United States Patent Application Publication US 2004/0265849 A1 - sequence listing, part 12

SEQ ID NO: 16385 - DNA, 201 bp, Homo sapiens
ttgaactgcagtcttttttcgttcccctgcagtgtgagtcctgctcgtagaatatcgttggtgtacttgaggctgcttttccagaaggcaggatgtggaarttccagcaggcagagctgcctctggcttgctctcatctctgtgttttgtggctcctcactgagtgcgcgagccctgtgagctgttagcatgctggaaggc

SEQ ID NO: 16386 - DNA, 201 bp, Homo sapiens
gatggccagtggtatttgcaagcatgtctcagtggctttcccttttaaaaatgctgtccctcctttccaagtaacctgttgtgcttttatgagatgtattsaagtaatgaatctattcccatggtagaggaaactagctgcttactgtacagatttgggataattttcattgtcaaggtgaaaccgattgaactgcagtct

SEQ ID NO: 16387 - DNA, 201 bp, Homo sapiens
tggcagcacaggtggtggggcggcatgcctgggaagatgtccttgttgttagggtgggtcagggagggcctcctccatcagacttcagctccgtgtagacrctgacgtgtgctgttcacacgctcgtggaaaatgggtgtttggaccccttgaggtgaaagctgtgctgctctgggaggatgctgagtgatgccgtcttgc

SEQ ID NO: 16388 - DNA, 201 bp, Homo sapiens
tcggccctagatgcagcgtgatccatctttgcgcagggaatctttgctgcaggtgaaatggagcggtggccacacctgttctctgcaaagtgggtgttgtwatttctctgccttcctcttggatgaagactttgagacatgctttttaatgccttccatttcgcgttagtgttacaatcagcctgtgcaagatttcagttc

SEQ ID NO: 16389 - DNA, 201 bp, Homo sapiens
ccaacaggaagtggaagagaacatgccaccattcattcattgtgagggtctttattgagcacctgctgtgtgtccctcctggcaggcaccgaggtggacasggtgtccctctctcatgagcccacagtagcgagggaggtggacaagggagcggcccctggtgagggtcaggatgctggcaaggatggaggggccttaagg

SEQ ID NO: 16390 - DNA, 201 bp, Homo sapiens
tcctctctctccctgtatttgtccagcctgccaaggaaaatgcagcagttgggttaaattggcatggctaggttgcactaatgacaagtaccacgtagctsgcatttaccgaggaccggttttgtactggcactttgtcccctgggcagcgctacagggcctgcccctcctctccccctctcttgtactgtactcggccct

SEQ ID NO: 16391 - DNA, 201 bp, Homo sapiens
tcgagactagcctgggcaacatggcgaaactccgtctctactaaaaatacaaaagattggccggtcgtagtggtacgcgcctgtaatcccggctaaactgkaggctgaggcgcaagaattacttgaacccggaaggtggaggttgtagtgagcccagatcgtgcacctggactctttggactgtgtctcaaaaaaaaaaaa

SEQ ID NO: 16392 - DNA, 201 bp, Homo sapiens
tgtacgtagcactgaggcccttagctgctgggagaggcggtctgagctgcagacaaaaagctggcgaggggatggcttgcttcctcacctaccgctggggrgacgtagcaggccgctggggggcacgtagcaggcgggcgtgtctcctcctggaaccgtgagctcagtgctggttgaaattgcccgtggggggccaggcgt

SEQ ID NO: 16393 - DNA, 201 bp, Homo sapiens
taaaagtcaagttaaggttgttttgtttgtttcttttacatgttcatgttttttgagcccaaaggttggggcaggttgggcttgagctgggaggggctggrcaccttttttgtaagaccgcctatctgttgttcctcctctgagggtgtttccaggcgtctagactcacccaggtgagttgatgctgacaggagctgctcg

SEQ ID NO: 16394 - DNA, 201 bp, Homo sapiens
aaagctggcgaggggatggcttgcttcctcacctaccgctggggggacgtagcaggccgctggggggcacgtagcaggcgggcgtgtctcctcctggaacygtgagctcagtgctggttgaaattgcccgtggggggccaggcgtggtggctcatgcctgtaatctcagcactttgggaggcagaggcaggcggatcacga

SEQ ID NO: 16395 - DNA, 201 bp, Homo sapiens
ctgtattcgtaaagtcctggtgtcaaggggcccccgggcctatgggcttgaggtgtcaagaacctgctcacggctggtgtgcgtggctaggccacccttcrgggcggcgaggggtggtggtgctggcactgatggtggtggccgacctcactcagatgtcgcacgtgggggacggggagcgggtcccacctcctgtccctg

SEQ ID NO: 16396 - DNA, 201 bp, Homo sapiens
gggaccgaccaccacacccggctaatttctgtatttttagtagggagggggtttctccatgctggtcaggctggtcttgaacttcctgacctcgtgatctrcccacctcagcctcccaaagtgctgagattacaggcgtcagccactgtgcccagccatcatattcttaaaagtcaagttaaggttgttttgtttgtttct

SEQ ID NO: 16397 - DNA, 201 bp, Homo sapiens
gaggctgaggcgggcggattgcctgaggtcaggagttcgagactagcctgggcaacatggcgaaactccgtctctactaaaaatacaaaagattggccggkcgtagtggtacgcgcctgtaatcccggctaaactggaggctgaggcgcaagaattacttgaacccggaaggtggaggttgtagtgagcccagatcgtgca

SEQ ID NO: 16398 - DNA, 201 bp, Homo sapiens
ttgtggaaatctggggaggcactgcttctccctccatgtgagcagcttcacccagcctggggtcagtgcttacgctccacggcgggcctgggccttccccygggtcctcgccggcgttctggggttctttggtttacgtagaagctgtaaacactttgatgtggccgaccttgcaccaccagtctgttagttctgacctcc

SEQ ID NO: 16399 - DNA, 201 bp, Homo sapiens
ggagccaggcagcatctggtctaggggccgccaattcatcaccgttcccgtaaccttggcccccgctttcctcaagatcaagtctccaaccttcctgttcyctcaaaaggattgttccacagagacacctgagtgttcatgaaaatgccaagccttggcccggcgcggtggctcacgcctgtaatcctagcactttgggag

SEQ ID NO: 16400 - DNA, 201 bp, Homo sapiens
tgctgccgcgctcctccttgtgggcgccgagctgctgttggtgggggcgtgtggggctcctggtctgcaggcagggctggcactccctgtggcctcctgcscctgtcccccaaccggctgtgtcgccctggtaccggctgctgtcccctcgctcccctcccctgggctccctgtgtcgaaggtgggcagtgggtgcttgtc

SEQ ID NO: 16401 - DNA, 201 bp, Homo sapiens
atggcgacggaggagaagaagcccgagaccgaggccgccagagcacagccaaccccttcgtcatccgccactcagagcaaggtgcgtgcccaggggccccytggacaccttccgggggcaaatacgcttagagagtctcggaaacatctcaagctcataagcctagtcttccctactcagttaaatgtcactgctaatttt

SEQ ID NO: 16402 - DNA, 201 bp, Homo sapiens
ctgaggtttggttgctcggcttcaggtggtcaggcttacctggatgaaaagcagtggctgctaggaggagccaggcagcatctggtctaggggccgccaaytcatcaccgttcccgtaaccttggcccccgctttcctcaagatcaagtctccaaccttcctgttctctcaaaaggattgttccacagagacacctgagtg

SEQ ID NO: 16403 - DNA, 201 bp, Homo sapiens
tgtggggctcctggtctgcaggcagggctggcactccctgtggcctcctgcccctgtcccccaaccggctgtgtcgccctggtaccggctgctgtcccctygctcccctcccctgggctccctgtgtcgaaggtgggcagtgggtgcttgtcctgtgacctcccaggtggcgggcaggcgctacccgcgtttctggagaaa

SEQ ID NO: 16404 - DNA, 201 bp, Homo sapiens
gagtgcccatggcctggtgccccaggaggcctgtattcgtaaagtcctggtgtcaaggggcccccgggcctatgggcttgaggtgtcaagaacctgctcamggctggtgtgcgtggctaggccacccttcggggcggcgaggggtggtggtgctggcactgatggtggtggccgacctcactcagatgtcgcacgtggggg

SEQ ID NO: 16405 - DNA, 201 bp, Homo sapiens
gattcctgggctccacctcagggactgagggactcaggaatcggcctgtggcatgcagtccaggagggcacactgaggtttggttgctcggcttcaggtgktcaggcttacctggatgaaaagcagtggctgctaggaggagccaggcagcatctggtctaggggccgccaattcatcaccgttcccgtaaccttggcccc

SEQ ID NO: 16406 - DNA, 201 bp, Homo sapiens
atatagtttgtttcttggctccctgttctgcatctcgctcaacagactgcctctgtcaccgggtccctccacccttgtctcctgtgcggccagcatcagakccatggcgacggaggagaagaagcccgagaccgaggccgccagagcacagccaaccccttcgtcatccgccactcagagcaaggtgcgtgcccaggggcc

SEQ ID NO: 16407 - DNA, 201 bp, Homo sapiens
tcctcaccctctggccctgcatttccacgtctcatggagccaacgagagcagggggttcgagcccttgtggaaatctggggaggcactgcttctccctccmtgtgagcagcttcacccagcctggggtcagtgcttacgctccacggcgggcctgggccttcccctgggtcctcgccggcgttctggggttctttggttta

SEQ ID NO: 16408 - DNA, 201 bp, Homo sapiens
cacctctgtgggtcccggctgccctctgcagccgccgctacttcctcaccctctggccctgcatttccacgtctcatggagccaacgagagcagggggttygagcccttgtggaaatctggggaggcactgcttctccctccatgtgagcagcttcacccagcctggggtcagtgcttacgctccacggcgggcctgggcc

SEQ ID NO: 16409 - DNA, 201 bp, Homo sapiens
ctccctcttttttctgtgccatgtatcgttgaaaccaggtcgtttatcttgtggcctcctggtctggttttgctgagtgcgtctccgtggggctgttcagyatcttcctgtctcctgtgttccctgtaacctggcagtgggggaggcagccggccatgctccatgcacccaccacggtgggtggtgctgtgtgcgtgttca

SEQ ID NO: 16410 - DNA, 201 bp, Homo sapiens
atgcatgcatacacatgtatgcttgtgtatggaatcaggaaccagacaaggtcttcacctgcatctggttagtttactagctgttttttttttttttttttggagacgtcttgttcttgcccaggctggagtgtagtggcacgacctcagctcactgcaacctctgcctcccaggttcaggtgattctcctgcctcagcct

SEQ ID NO: 16411 - DNA, 201 bp, Homo sapiens
aatgcatgcatacacatgtatgcttgtgtatggaatcaggaaccagacaaggtcttcacctgcatctggttagtttactagctgttttttttttttttttttggagacgtcttgttcttgcccaggctggagtgtagtggcacgacctcagctcactgcaacctctgcctcccaggttcaggtgattctcctgcctcagcc

SEQ ID NO: 16412 - DNA, 201 bp, Homo sapiens
gcggcgaggggtggtggtgctggcactgatggtggtggccgacctcactcagatgtcgcacgtgggggacggggagcgggtcccacctcctgtccctgccyggctgtcagcgcccgccgtgtgtcacctgtccgtttttattgcagatgacgacaacccccccgtgtcttttgtgaagttctccccgaacggcaaatacat

SEQ ID NO: 16413 - DNA, 201 bp, Homo sapiens
ccagcccccctaaagttatttaattgaatatctgatgttcagatttcccgttgtcttagtatgttttaaaaaattgtgcctgtgcacacatacacacacayacacacgtcacatgcatgtgtacacatatatatgcatgtagtgcacacctgtacatgggtgcacacaagtacatttgtgcagcaaaccacagcatgtgta

SEQ ID NO: 16414 - DNA, 201 bp, Homo sapiens
tccatcccctgtgaggcaggtgattcctgagagtgcccatggcctggtgccccaggaggcctgtattcgtaaagtcctggtgtcaaggggcccccgggccyatgggcttgaggtgtcaagaacctgctcacggctggtgtgcgtggctaggccacccttcggggcggcgaggggtggtggtgctggcactgatggtggtgg

SEQ ID NO: 16415 - DNA, 201 bp, Homo sapiens
taattcctaggttcattttaatcgtgatggatccttgatagtttcaagtagctatgatggtctctggtaagtgaaaacattttacttcatgaagcgatgartgcttaactaagggccagctcttgcactgttcctgcatctgggggtacagcagtgacaaaagacccaagtccttaatttccgaagcttctcttctggcca

SEQ ID NO: 16416 - DNA, 201 bp, Homo sapiens
gcatgtgtttgcatgagcgtgggcagagcctgcgagaagcactgggctgctgctgcccctctccttggccagggagagtggagagagcaacaggcttcccsctctgtgttgggggtaaactgtggcttgtgtaggagagatccagaggtaccccacacatggtctgcacgtgtgtagcatgtgtggactgttgatgtttgt

SEQ ID NO: 16417 - DNA, 201 bp, Homo sapiens
tgtacccagcccccctaaagttatttaattgaatatctgatgttcagatttcccgttgtcttagtatgttttaaaaaattgtgcctgtgcacacatacacwcacatacacacgtcacatgcatgtgtacacatatatatgcatgtagtgcacacctgtacatgggtgcacacaagtacatttgtgcagcaaaccacagcat

SEQ ID NO: 16418 - DNA, 201 bp, Homo sapiens
gtgtctcaaactcctggcctccagtgatccacttctgcctcccaaagtgctgggactgcaggcgtgagccattgtacccagcccccctaaagttatttaaytgaatatctgatgttcagatttcccgttgtcttagtatgttttaaaaaattgtgcctgtgcacacatacacacacatacacacgtcacatgcatgtgtac

SEQ ID NO: 16419 - DNA, 201 bp, Homo sapiens
gacacgagtgatcctcccacctcagcctcccaagtagctgggaccacaggcacatgatatcatgcctgtctaattcttttatttttgagacagggtttaaytctgtcacccaggctggagtgcagtggtgccatctcagctcactgcaatccccacatcccggttcaagcgattcttgggcctagcctcccgagtagctgg

SEQ ID NO: 16420 - DNA, 201 bp, Homo sapiens
tgtgaagagtgtggcgccccccagtttcctgtccctgctgcaggaacttcatcgttgttcatcggctcctcctgttatttcagtacaaatcccagacattstaccatgtaagtggtgaacgcatggtatctcaaaacaagtctccagaagcattattaccacaatgccattttcataccaaaaaagttctccaaccccctg

SEQ ID NO: 16421 - DNA, 201 bp, Homo sapiens
agcacgggtggagtactactagcagctgcatatagagcccttaaaaaatgactcctacaaaccaccactgcactagccacactcctcccacccggccctgycaaacaaaactaaacaaaacaaactaaagcctttgaaaaatcgccttggctctttgggcctctgatttccacctggtctgtcccaggagctgtatctttc

SEQ ID NO: 16422 - DNA, 201 bp, Homo sapiens
agggaccgaccaccacacccggctaatttctgtatttttagtagggagggggtttctccatgctggtcaggctggtcttgaacttcctgacctcgtgatcygcccacctcagcctcccaaagtgctgagattacaggcgtcagccactgtgcccagccatcatattcttaaaagtcaagttaaggttgttttgtttgtttc

SEQ ID NO: 16423 - DNA, 201 bp, Homo sapiens
ttcacagtggtctttgccgggaccctctgtaaccagtgggattatgctgccgccaccagcaccaccgagaacccgaggtggggaggggatttgcagactgygccaggtgcagcctggctttggaaacaagggccgcattcctggaattctggctgggagatccgcccagcttggcctgacccaaactggtgcctgcatggc

SEQ ID NO: 16424 - DNA, 201 bp, Homo sapiens
tgttagggtgggtcagggagggcctcctccatcagacttcagctccgtgtagacgctgacgtgtgctgttcacacgctcgtggaaaatgggtgtttggacsccttgaggtgaaagctgtgctgctctgggaggatgctgagtgatgccgtcttgccctgtgaggatgcgtcaccatcccgggcaggtgaacccaagcagat

SEQ ID NO: 16425 - DNA, 201 bp, Homo sapiens
ccggtccgtttacccatctcctcaaatgctagtttaatctgtgacctgggcaggtgctgtcctagccggtggggaagacaggaaagcgaaggacccaggcrgggagcctgtccaggatctcagatagggagagccaggtccccacctctgttgggccggccacccggctggtgtttaagatgcagattaattcctgtcttt

SEQ ID NO: 16426 - DNA, 201 bp, Homo sapiens
caaggccacacaggtgagggcctgcgctcctgcagtcactggctgcctgttgatgtgaggacagttcctgcaggtgaagcgtggtgtgcccgtagggtgcygtcgtcttccccttcccacctcagccctccgctggccccgctgaggaaccgctgctaagagctcttgcccaaggcatggagctggtcactgtgctgccga

SEQ ID NO: 16427 - DNA, 201 bp, Homo sapiens
taaaatatagtttgtttcttggctccctgttctgcatctcgctcaacagactgcctctgtcaccgggtccctccacccttgtctcctgtgcggccagcatyagagccatggcgacggaggagaagaagcccgagaccgaggccgccagagcacagccaaccccttcgtcatccgccactcagagcaaggtgcgtgcccagg

SEQ ID NO: 16428 - DNA, 201 bp, Homo sapiens
cgtggtttcgatctcctgagctcgtgatcctcccgccttggcctcccaaaatgctgggattacaagtgtgagtcactgcgcccggccaaaactctgtcttwaaaaaaaaaaaaaaaaatcaagaacaaatggccaagagttaaactacacagtatcataaaccgctccatttcacgaagtggccagaaagttcttttgtta

SEQ ID NO: 16429 - DNA, 201 bp, Homo sapiens
cgaggtgattccccagccctctttgctgctggtggagttgtccctctgttgagttgggcattcgccagcctcatccatcccctgtgaggcaggtgattcckgagagtgcccatggcctggtgccccaggaggcctgtattcgtaaagtcctggtgtcaaggggcccccgggcctatgggcttgaggtgtcaagaacctgct

SEQ ID NO: 16430 - DNA, 201 bp, Homo sapiens
tgcgagaagcactgggctgctgctgcccctctccttggccagggagagtggagagagcaacaggcttccccctctgtgttgggggtaaactgtggcttgtrtaggagagatccagaggtaccccacacatggtctgcacgtgtgtagcatgtgtggactgttgatgtttgtatggacagtgtttagtctttgtccctagaa

SEQ ID NO: 16431 - DNA, 201 bp, Homo sapiens
acattctttttgaaaataaaaattttcatgtcttctaatttagtctggtgagaatttcttaacttaaaacgtagctgtctctgtggggtgggagggcggcygccctggggctttgtccccggtggtgggggtggtgtctggtgagccagggtgccccgcaggacagtcctgggtttttacagtaaccttaggaaagtcatc

SEQ ID NO: 16432 - DNA, 201 bp, Homo sapiens; identical to SEQ ID NO: 2584

SEQ ID NO: 16433 - DNA, 201 bp, Homo sapiens
gcgtgggcagagcctgcgagaagcactgggctgctgctgcccctctccttggccagggagagtggagagagcaacaggcttccccctctgtgttgggggtmaactgtggcttgtgtaggagagatccagaggtaccccacacatggtctgcacgtgtgtagcatgtgtggactgttgatgtttgtatggacagtgtttagt

SEQ ID NO: 16434 - DNA, 201 bp, Homo sapiens; identical to SEQ ID NO: 2586

SEQ ID NO: 16435 - DNA, 201 bp, Homo sapiens
aatataagagaatgactgttaaacaggtgaagcataacttttaaaaaaagatagggaaaagcgtgctagtcctaaaatttatatctgactcccagcagccygcgtgagatcataacttgtctgcttacgcttttttgttctctttgcttcgaagtcgcatctgggacaccgcctcaggccagtgcctgaagacgctcatcg

SEQ ID NO: 16436 - DNA, 201 bp, Homo sapiens
atataagagaatgactgttaaacaggtgaagcataacttttaaaaaaagatagggaaaagcgtgctagtcctaaaatttatatctgactcccagcagcccscgtgagatcataacttgtctgcttacgcttttttgttctctttgcttcgaagtcgcatctgggacaccgcctcaggccagtgcctgaagacgctcatcgg

SEQ ID NO: 16437 - DNA, 201 bp, Homo sapiens
aatttatatctgactcccagcagcccgcgtgagatcataacttgtctgcttacgcttttttgttctctttgcttcgaagtcgcatctgggacaccgcctcrggccagtgcctgaagacgctcatcggtgagtgtggctctgtgtgggggctgggtctgtggggagggcctcccctgctgggttcactgcccctgttcttca

SEQ ID NO: 16438 - DNA, 201 bp, Homo sapiens
gattttacctctcacaaagccactgccctcctgggctgttctctaagctccagctttcccatgcgtgcaccctcagccctgtgggtccgagcctgggcccygatcctctgagggctgtgtggttgggtggtaaaacctgttctggatgtttccagaaccaagaggacttcctcacccttttgaggatgacccgagtcaggg

SEQ ID NO: 16439 - DNA, 201 bp, Homo sapiens
cctgaggggctccttaccctgatggggaagggggttccagccccgctggcttttgcacctggcgctgatggtggctgtgacgtagtggctgcagagttggrtgtggggacagaaggatgcctccagacatgccgcctcacccctctctctgtcttgcagcactctgaagctctgggactacagcaaggggaaggtgagccc

SEQ ID NO: 16440 - DNA, 201 bp, Homo sapiens
agggggttccagccccgctggcttttgcacctggcgctgatggtggctgtgacgtagtggctgcagagttgggtgtggggacagaaggatgcctccagacrtgccgcctcacccctctctctgtcttgcagcactctgaagctctgggactacagcaaggggaaggtgagcccccgcaggcttgggcccccatggtgcacc

SEQ ID NO: 16441 - DNA, 201 bp, Homo sapiens
gagaggtcacacctgttacaggttgctttatactcagagacacttttctgtgcccacaaaatgaatttccatttcaaccaaagcgcactgcgccaagtacyggggacaccttgtcccgtttgtttctaggtccatctccttaacggaggcaggcagcctgttgtcgggctttgctggcagtgcttggttgacaccttccga

SEQ ID NO: 16442 - DNA, 201 bp, Homo sapiens
cctatgggcttgaggtgtcaagaacctgctcacggctggtgtgcgtggctaggccacccttcggggcggcgaggggtggtggtgctggcactgatggtggwggccgacctcactcagatgtcgcacgtgggggacggggagcgggtcccacctcctgtccctgcctggctgtcagcgcccgccgtgtgtcacctgtccgtt

SEQ ID NO: 16443 - DNA, 201 bp, Homo sapiens
acctgagaagcatcttccatcctggaagcctctcctggggcaggcaggtgcctggcttctgtgagcgaggccggtgctgggatagagcaggcggggctgtycccattgggagaggaagcctcaggcctggctggagggcaggcagggctttttggttgagttcagcgaggcagccaccagcagggtgggcgtggggcaggg

SEQ ID NO: 16444 - DNA, 201 bp, Homo sapiens
gaatgtggttagatggatcactgtgagttagaaaagtactttgagaggctgccggccagatggttgcagtgaagcagctggcacggtgagagcaccctgtyggagcagaaacaggtactcacccctctgtgtctgctggagaacatctagggctgcagtacccagcatgcccagcatagaggctgccagccgcatgatggc

SEQ ID NO: 16445 - DNA, 201 bp, Homo sapiens
agacctggcacaaaaaaagaaagtaaagtgtcttgtaataactttttgtgttgattatgttgaaataatattttagatacattgggttacatgttaccaargtaatttcacttgtcttttaagcttttctaatgtagcttctagaacaattaaaattacacgtgtggctggcaggctcttgcagagtctagcctagtgctt

SEQ ID NO: 16446 - DNA, 201 bp, Homo sapiens
ttgccctgagactcatgccctcagccccgattcgggcacatggctcatgtcaaccgctggaagtccctctggggcccacaaatgtctctagaccacaggargagtcggcctggctccatgtgcctggcgcctggggcagaaaggtggacggggcaatcagagtggtcaccatcggggagtacactttgcactccactcgag

SEQ ID NO: 16447 - DNA, 201 bp, Homo sapiens
atctgtggccgtttgtgcgggatggctttggaggggaaatgcagtagtcaggatatgtgtttagctttttgacaggtacattttggagctttagagacttmgaggcatgtggccccctgctcactgcctcccatccctgtcccctctctggccagggtttgccctctctggctagggctcctcggctgagggccgctgccg

SEQ ID NO: 16448 - DNA, 201 bp, Homo sapiens
actgcctcccatccctgtcccctctctggccagggtttgccctctctggctagggctcctcggctgagggccgctgccgacccccatcatccacagccctygcgccctccttgcacccgggacctgtgtttttcctgccctggagcttctgctactgcttgtctgcccaagtcgactccgcagagtacttggagtgctcct

SEQ ID NO: 16449 - DNA, 201 bp, Homo sapiens
atcatccacagccctcgcgccctccttgcacccgggacctgtgtttttcctgccctggagcttctgctactgcttgtctgcccaagtcgactccgcagagyacttggagtgctccttggctaggggccttgccatcccctgctgggttctggctgattaccttctctgtttctttctttctttttttttttttgtttttta

SEQ ID NO: 16450 - DNA, 201 bp, Homo sapiens
cgcagagtacttggagtgctccttggctaggggccttgccatcccctgctgggttctggctgattaccttctctgtttctttctttctttttttttttttkttttttaatatttatttatttatttattttgagacagagtctcactttgttgcccaggctggagtgcagtggtgtgatctcagctcactgcaagctccac

SEQ ID NO: 16451 - DNA, 201 bp, Homo sapiens
ctgcgcccggccaaaactctgtcttaaaaaaaaaaaaaaaaaatcaagaacaaatggccaagagttaaactacacagtatcataaaccgctccatttcacraagtggccagaaagttcttttgttaacaaagtgcatgaggtagtttcttggccaatcctgcccttcgttgagaagcggaaggaagggtggatgcagcatt

SEQ ID NO: 16452 - DNA, 201 bp, Homo sapiens
catgtatgcttgtgtatggaatcaggaaccagacaaggtcttcacctgcatctggttagtttactagctgttttttttttttttttttggagacgtcttgytcttgcccaggctggagtgtagtggcacgacctcagctcactgcaacctctgcctcccaggttcaggtgattctcctgcctcagcctcctgagtagctgg

SEQ ID NO: 16453 - DNA, 201 bp, Homo sapiens
aaactacacagtatcataaaccgctccatttcacgaagtggccagaaagttcttttgttaacaaagtgcatgaggtagtttcttggccaatcctgcccttygttgagaagcggaaggaagggtggatgcagcatttgtcccatgctgcctgcccgtgtgcctttcactttgtgccatcttggcggtgaatgggtttaagca

SEQ ID NO: 16454 - DNA, 201 bp, Homo sapiens
gtaatcccgcagtttgggaagccaaggcgggtggatcacttgcggtcaggagttcaagaccaggctggccaatatggtgaaaccccgtctctcctaaaaayatatatatataaaaattagctgggcgtggtggtgcatgcctgtaatcccagttacttgggaggctgaggcacgagaattgcttgaacctgggaggtggag

SEQ ID NO: 16455 - DNA, 201 bp, Homo sapiens
tgggaggtggaggttgcagtgagctgagatcgcaccccagcctgggtgacagagcgagactctttctgaaaacaaacaaacaaaaaaacataactcagtctttttttttttttttttttttttgagatcaggtaagaagcagttgtgtccctgacttgaaagtaagtttttgtctcttcttcctctccttaattcctaggt

SEQ ID NO: 16456 - DNA, 201 bp, Homo sapiens
ccatggcctggtgccccaggaggcctgtattcgtaaagtcctggtgtcaaggggcccccgggcctatgggcttgaggtgtcaagaacctgctcacggctgrtgtgcgtggctaggccacccttcggggcggcgaggggtggtggtgctggcactgatggtggtggccgacctcactcagatgtcgcacgtgggggacgggg

SEQ ID NO: 16457 - DNA, 201 bp, Homo sapiens
gggaggtggaggttgcagtgagctgagatcgcaccccagcctgggtgacagagcgagactctttctgaaaacaaacaaacaaaaaaacataactcagtctttttttttttttttttttttttgagatcaggtaagaagcagttgtgtccctgacttgaaagtaagtttttgtctcttcttcctctccttaattcctaggtt

SEQ ID NO: 16458 - DNA, 201 bp, Homo sapiens
atgcagcatttgtcccatgctgcctgcccgtgtgcctttcactttgtgccatcttggcggtgaatgggtttaagcatttttacccttggaaggctttgccygagtgagatggcaggcgaagccctgatactgcccggacggacagtgtgtcaggcctgggcggggctgcggggtctgagccccgcacatagctgggccaca

SEQ ID NO: 16459 - DNA, 201 bp, Homo sapiens; identical to SEQ ID NO: 2594

SEQ ID NO: 16460 - DNA, 201 bp, Homo sapiens
acccaggtgagttgatgctgacaggagctgctcggccttctgagctgcctatttcgccttctgttcctctggtgtttcgcttgggtagggcatgggcacasttcactcagctctggccctggcctggctgtctaacgctaggactgttatagtggactttgcagctttttgcttggatttccttagttcctctctctccct

SEQ ID NO: 16461 - DNA, 201 bp, Homo sapiens
gtgatctcagctcactgcaagctccacctcccgggttcacgccattctcctgcctcagcctcctgagtagctgggactacaggcgccctccaccatgcccrgctaatttttttttatatttttagtagagatggggtttcaccgtgttagccgggatggtctcgatctcctgacctcataatccgcccacctcggcctcct

SEQ ID NO: 16462 - DNA, 201 bp, Homo sapiens
ggcctcctgtgctgtagcaggatcacaggtgggattgaggtggggggatgaggtggattgaggggggcctcatgtttctggctcggctggtgctgttggtrctgagtttggagactacagaagaggaggtcttgtggggaagtagtgggctcagattcagatgtgttccacttgaaaggtactgtccacatagagattggt

SEQ ID NO: 16463 - DNA, 201 bp, Homo sapiens
cccaccccggctgcgatcctgacgcacaggcagttctgcaagccctcccgtagacctttagcaaagggagcagggcttcagtgttcggggtcggagggtgrggcgctggaccaaggccagagctggtgggggcctcctgtgctgtagcaggatcacaggtgggattgaggtggggggatgaggtggattgaggggggcctc

SEQ ID NO: 16464 - DNA, 201 bp, Homo sapiens
ctggaggagagagccttttatcaaaaatacagattcttggttctgattgtaagagtctctgtaggacccagaaaacatctctttatagttgcccccacccyggctgcgatcctgacgcacaggcagttctgcaagccctcccgtagacctttagcaaagggagcagggcttcagtgttcggggtcggagggtgaggcgctg

SEQ ID NO: 16465 - DNA, 201 bp, Homo sapiens
ttgcctgctgtgtcagggatcccaaatctgtcacctggaggagagagccttttatcaaaaatacagattcttggttctgattgtaagagtctctgtaggamccagaaaacatctctttatagttgcccccaccccggctgcgatcctgacgcacaggcagttctgcaagccctcccgtagacctttagcaaagggagcagg

SEQ ID NO: 16466 - DNA, 201 bp, Homo sapiens
ggcttccccctctgtgttgggggtaaactgtggcttgtgtaggagagatccagaggtaccccacacatggtctgcacgtgtgtagcatgtgtggactgttratgtttgtatggacagtgtttagtctttgtccctagaatataagagaatgactgttaaacaggtgaagcataacttttaaaaaaagatagggaaaagcgt

SEQ ID NO: 16467 - DNA, 201 bp, Homo sapiens
aaggcgggtggatcacttgcggtcaggagttcaagaccaggctggccaatatggtgaaaccccgtctctcctaaaaatatatatatataaaaattagctgrgcgtggtggtgcatgcctgtaatcccagttacttgggaggctgaggcacgagaattgcttgaacctgggaggtggaggttgcagtgagctgagatcgcac

SEQ ID NO: 16468 - DNA, 201 bp, Homo sapiens
tctgcatctcgctcaacagactgcctctgtcaccgggtccctccacccttgtctcctgtgcggccagcatcagagccatggcgacggaggagaagaagccygagaccgaggccgccagagcacagccaaccccttcgtcatccgccactcagagcaaggtgcgtgcccaggggccccttggacaccttccgggggcaaata

SEQ ID NO: 16469 - DNA, 201 bp, Homo sapiens
tacttcatgaagcgatgagtgcttaactaagggccagctcttgcactgttcctgcatctgggggtacagcagtgacaaaagacccaagtccttaatttccraagcttctcttctggccacgctgcagacatgttagcagataggcagtgcagtttcggggttggcagcacaggtggtggggcggcatgcctgggaagatgt

SEQ ID NO: 16470 - DNA, 201 bp, Homo sapiens
ctgttggcgtggggatccccagggggtcacagtctgtagtcgccatgcatgaccccccatcggtcttgagaagacgggtctggtgggagagggtcgtagtygagttgcacccaaccaccggcctcccatgggcttcacagcacacacttccgggccatcgcctcgcaaggttcaagctgcggttgcagcactgtgatggcg

SEQ ID NO: 16471 - DNA, 201 bp, Homo sapiens
cctcgcaaggttcaagctgcggttgcagcactgtgatggcgtttggggctgaggtcactgggatgtgctgtggcaaaaatgaggtcatccggagccccacrttggccagtagtctccacggttaaagccatcgtttacacttgaccatttaccagcttattataaaggatacacttcaggaacagccagaggggaggggtg

SEQ ID NO: 16472 - DNA, 201 bp, Homo sapiens
aacaattaaaattacacgtgtggctggcaggctcttgcagagtctagcctagtgcttctctgggcgtgcagcagcaggcagcatgccccggggacctgttygaaatttatgttcttggactccccctcctggactggtcaaatcagaagccctggggatggggcctagcagtctctgccatagtagctcaccggtgccttt

SEQ ID NO: 16473 - DNA, 201 bp, Homo sapiens
gatgtgctgtggcaaaaatgaggtcatccggagccccacattggccagtagtctccacggttaaagccatcgtttacacttgaccatttaccagcttattrtaaaggatacacttcaggaacagccagaggggaggggtgcacagggtgagctatgggcgagcgtggagctgccagggcctctctggtgccaccctcccgg

SEQ ID NO: 16474 - DNA, 201 bp, Homo sapiens
gggatggggcctagcagtctctgccatagtagctcaccggtgcctttgatgcatgtggatttgcctctggggacacatggcaatgtctggagacatttttrgttgtcagagctataggcatctagtgagcaaaggacaaggttgccactgcacaggggcagtaccaccctgtcccccccggaagagtctggtctaaaatgt

SEQ ID NO: 16475 - DNA, 201 bp, Homo sapiens; identical to SEQ ID NO: 2588

SEQ ID NO: 16476 - DNA, 201 bp, Homo sapiens
tatataaaaattagctgggcgtggtggtgcatgcctgtaatcccagttacttgggaggctgaggcacgagaattgcttgaacctgggaggtggaggttgcrgtgagctgagatcgcaccccagcctgggtgacagagcgagactctttctgaaaacaaacaaacaaaaaaacataactcagtctttttttttttttttttt

SEQ ID NO: 16477 - DNA, 201 bp, Homo sapiens
ctgctggtggagttgtccctctgttgagttgggcattcgccagcctcatccatcccctgtgaggcaggtgattcctgagagtgcccatggcctggtgcccyaggaggcctgtattcgtaaagtcctggtgtcaaggggcccccgggcctatgggcttgaggtgtcaagaacctgctcacggctggtgtgcgtggctaggcc

SEQ ID NO: 16478 - DNA, 201 bp, Homo sapiens
ggggcttggtggctcacgcctgtaatcctagcactttgggaggccgaagctggaggagcacttgaggtcaggagttccagaccagcctggccaacatggtraaaccctgcctctactaataatacaaaaattagccggatgtggtggcatgcacctgtaatcccagcttcttgtaaggctgaggcagaagaatcgcttaaa

SEQ ID NO: 16479 - DNA, 201 bp, Homo sapiens
agaataagagaaaacattttcaaattatgcatttgacaaagatcgaatatccaaaatctgtaagaaacttaagcaaactaacaagcaaaaaaaccaaacamccccattaaaaagttagcaaagtacatgaacaaacacttctcaaaagaagacatacatgcatctaataagcatatgaaaaatggtcaatatcaataatca

SEQ ID NO: 16480 - DNA, 201 bp, Homo sapiens
aaagcaggaggagcacttgaggtcaggatttgaggccagtctgggtaacatggtaagaccctgtctctaccttaaaaaatataaatatatatattatataytattatatatacaatatattatatatatataatttatttagtcagattactgagcaattaattcaggtaattgcactgtcagtctgaagtaattgagatg

SEQ ID NO: 16481 - DNA, 201 bp, Homo sapiens
gccaatggaagccttggattccttctagcagatgcaggttatgatgtatggatgggaaacagtcggggaaacacttggtcaagaagacacaaaacactctyagagacagatgagaaattctgggcctttaggtaaatattagctaagaaaactcaagggggaaattggaggcaattttaaaaaaataacgtggacgctatt

SEQ ID NO: 16482 - DNA, 201 bp, Homo sapiens
tcacagtcatattctcaagggcttcaaagaatatgaaagcaaaaagcctcatccaaaggacagcaacttcaaagattaaaggaatatcagccaaaacagtkgagaaggaatcagtgcaagaactctggacatttgaaaaggcaaatgacctctaaatgaccacactaactctccagcaattgttcttaaccagattgaaat

SEQ ID NO: 16483 - DNA, 201 bp, Homo sapiens
ctgagctgagccctggtaccctgaagtcatccagaaatgaagccagtcaactaaacacaacttatatcacagtcatattctcaagggcttcaaagaatatraaagcaaaaagcctcatccaaaggacagcaacttcaaagattaaaggaatatcagccaaaacagtggagaaggaatcagtgcaagaactctggacatttg

SEQ ID NO: 16484 - DNA, 201 bp, Homo sapiens
cagcatgctggatgcttcttcttggatctatgtatggttatgacaagaaaggaaacaatgcaaaccctgaagctaatatgaatattgtaagtcatttattmagaaaaaatgctaaaataaggaattattcatatttcagcattttagatacaactggtgtgccttcttagttttcagcaattcctccagtgactaagtctg

SEQ ID NO: 16485 - DNA, 201 bp, Homo sapiens
tggtctacctttgaatagacatacttttaaaccatggcaaggaagtgagactgcacattgaaatatgtaaaatttgcctttgggtgccacgtgagaaatartcacatcactagaaactaatcataagcttttgtgtttggttaaagttttattgatccatttttcttgtttactttgtgggatactgggcttaactagggg

SEQ ID NO: 16486 - DNA, 201 bp, Homo sapiens
ctccctgaatgctctctctccctcagaaatctggaagttggcagagggacactgagctgagcatattattgtagtttttaaatgctctccactggacagargatggggatttgaatagaaatttggtgaggaactaatcagtgtccatttacactcacctcctcttcctccctggaagagctataggacttgagtaagcat

SEQ ID NO: 16487 - DNA, 201 bp, Homo sapiens
tacatgctgaacagataaggtgtctattgtaaatatagtactgctccctcccatattctttgtgaaagtcatatccttgttccagataatgtttttttttmttaattccaggctccatactctgaatcatctgagccacttctcattaacacatacatcagcttagcctaattatagcttttgcagggatttatctgagct

SEQ ID NO: 16488 - DNA, 201 bp, Homo sapiens
ttgaatagaaatttggtgaggaactaatcagtgtccatttacactcacctcctcttcctccctggaagagctataggacttgagtaagcatgataaatttyatgtctttgtaaaccacacccaggaaatttgtatatacaaatacatagagcacagtagttatcaggacagactttgacataaaaagaactgggtttgagt

SEQ ID NO: 16489 - DNA, 201 bp, Homo sapiens
gctgaaacataataaatgtgcatcaatcatctctttctcacaacccaaatgggatttttaaaaaataaaagggaagggcttatacctatatttaaacaaaytgaaaaggcatggttatatttgtttgtgagttggaacacacaagcttactataataaatcaattgagcttatctattcagtgtgtgatttagtatttatg

SEQ ID NO: 16490 - DNA, 201 bp, Homo sapiens
tacatcagcttagcctaattatagcttttgcagggatttatctgagctgatgtatctgtactgtttccatttacttttctgcttattttcttcagagaacwgtcctatttaaaatgaaaatgctagtgtgattcttactgttaccatgggaagaagagagagaaagagaaagctttgaaatagtgcattgcaatagtccat

SEQ ID NO: 16491 - DNA, 201 bp, Homo sapiens
gattcagagtctttttatcaattgttcagtcaattatttcagttcttctttttctggccaagacagttttaatgttccaacaagtgtttcagtacacacayacacacacacacacacacacacacacacacacacacatgctagtggaggcccaggaagggacctctggaaaccaaattatatggatattctccctagcct

SEQ ID NO: 16492 - DNA, 201 bp, Homo sapiens
ggcagttaaatcactaaatttatttctaagcagtactttggctgtatgtcaaattttgatatgtcatgttttattatcatttagttgcaaatatcttctawtttccatttttattgcttcagtttctatgggttctttaggcatgttctgcaaatgtcaattataacaaattggttaatagtgctgttcaggttttctata

SEQ ID NO: 16493 - DNA, 201 bp, Homo sapiens
tatctttatagaataactcagaagacttccaattcatccccagtatgatcacgatagaaggaaaaaatgactaagcagagccccaattttgttagaaacaytgcgtaagtatttatttttacaagattgtcttatctcctgttctctcagggtttgtagccttttccaccatgcctgaactggcacaaagaatcaaaatga

SEQ ID NO: 16494 - DNA, 201 bp, Homo sapiens
attctgtcatgattcctctattgagtttttaaaatatgcctacctcaagattgcaaatttgtaccctattatctgatgactgaaaacaattgacttgtatrtttgatctagtgagagaactagtcttgtatgagttacaccaccatatttggaagtggaagtttttcattatggtttctcaaatggatatttaatatgata

SEQ ID NO: 16495 - DNA, 201 bp, Homo sapiens
ccatatttggaagtggaagtttttcattatggtttctcaaatggatatttaatatgataaaatgattttgtaaaaattaatcttttggcaacatacataaygattcgactcataaagactcaaaaatgaaaaaccaggcaggagaccagtataatgatataagatattaggaattagatactagactagataggtaatagt

SEQ ID NO: 16496 - DNA, 201 bp, Homo sapiens
atctgggacagtactcgaatgcagtgtacacatgggtaacatggaaaaccccgattttcccttatattcaaggtattatttgaccttaagaaaaaccgttytacatttcataccaattaatgagaaaaaaatattggcaagcactgactgggcagaatacagggaagcttcactatggagaagtgaatttgggattgaggg

SEQ ID NO: 16497 - DNA, 201 bp, Homo sapiens
gtggtggcttatgtctataatcccagtgctttgggaagcccaggcgggaagataccttgaggccaggagttcgagaccagtctgagtaatgtagaaacacmctatctctaaaaaaaagaaaaaaaattagccagatgaacacctgtagtcccagctaccctggaagcagaggtgggaaaatcacataataacctcaaatca

SEQ ID NO: 16498 - DNA, 201 bp, Homo sapiens
ttaaaaactgagaatcccctgaatttatcatgtctgcttttttcttagtctaaaatccttatatgcattagcatatccttagtctaatatccttatatttmttagtctaatatctttatatttcttagtctaaggatatatgtctaaggatatatgaaacaggatataaggatatatgatattatatagaatataaggata

SEQ ID NO: 16499 - DNA, 201 bp, Homo sapiens
ataggcaaagcaggtaagaacatcccttgtaagaggtgctggaagacaggctgtttagattggacttgacactccttcctaaatggaacacgtatagactyctcttgctgcggtgtgtcatccttctatatccagatccatataacacaggggaacaaaacaaaggcagctgatgggctgtatgtcatggttacaaaaggc

SEQ ID NO: 16500 - DNA, 201 bp, Homo sapiens
gttaactgtcaaagccttgagagagaagaccaatttttacacatttccctactactttgccataaaatataatcctgaggtaaggacctgatcaacattcraagcttactctcagtgaggaatgatgaagtggaataaaatcaaaccagtgaagcaatatgtaatataaaatagtgagtcaatttggcatagtcattaaga

SEQ ID NO: 16501 - DNA, 201 bp, Homo sapiens
agagctggtggaggaaaaagttcttcaaagatgggcttttttggttaatatgtcttcagattatatggtacatgttttttccttaaagaaagggaaaagasgccgggtgcagtggctcacacctgtaatcccagcactttgggaagctgaggcaggtggatcacgaggtcaggagagcgagaccatcctggctgacacagt

SEQ ID NO: 16502 - DNA, 201 bp, Homo sapiens
ggggtttcactgtgttagccaggatggcctcgatctcctgacctcgtgatctgcccgcctcagctcccaaagtgctgagattataggcgtgagccaccgcrcctggcaaccagacagccttttacatgttttagttctcatcgaattcttataaataccctaggagatagcatttattattatttcccattatacagatag

SEQ ID NO: 16503 - DNA, 201 bp, Homo sapiens
acttcaagagtaagtaccaggatgagatcaacaagcatatagagatggagaatgaattttcctcatcaagaaggatgtggttaaagcttacatgaacaacrtagaataagcagtctcgcctaaaagggctgccccaggagaagagaagatccgtgagctgcagtcccagatctcggccacatctctggtcctatccttgga

SEQ ID NO: 16504 - DNA, 201 bp, Homo sapiens
ctggagcagcagaacaagatgctggagaccatgtggagcctgcagcagcagaagacagctgggagaacgtggacaacatggagagctgcatcaacaacttkctgcggcagctggacacatgggaccagaagctgaaggtggaggtggagcttgacaacatgcaggggctggtggaggacttcaagagtaagtaccaggatg

SEQ ID NO: 16505 - DNA, 201 bp, Homo sapiens
cactcctacaccatcacgtgaagcatttcctccacttcacaaggcttcaatcaactatcaaaagaggcagcaaagaccctgatagtgacggctactgggcmcgagtaggaaaaaaggattttggcaacaggagaagtttaagaaatatgtattaggtggaggaggtgtcagcagctgccttactgaaggattaggcaggag

SEQ ID NO: 16506 - DNA, 201 bp, Homo sapiens
tttggtatttcaaatggggtatttagctttattttgtttcaaatatttagtcaattttctaatgttatccaaaaaataattcatcctttacccacaaatcyttcatttaaaaaaaatttttttaagagacaggatcttggagcttctatatagctgaatatctggacgttcctagagactggggcacaagggagggcttgg

SEQ ID NO: 16507 - DNA, 201 bp, Homo sapiens
gggcaaattacttgactttgtaagacccagttttattttaaataaaatgaggacaatatttcccatccttttttaaattgtttttcttcttttcttttttyttttttttttttttttttttttgacagggtttcactctgtcaccgaggctggcgttcagtggtggtgctattacagctcactggagtctcaaactcctgg

SEQ ID NO: 16508 - DNA, 201 bp, Homo sapiens
ggtgggagtgcagtggcccgatctcggttcactgcaacctctgcctctcgggttcaagtgattctcctgcctcagcctccgagtagctgggactacaggcrtgtgccaccacaactggctaatttttgtattttcagtagagacagatttcaccatgttagccaggctggtctggaactcctggcctcaggtgatccacac

SEQ ID NO: 16509 - DNA, 201 bp, Homo sapiens
tagccaaaattccaagtacaatacaataaactatagccctcaagttgtacattagctgttttgtttcttctcttttcctttgctttttgagacagtctcaytctatcacccaggctggagtgcagtggcacaatctcggctcactgcaacctccacctcctgggttcaagtgattatcatatctcagcctcctatgagtag

SEQ ID NO: 16510 - DNA, 201 bp, Homo sapiens
gctgtacaattgtatcaataaacagcaatgtgtttgaaaatgtgcaatgcctcaacaggcagttgaacacttaggaaaagcttcaggactgctagtgtaargatgcaggattgatgggggagcactttctattcagaaagaaaaatatttttaaggaaatggagaattattcaactggttataagaaaagagtcgctcaag

SEQ ID NO: 16511 - DNA, 201 bp, Homo sapiens
gtgatgtatcgagaaaacagcacccctgacccagcaacctcagaagtggtggagcaagctggaaagctcatagaaaatgtagatccagaaaaggctgtacwattgtatcaataaacagcaatgtgtttgaaaatgtgcaatgcctcaacaggcagttgaacacttaggaaaagcttcaggactgctagtgtaaagatgcag

SEQ ID NO: 16512 - DNA, 201 bp, Homo sapiens
ctatgagaattaaatgagataatagtcataataactatatttaactaacgtttatgagatgcccagcatgttaagaactttacttttgttatcataatgarttcccctaacatagagaaatgtactattacaggccctgttttatagatgagaacactgtcttagcaagatagttcatttcacgtataccatgttgaacac

SEQ ID NO: 16513 - DNA, 201 bp, Homo sapiens
ccaggtgtggtgatgagtgcctgtaatcccagctacttgggaggctgaggcaggagaatcgattgaacctgggaggtggaggttgcaggttgcagtgagtygagatggtgccactgcaccactcaagcctgggtgacagattgagactccatctcaaaaaaaaaagcaatagattaatacatatcaccagagaaaatcatt

SEQ ID NO: 16514 - DNA, 201 bp, Homo sapiens
tgagtgcactgagaagttttaaaaagaggagtggcataatacagttttcattttcaaaatatcatgttggctgatttgtgaaaaataaaatagagaaagayaggatttatattaaatgacatggaacacagcatacacattattattaaatctgacatttcatttcagggatagaaataattcccacctacagatactatc

SEQ ID NO: 16515 - DNA, 201 bp, Homo sapiens
aataaacagcaatgtgtttgaaaatgtgcaatgcctcaacaggcagttgaacacttaggaaaagcttcaggactgctagtgtaaagatgcaggattgatgrgggagcactttctattcagaaagaaaaatatttttaaggaaatggagaattattcaactggttataagaaaagagtcgctcaagtcttatttcacttaca

SEQ ID NO: 16516 - DNA, 201 bp, Homo sapiens
tagtgcctttatttttcagtttatatttggtgacaaaatattctacccacacaacttctttgatcaatttcttgctactgaagtgtgctcccgtgagatgytgaatctcctttgcagcaatgccttatttataatttgtggatttgacagtaagaactttaacacggttagtatgcatttcaatttctatattttgagcaa

SEQ ID NO: 16517 - DNA, 201 bp, Homo sapiens
gtctcctgacattgccaaatatcatcttgatggcaaaatgcccaccctactaagttaagaaccagtactgtaaattataaccttaataagattaagatttwaaaaaaaaaatattttatagaccgtatggtgttctactataatgaggctgacaatgcacagctgtttctcttttttagaatgtcagagactactgctttt

SEQ ID NO: 16518 - DNA, 201 bp, Homo sapiens
tcttgtgagagcttctataagttggctccaaagttcttttaccaaacctgtcatcctgaatgtttgctgcttctgctcagttatttccctaagaggtcccrattcctttttaatgtggaattttacaagatcatattctataagtgaggatgatcattgttattaggtcgttatttgtaggacttttcaatgcagagacct

SEQ ID NO: 16519 - DNA, 201 bp, Homo sapiens
aggaatggaggcaagaaggaggtaaagaaaggaagatattagaagacatagaaagggacttgagcttccaggtgcaaacattacctgcatatctcagttgkccattatcctagccctactggaaaaattctaaaagctatatataatctaagccaaaccagaaaaagtatttaaagcatacaaggaggatgccactctaga

SEQ ID NO: 16520 - DNA, 201 bp, Homo sapiens
gagcagcctatataagtatctgattacagaacaatggataatttctccgctcacataaaacattgatactctggcttatcaggtcttctttgtggttttgkttcatataaatcagttcctagaagtctgattacctttcagtaacctaataaaagcatattcataagtgtgcaaagcaaagcttacatacaattattgaac

SEQ ID NO: 16521 - DNA, 201 bp, Homo sapiens
gtagggtagatttggaggctgcttgtgtttttcctcctaatccaggggcatttactctatttaatcaatagatgatgcctgtactcattttacttagcatrtcagcccctttattaaaaattgtgaaaaaaaagactacctaaataagcaaaacccaatcaggaattaaattttagagaagttcccagatggaagatagga

SEQ ID NO: 16522 - DNA, 201 bp, Homo sapiens
gaagccagtcccaagataattgttctgtacccctattctctaagaagctaaattgtgttagactgaaacccataaggaaccattgttcaaagttggcttgytcaaaagtaaagatttttaatagtttctcttaattagattattttctaagacatagaattatgattactattttatctctataattttcatctctataac

SEQ ID NO: 16523 - DNA, 201 bp, Homo sapiens
aagcaaattatcctacagattcagagctggtacaggtgtgctgtcaagcagcccattccattagtcagcttgtggttcactcacattaaagtattgacctwaatggtatatttatctagataattctaccttgttattttcaaagccccagtcttgtttgctaattctgtgcatcatttttctctgattctgaaaggcaaa

SEQ ID NO: 16524 - DNA, 201 bp, Homo sapiens
ctctcctcaagttcacagcattatctctgctatatctatattttattgagtataagagaattaacccatgtaagctccatgagggtagggatttctcatcrttttgttcaccagtgttttctcatcttgaagagtacatgacaattactgggctcccagtatctatgtgttgcattaatgaaatttcttaactttaatcta

SEQ ID NO: 16525 - DNA, 201 bp, Homo sapiens
tgctatatctatattttattgagtataagagaattaacccatgtaagctccatgagggtagggatttctcatcgttttgttcaccagtgttttctcatctkgaagagtacatgacaattactgggctcccagtatctatgtgttgcattaatgaaatttcttaactttaatctacctcaaaatgtctctatcttcttgatt

SEQ ID NO: 16526 - DNA, 201 bp, Homo sapiens
aaaacaagcaagaccatcaattctatcaagttatcattatgtcactctgttcttatcaacatatttttagtattgaagagggcttcttctacttactcctkaaccttgtacaatgtagtttaggtcttcatctttttatcatagctaccttatttaaagtcacccatggcttttaattgccaaattcaatggcctatcttc

SEQ ID NO: 16527 - DNA, 201 bp, Homo sapiens
cccttgtctccaaaacttccgcaatatgtccaaatttcctagcctgacattcagactttgattatctgcctccaagtttatatcctatcatattcctttayatattctgttctccaggtacactgggaagcttgccattcctgatcatagcctacaaactcttcctgcctcccactcaccctcatctctgctgtcaaaatg

SEQ ID NO: 16528 - DNA, 201 bp, Homo sapiens
ccattgtatgttttcttcatatgttgctggtgcctaacagaactatggccattgtccacattcatttagcagcctttgtagttattgctttgaggagcttyctctcatgaatgcccttgctttctctcccacagagtcatccccctatatatgacctgactgccatgaaagtgcctactgctatttgggctggtggacatg

SEQ ID NO: 16529 - DNA, 201 bp, Homo sapiens
tcatcaatttaatgtatacgtattgatggggaataatggtcactatgaaaaccatgtgataatatggaaaaatacccatgatataatgttatgtgaagagragaaaatgaaactggtagaactatgtgattgcaaatatatacaaatattaaaacaattatatgactttataaaatatttgtatataatgaaaactgaagc

SEQ ID NO: 16530 - DNA, 201 bp, Homo sapiens
ccaaagctagagacagttatcaatgttcatgtacaagaagcctatagaataccaagcagacttatcccaaagaagacttaataatcaaactcccaaaggtytaggataaagaaaggatcctaaaagcagtaagagagggagggagagagggagagagaaagagagagagagagagaacattcaagggagctccagtatgtc

SEQ ID NO: 16531 - DNA, 201 bp, Homo sapiens
gccttgggtcttggatggcatttctggatctgggttggaccagaggagagcccactctcctgaaaggtgagtcccagggctggaagcattcaccacaagcygactgaagagccactgggcctcgagtgagtttggcggtagcctggcaatactcaccacaggcctggggtggtggtggccatggggagagactcctctgtt

SEQ ID NO: 16532 - DNA, 201 bp, Homo sapiens
gaagactgaggtgggaggatagcttgagccgaggaggcgaaggctgcagtgagccaagatcacaccactgcactccagcccagggaacacagtgagacccrtctcaaacaaacaaacaaacagacaaataaagtactatgttgtaattcatgtgtaaaaattaagagattataacatgaaggtatatatttcctttcctct

SEQ ID NO: 16533 - DNA, 201 bp, Homo sapiens
tgaggtgggtggatcacctgagatcaagagtttgagatcagcctggccaatgtggtaaaaccctatctctactaaaaaaacaaaaattagtagggtgtggyggcacatgcctgtaatcctagctacttgggaggctgaggcatgagaatcacttgaacccaggaggcagatgttgcagtgagccaagatggtgccacagca

SEQ ID NO: 16534 - DNA, 201 bp, Homo sapiens
gcaggggaacgaatgccttgagctgaggagtttaagaccagcctgggcaacatggtgaaaccccatctctacaaaaacatacaaaaagtgtagctggccaytggggcaggtgcctttagttccagctacttggaagactgaggtgggaggatagcttgagccgaggaggcgaaggctgcagtgagccaagatcacaccact

SEQ ID NO: 16535 - DNA, 201 bp, Homo sapiens
ggtaggagtgcagtggcatgatctcagctcactgcaacctttgcctctggggttcaaaggattctcccgcctcagcctccccagtagctgggattacaggygcacaccaccacgcccagctaattttgtatttttagtagagatgtggtttcaccatgttggccaggctggtctcaaaatcttgaccttgtgatccacccg

SEQ ID NO: 16536 - DNA, 201 bp, Homo sapiens
aatcaaggtgacacccttaaaagttgcatagttgcctaatatcatatatcgacactagtcttatatttaacaaaatcaaagtatttatgtcttcactgaaygtgtttaaatgttctaggcctaacaatgagatgacttttctaatttgttattccttctttttgatagtttggatgagatggctaaatatgaccttccagc

SEQ ID NO: 16537 - DNA, 201 bp, Homo sapiens
taaaatatcctgctgagtacacctggaaggtaatttttctggcactgactaccatacaaaaataactatgaatttatttcaaagaagaaaatgctttttawtttattttattattattatactttaagttttaaggtacatgtgtacaacgtgcaggtttgttacatatgtatacatgtgccatgttggtgtgctgcaccc

SEQ ID NO: 16538 - DNA, 201 bp, Homo sapiens
tacagactatatttctgagcaactatttatgtaagactttgcccatattctttttttgagatagagtctcgctgtcacccaggctggagtgcagtggcgcratctcggctcatagcaagctccgcctcttgggttcacgccattctcctgcctcagcctcccgagtagctggaactacaggcgcccgccaccacgcccggc

SEQ ID NO: 16539 - DNA, 201 bp, Homo sapiens
attctcagcaaactaacacaggaagagaaaaccaaacaccgcatgttctcattcataagtgggagttgaacaatgagaacacatggacacagggaagggamcgtcacacaccagggcctgccaggggctaggggacaatgggagggatagcactaggagaaatacctaatgtagatgatgggtggattggtgcagcaaacc

SEQ ID NO: 16540 - DNA, 201 bp, Homo sapiens
cagagtaaggcagttgcttgagaaccaccagcacaaagtcattcttatttgttcctaagatgttaaagttaatctctttattcaaaagaatgtcttggaayctcactgcaaatggctcaaaatataactttccctgtattagaaacccaaagtcaatacacagcacagttagggaatttatttagtctgattactgagcaa

SEQ ID NO: 16541 - DNA, 201 bp, Homo sapiens
accatatatatatatatgtatggtaagtagatatatatatatccacttactacagatttatatatatagggtaaatatatatacttactatatatatatayggtatatatatctgtatatctctatatatctactatatatatctataatatatataggatatatatatagagaatatatatatagggtaagtaaattgat

SEQ ID NO: 16542 - DNA, 201 bp, Homo sapiens
tgtgtgtgtgtgtgtgtgtgtgtgtgtacttggttaagtcctatcttgttattctgctttaaatcaatattcttaaatatttttgccgttttcttctcaakaaaattatgttttcaacaagtttgaaaaaaattcaccagaattttaattgaaattgcattaagcctttttaataatttaagagttgaacaattttcaaag

SEQ ID NO: 16543 - DNA, 201 bp, Homo sapiens
cctaaaggcacaaattttaaaatgtgtgtagattacagactcagctcagctccattctaaaagatgcattctctataagacctccctaacacctggaatasaagcagctgggtaaacatcctggccatgcagtatgggcagcatgagtcagttagagggcaaggttctttctcttgatccgcccacataccttgggggtgt

SEQ ID NO: 16544 - DNA, 201 bp, Homo sapiens
gtgccccaaactacaatgatttggatttcctgtgggtaggaatgcattgcagaaaatgtttggcaaaatagttcaagatcaactatgtaataattgaaaaktccatcgtttcttttcttttttccccaagaatatctgtgttttctagtatagaaatgtttgtatttgctagcatagactagattccagcagtttgtatat

SEQ ID NO: 16545 - DNA, 201 bp, Homo sapiens
tgtcaaagccaaactgttattttttgtttgtttttacaaaatagttatcctttgttttctttttctagaaataagaaagcagtttttaccaggctttcttygtgtctgaaaacagaaaccaactcaaatatatagcaccttggcatacttagcacttcaggctgtaaatatgagagtatggaactgagttttggaataaca

SEQ ID NO: 16546 - DNA, 201 bp, Homo sapiens
gcaccttggcatacttagcacttcaggctgtaaatatgagagtatggaactgagttttggaataacaatatgaagttaaagtgccattttactctaaaatkacttggtttcatattccttcactggactatcctgtctctcccttactttgtaaggacattgagggaaaaattatttccttcactgctcttcctttgtggt

SEQ ID NO: 16547 - DNA, 201 bp, Homo sapiens
gtacaacaaaccaacaaaaagaggataatagagataataatagtagcacctaccaatagagttgtttgtaacttaattcttataaatcactttttaaagtyaacgccatatagttatttccaattgttattatatgtgatagataccaaaaattatagctgttattgtcctaattgcattttgattttttgttgtaagtat

SEQ ID NO: 16548 - DNA, 201 bp, Homo sapiens
tgaatagaaatttggtgaggaactaatcagtgtccatttacactcacctcctcttcctccctggaagagctataggacttgagtaagcatgataaatttcrtgtctttgtaaaccacacccaggaaatttgtatatacaaatacatagagcacagtagttatcaggacagactttgacataaaaagaactgggtttgagtc

SEQ ID NO: 16549 - DNA, 201 bp, Homo sapiens
ctccagtatcacggtaaatggaggtgataagaaagacatgctttctcttgtttcattcttaaggtgaaagtattcaatatgttagcattaattataattgyacctggaggatattttatagaattccttcatctgattgagttccttttcatttctattttcctaaaaattttttattataaagtggtgttgagttttgtc

SEQ ID NO: 16550 - DNA, 201 bp, Homo sapiens
tggaggatattttatagaattccttcatctgattgagttccttttcatttctattttcctaaaaattttttattataaagtggtgttgagttttgtcaaaygtacttcccaattttaaaactgatcattttaaactatttgctcctttgattaatttccatattattctaataaccttggctccaatttatccatcagaac

SEQ ID NO: 16551 - DNA, 201 bp, Homo sapiens
agcagacagatgataagatgctgttggatcaaggagaatggggaaagagaccagtgcatgtagctagcaaagggtggagctgggagtcagaacaccagagrtgaagaagcggatgggtgactaggagacagcaggagagatcccacatgtttgattccaggatttgtctgttttgtcatccagttcatttaaatagtaaac

SEQ ID NO: 16552 - DNA, 201 bp, Homo sapiens
gagagaatcaagagtttttgtgtgtgttttgtttttgtttttgttcttgtgtgtgtttgtggttgtttatccataagatatctaaatataccgactgactgaattaattctgttacacaaaatttcagagtcctgtagaatattcatcacattttaaaattcagaaaacgaacgtcaacattcagatctattcttagtgtc

SEQ ID NO: 16553 - DNA, 201 bp, Homo sapiens
gtctgttttgtcatccagttcatttaaatagtaaacatagggatgagctctcaaaccatctgctaaatacctggttgtgaataccagattcctttggaatrtctctctgctcccttctagatcttttcattcaaatgattgtaaaggaaaggttcgtcttggtccttaactttgcttgagttattttagaaacatagcaga

SEQ ID NO: 16554 - DNA, 201 bp, Homo sapiens
tgagagaatcaagagtttttgtgtgtgttttgtttttgtttttgttcttgtgtgtgtttgtggttgtttatccataagatatctaaatataccgactgactgaattaattctgttacacaaaatttcagagtcctgtagaatattcatcacattttaaaattcagaaaacgaacgtcaacattcagatctattcttagtgt

SEQ ID NO: 16555 - DNA, 201 bp, Homo sapiens
tcttctgaaggacagagttagaattttaactcagaattctccacaaagcattcagggattcatcattagctttattttaccattgatcaaactgaaattcwtctgtagaaactgacccctttgcattttttaaacttaagagttttccaaacttagagcttagagttttctgtggggtctttgtacctgcacactctggcc

SEQ ID NO: 16556 - DNA, 201 bp, Homo sapiens
cagtgaagaattagggtggggactggttaagaatgctctccaagcattgccataagttgttattaagtgtttgcttgatgagcctgatagttcctattatkgggcaatgagaaaaatggaattaaggtctctattacttctgatattcttttgttgagaaattgctatccttgatttcaccatcaatgtatttgtcagtgc

SEQ ID NO: 16557 - DNA, 201 bp, Homo sapiens
atgagagaatcaagagtttttgtgtgtgttttgtttttgtttttgttcttgtgtgtgtttgtggttgtttatccataagatatctaaatataccgactgactgaattaattctgttacacaaaatttcagagtcctgtagaatattcatcacattttaaaattcagaaaacgaacgtcaacattcagatctattcttagtg

SEQ ID NO: 16558 - DNA, 201 bp, Homo sapiens
ttgatttcaccatcaatgtatttgtcagtgcaaaatgcattacttatgagagctgcctacatataatccacatgcatttgatatacaatatgtaaacccartataaaatcaaacatgcatcaaggcaatattctcttgaaagtctcatatttcctactgactgcagtagctagaggggttgggggcagggagcggacaaaa

SEQ ID NO: 16559 - DNA, 201 bp, Homo sapiens
ctcagccctagctctcagcccaccctacagggatagtttgctgcctagggtacacctcttgcccttgcctccaactgaaaaaacaagtctattttttttttctgaaacagagcctcaggtatcctcaggaatctctgcaaaaaagaccctattagttcctatcagttctgtgcttaaacttcattaaagagccaattctag

SEQ ID NO: 16560 - DNA, 201 bp, Homo sapiens
ggagaagaagcagatcaagaccctgaacaagtttgcctccttcattgacaaagtgtggttcctggagcagcagaacaagatgctggagaccatgtggagcytgcagcagcagaagacagctgggagaacgtggacaacatggagagctgcatcaacaacttgctgcggcagctggacacatgggaccagaagctgaaggtg

SEQ ID NO: 16561 - DNA, 201 bp, Homo sapiens
aaagactgcaaaaagaaatcaaagtggaagtatcctgaaggcttgagggaatatggaattagaggttcacatgtgggatgtatggatttggatttttttttctcacctagggaatatatgaaagtatgtgattagtgagagatacttgagagaatgagtttggggagaaagaaagagtgagcagcagacagatgataagat

SEQ ID NO: 16562 - DNA, 201 bp, Homo sapiens
tttcttttttctttctttctgtttctctttctttctttctttcctttctttctctctctctttctttctccttccttccttcctgctttccttccttcctwgcctgttttctgccttattctaggataataaaatattagcattctgtcatgattcctctattgagtttttaaaatatgcctacctcaagattgcaaattt

SEQ ID NO: 16563 - DNA, 201 bp, Homo sapiens
aaaaccatttaccattttttaggaagccctttatgttctcattccaatggccttgagtatgaatattcttttttatgatcagggtcatctgcaggggaatatgaagcaaagtgactgtcaagagtgacacaactgcttatgaaatcaatcatttgtggaggacacaccattctctttttctgctgctttgtaataaatagt

SEQ ID NO: 16564 - DNA, 201 bp, Homo sapiens
aaggaaatcgcattttaacaagctcctgctgctgctggtgctatgtccacagaccacaatttgagtagcactgctctatacaatggctgaatttctacatyatctcacctaagtctatttaaatcatcatatactactatgtcatattaatggaatctaaatctgcactagaactacaacagaaaactccaggaacatata

SEQ ID NO: 16565 - DNA, 201 bp, Homo sapiens
ttcatagaatcattttaatatttttattacctctaggagtttttttaaaaatacagaacaatttgttttctaaaacaaaactcaagcatttccttgaaaasgaaaaaaaatcacctctattaatcaattagcactcaatctactatgtgcaaaaaaccgtgccaaaagcttttggaatacgcaatcctatagatctgaact

SEQ ID NO: 16566 - DNA, 201 bp, Homo sapiens
gggcagtaatagtccatctcctggtggtttgaactaccatccagtggtggcttcctaaagagaagtttcatgacttaatacagatgatctctatagagtayctttgagatttccccgagatttttgatagagcagtttctttgattttgtgagctatcccaatacgcttttttggtttcataagccagtgttggtttctgt

SEQ ID NO: 16567 - DNA, 201 bp, Homo sapiens
agagaaaagcaatgttaagttgcactgaagcaaaacaaggctattgggttaaatttttttcatagaatcattttaatatttttattacctctaggagtttytttaaaaatacagaacaatttgttttctaaaacaaaactcaagcatttccttgaaaacgaaaaaaaatcacctctattaatcaattagcactcaatctac

SEQ ID NO: 16568 - DNA, 201 bp, Homo sapiens
atagtccatctcctggtggtttgaactaccatccagtggtggcttcctaaagagaagtttcatgacttaatacagatgatctctatagagtatctttgagwtttccccgagatttttgatagagcagtttctttgattttgtgagctatcccaatacgcttttttggtttcataagccagtgttggtttctgttgtttatt

SEQ ID NO: 16569 - DNA, 201 bp, Homo sapiens
cagtgctttgggaagcccaggcgggaagataccttgaggccaggagttcgagaccagtctgagtaatgtagaaacaccctatctctaaaaaaaagaaaaawaattagccagatgaacacctgtagtcccagctaccctggaagcagaggtgggaaaatcacataataacctcaaatcagtaaatgtttatggaataactat

SEQ ID NO: 16570 - DNA, 201 bp, Homo sapiens
atatagagaatatatatatagggtaagtaaattgatagttgggtgtgtatatatatagtaaatttgtgtgtgtctgtgtgtgtgtgtgtgtgtgtgtgtgtacttggttaagtcctatcttgttattctgctttaaatcaatattcttaaatatttttgccgttttcttctcaagaaaattatgttttcaacaagtttgaa

SEQ ID NO: 16571 - DNA, 201 bp, Homo sapiens
tatatagagaatatatatatagggtaagtaaattgatagttgggtgtgtatatatatagtaaatttgtgtgtgtctgtgtgtgtgtgtgtgtgtgtgtgtgtacttggttaagtcctatcttgttattctgctttaaatcaatattcttaaatatttttgccgttttcttctcaagaaaattatgttttcaacaagtttga

SEQ ID NO: 16572 - DNA, 201 bp, Homo sapiens
gctccagtatgtctggcagaagacttttcagtggaaacctttcaggtcgggagaaagtggcatgacatatttaaagcgctgaaggaaaaaaaaaaaaaaaacaccttttaccctagaatagtatatctggtgaaaatatccttcaaacatgtaggagaaataaagactttcccagacaaacaaaagctgaggcatttcatt

SEQ ID NO: 16573 - DNA, 201 bp, Homo sapiens
gagctgagatcatgccactgcactccaacctgggcgacagagcaagactccgtctcaaaaaaaaaaaaaaaagaaagaaagaaagaaaatacagtcagagwaaaaagaatgaaaaagaacaaagcacaaaagcacacctacaaaatctagaaaatagcttcaaagcgcaaatataagagtcactggccgtaaaaaggaggt

SEQ ID NO: 16574 - DNA, 201 bp, Homo sapiens
gtttcatgacttaatacagatgatctctatagagtatctttgagatttccccgagatttttgatagagcagtttctttgattttgtgagctatcccaataygcttttttggtttcataagccagtgttggtttctgttgtttattaccaaagtattttaacattcaggaattcatatcagaagtggaatggaatagtgtta

SEQ ID NO: 16575 - DNA, 201 bp, Homo sapiens
gaacctgggaggcggaggttgcaatgagctgagatcatgccactgcactccaacctgggcgacagagcaagactccgtctcaaaaaaaaaaaaaaaagaaagaaagaaagaaaatacagtcagagaaaaaagaatgaaaaagaacaaagcacaaaagcacacctacaaaatctagaaaatagcttcaaagcgcaaatataa

SEQ ID NO: 16576 - DNA, 201 bp, Homo sapiens
cttgaacctgggaggcggaggttgcaatgagctgagatcatgccactgcactccaacctgggcgacagagcaagactccgtctcaaaaaaaaaaaaaaaagaaagaaagaaagaaaatacagtcagagaaaaaagaatgaaaaagaacaaagcacaaaagcacacctacaaaatctagaaaatagcttcaaagcgcaaata

SEQ ID NO: 16577 - DNA, 201 bp, Homo sapiens
aattattgttaactatagtcatcctattgtgcatgccagactttagtccttctaacggtattttggtacccattaaccaatgcctctttatccttcccccwcccctactacctttcccaccctctggtaaccatcattcttctcactatctctataaggtcagtttttttttaaactcccctatatgagtgagaacatgca

SEQ ID NO: 16578 - DNA, 201 bp, Homo sapiens
aaatttcagataattcaccctaataagcacacaacagatggtttgttttgattcctttttatatcctttggagaagttccactaacgactgtatttttacygggcagagtgaaatcatcatctacaatggctaccccagtgaagagtatgaagtcaccactgaagatgggtatatactccttgtcaacagaattccttatg

SEQ ID NO: 16579 - DNA, 201 bp, Homo sapiens
gacacttaggctgatttcatatcttggtcattgtgaatagtgctgtactaaacatgggggtgcagatgtctcttccatggattgatttccttttttttttytgaatatagacctagcactggaattgctggatcatatggtaattctacttttagttttttgaggatccctcatactcttccccatagttcctgtactaat

SEQ ID NO: 16580 - DNA, 201 bp, Homo sapiens
cctccaagtttatatcctatcatattcctttatatattctgttctccaggtacactgggaagcttgccattcctgatcatagcctacaaactcttcctgcytcccactcaccctcatctctgctgtcaaaatgcaaccttccctcaagagtcatttcacaggacccctctttctatgaagccctcaggtggaaataatttt

SEQ ID NO: 16581 - DNA, 201 bp, Homo sapiens
actggacagaagcagctacactatgttggccattcccagggcaccaccattggtaagtaatggcagtcaaggccaagtggtttacttctcataaacacttycccagtggttatggtaggcatgttagcaaccacactaattgctttccattcatttaatgcctccaacaacacaatgacatagggacaattataattccta

SEQ ID NO: 16582 - DNA, 201 bp, Homo sapiens
catcatcctcatcacacatgtataagtagattagataaactagtgagtcttttctgcagcttgattgctacaaccctctaatagtgcctttatttttcagwttatatttggtgacaaaatattctacccacacaacttctttgatcaatttcttgctactgaagtgtgctcccgtgagatgctgaatctcctttgcagcaa

SEQ ID NO: 16583 - DNA, 201 bp, Homo sapiens
tctcaaaaccatttaccattttttaggaagccctttatgttctcattccaatggccttgagtatgaatattcttttttatgatcagggtcatctgcagggkaatatgaagcaaagtgactgtcaagagtgacacaactgcttatgaaatcaatcatttgtggaggacacaccattctctttttctgctgctttgtaataaa

SEQ ID NO: 16584 - DNA, 201 bp, Homo sapiens
cccctctaggctcactctctgttctttaacacctttctctctgcccaagaggctgaactgtaaggacaggtcaacaagctcccttgacttttggttttcakttcaattcagccaatggaaatggtgagcaggagatggaaagaaataggccagtaaggtttcattttttattgccctggcttcctccctgtgaagtcaact

SEQ ID NO: 16585 - DNA, 201 bp, Homo sapiens
ccaactctccctcaccttctacatgcaacctatcatcgccatctatcaattttgccttctaaatttctccctaatctgacaactttcagcttcaataatcwttcaaatccaggtttggatataatgtcttcaactactacaatgccttctcactggtattaaactatttgtagtcagttctggacccaagtctgtgtgatt

SEQ ID NO: 16586 - DNA, 201 bp, Homo sapiens
aattaatcgttttgtttgacaatgcttaataccctaattctctcacccagtaaaaccaacacacacacacacacacacacacacacacacacacacacacwctctctctctctctctctctttcctttaggggaacggtttagcctcaggttataaaatataaggattccatttccttctatggttttgtactattcatct

SEQ ID NO: 16587 - DNA, 201 bp, Homo sapiens
gaattaatcgttttgtttgacaatgcttaataccctaattctctcacccagtaaaaccaacacacacacacacacacacacacacacacacacacacacamtctctctctctctctctctctttcctttaggggaacggtttagcctcaggttataaaatataaggattccatttccttctatggttttgtactattcatc

SEQ ID NO: 16588 - DNA, 201 bp, Homo sapiens
actccttggagacagtgtcaatagccctctactcattttcataaagtcagccatgcctgcacttaataatgggttgtctataaatgtgttaacttctaaawtgctactctgaaacttgcaacacattttgctatgaaaatggtgctgtaggtcagagcttttcagactttaccatgcccagaaatctcctggagatcttgg

SEQ ID NO: 16589 - DNA, 201 bp, Homo sapiens
taatggaatatttgatattccatggaatattaatggaataaaagaagtaccaagatttcatactcctcttcctgtccaagagaggaagagagggatggagscagggaaaaaggaagggaaggagggagagggagagggagagaagacagaaggaagaggaggaggaagaagaggaggaagaagaaaaagggaagggaaagg

SEQ ID NO: 16590 - DNA, 201 bp, Homo sapiens
aattatgttgacatttacttcatgttttcaagtgtgacaatttaaatagattgtcacacaaataaataattaaagtaaaaggcaggatctgactttaaccsgtaaacaaatttattttttatttatcaataacttgctttatttatcaatccatgcttggcaaaacaaatccatgtgaaagaaaatagccacttcataaaa

SEQ ID NO: 16591 - DNA, 201 bp, Homo sapiens
actttaaccggtaaacaaatttattttttatttatcaataacttgctttatttatcaatccatgcttggcaaaacaaatccatgtgaaagaaaatagccasttcataaaataatcaacaattaaaatacggtgttaagaaacaggtgacatctaccataatggattcttggttctctgttctgaaacctggagttggcttt

SEQ ID NO: 16592 - DNA, 201 bp, Homo sapiens
ggaaatcgcattttaacaagctcctgctgctgctggtgctatgtccacagaccacaatttgagtagcactgctctatacaatggctgaatttctacatcakctcacctaagtctatttaaatcatcatatactactatgtcatattaatggaatctaaatctgcactagaactacaacagaaaactccaggaacatatatc

SEQ ID NO: 16593 - DNA, 201 bp, Homo sapiens
tttccagagtaccgctctcccatttcttgtcaactcagcgtgtcatcttttcctaccatagttaaatatgtaacctagatcttgcctaaagaggaaagggractgatatttatttaatatctactaaacatcatgcactgtgttaagcacattgtatgcatcatcgcattcacattttgtctacattttacaaatgaaaac

SEQ ID NO: 16594 - DNA, 201 bp, Homo sapiens
tggattcttggttctctgttctgaaacctggagttggcttttccaaatacggagtaaagatcttaaagtgaattagatcttaaatgaataaatgctagttrttactgttctttagttgtaatttctggttaataaagaattctagaagaaatgtgtgtttatttttactgtaaataggtgtttccaaagttttaagaacta

SEQ ID NO: 16595 - DNA, 201 bp, Homo sapiens
atatttatttaatatctactaaacatcatgcactgtgttaagcacattgtatgcatcatcgcattcacattttgtctacattttacaaatgaaaacctacygtggaaagagcaagagcagtttcctccctgacctggatgagtgactttaaataaagtgcttaatctctccaagcacgggttcttcatttataagtgaggg

SEQ ID NO: 16596 - DNA, 201 bp, Homo sapiens
cttccatttcatccagagcgtttgtaaagctgatatgcattaagaatctctaagagcacaaagtagtttttttaaacttttttgttcaagaatatgttgcygtttaattcattcttttgtacaaatatttttctaagttaggcactttgaaaaatgctaacacactgtcttaaagcattctcttaaatttgttttcaaatt

SEQ ID NO: 16597 - DNA, 201 bp, Homo sapiens
ggaggaattttattttgcctccttccattttataggaggaacagatttataccctgtttacacatgtagcttattggataataacatgaacgaataatatygacttagaaactttatttggactaagttataaattgtatttcttattatacaataatgggaatataatttctacattccaaaacatgtacaggtagccat

SEQ ID NO: 16598 - DNA, 201 bp, Homo sapiens
ctattatagtaatggaagcaaagccaattccaactacaatttccaatcaaactgactctaatggaacctaattagtaactgacacaatccaaagaaacttraaggtatttaaactaacctcatgccactaagtcctacctgactaaaatgcacgttctgatacaagtgtgtttgcaattctttcctatgctctgcgtgtat

SEQ ID NO: 16599 - DNA, 201 bp, Homo sapiens
tataattacattcagtaaaatgcacagatctgaattgtacagtttgatgaatcttagcaattaccccagtcaaaatttgccctagaaccaagcaaacactrttgtgatttctattcctatgaattagttttatctgtttttgacctttacagaaattcaaccgcagagtatgcactcctttgcgcttttttcattcggcat

SEQ ID NO: 16600 - DNA, 201 bp, Homo sapiens
tagaaccaagcaaacactattgtgatttctattcctatgaattagttttatctgtttttgacctttacagaaattcaaccgcagagtatgcactcctttgygcttttttcattcggcataacgtttgtgatatttatccaggctgttgaatgtgtcgatgagtagtaagcattccattacataaatataacatgattatgt

SEQ ID NO: 16601 - DNA, 201 bp, Homo sapiens
aaggatgttatggtacagaccaagtagatgacataaatgaacaccaccttaaatcagagttttaaaaataggccctgaactgaagcaagaggtaaactagrgaagcctcaggagaactgagacttctccagagagaagtatctgggatttaacttctttctaatgaggcttggttttccatgaacttttcctttaaaccaa

SEQ ID NO: 16602 - DNA, 201 bp, Homo sapiens
aaatgggtggttacatccttctggtgatctaggagccctattttcgtcctagcatacagcatttttctaaaatttgctgttagctttcatgattcttaccytaactattctttttctaaaaaacatttgtttcagctttaccactctgatgaattcagagcttatgactggggaaatgacgctgataatatgaaacattac

SEQ ID NO: 16603 - DNA, 201 bp, Homo sapiens
atactttaattaaataatactttgcatgtgcgctagatgctaggaactgcactaattgtcttttaaacatgacctactaacttcacaacagccctacccaktagaaaatttttccattttatagatgagaaaattcataataatagaaatttaaaactctcctaaggtatagaacgtgtttgaatccagaatgaaacacat

SEQ ID NO: 16604 - DNA, 201 bp, Homo sapiens
gttcttgtgtgtgtttgtggttgtttatccataagatatctaaatataccgactgactgaattaattctgttacacaaaatttcagagtcctgtagaataytcatcacattttaaaattcagaaaacgaacgtcaacattcagatctattcttagtgtcttagggccaacagctctctttgaatgtcctttgggacttaac

SEQ ID NO: 16605 - DNA, 201 bp, Homo sapiens
ctgtgtccggcctatttttttgatgatgtttttgaagaacagaagttttttattttaataattttttaatcttttttttgtttatggttagttgtctaccmcaaatttgtaaagatattattctttgttatcttctaacaactttgtacttaagcttttagttttagatttgcaatctgaggtatatttttgtatctggtt

SEQ ID NO: 16606 - DNA, 201 bp, Homo sapiens
tccggcctatttttttgatgatgtttttgaagaacagaagttttttattttaataattttttaatcttttttttgtttatggttagttgtctaccacaaayttgtaaagatattattctttgttatcttctaacaactttgtacttaagcttttagttttagatttgcaatctgaggtatatttttgtatctggtttggga

SEQ ID NO: 16607 - DNA, 201 bp, Homo sapiens
atctggaaatatatagaaatatattactcaagaccagccattccattgtttaccaacaactgaacatgtaaaaattgctcaaacatagcttattaagatamgaagtgaaaaaacatcactcaggttgcctaaacttgtattatttaatgtttttttttttctgatttatttcttccccactctctttttctttgccttcct

SEQ ID NO: 16608 - DNA, 201 bp, Homo sapiens
atcttccaatgagttacactgttcccaaactatcttcataaggggtagtaagacccagtgaaaagaaattgagtaaaacagatattgttcaaattctaaaytgacatttacgtttgctagcgatggaaaaataatgattataatgattaagcatatagatgctcagtccatggtatataaattatagattaaataggtaaa

SEQ ID NO: 16609 - DNA, 201 bp, Homo sapiens
agatctactgaaacagaatttttacttcaacaagatcttcaggtaattcacaggcccattagaatttgacaagcacttatctaaaacatattgcattcacyttgctctgtggataaaggtggttttctctgtgcaatcattgctagaattcacttataaaaccgccagttaatgttatacactctacttgaatagtaagta

SEQ ID NO: 16610 - DNA, 201 bp, Homo sapiens
ttataataaaaaattatttgagggtggaaagactcctacctgtcatttggtggcatttatactgatagaacttttttttaaaaaaattttaattttaattttaatttatttcagaaaatttataaattaaagaagcatatacaaagaaacttacatcatgtgtaatccttccatccagagataactagatgtactaacatt

SEQ ID NO: 16611 - DNA, 201 bp, Homo sapiens
acaaaatatgttgttatttttcataagtcaattgaaataattgtgccatattcagtatgagcaaaactagagacacagaagatttaaaaagttataaataygaagtatttgtatttataatataaagtataatatgtggttcttgtccttaagaagcttatgaactagttgaagaaccaagacatacatctgaaataatca

SEQ ID NO: 16612 - DNA, 201 bp, Homo sapiens
attataataaaaaattatttgagggtggaaagactcctacctgtcatttggtggcatttatactgatagaacttttttttaaaaaaattttaattttaattttaatttatttcagaaaatttataaattaaagaagcatatacaaagaaacttacatcatgtgtaatccttccatccagagataactagatgtactaacat

SEQ ID NO: 16613 - DNA, 201 bp, Homo sapiens
gggcctttaggtaaatattagctaagaaaactcaagggggaaattggaggcaattttaaaaaaataacgtggacgctattaatgattatctttgacgcttraagtcatatagctccttgtagtttctgttaagatctcaaaggagggtaacagcaagaagctctgatttttcactgattctcccacaagcaaagtatggca

SEQ ID NO: 16614 - DNA, 201 bp, Homo sapiens
agtttaaataataatgtttttcctatgataaagtaatactggatatagaaaatttagaaagtgtgaaaaacactttaaaaatgagaaaataatcatccaamtattcaccatctagatataactataattaaaatttgatgtttaggctttttttttctattatggtttgtgtcatcattgaactcaaaatatatgcacaat

SEQ ID NO: 16615 - DNA, 201 bp, Homo sapiens
aattataataaaaaattatttgagggtggaaagactcctacctgtcatttggtggcatttatactgatagaacttttttttaaaaaaattttaattttaattttaatttatttcagaaaatttataaattaaagaagcatatacaaagaaacttacatcatgtgtaatccttccatccagagataactagatgtactaaca

SEQ ID NO: 16616 - DNA, 201 bp, Homo sapiens
tgggcaccagcatgggtctgggtgaggtctatgctggggctggtgatatgggaggcatcacaattttcactgtgacccagagtctgctgagctccctaaargtggaggtggatcccaacatccatgctgtgaacacccaggagaagaagcagatcaagaccctgaacaagtttgcctccttcattgacaaagtgtggttcc

SEQ ID NO: 16617 - DNA, 201 bp, Homo sapiens
caattaaaatacggtgttaagaaacaggtgacatctaccataatggattcttggttctctgttctgaaacctggagttggcttttccaaatacggagtaargatcttaaagtgaattagatcttaaatgaataaatgctagttattactgttctttagttgtaatttctggttaataaagaattctagaagaaatgtgtgt

SEQ ID NO: 16618 - DNA, 201 bp, Homo sapiens
aaattataataaaaaattatttgagggtggaaagactcctacctgtcatttggtggcatttatactgatagaacttttttttaaaaaaattttaattttaattttaatttatttcagaaaatttataaattaaagaagcatatacaaagaaacttacatcatgtgtaatccttccatccagagataactagatgtactaac

SEQ ID NO: 16619 - DNA, 201 bp, Homo sapiens
ctcaagagaacttttaagtctctccaaacttttctcttgtcatttctatcacgtagctgccaaaattcatgagacaaaaagctgtacaatgagaaactctytttctaatctgagatccctgtgatttgtctcagactcagatcaaagaggcctgatggtacttgactatttaatggtacttaactttggcagagttagtaa

SEQ ID NO: 16620 - DNA, 201 bp, Homo sapiens
taaattataataaaaaattatttgagggtggaaagactcctacctgtcatttggtggcatttatactgatagaacttttttttaaaaaaattttaattttaattttaatttatttcagaaaatttataaattaaagaagcatatacaaagaaacttacatcatgtgtaatccttccatccagagataactagatgtactaa

SEQ ID NO: 16621 - DNA, 201 bp, Homo sapiens
taatctgagatccctgtgatttgtctcagactcagatcaaagaggcctgatggtacttgactatttaatggtacttaactttggcagagttagtaacaccwcttctttccctctattccaaatggtggaaaaatggacatagactcttagttccttggtcccgatggctgaaggctctctgagagtacaacttactcactc

SEQ ID NO: 16622 - DNA, 201 bp, Homo sapiens
acattcagatctattcttagtgtcttagggccaacagctctctttgaatgtcctttgggacttaacacggggtgaaggagaagatcactggggtttttatyctttaatctcctatacccttgaacctatgggagttgagtctggaaaaagatagatttccttttgtctttgccccgcgggatgccctctgtaggctttctg

SEQ ID NO: 16623 - DNA, 201 bp, Homo sapiens
atcaatattgttaaaatgtccatatgatccaaaacaatctacagattcaatgcaatccctatcaaaataccaatgacattcttcattgaaataaaaaaaaagcctaaaatttaagtggaaccatgaaggtagatgtctgctatacatagaagattaagtactcaacaaaccttgaatatgaagactggggaagtgaatagg

SEQ ID NO: 16624 - DNA, 201 bp, Homo sapiens
tactcactctcaggaagccactctagttccaaaagtgacctgaggtagagtcctgagataacaacacagcatcacaaaccacttataaagcacaggaaaartctagtcacttcttccctctcttctctctttttccacactttctcacttctttctttttcctttctcttttttagttgaaatgttcctattttacattgg

SEQ ID NO: 16625 - DNA, 201 bp, Homo sapiens
aaattcattaaatttgcaggatacaacatcaacatacaaaattcagcagcatttcaatatgccaagagcaaataatcttaaaaaaaagaaagaaaaaaaaacaagaaataatcccatttataatagctacaaataaaataaaacacctaggaataaaccataccaaagaagtgaaagatttctacaatgaaaactataaaa

SEQ ID NO: 16626 - DNA, 201 bp, Homo sapiens
tgtatataatcccttacaaatgagaaaacaagacagagaacttaaataacttacccaagtaagtagctcagaagggactagatcccaggtttgcctggcaycaaattttatctcttaacctttcttttatactacagaaattcaggaatgagatttttcttgtagacactgagaaagttcaaatatgaaattcttgttgcc

SEQ ID NO: 16627 - DNA, 201 bp, Homo sapiens
ttgaacattgtttttaatgtacctcttggctatttgtatgtcttcttttgagaaatgtctactcagatcttttgtccatttttaaatcagattttttttttgcaattgagttatatgacctctttatatattctggttactaatcccttgtcagatgggtagtttacaaatattttctctcattcaacaggttctttagtt

SEQ ID NO: 16628 - DNA, 201 bp, Homo sapiens
tgtttgctttattattctctcctttagataagcattccaggtaattgctcttttcagaggagcttggtaaatctgttatagaattaagtgaatacgactarccttgcaagaaaagcatcagtaggcctcgacaaatcaaatttttctgatttcagtttcttaaaaatgttgacttgcaatcaaggtgacacccttaaaagt

SEQ ID NO: 16629 - DNA, 201 bp, Homo sapiens
cgattttcccttatattcaaggtattatttgaccttaagaaaaaccgttttacatttcataccaattaatgagaaaaaaatattggcaagcactgactgggcagaatacagggaagcttcactatggagaagtgaatttgggattgagggcctttattgcaatctccttgtaaataatatttgatactcttcctcatctgg

SEQ ID NO: 16630 - DNA, 201 bp, Homo sapiens
cccacacaattaagagatattttgggatggtgagatctttccattcctcttcatttgcacagctctcttcaaacttctgcataccctgacgtgtgtaggaygtggtgcaattcaagttaattcagccaaaagatatctaggagctactacttcaaggccctggcattaggaaacagctatgtctacaaggaaactttccag

SEQ ID NO: 16631 - DNA, 201 bp, Homo sapiens
attcagagtctttttatcaattgttcagtcaattatttcagttcttctttttctggccaagacagttttaatgttccaacaagtgtttcagtacacacatacacacacacacacacacacacacacacacacacacatgctagtggaggcccaggaagggacctctggaaaccaaattatatggatattctccctagccta

SEQ ID NO: 16632 - DNA, 201 bp, Homo sapiens
agaaaggctttctgaaacaagagagaaacatgagcaacattgaagtggtgaagctcaggccatggagaaccacacataactcactttactggagatttatrttagtatttgtgaaggagagtatgagaaatcatgttggaaatgtagaggcagatgataaagggatttgagcgccaaattaatgaatttggaatgtattat

SEQ ID NO: 16633 - DNA, 201 bp, Homo sapiens
agaaatggtgtagagaagaagaaatgactttagttggttttggaaagtgggtaggacttagatatgctcttatacttgatctgcaaaaaaaaaaaaaaaaaccatggagaatttgattatctgtgctctgtgtttcatttaggacataaatatttttagtgactgttgtttgcattttggacagagcaatttctgttatgt

SEQ ID NO: 16634 - DNA, 201 bp, Homo sapiens
tggaaatgtagaggcagatgataaagggatttgagcgccaaattaatgaatttggaatgtattatataagtaattggggagcatggaaatatttgcacagrggaatgacacgcataatgcccctttttagaaagattcccctgggaaccaaatgtaagcagatgagggtaaaggacatcaagaagggtgaaagattaggag

SEQ ID NO: 16635 - DNA, 201 bp, Homo sapiens
ggcttgaattctagaatgaggagccagccatgccatagcaggggaatgatactccttaaaagggaaaatttaactacaaatcctctgaagtagaaatgatragaataaccaaaatatctgcaatggttcaatagcaaataatttattggcagctgcttaccgtgttcattttgcatcttttttcccaccacacatattaag

SEQ ID NO: 16636 - DNA, 201 bp, Homo sapiens
tcatgaccaatgtgcacattcattcagccaatgtttactgagtggctactgtatgcgctgttctaggccccgaacattcaaacagggaacagacaaactcygacctcacaaagcttatgttcattttagtgataattttacaagtcattgctcctggattgccaatcaactgtgtaaagatgatttggaccaggaccttat

SEQ ID NO: 16637 - DNA, 201 bp, Homo sapiens
agattcccctgggaaccaaatgtaagcagatgagggtaaaggacatcaagaagggtgaaagattaggagaatcattatggagttattgttaacacatcagytgatagatgttggggattggacaagagttgtgcactgatgagaagaatgattatggggttattgttaacacatcagctgatagatattggggattggaac

SEQ ID NO: 16638 - DNA, 201 bp, Homo sapiens
ggtaatgaaaaccaaattgtgctattgtgctatctatctatctatctatctatctatctatctatctatctatctatctatctatttatctatctatctahagatagaacctcctcttttgaatttatgttttaagaatatcaagctatttgttgatatacatgattgccttctattgatctatagttctattacttttaa

SEQ ID NO: 16639 - DNA, 201 bp, Homo sapiens
atgtaagcagatgagggtaaaggacatcaagaagggtgaaagattaggagaatcattatggagttattgttaacacatcagttgatagatgttggggattrgacaagagttgtgcactgatgagaagaatgattatggggttattgttaacacatcagctgatagatattggggattggaacaagagttgtgcaacaaaaa

SEQ ID NO: 16640 - DNA, 201 bp, Homo sapiens
caaatactgtccggtaatgaaaaccaaattgtgctattgtgctatctatctatctatctatctatctatctatctatctatctatctatctatctatttawctatctatctatagatagaacctcctcttttgaatttatgttttaagaatatcaagctatttgttgatatacatgattgccttctattgatctatagttc

SEQ ID NO: 16641 - DNA, 201 bp, Homo sapiens
agaagaatgattatggggttattgttaacacatcagctgatagatattggggattggaacaagagttgtgcaacaaaaaataatctgtaagatatgacaawgaaatgatagacaacgtttaggtatatttttgactttttgaggaacgggctttctttctcctctcctctcccatcagccagatgctcgcaggcatgcttg

SEQ ID NO: 16642 - DNA, 201 bp, Homo sapiens
aacaaatactgtccggtaatgaaaaccaaattgtgctattgtgctatctatctatctatctatctatctatctatctatctatctatctatctatctattyatctatctatctatagatagaacctcctcttttgaatttatgttttaagaatatcaagctatttgttgatatacatgattgccttctattgatctatagt

SEQ ID NO: 16643 - DNA, 201 bp, Homo sapiens
tttgaggaacgggctttctttctcctctcctctcccatcagccagatgctcgcaggcatgcttggtgaaaggcttccttttttatgggagcttctggactragacaaccttttttctctctctgattagcacttccttttcattgatgctgccagttctttcaattgctccatttctattacattcaactcagttcatgag

SEQ ID NO: 16644 - DNA, 201 bp, Homo sapiens
cagttaatgttacttctataatgtaatattctgtaaaaacttttctctctctcttttattgtatttagcttacacctcctttatacaacattactaagatsgaagttccaacagcaatatggaatggtggacaggacattgtggctgatcccaaggatgttgaaaatttacttcctcaaattgctaaccttatttattaca

SEQ ID NO: 16645 - DNA, 201 bp, Homo sapiens
tgaaaaggggactgcattgacctcctgcttctcaggaggaatttaatgctagatatgcatcaacagagtttatcaaaattggtttgaattattggattagyctttaaatagttatcagggaggctcactctttgcctgataattctctgaagacagacaggaacctaaaaatacaaacagcaagactgatcttgctaactg

SEQ ID NO: 16646 - DNA, 201 bp, Homo sapiens
agctgaacacttccttttactccacatttgtttaattggcatgaaatttcccactccactaaaacagatcttaggatttggacaacacaaaatatcatttkttttgaaaggatttgaggataaatccaaactaatagaactgaaacttctatattatgctgggtagcaacttagttttccctacccttcttcatgctggga

SEQ ID NO: 16647 - DNA, 201 bp, Homo sapiens
ctgaaaaacaaatactgtccggtaatgaaaaccaaattgtgctattgtgctatctatctatctatctatctatctatctatctatctatctatctatctadctatttatctatctatctatagatagaacctcctcttttgaatttatgttttaagaatatcaagctatttgttgatatacatgattgccttctattgatc

SEQ ID NO: 16648 - DNA, 201 bp, Homo sapiens
ctatctatctatctatctatctatctatttatctatctatctatagatagaacctcctcttttgaatttatgttttaagaatatcaagctatttgttgatrtacatgattgccttctattgatctatagttctattacttttaaagcaagaggggtctcaaaagacaattgacttgataatatagctttgtcagaaagaat

SEQ ID NO: 16649 - DNA, 201 bp, Homo sapiens
cctctctcatcttaccctttcccccaccaggtccccggccagttgtgtatatgcagcatgccctgtttgcagacaatgcctactggcttgagaattatgcyaatggaagccttggattccttctagcagatgcaggttatgatgtatggatgggaaacagtcggggaaacacttggtcaagaagacacaaaacactctcag

SEQ ID NO: 16650 - DNA, 201 bp, Homo sapiens
tagcacttccttttcattgatgctgccagttctttcaattgctccatttctattacattcaactcagttcatgagagttgaactgaattgagtataaagcrtaaagacttaagtcagacagaactgggttcacattctgcccctgcctcctgcctattgtaaccttggacaagttatttaaccatgctaagcctcaatttt

SEQ ID NO: 16651 - DNA, 201 bp, Homo sapiens
tgtctgaaaaacaaatactgtccggtaatgaaaaccaaattgtgctattgtgctatctatctatctatctatctatctatctatctatctatctatctatytatctatttatctatctatctatagatagaacctcctcttttgaatttatgttttaagaatatcaagctatttgttgatatacatgattgccttctattg

SEQ ID NO: 16652 - DNA, 201 bp, Homo sapiens
gtcaagaagacacaaaacactctcagagacagatgagaaattctgggcctttaggtaaatattagctaagaaaactcaagggggaaattggaggcaatttwaaaaaaataacgtggacgctattaatgattatctttgacgcttgaagtcatatagctccttgtagtttctgttaagatctcaaaggagggtaacagcaag

SEQ ID NO: 16653 - DNA, 201 bp, Homo sapiens
gttcttctttttctggccaagacagttttaatgttccaacaagtgtttcagtacacacatacacacacacacacacacacacacacacacacacacatgcyagtggaggcccaggaagggacctctggaaaccaaattatatggatattctccctagcctacccagtgttgtgctaatctccatcctcacagatatacaaa

SEQ ID NO: 16654 - DNA, 201 bp, Homo sapiens
aagaaccatagccaggggtacataagtaatattggtggaactttgaaaaaatacacatgtccagaactcaacctttgagattttgatttttattcagtacrtttggatagcttataagtaggttaaaatatttttaaagccctaagatgtttctgatgcttactttggtggaaaataactcttttaatttaaaaaatagtg

SEQ ID NO: 16655 - DNA, 201 bp, Homo sapiens
aagctagttagatctttgtctgaaaaacaaatactgtccggtaatgaaaaccaaattgtgctattgtgctatctatctatctatctatctatctatctatstatctatctatctatctatctatttatctatctatctatagatagaacctcctcttttgaatttatgttttaagaatatcaagctatttgttgatataca

SEQ ID NO: 16656 - DNA, 201 bp, Homo sapiens
atctttgacgcttgaagtcatatagctccttgtagtttctgttaagatctcaaaggagggtaacagcaagaagctctgatttttcactgattctcccacargcaaagtatggcatttcaacaagatcatttttacatccaattctgtgaattctatgcattaaaagtatgtccaaagagacagctcaggaaattatcatga

SEQ ID NO: 16657 - DNA, 201 bp, Homo sapiens
ggcatttgccccttctaatccagtcccattttaacaaattacactccaagtaggaggataaacaagtcattttcattctaatccattcttggattcttccrtgtacctcattcctagggtagcttttccttcaaacttttgtgatctcaggagtctccattagggatttccagaaagtgattttccaaatggaatgaacaa

SEQ ID NO: 16658 - DNA, 201 bp, Homo sapiens
ctaaatataccgactgactgaattaattctgttacacaaaatttcagagtcctgtagaatattcatcacattttaaaattcagaaaacgaacgtcaacatwcagatctattcttagtgtcttagggccaacagctctctttgaatgtcctttgggacttaacacggggtgaaggagaagatcactggggtttttatccttt

SEQ ID NO: 16659 - DNA, 201 bp, Homo sapiens
attccaatcaccatttatttactcttgcaaattagaggagacaaattaaaactagatccaacttgaatgtctagctaagtgtcctgtgtctttttttttttaaagaatctacatttgaatatacctcctacagaaattcaaatacaaaatgagctctagagaataccacacatacatgctgcacattaagcaggaagcgag

SEQ ID NO: 16660 - DNA, 201 bp, Homo sapiens
gttctaggccccgaacattcaaacagggaacagacaaactctgacctcacaaagcttatgttcattttagtgataattttacaagtcattgctcctggatkgccaatcaactgtgtaaagatgatttggaccaggaccttattgatttagagaaactgtgattgatttagagaaactgagatcgcacatagtaccattttc

SEQ ID NO: 16661 - DNA, 201 bp, Homo sapiens
tctattcttagtgtcttagggccaacagctctctttgaatgtcctttgggacttaacacggggtgaaggagaagatcactggggtttttatcctttaatcycctatacccttgaacctatgggagttgagtctggaaaaagatagatttccttttgtctttgccccgcgggatgccctctgtaggctttctgaagacactg

SEQ ID NO: 16662 - DNA, 201 bp, Homo sapiens
aataggaagagaggaagtcaaactacttcttttcatggatgatgtgattctatatctaaaaaaccccatagtctcattctaaaggctccttacactgatawcttcagtaatgttttaggatacaaaatcaatgtaccaaaatcagtaacaatgtccaagctgacagccaagtcaagaacataatcccaatcataatagcca

SEQ ID NO: 16663 - DNA, 201 bp, Homo sapiens
gaccttattgatttagagaaactgtgattgatttagagaaactgagatcgcacatagtaccattttcaggaaaactccaatattagatttttaaaaccttkttaatgggcaatgaagaagaatcttttttgatatcttgtttcttttaatggaagagttttctgctgtcaccagaggacaggctgatgcctgcgatagact

SEQ ID NO: 16664 - DNA, 201 bp, Homo sapiens
ggagaagatcactggggtttttatcctttaatctcctatacccttgaacctatgggagttgagtctggaaaaagatagatttccttttgtctttgccccgygggatgccctctgtaggctttctgaagacactgctgaggacaggacagagctggtggaggaaaaagttcttcaaagatgggcttttttggttaatatgtc

SEQ ID NO: 16665 - DNA, 201 bp, Homo sapiens
aatagcttaaacccaggaggcagaggttgcagtgggctgagattgtgccatggcactccagcccaagtgacagagcaagactccgtctcaaaaaaaaaaaagaaaacaataataatattaaatgccatttatgacaaacccacagccaacataatactgaataggcaaaagcttgaagcattccccttgagaactgaaaca

SEQ ID NO: 16666 - DNA, 201 bp, Homo sapiens
ttttctgctgtcaccagaggacaggctgatgcctgcgatagacttttctttcttcaggcctaagctccctgttggtttgtaaacctgatgctagaacagastgtgtattcctattacattaataaaacattcagtacccactgaaagtttgagaatagtggaggaatagaatagaatgttatagtctgagttcttgggcag

SEQ ID NO: 16667 - DNA, 201 bp, Homo sapiens
tcaaaaccacaatgagataccatctcatgccagagagaatggcgattattaaaaagtcaggaaacaatagatgctggcgaggctgtggagaaataggaacrcttttacactgttgatgggaatgtgaattaattcaaccattgtggaagatagcatggctattcctcaaggatctagaatcaaaaataccatttgacccag

SEQ ID NO: 16668 - DNA, 201 bp, Homo sapiens
ctggtggaggaaaaagttcttcaaagatgggcttttttggttaatatgtcttcagattatatggtacatgttttttccttaaagaaagggaaaagaggccrggtgcagtggctcacacctgtaatcccagcactttgggaagctgaggcaggtggatcacgaggtcaggagagcgagaccatcctggctgacacagtgaaa

SEQ ID NO: 16669 - DNA, 201 bp, Homo sapiens
catctcaacaaacatatgaaaaaaagctcaacatcactgatcatcagagaaatgaaaatcaaaaccacaatgagataccatctcatgccagagagaatggygattattaaaaagtcaggaaacaatagatgctggcgaggctgtggagaaataggaacgcttttacactgttgatgggaatgtgaattaattcaaccattg

SEQ ID NO: 16670 - DNA, 201 bp, Homo sapiens
attagccaggcgtggtggtgcgcacctgtagtcctagctactcgggaggctaaggcaggagaatggaacccaggaggtggagcctgcagtgagctgagatygcaccactgcactccagcctgggtgacagagcgagactccatctcaaaaataaaaataaaaataaaaataaaaaaaagaaagaaagggaaaagaggaaaa

SEQ ID NO: 16671 - DNA, 201 bp, Homo sapiens
tcaatagacacagaaaagactcttaagaaaattccacatcccttcatgttaaaaaccctcaacaaactaagcatcaaagaaacttacctcaaaataataaragccatctcaacaaacatatgaaaaaaagctcaacatcactgatcatcagagaaatgaaaatcaaaaccacaatgagataccatctcatgccagagagaa

SEQ ID NO: 16672 - DNA, 201 bp, Homo sapiens
ttttcctaggacttggcaacaagcattttgagaaatttattctgcccttgaacatctttgagcccattgagatgttctccaacgcaaacagtaggttaagygtcctcactttacaatggcaaatcacttaatggaggtcatgtgggttcctgaaatgtttgatgaaagcctctggtttgaatgttacaacactactggtta

SEQ ID NO: 16673 - DNA, 201 bp, Homo sapiens
tgggaaaatcacataataacctcaaatcagtaaatgtttatggaataactattataaacaacatttaaaatcaccatgattactttgaacacacgttatayagagattggatatagagaagtcaaaggcccacacatccctcacccaaatctgggctctcaaaataagcaggcaaaagtcttaaacacaaagcataataag

SEQ ID NO: 16674 - DNA, 201 bp, Homo sapiens
  misc_feature (1)...(201): n = A,T,C or G, or insertion/deletion polymorphism (see Tables 1-2)
caaggaaatgtattcactttcattttgtctttttcctttcagctttgatgaaatggctaaatatgaccttccagccacaatcgacttcattgtaaagaaanctggacagaagcagctacactatgttggccattcccagggcaccaccattggtaagtaatggcagtcaaggccaagtggtttacttctcataaacacttt

SEQ ID NO: 16675 - DNA, 201 bp, Homo sapiens
ctccagagctagcagaagaaaaaataaccaaaattacagcttaactgaatgaaactgagatgcaaagaaacatacaaaagatcaacaaaatcacaagttgyttccttgacagaataaataaaattgatagactgctagctagactaataaagaataaagagagaagattcaaataaatacagtcagaaatgacaatgggga

SEQ ID NO: 16676 - DNA, 201 bp, Homo sapiens
aaactgagatgcaaagaaacatacaaaagatcaacaaaatcacaagttgtttccttgacagaataaataaaattgatagactgctagctagactaataaakaataaagagagaagattcaaataaatacagtcagaaatgacaatggggacattaccaccaccccacagatacataataatccctcagagactatcattat

SEQ ID NO: 16677 - DNA, 201 bp, Homo sapiens
ttattatttactttcataggctgtttttggtaccaaaggtttctttttagaagataagaaaacgaagatagcttctaccaaaatctgcaacaataagataytctggttgatatgtagcgaatttatgtccttatgggctggatccaacaagaaaaatatgaatcaggtatgtatgataattatagggccatttgatacctt

SEQ ID NO: 16678 - DNA, 201 bp, Homo sapiens
actatatttctgagcaactatttatgtaagactttgcccatattctttttttgagatagagtctcgctgtcacccaggctggagtgcagtggcgcgatctsggctcatagcaagctccgcctcttgggttcacgccattctcctgcctcagcctcccgagtagctggaactacaggcgcccgccaccacgcccggctaatt

SEQ ID NO: 16679 - DNA, 201 bp, Homo sapiens
aactgaatcagtactaaaacactaccaaccagaaaaagccctggaccagaatgaattacagtccaattttaccatacatgtaagaagagctggtgccaatyttattgaaataattccaaaaaatcgaggaggagggactcttctctaactcattttatgaagccagcatccatcattctgatgccaaaatctggcagaaac

SEQ ID NO: 16680 - DNA, 201 bp, Homo sapiens
aagaagaaattatgttaactgcgcatctgttttccaaaggaatgttgatgttctgtctctcattctcccacatgactatgcattcctgctctggtggctaygctcatttaaagaggtttacaaagctgccctcaaagtactacacccctgtgtgtgagagacttcccaggacttaccactacccattgccattacacagac

SEQ ID NO: 16681 - DNA, 201 bp, Homo sapiens
cacagacctgtcccatatcccagatccccagcacactgtcctctcctttctgaagtactaatacctgatataataagctaataattctaactgttcatggmatttctggtcttcttaaacaataccctttcctttgttgacagccagaggagtgatttcaatgggatatattcccaaatagaagaaaaagatgccgtgctt

SEQ ID NO: 16682 - DNA, 201 bp, Homo sapiens
taccaggttggtctttaactaactgaagcaatgacactaatttaagagccagggccagcatctagaaaactctttgaataataggatgtaagtaaaataarctgggtttataattatgaatattctccacacactcccttttctctaatatttaggaaatataatagaaatcatgaaaatattagggaaaattacatatca

SEQ ID NO: 16683 - DNA, 201 bp, Homo sapiens
ggtaagtattcaacaattacagctccataactgaaacaactgacctatcccctgaccataactgggaagtcaatacaaagccaaaataaatgactcaggayattttgagatcatattttagagtgtttgggtagaaacaacctattaacaattagaatctaatcaaatccatttcccttagcttgagttgcaatctatgtt

SEQ ID NO: 16684 - DNA, 201 bp, Homo sapiens
gtaaccaagctcttaacctttatgctttaatattataagtatgtattataaactagccattcagaacaagaagaatgataaggaaaacactgttcctgccyaagtggcactcagagtaatgaaaacatcagatactatacagctatagtttgagtatcctatgtccaaaatgcttgagaccagacatattttgaattttgt

SEQ ID NO: 16685 - DNA, 201 bp, Homo sapiens
tttggagccaatggcatcagcatcacctatgaatgcagaatctcaggctgttccccagatctactgaaacagaatttttacttcaacaagatcttcaggtrattcacaggcccattagaatttgacaagcacttatctaaaacatattgcattcactttgctctgtggataaaggtggttttctctgtgcaatcattgcta

SEQ ID NO: 16686 - DNA, 201 bp, Homo sapiens
tacccaaaggaatataaaccattctactataaagatacatgcacatgtatgtttactgcagcactgtttacaataacaaagacatggaaccaacggaaatrcccatcaataatagactggataaagaatatgtggtacatatgcaccatggaatactatgcagtcatagtaccatgcagccaatgagataatgtactttgc

SEQ ID NO: 16687 - DNA, 201 bp, Homo sapiens
agttaagagtatggatttagatcagtttaaattcaaaccctacatttggaactgacttaaacgtctctgtcttgatttcctcatccacaaaatgggttatygggaagatcaaatgagctagtatgtttaaagcatatagaacattgtacaaagcatatagcacatagtaatagcatataaggttttctactactattcata

SEQ ID NO: 16688 - DNA, 201 bp, Homo sapiens
ccagaggacaggctgatgcctgcgatagacttttctttcttcaggcctaagctccctgttggtttgtaaacctgatgctagaacagactgtgtattcctaytacattaataaaacattcagtacccactgaaagtttgagaatagtggaggaatagaatagaatgttatagtctgagttcttgggcaggggcaagcatcag

SEQ ID NO: 16689 - DNA, 201 bp, Homo sapiens
tttaggaggtgtcacaacaattctcctattcttgtaagtcccaatctatagatttcctcacatgttcttttaataaacaggcttctagcttatggaatacytgatttgactaaatgttatataggcccttttgttcctcctgtctgaagaacaaaatactagtactatggaatattggtatatattaaatatatatctata

SEQ ID NO: 16690 - DNA, 201 bp, Homo sapiens
gtactctaagtagctgtgagcctgcagtgcacagactatatgtagggcaaacctttcctgggtctctggtcacagcagcatattgactacggtgatgcaayttcccaggaataacatgtgttccaaattcaaagaaataattccacagagtaagtttctagattccctctgagctgaaaaagtaaaattcaatgccatgga

SEQ ID NO: 16691 - DNA, 201 bp, Homo sapiens
ataacagcagaatacatattcttctcatgtgcacatggcatatactctaaaatcgaccacacactcaaccataaagcaattctcaacaaattaaaaaaaaactgaaattatactatgtacactcatgaatcacagtacaataaaagtagaaatcaataccaagatgatccatcaaaaccatgcaattagacaaccttctcc

SEQ ID NO: 16692 - DNA, 201 bp, Homo sapiens
aatgtaagcactatgtagaaatttctaaagttttttaagctgacaacttacttcttaatttacttactttacttaatttactttacaatttactttccagrtattttggaaagaaatcaataatctagttccaagtaaaagttgaaaggaacccacactaataaaagctttgaatttgtcattgaacttccactaaagttt

SEQ ID NO: 16693 - DNA, 201 bp, Homo sapiens
aataattatctgaaaactatgaactactgtcttcttccatttcagcttttatagcattttctacaaacccagaactggctaaaaagattaagatatttttkgcactggctccagttgtcacagttaaatacacccaaagtcctatgaaaaaactaacaaccctttccaggcgagtagttaaggtatgtgacttcccaagtt

SEQ ID NO: 16694 - DNA, 201 bp, Homo sapiens
agtgcttcttattcctgcttgatgcacacatatctctgcaagaccctcaagaagtgctctcagagaactcactgcagggttctgctggcacctgccactgycacattgatgtttttggaatcagcatcaactcttcatttttatttacttcattcccatttcttctccttgtcctcagtgtctgggttttgagcatggttc

SEQ ID NO: 16695 - DNA, 201 bp, Homo sapiens
gcggtcaacatttaaatttgggaaattcagagaacccctgcaagatagtatataagacaaccatccccaagacacatagtcatcagattctccaaggtctrtatgaaagaaaaaatattaaaggcagctagagagaaggggcagttcaccaacaaagggaacctcatcaggctaactgtggacctttcagcagaaacccta

SEQ ID NO: 16696 - DNA, 201 bp, Homo sapiens
acacataagcataatatttgatgactgaataattccattttttctcacccataatttaggtcaacagtctcttacttcgggaaattttactgtcttaagayatataataagaaataattttatacccagtgtttatatagacgtcatttttcttttagatagattcctgaaaacaaaattactgagtgaaggttatgaata

SEQ ID NO: 16697 - DNA, 201 bp, Homo sapiens
aaagaatttaaaaaatgaacaaaatctgcagaaaatataggattatgtaaagacaccaaacctacagctctctggcattcctgaaagagaggaagagagaggaagtaacttggaaaacatatttgatgatattgtctatgaaaatttccccaacctcactagagcggtcaacatttaaatttgggaaattcagagaacccc

SEQ ID NO: 16698 - DNA, 201 bp, Homo sapiens
ggtagaatcatggctcactgtagccttgacatcctgggtttaagcaatcctcccatctcagcttcctgagtagctggcaccacaggcatgcaccaccatgmccagataacgtttgtttctttttacaaagatgaggtcttgttttgttgcctaggctggtcttggactgctggactcaagcaatcctcccacctcagccta

SEQ ID NO: 16699 - DNA, 201 bp, Homo sapiens
atttcattccatagtgagaaagaaaacctgttagaataactgggtgatgctgcagaaagaaatcaattcacctcctgtgactgattatttgcttctggaarctctgtgattcattctggcatctcagagttagggatgaaatgagaatgttgccagcatttaccccatgcttgggaagtttacacagcagtagctactcca

SEQ ID NO: 16700 - DNA, 201 bp, Homo sapiens
aaaagaatttaaaaaatgaacaaaatctgcagaaaatataggattatgtaaagacaccaaacctacagctctctggcattcctgaaagagaggaagagagaggaagtaacttggaaaacatatttgatgatattgtctatgaaaatttccccaacctcactagagcggtcaacatttaaatttgggaaattcagagaaccc

SEQ ID NO: 16701 - DNA, 201 bp, Homo sapiens
taacagactcacagctccacaggctgtacaggaagcatggctaggaggcctcaagaaacttacaatcaatcaccgtggaaagtgaaggggaagcaagcacrtcttaccacggtggagcaggagagagagagcacaaagcgggaagtgccacacactttcaaacaaccagatcttgtgagaactcacttactatcaggagaa

SEQ ID NO: 16702 - DNA, 201 bp, Homo sapiens
tatacaaggtcatcagcaggctgagtatatgtcagaatttctagctgaactgagtgctatatgacaacaaggatttttcttgttttcccaagtgttttttkttccatttagtcaggtaggtcaatgaattcacattgcccaaatgaaagacacttcaagttacccataatcactgatgtgtccaattttgacattagaaaa

SEQ ID NO: 16703 - DNA, 201 bp, Homo sapiens
agcttaggaaaaaatctcagagattgaagactggttatttcagtgaacccagtcagacaaaaataaagaaaaaagaatttaaaaaatgaacaaaatctgcwgaaaatataggattatgtaaagacaccaaacctacagctctctggcattcctgaaagagaggaagagagaggaagtaacttggaaaacatatttgatgat

SEQ ID NO: 16704 - DNA, 201 bp, Homo sapiens
ggctaggaggcctcaagaaacttacaatcaatcaccgtggaaagtgaaggggaagcaagcacatcttaccacggtggagcaggagagagagagcacaaagygggaagtgccacacactttcaaacaaccagatcttgtgagaactcacttactatcaggagaacagcaaaggggaagtccgcccccatgattcagtcacct

SEQ ID NO: 16705 - DNA, 201 bp, Homo sapiens
gctaatctgggacagtactcgaatgcagtgtacacatgggtaacatggaaaaccccgattttcccttatattcaaggtattatttgaccttaagaaaaacygttttacatttcataccaattaatgagaaaaaaatattggcaagcactgactgggcagaatacagggaagcttcactatggagaagtgaatttgggattg

SEQ ID NO: 16706 - DNA, 201 bp, Homo sapiens
tcattatttctaattcttacaaggaccttgcaaggtaaatattattatccctatttttttcagaggttcagagagggtaggtaaattaccagagttattcagctagtaaacaaccagagacaggggctcaagatggtcaactggatacagccaggaagagtttctcccattaagagacaagaccatcaagaagattggaac

SEQ ID NO: 16707 - DNA, 201 bp, Homo sapiens
tcaggagaacagcaaaggggaagtccgcccccatgattcagtcacctcccaccaggcccctcacctgacaagtgtggttacaattagagatgagatttggrtggggacacagagccaaaccaaatcatcagatttgatcctagagcccaagttcctaagtagtacgtcctattgcctctcatttctaaaagcttgcagaat

SEQ ID NO: 16708 - DNA, 201 bp, Homo sapiens
tgtataaattcatatggtattccaaacccttaaagacagatttttttttgcttttaaaaatgtttatgggtatataatagttgtacatatttatgagacayatatattttgatataagcatacaatgtgtaatgaccaaatcagggtaattgggatatccatcacctcaagcatttatcatttctttttgttagagacatt

SEQ ID NO: 16709 - DNA, 201 bp, Homo sapiens
gagccaaaccaaatcatcagatttgatcctagagcccaagttcctaagtagtacgtcctattgcctctcatttctaaaagcttgcagaatttcaacagcavactgctgcctctctgaatataaatcatgatgagaataattttaaactaaaaatcaggactaaattggtaagtgggaaaaatatctgagattcaagctaag

SEQ ID NO: 16710 - DNA, 201 bp, Homo sapiens
atagttataagagcagttatgacagcaataataattattgcttctgaaggtgatattattattgctgccatagagttgcaccagaatcaagctatattaayctgtattaatttatatgtcaatatattatattactatacaatagcaaaacagattagcagggagggtgtattttctaacataatttgaagatctgtattt

SEQ ID NO: 16711 - DNA, 201 bp, Homo sapiens
atattactatacaatagcaaaacagattagcagggagggtgtattttctaacataatttgaagatctgtattttataagtaactgtaaaaggaagccctcytgaaaaatgttccccttggttgtttttgcaaagttgttctttgctttaaacttaagtagtttcaaagacaaatgagaaatactcataatctttttctctc

SEQ ID NO: 16712 - DNA, 201 bp, Homo sapiens
cctagctactcgggaggctaaggcaggagaatggaacccaggaggtggagcctgcagtgagctgagatcgcaccactgcactccagcctgggtgacagagygagactccatctcaaaaataaaaataaaaataaaaataaaaaaaagaaagaaagggaaaagaggaaaagaagaaactttttaaatttctctcaaatgttt

SEQ ID NO: 16713 - DNA, 201 bp, Homo sapiens
ataaatgtcaaaattatctgcctcatcaatcctatatgggtggcaaataacagaaaaatgaagtgctgcatatatgcatgaccttatattctaatatttgragtttcaataccaaaatgcaaaagtagtcatgcacagtgtctcagtcagcccatggctacattatgcacatcacagcaggtggcttgactccacatatgg

SEQ ID NO: 16714 - DNA, 201 bp, Homo sapiens
agagaatcaagagtttttgtgtgtgttttgtttttgtttttgttcttgtgtgtgtttgtggttgtttatccataagatatctaaatataccgactgactgaattaattctgttacacaaaatttcagagtcctgtagaatattcatcacattttaaaattcagaaaacgaacgtcaacattcagatctattcttagtgtct

SEQ ID NO: 16715 - DNA, 201 bp, Homo sapiens
tgactccacatatgggaggcagagagcagccatgtaccttacacagaactgcggaagctcagtgggtgaatatttcttttaatagtaaaaaaaaaaaagtytaaggatagggaatataatcataacagtttagaccacatcatgaggataaggtacaaagttgtataataacaatagcagtaatttttaaatgtaagaaat

SEQ ID NO: 16716 - DNA, 201 bp, Homo sapiens
agaaaatttagaaagtgtgaaaaacactttaaaaatgagaaaataatcatccaaatattcaccatctagatataactataattaaaatttgatgtttaggytttttttttctattatggtttgtgtcatcattgaactcaaaatatatgcacaatttgaagtctgtttttccctatgtattatgtagtaggaattttcaca

SEQ ID NO: 16717 - DNA, 201 bp, Homo sapiens
ctataattaaaatttgatgtttaggctttttttttctattatggtttgtgtcatcattgaactcaaaatatatgcacaatttgaagtctgtttttccctaygtattatgtagtaggaattttcacatatcacacataagcataatatttgatgactgaataattccattttttctcacccataatttaggtcaacagtctc

SEQ ID NO: 16718 - DNA, 201 bp, Homo sapiens
tgtagtaggaattttcacatatcacacataagcataatatttgatgactgaataattccattttttctcacccataatttaggtcaacagtctcttacttygggaaattttactgtcttaagatatataataagaaataattttatacccagtgtttatatagacgtcatttttcttttagatagattcctgaaaacaaaa

SEQ ID NO: 16719 - DNA, 201 bp, Homo sapiens
atggcaagtttgatatctgtactggggactacacatggtttgtttggaaaattacatcctggaagccctgaagtgactatgaacattgtaagttactctgsggaaaaactctataaaactaaaagatgctattatttaaaatcataatgagttaaagattttatatgaccaattaaaaataaacagtaatattcatttatt

SEQ ID NO: 16720 - DNA, 201 bp, Homo sapiens
taatcaacaattaaaatacggtgttaagaaacaggtgacatctaccataatggattcttggttctctgttctgaaacctggagttggcttttccaaatacrgagtaaagatcttaaagtgaattagatcttaaatgaataaatgctagttattactgttctttagttgtaatttctggttaataaagaattctagaagaaa

SEQ ID NO: 16721 - DNA, 201 bp, Homo sapiens
ttttctcacccataatttaggtcaacagtctcttacttcgggaaattttactgtcttaagatatataataagaaataattttatacccagtgtttatatasacgtcatttttcttttagatagattcctgaaaacaaaattactgagtgaaggttatgaatacttttaaatttacaagacatgttaacaaatttttttcat

SEQ ID NO: 16722 - DNA, 201 bp, Homo sapiens
aactaacacaggaacagaatatcaaataccacatgttcttactcataagtgggagttgaacaatgagaacacatggacacagagaggggaacaacacacascagggcctgtgtgtgagggttggatggcgagggaagggaacttagaggatgagtcaataggagcatcaaactaccatggcatatgtacacctatgtaaca

SEQ ID NO: 16723 - DNA, 201 bp, Homo sapiens
atgaatacttttaaatttacaagacatgttaacaaatttttttcataaaggttttgccaatgattaactctaccatcagaaaaaagtaccaaccaatctartaactagagataccaaatgtgctttgattaatttattggccattatatttcttttccacacattatctattccctcttttgtccagttatctactggaaa

SEQ ID NO: 16724 - DNA, 201 bp, Homo sapiens
accgccagttaatgttatacactctacttgaatagtaagtactgggtttaaagtgtggttacctaaactctggttctttctcttgtgttttctagtcccarcctccctactacaatgtgacagccatgaatgtaccaattgcagtgtggaacggtggcaaggacctgttggctgacccccaagatgttggccttttgcttc

SEQ ID NO: 16725 - DNA, 201 bp, Homo sapiens
ttatactatgttacggtttgatgtataaaatataaatgagataaggaatatcttgtacccagcatagtgtataaaacatagtgagtattcacaaaaacctrttaacaatgtttattatattgtcacatccctcaacctttgttaggaagccccaaacttaatttgttttaagcaagaaattgctaaaagaagataacttgg

SEQ ID NO: 16726 - DNA, 201 bp, Homo sapiens
caatgattaactctaccatcagaaaaaagtaccaaccaatctaataactagagataccaaatgtgctttgattaatttattggccattatatttcttttcyacacattatctattccctcttttgtccagttatctactggaaacttgattgattggtttctctgttcctttccattcattccctcttttcttctttcctt

SEQ ID NO: 16727 - DNA, 201 bp, Homo sapiens
cctgtaattccagctacttgggaggctaaggcaccagaatagcttaaacccaggaggcagaggttgcagtgggctgagattgtgccatggcactccagccyaagtgacagagcaagactccgtctcaaaaaaaaaaaagaaaacaataataatattaaatgccatttatgacaaacccacagccaacataatactgaatag

SEQ ID NO: 16728 - DNA, 201 bp, Homo sapiens
ttgtataattcagtattctactggttaaagcacagcctagaagtatgtttctgctctctctcatagcagtgttataaaaagattacaccaaatttcacttygtagaatttatctttgatgacaaatatattaaatttcctttcctaggcagatcccaaatgtggcagcttttagcagcagcatgctggatgcttcttcttg

SEQ ID NO: 16729 - DNA, 201 bp, Homo sapiens
ctcttttttagaatgtcagagactactgcttttcaatacacaaacccaagagttaattaggagattaaaaatggtggcattccaatttgatcagttcttcrtttattaactgaatacttccataaagaggaattgttgtcacatatatttaagttatccaaaatccatgattctttccctttatttatgaatttccaaaat

SEQ ID NO: 16730 - DNA, 201 bp, Homo sapiens
agtgggctgagattgtgccatggcactccagcccaagtgacagagcaagactccgtctcaaaaaaaaaaaagaaaacaataataatattaaatgccatttmtgacaaacccacagccaacataatactgaataggcaaaagcttgaagcattccccttgagaactgaaacaagacaagaatgtccactgtcaccactccta

SEQ ID NO: 16731 - DNA, 201 bp, Homo sapiens
ctggatgatatgaattgccatatctgtgagttcaatatttaagaaaaacatctatgcttttctaaatttcctcaaaggtcttcctataagtgctaagaatyccttgttctttattggagtaaacccaattcatgtgtgccagtagattacctgacttactatcttactgttcaatttatgtcactgtagctaagtcagtac

SEQ ID NO: 16732 - DNA, 201 bp, Homo sapiens
acagaccctccatttgtttaggggaaagtaagggaaaagaacaagatactctgcctggtaatccagagaattcttctggatcttatccaaaaccaccaagrtggtacctctataagtctgcaagagctacagtgttactgggctaagggtgcctcctaacgcagatatggctgcagtgaccaagaacttagatcacagcac

SEQ ID NO: 16733 - DNA, 201 bp, Homo sapiens
aatacctagaaagccttccaataagggtgggtacaaacaagcccagactgtgaagactacaacaaatacataactcttaaatgcccagacactgacaaacrtctgcaaacatcaagaccgtctaggaaaatatgacctcaccaagtaaactaaataagccaccagggaccaaccccagagagacagagaaatgtgaccttt

SEQ ID NO: 16734 - DNA, 201 bp, Homo sapiens
ctgtacactgcctcaagggaaaatgttactcaagtcagagttcccattgacttgactacacaatccttgattcatattttaatttggcatttagagattgyaaaacagtgacgtggttctcattacatttttgagttctaatgtgatttaagaagtgctttggagtagggtgaaaacagattgctagtatttataccttga

SEQ ID NO: 16735 - DNA, 201 bp, Homo sapiens
tattggattaaaaataaaatcctaaaaaaggagagaagcacatataaacctgcgtcttatttcatgtgttcctttctttgtgggtgacttttgttttgaartaaaacctgcaaaataacaggacagggtggaagggagatgggatcccctctttatgaagaagcagcagtcctgttttatcacctcttcattttctgttat

SEQ ID NO: 16736 - DNA, 201 bp, Homo sapiens
ttattttctaagacatagaattatgattactattttatctctataattttcatctctataacgtttacaaatactgaaataacctttggaaaaaattggcytttagctttacttttgcaatattttattttatccccataaaagcctaggaaattggtactatgacttttagtatgttcatttaatagatgaaaacacaga

SEQ ID NO: 16737 - DNA, 201 bp, Homo sapiens
aatagcagtaatttttaaatgtaagaaatgtatagctaatgcctttttaaaaaaattattaaaattcctgaagcaaagatattcaagaatcattcaattcygcatctttaaaaaatatttctgtgtgtaacatggtaacatttaaaggcattggatttaaatgaaaaatctgaggattttcactggaaagatacaggaatg

SEQ ID NO: 16738 - DNA, 201 bp, Homo sapiens
gcccattccattagtcagcttgtggttcactcacattaaagtattgacctaaatggtatatttatctagataattctaccttgttattttcaaagccccartcttgtttgctaattctgtgcatcatttttctctgattctgaaaggcaaaattttgttgggcaattgctgtaatatgagttttatctcctttagagtcga

SEQ ID NO: 16739 - DNA, 201 bp, Homo sapiens
tatattattttaacgtgcttattttattttaggctgttaattctggtcagctccaagcttttgattggggaaactctgatcagaacatgatgcacttccaycaggtacaaaaataatcctcataatcagttccatgctgcaaatgaactaacaaaaatagtgtctactcatgaagcacctgccacttccatttaaccacac

SEQ ID NO: 16740 - DNA, 201 bp, Homo sapiens
agaagtatctgggatttaacttctttctaatgaggcttggttttccatgaacttttcctttaaaccaaggggggtattgctcatctttctgttgagccccrtttgtcataattgtaaaatgggtggttacatccttctggtgatctaggagccctattttcgtcctagcatacagcatttttctaaaatttgctgttagct

SEQ ID NO: 16741 - DNA, 201 bp, Homo sapiens
ctcaattccctgtcctctgctgggaataaccctagtactctaagtagctgtgagcctgcagtgcacagactatatgtagggcaaacctttcctgggtctcwggtcacagcagcatattgactacggtgatgcaatttcccaggaataacatgtgttccaaattcaaagaaataattccacagagtaagtttctagattccc

SEQ ID NO: 16742 - DNA, 201 bp, Homo sapiens
cagaacatgatgcacttccaccaggtacaaaaataatcctcataatcagttccatgctgcaaatgaactaacaaaaatagtgtctactcatgaagcacctrccacttccatttaaccacactggatattgcttattgctgttctcacaggctgcttattgggttcttgccatatgccatatcattatttctaattcttaca

SEQ ID NO: 16743 - DNA, 201 bp, Homo sapiens
tgttgagccccatttgtcataattgtaaaatgggtggttacatccttctggtgatctaggagccctattttcgtcctagcatacagcatttttctaaaatktgctgttagctttcatgattcttaccctaactattctttttctaaaaaacatttgtttcagctttaccactctgatgaattcagagcttatgactgggga

SEQ ID NO: 16744 - DNA, 201 bp, Homo sapiens
cttctctcactggtcttcttgtgccttattcctggaaattactgatggaggtagagaacagaacaaaacctggctgctgatgctaaggcatgaaagtgttycaagagttctaggagctgaaaggaaacctgtgtgtcccaggtgtagcgggaaaagggaaaatgacatgagtgaagactgaggtgcagatggggcagtagt

SEQ ID NO: 16745 - DNA, 201 bp, Homo sapiens
tcagagcttatgactggggaaatgacgctgataatatgaaacattacaatcaggtgagctatttacagtaaccccagcatgctgattttgataaattatartaaaaaattatttgagggtggaaagactcctacctgtcatttggtggcatttatactgatagaacttttttttaaaaaaattttaattttaattttaatt

SEQ ID NO: 16746 - DNA, 201 bp, Homo sapiens
tattatccctatttttttcagaggttcagagagggtaggtaaattaccagagttattcagctagtaaacaaccagagacaggggctcaagatggtcaactrgatacagccaggaagagtttctcccattaagagacaagaccatcaagaagattggaacactctgagcagatcttcagaagaaaggcattgagaatgaatg

SEQ ID NO: 16747 - DNA, 201 bp, Homo sapiens
tagctttcactctgataaaaaaagaaaactgcagaataattttgaatcgaagagttacatgattcataacaggatcccttttgttgccaggggcaaagagscaggagcagagaaccaattagaggactcttatagtacccatgcaggagatggtggtgacctggatgaagggtgttcttggaaaaaccattcttccacaaa

SEQ ID NO: 16748 - DNA, 201 bp, Homo sapiens
cccagcatgctgattttgataaattataataaaaaattatttgagggtggaaagactcctacctgtcatttggtggcatttatactgatagaacttttttytaaaaaaattttaattttaattttaatttatttcagaaaatttataaattaaagaagcatatacaaagaaacttacatcatgtgtaatccttccatccag

SEQ ID NO: 16749 - DNA, 201 bp, Homo sapiens
gaaccataaaaagaacgaaactgccaaagttttttttcattagtatctcttcttgttcctctctccaaagtatccagcaagtacccttgatctcctaccamactgttgaactcacataatttttctctctctagcatgagggatttttagcttttaaaccttctataatgataagaacaatcatctataaagcatttatgt

SEQ ID NO: 16750 - DNA, 201 bp, Homo sapiens
tcaactggatacagccaggaagagtttctcccattaagagacaagaccatcaagaagattggaacactctgagcagatcttcagaagaaaggcattgagartgaatggaggtaggatgtggagcctgggctagagggaggattctgggaagcctgaacggggttgctgagcaccaggactcacttcaggccctgagtagct

SEQ ID NO: 16751 - DNA, 201 bp, Homo sapiens
ttgcaaattctgaagtgacatacaaatgtgttgttcatatccttccagtaaatgctacctttaaacacttgacctgaatcagaaaacataaatctttactktttttaagaaactgagtatgtgtcttagtatgtatataatatgtgtgtctgttgatttctagagtcgcttggatgtgtatctatcacataatccagcagg

SEQ ID NO: 16752 - DNA, 201 bp, Homo sapiens
atttggaccatttctatggcttatctagattttttcaggacttgccttcaacctattctttctgtaggtgattccattaactgttgcccatatggtagtcygaagacagacctccgagaaatgacccttgtctccaaaacttccgcaatatgtccaaatttcctagcctgacattcagactttgattatctgcctccaagt

SEQ ID NO: 16753 - DNA, 201 bp, Homo sapiens
cctctctccaaagtatccagcaagtacccttgatctcctaccacactgttgaactcacataatttttctctctctagcatgagggatttttagcttttaawccttctataatgataagaacaatcatctataaagcatttatgttaagcattattctacacatattacatataatcctcacaatgtcacagtctgtctcca

SEQ ID NO: 16754 - DNA, 201 bp, Homo sapiens
tgcaatggcccattcttactatggacctacctgtaggacaccccacaacccccatagacatttgagctagtaggcagagctgtttggggagttggcagggwcaggactcttgcctgtgcaaagcccaaagggtttggtgcaggaacggttgcagtgaagtatggccagggacatccattccctaaggctcgccaagcacct

SEQ ID NO: 16755 - DNA, 201 bp, Homo sapiens
actttgattttgtctggggcctcgatgcccctcaacggatgtacagtgaaatcatagctttaatgaaggcatattcctaaatgcaatgcatttacttttcrattaaaagttgcttccaagcccataagggactttagaaaaaatagtaaccaacaatgaggttgtcccccagcaccctgggggagatgcacagtggagtct

SEQ ID NO: 16756 - DNA, 201 bp, Homo sapiens
acagcttttgcagatgggtccctaccagtgtgaacatacttgcagcctcccctgactgctttgcaagcatgcgtgtgtgcaaaccttgccaccaccaccaygatgaagtgcttttgccccacctcccatcagagtgttgttgccagtatatgaggaacatctcagcctctccagtgcagcagtggccagagaacaaagctt

SEQ ID NO: 16757 - DNA, 201 bp, Homo sapiens
ctgtatctctagccacttctctcatcttaatttgaagcaaatctcaagcatcacatatttcatccatgaggatttcaggatgaattactaaaagataaagyctctgttttaacataataatactgttcttacatctaaaattttaaaaatatctagccagtgctcagatttccaattatttcattaataatgtttatttat

SEQ ID NO: 16758 - DNA, 201 bp, Homo sapiens
tgttcattttagtgataattttacaagtcattgctcctggattgccaatcaactgtgtaaagatgatttggaccaggaccttattgatttagagaaactgwgattgatttagagaaactgagatcgcacatagtaccattttcaggaaaactccaatattagatttttaaaaccttgttaatgggcaatgaagaagaatct

SEQ ID NO: 16759 - DNA, 201 bp, Homo sapiens
taataatactgttcttacatctaaaattttaaaaatatctagccagtgctcagatttccaattatttcattaataatgtttatttatgaaatgttttatastttgtttagattgaaattcaaataaggcctttatcttttattacttgatgttgtctcatgtttctttagatatacaggtccatttgcccttgcccttttt

SEQ ID NO: 16760 - DNA, 201 bp, Homo sapiens
tgttgaactcacataatttttctctctctagcatgagggatttttagcttttaaaccttctataatgataagaacaatcatctataaagcatttatgttargcattattctacacatattacatataatcctcacaatgtcacagtctgtctccagagcctgggctcttcaccattgctctgtgtagcccacaatttatac

SEQ ID NO: 16761 - DNA, 201 bp, Homo sapiens
catgggcaactggagacccatctgacgctcagccctagctctcagcccaccctacagggatagtttgctgcctagggtacacctcttgcccttgcctccarctgaaaaaacaagtctattttttttttctgaaacagagcctcaggtatcctcaggaatctctgcaaaaaagaccctattagttcctatcagttctgtgct

SEQ ID NO: 16762 - DNA, 201 bp, Homo sapiens
tcttagcttacccttcctgtggctgtcccacatcccgctggggaggcagctgtgcaggggagcatgggcaactggagacccatctgacgctcagccctagytctcagcccaccctacagggatagtttgctgcctagggtacacctcttgcccttgcctccaactgaaaaaacaagtctattttttttttctgaaacagag

SEQ ID NO: 16763 - DNA, 201 bp, Homo sapiens
ttgggaggctaaggcaggggaacgaatgccttgagctgaggagtttaagaccagcctgggcaacatggtgaaaccccatctctacaaaaacatacaaaaartgtagctggccattggggcaggtgcctttagttccagctacttggaagactgaggtgggaggatagcttgagccgaggaggcgaaggctgcagtgagcca

SEQ ID NO: 16764 - DNA, 201 bp, Homo sapiens
tgcaatgggaagctggtatccgagtcctctgatgtcctgcccaagtgaatgtccacggcagcacttcttagcttacccttcctgtggctgtcccacatccygctggggaggcagctgtgcaggggagcatgggcaactggagacccatctgacgctcagccctagctctcagcccaccctacagggatagtttgctgccta

SEQ ID NO: 16765 - DNA, 201 bp, Homo sapiens
cttcacatcgtctggtaaccatcattgtactcccttcatctccatgagttcaatatttttcatttttagctcctacaaataagtgaaaatgtgagaaatcygttcttctgtgcaagatactattttaaatagagtggtcagaaaaagctcccctgggaaatgacacctgagcagagaagtggctaaagtgagaaagatcca

SEQ ID NO: 16766 - DNA, 201 bp, Homo sapiens
ggaacgaatgccttgagctgaggagtttaagaccagcctgggcaacatggtgaaaccccatctctacaaaaacatacaaaaagtgtagctggccattgggrcaggtgcctttagttccagctacttggaagactgaggtgggaggatagcttgagccgaggaggcgaaggctgcagtgagccaagatcacaccactgcact

SEQ ID NO: 16767 - DNA, 201 bp, Homo sapiens
ggaaaaatacttaaagcagaggtacttagatgtcctgggagaagtcaagcagtttttgttctgaaattcttaacagtcctttccattaaaggagaaaaatkatcgccccccatctctctgtttaatttgtgtaactttgaagttttaagtcacttttacatacactgtttatctggtcactccttttcttcatgactttgt

SEQ ID NO: 16768 - DNA, 201 bp, Homo sapiens
gtctgggacaaaaactgatctgagatatgaagaaatgccctggagaatagtctcctaacatcaacttttagcatacaccagaatcacctggagttcgccawtctccagtgttcctgctttagtaggtctaggccctgtctaagaatttgcatttcaaacaagttcccagctaatgctgataccactggtcaggaatttcta

SEQ ID NO: 16769 - DNA, 201 bp, Homo sapiens
aattttgccttctaaatttctccctaatctgacaactttcagcttcaataatcattcaaatccaggtttggatataatgtcttcaactactacaatgcctyctcactggtattaaactatttgtagtcagttctggacccaagtctgtgtgatttcatggtttaaagtaaatattaccctattagctcccacctagcaaca

SEQ ID NO: 16770 - DNA, 201 bp, Homo sapiens
acaattaatacccacaaaagtactataaaattggtaatattatgccaattttatgttaattatacaaatatatacataatataaatatataatattggcayagtgtgccaattttttattataacatgtaaagtagggagatgtagaatgaattatatgtgcaaattctcatgaaaaatagtgaattcaggtcttcctgac

SEQ ID NO: 16771 - DNA, 201 bp, Homo sapiens
gtctgtgtgatttcatggtttaaagtaaatattaccctattagctcccacctagcaacagcatctcagcttgtcaaatcaccatctagtttagcctacctrccttcactccagcctccaccatgtccatcagggtgacccagaactccgccttcagcagttgttggtacaggagcatacccagtgcttgtatcagatcctc

SEQ ID NO: 16772 - DNA, 201 bp, Homo sapiens
gcatctcagcttgtcaaatcaccatctagtttagcctacctgccttcactccagcctccaccatgtccatcagggtgacccagaactccgccttcagcagytgttggtacaggagcatacccagtgcttgtatcagatcctcaagcttattccaggtaggtagcagctttctgggtggcctgggcaccagcatgggtctgg

SEQ ID NO: 16773 - DNA, 201 bp, Homo sapiens
acctgccttcactccagcctccaccatgtccatcagggtgacccagaactccgccttcagcagttgttggtacaggagcatacccagtgcttgtatcagawcctcaagcttattccaggtaggtagcagctttctgggtggcctgggcaccagcatgggtctgggtgaggtctatgctggggctggtgatatgggaggcat

SEQ ID NO: 16774 - DNA, 201 bp, Homo sapiens
agaacattaactcaggaaaaaaaacaggagcatatatcaaaacaacaatgttacctctttgcacattccaatcaccatttatttactcttgcaaattagakgagacaaattaaaactagatccaacttgaatgtctagctaagtgtcctgtgtctttttttttttaaagaatctacatttgaatatacctcctacagaaat

SEQ ID NO: 16775 - DNA, 201 bp, Homo sapiens
ccagctttgttcttttttctcagaatcttatatttagaaaaacctaaagactccaacaaaaaacctgctagaactgataaacaaattcattaaatttgcargatacaacatcaacatacaaaattcagcagcatttcaatatgccaagagcaaataatcttaaaaaaaagaaagaaaaaaaaacaagaaataatcccattt

SEQ ID NO: 16776 - DNA, 201 bp, Homo sapiens
tttttctcagaatcttatatttagaaaaacctaaagactccaacaaaaaacctgctagaactgataaacaaattcattaaatttgcaggatacaacatcarcatacaaaattcagcagcatttcaatatgccaagagcaaataatcttaaaaaaaagaaagaaaaaaaaacaagaaataatcccatttataatagctacaa

SEQ ID NO: 16777 - DNA, 201 bp, Homo sapiens
gagagactcctctgtttatggaagggtgaagggagagtgggaaggattttgacttgtggtttgggtgccagctcagctgcagtagaataaggcaccaggcrgattcctaagatatccaactccaggctctgactcctggatgacatcgctggacccgcttggggctgagggtaactcaccaccttgaaaggaaggacacaa

SEQ ID NO: 16778 - DNA, 201 bp, Homo sapiens
cagtggagaaggaatcagtgcaagaactctggacatttgaaaaggcaaatgacctctaaatgaccacactaactctccagcaattgttcttaaccagattkaaatgactgaaatgacagatacacagttcagaatctggacggcaacagagatcattgaaattcaggagaaagttgaaactcagtccaaggaatctaagga

SEQ ID NO: 16779 - DNA, 201 bp, Homo sapiens
ttagcattacaacagaagtgtgtaaagtcacctttgtttttatctatttgtaggtaacccgttgtggatttttagaaaataattaactttctgcttatatrcttgttttatattattatggtttggttttcatctctgtaatgaaatgaacttagcaagcatatttttgcaaaggtatcccctttgatttcaattttgcag

SEQ ID NO: 16780 - DNA, 201 bp, Homo sapiens
cagctctctggcattcctgaaagagaggaagagagaggaagtaacttggaaaacatatttgatgatattgtctatgaaaatttccccaacctcactagagmggtcaacatttaaatttgggaaattcagagaacccctgcaagatagtatataagacaaccatccccaagacacatagtcatcagattctccaaggtctat

SEQ ID NO: 16781 - DNA, 201 bp, Homo sapiens
aaatatatacataatataaatatataatattggcacagtgtgccaattttttattataacatgtaaagtagggagatgtagaatgaattatatgtgcaaaktctcatgaaaaatagtgaattcaggtcttcctgactcaaaaatccaaatctgtccaatataccacattaacagatcaaatcaagccttaatataaataaa

SEQ ID NO: 16782 - DNA, 201 bp, Homo sapiens
taaaggcagctagagagaaggggcagttcaccaacaaagggaacctcatcaggctaactgtggacctttcagcagaaaccctacaagccagaagagattasgggcttgtattcaacatccttaaagaaaagaaattctaaccaagaatttcacatacagacaaactaagctttataagtgaagaaaatataaaatattttt

SEQ ID NO: 16783 - DNA, 201 bp, Homo sapiens
actcaccaccttgaaaggaaggacacaaggctggctggcttcatcatctgctaatcgtagagccctagggccatgaataaacataggcggcagccaggtartggttacagcaggccttgggcgagactcagtgctgtgctggcttcaggtctgacccagcacagtcccagtggcagtggctacagggtagtgcttgtatta

SEQ ID NO: 16784 - DNA, 201 bp, Homo sapiens
acaatagtgggagacttcaacaccccactgacagtactagacagatctttgatgcagaaagctaacaaagatatttgggacctaaacttgacacctaaccraatagactgagcagacatctagagaacactcgacccaataacagcagaatacatattcttctcatgtgcacatggcatatactctaaaatcgaccacaca

SEQ ID NO: 16785 - DNA, 201 bp, Homo sapiens
ctccagcctccaccatgtccatcagggtgacccagaactccgccttcagcagttgttggtacaggagcatacccagtgcttgtatcagatcctcaagcttmttccaggtaggtagcagctttctgggtggcctgggcaccagcatgggtctgggtgaggtctatgctggggctggtgatatgggaggcatcacaattttca

SEQ ID NO: 16786 - DNA, 201 bp, Homo sapiens; identical to SEQ ID NO: 2640

SEQ ID NO: 16787 - DNA, 201 bp, Homo sapiens
aaacataggagattttaaaaataatcacaatacacaaacatcatgcctaaaaaccaagcagatcaaaaatcttttaataatataaaatatgcaggcaatcrttcaaatttccatgattatctcataaatgtgtgttttttaaaaaacaaatttgtccaaatcaggatataaatagtgccaggcatcatatttgatttatag

SEQ ID NO: 16788 - DNA, 201 bp, Homo sapiens
cgggaggctaaggcaggagaatggaacccaggaggtggagcctgcagtgagctgagatcgcaccactgcactccagcctgggtgacagagcgagactccawctcaaaaataaaaataaaaataaaaataaaaaaaagaaagaaagggaaaagaggaaaagaagaaactttttaaatttctctcaaatgtttacttgtggta

SEQ ID NO: 16789 - DNA, 201 bp, Homo sapiens
acctaatacagcaacacatcaaaaagctagtccacaacaatcaagtaggctttattcctgggttgcaaagttggtccaaaatatgcaaatcaatatgtttsaggcatcacataaacagaactaaaaacaaaaatcacaagattatctcaatagacacagaaaagactcttaagaaaattccacatcccttcatgttaaaaa

SEQ ID NO: 16790 - DNA, 201 bp, Homo sapiens
atgattatctcataaatgtgtgttttttaaaaaacaaatttgtccaaatcaggatataaatagtgccaggcatcatatttgatttataggtatcacaagaytcactctatactagctctttcctcctgttttatttttaaccatttatttattgatgctattcctcagtcctgataatatgatccatctttgagaatactt

SEQ ID NO: 16791 - DNA, 201 bp, Homo sapiens
ttacaatgacattgtttctatgatatcagaagataaaaagtagttctggatttaaagaattatccgtttgtttttccaaaatactttattctctcatacayagtattttcataatgtttgacatgcagtgcttctttctgtaattttgactttagaaatatattggcatcaacaaacttccatttgtcattttgaattttt

SEQ ID NO: 16792 - DNA, 201 bp, Homo sapiens
ttgatgctattcctcagtcctgataatatgatccatctttgagaatactttacacaaatttgtttttgccaagggcaattcttttgctttaagactatcasttctaatttatatttccattttagcttttaacattcaactttttttcccaaaagggcctctttaaattcagtctatacaaatacttacatccccaataaa

SEQ ID NO: 16793 - DNA, 201 bp, Homo sapiens
taagtaccaggatgagatcaacaagcatatagagatggagaatgaattttcctcatcaagaaggatgtggttaaagcttacatgaacaacatagaataagyagtctcgcctaaaagggctgccccaggagaagagaagatccgtgagctgcagtcccagatctcggccacatctctggtcctatccttggacaacagccga

SEQ ID NO: 16794 - DNA, 201 bp, Homo sapiens
catggatggcatcatctcgacgtctccgcccagtaccaggagatcgccagccgcagctgggccaaggccgagagcatgcaccaccaggtcgagtatgaggygctgcaggccttggctgggaaggctgagaatgagctgtgtcgcaggaagaggatcttccaggtgaaccgaaacatcagccggctccaggatgagactgaa

SEQ ID NO: 16795 - DNA, 201 bp, Homo sapiens
ggctttaaatagagctcagtctgaatccagtttgcaatttataactaatggtgtcaattttgaaaatcatctcaaatttgaaaatgttttatatttattcmttcctgctagatgcaacacatttgctctaagaccacaaaaacctatcaaatttattttccaatttaacatttatctttaacattagtcttttctcttctg

SEQ ID NO: 16796 - DNA, 201 bp, Homo sapiens
tcgagtatgaggcgctgcaggccttggctgggaaggctgagaatgagctgtgtcgcaggaagaggatcttccaggtgaaccgaaacatcagccggctccasgatgagactgaaggcctcaaaggccagagaacgcagagcagcgtggggagtccgccattaaggactcaacgctgagcctgcagagctggaggccgcccta

SEQ ID NO: 16797 - DNA, 201 bp, Homo sapiens
cgagtatgaggcgctgcaggccttggctgggaaggctgagaatgagctgtgtcgcaggaagaggatcttccaggtgaaccgaaacatcagccggctccagsatgagactgaaggcctcaaaggccagagaacgcagagcagcgtggggagtccgccattaaggactcaacgctgagcctgcagagctggaggccgccctat

SEQ ID NO: 16798 - DNA, 201 bp, Homo sapiens
aagctggccttgggcatcgagagcgccacctacaggaagctgctggagggcgaggagagcccgctggagtctgggacgcagagcaggtgtatgcataggargacaagcagtggctacccaggtgggctgggctcggcctcacaagctctgccctcagctatggcctggactccttccagtccagctttgactgtggtgggg

SEQ ID NO: 16799 - DNA, 201 bp, Homo sapiens
tgggacgcagagcaggtgtatgcataggaggacaagcagtggctacccaggtgggctgggctcggcctcacaagctctgccctcagctatggcctggactycttccagtccagctttgactgtggtggggactccggctctttcagccgcaccagctcctgcagggccatagttgtgaagaagattgacccctgcaatggg

SEQ ID NO: 16800 - DNA, 201 bp, Homo sapiens
acacccaaagtcctatgaaaaaactaacaaccctttccaggcgagtagttaaggtatgtgacttcccaagttttaatctgaaataactaaaagtagctctrtttccattgatttcaacagaagaccaatgacattttacaaacttctgagaaaataataggtattcaagatatccatgtaagttcactgatgatgtatgca

SEQ ID NO: 16801 - DNA, 201 bp, Homo sapiens
aggaggacaagcagtggctacccaggtgggctgggctcggcctcacaagctctgccctcagctatggcctggactccttccagtccagctttgactgtggyggggactccggctctttcagccgcaccagctcctgcagggccatagttgtgaagaagattgacccctgcaatgggaagctggtatccgagtcctctgatg

SEQ ID NO: 16802 - DNA, 201 bp, Homo sapiens
aaatatctgcaatggttcaatagcaaataatttattggcagctgcttaccgtgttcattttgcatcttttttcccaccacacatattaaggagcagctgargtcatgtttgacattctctccctcttttatctccagtttcagaatgaaaaatgagagtgagatatgagtagttttactagttaaaatatgaaacacccag

SEQ ID NO: 16803 - DNA, 201 bp, Homo sapiens
aacaaataattttgtataagtctcattttaagataatactaaaaagtcattatttattcactattatcactatttataaaattttgtagagcatcctggawctttttgcttacttttgtttttattttttgctaaatctggcaatcccaggcacatgtgtgaaggagctgtgaaatataaaaggagaaaacttttatggga

SEQ ID NO: 16804 - DNA, 201 bp, Homo sapiens
tggagtttcaataccaaaatgcaaaagtagtcatgcacagtgtctcagtcagcccatggctacattatgcacatcacagcaggtggcttgactccacataygggaggcagagagcagccatgtaccttacacagaactgcggaagctcagtgggtgaatatttcttttaatagtaaaaaaaaaaaagtctaaggataggga

SEQ ID NO: 16805 - DNA, 201 bp, Homo sapiens
gaaacaagacaagaatgtccactgtcaccactcctattgagcatagtactggaagtcctagccagagcaatcacacaagagaaagaaataaatggcattcraataggaagagaggaagtcaaactacttcttttcatggatgatgtgattctatatctaaaaaaccccatagtctcattctaaaggctccttacactgata

SEQ ID NO: 16806 - DNA, 201 bp, Homo sapiens
tcatttcccagaaactatttgctcttgctttcttctctctcttcttagttcattttatactttgacatgtcgaataacaaaacttctcaatatcagaaagwctatttatttaaagaaaaactctagatttctaaaaagagaggaagatataatggtgttgctggctttacagagccaattatttcccaaaataactccata

SEQ ID NO: 16807 - DNA, 201 bp, Homo sapiens
acctccatgatatgcaatttacttatgtggcaagcctgcacatgtaccccctgaatctaaaataaaagttggaaggggaaaaaaatcaaccagaatacgayccaggtttcctggatttaaagtctagtcttctccactacacttattccttctcaaaaaaacaaaaacaaaaaacaaacaaacaaacaaaaaacatgtttg

SEQ ID NO: 16808 - DNA, 201 bp, Homo sapiens
cttttagagaaaagttttatattaaagggaaatgtgtattgttattgttattttattcccaagtatgtgaggaaatccaataatgattttggcttcttgcygatagactgagcttaaactgaaaaagtagtcatgaatgatacttgggtttttcaaatctaggatgtagaaatttgggaaaaaaaaattcttttttttaat

SEQ ID NO: 16809 - DNA, 201 bp, Homo sapiens
caaattttatctcttaacctttcttttatactacagaaattcaggaatgagatttttcttgtagacactgagaaagttcaaatatgaaattcttgttgccygtgttttgcagctccaaagcctgctgtgtatttgcagcatggcttaattgcatctgccagtaactggatttgcaacctgcccaacaacagtttggctttc

SEQ ID NO: 16810 - DNA, 201 bp, Homo sapiens
tcatgaatgatacttgggtttttcaaatctaggatgtagaaatttgggaaaaaaaaattcttttttttaatttcttttttcttttacctttaaaaataaartcagggtctcattatgttgtaaaggctaatcttgaactcctggctcaagcgattctcttgcttcagtgtctcaaagtgctgggattacaggcgtgagcca

SEQ ID NO: 16811 - DNA, 201 bp, Homo sapiens
tggctttccttctggcagatagtggttatgacgtgtggttggggaacagccgaggaaacacttggtccagaaaacaccttaaattgtcaccgaaatcaccrgaatactgggccttcaggtaaagagaaacctattaatgaataaaatgtgtactttcctcatgcatatgtatgaacacctagtgatttttttcctgttttg

SEQ ID NO: 16812 - DNA, 201 bp, Homo sapiens
aaactgatgcactggcataggagctaagaaccatgccttggaggtcatgaaaatcctgtgttccttggcctcgttgcctgccttctttctggaaaccactrggatttcctaattctatgccatagtccattgcacccttgcaaatgactagaaaattccctaggtaagtatttcttaaactatacataggatcagaagtaa

SEQ ID NO: 16813 - DNA, 201 bp, Homo sapiens
tatagattgctttgatcctttgcttttgacgtgtctctacaacattaaagattgttagtactgtctccatttcttaaaagaagaacttgaggctcagagarcctaagcagcctgtcccgagtcacccagctaatggacggcagagcgagaatttgaacccagatctgaccaggcaacccatggtcaacagtcttttttata

SEQ ID NO: 16814 - DNA, 201 bp, Homo sapiens
gagtcagagaatgtcctgctaatttactccgtatttgggaaagctaactccaggtttcagaacagagattatcttgtatagtcagatataatctttatttmatggaatatttgatattccatggaatattaatggaataaaagaagtaccaagatttcatactcctcttcctgtccaagagaggaagagagggatggaggc

SEQ ID NO: 16815 - DNA, 201 bp, Homo sapiens
agcaacttcctatttactctgagtggatttgatccgcaaaacttaaatatggtaggtgtaagtaattgggtctgggaaaacatttgttttgttgcacagargtgatgaaagttatcctggattgtatggcaactgcaattcaaggtttcctttttgcatttggaatgcaattagtacatttatggcttccaatgagggttg

SEQ ID NO: 16816 - DNA, 201 bp, Homo sapiens
gggtctgggaaaacatttgttttgttgcacagaggtgatgaaagttatcctggattgtatggcaactgcaattcaaggtttcctttttgcatttggaatgyaattagtacatttatggcttccaatgagggttgagagtccacttgctttcataggaggatttgagaagaaagcttttctgccaacaattctcatctcttc

SEQ ID NO: 16817 - DNA, 201 bp, Homo sapiens
atctgttcagaatatgctgcactgggctcaggtaagtgcttcttattcctgcttgatgcacacatatctctgcaagaccctcaagaagtgctctcagagarctcactgcagggttctgctggcacctgccactgtcacattgatgtttttggaatcagcatcaactcttcatttttatttacttcattcccatttcttctc

SEQ ID NO: 16818 - DNA, 201 bp, Homo sapiens
tgggaataaccctagtactctaagtagctgtgagcctgcagtgcacagactatatgtagggcaaacctttcctgggtctctggtcacagcagcatattgaytacggtgatgcaatttcccaggaataacatgtgttccaaattcaaagaaataattccacagagtaagtttctagattccctctgagctgaaaaagtaaaa

SEQ ID NO: 16819 - DNA, 201 bp, Homo sapiens
aagcgattctcttgcttcagtgtctcaaagtgctgggattacaggcgtgagccaccatgcccagccaaaaaattttaatgtgggaatttttaatgtcatcmtaacaactactataacaactataatagtgaaaatgtataactcaactctaactgttgtgaaaaacctgacttttctccccagctgctatagttagatgta

SEQ ID NO: 16820 - DNA, 201 bp, Homo sapiens
tcttgcttcagtgtctcaaagtgctgggattacaggcgtgagccaccatgcccagccaaaaaattttaatgtgggaatttttaatgtcatcataacaactrctataacaactataatagtgaaaatgtataactcaactctaactgttgtgaaaaacctgacttttctccccagctgctatagttagatgtacgtggcagg

SEQ ID NO: 16821 - DNA, 201 bp, Homo sapiens
gtggggatatgccacacacacacactgtttcagaatacggttgtctcttgtgaggaaacagtggtgactaggtttacttagttcatatagtttttccaaargccccctaaccccaactcccaccaaaagatactatattctcaatggctatggcaaaaagttctagagggacctctggcccagttttagtcacgtgcccat

SEQ ID NO: 16822 - DNA, 201 bp, Homo sapiens
ccagttttagtcacgtgcccatctctcatacaatcactgtgacctgaagaatggaggacgaattggccagacctggttacctggaacagaggttgtgttgkatcaatacaagaaagaagcggtaagggaaaacttgctgagagtttatagagtgctatagccactctagttatttgtaacagactgactcctttttagcat

SEQ ID NO: 16823 - DNA, 201 bp, Homo sapiens
ggtaatgttaagaaaaatttcctttgtaacagcaaagaaagccagtggaatttacagccaagttggtagcatatcaaagtaaaatacctgacacatactaygtacttaataaataataaataattcactattattatttataataacattattagtattcttcagtaactaagctgcattctctggacttccagaatcatc

SEQ ID NO: 16824 - DNA, 201 bp, Homo sapiens
tacttcattcccatttcttctccttgtcctcagtgtctgggttttgagcatggttctcagatattctgactgggttctgatccttagatgattccaaactrcattttaagggaaggcttttatttcctctttcagaaagtcatcagctctaatagaactttatataaaatgatgcatcttattccagaaagagctgttcat

SEQ ID NO: 16825 - DNA, 201 bp, Homo sapiens
tcttctccttgtcctcagtgtctgggttttgagcatggttctcagatattctgactgggttctgatccttagatgattccaaactgcattttaagggaagrcttttatttcctctttcagaaagtcatcagctctaatagaactttatataaaatgatgcatcttattccagaaagagctgttcatcctccaatcaatata

SEQ ID NO: 16826 - DNA, 201 bp, Homo sapiens
ccagaaagagctgttcatcctccaatcaatatatggggcatttcagaatgtggaaatgatgctttattcagagaagattgaatgctagggaagaattaaartggatttatggcttatgtttttaccttcagctaaagttttatttgttttattttattactcaatatacagaaagctcagagataagtctaatccagttgg

SEQ ID NO: 16827 - DNA, 201 bp, Homo sapiens
ggagaaagaagcaatccaacaaacaaaaagataaccacactgtaataggaaatgtgttttgaataggacattggaagaaaaataataatcatttttacagrtagatcccaaagtcaaggatctatgttcaaccatgtgtgttccaccatcttcacaattgaatgagtaaccatcattaagcagttagcttaggccgtaata

SEQ ID NO: 16828 - DNA, 201 bp, Homo sapiens
tgtgtgtctttgtgtgtgcatgcgcacacacgtgcatgcacattcatttgtttattatgtaatatttgcctatattcttggctggtggctcagtcacaacsctttttgaaaagtgaacaaaatatacataattctatgatggggaaagtggtggtgtcttcttaaaggtttaatatatctgagaccccccccaaccaggaa

SEQ ID NO: 16829 - DNA, 201 bp, Homo sapiens
aataggacattggaagaaaaataataatcatttttacaggtagatcccaaagtcaaggatctatgttcaaccatgtgtgttccaccatcttcacaattgartgagtaaccatcattaagcagttagcttaggccgtaatatgattcttggactgagatttcaaaaataccacaggccttctgaaaggttacccctttctag

SEQ ID NO: 16830 - DNA, 201 bp, Homo sapiens
tgtgtctttgtgtgtgcatgcgcacacacgtgcatgcacattcatttgtttattatgtaatatttgcctatattcttggctggtggctcagtcacaacccyttttgaaaagtgaacaaaatatacataattctatgatggggaaagtggtggtgtcttcttaaaggtttaatatatctgagaccccccccaaccaggaatt

SEQ ID NO: 16831 - DNA, 201 bp, Homo sapiens
acattcatttgtttattatgtaatatttgcctatattcttggctggtggctcagtcacaaccctttttgaaaagtgaacaaaatatacataattctatgayggggaaagtggtggtgtcttcttaaaggtttaatatatctgagaccccccccaaccaggaatttgcattttaatatatatcctactaaatttgctccctg

SEQ ID NO: 16832 - DNA, 201 bp, Homo sapiens
cagctaaggcaagagtgatgatcatgatgatgggagtaatactagtgaaaaaaagctgtttgttgggtattattaggtgctacatgctttataggtgttamcataatcttcacaatcctaagaaagaatgttactatcattctcatttcacaaatatcttgccttgaatcacagattcagtagtctattaagcctggatac

SEQ ID NO: 16833 - DNA, 201 bp, Homo sapiens
gatgacattctggtctatagctacaaaatgcaccgattgaagcacagatgatgtgtatcatttaaagagtgttgataattttgttttttctctgtcattaktttctatccctataacatattcagtttcttcatctttaaaaagcttttgaagtcaaaattgagtttaaataaccaaatagcatttagacttctcaaatta

SEQ ID NO: 16834 - DNA, 201 bp, Homo sapiens
ggacatcttagggtaaaaacatactgtaataccttcctcagttgttttccaatttaccacccccttcctaggaaaatccacacgccttaatgaattgctayagtcattagcaaagggagtaagttttgatgtttgtcttgtctgtgggccttgtttccctctgactcataagctctaatatactccagccattcaaaatac

SEQ ID NO: 16835 - DNA, 201 bp, Homo sapiens
acaagaagcctatagaataccaagcagacttatcccaaagaagacttaataatcaaactcccaaaggtctaggataaagaaaggatcctaaaagcagtaaragagggagggagagagggagagagaaagagagagagagagagaacattcaagggagctccagtatgtctggcagaagacttttcagtggaaacctttcag

SEQ ID NO: 16836 - DNA, 201 bp, Homo sapiens
gacattggaagaaaaataataatcatttttacaggtagatcccaaagtcaaggatctatgttcaaccatgtgtgttccaccatcttcacaattgaatgagyaaccatcattaagcagttagcttaggccgtaatatgattcttggactgagatttcaaaaataccacaggccttctgaaaggttacccctttctagctcca

SEQ ID NO: 16837 - DNA, 201 bp, Homo sapiens
tttaaattaatttcagtatgagtattgaaatatataatagaaatattgtaacattatatattttctatatacttttattatatagaaaatatatattacakaatatattattaaatattgtagaacaatatataatacagaaaaatatataatactcagtaatatattaaatacttattaaaatagcaagcttatatagga

SEQ ID NO: 16838 - DNA, 201 bp, Homo sapiens
tatatattttctatatacttttattatatagaaaatatatattacagaatatattattaaatattgtagaacaatatataatacagaaaaatatataataytcagtaatatattaaatacttattaaaatagcaagcttatataggaagagtgatggagcattgtgagaaagtttcagctttatttctttgacattacttt

SEQ ID NO: 16839 - DNA, 201 bp, Homo sapiens
ctctgccatactgctagttccaaattccttctggtttcaggatttaggagtcagggttgcctcatcttctcaaatgagttacagtcacgcacatccctacrcactgcatggttggcactagttccttgatatatgttactccgtttgatcctcatgaaggatcaaatggggaagggagatactattgtctctgattgtcca

SEQ ID NO: 16840 - DNA, 201 bp, Homo sapiens
gcaggtcttaaatctctctaagcctttgtttttttaattgataaaatgaggataataatagtaccaaaattagggagattttcagagcttaaataacataygtgaactatttagagtaatgcctgccataaggggactcagtagcttattattagtttcatacaatttgaaaagtttcataatatttgcagatataagatg

SEQ ID NO: 16841 - DNA, 201 bp, Homo sapiens
cactttttaaataccattatatggatcattaaagatataagtaagaagtatcatttttaggaggtagtagtatctgccagggatagtgtgccttagcatgycattccctagcaaatagtactattttcgatctggtgtgtcaccagatctacgaaaacttttagagaaaagttttatattaaagggaaatgtgtattgtta

SEQ ID NO: 16842 - DNA, 201 bp, Homo sapiens
gaaaagtttcataatatttgcagatataagatgatcttcaaccagatagctaatgtatgcaaagctatttagcttcagaagtaaactctgcatttctagargttaaatattactttgttatagtgaattatctgtaatatttatctcttgctcacttttataagaaaaatagtgaaagcatttattaagaacttacactgc

SEQ ID NO: 16843 - DNA, 201 bp, Homo sapiens
atgaacagacactagagtgatccccagtgatttccagcttctagtatctatgcctttgtataatctcctcccattcaatgtgggtgggatatgagacttckttcaagccaacagaactggcaaaggtgtaagatgtcacacccttgattaggttttgtcatatggcaaaggtgataaaatgtcaatccctgattacattat

SEQ ID NO: 16844 - DNA, 201 bp, Homo sapiens
cttgtttactttgtgggatactgggcttaactaggggatacctccactttttacttggccatggtatgaaaacctgtcctctgaatctttagatattttgkcaaattgtaggcaaacaaagacttaaagcaattcaaccttgattaaaataagaccaaaaatgcctccatacttgattaaatttatttcattttaggaact

SEQ ID NO: 16845 - DNA, 201 bp, Homo sapiens
cttatgtttcatatacactatacaaataggctgaaagtaagcttgtatggtattttaaataattttgtgcatgaaacaaaagttttgactgtgttttgagygtaacctgtcgtataaggtcaggtgtagaatttttcacttgtggcatttcagtgctcaagaagttttagattttggagcatttcagatttgggatttttg

SEQ ID NO: 16846 - DNA, 201 bp, Homo sapiens
aagagaaatgacagattgacagaaatagactagcaaactgagtgggaaatgaatactcagcactgttgatggaagtgcatagcctatttctggaataatcyggaaatatatagtaaaattgatcaaccatatgacctatgaccaaaaaattctcattcctagatgtatggcatgcacactattccatcgtggggcatataa

SEQ ID NO: 16847 - DNA, 201 bp, Homo sapiens
aaaagagtaaggtaactatcccctgaaaattctggttatttctaggaaaatggaatatctctgcatttataagattttttaaatgtatggaaaaatgaaaraatacagactgtgtaaaagatatcagattgtgctatagtggttactaggtttaagaataatttggaggctgaaaaagagaaaaaatgctatcaggtagca

SEQ ID NO: 16848 - DNA, 201 bp, Homo sapiens
ataaatgctgacatatttaatggtgcagaatttaagggaatgaaattatcggtcattggggaataggacagtttaaaggtggaggttttacagtaagaagyaacaaacaacatatgcttaatgcaacatgttggattctcacaagccaggcctgctttatagatgtgtgaaatatgcaactctagaggattagaaggtgtg

SEQ ID NO: 16849 - DNA, 201 bp, Homo sapiens
tcatacttcaaatgtctttcatgccttggtctcaatgctccctgaagagtctgctgattcccaaatattaataatgccactgagcccagatttgtgactargagaagggatatttatcctatccgacattttgtttgaaaaggtcacattctgagatcaaatgctaactagaaagatgatcccccatggaaaaaagaatgc

SEQ ID NO: 16850 - DNA, 201 bp, Homo sapiens
actattattatttataataacattattagtattcttcagtaactaagctgcattctctggacttccagaatcatctattcaatcactcattcactcagtcmgcaaaaatttttgatgatgatggtgattagaggaggaatgaaatcaagaaactctaaaaacaatttatctattttcaggggtgctggtgagatttgaagg

SEQ ID NO: 16851 - DNA, 201 bp, Homo sapiens
agctgcattctctggacttccagaatcatctattcaatcactcattcactcagtcagcaaaaatttttgatgatgatggtgattagaggaggaatgaaatyaagaaactctaaaaacaatttatctattttcaggggtgctggtgagatttgaaggtgatttaatagtaactcaaaatagaacattaactcaggaaaaaaa

SEQ ID NO: 16852 - DNA, 201 bp, Homo sapiens
agagatcttgaaagaattggatatactatttcctaccaattctaatgcccaatttacataccaaggtaaaagaaattcagaaaagccaaagcaataattgrcaatgtggtagcattagaagtgatgcagctggatgaggcaggaggatgtggcattttacagagatgctcgtatgactggggtcatttcatccacccttgg

SEQ ID NO: 16853 - DNA, 201 bp, Homo sapiens
atataattttcctcatattcaatggtatggcccttcctcttcattctcacaaggatttgacctttgtcacaaacacggatggtcctgatcgtgtcactccrgaacatggacgttatcaaggacagctgccggcactcttggtaataatttctctttaaatgtaagtgatctttcctttgaacattttgagttgagatggat

SEQ ID NO: 16854 - DNA, 201 bp, Homo sapiens
atttctaaatgtcataacctttgctattattataaggatgattcaagctaataaattcatcaagaaaaatatataaccaataagtaaattagtggaagagrgaaaatgtttattccctgtgaccaaatataaccattttcattttggagtaattcttctagtcttttgaagaccatacttttttgtttatttgttttagaa

SEQ ID NO: 16855 - DNA, 201 bp, Homo sapiens
aaagctactaaaacacttgcctgaggttagacatcttcttctgtggtgaggctggatttcaaatttagaccatttgactgtagcacttatatgatgagcaygctgtttagtgttatagtgttggtctacctttgaatagacatacttttaaaccatggcaaggaagtgagactgcacattgaaatatgtaaaatttgcctt

SEQ ID NO: 16856 - DNA, 201 bp, Homo sapiens
cctttgctattattataaggatgattcaagctaataaattcatcaagaaaaatatataaccaataagtaaattagtggaagagggaaaatgtttattcccwgtgaccaaatataaccattttcattttggagtaattcttctagtcttttgaagaccatacttttttgtttatttgttttagaagtttaaaaacaataaaa

SEQ ID NO: 16857 - DNA, 201 bp, Homo sapiens
ttatatgatgagcatgctgtttagtgttatagtgttggtctacctttgaatagacatacttttaaaccatggcaaggaagtgagactgcacattgaaataygtaaaatttgcctttgggtgccacgtgagaaatagtcacatcactagaaactaatcataagcttttgtgtttggttaaagttttattgatccatttttct

SEQ ID NO: 16858 - DNA, 201 bp, Homo sapiens
ctattggtatatacaattcttttgcccaacaactttttcctctatttaacataatgttataagtatgctttcatgtttttatatagtctttaaaataattkaatggacttatctacaagattaaattaatatattatagtttattttaaaattctcttgtaattgaaaacatgtttttaatttttattacaaataacaaga

SEQ ID NO: 16859 - DNA, 201 bp, Homo sapiens
atatgatgagcatgctgtttagtgttatagtgttggtctacctttgaatagacatacttttaaaccatggcaaggaagtgagactgcacattgaaatatgyaaaatttgcctttgggtgccacgtgagaaatagtcacatcactagaaactaatcataagcttttgtgtttggttaaagttttattgatccatttttcttg

SEQ ID NO: 16860 - DNA, 201 bp, Homo sapiens
gggattacaagcgtgagccactgtgtccggcctatttttttgatgatgtttttgaagaacagaagttttttattttaataattttttaatcttttttttgyttatggttagttgtctaccacaaatttgtaaagatattattctttgttatcttctaacaactttgtacttaagcttttagttttagatttgcaatctgag

SEQ ID NO: 16861 - DNA, 201 bp, Homo sapiens
ccggcctatttttttgatgatgtttttgaagaacagaagttttttattttaataattttttaatcttttttttgtttatggttagttgtctaccacaaatktgtaaagatattattctttgttatcttctaacaactttgtacttaagcttttagttttagatttgcaatctgaggtatatttttgtatctggtttgggaa

SEQ ID NO: 16862 - DNA, 201 bp, Homo sapiens
gctttaatttccttcactgaaaatagtgagtgtatacctcccagagttgtgaggatttttgtgtttatttcttgaacaaatatctattgaatggcttcttyatattgagcattttaatataattagcgtatgatccgtggtattgcttaattaatattacccaccattattggttttataactgcaaggtattacttatta

SEQ ID NO: 16863 - DNA, 201 bp, Homo sapiens
ttattaagttcctaatgtgaaagtctagtctctgtgactcttctttttgagaaggaatagatcagtaatctagtgacatataattggctgtattaatatgytatgtttaatatttaatatcatccaaatcaactgctgttgaattgatcattattaatacgattgtgaaaccttataggctattaaaacatttatttaaat

SEQ ID NO: 16864 - DNA, 201 bp, Homo sapiens
gcagttttgattattacaggtttgtagtataatttgaagtcaggtcatgtgatgcctccagctttgttcttttttctcagaatcttatatttagaaaaacstaaagactccaacaaaaaacctgctagaactgataaacaaattcattaaatttgcaggatacaacatcaacatacaaaattcagcagcatttcaatatgc

SEQ ID NO: 16865 - DNA, 201 bp, Homo sapiens
atatctagttttcccagcatcatttcttgtggaaattgtcctttgcccaatgtatgttcttgatgcctttgttgaaaattagttgactataaatgtgtggrtttatttgtgggttctttattctgttccattggtctatgtgtctgtttttatgccagtatcatgcagttttgattattacaggtttgtagtataatttga

SEQ ID NO: 16866 - DNA, 201 bp, Homo sapiens
cctcaaattggcccagaccaatgtcccggagtgcttctgtaatgtttgttttttagtagtttcatagttttaggtcttaaatgtgtctttaatccattttkattttgtttttgtatctggcaagagatagagatctaatttcattcttctgcatatggatatctagttttcccagcatcatttcttgtggaaattgtcctt

SEQ ID NO: 16867 - DNA, 201 bp, Homo sapiens
catcctattgtgcatgccagactttagtccttctaacggtattttggtacccattaaccaatgcctctttatccttcccccacccctactacctttcccascctctggtaaccatcattcttctcactatctctataaggtcagtttttttttaaactcccctatatgagtgagaacatgcagtatttgtctttttgtgcc

SEQ ID NO: 16868 - DNA, 201 bp, Homo sapiens
tacctcgtctttttaaaatcaagcatcattttccagtcttcattttactgggcttatcagcagcatttaatatggttaatcaccttcttttccttcaagtmctttgtttattttgcatcctaggacattatgctcacttggtttttctcgtatctgtctttcttgcctctccttggaaggttttcctcatatctacaatcc

SEQ ID NO: 16869 - DNA, 201 bp, Homo sapiens
tgtagcctgctttttactatgttgataaagaggaggtgtctgagaagctttgtagaaataatgtgggaacatggagaagaactgaattgaggtcagggaarctataaacctttgagtgcttttgtgatgtgatgtgctctatgggaggctgtgtatgagttcaagcttgagaaacttgcttgataaaaatgtgactattaa

SEQ ID NO: 16870 - DNA, 201 bp, Homo sapiens
acatagttgaagttgatagcagtatcaatcaactgggtataattgacatctatagactacttcaaataacagcagattacacattcttctcaagcttacayggaacattcaccaagataaacttcattctaggccataaaacaaaccttaacaaactagagatcatgccatatctgttctcaaagcacaataaaattaaat

SEQ ID NO: 16871 - DNA, 201 bp, Homo sapiens
tagcaataatttattgtatttttcaaaatagctagaagaggattggaaatgtttctaacacaaatgataaatatttgaggtgatggatattctaattaccstgatttgatcattacacattgtgtgcatgtatcacgatatcatatgtaccccataaatatgtacaattattatgcattagtaaaaaaagatataccactc

SEQ ID NO: 16872 - DNA, 201 bp, Homo sapiens
tcagatagcagtataccagatgaagagaagatgaaggaggaaaaatatgattatatatcacgaggaggtaggacccacttttttttttaagggaatgaaamcaaataaaacaaaaatacattttaaaatatgcttatttagtatgaaaaataagactcttctttctttaatcctacagaaaatcctaaaggtaaaaacaaa

SEQ ID NO: 16873 - DNA, 201 bp, Homo sapiens
acaggcatgaaccaccatgccaggccccttatctagatttttaatggtcatgggaatgtttgatgctgttctcaaatatacgggaagcagaaaccccccccacatgatattttaattatttgtttatatgtctgtcctttcagtagggtggccttttaaatttatttttagtatttctctgctgtaagccttttattgttt

SEQ ID NO: 16874 - DNA, 201 bp, Homo sapiens
atgggctggtaagaaattcactcctcgaaaacagggaggacacaagtttttgcctgtcataggaagtgtacatttatgtatgcatattgtattaacgtatsccaacacagttattctgtccttggcatccttaatgcctgtagaggctgtctcatcagctgtagtcagtgtctttctagggcagtaacgccacaacattga

SEQ ID NO: 16875 - DNA, 201 bp, Homo sapiens
aaaatatttgctttatttagatttctagtatttcttatcaaggaaaaaaatactttttcattatcttatcgcttgataaccgttttttgtctcagctaaayggaagaaaagttacctggcagcataagatagctatgaagaatctttcccccaccagaaagaagtttagcaaactattttactgaataaatctaagacttc

SEQ ID NO: 16876 - DNA, 201 bp, Homo sapiens
tctctatttcttataaaatatttaaaaattttaaaaaatgtatatgagggatgccacctacttgtattctctgtcccaggcctataacaatgtaaaagacrggaaggctgtacttctaagtttttcagacctggcagttctcacacaaccagacttctggtttgcattttgtcaggaatataggaactcaaatctaagaga

SEQ ID NO: 16877 - DNA, 201 bp, Homo sapiens
agatatattctctattctgtgggttgccttttcacattcttgataatgtcttttgatgcataggaaaattataaattttaatgtagttcaatgtatccatyttttattttgttgttggtgcttttggtgtcatttcccagaagttgctgccaaatctaatgttattgaagctttcctgtcttcatttgcttctaagtcttc

SEQ ID NO: 16878 - DNA, 201 bp, Homo sapiens; identical to SEQ ID NO: 2648

SEQ ID NO: 16879 - DNA, 201 bp, Homo sapiens
gtgattagaaatatcaacatctctttcaggttaaaaatattttgtatcatgcagtcaaagaaatggtgagagccttgaagatacacgaggatgaagtagasgatatggaagaaaattaagtgtgatccagtttgatatttttaggttgttgaactgggattacttaaccttgaatgatgatatgtatgcacactgacttta

SEQ ID NO: 16880 - DNA, 201 bp, Homo sapiens
tcccagtttttatgaagaataagtaggtaagatttcattgtgacttcttaaactattattttaagaaaatgatattagaaaagatgacaacaaaactgtaytgtggtggtatcctttacagcacacccttaccttttttccacagggaaagtcatgtactctacttgttgctgatagttatttttctctcagaaagtagaa

SEQ ID NO: 16881 - DNA, 201 bp, Homo sapiens
tttaactattgttattgctgttttctggcagaacatctagcatataacaaatttgcaatatttgtaaagttttcttcttatgttactatcaaagaaatatwttaaaagctgctgaaacattattgcaggtatttgatataactaatgagttagggtagttcctttcaattttttaagcctgcaaattaactaattacaagg

SEQ ID NO: 16882 - DNA, 201 bp, Homo sapiens
acattatgctactcagctttttaactgacactattgactataataggtaaccacccctatcccccagagatttgagagtcagtgggcacacttgagttatwgtctgagcgctgccacagaaatgtgacctgtagttcagattatttatcctttctaatcctgtgatgccatggagttacatcctttgtatctcattgtagt

SEQ ID NO: 16883 - DNA, 201 bp, Homo sapiens
taaaattcaagtctttctaggcttcagactaaaaacaaaacagtactggtccttagtcattaaataatctggattgagagtcattaattcatatatttaasggccaggtttgttatgttcagaactacaaataccttcaaagaacctagaatttaatgggggaaacacacatagaaaaacaaatataagcaaaatgtagta

SEQ ID NO: 16884 - DNA, 201 bp, Homo sapiens
acccttgaaatcagttgaccatttgtgtaacagtttatttctgtgctctctattctggtcccttggtctatatatctgtccttacgcaagtatcacactgktttgattacttccagtaccttattttttcccccacttttctaccgctgaataatttgttcaaatgattgctcactctaagataaatcattaaagtgtact

SEQ ID NO: 16885 - DNA, 201 bp, Homo sapiens
cagcctcctgagtagctggaattacaggcacacgccaccgcacctggctaatttttgtatttttagtagagaaggggtttcaccatgttggccaggctggkctcgaactcctgacttcaggtgattcgcccacctctgcctccaaagtgctgggattacaggtgtgagccaccgcgcccgacctcctgaagtatcttaaac

SEQ ID NO: 16886 - DNA, 201 bp, Homo sapiens
gtgtactattctgttttggtgaaatttactgaaataccagatcaatgtcttgagtataactcctgccttgtaaattattaggcataagacctcccttgtargaaacatatgtttttaagattcgaggaaaaagaagatcctgtgattgctgagctataacatacaggcattcatttattgctgtgtgccagtcactttgct

SEQ ID NO: 16887 - DNA, 201 bp, Homo sapiens
tgccttgtaaattattaggcataagacctcccttgtaagaaacatatgtttttaagattcgaggaaaaagaagatcctgtgattgctgagctataacatayaggcattcatttattgctgtgtgccagtcactttgctctaaatgtgaactcaaagacagataaaatacttgattctctttcaggtcataaatattacagc

SEQ ID NO: 16888 - DNA, 201 bp, Homo sapiens
ggctgtggtcaacaggggtggcatgatccccagactaccagtggaatggtcaggtgagggctccagccatcatgttgcagccctgctactggggaaggtgsgttgctttctgttggagcagctgtaggcaggcaactggtaactgggcaggtgcactttgctagggtgttgaccctggcagcagtagcccacagtacagat

SEQ ID NO: 16889 - DNA, 201 bp, Homo sapiens
gttttatttaagaaaagaaacaggaagtaaacaaggtcattaaattgtattaggaaaagagccacattcatttaactattgttattgctgttttctggcaraacatctagcatataacaaatttgcaatatttgtaaagttttcttcttatgttactatcaaagaaatatattaaaagctgctgaaacattattgcaggta

SEQ ID NO: 16890 - DNA, 201 bp, Homo sapiens
atggggatgatactgttatgaagatcaaaaataagaggctttaaaatctaagggtaattagactgttaaaagcattggtttctcttttaaatattagtttycctaggagatatgtggaatgtgcatcttctgcatgttaaaagagttcatttattagcagagcaacagagactaagaaagtacctaggagagcaggtagtg

SEQ ID NO: 16891 - DNA, 201 bp, Homo sapiens
tctgcttcccgggttcaagcaattctcccaccccagcctcctgaatagctaggactataggcatgcaacaccacgtgtagctaatttttgtatttttactrgagacggggtttcgccatgttggccacgctggtcttgaactcctggcctcaagcagttgcccaccttggccccccaaagtgttgggatttcaggcatgag

SEQ ID NO: 16892 - DNA, 201 bp, Homo sapiens
aacagtttatttctgtgctctctattctggtcccttggtctatatatctgtccttacgcaagtatcacactggtttgattacttccagtaccttatttttycccccacttttctaccgctgaataatttgttcaaatgattgctcactctaagataaatcattaaagtgtactattctgttttggtgaaatttactgaaat

SEQ ID NO: 16893 - DNA, 201 bp, Homo sapiens
tcttccacccgttgttctttgcttttgagtcagcctcagtttataagataatgttgccttttaccccttacatataaagaaatgtgtcaaattttaaaagrcaataatagtaaactttcatttcttttgattgtgctaatgagagagagtgtatgtggagggaagggggggtgggggagaagaacctgagccctggaagtc

SEQ ID NO: 16894 - DNA, 201 bp, Homo sapiens
gctgaggtcgcgccactgcactccagcctggcgacagagtgagagtccattaaaaaaaaaaagatataatgtcagtaatatattattactagttcatttttgaaggcataccaagttccagatatttttctcagtgttttacattattcttttgaggtagacactattattcttgtttatagatgaataaacaggcatagg

SEQ ID NO: 16895 - DNA, 201 bp, Homo sapiens
aagatgaggtcgttagagttgcccttaatctagggttcttataagagagaatatggatacagagatacacagtgtagacaccatgtgtcaacattggcagrgatcggcatgatgcttctgcaagctcaggattgcaaaaggttgccagcagaccaccagaagctaggagaggcaaggaagggctctggtacagttttcaga

SEQ ID NO: 16896 - DNA, 201 bp, Homo sapiens
ccgggttcaagcgattctcctgcctcagcctcccaagtagctgggattataggcatgtgccaccatgcctagctaattttttttgtattgttagtagagasagagtttcaccgtgttagccaggctggtcttgaactcctaacctcgtgatccgcccacctcggcctctcaaagtgctgggattagaaatgtgagccactg

SEQ ID NO: 16897 - DNA, 201 bp, Homo sapiens
aaagtagttgtaattgcaatcagatttttcttactaaatatctatgagtgtttggacatgttttgaaacaactaatatacttaatattttttctcaatatytgctatcttaaaaaaataaagatttcatactgattttttttagcttgtcgttactttcttcatgaagaaatttaaatttctacagccagtcctcttcatt

SEQ ID NO: 16898 - DNA, 201 bp, Homo sapiens
ttcccctgccgcgcccgcacccggctctcgcagacgtaccttgcaggcttccctctggcgcctcgctcagcccggccaactggcggtcacgcccctctgcygaacccttggcgcgtttgcccgcatcccttgcctgggtccctgcgtctctccgagcggcttcccctgtggaggtggtgtcggagcaggactcccgggata

SEQ ID NO: 16899 - DNA, 201 bp, Homo sapiens
gctactcatctgctctgtgaaaatggctaatccctaaattaatttatgttcaaaaagagaacatttatgcttctgttttaggtgctgttgaatttattatstaataatatgtactttcaaaaattaggaattagccgggtgtggtggctcacgcctgtaattaacagatttaaaattttattataaaaatatgaattaggc

SEQ ID NO: 16900 - DNA, 201 bp, Homo sapiens
ctcaccttttcaggtcttggctcagtagttcttgtctgttttattagtacatggcttaaaacccccaaacttaaagtatatcttatctatatatatttttkttttcgagacagagtcttgctctgtcgcccaggctggagtgcaatggtgtgatcttggcttactgcaacctccgcctcctgggttcaagccattctcctg

SEQ ID NO: 16901 - DNA, 201 bp, Homo sapiens
gggtttctcaccttttcaggtcttggctcagtagttcttgtctgttttattagtacatggcttaaaacccccaaacttaaagtatatcttatctatatatwttttttttttcgagacagagtcttgctctgtcgcccaggctggagtgcaatggtgtgatcttggcttactgcaacctccgcctcctgggttcaagccatt

SEQ ID NO: 16902 - DNA, 201 bp, Homo sapiens
tgttgatctacatagaatatatgcattaagacattggagggatatggaaacaagtatatgatccctaaaaagttggaaataaggtagttcactgagatttrtagtttattctaagaaggattatgtttaactgtgtccagaataaatgaaatatttttgggtaaattaactgtttatcagttatattataagttaactgga

SEQ ID NO: 16903 - DNA, 201 bp, Homo sapiens
gttttttaaaatagccttttactgaaattgctttctttagatcagtgtgggatcacagtcattcatcactttgttttgtttctaaataaaaataaaactcraatgcaaagaatattattggaatgcaaaaatgtaataattataacagattaaaatgttggtgtttgctgttttcccctggtacaacaatccttttttagc

SEQ ID NO: 16904 - DNA, 201 bp, Homo sapiens
attagtatgatgtgatgattgtcctgttttatttttatttttttgagacagagtcttgctctgtcatccagggtggagtgcagtggcgtgatctcggctcrttgcaacctctgcttcccgggttcaagcaattctcccaccccagcctcctgaatagctaggactataggcatgcaacaccacgtgtagctaatttttgta

SEQ ID NO: 16905 - DNA, 201 bp, Homo sapiens
ttgtagagaggggtttcaccatgttggccaggctggtctctaactcctgacctcaggcgatccgcccacttcagcctcccaaagtgctgggattacaggcrtgagccaccacacccagccggaagtggttttaaggaagacattaagaatggtaggtgactttatatcatcctgttaataaagagggactatggacgaagt

SEQ ID NO: 16906 - DNA, 201 bp, Homo sapiens
gatctcggctcactgcaacctctgcctcctgagttcaagtgattttcctgcctcagcttctcaagtagctgggattacaggcaagcaccaccacgcccagytaagttttgtattttttgtagagaggggtttcaccatgttggccaggctggtctctaactcctgacctcaggcgatccgcccacttcagcctcccaaagt

SEQ ID NO: 16907 - DNA, 201 bp, Homo sapiens
tatataaagcaggaaaggattaattttgagtgatgagatacagaaattaattcatagacaaggctatgtttgaactaggccttggaaagattgaccagggygcagtggctcaggcctgtaatcccagcactttgggaggccaaggcgggcggatcacgaggtcaagagatggagaccatcctggccagcatggtgaaaccc

SEQ ID NO: 16908 - DNA, 201 bp, Homo sapiens
cgacacggagagatcctcactcaaaacaaaaaatctaaatgctattccttttttttttaactacttcagaaagaatctttatcttctaattgctgttttttaaatttgatgacctaagatggttgtggctcttcttacataatttcctcataaaaaactgtagactggctgcaacaatttagttctacattttcaataatg

SEQ ID NO: 16909 - DNA, 201 bp, Homo sapiens
gcactatatgctaaaagtgaaaatcagcccaaaaaacttcgatgtggtattaatttggaagttacattcattgcactgtatattaaaaaaaaattttttttagtgagtgtttggcgaggcacagtggctcacgcctgtaatcccagctctttgggaggccaaggcgggcagatcaccggaggtcaggagtttgaggccagc

SEQ ID NO: 16910 - DNA, 201 bp, Homo sapiens
agcactatatgctaaaagtgaaaatcagcccaaaaaacttcgatgtggtattaatttggaagttacattcattgcactgtatattaaaaaaaaattttttttagtgagtgtttggcgaggcacagtggctcacgcctgtaatcccagctctttgggaggccaaggcgggcagatcaccggaggtcaggagtttgaggccag

SEQ ID NO: 16911 - DNA, 201 bp, Homo sapiens
tagcactatatgctaaaagtgaaaatcagcccaaaaaacttcgatgtggtattaatttggaagttacattcattgcactgtatattaaaaaaaaattttttttagtgagtgtttggcgaggcacagtggctcacgcctgtaatcccagctctttgggaggccaaggcgggcagatcaccggaggtcaggagtttgaggcca

SEQ ID NO: 16912 - DNA, 201 bp, Homo sapiens
ccgggtatggtggatcacgcctgtaatattagtactttgggaagccaaggcgggcagatcacctgaggttaggagttcgagaccagcctggccaacatgaygaaaccctgtctctactaaaaatacaaaaattagctgggtgtggtggcgcgtgcctgtaatcccagctacttgtgaggctgaagcaggggaatcgctgga

SEQ ID NO: 16913 - DNA, 201 bp, Homo sapiens
ttcgccatcttaacctggaaacctaaacctacttttaaattgtccgccttatttttaatatgtgtgatatttatgatgaaacattgaaatatactgaaatrcataatatctagttgttccatatatgtttttaaaataaatgcttcagcaaatctgttaactatttttgtaaatctcagcattcattcttgctttttggaa

SEQ ID NO: 16914 - DNA, 201 bp, Homo sapiens
agacaatatggcatgaactgttgttgaatgtctttgtgaatggaattttgttgttaaattcccatatctatctcaaccgtcaacttccatgccattaagtrtcaagagagaatcccaaagctgtttgctttatatgggtatgtacagtagtggatcatctacatatttaattcttcctaggctaaatattctttaaacttt

SEQ ID NO: 16915 - DNA, 201 bp, Homo sapiens
cgcaggtctcgtgccaatcaaaacgtcaacgctgttcacgtatgtatgttattagggatgaatttctgtaaaatatttttccttaggctagtagaaaccargtagtaaacaattactgttaattggttatttttagagccattatacacgtgcccaagcaaatagtcccagaccagcaatgaactcccaagctgctgtacc

SEQ ID NO: 16916 - DNA, 201 bp, Homo sapiens
tttcgtttttcttcctgatcattctgtatcccagctaatgagatcaatcacatctatgccagtttgtcacttaaatcaacatgtagggccaggagcggtgrctcacgcctataatcccagcacttaggaggccaaggtgggtggatcacctgaggtcaagagtttgagaccatcctggccaacatggcaaaacccccgttt

SEQ ID NO: 16917 - DNA, 201 bp, Homo sapiens
tgttttgtatcatggattaggtactagaaccacagaatgtcgatccttctatggttcaaatgacctttctagatgatgttgttcactctttgttaaaaggygaaaatattggcattacatcacgacgcaggtctcgtgccaatcaaaacgtcaacgctgttcacgtatgtatgttattagggatgaatttctgtaaaatat

SEQ ID NO: 16918 - DNA, 201 bp, Homo sapiens
ttgtcacttaaatcaacatgtagggccaggagcggtggctcacgcctataatcccagcacttaggaggccaaggtgggtggatcacctgaggtcaagagtytgagaccatcctggccaacatggcaaaacccccgtttctactaaaaatacaaaaattagccgtgtgtggtggcacatgcctgtagtcccagctactcagg

SEQ ID NO: 16919 - DNA, 201 bp, Homo sapiens
ctcctctatcgtaaggctcccatccttacccgcctagactattacagaacactccaaactacagtctttcagttttcttcctcacctactctgctgtcctyaattcaatccataccagtgtacttgtccctatattccatactgtttcacccatctattcttgcgtatgaattttcctctgtctgaaagaccttcttttct

SEQ ID NO: 16920 - DNA, 201 bp, Homo sapiens
tgtaaaggtatttatacttacctcaaaaaaggatcaataaatgtttatgaaatccatacatatgaatggtttggcttttggtaaaaaaaaaaaaaaaaaaataccctgttcctcatccatgtgctatacttttgaaacagttataaggaaggaaaccagatagatggaaacttcatagtggaaggaggtggtgagaaggaa

SEQ ID NO: 16921 - DNA, 201 bp, Homo sapiens
cgcttgaacttgggaggcgaagattccagtgagtcaagatcgtgcccagtacactacgggctgggagagtgagactgtgtctcagaaaaaaaaaaaaaaamcagcacagaaaaaacagtttataattccctatattatggaaaaggtatatggatggttatgtatggaagtttttgtttgtttgggttttttttttttttg

SEQ ID NO: 16922 - DNA, 201 bp, Homo sapiens
atagattctgttctttcctcaactgtgccttgacaaacttaggaaaaaaaaaaaagttttttttttttttttttgagatggaatctcactctgttgcccargctggagtccagtggtgcgatcttggctcactgcaacctctgccttccaggttcaagcagttctcctgcctcagcctccctagtagctgggactacagga

SEQ ID NO: 16923 - DNA, 201 bp, Homo sapiens
acatttgatatagattctgttctttcctcaactgtgccttgacaaacttaggaaaaaaaaaaaagttttttttttttttttttgagatggaatctcactctgttgcccaggctggagtccagtggtgcgatcttggctcactgcaacctctgccttccaggttcaagcagttctcctgcctcagcctccctagtagctggg

SEQ ID NO: 16924 - DNA, 201 bp, Homo sapiens
aatattaacatttgatatagattctgttctttcctcaactgtgccttgacaaacttaggaaaaaaaaaaaagttttttttttttttttttgagatggaatytcactctgttgcccaggctggagtccagtggtgcgatcttggctcactgcaacctctgccttccaggttcaagcagttctcctgcctcagcctccctagt

SEQ ID NO: 16925 - DNA, 201 bp, Homo sapiens
ttaatattaacatttgatatagattctgttctttcctcaactgtgccttgacaaacttaggaaaaaaaaaaaagttttttttttttttttttgagatggartctcactctgttgcccaggctggagtccagtggtgcgatcttggctcactgcaacctctgccttccaggttcaagcagttctcctgcctcagcctcccta

SEQ ID NO: 16926 - DNA, 201 bp, Homo sapiens
ctcaaactcctgaccttgtgatctgcccaccttggcctctcaaagtgctgggattacaggtgtgagccaccgcgcctggcctttttttttttttttttttttatttcatggaggatttgtatttctttcatccaggtgcctggtgatagggattgtctgattaactatccttttcttagtgtgatttgagattttctaagc

SEQ ID NO: 16927 - DNA, 201 bp, Homo sapiens
agcagatgaactttaaaactgccttttaaaatgatattttagttgcgctaaattatggtatgacactgaatgatacgataagtctcttaaaaatagtagcmaagtagatagaccaatagactgttaaaagaaaaactttcagacaaattttacaatttaactgagcaaggaaaaatgattcacaaattgggtagcccttag

SEQ ID NO: 16928 - DNA, 201 bp, Homo sapiens
tctcaaactcctgaccttgtgatctgcccaccttggcctctcaaagtgctgggattacaggtgtgagccaccgcgcctggcctttttttttttttttttttttatttcatggaggatttgtatttctttcatccaggtgcctggtgatagggattgtctgattaactatccttttcttagtgtgatttgagattttctaag

SEQ ID NO: 16929 - DNA, 201 bp, Homo sapiens
agagagagagagagagagggtcagagcgtcttgccatgtcatccaggctggagtgtagtagtggtacaattagagctcactgcaaccttttttgttttttkttttttttttgaggtggagtcttgctccgtcgccaggctggagtgcagtggtatgatcttggctcactgcagcctctgccttccgggttcaagcgattct

SEQ ID NO: 16930 - DNA, 201 bp, Homo sapiens
gaaacacttaaaggagtatctagaaatataacagggtggagagagatttaactagttttgaattgtcttgctcagttattggaaatcctctatgtaataasgctcagaagataagtccaagcctcagtgatgaagaaagttcaccattagaagtggaaagctggagtgtaatgaaaaggcctattggatttttaatgaaag

SEQ ID NO: 16931 - DNA, 201 bp, Homo sapiens
aattaaccacagctaatcaaatgatgaaattttgtatacggagacttaattaccccttgcttttaattatgtgaaatcttttaatatgtttcctttttttwaaaaaagtatttatttatatttatatgtactcagacacacacacacctacatagagagcttaagagattaatctatcgtgtccttaataaatcaggtaga

SEQ ID NO: 16932 - DNA, 201 bp, Homo sapiens
ggaggcggaggttgcactgagctgagattgcaccactgcactccagcttgggtgacagagtgagactctgtctcaaaaaaaaaaaaaaaaaaaaaaagtgrccattagataagtacttcactgtataagataaggtgctaggggcactgggagaaaaggaaatatagtaccttctgcctagaagcttttatagtgtggtct

SEQ ID NO: 16933 - DNA, 201 bp, Homo sapiens
gataagtacttcactgtataagataaggtgctaggggcactgggagaaaaggaaatatagtaccttctgcctagaagcttttatagtgtggtctcttggartgcttgaaatcatttcttatatagaagatatgatttctttaagtactgaacttaattttgattttatacatatatcactaatattcatacattgtgctat

SEQ ID NO: 16934 - DNA, 201 bp, Homo sapiens
ttagactgttaaaagcattggtttctcttttaaatattagttttcctaggagatatgtggaatgtgcatcttctgcatgttaaaagagttcatttattagyagagcaacagagactaagaaagtacctaggagagcaggtagtgagagcagaattagagggtacaaagataatgtctgatccctgtaattattaatgagaa

SEQ ID NO: 16935 - DNA, 201 bp, Homo sapiens
aaacctaactggggaatgggaaaaatgcagctccagtcaactctagccctccacatggagaaaaggaaattcctaactccacctccctctagacttccagytgtgggaagggaaataacttcagccctctccagccaccctgttccatttgaagggaggaaaaaacctgagaaatgctggtggaaggtcacagtctagagg

SEQ ID NO: 16936 - DNA, 201 bp, Homo sapiens
ctagacttccagttgtgggaagggaaataacttcagccctctccagccaccctgttccatttgaagggaggaaaaaacctgagaaatgctggtggaaggtyacagtctagaggcacgggctcaccagaggactgagacctaatcctaggcctatagaatgcttctcctcccccatcaccctagtactgcattacaaaacac

SEQ ID NO: 16937 - DNA, 201 bp, Homo sapiens
catcattatgtcagtgagtacccagtgtttagctcccacttataagttagggcatgcagtatttggttttctgttcctaccttaatttgcttaggataatsacctccaactccatccatgttgctgcaaaaggacatgatttcattctttgttatgtctgcatagtattccatggtgtgtgtgtgtactacattttcttta

SEQ ID NO: 16938 - DNA, 201 bp, Homo sapiens
ttacagaacactccaaactacagtctttcagttttcttcctcacctactctgctgtcctcaattcaatccataccagtgtacttgtccctatattccataytgtttcacccatctattcttgcgtatgaattttcctctgtctgaaagaccttcttttctgatctcttattatctggcagatgcccttgcagttttgaagt

SEQ ID NO: 16939 - DNA, 201 bp, Homo sapiens
gttccaactcaaaaaccttggtttcatacttttcttgagtctcaactcaaatatttccttctctgtaaatcctttcctgacacacctaactaggtcacccsccaacccattttgtctcacctttgtatcctagaggatacaaagatactttaatctgtatcgtatttgtgtgtctgtctcaattccactggattgtaagat

SEQ ID NO: 16940 - DNA, 201 bp, Homo sapiens
cgagatcacaccagtgcactccagcctgggcaacagagcaagactcactctgaaaattaaaaaaaaataaaattaaaaaaacgtgataaactaatgactargtctttttcttttctttttttaagagatggggtctctaccgggcacagtagctcacacctttaatcccagtatttaggaggccaaggtgggcagattgct

SEQ ID NO: 16941 - DNA, 201 bp, Homo sapiens
gaaatatttagactcttaagataaaatgtgaaataggtaagcctaggtatatatacactttttaaaattaaatttgtttaagtgatgtcacagtcatacaktttttcttttataaatctggtttcatctcacaaccaccttgatcttagacttctagccttcaaaattgtgggttactggagtttgaggctctgtattgat

SEQ ID NO: 16942 - DNA, 201 bp, Homo sapiens
atgtagtttgtagtaggtttcacaaggtactgaaattacatagacgtatatgattcgccatcttaacctggaaacctaaacctacttttaaattgtccgcsttatttttaatatgtgtgatatttatgatgaaacattgaaatatactgaaatgcataatatctagttgttccatatatgtttttaaaataaatgcttcag

SEQ ID NO: 16943 - DNA, 201 bp, Homo sapiens
tgatcgttatgaatgatcaggtaaatagttccactaatatttttatagagattttaaaagttcaaatcatccatgccccccaaaatacatcaacaatttgmtactaaataatttttatctctagggtttttagtcgtgtaattctagtaagtttaaatgtatctgatattacatagaggtcatttcaggtcatagggagac

SEQ ID NO: 16944 - DNA, 201 bp, Homo sapiens
cgtagttgggattacaggcatgagccaccacgcccggctaattttgtatttttagtagagatggggtttcaccatgttagtcaggctggtctcgaactccygacctcagatgatccacctgccttggcctcccattgtgttgggattacaagcgtgagccaccacacctggcctgagtttgcatcttataagcaatgtcta

SEQ ID NO: 16945 - DNA, 201 bp, Homo sapiens
accagaatcagctcacaacaattgtagaataagttactaaattctattgagattttgttgaaagatacctatctagccatatatatatttatatatatatwtatatatataatttatgttagtgtattttggctctttgagagaagtcaaagtttacatctgttaaaagtctcagaaattggcaatagaacaacagtccat

SEQ ID NO: 16946 - DNA, 201 bp, Homo sapiens
atatagagagaaccagaatcagctcacaacaattgtagaataagttactaaattctattgagattttgttgaaagatacctatctagccatatatatatttatatatatatatatatatataatttatgttagtgtattttggctctttgagagaagtcaaagtttacatctgttaaaagtctcagaaattggcaatagaa

SEQ ID NO: 16947 - DNA, 201 bp, Homo sapiens
gggaaagatgttgacaagataagggaatttcttcaaaaggtataagttagtttgcaaataatatctcttcccctcaagcaaggacttattcattgttgccrtaccttcacttggcattcaacaatataagaccattacataatttttacttcaaagtagatgggagtttttgttgaaagtcaaaaccctgtttctcttgct

SEQ ID NO: 16948 - DNA, 201 bp, Homo sapiens
gatatagagagaaccagaatcagctcacaacaattgtagaataagttactaaattctattgagattttgttgaaagatacctatctagccatatatatatttatatatatatatatatatataatttatgttagtgtattttggctctttgagagaagtcaaagtttacatctgttaaaagtctcagaaattggcaataga

SEQ ID NO: 16949 - DNA, 201 bp, Homo sapiens
tttgcccccatgcctacattatcaccatttttaaacagggtatccaggttgtttgtcttacagctttcattgttcaggttgaagcaacattctctgataayaacattcagaggcactttgacagactgctgtgtctgacctggaacaacaatctctgatagcaacattcagaggcactttgtcagactgctttgtctgacc

SEQ ID NO: 16950 - DNA, 201 bp, Homo sapiens
gctttgcccccatgcctacattatcaccatttttaaacagggtatccaggttgtttgtcttacagctttcattgttcaggttgaagcaacattctctgatracaacattcagaggcactttgacagactgctgtgtctgacctggaacaacaatctctgatagcaacattcagaggcactttgtcagactgctttgtctga

SEQ ID NO: 16951 - DNA, 201 bp, Homo sapiens
ggaggcagaggcaggtggatcacttgaggtcaggagttagagaccagcctggccaacacagtgaaaccccgtctctactaaaaatacaaaaattagccaggcgtggtggcacatgcctttaattccagctacttgggagactgaggcacgagaattgcttgaactcaggaggtggaggttgcagtagctgagattacgccg

SEQ ID NO: 16952 - DNA, 201 bp, Homo sapiens
ttttttctactttttattgtcttaaaatactgttcaaatcaggatctggagtatcctgggttatacaaacctatatataagtaaatatacattttttatcrtagtttgctttattgcacttagcagatgctgaatgtttttaaataaatttgaggttttatgataggtgaaatgacatgcacctgtaatcccagttactcg

SEQ ID NO: 16953 - DNA, 201 bp, Homo sapiens
tcaattgtgtgcaatataaatagaaggcccagtccaatattttgagttatatacatccaggaaaataatagcagagtgataataattttgatagaaagttrataatttcacaagtgtattaactttatttgaactgaatgcctgtcatgaaattacagctacacaggtgttttgttgacagaaaactgcatattatggaat

SEQ ID NO: 16954 - DNA, 201 bp, Homo sapiens
ctgagagaaggcggttgcggtgatcctatgatcgcgccactgcactccagcctggcaacagagcaagactccatctcaaaaataaataaataaataaaaaytgaattataaaattcctaaaagaaaataccaaagaatacctacatagagtatttttaaagcatgccttaaggctgcaacataaatatattagcatatttg

SEQ ID NO: 16955 - DNA, 201 bp, Homo sapiens
gaaagaaaattcagctttacaacaataagttcatatcttgaggaaaagtaaaagtacattaagaatgtaaaggcaagtccagtttcgatgcaataagtgamctgtaattcctagaagttctttttacctggccaggcacagtggctcatgcctgaaatcccagcactttgggaggccaaggtgggaggatcacttgaggtc

SEQ ID NO: 16956 - DNA, 201 bp, Homo sapiens
aagtttaatcgttcttgagtcaaatctgaaacaaatatgaatacacatactttcttcatatatattcaacattgtcttaatgtattttgtgtgtgcgtgtsatatactttaaactgcattgtaagttctctggtatcctagatttattaagaataactgatttcaaattgatatatacccaggtttaaaaattgttggcgt

SEQ ID NO: 16957 - DNA, 201 bp, Homo sapiens
tttcaccgtgttggccagaatggtcttgatttcttgacctcatgatccacccacctcggcctcctaaagttctgggattacaggcatgagccaccatgccyggccttttgcccactttttaatgggatttttttttaaactgttgagtttctcatatattctgaattattagtcacttgtgcgatgagtagcttgcaaata

SEQ ID NO: 16958 - DNA, 201 bp, Homo sapiens
taatcttttagctagaccagctaaaaagaaaggatacaaattactaatatcaaaaatgaaagagcagcatctttacagatcccattgacattaaaaagatrataaaggaatattatcactgaccctgtgcttatgaatttcataacctagatgaaatggaccagttatttgaaaggtacaatctgccaaaagtcacacaag

SEQ ID NO: 16959 - DNA, 201 bp, Homo sapiens
attacaggcatgagccgctgcacctggccaaaaattttagtctttctaatagatgtgtagtagtagctcattgtggtctttatttgtatttctctaattaytaatgatttttaatatcttttgatgtgcttacttgctgcctgtatgtcttctttagtgaagtacatgttcaaatcttttgcccatatttttgaattaatt

SEQ ID NO: 16960 - DNA, 201 bp, Homo sapiens
taaatttcatgtttgcccacaaagccttgtgtgagctggtccctgcttgcctttccaaattcatcttattatcattatcctcctggcccactaagcttcaktcctattggcctttcttctgtttctgtaaacatgtcagcctcctttttccttagggtcgttgattctgctgttccctgcttcagaatgagcaactgtctc

SEQ ID NO: 16961 - DNA, 201 bp, Homo sapiens
acagatattataacctttttgtcatatttcatagtttgcttagccagttgtttgatagtaagtctttttgaattgtatgtttattttaaagtctatgcaaygggatattgtcattaattccagtagtcaggttatgtgtgcttgccttccttccttttttcttttgttttaggagattgtaaaaattaataaacaagtgaa

SEQ ID NO: 16962 - DNA, 201 bp, Homo sapiens
gctggtccctgcttgcctttccaaattcatcttattatcattatcctcctggcccactaagcttcagtcctattggcctttcttctgtttctgtaaacatrtcagcctcctttttccttagggtcgttgattctgctgttccctgcttcagaatgagcaactgtctcacctgcattggcttcttaatgctattcagattcc

SEQ ID NO: 16963 - DNA, 201 bp, Homo sapiens
ccctgcttcagaatgagcaactgtctcacctgcattggcttcttaatgctattcagattccgtggtgactccttcatttattacccaatctcacctaaccrcctaatcactcctgggtcatcctgttgcagttctctgcattgtacttaaccactggctgctgttgttgttttctgtttcctcctccaattagaatgtgag

SEQ ID NO: 16964 - DNA, 201 bp, Homo sapiens
aaaacccctaaaaaacctacaattttagttagggaatttcacatttaaatgattgtttcatttagattttggaagtattaaaaatggcctgtggcctttargttgagagcttttggaacttggtcattaaaggcctaagcatatttctcaggccctttgtctttaaatatatctttgtgtgtcacttaagggctaagcttt

SEQ ID NO: 16965 - DNA, 201 bp, Homo sapiens
agattttggaagtattaaaaatggcctgtggcctttaggttgagagcttttggaacttggtcattaaaggcctaagcatatttctcaggccctttgtcttyaaatatatctttgtgtgtcacttaagggctaagcttttttacatggatcatttagctttaagactcagtttccccatctgcaaaatgggtataataatag

SEQ ID NO: 16966 - DNA, 201 bp, Homo sapiens
caagaaagtcttgttggttctatctataaaacatattcagatcccaggcggggcgtggtggctcaacgcctgtaatctcagcactcggggaggccaaggcrggtacattgcttgagtctaggagttcaagaccagcctgggcaacatggcaaaactctgtctactaaaaatacaaaaaattagctaggcgtggtggcacgc

SEQ ID NO: 16967 - DNA, 201 bp, Homo sapiens
tcccttgcctgggtccctgcgtctctccgagcggcttcccctgtggaggtggtgtcggagcaggactcccgggatagccgcggaggctgccctggcccccmtcccggaggggtcgaccgcggctccccgctgtggcgcctgggcggccacggagacctccccgaaaggcggagccgcgagtccggcgccgcgcgggcaggt

SEQ ID NO: 16968 - DNA, 201 bp, Homo sapiens; identical to SEQ ID NO: 2646

SEQ ID NO: 16969 - DNA, 201 bp, Homo sapiens
atcagaaaactcctcagtcacttactgttatgaattgactctcagtaaatgttttgaatgtataaatatcaagtattgattatgtatgtggtcagtgttgyaggctaacatagcatttaagaagtaaacccgttctcaagaaatttctacttctagtggagagagttgatgaatattcagcggttgattcatactactgta

SEQ ID NO: 16970 - DNA, 201 bp, Homo sapiens
tgggtgacaagagtgagatcctgttcaaaaatacaataaataaaaaggtcagatcaaaataaataggccaggcacagtggctcacacctgtaatcccaacrctttgggaggccgaggcagacagatcacctgaggtcaggagttcaagaccagcctggccaacaaggagaaactccgtctctactgaaaatacaaaataag

SEQ ID NO: 16971 - DNA, 201 bp, Homo sapiens
caacagcgtacaggttccccttttcccacatattcaacagtgtccatcattattccctgtcatttatttatttatttatttatttatttatttatctatctatctatctattgagatgaggtctcattctgttgcccaggctggagtacagtggcacaatctgagctcactgcaacctctgcctcccggattcaagtgatt

SEQ ID NO: 16972 - DNA, 201 bp, Homo sapiens
gatttgagattttctaagccaccttgattactcaaagctggactgcagaccataaaggaactgacttaattctgggttacttttgctcccaggatatagcytttctgaattctaactcaatcagggtctttacctttgttggaaccctagatttggacttttttagatctattctgtagaagccaccaagtctatttcttg

SEQ ID NO: 16973 - DNA, 201 bp, Homo sapiens
aaatgggtataataatagtatctacttccaggagttattttgaagatcatttgaagcacttggcatattgggtgatacatagtatgtgctcagtaattgtyacccattattctgtttttattgctgttatctacagctgtgcagctcatgtttctcggaatagtcttgtagattttggattcaaagtttgatctttttatc

SEQ ID NO: 16974 - DNA, 201 bp, Homo sapiens
ccaacagcgtacaggttccccttttcccacatattcaacagtgtccatcattattccctgtcatttatttatttatttatttatttatttatttatctatctatctatctattgagatgaggtctcattctgttgcccaggctggagtacagtggcacaatctgagctcactgcaacctctgcctcccggattcaagtgat

SEQ ID NO: 16975 - DNA, 201 bp, Homo sapiens
aggtgggagaatcgcctgagcctgggaggttgaggctgcagtgagcccagatcacaccactgcactccagcctaggtaaccagagtgagactctgtctggraaaaaaaaaaaaaaaaaaaaaaaaaaaattcagatcccagcacatgtcattttttctattagcattatactagttcaaacctacattatcttttgcctag

SEQ ID NO: 16976 - DNA, 201 bp, Homo sapiens
tagtgtgatttgagattttctaagccaccttgattactcaaagctggactgcagaccataaaggaactgacttaattctgggttacttttgctcccaggawatagcctttctgaattctaactcaatcagggtctttacctttgttggaaccctagatttggacttttttagatctattctgtagaagccaccaagtctat

SEQ ID NO: 16977 - DNA, 201 bp, Homo sapiens
aagagctggcagctggcaggttttttttttttttttttttttgagacaaagtctcgctctgtcacccaggctggagtgcagtggcgcaacttggctcactkcaagctccgcctcgcgggttcacaccatgctcctgcctcagcctcccgagtagctgggactgtagatgcccgccaccatgcccggctaatttttgtattt

SEQ ID NO: 16978 - DNA, 201 bp, Homo sapiens
caccaacagcgtacaggttccccttttcccacatattcaacagtgtccatcattattccctgtcatttatttatttatttatttatttatttatttatctatctatctatctattgagatgaggtctcattctgttgcccaggctggagtacagtggcacaatctgagctcactgcaacctctgcctcccggattcaagtg

SEQ ID NO: 16979 - DNA, 201 bp, Homo sapiens
taaaataaaataaaatgtattgggaaaatgtttagttttactaaattcagtaatgcacaaaggatgaaaagaggataggcgctttaggtatttatggtctrttaatgtctttttttatttttacataggacaaaagcaataaccttggttttcacaatactttattagactttgtttcaaggaaattttttctttctctct

SEQ ID NO: 16980 - DNA, 201 bp, Homo sapiens
agttctctttctaattttgtcaggtgttcttaactaattctttctttcccagcctcctttttttttttttttttttttgagactgggtctcgttttgttayccaggctggggcaaagatggctcattgcctcctcagattcccgggctcaagtgatcctcctgcctcagaccctgccccgcgccccccaccccccatgtag

SEQ ID NO: 16981 - DNA, 201 bp, Homo sapiens
tccaccaacagcgtacaggttccccttttcccacatattcaacagtgtccatcattattccctgtcatttatttatttatttatttatttatttatttatctatctatctatctattgagatgaggtctcattctgttgcccaggctggagtacagtggcacaatctgagctcactgcaacctctgcctcccggattcaag

SEQ ID NO: 16982 - DNA, 201 bp, Homo sapiens
aacctgggaggtggaggttgcagtgaggggagattgtaccgctacactccagcctaggtgacagagcaagactccatctcaaataaaataaaattaaaatwaaataaaatgtattgggaaaatgtttagttttactaaattcagtaatgcacaaaggatgaaaagaggataggcgctttaggtatttatggtctattaatg

SEQ ID NO: 16983 - DNA, 201 bp, Homo sapiens
ggtggtatagacagctttgctttttgagcacccctgtagcaactttcaaactttatatatttcttgtcccagcaaatccttattagcaaaatggattcttktataagttaaaaagatgtggtgtggtaaaaattaatgtcactcttgtggacttaacattcacgttttaaaactgttgccagcaatctcagggatctaaga

SEQ ID NO: 16984 - DNA, 201 bp, Homo sapiens
acaccattctcctgcctcagcctccctagtagctgggactataggcacccgccaccatgcctggctaatttttgtatttttagtagagatggggtttcacygtgttagccaggatggtctcgatctcctgacctcgtgaatcaccctcctcggcctcccaaagtgctgggattacaggcgtgagccaccgtgtctagccgg

SEQ ID NO: 16985 - DNA, 201 bp, Homo sapiens
gactcctgctttgaatatatatgattagaattaatgttctgaagaaaagtgcttgggctgagtagaaaatataagatattccagatggaggaaatcttgtmagcagaagtgtgaaaaaggtaaaatagatctattatttgccatattaacatgagcaaatggcaagtgttcttttttttatttttaaatgagacatgagac

SEQ ID NO: 16986 - DNA, 201 bp, Homo sapiens
attacaggcgtgagccaccgtgtctagccggtattattcttactaaaacaatttttaaaaatgtggacagaataatagagttagtacctttgaaaagtatrggggaaagggctgaaaaatgtgacacaattagcaatgaagtttttaactgtgaaataaaagcacgattaacatcagtatctttttcacagtctttttcaa

SEQ ID NO: 16987 - DNA, 201 bp, Homo sapiens
aattgacttgttacttcctttacagttttcttaactttctaaaaccattcattcatagacttttaaaataatagctttattgaggcataattcacataccrtgtaattcacccaattaaagtacacagttgtatggtttttagcatgttcacagagctgtgcaaccattaccacaatttgaaattcttcatcagccctgaa

SEQ ID NO: 16988 - DNA, 201 bp, Homo sapiens
ttaactttctaaaaccattcattcatagacttttaaaataatagctttattgaggcataattcacataccatgtaattcacccaattaaagtacacagttrtatggtttttagcatgttcacagagctgtgcaaccattaccacaatttgaaattcttcatcagccctgaaagaaactgtcttttagcagtcacttcccat

SEQ ID NO: 16989 - DNA, 201 bp, Homo sapiens
tcttcattctttgccaacttttaggccaccttgaagagattaccttgattatcttgcccacacactaaattgtgtgaccacagggcaagatacaacaattygtcatctcagttttcttatttctaaggttagtaaactagtacttagcacatagagttgttgcatggattaaatgagctatctatagattgctcattagcg

SEQ ID NO: 16990 - DNA, 201 bp, Homo sapiens
ccagaataagaaacagcacattaccagcaccctcaggctcctctcaacacccactgcaggttatcaatttcccttagcaaaattaggctgttttatgccayactataacatatcttcagttgccaaataatgggaaagatagagttaatctcagcttactcgtatataagtcatataaaacactatttttattttctcttt

SEQ ID NO: 16991 - DNA, 201 bp, Homo sapiens
taatagatggaagagaatggagaaaaatggaagaaatttaaagggcacaagaaaacctccgttattcccaattataatataaaatattgtaagaaaaaaaktttacagcattaacaactagtggtaatctttttattaactaccattttattttgtagttttgacagatcttctagatgccatgcacactcttagggaaaa

SEQ ID NO: 16992 - DNA, 201 bp, Homo sapiens
ataatatacctttcttagaagtattacatgaggaataaatgaaataacaaatgtgaactagcatcctggttggttcatacaacttcacagtaaacgatagkttcttctctgtcactcagagttgaaaactgcaaagtctatcacattattcccgatgaatgtagtaatgtcctaagagtgatcactcattgatgacatgtc

SEQ ID NO: 16993 - DNA, 201 bp, Homo sapiens
tttttttttttttttttttttttttttttttacaattgcttgaagccctttactttccccttctccacgtctttggctgactttcattcattcttcaggcyttgtcacgtctatcacttattttctgactacttccctgaccccaatcctggattagttgccccttctgtgtgctgccatccatccatttaatatcttctg

SEQ ID NO: 16994 - DNA, 201 bp, Homo sapiens
tagaattggttagtaagtaaatagaaacgctgctgcactttttagtcattaatcagtacctagagctcttaatgtctttgcttctttactaaagtcttacygtatcatcacaattgtataactgacttgaatttcatctcaaggagtttaactttttacaaagcataatcttgctaaaactttcctactgattttacagct

SEQ ID NO: 16995 - DNA, 201 bp, Homo sapiens
tgtcgagaatgtagacttattcgcagtaaaaaaggagaagaaccagctcactcaccagtattttgtagattttactactttagacggtaagtgaaaatatkagattgggaaaaaagtaatttattgatttgatattggaaattatatagtgttattctgagtgtcccttttggatgggggagtaagtctttgagtctccat

SEQ ID NO: 16996 - DNA, 201 bp, Homo sapiens; identical to SEQ ID NO: 2655

SEQ ID NO: 16997 - DNA, 201 bp, Homo sapiens
gttggcttcttccttgacttggatttcttccttgacttggtatggatagttaactagaaacagatgttaactccttgaccagtgcatttctctttcctcawtctaatagataagctttaatgaatatctttagtggatattctaatagataagctttttttttttttttaaagaagcttcctagtgggcagcagtataaac

SEQ ID NO: 16998 - DNA, 201 bp, Homo sapiens
gtagagtcatttcatttaacacaggaactgagacttttgaaggaagaaatcaattatgatgataaactacaggtaagagttgggtgttctaggtcctgttyttcaggctttttatattcagaaatatgatacatgtataacagcttaggcagtcattgcctagttggtcacattagggtgacaaccaaagattaacaccaa

SEQ ID NO: 16999 - DNA, 201 bp, Homo sapiens
cgctgggagagcggacgcggctggcgaagctggcgagcgggggtcatccgagccgtgtcacacagggacagccgcaatccggacctggcggtaagagagcsagcgccccccttttcccctgccgcgcccgcacccggctctcgcagacgtaccttgcaggcttccctctggcgcctcgctcagcccggccaactggcggtc

SEQ ID NO: 17000 - DNA, 201 bp, Homo sapiens
gctgcttgaagaatatggagtcagaacctgtactcttattcagttccttggtgatgctattgttttgccagcgggagcacttcatcaggtatatacaaacytatttctaacatattttttactgactgaaagaactagttttgaaaaaaaaattgctcttagtatagatataaatggaagaagatgcaaataagagaatta

SEQ ID NO: 17001 - DNA, 201 bp, Homo sapiens
ttgaggaagaagatttggatgacattttaaggaaaagattgaaggactcaagtgaaatacctggtgctctgtggcatatttatgctgggaaagatgttgasaagataagggaatttcttcaaaaggtataagttagtttgcaaataatatctcttcccctcaagcaaggacttattcattgttgccgtaccttcacttggc

SEQ ID NO: 17002 - DNA, 201 bp, Homo sapiens
aatgtaacttaacagatttttagtctttgaaacatctgttttatgttgtctaataaaaagaaacaagtaattggaaacaaaatactgggtcctaatccctrtttctagcactaatttcctttgaccttaaagatgccgtttatactgttttgcttatggagaaatgtttggcagttccataagcttttgaaaatggaatta

SEQ ID NO: 17003 - DNA, 201 bp, Homo sapiens
actttgtagctataatactaaggtctagaagtcccctaagcattaaataaaagagttagactaaatgacctttgtagcagtgagtacactagctctgtgarcttgttaaaggtgaaaaaacagccttctctggtcaacattaaacgaatcaagccctaattattttagtctttaggataagaggcattcaactaaagctag

SEQ ID NO: 17004 - DNA, 201 bp, Homo sapiens
gtgacagtcaggtatgatgaggccactgctctccagcctgggtaagagagcaagactctgtctcaaacaaacaaacaaacaaacaaaaaagaaagtctatrtatcttttaactgttatttatttatctatttataagcctgcagtggtttctggtgtgcataagaaaatgaacattagcctatggaaggcggaatcaatta

SEQ ID NO: 17005 - DNA, 201 bp, Homo sapiens
cttgaatccaggaggcggaggttgcactgagccaagatcgtgctgctgcactccagcctggtgacagagtgagaccctgtctcaaaaaaaaaaaaaaaaamaaaaaaggctgggcacagtgaactcaagcctgtaatcccagcactttgggaggccgaggcaggcagatcacctgaaagtcagacatttgagaccagcctg

SEQ ID NO: 17006 - DNA, 201 bp, Homo sapiens
aggattaagctatcctgacccaatgtcattatatttaaccaagtaaactatttgtagaaatgaatcatatctctggattatgtaaagctttcttgttagtsatggtgtaaactgagagccagttttagttcagatagccagtatatcttcatagtctcatggattggagagatgactttatcaattctcagagttgactca

SEQ ID NO: 17007 - DNA, 201 bp, Homo sapiens
ttactgttaattggttatttttagagccattatacacgtgcccaagcaaatagtcccagaccagcaatgaactcccaagctgctgtaccaaaacagaatayacaccagcaacagcaacaaagaagtatccgtccaaataagaggaagggctcagatagcagtataccagatgaagagaagatgaaggaggaaaaatatgat

SEQ ID NO: 17008 - DNA, 201 bp, Homo sapiens
cggctaattttttgtatttttagtagagacggtgtttcaccatgttagtcaggatggtgtcgatctcctggccttgtgatccgcccaccttggcctcccaragtgctgggagcattttttaaggtttgaagagaacctagattttaaatcccaccaagttgtcattcagatattaaagccataataaaaatttttatcaag

SEQ ID NO: 17009 - DNA, 201 bp, Homo sapiens
aggcctggtgacccaagtgccctactgtactcagattattaattcaaggtttctatttttattgttgcactcacatgtttattctgacccttcactctcaygtcattaatgtagctgcagctgcacaaagataagctagctagaggaacacaggagagccaagagctggctaacagatttgtgtctttttccttaacatcc

SEQ ID NO: 17010 - DNA, 201 bp, Homo sapiens
gtagttctaggtgtttatgtgtaatagagtagaaattatggaaagatattttcaagctggtaagttggtgagcggccacagttaaaagctgaagggttgartgtttcagcatgagaaatagtggcgggaggatttctaacttactcattgattgtgttcagttctgaaaaagttttcttgatgtcccattgcagatttgaa

SEQ ID NO: 17011 - DNA, 201 bp, Homo sapiens
ctatattgcccaggctggactagaactcctggcctctgccttgtgagtagctgggacgacaggtacacaccaccgtatctatcttcagattttttttttttaccccatttcttaaattgttatgtcatatttcattgttttatccaaacatgacaattagttgccatttactagaatttaacagaatgtttagatttctca

SEQ ID NO: 17012 - DNA, 201 bp, Homo sapiens
ccaaagtgctggaattacaatcgtgagccaccaggcctggcaagaaattcttaaatgcattgtgtcacatccttttacatcttaccgaaaaataaatataraagaacaatatagaaaaataatgcctacaaaaatgtcttaaaatttgtttttaaacttatgcctgtgtatgtgttttccctaacttacatagtaaacatt

SEQ ID NO: 17013 - DNA, 201 bp, Homo sapiens
gatgtttagggtagagtccagactcttctccctgtgcagtcatgtccagcattatctttttatgtccacagtatgtgagtttcgtcagtgaagaaactcatctgagtctttgattttccagttttactggggctcaaaatcacatactagctgaaaggtgtagctttggcctctgggaggtcagactaataactttagttc

SEQ ID NO: 17014 - DNA, 201 bp, Homo sapiens
acatttgcaaaggagaattttatttaaaaaaagtgattgatgtagtttctttactgtgaaaagaaaaatgttttcctgtttttaaggtgacttgttttttyagtcccctcctctcatatgaattccttcataaaatctatgatgtttggtaaagtaattgatcagctgtcttaatatatatatatgtgtgttgtgtgtatt

SEQ ID NO: 17015 - DNA, 201 bp, Homo sapiens
tgttcaccccagccctcctgtgttgagaatcactgtctatatgctttacttgccccttcatctttggtcctgatgaaaaatgacacaggtcattgtcactmtaaatccatattttgtaatttcaactgggtccttaattttgcctggtagtcctttaatacttcctagtccattctcccatttttcatggggctattttag

SEQ ID NO: 17016 - DNA, 201 bp, Homo sapiens
actttgggaggttgaggcgggagaattgcttgagtccaggagttcaagaccagccagggcagcatagctataccctcatccctaccaaaaaaaaaaaaaaattagcctattgtagtggcgcaagccttgtagtcccagctactcaggaggttgaggtgggaggattgcttgactccaggagtacaaggctatggtgagcta

SEQ ID NO: 17017 - DNA, 201 bp, Homo sapiens
gaatgagtcttttgtaatctttgtgaaataatttgtaaaatttcgttaattgatcttttgtcaatattaatgcaagttagagaaaaatgttctttactggyactgtgtaattgaaatcagttacaaagaatattcttagtatgcaaacttaagtatatacatttgcaaaggagaattttatttaaaaaaagtgattgatgt

SEQ ID NO: 17018 - DNA, 201 bp, Homo sapiens
atagtaggaatctgtacctctgacttagcaaataaaatgcctttggcaagttctctcattcattaatggatatccctgagccatttcccatcccctttcarcctttatttagagccattgggataggtatagattaagacaattgggaaagtgagagcctttatttattttctttgagacggagtcttgctctgtcacccc

SEQ ID NO: 17019 - DNA, 201 bp, Homo sapiens
tagtctaactggtgaggtaatcacgatcaatagtaacttgaactgaagaatggttttgttccagtatatgtttctgcttatagtcactgaaaagtttctcrtctattccaaagccctgcttctgtgcaaatttagttcctactacatcaagaaaggaattttaaggatcagaactacagaaacattcagttgatttctttg

SEQ ID NO: 17020 - DNA, 201 bp, Homo sapiens
agcatttttgagttttactttcttgcccttattgttttttctctttttttcattgttcttaattttcttttatgttttgtttccatagtctaactggtgargtaatcacgatcaatagtaacttgaactgaagaatggttttgttccagtatatgtttctgcttatagtcactgaaaagtttctcatctattccaaagccc

SEQ ID NO: 17021 - DNA, 201 bp, Homo sapiens
tcattgcaaaaagtgtagatgtggctattcaattggatacagctattctgtagtaaccattaaaaagttaaaaattaaaacatgtaattttctgactagtrgaaaaaaattgggatgatacaaacagaattggaggccgggtgcagtggctcaagcctgtaatcccagcactctgggaggctgaggcgagcggatcacctg

SEQ ID NO: 17022 - DNA, 201 bp, Homo sapiens
actttgggaggctgaggtgggtggatcacctgaggtcaggagtttgagaccagcctgccatcatgaagaaaccctgtctctactaaaaatataaaattagscaggtgtggttgtgcatgtttgtaatcccagctacccgggaggccgaggcaggagactctcttgaacccgggaggtagaggttacggtaagctgagatcg

SEQ ID NO: 17023 - DNA, 201 bp, Homo sapiens
tgagcctcccaccttggcctcccaaaatgctgggattacaggtgtgtgccacctacacctgaccttactatttactcttaattgtaaattttttgtttctsttatggcactgtgtaccttcccctccccagtatccattctatcttttatccaattgtgtggtttgactacaggatgggccatgatttttctaagctaact

SEQ ID NO: 17024 - DNA, 201 bp, Homo sapiens
ggtgctattccccctgagttaaaaaagacctgtcaggctgggctcggtagctcatgcctgtaatcccagcactttgggaggctgaggtgggtggatcaccygaggtcaggagtttgagaccagcctgccatcatgaagaaaccctgtctctactaaaaatataaaattaggcaggtgtggttgtgcatgtttgtaatccca

SEQ ID NO: 17025 - DNA, 201 bp, Homo sapiens
ttctggccaataaatgagttgtgagaaaaacagatgtttgaaaggaaattgtgcatcctaatattgctgcagtatttaagttccagtatgagatcttcaargctgtcttttttttttcttcttccgttctcagatcctgaggcaacattttgaggtgctattccccctgagttaaaaaagacctgtcaggctgggctcggt

SEQ ID NO: 17026 - DNA, 201 bp, Homo sapiens
tttctctagaacactatactttagcaagggttaaaatttggagaatagcaaactgactttctcatgtatttccttcaggttctaatgtttttaaacattgrtagggttgaggaaataacagatcagaatgtatccacttcaaacaacaaatggttatactctgaattcttggctgaggtacttgtgatattttaaaatgta

SEQ ID NO: 17027 - DNA, 201 bp, Homo sapiens
caaaagacacagtctcattctgttgcccaggctggggggcattggcacaatctcagctcgctgcaacctccacctcttgggctcaggtgatcttcccaacycagcctcccgagtagctgggactatagcacataccaccacgcctggctaatttttgaattttttgtagagacagggtttcaccatgttgctcaggcgggt

SEQ ID NO: 17028 - DNA, 201 bp, Homo sapiens
tatctttggatcgcaagttaaaacctcataatctaaaagtgaaaaaaatagggcaagcaaatgaaaaaccatgtaagcgaatgtattggaaatgtaattcyaattgtgcagtttcacatataattttgtaggacgaggatattgaagtaggtaaaattgagatttgataggaaaaaagtaagtaatgagaagtgggtttaa

SEQ ID NO: 17029 - DNA, 201 bp, Homo sapiens
agggcaagcaaatgaaaaaccatgtaagcgaatgtattggaaatgtaattccaattgtgcagtttcacatataattttgtaggacgaggatattgaagtargtaaaattgagatttgataggaaaaaagtaagtaatgagaagtgggtttaagagttttaacagaggattggacatatttttatagggcaagaggtaaagt

SEQ ID NO: 17030 - DNA, 201 bp, Homo sapiens
gtttgcatttcagcatttagctgtaactgaaatgattcctagtttagtcacagcataccctctctaaattgttagcttaattttcccttttttttttttttggaactcaatttatatcgtatgggccaggtacagtgactcagacccgtaatcccagcactttgggagactgaggtgggaggattgcttgaggccaagagt

SEQ ID NO: 17031 - DNA, 201 bp, Homo sapiens
taggctcgaaatttaatagtttcagctactgaagaggctgaggtagaaggattgattgagcccaaagggtgacagtcaggtatgatgaggccactgctctmcagcctgggtaagagagcaagactctgtctcaaacaaacaaacaaacaaacaaaaaagaaagtctatatatcttttaactgttatttatttatctattta

SEQ ID NO: 17032 - DNA, 201 bp, Homo sapiens
ttaagagttttaacagaggattggacatatttttatagggcaagaggtaaagtagaaagctcaggcagaaatgagctgattacatgcacaaaaagtgttaygtttgaaaccagagtctaggagaataataagaaatgaaggagagaaaaaactttgttttagcatattatattttaaatgttggagatactagcattggaa

SEQ ID NO: 17033 - DNA, 201 bp, Homo sapiens
ttcaatgggagccccagtgagtgatgccagatttttggttttaatgtgggccttaaatagagatgatttggagacttagtttttggctctgaactacccastatgctgatgaaatcaagtgtaccaaattgctaggcatgtttctatttgcattataactctctttaccttgaaagctggcattttctgtctttttttcca

SEQ ID NO: 17034 - DNA, 201 bp, Homo sapiens
gatttttctatttctgtagaaaacatggggatattaatagggtttgtatgtattgaatctgtagatggctttgggtagtgctgatatcttaatatcggatyttctgatccacaaacacagatgtctttccatttatttgtgtgtttaatttcctttgatatgtaccagtcatttgtctccttggtttcttacgtattattt

SEQ ID NO: 17035 - DNA, 201 bp, Homo sapiens
taggaaaattataaattttaatgtagttcaatgtatccatcttttattttgttgttggtgcttttggtgtcatttcccagaagttgctgccaaatctaatrttattgaagctttcctgtcttcatttgcttctaagtcttctatagtttcagctcttgatttagttcttctatccatttttagttgacttttgtgtatggt

SEQ ID NO: 17036 - DNA, 201 bp, Homo sapiens
tccaaaggttgatttatgaatacgtaatctgtgaaatttatttgtaatgccctgagccatttactttttcaatgaaaacttcaaatttaggaaatttttttccctttgtgtgcatgaaagcttacaattccaaattcattgtaatatttgtacaggtatctacctaatattttttacctacctattttaatagtttctgag

SEQ ID NO: 17037 - DNA, 201 bp, Homo sapiens
ctttctgtccccaatgtgcttttcttgttagaaaggtatagttctttggagtcaagctgtttctgggttttatacgattttaaataagacgaaaaatgttstcaattaaaatgttaaatgccatgcagaattgattatctttttttttttttggtttcttacatgtgacgctgccagtgctttctttgagtagcgtaggta

SEQ ID NO: 17038 - DNA, 201 bp, Homo sapiens
cacgtgcccaagcaaatagtcccagaccagcaatgaactcccaagctgctgtaccaaaacagaatacacaccagcaacagcaacaaagaagtatccgtccmaataagaggaagggctcagatagcagtataccagatgaagagaagatgaaggaggaaaaatatgattatatatcacgaggaggtaggacccacttttttt

SEQ ID NO: 17039 - DNA, 201 bp, Homo sapiens
aaattgcccagcttgagtgttctagagaaaacagataaaagccttatagttattttaaacattcagattactactgtaaactctgttaactttttttttttaaatagaggttcaggaaaatctcaagaaactgaaatttagaatattggactacctataaaaaagcagtataaagggtgcctgaaatcgaactgctcactg

SEQ ID NO: 17040 - DNA, 201 bp, Homo sapiens
tcacctgagccaaggagttcgaagtacagtgagctatgattgtaccactgcactcaagcctgggtagcaaaatgagactgcctcaaaaaaaaaaaaaaatsaaactatagtttaggctgtttctggaggattcattagtgctcccatcgaatgtatttaggagacccgcacagggttgcaaaagatgggctttgtaggtca

SEQ ID NO: 17041 - DNA, 201 bp, Homo sapiens
agaatgatagaatatttatccttttgttactggcttatttagcttactacaatattcttgaggttcatccatgttgcaacatgtgacatgatcttcttcttatttaaggctgtataatattccactgtatgtatgtgccctattttctttctccattcatctgtcagtggacatttgggttgctttcacctcttggctgtg

SEQ ID NO: 17042 - DNA, 201 bp, Homo sapiens
agtggtgtctttttttgcttggtcctgtacaatcagagtaccacttgaggccattctaatgctgtaggctgaggtaacttgcgtcttcatgtaagttacttaatagattgttaaattttatttactttttaataaagtaaaatacttgtgaaagcacatttatcggcaccagggaaagaaagtgttggcattcataattga

SEQ ID NO: 17043 - DNA, 201 bp, Homo sapiens
tgacctcatgatccacccgcctcggcctcccaaagtgctgggattacaggcatcagccaccacgcctggccaccttcttgatatgtttctcagctattgcmttattggtatatagaaatgctactgatttttgcttgttgatttttttatcttgcaactttactgaattgatcagttctatgaggtttttggtgggatctt

SEQ ID NO: 17044 - DNA, 201 bp, Homo sapiens
tagaatgatagaatatttatccttttgttactggcttatttagcttactacaatattcttgaggttcatccatgttgcaacatgtgacatgatcttcttcttatttaaggctgtataatattccactgtatgtatgtgccctattttctttctccattcatctgtcagtggacatttgggttgctttcacctcttggctgt

SEQ ID NO: 17045 - DNA, 201 bp, Homo sapiens
gtggaaactggcagtgtacctgctgtttcttgagatcatgacaagacaaaaacaaatcctgttgtctcattaacatattttaaagtatattttttaaaacktaacataattgcatcttcagcaaaatatgaatagtataatacccaggctccttctctggaattgtctggttcctctttctttctaggatatcagtagcaa

SEQ ID NO: 17046 - DNA, 201 bp, Homo sapiens
caatgaatggtgtatctcaagtgagtaaaaatctctggttattcaaataaaatctgtggttaaattagtcaactttgatatttatttgaaatttggtttargacttatgtatgaattaggtttgctgtgtttctgtgtaaattttttgtatctatactactaattgaattattgaagaaagtgtttaaaaatgtaattgtt

SEQ ID NO: 17047 - DNA, 201 bp, Homo sapiens
gtagaatgatagaatatttatccttttgttactggcttatttagcttactacaatattcttgaggttcatccatgttgcaacatgtgacatgatcttcttcttatttaaggctgtataatattccactgtatgtatgtgccctattttctttctccattcatctgtcagtggacatttgggttgctttcacctcttggctg

SEQ ID NO: 17048 - DNA, 201 bp, Homo sapiens
aagcacctcttctcccaaatacaggttttataaaattaccacttgtcttaatgagccacacttaccttggaaaatcagattatgtatttcaatagaaataygttgaaactaacctgtagtttctaactatataaacctttaatctttacgttcttgctgtggatcttgaaagagctttctcctatgtaaaccaacttttgg

SEQ ID NO: 17049 - DNA, 201 bp, Homo sapiens
gtaacacaataaaacagaatatgattttgatttaggccccttaaaagctaaaggttatttatctttctatgatgagaatatttttggaaaatatttaacgyagtctcaatgttgatctttctttagaattaagttttaagcctctataaagtcattaggtttattagagcaaaattatgacctgaaatagttgagttcgtt

SEQ ID NO: 17050 - DNA, 201 bp, Homo sapiens
attaagctaaatattttttaagattgttgaaattaccagttaattttttcaggtataagtaaagctcacagaattgtgtgtgtgtgtgtgtgtgtgtgtgwgtgtgtgtgtgtgtgtgtgtgtatgtgtatttttttttttttttttttccgtgatggagtctcactctttcacccaggctggaatgcagtggcacgttct

SEQ ID NO: 17051 - DNA, 201 bp, Homo sapiens
catgacccctatctaattttagtatacccccaaaagaaactcactatccgttagcagtcacttgtgttcctcttcctgccacttccagccctttggcaacygcttatctactctcttgtctctatggaaatgtctgttgtgaacattccatataaatgaaatcatataatctgtgcccttttgcatctagctttctttcac

SEQ ID NO: 17052 - DNA, 201 bp, Homo sapiens
cagtgcactccagcctggtgacaaaagtgaaactttgcctcaaaacaaaaacaacaacaacaaaaagggctggatgtggtggcttacacctttaatcccakcactttgggaggcgaaggtgggtggattgcaaggtcaggagttggagaccagcctggccaacatggtgaaaaacatagtgaaaccccgtctctactaaaa

SEQ ID NO: 17053 - DNA, 201 bp, Homo sapiens
tccagagttgatgtgatcatttaaggatgccagggctgttgaagactgggctgttgttctcttggtcttttcctcatggtcagttacaatatagctgataytgttgttgtcttccttagttcagctccaggcaggaaggaggaggaagcagaaaagggcaagaaggctcatagtgtcacacacacaatgggtgggttcatt

SEQ ID NO: 17054 - DNA, 201 bp, Homo sapiens
tagcattgtgatcatcatcttaggtattcagtcggtgaatttctgtttttaggtgtaatctaaaagttctgtaaaataaacatcaacaatgttgtatgctkcttatggctgttctaggtctctgtgtttttattatgaacttgtatctgatcttttcaagtttttgtctcatggtattttttcctcaatgccaattaacag

SEQ ID NO: 17055 - DNA, 201 bp, Homo sapiens; identical to SEQ ID NO: 2647

SEQ ID NO: 17056 - DNA, 201 bp, Homo sapiens
cctactgaacctttgcatttaacactggatcactgtccttttggaaattctttgttcctgttgctactctgatacttctcttcaggttttcctattttttwaatcagtctttgctgtatgtttgttctctctgtagaagatttagtgtttatgtgatttttttttgtagtgctccttattttctgtagtgttcctttttgg

SEQ ID NO: 17057 - DNA, 201 bp, Homo sapiens
atccatattaagatgttttctagtctcttttttttcagctgtctagttttgttttgctgttttttgtttgtttgtttgtttgtttttttggttgtgcataygggtattctgaatacctagattcgctcaaagctaaaattcaaaaataaaatactttaaaatgaagcccttgtcagtctcttgccaaaacagttgtctcta

SEQ ID NO: 17058 - DNA, 201 bp, Homo sapiens
agtagttatgacatgctgagaagtattagtgcatttactgaagtactgtgctagtgattggcaacataatgtgtctggtttaagatattaaaatttttaawcctaatgaagaaaggacaaattaaaaatgaatcacagttaaaatgtatacatacattattgagaaatgaattacattattttgggttctgcagagaatca

SEQ ID NO: 17059 - DNA, 201 bp, Homo sapiens
gcctcctgagtagctaggactacaggtgtatgccactgtgtccagctaagttttgtatttttagtacagactaggtttcgccatgttgtccaggctggtcytgaactcctgacttcaggtgatccgcctgcctcagcttcccaaagtgctgggattacaggtgtcagccaccatgcctggctcatttgctgtcttaaccac

SEQ ID NO: 17060 - DNA, 201 bp, Homo sapiens
atttgagagtaggctgactggactacataatttggaacttttgaccccattaccttcagtcttctctttgattttattttgctctgtttaacaaattgttytgggctgagcacggtggctcatgcctgcagtcccagcactttgggaggctaaggtgagaggattgcgtaacgccagaatttgagacaagcctagcaaaat

SEQ ID NO: 17061 - DNA, 201 bp, Homo sapiens
tgaaccatggcttttttgatctataagataggtactattttacctaaaagggttgttatatgaattgagtgaaattgtatgaagcagttaccacagtgccrttttatgtttcttttactaaacctggttgtgcacacttagtgttagggagacttcagtagacagtacagtaataaaggtcagtaacctcaaggctcagtc

SEQ ID NO: 17062 - DNA, 201 bp, Homo sapiens
atccttcagagatgttacatgttgcctaggaactgtgctatattaccatagttaactaccataacgtaaggacttgtactatattaccataatcaactacygtaatgtatgctataggccaagcgcggtggctcacatctgtaatctcagcactttgggaggccaaggcagggagatcacttgagctcaggagttcaagac

SEQ ID NO: 17063 - DNA, 201 bp, Homo sapiens
ggctgggtgcggtggctcacgcctgtaatcccagcactttgggaagccgaggtgggtggatcacgaggtcaacagattgagaccagcctgaacaacatggygaaaccccgtctctattaaaaatacaaaaataagctgggcatggtggcgcgtatctgtagtcccagctacttgtcaggctgaggcagaagaatcatttga

SEQ ID NO: 17064 - DNA, 201 bp, Homo sapiens; identical to SEQ ID NO: 2644

SEQ ID NO: 17065 - DNA, 201 bp, Homo sapiens
ttggcctcccaaagtgctaggattacaggcgtgagccaccatgccctgccacagttcttttttttttttttttcctttggagacagggtctcaccctgttrcccaggctggaataaggtggcatggtattggctcattgcaacctctgcttcctgggctcaagcaatcctcccatctcagcctcccaagtggctgggacta

SEQ ID NO: 17066 - DNA, 201 bp, Homo sapiens
cctgccaaattagcagctattaaatagaaggatactgctgtattgttgagaatgtgtggataccagtaagttcttattggagagaagaaagactaaattttggcagggggagaaattgtacacgtttgccttctcatggatgtcaggcttcgattctgaatcccacctgtaagactttatctcaggcctgtttcaggttat

SEQ ID NO: 17067 - DNA, 201 bp, Homo sapiens
cctgggaggcggaggttgcactgagctgagattgcaccactgcactccagcttgggtgacagagtgagactctgtctcaaaaaaaaaaaaaaaaaaaaaaagtggccattagataagtacttcactgtataagataaggtgctaggggcactgggagaaaaggaaatatagtaccttctgcctagaagcttttatagtgtg

SEQ ID NO: 17068 - DNA, 201 bp, Homo sapiens
aacagtgccttttttcacatctcaataggccatgggttggaaaccacctactatgtgctatacacgtgtcattgagtcattctgacaacttaaaaagccakatagcgtttattcccttttggtaccatggaaagtgaggtttagagaagttaactcaactggcgggtgatcacataggtcattggtaacagaactggagat

SEQ ID NO: 17069 - DNA, 201 bp, Homo sapiens
atttattctatagattttaaagtatcctaggaaatagctttagggatcgtgatgtggaaactaatggaaaattaaatgtattattaggattgaaatctggrtaagtagttttatttatttattattattttttgagacagagtcttgctctgtcgcccaggctggagttcagtagtgcaatcttggcccactgcaacctct

SEQ ID NO: 17070 - DNA, 201 bp, Homo sapiens
tgaaatgtccctagactgctgtgcgttaagtttcattttgtatgcttattatatcttctgcctcttccacatttagattactttttgctgctttctttctrtttacctggaacagtgccttttttcacatctcaataggccatgggttggaaaccacctactatgtgctatacacgtgtcattgagtcattctgacaactt

SEQ ID NO: 17071 - DNA, 201 bp, Homo sapiens
ctatttgaagaacaaaattgttaattggaagattaaagagaatatttcacggggataaaaggacaaggaaatagcaaatataaaagaaaaattgacagctwtcaaatacagaaataaaggtattgacatccagaagataggaatctaagaagggagataattttttttaagtggagaataaatacttaaagggataaaagg

SEQ ID NO: 17072 - DNA, 201 bp, Homo sapiens
cactctaggccaggtgttcttaaccgtgttcacggtcgcaatggctgaagcaacggttcctaaaggtgattgaacctcagaactaacccagagagcttttwaaacctaaggattcctgggacccaccctcagtgtaagttacagagtaaggcttagatatgtgtattcttagaatgttctccaggtgatcttgaaaattct

SEQ ID NO: 17073 - DNA, 201 bp, Homo sapiens
gaggcaacccttggtggacttctagataacttcagggtatggtctggtcaccagaaagaccagaccttgaatagaagcttggaacactctcatctccatgmcctaacctctggggagtggggagtgactggagatagagtaaattaccagtggcatatgtaaccaaacctctataaaaggtttgcatatgtaaccagacct

SEQ ID NO: 17074 - DNA, 201 bp, Homo sapiens
agtgatcctcccacctcagcctcccaagtagctgggaccacaggtgcacaccaccatgcctgactttttttttttttttttttgttaaagtagatatgggrtctcaccatgttgcccatgctgttcttgaattcctgagctcaagcaatccacctgccccaacctcccaaagttctgggattacaggcatgagccaccaca

SEQ ID NO: 17075 - DNA, 201 bp, Homo sapiens
agggcatggtggtgcacgtgtatagtcccagctactggggaggctaaggcaggaggatcgcttgagcccaggaggttgaggctacagtgagccatggtctygccactgcacttgagcctgggtgacagagggagaccctatctcataaaaaaaaaagggggggagctatgctgcatagtggcacacacctgtaatctcagc

SEQ ID NO: 17076 - DNA, 201 bp, Homo sapiens
ttgaagatggagtgtccctttgttgcccaggctggtctcaaactggcctcaagtgatcttcccacctcggcctcccaaaatgctgggattacaggcaagarccgtcacacctggcctaactttgcttggaattgtgtacagttttatagactaatttaggaagtatgaatatcttttcattactgagtctgcacttcaaat

SEQ ID NO: 17077 - DNA, 201 bp, Homo sapiens
gtacataacaaattatgtcatttgaacagaggtaattttacttcttcttttccaatttgaatgtcttatctaagtttctgactagtccaatgctgcgttgratagaagtggcaacagcaggtatccttgtcttgctcttgatcttagagaaaaagcttttagtgtttcaccattgagtatgatgttagctgtggaatgttc

SEQ ID NO: 17078 - DNA, 201 bp, Homo sapiens
atgtgctgttgaatttggttttctattttgataagaatttttgtatgtatgttcatcagagatattggcctgtagttttattttgttgttgttgttgttgtagcattcttgtctggttttggtattagggtaatataatgctggcctcttagaataaattaggaagaattccctcctcttcagttttttggactagtttga

SEQ ID NO: 17079 - DNA, 201 bp, Homo sapiens
atatcggattttctgatccacaaacacagatgtctttccatttatttgtgtgtttaatttcctttgatatgtaccagtcatttgtctccttggtttcttaygtattatttttttgatgttactgtaaatggaattgctttaataatttccttttcagattgtccattgttgatttatagaaacacaactgatttatctgtg

SEQ ID NO: 17080 - DNA, 201 bp, Homo sapiens
ctagttaacttgactcatagttcagatattactttatgtcttcatgaaagggctgtctacacccatggtcttgattgaggaaagtacttaataaattttcstaacttcatttatcacacatgaaatgtaatatattttatgttgtttgatgaccatcagtctctcctcgtagactgtatgtcccatgaatacagtcgtcag

SEQ ID NO: 17081 - DNA, 201 bp, Homo sapiens
gatgtgctgttgaatttggttttctattttgataagaatttttgtatgtatgttcatcagagatattggcctgtagttttattttgttgttgttgttgttgtagcattcttgtctggttttggtattagggtaatataatgctggcctcttagaataaattaggaagaattccctcctcttcagttttttggactagtttg

SEQ ID NO: 17082 - DNA, 201 bp, Homo sapiens
ctacacaccgatctctatttcttttaattatgtccaaaaattcagcatgtgagtttcgacaatgaagaaacattggtaattttgtttgttctgacagttcwaactgtttttcacagtatttgagttgagtatctttgggacaaaagtgcagtcagtcaaaatcaagtccacattctcctactgccacaactttccctttat

SEQ ID NO: 17083 - DNA, 201 bp, Homo sapiens
agcctggccaatatggttaaaccccatctctactaaaaataactgggcgtggtggtgcgcgcctgtaatctcagctactccggaggctgaggcaggagaaycacttgaacttgggaggaagaggttgcagtgagccgagatcacgccactgcactccagcctgggtgatagagtgagactgtctcaaccaaaaaacaaaaa

SEQ ID NO: 17084 - DNA, 201 bp, Homo sapiens
tgatgtgctgttgaatttggttttctattttgataagaatttttgtatgtatgttcatcagagatattggcctgtagttttattttgttgttgttgttgttgtagcattcttgtctggttttggtattagggtaatataatgctggcctcttagaataaattaggaagaattccctcctcttcagttttttggactagttt

SEQ ID NO: 17085 - DNA, 201 bp, Homo sapiens
aaatgattagagatatattctctattctgtgggttgccttttcacattcttgataatgtcttttgatgcataggaaaattataaattttaatgtagttcartgtatccatcttttattttgttgttggtgcttttggtgtcatttcccagaagttgctgccaaatctaatgttattgaagctttcctgtcttcatttgctt

SEQ ID NO: 17086 - DNA, 201 bp, Homo sapiens
agtttataattccctatattatggaaaaggtatatggatggttatgtatggaagtttttgtttgtttgggttttttttttttttgcagataatttctttaytgaaactatcggtaagttttactatgaaattttacatacatgatggaaagtggaagacatataccaattatattccaggaaaaaatactttaatagtatt

SEQ ID NO: 17087 - DNA, 201 bp, Homo sapiens
tacttatagtacattattctgtatggctttgcttgacagacgcaaaggatcagtaaaaatttttcctttggcatcaggcctttgtttcagcttaagaaatkctttctaatttgaaattatattttaaaacattcactttttctccagtaatataaaatgtctgtgtcttttgctatattttaggaatatttgtggactatc

SEQ ID NO: 17088 - DNA, 201 bp, Homo sapiens
aaagattgtcagaatgcttgtttctcaattcctgttttttggccagatttaatatgaattaatagggaaacgttgattattttatgttactttttgatctrtcagaacagacatgtaataacgccttgaatttacaaaatgcagttcctttctcctctttttagattggtattttagtccagttagtagatccatgtctac

SEQ ID NO: 17089 - DNA, 201 bp, Homo sapiens
agggatccttgtgatgatggaacaattctctgttatggttgtggtcatgatgttaaatgaatctgcacattacaaaattgcatagaactgcacagccatgygcacacatatgcacacaaatgagtatatgtaaaactggtgaaatggaaataagctttgtggtttgtacttaatgtcagtttcttggttttgaaattatac

SEQ ID NO: 17090 - DNA, 201 bp, Homo sapiens
agttttttgttaaaaataaagatgtgaacggatgcacgtagtcttattcctcccaggcatatgtaatcaagctgagcataacctaaaggaaaataaccacrttataggtgttgcgatacaatacaacaggaactacacaattcaacttatgaagtatttttgccaagaagaactgaacctgaatataatgaagcttctaga

SEQ ID NO: 17091 - DNA, 201 bp, Homo sapiens
cttgaaacctcattattgtgtagtccaaataaagttggacctgcttgctttctcactgggcgcccatctcattattgtatatgatctaagataaatgcacmtgagcacacattacctttttttttttaataagtaactagggaaaacatcatagaataaaacttctacaaaatcatctttgcatatctttctttccaacca

SEQ ID NO: 17092 - DNA, 201 bp, Homo sapiens
taattactcacaaatctgcaattaaagtttggccttttttcagtttgatccaccgtctctactgtttggaagctttacatgaatgtcccgtgtgtgggttygaaatagtgtttaaagtataatttattatcttcatgtgaaaccagctgccattttgagatttaatttgaagtttcacctgggcttgaaaacaccttcatc

SEQ ID NO: 17093 - DNA, 201 bp, Homo sapiens
ccttaaaaattctaggtggctaatgtgcttttctattatgatacattggaattttagttatagcttccttcctttttttcttttttcttttttttttttttgagatggagtctcacactgtcacccaggctggagtgcagtggcacaatcttggcttgctgcaacctccacctcccaggttcaagcgattctcatgcctca

SEQ ID NO: 17094 - DNA, 201 bp, Homo sapiens
atgtagcactgccatatgctgctatgtagattgtgtaaccctaacactatcttttaatttttcatgtaatataattggtctttatgcttaatttttcctcwcattggactacaagaagtcctcatttaaatataatttatttgaagaacatatgagtaattttggaacacaagatgaatttattttagagaaatagtgatg

SEQ ID NO: 17095 - DNA, 201 bp, Homo sapiens
atgaggtagtcttttctaattatcaaccttgaatttgattaatactccagttaaacaattactggaaatacaagaatggagaaacatattttaaaatgccmcagaatagtaaaatacaggtaattgaaggctgtatgggagaaatgactttatttctttaaccaaggggaaaaagcaagaggaacctataaataatagatt

SEQ ID NO: 17096 - DNA, 201 bp, Homo sapiens
tccttaaaaattctaggtggctaatgtgcttttctattatgatacattggaattttagttatagcttccttcctttttttcttttttcttttttttttttttgagatggagtctcacactgtcacccaggctggagtgcagtggcacaatcttggcttgctgcaacctccacctcccaggttcaagcgattctcatgcctc

SEQ ID NO: 17097 - DNA, 201 bp, Homo sapiens
tatgatatatcttaattatatcgtattaaagagacaggatcttgctatattgcccaggctggactagaactcctggcctctgccttgtgagtagctgggaygacaggtacacaccaccgtatctatcttcagattttttttttttaccccatttcttaaattgttatgtcatatttcattgttttatccaaacatgacaat

SEQ ID NO: 17098 - DNA, 201 bp, Homo sapiens
gtcagtcaaaatcaagtccacattctcctactgccacaactttccctttattgttttcatcaagatttagcaactcctttaagtaaagatcagggttattmttttcaaatttaccacatcttgtaggatgacatccagctgtactgaaaaacatatgatttgtttgtgccaaatgcagtgcatctttactgtcttgtagat

SEQ ID NO: 17099 - DNA, 201 bp, Homo sapiens
ttcctgtttctccagcttgtgggctgcagatcatgggattttggctttcataatcatatgagataatgagcctatatatatatatgtatacacacacacayatgcaaacacacagagaaacacacacaaatatgctcacactctattggtcctgtttttgtggagaactctaatacaaagacatttgaagattgagagaat

SEQ ID NO: 17100 - DNA, 201 bp, Homo sapiens
ataacattactgatttcttgccattgtaataaattgttaccatattttattatctttatttatttatttatttatttatttatttatttatttatttatttttgagatggaattgcgctctgtctcccagctggagtacagtgtattttgagtagagacagggtttcaccatgttggtcgggctggtcttgaactcttgac

SEQ ID NO: 17101 - DNA, 201 bp, Homo sapiens
tataacattactgatttcttgccattgtaataaattgttaccatattttattatctttatttatttatttatttatttatttatttatttatttatttatttttgagatggaattgcgctctgtctcccagctggagtacagtgtattttgagtagagacagggtttcaccatgttggtcgggctggtcttgaactcttga

SEQ ID NO: 17102 - DNA, 201 bp, Homo sapiens
aacttctaaaatgttgcttaggttgttttctgctttagtatttacctttggtgagatttatattagtatttttgcagttaataagcctgttttttttttttaacttggaattgttaactgttaaccggagattgttagaaactaagactgcagacataagctccttgaatttcctgttaaatgtgaaatggtgagctttaa

SEQ ID NO: 17103 - DNA, 201 bp, Homo sapiens
aacttgttttctaacagtatcgtgtttttcaatagacctgcttgggtgggaatttggactttgttctttcaagtcactccagtccttttttttttttttttggtagactaaatcttaacttctaaaatgttgcttaggttgttttctgctttagtatttacctttggtgagatttatattagtatttttgcagttaataag

SEQ ID NO: 17104 - DNA, 201 bp, Homo sapiens
attgggaactagaaagttaggaactcaagtcacatattccctttaaaccctctccagaatctcctttttttgacgggtttattctgctaactcatagataytgcttctcataacactagttttcatttgacttacgtgtgtcagtatcaattcacctacctgtccccgctcctttacaagaccttttaaatctaatattta

SEQ ID NO: 17105 - DNA, 201 bp, Homo sapiens; identical to SEQ ID NO: 2678

SEQ ID NO: 17106 - DNA, 201 bp, Homo sapiens
attgtacttctttttctgcattagaattaaattgctccattaaatggacttttatcagctttgataaactgtattcccagcattgagaacattgcttagtrgatagtaggtattcacaaaaaaattagctgggcgtggtggtgggcacctgtaatgccagcttctcaggaggctgaggcaggagaatcacttgaactcagg

SEQ ID NO: 17107 - DNA, 201 bp, Homo sapiens
gcctgagaaattaaggtcactgccttttataaaagatctggcctcaatgtttttagttttaagaatttttaactttcatttgtttaaaaaggtttattgtrtttgtagtaatttaataactgtaaatgttaaaaaacgagtttaattgtttaaagtattatggcagaagtgcttcaaattaggattttcagactagtgttt

SEQ ID NO: 17108 - DNA, 201 bp, Homo sapiens
aattagatagaaggagtaagtgctagtgttcgatagcacagtatggtaaccatagttagcaataatttattgtatttttcaaaatagctagaagaggattkgaaatgtttctaacacaaatgataaatatttgaggtgatggatattctaattaccctgatttgatcattacacattgtgtgcatgtatcacgatatcata

SEQ ID NO: 17109 - DNA, 201 bp, Homo sapiens
aaaaaattgacctgaagttctaccgcaagagaggaaacgaggccgggtgcagtggctcacgcctgtagtcccagcactttgggaggccgaggcgggtgaaycacctgaggtgaagagtttgagaccagcctggccaacatggcgaaacttcgtctctactaaaaatacaaaaattagccgggtgtggtggagggcacctgt

SEQ ID NO: 17110 - DNA, 201 bp, Homo sapiens
tcgtaaggaaatgaggttgattgaaacaactttggagaaccttctgtactcctttcatttagttgcggtttccaagaacctatccacaacattaagtgggkacttactatatagccaaaaataaaatgaaaggcatataattttgaaatgtacttgtagctttggaatgtactgtacagtgagttcgtcatacatctagat

SEQ ID NO: 17111 - DNA, 201 bp, Homo sapiens
agtgttgggattacaggcgtgagctactgtgccctgctgggtcctcttttattagggtattaattctatacatgaaggctctgctttcatgtgttagtcamctcctgaacgccccacttcttcataccatcccaatgatgactaggtttccacatacgaattttagtgggggacacaaacattcagaatataggagatatt

SEQ ID NO: 17112 - DNA, 201 bp, Homo sapiens
ttccaagaacctatccacaacattaagtggggacttactatatagccaaaaataaaatgaaaggcatataattttgaaatgtacttgtagctttggaatgyactgtacagtgagttcgtcatacatctagatgaggatgtaaaagaacaaaaacttggaatttccctccctctccatgcagctttgaagagtctttaatcc

SEQ ID NO: 17113 - DNA, 201 bp, Homo sapiens
ggacatttggcccatcagaatttctgataggacaagtgcattaaatgaaaatcctttttctaagtggttctttcagccccatttatttcatgtcaaccagktacgtcccccctgaaatgattagaggattgttacctcagggaaagtgaaggtccctgagaaaagaacaataataaatactggtaataagtgccctacagt

SEQ ID NO: 17114 - DNA, 201 bp, Homo sapiens
cccttttggggtacatttattcatggatgttttttctttaggtattataaatggaattgtcttttttgttgttgttgttgttgttgttgttgttgttgttkagacggagtctcactctgtcgcccagactggagtgcagtggcgcaatcttggctcactgcaagctctgcctcccgagttcacaccattctcctgcctcag

SEQ ID NO: 17115 - DNA, 201 bp, Homo sapiens
ttcaaagtagaaatctgggtctcatatgtcattaaatttaagaagttctgctatttctgtgtcactctcagtgggacaacaagacattatgtgtgtcctartgtaatggattaggaaagtacatgtatcacctatggactattatggactatttttgccaaaaaattgaaactgaatcatgtctctagatctagatcttac

SEQ ID NO: 17116 - DNA, 201 bp, Homo sapiens
aaaaaaaaaaagaattgtatgaagagaagtagactcccagtgctttcttcatacttctcacagttggcaagctaacctcttcaccacttacagtacattckctcaagaatatgaacagtagaggttctggctttaaggacatttggcccatcagaatttctgataggacaagtgcattaaatgaaaatcctttttctaagt

SEQ ID NO: 17117 - DNA, 201 bp, Homo sapiens
gatatagcctctgttcgagattattgtctcattcttctaccctttaacataaaaggcacgtgagatttagaatgtatagtataatctctctgtatatatatcatcattgcctttgggagaagggagtggcatgggttttttttaagtcatgctgattcccactttttaacttttttatataaattctctacttatgcattt

SEQ ID NO: 17118 - DNA, 201 bp, Homo sapiens
gtgatattgagcatttttttcatgaattttgaccattttttagccctttgtatgtttgcttttgaaaacaatcccctgcccactttttttgtttttttttytttttttttgagacggagtttgctcttgttgcccaggctggagtgcaatggcgctatctgggctcattgcaaactctgcctcccaggttcaagcgattct

SEQ ID NO: 17119 - DNA, 201 bp, Homo sapiens
ctcacgcctgtaatcccagcactttgggaggccaaggtgggcggattccctgaactcatgagttctcagccagcctgggcaacattgtgaaaccccatctytaccaaaaacaaaaaattagccaggcatggcggcatgcatctctaatcccagctactcgggaggctgaggcaagagaattgcttgaacccgggaggcaga

SEQ ID NO: 17120 - DNA, 201 bp, Homo sapiens
ggatatagcctctgttcgagattattgtctcattcttctaccctttaacataaaaggcacgtgagatttagaatgtatagtataatctctctgtatatatatcatcattgcctttgggagaagggagtggcatgggttttttttaagtcatgctgattcccactttttaacttttttatataaattctctacttatgcatt

SEQ ID NO: 17121 - DNA, 201 bp, Homo sapiens
attttaacgaaatgttacaagtattcttcgtaaatgtacttactttctcattttatatgtaaattatggttttaattttttatttctctgatgatttgtgwtattgagcatttttttcatgaattttgaccattttttagccctttgtatgtttgcttttgaaaacaatcccctgcccactttttttgtttttttttcttt

SEQ ID NO: 17122 - DNA, 201 bp, Homo sapiens
caagatagaaatacatttttagaatgtagggagtgggtgtcaattagtgaccaatttaacaggattaaagaaaactgggccaggcttcacgcctataatcycagcactaggtttttgttttgaccccttgcccactccaatcccagcactttgggaggccaaggtgggagaaccgcttgagcccagaagttgaagaccagc

SEQ ID NO: 17123 - DNA, 201 bp, Homo sapiens
aggatatagcctctgttcgagattattgtctcattcttctaccctttaacataaaaggcacgtgagatttagaatgtatagtataatctctctgtatatatatcatcattgcctttgggagaagggagtggcatgggttttttttaagtcatgctgattcccactttttaacttttttatataaattctctacttatgcat

SEQ ID NO: 17124 - DNA, 201 bp, Homo sapiens
gcattatgatattcctaaaaacatcctgttcagatgagtgttacatatcatcaggtattaagcttctgctcatttacacagtcacaatttcatttattcaytcaacacaaaggactaacaatttttaaaaagaaaagggaaagtggaaagtttattttaacgaaatgttacaagtattcttcgtaaatgtacttactttct

SEQ ID NO: 17125 - DNA, 201 bp, Homo sapiens
agattttagaaatattataagtactctttattcattgtcagtcttactaaattggtacttatctggaatgtactttggaagtttgtttctgaagttttaamaagttacacagtttggataagtaatgtacatttgagtggtaggatgacttatactagctttgggcatcccttggctttcctggtgacacttaaatttcca

SEQ ID NO: 17126 - DNA, 201 bp, Homo sapiens
taggatatagcctctgttcgagattattgtctcattcttctaccctttaacataaaaggcacgtgagatttagaatgtatagtataatctctctgtatatatatcatcattgcctttgggagaagggagtggcatgggttttttttaagtcatgctgattcccactttttaacttttttatataaattctctacttatgca

SEQ ID NO: 17127 - DNA, 201 bp, Homo sapiens
agtaagagataatggtcacaagatagaaatacatttttagaatgtagggagtgggtgtcaattagtgaccaatttaacaggattaaagaaaactgggccasgcttcacgcctataatctcagcactaggtttttgttttgaccccttgcccactccaatcccagcactttgggaggccaaggtgggagaaccgcttgagcc

SEQ ID NO: 17128 - DNA, 201 bp, Homo sapiens
agagagatcaagtgatttgcatggtaacacagctagtaaatggtggagctaggattagaagtcaggcaatgtagctcaagtttggggtctctctctctctyttttttttcttttttttgagatgaagtcttgctctatcacccaggctggagtgcagtggcgcgatgtcagctcactgctaccttggcctcctgagttcaa

SEQ ID NO: 17129 - DNA, 201 bp, Homo sapiens
tgttaatattacaccatctttcccatgtaatattcttgtttcttcttagtttagcctcctgaatttatgcaggcaatgggcttgtttggttttcctttgtrttacttataaaatgtagtttgttctgataacgttcttataagattgatgatattaatctgtatatatgcatatttgtttctctcctgttatatatatgtc

SEQ ID NO: 17130 - DNA, 201 bp, Homo sapiens
aggggctcattggtccactcaacctctgagagtgctgcagtgtgacctttgttttggcttcaatattttatcccatttctcaataactgtttaaagatttrcacccagctgggactagtctcttgaatctcctctttctttttctccattgtcttatgaatctttattgcctgttattttggtaagacttttacatatggc

SEQ ID NO: 17131 - DNA, 201 bp, Homo sapiens
tgaatcagatcaagtggcaaggagaaaagagtcagtagttaagaataactgggggagggggtgatgaaaaagaaaagttataatagtaaaatgagatgagraaggtaatagaaaagttggaagcagagaagttaagtaaaataactatttctgttttctccatctgccatcttcattctttgccaacttttaggccacctt

SEQ ID NO: 17132 - DNA, 201 bp, Homo sapiens
tcttagtcatttttgccttccagtttttaaagtttcctcaaactagggtgaattgccgggtacagtagctcactcctgtaatcccagcactttgggaggcygaggctggcagatcacctgaggttgagagtttgagaccagcccgaccaacatggagaaaccccatctctcctaaaagtacaaaattagccaggcatggtg

SEQ ID NO: 17133 - DNA, 201 bp, Homo sapiens
atttctataaggggctgggcgtgatgattcatgcctataatcccagcactttgggaggcgagggtgggcagatcacctgaggtcaggagttcgagaccagyctggccaacatggctaaaccctgtctctactgtagtcccagctacttgggaggctgaggcaggaaaatcgcttgaacctgggaggtggaggttgcagtga

SEQ ID NO: 17134 - DNA, 201 bp, Homo sapiens
cgaaaaaattccctcttgcagtttttttttttgttttttgttttttgtttttttgagacagagtcttgctcttgttgcccaggctagagctcagtggcgcratcttggctcactgcaacctctgccttccgggttcaagcgattctcctgcctcagcctcccgagtagctgcggattacaggcatgcaccaccacgcctgt

SEQ ID NO: 17135 - DNA, 201 bp, Homo sapiens
ttataacattactgatttcttgccattgtaataaattgttaccatattttattatctttatttatttatttatttatttatttatttatttatttatttatttttgagatggaattgcgctctgtctcccagctggagtacagtgtattttgagtagagacagggtttcaccatgttggtcgggctggtcttgaactcttg

SEQ ID NO: 17136 - DNA, 201 bp, Homo sapiens
cttataacattactgatttcttgccattgtaataaattgttaccatattttattatctttatttatttatttatttatttatttatttatttatttatttatttttgagatggaattgcgctctgtctcccagctggagtacagtgtattttgagtagagacagggtttcaccatgttggtcgggctggtcttgaactctt

SEQ ID NO: 17137 - DNA, 201 bp, Homo sapiens
gaacccaggaggcgtggaggttgcagtgagctgagattgcactactgcactccagcctgggcaacagagcaagactccgtctcaaaaaaaaaaaaaaaaaatttctgttcaaggatgggcgtggtggcccatgcctgtaatcccagcactttgggaggtcaaggtgggtgggtggatcatgaggttaagagattgagacca

SEQ ID NO: 17138 - DNA, 201 bp, Homo sapiens
attattcaaaatgtttaaagtttgtagtggctaatgtagcatgtgtagtcagcccttaagcttccttgaaatgatgccactatatctaggtctatcttagyggtgcctacttaaattttatctgaaaagtttcaaaaacagccaggcaacaacaacaaaacaaatcattaagatccaaatcaagggctgagaatggtggct

SEQ ID NO: 17139 - DNA, 201 bp, Homo sapiens
tggaccttcagtatttcatgttaggctttataggcagtatcttataacattactgatttcttgccattgtaataaattgttaccatattttattatctttwtttatttatttatttatttatttatttatttatttatttatttttgagatggaattgcgctctgtctcccagctggagtacagtgtattttgagtagaga

SEQ ID NO: 17140 - DNA, 201 bp, Homo sapiens
aagaccagcctggccaacatggtgaaacctcatctctactaaaaatacaaaaaattagctgggcatggtggcagtgcctgtaatcccagctactcaggagrctgaggcaggagaattgcttgaacccaggagacggaggctgcagtgagctgtgatcacaccattgcactccagcctgagtgacaagagcgagactctgtc

SEQ ID NO: 17141 - DNA, 201 bp, Homo sapiens
aggtaggaggatcgcttgaacccaggaggcagaggttgcggtgagctgagattgcaccattgcactcaagtctgggtaacaagagcgaaactctatctcaaaaaaaaaaaaaaaaaaaaaaaaatctaaggagcagaaagatatttgattattcaaaatgtttaaagtttgtagtggctaatgtagcatgtgtagtcagcc

SEQ ID NO: 17142 - DNA, 201 bp, Homo sapiens
taatattcttggatcaagctgcaggttttagctatactcattctctctgaaatgaattattaaccagtatcagttttacatttttcatttcttttcatagrtaaaagtaaattatgttgtcattgtaaaggaccagatgcagttttaaaaaatttttaacattcatgggcttaataaaatttcttttctgaaacttttaaa

SEQ ID NO: 17143 - DNA, 201 bp, Homo sapiens
gaggtaggaggatcgcttgaacccaggaggcagaggttgcggtgagctgagattgcaccattgcactcaagtctgggtaacaagagcgaaactctatctcaaaaaaaaaaaaaaaaaaaaaaaaatctaaggagcagaaagatatttgattattcaaaatgtttaaagtttgtagtggctaatgtagcatgtgtagtcagc

SEQ ID NO: 17144 - DNA, 201 bp, Homo sapiens
gcgcctggtttatttaatgtttttaaataaacacttcgctgtcgacacaactaaactgcatatacttttcaggatcctgggtatgatgatgagaaaagatkccaaaggagatgactggttcctaattttgagaaactttcaaagtggtgaaagaaacacatatggttcaagaagggaataattatatagtaacaggtactt

SEQ ID NO: 17145 - DNA, 201 bp, Homo sapiens
tggaatgcatttctaattatatatattcatttactcaggcatttttcttctcgtaacttattgtccagtctacatgcatttattcatttgtgggagatgasttgagtacagggcttcttcttgtatgtattagaagactggaaacagcctaactatctgttaaataaactgagtgcagttgctcatgccagtagtcccagc

SEQ ID NO: 17146 - DNA, 201 bp, Homo sapiens
aactagtcagtgagtgattgaataaactttattaaaacatgcttagtgaattagtgaatattacaacacaatttttttcctattactttctttgagtttcragaaagtttctagctgggtgtggtggtgtgtgcctgtagtcccagatactggagaggctgtggtgggaggatcccttgagcccaagagttcgaggttaca

SEQ ID NO: 17147 - DNA, 201 bp, Homo sapiens
aactccttgaccagtgcatttctctttcctcattctaatagataagctttaatgaatatctttagtggatattctaatagataagctttttttttttttttaaagaagcttcctagtgggcagcagtataaacaccaccaaatcaaacttaaccttttaccaggttgcttttattttttaaagaccatgattgagtctaag

SEQ ID NO: 17148 - DNA, 201 bp, Homo sapiens
gataaatcactggaagattgatataactcattgagagctgttacattcatgcctacagtttattgcagagaaagtatacgaattaaaatcagccaggggargagatgtttagggtagagtccagactcttctccctgtgcagtcatgtccagcattatctttttatgtccacagtatgtgagtttcgtcagtgaagaaact

SEQ ID NO: 17149 - DNA, 201 bp, Homo sapiens
aacagcacagaaaaaacagtttataattccctatattatggaaaaggtatatggatggttatgtatggaagtttttgtttgtttgggttttttttttttttgcagataatttctttattgaaactatcggtaagttttactatgaaattttacatacatgatggaaagtggaagacatataccaattatattccaggaaaa

SEQ ID NO: 17150 - DNA, 201 bp, Homo sapiens
atccattgttggctcaagataccccacccaaaatattctggtaagagaccagaatataccatccccaaaatatctttttttgccatgttttgagctagttmttctgagaatctgcagacacaggagtaattttgaaaagctgcccttttgtaaaagaaatttacccatctataaaggagatctactttagtaaaagttacc

SEQ ID NO: 17151 - DNA, 201 bp, Homo sapiens
accaagaggcagaggtttcagtgagccaagatcacaagattgcactccagcctgggagacagagcaagactctgtctcaaaaaaaaaaaaaaaaaaaaaaraaatgcaaattactctcaatgaatatattttgctcttacttggtcaatttgttttttaaaaattttcattatactgattatccattgttggctcaagata

SEQ ID NO: 17152 - DNA, 201 bp, Homo sapiens
tgtgttaggatatagcctctgttcgagattattgtctcattcttctaccctttaacataaaaggcacgtgagatttagaatgtatagtataatctctctgtatatatatcatcattgcctttgggagaagggagtggcatgggttttttttaagtcatgctgattcccactttttaacttttttatataaattctctactt

SEQ ID NO: 17153 - DNA, 201 bp, Homo sapiens
gcgctgggagagcggacgcggctggcgaagctggcgagcgggggtcatccgagccgtgtcacacagggacagccgcaatccggacctggcggtaagagagygagcgccccccttttcccctgccgcgcccgcacccggctctcgcagacgtaccttgcaggcttccctctggcgcctcgctcagcccggccaactggcggt

SEQ ID NO: 17154 - DNA, 201 bp, Homo sapiens
gtgtgttaggatatagcctctgttcgagattattgtctcattcttctaccctttaacataaaaggcacgtgagatttagaatgtatagtataatctctctgtatatatatcatcattgcctttgggagaagggagtggcatgggttttttttaagtcatgctgattcccactttttaacttttttatataaattctctact

SEQ ID NO: 17155 - DNA, 201 bp, Homo sapiens
ccaggcccaactttccaaactttgaaaagtattctgagtcaggctacatagaaatcatataccctacttcctgccagctacgggaagaaaagactccatgrtttctctctctctttgtttttatttttttccttctttttaaaaaatgtgatcagagatctggattggaaagaaaacattcttagagttatttgagagctt

SEQ ID NO: 17156 - DNA, 201 bp, Homo sapiens
aacttttcctctgctcactttttgttacactgaggtatactttaaatagtaaaggaaggataaatgcttcattctttccctttctcaattttcttcttctttttttttttttttgagttaggagttgttttttttgaggctggagtgcaatggtgcgatctcggctcactgcaacctccgcctcccacctgtctcagcctc

SEQ ID NO: 17157 - DNA, 201 bp, Homo sapiens
cagattctgaatttgcttttaaaaagtcagatgttgttctggtttttgatcttttatataaaagaaacttgtgggatcttttcttgtgtctctgcttggamatttcacaataactttcctagatgtacattgatttttatctgttttttttttctgagacagttttgctcctgtggcccaggctggagtgcaatggcgcga

SEQ ID NO: 17158 - DNA, 201 bp, Homo sapiens
tggccgagcactttaggaggctgaggcaggagtatcacttcaggccaggagttcagaaccaacctgagtgagaccctgtctctaccaaaaaaaaaaaaaaattagttgggcacagtggcacatgtctgtgttctgagatactcagggaggctaaggcaggaggatcacttgatctgaggagttcacacctgcagtgagact

SEQ ID NO: 17159 - DNA, 201 bp, Homo sapiens
gaacttttcctctgctcactttttgttacactgaggtatactttaaatagtaaaggaaggataaatgcttcattctttccctttctcaattttcttcttctttttttttttttttgagttaggagttgttttttttgaggctggagtgcaatggtgcgatctcggctcactgcaacctccgcctcccacctgtctcagcct

SEQ ID NO: 17160 - DNA, 201 bp, Homo sapiens
gctcataataacttctctagcttactttactgtaagaatacagtatataatagacatacaaaatatttgttaattgactttatgtcattgttaagacttcyggtcaacagtaggctattaccagttaattttatggggagtcaaaaattacattcagcttttcgactgggcgggctgtcctcagtcccaacccctgaattg

SEQ ID NO: 17161 - DNA, 201 bp, Homo sapiens
ttactgaataatagtccattgtatacataaacattttatatcatcagttgatggatatttgggttgtttccactttttggctgttacgaataatgctgctrtgaacatatatgtacaaatatttgtagccatatgttttcatttcttttgggtgttttttttttaagtaaactaagattaatcaagttctaaaggaaaaga

SEQ ID NO: 17162 - DNA, 201 bp, Homo sapiens
gacatggcactatttacagtagagagaaatataaacaaacataaagatgcagtattaactcataactacataaaattaactttagtacatgctgtgatagrtttttagccacctcctgtttttactgtgttgaactcaaatgttgcgaatgtctgcttaaaactcagtgtgatgctgacatctccatgtgagtagttgacc

SEQ ID NO: 17163 - DNA, 201 bp, Homo sapiens
ctcctgggttcacaccattctcctgcctcagcctccctagtagctgggactataggcacccgccaccatgcctggctaatttttgtatttttagtagagayggggtttcactgtgttagccaggatggtctcgatctcctgacctcgtgaatcaccctcctcggcctcccaaagtgctgggattacaggcgtgagccaccg

SEQ ID NO: 17164 - DNA, 201 bp, Homo sapiens
aaataaatatattgcaaaatattttagagatttgcagcaatttgaaaaaactcatagatgaaccatgtagcctagaaatatttttaaaaatttagaaaatsttaggtatgtcataaatgcataaaatatatgtacatcttagttttatcatttgctaccataaaatatacacaaatctatttaaaaagttaaaatatcaga

SEQ ID NO: 17165 - DNA, 201 bp, Homo sapiens
tccagcaaatcttcctttttaggaagggcagaatgagtagaggaggaagactgagtacactcacatgttaataaattttggcatgtcacactaagaaagtrtttttggtctcactgattattaaagaaatccagataaaaattttcttacctgccaaattagcagctattaaatagaaggatactgctgtattgttgagaa

SEQ ID NO: 17166 - DNA, 201 bp, Homo sapiens
atctctgattttttaaaatgtatattcatagtagtagaattaataatcacagggtatgaacttgaaagccacaaaaatctatctcctgacactcttcacamattgtgtaaaggttgtactgactgccattgtcctcagtcagtgttggggtgtttttatctcactcatcacacccttgtaagcattaattatttatttgca

SEQ ID NO: 17167 - DNA, 201 bp, Homo sapiens
cacttactcaagtcatgcagatggccctgttgaacttgtgtatacaaaacgttggtgctacatatatgtagttttcacatcccacaaatactgtatatatwtttttttttttgagatggagtcttgctctgtcacccaggctggagtgcagtggtgcgatctcagcactcactgcatcttctgcctccttggttcaagcaa

SEQ ID NO: 17168 - DNA, 201 bp, Homo sapiens
tgagtaatacttccttaatcgactctccttcgtgtgctcgcacgcttgcgctctctctctctctctctctctctatatatatatatatattttttttttttcttttgagacagagtgttgctcttgtcacccaagctggagtgcagtggtgcagtcttggctcactgcaacctccatctcccaggttcaagcgattctcct

SEQ ID NO: 17169 - DNA, 201 bp, Homo sapiens
ctgaaagcttttcctctaagatcaagaataagacaagggatccctgcttttgccatgtccactccacatagtatttgaagttatagtccagaaattagacyagaaaaagacaaatagcatttaaattggaaagaaagaagtaaaattgtgtctgttcacagatgatataatcttatacttagaaaaccataaagacttcac

SEQ ID NO: 17170 - DNA, 201 bp, Homo sapiens
gggcaataatagataaagctatcataaacattcatatacatggttttatgtgaacaaagatttttatttctgttaagtaaatactgaatggtgggattgcytggtgatactataatgtatgattaaatttaagaaactgccagactattctctaaattggttgttccattttcatttcccagtgcagggttatgtgagttt

SEQ ID NO: 17171 - DNA, 201 bp, Homo sapiens
tgactttttagtaatagccactctgactgatgtgagatgataactcattgggattttgatttgcatttctctgataattagtgatgttgagcctctttttycatgtttgttggctgcttgtatgtcttcttttgagaagtgtctgttcatgtgtttttgcccatttttaaatggggttattttattttattttattttatt

SEQ ID NO: 17172 - DNA, 201 bp, Homo sapiens
ctgaaattgcagaattttcttattgatttgagtaatacttccttaatcgactctccttcgtgtgctcgcacgcttgcgctctctctctctctctctctctmtatatatatatatatattttttttttttcttttgagacagagtgttgctcttgtcacccaagctggagtgcagtggtgcagtcttggctcactgcaacct

SEQ ID NO: 17173 - DNA, 201 bp, Homo sapiens
tgttgcttaggtaatatcctagtcaatggtgaaagactgaaagcttttcctctaagatcaagaataagacaagggatccctgcttttgccatgtccactcmacatagtatttgaagttatagtccagaaattagactagaaaaagacaaatagcatttaaattggaaagaaagaagtaaaattgtgtctgttcacagatga

SEQ ID NO: 17174 - DNA, 201 bp, Homo sapiens
tgacagtaccaaattgagaaaatgatgttaaagtttagatatttttattttttccagttaagacgatagtaaaagataattctagtattcagatggtgcgragaataaaagatgaaatgtaggcttggagcctttaattaaagtcctagaaaatatgatggcttttgtgaccatactgtaattttgtcttcttgttcctca

SEQ ID NO: 17175 - DNA, 201 bp, Homo sapiens
tactgaaattgcagaattttcttattgatttgagtaatacttccttaatcgactctccttcgtgtgctcgcacgcttgcgctctctctctctctctctctmtctatatatatatatatattttttttttttcttttgagacagagtgttgctcttgtcacccaagctggagtgcagtggtgcagtcttggctcactgcaac

SEQ ID NO: 17176 - DNA, 201 bp, Homo sapiens
ccgtcaactttcttctttctcaggatagttttggttattcagggtcccttgagattctgtatgaatttcaggagagatttttctttttctccagaaaaagktcacttggattttgatagggattgaattgaatctgtagatggatctgggtggtagacatcttaatattaagggctgggtgctgtatcccagctctttggg

SEQ ID NO: 17177 - DNA, 201 bp, Homo sapiens
taaccaaccttaccctccttagctctttgggacgcccacctcgcggcgagagtggggcaggaggctgaggaagggtactggagggtagggattggcagtgyctgtgtgaaaagtgagatattcgcaggaactcggtgtccaataaaactctcgaccaggccctggttttggagagccaagactttgaggtgtgcctggcca

SEQ ID NO: 17178 - DNA, 201 bp, Homo sapiens
aaatcaaacttaaccttttaccaggttgcttttattttttaaagaccatgattgagtctaagagtcaggagatttttaatgttaattaaaaactttatatrtatgcagcactgtagtgagcactaaaaataaatgaaagaacagttctaccttaagtgagtttacatgcataatttaaagatacttttattacacttaaaa

SEQ ID NO: 17179 - DNA, 201 bp, Homo sapiens
ttttaagaaattgtcacaaacaccccaccttgagctaccaccaccctgagcagtcagcagccaaaaacgttgaggcaaggcactttatcggcaaaaagatrctacaactctctgaaagctcagatgattgttaccgttttttggcagtaagaacatttttaagttaaagtgtgtacattgtttttgatttttattttttga

SEQ ID NO: 17180 - DNA, 201 bp, Homo sapiens
atgaattttcttgcttttacttgtttaggaaagactttatttccccatcatttatgaaggataacattgtttggtatagtatattcggcttttttttttttctccttcagctttttgaacctattatcccattgtcttctgccctgtaaggattgtgcagagaaactgccgttagtctgattggggttcattaataagtga

SEQ ID NO: 17181 - DNA, 201 bp, Homo sapiens
gtttcaccagtgttggccaggatgttctcgaactcctaacctcaagtaatcctcccacctcggcctcccaacgtgttcggattacaggtgtaagccactgygcctggctactctctttttctatatctgtttctggattatattttgacaggcgtcgaacacattcccagttactccctgacttttcatatgcatctccct

SEQ ID NO: 17182 - DNA, 201 bp, Homo sapiens
cccaaaactaatttattatagggaacaggtatagaaggactagctagaattctccgaatataccttgttttctagatgtgactttgaatcaagtatgtcartattttacataatcccaaaagaagtttttgtcattaaaaaaaaaaatcctaaaaggaaaagcaaaatgaaacagaagcctaagtggcataaccataggaa

SEQ ID NO: 17183 - DNA, 201 bp, Homo sapiens
agtttgctcttgttgcccaggctggagtgcaatggcgctatctgggctcattgcaaactctgcctcccaggttcaagcgattctctttcctcagcttcccragtagctgacattacaggcatgcaccaccacgcctggctaattttgtatttttagtagagatggggtttctccatgttggtcaggctgatctcgaactcc

SEQ ID NO: 17184 - DNA, 201 bp, Homo sapiens
tactgttagatatgtagtggtacagcattgatttaattttttttccccttgtggtaataggtattgaatactattggtgaacttttttaccgtctattttytttttggagacatgcttgtttaaatcattttttgttgtttttcttatttttaagttgtaatggtttcttttcaactttgaatgtatgtcctctttcagat

SEQ ID NO: 17185 - DNA, 201 bp, Homo sapiens
tacttggaaaaattttcagcttccttttctaaacctattgtattttttatttctgctatcataatttaatttgctaaagatttttttctgtttttttttttgtttgtttctccagattgttgtattttgatagcatccttttgcttttgattatggtattttcctcttacctcattcagaatattctttttttttttaatg

SEQ ID NO: 17186 - DNA, 201 bp, Homo sapiens
gattacaggcgttagccactgcacccagccagtttgttccttttattaatgagtattctgttgtatggatataccacagttagattatccattcacccgcyaacagatacccattctacttttgagtgattttgaatcatgctcctaaaaacatacatatacagatttttgtgtgaacatacatttttattttatttgggc

SEQ ID NO: 17187 - DNA, 201 bp, Homo sapiens
agaatacattgaaaaacatgcataaaatgagatagatttttcctgcaattacggattgcaattcagctgacttttaaatgtttattattaaaaaaaaaaaactaagataaatgctgattgttttgtgaattatgtgttactttgagatttaaaatgtcttcggctatgtagttaattgttattagggtttgatgtgtgtta

SEQ ID NO: 17188 - DNA, 201 bp, Homo sapiens
taactagaataaatgtcccaaataaattaaaacagccctctttttagcaaagttaaagtacatattaaactgagttagacatttttgtgtaattctacttmttagctatttattatagtatgttccaggtatttaagttggaatacaaagatgtaaaaacatgtctgtacaccctcaaaatacacagtctaaaagggagaa

SEQ ID NO: 17189 - DNA, 201 bp, Homo sapiens
ctgacctcaggtgattgaccctcctcggcctcccaaagtactaggattacagacaggagtcactgtgtctggtccttatctagatttttttttttttttttgagatggagtctcactctgttgcccaggttggagtgcagtggtgtgatctcggctcactgccacctccgtctcctgggttcaggcgattctcctgcctca

SEQ ID NO: 17190 - DNA, 201 bp, Homo sapiens
ccgagacgggcagatcacaaggtcaggagttcaaaaccagtctggccgacatggtgaaaccccatctctactaaaaaaacaaaaaacaaacaaaaaaaaamccagaaaaattagccgggcatggtggcgtgtgcctgtaatctcagctactagggaggctgaggcgggagaattgcttgaacctgggaagcagaggttgca

SEQ ID NO: 17191 - DNA, 201 bp, Homo sapiens
tgttaggtaactggctgaccagtgagatagtggaacagagacttcagtgaccacacccaacaaggaatactgcctttgcaaaaacagtttggaaaagtcactaaacaaatggatgactggagccctcaggaatcaacaacagcaaaccctgaggcagggagagaatatgattacccattgtaatgttcagatgcccagttt

SEQ ID NO: 17192 - DNA, 201 bp, Homo sapiens
ctgattttttaattttttgtggagatggggtcttgctgtgttgctcaggctggtctcgaactcctaagctcaggcaatcttcctgccttggcctcccaaartgttgggattgtaggcatgagccaacccacctggctggttttttccattttgatgaggtccagttgatcagtttctcttttatggatggtattttcatag

SEQ ID NO: 17193 - DNA, 201 bp, Homo sapiens
ctagtactgtagatggacaccaccatgcccagctgattttttaattttttgtggagatggggtcttgctgtgttgctcaggctggtctcgaactcctaagstcaggcaatcttcctgccttggcctcccaaagtgttgggattgtaggcatgagccaacccacctggctggttttttccattttgatgaggtccagttgat

SEQ ID NO: 17194 - DNA, 201 bp, Homo sapiens
cttcttggattcaagtgattctcctgcctcagtctcccgagtagctgggattacagctgcccatcaccacacttagctaatttgtttttttttttttttttaatagagccggggtttcatcattttggcctggctggtctcgaactacagacctcaggtgatctgcctgcctcggccttccaagatgctgggattacaggc

SEQ ID NO: 17195 - DNA, 201 bp, Homo sapiens
gatcaagctgggggtggtggctgacacttgtaatcccaacatgtaatgccaacactttgggaggccaggataggaggattcctcgagtctaggagttcaasactagcctgggcaacataaggagacaccatctctacaaaaaagttaaaaattaacaaaaattagctgggcgtgttggcaggcacctgtaattcccagcta

SEQ ID NO: 17196 - DNA, 201 bp, Homo sapiens
atacattggttagtgaagctaaccaaagtatagagaaaatatgtccatattaaccctgaacctaaaagtctaggtcagtacttctcaaattatctatgccraagaaactttttttttttaaattccagtttgtttagaaaatcacaagtattgatgtcccaggaatgttgaacttacgtaagagttctggacatgttatta

SEQ ID NO: 17197 - DNA, 201 bp, Homo sapiens
gctcgaacctgggaggtggaggttgcagtgagccgagattgcgccactgccctccagcttgggtgacagagtgagagtctgtctcaaaaaaaaaaaaattwttttttttcagatagtaaatgatgaagcaattatagttagaatatcattatttgcaaatctcagtgaattactagatttagacaattatcattggctgct

SEQ ID NO: 17198 - DNA, 201 bp, Homo sapiens
agtctggaacctcattcaaactctatttttagggggttttatggagacttcattacataggcatcattgattatataattggccattgttgatcaactcarttcagcccctctcctctccctggaggtctggggtggggctatgaactttccaactctctaaacacatggttggttcccttggtaacaagcaccatcctgg

SEQ ID NO: 17199 - DNA, 201 bp, Homo sapiens
cgctcgaacctgggaggtggaggttgcagtgagccgagattgcgccactgccctccagcttgggtgacagagtgagagtctgtctcaaaaaaaaaaaaatwtttttttttcagatagtaaatgatgaagcaattatagttagaatatcattatttgcaaatctcagtgaattactagatttagacaattatcattggctgc

SEQ ID NO: 17200 - DNA, 201 bp, Homo sapiens
tcgctcgaacctgggaggtggaggttgcagtgagccgagattgcgccactgccctccagcttgggtgacagagtgagagtctgtctcaaaaaaaaaaaaawttttttttttcagatagtaaatgatgaagcaattatagttagaatatcattatttgcaaatctcagtgaattactagatttagacaattatcattggctg

SEQ ID NO: 17201 - DNA, 201 bp, Homo sapiens
atcctgggtgacagagccaaactcttgtctcaaaacaaaacaaaacaaaaaaccaaaacactgaggtagaagaaaccctattctagtattcttgggcttaytattcccctgttttacgtcatttgtgtttatcaagtaatattttgatttagctttcctaaggaaaagtttgtattatttgttaatccccatgctttctac

SEQ ID NO: 17202 - DNA, 201 bp, Homo sapiens
aactaaagctaggtttatcttaaaagaacttttcagttagagtgccagatgcaaatcagatgttctgcagaattggaaaaccaggatcatttagattaatrgtacttactcagcactttctattctctttttctttttccttttctttctttttttttttttttttgagatgaagtctcactctgtcacccaggctggagt

SEQ ID NO: 17203 - DNA, 201 bp, Homo sapiens
actttgagaagccgaagcgggcggatcatgaggtcaggagttcgagaccaccctggccaacatggtgaaatgcagtctctactaaaaatacaaaaaaaaaattaaccgggcgtggtggcgggcgcctgtaatcccagctactttggaggctgaagcaggagaatcgcttgaacctgggaggcagaggtttcagtgagccga

SEQ ID NO: 17204 - DNA, 201 bp, Homo sapiens
aaattacttttaaaaataaactcttgccaggtggcctaaaactcgacatgtttttgaaaattacaatgattgaaagaatatgctgggggagagtgggggggtaccctaactttttttaaaacagtttgagaggcataagagctaaagtcttaacgcagtttagtgaattgtatgtttgtctctgttagtaagctatttaat

SEQ ID NO: 17205 - DNA, 201 bp, Homo sapiens
ggtttcccttgctactgatttctaggtttattctgttgtggtcagaaaagacagtttgccgtatgattttcgcttttttgaatttgttgaggcttgtttcrtggcattgtattgtctgtgtatttgattttaccagtagcttttatatttttaaatattttcttttttgtacattatttgtttttctttctgattgaagaa

SEQ ID NO: 17206 - DNA, 201 bp, Homo sapiens
ggagggctcatctgttcgcgtcttcctcatgtgaatggaatgtggtgcagcatggagccccaaacaggatacagttgttctaagcattcttcctatagttyggtaggccctactagaaatgcaggctctcaactatatttattttggccgtagactatttttaaaaagtatgtttaacactgataaatgaccttaaaaaaa

SEQ ID NO: 17207 - DNA, 201 bp, Homo sapiens
ggggagggctcatctgttcgcgtcttcctcatgtgaatggaatgtggtgcagcatggagccccaaacaggatacagttgttctaagcattcttcctatagwttggtaggccctactagaaatgcaggctctcaactatatttattttggccgtagactatttttaaaaagtatgtttaacactgataaatgaccttaaaaa

SEQ ID NO: 17208 - DNA, 201 bp, Homo sapiens
tacgggcatgcgccaccatgtctggctaatttttgtatttttagtagagacagggtttcgccatgttggccaggctggtctcgaactcctgacctcaggtratgtgcccagcttgtcctcccaaagtgccgggattacagatgtgagatactgcacctggcctagttatttatttcttaaaacattaaaataactcactta

SEQ ID NO: 17209 - DNA, 201 bp, Homo sapiens
gtccatttttttatctgtaaaaatgagagtatttctaacattaaagtaataggactaaattttgtatttcttttttaaaaatacctatatttttagagacrgcatcttgcaatgttgcccaggctggtctcctactccctgggctcaagccatcctctcagctcactttctaagtagctgggattccaggggcatgccact

SEQ ID NO: 17210 - DNA, 201 bp, Homo sapiens
gaagataatttccagtgcgtgaatacagtgttttcacaagttccactgccactgtggaaatgatagtgtaatcctagatcttgtgaaatacaattaaaatrtaacgtacatttacttactaataaaagtaactagaataaatgtcccaaataaattaaaacagccctctttttagcaaagttaaagtacatattaaactga

SEQ ID NO: 17211 - DNA, 201 bp, Homo sapiens
caggaggcaaagtttgcagtgagccgatatcgtgccattgcactccagcctgggtgacaagagcgaaaactcagtctcaaaaaaaaaaagaaaaaaaaaaagttttggtaacagtggcgacagttgcatagggtgtgaagttattttagtgcccttaaattatacatttaaaaatggttaaattaactttatattatacat

SEQ ID NO: 17212 - DNA, 201 bp, Homo sapiens
ttgatctcgtgaccttgtgatccgcccaccttggcctcccaaagtgttgggattacaagcgtgagccacctcgcccagcccttttttttttttttttttttctgagacagactttcactcttttttcccaggctggagtgcaatggcgctatctcagctcactgcaacctctgcctcccgggttcaagcgattctcctgcc

SEQ ID NO: 17213 - DNA, 201 bp, Homo sapiens
ctttgggaggccatggcaggggtattgcttgagatcaggagttcaagaccagcgtgggcaatatggcgagacactgtctctacttaaaaaaaaaaaaaaaagctgggtatggtgatttgtacctgtagtcccagctgctactcaggaggctgaggtgcaggaggtttacaccttcagtcacttcagtccatgaggttacag

SEQ ID NO: 17214 - DNA, 201 bp, Homo sapiens
agtgctgggattacaggcatgagccaccacacccggcctgatttcagccttttactccatcatgtccttctctctctctttttttttttttttttttttttgaaacagggttgtgctttgtcgcccaggctgaagtacagtggcacgattatagcttactgctgccttgaattcctgggctcaagtgatcctcccatctca

SEQ ID NO: 17215 - DNA, 201 bp, Homo sapiens
cagattatttaaaataatgggttttgggccaagcatggtggctcacacctgtaatcccagctacttgggaggctgaggtaggaggattgcttgagcccaggaggtcgaggctgcagtgagccacagtcgcatcattgtactccagcacaggcaacagaatgagacccggtctcaaaaagaaaaaaaaaaaaaaaaaaaaag

SEQ ID NO: 17216 - DNA, 201 bp, Homo sapiens
gatctgcctgtcttggcctcccaaagtcctgggattagagacatgagccactgcgcccagacttttcagttttgactgagattttatttgtcatgtgatawgcagtttggacatggtttagagaattcacaggagcagtttcatcactccttatttctttgtagattgtatagagacttttaatctcataagatctaaact

SEQ ID NO: 17217 - DNA, 201 bp, Homo sapiens
atgtaattgttctacctttgtaggttttacagaatgttcttaatcacagtaataaaatttctctgtgcatgcctgagtctcagcagcaaaatactcctccraagtctgagaaaaatggtggcagcagcccagagagtgatgtaggcacagataacaagttaactcctccagaatcccagtcaccactgcactggttagcag

SEQ ID NO: 17218 - DNA, 201 bp, Homo sapiens
aaacaaaaaaaacataaatttggttgaataatcaaaactgtaatagatggaagagaatggagaaaaatggaagaaatttaaagggcacaagaaaacctccrttattcccaattataatataaaatattgtaagaaaaaaattttacagcattaacaactagtggtaatctttttattaactaccattttattttgtagttt

SEQ ID NO: 17219 - DNA, 201 bp, Homo sapiens
ctcaagtgagtaaaaatctctggttattcaaataaaatctgtggttaaattagtcaactttgatatttatttgaaatttggtttaggacttatgtatgaaytaggtttgctgtgtttctgtgtaaattttttgtatctatactactaattgaattattgaagaaagtgtttaaaaatgtaattgttctacctttgtaggtt

SEQ ID NO: 17220 - DNA, 201 bp, Homo sapiens
gacatttgccaggaggaacagcataattggtgttgaagtattttaggggacagtagaatgtcagcttagctaaagaagagagtttatgaatagaattaatrctggatacacatggtgtggggtcagacaaaagaggaaaagatcactaagcacagttctcaggagagtaacaaaattatctgtgtaacaatggcatgttgg

SEQ ID NO: 17221 - DNA, 201 bp, Homo sapiens
tggagacagagtcttgctccatcacccaggctggagtgcagtggcgtggtctcagctcactgcaacctttgcctcctgggttcaagtgattctcctgcctsagcctcccaagtagctgggagtacaggtgtgtgccaccatacccagctgatttttttatttttagtagagatggggttcaccacctaccttcccctatgg

SEQ ID NO: 17222 - DNA, 201 bp, Homo sapiens
ttcatatggcagtaaagctacctataaaccttatttatcattgtatttacttgaatatttggaaaatttttgaaaacgtctgttatctcaataatacatcrggtgttattaataggttattgatatgtaacatttttatatttttcctacaggctcagtagtgggaactcttaaaaataaggtcattgtacttatatattt

SEQ ID NO: 17223 - DNA, 201 bp, Homo sapiens
aaactaaagaagataattttatccatagtaggttttaaaaaatatttaatgagtatgttgaattgttcatataaaaagtttaaaccattttaaacttttayagaccttaacccaaaagcatgattttaattttatagaccttaacccaaaaactggatacaatttatgagaaattatgaataattagatgtataggtgaat

SEQ ID NO: 17224 - DNA, 201 bp, Homo sapiens
tttgaggccatagtgcactgtgatcatgcctgtgaatagtcactgcactctagcctgggcaacttagcaaagccgtttctttccggtttttttttttttttagatggagtttcactctttttgcccaggctgtagtgcagtggcatgatctcggctcactgcaacctctgcctcgcgggttcaagcgattctcctgcgtca

SEQ ID NO: 17225 - DNA, 201 bp, Homo sapiens
agaatggcaattttgccttccgtttaccataaacttctctgaatagagtagttatttggatatcagaagctaagagcaagtaagcacattaatggggttcytataaaactattaagaattttcatccttgttctcttaaatcacttcagcaatgtgtcagtctaattaatgaaaatatatgtatagttggcatttttaaag

SEQ ID NO: 17226 - DNA, 201 bp, Homo sapiens
gtaaagagagtgaagtacaatataattgaggaataaccaccagccagtaagagaatggcaattttgccttccgtttaccataaacttctctgaatagagtwgttatttggatatcagaagctaagagcaagtaagcacattaatggggttcctataaaactattaagaattttcatccttgttctcttaaatcacttcagc

SEQ ID NO: 17227 - DNA, 201 bp, Homo sapiens
tcaaatgacctttctagatgatgttgttcactctttgttaaaaggtgaaaatattggcattacatcacgacgcaggtctcgtgccaatcaaaacgtcaacrctgttcacgtatgtatgttattagggatgaatttctgtaaaatatttttccttaggctagtagaaaccaggtagtaaacaattactgttaattggttatt

SEQ ID NO: 17228 - DNA, 201 bp, Homo sapiens
agccgaagcgggcggatcatgaggtcaggagttcgagaccaccctggccaacatggtgaaatgcagtctctactaaaaatacaaaaaaaaaattaaccgggcgtggtggcgggcgcctgtaatcccagctactttggaggctgaagcaggagaatcgcttgaacctgggaggcagaggtttcagtgagccgagaccgcgcc

SEQ ID NO: 17229 - DNA, 201 bp, Homo sapiens
atgaaaaaatgttgactttgtcacatgctttatctgcatcaattgagatgatcataaaattttttttcccttcattatgtgaatgtattgtatttattgasttttgtgtgttgaaccatcctcgcattccagcaataaatctcagttatggtatataatttttttttaatttctctttttaagagacatgatctcactctt

SEQ ID NO: 17230 - DNA, 201 bp, Homo sapiens
ctaatacaatgtcagtgctatatagtacttataatacctaatgcagtgtaaatgctctgtaaatagttgttatactgtatttttcaaattcatattttttwaatttttttctgaatatttttgatctatcattggttgaactcatgaatgcagtacagaggaccgacagtatagctgtctttatcccagtcctgcagcgtt

SEQ ID NO: 17231 - DNA, 201 bp, Homo sapiens
taagatggttaaatttatttatttaaataaatcttatgaaatacagaaatgttctagaaagaagaaaaaaaaatttagagttcgtgtaattacaatggctstataccagattgattgttttctaaccagttgtccaagcagtacattaaattccttagcttcttaaaatggcagctgttactggcataaattttgtaaata

SEQ ID NO: 17232 - DNA, 201 bp, Homo sapiens
acacagtacatttcttctcacatcaaatgtcagtgttggtatgctcaattaagttttatggtgaatcttaaggattacaagtttcctatggagtttttgtttgttttttgttttttgttttttgagctggagtctcgctctgtcgcccaggctggagtgcagtggcatgatctcggctcactgtaagctccaccacctggg

SEQ ID NO: 17233 - DNA, 201 bp, Homo sapiens
caaggaggtaatggggaaataattgtagagccttgttgacttatactgcacaagaaacagatgtttgccagatggaaatgaacaaaaccagtgcaaaaaargtgtcttattcaagtttctaagaggacaaacaatgaaacgattaggaaaaactggaagaggcatattactagcttttgaccaaaaaaggtcaggaaatca

SEQ ID NO: 17234 - DNA, 201 bp, Homo sapiens
cacacagtacatttcttctcacatcaaatgtcagtgttggtatgctcaattaagttttatggtgaatcttaaggattacaagtttcctatggagtttttgtttgttttttgttttttgttttttgagctggagtctcgctctgtcgcccaggctggagtgcagtggcatgatctcggctcactgtaagctccaccacctgg

SEQ ID NO: 17235 - DNA, 201 bp, Homo sapiens
acacacagtacatttcttctcacatcaaatgtcagtgttggtatgctcaattaagttttatggtgaatcttaaggattacaagtttcctatggagtttttgtttgttttttgttttttgttttttgagctggagtctcgctctgtcgcccaggctggagtgcagtggcatgatctcggctcactgtaagctccaccacctg

SEQ ID NO: 17236 - DNA, 201 bp, Homo sapiens
tggactctcccgagtgataggggtgatagaagtgtcatttcttctatgaggcaacccttggtggacttctagataacttcagggtatggtctggtcaccaraaagaccagaccttgaatagaagcttggaacactctcatctccatgccctaacctctggggagtggggagtgactggagatagagtaaattaccagtggc

SEQ ID NO: 17237 - DNA, 201 bp, Homo sapiens
aggtcgaaactgcagtgagccatgatctcacccttgcactccagcctcagcatcaaagcgagaccctgtctcaaaaaaaaaaaaaaaaagaaaagaaaagrgtacattgtttcttgcccagtagagtttgaaaattgtcattgaggagatatgaatattatcatcatggtttgtgaatgacgtaattgaattatgagttat

SEQ ID NO: 17238 - DNA, 201 bp, Homo sapiens
acagtattacaaaattcatcactattttcctcaattctgtattttatctatacctaactgtttagcgcttctggaaaatactaggtgtttttacatgtccmttcttttattcatacttttcccccacctatgaagccttttcacctatttctgctaattaaatctctaaaaatccagggtaactcatatagttcccgcatt

SEQ ID NO: 17239 - DNA, 201 bp, Homo sapiens
taatgtcaggtatctgtcaattattcttttagtgaatttacagtattacaaaattcatcactattttcctcaattctgtattttatctatacctaactgtktagcgcttctggaaaatactaggtgtttttacatgtccattcttttattcatacttttcccccacctatgaagccttttcacctatttctgctaattaaa

SEQ ID NO: 17240 - DNA, 201 bp, Homo sapiens
gggtgagaatagcttttcctacatctgccactcacaaacaataaccccacacacaagtcacttatctcatgagtcaggtcaccttttctgcaaaatggagrtaataaggatgttacagaaaagtatttggttgtgagattccattgatagagaagtgagaaaatcattttatgtgaataatatattaaaatcttattcttt

SEQ ID NO: 17241 - DNA, 201 bp, Homo sapiens
ttaacctataaaaataaatggaacatagagatgattattactttttgaaatctaattgataattatcatcattgatactatttatcaggcatttaagtaayatgtaagatatctccgttttgtaattgagaaacctggaaggttaaatgaggcctaaactcacacaattggtaagttacagagctattactagatctcttt

SEQ ID NO: 17242 - DNA, 201 bp, Homo sapiens
aaggattttaaaaatctgaaaaaacataaaccctttagtatgtatctaatgatattgggtgagaatagcttttcctacatctgccactcacaaacaataamcccacacacaagtcacttatctcatgagtcaggtcaccttttctgcaaaatggagataataaggatgttacagaaaagtatttggttgtgagattccatt

SEQ ID NO: 17243 - DNA, 201 bp, Homo sapiens
tagttggtatttaatcagcaataaaattggcagtatgattatcatgacaatagatcaatcaggtaaggattttaaaaatctgaaaaaacataaaccctttrgtatgtatctaatgatattgggtgagaatagcttttcctacatctgccactcacaaacaataaccccacacacaagtcacttatctcatgagtcaggtca

SEQ ID NO: 17244 - DNA, 201 bp, Homo sapiens
ggtgaacttagagaatttcactctctcattctttcagtttgtttcatccacctttgtgtagcttcttaaaagcacataggcttggtcaatcttttttttttgtttgtttttcttaatagatgcgctctgactttgttgcccaggctgatcttgaactcctgggctcaagtgatccttcccgccttggcctcccaaagtgct

SEQ ID NO: 17245 - DNA, 201 bp, Homo sapiens
gctgccctggcccccatcccggaggggtcgaccgcggctccccgctgtggcgcctgggcggccacggagacctccccgaaaggcggagccgcgagtccggygccgcgcgggcaggtgggggtagggggcggaccactcatggcgacaggcggccagcttccctggtatctcttttcttggaaaagtcttcatagtgctgta

SEQ ID NO: 17246 - DNA, 201 bp, Homo sapiens; identical to SEQ ID NO: 2653

SEQ ID NO: 17247 - DNA, 201 bp, Homo sapiens
atttctaacattaaagtaataggactaaattttgtatttcttttttaaaaatacctatatttttagagacggcatcttgcaatgttgcccaggctggtctyctactccctgggctcaagccatcctctcagctcactttctaagtagctgggattccaggggcatgccactatgtctgcttgtatgattgctgcttgattt

SEQ ID NO: 17248 - DNA, 201 bp, Homo sapiens
gtttcttttaagtgactttttagtataatagttaatagcagggagcctttgttatcacaagatctggttttgaaaaccagtttcttaatgtgtattcttasgcaagttactaaacttctctaaacctcattttctttatcctcaaaatgagattacgtgtgtaaagtacttagtatactgtctgacacatagtaagtgttc

SEQ ID NO: 17249 - DNA, 201 bp, Homo sapiens
tttagaaagattatccaaggcaattttggaagtgactacctaaagctggtattgaattttttgttaggagtagagttctgatgaaataagaggattaataytgtggaaacattagaagtacttagtatagattgtctgtctcaaagtaatgagtgtcattttcatttcaggccgctcttttttcagagtagtgtatcaggt

SEQ ID NO: 17250 - DNA, 201 bp, Homo sapiens
gcatggtggtgtgttcctgtagtcccaattacctgggaggctgaggtgggaggatcacctgaacccaggagatggaggctgcagtgaactgtgattgcccyattgcactccagcctgggtgacacagtgataccctgtctcagaaaggaagtaattaaatgaatcaaaagtgttttagaaagattatccaaggcaattttg

SEQ ID NO: 17251 - DNA, 201 bp, Homo sapiens
cataactgagggagttaaggatatgttgccaacatctgataggtagaggctacagatgcctctgaacagtctgcaatgcacagagtaatccctcccaacaragaattattcaacctaaaatgtcaaaagtaccagagttgagaaaccctgcttagatgtacggcatttttatttttcacttaatgatcatttatgggtctt

SEQ ID NO: 17252 - DNA, 201 bp, Homo sapiens
tactttcctatagagggtgaattgagtcaattaaccatttgtgaaatcacaatagcattttgctgtttctgccattacaacattaagttaatgtgttaaayccactttagaaattgtgaaatttcagcatttggcttataaagacataatctaccccaattatttgtattggaatctcagctttactccctaactgttacc

SEQ ID NO: 17253 - DNA, 201 bp, Homo sapiens
agacaacatttaatttttggagttcctctcggtccagaaattcttcttactctctagatgacggatttcttgagccaatgttcttgtacttattaaacatragtcagtaaatgtgatggagcaatgatgtagagtatgtaaataagttgatttttttttcacatattagactgtataatgcattagagttttgtccttttt

SEQ ID NO: 17254 - DNA, 201 bp, Homo sapiens
aaaacataaaaactaaaataaatacctagtttaaaatacctaatttttccagcaccgggaaaaatggcatagaatagatgcagtggttatggagggtgggwttaaaagtacacagtggattcctataggtggaatggggctactacagcccaggttaacccttaaaattaacaaggtgtaccagggaaaccagaaaaaact

SEQ ID NO: 17255 - DNA, 201 bp, Homo sapiens
tcaccatgttggtcaggctggtctcgaactcccgacctcaggtgatccgcccgcctcagcctcccaaagtactgggattacaggcatgagccaccgtgccyggccagcttacttttaaataaatatgtttttaaaaattttaatagacaacatttaatttttggagttcctctcggtccagaaattcttcttactctctag

SEQ ID NO: 17256 - DNA, 201 bp, Homo sapiens
gagatgtggtgtgtggttatacacatgggtgtttctctagtggattaagccaaatggctccttaccctaagttagagacagagaggggaaagcatgtaattgtaaagaacgaggcagcaattcagaagtgcttaataattggacctgatttcaaatgggtcactctatatggtttatttaaacacagtgctttgtaagttt

SEQ ID NO: 17257 - DNA, 201 bp, Homo sapiens
ttatatacacatacacataatagtgtgtttcttagtacattaaagctagatataatagattttgtcttatctactcttttggaatgtcttcctctctgctrcctttttgtttctcttaattaaaagtcagccgctttttctccactaatttttatgttttatttacttctatcttacattttatctaatttttacatttaa

SEQ ID NO: 17258 - DNA, 201 bp, Homo sapiens
ataggtaccttccaggttttaatgcctagaaaactcttgtgaagttaaatttatgaaattaagtgttagtgaaatacgtattctcttttcatcttgagacraatatacatattcacatgtaagagttctaagaaaagggccagaatgagtgcctttttttcccccaggttgtaatgtttagtcaaatctcccctgcttggt

SEQ ID NO: 17259 - DNA, 201 bp, Homo sapiens
cagcctcccgagtagctgggattatagatgcgcaccactacacctaaatacattttttttgtattttttagtagagatgaggtttggtttcaccatgttgrtcaggctggtcttgaactcatgacctcaggtgatccacccacctcggcttcccaaagtgctgggattacaggcatgagccaccacacccggcctgatttc

SEQ ID NO: 17260 - DNA, 201 bp, Homo sapiens
gaaagttgtatttaaaaaaaaatgatttgtaggatttgtttttatattttagataattacttattggttctatatcacatatatcatttcccagcagctcwtttttccacattagcaagttttagtgaataaaagttttaaattttaggatagtcaatttatcaagttaatttcatatatcttctgaagaatgaaattttt

SEQ ID NO: 17261 - DNA, 201 bp, Homo sapiens
gcagtcttattccatactggtctgaaatttactattgctactgctgtcactcacacgtatttggataattcagtgtatctttctggttcgtttattactcrcccctgtctataatgaatggcaccgttaatcacaacctctttgaatatagttctctgcttctgtgataccacttctgattctgacaccttatggagttgg

SEQ ID NO: 17262 - DNA, 201 bp, Homo sapiens
ggatggtggttaacaggggtgggtaatgagaaattatttagtagatacaatgtacattattcaggtgatgataactaaaagccaagacatcaccgctaggsaatatatccatgtaacaaaaattgcagttgtaccccttaaatttatacaaaatttttaaaaagaatatttatttaaatgttcactggtccttttaaaaaa

SEQ ID NO: 17263 - DNA, 201 bp, Homo sapiens
atcttcttggacaagcccatccttctgcttcatataatcagcttggactttatccaattatttggcagtatccaaatggaacacatgcatactcaggactyggtttgccttcttctaagtgggttcacccagaaaatgcagttaatgctgaagcttcattaaggagggtaagttacactgtagtttgccacatagcagtat

SEQ ID NO: 17264 - DNA, 201 bp, Homo sapiens
aagagcttattctcttactagccctagatttttcgtatttgaaaacctggtgtgtataattgggtaaagtttaaagggcctctatgtggttcaaagagctrcatactgaggatgggcagctttccaatgtaagctcttggtaaattatttaaaggtcctgtggttcctgagaaagtaggatgttgagtgagcaaagtgacc

SEQ ID NO: 17265 - DNA, 201 bp, Homo sapiens
tttaggaagccagaatacctttaaataaatatcttctgcaaaataccaaagagcttattctcttactagccctagatttttcgtatttgaaaacctggtgygtataattgggtaaagtttaaagggcctctatgtggttcaaagagctacatactgaggatgggcagctttccaatgtaagctcttggtaaattatttaaa

SEQ ID NO: 17266 - DNA, 201 bp, Homo sapiens
ttttttgttgaatgattaactttacttctggtttctcgtgtcttcttttgaggcactttttctttgttcctcttagtatgcatagaaagttgagatcaacwatgattgaatcttcatcttttttaagcatcaagaagaaactacttttgaggttattctgtttactatttttacttacgttctgtttctgtgtattctggg

SEQ ID NO: 17267 - DNA, 201 bp, Homo sapiens
tgatcagttggagttcaaagtgattggcttaatcttgagccacatccacatttaagggttgtgaagaagtggagccatctgggaagattgaaaaaaaaaaattagagaaatagggaaagcatcagaatatggtattttcaaagtcaaaggagaaataagcctcttataggttatcattaatacgaatgcctctgtgttgag

SEQ ID NO: 17268 - DNA, 201 bp, Homo sapiens
ggaaggctgtacttctaagtttttcagacctggcagttctcacacaaccagacttctggtttgcattttgtcaggaatataggaactcaaatctaagagamgtgcatattgtggagtgtagggatattgtttaaaaaaaaataagtctgtgggaggaaaatgtatttgatttctctcaaaaacaggttttttttgttttgt

SEQ ID NO: 17269 - DNA, 201 bp, Homo sapiens
tttacccctactcaatttttgaacctttggggcatagcttatctttggtaatttagcatattaatcagctttccctaatatttggctttagattaagcttstttttttttccactaagttagctaccactggttttgctgttattttaaaattagtttattttacccatcttttcaatctgttgaaaccttacaatcctca

SEQ ID NO: 17270 - DNA, 201 bp, Homo sapiens
cgtggaacgacagctttaaccttcataccacagaacagtgttgtctcctactgagtttctgtttagcttcatctttgcatcacccaaaatctctgagacartgcttaatacactttaaatgttccaatgaatatttgttgaatgaataaaacttcctaatccttttttgcatcaaaagctgccaagctggttttaccacat

SEQ ID NO: 17271 - DNA, 201 bp, Homo sapiens
ctcgatttcctgacctcgtgatctgcccacctcagcctcccaaagtgctgggattacagacgtgagccaccgcgcccggctcctatggagttttaagtacyagtctgaaagtcttgagatttcaaattttttttttaacttaatacaaaaaatactcatttttaaagctgttgtttatgtagaaaaaatagatatttatac

SEQ ID NO: 17272 - DNA, 201 bp, Homo sapiens
cctgggttcacaccattctcctgcctcagcctcccgagtagctgtgactacaggcgcccgccaccacgcccggctatttttttgtatttttagtagatacrgggtttcgccatgttagccaggatggtctcgatttcctgacctcgtgatctgcccacctcagcctcccaaagtgctgggattacagacgtgagccaccgc

SEQ ID NO: 17273 - DNA, 201 bp, Homo sapiens
aaacaatagttctagattttttttttttttttttgagatggtgtcttgctctatcacccaggctggagtgcaatggcgcgatctcggcttgctgcaacctscacctcctggagttcaagtgattctcctgcctcagcctcccaagtagctgggactacaggcatgtgtcaccacacctggctaaatttttatttttagtaa

SEQ ID NO: 17274 - DNA, 201 bp, Homo sapiens
taccttcacttggcattcaacaatataagaccattacataatttttacttcaaagtagatgggagtttttgttgaaagtcaaaaccctgtttctcttgctyctctttgaaagtctgttaacattttgagggttttgaatggtgatttgttcccagttggtagtgtgcctccattccctgttaataaaagactgatctgttc

SEQ ID NO: 17275 - DNA, 201 bp, Homo sapiens
tgaatacttacctgtattttaatctgaagtatgatcatttgtgccttctaaagcagattatttaactgattaaagagtcccttgaaattgatttttcaagygttagaaggttagccatgtaaaggtatttatacttacctcaaaaaaggatcaataaatgtttatgaaatccatacatatgaatggtttggcttttggtaa

SEQ ID NO: 17276 - DNA, 201 bp, Homo sapiens
aagttcacggtgaaaattcagtatctcacatttttcccccagttccttttttccagatgcaatcattgttaccccaaagagattccatgcttacacttgtstccctgctgctacttttttgggaacagtggtcttttagtaggctcaaagtgaccttgttaaaaagttaggttggtttacatatccacacttccccctctg

SEQ ID NO: 17277 - DNA, 201 bp, Homo sapiens
ccaaggtgggcagatcgcttgagtccaggagtttgagaccagcctggtcaacatggtgaaaccccgtctctactaaaaatacaaaaattagttgtgcatgktggtatgcgcctgtaatcccagctactcaggaagctgaggcaggagaatcgcttgaacttgggaggcgaagattccagtgagtcaagatcgtgcccagta

SEQ ID NO: 17278 - DNA, 201 bp, Homo sapiens
ttgcctttttgtttttttgagatggagtctcactctgttgcccaggctggagtgcagtggcatgatctcggctcactgcaagctctgcctcccgggttcaygcagttctcctgcctcagcctccggagtagctgggactacaggcgcctgccaccacgcccggttaatttttttgtattttcagtagagactgggtttcac

SEQ ID NO: 17279 - DNA, 201 bp, Homo sapiens
tggagaaggaagcattgtttgcagtagagggttgcccacagccacaattgatttcctttgaagaatgttcttcgtatctggtaaaagtggcctatttcagygcacctttttcagaaattactagtcttttgtttcctttgtttagtatgttacaacgtgtgaccttcaaaccagtggggtttgacgatttttagcaatttc

SEQ ID NO: 17280 - DNA, 201 bp, Homo sapiens
atcagaggggaagtcgcaggcggcggcccggcggggctggctccttcctctcggccgggccgggttgggggctggggaagcaggggtgaggcagggcgggyggagggtgtggctggaccccgagatcgttgggggtgctgtgggggatgggcccggatgcgccagaggcgacgccggctgctcctgacgacctggtgctca

SEQ ID NO: 17281 - DNA, 201 bp, Homo sapiens
tgaggcagggcgggcggagggtgtggctggaccccgagatcgttgggggtgctgtgggggatgggcccggatgcgccagaggcgacgccggctgctcctgrcgacctggtgctcaccgcggccctgaccccagaaaacctcttctaggaccctggcccttactcctccttccccaggttccctcgtccgacccacccagta

SEQ ID NO: 17282 - DNA, 201 bp, Homo sapiens
ggcccacaccatgcctgtccctgtgagaaagacgttactgcacgctcactgtcactcattcactgcagatctgagcccttcctgtatgccagggacttcaycatgatcctggggtctggtccagggatattgttacctgccggctaacaatatcgtgtgtttaggaacaccaagaaggcaagtagcaagtagccacaaagg

SEQ ID NO: 17283 - DNA, 201 bp, Homo sapiens
ccccacatgcgacctgtccagccgcaggagcctggagccccgcgaggccttcccgaagcacctgcaggcccagcgcagatgagccgcagtctcctgccgcytcctgggcagcagcccggccacagcagcgagggggcggcagcaggccggcccatccggaatccatgtgtcactggcctaggcctccctccgactcgctgg

SEQ ID NO: 17284 - DNA, 201 bp, Homo sapiens
aaagtcttcaggacttgcacatgtaagattcatgggaaagctttaggtgtgtgttgattttggtagcctcaggcttttgtaggacagatgtcctctaaaaycccatttaaggtagtcctggctgcaggaggacagggtcagggagagaagtaggacaaagaaggctgggcaagagggcctggccctggggatctgttgaca

SEQ ID NO: 17285 - DNA, 201 bp, Homo sapiens
aaaacatataacaacaacaacaacaattggggtttgagaatgggagggtgggcctttccctgacctcccctccaccccaccttctaactggagctggagcrgtgtcagcagagtgatgggctcttgaacacccagcgagactccaagcctgggaagagagggagagaagagccctctttgcctggagaggctgtcatatgc

SEQ ID NO: 17286 - DNA, 201 bp, Homo sapiens
cttggttcctcaaaggagagaggggaatttcgtttgaaccccttaaggggttacaaggttgaactgggaccttgttcataaccccaaaatggtacagggcycccctatttgtcctagtagggtggaggcaagcaggacgagtgggatactcttggggaacaggattgggagggaaatgcctcattcacatggtgtggacag

SEQ ID NO: 17287 - DNA, 201 bp, Homo sapiens
ggaagccagcaccctcccgtccccttctcaaaaaggtcagaaggctacctggagcacagaagagctctgtcctaccctaagccccaagggccagagagagygctctgctcatcttcccagtgaggggacagaactagctgtgtgaccttgcagcagccacttcacctttctgggccttgattttcctggtggtttagtggg

SEQ ID NO: 17288 - DNA, 201 bp, Homo sapiens
tataagttgaatccctgatgcagtgagcactcacatctgccattaaattaaatcaaattaaagcactttaatttgagtggtctcttgtgcctctcaaggayctgggagatagttattgttactttacagcctaccattttatggttgtagaaactgaggcacagagaagtaatttacccaaaggtcaaatagctagtaagt

SEQ ID NO: 17289 - DNA, 201 bp, Homo sapiens
ggtgcagtgtgctgggacagctctggcctgggtgccagttcgggctctgccgctgactggccccaggatgccgggcacatcacctaaaccctctgagcttyggtttcagactaggaaactgaaagggacgcataggtgtgaaggcaccttgccagggggctggagggcttccagggcaggtactacgctcctcccccacgg

SEQ ID NO: 17290 - DNA, 201 bp, Homo sapiens
cctgccggctaacaatatcgtgtgtttaggaacaccaagaaggcaagtagcaagtagccacaaaggggctccctcctgaccacccctccctgcttcccacmccacacacctaaaccactgcgagtgtggggatgcgctgcgccgacgtctgtgggtaagtgtgggtgtgtgagaagaacccaaaagtgggtcaggatggat

SEQ ID NO: 17291 - DNA, 201 bp, Homo sapiens; identical to SEQ ID NO: 2681

SEQ ID NO: 17292 - DNA, 201 bp, Homo sapiens
aggagggaagccagggtcctgaggcagctcagaacatagccccgggcccctcacacctcccgctgttctctgccctttatggactattggggccaccgccyggagcagggaccaaggactagggcagccaccaagatgccactggaccagcagggaggtcagggcccgggcagcaggtgggtgttggcgcaggcatacctg

SEQ ID NO: 17293 - DNA, 201 bp, Homo sapiens
gctcttttctgagtccttctgtctgtgccctgtggctatttccagggagggcaggaggaggccacagaggcaagcttctctccagtcctgggccttcttcrgtggactggcctccatcacaggccccgttgcctgaggaatgaggccaaaataatggcagatacagggcctctcagaggctgagccaggcctggcccactt

SEQ ID NO: 17294 - DNA, 201 bp, Homo sapiens
ttggaagcaggagcctgggttctcccagggccggcctgctcctcagcacaccttgtatcgctttgtgtgaggcaccctcggagggaggaagaatggctgtkctttttcatcccagaggccccgtgtttggggtgaagacacccaagaacataagcaaaatattagacataggcacagagtgggagggacctgaggcctgat

SEQ ID NO: 17295 - DNA, 201 bp, Homo sapiens; identical to SEQ ID NO: 2699

SEQ ID NO: 17296 - DNA, 201 bp, Homo sapiens
ggtttctatggaggcttcattatgtaggcatgactgatgaaatcactggccactggtgatcgcctcaacctttggcccctctcccttccccagcggttggrggtagttggttcccctggcagccagtccttatcctgagggtatccaggagccccccaggagtcacctcattggaacaaaagatgctcctatcactccaga

SEQ ID NO: 17297 - DNA, 201 bp, Homo sapiens
ggcaccctcggagggaggaagaatggctgtgctttttcatcccagaggccccgtgtttggggtgaagacacccaagaacataagcaaaatattagacatargcacagagtgggagggacctgaggcctgatggctggcccagtggtctctaagctgcctgcctagagccagcacagaagcgtggcccgagctgggtaccac

SEQ ID NO: 17298 - DNA, 201 bp, Homo sapiens
ggagggaggaagaatggctgtgctttttcatcccagaggccccgtgtttggggtgaagacacccaagaacataagcaaaatattagacataggcacagagygggagggacctgaggcctgatggctggcccagtggtctctaagctgcctgcctagagccagcacagaagcgtggcccgagctgggtaccacccatgggat

SEQ ID NO: 17299 - DNA, 201 bp, Homo sapiens
gagctgggtaccacccatgggatttcaggggtctcaggtagcatgtgcgtgctggaaggtttaaaaagctccttggggaagggcacagtggctcatgcctrtaaccccagtgctttggggagctgagggaggaggatcacttgagcccaggagttcgagatcagcctgggcagcatatcaagaccctatctctatgaaaaa

SEQ ID NO: 17300 - DNA, 201 bp, Homo sapiens
gttcggggctacagtaagctatgattgcaccactgcactcctgcctgggtgacagagcaagactctgtctcaataaataaataaaaataaagagctcctcrgctgattctaaggtgcagtcaccactgaggtcctcaacaacgaggaagtgacttctttgaggacacaccgtgggccaggctgaaagtggactcctggtcc

SEQ ID NO: 17301 - DNA, 201 bp, Homo sapiens
gactctaacttgtggggtgggagggggcgatggggaaccctgactcagctcctcttttgtcttgccatctctggccagttgctctgcctctctgagccttygttttctcctttcttctggtgttgatcctattggctctgactacttcacaggactgtgaggataaaaggcagacccatccaaatgcctggagagaactta

SEQ ID NO: 17302 - DNA, 201 bp, Homo sapiens
caaacacctttttttcagcttaaaggtggcgccagcccacacctggcctcagggacccctcagtgtgtccttgagttttaccctcagagtggccactcccmagctgcccagaggacttcctcgtcattcctccccacaagacctcctaggggactctcctcgtatcccttctggtctctgctgtccccatggtggcctctc

SEQ ID NO: 17303 - DNA, 201 bp, Homo sapiens
ccaggcaccccgcaggtgccatctgctttaatctctgagtagtcctgggagataggcactgagcccctcgaggtcgggtgcttgcccaaggtgcactggtygggggaagcctggggatctgcaggaccccagggccctgctctcctcgtccctctctggctggctgcctttgctttcctgggagtgagggtcctggaatcc

SEQ ID NO: 17304 - DNA, 201 bp, Homo sapiens
ttccaggggaggcttcagaagcctgaaggccttggatttcaaagccctttaggcacccttctgtgtgcccactgctgcacgcatgtgggtgccgtttggtkccatggccccaccgcccttttcccccagacctgacagctctgctcacccctacacatctctgctcctttgggctatggcagaactcaggatgaagggggc

SEQ ID NO: 17305 - DNA, 201 bp, Homo sapiens
tccaggcctatcacagcctctgccgccccctccaagagaggctcaagtatttaatgactggcccctctgccccccacttcccagccacccccaccccctcrcagggacactgcctccccaggtgccctctcccaggtgtgtgatggggtgttaatcctcagcggaggaggatcccaggtgtccccactgggccccaccttg

SEQ ID NO: 17306 - DNA, 201 bp, Homo sapiens
cccctccttgcctgcctggcagagtttccaccaggagtgccctgggactgttaggtgttttttagcaactgtctctgccccgtaggggaaagggaggaagycagataagttgagtgttcttgccagggagctgggtcaggtgggaggctctctgcctctggccactctgcggtccacgggcctgagaggcccctgcagctg

SEQ ID NO: 17307 - DNA, 201 bp, Homo sapiens; identical to SEQ ID NO: 2687

SEQ ID NO: 17308 - DNA, 201 bp, Homo sapiens
tctttccgtcctgtcgctgtgcctctggctgtgtgtcctcaagtggagacaatgtcagatgtccatattgagaccccttgtaacactgagaccctacagarcctctgcccagtcctgtccctaggctccccgggtgtgtgccagagaacccggggttcaggtgtcctgtcttgtgtcttttgaaagtatggagcttcagtt

SEQ ID NO: 17309 - DNA, 201 bp, Homo sapiens
tggtgggcagaggtcaggagtggggactgacaaggaaggggccttggcaggagacagacagtgcaccgtttctcaggcagtttctgagacacccagggcayaggcatgagaagctctgttcctacgcagcatgggcacctcggacatctgtcctggtggtggggctggggctggactgggaacggagtgggggtgccccac

SEQ ID NO: 17310 - DNA, 201 bp, Homo sapiens
ataaaaattagacaggcatggtggcacatgcctgtggtcccaggtacttggaaggctgaggtgggaggatcgcttgagcctgggagttcggggctacagtragctatgattgcaccactgcactcctgcctgggtgacagagcaagactctgtctcaataaataaataaaaataaagagctcctcggctgattctaaggtg

SEQ ID NO: 17311 - DNA, 201 bp, Homo sapiens
aaggcagcagggttgggccagaaggtgggagtgagccggtgccaggggcctcagatgacacccaggggctggaggcaccttccctacttccactctggggyaggtgggttatgggcacacagatcttgttggttgagggcaggtatggttgagggctcatacctccctcccagaacccagccatttcccatcacctgcaca

SEQ ID NO: 17312 - DNA, 201 bp, Homo sapiens
ctgaaccctgaggagctcctggagaaggcttcgttggttttagcaaacgagggaagtggtgcctgcagcctccccagaggcttgcctgggggctcaggagygctcaggtcaagcctgagggatggggtgagtgctgggccaggtgccccacaggctcccaggaagcacccctgcagccttcctctgtctgctcctgggccc

SEQ ID NO: 17313 - DNA, 201 bp, Homo sapiens
ctgcagccttcctctgtctgctcctgggcccaggggctgcgggactcttggctgctaggacaggtacgtgtgggccaggtgtgggccgagcagagggatgrggaagaggctcaatgagagacagaggagagagggacacaggaacacacggggaggcacgtgaaagcaagaggaagaaggagagagagggagagagccgcc

SEQ ID NO: 17314 - DNA, 201 bp, Homo sapiens
ggctggggctggactgggaacggagtgggggtgccccaccctctcaaagccacgggcccctgctactcctaaggccagtcttgagctctgtgatgaagacrtaagaatactggcctcttattggggttcctgggggtcagaggaacacagccatcgaaggccattgctcggccacatgatgaggcaggggaccccaggaac

SEQ ID NO: 17315 - DNA, 201 bp, Homo sapiens
gtcatttaagagatgagcaaggagaaagccacaccatatgagaacaattaccaaaccctgtgggatgcagggaaagtcacatctcctttttgggccttgaygtagtatctctaagacaaataggttagaccatataatttgaggttcctttcagctctgacatgcagtgacttcatgaaatatttaaggtggtagcttgtg

SEQ ID NO: 17316 - DNA, 201 bp, Homo sapiens
tgccgctgactggccccaggatgccgggcacatcacctaaaccctctgagcttcggtttcagactaggaaactgaaagggacgcataggtgtgaaggcacsttgccagggggctggagggcttccagggcaggtactacgctcctcccccacggaaaaaccaccagatgggtcctcatttctagggctggcccacaccatg

SEQ ID NO: 17317 - DNA, 201 bp, Homo sapiens; identical to SEQ ID NO: 2700

SEQ ID NO: 17318 - DNA, 201 bp, Homo sapiens
cctcctcttctgaatcctgttactcctctcatgggtccctaggacttcttggggacctcaggtcatccacagctgtgggatgagctcccctaaatagagastgagcgtttttgtgccatagaacccttgtacttcccacccctgctgtggggtgaccccgtgtcagaaacggggtgttttcatcttgcagagcccctgcct

SEQ ID NO: 17319 - DNA, 201 bp, Homo sapiens
gggtgtctgtgtgttcaccccacctcctcttctgaatcctgttactcctctcatgggtccctaggacttcttggggacctcaggtcatccacagctgtggratgagctcccctaaatagagactgagcgtttttgtgccatagaacccttgtacttcccacccctgctgtggggtgaccccgtgtcagaaacggggtgttt

SEQ ID NO: 17320 - DNA, 201 bp, Homo sapiens
ctttgggaggccaaggtgggaggatcgtgtgacccaggagttggcgaccagcccaaacaatacagggagacctcctctctgtgaaaaaaaaaaaaaaaaaatagccaggcatggtggcatgcatttgtggtccctgccacttgagaggctgaggtgggaggattgcttgagcctaggaagtcaaggctacagtgagctgag

SEQ ID NO: 17321 - DNA, 201 bp, Homo sapiens
ttctctactttgtactccacttctatgaagttttcattatatttatgagtgtctaacacagtgcttggcacccaggaggcgcacagttcatataagttgartccctgatgcagtgagcactcacatctgccattaaattaaatcaaattaaagcactttaatttgagtggtctcttgtgcctctcaaggatctgggagata

SEQ ID NO: 17322 - DNA, 201 bp, Homo sapiens
gggactgacaaggaaggggccttggcaggagacagacagtgcaccgtttctcaggcagtttctgagacacccagggcataggcatgagaagctctgttccyacgcagcatgggcacctcggacatctgtcctggtggtggggctggggctggactgggaacggagtgggggtgccccaccctctcaaagccacgggcccct

SEQ ID NO: 17323 - DNA, 201 bp, Homo sapiens
ctgatctccaggaagtggaggtgagtactgcccaggaccccactctgtgtggtctctgcagagcacaccccctcccctcctgtgtccctccacaccctcaytctgacttgccttccctgccagcctccagtgtggcatgggagcaatcaggagctcacgggagaggctggaaaggattctggacatgggtttatagggata

SEQ ID NO: 17324 - DNA, 201 bp, Homo sapiens
ccggggtctgcgggagcggccgccgcacgtcgcagcccgaggctccgcagcctggccggctaattacacggaaagtaaacagtactgggggtcacagcccrgcgcccctcccctgtccctgcggcccgggccggcggccctgggaccccccagccccgggacccccagctccacacctgcccgacgctccggggtcgcgcg

SEQ ID NO: 17325 - DNA, 201 bp, Homo sapiens
aggggagctggcagagctggcagagaggaggaggagaagaagaggagctagtgtcccacaacccaaggccagggcgaggtctgggcaggacgctgcagtgyggtccggtccaggggtcacgctgtcctttagggaggtggaggtcagcaggaagtctggctttcatcccggctcatggccttgggcaagtcactgggcctc

SEQ ID NO: 17326 - DNA, 201 bp, Homo sapiens
ggtccaggggtcacgctgtcctttagggaggtggaggtcagcaggaagtctggctttcatcccggctcatggccttgggcaagtcactgggcctctgtgcrccttgctgttctctgctgagcaggagaaacccaagcctcccaagtgagataatgttgtcgagcgctgtgatgacccgcttcccattagcagccgccccat

SEQ ID NO: 17327 - DNA, 201 bp, Homo sapiens
gcctcagagagtgtgttgtagcaagaaaagtggtctgtgctgggcatcgggagacctgggttgtgtgacgggaggacctgggtcaggtcatctgtctctgrgctttctccggcacaaagggggggctggaccaggtgacctcgtaggaccctttctgggtcctctgcctctgagggtttgaagctgaatcgtgataactgg

SEQ ID NO: 17328 - DNA, 201 bp, Homo sapiens; identical to SEQ ID NO: 2682

SEQ ID NO: 17329 - DNA, 201 bp, Homo sapiens
cttcctgccagactctgggccctacaatctgggccccaaaagaaccttcaccccaaagaagtcggcttccaccagagcaggagggataccagttagctagyaggaagaacttaacatgggtggagggagcttaaaccctgacatgggtagcccagggaaagcaggaattcttttccctgcagggctttcagaacgggtttt

SEQ ID NO: 17330 - DNA, 201 bp, Homo sapiens; identical to SEQ ID NO: 2685

SEQ ID NO: 17331 - DNA, 201 bp, Homo sapiens
tgtgatgaaatttctcagctgaatatacctgaaaccagagctttcaaaccagagtcatctcggaaaatggaggtccccaggctcacctgacctgtgtggcyggagctggggaagccctggtgttcctcactggatgcttctccccatcttggtgggggatcggcagtcagggcccaaagcttcagcccgggccccaccata

SEQ ID NO: 17332 - DNA, 201 bp, Homo sapiens
atcggcagtcagggcccaaagcttcagcccgggccccaccatacgctagtcagggacccccggcaagtgaccacatctttctgagttctgcttcttcatcygcgtcaggaaataacaatacctatcttggagcctgttgtgaggatgagccaagaaaatctgtgcagagcaccgtgtaattcacaaatccctctgcaaatg

SEQ ID NO: 17333 - DNA, 201 bp, Homo sapiens; identical to SEQ ID NO: 2689

SEQ ID NO: 17334 - DNA, 201 bp, Homo sapiens
agtgtagccggcccggccagcggtaggaagcttgctgctctgcctggaggagggagggaaatagggaaggggctgaggacacaggtgtatgctgggccagyctgcccttgttccttcctgccagactctgggccctacaatctgggccccaaaagaaccttcaccccaaagaagtcggcttccaccagagcaggagggata

SEQ ID NO: 17335 - DNA, 201 bp, Homo sapiens
gaagcgtgcctgaacctgatcttttcccagggctggacaagagcctgggggccagctgcaaggactccattggctggatgttctccaagctggacaccagkgctgacctcttcctggaccagacggagctggccgccatcaacctggacaagtacgaggtctgcatccgtcccttcttcaactcctgtgacacctacaagg

SEQ ID NO: 17336 - DNA, 201 bp, Homo sapiens
gattttgtgggtcctgaagcttatatacttttggaggtcttctttaagaaagagttaaaaaagaaatcccagcactttgggaggccaaggtgggaggatcrtgtgacccaggagttggcgaccagcccaaacaatacagggagacctcctctctgtgaaaaaaaaaaaaaaaaaatagccaggcatggtggcatgcatttg

SEQ ID NO: 17337 - DNA, 201 bp, Homo sapiens
acatggagcccagaggaggccctggcctaggaagacagaagagggttgcccccttcctgtgtctatccttgtggtggggcagggactcccaatctgccccrggaaaagtgtgttttaggcactaattttatgcccatccatgctggagctagagtttgggatacagaaggatcctggaaccctccactgagttcagtttcc

SEQ ID NO: 17338 - DNA, 201 bp, Homo sapiens
tccagcgagtagagccggaagaattgctggctggtgtccagctctcagcatctgggcctgttggggggtcagcacccggtctggctgggctctgggggtgyatagacttctgctcatgcatgaggacctgaggtcacctctctgaggggcccacagcctgggtccctgctctgaccctgcctggcactgtctcattcaggc

SEQ ID NO: 17339 - DNA, 201 bp, Homo sapiens
ggggggtcagcacccggtctggctgggctctgggggtgcatagacttctgctcatgcatgaggacctgaggtcacctctctgaggggcccacagcctgggyccctgctctgaccctgcctggcactgtctcattcaggcatcttcatcccgagctgcgacgaggatggctactaccggaagatgcagtgtgaccagagcag

SEQ ID NO: 17340 - DNA, 201 bp, Homo sapiens; identical to SEQ ID NO: 2696

SEQ ID NO: 17341 - DNA, 201 bp, Homo sapiens; identical to SEQ ID NO: 2697

SEQ ID NO: 17342 - DNA, 201 bp, Homo sapiens; identical to SEQ ID NO: 2698

SEQ ID NO: 17343 - DNA, 201 bp, Homo sapiens; identical to SEQ ID NO: 2701

SEQ ID NO: 17344 - DNA, 201 bp, Homo sapiens
gaatcctgttactcctctcatgggtccctaggacttcttggggacctcaggtcatccacagctgtgggatgagctcccctaaatagagactgagcgttttygtgccatagaacccttgtacttcccacccctgctgtggggtgaccccgtgtcagaaacggggtgttttcatcttgcagagcccctgcctgggtctctaag

SEQ ID NO: 17345 - DNA, 201 bp, Homo sapiens
tgcagtggctcctgcctgtaatcccagcactttgggaagccaaggcgggtggatcacctaaggtcaggagtttgagaccagcctgaccaatgtggtgaaamcccatctctactgaaaatacaaaattagctgggcatggtcgcttgtgcctgtagtcccagatactcgtgtggctgagacaggagaattgcttgaacctgg

SEQ ID NO: 17346 - DNA, 201 bp, Homo sapiens
tcccacgccatccccactttcccccaaatttctaatcataaattcttggtcttgacctttgagaatccactgtgtactgagtcccaaaaattccactcacsgcctggttggaggttaaggcagcagggttgggccagaaggtgggagtgagccggtgccaggggcctcagatgacacccaggggctggaggcaccttccct

SEQ ID NO: 17347 - DNA, 201 bp, Homo sapiens
ggttttaccgtgttatccagggtgctcgatctcctgacctcgtgatccgcccgccttggcctcccaaagtgctgggattacaggtgtgagccaccgcgccyggcctattatttatatttattatgattatgattatgttttttctctttattacaaagtaatatatgttcattgcagaaattttggggaaagttggagaaa

SEQ ID NO: 17348 - DNA, 201 bp, Homo sapiens
gttcacgccattctcctgtctcagcctcccgagtagctgggactacaggcgcccgccatcacacacggctatttttgtatttttagtagagatggggtttyaccgtgttatccagggtgctcgatctcctgacctcgtgatccgcccgccttggcctcccaaagtgctgggattacaggtgtgagccaccgcgcctggcct

SEQ ID NO: 17349 - DNA, 201 bp, Homo sapiens
ccctgagtgacactcactcacatgctccataaacacctgggggccggccccagagatacaacagcaatagacccagcccaactctgagcggatggcaagamggatgcactccctggcctcataaccctttagctcgggccagtccggaaacacacaacacacaaatggacacactaaaaagacagaactagcagtgtgacc

SEQ ID NO: 17350 - DNA, 201 bp, Homo sapiens
ggaacccgtgaaaggctttcaaaatataatacttattatattttttattatttttaaaatttattttatttttattatttatttctttatttttttgagayggagtctcactctgtcgcccaggctggagtgcagtggcgtgatcttggctcactacaagctctgcctaccgggttcacgccattctcctgtctcagcctc

SEQ ID NO: 17351 - DNA, 201 bp, Homo sapiens
tacacaggcgcctgggagcttcagctggggagcctgcaggaaagcaagtgggccccggaggcaggtcggactcagagtggctgggaggagaaggctgggcyttcctagcaggggacagccaggccggcggaactgtgggaggatggagagtgtcaaacctggtgaagtcagactggctgtcctagaagacttgggccatgg

SEQ ID NO: 17352 - DNA, 201 bp, Homo sapiens
ggtggggccggcagtgagggtggcatcggctcgcgcggtgccctctgttcccaccgtgggctttgcgggagggggacagcatgggacgggagtgtgaccgrggctctgggtctggggtcccagcagccttctaggcgagatggtggaaggcgtgtccgtacgggggtgggctggggtccccgtgcagaagggcgcgcgagg

SEQ ID NO: 17353 - DNA, 201 bp, Homo sapiens; identical to SEQ ID NO: 2683

SEQ ID NO: 17354 - DNA, 201 bp, Homo sapiens
catggagtcagggaaactgatggggcggctgggagctagcacaggggcctgagcagtggttcaaggaagcgggtttcctcatctccagcgagtagagccgraagaattgctggctggtgtccagctctcagcatctgggcctgttggggggtcagcacccggtctggctgggctctgggggtgcatagacttctgctcatg

SEQ ID NO: 17355 - DNA, 201 bp, Homo sapiens; identical to SEQ ID NO: 2686

SEQ ID NO: 17356 - DNA, 201 bp, Homo sapiens; identical to SEQ ID NO: 2684

SEQ ID NO: 17357 - DNA, 201 bp, Homo sapiens; identical to SEQ ID NO: 2688

SEQ ID NO: 17358 - DNA, 201 bp, Homo sapiens; identical to SEQ ID NO: 2691

SEQ ID NO: 17359 - DNA, 201 bp, Homo sapiens; identical to SEQ ID NO: 2692

SEQ ID NO: 17360 - DNA, 201 bp, Homo sapiens; identical to SEQ ID NO: 2693

SEQ ID NO: 17361 - DNA, 201 bp, Homo sapiens
cctgctctgaccctgcctggcactgtctcattcaggcatcttcatcccgagctgcgacgaggatggctactaccggaagatgcagtgtgaccagagcagcrgtgactgctggtgtgtggaccagctgggcctggagctgactggcacgcgcacgcatgggagccccgactgcggtacgggctgggcagctcagggcctgct

SEQ ID NO: 17362 - DNA, 201 bp, Homo sapiens; identical to SEQ ID NO: 2694

SEQ ID NO: 17363 - DNA, 201 bp, Homo sapiens
ttgaacccaggaggcggagattgcggtgagccgagatcatgccattgcactccagcctgggcaacaagagcaaaactccatctcaaaaaaaaaaaaaaaamcaaaacgacaatatggtgaggatgtgatcatttttgcattttggaatgatcattcttgattgccttgggaagaatagattttgggggaaggtacagagca

SEQ ID NO: 17364 - DNA, 201 bp, Homo sapiens
gccacctaataaattactgtaataaatgttcttgcacatgagccatcacatattggggtgctattatttctataggatacatttctaagagtggaatggcrggatcatgggctctgtatactttgttttatttaatattgctaaagtatattctcaaaagtttacagatactcaacctcccactagcaacatatggatatg

SEQ ID NO: 17365 - DNA, 201 bp, Homo sapiens
atacagcaagaccctgtttatacaaaaaataaaaattaaaaaatcagctgggtgtgatggctcaagccatcaatagtcccagctattcgggaggctgagtygggaggatggcttgagcccaggagttcaaggctgcagtgagctatgattgtgccactgcattctagtctgagtggtacaggaagactctgacttcttaaa

SEQ ID NO: 17366 - DNA, 201 bp, Homo sapiens
taacctgcttttaacttaacaatctgtcttaaaaagtatttcatatcaccaaggtgagagaatcacttgaggtcaggatttcaagactagcctgggcaatrcagcaagaccctgtttatacaaaaaataaaaattaaaaaatcagctgggtgtgatggctcaagccatcaatagtcccagctattcgggaggctgagtcgg

SEQ ID NO: 17367 - DNA, 201 bp, Homo sapiens
tttttattgcaaaaatttttaaacatacggaacagtagagaccagtataattaatccttgtatacccatcacccaattccaataattatcaaaattttacracacttgcttcatctgtcttttttcatatatttttgttttccaaaaatggcattatagtacacataccacttggtaacctgcttttaacttaacaatctg

SEQ ID NO: 17368 - DNA, 201 bp, Homo sapiens
gtggataagacaacaggcacatcatctttctcacaacttaccactgaggaaacggtacagagaggaagaaaaaaagcatcccagaaaggcaatctagatcrctcagtgactaccgcctagcacctccaggaacagaggcaaaagttgaaagcagggtgtgtccccaggacatccctgcaactcaccctttctcctctgctt

SEQ ID NO: 17369 - DNA, 201 bp, Homo sapiens
gtaattagatgtagaagttcagtttaacatagaaaattgtgattatgcaaatggagactatgctattagaatgtgtttcaggttcggaaaattatatcctwctcttccacattgggttggcttatggttactaattcttgaccctcccagagattccaggctgattaaggtttgcacaaaacagacagacacacttcctcc

SEQ ID NO: 17370 - DNA, 201 bp, Homo sapiens
gccaccatgcccagctgatttttaatttattttgtaggggcgaggtcttactatgttgcccagatgtactagctgattgcttacagaaaatgtctgccaawccccgctcaagtggattatcttcaatgacttaagctgttttatatggcaggggaaaagggagcctaagtagattcttcctatattcatttagtcaccagg

SEQ ID NO: 17371 - DNA, 201 bp, Homo sapiens
agagtcggccccacatcaaatgtaattagatgtagaagttcagtttaacatagaaaattgtgattatgcaaatggagactatgctattagaatgtgtttcrggttcggaaaattatatccttctcttccacattgggttggcttatggttactaattcttgaccctcccagagattccaggctgattaaggtttgcacaaa

SEQ ID NO: 17372 - DNA, 201 bp, Homo sapiens
ctgtggtcagttgtcttcccaaaatgatatgtttttcaggatgcagtgagattttatgcatttgattatgttccctccgtgagcggggctgggcaagcacractgtttcccattacccagcctctctgaggccgcccttcttctgtggtttgaggtggagaagcagcacaggcaagcccttcccagcggtttttgtgtggt

SEQ ID NO: 17373 - DNA, 201 bp, Homo sapiens
ttacccaagtattagcccttgttaggggtgacatcttagactttccccctgtattaccttagcagagtcggccccacatcaaatgtaattagatgtagaarttcagtttaacatagaaaattgtgattatgcaaatggagactatgctattagaatgtgtttcaggttcggaaaattatatccttctcttccacattgggt

SEQ ID NO: 17374 - DNA, 201 bp, Homo sapiens
cacacattcccccatacccataccatagtctggacatctggatggtcaaatgacttgacccctccaccccccacacccacccatgtatgtttaggtttacratagcgttggtgcccatagtgtattgattgctctgattatcccaggctcttgaggagagtattgatggagacttagtacacaaagaacatatttgtgcat

SEQ ID NO: 17375 - DNA, 201 bp, Homo sapiens
gttacagctccgtatttgcctaatttgaacatggtctgatcgttggctgcctgtgattaactgaagcttggctgctgtgattggctgagactcagctattygttagaaaagtacactacttcaggctttcacctaggtgatgtgctaagttaaaatgcagttccttacataagaactcaaagtatggaggcatcctcaggc

SEQ ID NO: 17376 - DNA, 201 bp, Homo sapiens
caaaaccagcagaggcccacagactctgtgccagataacattagatcacatctgagacagatcaggctggagcacagaaatcgtttactgaagatggaatstacactttgcagctctaggaggcagtttgagagacctctctcaccctgcaggcctgttgccctaagccatatttttacggcaactctaagttatttgaac

SEQ ID NO: 17377 - DNA, 201 bp, Homo sapiens
cctcctcaccctgttttcaccctgtagccctcatagcacctactgcatgtgcctgcacataagacaaactcatttaagcagttaaaggttgagcaatcacrtattctcaaggggctgtagtcaagtcctctcctagtcttcatagatttttttttttttcattttaatgacaatctgaaagatgggtagaaaaataggtac

SEQ ID NO: 17378 - DNA, 201 bp, Homo sapiens
cctgtgtctgtccacatgtgcatgtgtgcaagtgtgtatgcgtgcatatgaagctccctgagagctgtcacgtttggcagtttcaaatctgagccttcccrggatgccccatcacaggtaacactcccatccatcctggccctgggctgcagccgctctatctgcctgtttcttttggctcctggttcaacaagtattcct

SEQ ID NO: 17379 - DNA, 201 bp, Homo sapiens
taaattcactctgagtcagagctaatatgctctataaaatatttgaaagcatcaataaaggcaactgtgtctaccctccaagttaagccaagatccatagstacggaatttgcaaccatttgctatctgcatgataggttcaaaatcaacatcttgctctctgcataacaggttataaatcaacatcatgagagataaata

SEQ ID NO: 17380 - DNA, 201 bp, Homo sapiens
cttggcagctctgctctggggtgggatttgcaaagcagtttggacttcagctgcacctgtgttgacacacgatttcttcctgagctcctcctgagcacagyctctccccttatttatattcccattgctgagcacccagcaaagggcatggcacactcagcatacccaggactggcttcttgcatgatcctgtcacagcaa

SEQ ID NO: 17381 - DNA, 201 bp, Homo sapiens
tgccccgtttgcccgtgagatctctcaccatcactgtatgcaagcctaggaagaacagagctttctggctcagggacagatctccatgctgggaatcaggrccttgagttcctgggtcaaatccacaatgaactcattctgagatgtaggcaaatgtttaccttctgttgcttcggttttcccatctgtgcatttgatgtg

SEQ ID NO: 17382 - DNA, 201 bp, Homo sapiens
caggaaaggactatactttgagttatttggctttaagtattttttttcatacattatcttttcagtctcgtaatcactgtaccctgtgaagtgtgtagggkgtataatagcagtaattataagagtacaacaataacaataatgtatacctttaattgagtcccggtactctggggcaaagaagtttacatacattattta

SEQ ID NO: 17383 - DNA, 201 bp, Homo sapiens
tgaacccaggaggcggagattgcggtgagccgagatcatgccattgcactccagcctgggcaacaagagcaaaactccatctcaaaaaaaaaaaaaaaacmaaaacgacaatatggtgaggatgtgatcatttttgcattttggaatgatcattcttgattgccttgggaagaatagattttgggggaaggtacagagcag

SEQ ID NO: 17384 - DNA, 201 bp, Homo sapiens
cctgttcctgcctctccctaaagcctctagactctgggtctgcccagagctgcttggataaattagaaagtctaatttagcaatactgcagttacctatgrctgaattcctgattgttaaattccagaaactgatttctccagtacctctcctccctggaaagtaaagaaaggcctccacccacagcactatacccagaga

SEQ ID NO: 17385 - DNA, 201 bp, Homo sapiens
tagggagctcacagcccaacattggagaagagcatagtgggagcccctctggaggggacactgggatggcttctggtctgtgtgaactggttcctgatgtyggggcaacacctcccagtgtccgaaggcctgatccttgctcacacctgcccagccacctgagagtgagtatgctggctggagttcatgaatttttgtttg

SEQ ID NO: 17386 - DNA, 201 bp, Homo sapiens
gaaggggccttggggctttctcagcctgttagtagtttttgtgtacctgcccgaggtgcactttctctgtgtctgtccctgtaaagccaccttgcagtttycacaaccatcttggagtttatttagtgccagtgtcacagatgggccaccctgacctgggatgatacacatcgtttttattatttatttctcgccaagacc

SEQ ID NO: 17387 - DNA, 201 bp, Homo sapiens
aagatatcaccccaaagataaggggtgattactctgttgccaaaggatatttttccagtttccaatgaatgcccagtgagttgtttttgcatatacatttmtaatgtttttctgcttacaaaacttatgcttattgtgaaaatgcaaacagaaaagaaatactgaggggaatgaaattccccggttgtctccctttcagcc

SEQ ID NO: 17388 - DNA, 201 bp, Homo sapiens
gtctggttttatcattataacctctgtgacatcttgctggtcacatgagcctcctcaagcctatctgagggacaaggacaaagcctgccccagccaacccytacattgtcagtggcttgatgttcattcacatccttctgtcagacgctggtcccccggtttgccattgccagcatatggaattgaatgcaggtgtatctg

SEQ ID NO: 17389 - DNA, 201 bp, Homo sapiens
aagcagcttgctttctgctctcaggggacttggggacaaaggggagtgatcaaaaggggatttcccacagccccaaaatgctagccggattgcacttgtgrcctctccttcctgagtgaaactagattgttgacttgcctgccacctgtttccaacatggagtagagatgttgcacatacatgatgccatgtgtccagatt

SEQ ID NO: 17390 - DNA, 201 bp, Homo sapiens
tgaataagaaagagaaaatctgaaggaacaacaaaaagtgagtagccttcttcctgcagacctggacaagatgattggaatatattctgggttgttctatrgaaacttcgtcaataagtatggaatcataatctctctgatgcagaagtgaacttggaataatttaaaccagtgtctcccagtcacttcatcagagggtca

SEQ ID NO: 17391 - DNA, 201 bp, Homo sapiens
ggagtttctgaggctgcgttgcaggtgacagggacttctctggccttggccacccatggagcaagatgaagaggccagccacacctggtatccacattctyctgcaccctgacagcatctgccaagatgaactcagatgtttggaggccttttctacagacccagtggaaggggagagtcagcatttgtctggttttatca

SEQ ID NO: 17392 - DNA, 201 bp, Homo sapiens
tctctgcgaggatctgaggggtctcttccttgctgtgatcctcctctttagtaagcccctctcacctccccctctccctaccccacaagccgcttgggagkttctgaggctgcgttgcaggtgacagggacttctctggccttggccacccatggagcaagatgaagaggccagccacacctggtatccacattcttctgc

SEQ ID NO: 17393 - DNA, 201 bp, Homo sapiens
agtcaaggaaacatcatctgtccttgattcagccttggtgcctgcactctggggtacaaccacctcacagtaggatggtttttaaatggccccccagttgrgggagaagctaaggaaagagaaggctgcagatccaaagagtggcattgaagtttgctgggtgtctgtaggtggaccctttccagctgggcagatagttga

SEQ ID NO: 17394 - DNA, 201 bp, Homo sapiens
acagctctctgcgaggagctaggaggggacagagagctaacattttgggagctaggaggggacagagagccccagtcattgtaggatgataataaaaacamcagccaacatttatatagtactcaatatgttcttagcatttttgttttgtattagctcatttagtcctctagacaaccccatgaggtggatactattatt

SEQ ID NO: 17395 - DNA, 201 bp, Homo sapiens
tccacagaaatatttgtcccagctggccgaggagggcctcaaggagaccgagggggcagatagcccgaggccagaggacagcggaatcgtgccacgcttcsaaaggaaaaagctctgatgcttctgcttctgctgctactgctgctgctgcaaggttggaaaggagagcttgctgaagtggggccttcctgattctgggga

SEQ ID NO: 17396 - DNA, 201 bp, Homo sapiens
caggaaacattttgctaggagctaggaggggacagagacctaggggacagctctctgcgaggagctaggaggggacagagagctaacattttgggagctargaggggacagagagccccagtcattgtaggatgataataaaaacaacagccaacatttatatagtactcaatatgttcttagcatttttgttttgtatta

SEQ ID NO: 17397 - DNA, 201 bp, Homo sapiens
gagatggggagtttatctggcttgagcctggtgagaagcaacgcaggaaacattttgctaggagctaggaggggacagagacctaggggacagctctctgygaggagctaggaggggacagagagctaacattttgggagctaggaggggacagagagccccagtcattgtaggatgataataaaaacaacagccaacatt

SEQ ID NO: 17398 - DNA, 201 bp, Homo sapiens
tgaaggggaggaactgtgaccacgatgggggaggctggattgagtgtcaggtgggcagggggcagggcttgtaaattgactccaacctggggtctgggtayggggaagagatggcattaactgagcccctccataaaggggggtggatggggagaggagagacacaggcaggacattctgcagtctgtcccaggcctcttc

SEQ ID NO: 17399 - DNA, 201 bp, Homo sapiens
tcaggccgtggtgctgttttgcacaattgccataggccagcgctcatttaccctgccttccagcttccctccctctgccttttaagcatagatatgttgcytagagcttgggctgtttctggaaaacagagttgttttgggagttaaatgagcttatttaagtcaagcagttagaacagcacttgacactagataagggct

SEQ ID NO: 17400 - DNA, 201 bp, Homo sapiens
ttactctactatacttgtcttggaaactgagacccataatgtcatggcctgggtcaccatgtgcagagaactatcataggctatgcccaaactcaagtcayttaagcctctgatttccctccggagagcagcttctctgtgactgaggcagccacagcacctgtggcccagggctaggcctctcctcgggcaaggcaagaa

SEQ ID NO: 17401 - DNA, 201 bp, Homo sapiens
cagaaatgtcagaaatcaccttcattgttcttggaaggaggctgatagtaggagaacaggccagcggcaggccatggaatggctaagtgcttaccacaccrccgagtccatcccttacattcacaacaacctgtgaatgaagtgggtgtgagtctctttgtgactgttctgcaagtgaggaaactgaggcttggagaagct

SEQ ID NO: 17402 - DNA, 201 bp, Homo sapiens
cactgcccagggccacgttgctgtcagcgaggaactctggggtcacacacactttctctccctcttccacaagacactactgctgtcagctcggccctgcwgattcctgagtccccctgcatggcacacttagtgtactccataggggcactgtctcttggcctcttcacaactggagaagcaggtactgttattctcccc

SEQ ID NO: 17403 - DNA, 201 bp, Homo sapiens
tttactgggggctccctgggatgggccgtagcagcccaggctctctcctctaggtggcatgatggctacagtgacctcagcagctctttctcccccttccstttccttcaacaagagaaagccagagttttttcctagaagctcccacaaaagtcctgagacttttgagagagagtcgctctgactggactagcttagcac

SEQ ID NO: 17404 - DNA, 201 bp, Homo sapiens
aaccggaagaggttcagagagctccgctgcaccacgtgggcaggcagcatttatgggcagaaaactgaagcgagatacagaaacagcttgataggttacakctccgtatttgcctaatttgaacatggtctgatcgttggctgcctgtgattaactgaagcttggctgctgtgattggctgagactcagctatttgttaga

SEQ ID NO: 17405 - DNA, 201 bp, Homo sapiens
ggcggggatggggcgagaagctgctttgggcactcaagctggggccctgacttcagcaggcccagaccctaggattaacaagccatctactgtgcttgtayagattgttttacttaattaaaatgaaaaaatccagttacagttctcctgggctggagctgccacaacaaaaagaaatatccttggaacagggccatcttc

SEQ ID NO: 17406 - DNA, 201 bp, Homo sapiens
agcaagaacaggctgtatgatggacaaacctgggaggaagagttggccctgtgtggccacggttttgagttaagcttaattgcttttctaaagctcagctrcttaatactacacaagtcaaaatctatcatcagactcttgaccatccattctcctcttccttccgtattcttgcctacatagacattggtcactccccat

SEQ ID NO: 17407 - DNA, 201 bp, Homo sapiens
gcctagaggtgctgatctggctttgtgtcattcagaaaaacaaccccagacagaagtgaagagctgtttaatccagttcatctagtattgaaacacatgayttaagaagcagacataaatccttaaaattcaaggcattcctggactttctagcattcagcgctggcttagaaaaaaaaaagttggagctttttatgtttt

SEQ ID NO: 17408 - DNA, 201 bp, Homo sapiens
ggttcatgaatggtgtatgcctgtagtcgcagctacttgggaggctgaggcaagagaatcacttgaacccgggaggcaaaggttgcagtgagccgagatcrcaccactgcactccagcgcaggtgacagaccgggactctgtctcaaaacaaacaaacaaaaaaaccattttctccattgtcattgttgttgtcaagcgtt

SEQ ID NO: 17409 - DNA, 201 bp, Homo sapiens
gcctcaaatcttggaacatcatacgtgcccattccagcaaggtcattcactcagtcaagccccacatttcctttggcttctgtggggacaactgtgagtayggaaacattttctctagaaattaatgaaaatgattattagtttatttatttgtttgtttatttgagacagccaggctggaatgcaatggtgcaatcatat

SEQ ID NO: 17410 - DNA, 201 bp, Homo sapiens
gcgctgcacagtcaggtgcctggtaaacagggcatgtgttcctacctccattctcaggtgaggaaactgagccccaggagcagttcggctgactctccccrggtcacatgggttcttagcatctggcctggaccctctcagagctgggctctttccactccactgactgaccgtgtcttcaaaaggagaactgtgacctgc

SEQ ID NO: 17411 - DNA, 201 bp, Homo sapiens
gcacattatgtcctgtctttaataaccaggacttccctgatgtccccttctcacggatgtagaaagcaaacagatcccaagacactaaaatgcattgggcytgctgtctgggcccatcagtattctctgagatacttgagacgtaaagctttgctgattatcagcatgtccagaggtacaatcatgccaatcactaataat

SEQ ID NO: 17412 - DNA, 201 bp, Homo sapiens
tttggggacagtttttgtttgaacacctgttttcaactatttgggggtctgcacctacgagtggaatttctgggtcacatgctaattctttgtttaacttmttaaggagccggtttccctttctcgccctctccagtgctggcatccggtgtatacttggttcggcagagggaacattgtgtgcttctcccaacagcacag

SEQ ID NO: 17413 - DNA, 201 bp, Homo sapiens
ttttcattactccaaaaggaaacctcatactcattaagtaatcactccctattccccctaagccagcccctggcaaccaccaatctgccttctgtctctayggatttgcctgttctgtacttttctgtaaatggaatcatatgatatgtggcctttggtgactggctttttcttttttacttagcataacattttcaaggt

SEQ ID NO: 17414 - DNA, 201 bp, Homo sapiens; identical to SEQ ID NO: 2790

SEQ ID NO: 17415 - DNA, 201 bp, Homo sapiens
ccaggagttgtggtgtaaatctgcagtcccagctacttgggaggctgagggaggaggattgcttgaacctgggaggagatccaggctgcagtgagccattrttgtgccactgcactccagcctgggcagcagagtgagtgagaccctgtctcagaaaaaaaggaaaagaaacaaaaaaaaaaactcaggatttccgatctc

SEQ ID NO: 17416 - DNA, 201 bp, Homo sapiens
ccactctctagttccggaatattttcattactccaaaaggaaacctcatactcattaagtaatcactccctattccccctaagccagcccctggcaaccascaatctgccttctgtctctacggatttgcctgttctgtacttttctgtaaatggaatcatatgatatgtggcctttggtgactggctttttcttttttac

SEQ ID NO: 17417 - DNA, 201 bp, Homo sapiens
ttatctcattggtccccgaaggaagagtatggtatgaggttctgcatttgacaggtgaggaaactgaagtccagagacttacccaggatgacatagcaaaygcaggttagaactcaggatttctcagcctgggcaacatagggagaccctgtctctgcaaaaaaataaaataaaataaaactagccaggagttgtggtgta

SEQ ID NO: 17418 - DNA, 201 bp, Homo sapiens
gacctaggactgggagctgcatgtgaaagggaagctgcacgctcagaaatgcctggtcttctctgaaaagtaagtgctgttcaggaggacaggctcatgcrtaggctcaacacatattcactgagcatttactgtgtgtcacacgctgttttgagtcctggggcaatagcagagaccagaacaggcaaagttcctgccctc

SEQ ID NO: 17419 - DNA, 201 bp, Homo sapiens
atgaaataggtggggtcttcctgggggaaaggagaaggggtgggaggtgggaggtaggtggtgggggcaagggtccattgagaggggtagagggaatccartttgtgagtctgggctcctgttcaagatgggcatgagatgtatggatgaggagctgatggagcaaaggctggatggggaggcaggaacagtgggaggagc

SEQ ID NO: 17420 - DNA, 201 bp, Homo sapiens
aaattggctctattgagttataatggatataaagtaagtgcatatcaagtgcatagtttgatcagttttgacctataaatatacctgtgagaccatcaccrcaatcaagactgggaacaatgttcatcatatcccaaatttcctgtctcctatgtaacccctccctccccacagtgcaacccccaggtaaaggatctcctt

SEQ ID NO: 17421 - DNA, 201 bp, Homo sapiens
tgtctgctctttttcccattttaatagctaagcttttattgttaacattccccatgcaggcaccatccctagggatctgtatgtattatcacatttaaccmtctcaaaacacctatgaggtaggtgctgtttttatccttatttaacagataaaaaatctgaaatgcagagtcacacagctaataactggcaaaaaccaga

SEQ ID NO: 17422 - DNA, 201 bp, Homo sapiens
ttactgtgtgtcacacgctgttttgagtcctggggcaatagcagagaccagaacaggcaaagttcctgccctcaaggagcttgtgcttcacaggggccagrgagatgataaacaaaatgaacaagaaaattacagcatccctggtggtaaatgctaggcagaaaacaccaggcagaggccggaagtgcgtgtgtgcgtggg

SEQ ID NO: 17423 - DNA, 201 bp, Homo sapiens
ataagacaaactcatttaagcagttaaaggttgagcaatcacgtattctcaaggggctgtagtcaagtcctctcctagtcttcatagatttttttttttttcattttaatgacaatctgaaagatgggtagaaaaataggtacatgcagccaggcacagtggctcacaactgtaatcccattcctttgggaggccaaggca

SEQ ID NO: 17424 - DNA, 201 bp, Homo sapiens
aaaaacgagagaattcttcgagagtcccggtcacagcagctgcagagagaggtacagtgtgaagaaatgaaatccaacaagtgaaatatcagaaatgtcaraaatcaccttcattgttcttggaaggaggctgatagtaggagaacaggccagcggcaggccatggaatggctaagtgcttaccacaccgccgagtccatc

SEQ ID NO: 17425 - DNA, 201 bp, Homo sapiens
taacaggaggtgaggctgacttgtcaacagggcctacactatgcagggccttgtaggcaggttgaagatttttgcctttatcttaactaccaggggaagcraatgaagtatttaagcaagaaaatacagtgaggaggctggacacagtggctcacgcctgtaattccagcactttgggaggctgaggcaggcagatcgctt

SEQ ID NO: 17426 - DNA, 201 bp, Homo sapiens
cccccaaaagaggcctacatataggttaattatgtggaagaaaatatttggattggagtgactctgggtgattttttccttccttttatttacttttttttctgtaaagaacataattctaaaataaacaaacaaaaacgagagaattcttcgagagtcccggtcacagcagctgcagagagaggtacagtgtgaagaaat

SEQ ID NO: 17427 - DNA, 201 bp, Homo sapiens
tttaagcaagaaaatacagtgaggaggctggacacagtggctcacgcctgtaattccagcactttgggaggctgaggcaggcagatcgcttgaggtcaggagttcgagaccagcctggccaacatggtgaaaccctgtctctactaaaaatacaaaaaaaaaaaaaaattagccaggtgtggtggcaggcacctgtaatcc

SEQ ID NO: 17428 - DNA, 201 bp, Homo sapiens
aattagggtatgactaaaatggcccccccaaaagaggcctacatataggttaattatgtggaagaaaatatttggattggagtgactctgggtgatttttyccttccttttatttacttttttttctgtaaagaacataattctaaaataaacaaacaaaaacgagagaattcttcgagagtcccggtcacagcagctgca

SEQ ID NO: 17429 - DNA, 201 bp, Homo sapiens
aaagcgaggtggttcatgatgagacgtgaggcctgcctgagcccaggcttctgtttatttgtgtgtgttgatctgtgatgttgaataggagaagcgcttcragagagcccctgtctggaagcccacattttggtgaaagagaattttgtggtttccctctctgcactctgctcgctcagagccatgcccaggtcaatggca

SEQ ID NO: 17430 - DNA, 201 bp, Homo sapiens
aggctgcagtgagccattattgtgccactgcactccagcctgggcagcagagtgagtgagaccctgtctcagaaaaaaaggaaaagaaacaaaaaaaaaaactcaggatttccgatctcagatcactctgttctccaggttcttccagttcaggcagcaacacagtgtaggaaaggctacatttgtgcagaaactatgaac

SEQ ID NO: 17431 - DNA, 201 bp, Homo sapiens
ttttgtaacagagactttggcaaattcaagataatgtttaccattggcaatcacggggaagggtgaggtggggggagcacgtaaccaagggagatttatcrtattggaatgctctctgtcttaagcttggtgctgtgtactcttttttgaatgtcctaaatgttacataataaagtagaaatttgaacaccaatagtaatg

SEQ ID NO: 17432 - DNA, 201 bp, Homo sapiens
gacggacaccctttctgcagtaagattcggtgagagtctgctattgtcccctacctcaaattcagatttttttacttgtaattttttggttattccttatrctagttaggtttgagagctcagttgaagggaactgtgatattgtgagatttggtcttcctcaggtttcctagcataaaactccaaaagtctttggaatcg

SEQ ID NO: 17433 - DNA, 201 bp, Homo sapiens
ttgtatggctcttattgcatgatttagctgggcgtggtggttcatgcctgtaatccctgcactttgagaggccaaggcaggaggattgcttgagcccgggmgttcaagaccagccctggcaacatagcgagaccttgtcttttataaaacctaaaaaaattagcctggtgtggtggtgagcccctgtagtcccaactactt

SEQ ID NO: 17434 - DNA, 201 bp, Homo sapiens
tcagtggcaaaggggaatctctactaagagctccctcctgcccagaatgcaattttagaaaatagagctgacttctctgggaaaaacaaaaccaaccttgkcttactctggtcatggaaaccaacttggcacctcattatcgccttgttagcaagaacaggctgtatgatggacaaacctgggaggaagagttggccctgt

SEQ ID NO: 17435 - DNA, 201 bp, Homo sapiens
gatctggagagcaaacttccttttttttttaagggataaatttgctgcacagcatctcccaagacaaaaacataagaaagaaggaaaaagaaatactaacyttagaataaactgagatgaccctgggtattttagctctagaaaacagttgcaaaggccaccctgcaggagaagagagggctccttcatgcattcagtcag

SEQ ID NO: 17436 - DNA, 201 bp, Homo sapiens
gagtttactgatggaatcacctaggaatgaatcccttttcaaagagaagagttaagcagagtctcagggtagggagtgaaggcactttaagaaagttcccygggagattctgacacaaccactaacccagcaactccagcctacatcatctttgagtcccctcgcattagctctgaaaggtcggaattagataaagtagta

SEQ ID NO: 17437 - DNA, 201 bp, Homo sapiens
agttccagcttccaggggtgtcagatcatgcaccccaatttttggttcagaaatatgatcactactatatgcacctcaatttcaggttattaactattgcrggctaagaattttagggctttaaaaatagtatgatgtgttttttcttctttgtctagggtgtttggatgaaagcaggtgctcagctctgatgattcatgt

SEQ ID NO: 17438 - DNA, 201 bp, Homo sapiens
agacctgggtttctgttcttcctacttatgggtgactgtgtgccctcaggtaagtcataccccttcttgagccttagtttcctctctgtaatttagacagygattttttcaatggtggaagtgttgggaatgaagtggggagggagtttactgatggaatcacctaggaatgaatcccttttcaaagagaagagttaagca

SEQ ID NO: 17439 - DNA, 201 bp, Homo sapiens
ccttcctccatcttcaaagccagcagcaaagcatcttctctcctctctgacttctgtttccatccttatatcttctcgctgactctgatcctcctgcttcygtcttagaaggactcttgtgattacattgggcataccaaattaaattcagaaattcagataatcaagatctttaattcaatcatgtctgcaaagtcccct

SEQ ID NO: 17440 - DNA, 201 bp, Homo sapiens
agggtattgaacagggagacctgggtttctgttcttcctacttatgggtgactgtgtgccctcaggtaagtcataccccttcttgagccttagtttcctcwctgtaatttagacagcgattttttcaatggtggaagtgttgggaatgaagtggggagggagtttactgatggaatcacctaggaatgaatcccttttcaa

SEQ ID NO: 17441 - DNA, 201 bp, Homo sapiens
ttgggaattgtgttggttttctattgctgctgtaacaaattgccacaaatttaatggcttataataacatacatgtattatcttacagttctggaggccakaagtccaaaaccagcctcactggactacggtcaaggtgttagttccttctggaggctctaagggacaatctgtttcctggtcttttctagtttctaagag

SEQ ID NO: 17442 - DNA, 201 bp, Homo sapiens
tgggctccctccttccctcccatctccctccctcagagctgcccttcacactgataagtggctattttgaaatgaaaaaaaagttctaatgacaagtctasgctgcttccttctgacagggtctcctaggcacttagctcagtgtcctgggaggtgggaggaggaaagtgaagccacccaaccagctgggcttgcagtcgg

SEQ ID NO: 17443 - DNA, 201 bp, Homo sapiens
tttttttttgcagagatggggtctccatatgtggcccaggctggtcttcacctcctgggcttaagtgatcctcctgcctcagcttcccaaagtgctgggaytacaggtgtgagccacttcacctggccggcctatcgttattttaagtgtatgatgcaataacctagatttgcaaggggcggctgtaaactttcttgcaat

SEQ ID NO: 17444 - DNA, 201 bp, Homo sapiens
gttcttggactggccaggtctgagacacgttgcttgggcccctatttgtgcagaattggcccctgactacattcccagagggtctttggatgtttggtcasatggtctgtactctggggggatcaattcataccagcaaggtccagtcagcccctacacctaccaccgcctctctagtggaagccacttttgcatctaatt

SEQ ID NO: 17445 - DNA, 201 bp, Homo sapiens
cggtgtggcccccctccacttgccgcatatctgtagcatctgtgacaagaaggtgtttgatttgaaggtgagttgtccaagacaggctgggagccacagcyagaagcctgggcaggcctttccccatgacccaactcacgctgccaatgggcaaggaactgttgcattggggtaacagaattttgccatcagtattcttga

SEQ ID NO: 17446 - DNA, 201 bp, Homo sapiens
atcagccctctcacctcgattactttctatattttagcacaaaagaagaaatggcgcattcaccactcagccagttgcactggaagtgaatttaaattccygaactggttatcttggaagatattgtgcttattgcagatgtggccggtgcatgagtttaggcactaccatgctctgggctgtggttcttggctcctgctt

SEQ ID NO: 17447 - DNA, 201 bp, Homo sapiens
gtgtggcccccctccacttgccgcatatctgtagcatctgtgacaagaaggtgtttgatttgaaggtgagttgtccaagacaggctgggagccacagctaraagcctgggcaggcctttccccatgacccaactcacgctgccaatgggcaaggaactgttgcattggggtaacagaattttgccatcagtattcttgact

SEQ ID NO: 17448 - DNA, 201 bp, Homo sapiens
caccaaaataccataaataaggaatgttttaaagaaaaatggttcagaaggaaggaaaactataatgtagttcttgttagttaagttgacattaatcctckctttgctttaagtctctcctgtgttgacactagcagaatgtgtcataaagacatggaaagatcataaattctcaactctgctctaaagatctgaccttca

SEQ ID NO: 17449 - DNA, 201 bp, Homo sapiens
cactctgtcacccaggctgcagtgcagtggcatgatctcagctcactgcagcctcaaattcctgggctcaagtgatcctcccacctcagcctcctgagaarcttggacaacaggtacacaccaccaggcccggctaatttttttaattttttttttttttgcagagatggggtctccatatgtggcccaggctggtcttca

SEQ ID NO: 17450 - DNA, 201 bp, Homo sapiens
ttttttgtttgtttgttttttgttgttttctttttgtttgttttgttttgtttttgtctgtagaatgagtgagttaaactaaattgtctgtaaggcctcasctcactcttaaagtgtgatcactagctagagtttgaactttagccccaatatgactgttgtgttgtcattgtcacctttgtaacctgacattcaggaatg

SEQ ID NO: 17451 - DNA, 201 bp, Homo sapiens
ctccctgcctgaccagtgtctctgtgctcatcctttgccttcccatggactcagttctactttggtcacttttctttccttctgacctaggactgggagcygcatgtgaaagggaagctgcacgctcagaaatgcctggtcttctctgaaaagtaagtgctgttcaggaggacaggctcatgcgtaggctcaacacatatt

SEQ ID NO: 17452 - DNA, 201 bp, Homo sapiens
tactggggcttgaaattctttgcgtcactttaaatatggtggattaagcattaagggcctattccaaactttgagcatcaccctaaagatgagttggtgcygtgggacttgagtggttcacagtaattgtaccaggtagaggtaagaatgctcagattcttcctgatttgagtggtccttatggccaagtcttgtgccttc

SEQ ID NO: 17453 - DNA, 201 bp, Homo sapiens
catttccccagttatgaggcttcttcatctgggggaggccactcatcagcatgttgtccagccttttgtggctagtttttacttcaggtgtggggataggwgtgtgacttcggcccctctgatgccttggtctcgagccagctaggctaatgcaacccttctgctttgggatgagacaaatcccccaagctctctgcagcc

SEQ ID NO: 17454 - DNA, 201 bp, Homo sapiens
gggtagaggccctaattctcaaaccaaacacctgctttcaattgttcagtttcacagacatgcgcactactgtgagggtcctgatttgggggaagggaatrcaaggaaggaggaaagggagtgttagtttgggctatcactcaaggacagagggcaacagaaaggtgtgagggcactctgactgtgccctttctacctata

SEQ ID NO: 17455 - DNA, 201 bp, Homo sapiens
catggtccttcaccgaccctatgatttgcactttttatttctatgtgtgccacacacaatgcagtattaatggcaaccaggtaaatattgatttatttttwaaagcttttcttcagtgttttgtcaaccatttcaaagtgtctcccaaaaaaggatgctgaagagcaattgctcccttaagcaacagattcatatttaccc

SEQ ID NO: 17456 - DNA, 201 bp, Homo sapiens
tcactgcaacctccacctcctgggttcaagtgattctcctgcctcagcctccggagtagctgggattacaggcacctgccaccacgcctggctagtttttkgtctttttttagtagagataaggttccaccatgttggccttgaactgttggggtcttgaactcctgacctcaggtgatccacctgcctcagcctcccaaa

SEQ ID NO: 17457 - DNA, 201 bp, Homo sapiens
tgtgctagtttggcttcttttgctcaacatcattgagattcatctgtactgttgggtggatcagtagtctgtttcattcttcttcttttttttttttttttgagacaaagtttttctctcgttacccaggcgggagtacagtggcatgatcttggctcactgcaacctccacctcctgggttcaagtgattctcctgcctc

SEQ ID NO: 17458 - DNA, 201 bp, Homo sapiens
atgtgctagtttggcttcttttgctcaacatcattgagattcatctgtactgttgggtggatcagtagtctgtttcattcttcttcttttttttttttttttgagacaaagtttttctctcgttacccaggcgggagtacagtggcatgatcttggctcactgcaacctccacctcctgggttcaagtgattctcctgcct

SEQ ID NO: 17459 - DNA, 201 bp, Homo sapiens
ctttttttcccttctcctttaaaaaaatctcttactatttctttcctccaggtgtaccatttttatagtcagatctggagagcaaacttccttttttttttaagggataaatttgctgcacagcatctcccaagacaaaaacataagaaagaaggaaaaagaaatactaaccttagaataaactgagatgaccctgggtat

SEQ ID NO: 17460 - DNA, 201 bp, Homo sapiens
cctaggaatgaatcccttttcaaagagaagagttaagcagagtctcagggtagggagtgaaggcactttaagaaagttccctgggagattctgacacaaccactaacccagcaactccagcctacatcatctttgagtcccctcgcattagctctgaaaggtcggaattagataaagtagtagtagcagctgctcagaagg

SEQ ID NO: 17461 - DNA, 201 bp, Homo sapiens
cactgcagcctcaaattcctgggctcaagtgatcctcccacctcagcctcctgagaaacttggacaacaggtacacaccaccaggcccggctaatttttttaattttttttttttttgcagagatggggtctccatatgtggcccaggctggtcttcacctcctgggcttaagtgatcctcctgcctcagcttcccaaagt

SEQ ID NO: 17462 - DNA, 201 bp, Homo sapiens
gaaccactctgtgtggttctgtagagttgggagttaagagtgtacacagttacatgcacagtatatctaagacagagactgtgtgtctgtgtgtgggtggkgtgggatgggaggtgtgaagattctaaatcctgctccttggctccctcacagatatggcccagaaaggccgcggtctcgtagtccggtgagccggtcact

SEQ ID NO: 17463 - DNA, 201 bp, Homo sapiens
taatataggaaaaggtctgttaatatttggccctttggggcaagtctacaccctattaaaacagcctaaaagtaatgcgtgtgtgtgtgtgtgtgtgtgcrtgtgtgcgtgtgtgtgtgcatgtgtgtgcgtgtgtgtgtgtgtgtacgtgtggcttcgtttagaaccagctcttggttttcataagttgaatgtagatgt

SEQ ID NO: 17464 - DNA, 201 bp, Homo sapiens
aaataatataggaaaaggtctgttaatatttggccctttggggcaagtctacaccctattaaaacagcctaaaagtaatgcgtgtgtgtgtgtgtgtgtgygcgtgtgtgcgtgtgtgtgtgcatgtgtgtgcgtgtgtgtgtgtgtgtacgtgtggcttcgtttagaaccagctcttggttttcataagttgaatgtaga

SEQ ID NO: 17465 - DNA, 201 bp, Homo sapiens
gctcctcaccctttgttggaaaataatataggaaaaggtctgttaatatttggccctttggggcaagtctacaccctattaaaacagcctaaaagtaatgygtgtgtgtgtgtgtgtgtgtgcgtgtgtgcgtgtgtgtgtgcatgtgtgtgcgtgtgtgtgtgtgtgtacgtgtggcttcgtttagaaccagctcttggt

SEQ ID NO: 17466 - DNA, 201 bp, Homo sapiens
ataaggaaatggaggctcaggaaaatagaaatgtctgtggaaggccagaggtgtaagtcacaggctgcaactctgattactggctgtttctggaacaccawctgtctgccctggccctctgaatgcatggcttagagcgctctggtctcctgacttctttgagcatgaggactagtaattgatgtggcatatactaccagc

SEQ ID NO: 17467 - DNA, 201 bp, Homo sapiens
tctgtcctgtccttcccagagaggtgttcacatgatccaagcctgattaatcagagaacctcatcctcctcatcacagcaattgattcaggatgaggaacrtaatccaaatgggccaatcaaaatgttccctgtgattttgtcagtaccatcaaaaagacacactctaattctgaggttgctagctgtaagtcaatggttc

SEQ ID NO: 17468 - DNA, 201 bp, Homo sapiens
ggtggtatcatagctcactgtaacctcaaaacccagggctcaagtgatcgtcccacctgagcctcccaagtagctgagattacagttgtgcgccaccatgmctggccaatctaaaaaatttttttagagacagaatctctctatgttgcccaggctgttctcgaattcctggcctcaagtgatccttctgctgtggcctcc

SEQ ID NO: 17469 - DNA, 201 bp, Homo sapiens
tccataagaggtgaagatttttaaaacccttatgcttcagagcctagacaagacccaaccatgcgggaagacaggtgagaacttgttattcgccccacccscttctaccaatttcattcttttattgaccaatatttgtggagcacccggcattgggactatagttagtgacactgaaatgacccctgggctcgtggagct

SEQ ID NO: 17470 - DNA, 201 bp, Homo sapiens
agatgtcttccccatgatctgcctgtggaaattttacggaacttcctgtgcctaggatgcagaaaccacgtgtagtcttaatgtgtcaccctgggctactkctctgggtgacgcattaagacaacttataataattgtgcaagagctcgagacgcttcacaggtggtacttaaagtattcccaggcctctagtattccctg

SEQ ID NO: 17471 - DNA, 201 bp, Homo sapiens
accaaaacatacctgtgggccagatgccatctagaagccccagagtgtaacccctggtataaccaatccataagaggtgaagatttttaaaacccttatgyttcagagcctagacaagacccaaccatgcgggaagacaggtgagaacttgttattcgccccacccccttctaccaatttcattcttttattgaccaatat

SEQ ID NO: 17472 - DNA, 201 bp, Homo sapiens
cattgagctgagattgcaccactgcactccagcctgggcaagacagcgaggctccatctcaaaaaaagaaaaaagaaaaataggcatatgcacagaaccayatccacacattcccccatacccataccatagtctggacatctggatggtcaaatgacttgacccctccaccccccacacccacccatgtatgtttaggtt

SEQ ID NO: 17473 - DNA, 201 bp, Homo sapiens
cagtccctagaggagggcttggcacagagcaggtgtccagtgagtacctgttgaaggtatgaaggttggaacccagactctggaagcaaaggcctggcttstgagaaccaggtcagaccctgctttcttctgcctcacttttcttgtttgtaaaatggatgtgatcacaaggctgttgtagtactgtaaagaggtcatgct

SEQ ID NO: 17474 - DNA, 201 bp, Homo sapiens
ttagaaggcaaaactcctcccctagcaaacctcacctggcattctgcagcagaaactgtatgtgttctctgggggaaatcttgttgcaaaaaatatttatygatttgcatgaaaaggtgccaatagagctaagaaatatttttagctgtattgtgtttgaccctttgtggacttgtgaccctttgtggacttgtagaaatt

SEQ ID NO: 17475 - DNA, 201 bp, Homo sapiens
gaaaatgctatttatgaaaaaagaattttaatcttcttattaggagatatgttttatctaaaaactgtattcattattatactttgaacttcactaatacraatatcataggaatttgttttctcttctgctttttaagtacctatatcataacctcgattttgccacttgcctgggaatcccagatttgttttgagacag

SEQ ID NO: 17476 - DNA, 201 bp, Homo sapiens
atgcccagcgttccagtgaaaggacacccagtagtctttttttgcccattacaaagtctgccacgatttttcctaactggcatagcaggaggaagaacagsagatgagattagggaagagggtgagactcatggaagacactgtgtgcctcaccaaggacttgaactggatcccaaggacctggtgaaccagtggatattt

SEQ ID NO: 17477 - DNA, 201 bp, Homo sapiens
tgcccagggcacggctacctagaagtgctctgtgtgaaacctaccgggaggaaggatcaggtgagtgccatgagaccagcaggggaaaagccaagtccagkaatgtcaaccaggatagggctgctctgtcatattgattcaggcagttggtcagagagttaggcaaaagcagcaccagcacatgaaaaacaaggtggagag

SEQ ID NO: 17478 - DNA, 201 bp, Homo sapiens
agtcctgttcgtccagtagggagtggcctgaggtgtttgcacccaaagagcctcccaagggagattagatctttggttcattctgtcctccctcctgccaraagcatttaccagtcctggaactctgaggagaagtggtgaaggagaagccgtcaccacctgctaaattaaactgggtgcccagagctgtccacagtgttt

SEQ ID NO: 17479 - DNA, 201 bp, Homo sapiens
ggcactgtgcaagacactttatctcaatgaactcatttaatccccacaggttttgagtaccaacctttgagcttggtactattgttactgcaggtgaggaractgaggcacagagaacttacgttatttgtccaagaacacacggtcaggaaatggcagacccagaattataccaaggagatctggccccaaatcccatgg

SEQ ID NO: 17480 - DNA, 201 bp, Homo sapiens
atgaggatgaacgtttattgaatgaatgaacatttactggctatttactatgcgctaggcactgtgcaagacactttatctcaatgaactcatttaatccycacaggttttgagtaccaacctttgagcttggtactattgttactgcaggtgaggagactgaggcacagagaacttacgttatttgtccaagaacacacg

SEQ ID NO: 17481 - DNA, 201 bp, Homo sapiens
cagcaccagcacatgaaaaacaaggtggagagcggcatcccagggcaaagctgcctgctaaggccttcttcacattttctgcctagggtagctaatgagaygccttagcctctaagagctcaagactcctgagcacagcaagggtgcagggatggtcctctcaggaggctaagtacttctttgtaactttgtttcatttat

SEQ ID NO: 17482 - DNA, 201 bp, Homo sapiens
tgtgtcacacgctgttttgagtcctggggcaatagcagagaccagaacaggcaaagttcctgccctcaaggagcttgtgcttcacaggggccagggagatrataaacaaaatgaacaagaaaattacagcatccctggtggtaaatgctaggcagaaaacaccaggcagaggccggaagtgcgtgtgtgcgtgggcgtgtg

SEQ ID NO: 17483 - DNA, 201 bp, Homo sapiens
aggctaagtacttctttgtaactttgtttcatttataactttgtttcatttctttgtttcatttgtagcttcgtttcatttcttcagattagaaatttttytttccttatggctgcagcctttagaggagtccacagtaatcgccttttgtcctctcagaaaatctgtggataagacaacaggcacatcatctttctcaca

SEQ ID NO: 17484 - DNA, 201 bp, Homo sapiens
tccagagagaagaggaaaaagcgggggaggaagaaagagaacacactctcacactctttctggggaagcagtcagggatgttttgaggtgttttggtggaragtagagagagaatgtgaggcttctgggttaaatctccaaaaaaaggagagatttaacgacatgttgctatgtattgcatatctgatctcactttatgtt

SEQ ID NO: 17485 - DNA, 201 bp, Homo sapiens
ttttggaagctctgataagtttcctccaaacttattcccctcctcttgatttcaggagatgtcagggtttttctattctggacaatgaatttggtacagaktcactgtaattaaatataaaaacagaagcatcttcctccagctaaagcagcagttggcgcgggcttaggttgaatgctggcctctctgcaaagcacagct

SEQ ID NO: 17486 - DNA, 201 bp, Homo sapiens
tgaagtgggagaatcacttgtgcctgggaggttgaggctttcagtgagctgtgattgtaccattgcattccagcctgagtgacagagcaagaccccgtttyttaaaaaaaaaaaaaaaaaaaaaaaaaaaaaaattgcatgattctttgtaaattacatagaaaaaatcaaggaaaaaaagtcgattaaatttaataaaac

SEQ ID NO: 17487 - DNA, 201 bp, Homo sapiens
cacttgaacccagaaggcagaggttgcagtgagccaaggtcgcaccactgcactccagcctgggacacagtgtgagactccgtctcaaaaaaaaaaaaaaagaactacctgaaactgggtaatttataaagaaaagagctttaattggctcatggttccacaggctgcataggaaacatggctgtggaggcctcagaaaac

SEQ ID NO: 17488 - DNA, 201 bp, Homo sapiens
accaacatggtgaaacctaaactaaaaatacaaaaattagccaggtgtggtggcgggcacctgtaatcccagatgcttgggaagctgaggcaggagaatcrcttgaacccagaaggcagaggttgcagtgagccaaggtcgcaccactgcactccagcctgggacacagtgtgagactccgtctcaaaaaaaaaaaaaaag

SEQ ID NO: 17489 - DNA, 201 bp, Homo sapiens
gctttagtgagcttagaaaagttgcttaacctctgtgaacctcagtttacagatcaggaaaggactatactttgagttatttggctttaagtattttttttcatacattatcttttcagtctcgtaatcactgtaccctgtgaagtgtgtagggtgtataatagcagtaattataagagtacaacaataacaataatgtat

SEQ ID NO: 17490 - DNA, 201 bp, Homo sapiens
tccagagtcctgaatctgctttgcttgcatcattgcctctgaaattcctttactaacagttctccttcaggcagaacctggctttttttttttttttttttcctaataaaagtatattgcttctttcagacaagtaagcatcccaccccattctatatccaagcaaagttcctggtctcctggattcttccctgggggctg

SEQ ID NO: 17491 - DNA, 201 bp, Homo sapiens
ttccagagtcctgaatctgctttgcttgcatcattgcctctgaaattcctttactaacagttctccttcaggcagaacctggctttttttttttttttttttcctaataaaagtatattgcttctttcagacaagtaagcatcccaccccattctatatccaagcaaagttcctggtctcctggattcttccctgggggct

SEQ ID NO: 17492 - DNA, 201 bp, Homo sapiens
gccaacatttaggcagttattaacagcttctgtgatgaaatatttaacacgtgtctccaaaccagtatttttgagcaacaggcaaaatgataggtgattcycctaaacatcacttacagcactattattcctatttcacagatgaggaaactaatctcagagagggtaaacagtgtgcctgaggtcacacagcataagtaa

SEQ ID NO: 17493 - DNA, 201 bp, Homo sapiens
cttccagagtcctgaatctgctttgcttgcatcattgcctctgaaattcctttactaacagttctccttcaggcagaacctggctttttttttttttttttttcctaataaaagtatattgcttctttcagacaagtaagcatcccaccccattctatatccaagcaaagttcctggtctcctggattcttccctgggggc

SEQ ID NO: 17494 - DNA, 201 bp, Homo sapiens
gcttccagagtcctgaatctgctttgcttgcatcattgcctctgaaattcctttactaacagttctccttcaggcagaacctggctttttttttttttttttttcctaataaaagtatattgcttctttcagacaagtaagcatcccaccccattctatatccaagcaaagttcctggtctcctggattcttccctggggg

SEQ ID NO: 17495 - DNA, 201 bp, Homo sapiens
agaagtccttctaagcagcccttggctgaattggccactgtcagaactcagggatgcattcaaatagttccaaaccagggtttgcttttgttttagctgawctacgtttctttcttttctttccttcttttttgttttattgtgaagtataacagaacacacagaaaaatggctgattatatattgtatggtttaaaaagt

SEQ ID NO: 17496 - DNA, 201 bp, Homo sapiens
agaaaatatttggattggagtgactctgggtgattttttccttccttttatttacttttttttctgtaaagaacataattctaaaataaacaaacaaaaaygagagaattcttcgagagtcccggtcacagcagctgcagagagaggtacagtgtgaagaaatgaaatccaacaagtgaaatatcagaaatgtcagaaatc

SEQ ID NO: 17497 - DNA, 201 bp, Homo sapiens; identical to SEQ ID NO: 2789

SEQ ID NO: 17498 - DNA, 201 bp, Homo sapiens
ctgggaatgaaggtgagcaaggccctacaggtcagcagcttgaagcagaagtgggctacccacaggcacattatgtcctgtctttaataaccaggacttcyctgatgtccccttctcacggatgtagaaagcaaacagatcccaagacactaaaatgcattgggcctgctgtctgggcccatcagtattctctgagatact

SEQ ID NO: 17499 - DNA, 201 bp, Homo sapiens
gcctctggccctgacattggcctgacctgctcctgcccccatgcacctgagccctaccctcatagtcactctgccatgggtaatctgcaaaacctcagcckctccctgccaagaccatcctcctcccacgtcggtctttcctggatctgggctggaaggaataaccaggaggatatgaagttccagaagagcagaagaaaa

SEQ ID NO: 17500 - DNA, 201 bp, Homo sapiens
tggcattctgacaagtctccatatgtagatgggcactgtgtcaaccagcttccagagtcctgaatctgctttgcttgcatcattgcctctgaaattccttwactaacagttctccttcaggcagaacctggctttttttttttttttttttcctaataaaagtatattgcttctttcagacaagtaagcatcccaccccat

SEQ ID NO: 17501 - DNA, 201 bp, Homo sapiens
gagcaaggccctacaggtcagcagcttgaagcagaagtgggctacccacaggcacattatgtcctgtctttaataaccaggacttccctgatgtccccttmtcacggatgtagaaagcaaacagatcccaagacactaaaatgcattgggcctgctgtctgggcccatcagtattctctgagatacttgagacgtaaagct

SEQ ID NO: 17502 - DNA, 201 bp, Homo sapiens
tgatctctgttgtctatgtgaaaaaaacctgagaaatcaggtaatttgcttatagtcacccagccaagaagccgcagagatagtattctaacagagcttcwcaagcttcagtgtgcatacagatcacttggtgatgttgtgaaaactcactttgattcagcatatctagggtagtgctgttattgcgtatttctaacgagg

SEQ ID NO: 17503 - DNA, 201 bp, Homo sapiens
attctgaggttgctagctgtaagtcaatggttctcgaagtgtggtctgcagatccctgcatgaagtcaaaactatttttataaccacattgagattttatktgcctttctcactgtgttgacattcacactgatggggcaaaaacaatggtgggtaaaaccactagcacctttgctgttctgtgggaaaaagtgagaggct

SEQ ID NO: 17504 - DNA, 201 bp, Homo sapiens
atcgcctgattctgaatcactttcctctttttactctactatacttgtcttggaaactgagacccataatgtcatggcctgggtcaccatgtgcagagaastatcataggctatgcccaaactcaagtcatttaagcctctgatttccctccggagagcagcttctctgtgactgaggcagccacagcacctgtggcccag

SEQ ID NO: 17505 - DNA, 201 bp, Homo sapiens
cctgtgaagatgaatatctggtggtcagtgctgtagtggaaatagcaggcacaggcagaggtctggccctgcccctgttagcccatgacttcctaaggccygcttccttgggtgtaaaagaagataagagtattacttgctccgggtgtggtggctcatgcctgtaatcccagcactttgggaggccaaggtgggtggatc

SEQ ID NO: 17506 - DNA, 201 bp, Homo sapiens
agagtttaatttaattgggcagccctcagaaccggaagaggttcagagagctccgctgcaccacgtgggcaggcagcatttatgggcagaaaactgaagcsagatacagaaacagcttgataggttacagctccgtatttgcctaatttgaacatggtctgatcgttggctgcctgtgattaactgaagcttggctgctgt

SEQ ID NO: 17507 - DNA, 201 bp, Homo sapiens
gctcctgcattggagtgggaaattgtagatagtgacctaggaaggtgactttgtacctgcttgtaggtttagttttatttgcttcttgggtgtatttagaytgtcctttttgagctgtttgtgggtttttctccacagaattgggtactcataaaagaggtgtccatattgcctcaaagccaccagattctgatgagccat

SEQ ID NO: 17508 - DNA, 201 bp, Homo sapiens
acccgggaaggccgtggctgccatcatccaggacatccattcccagagggagagggacatgttccgggaagcagacaggtgaggccccaagccccaagtcyccaggcaggttctgggcagtgggaacagactcctgtttctcattcttaggggcatttgagtcatgctgtgccctgttcttgcccctaccccatccatctg

SEQ ID NO: 17509 - DNA, 201 bp, Homo sapiens
attttttcccttttggtggaccaggcaatgaatgacccaggtcagagctgcttccctcaggtgtttgcaaggccatctctgatctgatggtgatctctctsactttgctagaaacccgggaaggccgtggctgccatcatccaggacatccattcccagagggagagggacatgttccgggaagcagacaggtgaggcccc

SEQ ID NO: 17510 - DNA, 201 bp, Homo sapiens
catttgtatggctcttattgcatgatttagctgggcgtggtggttcatgcctgtaatccctgcactttgagaggccaaggcaggaggattgcttgagcccrggagttcaagaccagccctggcaacatagcgagaccttgtcttttataaaacctaaaaaaattagcctggtgtggtggtgagcccctgtagtcccaacta

SEQ ID NO: 17511 - DNA, 201 bp, Homo sapiens
tgaagataacagctccactcactgaacaaagacatttcttctgattgcaaattttatttcccaattcccccttttagcgcctcccacagtgggtgtggcatctgtgttgggaaaagttcacactctaaatacaagtgaaggcataatgaatttacgttccaggccaactcatcaacaagcatgtttgttagtatcatttct

SEQ ID NO: 17512 - DNA, 201 bp, Homo sapiens
tgggctttacagagggttgatctctacagctccagtttgacataagggaccatttgccaaagttgtggtgccttttcttgtggacatcctgcccagtgctragttcctgggccttttcttgaatgggggattggctgacttctaaaacctctgacttattcacaagcacagttgaaggagtcactgccttctctttgactt

SEQ ID NO: 17513 - DNA, 201 bp, Homo sapiens
ggaagaagacctgcttggtgggatccacatcaagtgcagtcagctccaagtgagcctcttcttctaccccaagtgacaaccgaccctggctgaaggaccastggtctctagccacacggtggggtgggaggagacatcctgggcagcagctttcttcttggccgacaccaacaggcttggcttctatccttgtttggcctt

SEQ ID NO: 17514 - DNA, 201 bp, Homo sapiens
gggacagacttggctgcatttaaacttctcccacctgtgttggagtctgagtgtttcgttgccttgtttgtttatttatttttgtttaggtttttttttttctcattttcttttcttttcctttttattgttatttatttatttatttatcgagacagggtctcgctgtgtcacccaggctggagtgcagtggcatgatca

SEQ ID NO: 17515 - DNA, 201 bp, Homo sapiens
cagtcaagccccacatttcctttggcttctgtggggacaactgtgagtacggaaacattttctctagaaattaatgaaaatgattattagtttatttattwgtttgtttatttgagacagccaggctggaatgcaatggtgcaatcatatctcactgcagccttgaactaactcctggtcccaagtgatcttcctgcctcg

SEQ ID NO: 17516 - DNA, 201 bp, Homo sapiens
ttctaggactgcatggggcttggaatctcacccttgtcttaaaagcagcaagatgtgttaactctgagcactgtagttggtcccttgtggggctgttgagyggaatcattgtcatcacagaatggatgtaaagataacaatgtctgacgtttgcttcaaaataatatagggggtggggaaggagggtggtgagtacagatg

SEQ ID NO: 17517 - DNA, 201 bp, Homo sapiens
gagaaattctgattgctctttctcctctaactttatcttttgctcaccaggtaaagtatagggagagaagggagagattttaaggtatttttcatttcctstcttgaatatttcttcatgcacatatcttatctccccatatacttcctgtggcaagggagttcctcagcttatttgaggcagaacctttcacatgataga

SEQ ID NO: 17518 - DNA, 201 bp, Homo sapiens
gctcagctacttaatactacacaagtcaaaatctatcatcagactcttgaccatccattctcctcttccttccgtattcttgcctacatagacattggtcrctccccattctgctgctgttgaatttgtgctgggtcacccagggacccccaaggcttgtttgcaaccagcccggctccccaaaggagaacagggctgtaa

SEQ ID NO: 17519 - DNA, 201 bp, Homo sapiens
atcatgatctctgttgtctatgtgaaaaaaacctgagaaatcaggtaatttgcttatagtcacccagccaagaagccgcagagatagtattctaacagagyttcacaagcttcagtgtgcatacagatcacttggtgatgttgtgaaaactcactttgattcagcatatctagggtagtgctgttattgcgtatttctaac

SEQ ID NO: 17520 - DNA, 201 bp, Homo sapiens
tcatctgactctagagccatgttcttagcttctgttctctgctgcctttcagatgtgcttgttcagtggtatgtgtatgccagtgttcctgtgggagagcrtcctagccagggggttgtagggtggtatgtatttgcattttaaattttcataattgctactaaattgcactccaaaaagatggtatcagttttccctgcg

SEQ ID NO: 17521 - DNA, 201 bp, Homo sapiens
ggttcatgcctgtaatccctgcactttgagaggccaaggcaggaggattgcttgagcccgggagttcaagaccagccctggcaacatagcgagaccttgtyttttataaaacctaaaaaaattagcctggtgtggtggtgagcccctgtagtcccaactactttggaggctgaagtgggagaatcacttgtgcctgggagg

SEQ ID NO: 17522 - DNA, 201 bp, Homo sapiens
catcctcagagctgggacagagacccacctagagctctggagcaagatgagggaggaacagctgctatcaggaggagggagagtggctaccgggaaggtakagggcaaacactgtatccatgtgtgtctctgggccaaaggggctgcatatgaggtcccaccagggtttgcagaggtggggagaaattctgattgctcttt

SEQ ID NO: 17523 - DNA, 201 bp, Homo sapiens
aatactttgaaaatactttgaagtatacaattcagtggcatttagcacattcacgacattgtgcaaatgttaccactctctagttccggaatattttcatyactccaaaaggaaacctcatactcattaagtaatcactccctattccccctaagccagcccctggcaaccaccaatctgccttctgtctctacggatttg

SEQ ID NO: 17524 - DNA, 201 bp, Homo sapiens
attcttccctgggggctggaattgaatttctacactaagttcccagtagagctttggtctccaaatgagatgttgtcataagtttctaattaggattaacrgcagtaattggcttcttaaattaaagtaccaaagcatagcaataccttcctgagggagatagtttggggtggtgcaaaaaacatgggttaaagaggtcag

SEQ ID NO: 17525 - DNA, 201 bp, Homo sapiens
agtcttaatgtgtcaccctgggctacttctctgggtgacgcattaagacaacttataataattgtgcaagagctcgagacgcttcacaggtggtacttaaagtattcccaggcctctagtattccctgggaaagcttgctgtcagggctgttactgactcaaatgcctttgaaggtaagctggagtcagcactccttttct

SEQ ID NO: 17526 - DNA, 201 bp, Homo sapiens
ttccagaagaagatgttcacaggggaacttttaaaggaggaagtcagaagggaaaggtgctgagagttccaggcataaacccttgaatacaaccttctctmcctatacagaccttcagtaacattttcttcttctgtcacccccttgatctcttgttctcttctctctccttcatatttacgtcttaagcctcatagaagt

SEQ ID NO: 17527 - DNA, 201 bp, Homo sapiens
aagctcagtaaccagccaaggtcaacagcaagtgaggggtggagctcgtggctcccatttctacctgatggctgccaggacacaggggcctgcctcccatsccatcctaaccctgcgtgtctatcccccatcctttcccaggggtggagttcgtggttcccaggactggcttttattgcaagctgtgtgggctgttctaca

SEQ ID NO: 17528 - DNA, 201 bp, Homo sapiens
atacaaggaattgcagctcaaggtaaagcattatcttgctcattcagtcattcaacaagcaccagatgagtttctcctccgtgttaggcactgacctaaaygctggtggaaaggagaggataggaaaagattcagaaattacacactgcctttgaggatctcgaggcaaaccattgcagcatggcaagaaaagtgctcttg

SEQ ID NO: 17529 - DNA, 201 bp, Homo sapiens
tgaggggtggagctcgtggctcccatttctacctgatggctgccaggacacaggggcctgcctcccatgccatcctaaccctgcgtgtctatcccccatcstttcccaggggtggagttcgtggttcccaggactggcttttattgcaagctgtgtgggctgttctacacgagcgaggagacagcaaagatgagccactgc

SEQ ID NO: 17530 - DNA, 201 bp, Homo sapiens
ttgtctttcatgcagggagacagctgggtgagagggcacagagaagaaagacagtaggcatcatgctgcagaagattcagggccagaacaaagggcagccrttgacagctgcacattttatgcaaatcttgaacggtttcatccagggaacaaaacccttgtgaaaatggtggaaaagggccctttcccttttagaaattc

SEQ ID NO: 17531 - DNA, 201 bp, Homo sapiens
aattcagcttgtaacattgatgtggtgagagtccctagattagtattattcccatttgacaagtgagagctagaggtgctaaaatgtttatcaagaaaaargcactgagaaagctgggtggcagaatgtgaaataaaaccctaaagaatcttgacttcttagtcgcccacgctaatgccatagactatgacagcatggaga

SEQ ID NO: 17532 - DNA, 201 bp, Homo sapiens
catcaggtcattaagctatctctctccatcaacctggagtgagactactcacttgtctctgttcctacttctcagaaattctattttgggtaaatgcacaraattcagcttgtaacattgatgtggtgagagtccctagattagtattattcccatttgacaagtgagagctagaggtgctaaaatgtttatcaagaaaaa

SEQ ID NO: 17533 - DNA, 201 bp, Homo sapiens
tggaagtttaaaatgtttcaatattcaaatctataatagttttcttcatggcttctgggtttcctgtcttgtgtaagcagtctccccatgctgatgttatstaattattttcctctgtttgcttataatacttttatggctccatatatttataattgcatctttagtatatcagaaatttacatttggaatagatgaaga

SEQ ID NO: 17534 - DNA, 201 bp, Homo sapiens
tgtgaattctttgtttatatttctttcctatttatctatttggatgtttgagttgttcttacttataggcactttttgtacattaagcataaacatctgtyggcagagagaaaagacactgtgttttgaagctcccaggggtgagtatcagggtctgaagcaggtactgaactgccagaggtctgtgtttgatattaggaa

SEQ ID NO: 17535 - DNA, 201 bp, Homo sapiens
tacagagagatgatacattgatgatatcatgtgtcctagattcatgcttcatatgaaggtaaattttacctttgatgttttgtgtgttcattaaaaaatayaacattatatcaagatactgaggtagcattcaatggtaaatgtcagtggtatgctgactgccaaatatttgccaactggatggggtgtgtgtgtgtgtgt

SEQ ID NO: 17536 - DNA, 201 bp, Homo sapiens
ataaaatacagttgctgaaatgggaactggcagcctcattcattttaaataagactaaaacataaaatcacattctttttcaaggtttcagattgcatttmatatttcttatgctaaatcccagatcacttgaaaaccccacagaagattaaactcatgttctttttcttatactcttacaatactggcaaaataaagttt

SEQ ID NO: 17537 - DNA, 201 bp, Homo sapiens
ctcaaggggctgctcccccactctgcaaaaccagacggtacctctctggtaatctgtgtgtgcagcaggatcaacctacaaagcatagctttataaaatayagttgctgaaatgggaactggcagcctcattcattttaaataagactaaaacataaaatcacattctttttcaaggtttcagattgcatttaatatttct

SEQ ID NO: 17538 - DNA, 201 bp, Homo sapiens
atgcatgtaagggtaattagaatcatagaagaagagatataaattaggctaaagggacatttgaagaaataatacctgcgaactttccaaacctaatgacrgtcatcagacaacagatctaagaatctcagagaacagaggcagaataaatcccaagaccactacatttagctatatcatgttcaaactactggaaataag

SEQ ID NO: 17539 - DNA, 201 bp, Homo sapiens
attacatggcaaaaaataactgtatactcaaactcaaagcacagcagaaaaactgtgagataatatttgcaatatatatcacagataaaaattcatgtccytaaatataaaaaactttttgaatgagtgaaatattatcaaaaatataatagcaaatgggcaaaagatataaatggatggttcacaagaagaatgtaaata

SEQ ID NO: 17540 - DNA, 201 bp, Homo sapiens
gacggggtttcaccttgttagccaggatggtctcgatctcctgacctcatgatccacccgcctcggcctcccaaagtgctgggattacaggcgtgagccamcgcgcccggccaaaagaaaagtgaaatttctaaacttatccaagaccttttaaattatatcctcaggagtggatcccaggaaagtgtctttctctccttt

SEQ ID NO: 17541 - DNA, 201 bp, Homo sapiens
aatggcaacaaaagccaaaattgacaaatgggatctaattaaactaaagagcttctgcacagcaaaagaaactaccatcagagtgaacaggcaacctacaraatgggagaaaattttcgcaacctactcatctgacaaagggctaatatccagaatctacaatgaactcaaacaaatttacaagaaaaaaacaaacaaccc

SEQ ID NO: 17542 - DNA, 201 bp, Homo sapiens
aagcggagcttgcagtgagccgagattgcgccactgcagtccgcagtccggcctgggcgacagagcgagactccgtctcaaaaaaaaaaaaaaaaaaaaaagaatctcactcaaaaccgctcaactacatggaaactgaacaacccgctcctgaatgactactggatacataacgaaatgaaggcagaaataaagatgttc

SEQ ID NO: 17543 - DNA, 201 bp, Homo sapiens
tgaacccgggaagcggagcttgcagtgagccgagattgcgccactgcagtccgcagtccggcctgggcgacagagcgagactccgtctcaaaaaaaaaaamaaaaaaaaaagaatctcactcaaaaccgctcaactacatggaaactgaacaacccgctcctgaatgactactggatacataacgaaatgaaggcagaaat

SEQ ID NO: 17544 - DNA, 201 bp, Homo sapiens
tggcgtgaacccgggaagcggagcttgcagtgagccgagattgcgccactgcagtccgcagtccggcctgggcgacagagcgagactccgtctcaaaaaamaaaaaaaaaaaaaaagaatctcactcaaaaccgctcaactacatggaaactgaacaacccgctcctgaatgactactggatacataacgaaatgaaggca

SEQ ID NO: 17545 - DNA, 201 bp, Homo sapiens
taatcccagcactttgggaggccgaggcgggtggatcatgaggtcaggagatcgagaccatcctggctaacaaggtgaaaccccgtctctactaaaaatayaaaaaattagccgggcgcggtggctggcgcctgtagtcccagctactcgggaggctgaggcaggagaatggcgtgaacccgggaagcggagcttgcagtg

SEQ ID NO: 17546 - DNA, 201 bp, Homo sapiens
cttatttcctcccctgttaatccagcaacagttctttaagttctgggaatttcactgtatcctcctagataattcccctcccccaccacttggtctaatgyggatcatctgagacatggtaggatcccgatgaagccatccaggcaggagatagatagagctccaagtgtgctttatttaagcagcataaacttggttatg

SEQ ID NO: 17547 - DNA, 201 bp, Homo sapiens
ttaaacccatgatagtaaaaattttaatccatacaataaattaataactcatgagtccatgtgcataacaataaataaataaataaataaataaataaataaagctcttctttacagcagacattaaagtaataaatgtaggactgatggaattagaaaatcgagtggcagtcattattgtaatccttgtctgaggcaaga

SEQ ID NO: 17548 - DNA, 201 bp, Homo sapiens
tttaaacccatgatagtaaaaattttaatccatacaataaattaataactcatgagtccatgtgcataacaataaataaataaataaataaataaataaataaagctcttctttacagcagacattaaagtaataaatgtaggactgatggaattagaaaatcgagtggcagtcattattgtaatccttgtctgaggcaag

SEQ ID NO: 17549 - DNA, 201 bp, Homo sapiens
atttaaacccatgatagtaaaaattttaatccatacaataaattaataactcatgagtccatgtgcataacaataaataaataaataaataaataaataaataaagctcttctttacagcagacattaaagtaataaatgtaggactgatggaattagaaaatcgagtggcagtcattattgtaatccttgtctgaggcaa

SEQ ID NO: 17550 - DNA, 201 bp, Homo sapiens
tatttaaacccatgatagtaaaaattttaatccatacaataaattaataactcatgagtccatgtgcataacaataaataaataaataaataaataaataaataaagctcttctttacagcagacattaaagtaataaatgtaggactgatggaattagaaaatcgagtggcagtcattattgtaatccttgtctgaggca

SEQ ID NO: 17551 - DNA, 201 bp, Homo sapiens
ggcaaggcagtttgctgaagctctggtgaatacaaataaatttacttagtaacccttgtctttaaatagcttccaaaccggtaaaatacagcaggaaaaaatgagtcgcaaaaggcagtataggggccaaatgaacagtcaagatgaaaagtgctacaggaactgagatgagagagagaaatgatatgggaaaacatttaa

SEQ ID NO: 17552 - DNA, 201 bp, Homo sapiens
attaatttccctatgtatttaattgggtgtcaatgtaaatttaaaaaatcatattcaatttttccttagctgtagatgtaactacttgctgataattcccrtatgtttgtcctcatcccgaactcctctctctgactctgggaaagtagttctctccagatatgctaataatatctcaaatttaacacattcttacatata

SEQ ID NO: 17553 - DNA, 201 bp, Homo sapiens
caggatgaccacattttgttgaatgtaaatttccaagagcaaaaaacatgggaatgaggccgatttcccatcttaagcacgcaggatttcaaatcaatttyttattaacttgataacattgctttttctagaaaggtcactattttttgtgttaagaatatgctcttggccaagcatagcggctcacacctgtaatcccag

SEQ ID NO: 17554 - DNA, 201 bp, Homo sapiens
tctttgttatttaaaagaaaacatcaaaccaacactacttaaagtttaattattctgactaggagggaagttcttatctcagctgtgatcttaattgagaytgatttgaaatctagctaagagttctccttgacaggagatatcacagaggcagacaagtttaacgttacccagcgaacttggtgagatgcagaatcccct

SEQ ID NO: 17555 - DNA, 201 bp, Homo sapiens
gtcagtgtcttgtaatttcagcagaaaaatctaactcactagcctcatacatatagtctgaaaagaaagatatgcaagtaaatagtcaattactatgtaakgttactcaagggtttattaaaacctatttacaaatggtccatatgtcttgcctataccaggtcctaggacattctagattccctacttgcttgccaacaa

SEQ ID NO: 17556 - DNA, 201 bp, Homo sapiens
attctaacaattactaaaataaacaaaccaaccaacccaagcaaccaaccaaacaaacaaaaataagacaaaactccattttgtgttttctaacatggttygattcaagttcttctacccttaagaaacccttgtccacctcatctcctttttattaggtaaaaaatttaaaccattttattacattgacaatataataat

SEQ ID NO: 17557 - DNA, 201 bp, Homo sapiens
cacatctatgtttcatgtgtgtccttggccacagtttctggagcttcataaatgaagtccctgctggggataccagctggttctagatgagcagtggaaayatctcaacatcctgcctcaacctgccctgtccccaaagcttcttatgtggtgaacaggaaaaaggctctgtgtgacatgacacttcaataatatacaaag

SEQ ID NO: 17558 - DNA, 201 bp, Homo sapiens
gggtaaatatccagaagtcttatttctagatcattgttggtagtgatttttgaaggaagcaaaaataaataaataataaatggggttttgattagttcctrtcctcagtaaaattattccactttggacaaatacatctagcagccaattgaaaaaataatactattctgtaatactttaaatagctatcatgatattgct

SEQ ID NO: 17559 - DNA, 201 bp, Homo sapiens
tttcatatgagaatctgaaaatgtagaagtaggtagggttgaaaaccttaagactcacatggtgcaactccctaactcttagatccattttagagacaagwcatggacatcctggtggactaagtggtttcctcctatctcctgctacaaaaggctccttatattaagatattacatttgtataatgcatagaattcaggc

SEQ ID NO: 17560 - DNA, 201 bp, Homo sapiens
gccaattctaaccatgggggttatgaataaacaaatttaaccactttttttttctgtttgaaaatgctccagttatatgaaaagatttattttcctacatmttttctcccacgtgtctaatgtatcctgataaagcccctgtcctggagtcccagtttcttgtttactagattttaccaaatgctatttcattgctagagt

SEQ ID NO: 17561 - DNA, 201 bp, Homo sapiens
ccagccgtgctttaggtaacagtctgtcaaccccttgataacaatcccaatttatcgctaagttgtaaacattgtctccaagcaaagattggcctataggrtctaagccctgaagcaattttatttttacaaattctaaataaaacttatgttactcagaaggtaattctgggtgggtcatgagaagaagaaaaggattaa

SEQ ID NO: 17562 - DNA, 201 bp, Homo sapiens
tgaattgtcattcctaatagtactgaacccaggaaccctgtgctcaataatcgcatgtgtggcctatcctcctgtgaattatgctcttcccagacacatgraagtacacctttcagaggctgatggttatcattctttcctaaagaattgattgtgcaactgacattcactgagggcttgattctcctcgcctcagagcta

SEQ ID NO: 17563 - DNA, 201 bp, Homo sapiens
tgtaggattttgtgtatatatatacatatatatctttaaatgtaaatctgttaagaaatacatatagatataaacctatgagtgtatatgtatccttgtakatatatttgtatatctatatggcttctaactctatccactgagagagcctagaagcgataataccctagtagcaatgagcatacctagtagccacatctt

SEQ ID NO: 17564 - DNA, 201 bp, Homo sapiens
cagaccagaaatcaatttctaaaaattactcctgtagatacatctccaaatataaaaaaatacatatgtgtgaggttattaattacagcattgattataaataaaaaatactggaaacaaactgggtgctcatacataggagggagattcagtaaactaaggtatatccacagaatggactcaatatatccagaatagaat

SEQ ID NO: 17565 - DNA, 201 bp, Homo sapiens
tcagctaatccctccttaatccctaactgtaaaggaagagtcttaacataagaatctgttaattctgtgacagttacaaattctagggtttttttttttttatttcatcttgatcacttctgttctataacatgcagccacagttttcttacaaagatcacaaaagattacagacagaaaatatcccattggccaaatcaa

SEQ ID NO: 17566 - DNA, 201 bp, Homo sapiens
tcagaccagaaatcaatttctaaaaattactcctgtagatacatctccaaatataaaaaaatacatatgtgtgaggttattaattacagcattgattataaataaaaaatactggaaacaaactgggtgctcatacataggagggagattcagtaaactaaggtatatccacagaatggactcaatatatccagaatagaa

SEQ ID NO: 17567 - DNA, 201 bp, Homo sapiens
atccttttgttaaaaacaatccaattatattcttttaattatttgtaaaagtacaattaaattattattgactatagtcaccctgttgtgctatcatatastaggtattattcattctttctaatgactttttatacccattaaccatccccatttcctttccaccctccctactactcttcccagcctctggtcaccttc

SEQ ID NO: 17568 - DNA, 201 bp, Homo sapiens
ctgctgcaagagcttctgaattgatctcttcagtccagatttaccccaatacaacaattctccactttcccaattagctggaagctttatgcacacaacaaaaaatagggttgtcattcactttttcccactgtaaatgaaatgttaatcttcaagaaccacatcaattatctgagctctctctttataggcccatcacat

SEQ ID NO: 17569 - DNA, 201 bp, Homo sapiens
cctgctgcaagagcttctgaattgatctcttcagtccagatttaccccaatacaacaattctccactttcccaattagctggaagctttatgcacacaacaaaaaatagggttgtcattcactttttcccactgtaaatgaaatgttaatcttcaagaaccacatcaattatctgagctctctctttataggcccatcaca

SEQ ID NO: 17570 - DNA, 201 bp, Homo sapiens
tgaaattgctatttgagatataaacaaaaaactcacccaggaccaatgaattcttggattcctggcagaagaaattgtaagacttctcagtagagacacaygaatgcatggatcagccataggaaaaaataactctacataagatgagatttaaaataatataaactaaaatttacaggatgtaactgatacaggaggggg

SEQ ID NO: 17571 - DNA, 201 bp, Homo sapiens
tagcctgctgcaagagcttctgaattgatctcttcagtccagatttaccccaatacaacaattctccactttcccaattagctggaagctttatgcacacaacaaaaaatagggttgtcattcactttttcccactgtaaatgaaatgttaatcttcaagaaccacatcaattatctgagctctctctttataggcccatc

SEQ ID NO: 17572 - DNA, 201 bp, Homo sapiens
ctagcctgctgcaagagcttctgaattgatctcttcagtccagatttaccccaatacaacaattctccactttcccaattagctggaagctttatgcacacaacaaaaaatagggttgtcattcactttttcccactgtaaatgaaatgttaatcttcaagaaccacatcaattatctgagctctctctttataggcccat

SEQ ID NO: 17573 - DNA, 201 bp, Homo sapiens
aggccattaccattttttcagtcaatgaagggttaatcccctcaaataaatgtggaaagaccagtgtgggtggccacttcctctggcaaaaaaaaaaaaaagactatgtccttctgttttcctattttcttccttagattatatcctactagaaagcacaactatatctgcctcactcacccctgaattccagtaggaatt

SEQ ID NO: 17574 - DNA, 201 bp, Homo sapiens
cctagcctgctgcaagagcttctgaattgatctcttcagtccagatttaccccaatacaacaattctccactttcccaattagctggaagctttatgcacacaacaaaaaatagggttgtcattcactttttcccactgtaaatgaaatgttaatcttcaagaaccacatcaattatctgagctctctctttataggccca

SEQ ID NO: 17575 - DNA, 201 bp, Homo sapiens
ctcagaggcatgaggaacccaaagtggccaggtggcagtcttaactttaagttcaatgaactcgttattgttcgtcctcgtggaaacatttccccccccccggaattaagacccttagagcataaagccttgagaacacagagtgtaaattgtgttattgagtcactaggggtaatagtgtgttgccacccccattatcac

SEQ ID NO: 17576 - DNA, 201 bp, Homo sapiens
taaataataaatggggttttgattagttcctatcctcagtaaaattattccactttggacaaatacatctagcagccaattgaaaaaataatactattctstaatactttaaatagctatcatgatattgcttttgtatccccatggaaaccttcaaagatctttcaaatacccgccaaaagaaatgaagtgtaaatttta

SEQ ID NO: 17577 - DNA, 201 bp, Homo sapiens
gcctagcctgctgcaagagcttctgaattgatctcttcagtccagatttaccccaatacaacaattctccactttcccaattagctggaagctttatgcacacaacaaaaaatagggttgtcattcactttttcccactgtaaatgaaatgttaatcttcaagaaccacatcaattatctgagctctctctttataggccc

SEQ ID NO: 17578 - DNA, 201 bp, Homo sapiens
aacttagcagaatagaatgtgtagaggaatggccaataaaagagatgcagagcagaaaacttcctggccttcctatattcttgaatgtagttaataatgtmcctgatcatgctgattcactggcaaggtttggagattcacattttaaaataccatatatatctagttgttgaactgattgcagcttctagtgcctgagag

SEQ ID NO: 17579 - DNA, 201 bp, Homo sapiens
ctctggtccagtcctctactccaccccaatcacctcctaattgatgcttactcatcctttatatccaagctcatttcagcccatttcttcagaaaaattcrtaacaacctccctgacaggatcaatcatttctatgatgtgctataaaagcacaaaaattaaatgctaacttgttagaatttttctttatttgtaactaca

SEQ ID NO: 17580 - DNA, 201 bp, Homo sapiens
cttctcttgcatcaagaggataggtaaaatgagaatttatctcatgcctttcttatgaaagcccatttgaagtaaaagttgtacatcaactctcagatcaraatggctacttctgcttctgagtaatttaaataacctgtcaaaattgagatttcccaagtccattttgtgttcagaatttgcaggtaagctcctcaatat

SEQ ID NO: 17581 - DNA, 201 bp, Homo sapiens
ataaatcaataagaagaagggtttcataagaaaactggagggtgcaccctcatacctatagtacattttggctggtaaaattatttgtttccaatccactygcagtagaccacggtatttcaagcagacctcagtcgcagaaaaatccaccctccacatcattcttcccaggaattggccttagtaggacaaatgctcttc

SEQ ID NO: 17582 - DNA, 201 bp, Homo sapiens
gaaaaactgtatggttctcagttcttaaatttctagttataaaagtttaacctatacctcacacccattaagatggctactacaaatagaaatgaacaaaygttaaagaggatgtggagaaagggaaaccttgtacactattggtgagaatgaaaaattatgcaggcactttaaaaaaatagtatgacaattctttaaaag

SEQ ID NO: 17583 - DNA, 201 bp, Homo sapiens
tgacgatacacacacaggcatacacactaagtaaaggctcctgcctttgttatttatgattctggaaatgtaatgcatgcctcactggccctgctgatgaygtctgcaagcatctttgtttgatttttttaaaagctggaagcaacaatgctggatgttgacttgttaatgaagaaagagatctaagacctgagaccttta

SEQ ID NO: 17584 - DNA, 201 bp, Homo sapiens
tacaaattctaaataaaacttatgttactcagaaggtaattctgggtgggtcatgagaagaagaaaaggattaaaacgtggaggagaagaggggagggaarggggagagagagaggaagagggagagacagagagagaaagtgaaaggaaaaactatctgcaaagctttggagttctttcaaagaagaaataagagaaaaa

SEQ ID NO: 17585 - DNA, 201 bp, Homo sapiens
gttcactgccctttacctcagctttgctaaggaagagaagcctggtattttttttttttttttacaaataatgatgtataagtatctgttggggtcaggtygagacagttacttcttatgcttcatgattccccaaggagattttatttatttgatccctgatccatacaaatgtgcatggaaacacacacagaatccaaa

SEQ ID NO: 17586 - DNA, 201 bp, Homo sapiens
cttcagcactttcctaaatcatttgtaattgagttgttgactatttagcctttaaataccagaccatagctccttaatggagccctttgttctccccagcrtcttacagtgggactgaagtattcaatttttagaggcggtggatctatttattacttgggttgtggtgatggtaacaggagtaaaatttacatatgtcta

SEQ ID NO: 17587 - DNA, 201 bp, Homo sapiens
tactttctttactgtctgccattttcacccagccagtgatggaagccattaacttgagaatcatactcaatttctctgctcatcgccctccacatctagtyagttatagagcagagctgatacaacctccagatagatctcaatcccgccctctccttctgaaaatcctctcccagctgcctccacatcacatcctcctaa

SEQ ID NO: 17588 - DNA, 201 bp, Homo sapiens
cctgaaggaatgcaactcagcttattaccctaaaagaaccatgtcttggtttgcaggctatcttccagtgccagtaaggagcatagcttctgagatgcacrgtgatattttcctatcatcatgggaaaatctgggtgaattagggggaaaacaaaacaacaaaaaggcttcccttccttaaaaaacagtattgccacctgc

SEQ ID NO: 17589 - DNA, 201 bp, Homo sapiens
aagcagaaaaaaatatatactttaatatatatatgatttattagaggaattgactcatgtgtttaccgaagctgagaagttccaggaactgccatccgcargctggagaacagaaaagctggtggtgtaatgaagccccaggaaccaggagctccaatgctcagggcaggaaaagatggatgtcccagctcaaacagagag

SEQ ID NO: 17590 - DNA, 201 bp, Homo sapiens
agtttgtatacagatatataaaaacatgaagtaactaaaatttaacaaatacaaagcaaaattctacttcaattttcttatcaggttgtgaatagacttgytgaattaacttctaatattcatcttctttctttggtaagttgatgaaatgatccctattttaaatagctgctgaaataaccaatgcttgtgaaagtgttt

SEQ ID NO: 17591 - DNA, 201 bp, Homo sapiens
ttatattgttccttgcctaataggagaaaacagcaagcaaatagataatttcaacactatgaatacagggaaggaaagatagaagagaatccttaatatayaaaagaagaaagagaaggaagttggaagggcttttcaaggagtcagcatcagtgaaatgaagatgatcctatagcaacacagaagtagaggatacatggg

SEQ ID NO: 17592 - DNA, 201 bp, Homo sapiens
gacctgccagagcaaaacatgccaagaaagtgtatgcctctttctttctttcttttttctttttttaatttgatttttaaaagaagactatgaatttcaamtaagccaagactacagaggaatttgcgagggattaaaaaaaatctccagcccaggacccaaaaactcttcagagtttgaacatttgtttggaggggggta

SEQ ID NO: 17593 - DNA, 201 bp, Homo sapiens
cagggctgcattaattaataggaggaacggcctttgacctgccagagcaaaacatgccaagaaagtgtatgcctctttctttctttcttttttctttttttaatttgatttttaaaagaagactatgaatttcaaataagccaagactacagaggaatttgcgagggattaaaaaaaatctccagcccaggacccaaaaac

SEQ ID NO: 17594 - DNA, 201 bp, Homo sapiens
ctcagctaatccctccttaatccctaactgtaaaggaagagtcttaacataagaatctgttaattctgtgacagttacaaattctagggtttttttttttttatttcatcttgatcacttctgttctataacatgcagccacagttttcttacaaagatcacaaaagattacagacagaaaatatcccattggccaaatca

SEQ ID NO: 17595 - DNA, 201 bp, Homo sapiens
ttggtgtgtagcttatgatttttatattgttccttgcctaataggagaaaacagcaagcaaatagataatttcaacactatgaatacagggaaggaaagayagaagagaatccttaatatataaaagaagaaagagaaggaagttggaagggcttttcaaggagtcagcatcagtgaaatgaagatgatcctatagcaaca

SEQ ID NO: 17596 - DNA, 201 bp, Homo sapiens
atgatttttatattgttccttgcctaataggagaaaacagcaagcaaatagataatttcaacactatgaatacagggaaggaaagatagaagagaatccttaatatataaaagaagaaagagaaggaagttggaagggcttttcaaggagtcagcatcagtgaaatgaagatgatcctatagcaacacagaagtagaggat

SEQ ID NO: 17597 - DNA, 201 bp, Homo sapiens
taagaaggtactttagtaatcttattcttctcatttgaaaaactgggattatgttccacagagaatgggtgtaaaattaaaataatatacgtgatgcaaaraagcaggtccattgctcacttgttcagagtagacattaatattcactctttttatgtttcctccagtaggattagtcaaacttcagaaatcttctcaaca

SEQ ID NO: 17598 - DNA, 201 bp, Homo sapiens
agatggaaatgttctggtgaattggtgtacgacaatgtgaatgtacttaacactactcaactgtacacataaaatgactaagatgttaaaaacaaacaacatttaaattgtatattacatatatatataaagattattctatgtgaattaaaccttaataaagctgttaaataaaagttcaaatcagttttccagttagtt

SEQ ID NO: 17599 - DNA, 201 bp, Homo sapiens
tcacaaatgcaagtttttaggatataaaagctatgatattccatacaatggaatactattcatcaataaaaattaacgaactagtatacaacagtgtggaragcaaaactataggaacaaaaaatagatcagtagttgtcaggggctggggatggagagagagattgactataaaggggtagcacaaattttaggggtgac

SEQ ID NO: 17600 - DNA, 201 bp, Homo sapiens
aagatggaaatgttctggtgaattggtgtacgacaatgtgaatgtacttaacactactcaactgtacacataaaatgactaagatgttaaaaacaaacaacatttaaattgtatattacatatatatataaagattattctatgtgaattaaaccttaataaagctgttaaataaaagttcaaatcagttttccagttagt

SEQ ID NO: 17601 - DNA, 201 bp, Homo sapiens
caagatggaaatgttctggtgaattggtgtacgacaatgtgaatgtacttaacactactcaactgtacacataaaatgactaagatgttaaaaacaaacaacatttaaattgtatattacatatatatataaagattattctatgtgaattaaaccttaataaagctgttaaataaaagttcaaatcagttttccagttag

SEQ ID NO: 17602 - DNA, 201 bp, Homo sapiens
actatttgcatacctatattcatagcagcattattcacaatagccaagaagtggaagcgacacaaatgttcatctacagatgaatagattaacaaaatgtwtatacaaacagtggaatattatttggccttaacaagaaagaaaatcttgccatatgctataacatggatgaaacttgaggacacgaggctaagcgaagtc

SEQ ID NO: 17603 - DNA, 201 bp, Homo sapiens
taaatgccttagggcttagaattgactgagaggctttgactttgtttatatgatttgagttagacttttgttcacttgaacaagaacttttctgcttacargtcaagtaaaaattgagtgggcttcctatctatttcacttcgagaaacaccaggattaactagccaacaccataggtctgcatgagtcagattattctga

SEQ ID NO: 17604 - DNA, 201 bp, Homo sapiens
atgctgttctcatgatagtgagtgggttctcacaagagctgatggttttaaaagtgtttggcagtctccgctttgctctctctctctcctgccaccttgtraagaaggtacttgcttctcctttgccctctgccatgattgtaagttccctgaggcttccccagccatatggaactgggagtcaattaaacctctttcctt

SEQ ID NO: 17605 - DNA, 201 bp, Homo sapiens
gaaaaagagtttcttaattaggtcctatttgtcaatttttggttttgttacaattgcttttggcatcttcatcatgaaatctttgctaggtcctatgtccrgaatggtatttgctaggttatctttcagaatttttatagatttgggtttcacatttaagtatttaattcatcttgagttgatttctgaatatggtgtaag

SEQ ID NO: 17606 - DNA, 201 bp, Homo sapiens
ccaaagtgctgggattacaggtgtgagccaatgcacccagcccttatttttttttttttaatttttagctcaagtactaccatctcttgaaaatactgccygactacctcagtcatcctctgcattttcttgccacagtagcatgggaaatttgtcagaccttttaaaataaactttttatttttgaataattttaaattt

SEQ ID NO: 17607 - DNA, 201 bp, Homo sapiens
ataaatccagagaggacagtaggaaagaatactcaggatattcaggatgtttcttatattgagaaatttgtaatgcaaaggaccattggagcgtgcaaggktgcaacgctgctgacatgtcagaccacggagtttgctgggttgtttcctattctttcttttcacagatctgtctccaccatgaaacattattatcattac

SEQ ID NO: 17608 - DNA, 201 bp, Homo sapiens
catcatcattatcccctagtcattgtcattattaacatcatcattgctaccagttcttattatttcatgatcacttacttcatgcgaggcactttgcatgygctatttatttaatcttcacacaaggaaatcctgggaagtaggtatcatcatcctcaatttatagacaaggaaagttaggctcagtaagaatatattact

SEQ ID NO: 17609 - DNA, 201 bp, Homo sapiens
catatacctgcttagtatagcttattatatatgcaaattgaatcacatgtaattatcacatgtaatcagctgtatttctatctctctatatataactatasttatagttatatatatttatatggttaactatattatatatacttatataaattgtatcacagatgatcacgtatcatacgtgtatgatgtgtggaacag

SEQ ID NO: 17610 - DNA, 201 bp, Homo sapiens
acttacttcatgcgaggcactttgcatgcgctatttatttaatcttcacacaaggaaatcctgggaagtaggtatcatcatcctcaatttatagacaaggmaagttaggctcagtaagaatatattacttataaatattataaaactagtaagttttataactggtaaaacaagaatttgaatctatacatggctgaattg

SEQ ID NO: 17611 - DNA, 201 bp, Homo sapiens
aggtggtctgtttttctaaaaaagaatgagatttgtcttaatgaagggtaattaacttcaggagagattacatagcttctgcttttacatcatcattatcwcaagcttgtaagttttaaatatttccatttcctttctgtcattggctgttctcaaacagtaaagaatgcagaatcaaatcttgtctatttcatattttgt

SEQ ID NO: 17612 - DNA, 201 bp, Homo sapiens
ttagtaatcttattcttctcatttgaaaaactgggattatgttccacagagaatgggtgtaaaattaaaataatatacgtgatgcaaaaaagcaggtccaytgctcacttgttcagagtagacattaatattcactctttttatgtttcctccagtaggattagtcaaacttcagaaatcttctcaacacagagtttcata

SEQ ID NO: 17613 - DNA, 201 bp, Homo sapiens
ggtttcataagaaaactggagggtgcaccctcatacctatagtacattttggctggtaaaattatttgtttccaatccactcgcagtagaccacggtattycaagcagacctcagtcgcagaaaaatccaccctccacatcattcttcccaggaattggccttagtaggacaaatgctcttcaaacctgcacagcattaat

SEQ ID NO: 17614 - DNA, 201 bp, Homo sapiens
aaagaaccatgtcttggtttgcaggctatcttccagtgccagtaaggagcatagcttctgagatgcacggtgatattttcctatcatcatgggaaaatctkggtgaattagggggaaaacaaaacaacaaaaaggcttcccttccttaaaaaacagtattgccacctgccaggaaattggaaaaataggtacacaaatctg

SEQ ID NO: 17615 - DNA, 201 bp, Homo sapiens
gaaagtggggaagaccgctggccaagatccctatatcttttcatttcatactactttctctgacctagaccaaagattattaaggttgaaagggacattgrggaatcatctaatctacctcccacccccaatccttttacagatgaagaaatcgagtagtaaggtgatttgcctaggacttcagttagatattaacagaga

SEQ ID NO: 17616 - DNA, 201 bp, Homo sapiens
aaagtcatggaaaatgaaactcaggttggtcttctcactggcttcttaaaggaatgagcacattgtgatcctgctctgtatcgtggagaaagacccaaggwaagttcccatttccagttaagctcagcctaacctctcttaatagctattcctagttctgccattcattaactcaacttatactttccataaacatgtgta

SEQ ID NO: 17617 - DNA, 201 bp, Homo sapiens
tccccatctacccctttatctattatttcctctttattctttagatctttgttcagtcattccttcccaggagaagctttctctgagtctcttacccaggycatatccccaatggcacactctcagaacacatgtaaaatactgaatacaactttaatttgacatctttatcctctgttagactgtagtcactatcaatgc

SEQ ID NO: 17618 - DNA, 201 bp, Homo sapiens
accttcttctacaatatcaccctcagctttagctggggattaatatgtttttatatctatcctcattgctgccaccctaggtaaagccatcatccacttcygttggcactagtctcatttccttctagctggtgtcctgtagctattcttgcaccctgtagctcattctcctcactggatttagagtaactgtttccaaac

SEQ ID NO: 17619 - DNA, 201 bp, Homo sapiens
tctcccattctgtaggttttctgtttactacgttgaaaaagagtttcttaattaggtcctatttgtcaatttttggttttgttacaattgcttttggcatmttcatcatgaaatctttgctaggtcctatgtccagaatggtatttgctaggttatctttcagaatttttatagatttgggtttcacatttaagtatttaa

SEQ ID NO: 17620 - DNA, 201 bp, Homo sapiens
atggcttttcagttctctacgaaatgcattgaactactcaatgtcttagtaaattcactttctgctcaaattaggcagagtcagtgtcttgtaatttcagyagaaaaatctaactcactagcctcatacatatagtctgaaaagaaagatatgcaagtaaatagtcaattactatgtaatgttactcaagggtttattaaa

SEQ ID NO: 17621 - DNA, 201 bp, Homo sapiens
tttgtctgttttttacaatgaggttgtttgtttgttgcttgtaactctttttaattccttgtagattctgacctttgttggatttttgtctgtttttttttaacgaggttgtttgttttttgcttgtaactctttttaagttccttatagatactagacatttgttggatgcatagtttgcaaatattttctcccattctg

SEQ ID NO: 17622 - DNA, 201 bp, Homo sapiens
gcggatcacgagattagaagatcgagaccatcctggctaacatggtgaaaccccgtctctactaaaaatacaaaaagttagccgggcgtggttgcgggtgyctgtagtcccagctactctggaggctgaggcgggagaatggcgtgaacccaggaggcggagcttgcagtgagccgagatcgtgccactgccctccagcct

SEQ ID NO: 17623 - DNA, 201 bp, Homo sapiens
agctcttgatattttgggcactgacttctatcagaggatattctttcctgtcaaacttgccttagcattgcttctcaatgctcttaaaaaatctttgatgyctactcaaggacaagggccctgttcctcctggatccaataggattcctattcttttactacagttgtgtgatctgaagttattatagtttcccagtgtcc

SEQ ID NO: 17624 - DNA, 201 bp, Homo sapiens
cacacgactgcgcggcctgctctttcttcagagtcagcagcttaactctttctctgggcacaagctggccaggctgtgtcctggccaacccccgccctccrttcatctgcaaagacagacagctctggctctctctctctctctttctctgggtgcgggcacacctgtacattgtcagcagagaaattataccttttacag

SEQ ID NO: 17625 - DNA, 201 bp, Homo sapiens
tgagtattttgtcatatgtttgttgggcacatgtatgtcttcttttgaaaagtgtctattcatgtcttttgtctgttttttacaatgaggttgtttgtttkttgcttgtaactctttttaattccttgtagattctgacctttgttggatttttgtctgtttttttttaacgaggttgtttgttttttgcttgtaactctt

SEQ ID NO: 17626 - DNA, 201 bp, Homo sapiens
ctcttaaaagccagttgatttgagcaaattatttcagctgtatttgtctcagctttctcataaggaaaacaagcatactaacagtgcctattccataggtrtaatacaaagactaaatgagttaaaacaaatggattgtctagaacaatacctcgcatatagttcacccaataagtaataagccacccatattattattga

SEQ ID NO: 17627 - DNA, 201 bp, Homo sapiens
tgaagaaatcgagtagtaaggtgatttgcctaggacttcagttagatattaacagagagtgtctccaagtccctctcctgtgccttgctattcattcatcraaaagtttgcttcaggtgggctgggctatgatgaactccatgtggttttagtgaatgattcctaaacctgagtgatcatcagacttagctgtaaatattt

SEQ ID NO: 17628 - DNA, 201 bp, Homo sapiens
catactaaaggtaatgtttgagttgggccttaaaaggtaaataggaagggtatggagagggtagagaaagtgggattaatttccctatgtatttaattggrtgtcaatgtaaatttaaaaaatcatattcaatttttccttagctgtagatgtaactacttgctgataattcccgtatgtttgtcctcatcccgaactcct

SEQ ID NO: 17629 - DNA, 201 bp, Homo sapiens
aaaatcaaaaccccgccactccaaagatacattctctagcttttttctccacagatttcctaaatttattccttttatctgaggacttattcatctcagayaggtcatcttataatttagtgattgcctgtttagggttgaagtaagagagcctggatttgaatctaagcagcactacctgaaatcgttatgatttgaatg

SEQ ID NO: 17630 - DNA, 201 bp, Homo sapiens
cttattcatctcagacaggtcatcttataatttagtgattgcctgtttagggttgaagtaagagagcctggatttgaatctaagcagcactacctgaaatygttatgatttgaatggcttcttaatatcttagtgacttgttctcctctgatataaaagtaggctagtagtagtaactaacttatggggttgcatgagtat

SEQ ID NO: 17631 - DNA, 201 bp, Homo sapiens
ttcaagaacctatctgtgactttgatgacatactgtatagttctctgattaggttagtcttttggtaagcatatgtatgcctccggactgagattttacgwgtatttctcattgtttttctctccccctaggtggagcagagtggctggagtgggcttgatttgtgtgtttcccttctcattggaaggctagacctgactg

SEQ ID NO: 17632 - DNA, 201 bp, Homo sapiens
tggtgtctgtactttttcactaccttcttctacaatatcaccctcagctttagctggggattaatatgtttttatatctatcctcattgctgccaccctargtaaagccatcatccacttccgttggcactagtctcatttccttctagctggtgtcctgtagctattcttgcaccctgtagctcattctcctcactggat

SEQ ID NO: 17633 - DNA, 201 bp, Homo sapiens
ttactcatctactcgttcagtaaataaccccaagaacgctgtgccagacacactgtttgtaattcagggatgaataaggcagatagagttgtgctctcaartagtacataatcagaggaagaaaatagaaaaaatggacatagagaaaattgcttaccttgacagcaagcactggcttctctcttgatgagagactgattt

SEQ ID NO: 17634 - DNA, 201 bp, Homo sapiens
cgtaggtggatgttttgcagatttaatcaccaactttgcatttactcatctactcgttcagtaaataaccccaagaacgctgtgccagacacactgtttgkaattcagggatgaataaggcagatagagttgtgctctcaagtagtacataatcagaggaagaaaatagaaaaaatggacatagagaaaattgcttacctt

SEQ ID NO: 17635 - DNA, 201 bp, Homo sapiens
tttcagaccagaaatcaatttctaaaaattactcctgtagatacatctccaaatataaaaaaatacatatgtgtgaggttattaattacagcattgattataaataaaaaatactggaaacaaactgggtgctcatacataggagggagattcagtaaactaaggtatatccacagaatggactcaatatatccagaatag

SEQ ID NO: 17636 - DNA, 201 bp, Homo sapiens
acttaagagtctttgtacatggatgcttttcctgtttttcctcttttttcacttcattgcctttgcctcacctttccccgccttcacaattgcacctaggktatacatactatgtagagacatagcaggaaatcaggaaaccccgaagtgaacataaactcagccaagaaaatcactagggactgacagcagtgacaaggc

SEQ ID NO: 17637 - DNA, 201 bp, Homo sapiens
tcagcctcccaagtagctgggattacaagtgtgcaccaccatgcccggtaatttttttgtatttttagtagagatgaggtttcaccatgttggtcaggctrgtcttgaactcctgacctcaggtgatccactcacctcggtctcccaaagtgctgggattacaggcgtgagccaccatgcccagcctaatattctctactc

SEQ ID NO: 17638 - DNA, 201 bp, Homo sapiens
ttaggttcttttactggaaaacagggaaacataccatttactttaaaatgcctggttaggattaatgacaatatataaaaataagttagcccaatgcctgrctcataaaaatgcattgataaatgagaaatatacctaaaatgaattatgtgaatataattattttaattatttctatgcatattataattcttgaaactc

SEQ ID NO: 17639 - DNA, 201 bp, Homo sapiens
aaccgaagactttaaaattgaattttaccaatgtatacccataccagcagtgagtgttccagataccttcctccttatcactacttaatattgtctgtctytatcattttagtgattttggtgggtatgtgtagaataatttcacagtgcttttaatttacacatcacagataacttagaaatgaccatattttttatgtg

SEQ ID NO: 17640 - DNA, 201 bp, Homo sapiens
ctcttaatagtgttgcttaatgaataaaagttcttaattttaatgaaatgtatgattaatgttttattttgtggttagtactctttgatatatatattcakgtaatctttgtcttccccaacataatattcctcaattttctaaagaagatatacttttaaaatatttaatttatgatcattttcaaattgattttttaat

SEQ ID NO: 17641 - DNA, 201 bp, Homo sapiens
gtaggtactgtgcctctttcttgattgagggaaaagcccgatggaacaacatatttttcaccttgaaagggatgtcatgacattcctcacaccactggacygttagaggttttgctgaggtagaaggcccctggatttcaattgaatttattttctaccctctgacatgcaactatcttaccaataagtctagagtagttg

SEQ ID NO: 17642 - DNA, 201 bp, Homo sapiens
aacctccagtaggttaaaccaaggtgattatagagggcatacatttctttgtccataactcagcaggaaatcatttaatatttcaccactcttaatgatgkctgatcatattaagtactcattatatttaatatcaatataaatctgaaattatctttcattacttaatctatattttttgttgataagtcttgatgggga

SEQ ID NO: 17643 - DNA, 201 bp, Homo sapiens
actcagcaggaaatcatttaatatttcaccactcttaatgatggctgatcatattaagtactcattatatttaatatcaatataaatctgaaattatcttycattacttaatctatattttttgttgataagtcttgatggggagtataattttattattgttatcaaagaaacaacttattttctctatttatttcacca

SEQ ID NO: 17644 - DNA, 201 bp, Homo sapiens
tcgaaataagcagaatggtcaaggcatttgaagtagaataaatggcataagtaaaatttcaaggacaggaacaaaaaatacctgggcacacatattgtttratttggatgagaaagaattataaagtagacagtaagaagaggagattgggggtaaggagaaagagttaaagagtttcttaaggtcccagccttttcacca

SEQ ID NO: 17645 - DNA, 201 bp, Homo sapiens
gggcacacatattgtttaatttggatgagaaagaattataaagtagacagtaagaagaggagattgggggtaaggagaaagagttaaagagtttcttaagrtcccagccttttcaccattatagaaagactcactttaaggttcatctgtaggttcattcatggcatttagcattctcagatgagttcaattcaacacaac

SEQ ID NO: 17646 - DNA, 201 bp, Homo sapiens
aagtagacagtaagaagaggagattgggggtaaggagaaagagttaaagagtttcttaaggtcccagccttttcaccattatagaaagactcactttaagrttcatctgtaggttcattcatggcatttagcattctcagatgagttcaattcaacacaacacagtgaaattcaatacaaattgattgaatgcaagatttt

SEQ ID NO: 17647 - DNA, 201 bp, Homo sapiens
gattgggggtaaggagaaagagttaaagagtttcttaaggtcccagccttttcaccattatagaaagactcactttaaggttcatctgtaggttcattcayggcatttagcattctcagatgagttcaattcaacacaacacagtgaaattcaatacaaattgattgaatgcaagattttatacattaaggaattaactta

SEQ ID NO: 17648 - DNA, 201 bp, Homo sapiens
ggaaaaaataactctacataagatgagatttaaaataatataaactaaaatttacaggatgtaactgatacaggagggggcagggaagtgctggtaagggmagggcgtggtccttggtttggggtccaccccggggcctgtgcccacggacctaggtgaggacaagcatttatgttttcctgccgaaatgttgcgtttccc

SEQ ID NO: 17649 - DNA, 201 bp, Homo sapiens
taacatcttccaataatttgacttcagtattccctgctggttccttctcacatacacactgaagaatgctttctcagcctgatttccatgtctgagtcacrtgcagtccattttaatgtcaaccccatttgtgtccccagcatcagctcctgagctactgcacttctccagtgcttaggagtttagctcattaggtgctaa

SEQ ID NO: 17650 - DNA, 201 bp, Homo sapiens
tctacaaagaagaacttaaacaaatcagcaagaaaaatacaaataatcctattaaaagggggcaaaatacataagtagacatatctcaaaagaagatatgyaaatagccagcaaacgtatttaaaaaatgttcaacatcactaatcatcagagaattgcaaattaaaaccacagtgagataccacattaccccagacagaa

SEQ ID NO: 17651 - DNA, 201 bp, Homo sapiens
atatgcaaatagccagcaaacgtatttaaaaaatgttcaacatcactaatcatcagagaattgcaaattaaaaccacagtgagataccacattaccccagmcagaatggccattattaaaaagtcacaaaacaatagatagtggtgcaaaagtggtgaaaagggaacacttatacactgctggtgggaatgtaagttagtg

SEQ ID NO: 17652 - DNA, 201 bp, Homo sapiens
aattggttagttacattgcttgggtgagaacaatggaaagaatggaaggaatggggatagggtggagaatgaagcttctccaagcataccatgttgaaccrtctgacttttagacccctgctaatgtttcaaataattaaatgaagggaaataaataataaataaaacaatatgtggggaagtctaaaacaaaatacaaac

SEQ ID NO: 17653 - DNA, 201 bp, Homo sapiens
gtaaccacactggaggaagagaaaaaaaagaacaaaatcaggtaattttcaacagcatttagattacacacttcaggccaaagacaaaattaactttggaratatgttggactctggttagtaggtttctttttcacagatagatgggttaacagttctaaaactactttctgtgtattctagatctaagcaaataagtaa

SEQ ID NO: 17654 - DNA, 201 bp, Homo sapiens
atctttacaagttattaattaaaaaggggaagcataagaacctgtaccttggagaaaccaagtgatcatagtgaatatcaccagaaaggtggtaagcccayaccacgttcctccgaacgtgattcaccgagaaggacagaaaaatcccttagtagaattccaggcaataatgatctgaacctaatcatttagaagtatcaa

SEQ ID NO: 17655 - DNA, 201 bp, Homo sapiens
gcaataatgatctgaacctaatcatttagaagtatcaagcagggagttgtggctcgtgcctgtaatcccagcactttgggaggctgaggcgggcggatcawttgaggtcagcagttcaaaaccaacctggccaacatggtgaaaccctgtctctactaaaaatacaaaattagccaggcatggtggtgagtgcctgtaatc

SEQ ID NO: 17656 - DNA, 201 bp, Homo sapiens
caggcatggtggtgagtgcctgtaatcccagctactcaggaggctgaggcaggagagttgcttgagcctgggaggaggaggttgcagttagcagagatcgygccattgcactacagcctgtgtgacagagcaagactctgtctcagaaaaaagaaaagaaaagaaaagaaaagaaaagaaaagaaaagaaatatcagacag

SEQ ID NO: 17657 - DNA, 201 bp, Homo sapiens
tgtgtgtgtagatatcgatcgaggcatagatagacacatggaaaagagagaggaagaaaacagaagggcctgtagagagaggaagtgagaatgagagaacsttttcatgtgagtacacacaggaaacaaaaagcacaagaggaaatgttaacatttggggaatctgggtgaagagtatgtgaagatgtcttgttcaattcc

SEQ ID NO: 17658 - DNA, 201 bp, Homo sapiens
gttcaatcagcatatcattcatgctacatcttgtaggaaaaaaggatgatcaagaaccctgcaaaagaaattctgacatagacctggagaatttatagatycctgaggtaggacagtaaaggtgtattgtgggtcttgccagctgaatgcagactgcttgtagtgtaccttatggacagggtaggaaaatggaattttcca

SEQ ID NO: 17659 - DNA, 201 bp, Homo sapiens
taccactttgacacttagattgagaatatctgtatatgcctttctgtgtactcagaagtaactattatagtgatcttggcattttcattaccttctattgyttccttacagatgtctaaggaaataaattattgttttggcatatttttaaaatgatatgataatgaatgttatacattcattaaattgcatttttctgta

SEQ ID NO: 17660 - DNA, 201 bp, Homo sapiens
gtggagagtggggaaggggatgaaggaaaaaaaactatctaaagggtacattgtacattactcaggtgatggtacactgaaatcctagacttcatcactayacggtttatccacataaccaaaaatcacttgtagctctaaagctaatgaaatagaaaagttaaaataaaaaaaacacagaaaaaatactaacaatcatgc

SEQ ID NO: 17661 - DNA, 201 bp, Homo sapiens
tgagagaacgttttcatgtgagtacacacaggaaacaaaaagcacaagaggaaatgttaacatttggggaatctgggtgaagagtatgtgaagatgtcttkttcaattcctacaacttttcataagtctgaaatcatgtccaaataaagtttaaaagaaaataaaacttataattctatgcattagtaaataatcttctgg

SEQ ID NO: 17662 - DNA, 201 bp, Homo sapiens
aacaatgttattttccctgctaattctttgatatatttacacacatgcacacacacacatatatatcctctccttatacaggggtcagactgcggtataargctggtggtcttagagagaagggcaggtataatgtcggagacgaatgcctgatatcggaggagacatcagtagatagagtctcctgtgatcaaagattac

SEQ ID NO: 17663 - DNA, 201 bp, Homo sapiens
gacgaagaagacggcagaagacgggtgatttctgcatttccatctgaggtaccgggttcatctcactagggagtgccagacagtgggcgcaggtcagtggrtgcgtgcaccatgcgcgagccaaagcagggcgaggcattgcctcacttgggaggtgcaaggggtcagggagttccctttccaagtcaaagaaaggggtga

SEQ ID NO: 17664 - DNA, 201 bp, Homo sapiens
acaatcaattatccagttacctaattgtgataccaaggaagtatttaagattcctattcccggctggcttaacgcacattgttcaacaagtcctacatctytaccttcaaatggctgttaattcttgcttcatctctgcattcaaccgccactgcattattccaggatctctttattttcaacctgaattatacaactttt

SEQ ID NO: 17665 - DNA, 201 bp, Homo sapiens
ctcacatcatacacatctcatcatacacttctatttgcctcaatgttcttccctctagtgtcataggggagggaggacccatggtatttaagagcaagtayattagagttagatactctgattctgactctaagaatgttgagttcccacttaatgatgctgagctacccttttcttattagtataataaaatggaaatag

SEQ ID NO: 17666 - DNA, 201 bp, Homo sapiens
tgacaacaatagcacaaatgatgccaagataaattagaagaaatacagttatatatctacagccataccaccctgaatgcagctgatcttgtctggtctcrgaagctaagcaaggttgggcctgcttggtacttgggtgggagaaaatataatgttgtatgatccttaaacaacacatgaagtcgtatacttgaaaattga

SEQ ID NO: 17667 - DNA, 201 bp, Homo sapiens
gcaaaatatttgaaagatctggatgctgaaaaaaacaaagctttgagaaaagaaagcaagatgaccttaataaatagtgaactatataatgttctaatgayaactaaatggtcagaattcaactctttgtcattgtgggactgaggtctctgttttcttgctgtcaagccaggattttctcttaactccttacagccacct

SEQ ID NO: 17668 - DNA, 201 bp, Homo sapiens
attctttttctttcatatttttgggtgttatttattccttacttccagactacatggcaggattttcagatcatactttactaaaaagtctagtgttaaaraaaaccccacaatatttcttaaatttagagacattattttatattacataatactgacaacataatttatacttttctttcctcttttatatgcattgtt

SEQ ID NO: 17669 - DNA, 201 bp, Homo sapiens
caatttcttaataactcctaccacaccacaagaatatgtcaacatagcgcaagtcatggatacagagagaacggcatttcaaaggccaattaacttatttktcattaatcatcttattacagaagaacacaaaacacctgagtaagtggtaatgtacagcccaagttcccttttgttatttctggaaaggtcctcacctct

SEQ ID NO: 17670 - DNA, 201 bp, Homo sapiens
cgttcttccttgagagagaatagccttgctttcactcaaggggttctgggtctgtaaatgccttagggcttagaattgactgagaggctttgactttgttyatatgatttgagttagacttttgttcacttgaacaagaacttttctgcttacaggtcaagtaaaaattgagtgggcttcctatctatttcacttcgagaa

SEQ ID NO: 17671 - DNA, 201 bp, Homo sapiens
gaggtagcattcaatggtaaatgtcagtggtatgctgactgccaaatatttgccaactggatggggtgtgtgtgtgtgtgtgtgtgtgtgtgtgtgtgtgkcaagagggagatgagggtaaagctctgatttacagtgttttctaatctccataaacattctcctatgccaactttgagctaccagcttgaggtcactgaa

SEQ ID NO: 17672 - DNA, 201 bp, Homo sapiens
cgcccggccaaaagaaaagtgaaatttctaaacttatccaagaccttttaaattatatcctcaggagtggatcccaggaaagtgtctttctctcctttttyccttcaaaccctctagattattgaaatacactgaagtttgagaattaagtaatccatgttcagagaaatgtgatagcctctgaactaggcatagagatga

SEQ ID NO: 17673 - DNA, 201 bp, Homo sapiens
atcactggttagattatatgctagctttcagtaagtctaaaaaatttttctcctagtatttatcagtcattttggaaacattacacctttttcaaaaatcygtaaaatattgctatgagacatagtgatgcctggaacacttcctttccagtttgtcagcagaggatgaagaatagcatcatctcccattaacacaagggt

SEQ ID NO: 17674 - DNA, 201 bp, Homo sapiens
tgaaacgaccaaaaaaaggaggtctttttttctttgccttctataatttccacagccatcttttcatcacaatgggacagcctgtctgagaatgaggccartgcaaagaagaaagtggagcccacgtacagagagatgatacattgatgatatcatgtgtcctagattcatgcttcatatgaaggtaaattttacctttga

SEQ ID NO: 17675 - DNA, 201 bp, Homo sapiens
ccacataagactttgatctggaaatgtgtggacaggcttcactttgggcaaacaaaaatgaaaaccatatccaaggcagaataaagcatttgtaaagcaargcaaccctattcaaagagcagggggaagtgaaaagagggaaaataagtggaaagccagagatttacctttctctgcttgttgctttagctatgtctcaag

SEQ ID NO: 17676 - DNA, 201 bp, Homo sapiens
tctggaaatgtgtggacaggcttcactttgggcaaacaaaaatgaaaaccatatccaaggcagaataaagcatttgtaaagcaaggcaaccctattcaaasagcagggggaagtgaaaagagggaaaataagtggaaagccagagatttacctttctctgcttgttgctttagctatgtctcaaggggctgctcccccact

SEQ ID NO: 17677 - DNA, 201 bp, Homo sapiens
agcaggatcaacctacaaagcatagctttataaaatacagttgctgaaatgggaactggcagcctcattcattttaaataagactaaaacataaaatcacwttctttttcaaggtttcagattgcatttaatatttcttatgctaaatcccagatcacttgaaaaccccacagaagattaaactcatgttctttttcttat

SEQ ID NO: 17678 - DNA, 201 bp, Homo sapiens
attttaaataagactaaaacataaaatcacattctttttcaaggtttcagattgcatttaatatttcttatgctaaatcccagatcacttgaaaaccccayagaagattaaactcatgttctttttcttatactcttacaatactggcaaaataaagtttttgcccttcctttttttttttttaatcctttaaccaggtca

SEQ ID NO: 17679 - DNA, 201 bp, Homo sapiens
agatcctagctaaatatagctcagtggcaaggaaggtcttcattttatgagaggacttcagtgggcataaaagaccaacctattgtagcaaggctgaaaawccccataatctgggaaaggtattaccagccttattccatgtgttggtctaaaaatcagtgtgattcctattttacacactggtttaacctagcatatttg

SEQ ID NO: 17680 - DNA, 201 bp, Homo sapiens
gacaggttataggcaacctagggaatttaacctagaacatgcctcttgttttggttttcctttttttttgagacggagtctctgtctgtcacccaggctgragtgcagtggcacgatctctgctcactgcaacctccgcctcccgggttcaagcgtttctcctgcctcagcctgccaagtagctgggactacaggcacatg

SEQ ID NO: 17681 - DNA, 201 bp, Homo sapiens
tgggactacaggcacatgccaccacgcccagctaatttttgtatttttagtagagacggagtttcaccatgttgagcaggatgatctcgatctcctgaccycgtgatccacccatctcaacctcccaaagtgttgggattataggtgtgagccatctcgcccggcggttttcctatttttaaaagagtgagtgataattag

SEQ ID NO: 17682 - DNA, 201 bp, Homo sapiens
gacggagtttcaccatgttgagcaggatgatctcgatctcctgacctcgtgatccacccatctcaacctcccaaagtgttgggattataggtgtgagccayctcgcccggcggttttcctatttttaaaagagtgagtgataattagcccaattacataccttctccttgtggaaaaagaagtgagacctcccgcagcagt

SEQ ID NO: 17683 - DNA, 201 bp, Homo sapiens
ggagaatggcgtgaacccgggaagcggagcttgcagtgagccgagattgcaccactgcagtccgcagtccggcctgggcgacagagcgagactccgtctcaaaaaaaaaaaaaaaacgatggtctaggacttttgactttgtgaccttggcaaatgacaacccctctaaatcatctgttacaatgttacttaaggtagggg

SEQ ID NO: 17684 - DNA, 201 bp, Homo sapiens
ctcccaaagtgctgggattacaggcatgagccactgcaccaggcctgtatatttatttcttttaaaatatataacttttaaagttatattttctttttggttttttttttttgtttgtttgtttgtttgtttgtttgttttagacggagtctcgctctcgctctgtcgcccaggctggagtgcattggcatgatctcggct

SEQ ID NO: 17685 - DNA, 201 bp, Homo sapiens
tcccaaagtgctgggattacaggcatgagccactgcaccaggcctgtatatttatttcttttaaaatatataacttttaaagttatattttctttttggttttttttttttgtttgtttgtttgtttgtttgtttgttttagacggagtctcgctctcgctctgtcgcccaggctggagtgcattggcatgatctcggctc

SEQ ID NO: 17686 - DNA, 201 bp, Homo sapiens
cccaaagtgctgggattacaggcatgagccactgcaccaggcctgtatatttatttcttttaaaatatataacttttaaagttatattttctttttggttttttttttttgtttgtttgtttgtttgtttgtttgttttagacggagtctcgctctcgctctgtcgcccaggctggagtgcattggcatgatctcggctca

SEQ ID NO: 17687 - DNA, 201 bp, Homo sapiens
catctcaaaaaaaaaaaaaaaatttgtggaatgattttagagggaaagtataattgtgggatcatgttaccagtaaagatataatatgtgatgtgttttcrgtaacatgttaatatttcaggatatcatttacaaggtaaaaactgttttcaataatgagtttgacgctgcatataaacaaaaagagtttgaaattgcacg

SEQ ID NO: 17688 - DNA, 201 bp, Homo sapiens
tagaaaatattgcaaaattagaccaacaggaatttggtctggatcttgaggaactagaaaggcttcatgatgaaagtcaggaagaagtggcaaaggtatgaaaaagtataatttaagcaccataaagttatgatgaaagaagtaaaaagataataggaatgggaactttttcataataatgtgaatatgacaaaacctttt

SEQ ID NO: 17689 - DNA, 201 bp, Homo sapiens
agttcctcacactaggtaatatctttctattatatactgtattttttcctttctaccattcattgctactgaattgtaatttatgtgagattattttcaaygctttcaagactagatgctccatgagggtagagactaagtctgtcttgttcatccctgtatctccagcaaatagcaaagggctttgttcaaagtgtatgt

SEQ ID NO: 17690 - DNA, 201 bp, Homo sapiens
tttgctggcaattggtatttagagaccaagatctggataccagatgtgttctttgctataggggttaggagtcattctctctctctctctctctctctctmacacacacacacacacacacacacacacacacacacacatccagttagctccaattccaactcaattccaattcgacagcacagggttcttttctctttc

SEQ ID NO: 17691 - DNA, 201 bp, Homo sapiens
ctaacagactactcagtaatatcaaaataattcaggagctgacttaaaacatttcctttaaatgagacaatttaagattcaaagatgataatagttgtaawaaattaaacccgtcacatttgtttaaatttatgaatttatgatattttaaaaagagaagtgccaatcagtcactttcagaggatgaaaacaaattcatta

SEQ ID NO: 17692 - DNA, 201 bp, Homo sapiens
cccttttaagtcccttcttttttatttcaaagtagctgcttttctgacacctctacagctaccactctaatgcaaactactgtctgtcacctttcccaggmtttattgccttagttcctctgccccctgcctcctcccccaatccctatatcccatctcatttcatctcctgtcattctttccctcattaactgttccagt

SEQ ID NO: 17693 - DNA, 201 bp, Homo sapiens
taacagactactcagtaatatcaaaataattcaggagctgacttaaaacatttcctttaaatgagacaatttaagattcaaagatgataatagttgtaaawaattaaacccgtcacatttgtttaaatttatgaatttatgatattttaaaaagagaagtgccaatcagtcactttcagaggatgaaaacaaattcattat

SEQ ID NO: 17694 - DNA, 201 bp, Homo sapiens
tcacctcatcttcctattatggtggagattcctgcttctcctcaatcctgccccatgtccctttttccctgccttgtggttctccatagtacttatcacckcctggctgagttcatttttacctgtgcctctcctcccctacccccttcaagatgaccattatgtggagtgaagacggttatatagtaactgtgcattcgc

SEQ ID NO: 17695 - DNA, 201 bp, Homo sapiens
acactcacacactcatacacagagttggctgtacttagaaacaggtgattgggtgttctttcaaagtccccaattggtgtattttcttctataaatcttawcttcatgaataaatacttcacagacatatttctcttgtactaggaaattccttgctctttttagtatccccaatatttttgtttatgctggaaagtctcc

SEQ ID NO: 17696 - DNA, 201 bp, Homo sapiens
tatccagagtgctgtttaaatatcttttcaaatgttttctactttgtcgatatctttaatagcttaaggacagtgtttcagcttaaattctcaagagaatwtggagaagtaagtggagataaatttaaggaattaaaccaattttaaagcaaagaaacatacagcaatagtttttttaaagctgttattgatttcagcatt

SEQ ID NO: 17697 - DNA, 201 bp, Homo sapiens
tgacattctacaaaataagtggcctgtcctcaagtgtctgcaaattattctcaaatggttcagaaaagtgtaggaaagaaagtagataggtagggggcagrggggcagggggtgggagagagagagaagagagagagagagagagagaaaagtgataaagcaaatagggtagaatgtctacagttggtgactttgaaaaag

SEQ ID NO: 17698 - DNA, 201 bp, Homo sapiens
gtatgttaggacctaaaaaagacctgtgcagttgaagcgagctagggagaaagtggtgggaggtgaggtcttcaaagtgggaggagaccaggtaacgaagrgctttgtaaactaggtaaagagtttgaattttattttacatgtaatgagaactgagtcaggtgttctgaacacaggattaacaaggtatagttgacatta

SEQ ID NO: 17699 - DNA, 201 bp, Homo sapiens
tcaagagatcgtcaaaaggtaaattctccctacccccctacatagttttaattttattcattaatgtattcattcatttaaccagtatttaataagaagcytctgtgatatcaagcatattctaagccaggagtgtttcaaaatatatctgtgagttatttttcttccaacagtttacatttgcagcctccagttcttcat

SEQ ID NO: 17700 - DNA, 201 bp, Homo sapiens
gaccaggtaacgaagggctttgtaaactaggtaaagagtttgaattttattttacatgtaatgagaactgagtcaggtgttctgaacacaggattaacaargtatagttgacattattgaaatgactatttgatgctatgaggagaatgtttcctgtaggtgataagaaggataagaagcagggacattgctcaggaggct

SEQ ID NO: 17701 - DNA, 201 bp, Homo sapiens
aagggctttgtaaactaggtaaagagtttgaattttattttacatgtaatgagaactgagtcaggtgttctgaacacaggattaacaaggtatagttgacrttattgaaatgactatttgatgctatgaggagaatgtttcctgtaggtgataagaaggataagaagcagggacattgctcaggaggctaaggcagaggtt

SEQ ID NO: 17702 - DNA, 201 bp, Homo sapiens
ggcaaaggtatgaaaaagtataatttaagcaccataaagttatgatgaaagaagtaaaaagataataggaatgggaactttttcataataatgtgaatatracaaaacctttttcagtataatgtgaataaagcaaacatagtgcatataagtataatgaatcagaggatcatcgaatttgggggttaggagcagggagaa

SEQ ID NO: 17703 - DNA, 201 bp, Homo sapiens
agggatattggtctgtaattttcttgtgatgtctttctctggctttggtatcaaggtactgctggcctcatataatatattagaaagtgttccctcctctyctattttttggaaacatttgagtagtattggtgtaatttttctttaaatgtttgatagaattcatcagtgaagccttcttgtcctgggcttttctttttt

SEQ ID NO: 17704 - DNA, 201 bp, Homo sapiens
gctgggtttaaaacgatggtctaggccaggcgcagtggctcacgcctgtaatcccagcactttgggaggctgaggcgggtggatcatgaggtcaggagatygagaccatcctggctaacaaggtgaaaccccgtctctactaaaaatacaaaaaattagccgggcgcggtggcgggcgcctgtagtcccagctactcggga

SEQ ID NO: 17705 - DNA, 201 bp, Homo sapiens
ggcactgaagaagtttccacaaggcactgtgaagaattgtccacatatttccttggttagttacctataaactgaaatggttagttacctgaaaataatasagctaaatgtgattttttaaattatgatttttgtagcctctgtgttttcttttttattaatataggcgatttggaggacacctagccagtgaaattctgg

SEQ ID NO: 17706 - DNA, 201 bp, Homo sapiens
tctacaaactttttaaacgccgaccaaggtttgtttctccttcactattgtgtttctgagaaaaaagtttgcaaataaagaggagtgttactagatttcarcttttttctcccaattaaatggaattattcagtgtaatatcttttaggtggagatgtttaagggttttgatcctaattcagtattttttgagattatgtc

SEQ ID NO: 17707 - DNA, 201 bp, Homo sapiens
gaattgtccacatatttccttggttagttacctataaactgaaatggttagttacctgaaaataatagagctaaatgtgattttttaaattatgatttttrtagcctctgtgttttcttttttattaatataggcgatttggaggacacctagccagtgaaattctggactattaccagaaactattaatttccctgagca

SEQ ID NO: 17708 - DNA, 201 bp, Homo sapiens
gctggcaattggtatttagagaccaagatctggataccagatgtgttctttgctataggggttaggagtcattctctctctctctctctctctctctcacwcacacacacacacacacacacacacacacacacacatccagttagctccaattccaactcaattccaattcgacagcacagggttcttttctctttcctt

SEQ ID NO: 17709 - DNA, 201 bp, Homo sapiens
ttctcttgactgattcctgtactcctgaggtaactgttttctcttctttctactttttcatttgggctgtttacctctgtctaaatagtcttcttaatacygttgttatttcttgatatttctgttttgatgctaactatgggtgtcctggtatggaacatgagtagttatgcttgttactgctccccatccccactatag

SEQ ID NO: 17710 - DNA, 201 bp, Homo sapiens
agagacaaggttttaccatgttagtcaggctggtcttgaactcctgacctcaggtgatccacctgcctcagcctcccaaagtgctgggattacaagcgtaygccaccacgcctggccaagccaaatcaatcttaacttgcatagatatttgttatgaaaaacagtaactttcaaagctaaaacaacctttataaagtcatc

SEQ ID NO: 17711 - DNA, 201 bp, Homo sapiens
taaaggtagcccttattattaggtggaacttcatgcaattgctgttttatgtggctcaacctacaaatattttctagaaaagtatatggctcatcctactmtaaatactttcttttaacttttataatgtgccaaattttaaataattttattataaagcagaattttaaaactatggcatgatccaagttattgatcatt

SEQ ID NO: 17712 - DNA, 201 bp, Homo sapiens
atcattgcacagagaatggttaatgtctaacaactttgtaaatcaaggtttcatgcatttttaaaaccaaagtgctaccacctgtattttgaagagtattgtcaacaaataaaaggtttccaaaccaagttgcagtcctcaaatgtcatgtttgtccttaggttatggatcgcagctttaaaaaggaattttctgaaattc

SEQ ID NO: 17713 - DNA, 201 bp, Homo sapiens
atgacatatagttctaattttattttttcaaataaatagcccatttccccagtctgttttatttaatatactatcctttctctgctgatttgcaatgtctyctctatcaatccctggatataggattgttgctggactctgttctaagattgaatattgatttttcttgagccaataccaagctattttaattactatcac

SEQ ID NO: 17714 - DNA, 201 bp, Homo sapiens
tcattgcacagagaatggttaatgtctaacaactttgtaaatcaaggtttcatgcatttttaaaaccaaagtgctaccacctgtattttgaagagtattgtcaacaaataaaaggtttccaaaccaagttgcagtcctcaaatgtcatgtttgtccttaggttatggatcgcagctttaaaaaggaattttctgaaattcc

SEQ ID NO: 17715 - DNA, 201 bp, Homo sapiens
caggtgttctgaacacaggattaacaaggtatagttgacattattgaaatgactatttgatgctatgaggagaatgtttcctgtaggtgataagaaggatmagaagcagggacattgctcaggaggctaaggcagaggttcaggtagcaatgatggaggtggaggagtcttgtgccaaggagagaagtggtggattccagg

SEQ ID NO: 17716 - DNA, 201 bp, Homo sapiens
cattgcacagagaatggttaatgtctaacaactttgtaaatcaaggtttcatgcatttttaaaaccaaagtgctaccacctgtattttgaagagtattgtcaacaaataaaaggtttccaaaccaagttgcagtcctcaaatgtcatgtttgtccttaggttatggatcgcagctttaaaaaggaattttctgaaattcct

SEQ ID NO: 17717 - DNA, 201 bp, Homo sapiens
ttttgcatattaatcttatactctgcaactttgccaaatttatgtattatctctagtagggtttttgtggattctatatgactttctctatatatatagaytcattaatctgtgaatagaaattgttttacatcttttcagtttgggtgccttttatttcttcttcttgcctaattgccatgactagaatttttattacag

SEQ ID NO: 17718 - DNA, 201 bp, Homo sapiens
ctatgtgatcattttcccatgaagactaggacatgttatctatctttgtatctccctcagtgtctttaactaggactttgttaatgtgggactcaagtggmacacttaaatgtttggtgagttgaataaatgaattaatgaatgagaaaataaagtaggcatttgtaataattggtgctttgatgtaataattagtgtaca

SEQ ID NO: 17719 - DNA, 201 bp, Homo sapiens
atatttctgttttgatgctaactatgggtgtcctggtatggaacatgagtagttatgcttgttactgctccccatccccactatagcacacatataaatcygtgcttggaatacacactatgatagttatttgaatattcttcaatgctgagccacatggtatattattattacatttctgcttttacaacttgatttttc

SEQ ID NO: 17720 - DNA, 201 bp, Homo sapiens
atgatatgctctcacttataagtgggagctaaatgatgagaacacatgggcacatagaggggaacaacagatactggggtgtctggtttcctgagggtggwgggtgggaggagggagaagatcagaaaaaataactattgggtactaggcttagtacctggtgacaaaataatctgtacaacaaacccccatgacacaagt

SEQ ID NO: 17721 - DNA, 201 bp, Homo sapiens
gggcttcagatgcaacatcattggaagttgttggcatgaggaagctagaggcaaaccaattagaagcgggacaactcattttactggtttagggaacatayttggctttctctggatggtcctaggttggaaatggggacaaaattatagaagctggtggtaatgatcaagccctgaaagtttgaggccaatccttaaaaa

SEQ ID NO: 17722 - DNA, 201 bp, Homo sapiens
aaactctgatttgattttgattgagaatatattgcttatagtttgatttggagaagaatttatctgccagctctgaactttagtatatatataagtatgtrtgataaaactttactgaagaatattttttaaattgaattaagatatatacagacagtccccaactcacagtggttcaacttataatttttcaaccttatg

SEQ ID NO: 17723 - DNA, 201 bp, Homo sapiens
ttgctggcaattggtatttagagaccaagatctggataccagatgtgttctttgctataggggttaggagtcattctctctctctctctctctctctctcwcacacacacacacacacacacacacacacacacacacatccagttagctccaattccaactcaattccaattcgacagcacagggttcttttctctttcc

SEQ ID NO: 17724 - DNA, 201 bp, Homo sapiens
gttttgcttccctgctgttccaaccagcaggctttgtgcacattagctacgcagctcaccaccacagtgcatccatcctcacaccccacttcactcgtgtrtgcaacccgaccatccttagaggtactgtgtgtcctcaaggaagagaatccaagcctacagacaaacttcaggagacgttctcaaaggcagagatgtgtt

SEQ ID NO: 17725 - DNA, 201 bp, Homo sapiens
cccgtgtgcttcccagccagcatttctgaagatctgtcttagcattcttttcctcctttcctctcaggcacccactgcatctgggtcttaatagctgtctrctcactcacatttcacacagattgaaaggtagacgaaatctggttcatgtttctgcctgtgcctgccttcccattttctaaggagctgtttctcattgag

SEQ ID NO: 17726 - DNA, 201 bp, Homo sapiens
ttgcttacagaatggatcatgtgccccttatgttgaggggaccacttaattgctctcctgcgtccttgaaagaaagaagtaagattgtgtttttgccaccratttagccatataaaccccatctccttgccgttttctgggtttcgagctgctgtctctaaaagtaccatatcattgtgcttggtatcagttggtgctgga

SEQ ID NO: 17727 - DNA, 201 bp, Homo sapiens
ccttggatgatcaagggagcctccatgtccagagacatcgccaagtttacaccactaccctcacccagggcagccagtgaccggctgatggagcccaaggkgaagggggtacaaaagcccagcctcctcaccccaagatgagacaattcagcagagtccctctcatttctcccaaccctgggaatcagggtttttcctctg

SEQ ID NO: 17728 - DNA, 201 bp, Homo sapiens
atacaggcatgcaatgtgaaataatcacaacatggagaatgggatattcatcctcacaagcatttatcctttgggttataaacaatacagttacactcttytagttattttttaatgtacagttaagtgattgttgactatagtcaccctgttgtgcaatgaaaattttacctcatattttgatgttgttctctttaaaaa

SEQ ID NO: 17729 - DNA, 201 bp, Homo sapiens
attcatccttcagatcccagctcaaaaatcagttcctcacactaggtaatatctttctattatatactgtattttttcctttctaccattcattgctactraattgtaatttatgtgagattattttcaatgctttcaagactagatgctccatgagggtagagactaagtctgtcttgttcatccctgtatctccagcaa

SEQ ID NO: 17730 - DNA, 201 bp, Homo sapiens
atcatgttaccagtaaagatataatatgtgatgtgttttcagtaacatgttaatatttcaggatatcatttacaaggtaaaaactgttttcaataatgagkttgacgctgcatataaacaaaaagagtttgaaattgcacgcgtgaaggaaagaaatgttcgaattcgagaaattattttagatctggaattggaagaagc

SEQ ID NO: 17731 - DNA, 201 bp, Homo sapiens
cgttgtccctttcggagaactaccaggatctggcaagttgaataaggatgcctttgcccagttaatgaaagctatggatgagttggacaatattagtaacrtgccagaaggcttggaccctttggtctggaatcatttctgcatgacaagacgagcaaaagtggaaaatgaacagaaagtatatactattttaacttaatt

SEQ ID NO: 17732 - DNA, 201 bp, Homo sapiens
catttatttatttagagacaggatcttgcttagtaacccaggctagagtgcagtggcataagcgtagctcactgcaggcttgaactcctgggctcaagcawtcctctcacctcatccttccaagtagctaggcctgcagacatgcaccaccacgcccaagtaatttttgtatttttttgaagagacagggtctccctatga

SEQ ID NO: 17733 - DNA, 201 bp, Homo sapiens
cacccccagctaatcaacctgccagcactcttaggtaaacccttgttcctgtatctggtgtagcttccactcgttgttgagtgctgtgctgagggcattcrgggctgtgatgcatcctgctgatccatctgatttccgtctttcagttgttatagttttcatgctcctgaaggattctattccttttttcctcttcattgt

SEQ ID NO: 17734 - DNA, 201 bp, Homo sapiens
ctgtatatttatttcttttaaaatatataacttttaaagttatattttctttttggttttttttttttgtttgtttgtttgtttgtttgtttgttttagayggagtctcgctctcgctctgtcgcccaggctggagtgcattggcatgatctcggctcactgcaagctctgcctcccaggttcacgccattctcctgcctc

SEQ ID NO: 17735 - DNA, 201 bp, Homo sapiens
tttttattgtggatgtaaataatagaagaattaagtacagtaaagactcccagacagaggtcacaaactggcacttcaaatgtgtgttggcgagatttcamccaacatttagatatctggcagtttcacttaaaaatatgaattccagacctctctaataaaacaggaagacttcgctcagtggttttgcttccctgctgt

SEQ ID NO: 17736 - DNA, 201 bp, Homo sapiens
cggtggctcacgcctgtaatcccagcactttgggaggccgaggcaggtggatcacaaggtcaggagatcaagaccatcctggctaacatagtgaaaccccrtctctattaaaaatacaaaaaaattagccgggcgtggtagcgggcacctgtagtcccagctactcaggaggctgaggcaggagaatggcgtgaacccggg

SEQ ID NO: 17737 - DNA, 201 bp, Homo sapiens
tgtgtgtcctcaaggaagagaatccaagcctacagacaaacttcaggagacgttctcaaaggcagagatgtgtttcccgaaagtgcatctcagtgcaaggkggctcaaagtgttggagaaagacaaactctaccactgaaggtgcagttaatggctacttagtgagtttacaatggagattattatttctgagtccacact

SEQ ID NO: 17738 - DNA, 201 bp, Homo sapiens
ccccactttttggtaaggtttttgtgtaaggtctgttaggtttacatcctgaagcttattggcttaaaatgtactcttctttgatgtagtctctttggggycaattgggagaaagagaaaccaatagtgcaaccattgtgatactgaatattaacaggtatctttttggaaataaagaaacagtccctccaaacaaacaaa

SEQ ID NO: 17739 - DNA, 201 bp, Homo sapiens
taaaatacggcccttctctgcaacattgtgaaaatgttaaatgttgtggagattttgtatcataacaattttgctagccacttacctcaaaaactcatttsaggattgcatcatcatgcccattttatacatgggattctgaatagaatattagcttttatctcactatgtaagtcctaacatattgtttataaccagcga

SEQ ID NO: 17740 - DNA, 201 bp, Homo sapiens
gaaaaaggtttgaataacaaatggcataatcaatgcagtacattatttacaactcaaattcaaggtttttacagtgcagttctgctacttttatccccatscatcagaaggaaacactgtcacattaaaattgctcacaattacagtagagatataaaagacggtgatgtgcagtcaagtaaataatatttattcttctaa

SEQ ID NO: 17741 - DNA, 201 bp, Homo sapiens
agacatttaagctgagatctgaattaaaagagaacaccaccatgcaaagacaatgggagggtagcaagagtattcagggcaaagggggaaagagcttggcrtgtggtatgttaggacctaaaaaagacctgtgcagttgaagcgagctagggagaaagtggtgggaggtgaggtcttcaaagtgggaggagaccaggtaac

SEQ ID NO: 17742 - DNA, 201 bp, Homo sapiens
tcacctgggggatttgttaaaaatgcaggttctgatttcattgtttctctgtgaaaatggaaggacgctgagattttgcactccaaataggctattgctgkccagtggaccctactttaagtagcaggatcctagagtaccatttcacacccgttgcgcatctcccaaactttcaacacctgacgccctcaactcactctc

SEQ ID NO: 17743 - DNA, 201 bp, Homo sapiens
atggctactactaaagagtaaaaaaattacagatactggtgaggctgtggagaaaagggaatgcttatacactgttggtgggaatataaattagctcaacmattgtggaaagcggtatggcaattcctcaaagagctaaaaacagaactaccattcaacccagcaatcccattactgggtatatacccaaaggaatataaa

SEQ ID NO: 17744 - DNA, 201 bp, Homo sapiens
ttattctcccattttcataagtaattttaattcaattaagtcagtggtttcctaactgtggttgcacattagaatcatttgaagaactttataaatgtgcycagaccccacccccaggatgagtattttttaaaagctccctccataattctaaggttcaagaaggatcacagagctaaatgtccattctagtatgccatc

SEQ ID NO: 17745 - DNA, 201 bp, Homo sapiens
tcccttactcctctactgctgcatccacccgccagctccactgaatccatggcgtctgcctttctgcttcttatgggtgaaatggccttgcatccacctargcctggtcctctcctggtgcactagtcaccatcccatctcacctactcaatgtcattactcatcagtttaccctcttctttcctgcatcatcaatttttc

SEQ ID NO: 17746 - DNA, 201 bp, Homo sapiens
gggagaaattgatgatacagaaggagatggcattgaaaaaaaattgtgttaagtattaagacttcaaaaagaagaaaaaagatcctaagcatagatggtgrcacaggccctgatgggcaggaacatttgggtcacagtaacaaagaaggcaaagagtggtgacagtgtgactggtctgatcatctctgcttcctcagtgga

SEQ ID NO: 17747 - DNA, 201 bp, Homo sapiens
caccaaatagattagtttcctatggaaacctactggaaagttagaagatggaatgagacaccacttggcagagcattacaacatacaggtgtaacttttckgaaagcaaataaacaccctaaacacagcccaatcatttagatcaagttatatgagctttaagaactgtacgtaggctgacatgcaacccaacaatggtgt

SEQ ID NO: 17748 - DNA, 201 bp, Homo sapiens
ccatccaggacaatttttattcctttgatttatctatcatttatcagtttctgaagccttaatctcttctgcagcagttctgggatctattcatcacttcsaattcagttgttggcaagacaattcaacaaattaaaatgattgttgaaataattaagttgtcacaaaatttccctttagaggattcttattattgcataa

SEQ ID NO: 17749 - DNA, 201 bp, Homo sapiens
caaccccagatacacacaattatactacaaatggatttattttgtcttgcgtttttttccccaagtgttttcatatcccctgtgtggttgaaaacttcccratgaaagcgcgcacggttgaagagctgaaagaattggaaagagttttacagcaaaagaagattgaagcagagtgtcttaaagtactattttaaatataca

SEQ ID NO: 17750 - DNA, 201 bp, Homo sapiens
aacttatcaaagaagaatgttggaattcgatggctgtgaaaggtcgagctcttaaggtaacagatagaaccctaggtacaaaacctgatgagaattgtcaycaaaagctcaggaaagttttaaaaataaatttaagaaaattcaggcatagcaaagcactgagagcatggcttgccccttcctatactgaatttcacctgg

SEQ ID NO: 17751 - DNA, 201 bp, Homo sapiens
ttgatggaattatggttttcctaaatcccaactttttaagcaataatctctgtcaaaccactaaaaaaacactgcccttcagtgtagttttgttttggtcrgaactttgcacccactctttttctgaaacaaaaagaaggcatgcttaattcgtgttaaccttcacccactgatcctttgttaacaggtttctttgtaaaa

SEQ ID NO: 17752 - DNA, 201 bp, Homo sapiens
aggttgtcttcatccacacatatccttttcatcctcccttgtcactagggattgtattttaagataattgatcaaggatgaagtagaatttgttttgatgsaattatggttttcctaaatcccaactttttaagcaataatctctgtcaaaccactaaaaaaacactgcccttcagtgtagttttgttttggtcagaactt

SEQ ID NO: 17753 - DNA, 201 bp, Homo sapiens
caataaatcaaggagcctgtatcctatacaacactggctagccctcaaatatgaggatataccttaaaaagtgagatttggtgttctgctcttatcctgcrcagaggttgtcttcatccacacatatccttttcatcctcccttgtcactagggattgtattttaagataattgatcaaggatgaagtagaatttgttttg

SEQ ID NO: 17754 - DNA, 201 bp, Homo sapiens
ccaacaggaatggtacactgaaaaggttacatttaaattccctcagtgactttttacagaggtatgagcagggttaagggaaacagcaaggagtggcaaaygtgttgtaattagaaacaatgggaggccagtaccatctctagagctaaaaaggcagggaaagagagctgttcccagaaccagcaagacctgtagccttgg

SEQ ID NO: 17755 - DNA, 201 bp, Homo sapiens
aaaactacaaagaaacacaatatataataaaaagtcaagatagtgtttagtactggggttgagattttgatgaggactcctggaagaagcaactgcagtcrtaaagttctgtttcttgcgataagtggtgctaacaagagtgtttgcctttataataacccattaaattatatattcatgttatgtattttttgtatatgt

SEQ ID NO: 17756 - DNA, 201 bp, Homo sapiens
atatgcaaagcttcttctaaatacaactttacatatagcaaccctgcagcatactagatttctttcacagatgaggataccatctcagagagtctgggtarcatgcctaagtcagccactagtgtgtaatagagcagcagctggaactgtgggaataagtgaagaacatccaaatgcaaatgagcagatgctgtttattca

SEQ ID NO: 17757 - DNA, 201 bp, Homo sapiens
aatttgaagctttctttcatgttcacctattcaaagtctaattagggctaaatcaggttgtgttatcactggggagaatgcctactgactgctttacagcyatctcccttccagcactgtgctttaaaatttctattttaaaaagcctgctttgttacatagaccttgattcaggatggaactttcccacgttttgttgct

SEQ ID NO: 17758 - DNA, 201 bp, Homo sapiens
ccaaattcatgctcatccctcaagagttctccttgatcctctgaggcaggatttggtgcagagaaaggccttccatatgctagtttccctcatattgtttwtttttttttcttgagctctgtgcctttgaagagatagtaacaccagattaggtacaacagtggcccaggagagaacagtgttagcagatggcaccataaa

SEQ ID NO: 17759 - DNA, 201 bp, Homo sapiens
ctggcatatttttgttaaagtacctaggattctataatttcacttaaagtgatgagaacaaattttaaaaataagatataaaagaatttatagttgcctgmatacttgattttcaccaagaagcaaatttgatactttcaaatcgttcaaattgttacataccatgtaagttttagacatttaaatttaaatgttttatta

SEQ ID NO: 17760 - DNA, 201 bp, Homo sapiens
ggagatctgactttagcaggtattctgtctgctctcagtaaaaagtgaaggggtgggtggtgttgggaagtgtcttggcatcccattgtgtggtgggggtkgttctctattctttctagccactaacagattccttgggccttgccctgtttctcccatccaaatattcattccagtttcttctacctggagacaaacact

SEQ ID NO: 17761 - DNA, 201 bp, Homo sapiens
atggggctaatgtattgaagaagacaggccgtaaacaaatctctacatagtatatgatggaaacaaactggatgctgtgatagatgtgggagatctacttytgtggtcaaagaaaaccacttcaagggctgacatttcagttgagaactaaagggagagagagatctggctgtgcaaagatctgagggaagagaatgtcaa

SEQ ID NO: 17762 - DNA, 201 bp, Homo sapiens
agtattccaggaacagcacaccagaaaggctgaagcatcgtggatgggagagagcctaatggaatgaggttggggaggtaggcagaggctagccctgacgrgcttgtatattgcggtaaagaatttggcttttttattaactgtgcaacaggaagctatgaaaaaaaatcccattttcttatcacaagaggtaggcaccaa

SEQ ID NO: 17763 - DNA, 201 bp, Homo sapiens
ggaatcaggcaggctctgacaactgatatgccaagccagctgtctatttagaaagaaataatttaaaactatattagctattaactcactggatcagaatyaaaaagaaatgaattgcaaattaaagtcatttaatcagacaataaaataaatagaaattcacaagaagtactaaaaaagacattttaaatctgcgagata

SEQ ID NO: 17764 - DNA, 201 bp, Homo sapiens
tggcgtctgcctttctgcttcttatgggtgaaatggccttgcatccacctaagcctggtcctctcctggtgcactagtcaccatcccatctcacctactcratgtcattactcatcagtttaccctcttctttcctgcatcatcaatttttcccaccctgtggattttccccatcagtgtagacacatgctataattgtat

SEQ ID NO: 17765 - DNA, 201 bp, Homo sapiens
tccacacaataaatcaaggagcctgtatcctatacaacactggctagccctcaaatatgaggatataccttaaaaagtgagatttggtgttctgctcttaycctgcgcagaggttgtcttcatccacacatatccttttcatcctcccttgtcactagggattgtattttaagataattgatcaaggatgaagtagaattt

SEQ ID NO: 17766 - DNA, 201 bp, Homo sapiens
tctcactataaagataccaacacacccctctgagtctatcacctaagagtccaggtatatcccaccctgctcaccttcacctaagtcacagaagaactgtygtaaaattttaaaatatcttttgcccaagatgtcaggtcgttttccttgccaatgtgaaggactgtatccttttaaagggctttttaaaaaaaactctga

SEQ ID NO: 17767 - DNA, 201 bp, Homo sapiens
taccatatatttgtaccaatggcatatatattacgtatatgttatatatatattgtatatgtatacctgtgcacatcagttttttatattgccacatttgytctctttttctcctgaatagttggagacaaatcacagatatcatgatattcctaaatattacagcttaaacctcctaagaacaaaaatattcttctacat

SEQ ID NO: 17768 - DNA, 201 bp, Homo sapiens
gctatttggctgaacttatcaaagaagaatgttggaattcgatggctgtgaaaggtcgagctcttaaggtaacagatagaaccctaggtacaaaacctgaygagaattgtcatcaaaagctcaggaaagttttaaaaataaatttaagaaaattcaggcatagcaaagcactgagagcatggcttgccccttcctatactg

SEQ ID NO: 17769 - DNA, 201 bp, Homo sapiens
tgaaatggttagttacctgaaaataatagagctaaatgtgattttttaaattatgatttttgtagcctctgtgttttcttttttattaatataggcgattyggaggacacctagccagtgaaattctggactattaccagaaactattaatttccctgagcagcgccatggacaaggagaatcattatttaagcacaacac

SEQ ID NO: 17770 - DNA, 201 bp, Homo sapiens
gcaaccatatgtaaaacattccaaatacttctacagctctgcagtctaatccctttgtcacttttggaaggtgacttttcagcttaatgcacattgccctytctgtagaggaaggaaaaaggtatgggcctgccttactgagaactaaacagagtccagggaaagactcccctgtgggaaaccactttgttctctacaaag

SEQ ID NO: 17771 - DNA, 201 bp, Homo sapiens
aatagtgcaaccattgtgatactgaatattaacaggtatctttttggaaataaagaaacagtccctccaaacaaacaaaacaaatactatagctattttcrgatttcctagtagctttttttttgttcttagactatatcccgctaagaatacaccaacatattatgtttagaattactttgactaattctttttttcccc

SEQ ID NO: 17772 - DNA, 201 bp, Homo sapiens
tcctcccccaatccctatatcccatctcatttcatctcctgtcattctttccctcattaactgttccagttccactgatttccttactgttcctcagatayccagcaaactcttgacttgaacacctgtaggtcattctcgctgcaggtccttgacacactgtatccttggcctggagcgctcttcccccttttagctaca

SEQ ID NO: 17773 - DNA, 201 bp, Homo sapiens
gtaatagccagcaatgtcgcagatgagggtgggcagcagagcttcgtttgccaagctcagtcgtactttaggggaagctggagaaagaatgaggaataagrttacacatggatctaactggggacagcggaggagcctgaagccttttcttcctgccaagatgagagtagattgtggaggctacagtgtcccttggtggtg

SEQ ID NO: 17774 - DNA, 201 bp, Homo sapiens
ccgggtgaggtgggtggtgagaaaggaaacagcaagcagggctctggcagctgctgcagacggcttcacacagggacgcgggctgccatcttgctctaagygaaagtgaaagaaaagtcggcagcagagggaacagggaagaaacctaaaggctgcaggctgccaggtgtgcttggagagcccccttcttccgccgggcct

SEQ ID NO: 17775 - DNA, 201 bp, Homo sapiens
tgggcaacaagagcgaaactccatctcaaaaaaaaaaaagaaaagaaaagaaaagcaagtcacagaaagttttgcttttctaaagtggtaagatatggggsacagaagaagaaagggaacaaatccacctccatccacactggtcacctcagggcacccctaggccttggtcctttcttcctaaaaacccctgagtcaggc

SEQ ID NO: 17776 - DNA, 201 bp, Homo sapiens
ggttttcttgccttctaccagtggaagcccaggaaaagatggaggaggggacaagaaaattcaccttgcagtttttccaccaatacttcctctttagcttkgcagcactgctctcaaattgtgatgctcctgcctgcaaggcatcagctcggtcatccagctctgacagcttctggtccctctccaggaccttgtccacgt

SEQ ID NO: 17777 - DNA, 201 bp, Homo sapiens
ctcccagggtcaccaagaatgaggcgctctggcacccgacgctgaacttgccactgagcccccaggggactgtgcgaactgcaggtaagaaaatgaaaagyaaggccaggtgtggtggctcacgcctgtaattccagaattttgggataccgaggtcggtggatcacctgaggtcaggagtttgagatcagcctggtcaac

SEQ ID NO: 17778 - DNA, 201 bp, Homo sapiens
cttgcactgatgttcctggggcttcagagacggcaaggtaagagcctgggtgcccttggctctggccctggcccacctcacccactctaaccacccccccrcccagaccagggtggaagcccagatgccccaagctccagccacccacccatcacagcctcctgcttttgagtttgccctaaatgaaaatgaaaccagtcg

SEQ ID NO: 17779 - DNA, 201 bp, Homo sapiens
tccttcttgcactgatgttcctggggcttcagagacggcaaggtaagagcctgggtgcccttggctctggccctggcccacctcacccactctaaccaccyccccgcccagaccagggtggaagcccagatgccccaagctccagccacccacccatcacagcctcctgcttttgagtttgccctaaatgaaaatgaaacc

SEQ ID NO: 17780 - DNA, 201 bp, Homo sapiens
cttggttcatggccaacatgcaggtctctggagggggacctagcatctccttggtgatgaagactcccagggtcaccaagaatgaggcgctctggcacccracgctgaacttgccactgagcccccaggggactgtgcgaactgcaggtaagaaaatgaaaagcaaggccaggtgtggtggctcacgcctgtaattccaga

SEQ ID NO: 17781 - DNA, 201 bp, Homo sapiens
tcagagacggcaaggtaagagcctgggtgcccttggctctggccctggcccacctcacccactctaaccacccccccgcccagaccagggtggaagcccasatgccccaagctccagccacccacccatcacagcctcctgcttttgagtttgccctaaatgaaaatgaaaccagtcgtgttccctcgttttctcctagct

SEQ ID NO: 17782 - DNA, 201 bp, Homo sapiens
tgagccaagatcatgccactgcactccagcttgggcgacagagcaagacaccatcttaaaaaaaaaaaaaaaactggcttagaatgacagtaagaagccarccaatctttagttggctttactatctgttttctggaaaatgtaaccctgcccccttacggcctgcatccaggtgggcccctcacacacccccgccttggt

SEQ ID NO: 17783 - DNA, 201 bp, Homo sapiens
atctccccacacgactgcctagtatgccacagatcttcatacttttagatattttttaattgatatgataatagtctcaactataaagtccagggcatggkggtgcacacctgtagtccagctactcaggagactgaggcaggaggattgcttgagcccaggagtttgagtcctgtctgggcaacatagagagcgagaccc

SEQ ID NO: 17784 - DNA, 201 bp, Homo sapiens
tagactggacacaggaatcaggaagtcccagacggaaaagagaaagagacaggagaaaacaagagggtgaattacaccaagttaccagacattcaggtctytccattgttaagtgccccatccccatggtctccctccaacccaagccagtgacacacagcatagccccacttcctcagaacaggaggcgccatctccctg

SEQ ID NO: 17785 - DNA, 201 bp, Homo sapiens; identical to SEQ ID NO: 2807

SEQ ID NO: 17786 - DNA, 201 bp, Homo sapiens
agggaaggggtggtacattctcaagtaaaaaagtagactggacacaggaatcaggaagtcccagacggaaaagagaaagagacaggagaaaacaagagggygaattacaccaagttaccagacattcaggtctctccattgttaagtgccccatccccatggtctccctccaacccaagccagtgacacacagcatagccc

SEQ ID NO: 17787 - DNA, 201 bp, Homo sapiens
cccacctattatctttgaggcctcaggtaaaagccttccacctgtgtccttggtcctcccgggctccctccaccaggacagcccaggtcccgattacagcyacacatactgcctcccgttggccctggtgttctcacgctaatttgccctctgtgtgtgccctgcttctccccagtggacctggtccagattccccaggcc

SEQ ID NO: 17788 - DNA, 201 bp, Homo sapiens
cacccgacgctgaacttgccactgagcccccaggggactgtgcgaactgcaggtaagaaaatgaaaagcaaggccaggtgtggtggctcacgcctgtaatyccagaattttgggataccgaggtcggtggatcacctgaggtcaggagtttgagatcagcctggtcaacacggtgaaaccccgtctctactaataccaaaa

SEQ ID NO: 17789 - DNA, 201 bp, Homo sapiens
gttacagctgccccagggaggaggagggcagcaccatccccatccaggaggattaccgaaaaccggagcctgcctgctccccctgagccagcacctgcggkagctgcactacagccctggcctccacccccaccccgccgaccatccaagggagagtgagacctggcagccacaactgcagtcccatcctcttgtcagggc

SEQ ID NO: 17790 - DNA, 201 bp, Homo sapiens
gcctctgccttccttcactgtgcaccctgggctcatgcaccaaggcagagaacaggaagaagtgaggggacaagaagaaggcagaatgtccagatggaggwtaagaccaaagagccaggttggtggtgtgacggtaggaaaacaaagctggaggaaatggagaaggaacaagtgagggacaatgaggcatgggttggggct

SEQ ID NO: 17791 - DNA, 201 bp, Homo sapiens; identical to SEQ ID NO: 2799

SEQ ID NO: 17792 - DNA, 201 bp, Homo sapiens
ccttgttccaggctcctcaaccagggactcacacacacaatccttagctcctcctccctggggtggacactgcaggtgagggctcagctcatgattcctgygcacgatgatccccgcccacgttgctctcacctacagagcggagaacagccttgggagtcatctttgccagcagtctcttccttcttgcactgatgttcc

SEQ ID NO: 17793 - DNA, 201 bp, Homo sapiens
ggaacactcaagatagaaacaatagcatatatgaaagccaaatcataaaacagcctaaagagaatttggagaattgcaagtaattcagcacagctagagcytagggtatatgggaaaaagggaaagtggctctgaagcttcggaggtaattctatttattgagcatttacatgaatcaagcagtgtagaaagcacttaaat

SEQ ID NO: 17794 - DNA, 201 bp, Homo sapiens
atagccccacttcctcagaacaggaggcgccatctccctgcaatgcgttgcagggggaaggcttgtccatcaaagaaatcccttgtctctgcccttccccygtcccgaaccaggtgacgatcccatagcagcggtctccatacctcagtcagagcagccccactccccaggcaggcaggcaggcagggagaagactccagg

SEQ ID NO: 17795 - DNA, 201 bp, Homo sapiens
ctcaaccagggactcacacacacaatccttagctcctcctccctggggtggacactgcaggtgagggctcagctcatgattcctgcgcacgatgatccccrcccacgttgctctcacctacagagcggagaacagccttgggagtcatctttgccagcagtctcttccttcttgcactgatgttcctggggcttcagagac

SEQ ID NO: 17796 - DNA, 201 bp, Homo sapiens
gacagagaccactgttaagacagcagcttggttcatggccaacatgcaggtctctggagggggacctagcatctccttggtgatgaagactcccagggtcrccaagaatgaggcgctctggcacccgacgctgaacttgccactgagcccccaggggactgtgcgaactgcaggtaagaaaatgaaaagcaaggccaggtg

SEQ ID NO: 17797 - DNA, 201 bp, Homo sapiens
ccttctcccgtctccccctgcccccactgctggccaagactcatcggatctccttctgcagacaaaggagaaagtcctgtggagcctgcagagccttgtcrttacagctgccccagggaggaggagggcagcaccatccccatccaggaggattaccgaaaaccggagcctgcctgctccccctgagccagcacctgcggg

SEQ ID NO: 17798 - DNA, 201 bp, Homo sapiens
ggaggagatgctgtaggtgcctgccacgctttgcctgaggctggagaaggaggcaccagagacttgggctggggatccacccagctcctctcgggtccacytcaccaccacatccagagggtaatagccagcaatgtcgcagatgagggtgggcagcagagcttcgtttgccaagctcagtcgtactttaggggaagctgg

SEQ ID NO: 17799 - DNA, 201 bp, Homo sapiens
cctcgggtgactgctgggaggttcaggatacctgcaaatgcctcactccctcagctgcaaggagagacttctcctttttattcgtttctaaaatgtgcctratcaatacggtggaactcagcataccaaaactgtacgtgaggatgatggggaaaagggggtaagggggtgttcactgacagccttatctgggcacatccc

SEQ ID NO: 17800 - DNA, 201 bp, Homo sapiens
acgaacagattagaaataactacaaaaaacaagtttttactttcgaaaagggtactgcactgaaaccaagttggactttggtccacccccaggaccctctycaggcctggtccaggaaggaaagctccacatgaccaggcagtactgagtgagctgccatcttcccagcccctccctagctcctaccagtggccaggtttt

SEQ ID NO: 17801 - DNA, 201 bp, Homo sapiens
ccccacagctactccaacccaaacaacaaccaagccagtttaatggtaggaatttgtattttttgcctttgttcagaatacatgacattggtaaatatgcmacatgcctttggtggaagtacaactgttgttattactctatacaagtatgagatcagggttaggaaaaaaagacaaagaggtgatgacagacacacagtg

SEQ ID NO: 17802 - DNA, 201 bp, Homo sapiens
cacctcagggcacccctaggccttggtcctttcttcctaaaaacccctgagtcaggccaggtgcgaaggcccatgcctgtaatcccagcactttgggaggscaaggcaggtggatcacctgaggtcaggagttcaagaccagcctggccaacatggtgaaaccccctctctactaaaatacagaaattagccgggcatgat

SEQ ID NO: 17803 - DNA, 201 bp, Homo sapiens
ctcccaagtagctgggattacaggcatgcgccacgacacccagctaatttttgtatttttagtagagacggggtttctccatgttggtcaggctggtctcraactcccaacctcaggtgatccacccgcctgggcttcccaataccacgtgtgtttttttgttttgttttgttttttacattttttttgagacggagtttc

SEQ ID NO: 17804 - DNA, 201 bp, Homo sapiens
gttaagacagcagcttggttcatggccaacatgcaggtctctggagggggacctagcatctccttggtgatgaagactcccagggtcaccaagaatgaggygctctggcacccgacgctgaacttgccactgagcccccaggggactgtgcgaactgcaggtaagaaaatgaaaagcaaggccaggtgtggtggctcacgc

SEQ ID NO: 17805 - DNA, 201 bp, Homo sapiens
tcttaccagcacctacaggacttgggctgcttcaggctgaacgctgggagaccacttcctgtgctgacacacagagctcccatctccatgaagaccgcacrgcgcgtgtaagccagcccagctgacctaaagcgacatgagactactagaaagaaacgacacccttccccaagcccccacagctactccaacccaaacaac

SEQ ID NO: 17806 - DNA, 201 bp, Homo sapiens
ttctggggaaggcggtgctcaccccagcctttgtctgcagagccccacccagcagaggggcagtggcgggcagtggacgtggtcctagactgcttcctggygaaggacggtgcgcaccgtggagctctcgccagcagtgaggacagggcaagggcctcccttgtgctgaagcaggtgccagtgctggacgatggctccctg

SEQ ID NO: 17807 - DNA, 201 bp, Homo sapiens
gagtagctttctggggaaggcggtgctcaccccagcctttgtctgcagagccccacccagcagaggggcagtggcgggcagtggacgtggtcctagactgyttcctggcgaaggacggtgcgcaccgtggagctctcgccagcagtgaggacagggcaagggcctcccttgtgctgaagcaggtgccagtgctggacgatg

SEQ ID NO: 17808 - DNA, 201 bp, Homo sapiens
ctggacgatggctccctggaggacttcaccgatttccaagggggcacactggcccaagatgacccacctattatctttgaggcctcaggtaaaagccttcyacctgtgtccttggtcctcccgggctccctccaccaggacagcccaggtcccgattacagccacacatactgcctcccgttggccctggtgttctcacgc

SEQ ID NO: 17809 - DNA, 201 bp, Homo sapiens
caacagttggaaatgcaagcataaactcctctgagcaaggcaaatccaggactttaactctcaccaagaagtatttgcctggactagcaggtgctctccaraaagctggtttggggatgacgggagaatagagggacacagaaacagctaggatcttggatggcaacttttaccctttgatgactccacagcttgagggcg

SEQ ID NO: 17810 - DNA, 201 bp, Homo sapiens
tttctccacactggtcccaactgagccctgtcaccaagcctagcggctccaacttgcaaagtgtttaagtatgaaacaaaggccctcagaggcacccccgkggctccatctcagttgcacctcagctgcaattagggttctgctccctcgggtgactgctgggaggttcaggatacctgcaaatgcctcactccctcagct

SEQ ID NO: 17811 - DNA, 201 bp, Homo sapiens
tgtatatgtgtacgtgtgtattttcctctgaactgagagtaagttgcagaagataacacttgaaccccaaacgcatgtttgaaccccgaaacgcatgtttraaccccaaatacatccatagcatgtattagtttacaatgaaggacaaggatgtaatccttcatagttacaaagccatcatgtcagaaacaaaccaaagtg

SEQ ID NO: 17812 - DNA, 201 bp, Homo sapiens
acgggatgtgggaagctcagcttcatttgactgcaaagtcccagggttttgttgcacatttgctcatgcacatgggtggtgggaggaaagggggatagcaragacacacagaagagggtacagggtgggtgagaaagaaagtagaagggctaatacccccaaagaacaaggccaactacacctggtgagcctcagagggac

SEQ ID NO: 17813 - DNA, 201 bp, Homo sapiens
cagaacactctaacctctctgtggtccaacctaaatctatcctgacccattagaaaaaggtcttcatgtctgtccagtgtctaccatactcctggcatgcrtaggtatttctctctttttattccaaacctacaaaaaaaggtgaaataataatataatgaacacctatataccctacacctagatccaccagttgttaac

SEQ ID NO: 17814 - DNA, 201 bp, Homo sapiens
accttcgaggggggccgttgggagggtactgactgctttcttccagctcttcagtcccgcccttgggcaggacgaagggaatgtgggaaacaagggcgaarggaaaggaaggatggttttgagcaatgaaatgctgctgcatggaaagtgggcatccagaccctgcccagcatggcctcagcctcttcctgttcgtggacc

SEQ ID NO: 17815 - DNA, 201 bp, Homo sapiens
gttaagtgccccatccccatggtctccctccaacccaagccagtgacacacagcatagccccacttcctcagaacaggaggcgccatctccctgcaatgckttgcagggggaaggcttgtccatcaaagaaatcccttgtctctgcccttcccccgtcccgaaccaggtgacgatcccatagcagcggtctccatacctca

SEQ ID NO: 17816 - DNA, 201 bp, Homo sapiens
ctcatctcactgggctgccatgaggaaataagacacatgatgctattctgtacatgggtgctgtccactgtagtcttatcgagccaaaacccggttttctsccagtgaaatgctaggctgctctggtgcttcaggggtaaagctcagggatgcatcatttgttcatgatcttattagtaaacccagtacttgccctctcca

SEQ ID NO: 17817 - DNA, 201 bp, Homo sapiens
cactccagcctgggcagctgagtgagacaccgtctcaaaaacaacaacaacaacaaaaaccctgagtccacaagagaatgcttcgcagcccctacctgaasgtccccaggcacacagacaacctgtgttatttccaaaatggagatcgttctcatctcactgggctgccatgaggaaataagacacatgatgctattctgt

SEQ ID NO: 17818 - DNA, 201 bp, Homo sapiens
tgttagccaggatggtctcgatctcctcaccttgtgatccgcccgccttggcctcctaaagtgctgggattacaggcatgagccaccgcgcccggccctctttttttttttttttgagacggagtctctgttgcccaggctggcgtgcagtggctcaatctcggctcactgcaagctccgcctcccgggttcatgccattc

SEQ ID NO: 17819 - DNA, 201 bp, Homo sapiens; identical to SEQ ID NO: 2838

SEQ ID NO: 17820 - DNA, 201 bp, Homo sapiens
tgagaccctgtctcaaaaaaaacaaaaaacaaaaaacaaacaaaaaacttgttatagccagatttatgacttattttcttgcaacaatttaaacagttccttttttttttttttgagacggagtctcactgtcgcccaggctggaatgcagtggcgtgaactcggctcagtgcaaattctgcctcccgggttcccgccagt

SEQ ID NO: 17821 - DNA, 201 bp, Homo sapiens; identical to SEQ ID NO: 2839

SEQ ID NO: 17822 - DNA, 201 bp, Homo sapiens; identical to SEQ ID NO: 2841

SEQ ID NO: 17823 - DNA, 201 bp, Homo sapiens
tgggctgggtgcagtggttcactcttgtaattccagcacccagcactttgggaagccgaggtctgcagatcacttgaggtcaggagaccagcctagcctgrccaacatggtgaaaccccatttctactgaaaacacaaaaaattaggcaggtgtggtggtgcgagctatgatcccagctacttgggtggctgaggcacgag

SEQ ID NO: 17824 - DNA, 201 bp, Homo sapiens
acagggagaaacctcgtctctactaaaaatacaaaattagccaggcgtggtggcgcatgcctgtaatcccagctacttgggaggctgaggcaggagaatcrcttgaaccctggaagcagaggttgcggtgagccgagatcgtgccattgcactccagcctgcgcaacaagagcgaaactaggtctcaaagaaaaaaacgga

SEQ ID NO: 17825 - DNA, 201 bp, Homo sapiens
ggaaaacccttctgaacagagtaaaaagccgaaaggagctgcctcaaatagacagatcttttcagatggcgctggacaaacagctaacatgcctgctacasctcgggagtgctcctctttgatgcttgaagcccccactctggggcatctcgcagaggctgtgtcctccccctccccctctaggcccccactgtggaactg

SEQ ID NO: 17826 - DNA, 201 bp, Homo sapiens
cgaaaaatacaaaaaattagccgggtgtggtggtgtgcgcctgtaatcccagctactcagggggctgaggcaggagaatcgcgtgaatccgggaggcagargttgcagtgagctgagattgcaccgttgcactccagctcaggcgacagtgcgagactccgtctcaaaaacaaaagaaaaaaaaacggaaagaaagaaagg

SEQ ID NO: 17827 - DNA, 201 bp, Homo sapiens; identical to SEQ ID NO: 15249

SEQ ID NO: 17828 - DNA, 201 bp, Homo sapiens
catctcatccctgcccctcaggaccaggataagcggaagaaaaggattcatttgtgccctcaaaacagctctgggacagagcttttcacaaaggctttggrctgagctaagcttctgctggaggctcagcacagctggggtctgtttggagggcctggatacagagatactgagtcttcatgatgaagcctgtctgtgggg

SEQ ID NO: 17829 - DNA, 201 bp, Homo sapiens; identical to SEQ ID NO: 2840

SEQ ID NO: 17830 - DNA, 201 bp, Homo sapiens
ccagggaggagggaagacacgacctgacacccgggatccgtgccagagactcctctctgaggaagaatgtggcccctgggcagaaggaggcctccccgccyaccctggggactttgtactgtctccaaaccttgaggatgaggattcatcctcctgttccatttagtcttccatctcatccctgcccctcaggaccaggat

SEQ ID NO: 17831 - DNA, 201 bp, Homo sapiens
gctgagacaagagaattgcttgaacctgggaggaaaaggttgcagtgagctgagactgtaccactgcactccagcctgggcaacggggagactccgtctcaaaaaaaaaaaaaaaaaaaaaaaaaaaaaagatgggctgggtgcagtggttcactcttgtaattccagcacccagcactttgggaagccgaggtctgcaga

SEQ ID NO: 17832 - DNA, 201 bp, Homo sapiens
gttgcagtgagctgagattgcaccactgtactccagcctaggtaacacagcaagcgagactccatctcagaaaaaaaaaaaacaaaacccaggagaaggarccggcaagagcagtgagggctgaagccagtgcactctaaagtcaggtgaggtcagcaaagcccacaggctctggtggatttccctgaggaagcaggacct

SEQ ID NO: 17833 - DNA, 201 bp, Homo sapiens
taagctcaagtgttgcaagtactgcttagaatgcctgtcatttccgtgagcagtttgtctctccagtaaattgtgtattgtaataaaaaatgatctctagyggttctcacatattttttattgtgtttagtgcagtactgtagtaaaccttgcataacaccatgggatccatatgaagtgatgcttcaagtgctcccaaga

SEQ ID NO: 17834 - DNA, 201 bp, Homo sapiens
attgactgtttatgttatctgtaaggtttctagttactggtaggctataagttgaattgcttgatatgtaccatagatcaaggtttgccattgtggttgcrtgccattttaagataattaatccagtaaggagtgttgtaaaaaaagaaaagaaaatctgtgaagccatcactgtagctacgttagcagccatgaaaacct

SEQ ID NO: 17835 - DNA, 201 bp, Homo sapiens
ctctgtagatgagaccacctatgaaagactagcggaggaatcactggactctttagcagagttttttgaagaccttgcagacaagccatacacgtttgagkactatgatgtttcctttgggagtggtgtcttaactggtaaactgggtagagatctagcaacctacgtgatcaacaagcagacaccaaacaagcaaatctg

SEQ ID NO: 17836 - DNA, 201 bp, Homo sapiens
ggcaggtgtggtggctcgtacctgtaaccccagcactttgggattctgaggtgagagcgtagtttgagctcagactagcctgggcaacataatgagaaccygtctcaaaaaaaaaaaaaaaaattctgccctgggaccttctccccctcaattctaccaaactggttagaaatacaatctcagtgattaataatagagatc

SEQ ID NO: 17837 - DNA, 201 bp, Homo sapiens
tttctgtctgtgtgtaaacacaaatcagtttttaaaatttaggtttgtattgtacatactgtctgacaacttactgttgttttctgtttttacatggcagstttatgaaatttattacaagtggagatagtttcaatatagttttaatatacgtctgtgtgtgtacgtgtgtgtgtatgtatatgtgtgtgtgtgatttta

SEQ ID NO: 17838 - DNA, 201 bp, Homo sapiens
gccaggtgtggtggtgctcagctgtaatcccagctacttaggaggctgtggcacgagaatcgcttgaaccctgaagtgggggaggttgcagtgagcagagrttgcatcactgcattccagcttgggcaacagagagagaccctgtctcaaaaaagtaaataaataaataaaaataaataataaaataaggctgggtgcagt

SEQ ID NO: 17839 - DNA, 201 bp, Homo sapiens
caccctcatgggtgccctcctcctcctccacactcggccttcaacatcctgtgcaagctggctctgcctgcgaatggcctcctcacgtagcttatattccracaaccatgcaggtaccctgtgatgtggatacccacttggtggctataagagtgaatttttcaggaagggaagagaattctgatttcctaagttttactt

SEQ ID NO: 17840 - DNA, 201 bp, Homo sapiens
ctattaattgaagagatcagttttcacattactttatatggccttcataattattagcacttgatagaataatattagtaggctgggcgcagtggctcacrcctgtaatcccagtactttaggaggccaaggtgggtggatcacctgaggtcaggagttcaagaccagcctggccaacatggggaaaccccttctctactt

SEQ ID NO: 17841 - DNA, 201 bp, Homo sapiens
tgtagagacaagatctcactgtattgcccaggcaggtctcaaactcctagcctcaagtgatcctcctgcttctgcctcccaaagtgctgggattacaggcrtgagccactgcatctgcccttaatagatcttatttgatccttccctctttatatagcaaatctcccattgctgctttgaacccttctatgtggaggtgct

SEQ ID NO: 17842 - DNA, 201 bp, Homo sapiens
tcctgagatggagtttcactctcgtcgcccaggctggagtgcagtggcacaatctcggctcactgcaacctccgcttcccaggttcaagcaattctcctgyctcagcctcccaagtagctgggattataggcgttcgccaccagacccagctaatattttgtatgtttagtagagacgggttttcaccatgttggtcaggc

SEQ ID NO: 17843 - DNA, 201 bp, Homo sapiens
accagcctggccaacatggcgaaacctcatctctactaaaaatacaaagcaattagccaggcatggtggcaaatgcccataatcccagctactcaggaagytgaggcatgagaatcgcttgaacctgggaggtggaggttgcagtgagccaagatcatgccactgcactccagcctgggtgaagtgagactctgtcaaaaa

SEQ ID NO: 17844 - DNA, 201 bp, Homo sapiens
tgataaccattagcatgtcctcaatatttgttggatggctgctactaatcttgagggcatcatgccaatattgactgatgtatcaatcaatgctactggcrtgtggtatttacagcaaaaaactaagtgtgctcatttagctataacatgtctttagcagaagagataagtcagatgttaacatttgatacctgcatctat

SEQ ID NO: 17845 - DNA, 201 bp, Homo sapiens
agttggcttattcctttgcctttgaccacagctttgttggaggtcagcagcatcctaagagccagggagcaggccaggcacagtggctcacgcctgtaatyccagcactttgggaagccagggcaggtggatcacttgacgtcaggagttcaagaccagcctggccaacatggcgaaacctcatctctactaaaaatacaa

SEQ ID NO: 17846 - DNA, 201 bp, Homo sapiens
gcacttggtattttaaaaatttagccattatactagatgtataatttttttttaaggaaaaaactttatttcattcttcaataactgtaattactagtggwgtgtatgttgggtattgtacaacttctcaaaccttagaatcattatacaccatcagctcttttcctgtaccatacaattttcacatagcatttatttttt

SEQ ID NO: 17847 - DNA, 201 bp, Homo sapiens
tgaagtagagaatgctgttttctctagttacattcctttgtttcttcttacacttatttatagggtgaccatatgtcctagtttgcctgatacagtctggktttccaaagtctaatagtgccccttttcattcacagaattgtcctagtctaggtggtaaattaaatggcagtattacttacataacatttaatgtatgcc

SEQ ID NO: 17848 - DNA, 201 bp, Homo sapiens
actagaaacatagagcatcttcccctttaaagttgctggtagaagctggatcgggaattggttaggggagaggtagttgtagttagtttttttttttttttaaatttcagtagttttttggggaacaggtgtgtttggttacatgaataagttctttagtagtgatttatgagattttgatgcacccatcacccaagcaat

SEQ ID NO: 17849 - DNA, 201 bp, Homo sapiens
caaatacacaaagccaaagaaggcttgggaggccactgatagtatatataatattattattatagtacatataatagtatatattgtgtgagtgtgtgtgtatatgtatatttttaattgggaggtgccccaaagtgaagtgtactagtcttaaatgaaaataattacagaaattatttttattaaatatgctcctagcca

SEQ ID NO: 17850 - DNA, 201 bp, Homo sapiens
gaccatatgagtggggactggctctgtcacccaagcctgagtgcagtggcgcttccaactcaccttcccgagtaggtgagactacaggcacacaccatcaygcctggctgattttttcatttttttgtagaaaaatggagtttctgctgggcgcagtggctcacgcctgtaatcccagcactttgggaggccaaggcaggt

SEQ ID NO: 17851 - DNA, 201 bp, Homo sapiens
gtttctattattctacccatcttacatatgggaaagttgaagcacaaagaggtcaagtgacttggctaaaatcatgcagctgtatttgaatagtaagtggyagcaccaggattgagtgcaggctgtttgacaccagtgctcttacccacgccactcttgcccctatgctggtcccaaatatatctgtctgcctctgtagac

SEQ ID NO: 17852 - DNA, 201 bp, Homo sapiens
gcaaatacacaaagccaaagaaggcttgggaggccactgatagtatatataatattattattatagtacatataatagtatatattgtgtgagtgtgtgtgtatatgtatatttttaattgggaggtgccccaaagtgaagtgtactagtcttaaatgaaaataattacagaaattatttttattaaatatgctcctagcc

SEQ ID NO: 17853 - DNA, 201 bp, Homo sapiens
ggctttggaatttgaagggtttcctttgttttcacaaaatccttatagattctacatgtaccactaggccaatccgattatagtcttctttctcagaagaytgaatggtgaccttttttcatctttgtaatgccagctattcagcattccctctgagaccctccagtgatgaggtttcccagcatttggagagtatcaagt

SEQ ID NO: 17854 - DNA, 201 bp, Homo sapiens
gggcatggtagctcacgcctgtaatcccagcactttgggaggctgaggcaggcagatcacctgaggtcaggagttcgagaccagcctggccaacatggtgraaccccatctctactaaaaatacaaaaattagccaggcgtggtggcacacacctgtaatctcagctactcgggaggctgagacaggagaatcgcttgaag

SEQ ID NO: 17855 - DNA, 201 bp, Homo sapiens
tcaagtgattctcctgcctcagcttcctgagtagctgtgactacaggtgcacgccaccacgcaaggctaatttttgtatttttagttgagatggggtttcmccatgttggcaaggccggtctcgaacccctgacctcaggtgatccgcccacctcaacctcccgaagcgctgggattacaggcataagccaccgcacccgt

SEQ ID NO: 17856 - DNA, 201 bp, Homo sapiens
tcaccagtaatgtgttctagtttctcctcattctcatcaacacttactattttctgtctttttgattatagacatgctactggatgtaaatggtgtctcttggtggttttgatttgaatttccctaatgttgggcatctttttatgtgcttgttagcgatttctgtttcttctttgggaaagtatctgttctaattctttg

SEQ ID NO: 17857 - DNA, 201 bp, Homo sapiens
acagattttccaggcgcatggtgcaagctgtcagtgtatctaccattctggggtctggaagacggtggccctcttctcatagctccactaggcagtgcccmagtagggactctgtgtggggattccaaccccacatttcctttctgaactgccttagcagaggttctccatgagggccccgcccctgcagcaaacttctgc

SEQ ID NO: 17858 - DNA, 201 bp, Homo sapiens
aattcttgaactaatgagttgttaattaaggtaggttaaaaaaaaaccaggcatttttatatgaagatactttctgtatgaaatttgattaggcagtatarcatttaactagtaagtgtgaaaaattatttactaagaagcaaagaacaggatttaaaagaagtacaaccaacttccagttatagatgtctgaggagcctt

SEQ ID NO: 17859 - DNA, 201 bp, Homo sapiens
aggggaaaatgggggagttattaagtagtgggtatagaatttcagttttacaaggtaaaaatggagatggatggtggtgatggctatacaatgctatggaygtattcaataccactgaactgtacacttagaaatggttaagatggtaaatatgtatattttaccacaataaaaaagtaaaaaaataagtcataggaataa

SEQ ID NO: 17860 - DNA, 201 bp, Homo sapiens
gaagcatctgcaaagaacactaagaacgacctgtcagagaagtagggaggagaataggaaaagagcatgtcctggaccctagttatagaattatttctgcyccaaaaagtgtaacttttttaaaaaagaaagcctgaatgcaagcatttttcatctgtctggtttgtaccatcacaagacataatttccaaatagaataag

SEQ ID NO: 17861 - DNA, 201 bp, Homo sapiens
tttcactgcagtactttctgctaggttgtgctatgtctcagttgaattactactggaatttgtgtaattgtgtgtgttagataaacatctctctttttctrtatttgataggcaaaatgatgtctttatagtcttgtgggcaatattttacaaatggccttctggctgtgtatcactgctgctccatgccaaaactccttt

SEQ ID NO: 17862 - DNA, 201 bp, Homo sapiens
agttgtcagtatataagtgagtgtgaataagatcaccgagggagagggaagagaggaccagaaacctcatgggagaagcatctgcaaagaacactaagaaygacctgtcagagaagtagggaggagaataggaaaagagcatgtcctggaccctagttatagaattatttctgctccaaaaagtgtaacttttttaaaaaa

SEQ ID NO: 17863 - DNA, 201 bp, Homo sapiens
tcacctgaggtcaggagttcgagaccagcctggccaacatggcgaaaccacatctctactaaagtacaaaaatcagccaggtgtggtggcgggcgcctgtratcccagctactcaggaggctaaggcagagaattgcttgaacccgggaggtggaggttgcagtgagccaagatcatgcaactgcactccagccttggtga

SEQ ID NO: 17864 - DNA, 201 bp, Homo sapiens
aaatgagataagtataaaatacatgctagatttcaagttagtacaaaaattgaataaataaaatttctcagtaactttttatattgatgacatagtgagayaatattttaggtatattggagtaaatacttttttttttttttgagacagggtctggctctgtcatccaggctgtagtgcagtggtgcaatctcagcatac

SEQ ID NO: 17865 - DNA, 201 bp, Homo sapiens
gaacactaaaaaatatttgattaaccgaagagaaagcacaacaggaacaacagaggaacatagcaagagaaggagcaagtaggaaacaaatagcaaggtgrtagatataaacctagccaaagcaataatgacattaaatgtaattggtctaaaaacatcaagtaaaaggcacagagatcatattttcctgcctgtagtctt

SEQ ID NO: 17866 - DNA, 201 bp, Homo sapiens
aatatggtgaaaccccgtctctattaaaaatgcaaaaaaaaaaaaaattaattggacatggtggtgtgcacctgtaatcccatctactcaggaggctgagkcaggagaacgcttgaacccaggaggcagaggttgcggtgagccaagatcgtgccactgcactccaacctgggtgacagagtgagactctgtctctaaata

SEQ ID NO: 17867 - DNA, 201 bp, Homo sapiens
atcaccagtaatgtgttctagtttctcctcattctcatcaacacttactattttctgtctttttgattatagacatgctactggatgtaaatggtgtctcttggtggttttgatttgaatttccctaatgttgggcatctttttatgtgcttgttagcgatttctgtttcttctttgggaaagtatctgttctaattcttt

SEQ ID NO: 17868 - DNA, 201 bp, Homo sapiens
aaaaaaaaaaaattaattggacatggtggtgtgcacctgtaatcccatctactcaggaggctgagtcaggagaacgcttgaacccaggaggcagaggttgyggtgagccaagatcgtgccactgcactccaacctgggtgacagagtgagactctgtctctaaataaataaataaataaacaaaacagggaaaaagtagaa

SEQ ID NO: 17869 - DNA, 201 bp, Homo sapiens
gttgctcttgtcatccgggctggagtgcaatgacacgattttggcttactgcaacctccgcctcctgggttcaagcaattttcctgcctcagcctcccgartagctgaaattacaggtgcctaacaccacgcccaagtaatttttgtatttttggtagagacaggtttcactatgttggccaggctggtcttgaactcctg

SEQ ID NO: 17870 - DNA, 201 bp, Homo sapiens
ccacccatctcagcctcccaaagtgctgagattacaggcgtgagccacctcacccggcctttttttgtttgtttgtttgtttgttttgcaattttggctcrctgcaacccccgcctcccagattcaagcgattctcctgcctcagcctcctgagtagctgggattacaggcgtgtgccaccacacccagctaatttttgta

SEQ ID NO: 17871 - DNA, 201 bp, Homo sapiens
tgttggccaggctgttcttgatctcctgacctcatgatccacccatctcagcctcccaaagtgctgagattacaggcgtgagccacctcacccggcctttktttgtttgtttgtttgtttgttttgcaattttggctcgctgcaacccccgcctcccagattcaagcgattctcctgcctcagcctcctgagtagctggga

SEQ ID NO: 17872 - DNA, 201 bp, Homo sapiens
cttgaacctgggagatggaggttgcagtaagccgagatcccgccattgcacttcagcctgggtgataagagtgaaactctgtctcaaaaaaaaaaaaaaaagataaaagggatatattgacctgaacactttgtcactagggaatattcttctcatctatgttgattttttttttgagggggacttaaagtcagtgtcgcc

SEQ ID NO: 17873 - DNA, 201 bp, Homo sapiens
cagtagacctagcaccatttactaaaaagaccatcttttccctgccacactgcagtgtcacttttatcataaatctgatgttcaaatatatttgagtctcrttctgttcctttggtctgtttgtctattatgctgatacttctgacttcattattatggcattttaataggcctcgatatattgtagtaaatgaaatactg

SEQ ID NO: 17874 - DNA, 201 bp, Homo sapiens
gtagagacaggagtttcaccatgttgaccaggttggtcttgaactcctgaccacaagttttccaaccgccttggcctctcaaagtgctgggattataggcrtgaggcaccgcgcctggtcaaattttttgttatatttttattttctttcctatgtacttcctttcttttctctgcctgtttaccttttcagtctgatcac

SEQ ID NO: 17875 - DNA, 201 bp, Homo sapiens
gaatcctggaggtggagcttgctatgagctgagattgcactgctgcactcaagcctgggcaacagggcgagactatgtctcaaaaaaaaaaaaaaaaaaaagattgtttttagaaaataatttgtgtataattcatgataattttatgctatccttgatacatgaagatgcttcacactgtggtaaggaccagcttttaga

SEQ ID NO: 17876 - DNA, 201 bp, Homo sapiens
tatgttggccaggctggtctccactcctgacctcaggtgatctgcccacctctgcctcccaaagtgctgggattacaggtgtgagccaacgcgcctggctragaggctctttcaatattatgagattaatcctttgtaatgtgagttccagatattttcttcagttcattatttgacttttgattttgtttatgctatatt

SEQ ID NO: 17877 - DNA, 201 bp, Homo sapiens
taaaatgaaataataaaaagaaaacccattaaaaaaatacaccaaaggctgggtacggtggcttacgcctgtaatcccagcactttgggaggcggggggggtgtggatcacttgaggtcaggagttcgagtccaacctggccaacatggtgaaacactgtctctactaaaaatacaaaaattagccaggcgtggtggcagg

SEQ ID NO: 17878 - DNA, 201 bp, Homo sapiens
gcctgtggtcccagctactcaggaggttgaggcaggaaaattgcttgaacttgggaggcagaggttgcagtgagctgagatggtgccattgcactccagcmtgggcaacagagcaaaactacatctccaaacaaaacaaaacaaaactgagtgcctttaacagcacccaggtcacctcttgaatgctttgctgcttagaaa

SEQ ID NO: 17879 - DNA, 201 bp, Homo sapiens
attatgcttagttgtaatacatgtccttcacacattttatccggtttcctatcttcatgctacaaagcttagacctctaacaccttaaattaattgttcarttacaaaagcagattcaaaattcttctgtgagaaatgttttggatttatccataggcataattgctactcacctctgcaaaaggggagagccttccatgt

SEQ ID NO: 17880 - DNA, 201 bp, Homo sapiens
gtcttgaactcctaatcttgtgatccacctgcctcaccctcccaaagtgctgggattacaggcctgagccactgcactggcctttttttttttttttttttaaagtaaaacacaggatcagaaatctctttgttttgcatcatttgtgcaatatttgttttgtttgttttttccttaatgtcttgagagccagcaaagatt

SEQ ID NO: 17881 - DNA, 201 bp, Homo sapiens
gggatgtgaaggttaaggcatgaatggagggcttggccttagatagtaacatagttcaatcaagataatagaaggaagacagaataatatgtgtggctacratagcaagtagatggtacattgtggctgggcatgtgtggaggatctttactgattttctctggtggttttttgttgttgttgttgtttgacagagtcttg

SEQ ID NO: 17882 - DNA, 201 bp, Homo sapiens
atcaagataatagaaggaagacagaataatatgtgtggctacaatagcaagtagatggtacattgtggctgggcatgtgtggaggatctttactgattttstctggtggttttttgttgttgttgttgtttgacagagtcttgctctgttgcccaggctagagtgtagtggcgtgatcttggctcactgtagcctccgact

SEQ ID NO: 17883 - DNA, 201 bp, Homo sapiens
aagatgaatatgctacaggcaccaaatgtggcctgcaaagcttaaaatatttaccatctggccctttgtagaaggtttgctggttgtataatccatgatayagattcatagaacctattttttaatcaaaaaagtaacagaattaagtcattcatatttcaagtttgaattgacatcatccttctactaattttctttgtt

SEQ ID NO: 17884 - DNA, 201 bp, Homo sapiens
tccagcctgggcaacagagtgagactccatctcaaaaaaaaaaaaaaagcataatattagtaatcaggttttctccttccattgagtgtcttcacaatatrccttgcccaacagcgaggtgggtgacaccaatagcaagatatcccaatggtgcaaaaggaaagctaaccagaggccgggcatggtggctcacacctgtaa

SEQ ID NO: 17885 - DNA, 201 bp, Homo sapiens
ctcttatgtatgagtggacagcactgacgcatttaatctgtgctttgctgcagttcatcacagtggcttccaaaatagaaagcacccacccacttctgtakgcttattgaatataaggatcagctaactatggcctgtttgcatgccagattgggcccatggcctgtttttgtactgtgtggcagtttagaatttttcttt

SEQ ID NO: 17886 - DNA, 201 bp, Homo sapiens
ctcaggcaaatgcagtgttaccattgcattatataggtcatcattgtttccagccttcagtaacagttacttgctactcagtcgcaattgcaggtgtcacrtatgttacatgtttgttatggcaataacgtactcctattaccagtttctggactagcttttccgaagtaaggctgctgtaacaaccctcaaattgtagtg

SEQ ID NO: 17887 - DNA, 201 bp, Homo sapiens
ccctcccggctgctttcatgggctggcattgagtttctacagattttccaggcgcatggtgcaagctgtcagtgtatctaccattctggggtctggaagayggtggccctcttctcatagctccactaggcagtgcccaagtagggactctgtgtggggattccaaccccacatttcctttctgaactgccttagcagagg

SEQ ID NO: 17888 - DNA, 201 bp, Homo sapiens
acttaaaaaaatacaaaaattaaccgggcgtggtgacgggcgcctgtaatcccagctactttggaggctgaggtaggagaatcacttgaacccaggaggcrgaggttgaagtgagctgaggtcgcgccactgcactccagcctgggcaacagagtgagactccatctcaaaaaaaaaaaaaaagcataatattagtaatca

SEQ ID NO: 17889 - DNA, 201 bp, Homo sapiens
ctctttttaaaaacaacatctttattgggatattcagatatcttacaagttaccttttggaagtatacaactcagtggtttttagtatcctcacaggttaygtgcacccatcactacagtcaattttagaacattcattatccccaaaagaaccctgtacccattagcagttattatctttactttttaaatgcgggaaat

SEQ ID NO: 17890 - DNA, 201 bp, Homo sapiens
atattgatggtatccctttgattccattttgtaaggtaaattttcattcccactagttccatcatcttttctatgttttctttgtttctttgtttctttcwttttttctttttttaagatagagtctcactctgttgcccaggctggagcgcagtggtatgatcacagctcactgcagtcccgacctcctggactctaacg

SEQ ID NO: 17891 - DNA, 201 bp, Homo sapiens
agtagagacagggtttcaccatgttggccaggatggtctcgaactcctgacctcaggtgatcagcctgcctcggcctcccaaagtgctgggattacaggcrtgagccactgcacctggcctgcctggataatttttttaaaaatgttttgaagaggtaaggtctctccatgtttcccagtgtggtcttgaacttctgggtt

SEQ ID NO: 17892 - DNA, 201 bp, Homo sapiens
ttaaggtatttagaccaaaatttaagaaactttataagatcttattggctaaatattgacttaactatatatatatatatatatatatatatatatatttwtttttttttttttttttttttttgagatggagtctcactctgtcacgcaggttggagtgcagtggtgtgatcttggctcactgcaacctccgcttgctgg

SEQ ID NO: 17893 - DNA, 201 bp, Homo sapiens
gtttaaggtatttagaccaaaatttaagaaactttataagatcttattggctaaatattgacttaactatatatatatatatatatatatatatatatatwtttttttttttttttttttttttttgagatggagtctcactctgtcacgcaggttggagtgcagtggtgtgatcttggctcactgcaacctccgcttgct

SEQ ID NO: 17894 - DNA, 201 bp, Homo sapiens
atgggaaaagtgtcaagaatatcttcgaaaaatcaaccgtgatattgcccagctactgactcattcacgttcaataggtaccctcctaatctaactgcacrtttaacagaatgtactataatggcttaaaatggttacttattttaaattgtttgaatttttaaaggtatgtgtcccaggcaggaaagttgagaacgcttt

SEQ ID NO: 17895 - DNA, 201 bp, Homo sapiens
gctgaggcaggaggatcatttgagcccaggagttcaagaccagcgtgggcaacataatgagactctgatgctacaaaaaacttaaaaaaaaaaaaaaaaaattaaccaggcatggtggcacatgtctagctacttgggaggctgaggtgggagtattgcttgagcccaggaggtcaaggctgcagtgagtggtgattgtac

SEQ ID NO: 17896 - DNA, 201 bp, Homo sapiens
cacatcactgccctccagcctgggagacagagtgagactgtgcctcaaaaataaatacatagatagatagatagatagatagatagatagatagatagataaatggaaaccttgatttaagtagttgcttcagtagttcatttgggctttgtcagtcaataacacattttacttctgtagtaatgggttactgataaggga

SEQ ID NO: 17897 - DNA, 201 bp, Homo sapiens
tcacatcactgccctccagcctgggagacagagtgagactgtgcctcaaaaataaatacatagatagatagatagatagatagatagatagatagatagataaatggaaaccttgatttaagtagttgcttcagtagttcatttgggctttgtcagtcaataacacattttacttctgtagtaatgggttactgataaggg

SEQ ID NO: 17898 - DNA, 201 bp, Homo sapiens
atcacatcactgccctccagcctgggagacagagtgagactgtgcctcaaaaataaatacatagatagatagatagatagatagatagatagatagatagataaatggaaaccttgatttaagtagttgcttcagtagttcatttgggctttgtcagtcaataacacattttacttctgtagtaatgggttactgataagg

SEQ ID NO: 17899 - DNA, 201 bp, Homo sapiens
ttcctaggcaaaagattgaatggctatatgaaagaaatcagaacagccccatcactggctagaaatgtaggaaagttatcaaaattatttccttttccccmcaagaaaggcttctagcccttctgggtttaccaataatttttttttttttttttttttttgagacagagtcgcactctgttgcccaggctgggatgcagt

SEQ ID NO: 17900 - DNA, 201 bp, Homo sapiens
gatcacatcactgccctccagcctgggagacagagtgagactgtgcctcaaaaataaatacatagatagatagatagatagatagatagatagatagatagataaatggaaaccttgatttaagtagttgcttcagtagttcatttgggctttgtcagtcaataacacattttacttctgtagtaatgggttactgataag

SEQ ID NO: 17901 - DNA, 201 bp, Homo sapiens
cattcacctgaattactgcagtagccttctaatgagtcttcctccttcctcgctctcctgtaagtgtgcctataagacagatatgccacctttctactcaraatcaccaatggcctgtcatctcactcagaagaaaggctttattttttctgcttacatatacccctccctccccagtcttccaaaaacatctctgatctt

SEQ ID NO: 17902 - DNA, 201 bp, Homo sapiens
ttggcttccctgggccacactggaagaagaacagttgtcttgggccacatataaaatacactaacactaatgatagctgatggactaaaaaaaaaaaaaaattttcacaaaaaaagtctcataatgttttaaggaagtttgcgaatttgtgttgggccacattcaaagccatcctgggttgcgtgtggttcatgggccatg

SEQ ID NO: 17903 - DNA, 201 bp, Homo sapiens
gcggaggttgaagtgagctgaggtcgcgccactgcactccagcctgggcaacagagtgagactccatctcaaaaaaaaaaaaaaagcataatattagtaawcaggttttctccttccattgagtgtcttcacaatataccttgcccaacagcgaggtgggtgacaccaatagcaagatatcccaatggtgcaaaaggaaag

SEQ ID NO: 17904 - DNA, 201 bp, Homo sapiens
catcctaaagtatttgactgatgtctacagcaatcagtttcttaaggcattcacaacaggattcagttatgtaagagctcttctgccagtcagcctcaccytcattccatttctctcttgctgctttgaaagacctttttgtttttgctgtcctgcagttatatggtgatatatctaggtttggcttaaatctattgggat

SEQ ID NO: 17905 - DNA, 201 bp, Homo sapiens
caagcaatccacccgcctcggcctcccaaagtgttgggattactggcgtgagccactgcacagtgcacaaccagcttttttttttttttttttttttttttgagatggagtctcactctgttgcccaggctggagtgcagtagcgcaatcttggttcactgcaacctctgcctcctgggttcaagtgattctcctgcctca

SEQ ID NO: 17906 - DNA, 201 bp, Homo sapiens
accttatagttgggtaatccctaatgccagtatctttaggtcttccttcatggcctggtcatgtatatcagagaagatgcaactattccacctggaatatmaaggtctagtgaccagcatgatgccatgttttccctgaagcgtgtgtgtatgtgtgtgcatgtgtgtaggtgttgtgtgtgtgtgtgtgtgtgtttatag

SEQ ID NO: 17907 - DNA, 201 bp, Homo sapiens
attgaggtaacacctggctggtgataataaaattgtcatcaagtaaaaggattcttacttttgtataaaataggaatatgcatctatatgtccaaaacagktttttaaaattttactaatttatttatttttgagacagggtctcactccagtcacctgggctgcaatgcggtggtgcgatcttggctcactgcagccttg

SEQ ID NO: 17908 - DNA, 201 bp, Homo sapiens
ccaacctcaggtgatccacccacctcggccttccaaagttctgggattgtaggcatgagccactgcgcctggccacttgttaatgtttatgaagtaactcrtgcatatagtttaaagttgtatttctcaactatttctgtgcatcagaaactttcagagcccttttcgaaccacttgtagctgggtcccatccacctcctg

SEQ ID NO: 17909 - DNA, 201 bp, Homo sapiens
tttttagtagagatgggatttccccatgttggtcaggctggtctcgaactcccaacctcaggtgatccacccacctcggccttccaaagttctgggattgyaggcatgagccactgcgcctggccacttgttaatgtttatgaagtaactcgtgcatatagtttaaagttgtatttctcaactatttctgtgcatcagaaa

SEQ ID NO: 17910 - DNA, 201 bp, Homo sapiens
aggacttactgcaagaagtacatgaagagcaactggttaacctgctcactgttctgtctcaaaatgagacacattaacgggtaggctacaatgttcctggrcttctttcaaagtggaagcacttctgagctctttagcattgaagtgtcaaaagcaattcacatgggaagacaatttcttatatgtgctttgtgactgcca

SEQ ID NO: 17911 - DNA, 201 bp, Homo sapiens
gattaggaggtagaaggtttgaatttgaatcatagctctacagcttactggccataattcctaagtaacttcctgtatgtatgtttctttttgtatatgtrtgtgtgtgtgtgtgtgtgtgtgtgtgtgtacacacacacacacacacatactctggtggaagccatgcatttagggactggactaaggaaagagaagtta

SEQ ID NO: 17912 - DNA, 201 bp, Homo sapiens
taaaaatgatctaaacttccctgttaaagacaaagattatcagtatgcctcttagaaaaacccaataatatactgtttttaagagactcttcgaggccaaragcggtgactcacacctgttatcccaacactttgggtggctaagatgggaagattgcttgcggccaggagttcaagaccagcctgggaaacgtagcaaga

SEQ ID NO: 17913 - DNA, 201 bp, Homo sapiens
gagctagccacactgataggccttgttttgtggctttctcaatgatgctttaaaaggaaacagtttcatttgaattatttcttttctttttttgaggtagrgtcttgttggactgcagtggcgcaatcttggctcactgcagctttgacctcctgggctcaattgatcctcccacctcagctccccgagtagctagcacta

SEQ ID NO: 17914 - DNA, 201 bp, Homo sapiens
taaagcaagaaagatgttcaggaaagcaaaaacgcagtagcaggattaaaattcacatcaaagacaatagagtagaactgatacttagacaagatgctgcrcctcagggtgatgtgactgcagactgatcctaccagtacttcaaaacatttagctagtgatattcaggaagaactgcagatgatctctcagtatcctgag

SEQ ID NO: 17915 - DNA, 201 bp, Homo sapiens
gtaacttcagaagaggtagagggggaaagtgagtaacaaaatgatgatcattacaatgaaaggcaggaagggaaaataaactccaaaaagtataattagcrcaaaataataaaatagaaacaaatccgaatcatggtaagtaaaaatgatctaaacttccctgttaaagacaaagattatcagtatgcctcttagaaaaac

SEQ ID NO: 17916 - DNA, 201 bp, Homo sapiens
tagatgctaatagcttgcaggtcttttggctgttggtaatttgtctccaaccacctgggatttgatggttaccatattactgtatcagtttgctatggctrccataacaaggtgccatagactgagtagcttaaacaacagaaatgcattttctcacagttctggaggccggaagtccaagatcaaggtgtcagcaggttc

SEQ ID NO: 17917 - DNA, 201 bp, Homo sapiens
ctttgggaggctgaggtgtgtggatcacttgaggttaggaatttgagcccagcctgaccaacatggtgaaaccccatctctactaaaaatacaaaattagytgggcatggtggcacatgcctgtagtcccagctacttgagagtctgaggcaggagaattgcttgaacctgagcagcagaggttgcagtgagccgagatca

SEQ ID NO: 17918 - DNA, 201 bp, Homo sapiens
actgcttaaagaaaaagtaatttttctttctcctttgaggaaaagtttattcttttcttacctatcatgcatccactttattgtagacaaaacatgaaatstaggaaagcagaattgtgacggaatacatcatatgaccatatgagtggggactggctctgtcacccaagcctgagtgcagtggcgcttccaactcacctt

SEQ ID NO: 17919 - DNA, 201 bp, Homo sapiens
aaatgaatgatgtttcgcatataatggctcttgcatgtagttgcaataataatgaagtgagaataatgttagaaaaagctttgaatactgtcagaaaatgrtcaaaagcccaagtgcttgcagggttctggttgccatggtgactaagactgtcgaagcagaatggaatacttagtgagattatataaggcagcatctcga

SEQ ID NO: 17920 - DNA, 201 bp, Homo sapiens
gggattatagatttaaaggtaggaaggcatttaaaagcttgcatttaaatcccttgtgtaacttctggcacatgggctctcaaacttaaaacactgacatrgttataatagctcggaccccatttttttgagacagttttatggagctatatttatatacaataaaatttgcccattcaaagtttacagttgaaaagtttg

SEQ ID NO: 17921 - DNA, 201 bp, Homo sapiens
agaagaattctatatctgtcttggataaaaaatactatcagatgatataactaaggtttttttctatttttatttttacctcctgcatgaatgaacatatrttttcttacaggactgaatttgctcttaaagaaatcatgtcctctggaggtgctgaagatgatatcccacagggagagaggaaaacagttacagattttt

SEQ ID NO: 17922 - DNA, 201 bp, Homo sapiens
tttttttttgttttgcatttgactctgagctaagtgttccaactctttaaaggcaatgtttattgttacaacctcgatccagtgcccagaactatgcttcrtgagatcatcacaactctttaaattgtatatttacagtgtgtagtgatgctgacgaaatacacggtagtaaaccaaaaagaaacatttggaaagtcccct

SEQ ID NO: 17923 - DNA, 201 bp, Homo sapiens
agcctcctgagtagctgggactacaggtgcccaccaccacgcccggctaatttttgtatttttagtagagacaagctttctccatgttggccaggctggtsttgaactcctgacctcaggtgatccgtccacctcggcctcccaaagtgctgggattacaggtgtaagccactgcgcccgactgagatgatctgttttctt

SEQ ID NO: 17924 - DNA, 201 bp, Homo sapiens
tcatattcattactcactcaaagtctggaatgttcaaggccagccagagcctaagccaaagtaccagtgataattcttatgttttgcttaaacataaggtktgtatttgtttttctttgaaggatgaaaagctgccgtctgtaatcctagcactttgggaggctgaggcgggtgcatcacttgaggccaggaggtcgagac

SEQ ID NO: 17925 - DNA, 201 bp, Homo sapiens
tctacaaaaaaatacaaaaaattagccgagcatggtggtgtgcctggagacccagctactcaagaggttgagataggaggatggcttgagcctgggaagcrgaggttgcagtgagccatgatcacgccactgcacaccagcctgggcaacatagcgagaccctgtctccaaaaaaaaaaaatctagagattaaggcatgct

SEQ ID NO: 17926 - DNA, 201 bp, Homo sapiens
tgtaaccccagcactttgggattctgaggtgagagcgtagtttgagctcagactagcctgggcaacataatgagaacccgtctcaaaaaaaaaaaaaaaaattctgccctgggaccttctccccctcaattctaccaaactggttagaaatacaatctcagtgattaataatagagatccacccctccttagagttatgtg

SEQ ID NO: 17927 - DNA, 201 bp, Homo sapiens
ggataaaaaatactatcagatgatataactaaggtttttttctatttttatttttacctcctgcatgaatgaacatatgttttcttacaggactgaatttrctcttaaagaaatcatgtcctctggaggtgctgaagatgatatcccacagggagagaggaaaacagttacagatttttgttatcttctggataaatctaa

SEQ ID NO: 17928 - DNA, 201 bp, Homo sapiens
gtttttaatgagaaaagagaactgggtaactgatgtattatttctggagtattttctttgctatatatgttttatataggtctggatgttttatgagtatrtaagtgttttgtaaatgtttcttcatttaaacagtttcatgtacatttcttcatttaaatattactcgttaatttttttttttttttttttttttttttg

SEQ ID NO: 17929 - DNA, 201 bp, Homo sapiens
tgaactcctgacctcaggtgatagacctgcctcagactcccaaaatgctgggattacaggcgtgagccactgtgcccggcctgaattcaattatttatttwttttttttgagacggagtttcgctctgtcgcccaggctggagtgcagtggcacaatctcggctcactgcaagctctgcctcctgggttcatgctattctc

SEQ ID NO: 17930 - DNA, 201 bp, Homo sapiens
agtggctcatgcctgtaatcccagcactttgggaggctgaggcgggcggatcacttggggtcaggagttcaaaaccagcctggccaacgtggtgaaatccygtctctactggaaattaaaaaattagctgggaggggtggtgtgcacctgtagtcccagctacttgggaggctgaggcaggagaatcgcttgaacccggga

SEQ ID NO: 17931 - DNA, 201 bp, Homo sapiens
aggcaggagaatcgcttgaacccaggaggtggaggttgcagtgagccgagatagcattacggcactccaccctgggcaacagagcaagactccatctcaamaaaaaaaaagaaaagaaaagaaaaactgcagcatagaagtgatgtgaactttcattaaagcttctcttttttatgttaggaacccatagtaatcggtatc

SEQ ID NO: 17932 - DNA, 201 bp, Homo sapiens
cgtccagaacataccaatcttcagaaatgaaaagggaggccaggcgtgcagtggctcatgcctgtaatcccagcactttgggaggctgaggcgggcggatyacttggggtcaggagttcaaaaccagcctggccaacgtggtgaaatcccgtctctactggaaattaaaaaattagctgggaggggtggtgtgcacctgta

SEQ ID NO: 17933 - DNA, 201 bp, Homo sapiens
cacctcctgggctcaagccacccagccaattcagcctctggagtagctgggactacaagcgcctgacacctcacccagctcttttttttttttttttttttgtagagacaaggtttggccatgttgcccaggctggtctcaaactcctgggctcaaatgatccaaccaccttggcctactaaagtgctgtgattacaagtg

SEQ ID NO: 17934 - DNA, 201 bp, Homo sapiens
atgttgggattacaggcgtgttccaccgtacccagccagcagtgtactttcttaaattgtatatttgttttgtttttgtgggaaatggaagaatgtgagargctgctgaatgaaaaggtttattggctaccccaattaaacttataaagccagaggggtccaggcattttgtgtcttcacagaattcaaaagaagtactct

SEQ ID NO: 17935 - DNA, 201 bp, Homo sapiens
agaaattaaaaaatgcttattcctccacttggttgcttgactggtgaacaaaagtgaaacctttttttttttgttttgcatttgactctgagctaagtgttccaactctttaaaggcaatgtttattgttacaacctcgatccagtgcccagaactatgcttcatgagatcatcacaactctttaaattgtatatttacag

SEQ ID NO: 17936 - DNA, 201 bp, Homo sapiens
tttgtttttctctcagtgctatgatgcaaaggagatatgagcagaccaaactgaagaataagatttctgagatgtggctgacacagtttaacagttcttcrttgttgttttcccagccttcatcccggggatctctatcctttcaccaggaagccactgttcatcattgtggattcgtctaatagtgttgcgtataaggtg

SEQ ID NO: 17937 - DNA, 201 bp, Homo sapiens
ttctcaaaaaaaatgtgtttgatatttatttaaacgttaagttataggcaaccatgtatcctggaaaatagtcaggagtatatatattttactgtcatagratgtggtccatgcaatactttaagtgaataaggccagttgcatagtttatatcatataatttcattttcgtttaagagaaccacatgtttgattatgcaa

SEQ ID NO: 17938 - DNA, 201 bp, Homo sapiens
taagaaattaaaaaatgcttattcctccacttggttgcttgactggtgaacaaaagtgaaacctttttttttttgttttgcatttgactctgagctaagtgttccaactctttaaaggcaatgtttattgttacaacctcgatccagtgcccagaactatgcttcatgagatcatcacaactctttaaattgtatatttac

SEQ ID NO: 17939 - DNA, 201 bp, Homo sapiens
agttctttttcttttttcttttcttttcttttttttttttttttgagacagagttttactctgccgcccaggctggagtgcagtggcactatcttggctcmctgcaacctctgccttccgggttcaagcgattctcctgcctcagcctcccaagtagctgggattatagtcatgcatcaccacacccagctaatttttgta

SEQ ID NO: 17940 - DNA, 201 bp, Homo sapiens
caccatgttggccaggctggtgtcaaacttctgacctcaagtgatctgcccacctcggtctcccaaagtgctgggattacaggcgtgagccaccgcgcccrgctaattttttaacttttaacaaattttgcattgtttctttttggtattcctagaagtaattgtatacgtaatataatctttcttttctcattgatgagt

SEQ ID NO: 17941 - DNA, 201 bp, Homo sapiens
ggttgggttattgttttacaagagattggcttcacacagatttaatagaaaagaaatgactccaaaacaaggcttagctaataacatttattctttagccygtgtaatcttaattcatatctcttcaaaagcctggtgacaactgtcatgtaggaccagggaatagtctgttaatgctgtttgaattttctctctcttttt

SEQ ID NO: 17942 - DNA, 201 bp, Homo sapiens
ccaataaataagggctatgtactatatgtactatatagagttatcatgtggtggaagatacttgcaagtcatagatttatgggcaggaggatttgttactscctatatctaggctgaatgtaaaatcccttatgttgtatcaatgggggtaaaaactatttttatttgcctatgatatacttggtttctaataaagtgccc

SEQ ID NO: 17943 - DNA, 201 bp, Homo sapiens
atatgtagctatgtattttactaattgtgaaacactggaaattaatgatgcagacaacttggtgtggtctttgaacagctctctgcagtatttttttttttcctgttaccataaattgtatttaagtgcttgctttccacttaagttgtactaatagaaccggtaactcccagccctccctgtttgacactccttagctta

SEQ ID NO: 17944 - DNA, 201 bp, Homo sapiens
gttagcgtaaagttatcttttcttttttcctaatcagagttcttgaccctttggttattgagtttaaaacttcaattgaaattcaatagtatttatttttkaaaaaaatcactaaactgtgcctaaagaacataactgccatattaatgttttggtttatatcctctatagtaatagaaaaacatttaatacttgtaatgc

SEQ ID NO: 17945 - DNA, 201 bp, Homo sapiens
tttaagatgtcatgaactttaaataaaaccatgttgtttatccttgtttgttgttttgtgtatgtgattttctttcatttcaggagctgcctgccaatagygtgcttctgatttacctgtcggccactggcgttttccccacaggtcgttctgatagtgaaggtacaataaaggaatgctccctgttgtgagcagggcttg

SEQ ID NO: 17946 - DNA, 201 bp, Homo sapiens
aattacttcttctatttaagcatatgaaactaactttttttcttttaagagaccggggatgggggtgtgcatctcactatgttgccccttctttaatcccygcctcttggctggtctccagctcctggcctcaaatgatcctcccaccttggccctccaaagtgctgggattacaggtgtgagctgccacacctagacttt

SEQ ID NO: 17947 - DNA, 201 bp, Homo sapiens
aatttgtaaactcttttatcctctctactagaatatcaactagtgggtagattctgtatttactaaaacttcctatcatctgagtcttaaggcctataaayagatatttgaattaaattaaagcatgcttggggccagacatggtggctcatgcctgtaatcccagcactttgggaggccgaggcgggtgggtcacttgag

SEQ ID NO: 17948 - DNA, 201 bp, Homo sapiens
gcttgatcctatgtctttttgacattctttagcattccttgagcactttcttgcttactaccacaagatattccagattgatcctgtactttttctacccstgtgctgtaattagtgaattacaattctccagagatgtctggttccttttattggagaatggtattaggggccaagtgttaggtgctagaaacgttcata

SEQ ID NO: 17949 - DNA, 201 bp, Homo sapiens
tttacagcagaaggatccaggggagaatcaggcattatacctcagttttcccttgtctttgaaggaaagtacttgacatttttgaagattacaggttggtyattttgtagaatgtcccccaacttggttttgtctgtttcctcatgattagactcaggctacagaactttgacaggaacagtacttctcatcgcatgggac

SEQ ID NO: 17950 - DNA, 201 bp, Homo sapiens
actatgctggtttcagtgcatgttcaactgctataattagtgtagttttaatgtgctcattttgctgcattaggtttgtattttgttactgtattttactrtgtttgtattttgttcaccaattcatcattggtggttgaacatttttcttattaacattgaaatttactcctgtctagtccttagaccccattcaggcct

SEQ ID NO: 17951 - DNA, 201 bp, Homo sapiens
ctcacgcctgtaatcccagcactttgggaggccgaggcaggcggatcacgaggtcaggagatcgagaccatcctggctaacagtgaaaccccgtatctacyaaaaatacaaaaaattagccgggcgcggtggcaggcacctgtagtcccagctactcatgaggctgaggcaggagaatggtgtgaacccgggagtcagagt

SEQ ID NO: 17952 - DNA, 201 bp, Homo sapiens
tattgtgcaaatatcatagagtgtacttacacaaactagatggtataggcttcctacatacctaggcttcacggtatagcctgttgctcctgggctgcaawcctgtacagcatggtactgtactgaatactgttagcaattatacaatgttaagtacttgtatatccaaacatatctaaacatagaaatggtgcagtaaaa

SEQ ID NO: 17953 - DNA, 201 bp, Homo sapiens
aaaaaaaatttttttaaatgcaaaaaatacaaaagcaaatagaatttcatctacaaaagttctttttcttttttcttttcttttcttttttttttttttttgagacagagttttactctgccgcccaggctggagtgcagtggcactatcttggctcactgcaacctctgccttccgggttcaagcgattctcctgcctca

SEQ ID NO: 17954 - DNA, 201 bp, Homo sapiens
gggcagatcacctgaggttgggagttcgagaccaacctgaccaacatggagaaaccctgtctctactaaaaatacaaaaattagccaggcgtggtggcgcwtgcctgtaatcccagctactagggtggctgaggcaggaaaatctcttgaacccagcaggcggaagttgtggtgagccaagattgtgccattgcactccag

SEQ ID NO: 17955 - DNA, 201 bp, Homo sapiens
gagcctgggaggtcaaggctaccctgagtcatgatcatgccactgctctccatcctgggtgaaagaatgagaaaccctttcttaaaaaaaaaaaaaaaaaatacagttgaccttgtgtcctgcagtcttgctaaattttgttagttcttttagcttttttacatgttccttaaaattttctatatacaagatcatgtcatc

SEQ ID NO: 17956 - DNA, 201 bp, Homo sapiens
tgggaggcagaggcgggcggatcacaaggtcaggagttggagaccagcctggccaaggtggtgaaacctcatctttactaaaaatacaaaaaaaaaaaaaattagccgggtgtggtggcgtatgcctgtagtcccagctacttgggaggctgaggcaagagaatcacttgaacctgggaggcggaggttgcaatgagccga

SEQ ID NO: 17957 - DNA, 201 bp, Homo sapiens
attattgataaataaatgaccgtgtagtttatgtttttattgtgtgtatatgtcaagaagaaggaatagcttactctattgatatttagtcttggccattygttaagttcttattgcttttttctttaggcggatcctgtaatggtattaaatgatgataataccattgttatcacatcgaatcgccttgctgaaacagga

SEQ ID NO: 17958 - DNA, 201 bp, Homo sapiens
cacactctatgaccaagcatttccagtattttcttattgatctgtaagagttctgaatatattctacatgaaagtcctttgtcagatttatgtgttgaacyatcttctcctactcttgtcttgccttttactctcttctgatatcttctgtctctttttctccttttctttaaacatctgttaaaatatttattagtatct

SEQ ID NO: 17959 - DNA, 201 bp, Homo sapiens
tcatatgattttttttctttctctttttttccttctaatgtgttgaattaatttgattgattttttttttaaatgttaaaccaaccttaaatttctggaayaaacccaacttagtcacgatccttttttaacatattgctgaattcaatttactcatatgtgttttaagatttttacatctatattttgtacatacactgc

SEQ ID NO: 17960 - DNA, 201 bp, Homo sapiens
aaatgtaattggtctaaaaacatcaagtaaaaggcacagagatcatattttcctgcctgtagtcttccacgcttcgttgtattcttaacttaaacatttaytactttctttaggaagccttttctcacccaagatctagtcctgtgggcacaaatagcattctttatttctcctatcattatattattccgttgtgttgta

SEQ ID NO: 17961 - DNA, 201 bp, Homo sapiens
tttttaaatgtaattgttttttaaatgctaatgtttgtaaagcaccttcagttcttcggatgaaaggtgctatattccctcagtgtaaattaataaaaagrttacaggaagtttgtcaaaaaattcaatgcatagtctgtagtatgtcctgacaagaagttagcattttatataagaaattaaaaaatgcttattcctcca

SEQ ID NO: 17962 - DNA, 201 bp, Homo sapiens
ggagtgcaatggtgcaatctcggctcactgcaacctccgcctcccaggttcaagcgattctcctgcctcagcctcctgagtagacaggcatgtgccaccaygctcggctaattgttttttctgatagagatgggatttcacgatgttggccaggctggtctcgaactcctgacctcaggttatccgcccaccttggtctcc

SEQ ID NO: 17963 - DNA, 201 bp, Homo sapiens
aaaattatttaaaatattatgtaaagttacctttaggttatgtgtatacggtacatatgaaacattaataaacttcgtgtttagacttgggacctgtcccsaggacatctcattatgtatatgcaaatattgcaaatcccaaaaaacccaaaatccaaacacttgtggccccaagcattttggataagggatactcaactt

SEQ ID NO: 17964 - DNA, 201 bp, Homo sapiens
aatgatctaaacttccctgttaaagacaaagattatcagtatgcctcttagaaaaacccaataatatactgtttttaagagactcttcgaggccaagagcrgtgactcacacctgttatcccaacactttgggtggctaagatgggaagattgcttgcggccaggagttcaagaccagcctgggaaacgtagcaagacccg

SEQ ID NO: 17965 - DNA, 201 bp, Homo sapiens
tatccctttttctgttctacttcttattttttaaataaaaaagtttgtgtgtatatattcttttcccctcgtttattcattctagattttgctttctgtcwtccttcctctgctcaaatacaagccctgtgagggcagggatatttctttgttgataaagcacagaaaatagtggaacatagtagatgttcaacaaattct

SEQ ID NO: 17966 - DNA, 201 bp, Homo sapiens
ctttacccttgctctatatttttttcctatatctctaagtttctttttttgattattttccttttgcttaaaggacactcttccttttgttctgctggtgrtgaattccatatatatttttttcttttcttttcttttcttcgtttcatttctttcattttgagctgggtcttgctctgttgcctccagtggtgtgcagtg

SEQ ID NO: 17967 - DNA, 201 bp, Homo sapiens
ataaactggtaaaaacctagagtttttatttgtaataaaattttacttgtaataaaaaatttaaacatcttaaaataaattcagtgactgtttcatgttayagtctatcctatattcctggtatccctttttctgttctacttcttattttttaaataaaaaagtttgtgtgtatatattcttttcccctcgtttattcat

SEQ ID NO: 17968 - DNA, 201 bp, Homo sapiens
tggctcactgcaaccttcacttcctgagtggctgggattacaggtgtgtgccaccatgcctatctaatttttgtatttttaatagagatgctgttttgccrtgttggccaggctggtctcgaacacccaatccaagtgatccgcccacctcagcctcccaaagtgctgggattacaggcgtgagctactgcgctgggccta

SEQ ID NO: 17969 - DNA, 201 bp, Homo sapiens
cttctaaaactgaggtagtgtaattttatcaggcattcctctataatgattgaggtaatcaggtaaaaggagttgttttcagtaacctaggtacgtttttrcttttcagtatgaaagaatataagactaataagaatgaaaattttgtttctaggtagtttatgctattgcatgtgtcttatatgcaagatttaaaggctg

SEQ ID NO: 17970 - DNA, 201 bp, Homo sapiens
tgtcactagggaatattcttctcatctatgttgattttttttttgagggggacttaaagtcagtgtcgcctgataatagcgtagctacacttcttcccttytggttgatgtttcaagatatgtattttccatactttgacttacaaccttttcaatcttttactcatgtatcagttttttttcttaaatccaatctgatgg

SEQ ID NO: 17971 - DNA, 201 bp, Homo sapiens
agtgtaatagatgctgccaagttaaattgtcttctaaagtgtttatatcaatttatactcctattacctacatatgagtatttccccacattcttgccaamagtgtatattctcaaacttttagaaattttgcttaactgatagggtaaaaatggaattttgagatggagtctcgctctgtcatccaggctggagtgcagt

SEQ ID NO: 17972 - DNA, 201 bp, Homo sapiens
caccatgttggccaggctggtctcgaactcctgacctcaggtgatctacccacctcagcctcccaaagtgctggaattacaggcgtgagccaaagttcctyaggcttctaaaactgaggtagtgtaattttatcaggcattcctctataatgattgaggtaatcaggtaaaaggagttgttttcagtaacctaggtacgtt

SEQ ID NO: 17973 - DNA, 201 bp, Homo sapiens
caggtagcaggcactaaaccaaatggaaggaggagtccaagagaggataacttttttcgcagagtgctagtgcttattaggggataaggtttatatattamctcattagaagatgggggcattattcacatttagaaagagaaactgagacttaggaaattaaagtgattgacccaaagtaacacagctaggaagtggcac

SEQ ID NO: 17974 - DNA, 201 bp, Homo sapiens
gccactaagttatgtagcaggggataactggattagcattccattttgccggagtttagagatcatactatacgttgaactgtaagaacaagaacaagatrtatttctaccttcaggagcactgttagttttataagagaagaaatatggattatgtgtccccttcctttatagattgttatttcactgtctttcatttta

SEQ ID NO: 17975 - DNA, 201 bp, Homo sapiens
tgatcccgggaggcggaggttgtggtgagccgaggtcgtgccattgcactccggcctgggcaacagagtgagactccgtctttttaaaaaaaaaaaaaaaattgtattatttggccaggcgcggtacctcacacctctaatctcagcactttgggaggcagaggcgggcggatcacaaggtcaggagttggagaccagcct

SEQ ID NO: 17976 - DNA, 201 bp, Homo sapiens
atttgaaatactgggataactcgggatcagacaaccctatttcacaatatttgtgtttttatcttaggatgcatactatgagggtcctttgggaagaagarcatgactttggggttttttttctaactgtgtaattctggagaaataacttacttaagcctgttttttcatctctaaattctggtgacagtgcctacctta

SEQ ID NO: 17977 - DNA, 201 bp, Homo sapiens
ttgttttgaatttttttggtcatagtattggtatgtgtttagttttataagaaattgcagtgattcctcagggatctagaactagaaataccgtttgaccyagcaatcccattactgggtatatacccaaaggattataaatcatgctgctataaagacacatgcacatatatgtttattgcggcactattcacagtagca

SEQ ID NO: 17978 - DNA, 201 bp, Homo sapiens
ccctgcattgttcaggggtcagctatatttgagttctgacatatttgtccatttatggattcgtcttaccattcatcagtagatcttttttttttttttttgagatggagtcttgctctgttgcctaggctggagtacaatggcgtgatcactgctcactgcaacttctgcctcctgggttcaagcaattctcctgcctca

SEQ ID NO: 17979 - DNA, 201 bp, Homo sapiens
ggaaaaaaaaaaaaaaaaactgccacaaaggacatttattagttaaatttcaggtagttaaaagttatacatggatttttcagggagttgaaagttatacwtggatttttaactgtgttagggagggggctcagcatccctaacccctgcattgttcaggggtcagctatatttgagttctgacatatttgtccatttatg

SEQ ID NO: 17980 - DNA, 201 bp, Homo sapiens
tctactaaaaatacaaaaattagctgggcgtcgtggcgtgagcctgtagtctcagctactcgggaggctgagacaggagaactgcttgaacccagaaggtsgaggttgcagtgagctgagatcacaccactgcactccagcctgggcgacagagcaagactccatccccccccgcaaaaaaaaaaaaaaaaaaaagacata

SEQ ID NO: 17981 - DNA, 201 bp, Homo sapiens
ttcatgtacaaaattatttaaaatattatgtaaagttacctttaggttatgtgtatacggtacatatgaaacattaataaacttcgtgtttagacttgggacctgtccccaggacatctcattatgtatatgcaaatattgcaaatcccaaaaaacccaaaatccaaacacttgtggccccaagcattttggataagggat

SEQ ID NO: 17982 - DNA, 201 bp, Homo sapiens
tttttggctatcaagaataatagtcctgtgaacatttgtatacaagtttttatgtgagcgtaggttttccttttttttgagacagagtgttgctcttgtcrtccgggctggagtgcaatgacacgattttggcttactgcaacctccgcctcctgggttcaagcaattttcctgcctcagcctcccgagtagctgaaatta

SEQ ID NO: 17983 - DNA, 201 bp, Homo sapiens
aatttgcatgtgctgtggccatgagataagacagcttagggagcatgtagagaaatttattttattgtatttttttgagatggagtcttgcactgtcgcccaggctagatgcagtggcgcagtctcagctcactacaacctctgcctcccaagttcaagcgattctccttgcctcagcgtcccgagaagctgggattacag

SEQ ID NO: 17984 - DNA, 201 bp, Homo sapiens
ctgagaatttgcatgtgctgtggccatgagataagacagcttagggagcatgtagagaaatttattttattgtatttttttgagatggagtcttgcactgtcgcccaggctagatgcagtggcgcagtctcagctcactacaacctctgcctcccaagttcaagcgattctccttgcctcagcgtcccgagaagctgggat

SEQ ID NO: 17985 - DNA, 201 bp, Homo sapiens
ttttgagatgaagttttgctcttgtcccccaggctggagtgtgatggtgcgatcttgctcactgcaacctccgcctcctgggttcaagtgattctcctgcytccaagcgattctcctgcctccaagcgattctcctgcctcggcacccaccgcccccctaccccgagtagctgggattacaggtgcctgtcaccatgcccg

SEQ ID NO: 17986 - DNA, 201 bp, Homo sapiens
caaaactagctgatcagtaagcacttctgagatctaaagcctatagttttctcattagccaagagttacttcatttattcaatttttttttttttttttttgagatggggtctcactctgtcactcaggctggagtacagttgtgtgatcatagctcacttcagcctctacctcctgggctcaggtgatcctcccacttca

SEQ ID NO: 17987 - DNA, 201 bp, Homo sapiens
gtctcactattttgcccaggctggtctcaaactcctgggctcaggtgattctcccacctcccaaagagctgggattacagtcgtgagccactgtgccgggsctcactgaggtgtaaagtatgtttcaatatctgatgagtctagttccccctctgctctttttcagagttctcttggggaatccagtttttccatatgaac

SEQ ID NO: 17988 - DNA, 201 bp, Homo sapiens
tattcactttgaaagctgtttttaggaggtcggtgatgtgaatggtatttagaattttagctttttaattatacccattttggaaggctaaacttagtgartgacaggtcattaaaaaagcaaaaaagaaacggcattgttccaggaaaggttcttggttgaaaattacagaccttaattccagccaacttaagcagaaaa

SEQ ID NO: 17989 - DNA, 201 bp, Homo sapiens
aaggttgcagtgagctgtgattgtgccactacattccagcctgggtgacagagtgagaccctgtctttctcttaaaacaaaacaaacaaacactgcccccsccaaccccaaaccaaaaaaaaacccagctagattactgcctcaaacttaatgtgcacacaagccatcttgaaagcttgttgaaatgcaaattctgatttt

SEQ ID NO: 17990 - DNA, 201 bp, Homo sapiens
agcctgggtgacagtgagaccctgtctcaaaaaaaacaaaacaaaacaaaacagttgagaccattctattgacgtatcaacaaaaactttttaaatgaaamattttaaatttacagaaaattaaatagaataattaatccccacattctcatcacctaacttcaacaatcatgaattgatggccagttatatactttacgt

SEQ ID NO: 17991 - DNA, 201 bp, Homo sapiens
tgttatgaatattgtctaatggaatcttcataatacctttatgaggggtaaataatataaactctgttttggagttgaagaaatcccaaagctgagaaaakttaaaaacatgcccaaagtaaaatagctagtaattcaagtcattccttgagaggtagatctgataaccaaaatcaatttctaaaaattgttttagtgatt

SEQ ID NO: 17992 - DNA, 201 bp, Homo sapiens
actgtctctactaaaaatacaaaaattagccaggcgtggtggcaggtgcctataatcccagctacttgggaggccgaggcacgagaatagcttgaacttargaggcagaggttgtagtgagccaagattgcaccactaaactccggcctgggcgacagagcaagactccatctcaaaaataaataaataaataaataaatg

SEQ ID NO: 17993 - DNA, 201 bp, Homo sapiens
attcttttgggtctcataatatttttttcaaagagtgatttttaatcactgggtaggggaaagcctgaaaatacgtttacttatgttttaaggaaaaggaraggtaggatctatgggatttgaaatactgggataactcgggatcagacaaccctatttcacaatatttgtgtttttatcttaggatgcatactatgaggg

SEQ ID NO: 17994 - DNA, 201 bp, Homo sapiens
tgagccgagattgcaccactgcactccagcctggtgacagagcaagactgtctcagaaaaaaaaaaaaaagactatctactatcccctgtctcttgccctytttagttttcccttctggcactggcattgaaacaaattcatgcagatctgtatgccttaagcagtgaaagtaatttgttcttttgccctgaacacgtcat

SEQ ID NO: 17995 - DNA, 201 bp, Homo sapiens
tcctttggcttccttttcttaaactctctgtcctcatggtattattcagtttctttatacattgatcaacaagaagtttggtacctatgcatttctctttkcattattattataacatgtaactttttttctttgagttagagtctcattttgtcacccaggctgtagtgcagtggcacagtcatgttcattgcagcctag

SEQ ID NO: 17996 - DNA, 201 bp, Homo sapiens
gcggaggttgttgtgagcggagatcgtgccactgtactccagcctggtcaacaggagcgaaactccatctcgaaaaaaaaaaaaaaaaaattagctggacrtggtggtgcatgcctataatcccagctacttgggagcctgaggcaggagaattgcttaaacctgggagcagaggttgcagtgagccgggagatcatgcca

SEQ ID NO: 17997 - DNA, 201 bp, Homo sapiens
attgtatactgtcagtagatgaagtttcttatttatcccccttttaaaagaatataaccacatgcatgatttttcttttgaggacttcaaattactacctstacagtcgattttttttttcttggtatctaagataatgtgggaaatcttgagaaatcctacttttttactttttgatgttgtgtaaggatctcagctatt

SEQ ID NO: 17998 - DNA, 201 bp, Homo sapiens
acagttttgacatgtttttctcaagaacactttgtggttgactgttgtaagctttccaactaaacagtgacattttggggaaagccccactcttgtaaatmtccttaatttccttgcatgtcttgttcagacttgtctaggggcgtttgcatggcacatgtaaggggtgcagatgctggagtgtacatttttcatatcttt

SEQ ID NO: 17999 - DNA, 201 bp, Homo sapiens
tgtaatcccagctactcgggaggctgaggaaggagaattgcctgaacccaggaggcggaggttgcagtgagcagagatcatgccgctgcactccagcctgkgcaacagagcaatactcagtcttggaaaaaaaaaaatgatgttactgtgaaattcttgtatcagtttcctggtacacatatgtaagattttctctgagga

SEQ ID NO: 18000 - DNA, 201 bp, Homo sapiens
aagcaagctgtttttctattgaggtaacacctggctggtgataataaaattgtcatcaagtaaaaggattcttacttttgtataaaataggaatatgcatstatatgtccaaaacaggtttttaaaattttactaatttatttatttttgagacagggtctcactccagtcacctgggctgcaatgcggtggtgcgatctt

SEQ ID NO: 18001 - DNA, 201 bp, Homo sapiens
acattcagtcttaatcttcgtagaaattgtgtggaaaagcatacatttttataacgtgtactcgtttaccaggctttattgagtgcctgctatgtaatagmccttcgaaagcatagagaagtttatgttacctaagcaataaatatcaaagatgtttaacagatgtcacaatgccaaaggagggttgggttattgttttac

SEQ ID NO: 18002 - DNA, 201 bp, Homo sapiens
gatggaagtgtttaagtgcagtaggtcagtgccagtgagaaaaaaaataaaatcatacaaaaaaagaaatattgaataaattaagaaaaaggtatatcatraatacataaaatatatgtagacactagtctattttatcatttactactataagatatatacaaatctattatgaatgattaaaatttatgcacacactta

SEQ ID NO: 18003 - DNA, 201 bp, Homo sapiens
gcccaggctggagtgcagtggcgtgatctcggctcactgcaacctctgcctctcgggttcaagcgattctcctgcctcagcctcccaagtagctgagattmcaggtgcccgccaccatgcccggctaattttttgtatttttagtagagacggggtttcacgtgttagctaggatgttctcgatctcctgacctcgtgatc

SEQ ID NO: 18004 - DNA, 201 bp, Homo sapiens
ggcatgtgtgcctgtttgacagtgtcctggaaattcttttctagacggggagtgcatgttgaaggtgctcacacgtggtttcctaaaatcctgcaaagtgrcagttaggacttttgtttgtttgtttgtttctttgtttctttgagacggagtctcactctcgcccaggctggagtgcagtggcgtgatctcggctcactg

SEQ ID NO: 18005 - DNA, 201 bp, Homo sapiens
tgggccactgagtgcccagacatttggtcaaacattatcttaggtgtgtctgtgaggatgtttctggatgaaattaatatttgaagtgattgagtaaaacrgatacccttccgagtctgggtgagcctcatccaatcatttgaagacctggctagaacaaaaagactgagcaagagggagcttctcctgcctgactccttg

SEQ ID NO: 18006 - DNA, 201 bp, Homo sapiens
gcctcaagtgctctgtctgactaggcctcccaaagtgctgggattacaggtgtgagccaccgggcctggccttcacttacttctttttcctttttattttycttctgagacagggcttggctctgttgtcaaggctgaagtgaagtggtgcaatcacagctcactgcagcctcgacctggtaatccttccacctcagcctc

SEQ ID NO: 18007 - DNA, 201 bp, Homo sapiens
caggctgtagtgcagtggtgcaatctcagcatactgcaacctccacctcctgggctcaagccacccagccaattcagcctctggagtagctgggactacargcgcctgacacctcacccagctcttttttttttttttttttttgtagagacaaggtttggccatgttgcccaggctggtctcaaactcctgggctcaaat

SEQ ID NO: 18008 - DNA, 201 bp, Homo sapiens
gccttgtggctgggtatgctggctcactcctttaatgccagcactttgggaagctgaggcaggcagatcacttgatcccaggagttggagaccagctgggyaacatggtgaaaccctgtctctacaaaaaatacaaaaaattacttgggctgtggtggcacatgcccatagccccagttacctgggaggccgaggtaacag

SEQ ID NO: 18009 - DNA, 201 bp, Homo sapiens
cagggtgagcactcaaaatgcatctagcatgactgaggaactaaatttttaattttatttaattgtaattaaattaacttgagaaactgctacttgatcasctattggaaaacgttcaagtatgttttgaacaacttgggtatgtgagtctgtatttttcatccgtcattttatgaaatctaagtatatatcaaatatttc

SEQ ID NO: 18010 - DNA, 201 bp, Homo sapiens
ataaataaataaatggtgatttaaatgaaagtacattgtattttctgcctctgtgagttctctactggagacagtttgaatgaattgttaggagtaggcgrctttgagtcatgcttccttacatccgtctccagattcatattttggatgctttctttcattttgtgtatttttgtatttcctgccccattagcttcataa

SEQ ID NO: 18011 - DNA, 201 bp, Homo sapiens
cctaaatgttttggagtctaattctggacttttcattctgttccattggtttcctgcctactcttgtaccagcaccactttaattactgacgtttttcttytgttatgttttgttttgttttgttttttgttttgagacagggtctcgctctgttgcgcagggtggagtgcagtggcacaatcagagctcattgtagcctt

SEQ ID NO: 18012 - DNA, 201 bp, Homo sapiens
atttctgtgttaatatgcatttgagtgtaatagatgctgccaagttaaattgtcttctaaagtgtttatatcaatttatactcctattacctacatatgartatttccccacattcttgccaacagtgtatattctcaaacttttagaaattttgcttaactgatagggtaaaaatggaattttgagatggagtctcgctc

SEQ ID NO: 18013 - DNA, 201 bp, Homo sapiens
aaccaccgctcccagcctagcttccagtatttctttttttttcttttttgagacagagtttcactcttgttgcccaggctggagtgcaatggcgtgatctyggctcactgtaacctctgctccccaagttcaggccattctcctgccttagcctcctgagtagctcggattacaggtgcacgccaccacacctggctaatt

SEQ ID NO: 18014 - DNA, 201 bp, Homo sapiens
ggttgcagtgagccgagagcgcgccattgcactccagcctgggtgacgagaatgaaactccatctcaaaaaaaaaaaaaaaaaaaaaaaaaaaaaatatatatatatatatatatatatatatatatatatatatatggatcacagttgtatttcagcatagctaattcatcaaaagttagctcttttttctcatgtagca

SEQ ID NO: 18015 - DNA, 201 bp, Homo sapiens
gaggttgcagtgagccgagagcgcgccattgcactccagcctgggtgacgagaatgaaactccatctcaaaaaaaaaaaaaaaaaaaaaaaaaaaaaatatatatatatatatatatatatatatatatatatatatatggatcacagttgtatttcagcatagctaattcatcaaaagttagctcttttttctcatgtag

SEQ ID NO: 18016 - DNA, 201 bp, Homo sapiens
aggaggttgcagtgagccgagagcgcgccattgcactccagcctgggtgacgagaatgaaactccatctcaaaaaaaaaaaaaaaaaaaaaaaaaaaaaatatatatatatatatatatatatatatatatatatatatatggatcacagttgtatttcagcatagctaattcatcaaaagttagctcttttttctcatgt

SEQ ID NO: 18017 - DNA, 201 bp, Homo sapiens
gaggaggttgcagtgagccgagagcgcgccattgcactccagcctgggtgacgagaatgaaactccatctcaaaaaaaaaaaaaaaaaaaaaaaaaaaaaatatatatatatatatatatatatatatatatatatatatatggatcacagttgtatttcagcatagctaattcatcaaaagttagctcttttttctcatg

SEQ ID NO: 18018 - DNA, 201 bp, Homo sapiens
aaatacaaaattagcctggtgtggtggcgcatgcccataatcccagctactctggaggctgaggcaggagaatcgtttgaacccgggaggaggaggttgcrgtgagccgagagcgcgccattgcactccagcctgggtgacgagaatgaaactccatctcaaaaaaaaaaaaaaaaaaaaaaaaaaaaaatatatatatat

SEQ ID NO: 18019 - DNA, 201 bp, Homo sapiens
atagtcaaagtactatttgttttaaaggcttgcctcccaaacacttcatttggtcagactcatttataacttaaaaatttgatcttggttttagataaacrattaatactaaaggatttattgttcttgcagcttcacttgtcttaataatgtgtagcattgtattataacttgtatatgtgaatgaatggttttcagaag

SEQ ID NO: 18020 - DNA, 201 bp, Homo sapiens
ctagaaacatagagcatcttcccctttaaagttgctggtagaagctggatcgggaattggttaggggagaggtagttgtagttagtttttttttttttttwaatttcagtagttttttggggaacaggtgtgtttggttacatgaataagttctttagtagtgatttatgagattttgatgcacccatcacccaagcaata

SEQ ID NO: 18021 - DNA, 201 bp, Homo sapiens
ccatcactacagtcaattttagaacattcattatccccaaaagaaccctgtacccattagcagttattatctttactttttaaatgcgggaaataaacctrcatagaaagaccagaaagactttatgctcttgaactgtataaactgactccagcctacctgttgtaccttttgttgttgttgttgttgttgttgttgtta

SEQ ID NO: 18022 - DNA, 201 bp, Homo sapiens
ctcaaatgatccacccaccttggcctcccagagtgctgggattacaggcatgagccactgtacctggcccagtttcaatccacagagttcattctaacttyttccatttccatatttgcatctcccttctctgccaagtgagaactctgggtcccattgcctttaataaatcttttttaaaaaagaattttttttttttta

SEQ ID NO: 18023 - DNA, 201 bp, Homo sapiens
acaagttaccttttggaagtatacaactcagtggtttttagtatcctcacaggttacgtgcacccatcactacagtcaattttagaacattcattatcccyaaaagaaccctgtacccattagcagttattatctttactttttaaatgcgggaaataaacctacatagaaagaccagaaagactttatgctcttgaactg

SEQ ID NO: 18024 - DNA, 201 bp, Homo sapiens
ttttattaatcatattgtcaactactggcagcacacgttttaaatgctgatcatagatgatagtattatctaacttttttgtgttttcactaggtgctgtrtattcttaggtcgttacctgtattaactcagtaactcttgtcatcaaacctatggtctaggctctattattattatctccattttataaatgaggaacta

SEQ ID NO: 18025 - DNA, 201 bp, Homo sapiens
tactgtagttatgtgaccagtaggactactttcatagttaatatctggcaagttaatgatgttaatacacagaaaacctcaatagtaaatagacacgaaaygctgatggtggaagtgccaacagagtttccttgtcacactttaggcctgtactgtccaatccagtaaccatatgcagggtgagcactcaaaatgcatcta

SEQ ID NO: 18026 - DNA, 201 bp, Homo sapiens
tttattagagaagtaaagaaagaaaagaatggctactctgtaggcagagcagccccgagggctgctggttggctaatttttaaatttttttgtagagacarggtctcacttcgttgcccatgctggtctcgaactcctggcctcaaatgatcctcctgccttggcctcccaaagtgctaggattgcaggcttgagtcactg

SEQ ID NO: 18027 - DNA, 201 bp, Homo sapiens
ctgagcgggtgttgtggacctgtagtcccagcttctcaagaggctgaggtgggaggattgcttgagcccaggaagtcaaggctgcagtgatgcagtgagcygtgatcatgccactgcactccagtgtggggaacacagcaagaccctgcctcaaaaaataaactaattttattgagcatctactatgtgccaagtactgtg

SEQ ID NO: 18028 - DNA, 201 bp, Homo sapiens
ataaaagggcttacactatgaagtagtattggctaaaacatccctctcacctggagtcctcatttttcagaggcaatcacttttgactctttctgattttrgttttcctggcatttactttcatttctcaaatatacttttatcactctttcttcgtttattaatttatacattctcctttgatatcctgccacaataaat

SEQ ID NO: 18029 - DNA, 201 bp, Homo sapiens
cagtgattcaaaaccacctccccaccctgagtaaaagatttgatatgaatatgaatgctatgagtctcctggtgatgttttgggtgtatatgttcctgtgwgtgtttggaaatcatagagggtatttaccttgagggctcttttgttgaccttatttatttgaaattcttattttatttgtaatggcatatgtatattttt

SEQ ID NO: 18030 - DNA, 201 bp, Homo sapiens
tcagggttttcttttattaattgagcacaatactgttttgatttaatttttttccctcaaaccacccagctccttacatagtttttaattatatagctatmtgaaagaggtggctaagacatttgctgcacacacttgaactaatgttgggtcagtagcttcgtgttactgccctgatcccagtgtaattcaggtggaaag

SEQ ID NO: 18031 - DNA, 201 bp, Homo sapiens
atccctttactatgattaatttttgttattccaggaaatacttgtgaagccagccaattaataaagcactttagcatctgttcaggtagttttgaaaaccmacttttccccttcaggataagaacttccaggttacctaaaaatgcaataaaaatctttatagtctaagcttcttggcatataatttttcatcagggtttt

SEQ ID NO: 18032 - DNA, 201 bp, Homo sapiens
cttgaccttgtgacctgcccaccttggcctcccaaagtgctgggattacaggcgtgagccactgcacccggccccagattgctacttctaaaaattaagcmgaatgtaagagggggaagaaatattgtcactgtcacagtatacatactgagagctatgaaaccaatgagtaaagatcagttggccgggtataaaaaactt

SEQ ID NO: 18033 - DNA, 201 bp, Homo sapiens
gagcgagactccgtctcaaaaaaaaaaagaaaaagaaaaagaactaaaaaacaaaccttagctggatgttggtcatgtgcctctagtcccagctgcttgggagactggggtggaagaatcacttgagcccgggaagtcaaggctgcagtgagccatgattgtgccacacacttcagcctgggtgacagaagcagaccctgt

SEQ ID NO: 18034 - DNA, 201 bp, Homo sapiens
taaatcagaaaatatttatatattacagcttactgttaggagccctagtatagcattttagatcactttttatgtacttttagcctgcgtacgaagtcctsttcctttataaccctttttacttgacacctgaaataaaacactggcttctagttctgttttctcccttaacaggatgtattactgagatttattaatttt

SEQ ID NO: 18035 - DNA, 201 bp, Homo sapiens
attcctttggcggaggagaggcgctctgctttttagagtttccagtttttctgctctgttttttccccatctttgtggttttatctacttttggtctttgrtgatggggatgtacagatgggtttttggtgtggatgctgtttctgtttgttagttttccttctaacagacaggaccctcagctgcaggtctgttggagtt

SEQ ID NO: 18036 - DNA, 201 bp, Homo sapiens
cattagaaaaaggatgatcataggagttttcctatggacaaattttaaaaaatttaaaccctattttgaaaaagaaactggtgtctttataactgatttaractggaatagtagatgttctaaattcttttgaggaaaatagtatagaagttagccaatgttgttcatagctataaatcagaaaatatttatatattacag

SEQ ID NO: 18037 - DNA, 201 bp, Homo sapiens
tcctgtagcttggagtagtttgatcgtctgaagccttcttctctcaactcgtcaaagtcattctccgtccagctttgttccgttgctggtgaggagctgcrttcctttggcggaggagaggcgctctgctttttagagtttccagtttttctgctctgttttttccccatctttgtggttttatctacttttggtctttga

SEQ ID NO: 18038 - DNA, 201 bp, Homo sapiens
tcctcctgtagcttggagtagtttgatcgtctgaagccttcttctctcaactcgtcaaagtcattctccgtccagctttgttccgttgctggtgaggagcygcattcctttggcggaggagaggcgctctgctttttagagtttccagtttttctgctctgttttttccccatctttgtggttttatctacttttggtctt

SEQ ID NO: 18039 - DNA, 201 bp, Homo sapiens
tgcagcagctgctccagatgggctgccaccaccatcataatcccagctacttgagaggctaaggcgtgagaatcgcttgaacctgggagggagaggttgcrgtgagtggagatcgcaccactgtactccagcttggacaacagagtgagaccctgtctcaaacaaaaatattagctgagtgtggtgccatgcacctgtagt

SEQ ID NO: 18040 - DNA, 201 bp, Homo sapiens
attatgatgttagctggttattttgctcgttagttgatgcagtttcttcctagcctcgatggtctttgcaatttggcatgattttgcagtggctagtaccrgttgttcctttccatgtttagtgcttccttcaggagctcttgtagggcaggcctggtgatgacaaaatctctcagcatttgcttgtctgtgaagtatttt

SEQ ID NO: 18041 - DNA, 201 bp, Homo sapiens
gggggcagggagcttcttaagaccctgagaacacagggaagcatgggtccaaagctgcagctgggtagctgcagctgcacccaggagcgctgggctcccasccctccaactcagtaggtggcccggcttccacctgttcctggcctccacccattctgtggagcatgcagccctggccacaacttccccactgcagtcggc

SEQ ID NO: 18042 - DNA, 201 bp, Homo sapiens
tctggtcctggactctttttggttggtaagctattgattattgccacaatttcagagcctgttactggtctattcagagattcaacttcttcctggtttaktcttgggagggtgtatgtgttgaggaatttatccatttcttctagattttctagtttatttgcgtagaggtgtatatagtattctctgatggtagtttgt

SEQ ID NO: 18043 - DNA, 201 bp, Homo sapiens
agactagcggaggaatcactggactctttagcagagttttttgaagaccttgcagacaagccatacacgtttgaggactatgatgtttcctttgggagtgktgtcttaactggtaaactgggtagagatctagcaacctacgtgatcaacaagcagacaccaaacaagcaaatctggttatcttctccatccagtggactc

SEQ ID NO: 18044 - DNA, 201 bp, Homo sapiens
cagaagctctttagtttaattagatcccatttgtcaattttgtcttttgttcccattgcttttggtgttttagacatgaagtccttgcccatgcctacgtmctgaatggtaatgcctaggttttcttctagggtttttatggttttagatctaacatttaagtctttaatccatcttgaattaatttttgtataaggtgta

SEQ ID NO: 18045 - DNA, 201 bp, Homo sapiens
gggaggccacggatgggcctggaaaaagcacctcgagttctcactctgggccatggacttcaaccagaactggcagccttatccccccaggcccgcctccyatgctcgtcattacccaaagtctggagagggctgaggcagcagggggcttgtgaatcagtgccgtcatgagcacacccagtcagttgtgacaggtcccag

SEQ ID NO: 18046 - DNA, 201 bp, Homo sapiens
aatcacttttgttattgttaaatttttctggtatttctccatttttggcttttatgaccattattttgcaaatgtctacaacgtttttgaaattatagtawgaatatactaaatggaaatattttgaaacatttatggtttgtatagttatactatcttaaggctcggtatttttctcacttttttttaattcaaagaaaa

SEQ ID NO: 18047 - DNA, 201 bp, Homo sapiens
atttgatggttaccatattactgtatcagtttgctatggctgccataacaaggtgccatagactgagtagcttaaacaacagaaatgcattttctcacagytctggaggccggaagtccaagatcaaggtgtcagcaggttcagtttgttctgagccctctctccttggattgcagatggatgcctccttcctgtgccctc

SEQ ID NO: 18048 - DNA, 201 bp, Homo sapiens
gcttattgaatataaggatcagctaactatggcctgtttgcatgccagattgggcccatggcctgtttttgtactgtgtggcagtttagaatttttctttytttttttttacattttcaaagggttgtaaaaagggaaaagatgaatatgctacaggcaccaaatgtggcctgcaaagcttaaaatatttaccatctggcc

SEQ ID NO: 18049 - DNA, 201 bp, Homo sapiens
tagcctgtgtaatcttaattcatatctcttcaaaagcctggtgacaactgtcatgtaggaccagggaatagtctgttaatgctgtttgaattttctctctytttttttttttttttggaggtggagtcttgctctgtcgcccaggctggagtgcagtggtgcgatctcaactcactgcaacctccacctccacttcctggg

SEQ ID NO: 18050 - DNA, 201 bp, Homo sapiens
ggtctcgaacacccaatccaagtgatccgcccacctcagcctcccaaagtgctgggattacaggcgtgagctactgcgctgggcctaatcttgcccttttytggggggggtggggggttataattaaaaccattctattatttgacttcattagtacttacacagtgttttacattttttttttttttttttttgagacgg

SEQ ID NO: 18051 - DNA, 201 bp, Homo sapiens
aatattttaattcctttaaatgaaatcaaattctgcccttgggggcaggtgtggtggctcgtacctgtaaccccagcactttgggattctgaggtgagagsgtagtttgagctcagactagcctgggcaacataatgagaacccgtctcaaaaaaaaaaaaaaaaattctgccctgggaccttctccccctcaattctacc

SEQ ID NO: 18052 - DNA, 201 bp, Homo sapiens
tatgactggactgagaaaaactgggtgtactcccacgattgcgtgtccctccatgatgtgctcgctgcagagctcactaaagccttaaaaaccaaactggrcttgtcttccttggcctattctggagaagacgcttgatgcccagcccggttttaaggatattaaaagctgtcaggccaagaccccagcttcattatgcag

SEQ ID NO: 18053 - DNA, 201 bp, Homo sapiens
ccaagacacatttggcaatatctggagatatttttagccgtcaaaacaagtaggggggtgatgcaactggcatctagtgcgtagaggcgagggatgccgcyaaacactctacagtgtaccagacaacccccacaacaaagacttatttggcccaaaatggcaggagtgagaaggttaagaaactctatgttagggagtttt

SEQ ID NO: 18054 - DNA, 201 bp, Homo sapiens; identical to SEQ ID NO: 2850

SEQ ID NO: 18055 - DNA, 201 bp, Homo sapiens
tgctgaaagctgaacactcaatgggaagacctgtttgcagagaggagccagccactccagggtctcctttctgctagaagctgaacactcgttgggacacmcttgctgtggaaaggacatccttactgtggaaatgagctactaactgcaggtctccttcctcttcatcttccttatccttctgttccattgctcagtaat

SEQ ID NO: 18056 - DNA, 201 bp, Homo sapiens
ggagagaaactacccattccagaacctcctctctgctgaaagctgaacactcaatgggaagacctgtttgcagagaggagccagccactccagggtctcckttctgctagaagctgaacactcgttgggacacacttgctgtggaaaggacatccttactgtggaaatgagctactaactgcaggtctccttcctcttcat

SEQ ID NO: 18057 - DNA, 201 bp, Homo sapiens
tacgccagccccctgccgtctcggccccctttggaacttgggcaccaacaagcgtgggagggaggctgagaggggtctgaagacagctggacactgacttkcaggcgctccttggcatgaacagcctgggagcaggaggcagacaggttcctgggtggaaggggatgggtccccagtgaagtcccaccctgaagctggtga

SEQ ID NO: 18058 - DNA, 201 bp, Homo sapiens; identical to SEQ ID NO: 2853

SEQ ID NO: 18059 - DNA, 201 bp, Homo sapiens; identical to SEQ ID NO: 2854

SEQ ID NO: 18060 - DNA, 201 bp, Homo sapiens; identical to SEQ ID NO: 2855

SEQ ID NO: 18061 - DNA, 201 bp, Homo sapiens; identical to SEQ ID NO: 2856

SEQ ID NO: 18062 - DNA, 201 bp, Homo sapiens; identical to SEQ ID NO: 2857

SEQ ID NO: 18063 - DNA, 201 bp, Homo sapiens; identical to SEQ ID NO: 2858

SEQ ID NO: 18064 - DNA, 201 bp, Homo sapiens; identical to SEQ ID NO: 9261

SEQ ID NO: 18065 - DNA, 201 bp, Homo sapiens; identical to SEQ ID NO: 9249

SEQ ID NO: 18066 - DNA, 201 bp, Homo sapiens; identical to SEQ ID NO: 9262

SEQ ID NO: 18067 - DNA, 201 bp, Homo sapiens; identical to SEQ ID NO: 9285

SEQ ID NO: 18068 - DNA, 201 bp, Homo sapiens; identical to SEQ ID NO: 9289

SEQ ID NO: 18069 - DNA, 201 bp, Homo sapiens; identical to SEQ ID NO: 9290

SEQ ID NO: 18070 - DNA, 201 bp, Homo sapiens; identical to SEQ ID NO: 9293

SEQ ID NO: 18071 - DNA, 201 bp, Homo sapiens; identical to SEQ ID NO: 2861

SEQ ID NO: 18072 - DNA, 201 bp, Homo sapiens
agacaccaagaagctggactccatccaccggtaacaataatacaaattcagatttctactgtacctaaataacgcaattaagttgcttttcatctttacaytgtctgtaaaaatgacaaattataggcctaccatacaatattccttgaaacatgagaactgtaatcaggctctttccatcaggctcctctcaggccaata

SEQ ID NO: 18073 - DNA, 201 bp, Homo sapiens
ctttgggaggctgaggtaggaggattgcttgagcccaggaatttgaaaccagcctgggcaacatggtgagaccccgtttcttttcttcctatttttttttwaataaattttttaaaaagtaaaacattgaaaattcaataatagctatcagattagtttttttaacctcctcaaccagagtaattcccttaagacctatta

SEQ ID NO: 18074 - DNA, 201 bp, Homo sapiens
tgggatgagatggggacttgggagagatgcattatcagtcctgttctctcctggggccccaagccagaaagggtcagctcgagcaggcccagtggtgtccrctgggtgacactgctattctctcactgctgtgccttttaggctgcaggagcagtgcagactcctctgctgctccattctgtagccccaggatcacacttc

SEQ ID NO: 18075 - DNA, 201 bp, Homo sapiens
aggcctccccagccctatggaactgtgagtcaattcaacctctttcctttataaattgcccggtctcaagtctatctttattagcagcatgaaaacagackaatacaagaatattaagtaaaaactaaagaaatctaaatagaggccgggcgcagtggctcatgcccgtaatcccaatactttgggaggccaaggaaggcg

SEQ ID NO: 18076 - DNA, 201 bp, Homo sapiens
tgaaggaatgccgggcagtggtcattgcggggggtaccatgcagccggtaaggacacctttcccagcccctcgtgccccaggtgttgggatgagatggggrcttgggagagatgcattatcagtcctgttctctcctggggccccaagccagaaagggtcagctcgagcaggcccagtggtgtccactgggtgacactgct

SEQ ID NO: 18077 - DNA, 201 bp, Homo sapiens
ataaaacttgatttcgagctttttggattttgcagttgcaggcgttgtaggaatagcactgtcctgttgggcggctgtcagttttgcgcacctcagcttayagtgtcaacatacttggaacgtgacagtttgtattttcatttttttttattattattatactttaagttctagggtacatgtgcacaatgtgcaggtttg

SEQ ID NO: 18078 - DNA, 201 bp, Homo sapiens
agaactgaatatcccaaacaaggtttacagaaacctttcatactctctcctcaacaaaaacaacaaagggctgagaaagctgcctacagaactgaactagrgtaataaaggaatcggtttattacaaatatctaagagaaccctgaaatcatcaaagtggttacttagatctctgaggaacagccagggctgtgaactgac

SEQ ID NO: 18079 - DNA, 201 bp, Homo sapiens
ttaatattgtgcctggcaataaaaatgttcgttgagtaaatggatagatgaataaaaactgtactcttaggtctgaattatatactccaaaatttttaagwcacttatttaaaatattggtagctttgaaaatgattcatttcaaagccttgactatatataaactaaaatataatttaagaaataaaaacatcccctcca

SEQ ID NO: 18080 - DNA, 201 bp, Homo sapiens
cctcagcctcacaaagtgctgtgattacaggtatgagccactacacaaagccaggataacttatttttgcttcttacctaaatattcagaaataggggaargttggtaataccagtttataaataaaatgtttaaatcttttataacaataagagcaacaggctgtatcatatagtcaaggtttgtagtaggctatgctac

SEQ ID NO: 18081 - DNA, 201 bp, Homo sapiens
ggttgtcctagagattaaatggtgtttaatttaaagagaaagcactagcacttgtgcctcagacctggactcacctgggggaccccctttgctgggacgayagaagtgtctgttgggcttgcactcacctcccaccgatctgtttttccaggcagcctcagtgagagcaccctgaagtttttgctcctgaatccagctgtg

SEQ ID NO: 18082 - DNA, 201 bp, Homo sapiens
tgatattctttatccagtttgtctaaagtctaaaaaacaaaacaactctttggtttattactgggtgaaccccaaaattgggattcggccagagaggccayatgggttctcggcttcctccaggaaagaattcaagaacaagctgacagtaaagtgaaatcatgtttattaagaaagttaaggaataggccagcacggtga

SEQ ID NO: 18083 - DNA, 201 bp, Homo sapiens
taaattaaaaacatagtatatatgaatatcattttcatatatcttgctacttccttagccttcttaattataaacttgagtcagctattatttactgagtrcttacattttagatgctgttctaagtgctccacatgtataaacttgcttagtcatcacgagtgggaactattaccctcatcgtacagaagaggaagcaga

SEQ ID NO: 18084 - DNA, 201 bp, Homo sapiens
ccttcagcctatttattttattttaaacagaaaaattatactatgtcaaccccaaaccctcaatcaatttcttaaaaggttaactaaagcatggtaaggtrcctaaatataattcttataaaacaaaacatctggtcagttgtgaaatgtttaaaacattgcttcttgatcaccaaataattaatatggtgaataacagat

SEQ ID NO: 18085 - DNA, 201 bp, Homo sapiens
gatttgtctcttgaatttgagaatcggaaaaagagaaggaagagaaataggtgtacaggaaacatcttgactcagaaacaaacaaaaaattgtcaagtctrtttcaaatgttaagttttactatcctgggtgaggtattaattaaagaaaggatgaactttatgctgttttaattcatttaaaatggcatgtcttgtgtca

SEQ ID NO: 18086 - DNA, 201 bp, Homo sapiens
ccatgcccggctaattttttgtagttttagtagagacggggtttcatcatgttggccaggctggtctcgaactcctgacctccggtgatccgcctgcctcrgcctcccaaagtgctgggattacaggcatgagccaccccgcccggctgcaataatattttttttaaggttttttttttttgcctttttgtagggttttta

SEQ ID NO: 18087 - DNA, 201 bp, Homo sapiens
gaacctggagaactatgctaaatgaaaaaaagccaggcagggaaggacacatactgcaggatctcacatgtatgtggaatctaaaacaatcaagctcatakaagtagagaataaaatggtggttaccaggggctgggagcgaggaaatggggaaatgttggtcaatgggtacaacatttcagttagacaggaggaatattt

SEQ ID NO: 18088 - DNA, 201 bp, Homo sapiens
gaagttggtcaaaacattcaaaattaccaacactgtttgaaatacggatttatattattgttactatgagcctcaccctaattgttgtgtatgaagaggtktcatgaaatgtctgttctggttattacagccatgtatccaccaagatttgaaataaactgaacttagaagcagttcttggccaggcgcagtgggtcatgc

SEQ ID NO: 18089 - DNA, 201 bp, Homo sapiens
ttcaaaattaccaacactgtttgaaatacggatttatattattgttactatgagcctcaccctaattgttgtgtatgaagaggtttcatgaaatgtctgtkctggttattacagccatgtatccaccaagatttgaaataaactgaacttagaagcagttcttggccaggcgcagtgggtcatgcctgtaatcccagcagt

SEQ ID NO: 18090 - DNA, 201 bp, Homo sapiens
ttgaaatacggatttatattattgttactatgagcctcaccctaattgttgtgtatgaagaggtttcatgaaatgtctgttctggttattacagccatgtrtccaccaagatttgaaataaactgaacttagaagcagttcttggccaggcgcagtgggtcatgcctgtaatcccagcagtttgggaggccgaggcaggtg

SEQ ID NO: 18091 - DNA, 201 bp, Homo sapiens
attgatgatgtcatcgagcgttattaacaaaattatagacaaaggtgggaggaatggaggatttattaatggatggcctcaaaatttacaactatagattrtatttatcggttcaagccaagaggccctgtctacatttcaccttgacaacatctttgggttgagcctcatgcttctccttcctttaccacaggtcatcat

SEQ ID NO: 18092 - DNA, 201 bp, Homo sapiens
agtttgagaccagcctggccaacatggtaaaaacccatctctactaaaaatacaaaaaatttgccaggtgtggtggcgcgtgcctgtaatcccagctactygggaggctagggcaggagaatcacttgaatctgattcagggaggcagaggttgcagtgagctgagactgcaccactgcactccatctgggtgacaaagtg

SEQ ID NO: 18093 - DNA, 201 bp, Homo sapiens
ttatctattttttccatttcttcatcacatttgagctttcatcattgatgatagcagtcatttttctgttctttggttgcaaaacaatatacgatttatgkgctccttcaagactgatataatatctgactgccattaacacctaccttttcaagagctgaccatctgatctatatattatttaagttctttcctttgttt

SEQ ID NO: 18094 - DNA, 201 bp, Homo sapiens
tcctcttgcttcccctagccatttaagtaactgcctgtaatgctaagttccgttccatccccatgccttagtttaggtacacttcatctcttgtccagacyacttcagtagcctcctacctggcctccctatcaaccagactccatactattgccaaaatcatcttcttaatatgctaatctgatcattataatcccctgc

SEQ ID NO: 18095 - DNA, 201 bp, Homo sapiens
ccagactacttcagtagcctcctacctggcctccctatcaaccagactccatactattgccaaaatcatcttcttaatatgctaatctgatcattataatyccctgcataaaatctttcagtggctctttatgactggataaaaattccttagcttgtaatacaaatttatatttggcccttggctaccctcttcaattct

SEQ ID NO: 18096 - DNA, 201 bp, Homo sapiens
tgacaagaaagataactacaggattaccaaagccattatattttccctcatttgtatgtacatgacacactggttctataatgtttcccaagaatagatcytgaatcctaagactgctgtgatgggactctgagagaagagattataatgtcagaatacttagctcctaggatgtgattaagcttattttgttcatcacta

SEQ ID NO: 18097 - DNA, 201 bp, Homo sapiens
gtgatgggactctgagagaagagattataatgtcagaatacttagctcctaggatgtgattaagcttattttgttcatcactaaagtggtatcatagcatyctttctaccatattaaagtaaatgaatcctaattaacatctgtaatagctcagtgggcctctttgtcttttaagtgaaaactactgagcccttttttttt

SEQ ID NO: 18098 - DNA, 201 bp, Homo sapiens
cgcttgaacccgggaggcggaggttgcggtgagccaagatcgcgccattgcacgccagcctgggcaacagagcgaaactcagtctcaaaaaaaaaaaaaarggaaacatttattgaacacctagtacattccatgcactgtagtgtgtgtggttttatttaatttcatctctgcccaaccctgggaaacggtctattagca

SEQ ID NO: 18099 - DNA, 201 bp, Homo sapiens
tatttctctccttttgaatttgggcttgccttgtgaccagcagaatatggcagaaatgtcactgtgacagtcctaggttcagcccttaagagagtcctggmagctcctgttgtttctatcttagaattcatttaagaagcctggttgggacgggcacggtggctcacacctgtaatcccagcactttgggaggctgaggtg

SEQ ID NO: 18100 - DNA, 201 bp, Homo sapiens
actagataaactctgcatttgacccagaaaacatgtcaaatcctatgatcttgtctaaagttcaacaatgccctgtagctatatattctagtgctcctaarttttacaacctttccttcctttagaaatattcacgatgtgaatgctgaggcataaataaataaaagaaatattcacttgagcaaataatccacaagaatc

SEQ ID NO: 18101 - DNA, 201 bp, Homo sapiens
atggcataagactagtaccagccaatgatatataacaagtgatgtgggtaacttttaatgtccttaaagggagacagtgtgctccttattttgtgccaccrcttagaacatgatcaaatggcaagccacctgagatagtatggtctagactagaaggctgtacaacaacagaggaagagcctggctcctggatgacctcat

SEQ ID NO: 18102 - DNA, 201 bp, Homo sapiens
agaggagacatccctgtcacccgtgggccttcatgaccaagagattgtttgaggaggtttatttttattgcatttcaaaagaatattacctcaataacaayatatggccaggtgcagtggctcacacatataatcctagcactttgggaggccaaggccagaggattgcttgagcccaggagttcaagagcagcctgggca

SEQ ID NO: 18103 - DNA, 201 bp, Homo sapiens
attatttccaaggtaaatatttttcttccaggtattttcctaaggacccaagttcaaaaccttgcattactctggtctccctttcttttttttttttttttgtcttatgagaaatcaagtctgaattgatttggttcagaatcaaacctgaatctgatcactaaattctactaattcttttctttctatgtctatccacat

SEQ ID NO: 18104 - DNA, 201 bp, Homo sapiens
aaagtttttttttttttttttttttttgagactgagtctcactctgttgaccaggctggagtgcagtggtgcgatcttggctcactacaagctccgcctcrtgagttcacaccattctactgccttggcctcccgagtagctgggactacaggcatccgccaccacgcccagctgattttttgtgtttttggtagagacgg

SEQ ID NO: 18105 - DNA, 201 bp, Homo sapiens
ggcatgactgtgttatgtcattagttcaaggtcaaaaatctagtaagtggagttgctacacagagacagtcgaacaagtgaaatattatctctgcttaaasactcacagaatatttataggatgacattaatgaaaacaagattggttagttcttgggttctgaaacttaaagtgacaagtataattatttcctagtacaa

SEQ ID NO: 18106 - DNA, 201 bp, Homo sapiens
caacatgcgtgagccaccgtgcccggccagcattacataagctttcaaaacatgatttttactatcctatcctaaaagtttttttttttttttttttttttgagactgagtctcactctgttgaccaggctggagtgcagtggtgcgatcttggctcactacaagctccgcctcgtgagttcacaccattctactgccttg

SEQ ID NO: 18107 - DNA, 201 bp, Homo sapiens
aagccaaacaaacgaggcagcttccacgggcacctggctgaataaattaaacttgattgaatcctctattgtaatgacgacagaaaaggaggtaaaatatgccttccctaatgagtttctttacagtcatttactatttaaaacttgctattccaggaaagcagcaatcgcgtaagactgctttgactgggtcttgaaggc

SEQ ID NO: 18108 - DNA, 201 bp, Homo sapiens
ccaccacatccggctaattttttgtatttttagtagagatgggatttcactgtgttagccaggatggtcccgatctcctgacctcatgatccgcccacctyggcctcccaaagtgctgggattacagaggtgagccactgctcccagcgcttttttctttttttttaagatggtgtctcactttattgcccaggctggagt

SEQ ID NO: 18109 - DNA, 201 bp, Homo sapiens
atagcattacataagcttttttcttttctttttttttttttgagacagagtctcactctgtcacccagtctggagtgcagtggcacaatctcggctcactrcaagctccgccgcctgggttcacgccattctcccgcctcagcctcccgagtagctgggactacaggtgcccgccaccacatccggctaattttttgtatt

SEQ ID NO: 18110 - DNA, 201 bp, Homo sapiens
aggatgtgctatttagctttttgccttatttccaagttttgcatactttttctgaccaacacttgagaacctttaatatatagtttttctgtttccattgkcttcagttccaattgtcttttggttccaattctctaagttttaattcaaccagtgtttactgaacacatactatgtaccagaagctactgcaatgaatgg

SEQ ID NO: 18111 - DNA, 201 bp, Homo sapiens
ccctgaaacctcagcctgtgtggcaagttctattacaggattcacatttcctgatttcaaaattactacacagcaatggtaaacaagacattgtggtaacmccataaatagtgtgatggtttgaatgtctgtgtcccttccagaattcatgttggaagttattccccaatgcaacagtttaagaggtgagacctttagggg

SEQ ID NO: 18112 - DNA, 201 bp, Homo sapiens
gttttgctattgtaaaccaaaaggtatctgagacaggtcttaatcagcttagtttattttgccaaggttaaggatgtgcctgtgacacagcttcaggaggwcctaacgacatgtgcccaaggtggtcggtgtgcaacttgcttgtatacattttagggagacatgagacattaatcaatatgtgtaagatgtgcattggtt

SEQ ID NO: 18113 - DNA, 201 bp, Homo sapiens
ttataaaagggacatggggaactagcctaggccttttttttttttttttttttttttcgcttctgctcttccaccatggaagacacagaaggaaggtaccmccttggaagcagagagcagccctcgccagacaccaactctgctggcaccttgatcttgtacttcccagcctctagaactgagcagaaatacatttctgct

SEQ ID NO: 18114 - DNA, 201 bp, Homo sapiens
gcagtgccatagcattacataagcttttttcttttctttttttttttttgagacagagtctcactctgtcacccagtctggagtgcagtggcacaatctcrgctcactgcaagctccgccgcctgggttcacgccattctcccgcctcagcctcccgagtagctgggactacaggtgcccgccaccacatccggctaattt

SEQ ID NO: 18115 - DNA, 201 bp, Homo sapiens
agcctggcatcaaatatatgtgaagccattttttttttttagatggagtttcactcttgtccaggctggagtgcaatggcacgatcttggcttactgcaayctccacctccctggttcaagcaattcttctgcctcagcctcccgaatatctgggattacaggcatgcgccatcatgtccagctaattttgtatttttagt

SEQ ID NO: 18116 - DNA, 201 bp, Homo sapiens
ggtaaactaaaagcatcctgtaacatgcccactggggcttcaggagccgtaaacattcacccctagacactgccgtggggtcggagccccacagcctgccygtctgtatgctcccctagaggtctgagcagccaggcactgaagaagtgagccacacccccattgcatgctctgcgagggggacagggaaactttaccgct

SEQ ID NO: 18117 - DNA, 201 bp, Homo sapiens
ttttccaaaaataaaacatatgagtagaatgcccttgttttacatttttgcaaatctcgttaatatctgacctactagaagacagattatctaatcagttstgtattcaatatgttgtgatattatgtaggttctagaaaattccactttacactcatgagagaatggaagttaaaaagctaaatataataattattataa

SEQ ID NO: 18118 - DNA, 201 bp, Homo sapiens
aaacggtactgtaatccctttagatcccatcaggaaacatagaggatgatctgaacaataattccctccaattgatagcttaggaagatctctccattctrttattttaaggatttttaaagaccacctcaaccaagattttcaaatcatagtgaaacacaaaatttgatcaacttacccacaacagtgaaaaagcctctg

SEQ ID NO: 18119 - DNA, 201 bp, Homo sapiens
cttgttctttattttccaaggttcttaacctaatacagttattatttacaattctgtgtaaatcctttgtgggatttttttacatactataaccattcatrcattcaacacatattttttgagtgtctagtatatacaacaggtgttggtctaggtctagggctgtatcagtgaatgaaactaagtctttactgtcaagga

SEQ ID NO: 18120 - DNA, 201 bp, Homo sapiens
agaagacagattatctaatcagttctgtattcaatatgttgtgatattatgtaggttctagaaaattccactttacactcatgagagaatggaagttaaaragctaaatataataattattataaaactaatttgaccttggaggcctcttgaaagcatagggccctccccaccaaggaccacggggcaccactttgagag

SEQ ID NO: 18121 - DNA, 201 bp, Homo sapiens
gtccggaaacggtactgtaatccctttagatcccatcaggaaacatagaggatgatctgaacaataattccctccaattgatagcttaggaagatctctcyattctgttattttaaggatttttaaagaccacctcaaccaagattttcaaatcatagtgaaacacaaaatttgatcaacttacccacaacagtgaaaaag

SEQ ID NO: 18122 - DNA, 201 bp, Homo sapiens
tgaccttggaggcctcttgaaagcatagggccctccccaccaaggaccacggggcaccactttgagagtctttgctctcaaatcaattaggacccagactmtatgaagttaaatgttaaacagattgatagttttttgtgtgtgtgtgagacagagtctcactctgttgcccagactggagtgcagtggtgtgatctcggc

SEQ ID NO: 18123 - DNA, 201 bp, Homo sapiens
gaaagcatagggccctccccaccaaggaccacggggcaccactttgagagtctttgctctcaaatcaattaggacccagactctatgaagttaaatgttamacagattgatagttttttgtgtgtgtgtgagacagagtctcactctgttgcccagactggagtgcagtggtgtgatctcggctcactgcaacctccaccc

SEQ ID NO: 18124 - DNA, 201 bp, Homo sapiens
ttcttttctctttttctttctttctttcttcctttcttttttttttttttttggcagggtctcactctgtcaaacaggcaggagtgtagtggtgagatttytggtcactgcaacctccatccacctcctgggttcaagcagttctcccacctcagcctcctgagtgagtagctgggactacaggcactcaccaccatgctt

SEQ ID NO: 18125 - DNA, 201 bp, Homo sapiens
agctatatacaaaaagcttccctttttataggaaatgtccaaaataggtaaatccacagagacaaactatagactagtggctgccagagcttagggggaakgaaggatgaggagtgactaataatggctacggagtttcactttgggatgataaaaatgttttgaaactagtggtgatggttgtacaaccttgtgactaca

SEQ ID NO: 18126 - DNA, 201 bp, Homo sapiens
gctatatacaaaaagcttccctttttataggaaatgtccaaaataggtaaatccacagagacaaactatagactagtggctgccagagcttagggggaagsaaggatgaggagtgactaataatggctacggagtttcactttgggatgataaaaatgttttgaaactagtggtgatggttgtacaaccttgtgactacac

SEQ ID NO: 18127 - DNA, 201 bp, Homo sapiens
aaactgagccttgcctcccagttcttcattgcacttcagattgtgtcttactacaaagagaaaattagtctgtgatcagtttggatcagaagaactgaaawtgtacatttagaatagaagccagggatgtgatgcacacccgtgatcccagctactcaggaggctgagatgggaggatcacttgagcctgggagttagagg

SEQ ID NO: 18128 - DNA, 201 bp, Homo sapiens
ggcccttaccccagacctgtgattctcaaatggtatgccaagatgccctggggaaccacagcaaactcacagaagacgatgggatatcttaaatgttcaakgggaatgcagtgatacttggcatctgttgaacgcagtgtgaattactagctcaagacacttcagttcagtctcaatgttaccccacgcatcatccctttc

SEQ ID NO: 18129 - DNA, 201 bp, Homo sapiens
ccaggagtggtggtgggcacctgtagtcccagctacttgggaagctgaggcaggagaattgcttgaacctgggcacagaggttgcagtaagccaagatcaygccacttcactccagcctgggcaaaagggcgaaactccatctcaaaaaatataataataatttctggcataatctcagaagattcggccaggcataatgg

SEQ ID NO: 18130 - DNA, 201 bp, Homo sapiens
tctcatggcatgcctcttgcttggtttacatcatagaatttctggcataataggccgggcatggtggcttacgcctgtaatcctagcacgttgggaggccraggcgggtgggtcacctgaggtcaggagttcgagaccagcctggccaacatggtgaaaccccaactctactaaaaatacaaaaattagccaggagtggtg

SEQ ID NO: 18131 - DNA, 201 bp, Homo sapiens
taaagcctcagcctcccaaagtgctgggattataggagtgagccactgtacctggctctattttatttatttatttatttattttattttatttattattatttttttttgagatggagtctggctctgtcatccaggctggagtgcagtggtgcgatctcagctcactacaagctccgccacccaggttcacgccattct

SEQ ID NO: 18132 - DNA, 201 bp, Homo sapiens
ctgtaagaaaataacgtggtgctgccttgtgctgcctttcattctaaatggattttgggtgacaaggtttaacagagtagaatcacaggaatgattttctmatttctcaaagtgagatagtttttatcttggaccccccaaacattgaagaaccctttcttatgtggatttctaaatagtgtacagcacagtagtagggtt

SEQ ID NO: 18133 - DNA, 201 bp, Homo sapiens
cggctcccatctgtattttcaaaaaaaataaataaataaatgacagtatggcctattctattctattctattctattctattctattctattctattcatttgagacagggtcttgctctgtcgcccagactggaatgcagtggcgtgaacatacctcactgcagcctcaatctcctgggtataagtgatcctcctatctc

SEQ ID NO: 18134 - DNA, 201 bp, Homo sapiens
ccggctcccatctgtattttcaaaaaaaataaataaataaatgacagtatggcctattctattctattctattctattctattctattctattctattcatttgagacagggtcttgctctgtcgcccagactggaatgcagtggcgtgaacatacctcactgcagcctcaatctcctgggtataagtgatcctcctatct

SEQ ID NO: 18135 - DNA, 201 bp, Homo sapiens
cccggctcccatctgtattttcaaaaaaaataaataaataaatgacagtatggcctattctattctattctattctattctattctattctattctattcatttgagacagggtcttgctctgtcgcccagactggaatgcagtggcgtgaacatacctcactgcagcctcaatctcctgggtataagtgatcctcctatc

SEQ ID NO: 18136 - DNA, 201 bp, Homo sapiens
gctggtctcaaactcctgacctcaagtgatctgtccgccttggcctcccagagtgttgggattacaggcctgagccactgcacccagccccgccacccttytgagtccccattgtttatcacttcactctctatgtccatgtggacacagtatttagctcccacttataagtgagaatgtgccgtatttagctttctgttt

SEQ ID NO: 18137 - DNA, 201 bp, Homo sapiens
gcccggctcccatctgtattttcaaaaaaaataaataaataaatgacagtatggcctattctattctattctattctattctattctattctattctattcatttgagacagggtcttgctctgtcgcccagactggaatgcagtggcgtgaacatacctcactgcagcctcaatctcctgggtataagtgatcctcctat

SEQ ID NO: 18138 - DNA, 201 bp, Homo sapiens
cttcttttaacacatcagtctggtcttatttctaggctttatctcatacgacatttactgtgtcctcacatgcacatactcctggccccaacctctctcaraattttatttttcctagtgtcctagctttgagctgtctacttgttcttgcccaccactggatgttcagctgcacttttctctaaaaggtttggtactcca

SEQ ID NO: 18139 - DNA, 201 bp, Homo sapiens
ccatgcccggctcccatctgtattttcaaaaaaaataaataaataaatgacagtatggcctattctattctattctattctattctattctattctattctattcatttgagacagggtcttgctctgtcgcccagactggaatgcagtggcgtgaacatacctcactgcagcctcaatctcctgggtataagtgatcctc

SEQ ID NO: 18140 - DNA, 201 bp, Homo sapiens
acgacatttactgtgtcctcacatgcacatactcctggccccaacctctctcagaattttatttttcctagtgtcctagctttgagctgtctacttgttcktgcccaccactggatgttcagctgcacttttctctaaaaggtttggtactccactccaaaaaaaattatatttttaaaatataggaaacgatgatatatg

SEQ ID NO: 18141 - DNA, 201 bp, Homo sapiens
cactttgagagactaaggcaggaggattgcttgaggccagtagttagagacctgtgtggctaacttagtgagaccctgtctgttttgttttttttttttttggagacagagtcttgccttgtcacccaggctggagtgcagcggtgggatcttggctcactgcaacctttgcctcctgagttcaagtgattctcctgcctc

SEQ ID NO: 18142 - DNA, 201 bp, Homo sapiens
cttaagttttttctttctttctttctttctttctttctttctttctttctttctttctttctttctttctttcttttttaatctatctttctttctttctytctctctctctctctttatatttttattttccagagtctccaacccaggttggagtgcagtggtgtgattatagctcactgcagcctcaacctcctggga

SEQ ID NO: 18143 - DNA, 201 bp, Homo sapiens
ccaccactggatgttcagctgcacttttctctaaaaggtttggtactccactccaaaaaaaattatatttttaaaatataggaaacgatgatatatggagsacctactatgtgccaggcaccacaccacatatgttacagacattacctcattcgatcttcacaatcagcccaatgtggtaggtattagcctcctcctcca

SEQ ID NO: 18144 - DNA, 201 bp, Homo sapiens
aaaagaaaaaaaatcttactcatcttgtagggagggaaagaaccctttttcttctgccctcctggggtgggggctgcaaattaaactgaaaaaaaccagaytgacatgtaaacatgtggaaactcagtgataaacaatgccatcaaaggagtggttagaatttgggtttaacaaaagaataagaaatttgtaaagaagtga

SEQ ID NO: 18145 - DNA, 201 bp, Homo sapiens
caagaggctgaggaggaaggatcacttgagcctgggaggctgaggcttcagtgagctatgatcgtgccactgtaccccagcctgggtgagagagtccctayctcaaaaaaataaaaccaaaaaactactggggccacgtcagaactaaaagagttctgcaggcccttcagagaaaggagaagtgagagtcaattaacctca

SEQ ID NO: 18146 - DNA, 201 bp, Homo sapiens
agggtatcatcgtgttagccaggatggtctccatctcctgaccttgtgatctgcccgcctcagcctcccaaagtgctgggattacaggcatgagccatcgygcccggcctttcaattcttttaatacaaagcaaatgaaaacacctgttttcaatttcttttaccagtcaggctatcttttggaacctaagacagtttgcc

SEQ ID NO: 18147 - DNA, 201 bp, Homo sapiens
aaggccggtcgcggtggctcacgcctataatcccagcactttgggaggccaaggtgggcggatcatgaggtcaggagatcgagaccatcctggctaacacrgtgaaaccccatctctactaaaaacacaaaaaaattagccaggtgtggtggtaggcgcctgtagtcccagctacttgggaggctgaggcaggagaatggc

SEQ ID NO: 18148 - DNA, 201 bp, Homo sapiens
ctgattagtcttgttgaacaaagaaaatacaggctttggctgggtatggtggctcatgcctgtaatcccagcactttgggaggctgaggcaggtggatcaygaggtcaggagatcgataccatcctggctaacacggtgaaaccccatctctactaaaaatacaaaaaaattaactgagtctggtggcgggcacctgtagt

SEQ ID NO: 18149 - DNA, 201 bp, Homo sapiens
ttgtgtaaaaaagagcaaaatgggccgggtgtggtggctcatgcctgtaatcctagcactttggcaggccaagacgggcagatcacgaggtcaggagatcragaccatcctggctgacacggtgaaaccccatctctactaaaaatacaaaaaattagccaggcatggtggcatgcacctgtggtcccagctactcgggag

SEQ ID NO: 18150 - DNA, 201 bp, Homo sapiens
aattttatctatgtttttaaaggcagaagatagaaataaaatctaaataacttgtccttgagcctgacctaaagcctagacagtggaacagaattcgggaktaaggagcctggagagggtggagtaagtttattcaaattaataaatgctaaatcagaattatttaaaaaatttaggcagatgattactcactctccctgt

SEQ ID NO: 18151 - DNA, 201 bp, Homo sapiens
tatagcttatgttgcttgtgtaaaaaagagcaaaatgggccgggtgtggtggctcatgcctgtaatcctagcactttggcaggccaagacgggcagatcaygaggtcaggagatcaagaccatcctggctgacacggtgaaaccccatctctactaaaaatacaaaaaattagccaggcatggtggcatgcacctgtggtc

SEQ ID NO: 18152 - DNA, 201 bp, Homo sapiens
ccatctccagtgtattgggttcagctcatttcctccccagcactgctactaatgttcaaggcattatttgttgaagccaggtgccgtctaagcaggctgtygagggagagcaattttttttttgagacaggatctctttctgttgcccaggctggagtgcagtgacatgatcttggctcaccgcagcctcgacctcccaag

SEQ ID NO: 18153 - DNA, 201 bp, Homo sapiens
gtatttacagctgctccccatcactcacattaccacctgagctccaccttctgtcagatcagcggtggcactagattatcataggagcatgaaccctatcrtgaccagagcattcaggaatctaggttgagtgtccttatgagaatctaatgcccgatgatctgttactgtctcccatcacccccatatgggaccatctta

SEQ ID NO: 18154 - DNA, 201 bp, Homo sapiens
gaaagtgcttcttttgctacaggatgaggtgggagcaggaattgtgagaggccccctggccaccatctccagtgtattgggttcagctcatttcctccccrgcactgctactaatgttcaaggcattatttgttgaagccaggtgccgtctaagcaggctgtcgagggagagcaattttttttttgagacaggatctcttt

SEQ ID NO: 18155 - DNA, 201 bp, Homo sapiens
ggcataacttgataatataggatgcttcaacatgataaaacttcaattctttctaaattaatttataataactcctctcccaaattctaaggatttttttwaaaaaaagacaggctgatttgaaagttcaaacagaaaaaaataaaaattcaacgtacgtttgatgaagaagggaaatgatagaaaactagtcaaaacgaa

SEQ ID NO: 18156 - DNA, 201 bp, Homo sapiens
ttggccaggctgttctcaaactcctgaccccaggtgatccacctccttcagcctcccaaagtgttcggattacaggcgtgagacaccacgcccgggctcaratgttcatctctttcagaaataccctcagaggaacacccagaggaatgtttgactaactgtctgaacacattgcaacccagtcaagctgacacatagaat

SEQ ID NO: 18157 - DNA, 201 bp, Homo sapiens
ttttgaaactagtggtgatggttgtacaaccttgtgactacactaaaaatcactgacctacacactttaaaatggtgaaatttatttgtgcttgaattatrtctcaaaaatatggttaagttttaagtttattataacagaattaaacttttagaaaagggaaaaaatggttttacagggaaaggatgtggtaattttata

SEQ ID NO: 18158 - DNA, 201 bp, Homo sapiens
catcatgttggccaggctgttctcaaactcctgaccccaggtgatccacctccttcagcctcccaaagtgttcggattacaggcgtgagacaccacgcccrggctcaaatgttcatctctttcagaaataccctcagaggaacacccagaggaatgtttgactaactgtctgaacacattgcaacccagtcaagctgacac

SEQ ID NO: 18159 - DNA, 201 bp, Homo sapiens
gacataagtcagagtctattgtgcaaaattgaatttgtaaagtaccatataaatatactttttcagataatagttatgactaatactgttacaggaaaggkgtcccaatccagaccccaagagaaggttctggatcctgcacaagaaagaatttggggcgagttcataaagtaaagtgaaagcaagtttattagagaagta

SEQ ID NO: 18160 - DNA, 201 bp, Homo sapiens
cccgccaccatgcccggctagttttctgtatttttagtagagacggggtttcaccatgttagccaggatggtctcgatctcctgacctcgtgatccacccrcctcggcctcccaaagtgctgggattacaggtgtgagccaccgcgcccggccaaaaacattttttttttttgtagaactggaatctcaccatgttgccca

SEQ ID NO: 18161 - DNA, 201 bp, Homo sapiens
ttcttaaagcagccgcttgttttctgttggcttgaaagccagattaaggtctgtttttgaacattttcatcaatgaatacatattttttcattctctccartgtcttaaaagtaagagcactgagcctgtaatacaaatcaccaaagcaaaagttagataaagaggaagtgacaatgtcagcaattccacagtttcatcac

SEQ ID NO: 18162 - DNA, 201 bp, Homo sapiens
agaatcatcttttagactattcttaacttttttaaaaacacacataagttaaaagggctttctgtgctttacccacctaataatattattattaggaacarctggatttggaacaacatccaaagtgaatgctataatcctgctactcttcaatcatccaacatattaacttctccatagctttcttttatttttcatttt

SEQ ID NO: 18163 - DNA, 201 bp, Homo sapiens
gagtgtggtggtgcaatcttggctcactgcaagctccgcgtcccgggttcatgccattctcctacctcagcctcctgcgtagctgggactacaggtgcccrccaccatgcccggctagttttctgtatttttagtagagacggggtttcaccatgttagccaggatggtctcgatctcctgacctcgtgatccacccgcct

SEQ ID NO: 18164 - DNA, 201 bp, Homo sapiens
aaaacaattttttttttttgagatggagtctcgctctgttgcccaggctggagtgtggtggtgcaatcttggctcactgcaagctccgcgtcccgggttcwtgccattctcctacctcagcctcctgcgtagctgggactacaggtgcccgccaccatgcccggctagttttctgtatttttagtagagacggggtttcac

SEQ ID NO: 18165 - DNA, 201 bp, Homo sapiens
agcaatcctcctgcctcagtgtcccttgtacctgggactagaatcgccccaccaagcccaactaattaaaaacaattttttttttttgagatggagtctcrctctgttgcccaggctggagtgtggtggtgcaatcttggctcactgcaagctccgcgtcccgggttcatgccattctcctacctcagcctcctgcgtagc

SEQ ID NO: 18166 - DNA, 201 bp, Homo sapiens
aactcctgggctcaagcaatcctcctgcctcagtgtcccttgtacctgggactagaatcgccccaccaagcccaactaattaaaaacaattttttttttttgagatggagtctcgctctgttgcccaggctggagtgtggtggtgcaatcttggctcactgcaagctccgcgtcccgggttcatgccattctcctacctca

SEQ ID NO: 18167 - DNA, 201 bp, Homo sapiens
atgttcactctaggtgtcggtcacatcagaatggctttgagcaattcaccctaacctccttgagcctcaatttcttcttcttcttcttcttttcttttttytttttttgagacagggtctcattctgtcactcaggctaaagtgcaatggtgtgatctcggctcactgcagcagccccaaactcctgggctcaagcaatcc

SEQ ID NO: 18168 - DNA, 201 bp, Homo sapiens
ctcccaggttcaagcaattctcctgtctcagcctcccaagtagctgggattacaggtgcctgccaccacacctggctaatttttgtatttttagtagagaygggggttttaccattttcgccaggctggtctcgaactcctgacgtgaagtgatccacccacttcagcctcccaaagtgctgggattacaggagtgagcca

SEQ ID NO: 18169 - DNA, 201 bp, Homo sapiens
ctgacttttaaatgttacagttctatatgatatttgttccatggagtaaatcataaagtttctctctctctctctttttttttttttttttttgttttttkggagatggagtttcactgtcctcacccaggctggagtgcaatggcacgatctcgtctcgctgaaacctccacctcccaggttcaagcaattctcctgtct

SEQ ID NO: 18170 - DNA, 201 bp, Homo sapiens
gtacaaatgcaacatataaacaatttcttacaaaaaaagtcaccaattaaaccaaagtattttacagaatttactacaaaatgccataaaaactgccttcmcttaagctctctctccccgtatccggcgagccaactggatgtctttgggcatgatggtgactctcttagcgtggatggcacacaggttagtatcttccaa

SEQ ID NO: 18171 - DNA, 201 bp, Homo sapiens
aggaccctgttgtacacatttatcaattctagtaccttaatagctacccaacaagtcattaacatacagaaacatgcatcatgagaagcaagaaatatcaygcatccgttttgcatattaacaacttgtcactcctgagcaacagtgctgacatcactgaggtctgtaaacagtcacttttcgcattcatcctgagtgaaa

SEQ ID NO: 18172 - DNA, 201 bp, Homo sapiens
aggaaactataagttacactgtggttaaggtttgtatcttcacccttgaaaaagcctacattctatcacagtgatgtatggtcagacttaacagccccaaytgttaaacacttggatcaagtcataaccagttttattgcaaaaggaccctgttgtacacatttatcaattctagtaccttaatagctacccaacaagtca

SEQ ID NO: 18173 - DNA, 201 bp, Homo sapiens
cgagtagaaaagcatgcctttctaacttgtagttaattttcttcttttaacacatcagtctggtcttatttctaggctttatctcatacgacatttactgkgtcctcacatgcacatactcctggccccaacctctctcagaattttatttttcctagtgtcctagctttgagctgtctacttgttcttgcccaccactgg

SEQ ID NO: 18174 - DNA, 201 bp, Homo sapiens
gcaccttgggaggccgaggcaggcagatcacctgagatcaggagttcgagaccagcctggccaatatggtgaaacctcgtctgtagtaaaaatacaaaaaatcagccgagtgtggtggcaggtgcctataatcccagctaattgggaggctgaggcatgagaattgcttgcatctgagaggtggaggttgcagtgagcgga

SEQ ID NO: 18175 - DNA, 201 bp, Homo sapiens
ctcatcttaaaatcagcaaaggtggagccgggcgcagtggctcacgcctgtaatcccaggactttgggaggccgaggcgggcagatcatgaggtcaggagmtcgagaccaccctggctaacacagtgaaaccctgtctccactaacaatacaaaaaattagccgggcgtggtggcaggtgcctgtagtctcagctactcgg

SEQ ID NO: 18176 - DNA, 201 bp, Homo sapiens
cggtatattttatgcaagcttatacaccccaaatatttccattttaccatacaattaatatacagacgtattaatgagatatctacattctttttttttttctgtaccacatctttgaaatccagtatgtactttacactgtcagtgcatctcaattctgactgacctcatttcaagtgctcaatagccacaagtgacatt

SEQ ID NO: 18177 - DNA, 201 bp, Homo sapiens
gccgaggctggcagatcacctgaggtcgggagttcgagaccagcctgaccaacatggagaaactctgtctctactaaaaatccagaaaaaaaaaaaaaaaattaactgggcatgggcccatgcctgtaatcctggggaggctgaggcaggagaatcacttgaacctgggaggcggaggttgtatcattgccctccagcctg

SEQ ID NO: 18178 - DNA, 201 bp, Homo sapiens
aaaacatttaatttgaaaatgttgacactacaatatataaaatagctattataaatgcacatattgtattctatagctgccaggtttaattttttttttttaaaggaaactataagttacactgtggttaaggtttgtatcttcacccttgaaaaagcctacattctatcacagtgatgtatggtcagacttaacagcccc

SEQ ID NO: 18179 - DNA, 201 bp, Homo sapiens
tcctgggttcaggcaattctcctgcctcagccttgacagtagctgggattacaggcgcccaccaccacatccagctaatttttgtatttttaatagagacrggatttcaccatgttatagttcaaatacttttttaaaaattagatgtgctagttctgtactaacttgtctttttttgcaagttaaaatgctagtcagttc

SEQ ID NO: 18180 - DNA, 201 bp, Homo sapiens
aacttgagcccaggagtttgagaccagcctggccaacacagtgagaccccatctctgcaaaaaaattttttttaaaaaattagccaggcatggtggcatgmgcctgtagtcccagctactcaggaggctgaggcaggaggatctcttgagccctggagttccagactgcaatgagctgtgactgcaccactgtactccagc

SEQ ID NO: 18181 - DNA, 201 bp, Homo sapiens
gtggcagagcgagaccctgtctcaaaaaaacaaaacaaaacaaaaagattaagggttccctcaaaattagtgggggtaatgttagggaaccaggagcctakgagggccagagtagcaccattttaagttcagctccatcttgagaaatagtaaagcccattctctgctggtcacgacccacattcatgggctgtttacagt

SEQ ID NO: 18182 - DNA, 201 bp, Homo sapiens
cttaaaatggttcagttgatgtgatttgtgctaaacaaaagcagttatctgagtctctctgcgttagtgtgtggcctttcatctaaaggccttcaaggccctcccctactatgtttggtgttagaagacccagattttaaaatagtattaaggttctgcacagactgaaaatcacacatcacatatatcaggaggagaaca

SEQ ID NO: 18183 - DNA, 201 bp, Homo sapiens
gttacagaagaatgaccttcaccctcctctcctcttaaaattaagggctctcttagctgggcatagtggcgcatgcttgtaatcccagatacttgggaggmtgaggcacgagaatcgcttgagcccgggaagcagaggctgcagtgagccaagatcgcaccaccacactctagcctgggtggcagagcgagaccctgtctc

SEQ ID NO: 18184 - DNA, 201 bp, Homo sapiens
tacaggtgtgctaccatgcccagctaatttttgtagttttagtagagacaggatttcattattttggccaggctggtctcaaactcctgacctcagatgayctgcccgcttcagcctcccaagtgctgggattacaggcataagccaccatgcccaggccagaatttgcccatttttaatgcatgttctccacctttcata

SEQ ID NO: 18185 - DNA, 201 bp, Homo sapiens
ggctccctgaggaggctcactgcatgctttcgtgaaaggaccctgtcccagcaatcgatgtccactatcagcaggaagaagttacagaagaatgaccttcrccctcctctcctcttaaaattaagggctctcttagctgggcatagtggcgcatgcttgtaatcccagatacttgggaggatgaggcacgagaatcgcttg

SEQ ID NO: 18186 - DNA, 201 bp, Homo sapiens
gactacaggtgtgctaccatgcccagctaatttttgtagttttagtagagacaggatttcattattttggccaggctggtctcaaactcctgacctcagaygatctgcccgcttcagcctcccaagtgctgggattacaggcataagccaccatgcccaggccagaatttgcccatttttaatgcatgttctccacctttc

SEQ ID NO: 18187 - DNA, 201 bp, Homo sapiens
caaaaggcactttgtgaatatcagtatgcagttgggtacacttatccggaattaaacctgtctctcctggagctacatgccacaggcatctcacacagggrccgctgttctggaacactcctgtgagccaataaaggatcaacagcttctcttcaggccaggcgcagtggctcacacctgtaatcccagcactttgggagg

SEQ ID NO: 18188 - DNA, 201 bp, Homo sapiens
tataaaaattagctgggcgtggtggcaggtgcttgtagtcccagctactcaggaggctgaggtgggaggatggcttgaacccaggaggtggaggttgcaaygagctgtgatccattccagcctgggcaacagggccaaactctgtgtctaaacaaacaattgacactgaaaatcacttccacaaaatgagatgcaaagtag

SEQ ID NO: 18189 - DNA, 201 bp, Homo sapiens
gttggccaggctggtcttgaacttctgacctcaggtgatccacccatctcagcctcccagagtgctaggattacaggcgtgagccactgtgccggggcagyaggcctttcttgactgcagattttctaatacatgaaaacagccaccaattgcaaaaatatattaattttcgacaggtacaaaaggcactttgtgaatatc

SEQ ID NO: 18190 - DNA, 201 bp, Homo sapiens
atggtggtgcatgcctgtagtcccagctacttgggaggctgaggcagaagaattgcctgaacccgggaggtggaggctgcagtgagctgagaacgcgccaytgcactccagcctgggcaacaagagcaaaactccatctcaaaaaaaaaaaaaagaaagaaaaaagaaatctaaatagagtgtagactttagttagcaata

SEQ ID NO: 18191 - DNA, 201 bp, Homo sapiens
acagcacatggccatattccatatttatagataaatttatcctttatttgttgatgtcccctcagattctgaaagcttctaactaaaagtatttttgctcyctgtaatagaaaacttaaatgtatttatgttttgcattgagaaaaatgttttatataatgatctatagttattcaatattattactgaattctataattt

SEQ ID NO: 18192 - DNA, 201 bp, Homo sapiens
ctggtcttgaactccagacttcaagtgatccacccgcctcagcctcccaaagggctgggattacaggcatgggccaccgtgcccggccagaccatgacttkacttttgcacatatgcacagtatttctgaaaatcaagtgaaaaagttggatttatatactctatgtgagtttacatgttatggggatttccatttccaga

SEQ ID NO: 18193 - DNA, 201 bp, Homo sapiens
cccaagaggtggaggttgtagtgatctgagatcatgccactgcacttcagcctggatgacaaagtgagactgtcacaaaaaaaaaaaaaaaaaaaaaaaaattacatcccaaccactgcatattgattagaatggcttaagtcccaaaagctgactataccaaatattgacaaggataggaagtgacagtaattctcattc

SEQ ID NO: 18194 - DNA, 201 bp, Homo sapiens
atctcatcttgaactgtggttcccataatccctacatgtcgtgggaaggacccagaaggaggtgattgaatcatgggggcagtgaccctcatgctgttctygtgatagtgagtggattattttcccgggctttgctcagcacttcttgctgccgccatgtgaagaaggacacctttgtttccccttctgtcatgattgtaa

SEQ ID NO: 18195 - DNA, 201 bp, Homo sapiens
caggctggtcttgaactccagacttcaagtgatccacccgcctcagcctcccaaagggctgggattacaggcatgggccaccgtgcccggccagaccatgmctttacttttgcacatatgcacagtatttctgaaaatcaagtgaaaaagttggatttatatactctatgtgagtttacatgttatggggatttccatttc

SEQ ID NO: 18196 - DNA, 201 bp, Homo sapiens
ggagagggggcaggtgatttgtggaggatgctccagctgcctttccctgttctagagtaagggcagctctagatgcagcccttgccctacgtgaaagtgcrggaacactccctgagaggcaggagtgctggtttctcgaagctgtcatggtctctgtgttggtggttatgcctctttagaggtctcctggaggagtgtcct

SEQ ID NO: 18197 - DNA, 201 bp, Homo sapiens
acccaagaggtggaggttgtagtgatctgagatcatgccactgcacttcagcctggatgacaaagtgagactgtcacaaaaaaaaaaaaaaaaaaaaaaaaattacatcccaaccactgcatattgattagaatggcttaagtcccaaaagctgactataccaaatattgacaaggataggaagtgacagtaattctcatt

SEQ ID NO: 18198 - DNA, 201 bp, Homo sapiens
tcattgatatgttaatttgttcagtatcttttttccccatagactgaaagttccctgggagcacaaatcacatgtcttttgtgtactgcagtatgcccacycccacttaccaaagtgcctgagacatagtaggcctttaataattgttgaatgaataaattaatgtcctcctgataggcatacttgatggtgaaactagac

SEQ ID NO: 18199 - DNA, 201 bp, Homo sapiens
taatttttgtatttttggtagagacgaggtttcaccatattggccaggctggtcttgaactccagacttcaagtgatccacccgcctcagcctcccaaagkgctgggattacaggcatgggccaccgtgcccggccagaccatgactttacttttgcacatatgcacagtatttctgaaaatcaagtgaaaaagttggatt

SEQ ID NO: 18200 - DNA, 201 bp, Homo sapiens
ggccaggcttagtggctcacacctgtaatcctagcacttgggaggccgaggcaggtggatcacttgaggtcaggagttcgagaccagcctggccaacatastgaaatccctgtctctactaaaaataaaaaattagctgggcacagtggcgggtgcctgtaatcccagctactggggaggctgaggcagaagagtcagttg

SEQ ID NO: 18201 - DNA, 201 bp, Homo sapiens
gctgggtgtggtagatgacatctgtaatcccagcactttgggaggccaagatggttaattgcttgacgtcaggagttcgagactagcctgggcaatatggkgaaaccctgtctctaccaaaaatacaaaaaaattatctgggtgtggtagcatgcatctgtagtcccagctacttgggaggctgaggtgggaggatcgctt

SEQ ID NO: 18202 - DNA, 201 bp, Homo sapiens
tagaatgctacttagccataaaaaggaatgtattaatggcattcacagcaacctggatgggactggagactattattctaagtgaagtgactcaggaatgraaaaccaaacattatatgttctcgctcataagtgagagctaagctatgagcatgcaaaggcataaaaatgatacagtggactttggggacttgtgaggaa

SEQ ID NO: 18203 - DNA, 201 bp, Homo sapiens
atcaagcccggctaatttttgtatttttggtagagacgaggtttcaccatattggccaggctggtcttgaactccagacttcaagtgatccacccgcctcwgcctcccaaagggctgggattacaggcatgggccaccgtgcccggccagaccatgactttacttttgcacatatgcacagtatttctgaaaatcaagtga

SEQ ID NO: 18204 - DNA, 201 bp, Homo sapiens
cctttgctaatgatgcctgttcctttccagtgtatttccgcattgtcaccatggatagcaacttcgttccagtgaatgacaaggtgagttgggaggaggaraaggagtggcgcagggagaacagggaaaaggatgagagattctctagggtggaagtcctctcagcctgggcgtggcaaggcgaggccctctgggttggag

SEQ ID NO: 18205 - DNA, 201 bp, Homo sapiens
gccactatgcctgatggatttttctcctttgcttacatttgtaacatgcagccacaaaattctaatacaagaaaagagaataggagacaggcacagtggcrtatttctatagtcccagctatttgcgaggctgagacaggagggtcacttgagttcaggagtttgaggctagcctgtgcaacacagccatactgcccatgg

SEQ ID NO: 18206 - DNA, 201 bp, Homo sapiens
gctactcaggaggctgaggcaggagaatcacttgaacctgggagacggaggttgtaatgagccaagattgcaccactgcactctagctcgggctacggagyaagaatctgtctcaaaaaaaaaagaaagaaagaaagaaagaaagaaaaagaaaaaattagccaaacatggtggttcatgcttgtaaccccagctactcag

SEQ ID NO: 18207 - DNA, 201 bp, Homo sapiens
tcatctctactaaaaatacaaaaattagctgggcatggtggtgggtgcccataatcccagttactcaggaaggccaggcaggagaattactggaacccaaraggtggaggttgtagtgatctgagatcatgccactgcacttcagcctggatgacaaagtgagactgtcacaaaaaaaaaaaaaaaaaaaaaaaaattaca

SEQ ID NO: 18208 - DNA, 201 bp, Homo sapiens
agtggtacctgagcaaggcattgtagacctgtccttccaactggcaccagaggcaatgctgggcacctacactgtggcagtggctgagggcaagacctttsgtactttcagtgtggaggaatatggtaggtggggaaatggacaggccaaagtattgggcataatctcatcttaaaatcagcaaaggtggagccgggcgca

SEQ ID NO: 18209 - DNA, 201 bp, Homo sapiens
ggtgaaacctcatctctactaaaaatacaaaaattagctgggcatggtggtgggtgcccataatcccagttactcaggaaggccaggcaggagaattactkgaacccaagaggtggaggttgtagtgatctgagatcatgccactgcacttcagcctggatgacaaagtgagactgtcacaaaaaaaaaaaaaaaaaaaaa

SEQ ID NO: 18210 - DNA, 201 bp, Homo sapiens
gaatcttggtgatgacttttggggatgagagatgggggaacaacctatacttctcattttaaacacaagttttacctctaacttagaatttactgctgggraaaaaaaacaggaaaataaccaagtctaagaatttggattcccaggaaatgaaaaattacataagcatcctgtacttaaaatttaccttttaaatattat

SEQ ID NO: 18211 - DNA, 201 bp, Homo sapiens
aacaaacaaagcttagctgggcgtgatggcgcatgcctttagccccagctactcaagaggctgaggaggaaggatcacttgagcctgggaggctgaggctkcagtgagctatgatcgtgccactgtaccccagcctgggtgagagagtccctacctcaaaaaaataaaaccaaaaaactactggggccacgtcagaactaa

SEQ ID NO: 18212 - DNA, 201 bp, Homo sapiens
gaataaatgaaatgaaataaggtagacattcaaaatacagtcactaccttcatattaataaagtgaaaacaaggctaaagagtaaatgaggggaaaaaaaacacataccatgttcaccgcatcttgatcaaaagggttccattctatattctgaggatagtgggcgagaactttggatttgaatgttcttctcaaaggact

SEQ ID NO: 18213 - DNA, 201 bp, Homo sapiens
taagcatgaggcacatactcaataaaaatgggccaacagacttttctacatgtaatctgtgagctttgaggcactattcaaatatacctttttttttttttactaagatagttagcaagcaaatatcttcaagcagcttttaatcaagcttttagtactgtatattaccttcccttctcaaactaacttaaaatcacctta

SEQ ID NO: 18214 - DNA, 201 bp, Homo sapiens
actatgacctactttatttctaagaccctctcaaggttgactatctctctatcttctatctatctatctatctatctatctatctatctatctatctatcyatccatccatccatccacctacctacctacctacctctacctacctacctacctacctacctacctacctattttgagacagggtcttgctatggtgccc

SEQ ID NO: 18215 - DNA, 201 bp, Homo sapiens
tcctgttctcatggtgcttacattaagcacgagatacacagttgactactagctaagtaattggttaactgcaactgagataggtgctacaaaaaggtatacaaggtactaagagaacctaaggtgacctgagtgctgggaagacggtggaaggtgatggtcaggagcagcttctctatataaatgtttacagtgaagtct

SEQ ID NO: 18216 - DNA, 201 bp, Homo sapiens
ctcctgttctcatggtgcttacattaagcacgagatacacagttgactactagctaagtaattggttaactgcaactgagataggtgctacaaaaaggtatacaaggtactaagagaacctaaggtgacctgagtgctgggaagacggtggaaggtgatggtcaggagcagcttctctatataaatgtttacagtgaagtc

SEQ ID NO: 18217 - DNA, 201 bp, Homo sapiens
aacaaatacttcaaaagtttaacgaattgggctatgcagtcatgcctcatccaccatgttcacctgacctcttgccaactgaccacttcttcaagcatctsgacaattttttgcagggaaaacgcttccacaaccagcaggatgcagaaaatgctttccaagagttcatcaaatcccaaagcacggatattttacgttaca

SEQ ID NO: 18218 - DNA, 201 bp, Homo sapiens
cgaaatcattacatccaagaagtatgctcagcaaatcgatgagatgcatcaaaaactgcaaagcctgcagcgggcactggtcaacagaaagggcccaattmttttccacaacaatgcctgaccgcacatcacacaacaaatacttcaaaagtttaacgaattgggctatgcagtcatgcctcatccaccatgttcacctga

SEQ ID NO: 18219 - DNA, 201 bp, Homo sapiens
cactttgggaggccaaggcaggtggatcacctgaggtcaggagttcgagaacagcctggccaacatggtgaaactccgtctctattaaaaatacaaaaaaattagtcaggcatggtggcaggcacctgtaatcccagctacttgggaggctgaggcatgagaattgcttgaacctgggcggcagagtttggcagtgagccg

SEQ ID NO: 18220 - DNA, 201 bp, Homo sapiens
gcggccccggaacccgggcctcgggccccgccggctcgcgcgtcccgccgtccgcccaccggagctgggccgggccgccgcgcttgcttctgcccgccgcrccggggccggccctgggcctccgcggatgccgagccttgcaccggagggcgggcctcgctggctgttttccctcattgcctggctctgcgcggtagaggt

SEQ ID NO: 18221 - DNA, 201 bp, Homo sapiens
caagtcccaggttcttagtgccatcaacaaagaattggacatgacacatacaagtagcaaggcagcaaacagtttgttaagcagaatgcaatcagcaacgratcaggctgacctgcgagtggtatcagccccagtttgttatagttcatggccttttatatgttttttcctcacttgcttaaccttactttgtttttcgta

SEQ ID NO: 18222 - DNA, 201 bp, Homo sapiens
aagtgctgggattacaagcatgagccactgtgcctggcctaaccaattttctattaatagacttgtgggttgataatattttatttaaaaacttttttttycctgaaagtcaccatttttagagcagatacacttgtcattgaacaaatatgtagtaatttaatagtataatatattcacattttactatgtgtctggcag

SEQ ID NO: 18223 - DNA, 201 bp, Homo sapiens
ccactgtttcattcctttccaaaaaataaaagctggaattgttatgatgtttgtcctactttttattttcttttgtctttaaaatatatttattttcctgsggaatctgagggataccaatatactaattgacctgatttgattcctgtactttatatgtattaaaacatcactatatactccatgaatatgtacaattat

SEQ ID NO: 18224 - DNA, 201 bp, Homo sapiens
tcccgggaggggatgcggcagcccttgagtgctggttggggaaggagagctgcccccagtgaggaggcgccgagctgagtggcccagactccttaggagasgcctggttttgggcttcctggtgattttccttcatgtctgcctcctgtaggcggagcaggccaggaggaagcagcgagaagaacgcctgcagcagctgca

SEQ ID NO: 18225 - DNA, 201 bp, Homo sapiens
acacatggatacagggcggggaacatcacacactggggcctgttgtggggtggttggctgggggagggatagcattaggagaaatacctaatgtaaatgamgagttgatgggtgcagcaaaccaacatggcacatgtatacctatgtaacaaatccgcacattgtgtacatgtaccctagaacttaaagtataataaaata

SEQ ID NO: 18226 - DNA, 201 bp, Homo sapiens
atctcaatttctcaatctgtataatggggataatattgggtaatgcactaagcaccatgtcaggaatgtagttagtgttcaataaacgtttatctttattrctgcgaaacctcattctgccattcccttctttgtcttcctctcccaaccccccagcttcatcatggcctatgaacagccaaagggtaaaatgatcagaaa

SEQ ID NO: 18227 - DNA, 201 bp, Homo sapiens
ggttatcagactgatagctgcatttaaatagattttaaaatggatcagaagagataaaaatcactggtgggccgatttgactgatggaagtggtaaagggmgtcagcagctctagctggaggggcactcaccatctacggaggagtgggtgttcacagacctgggcgattgctcttagcaggaagagtgatgggaaccaag

SEQ ID NO: 18228 - DNA, 201 bp, Homo sapiens
tctacacagcaacaacgaaccatttctcaatcaaattgtcatgtgcaacaaaaagtggatttcattagacaaccggcgatgaccagcttagtggctgaacyaagaagaagctctaaagtacttcccaaagccaaacttgcaccaaaaaaaggtcacggtcactgtttggtggcctgctgctggtttgatccactacagctt

SEQ ID NO: 18229 - DNA, 201 bp, Homo sapiens
tgcctcagcctcccaagtagctgggattacaggcgtctgccactgcacctggctaatttctgtatttttagtagagatgggtttcactatgttggccaggmtggtctcaaactcctgacctcatgatccgcctgcttcgtcctctcaaagtgctgggattacaggcttgagccactgagcctggaccatcattttaatggg

SEQ ID NO: 18230 - DNA, 201 bp, Homo sapiens
caacagagtgagaccctatctcaaaaaaattaaaaagaagaaattagagcatatagagaagtaaaacagaaataattaacactgtgtgtagataccttccctcctgaattcaacaaatgttaacactttgctatattcatttcacaactttttaaaacagaaatatgaatcttaaattcggctggggaaaaaaaaacagaa

SEQ ID NO: 18231 - DNA, 201 bp, Homo sapiens
tgtgatctcagctcactgcaacctccacctcctgggttcaagcgattctcctgcctcagcctcccgactagctgggactacaggtgtgtgccaccatgccyggctaatttttggtatttttaatagagacagggtttcactgtgttagccaggatggtctcgatctcctgacctcatgatccacacacctcggcctcccaa

SEQ ID NO: 18232 - DNA, 201 bp, Homo sapiens
agccagcatggcaaaacctcatctctactaaaaatacaaagaaattagccaggcatggtggtgcgcgcctgtagtcccagggacttgggaggctgaggcaygagaatcgcttgaacccaggaggtggaggttgcaatatgctgagattgcgccactgcactccagcctgggtgacagagcaagactccgtctcaataaaaa

SEQ ID NO: 18233 - DNA, 201 bp, Homo sapiens
cagaaataggagagctcaggacagaccacaaacggtgagacataacctgctacttaaaagaggaggtgtgggccgggtgcggtggcttacacctgtaatcycagcactttgggaggccaaggcaggcagatcacctagggtcaggagttcgagaccagcctagccagcatggcaaaacctcatctctactaaaaatacaaa

SEQ ID NO: 18234 - DNA, 201 bp, Homo sapiens
aaaacaaacaaacaaaaaaagagcagaaataggagagctcaggacagaccacaaacggtgagacataacctgctacttaaaagaggaggtgtgggccgggygcggtggcttacacctgtaatcccagcactttgggaggccaaggcaggcagatcacctagggtcaggagttcgagaccagcctagccagcatggcaaaac

SEQ ID NO: 18235 - DNA, 201 bp, Homo sapiens
taattcttctgctgtttgggggaattaggggcctgaatagggagacagaatttgcttcatttttatcccttcatgcctttcaactccttttctgtgcatgyggccttaagtgattgacttttctgatttcttacaggatttcttctaatagctttgtgcagacatgcggtgccatcaacaaaaatggtcttcaagcctcaa

SEQ ID NO: 18236 - DNA, 201 bp, Homo sapiens
ggcaattttttggggtatgtcactttaaattttttaaaaatctagctctataatctcaggattcactctgttgttctcggcatacagattacaaaaaaathgagtataaaaccatatccataaatgcttattcttcttcatttgaaactgaaataaattggtagatattaatgagctaaaactcctgaacagactccacaa

SEQ ID NO: 18237 - DNA, 201 bp, Homo sapiens
agagaggaaaaaggaaagccaaattatgatacttggggaatagataaagaagagcagatggagaggagaggaaagaatgaaaaggagaggaaatagggaamaaggaagggaatgaacaatgggtaagggcaaaaaaaaaaaaaaaaaggataacattttaaagagaggctgatgaacaattttaattcttctgctgtttgg

SEQ ID NO: 18238 - DNA, 201 bp, Homo sapiens
ctgtggatcagaatttcaaatcagtctagaaggacattttcatcactgaaatccacctactttgattcactttgggttttcatggtaactcttcagcacaygcaatgtttttaaatttatggcatagctttatcagtgagtaagaaatgaagtatcacatgttattaaaacccccttaacacagttaagaagagtaaagga

SEQ ID NO: 18239 - DNA, 201 bp, Homo sapiens
tccatgttagagttgcctacggcaacccaagcccagaatgactacggaccacagcaaaaatgtgagttaaccaaggtagcatggaagacgatgcatagcarcagtaggctatggatgaatggggagtagaataagtttaaagcagagggtgcagaagaattgaggataatttgaggaaatacttttggttcagtttaaagt

SEQ ID NO: 18240 - DNA, 201 bp, Homo sapiens
aggaatataaagtaaaggaagaagaaggcaaataagctttgtctttttattctgaaaaggacactaccctcagaaaccaccaccttcatcttattgctaaragcagcgtcacatgaccagcacaagtgcaaatgaggatgggaaagtgagtttttaaattgaacacatggctatttcaaataaaagcagggttctattaca

SEQ ID NO: 18241 - DNA, 201 bp, Homo sapiens
aaggcacacaggcatgcagtgtggtgtgggtagtggtttatttccactatgaagaaccaaaggaggtaagcaaggcccaaaaatgtttcttagacttcaattattggtatcaaaagttagacaatggtgtttaaattccccttttattcttccactagttctttgaaaaaagaatcatactctgattttcatactgtgctg

SEQ ID NO: 18242 - DNA, 201 bp, Homo sapiens
gggaacagaacttcagatagctgtagtgtcaccgttagttctgtcagaggtcaaaacattgtctgtcaaaggaataacacctgcagtgttacctgaaacartgtatcccgttattaaagaaggcagtgtttgtagtttacaaaatcaattggcagaaaatgcaaaggcaactgctgctttgaaagttgatgttagtggacc

SEQ ID NO: 18243 - DNA, 201 bp, Homo sapiens
ttcatggccttttatatgttttttcctcacttgcttaaccttactttgtttttcgtaagtgaattgctcatcctggcctttccctcattgtgcctaaaccrcactttatttctcataagctaattgtgcatccttgcttaaccttattttatcttttctgacaaaattgctcatctttacttttagttcttgtaaccaaat

SEQ ID NO: 18244 - DNA, 201 bp, Homo sapiens
tgtaaaaataaatactttaataatatgccataatgacatgtatactgatccggatttgtatctagggattgtactgtgggagtccaaaaacctgctgcatrtgtaaaatagttatactatttaataagcaaaagtcactagcagcaaaattatccaaaaatcagtggagttctaggaataaagtatctcttgtggtgccaa

SEQ ID NO: 18245 - DNA, 201 bp, Homo sapiens
tgccataatgacatgtatactgatccggatttgtatctagggattgtactgtgggagtccaaaaacctgctgcatgtgtaaaatagttatactatttaatragcaaaagtcactagcagcaaaattatccaaaaatcagtggagttctaggaataaagtatctcttgtggtgccaaagcaaaaatgcaagtctagacctca

SEQ ID NO: 18246 - DNA, 201 bp, Homo sapiens
aaatgcaagtctagacctcagcaaggcaagactttatcaaaggaggctatgacaataggaagacactcaaagcctaagctagaaacctctcagggaagggrtgtgtgagcagaaactgtggcaaaggcagctgtggaaagagaaaagagaaaagggtgtattcagtttgctaggggaagtcttgaacttaatgaactgtgt

SEQ ID NO: 18247 - DNA, 201 bp, Homo sapiens
gctacagccgttaaatgccgctagatggagtgcgtgattctggtatggcctcatgtggacctgcgaaggatggagagaacatggtctctgcttcccagaawaaaaggagaaatttggtaacaagtgtggagactgctcttaaataatgctccagatttcaagccacttcttcctggaccatgagagagctccctaatgttg

SEQ ID NO: 18248 - DNA, 201 bp, Homo sapiens
aaagtagaattaaatatataatccaagagctggttacttgaaaaataaaaaagataggcttttagctaagttaactaggaaaaacagctaaaatatacttkatgcaataatttggaaattctagataaaatggattatttttaaagaaagtatgacttgccaaaactgatcttaaaaaaaaaaacagaaaatctaaataag

SEQ ID NO: 18249 - DNA, 201 bp, Homo sapiens
gttttgtggatcttcagtaaaacattccccagaaataagtagggccatttcccagtgtgactataaactggagacaggtaaatattttttttggtggaggkgggggctaattgattttggctctgaactgatgctaatccatggagacacaaaataaagtaagatgaaatgaaacaaacgcaacaacaacaaatccagcat

SEQ ID NO: 18250 - DNA, 201 bp, Homo sapiens
taccatagatgggtacttaaacaacgaacatttattgctcaagttctggagactggaagtcctgagattagggtgccagcatggctggtttgcggtaaaggcttgcctcctggttcacagatggctgtcttctcacatggcaaagagagtgagagctcttctctttctcttctctaaggacactaatcctatagcaggagc

SEQ ID NO: 18251 - DNA, 201 bp, Homo sapiens
gacacccagaggctccttatagtcactctagtctgcactaggcctctagcaatttatgaaaaatgtagctgctttcttcttgcatgcttgtatgatggccyaaatacctcccatactctggcactgatgagacactccacccatctggtctctgctcatgaggattgcatgtccttgaatttcaggctacttagcttacct

SEQ ID NO: 18252 - DNA, 201 bp, Homo sapiens
aaatattaaaatgtgccctgttttctgaaataggcctaatttcctccttggtgctctaggcatgtgtgctcggtgagggcctcctgatggcggaagttgargactgtgcactgagtcgttgcccctctgcttcttgtagaaaatgaggtgcataaggaaggcaggggcttggtctgtctaattcactgctacttgctgagc

SEQ ID NO: 18253 - DNA, 201 bp, Homo sapiens
tcccacagtcactgtgctctcccgccctcaagctcatcgattctgtctctgtaccacagtcactgctgggggatggcggggagggggtgaatcagcaattsaagtgtgtcttttctaccctcttcagtgcctctttcagtgatataaagttaaaaccaggcactgtgatcactcttctgatttttggttcttatgacagtg

SEQ ID NO: 18254 - DNA, 201 bp, Homo sapiens
accgtgtctggcctaaagaagtgtttgtttgttttgttttgttttgactttatggaaatttatagcaatcttagtgatattctcctcctgatgtttatatrgcccaggtttgtggaagtcctagctcatcgtgatccttagatctccttattttttgctttttttgaagaattgccattatccctactatcaaggctgata

SEQ ID NO: 18255 - DNA, 201 bp, Homo sapiens
gtttttttccattgctcactcagatagtattattgatttagtctttacaagacacaatattgaatcccatagataaatatggatcaggagaaagaaagatrctgtttccgtccttagtatggtgctaattgtggaattgggtctactctaagactctgagtaaagtagggaaggggaagagagctagagaaaggtaggatt

SEQ ID NO: 18256 - DNA, 201 bp, Homo sapiens
tctaacaaggtgtgtagaaaaaaacctgagcactaatctcatttatatgtattgatgaaataatactaggtactaggaaaaagaatcctgtaataccttamaagaatgaaaggacaaaaatggggattatttcagaaatacaaggataataaattattaggaaatctattttataaagagacccaaggacaatcaactcaa

SEQ ID NO: 18257 - DNA, 201 bp, Homo sapiens
tcccttcacacttctataatttaactctctcaactgcatgtgaaagatcttagctgaagatgactgacagtgttatttattccatgttagagttgcctacrgcaacccaagcccagaatgactacggaccacagcaaaaatgtgagttaaccaaggtagcatggaagacgatgcatagcaacagtaggctatggatgaatg

SEQ ID NO: 18258 - DNA, 201 bp, Homo sapiens
aaggagagcttcttcagccccagcagggtgcctccattcagaatataatgtgcctggactgtctgagtatggccacagggtagttcatgagacatgggctyaaggtggacaaagctcttgcttggggagaacacaagataagcagtgtgatgtgcctcttcgtgttcttctgacacccactggtagccgtaacagggacta

SEQ ID NO: 18259 - DNA, 201 bp, Homo sapiens
ttaaaaactttttttacacagacagggtctcgctatatttcccaggctggtctcaaacttctgggctaaagcctcagcctcccaaagtgctgggattatargagtgagccactgtacctggctctattttatttatttatttatttattttattttatttattattatttttttttgagatggagtctggctctgtcatcc

SEQ ID NO: 18260 - DNA, 201 bp, Homo sapiens
aaggtggacaaagctcttgcttggggagaacacaagataagcagtgtgatgtgcctcttcgtgttcttctgacacccactggtagccgtaacagggactaygatccttgtaattgacctaatgaattagaaaaattatattatttttagattatacgtcataaagattaatgttctcacaaaactacgtaagtttactgtc

SEQ ID NO: 18261 - DNA, 201 bp, Homo sapiens
ttgaaacaatggacataatctttgcttcttcttttttttttttttttcctgagacagagtctcgctctgtcgtccaggcaggagtacagtggtgccatctsagttcactgcaacctccacctcatgggctggtccaccatgatcctcccacctcagcttcccgggtagctgggattacaggcatgggccaccacacccggc

SEQ ID NO: 18262 - DNA, 201 bp, Homo sapiens
gagcaacaaacgtttctctgaccctacttctgttgtcatatctctttctctgacaaccccttcgtcctccctctttcagttgtaaggacctttacaattaycttgagcctgcctggaggatcaaggatactcttcctaccttgagggccttaatttagtcacacctgcaaaatccctcttgccatgtaagttaacatattt

SEQ ID NO: 18263 - DNA, 201 bp, Homo sapiens
caaagcctggcagggtcttttccccgggggagctgcaggcagggaacagtcctgatgggtcatccccttcactcccagcccagagcccccggccaggcacmcccagggaaggctctggtggagaacctgtgcatgaaggccgtcaaccagtccataggtgagcctggctgcctccagctgggtggacagatgggggctgga

SEQ ID NO: 18264 - DNA, 201 bp, Homo sapiens
cccgggggagctgcaggcagggaacagtcctgatgggtcatccccttcactcccagcccagagcccccggccaggcacccccagggaaggctctggtggasaacctgtgcatgaaggccgtcaaccagtccataggtgagcctggctgcctccagctgggtggacagatgggggctggagaaggggagaacaggaaagagg

SEQ ID NO: 18265 - DNA, 201 bp, Homo sapiens
aggcacccccagggaaggctctggtggagaacctgtgcatgaaggccgtcaaccagtccataggtgagcctggctgcctccagctgggtggacagatgggrgctggagaaggggagaacaggaaagaggggttgcctgccctgtttcctatataagtctgaggaaggggagggggtcgccatgggaatgtgctgtaggggg

SEQ ID NO: 18266 - DNA, 201 bp, Homo sapiens
atttgtttaggatacaggagtctttcaattagcctttgaatttctcacaaagggaatttgtccatgattgttactaaactggtgttcatgtgtgggacagrggggaagcctgggggaagaccagggtttcctactctgtcatcttgctgacttcacttctccactcatgtatctttcatcagccagtttcttactgtgtta

SEQ ID NO: 18267 - DNA, 201 bp, Homo sapiens
ttttacatattaaattactatgtatatttggatagaatgagatatagacttaggtaaaacctatgaatacctggatttggtagggggtaaaagccacttaytcctagtcttaggaataactgtataaggaaaggctatggcagaatcttttaataattctacgttcacattaaggctgatttcatcataacaagttaatga

SEQ ID NO: 18268 - DNA, 201 bp, Homo sapiens
ctttgttttcagtggcctgctgtgttcctaccacttcctgagtctttctgagaatgagtgggggagatctctggggacacttgggcttgagtgtctctgcsgaatcacttccatgtctctgccttctttccctctctcctaaaacatattactccttccactttctttgtttttgtgggtgtaagcctccatattactttg

SEQ ID NO: 18269 - DNA, 201 bp, Homo sapiens
tcctgagcagctgggactacaggtgtgcgccatcacacctagctaattttttaatttgtagaaatgagatctcactatgctgctcaggctggtggtcttaracccctaggctcaagcaatcctccctccttggcctcccatagtgctgagatgacaggcgtgagccactgtacctgaccccttttaccttgtttagcctga

SEQ ID NO: 18270 - DNA, 201 bp, Homo sapiens
ccgagatgctgtttatccttgatagtcaccttttaagccttctacaggtctatcaagttgagtcaccattaccacttggtgtgtgctgtgccttgtgtaayactgcagttccgggagtcctccaacctggaatgcatgctttgcggggatctatgatgccctcgaattgtatgttacatgtgaacctgtgagcattttcta

SEQ ID NO: 18271 - DNA, 201 bp, Homo sapiens
ccaacctggaatgcatgctttgcggggatctatgatgccctcgaattgtatgttacatgtgaacctgtgagcattttctaggggctctgcacctttgtgtyctcagctctgagccccatgcttgctgcaaccagcaggtgttcagagtgaatgaatttgcttatcttggcataaatcatgtaactgttgatgataccccag

SEQ ID NO: 18272 - DNA, 201 bp, Homo sapiens
tttgcttaaaaaggccttttcctcaagattatacaaatattggaatggaggaatatttttaaattttcttctgtgttttctctgctctagacaaagactarccctttgggtctctttattctcccaggttaaaagctgtttggtttgagaatattctcttgtacatcctgcattctgtcctcattaatctccaaaggaatt

SEQ ID NO: 18273 - DNA, 201 bp, Homo sapiens
gttgttgggtgcagcaaaccaccatggcacatgtatacctatgtaacaaacctgcacgttcagcacatgtatcccagaacttaaagtataaaaaaaaaaaatgccaaattgcccaccaatgcagctacaaagatttatagttccaagtatgtctattttccagcaaattccccagcaccatggagatttatccatctaagt

SEQ ID NO: 18274 - DNA, 201 bp, Homo sapiens
ggttggagcgcagtggtgtgatttcggctcactgcaacctccccctgcccggctcaagcgattctcgtgccccagccccccatgtagctgggactacaggygcccgccaccaggcctggctaatttttgtttttttcgtagagacagggtttcaccatgttggccaggctgttctcaaacccctgacctcaagtcatcctc

SEQ ID NO: 18275 - DNA, 201 bp, Homo sapiens
gataaaatgaatgtgcattgtaacttgaggtttatacccctttgtggttttgatctcactatgattatgaagatggactcttacctgaggcacaggtcatrgaactgaaagtcttttcttgctcaataccttcagccttggatgaaaggaaagaaaaggagaaaagatagaaacatcctggtgacaagagaaccacatgga

SEQ ID NO: 18276 - DNA, 201 bp, Homo sapiens
ggaggtgcaggtttgttacataggtaaatgtgtgccatggtggtttgctgcacagatcatcccatcacctagggattaagcccagcatccactagctattmttcctgatgctctcccttctgtcactcccactctcagacaggccccatatatgttgctcgcctccatgtgtctatgtgtttgcatcattcagctcccact

SEQ ID NO: 18277 - DNA, 201 bp, Homo sapiens
gaaatttagtaaaactatttgatgattagcccttacacttaagagatacatcaaaatgagtaactcagaaacggagaagtcatgataaaaggattgaatgrtaggtaatcagttcacttaaatgtagaaataaggctaaatgacaaggaagttatgtttttagggtacattttatgtgttacatcttggcaacagatgaat

SEQ ID NO: 18278 - DNA, 201 bp, Homo sapiens
tgatctatatacaaccactattacataatttacaaagagataagtgctataagataaattaaaattatatattttggagatttcaagatgacgggttggakaatgactctcgtggaactgagaaagctgagttgtgtgtcagcttcaagaatgttcctggcatataacctaacttgcagcaaagaattctgcaagcgctaa

SEQ ID NO: 18279 - DNA, 201 bp, Homo sapiens
cctctccacgaatcacagagtaaggcattgtgagctccacaaagaagggctggaaggctcggagagaggcagtggaagagataccaagtccagcatcttcrgacaggcagaaggcccctgccttccactcggtgatggtgtcagggactgttactcctacctcagccacacctgatgagctggggaggagggcaagtgaag

SEQ ID NO: 18280 - DNA, 201 bp, Homo sapiens
gagagtggttgctatactaaaaatgaaattaccagtggagtgaacagaatttaatgatttacattaaattacttttacataaattaaatttactttaaatyactgtatggaactttgcaaaactgttgttctctgggaaataagattagagcattagattttattccacttattttttgacatctgaaataaacaattcag

SEQ ID NO: 18281 - DNA, 201 bp, Homo sapiens
gctgctgtatttgaatagtggttttggccatggattatgagatatttctgtgatgttcacgttgtttcttgtcaccagtgaagccctttgtccttctttakgttttttaaaatacagcatccctatgaatgtctttcctgtttccataatcagaattactctttctttccattgtcagcattttccctctcttacagtaca

SEQ ID NO: 18282 - DNA, 201 bp, Homo sapiens
tccataatcagaattactctttctttccattgtcagcattttccctctcttacagtacatcagaatcttgtattttatctgattttgtgccctgaagtatyggatgtatctaaaaaaaaatctctgatcagttctagctatcaccagctaagtcacctcagcaagaaacaattaatttgaatcttggtttctttgtgtgta

SEQ ID NO: 18283 - DNA, 201 bp, Homo sapiens
  misc_feature (1)...(201): n = A,T,C or G, or insertion/deletion polymorphism (see Tables 1-2)
agcattttgggcatagtaatattgttggacatgaaataaaattaaaagcaaattgctgttttacctccatagtatccttgacctactgctcctgcagacanggaagggatgactgaacacgactttggttttcggatttttgagttagtgaacaccttcaatcccatcccctggaaaaaaataattgttcaatctacttgt

SEQ ID NO: 18284 - DNA, 201 bp, Homo sapiens
aacgtgactcacagatttaggtgacagctcagcttcaggcttcattagcagcacactctggtctacagcacggagggcacaaagggagaggggggtggctstcaccttcaggcgggtgtttgaggctggcaggctctgagctgaggagaatctcaaatttacctgtaaagaggatatgattaaagcagccattttataatt

SEQ ID NO: 18285 - DNA, 201 bp, Homo sapiens
ccagatgaataggcagaggttagatctagccctgactcacatactgagcttttgtgtgatcctcacaagagactttaacctttttattggcttcatttttstctgctgaaaaatggagaggcaaggctacataattactaagattatgaatagatacagagttttattaacattcaaaaactcacaagccagcatgttaat

SEQ ID NO: 18286 - DNA, 201 bp, Homo sapiens
ccagaaagcagatgttgcagtaagccaagcctgtgccactgcactccagtctgggcaacagagccagactgtctcaaaaaaagagaaggtttgaacaaatraaaaggcataacttgataatataggatgcttcaacatgataaaacttcaattctttctaaattaatttataataactcctctcccaaattctaaggattt

SEQ ID NO: 18287 - DNA, 201 bp, Homo sapiens
accaaaacaatcttgaaaaagttaaaaattgaaagactcacacctccccatttcaaaactttgcttaaagctataatatcaagactgtagtatgggcatargaatagacatgtagttgaggacaatgaattgagagtccagaaataaacccagactcttgcatcaattgattttcaacaaggctgccaagacagttcaatg

SEQ ID NO: 18288 - DNA, 201 bp, Homo sapiens
ggtccctgagaatttgaaaaatcaaaggtgccattttcgggccattagctgtcattatctaatttgcactggggcccggccacgttgcaataaaaagccamacactttggctttatgcttcccataagccaagtttggcaaggctgtgaaggagacagctcagtggagaggacataggaattttggattgttgagcaccta

SEQ ID NO: 18289 - DNA, 201 bp, Homo sapiens
caattcacaaaaaatccattagggctaataaacaagctcagaatggtgcaacaatgcaagatcaatatacaaaaatcagttgtatttctataaagtaacartgaacaatccaaaaataaaattaagaaaataattccatttataataccatcaaatataataaaatactttgcaacaaatttaacaaaagaagtggatgac

SEQ ID NO: 18290 - DNA, 201 bp, Homo sapiens
tacctctaattccaggggttccacaacgaaaacaaaggtttttccccaaatgggatttgtggcaacttttctgttttcccaaggaatcccaggccaccagragtcattttagggtctttaatacctgcaccaagagtggcaagaaagaatggagaaaagtaattcagttgactgggaaaaaaccttttccaggaaaacaag

SEQ ID NO: 18291 - DNA, 201 bp, Homo sapiens
accatgccttgctaatttttgtatttttaatggagatggggtttcaccatgttggccaggctggtctcgaactcctgacctcaagtgatccatctgcctcrgcctcccaaaatgctgggattatagatgtgaaccacagtgcctggcccatctacttttcaatcaaaaatgatcataaaagaataagaatataagttgaca

SEQ ID NO: 18292 - DNA, 201 bp, Homo sapiens
gcctaataaacaagtaaagctgagagacaaagacagattttgagaggtacttatttacctctaattccaggggttccacaacgaaaacaaaggtttttccycaaatgggatttgtggcaacttttctgttttcccaaggaatcccaggccaccagaagtcattttagggtctttaatacctgcaccaagagtggcaagaaa

SEQ ID NO: 18293 - DNA, 201 bp, Homo sapiens
ccattctcctgcctcagcctcctgaatagctgggactacaggcgcccgccaccatgcccggctaatttttttgtatttttagtacggacagggtttcaccrtgttagccaggatgatctcgatctcctgaccttgtgatccacctgccttggcctcgcaaagtgctgggattaccggcgtgagccaccgcgcccggcctgg

SEQ ID NO: 18294 - DNA, 201 bp, Homo sapiens
aaattatattatttttagattatacgtcataaagattaatgttctcacaaaactacgtaagtttactgtcctaccttaactagtagctagaaatcttttgwtccacaatgaaaagtgggagaaggacccctgattttgtttctctgcttcaaatgtaggcatgctttgtgactttacactgcagagcctcctgggattgag

SEQ ID NO: 18295 - DNA, 201 bp, Homo sapiens
aatctttttaccaaaagtatatgtaaactgttttttcaatagtcttaaatacatgttacactgttaacttttagcaacctttacttttgttggtaagtttkggattttaattatgtactaggtggagagcctaggacccagacagaagttcagataaggtccgacttattccagcatttaactccatgtgtcctaggtctt

SEQ ID NO: 18296 - DNA, 201 bp, Homo sapiens
ataatttttctttaccataaagcagtggttcccaaagtgtagtctgcatattctgtagtctgagaccctttcagggttgtgaactgaactagttacttttytcatggaacaccatttttactttttaaaagaatgattgatatggtttgactgtgtcgccacccaaatctcatcttgaattgtagctcccacaattcccat

SEQ ID NO: 18297 - DNA, 201 bp, Homo sapiens
gtgaggctgggagactttgtgatgggctgaagctcaaatccacctgtgaaattggaacaaaaggtcagaaaagcaaatttccaggtttacccatgcattcrctcgcatttgcagagtgttcctcatgtacaatgtataaccactctgcttgacttcgtggagggttggcattgtgtcaatcctgaagctttttgttcccta

SEQ ID NO: 18298 - DNA, 201 bp, Homo sapiens
aggtcagaaaccctgtacagggactgtgcacataaaatatgaggccagtttcccgagagttttattggctccataagtcaagtttgattccttaaaggacrgcacacctctccagtcaaagccttggtaaaataaccagtttttcaaatcatgttctgttacaaaataaaacagattcttattgcactgatggaaataact

SEQ ID NO: 18299 - DNA, 201 bp, Homo sapiens
attttgttccatagaaggaatctgagataaggccttttaaagctgagcccagtcatggaattgtaccattaaatacctatgagttgggtgaattcctctcytcctgaggttccaagataacttgggggtactggcctgtcagaaagtgacattctttacttaccacaggtcagaaaccctgtacagggactgtgcacataa

SEQ ID NO: 18300 - DNA, 201 bp, Homo sapiens
cctacctcagccacacctgctgagctggagaggagtgtaagtgaagaacagaaagtaagcagttaaatacatcctttctagggagagaatccctaggaatkattctactgccatgacttaaaaacactcaatagaaataccaataatggagagtataatcaaggattgagatgggaatataagtccttttcttccaactgt

SEQ ID NO: 18301 - DNA, 201 bp, Homo sapiens
acaggatccctggtgacagccccgttcccattcacactggaacctcaccaccatccctgagtgtctgctctgagtatggcactgtccagatgctgtggacrtagaagggaagaagacatggaggggacagttaatagacatgaaaacaaatagcacctatgtgaagtcagcatgtttgcctacaaggaaaacaaaatggtg

SEQ ID NO: 18302 - DNA, 201 bp, Homo sapiens
ttggaagtgttctctcactttttggaagcatttgagactgattggcacttttttaaaaaaatgtgtattagaatctacctgtgaagctatctgatcctggrtttttatttgttagaaggatttttgttattcattaaatctccatactaatgataggtctgttcaaactttcttgatttttacttttgacatgttttgtgt

SEQ ID NO: 18303 - DNA, 201 bp, Homo sapiens
gtggatcctgtaggtcagcttccggggcttcccatgccctcacgtttcaggagataacgtgagcctcagaggacctgagttctgaatagaaaatttttgckcttcatttcttcacacacccagcctctcagtgagctcctgctggctttgtccagcatgcgacataagattgaatccaagccttttaagatagagccgcct

SEQ ID NO: 18304 - DNA, 201 bp, Homo sapiens
atacatactgaaccatccttgcatcctgggaataaatactacttggtcatgatgtatgatccctttaatgtgctgttggattctatttcctaatatttttwaaatattttttgcatctatattcatcagagatattggcctgtcattttttttttcttgtagtgtccttgtctggctttggtagcagtgtgctactggcct

SEQ ID NO: 18305 - DNA, 201 bp, Homo sapiens
accagtccataggtgagcctggctgcctccagctgggtggacagatgggggctggagaaggggagaacaggaaagaggggttgcctgccctgtttcctatrtaagtctgaggaaggggagggggtcgccatgggaatgtgctgtagggggaggcaggtgttgctcggagccccagcctctgttcctatgcaggcagggcca

SEQ ID NO: 18306 - DNA, 201 bp, Homo sapiens
cgtgggtgtcatccaagttttggctcagcaactcagcgtctgggtttctcctacaggcctgtggccaggagagaggccaggtgacagaggccctgctcctytctgtggttggaggaaagatgagtgaagggatcaacttctctgacaacctaggccggtaagtagtggttctgctcatctcctgggtcgtgatacatggcc

SEQ ID NO: 18307 - DNA, 201 bp, Homo sapiens
catccaggtgcgggcgtcatgctgagcttgggtctgagaccatgtgggggtggcagctggaaacgtgggtgtcatccaagttttggctcagcaactcagcrtctgggtttctcctacaggcctgtggccaggagagaggccaggtgacagaggccctgctcctctctgtggttggaggaaagatgagtgaagggatcaact

SEQ ID NO: 18308 - DNA, 201 bp, Homo sapiens
ggccctggcagaggtgaaggacatggagcagctgctggcccttgggaaggaggcccgggcctgtccctattacaggagccgccttgccatccctgcagccmaggtgagggccctgcagggccagaaagccgctcttggctctcactgtggtctaggccatgaggggcgtcctcatcacactgtagtttgggggatgccccc

SEQ ID NO: 18309 - DNA, 201 bp, Homo sapiens
tctgggtgacagagcgagactccgtctcacaaaaaaaaaacaaaaaaaaaaaccaaaatacaaaattagccgagtgtggtggcacaggcctgtaatcccarctactcaggaggctgaggcaggagaatcgtttgaacccagtaggtggtggttgtggtgagccaagatggcgccattacactccagcctgggcaacaagaa

SEQ ID NO: 18310 - DNA, 201 bp, Homo sapiens
gatctctgcaacccatggatcaggagatacccttgtgagcccatgccaccagggtcttgggtctgatacacaaagctatgtggagtcttggcagagcagcwgctcaggcacacagaaaccctggagttttacataatccggccctgggatccctggaaaggcaggaaatctgtttgtatatatccctaggaagggggctaa

SEQ ID NO: 18311 - DNA, 201 bp, Homo sapiens
cttctttgagaaggtccctgatcccattcctcctgactgggcgagacctcccaatgagggtctccagccacctccaacagttgcatgtgggctggcaacargttagtacccccacaggatggagtttctagaggaaggcacaggctgccatctttgctgtttcatggcctttgctggtgatacttccacgtatgggagaaa

SEQ ID NO: 18312 - DNA, 201 bp, Homo sapiens
aaaaacaaacaaacaaacagaaaacaacagcatcaacaaaaaagacctaacacaaatctaattcaaagggcagcagcctcaaggattaaaggtagataagytcacaaagatgagaaagaattaattcaaaaacaacgaaaactcaaaatgccagagtgtctcttctcttccagatgactgtgacacctcaccagcaagggc

SEQ ID NO: 18313 - DNA, 201 bp, Homo sapiens
aatgcagagaaggccagtaagatactccacaagaacatcaacccaaagacacaaaatcatcagattctccaatgccaaaatgaaagaaaccatgttaaggrcacctagagagaaaggccaagtcacctacaaaaggaaacatatcatactaacagtggacctctctgccaaaaccatggaagccagaagaaattgggggcc

SEQ ID NO: 18314 - DNA, 201 bp, Homo sapiens
agaatcagtgtaatgacaatggccatactgcccaaagtattttatagattcagtgctattcccattaaactaccattgacattcttcacagaattagaaamatctattttaaaattcatatggaaccaaaaaagagcctgaattgccaagacaattctaagcaagaagaacaaagctggaggcatcatgttacctgacttc

SEQ ID NO: 18315 - DNA, 201 bp, Homo sapiens
ttagttcaatgtctttgtatctagaggtattgtacctgaggaatcacacctgagaggcattatctgtacttggacctgatttaaatgatatttagcctttsagctgttcctattttacaatgagaatctcagagagaggatcgagtatattttacatgtgagagctcatgaattgctggggatcagaggtcaggctgtgga

SEQ ID NO: 18316 - DNA, 201 bp, Homo sapiens
gctctggagaaaatcagttgtcacattgtgggacaccagcagccctaggacctctgtgtggtgaggaactgaggcctcctgccaatagctctcaagaaacytgtcttggaagcagatcttccaacctctgtcaagctgtcaggtggctgcagctttggccgccatgttaatcgcaaccagggcaggtcacaagctagaccc

SEQ ID NO: 18317 - DNA, 201 bp, Homo sapiens
ccacctagctaagctgctctgaattcctgactcacagaaattgcatgtgataataaatgtttattgttttaagccactaggttttgaagaaaattgttatrcagcagtagataggtaacgcaaacaccctttctacttctttatttacctttgtttttgagtagaattaaataggtacataaatgaacatgtattatttat

SEQ ID NO: 18318 - DNA, 201 bp, Homo sapiens
ggtggaagacaggaacagaaatgtgttccagctgatggtcattgggttcagtgctatccacagtttcagacacccactgaaggtcttgggacacacccctrcagatcagggggcactagtggatatgctccaacctgaagaatgttaattttgataattaaaaataggacaggggtctcagatatagttatctcacagttt

SEQ ID NO: 18319 - DNA, 201 bp, Homo sapiens
aatttcaaaatcacatctcagcttgtgccacttatcttgaacaaatctctcaactattctgaatccacttttctaatcttaaaatgggactattattctcyggaatgttgggcagattaagtgagaaaacctatatgagacagcttgagaaactatcaagtactcggcaagtggtacgtatttttactgttatattttact

SEQ ID NO: 18320 - DNA, 201 bp, Homo sapiens
aaagtttatttccacacctttaaaggtgccagactgccagtctctcctggatcgggaaaggaatagaaaagagaggcagggctgcattagtggagattctstacagatgcaaattttccccacaaaggacagctttgctaggccacttccgttttctgaccaaggggcagccatttcaaaatatgtcaaagaaatatattt

SEQ ID NO: 18321 - DNA, 201 bp, Homo sapiens
tttcaaatatggagaaaacgaaactactggggaaagggagggtccactgagaaccatcccagtaactcaaccacggctggtcttcgctggacaccatgaaycacactgtccaaaccttcttctctcctgtcaacagcggccagccccccaactatgagatgctcaaggaggagcacaaggtggctgtgctgggggtgcccc

SEQ ID NO: 18322 - DNA, 201 bp, Homo sapiens
gcctgtattatgttgagatactctcctatttatagtttcttgagagtttttaacatgaaagaatgttgaattttgtcaaatgctttctctgcttgtatttrtataattatgtgattttttttccctttattctgtgaatgtggtacaaatttatacatactgaaccatccttgcatcctgggaataaatactacttggtca

SEQ ID NO: 18323 - DNA, 201 bp, Homo sapiens
aaataaaattaaaaaaaaatttagccaggcatgatgatgcatgcctacagttccagctacctgggaggctgaggtgggaggatcgcttgagtgcaggagaytgaggctgtggtgagccatggttgcaccaccacactccagcctaggtgacacagtgagaccctgtctcaaaacaagacaaaacaaacacacacacatata

SEQ ID NO: 18324 - DNA, 201 bp, Homo sapiens
ccattttaaagtcatgttattagtttttttgctgttgagttgagttgtaggagttgcttatatgttttggatagcaaccccttgtcagacacatggtttgmaaatattttctaccattccatatgttgtcttttcactttgttgattattcctttgctttgcaagagctttccagtttgacatagttcaacttatttgttt

SEQ ID NO: 18325 - DNA, 201 bp, Homo sapiens
tctaagactgagtaaacttctattttagaaattggaggtctggtttgtaactttcctgggtaaaagtattttcatctattttgtgaactttgttaatcatmttttatttggtaaattatgaatgggtatacatttgtacagttcgtgtatattgattgtggcaaagttgtattgatttctatattttggatgagaaatttt

SEQ ID NO: 18326 - DNA, 201 bp, Homo sapiens
tgagccaagctcttgaattaggtactggggatgtgtggcaagtaaagcaatcaagtggagagatggatattatttagtcagttcacaagaattttaatgcrtattttgtatcagatactgttctgtggttaacaaaaaccacatgttcctgccattggggattatacattcctgtggaagaatacagatcaaagtatataa

SEQ ID NO: 18327 - DNA, 201 bp, Homo sapiens
atagtcagcaggaagaccattcagggggctaattcagtgttcagttggaagaaaatgagggcccaaagtaagattacaacagtgggaagagtgagaaaaaatatggatttcaaatgtacgtgatgtgacctaataactactttaatatatatgggcacattggagagagaagttgtgttactgcaaattatcacatctgaa

SEQ ID NO: 18328 - DNA, 201 bp, Homo sapiens
ttacagacaggaatgaaaaccgaccttgtctggaggagaactttccaagtttggtacagaggactcccacagattatgatgaagccatcaactcacaaacwggattaccaaacacacaagaaggcaatcactgtgagagtcagcagaaacaactgatttagatttctcaaatatttctagtattagaattataattacata

SEQ ID NO: 18329 - DNA, 201 bp, Homo sapiens
ttcctatttgtttaagcagctgctagttgcttttctgttatttattgccagagggattccagctgatacaaaatattttcaagataggtcagtgtgataaacgacatgggttgtgaaacaacatacagtgttaagtcatctgcaagtacagaaaggaggtcaacttgactgtggcttagggattaggctaaagagagagag

SEQ ID NO: 18330 - DNA, 201 bp, Homo sapiens
atgtttattaaaaagaaccataaacatcacctctacaggacaattgggcaggtttcccagggaagggaagaaaactattgttctccttggtgggtctggakcttaggcaggtaaaggaacttgagcctctttggaagagctggtgaggggtgggtagatcagagagaccttgagtcttcttagttcaggatgtaaacatgc

SEQ ID NO: 18331 - DNA, 201 bp, Homo sapiens
atcgagaccgtcctggctaacacagtgaaaccccatctctactaaaaacaatacacaaaaattagccgggcgtggtggcgggcgcctgtagtcccagctayttgggaggctgaggcaggagaatggtgtgaacctgggaggcggagcttgcagtaagccgagatcacgccactgcactccagtctgggtgacagagcgaga

SEQ ID NO: 18332 - DNA, 201 bp, Homo sapiens
gaaaaagttagatcaaagggtaaacactaggatgtaaattccacaaaggataagatgttgttcattgctgtattcccagtgcctagaacagtacctagcaygcactgtgtacaggtgtttgataaatattcagttaatgatgaaagggtacatactatatatacgtttatatatttgtgttttatgtatgcttatataaat

SEQ ID NO: 18333 - DNA, 201 bp, Homo sapiens
gcagaaggcccctgccttccactcggtgatggtgtcagggactgttactcctacctcagccacacctgctgagctggagaggagtgtaagtgaagaacagwaagtaagcagttaaatacatcctttctagggagagaatccctaggaatgattctactgccatgacttaaaaacactcaatagaaataccaataatggaga

SEQ ID NO: 18334 - DNA, 201 bp, Homo sapiens
gaggccgaggtgggcggatcatgagatcaggagatcgagaccgtcctggctaacacagtgaaaccccatctctactaaaaacaatacacaaaaattagccrggcgtggtggcgggcgcctgtagtcccagctacttgggaggctgaggcaggagaatggtgtgaacctgggaggcggagcttgcagtaagccgagatcacg

SEQ ID NO: 18335 - DNA, 201 bp, Homo sapiens
tcgcttttacttcttggttattgggactagtgctatgactgtggtatataaatatctcttcaagaccatgttttcaattcttttggatatacacccataartaaaattcctggatcatatggtagttctatttgaattttttgaggaaacttgacggtgttttccatagcagttaaaccattttacaatcccaccaactgt

SEQ ID NO: 18336 - DNA, 201 bp, Homo sapiens
ctaatgactttggggttactgcccaggacacagtttgccgcccgtttgcacagatgcagtgaggcgcttgttccttctccactgggacagctaggaaggcrggagaggcttccagctgcacactgacctgaaaccacacataagaaagggagtagagagggaaggagaacagagggagaatgggtttgaagtaaagcatct

SEQ ID NO: 18337 - DNA, 201 bp, Homo sapiens
agagtaattaattacagaaaacattataacacaagagggaaaatacagagctatatggtaaatataccttgtcccgcggtctatgagtaaaagctctagayactacattctttctaggcggtctgtcatggacacactcagctcctaatctcagttccttgttctcaccttcttcctatccctttattaaagcacctcatt

SEQ ID NO: 18338 - DNA, 201 bp, Homo sapiens
tgactttcagctgatcactgcctgaaacttctgtgcatagttctctgcctgggattctgctcccaccagtgaggacgccttaattttttcttttactcacytgtccatttagtctgtatatcatcacgagacaatgctgaagtgtattagactttgctaaaagggttagagtaattaattacagaaaacattataacacaa

SEQ ID NO: 18339 - DNA, 201 bp, Homo sapiens
ttccaggaacctaagagcgcacaccaggtggagcaggtgctgctggcgtattccaggtgcatccaggtgcgggcgtcatgctgagcttgggtctgagaccrtgtgggggtggcagctggaaacgtgggtgtcatccaagttttggctcagcaactcagcgtctgggtttctcctacaggcctgtggccaggagagaggcca

SEQ ID NO: 18340 - DNA, 201 bp, Homo sapiens
tctgtctttctcagatattccaggaacctaagagcgcacaccaggtggagcaggtgctgctggcgtattccaggtgcatccaggtgcgggcgtcatgctgrgcttgggtctgagaccatgtgggggtggcagctggaaacgtgggtgtcatccaagttttggctcagcaactcagcgtctgggtttctcctacaggcctgt

SEQ ID NO: 18341 - DNA, 201 bp, Homo sapiens
ggtccatgcccactgggagaagggtggcctgctgggccgtctggctgccaggaagaaggtgagtggcctgtcggcagccttgccacttgtgaggacagtgycactgagtcctcctgggagctcttgtgctcatcgggtcaggacaggcttctggctcctcatccccaccgctcccagtccctgactacagaggatttcccc

SEQ ID NO: 18342 - DNA, 201 bp, Homo sapiens
atttctactggaagcattaaatggtaccagataacacttcagaaaatactttacattttaaagcagggtgaagggccaccaggtagctacaaaagggcaasaacaaaagttccattttctgaatggtccactggggacttgagtagatggcccacatttagttgaataacggtaattataaaaccacgagagacttaatga

SEQ ID NO: 18343 - DNA, 201 bp, Homo sapiens
aagctccccttctaaaaggaaggaagcccttttatcactgtcttgagttcaacaaggaaagtggggtagattgaaatgtcataaaaccagaaaaaaaattrtggtgactttatggcaaagaatagtggtaggaaattaaagcttttaataataaaatttgccaacacatgtgtgtgtgtgcaccctgccttgccactgctg

SEQ ID NO: 18344 - DNA, 201 bp, Homo sapiens
ccagcgagagagcctgtgagcacagtggagcctcaggacagcacgatcagagctggcttctcaaaggcggtgcccttgagctcagtcacctctcgcccctytgccgcccattgctggcacctggcttgggctctccgtctgcccaacagctcacttcagaggaaacaggaaaccaacggggccttcgctgccctcctcagc

SEQ ID NO: 18345 - DNA, 201 bp, Homo sapiens
catcacacctggctaatttttgtatttttagtagagatggggtttcaccatgttggccaggatggtctcgatctcctgacttcatgatctgaccaccttgrccccccaaagtgctgggattacaggtatgagccactgcacctggccaacattcttaaagaaaataaattccaaccaagaatttcatatctagccaaacta

SEQ ID NO: 18346 - DNA, 201 bp, Homo sapiens
tggcttctcaaaggcggtgcccttgagctcagtcacctctcgcccctttgccgcccattgctggcacctggcttgggctctccgtctgcccaacagctcayttcagaggaaacaggaaaccaacggggccttcgctgccctcctcagccaaacccatgcaaggccagcccatggaaagggagccagggagggtgagagtgg

SEQ ID NO: 18347 - DNA, 201 bp, Homo sapiens
tcagtcacctctcgcccctttgccgcccattgctggcacctggcttgggctctccgtctgcccaacagctcacttcagaggaaacaggaaaccaacggggmcttcgctgccctcctcagccaaacccatgcaaggccagcccatggaaagggagccagggagggtgagagtggaggggcagaggcctggctgcttctcctg

SEQ ID NO: 18348 - DNA, 201 bp, Homo sapiens
attcaatgagaagacctaactaaacaaaatctacatgcacccaacacaggagcacccagattcataaaacaagtgcttagagaccttcaaagagactcagrctcccacacaataatattgagaaacttcaacactccacagacagtattagacagatcatcaaggcagaaatttaggatctgaactcagcacaggacccaa

SEQ ID NO: 18349 - DNA, 201 bp, Homo sapiens
aggccagcccatggaaagggagccagggagggtgagagtggaggggcagaggcctggctgcttctcctgctgtgatctgggcacacactaagctgcttagmcaacagctctatctcctgggctcagggctcagccatgtgaggaggaagggatcagtacagccctgaggaagagtgaggacctcaagtcagccagagctgg

SEQ ID NO: 18350 - DNA, 201 bp, Homo sapiens
ataaaggaaaaaatgatccacacatgccatacaccacccccagccaaaaataacaaaacaattattaagtactaatgttgtaatatcaaacttactatgaygtttaaattccttctgcagtttactgatctggttgctttttatcctgttcccagatagagttttcactttctttggtttcaatgtagtctttagactggg

SEQ ID NO: 18351 - DNA, 201 bp, Homo sapiens
agcacaggacccaaatggatctgatagacatctacaaaactatccactacaaaacaacaacacatacattcttctcaactgcacacggcactactctaaarccgatcacacaatcagacataaaactatcctcagcaaatttagaaaaatgaaatcatacactccacactctcggactaccatgtgattaaaatagaattc

SEQ ID NO: 18352 - DNA, 201 bp, Homo sapiens
ctgcttctcctgctgtgatctgggcacacactaagctgcttagccaacagctctatctcctgggctcagggctcagccatgtgaggaggaagggatcagtrcagccctgaggaagagtgaggacctcaagtcagccagagctggtgccccacaaactgctgtggaacgcgagcaacttacttaactactctgagccccctt

SEQ ID NO: 18353 - DNA, 201 bp, Homo sapiens
ggcacacactaagctgcttagccaacagctctatctcctgggctcagggctcagccatgtgaggaggaagggatcagtacagccctgaggaagagtgaggrcctcaagtcagccagagctggtgccccacaaactgctgtggaacgcgagcaacttacttaactactctgagcccccttatgtgcaaaataggaacaacaa

SEQ ID NO: 18354 - DNA, 201 bp, Homo sapiens
aggactgatggtttcttttctgagaaagcaactcagataagacagatgtaattttctcaagttttaagaccaggaggataaatttctatgtttattaaaargaaccataaacatcacctctacaggacaattgggcaggtttcccagggaagggaagaaaactattgttctccttggtgggtctggagcttaggcaggtaa

SEQ ID NO: 18355 - DNA, 201 bp, Homo sapiens
cacacatgatttcctttcttatcacctcatttttagaaggatgtgcacaaaccggaacaaggtcagagagcaaggagacgagtgagggaaattgacatcaygtcttaaaaggaagaaatggggttgggcctgatggctcacacctataattccagcactttcagaggccggggcgggtagatcatttgaggccaggagttc

SEQ ID NO: 18356 - DNA, 201 bp, Homo sapiens
gagtagacaattatctctagcagttttttgctcacctaatgactttggggttactgcccaggacacagtttgccgcccgtttgcacagatgcagtgaggcrcttgttccttctccactgggacagctaggaaggcgggagaggcttccagctgcacactgacctgaaaccacacataagaaagggagtagagagggaagga

SEQ ID NO: 18357 - DNA, 201 bp, Homo sapiens
gcagggaagaaatgtaactatgtgtggaaaaacgggaattttagggaggggtaaggaagagaaaggggtcaacaggaagcaggcagtcatgattggtgagrcgtctggctccctttgtccagatgtgatgatctggtaagtttcagctccttgatactgtctgggaggactgatggtttcttttctgagaaagcaactcag

SEQ ID NO: 18358 - DNA, 201 bp, Homo sapiens
gtggagatgttgaggatatccttgtaggcatcttagaataaaaggcaaaggaaaaaaatcgcagcatctagtggtcttttcctgaaggaagtagcactcamtataaggttcccactgccatatacaatctttgagtagacaattatctctagcagttttttgctcacctaatgactttggggttactgcccaggacacagt

SEQ ID NO: 18359 - DNA, 201 bp, Homo sapiens
tttacaattttttaaaaaagcagctagtaagataaatgcagttttattcatggtcataaaaatattattggttattgtagaggaaatctcaatcaaagatrggttcaaattatgttgaaagtaaaagaatggacaaagacataccatttaaatggcaaccatgacaaagctgggtggctatagaagaagggggaaacactt

SEQ ID NO: 18360 - DNA, 201 bp, Homo sapiens
agggtgtggtggtgtgtgcctgtggtcccagctactcaagaggctgaggcaggaggatcacttgagcccaggcgttggatgctgaagtgagctatgatagscacctaggcaacagcatgacatcctgtctcaaaaactaaataaataggccgagtgcagtggctcacacctgtaatcccagcactctgagaggccaaggtg

SEQ ID NO: 18361 - DNA, 201 bp, Homo sapiens
cttgaaaactaagacctttgctgtttatttcacaatgtgaaatcaataaacctgaggatacaagtctctgtagtgatattctgtatttactcatttttacmcatttttgaatgcaattttgctaaggaaggaaagcttacagatgcataaaatgtaactgggaagagtagccataaaaatcaatgaatggatgtggctggg

SEQ ID NO: 18362 - DNA, 201 bp, Homo sapiens
ggcctcccaaagtgctgggattacaggcgtgagccactgtgcctggccatgtttatattttataagttcgtgtactttattcctcaaatttataattacartaatgcaactggcataacagaatataccacaatcatacagggtgagcatataactcaactgttaggagcaaaagtatgtagaaatattagagattattat

SEQ ID NO: 18363 - DNA, 201 bp, Homo sapiens
atttacttattcaatgaatatttgagtgcttattatataccaggcactgttctaggcactggggatatggggatacagcaatgaaaaaaaaagataaataytttgtccttatgaaatttgtattctagagtagggagacataatgaacaaatgaaaacaggcatcagatggtgataggtagtaaggagaaaaagaagtaag

SEQ ID NO: 18364 - DNA, 201 bp, Homo sapiens
tagtacctaaccctatatatactatgttttttcctatacatacatacttaggatgaagtttaatttataaattaggcttagtaagagattaacaaaactgwtaatagaagaacaattataacaatatgccaacatcactactcttgagctttgggaccattattaagtaaaataaggattatttgaacataagccctgcag

SEQ ID NO: 18365 - DNA, 201 bp, Homo sapiens
tgaaggaatatgattatacaatgccatactcaatggtggcagcatttaatttaagtaatggagaagaattaaacattgtagctggatctgtttctgtagtygaggacaactgtgatgtaactttgaattaaacaaacaaaacaaaacagaagaagactatatatatattttttctttttttagagacagtctcactttgct

SEQ ID NO: 18366 - DNA, 201 bp, Homo sapiens
tggagtagatgattaacccagctaaagcttgatttttactagctagcactttattaacctagtgtgttatattgtgactttaaaatggtaaaaacaattayaaagtggagttctcattcaggttagctttctagtccaagtcactaacaatttactatgtaatagacattctaagatttctgccaacaattctattgtcaa

SEQ ID NO: 18367 - DNA, 201 bp, Homo sapiens
tatccgaggggcatatgttccaagatccccagtggacacctgaaaccacagatagtacctaaccctatatatactatgttttttcctatacatacatactkaggatgaagtttaatttataaattaggcttagtaagagattaacaaaactgataatagaagaacaattataacaatatgccaacatcactactcttgagc

SEQ ID NO: 18368 - DNA, 201 bp, Homo sapiens
atgaatgtaattcttgttaaatggaaaatcttgtttttaaaatatgaaggtttagagttttgtttacttttgtcatgtaactggttctgtatttctatgcrtgccaattatacacatctctatctgcatttttttttctattttaaccgctgaaggaatatgattatacaatgccatactcaatggtggcagcatttaatt

SEQ ID NO: 18369 - DNA, 201 bp, Homo sapiens
tcttgtatatagtagttccccttatccgaggggcatatgttccaagatccccagtggacacctgaaaccacagatagtacctaaccctatatatactatgwtttttcctatacatacatacttaggatgaagtttaatttataaattaggcttagtaagagattaacaaaactgataatagaagaacaattataacaatat

SEQ ID NO: 18370 - DNA, 201 bp, Homo sapiens
cagccttgagttgtcaaagtgcttccaagtatgaatatagtaatgtttggatctgactctaaaagttttctctataggagatactctccagtttaatgaaygtaattcttgttaaatggaaaatcttgtttttaaaatatgaaggtttagagttttgtttacttttgtcatgtaactggttctgtatttctatgcatgcca

SEQ ID NO: 18371 - DNA, 201 bp, Homo sapiens
attggccagactgtggtcatttttcttgcacaaaatgataaatgaggtgcatcagaatgttaacaataactgtattttgctgctacgctggtattgtttakgcacttactttctaatcagtagctcattaactgctgggttttgtttttgtatttttaactagagttcttcactggacattactaagtaaatctaagaaag

SEQ ID NO: 18372 - DNA, 201 bp, Homo sapiens
tgtttagattttaatcttcatctgcagtttattttggaataggaagcaaggtgggggaaatgttacaggattacttttcctttgatgaacagaaaataagygtatgcgtgtttgtgtgtgggtttgcacaaggttggttcatgacccttaaccataggagcccctttgttcactgtagtgctcatgttcgctgtggaactt

SEQ ID NO: 18373 - DNA, 201 bp, Homo sapiens
caggctggaattttcgtattttttgtcacaaagcctcgctatgttgcccaggctggtttcaaactcctggcttcaaacagtcctcacaccttagcctcccwaaggatcttgtgctgagattacaggcatgatcctccatctttttatattgtgtaattataatgcagagtagtttgagcttggtgatgagaaagctttctt

SEQ ID NO: 18374 - DNA, 201 bp, Homo sapiens
agtcattttaaaacaaagatgagagaactataaagtaaggggaaatatcattttatttaaaaataattattcaatgatagataatggagatacagaatgamtcattgggttcataggtatgatttgtgcagccagtcttagaggaaatacatcattttaacattattcccacaaaatgttaaagctcaatggtttgactat

SEQ ID NO: 18375 - DNA, 201 bp, Homo sapiens
ttggactaaaacaatttactacaaacaatagaattcaatggctgtcctaacatatttatactttggggcatgccgaagtatttttgtataatgaatctgtycccattgtgaatttgctatgtatatacatttcaaatttatagatactatctcatcaactttctaaaatgccaacttaccttctcactagcaatgcttatg

SEQ ID NO: 18376 - DNA, 201 bp, Homo sapiens
atgaaccatcatacccggactttctgctttttaatgagaaaaaatatttgaatatacaaagataaaagcacatcctcaggttgttttcattctaatatgcytccatcatttctcaaaattatcaaaaagcactttgggagactgaggcaggtggatcatgaggtcaagagattgagaccatcctggccaacatggtgaaac

SEQ ID NO: 18377 - DNA, 201 bp, Homo sapiens
agactacaggtgcactccaccacgccccgctaatttttttcttaagctttttatggagacagggtcctaccatgttgctcaggctagcctcaaagtcctgrcctcacgggatcttcctatctcggccccgcaaagtgttagggttacaggcatgaaccatcatacccggactttctgctttttaatgagaaaaaatatttg

SEQ ID NO: 18378 - DNA, 201 bp, Homo sapiens
tgtatttttttttttcagagacagggtcttgctctgttgcccaggctggagtacagtggttagatcatagctcagtgcagccttgaactcctaggctcaastgatcctcccatctcagcctcccaaatagctaagactacaggtgcactccaccacgccccgctaatttttttcttaagctttttatggagacagggtcct

SEQ ID NO: 18379 - DNA, 201 bp, Homo sapiens
ttggacttttgagccagccaactaataagaagtaaaaccaacactgtggagtggcaaacaaaagaaaatgcattttaatctgggtctcaggaattgcaattgggagacacagatccagcaaataggaaaatcatgttccgtcttggtgagattaggcagaggcttagaaggactactgtgagtttacacatctggaaggtt

SEQ ID NO: 18380 - DNA, 201 bp, Homo sapiens
agtcccctctccttgggaaaaagtgttcctactctctgggtgagcgtctggtccgaatcgttggcttggagatgattttacgggctctttctggagaacaraagtaaaacgttacagtgttccgatgagacacagtaggcagtacttgggagggtcttatagaccccaccctgtggaagtgggtctcaacattacacaacc

SEQ ID NO: 18381 - DNA, 201 bp, Homo sapiens
cttcaaaaaagcatcaataaacagtccatgtcacttgctttagtttgtttgggcctactaattgctccaacacttctcgggaatgatctataaaagaaaayaatgacaatatattaattgacaataaaaaatgtttaatgtttcctcatgtctaactggaggtgatgttaattattatacagttatttaaaggattaaagg

SEQ ID NO: 18382 - DNA, 201 bp, Homo sapiens
tctgggacacagctaaggcggtgttaagagggaaacttatagcactaaacatccacatcgaaaagttagaaagatctcaacttaacctcacatcacaactraaagaactagtgggtcagctgtgctgtgcaggtgatccatgctacaccctaatcactacttgctcttcggaacctgaaagttacagcaacggaagcttca

SEQ ID NO: 18383 - DNA, 201 bp, Homo sapiens
gctccgtcccagggaaatgtaaagttgctaccagcctgaaaaccctgatgggggtggggtggtggtggctgcagtcccaggttgtggggttgcccccatgmggagaagtgggactcacataaaaaatagtctggccaaacgtccttgatgaacattgatgcaaaaatcctcaacaaaatatttgcaaaccaatattcctga

SEQ ID NO: 18384 - DNA, 201 bp, Homo sapiens
aatcacttggttgattttctttaaagtttttattttgaaatgattgtagattcacagagagtcacaaaagtagtagacagagtcccttggatgctttaccyggctttccctaacagaacagctatcttacagaacagcaggacaccatcaaaaccagggcatgggcattgtctgactattgttagactacagaccttatgc

SEQ ID NO: 18385 - DNA, 201 bp, Homo sapiens
tgggactcacataaaaaatagtctggccaaacgtccttgatgaacattgatgcaaaaatcctcaacaaaatatttgcaaaccaatattcctgatgaacatygatgcgaaaatcctcaataaaatactggtaaactgaatccagcagcacatcaaaaagcttagctaccgcgatcaagtagacttcatccctgggatgcaag

SEQ ID NO: 18386 - DNA, 201 bp, Homo sapiens
gctcatgcctgtagtctcagtactttgggaggctgaggctgtaagctgtgatcctgccactgcactctcgcctggcctgtctcaaaaacaaaacagaaacyggcaaaactcagtcttgttgttttcttttttctttctttcttttttttttttttttttggtagagacaggatcttgctatgttgtccaggctggtcttaa

SEQ ID NO: 18387 - DNA, 201 bp, Homo sapiens
ctcacataaaaaatagtctggccaaacgtccttgatgaacattgatgcaaaaatcctcaacaaaatatttgcaaaccaatattcctgatgaacatcgatgygaaaatcctcaataaaatactggtaaactgaatccagcagcacatcaaaaagcttagctaccgcgatcaagtagacttcatccctgggatgcaaggttgg

SEQ ID NO: 18388 - DNA, 201 bp, Homo sapiens
aatattccatgctcatagataggaagaatcaatatcatgaaaatggtcatattgcccaaagcaatttatagatttaatgtttttcctataaaactaccaaygacatccttcacagacctagataaaactatttaaaaatgtatatggaactaaaaaaagagcccaaatagccaaggcaatcctaagcaaaaagaagaaagg

SEQ ID NO: 18389 - DNA, 201 bp, Homo sapiens
aaaaacagtgaaggaaatttcttgagctggacacagttctcagccttctattccccacatgacccactttcagttgtcaagtctgtgctggagagaatcarcctcaagaaaactcatggaatgaaggacgcacaacaagaacacaaggtggctgtgtgcaagtagtttattttgacattcctgagcctattgaccactttt

SEQ ID NO: 18390 - DNA, 201 bp, Homo sapiens
tcatcctctgagggctgaccgtgggaaggcagggaactggacccaaagatcctggcttttcctccccaggagaccagggataagctcagcatccccatacrctgaaggcagcaggaagctggctgtctaacacctctcttgctttgtaagagggtccttcctaatgcagagctggggaaaggagagacgctgggaggggct

SEQ ID NO: 18391 - DNA, 201 bp, Homo sapiens
tgatagtctccgtgtggccacagggcagggtaccagccacaggctccaggtgaatgtaacttccacttaaggagaaaacacgatttgcagtgtgctgagcrccctggtggtcttctgctacccatgaatagtgaaaacacaagttgggatgcacagtgaaaacctgagtaaacagaaaagcaaagaaagaatactgtcttg

SEQ ID NO: 18392 - DNA, 201 bp, Homo sapiens
gacgctgggaggggctagcatgccgcaccagggaaaggctggtgctctcagcggtggctggctctgcctgcagctacgtgactgagagaagaaagtcattyagagaaatcccaagacacagagagcagcatcgtggcttagatccctcttgcctccctcctccgagggctggcagtggggagtgtatatacctccgaaaat

SEQ ID NO: 18393 - DNA, 201 bp, Homo sapiens
agattttgaagtcagacggaaaacagcgctaggactgagagttcctcggttcaggttcacttttctttcaccagactactgcataaaaacagcttatgacrtcttggtatgagtaacaattgctttcaaaaattatgggcagaaattacttaaatcttctcaccattagataagagaaagaaagccttagattgaacttcc

SEQ ID NO: 18394 - DNA, 201 bp, Homo sapiens
aacacaagttgggatgcacagtgaaaacctgagtaaacagaaaagcaaagaaagaatactgtcttgaaattcttcaccttagcttctcaccaaaatgaatrgttacaacggtgtcttccactctaaaatacactatgcctctccctcatactggtcgacagccaaataaatgaattttcagtctcccaacattcaaatatt

SEQ ID NO: 18395 - DNA, 201 bp, Homo sapiens
tttgggaggtcattcctttggggtggtcatgttttgggggaaaccagagagaacctgaagtgaggaaacagcttggggatgaaggtgctgtacagacaccrggccagtcccgccggctactcatgtttactatgcacagccagcacacccatgggcgaaagaccttcggtgccccctgctcctaagagctaagcactaaat

SEQ ID NO: 18396 - DNA, 201 bp, Homo sapiens
caacaataataacaacaataaacaaggtagcttgcaaaataccagacattaaaaaaaaattaagtgcatagcttgaaaactttgcagctgtaaattatgamgctagctgaccacacagattttgaagtcagacggaaaacagcgctaggactgagagttcctcggttcaggttcacttttctttcaccagactactgcata

SEQ ID NO: 18397 - DNA, 201 bp, Homo sapiens
ctgggatttgaagaggtaacctttaactccattgttgagtgaggaaataagggcaagggattttaccctaaaatagggaatatagactagttggccttggkatctaaagccaggagtcccgactcccagccagggctctccccatgagacatgggagagttggccaagctttctggggaagagcaccatctggggttcggt

SEQ ID NO: 18398 - DNA, 201 bp, Homo sapiens
ataaacagcacaggaaaatgaaggaatatcctagtcctcttgaggattagagggggagggaagaggagggaaggaagagaaaaaggtaggaaaggatccamaatgaggctgagattttgaaacccaacctgctggctttatagccaagcttttcatcatcactggaaactcaaacctgcagcaattatatgctgaggtcat

SEQ ID NO: 18399 - DNA, 201 bp, Homo sapiens
tttacagatgaggaaactgagaagacatcaggcaatttttccaacatcacacaaaggataaggaaaatgttaggatgccaaccccatgtctccaggtttcyttccactacagcatgctgttcatttgtgatctcgttcattcatccatccttccttccactcattccttcattcactcacctatatttttccctaaacagc

SEQ ID NO: 18400 - DNA, 201 bp, Homo sapiens
cagttctaaaacaattaacaaccatgaagggacaaaagtccgaagtgggcatctcgcttatggcacatcagcctctagtcatagtcaccctcagaccccayctagcggctgcccgaattatttcattcagggatctgtgtgtttggctgataaccaggcaccactggcccgtggggtgctatgactattgcagtgttaaaa

SEQ ID NO: 18401 - DNA, 201 bp, Homo sapiens
gcatcctcagaatatctatttgtttgtaggggataacaagaaaccctctggatgtatgaatgtattgacagctagcatataggaggaacttgcctgtaagratactcatttatcccagttttctgtacacaaaactgctgaaaccaagcactggaaaagctccctaaaattacttggtaaaactaaatggtccacaactca

SEQ ID NO: 18402 - DNA, 201 bp, Homo sapiens
cctactaactattcagtatatttcccctaaggtcattttatttcagtgttatctttctgagaagaaaaaccaaagaagattattttatgctcctggacttktccttaacctcacagttcacaacattggccctctttgtgtatacaaagccaatcacttcactgcaacagaccacagctgagcaaacaaatacagacgttg

SEQ ID NO: 18403 - DNA, 201 bp, Homo sapiens
ctaccacatttggtggcagtttcagggataattcttcagaaacctcaccacctagagaaataagcaaatcagacatatgaaaattatttctgcattatatstttctaaacagctctatgacccagaagctaggactatgccttatacctaaactcctcctgaaaagttgtccgcctttaatacaacagtaatatataaata

SEQ ID NO: 18404 - DNA, 201 bp, Homo sapiens
tggcggagaacggtgccccatgagcgcagaattagaaatctctccctttatgaattcttgtcaaggaaattgcaatcgcagcccagcagagaggaattaaygtattgggtcaggttgtcttagataataggatagccctagattacatcttagcggagcagggaggagtatgtatggttgcaaataccgcgtgctatattt

SEQ ID NO: 18405 - DNA, 201 bp, Homo sapiens
tcttaaaagtaagagcactgagcctgtaatacaaatcaccaaagcaaaagttagataaagaggaagtgacaatgtcagcaattccacagtttcatcaccaytgttccctttgagtaaaggatgcattcaactcatctactgtaaaccatctttattgttagtggccctttcctttgggtcaggaaaatattatgactagca

SEQ ID NO: 18406 - DNA, 201 bp, Homo sapiens
tggggtggtacctacagtgactgtgagaggaatctccagaagggcgatggtgatataggcggagagggtcacttcatcttctactcctccctgtgaatacragagagagatctgaataattcaacttctgagaatgctattgattagttctttctattctgctgtgtcatggaattcatccttacccatatccatccctat

SEQ ID NO: 18407 - DNA, 201 bp, Homo sapiens
gaattcattctgtgacatatggattattttgagtctcattaggcatattttgaaactactcagattcatattaaaactccatgaaggtaggaccgaagtcktattcatttttgtttctcccacaaatttttttttttttttctgagatggagtctcactctgttgcccaggctggagtgcagtggcgtgatctcagctcac

SEQ ID NO: 18408 - DNA, 201 bp, Homo sapiens
tctctccaatgtcttaaaagtaagagcactgagcctgtaatacaaatcaccaaagcaaaagttagataaagaggaagtgacaatgtcagcaattccacagkttcatcaccattgttccctttgagtaaaggatgcattcaactcatctactgtaaaccatctttattgttagtggccctttcctttgggtcaggaaaatat

SEQ ID NO: 18409 - DNA, 201 bp, Homo sapiens
ccagtctttaataaaccaaattaccacaacatctcagagttctttcagctatcctggaagtaaccaagaagcatgcatgtatcccggtaattcaaatccartttcacagccactgctgaatatccaaaattatcctcaacaaatttctgtttctgatatgcataatgggacagttgtggcctcacacacttcagtagaaag

SEQ ID NO: 18410 - DNA, 201 bp, Homo sapiens
cagttcttgatacagaggatgggccaggagaaggatctcaggtgtgctctcacctttcttcacagcttcctcattaagtgacttgagtacttccttcctcytgtcctggttacctgccagggcaaaagcataggccagcagtgctttggtatatacatggctgccatggtccccttcttgtgctgtcttccaggctgactc

SEQ ID NO: 18411 - DNA, 201 bp, Homo sapiens
agaggttacggcacttaatcaagctcacagagctagtaagtggtggaacagattgactttagagccactctgttctgccctttaacagaattcattctgtracatatggattattttgagtctcattaggcatattttgaaactactcagattcatattaaaactccatgaaggtaggaccgaagtcttattcatttttgt

SEQ ID NO: 18412 - DNA, 201 bp, Homo sapiens
gaagaacttgttttttgcaaacatttttggaacttttaacttccaaaaatgatcttatcacgtgagcatttcatgatctccaaggttggaacgtgactcayagatttaggtgacagctcagcttcaggcttcattagcagcacactctggtctacagcacggagggcacaaagggagaggggggtggctctcaccttcagg

SEQ ID NO: 18413 - DNA, 201 bp, Homo sapiens
cgccatgttgcccaggctggtctcaaactcttgagctcaagcaatacacccacctcggcctcccaaagtgctgggattacaggtgtgagccaccgtgcccrgccttgttctctcatcttatagacaaattcaccgaagcacagagaggttacggcacttaatcaagctcacagagctagtaagtggtggaacagattgact

SEQ ID NO: 18414 - DNA, 201 bp, Homo sapiens
gatatttcttttcatcttgtcacaaatttttatattcctcttcatcctgttaaaatctcccctgtttttcttaaattaccacctttcaaggtaaataaaaygctgctggttctctttttatcagtgtgccatttaattttcggttattacaatagaatggtcttaaatttgtctttaaactgaaaacatgcaactctcaag

SEQ ID NO: 18415 - DNA, 201 bp, Homo sapiens
tctggctgccaggaagaaggtgagtggcctgtcggcagccttgccacttgtgaggacagtgccactgagtcctcctgggagctcttgtgctcatcgggtcrggacaggcttctggctcctcatccccaccgctcccagtccctgactacagaggatttccccaaagtccctggctgtgaggttctccagtccgctggccag

SEQ ID NO: 18416 - DNA, 201 bp, Homo sapiens
gtaccctactccctacaatccatctggtcccaaacacttcccaaagcaactgggctttatgctgctctgtgtgcaaacaggaagttccacccacacaagayctctaaacaaagttgaggtctctgaacattctctggaaaggtcattgatggcctatttatagtcaaggttaattcctggcgggctaaatagaatccctgg

SEQ ID NO: 18417 - DNA, 201 bp, Homo sapiens
ctctgaagaacttgttttttgcaaacatttttggaacttttaacttccaaaaatgatcttatcacgtgagcatttcatgatctccaaggttggaacgtgastcacagatttaggtgacagctcagcttcaggcttcattagcagcacactctggtctacagcacggagggcacaaagggagaggggggtggctctcacctt

SEQ ID NO: 18418 - DNA, 201 bp, Homo sapiens
ctgaggcgtctgtgggcaggaggaccaagaggagaagaaccagacttggatgaaggagtttgttcttccccatgttgcagaaagaaggagctggaggagamcagactgtattgtaccctactccctacaatccatctggtcccaaacacttcccaaagcaactgggctttatgctgctctgtgtgcaaacaggaagttcca

SEQ ID NO: 18419 - DNA, 201 bp, Homo sapiens
ggaagaaggtgagtggcctgtcggcagccttgccacttgtgaggacagtgccactgagtcctcctgggagctcttgtgctcatcgggtcaggacaggcttytggctcctcatccccaccgctcccagtccctgactacagaggatttccccaaagtccctggctgtgaggttctccagtccgctggccagaaaacacaagg

SEQ ID NO: 18420 - DNA, 201 bp, Homo sapiens
cactgagtcctcctgggagctcttgtgctcatcgggtcaggacaggcttctggctcctcatccccaccgctcccagtccctgactacagaggatttccccmaagtccctggctgtgaggttctccagtccgctggccagaaaacacaaggccacgagcagacccgagacctggcaccctaaacctgtctctgggaaatgtc

SEQ ID NO: 18421 - DNA, 201 bp, Homo sapiens
attgttattgtccctgaaaacgtggaagttattattccattgtctcatctactgctgctgatgatttaggctcattgttattttccctcaaaacgtggaarttattattccattgtctcatctactgttgctgatgagatgtctgctgttggcttggcaatcttttctttgcagcaaatctttcttttttcttttaacctt

SEQ ID NO: 18422 - DNA, 201 bp, Homo sapiens
ttataaaatagccacattttataaaattattttaaataacctcactcgtgaatactggggtagctggggataaatttttaggctcattgttattgtccctsaaaacgtggaagttattattccattgtctcatctactgctgctgatgatttaggctcattgttattttccctcaaaacgtggaagttattattccattgt

SEQ ID NO: 18423 - DNA, 201 bp, Homo sapiens
cccttcaaaaactaacagatatgttaccattttgatgtatttcctttcagttttatctgtgcattcatatgtgagtgtatgtacacatacatatgtgtatrgttgtatgtatatatgtagtatacacataagtgtataatctggatatatccaactccgttatccatatcattggctatgtctacaacaatagtatagata

SEQ ID NO: 18424 - DNA, 201 bp, Homo sapiens
aaggactggaaataattttttccatgatttggaaagtgatattatatttgtcaatgagaaataatgtaatagctttttaatagttcacaaaatgatgtcasttgctctctattcaaaaatatctttagcctttttgaggttattttggggagatgataaggacaggcatctccataatcccaaatatttgggagaaaactt

SEQ ID NO: 18425 - DNA, 201 bp, Homo sapiens
gatgacatgaggtttaaagcacagaatttttagagaggagagaaggagaatgctctgaaagcagccacgtggagcaaaagcggcgtctgtctcacctcacyttccagccatgtggagcaaaaggggcatctgtctcaggcccagtggcatgggagtgaaatagcacttcagagagttgcaggggaaacagtgtccccaagg

SEQ ID NO: 18426 - DNA, 201 bp, Homo sapiens
atttttaggacaattgaagatacttgactgtaaacttgcaattagttttggaaaattacttccaattttgttaagtgatcgtgttgtcgcagaagtggacratgtctctgtattttagaggtacatactactgcatgtacagaaaaatatcatgatctttgtgatttatcctaagatgttaaagcaaaatatatgatgaaa

SEQ ID NO: 18427 - DNA, 201 bp, Homo sapiens
atcatgatctttgtgatttatcctaagatgttaaagcaaaatatatgatgaaacaatacggaaagatgtttattgttaaatcataattaagtgtgtttctrttcttttatgtatttgaaaattttaatagtaagtcgttaaataaagagaagtcaaaggagtaatattacaaaagtgctgaggcaaagtaaatttataatt

SEQ ID NO: 18428 - DNA, 201 bp, Homo sapiens
aaaattttaatagtaagtcgttaaataaagagaagtcaaaggagtaatattacaaaagtgctgaggcaaagtaaatttataattttgtacctacataatcmctcaaaattgaggcaaaatataaaattttagataaaaacaatgtaactcactctccacagactgttatgttcactttttcatccatgatactgattatct

SEQ ID NO: 18429 - DNA, 201 bp, Homo sapiens
gaaggtgataattagcattgcctctggaaagacaaatacagaaggaagagaaaatacaatcaacctgacaactgggagtaggaggaattcagatctgaaawtttttaaagtagttcatctgtctagagtattatcagaacctcctactctctaaaagcactaatttccttataagatactttttctgatacttacctcaag

SEQ ID NO: 18430 - DNA, 201 bp, Homo sapiens
tactgcttactttcataagttgggaaatagatattaatagagttatatgtcattatgatttagacctaacagaaatagaattcccagaatcatttggttgmaagtaaaccaagaatatttcttctaatttcaacattgtctattttctacctattaaaagcagctttgttcctttgcactaatattgaaggtaagttgaaa

SEQ ID NO: 18431 - DNA, 201 bp, Homo sapiens
tcagcaccacggtgccatgcctgggactcgtgaatattgtgaactccatgctattatagaaactttctctcttcatatcctagtccccgatctttgccccrattcagcaggaagtagccagagtggtctgttcccctatacccctcaggattgtggagtgacaaggatggaactgagctgcaacaggggcccctttcttag

SEQ ID NO: 18432 - DNA, 201 bp, Homo sapiens
tagacctaacagaaatagaattcccagaatcatttggttgaaagtaaaccaagaatatttcttctaatttcaacattgtctattttctacctattaaaagyagctttgttcctttgcactaatattgaaggtaagttgaaaaaagggaaattcaattagcataaaaaagtctttgtgtataatatatttctatactatatg

SEQ ID NO: 18433 - DNA, 201 bp, Homo sapiens
tttgcactgttaggacaacctcacttcacggctgtaattgtcatcaacaaaaacaaccccttcctaatcaattcaatcaaatgcctaacaattggtagtayttttgctggatttttaatctccaacaatattattccaatatcagttccccaaatgactatgctccttcacctaaaactcacaaccctcagcgtaactatt

SEQ ID NO: 18434 - DNA, 201 bp, Homo sapiens
gttggcttgaaagccagattaaggtctgtttttgaacattttcatcaatgaatacatattttttcattctctccaatgtcttaaaagtaagagcactgagyctgtaatacaaatcaccaaagcaaaagttagataaagaggaagtgacaatgtcagcaattccacagtttcatcaccattgttccctttgagtaaaggatg

SEQ ID NO: 18435 - DNA, 201 bp, Homo sapiens
  misc_feature (1)...(201): n = A,T,C or G, or insertion/deletion polymorphism (see Tables 1-2)
atatttaatttctccaatatattaggattttacccaatcacaatacaccacacaacaccacactcaaatttccatgcaagacaaaacctaacctctcttcnactagaactgatttgattagaaaaatcaacaccaaaaaatactgcccaggttcaaatgatagcctccaccattgtatctaaccagaaagatctaattatg

SEQ ID NO: 18436 - DNA, 201 bp, Homo sapiens
gttgaaaagctggccatcattcttaaagcagccgcttgttttctgttggcttgaaagccagattaaggtctgtttttgaacattttcatcaatgaatacawattttttcattctctccaatgtcttaaaagtaagagcactgagcctgtaatacaaatcaccaaagcaaaagttagataaagaggaagtgacaatgtcagc

SEQ ID NO: 18437 - DNA, 201 bp, Homo sapiens
caggttcaggctgggagaagtggcttatacctagttcccggcactttgggaggctgaggcaggagagtcacttgaggccaggagtttgagaacagcctgcrcaacattgtgaggtcccccatctctacaaaaattaaaataaaaaatttagccaggtggcacatggctgtagtagcagttactcaggaggctgaggcaaga

SEQ ID NO: 18438 - DNA, 201 bp, Homo sapiens
agtcacatccaggctgtagttaaacatgcacaaagcaggaatggtgctgctgaccaacccaccacaggcccaggactgcagtgcctcagaaggtttcatakgcacaggaagaatattcatattccagatcaggaaagccagaggcagggcaaggcaggcaatgcccaggaacaaggaaagcctggtgcttctcctctctca

SEQ ID NO: 18439 - DNA, 201 bp, Homo sapiens
tccctttctctcccctcccttctatttctagtttaatttctgaagaggactgactcgggaaggactagagactgaataaggcagacaagagactcagaagragtcacatccaggctgtagttaaacatgcacaaagcaggaatggtgctgctgaccaacccaccacaggcccaggactgcagtgcctcagaaggtttcata

SEQ ID NO: 18440 - DNA, 201 bp, Homo sapiens
aagctcagggtatttcaggggccatcagagcatgctaaaatgccatgataggagattttgagcaaccacagggaaaaaaaggaggggaaaggagatagaaratgggctggagatggacaggtatctgcaaagaaaggaagttggaagggagggatttacgtaaatatggacaggaaaagggttggattttgccaaggatat

SEQ ID NO: 18441 - DNA, 201 bp, Homo sapiens
atgattatgaggaaggatgctgaagaaaagctcagggtatttcaggggccatcagagcatgctaaaatgccatgataggagattttgagcaaccacagggraaaaaaggaggggaaaggagatagaaaatgggctggagatggacaggtatctgcaaagaaaggaagttggaagggagggatttacgtaaatatggacagg

SEQ ID NO: 18442 - DNA, 201 bp, Homo sapiens
agtaggcctgtaggctggtaagacaagctattaaggaaccaagattataggaactttgcctggggaacatccaggggaagaagatctttcctttttgaagktgtcctgtctgtaggcttcttcatacctgtctgccctggtttgtagattgatttgtctgtctggacaaagaccagactgtcctcgttcttaaccatcact

SEQ ID NO: 18443 - DNA, 201 bp, Homo sapiens
ttgttaattttaactttaaaagtttatttttggccgggcacggtggctcacgcctgtaatcccagcactttgggaggccaaggcaggtggatcacctgagrtcaggagttcgagaacagcctggccaacatggtgaaactccgtctctattaaaaatacaaaaaaattagtcaggcatggtggcaggcacctgtaatccca

SEQ ID NO: 18444 - DNA, 201 bp, Homo sapiens
tgagagggataagagcaataactattgtttaaaagcctaagagtgaaaacagatgtcaaaaaaaaaaaaaaaaaaaagccaaattctttcatcccaggatrtctgaaaaggagagactctatggagtgtggatgtagaaaaggagttattcctaccggaaaaaaatgaactgtggacacagtcactcaagaccagagaaac

SEQ ID NO: 18445 - DNA, 201 bp, Homo sapiens
tcctttgctatgcaattttacaggttgagaaataaacacttatgtaactataagtaaatatgttcagatgtaatcattaagatgggtcatagaattcttaygtagttctaagaatgaggaggaatggacatatttcattaataaatttagtttaataaatattacttttaaaaatgaataaacattgataagaagctacta

SEQ ID NO: 18446 - DNA, 201 bp, Homo sapiens
tttttttgtggtgggaacatacaaaatcctctcctctagctattttgagatatacaataccttattgttggctacagccaccctactgtgcaatgggatgygagaatttattcttccttgttaattttaactttaaaagtttatttttggccgggcacggtggctcacgcctgtaatcccagcactttgggaggccaaggc

SEQ ID NO: 18447 - DNA, 201 bp, Homo sapiens
ccatttattgatacaggcatgcaatgcatgataataatcattatccatgattggataatgatatggataatgataatgattatcatccataatcattatcrtgcactgcatgcctgtatcaaaatatctcatgtaacccataaatatatatacctgctatgtttccacaaaaattaaaaacaataaaaagtttaaaaaatc

SEQ ID NO: 18448 - DNA, 201 bp, Homo sapiens
ggatcctatatgagtaaattaattataacttacaaaagcacctggagcattggagctaataaaagatatctatggaaaccctaagttatctacaaaaaggkcaaatggggtagtagtaaagggtgagtagaggagatgagttatagccatctagctctatgggagtttgaaggcttctcctttaatgacaagtttctgaga

SEQ ID NO: 18449 - DNA, 201 bp, Homo sapiens
aggaggatagcttgagtccaggaagtcgaggctgccatgagctatgattgcaccactgccctccagcctgggagacaaagcaagactctttctctaaaaamagaggtaaaaaaaaaaaaaggaacgagattgtgtcctttgcagggacatggatggagttggaagctgttatcctcagcaaactaacacaggaacagaaaa

SEQ ID NO: 18450 - DNA, 201 bp, Homo sapiens
agcagaactgatggcctggccagctaaggcaattaagaggtgtatggttttttccttcctttgtagaagtgaatgcccatggaggctttagatggctcagygtctatcgttctgaaacactcacaatgggcaattacgagaaataaataattcccattgtgctaagttcatgattttttttgaaaaattacaatagccaac

SEQ ID NO: 18451 - DNA, 201 bp, Homo sapiens
aggagtaattttttttgtacaaaggatgcataatatttatacatatttatggggtacacgagatattttgttacatgcagagaatgtgtaatgatcacatygcgggatttagggtgcctaccaactcaagtatgtatcatttctatgtgttggaaatagttcaagtcctgtccacttgctattttgaaatacacagtacat

SEQ ID NO: 18452 - DNA, 201 bp, Homo sapiens
gtccctggctgtgaggttctccagtccgctggccagaaaacacaaggccacgagcagacccgagacctggcaccctaaacctgtctctgggaaatgtcctstgtctttctcagatattccaggaacctaagagcgcacaccaggtggagcaggtgctgctggcgtattccaggtgcatccaggtgcgggcgtcatgctgag

SEQ ID NO: 18453 - DNA, 201 bp, Homo sapiens
atgcatattatactaaatagatcagtggtcagataaccggtgtgatttttgtggggggacaacatcatgtaggcattttctatgacgaggacacaataaaatattctctagcaactaaatattaaatttcacaacaatatctcatgtataattgacagatgtattccttggtatctgaaattccctagatatattgcgata

SEQ ID NO: 18454 - DNA, 201 bp, Homo sapiens
ggctgtagtcctgccaagggtctctcctcagttttgagtctcaaggtgaagacgcggtttgtgggtggctgaggggttgctccatgggggctccctccctyccttccttccttagatggacgaggtgggtcgcatcctctgtaacctgtgcggtgtggtttctggaggggtggtctgtttcttcccctcctacgagtacct

SEQ ID NO: 18455 - DNA, 201 bp, Homo sapiens
acctcataccgtgaccaggcacaggggcggaggagaccccgggatgggagcctcacccttcgtgcgctcgcccaggctctcctgctttgctccctgctgcstgctgcccagtgtgactggcgatggtgggtgggtgagcgctgtcagtcgctgttcctgtgctggatgatggggcaggtaaatgccctctctgcagtgtct

SEQ ID NO: 18456 - DNA, 201 bp, Homo sapiens
gccaaggtcacaccactgcactccagtctaggcaacagaatgagaccctgtctcaaataaataaataaataaataaataaataaataaataaataagcaarcaaataaataaataggaattcaagaattgagatcatctgtgtgggtattgagaatgccaggaattaagaccagaaattctagagatgatggcaatggcaa

SEQ ID NO: 18457 - DNA, 201 bp, Homo sapiens
tttaataatgtaacccacctttgatatgttttcatatacattatggggaaaccatatttttttgaagtcaagaaatgtatattgcttcatgttgcaaaatktgtatgctatgtcaaagaagcattgccagaaaatgatctgaaatgtagaacaataaagttacattatagatgtcttaggtgaaccaagagaaaaattagt

SEQ ID NO: 18458 - DNA, 201 bp, Homo sapiens
ggccaggagtttgagaacagcctgcacaacattgtgaggtcccccatctctacaaaaattaaaataaaaaatttagccaggtggcacatggctgtagtagyagttactcaggaggctgaggcaagaaggatcacttaagcccacgaggttgaggctacagtgagctatgattgcaccagtgctttcagagtgacagagtga

SEQ ID NO: 18459 - DNA, 201 bp, Homo sapiens
tgaatccataacagatggataaaatccctgcccccatgccaaatcagtaaaatcagtaaattgtgactaaaatgtaactcttcaaagctttaatgattcartgattcatgattcaatatctgcagggttaggccatttatagagtaaatttgcaagtaaaaactattattttcttatattattttactacccttactttcc

SEQ ID NO: 18460 - DNA, 201 bp, Homo sapiens
ctaaaagatatcacgattaaaaattaattccacatatatttgatattctaaagaactattttatatgagttcagttaatatttttttaacagatattgaartcagaacaaatccaggttgacaaacttgcccaagatgtcattggtagtgagctgctaaaatgttttaatatatgtttactcaatcatgaatgtttgcatt

SEQ ID NO: 18461 - DNA, 201 bp, Homo sapiens
accaacttacaactggatagggttaaaattattttccctgctttggtcccccactgggggctgttggtgaagacttgatacatgattgaaaaataaaggarctatactttctgtatatatatatatggcctacaatacatgttaagttgcacttcactatatatttcgaatatctctatattcagtgccttccatccaaaa

SEQ ID NO: 18462 - DNA, 201 bp, Homo sapiens
ctattctggtgatgaaaatacaatattgaacaggatattcagtatccatgctctcatagaacttgtagtacaatgatgatcacatataaaccaccagcagrtttaatgccatccttagactgcagacattggtgtctgtttacatactgtattgcttgaaactttttaaatcaactttctttctctttctccatatttcag

SEQ ID NO: 18463 - DNA, 201 bp, Homo sapiens
gtacaatgatgatcacatataaaccaccagcagatttaatgccatccttagactgcagacattggtgtctgtttacatactgtattgcttgaaactttttraatcaactttctttctctttctccatatttcagcctaatcatcccttctttggagagcaaattcctggccacactgctgaaagtggattccttcctatta

SEQ ID NO: 18464 - DNA, 201 bp, Homo sapiens
tttgtttcttttgtcacattatcatagaatgaaataatttcttttaaattatgaaatgttatatatatatatactcacaaatatagagagcaagataaaaracactcgtaccttacatgcacccaactttaataaaattaaacacttgccaagtttgtttaaggtcatttcttcttaagaaatgaaagatggcaatggtag

SEQ ID NO: 18465 - DNA, 201 bp, Homo sapiens
tttcttttaaattatgaaatgttatatatatatatactcacaaatatagagagcaagataaaagacactcgtaccttacatgcacccaactttaataaaaktaaacacttgccaagtttgtttaaggtcatttcttcttaagaaatgaaagatggcaatggtagcgctcttttaaaatttgtctagaagcttttccagttt

SEQ ID NO: 18466 - DNA, 201 bp, Homo sapiens
cttgcatcttactgagcatctttaagatgattattttgaattttggggggaaatttgtagatctccatttggggtggagattagttactggaacttcattrgtttcctttggtggtattatgtttgcctggttcatcattatctgtgtaactttgcattggtttctatgcatctgaaggagcaaacaccttttcccatctt

SEQ ID NO: 18467 - DNA, 201 bp, Homo sapiens
tagaattcagaaaaaaagaatacttttactgagtctccttacttttcatggcatgtagttatttacattatttaataaaaatctgttttccttttaacctrtatataattggatacatcgatacagttatattaaagtataccttgtgtgttagtatttgaaaatactcatttaatcaggcatgataagcccattatgaga

SEQ ID NO: 18468 - DNA, 201 bp, Homo sapiens
ataactcagtaacctagtgtggtaaatgctaaacttgatctaagggttggtgctcctggtgaggtttaaagttttttttctccctacctcccttactcccyccttccctccctccctttatttcttcctcttttctttcattctttccttccttttgttctttctttcaatctccctcccctccccttccctttcctttat

SEQ ID NO: 18469 - DNA, 201 bp, Homo sapiens
attaaaaataccacaaagcaatttgaatacaatttgcatgcaaattaaatatcagagtgtgtggattagatatgcattctgggtttcaagaacaggagtgmtgattatgaggaaggatgctgaagaaaagctcagggtatttcaggggccatcagagcatgctaaaatgccatgataggagattttgagcaaccacaggga

SEQ ID NO: 18470 - DNA, 201 bp, Homo sapiens
tgattcaccagtaatgaatccaataagaagaaagatgtgaagatgttttagaagagaacgtgggaaagtttttgatttttctatgaaggagtaagagctcwtctccatcagggtcctcctgttgtaaggaataagtttggaatacattaaaaataccacaaagcaatttgaatacaatttgcatgcaaattaaatatcaga

SEQ ID NO: 18471 - DNA, 201 bp, Homo sapiens
gtattgtttaggccttggaggtaaaggataaaattgtccagacagctaattattttcttcaggtggctgaggtaggaggatagcttgagtccaggaagtcraggctgccatgagctatgattgcaccactgccctccagcctgggagacaaagcaagactctttctctaaaaaaagaggtaaaaaaaaaaaaaggaacgag

SEQ ID NO: 18472 - DNA, 201 bp, Homo sapiens
aagtgtttaagatggaaataacagcatatggtagacactaacatgaggtacgaggactgtcagtacatctaaattacagcaagtgggatcaccattcctcwgcagtgtaagctttgatttttcccttgcatttttatttctctcaactcaaaacacacacagacacccacccacacagatatttaattatagagaaaatac

SEQ ID NO: 18473 - DNA, 201 bp, Homo sapiens
ttttcattcaaatcttttgctacctgaaggtgaaataaaaggttttggcaaatcaccaacctgggtggaggagaaaccgccctgggcattctgctgcttcrtgatccacttcacgatgttggttgcagaggtcaggtcctccgaggttggggctggctgggccgtgagataagcgaggagcacataggatgtcatctccac

SEQ ID NO: 18474 - DNA, 201 bp, Homo sapiens
gctccactgctgcttgaggaaggcagtgttgttatgggaaataggagatggataataacacagcgatggggtgccgggattctgagcatttccttttggcyctctttgactttgatttgcttttatttccattatccttggatactgaaaacttttcctcatttcaagttactgtcatctgtatttttttcttcttggatg

SEQ ID NO: 18475 - DNA, 201 bp, Homo sapiens
ccaagagaatgtgacctctgacaaacaatgatatgggtagagagcctaagttaaatgcttatcatgtgctaggtactattttatgtgttttatgtttgttrtcacatttaattttcccaatttccataagaggaaagtattatttttagccctgtcttataagacaggaaacagaggctctcagttaaattagtcaaggtc

SEQ ID NO: 18476 - DNA, 201 bp, Homo sapiens
cagcccttctcagtggtctcagtgtggagcagggaggggaccagaaccatatactgcctgggaatgagacggttcagttagaggaaagtgaaggaagagasgcattgctatcaacagcacttttttccatcatcataattatcatcatcagttctacaccaagagaagatgtactgatgagcatgaaatttggccgttgaa

SEQ ID NO: 18477 - DNA, 201 bp, Homo sapiens
caaaccagaaatggaagacaacccatcagctcgtcttctgagctccttctagcgccaggaattccatagaaaccgcatattgtttgattcctcagcccccrgatgggttgccagagtgcagtgggacttgccaagagaatgtgacctctgacaaacaatgatatgggtagagagcctaagttaaatgcttatcatgtgcta

SEQ ID NO: 18478 - DNA, 201 bp, Homo sapiens
ccacatccagaattttttttatttgacaaaccagaaatggaagacaacccatcagctcgtcttctgagctccttctagcgccaggaattccatagaaaccrcatattgtttgattcctcagcccccggatgggttgccagagtgcagtgggacttgccaagagaatgtgacctctgacaaacaatgatatgggtagagagc

SEQ ID NO: 18479 - DNA, 201 bp, Homo sapiens
atgacttcttttgttgagctggagatactattgtcttgcagattatctctttggcacgcatgaccatttttttttgtcttttaaatcacaaactggctttytttctgctaaggttggtgtgcttagattctttaagctccaaatctcaagaaaatataggaaggaaaatcaaccattagagagagagagagagagagaaaa

SEQ ID NO: 18480 - DNA, 201 bp, Homo sapiens
acagcatgagtttaatcttgtacatgacttcttttgttgagctggagatactattgtcttgcagattatctctttggcacgcatgaccatttttttttgtyttttaaatcacaaactggctttctttctgctaaggttggtgtgcttagattctttaagctccaaatctcaagaaaatataggaaggaaaatcaaccatta

SEQ ID NO: 18481 - DNA, 201 bp, Homo sapiens
gaagaaagaataaaaaagccataatgttaagtacatccattccatgcccatagccatacatcacagaagtcacagggaaggctctgtgacacgagataatkatgtggatgtgacagaacatggtagaggaaaaggccacagacaggtgcagagtaggaagaatgaaagaattcattgtggctgtcaaaatcctatgtttgt

SEQ ID NO: 18482 - DNA, 201 bp, Homo sapiens
ctaatctttgacaacgttgacaaaagcaagcaagggggaaaggactctattcaataaatggtgctggaataactggctagccatacgcagaagattgaacytggacctcttgcttacaccatatgcaaaaatcaaatcaagatggattaaagacctaaatgtaaaacctaaaactataaaatcctggaagataacctagaa

SEQ ID NO: 18483 - DNA, 201 bp, Homo sapiens
ataaataggaagaaagaataaaaaagccataatgttaagtacatccattccatgcccatagccatacatcacagaagtcacagggaaggctctgtgacacragataatgatgtggatgtgacagaacatggtagaggaaaaggccacagacaggtgcagagtaggaagaatgaaagaattcattgtggctgtcaaaatcct

SEQ ID NO: 18484 - DNA, 201 bp, Homo sapiens
ctcttgcttacaccatatgcaaaaatcaaatcaagatggattaaagacctaaatgtaaaacctaaaactataaaatcctggaagataacctagaaaatacytttctgggcataggcccttgtaaagatttcatgatggagatgttaaaagcaattgcaacaaaatcaaaaattgacaagtgggacctaattagactaagga

SEQ ID NO: 18485 - DNA, 201 bp, Homo sapiens
gggaggcagaggttgcagtgagctgagatcgtgtcaccacacttccagcctgggcaaaagagtgagactctgtctaaaaaaaaaaaaaaaaaaaaaaaaamaacaaaaccacccctatctatcctatctatcctatctatctatctatctatctatctatctatctattggtctatctatctagataaaaatagcagtcaa

SEQ ID NO: 18486 - DNA, 201 bp, Homo sapiens
gtgggtggctgaggggttgctccatgggggctccctccctcccttccttccttagatggacgaggtgggtcgcatcctctgtaacctgtgcggtgtggttyctggaggggtggtctgtttcttcccctcctacgagtacctgcgccaggtccatgcccactgggagaagggtggcctgctgggccgtctggctgccaggaa

SEQ ID NO: 18487 - DNA, 201 bp, Homo sapiens
gccaccacgcccggctaattttttgttgtatttttggtagagatggggtttcaccgtcttagccaggatggtctccatatcctgtccttgtgatccgcccrcctcggcctcccaaagtgctgggattacaggcatgagccaccacgcccggccagatttgcttttttattataaatcatcttttaattttccttattaaca

SEQ ID NO: 18488 - DNA, 201 bp, Homo sapiens
ataaatcatcttttaattttccttattaacacagaaataaacaagaaaattcttcctggagaactttaagaacacaaagagatgtgtcttttctgagatamgctctaagcatgacagaggtctagaaatggaaagctgaaccccacgtctcagattttattatttattatctggtttttttttttgaaatagagatgaggt

SEQ ID NO: 18489 - DNA, 201 bp, Homo sapiens
actttgtttacccttggcctgagccccttcagagaacagggtggcttcagggccaaacattccaatttgctcgatttgttactctttcatctgcttcccayatctggttcatcctagccttgtttcctcctaccatagagaaaccctttgcaacctttgagatgtttacagaccttccagtcccagcattcccctccctcc

SEQ ID NO: 18490 - DNA, 201 bp, Homo sapiens
aagaaagaaagaaagaaagaaagaaagaaagaaagaaaatcccccacccttcatgttctgcaaaagggcttactgcaaagaccaccccccaacccttccasatgtcacttcagtaagactcacagatgctcttcttctttacctatgttaagaccagacacagaccctcaaaatttcctttctttgcctcacagatgatta

SEQ ID NO: 18491 - DNA, 201 bp, Homo sapiens
ggccgaggtgagaggatcacctgaggtcaggagttcgagaccagccatgaccaacatggtgaaaccctgtctctactaaaaatacaaaaaaaattagccgktgtggtggcaggcacctgtagtcccagctactcaggatactgagacagaagaatcgttggaacccagaaggcggaggttgcagtgagccgagatcaggcc

SEQ ID NO: 18492 - DNA, 201 bp, Homo sapiens
ccacgtcagcctcctgagcagctgggactacaggtgtgcgccatcacacctagctaattttttaatttgtagaaatgagatctcactatgctgctcaggcyggtggtcttagacccctaggctcaagcaatcctccctccttggcctcccatagtgctgagatgacaggcgtgagccactgtacctgaccccttttacctt

SEQ ID NO: 18493 - DNA, 201 bp, Homo sapiens
ctccagcctgggcaatagagcgagactccatctcaaaaaaaagaaaagaaaaaaaaaatcaaaatgaaagcatcattaacttcatgtcaaaacttgacagrcttacttaaaagataaacatggtgtaaaaaaaagagtagctggattgctcattttcagatatccactttcatacttctattcacatttttctttacttgt

SEQ ID NO: 18494 - DNA, 201 bp, Homo sapiens
gttcagttagaggaaagtgaaggaagagaggcattgctatcaacagcacttttttccatcatcataattatcatcatcagttctacaccaagagaagatgyactgatgagcatgaaatttggccgttgaaggccatgcataagaattatttcccttttccctcacatgccatggcagtgaacattttacttgaggtaggtc

SEQ ID NO: 18495 - DNA, 201 bp, Homo sapiens
gggaactcttccttttctgggagaatattgtatttcaaggatgtctatagaacatcaaagacaaaatcagttttttgccctttcccagaattcctgtccaygtccctaaccctttctctgatctgtcccattgttttctgagttaggacttctcagagagaacagctgctgtcctcatctgtcctgtcctcacctgcccaa

SEQ ID NO: 18496 - DNA, 201 bp, Homo sapiens
aattgaaaagcaggaacctgctgacaatctttttcttgtagtcatgggtcctagcgcagtgctctgcacatggtcagcattcatacaaacacatgtgattrtatttctgagctggaaaaaggataaggctttgatagagattgactttaatagtattttgatattagtattgtcttatgctggggatacatacatcattaa

SEQ ID NO: 18497 - DNA, 201 bp, Homo sapiens
gctgaagtccacatgctgcctcctgcaggctgtttaaggctgtgcagttatgaagtccaaactgttccctctttgtgtgtcctggaggcttggagctgcaraaagcctgtggaaaaaagagctttcttttcttttttctttttaaaaattattcatctattcagaggggaggctgttttgcaatctgcacataattcttgc

SEQ ID NO: 18498 - DNA, 201 bp, Homo sapiens
agtcaaaatgatttttctagctcatgtttcctactggtgtgtgctaacaccttagtgttactccatttctcctctaattccctacctacaggaatacgctyactcaggcactgacacacttaatcacccctttgttttaatgagtgcctacaaccttcccagcactgtgttgggtgaacaggctgcacagacatgattaag

SEQ ID NO: 18499 - DNA, 201 bp, Homo sapiens
tggttttgttttctttttggatgttttagttagctatggataaaatctccacaaggtgtccctaagctacagatatgaaaatgtcctgctcagaacacccytgggagtccccatccccaaactccacttaggcaactgattagtgaaatccaattagatccagcatctctcccaagatactttgactccaggtaaattcag

SEQ ID NO: 18500 - DNA, 201 bp, Homo sapiens
gtgttactccatttctcctctaattccctacctacaggaatacgctcactcaggcactgacacacttaatcacccctttgttttaatgagtgcctacaacyttcccagcactgtgttgggtgaacaggctgcacagacatgattaagatacaggtttggctttcaaagaggtatgagtatatggatgagaggaaaataaat

SEQ ID NO: 18501 - DNA, 201 bp, Homo sapiens
ggtgtagacagatagctgcttacccaatttcttaggtataatagtccagatgtttgttttcctccctccagcttgaataacctcactgccattgattttcmaggtattaatatttgcttcataattctgagactcctccacttgaacagaaatctaagaaaacaatcatggcaatgaggatagcactggaacacacatcac

SEQ ID NO: 18502 - DNA, 201 bp, Homo sapiens
cagccagtgataaagaggggaaacagtgtggcttcaggaaaacttcaagaagaaagtgtttcaaaaagaaaataatggtcagctactactgagaaattaaytgtgatttggatagagaacaaatcattagatttggcaagataaagatggttggcaagcttgataggggatgttttgtggcagatggcaagtgtcggtggc

SEQ ID NO: 18503 - DNA, 201 bp, Homo sapiens
ctcatctataataataataataataaagcagcaaatgatatatgaattcagagttcagggaagaaaacagggctctaggtattcatttgggaatccgtaayatgcttgtcataaagctatgggactgactgagattaaatagggaaagaatgtacacaaaaaacagaagagcatcaaggacccagctctagagagtcctaa

SEQ ID NO: 18504 - DNA, 201 bp, Homo sapiens
ctggacaacgtagtgagacctcatctataataataataataataaagcagcaaatgatatatgaattcagagttcagggaagaaaacagggctctaggtaytcatttgggaatccgtaacatgcttgtcataaagctatgggactgactgagattaaatagggaaagaatgtacacaaaaaacagaagagcatcaaggacc

SEQ ID NO: 18505 - DNA, 201 bp, Homo sapiens
aggaataacacctgcagtgttacctgaaacagtgtatcccgttattaaagaaggcagtgtttgtagtttacaaaatcaattggcagaaaatgcaaaggcarctgctgctttgaaagttgatgttagtggaccagtagcaagtacagcaacatcaaccaagatttttccactaactcagaaggaaaagcagaatgagtcaac

SEQ ID NO: 18506 - DNA, 201 bp, Homo sapiens
ctgagaacagcatcacaactgagctaaaataatctcatagatatattatttgctgttaaaataatacaatgaatatagtacattaaagaacatttgaatgrccattttttaaaagtagtgattaaaagtgtcacgcacatcgtatctagcattccttgtttactagaattttaaactttttccattccatgtattttcaat

SEQ ID NO: 18507 - DNA, 201 bp, Homo sapiens
accagaaaggaaggaaactcatgcttgtatgtctgagataagaactgtctcaaggccagacgcggtggctcacacctgtaatcctagtactttgggaggcygaggcgggcggatcacgaggtcaggagtttgagaccagcctggccaacgtggtgaaattcccgtctctactaaaaatacaaaaaaaaaaagaaaaaaaaa

SEQ ID NO: 18508 - DNA, 201 bp, Homo sapiens
ctgaaagttgcagattccaggagaagtaactattgtcagacccagacaaattggagcctagagaccagaaaggaaggaaactcatgcttgtatgtctgagrtaagaactgtctcaaggccagacgcggtggctcacacctgtaatcctagtactttgggaggccgaggcgggcggatcacgaggtcaggagtttgagacca

SEQ ID NO: 18509 - DNA, 201 bp, Homo sapiens
gagtttatgcaagaacataaaccaagccctgtttccttcatggagaaagcctcatcagctggactaaataatgtgcttagtgacacacttaattactagtytggctcaagcttcttactttgttacaaaccagaaatagcttgctgaccaactgccagtctcagactgtaccttgtcccagaagggtacaaaattaggttc

SEQ ID NO: 18510 - DNA, 201 bp, Homo sapiens
agatcatggttcactgcagcctcgaccttctggcatcaagtgatcttcccacgtcagcctcctgagcagctgggactacaggtgtgcgccatcacacctarctaattttttaatttgtagaaatgagatctcactatgctgctcaggctggtggtcttagacccctaggctcaagcaatcctccctccttggcctcccata

SEQ ID NO: 18511 - DNA, 201 bp, Homo sapiens
agtagagacagggtttctccatgttggtcagactagtctcgaactccccacctcaggtgatccacctgcctcagccttccaaagtgctggggttacaggcrtgagccacggcccccaactaaaagagtaatttctaattcttctctttcctcggtccctctattcaaaactattcatgtcccagatccaaaggattctcta

SEQ ID NO: 18512 - DNA, 201 bp, Homo sapiens
agctagatacagagtgtcgattggtgcactcacaaaccttcagctaaacacagggtgctgattggtgtgtttacaaaccttgagctagatacagagtgccrattggtgtatttacaatccctgagctagacataaaggttctccaaggcccaaccagagcagctagatacagagtgtcaattggtgcactcacaaaccttg

SEQ ID NO: 18513 - DNA, 201 bp, Homo sapiens
gcaagctcggctcaccgcaacctctgcctcccaggttcaagcgattctcccacctcagcctcccaaggagctgggattacaggcatgcaccaccacggccrgctaattttgtatttttagtagagacagggtttctccatgttggtcagactagtctcgaactccccacctcaggtgatccacctgcctcagccttccaaa

SEQ ID NO: 18514 - DNA, 201 bp, Homo sapiens
tttcaattcaactgggtatagacttagaagtcaaattgtagcagaattgtaggccaagtgtagtggctcatatctataatcccagcactttggaagccaaygtgggaatatctcttgagtccaggagtttgagaccagcctcatttatttggttgagccacaggtgagcagtctctcaaaacaaaagtgaatgcagagcct

SEQ ID NO: 18515 - DNA, 201 bp, Homo sapiens
ttgatggacatctgtctgggtttttctacctttggctaatgtgaataatgctgctatgaacattcatgtacaagtatttgagtacccagtttcaattcaaytgggtatagacttagaagtcaaattgtagcagaattgtaggccaagtgtagtggctcatatctataatcccagcactttggaagccaacgtgggaatatc

SEQ ID NO: 18516 - DNA, 201 bp, Homo sapiens
cgaagagctcgtttcttcctcttaatctatcactagtaccacaatactgagttgagatcattattgctatattacctcaagccaatcattaatgtcaatgrtattaactttttctcatttgtaaaaatgataaaacttggtttaagatgttccgtatagtcccttgaaattacttttgtttgtttgttcatatctatctat

SEQ ID NO: 18517 - DNA, 201 bp, Homo sapiens
actagtaccacaatactgagttgagatcattattgctatattacctcaagccaatcattaatgtcaatggtattaactttttctcatttgtaaaaatgatmaaacttggtttaagatgttccgtatagtcccttgaaattacttttgtttgtttgttcatatctatctataaaaacaagctgatgtagcattttttgtttt

SEQ ID NO: 18518 - DNA, 201 bp, Homo sapiens
aaaaggcaaaggaaaaaaatcgcagcatctagtggtcttttcctgaaggaagtagcactcaatataaggttcccactgccatatacaatctttgagtagasaattatctctagcagttttttgctcacctaatgactttggggttactgcccaggacacagtttgccgcccgtttgcacagatgcagtgaggcgcttgttc

SEQ ID NO: 18519 - DNA, 201 bp, Homo sapiens
aaaaaataaaaaaaaaaaaagatgagtattgaggtaatgggtatgttaattagcttgatttaataatttcacattgtttacatatattacaacatcactcygtaccccataaagacatcaaattataaaaagccaacggcaaacacaaatggcctgtgacttcccttatgtccttcagtactaattcacccaatcctttaa

SEQ ID NO: 18520 - DNA, 201 bp, Homo sapiens
tcagaattagaatttgcttcatgtgaattgaataaatataaaatgagtctgaatagggaagatgaaatgcaaaaaattgacacttgtgcttaaaacctttyatatattcataaccttaaaaccttttatacatttatatattcaatgcaattccaaacaatacctagttgactatggggataatgaacttaaaagattcta

SEQ ID NO: 18521 - DNA, 201 bp, Homo sapiens
caaaaaaaagacagttctaaaaaatgaacataaggtataaacaccaacattcaacatgtacacacacacacacacacacacacacacacacacacacacaygcagttggccctctgtatttgtgggttccacatctggggattcaaccaaccacagataaaaaatatttggaaactaaaaattccaccctgcgcttctgga

SEQ ID NO: 18522 - DNA, 201 bp, Homo sapiens
atgaacttaaaagattctagagttttaacttgaacaaataatgatcttagtaattgtattagtccattcttgcattgctataaagaaatacctgagattgrgtgatttataaagaaaggaggtttagttggctcacagttccacaggctgtccaagaagcatgatgctggcctctgctaggcttctggggaggcctccaga

SEQ ID NO: 18523 - DNA, 201 bp, Homo sapiens
ctaagaactgcactctgatacacggttattcccaataataataaccatccaccccgtgcagtggtcataaaccagagagagaaatgtccacatgaaactakgtgctgcatgctggccatcactcatggatcattaatgaaaactgacttggaatcactattttaaggacaggatggcggggaggcatgcttgtaaacagag

SEQ ID NO: 18524 - DNA, 201 bp, Homo sapiens
aacttgaacaaataatgatcttagtaattgtattagtccattcttgcattgctataaagaaatacctgagattgggtgatttataaagaaaggaggtttarttggctcacagttccacaggctgtccaagaagcatgatgctggcctctgctaggcttctggggaggcctccagaaacttacaatcatggcagaaggctaa

SEQ ID NO: 18525 - DNA, 201 bp, Homo sapiens
atcttagtaattgtattagtccattcttgcattgctataaagaaatacctgagattgggtgatttataaagaaaggaggtttagttggctcacagttccayaggctgtccaagaagcatgatgctggcctctgctaggcttctggggaggcctccagaaacttacaatcatggcagaaggctaaaagggagcaaggcttct

SEQ ID NO: 18526 - DNA, 201 bp, Homo sapiens
ttcagattgtgaccttttgagattggctttttccccacacagcctaatgcttctgagatccacttaagtcgttgtgtatgtcagtcgtttgttcctcttcrttgtccagcagaactatgtcgtatggttgccaaaccattcatctactgatgaactttttgttgtttccaatgtttggaaaaactgttttctttttccttt

SEQ ID NO: 18527 - DNA, 201 bp, Homo sapiens
tacctctttgtatagcttttctgtgatttaataaatgctagggagaatagattcatattcagaaaagtgaatatgatattgataaagaacaaaagaaaagrtagagttgtaaatgccataaatttattcaacatacaaattttgtgtatttccaatgatcttcccttctttctctcactgtcctctctattgatgagtctg

SEQ ID NO: 18528 - DNA, 201 bp, Homo sapiens
ctcaggtgatccacctgcctcggcctcccagagtgctgggattacaggcatgagccaccgcacctggccctattttttatttctttctgatagagtctccstatgtcacccaggctggagtagtggtgcaatctcagctcattgcaactgctacctcccaggctcaagggattctcgtgcctccacctcctaagtagctgg

SEQ ID NO: 18529 - DNA, 201 bp, Homo sapiens
tgtatagcttttctgtgatttaataaatgctagggagaatagattcatattcagaaaagtgaatatgatattgataaagaacaaaagaaaaggtagagttrtaaatgccataaatttattcaacatacaaattttgtgtatttccaatgatcttcccttctttctctcactgtcctctctattgatgagtctgttcttcat

SEQ ID NO: 18530 - DNA, 201 bp, Homo sapiens
gaaaaatagtctgagaacagcatcacaactgagctaaaataatctcatagatatattatttgctgttaaaataatacaatgaatatagtacattaaagaamatttgaatggccattttttaaaagtagtgattaaaagtgtcacgcacatcgtatctagcattccttgtttactagaattttaaactttttccattccatg

SEQ ID NO: 18531 - DNA, 201 bp, Homo sapiens
gttgttgtgttttagtgtttctctgtctcaggaagcttgctatttcactcttaaaactgtgtcttcgacttaatgtcataaaactatacaagttggtacartattctgtctcaattgccaaggtaggattttgaagatcttgtgcagtagaaatattgagaaacttcaaatctaatagaaaaatagtctgagaacagcatc

SEQ ID NO: 18532 - DNA, 201 bp, Homo sapiens
ccttgcttgtgaaaattacaggattgaaaacaatcattcttttaaggttattattatttacgtgactatataccaatatacataaccaatatattgttctytttgttgttgttgttgttgttgtgttttagtgtttctctgtctcaggaagcttgctatttcactcttaaaactgtgtcttcgacttaatgtcataaaact

SEQ ID NO: 18533 - DNA, 201 bp, Homo sapiens
gcactggattgaaataatgtcctagcaaggaatccattgtttttaaacttcctgatttcacattatgtaattagaactgatctccagtttccttgcttgtraaaattacaggattgaaaacaatcattcttttaaggttattattatttacgtgactatataccaatatacataaccaatatattgttctttttgttgttg

SEQ ID NO: 18534 - DNA, 201 bp, Homo sapiens
ttcaatgagaagatcttttaatacaaaacctcttagatgtctgtttcttttcaggaaaagcttgactgtttgcatatccatacctctactaagaagctttkgaccacagtgtctttccagtttagcttttgctgctccattccttcatttgggcaagcactgctttgtttggactcagcaactacagtgatattcacttta

SEQ ID NO: 18535 - DNA, 201 bp, Homo sapiens
gcaccagctcactcaagcatggctggtgcaagtttatccctgagagaagatccaactcatcttccccttttgttcatatctggaaggcacgggacatcacyggtacccattttagcctctgcgttctgtagcttggacaggcattatcttgatgtcactgtgggacactctcagctcctctgatcctgtatagcatctcca

SEQ ID NO: 18536 - DNA, 201 bp, Homo sapiens
gacactgacataaactgagggcaaagctgactgtaactaaaagattttagccaaatgtcaaagtcaaagataaatgtcatagcgccctaacaaatagtatrtgtttatcaaaagcgataaacctggagatgtcatcacaacaacaaaaactttcatgaaaaagacaagacaaaggtaagttacgactgtaattgtagcatt

SEQ ID NO: 18537 - DNA, 201 bp, Homo sapiens
accctctcaaggttgactatctctctatcttctatctatctatctatctatctatctatctatctatctatctatccatccatccatccatccacctaccyacctacctacctctacctacctacctacctacctacctacctacctattttgagacagggtcttgctatggtgcccattctggtctcaaactcctgggct

SEQ ID NO: 18538 - DNA, 201 bp, Homo sapiens
tacctcttacaattcccaaatagcaaagatattcagctctcttcccttgaaaatggttgagccacagaaaccttctctacccaatcagcaagggattggcwgcagagaaccagaaaaacaattagataataccactgaaaataaagactttggttttcaaaaagataaacctgtacagtgcacagatgtttcacataaaat

SEQ ID NO: 18539 - DNA, 201 bp, Homo sapiens
atccatctgccttggcctcccaaaatgctgggattacaggtgtgagccactgctcttggcccagtttagggtttatagtgtgccaaactacgagatccctyccagttctgcttatcttaatgtaaaaggacattaaatataaataatataaattatataattaatgacaattaaaattatttttaagttaattgtttttgt

SEQ ID NO: 18540 - DNA, 201 bp, Homo sapiens
cagacgcctgtaatcccagctacttgggagactgaggcaggagaatcacttgaacctagaaggcggaggttgcagtgagccgagatcacaccattgcactmcagcctgggcgacagagtgagactccgtctcaaaaaaataaaataaataaataaataaataaaacagtttaagcatctgctctttgaaatccaaatacca

SEQ ID NO: 18541 - DNA, 201 bp, Homo sapiens
ctgtctctgctaaaaatacaaaaattagccaggcgcagtggcagacgcctgtaatcccagctacttgggagactgaggcaggagaatcacttgaacctagraggcggaggttgcagtgagccgagatcacaccattgcactccagcctgggcgacagagtgagactccgtctcaaaaaaataaaataaataaataaataaa

SEQ ID NO: 18542 - DNA, 201 bp, Homo sapiens
aaaccataacaacactattcttttttcagaattatttagtcataaatgcagtccactaactctatttcaattcagttcaatctggttagtaatgataaacyattctagatactttgaaggtatatttttaaaaagtttcttcattcagctagtttaaatagacatatggagataagacttagatatctgacacaagcccag

SEQ ID NO: 18543 - DNA, 201 bp, Homo sapiens
taaagccattgactagatgattttatcaagggatcctcgtatagagaagagagatctgcagactgagcattatcgtcaagatgattataggtggcacagakttgggtttttaatgataatttaaataaacttaaaaaagtgttagcttttccccttctctttcaatatagtggtaatttttgtattgctatattaatgata

SEQ ID NO: 18544 - DNA, 201 bp, Homo sapiens
gggctctgagactcacagagagtagacttacgtacctcaactagtaaggccttgactacagtgtccttctgcgcaagtggtgggacgtcagtcaactcatygtcacacacttcctgagaatgcatggcttccgcagtggctgtgaaattcacctttcctggggaataaagttcttaagagttaaacggtgattctatattg

SEQ ID NO: 18545 - DNA, 201 bp, Homo sapiens
gggaataaagttcttaagagttaaacggtgattctatattgaacagtttcttcttttccagtttccccagtgtatccagtggttgtcttcctcttgattartattaaaggaggagaaaaagtgtgtattggggtcagtgcagaaaacaaatcatccaagcacacgaagtggaatttgctaatagcattactactcacccag

SEQ ID NO: 18546 - DNA, 201 bp, Homo sapiens
gctgtgatcctgccactgcactctcgcctggcctgtctcaaaaacaaaacagaaaccggcaaaactcagtcttgttgttttcttttttctttctttctttyttttttttttttttggtagagacaggatcttgctatgttgtccaggctggtcttaaacatctggcctcctcaacctccccaagtgctggtattacagaca

SEQ ID NO: 18547 - DNA, 201 bp, Homo sapiens
atattgaacagtttcttcttttccagtttccccagtgtatccagtggttgtcttcctcttgattaatattaaaggaggagaaaaagtgtgtattggggtcrgtgcagaaaacaaatcatccaagcacacgaagtggaatttgctaatagcattactactcacccagtgacttcggagtcacaacccaggacacggttttcc

SEQ ID NO: 18548 - DNA, 201 bp, Homo sapiens
tgcacaacgacctgtcccccacacccaaccacaagtttatgaagggatgcagaacagcatgaatactgcaaaagatgctctgtgcatcaggtaaatggacwgagggacaatgtccatgagtccagaggcgctgagaagctgtgcaaatatggtcagctctatcagacactttgtagtttaggtgtttgaaacaagaaaatt

SEQ ID NO: 18549 - DNA, 201 bp, Homo sapiens
ttctgcctattaaattgttgttgtaatatacccttacccctagctgttcagcaagctactgctttctaatgctgtcacatgtatgaatataaagcatgttytttttccctctagttaaactgtctaatgtcaagaaatttgcaggcccacttcctccccccaccaccacttgaacctaatttagtgatggaaaggttttat

SEQ ID NO: 18550 - DNA, 201 bp, Homo sapiens
tttctttcattctttccttccttttgttctttctttcaatctccctcccctccccttccctttcctttatttaagagggctggtagcatcctactttctaytattttagttatcaatagactaaattagaaaaaaaattagcattgtttaattatgagataaatgaactataaacctaaatatttaccagaaaagagcaga

SEQ ID NO: 18551 - DNA, 201 bp, Homo sapiens
cttacccctagctgttcagcaagctactgctttctaatgctgtcacatgtatgaatataaagcatgttttttttccctctagttaaactgtctaatgtcargaaatttgcaggcccacttcctccccccaccaccacttgaacctaatttagtgatggaaaggttttattcccaatatagttgtgttttatgttcctgttc

SEQ ID NO: 18552 - DNA, 201 bp, Homo sapiens
aggtcatacgctcagggaatgtttattattggaacaatttaacctaccagcttgttattttgttcactttcctataaaaaggctaatcctattttttcttyaaatagaatctagagctaaatatatttttctttataaataaaaacaaatgacctgtacatgtacctcctgaatctaaaataaaagttgattaaaaaaaaa

SEQ ID NO: 18553 - DNA, 201 bp, Homo sapiens
ccctctagttaaactgtctaatgtcaagaaatttgcaggcccacttcctccccccaccaccacttgaacctaatttagtgatggaaaggttttattcccartatagttgtgttttatgttcctgttctaggcttaaattttcaggggcctggaagcttccatttttgtttcaggaagctagatgctatgctttgaagaagc

SEQ ID NO: 18554 - DNA, 201 bp, Homo sapiens
agatgattactcaactggtgaagggaaggataaagagtaatttaatacaccaaatattgcttttacactgaaattgtgttcacatgtcttctgtttgcagygagaatcaaacaagaggaatggatattagctaagcaagatgatttcgggaatgattttttgtttgtttgtttgtttcgacattgaattaatatggagaca

SEQ ID NO: 18555 - DNA, 201 bp, Homo sapiens
tgagtctagatcctctgtccatgaaggaaaagtgattaagcaccagctcactcaagcatggctggtgcaagtttatccctgagagaagatccaactcatcktccccttttgttcatatctggaaggcacgggacatcaccggtacccattttagcctctgcgttctgtagcttggacaggcattatcttgatgtcactgtg

SEQ ID NO: 18556 - DNA, 201 bp, Homo sapiens
atgagtctagatcctctgtccatgaaggaaaagtgattaagcaccagctcactcaagcatggctggtgcaagtttatccctgagagaagatccaactcatsttccccttttgttcatatctggaaggcacgggacatcaccggtacccattttagcctctgcgttctgtagcttggacaggcattatcttgatgtcactgt

SEQ ID NO: 18557 - DNA, 201 bp, Homo sapiens
cctcctccatgggacatgacttcctgggacaaatctattccagaaccaaagggcttactgaaataattgatctcagtggtttctaaggaaatatttaaatmaaaaggggaaaatctgaaaagaaatccaaaatggagatgattatgccagaggtctctaaaaaggagccaggagggcataaggagttggacccccatcacc

SEQ ID NO: 18558 - DNA, 201 bp, Homo sapiens
accagcctcagaaagtgaactaaaaaccacctcctgaatattctttttgatggataaacttataccataaagataaagcatgaaacacaagaatcctccaygagttatttaaagtgaaatcacagggcacatggactcatgtggaaggagaggacatgaactgattcttttggtgaattttatttaggactaatttgactc

SEQ ID NO: 18559 - DNA, 201 bp, Homo sapiens
aggcatgagccaccatgcgtggcttttttttttttttttttttttttttttttgagacagggtctcttgcgctgtcacctaggctggagtgcagtgagacraacacagctcactgcagcctagacctgctgggtttaagtgatccttacatctcagcctcctgagtacctgggactacaggtgtgcatcaccacacctggc

SEQ ID NO: 18560 - DNA, 201 bp, Homo sapiens
gagtacaaaagccaagattatattatgtgctattgggcctcaatcctaatatctcattgtccaatattgtgtgacaaccatatcataagaggagctaagartacacatgatggaaaaaaaaatagataggagcagaccagcctcagaaagtgaactaaaaaccacctcctgaatattctttttgatggataaacttatacc

SEQ ID NO: 18561 - DNA, 201 bp, Homo sapiens
tttatttttgagatggaatctcgctctgttgcccaggctggagtgcagtggcatgaacttggctcactgcaacctccgcctcctgagttcaagtggttctyctgcctcagcctccccagcagctgggattacaggtgcacaccaccatgcctggctaatttttgtatttttgtagagacggggtttcactatgttggccag

SEQ ID NO: 18562 - DNA, 201 bp, Homo sapiens
gactttttcatatgttattagagacaaccttacctgctctaaaaaaatcaatacaatgtccaataacataaaatcagggattaaatggaaatttagagtcratgtttcatatttgaatgaacgtattcaaattttgtgctttatttcaagcagaaagaaaacaatcagtaagagattatatagacctaagagatgttacag

SEQ ID NO: 18563 - DNA, 201 bp, Homo sapiens
ctcaagcaatcctcccaccttagccttctgagtagctgggactacaggcgcatgccactatgcccagctaaaaaaactttttaatcttgatgtgtctagtktatttttttcttttgttgtttgtgcttttggtgtcatacaaaactgttgtctaatctaaggtcatgaacattcatggctaggttttcctctaagagtttt

SEQ ID NO: 18564 - DNA, 201 bp, Homo sapiens
tgtaaccattcatcagttgatggacactttagttgtttgtttttttagctattatcaataaagctgctatgaacatttgtgtacaagttttcgtgtgcacrtatgttttaattcccgggggagttaatactagaggtggaaatgctgggtcatatggtaattctatgttttaccttctgaggaactgctagttttgaaaac

SEQ ID NO: 18565 - DNA, 201 bp, Homo sapiens
tgaagactcagatgaaggagtataatcagatcaccatcaaccaggtaaaataatacccctcatggccataaaaccggagactgaggggcaggggcagtgawgtatctatgggttattttctcctaagagtacaaaagccaagattatattatgtgctattgggcctcaatcctaatatctcattgtccaatattgtgtgac

SEQ ID NO: 18566 - DNA, 201 bp, Homo sapiens
gtctccttgtgctgaactgcatgggataggccatttccatacaatctcatcctctgaataaggaaccatgatgctcctaaagacatactaaatatagatcytgggtaatattggagtcagtgctggtcatcaatgattttctctgtgatgatagagggggtccactatgaatgatagcattaattttgctgtatgttcttg

SEQ ID NO: 18567 - DNA, 201 bp, Homo sapiens
tttagtgcctgaactatttatgtatgaaaaaatgtaaaaactacactgactgtaacacataaaacaacacacacaaaaggtaaagcttgaagactcagatraaggagtataatcagatcaccatcaaccaggtaaaataatacccctcatggccataaaaccggagactgaggggcaggggcagtgatgtatctatgggtt

SEQ ID NO: 18568 - DNA, 201 bp, Homo sapiens
tcaaggcatcagcagattcagtgtctggtgggagcttgctgtctgcttcacagatggtgccttcttatggcatcctcacatggtgaaagggaacaaacagsctccctcaagccttttttgtaagggcactaatcccattcatgaaggcagagcacctacttgtaatactatcgtattcgttcgttctcatgctgctaataa

SEQ ID NO: 18569 - DNA, 201 bp, Homo sapiens
gaggcccaataacgagaagcagacagactaggaaagaagggaatttattgctgtaaccagatacaggcagaaggctggagataattccaccaggccaactyaaagtgtcaacaattgtcttagtgtttatataggttggggttatgcgcctgtgtgcagtgtagcattcgcctaagtctactggtaactaattttgtttca

SEQ ID NO: 18570 - DNA, 201 bp, Homo sapiens
gcaccattgcactccagcctggacaacaagagcgaaactccgtctcaaaaaataataataatacaaataaaaaaataaaaaataaataaaataaaataaaracgtttttatcttgttaatctgtcttttgtcaatctaatttacagggcccagcctgtaaatctaaaatgagtagaaggaaaaagaatttttcccctcctg

SEQ ID NO: 18571 - DNA, 201 bp, Homo sapiens
ccaattgatagcttaggaagatctctccattctgttattttaaggatttttaaagaccacctcaaccaagattttcaaatcatagtgaaacacaaaatttratcaacttacccacaacagtgaaaaagcctctggctgacccttctactacatcatttggcaagtccaaaactccctgcttggaggctttggcacctagaa

SEQ ID NO: 18572 - DNA, 201 bp, Homo sapiens
gtgcggatcacgaggtcaggagatcgagaccatcctggctaacaaggtgaaaccccgtctctactaaaaatacgaaaaaaattagctgggcgtggtggcgrgcgcctgtagtcccagctacttgggaggctgaggcaggagaatggtgtgaacccagaaggcagagcttgcagtgagctgagatggggccactgcactgca

SEQ ID NO: 18573 - DNA, 201 bp, Homo sapiens
ggttcacttttctttcaccagactactgcataaaaacagcttatgacatcttggtatgagtaacaattgctttcaaaaattatgggcagaaattacttaawtcttctcaccattagataagagaaagaaagccttagattgaacttcctctgtcagttgctcagtagatttcagatagtccagaacataagtatcagatgc

SEQ ID NO: 18574 - DNA, 201 bp, Homo sapiens
cgtgcggatcacgaggtcaggagatcgagaccatcctggctaacaaggtgaaaccccgtctctactaaaaatacgaaaaaaattagctgggcgtggtggcsggcgcctgtagtcccagctacttgggaggctgaggcaggagaatggtgtgaacccagaaggcagagcttgcagtgagctgagatggggccactgcactgc

SEQ ID NO: 18575 - DNA, 201 bp, Homo sapiens
taggactgagagttcctcggttcaggttcacttttctttcaccagactactgcataaaaacagcttatgacatcttggtatgagtaacaattgctttcaamaattatgggcagaaattacttaaatcttctcaccattagataagagaaagaaagccttagattgaacttcctctgtcagttgctcagtagatttcagata

SEQ ID NO: 18576 - DNA, 201 bp, Homo sapiens
ggagacctagggagtgccaggcctcagagcagacagaggaagggcacgcagtgacagagcccacgaagtgtggccagagagcagtgatgaggaggattacmgagtggctcatggaaaccagcgtggaagctttcttatttcttcttctccttctgcttctctttctcccttcctcctttcctccctccctccctccctccc

SEQ ID NO: 18577 - DNA, 201 bp, Homo sapiens
gcgtcctggaaaaatcaggtcacacacggactcaaaggatgaatgcgaggttttattgagtggtggaggtggctttcagagggatggatggagagccagayggtgggtggatggaatgggaaggtgatcttcccctggagtcaggccgcccagcggctggactcctttcctaccgcccccagctgaactcctcttggcatc

SEQ ID NO: 18578 - DNA, 201 bp, Homo sapiens
ggccgtagtgtctaggagtggatgcctgcagccccagcgttacaaagctttcagcttggccgcccgaagacagcttgaatgttaaccagcttaatggaccytttgccttttcacaagggcagagggccaacatgatagcttgctgtatcccgagctcttgttcagcgtcctggaaaaatcaggtcacacacggactcaaag

SEQ ID NO: 18579 - DNA, 201 bp, Homo sapiens
taccctcactatctgcctaaatcatttctttttaactcctatatcaatagcctcccaagtagctgggactatacgtgtgcgccacgacactcagctaatayttgtattttttgtagagacagggcttcaccatgttgcacaggctggtcttggaactcctgagctcaaagtgatctgcctgccttggcctttgaaagtggt

SEQ ID NO: 18580 - DNA, 201 bp, Homo sapiens
tgtctgcagctcaattttacaggctgactttttcaaaaagaaatgacttggggactgcttttcattaaaaggaaaaccttactgaggactttcttaccctyactatctgcctaaatcatttctttttaactcctatatcaatagcctcccaagtagctgggactatacgtgtgcgccacgacactcagctaatatttgtat

SEQ ID NO: 18581 - DNA, 201 bp, Homo sapiens
gcagtcaactaatttttcaaattaaaaatgctttattgttatttatagcatgattgtttttctataaaaaaggcatattacaacagccttcgcttcacatmtgactcttgcagcattcttataaagagatctcacaccatatttgagggcttcattagttttctaagccttaaaaaaatttcatcattaagattattctct

SEQ ID NO: 18582 - DNA, 201 bp, Homo sapiens
tataggcatgcactaccacacccagataacttttgtatttttagtagagacagggtttcaccatgttggccaggctggtctcaaacttctgacctcaagtratcctcccgcctcggcctcccaaagtgctgggattacaggtgtgagccaccaggcccgaccaatgctaggtctttgcagtgggtctcatatcattccacg

SEQ ID NO: 18583 - DNA, 201 bp, Homo sapiens
gctgggattacaggcgtgagccaccgcgcctggccattttttttttttttttttttgagacaaagtctcattgtgttgcccaggctggagtgcagtggtgygatctcggctcactgcaacctcctcctcccgggatcaagtggttctgcctcagcctcccgagtaactggaattataggcatgcactaccacacccagata

SEQ ID NO: 18584 - DNA, 201 bp, Homo sapiens
ggggcctcagtgtggagcagggaggggaccagcaccatatactgcctgggaaaggaagaagtctaaattagagaaaaactgatgatagtaagcgttttcayccataaatgtgttttcataacaatatgtattaattggtgcaatcagttttattctaaaagtcaatggactaagtcaatggaggttctgtcacagatcagc

SEQ ID NO: 18585 - DNA, 201 bp, Homo sapiens
ctggtgaggaaatatccttaatgactcctttgttttcaattagaacattactccttgccttcccaggcagtgaatctgctgtattaaaatgtgtttattctttttttttttttttaacactttttactgccatcctcattttttattaaaaagtaaatttggtagacattcaagcatgcagagaaaaatttctctaggcct

SEQ ID NO: 18586 - DNA, 201 bp, Homo sapiens
gaaaatacacacttggtgaaatgaaagtcaattaatcatgcttttcagtttcttttttttaaacaaacatgccattaaaggaatcatgattttttttttttcattttatggtcacaatacctcaatgagtttggtgttgtcattctgacttcagatttaaagaaattgagcctctaaaaggttaagtgagtctgcaaattt

SEQ ID NO: 18587 - DNA, 201 bp, Homo sapiens
tacctttgtttccattgatctgttttctcttaggttggaaagaaaatacacacttggtgaaatgaaagtcaattaatcatgcttttcagtttcttttttttaaacaaacatgccattaaaggaatcatgattttttttttttcattttatggtcacaatacctcaatgagtttggtgttgtcattctgacttcagatttaa

SEQ ID NO: 18588 - DNA, 201 bp, Homo sapiens
actggtgaagggaaggataaagagtaatttaatacaccaaatattgcttttacactgaaattgtgttcacatgtcttctgtttgcagcgagaatcaaacaagaggaatggatattagctaagcaagatgatttcgggaatgattttttgtttgtttgtttgtttcgacattgaattaatatggagacataaacaataagca

SEQ ID NO: 18589 - DNA, 201 bp, Homo sapiens
aactggtgaagggaaggataaagagtaatttaatacaccaaatattgcttttacactgaaattgtgttcacatgtcttctgtttgcagcgagaatcaaacaagaggaatggatattagctaagcaagatgatttcgggaatgattttttgtttgtttgtttgtttcgacattgaattaatatggagacataaacaataagc

SEQ ID NO: 18590 - DNA, 201 bp, Homo sapiens
tcttcctcaccatcaccttcttcctccccaccttcttcctcttcttcatctacctcgttgtcagcctccggctccccattttcctcattagcattcccgtkagcaggggcgtctcttccattttccgcctcttccacaacttccttcttctcctttaagtcctcggtggtgatttcggagctggtgtctacggctgcgtct

SEQ ID NO: 18591 - DNA, 201 bp, Homo sapiens
tcctcttcctcaccatcaccttcttcctccccaccttcttcctcttcttcatctacctcgttgtcagcctccggctccccattttcctcattagcattccygtgagcaggggcgtctcttccattttccgcctcttccacaacttccttcttctcctttaagtcctcggtggtgatttcggagctggtgtctacggctgcg

SEQ ID NO: 18592 - DNA, 201 bp, Homo sapiens
gtcatccgagatcattaaaaatggccgaccctaacaatatgtacaaaaatataaaatgtaaataaaaaatacaagtttcctttttaaagtacttttaagaaaaaaaaaaagcagggccttggaagttttggttctttttccctcccctgttgcaaattctcatggtttgggttgggtggtggagagcgcgtgtcatctgcg

SEQ ID NO: 18593 - DNA, 201 bp, Homo sapiens
aaaacactgcatgggagaggccgccttgtgcctctaatccaacagctgtgcttagctaacagctcatgacagtgtagaggggcacaggcaaggctgtaackccctgaaccaggtgatatgcagcagttcaggttttcttccttctgatcaagtacccctttgatggagtaagttcaagagatctatagtacaacacagtga

SEQ ID NO: 18594 - DNA, 201 bp, Homo sapiens
ggtcatccgagatcattaaaaatggccgaccctaacaatatgtacaaaaatataaaatgtaaataaaaaatacaagtttcctttttaaagtacttttaagaaaaaaaaaaagcagggccttggaagttttggttctttttccctcccctgttgcaaattctcatggtttgggttgggtggtggagagcgcgtgtcatctgc

SEQ ID NO: 18595 - DNA, 201 bp, Homo sapiens
gtgggttcaggctttttgtttattccttttgttttggtggcagtgcagaagataataggaaaagaggcttctatgcatgaaacagcacaacaattttcaascaggtcatctattggctgaaagctcagagctgtgctcagatttaattctaaatgtgatctgaattgggtaatacaaaagtctaaaaaagatgaaaagttc

SEQ ID NO: 18596 - DNA, 201 bp, Homo sapiens
cccttaggaacttcctcagctcactttcaaatggagggcactggctttctaaccattgtgtctcccagcccagtgacagctgaagctgactgcttccgatrtcacaggcagcacagaagagccgccctccaggtgctgctgggaaatgctgcctggaactctttgccatttactttctatcaaaagctgagggaaatggta

SEQ ID NO: 18597 - DNA, 201 bp, Homo sapiens
ttatctagcaatagataactgaagtagctacaaagataactttagcatgatttccaggcaaagtgctctctcctcagaatttgtaagattcctccaaagarcagctgtagagctgttaagtatccaatccaaacagatgggagaaaagataaagctcttgacaagctgctgtggaaaataccaattcatgttatctctgcc

SEQ ID NO: 18598 - DNA, 201 bp, Homo sapiens
tgttgatgataccccaggaaggtgagcctttggttataaatccttttaacattttccagtctaaaagttttgtggtcttattacaggatgtagaaaacagkgggcctcagttattcttttgctgttgtgccggagtataccacggttgtttttgaaagataactttgaccatacccttaggaacttcctcagctcactttc

SEQ ID NO: 18599 - DNA, 201 bp, Homo sapiens
accaattcatgttatctctgccttcctgggaacttgcaaatgaaccagccctcaaatgcagctctggatatgacaaaccatcccagatggacccctaaagktccccaatagctttgtatctttcaaaaccacataaatcttagaatctacagtttaggttttgtttgtttgtttgtttgtcttagacagagttttgctctt

SEQ ID NO: 18600 - DNA, 201 bp, Homo sapiens
agtagagacggggtttcactgtgttggccaggaaggtctcgatctcctgacctcgtgatctgcccgcctccgcctcccaaagtgctgggattacaggcgtragccaccgcgcctggccattttttttttttttttttttgagacaaagtctcattgtgttgcccaggctggagtgcagtggtgcgatctcggctcactgca

SEQ ID NO: 18601 - DNA, 201 bp, Homo sapiens
ttacaggtgtgagccactgcgcctggcctattttatttttatttatttatttttttgagacggagtctcgctctgttgcccaggctggagggcagtggcgygatctcggctcactgcaagctctgccttctgggttcacgccattctcttgcctcagcctcccaagtaactgggactacaggcacccaccaccacaccccg

SEQ ID NO: 18602 - DNA, 201 bp, Homo sapiens
atgctaggtcttttattttatttattatttttttttgagagggagtcttgatctgtcgcccaggctggagtccagtggcgcaatgtcagctcacttcaagytccgcctcccgggttcttgccattctcctgcctcagcctcctgagtagctgggactacaggtgcccgccaccacacctggctaattttttgtatttttag

SEQ ID NO: 18603 - DNA, 201 bp, Homo sapiens
tcaaaaataaaataaaataatccatccataaataaataataaatgtagcatagcctaagtgtccagtggttataatctacagtagtgcaccgtaatgttgyaggctttcacattcaatcaccactcagtgactcacccaggcaacctccagtgctgcaagctccattcatagtaagtgcctgataaactacagggcacttt

SEQ ID NO: 18604 - DNA, 201 bp, Homo sapiens
aatgaatacattcttgtaaaagcacttaactttacataagtgtttaaaggaaaacacatagatatatccccaaccttcttttttcttttttttttttttttgtggcagggtcttactttgtcacccaggctagagtgcagtggtgtgatcatggctcactgtagtcttgacctccgggtgcaagtgatcctcctgccttag

SEQ ID NO: 18605 - DNA, 201 bp, Homo sapiens
ttagagcaaattttgcaatgaatacattcttgtaaaagcacttaactttacataagtgtttaaaggaaaacacatagatatatccccaaccttcttttttyttttttttttttttttgtggcagggtcttactttgtcacccaggctagagtgcagtggtgtgatcatggctcactgtagtcttgacctccgggtgcaagt

SEQ ID NO: 18606 - DNA, 201 bp, Homo sapiens
gccttgttggccaggctggtctcaaactcctgatttcaggtgatccgcccaccttggcctctcaaagtgctgagattacaggcatgagccaccacgctccrcccccagttaaaatgtttttaacgggcagtattaatatcattccatttcacagctgaagaaactgccttaggctatgtaacttaagatcaaacagctgta

SEQ ID NO: 18607 - DNA, 201 bp, Homo sapiens
cgagttcaagcaattctcctgcctcagcctcctgagtagctgggattacaggtgcatgccaccatgtgtggctaatttttgtatttttagtagagatgggktttcgccttgttggccaggctggtctcaaactcctgatttcaggtgatccgcccaccttggcctctcaaagtgctgagattacaggcatgagccaccacg

SEQ ID NO: 18608 - DNA, 201 bp, Homo sapiens
aatctcggttcactgcaacctccacctcccgagttcaagcaattctcctgcctcagcctcctgagtagctgggattacaggtgcatgccaccatgtgtggytaatttttgtatttttagtagagatggggtttcgccttgttggccaggctggtctcaaactcctgatttcaggtgatccgcccaccttggcctctcaaag

SEQ ID NO: 18609 - DNA, 201 bp, Homo sapiens
aatcagagatcgtttactggaaatgacaagtttcatcttgtctgattaagtacacattaaatcttggcacagactttcttaggcaaaactttgctcaacartaatttgaatccacatagaacccttgcctttagtaccttgaatattctttgttattgcattaattcccattcctaaattttacaagatgtctgagactat

SEQ ID NO: 18610 - DNA, 201 bp, Homo sapiens
actttaccatggccacatgggacatgaatctaagtcttgtgactactagtccactgttttatccattatagcattttggtagagaacgtgacttataattygtagacactcagtgaggataggaggaagtagtagaaagtggagtgagagaggaatacctggcctaggaaagacagttcagagttgacaaacatcgtttat

SEQ ID NO: 18611 - DNA, 201 bp, Homo sapiens
gctgtagtctaagaattgtcatgtagatcaattgaatggaattgagggtccagaagtaaacccacatgtttatggtcaacatttttaagaagagtgccagratcttcaaatgaggaaagatctcctgattggctacaagtagacctgcccttatttgggtataaacccatggaaagtccctagttagaagttaattgacag

SEQ ID NO: 18612 - DNA, 201 bp, Homo sapiens
tgcatgtctgtaatcccagcactttgagaggctgagctaggatgatcacttgagcccaggagttcaagaccagccgaggcaacataggaagaccccatctytacaaaaaatttaagaattagcccagccaggcacaggggctcatgcctgtaatcccagcactttaggaggccgaggtgagtggatcacctgaggtcagga

SEQ ID NO: 18613 - DNA, 201 bp, Homo sapiens
cggggtttcaccatgttggccaggatgctcaaacccctgacctcgcgatccgcccgcctcggcctcccaaagcgctgagattaccggcgtgagccaccgckcctggcctgggcacagagttaaaaaaaaaatactggtaacagaaaacttgttggcgtgtttcagttttcagagtcttctataaggtcttataccagccga

SEQ ID NO: 18614 - DNA, 201 bp, Homo sapiens
gtatttttagtaaagacggggtttcaccatgttggccaggatgctcaaacccctgacctcgcgatccgcccgcctcggcctcccaaagcgctgagattacmggcgtgagccaccgcgcctggcctgggcacagagttaaaaaaaaaatactggtaacagaaaacttgttggcgtgtttcagttttcagagtcttctataag

SEQ ID NO: 18615 - DNA, 201 bp, Homo sapiens
ttgttaatatatgaacagactttgagtaatcagagatcgtttactggaaatgacaagtttcatcttgtctgattaagtacacattaaatcttggcacagaytttcttaggcaaaactttgctcaacagtaatttgaatccacatagaacccttgcctttagtaccttgaatattctttgttattgcattaattcccattcc

SEQ ID NO: 18616 - DNA, 201 bp, Homo sapiens
acaacaatccagtaatctccaaacattggttctgaaatcagttggaacgagagttgggtaatatttcggaaagaagtcacattttgccattgaaaaatccrattgttttgaggatcctagaaaataatgaaaaaaatataaacaatcagaatttgtatgagagtattaccctttgctgccatatttcggatagtttcggat

SEQ ID NO: 18617 - DNA, 201 bp, Homo sapiens
atgactcactagaatatttctctctgctttgtgttgactttacagttatgttaccttttctaatgctaattttaaaatatttgcttgtcattttgattacrtaagtgtaactgagtattacttcttgggcatataatgctatttaatggagtaaccagtggcaactcttgcttttgccttccaaaaatagaatcttaaaaa

SEQ ID NO: 18618 - DNA, 201 bp, Homo sapiens
ttactttttatcaatctgatgagtgaagcagtatcttgccttaattttcattattaatgactttacacatcttttcatatgtttatggaccatttgaattmtaccatcagtttgatatctcaacacaatatgtaaagggtctatcaggaacatctccttgccccagtttcatgagccttggactctagacgctgcaatttt

SEQ ID NO: 18619 - DNA, 201 bp, Homo sapiens
acactcgtaccttacatgcacccaactttaataaaattaaacacttgccaagtttgtttaaggtcatttcttcttaagaaatgaaagatggcaatggtagygctcttttaaaatttgtctagaagcttttccagtttttaccagatccaccaacccaaaaaaagaaataaatcaagacaaatatggttggagtttcctttg

SEQ ID NO: 18620 - DNA, 201 bp, Homo sapiens
aatttatcctaaaaagtactttctatttatttccctaagaggctcattccaagtgattttcatcagaacaatgtttttcttttttttttctttttttttttgctagaacaactcagcaaaataaaattcctgtttattgttggacaacattgtttcacacatacatcaaacaggccaaaaaataaaaataaacagcaactt

SEQ ID NO: 18621 - DNA, 201 bp, Homo sapiens
agtttcccaaattgtgtgagactatccgaagcacaagtcaaaaacagatcaaatttttcatgtcacacatcagcactgagatgtgttttttcagttattgkactcttcttatctctttggagtaattcagcccaggacaaacaactttatagggaaatttagatagaagatagaatggaccctcttattgccttatggtca

SEQ ID NO: 18622 - DNA, 201 bp, Homo sapiens
aaaacaaagtaatggtgatgatacaatcttttcttagattgcaaatattctcataagttattacaaaaaatattccctatttattgggcaaacagtgcccscttttgaccactggatcctatgaaagaaatcctaagacaatagactcttcatctctgctaaaaattgaattatatagagagttatatagatgtatattat

SEQ ID NO: 18623 - DNA, 201 bp, Homo sapiens
ttagttttccttctaaccatcagtttcctgagctgcacgtctattggagtttgctggaggtccactccagaccctgtttgcctgggtatcatcagcagagsctgcagaacagcaaatattgctgtctgatccttcctctggaagcttcatctcagaggggcacctggctgtttgaggtgtcagtcagcccctactgggagg

SEQ ID NO: 18624 - DNA, 201 bp, Homo sapiens
gagtgcagtggcatgatctcagctcactgaaagctctgcctcccgggttcacgccattctcctgcctcagcctcccgagtagctgggactacaggcgcccrccaccacgcccggctaattttttgttgtatttttggtagagatggggtttcaccgtcttagccaggatggtctccatatcctgtccttgtgatccgcccg

SEQ ID NO: 18625 - DNA, 201 bp, Homo sapiens
tcgccttgggggtgtgccagacagattaaaatgaataaatcaacacttcacccaaacattcattcatagacttgcttttttttttttttttttttgagacrgagtctcaatctgtcacccaggctggagtgcagtggcatgatctcagctcactgaaagctctgcctcccgggttcacgccattctcctgcctcagcctcc

SEQ ID NO: 18626 - DNA, 201 bp, Homo sapiens
caaacctcgccttgggggtgtgccagacagattaaaatgaataaatcaacacttcacccaaacattcattcatagacttgcttttttttttttttttttttgagacagagtctcaatctgtcacccaggctggagtgcagtggcatgatctcagctcactgaaagctctgcctcccgggttcacgccattctcctgcctca

SEQ ID NO: 18627 - DNA, 201 bp, Homo sapiens
ggccctggcttaacagcagtgcggaaaagcttttctcttggggctgtggtgctttccaggtgtgtgaagttaaaacattttagggccatacggtaggtagyacctgccacatagttgtcttggtcagccccggctgccatgacaaaataccataaactgggtggcttagacacagaaatgtgttttctcacagtcccagag

SEQ ID NO: 18628 - DNA, 201 bp, Homo sapiens
tcaaacctcgccttgggggtgtgccagacagattaaaatgaataaatcaacacttcacccaaacattcattcatagacttgcttttttttttttttttttttgagacagagtctcaatctgtcacccaggctggagtgcagtggcatgatctcagctcactgaaagctctgcctcccgggttcacgccattctcctgcctc

SEQ ID NO: 18629 - DNA, 201 bp, Homo sapiens
atcaaacctcgccttgggggtgtgccagacagattaaaatgaataaatcaacacttcacccaaacattcattcatagacttgcttttttttttttttttttttgagacagagtctcaatctgtcacccaggctggagtgcagtggcatgatctcagctcactgaaagctctgcctcccgggttcacgccattctcctgcct

SEQ ID NO: 18630 - DNA, 201 bp, Homo sapiens
ccacatcctataacttaacaataaccaattgctcatcaattttgtttctgtaatccaaagagagttcctgatcaacaactttgtaccagcccactctctcsgtcccagtcttttgtttttaaaaacctgcttggaacaaaggctctaggaagctcacagccaagagtacttgggtctgagtcttccaggcagctgtcctca

SEQ ID NO: 18631 - DNA, 201 bp, Homo sapiens
tagctgggactataggtgcacgccaccacacctggctaattttcttattttttgtagagagagggtttcattatgttgcccaggctggtctcaaactcctrtgctcaagcaattcaccgagattacaggcctgagattacaggtgctgagattacaggcctgagccaccgtgcccagtcctcataatgcatttcacacacc

SEQ ID NO: 18632 - DNA, 201 bp, Homo sapiens
attcacaatagctaagccatggaatcaatctaaatgcccaccaatggtagactggataaagaaaacatgccacatatacactatggaatactacacagccrtaagaaagaatgagatcacgtcctttgcagcaaaattgatggagctggagaccatcatcctaagcaaactaacacagggacagaaaaccaaatactgtat

SEQ ID NO: 18633 - DNA, 201 bp, Homo sapiens
cactgcagccttgacctccctgggcccgagtgatcctcccacctcatcctcccgaatagctgggactataggtgcacgccaccacacctggctaattttcytattttttgtagagagagggtttcattatgttgcccaggctggtctcaaactcctgtgctcaagcaattcaccgagattacaggcctgagattacaggtg

SEQ ID NO: 18634 - DNA, 201 bp, Homo sapiens
cctgcctcagccttctgagtagctgggactacatgcacctgccaccacgccccactaattttttgtatttttagtagagacggggtttcactgtgttagcyaggatggtcttgatctcctgacctcgtgatccgcccacctcagcctcccaaagtgctgggattacaggcgtgagccactgagcccagcccgaacttttga

SEQ ID NO: 18635 - DNA, 201 bp, Homo sapiens
cctggaggcagaggttgcagtgagccgagatcgcgccactgcactccaggctgggtgacagggcaagactctgtcttaaaaaaaaaaaaaaaaaaaaaaaattggccgggcgcagtggctcatgcctgtaatcccagcactttgggaggctgaggcaggcggaacacgaggtcaggagatcgagaccatcctggctaacat

SEQ ID NO: 18636 - DNA, 201 bp, Homo sapiens
ccctggaggcagaggttgcagtgagccgagatcgcgccactgcactccaggctgggtgacagggcaagactctgtcttaaaaaaaaaaaaaaaaaaaaaaaattggccgggcgcagtggctcatgcctgtaatcccagcactttgggaggctgaggcaggcggaacacgaggtcaggagatcgagaccatcctggctaaca

SEQ ID NO: 18637 - DNA, 201 bp, Homo sapiens
accctggaggcagaggttgcagtgagccgagatcgcgccactgcactccaggctgggtgacagggcaagactctgtcttaaaaaaaaaaaaaaaaaaaaaaaattggccgggcgcagtggctcatgcctgtaatcccagcactttgggaggctgaggcaggcggaacacgaggtcaggagatcgagaccatcctggctaac

SEQ ID NO: 18638 - DNA, 201 bp, Homo sapiens
ctgtgtctctacaaaaactttaaaaaattgtcagggcatgatggcatgggcttttagtcccagatactcaggaggctgagcggggaggacctccccgcttragcccacaatgcagaggttgtagtgagctgtgatagtgccactgcattccagcctgggtgacagagccagaccttgtctaaaaaacaatagagtaaaata

SEQ ID NO: 18639 - DNA, 201 bp, Homo sapiens
aaccctggaggcagaggttgcagtgagccgagatcgcgccactgcactccaggctgggtgacagggcaagactctgtcttaaaaaaaaaaaaaaaaaaaaaaaattggccgggcgcagtggctcatgcctgtaatcccagcactttgggaggctgaggcaggcggaacacgaggtcaggagatcgagaccatcctggctaa

SEQ ID NO: 18640 - DNA, 201 bp, Homo sapiens
ggaggcagagttgcagtgagctgagatcgcgccattgcactctagcctggccagcagagcgagagtccatctcaattaaaaaaaaaaaagtatgcataagrtactaagggaggccggcatggtggctcacgcctctaatcccagcactttgggaggccaaggcgggcggatcacctgaggtcaggagttcgagaccagcct

SEQ ID NO: 18641 - DNA, 201 bp, Homo sapiens
caagacctgcctgggaaccatgccgagacctggtctctacaaaaaataaaaaattagctgggtgtgtggtgatgcatgcccctagtcccagctactcaggrggctgaggtgagaggatcccttgagcccagaaggtcaaggatgcagtgagccatgatcatgccactctaccccagcctgggcaagagagtgagatcctgt

SEQ ID NO: 18642 - DNA, 201 bp, Homo sapiens
aattagagcatatagagaagtaaaacagaaataattaacactgtgtgtagataccttccctcctgaattcaacaaatgttaacactttgctatattcattkcacaactttttaaaacagaaatatgaatcttaaattcggctggggaaaaaaaaacagaaataaaaactttagataaatgaaaattccctcagctggagct

SEQ ID NO: 18643 - DNA, 201 bp, Homo sapiens
aatacatagaatacataatacaaaaaagttaaacaactggtatatatattggataagaaaagataaaatgatatctttcagctgattataagatttatgcrgccgggcactgtggttcatgcctgtaatctcagcactttgggaggccgaggcggacggatcatgaggtcaggagttcgagaccatcctggctaacacggt

SEQ ID NO: 18644 - DNA, 201 bp, Homo sapiens
gagactgtgcttctgttcgtgtttctgtgggttgtatactcatgaaatgtatgtatgtgtttttcttccatttttctcacgggttgtttggtatttctttwtttttttcttttttttttttgagacagaatctcgatgcattgcccaggctggagtgcaggggtgatctcggctcactgcaacctccacctcctgggctcc

SEQ ID NO: 18645 - DNA, 201 bp, Homo sapiens
agggactgcggagcagctgctacttgcaggtgggcatgtgaggctgggggactttgtgctgggctgaagctcaaatccacctgtgggaaatgaaggaaacrtcaaccagtgttttccctacttctgtgatcttgcagtcacctgcatttcctaagccacccttatattcagttcatatgactatgttggtaatgtcagtca

SEQ ID NO: 18646 - DNA, 201 bp, Homo sapiens
ccttctgggttcaagcgattctcctgcctcagcctcccgaatagctgggactacaggcacacgccaccacgcctggctaattttttgtatttttagtagarccggggtttcaccatattggccaggctggtcttcaactcctgacctcatgatccagtcacctcagcttcccaaagtgctgggattataggcgtgagccac

SEQ ID NO: 18647 - DNA, 201 bp, Homo sapiens
tctcttgtatgatgaatgatggaatataccaaaaccctatgctaattagatttggtagatacactttaagaagtaatataacgtctgtttttatttatttrtttatttagacagagtcttaccctggtgcccaggctggagtgcaatggcacaatctcggctcactgcaacctccgccttctgggttcaagcgattctcct

SEQ ID NO: 18648 - DNA, 201 bp, Homo sapiens
cccattaaaatgtcacaaacagttaatggttaggctaggattcacctcttcaaatgacaacatgaaaggattgggaagctctgatggcagaagagaagacrctagataaactctgcatttgacccagaaaacatgtcaaatcctatgatcttgtctaaagttcaacaatgccctgtagctatatattctagtgctcctaag

SEQ ID NO: 18649 - DNA, 201 bp, Homo sapiens
aaaaatcaaatcaagatggattaaagacctaaatgtaaaacctaaaactataaaatcctggaagataacctagaaaatacctttctgggcataggcccttrtaaagatttcatgatggagatgttaaaagcaattgcaacaaaatcaaaaattgacaagtgggacctaattagactaaggagcatctgcacagcaaaagaa

SEQ ID NO: 18650 - DNA, 201 bp, Homo sapiens
tactacgagttaataactgttcttagaactaactttttttttttttcctttttactttgagacggagtctcgctctgtcacccaggctggagtgcaatggygcagtctcggctcactgcaatctccgcctcctgggttcaagccattctcctgcctcagcctcccaagtagctgggattacaggcgcatgccactacgtcc

SEQ ID NO: 18651 - DNA, 201 bp, Homo sapiens
tacaccatatgcaaaaatcaaatcaagatggattaaagacctaaatgtaaaacctaaaactataaaatcctggaagataacctagaaaatacctttctggscataggcccttgtaaagatttcatgatggagatgttaaaagcaattgcaacaaaatcaaaaattgacaagtgggacctaattagactaaggagcatctgc

SEQ ID NO: 18652 - DNA, 201 bp, Homo sapiens
ttcaagccattctcctgcctcagcctcccaagtagctgggattacaggcgcatgccactacgtcccgctaagtttcgtactttcagtagagacagtgtttygccatgttggccaggctggtctcgaactcctgacctcaagggatctgcctcagcctcccaaagtgctgggattacaggcgtgagccaccgtgcccagcca

SEQ ID NO: 18653 - DNA, 201 bp, Homo sapiens
tatcagggacatgttgaaattccaatgaccattttttttttttttttttttgccttagaggcatcttttgtacataatgtatttctttttttttttttttycctcaagacagggcctcactctgccacccagattggagtgcagtgacaccatcagggctcactgcagccttgacctccctgggcccgagtgatcctccca

SEQ ID NO: 18654 - DNA, 201 bp, Homo sapiens
ttaaaaacacacagccaacatcatactgaatgggcaaaagctggaagcattcctcttgaaaactgggatgagacaaagatgccttctcttaccactcctaattcaacatagtactggaattcttagccagcacaatcaggcaagagaaagaaataaaaggcatccaaataggaagagaggaagttaagctctccctgtttg

SEQ ID NO: 18655 - DNA, 201 bp, Homo sapiens
accgtggaatgtactttcattttcaataaaacccttcattccttccttgctttgttagtgagttttgtccaattctttgttcaagacaccaagaaccttgratactctctaccgctaacatttgtgtgatgggtgcaccaaaatctcacaaatcaccactaaataacttactcatgtaactgaacaccacctgttcaccaa

SEQ ID NO: 18656 - DNA, 201 bp, Homo sapiens
atttgggggactgaggcaggagtactgcgtaagcccagaaagtggagactgaagtgagccaagatcatgccactgcactccagcctgggggacaaagtggkacgctgtctcaaaaaaaaaaaaaaaaaaaaaaaactacaaccctaacattattaactccatcacatttttgtttgttcgtctttagctcagatcaccttt

SEQ ID NO: 18657 - DNA, 201 bp, Homo sapiens
aggttcctgatgcaaaacctaaagagctttcatctgaggaaggtgagtcctttttaaactatgaggcctggagagacgttaaaatgagagcaatcacaccytactccccgctttgagctatgtattcatctcttaaaactgcttgctattgccacaagtagctatgaattaattttaatttaggattattatagtgtctca

SEQ ID NO: 18658 - DNA, 201 bp, Homo sapiens
ccaccagcagctcttcattggacccatcctgaccctccaagaaagcagaaaaggaggttcctgatgcaaaacctaaagagctttcatctgaggaaggtgartcctttttaaactatgaggcctggagagacgttaaaatgagagcaatcacaccttactccccgctttgagctatgtattcatctcttaaaactgcttgct

SEQ ID NO: 18659 - DNA, 201 bp, Homo sapiens
gttggttgcaggcaggggactgttgccccctgccaagcacttcagcttccttgcctggcctctccttggcttctgtctgtccccaccagcagctcttcatkggacccatcctgaccctccaagaaagcagaaaaggaggttcctgatgcaaaacctaaagagctttcatctgaggaaggtgagtcctttttaaactatgag

SEQ ID NO: 18660 - DNA, 201 bp, Homo sapiens
actggtttctaccactttcggcctcaagtgacagtgttttttaacgttggttgcaggcaggggactgttgccccctgccaagcacttcagcttccttgccyggcctctccttggcttctgtctgtccccaccagcagctcttcattggacccatcctgaccctccaagaaagcagaaaaggaggttcctgatgcaaaacct

SEQ ID NO: 18661 - DNA, 201 bp, Homo sapiens
tgcagttatgctacaagatctcttggcaaaggactagccaggcatgcctaatatatacattcgtgtgatttaacaaactggtttctaccactttcggcctsaagtgacagtgttttttaacgttggttgcaggcaggggactgttgccccctgccaagcacttcagcttccttgcctggcctctccttggcttctgtctgt

SEQ ID NO: 18662 - DNA, 201 bp, Homo sapiens
ttcttccgcttatttcactctttctgtacacattttccagtacctccaccactcaccaccctccaaaaagaactgatccctaagcttgtgcagtgattaaygattttcatgtcttttctatttgcctgcagttatgctacaagatctcttggcaaaggactagccaggcatgcctaatatatacattcgtgtgatttaaca

SEQ ID NO: 18663 - DNA, 201 bp, Homo sapiens
atgctgtggaagcttttttcttttgctctttacaataaatcttgctgctgctgactctttgggtctgcaccacctttaagagctgtaacgccatgaaggtyggcagcttcattcttgaagtcagcaagaccatgaactcactggaaggtagaaactctggacatatctgaaggaacaaactcctgacacaccatctttaag

SEQ ID NO: 18664 - DNA, 201 bp, Homo sapiens
tgcgaagctcttctactatctgctctttgactttttataacttattagtcatatcattcctcagggtgtgtataacttaataaataactttttttttttttgagacagagtctcactctgttgcccaggatggagtgcaatggcccgatcttggctcactgcaagctccacctcccgagttcaagcaattctcctgcctca

SEQ ID NO: 18665 - DNA, 201 bp, Homo sapiens
ggctggagcgcaatggtacaaactcggctcactgcaacctccacctcccgggttcaagcaattttcctgcctcagtctcccaagtagctaggattacaggygcccgccaccatgcctggcttgtatttttagtagagacagggttttgccatgttgcccaggctggtctcgatctcctgacctcaggtgatccaccagcct

SEQ ID NO: 18666 - DNA, 201 bp, Homo sapiens
attatcgatgatgtatgggacagcaatcttgaattaaagaagaaggtgggaaagccccaaatctctcataaattatgatgatgatgatgatgatgatgatkatttagcacacctctgctggcaggaaacaatttattttaaagatgacctgttacattaggtatttgtattgaatgttaccttatgtgttgaaaagggagt

SEQ ID NO: 18667 - DNA, 201 bp, Homo sapiens
gtcctgaactcctgaccttgtgatccgcctgcctcagcctcccaaagtgctgggattacaggcatgagccaccacgcccgaccaatagttgtattttttttggagacggagtctcgctttgtcacctaggctggagtgcagtggcgtgcaattggctcatgccaacctctgcctcagcctcccaagtagctgggattacag

SEQ ID NO: 18668 - DNA, 201 bp, Homo sapiens
cttagtagcatagactcaggtatgtgcatacagagttcattatgaataacaaaagatatttatgaattagtgtttgcttatgccagaaattttcttttccttttttttttttttttttttgaaacagagtcttcactctgtcacccagactagagtgcagtggtgtgatcttggcttactgtatcctccacctcccaggtt

SEQ ID NO: 18669 - DNA, 201 bp, Homo sapiens
cctactccagctagaagagaattttataaactatgtaaatgtatacttccattactatttcttaattgaaaatactcaaacaataggccactttctccttyaaaataaagattcatggatttaattcttggctacgagaatttgctcatctgcctgaatcaaactacaaaaatagccagatgtggtggcgcatgcctgtaa

SEQ ID NO: 18670 - DNA, 201 bp, Homo sapiens
ctgggttcaaggaattctcctgcctcagcctccagagaagctgggattacaggcgtctgccaccatgcccgactaattttctgtatttttagtagagatgrggtttcaccatgctggccaggctggtctcgaactcttgacctcaggtgatccagccacctcggccttccaaagtgctggaattacagacatgagccacca

SEQ ID NO: 18671 - DNA, 201 bp, Homo sapiens
tttaaaaaatgatctccttaagtccagatttatttttattggacatttctgtgccccagacctggaatgggccatttttccaatgaaaaggaaattattcmttttagtgtgtactggtttatttttggtgccagctgcttcctcttgttgttttcttcccccagcaccaatctggcactggagtcatacctccctggaggt

SEQ ID NO: 18672 - DNA, 201 bp, Homo sapiens
ataaaataattttaaaaaatgatctccttaagtccagatttatttttattggacatttctgtgccccagacctggaatgggccatttttccaatgaaaagsaaattattccttttagtgtgtactggtttatttttggtgccagctgcttcctcttgttgttttcttcccccagcaccaatctggcactggagtcatacct

SEQ ID NO: 18673 - DNA, 201 bp, Homo sapiens
agctgagatcatgccactacactccagcctgggtgacagagcaagactctatctcaaataataataataataataataataataataataataataataawaaaataaaataattttaaaaaatgatctccttaagtccagatttatttttattggacatttctgtgccccagacctggaatgggccatttttccaatgaa

SEQ ID NO: 18674 - DNA, 201 bp, Homo sapiens
tatagtgagctgagatcatgccactacactccagcctgggtgacagagcaagactctatctcaaataataataataataataataataataataataatawtaataataaaataaaataattttaaaaaatgatctccttaagtccagatttatttttattggacatttctgtgccccagacctggaatgggccatttttc

SEQ ID NO: 18675 - DNA, 201 bp, Homo sapiens
gttatagtgagctgagatcatgccactacactccagcctgggtgacagagcaagactctatctcaaataataataataataataataataataataataataataataataaaataaaataattttaaaaaatgatctccttaagtccagatttatttttattggacatttctgtgccccagacctggaatgggccatttt

SEQ ID NO: 18676 - DNA, 201 bp, Homo sapiens
tccttgcttcctaaagcatttctatgccacttcagaggttcaggttccttccagttttcttggttggttaactaagtcatttgcttttacactgtgggctytatgaatttatttcctttcctagatttcttagcttactttctgtagttttaactctaatcagctaacttctaatgttctgcttcagtaaatatttccctc

SEQ ID NO: 18677 - DNA, 201 bp, Homo sapiens
ttttttttgctgccacatgttgttcaattcattaccagcttgtccttgcttcctaaagcatttctatgccacttcagaggttcaggttccttccagttttyttggttggttaactaagtcatttgcttttacactgtgggctctatgaatttatttcctttcctagatttcttagcttactttctgtagttttaactctaa

SEQ ID NO: 18678 - DNA, 201 bp, Homo sapiens
atctctttttcttttttcttttcttttctttttttttttttttttgctgccacatgttgttcaattcattaccagcttgtccttgcttcctaaagcatttytatgccacttcagaggttcaggttccttccagttttcttggttggttaactaagtcatttgcttttacactgtgggctctatgaatttatttcctttcct

SEQ ID NO: 18679 - DNA, 201 bp, Homo sapiens
atttctagcttcttcctttctaatctaaaaaagctgctctgtaataactttaattacttcagtgacaagacttctaattctgtccaactcatttcttcctmacacatgggaacaaaaccaggtgacttgtacaaaatgaaactatttaagtattcatctataaactgctttcctttttcctttttttttttttttaacaaa

SEQ ID NO: 18680 - DNA, 201 bp, Homo sapiens
ttgtttttctaattttatttagttgtctatctgtgttttcttgcatcttactgagcatctttaagatgattattttgaattttggggggaaatttgtagatctccatttggggtggagattagttactggaacttcattagtttcctttggtggtattatgtttgcctggttcatcattatctgtgtaactttgcattggt

SEQ ID NO: 18681 - DNA, 201 bp, Homo sapiens
ctctggtaaaaaatgctttgttccttaatagttgaaaactcactatttttagtcctttctgaagtcctaactacattccttttttttttttttttttttttgagacggagtctcgctctgtcgcccaggctggagtgcagtggggcgatctcggctcactgcaaacttcgcctcccgggttcacgccattctcctgcctca

SEQ ID NO: 18682 - DNA, 201 bp, Homo sapiens
actctggtaaaaaatgctttgttccttaatagttgaaaactcactatttttagtcctttctgaagtcctaactacattccttttttttttttttttttttttgagacggagtctcgctctgtcgcccaggctggagtgcagtggggcgatctcggctcactgcaaacttcgcctcccgggttcacgccattctcctgcctc

SEQ ID NO: 18683 - DNA, 201 bp, Homo sapiens
tactctggtaaaaaatgctttgttccttaatagttgaaaactcactatttttagtcctttctgaagtcctaactacattccttttttttttttttttttttttgagacggagtctcgctctgtcgcccaggctggagtgcagtggggcgatctcggctcactgcaaacttcgcctcccgggttcacgccattctcctgcct

SEQ ID NO: 18684 - DNA, 201 bp, Homo sapiens
ttactctggtaaaaaatgctttgttccttaatagttgaaaactcactatttttagtcctttctgaagtcctaactacattccttttttttttttttttttttttgagacggagtctcgctctgtcgcccaggctggagtgcagtggggcgatctcggctcactgcaaacttcgcctcccgggttcacgccattctcctgcc

SEQ ID NO: 18685 - DNA, 201 bp, Homo sapiens
cttactctggtaaaaaatgctttgttccttaatagttgaaaactcactatttttagtcctttctgaagtcctaactacattccttttttttttttttttttttttgagacggagtctcgctctgtcgcccaggctggagtgcagtggggcgatctcggctcactgcaaacttcgcctcccgggttcacgccattctcctgc

SEQ ID NO: 18686 - DNA, 201 bp, Homo sapiens
ggactcacgccattctcctgcctcagcctcccgagtagctgggactacaggcgcccgccaccccgcccagctaattttttgtatttttagtagagacgggrtttcaccatgttagccaggatggtctcgatcgcctgacctcgtgatctgcccgcctcggcctccgaaagtgctgggattacaggcgtgagccaccgtgcc

SEQ ID NO: 18687 - DNA, 201 bp, Homo sapiens
tggactcacgccattctcctgcctcagcctcccgagtagctgggactacaggcgcccgccaccccgcccagctaattttttgtatttttagtagagacggggtttcaccatgttagccaggatggtctcgatcgcctgacctcgtgatctgcccgcctcggcctccgaaagtgctgggattacaggcgtgagccaccgtgc

SEQ ID NO: 18688 - DNA, 201 bp, Homo sapiens
actaatggtgggcctcttagcagacaccctacaagccataagagatttggggcctatgttcaacatttcttttcttttcttttcttttctttttttttttcttcttgacagagtctcactctgtcaccaggctggagtgcagtggcatgatctcggctcactgcaacccccacctcccaggttcaaacagttctcctgcct

SEQ ID NO: 18689 - DNA, 201 bp, Homo sapiens
gactaatggtgggcctcttagcagacaccctacaagccataagagatttggggcctatgttcaacatttcttttcttttcttttcttttctttttttttttcttcttgacagagtctcactctgtcaccaggctggagtgcagtggcatgatctcggctcactgcaacccccacctcccaggttcaaacagttctcctgcc

SEQ ID NO: 18690 - DNA, 201 bp, Homo sapiens
atagacctactttttaaaaaaaccctatagctaatactaaatttttttttttttttttttttttttgagacagagtctcgcagtgtcgcccaggctggagkgcagtggcgcaatctcggctcactgcaacctccgcctccctgcaacctccgcctccctgcaacctccgcctcccaggttcaagcaattcccccgcctcag

SEQ ID NO: 18691 - DNA, 201 bp, Homo sapiens
ggattacaggtgtgaggcactgtgcccggcagtatttgattttgtcagaaattcttatcttagatttttgaaatgatctcatgatttttttttttttttttgaaacggagtctagctctgtcacccaggctggagtgcagtggcgccatctgggctcactgcaagctccgcctaccgggttctcaccattctcctgcctca

SEQ ID NO: 18692 - DNA, 201 bp, Homo sapiens
ccaccgaatttgtggcttaattcacaaatgttctccttgccccacgctacctctgcctcatgttggtccttgtgttttcacagtaactcggggaaggaggyggtccacgtcacagttcctgacgccatcaccgagtggaaggcgatgagtttctgcacttcccagtcaagaggcttcgggctttcacccactgttggacta

SEQ ID NO: 18693 - DNA, 201 bp, Homo sapiens
gccagagtgactccatcttggttgttacccacgagtgcctaagtgaaacccaccaaggggctaaaaccacaaaaatgtcatgttaatgacactatgatgakctgggccaaggacacttaggttgatttattccgcctgtgcctaagttaggacagtcccttctgagcaacatcctggcataaggggaagttcttaaccaca

SEQ ID NO: 18694 - DNA, 201 bp, Homo sapiens
ctcacacctcagcccccaagtaggtgggattacaggtgcactccaccacacccggctaatttttgtatttttttgtagagttggggtttcgctatgttgcycaggctagcctcaaactcctgggctcaagcaatcctcccgcctcggcttcccaaactgctgagattataggcgtgcaccaccatgcccagcccagagcca

SEQ ID NO: 18695 - DNA, 201 bp, Homo sapiens
cacctcctgggttcaagtgattctcctgcctcagcctcctgagtagctgggactacaggtgcccgccaccacacccagctaatttttttttttttttttttttgtatatttagtagaggccggggtttcaccgtgttggccaggatggtctccatctcctgacctcgtgatacccctgcctcagcctcccaaagtgctgcg

SEQ ID NO: 18696 - DNA, 201 bp, Homo sapiens
catgatcacagctcactgcacattcatctgcccaagcccaagtgagcctcacacctcagcccccaagtaggtgggattacaggtgcactccaccacacccrgctaatttttgtatttttttgtagagttggggtttcgctatgttgcccaggctagcctcaaactcctgggctcaagcaatcctcccgcctcggcttccca

SEQ ID NO: 18697 - DNA, 201 bp, Homo sapiens
tggaaccaacctaagtgcccatcaaccaacgactggataaagaaaatgtggtatatatgcaccttggaatactactcaaccataaaaaggaatgaaataayggcatttgcagcaactggatggagtgggaggccctaagtgaagtaacttaggaatggaaaaccaaatattgtgtgttctcacttacaaatgggagctaag

SEQ ID NO: 18698 - DNA, 201 bp, Homo sapiens
tgtaatcccagctactggggaagctgaggcaggagaatcgcttgaacccgggaggcagaggttgcagtgagccaagatcacgccactgcactccagcctgsggacagagtgagactgtcaaaaacaaaaacaaaaacaaacaaaaaaaaaccacttaaatctaagacctgaaagcacaaaaatgctagaagaggccaggca

SEQ ID NO: 18699 - DNA, 201 bp, Homo sapiens
ctgtaatcccagctactggggaagctgaggcaggagaatcgcttgaacccgggaggcagaggttgcagtgagccaagatcacgccactgcactccagcctkgggacagagtgagactgtcaaaaacaaaaacaaaaacaaacaaaaaaaaaccacttaaatctaagacctgaaagcacaaaaatgctagaagaggccaggc

SEQ ID NO: 18700 - DNA, 201 bp, Homo sapiens
acatagttttggattttctgtataacatctgatactcagttttgtgttttcctctctgcttatactcctaatatttttttctttataccagctaggatctccagtaaaatgattaatggagggatagtggcatcttccatgttactatttaattgttttagctaccatttatcaaaagaagtttccatctttataattttt

SEQ ID NO: 18701 - DNA, 201 bp, Homo sapiens
tacatagttttggattttctgtataacatctgatactcagttttgtgttttcctctctgcttatactcctaatatttttttctttataccagctaggatctccagtaaaatgattaatggagggatagtggcatcttccatgttactatttaattgttttagctaccatttatcaaaagaagtttccatctttataatttt

SEQ ID NO: 18702 - DNA, 201 bp, Homo sapiens
aggttgcagtgagccaagatcgcaccattgcactctagcctgggggacgagagcaagacttcatctcaaaaaacaaacaaacaaacaaacaaacaaacaamccaaaaaccttttaaattaaactgtaaaaacggcagcccacttgggctcccctctccactatagatagctttcttctttcatttattaaactttcactcc

SEQ ID NO: 18703 - DNA, 201 bp, Homo sapiens
tctcaaaaaaaaaaaaaaaaaaagaatatcataaggtaatatcataaaagacctaggaaatgtattcagttgttttatttcatttaaccggtatttcaggkgtatctctctatgagatcatgtactttttagagacaaaagatacagtcactggctcaaagagcttgtagtcccaatagggactcctagcaatttgtgtaa

SEQ ID NO: 18704 - DNA, 201 bp, Homo sapiens
acacctgtaatcccaacactttaggaggccaagtcacgaggatcacttgagtttgaaaccagcttgggcaacatagtgagacctcgtctctacaaaaaaamaatttaaaaaatgaggcgagaggatgacttgagtccaggaggttgaggctccaatgagccatgattgtgccactggactcctgcctgggtgacatagcaa

SEQ ID NO: 18705 - DNA, 201 bp, Homo sapiens
ggctagaggaggaaagttaaatctcttctaaggaaggtgtgatgtgcgaatacaaactcttaacttctgctgccacttaataactctgagggaagccaccwgaagagaagtcaacagtgcataaaggttgcgcctaaacagctgcagtgaaatgaagctggagccacgttcaaattacaccctgaacacatgcccccaaaa

SEQ ID NO: 18706 - DNA, 201 bp, Homo sapiens
agactaatggtgggcctcttagcagacaccctacaagccataagagatttggggcctatgttcaacatttcttttcttttcttttcttttctttttttttttcttcttgacagagtctcactctgtcaccaggctggagtgcagtggcatgatctcggctcactgcaacccccacctcccaggttcaaacagttctcctgc

SEQ ID NO: 18707 - DNA, 201 bp, Homo sapiens
tcagactaatggtgggcctcttagcagacaccctacaagccataagagatttggggcctatgttcaacatttcttttcttttcttttcttttctttttttytttcttcttgacagagtctcactctgtcaccaggctggagtgcagtggcatgatctcggctcactgcaacccccacctcccaggttcaaacagttctcct

SEQ ID NO: 18708 - DNA, 201 bp, Homo sapiens
gatgagaaagaaccagcacaagaactctgacaactcaaagagccagagcatcttctttcctccaaacaatcacaccagttctccagcaagggttcttaatwgggctgagatggctgaaatgacagaaatagaattcagactatggataggaatgaaggtcattgagattcaggagaatgttgaaacctaatctaaggaagc

SEQ ID NO: 18709 - DNA, 201 bp, Homo sapiens
agccaatgtgcccggccaaaatttacttttttaaaatgattatattaaagcctgagattggtggcactcaattaaaaattgttataactctacgtagaatrtggaatttttccaacttcatgcaaatttgactttagcttaacattacttattttatatcactatgtgtttatactgcaaagctcttaagtttgggaagaa

SEQ ID NO: 18710 - DNA, 201 bp, Homo sapiens
ttcatgtccaaaacaccaaaagcaatggcaacaaaagacaaaattgacaaatgggatctaattaaactaaagagcttctgcacagcaaaagaaactaccawcagagtgaacaggcaacctacaaaatgggagaaaattttcgcaacctactcatctgacaaagggctaatagaggcttcttgatctgagcctctggaatgg

SEQ ID NO: 18711 - DNA, 201 bp, Homo sapiens
attcaggacataggcatgggtaaggacttcatgtccaaaacaccaaaagcaatggcaacaaaagacaaaattgacaaatgggatctaattaaactaaagarcttctgcacagcaaaagaaactaccatcagagtgaacaggcaacctacaaaatgggagaaaattttcgcaacctactcatctgacaaagggctaatagag

SEQ ID NO: 18712 - DNA, 201 bp, Homo sapiens
agttcatatggaaccaaaaaagagcccgcatcgccaaggcaatcctaagccaaaagaacaaagctggaggcatcacactacctgacttcaaactatactayaaggctacagtaaccaaaagagcatggtactggtaccaaaacagagatatagatcaatggaacagaacagagccctcagaaataactctgcatatctaca

SEQ ID NO: 18713 - DNA, 201 bp, Homo sapiens
caagaggccaagcatatgtataaagttctgattatccctcaggtatctgtagtagacttcaaacagtatttaacctctactgtccatactctcttaatcasgacaaggttgttagttaaaaagaaggttgtgcttctagattggggggtggagtgccaaaagtgtagcccatcacataaaaataatattgattacatcaat

SEQ ID NO: 18714 - DNA, 201 bp, Homo sapiens
gtaatttacagattcaatgccatccccatcaagctaccaatgactttcttcacagaattggaaaaaactactttaaagttcatatggaaccaaaaaagagyccgcatcgccaaggcaatcctaagccaaaagaacaaagctggaggcatcacactacctgacttcaaactatactataaggctacagtaaccaaaagagca

SEQ ID NO: 18715 - DNA, 201 bp, Homo sapiens
attgtcacagtatctcagtgcttgtgttcaagtcacccttattttacttcatcatggccccaatgcaccagagtattgatgctggcaattgggaggtgaargagaagccgtaaagtgcttcctttaggtgaaaaggtgaaagttccccacttgataaggaaagaaaaaataatgtatgctgaggttgccaagatctacggt

SEQ ID NO: 18716 - DNA, 201 bp, Homo sapiens
atacttactggaagccagttccctctacttttttatttaaaacaagcttacatttcttattttaatatttatgtatgtatgtatgtatgtatttatttatktatttatttatttatttatttatttgagacaggatattattctgtcacccagactgcagtgtagtggcacaatcacagctcaccacagcctggacttccc

SEQ ID NO: 18717 - DNA, 201 bp, Homo sapiens
agttcctgccctcagcgggttgacacacttgtgggggagaaaggcaacaaaagcttaagcaagtaaatgcataattttacagggtgatatgtgctaaaaastaaataaagcaaggtggaggaataacaagactggcgggggtgctggctggggtggctatttgagaaatgagggccaggcatggcctttcagaggagatga

SEQ ID NO: 18718 - DNA, 201 bp, Homo sapiens
taggatgcatgaaaacaacattaaccttcttgtacatctccatcagagctcttgggtgaccaggaacattgtccatgagtagtaatattttgaaaggaagstttttttttggagcagtaggtctcaacagtgggattaaaatattcggtcaattggccaggtgtggtggttcatgcctgtaatcccagcacttaggaggct

SEQ ID NO: 18719 - DNA, 201 bp, Homo sapiens
ataagtgagaacatacaatatttcgttttccattcctaaattacttcacttagaataatggcctcccactccatccaagttgctgcaaatgccattatttygttcccttttatggttgagtagtattccatggtgcatatataccacattttctttatccagtcattgattgatgggcacttaggttggttccatatcttt

SEQ ID NO: 18720 - DNA, 201 bp, Homo sapiens
actgccataaagtgaatattgtgataaagcaagtcacacaaattttttggtttcccagtgcatgtaaaagttatgcttacactatactgtaacctactagrtatgcaataacattatgtcataaatgtgcaacataaatacactaattataaaatactttattgctgaaaaaatgctaacaatcatctgagccttaattga

SEQ ID NO: 18721 - DNA, 201 bp, Homo sapiens
gttgtggtgagccaagatggcgccattacactccagcctgggcaacaagaatgaaacagtgtcccccactcaaaaaaaaaaaaaaaaagatcagcaacaasataaaaccaccaagggctagagggacaaattgaggagccggtgtgaccagaggctagaagctgggtgggaagggctgtcctgcctggtgggagctgggtc

SEQ ID NO: 18722 - DNA, 201 bp, Homo sapiens
ttataatcaagcttgttaccccaaaaaatcaaaaaatccactgggattgtattgactcttaattactttttctttctttctttttttttttttttttttttgagacaagagctcattctgctgcccaggctggagtgcaaatggtgcaatctcagctcactgcaacctccacctcccaggctcaagtaatcctcccacctc

SEQ ID NO: 18723 - DNA, 201 bp, Homo sapiens
gcatgatcacagctcactgcacattcatctgcccaagcccaagtgagcctcacacctcagcccccaagtaggtgggattacaggtgcactccaccacaccyggctaatttttgtatttttttgtagagttggggtttcgctatgttgcccaggctagcctcaaactcctgggctcaagcaatcctcccgcctcggcttccc

SEQ ID NO: 18724 - DNA, 201 bp, Homo sapiens
gcacatgcctgtagtcccagctacttcggatgctgaggcaggagaatctcttgaacccgggaggtggaggttgcagtaagtggagatcgtgccactgcatyccaacctgggtgacacagtgagactctgtctcaaataaataaataaataataacatcttcactgagatacaggtatacttcagagataagcccatatatc

SEQ ID NO: 18725 - DNA, 201 bp, Homo sapiens
tttccatggaaagtttataatcaagcttgttaccccaaaaaatcaaaaaatccactgggattgtattgactcttaattactttttctttctttcttttttyttttttttttttttgagacaagagctcattctgctgcccaggctggagtgcaaatggtgcaatctcagctcactgcaacctccacctcccaggctcaagt

SEQ ID NO: 18726 - DNA, 201 bp, Homo sapiens
ccccctagcaggttcttgatagttgctgacaatggagctagctggggattctttcctccgatggtcattatgcattatagacaaggttcctgtgttctcawtatgcccccaaggaacatgcttcagcaaacgtgaaaaatgccagagccatacattttttttttttttttttgagacagggtctccctctgtcacccagcc

SEQ ID NO: 18727 - DNA, 201 bp, Homo sapiens
gcatttccatggaaagtttataatcaagcttgttaccccaaaaaatcaaaaaatccactgggattgtattgactcttaattactttttctttctttctttytttttttttttttttttgagacaagagctcattctgctgcccaggctggagtgcaaatggtgcaatctcagctcactgcaacctccacctcccaggctca

SEQ ID NO: 18728 - DNA, 201 bp, Homo sapiens
tgcatgtgtaaataggataaattcttgaaagattgctctgcaaatctgatcatttgtttctcatctcttttttttatattttattttattttatttatttattttttttttgagacagatcttgctctgtcacccaggatggagtgcagtggttgttcgctgcaacctccacttcctgagttcaagcgattcttgtgcctc

SEQ ID NO: 18729 - DNA, 201 bp, Homo sapiens
aggagtaagctagttgacctggtaacaaaacacatgacctcaataataaacaggaactcctaaagacaataagaggtaagatcttaggaaaaaaaaaaaaagttttcctcattcttgacctgtgaaacaatttcctggcttatattagaaacaatcattttgccagttcttgttttgtttcattttggcagggtctggtgc

SEQ ID NO: 18730 - DNA, 201 bp, Homo sapiens
caggagtaagctagttgacctggtaacaaaacacatgacctcaataataaacaggaactcctaaagacaataagaggtaagatcttaggaaaaaaaaaaaaagttttcctcattcttgacctgtgaaacaatttcctggcttatattagaaacaatcattttgccagttcttgttttgtttcattttggcagggtctggtg

SEQ ID NO: 18731 - DNA, 201 bp, Homo sapiens
agagtcggagagcatcttccccttaggccttctctctctctttctttctcacttgtaagaaaagtagtttgaactgtacaatctttaaagttctttccaastctgatttggctacctatttcttcctaccagacggtgttgagatacaatattctccctcccacaaatatgaagacctttagtcttagtgtggaaatagga

SEQ ID NO: 18732 - DNA, 201 bp, Homo sapiens
agtgctgtgattacaggtatgagccactacacaaagccaggataacttatttttgcttcttacctaaatattcagaaataggggaaggttggtaataccaktttataaataaaatgtttaaatcttttataacaataagagcaacaggctgtatcatatagtcaaggtttgtagtaggctatgctacctagttttatataa

SEQ ID NO: 18733 - DNA, 201 bp, Homo sapiens
ttcaccttcaccaataaacatcttacttttcatacatcaaatagcctttttttaaaaaaagtgggccaaagatctggcttttgatattcagaccctcataractataaaattttaggtcaacaacgatttggcttgtacgactagtatgtcctgcagattttcctagtgaaaggtacttataagccttctggaatccaaca

SEQ ID NO: 18734 - DNA, 201 bp, Homo sapiens
tttcatacttactggaagccagttccctctacttttttatttaaaacaagcttacatttcttattttaatatttatgtatgtatgtatgtatgtatttatktatgtatttatttatttatttatttatttgagacaggatattattctgtcacccagactgcagtgtagtggcacaatcacagctcaccacagcctggact

SEQ ID NO: 18735 - DNA, 201 bp, Homo sapiens
gccctcctagtctctcacacctacatttcagtagacaaggacaccagcctctgtaatgactacaccgctctctcattcccctaacttctctgtgcccagaygacttaaccaggcttggttccatactccccttagtgtaaggtaatagcccttgccataggcattctcaacaggtacgtgataacataaacacctgtgaga

SEQ ID NO: 18736 - DNA, 201 bp, Homo sapiens
accgtgttatccaggatggtctcgatctcctcacctcgtgatccgcccgcctcagcctcccaaagtgctgggattacaggcgtgagccaccacgcccagcygaagcactgctattttcacagctaattcaggttatttcatattattctactctatgaacagatgagtatacgtatttattaagcagtgttgatctcatta

SEQ ID NO: 18737 - DNA, 201 bp, Homo sapiens
ataatttcatacttactggaagccagttccctctacttttttatttaaaacaagcttacatttcttattttaatatttatgtatgtatgtatgtatgtatktatttatgtatttatttatttatttatttatttgagacaggatattattctgtcacccagactgcagtgtagtggcacaatcacagctcaccacagcctg

SEQ ID NO: 18738 - DNA, 201 bp, Homo sapiens
gagcaggttttgtaaaaaagtaaaacctgttggggttttgctgactcagcgcatgtgtgaggaaggaggagggatagaggaaagattctgagcaggaggcsgagcgcggtggctcacgcctataatcccagcactttgggaggccaaggcaggtggatcacctgaggtcaggagttcatagaccagcctggccaacatggt

SEQ ID NO: 18739 - DNA, 201 bp, Homo sapiens
tccacaagaatcctttaagaagtagtctctgcagagattaggggagactaaagagacataactaaatgcaatgtggtatcctggattggacagtggaacasaaaaagggtattagtggaaaaattcacgaaatccaaatgaagcctggagtttagttaatagtattattccaatgttaatttcttagttttgatgaatgta

SEQ ID NO: 18740 - DNA, 201 bp, Homo sapiens
ggtactgataaagaacagacacatagaccaatggtacagaatagagaactcagagataaaaccgcaaacctacaaccatctgatctttgacaaacttgacraaaacaagcaatggaggaaaggcctccctatttagtaaatggtgctgggaatgctggctagccttatgcagaaaattgaaactggaccccttcctttcac

SEQ ID NO: 18741 - DNA, 201 bp, Homo sapiens
tatattatacaataaaaacatactgtcaaaaatgtgcctagtgatggctctggcacagatcccaaggtggcaatggcctctgctgcctcagcccctgccaygctgtccaccagcatcactgtggagaataaggtcagcccctcaagggcaacagaggggtctaggtctggacctgtggctggcggcacaggagccatggtg

SEQ ID NO: 18742 - DNA, 201 bp, Homo sapiens
aattcatttcttgtttcttccaagttctggttgctatgcgcattctttggcttacagctgcatcactccaaactctgcctgtcttcacatcacttcctccwgcgtgtgtcaaacttccctttgcctctctctagaagggtgcatgtgatagcatttagagccaaccaggataatctccgcatctcaagatcctgaatcaca

SEQ ID NO: 18743 - DNA, 201 bp, Homo sapiens
aatcaggcaagagaaataaataaagtgtattcgaataggaagagagaaagtcaaattatctttatttgattttatatctagaaaaccccattatctcagtycaaaagattcttaagctgataagcaacttcagcaaaatctcaggatacaaaatcaatgtgcaaaaatcacaggcatttctatacaccaacaacaggcaag

SEQ ID NO: 18744 - DNA, 201 bp, Homo sapiens
ggcatgcaccaccacgcctgggtaactctgtatttttagtagagatgaggtttctccatgttggtcaggctggtctcgaactcacaacctcaggtgatccrcccacctcggcctcccaaagtgctgggattacaggcgtgatacactgtgcccggccttatttttaatttttttgtagagacggggtttcaccatgttacc

SEQ ID NO: 18745 - DNA, 201 bp, Homo sapiens
ttggagacatgaaggtcttcagccagaccttacagagaattacttcacttactcaggtaacgtttatggagccatttcactgtgctgtgtactggaaatawaatagaaaataaaaaaatacaccaggggacaaaaaataacaaatgcctgctctcatggaatttccagtttggggagaagactgacattaatcaaaggaat

SEQ ID NO: 18746 - DNA, 201 bp, Homo sapiens
ctggccagggcaatcaggcaagagaaataaataaagtgtattcgaataggaagagagaaagtcaaattatctttatttgattttatatctagaaaaccccrttatctcagtccaaaagattcttaagctgataagcaacttcagcaaaatctcaggatacaaaatcaatgtgcaaaaatcacaggcatttctatacaccaa

SEQ ID NO: 18747 - DNA, 201 bp, Homo sapiens
caggctcatggaaacctgtggtttgggaagagggacaatgagagggtggggaattaggaacctttaattcctgggtggccactcatgggatggagcagtasctgtgctgagaccatttactgaaggtaaaagtaactaatggaatttagagatgaatccacctcccagggagtgggattcactggatatataaggaaatgc

SEQ ID NO: 18748 - DNA, 201 bp, Homo sapiens
gactgggggatagggggagtaggtaagaagcattccaaaatcaaaataagcccaatgtgtctggagggcaaagatacaggaagagaggggaggtttaagamaagagggtgggcagggcttgctaacatatttaggctcatagacctcaatataacagcaatggaaaaatcactgaggtggctttaagtggtgtagaagaga

SEQ ID NO: 18749 - DNA, 201 bp, Homo sapiens
aggtgggaggatcacttaagcctgggaggtcaaggctacaataagctgtgattaaggcacctgggcaacagagcaagaccctgcttctaccaaaaaaaaaatatatattaaatttgtagaagtctgggcacagtggctcacacctgtaatcccagcactttgggggctgaggcagaaggattgccttcacgagtttgagac

SEQ ID NO: 18750 - DNA, 201 bp, Homo sapiens
cttgctttcattgtttgggctattatgaatagtgctgctctgcacctgttgtacatatagcctggtgaacatgtttgcgaatttctatgagcgtgatcacrgtggtgtagaattgccaatcttcaacctgcctgtattttccaaagcgatcataccaatttatttaccttccagcagtgtatgagaattctctattctcac

SEQ ID NO: 18751 - DNA, 201 bp, Homo sapiens
caccaagaagcaactctgttgataccgactgagattcagatgcctgaacctgaccttctacacacgtggccctagtggatcattccagcctcagtttccaygtctccccaaatgcctgctaaatgtgtcagccaaacctgactacttcccattctgcacacataccttctccaccttggtggccgaatcctttggagccca

SEQ ID NO: 18752 - DNA, 201 bp, Homo sapiens
acatcccttcataataaaaaccttaaaaaaacttggtatagaagaaacatatcttaatataattacaccatatatgacagactctcagctagtatcatacygatgaggaaaaaaaaaaacctttcctctgagatctggaatacaacaaggatatccactttcaccactgttattcaacacggtactagaagtcctagctag

SEQ ID NO: 18753 - DNA, 201 bp, Homo sapiens
agtatcccattgtatgattgtaccacagtttatccattttttagttgatgggttttgacttgctttcattgtttgggctattatgaatagtgctgctctgyacctgttgtacatatagcctggtgaacatgtttgcgaatttctatgagcgtgatcacagtggtgtagaattgccaatcttcaacctgcctgtattttcca

SEQ ID NO: 18754 - DNA, 201 bp, Homo sapiens
  misc_feature (1)...(201): n = A,T,C or G, or insertion/deletion polymorphism (see Tables 1-2)
agatatttatagcaatgcgagaatggactaatacagtgacctttcagacagagaattcaaatagctgttttgagaaaactcaacaaaattcaagataacanggagaaggagttcagaattctatcagaaaaatttaacaaagagatttaaataattaaaaaagaactacgcagaaattctggagttgaaatatgcaactga

SEQ ID NO: 18755 - DNA, 201 bp, Homo sapiens
tctctgcctggtaatccagagaattcatccaggtcttatccgaaactaccaaggtggtaactctacaaatccgcaagaaccacaggttactgggcttgggrtgccccctaaggcagacacggcttagatctcaatacccaagttcaaatacctggaaagccttcctaagaagagtgggtaaaaaaaaagtctagactgcaa

SEQ ID NO: 18756 - DNA, 201 bp, Homo sapiens
tcacacataatttagtttttgtctgctttttgaactttacatgaatggaataatattgcatatattatttaatgctttttctttcatttaacatttttttktgtgtgtgtgtgagattctccaggttgttgtacacagtgctagttatttcattttgttatggtatagtatcccattgtatgattgtaccacagtttatcc

SEQ ID NO: 18757 - DNA, 201 bp, Homo sapiens
gtgccgggtggcccacagctggaaggcagctcgggctgaatggaggctgatatttccttgaggccccatggaggctgatatttccttgaggcccctccgcttcaggtgtgctctgttctgggaatgaggtgctgtgcgacttttcctggtgatctgatcagatttgccccgctccacggtgaaactgctgtctagccttct

SEQ ID NO: 18758 - DNA, 201 bp, Homo sapiens
tatcacacataatttagtttttgtctgctttttgaactttacatgaatggaataatattgcatatattatttaatgctttttctttcatttaacatttttktttgtgtgtgtgtgagattctccaggttgttgtacacagtgctagttatttcattttgttatggtatagtatcccattgtatgattgtaccacagtttat

SEQ ID NO: 18759 - DNA, 201 bp, Homo sapiens
aggtgccgggtggcccacagctggaaggcagctcgggctgaatggaggctgatatttccttgaggccccatggaggctgatatttccttgaggcccctccgcttcaggtgtgctctgttctgggaatgaggtgctgtgcgacttttcctggtgatctgatcagatttgccccgctccacggtgaaactgctgtctagcctt

SEQ ID NO: 18760 - DNA, 201 bp, Homo sapiens
catcccaaagctgcagagtacacattctttttcctcagcacatggatcattctcaaggatggaccatatgttatgtcacaaaacaagtcttaaaacatttwaaaaaactgaaataatataaagcatcttctctgaccacaatagaataaaactagagatcaataataagtggaattattgaaaattttcttgaaataaatg

SEQ ID NO: 18761 - DNA, 201 bp, Homo sapiens
ctctgtctgaggtgccgggtggcccacagctggaaggcagctcgggctgaatggaggctgatatttccttgaggccccatggaggctgatatttccttgaggcccctccgcttcaggtgtgctctgttctgggaatgaggtgctgtgcgacttttcctggtgatctgatcagatttgccccgctccacggtgaaactgctg

SEQ ID NO: 18762 - DNA, 201 bp, Homo sapiens
ctgtttagaaagaaaaaaaatcactccaatagtattgaaaagtccaaagatgaaatagtttcattttcttttcctaaggcttataaaaggccccctgcctrttgattccatccctcttttgtgtccagtggagccatgttactcttcagtggcccaggggttcactattaaagaaagatcagtccaggtttctgggcacat

SEQ ID NO: 18763 - DNA, 201 bp, Homo sapiens
cttcagtctcctgccagcactttccattggctgattctaaataaaagccagttagcaaaggggcttaggaactgtagtttgcagggctcagcctctgtggracagagcagagcagaagggtagggaatgggttggaaagcaaacaggaaatgactgatgtaaagaatattgtgttttacattttgaaatactatgcagcca

SEQ ID NO: 18764 - DNA, 201 bp, Homo sapiens
aaacacaacatacgaaaagctatgggatacaacaaaagcagtactgagaggcaagtttatagctataagtgcctacatcaaaaaagaaaaaaacctcaaayaaacaactatttaatgatgtatattaaagaactagaaaagcaagagcaaaccaaaccccaaattagtagaagaaataataaaaatcaggccaggcgcagt

SEQ ID NO: 18765 - DNA, 201 bp, Homo sapiens
tcaaaaaaaaaaaaaatgggaaaaaaaaaagcaacaattcagtcacacttctaatatgaaacatttcctccaatgtcaggtaataatatataagaatatcmccctgggtgcaatggctgatgcctggaatcccagcactttgggaggccgaggtgggcggattgcgaggtcaggagttcgagatcagtctggccaacatag

SEQ ID NO: 18766 - DNA, 201 bp, Homo sapiens
gtattttcttgtggtcctttttttggttattgatgaaacacatagaggatttgaaacaaatttacttgaagtgcaactatttaaagtggcccttccttccygattcctacactcctcactgctctctagagcatggtgagagcacgatcagcagcctccctggagagccttccctgaccgcatgtggagactgatggactc

SEQ ID NO: 18767 - DNA, 201 bp, Homo sapiens
tttaaatttttaaatgtaattaattgatactacaactagtcagtgaaagtttgataaggagcatcttatcataacacaattaattaccactaattaattamaaaagaaaaatagtaatgtgacagtgaaaacagttaatcaaagttaataccaccaataatggggcaagctgacatcattttctcctgctgtactgcaatg

SEQ ID NO: 18768 - DNA, 201 bp, Homo sapiens
cacccggcccttctttaaatttttaaatgtaattaattgatactacaactagtcagtgaaagtttgataaggagcatcttatcataacacaattaattacyactaattaattacaaaagaaaaatagtaatgtgacagtgaaaacagttaatcaaagttaataccaccaataatggggcaagctgacatcattttctcctg

SEQ ID NO: 18769 - DNA, 201 bp, Homo sapiens
ttaccgtctgctttttttttttttttgagatggaatttcgctctttttgcccaggctggagtgcagtggtgcagtctcagctcactgcaacctccgcctcctgggttcaagtgattctcatgcctcagcctcctgaatagctgagattacagatatgcaccaccacgcccagctaatgtttgtatttttagtagacatggg

SEQ ID NO: 18770 - DNA, 201 bp, Homo sapiens
atgcatgtcttttgtttttatgattattgaaaaatggttttcagaatacaaaatgagaatcaaaaattggtaattagatattctgtgtttctcaaatggayggactttataattgggtggagttatgttaaaagctagaaaaactgaagaagttaagaaagaattgaaaattcccattaagagaaaaaagaaaaagctgca

SEQ ID NO: 18771 - DNA, 201 bp, Homo sapiens
agtcggagagcatcttccccttaggccttctctctctctttctttctcacttgtaagaaaagtagtttgaactgtacaatctttaaagttctttccaagtytgatttggctacctatttcttcctaccagacggtgttgagatacaatattctccctcccacaaatatgaagacctttagtcttagtgtggaaataggaaa

SEQ ID NO: 18772 - DNA, 201 bp, Homo sapiens
agatggtgcctacaatgatttcacaattctagccggtactatgaggttcataaaaacatggtccacaaattcaggaaccatgtgtgtttgtgtttaactgytgtattcctggcattttgcatggtacatggtatggcaatgatcctcaaaaaatatttactgatttgaagattctttaagtcagaatgatttgtatcttct

SEQ ID NO: 18773 - DNA, 201 bp, Homo sapiens
cttgagcccaggagtttaaggctccagctgaccatgattgcaccactgccctccagcctggacaacagaatgagaccctgtctcaaaaaaaaaaaagaaaraaaaagttatgtaactttctccctcatttccttagaatatgctatttgctctgcctgataagctccctgccaccacatatttagttaatgactacctgct

SEQ ID NO: 18774 - DNA, 201 bp, Homo sapiens
ttttgtaacttcatggaagcacaaattctttttaaaagtattttttatattaaagtatcagtgatggaggctggcagagatcttggggcgagaatttattytctcagagaaatggtagtgatggaccatggaaacttgtctatggtaatctgtgttagaatatattcttgaaagttctaagaatacattatatccacaagt

SEQ ID NO: 18775 - DNA, 201 bp, Homo sapiens
ttgttttttctgtttttaatttctttaacgatattttcactgtattttttgtaacttcatggaagcacaaattctttttaaaagtattttttatattaaastatcagtgatggaggctggcagagatcttggggcgagaatttattttctcagagaaatggtagtgatggaccatggaaacttgtctatggtaatctgtgt

SEQ ID NO: 18776 - DNA, 201 bp, Homo sapiens
caccgcacctggccccctagcaggttcttgatagttgctgacaatggagctagctggggattctttcctccgatggtcattatgcattatagacaaggttyctgtgttctcattatgcccccaaggaacatgcttcagcaaacgtgaaaaatgccagagccatacattttttttttttttttttgagacagggtctccctc

SEQ ID NO: 18777 - DNA, 201 bp, Homo sapiens
tgagtaactttaggacaattggacttaaaatatgaactatgtggcgtacacaagcttcactttggggagtcaaaagacaatttcaaagagataggaagagytgttcacttaaggttaggatgctgcagatagagcaaatgatgacttcacatatgaactgcaagtctaaagtaatatagtgggggtactctgaattgcagt

SEQ ID NO: 18778 - DNA, 201 bp, Homo sapiens
tctgtggttggcatagatagaaaaggaaacagaagtggtcaggactttttcccatctataagtttacattaggacttctcttttttttttttttttgagayggagtctcactctttcgcccaagctggactgcagtggcgctatcccggctcactgcaagctccgcctcttgggttcatgccattctcctgcctcagcctc

SEQ ID NO: 18779 - DNA, 201 bp, Homo sapiens
ctgcttgtctttgtcaattattgatatttacctagaggatgttcactaaatttgatgagtaactttaggacaattggacttaaaatatgaactatgtggcrtacacaagcttcactttggggagtcaaaagacaatttcaaagagataggaagagttgttcacttaaggttaggatgctgcagatagagcaaatgatgact

SEQ ID NO: 18780 - DNA, 201 bp, Homo sapiens
ctatgtctgtggttggcatagatagaaaaggaaacagaagtggtcaggactttttcccatctataagtttacattaggacttctcttttttttttttttttgagacggagtctcactctttcgcccaagctggactgcagtggcgctatcccggctcactgcaagctccgcctcttgggttcatgccattctcctgcctca

SEQ ID NO: 18781 - DNA, 201 bp, Homo sapiens
gctatgtctgtggttggcatagatagaaaaggaaacagaagtggtcaggactttttcccatctataagtttacattaggacttctcttttttttttttttttgagacggagtctcactctttcgcccaagctggactgcagtggcgctatcccggctcactgcaagctccgcctcttgggttcatgccattctcctgcctc

SEQ ID NO: 18782 - DNA, 201 bp, Homo sapiens
ttaaactcaggaggtggaggttgcagtgagccaagatcacgccactgcactctagcctggtgacagagcgagacttcgtctcaaaaaaaaaaaaaaaaaaagaagtgatacttcgaatacagtttttacctcaacacagtgttgtcttaatatggtttgtacccgcctgccacacactgatgtgtcatgtatacttggggg

SEQ ID NO: 18783 - DNA, 201 bp, Homo sapiens
cctctgtctgaggtgccgggtggcccacagctggaaggcagctcgggctgaatggaggctgatatttccttgaggccccatggaggctgatatttccttgaggcccctccgcttcaggtgtgctctgttctgggaatgaggtgctgtgcgacttttcctggtgatctgatcagatttgccccgctccacggtgaaactgct

SEQ ID NO: 18784 - DNA, 201 bp, Homo sapiens
ccctctgtctgaggtgccgggtggcccacagctggaaggcagctcgggctgaatggaggctgatatttccttgaggccccatggaggctgatatttccttgaggcccctccgcttcaggtgtgctctgttctgggaatgaggtgctgtgcgacttttcctggtgatctgatcagatttgccccgctccacggtgaaactgc

SEQ ID NO: 18785 - DNA, 201 bp, Homo sapiens
gcaaaaatcctcaacaaaatactagcaaaccaaattcaacaacacattaaaaagatcattcatcatgactaaataggatttatcccagggatgcaaggatrgttcaacatatgcaaatcaatcaatctgatatatcatcatatcaacaaaatgaagaacaaaaaccatatgatcatttcaatggatgcttaaaaagcactt

SEQ ID NO: 18786 - DNA, 201 bp, Homo sapiens
tcaacaaaatactagcaaaccaaattcaacaacacattaaaaagatcattcatcatgactaaataggatttatcccagggatgcaaggatagttcaacatrtgcaaatcaatcaatctgatatatcatcatatcaacaaaatgaagaacaaaaaccatatgatcatttcaatggatgcttaaaaagcacttgataacattc

SEQ ID NO: 18787 - DNA, 201 bp, Homo sapiens
tataataatagctggtaacttcaacatcccattttcagcgttggacagatcttccagagagaaaatcaatgaacatcagacttaatctgtaccaaatggamctaatcagaccaaatggacctaatagatacatacataacatttcatcccaaagctgcagagtacacattctttttcctcagcacatggatcattctcaag

SEQ ID NO: 18788 - DNA, 201 bp, Homo sapiens
tccctctgtctgaggtgccgggtggcccacagctggaaggcagctcgggctgaatggaggctgatatttccttgaggccccatggaggctgatatttccttgaggcccctccgcttcaggtgtgctctgttctgggaatgaggtgctgtgcgacttttcctggtgatctgatcagatttgccccgctccacggtgaaactg

SEQ ID NO: 18789 - DNA, 201 bp, Homo sapiens
taaagtattcaaaaaggtacaagttctaatctaacagttctatttgtgatttttgaggaagcatatgcgtatttccacttaagcatctgaaatattgcctmtagtgctgaacaaattcttcccttggttattttcctcttatctcagtccctggaaaaataaatgcctgtactaattctctatatacataaatggtctctt

SEQ ID NO: 18790 - DNA, 201 bp, Homo sapiens
ctccctctgtctgaggtgccgggtggcccacagctggaaggcagctcgggctgaatggaggctgatatttccttgaggccccatggaggctgatatttccttgaggcccctccgcttcaggtgtgctctgttctgggaatgaggtgctgtgcgacttttcctggtgatctgatcagatttgccccgctccacggtgaaact

SEQ ID NO: 18791 - DNA, 201 bp, Homo sapiens
aataagtgaaaagtccctacaatgaaaactaaaacactggagcaagaaattgaaaaggacacaaaaaactggaaagacattccatattcatgggttggaaractcaatattgttaaaatgcccattctccccaaagcaatctacagatttcatgcaatccctataaaaataccaataatgttcttcacaaaagtagaaaaa

SEQ ID NO: 18792 - DNA, 201 bp, Homo sapiens
gctcaggtgcaatgcaaataatgaggtgactctatccctgccatctcaggctaatcccctctcccctgaggagctgagactcagctccctggaggtgaaargctaaagcattcccctgttgtgccattttcttccctttctctcatgcattatttttcttactgtggttattcttgatgggaatttttagcagagctcagt

SEQ ID NO: 18793 - DNA, 201 bp, Homo sapiens
tttattacctgacttcaaattatactacagttagagtaaccaaaacaggatgatactggcataaaaacagacacattagaccagtgaaacagtctaataargaatgcagaaataaatccacacatttacagtgaactcactttagacaaaggtgccgagaacatacaatggagaaaggacagtctcttcagtcaatggtgc

SEQ ID NO: 18794 - DNA, 201 bp, Homo sapiens
ccttcaaggttctacccaatgataacttcctttataaagtgttccctggctcacccaggggtaatcaattgcttaggcttttgcgtgtgaacttctgcttktgttaccataaattatctgtatgtctagcatccttgctcattttaccatgttatatcattaaatcctcataattatcatgtaatcttaagtattaggatt

SEQ ID NO: 18795 - DNA, 201 bp, Homo sapiens
atcacagtgtgcacccaagaaagtcaattagctgttactgagagtttggagactttttctttttagcttagacatctctttttcttttttcttttcttttytttttttttttttttttgctgccacatgttgttcaattcattaccagcttgtccttgcttcctaaagcatttctatgccacttcagaggttcaggttcct

SEQ ID NO: 18796 - DNA, 201 bp, Homo sapiens
tctggcaaatagagataaaaatagtttgaaaatgttattgcattttctgtttgttgtacctcttttctttctttttttttctctccaactgaatcagtccstttttgttgttttgtaacctcttccagagttaactacttccattgtaggtgatgaaatgtataaggcaccacttcaaatgttggcactgctataagcatg

SEQ ID NO: 18797 - DNA, 201 bp, Homo sapiens
tgtggctcgaaatgtcaatagtgttgatgctgaaaaactctggtctagaatgtgtccaatgaccatagcgtggctttagagggtaaagatgctcgttgtamgtctccatgttgctaatatattaacatagggcttagtgaaaagtgttatgggggatgtcttaagtctttcctttaaattctcatggtcctcaaatattcc

SEQ ID NO: 18798 - DNA, 201 bp, Homo sapiens
agaatgatttgtatcttctccagcatatctggatcctaaggggtgatgccaacaagagtcctggagaaaagtgtttctgttataacgtggcatggttaggkcctgaagtatacatttgcttatatttgctgtatacctttgtgctgtgctctcttaatgatcccccaaaagctcctttcccgccttccccaggccacaatg

SEQ ID NO: 18799 - DNA, 201 bp, Homo sapiens
atcttctccagcatatctggatcctaaggggtgatgccaacaagagtcctggagaaaagtgtttctgttataacgtggcatggttagggcctgaagtatayatttgcttatatttgctgtatacctttgtgctgtgctctcttaatgatcccccaaaagctcctttcccgccttccccaggccacaatgttgcagaaaaaa

SEQ ID NO: 18800 - DNA, 201 bp, Homo sapiens
gagagctggtatccaagcagcttggagatgaagtcctggccccagaaggcactggtgtggaagccacacatctcccttgaaagtgcatctggaggtctcastatgtgaagtgctcttgaagggaagatttcccaccggccattcacagcagagcaccccagtgccccacagatacaccctctcattgtgtgttatccctgc

SEQ ID NO: 18801 - DNA, 201 bp, Homo sapiens
agaggcaggctctgaaccagtatgcttaactgcctagtttcagaagaggcttaaggcagcaggcggagctgtataaaatacaagataatctcaagtattcygtaggagagagaaaaacaatggcaaagacagacataaaacagagccaggaatgaggccaaaaatatatatcatttgacctatacacttgctaagaggacc

SEQ ID NO: 18802 - DNA, 201 bp, Homo sapiens
ccattgtacagtttgacaggcctgtgtgaatatcctgctttgtagctgagtgttcttgcttgttaatctgcttcccctatccccactcttttttttttttwttaatctggtggttgagaggtgcttccaagcctacctattttatttaccacttcctcgttagttttttgggcttcttaaaatggtcctccactcttatga

SEQ ID NO: 18803 - DNA, 201 bp, Homo sapiens
caaaatgctgttactacaggcgtgagccaccgcacccggcccaaattggcaaagagttttaaaagtaatagcattcagcattgataaaggcatgggaaagstggagctcttttccactccaactgatacataaactagttcacagccttcaaaacattcacactcttggacctagtactaactctacttggagtgagttag

SEQ ID NO: 18804 - DNA, 201 bp, Homo sapiens
caaagagaaacttggtattattatgtattaatccatattaactaaagttgaacctgacatcaaaatattgatcccttcttaaaatagacaaaaatactttragttaaattgtttttcttcctatttgtgctagccggtgcttaaagtctaatgatgtgataattgaatagtaaaggaatctaaatctctactttcttgatt

SEQ ID NO: 18805 - DNA, 201 bp, Homo sapiens
cttgataaattacccaatctcaggtatgtctttattagcagtgtgagcacagacgaatacaatcacttccactgggttgagtcttctagcttttctcttakggcttatggcccaacatcaaaacatggtaacaagcaacaaggatgtggctcaggcacccaggtccctactgcttgggggatcgtagggtacctgagagtg

SEQ ID NO: 18806 - DNA, 201 bp, Homo sapiens
gggggtacgtgtataggtaaagttgtgtcatgggggtttgtggaacagattatttaatcacccaggtattaagcctagtacccaattagttgtttttttttcaaatcctctccctcctcccacgctttgcctgcctataggccccagtgtgttgagcccctctacatgtccatgtgttctcatcatttagctcccacttat

SEQ ID NO: 18807 - DNA, 201 bp, Homo sapiens
acccaggaggtggaggttgcagtgacctgaagtcaccccatcgtactgcagcctgggtaacagagcaagattctgtctttttaaaaaaaaaaaaaaaaaaagcatttgtgaaggtgaatttcaagaatctaatcaggcctccctccctcccccattagaggcacactctattatgtaaaacagacagggagtgtattcatt

SEQ ID NO: 18808 - DNA, 201 bp, Homo sapiens
agctactcaagtggctgaacccaggaggtggaggttgcagtgacctgaagtcaccccatcgtactgcagcctgggtaacagagcaagattctgtctttttwaaaaaaaaaaaaaaaaaagcatttgtgaaggtgaatttcaagaatctaatcaggcctccctccctcccccattagaggcacactctattatgtaaaacag

SEQ ID NO: 18809 - DNA, 201 bp, Homo sapiens
atgccagcactttaagaggctggggcaggcagatcacttgaggccaggagttcgagaccagccctggcctcaagttggccaacatggcaaaaccccatctytactaataataacaaaaattagtcgggcgtggtggcacatgcctgtaatcctagctactcaagtggctgaacccaggaggtggaggttgcagtgacctga

SEQ ID NO: 18810 - DNA, 201 bp, Homo sapiens
aggtctgcttctgtctgtgctgtgtttatttgattgtttttattatattttattactgttggtggcacataggggaatgtggcgcagagcaccactctggraggatgcttcccgtgcagccaaagtgatcatgtccagggctttcatctgtaaccacaaagtgtgttaggaagtctcacctaatgattaagaccatggtcc

SEQ ID NO: 18811 - DNA, 201 bp, Homo sapiens
ggaagttacctgggcagaggtctgcttctgtctgtgctgtgtttatttgattgtttttattatattttattactgttggtggcacataggggaatgtggcrcagagcaccactctgggaggatgcttcccgtgcagccaaagtgatcatgtccagggctttcatctgtaaccacaaagtgtgttaggaagtctcacctaat

SEQ ID NO: 18812 - DNA, 201 bp, Homo sapiens
ttcttgactatgatggtatgaaagtgatacacattcagtagaaagtgtatttcgcatacccatacagcaattctgtttgtttgtttgtttgtttgttttttgagacagtctcgctctgtcacccaggctggagtgcagtcgtgtgatatcggctcactgcaacctctgcccagctaatttttgtatttttagtcaaaacag

SEQ ID NO: 18813 - DNA, 201 bp, Homo sapiens
ttttcacatgggggaaaaaaataaaccatttgctgagggaacacccatcattgtgtaaaacagttgactgaactctatcagaatgtactgctgacatggaraaattccaccctagttttctttgcctgcatttcctatgtaaaggtaggattctgcttgtctttgtcaattattgatatttacctagaggatgttcactaa

SEQ ID NO: 18814 - DNA, 201 bp, Homo sapiens
caaagtcaactttcctcagggactttcagaatccccaaatagactatccactttctttcacacttatttgcctctaacttgttgatttcttttttttttttctgttttttaagggttaacaatctcttgggtgcactctgacttccatgcgctttatagaaaaaattggtcctgaggccagcagcaacagtcggtctcagg

SEQ ID NO: 18815 - DNA, 201 bp, Homo sapiens
ccaaagtcaactttcctcagggactttcagaatccccaaatagactatccactttctttcacacttatttgcctctaacttgttgatttcttttttttttttctgttttttaagggttaacaatctcttgggtgcactctgacttccatgcgctttatagaaaaaattggtcctgaggccagcagcaacagtcggtctcag

SEQ ID NO: 18816 - DNA, 201 bp, Homo sapiens
atcacctgagcccaggagttgaggctgcaataagccctgatgcagcactgcactccagcctgggcaacagagccaagaccctgtctcaaaaaaaaaaaaaacccacaggagaaacagatgtctaaattcagtagcaaaggttgcagcaaacttgaagtcctaagttagggtaaagagatgaagaggaaatgacaagaattt

SEQ ID NO: 18817 - DNA, 201 bp, Homo sapiens
tggtaacacaccctttcacctcctcataccccgtgtcttcgcttttccagtcctttggctgccctccggtttcttccctcacatacctgtctgactagttmctagaagcctggcagaaattgttctccgattttaatctggctgccacaaatgaaagaccttggagtccaaatactcctctctcaaagcaaaatctaaatg

SEQ ID NO: 18818 - DNA, 201 bp, Homo sapiens
taattccacgcccccacctccaccatccgtttatctattgtaagggtagatttcaaaaatgagtttcccatttgccaagaaggaaggaaatctttccctcmtccccttcttagagcatttctgtcagaaaaccttgtggctgtaaagcctttttctagccttttaaaataaaaatatttcactttagatgctaagtgcaag

SEQ ID NO: 18819 - DNA, 201 bp, Homo sapiens
ggttagttgtcctgctcatgtaaatcacttgaaaagtgaagtaagaggcaagatggggtggttggccagagactctcaggatccagtgggatgagctgccrctgcccactgcttcctgggttgcaagagagcctctacccacaacacccgtcctgggttttggcaccaaatgtaagagttaaagaaagaggaaagaaacac

SEQ ID NO: 18820 - DNA, 201 bp, Homo sapiens
ctagccttttaaaataaaaatatttcactttagatgctaagtgcaagggcattatcctacatagccaaataaactgatctcacacagagaatttataactrtacaaggtattctattttctaatacattgtctgcattctaatttcctcattagttccaacaatttgctttatagcttttcttttttttattttttgcttc

SEQ ID NO: 18821 - DNA, 201 bp, Homo sapiens
aaaacataaaggcctttgaatatactcatagcttggacatcgattttaattaagctgagtgctctttttcatcaggggtgagggttgaggttagaattatrtaaataatataccaagttaaattaaaggattgggttatgtgcaggaattccctgtgataatgagagggattttcagagaaagatccaaggtgctgtttaa

SEQ ID NO: 18822 - DNA, 201 bp, Homo sapiens
cagctaattcttgccttttgcttgattgtggtctaaggacatggaaggacagtgatctgatgatggaacaccgcataaggtatttgttggtgcattttttycttaatactaggtgttttgagataatgccacttgctccgtctcttaatattctccgtgtggattggacatgttgcctgactgttaatgacagccattggg

SEQ ID NO: 18823 - DNA, 201 bp, Homo sapiens
tccttcaaggttctacccaatgataacttcctttataaagtgttccctggctcacccaggggtaatcaattgcttaggcttttgcgtgtgaacttctgctygtgttaccataaattatctgtatgtctagcatccttgctcattttaccatgttatatcattaaatcctcataattatcatgtaatcttaagtattaggat

SEQ ID NO: 18824 - DNA, 201 bp, Homo sapiens
tgattgcactgtggtatgaaagacagtttgttgtgatttctgttcttttacatttgctgaggagtgctttacttccaattatgtggtcaattttataatawatgtgatgtggtgctgagaagaatatatattctgttgatttggggtggagagttctgtagatgtctattagatccacttggtgcagagttgagttcaagt

SEQ ID NO: 18825 - DNA, 201 bp, Homo sapiens
cgcttgaacctgggaggtggaggttgcagcgagcagagatcacatcactgtactccagcctgggcaacagagcaagactctggccactccaccccaccctscaaccaaaaaaaatcaaaaatcaaaaaagagataaaaataatacataaaataatttgcccaaagacacatggatgacaagtgtcagagtcaggttataaa

SEQ ID NO: 18826 - DNA, 201 bp, Homo sapiens
tccatttagttaacctttacttttccttcaaggttctacccaatgataacttcctttataaagtgttccctggctcacccaggggtaatcaattgcttagscttttgcgtgtgaacttctgcttgtgttaccataaattatctgtatgtctagcatccttgctcattttaccatgttatatcattaaatcctcataattat

SEQ ID NO: 18827 - DNA, 201 bp, Homo sapiens
tgcagtataatttgaaggttaaattacaagttatttataaagaaaagggtataaaaaggcatggtatttaagatgtaagtatcaaactggtttttgactttggcagtaattataaataactatttattaattagacatcataatgtaattttttccatgtaattaaagaagtggtatagactgctaacatattttaacttt

SEQ ID NO: 18828 - DNA, 201 bp, Homo sapiens
ttgctaaagtccaccctcgcaactctcaacagagtcacttggcaaaacgtaggtctgatcgtgtggctgttttgcttaaaagtctttgatggttccccagrttgctttgttaaacaaaggaatttctactttaaaagtagaatttcctgcggaatctttctcaagttactttgctccaaccacactaaaccgcaccgttcc

SEQ ID NO: 18829 - DNA, 201 bp, Homo sapiens
gaagcccagaaagaggaagatacagaggtggccaccgatccaatgacaacgtgcaagttgttgatgactttgacgagaccaggttcagtgttctttgggargattgaggaggaatgtgatttaagaatagatgttcatgaccgtagaagtggaaatatgaatataaaggttaaggtttgtttgttttaagatgggacttac

SEQ ID NO: 18830 - DNA, 201 bp, Homo sapiens
tatatctacagagatgtactcagtgatcaaagagcagagtttttctcatttgtgctatcccactaacgtgtgtgtgtgtgtgtgtgtgtgtgtgtgtgtgtatttttttttttcagagacagggtcttgctctgttgcccaggctggagtacagtggttagatcatagctcagtgcagccttgaactcctaggctcaagtg

SEQ ID NO: 18831 - DNA, 201 bp, Homo sapiens
atatatctacagagatgtactcagtgatcaaagagcagagtttttctcatttgtgctatcccactaacgtgtgtgtgtgtgtgtgtgtgtgtgtgtgtgtgtatttttttttttcagagacagggtcttgctctgttgcccaggctggagtacagtggttagatcatagctcagtgcagccttgaactcctaggctcaagt

SEQ ID NO: 18832 - DNA, 201 bp, Homo sapiens
gtatcttgggcaaaatctgcagtgaaggaaatatatatctacagagatgtactcagtgatcaaagagcagagtttttctcatttgtgctatcccactaacrtgtgtgtgtgtgtgtgtgtgtgtgtgtgtgtgtatttttttttttcagagacagggtcttgctctgttgcccaggctggagtacagtggttagatcatag

SEQ ID NO: 18833 - DNA, 201 bp, Homo sapiens
atcacttccactgggttgagtcttctagcttttctcttagggcttatggcccaacatcaaaacatggtaacaagcaacaaggatgtggctcaggcacccasgtccctactgcttgggggatcgtagggtacctgagagtgagtggactgatagcctttgatagatgctgtgagaaatgagagactgagattgtgcttttca

SEQ ID NO: 18834 - DNA, 201 bp, Homo sapiens
tattcttacttctttattgtcaagcatctatacatatacgtatgtatacttatgttcacatatatacatatatgaatacatatacataaatacatatatatgtaacatatgtgggtaggtaaatttaactttaactcctcttttaaatagaatgtaaccataaatttataaatattaaacatttccttctgactgagctat

SEQ ID NO: 18835 - DNA, 201 bp, Homo sapiens
gctcctcctggggatgcctctcaatagagaaattctacattcccgcctgttgaaagcagacatggttacttgacttgtttgggcctatgaaatgtgaacasaggcgacacacgtcacgatcaggtgggagacttagtaacacatgcctggtgtcccatgcccttttccctctgccagtgttccagggcgtggcaggactgc

SEQ ID NO: 18836 - DNA, 201 bp, Homo sapiens
ttattcttacttctttattgtcaagcatctatacatatacgtatgtatacttatgttcacatatatacatatatgaatacatatacataaatacatatatatgtaacatatgtgggtaggtaaatttaactttaactcctcttttaaatagaatgtaaccataaatttataaatattaaacatttccttctgactgagcta

SEQ ID NO: 18837 - DNA, 201 bp, Homo sapiens
ggagaccctgtctcaaaaaaaaacaaagattctattcagaagagacctcctggggaaacctttcttgacctgtccagaagagaggagtttcttccataacrctacaaaatctacaaattagaacagatttttatggtccaatattttaaaaattccatagcttaatttttaaatgaaccactatcgtacaaacactgtact

SEQ ID NO: 18838 - DNA, 201 bp, Homo sapiens
ctataacatttatgtactgcaatgtcccaaccctcctatttcagctaaaatatagaaggaaaaaatacacctgtaagtagtatagtgtacactaaagtttyattgaataagaaaaagaattttagtttttattttagctctgtgttcatttatttcataagtcaaatgtatcgtaacaaatttaacctgacaacttctcat

SEQ ID NO: 18839 - DNA, 201 bp, Homo sapiens
tggtcacaactgaggtgggtgctactggcttctagggatggaggtcaggaaagctgccaagaacccgacagtgtacaggacagcccccacaccagcatgtsactactgccgaggacgagaagccctgatctagccaatcctgtcatttttcagactccagggagtttgtgacctgaccttcaaatataagatttaatattt

SEQ ID NO: 18840 - DNA, 201 bp, Homo sapiens
tgtgaattattcttacttctttattgtcaagcatctatacatatacgtatgtatacttatgttcacatatatacatatatgaatacatatacataaatacatatatatgtaacatatgtgggtaggtaaatttaactttaactcctcttttaaatagaatgtaaccataaatttataaatattaaacatttccttctgact

SEQ ID NO: 18841 - DNA, 201 bp, Homo sapiens
tgcaggggaaagtgaaaggaaatagagacttaaaggaagaagaaaggagaaaaagatcttccatcatgaaggctgaatgataggggaaatttttcacacamccctataaacaaacacagaatctgaggacaatccacatcccacctttgtagacatttaaagtcaccctaccttgatgaggaggaactcagatgccttgag

SEQ ID NO: 18842 - DNA, 201 bp, Homo sapiens
gagagactgagattgtgcttttcaacaaatatgtagaattcatcttttctattttgtaagcccccccaccttttttttttgagacaggatgttgctctcakgctggagtgtggtgatgttatcttggctcactgtagcctccatcttgccaggcttaggtggtcctcctacctcagcctcctggatagctgagactacagg

SEQ ID NO: 18843 - DNA, 201 bp, Homo sapiens
acccaggtgatagatggaaccttgaccagagtcagtttcccagtgtgtccaatggcgtgatggagccattcagtggttacttctctagtctcagaatgaayggtgggaaaaggtatatttagcaactgttctttgattgatgaagcgagggagggctattatattaagaacattcaagtgaaagcctctgaaaatcctcag

SEQ ID NO: 18844 - DNA, 201 bp, Homo sapiens
aagcccccccaccttttttttttgagacaggatgttgctctcaggctggagtgtggtgatgttatcttggctcactgtagcctccatcttgccaggcttakgtggtcctcctacctcagcctcctggatagctgagactacaggcatgttccatcacacctggctaattttgtattttttgtggagatggggttttgccat

SEQ ID NO: 18845 - DNA, 201 bp, Homo sapiens
agcctattttgtcagtcttttatgcattaaagaccattatactagagacaggaaaggtgaaaaatattgtaatatgaaatgatcaattatataggtgttamacatgatgtttaggatgtcttttggtaatatgaaaatgttctcaaactatagtattaaataaagcaggatacaaaactgtatgtaatatgtaatctcaac

SEQ ID NO: 18846 - DNA, 201 bp, Homo sapiens
aaaaaaaaggaagaacgggaaacagattatagggagcaatcaagaaaagaaaaagaactaatgacctcatttacaacttaaatgaataggcatttttttttgcaaaccaaaataacttttactatagatatgttaatgatgtcattaaaacattttctaaaacatattttataagtttaagagttaacaagccttggccag

SEQ ID NO: 18847 - DNA, 201 bp, Homo sapiens
tctacaacaatattatttagtcatttctctgcattgtactcaactctttaaaggttatagaattgtagttagcgtattagaaggctcatggatctagattmtatgtcctcagcaggtgaagtcttttttacacaatgccactgtacggattgtagagttcttgggctggcataattttatgtgaccaaaatttggcaaagg

SEQ ID NO: 18848 - DNA, 201 bp, Homo sapiens
gcgcgtggtggagttttcctgtggtgagaagctgtgcccagggtggggcaggctagaggtcaggttctggcccccgttttctgtgggtaatacctcatacygtgaccaggcacaggggcggaggagaccccgggatgggagcctcacccttcgtgcgctcgcccaggctctcctgctttgctccctgctgcctgctgccca

SEQ ID NO: 18849 - DNA, 201 bp, Homo sapiens
tgcctgtaatcccagaactttgggaggctgaggcaagcagatcacttgaggtcaggaattctagaccagcctggacaacatggtgaaaccccatctctacwaaaaatacaaaattggccaggtgtagtggtgcggtcctgtaatccctgctacttgggaggctgaggcaggacaatcgcttaaagcagggaggcggaggtt

SEQ ID NO: 18850 - DNA, 201 bp, Homo sapiens
ctcaccttctacaacaatattatttagtcatttctctgcattgtactcaactctttaaaggttatagaattgtagttagcgtattagaaggctcatggatmtagattctatgtcctcagcaggtgaagtcttttttacacaatgccactgtacggattgtagagttcttgggctggcataattttatgtgaccaaaatttg

SEQ ID NO: 18851 - DNA, 201 bp, Homo sapiens
cttgaacctggaaggcaggggttgtcgctgagatcgtgccactgcattccagcctgggcgacagagcaagaatccgtcttaaaaaaaaaaaaaaaaaaaaraaaaaagattctaagaaggtgtccatgggctctaccaaactaccaaagaggtttatggtcaaaaaaacagagaagagttcctgccctcaggagttatttc

SEQ ID NO: 18852 - DNA, 201 bp, Homo sapiens
ctataatcccaactactcagggaggctgaggcatgagaatctcttgaacctggaaggcaggggttgtcgctgagatcgtgccactgcattccagcctgggygacagagcaagaatccgtcttaaaaaaaaaaaaaaaaaaaagaaaaaagattctaagaaggtgtccatgggctctaccaaactaccaaagaggtttatgg

SEQ ID NO: 18853 - DNA, 201 bp, Homo sapiens
ggcttgaacccgggaggtggaggctgcagtgagctgagactgtgccagtgcactccagcctgggcaacagagtcagactcagtctcaaaaaaaaaaaaaaaggcttaagtaggcacagtagctcacacctgtaatcatggcacttttagaggctgaggtgggtggatcacttaagcccagaagttcaagaacaatctgggc

SEQ ID NO: 18854 - DNA, 201 bp, Homo sapiens
tggcttgaacccgggaggtggaggctgcagtgagctgagactgtgccagtgcactccagcctgggcaacagagtcagactcagtctcaaaaaaaaaaaaaaaggcttaagtaggcacagtagctcacacctgtaatcatggcacttttagaggctgaggtgggtggatcacttaagcccagaagttcaagaacaatctggg

SEQ ID NO: 18855 - DNA, 201 bp, Homo sapiens
ggttgcccggacctgtagtcccagctactcaggaggctgaggcaggagaatggcttgaacccgggaggtggaggctgcagtgagctgagactgtgccagtkcactccagcctgggcaacagagtcagactcagtctcaaaaaaaaaaaaaaaggcttaagtaggcacagtagctcacacctgtaatcatggcacttttaga

SEQ ID NO: 18856 - DNA, 201 bp, Homo sapiens
acaagacgcaaataggtgagacctaagggaggagaaaaaaatctcaggtgatggctacatgggcatttttatttacttatttttatttatttatttattttattttttagacagtctcgctgtgtcgcccaggctggagtgcagtggtgcgacctaggctcactgcaacctctggttcctgggttcaagcgattctcctgc

SEQ ID NO: 18857 - DNA, 201 bp, Homo sapiens
aacaagacgcaaataggtgagacctaagggaggagaaaaaaatctcaggtgatggctacatgggcatttttatttacttatttttatttatttatttattttattttttagacagtctcgctgtgtcgcccaggctggagtgcagtggtgcgacctaggctcactgcaacctctggttcctgggttcaagcgattctcctg

SEQ ID NO: 18858 - DNA, 201 bp, Homo sapiens
caacaagacgcaaataggtgagacctaagggaggagaaaaaaatctcaggtgatggctacatgggcatttttatttacttatttttatttatttatttattttattttttagacagtctcgctgtgtcgcccaggctggagtgcagtggtgcgacctaggctcactgcaacctctggttcctgggttcaagcgattctcct

SEQ ID NO: 18859 - DNA, 201 bp, Homo sapiens
tgagtttgggaaatcaaggctgcagtggagccataattgcgccactgcactccagcctgggtgacagagtaagactctgtctccaaaaaaaaatttttttwaaattatagccaatttgattaaaaataattaccaacagggtgggggctaggggagggatagctttaggagaaatacctaatgtagatgatggtttgataa

SEQ ID NO: 18860 - DNA, 201 bp, Homo sapiens
tattgtggagatattttttttctgagtggatagcgctcttgtgatacgctgggtgagggcgagcaatatttagcggactgtcctgtgaggatagtaaggtyatctggtgagagtgttaggtggcccaggccagacttgggagaggcagggagagagggggacgacggaggagggcgccttggggtgcgtcttgaaagcttt

SEQ ID NO: 18861 - DNA, 201 bp, Homo sapiens
tatcactcttttgtgtttctaggttgtatttttctattcttaagaaatcctttccatgaagtcataaaaacatgcacctatattgtcttctgaatatcttmtggtttgacttttatatttaaatctttaattctccctggaattgatttttgtgtttggtgtgaggtagaaatctaatttaaattttttcccatgattcca

SEQ ID NO: 18862 - DNA, 201 bp, Homo sapiens
ttgtgaattattcttacttctttattgtcaagcatctatacatatacgtatgtatacttatgttcacatatatacatatatgaatacatatacataaatacatatatatgtaacatatgtgggtaggtaaatttaactttaactcctcttttaaatagaatgtaaccataaatttataaatattaaacatttccttctgac

SEQ ID NO: 18863 - DNA, 201 bp, Homo sapiens
agtccaccacgggtggctcatgttgagccttggtctagtttgctttattaatattttttccatcttaattttaagaagtcacattttctttttttttttttcctttctggctaatagggtttctatgtgattattaagctgacttttagtttgcctgtaaatatttgtctcccatggctggagagtcatgcattgctcctt

SEQ ID NO: 18864 - DNA, 201 bp, Homo sapiens
gcgtgagccactgcgcccggccttaagtctctaaatttttaaaaaatgcatttaatactaaggtctcaaacagttttctagacatgtaaatcaaaaacccrtttaattaattaagatcctggggggaaaaaaaggttacttgctgaacaaaatgaagtttacttataggaaatagcactataggaaagtagacagcatttt

SEQ ID NO: 18865 - DNA, 201 bp, Homo sapiens
ctctatatcgagtttcacttgtttattttattttattttattttattttatttttgagatggagtctcgctctgtcgcccaggctggagtgcagtggtgcratcttggctcactgcaacctccacctcctgggttcatgccattctcctgcctcagcttcccaagtagctgggactacaggcgctggccaccatgcctggc

SEQ ID NO: 18866 - DNA, 201 bp, Homo sapiens
tataggaactattaagtgagaactttaacagtaattctccatatgcaaaaaagcatttttactagtctgtacttaacaacttgcaaatttgcttttatccraaaggaagagaattagagaaatgattttagtaagaaatgctaaaatcaaaaagataggtaaatatttaaggaatcattgtagtattcccaacagttttat

SEQ ID NO: 18867 - DNA, 201 bp, Homo sapiens
tcacattttgtccttttaaaaattcttttatttgattcaatatattgtattttgtttatttttttaactgcagaagtgagtagttatatatatatatatataaaattccttaccaatgaaagcccacaagagagctcaaagcaattaattcctagataaatataattttaattgatcttatcctacttatccagtcatttt

SEQ ID NO: 18868 - DNA, 201 bp, Homo sapiens
gacaggcgcccgccaccacgtctgactaatttttgtatttttagtagatacggggtttcattatattggccagactggtctcaaactcctgatctcaagtkatctgcctgccttggcctcccagtgttgggattacaggcgtgagccaccaggcccagccataattcttataaaaacggaaatctgatatttcatttagcc

SEQ ID NO: 18869 - DNA, 201 bp, Homo sapiens
ctcccaaaatgctgggattataggcgtgagccactgtgcccagccccttttgttgatcgctccacaattttccaaaacgttcatagggactctatattagytttctagagctgccataacaaagcaccacaaactgggtgggttaaaaaaacagaaaatgtattatcttacagttctggaagtcagaggtccaaaatcaag

SEQ ID NO: 18870 - DNA, 201 bp, Homo sapiens
gctgggatgacaggcgcccgccaccacgtctgactaatttttgtatttttagtagatacggggtttcattatattggccagactggtctcaaactcctgayctcaagttatctgcctgccttggcctcccagtgttgggattacaggcgtgagccaccaggcccagccataattcttataaaaacggaaatctgatatttc

SEQ ID NO: 18871 - DNA, 201 bp, Homo sapiens
ttactaggcgggaaggcatatctggacttgtctgggcatggcaaaggcaggaaggttgtttacagaacaggtagctaggagacaaggaagtacaaggaagytggttttaagaaacaaagaacagggaactaaagctttttgaagaggaatttatcatctctgacacttcttgtacagtctgcagaactgtgaggcaattaa

SEQ ID NO: 18872 - DNA, 201 bp, Homo sapiens
cctgtacaaatacgaaagacaaaaaggcaaacttatttgtgacttttttttttttttttttttttttttttgagacggagtctcgctctgtcgcccaggcyggaccgcggactgcagtggcgcaatctcggctcactgcaagctccgcttcccgggttcacgccattctcctgcctcagcctcccgagtagctgggactac

SEQ ID NO: 18873 - DNA, 201 bp, Homo sapiens
taaacatgatgtttaggatgtcttttggtaatatgaaaatgttctcaaactatagtattaaataaagcaggatacaaaactgtatgtaatatgtaatctcmacaatgtttaacatatatatggagctgcagtgagctgagatcgtgccactgcactccagcctgggcgacagcaagactgtctcaaaaaaaatttatatat

SEQ ID NO: 18874 - DNA, 201 bp, Homo sapiens
tggatgatctagaagaaatgaatgcattcctagacatatacatactaccaagactgaatcatgaagaaatagaaaatctgaactgacaaataatgagtaargagattgaatcagtaataaaaagttttccattaaagaaaagcctaataactgttggcttcactgctaggttctacttatcatttaaaaagaatgaatacc

SEQ ID NO: 18875 - DNA, 201 bp, Homo sapiens
gtttaggatgtcttttggtaatatgaaaatgttctcaaactatagtattaaataaagcaggatacaaaactgtatgtaatatgtaatctcaacaatgtttmacatatatatggagctgcagtgagctgagatcgtgccactgcactccagcctgggcgacagcaagactgtctcaaaaaaaatttatatatatggagcaag

SEQ ID NO: 18876 - DNA, 201 bp, Homo sapiens
tctgacatggaagtgtgcatgtatctgtgtatgtgtgtgttccctgtatttctaacatacctgggatcctaatatgcatactaatctatgacttgcttttyacatttaataatatattgtgactacatttccattttagtacaataaagtttctcctcattctttttttctgtttttgagatggagtcttgctctgttgcc

SEQ ID NO: 18877 - DNA, 201 bp, Homo sapiens
gtgttgcccaggctggtcttgaactcctgggctcaagtgatcctcctgacttggcctcagcctcccaaagtgctgggattacaggcatgagccactgcgcstggcccccaagatacactttcaccaaactgtgtttcaaagttatgcttttaaattgtatttaaagttcatataagaacaggcttagctgtgacactgtag

SEQ ID NO: 18878 - DNA, 201 bp, Homo sapiens
tgaacctgggagatggaggttgcagtgagccgagattgcaccactgcattccagcctaggtgacagagcaagactctgtcttaaaaaaaaaaaaaaaaaaaaggtgaataggggaagcacaaaatgtgtagttttgagaaaagcctattaaaggggacctaagaatggagagatttgcgaggagaggttgttggattttga

SEQ ID NO: 18879 - DNA, 201 bp, Homo sapiens
ttaggaggctgaggtgggagaatcacttgagcctgggaggtcaagactgcagtaagccgtgatcatgccactgcactgtagcatgggtgacagagtgagamcatgtctttaaaaaaaaaaaatctgtggactatgaagcaagatgagagacatttgaaagcatatgtcggaaagtcaggtatacttctagagctggctctc

SEQ ID NO: 18880 - DNA, 201 bp, Homo sapiens
atatactagacttttctagaaggttctctttgaagaaaagttttctctgctaaccacactttgaaaaattatttctgtaggaaaatgatatattatccttygataacctaggtcgctggacagcttttgttaaaaagttctacccatgtggctttagcttccaaagatacacttcctttttttgagacagagtctcactgt

SEQ ID NO: 18881 - DNA, 201 bp, Homo sapiens
cgggtgtagtggctcacgcttataatcccagcactttgggaggccaaagcaggaggattgcttgagcccaggcattcgagaccagcttaggcaacatggcragaccccacctctataaaaaatttaaaaattagctgggcgtgatggtgtgcatctgtaggcccagctactcaggaggctgaggtgggaggatcacttaag

SEQ ID NO: 18882 - DNA, 201 bp, Homo sapiens
tttcttaacttccttgtgattattttcctcatctttgaaaaaggaataatgtcctcaacaggtaacatgaaggttaaaaggagatggcgtgtgtgtgtgtrtgtgtgtgtgtgtgtgtatacttgtgtatctcatccctaaacaaagcctggctcatagtaggccctatataagtgcttgttactatgattgaaagttgga

SEQ ID NO: 18883 - DNA, 201 bp, Homo sapiens
aatgtgacaaagcacagtcaggttgtgggaacctaacctaatctttgggctgaattaagaattcccagaagtgacactcaagttgcaagatgaagaataarcaggaatgagacaggtgaggggtgcggtgtgggaggattgttcttgtaaggggagatagcctatgccttctctggaactgagattacttttctccgtgtt

SEQ ID NO: 18884 - DNA, 201 bp, Homo sapiens
aaaatttccactgcatggaggaaagtaaatggattgggattatttcctgcaggtaaatgaaactttatggtatttgttatggaggcaagtagggtacttakagaaagccaaatataacctgtccctccctatcttttccttagttgtgagggtcaaaggggcacattacagtctggattcagaaacccctttcaacagcac

SEQ ID NO: 18885 - DNA, 201 bp, Homo sapiens
cgaatctgttgggcacccactgagtagtgaacaggatgaatgtgacaaccacactccctgcccttcccaggcttgcagcttagtgagggagagcaacactrcctgcccttcattagggggatgaatgtgacaaagcacagtcaggttgtgggaacctaacctaatctttgggctgaattaagaattcccagaagtgacact

SEQ ID NO: 18886 - DNA, 201 bp, Homo sapiens
gtaaccaaataccacctgtgccccaataacctatggaaataaaaagtttttaaaaatttcattttgtgagtgcagagtaggtatatgggatacatgagatrttttgatacaggcgtgtgatgtgtaataatcacatccgggtaaatgggatatctatgacctcaagcatttatcctttgtgttacaaacaatacaattagg

SEQ ID NO: 18887 - DNA, 201 bp, Homo sapiens
gcaaaatttccactgcatggaggaaagtaaatggattgggattatttcctgcaggtaaatgaaactttatggtatttgttatggaggcaagtagggtactyagagaaagccaaatataacctgtccctccctatcttttccttagttgtgagggtcaaaggggcacattacagtctggattcagaaacccctttcaacagc

SEQ ID NO: 18888 - DNA, 201 bp, Homo sapiens
aaattaaaggcataagtatgatacaaaggactttggggacttgggcggaaagggtgggaagggagagaggaataaaaaactacaaattgggttcagtgtayactgctcgggtgatgggtgcaccaaaatctcacaaatcaccactaaagaacttactcatgtaaccaaataccacctgtgccccaataacctatggaaata

SEQ ID NO: 18889 - DNA, 201 bp, Homo sapiens
gcccctgcccagggcagagaccaccgtgttgctttatgcctcgctggtgagagggggtcataaacagtttgtgctccatgaaccgttcctgcccacctccraggtcgtgtttctgctccctctcttctcccttagagcccatggggacaaggcagagaacttgagtggagatgaaggtggtgaatattagaggaacaaagt

SEQ ID NO: 18890 - DNA, 201 bp, Homo sapiens
tagatgacatcaacagtggtgctgtggaatgcccagccagttaagcacaaaggaaaatatttcaataaagaatcatttgacaactagaaaaaaaaaaaaaagatgtttatcaagacaatatgtgcaccgctgaacataggctcttatcagtggttctacttttgccctttgccctgtgatcgttgttggaccctaatcagt

SEQ ID NO: 18891 - DNA, 201 bp, Homo sapiens
aaagctggagtttattcatgtcttagcaagggagcacaccgccttgcggaaacttgagcagcatctgggaggggagggcaaagggaggatatttatgaggytctaggttggattaaggtgggtctttcagtgaagggctctgattaagtttgggtacggatcatgatttagcaaggtgagggcttaaaaaagttttggagc

SEQ ID NO: 18892 - DNA, 201 bp, Homo sapiens
cacaacaagacgcaaataggtgagacctaagggaggagaaaaaaatctcaggtgatggctacatgggcatttttatttacttatttttatttatttatttattttattttttagacagtctcgctgtgtcgcccaggctggagtgcagtggtgcgacctaggctcactgcaacctctggttcctgggttcaagcgattctc

SEQ ID NO: 18893 - DNA, 201 bp, Homo sapiens
tgtaggcccctgttgtttcactgggacctttctcccctctctacagctttccccttccccagccccaggaaaggtggaggcgccaccttctggtcagaaakgagattacacaatggtgtcctgcttttaaactttttgttttgttttagcatttattttcgaatagacaatacacgcccacgtaaaaattcaaaggtccta

SEQ ID NO: 18894 - DNA, 201 bp, Homo sapiens
gcactggcccccaagatcggccccctggtctgtctccaaaaaaggttggtgatgacattgccaaggaaacaggtgactagaagggcctgaggattacagtsaacctgaccattcagaacagacagacccagattgaggtggtggcttctgcctctgccctgatcatcaaagccctcaaggaagcaccaagagacagaaatt

SEQ ID NO: 18895 - DNA, 201 bp, Homo sapiens
tcttgcatcattggtacataataattcatagacttcataagttattaatatacaagttacagaatttaataatgtaacccacctttgatatgttttcatayacattatggggaaaccatatttttttgaagtcaagaaatgtatattgcttcatgttgcaaaatttgtatgctatgtcaaagaagcattgccagaaaatga

SEQ ID NO: 18896 - DNA, 201 bp, Homo sapiens
caatacattttaagaagaattaatggctgtcaaaggaaaaaggtagactgttttaatggacatcttgtgatttgcattttattttctatttcttcaaccgytcatatagaccatggtatatgtagaagtactgtgtgaatatgagtagattggtcaacattattggtcttatgaaatgggcttaaaataccagaattcatt

SEQ ID NO: 18897 - DNA, 201 bp, Homo sapiens
tcaatgtaggcccctgttgtttcactgggacctttctcccctctctacagctttccccttccccagccccaggaaaggtggaggcgccaccttctggtcakaaaggagattacacaatggtgtcctgcttttaaactttttgttttgttttagcatttattttcgaatagacaatacacgcccacgtaaaaattcaaaggt

SEQ ID NO: 18898 - DNA, 201 bp, Homo sapiens
aagctgaaaacactcaaaagacagatacacagattgaccagaggcttcagagataggcatgagttgaatgacatgtgcagacagcacagcaggatgagcamtgcacggtgaatgtgaggctgaaatactcagaatcatgatgaaagaaaaacacaaaccaggtacactaaggcaaagctgggtgagacagtccaggagaca

SEQ ID NO: 18899 - DNA, 201 bp, Homo sapiens
ctcaatacattttaagaagaattaatggctgtcaaaggaaaaaggtagactgttttaatggacatcttgtgatttgcattttattttctatttcttcaacygctcatatagaccatggtatatgtagaagtactgtgtgaatatgagtagattggtcaacattattggtcttatgaaatgggcttaaaataccagaattca

SEQ ID NO: 18900 - DNA, 201 bp, Homo sapiens
gcatgcaccaccatgcccggctaattttgcctttttagtagagacggggtttctccatgttggtcaggctggtctcaaactcccaacctcaggtgatccgycagcttcagcctcccaaagtgttgggattacaggtgtgagccaccgcacctggctgtaccttcatttttcaactgccatgcagaaaaaggaggggttgta

SEQ ID NO: 18901 - DNA, 201 bp, Homo sapiens
cacacatagggatcagggactataaccagaaaagatagaaaagagtccttccccgttccaggcaaggcagccatccccattcactccttggccttcaggtwacaccagagactggccccagccagttgccttcaattaccaacagtctactagaaaatggccgctgaaagaccgaaaaagtaaaggacttggtctcaagcc

SEQ ID NO: 18902 - DNA, 201 bp, Homo sapiens
ccatctacaacatgcccaagccctctgacttgtccttagccagtcgagtagggaaggaaagaattcagcataaggaaagaaggtttaagtcacctgaaacmtgtatgagttagccccgggtgagcttccactgccaattacgtcacacatagggatcagggactataaccagaaaagatagaaaagagtccttccccgttc

SEQ ID NO: 18903 - DNA, 201 bp, Homo sapiens
gggatttctgaccatttgccctgccttttaaaaaataggtctaattgcaggatggtgtcataattaaggctactattgaccacccattgttccaggctggrcagcttataatggggacaaacagtattggagaaacaaaaatcatacgttttctctttagattgtcagggtcaaattgatttcaatcccagaggatgcagc

SEQ ID NO: 18904 - DNA, 201 bp, Homo sapiens
cctttggacttccctgtgggggaattattaggttttggtatagggccatgaaggcctatacatatgggatttctgaccatttgccctgccttttaaaaaayaggtctaattgcaggatggtgtcataattaaggctactattgaccacccattgttccaggctggacagcttataatggggacaaacagtattggagaaac

SEQ ID NO: 18905 - DNA, 201 bp, Homo sapiens
tgttcattcccatgggtgtgttatagtcccagttaggatcagtagtagggactgtgtctggtcctgggtgattgccctgagggtttcgggcaaataaattrtctgcttcctggcgggcagcctcaaggatgtgttccttttcaaaggaggtgtaacagattgctagaatgaattgagcgtccctccatgagagatcaaagg

SEQ ID NO: 18906 - DNA, 201 bp, Homo sapiens
acaaattcaggataatgattgcctctggaggtggtagtgatacacaagggatttatttttcccacgtcggtaattttctatttcttaatctatgagagagytgtacagtgttttctagttatagcttatgcccttttgtatatctattataaaatatttctcaatacattttaagaagaattaatggctgtcaaaggaaaa

SEQ ID NO: 18907 - DNA, 201 bp, Homo sapiens
aaatcttgtttctctcaagatgaaacacatgtgaagattctaaatattagttagggatacatatgcagcaaaaatataaggaaatccatggaattgtaacracaaattcaggataatgattgcctctggaggtggtagtgatacacaagggatttatttttcccacgtcggtaattttctatttcttaatctatgagagag

SEQ ID NO: 18908 - DNA, 201 bp, Homo sapiens
aaatccatgaggagaaactcgatgtgtaaattatgactaatttatagactgtaatatattatgcagcagtgaaaattaatgagctgactctgcacatactkgtataggggtcttcatcaacatagtgttgaacttagaaaataaaaagcagacaaacaaaaaactaagctgctgaaatattcaaaaatgtttctcttgttt

SEQ ID NO: 18909 - DNA, 201 bp, Homo sapiens
ttgaacctgggagatggaggttgcagtgagccgagattgcaccactgcattccagcctaggtgacagagcaagactctgtcttaaaaaaaaaaaaaaaaaaaaggtgaataggggaagcacaaaatgtgtagttttgagaaaagcctattaaaggggacctaagaatggagagatttgcgaggagaggttgttggattttg

SEQ ID NO: 18910 - DNA, 201 bp, Homo sapiens
tgaaatgtggccagccccaggaagtgctggtggattattacatcgacccggccgatgcaagccctgaccaagagatcagcttctcctactatgtgagaccrggaaacggggacgggtgagagtatgctgggaaggaaagagaatgagaagagtcagccagagggtgcacctaggctatctgaattgcagatgcacatctaa

SEQ ID NO: 18911 - DNA, 201 bp, Homo sapiens
tttgtatcctttgaccaaacatttccccaaaactgcacccccaactcccagtgcctggtaactactattctactctcaacttctatgagtttaacttttayagattccacatatagttgagatcatgcagtatttgtcattttgtgtctggcttataacataatgctgtccagattcatccatcttgttacaaatgacata

SEQ ID NO: 18912 - DNA, 201 bp, Homo sapiens
cttgaacctgggagatggaggttgcagtgagccgagattgcaccactgcattccagcctaggtgacagagcaagactctgtcttaaaaaaaaaaaaaaaaaaaaggtgaataggggaagcacaaaatgtgtagttttgagaaaagcctattaaaggggacctaagaatggagagatttgcgaggagaggttgttggatttt

SEQ ID NO: 18913 - DNA, 201 bp, Homo sapiens
taatgaaatacccacatgccattctcaggcagtgaagatttgagagaaagagctctatttgaaaaccgtaacaagtccgtggggtttccatggttggagcrcatgctaaaattctctctctctcttttattctcagggaaagtttcaaatggaagacttagtatataatccggaacaagtgccacgttactaccaaaatgc

SEQ ID NO: 18914 - DNA, 201 bp, Homo sapiens
tagaaacacctagcgtcttgtccccgagagtttgcatccgaaatttggactgcttaatttattttttggcatatatatacaccaaattaaatgaaaaaaawatatatatatatacttaacttttaggttcaggcgtacacatgcaggtttgttatataggtaaactcgtgtcatgggggtttggtgtacagattactttat

SEQ ID NO: 18915 - DNA, 201 bp, Homo sapiens
ataatctaagtcacgttcatctatcccaggaatatctgtgaagatacatcacccacaatttcctctcatttagtaactataattcagcccttctgtcgctstcctacataccaaaatattgctgtacacagctacgtttatggattctttatccatccttggctggaccgctaatgaaatacccacatgccattctcaggc

SEQ ID NO: 18916 - DNA, 201 bp, Homo sapiens
tttcagtctacattatttacaaaaacaacaataatttataatgtttacttaaacactggctttcaacaaaacacttagaaacacctagcgtcttgtccccyagagtttgcatccgaaatttggactgcttaatttattttttggcatatatatacaccaaattaaatgaaaaaaatatatatatatatacttaacttttag

SEQ ID NO: 18917 - DNA, 201 bp, Homo sapiens
atttcagtctacattatttacaaaaacaacaataatttataatgtttacttaaacactggctttcaacaaaacacttagaaacacctagcgtcttgtcccygagagtttgcatccgaaatttggactgcttaatttattttttggcatatatatacaccaaattaaatgaaaaaaatatatatatatatacttaactttta

SEQ ID NO: 18918 - DNA, 201 bp, Homo sapiens
agtacagacggggtttctccatgttggtcaggctggtcttgaactcccgacctaaggtaatctgcccgccttggcctcccaaagtgctgagattacaggcrtgagccaccacgcccggctgaggatctgcattttaagaaagctctacaagtgatgcacaggctgtttgtgacctctaatctatgccagttattttattta

SEQ ID NO: 18919 - DNA, 201 bp, Homo sapiens
gcctcccgagtagctgggattacaggcatgcaccaccacgtccgactaattttgtatttttagtacagacggggtttctccatgttggtcaggctggtctygaactcccgacctaaggtaatctgcccgccttggcctcccaaagtgctgagattacaggcgtgagccaccacgcccggctgaggatctgcattttaagaa

SEQ ID NO: 18920 - DNA, 201 bp, Homo sapiens
ttttattggatgactaactgtgttcattttttaatatccagagatttggtatagtttgacttctctgtcttgcaggaatacttgcgtagactcaaagaggdtctaaaaggttgatcttcccaggcttaagtttcataaaatttgtaaactataattcccatcaacttatgcatgaacaaactctcctaccacacatatcta

SEQ ID NO: 18921 - DNA, 201 bp, Homo sapiens
cgagtagttgggactacaggtgcctgccaccacatccggctaattttttgtattttgtttgtttgtttgtttgtttgtagagacggggcttcattgtgttagccaggatggtctcgatctcctgacctcatgatctgcccaccttggcctcccaaagtgctgggattacaggcgtgagccatcgcacccggccccagccct

SEQ ID NO: 18922 - DNA, 201 bp, Homo sapiens
agatttcaggaggtctatagacttggatcagaaaaataattacatctgtattttcactcaactcagactgaaatttagcattttcttctatttgaatgtaracaacaaatctcagtagtactagtagcacttgttactttgttaccagtagaaagtatagtttttttaaattatatctcagttttcacaggtgtcttgaaa

SEQ ID NO: 18923 - DNA, 201 bp, Homo sapiens
ggagtgcagtggcgtgatctcggctcactgcaagctccgcctcctgggttcaagccattctgctgcctcagcctcccgagtagttgggactacaggtgccygccaccacatccggctaattttttgtattttgtttgtttgtttgtttgtttgtagagacggggcttcattgtgttagccaggatggtctcgatctcctga

SEQ ID NO: 18924 - DNA, 201 bp, Homo sapiens
cattagggcctaaaatgtaccaggtattagggacacaggataacaaggcagcaaaggatcattatattcagatgcaaaaggaaatgtaataaatataaaaygtataaaaagtaagtagccagtttcaaataataatcagtgtcattctgtcaacacttattttctaagtatgtactccatgctaaatactaatctataaag

SEQ ID NO: 18925 - DNA, 201 bp, Homo sapiens
ttcagccctgtccatgttggaaaggctttgtacaccccagagatacatgtactccagtttgaaaattgctgatgtagtgtgtatctagtgtcaatcagcckgtgttcaaataacagctctacatcttgctagctgaatgactttgggcaatttatttagcctaactatacctcagtttcctccttggtaaaatgggagtga

SEQ ID NO: 18926 - DNA, 201 bp, Homo sapiens
agagtagaaggcatttagctttagcaatgccagtgaattttgtgaactctttcaagttatataccaaaaccttataataatctttcatcaaaaactgattyatcagcactcaacttgattagatgctcctttaatttggttgaaagaattataaatcttgacttccaaaaagatttttcatgaaagtactttatctacaca

SEQ ID NO: 18927 - DNA, 201 bp, Homo sapiens
tgcctgcttgtctgtctgtctttctttcttttccttctttctttctttcttttctttctttttctttctttctcttttcttcctttcttcctttctctttyttttctttctttctttctttcctctttcttctttccttcttttccctccctccctccctcccttccttcgttccttccttccttccttccttctctcttt

SEQ ID NO: 18928 - DNA, 201 bp, Homo sapiens
aaaataagaagttaaaaaatatcacttcttttgttttgagacggagtcttgctctgttgcccaggttggagtgcagtggtgtaatctcggctcactgcaayctccgcctccggggttcaagcaattatcctgcctcagcctctctagtagttgggattacaggtgcgtgccaccacacccagttaatttttgtatttttag

SEQ ID NO: 18929 - DNA, 201 bp, Homo sapiens
gcacacatttttaaaataagaagttaaaaaatatcacttcttttgttttgagacggagtcttgctctgttgcccaggttggagtgcagtggtgtaatctcrgctcactgcaatctccgcctccggggttcaagcaattatcctgcctcagcctctctagtagttgggattacaggtgcgtgccaccacacccagttaattt

SEQ ID NO: 18930 - DNA, 201 bp, Homo sapiens
accctgatccattcctcctcatcgagtgggacctttctgtgggggcttcaggtactccagccagggttctaaagacagagctttgatctctccctgggacygagctcctggggggcaggggtgtctgccatctctgcagtttggttgactctgccactccaacctgctggctttggagaatacaggtgatccaggtgagga

SEQ ID NO: 18931 - DNA, 201 bp, Homo sapiens
ccattttacgttcccagcaacactgctaaagtctaacccgcacttttaatcacaatatactgccttcttttcataaactttaaaaaagttaaccttcaatyggtttctaattgctagtttttttctctccatagaactagacacagtttggaaattttctcacccttaggttgcaaccttgtttccaaggctacttcatgt

SEQ ID NO: 18932 - DNA, 201 bp, Homo sapiens
tcaagctatcctcctgcctcagactcccgagtacttgaaactacaggtgtttgccaccacaccaggctaatttttgcattttttgtagagacaaggtttcrccatgttgcccaggctggtctcaaactcctgggctcaagcaatcatcccatgtcagcctcccaaagtgctggaattactggtgtgagccaccatgcctag

SEQ ID NO: 18933 - DNA, 201 bp, Homo sapiens
ggaaaatgcttccaaagattaacaaaatcttaagttatgaaggattaattaaaacttcattgtagagtctagaggtaaaaatagaccaaatatagaaagamgacgtaacttgcatctgtgtttaattaatacataatgccctgaggaatttagctacatattattattgccacctgttaaacatctatgtctactcaggct

SEQ ID NO: 18934 - DNA, 201 bp, Homo sapiens
atagtattggtctttttgtgactagcttatttcacttaccataacgtcctcaaggatcattcatgctgtagcatgtgacaggattttcttcccttctcagrctgcataatattctgttgtatttatataccacattttgtttacctgttcatcccttgatggacatttgggtagcctcgatctctcagctattgtgaatag

SEQ ID NO: 18935 - DNA, 201 bp, Homo sapiens
taccacattttctttatccaatctctcattgatggacatttaggttgattccatatctttgctattgtgaatagtgctgcaatgaacatttgcatgcatgygtctttatggtagaatgatttatattcctctgggtatatatccagtaatgggattgctggcttgtgaaattctttatatgtctagatcagaggactttgt

SEQ ID NO: 18936 - DNA, 201 bp, Homo sapiens
gttgcagaggtcaggtcccctgaggtgggggctggctgggccgtgagataagcgaggagcacataggatgtcatctccacctcagcagagggagcctgggkttggtaaagatgccccactggtgccttgggtctctgagggcgctcccaatggacgaggttgtcttaagggtgagaaaaaggagataattgtaactcatca

SEQ ID NO: 18937 - DNA, 201 bp, Homo sapiens
gacagcatctcagtatgttgcccaggccggtttcaaccccctgggctcaaacaatcctcccaccttggcccccaaagtgttggggtttcaggcatgagccrctgcgcccagccttgttattttctattctattgttttgtttgcttatcattcttggcttccaacagcaatttttaaaaactgttttggggtagagggagt

SEQ ID NO: 18938 - DNA, 201 bp, Homo sapiens
acatgaaatagtagagtttgtactcattaaattgaaaaaaaaaatacagtaatccttgaaataccaaaggctgacatggatgtgaaacaatgggaaccaawatacactgctgtgggaagccaactgctctttggcaatattcagcaatggggaagatgtgcttagcccactaatcagtcattatgcttctcaaagcataat

SEQ ID NO: 18939 - DNA, 201 bp, Homo sapiens
tgttgcccaggctggagtgcagtggcgtgatttcggttcactacaacctccacctcccaggttcgagcgattctcctgcctcagcctccagagtagctggrattacaggcgcctgccaccacacctggttaatttttgtatttttagtagagacggagtttcaccatgttggccaggctggtctcaaactcctgacctcag

SEQ ID NO: 18940 - DNA, 201 bp, Homo sapiens
tcttctttttcacacacacgggcacatgtgcatgtgcatgactttatattttgtcatttacgcttagtcatatatatatatatatacacaaatatatatayacacacacacacacacacacatatatatatatatatatatatttttttttttaagaccatatttcgctctcgttgtccaggctggagtgcaatggcatga

SEQ ID NO: 18941 - DNA, 201 bp, Homo sapiens
ggagcgcagtgacatgatctcagctcactgcaacctccacctcccaagttcaagtgattctcctgcctcagcctcctgaatagccatgactacaggtgtgyggcaccatgccctgctaacttattttttgtagagacggggtttcaccatgttacccaggctggtcttgaattcctggactcaagtgatcctcccaccttg

SEQ ID NO: 18942 - DNA, 201 bp, Homo sapiens
tgttttgaccttaaagaggaggtagagacagagactggggtagaaagtttattcaaagggataacaacagggaactctccaaacctagagaagaatatcamtattcaagcacaagaaggttatagaacaccaagtagacttaactcaaataagactacatttaataattgaacttccaaaggtcaaggataaagaaaggat

SEQ ID NO: 18943 - DNA, 201 bp, Homo sapiens
gcatatgttaacaccccattcccaacaaatcgaacagtgggcacagactaggagggtactggaagaccacatgctcaaggatgctgatcttggagggggcrgggtgcgtgtgaggaattggagccattaatgagatcgttcaacctcaggacttaagcaaacacatactacttgccttgtggctaatttgactatttcttt

SEQ ID NO: 18944 - DNA, 201 bp, Homo sapiens
tagtctatttgcttcagttgctgccaaacatcgacagcctttcaaaccaggatccttccttatttagagaagtttgcaggagggcttccatttccatacaycggattaaatgcttttccttctcacctgtttaggctaatggccttcagtgttatgcagagtaaagacattctgtagcctccattcagaagaaccattttg

SEQ ID NO: 18945 - DNA, 201 bp, Homo sapiens
ggcccctgttgcatatgttaacaccccattcccaacaaatcgaacagtgggcacagactaggagggtactggaagaccacatgctcaaggatgctgatctyggagggggcagggtgcgtgtgaggaattggagccattaatgagatcgttcaacctcaggacttaagcaaacacatactacttgccttgtggctaatttga

SEQ ID NO: 18946 - DNA, 201 bp, Homo sapiens
tctaggaaattaattcagttaactaatatttattggacattttctattttccagggattacgaaatatccctcttctacatttatcatttagacttcaatygtcttcactgaaaactgaggggcttagttttaaagttctttttttttcctttaaatatctaagagcctataaatccactcaatcttcattttctcccaac

SEQ ID NO: 18947 - DNA, 201 bp, Homo sapiens
cgagtagctgggactacaggcgcctgccaccacgcccggctaattttttgtattttttagtagagatggggtttcactgtgttagccaggatggtctcgayctcctgacctcgtgatccgcccgccttggcctcccaaagtgctgggattacaggcgtgagccaccgcgcccggcccctgttgcatatgttaacaccccat

SEQ ID NO: 18948 - DNA, 201 bp, Homo sapiens
tcctgcctcagcctccccgagtagctgggactacaggcgcctgccaccacgcccggctaattttttgtattttttagtagagatggggtttcactgtgttrgccaggatggtctcgatctcctgacctcgtgatccgcccgccttggcctcccaaagtgctgggattacaggcgtgagccaccgcgcccggcccctgttgc

SEQ ID NO: 18949 - DNA, 201 bp, Homo sapiens
aggaggattcatgttcttgcccgggatagtctcgaactcctggactcaagaaatcctcccacctgagcctcctaaagcattgggattacagtcattagccmccgtgcccaggtttttttttttttttttttttaaggctagttattgaaagcagtgggagtggagaagaaacaaatcggtaactggttgtgatcagtctgt

SEQ ID NO: 18950 - DNA, 201 bp, Homo sapiens
tgctgctccgcatgcctctcatgcaggagccagctagcccaggtatattcttatggcagtgatgaggtgcaagtgcaaaagctgatgttcagggcttttcyaaacctctgtatattgcatatgtttttttcttttttttttttttgagacagagtctcactctgtcacccaggctggagtgcagtggcgtgatctcggctc

SEQ ID NO: 18951 - DNA, 201 bp, Homo sapiens
cgttaaaatctttctttctttctttttttcccctgtagagaggaggattcatgttcttgcccgggatagtctcgaactcctggactcaagaaatcctcccmcctgagcctcctaaagcattgggattacagtcattagccaccgtgcccaggtttttttttttttttttttttaaggctagttattgaaagcagtgggagt

SEQ ID NO: 18952 - DNA, 201 bp, Homo sapiens
gggcattcagtcaggcagctctgctgatttcgatttccagaactgtctgcagatcggctggccataagctgctgctccgcatgcctctcatgcaggagccrgctagcccaggtatattcttatggcagtgatgaggtgcaagtgcaaaagctgatgttcagggcttttccaaacctctgtatattgcatatgtttttttct

SEQ ID NO: 18953 - DNA, 201 bp, Homo sapiens
aaattatactttttaaaaaacaaaatactttcctatattggctatttaagttgcttcaagatttttactgttgtaaataatgatgagccacttcctccctytcacccaggacaaaaaaagaaaaaatatatataatgatgccgttaaaatctttctttctttctttttttcccctgtagagaggaggattcatgttcttgc

SEQ ID NO: 18954 - DNA, 201 bp, Homo sapiens
gtagctcggggtacaggcacctgccactatacctggctaattctttaaaaatttttttagagacacgaagtctcgctttgttgtacacgctgtttctgaaytcctggcttcaggtgatccttccgagtggacctcccgaagtgctgggattacaggcatgagccaccatgcctggccaagttcatttttaaattctgactt

SEQ ID NO: 18955 - DNA, 201 bp, Homo sapiens
cggggtacaggcacctgccactatacctggctaattctttaaaaatttttttagagacacgaagtctcgctttgttgtacacgctgtttctgaattcctgrcttcaggtgatccttccgagtggacctcccgaagtgctgggattacaggcatgagccaccatgcctggccaagttcatttttaaattctgactttagtaa

SEQ ID NO: 18956 - DNA, 201 bp, Homo sapiens
gggtacaggcacctgccactatacctggctaattctttaaaaatttttttagagacacgaagtctcgctttgttgtacacgctgtttctgaattcctggcytcaggtgatccttccgagtggacctcccgaagtgctgggattacaggcatgagccaccatgcctggccaagttcatttttaaattctgactttagtaaga

SEQ ID NO: 18957 - DNA, 201 bp, Homo sapiens
atattagggtcttggactgccagaactccctgccagtggcactccctgggagagaaggcctgttcccacacccctctctccagctttctccacctggaccrgatcagttgttctcccttactcccctctaggatccagaattcctggtttgactatcaaaagtaacactacttataattatttataggatacatcattgac

SEQ ID NO: 18958 - DNA, 201 bp, Homo sapiens
tatatgtagatccagactcgagtgatataggctgcaaataaattgctagtgaatttatgaattattagaaaagaaaggacattcattatgatttaatcgcrgttgaatgtaggcagcacagagggcttatactgtgtcttttttttttttttttttaaatatacggtgtctattttgctcaccactctatgcccggtgcct

SEQ ID NO: 18959 - DNA, 201 bp, Homo sapiens
cccaaggtatggagaatagcggccgtgcagccaataatgtcactgggctcacttgggctaaagtgggtctcccctttccttccctgccctccctctacccygaaactttccttaactactgaagatcaggccttcttggccccaacacagaaatccctgtggggtggggggcaaggagaactgttgtccactcctgtctgc

SEQ ID NO: 18960 - DNA, 201 bp, Homo sapiens
taattctttaaaaatttttttagagacacgaagtctcgctttgttgtacacgctgtttctgaattcctggcttcaggtgatccttccgagtggacctcccraagtgctgggattacaggcatgagccaccatgcctggccaagttcatttttaaattctgactttagtaagaaagtttagaaatgagagataaaatgtagc

SEQ ID NO: 18961 - DNA, 201 bp, Homo sapiens
aaaataaaaaatacatgtaacaatatgccagcatcagtactcttgtgctctggtgcaattgttaagtaatatcagggttatgtgaatgcagtagccctgcracaatagctctgataaccaagaaggctactaaatggacagcatggatatgctgaacgaaggcagaattcacatcctgggcagacagggcagggtggcatg

SEQ ID NO: 18962 - DNA, 201 bp, Homo sapiens
gctcatgtgggtacaggagcagatcacctgtgttgagaaggttgaggattgagaagtctgggcctgtcccatggatctgacatccaggggtcccagccttyttgttttctacaaaagagaaactcagagcctgtgcccctggaattttcaaataaagcatgtgcttgtcccaaggtatggagaatagcggccgtgcagcca

SEQ ID NO: 18963 - DNA, 201 bp, Homo sapiens
ttggcctaaaatgaatcacttgactccttagtaattctattttttcacctgtaatatggggatagtaatataaagcctattcaaagtgcatgaggacaggyaattctcagaattcaaaattttcaagattttagaaagctattatggtacatatgactggatattatgagacaccccattttgagttgggttttcagccac

SEQ ID NO: 18964 - DNA, 201 bp, Homo sapiens
tgaatgagcagatgctgcctcgttgcagtctggtagtgtaattccaggctgcccatgtggacttcgacttctgcccctgcccagggcagagaccaccgtgytgctttatgcctcgctggtgagagggggtcataaacagtttgtgctccatgaaccgttcctgcccacctccaaggtcgtgtttctgctccctctcttctc

SEQ ID NO: 18965 - DNA, 201 bp, Homo sapiens
aaaaagtgagccttcaactagaaacaggaatgaacagaaacattttggaaacaatccaaaaagaaccaggaattaaaaatataatggggtgactcacatcygtaatcccagcactttgggaggctaaggcgtgtggatcctttgagatcaggagtttgagaccagcccagtcaacatggcaaaaccccgtcactacaaaaa

SEQ ID NO: 18966 - DNA, 201 bp, Homo sapiens
acatgaatgagcagatgctgcctcgttgcagtctggtagtgtaattccaggctgcccatgtggacttcgacttctgcccctgcccagggcagagaccaccrtgttgctttatgcctcgctggtgagagggggtcataaacagtttgtgctccatgaaccgttcctgcccacctccaaggtcgtgtttctgctccctctctt

SEQ ID NO: 18967 - DNA, 201 bp, Homo sapiens
tcctacagcacctgtgattccagcggaggatttaccaagctgggttcctgttttctgttgaccctcccatctcccccatcagagtgtaagatctctggaargctggaccctgtgctgggtgcttccaactccccaccaccacaccccattatctattctctttatcactgacaaaaagtacaattttatttggagcagcca

SEQ ID NO: 18968 - DNA, 201 bp, Homo sapiens
aagagacataatggttccagggcagcctaactgtacagtacccttaagaaaagtattcgtatctatatctctactgcagtaggccaagtgctgtggcacaygcctaaaattgtagcactttgggaggctgaagtgggaggactgcttgagcctaggtgtttgaggccagccctagcaatatagggagaccccccatctcta

SEQ ID NO: 18969 - DNA, 201 bp, Homo sapiens
taccaaacacacaagaaggcaatcactgtgagagtcagcagaaacaactgatttagatttctcaaatatttctagtattagaattataattacatatataygacataaaacagctgtgtatgaagtgtttaaagaagtatataatttaaaaagtgagccttcaactagaaacaggaatgaacagaaacattttggaaacaa

SEQ ID NO: 18970 - DNA, 201 bp, Homo sapiens
agatatagaaagagagaaaatagtgtgttcagtttactacattaagtttgagtggctgggtgtggtggctcacacctgtaatcacagcactttgggaggcygaggcgggtggatcacgaggtcaggagatcgagaccatcctggctaacacggtgaaaccccgtctgtactaaaaatacaaaaaattagctgggtgtggtg

SEQ ID NO: 18971 - DNA, 201 bp, Homo sapiens
agtaaatacacagttgtgatagtgaaatgtcttctatgaactagaaaataagaaaatagacacttaaagttcagagtagagaaggaaactcaaagagacakaatggttccagggcagcctaactgtacagtacccttaagaaaagtattcgtatctatatctctactgcagtaggccaagtgctgtggcacatgcctaaaa

SEQ ID NO: 18972 - DNA, 201 bp, Homo sapiens
catgcacctgtatgtttttcgcagcactattcacaatagcaaagacatggaatcagcctagatgttcatcaatggtagagtggataaagaaaatgtggtcyatgtataccatggaatgctatgtagccataaaaaagaatgcaatcggcccagtgcggtggctcatacctgtaaacccagcactttgggaggccgaggtgg

SEQ ID NO: 18973 - DNA, 201 bp, Homo sapiens
atgctaaccatcactaatcatcagagaaatgcaaaatcaaaaccacaatgagataccatccacactagttagaatggctattattaaagtcagaaaataakagatgttggcgaggtagcagagaaaagggaatgctaacacactgttggtgggaaggtaaattagttcagccactgtggaaagcagtttggagttttctca

SEQ ID NO: 18974 - DNA, 201 bp, Homo sapiens
gtatgctatgatggtgaaatcaaagaagtgaagaaccaccgttgtagataatgagcaaattggggatcaaaggataggaaacgttgatgaggtggaagagygagtggtttgattggaagaagtgcagagcctgatttggaagaatcagaggtgcagttattggtgataacatgacaaatgatatgggtgtgagtggctcat

SEQ ID NO: 18975 - DNA, 201 bp, Homo sapiens
ttcttcctccttcctcctccttcttcttcctttttcttttttgagacagtcttgctctgtcacccaggctggaatgtagtggtatgatcatagctcactgyagcctcgacctccccaggcttaggtgatcctctcaccttagcctcccgaggagctaagaccataggtgtgagccaccatgcccagctaatgttttaattt

SEQ ID NO: 18976 - DNA, 201 bp, Homo sapiens
tcagctatgagcgtgcatagagaaggcacagagttaggttttatgaccaaaagagagagatgagacagaattaaatgtgtttgcaagtcagtaagtatgckatgatggtgaaatcaaagaagtgaagaaccaccgttgtagataatgagcaaattggggatcaaaggataggaaacgttgatgaggtggaagagtgagtgg

SEQ ID NO: 18977 - DNA, 201 bp, Homo sapiens
cactgcctctccacgagttacagctgaaactagtccccagtcagcacagatctgtcatttctccagttctcctcagctatgagcgtgcatagagaaggcasagagttaggttttatgaccaaaagagagagatgagacagaattaaatgtgtttgcaagtcagtaagtatgctatgatggtgaaatcaaagaagtgaagaa

SEQ ID NO: 18978 - DNA, 201 bp, Homo sapiens
aggaagtcgaggctgccatgagctatgattgcaccactgccctccagcctgggagacaaagcaagactctttctctaaaaaaagaggtaaaaaaaaaaaaaggaacgagattgtgtcctttgcagggacatggatggagttggaagctgttatcctcagcaaactaacacaggaacagaaaaccaaacaccgtatattctc

SEQ ID NO: 18979 - DNA, 201 bp, Homo sapiens
gttggtcaggctggtctcaaactcctgacctcaggtgatccacctgcctcggcctcccaaactgctgagattataggtgtgagccaccacacccagccttytttcttctttactctcccaactcctccactgcaactcccattctacagagaaggcattatctcctttgggctaatgttttaccatactgaaaagacctct

SEQ ID NO: 18980 - DNA, 201 bp, Homo sapiens
agtggcgccatctcagctcactgcaacctctgcctcccgggttcaagattctcctacctcagcctcccgagtagctgggactacaggcatgtgccaccacrcccggctagttttttgtatttagtagacatggggtttcaccatgttggtcaggctggtctcaaactcctgacctcaggtgatccacctgcctcggcctcc

SEQ ID NO: 18981 - DNA, 201 bp, Homo sapiens
attgcttcctcttttctgcccagcatttcttcttcttctttttttttttttttttgagacggagcctcactctgtcgcccacgctggagtgcagtggcgcsatctcagctcactgcaacctctgcctcccgggttcaagattctcctacctcagcctcccgagtagctgggactacaggcatgtgccaccacgcccggcta

SEQ ID NO: 18982 - DNA, 201 bp, Homo sapiens
gggaggtggaggttgcagtgagcccagatcatgccactgcactccagcctgggtgacaagagggagactgtctcaaaaaaaaaaaaaaaaaaaaaaaaaaagatggtcatggtcatcccagggtgggggcaggcttgaggactctgcggtggtctctcaggatctactccagatccaggctggcttccagaaatactgcaa

SEQ ID NO: 18983 - DNA, 201 bp, Homo sapiens
cttgtctgcccagaacctggcaggagcatttaataaagatgttcagcttggcgcagtggctcatgcctgtaatcccagcactttgggaggccgaggcgggyggatcacttgaggtcaggagtttcagaccagcctgaccaacatggtgaaaccccatctctactaaaactacaaaaattagccgggcatggtggcgggcac

SEQ ID NO: 18984 - DNA, 201 bp, Homo sapiens
atctgaaacagttctggtcccaaacattttgcattaaggatactcaacttgtattaagccgtcaagtctgtcagtagttacctaatataaaggtacttgaracacaggtcaaaagataaattttcttttcccacacactggcaagagtttctaatagattgatcctgtttatacaatttgcagtgcccttaaagagtctgt

SEQ ID NO: 18985 - DNA, 201 bp, Homo sapiens
aggcagaggttgcagtgagctgagatcgcaccactgcactccagcctgggcaacagagcgagaccctgtctcaaaaaaataaataaattatagcttgtggyagattgtatgttccaaaagcagccacaatatcctcctgatcctagtgctcttctgcaatgtgatcttgtcactctcctttgaacctgggccctgtgactg

SEQ ID NO: 18986 - DNA, 201 bp, Homo sapiens
tagtgtcctagctttgagctgtctacttgttcttgcccaccactggatgttcagctgcacttttctctaaaaggtttggtactccactccaaaaaaaattrtatttttaaaatataggaaacgatgatatatggaggacctactatgtgccaggcaccacaccacatatgttacagacattacctcattcgatcttcacaa

SEQ ID NO: 18987 - DNA, 201 bp, Homo sapiens
cttgggttctcagcctccctagtagctgggattagctaatttgtcagtttaattcttaaaccagctgcagaacctaagagagtagaaggaagttttcctckcctacactaggttgtatgttagttttctgttgccactggtaatgatttgggacacaacaataagccacaaatttagtggcttaaaacaacacaaatgtat

SEQ ID NO: 18988 - DNA, 201 bp, Homo sapiens
agcctcccgagtagaaaagcatgcctttctaacttgtagttaattttcttcttttaacacatcagtctggtcttatttctaggctttatctcatacgacayttactgtgtcctcacatgcacatactcctggccccaacctctctcagaattttatttttcctagtgtcctagctttgagctgtctacttgttcttgccca

SEQ ID NO: 18989 - DNA, 201 bp, Homo sapiens
caggggataaaaaagaaagcgacagttcagggactctggcgataaagctgccggagtccgcggcggcggaggcggctgcggcgagcaaggaggctgacgasgcacaatgcaaagacggcttttcagagcagccagtggggcaggacaatgtttttcatcaaatgtccttagatttggaggagggtaagagttgtttttttt

SEQ ID NO: 18990 - DNA, 201 bp, Homo sapiens
gttgtgttttcttttatttgcaaaagcatgcatttctttttcttttcttttttttttttttttgagacggagactcactctatcacccaggctggagtgcratggcgcgatctcggctcactgcaacctctgcctcttgggttcaagcgattcacctccctcagcctcccgagtagaaaagcatgcctttctaacttgtag

SEQ ID NO: 18991 - DNA, 201 bp, Homo sapiens
ctgatataagtatagctactcctgctctttttttgttttcattggcatgaaatatctttttccattcatttattttcagtctatttgtatctttataaatraagtgtgtttcttttaggcaacagctcattgggccttgcatttttatccattcagcctctccatgtctttgtgttgtgtgtcacccaggccgaagtgcag

SEQ ID NO: 18992 - DNA, 201 bp, Homo sapiens
ggctgaggcaggaaaatcacttgaacctgggaggcggaggttgcagtgagctgagatcacgccattgcactccagcctgggcagcagagtgagactacatytcaaaaaaaaaaaattgtaaagacagcccaaaaatacaaaaaaaattagccaggcatggtggtgcatgcctgtagtcccagctgcttgggaggctgaggt

SEQ ID NO: 18993 - DNA, 201 bp, Homo sapiens
aaaatcaaacaatatatattaaagttaattatacaggcatagagagtagagagacataatggctactaaatgtattagtagttatctctaaacagttgagktgctgttcatttttactttctttacattttcctgtattgcttaaattttctataaaatgcatatcagaatttaaaaatatagttatattcatattcattt

SEQ ID NO: 18994 - DNA, 201 bp, Homo sapiens
tgggcttcttccaagaagcaccacatttccctgaaaataaatggcagatgaattatttcttgagattatgaaaatctgttagatgaaagcttgcctttttstcatgttcaaaacaatgctaaatgcttataattatactcccaatgaattacttctttcactggcttcctttgctctggcaaaggtggattttttttccat

SEQ ID NO: 18995 - DNA, 201 bp, Homo sapiens
gaagtttagcaattgaaaaaaaataacctatctgactactaccctttaggtattttagagagtagggaaaaggagaagagagaaaaagaaagggctgaaasgtgggaacaatatacaacctattaaaaccagagaaactggggagctgtggtggcaaaaaaaaaaaaaaaaaaaaaaagacacagaaatgctcaccacttt

SEQ ID NO: 18996 - DNA, 201 bp, Homo sapiens
gctgatttttgtatttttagtaaagacggggtttcaccatgttggccaggatgctcaaacccctgacctcgcgatccgcccgcctcggcctcccaaagcgmtgagattaccggcgtgagccaccgcgcctggcctgggcacagagttaaaaaaaaaatactggtaacagaaaacttgttggcgtgtttcagttttcagagt

SEQ ID NO: 18997 - DNA, 201 bp, Homo sapiens
gatttaagaatttcaataaaatagtgaaagaagaaataaaagaaaaaagaaaaacaacagtgaaagaaatagaatcaaggcattaatccaccaagaaaagsgttagctgtgtgttcactctgaccttgagtctattaccacatggaaattttttaggaattttacaacggaaggaaaaaagggaagaaaaaagagatactc

SEQ ID NO: 18998 - DNA, 201 bp, Homo sapiens
ccactccactccactccactgcctctccacgagttacagctgaaactagtccccagtcagcacagatctgtcatttctccagttctcctcagctatgagcrtgcatagagaaggcacagagttaggttttatgaccaaaagagagagatgagacagaattaaatgtgtttgcaagtcagtaagtatgctatgatggtgaaa

SEQ ID NO: 18999 - DNA, 201 bp, Homo sapiens
aaaggcacacaggcatgcagtgtggtgtgggtagtggtttatttccactatgaagaaccaaaggaggtaagcaaggcccaaaaatgtttcttagacttcaattattggtatcaaaagttagacaatggtgtttaaattccccttttattcttccactagttctttgaaaaaagaatcatactctgattttcatactgtgct

SEQ ID NO: 19000 - DNA, 201 bp, Homo sapiens
tgtcttttggaagctattgttgatagaaagtgagctttccttttttgtcttaaactttttttttttttttaaacaggatctggctctgttgcccaggctgyagtgcagtggcgtgatctcagctcactgcagcctctgcctcccaagttcaagcgattcttgtgcctcagcctcctgagtagctgggatgacaggcacgtg

SEQ ID NO: 19001 - DNA, 201 bp, Homo sapiens
ctgagccccggggccacgggaagaacttgcagcgacgtcatccctgccccggacacagtcccgggcccagggaggacctggaacattcccttcctcccccscccccccgcccccgcccatcagcccagcctgcaaggaggcgccaccggacctgcacactcaggagcaggtgagccagggacaagcaggagccccgcccct

SEQ ID NO: 19002 - DNA, 201 bp, Homo sapiens
acagctgctgcaaaaactctaaagcaagacccagcttcaggtcttcttcttcttttttttttttttttttttgacacagggtctcactctgttgcccaggytggagtgcagtgacatggtctcggcccactatagcctccacctcctggactcaagtgatcctcccacttcagcctcccgagtagctggaactataggcac

SEQ ID NO: 19003 - DNA, 201 bp, Homo sapiens
caaaggcacacaggcatgcagtgtggtgtgggtagtggtttatttccactatgaagaaccaaaggaggtaagcaaggcccaaaaatgtttcttagacttcaattattggtatcaaaagttagacaatggtgtttaaattccccttttattcttccactagttctttgaaaaaagaatcatactctgattttcatactgtgc

SEQ ID NO: 19004 - DNA, 201 bp, Homo sapiens
tgatcggagaacaatgtgaaccattgttctcaaagggctatttctattatttttggtatgattaatagtttgtcacaatgtacaaatattagtgattgaarctttcttgtaattctgaatatgctcataacctgtagagattctctggaaggggctcaagcagtagcttttctgaagcattttccctctgaatataggagg

SEQ ID NO: 19005 - DNA, 201 bp, Homo sapiens
actgctggtttgtgagagctgtatgtagaggaaaacaaaaattagccgggcgtggtggcaggcacctgtaatcccagctactcgggaggctgagacaggaraatcgcttgattctccacccaggaggtggaggctgcagtgagcagagatcgtgggctgcactccagcctgggcaacaaagtgagactctgtctcaaaaaa

SEQ ID NO: 19006 - DNA, 201 bp, Homo sapiens
tttgtagatatccttttttttttcaatctatgaactcaaatatatgaaatatgtctgtaccctccttcttttggctgcccagctaagctcatcccaacaasgcttcccagctttcttcaggtcaccaccaatccaatccaggctggaagtgatgagactgagctgtggaatacaaggagcgtgcatggggtgctcttctgg

SEQ ID NO: 19007 - DNA, 201 bp, Homo sapiens
ggaggctaaggtgggcagatcacttgagcccacgagtttgagaccagcctgggcaacatggcaaaaccttgtctccacaaaaaatataaaaattagacagstgtggtggtgcacacctatagtcccagacagctacttgggaggttgaactggatcacctgagtctagggatggtgaggttgcagtgagctgtgatcacgc

SEQ ID NO: 19008 - DNA, 201 bp, Homo sapiens
agtatatctcgcacctaaacaaattaagcatgggtgggcacggtggctcgcgtctgttagctctttgggaggctaaggtgggcagatcacttgagcccacragtttgagaccagcctgggcaacatggcaaaaccttgtctccacaaaaaatataaaaattagacaggtgtggtggtgcacacctatagtcccagacagct

SEQ ID NO: 19009 - DNA, 201 bp, Homo sapiens
gaccttattcacatatatagtcttccttattttttgatgaacttacactataagcgtccctctaggtacatgccatccctctcccacaatctcagacaagmaatgtttttactgtcattcagttctaactatttcttaatttgttgggaaacacatggaatttttaaagccatccttttgttcctgatgtctaattttgtt

SEQ ID NO: 19010 - DNA, 201 bp, Homo sapiens
cctgggaggcggaggttgtagtgagccgagatcatgccacttcactccagcctgggcaacaaagcaagactttgcctcaaaaaaaaaaaattgtttttgcrattatttaatcagactttcttaagactttgacctttatgcacttttaccttccttaataactcttcaaaagaggccttgaaaaaaatgcaatgactagca

SEQ ID NO: 19011 - DNA, 201 bp, Homo sapiens
gcctctaactcctgggctcaggtgatcctcgacctcagcctcccaagtagctgggactacaggcatacactaccatgtctggctttttttttttttttttytttggagatggagtttcccttgttacccaggctggagtgcaatggtgcgatctcggctcactgcagtctctgcctccagggttcaagcgattctcctgcc

SEQ ID NO: 19012 - DNA, 201 bp, Homo sapiens
agtatgtgattatatatatgtgtgtgtatacatatgtaggtatatatacatgtatatatgtgcatgtatgtacatatatgtgtgcatatatgtatatattmatacacacaaactcatgattggattatttaaatgggctgcaaggttgtagcagatatatgacatgcaacttgtaatagtcttggttcccttttcctacct

SEQ ID NO: 19013 - DNA, 201 bp, Homo sapiens
tagtctcatctctctagaaggatattcacccatactcaccttgtccactttgtgccagagttgaacattcttaagaaattaagaaggtgattctttgccarccatattccagttctttatttaggagctatattatcagctttgcttatggctccagaagtggccattaatacctggagctaaaacactgttttggtttag

SEQ ID NO: 19014 - DNA, 201 bp, Homo sapiens
gtggccaggtgcattgcctcaggtctgtaatcccagcacttgggaggccgaggcaggtggatcactggaggtcaggagttcaagaccagcctggccaacgyggtgtaacttgtctctactaaaaatacaaaaattagctagctgtggtggcatgtgcctgtaatcccagctactcgggaggctgaggcaggagaatcacct

SEQ ID NO: 19015 - DNA, 201 bp, Homo sapiens
ccaatatggctattgtggaagtgaagatgctatctgggttcagtcccatggagggcaccaatcagttagtaagttacttctgttttcttcatttatctagytgtgaggggacctaacgttataatttaaaaaactggtaaaatgggcatcatggcgtgtatacacacacacacacaaggcatgtatatacatacatatata

SEQ ID NO: 19016 - DNA, 201 bp, Homo sapiens
gccattttgataaatacatgaattaatgagtgagtttcgagagtagggggagagagaataactgggcatccccttctgtagatcctcagtcttctagtctyatctctctagaaggatattcacccatactcaccttgtccactttgtgccagagttgaacattcttaagaaattaagaaggtgattctttgccaaccatat

SEQ ID NO: 19017 - DNA, 201 bp, Homo sapiens
agaaaaacagtgaagttttaagtattccattttaacattgtttataattttttttttaactagaaatcagagatacatatgtgagacattttatagtttarcataagtgtgccttggcttgtttttgtccattaacttagttcaggactgtaacacttgaaataataatgcctaaagatgtcatgatcttaagacgaggaa

SEQ ID NO: 19018 - DNA, 201 bp, Homo sapiens
  misc_feature (1)...(201): n = A,T,C or G, or insertion/deletion polymorphism (see Tables 1-2)
agcccaggacttcacgaccagcctggacaagacagtgagacccccatctctacaaaaagaaaaaaaaaaagtaagaaaaaaattagcccagcatggtggcntgtgcctgtagtcccagctatcaggaggctgaggcagtaggattgcttgagcccaggagttcagtcgcatcactgcactccagcctaggcaacagagtga

SEQ ID NO: 19019 - DNA, 201 bp, Homo sapiens
tgtgtgtgtgttggggatgcagagtgcactgaagtaataggctcacatgtgttttcttcttcctgctctcagttatgtggggagccgtagctcttccaatrtggctattgtggaagtgaagatgctatctgggttcagtcccatggagggcaccaatcagttagtaagttacttctgttttcttcatttatctagctgtga

SEQ ID NO: 19020 - DNA, 201 bp, Homo sapiens
gagccgagatcacgctactgcactccagcccgggcaacagagcaagactgtgtctgggaaaaaacaaaaacaaaaacaaaaacaaacaacaacaacaacamgaatttagcacagtgtctggcatgtggaaagcactctataaatgttagctattttactatttcatcatagattcttataggacagtggccaccacttacg

SEQ ID NO: 19021 - DNA, 201 bp, Homo sapiens
ctactaaaaatacaaaaattagctgggcatggtggcatgcgcctgtagtcccagctactcaggaggctgagacaggagaattgcttgaacccaggaggcgraggttacagtgagcagagtttgcaccactgtactccatcctgggcaataaagtgagactctgtctcaaaaacaaaacaacaacaacaacaaaaaaaagtt

SEQ ID NO: 19022 - DNA, 201 bp, Homo sapiens
ctccaaaaaaaaaagggttgagagataatggaagattgagcaagacagattaacatgtttaaggctggacacagtggctcatgcctgtaatcccagcactytgggaggccacggcgcgtggatcacttgaggttaggagttcgagaccagcctgaccaacatggtgaaaccccgtctctactaaaaatacaaaaattagct

SEQ ID NO: 19023 - DNA, 201 bp, Homo sapiens
aaaaacagaaagaaagaaagaaaaaagttaaccaggcatggtggcacatgcctgtagtcccagctactcaagaggctgaagtggaaggactgcttgagccwgggaggttgaggttacagtgagctatgactgtgccactgcactccagcccgtgtgacagagcaaggctctgtctccaaaaaaaaaaaaaaaaagaagaag

SEQ ID NO: 19024 - DNA, 201 bp, Homo sapiens
tattcttctttccagttctgtattctcttcaagactggttgaagtaccacacacattattaattttttttttgagatcgagttttcactcttgctgcccargctggagcgcaatggctcaatcttggatcactgcaacctccacttcctgggttcaagcgattctcctgcctcactcagcctcctgagtagctgggattac

SEQ ID NO: 19025 - DNA, 201 bp, Homo sapiens
ttttttttttttttttttgagacgagggtcttactgtgtcacccaggctggagtacagtggtgaaatctaggctcaatgaaatctccaccttccaggctcmggtggtcctcccacctcagcctaccgagtagctgggaccacaggcgcatactgccaacacccagctaattttctgtatttttggtagagatggagtttca

SEQ ID NO: 19026 - DNA, 201 bp, Homo sapiens
tacaaagggctatagaagctcagggcccttgttcactagaagcaaggagacccctgaccccttcttccaaatatacttgtttgtctttgtctttattccckcattcgtcctcctttgttcagtccaccagggtccgtggcacagtggagcctgagggttgtgaccaacttttacaaataaagttcgttggccctcactcta

SEQ ID NO: 19027 - DNA, 201 bp, Homo sapiens
atcacgaatgcaggatgtggggaaactcacatctgcacctgccaccagaaggtatgctgagggcaatcactccctggcgccgtgctccttgaggttatctrctggaacatctggagcctactgttcaaagaaagcagttatgcaggcctgcactaagtgaaacagctgactgacaaccaccccctcctcattatttccttt

SEQ ID NO: 19028 - DNA, 201 bp, Homo sapiens
acttagagcctgagaaatttactatgtgaacctttacatgctggggaaagcctgagggtcatgaccaactcagcactccactggaggctatatgataaaaragcaaactgtttatcacgaatgcaggatgtggggaaactcacatctgcacctgccaccagaaggtatgctgagggcaatcactccctggcgccgtgctcc

SEQ ID NO: 19029 - DNA, 201 bp, Homo sapiens
ctcagagcctgagaaatttactatgacttagagcctgagaaatttactatgtgaacctttacatgctggggaaagcctgagggtcatgaccaactcagcaytccactggaggctatatgataaaagagcaaactgtttatcacgaatgcaggatgtggggaaactcacatctgcacctgccaccagaaggtatgctgaggg

SEQ ID NO: 19030 - DNA, 201 bp, Homo sapiens
tgattagccaacatctaaccacctcaatttatagtaaagaggactcctaaaactcaaacctgtttagcataacataaagtgacaaatagaaaacattgccwtttccaggaagaacaaaaaatcaataatttattcaaacatacattgagcgcctactatttgtcaggcctgtgacaggagctagtatggcattaagagtgt

SEQ ID NO: 19031 - DNA, 201 bp, Homo sapiens
agcatgacatcctgtctcaaaaactaaataaataggccgagtgcagtggctcacacctgtaatcccagcactctgagaggccaaggtgggtggatcacccraagtcaggagttagagaccagcctggttaacacggtgaaaccccgtctctactaaaaatacaaacaattagctgggcgtggtggcgcacgcttgtaatcc

SEQ ID NO: 19032 - DNA, 201 bp, Homo sapiens
ttatgctaaactgtttccctcaagtagcttcaagtctagaagtcagaaagacatgcttagaaatcatattaatactatctggccagccctacctcattacyacccaaaagtccaataaataaaaatggcaatttatgtacccacaggtaaagagtacacacatttcatactacagaattgctttctaaaggataaatttaa

SEQ ID NO: 19033 - DNA, 201 bp, Homo sapiens
atgatttcaagagatctcttggaaaccaataagaaacatgcaaatgccttttgcaaataaaaaaatttaagtcaacttttaatcatatgctctctaaattwaaaaaaaacttctttaatgaaagtgggccggttgtggtggctcatccttgtaatcccagcactttgggaggctgaggtgagtggatcacttgaagtcagg

SEQ ID NO: 19034 - DNA, 201 bp, Homo sapiens
taagtgaatttgagtatccataaactttaccttgagtatctactctttattgattacatcctcagcaacaagaaacaaaacaagagcaacccactgcaacyatagactggctgccagaaggtaagagtatgtgaggatctagtgcaaacaaggtaggaactgttaagagtccatgaatatttcagaagaataatgaaaaag

SEQ ID NO: 19035 - DNA, 201 bp, Homo sapiens
tttctgaacatgaattgattaggttaaccaagtaatctgtggatgttcagtagtaccttgttgatggtgattttctataaaagcatgctactggctgggtrtggtggctcatgcctgtcatcccagcattttgggaggccaaggcagccggaccacctgaggttgggagttcaagactagcctgaccaacatggagaaacc

SEQ ID NO: 19036 - DNA, 201 bp, Homo sapiens
tttttaaaaggacaaaggtcttgtggtcaaatcagtttagcgaatggtgcataccatatcttgctcttacagagtctcagtgcacactaacatattaaagkttctgagaaatccagaagaaaaaacaagtatgtaactttatttaacctaatatttcccaaacttttttttagtgactcacagaaacactccgtagaacta

SEQ ID NO: 19037 - DNA, 201 bp, Homo sapiens
gaatttgagtatccataaactttaccttgagtatctactctttattgattacatcctcagcaacaagaaacaaaacaagagcaacccactgcaaccatagwctggctgccagaaggtaagagtatgtgaggatctagtgcaaacaaggtaggaactgttaagagtccatgaatatttcagaagaataatgaaaaagtgtgc

SEQ ID NO: 19038 - DNA, 201 bp, Homo sapiens
cagccgtccagccctatgctttttattttatgccattatttaaatctgatgttccattcagttctctacagttggaagggtctagcttgggctacctttgkattgttcaaaatgcttttttaaaaggacaaaggtcttgtggtcaaatcagtttagcgaatggtgcataccatatcttgctcttacagagtctcagtgcac

SEQ ID NO: 19039 - DNA, 201 bp, Homo sapiens
caaagtgctgggattacaagcgtgacctatgcgtgcccagcctcttcctactttcttttgagagcaggccagtccattgagaaatccatcctctgtgtagmcaaggttagtggtgtggcacatgagctccagagttaaatgtcctgggttcaaattccagtcctgctgcagatgagccatgtaaccgtgagcaagctattt

SEQ ID NO: 19040 - DNA, 201 bp, Homo sapiens
catggctttctctttctttactggacactgtatagatgtcatgcaggtctgaacgtcacactgttaaataattacttaacaactgaccagaactaaggctstggtctagagctccaaaccagaagcaaaaaggaatggtgctgggctggggcactttcctctaacatcacccaaacccagaaaatgaggatcgtaagcccc

SEQ ID NO: 19041 - DNA, 201 bp, Homo sapiens
tccgtccaggtaccctgttaaagcttcaaagactctggatcagaatgatctctgctatacacacatacccaaagaataaacaaaaatgctattgctaatawctctcagtcccttgagggattaacttttagtcccttgatttgcaaatcaagctgtaaactatattaattcccccctttctgtacctttcctttcggatga

SEQ ID NO: 19042 - DNA, 201 bp, Homo sapiens
gctgcgatcgtaccactgcactccaggcctgggtgacagagtgagattctgtctcaaaaaaacaaaaaacaaacaaacaaaaaacccaacaacaacaacaaaaactcaccaggagtaggcagagacagtaatttacagttatagactatgaagaccaaatccagagaaatctccttagattctgctctgtggccatcattt

SEQ ID NO: 19043 - DNA, 201 bp, Homo sapiens
ggcctcttactgtgtcaccaaatccatctgggaaagccatttcctgtggtgaggactagtaggcagcccaacgtcttttgtaagaagtttactctattggkcactattctaggcacgtggtttatttgatattatttcatgtttacaacaaatcaatgagctaggtattggtatgccattattaatcccattttacagatg

SEQ ID NO: 19044 - DNA, 201 bp, Homo sapiens
ttgattgagatgctgacaccctccttcccttctaggaaaggaaaataaagggggaaggaaggtggagagggacaaaggagaggcgtgtggaggatgatagygcaggacttgcattctcagttctgcctcttaaatcttggaacctatttcttcatctaacagtataggactgatgtttatttttgtattagatcatatata

SEQ ID NO: 19045 - DNA, 201 bp, Homo sapiens
agctgcgatcgtaccactgcactccaggcctgggtgacagagtgagattctgtctcaaaaaaacaaaaaacaaacaaacaaaaaacccaacaacaacaacaaaaactcaccaggagtaggcagagacagtaatttacagttatagactatgaagaccaaatccagagaaatctccttagattctgctctgtggccatcatt

SEQ ID NO: 19046 - DNA, 201 bp, Homo sapiens
atgtctgtagaatgagaatacagatgaagcctgggtgcagtggctcatgcctgtaatcccagcactttgggaggccgaggcgggcagatcgtttgggcccrggagtttgagaccaccctgggcaacatggtgaaaccccatctctacaaaaaaaatatgaaaaattaatcaggcttgttagtgcatgcctgtagtcccagc

SEQ ID NO: 19047 - DNA, 201 bp, Homo sapiens
ttgatctcctggccttaagtgatcctctagtcttggcctcctgggctgctgggattacaggcatgagccacagtatccagcctgtttttatataacttttrtacatggtgtgagatataggttgaggttttttttttcttataaatgcccaattattttagaaccatttatttaaataagtatcctttttccattgaattc

SEQ ID NO: 19048 - DNA, 201 bp, Homo sapiens
caggcatgaaccttcacctttcttttagaaagagcgtgaatctctaattcaccagagtccccaccattccatctcatctgagttatctcactatctctgtkcttccctcatttacatcatctgtcacttacctgttgacatgtgagttttgacttttgattgagatgctgacaccctccttcccttctaggaaaggaaaat

SEQ ID NO: 19049 - DNA, 201 bp, Homo sapiens
gagctgcgatcgtaccactgcactccaggcctgggtgacagagtgagattctgtctcaaaaaaacaaaaaacaaacaaacaaaaaacccaacaacaacaacaaaaactcaccaggagtaggcagagacagtaatttacagttatagactatgaagaccaaatccagagaaatctccttagattctgctctgtggccatcat

SEQ ID NO: 19050 - DNA, 201 bp, Homo sapiens
gccaagctcagaaattcatcttcattgatcccaagaacatccaggatgctctcaagtggatggcaggaaaccagctccccagtggctgctatgccaacgtrggaaatctccttcacacagctatgaaggtgcggatctgtccaggagcctgcagccaaccactgtctcgaaggaccccacacctctgaccgagtagaagca

SEQ ID NO: 19051 - DNA, 201 bp, Homo sapiens
actatatgtaccactattacagtgtcatatgattctgtgtttgtctatataccttcaccaggagatttaggctttcacattgctagttagcatacttcacrttgctgtttagcatgtttcaacttgaaggacttccttgagcatctcttgtaagtcaggtctagtggtgataaactccctcaagttttgtttatccagaaa

SEQ ID NO: 19052 - DNA, 201 bp, Homo sapiens
cttcctaacacatgggaacaaaaccaggtgacttgtacaaaatgaaactatttaagtattcatctataaactgctttcctttttcctttttttttttttttaacaaattctaaatacttacgtagataaggcttcctctgcccctaagcaaactttctgcacaataactgcacctagcttggtgagacagatggagagcct

SEQ ID NO: 19053 - DNA, 201 bp, Homo sapiens
gaattcagattttttaatttagaaaagcagtatggtgcatataccacatatatgaactatctagggcagtatcctataattaaatacattaatatttctgyagcaaaccatatatgtcccagtaggacagataatcaaagaatatgaatagggtcactttggttcaggtctggttttgctgatgaatgagttacaaaaaga

SEQ ID NO: 19054 - DNA, 201 bp, Homo sapiens
gagatggggtttcaccatattggccaggctggtctcgaactcctgaccttgtgatcctcctgccttggcctcccaaagtgctgggattacaggcgtgagcyactgcacccggcagcaggagattttcataggcaaaaggaggaatgcatagtaccagaaggaataggagagtctgaagtgccattcctcatggggctgatt

SEQ ID NO: 19055 - DNA, 201 bp, Homo sapiens
aatggctattgatgctaaagaaagttctgaaggagcattctccaatgcagttatttcctacagaagattttaagtgattttttaaaaaactgcctcttttytaaaaatatttcagcttttattttagatatgggggtacatatgtaggattgttacatgggtatattggatccaggtagtgagcatagtaagcaataggta

SEQ ID NO: 19056 - DNA, 201 bp, Homo sapiens
agtagctgagattacaggcgcccaccaccacaccaggctaatttttgtatttttcgtagagatggggattctccatgttggccagggtgatcttgaactcytgacctcaagcaatccgcctacctcggcctcccaaagtgctgggattacaggcgtgaaccaccgcaccaggccagtgtaacatttttgatcattttttta

SEQ ID NO: 19057 - DNA, 201 bp, Homo sapiens
tttagtagagatgggtttcatcatgttagccaggatggtctggatctcttgaccttgtgatccgcccaccttggcctcccaaagtgctgggattacaagcrcttgtaatcccaccacgcctggcctatttttttaaacatttgaaagtacaacacacagaaagtataactttaaggtggcataaaaactaggtgttagaat

SEQ ID NO: 19058 - DNA, 201 bp, Homo sapiens
cttactgccaccatcttcaattacctaaaggattgcatcagggtgagagctggggatacaggaatcaggtgtcagccctggaatcacacctcccccataastttgtctctaaattggaagcatcccaattttccctgggaaagagaggagatgtcggcgtctcagcccccaggtttccccaggcctctatgcactacctcc

SEQ ID NO: 19059 - DNA, 201 bp, Homo sapiens
tcacgcctgtaatcccaacactttgggaggctgaagcaggagaatcactttggaccagcctgggcaacatatcaagacctttttctctacaaaaaaaaaaatttttttttaattaggcatggtggtgcacacctgcagtcctagctactcaagggactgaagtgaaaggattacttgagcacagaagttcaaggctgcagt

SEQ ID NO: 19060 - DNA, 201 bp, Homo sapiens
agccctggtgagaagtctggattttattttaagccgcctgagtgatgtgatttcatacatgtttttaaaagatcactctggttattccttgcagacagtgraagagtgagccaagttaggaggctattgcagtagttcaggtaagagatgatggtggcttagactgagagagaatctacttgagggtaagaagtgatctga

SEQ ID NO: 19061 - DNA, 201 bp, Homo sapiens
agtcagacggaaaacagcgctaggactgagagttcctcggttcaggttcacttttctttcaccagactactgcataaaaacagcttatgacatcttggtaygagtaacaattgctttcaaaaattatgggcagaaattacttaaatcttctcaccattagataagagaaagaaagccttagattgaacttcctctgtcagt

SEQ ID NO: 19062 - DNA, 201 bp, Homo sapiens
acctataccaaataaacacatattgagaaagtataggatcttagatctgtaaaaactttgaaatactatttaatcagttaaataattgctggctaaatcayattaaaactaacaaaaagtccatgaggctcaactggattttaatacattccagataaaggcactgctcaatactctttgaggactcattcaaggacattg

SEQ ID NO: 19063 - DNA, 201 bp, Homo sapiens
gaaaggacagtctcttcagtcaatggtgctgggaaaactggatatctttacgcagaagaatgaaggttgaccccgtatctcttaccatataaaaaaaaaaatcaaatgaaaatgggttaaaaacttaaatttaagacctcaaactatgaaactactaaaagaaaacattggggaacctctccagaacactggagtgggcaa

SEQ ID NO: 19064 - DNA, 201 bp, Homo sapiens
acaccagcctgaccaacatgaagaaaacccgtctctactaaaaatacaaaattagctgggcgtggtggtgcatgcctgtaatcccagctactcgggaggaygaggcaggagaatcacttaaacccaggaggcggtgagccaagatcccgccattgcactccagcctgggcaacaagagcgaaactccatctcaaaagaaaa

SEQ ID NO: 19065 - DNA, 201 bp, Homo sapiens
tttattttattttatttattattatttttttttgagatggagtctggctctgtcatccaggctggagtgcagtggtgcgatctcagctcactacaagctcygccacccaggttcacgccattctgctgcctcagccttccgagtagctgagactacaggcgcctgctaccacgcccagctaattttttgtatttttagtac

SEQ ID NO: 19066 - DNA, 201 bp, Homo sapiens
aggtttcccaactacagatatatcaagctgccatttaaaaatctctcaacaattgttatgaaaaatggaaagacaacatacatataaattatcttataaamtattacatggattaacatacaaaatagatcagtcactcaacaagaaactaaaatatcattaagtcttcaaaacaaaatgcatttggctagtctatttctt

SEQ ID NO: 19067 - DNA, 201 bp, Homo sapiens
gtggtgcgatctcagctcactacaagctccgccacccaggttcacgccattctgctgcctcagccttccgagtagctgagactacaggcgcctgctaccaygcccagctaattttttgtatttttagtacagacggggtttcaccatgttggtctggctggtcttgatctcctgacctcgtgatcctcctgcctcggcctc

SEQ ID NO: 19068 - DNA, 201 bp, Homo sapiens
gtgggtggatcacttgaggtcagaagttcaagaccagcctggccaacatggtgaaaccccatctctagtgcaaatacaaaaattagcgaagtgtggtggcrtgcacctgtaatcccagctatttgggaagttgaggcaaaagaatcacttgaacctggcaggtggaggttgcagtcagctgagacggcgccactgcactcc

SEQ ID NO: 19069 - DNA, 201 bp, Homo sapiens
aggccgaggcaggcagatcacctgaggtcaggagtttgagaccagcctggccaacatggcgataccccatctctactaaaattataaaaattggccgggcrtggtggtgcatgcctgtaatcccagctacttgggaggctgaggcaggagaattgcttgaacccgcgaggcggaggttgcagtgagctgagatcatgccat

SEQ ID NO: 19070 - DNA, 201 bp, Homo sapiens
tcacacctataattccagcactttcagaggccggggcgggtagatcatttgaggccaggagttcgagaccagcctggccatggtgaaaccccatctccacyaaacatacaaaaattagccaggcatggcagcacatgcctgtaatcccagctactctggaggctgtaacacaagagtcacttaaacctgggaagtggagtt

SEQ ID NO: 19071 - DNA, 201 bp, Homo sapiens
agactgaagaagtactctcggcagagtaagaaggagcactaactgcttctactttggagcaagtatcaaaggctgtgttagtctgctggggcttccatcaygaatgaccacagactggatgccttaaacaacagaagttaattttctcacagttctggaggcccgaagttcaaaatcaaggtgtccgcaggtctgttttct

SEQ ID NO: 19072 - DNA, 201 bp, Homo sapiens
attatccttcttaatttgtgcttcttgcctttcgtatatatctttttcattttgagtttccttgaattaaaactttttaattcaactcttggattgcttarttttgaataatttgagagaatttgggctgttcttggtttatttagactgaagaagtactctcggcagagtaagaaggagcactaactgcttctactttgg

SEQ ID NO: 19073 - DNA, 201 bp, Homo sapiens
tgtaccctcacttaagactccagtgcatctaagtgtgttagtaactgattatggagagcacctttgtgctattatcagaattcctgggtgtgggaaacttytataactgtgcaacttttctatctccacgtcagtgcacagtatatggacatttatattttctactaacacaactgacattccactcccgtcagtttagtt

SEQ ID NO: 19074 - DNA, 201 bp, Homo sapiens
tgaacctgggaggtggaggctgcagtgagccaagatggtacccactgcacttcagcctgggcaacagagcaagactctgtctcaaaaaaaaaaaaaaaaawaaaaaagaaaggagaaaaagaaaagaaaaatttgcatttaagacttatatgaaaatacataatttattttgcagaatgatctagagcaggactgtcattt

SEQ ID NO: 19075 - DNA, 201 bp, Homo sapiens
ctgagatatacatgaggcccaggacattccaggcaataactgtctgcctctcctgactctgcccaaacccgaaatgatgctttctagctcacacaaaaatrtatatatatatatcagcaggcagatactcaagctgaaagagacattactggggttcgtttctagatcacagatcctgcctcaggctcactgaagtgacca

SEQ ID NO: 19076 - DNA, 201 bp, Homo sapiens
cttcacaaaattgttgcctattttttagccagcattttatcttgactccttaactacctaggcctatatccttctcctcctcctccgtcccctcttcctcytcctcctccgtcccctcttcctcctcctcctcatcatcttaccatttaatcaataattgcaatcagcctgtcagaatacgtaaagggaatccatgtaatt

SEQ ID NO: 19077 - DNA, 201 bp, Homo sapiens
atgtatatatatatgtgtgtatatatatatgtgtgtgtgtgtatatatatatatatatatatatatatatgtatagttttgggggtttgtttttttttctyttttttttgagacggagttttcctctgtcacccaggctggagtggagcggcgcaaccttggctcactgcaagctctgcctcccaggttcatgtcattctc

SEQ ID NO: 19078 - DNA, 201 bp, Homo sapiens
cagcactttcagaggccaaggcaggtggctcacttgagaccagcctgggcaacatggcaaaactctgtctccacaaaaaaataaaaaaaccagctaggtgygccggcacacacctgtagtcccaactacttgggagactaggatagaaagatcgcttgagcccaggaggcagaggttgcagtgagctgagatcatctcaca

SEQ ID NO: 19079 - DNA, 201 bp, Homo sapiens
tatatgtgtgtatatatatgtgtgtatatatatgtatatatatatgtgtgtatatatatatgtgtgtgtgtgtatatatatatatatatatatatatatatgtatagttttgggggtttgtttttttttcttttttttttgagacggagttttcctctgtcacccaggctggagtggagcggcgcaaccttggctcactgc

SEQ ID NO: 19080 - DNA, 201 bp, Homo sapiens
acagtcggagagggctgacggaaggggtagaacggagcagctggtgacatgggtgatgacccgggagttcctgacgtccacccactgggctcttgtctccyccccacgtgtgtggtgatggtgggcatgcccttccccaacatcaggtctgcagagctgcaggagaagatggcctacttggatcaaaccctcgtgagtgac

SEQ ID NO: 19081 - DNA, 201 bp, Homo sapiens
tccacaatgttaaagaacacacagtttactatcgcatgtatattcctattgcaacaccttatttcaaaataaaaataattttcttttagagagcctatccytatttgttatttaggttgacaaacccaacatacaataaagttgccaaattcattagctgggtgtggtggcacgtgggtgtagtcccagctatttggaaag

SEQ ID NO: 19082 - DNA, 201 bp, Homo sapiens
tgccaccatcttggaagccgcccaccaccatcttggaagccgcttgccaccattttgggagctctgtgagcaaggatccccggtaacattttggcgaccaygaagggacctccgaagcgtttgtctcttccagaattgaaactgtaaaactacaaatggttcttcaaatggagccccagatgcagtccatgactaagatcc

SEQ ID NO: 19083 - DNA, 201 bp, Homo sapiens
ttctctgagccctggtgagaagtctggattttattttaagccgcctgagtgatgtgatttcatacatgtttttaaaagatcactctggttattccttgcasacagtggaagagtgagccaagttaggaggctattgcagtagttcaggtaagagatgatggtggcttagactgagagagaatctacttgagggtaagaagt

SEQ ID NO: 19084 - DNA, 201 bp, Homo sapiens
ggtggctcatgcctgtaatcccagcactttgggaggccaaggtgggcaaatcacaaggtcaggagtttgagatcagcctgaccaacatggtgaaagcccgyctctactaaacacaaaaaataagctgggcgtagtggcaggcgcctgtaatcccagctagttgagaggttgaggcaggagaatcacttgaacccaggaggc

SEQ ID NO: 19085 - DNA, 201 bp, Homo sapiens
gcaagcaggttctctgagccctggtgagaagtctggattttattttaagccgcctgagtgatgtgatttcatacatgtttttaaaagatcactctggttaytccttgcagacagtggaagagtgagccaagttaggaggctattgcagtagttcaggtaagagatgatggtggcttagactgagagagaatctacttgagg

SEQ ID NO: 19086 - DNA, 201 bp, Homo sapiens
ggggtttcaccatcttggccaggctggtcttgaactcctgacctcgtaatccacctgcctcagcctctcacagtgctgggattataggtgtgagccactgygcctggccggcctacaccattctttacactgaaaggcttaaatgaaggtcacataatttgaatggatgattcagtatctttttttttttttttttttttt

SEQ ID NO: 19087 - DNA, 201 bp, Homo sapiens
ggagtcagcaagcaggttctctgagccctggtgagaagtctggattttattttaagccgcctgagtgatgtgatttcatacatgtttttaaaagatcactstggttattccttgcagacagtggaagagtgagccaagttaggaggctattgcagtagttcaggtaagagatgatggtggcttagactgagagagaatcta

SEQ ID NO: 19088 - DNA, 201 bp, Homo sapiens
tagcactgcctacaccattcttttcttttctttttttgagatgtagtcttgctctgtcacccaggctggagtgtagtggtgcgatctcagctcactgcaamctctgcctcctgggttcgagcaattgtctgcctcagcctcccgcgtagctgggattacaggtgtccaccaccatgcctgggtaatttttttatattctta

SEQ ID NO: 19089 - DNA, 201 bp, Homo sapiens
gtggtagaggcaagtgcatatgtaactatgcacttgattaacctttgaataattaagagttcacacaagatatttttgagttgagtagaagaggtgacagaaatcagaagaaatgtttgagtttgtttacactctacatttggaatttattttgaataaatattttaaatatttttcaagtagatatagaaaattcaagag

SEQ ID NO: 19090 - DNA, 201 bp, Homo sapiens
ggtggtagaggcaagtgcatatgtaactatgcacttgattaacctttgaataattaagagttcacacaagatatttttgagttgagtagaagaggtgacagaaatcagaagaaatgtttgagtttgtttacactctacatttggaatttattttgaataaatattttaaatatttttcaagtagatatagaaaattcaaga

SEQ ID NO: 19091 - DNA, 201 bp, Homo sapiens
ggagctgtcccaggaagggtacaggagtggtgcagcccttgcctgcagcccaaacagtgactgtgagccagggcagccagacagaggcagaaagtgcagcwgccaagaaggcagaagcagatgggagtggccagcagaatgtgggcatgaacctgacacggacagccacacctgcgcccagccagacacttattagctcag

SEQ ID NO: 19092 - DNA, 201 bp, Homo sapiens
taaccatacttgatcataaagtaagagtaaataaaactgttataaggttaaacagtattaacagatttggaaaacctgcaaaatgtaagagtttctataawtttttatttatttatttattttttttgagatggagtctctctctgttgcccaggccggagtacagtggcgctatcttggctcactgcaacctctgcctcc

SEQ ID NO: 19093 - DNA, 201 bp, Homo sapiens
aactaggtttgcaagaatacacttttgaaaaaacacattaggacattgattagaatcgccttaccaatacctgcatcctataagtgttttgcaatactcasagtggctcagtggagtgagtgaggttgtaatccgagctgctactgaaattcttctttataatttgatagtgttggacttgaaggtcccatctggttacac

SEQ ID NO: 19094 - DNA, 201 bp, Homo sapiens
gggagctgtcccaggaagggtacaggagtggtgcagcccttgcctgcagcccaaacagtgactgtgagccagggcagccagacagaggcagaaagtgcagmagccaagaaggcagaagcagatgggagtggccagcagaatgtgggcatgaacctgacacggacagccacacctgcgcccagccagacacttattagctca

SEQ ID NO: 19095 - DNA, 201 bp, Homo sapiens
atgtgagaggggcagtggagagggagtcagcaagcaggttctctgagccctggtgagaagtctggattttattttaagccgcctgagtgatgtgatttcayacatgtttttaaaagatcactctggttattccttgcagacagtggaagagtgagccaagttaggaggctattgcagtagttcaggtaagagatgatggtg

SEQ ID NO: 19096 - DNA, 201 bp, Homo sapiens
taaagattaagaaggaaggaagtatcagggcttgatttaggtaagaatttgaattgtcccaaggataaaccatggatatacacagattagttttttttttkttttttttttttttgagacagagtctcgctgtcgcccaggctggcgtccagtggcgtgatctcagctcactgccaagctccacctcccgggttcatgcca

SEQ ID NO: 19097 - DNA, 201 bp, Homo sapiens
acataaagattaagaaggaaggaagtatcagggcttgatttaggtaagaatttgaattgtcccaaggataaaccatggatatacacagattagtttttttktttttttttttttttttgagacagagtctcgctgtcgcccaggctggcgtccagtggcgtgatctcagctcactgccaagctccacctcccgggttcatg

SEQ ID NO: 19098 - DNA, 201 bp, Homo sapiens
agaaactgagcttatatctccattctactcactacaacagaaaagctggaactggcctaaaagtaaaatcagaatagagagatacttgtaggctacttatytggagacatgaaggtcttcagccagaccttacagagaattacttcacttactcaggtaacgtttatggagccatttcactgtgctgtgtactggaaatat

SEQ ID NO: 19099 - DNA, 201 bp, Homo sapiens
gccactagggaggctgaagccggaggatcctgtgagcccaggagtttgaggccagcctaaagaaacatagtgaaaccgcatttccaaaaaaacaaacaaamaaaaaacaaatcattgcctgaaaaaccatcagaagcaagcctttggagaacgagtacaataagctgtacacctttcctgttactagcctgtctgatgcat

SEQ ID NO: 19100 - DNA, 201 bp, Homo sapiens
taaatactgacggaccctgcaacttccttgatccgcccagcagaaactgagcttatatctccattctactcactacaacagaaaagctggaactggcctaraagtaaaatcagaatagagagatacttgtaggctacttatttggagacatgaaggtcttcagccagaccttacagagaattacttcacttactcaggtaa

SEQ ID NO: 19101 - DNA, 201 bp, Homo sapiens
ttcaccatgttagccaagatggtctcgatctcctgacctcatgctccgcccgcctcggcctcccaaagtgctgggattacaggcgtgagccaccgcgcccrgctacaagttgtaattccttctgttctctattcctagcctatgaaatatactttcaagccacaaggtagtgagatgattaactgatacaataaacacatc

SEQ ID NO: 19102 - DNA, 201 bp, Homo sapiens
tgtcatcatacctataccaaataaacacatattgagaaagtataggatcttagatctgtaaaaactttgaaatactatttaatcagttaaataattgctgrctaaatcacattaaaactaacaaaaagtccatgaggctcaactggattttaatacattccagataaaggcactgctcaatactctttgaggactcattca

SEQ ID NO: 19103 - DNA, 201 bp, Homo sapiens
aggtggaggttgcagtgagccaagatcgtgccattgcactccagcctgggtgacagagcaagactccatctcgaaaaaaataaaaataaaaacaatatatkaatcagtttcaggattatttgtgaaaagtgaaacactgtatacaatattttgaatatgcaaacatttttctagaaagaaggttcaaaacattttactata

SEQ ID NO: 19104 - DNA, 201 bp, Homo sapiens
atatatgtgtgtatatatatgtgtgtatatatatgtatatatatatgtgtgtatatatatatgtgtgtgtgtgtatatatatatatatatatatatatatatgtatagttttgggggtttgtttttttttcttttttttttgagacggagttttcctctgtcacccaggctggagtggagcggcgcaaccttggctcactg

SEQ ID NO: 19105 - DNA, 201 bp, Homo sapiens
tatatatgtgtgtatatatatgtgtgtatatatatgtatatatatatgtgtgtatatatatatgtgtgtgtgtgtatatatatatatatatatatatatatatgtatagttttgggggtttgtttttttttcttttttttttgagacggagttttcctctgtcacccaggctggagtggagcggcgcaaccttggctcact

SEQ ID NO: 19106 - DNA, 201 bp, Homo sapiens
atatatatgtgtgtatatatatgtgtgtatatatatgtatatatatatgtgtgtatatatatatgtgtgtgtgtgtatatatatatatatatatatatatatatgtatagttttgggggtttgtttttttttcttttttttttgagacggagttttcctctgtcacccaggctggagtggagcggcgcaaccttggctcac

SEQ ID NO: 19107 - DNA, 201 bp, Homo sapiens
gcattgttttacatatatatgtatatatatatgtgtgtatatatatgtgtgtatatatatgtatatatatatgtgtgtatatatatatgtgtgtgtgtgtrtatatatatatatatatatatatatatgtatagttttgggggtttgtttttttttcttttttttttgagacggagttttcctctgtcacccaggctggag

SEQ ID NO: 19108 - DNA, 201 bp, Homo sapiens
cagtttctttggtatcctttgtgccagggagttgggtgctgaacaatctacctgtaacattcccttgccttcatatcccaaagctctgcaagcaaagaagwgttctggtgggcagctagggccatttgttgtagtccagaggaagagagccatccgtatcttctgtgctgtactcatacctatttaatccaatctgctggc

SEQ ID NO: 19109 - DNA, 201 bp, Homo sapiens
ggaaaattctctattaatgtatcagaatgtttttgataagcattgttttacatatatatgtatatatatatgtgtgtatatatatgtgtgtatatatatgkatatatatatgtgtgtatatatatatgtgtgtgtgtgtatatatatatatatatatatatatatatgtatagttttgggggtttgtttttttttcttttt

SEQ ID NO: 19110 - DNA, 201 bp, Homo sapiens
tagtaacaatatctattaatcattttaaaaggaaaattctctattaatgtatcagaatgtttttgataagcattgttttacatatatatgtatatatatatgtgtgtatatatatgtgtgtatatatatgtatatatatatgtgtgtatatatatatgtgtgtgtgtgtatatatatatatatatatatatatatatgtat

SEQ ID NO: 19111 - DNA, 201 bp, Homo sapiens
taatccccgcactttgggaggccgaggtgggtggatcacttgagcccaggagttcaagaccagcctgggcaacatggtgaaaccctgtctctacaaaaaawacaaaaattagccaggcatgatggtgtgtgcctgtagtttcaggggaggctgaggtgggagaattgcttgagcccaggaggtgggggctgcagtgagctg

SEQ ID NO: 19112 - DNA, 201 bp, Homo sapiens
ctagtaacaatatctattaatcattttaaaaggaaaattctctattaatgtatcagaatgtttttgataagcattgttttacatatatatgtatatatatatgtgtgtatatatatgtgtgtatatatatgtatatatatatgtgtgtatatatatatgtgtgtgtgtgtatatatatatatatatatatatatatatgta

SEQ ID NO: 19113 - DNA, 201 bp, Homo sapiens
ccattgccctccagcctgggcaacaacagggaaactctgtctcaaaaaaaaaaaaaaaaaaagtagcttttctggaaagggaactgtataaactaattgaktttctccctttcctggtggctgattttctaattacttaatcgctcctcatgtggtatagttatccctcagtatctgtgtgggattggttccaagactccc

SEQ ID NO: 19114 - DNA, 201 bp, Homo sapiens
aaggtcctagttaaatgaattactacagaaagtgacggaccatccacaccaaataaattgtagcttctacaaatatctgcattattaccaatatatgttaytttccctcagctgaactatatagggtaagacatatcaaacattttttatgatgcttttactatataaaatcttttcaataagccaagaaagagaaaatat

SEQ ID NO: 19115 - DNA, 201 bp, Homo sapiens
aacaaaaacaaaaacaaacaacaacaacaacaagaatttagcacagtgtctggcatgtggaaagcactctataaatgttagctattttactatttcatcayagattcttataggacagtggccaccacttacgtatgtactccagaatctgacacactgtaagcatttaacattaaataatccaaaatataatagctagtt

SEQ ID NO: 19116 - DNA, 201 bp, Homo sapiens
gtggaatcaaccagattaacgcttagtaaattattatcaaatcaatcttagcaacattttctaaaaggtcctagttaaatgaattactacagaaagtgackgaccatccacaccaaataaattgtagcttctacaaatatctgcattattaccaatatatgttattttccctcagctgaactatatagggtaagacatatc

SEQ ID NO: 19117 - DNA, 201 bp, Homo sapiens
acaacaagaatttagcacagtgtctggcatgtggaaagcactctataaatgttagctattttactatttcatcatagattcttataggacagtggccaccrcttacgtatgtactccagaatctgacacactgtaagcatttaacattaaataatccaaaatataatagctagttatggttttaccaaaaacaaaatttag

SEQ ID NO: 19118 - DNA, 201 bp, Homo sapiens
gactctgtctcaaaaaaaaaaaaaaaaaaaaaaaagaaaggagaaaaagaaaagaaaaatttgcatttaagacttatatgaaaatacataatttattttgyagaatgatctagagcaggactgtcattttaactaaagttatttttggccaggtgtggtggcttatgtctgtaatcccagcactttgggaggccgaggcag

SEQ ID NO: 19119 - DNA, 201 bp, Homo sapiens
aaattggtatgattaataaataactcctattgctgtttaattaaaaagataacatctcaataaggttaaaaattaataatcaatgttaacaacaataactgttttcatttttgtatgactggtttttgtttacatgaatatatactttatattgttatcattacattgtttaagccatgaacattatatcacaagcttttc

SEQ ID NO: 19120 - DNA, 201 bp, Homo sapiens
taacaatgcattgtattctagatatttacttttattactctgagagtatctgtgaccaacagtggaaatacaagcaaaaggatgtgcacaggaattttagracagtctgtcttaacaccttagcagcaaacagaacttgtactcctccagcctcctttctctctccctgtccccttttctttccctttctctcctccctca

SEQ ID NO: 19121 - DNA, 201 bp, Homo sapiens
ggtgaagattgcagtgagccgagatggagatcacgccactgcactccagcctgggtgacggagcaagactctgtctcaaaaaaaaaaaagaaatgccgaargagatgagagaagtgctaaaggagtttgcaggaagcagacacctccttttgggatggccagaaataatgactgaaatttgactttgcatagtctgataga

SEQ ID NO: 19122 - DNA, 201 bp, Homo sapiens
gggtagtctataaagaaatggcgcagccaggcatggtggctcactgcctgtaatcccagcactttgggaggccaaggatgggtggactgcttgagctcagkagtttgagatcagcttaggcaacatctttgtagagatggcaaaaccccatctctacaaaaaatacaaaaattagccaggcatggtggcacatgcctgtgg

SEQ ID NO: 19123 - DNA, 201 bp, Homo sapiens
ggctagccaattagagatcacatagcaagagagaggaacgaagagggtaggggagtggtgccagactctttttaacaactagctcttgtgggaactcataragggagaactcacccattacctctaggagggcaccaagccattaacgagggatctgcccccataacccaaatatctcccaataagccccacctccaacat

SEQ ID NO: 19124 - DNA, 201 bp, Homo sapiens
taagaaaagggtgagctatcaatccagctgccactgtgagcaactgtagctgcatcttgctgcagaaccctgggactcagtgtagagagcatgacccagasttacccacaggatgagtgagggagctggttatgaactgctgggggagtgttacagttcaggctgccagagcaaaccttgtcatggaaatcagccgggcat

SEQ ID NO: 19125 - DNA, 201 bp, Homo sapiens
cactagtcaggtgtctactgctgatcaaatgtaatctgagagggcccttaatctctgagcctcagtctctttaccataaatatgtctaaggtcccttcaakaactaacgtgacatgatattctgtcagtcttgactaaatgttctgcttatttgaattcagatcatggtctccaccgtctctacgctcttttgaaaaccac

SEQ ID NO: 19126 - DNA, 201 bp, Homo sapiens
aaatgattcatttcaaagccttgactatatataaactaaaatataatttaagaaataaaaacatcccctccactgcccttttttttttttttttttttttktgacggagtctcgctctattgcctaggttggagtgcagtgctcagctcactgcaacctctgcctcctgggttcaagcgattctcctacctcagcctcctg

SEQ ID NO: 19127 - DNA, 201 bp, Homo sapiens
tttagtctttacaagacacaatattgaatcccatagataaatatggatcaggagaaagaaagatactgtttccgtccttagtatggtgctaattgtggaaktgggtctactctaagactctgagtaaagtagggaaggggaagagagctagagaaaggtaggattgtcagagcttgctttcttcttttttttgagacagag

SEQ ID NO: 19128 - DNA, 201 bp, Homo sapiens
tcccaagccaagtagcacataattaaattatctaatctcctaaaatattttaattcagttgtgtgccatttttaagttgcgtacactagagacattttatrtgatcggagaacaatgtgaaccattgttctcaaagggctatttctattatttttggtatgattaatagtttgtcacaatgtacaaatattagtgattgaa

SEQ ID NO: 19129 - DNA, 201 bp, Homo sapiens
ttgcggttcaagctgactaactgtaataaatcttttttccagtatccagaacagtttccaaatagggttgtatcctgatgtggaaactaaaaaaaaaaaaagcaaaaagattgatttacatatttaaaaaattaaatgccagtataaataatgttgtcactggtgaggcgttaaaaggtaattaaagtaaaacttttttgt

SEQ ID NO: 19130 - DNA, 201 bp, Homo sapiens
ttttcctctgaccacttctctgttttggttccagatgtgatgaatatgtcacccagttggatgagatgcagagacagttagcagctgcagaggatgagaaraagactctgaacactttgttacgaatggctatccagcaaaaactcgccctgacccagaggctggaggacttagagtttgaccatgagcagtcccgacgca

SEQ ID NO: 19131 - DNA, 201 bp, Homo sapiens
gttttctgctattgtgggttatctacattctattgctagacctttaaaccagtcttctaaatttctaaatttcggtcaaatttattacttttcagcttaastcccaaattcagtttcaccaagattttcctctgaccacttctctgttttggttccagatgtgatgaatatgtcacccagttggatgagatgcagagacag

SEQ ID NO: 19132 - DNA, 201 bp, Homo sapiens
aggcaggagaatcacttgaaccccggggggcggaggttgcggtgagcctagattgcatgattgcactccagcctgggcaacaagagcgaaaatctgtcttwaaaaaaaaaaaatcaagatgcttaactgaaacagaggtatagataaggacacttggccaaccaacagagactaatttgtgaacaagcattcattgattac

SEQ ID NO: 19133 - DNA, 201 bp, Homo sapiens
gcctcagcctccgaagcagctgagattacaggcatgtgccaccatgcctggctaactttttgtggagacagaatttcaccatattgtctaggctggtctcraactcctgacctcaagtgatccgcccacctcggcctcccaaagtgctgggattacaggcatgaaccaccgcgcccagccaagtatagcaagattaaaagg

SEQ ID NO: 19134 - DNA, 201 bp, Homo sapiens
attctcatgcctcagcctccgaagcagctgagattacaggcatgtgccaccatgcctggctaactttttgtggagacagaatttcaccatattgtctaggstggtctcaaactcctgacctcaagtgatccgcccacctcggcctcccaaagtgctgggattacaggcatgaaccaccgcgcccagccaagtatagcaaga

SEQ ID NO: 19135 - DNA, 201 bp, Homo sapiens
caagactcaatttctaggagtatagcaaaattattattattatttttttttatttttgttttgagacagagtctcgctctgttgtccaggctggagtgcastggcgccatctctgctcactgcaacctccgcctcctgggttcaagcgattctcatgcctcagcctccgaagcagctgagattacaggcatgtgccaccat

SEQ ID NO: 19136 - DNA, 201 bp, Homo sapiens
aagaaggtctgatggccaataactggaccccagctttggagctggaggttcagattcaagactcaatttctaggagtatagcaaaattattattattattwttttttatttttgttttgagacagagtctcgctctgttgtccaggctggagtgcagtggcgccatctctgctcactgcaacctccgcctcctgggttcaa

SEQ ID NO: 19137 - DNA, 201 bp, Homo sapiens
gtgaagaaggtctgatggccaataactggaccccagctttggagctggaggttcagattcaagactcaatttctaggagtatagcaaaattattattattwtttttttttatttttgttttgagacagagtctcgctctgttgtccaggctggagtgcagtggcgccatctctgctcactgcaacctccgcctcctgggtt

SEQ ID NO: 19138 - DNA, 201 bp, Homo sapiens
acctgggaggcagagcttgcagtgagccgagattgcgccactgcactccagcctgggagacagagtgagactccatctcaaaaaaaaaaaaaaaaaaaaaagaaagtttgaatagatactttcctttagatatgaagacattcagcatcaattcattgctcttaaagcagatctcatgatggtttattttttaaaaagaag

SEQ ID NO: 19139 - DNA, 201 bp, Homo sapiens
gtgagaccatttaggaggcttgagatagtccaggtagcagcttagacttgattgtatggaaataaagaccacctacaggagaacaaataaaggctatctawtcagagcttgctatatagcaagagagagagccaccatcatgtgcatttggtaaaaagtcaaagtcaagcagaggactgcgaaaacttgatagtggaaaaa

SEQ ID NO: 19140 - DNA, 201 bp, Homo sapiens
ccaccatcatgtgcatttggtaaaaagtcaaagtcaagcagaggactgcgaaaacttgatagtggaaaaagcaaaaagtttcaggtctaccctgattggasgctgtcgacctggagaagctgtaggcagctaactagaagaggcgcatcctatgggattggttaggggtgcatatttggctttctcctgtgggtcctaaat

SEQ ID NO: 19141 - DNA, 201 bp, Homo sapiens
gggcagttcacccctggctaacgctggtctaaatgctccctccatgggcactggctgagttctgccctgtgtgctttcccctgtgattgggcagcactgcrttctaaagccaagtcccacagtcactgtgctctcccgccctcaagctcatcgattctgtctctgtaccacagtcactgctgggggatggcggggaggggg

SEQ ID NO: 19142 - DNA, 201 bp, Homo sapiens
gagtgcagtggtgcgatcttggctcactacaagctccgcctcgtgagttcacaccattctactgccttggcctcccgagtagctgggactacaggcatccrccaccacgcccagctgattttttgtgtttttggtagagacggggtttcaccatgttagccaggatggtctccatctcctgacctcatgatctgcctgcct

SEQ ID NO: 19143 - DNA, 201 bp, Homo sapiens
ggatgggcagttcacccctggctaacgctggtctaaatgctccctccatgggcactggctgagttctgccctgtgtgctttcccctgtgattgggcagcaytgcgttctaaagccaagtcccacagtcactgtgctctcccgccctcaagctcatcgattctgtctctgtaccacagtcactgctgggggatggcggggag

SEQ ID NO: 19144 - DNA, 201 bp, Homo sapiens
taggggaccaatatgggagattccctgaggatgttagcattcccagaataggagggaaggtgagataaatgtgcctttttttttcctttttttttttttttaaagaaaaagcctcattctgtcgcccaggctggagtgcagtggcgtgatctcggctcactgcagcctccgcctcccaggttcaagcgatcatcccacccg

SEQ ID NO: 19145 - DNA, 201 bp, Homo sapiens
agagagagaccctgtctctaaaaaagcaaaactgaaaaaacctacaaaaatatttaatatgtacagtttctgatagacactaactctcttttccaatttcmtaagaaacaatgctcagtacttgtggtggttgcctaaagttgtagaggtgaaaactttgttttcatttccatttaggtcttttttttttttcaaaaattt

SEQ ID NO: 19146 - DNA, 201 bp, Homo sapiens
aaaaaacctacaaaaatatttaatatgtacagtttctgatagacactaactctcttttccaatttcctaagaaacaatgctcagtacttgtggtggttgcmtaaagttgtagaggtgaaaactttgttttcatttccatttaggtcttttttttttttcaaaaatttttttaaatagagacagtctcactatgttgcctag

SEQ ID NO: 19147 - DNA, 201 bp, Homo sapiens
ctgaactgtgagtcagttaaacccctttccttgataaattacccaatctcaggtatgtctttattagcagtgtgagcacagacgaatacaatcacttccastgggttgagtcttctagcttttctcttagggcttatggcccaacatcaaaacatggtaacaagcaacaaggatgtggctcaggcacccaggtccctactg

SEQ ID NO: 19148 - DNA, 201 bp, Homo sapiens
tgtaatcccaggactttgggaggccgaggcgggcagatcatgaggtcaggagctcgagaccaccctggctaacacagtgaaaccctgtctccactaacaawacaaaaaattagccgggcgtggtggcaggtgcctgtagtctcagctactcgggaggctgaggcaggagaatggcgtgaacctgggaggtggagcttgcag

SEQ ID NO: 19149 - DNA, 201 bp, Homo sapiens
tcccaaagtgccgggattacaggcgtgagccaccacacccggtcaaaagattattttttaatctgaaattatttccaaggtaaatatttttcttccaggtrttttcctaaggacccaagttcaaaaccttgcattactctggtctccctttcttttttttttttttttgtcttatgagaaatcaagtctgaattgatttgg

SEQ ID NO: 19150 - DNA, 201 bp, Homo sapiens
ccactgcgcccggctaaaggaccatttaaaaatgtaaaaggacaatcccctggatgagagaaaatcattccaaatcaaatatctgataaggggcttgtatmtagagtatacagagaacccatacattcagtaataaaatgataactaactcaaacaatagacaaaggatctggacaggcattttgccaacaaagataaaca

SEQ ID NO: 19151 - DNA, 201 bp, Homo sapiens
atggctttggaacccttcagggtactgggtgcatggatatgtgtaatgttttattgcttctcttttgaggtgccacaaaatacccttctctgcttggagaygcaggctccaggaaaaggaaggagaccaacagatgagaagtgacttcttttcttccacttctaggaaaatacataattagaaccttccaagatgtaagga

SEQ ID NO: 19152 - DNA, 201 bp, Homo sapiens
aaggaacaaaaactgaaaactcaagaacttggcagaaaattccatttagcattgttatgtcatgttctgtggttataaaccctgctgtttttagagttctrtgctttttggcaaaaataataaagtgtaccaactgcatcctttgtgtattcctgaatgtgaagctccccatttaagtgaaacagaaaggtgaagcaatta

SEQ ID NO: 19153 - DNA, 201 bp, Homo sapiens
ttggaagtgggtgggggcaatgtagttttctatctcatgtgtcctttaatatctggagatgtattaacctcttcagttcatgtgaggggaacataattacrtagtaaagataaactcattttttaattgaggtaagcatttcaaatagaaatcatttttccagtcctttttttagagttgtgttacatgtggttatatcta

SEQ ID NO: 19154 - DNA, 201 bp, Homo sapiens
ctctatttttagtttttttcagaaacctccaaactgttctccatagtggttgtactaatttacattcccaccaacagtgtatgagggttctcttttctccrcatcctcaccagcatttattattgtttgtcttttggaaaaaagccattttaactggggtgagataatatctcattgtagttttgatttacatttctctga

SEQ ID NO: 19155 - DNA, 201 bp, Homo sapiens
agagccatgttatatttacctaacactaaatatagtttctctttttaatttattatttatttatttttttaaaggccagtcaagtgaagcagtgggagtggagaaggaacaaagaaatctgtaactgattgtaatgaattagttatcaacaccactgcactcggacctgcctaaatacacttgcaattactaaaatttatt

SEQ ID NO: 19156 - DNA, 201 bp, Homo sapiens
gctaaatacttaacttcccatgctttttgaggattcccaaaagactttagggggttcccaagactttcagggttttttttttttttcacaataaaagaaakgaacagtgtcaatccataaagtcagaccagcagtttaataagatcctcttcatagctcagttctcagtgcatacagagattcaatatagccccatcactc

SEQ ID NO: 19157 - DNA, 201 bp, Homo sapiens
ggttatattaaatgataacattaaccaggcatggttttagcacaaaccataactattgtgctaattaggtaacagtacatgggttgatgagtgaactggaraatactccacctgcccaaagaagggaattccctgtcgaaagtgtgagtccactttcacaaatgagagtttggttatggttcttgtgatttcactggactg

SEQ ID NO: 19158 - DNA, 201 bp, Homo sapiens
ttactctgaagaacttgttttttgcaaacatttttggaacttttaacttccaaaaatgatcttatcacgtgagcatttcatgatctccaaggttggaacgkgactcacagatttaggtgacagctcagcttcaggcttcattagcagcacactctggtctacagcacggagggcacaaagggagaggggggtggctctcac

SEQ ID NO: 19159 - DNA, 201 bp, Homo sapiens
attccccatttctctctttccctagcccttggcaaccaccatcctgttttctgtttctatgactttgactactttagaaaccccatgtacgtgaatcatayagtattggtctttttgtgactagcttatttcacttaccataacgtcctcaaggatcattcatgctgtagcatgtgacaggattttcttcccttctcagac

SEQ ID NO: 19160 - DNA, 201 bp, Homo sapiens
tatatatatttaaaactaaatgctaattatgttagaattggcttttatagtaaaagtatctaacagttaaagggggcttactaagtgattcaacatgtatkatttcacttaatcttcacaaccaccccaagagtcaggtgttagtattgcaatcattttacagataaggaaatgaagcacagaggttttagttaattcctt

SEQ ID NO: 19161 - DNA, 201 bp, Homo sapiens
ttcaggcttcctctaccttcatccccagctcccaatagcactagtgaatccttgagcaaaacattttgttcatatcttaatgtatattttggtgacaacayatatatgatcaccccaaacagggaacaggtagaaataataatttcattgtcaagactagcacagtgctggcacgtggaaagcattcaagacactttttga

SEQ ID NO: 19162 - DNA, 201 bp, Homo sapiens
agaaaaattgcctaagaaatgaatatataagctggaatttgggaggcaatggctgtttggcctgcgggggagggagattagtaagagtcatcaagtctcakcactctaagacgacattcaagtgggttggaatgtataaatcaaacttctcaaaaccgctgttatctcaaacccaggtttcagcgacaatttcgtagtcca

SEQ ID NO: 19163 - DNA, 201 bp, Homo sapiens
ctgagttgctaggactacaggtgcatgccaccccacccagctaattttttgtatattttgtagagacagggtttcaccacgttgcctaggctcgtctcgawctcctggcctcacgcaatccacccacctcagcctcccaaagtgctgggattacaggcgtgagctaccgtgcctggcctaggctgactatttttaatgctc

SEQ ID NO: 19164 - DNA, 201 bp, Homo sapiens
ccatgtacctgtctggtcttaacaacagctggacttgtttatattttccaacttagattaggctgacatgtttaaatgcagtgatgctaaaccttgtgaartgaggaagcaggatgatgactgtcattctcagagatgttttgatattgtctatacctatcaacactgctttgccaagatagggaagtgcaaaccagaaag

SEQ ID NO: 19165 - DNA, 201 bp, Homo sapiens
gtattatgaataaataaaatattgtaaccttaggggtctgagaagacattggtagaaagcattggtttaagagctgagctgatgaattagctgaagtctasctcttctgggctatcttaggctgattgctattattattatttttttgagacagggttttgctctggcgcccatgctggagtacagtggcacaatcttggc

SEQ ID NO: 19166 - DNA, 201 bp, Homo sapiens
ctgtctggtcttaacaacagctggacttgtttatattttccaacttagattaggctgacatgtttaaatgcagtgatgctaaaccttgtgaagtgaggaarcaggatgatgactgtcattctcagagatgttttgatattgtctatacctatcaacactgctttgccaagatagggaagtgcaaaccagaaagtggtaagc

SEQ ID NO: 19167 - DNA, 201 bp, Homo sapiens
aatgttctcacaaaactacgtaagtttactgtcctaccttaactagtagctagaaatcttttgttccacaatgaaaagtgggagaaggacccctgattttstttctctgcttcaaatgtaggcatgctttgtgactttacactgcagagcctcctgggattgagatttatatttcttaagagcataaaaggaggcatcctt

SEQ ID NO: 19168 - DNA, 201 bp, Homo sapiens
tctggtcttaacaacagctggacttgtttatattttccaacttagattaggctgacatgtttaaatgcagtgatgctaaaccttgtgaagtgaggaagcasgatgatgactgtcattctcagagatgttttgatattgtctatacctatcaacactgctttgccaagatagggaagtgcaaaccagaaagtggtaagccat

SEQ ID NO: 19169 - DNA, 201 bp, Homo sapiens
ttctcaagaatcacttgagccagtagaattatttctaattattcttataaattactagtcatgaaatgccatttttatctttgatacacggcaaggtgctyattaattgtggtgggacatgcatgggtctaggtgctcttgcatttttcttttggctccttagtagtcttaaaaacttgcttacatatttcccaacgtttc

SEQ ID NO: 19170 - DNA, 201 bp, Homo sapiens
ctttgccaagatagggaagtgcaaaccagaaagtggtaagccatcaccttcttgataaaggagatggacttaatttaatgaaatgtacctcttactgactytgctgcttgatttaaacaatccttctagggatatttctgtcattgcacttaccttgcatagcaaaccttaatgcaattgtgttttgcctttgctacacca

SEQ ID NO: 19171 - DNA, 201 bp, Homo sapiens
ttgcagtgaaccgagattgcgccactgaactccagactgggcgacagagcgagactccatctcaaaagaaaaaaaaaggcacatagagaaaaagcatacasatttattaacgtgcacacgtgagaatcacagaatgattgcccagtatcccaatggggcccaaatacttacataatcttatttcagaggggaagaggagat

SEQ ID NO: 19172 - DNA, 201 bp, Homo sapiens
ttgaacccaggaggtggaggttgcagtgaaccgagattgcgccactgaactccagactgggcgacagagcgagactccatctcaaaagaaaaaaaaaggcrcatagagaaaaagcatacagatttattaacgtgcacacgtgagaatcacagaatgattgcccagtatcccaatggggcccaaatacttacataatcttat

SEQ ID NO: 19173 - DNA, 201 bp, Homo sapiens
gctaagtcccccattacctggggccagcagggctgactggctgcccgagtgcggggcccaccaagcccacgcccacccggaactccagctggcccgcaagygccgcaggcagccccggttcccgctcgtgcctctccctccacacctccctgcaagctaagggagtgggctccggccttggccagcccagaaaggggctcc

SEQ ID NO: 19174 - DNA, 201 bp, Homo sapiens
caccaagcccacgcccacccggaactccagctggcccgcaagcgccgcaggcagccccggttcccgctcgtgcctctccctccacacctccctgcaagctragggagtgggctccggccttggccagcccagaaaggggctcccacagtgcagtgggggggctgaagggatcctcaaatgccaccaaactgggagcccagg

SEQ ID NO: 19175 - DNA, 201 bp, Homo sapiens
ctaaaccaaaaataaaattctaaggccccccaaccatctgaatggactttctcctggccagggcacttttaaaatttaacctgaaagactggttcgggccrtgatggaagggggtggtcagacatgccttgttatacctctccggcattaatatcaacacagaattcagtctgataagaaacattttacagcctattctct

SEQ ID NO: 19176 - DNA, 201 bp, Homo sapiens
atgagaaagttatccacattctattttctctaggactgtgtgtgtccctatttccatacagtcacaacaatactgagtagtattaattttttttttttttttgagacagagtctcgttgtgtcacccacgctggagtaaagtggcatgatctcggctcactgcaacctccacctcccgggttcaagcgattctcctgcctc

SEQ ID NO: 19177 - DNA, 201 bp, Homo sapiens
gagtctcgctctgttgcccaggctggagtgcagtggcgtgatcacggctcaccacaacctccgcctcctgggttcaagtgattctcctgcctcagcctccygagtagctgggattacaggcatgtgccaccacacctggccaatttttgtatttttagtagagacggggtttcactatgttggtcaggctggtcttaaact

SEQ ID NO: 19178 - DNA, 201 bp, Homo sapiens
cgggcgcctgtagtcccagctactcgggaggctgaggcaggagaatggcgtgaacccgggaggcggagcttgcagtgagccgagatcgcgccattgcactycagcctgggcggtagagccagactctgtctcaaaaaaaaaaaaaaagaaattacagtttagaggtcatgcagcctctggctccaagagtctgaacctccc

SEQ ID NO: 19179 - DNA, 201 bp, Homo sapiens
ttttggagtctacacaatcagaaggagctacagtgggtcttattcttaccaaatagtagaaggttaattctttttcatccctgagaatctgtttattcagratgtagtgtgcttgaatctcctgggtttgtccacaggtcaaagtaccaataataggtttgaggtgaatataactcttgcttggggaaaaaaaatgctttg

SEQ ID NO: 19180 - DNA, 201 bp, Homo sapiens
ctccatccaccggtaacaataatacaaattcagatttctactgtacctaaataacgcaattaagttgcttttcatctttacattgtctgtaaaaatgacarattataggcctaccatacaatattccttgaaacatgagaactgtaatcaggctctttccatcaggctcctctcaggccaataaagtaatatcactgttta

SEQ ID NO: 19181 - DNA, 201 bp, Homo sapiens
tctttctagcctttcaaattccaagttaaagtggaacttgccacatgtcgttttgtatcactttccccaacccctttcttttcttttttttttttttttttgagacggaatttcgctcttgttgcccaggctggagtgcaatgttatgctctcagctcactgcagcctccacctccccagttcaagtgattttcctgcctc

SEQ ID NO: 19182 - DNA, 201 bp, Homo sapiens
gaatctcttgaacctgggaggtggaagttgcagtgagctgagatcacgccaccgtactccagggtgggtgacagagcgagatcctgtctcaaaaaaaaaaagtttatggagtttatgtagagtggtagagtgacccaaaactcaattgaatatactggttttccctgtgtccaaatcaaacagagcctccagagaccatca

SEQ ID NO: 19183 - DNA, 201 bp, Homo sapiens
aaggaaaacaagaccgcagtggctcatgccggtcatcccaacactttgggaggccatggtgaaaccctgtctctactaaaaatacaaaaattaccccagcrtggtggcgcgcacctgtaatccctgctactcaggaggctgaggcaggagaatctcttgaacctgggaggtggaagttgcagtgagctgagatcacgccac

SEQ ID NO: 19184 - DNA, 201 bp, Homo sapiens
acattttgtccttttaaaaattcttttatttgattcaatatattgtattttgtttatttttttaactgcagaagtgagtagttatatatatatatatatawaattccttaccaatgaaagcccacaagagagctcaaagcaattaattcctagataaatataattttaattgatcttatcctacttatccagtcatttttc

SEQ ID NO: 19185 - DNA, 201 bp, Homo sapiens
cgctagagcatgggaggtcaaggctgcagtgagccaagattgcaccagtgcactccagtctggatgacagagtcagaacctgtctcaagaaaaaaaaaaaattttattgtgagcttgaacctaaacttggctcaaaatgagggcttatcttcattctaatgtcaaacctatgaatgtaatttgggattatccatttcaaat

SEQ ID NO: 19186 - DNA, 201 bp, Homo sapiens
attatatatgggagagggtgagtaagtgagaactttcagggtgatgtgtacattgttggacttggcaagtaggtggatggttgtaccattcactgacaaaagactggtgggacgaataatgaattcagttttggatatgttgcatttgagatgccagtgaaatattctagctgcaatgttaaggaaacgggggagaggatg

SEQ ID NO: 19187 - DNA, 201 bp, Homo sapiens
tttgttcctcagagataatacatatgttccctcagaaattatgtgtagcttgggacagcaattatttcaactgatgtaattctttttttttttttttttttgacaccaagtcttgctctattgcccaggctggagtgcagtggcacgatctcggctcactcaacctctgcctcctgggttcaagtgattctcctgcctcag

SEQ ID NO: 19188 - DNA, 201 bp, Homo sapiens
cctcttgagatcctactgttgaaatgtacttgatgcttcctttagaagtattctaatattttcagttaaaatcccattagaaggacaaacaagtaagaaayatttttttataagtttctatttcaggaaaataaaaatataaatttctctttgttaaattatggtagtagaaaaagcttcagtaagaggttattacaattg

SEQ ID NO: 19189 - DNA, 201 bp, Homo sapiens
attaataaataggactgtctgccttatctacccatcagggttgttataatttgaaaaattctttgagaattataaaattatattataaaagtataaaacaygtatattattttcccacatatcctcttgagatcctactgttgaaatgtacttgatgcttcctttagaagtattctaatattttcagttaaaatcccatta

SEQ ID NO: 19190 - DNA, 201 bp, Homo sapiens
ctgattgactttcaaattcagattacttttacgctagcatacggtgggcacaaagggtttttttgtttatttgtttgtttgagacggagtctcgctctgtygccaggctggagcgcagtggtgcaatctcggctcactgcaacctcctcttcctgggttcgagcgattcctcgtgccttagcctcccaagtagctgggact

SEQ ID NO: 19191 - DNA, 201 bp, Homo sapiens
gttggggttgcagggatgggaagaagcaggtcaaagggtacaaagttgaagttacgtaggatgaataaatttagaaatctaaagtacagcatgaggactgyagttgataatactgtattggatactgaaacttggctaagaggatagattttaggtgtgcttgctatgcacacaaaaataggtaacaatgtgagctaatgg

SEQ ID NO: 19192 - DNA, 201 bp, Homo sapiens
tgggagtgaaagggagaagtaaacaagactccaggagcctgaaagggagtatatggccattccggctctttctctccacctgccccactggcttgtttcasggataaaactctgtttccagtgtctctctggaaggaatttgttcactccccttggtgcaaatgtacattgccacagccattatggaaaacagtatggaga

SEQ ID NO: 19193 - DNA, 201 bp, Homo sapiens
ttcaaaaggcaggtatttacgagacaaagctgcatttttaaagcactggtgaagtgtgaagaaaatgagaccgattagggaagaaaacccgagaagctcaragtttgggtgaccctggggatgtgggaaggtggtgtaaatggtaccctgagggtagcatggatggtaagtgaaagaggaaaaggtgtaggtttgcataaa

SEQ ID NO: 19194 - DNA, 201 bp, Homo sapiens
ccctgtcagaattcttcataccacacaaatactaactttgaagggttataagggctagaaacttgctttatggtgcaatttggtatttggagatctcaaaacctgtaacttttacaatcatgaatatctagtaagcatattttgcatacaagagtttgcagtattcctaggaatgcaacttttaatttacttgatggctac

SEQ ID NO: 19195 - DNA, 201 bp, Homo sapiens
gtttgggtgaccctggggatgtgggaaggtggtgtaaatggtaccctgagggtagcatggatggtaagtgaaagaggaaaaggtgtaggtttgcataaaaraaactgatggaatttggatgccccatagcagacccaggggaatgataccaggggaaaagatggacagttttgtgggtaaattagcagtgattttgattcc

SEQ ID NO: 19196 - DNA, 201 bp, Homo sapiens
gtgtctttccttccgtgttcaggaactgaaggcacctcagtcccacacagctcttgagactctagtgcctctgcgctcacagtgaaattcacatttcctgwaaaaaaaggccagtagaaatgaatagcatcttccccttcctccatgcctccaaactcaagatttagaaatgttcaatgctctgtaaacttttgttttatt

SEQ ID NO: 19197 - DNA, 201 bp, Homo sapiens
gtgtaaatggtaccctgagggtagcatggatggtaagtgaaagaggaaaaggtgtaggtttgcataaaagaaactgatggaatttggatgccccatagcaracccaggggaatgataccaggggaaaagatggacagttttgtgggtaaattagcagtgattttgattccttgtcttgttagctgctgatggagatacgtg

SEQ ID NO: 19198 - DNA, 201 bp, Homo sapiens
gtttgcataaaagaaactgatggaatttggatgccccatagcagacccaggggaatgataccaggggaaaagatggacagttttgtgggtaaattagcagkgattttgattccttgtcttgttagctgctgatggagatacgtgtatcagcataatacctggctagtttccatggccggcaagagccagtcctgcagtgtg

SEQ ID NO: 19199 - DNA, 201 bp, Homo sapiens
cagttgggctttattacgttatcccttctttgccctctgaaagctgagttttgaaatagttaggatcttatacaacatctcagattcagcatgctgtgcasgaggtggggagaaaagggtacaaaagaggaaaatgttcagtgaaggtgttattacaatggaggggattatgaaagtggaaattgataccttttcctcttg

SEQ ID NO: 19200 - DNA, 201 bp, Homo sapiens
atgctcataacctgtagagattctctggaaggggctcaagcagtagcttttctgaagcattttccctctgaatataggaggccctcaaagtaataatatgwcttatttcatttcacagatgaacaggcaacaattcagtattctgatccctgtgaatgaggtaagtccagcggagaaatgggtggagttatgggttagggt

SEQ ID NO: 19201 - DNA, 201 bp, Homo sapiens
tgcctaatatgtagcataacatgataatatataattgatgtaattcttactccagaaatacttctattatttacaataaaggtccaagtgtaagaagcctkcgaagtaacatattatggtgtctatctaagctaaaagtctcaagtcaggattctgatacccagagcaaatccaagcacgctaacccctttacagaatagc

SEQ ID NO: 19202 - DNA, 201 bp, Homo sapiens
tcaaaaaacaaacaaacaaaaactatatatatatatatatatatatatatatatatatatatgttatgcctaatatgtagcataacatgataatatataaktgatgtaattcttactccagaaatacttctattatttacaataaaggtccaagtgtaagaagccttcgaagtaacatattatggtgtctatctaagctaa

SEQ ID NO: 19203 - DNA, 201 bp, Homo sapiens
ttgaactccagcctgagcaacaagagtgaaactctgtctcaaaaaacaaacaaacaaaaactatatatatatatatatatatatatatatatatatatatrttatgcctaatatgtagcataacatgataatatataattgatgtaattcttactccagaaatacttctattatttacaataaaggtccaagtgtaagaag

SEQ ID NO: 19204 - DNA, 201 bp, Homo sapiens
gagctgagatcgtgccattgaactccagcctgagcaacaagagtgaaactctgtctcaaaaaacaaacaaacaaaaactatatatatatatatatatatatatatatatatatatatgttatgcctaatatgtagcataacatgataatatataattgatgtaattcttactccagaaatacttctattatttacaataaa

SEQ ID NO: 19205 - DNA, 201 bp, Homo sapiens
gtgagctgagatcgtgccattgaactccagcctgagcaacaagagtgaaactctgtctcaaaaaacaaacaaacaaaaactatatatatatatatatatatatatatatatatatatatgttatgcctaatatgtagcataacatgataatatataattgatgtaattcttactccagaaatacttctattatttacaata

SEQ ID NO: 19206 - DNA, 201 bp, Homo sapiens
tcgtgagctgagatcgtgccattgaactccagcctgagcaacaagagtgaaactctgtctcaaaaaacaaacaaacaaaaactatatatatatatatatatatatatatatatatatatatgttatgcctaatatgtagcataacatgataatatataattgatgtaattcttactccagaaatacttctattatttacaa

SEQ ID NO: 19207 - DNA, 201 bp, Homo sapiens
tgtcgtgagctgagatcgtgccattgaactccagcctgagcaacaagagtgaaactctgtctcaaaaaacaaacaaacaaaaactatatatatatatatatatatatatatatatatatatatgttatgcctaatatgtagcataacatgataatatataattgatgtaattcttactccagaaatacttctattatttac

SEQ ID NO: 19208 - DNA, 201 bp, Homo sapiens
acccaggaggcggaggttgtcgtgagctgagatcgtgccattgaactccagcctgagcaacaagagtgaaactctgtctcaaaaaacaaacaaacaaaaamtatatatatatatatatatatatatatatatatatatatgttatgcctaatatgtagcataacatgataatatataattgatgtaattcttactccagaa

SEQ ID NO: 19209 - DNA, 201 bp, Homo sapiens
cacttgaacccaggaggcggaggttgtcgtgagctgagatcgtgccattgaactccagcctgagcaacaagagtgaaactctgtctcaaaaaacaaacaaacaaaaactatatatatatatatatatatatatatatatatatatatgttatgcctaatatgtagcataacatgataatatataattgatgtaattcttac

SEQ ID NO: 19210 - DNA, 201 bp, Homo sapiens
aaagctttattgcttacacaaatcccgtttggtggtctcttcacacggacgcacatgaaacaaactatatatgtgtatgtatatagtttgtatatatgtayatactttgcttgtttatttttttttgagatggagttttgctcttgttgcccaggctggagtagtggcacgatctcggctcactgcaacctctgcctccca

SEQ ID NO: 19211 - DNA, 201 bp, Homo sapiens
aaccataccatcatcttgttagatggagaaaaagtatttgacagaattcaatgctcttttatgataaaactctcaccaaattagatatacaagcaatgttyctcaacacaataaagggcatgtatgataaacctatagcttacatatttaacagtggaaaattgaaagactttcctttaagatctggaacaagacaaggat

SEQ ID NO: 19212 - DNA, 201 bp, Homo sapiens
aagtccagcctggggaacacagcaaaagctcatcacttaaaaaactaaaccaaccaaccaaccacacgaaataaactagcagactaaatccaacaatacaktaaaaggatcatctacctagtcaagtgggatttatccctgagatgcaaaaattgttcaacatatgcatatcaataaatgtgatacattacatttacagaa

SEQ ID NO: 19213 - DNA, 201 bp, Homo sapiens
gcttctttttttttttcttttttagaggtgaggtcttgctctatcactcaggatgaagtgcagtggtacaatcacagtttactgcagcctcaaactcctgrgtaaaagcaatcctcccgcctcagcctcctgagtcagaaagtaattgttttgatctttacgcttaccactctaatctaagtcaccctcttttcttgtctg

SEQ ID NO: 19214 - DNA, 201 bp, Homo sapiens
caatattcttgatgaatatagatgcaaaaatcctcaataaaatactagcatagcagctaagcatggtggcatacacctgtgggtggctgaggtggtaggaytgcttgaactcaggagttcaagtccagcctggggaacacagcaaaagctcatcacttaaaaaactaaaccaaccaaccaaccacacgaaataaactagca

SEQ ID NO: 19215 - DNA, 201 bp, Homo sapiens
agtaagctcaaaattggcagaagaaaggaaaataataaagattagagcagaaataaatcaaatagagactagaaaaagaatacaaaagatcaatgaaactraattgtttttttaaaaagacagacaaaaacttttagctaggttagctaagaaaaaagagggaggccttaaatatataaaatcagaaatgaaagagaaatt

SEQ ID NO: 19216 - DNA, 201 bp, Homo sapiens
aagtaagctcaaaattggcagaagaaaggaaaataataaagattagagcagaaataaatcaaatagagactagaaaaagaatacaaaagatcaatgaaacygaattgtttttttaaaaagacagacaaaaacttttagctaggttagctaagaaaaaagagggaggccttaaatatataaaatcagaaatgaaagagaaat

SEQ ID NO: 19217 - DNA, 201 bp, Homo sapiens
atttacatcgtattaggtattataagtaatctagagatgatttaatgtatactggaggatgtgtgtaggttacatgcaaatactacactattttatctcaragacttgagcatctgtggattttggtatctgcagggggtcctggaacccccacaccctcacccagactgagggatgactgtatttacgttatctaccact

SEQ ID NO: 19218 - DNA, 201 bp, Homo sapiens
ctaagaggaaagcttataacaataaacaccaaaaaagaagaaaaatttccaataaagatactaatgatattcctcagagaagtaggaaaagaagaacaaastaagctcaaaattggcagaagaaaggaaaataataaagattagagcagaaataaatcaaatagagactagaaaaagaatacaaaagatcaatgaaactga

SEQ ID NO: 19219 - DNA, 201 bp, Homo sapiens
ctgtgtgcttaattaattatggaaaactccattaaaacaagaatgttttaattttgggggttggtattaaatattgctacagaaaataacgaagctatgtkaagtcctattcacagatcactgatgtcctcattggacttaggtgtaattaattctactccaagcccaatgtcacccatgggaaatggaaagactccaaat

SEQ ID NO: 19220 - DNA, 201 bp, Homo sapiens
tggtatctgcagggggtcctggaacccccacaccctcacccagactgagggatgactgtatttacgttatctaccactctgatgttttctttttgctttarattgcccattacctcttcatctgtttcatttattcattcaaaaatttgtattgagtggctactgtgtcgggcatggtgccacttgctggagatacagcgt

SEQ ID NO: 19221 - DNA, 201 bp, Homo sapiens
acaaaatatgtaaattctgacatcaacgacataaaatgtgtgtgggggagtgaaagaatgcaaagttaagttgttatcagcttgaaattgactgtaaaccycatagtaacagcaaggcaaaaatctttaatagaagcacagaacaaaaattttaaaagattcaaatcataccactacagaacatcagaccacaaaggaaga

SEQ ID NO: 19222 - DNA, 201 bp, Homo sapiens
ttgataagcctcactgattgctacttgctagatggttttaggagatatcttgaagttgaccttgtgtgaggttactggatggaaacagcatgagtttaatyttgtacatgacttcttttgttgagctggagatactattgtcttgcagattatctctttggcacgcatgaccatttttttttgtcttttaaatcacaaact

SEQ ID NO: 19223 - DNA, 201 bp, Homo sapiens
aaaatcaaagacaaaaaaaaattctgaaaagcagaaggtgataaagaaacatatcacatacaaaggaattccaatacaactatccatggatttttagcagkaacccggcaggctgagggagagtggaataatatattcaaagtactgaaggaaaacaaaaataaaaacaacatggaatcaagaattcttcatccagcaaag

SEQ ID NO: 19224 - DNA, 201 bp, Homo sapiens
ttgaccttgtgtgaggttactggatggaaacagcatgagtttaatcttgtacatgacttcttttgttgagctggagatactattgtcttgcagattatctytttggcacgcatgaccatttttttttgtcttttaaatcacaaactggctttctttctgctaaggttggtgtgcttagattctttaagctccaaatctcaa

SEQ ID NO: 19225 - DNA, 201 bp, Homo sapiens
gccattgtagtacccagccagcagctccaccagatagcagagacaaaacagtgatcttgccagagagcaaggcccaaccagtggccctaccaaacataagrgcaaaggcagtggcccagccaactagggaacccatgaaaactctgcctgctcaaggttgtcaccaactgatctttccagaattataggctagactaaata

SEQ ID NO: 19226 - DNA, 201 bp, Homo sapiens
tctggagaatgttagctttactgaaagtataaaagtttcgttgttgtagacaccaggtcctaataaaaacaagtaaaagaagaaaaagtttgttatgggtrgaactgattaagtgaggtaccactgaagaattaaagatatctcacacatactttgattaattaaatggtgaataagaacttgttttaatctcattattca

SEQ ID NO: 19227 - DNA, 201 bp, Homo sapiens
aaatatttaaggaatcattgtagtattcccaacagttttatagatgaaattttaagttctctgggttataacttgctttctgatgccattataaacctgayggctgagacactggtcgatcacccattaggaatatatgctaaaattgttgctttcagtttttaaaatatggcttaattttatgtttgcttaaaattggtt

SEQ ID NO: 19228 - DNA, 201 bp, Homo sapiens
actgcactccagcctgggtgacaataaaaataaataaatgaaatgaaaataaaataaggtggaattttcacccattgacaaaaagttaataattattattrtatctaatttctggacattgaatagctcataagccaacctacttatgagcatctgttttctggatgagcttcaaccgttgcaagtggatttttcttcttt

SEQ ID NO: 19229 - DNA, 201 bp, Homo sapiens
cctgtccttcaaagaagaaagagagatttctgtttctttgaaagatttaaagttacaagagtaagaaggatttaaagttagaagagtaagaaggataaagmataagaaacatctggatgaaagagggtccctgaaacttctcagttgcttgctgatttacatgccattaaactttttctgacaactgtaacccagcttata

SEQ ID NO: 19230 - DNA, 201 bp, Homo sapiens
tcctcctctctcccatcccccaaaataataccatctaattcagaaaaatcagaaaaatggcttagtatagacaaggcagtgtctcagagaggaaatgatayggctaggactaagggagaaggaccctgtccttcaaagaagaaagagagatttctgtttctttgaaagatttaaagttacaagagtaagaaggatttaaag

SEQ ID NO: 19231 - DNA, 201 bp, Homo sapiens
atattggatgagtcactaaattgcatcatctcaagaaatgttcctgcatttacatgttatccacttagaatttaaagtggacagaaaaacagtatttgttyagctttggtgaaatggtgagggaagggagagaggcaatttaatgtaacttgtagagagtcctcattccagttgtaatgtacaacataccacttacctcaa

SEQ ID NO: 19232 - DNA, 201 bp, Homo sapiens
ctggataagcagagtcctttcctacagggtctgagaaggccaccacagtcatttcttcccttctgtcagacataattcttcagtttagccttcccacctcwatacagtctgataacagacgagcctttattagtcaaatcagccaagccttttttcaggctcttagtatccagtgacagactaatggtctattaaaaacac

SEQ ID NO: 19233 - DNA, 201 bp, Homo sapiens
ggaatataacttttgatgagatcgtcaacattgcttgacagatgcggcactgatccttagccagagaactctctggaaccattaaagagatcctggggacygcccagtctgtgggctgtaatgttgatggccactaccctcatgacatcatagatgacatcaacagtggtgctgtggaatgcccagccagttaagcacaaa

SEQ ID NO: 19234 - DNA, 201 bp, Homo sapiens
tccggcgccggtcacggactagggaaggcagccttcccttggtgtttagtcattgcagggacacctctctgattatttacacacgtttcagaggtgtcaaygcaggagggacgcctgcattggtccttcacccttagcggcaagtcccgcttttctggggaaggggcaagtaccccaaccatttctctccgtgtctctacc

SEQ ID NO: 19235 - DNA, 201 bp, Homo sapiens
catcccccaaaataataccatctaattcagaaaaatcagaaaaatggcttagtatagacaaggcagtgtctcatagaagaaatgatatggctaggactaarggagaaggaccctgtccttcaaagaagaaagagagatttctgtttctttgaaagatttaaagttagaagagtcagaggatttaaagttagaagagtaaga

SEQ ID NO: 19236 - DNA, 201 bp, Homo sapiens
acccttaataaaaacttgctggtctgagactcaggcaggcatcacagtcctactgatatgtgatgtcacccctggcagcccagctataaaattcctctctytgtactgtctctctttatttctcagccagccaacacttatgcaaaatagaaagaacctacattgaaatattgggggtgggctcccccaatagaaaggcag

SEQ ID NO: 19237 - DNA, 201 bp, Homo sapiens
ctactacttctcctcctctctcccatcccccaaaataataccatctaattcagaaaaatcagaaaaatggcttagtatagacaaggcagtgtctcatagargaaatgatatggctaggactaaaggagaaggaccctgtccttcaaagaagaaagagagatttctgtttctttgaaagatttaaagttagaagagtcagag

SEQ ID NO: 19238 - DNA, 201 bp, Homo sapiens
tttgtttattgattcatcaattgatggacatctgtctgggtttttctacctttggctaatgtgaataatgctgctatgaacattcatgtacaagtatttgrgtacccagtttcaattcaactgggtatagacttagaagtcaaattgtagcagaattgtaggccaagtgtagtggctcatatctataatcccagcactttg

SEQ ID NO: 19239 - DNA, 201 bp, Homo sapiens
tgttctactacttctcctcctctctcccatcccccaaaataataccatctaattcagaaaaatcagaaaaatggcttagtatagacaaggcagtgtctcakagaagaaatgatatggctaggactaaaggagaaggaccctgtccttcaaagaagaaagagagatttctgtttctttgaaagatttaaagttagaagagtc

SEQ ID NO: 19240 - DNA, 201 bp, Homo sapiens
aatcttcaccgtggcagtcggaagcgtcactatactttctgcaaatgctcacagtcacatgtccagggacaggcttcccatatgtgtatctgtcatgagavcattcccaaaggaatcagagcagacaccgaacctccccattttctagctatttatatctcccctttagctacagtatattccctgtctgtacttccctct

SEQ ID NO: 19241 - DNA, 201 bp, Homo sapiens
tgcaccaccacaatcagctaattttctgtatttcttgtagagatggggtctctatatgttgcccaggccggtcttgaactcctgggctgaagtgagcctcycaccttggcctcccaaactgctgggattacaggcatgagccttgtgctcggccttaatctgctttttaaacaggaacacagaacaaaaaagattgtttgc

SEQ ID NO: 19242 - DNA, 201 bp, Homo sapiens
gaatcgcttgaacctggcaggcagaggttgcagtgagctgagattgtaccactgcacttcaacctgggcaacagagtgagactccatccccactcccccayaaaaaaaacagcagctagaggctggccagggaactatgtttctcatagaggcctgcctgcctgcctgccttccttccttccttctttccttccttctctg

SEQ ID NO: 19243 - DNA, 201 bp, Homo sapiens
acacacatcactatgaaacaccatgctcaatacactgtttaaactgtcactgtgaatgaaagcaattgtatttgtttgaggaatatggacctaagtcttayacctttatagtagcattttgcacttgaggataaagagaatatggaaatattaagaaatattttagctttgttagatttttgcctccagatcaaacagaac

SEQ ID NO: 19244 - DNA, 201 bp, Homo sapiens
aagaatgatgtctctaaaattctatcacctccccccaacttacaattcattatttggctaagaaaatcaatgcctgttgtgttttctcttatacccatgtwgtacacaaacctgttccttcttcttggatctgggcctcagtgtgaagtttcatttcatactccttcctcttcagctggaagaccttggtttttacttgct

SEQ ID NO: 19245 - DNA, 201 bp, Homo sapiens
ctccgcctccccggttcacgccattctcctgcctcagcctccccgagtagctgggactacaggcgcctgccaccacgcccggctaattttttgtattttttagtagagatggggtttcactgtgttagccaggatggtctcgatctcctgacctcgtgatccgcccgccttggcctcccaaagtgctgggattacaggcgt

SEQ ID NO: 19246 - DNA, 201 bp, Homo sapiens
taatttaaaatcaagtcttcttttcatttctgcaagtttttgcttgttgttttataataaaaaatttcaaaaatacagaaatataaaacagggtgatatayatctatgtacctcaaacctagaattttgttactcttttatcatatttgtgtcagacatctcaagacataaaacatttctgattaaggctgagcatggtgg

SEQ ID NO: 19247 - DNA, 201 bp, Homo sapiens
ctccatgggctcctgtgcggcccgagcctcctcgacgagcgccaccccctgctccacggcacccagtcccatcgaccacccaagggctgaggagtgcgggygcacgcaggggactggcaggcagctccacctgcagccccggtgcgggattcaccgggtgaagccagctgggctcctgaatctggtggggctttggagaac

SEQ ID NO: 19248 - DNA, 201 bp, Homo sapiens
atattaaaatgtttcttaaaaaaaagccataagcatagttaaaggacaaatggctaagcaaaataaaatgcttgactcactgaaaataaaataactgctaytgatgaacatacatttactacaattttagtattggtgaattatatacaaatgaaaaatgtagcagttatcttccctttctcataaaattaatgttaaaac

SEQ ID NO: 19249 - DNA, 201 bp, Homo sapiens
tatattcttatttttctactaaatgtggaatttctagtttatgatatttgtaatttaaaatcaagtcttcttttcatttctgcaagtttttgcttgttgtyttataataaaaaatttcaaaaatacagaaatataaaacagggtgatatacatctatgtacctcaaacctagaattttgttactcttttatcatatttgtg

SEQ ID NO: 19250 - DNA, 201 bp, Homo sapiens
tatttgatgcattgaaaataaaataattactactcatgaacatacatttacttccattttaatcttggtaaattatatgaaatgaaaatgagagaagtatrgtatttattttcatactgaatcccttcctcataaaattcatattaaaatgtttcttaaaaaaaagccataagcatagttaaaggacaaatggctaagcaa

SEQ ID NO: 19251 - DNA, 201 bp, Homo sapiens
tattctttccatttctttgttatctccatttcccactcccattccccacccctctaggaaaccattctcatgtttaatgtgtatcctttcattgtatattkccttttaacatgtttattgtatgcatgcatttctaatttataaacatgggacttgtcatagatttgtttagtttttcactcagcactgttttcaagatca

SEQ ID NO: 19252 - DNA, 201 bp, Homo sapiens
ttcttcttcaatgatcttttcagtaatttatgtagaatcgcatgccaaataagacaacaaattgtaagagcctggtgatgttgtgattcagttgctgtcawctgatggctgacacaagacggttatcacaagatgatctatttagttcccaccaccaacttccttactcaacagttgtatggagaaaacaccaacaacaaa

SEQ ID NO: 19253 - DNA, 201 bp, Homo sapiens
agaatgagactctgtctcaaaaaaaaaaaaaaaaatttagaatgagcacgaagttaatgaataatacctcagtcacattctagtaagaaaccattcctccytgtgggaattagagccctgcccccagaaccctggctctgaggtttgacttctgttatgtactgacagtccccattacgctcatggttccatggtgccagc

SEQ ID NO: 19254 - DNA, 201 bp, Homo sapiens
tttcttcttcaatgatcttttcagtaatttatgtagaatcgcatgccaaataagacaacaaattgtaagagcctggtgatgttgtgattcagttgctgtcwtctgatggctgacacaagacggttatcacaagatgatctatttagttcccaccaccaacttccttactcaacagttgtatggagaaaacaccaacaacaa

SEQ ID NO: 19255 - DNA, 201 bp, Homo sapiens
ttgggagctaataaaataccccagtattattgggtgttttcttgaggttgacaaataatagattaattcctaagcattctgagctctttcctgtatttttstgttctttattttttttccaaaatagaaatggctttacctttctgaaaataaaataaggtattattattgtaaaacactcagacaatttagaaaaattat

SEQ ID NO: 19256 - DNA, 201 bp, Homo sapiens
actggcaatatcattttaaaactcatggttatggtagctactttagaaagaatagccatttcagaaagaaaaccttggtacattattaataggatccattytggaaacaagcctaacataacatgtatttggatatcaggttttcttctgattaccttgctaatcttggtggatttatctagtataacaaaccatcggtct

SEQ ID NO: 19257 - DNA, 201 bp, Homo sapiens
aggcctcgtgttcagtctgaaaacagctgcttcctgtacttcgttcagttctctaattgctcacaataaaaagctaagtcctttcttacttcatcatggcyagaagcagttcccatgcgaatgtcttggttaaaggagaaaaatgtataaggtaactataaactaagactttcacatcaattcagttggttcttttgttaa

SEQ ID NO: 19258 - DNA, 201 bp, Homo sapiens
agtattccatgatgtatatgtaccacattttctttatccagtctgtcattgatgagcatttgggttagttccatgactttgttattgtaaatagtgccgcrataaacatacatgtgcatgtgtcattatagtagaatgatttatattcctttgggtatatacccagtaatgggattactaggtcaaatggtatttctggtt

SEQ ID NO: 19259 - DNA, 201 bp, Homo sapiens
ccttcaagtggtgaagacaagtaggtaattggatacacaagtctgggctcagggtagaggctgggctagagaaagaaatttgggagtcatcagtgaatagrtgacattttaagccatgggcttggaggagataacctaaggaatgacgagaatacatctgaagatccagcctcagacactctggtgtacagaagcaggtag

SEQ ID NO: 19260 - DNA, 201 bp, Homo sapiens
aacaatgtcctcaggaatacttcagaaatagaaggtatgcaatcccttagtggggggcaaacacatttcagatttcgtctttatttaaaaggatcttcagwctacaacatttgcttttttcgtgctttggaaaatatccttgtgcagataagttcttctgtttgaaacaagcatgaaacattggtccaataacctaagaat

SEQ ID NO: 19261 - DNA, 201 bp, Homo sapiens
tgctaactctctctttgccacagggagtcttagtatatttaattttattttagttccgagatacatgtgcagaacgtgcaggtttgttacataagtatacrtgtgccatggtggtttcttgcacctattgacccatccgcttagttccctcccgtcaccccacacctcccaacaggccctggtgtgtgttgttcctgtccc

SEQ ID NO: 19262 - DNA, 201 bp, Homo sapiens
attgttgtaatgattcaactgttcctacatttaattgcagtttaattattatgccttttggggttaaatgatgtgaagtgtttccacctactgataaatascatatgaaaacacgactaaaagactgatttaagaaacttgttatttttaaaaatatgaatttcaaaagaaatgttctcaaagacacatgcatttatttta

SEQ ID NO: 19263 - DNA, 201 bp, Homo sapiens
ttaatctgctagatgtagtatttccttgctaactctctctttgccacagggagtcttagtatatttaattttattttagttccgagatacatgtgcagaaygtgcaggtttgttacataagtatacgtgtgccatggtggtttcttgcacctattgacccatccgcttagttccctcccgtcaccccacacctcccaacag

SEQ ID NO: 19264 - DNA, 201 bp, Homo sapiens
gttgttttgttttttgagacggagtctcgctttgttgcccaggctggagtgcagtggcgtgatttcggttcactacaacctccacctcccaggttcgagckattctcctgcctcagcctccagagtagctgggattacaggcgcctgccaccacacctggttaatttttgtatttttagtagagacggagtttcaccatgt

SEQ ID NO: 19265 - DNA, 201 bp, Homo sapiens
tctattcagaggggaggctgttttgcaatctgcacataattcttgcagctgctgcctgctgccctgactcactgcctccctgtttgcctctagggtggtgytgatgatgaggtctccttgactgcgtatgtcacagctgcattgctggagatgggaaaggatgtagatgtaagttctcctggctcctgctcttgataccct

SEQ ID NO: 19266 - DNA, 201 bp, Homo sapiens
tacttagagagcttatctccttgattaatctttagtctgcctgattaatctgctagatgtagtatttccttgctaactctctctttgccacagggagtctwagtatatttaattttattttagttccgagatacatgtgcagaacgtgcaggtttgttacataagtatacgtgtgccatggtggtttcttgcacctattga

SEQ ID NO: 19267 - DNA, 201 bp, Homo sapiens
agagaatatctttccctctccttcctcttcccttcactcttctcaaaactataaaaatataatactcatttctacctgtttttgtggcttttatactttcratgtgttcatctacatgagatttagtttgatgtgtggaacagcaagagagtttaaattaaaaatcttcccctaaatggctaaatgtcccagtgccattta

SEQ ID NO: 19268 - DNA, 201 bp, Homo sapiens
ttagagtgccctttaagcagagaatatctttccctctccttcctcttcccttcactcttctcaaaactataaaaatataatactcatttctacctgttttygtggcttttatactttcgatgtgttcatctacatgagatttagtttgatgtgtggaacagcaagagagtttaaattaaaaatcttcccctaaatggctaa

SEQ ID NO: 19269 - DNA, 201 bp, Homo sapiens
gttttctatgagtagaaatcctttccactggtttgttattttccttttgattttattttacttttgacaccctgaaggtttagtgttcctgtttttaaatstactgattgtttcttaggagattccttagagtgccctttaagcagagaatatctttccctctccttcctcttcccttcactcttctcaaaactataaaaa

SEQ ID NO: 19270 - DNA, 201 bp, Homo sapiens
gaggccgaggcgggcagatcatgaggtcaggagctcgagaccaccctggctaacacagtgaaaccctgtctccactaacaatacaaaaaattagccgggcrtggtggcaggtgcctgtagtctcagctactcgggaggctgaggcaggagaatggcgtgaacctgggaggtggagcttgcagtgagctgacatcacgccac

SEQ ID NO: 19271 - DNA, 201 bp, Homo sapiens
gaaatagggctacattacctcattttagcattttgggcatagtaatattgttggacatgaaataaaattaaaagcaaattgctgttttacctccatagtayccttgacctactgctcctgcagacacggaagggatgactgaacacgactttggttttcggatttttgagttagtgaacaccttcaatcccatcccctgga

SEQ ID NO: 19272 - DNA, 201 bp, Homo sapiens
tagtccccaggcaagaaggaggtgtgctttgggaaagggctgttatcatctttgttttaaactataagtttctctcaaagttagttcagcctatgctgaaygaacaaggaggttagaagcaagatggagtcggttaagttaaaactctttcaccgtctcagtgataattttgcaaaggcggtttcagtttgataaggcaac

SEQ ID NO: 19273 - DNA, 201 bp, Homo sapiens
aatacttacactattcctaataccttaagtgtacttgtaagtgaagagcaaagttggaggctgttgaggtaaataatctcaagtgagattggaactatacrttttatgctcctggttttcatgatcgcaaagatttaatgacagtaacttaagattctcttgatgtatcaaattacaaggtttcatttgtaaataaggtga

SEQ ID NO: 19274 - DNA, 201 bp, Homo sapiens
atcatgatgtttatgttgtcaaaatggttttataaccacttcacagcaacaggcttcatatgatgtgagttagctaacaaaattcttgtgtacttagagakcttatctccttgattaatctttagtctgcctgattaatctgctagatgtagtatttccttgctaactctctctttgccacagggagtcttagtatattta

SEQ ID NO: 19275 - DNA, 201 bp, Homo sapiens
gagagatctgaataattcaacttctgagaatgctattgattagttctttctattctgctgtgtcatggaattcatccttacccatatccatccctataggrcaaagtatcacaatcaacttttgttctatcccctcttttttggtgccatccaggttttattttcctctgaggctttcccttagaatttttcacattatca

SEQ ID NO: 19276 - DNA, 201 bp, Homo sapiens
acttacaatggtcccacttaagattttttagactttacaatgagtttgtcaggatataaccccatcgtaattgagaagcatctgcacggcctcttgtcttytgatttctgatttgattaagaaatcctagattttataagatgcaatatggacaaaatatatatgatatatagaaaagaagagaggagacagggatcacag

SEQ ID NO: 19277 - DNA, 201 bp, Homo sapiens
gagatggtccctgacttacaatggtcccacttaagattttttagactttacaatgagtttgtcaggatataaccccatcgtaattgagaagcatctgcacrgcctcttgtcttctgatttctgatttgattaagaaatcctagattttataagatgcaatatggacaaaatatatatgatatatagaaaagaagagaggag

SEQ ID NO: 19278 - DNA, 201 bp, Homo sapiens
gaattcattcaaggagttacttccatgattattttcttatgtttaaggttatataatgtaccaggtaagggttgggcatatattgagaactgatatgttarttgtaataactagtacttttataggatttgctatgtgacatgtactctactaagtgttttacgtgtaccaattcatttattacaacagctctgtgaggta

SEQ ID NO: 19279 - DNA, 201 bp, Homo sapiens
ccaaatcccagatccaggtctcagggaagtacttccggactatctctttcacttgcaatatctgaggttcttcttcgatcattgggtacattatttctacrgctcctgggggtacacctcgcagacctggtcctggaagacaacacacaggcctcagtgtgaacctcatttttatcatcaatttcttattgctgccttatt

SEQ ID NO: 19280 - DNA, 201 bp, Homo sapiens
cagcaaaaatataaggaaatccatggaattgtaacgacaaattcaggataatgattgcctctggaggtggtagtgatacacaagggatttatttttcccaygtcggtaattttctatttcttaatctatgagagagttgtacagtgttttctagttatagcttatgcccttttgtatatctattataaaatatttctcaat

SEQ ID NO: 19281 - DNA, 201 bp, Homo sapiens
caccgtgatccacatccgcagcaagacctccgtgccccaccatgtcgtctggtccctgttcaacaccctcttcatgaacccctgctgcctgggcttcatarcatttgcctactccgtgaagtctagggacaggaagatggttggcaacgtgactggggcccaggcctatgcctccaccaccaagtgcctgaacatctgggc

SEQ ID NO: 19282 - DNA, 201 bp, Homo sapiens
gacaaacaaaaaactaagctgctgaaatattcaaaaatgtttctcttgtttcttgaataagagagaaataaaaatcttgtttctctcaagatgaaacacaygtgaagattctaaatattagttagggatacatatgcagcaaaaatataaggaaatccatggaattgtaacgacaaattcaggataatgattgcctctgga

SEQ ID NO: 19283 - DNA, 201 bp, Homo sapiens
ggagccatcctccgatggagcacaggcagatggaagcccccaccccagctgcgtggcctgaagccagcctcccgctccccgaaggtggtctccacacagamctgggacagttccatccccgccccttcctccagggcagcagggctgaggatcccattctggctgtgtccacgtccgggccatggctggagtctgggttta

SEQ ID NO: 19284 - DNA, 201 bp, Homo sapiens
ttcaactgttcctacatttaattgcagtttaattattatgccttttggggttaaatgatgtgaagtgtttccacctactgataaataccatatgaaaacaygactaaaagactgatttaagaaacttgttatttttaaaaatatgaatttcaaaagaaatgttctcaaagacacatgcatttattttaaattcaaaaaatt

SEQ ID NO: 19285 - DNA, 201 bp, Homo sapiens
aaaatcaggataatcaaaggtctcatttcagaagttatgaaggattaaatagagtaatgctcataaaatgatatatttacatattcagtactcaataaatkctagctacaattaaaaaagtgtgtgtgtgtgtgtgtgtgtgtgtgtgttttaaatgactaagttggaattggccttttttttgtggtttccatcattcga

SEQ ID NO: 19286 - DNA, 201 bp, Homo sapiens
agcccactaatcagtcattatgcttctcaaagcataatttggagaaacacagatgcacaagaaaacaggcacatgagtattcattgcagcattttttttartagcaaaacataaaaaaaatccatgaggagaaactcgatgtgtaaattatgactaatttatagactgtaatatattatgcagcagtgaaaattaatgagc

SEQ ID NO: 19287 - DNA, 201 bp, Homo sapiens
ggcggcgcccgctaggatttccagttgtcctcttcttcctctgcctgtggctgctgggggttagcagacacggtttgttgtctgacatacgggctctctcytcccggcccctcaccagccccagaggtgaaaaggctggagggcaaaggctgagtgagggaggtctgtggggagcactggtttccccaggccccagagact

SEQ ID NO: 19288 - DNA, 201 bp, Homo sapiens
acttggaattcatcatctgaaatagttactgtttgtggtgcattgaccgtaacttcaaacttgggcagcactggaaacgaagagaaatatacgttagcctscacaatcacaggcaagcaaaccttattgcagtcatatagcttactatgattccttgtaccctccatctgtatgagctatgtatcatttgccccaaattgt

SEQ ID NO: 19289 - DNA, 201 bp, Homo sapiens
tcagtactcaataaatgctagctacaattaaaaaagtgtgtgtgtgtgtgtgtgtgtgtgtgtgttttaaatgactaagttggaattggccttttttttgkggtttccatcattcgaacttattttattgatactcattagcgaatataattttgttgatttttttggtgcattatgacactttttgttagtgattacaca

SEQ ID NO: 19290 - DNA, 201 bp, Homo sapiens
tgtgcttagcccactaatcagtcattatgcttctcaaagcataatttggagaaacacagatgcacaagaaaacaggcacatgagtattcattgcagcattktttttaatagcaaaacataaaaaaaatccatgaggagaaactcgatgtgtaaattatgactaatttatagactgtaatatattatgcagcagtgaaaatt

SEQ ID NO: 19291 - DNA, 201 bp, Homo sapiens
ctggtttccccaggccccagagacttaaacacaggaagaaaaaggcaagagagaattaacgatgccacagcccatggcagacagcggccctgcctcctacscttgcgtctcaggaccagcttgttgaagagatcccacatcagttccctgccttggcttacggctctcactgcaataggaaagccacggagtggggtgtgg

SEQ ID NO: 19292 - DNA, 201 bp, Homo sapiens
ccagcttgttgaagagatcccacatcagttccctgccttggcttacggctctcactgcaataggaaagccacggagtggggtgtggggttcagtcacattkgacccccggctccgtgttcctgtcccctgtagtgtttttgttattagaccctttttcctccttggtttaggaatgggggccccagggccacccttgtcca

SEQ ID NO: 19293 - DNA, 201 bp, Homo sapiens
aagccaaaacataataagacaatcaaaagattgtccctgttatcattctgctgcatgaaaagggaaactgcaagcattctccgcattctcggctgcaagtrccagcactgatcatgaaatgtttacatagcccttactatgggagacaggaaaggagctgtgaaggacaagtgtcagatctgctgctgctgcttcaagact

SEQ ID NO: 19294 - DNA, 201 bp, Homo sapiens
aacccccaggctatcggttatgtccccttaagctgtagggggaggggaatttggcccaacccagctacatgtccccttctccctctctgatttaaagcagrtcaaggcagacctggggaagttttcagatgatcctgataggtacatagatttcctacagggtctagggcaaaccttttacctcatttggagagatgtcat

SEQ ID NO: 19295 - DNA, 201 bp, Homo sapiens
agaaccctaaaatagtaacagaggacaaggaaagaggaaaggaagagatactcacttgaaaattcattatttaataatcttgcccttgcaaaattggaaakattttataatttttttattgataggtaatattttcattgctattatttaccatattcttccacagagaaggagtgatatgttttcttctcattgagcatc

SEQ ID NO: 19296 - DNA, 201 bp, Homo sapiens
  misc_feature (1)...(201): n = A,T,C or G, or insertion/deletion polymorphism (see Tables 1-2)
gaagaattcataaaatcagcaaaataatttaacaccttctttttcccttaccttctacacatttatattttacttctttttagccatctatcccattctantatctttctatgaatacattattctattgtgtacaatttcaacttacaaggcacagacattcactttgaattcagagtccacaactaagatattttctgg

SEQ ID NO: 19297 - DNA, 201 bp, Homo sapiens
agtcagttgtcttaaactgttacataaaaccacgtgtcataacatgcattaaaagaattatagatgcatggaagaattcataaaatcagcaaaataatttmacaccttctttttcccttaccttctacacatttatattttacttctttttagccatctatcccattctaatatctttctatgaatacattattctattgt

SEQ ID NO: 19298 - DNA, 201 bp, Homo sapiens
acaccaaatattgcttttacactgaaattgtgttcacatgtcttctgtttgcagcgagaatcaaacaagaggaatggatattagctaagcaagatgatttygggaatgattttttgtttgtttgtttgtttcgacattgaattaatatggagacataaacaataagcaacaggattcagtaaagtatgtagtatagacaat

SEQ ID NO: 19299 - DNA, 201 bp, Homo sapiens
gggaatgattttttgtttgtttgtttgtttcgacattgaattaatatggagacataaacaataagcaacaggattcagtaaagtatgtagtatagacaatrgggagtcaggaatgaaaagacaatcaactttagttaggccggaaaagactttaccaaagcggaacctaagatgatcattcatggatgggaggtggaggag

SEQ ID NO: 19300 - DNA, 201 bp, Homo sapiens
ttgtttgtttgtttgtttcgacattgaattaatatggagacataaacaataagcaacaggattcagtaaagtatgtagtatagacaatggggagtcaggartgaaaagacaatcaactttagttaggccggaaaagactttaccaaagcggaacctaagatgatcattcatggatgggaggtggaggagaatggggagtta

SEQ ID NO: 19301 - DNA, 201 bp, Homo sapiens
  misc_feature (1)...(201): n = A,T,C or G, or insertion/deletion polymorphism (see Tables 1-2)
gacagtagtcagttgtcttaaactgttacataaaaccacgtgtcataacatgcattaaaagaattatagatgcatggaagaattcataaaatcagcaaaanaatttaacaccttctttttcccttaccttctacacatttatattttacttctttttagccatctatcccattctaatatctttctatgaatacattattc

SEQ ID NO: 19302 - DNA, 201 bp, Homo sapiens
ttcccaggaaaggactgtgcaaatatatatacaaaggtggaagggtgcttcacagggatagtaaaaatttaccctctagagtagaatggctattttcaggktgtgtttcccataattaggtaaacagaaggtataatatataataaaacataaggctaggacaaatgaataaggtctgttaagtgggagttagttagcttg

SEQ ID NO: 19303 - DNA, 201 bp, Homo sapiens
tccaattcagtggccactagtcacatgtgacagcttgaaatgtggctaacgcaactgaatatttagttttaattaaaacttaaataaccacatgtggtcayggctactgtattggctggtgcaaaacaatatgttatcttatgatgtaagaaagacagtagtcagttgtcttaaactgttacataaaaccacgtgtcataa

SEQ ID NO: 19304 - DNA, 201 bp, Homo sapiens
gcctgatggcagtagaaaagaattttgagttaggccttttgcaacatttcctgatttccaggtatacttgaaacacacaaagagactatgcagaggtagcrtatctgccaaaagttgcgttactctcttttgctcaatattacataaatcccttctctttccataagaagatatgacagagacagttaatatccacatgag

SEQ ID NO: 19305 - DNA, 201 bp, Homo sapiens
agaattttgagttaggccttttgcaacatttcctgatttccaggtatacttgaaacacacaaagagactatgcagaggtagcgtatctgccaaaagttgcrttactctcttttgctcaatattacataaatcccttctctttccataagaagatatgacagagacagttaatatccacatgagccttcccatttctcagcc

SEQ ID NO: 19306 - DNA, 201 bp, Homo sapiens
tacctcctattatgctgatacgcaatcctcgtggtagacacaaagttggcttatggatttttgagttggtaaaaatatctaatcctatggactgaaaaaarttgttaaagcatagcggcaatccaatcttgagactgtaagtagtttcttgaatttgtattgtactttcactattatgttacatatagttcatacgctcat

SEQ ID NO: 19307 - DNA, 201 bp, Homo sapiens
gacatctccttcattctgctggtgctccactgctgcttgaggaaggcagtgttgttatgggaaataggagatggataataacacagcgatggggtgccggrattctgagcatttccttttggccctctttgactttgatttgcttttatttccattatccttggatactgaaaacttttcctcatttcaagttactgtcat

SEQ ID NO: 19308 - DNA, 201 bp, Homo sapiens
ccaccactcaagcaaagttcagtctggctctctcccatattaaactttgctcagttgctgaggtcagtgtcctggagagaacccaaggttctttgcagccatgagcagagtcatgcttcagtttctccaaaagaaataaaagatgagtattataattatcttctggatttaatgacatttttatttggctttcccttttta

SEQ ID NO: 19309 - DNA, 201 bp, Homo sapiens
aaggcatttctttttccctttcccaaatcttggagcttcaaagtcatttcatgattatctatgtgcaagtgtatacttcatgttgtaggagagtttttctrtattagaaactgaagtgtggagatgagaaattatttccttctacagaacattataaaatggatgtagagattagattcctcatctgctctctatctctgt

SEQ ID NO: 19310 - DNA, 201 bp, Homo sapiens
tggcatgatttcggctcaccgcaacctccgcctcctgggttcaagtgattctcctgcctcagcctcccgagtagctgggattacaggcatgcaccaccacktccgactaattttgtatttttagtacagacggggtttctccatgttggtcaggctggtcttgaactcccgacctaaggtaatctgcccgccttggcctcc

SEQ ID NO: 19311 - DNA, 201 bp, Homo sapiens
tgctagctacaattaaaaaagtgtgtgtgtgtgtgtgtgtgtgtgtgtgttttaaatgactaagttggaattggccttttttttgtggtttccatcattcraacttattttattgatactcattagcgaatataattttgttgatttttttggtgcattatgacactttttgttagtgattacacaatgttgatcatttat

SEQ ID NO: 19312 - DNA, 201 bp, Homo sapiens
tgttcatatcttttatcttcttagcaaaattctaagctaagaagaaattgaaaagcaggaacctgctgacaatctttttcttgtagtcatgggtcctagcrcagtgctctgcacatggtcagcattcatacaaacacatgtgattatatttctgagctggaaaaaggataaggctttgatagagattgactttaatagtat

SEQ ID NO: 19313 - DNA, 201 bp, Homo sapiens
actcattagcgaatataattttgttgatttttttggtgcattatgacactttttgttagtgattacacaatgttgatcatttatttatttattgtactaartactgcaacctctgaattgccaatttttacatggtatttctggcagtgatgggtggccccgctttctgattacataaaatggtccatctagtccatggtt

SEQ ID NO: 19314 - DNA, 201 bp, Homo sapiens
ataaaggagagaagaacattcttttagagttaacattagaattctcaaatttctagcatggaagtgatgtttctaaaatgcatttaccttcccagatgttyccttagaggattattatctacgtttttttgcaaatagactggaagttctcttaccttatcaaggtaaatcaagacatggttgctgctgacttctgtccgg

SEQ ID NO: 19315 - DNA, 201 bp, Homo sapiens
aaaggctttggaaggaaagaaaatactttgttgtgactttgtgcttttctgaaacaagaaggcaaaacatgtgggcattgaatggctgcaataaaagactrcacagtgtccacacattggcaagcctcaggtttcagaggaagcactggagccagcagaatgccaaagccttgtttctcccttgaaccagtttggtgttac

SEQ ID NO: 19316 - DNA, 201 bp, Homo sapiens
agtatgttgataattaactaataattgactaatcacaagggctacttccttatattactgggtatccaaaaaacttgtcaacataataaacacattttgtsaagatttcttgcttatgggattttaggaatattcatatcccaagatcataataagccatttctacctgtaatccctggtgaaatataaataaaggagaga

SEQ ID NO: 19317 - DNA, 201 bp, Homo sapiens
atggaaaatattcattaaaattagaggaaacttacaatgttagtgacattacaatgttaatggcagttggtcaaattaataataggtaatgtcttgtgttyttctctatatttttcaaattttctacagtgaggattcattgcttctctaataacattaatgtaagcatataaataattaaagtttcatggttaatctcac

SEQ ID NO: 19318 - DNA, 201 bp, Homo sapiens
ttgtactttcactattatgttacatatagttcatacgctcatcatgaaaattacacaaaatgaggagagctatttataaatatgaaaacagagtcatagamggtcaagttcattaagctattgagtgaataggagtgggaattcaaacccgtttctgattcttatttctaaatattgtctggtataatctaatgctcctta

SEQ ID NO: 19319 - DNA, 201 bp, Homo sapiens
ttgcctgtaaatatttgtctcccatggctggagagtcatgcattgctccttaatttctatacttagtttgctacatttggattccttcctgcagttcttascaacctcccaaagcctcatctgacagaatactagatccctatgaccctgactaaaagaaccaagtatattaagtcaaacagccacactcacagcgaaggc

SEQ ID NO: 19320 - DNA, 201 bp, Homo sapiens
ctattttatctcagagtatttgggaaactgtgggactcttgaacacagttgtcagtgagggttgtgtacgcaacagaaagaaataaaccagaaataaatayttagagattaaacagctggttaataaaccaagaagtattcttttcatccttctaccatctgatttgtgattccagaaggtccagaagagagagatttaaa

SEQ ID NO: 19321 - DNA, 201 bp, Homo sapiens
aagagtgtcagacacattatggaaaatattttgttttggttttcttacatattggaatccccaagagtcactgagaggggaatacgatggtggtaagcagytttgggatccatttggttaaggtttgcagcctaaaagtaaaccactttctatttaaggtggtagagaagttcatgtgtgaacatctgtgtgtccacagag

SEQ ID NO: 19322 - DNA, 201 bp, Homo sapiens
tgataatgtcccttaggaaatttaaaagattatggtgtttatttaacatgtgcatgcttacattatgaaaagcaacacagagaatcatggagtaatatcaraggtcatggatcctaattcttttgttgtgcaaaagaaagtaatatatagagagatgaaatgaattgatcaaaatctcaaaattcattttggttgagtaaa

SEQ ID NO: 19323 - DNA, 201 bp, Homo sapiens
tgcagcctctatcatcctcccctctcactgctacatattaggtgatgaccttttccttttcagtacactccaaattcattctgactcaaaacctttggcaygctgcttccattttttgtaagcttgctctggcctctccactattctccaatgtaaacatttcaaaattgctcaattatttcaaaaatttatcagcacctt

SEQ ID NO: 19324 - DNA, 201 bp, Homo sapiens
ctggggcctgttggggtgggggcagggggagagagagcatcaggaagaatagctaaaggatgctgggcttaatacctaggtgatgggttgatctgtgcagyaaaccaccatggcaaatgtttacctatgtaacaaacctgtacatctggcacatgtaccccagaacttaaaataaaagttaaaaaaaaaaaaagattctgt

SEQ ID NO: 19325 - DNA, 201 bp, Homo sapiens
aagttaaaaaaaaaaaaagattctgtgccaggcatggcacagattgtcttggtaagcaagattgctcccttaaggagaatataacagagaatacaatgagwtaaaatatgtaaagtactttatgcagtttctgcttgttgtggaattacactatgcctgttactctgaagaacttgttttttgcaaacatttttggaactt

SEQ ID NO: 19326 - DNA, 201 bp, Homo sapiens
ttggtaagcaagattgctcccttaaggagaatataacagagaatacaatgagttaaaatatgtaaagtactttatgcagtttctgcttgttgtggaattayactatgcctgttactctgaagaacttgttttttgcaaacatttttggaacttttaacttccaaaaatgatcttatcacgtgagcatttcatgatctccaa

SEQ ID NO: 19327 - DNA, 201 bp, Homo sapiens
gtgataaagctttagctttcaagtgaattttggaagcctcgtagctgccactgtgatcttgaaagctatccaggacctttctaatgacatcagttattatrttaacaactgatttttgttttggataataaaatgtgtcaatatttaaaagatctatataactcagagaaccaatattttccgaactgccaatgcatgatg

SEQ ID NO: 19328 - DNA, 201 bp, Homo sapiens
gaaaagggaactaaatatcccacaggtgttttgtattagtagttgataaatttataatgtaggttgtttctataatgtatgtataagagacaaaaagaggrgcatcagacttgatggagacaaaatgaagtgataatgtaattacttaatgtaataaataaccccaacacatctcctaaacctgaatttctgtgatcagga

SEQ ID NO: 19329 - DNA, 201 bp, Homo sapiens; identical to SEQ ID NO: 2850

SEQ ID NO: 19330 - DNA, 201 bp, Homo sapiens; identical to SEQ ID NO: 18055

SEQ ID NO: 19331 - DNA, 201 bp, Homo sapiens
tgccctttctagccaaggttatagctgccctggactgctcactctctggtctcaatttaaaatgatcccgtggccacagggctcctgcccaggggcttgtyaccttcccctcctccttcctgagtcactccttcagtagaaggccctgctctctatcctgccccacagccctgcctggatttgtatccttggcttcgtgcc

SEQ ID NO: 19332 - DNA, 201 bp, Homo sapiens; identical to SEQ ID NO: 18056

SEQ ID NO: 19333 - DNA, 201 bp, Homo sapiens; identical to SEQ ID NO: 18057

SEQ ID NO: 19334 - DNA, 201 bp, Homo sapiens
gcctgcagcagctgcagcacagggtgcagctcaagtatgcagccaagcgcctggtgagcctcatttcttggggggcaggattatgtccaggcagggtcgcyctgcttggaggctcatgggtgcgtggccagggtcttggtctcccctccatgaccctcactggctatgtgctcccgtacagaagctgggctgtgagtggtt

SEQ ID NO: 19335 - DNA, 201 bp, Homo sapiens
tatcagatatattatacatttaaacagttaaacacctaaacagcccaattttatgtggatcagtactactaacggcttagggtaaaatgacagctacagcrtaactagaatgttaaagtggcatgtctcagacaacgtggatggacataaagtatttgagagaatattgcataatagaaaaaaacattgtaaagactaaaa

SEQ ID NO: 19336 - DNA, 201 bp, Homo sapiens
tggtggtgagagaattgcctgaatcagctgccaaatggtgcccaggttggaaaagcaaatgtgcacacatgggttcttcccactctaaccctgaggaattmgaggcctgcttctgacacagactgggcagtggctagtgactctaggtatagagtatccaggccctgctcacccaggctagagcttagggagccagaagga

SEQ ID NO: 19337 - DNA, 201 bp, Homo sapiens
tttgcaaacatttttggaacttttaacttccaaaaatgatcttatcacgtgagcatttcatgatctccaaggttggaacgtgactcacagatttaggtgasagctcagcttcaggcttcattagcagcacactctggtctacagcacggagggcacaaagggagaggggggtggctctcaccttcaggcgggtgtttgagg

SEQ ID NO: 19338 - DNA, 201 bp, Homo sapiens
aatatctaatatacagcctaagagttcattggttcagacaatttaaaaaatggtgaataaagaacaacaggaaattgtgcagaatcttcccaaagatttgmttctactttggccaaaaaaattaattggcaagataatctattagttccttctgttgataccgacatttcttgagtagtatctgagttatatagtagtagc

SEQ ID NO: 19339 - DNA, 201 bp, Homo sapiens
gtctactgaatttaatatagcagtttggaatcacttatcataagacatatatgaaaaaaatcaataattatttatcttcaagatgcaatagtattcatctytctaactcaatatactatgaaaacattgcttatggagaatctctttaaaatatatttgcttttatttttagaaaatttaagttcattaaaatatgttagt

SEQ ID NO: 19340 - DNA, 201 bp, Homo sapiens
tgttaaatttttgtgctatcattatttttaaagtgtccaggctgtttctcatctgttctgtattattaagctgagtttaaactcatgacaacctactgctrtctgtagtggtacatggaagtgtgccagtgtatgatggggtaaaattggcacagccttgtgaggcatcatttttaatcaaaatattagtaacaaaacatt

SEQ ID NO: 19341 - DNA, 201 bp, Homo sapiens
tattaaaggcttataggtgacttgattttgaaattcatatgaattttataacaaaacaagagacttttaaaaaactgtgtttgtggttgcctgttttggawgtcagcactagacctctcagtatgacatcaccccctgcctttagaagtagctgggaggaatgttttaggagcactgtatgcctaatttcctaatttcctt

SEQ ID NO: 19342 - DNA, 201 bp, Homo sapiens
caaaacaagagacttttaaaaaactgtgtttgtggttgcctgttttggatgtcagcactagacctctcagtatgacatcaccccctgcctttagaagtagytgggaggaatgttttaggagcactgtatgcctaatttcctaatttccttcttttccacacatcacaatgggagaagaataaaaggactagtcttaaacaa

SEQ ID NO: 19343 - DNA, 201 bp, Homo sapiens
agagtcaaaataatttgaaacagtaagacgaaagccaaatgaatgtggaattctgaagcagggttaaacataggagttaattttattaggaagctgcaatraaatggttattacactagagtacttaagtttttcactgagtttccgaaatgtcaaagacaaagtcaaaacaatcatttacatagctgtcattaaataaaa

SEQ ID NO: 19344 - DNA, 201 bp, Homo sapiens
agttactcaccgctattttaaaaaagaaaagaggctttttgacatcagctgttgctattctatatgttatcttctttctgtaagggaaggtacccttatcwccattctggatctgagcctgaaatctggccaccttttcttcattcatgctgatagtgaacctgaagcaggaggctttttcaacactagcaagtggcaaca

SEQ ID NO: 19345 - DNA, 201 bp, Homo sapiens
ggttcgatctcattagttaccaataaaatgtacattggaaggacaataagatgatactccttttttacctgtcaaattggcaaagagtcttttttttttttctccatctgtcgcccaggctggagtgcagtggcgcgatctcggctcactgcaagctccgcctcctgggttgacgccattctcccgcctcagcctcccgag

SEQ ID NO: 19346 - DNA, 201 bp, Homo sapiens
ctttatctgatatttatgtaagactcatgttttgaagtatttgaatgctgtattttgtttctcaattttttatcttgaaaaaaaattcaagcctttagaakaattgaaagaatactgcagtgaacacctttatgccatttttcctagattcaatcactgaatttttgccatgtttactttaattccacgcccccacctcca

SEQ ID NO: 19347 - DNA, 201 bp, Homo sapiens
ggctgtagctactttaagcttagatatctgccttcgaatattctaccttttttaaaataaaatataaatgtctagtgattctttcgttgttgtttttattktttggagacacggtcttgctgtgccacccagactcgagtgcaatggtgtggtcacagctcactgcagccttgaccttctgggctcaagtgatcctcccac

SEQ ID NO: 19348 - DNA, 201 bp, Homo sapiens
agccaggcttcctgcttggagtccgcaggaggctgtggcagcagtggcatccactgtggcatctccgtcctgcccaccttaagaggtgagatggagcaggyccatctgcctctgccctttctagccaaggttatagctgccctggactgctcactctctggtctcaatttaaaatgatcccgtggccacagggctcctgcc

SEQ ID NO: 19349 - DNA, 201 bp, Homo sapiens
tgcccaccttggcctcccaaagtgctgggattacaggcgtgagccatcgcacccggccccagccctggcatctttaagtagctttgctaaccattcctgtgtccttagtggtctttcaactgctgggaataaatagcctttactgtcagtgtgaatggttctgaaaactaactgcatgatagaaccacctacagagttcat

SEQ ID NO: 19350 - DNA, 201 bp, Homo sapiens
gcctggatccgagcccgcgtggaggtcaaagctacctttggccccgccattgctgctgtgcagaaggtcagtcctacctttttctttctgagagcctcccmaccccgagatcacatttctcactgccttctgtctgcccagtttcaccgggagaagtcggcctcttcctgatgggcaaccacaccaccgcccggcgccgtg

SEQ ID NO: 19351 - DNA, 201 bp, Homo sapiens
gaaagaggggttgcctgccctgtttcctatataagtctgaggaaggggagggggtcgccatgggaatgtgctgtagggggaggcaggtgttgctcggagcsccagcctctgttcctatgcaggcagggccatcaggcaccagaaggattttgccagcatagtgctcctggaccagcgatacgcccggccccctgtcctggc

SEQ ID NO: 19352 - DNA, 201 bp, Homo sapiens
tacattggattaaaaaaatccaaacacctagcacctatttaccattttcactgtgggtttcaatggataaaaccagatatcaacttggatacatccaagaytagacagctccctgtgtaactatagatataagaaagaaaaataagcctcagtgtcttttgaatcttgctctcagttaaggttcaacataagccctgacat

SEQ ID NO: 19353 - DNA, 201 bp, Homo sapiens
aatctatataaagtaaaaaagaaaaaaaccccaaacacattggcttttattttatttttccatcaaagacaccacactggaaagaactgagtttatctagkattctgttttgctcacctgtcttatagtaatcataggctttcacaaaagcaggtttcagctttcttatggggttgtcttgcagaagagtgaaagaaaagg

SEQ ID NO: 19354 - DNA, 201 bp, Homo sapiens
aaataagttatggagacagattaaactgaaaacaagatgtacaagggtttaccacacttttattcctttaagaattgaggtttggcctccacttccacccwtgttgctactatctcaagtgaaataactcagaaacaggaggtcaaatacttcacattctcacttataagtgggagctaaataatttgtacacatggacat

SEQ ID NO: 19355 - DNA, 201 bp, Homo sapiens
tagttttggcagtagttttgtaggccaaggaagaaaaaataagttatggagacagattaaactgaaaacaagatgtacaagggtttaccacacttttattsctttaagaattgaggtttggcctccacttccacccttgttgctactatctcaagtgaaataactcagaaacaggaggtcaaatacttcacattctcactt

SEQ ID NO: 19356 - DNA, 201 bp, Homo sapiens
catcctgctcctttccccacaactttgtcctgctcgtccaggcctgggagacgctgggtctgtgacaggctgaaccgtgtgaggagcagccccctccctgrcctggccggcccatcactggaaggcaaaggagaggtggcgggggcaggtccacgtgtgttggtaggatgtcatttagctggcaccatctctttgcctctt

SEQ ID NO: 19357 - DNA, 201 bp, Homo sapiens
ccagaaaaatgcttaaagcagtgccaggcagatggtagatactcagtattgccttttaaaaaattaacccttctatctcttttgtgcttctacattttttwaatctccttagaaaacttgttcctgtacagcaggtcctccaataagattgttcctgttcaacctcgttttgttataatgttgatgagacaatggccaggg

SEQ ID NO: 19358 - DNA, 201 bp, Homo sapiens
agaaaaaaaatcttcgtaggaagctgaacctgaaatctacagtagacttaattattaaaatagagctctttgtagactttcagttggtctaaaacgtgtcrcattggtgcaaagcattttggctctccctaagcggtaagaaatacagttttaagaagtggaatatccttatagcccatttttcaggaaaattttccatga

SEQ ID NO: 19359 - DNA, 201 bp, Homo sapiens
taaaatatttagatgtaagacttctacttatttacgtttggatcttcagttcatttcaaatcatctacttcccttgaaaacgctttttaaattttgttttagtttgtttgtttgtttgagacggagtcttgttctgtcgcccaggctggagtacagtggcaagacctcggctcactgcaacctccacctcctgggttcaag

SEQ ID NO: 19360 - DNA, 201 bp, Homo sapiens
aaaaatggaaaaaagggtgttttctgctatatgtccgtacaaaaggattaatattttaaactataactaaacagttttttttttaaagaacattaagaatytacacaatgacatctgctggaaggaataagcctagttcatggcgcttgctgtgaggcaccccaggaaggtagaccacatacctccctcaagtcgttgtcc

SEQ ID NO: 19361 - DNA, 201 bp, Homo sapiens
tttgagacagagtttcactcttattgcccaggctggagtgcaatggcgcgatctcagctcactgcaatctctacctcctgggttcaaacgatcctcctgcytcagcctcccaactagctgagaccgcaggcatgtaccaccagttccagctagttttgtatttttagtagagatggcgtttcatcatgttgctcaggctgg

SEQ ID NO: 19362 - DNA, 201 bp, Homo sapiens
ccccccttttttttttttgagacggagtctcactctgtcgtccaggctggaatgcagtggcacaatcttggctcactgcaagctctgcctcccgggttcaygccattctcctgcctcagcctcccgagtagctgggactacaggcacccgccaggctaattttttgtatttttagtagagacggggtttcactgtgttagc

SEQ ID NO: 19363 - DNA, 201 bp, Homo sapiens
ctcccaggttcaagcaattctcctgcctcagccttccaagcagctgggattacaggcatgtgccaacatgcccagctaagttttgtatttttagtggagayggggtttcaccatgttggccaggctggtctggaactcctgagctcaggtgatccgcccgcctcagcctcccaaagtgctgggattacagacgtgagtcac

SEQ ID NO: 19364 - DNA, 201 bp, Homo sapiens
attatggactattttatgtcaataaattagacagtttagaaaaatagacaagattttaaatgacatacacaaccaaaaaattaactaaagtagtagcaaayttaccttgcacttcattaaagaaaataaatttgtatttaaaatcttctcacaaagaaaattctatgtccagatcactggtaaattcaacaaaatatttaa

SEQ ID NO: 19365 - DNA, 201 bp, Homo sapiens
aagctatgatgtgactggacaactttttgctaaagacttgatttgcagaaaaattaaaatgtcagagtaatttagccacaaaaaaagggctcttcgaaaakattaagtgcatgactcttagatacccttacccatcacaacaaaagccaaaattggagatagaattatccatcaaatgtcaatgaaaaggctttttgttta

SEQ ID NO: 19366 - DNA, 201 bp, Homo sapiens
tcccaggtgttaaaactatgctgttttcctagccagatatcagcacttcttgggactaaagactctttttgccctaggatggattatgtccaggacctcawtaacacctaatttagatgactgagatgatgagatttggaacttttgagctaatgagactgtgagcttttaatcttatgttaatgttatgatggatagagt

SEQ ID NO: 19367 - DNA, 201 bp, Homo sapiens
agctccagcaggaatgcagtcctgacaccttgagtttagcctagtgagacttctgacctccagaactagaagatacaagtggtgttttaaggcactaaaaygaagaactagaagtattgttttaagcccataaatttgtgataatctgttacagtagtaataggcaatgcatacacaagcacacaaagtaaaatttttctg

SEQ ID NO: 19368 - DNA, 201 bp, Homo sapiens
aaatattagtgattgaaactttcttgtaattctgaatatgctcataacctgtagagattctctggaaggggctcaagcagtagcttttctgaagcattttycctctgaatataggaggccctcaaagtaataatatgacttatttcatttcacagatgaacaggcaacaattcagtattctgatccctgtgaatgaggtaa

SEQ ID NO: 19369 - DNA, 201 bp, Homo sapiens
gcagtcctgacaccttgagtttagcctagtgagacttctgacctccagaactagaagatacaagtggtgttttaaggcactaaaacgaagaactagaagtrttgttttaagcccataaatttgtgataatctgttacagtagtaataggcaatgcatacacaagcacacaaagtaaaatttttctgtggttattttccata

SEQ ID NO: 19370 - DNA, 201 bp, Homo sapiens
aatgcatacacaagcacacaaagtaaaatttttctgtggttattttccatattttttcagttattttctgccttttgaagacattaaagacataaaatgartatgtattagtttaggaataaaatttaaaatgtaggaatgctataaaagaagaaaaaattttaactgggctaaagcaaacccagtatgtcatcctattac

SEQ ID NO: 19371 - DNA, 201 bp, Homo sapiens
aagacattaaagacataaaatgaatatgtattagtttaggaataaaatttaaaatgtaggaatgctataaaagaagaaaaaattttaactgggctaaagcraacccagtatgtcatcctattacatcagcttcttcatctttggatgaagaggttggtgactgtttcttctaatgtgagaatagctccaaattgctaaatt

SEQ ID NO: 19372 - DNA, 201 bp, Homo sapiens
ggctaaagcaaacccagtatgtcatcctattacatcagcttcttcatctttggatgaagaggttggtgactgtttcttctaatgtgagaatagctccaaaytgctaaattgttcagaatttgacaagatgaaagaggaaagaaaaaggaaatcttgaaaacatttactgtttccttgttcaatggataacacatggattcc

SEQ ID NO: 19373 - DNA, 201 bp, Homo sapiens
ctaatgtgagaatagctccaaattgctaaattgttcagaatttgacaagatgaaagaggaaagaaaaaggaaatcttgaaaacatttactgtttccttgtycaatggataacacatggattcctgattgggagatttttcctcttgctttgatctgaaggcagaaggaaatatattcattattgtttaaaagaatacattt

SEQ ID NO: 19374 - DNA, 201 bp, Homo sapiens
ttaatgtgatggagtagcaaaaaacctcacatcatattacatcacattaataaattaaaattatatgtttttggaaaactcggcaaaataggtaaaccacyaactaatctaacaaggaagaaaaagtagctatctgcttaggaacaaaagaaaaacaacttcttccatgactcagttttcagcctcattttttgtcctttt

SEQ ID NO: 19375 - DNA, 201 bp, Homo sapiens
gatattaggatattataaaatatgtaaatataaaaataaccactaaaataaaaattcaagctagcctgaatactcaaagaagctttaagcaagataacaamaaacaaacataaaagctaaagaaataaagtagctttaaatacaatacagaatcataagaaaaatagtatgatagagctgaggcctaacacatacatcata

SEQ ID NO: 19376 - DNA, 201 bp, Homo sapiens
atatagaacatctacaaaaaatctacagctaacgttataattaatggtgagagactagatactttcccctcaaatcctgaacaagacggggatgtctactsttactactcctagtcatcattgtcctggaattcctagctaatgaaataagagaagaaaataaaatgaaaggtatacagactggtaaggaagaaatgaaac

SEQ ID NO: 19377 - DNA, 201 bp, Homo sapiens
cacaatcaatcagttggtgctaattgatattcacaggatatttcatccaacaacagtagaatacacatttttctcaagctcacatggaacattcttaaagrtgggtcatatcctagttccaaaacacaacttaataaacttaaaagaatagaaatcaaacaaagtatgtgctcagaaaacaatggaaataaattagaagtc

SEQ ID NO: 19378 - DNA, 201 bp, Homo sapiens
ttgttcttgggagctctgaaatgccatgtaacaagccaagctactctgttggagagaccataaaatgaagtcctgagactacatgcagggagagagagaasaagcagtctctcagaatcccagtggagtctccacgtgactccaatcccagctgccatctggctgcaatttcatgagagactcttggcaagaccatgagaa

SEQ ID NO: 19379 - DNA, 201 bp, Homo sapiens
aaaagtcaagagaagataagactgagaaaaacttcagattcttaataaaaagaaggcactcaattataggaaagtaaactttctgaaaagtaggagagaaktaggatagtggtaaatttgctaccattttgaaatggtccataatcatgaatatataatttcagtatatggcacagactcattacagaatcacacagtgct

SEQ ID NO: 19380 - DNA, 201 bp, Homo sapiens
ttatgaaaaaaattttttaaaatgaatttactatagcttgagtatacagtgtgtataaagtctacagtaatgtacaataatgtcctaggctttcacattcrctcaccactcactgactcacccagagcaacttccagtcctgcaaaccccattcgtggtaagagccctatcgaggtgtaccatttttaatgttttatactg

SEQ ID NO: 19381 - DNA, 201 bp, Homo sapiens
cgtgttactgcccctgaagaactcccagtgggacaagataaggaagtagaacagtgatattgatgatcctgaccctgtgtaggccttggctaatgtatgtktttgtgtcttagtttttaacaaagctatttaaaaagtaaaaaaaaaattaaatagaaaaaaacttatataataaggatataaagaaagaaaatatttttg

SEQ ID NO: 19382 - DNA, 201 bp, Homo sapiens
accatactttttttttttcttttgagatggagtttcactcttgtcacccaggctggagtgcaatggtgtgatctcggctcgctgcaacctccgcctccccrgttccagcgattcttccgccacagcctcccgagtagctgggatttacaggcatgcgccaccatgcccggctaattttttgtatttttagtagagacgggt

SEQ ID NO: 19383 - DNA, 201 bp, Homo sapiens
tgaatgtgaggctgaaatactcagaatcatgatgaaagaaaaacacaaaccaggtacactaaggcaaagctgggtgagacagtccaggagacaagtcatayagctttgtcatggcacaacaagacgcaaataggtgagacctaagggaggagaaaaaaatctcaggtgatggctacatgggcatttttatttacttatttt

SEQ ID NO: 19384 - DNA, 201 bp, Homo sapiens
tcctggctaacaaattgagattcctataatcagagaatgaacctttcatttcactaccagagataaagtaaaaaatgcatgtttttgcttgaagtaacaayctagttgaaatgcagtcagtcagcaagtataaaggaaaggtgactggatgctttagtgtgggaaaggttgtttgctcggtggaaaaggttggagagagtc

SEQ ID NO: 19385 - DNA, 201 bp, Homo sapiens
gctccaaattgctaaattgttcagaatttgacaagatgaaagaggaaagaaaaaggaaatcttgaaaacatttactgtttccttgttcaatggataacacrtggattcctgattgggagatttttcctcttgctttgatctgaaggcagaaggaaatatattcattattgtttaaaagaatacattttaacctaactttaa

SEQ ID NO: 19386 - DNA, 201 bp, Homo sapiens
agatttttcctcttgctttgatctgaaggcagaaggaaatatattcattattgtttaaaagaatacattttaacctaactttaaaacattcatgatatatktgtgaaccataatcttattaccccaacctagaagttattttgatcactaaacttccttttcaatatcttcatatatgtgtctttacatactttaaataaa

SEQ ID NO: 19387 - DNA, 201 bp, Homo sapiens
tataaaataaataaaataaaaaaagaaaagattagagtgaatgaagaatttgtgagagatctgactctaattttaggtcggaataaaggaatttattattrtaactctgctataatttaaagacccaatgattcagagtggtcataaataaccaataccatattagataaggcttacacaaggacatgctatcctggggca

SEQ ID NO: 19388 - DNA, 201 bp, Homo sapiens
attattttgaaatgtacaatatattattactgactataattatcctgttatgcaatacatctcaaaatcttgaatagttctatttggatatctcatggggmctcaaattgagaacatccaaaagtgggatcatcacactaccttcccaaactttctccacttccactgttctctctttcagtatatgggtcttccatctat

SEQ ID NO: 19389 - DNA, 201 bp, Homo sapiens
acctccgcatcccaggttcaagtgactctcctgcctcagcctcccaagtagctaggattacaggcgcccaccaccacgcctggctaattttttttttttttggtatttttagtagagacggggtttcaccatgttggccaggttggtctcaaactcctgacctcaggtgatccacctaccttgacctcccaaagtgctggg

SEQ ID NO: 19390 - DNA, 201 bp, Homo sapiens
aaattgagaacatccaaaagtgggatcatcacactaccttcccaaactttctccacttccactgttctctctttcagtatatgggtcttccatctatcagrtaactgacgcaggaatactgaggaattgggttttttttaatgagtcattttctttcactgcttatctcaaactcattgtcaagtgctatctcctctcccc

SEQ ID NO: 19391 - DNA, 201 bp, Homo sapiens
cctctcattcatttgctctctgcagctttgataactttcttttccatacccttgaggtaagaggtgggactcaactttggaagcaggtctcagacaccggrccaaattgagaacttactaaaacagggatgcagggtggctgctttccattagacgtgcctaccagtgtgccatgtcagtttaccattgccgtggcgacac

SEQ ID NO: 19392 - DNA, 201 bp, Homo sapiens
accactttttcctggaaatttctgcataatctgcctcttaatttccatgtaactaaaatgggtgtaaatatgactgcagtactccctttgagctgctactrtgggcacactgcttatggggtagccctgctctgcaaggaacagtacctctgctgctgctgtacgctgctgcttcaataaacgttgctgtctctaacacct

SEQ ID NO: 19393 - DNA, 201 bp, Homo sapiens
ctgctgcttcaataaacgttgctgtctctaacacctctggcttgcccttgaattctttcctgggtgaagaaaagaaccctcttgggctaaaaccccatttsggagcttacctgccctgcgtcacccttacagggtctgctcatactgccacaccctggactttttacatactctgcctctggaatcagtaatttttgcctt

SEQ ID NO: 19394 - DNA, 201 bp, Homo sapiens
agttctccttgatttataggtactttaagaaaataaatgtgaagttagatggaaaagtagtagctataaaacaaaaatgttgtatcatgactcagtttgaytctgcctaatatgatagaaggaaatgacacaaagccataactaatttgttgtctctcaaaacgtgttttgtggaccaccagcattgaaacgatctgggat

SEQ ID NO: 19395 - DNA, 201 bp, Homo sapiens
aatgcctgtttctccagagtggttacttttggatttttgccagtctagcaggtgaaagcctggagattgttattcagtagtttgggctggggcctggccaygtgtatttttgaaaattttcgctggtgattttgctgcatggccagggttgataatgactgtgccagatttgctggatttcctttgctattcctgcacata

SEQ ID NO: 19396 - DNA, 201 bp, Homo sapiens
tgtgcccggccctctcttaagctggctttaattattatttggtttcacattttgatctttaattaatttttgcagttgtgataactaacttggaagagagragacagactgagttctgggcaaagtcttggatcattgagagggaaggaaaaggtttgaagatgaaagtgatgagaacgggtagtggatggggtgggcagg

SEQ ID NO: 19397 - DNA, 201 bp, Homo sapiens
tcccttcatgggtccaaaatttgaaaactgattgttgtaattgccaaaattcattgtagcttccaccacctccaaaattgcttccatcattaccaaatccrttatagccatccccattgccaccatatccaccacaaccacagctgccaccaaagccaccatgaccatgaagttttctccactaccaaagttgtcactccc

SEQ ID NO: 19398 - DNA, 201 bp, Homo sapiens
ctgctgctactagaaccaccataggcaccttggtttcgtggtttggcaaagcattggcctccaccaccacaggggccagagcttctgactccaaagattcytcccttcatgggtccaaaatttgaaaactgattgttgtaattgccaaaattcattgtagcttccaccacctccaaaattgcttccatcattaccaaatcc

SEQ ID NO: 19399 - DNA, 201 bp, Homo sapiens
taccattctgtatcccaccagtactgtctaggaatgcctgtttctccagagtggttacttttggatttttgccagtctagcaggtgaaagcctggagattsttattcagtagtttgggctggggcctggccacgtgtatttttgaaaattttcgctggtgattttgctgcatggccagggttgataatgactgtgccagat

SEQ ID NO: 19400 - DNA, 201 bp, Homo sapiens
gaaagcatgagccaaaaacgtatgccaaaacaaaaatgttaatagataccactggattactttccaaaaagactgaagcagttttactgccactggcaacrgatgagggtactagtcctaggtccttctcagctccatgtgttctcaatgttttaaattctggctaattattattattactatttttgtgggggaagaagg

SEQ ID NO: 19401 - DNA, 201 bp, Homo sapiens
tgtgaaatttcatgagaattgtaccattctgtatcccaccagtactgtctaggaatgcctgtttctccagagtggttacttttggatttttgccagtctarcaggtgaaagcctggagattgttattcagtagtttgggctggggcctggccacgtgtatttttgaaaattttcgctggtgattttgctgcatggccaggg

SEQ ID NO: 19402 - DNA, 201 bp, Homo sapiens
ttcaggggaagagaaaaggtgtcagaaaagagaagtagccagaagtaggcaagaaacccaaataatagggtccctgaagtgagggacatgtataggaaaakatttgggaataatagtgtaggagatgaaataaaacaccacagtgaacatttttgtacatgtattctgttttctcatgttttgaaagcatgagccaaaaac

SEQ ID NO: 19403 - DNA, 201 bp, Homo sapiens
cacgacattgctgggcagccctgcgagcttgggtgaggcagggggccgaacattttcagtgatttcaatctgtactattgcacggtttttggcagcagccyacatgggatttgtcataataacagagaaatcaaatagcaagaaggatggagggagaggatgttacagaatggtttcaggggaagagaaaaggtgtcagaa

SEQ ID NO: 19404 - DNA, 201 bp, Homo sapiens
ttctcagtgaaatcaaagacaaggtcatatactaagaaggagagaggaaataataggtttgggggtctatggacagcagaatttttgaataatcacaaagrggaaagagaggcatctgcctagagacacgacattgctgggcagccctgcgagcttgggtgaggcagggggccgaacattttcagtgatttcaatctgtac

SEQ ID NO: 19405 - DNA, 201 bp, Homo sapiens
agtaaccttgggtagaaagagtgccccttccccatggaagaaggaaagatgggtgaggattctgatgggtttattacaagtgatagggaagtaaactgttrttacctggtgaacttcattttctcagtgaaatcaaagacaaggtcatatactaagaaggagagaggaaataataggtttgggggtctatggacagcagaa

SEQ ID NO: 19406 - DNA, 201 bp, Homo sapiens
taaccttgggcatttttacttggacctcaaatttaggcaaaactgttttgataaaaaagaaaaaaaaaggtgagagtgggccagagatcttacaagtattrgtagtagatgctatgacagaacctttaacatgtggtcacatgaaatgacttcagctacaacagggagcccagggacaatactgagaaggagaagccattc

SEQ ID NO: 19407 - DNA, 201 bp, Homo sapiens
gcagcatgattagtccctgaagatcatcacagttagatgtggtaaagagggaccaataggtttcaatgtattcttattctttccctccctaggcccagctyttcttcccaaatgccagccctgctgactaacagaggtctgaggcccatcatctgacacctggctataagcctactaaagtggtagctatgcagagtgcag

SEQ ID NO: 19408 - DNA, 201 bp, Homo sapiens
ggtgtaggttatagacaaccataaaataatccctggaaatactttcagttataaaatataaaaaacatacatagtgtatgtagctgacacaatgtattggwtaacaatttatgtttgagtatcaattcaaatctttcctaccccttaatgactctgtgatttttttaagttactaacttttccagtactgatatgctcatt

SEQ ID NO: 19409 - DNA, 201 bp, Homo sapiens
tccctggagctcccagtggacattgttcctgactcgaccaaggcttatgttacggttctgggtaagcagttagagattcttgactcagaaaggaaaaggckaatggaggctgcaaaggtgtggagtggggcgggacatacggacctatccggagagtgtaactaataacaagtgatgaaggaaaaagagcctattttatat

SEQ ID NO: 19410 - DNA, 201 bp, Homo sapiens
ttcttcctggggtcctataggtaaaaatattatgagttcatagaaacaattgaaatatatacctttgagtagaagggcagctttgcgggtaagaacgacayaggcagctgtatcacagatggttggtaaattggcccaaaggtattagcaaagttttataggaattccaacctgagataagggcaataagtttactagcta

SEQ ID NO: 19411 - DNA, 201 bp, Homo sapiens
acagatagctgcttacccaatttcttaggtataatagtccagatgtttgttttcctccctccagcttgaataacctcactgccattgattttccaggtatkaatatttgcttcataattctgagactcctccacttgaacagaaatctaagaaaacaatcatggcaatgaggatagcactggaacacacatcactatgaaa

SEQ ID NO: 19412 - DNA, 201 bp, Homo sapiens
tggaataaaaaactgctttaagcactgtattttcttctctttcttcactttatttagctgcaaactccattatcaataaaatgaaaatagtattgttaagytccccttataaatgaaatcaaagaaagaataagaatgaaaaatgagtgagaactttttttggagtaaagatcatggtctgtacctgtgcaataaattgct

SEQ ID NO: 19413 - DNA, 201 bp, Homo sapiens
cttaaggttaggatgctgcagatagagcaaatgatgacttcacatatgaactgcaagtctaaagtaatatagtgggggtactctgaattgcagttgattgmaagtaagctgtttccactaaaaaaaaatccaggtggcatggagagtaatatcacagactcatttaaaggatgattaacgattctccaaagaaaaatcagg

SEQ ID NO: 19414 - DNA, 201 bp, Homo sapiens
tataaatccttttaacattttccagtctaaaagttttgtggtcttattacaggatgtagaaaacagtgggcctcagttattcttttgctgttgtgccggartataccacggttgtttttgaaagataactttgaccatacccttaggaacttcctcagctcactttcaaatggagggcactggctttctaaccattgtgtc

SEQ ID NO: 19415 - DNA, 201 bp, Homo sapiens
tgtgcacagcctcacacctgtaatcctagcactttgggaggtcgaggtgggtggatcacttgaggtcaggaatttgagaacagcctggccaacatggtgamaccccatctctactaaatatatatatatataaaaaatttagctgggcatggtgatagatgcctgtaatttcagctacttgggaggctgaggcaggagaat

SEQ ID NO: 19416 - DNA, 201 bp, Homo sapiens
ttagtgatccaaacaaaggaatgtggtcaactgtatgaacaaggttcagtgaagtcctgagtcacatgacaatctgtcctccccaagcctctgtgcttcaraagctggaaagtcgttctacccttgggcacagggtacatgtgcagtagcaataaatagcaccaggaggaataggagcaacaagtgttactggtagagggt

SEQ ID NO: 19417 - DNA, 201 bp, Homo sapiens
tgttaatagcacacaacattttaaaaaattattacaaatgatggtataattttataatgtattgattcataatgtaacataatttaaatggtttctaagaygctagaaataagtgagcatttacttggattaatgacttaaaataggagggattaatgttaatagcattcatttgatgcctcatgataaattacaaagatg

SEQ ID NO: 19418 - DNA, 201 bp, Homo sapiens
tctcgggttcacgccattctcctgcctcactcagcctcccgagtagctgggactacaggcacccgccaccacacccggctaattttttgtttttgtttttkttttttttttttttttagtagagacggggtttcaccgtgttagccaggatggtctcgatcttctgacctcgtgatctgcccgcctgggcctcccaaagtg

SEQ ID NO: 19419 - DNA, 201 bp, Homo sapiens
atatttcactttacctcatactcaagcttactccaaacctaattctaatccgtaatgatctttgtccttcagataagagttaggggccatgatgactcctycctcaagaaccatctagtgtttctggtgatttatggcacaaatggaaccttcaaccagaccctggttactgataacaatggcctagctccctttaccttg

SEQ ID NO: 19420 - DNA, 201 bp, Homo sapiens
ccaaagtgctgggattacaggcgtgagccactgcgcccggccttaagtctctaaatttttaaaaaatgcatttaatactaaggtctcaaacagttttctakacatgtaaatcaaaaacccgtttaattaattaagatcctggggggaaaaaaaggttacttgctgaacaaaatgaagtttacttataggaaatagcactat

SEQ ID NO: 19421 - DNA, 201 bp, Homo sapiens
atgaaaggtatacagactggtaaggaagaaatgaaactgtttttgttcacagattacatgattggctaggtaaaaaatcttgaaggagttgaacctttggrgcagggttacctggcttttgattttaaaagaacaaacaagagaaaaacagaatttgagaaggaagaaagccaattaagagacagaagtttatgctgagag

SEQ ID NO: 19422 - DNA, 201 bp, Homo sapiens
cctggttttagataagttaaaatttagcaggaaaaacaggtattatattttacaaattaaatctcatatttttaagcatattttaacaagaaaaaaattckctgtgaattccattgtaacgttttacatataaaactctccctcttaagtctctaaacttttttttttttttttgagacggagtctcgctctgttgcccag

SEQ ID NO: 19423 - DNA, 201 bp, Homo sapiens
tgaaaagcggaggttgcggtgagccaggattatgccactgcaattcagcgtggtccagagtgagacaacgtctcaaaaaaaaaaaaaaaaagtcaactgtrttaggtattataagtaatccagagaggatttaaagtatataggaggatgtgcataggttatatgcaaatactacaccatcttatataagagatttgagca

SEQ ID NO: 19424 - DNA, 201 bp, Homo sapiens
gggtggccacattgggaggattgcttgagtttaggagttcaaaatcagcctgggtaacgtagtgaaaccttgtcttgtctctcaaaaaaaaaaaaaaaaaagtcaagaaatttgccagtatggacctggtgcggtggctcacgcctataatcccagcactttgggaggccgaagcaggtggatcatgaggtcaggagattg

SEQ ID NO: 19425 - DNA, 201 bp, Homo sapiens
ggacatgcagagaagcaggcacggtagccaccaggaccatggtgtagccgcaggtggtctggagagagtgaggcaggggtggcagtgactgaagaccattmagtgtctttcatagaaagaatggcagaggagaccccagttcctccctgagtcccctctccttgggaaaaagtgttcctactctctgggtgagcgtctggt

SEQ ID NO: 19426 - DNA, 201 bp, Homo sapiens
tagattctcaacttctgtctatgctttttcttaaaagagatcttctatcatgctagctctcagatgttacccagtcctactcttccagctccccatttatrtccaagctcctgctactgatatacacccactatggtgcattgcttatgggaggaggaacctccagggctccaggaaagatacatttctaaatatcagtgc

SEQ ID NO: 19427 - DNA, 201 bp, Homo sapiens
ctatggcgaaacacttgacagtaaatatagagtagtgaaattactaaacttatggattattaagattttattctttattcattattttttggtttgcaaawaaaaaaacctaaatataactaaaaagtatccagatgaataggcagaggttagatctagccctgactcacatactgagcttttgtgtgatcctcacaagag

SEQ ID NO: 19428 - DNA, 201 bp, Homo sapiens
cctgaaagtggcagggacgggtcagcagagaccctgatcctaccattaggttctgaatgggaaaaggaactacagaagcatctccaccaaagctcttcttsccaaagtttacttctgtattgtttaggccttggaggtaaaggataaaattgtccagacagctaattattttcttcaggtggctgaggtaggaggatagct

SEQ ID NO: 19429 - DNA, 201 bp, Homo sapiens
ccaacctaatatttcactttacctcatactcaagcttactccaaacctaattctaatccgtaatgatctttgtccttcagataagagttaggggccatgaygactccttcctcaagaaccatctagtgtttctggtgatttatggcacaaatggaaccttcaaccagaccctggttactgataacaatggcctagctccct

SEQ ID NO: 19430 - DNA, 201 bp, Homo sapiens
agacaatttcaaagagataggaagagttgttcacttaaggttaggatgctgcagatagagcaaatgatgacttcacatatgaactgcaagtctaaagtaayatagtgggggtactctgaattgcagttgattgcaagtaagctgtttccactaaaaaaaaatccaggtggcatggagagtaatatcacagactcatttaaa

SEQ ID NO: 19431 - DNA, 201 bp, Homo sapiens
ttcaagtaaataaagcctctcatatataaagatagttccaccggacagattttttttttttttctttttctgaggcaggtcttgctctgttgcccagcctygagtacagtggtgcgaacacaattcactgcagccttgacctcctgggctccagtgattctcttgcctcagcctccctgtagctggaaccacagatgtgca

SEQ ID NO: 19432 - DNA, 201 bp, Homo sapiens
tagtaatgataaactattctagatactttgaaggtatatttttaaaaagtttcttcattcagctagtttaaatagacatatggagataagacttagatatytgacacaagcccaggctatttcaataatttataaatttatgtaacaatatttgttataaaaggtcagagaagagagaagaaaatatgggttagaatagta

SEQ ID NO: 19433 - DNA, 201 bp, Homo sapiens
gtcgaatttttagcattgtatgaacagatgacaatgtagccattttattgctgataaacagttgctgctgggaacatccttgtacatgactccaagtggamacaagcacacattcataagagtgagatgactgggtcacaaatagttgaatcttaaattttactagataatgtcaaatgcttttaactcttggcactatca

SEQ ID NO: 19434 - DNA, 201 bp, Homo sapiens
agggtttctaagtggcattaaaaacttacgctttaacttaggggggatatgggagattcctgaaagggttagagaagaggagggacacgatctgacacatsttttaaaggatccctctcgctgaaggggaacaagaagagatgatcaggagaccagttagaaagctattgagagcctgcaagagaaaggactagaatagta

SEQ ID NO: 19435 - DNA, 201 bp, Homo sapiens
tttgtaattgccactgggaaatttctttccttttctgttcaaaatatttcgctgaaactaatgagaaatgccatgataaagatttctcagagtttggttcycactttcattgtatttcattgaaagtgcttaattaaaatggcttgagaactttgggtagccatgtgtaagaaatggatggtattcaccggggaaacaagg

SEQ ID NO: 19436 - DNA, 201 bp, Homo sapiens
tatttcaagtaaataaagcctctcatatataaagatagttccaccggacagattttttttttttttctttttctgaggcaggtcttgctctgttgcccagscttgagtacagtggtgcgaacacaattcactgcagccttgacctcctgggctccagtgattctcttgcctcagcctccctgtagctggaaccacagatgt

SEQ ID NO: 19437 - DNA, 201 bp, Homo sapiens
ggcggggataacaagagttgggggaggggcaggaaggaagggtagagttagggcaggaaagaattggtcaaaagttgcaaagttgagtcactgactgtgtygataggctaggcaaggctgtctgtgaaaaagtctgtggttttgtttcctgaacacctgggtccaagctgagctgttgctgacatagtttatctgtcttgc

SEQ ID NO: 19438 - DNA, 201 bp, Homo sapiens
ggccagtgagattttttttctaaggctggaaacccaggaacataaggaaggtgggtatgtcaaaaatatgacaaagtaaatgagttgcctatttaaataayaggcttgaaaaaaaatgcttgtaggatggaaggcagtacttacactgaaagtttccatttcacatgaacagaaaaacatgggtaattaagagttctcaaa

SEQ ID NO: 19439 - DNA, 201 bp, Homo sapiens
ccttgtacatgactccaagtggacacaagcacacattcataagagtgagatgactgggtcacaaatagttgaatcttaaattttactagataatgtcaaaygcttttaactcttggcactatcacattttaaaatttcagctaatttggaacatgtgtaatggtattatatttcattatgtttttatttgcacttctacct

SEQ ID NO: 19440 - DNA, 201 bp, Homo sapiens
ctctactcgaaggtgaccacgtttagattctgagacgggaagtggagggcgaataggtcacggcggccttttttttttagtttaacttttccttttttgcygtctggtcatcctcgtcggtcttctgcttctgggtatcgacatcgttatcctcatcatcttcagctgcccgcttgcccgtagctgactcagctccctcat

SEQ ID NO: 19441 - DNA, 201 bp, Homo sapiens
ctatgagcttagggtctccctacaatcactggtctctcactcccttaaaattttttctgtaaattgctttcaaatcgtagaggggaatggattatgaagtwtaaatcaagaagagcaaaattataagaaaaagaggccgggcgtggtggttcatgcccgtaatcccagcactttgggaggccgaggcgggtggatcacctg

SEQ ID NO: 19442 - DNA, 201 bp, Homo sapiens
tatctattactgtgcctggtacgggatggagtgggtcagggaataggggagggcacaaagggagtcaaaaagaatagaaagaaagccgtcaaagggctgayggtctggttgagggaaaaagacaggaaccatctgcttagacaacacagatataaagtgtacttgagaaattcagaggatggtaaggtgcctgcaagtggg

SEQ ID NO: 19443 - DNA, 201 bp, Homo sapiens
ggcgaataggtcacggcggccttttttttttagtttaacttttccttttttgctgtctggtcatcctcgtcggtcttctgcttctgggtatcgacatcgtyatcctcatcatcttcagctgcccgcttgcccgtagctgactcagctccctcatcttcatctccatcctcttcctcaccatcaccttcttcctccccacct

SEQ ID NO: 19444 - DNA, 201 bp, Homo sapiens
gggtttccctgtgttggccaggctggtcccaaactcccaacctcaggtgatctgcccaccttggcatcccaaaatgctgggtttacaggcgtgagccattgcacctggcctaggagttcttatatattctagatatgagcttctttgggttacatgacttacacaaatttttttttttctactttgtggcttgccacaaag

SEQ ID NO: 19445 - DNA, 201 bp, Homo sapiens
ctgatcctggaatgagtgttgagagcagcacagaccactctacgtttctgctctgaccacaggtctggcctagaatttgcccctccactgcacaatgcagstaaaaacctttaaaaaaataaataaatggtctctgagcctcccagaaatacagcacttagaatgttgtttttggagggggcatgtgataaagaatgggaa

SEQ ID NO: 19446 - DNA, 201 bp, Homo sapiens
aatactgtatgaaataataagggctctgagactcacagagagtagacttacgtacctcaactagtaaggccttgactacagtgtccttctgcgcaagtggygggacgtcagtcaactcattgtcacacacttcctgagaatgcatggcttccgcagtggctgtgaaattcacctttcctggggaataaagttcttaagagt

SEQ ID NO: 19447 - DNA, 201 bp, Homo sapiens
taagggtaaaaaagtgtgatatatttcctcacccatcataagggttgtggctggcactcctataataaaagacaggttaataagagaaaagcataacaaaygtacttcatcaaagttttaggtgacaccagtgtcttcagaaatgaagaccaaaagacccagagaacactgtgtctctgtgcttaggtctgatgaagaatg

SEQ ID NO: 19448 - DNA, 201 bp, Homo sapiens
tccaggtttctttccactacagcatgctgttcatttgtgatctcgttcattcatccatccttccttccactcattccttcattcactcacctatatttttycctaaacagctacaggtcaccactgtctgggttgtttgctactaccttctgctgctgcctgagaaaacctgggagactgtgatcacattttttttcctgt

SEQ ID NO: 19449 - DNA, 201 bp, Homo sapiens
gtacctcaactagtaaggccttgactacagtgtccttctgcgcaagtggtgggacgtcagtcaactcattgtcacacacttcctgagaatgcatggcttcygcagtggctgtgaaattcacctttcctggggaataaagttcttaagagttaaacggtgattctatattgaacagtttcttcttttccagtttccccagtg

SEQ ID NO: 19450 - DNA, 201 bp, Homo sapiens
tttgtctgttttgtctactgatggccacccatgacagaaaaaaaagtgactgtcttaggggaggccctcaatgtatttttgttgaatattgaataaatggrtgactcagatgtagggggtgatctaaagagaagagtcaagaatgacttcaacgttttttgcttgggcaattgggattgccactttccaaatcagggaagt

SEQ ID NO: 19451 - DNA, 201 bp, Homo sapiens
atgttatgattatgctgctagagtagtgaaaatcagataaacagcaccaagttctgttggaataaagcatacttatatctcagtgagcttcacatggcagytttgtattccttaaataaaaaatatgccatctgaacctatgttaaatttttgtgctatcattatttttaaagtgtccaggctgtttctcatctgttctgt

SEQ ID NO: 19452 - DNA, 201 bp, Homo sapiens
ctctaatattgcctctattttaaaaaaactaaatgtattgagcattctctatatgccaggaactgaactaagtaatttactgttaatttacactataattycatgaagtaggtattaatattatctccaggactaaagtgagatgattgacatttctctttccagatgaaattaggtaagttatccaaggtcatgtatcta

SEQ ID NO: 19453 - DNA, 201 bp, Homo sapiens
taaaaatgttattttttatataattacatttacctctaatgttttactttttgtttttatgtctcgtctttttattcctttcttattccttagtggggttkattttgcataaatgagtattttctaatgtagcattttaatttctctttgttttttctgtttttaatttctttaacgatattttcactgtattttttgtaa

SEQ ID NO: 19454 - DNA, 201 bp, Homo sapiens
agttaggacttctcagagagaacagctgctgtcctcatctgtcctgtcctcacctgcccaagagtctcacctggaggtagacacatccttctcctgtcacyttcatgctgtattccccaggcagctctggcaatgagacctgctgcagtaacaggcggttgttgttgtccacttggaatttgctggaaaatgtccctgaag

SEQ ID NO: 19455 - DNA, 201 bp, Homo sapiens
aagttgttgttatagtgaattggttttttataaatttgtatttttttctttctttcttttttcttttttttttttttgagacggagtttcactcttgttgyccaggctgcagtgcaatggcacgatctcactcaccgcaacctctgcctcccaggttcaagcaattgcctctttgggtcttttcttttttttcttgagaca

SEQ ID NO: 19456 - DNA, 201 bp, Homo sapiens
attctcaggtcttccaatttgctacttaaaaagtcagctgtcaatttatgagaatttttttactggccataaaaataaatgtaacaaatgttctgaccatycttttggtgcttatcttttcccaagcccaagaatgacataaagtttcttcgttcatcattgatttattcattatcaacctttggcttctcccctctcttc

SEQ ID NO: 19457 - DNA, 201 bp, Homo sapiens
ctacgtgaaaatcactctcactcacccgtctcgtagtaatcatagactttcactatggctggtttcagatctcttactgggacatcttgcagaaccgtgargaacaagctcagtgtctgatttgacacctggaaagcaaaagtcaattaaatgacctttcaggaagctttcttctctctttgaattagtttaagtattcac

SEQ ID NO: 19458 - DNA, 201 bp, Homo sapiens; identical to SEQ ID NO: 2858

SEQ ID NO: 19459 - DNA, 201 bp, Homo sapiens
actcctacagagaaactgctggttttcaagataactctaataatgcatgtggcggcaaacaaggagctgtttgacaacactgacatctattcctacaggcrtagaagccctttgtctactatttgacaagaaaatataataaaaatctaacatagtttattagaagttggtcaaaacattcaaaattaccaacactgtttg

SEQ ID NO: 19460 - DNA, 201 bp, Homo sapiens
gctggttttcaagataactctaataatgcatgtggcggcaaacaaggagctgtttgacaacactgacatctattcctacaggcgtagaagccctttgtctrctatttgacaagaaaatataataaaaatctaacatagtttattagaagttggtcaaaacattcaaaattaccaacactgtttgaaatacggatttatatt

SEQ ID NO: 19461 - DNA, 201 bp, Homo sapiens
ttgttactatgagcctcaccctaattgttgtgtatgaagaggtttcatgaaatgtctgttctggttattacagccatgtatccaccaagatttgaaataarctgaacttagaagcagttcttggccaggcgcagtgggtcatgcctgtaatcccagcagtttgggaggccgaggcaggtggatcacctgaggtcaggagtt

SEQ ID NO: 19462 - DNA, 201 bp, Homo sapiens
tgaacttagaagcagttcttggccaggcgcagtgggtcatgcctgtaatcccagcagtttgggaggccgaggcaggtggatcacctgaggtcaggagttcragaccagcctggccaacatggtgaaaccccatctctactaaaaatacaaaaattagctgagcatggtggcacgcgtctgtaataccagcaatttgggagg

SEQ ID NO: 19463 - DNA, 201 bp, Homo sapiens
cttgctgggggcccagagagaacaagaacagaaagggagaatgtgtccatctgtctgccagagctgggatgcacttttcttcttctgtcctcggacaacarttccaggctcccgggcctttggactctaggacttacatcagcggcccctggagttctcaggcctttggcctcagattgaagttataccatcagtttccct

SEQ ID NO: 19464 - DNA, 201 bp, Homo sapiens
gtgtccatctgtctgccagagctgggatgcacttttcttcttctgtcctcggacaacagttccaggctcccgggcctttggactctaggacttacatcagyggcccctggagttctcaggcctttggcctcagattgaagttataccatcagtttccctggttccgaggctttcacacttgggctgaaccacactactgac

SEQ ID NO: 19465 - DNA, 201 bp, Homo sapiens
ttgtgagagccaatccctctaataaatcctttttcctatatctatatttatatctatatcatctatctgatctatatctatcatgtcccattgattctgtstctctggagaaccctaagatagtgaattaaatgttaatgtccaacaagccacaaatcgggagttacagtcatgcactgaataacaacattttgatcaatg

SEQ ID NO: 19466 - DNA, 201 bp, Homo sapiens
atgaagaattgaaagataaaattgaggaaattacacagaaagcgtggcaaaaagacaaggagataggaaatgagagaaaaaaggtaagaaaatttatgaamtctatgaagttcagcagccaaataatagaatttccaggaagagtaaaacagaggggaagaaatcaacaatgaaatagttcaggctgggcgtggtggctca

SEQ ID NO: 19467 - DNA, 201 bp, Homo sapiens
agaaccaaattgaaagtgtccatcataatagatgaaaattgtcctgcactaaagcatatgattgtgaaatgtaaaatatctaggacaaacaggagattctmaggcttccagaaggggtagaagggtggcacaaaagggtggtgggggagtcggaattggattgggtttctcagcagcaacacaggaataagaaaagaaaca

SEQ ID NO: 19468 - DNA, 201 bp, Homo sapiens
taaggcttgtgctgtacagtaggttattagtagttaaattctgggggagtcaaaagttaaatgcaaattttctacttgaggaagtgtcggtgcccctaacrcctatgttcaagagtcaactgtaattcaagttatacattttaatttttttcttacactagtaaataccagactgagaggattgaaggtttgactcatttc

SEQ ID NO: 19469 - DNA, 201 bp, Homo sapiens
tagacatggcctcaaaggaagtaggtactttcacaaacatcatctcctttgatcttctcaaccaccctgaggagtatgtacttttgccccactttacagaygaggaaactgagaagacatcaggcaatttttccaacatcacacaaaggataaggaaaatgttaggatgccaaccccatgtctccaggtttctttccacta

SEQ ID NO: 19470 - DNA, 201 bp, Homo sapiens
gaggatggagacttttatgaagagctacttccacttaataaacagtaaacatactttctcttccttatgattttcttcacattttcttttacttagcttastttaagaatacaatacataacacatataacatacaaaatatgtgttaatcaactgtttatattatccataaggcttgtgctgtacagtaggttattagta

SEQ ID NO: 19471 - DNA, 201 bp, Homo sapiens
cctctccagccccactgggcacactggtaaggctggggcctctgcccacagtcagggcctatcgtggcctggagcccacacctaccaccctgactacagcrggactgagggcactcatggtatctcatggaaaacaaactgaggcccaggaggaaaatgtttgtttaaaattttgcacgccatttctccagggccactaag

SEQ ID NO: 19472 - DNA, 201 bp, Homo sapiens
tttaatacatcacattctactttcagctgttccccttaattattcttattccacttcttccttgacgtgttttgggcatctaatccattgtccttggaagycttccttccttcagccttatactggtttaacattcctccagcgcagtttactttccacgacattccatttgattctcccactagccaaattcttaacacc

SEQ ID NO: 19473 - DNA, 201 bp, Homo sapiens
catgccccaccgcctctccagccccactgggcacactggtaaggctggggcctctgcccacagtcagggcctatcgtggcctggagcccacacctaccacmctgactacagcgggactgagggcactcatggtatctcatggaaaacaaactgaggcccaggaggaaaatgtttgtttaaaattttgcacgccatttctcc

SEQ ID NO: 19474 - DNA, 201 bp, Homo sapiens
cagctgttccccttaattattcttattccacttcttccttgacgtgttttgggcatctaatccattgtccttggaagccttccttccttcagccttatacyggtttaacattcctccagcgcagtttactttccacgacattccatttgattctcccactagccaaattcttaacacctgccacacacatttttctgtttt

SEQ ID NO: 19475 - DNA, 201 bp, Homo sapiens
ctgatgtttcttcaactgacttgatcctttcatacatccaccttaagctgttgtattaccttccatattatttccattttataaacccttcttctgaaagrccgtgtcttaattgtccataactctcagaaaaagtactggaagaatctttttgaaacagctccaaatggaaaattaccaatttagtttttctcagatctt

SEQ ID NO: 19476 - DNA, 201 bp, Homo sapiens
tagtgatggctctggcacagatcccaaggtggcaatggcctctgctgcctcagcccctgccatgctgtccaccagcatcactgtggagaataaggtcagcycctcaagggcaacagaggggtctaggtctggacctgtggctggcggcacaggagccatggtggtgcagaccaggagctgtgtctagcaaggcttatgccc

SEQ ID NO: 19477 - DNA, 201 bp, Homo sapiens
gcagtggcggttaggcttctccacatggaaaccccttagtttcactggccacggccagaaacctgcagttgcttccatgtttaggcacggtccaccaagcrtcccaagttggaaagtcccaaggtctgctccatggatggagcaggaaggaaagggaaaatgaatcccaaactttgggcttacttctccctcctggctggc

SEQ ID NO: 19478 - DNA, 201 bp, Homo sapiens
acacaccgtacccctgtctcataaggcagtttatagtttcaaagtgcatggagcccgtcctgcacaccattctcccacaccccgctccagcgcctctcccygagttacagacctcactgtgggcccccggggaaccagcgcagaggtttaagcggtgtggggtcaactccaagggtcaggagttggcaactggttggttcc

SEQ ID NO: 19479 - DNA, 201 bp, Homo sapiens; identical to SEQ ID NO: 2853

SEQ ID NO: 19480 - DNA, 201 bp, Homo sapiens
ccaaggtctgctccatggatggagcaggaaggaaagggaaaatgaatcccaaactttgggcttacttctccctcctggctggcttgccaaaatatgttaayggtggaggatatctaagttcttggcatcttgaacaaagaattggacaaaatgcacaaacaaagcaaggaaggaatgaaagattttattgaaaatgaaagt

SEQ ID NO: 19481 - DNA, 201 bp, Homo sapiens
aggaaaatgcacacacaccgtacccctgtctcataaggcagtttatagtttcaaagtgcatggagcccgtcctgcacaccattctcccacaccccgctccrgcgcctctccctgagttacagacctcactgtgggcccccggggaaccagcgcagaggtttaagcggtgtggggtcaactccaagggtcaggagttggcaa

SEQ ID NO: 19482 - DNA, 201 bp, Homo sapiens
ctgaggtgggaggattgcttcagcccagagttgcaggtggaagtgagctatgatcgcaccactgcactccagcctgagtgacagaacagagactttgtttyttaaaaaaaaaagtaaaaaaagagaaatgaaacaaagtttgcataattttcaatcatcaaaaaaaccaatttggctactcagtgattaacttgattttat

SEQ ID NO: 19483 - DNA, 201 bp, Homo sapiens
ttttctcctccctcagcatagtctgactttgggaagggcaaattcaaatcgtgagcagcactggtcacagtctaccagtgccacatgcctcacacaagaarcggacaatcacgccatgctgatgccaacaggtctcagacatgaactcacccaagggtctcacagatgcctttcctgttttctttgccccatttttctttt

SEQ ID NO: 19484 - DNA, 201 bp, Homo sapiens
caaggtctgctccatggatggagcaggaaggaaagggaaaatgaatcccaaactttgggcttacttctccctcctggctggcttgccaaaatatgttaatrgtggaggatatctaagttcttggcatcttgaacaaagaattggacaaaatgcacaaacaaagcaaggaaggaatgaaagattttattgaaaatgaaagta

SEQ ID NO: 19485 - DNA, 201 bp, Homo sapiens
tgtacatatatacattcaaaatagtctgaagagtataaataactatgaaattgaaaggattagccaggtgtgatggcatgtgcctataaccccagctaccrgggagactgaggtgggaggattgcttcagcccagagttgcaggtggaagtgagctatgatcgcaccactgcactccagcctgagtgacagaacagagact

SEQ ID NO: 19486 - DNA, 201 bp, Homo sapiens
tggcagcctttcattctatactgagccaagagacacacaccagagccccaggctggccatgccccaccgcctctccagccccactgggcacactggtaagkctggggcctctgcccacagtcagggcctatcgtggcctggagcccacacctaccaccctgactacagcgggactgagggcactcatggtatctcatggaa

SEQ ID NO: 19487 - DNA, 201 bp, Homo sapiens
ggcccccttccagtgtcaaagacagaaatgacaggttaaatacttctcatgtcacatcactgaacctgtctttcctgcctccctcgtccacttttaaggaygcttgtgattacactgggttgccaaggtaatccatgataatctccctattttaaggtcaactgattaacaaccttaattccaattgcaactttaatttct

SEQ ID NO: 19488 - DNA, 201 bp, Homo sapiens
acacctgtaatcccagcacttcagcactttaggaggccaagaccagcagattgcttgagctcaggagttccagaccagcctgggcaacatggcaaaacccyatctctacaaaaaatacaaaaattagctaggcatgctgatgtgcgcctataatgccagttactttggaggctgaagtgggagggaggtggagaccatagg

SEQ ID NO: 19489 - DNA, 201 bp, Homo sapiens
tacatgtttgtgcatgaaaacatctgaacagcttccatttgttatttttcatatttctatattgttaaaaattgacaacaggcatctattgctttttgtamttcaaagcctttctttcttaagtccgtgtgtgtttctgtgagaaaagatgatcagcattgtgaatcatggctattcttatataaatcactcaaatttgta

SEQ ID NO: 19490 - DNA, 201 bp, Homo sapiens
gatttcattagcttcctattaatggcagtggctgcttgctatcatgccccatgcagccagtgggagcttcgcctcttctgagttggggtgggggctccccmaggtgctgctgcagccctgcaaacctcagtcctccaaacctcagctgcagacccaggcttcctgctctatgaagcaggcaggagccccgtcctcctgggt

SEQ ID NO: 19491 - DNA, 201 bp, Homo sapiens
agtcatattttatttacaaaaaataaagggatgtggtatttcttgtagaatacattgtttctaagaaaataaaacttaaagcaaaaatcagctatttccakggttgtgaatgcaattctgcccatagataaggatgatttgtgctagtaccttattttatcttctcatttcaggtttctatggttattttactcctctctt

SEQ ID NO: 19492 - DNA, 201 bp, Homo sapiens
tatacctgtaggttgtatcccaaatttggggaatatttgatcattactttttcaaattcctttccgatttcattatatgtcccctttattttgggggactwcagtttcacttttgttatactatttggcattgttcataggtcactgaggttctgttcatttttttctcccattttttccctctattcttcatattggatt

SEQ ID NO: 19493 - DNA, 201 bp, Homo sapiens
gtcccagagtcccgcttccagggcctctcggctcgcgcaccccggtcacgcggggtcacgcgcctgaccgctcccgggtagggttcgagtgaagagggtgmgaggggcaggtggcggaagcggaagttacgcaggcagctcgccctcgggctccgcgggagttgtagttctcacgctaggtctcctccgggcgcttcccta

SEQ ID NO: 19494 - DNA, 201 bp, Homo sapiens
atccgccttggcctcccaaaccaaagtgttggggttacaggtgtgagccactgtgcccagccagccctggcatctttttttttttttttttttttttttttgagatggagtttcgctctgtcgcccaggctggagtgcagtggcgtgatctcggctcactgcaagctccgcctcctgggttcaagccattctgctgcctca

SEQ ID NO: 19495 - DNA, 201 bp, Homo sapiens
ttcttatatgttttcctcatctgaaagacttagcataattctctccataaatcagtataatacccacgatttatattccagctgaaattttacttggggggtgtgtgtgtgtgtgtgtgtgtgtattttagggatggggtctcactctttcactcactgcagcctcaaactcctgggttccaatgatcgtcctgcctcagc

SEQ ID NO: 19496 - DNA, 201 bp, Homo sapiens
tcatctatctgatctatatctatcatgtcccattgattctgtctctctggagaaccctaagatagtgaattaaatgttaatgtccaacaagccacaaatcrggagttacagtcatgcactgaataacaacattttgatcaatggcagactgtatatatgacagcagttctgtaagcttataatggagctaaaacattccta

SEQ ID NO: 19497 - DNA, 201 bp, Homo sapiens
tttcttatatgttttcctcatctgaaagacttagcataattctctccataaatcagtataatacccacgatttatattccagctgaaattttacttggggggtgtgtgtgtgtgtgtgtgtgtgtattttagggatggggtctcactctttcactcactgcagcctcaaactcctgggttccaatgatcgtcctgcctcag

SEQ ID NO: 19498 - DNA, 201 bp, Homo sapiens
atagaaaaggaagatgatataggtcagaaacttggatctatgtaaagaaagggagagcatttaaagtctttcattttcctcattcttgttcttcatttttwaattatttttatttttttatgagacggagtcttaccttgtcacccaggttggagtgcagtggtacaatcacaggtcattgcagcctcaatttcctggact

SEQ ID NO: 19499 - DNA, 201 bp, Homo sapiens
ttctgacgtcatagcatactggattactggtgtgtttgtggtgatgctggtgtaaacaaacctgctgtgctgccagtcatataaaagtatagcaggcacamttatgtacagtccataatactttataatgataataaaagactatgttactggtttatgtacttactctattctttgttgttattttagagtatactccta

SEQ ID NO: 19500 - DNA, 201 bp, Homo sapiens
aaagatacatgcacacatatgttcattacagcactattcacaatagcaaagacatggaatcaacccaaatgtccatcagtgatagaccagataaagaaaaygtggtacatatacaccatggaatactatgcagccataaaaagggatgagatctttgcagggacatggatggagctgaaagccattatcctcagcaaacta

SEQ ID NO: 19501 - DNA, 201 bp, Homo sapiens
gctggagggctgcatcactcccccactgctggtttgtgagagctgtatgtagaggaaaacaaaaattagccgggcgtggtggcaggcacctgtaatcccasctactcgggaggctgagacaggaaaatcgcttgattctccacccaggaggtggaggctgcagtgagcagagatcgtgggctgcactccagcctgggcaac

SEQ ID NO: 19502 - DNA, 201 bp, Homo sapiens
tattttagagtatactcctacttatttaaaaaaaaaaagttaactgcaaaatagcctccggcaggtcctttaggaggtgttccagaaggcattgttatcayagtagatgacagctccatgcatgttattgtccctgaaccttctagtgggacaagacgtagaggtggaagacagtgatattgatgatcctgagtataagta

SEQ ID NO: 19503 - DNA, 201 bp, Homo sapiens
acaaagaaggtgatcaaaacaaaggctctaaacaagagctatattttaaatatttaaacagctactcgttagctggtttctagttgaattggttatgtatytagttaccaatatgctgcaaccgtgcagtcacctacacattatttaagtatatttaactgttaaatgcactacccaccaatcatgaaataaactttatga

SEQ ID NO: 19504 - DNA, 201 bp, Homo sapiens
tgttatcatagtagatgacagctccatgcatgttattgtccctgaaccttctagtgggacaagacgtagaggtggaagacagtgatattgatgatcctgastataagtaggcctagactaatgtgtgtgtttgcatcttagtttcgaacaaaaaaagtttaaaaaataaaaaaagcttatagattaaggatataaagaaag

SEQ ID NO: 19505 - DNA, 201 bp, Homo sapiens
aggctgaggtgagaggatcacttgagcctgggtgatagaggctacaatgggctacaatcataccactgcactccagctagggtgacagaatgagactcttwaaaaaaaaaaaaggggattactggggtatttcccctcccaccctgattccaagtgagaggggaaacaagagggcactttggggaaattgggcactgcttg

SEQ ID NO: 19506 - DNA, 201 bp, Homo sapiens
ctccattcatagtaagtgcctgataaactacagggcacttttgggcagttgactttaaagtaaataggcttctaaattaacagcctgagggagggcttgtrattcatgcaaacatcttgtccctgagtaacgaatcttattgtgagttcctcaaattgtcaagtactgattaatgcacaacctcctgacactgaagaggac

SEQ ID NO: 19507 - DNA, 201 bp, Homo sapiens
catttgtaaccacagcactttgggaggccaaggagggaagatcgcttgagcttaggagttcaagactggcctggggaacgtagaaagtcatcatctctaayaaaaataaaaaaataaaagaattagctgggcaaggtggtttatatctgtagtcccagctactagggaggctgaggtgagaggatcacttgagcctgggtg

SEQ ID NO: 19508 - DNA, 201 bp, Homo sapiens
actttaaagtaaataggcttctaaattaacagcctgagggagggcttgtgattcatgcaaacatcttgtccctgagtaacgaatcttattgtgagttcctyaaattgtcaagtactgattaatgcacaacctcctgacactgaagaggactctgactcacttttgaatcaaatgtcgatattttagcctttatattgcagt

SEQ ID NO: 19509 - DNA, 201 bp, Homo sapiens
acagttaagtgggcacctggtctttgagaatcttctcttgagaaagctctctttggttccacaaatcttccatccacttgtgtggccttgcattcgtggcygcatccacctcctccatagtggcatatgtgacaaacccaaagcccctgcaaccttggtgtttgggtctctcattacggcacagtccgtgagcgttcccca

SEQ ID NO: 19510 - DNA, 201 bp, Homo sapiens
tacatatagcctaggtgtatggtaggctagaccacctagatttgtgtaagtgtggcaggccaattctccctgacaatcacacagacaggcctgcatagcastccagttacacagatttccacagagctgccttaacattgagcaaatagttaaacctagcaaaatcggcacccagacagcaaagctagaaatgaaacatat

SEQ ID NO: 19511 - DNA, 201 bp, Homo sapiens
acatgttgctcctggacaaaactgagggtcaggctgctacttctcctggcccaataatgagatgcagacaaactggggaagagaggttttatttttgcatytggttacagggagaaggcctagaaattgtcaccacaccaactcaaaattacaaagttttccagagcttataaaccttccaagctgtatgtctacatataa

SEQ ID NO: 19512 - DNA, 201 bp, Homo sapiens
accgggggcaggaggaaagtcactgatgcccagctgtttgcatcctgcacagctacaggtccttaattaaaagtgtactgttggtttctgctgagtttttyattgatatgtgctgctgttttctctggaagcctctttagggaatcgaggagcgcactggtgcaggggctgggtggagccatcctccgatggagcacaggc

SEQ ID NO: 19513 - DNA, 201 bp, Homo sapiens
cttacaggcagttctccctcactgctcctcacctccagaataaggagactccttcagctttgaagatgtgggaagagcaggggtgagggcaaggaagaggrtgtctgagcattgaaaaggccaagaaaagaggctggagccctgaaggcaatcagcacctgttcccaagaatgcaaggctgggccttctcccctctcagac

SEQ ID NO: 19514 - DNA, 201 bp, Homo sapiens
aacatagtactggaattcttagccagcacaatcaggcaagagaaagaaataaaaggcatccaaataggaagagaggaagttaagctctccctgtttgcgartgatatgattctatatctagaaaacctcatcatctctgccgaaaagctccttgatctgataaacaactgatacccaaagcaatcctaagcaaaaagaaca

SEQ ID NO: 19515 - DNA, 201 bp, Homo sapiens
atcttctgccaccatcagggacaaaccgggggcaggaggaaagtcactgatgcccagctgtttgcatcctgcacagctacaggtccttaattaaaagtgtrctgttggtttctgctgagttttttattgatatgtgctgctgttttctctggaagcctctttagggaatcgaggagcgcactggtgcaggggctgggtgga

SEQ ID NO: 19516 - DNA, 201 bp, Homo sapiens
ctaaaattgctgttattctgttctttttcaaggtgcactgatttcatattgttcaaacacacatgttttacaatcaatttgtacagttaatacaattgtcmtagtggtcctgaggtgacgtacatccttcagcttatgaagataacacgattaagagattaaagtaagacaggcataagaaattataagagtattatttgg

SEQ ID NO: 19517 - DNA, 201 bp, Homo sapiens
tggcaacaggttagtacccccacaggatggagtttctagaggaaggcacaggctgccatctttgctgtttcatggcctttgctggtgatacttccacgtaygggagaaaccaaagcaactggggtctggagtggacccccagcaaacctcagcagccctatgatagagtggcttgactgctaaaagaaaaacaaacaaaca

SEQ ID NO: 19518 - DNA, 201 bp, Homo sapiens
ctggcagacttcttctctaggagccctctacctcctgggccccaactctgaagcagctgcctggcagagacagtgaggagggtgcagggagaggactttgycctccactgctctccagccaggacacggccccggctggcagcctttcattctatactgagccaagagacacacaccagagccccaggctggccatgcccc

SEQ ID NO: 19519 - DNA, 201 bp, Homo sapiens
cctgcatggctgagagccaggcttcctgcttggagtccgcaggaggctgtggcagcagtggcatccactgtggcatctccgtcctgcccaccttaagaggygagatggagcaggtccatctgcctctgccctttctagccaaggttatagctgccctggactgctcactctctggtctcaatttaaaatgatcccgtggcc

SEQ ID NO: 19520 - DNA, 201 bp, Homo sapiens
gcacttcagcactttaggaggccaagaccagcagattgcttgagctcaggagttccagaccagcctgggcaacatggcaaaaccccatctctacaaaaaawacaaaaattagctaggcatgctgatgtgcgcctataatgccagttactttggaggctgaagtgggagggaggtggagaccatagggagcagagatcacgc

SEQ ID NO: 19521 - DNA, 201 bp, Homo sapiens
tccagcaggaactggccgctgtgaaccctcttcccacattagccggctctcacactgtgactaaagagaccagccaccacatggtcccggttacaggggcrgctggggccttgccatctggcaggacctgctgccactggcgctcgctgtctgtgagcacagggtctggtgggcaggaggtgactggagggcatgtcttcc

SEQ ID NO: 19522 - DNA, 201 bp, Homo sapiens
ccatgaaatgtaaagactgcattgtgggacatggaggggctccatgagatccatttagttgcattcatcctcctgtccccaaagtatatcagtaaatgtaytgtttcttgacagtttggctgtgttatcccagaggactggatgtgggaatctccaaatggccagataatactctcagcttccaattcagtgaaactattc

SEQ ID NO: 19523 - DNA, 201 bp, Homo sapiens
gatactgagactgcagttttattatgtggttcttgagctcagaggagaggtctgggttggagataaacatttgagagtagtaggcatatagatgataattgaagtcccccatctactaaattagtttactctcctcagtctttaaaattgcctggggaggccgggcacagtggctcatgcctataatcccagcactttggg

SEQ ID NO: 19524 - DNA, 201 bp, Homo sapiens
tggaggaaactgagttaggtcagagctgacaggtgctgactctcaagactcagatggtggtctaagctgatgatttgtaaaatccaagtcatttgtgggawgacgttggcatctttaactctgtgggtatctcttctttcagtgaatattaagtgcttctgcagtgtcaggccctgggctgtgttttagggatgtgaaaat

SEQ ID NO: 19525 - DNA, 201 bp, Homo sapiens
gggggaattttggaatcaccagtatggttcttaagtttttgttttctaccaacttctatcctctccatacactcaatactttaattatttccccattggcyccatccaccagaaacaagatgatttacaagtggttcactgtaaacgggtcctgtcagtccttcactatgaagaatatacaagattttacattctagtaca

SEQ ID NO: 19526 - DNA, 201 bp, Homo sapiens
ttcttctttgctgagtacagagtaaaagaatacaatatttaagtatggcaaagataagagacacaagaaattactcaggatctgaaatgactgagcaaggragttctttctctgagatctttaagactagtagtagttggtaatgtctgattgagtgggaagagtatggacgaagtgatgtccaagtttcatactgactag

SEQ ID NO: 19527 - DNA, 201 bp, Homo sapiens
cctaatcaaaattgattggatgaattattgagtgttacaaaagtgatgcaatgaagggccctcatatttttgacattcatttttattagatccttcttatytggagattaggtatgtgagaagctcggagaaataatcttagaagagccaagcagaatttttatatctaaatccatgttacttacatagaatatattgttc

SEQ ID NO: 19528 - DNA, 201 bp, Homo sapiens
attttgatagtgaagagtgctggtacatcaataaagtacttgtatagtaaacaaattaaagatgttttgtgaactagctaggccttgaagactcacagggyttggtgtgtaatactgtcattcttagagataattagctccaggttgttctttctgctggaattgtgaattgcaaatccattcttatcagagtgaaatcag

SEQ ID NO: 19529 - DNA, 201 bp, Homo sapiens
tctgacttacaactgtacctctctagagaaaaaacagaaaataaggaacaaagggaaggcagttttactagtgagaagatgcaaatcaaaagcaaactggraagcaagagcaatagtaagggtgagatgagggactggagttgagactgcttgagaaatctggctgtgtagctttggtttgggggactgaggaagaggctg

SEQ ID NO: 19530 - DNA, 201 bp, Homo sapiens
gcgatccaagatagcaccacggcactccagcccgggtgacagagtgagactgtctcaaaaaaatttttttttccaaaagatgatctaaaataggacatttrtatctttaatttccagttctccttattctagattttataatctatcttaaggactcttactgattttcccactgcttttggaaatctttgtggtagaagg

SEQ ID NO: 19531 - DNA, 201 bp, Homo sapiens
gttttcacaggccctattatattaactctgacttacaactgtacctctctagagaaaaaacagaaaataaggaacaaagggaaggcagttttactagtgaraagatgcaaatcaaaagcaaactggaaagcaagagcaatagtaagggtgagatgagggactggagttgagactgcttgagaaatctggctgtgtagcttt

SEQ ID NO: 19532 - DNA, 201 bp, Homo sapiens
catatctgaaatctaagagtatgaattaggataaaattagtaagacatctaaaatggagagagttcggcttaaggttaggaagacgtcataaagttctcamgggacaagtcttcgtgattttaggttttgaactttgcgttttagggattctcaactaggttgtgtaggtttttgggggtgaaccctgagaataattttag

SEQ ID NO: 19533 - DNA, 201 bp, Homo sapiens
ggtacgatcatagctcacagcagccttgaacccctgagctcaagtgatcctcctgccttagcctcctgggtagctcggggtacaggcacctgccactatayctggctaattctttaaaaatttttttagagacacgaagtctcgctttgttgtacacgctgtttctgaattcctggcttcaggtgatccttccgagtggac

SEQ ID NO: 19534 - DNA, 201 bp, Homo sapiens
gaggtgggagaagcaagtctagaacatctccaggctcagactaaacgagagtacttggactgcaaccaagtaatcactgcaaagtagttccaagcagcaaraaataccagattctcatggaggctactatagggtacagaataacaacatgaaagcaatcaaccctgtataaataatgtttcttggcattttttttttaat

SEQ ID NO: 19535 - DNA, 201 bp, Homo sapiens
tcacatttttcctgtcctaatctcagaggtgggagaagcaagtctagaacatctccaggctcagactaaacgagagtacttggactgcaaccaagtaatcmctgcaaagtagttccaagcagcaagaaataccagattctcatggaggctactatagggtacagaataacaacatgaaagcaatcaaccctgtataaataa

SEQ ID NO: 19536 - DNA, 201 bp, Homo sapiens
tctctggccacctgatacaggttacacccgcatccttgggctgatttattttttctcacagtgtctaacacaatcctcagtggaggattaataagtttatytgtttattgttctctcctactagaatttaaatttaaatctatgaggacaggaactttgtttttttgtttgtttgtttgtttgagatggtgtctcgctctg

SEQ ID NO: 19537 - DNA, 201 bp, Homo sapiens
acattcggacaaggaccagggtcgcagcccgaagcacgtggtctgtcacgtagagcacaaaaagcagtgccctgcggagttcactgactcccgcggcgtasacaacgccgccgcctccatctccagccaagttggcttccctggccatcttacagcgcggacggccgcccataaacgggaagccctcgcggtgtcgcccac

SEQ ID NO: 19538 - DNA, 201 bp, Homo sapiens
cccaaagtgctgggattacaggcctgagccaccgcacccggcctcagtgtcttctttaatgccatcaacaaacatatttttcacagttaagtgggcacctsgtctttgagaatcttctcttgagaaagctctctttggttccacaaatcttccatccacttgtgtggccttgcattcgtggccgcatccacctcctccata

SEQ ID NO: 19539 - DNA, 201 bp, Homo sapiens
tgccaccaaagccaccatgaccatgaagttttctccactaccaaagttgtcactcccaccaaaaccacctccatgaccactaccaaagtttccagaaccayttcgacctctttggctagatgaagcgctagctctctcttgctttgacagtgctttcctaacttcacagttgtggtcattcacagtatggtatttctgaat

SEQ ID NO: 19540 - DNA, 201 bp, Homo sapiens
tagcactccagttacacagatttccacagagctgccttaacattgagcaaatagttaaacctagcaaaatcggcacccagacagcaaagctagaaatgaarcatatggtcagtaggagccttgcgtgggcttctccctaacctggagcaaaccaaaataatacagtctttcattcctagtgcaggacccatctcgggtcaa

SEQ ID NO: 19541 - DNA, 201 bp, Homo sapiens
cgagaatcacttgaacccaggaggtggagtttgcagtgagccgagatcgtgcgattgcactccagcctggatgacagagtgagacttcatctcaaaaaaamcccaaaaaatatgcatgtgagagaggatgctttatagaccaagattcttgagtcagtggatgaatatgaagctgactggacaactggaagaagtaacctt

SEQ ID NO: 19542 - DNA, 201 bp, Homo sapiens
ctggagcaaaccaaaataatacagtctttcattcctagtgcaggacccatctcgggtcaacgaaatctgagacagtcaaggtaacagagctgtttgagtarattcattggagagtctaaggcagcactccagaccaagctgtaaaggagataagatagaaataatcactctggtaccacagtacacaggccttgaaggtac

SEQ ID NO: 19543 - DNA, 201 bp, Homo sapiens
caagttactgtactaaatactgtggacaattgtaacacaatggcaagtatttatgtatttaaacacatccaagcatagaaaaaatacagtaaaatacagtrtaaaagataaaaaatggtacacctgcatatgacacttaccatgaatggagcttgcagattacagtataaaagataaaaaacggtacaccggtatatgaca

SEQ ID NO: 19544 - DNA, 201 bp, Homo sapiens
ctgaatgacaggtgagccaatgaagaaattaagaaggaagttaaaaaacttctgaaaataaatgataatggaaacataataccaaaatctatgggatacartgaaagcagtactaacagcaaagtttatacctaaaaccacctacataaaaaagtaaaaatgcctcaaatatacaacttaacaatgcgtcttaaagaacta

SEQ ID NO: 19545 - DNA, 201 bp, Homo sapiens
gctgctgggggttagcagacacggtttgttgtctgacatacgggctctctcctcccggcccctcaccagccccagaggtgaaaaggctggagggcaaaggstgagtgagggaggtctgtggggagcactggtttccccaggccccagagacttaaacacaggaagaaaaaggcaagagagaattaacgatgccacagccca

SEQ ID NO: 19546 - DNA, 201 bp, Homo sapiens
tgcgttcttctcctcagcatatggatcattctcaaggatagatcatatgtttggtcacaaaacaagtctttaaaagttcaaaaaaattgaaatcatgtcarttatcttctctgactataatggaaaaaaactagaagtcagtaacaagaggaactttgaaaactatataaacacatggaaattaaacagtatgttactgaa

SEQ ID NO: 19547 - DNA, 201 bp, Homo sapiens
gatgcttatggaggaaggtctgagcttccccgcctctcacaccttaggctgcgaaatatgtattcataaaacctccaggcatcttctgaggacgcctcackcaggagaaagctgctagttccctttggctctcttgccctttggttatatctgcccctgctgggggcagggatgtggggcttgggggcatctcctgtggtg

SEQ ID NO: 19548 - DNA, 201 bp, Homo sapiens
catagggaatccgttttactagcttatcctttcagtctttctttttcccctaaataagcaaaaacgtgtcttcatttttccctttcctgttttatttacayagaaggcatcttagtcagttgtctgaccatcgctcctctagtgggctgcgtggttctctgttggacagatgtagggagcttatccaaccagtaccctctg

SEQ ID NO: 19549 - DNA, 201 bp, Homo sapiens
taacagtcgcattacttggatatgataacatcagaaggcataatgaatagtgagatgcttgggcctctatgttgaggacgaagctctgatttttttttttyccccaaattcttatgtaaggagtctggggagtcatgccccacaaatcatcagttctcatcagatgggttttatttaatcctgtatattgagacttacttt

SEQ ID NO: 19550 - DNA, 201 bp, Homo sapiens
ttgggataattagcatagtgtcttatcagaactatagcccatattctttagcttaacaatggatagccaattgctcatcaattttatttctgtaaaccaaagagagttcctgatcaacaactttgtaccagcccactctctctgtcccccttttgtctttaaaaacctgcttggaacaaaggctctaggaagctcacagcc

SEQ ID NO: 19551 - DNA, 201 bp, Homo sapiens
cataatgaatagtgagatgcttgggcctctatgttgaggacgaagctctgattttttttttttccccaaattcttatgtaaggagtctggggagtcatgcyccacaaatcatcagttctcatcagatgggttttatttaatcctgtatattgagacttactttccaatctgactctggccatggcaaggaagaaaataaaa

SEQ ID NO: 19552 - DNA, 201 bp, Homo sapiens
tttgggataattagcatagtgtcttatcagaactatagcccatattctttagcttaacaatggatagccaattgctcatcaattttatttctgtaaaccaaagagagttcctgatcaacaactttgtaccagcccactctctctgtcccccttttgtctttaaaaacctgcttggaacaaaggctctaggaagctcacagc

SEQ ID NO: 19553 - DNA, 201 bp, Homo sapiens
tttgggaggctgaggcgggtggatcacgaggtcaggagatcgcgaccatcctggctaacatggtaaaaccctgtctctactaaaaatacaaaaaattagcsgggtgcggtggtgggcgcctgtagtcccagctactcgggaggctgagtcaggagaatggcgtgaacccgggaggcggagtttgcagtgagccgagatcgt

SEQ ID NO: 19554 - DNA, 201 bp, Homo sapiens
ggaaagaaggaagagaagaccgcaaaacagcaagaagacatataacaaaatggcaggagtatgttttatcaataacaatattgaatgtaagtgaactaaaytctccaatcaaaagacagagtggctgaatggataaaaacacaagacccaacaatctgtcacctacaagaaacacatttcacttataaaaacacaagtaga

SEQ ID NO: 19555 - DNA, 201 bp, Homo sapiens
agtaagtacacagacaaacagaatattataacactgtaattgtggtgcataaactactcatatcttgagtagaaagactaaaagattaaccaaaaaaaaawaactaccacaactttttaagacatggacagtacaataacataaatagaaacaacaaaaagttaaaaagtggtggcatgaagttaaagtgtagagttttta

SEQ ID NO: 19556 - DNA, 201 bp, Homo sapiens
ccaatcaacaggaaagaaggaaattgttctatttattgcataaatagcattgtagaaattggcttgctatttggtgataaaataaataataagtcaagtayggtggtgcacgcttgtattcccagctactcggtagctgaggcaggaggatcgcttgagcctaggaattcaaggctgtagtgcaccatgatcacacctgtg

SEQ ID NO: 19557 - DNA, 201 bp, Homo sapiens
cctcatggacatgtactagcctgcccgttccctcccaagtgcagcctctcccataccattttgctgatatacactcacccatgatcacccctgactttgcyttgtttgcattcctcccccaccaatgtgcatgtgcacacgcaccctagcatgccactactgctggcatgagtgcacatcacgcccctcctccctgccaca

SEQ ID NO: 19558 - DNA, 201 bp, Homo sapiens
caattcatttgcccaggtaagagggtgtgagatgagaactctggtttcacattgattgcattactacaaattccaagagatcctgaccccctttgtctccrgacctcttacccaactactggttcatgtttccattaatccttacactgtacttgagtacaattgttaattgtactcaattgtactcaatttctctcaatt

SEQ ID NO: 19559 - DNA, 201 bp, Homo sapiens
tataatgatgccgttaaaatctttctttctttctttttttcccctgtagagaggaggattcatgttcttgcccgggatagtctcgaactcctggactcaaraaatcctcccacctgagcctcctaaagcattgggattacagtcattagccaccgtgcccaggtttttttttttttttttttttaaggctagttattgaaa

SEQ ID NO: 19560 - DNA, 201 bp, Homo sapiens
tttgactttgatttgcttttatttccattatccttggatactgaaaacttttcctcatttcaagttactgtcatctgtatttttttcttcttggatgtgtytgtttctttttcattcaaatcttttgctacctgaaggtgaaataaaaggttttggcaaatcaccaacctgggtggaggagaaaccgccctgggcattctg

SEQ ID NO: 19561 - DNA, 201 bp, Homo sapiens
aagtgattctactgcctcagcctcccaagtagctgggattacaggcatgtgccactgtgctggctaattttgtatttttagtagagacggagtttcatcaygttggtcaggttggtctcaaactcctgaccttaggtgatccatctgccttggcttcccaaagtgctgggattacaggcgtgagccctgtgtcctggcaga

SEQ ID NO: 19562 - DNA, 201 bp, Homo sapiens
gtttttttcattcatatgataaaagattaatacaatggaaataggatggaatgccattttgtcacattttttccgttttagggtatataagcaaacatccraattctctgaagataaaactttctgctgtgtacatatcaatgaattgttcagatacatggttatatagctagatttaggaggttggatgaataaagacag

SEQ ID NO: 19563 - DNA, 201 bp, Homo sapiens
taagaccctctcaaggttgactatctctctatcttctatctatctatctatctatctatctatctatctatctatctatccatccatccatccatccaccyacctacctacctacctctacctacctacctacctacctacctacctacctattttgagacagggtcttgctatggtgcccattctggtctcaaactcctg

SEQ ID NO: 19564 - DNA, 201 bp, Homo sapiens
  misc_feature (1)...(201): n = A,T,C or G, or insertion/deletion polymorphism (see Tables 1-2)
tagaaattctcactgctttggttaaatagaggagttgcattcttagaaatagaagcttcaaccatgaaccaaggagaacaggaaccacatgctatcttacngaagtgatttcggatttagattactacaaggtctttggagcactaaaaattagattcctgctctggaaattaaaattaagcaacagtctagtgaatgtag

SEQ ID NO: 19565 - DNA, 201 bp, Homo sapiens
aacagtgtaccctattcctttaaaagccggggtaaacgtctatctacccagccaaggcatattctacttatgtggatcttcaacccatatctgcctctcaracagtttgcaagaaataacgaaatctatccttactttacaatcccaaatagactctttggcagcagtgactctccaaaactaccgaggcctagacctcct

SEQ ID NO: 19566 - DNA, 201 bp, Homo sapiens
aaagaaaaaacagtgtaccctattcctttaaaagccggggtaaacgtctatctacccagccaaggcatattctacttatgtggatcttcaacccatatctrcctctcagacagtttgcaagaaataacgaaatctatccttactttacaatcccaaatagactctttggcagcagtgactctccaaaactaccgaggccta

SEQ ID NO: 19567 - DNA, 201 bp, Homo sapiens
catcccacggctcacgcggggctggacattcggacaaggaccagggtcgcagcccgaagcacgtggtctgtcacgtagagcacaaaaagcagtgccctgcrgagttcactgactcccgcggcgtacacaacgccgccgcctccatctccagccaagttggcttccctggccatcttacagcgcggacggccgcccataaac

SEQ ID NO: 19568 - DNA, 201 bp, Homo sapiens
actccatctcaaaaaaaaaaaaaaaaaaaaaatcaagtagcttgctcggggttccataacacctcttccttctgtttctctggctttccctcagtccacayataaggcttcatgagagaagacacgaatggatataaaccaatgggaataaaccaagacaagtcctggtttatgaattggtctgcacagtatactggctcc

SEQ ID NO: 19569 - DNA, 201 bp, Homo sapiens
tttgcacatatatacatatgcaccacctttgcagtggcaacatatatatccacactataaacataccacatttataaatcttgtaaggacaagaaatggarttgaataagtaccccccaacatatacaagaaagttagcatacttaccccgtttttcactacatcagaggcaaaataagaaatcttttaagaaaatctcaa

SEQ ID NO: 19570 - DNA, 201 bp, Homo sapiens
aaaatctcaagactggctcatggcaaaatgaatatgctaaatttgggggttggtttaagcgtggtatgtgtcaggtaattttgtgattaccaaaaagtttycacttgaaaactaagacctttgctgtttatttcacaatgtgaaatcaataaacctgaggatacaagtctctgtagtgatattctgtatttactcattttt

SEQ ID NO: 19571 - DNA, 201 bp, Homo sapiens
ctttctttctgctaaggttggtgtgcttagattctttaagctccaaatctcaagaaaatataggaaggaaaatcaaccattagagagagagagagagagaraaaaaaaaaaggaaaaaatataatgtgctccaaactgattataaatagcttttgaattgttggctccatagaattttttttttttttttttgagacggag

SEQ ID NO: 19572 - DNA, 201 bp, Homo sapiens
aaaattacagctagataggcagaataagttctaatgttctatagcaatggtctccaagatgtttagcaccaggcaccagtttcgtggaagacaatttttcyatggaccgttgctgggggctggtttcaggatgaaactgttccacctcagatcatcaggcattagttagattttcttaaggagcaggcaacctagatccct

SEQ ID NO: 19573 - DNA, 201 bp, Homo sapiens
tcactctccggtctaccttcttacccccagcatgcacagttaagtgctccacagagagaaagtaaaaaatacagagtttgtgttcagagggttttttttttctttttcttttttattattattatactttaagttttagggtacatgttcacaatgtgcaggttagttacatatgtatacatgtgccatgctggcgtgctg

SEQ ID NO: 19574 - DNA, 201 bp, Homo sapiens
acctccttaggctcaagtgatccacctcagcctctcgagtagctgggaccacaggcacataccaccatgcctggctaatttttgtattattattattattwttttttttttgtaaagacatttcaccatgttgcccaggctgatctcaaactcctgggctcaagccatttgcccttcttggcctcccaaagtgctgggatt

SEQ ID NO: 19575 - DNA, 201 bp, Homo sapiens
tgtttttctgactatggaatgaggaggacaccaatagttttgctggtggatacgagtaagatttttgtcaggaaagaaactgatttacatatctagttttgttttttttttttaacttcacagtgttgcactagaatggtgacagggaagaaaaagtatcaagaaactacagataatagtctctgtgactgaggatttgaa

SEQ ID NO: 19576 - DNA, 201 bp, Homo sapiens
tggtagagatggggtttcatcatgttggccaggctggtcttgaactcctgaactcaagtgatcctcctgcctcagtctcccaaagtgctgggattacaggygtaagccactgtgcccggccagttgtgagaattttgtatgtattctgactaccagtcctctgtcagatatatgtattatgatgatttctcccagcctgtg

SEQ ID NO: 19577 - DNA, 201 bp, Homo sapiens
accagagcagacctgcactttaaaatgacagctccctgttctgcctgtggaggacagacgtggcaggatggagaagggcaggcctgaaggccgctggcccrgtcagctgggcttgaactaggtggagggagcgagggcagttgtctgaactaaggcaggagcagtgggaagggcagtgaggtgaacatgaggttgaaatga

SEQ ID NO: 19578 - DNA, 201 bp, Homo sapiens
ccctgtgttgcatggttttagcaattatctttaggtctatgatccacatggagttaatttttgtgtgtggtgtgaggtagggattgaggtttttttttttyccaatatagatatgcagaatttaggctgggtgtggtagatgacatctgtaatcccagcactttgggaggccaagatggttaattgcttgacgtcaggagt

SEQ ID NO: 19579 - DNA, 201 bp, Homo sapiens
gttttagcaattatctttaggtctatgatccacatggagttaatttttgtgtgtggtgtgaggtagggattgaggttttttttttttccaatatagatatkcagaatttaggctgggtgtggtagatgacatctgtaatcccagcactttgggaggccaagatggttaattgcttgacgtcaggagttcgagactagcctg

SEQ ID NO: 19580 - DNA, 201 bp, Homo sapiens
cattaggagaacaaccagagcagacctgcactttaaaatgacagctccctgttctgcctgtggaggacagacgtggcaggatggagaagggcaggcctgarggccgctggcccagtcagctgggcttgaactaggtggagggagcgagggcagttgtctgaactaaggcaggagcagtgggaagggcagtgaggtgaacat

SEQ ID NO: 19581 - DNA, 201 bp, Homo sapiens
cttgagcccaggaggcagaagttgcagtgagccaagatggtgccactgcactccagtctgggtgacagagccaaaccctatctcattaaaaaaaaaaaaaragagagagagaagaaaagggaaaagaagatatgcagttgttcctgcaccatttgttgaaaagactggaatgttgattttaataatgcatgtaaattctcc

SEQ ID NO: 19582 - DNA, 201 bp, Homo sapiens
tatccctttctcttggtctgtgaggtttaggctgagaaacctactgatagtcttacatgtgacagtctttctttttctttttctttcttttctttctttcyttctttctttctttctttctttctttctttttctttcttttctctctctctcttctttctttctttctttttttttggagtctcactctgtcacccaggc

SEQ ID NO: 19583 - DNA, 201 bp, Homo sapiens
aagccaaatataacctgtccctccctatcttttccttagttgtgagggtcaaaggggcacattacagtctggattcagaaacccctttcaacagcacgtakatagttaaagagaaagattgttcttcaagggcctctaaggacaaaagtgaatccactaacactctaggaagcagtgtgactactggaagaaagacattca

SEQ ID NO: 19584 - DNA, 201 bp, Homo sapiens
ttatccctttctcttggtctgtgaggtttaggctgagaaacctactgatagtcttacatgtgacagtctttctttttctttttctttcttttctttctttycttctttctttctttctttctttctttctttttctttcttttctctctctctcttctttctttctttctttttttttggagtctcactctgtcacccagg

SEQ ID NO: 19585 - DNA, 201 bp, Homo sapiens
acaggcgtgaaccaccatacccagcctcaacatattttcaataggtgatgggtcattatgaaaaaaggacactgaagctaatgtaacactgaaatggtctmaagaaacaggaaactatagacatgttttagaatatccaatacatggcaagaccaaaatatgaaacctatccttttcatgtattgtttgggactgactcat

SEQ ID NO: 19586 - DNA, 201 bp, Homo sapiens
catggaaggacagtgatctgatgatggaacaccgcataaggtatttgttggtgcattttttccttaatactaggtgttttgagataatgccacttgctccrtctcttaatattctccgtgtggattggacatgttgcctgactgttaatgacagccattgggcctcatttcttgattgggtgaagctaaattatcaaaggt

SEQ ID NO: 19587 - DNA, 201 bp, Homo sapiens
cagaggaatatcagactctggaaacataacggtaagaagcaaaggagagggggcaggtgatttgtggaggatgctccagctgcctttccctgttctagagkaagggcagctctagatgcagcccttgccctacgtgaaagtgcgggaacactccctgagaggcaggagtgctggtttctcgaagctgtcatggtctctgtg

SEQ ID NO: 19588 - DNA, 201 bp, Homo sapiens
gcctcctgggttctggccatattcctgcctcagcctcctgattagctgggactacaggtgcccaccaccatgcctggctaatttttttttttttttttttwtttgtagtagagacagggtttcaccatgttagccaggatggtctcgatctcctgaccttgtgatctgcccgccttggcctcccaaagtgctgggattaca

SEQ ID NO: 19589 - DNA, 201 bp, Homo sapiens
agtgagaggcctgacagtgggaaaacaatgcctctcgggttggaaggcagaaagccaaaaatgcgaaagatacaaatgggtacgaagattggagtaagaaraaagctccttggaaacaggagagacatgattatctcaaagagaaagcgagaggcatgtttggaatctgaagctgaaaacactcaaaagacagatacacag

SEQ ID NO: 19590 - DNA, 201 bp, Homo sapiens
agggacatttgtctgtagtttccttttcttgtggtatctttgatattgcttgcctcataataattatgaggaggcattacctcttcttcttcttcttcttyttttttttgagacagagtcttgctctgtcagccaggctggggtgcagtggtgtgatctaggctcactgcaacctctgcctcccagattcaagcaattctc

SEQ ID NO: 19591 - DNA, 201 bp, Homo sapiens
taaatgtataaagaataactcttcctatatctctactatagtggatgtctctctggcctcctccttgtccatctggagtaatgaaccacaggaaagaaaaracacttcagccttaattcacttgctttctttccatatctctgcctatatttacaacaaggcttattttttattttattttatttttttttttgagacaaa

SEQ ID NO: 19592 - DNA, 201 bp, Homo sapiens
agctttgtgttgtggttaacagcacagattctggagccaggcttccttgtaccaaatctcagccctaccgctaactagctttttgacttcagtgaagtttyttaacttccttgtgattattttcctcatctttgaaaaaggaataatgtcctcaacaggtaacatgaaggttaaaaggagatggcgtgtgtgtgtgtgtgt

SEQ ID NO: 19593 - DNA, 201 bp, Homo sapiens
agtttcttaacttccttgtgattattttcctcatctttgaaaaaggaataatgtcctcaacaggtaacatgaaggttaaaaggagatggcgtgtgtgtgtrtgtgtgtgtgtgtgtgtgtatacttgtgtatctcatccctaaacaaagcctggctcatagtaggccctatataagtgcttgttactatgattgaaagttg

SEQ ID NO: 19594 - DNA, 201 bp, Homo sapiens
cagcttcctgacaaatgcaggaacctctctggacaggtgagtaaatgacaggttaaaaaggaacctatcggccaggcacggtggctcacgcctgtcatccyagcactttgggaggccgagatgggcggatcacgaggtcaggagtttgagaccagcctgaccaatatggggaaaccccgtctctattaaaaattcaaaaaa

SEQ ID NO: 19595 - DNA, 201 bp, Homo sapiens
  misc_feature (1)...(201): n = A,T,C or G, or insertion/deletion polymorphism (see Tables 1-2)
aatgctgcagctgctttgattttcaagaagccctttacttccccatggtgcttccaatcaaggatgattgtcaaaggattgcagtagaaattctcactgcnttggttaaatagaggagttgcattcttagaaatagaagcttcaaccatgaaccaaggagaacaggaaccacatgctatcttacagaagtgatttcggatt

SEQ ID NO: 19596 - DNA, 201 bp, Homo sapiens
  misc_feature (1)...(201): n = A,T,C or G, or insertion/deletion polymorphism (see Tables 1-2)
atcatatttggcctaattgacaataataagtcaacattcggggggtgagaactaataagggagttatgataatgctgcagctgctttgattttcaagaagncctttacttccccatggtgcttccaatcaaggatgattgtcaaaggattgcagtagaaattctcactgctttggttaaatagaggagttgcattcttaga

SEQ ID NO: 19597 - DNA, 201 bp, Homo sapiens
gctgttttgtttgttttcaagaaaaataaaaatccttacatcatatcaaataataaatacttttggtggcagggcaggggggatttaaaaattttaagccmaataaagatataaagctaacagaaaaaaaattttagaaaatactttcataacttccaagtgagaaggtatgtgtgtataaatatataccttaaatatgta

SEQ ID NO: 19598 - DNA, 201 bp, Homo sapiens
tgggcgacagagcgagactccgtctcaaaaaaaaaaaaaaaaaaaaaaaaaggagaacataaagcaagtaacaatgtttttcaagttttctttaatgcatyacatctttttttcacaagatattttaaaattttatttttccttattaagcgaattgaattatttcaagcatcagtgagagctgctagactgttatatttc

SEQ ID NO: 19599 - DNA, 201 bp, Homo sapiens
atgataacctttaacaaaattacttagtttttttcattcatatgataaaagattaatacaatggaaataggatggaatgccattttgtcacattttttccrttttagggtatataagcaaacatccgaattctctgaagataaaactttctgctgtgtacatatcaatgaattgttcagatacatggttatatagctagat

SEQ ID NO: 19600 - DNA, 201 bp, Homo sapiens
gccaccactcaagcaaagttcagtctggctctctcccatattaaactttgctcagttgctgaggtcagtgtcctggagagaacccaaggttctttgcagcmatgagcagagtcatgcttcagtttctccaaaagaaataaaagatgagtattataattatcttctggatttaatgacatttttatttggctttcccttttt

SEQ ID NO: 19601 - DNA, 201 bp, Homo sapiens
ttgataattaactaataattgactaatcacaagggctacttccttatattactgggtatccaaaaaacttgtcaacataataaacacattttgtcaagatytcttgcttatgggattttaggaatattcatatcccaagatcataataagccatttctacctgtaatccctggtgaaatataaataaaggagagaagaaca

SEQ ID NO: 19602 - DNA, 201 bp, Homo sapiens
  misc_feature (1)...(201): n = A,T,C or G, or insertion/deletion polymorphism (see Tables 1-2)
ttggtacaaatgatcttcttatctatgacccatatttgagggaacagtccattaatcctgttcttatgcaaatgtagttattactaaagcagggagttggntaatcatatttggcctaattgacaataataagtcaacattcggggggtgagaactaataagggagttatgataatgctgcagctgctttgattttcaaga

SEQ ID NO: 19603 - DNA, 201 bp, Homo sapiens
tcattgggtataacaacatatgtaatatataattactgtttcttaattcattcaacatctagaatataaattcagttaatttattttattctctaagaaartgatctctctctgatgaacattcttatttaattttatcctgagtgatagaaaatattttatcaacagtgatgcatcatcctatttgctttccaaagggga

SEQ ID NO: 19604 - DNA, 201 bp, Homo sapiens
ttttagaggactagtagttccaggtcttaagataagtttaaagaaagatctgaaacttcttgatgcaaatgaaactttctggaaaaagtatgtttgaataytctacaaaacactgacttaaaggaaaagaaaggcaccatcagcaatgaaattgcagaaaatgaaagaaaagaccgatgtaagatttgggcagaagaaact

SEQ ID NO: 19605 - DNA, 201 bp, Homo sapiens
ccttctataaaaacacaattctctttctatttccttaataaaagtgaagcgttgcttattttcagctaattctcctttatacaatttagtatgtatgctawccttctgtcttttcccgggactcttaaaataatttttaacctacttttcatagggcctatattcttaatatttaactatttttcagtactctagattcac

SEQ ID NO: 19606 - DNA, 201 bp, Homo sapiens
ggtgtgtaggggcaacccacccctacagggtacaggtgattaaagtggacaagggcagccactgagagagctggtatccaagcagcttggagatgaagtcstggccccagaaggcactggtgtggaagccacacatctcccttgaaagtgcatctggaggtctcagtatgtgaagtgctcttgaagggaagatttcccacc

SEQ ID NO: 19607 - DNA, 201 bp, Homo sapiens
cagaattgtgatgtatttatattataggcttaaaagcaattccaaggaaagacctagatctacaatttaacataggtaaatctccaagacaggatgctgaktgaaaaacaaacagtgatttatagaatgaaacttatacagtttattatatgtaaatcacacatccacaaacatatacatctacacacattatttctaaag

SEQ ID NO: 19608 - DNA, 201 bp, Homo sapiens
agtgttgggattataggcgtgagccactgagcccagtcaggttatttttttgatcgataatgcatattgcctttagttagaagtaggtcacagttggctayagttagttactataactgtcattccacaggatcctcctaactcaacttattctgtgtcctgttttttcaaaaaaatcacagaattttgcacaggctttga

SEQ ID NO: 19609 - DNA, 201 bp, Homo sapiens
ttaaaaacttttttactctttttttttttttttgagacacagttttgctttgtcacctagactggagtgcagtggcatgatctcagctcactgtgacctcygcctcctgggttcaagcgattctcacgcctcagcctcccgagtagctgggcctacaggcgcacgccaccatacccagctaattttttttttttactcttt

SEQ ID NO: 19610 - DNA, 201 bp, Homo sapiens
tggcgcaatctcagctcactgcaagctccacctcctgggttcacaccattctcctgcctcagcctcccgagtagctgggaccacaggcacccgccaccackcctggctaattttttgtatttttagtagagacggggttgcaccgtgttagccaggatggtctcgatctcctaacctcgtgatccgcccctgcctcggcat

SEQ ID NO: 19611 - DNA, 201 bp, Homo sapiens
tgtttaagtctttaatccattttttcttttttgagacggagtctcgctctgtcgcccaggctagagtgcagtggcgcaatctcagctcactgcaagctccrcctcctgggttcacaccattctcctgcctcagcctcccgagtagctgggaccacaggcacccgccaccactcctggctaattttttgtatttttagtaga

SEQ ID NO: 19612 - DNA, 201 bp, Homo sapiens
aactcattgcccaggccaatgtcaagaagatttcccctctgttttcctagagtagttttacagtttcaggccttatgtttaagtctttaatccattttttyttttttgagacggagtctcgctctgtcgcccaggctagagtgcagtggcgcaatctcagctcactgcaagctccacctcctgggttcacaccattctcct

SEQ ID NO: 19613 - DNA, 201 bp, Homo sapiens
acacctgtaatcccagcactttgggaagctgaggcaggaggatcctttgagcccaggagtttgagaccagctgtggcaacatagcgagactccgtctctayaaaaaattaaaaaattagccaggcgtggtggtgcatgcttgcagtctcagctacttgaaggctgaaatgggagatttcttgagcctaggagttcaaggct

SEQ ID NO: 19614 - DNA, 201 bp, Homo sapiens
atgtgttaaggaatttatccatttcttctagattttctagtttatttgcatagaggtgtttatagtattctctgatggtagtttgtatttctgtggggtcrgtggtgatatcccctttatcattttttattgtgtctatttgattcttctctcatttcttctttattagtcttgctagtggtctatcaattttgtttatct

SEQ ID NO: 19615 - DNA, 201 bp, Homo sapiens
caagaaaatttcctcatgctcctatccagtcatcttctcctagtcctagaggcaactattgctctgattttttttttttttttttttttttttttttttttgagatagagtctctatcactcaggctggagtgcgatggtgcaaacatggctcactgcagcttcgacctcccaggctcaaatgatcctcccagctagcctg

SEQ ID NO: 19616 - DNA, 201 bp, Homo sapiens
tgggaaggatgcctcctgttctgtataatcataagagaggaaggtaattaacagtcctagaacctcagcttcccaagtagctgggaccacaggcgcaagcyaccatgcccagctaatctttgtattttttgtagagacagggtctcacatttttgcccaggcttgtcttgaactcctaaactcaaataatctgcctgcctc

SEQ ID NO: 19617 - DNA, 201 bp, Homo sapiens
ttggaagtcctttctccctcacacctttcggaactccgtgactctccgctctcatgcctccgcctccattctacccttagggctcctcagccagatctttrgctagaaccatggtcaagggagaatgcgattccggctcctgtcacagacgcttaagtgtgagcgcaacccagcccgcctcctcctccacgcccctcacac

SEQ ID NO: 19618 - DNA, 201 bp, Homo sapiens
ctcttgggggctctgggtctttatgtagattggggaaaaatctcttccaaggcctgataatctctaagagtttttattttatttatttatttattatttawtttatttatttatttatttatttatttatttatttatttatttattttcagacagggtctcactctgtttgttgcccaggatggagtgtactggctccct

SEQ ID NO: 19619 - DNA, 201 bp, Homo sapiens
cttactctattccagtctttgcccactttcacacaaatgacaaggccaatatgttttgtttgttttttaatcattaagagtttttgtacaaaaagtgatggttttttttcttcattttaaaacaccagggtgtgggggagggatgcaaacaaataacaaaaaagatgcttttgtaacattattttccctgtttagaaagaa

SEQ ID NO: 19620 - DNA, 201 bp, Homo sapiens
atatatagtaggctgtatcatctaggtttgtgtaagcacactctataaggtttgcacgaggacaaaatcacctcacgcatttctccctgctgttaagcaaygtgtgacctgtatctgtcccaccaacagaagttatttgcatttcttcctgacaaaaatcttcaagttaacaagtaatttcacgaattctgggacccttaa

SEQ ID NO: 19621 - DNA, 201 bp, Homo sapiens
agacagcattagtcctacagtcaatctgagatcaaagaactctccgcactcctccccttagcaggaagtagccagaaagaacacaccgccccttgtccttytataactataggatctggattgacagagcaagagcatcaccatcttggacaaacactgccattttaagttgcccttgattaaaaaacgcctaatccagcc

SEQ ID NO: 19622 - DNA, 201 bp, Homo sapiens
ccagaaagaacacaccgccccttgtccttctataactataggatctggattgacagagcaagagcatcaccatcttggacaaacactgccattttaagttscccttgattaaaaaacgcctaatccagccccagaaacatcaccctaatggccaatgtcagcatgaccattaaatgacacctccaaccggaaatgttccaa

SEQ ID NO: 19623 - DNA, 201 bp, Homo sapiens
gccccttgtccttctataactataggatctggattgacagagcaagagcatcaccatcttggacaaacactgccattttaagttgcccttgattaaaaaaygcctaatccagccccagaaacatcaccctaatggccaatgtcagcatgaccattaaatgacacctccaaccggaaatgttccaaccccaagataaatccc

SEQ ID NO: 19624 - DNA, 201 bp, Homo sapiens
ataatattagcaaagctgtcaatagccatgggtaagcaatccatgagttattatatattttggataaaaatttcataatttcaatatgcaaatcaatcaamaaatcatcattgaaagcattaagaacctctctgcatgcggtcttgggttttgcatggatgatactacagatctctttgttccaggaaactaggaaaaata

SEQ ID NO: 19625 - DNA, 201 bp, Homo sapiens
ggcggagcttgcagtgatccgagattgcaccactgccctccagcctgggcgacagagcgagactccgtctcaaaaaaaaaaaaaaaaaaaaaaaaaggagmacataaagcaagtaacaatgtttttcaagttttctttaatgcattacatctttttttcacaagatattttaaaattttatttttccttattaagcgaatt

SEQ ID NO: 19626 - DNA, 201 bp, Homo sapiens
aaatgcatgcagccacgtggtcatcacagtgaagacatggaccatttccagcatccttcagagttcccgtgtgccctttagggctcctccccagcagcctscctcctggccttcagtatccacagacctgctttctcgcattgtcattttgccttttctagaatttcaggtaaaagaatcctacagtaggtatcttttgtg

SEQ ID NO: 19627 - DNA, 201 bp, Homo sapiens
gcagctcagtgagttctgataaatgcatgcagccacgtggtcatcacagtgaagacatggaccatttccagcatccttcagagttcccgtgtgccctttarggctcctccccagcagcctccctcctggccttcagtatccacagacctgctttctcgcattgtcattttgccttttctagaatttcaggtaaaagaatcc

SEQ ID NO: 19628 - DNA, 201 bp, Homo sapiens
ccctctcacccaggacaaaaaaagaaaaaatatatataatgatgccgttaaaatctttctttctttctttttttcccctgtagagaggaggattcatgttyttgcccgggatagtctcgaactcctggactcaagaaatcctcccacctgagcctcctaaagcattgggattacagtcattagccaccgtgcccaggtttt

SEQ ID NO: 19629 - DNA, 201 bp, Homo sapiens
tgtggctaacccagggccatttattgaaagaccaccctctccccacttaactgtgctgtctcccgtgtcatctatcaggtgttaccgcatttttcacttcygtgcactcttgtttgcgccattggtcctagaatatatttttgtgccagcacttcagcatcttagttattgtagctttaaaagaagtgttgctgtctggca

SEQ ID NO: 19630 - DNA, 201 bp, Homo sapiens
ctctgaccatagtaatttaccattatcaacacaaaaagtctgaggagtcctttaaaaatatctaggaaggattgatatttaattattacagatagtagttyacttctctcttgaatatatccagagaaattctttacattattccaaggtaatagattacagggtttctcaaatatttccttctataaaaacacaattctc

SEQ ID NO: 19631 - DNA, 201 bp, Homo sapiens
aatcatcttttagactattcttaacttttttaaaaacacacataagttaaaagggctttctgtgctttacccacctaataatattattattaggaacaacyggatttggaacaacatccaaagtgaatgctataatcctgctactcttcaatcatccaacatattaacttctccatagctttcttttatttttcattttgc

SEQ ID NO: 19632 - DNA, 201 bp, Homo sapiens
cagaaagatctctaaaatatctcccatttagaaactaaataacacacttctgaataactcatggttcaaagaagaaatcaaaaaagaaagtagaaaatatyttgaactgattcaaaatgaaagtttcacatgtaaatattaaacgatgcaactaaagcattattaacaggaaaatgtgtaacaataaacacttgtattagt

SEQ ID NO: 19633 - DNA, 201 bp, Homo sapiens
gaagcagccgagacttgaagatcgacattggatcctggtaaacttttttctttagaaaaatttaagttgacctgaaaatgaaaataaaagggcaaaaggayggcaagccatatgagaagaatcatcttttagactattcttaacttttttaaaaacacacataagttaaaagggctttctgtgctttacccacctaataat

SEQ ID NO: 19634 - DNA, 201 bp, Homo sapiens
cagagaacactccacttaatagcagcagaatacacattctaacatttatcaagatagaccatattttctgagctataaaatgtctccataaatttaaaagrattaaagtcatacaatcataatgtcattaaattagaaatcagtaacagaaagatctctaaaatatctcccatttagaaactaaataacacacttctgaat

SEQ ID NO: 19635 - DNA, 201 bp, Homo sapiens
acctcaatgacgttcagagaacactccacttaatagcagcagaatacacattctaacatttatcaagatagaccatattttctgagctataaaatgtctcyataaatttaaaagaattaaagtcatacaatcataatgtcattaaattagaaatcagtaacagaaagatctctaaaatatctcccatttagaaactaaata

SEQ ID NO: 19636 - DNA, 201 bp, Homo sapiens
caaatgtgcacacatgggttcttcccactctaaccctgaggaattagaggcctgcttctgacacagactgggcagtggctagtgactctaggtatagagtrtccaggccctgctcacccaggctagagcttagggagccagaaggaaggaggtgcatgttggggtgcaggacaggagggaaaaatactcgaattgcaaggt

SEQ ID NO: 19637 - DNA, 201 bp, Homo sapiens
tgtactaccacattttgtttatctattcatcagttgatggacattgggttgtttctaccttttggctgttgtgaatagtgatgctgtgaacatttttggaygagttttgatgtgggcatatgtcttcagttctcttgggtatacagctagaagtggaattgcaggttcaatctacgtttaacattttgaggaaccaccaaa

SEQ ID NO: 19638 - DNA, 201 bp, Homo sapiens
ttcctgtggtgagaagctgtgcccagggtggggcaggctagaggtcaggttctggcccccgttttctgtgggtaatacctcataccgtgaccaggcacagrggcggaggagaccccgggatgggagcctcacccttcgtgcgctcgcccaggctctcctgctttgctccctgctgcctgctgcccagtgtgactggcgatg

SEQ ID NO: 19639 - DNA, 201 bp, Homo sapiens
aagttgcttttgggccaaagataggtgattaggttagaacgtcttacctgatggtcagtgagatctgaaagctggtgtgggctttgtgtccatcgcaagtytggggcacagtctgcacttttaaagcaaatggggagtcctctttctctggaagaatattgtatttcatggatgtctgtgaaacagcaaagacactatcag

SEQ ID NO: 19640 - DNA, 201 bp, Homo sapiens
tctgcttccgttccctttctagaagattgaaaaaaaggtcaaaaccacatgcctgtggagaaagtgcgacatgtttagaaatactggtagggaaccaggartaagaaaagctttaccagcttttactacaaatggatgaaagacatcaggatcccaccaccgcaaggtaaagtgacttcccttttctggaacccctgtggc

SEQ ID NO: 19641 - DNA, 201 bp, Homo sapiens
attgaaaagtccaaagatgaaatagtttcattttcttttcctaaggcttataaaaggccccctgcctgttgattccatccctcttttgtgtccagtggagycatgttactcttcagtggcccaggggttcactattaaagaaagatcagtccaggtttctgggcacatggcctaaacaggaagatggaagcatcagaggat

SEQ ID NO: 19642 - DNA, 201 bp, Homo sapiens
attattttccctgtttagaaagaaaaaaaatcactccaatagtattgaaaagtccaaagatgaaatagtttcattttcttttcctaaggcttataaaaggscccctgcctgttgattccatccctcttttgtgtccagtggagccatgttactcttcagtggcccaggggttcactattaaagaaagatcagtccaggttt

SEQ ID NO: 19643 - DNA, 201 bp, Homo sapiens
agagtttggttcccactttcattgtatttcattgaaagtgcttaattaaaatggcttgagaactttgggtagccatgtgtaagaaatggatggtattcacmggggaaacaaggtatttgaatttctactttattgaaccagatttaccattattttaaaaggaatgcttatacaaatcaatttgaaattctacccatcttg

SEQ ID NO: 19644 - DNA, 201 bp, Homo sapiens
gtcttactctattccagtctttgcccactttcacacaaatgacaaggccaatatgttttgtttgttttttaatcattaagagtttttgtacaaaaagtgatggttttttttcttcattttaaaacaccagggtgtgggggagggatgcaaacaaataacaaaaaagatgcttttgtaacattattttccctgtttagaaag

SEQ ID NO: 19645 - DNA, 201 bp, Homo sapiens
taattggtaagaggcactgctaggagaagtttgagagttttgtataaggaatcaagtgattctgcttcttagtgtgactctgccactaccttgctgaatgwctctggggaatttgtttaacccttttggccctaatgttcacatgtgtaaaacaaatgataacaatagtaacttctagttttacatgttgaagattttatg

SEQ ID NO: 19646 - DNA, 201 bp, Homo sapiens
tctgggactgtttgtttgtaggctatcagttttgcttcttcaggttaaaaggaactgtaagaggtatctgtaatcacagagggcaacagtggaaaggaacrtcataggtaaggttcatgccctctgtctactgcttaagagatggaggcacagagaagcagcagaatgcctagtgaaaacagtaagttctgataggggagg

SEQ ID NO: 19647 - DNA, 201 bp, Homo sapiens
tgtcttactctattccagtctttgcccactttcacacaaatgacaaggccaatatgttttgtttgttttttaatcattaagagtttttgtacaaaaagtgatggttttttttcttcattttaaaacaccagggtgtgggggagggatgcaaacaaataacaaaaaagatgcttttgtaacattattttccctgtttagaaa

SEQ ID NO: 19648 - DNA, 201 bp, Homo sapiens
gtctacagaactcttctttccctggttagactttgcctgtcttggtctcaataactatcatggcagaattgcagaattgcacaagggactacagaacccayggtgttgtggagaagaatgccacttccaatctctccatcattccccacctcaagtgcttgactccggtctcaagatggaggctataatccagacctcttc

SEQ ID NO: 19649 - DNA, 201 bp, Homo sapiens
gggcacatgtggctgttgtcattctttctgcatcccactgttcccctccaatttatgttattttctaccctgtttttcagttccatctctgctctgtcctrtagctttataaaaccagagtgtgtggggctgaggtcaggagtataagtacctgccttaggcactattccttatataacaaaaatattaaatatttttttc

SEQ ID NO: 19650 - DNA, 201 bp, Homo sapiens
tttttaaataccagttgctttctaatttcattttgcttttaaagcttgccatctgacttcatattactgaatttaggacaggtactttggaattaatcattgctagacctcagtttcatttagcttcccttctcctatcatctggcattacctacatgttctcaccatttcttctaggctgccaagagattgcagaggaat

SEQ ID NO: 19651 - DNA, 201 bp, Homo sapiens
tcttggagtcctgggctcaagatatccttctgccttggcttcccaaagtgctgggattataggtgtgagccactgcactcagcctatatgcaattttgacagagtttttttcggaaatgaaaatcaccctacccttcttgctatttgtctgaattctgggcccttaaacaaaaatatcacaaagaatctttttgccagtat

SEQ ID NO: 19652 - DNA, 201 bp, Homo sapiens
agctcactgcagcctccaactcctgggttcaaatgatcctcccacctcagcctactgattagctaagactacagatacatacaactatgctttgctaatttatatatatatatatatatatatatatatatttttttttttttttttttttttttggtaaggactggatcttcctatgttgtccaggctggactaaaactg

SEQ ID NO: 19653 - DNA, 201 bp, Homo sapiens
ggagtggacagcccatctgctggtgagcatttatttagagactcatttgggggaaggagactcgtggagatgtgtttgaggactcggtgtaaaatagtagttacctatttatttaaagtagaaatgaggcctggcacagtggctcatgcctgtaatcccagcactttgggaggccaaggcaggcatatcacctgaggtcag

SEQ ID NO: 19654 - DNA, 201 bp, Homo sapiens
gggagtggacagcccatctgctggtgagcatttatttagagactcatttgggggaaggagactcgtggagatgtgtttgaggactcggtgtaaaatagtagttacctatttatttaaagtagaaatgaggcctggcacagtggctcatgcctgtaatcccagcactttgggaggccaaggcaggcatatcacctgaggtca

SEQ ID NO: 19655 - DNA, 201 bp, Homo sapiens
tgggagtggacagcccatctgctggtgagcatttatttagagactcatttgggggaaggagactcgtggagatgtgtttgaggactcggtgtaaaatagtagttacctatttatttaaagtagaaatgaggcctggcacagtggctcatgcctgtaatcccagcactttgggaggccaaggcaggcatatcacctgaggtc

SEQ ID NO: 19656 - DNA, 201 bp, Homo sapiens
ttattattttaacctgtactgtactagttttctttctttctttctttctttctttctttctttctttctttctttctttctttctttctttttttttttttttgagacagagtctctgttgctcaggctggagtgctgtggtgtgatctcggctcactgcaacttctgccttctgggttcaagcgattcttgtacctcagc

SEQ ID NO: 19657 - DNA, 201 bp, Homo sapiens
tatatagtaggctgtatcatctaggtttgtgtaagcacactctataaggtttgcacgaggacaaaatcacctcacgcatttctccctgctgttaagcaatrtgtgacctgtatctgtcccaccaacagaagttatttgcatttcttcctgacaaaaatcttcaagttaacaagtaatttcacgaattctgggacccttaat

SEQ ID NO: 19658 - DNA, 201 bp, Homo sapiens
gcctgcttgtctgtctgtctttctttcttttccttctttctttctttcttttctttctttttctttctttctcttttcttcctttcttcctttctctttcytttctttctttctttctttcctctttcttctttccttcttttccctccctccctccctcccttccttcgttccttccttccttccttccttctctctttc

SEQ ID NO: 19659 - DNA, 201 bp, Homo sapiens
attttcttttcttcaattgttgacagtctaatgctgccagatctttatctgtcagggacttttgatgttgttggagccatctcttgtggactttatgaaaycttgcatgcagcacaatttgaaacttcattgtgcattcaatttgcattgcctttgctgtgttcacagtggcactccatgaggcttaactatggagatcct

SEQ ID NO: 19660 - DNA, 201 bp, Homo sapiens
aacgagagttgaactcctacagcttaccttccattacagttaattctaggtggctcaaagatgtaaacattttgcaaagttgtaaatccataatgaaaacmaggaaaagatgtacatcctcttcccaagcatgctaaagtcttaagcaggcattacataaaataggaattacaaatagcaaacagttaaagctgttatccc

SEQ ID NO: 19661 - DNA, 201 bp, Homo sapiens
atcattaagattattctctcatgaagcacccaaaatatagacagcttttcttattttcttttcttcaattgttgacagtctaatgctgccagatctttatytgtcagggacttttgatgttgttggagccatctcttgtggactttatgaaaccttgcatgcagcacaatttgaaacttcattgtgcattcaatttgcatt

SEQ ID NO: 19662 - DNA, 201 bp, Homo sapiens
acagagcaagagcatcaccatcttggacaaacactgccattttaagttgcccttgattaaaaaacgcctaatccagccccagaaacatcaccctaatggcyaatgtcagcatgaccattaaatgacacctccaaccggaaatgttccaaccccaagataaatccccctccgaccagaaacatgccaaccccacaataaaac

SEQ ID NO: 19663 - DNA, 201 bp, Homo sapiens
caatcagccattgtcaatcatagactgtgctaaaattttccacttgtataaacttgccaggaacctttataagcccctgcccagcttgtctgtatggaatrtgatttagctgcttgctcgatttgtgtctctcaaattgcaatttataaaagatctcaattaaaataccttctctcatatgcttgtctgcagtgttggttt

SEQ ID NO: 19664 - DNA, 201 bp, Homo sapiens
ttaagttgcccttgattaaaaaacgcctaatccagccccagaaacatcaccctaatggccaatgtcagcatgaccattaaatgacacctccaaccggaaaygttccaaccccaagataaatccccctccgaccagaaacatgccaaccccacaataaaactctcctccacccagaaatattccaaatctgcgataagctct

SEQ ID NO: 19665 - DNA, 201 bp, Homo sapiens
taagttgcccttgattaaaaaacgcctaatccagccccagaaacatcaccctaatggccaatgtcagcatgaccattaaatgacacctccaaccggaaatrttccaaccccaagataaatccccctccgaccagaaacatgccaaccccacaataaaactctcctccacccagaaatattccaaatctgcgataagctctc

SEQ ID NO: 19666 - DNA, 201 bp, Homo sapiens
ctgcaggtgtgcaccgtcgtgcccagctaatatgcatatattttatttcatgacagtgtttctttaaaatcccaatatttattttacaagtagatatcatkccttcttgaagctttggtatttgtccacttaggtttctcctttaaatatttgtatcaaataatttaactcaactgccttattgataactgtaactccttt

SEQ ID NO: 19667 - DNA, 201 bp, Homo sapiens
taaggtcacagctcttcacagttcacttatctttttcctagttattctccctcctaatcattgccaaagtcttgggagataggtgtgaatccttctaggaygcagctgaaaaagttaaatgtcttgtcctagagcacacagctcagcagcaccaagaatgaaatgttaaatctggtgtttttccctctctgctgtagtgaa

SEQ ID NO: 19668 - DNA, 201 bp, Homo sapiens
atgatttgggggagagcaccaaatacccttaaagtttttacggcacagactttttagtaaatcttatgaggggatgattatgggaataatatgcatatatmtatatatatatatatatatatatatatatatatatattccaaaaatattggcaaaaataatgaagaacctgaaagtcctccatggtcagagttaaggtca

SEQ ID NO: 19669 - DNA, 201 bp, Homo sapiens
aaccccgtctctattaaaaattcaaaaaattggctgggcatggtggtgtgcacctgaaatcccagctacttggaggctgagacaggagaatcacttgaacycgggaggcggaggttgcaatgagccgagatggtgccactgcactccagcgtgggtgacagagcaacactcagtccccctcccccaccgaaaaaaaaaaaa

SEQ ID NO: 19670 - DNA, 201 bp, Homo sapiens
ctttgaataaactttccatctcattttctctctcaacctcctctttaaagtcaatacctctttttttttctctttgttaaatttatctgataagattctgmattctttctctgtgttatctaaaattttgttgagtttcctcaaaacagctattttgaattctcgatctgaaagatcactatctttgtttctgggagattg

SEQ ID NO: 19671 - DNA, 201 bp, Homo sapiens
gacaaggccaatatgttttgtttgttttttaatcattaagagtttttgtacaaaaagtgatggttttttttcttcattttaaaacaccagggtgtgggggrgggatgcaaacaaataacaaaaaagatgcttttgtaacattattttccctgtttagaaagaaaaaaaatcactccaatagtattgaaaagtccaaagatg

SEQ ID NO: 19672 - DNA, 201 bp, Homo sapiens
agcatttcatgtaaatggaatgttactgaatgtactcttgcttttgtctggcttcttttacttagcataatgttttgcaattcagccatgttgttggataygtcagtagtttactcctttttattgccgattagtattccattgtatggatatgccacaacttggttttttattcaccaattgatggatatttgaaatgtt

SEQ ID NO: 19673 - DNA, 201 bp, Homo sapiens
cagttgtcttactctattccagtctttgcccactttcacacaaatgacaaggccaatatgttttgtttgttttttaatcattaagagtttttgtacaaaargtgatggttttttttcttcattttaaaacaccagggtgtgggggagggatgcaaacaaataacaaaaaagatgcttttgtaacattattttccctgttta

SEQ ID NO: 19674 - DNA, 201 bp, Homo sapiens
aagacatacccacgactgggtaatttatttaatggacttgcagttccaggtggctgcggaggcctcacagtcatggcagaaggtgaaggaagaccaaaggyacatcttacatggcagcaggcaagagggtgtgtgcaggagaactcccctttataaaaccatcagatctcatgagacttactcactatcatgagaatggca

SEQ ID NO: 19675 - DNA, 201 bp, Homo sapiens
gtgcatgcctgcatgtgcctgtgtgtgtgcatgcttgcctggtgctcaagggtcaggggaagctggctgagaagactgaggagatggagggaggtggaggraagtgtaatagaaggaggtggaggaaggtggctgccatagagctttggctctggctggcctgagtctcttcctgaagttgcagctgcactttggggccag

SEQ ID NO: 19676 - DNA, 201 bp, Homo sapiens
agcaattctcctgcctcagcctcccgagtagctgggactacaggtgtgcgtcatcacacctggctaatttttgtatttttagtagagacagggtttcgccrtgttggccaagctcatctcaaactcttgacctcagatgatctgcctgccttggcctcccaaagttctggaattgcaggcatgagccactgcgcccagcac

SEQ ID NO: 19677 - DNA, 201 bp, Homo sapiens
gcattttactaaaaaaaaaaaaatagaaagggcgctcttcacctatgaacaccctgcacaaaatatcaagaactagaaaaaatcaactccatacaaagctkctgtaagagaaaataggaaatgcaaaccaaaacacttcagctaatgaaacttctccactaaagtcactaagtaaataaataagtaaacaaagaaaagcca

SEQ ID NO: 19678 - DNA, 201 bp, Homo sapiens
cctgcccaatgggagaggtagggtttttctagcttgtgtgacagaagtagcaaaatctggtcctcccccctcccagtgtagctgtggctcagagttttttytttttgttgtcacttactcccttgtgattgaattttttctcctgcatccatggcaggatccccagccagtatagagacttggttggcatcttctgctgca

SEQ ID NO: 19679 - DNA, 201 bp, Homo sapiens
tttattattttaacctgtactgtactagttttctttctttctttctttctttctttctttctttctttctttctttctttctttctttctttttttttttttttgagacagagtctctgttgctcaggctggagtgctgtggtgtgatctcggctcactgcaacttctgccttctgggttcaagcgattcttgtacctcag

SEQ ID NO: 19680 - DNA, 201 bp, Homo sapiens
gaaagggcttggactgaatgggcctggaagtggaagcttccaaaaaacatggctaaggggaaataatcagatcacaagaagaggtatgcagatccttggakacagggaatttaaaaaaggaaaggatgtcataggataaaataactccctccaccctcatttccatcaccaacattttaaaaataatgcattttactaaaa

SEQ ID NO: 19681 - DNA, 201 bp, Homo sapiens
ttttattattttaacctgtactgtactagttttctttctttctttctttctttctttctttctttctttctttctttctttctttctttctttttttttttttttgagacagagtctctgttgctcaggctggagtgctgtggtgtgatctcggctcactgcaacttctgccttctgggttcaagcgattcttgtacctca

SEQ ID NO: 19682 - DNA, 201 bp, Homo sapiens
acttgactatcattaactttgaaattaatgcagcaaaacagaaactaccttctggctaatttgcctaacacagtttcatgatccccaaatgttgctctacrgaaatagtcaagaaaattcttagttgagaacatgatatgacattctcctgttttcctgccatgtcactatccacactccttaatctcctcggttgcctcc

SEQ ID NO: 19683 - DNA, 201 bp, Homo sapiens
ccaccaatttcactcccatcataacccatgaatccattaacccatgaatccattaatccatgaatggatttatccattcatgagagcagacctttatgatscaatcacctcttaaaaagttccacctttcaatactgccacattggagattaagtatcaacatgaattttggaggggatattcaaaccatagcagtggtat

SEQ ID NO: 19684 - DNA, 201 bp, Homo sapiens
tgatcttcaaattatttcttagtagagaaacaaacaccaaatgccaagagagcttctactgctattgcagagggaaggcttaagagactgcagagaaaaasagagcagaatggcatggagaaatgagaagaaacacacaccaagtcaactccaggtaagagaaagtctagcattgttaaaaatacaaatcatagttttcgg

SEQ ID NO: 19685 - DNA, 201 bp, Homo sapiens
atccacctgcctcggccttccaaagtgctaggattataggcgtgagccacagcatccagcctctcacctcaaatactgaaagagctccctaactggtctcytgcctctacccctgccctgatatagtctacccaacatggcagccacaacagtcattttagaaggcacatcagatcttgtcattactctgctcaaaacctt

SEQ ID NO: 19686 - DNA, 201 bp, Homo sapiens
acttagcctgaccttattattaattgctaatcttacataaagctatcgaggtcatgattctcatattttctgatttaagagagaaataaatgctaaatgayggaataggatccaaaatattcatcagataggaagaggcgaaatatttcacatgtattttaaacataaagtttaaatggatatgaaatattgtgctggaat

SEQ ID NO: 19687 - DNA, 201 bp, Homo sapiens
gattttaaatcttcttacataatcttctgaagaaaacataaaatcaacaaagagaacaagtaaggatactcatgactaatatctttaacattactacaatwcagagaataccatgatcttcaaattatttcttagtagagaaacaaacaccaaatgccaagagagcttctactgctattgcagagggaaggcttaagagac

SEQ ID NO: 19688 - DNA, 201 bp, Homo sapiens
tttttattattttaacctgtactgtactagttttctttctttctttctttctttctttctttctttctttctttctttctttctttctttctttttttttttttttgagacagagtctctgttgctcaggctggagtgctgtggtgtgatctcggctcactgcaacttctgccttctgggttcaagcgattcttgtacctc

SEQ ID NO: 19689 - DNA, 201 bp, Homo sapiens
cataggttatatacaaatgctacaacattttattataagagacttcagcatccgaggattttggtgtgggggacactctagaatccatcccccatggttayggagagatgattgtattttcattatctctttacactagaacgtatgctccatgatggcagggatttctgactgctttcttcacagctgtccccagtgcct

SEQ ID NO: 19690 - DNA, 201 bp, Homo sapiens
taaatgctaaatgatggaataggatccaaaatattcatcagataggaagaggcgaaatatttcacatgtattttaaacataaagtttaaatggatatgaawtattgtgctggaattccaagcactgtaagatggaggaaaaatgactttatagcactacctgtaaacaaagctcaatggaaatagcagtgtgatgtggctg

SEQ ID NO: 19691 - DNA, 201 bp, Homo sapiens
tgaattcaggtttttattattttaacctgtactgtactagttttctttctttctttctttctttctttctttctttctttctttctttctttctttctttctttttttttttttttgagacagagtctctgttgctcaggctggagtgctgtggtgtgatctcggctcactgcaacttctgccttctgggttcaagcgatt

SEQ ID NO: 19692 - DNA, 201 bp, Homo sapiens
  misc_feature (1)...(201): n = A,T,C or G, or insertion/deletion polymorphism (see Tables 1-2)
agagacttcagcatccgaggattttggtgtgggggacactctagaatccatcccccatggttacggagagatgattgtattttcattatctctttacactngaacgtatgctccatgatggcagggatttctgactgctttcttcacagctgtccccagtgcctaaaaaaccgactacagatagatgctttcaaaactgtt

SEQ ID NO: 19693 - DNA, 201 bp, Homo sapiens
tgcctgaattcaggtttttattattttaacctgtactgtactagttttctttctttctttctttctttctttctttctttctttctttctttctttctttctttctttttttttttttttgagacagagtctctgttgctcaggctggagtgctgtggtgtgatctcggctcactgcaacttctgccttctgggttcaagc

SEQ ID NO: 19694 - DNA, 201 bp, Homo sapiens
agtagagatggggtttcaccatgttgcccaaggctggtgtccaactcctgacctcaagtgatctaccctcctcggcctcccaaagtgctgggattacaggygtgagccaccacgcccaaccttgagttaaatttctaaaaatctcaacataatgtgtttggctcctcttcttattatgcttagagttaggcactagcacat

SEQ ID NO: 19695 - DNA, 201 bp, Homo sapiens
aatgttttgtgtttctacctccgaagaatatgaaaaaaagaaaatgttttgctctgaagctgagttaagaagaagatagccaagacgtgggttgatggggrctgtattttaaggctgaacagttttgtttactattgtttattatttaatatattcttcccagtctccccacccccaccaaaggaaaagcgaaaaatttac

SEQ ID NO: 19696 - DNA, 201 bp, Homo sapiens
atcccagcactttgggaggccgaggcgggcggatcacctgagatcaggagtttgagaccaacctgggcagcgtagtcaaactctgtctctactaaacatasaaaaaaaattagccgggtgtggtggtgcatgcccatagccccagttaacttgggaggctgaggaaggagaatcacttgaacctgggaggtggaggttgca

SEQ ID NO: 19697 - DNA, 201 bp, Homo sapiens
attgttcattttgaacaaccgaaaagggtgaggcaatttcaataaagaaaggttgggagacttctagagtggttgtagaggaaatgccaaatccaacgtcrccattcacacaaaagccacttgcctcccattgggttatcgtatcaggaatgaggaacgaaagattggcagagcctgaggaactggaagaagaggttatcg

SEQ ID NO: 19698 - DNA, 201 bp, Homo sapiens
gaagaggcccgaaagccgcgtcacgtgcggggccgaaacttcgcggccggggccgggtggctggcgggtgggaggcaggcacggcggtcggggggcagccygcgcgcccggtgactcaccggccgcctccgagtgcggctgcaagcgaaggggccggcgcgccaggcggggtccgtgcccttggggccacccccgcgcctg

SEQ ID NO: 19699 - DNA, 201 bp, Homo sapiens
gccttagcattaaaaagactaaatttaaatccttgttccgccacttcctaactgtgtgaccttgggcaagttaatacacatgctgagcttggattaatcartggaggcttgtaggacacctactgtgatggcaaattctgtgtttgtttctagcaggagagattttaaaaagaagttaaagaaaaaaatatgtgagactat

SEQ ID NO: 19700 - DNA, 201 bp, Homo sapiens
gtttcaccatgttggccaggctggtctggaactcctgacctcaggtgatccacccgcctcggcctcccaaagtgctaggattacaggcgtgaaccaccgcrcccggccaaaagccatttttttaaaccatggtaaccctgatgttttgagagaagctgggacctacttcccatactttacttaacctggaagtgatgttct

SEQ ID NO: 19701 - DNA, 201 bp, Homo sapiens
cagaatccccagtgaatacccttctggggatgggagacggggccagctaggggccggccgcagaccccggtcccagagctagtttcagaggccagcgttcyccctagcgcctcgctgtgccccactctgggaaccggaaacaggaagcgccaagaggccgctgggcaaccgctcctcccaccagaccccgcggcatgtgac

SEQ ID NO: 19702 - DNA, 201 bp, Homo sapiens
cggccggggccgggtggctggcgggtgggaggcaggcacggcggtcggggggcagcccgcgcgcccggtgactcaccggccgcctccgagtgcggctgcargcgaaggggccggcgcgccaggcggggtccgtgcccttggggccacccccgcgcctgttattaataacccagcgcctggaggcgaaagccccggtgggcg

SEQ ID NO: 19703 - DNA, 201 bp, Homo sapiens
agacatcgtaaacaataaataagtactagatgctgtcatcatcaccatcaccatcaccaccatcatcaccatcaccatcacacttcaatgtagttgcttaytaaatatgcttatcttccttgataaaacagagaccacattttctctgttcacctttttccccctgctgcctaacacagtttctgacacaaaataggagtt

SEQ ID NO: 19704 - DNA, 201 bp, Homo sapiens
ggttggacattttgttagggaagtaaaagcatatacatataaaattatatttgttctggaatataaaatatgttatttgtattgctcactatagatctagkgattgtaagaacttatgtagcattttatcaagcctccatatctctttggagacttcaaagactttagaaaggtatagataatatcaaatgttggtcaaga

SEQ ID NO: 19705 - DNA, 201 bp, Homo sapiens
cacctctttcttcagggactgaggtctgatttcagctgagcatctgggctagggtccttaacgggggaccccccccacagtatttcaatgtaagttctttmtattttcataagtgtcagctggctgagaaataaagagagagagaaagagtaaaaagagaggaattttacagctgggctgctgggggtgacatcacgtatc

SEQ ID NO: 19706 - DNA, 201 bp, Homo sapiens
agttgaccttgtgtgaggttactggatggaaacagcatgagtttaatcttgtacatgacttcttttgttgagctggagatactattgtcttgcagattatytctttggcacgcatgaccatttttttttgtcttttaaatcacaaactggctttctttctgctaaggttggtgtgcttagattctttaagctccaaatctc

SEQ ID NO: 19707 - DNA, 201 bp, Homo sapiens
agcagctcctcctgctcccagaggccacctctttcttcagggactgaggtctgatttcagctgagcatctgggctagggtccttaacgggggaccccccccacagtatttcaatgtaagttctttctattttcataagtgtcagctggctgagaaataaagagagagagaaagagtaaaaagagaggaattttacagctgg

SEQ ID NO: 19708 - DNA, 201 bp, Homo sapiens
gagatatcttgaagttgaccttgtgtgaggttactggatggaaacagcatgagtttaatcttgtacatgacttcttttgttgagctggagatactattgtyttgcagattatctctttggcacgcatgaccatttttttttgtcttttaaatcacaaactggctttctttctgctaaggttggtgtgcttagattctttaa

SEQ ID NO: 19709 - DNA, 201 bp, Homo sapiens
taaatgacacctccaaccggaaatgttccaaccccaagataaatccccctccgaccagaaacatgccaaccccacaataaaactctcctccacccagaaayattccaaatctgcgataagctctccctccctaaacccttaaatattcttagtctataagagagaaggccccgacctaaaccagccagaatcccctctcag

SEQ ID NO: 19710 - DNA, 201 bp, Homo sapiens
tggtttttgaagacattttcaccaaagcaagctgccattgatttcagtgggttaagccagttctgctacttacttgttactatggctgtagaacttttcckaataacataaagactttttaatattcagctctctatcttaaggatattaaccatttgtcatcttgtttaaatttttgttctctatttgtcttttaatttg

SEQ ID NO: 19711 - DNA, 201 bp, Homo sapiens
agctctctatcttaaggatattaaccatttgtcatcttgtttaaatttttgttctctatttgtcttttaatttgaggattctttaaatgtaaaaatctatrgtttgtaaaatctccttaccatctttttttttttttttttgggtcattttcactcttgttgcccaggctgcagtgcaatggcacaattttggctcaccgc

SEQ ID NO: 19712 - DNA, 201 bp, Homo sapiens
ggttagaacattcagctcagtccacagacctttggcgaggtgggggtcagggacggcagggaataggggatggggattaagctctataaaaactcttgggmcgggtgtggtggttcacacctgtaatctcagcactttgggaggccgaggcgggcagattacttgagctcaggagtttgagagcagcctggccaacatggt

SEQ ID NO: 19713 - DNA, 201 bp, Homo sapiens
gagagaaatgtccacatgaaactatgtgctgcatgctggccatcactcatggatcattaatgaaaactgacttggaatcactattttaaggacaggatggyggggaggcatgcttgtaaacagagcccttggcgactcaattcatctgcaactcatttttcatatatgttaaatgtatcccttcaagatcattgcaaagaa

SEQ ID NO: 19714 - DNA, 201 bp, Homo sapiens
acatggttttgctccctaaatactgaaatagtagacaagacgacacacctgaagcccgaaagaggtaaatttagtatacaaggaagggaatactctttgtyatataaaataatagtaagttcactaaactaattaatgcataaactcaactaaattgtgagttaataaggttgtgatgtaaactgaataaaacataaagaa

SEQ ID NO: 19715 - DNA, 201 bp, Homo sapiens
ggcccgtggacagttgctgtcctctctgttttctctctttgtgcctgtgccaccctcagagaagaagaaaggagctgaggaggagaagccaaagaggaggmggcaggagaagcaggcagcctgccccttctacaaccacgagcagatgggccttctccgggatgaggccctggcagaggtgaaggacatggagcagctgct

SEQ ID NO: 19716 - DNA, 201 bp, Homo sapiens
gctttggaacacagatgagtgcatgttcattctgccttgtttaattttagagacagggtgtcgctctgttgcccagggccgagtgcagtgttaagatcatrgttcactgcagcctcgaccttctggcatcaagtgatcttcccacgtcagcctcctgagcagctgggactacaggtgtgcgccatcacacctagctaattt

SEQ ID NO: 19717 - DNA, 201 bp, Homo sapiens
ctggtcaatgttccctattcttcagtttttaaaatattttttaaaattcaagttcaaactaatatatatgctaaaataaatatgaaactaagcacatagtktgtattagcatctaatatcatgatgactttattttactttttctactttattttttcattctccatagttctttattcagcaaatgcacattgaacagca

SEQ ID NO: 19718 - DNA, 201 bp, Homo sapiens
atatgatgatgatactggtcaatgttccctattcttcagtttttaaaatattttttaaaattcaagttcaaactaatatatatgctaaaataaatatgaawctaagcacatagtttgtattagcatctaatatcatgatgactttattttactttttctactttattttttcattctccatagttctttattcagcaaatg

SEQ ID NO: 19719 - DNA, 201 bp, Homo sapiens
agattatataaagggaagttgggggagaaagagaaatatatgatgatgatactggtcaatgttccctattcttcagtttttaaaatattttttaaaattcragttcaaactaatatatatgctaaaataaatatgaaactaagcacatagtttgtattagcatctaatatcatgatgactttattttactttttctacttt

SEQ ID NO: 19720 - DNA, 201 bp, Homo sapiens
aaggtataaatcttatcaatgttttacattttgctgaacaaaacaggagagagcggattcttttcaaataggaaaaattagggagggaaaagagggattgwctgaaactctattgaagtatgtcaacataaaagtttattgacagcctggcgtgatggctcaggcctgtaatcccagcactttaggaggccaaggtgggcg

SEQ ID NO: 19721 - DNA, 201 bp, Homo sapiens
cccagctactggggaggctgaggtgggagaatggcgtgaacctgggaggcagagcttgcagtgagccgagattgcgccactgcactccagcctgggagacagagtgagactccatctcaaaaaaaaaaaaaaaaaaaaaagaaagtttgaatagatactttcctttagatatgaagacattcagcatcaattcattgctct

SEQ ID NO: 19722 - DNA, 201 bp, Homo sapiens
gctgggcgtggtcgtgggcgcctgtagtcccagctactggggaggctgaggtgggagaatggcgtgaacctgggaggcagagcttgcagtgagccgagatygcgccactgcactccagcctgggagacagagtgagactccatctcaaaaaaaaaaaaaaaaaaaaaagaaagtttgaatagatactttcctttagatatg

SEQ ID NO: 19723 - DNA, 201 bp, Homo sapiens
atgataaagatttctcagagtttggttcccactttcattgtatttcattgaaagtgcttaattaaaatggcttgagaactttgggtagccatgtgtaagaratggatggtattcaccggggaaacaaggtatttgaatttctactttattgaaccagatttaccattattttaaaaggaatgcttatacaaatcaatttga

SEQ ID NO: 19724 - DNA, 201 bp, Homo sapiens
tgaaagtttgaattgggccaggcgcggtggctcacgcctataatctttgggagtgtaatctttgggaggccgaggtgggcagatcacgaggtcaggagatygagactatcctggctaacacggtgaaaccccagctctactaaaaatacaaaaaaattagctgggcgtggtcgtgggcgcctgtagtcccagctactgggg

SEQ ID NO: 19725 - DNA, 201 bp, Homo sapiens
cagcctaggcaaaatagctagaacctgtctctacaaaaatttaaaaaattagcagggtgtggtggtgtgtgcctgtggtcccagctactcaagaggctgargcaggaggatcacttgagcccaggcgttggatgctgaagtgagctatgatagccacctaggcaacagcatgacatcctgtctcaaaaactaaataaatag

SEQ ID NO: 19726 - DNA, 201 bp, Homo sapiens
aatgtatgatccaggaagtttgaaagtttgaattgggccaggcgcggtggctcacgcctataatctttgggagtgtaatctttgggaggccgaggtgggcrgatcacgaggtcaggagattgagactatcctggctaacacggtgaaaccccagctctactaaaaatacaaaaaaattagctgggcgtggtcgtgggcgcc

SEQ ID NO: 19727 - DNA, 201 bp, Homo sapiens
aggccgagtgcagtggctcacacctgtaatcccagcactctgagaggccaaggtgggtggatcacccgaagtcaggagttagagaccagcctggttaacayggtgaaaccccgtctctactaaaaatacaaacaattagctgggcgtggtggcgcacgcttgtaatcccaactactcgggaggctgaggcaggagaattgc

SEQ ID NO: 19728 - DNA, 201 bp, Homo sapiens
ataatcttagctgcctgattttaaatcttcttacataatcttctgaagaaaacataaaatcaacaaagagaacaagtaaggatactcatgactaatatctytaacattactacaatacagagaataccatgatcttcaaattatttcttagtagagaaacaaacaccaaatgccaagagagcttctactgctattgcagag

SEQ ID NO: 19729 - DNA, 201 bp, Homo sapiens
ctcataccccgtgtcttcgcttttccagtcctttggctgccctccggtttcttccctcacatacctgtctgactagttcctagaagcctggcagaaattgstctccgattttaatctggctgccacaaatgaaagaccttggagtccaaatactcctctctcaaagcaaaatctaaatggatataatttataagcaaagat

SEQ ID NO: 19730 - DNA, 201 bp, Homo sapiens
attttttaaaatatttttagtagagacggggtttcaccatcttggccaggctggtcttgaactcctgacctcgtgatccacccacctcggcctcccaaagygctgggattacaggcatgagccaccacacccggccatactgtactttttcatttaatagattgaaaaatttgcctccactaaatttctttgggtgcacat

SEQ ID NO: 19731 - DNA, 201 bp, Homo sapiens
tccacaaagcggtttggtcatcccccaacaaaaaaatgtaagattacctacatgcaattctagacggaacactatgcattggaccataattttctgtttcyagataaagcggcttagggagtggcagccttctctccatcacacatacttctggttttcggtaatggagattggtaaagacttttagacccatgttcttta

SEQ ID NO: 19732 - DNA, 201 bp, Homo sapiens
aagatttataaaacgtgtgtgtgtatatatatctatattatatatatattttatatatatattatatatatatatatatatatatatttttttttttttttaaatgtagagcctcactctgttgcccaggctggagcagagtggcacagtcttggctcactgcagactccacctcctgggtttaagcaattcttgtgtctc

SEQ ID NO: 19733 - DNA, 201 bp, Homo sapiens
catcatttatcccaaatacactaaattccacaaagcggtttggtcatcccccaacaaaaaaatgtaagattacctacatgcaattctagacggaacactaygcattggaccataattttctgtttccagataaagcggcttagggagtggcagccttctctccatcacacatacttctggttttcggtaatggagattggt

SEQ ID NO: 19734 - DNA, 201 bp, Homo sapiens
gtcctatgtaaatgaagaggataaagttacaaagtcatttatggcaaacgccagatggagaggctatttcctgttttagcttaagtgtgaattggccttaygctccctgcctccagaccctattttcctgcctcagcacaatctcagctcactgtaaccatctcccaggttcaggtgattctcctgcctcagcctcccgag

SEQ ID NO: 19735 - DNA, 201 bp, Homo sapiens
aggatatagtgggttgaattgtgtccccaaaaaggtgtgtccaagtcctaatccctatacctgtgaatgtgatcttattcagaaataaaatatttgcagaygtaattgaggatctcatcttgagatccttaatgcagtgcaattatagctgagtgggccctaaacccaatgactggtgtccttataagaaaagggagattt

SEQ ID NO: 19736 - DNA, 201 bp, Homo sapiens
aaagatttataaaacgtgtgtgtgtatatatatctatattatatatatattttatatatatattatatatatatatatatatatatatttttttttttttttaaatgtagagcctcactctgttgcccaggctggagcagagtggcacagtcttggctcactgcagactccacctcctgggtttaagcaattcttgtgtct

SEQ ID NO: 19737 - DNA, 201 bp, Homo sapiens
gaacactgaactggagagtttgctgacaattccgattccaaaggaaagctttccaaatcagtcatgaattgccctccatcctggtgaacctccacacagcrtctcagcgttccatcaggacctcacctccatcctggaatgcttcatctccagccacctggcctctgatggtgccagacctcagtagtctggttgtggttt

SEQ ID NO: 19738 - DNA, 201 bp, Homo sapiens
ctttcttttttcttttttttttttttgagacggagtttcactcttgttgtccaggctgcagtgcaatggcacgatctcactcaccgcaacctctgcctccsaggttcaagcaattgcctctttgggtcttttcttttttttcttgagacagagtctctctccgtcatccaggctggaatgcagtggcgctgttaacggtgg

SEQ ID NO: 19739 - DNA, 201 bp, Homo sapiens
tagttttatgtaataaagatttataaaacgtgtgtgtgtatatatatctatattatatatatattttatatatatattatatatatatatatatatatatatttttttttttttttaaatgtagagcctcactctgttgcccaggctggagcagagtggcacagtcttggctcactgcagactccacctcctgggtttaag

SEQ ID NO: 19740 - DNA, 201 bp, Homo sapiens
ctccacacagcgtctcagcgttccatcaggacctcacctccatcctggaatgcttcatctccagccacctggcctctgatggtgccagacctcagtagtcyggttgtggttttcatcatctgctcagtgttctctccttatcacagctgttgcccttctaccaggggaaggcttcttttgagcaggggcaggcccaaacac

SEQ ID NO: 19741 - DNA, 201 bp, Homo sapiens
ctagatcacttatacctaatataatgtaaatgctgtgtaagttgttgttatagtgaattggttttttataaatttgtatttttttctttctttcttttttcttttttttttttttgagacggagtttcactcttgttgtccaggctgcagtgcaatggcacgatctcactcaccgcaacctctgcctcccaggttcaagca

SEQ ID NO: 19742 - DNA, 201 bp, Homo sapiens
caaatagttttatgtaataaagatttataaaacgtgtgtgtgtatatatatctatattatatatatattttatatatatattatatatatatatatatatrtatatttttttttttttttaaatgtagagcctcactctgttgcccaggctggagcagagtggcacagtcttggctcactgcagactccacctcctgggtt

SEQ ID NO: 19743 - DNA, 201 bp, Homo sapiens
aatttgattactaatgaggttgagggatttttctacatttttgactatttggatatcatattttgcttgagtcctttgcccatttttcttttgggttctcygattttttttcttttctttctttcttttctttttttttttttttttttttttttttgagagagagtctgactctgtcacccaggctggagtgcagtggta

SEQ ID NO: 19744 - DNA, 201 bp, Homo sapiens
ttaggtctcactccgtcatctaggctagagtacaggcacaatcatggctcactgaagcctccacctcccaggttcaagtgatcctcccactcagcctcccragtagctggatcacaggcatataccagcacacttggctaatgtttctttgtttgtttgtttgtttgtttgtttgtagagactgagttttgctgtgttgct

SEQ ID NO: 19745 - DNA, 201 bp, Homo sapiens
catccaaatagttttatgtaataaagatttataaaacgtgtgtgtgtatatatatctatattatatatatattttatatatatattatatatatatatatatatatatatttttttttttttttaaatgtagagcctcactctgttgcccaggctggagcagagtggcacagtcttggctcactgcagactccacctcctg

SEQ ID NO: 19746 - DNA, 201 bp, Homo sapiens
ttttttttaaattagccaggtataatggcacatggctgtagtcccagctatttgggaagctgaggttggagggtcacttgagctcgggaggtcaagactgyagcaagctgtgattgcatcactgcactccagcctgggtaacagagtgagaccctgtctcaaaaaacaaataaataaataaaaagaaaaatacattataaa

SEQ ID NO: 19747 - DNA, 201 bp, Homo sapiens
cacttctacctaatttgattactaatgaggttgagggatttttctacatttttgactatttggatatcatattttgcttgagtcctttgcccatttttctyttgggttctctgattttttttcttttctttctttcttttctttttttttttttttttttttttttttgagagagagtctgactctgtcacccaggctgga

SEQ ID NO: 19748 - DNA, 201 bp, Homo sapiens
tgcgcctgtaatctcaggttctcgggaggctgaggcaggagaatcacttgaacctgggaggcggaggttgcagtgagctgagatcacgccactgcattacmgcctggcgacagagcaaaaaagaaaaaaaaaaaagaaataatgtaattatagatttatctcaattatataagtaacaatataaatattcaaactcgtctc

SEQ ID NO: 19749 - DNA, 201 bp, Homo sapiens
attaaaggcataagtatgatacaaaggactttggggacttgggcggaaagggtgggaagggagagaggaataaaaaactacaaattgggttcagtgtatastgctcgggtgatgggtgcaccaaaatctcacaaatcaccactaaagaacttactcatgtaaccaaataccacctgtgccccaataacctatggaaataaa

SEQ ID NO: 19750 - DNA, 201 bp, Homo sapiens
ttttctattttcaattttaaaaaatgtattattaagtagagacaggacctcaccatattgtccaggctggtctccagctcctgggctcagacaatcttccrgcctctgcctaccaaagtcctggaataacagacggcagacatgagccattgaacttgccccatatttttcaaaagtgaaattttgcaggcacctgtagtc

SEQ ID NO: 19751 - DNA, 201 bp, Homo sapiens
gcttgaacctgggaggcgggggttgcagtgagctgagatcacgccactgcactccagcctaggtaaaaaagcaagactccgtctcaaaaaaaaaaaaaaaagaaaagaaaaaaagaagaatgctgttttaaaatctttcattttttatttttaaaaaatagggacagggtttcaccgtgttgcccaggcttttctcaaact

SEQ ID NO: 19752 - DNA, 201 bp, Homo sapiens
taataaatattatatattatatatttataatatatatttataaatattatatttataataaatattatatattatatatttataataaatattatatattmtatattacatattatatatttataataaatattatataatatatactatatattttatatatattatatatcttgtatatattatatatataacttctct

SEQ ID NO: 19753 - DNA, 201 bp, Homo sapiens
tgcttgaacctgggaggcgggggttgcagtgagctgagatcacgccactgcactccagcctaggtaaaaaagcaagactccgtctcaaaaaaaaaaaaaaaagaaaagaaaaaaagaagaatgctgttttaaaatctttcattttttatttttaaaaaatagggacagggtttcaccgtgttgcccaggcttttctcaaac

SEQ ID NO: 19754 - DNA, 201 bp, Homo sapiens
cataagtgttagaagtaatagtttcttttaaagagtaacttccctcaagcctccttgctttatgctaataactcttggttaagccctatcctatgtagctkctagatataagggaatgagtacattctatgtctttgtactttaaccaagatatttgtttcctttcataagcaacttcctctttttctttgttctcctttg

SEQ ID NO: 19755 - DNA, 201 bp, Homo sapiens
ataattcccacctcaaagtgcataaaagacattcattttctttgtttgctgctcagactttcaagatgcatgtccgctgagctagtgtacacttaaaataytccctcctgaactccgcttagtctctccagtctctgatttcccactacaataacacatccctgaagagattttggtttgaccaatcaaaaataataattg

SEQ ID NO: 19756 - DNA, 201 bp, Homo sapiens
ttgagggtctagttgtggttgtcttagactttgcacatgtttttataagcaaagcagacaagctccagcaagggaactcaattgtctaattagatgttacyagaaatcttattggggctgtgatctaattcttttttttttttttgagacagactcttgctctgtcatccaggctgcagtgcagtggcgcgatctcagttc

SEQ ID NO: 19757 - DNA, 201 bp, Homo sapiens
tatttaaatatcatatatttataatatatatttataataaatattatatattatatatttataatatatatttataaatattatatttataataaatattmtatattatatatttataataaatattatatattatatattacatattatatatttataataaatattatataatatatactatatattttatatatatta

SEQ ID NO: 19758 - DNA, 201 bp, Homo sapiens
tataatatatttataataatatttataatatatatatttaaatatcatatatttataatatatatttataataaatattatatattatatatttataatawatatttataaatattatatttataataaatattatatattatatatttataataaatattatatattatatattacatattatatatttataataaatat

SEQ ID NO: 19759 - DNA, 201 bp, Homo sapiens
ctcccaaagtgctgggattacaggtgtgagccaccacgcccggccaccatctttatactttctatttttttggtttaaaatctttcattattcatagcatrtgatgagagactttacactctatatcattctcattttcaaagcaaccatagactatattgattcataatagttttatgtctatgtatcttgcttccccaa

SEQ ID NO: 19760 - DNA, 201 bp, Homo sapiens
aagagttcatatttccacacggttttggggcgctcgggagtttgttttttttacaaaacttttaaaactttaccactatatatataatatatttataataytatttataatatatatatttaaatatcatatatttataatatatatttataataaatattatatattatatatttataatatatatttataaatattata

SEQ ID NO: 19761 - DNA, 201 bp, Homo sapiens
attttcaaagcaaccatagactatattgattcataatagttttatgtctatgtatcttgcttccccaaagattccaaactccatgaagccagggtttaaasaatttttactgcctacatcatatattatggtgtatgtgaggtatgtgaggctgcagtgtaaggcctgaactggaatggtaataagtaagactgggaaaaa

SEQ ID NO: 19762 - DNA, 201 bp, Homo sapiens
tgggctgaaccacactactgacatcccaaggtctccagctcgcagatggcctgtgatggaacttctcagcctccataattgtgagagccaatccctctaakaaatcctttttcctatatctatatttatatctatatcatctatctgatctatatctatcatgtcccattgattctgtctctctggagaaccctaagatag

SEQ ID NO: 19763 - DNA, 201 bp, Homo sapiens
aagtccttgtggagactgacagttttttttccctttcatattgttgttgagtatgttgataattaactaataattgactaatcacaagggctacttccttrtattactgggtatccaaaaaacttgtcaacataataaacacattttgtcaagatttcttgcttatgggattttaggaatattcatatcccaagatcataa

SEQ ID NO: 19764 - DNA, 201 bp, Homo sapiens
ccagattatttcttaaataactaacataacgcatatacctctgtcaatgccaatacatagctctgttcatgggggtaaatgatatatactttttattggaygactaactgtgttcattttttaatatccagagatttggtatagtttgacttctctgtcttgcaggaatacttgcgtagactcaaagaggctctaaaaggt

SEQ ID NO: 19765 - DNA, 201 bp, Homo sapiens
ttatcctacagcacactatagggtccttaattaaattgtgcagaaatctctcagaggggatgataaattctccagattatttcttaaataactaacataaygcatatacctctgtcaatgccaatacatagctctgttcatgggggtaaatgatatatactttttattggatgactaactgtgttcattttttaatatcca

SEQ ID NO: 19766 - DNA, 201 bp, Homo sapiens
tctcttgggggctctgggtctttatgtagattggggaaaaatctcttccaaggcctgataatctctaagagtttttattttatttatttatttattatttwttttatttatttatttatttatttatttatttatttatttatttattttcagacagggtctcactctgtttgttgcccaggatggagtgtactggctccc

SEQ ID NO: 19767 - DNA, 201 bp, Homo sapiens
aggcgcagtggcagacgcctgtaatcccagctacttgggagactgaggcaggagaatcacttgaacctagaaggcggaggttgcagtgagccgagatcacrccattgcactccagcctgggcgacagagtgagactccgtctcaaaaaaataaaataaataaataaataaataaaacagtttaagcatctgctctttgaaa

SEQ ID NO: 19768 - DNA, 201 bp, Homo sapiens
taattattaacacatccaaatagttttatgtaataaagatttataaaacgtgtgtgtgtatatatatctatattatatatatattttatatatatattatatatatatatatatatatatatttttttttttttttaaatgtagagcctcactctgttgcccaggctggagcagagtggcacagtcttggctcactgcaga

SEQ ID NO: 19769 - DNA, 201 bp, Homo sapiens
gataattattaacacatccaaatagttttatgtaataaagatttataaaacgtgtgtgtgtatatatatctatattatatatatattttatatatatattatatatatatatatatatatatatttttttttttttttaaatgtagagcctcactctgttgcccaggctggagcagagtggcacagtcttggctcactgca

SEQ ID NO: 19770 - DNA, 201 bp, Homo sapiens
atgctgcggaggtttgtagcctaggaaaaatgggctgtaccacatagcataggtgtgttgcaggctacagcatctaggtttgcgtaagtacactctatgaygttcgcacaacaatatcacctaacaatgcatttttcagaacaaattctccatcactaagtgaagcatgattgtatttctgacattgtattttatcaataa

SEQ ID NO: 19771 - DNA, 201 bp, Homo sapiens
atattcaaactcgtctcagtgggattctgaatttgtagcggttaagaacagggctcttcacctacagtccattctccaccaagcacccccagcccttaccscaaggcctgggtcagtgctgggcacatgacagctgtgcactaaatattgattatacctgagagagtgaatgagctctggaatcagattgcttgggttgaa

SEQ ID NO: 19772 - DNA, 201 bp, Homo sapiens
tacatgcaaatcaatgatacatattttacaaatatggtactgttttatatacccaggaataaacctgaagaaagaaaaagaaaatagaaataaagacacayaggagagaaaatggttaaaactcactcgacactgacgaggtcccacatccatgtctctgggaagtttgttcttactgtttgaattatagcctgttctaca

SEQ ID NO: 19773 - DNA, 201 bp, Homo sapiens
ctttgataattattaacacatccaaatagttttatgtaataaagatttataaaacgtgtgtgtgtatatatatctatattatatatatattttatatatatattatatatatatatatatatatatatttttttttttttttaaatgtagagcctcactctgttgcccaggctggagcagagtggcacagtcttggctcac

SEQ ID NO: 19774 - DNA, 201 bp, Homo sapiens
gcactaaatattgattatacctgagagagtgaatgagctctggaatcagattgcttgggttgaattcccacttctaatacccactggttgtttaactttgraaaatttcttttgctggctaagattccatttcttcacttgtaaagttcagatgacaatagatactgagggaattcagcgaggcacgctcctggcttggag

SEQ ID NO: 19775 - DNA, 201 bp, Homo sapiens
gaggatagcactggaacacacatcactatgaaacaccatgctcaatacactgtttaaactgtcactgtgaatgaaagcaattgtatttgtttgaggaatayggacctaagtcttatacctttatagtagcattttgcacttgaggataaagagaatatggaaatattaagaaatattttagctttgttagatttttgcctc

SEQ ID NO: 19776 - DNA, 201 bp, Homo sapiens
tccagctttgataattattaacacatccaaatagttttatgtaataaagatttataaaacgtgtgtgtgtatatatatctatattatatatatattttatwtatatattatatatatatatatatatatatatttttttttttttttaaatgtagagcctcactctgttgcccaggctggagcagagtggcacagtcttgg

SEQ ID NO: 19777 - DNA, 201 bp, Homo sapiens
taagcccaggaggtcgagccaagatcacgccactgcagcactcaagcctgggcaacagagcaagaccctgtctcaaacaaaacaaaacgaaacaaaaaaaacaaaaaaacccatataaattttggggaacacatttcagttcataataaagtggaaaaattaaaagaaattaaatttacagtttaaagttatgctagaata

SEQ ID NO: 19778 - DNA, 201 bp, Homo sapiens
gatagagttggggtttcagcatgttgcccagactggtctcgaactcctgagctcaagcaatctgcctgcctcggcctcccaaagggttgacattacaggcrtgagccactgcacccagctaaaagctgtttttgttttaattttatctgaaattgctttttgcgcatggtatgagctaggtcaagagactttgttttccta

SEQ ID NO: 19779 - DNA, 201 bp, Homo sapiens
atgatgtaatgtcaaggtgttaggcaaagtgagttgtaacccatatttaagctatagctacacacttcagctggtcaggaagaaatatttgtcttcctttwtcaaaaagagtattggggccaggtgcagcggctcacgcctgtaatcccaacactttgggaggctgaggcgggtggatcacaaggtcaggagttcgagact

SEQ ID NO: 19780 - DNA, 201 bp, Homo sapiens
ggtgggcagatcacctgaggtcaggggtttgagatgagcctggtcaacatggtgaaaccccgtctctgtgaaaaatacaaaaattagccgggcgtggtggmacgtccctgtaagcccaactactcgggaggctgaggcaggagaatcgcttgaaccccggaggcagaggttgcagtgatccaagatcacaccactgcactc

SEQ ID NO: 19781 - DNA, 201 bp, Homo sapiens
atcctctgatgaaaaaggatctgttcaaggcttttgtttatgattctggattgactttcttttgaaattcttttttttattttttgtttttttttgttttktttttttttaactattttccttttttttaacttttatttgaggtttggggctacctgtgcaggtttgttacataggtaaacacgtgtcgcgggggttggt

SEQ ID NO: 19782 - DNA, 201 bp, Homo sapiens
cttcagctggtcaggaagaaatatttgtcttcctttatcaaaaagagtattggggccaggtgcagcggctcacgcctgtaatcccaacactttgggaggcygaggcgggtggatcacaaggtcaggagttcgagactgtcatggctaacacagtgaaaccccgtctctactaaaaaaaaaaaaatacaaaaaattagccag

SEQ ID NO: 19783 - DNA, 201 bp, Homo sapiens
gtgattgtgccactgcactccagcctgggcaacagagtgagattctgtctcaaaaaatgagaatgcactagatacacaattttattgaactttctattatrgaaaatttcaaacttatgcaaagtaaagactagtatgacccccatttacccatcatccagctttgataattattaacacatccaaatagttttatgtaat

SEQ ID NO: 19784 - DNA, 201 bp, Homo sapiens
cattgtggttggatatcctctgatgaaaaaggatctgttcaaggcttttgtttatgattctggattgactttcttttgaaattcttttttttattttttgwttttttttgttttttttttttttaactattttccttttttttaacttttatttgaggtttggggctacctgtgcaggtttgttacataggtaaacacgtg

SEQ ID NO: 19785 - DNA, 201 bp, Homo sapiens
gccaggtgttgtggcatgtgcctgtagtcccagctactcgggaggctgagacaggagaatcacttgaacccggaaggtggaggtggcagtgagccaagatygcgccagtgcactccaggctgggcgacagtttgagactgtctcaaaaaaaaaaaaaagtattggattacacaaggtcttcaaaaacatatctttcttggg

SEQ ID NO: 19786 - DNA, 201 bp, Homo sapiens
aggcgtagtggcgcatgcctgtaatcccagctacttgggaggctaaggcaggagaatcgcttgatcctgggaggcggaggttgcagtgagctgagatcgtrccatcgcactccagcctgggcaacaagagtgaaactccatctgaaaaaaaaattttattctgaagtatattattttttgatagtgctataaaagcaattg

SEQ ID NO: 19787 - DNA, 201 bp, Homo sapiens
tcattgtggttggatatcctctgatgaaaaaggatctgttcaaggcttttgtttatgattctggattgactttcttttgaaattcttttttttattttttktttttttttgttttttttttttttaactattttccttttttttaacttttatttgaggtttggggctacctgtgcaggtttgttacataggtaaacacgt

SEQ ID NO: 19788 - DNA, 201 bp, Homo sapiens
acttgaacccggaaggtggaggtggcagtgagccaagatcgcgccagtgcactccaggctgggcgacagtttgagactgtctcaaaaaaaaaaaaaagtaytggattacacaaggtcttcaaaaacatatctttcttgggtggacacagtggctcatgcctgtaatccttgcgctttgggaagcagaggcaggctgatcac

SEQ ID NO: 19789 - DNA, 201 bp, Homo sapiens
aaatgtcttcttttgagaagtgtctgttcatatcctgcacccactttttgatggggttgtttgtttttttcttgtaaatttgtatgagttcattgtagatyctggatattagatccagatttgtcagatgagtaggttgcaaaaattttctctcattctgtaggttgcctgttcactctgatagtagtttcttttgctgtg

SEQ ID NO: 19790 - DNA, 201 bp, Homo sapiens
tgtgaaatgaatccaaatacccaaatgactggtaaccaactgaatttgaagaacatggaaactccaagtacttctaatgtaagtggcagggttttggacarctccttttgcagtggacaagaatcctcaacaaaaggaatgcctgctaaaagtgacagtagctgttccatggaagtgctagcaacctgtctttccctgtgg

SEQ ID NO: 19791 - DNA, 201 bp, Homo sapiens
tcttctctctctctctttttttttgagatggagtttcactcttgttgcccaggctggagtgcaatggcacgatcttggctcactgcaacctccacctcccrggttcaagagattctcctgcctcagcctcccaagtagctgggattacaggtgcccaccaccacgcctggctaatttttgtatttttactagagacggtgt

SEQ ID NO: 19792 - DNA, 201 bp, Homo sapiens
aatggccttggacttgatctctggagtaagctgctgtgtttcatttagataatccagtacatagatgttaggagcaaagaggaccatattctgctctccayagccatagggcatctggagaagattttgtgtgttttgcatggcagagcctaatatgtctcctagagaatgggagagatgggaagtcataaagcttggaga

SEQ ID NO: 19793 - DNA, 201 bp, Homo sapiens
taatcccagctactcaggaggctgaggcactagaattgcttgaacctgggaggcagaggttgcagtgagctgggatcgtgccactgcactccagcctgggygacaaagtgagattctgctcaaaaaaaaaaagaaaagaaaagaaaagaaaaaaaagccatatctttcttgtgtaatgtgacgattctgcattacttgcca

SEQ ID NO: 19794 - DNA, 201 bp, Homo sapiens
ctgacggccagtgatgatgagcattttttcatgtgttttttggctgcataaatgtcttcttttgagaagtgtctgttcatatcctgcacccactttttgayggggttgtttgtttttttcttgtaaatttgtatgagttcattgtagatcctggatattagatccagatttgtcagatgagtaggttgcaaaaattttctc

SEQ ID NO: 19795 - DNA, 201 bp, Homo sapiens
gaaatgaatccaaatacccaaatgactggtaaccaactgaatttgaagaacatggaaactccaagtacttctaatgtaagtggcagggttttggacaactmcttttgcagtggacaagaatcctcaacaaaaggaatgcctgctaaaagtgacagtagctgttccatggaagtgctagcaacctgtctttccctgtggaaa

SEQ ID NO: 19796 - DNA, 201 bp, Homo sapiens
ggctcacacctgtaatcacagcactttgggaggccgaggcgggtggatcacgaggtcaggagatcgagaccatcctggctaacacggtgaaaccccgtctstactaaaaatacaaaaaattagctgggtgtggtggtgggtgcctgtagtcccagctactcgggaggctgaggcaggagaatggcgtgaacctgggaggtg

SEQ ID NO: 19797 - DNA, 201 bp, Homo sapiens
ggaaggaaacaaacaaattaacagttataatacagtgtgaccaaaaaaatgatagaagaaagcacaaaaagctacggaaggccaggtgtggtggctcatgyctgtaatcccagcaccttgggaggccgaggcaggcagatcacctgagatcaggagttcgagaccagcctggccaatatggtgaaacctcgtctgtagtaa

SEQ ID NO: 19798 - DNA, 201 bp, Homo sapiens
tgaggcacaagaatggcgtgaacctgggaggcagagcttgcagtgagccgagattgcgccactgcactccagcctgggcaacggtgcaagactccatctcrgaaaaaagaaaaaaaaaaaaaaactgctaccccagctttcttttggttcatattagtcatttgctttaattcattatggtgaccaaatgatagaaaagaa

SEQ ID NO: 19799 - DNA, 201 bp, Homo sapiens
acaaaaattaggaagacgtgatctttatttttaagttacttatttgttgttggaggcaacagagataaatgaattgtgatattttactggaaacaatatgrgtttttgagttaagaacagactgtgtttgaaatccctttagcagctatgtgaccttaggccaatatttgaaatgatgtgaacgttggtttcctcctcagt

SEQ ID NO: 19800 - DNA, 201 bp, Homo sapiens
ccccctgcccacccaccaaccccatcatctaactgtgtttcctgtcttccagggagccagggttttttatgttgtgtgagccgtgtatagtttcttttttyttttttttttgagacgcagtctcgctctgtcacccaggctggagtgcagtggcacaatctcagctcactgtaagctctgcctcccgggttcatgccattc

SEQ ID NO: 19801 - DNA, 201 bp, Homo sapiens
atctttagagagcatcatctatatgccaggtattatgcaggctatacaaaaattaggaagacgtgatctttatttttaagttacttatttgttgttggagrcaacagagataaatgaattgtgatattttactggaaacaatatgagtttttgagttaagaacagactgtgtttgaaatccctttagcagctatgtgacct

SEQ ID NO: 19802 - DNA, 201 bp, Homo sapiens
taaatctttagagagcatcatctatatgccaggtattatgcaggctatacaaaaattaggaagacgtgatctttatttttaagttacttatttgttgttgraggcaacagagataaatgaattgtgatattttactggaaacaatatgagtttttgagttaagaacagactgtgtttgaaatccctttagcagctatgtga

SEQ ID NO: 19803 - DNA, 201 bp, Homo sapiens
cattgtattactggttctgtgctacagttgtcattcaagttcctgagaaaatggaatgaatgtctgttattcatttatttattaaatctttagagagcatyatctatatgccaggtattatgcaggctatacaaaaattaggaagacgtgatctttatttttaagttacttatttgttgttggaggcaacagagataaatg

SEQ ID NO: 19804 - DNA, 201 bp, Homo sapiens
aagtgcttgagacaatacaagcaattatttgctaaaatttagaccagggtctcaaaacaacaattacatttttagataatggtcacagtaagtcttttcaraaaaaagcaacgaagaaagctctagaccaatgagattttagtcatcattaatcaatgccaagcgaaaaaatcttaagatgtatttaaatttgtgatgcca

SEQ ID NO: 19805 - DNA, 201 bp, Homo sapiens
tgaccagttcaaagagcatttgagaaacaagaagatttctaggacaagacatgagtgtgatggttaattttaggtgtcagtttgactggattaaggaatayctagaaacttagtaaagcattgtttctgggtgtgtctgtgaggatgtttccagaggagactaccatatgagtctgagtggactaagtggggaagattccc

SEQ ID NO: 19806 - DNA, 201 bp, Homo sapiens
tcaaagattttacttagctcaccgattaatgagggaaccagtaaagatgcagtgaccagttcaaagagcatttgagaaacaagaagatttctaggacaagmcatgagtgtgatggttaattttaggtgtcagtttgactggattaaggaatacctagaaacttagtaaagcattgtttctgggtgtgtctgtgaggatgtt

SEQ ID NO: 19807 - DNA, 201 bp, Homo sapiens
tagtgaattttcaaatgcagataagcaagtcaatttaaaatgtatttttttggtcaggcactgtggctcacggctgtaatcccagctctttgggaggccarggtgggaggaatgcttgagcccagggattggagaccagtctggtcgacataggaaaacctcatctccactaagaataaataaataaataaatactactac

SEQ ID NO: 19808 - DNA, 201 bp, Homo sapiens
gggaaagacctgggtctagagtctatatttttgtacttatgagacatgttaaagtatagttttcaagaaggtaacaatgtggctgtctggcaaatatgcartgaaatgtgtcaaagattttacttagctcaccgattaatgagggaaccagtaaagatgcagtgaccagttcaaagagcatttgagaaacaagaagatttc

SEQ ID NO: 19809 - DNA, 201 bp, Homo sapiens
caaagtctcagacagaaggaatacatttttttctttttgggatctattgcacagcatggtgaatatagttaataatagtgtattttatgtttcaaacttgsttagagaatttcaaatgttcccaccacaaaacataagtatttcaggttagcttgatttaattatttcacattttattcataaatcataacatcactttgt

SEQ ID NO: 19810 - DNA, 201 bp, Homo sapiens
gtaaacttagaacaatagctcaaatacctacataggagaaggaaatctcaagggaaaacagttaattttaaagttatttaagaaacagaatccaacaccayagatcagagttcatgctaggattatcatttcaaaaataatgactcatccaacagatatagaataatagcactttaaagatgtttaagagtaaagcacaaa

SEQ ID NO: 19811 - DNA, 201 bp, Homo sapiens; identical to SEQ ID NO: 2854

SEQ ID NO: 19812 - DNA, 201 bp, Homo sapiens; identical to SEQ ID NO: 2857

SEQ ID NO: 19813 - DNA, 201 bp, Homo sapiens
tcacgcgggtatgtgttctttcagttcttgttccatatttgcttcttttttcttgcatgatatttcttatatgttttcctcatctgaaagacttagcatamttctctccataaatcagtataatacccacgatttatattccagctgaaattttacttggggggtgtgtgtgtgtgtgtgtgtgtgtattttagggatggg

SEQ ID NO: 19814 - DNA, 201 bp, Homo sapiens
gatttgcatttctctgacggccagtgatgatgagcattttttcatgtgttttttggctgcataaatgtcttcttttgagaagtgtctgttcatatcctgcrcccactttttgatggggttgtttgtttttttcttgtaaatttgtatgagttcattgtagatcctggatattagatccagatttgtcagatgagtaggttg

SEQ ID NO: 19815 - DNA, 201 bp, Homo sapiens
ggaaagtaaatggagacaataaatatgggctggtttttccatgagtgactggtgtagacagatagctgcttacccaatttcttaggtataatagtccagaygtttgttttcctccctccagcttgaataacctcactgccattgattttccaggtattaatatttgcttcataattctgagactcctccacttgaacagaa

SEQ ID NO: 19816 - DNA, 201 bp, Homo sapiens
ccctgaggaatcgtcacactgacttccacaatggtcgaactagtttacagtcctaccaacagtgtaaaagtgttcctatttctccacatcctctccagcayctgttgtttcctgactttttaatgatcgccattctaactggtgtgagatggtatctcattgcggttttgatttgcatttctctgacggccagtgatgatg

SEQ ID NO: 19817 - DNA, 201 bp, Homo sapiens
caaccagaaattagattactatagattagaatttctaatggagaatttacaataagaattttaaaaatgtgagggagaaaatcacgtttgtatagacaatwtaaggaaagtaaatggagacaataaatatgggctggtttttccatgagtgactggtgtagacagatagctgcttacccaatttcttaggtataatagtcc

SEQ ID NO: 19818 - DNA, 201 bp, Homo sapiens
caatcattcttttaaggttattattatttacgtgactatataccaatatacataaccaatatattgttctttttgttgttgttgttgttgttgtgttttaktgtttctctgtctcaggaagcttgctatttcactcttaaaactgtgtcttcgacttaatgtcataaaactatacaagttggtacagtattctgtctcaat

SEQ ID NO: 19819 - DNA, 201 bp, Homo sapiens
gaacaagaccgtgcaaaaattgagaagaacttctgtaaaatgctgggggcaagaaaatagggaaaacaagaaaagagaagagtgactttgagggaagagtkcatatatcatttccttaatacatttcatttttcttttttatgccttgttttgaaaagctaccattatcttggcatgctttagatggaaaccatttactgt

SEQ ID NO: 19820 - DNA, 201 bp, Homo sapiens
atgtgtattaaatgcattttggacatgatattttcttttttttttcttttttgtttgagatggagtctcactctgttgctcaggctggagtacagtggcaygatcttggctccctgcaacctccacctcctgggttcaagcgattcttgtgcctcagcctcctgagtagctgggaatacaggcacgtgccaccacgcccag

SEQ ID NO: 19821 - DNA, 201 bp, Homo sapiens
aaacaaatctacaaacaaaactgaggctttggggtatttgtcacaaacaataaatgattttgtatttctgtttcagatctagctcttctgttatcccccaytttattccccttagatactgaccatgggattctatgtgcttacaaatttgttacatctacatttcacaacttaaacatacttttctgttttaaatgaata

SEQ ID NO: 19822 - DNA, 201 bp, Homo sapiens
tttttcttttttatgccttgttttgaaaagctaccattatcttggcatgctttagatggaaaccatttactgtgcagatttctgttcttgttctcaaaatstatgcaaaaatatctcgtctaacccctaccattgtgcctggccctttgaaatgtgtttcttgctgacgtgcttgtttctcctttccagtcctgacacagc

SEQ ID NO: 19823 - DNA, 201 bp, Homo sapiens
ctacttgggaggctgaggcaggagaattgcttgaacccaggagccagaggttgcagtgatctgagattgtgccactgcactccagcctgggcaacagagtragaccctgtctcaaaaaaaaaaaaaaaaaaggctttgagttagatgatttttgcccaactgtaggctaacgtaagtgttctggacacttttaaggtaggc

SEQ ID NO: 19824 - DNA, 201 bp, Homo sapiens
tatactctgccatttttattctacttaaaatgttaaatctttttttttttttgagactgggtttcgctcttgttttgttgcccaggttggagtgcattggygtgatctcagttcaccgcaacctccacctcccgggttcaaatgattctcctgcctcagcctcccaagtagctgggattagaggcacgcgccaccacgcct

SEQ ID NO: 19825 - DNA, 201 bp, Homo sapiens
cacagctctccctgaggagcagccacattccagctcccagtgcgcccctctccactgtctctccaagcctcctcacccctagtcttcatctcctgtggacraacatctggggtggaagttttgtagccacacacaggatactgcccaagatccagcgggtgttttcttctcggttgttagatgtacaattggattaatgtc

SEQ ID NO: 19826 - DNA, 201 bp, Homo sapiens
aattagctgggcatggtgatgcatgcctgtagtcccagctacttgggaggctgaggcaggagaatcacttgaacccaggaggcggaggttgcagtgagccragatcgcgccactgcactccagcctgcgacagatcaagactctgtctcaaaaaaaagaaaaaagaaagaaatacattggtttggttcagaaaggtgggac

SEQ ID NO: 19827 - DNA, 201 bp, Homo sapiens
ttttcttcaagttatccattatctgtcatcttggctgtcacagaggtttcttttggtctcattctattggactgccttctaagcatgtttcatatagttarcctcattagcatttcttcatggtttctcagaattctttcatatactctgccatttttattctacttaaaatgttaaatctttttttttttttgagactgg

SEQ ID NO: 19828 - DNA, 201 bp, Homo sapiens
atggcatctttacttttattttttcattgcagttgagtagatgtactggtgctgctcctttgtatgtgtgtatgtgtgtgataacgttaaagaaggctcartaacttgaagggaaaaaaatggtgtgtttatttaatgaccagaattttttttacttctcccaaaatcagggtcctactgagtctttcctgataaaaggta

SEQ ID NO: 19829 - DNA, 201 bp, Homo sapiens
ggtaaaaccccatcgctactaaaaatacaaaaaattagctggacgtggtggtgggtgcctgtaatcccacctactcaggaggctgagtcaggagaataacwtgaacccaggaggtggagattgcagtgagccgagatcgccattgcactccagcctgggcaacaagagtgaaacgtcatctcaaaaaaaaaagaaaaagaa

SEQ ID NO: 19830 - DNA, 201 bp, Homo sapiens
tggcacgatcatggctcactgcagccttgacctccccgggctcagatgatcctcctactttagcttcctgaatagctgggaccacggatccacgtgccacyacacctggctaatttttgcaggttttgtagagttggggttttaccgtgttgcccaggctggcctcaaactcctgagctcaagcgatcctccccaccgact

SEQ ID NO: 19831 - DNA, 201 bp, Homo sapiens
acctgagaagtggcatagctgctaagttgacttttaataaaaaactgtttgtgcctgagggaaatatatgcctttttaaaaagtacctcagaacatgttcstagatcgtctcatcggttttgtttggtgggactgggagttcagcaggaagtattgtctgtgtgtgatgacggggcagtattgccagtcggcaatgttgta

SEQ ID NO: 19832 - DNA, 201 bp, Homo sapiens
gacttcgtgatccgcccgccttggcctccaaagtgctgggattacaggcgtgagccaccgcgcccagccccagctttcttttctaaatattgcttcttcarctagaaacttcgaaagtgcagtattttagaaagacatgacagaaggagcgttaaagagaaatgcagtctctcatttgcatcacttcaagaaatgaacttc

SEQ ID NO: 19833 - DNA, 201 bp, Homo sapiens
ttagaagttgcctaaatgtgtctttggctctagcacttgcccagaaagaactttacagaaagggcccatccttgggttgacgcagagttcttctgagcttsagtgagaagctcttgtctgcagttctgagggaagccctgggggcacagcgaggggcctcccttccctttcctttagtgccatccctcctgatgttcatct

SEQ ID NO: 19834 - DNA, 201 bp, Homo sapiens
tccaactctggattctaataaaataatttggagaactttgagaaaaaggaaaactgttaaataagaaaagacctatttagaaattatactttagtctaacraagaggaggtacaatagtagtcttcaagaaaagaatatttaacaaatgatagatatcagctatagatattgttactaagtctagaataaaaaaggcttca

SEQ ID NO: 19835 - DNA, 201 bp, Homo sapiens
attctcctgcctcagcctcccgagtagctgggactacaggtgcccgccaccatgcccggctaatttttttgtatttttagtagagacggggtttcaccgtrttagccaggatggtctcgatctcctgacttcgtgatccgcccgccttggcctccaaagtgctgggattacaggcgtgagccaccgcgcccagccccagct

SEQ ID NO: 19836 - DNA, 201 bp, Homo sapiens
cttagaagttgcctaaatgtgtctttggctctagcacttgcccagaaagaactttacagaaagggcccatccttgggttgacgcagagttcttctgagctwcagtgagaagctcttgtctgcagttctgagggaagccctgggggcacagcgaggggcctcccttccctttcctttagtgccatccctcctgatgttcatc

SEQ ID NO: 19837 - DNA, 201 bp, Homo sapiens
aaatacattaaaattttactggttaatcataaaatattttatatttgaaaataggatggcaatctttatttttccaagatatttgttggaaaaaaatgatygttggtattattttttctttcagctatattccatggtatctttaaaattgttcagaatataggacttttactaaaaaaattcaattgtcagagtctaaaa

SEQ ID NO: 19838 - DNA, 201 bp, Homo sapiens
tgatgatgatactggtcaatgttccctattcttcagtttttaaaatattttttaaaattcaagttcaaactaatatatatgctaaaataaatatgaaactragcacatagtttgtattagcatctaatatcatgatgactttattttactttttctactttattttttcattctccatagttctttattcagcaaatgcac

SEQ ID NO: 19839 - DNA, 201 bp, Homo sapiens
tcttagaagttgcctaaatgtgtctttggctctagcacttgcccagaaagaactttacagaaagggcccatccttgggttgacgcagagttcttctgagcytcagtgagaagctcttgtctgcagttctgagggaagccctgggggcacagcgaggggcctcccttccctttcctttagtgccatccctcctgatgttcat

SEQ ID NO: 19840 - DNA, 201 bp, Homo sapiens
ttttccctcaagacagggcctcactctgccacccagattggagtgcagtgacaccatcagggctcactgcagccttgacctccctgggcccgagtgatcckcccacctcatcctcccgaatagctgggactataggtgcacgccaccacacctggctaattttcttattttttgtagagagagggtttcattatgttgccc

SEQ ID NO: 19841 - DNA, 201 bp, Homo sapiens
ctcttagaagttgcctaaatgtgtctttggctctagcacttgcccagaaagaactttacagaaagggcccatccttgggttgacgcagagttcttctgagsttcagtgagaagctcttgtctgcagttctgagggaagccctgggggcacagcgaggggcctcccttccctttcctttagtgccatccctcctgatgttca

SEQ ID NO: 19842 - DNA, 201 bp, Homo sapiens
gtgcacaccatcatgcccagctaattttttattttttgtaaagatgaggtctccctatgttgcccagtctggtctgaaagccctagactcaagcaatcctsctgccacagactcccaaagtgctgggattacacaggcatgagccaccatgcccagttgagtttcttaatttatgaatcaagtacacttaaatgctttaga

SEQ ID NO: 19843 - DNA, 201 bp, Homo sapiens
cctcttagaagttgcctaaatgtgtctttggctctagcacttgcccagaaagaactttacagaaagggcccatccttgggttgacgcagagttcttctgascttcagtgagaagctcttgtctgcagttctgagggaagccctgggggcacagcgaggggcctcccttccctttcctttagtgccatccctcctgatgttc

SEQ ID NO: 19844 - DNA, 201 bp, Homo sapiens
cttgcctcttagaagttgcctaaatgtgtctttggctctagcacttgcccagaaagaactttacagaaagggcccatccttgggttgacgcagagttcttytgagcttcagtgagaagctcttgtctgcagttctgagggaagccctgggggcacagcgaggggcctcccttccctttcctttagtgccatccctcctgat

SEQ ID NO: 19845 - DNA, 201 bp, Homo sapiens
tcttgcctcttagaagttgcctaaatgtgtctttggctctagcacttgcccagaaagaactttacagaaagggcccatccttgggttgacgcagagttctkctgagcttcagtgagaagctcttgtctgcagttctgagggaagccctgggggcacagcgaggggcctcccttccctttcctttagtgccatccctcctga

SEQ ID NO: 19846 - DNA, 201 bp, Homo sapiens
taactcaagggtctgttgtgaggattaaatgagtccttacatgtgacatacttgaaatagtacctggtgcagagttagggctgggtgagtgttagctattrtattattatttcattgctgtttgcatatatttttaaaatgtatttaggattttctttttttttttgagacagggtctcactctttgcccaggccggagtg

SEQ ID NO: 19847 - DNA, 201 bp, Homo sapiens
cccttatattcagttcatatgactatgttggtaatgtcagtcagaaacctatttttacaactttccttcactttaaaaatagaaaataatttgtaaatcayttattaccactttcacagatcccaacaactctagagacataaatagttagatctgttaaaaggtacatgacttcccttatgtttgcaagtattaatttta

SEQ ID NO: 19848 - DNA, 201 bp, Homo sapiens
tttgtttttccactctggtcactcagttctagccaagatagtccaccttattttagcacttgtactatgtctctgtctctgtctgtctgtctgtctgtctstctctctctctctctctctctctctctatatatatatatatatatgtaattttgagatggagtctcactctgtcgctctgactgaagtacagtggtgcga

SEQ ID NO: 19849 - DNA, 201 bp, Homo sapiens
ttagtgttcctctccaaagctgtatagttctgcgttaccttgcagtatgataaatctgatatcaactaataaaagatgtagatgattttgtatttaggagractgcttttgagagcaaaatgaaggcttgggatatgtagagcaaactgcctatcggctgcaggggacactgtattcagcaaatttgcttcatctgaaaca

SEQ ID NO: 19850 - DNA, 201 bp, Homo sapiens
gcagtagtgaggctgttgtgaattgttcctaaatttatgctaggtgctcttacctcaatttggatgccattatttgtttattgcaaatacagggtacaatraaaagcagtaagtgcgcatggagtaaatttgcattaaatgaagaaggaatcaattatagagtctctagaaatacatatttatttgccaacctcattcagt

SEQ ID NO: 19851 - DNA, 201 bp, Homo sapiens
ccagctcactcaagcatggctggtgcaagtttatccctgagagaagatccaactcatcttccccttttgttcatatctggaaggcacgggacatcaccggyacccattttagcctctgcgttctgtagcttggacaggcattatcttgatgtcactgtgggacactctcagctcctctgatcctgtatagcatctccagta

SEQ ID NO: 19852 - DNA, 201 bp, Homo sapiens
aatggatattataaataatggtctccaatattgactcttttgagtaattctatcagggacatgttgaaattccaatgaccattttttttttttttttttttgccttagaggcatcttttgtacataatgtatttctttttttttttttttccctcaagacagggcctcactctgccacccagattggagtgcagtgacacc

SEQ ID NO: 19853 - DNA, 201 bp, Homo sapiens
taatggatattataaataatggtctccaatattgactcttttgagtaattctatcagggacatgttgaaattccaatgaccattttttttttttttttttttgccttagaggcatcttttgtacataatgtatttctttttttttttttttccctcaagacagggcctcactctgccacccagattggagtgcagtgacac

SEQ ID NO: 19854 - DNA, 201 bp, Homo sapiens
ataatggatattataaataatggtctccaatattgactcttttgagtaattctatcagggacatgttgaaattccaatgaccattttttttttttttttttttgccttagaggcatcttttgtacataatgtatttctttttttttttttttccctcaagacagggcctcactctgccacccagattggagtgcagtgaca

SEQ ID NO: 19855 - DNA, 201 bp, Homo sapiens
cgatggtctatgggcaccccttgtgatctctgctttaaatcatttgatgtctgaattggtggaagggacacgggagcacacaccagcctggggagcccacyagagtacagaatgcaaactacagggacacatgcctttgagcaggtagtagatagccagggcctgtcaagttattaggtgtcccaggccaggtaataactc

SEQ ID NO: 19856 - DNA, 201 bp, Homo sapiens
tagcatctaatatcatgatgactttattttactttttctactttattttttcattctccatagttctttattcagcaaatgcacattgaacagcagaattstgttttaaacaccatgaaggaacactgaagcactatgaggagcaatgaggtggataaaaaagtacttactttctctaaggagattacagtgtacttgtgg

SEQ ID NO: 19857 - DNA, 201 bp, Homo sapiens
atcttgcctcttagaagttgcctaaatgtgtctttggctctagcacttgcccagaaagaactttacagaaagggcccatccttgggttgacgcagagttcktctgagcttcagtgagaagctcttgtctgcagttctgagggaagccctgggggcacagcgaggggcctcccttccctttcctttagtgccatccctcctg

SEQ ID NO: 19858 - DNA, 201 bp, Homo sapiens
ctctttgggagtacgtttatttgggtagcagccagggagactgaaacagttgaactgcccttcacaaaggctgagaaagatcgaattaccattacacttcrgggggctggagatggtacctgggtgaatgaccatgtgaagaaaggcggggtggcttccaagatggaagtgatggctggggaacttggcttgagctgggat

SEQ ID NO: 19859 - DNA, 201 bp, Homo sapiens
gtagatggaaaaggaacagccagtgctcacttacaggtgatttttgtgctctgtgaaggtgggcccagtgttgcctgaattatttatttatttttatttayttatttttagacggagtcttgctctgtcgcccaggctggagtgcagtggcgcgatctcggctcactgcaacctctgcttcctgggttcacgccattctcc

SEQ ID NO: 19860 - DNA, 201 bp, Homo sapiens
gtttacctaattaaaatgtctgtcttcatcaatagctgcctttttcgtcccatcatgaagcccattgtcaatcttgcctcttagaagttgcctaaatgtgkctttggctctagcacttgcccagaaagaactttacagaaagggcccatccttgggttgacgcagagttcttctgagcttcagtgagaagctcttgtctgc

SEQ ID NO: 19861 - DNA, 201 bp, Homo sapiens
ttggtcaggcactgtggctcacggctgtaatcccagctctttgggaggccaaggtgggaggaatgcttgagcccagggattggagaccagtctggtcgacmtaggaaaacctcatctccactaagaataaataaataaataaatactactactaattagctgagtgtggtggcatgggcctgtagttccagctagtggtgg

SEQ ID NO: 19862 - DNA, 201 bp, Homo sapiens
gccaccatgcccagctaaattttttttttttgtatttttagtagagacagggtttcactgtgttagccagtatggtcttgatctcctgacctcatgatccrcccaccccagcctcccaaagtgctgggattacaggcgcgagtcactgcgcccggcccaactttacagtatttaagcaggcctgaaagaaaccatgacaca

SEQ ID NO: 19863 - DNA, 201 bp, Homo sapiens
gggcctcactcagtatctcatcacatgaatctctctgctgggctgcctcatcacacaacagctgtcttccccagagcaagcagtttgagaaaaggggtgcrcccaagatggaagctgcagtcttttttgtaacctaatcccagaagagtcattactttcaccctgttctctttaacagaagcgagtcactcaatccagctc

SEQ ID NO: 19864 - DNA, 201 bp, Homo sapiens
agctctttgggaggccaaggtgggaggaatgcttgagcccagggattggagaccagtctggtcgacataggaaaacctcatctccactaagaataaataamtaaataaatactactactaattagctgagtgtggtggcatgggcctgtagttccagctagtggtggggctgaggcagtaagatcccttgagcccaggagg

SEQ ID NO: 19865 - DNA, 201 bp, Homo sapiens
agtgcagtggaagcaatcctggctcactgcaagctctgcctcccgggttcacgccattctcctgcctcagcctcctgagtagctgggactacaggcacccrccaccatgcccagctaaattttttttttttgtatttttagtagagacagggtttcactgtgttagccagtatggtcttgatctcctgacctcatgatcca

SEQ ID NO: 19866 - DNA, 201 bp, Homo sapiens
gcatctccccgaaccaataatagaagcttctgactccttcgcccacccttctgacttcttcttgcttctcccatggaagcaggtgtgggaaccgctgagcrgaacaccctcccccagcgggaaatccgggacacgcaggagcctcagtgaatccgaccattgtctcatctcaccaggcaggtgcctcctccatcctatgtg

SEQ ID NO: 19867 - DNA, 201 bp, Homo sapiens
gaggccaaggtgggaggaatgcttgagcccagggattggagaccagtctggtcgacataggaaaacctcatctccactaagaataaataaataaataaatactactactaattagctgagtgtggtggcatgggcctgtagttccagctagtggtggggctgaggcagtaagatcccttgagcccaggaggtcgaggctgc

SEQ ID NO: 19868 - DNA, 201 bp, Homo sapiens
aggtggtgggctggatttgctccggaggacatactatttttttttttttgagacagaggctcgctctgtcgcccaggctggagtgcaatggtgcgatctcrgctcactgcaagctctgcctcccgggttcacgccattctcctgcctcagcctcccaagtagctgggactacaggcacccgccaccatgcctggctaattt

SEQ ID NO: 19869 - DNA, 201 bp, Homo sapiens
taacatgccatcgtataggtcggaagtggaaatgggagaaagtgtggggtgcctagggaaggaggtgactgagtagggagcctggctgccatcctaacacmcagctcactgggcttgagagacttgagcctggtgccagggcagagtgggtgatgctggggcccaggctggcaccatacttgaggtctgccaggcaggtca

SEQ ID NO: 19870 - DNA, 201 bp, Homo sapiens
aggccaaggtgggaggaatgcttgagcccagggattggagaccagtctggtcgacataggaaaacctcatctccactaagaataaataaataaataaatamtactactaattagctgagtgtggtggcatgggcctgtagttccagctagtggtggggctgaggcagtaagatcccttgagcccaggaggtcgaggctgca

SEQ ID NO: 19871 - DNA, 201 bp, Homo sapiens
agatcacctgaggtctggagttcgagaccagcctgaccaacatagagaaaccccatctctactaaaaatacaaaattagccgggcgtggtggcacatgcckgtaatcccagctactagggaggctgaggcaggagaatcgcttgaacctgggaggcagagattgcagtgagccgagatcatgccattgcactccagcctgg

SEQ ID NO: 19872 - DNA, 201 bp, Homo sapiens
caccttggactgcagtgggcagggcctggggtggggatgagggtgcactgaccagcaccgcagcagcttggggaggttggggtgctgttaacatgccatcktataggtcggaagtggaaatgggagaaagtgtggggtgcctagggaaggaggtgactgagtagggagcctggctgccatcctaacacccagctcactggg

SEQ ID NO: 19873 - DNA, 201 bp, Homo sapiens
cctgctggcgattggctccagagaggaaggggtggaggcagccccggcctggcagctgcggtagcggctttgagtgagtgcgggagctgcagataccgagrcgctgcgactgccgcaggagtcgccgcagccaaactcgccgcgacgccgggagggagcgtaccgggaaggagagggagaggaggcactcgctgaggagac

SEQ ID NO: 19874 - DNA, 201 bp, Homo sapiens
gtggctcatgcctgtaatcccagcacttggggaggccgaggcgggcagatcacctgaggtctggagttcgagaccagcctgaccaacatagagaaaccccrtctctactaaaaatacaaaattagccgggcgtggtggcacatgcctgtaatcccagctactagggaggctgaggcaggagaatcgcttgaacctgggagg

SEQ ID NO: 19875 - DNA, 201 bp, Homo sapiens
atgacaactattaaaaaaaataagggatttctgaccagctaacaaccccacagaaaatctgccagggatccagaaatgagactgaggtggcctcagagagyggctccctcctgaaggggatgctgctgctgtcatcctgcccggcaccttggactgcagtgggcagggcctggggtggggatgagggtgcactgaccagca

SEQ ID NO: 19876 - DNA, 201 bp, Homo sapiens
cccttagctatgctgtcccttcccccagaggaccttgggcaggaacccgcctaccgccgagcttgtcctggaggtcacttctcagaaaattcagaaagtamaggtagaattctctttttctctctaacttttgttaggatttgaaaagaccagttttctagctactgaagcttaagcggcttcgctaaattcctgctttgg

SEQ ID NO: 19877 - DNA, 201 bp, Homo sapiens
gtctccacacagaactgggacagttccatccccgccccttcctccagggcagcagggctgaggatcccattctggctgtgtccacgtccgggccatggctrgagtctgggtttaggggaggaaggcatggcggcgcccgctaggatttccagttgtcctcttcttcctctgcctgtggctgctgggggttagcagacacgg

SEQ ID NO: 19878 - DNA, 201 bp, Homo sapiens
aaagggagttgtggcagtctacaaatcatttctgtaaggtagctctgctttttctcttttccattctttttttttttttttttttgagacgcagttttgckcttgtcccgcaggctggagtgcagtggcgcaatctcggctcactgcaacctctgcctcctggcttcaagattctcctgtctcagcctcccgagtagctgg

SEQ ID NO: 19879 - DNA, 201 bp, Homo sapiens
cgatggagcacaggcagatggaagcccccaccccagctgcgtggcctgaagccagcctcccgctccccgaaggtggtctccacacagaactgggacagttycatccccgccccttcctccagggcagcagggctgaggatcccattctggctgtgtccacgtccgggccatggctggagtctgggtttaggggaggaaggc

SEQ ID NO: 19880 - DNA, 201 bp, Homo sapiens
tggaagcctctttagggaatcgaggagcgcactggtgcaggggctgggtggagccatcctccgatggagcacaggcagatggaagcccccaccccagctgygtggcctgaagccagcctcccgctccccgaaggtggtctccacacagaactgggacagttccatccccgccccttcctccagggcagcagggctgaggat

SEQ ID NO: 19881 - DNA, 201 bp, Homo sapiens
agattttggtgattataactagagcttctataagcattcatgtacacttacgttttcgtgaagttttcatttttctagagtaaatacttaagagagtgggratactaggtcatatggtaagtgtatggttaagttttccagagcagctgtaccattttgctttcccactagcaatgtgtaaaagttcctgttgcccctatt

SEQ ID NO: 19882 - DNA, 201 bp, Homo sapiens
tctaaatctctgagatggctgtgttttagagctgcatgttctgcttatttactgcctgtcctttacatttcaaattcattcaatatttttccaaagtacasaatagttttgcctagttgcagtaattttcacctagacttcagggatcttccatcaactcttttatgtattttttctcctttgtttttccactctggtcac

SEQ ID NO: 19883 - DNA, 201 bp, Homo sapiens
aattaagtctataaaattgaggtgttgcaatacataatgtctatgatttttttttaccagctctaaatctctgagatggctgtgttttagagctgcatgtkctgcttatttactgcctgtcctttacatttcaaattcattcaatatttttccaaagtacagaatagttttgcctagttgcagtaattttcacctagactt

SEQ ID NO: 19884 - DNA, 201 bp, Homo sapiens
acccaaagtcatacaaatggtcagtggcagattttggaccagaagttaagcatttctaattccatgaaattgtcgtaatattatgactcccacctaaacawaacttattaattaattgattgattgataaattttcacctttctgcaatacggagcttctatctagacaggccagtcattttacctggtgctaaaataaac

SEQ ID NO: 19885 - DNA, 201 bp, Homo sapiens
gcagggtctttatgacctctatcttgtcctgctgacctatcttgtcctgtgactaagaatgcttaacctcctgggaatgcagcccagtaggtgttagcctyattttacccagaccttattcaagatggagtccctctggttccaatgcgtctgacaatactgctgccctgaggtgcctggtgctgattagaccgcgatcaa

SEQ ID NO: 19886 - DNA, 201 bp, Homo sapiens
aggaggcggaggttgcagtgagccgagatcacgccactgcactgcagcctgggtgacacagtgagactccgatccacctcaaaaaaaaaaaaaaaaaaaaagaggctgggcatggtggctcatgcctgtaatcccagcacttggggaggccgaggcgggcagatcacctgaggtctggagttcgagaccagcctgaccaac

SEQ ID NO: 19887 - DNA, 201 bp, Homo sapiens
ctaaaaatataaaaaagaaattagccgggcgtggtgacaggtgcctgtagtcctagctactcaggaggctgaggcaggagaatcgcttgaacccaggaggyggaggttgcagtgagccgagatcacgccactgcactgcagcctgggtgacacagtgagactccgatccacctcaaaaaaaaaaaaaaaaaaaaagaggct

SEQ ID NO: 19888 - DNA, 201 bp, Homo sapiens
atttcctccaatgtcaggtaataatatataagaatatcaccctgggtgcaatggctgatgcctggaatcccagcactttgggaggccgaggtgggcggatygcgaggtcaggagttcgagatcagtctggccaacatagtgaaaccctgtctctactaaaaatataaaaaagaaattagccgggcgtggtgacaggtgcct

SEQ ID NO: 19889 - DNA, 201 bp, Homo sapiens
atgtatcaccacgcctggctaattttttatatttttagtagagatggggtttcaacgtgttagccaggatggtctcgatctcctgacctcatgatctgccsgcctcagcctcccaaagtgctgagattataggtgtgagccaccacgcctgacctaagaagggtattttcttgtggtcctttttttggttattgatgaaac

SEQ ID NO: 19890 - DNA, 201 bp, Homo sapiens
tttttttttttttttttgagagacggagtctcgctctgtcaccaggctggagggcagtggcgcgatcttggctcactgcaacctctgcctcctgggttcargcgattctcctgcctcagcctcccgagtagctgggactacatgcatgtatcaccacgcctggctaattttttatatttttagtagagatggggtttcaac

SEQ ID NO: 19891 - DNA, 201 bp, Homo sapiens
tttgtaaagatgcttctcgaatactttttaaaataagaaggggttttttttttttttttttttttgagagacggagtctcgctctgtcaccaggctggagkgcagtggcgcgatcttggctcactgcaacctctgcctcctgggttcaggcgattctcctgcctcagcctcccgagtagctgggactacatgcatgtatca

SEQ ID NO: 19892 - DNA, 201 bp, Homo sapiens
aaaacccaaggccaaaacttccgtcccctgaaaggctcttagtcccctaggctttcgggttcctggcaatgactttgcctcttgggcagcatggtcttacragttagttacttgtgtttaagttttgggttcttttttttttttgcttgcctttgggcacctcctttattttgttatgagctcagccatgcatttgttgta

SEQ ID NO: 19893 - DNA, 201 bp, Homo sapiens
gacttagaaaaatacatttgtaaagatgcttctcgaatactttttaaaataagaaggggttttttttttttttttttttttgagagacggagtctcgctcygtcaccaggctggagggcagtggcgcgatcttggctcactgcaacctctgcctcctgggttcaggcgattctcctgcctcagcctcccgagtagctggga

SEQ ID NO: 19894 - DNA, 201 bp, Homo sapiens
tgggataagtgagctcacagtggagaaatgtagacttagaaaaatacatttgtaaagatgcttctcgaatactttttaaaataagaaggggtttttttttkttttttttttttgagagacggagtctcgctctgtcaccaggctggagggcagtggcgcgatcttggctcactgcaacctctgcctcctgggttcaggcga

SEQ ID NO: 19895 - DNA, 201 bp, Homo sapiens
aaactgaaatggcataaactctgtgtgtgtgtgtgtgtgtgtgtgtgtatgtatgtgtgtgtgtgtaggggtggagagagtgagaaagagaaaacaagtayggtgaaatgttcacaaactggtgaatcaggccaagggtctacgggagttctctgtgtaattcttgcacttttaaaaattatttaaaactaaaaactaagc

SEQ ID NO: 19896 - DNA, 201 bp, Homo sapiens
agagtcttgctgtgttgcccaggctggagtgcagtggcatgatctcagctcactgcaacctccacctcctggttcaagcaattctcctgcctcagcctccsgagtagctgggattacaggcatgagccaccacacccagctaatttttgtattttcagtaaagacagggttgtaccatgttggccaagctggtcttgaact

SEQ ID NO: 19897 - DNA, 201 bp, Homo sapiens
agagacagtctcactttgctcccaggctggaatgcagtggctattcagaggcttaatcattgggcactgcagccttgaactctgggcttttttttttttttgagatggagtctcagctctgtcgtccaggctggagtgcagtgactcatgtctcggctcactgtagcctccacctcccccaatcaagcgattgtcctgtct

SEQ ID NO: 19898 - DNA, 201 bp, Homo sapiens
attgatagatataagggttaagagggaaaagaaaaaaaatccagaagagaaaaatccatgtagtggcacaattaaaatttgatttcttttttttttttttkgcgacagagtcttgctgtgttgcccaggctggagtgcagtggcatgatctcagctcactgcaacctccacctcctggttcaagcaattctcctgcctcag

SEQ ID NO: 19899 - DNA, 201 bp, Homo sapiens
ctcagcctcctgagtagctgggactataggtgcctgccaccatgcctggctaatttttttttttttgcatttttagtagagatggggtttcaccgtgttaktcaggatggtctcaatctcctgacctcgtgatctgcccgtcttggcctcccaaagtgctaggattacaggcatgagccaccgcgcctggctgaaaacctt

SEQ ID NO: 19900 - DNA, 201 bp, Homo sapiens
actgcactctcgcctggcctgtctcaaaaacaaaacagaaaccggcaaaactcagtcttgttgttttcttttttctttctttcttttttttttttttttttggtagagacaggatcttgctatgttgtccaggctggtcttaaacatctggcctcctcaacctccccaagtgctggtattacagacatgagcctctgagcc

SEQ ID NO: 19901 - DNA, 201 bp, Homo sapiens
tccagttgcggcttttgacccccagatgcaaattctggtgggagagagctgacctgtggccccacagtgatccttactgggcaatctactggccaggaggccaagccctgtctaggtactaccctaatgaaacctttaaggcgctacagatctttgctgttttcagttccctccaacctctacaaaaaaccagagcaatgc

SEQ ID NO: 19902 - DNA, 201 bp, Homo sapiens
ttatgaaagaactttaaaggtacagttggcccacaatataacaatatagcaatataaaattacaacaataaaaataacacaaaaatagtgtaacaactacttatatagcatttacgttgtattaagtattatgagtcatccagagatgatttaaagtaaagtataccacagcatatgcctagtttatatacaaatatgatg

SEQ ID NO: 19903 - DNA, 201 bp, Homo sapiens
aaaccgtaacaagtccgtggggtttccatggttggagcacatgctaaaattctctctctctcttttattctcagggaaagtttcaaatggaagacttagtrtataatccggaacaagtgccacgttactaccaaaatgcctacctgcacctgcgacccttctacagcacaacccgcagcttccttggcatccaccggctaa

SEQ ID NO: 19904 - DNA, 201 bp, Homo sapiens
tttatgaaagaactttaaaggtacagttggcccacaatataacaatatagcaatataaaattacaacaataaaaataacacaaaaatagtgtaacaactacttatatagcatttacgttgtattaagtattatgagtcatccagagatgatttaaagtaaagtataccacagcatatgcctagtttatatacaaatatgat

SEQ ID NO: 19905 - DNA, 201 bp, Homo sapiens
atttatgaaagaactttaaaggtacagttggcccacaatataacaatatagcaatataaaattacaacaataaaaataacacaaaaatagtgtaacaactacttatatagcatttacgttgtattaagtattatgagtcatccagagatgatttaaagtaaagtataccacagcatatgcctagtttatatacaaatatga

SEQ ID NO: 19906 - DNA, 201 bp, Homo sapiens
tatgaattattagaaaagaaaggacattcattatgatttaatcgcagttgaatgtaggcagcacagagggcttatactgtgtcttttttttttttttttttaaatatacggtgtctattttgctcaccactctatgcccggtgcctggaagtgcgactggcacatagtaggtgttgcatagtttcagaatgaactttttag

SEQ ID NO: 19907 - DNA, 201 bp, Homo sapiens
ctaactttcaatttaataaaaaaaattaatttgtgcaattggttgttattttatagaagcctaatttctagaatatgggatataaacaatttaataatgtkttcaccagttagtttgattgctttctaaattaggaaaaatgaaaacaaataaacgatgggcaaaaaagctgactggggacagtaaggtctaagaaggcag

SEQ ID NO: 19908 - DNA, 201 bp, Homo sapiens
ctccacctccccagttcaagtgattttcctgcctcagcctcccgagtagctgagattataggcgcccaccaccatgcctggctaatttttgtatttttggkagagacagggtttcgccatgttgactaggctggtctcgagctcctacggatcggcctcccaaagtgctgggattacaggtgtgagccgctgcaccagccc

SEQ ID NO: 19909 - DNA, 201 bp, Homo sapiens
caaattccaagttaaagtggaacttgccacatgtcgttttgtatcactttccccaacccctttcttttcttttttttttttttttttgagacggaatttcrctcttgttgcccaggctggagtgcaatgttatgctctcagctcactgcagcctccacctccccagttcaagtgattttcctgcctcagcctcccgagtag

SEQ ID NO: 19910 - DNA, 201 bp, Homo sapiens
agcctccctaggagctgcagctacaggcacatgccaccatgcccagctaattctttatttattttattttattttttgagtcaaggtctcactgtgccacycaggctggagtgcagtggcatgatcaaggctcactgcagcctccacctcctgggtgcaaatgatcctcccacctctcagctccctgagtaccgggaccac

SEQ ID NO: 19911 - DNA, 201 bp, Homo sapiens
tttggcctcccaaagtgctaggattacaggctaactttcaatttaataaaaaaaattaatttgtgcaattggttgttattttatagaagcctaatttctakaatatgggatataaacaatttaataatgttttcaccagttagtttgattgctttctaaattaggaaaaatgaaaacaaataaacgatgggcaaaaaagct

SEQ ID NO: 19912 - DNA, 201 bp, Homo sapiens
actcacccaagggtctcacagatgcctttcctgttttctttgccccatttttcttttttctgctttgcttttacatactttctcttcttttgaacacatcygtccttctgcattcagcctcccaccatcatctgatatctcaaaagaagagacagccgtctccttcctcacagctgagtagcactgagaagtagttaaggg

SEQ ID NO: 19913 - DNA, 201 bp, Homo sapiens
ctattggctctttcgaggacactgagaggctcttttctttctctactctgggaagaaagaaggtagggccacataatctttaaataaagagactctaagcmagaagttttgtaggtgttaccttttctcctccctcagcatagtctgactttgggaagggcaaattcaaatcgtgagcagcactggtcacagtctaccagt

SEQ ID NO: 19914 - DNA, 201 bp, Homo sapiens
tcatgaaaagattggcataatacgtaggcatgttttcttaattattataaatagaaaagtatgattgcagtcatggaaaatattcattaaaattagaggamacttacaatgttagtgacattacaatgttaatggcagttggtcaaattaataataggtaatgtcttgtgtttttctctatatttttcaaattttctacag

SEQ ID NO: 19915 - DNA, 201 bp, Homo sapiens
tttcaacattaaaccatgtctaactcttttagcataggccccaattgagaactgctctgttttctgtcctaagccttacttagatcttttcattgcaattmgacaaaaatatcagagtattaagagtcagagaccaatcaacaggatgttctctgttccttcgtttcccaccaaatacagcactatgcacgaaggtggcat

SEQ ID NO: 19916 - DNA, 201 bp, Homo sapiens
ttttcttgtgaaggtaaatctctgaataaatactcacttagcacatacatccacttggaattcatcatctgaaatagttactgtttgtggtgcattgaccrtaacttcaaacttgggcagcactggaaacgaagagaaatatacgttagcctgcacaatcacaggcaagcaaaccttattgcagtcatatagcttactatg

SEQ ID NO: 19917 - DNA, 201 bp, Homo sapiens
tagcccaataaaataaattaatgaaaatgaagtaaatttctaagtgaaaaagctaaaaataacaacaaaatacagcaccagtaaggaaataataaagataraaatagaaattaatgtgatggagtagcaaaaaacctcacatcatattacatcacattaataaattaaaattatatgtttttggaaaactcggcaaaatag

SEQ ID NO: 19918 - DNA, 201 bp, Homo sapiens
aaacacctagcccaataaaataaattaatgaaaatgaagtaaatttctaagtgaaaaagctaaaaataacaacaaaatacagcaccagtaaggaaataatraagataaaaatagaaattaatgtgatggagtagcaaaaaacctcacatcatattacatcacattaataaattaaaattatatgtttttggaaaactcggc

SEQ ID NO: 19919 - DNA, 201 bp, Homo sapiens
gacacctctattctggtctaaacgctgttgccacctctcagttcagatcaacagcctatgtgccaggtgctgtgctaggttggacagacacaagaatccayagggcatgattcttgtcctctgtaaacttagaagccagcccagatgtatgcttttacctcactcccttcctgagttggtatctacatgatacactgattg

SEQ ID NO: 19920 - DNA, 201 bp, Homo sapiens
tttctgtaaattgctttcaaatcgtagaggggaatggattatgaagtataaatcaagaagagcaaaattataagaaaaagaggccgggcgtggtggttcaygcccgtaatcccagcactttgggaggccgaggcgggtggatcacctgaggtcaggagtttgagaccagtctggccaacatgatgaaaccccgtctctact

SEQ ID NO: 19921 - DNA, 201 bp, Homo sapiens
aacaagtgcccagacgatcctgatgtacaaccaggtttataagcttctgtgcatttccaaacatgggtaaaccccactttggtcctgaggacaggttgccragatttgcaggaataagacaaggaatgctatagattgtccctcaatacataatctgggccctctgcactttctggcatactttttgctcatttctgtttg

SEQ ID NO: 19922 - DNA, 201 bp, Homo sapiens
ggtctccctacaatcactggtctctcactcccttaaaattttttctgtaaattgctttcaaatcgtagaggggaatggattatgaagtataaatcaagaaragcaaaattataagaaaaagaggccgggcgtggtggttcatgcccgtaatcccagcactttgggaggccgaggcgggtggatcacctgaggtcaggagtt

SEQ ID NO: 19923 - DNA, 201 bp, Homo sapiens
tagcttcaagtgatccacctgcctcgacctcaccatcctagactttaaaccttgaaattttctagagctgcctcccagtgactttaacttactgtgtggayctgccttgctgccctcacttcttcatcttctcaccccgtcctcaccacttccttgtcttcttttggactggcttgtgtttacaacattggattagcagtt

SEQ ID NO: 19924 - DNA, 201 bp, Homo sapiens
agtagagacggggtttcaccatgttggccaggttggtctcaaactcctgacctcaggtgatccacctaccttgacctcccaaagtgctgggattacaggcrtgagccacagcgcccggcctttctcgtttcttaaaataattttataatgttccgttcaatggatgcatgataatgtgttccccaaatagcaaacgtttag

SEQ ID NO: 19925 - DNA, 201 bp, Homo sapiens
attcagcacctattttcagcccttcttaatttttctgtgacatttgtacctttttaaagctcttttcttggttctgatgacctgagatatcttgattttcytacctcattggttcttcaactttcttcctctggctttgccattttctcctttctcctcgtcttcattgggggtcccatctgccctctgggaaggttcagc

SEQ ID NO: 19926 - DNA, 201 bp, Homo sapiens
tagtagagacggggtttcaccatgttggccaggttggtctcaaactcctgacctcaggtgatccacctaccttgacctcccaaagtgctgggattacaggyatgagccacagcgcccggcctttctcgtttcttaaaataattttataatgttccgttcaatggatgcatgataatgtgttccccaaatagcaaacgttta

SEQ ID NO: 19927 - DNA, 201 bp, Homo sapiens
agtttctcctcattctttttttctgtttttgagatggagtcttgctctgttgcccaggctggagtgaagtggcctgatctcggctcactgcaacctccgcmtcccaggttcaagtgactctcctgcctcagcctcccaagtagctaggattacaggcgcccaccaccacgcctggctaattttttttttttttggtatttt

SEQ ID NO: 19928 - DNA, 201 bp, Homo sapiens
aatctatgacttgctttttacatttaataatatattgtgactacatttccattttagtacaataaagtttctcctcattctttttttctgtttttgagatrgagtcttgctctgttgcccaggctggagtgaagtggcctgatctcggctcactgcaacctccgcatcccaggttcaagtgactctcctgcctcagcctcc

SEQ ID NO: 19929 - DNA, 201 bp, Homo sapiens
ttcagtgaaagggttaatacaaacagaaattacggaatttctgaaaaataaaaatggtgcaattgctatgtatcaggatctatgagatacttcaaaagtasaaatcatggaaaaacttataggcttaaaaacacctagcccaataaaataaattaatgaaaatgaagtaaatttctaagtgaaaaagctaaaaataacaac

SEQ ID NO: 19930 - DNA, 201 bp, Homo sapiens
tgctgggattacaggcgtaagccaccgcacccagccccagagtctgttgtttatagaggatgattgggcgtagctttctagagctgggaaaaccacctttmaacagtattatataccaatatttactatttcataaattcaggcatatttgcttaaaataatctcctgtagagaggcaagaaacagaagcccatttttttg

SEQ ID NO: 19931 - DNA, 201 bp, Homo sapiens
ttaaaagaaaactctaaaataaattcctttttatatgaaaattataaagtactccagtaagtaaattttcagtgaaagggttaatacaaacagaaattacrgaatttctgaaaaataaaaatggtgcaattgctatgtatcaggatctatgagatacttcaaaagtagaaatcatggaaaaacttataggcttaaaaacac

SEQ ID NO: 19932 - DNA, 201 bp, Homo sapiens
tggtgcgatctcagctcactgcaacttctgcttcccaggttcaagtgattctcctgcttcagcctcccaagtagctaggactacaggcgcgtgccaccacrcccagctaatttttgtattcttagtagagacagggtttcaccatgttggccaggatggtttgatctctcgaacttgtgatccgcccaccttggcctccca

SEQ ID NO: 19933 - DNA, 201 bp, Homo sapiens
aggatgtttctcagcacctgtggacatggccacctttgacctcattggatatgcgtacagccatcaaatcaatattgtggctactgttgtggaggaagggwcaggtaagtagggtgctccttggctcattaagaaaagagaaagaaaaagggctggtcccagggacagatttactccaagtatacaagacctaccctcttg

SEQ ID NO: 19934 - DNA, 201 bp, Homo sapiens
agccaggtgtggtagcaggcacctgtaatcccagctacttgggagactgaggcacaagaatcacttgaacctgggaggcggaggttgcagtgagccaagaycatgccactgtactccagcctgggtgacagagcaagactctttcaaaaaaaaaaaaaattatagtaattttaacatgttcggtgttttctgtaattttgt

SEQ ID NO: 19935 - DNA, 201 bp, Homo sapiens
tccccttttgttcatatctggaaggcacgggacatcaccggtacccattttagcctctgcgttctgtagcttggacaggcattatcttgatgtcactgtgkgacactctcagctcctctgatcctgtatagcatctccagtaaacaactaaaagtgctttgtggagcagggattgccaagaggcaaatcaagagtgttcct

SEQ ID NO: 19936 - DNA, 201 bp, Homo sapiens
ctgggctcaagcaatcctcatgcctcagcccccaagtagctgggactacaggtgcacaccgccatgcctgactaatttttgtattttttttgtagacacasggttttgccatgtaagccaggttggtctagaactcttgagctaaggacagtccgcctgttttggcctcccaaagtgctaggattacaggctaactttcaa

SEQ ID NO: 19937 - DNA, 201 bp, Homo sapiens
agtgaaagagagacagaaagacaaagtcaaggagagaaaaagagatggaagtagtaaagaaaaaacagtgtaccctattcctttaaaagccggggtaaacktctatctacccagccaaggcatattctacttatgtggatcttcaacccatatctgcctctcagacagtttgcaagaaataacgaaatctatccttacttt

SEQ ID NO: 19938 - DNA, 201 bp, Homo sapiens
gagtgaaagagagacagaaagacaaagtcaaggagagaaaaagagatggaagtagtaaagaaaaaacagtgtaccctattcctttaaaagccggggtaaaygtctatctacccagccaaggcatattctacttatgtggatcttcaacccatatctgcctctcagacagtttgcaagaaataacgaaatctatccttactt

SEQ ID NO: 19939 - DNA, 201 bp, Homo sapiens
tgatgaatgccacttaaattacctagattcatctttaagcagaattgttttcccttcagatgcttagaaagattgttagtttcttttatatctttaagttstaaatcacaaaatcatatggcaagaaaaaccccagatttcttttccaatctatgaataaacataaagagacagttaatacttaattgatctatctgaact

SEQ ID NO: 19940 - DNA, 201 bp, Homo sapiens
agcagtcagagtgaaagagagacagaaagacaaagtcaaggagagaaaaagagatggaagtagtaaagaaaaaacagtgtaccctattcctttaaaagccrgggtaaacgtctatctacccagccaaggcatattctacttatgtggatcttcaacccatatctgcctctcagacagtttgcaagaaataacgaaatctat

SEQ ID NO: 19941 - DNA, 201 bp, Homo sapiens
aaataccacaaggaaattatagagttattgcacacaatgcaaaaacacaaagaggtgggaatcttacactgacaaagccatcaaaatgggaaggagagggragaacagcaacataagcagctggcagaggcagcagaaaggaaggaagagacaggaagtcaaagaaagagacagagagtaagaaacaaagagaagcagtca

SEQ ID NO: 19942 - DNA, 201 bp, Homo sapiens
ctccatgggctcctgtgcagcccgagtctcctcgacgagggccaccccctgctccacggcacccagtcccatcgaccacccaagggctgaggagtgcgggygcacgcaggggactggcaggcagctccacctgcagccccggtgcgggattcaccgggtgaagccagctgggctcctgaatctggtggggctttggagaac

SEQ ID NO: 19943 - DNA, 201 bp, Homo sapiens
gtattgcaagctcacatgtttcctgttacgttcttccaattagattgcccttctgtggttacttattatctctaaaattctgtttaattagtcttctaacktacagtcttctcatttcttatttatttttcttcaagttatccattatctgtcatcttggctgtcacagaggtttcttttggtctcattctattggactgc

SEQ ID NO: 19944 - DNA, 201 bp, Homo sapiens
agaaagaaaggaaggaagaaaggaaggaaagaaggaaggaaggaaggaaagaaggaaggaaagaaggaaggaaggaaggaaggaaggaaggaaggaaggamggaacggaaggaaggaaggaaagaaaaaagaaagcaaaacaacgtgcagaacctttgaaggagcctgtgcatatgaagagccctgaagcttcattagcca

SEQ ID NO: 19945 - DNA, 201 bp, Homo sapiens
cctctcacagggggtcaggtagttttttctcttgtgtctaagcaactccagtcatgaaatgttgtccgagacaatgggttaaatacacctgttccaccgtrtattggtttattgtgatgatctcttttccattatcttgtattgcaagctcacatgtttcctgttacgttcttccaattagattgcccttctgtggttact

SEQ ID NO: 19946 - DNA, 201 bp, Homo sapiens
aggaatttgggtatagtttagggaagatacaaccatatttacaataggcagcacacttactgtttggggcaagggaggaagtgggttgaaaagcatgaacktagaaatcatatctaacctgtcatttaatagccatgtgaccctgaacaagttagtgaacagttctgggccttctttcctcttctgtaaaacagtgataat

SEQ ID NO: 19947 - DNA, 201 bp, Homo sapiens
tacatagtaatttcttagggaatagctgttggaagattagtagataaatgaaagaacaaatgaatgaatgaataaggtatgtaaaaaatgattgctttctwacctggccaaaataagggagtccctgtttgtaggacatatccatattctcaaaactaatcttcaccactgatgagtctatgtatacgtacttggagcctg

SEQ ID NO: 19948 - DNA, 201 bp, Homo sapiens
tcacttccaaaaacagacaaacagagcttctgaaaaaaaccacaaaagctcaccattccttctaatagtttcccttccctttcctaagcagttttaatatrtaggtacttcagatgtcttttataaagaaagttaatcaagatggcacaaaatgcttgtgccaactggtgttgctgctttttataaaatatccaattcact

SEQ ID NO: 19949 - DNA, 201 bp, Homo sapiens
caaaagctcaccattccttctaatagtttcccttccctttcctaagcagttttaatatgtaggtacttcagatgtcttttataaagaaagttaatcaagayggcacaaaatgcttgtgccaactggtgttgctgctttttataaaatatccaattcacttaccatttcttcatgatggattagtaaacgttgatttctcat

SEQ ID NO: 19950 - DNA, 201 bp, Homo sapiens
gcatgatggtgtgcacctttagtctcagctactcgggaggctgaagtgggatgatcacctgagcccagggaggtcaaggctgcaatgagccatgattccaycactgcgctccagcctaggatacagagtgagaccctgtctcaaaaaaaaaaaaaaaaaaaaaaaaggccatatgcagtggctcatgtctgtaatcccagc

SEQ ID NO: 19951 - DNA, 201 bp, Homo sapiens
ccaccattaagcttcagattgagagaaacaccattgagttggcaaatgctttcgatgtgtacgtgcagaaagtcatatgtatctacaattttccagacagyggcaaagagaaatggaaactctgtgctgtattttaattggctgcaaaatgtttccttcagaaattaccattccattaagcacctactctgtgcaaacgct

SEQ ID NO: 19952 - DNA, 201 bp, Homo sapiens
acagtctctgatgtttccttctgagtaattggtcattgggagctgtggttacacatagctgagtgaagcggacacttctgtgaaggcatggcttggctctwgctgggaagttttctgtttcctggcctgttcctgtctctcttctcctctccatacttgttgggaatggacctcatacctctctggaatgatgcagtgcac

SEQ ID NO: 19953 - DNA, 201 bp, Homo sapiens
aaactgataatagagactatatcttctcaacacatgagatatattcgcaaaaactcattatatatttgggcacaaaaatatactggtggaaatattgctgrccatgaagatatagaacttgaaatttaaaagaaaactctaaaataaattcctttttatatgaaaattataaagtactccagtaagtaaattttcagtgaa

SEQ ID NO: 19954 - DNA, 201 bp, Homo sapiens
ggacgcagagagcagctctcaccagacactgaacctgccagcaccttaatcttagatcttcagcctccagaactgtgatcaataaatttgtgtgtttttawaaattctaatgcaaggtttcttctataaggttattttgtctatgttgaaaatctatgttttagtttagtttacctttatcaatgatcttagctagatctg

SEQ ID NO: 19955 - DNA, 201 bp, Homo sapiens
gtaagtggacacaggaggatgcttttagttgtttttttaattgtcaaattttatatactagtcacctaaaacatgttttttgtttgtttgtttgtgtgtgkttttttttttgagatggagtctcgctctgtcacccaggctggagtgcagtggcgcgatctcaactgcaacctccacctcccgggttcacgccaatatcct

SEQ ID NO: 19956 - DNA, 201 bp, Homo sapiens
ttaatcatcaatgtgataatattaagaagtcgggcccttaggaggtgaatgagattagcgagtttatatgagggctggagggagctagctaggccttttgrcccttttgtcctttccagcgtatgaggacaaggcattcatcctctccggaggacacagcaacaaggtgccatcttggacgcagagagcagctctcaccag

SEQ ID NO: 19957 - DNA, 201 bp, Homo sapiens
ctatggtctgaatgtgccccttttaaattcatgcactgaaacttaatcatcaatgtgataatattaagaagtcgggcccttaggaggtgaatgagattagygagtttatatgagggctggagggagctagctaggccttttgacccttttgtcctttccagcgtatgaggacaaggcattcatcctctccggaggacacag

SEQ ID NO: 19958 - DNA, 201 bp, Homo sapiens
tcagccccctgactagctgggactaaaagtgtgcaccaccatacctggctaattttggcatgttctttttttgtacaaaataatcttctggatggggctcmccatgttgcccaggctggtctcaaactcctggactcaagtgatcctcccatctcagcctcccaaggtgtggggtttacaggcatgaaccactgtgcccag

SEQ ID NO: 19959 - DNA, 201 bp, Homo sapiens
ccctgagtttttgtttttgtttttaatccagcagatacattttattttgctgtacctaagagaattattattaacatttagagctaacataaaaggagaayaggaataaattctattttttggtgtattgatacacacttttaatggttggtattaagttgaaatctcagatttgatttccttttaggctcagttttattt

SEQ ID NO: 19960 - DNA, 201 bp, Homo sapiens
aaacgaggtttcaccgtgttagccaggatgatctcgatctcttgaccttgtgatccgcccgcctcggcctcccaaagtgctgggattgcaggcatgagccmctgtgcccggcctcggctgggtggttcttaaggacttgccaggattgctcatgtggttgcagtcatctgacagccccactgggccaaatagtccaagatg

SEQ ID NO: 19961 - DNA, 201 bp, Homo sapiens
ttatgtttggctcagaataaaccttaaatattttacagaatttgcttttttttgtcaacaggattgaaggcaattgtattctttgggggtccagtttctasgtagatgaaggaactacagagaacagcctcatcttgtacttttggacagaaagataactgagagataggggagcgaaggtcagagagaccttgaggatac

SEQ ID NO: 19962 - DNA, 201 bp, Homo sapiens
actgttatatttcgggggtcttgcggggtagcttttcttacacatataagcagaagaaaacattttcccaagtcttaaaagagggttatgatgcatttcaktgtgtactctttttcttcccatatactctgcaggcatttgggcagtccttctccatccaccggaaggttgctgaagatggagagactcgggaggaaacgc

SEQ ID NO: 19963 - DNA, 201 bp, Homo sapiens
tttccttgtgattgaattcaggttagacatctttgatgggactgtcatagaactgatgctgtgttctaattgcatcttatcaggtgacttatgatttctgyttgtcccattattgatgctgttactttgatcacttgattaaggtggtgtctgcctggcttctccagtgtgaaatttcttttcttctttgtaatattttgt

SEQ ID NO: 19964 - DNA, 201 bp, Homo sapiens
taagcgaattgaattatttcaagcatcagtgagagctgctagactgttatatttcgggggtcttgcggggtagcttttcttacacatataagcagaagaamacattttcccaagtcttaaaagagggttatgatgcatttcattgtgtactctttttcttcccatatactctgcaggcatttgggcagtccttctccatcc

SEQ ID NO: 19965 - DNA, 201 bp, Homo sapiens
gatagaagccatatctccttggggtttttttcccccttaaggaaatatgaggcaaggttttcagggagggaagatggactgactgtaggaagagagagaartaaataacttgctatactgtgaacatgtagtatgaccactggacagtatttacagcctattagaatttgagagattcaggactatttgttttttttaagt

SEQ ID NO: 19966 - DNA, 201 bp, Homo sapiens
tcactcccaggaccaattataatctggatttttgtcttcatccttccaggtgtctctgatcccactgtaagcaaaccctgagtcctagggcctttcttccrcttatttcactctttctgtacacattttccagtacctccaccactcaccaccctccaaaaagaactgatccctaagcttgtgcagtgattaatgattttc

SEQ ID NO: 19967 - DNA, 201 bp, Homo sapiens
agaccttgaggatacttttttttttttttttttgagacggagtcttgttctgtcaccaggctggagtgcaatggcatgatcttggctcaccgcaacctccrcttcctgggttcaagggattctcctgcctcagcctcctgagtagctgggattacaggcgcccaccagcacacccagctaatttttatatttttagtagag

SEQ ID NO: 19968 - DNA, 201 bp, Homo sapiens
ggtggggatagaagccatatctccttggggtttttttcccccttaaggaaatatgaggcaaggttttcagggagggaagatggactgactgtaggaagagagagaagtaaataacttgctatactgtgaacatgtagtatgaccactggacagtatttacagcctattagaatttgagagattcaggactatttgtttttt

SEQ ID NO: 19969 - DNA, 201 bp, Homo sapiens
aaaagtatattcatccatcaaccataaccttaaatctgaagccaggaactaaaaagaaattctcaaggtaacacaattgtcatgaagtctcactcccaggrccaattataatctggatttttgtcttcatccttccaggtgtctctgatcccactgtaagcaaaccctgagtcctagggcctttcttccgcttatttcact

SEQ ID NO: 19970 - DNA, 201 bp, Homo sapiens
attttgggttcggtttgctcttgctcttctagttctttaagatgaatgttaggttatttatttgaagtttttcttctttttgatgtaggccctcataggtrtaaatttccttcttagtactgctttcactgtatctcatagattttggtagttgtgtttccattattattgtttcaataaatttttcaatttccttcataa

SEQ ID NO: 19971 - DNA, 201 bp, Homo sapiens
aggtggggatagaagccatatctccttggggtttttttcccccttaaggaaatatgaggcaaggttttcagggagggaagatggactgactgtaggaagagagagaagtaaataacttgctatactgtgaacatgtagtatgaccactggacagtatttacagcctattagaatttgagagattcaggactatttgttttt

SEQ ID NO: 19972 - DNA, 201 bp, Homo sapiens
  misc_feature (1)...(201): n = A,T,C or G, or insertion/deletion polymorphism (see Tables 1-2)
aaatctggtgtttttccctctctgctgtagtgaagctctgctagagatttaccgaagtccttgatattttaacctagctatcaacttcagcccagagaagntcttccaaaagtagattccaaaagtatattcatccatcaaccataaccttaaatctgaagccaggaactaaaaagaaattctcaaggtaacacaattgtc

SEQ ID NO: 19973 - DNA, 201 bp, Homo sapiens
cactatttgtagggtattttaacacatcactcagcagaagaaggttaaataaattttacaaaataagtaagaatacaaaggatcaaaataatccaacctcrtggatagaaaacaaactgataatagagactatatcttctcaacacatgagatatattcgcaaaaactcattatatatttgggcacaaaaatatactggtg

SEQ ID NO: 19974 - DNA, 201 bp, Homo sapiens
ttagagagtttagttgatttacaatcagtgttattattggtaggtaagcactactcctaccattttatttgtcttctggttgttttttggtcttctcttcyttctttccttctttcctgtcttccttttagtgaagatgattttctccaatgttacgctttaatttctttttattttttgggtgtccattgtacgttggac

SEQ ID NO: 19975 - DNA, 201 bp, Homo sapiens
tgggaggcggaggttgcagtgagccaagatcatgccattgcacgccagcctgggcaacaagagtgaaactgcatctctaaataaataaataaataaataaaaataaagtgaaaattatgcagtatgggtttcactgtagttttactactcttgtatagaggaggaaaaatttctcctctaccttcttacaatctctggcta

SEQ ID NO: 19976 - DNA, 201 bp, Homo sapiens
tatcagtatcttttaaccttactatgagaatcttaaagatggaagcattagcctctgcttatgattgctgtaggcaagaatgtgcaccaaccctcccaagmgtataaagatcatcaccgtcaccgtcaccattgtaaggtcacagctcttcacagttcacttatctttttcctagttattctccctcctaatcattgccaa

SEQ ID NO: 19977 - DNA, 201 bp, Homo sapiens
agatgcaagaagaaacagagcactatttgtagggtattttaacacatcactcagcagaagaaggttaaataaattttacaaaataagtaagaatacaaagratcaaaataatccaacctcgtggatagaaaacaaactgataatagagactatatcttctcaacacatgagatatattcgcaaaaactcattatatatttg

SEQ ID NO: 19978 - DNA, 201 bp, Homo sapiens
tccaatgttacgctttaatttctttttattttttgggtgtccattgtacgttggacatgcacacaatggacacacataaaacacaacaattagtattcggyttgcaaatactatctcgtaacccattattttaaatggatgacaacactgattgcagaaataaacaagcaaaaaagaaaatgaataaaactatatacttta

SEQ ID NO: 19979 - DNA, 201 bp, Homo sapiens
ctgggaggcggaggttgcagtgagccaagatcatgccattgcacgccagcctgggcaacaagagtgaaactgcatctctaaataaataaataaataaataaaaataaagtgaaaattatgcagtatgggtttcactgtagttttactactcttgtatagaggaggaaaaatttctcctctaccttcttacaatctctggct

SEQ ID NO: 19980 - DNA, 201 bp, Homo sapiens
ttaggatattaggatattataaaatatgtaaatataaaaataaccactaaaataaaaattcaagctagcctgaatactcaaagaagctttaagcaagatarcaacaaacaaacataaaagctaaagaaataaagtagctttaaatacaatacagaatcataagaaaaatagtatgatagagctgaggcctaacacatacat

SEQ ID NO: 19981 - DNA, 201 bp, Homo sapiens
actatatactttaactttctcctccccttttaacttttgtttctttttatgtcttattgcactgtctatatcttgaaaagttgtagttattatttctgatkggttcatggtttagtctttctacttaagagtatttcacacaccaaaaattgccatgttatattcctgtttttctgtgtgccattaccagtgagttttgta

SEQ ID NO: 19982 - DNA, 201 bp, Homo sapiens
cctgggaggcggaggttgcagtgagccaagatcatgccattgcacgccagcctgggcaacaagagtgaaactgcatctctaaataaataaataaataaataaaaataaagtgaaaattatgcagtatgggtttcactgtagttttactactcttgtatagaggaggaaaaatttctcctctaccttcttacaatctctggc

SEQ ID NO: 19983 - DNA, 201 bp, Homo sapiens
acctgggaggcggaggttgcagtgagccaagatcatgccattgcacgccagcctgggcaacaagagtgaaactgcatctctaaataaataaataaataaataaaaataaagtgaaaattatgcagtatgggtttcactgtagttttactactcttgtatagaggaggaaaaatttctcctctaccttcttacaatctctgg

SEQ ID NO: 19984 - DNA, 201 bp, Homo sapiens
agaagttttcccaattactgtgtaactgtcccttcttaggttataccttcttaggttatctcaaggtctttggttggttgattggtctaaacatttgaaaytcacaggtaggttttggcaggaaactcatttacagaaagggtgagaaatgttacctcccttacagcaacacaaactgggaattttaaaagcaacaaaagc

SEQ ID NO: 19985 - DNA, 201 bp, Homo sapiens
gcttccctaggccactttggaagaagaattgtcttgggccacacataaaatacactaacactaacaatagctaatgagctttaaaaaaaattgcaaaaaawaaatctcataatgttttaatcatgcttatgaattagtgttgggcctcattcaaagccgtcttgggctgcatgctgcccatgggccgcggattggacaagc

SEQ ID NO: 19986 - DNA, 201 bp, Homo sapiens
ctaggccactttggaagaagaattgtcttgggccacacataaaatacactaacactaacaatagctaatgagctttaaaaaaaattgcaaaaaaaaaatcycataatgttttaatcatgcttatgaattagtgttgggcctcattcaaagccgtcttgggctgcatgctgcccatgggccgcggattggacaagcttgatt

SEQ ID NO: 19987 - DNA, 201 bp, Homo sapiens
caccatgcccggctaattttttgtatttttagtagagacggggtttcaccgtgttagccaggatggtctcgatctcctgacctcgtgatccgcccgcctckgcctcccaaagtgctgggattacaggcgtgagccaccgcgcccggcctaggacttctctttaatggggtgttcagataatgtttgtttattcagcaaata

SEQ ID NO: 19988 - DNA, 201 bp, Homo sapiens
gtctcaaattcctgacctcaggtgatccacctgcctcgacctcccaaagtgttgggattataggcgtgtgccaccgcacccagcctacttctttttttttwaaaaaattatttatttatttttgtgggtatagagttggtgtatatatttatggggtatatgaggtactttgatacaggcatgcaacgggtaataatcaca

SEQ ID NO: 19989 - DNA, 201 bp, Homo sapiens
gtttctgaaactggaataaatatgaatggaggatttatcaacatttggatatttgcaatttcaattcttgattcttttttgaaaatctattctgggtctayatctgaaatgtttatctcctttggtgctagatccagagtacaatttttgaaaactttaaatcaagggtggaacaataaattcacttgctcttaagacttt

SEQ ID NO: 19990 - DNA, 201 bp, Homo sapiens
accttgaaaaacattgtttcctttctattgggcctggctttgtcaggagatactcaggaggtgatggtgaaaggaggtacctggtggagccagacgagtckggtaaatcagctttaacaagcagccagatgatagatgtcagttgggtgtcatgcccaattctagttgctgacaattaggaattagattaaaataggagtg

SEQ ID NO: 19991 - DNA, 201 bp, Homo sapiens
tatgttaaacattaggtaatatcagtatcttttaaccttactatgagaatcttaaagatggaagcattagcctctgcttatgattgctgtaggcaagaatstgcaccaaccctcccaagcgtataaagatcatcaccgtcaccgtcaccattgtaaggtcacagctcttcacagttcacttatctttttcctagttattct

SEQ ID NO: 19992 - DNA, 201 bp, Homo sapiens
atttcagaggaggcagatttaaacccagatgcatttgcattaaaccccaatggatttgattccaaagcacgtcgtctttctgctaataatagccaacagtyattgagtacttactatatttataccaaggtctgttccaagtgatacatagattttctcttttaagcctcgtggcagtatgagaaagaagctattattatc

SEQ ID NO: 19993 - DNA, 201 bp, Homo sapiens
gtgggtccagttatgttaaacattaggtaatatcagtatcttttaaccttactatgagaatcttaaagatggaagcattagcctctgcttatgattgctgyaggcaagaatgtgcaccaaccctcccaagcgtataaagatcatcaccgtcaccgtcaccattgtaaggtcacagctcttcacagttcacttatctttttc

SEQ ID NO: 19994 - DNA, 201 bp, Homo sapiens
cctatgcctcttgaaatttctctgtgtttgtctttgtacatttttaatgacttaatgagaaaaaagattcatcaggactcctttcctagcaggaggtttartgtttcacaaatgagtagggagctgctctcataatgaggtaaacggccacctgattcttggataagtccaaggaaaacctttacaccagaggaagcaaca

SEQ ID NO: 19995 - DNA, 201 bp, Homo sapiens
acttcaaagaggcaagatgtggtttgcattcatttcactgctaatattgctctcaaagatcgctaaagatctcttctccccttacacattccactcatttrtaacccagatcctcagtgtggctaatggagggtccctcagccctgtaacttctgtgcatgaagcagtaggtagtgggtccagttatgttaaacattaggt

SEQ ID NO: 19996 - DNA, 201 bp, Homo sapiens
atccaggctttaagtaaatataaatctaagtaataggctattgactattatcttagaaaaacttggggtattacaccaggttatcacagaatatttagttragaagtatggaaaatatgatatgctatttatttgaatgatactcggtaggcatgtaatgtgatgattaaatcagttaagaatatgtgatagatttttttt

SEQ ID NO: 19997 - DNA, 201 bp, Homo sapiens
aacctgggaggcggaggttgcagtgagccaagatcatgccattgcacgccagcctgggcaacaagagtgaaactgcatctctaaataaataaataaataawtaaaaataaagtgaaaattatgcagtatgggtttcactgtagttttactactcttgtatagaggaggaaaaatttctcctctaccttcttacaatctctg

SEQ ID NO: 19998 - DNA, 201 bp, Homo sapiens
atattaaatagcattttatttacagaaacatacatatatggtaaactataaagaaaatggtgatacaaaatgcaggatagtgtttacttggggagtggccraaggtacaatgagagagataggaccaaggaggacagacagaggcctttgaggctagtgggtcttggtcccgttcttaaactataggaattcattttaatg

SEQ ID NO: 19999 - DNA, 201 bp, Homo sapiens
gcttgcagtgagccgagattgcgccactgcacgccagcctgggcgacagagcgagaccctgtctcaaagaaataaaataaataaataaataaataaataawttgcagcccattgagtgaactttaaatgatcatgctactttgtgaaatagaatatcacattactagatctgttgtgtgctggacaaatgccagcacaatg

SEQ ID NO: 20000 - DNA, 201 bp, Homo sapiens
agctgcagctacattaatcagaatgaataaacggaatttaaagttgagttccaaaagcaaattgcaaaagagtgcatatggaaggatttcatcatatgaaktttacaaacagtattttactacaatattaaatagcattttatttacagaaacatacatatatggtaaactataaagaaaatggtgatacaaaatgcagga

SEQ ID NO: 20001 - DNA, 201 bp, Homo sapiens
ggatcacgaggtcaggagatcgagaccatcctggctaacacagtgaaaccctgtctctactaaaaatacaaagaaaaattagccgggcgtgttggcgggcrcctgtagtcccagctactcaggaggctgaggcaggagaatggcatgaacccggagggcggagcttgcagtgagccgagattgcgccactgcacgccagcc

SEQ ID NO: 20002 - DNA, 201 bp, Homo sapiens
agccatgttgttggatatgtcagtagtttactcctttttattgccgattagtattccattgtatggatatgccacaacttggttttttattcaccaattgwtggatatttgaaatgtttgcattttggctgctatgaacatttgtgtgtaaatctttatgtgatcacgtgctttcatttgtcttggataaataaataccta

SEQ ID NO: 20003 - DNA, 201 bp, Homo sapiens
cccagcactttcggaggccgcggccggcggatcacgaggtcaggagatcgagaccatcctggctaacacagtgaaaccctgtctctactaaaaatacaaaraaaaattagccgggcgtgttggcgggcacctgtagtcccagctactcaggaggctgaggcaggagaatggcatgaacccggagggcggagcttgcagtga

SEQ ID NO: 20004 - DNA, 201 bp, Homo sapiens
atctgcaaaacttattccaaaacaaatcagtaaatccaggttaaaatacccaggtcagacagtcacatttttactaataaaaaataactagcagcccgggygaggtggctcatgcctgtaatcccagcactttcggaggccgcggccggcggatcacgaggtcaggagatcgagaccatcctggctaacacagtgaaaccc

SEQ ID NO: 20005 - DNA, 201 bp, Homo sapiens
agtgagcatagtaagcaataggtaaaaaaatgacctcttattcaagagggtacctcattactatttacaaagtgctttcaaacattctttctcatttttttctgacaactctggacgtccccccctacttttagaagaaaactaacagtcccaaaaatgttttggtgtaagtcaatatatgaacccaggtccatgtccaga

SEQ ID NO: 20006 - DNA, 201 bp, Homo sapiens
ctgcctcagcctcccgagtagctgggactacaggcgcccgccaccacgcccagctaattttttgtatttttagtagagacggggtttcgctgtgttagccrggatggtcttgatctcctgacctcgtgatccgcccgcctctgcctcccaaagtgctgggattacaggcgtgagccaccgcgcctggccctggtgccttag

SEQ ID NO: 20007 - DNA, 201 bp, Homo sapiens
gtttgtctcttccagaattgaaactgtaaaactacaaatggttcttcaaatggagccccagatgcagtccatgactaagatccaccgcagacccctggacyggcctgctagcccatgctccaatgttaatgacatggaaggcacccttccggaggaaatctcaactacacaacacctactatgccccaattcagcaggaag

SEQ ID NO: 20008 - DNA, 201 bp, Homo sapiens
cattgttcctgcacggctaagtgcctgggttcgtcctaatcgagctgaacactagtcactgggttccacggttctcttccatgacccacagcttctaatarctcatcgcatggcccaagattccattccttggaatccgtgaggccaagaaccccaggtcagagaacacgaggcttgccaccatcttggaagccgcccacc

SEQ ID NO: 20009 - DNA, 201 bp, Homo sapiens
gtggcacgtgacccacaagacaagttgcttcccactcttccctcccctttccacgggcagaagatcctctccctgtggctgccatcaccactggcttatgkgggggttctgccaggccatcactgatacttaaagcctaagggctcttccgtcagcttgtgaccaatgctgccagctctgggactcaccttttggctcagg

SEQ ID NO: 20010 - DNA, 201 bp, Homo sapiens
ctggagctgagctttcgcttgccgtccaccactgctgtttgccactgtcgcagacccgccgctgattcccatcgccgctgactcccatccctccagatccrgcagggtgtccgctgtgctcctgatccagcgagactcccattgccactcccgattgtgctaaaagcttgccattgttcctgcacggctaagtgcctgggt

SEQ ID NO: 20011 - DNA, 201 bp, Homo sapiens
tccacgggcagaagatcctctccctgtggctgccatcaccactggcttatgggggggttctgccaggccatcactgatacttaaagcctaagggctcttcmgtcagcttgtgaccaatgctgccagctctgggactcaccttttggctcagggcaggtccagaaatgctgaccaagagcctaggcctggactcagtgacct

SEQ ID NO: 20012 - DNA, 201 bp, Homo sapiens
gaaatacatcattggataagcaacttcattcaaaagtcagtgccacagcaagcaagaaattagaagcttgtaaaaataagatggaattttgagctgggcayggtcgctcatgcctgtaatcttagcgctttgggaggccaaggcaggtggatcacttgaggtcaggaattcaagaccagcttagccaacatggcgaaaccc

SEQ ID NO: 20013 - DNA, 201 bp, Homo sapiens
gtgacagggcagcactgagttaagttaaagtgccccagtcactgcattctccctctactaaatgcacagatttctccccaccacgcagccactgctggggrtgggggaggcatggcagaagcactcccttagtcaccctggctggtgtcttagtaggctgtgtgcctcctactctagtccactggctctgggcccagctta

SEQ ID NO: 20014 - DNA, 201 bp, Homo sapiens
ctaaatgcacagatttctccccaccacgcagccactgctgggggtgggggaggcatggcagaagcactcccttagtcaccctggctggtgtcttagtaggytgtgtgcctcctactctagtccactggctctgggcccagcttagcactagggcttgcctaggaattgcagtccttgtggcctaacctgcccctcaagacc

SEQ ID NO: 20015 - DNA, 201 bp, Homo sapiens
tatataattagttactataatttttttctcaaaatatctcagatttggccattggaagccccttcagacaggctcctgtctccttttgacatatcctcatyatcttttaaatgcatgttgtaactctggcatcacaagatgtgtctggcttattttgctccagccctagaatcagtaacttctccaaagaccctagttctt

SEQ ID NO: 20016 - DNA, 201 bp, Homo sapiens
cagaaggaaggtaccaccttggaagcagagagcagccctcgccagacaccaactctgctggcaccttgatcttgtacttcccagcctctagaactgagcaraaatacatttctgctctttaattacccagtctcatgcattttcttatagacgtctgaatggactaagatcgatggacatatagaccaatggaatagattt

SEQ ID NO: 20017 - DNA, 201 bp, Homo sapiens
tgactcttgtgcagtaaaaaaaatccacatttaacttttgactccgccaaaacttgatcaacaatagcatgctgttcagtggaagccttaacagtaacatwaaacagttgataaacacatattttgtatgttacatgtattatatgctgtattcttagaataagcttgagaaaaggaaattttattaagaaaatcataagg

SEQ ID NO: 20018 - DNA, 201 bp, Homo sapiens
ggccttttttttttttttttttttttttcgcttctgctcttccaccatggaagacacagaaggaaggtaccaccttggaagcagagagcagccctcgccaracaccaactctgctggcaccttgatcttgtacttcccagcctctagaactgagcagaaatacatttctgctctttaattacccagtctcatgcattttct

SEQ ID NO: 20019 - DNA, 201 bp, Homo sapiens
ataaacacatattttgtatgttacatgtattatatgctgtattcttagaataagcttgagaaaaggaaattttattaagaaaatcataagggattgggtgyggcggatcacaaggtcaggagttcgagaccagcctggccaacatggtgaaaccctgtctctactaaaaatacaaaattagcctggcatggtggtgggacc

SEQ ID NO: 20020 - DNA, 201 bp, Homo sapiens
ttgagaaaaggaaattttattaagaaaatcataagggattgggtgcggcggatcacaaggtcaggagttcgagaccagcctggccaacatggtgaaacccygtctctactaaaaatacaaaattagcctggcatggtggtgggaccctgtaatccctgctgctcgggaggctgagacaggagaatcacttgaacccaggag

SEQ ID NO: 20021 - DNA, 201 bp, Homo sapiens
ccttgcaaaatcacaaaagaaaaaaattgaggtttcacgaggtaacctttcactccagtaataaaatgacagcatcttatgaacaagcttctcaggaaacscgacagaagaaacatgtaacacagaactcacgtccactaaaaacaaaaacagcttttttgccaaataaagatgtgtataagaagcatagttctttgggac

SEQ ID NO: 20022 - DNA, 201 bp, Homo sapiens
tgtatttggttggtggctttagtaataagagactagcttttaacacagccagaagaagctgatgtgaaccagcagaaataacactgatcatatataatacktatggaacagtggttgcccaccatttttgaacccaagatttcctgacatttatcactgtgccaacaaaaagaaaaactaggaacctggggaggacttaga

SEQ ID NO: 20023 - DNA, 201 bp, Homo sapiens
actttccgtatgctgatttttaaagtgtctgtatttggttggtggctttagtaataagagactagcttttaacacagccagaagaagctgatgtgaaccascagaaataacactgatcatatataatacttatggaacagtggttgcccaccatttttgaacccaagatttcctgacatttatcactgtgccaacaaaaag

SEQ ID NO: 20024 - DNA, 201 bp, Homo sapiens
agtggtgctacttagaagctgagaggttatgaaccttatatgcaaccatagggaatagtgttgttactataaataatgattgtactgaaccttatatgcartagtgaataatgttattataaataatgattgtactgaaccttatatgcaacatagggaataatgttattataaataatgattttcagactgaggcagttt

SEQ ID NO: 20025 - DNA, 201 bp, Homo sapiens
gcagtattcctaggaatgcaacttttaatttacttgatggctaccttgtatttaatttaggaaagagatccttacccggatgcatttgggaaggtagtttwggaccgtggccttgagtgtgaaggcctctccacgaatcacagagtaaggcattgtgagctccacaaagaagggctggaaggctcggagagaggcagtgga

SEQ ID NO: 20026 - DNA, 201 bp, Homo sapiens
tatgagtgagaatacaacttattaatagcttttgtaaacttctggcaaaaaaagatattgaagataattagagttgaaaaattatataggacatcacttasgattgggattcaatcacattttatagaaaattcaaataagagttgcttaagcatgaaagaagttcagaggtaagtagctcagggcttgtatggcaactcc

SEQ ID NO: 20027 - DNA, 201 bp, Homo sapiens
cagaaaataagttatgagtgagaatacaacttattaatagcttttgtaaacttctggcaaaaaaagatattgaagataattagagttgaaaaattatatargacatcacttaggattgggattcaatcacattttatagaaaattcaaataagagttgcttaagcatgaaagaagttcagaggtaagtagctcagggcttg

SEQ ID NO: 20028 - DNA, 201 bp, Homo sapiens
cactttgggaggccaaggcgggtggatcacttgaggtcaggagttcgagaccagcctggccaacatggtgaaaccctgtctctaccaaaaatataaaaaawtagccaggcgtggtggtgcatgcctataatcccagctactcgggaggctgaggcagaagaatcacttgaacccaggagatggaggttgcagtgagccaag

SEQ ID NO: 20029 - DNA, 201 bp, Homo sapiens
attagagattatctggtccagtgattctcaaccagggagacatttggttatttccggagatatttttggtcacaactgaggtgggtgctactggcttctakggatggaggtcaggaaagctgccaagaacccgacagtgtacaggacagcccccacaccagcatgtcactactgccgaggacgagaagccctgatctagcc

SEQ ID NO: 20030 - DNA, 201 bp, Homo sapiens
cccttgagcccaagagttcgcggttacagtgagctataattgtgccactgcattcagcctaggtgacacagcgagatcctatttaaaaaaaaaaaaaaaaagacaaaaagaaaagaaaattacagtataatttttctgtgttgaagagcttctgctggacaaattttcagtcttggtcggcagtttaactcaagaacagac

SEQ ID NO: 20031 - DNA, 201 bp, Homo sapiens
ggagatggaatgccagatgtaactctttctgacctgtaatcccagcttgcaaactaaataacatcagtggtactcagctttccttgtgtgtctacaccatycatatactcgcatcagcaatgtgtagcaattttgtgctggggtgtattagagaatagtatactttttgttctctttgagtattcatggactggactttct

SEQ ID NO: 20032 - DNA, 201 bp, Homo sapiens
acggattgtagagttcttgggctggcataattttatgtgaccaaaatttggcaaagggtcttatcagtttgaggagagattagtggagcattgaatttcasagtttgaaatgacattagagattatctggtccagtgattctcaaccagggagacatttggttatttccggagatatttttggtcacaactgaggtgggtg

SEQ ID NO: 20033 - DNA, 201 bp, Homo sapiens
tcccttgagcccaagagttcgcggttacagtgagctataattgtgccactgcattcagcctaggtgacacagcgagatcctatttaaaaaaaaaaaaaaaaagacaaaaagaaaagaaaattacagtataatttttctgtgttgaagagcttctgctggacaaattttcagtcttggtcggcagtttaactcaagaacaga

SEQ ID NO: 20034 - DNA, 201 bp, Homo sapiens
agcaggtgaagtcttttttacacaatgccactgtacggattgtagagttcttgggctggcataattttatgtgaccaaaatttggcaaagggtcttatcaktttgaggagagattagtggagcattgaatttcagagtttgaaatgacattagagattatctggtccagtgattctcaaccagggagacatttggttattt

SEQ ID NO: 20035 - DNA, 201 bp, Homo sapiens
gatcccttgaggccaagattttaagatcagcctgggaaacatagtgagaccccgtttctacagaaaaaaaaaaaaaaaagtaaaaattaggcacagtgtcrcatgcctctagtctcagctacttgggaagctgaggcaggatgatcaatcccttgagcccaagagttcgcggttacagtgagctataattgtgccactgca

SEQ ID NO: 20036 - DNA, 201 bp, Homo sapiens
aagtaaacaaagaaaagccatgccaaaataatttaacatgagtgaaatattctcaagcatgtatttgaggtatttaaaaggcaccatgagtcagaaattcwattaagaaaatacagaaatggacaaaacccaagaagaaataaaatgaggctttattgaactcaggaaaactagacaaaattatatcataaataaactcta

SEQ ID NO: 20037 - DNA, 201 bp, Homo sapiens
gccatggtggtttgctgcatccatcaacccgtcatctacattaggtatttcttctaatgctatccctcccctagcccccaaccccctaacaggccccggtrtgtgatgttcccctccctgtgtccatgtgttctcattgtacaactcccatatatgagtgagaacatgcggtgtttggttttccgttcctgtgttagtttg

SEQ ID NO: 20038 - DNA, 201 bp, Homo sapiens
ctttgggaggctgaggcgggaggatcccttgaggccaagattttaagatcagcctgggaaacatagtgagaccccgtttctacagaaaaaaaaaaaaaaaagtaaaaattaggcacagtgtcgcatgcctctagtctcagctacttgggaagctgaggcaggatgatcaatcccttgagcccaagagttcgcggttacagt

SEQ ID NO: 20039 - DNA, 201 bp, Homo sapiens
ttatttcagtgttatctttctgagaagaaaaaccaaagaagattattttatgctcctggacttttccttaacctcacagttcacaacattggccctctttstgtatacaaagccaatcacttcactgcaacagaccacagctgagcaaacaaatacagacgttgatagatgaaccactgacaacaactcctaacaaaaaca

SEQ ID NO: 20040 - DNA, 201 bp, Homo sapiens
acaaccatcttgaaaaactgtttggccttatctagtaaagctaaagatgtatagatcctaagatctagcaattccagttggaggtatgaaccctagaaagscttgcacttttgagtcagaagatgtagacaacaaaactcacagcagcactgtttgtaacagagaaaactaaaaacaacggaaattactatccacagtaaa

SEQ ID NO: 20041 - DNA, 201 bp, Homo sapiens
gtatatttcccctaaggtcattttatttcagtgttatctttctgagaagaaaaaccaaagaagattattttatgctcctggacttttccttaacctcacakttcacaacattggccctctttgtgtatacaaagccaatcacttcactgcaacagaccacagctgagcaaacaaatacagacgttgatagatgaaccactg

SEQ ID NO: 20042 - DNA, 201 bp, Homo sapiens
ccggggaggcggaggttgcagtgagcagagatggcaccactgcactccagcctggtgacagagggagactccgtctcaaaaaaaaaaaaaaaaaaaaaaaatctttttaaagcatcactaggatcagaaatgcaaatttttcagaaatttcaaaaatgtggagaaaaggttggacattttgttagggaagtaaaagcatat

SEQ ID NO: 20043 - DNA, 201 bp, Homo sapiens
accggggaggcggaggttgcagtgagcagagatggcaccactgcactccagcctggtgacagagggagactccgtctcaaaaaaaaaaaaaaaaaaaaaaaatctttttaaagcatcactaggatcagaaatgcaaatttttcagaaatttcaaaaatgtggagaaaaggttggacattttgttagggaagtaaaagcata

SEQ ID NO: 20044 - DNA, 201 bp, Homo sapiens
gggaggctgaggcagaagaattgcctgaaccggggaggcggaggttgcagtgagcagagatggcaccactgcactccagcctggtgacagagggagactcygtctcaaaaaaaaaaaaaaaaaaaaaaaatctttttaaagcatcactaggatcagaaatgcaaatttttcagaaatttcaaaaatgtggagaaaaggttg

SEQ ID NO: 20045 - DNA, 201 bp, Homo sapiens
tttgcccacagctgccctttcccccaggtgctctgtcccagggagatgggagtttaaacccctgactggggctgctgcctttctttcagagatgctttgtmcagataggagaaatctagagaggcagtctggctgctgggagtgtcttttagcatgctaattagcatacataattataattagctataattagcagtgagg

SEQ ID NO: 20046 - DNA, 201 bp, Homo sapiens
cagacacaaataagcacttaatttctttttaatgatataaaatcttttctggctgggtgtagtggctcacgcctgtaataccagcactttgagaggccaasgcgggcggatcacaagttcaagagatcaagaccatcctggctaacatggtgaaaccccgtctctgctaaaaatacaaaaattagctgggcatggtggcag

SEQ ID NO: 20047 - DNA, 201 bp, Homo sapiens
cagaggtctcttttgttgccatcttggttttggtgggttttggcctgcttcttaccatgttttatcagcaaggtctttgtgacctgcatcttgttgaaacragtcctgccaaattcctatcaggtttactgtagttaatgaggccaaaaaaaaaaaaggacattttcaaggagaaacagaaacattattagaaaagattct

SEQ ID NO: 20048 - DNA, 201 bp, Homo sapiens
agcaggataccctgcccaatgtccctggaatgtacacgttggaggcctcaggccagggctgtgtctatgtgcaggtaagtagagatccatgagaatgagcrgacattgggaaggagagtcggagagcatcttccccttaggccttctctctctctttctttctcacttgtaagaaaagtagtttgaactgtacaatcttta

SEQ ID NO: 20049 - DNA, 201 bp, Homo sapiens
aattggataaggcttattttcattcgtggcatatagataaccaattgacctagcttcatgtattgaaaagaacttttttcctaactttgtcataaaacaartgtctatatataaaagtgtgtgtatgtcttcgctattcatgcttgttttgcatttccatggaaagtttataatcaagcttgttaccccaaaaaatcaaaa

SEQ ID NO: 20050 - DNA, 201 bp, Homo sapiens
tcactccagtaataaaatgacagcatcttatgaacaagcttctcaggaaacccgacagaagaaacatgtaacacagaactcacgtccactaaaaacaaaarcagcttttttgccaaataaagatgtgtataagaagcatagttctttgggacagtcattatcaccagaaaagataaaattgaaactcaaatcagttagctt

SEQ ID NO: 20051 - DNA, 201 bp, Homo sapiens
tcaatattctgagatagcaaagcaatgatgcatttatgatagactggatgataggatttgtttttgctgaacttattcatacatatttgtgttttgcttaractttaaaattgtttctttttctatgagcacatagcaataactgggaagtggctgagaatcattcttttttttttaatttttgagacggagtcttgcact

SEQ ID NO: 20052 - DNA, 201 bp, Homo sapiens
aactttgtttcctagattttaaatttttccaccataacacgtattgcctttataataacataattcacttgttttaagtcgattcaggaagcttctgattmtatattataaattctaaatgttcccttctattttccagagtcaagtttagattatctagatcatgaaataatcagatattttcagctattacctaactca

SEQ ID NO: 20053 - DNA, 201 bp, Homo sapiens
tttgcattggttatccttgggtaatgggttttaactttgtttcctagattttaaatttttccaccataacacgtattgcctttataataacataattcacktgttttaagtcgattcaggaagcttctgattctatattataaattctaaatgttcccttctattttccagagtcaagtttagattatctagatcatgaaa

SEQ ID NO: 20054 - DNA, 201 bp, Homo sapiens
gttcttcaagggcctctaaggacaaaagtgaatccactaacactctaggaagcagtgtgactactggaagaaagacattcaagaggtaaaatggattttakaaggtcacaggagccaattgtcagtgtttgtactcttcatcaaaattatttttaatgagctccctgacaactgcgcatcctgacagcacgggtgaagtgg

SEQ ID NO: 20055 - DNA, 201 bp, Homo sapiens
aaagagaaagattgttcttcaagggcctctaaggacaaaagtgaatccactaacactctaggaagcagtgtgactactggaagaaagacattcaagaggtraaatggattttagaaggtcacaggagccaattgtcagtgtttgtactcttcatcaaaattatttttaatgagctccctgacaactgcgcatcctgacagc

SEQ ID NO: 20056 - DNA, 201 bp, Homo sapiens
actaaagaaagtttactaccacgcaatcctatctttgtctctttctcttttttattggcgtcaaactactcagtattttagactgcaaaatttccactgcrtggaggaaagtaaatggattgggattatttcctgcaggtaaatgaaactttatggtatttgttatggaggcaagtagggtacttagagaaagccaaatat

SEQ ID NO: 20057 - DNA, 201 bp, Homo sapiens
ataatcactgcccatatcccacctgccgtattcactgccgaatcccacctgccataatcactgccatattccacatgtcatattcactgccatatcccacytgccatattcactgccgtatcccacctgccataatcactgcccatattcccacctgccatattcactggcagatcccacctgccataatcactgccgtat

SEQ ID NO: 20058 - DNA, 201 bp, Homo sapiens
attcactgccaaatcccacctgccataatcactgccgtatcccacctgtcataatcactgccgtatcccacctgccataatcactgccgtatcccacctgycataatcactgccgtatcccacctgtcataatcactgctgtatcccacctgtcataatcactgccgtatcccacctgtcataatcactgccgtatcccac

SEQ ID NO: 20059 - DNA, 201 bp, Homo sapiens
ggactggaaccacacctgtcatattcatgctgtatctcacctgtcatattcactgccaaatcccacctgccataatcactgccgtatcccacctgtcatawtcactgccgtatcccacctgccataatcactgccgtatcccacctgccataatcactgccgtatcccacctgtcataatcactgctgtatcccacctgtc

SEQ ID NO: 20060 - DNA, 201 bp, Homo sapiens
cctgcttcttagcaattttgataaatctttgtatttcagcaaatacttgaaaaaaatgtaggatccactggcttatatcttctgtgtaggcatcaaaacasatggtggtggggttgttgggaagatggtagcagacagggttgcttaaaaatataagacttccttgatgtccaagaatactgagatttatatgattagaaa

SEQ ID NO: 20061 - DNA, 201 bp, Homo sapiens
acaagctcttgtggactggaaccacacctgtcatattcatgctgtatctcacctgtcatattcactgccaaatcccacctgccataatcactgccgtatcycacctgtcataatcactgccgtatcccacctgccataatcactgccgtatcccacctgccataatcactgccgtatcccacctgtcataatcactgctgt

SEQ ID NO: 20062 - DNA, 201 bp, Homo sapiens
gcagaggtcaatattaagcttccaattaatgcttattcatcacaaatagtaagtaaataatgacagaaataattccttagtcactctctagcacacttctkttttatttttaacatttttcactatgtgagatttcctagatttgttttattttctgtttccctctaactgcaatacaagctcttgtggactggaaccaca

SEQ ID NO: 20063 - DNA, 201 bp, Homo sapiens
agccatttggattcctttttctttgaattgctgcttgttaatatattggcccttttttctgttacattattaataatgccaggaattatgctagttgctaygcaagatgcagacttgaggaaaacctggtcccagctttcaaaatgcttactttccaaatctgactcatcgtttgactttaatgccccactggacttctct

SEQ ID NO: 20064 - DNA, 201 bp, Homo sapiens
tatggaaggcagaggattctcccacctcagcctcctgagtagctgggactacaggtgcacaccaccgcacccaggtaatttttgcattttttgtagagacygggttttgccatgttgcccaggctggtcttgaactcctgggctcaagcagtcggcccgccttggcctcccaaagtgttgggattacaggtgtgagtcatc

SEQ ID NO: 20065 - DNA, 201 bp, Homo sapiens
ttgcttgaacctgggaggtggaggttgcagtgagccgagatcgcaccactgcactccagcctgagtgacagagcgagactccatcaaacaaacaaacaaamaaaaaaaacaaaaacccaagaagacctctgtctcctagagcagtcacctagaatcctagagaaaaatgtctttccaaaaggaagaaatgcagaactgtgt

SEQ ID NO: 20066 - DNA, 201 bp, Homo sapiens
acacctgtaatctagaactttgggagactgaggtgggtggatcccttgagttcaggagtttgagaccagcctgggcaacacagcaaaaccttgtttctacmaaaaatacaaaaattagcccggtatggtggtgtgtgcctgtagtcccagctactagggaggctgaggtgggaggatcacttgagtcatggtaacagactc

SEQ ID NO: 20067 - DNA, 201 bp, Homo sapiens
tgcttgggaggctgaggcgggaggatcacttgtgactgggagtttgagaacagcctggggaacatagtgagaacccatcaggaaaaaaaaaaaaaaaaaaaagttgattaaaaaaagaaaaacaaaagaggccaggcacggtggctcacacttgtaatcccagcattttgggtggccaaggtgggaggatcgcttgaggcc

SEQ ID NO: 20068 - DNA, 201 bp, Homo sapiens
atcacaaggtgatgggtgcaagggctttgggtgctatctactggatacaaatgcaggggcttaggatactatcacccgagcgaattcctgggaactgcggrcataacttgccacaggaccttatcagttaattgcactctgatgtgctgggagtcagcttgcacaagttaagtccttgaggaattgggtgggcaaggagct

SEQ ID NO: 20069 - DNA, 201 bp, Homo sapiens
ttgcatacaacctgcagacttctgcattgaagccctggtgataatgccatgcctcctctgtagaattgtgaggaccaaatgggatggtaaatatgaaactrtgtataagtcataacattttataaattattattgtcctggaaactgccatcaggtttcgagatgccaagaaggtccccactatccctgtgtataaacggt

SEQ ID NO: 20070 - DNA, 201 bp, Homo sapiens
aggcatgaccttattcatcataacacttttgctgctaaaacaagcttcagacacattcagtacattttgttttgatccaatatttatttgatccagaggcytttccttttgaagggcgttttggaaacagccttatctgtaatcatgtgtactaattgaataacgtttacactttccagtgcaaatttgcttaattttcaa

SEQ ID NO: 20071 - DNA, 201 bp, Homo sapiens
caattcttctgcctcagcctcctgagtagctgggactacaagcacactaccacgcctggcttatttttgtatttttagtagagactggatttctctcactrtgttggccaggctggtctcaaactcctgaactcaggtgatccacctgcctcggcctcccaaaatgctgggattacaagcatgagccaccgtgtccacccg

SEQ ID NO: 20072 - DNA, 201 bp, Homo sapiens
gttttttccttgaccttgaaaatttagcttgggctttctttgtacaaacatgaagatcctaggagaagcccaatcaattttagagagacaagtggatgaaratagggattaaaagaattgtgcttgactgagcagagagactgatgatctgaaaggacaccaggtaaaatgtttctttttagctttacaaatgcactgctt

SEQ ID NO: 20073 - DNA, 201 bp, Homo sapiens
atatggagcacgaatttccacgtcagcatgtcatcctttcacaggaggcatgctaatcttcttcgtaacatccaattttaatatatatgctaggccgggcrcggtggctcacacctgtaatcccagcactttggaaggccaaggcaggcagatcacaaggtcaggagatcgagaccatcttggctaacacggtgaaacccc

SEQ ID NO: 20074 - DNA, 201 bp, Homo sapiens
attttatatcctaacaatttttatttactctggcaataaagagatagaacacccaccaacaaagtccctaaaatacgtaattgataaagcattggttatcygctaggttttaaacataatttctaagaatataaaaatttaatcaccaccatctttataattgttttaaaattacctctaatttcttcgcacaaggtccac

SEQ ID NO: 20075 - DNA, 201 bp, Homo sapiens
gggatccagaaatgagactgaggtggcctcagagagcggctccctcctgaaggggatgctgctgctgtcatcctgcccggcaccttggactgcagtgggcrgggcctggggtggggatgagggtgcactgaccagcaccgcagcagcttggggaggttggggtgctgttaacatgccatcgtataggtcggaagtggaaat

SEQ ID NO: 20076 - DNA, 201 bp, Homo sapiens
gttgaattgctgggtaatatatatgtgcttttaagtttttgacagataccactaaattgccattcgaaaaaatgcagtaacaatttacaccccatgaggtrtttttattattatttttaactaccaggactttacaccttgtaaaatctacaataagagagttatacattgactgtttactctgttgtttcagaacaatga

SEQ ID NO: 20077 - DNA, 201 bp, Homo sapiens
aaaaaatgcagtaacaatttacaccccatgaggtatttttattattatttttaactaccaggactttacaccttgtaaaatctacaataagagagttatayattgactgtttactctgttgtttcagaacaatgagatggtggagctacagagaatacggatgaaggatgaaatccgagaatataagttccgggaggcacg

SEQ ID NO: 20078 - DNA, 201 bp, Homo sapiens
gttagggtaaagagatgaagaggaaatgacaagaatttcttggaaagcaacttagagacccatctggggcttcagtgttactaattctgaaagaaagcaarcgaaaaagtggaagactgcagcagatctaaagaactaacaggacagaatactccacccattcaggtagaaaaagacaaaacaagaccccattattcagaa

SEQ ID NO: 20079 - DNA, 201 bp, Homo sapiens
ctcactgtttcacagtggacagggtctatgcaaacctgcggccaaggaagctgagaggtggaagaaagaggctgacacatccagtttcttaggaagaaacrtttactagggacttagaacagaagccatgtctgtatctcaggaagcagtgagacaagatggtggatccccgcaccattacccctcaaacccagggcttat

SEQ ID NO: 20080 - DNA, 201 bp, Homo sapiens
agctaaagcattcccctgttgtgccattttcttccctttctctcatgcattatttttcttactgtggttattcttgatgggaatttttagcagagctcagygccatcttatcccaggaagaaaaaaaaattgtaggagataaatgtatgatgaatggtgcaaaacacaacagttgcaatcttttaaatttattgtgaaatt

SEQ ID NO: 20081 - DNA, 201 bp, Homo sapiens
gatgggaatttttagcagagctcagtgccatcttatcccaggaagaaaaaaaaattgtaggagataaatgtatgatgaatggtgcaaaacacaacagttgmaatcttttaaatttattgtgaaattaaagaacatgcccctagaatataatcgctggcaattcaaaaagcaaggatttttagcaaaataaataagaccagt

SEQ ID NO: 20082 - DNA, 201 bp, Homo sapiens
ctaatttttaaatttattgtagagacaacacttcactatattggctggcctggtctcaaattccttgcctcaagcgatcttctgcctttacatcccaaagkgctggaattacaggcatgaaccttcacctttcttttagaaagagcgtgaatctctaattcaccagagtccccaccattccatctcatctgagttatctca

SEQ ID NO: 20083 - DNA, 201 bp, Homo sapiens
atctcagcctcctgagtacctgggactacaggtgtgcatcaccacacctggctaatttttaaatttattgtagagacaacacttcactatattggctggcstggtctcaaattccttgcctcaagcgatcttctgcctttacatcccaaagtgctggaattacaggcatgaaccttcacctttcttttagaaagagcgtga

SEQ ID NO: 20084 - DNA, 201 bp, Homo sapiens
tgtcatagttttctatttattttatagtcctactactgactgataatgttgagatctgattcaatttctgcctctaaccatctgtattgtaaaatcccgayggacaactaaaaaactgttaacaacagagcagcatttaaaacttcagaatctgaattttaaaatcctggctactcaactgatactaaaaatcaaaatatg

SEQ ID NO: 20085 - DNA, 201 bp, Homo sapiens
tcctaatcatactaccagcgttaagttgacagttatttatcaggcatatttagcagccagccttacagttttctcttgcacactgttaacaattactgtcrcatggtcactgttacatgttagccaatagtgcctcacattcactgtggcttccaaagcttgggcttggggaagcaggtggatggtgatatcatgagctca

SEQ ID NO: 20086 - DNA, 201 bp, Homo sapiens
aatctccaatgttggaggtggggcctggtgggaggcgactggatcatgagggtggtccttgatgaatggtttagagccatcccctcggtactgttcctccygatagtgagttatcgcaagatctggttgtttagaagtgtgtagcagctctccgcccctcttcctcctgcttctaatcatgtgagacgtcttgctcccact

SEQ ID NO: 20087 - DNA, 201 bp, Homo sapiens
gcacaggcagatggaagcccccaccccagctgcgtggcctgaagccagcctcccgctccccgaaggtggtctccacacagaactgggacagttccatcccygccccttcctccagggcagcagggctgaggatcccattctggctgtgtccacgtccgggccatggctggagtctgggtttaggggaggaaggcatggcgg

SEQ ID NO: 20088 - DNA, 201 bp, Homo sapiens
gtctcaaactcctaacctcaggtgatccacccacctcggcctcccaaagtgctgggattacaggcatgagccaccatgcccagccttttaaatttattttwaaaataaacgtatttcttacagttctggaggtttgaaagtccacagctgttgggctgcatctggtgagggccttcttaccgcagcataacatgacagaga

SEQ ID NO: 20089 - DNA, 201 bp, Homo sapiens
gtgccaccccgcctggctgatttttgtatttttagtagagatggggcttcaccatgttggccaggctggtctcaaactcctaacctcaggtgatccacccrcctcggcctcccaaagtgctgggattacaggcatgagccaccatgcccagccttttaaatttattttaaaaataaacgtatttcttacagttctggaggt

SEQ ID NO: 20090 - DNA, 201 bp, Homo sapiens
tcctttcagtctttctttttcccctaaataagcaaaaacgtgtcttcatttttccctttcctgttttatttacacagaaggcatcttagtcagttgtctgrccatcgctcctctagtgggctgcgtggttctctgttggacagatgtagggagcttatccaaccagtaccctctggataggcaggcgcatgattacaggga

SEQ ID NO: 20091 - DNA, 201 bp, Homo sapiens
atagggaatccgttttactagcttatcctttcagtctttctttttcccctaaataagcaaaaacgtgtcttcatttttccctttcctgttttatttacacrgaaggcatcttagtcagttgtctgaccatcgctcctctagtgggctgcgtggttctctgttggacagatgtagggagcttatccaaccagtaccctctgg

SEQ ID NO: 20092 - DNA, 201 bp, Homo sapiens
ctctcatccctttccagcccattccccacccccatagggaatccgttttactagcttatcctttcagtctttctttttcccctaaataagcaaaaacgtgycttcatttttccctttcctgttttatttacacagaaggcatcttagtcagttgtctgaccatcgctcctctagtgggctgcgtggttctctgttggacag

SEQ ID NO: 20093 - DNA, 201 bp, Homo sapiens; identical to SEQ ID NO: 2856

SEQ ID NO: 20094 - DNA, 201 bp, Homo sapiens
gcagcctcagtgagagcaccctgaagtttttgctcctgaatccagctgtgcactttgcccaagtggtgaaggaatgccgggcagtggtcattgcggggggkaccatgcagccggtaaggacacctttcccagcccctcgtgccccaggtgttgggatgagatggggacttgggagagatgcattatcagtcctgttctctc

SEQ ID NO: 20095 - DNA, 201 bp, Homo sapiens
tggttaagacaggaaggaaagagataatatctaagtagagtcatatgtcgggtcaatagatcttaaaatacagatagaagacagtaacacattttgtaacytgaggtaacaaaattatgttgaaagggagagattaaaaatgcatgtgggtgtggctgggtacagtggttcatgcctgtaatctcagcactttgggaggcc

SEQ ID NO: 20096 - DNA, 201 bp, Homo sapiens
attcaatggaaatggcaatatgaaggtcatgtttatcattcttcactggtgtggtggtgacaggtgaaatttcagcaggctgatcatacaaggtaaggaartggaaacaatgagtttagatggtttgaagtctggttaagacaggaaggaaagagataatatctaagtagagtcatatgtcgggtcaatagatcttaaaat

SEQ ID NO: 20097 - DNA, 201 bp, Homo sapiens
ataatgagaggagagtattcaatggaaatggcaatatgaaggtcatgtttatcattcttcactggtgtggtggtgacaggtgaaatttcagcaggctgatmatacaaggtaaggaaatggaaacaatgagtttagatggtttgaagtctggttaagacaggaaggaaagagataatatctaagtagagtcatatgtcgggt

SEQ ID NO: 20098 - DNA, 201 bp, Homo sapiens
tccagcgatgtataaatttgggtgcctatttctttataccctcacaaggcagagataaggtgaaccccaggctcttcatgattatgatgacttcacccctrgttccatttttgaaggataatgaggggtttttacctagaaggaggtctttcatattcttcacactggaacatctacaatacacatctttcccttgctagt

SEQ ID NO: 20099 - DNA, 201 bp, Homo sapiens
agtgccatagtgtgggaggatctttttattttctacgcgcaccgtatttgattctgtgtttacaggaactgtgtctgtagacaaaaagcaaaatgttgggktttagtttcttcaggtgaataaaatgttacttgcatctcctcattgtcacagtgttcgtattacatacttcgtgtgtgtagttttggcatttaaggaaac

SEQ ID NO: 20100 - DNA, 201 bp, Homo sapiens
aatgaaataatgaaataaccttagcttactgtaacttgtttactttataaacttttacatttacatttttaaaaacttttttactctttttttttttttttgagacacagttttgctttgtcacctagactggagtgcagtggcatgatctcagctcactgtgacctccgcctcctgggttcaagcgattctcacgcctca

SEQ ID NO: 20101 - DNA, 201 bp, Homo sapiens
accgagatactggtagtattgattgaaaactgtgcaagaccctgctcattggtggttgcattggagtaataattggcgtcattcacagagatgaagaagastttattggggatgggcacaccttttccatccaccagaagcacctaaagaagaaaagtacttgatagttgatgtgaacaacacccagagaggactgaactc

SEQ ID NO: 20102 - DNA, 201 bp, Homo sapiens
aagttagctaggcatggtggcgggctaatcccagcttgggaggctgaggtgggagaatcgcttgaacccaggaggtggaggttgcagtgagctgagatcaygccactgcactccagcctgggcaacagagtaagactctgtcgcataagtaaataaataaagctacagattatttgtatcccctcctgaaaagaggtgaag

SEQ ID NO: 20103 - DNA, 201 bp, Homo sapiens
atcattttctcctgctgtactgcaatgagatggtcataatagctcttatatagttttttgccaaaaatgcaaaatctgaatctaatcacaaggaaatatcyaacaaagccaaattgagggacatgttacaaaattcaaaacatcacataatccaaaagacaaaattttaaactgtcaacatcatgaaagacaaagaaaaac

SEQ ID NO: 20104 - DNA, 201 bp, Homo sapiens
gccctctctgcagtgtcttacagcacacctgcatctccagttttcggcccctccctgatcttaccaggtcacgtgatccctccagacaacatctgcccctygtcatctgcagcgggatctccaaccagccgctggaattcacgttccagaaaagagacctgcctcagatggtcagtcccagccagctcgctgcaccacagc

SEQ ID NO: 20105 - DNA, 201 bp, Homo sapiens
acctggactcacctgggggaccccctttgctgggacgatagaagtgtctgttgggcttgcactcacctcccaccgatctgtttttccaggcagcctcagtsagagcaccctgaagtttttgctcctgaatccagctgtgcactttgcccaagtggtgaaggaatgccgggcagtggtcattgcggggggtaccatgcagcc

SEQ ID NO: 20106 - DNA, 201 bp, Homo sapiens
taatcaggtggttcttggccaggttcagttcccaggaaggagccaagctgagcccgggagccgcagcatgaaaggattctttccttccatcctgggaactycctgggttaggaggaagcagtgcagtgggcactggcctgctgtgacctgggcaagcagtggaggtggacgggaggagatcgaggggctgggatggaggtc

SEQ ID NO: 20107 - DNA, 201 bp, Homo sapiens
cctgacaagagggaggcctcctccccattctgctctgtgcagctcttgcagcccctgcagacgagagtcaggccagcgtcccgcaaccagcttccccactratgcacatcgaaggcttcctggcagctctcactacggccaaccaggacggcagggtcatcctgagccgccaaggtaatcaggtggttcttggccaggttc

SEQ ID NO: 20108 - DNA, 201 bp, Homo sapiens
ggcagggcctgacggggtcagcttgcaccaagttgggtggagaacgagtagctccaggcctcccacagtggacagatcctcaggcctggaggggtgtcctyctgaaggagcattcccagtctctgacgaatgaggcctgggtctctggctggagttggagtgggtctgtgtctggagggggcacttgggctctggaaagag

SEQ ID NO: 20109 - DNA, 201 bp, Homo sapiens
caagatcacgccactgcactccagcctgggcgatacagcgagactcagtctcaaaaaacaaataaacaaaacaacaacaacaaaataataataaatttttwaaaaatgtcccatatatctcattgtatggatgaacatatattccagttttctgctattgtgggttatctacattctattgctagacctttaaaccagtct

SEQ ID NO: 20110 - DNA, 201 bp, Homo sapiens
tctctggggctggaaggagccagtgcagtgcccgaccctgtggcatagaacgtgagaagtgggcagcctctgcttgagaggatgccgagggtggtcagcamggataactaacggtggcagggcctgacggggtcagcttgcaccaagttgggtggagaacgagtagctccaggcctcccacagtggacagatcctcaggcc

SEQ ID NO: 20111 - DNA, 201 bp, Homo sapiens
ctcttatctagatccttggtatttttcactggttttgagacagtgccttcctgttgggtcttgtaaggtccagtctctcttcttgttggaagagcctgtgwattctttcactgcatgtttatgaatagccttcccgggccaggcactgtgatgagttccttctcccatacagctcatggcctggtacagggggagaaggtg

SEQ ID NO: 20112 - DNA, 201 bp, Homo sapiens
ctatttcatttcccactgcaccctcttatctagatccttggtatttttcactggttttgagacagtgccttcctgttgggtcttgtaaggtccagtctctyttcttgttggaagagcctgtgtattctttcactgcatgtttatgaatagccttcccgggccaggcactgtgatgagttccttctcccatacagctcatgg

SEQ ID NO: 20113 - DNA, 201 bp, Homo sapiens
ataccttggtctggctgctgtgtcccggcctcctggagaaggggtgaaaaacatgaacttacagggctttgggttccacgtgcaagcacgtgagtcagacrtgggaggctcctggacccacctgccctctaagtgggtccgttgcatgctataaacagtgaaaagcaaaacaaagccgttcaaatacagatgctcttctta

SEQ ID NO: 20114 - DNA, 201 bp, Homo sapiens
ctcattagatggcctcgtccctcaatcttctccaaactggtgctggcttccctgaggatgctctgagctggtgccattaacctgggcagcacttctctccrgtccacacgcacttcactctattatcctgcaccctgaaaaggcatggattttgttgaacggggccttgtgcatcagaagccaagtgcacctctgtctggg

SEQ ID NO: 20115 - DNA, 201 bp, Homo sapiens
gcttgagcccaggagtttgaggctgcagtgagctatgattgtgccactgtactccagcctgggagatagagcaagactccatctctaaaaaaaaaaaaaaatgctaatgtgagaatataaattgtgggaaatgagtgagggcaaggtggtacttcctccttctgagctcttcacacgtaatgcaaaaacccggtcttaact

SEQ ID NO: 20116 - DNA, 201 bp, Homo sapiens
cagcttcaggccatgggatgcagggctggcttccctgccaacgcctggcgctgatggattcttcccgcattgctggaaagggcagactgaggcgctgacamaagaagagttgtagctggtcataagtgacagcatcctctgttcactcgattggtcagttgtagcttcatccaggagatggtcatggggttcctgctgcat

SEQ ID NO: 20117 - DNA, 201 bp, Homo sapiens
tctaagtccatgttgattttttcctaccattgttcggggtagaagggagcaggtatctcaggtggtgggaacagtgcgagaaagcccccaggtcaacatgmacgctgccgcgcagggagcaggctcctctcagattaagcagcgtgtgctgggactgcgggaggtgaggtccattgggtggatccactaagctttggaagc

SEQ ID NO: 20118 - DNA, 201 bp, Homo sapiens
agaggaatgagacctgaaatacaggtctagttaaaagaagtcttaggtccggaaacctacaggtccaacaacaaggcagcagattctttttttttttttttgacagagtctccctctgtcatccaggctggagcacagtggtgtgatcttggctcactccaacctccgcctcccaggttcaagcgcttctcctgcctcagc

SEQ ID NO: 20119 - DNA, 201 bp, Homo sapiens
gggcgacatggtgagaccctgtcactaaaaataaacagaaagtaaagatacatatatatctcactgtgctaggctgaatgatggcctcccaaagatgttcrcaacctaatctgtaaaaactgtgagtttcttaccttacctggcaaaagggactttgcagatgtgattcaactaaggatgttgagatggggagattctcct

SEQ ID NO: 20120 - DNA, 201 bp, Homo sapiens
gagcatagactagtagagctagctcagcttcaggccatgggatgcagggctggcttccctgccaacgcctggcgctgatggattcttcccgcattgctggraagggcagactgaggcgctgacaaaagaagagttgtagctggtcataagtgacagcatcctctgttcactcgattggtcagttgtagcttcatccaggag

SEQ ID NO: 20121 - DNA, 201 bp, Homo sapiens
tgggcgacatggtgagaccctgtcactaaaaataaacagaaagtaaagatacatatatatctcactgtgctaggctgaatgatggcctcccaaagatgttygcaacctaatctgtaaaaactgtgagtttcttaccttacctggcaaaagggactttgcagatgtgattcaactaaggatgttgagatggggagattctcc

SEQ ID NO: 20122 - DNA, 201 bp, Homo sapiens
tatgtaaagtactttatgcagtttctgcttgttgtggaattacactatgcctgttactctgaagaacttgttttttgcaaacatttttggaacttttaacytccaaaaatgatcttatcacgtgagcatttcatgatctccaaggttggaacgtgactcacagatttaggtgacagctcagcttcaggcttcattagcagc

SEQ ID NO: 20123 - DNA, 201 bp, Homo sapiens
ttgcatctgcctgtagtcttaactacttggaagcccaaagcaggatgatcacttgagcccacgtgtctgaggtcagcctgggcgacatggtgagaccctgycactaaaaataaacagaaagtaaagatacatatatatctcactgtgctaggctgaatgatggcctcccaaagatgttcgcaacctaatctgtaaaaactg

SEQ ID NO: 20124 - DNA, 201 bp, Homo sapiens
ttttttttttgccattttgtatacttctctggtgaagtgcctggtcaagccttttacccatttaaaaaatcaaactgttttcttattgatttataagatakaagctaggcatagttgcatctgcctgtagtcttaactacttggaagcccaaagcaggatgatcacttgagcccacgtgtctgaggtcagcctgggcgaca

SEQ ID NO: 20125 - DNA, 201 bp, Homo sapiens
gttgagccacagaaaccttctctacccaatcagcaagggattggcagcagagaaccagaaaaacaattagataataccactgaaaataaagactttggttytcaaaaagataaacctgtacagtgcacagatgtttcacataaaatatgtgatcagtcaaagtcagagccacccttagagtcatcttttaacaatcttgaa

SEQ ID NO: 20126 - DNA, 201 bp, Homo sapiens
gatctgtacaccaacctaataacatgagcatgattgataggttgatcagtagtttggcttattgttcaatgaatatccactcccctctcccttctactgtrggaagattatacttcttgggcctggccctgtgacttgctctggcaaatgtactactaatggaaagacaggagagagaccttgaatatgtttgacttggct

SEQ ID NO: 20127 - DNA, 201 bp, Homo sapiens
ataagagagctttaaaaaataactttatgaaatcaaaacatacctaagaaagggtacaaatggtaagtgtataatgcagtggattatgtagggaacacacwtgtgtgtaagtatcaccctggtcaaaagcagtcttcatgctacttaactaccaattgctattccatcacactttgtaaaaagtaccactacagtccctag

SEQ ID NO: 20128 - DNA, 201 bp, Homo sapiens
tggcaagaccaaaatatgaaacctatccttttcatgtattgtttgggactgactcatatttgtactctttgtattgctaatttacatagctgtttaaaagrtcacattcatactaatgatatgcaatgatacattttattgagccaagagtaaggtagaacagaacagcccagggcaatgaggatggggcaaggaggcagg

SEQ ID NO: 20129 - DNA, 201 bp, Homo sapiens
tttagcagagacagagtttcaccatgttgtccaggctgatcttgaactccaacctcagtgatccacccacctcagcctgccaaagtgctgggattacaggygtgagccactgcgcccggccacatgggcattttttaaatgcctattaggggcgagtgaagctggttctggagaagggatctctgggaaatagtgaattat

SEQ ID NO: 20130 - DNA, 201 bp, Homo sapiens
aactcaccaggctgatgtggatagaatgggaggccccagttctgtccctccatccctgaggcccctccccaacctccctggaccccctgtccacagaggcmgtgctgtgtgccagcctcactcctgcattctggagatgccgttccaagatggaggttccctcacaccttcccccacccagcaaactccattggacagatc

SEQ ID NO: 20131 - DNA, 201 bp, Homo sapiens
ccacaaaagtataaccatttgcctcaccaccctaccccctccttcccacatgccttctcccctttaaagaaatgtataaatactgtattagtccgttttcmcactgctataaagaactgcctgagactgggtaatttacaaagagattgaattgactcatagttccacatggctggggaggcctcaggaaacttacaatca

SEQ ID NO: 20132 - DNA, 201 bp, Homo sapiens
aatcttgggtcactgcaacttctgcctcccaggttcaagcgaatcttctgtctcagcctcccaagtagctgggattacagatgtgcaccaccacacctggmtaatttttgtatttttagtagacacggggtttcgccatattaactaggctggtctcgaactcctgacttcaagtgatctgctcgccttggcatctcaaag

SEQ ID NO: 20133 - DNA, 201 bp, Homo sapiens
agagttcccctgctctgcaggcttgccaacgcagatgtgtcttttgatttcacctgttctagtgtggatacaagttgcatttccctaatgaataatgatgytctgaatcttttcaggcactttttttttttttttttttttttgccattttgtatacttctctggtgaagtgcctggtcaagccttttacccatttaaaaa

SEQ ID NO: 20134 - DNA, 201 bp, Homo sapiens
gcagaagaaagaagagagggacctggtgaaccgactgaaggtgagacctggggtatccggaagtgggagtgctggaggaaacagggcttcagcgattgttstggggcgattccgagactcaggcagtgcatgctcccctgccgttgctgtgcctctcagctcttccctcagctccttgggtcgatggtgctgccgctgtgc

SEQ ID NO: 20135 - DNA, 201 bp, Homo sapiens
tatttgtcctggataaacacttaggggaaggatcgctgggtcttatgtttgactttataaggaactgctgaactgttttccacagcagctgtgccatcttrtatgtccgtcagcaccgtgtgagagttcccctgctctgcaggcttgccaacgcagatgtgtcttttgatttcacctgttctagtgtggatacaagttgca

SEQ ID NO: 20136 - DNA, 201 bp, Homo sapiens
gggacagacggccgcacccacaccacgtcagggtatatgtccgtttggaggctttcctcaaacgtctggcagccctggactgcctgtgtatgctgaagaasagggcacagaaaggctgagtctgcagggcaggctggctgtggctgccaggctgggctcctttgttgggggcctccagttgccagcacatctgtgggattt

SEQ ID NO: 20137 - DNA, 201 bp, Homo sapiens
gtcattttgccttttctagaatttcaggtaaaagaatcctacagtaggtatcttttgtgtctggctgctttcacttagtgtaaagctcttgagaggtatcygtgttagatgtgtatcggtaagttgccctgttttattactgaatatattccgctctatggatgtaccacagtttgtttatccatttatcagctgaaggcc

SEQ ID NO: 20138 - DNA, 201 bp, Homo sapiens
ccgtgtcatttgaattagttgctcctcagactgacttgacagatttcagcatgagtgttagtggggacagacggccgcacccacaccacgtcagggtataygtccgtttggaggctttcctcaaacgtctggcagccctggactgcctgtgtatgctgaagaagagggcacagaaaggctgagtctgcagggcaggctggc

SEQ ID NO: 20139 - DNA, 201 bp, Homo sapiens
ggattataggcatgtgccaccacgcccagctaattttgtatttttagtagagacagggtttctccatgctggtctcgaactcccgacctcaggtgatctgsccacctaagcctcccaaagtgctgggattacaggcgtgagtcaccgcgcctggctgttttcttttcttttctttgtttagagatagggtctcactctgtc

SEQ ID NO: 20140 - DNA, 201 bp, Homo sapiens
tagagacagggtttctccatgctggtctcgaactcccgacctcaggtgatctgcccacctaagcctcccaaagtgctgggattacaggcgtgagtcaccgmgcctggctgttttcttttcttttctttgtttagagatagggtctcactctgtcacccaggctggagtgtagtggtaaaatcatagctcactgcaacctcc

SEQ ID NO: 20141 - DNA, 201 bp, Homo sapiens
ctgtggggtttctttttctttttcttttttttttttttttgagacggaatctcactctgtagcccaggctggagtgcagtggctcaatcttggctcgctgyaagctccgcctcccgggttcgcgccattctcctgcctaagcctcccgagtagctgggactacaggcacccgccaccacgcctggctaattttttgtattt

SEQ ID NO: 20142 - DNA, 201 bp, Homo sapiens
catttttaccttggagccctcctggaatcctccatcctttccgtgtcatttgaattagttgctcctcagactgacttgacagatttcagcatgagtgttartggggacagacggccgcacccacaccacgtcagggtatatgtccgtttggaggctttcctcaaacgtctggcagccctggactgcctgtgtatgctgaag

SEQ ID NO: 20143 - DNA, 201 bp, Homo sapiens
tatgacctcctttacccttgaaggccagatctgtagtacagtcacatggcagggttaggatttcaacatatgtttgtttgttaagatgggcagtctcactrtgtggcccaggctggtctcaaactcaagcgatcctcccctctcagcctcccaagtacctggtggctggcaagatccaagattactggtgcacaccaccat

SEQ ID NO: 20144 - DNA, 201 bp, Homo sapiens
gcatattttgtcttggtaattcctcttctggaaatctttcttaagtgaacaattcctaattcaaaagctacttactatatagttatacacaaagacatatrctacaaaattattaattactaggaaaacaaaatgaaataatctatatgttatataataaaagcataactaaataaatttcgtgtagtcacataaagatat

SEQ ID NO: 20145 - DNA, 201 bp, Homo sapiens
cctaaggagtatttacaaaggcagaagcataaagaagctctgagtaataaagcatcgaagaaaatctgtgtgaaaaacgtgccatgtgattctgaacataygagaccaagtaaacttgccgtgcaggttgaaagttgtgggaaatcaaatgagaaacacagcagcggcgtgcagacctctaaagagtcattaaatggcttg

SEQ ID NO: 20146 - DNA, 201 bp, Homo sapiens
tgcaccaccacgcccagctaatgtttgtatttttagtagacatggggctttgctatgttggccaggttggtcttgaactgctgacctcaggtgatctgcckgcctcagcctcccaaagtgctgggattacaggcgtgagccacggtgcccagccaccatctgctctttacagaaaaagtttgctcacctctactctagact

SEQ ID NO: 20147 - DNA, 201 bp, Homo sapiens
aatcgcttgaacctgggaggcggaggttgtagtgagccgagatcatgccacttcactccagcctgggcaacaaagcaagactttgcctcaaaaaaaaaaaattgtttttgcaattatttaatcagactttcttaagactttgacctttatgcacttttaccttccttaataactcttcaaaagaggccttgaaaaaaatgc

SEQ ID NO: 20148 - DNA, 201 bp, Homo sapiens
tagtggtaaaatcatagctcactgcaacctccaactcctgagctcaagaaaccctctctcctcagccttccaagtagctaggaccacaggtgcacaccacyacaccaagctattttcacaaatttttatacagacagcatctcagtatgttgcccaggccggtttcaaccccctgggctcaaacaatcctcccaccttggc

SEQ ID NO: 20149 - DNA, 201 bp, Homo sapiens
aagtttgggtctgtcatttaaaaaaattaaacaatttagaaatgtagtcctctcctgcttaacatcagtaatctattactgaaaattggttgttctgcatraaaatgctaaccttcagcctatttattttattttaaacagaaaaattatactatgtcaaccccaaaccctcaatcaatttcttaaaaggttaactaaagc

SEQ ID NO: 20150 - DNA, 201 bp, Homo sapiens
aaaaaaattaaacaatttagaaatgtagtcctctcctgcttaacatcagtaatctattactgaaaattggttgttctgcatgaaaatgctaaccttcagcytatttattttattttaaacagaaaaattatactatgtcaaccccaaaccctcaatcaatttcttaaaaggttaactaaagcatggtaaggtacctaaata

SEQ ID NO: 20151 - DNA, 201 bp, Homo sapiens
aaacagaaaaattatactatgtcaaccccaaaccctcaatcaatttcttaaaaggttaactaaagcatggtaaggtacctaaatataattcttataaaacraaacatctggtcagttgtgaaatgtttaaaacattgcttcttgatcaccaaataattaatatggtgaataacagataggggcttttgtgcagtagaagat

SEQ ID NO: 20152 - DNA, 201 bp, Homo sapiens
tataggacttattttgtaacattaagaagattccaattaattcaaattaaatggatgatgccttatcttcacaatgacattccaatagcttgttttcttaytttaatgaaaatatgtaatgatggtgaagattcagtgagacaggcacttccatactagctgctggaattctacgttgacacaacatatttggtgagcaat

SEQ ID NO: 20153 - DNA, 201 bp, Homo sapiens
ccaaagaagatgttaaatactaccaaaaaaaaaaggctgaaaactggtttccaagaatctctggggcatccttaagaactccccttgcatgttcattagayggccctttacccaatgtatctctaatagtctgctgaaaatactcaaaggcaagtaattttcatgtaatcaactaaacaaaatgtttaacaaatatggcaa

SEQ ID NO: 20154 - DNA, 201 bp, Homo sapiens
ggaggaaaaaaaagatgacgtcaacatggagcagagtttttcttagaccttagcctagcaaggaaagagaaatgcctggtctcagtgctgggaagctgttycagccagagccccgtggctgtgaagagagctctcctgtctggagccaaacagaaagctcataggtcttgaggccagaaaagttagtaggtggcggctctg

SEQ ID NO: 20155 - DNA, 201 bp, Homo sapiens
cttcagcccaattcacagccgcatttttccatctctttgccattcctccatgggagagctttctgttggtacaggaatagctgagaagtgggaaagatcawgggtagtaagagctgcccccgataatctacagaaagctttgctggaatgaggttgtgcatctctgaacctgagctagatttgttgggtcagggaccatac

SEQ ID NO: 20156 - DNA, 201 bp, Homo sapiens
gcttcttgatcaccaaataattaatatggtgaataacagataggggcttttgtgcagtagaagattcaagaccaagacaagctcatgtttccctttaggcrggcttcctcctgagggaggcccctgacctccctcttcttagagcatttgctttagaaaacttgtaaattttctctctgatacttcgagatgccaattttt

SEQ ID NO: 20157 - DNA, 201 bp, Homo sapiens
tgctttcctctgatgcagctgagccctgattaaccgagcagatgagctctgattgattggtttccaagccctaaactgggagtctctgtcagactgtggcwggctggtggtgggaggggcccagcagcagtttgtcctgggagcaacagcaggcgctggtttggcttgattgtgaaaagaggggtcctgtgatgctcttat

SEQ ID NO: 20158 - DNA, 201 bp, Homo sapiens
tgctgcccaggttccccatcaggttcatttgcatatgaacccagattcatttgcatttgctttcctctgatgcagctgagccctgattaaccgagcagatragctctgattgattggtttccaagccctaaactgggagtctctgtcagactgtggctggctggtggtgggaggggcccagcagcagtttgtcctgggagc

SEQ ID NO: 20159 - DNA, 201 bp, Homo sapiens
taatctcctaaaatattttaattcagttgtgtgccatttttaagttgcgtacactagagacattttatgtgatcggagaacaatgtgaaccattgttctcraagggctatttctattatttttggtatgattaatagtttgtcacaatgtacaaatattagtgattgaaactttcttgtaattctgaatatgctcataacc

SEQ ID NO: 20160 - DNA, 201 bp, Homo sapiens
atgaggccacggcctgaagtatacaagttgatagcaccaagtgctacgtatgtaaacaaaagaccatcttagagagatgacaagtcaagtggttccagggragatcagcagaagcaccactcagctgattccagtccaaatttcaacccacagaaatatgaacaataaacagatgccattataggctactaattttagagg

SEQ ID NO: 20161 - DNA, 201 bp, Homo sapiens
attttgaaaaggtcttctggcttctgctcttgctcttagaattctgccctgagactattgtataaagaagctcagtatagcgtattaaagatgaggccacrgcctgaagtatacaagttgatagcaccaagtgctacgtatgtaaacaaaagaccatcttagagagatgacaagtcaagtggttccaggggagatcagcag

SEQ ID NO: 20162 - DNA, 201 bp, Homo sapiens
cccagcaaactccattggacagatccacaccagcaacagcttcacagctaggccctggaggtatggagctcacagacctcccactaactaagaaaaacacrgtagagagccagaagggtggcaggttccaacagagcccccaccatgtcccccacccagccccccatccgaccccttccctccacctggactcagcaccat

SEQ ID NO: 20163 - DNA, 201 bp, Homo sapiens
ttgtagagacagagtttcaccttgtttcctaggttggtcttgaactcttgagctgaagccatccaactgcctcggcctcccaaagcgctgggattacaggygtgagccaccgcaccaagcctgtttcgtgttttgttttttaagacagggtcttactatgtcacccaggcttgagggcagtggcgtgatcatggcttactg

SEQ ID NO: 20164 - DNA, 201 bp, Homo sapiens
ttctgagacagagtctcgctctgtcacccaggctggagtgcagtggcgcgatcttgcctcactgcaagctccacctcccgggttcatgtcattctcctgcsacagcctcccgagtagctgggactacaggggcccgccaccaagcccagctaatttctttgtatttttagtagagacggggtttcactgtgttagccagga

SEQ ID NO: 20165 - DNA, 201 bp, Homo sapiens
ttttttttttttttttctgagacagagtctcgctctgtcacccaggctggagtgcagtggcgcgatcttgcctcactgcaagctccacctcccgggttcaygtcattctcctgccacagcctcccgagtagctgggactacaggggcccgccaccaagcccagctaatttctttgtatttttagtagagacggggtttcac

SEQ ID NO: 20166 - DNA, 201 bp, Homo sapiens
aatttacactcccaccaacagtgtaaaggcgttcctatttctccacatcctctccagcatctgttgtttcctgacttttttttttttttttttctgagacrgagtctcgctctgtcacccaggctggagtgcagtggcgcgatcttgcctcactgcaagctccacctcccgggttcatgtcattctcctgccacagcctcc

SEQ ID NO: 20167 - DNA, 201 bp, Homo sapiens
gtgggttcattcatgcagctttcctgagacagctgggggcttagactgtgactgcaaaccaacaagctggtggagtgacggtggccttggaatgcttttcmtttttaggttgacatgttaaaatgggaaaaatctgcttacaaatctacatttcccacttcgctgaaagaactttaaaatggggtcacttagaacaacctg

SEQ ID NO: 20168 - DNA, 201 bp, Homo sapiens
catttgactcagtccagctgccgccttctctgtcctgcctgaagcagctgagcgctgttgagaccacacggcctcatggatctagacgggcatgagctccyggcctctgcttcatccttggtgctgcccgtaagtcctgtggtctctggccagctttatgtcctactcccccaatggctataacagaccttcaccagtctc

SEQ ID NO: 20169 - DNA, 201 bp, Homo sapiens
gcacattacagtctggattcagaaacccctttcaacagcacgtagatagttaaagagaaagattgttcttcaagggcctctaaggacaaaagtgaatccaytaacactctaggaagcagtgtgactactggaagaaagacattcaagaggtaaaatggattttagaaggtcacaggagccaattgtcagtgtttgtactct

SEQ ID NO: 20170 - DNA, 201 bp, Homo sapiens
tttctctgtctgaagcttggactattcatgagaggacttcctactccaagacataagggagtcttgctcagaaggaggagctcctgtctgctgaggacacrgttccatccaatgaggtcagcagggctatcagcagcttccgttaattccgttggggcaggcgcttggcaagcggcagttatttgagctgaggatgctggg

SEQ ID NO: 20171 - DNA, 201 bp, Homo sapiens
gaatattcatattccagatcaggaaagccagaggcagggcaaggcaggcaatgcccaggaacaaggaaagcctggtgcttctcctctctcacctcccaggsgtggttgaaaagctggccatcattcttaaagcagccgcttgttttctgttggcttgaaagccagattaaggtctgtttttgaacattttcatcaatgaat

SEQ ID NO: 20172 - DNA, 201 bp, Homo sapiens
aaaatgctttgttccttaatagttgaaaactcactatttttagtcctttctgaagtcctaactacattccttttttttttttttttttttttgagacggartctcgctctgtcgcccaggctggagtgcagtggggcgatctcggctcactgcaaacttcgcctcccgggttcacgccattctcctgcctcagcctcccag

SEQ ID NO: 20173 - DNA, 201 bp, Homo sapiens
cacccacaaccatctgatcttcaacaaagctaacaaacacaaggaaaggactccctattcaataaatggtgctgagataactggctagccataggcagaakattgaaactggatccccgccttacacaatgcacaaaaatcaactcaagattggttaaagacttaaatgtaaaaccaaaaagtatacaaactctggaagac

SEQ ID NO: 20174 - DNA, 201 bp, Homo sapiens
acccaacttcaaactatactacagggctacagttaccaaaacagcatagtacttgtacaaaaacagacacacaaatcaatgggacagaatgcagagaccakaaataatgctgcacacccacaaccatctgatcttcaacaaagctaacaaacacaaggaaaggactccctattcaataaatggtgctgagataactggcta

SEQ ID NO: 20175 - DNA, 201 bp, Homo sapiens
aactgtgatgtaactttgaattaaacaaacaaaacaaaacagaagaagactatatatatattttttctttttttagagacagtctcactttgctcccaggmtggaatgcagtggctattcagaggcttaatcattgggcactgcagccttgaactctgggcttttttttttttttgagatggagtctcagctctgtcgtcc

SEQ ID NO: 20176 - DNA, 201 bp, Homo sapiens
gttctcaacctctctaagactcagttacaaaaaagagggcataatagtgtctcttgccttataggttttggtgaaaattgaataagaaaacatcagtaagkatgtggcatggtgcctgacaatctttagatgcccaataagtggtagctagtatcaacatagaaataaaattgaaaagatacacacacaatgtttgcattg

SEQ ID NO: 20177 - DNA, 201 bp, Homo sapiens
gccttataggttttggtgaaaattgaataagaaaacatcagtaaggatgtggcatggtgcctgacaatctttagatgcccaataagtggtagctagtatcmacatagaaataaaattgaaaagatacacacacaatgtttgcattggttatccttgggtaatgggttttaactttgtttcctagattttaaatttttccac

SEQ ID NO: 20178 - DNA, 201 bp, Homo sapiens
gtggtgcagatcctgtgggaggggagaatgacttaacaaacccagaggtgggggtgggagggaaagaattcaggtgagactgcactcagaggtaggattcytttttcttttttgtaggtaacattttttgttttcttactgtgtgccaggcattgttctaaactaaatatacaaggccaggcgcagtggctcactcctgta

SEQ ID NO: 20179 - DNA, 201 bp, Homo sapiens
tcctgtgacctgttgaggtttgctgctccaaaggaataaggagtctttgacattaatgtccatttaactcagggatctaaaaaggcaggttagtgttagarttctataggcaccccagaattgtacctaagagtgtgtgtgtgcgtgcatatgtgtgttttcctggggatggtgtagctttccttagattgtcaaaggaat

SEQ ID NO: 20180 - DNA, 201 bp, Homo sapiens
tattttatattatatttattttattttatattttttgctctgttgctcaggccgaagtgcagtggtacaatcatggctcactacagcctccacctcctgaktctcaagcaatcctcccaccccagcctcccagagtgctgagattacaggtgtgagccaccacacctggcctccattacttaaaaatgttttaaaggctgg

SEQ ID NO: 20181 - DNA, 201 bp, Homo sapiens
agtgctgggattacaggcatgagccaccatgcccagccttttaaatttattttaaaaataaacgtatttcttacagttctggaggtttgaaagtccacagytgttgggctgcatctggtgagggccttcttaccgcagcataacatgacagagagcatgacagggcaagaggccattttcttgtctgagagtttgatttag

SEQ ID NO: 20182 - DNA, 201 bp, Homo sapiens
tgatggccatgttactttccatcactatagtagtcattttattatctatatgtgtcccataacgttatgttgtacaccttaaataaatgtaatttttttttgagacagggtcttgctctgttgcccaggctgaaatgcagtggtgcaatcatagctcactgcagcctcgaatttctgggctcaagtgattgtactgcctca

SEQ ID NO: 20183 - DNA, 201 bp, Homo sapiens
aactgactgcctaaggaaggttctggagtgtggacaaaggtggagatggctacttccactgattaataaaagccttctaggccaggcgcggtggctcatgsctgtaatcccagcactttgggaggctgaggcaggcggatcacctgaggtcaggagttcaagaccagcctgaccaacatggagaaaccccgtctctactaa

SEQ ID NO: 20184 - DNA, 201 bp, Homo sapiens
tgcactccatcctgggtgacagagcaagaaccctgtctctaaggaaaaaaatagaaactgctgtcattgaatttaacattatctatgggtctttagtttgycatgaattgtcatcagcagtcagcatgagatacccaaatacaaaagtacaaaggaaaaaatacttttcactttgtaaaactgaacgcacacagcattaca

SEQ ID NO: 20185 - DNA, 201 bp, Homo sapiens
aaacacagcaatggctcatacagtgcctttggggagcgagatggaaatggaaacacatggtaatatcacccaattcccaatgagttctgtactccagagcrtaattcctgagccctctggaactattccactacctctccccttaacccctttccttcttgcactcagtcttctacctctttaatactgtttatttcaccc

SEQ ID NO: 20186 - DNA, 201 bp, Homo sapiens
attagagaaatgcaaatcaaaaccacaatgagataccatctcacaccagtcagaatggctgctgttaaaaagtcaaaaaacaacagatgctgatgaggttrcagagaaaaaggaatgctttttttactgttgtggggagtgtaaattagttcaaccactgtggaagaaagtgtggtgattcctcaaagacccagaggcaaa

SEQ ID NO: 20187 - DNA, 201 bp, Homo sapiens
agagtctacgaggaacttaaacaaatttacaagaaataaaaacccattaaaaagtgggcaaaggacatgaacagacaattctcaaaagaaaacatacatayagccaacaaacatatgaagaaaagctcaacatcactaatcattagagaaatgcaaatcaaaaccacaatgagataccatctcacaccagtcagaatggct

SEQ ID NO: 20188 - DNA, 201 bp, Homo sapiens
atttagcaactgttttaggatagatttttattctggaagatccataatgaattatattttatatgaagacagggctaccttttgcgtcaatattttgataktgaagagtgctggtacatcaataaagtacttgtatagtaaacaaattaaagatgttttgtgaactagctaggccttgaagactcacagggcttggtgtgt

SEQ ID NO: 20189 - DNA, 201 bp, Homo sapiens
tggatagttcaatatatattttgccaaaatgttatattgagtttacacaaataaacacacacaagctgtcataataagttcatttagcaactgttttaggrtagatttttattctggaagatccataatgaattatattttatatgaagacagggctaccttttgcgtcaatattttgatagtgaagagtgctggtacatc

SEQ ID NO: 20190 - DNA, 201 bp, Homo sapiens
caccatcatcttgataccaaaacctggcagagtcacaacaaaaaaagaaagcttcaggcgaatatccctgatgaacatcgatgcaaaaatcctcaacaaartacttgcaaaccaaatccagcagcacgtcaaaaagcttatccaccacaaccaagtaggcttcatccctgggatgcaagcttggctcaacatacacaaatc

SEQ ID NO: 20191 - DNA, 201 bp, Homo sapiens
aagtttattctgataggtctattttttgatgtactaataaaactggccatctctgctatagttttgctaacttgttgcagaagtaatctcaagaagaaaayagccctattagattatgtttaggatggatagttcaatatatattttgccaaaatgttatattgagtttacacaaataaacacacacaagctgtcataata

SEQ ID NO: 20192 - DNA, 201 bp, Homo sapiens
catttaaataatgagggaggccacttctaaagacttatcatttacctgatctacacaatatctagcataggaccagttctcaattgacggcaaacagtccyagcaggtcacttcattttgaacagacattgcaattgcacttgagaaatcatgccaagttttgcagggattgtccttggacttgtcaccacgaagacataa

SEQ ID NO: 20193 - DNA, 201 bp, Homo sapiens
tgcattataattagcgtatagtgagcagtgaggacaactagaggtcactttcatcaccaccttggttttggcaggttttggctgccttctttatggcattrttttatcagcagggtctttatgacctctatcttgtcctgctgacctatcttgtcctgtgactaagaatgcttaacctcctgggaatgcagcccagtaggt

SEQ ID NO: 20194 - DNA, 201 bp, Homo sapiens
atactacattgtacccattaagtaatttctcatccctctacatcctcccacccttcttgttttttttgtttgtttgtttgttttgctttgttttgttttgytttgctttgttttgttttgttttgagacagagtctttctctgtcgcccatcctgggttcaagcgattctcatggctcagcctcctggggttttaccctga

SEQ ID NO: 20195 - DNA, 201 bp, Homo sapiens
ttctaatcaaattgaattacacgttaacaaaacttacttaaattttccttgtatatttaattctatctcttcccaggccaagtcaaaaaaaatatgaaccyttggaacaattacatctagaagtgaccagtcctagtctaaatatttaaatacataacatgaggaattcaggccaaaagtttattctgataggtctatttt

SEQ ID NO: 20196 - DNA, 201 bp, Homo sapiens
aacctagattaaatcttgttggagatagagactctttatctacctctttatatgaaatgttaagcaaccacttagagcgtaatcgatcataaccaatcagrtcttgtaactgtttgttagtcttgtgtggaaaatgtaattctgttcagcattcttgttttttcctatataaatgacccctacctttctctacactgggga

SEQ ID NO: 20197 - DNA, 201 bp, Homo sapiens
ctaaatcttactgtaaactattgtcagcctactgtgcaatagaacaccagaactcattccttcttcattcttttcagattaaataaaattttaaaacactygtagagtgtcagatgtgttccaaggactgatccaaatgctcaaggcacaaaaatgtatatgacatgttcacagcccatattagcttaaaattttaagcca

SEQ ID NO: 20198 - DNA, 201 bp, Homo sapiens
cttaaaggatacaattggcggggcacagtggctcacacctgtaatcctagcactttgggatgccaaggtgggcagatcactagagccaaggagttcaagaycagcttgggtaatattgtgaaaccccatctctactaaaaatacaaaaattagttgggtatggtggcgtgtgcctctgtaatcccagctacttgggaggct

SEQ ID NO: 20199 - DNA, 201 bp, Homo sapiens
ggcaagcctgagtcctgggattacccctttacctctatttaggtttatctattccattccagtaatagttactcaccgctattttaaaaaagaaaagaggytttttgacatcagctgttgctattctatatgttatcttctttctgtaagggaaggtacccttatcaccattctggatctgagcctgaaatctggccacct

SEQ ID NO: 20200 - DNA, 201 bp, Homo sapiens
gctgtggcttacagaggagctgtggaattaggcatcctgtggtatattacagtctcaggtgtgccgaaccacacgtatgatatgctgaagacactagaaamggccaagacatacaggattgtcagagggattgacttgggatcagttagtcaatcgatggtaggaaggggagttttcttacttccgttgaagatgtgagtc

SEQ ID NO: 20201 - DNA, 201 bp, Homo sapiens
gtaattgtacatacttaaaggatacaattggcggggcacagtggctcacacctgtaatcctagcactttgggatgccaaggtgggcagatcactagagccmaggagttcaagaccagcttgggtaatattgtgaaaccccatctctactaaaaatacaaaaattagttgggtatggtggcgtgtgcctctgtaatcccagc

SEQ ID NO: 20202 - DNA, 201 bp, Homo sapiens
gagtttcttttcacaacaatccagtaatctccaaacattggttctgaaatcagttggaacgagagttgggtaatatttcggaaagaagtcacattttgccwttgaaaaatccgattgttttgaggatcctagaaaataatgaaaaaaatataaacaatcagaatttgtatgagagtattaccctttgctgccatatttcgg

SEQ ID NO: 20203 - DNA, 201 bp, Homo sapiens
gacaacaaattggggatcaccaagccactttacaattgagtaaattcaatgcacctgctgcttgtactgctctaggaatgaaaacacacagacagctctcyttcccaaacttactagactggtgcaaaggtcattgtggttttggcaaaaaaaccccaccaaaacctaacattttcttttctcttatccatcttcataccc

SEQ ID NO: 20204 - DNA, 201 bp, Homo sapiens
gagaggagcagcaaagtgctgatgacgaagccaaccaggtcaaggaagggagacaaagaaaaccagttctagcttcacctactcctgcctaagtctaacayaaatgttgtgttggtccatcctttaaactcttcatctacacaggacagctacaaatagcaactggttaccatatcttttaacagcaaattggtgtgtcac

SEQ ID NO: 20205 - DNA, 201 bp, Homo sapiens
ttgagtaaattcaatgcacctgctgcttgtactgctctaggaatgaaaacacacagacagctctctttcccaaacttactagactggtgcaaaggtcattrtggttttggcaaaaaaaccccaccaaaacctaacattttcttttctcttatccatcttcatacccaggacagactgacttacccttgcaaaacactttac

SEQ ID NO: 20206 - DNA, 201 bp, Homo sapiens
tttttccagttgagtaccttggggtgaattattattgttactgttatctctgtcgttccttactgcttcgtggtattttgcttgataagcatgctctgcamccacctctgttcgccagaggttacttctgcaaagtaggaagaaacgagcaatacgatggtaatctttgcgcctttgctaagatcttttgtaggttcctta

SEQ ID NO: 20207 - DNA, 201 bp, Homo sapiens
tgtttattagtaatacattcagttcaggctaggtagtaatcatatctgggttggatgttgccccaataaaaaaaaaattaaatttttttcttcctgaaaakgaaagtaatttgtgatcagataacacagaaaacaacaaaacaaaaatcatacataaactcaccaggagggtgtgtatttccttcatgaatatatgttgtt

SEQ ID NO: 20208 - DNA, 201 bp, Homo sapiens
agcaggggtagtttccctttccgaccagaggcaaacaacctgggtcacttccttgcttctcagacctcagtgccctttctgggtgctttctgtgttagaaytctcacctctgagaactgagctcaaggttcttgctggggcaaaaattgaaatgagcagaatttttttttgtttgtttgtttgcatttctggcctgcctcc

SEQ ID NO: 20209 - DNA, 201 bp, Homo sapiens
gtataaatggacagatactgatagtggtgggaagcagacaaattcctaggtagatacgggcgggtccctggtgaaaaccaaccttcgagtcaaagaccgcyggaagcctgaaaactcacctgccagttctgggtagaatctaagacccaagtgagaactcccgcaatgccttttagccaatcaaatggtgctttttccagg

SEQ ID NO: 20210 - DNA, 201 bp, Homo sapiens
gggtggtaaacaaagatggttttaatcactcacagtttgtgctggcagctgaccataattccttagtagcaataccctctggtctaccgcccaaagagcayaaagagagtttgaagcagccgagacttgaagatcgacattggatcctggtaaacttttttctttagaaaaatttaagttgacctgaaaatgaaaataaaa

SEQ ID NO: 20211 - DNA, 201 bp, Homo sapiens
taaaatgaaataaaataaaatacctaggaataccaagaaggtgaaagatctgtacattgaaaactgtaaaatattaatgaaagaaattgaaggctggggcrgaaggattgcgtgattccaggagtttgaggctgcagtaagtcatgattgtgccactgcactgcagcctgtgtgacagagtgagaccaaaaaaaaaaaaaa

SEQ ID NO: 20212 - DNA, 201 bp, Homo sapiens
caataacttttagatttgcccttttgaggctagtttctagatcctgtaggtgtgcttcattttttttttctttagtctcttgtgtgtgttttcaaatagcytatcttcaggctcactaattcttctgcttaatctattttgctaataaaagaccctgatgccaattacattttttagctccagaacttctgcatgattctt

SEQ ID NO: 20213 - DNA, 201 bp, Homo sapiens
ttattcttcctatccaactgaaattttgtatcctttgaccaaacatttccccaaaactgcacccccaactcccagtgcctggtaactactattctactctsaacttctatgagtttaacttttacagattccacatatagttgagatcatgcagtatttgtcattttgtgtctggcttataacataatgctgtccagattc

SEQ ID NO: 20214 - DNA, 201 bp, Homo sapiens
aagtcttagaaagtaatgttatattaacatgtaatatgaattccctgttactctttggatggtttgcatttgaccagtgtcttttcatttttagtaaaagyaaaattttttctagacataatcctgctattgatgttgaatactatttcatcttaccctgcataccacacaataccactgatacattgtatataccactga

SEQ ID NO: 20215 - DNA, 201 bp, Homo sapiens
tatgagctatgtatcatttgccccaaattgtgtggcaccattctacatggtggtgtctcactaatgattaattcttcctctttcttttcttttccctatcytcagaatttcacattttgtttctttttgtttgtttgtttgagacggagtttcactctgttgcccaggctggagtgcagtggtgcaatcttggctcactgc

SEQ ID NO: 20216 - DNA, 201 bp, Homo sapiens
taatgtcttgtgtttttctctatatttttcaaattttctacagtgaggattcattgcttctctaataacattaatgtaagcatataaataattaaagtttyatggttaatctcacttctcattctctctgagctttgtgttttcttgtgaaggtaaatctctgaataaatactcacttagcacatacatccacttggaatt

SEQ ID NO: 20217 - DNA, 201 bp, Homo sapiens
acagcaggtgaaaggctgtagccctcctgccctctcctggcaccaggcggccaccccacgttatgggaagtggtggtggcgccaggccagcccaggagccrtgggctggtgggactgaacaagttgggacatgcacccgttcggcaaagcttgtggacagcaggaatgaatgaactgtaacacaaacgagctgagactctt

SEQ ID NO: 20218 - DNA, 201 bp, Homo sapiens
tttttgcatggctgtgctcagtagctttctaaaagaagcctaagacttagtgggggaactatcgctctccacttttgtagcaatattaagacttataaccrtgataatacaagttattttactgcctcccttacactatatttgaatggattcccatgtttataaatagataacatgaatataccttaaattagtccttct

SEQ ID NO: 20219 - DNA, 201 bp, Homo sapiens
tcctggcaccaggcggccaccccacgttatgggaagtggtggtggcgccaggccagcccaggagccgtgggctggtgggactgaacaagttgggacatgcmcccgttcggcaaagcttgtggacagcaggaatgaatgaactgtaacacaaacgagctgagactcttcggggtgcagacctcgggattccccaagccagag

SEQ ID NO: 20220 - DNA, 201 bp, Homo sapiens
gggactgaacaagttgggacatgcacccgttcggcaaagcttgtggacagcaggaatgaatgaactgtaacacaaacgagctgagactcttcggggtgcaracctcgggattccccaagccagagctgtaacatgctgtaacaccccccaccgcatttttttttctttttcttttgagacagagtctcactctatcaccca

SEQ ID NO: 20221 - DNA, 201 bp, Homo sapiens
ttaatggcagttggtcaaattaataataggtaatgtcttgtgtttttctctatatttttcaaattttctacagtgaggattcattgcttctctaataacaytaatgtaagcatataaataattaaagtttcatggttaatctcacttctcattctctctgagctttgtgttttcttgtgaaggtaaatctctgaataaata

SEQ ID NO: 20222 - DNA, 201 bp, Homo sapiens
aacagccaacatattatataataaaataattaaattgggtatagtcacataaaaatatgtgcagcagaaaattggaattcatgaaaagattggcataataygtaggcatgttttcttaattattataaatagaaaagtatgattgcagtcatggaaaatattcattaaaattagaggaaacttacaatgttagtgacatta

SEQ ID NO: 20223 - DNA, 201 bp, Homo sapiens
agtttacagttaaaaccacattcataaaacaaagttaaaattatggtaggggcttgaactttgctgaagaatagacatagttgaacaatgacccgccattrcttagcttgtttttgttatataagttgcttactgccccagagtcttgtatctggggtggcaagatttagagcttctccaacttctcctgtaggtaatatt

SEQ ID NO: 20224 - DNA, 201 bp, Homo sapiens
ctttgctgaagaatagacatagttgaacaatgacccgccattgcttagcttgtttttgttatataagttgcttactgccccagagtcttgtatctggggtsgcaagatttagagcttctccaacttctcctgtaggtaatattactattgtaaaacctgaagaactggtctttgagacatttttcagatttagcatttcag

SEQ ID NO: 20225 - DNA, 201 bp, Homo sapiens
actggtctttgagacatttttcagatttagcatttcaggagaccaagagatgccacttcgtcctgagaccgcttcccaggaaatgacttggctgtgtgaawatggttttagacacccctgcaatttcatccccagccaatccgttgtttcagttctccagccccctgcctgccaaagtagtagttaaaaaactctagcctc

SEQ ID NO: 20226 - DNA, 201 bp, Homo sapiens
gttttacagttttcagtgtagaggacttacgtgtctttcgttacatttgtcctgaagtgctttattttttgatgcttttataactgaagttattgtgaaaratttattttgtgaatgtttactggtagtatgtagaaacacaattggtttttgtatttgtaactgtattctgttagtttgccacttattttggcagttgct

SEQ ID NO: 20227 - DNA, 201 bp, Homo sapiens
ggggttacaggcacccaccaccatgctcagctaatttttgtattttttttttttagtagagacagagtttcaccatgttggccagcctggtcttgaactcytgacctcaggtgatctgtctgcctcggcctcccaaactgggattacaggtgtgagctactgcccatggcagcgatttttaaaagaacacaacaatatctg

SEQ ID NO: 20228 - DNA, 201 bp, Homo sapiens
gccaaggcaggtggatagcttgagatcaggagttcgagaccagcctggccaacatggtgaaaccctgtctctactaaaattagccaggcatggtggcgggygcctgtagtcccagctatgtgggaggctaaggcaggagaattgcttgaacctgggaggtgaagtttgcagtgagccgagattgcaccactgcaccccagt

SEQ ID NO: 20229 - DNA, 201 bp, Homo sapiens
actcccagtcatggctgactcctccctttccttcgttcttgttcctaatctgtcaccatgtcctgtcgttttctttgtctcacccaaccctctgtgcctgmaaatcccctgactgcagcctcatccctgtcacctcctgactgtagttggtgacagaagaggaggctgcaccagtgaaggagcagggactccaggtctggc

SEQ ID NO: 20230 - DNA, 201 bp, Homo sapiens
tggtcttaaatcaatttggttatgacactaggtcccagaaaaaaagctgctatctcattagcagcttggtgtgttggaaattcatgtttgaaccacacagwgaacctacactaccagtaccattacttccctgcatataaaaaacaaaaaatgggggccaggcatggtggctcatgcctgtaatcccagcaatttgggagg

SEQ ID NO: 20231 - DNA, 201 bp, Homo sapiens
ttccagtgccaagtgttagtatattctcttctgttgtttgatggaaacgctcctcagtatctgtttccattcaaagtataccatttccttctctctctctytctcgacagggtcttgctctgtagctcaggctggagtgcagtagcactatcacacatgacagcctcaagctcctaggctcaagcaattttgctgcctcag

SEQ ID NO: 20232 - DNA, 201 bp, Homo sapiens
cttgggggccaccagatgccaatcagtagaatgggagagaaggaaggatggaggaagtgaggacaaggggcaaggaggaaggtctgtccacctgtctcttytgtgcaggaggtgtccaagcaggaggagcacgtcacatccccactgaaaaagcccacagaaaatgaaaagcccacatgcttgtccattgctgcaggatgg

SEQ ID NO: 20233 - DNA, 201 bp, Homo sapiens
gacagataggcagacagctagatattcatcatatttaaatagaaaaatatttcgatctcttccctttatagttcagtcttaaagaataagactagagaacstgtttttaggattggttttgatacatagtctatgggcattactgggcaagtgtaaatctctcttaatgcatcaaccaaagagcttatcagtctgagaaat

SEQ ID NO: 20234 - DNA, 201 bp, Homo sapiens
tgctgctggcattggccacaaagcctcctggtctggctccaaagcctggcagggtcttttccccgggggagctgcaggcagggaacagtcctgatgggtcwtccccttcactcccagcccagagcccccggccaggcacccccagggaaggctctggtggagaacctgtgcatgaaggccgtcaaccagtccataggtgag

SEQ ID NO: 20235 - DNA, 201 bp, Homo sapiens
tttgcctaattcttcattttctttgactctctgtgttgttgcctctgcattagacaaaggaaggcacctctcccattcttcacagactagtcttgtataggagaaggttcctatcaatcagccttgttggaggttgtgggagattctaacaatcctttctcttctcagggagaagcaggaagctgtggttcttgtctgctt

SEQ ID NO: 20236 - DNA, 201 bp, Homo sapiens
agggtaagagagcttatcacaggcttggaatgtttctgtgtggaggagaagtttattgtggggttggaatgtctctggtcagaggggaggttatcttgggrctgcatctctctggccggagaggaggttatcttgggatgggcatgtctctggctggggaggggtttattttcgtgttggaatgtttctggtcagagatgt

SEQ ID NO: 20237 - DNA, 201 bp, Homo sapiens
ttcacttctttttattctttttgctctaaacttctcttctcgcttcacttcattcatttcgtcttccatcactgataccctttctgccagttgatcacatyggctactgaggcttctgcattcgtcacgtagctctcgtgccttggttttcagctccatcaggtcctttaaggacttctctgcattggttattctagttat

SEQ ID NO: 20238 - DNA, 201 bp, Homo sapiens
ctcagatctgcctcactccatagcctgtgcccttttctttccactcacctttttctctttctatttaaaaattcctaacacttttgagattctgagtcaawtcataccaataaaatcatgtgtcaggtttcatgattatataaaggccagacttagatctggccacacatattatacctgaacatttcttcttatttctac

SEQ ID NO: 20239 - DNA, 201 bp, Homo sapiens
gaaatcaaagaaagaataagaatgaaaaatgagtgagaactttttttggagtaaagatcatggtctgtacctgtgcaataaattgctcacatatttcattktcatttttctcacaattgcttgaagaaaaatactctctgcacacccggatttgggtttccccttgcacaggttggccaaaggtgtacctaatgggggaag

SEQ ID NO: 20240 - DNA, 201 bp, Homo sapiens
ctgaggcaggaggatcctttgagcccaggagtttgagaccagctgtggcaacatagcgagactccgtctctacaaaaaattaaaaaattagccaggcgtggtggtgcatgcttgcagtctcagctacttgaaggctgaaatgggagatttcttgagcctaggagttcaaggctcaatatatgaaacaatggttccatgtat

SEQ ID NO: 20241 - DNA, 201 bp, Homo sapiens
ggaatatgaaaaacattcaataagtgttggctgattgaattaattcatgtttcattaattttatatcatcttcctaaatctcaatgaagtatcatgcaccyatttagacagtgtaaaataatccataatagcaatatattaaaatcaaactaatacttaatatcttttgtgtgccagaagttgggcaaagggctttatatg

SEQ ID NO: 20242 - DNA, 201 bp, Homo sapiens
gtgaaaatggtgagttgtttacatgcagtggccagtacagcgtggtactcacacctctttctggaagttgccattgggtggctctgtgggctcccaggctrttgctcagtgcagtcagccgttcttgggagttctgggggaagagcccagtgtcatggatttgagggcattccagctctgaggttgcaggcttctccttgg

SEQ ID NO: 20243 - DNA, 201 bp, Homo sapiens
tattaaccaattcttttttttttagtggtaaagagctattcaaaaatttatttctttttgtgtcagtttgttaaattctgttttttttccataaataattygtctacttaatctaacttgttaaatttattgacataaagatataacattaccttattatacttttaatgtctttaaaatctttagcaatatagcctctcc

SEQ ID NO: 20244 - DNA, 201 bp, Homo sapiens
attctttaaaacaaatgagtaaatgttaagtgttttcctgagttctgtgagccatccagcaaattggacctgaggagggtgtcagggatacctagatttaragccagtcagtcagaaactcaggccacatcctgtgcttgtgactggcattggaagtgggagacagtcttgtcaggctgagccctgaccttttgggatctg

SEQ ID NO: 20245 - DNA, 201 bp, Homo sapiens
gtttgtttgcacctgcctcaccacaaatacctgagtgtttgtgcagtgtcttgagctacgacttcatggaatcacgaggcaatagaaatttttcaactccrttacagtcttatgggaacacagtgtatacatggttctttgttgacagaaacattgttatgtatatatggttcattgttatgtgtgcatgactgtatatat

SEQ ID NO: 20246 - DNA, 201 bp, Homo sapiens
atgatctcagctcactgtgacctccgcctcctgggttcaagcgattctcacgcctcagcctcccgagtagctgggcctacaggcgcacgccaccatacccrgctaattttttttttttactctttttgtgatacacttagcttaaaatacaaacacattgtgcagttgtacaaaatatttttctttatatccttattctat

SEQ ID NO: 20247 - DNA, 201 bp, Homo sapiens
aaatacagtaaaatacagtataaaagataaaaaatggtacacctgcatatgacacttaccatgaatggagcttgcagattacagtataaaagataaaaaayggtacaccggtatatgacacttaccatgaatggaacttgcagactggaagttgccctgaatgaccaatcggtaagttaatgtaaaggcctagggcattac

SEQ ID NO: 20248 - DNA, 201 bp, Homo sapiens
ataagatattatttgcaagccttatggtaacctcaaataaaaaaacatacaacagatacacaaaaaataaaaagcaagaaattaaaacataccgccagagraaatcaccttcactaagaggaaaacaggaaggaaggaaagaaggaagagaagaccgcaaaacagcaagaagacatataacaaaatggcaggagtatgttt

SEQ ID NO: 20249 - DNA, 201 bp, Homo sapiens
attataatgctataagagaggcaagcctgagtcctgggattacccctttacctctatttaggtttatctattccattccagtaatagttactcaccgctaytttaaaaaagaaaagaggctttttgacatcagctgttgctattctatatgttatcttctttctgtaagggaaggtacccttatcaccattctggatctga

SEQ ID NO: 20250 - DNA, 201 bp, Homo sapiens
agagttaaagaaagaggaaagaaacatgaaaaatggctcaacagtgaaagacaggtttattttggagaataaacctgagaggggattctgaccaattttttggtcaggaccactctctcttacagactaagagtatttaagggttttagggtaagagagcttatcacaggcttggaatgtttctgtgtggaggagaagttt

SEQ ID NO: 20251 - DNA, 201 bp, Homo sapiens
tagcatgggaaagacccacccccatgattcaattacctcccaccaggtacctcccaccaggtccctcccacaacatgtgggaattgtgggagctataattyaagatgagatttgggtggggcatagccaaaccacatcaataacatagagaaggaattcagaatcctatcagaaaaacttaacaaagagaacaaaaattta

SEQ ID NO: 20252 - DNA, 201 bp, Homo sapiens
gaaaatagtttctttctcccttcaagttggataaattttgtacacacgaaaaataagtttgaatttgtaggctaaattcatttcttagctccttagaaatrttaggccttttcaaagaggaaagccttaattacactgtattcctcaggaaggttatttccttcatgtaaattatgacttttgtgcttccagtagctctgt

SEQ ID NO: 20253 - DNA, 201 bp, Homo sapiens
gagtctcaaggtgaagacgcggtttgtgggtggctgaggggttgctccatgggggctccctccctcccttccttccttagatggacgaggtgggtcgcatyctctgtaacctgtgcggtgtggtttctggaggggtggtctgtttcttcccctcctacgagtacctgcgccaggtccatgcccactgggagaagggtggcc

SEQ ID NO: 20254 - DNA, 201 bp, Homo sapiens
tgtgcctggggtgtgcagcccctgattgtcattgtggtgcccatcaggaccctggacagaagaagggaggactcagtgccagggcaatagggaggcccccyagggacgctagtgctgtgacatgtgtcagaaaggcgcagtcagcagcagcggctgggtgtgtttggtgggaggtggcacctaccaccccgtggttcccac

SEQ ID NO: 20255 - DNA, 201 bp, Homo sapiens
ctggaatatgaaaaacattcaataagtgttggctgattgaattaattcatgtttcattaattttatatcatcttcctaaatctcaatgaagtatcatgcayccatttagacagtgtaaaataatccataatagcaatatattaaaatcaaactaatacttaatatcttttgtgtgccagaagttgggcaaagggctttata

SEQ ID NO: 20256 - DNA, 201 bp, Homo sapiens
attgttacaattgctaatacagcacctggaatatgaaaaacattcaataagtgttggctgattgaattaattcatgtttcattaattttatatcatcttcmtaaatctcaatgaagtatcatgcacccatttagacagtgtaaaataatccataatagcaatatattaaaatcaaactaatacttaatatcttttgtgtgc

SEQ ID NO: 20257 - DNA, 201 bp, Homo sapiens
ctgtaacacctcagtggccatacatgtttcgtttgtaacacttatgtaattctaatatatgttttgtccccagttatactttttctatttcttctattgtkacaattgctaatacagcacctggaatatgaaaaacattcaataagtgttggctgattgaattaattcatgtttcattaattttatatcatcttcctaaat

SEQ ID NO: 20258 - DNA, 201 bp, Homo sapiens
tttctttttctttcttttctctctctctcttctttctttctttctttttttttggagtctcactctgtcacccaggctggagtgcagtggcacattcctgsctcactgcaacctctgcctcctgggctcaaatgatcctcccacctcagcctcctgagtacctggggctacaggtatgtgccactgcaccaggctaatttt

SEQ ID NO: 20259 - DNA, 201 bp, Homo sapiens
ggtgtagacttctttatgtttaacctacttggaatcttttaggattcctgaatctggatgtctatgttcttccctcaatttggatagttttcaattattaytttgttacatatgttttctgcttctttctctattctccttgtgggacttctataatgtgtatattggcttgcacattcatgtctcccaaatcctggaggt

SEQ ID NO: 20260 - DNA, 201 bp, Homo sapiens
ttgaatgctaatatagaggctctactcctaatattcaagttgacttcctaatttttttctgggttgacattatcttctgtaatgtcagcaattttacagtrtttgattctcatcttatgatgtagctgcatttttcactaaatttttggataaaatgtttttgtgtaattaactatgatacctcccatggggaaaaaattt

SEQ ID NO: 20261 - DNA, 201 bp, Homo sapiens
caagaagactctagccggggttcagataattccagttatgatgaagcactctctccaacatctcctgggcctttatcagtaagagctgggcatggagaacrtgacctggggaatcccaatacagctccacctacaccggaattacatggcatcaaccctgtgttcctgtccagtaatcccagccgttggagtgtagaggag

SEQ ID NO: 20262 - DNA, 201 bp, Homo sapiens
ctgtgctttggggaggaagagtgctgtgattatgggactttgcagtggaactcggtgcagctctgtcaaagcagatagcgacatgggacagaaatcagccmgtgcccacagagggagcatttagaccagccctagccacaggggaatggcccatcccagtggtcggaacctgagtttctgctagtcccaccactgcggcta

SEQ ID NO: 20263 - DNA, 201 bp, Homo sapiens
agagagtctgtgctttggggaggaagagtgctgtgattatgggactttgcagtggaactcggtgcagctctgtcaaagcagatagcgacatgggacagaawtcagccagtgcccacagagggagcatttagaccagccctagccacaggggaatggcccatcccagtggtcggaacctgagtttctgctagtcccaccact

SEQ ID NO: 20264 - DNA, 201 bp, Homo sapiens
aaatcagatgagcagtcacagtacctggttttaacatcatatcaacaaaagaggcactgacgaggacaggagagacagtcttgatttgccaatgccacccyttccccatctcccagcagcacagtgtggtgtggagagagagtctgtgctttggggaggaagagtgctgtgattatgggactttgcagtggaactcggtgc

SEQ ID NO: 20265 - DNA, 201 bp, Homo sapiens
cacgtggaaccaggcttctctccgtgtgcttctgttgtcagtttcatagatagctaggctgtttttgtttcattttcttttcaattttagaatttgctttyttcttttctgacttgtagtttttaaatatgtaaatatttgtatggctcaaaagtcaaagcaatataaaaagatctattcaggaaagcctcactctcatcc

SEQ ID NO: 20266 - DNA, 201 bp, Homo sapiens
ctggatacaatgctcatagaaggaagtcgtggaaacaagctcccatcccctagtgatctcttccctttggttctggtgcaggaagtatcccttagttatgratattttggtagtgactctcaattaaggatgtaatgatagcgattccatgtgggccatggcttggctactacagggtgcacaatttcatttacttattga

SEQ ID NO: 20267 - DNA, 201 bp, Homo sapiens
ctggattataatctttttctctttatctttcatagtttttttaaaaacatggactgtatcttatctaccactatatcccaaatacctaagatagtgcttaygttcagtgactattaaataaataaatggatgaattaaaaagtaagaatgaaaactgttcattctagttatttctgttagcccataaattagaggaattga

SEQ ID NO: 20268 - DNA, 201 bp, Homo sapiens
tatcttaggtactaaggcctcaaaaataagaaaaactttattatttctcctcagtagagtttggacatacataaggagagaaggtacagtgatgaaggagrccataattctgtagtgttgatgatcctggattataatctttttctctttatctttcatagtttttttaaaaacatggactgtatcttatctaccactata

SEQ ID NO: 20269 - DNA, 201 bp, Homo sapiens
cttttccattatgtgactgtttgacctgcatattaatttcaagatagcagtcaattcgataaggcattttcatagaggaaagtttacagaaacagtttatrtggttggatcaccaaattatcttaggtactaaggcctcaaaaataagaaaaactttattatttctcctcagtagagtttggacatacataaggagagaag

SEQ ID NO: 20270 - DNA, 201 bp, Homo sapiens
aatgctaatgtgagaatataaattgtgggaaatgagtgagggcaaggtggtacttcctccttctgagctcttcacacgtaatgcaaaaacccggtcttaaytgattttgttttttttctgagtatgcatatatgtggttgaatgaaccaatgtgtgattgtatcttttccattatgtgactgtttgacctgcatattaatt

SEQ ID NO: 20271 - DNA, 201 bp, Homo sapiens
gatcaagctttattctgaagaataaacctagctggcatgctggtgtgtacctgtagtcctagctatttgggaagctgaggtgggagggtcgcttgagcccrggagtttgaggctgcagtgagctatgattgtgccactgtactccagcctgggagatagagcaagactccatctctaaaaaaaaaaaaaaatgctaatgtg

SEQ ID NO: 20272 - DNA, 201 bp, Homo sapiens
tccctttaattaaggagaaaattgcaatggaaggtagagatgtaatattatcttatttgctacattataagaatccagttattgacagaaaggtcaattcyaggatgctgctcctctctacagctaacacatctttagaattagatgttaaatgagaaattagttatttagagtgaataattgtcttagcttgggctgctc

SEQ ID NO: 20273 - DNA, 201 bp, Homo sapiens
aaggaatcttttgttctacccacctttcctgttcaccctcattttccttacccggatgcatttgggaaggtagtttaggaccgtggccttgagtgtgaagrcctctccacgaatcacagagtaaggcattgtgagctccacaaagaagggctggaaggctcggagagaggcagtggaagagataccaagtccagcatcttc

SEQ ID NO: 20274 - DNA, 201 bp, Homo sapiens
aatatgagaataaaattaaataatagatatgggaatactcagtagagcaagtgtcaaatagtagacctttagcaattgttatttatttttaaaagtgttgstcattttttccataagagaatcagtataattggagtagagtcattgtacatgatttctaacctaaaatattttttatgcctggaactctggacaattttt

SEQ ID NO: 20275 - DNA, 201 bp, Homo sapiens
atcttcaagacacggcactttaaggccatcttctaagttaagtcctctgaaataatagccatgtagttcgctggaatgtagctgactatacacctagatgktagaagagagtcaactgtattttttcatagaaaacaattcatttttccccacaagcagtatataaataacctatataatcctatgaatatcctatgtaga

SEQ ID NO: 20276 - DNA, 201 bp, Homo sapiens
gaaaacctttaaataagagaggacaaaaaaagacatctcatatcataccccactgtactttcactactttgaatttggcatttttgttgaactagggataktatctcacttataaacactttaaatatagtagaatactttaaaatagtagaaatcaaattcgagggtagacgtaggagcaaaatggggatttatattaga

SEQ ID NO: 20277 - DNA, 201 bp, Homo sapiens
gccattcacacaaaagccacttgcctcccattgggttatcgtatcaggaatgaggaacgaaagattggcagagcctgaggaactggaagaagaggttatcrgtaaaacacattctttgtctgaaccaagaacttaaaattaagtgcagagcaagcagaaaagtattgactgaagctcaaaagtgagttatattgtttggat

SEQ ID NO: 20278 - DNA, 201 bp, Homo sapiens
ctcaactaatagatggatcaatatgtcatctcatgtctgttgcttaatctgtgtttgttttccagaaaaagctgaatcagtggctaatgtgaatgctaatrctccaagcagtgaactagtagccttgacccccgccccttcagtaccgcctcctacactagccatggtgtctagacaaatgggtgactcaaaacccccaca

SEQ ID NO: 20279 - DNA, 201 bp, Homo sapiens
gacgaagtgatgtccaagtttcatactgactagatttcttttcaccgcataattccaaaactaggttataccttggaaaaatgaatttacttttaatttaraatgattattattctctgctcttttttctctctgttgtattctgggattgttcctatagccacctacacacagatccagccccattcactgattcagcaa

SEQ ID NO: 20280 - DNA, 201 bp, Homo sapiens
ttctttgatgtgtttcattatttttggaaaattctcatttcttgtctcttcaaacatgtcttctgcttgttctttctcgtttctccttctaagattctgayaatatgtatgctaagccatttgatattgttttatagcacttgaagataattcaagtgctataaaaattcaaattatttgaaaagaattcaaatgattttc

SEQ ID NO: 20281 - DNA, 201 bp, Homo sapiens
actgagttaggtcagagctgacaggtgctgactctcaagactcagatggtggtctaagctgatgatttgtaaaatccaagtcatttgtgggatgacgttgrcatctttaactctgtgggtatctcttctttcagtgaatattaagtgcttctgcagtgtcaggccctgggctgtgttttagggatgtgaaaatgaataaaa

SEQ ID NO: 20282 - DNA, 201 bp, Homo sapiens
gctgggataatataaagacagaagacttccaaatacaccagaatgaaaacattttctttagctgtactgattggcagttatcatcactaattttttggcaygaataaattggaaatttatgtcagcacccttggataataattaaaaaatatatattataggccgggcgtggtgtctcacacctgtaatcccagcactttg

SEQ ID NO: 20283 - DNA, 201 bp, Homo sapiens
tggggagagtaaaggttatgatttccttttttctctacttcttcctatccatatttgcataaaaacatggtcacacattcttacttgattacttgtagaargacacattccaaagatactaacacctttagggtaaaggacatctcttccttcacaatttattgcagaatgctaggtttacaggagaagcttgaggaatgc

SEQ ID NO: 20284 - DNA, 201 bp, Homo sapiens
atgagacctcagtggggaaaaaaacaagaatattgctataggcttaatcgtaatttatatatttaaggatgatgggaaagatgaccacttctgcagcaaaygtttagcttctttcttttgaaataatctgaatacctatcaggtgctccctttaattaaggagaaaattgcaatggaaggtagagatgtaatattatctta

SEQ ID NO: 20285 - DNA, 201 bp, Homo sapiens
ttaagaactgtttttttcttgccacatacaagattgatgaggatgcggaaaatgagacctcagtggggaaaaaaacaagaatattgctataggcttaatcrtaatttatatatttaaggatgatgggaaagatgaccacttctgcagcaaatgtttagcttctttcttttgaaataatctgaatacctatcaggtgctccc

SEQ ID NO: 20286 - DNA, 201 bp, Homo sapiens
tgggatcacaggtgtgagccactgtgcctggccctcccttaactttagaagagcaactctttatttgtgctgatgcagggtccaagtaggcaaagagacarttaagagcagagcccataaatgtttactcttcagcaaccatctttcaggagtggaataaaaacaacatcaaaatgggacatctggtggtatcataatcac

SEQ ID NO: 20287 - DNA, 201 bp, Homo sapiens
ggagtgcagtgatgccatctcggctcactgcaatctctgcctcctgggttcaagcgattctcatgcctcagtctcccaagtagctgggattacaggtgccmgccaccatgcctaattttttatttttatttttgtttttagtagagacaggctttttgtaccacattcaccaggctggtctcaaacttctgacctcaagtg

SEQ ID NO: 20288 - DNA, 201 bp, Homo sapiens
ttgtgaaaaagtgaaggcaaagtcctattttaaaaaggagacatttgaagtgaggacccagctctgatttttttttttttgcccaaattcctgtctaagaratctggggagtcatgccctacaaactataaattctcatcagatgggttttatttaaccttatatatcgtgttttactttccaatctgactcaggcataac

SEQ ID NO: 20289 - DNA, 201 bp, Homo sapiens
atgtggttcctcaaattctccttagaaccaatttttccatccagctggtccccctcattgatgagttaaataaacctttaagctacattcacgtttgacastttatctgatatttatgtaagactcatgttttgaagtatttgaatgctgtattttgtttctcaattttttatcttgaaaaaaaattcaagcctttagaat

SEQ ID NO: 20290 - DNA, 201 bp, Homo sapiens
gtaaatttttttcaaattagtaattacatcctttgctttaaatacttcacctgaaaaagtgtctgaagaaaaacatattaatgatattattttaaaatatragactgtagggttccccagtgcctggctttctttctgtgtattggctgaaaatcgcagagggccttgaccgctctgtgacccgcccagctacaggttttt

SEQ ID NO: 20291 - DNA, 201 bp, Homo sapiens
ttaaaaagtggagcaaatgatggtttacggagcagggcttactgacttttagcattgtgtacttacacaaaattatagggaaaattcttattgatattaasctctagtaatttgtaacctgtcagattttcctttgaaatttcttaacgttatttgcatgtttttagatgatggtaattaatgtgttcatattataggata

SEQ ID NO: 20292 - DNA, 201 bp, Homo sapiens
ctattatatggatatactacattttgtttgtccatttattcatcagtggatacctgggatgcttcaaccttttgactgttgagagtaaggctgctgtgaayttggatatccatctattgacagacactgtttccacaagcttttaaaaagtggagcaaatgatggtttacggagcagggcttactgacttttagcattgtg

SEQ ID NO: 20293 - DNA, 201 bp, Homo sapiens
ataactcccctccctctagcccctggtaatcactattctacttaccatatctatgtatttgcctattctgtcctttagtgtctcacttattcacttagaayactgttttcaaggttcttccgtgttgtagcatgtatcaaagttatggctgaataacattctattatatggatatactacattttgtttgtccatttattc

SEQ ID NO: 20294 - DNA, 201 bp, Homo sapiens
tttaaccattttcaagtgtacaattgagtggcattaagtacattcacattgttgtacaaccatcactaccatcatctccagaactttttcatcattcccarttgaagctctgtacctcttaaacaataactcccctccctctagcccctggtaatcactattctacttaccatatctatgtatttgcctattctgtccttt

SEQ ID NO: 20295 - DNA, 201 bp, Homo sapiens
gctctttgggaggccaaggtgggaggaatgcttgagcccagggattggagaccagtctggtcgacataggaaaacctcatctccactaagaataaataaayaaataaatactactactaattagctgagtgtggtggcatgggcctgtagttccagctagtggtggggctgaggcagtaagatcccttgagcccaggaggt

SEQ ID NO: 20296 - DNA, 201 bp, Homo sapiens
ctggttttttgttctatgtatattttcaatttccacttatttatttctccatctctaattgtcatatatttagagatacttcactgacatttcctaaattycatgtctttgagttccttagtttctctaattctaatggcttttgctctattttcctaattaagagctgttgatgaaaacctttaaataagagaggacaaa

SEQ ID NO: 20297 - DNA, 201 bp, Homo sapiens
ccctcttttcccaatcagtttaaaagcattaagagattataacctgtcacctgcccttcgcattatactgtgacttacctaagggtatgtaatcagtagaktcaagatggttagaatccttgcacaatactggtttccggaggtgagagttggtaaaaatctttaatcctgttgcctttcaagataaaatcaattttagat

SEQ ID NO: 20298 - DNA, 201 bp, Homo sapiens
gaatataaagatttacctgcattattctcactgtatttctaacatctgacatgacaggcacattaaatgaattaaaagacaaagcaaaagaaaataatcayctcccctcttttcccaatcagtttaaaagcattaagagattataacctgtcacctgcccttcgcattatactgtgacttacctaagggtatgtaatcagt

SEQ ID NO: 20299 - DNA, 201 bp, Homo sapiens
tgaagacaagctttgttgatctggaagttgaatgataaatgtgaatccaatgacgccatacccctgcggataatggcaggctggatgtagcatgttagccrtcatattctgtgtgctccctgcgatgtgggcacttcccttccatcgtggtgaggccaaagcaaaggcacagagacctgaacacaaacatgaaaaacacct

SEQ ID NO: 20300 - DNA, 201 bp, Homo sapiens
aggtaaagacataaaactatactgtgggtggtaaacaaagatggttttaatcactcacagtttgtgctggcagctgaccataattccttagtagcaatacmctctggtctaccgcccaaagagcataaagagagtttgaagcagccgagacttgaagatcgacattggatcctggtaaacttttttctttagaaaaattta

SEQ ID NO: 20301 - DNA, 201 bp, Homo sapiens
attagcaccagcaagtgttctgggagcccacagtcaactttgtattattgcctcacttaagcgagaatagagtgaaaacaaacccagttgctgtgcccgtygcacatgcacatccgttcattggaattaaactgtcagccttcatcaactgcagtgtctgtggaaaccagggagctaccacagttctgggaaccgcactga

SEQ ID NO: 20302 - DNA, 201 bp, Homo sapiens
actgtattccagcctgggcaatggaatgagactgtgtctcaaaaagaaaaaaaaaaagaaattggcatcatttgcagggcattgtcttgaatttgtcatckgttcttgaattgcagttgacagtgtaggcattagcaccagcaagtgttctgggagcccacagtcaactttgtattattgcctcacttaagcgagaataga

SEQ ID NO: 20303 - DNA, 201 bp, Homo sapiens
aaaaattagccgggtgtggtggcgggcgcctgcagtcccagctactcgggaggctgaggcaggagaatggcgtgaacctgggaggtggagcttgcagtgasccgagattgtgccactgcactccagcctgggcgacacagcgagattccgtctcaaaaaaaaaaaaattgccagtatggcccgtagtcttagctactcagg

SEQ ID NO: 20304 - DNA, 201 bp, Homo sapiens
tttcttcctaccagacggtgttgagatacaatattctccctcccacaaatatgaagacctttagtcttagtgtggaaataggaaaagctagatgtgagcarccgacttcacctcgatccttgactctcactattcacaccaggtgattaaagctggggtgctggtggccggcagagcacctggtcataggagctgagctgg

SEQ ID NO: 20305 - DNA, 201 bp, Homo sapiens
ggaaaggagctgtgaaggacaagtgtcagatctgctgctgctgcttcaagactcagcctccctgaaacatcactctttcttagcaacctgcagggagacamccagatttttccatcagaggtttcttataccgtctaaacatattttcattctacgtgacaacacacaaatcggaccagtaagatagagatcaagagttta

SEQ ID NO: 20306 - DNA, 201 bp, Homo sapiens
actattttaaccattttcaagtgtacaattgagtggcattaagtacattcacattgttgtacaaccatcactaccatcatctccagaactttttcatcatycccaattgaagctctgtacctcttaaacaataactcccctccctctagcccctggtaatcactattctacttaccatatctatgtatttgcctattctgt

SEQ ID NO: 20307 - DNA, 201 bp, Homo sapiens
gcttaaatgccttcttttaaaaagttttcccttaattcactggaatccaataagttccagactgcaatgttgagaaagttgggatataaggaagaaaacaygcgtgcacgtgcatgtgtgtgtgtgtgtggtggcctccacttccttcaggcccctcagatccttcctatccacccagcaatctcttggaaaagagcttgc

SEQ ID NO: 20308 - DNA, 201 bp, Homo sapiens
cttcagttatagtcatattcttgtgtagtggaatatatacttagtagatgatggagttggacattatgaggacattatgaggtattcaaattgacaccacrcattgttacacatttctctaacccttaatctgaaaagtggtggagcagggaagacccagggctgccatattccattttatctcccatttcatttccaaga

SEQ ID NO: 20309 - DNA, 201 bp, Homo sapiens
gcaatataacatagcagaagctttgaaaaatcaaaaaataattcaaacaaaataactctccatctgtatacagctatttcctgggtatagcctttgaccaygtgcacttgtgtaagcttgtattttcttttttctttttgttttttgagacagggtctccctcaatcagccaggctgtaggtgatagatttgtgtgctgct

SEQ ID NO: 20310 - DNA, 201 bp, Homo sapiens
ctattgtaagggtagatttcaaaaatgagtttcccatttgccaagaaggaaggaaatctttccctcctccccttcttagagcatttctgtcagaaaacctygtggctgtaaagcctttttctagccttttaaaataaaaatatttcactttagatgctaagtgcaagggcattatcctacatagccaaataaactgatctc

SEQ ID NO: 20311 - DNA, 201 bp, Homo sapiens
ttatttacttggtaaactttctatgtaagtacagtttttttttttctggtactcaccatggctggaatgctcacattttcaacatataccccagtatcctragaacttctagagtactaatttcatctctggggaagagggatagaaattttggtgaaagcaatacaaaaaagtactattgattgaattctggcactgaac

SEQ ID NO: 20312 - DNA, 201 bp, Homo sapiens
ccctgtcctggccctagaattagccatttcttcaaagagcccctgattcctatgttgccttctgatgtggtttggatctgcatccccacccaaatctgacrttgaattgtaatctccagtgttggagatggggcctggtgggaggtgattggatcacgcggatggtttttcatgaatggtttagtaccatacccctagagc

SEQ ID NO: 20313 - DNA, 201 bp, Homo sapiens
agaaggaaggaaatctttccctcctccccttcttagagcatttctgtcagaaaaccttgtggctgtaaagcctttttctagccttttaaaataaaaatatktcactttagatgctaagtgcaagggcattatcctacatagccaaataaactgatctcacacagagaatttataactgtacaaggtattctattttctaat

SEQ ID NO: 20314 - DNA, 201 bp, Homo sapiens
ttaacttgcttattttttaacattaaaagactggaagatcctccaagcttattttgtactttccctgtcctggccctagaattagccatttcttcaaagarcccctgattcctatgttgccttctgatgtggtttggatctgcatccccacccaaatctgacgttgaattgtaatctccagtgttggagatggggcctggt

SEQ ID NO: 20315 - DNA, 201 bp, Homo sapiens
atctcacataaaaggctgggcacagtggctcacacctgtaatcccagcacttgggagaccaaggtgagagaatcacttgagcccagcaattcaagactagyctgggcaacatagtgaaaccctgtctctacaaacaaaaaaaggaagaagacaaaggagaaagagtagaaggagaaggagaagaagaaggagaaggaagaa

SEQ ID NO: 20316 - DNA, 201 bp, Homo sapiens
actcatcactggtggttcacgcagtgaaccctgttcatgtggttgaggtggtatttgccaagattctttaatgaatagttactatttccttttatccatartgtactctttggaagtgagtctcttatccctgactaccctcaaagggaggagagttaaattccacatcctgaatggggagtatctacatatattatttgg

SEQ ID NO: 20317 - DNA, 201 bp, Homo sapiens
caggacatcagcattcttgctgctgaccccctccccttgtcaccccagtaaagggcaggaccctctctggggaaggttttaagacccacaatcagaaaggyaggggaaaattagagtcctgccttgaggcagatgaaaggagggcagaagaaggccagaggccttccccttggggcctgacacactcaacattataagaaa

SEQ ID NO: 20318 - DNA, 201 bp, Homo sapiens
ttatgtttatcagtttattataaagtatattacaaaagatacagatgaagagaactgtagggcagggtatggggaaaggggtgtggagcttccatgccctytctgggaaggctgctctccaggaatctccacaggttcagtcatctggaagcattctgacacagttctcttgggtttttatggaagcttcaggacatcagc

SEQ ID NO: 20319 - DNA, 201 bp, Homo sapiens
ccagcctcaagtatttctttacagcaacacaagaaatatacaaatgacaatatgcagccatttgtatattgtctgcatcccaaattcaatgtaaacttcaygaatataaagatttacctgcattattctcactgtatttctaacatctgacatgacaggcacattaaatgaattaaaagacaaagcaaaagaaaataatca

SEQ ID NO: 20320 - DNA, 201 bp, Homo sapiens
tcatctcagatgttattagtgaggtaatattcagtattttatagaatatttagatatttatctttccaggagctcatgtgctttggtaatgaggcagaatrtctttgagaaagatagaagtgagaccttagggatgggtgtctgcctaactgaagtggactccagtgaaaattatataaatatcaaggcatgaaaattcag

SEQ ID NO: 20321 - DNA, 201 bp, Homo sapiens
gagccacagtgggaattctgatcattgctagacttgtcaattatacctacacatttggaaaatgaataaataaccagaagatggatctggtctctgttagwcctacaatgaagacaatttggccccaaattctggttattcctgatagtcataatctttgcctctcatctcagatgttattagtgaggtaatattcagtat

SEQ ID NO: 20322 - DNA, 201 bp, Homo sapiens
ctctgtacccctaccttctctctctccttttggatcccaggagacattatgggcacagccctgcagaacctggatggtctggtgcagatgcccagtggctrtggcgagcagaacatggtcttgtttgctcccatcatctatgtcttgcagtacctggagaaggcagggctgctgacggaggagatcaggtctcgggcagtg

SEQ ID NO: 20323 - DNA, 201 bp, Homo sapiens
aggaaaaggcgaatggaggctgcaaaggtgtggagtggggcgggacatacggacctatccggagagtgtaactaataacaagtgatgaaggaaaaagagcstattttatataggagggaaatacagtgtaggcaacagtacagatgggattagacttgtactctagttaaaaatggaagagagtcagggtaggaagaaggt

SEQ ID NO: 20324 - DNA, 201 bp, Homo sapiens
aagaaagaaaggaagagagaaagaaagagtcctagatgagagagagagagagaaagagagaagggaagggagggagggagggaggagagtcctagaccagkggtccccaatcctactggtctgtggcttgtcaggaagtggaccccacagcaggtggtgagcagtgagcaagcaagcagagcttcatctgtatttacagct

SEQ ID NO: 20325 - DNA, 201 bp, Homo sapiens
gcggtcttgctctgttgcccaggctgttctcaaactcctgggttcaagtgattctcccgcctcacccttccaaagtactgggattacaagaatgagtcacygcacctttaacttgtttaatcctcacccccaaccctatgggatgtcagtcactcatagattaaatccttgcaactcaaagtttgattttcatatgtatga

SEQ ID NO: 20326 - DNA, 201 bp, Homo sapiens
gattcaatatgcaagatcaccccctacacccacagacaccagtcacaagtctgggcctctggaacatctgaccaataagcttcaagttgggatttccacarcttcccctttgagttcagttaatttgctggagcagctcacagaactcagggaaacccttatgtttatcagtttattataaagtatattacaaaagataca

SEQ ID NO: 20327 - DNA, 201 bp, Homo sapiens
ttctggaatagtcacttgattctttttggtagtttctacttctctgagattcttcaaatttttattcattatgactatattttcttctaagtctttgaacrtatttatgcagatattaaagtccttgtttgctagttccagcatctatgttacataagtttcttttctacttactgacttttctttgatccatggcccata

SEQ ID NO: 20328 - DNA, 201 bp, Homo sapiens
caccatgttggccaggctaatattttatgtttttagtagagacagggtttcaccatgttggccaggctggtcttgaactcctgacctcaaattatccacckgcccccgcctcccaaaatgctggattacagctgtgagccaccgtgcctggccctcattcagttatttttaaaaattatgaatgctgttctgttctggaat

SEQ ID NO: 20329 - DNA, 201 bp, Homo sapiens
aaaatatagataagcatttagatcacaagttccccaaactggtctttgtagcagcaatttaggaatcacctgggtggtttttaaaaatacatattctgccrggcacggtggctcactttgggaggccgaggcgggcggatcatgaggtcaggagatcgagaccatcctggccaacacggtgaaaccccatctctactaaaa

SEQ ID NO: 20330 - DNA, 201 bp, Homo sapiens
ttccacacacgaggagccacagtgggaattctgatcattgctagacttgtcaattatacctacacatttggaaaatgaataaataaccagaagatggatcyggtctctgttagacctacaatgaagacaatttggccccaaattctggttattcctgatagtcataatctttgcctctcatctcagatgttattagtgagg

SEQ ID NO: 20331 - DNA, 201 bp, Homo sapiens
cgtcacattgtggtgactttcctccctgaaccccttcagagtgcagcatattacaggttaggagtgcctggttaaaggcagatggaatgatctagtttcarctaaacctatctttacacaacagataagtggctttaaaagactcctacagagaaactgctggttttcaagataactctaataatgcatgtggcggcaaac

SEQ ID NO: 20332 - DNA, 201 bp, Homo sapiens
attttcagggaactgtgagtataatggcaacttctagttcatttaggataagataggcagaaccttttcacatccactccaatgtgtttattccacacacraggagccacagtgggaattctgatcattgctagacttgtcaattatacctacacatttggaaaatgaataaataaccagaagatggatctggtctctgtt

SEQ ID NO: 20333 - DNA, 201 bp, Homo sapiens
tgcaagtgaggcctctgagatgcaggaagaccagaattcctagtccattttatttttatttaaaaaagcaagaatttaaactttactgacattgattatasagtatgcactggatttgtcactctgaatctatgtcaccgttatgtgtcacctcctcggggaagaacagaagcgtcacattgtggtgactttcctccctga

SEQ ID NO: 20334 - DNA, 201 bp, Homo sapiens
tctgttctgagactgggaatcagaagggagtgaaatggggaggccatggaagagtttattttcagggaactgtgagtataatggcaacttctagttcattkaggataagataggcagaaccttttcacatccactccaatgtgtttattccacacacgaggagccacagtgggaattctgatcattgctagacttgtcaat

SEQ ID NO: 20335 - DNA, 201 bp, Homo sapiens
tcaacagtgttcagtggtcaggaggaagaaagacctatgtgtcactgagcagagactgtaacttcctgccttcagttattcccagttactcttagaagtgktttatttatctttgcaaaatggatctcacagtcatggggtgccgctgccacagtggcggggcccacttagtgactgccaaacttcagacttgaaagggta

SEQ ID NO: 20336 - DNA, 201 bp, Homo sapiens
tcaataccttcaggctgtcaaagaataacacaaacaagcacagaagaatgagtctagatcctctgtccatgaaggaaaagtgattaagcaccagctcactyaagcatggctggtgcaagtttatccctgagagaagatccaactcatcttccccttttgttcatatctggaaggcacgggacatcaccggtacccatttta

SEQ ID NO: 20337 - DNA, 201 bp, Homo sapiens
atttcccaacatatgcgtttcacttccagtaaagaagttagaagactccattcccagattaccttgaatccagggggcaggtaaatgacaggctcgaccartgagatgctctgttctgagactgggaatcagaagggagtgaaatggggaggccatggaagagtttattttcagggaactgtgagtataatggcaacttct

SEQ ID NO: 20338 - DNA, 201 bp, Homo sapiens
attgttttgctgtttagaccgagataagttcttcaatgcctgctctcaagctgatttagtctatgaaaatgattttcttatggatggaggctttcctatamctttactttgctgttgatatatttcttttttatactaaatcttttttggtgggaactgtttagacctatgaccttagaacactggcctgacttggagaaa

SEQ ID NO: 20339 - DNA, 201 bp, Homo sapiens
tataaaaattaaactactggcccataatcagtatagctcgcctcatgatagattattctcaggctaaatttataacaggcactcaacaaaagtattcatckcttatcccctaacattatctagtagctataggagccggtgacctagtaaataataaaaaaaaatctttaggggtggaatgtaactatatgcagtagcggt

SEQ ID NO: 20340 - DNA, 201 bp, Homo sapiens
atggagacctttgttcctgtgggaaaataaccctcccacctgcaacagctgcccctgctgactgcgcctgtcttctccctctgaccccagagaaaggggcygtggtcagctgggatcttctgccaccatcagggacaaaccgggggcaggaggaaagtcactgatgcccagctgtttgcatcctgcacagctacaggtcct

SEQ ID NO: 20341 - DNA, 201 bp, Homo sapiens
attctcaggctaaatttataacaggcactcaacaaaagtattcatcgcttatcccctaacattatctagtagctataggagccggtgacctagtaaataawaaaaaaaaatctttaggggtggaatgtaactatatgcagtagcggtaattctgctccatttgtaaggagggtgaaatgcgatatggtcatgtaccctctt

SEQ ID NO: 20342 - DNA, 201 bp, Homo sapiens
caattatgccaagggccattaggctctcaacatgactatagagaccccgtatcatcatggagacctttgttcctgtgggaaaataaccctcccacctgcarcagctgcccctgctgactgcgcctgtcttctccctctgaccccagagaaaggggccgtggtcagctgggatcttctgccaccatcagggacaaaccgggg

SEQ ID NO: 20343 - DNA, 201 bp, Homo sapiens
actgagagcaagagaaaaggcatcaatcccagttgttaatccacgaggcatcccccagacccttctgtaaaggttaatgaaggcagtaaggcagttatctytgtttcgtgcactgatgcaatccaagcttccacggtttagcacatagtagacgctctataaatatttattgaatgttgaacgatgagagagtaattaaaa

SEQ ID NO: 20344 - DNA, 201 bp, Homo sapiens
ctaccccgacaccagcaattatgccaagggccattaggctctcaacatgactatagagaccccgtatcatcatggagacctttgttcctgtgggaaaatawccctcccacctgcaacagctgcccctgctgactgcgcctgtcttctccctctgaccccagagaaaggggccgtggtcagctgggatcttctgccaccatc

SEQ ID NO: 20345 - DNA, 201 bp, Homo sapiens
cctggctgtccttggggcgttccagggcagctcccctcctggaatagaatctttctttccatcctgcatggctgagagccaggcttcctgcttggagtccrcaggaggctgtggcagcagtggcatccactgtggcatctccgtcctgcccaccttaagaggtgagatggagcaggtccatctgcctctgccctttctagc

SEQ ID NO: 20346 - DNA, 201 bp, Homo sapiens
tgggtcctggctgtccttggggcgttccagggcagctcccctcctggaatagaatctttctttccatcctgcatggctgagagccaggcttcctgcttggwgtccgcaggaggctgtggcagcagtggcatccactgtggcatctccgtcctgcccaccttaagaggtgagatggagcaggtccatctgcctctgcccttt

SEQ ID NO: 20347 - DNA, 201 bp, Homo sapiens
gaacagtgggtcctggctgtccttggggcgttccagggcagctcccctcctggaatagaatctttctttccatcctgcatggctgagagccaggcttcctkcttggagtccgcaggaggctgtggcagcagtggcatccactgtggcatctccgtcctgcccaccttaagaggtgagatggagcaggtccatctgcctctg

SEQ ID NO: 20348 - DNA, 201 bp, Homo sapiens
tgaatgaacagtgggtcctggctgtccttggggcgttccagggcagctcccctcctggaatagaatctttctttccatcctgcatggctgagagccaggcytcctgcttggagtccgcaggaggctgtggcagcagtggcatccactgtggcatctccgtcctgcccaccttaagaggtgagatggagcaggtccatctgc

SEQ ID NO: 20349 - DNA, 201 bp, Homo sapiens
aacaataagtaacaattaggccaggcacggtggctcatgcctgtaatcccagcattttgggaggccggggcgggcagatcacctgaagatgggagtttgasaccagcctgaccaacatgaagaaaacccgtctctactaaaaatacaaaattagctgggcgtggtggtgcatgcctgtaatcccagctactcgggaggacg

SEQ ID NO: 20350 - DNA, 201 bp, Homo sapiens
gcagggatcctgttacaaaggtgaaacccaggaggagagtgtggagtccagagcgctgccaggacccaggcacaggcgttagctcccgtaggagaaaatgsgggaatcctgaatgaacagtgggtcctggctgtccttggggcgttccagggcagctcccctcctggaatagaatctttctttccatcctgcatggctgag

SEQ ID NO: 20351 - DNA, 201 bp, Homo sapiens
gtcacctggacccctgctgctggcattggccacaaagcctcctggtctggctccaaagcctggcagggtcttttccccgggggagctgcaggcagggaacrgtcctgatgggtcatccccttcactcccagcccagagcccccggccaggcacccccagggaaggctctggtggagaacctgtgcatgaaggccgtcaacc

SEQ ID NO: 20352 - DNA, 201 bp, Homo sapiens
ctgccccctccggaagcttggatgcccctccacaccctcttgatcttccctgtgatgtcacctggacccctgctgctggcattggccacaaagcctcctgktctggctccaaagcctggcagggtcttttccccgggggagctgcaggcagggaacagtcctgatgggtcatccccttcactcccagcccagagcccccgg

SEQ ID NO: 20353 - DNA, 201 bp, Homo sapiens
tttcattctttccttccttttgttctttctttcaatctccctcccctccccttccctttcctttatttaagagggctggtagcatcctactttctactatyttagttatcaatagactaaattagaaaaaaaattagcattgtttaattatgagataaatgaactataaacctaaatatttaccagaaaagagcagagcag

SEQ ID NO: 20354 - DNA, 201 bp, Homo sapiens
gatgcgtctcactatgttgcccaggctggtcttaaatactgggactcaagtgatcctcccacctcagcctcacaaagtgttgggattacaggcatgagccwttgtgcctgacccattttttgttttgttttgttttgagacagaatcttgctctgttacctaggctggagtgtagtggcgcgatctcagctcactgcaacc

SEQ ID NO: 20355 - DNA, 201 bp, Homo sapiens
ttaactatggagatcctggtgctacaagccgttaaatagttctctcttctcaacctattcccctatcctgcttttcttttcttcatagcacttattacctyctgattatattttttgtttgccttttgtctatcacctgtcattcttttaccagaccatctagtctcatatgtctatataacctttctgaaaaacatcctg

SEQ ID NO: 20356 - DNA, 201 bp, Homo sapiens
ctcagcttccaattcagtgaaactattcttaagcatgttaatgaaaatatacttctttcctggatcctaaaaggtctaaatgaaaacaactcctattcctraggatggaaaacaagtattctgcaaaagccactaccaatccgtaccttggttcccagacatatctctagaagagacagaaacaagccctttaatataatt

SEQ ID NO: 20357 - DNA, 201 bp, Homo sapiens
cgcaaggagctaccagaggcagaatgaagagactgaagcaatgacagccacttattttgaggaattacgtgtcattgatgactatgccaaaacattttgtrttagaattagtgatgatattgattaccccaaatggacactttgctcataggtgatgctactgaattaatatacaggtacagctccacctacttattagta

SEQ ID NO: 20358 - DNA, 201 bp, Homo sapiens
ctctcagcttccaattcagtgaaactattcttaagcatgttaatgaaaatatacttctttcctggatcctaaaaggtctaaatgaaaacaactcctattcytgaggatggaaaacaagtattctgcaaaagccactaccaatccgtaccttggttcccagacatatctctagaagagacagaaacaagccctttaatataa

SEQ ID NO: 20359 - DNA, 201 bp, Homo sapiens
gattaaagaacacttgagaggcaaagatcagaggatctcagcagggtgcttttgccctagacttatatagagaggagtaaacaagctgaagtggggtgatmtgcagttggggttgttttgtatgcagaactgtctgtcacttagctgaaccagaaatattattctcagggaaacaaattgttctaatcttagctagtcaac

SEQ ID NO: 20360 - DNA, 201 bp, Homo sapiens
atcctttggggcagatacaatgttgaggattgcctcaacagactctgaagaaattgcaataatatttggaataaaaggcctttcttgcatttcattttttraaaaatattgtatcatgtttaggatgtaaaaattttgtgacttttctatagaattgttagccagaaatgttatattgagagatacatatgttctatgaag

SEQ ID NO: 20361 - DNA, 201 bp, Homo sapiens
gggctccatgagatccatttagttgcattcatcctcctgtccccaaagtatatcagtaaatgtactgtttcttgacagtttggctgtgttatcccagaggmctggatgtgggaatctccaaatggccagataatactctcagcttccaattcagtgaaactattcttaagcatgttaatgaaaatatacttctttcctgga

SEQ ID NO: 20362 - DNA, 201 bp, Homo sapiens
ttggcctagacgggatctctcagccttacaagccctctccaggtggtaggtacagagtggagagaggctgagttttgatcacagtcggagagggctgacgraaggggtagaacggagcagctggtgacatgggtgatgacccgggagttcctgacgtccacccactgggctcttgtctcctccccacgtgtgtggtgatgg

SEQ ID NO: 20363 - DNA, 201 bp, Homo sapiens
caggcctgtggccaggagagaggccaggtgacagaggccctgctcctctctgtggttggaggaaagatgagtgaagggatcaacttctctgacaacctaggccggtaagtagtggttctgctcatctcctgggtcgtgatacatggccggccctcactcccagcagctgggcccctgcctgctgtctgctgccattagagc

SEQ ID NO: 20364 - DNA, 201 bp, Homo sapiens
tgaacccgggaggagaaggttgcagtgagccaagatcgcgccactgcactccagcctgggcgacagagtgagactctgtctcatgaaacaaacaaacaaamaaaaaaacagaacaaaaagataaaaaaaaaaaagtaggggaagaactggagggaggaattacacaggagcactgaatatattcactatcttgattttggt

SEQ ID NO: 20365 - DNA, 201 bp, Homo sapiens
ctccggggttcaagcgattctcatgcctcaacctcctgagtagctgtgattacaggcatgtgccaccacacccagctaatttttgtattttagtagagatrgggttttaccatgttggccaggctggtcttgaattcagttgatccgccagccttggcatcccaaagagctgggattacaggcatgagccaccacgcctgg

SEQ ID NO: 20366 - DNA, 201 bp, Homo sapiens
gtgctagggtgtttgtcgtgctcctggggcattttggtagacagatctaggaaatgttttcagagtgaatccatactggtatttctttctttctttctttytttttttttttttgagacacagtctcgctctgtctcccaggctggagcgcagtgacccgatcacggctctctgcaacctctgcctccggggttcaagcga

SEQ ID NO: 20367 - DNA, 201 bp, Homo sapiens
attttagtagagacggggtttcaccgtgttgcccaggctggagatagttgttatatttttaggaaataatgacaagaaaaaaaagtctatacatgctgttyagtacagatacaaatttttttccccaattttttcaatctgcggttggttgaatctacggatgtgaaacctacagatacagaggtctgactgtacttattc

SEQ ID NO: 20368 - DNA, 201 bp, Homo sapiens
gcttgaacccaggaggcggaggttgcagggagccgagattgagccactgcactccagcctgggcaacagatcgagactccatctcaaaaaaaaaaaaaaaragagatggagaggacagtatggtccacctctgtgggctggttgtcctagagattaaatggtgtttaatttaaagagaaagcactagcacttgtgcctcag

SEQ ID NO: 20369 - DNA, 201 bp, Homo sapiens
gcaacctctgcctcccgggttcaagcaattctcctgcctcagcctcctgagtagctgggactacaggcacacaccaccacacagggctaatttttgtttttcgtttttgtttgtttgagacggactcttgttctgtcacccaggctggagtgcagtggtgcgatctcagctcactgtaaactctgcctcctgggttcaagc

SEQ ID NO: 20370 - DNA, 201 bp, Homo sapiens
tttgttttgtacttttagtagagatggggtgtcgccatgttgcccaggctggtctcaaactcttgagctcaagcaatacacccacctcggcctcccaaagkgctgggattacaggtgtgagccaccgtgcccggccttgttctctcatcttatagacaaattcaccgaagcacagagaggttacggcacttaatcaagctc

SEQ ID NO: 20371 - DNA, 201 bp, Homo sapiens
cctcctgtatacatatcttccttttgtcctcttctgtcgcttttaataccgtgtggaggtgcaaaaccccttctagtaatggctggggaaaaaaagtcatktaagtcccagggtgaaataagactttctaaaaaaaatacttgagtctcaacctctaaaacctttcaagtaccccgatatttcttttcatcttgtcacaaa

SEQ ID NO: 20372 - DNA, 201 bp, Homo sapiens
tttgtctgcacccagccccctctcctccctttggtggcttcctgtgtgtccagggctagcgtcttctaggtgaatctaagatgtcagtaccttagccctcrgctgcttgctcagagcctggtttgtgttctttccccagctctgccaggcccattcccagctgctgcagtacatggagcgatacgggtgagatgtgactct

SEQ ID NO: 20373 - DNA, 201 bp, Homo sapiens
taagattgggtgcccattcctctccttggggatggttatgagcatgtgagtctcacagttgaccatatccaccttacagttggactggacaatacacttgrgactgtccttatctcccaggtgtccttacacatctagattccctccccaccaattgggaaacagtgacagcccgtcatagacagaaaaagtgggcttctt

SEQ ID NO: 20374 - DNA, 201 bp, Homo sapiens
cagttatgcaggcctgcactaagtgaaacagctgactgacaaccaccccctcctcattatttcctttactcaataaatacaaagggctatagaagctcagrgcccttgttcactagaagcaaggagacccctgaccccttcttccaaatatacttgtttgtctttgtctttattcccgcattcgtcctcctttgttcagtc

SEQ ID NO: 20375 - DNA, 201 bp, Homo sapiens
tgtgatggtgaccttgaaccatcactctttgtagactctaggtcttttcccaacccggtggaaactagcagggagattccatacttgaggaattcagcctyttgctttttctctgacccacagtggacactggaggaaaccttcccttccttcccttttctcttagctcccaccagcctaagggctgtggaaaccagtacc

SEQ ID NO: 20376 - DNA, 201 bp, Homo sapiens
agacggggtttctccatgttggtccggcttgtctcaaactcccgacctcaggtgatccacctgccttggcctcccaataacatccctactttaggctacaycatatataatgagtttagttggttaatggctacccaaattcaagtagtaagcaaagtacctttatgccttgagaggcatgaaaacagcagcctccaggct

SEQ ID NO: 20377 - DNA, 201 bp, Homo sapiens
ctgtgcctgggctgaattgaggctgggatgtgatggtgaccttgaaccatcactctttgtagactctaggtcttttcccaacccggtggaaactagcaggsagattccatacttgaggaattcagcctcttgctttttctctgacccacagtggacactggaggaaaccttcccttccttcccttttctcttagctcccac

SEQ ID NO: 20378 - DNA, 201 bp, Homo sapiens
tttttttttttttttgagatggagtttcgctcttgttgcccaggctggagtacagtggcgtgatctcggctcactgcaacctctgcctccccggttcaagygattctcctgcctcagcctcctgagtagctgggattacaggcatgtgccaccacgcctgggtaattttgtatttttagtagagacggggtttctccatgt

SEQ ID NO: 20379 - DNA, 201 bp, Homo sapiens
tggggtgtgcccactggtttctgactgtgaaacccccacgacatcccaccagctctactgacctgtgcctgggctgaattgaggctgggatgtgatggtgrccttgaaccatcactctttgtagactctaggtcttttcccaacccggtggaaactagcagggagattccatacttgaggaattcagcctcttgctttttc

SEQ ID NO: 20380 - DNA, 201 bp, Homo sapiens
tttgagaccagccttaccaacatgaggaaaccccgtctctactaaaaatacaaaaattagccgggcgtgatggcacgtgcctgtaatcccagctactcggratgctgaggcaggagaatcccttgaacccgggaggtggaatttgaagtgagccgagattacgcgccactgcaccccagtctgggggacagagacagactc

SEQ ID NO: 20381 - DNA, 201 bp, Homo sapiens
ggcaggcggatcatgaggccaggcgtttgagaccagccttaccaacatgaggaaaccccgtctctactaaaaatacaaaaattagccgggcgtgatggcaygtgcctgtaatcccagctactcggaatgctgaggcaggagaatcccttgaacccgggaggtggaatttgaagtgagccgagattacgcgccactgcaccc

SEQ ID NO: 20382 - DNA, 201 bp, Homo sapiens
taatctataacaaaaggtcggcaattaagaggtcgtgcttcgtgatctggtctccaaagtcaactttcctcagggactttcagaatccccaaatagactayccactttctttcacacttatttgcctctaacttgttgatttcttttttttttttctgttttttaagggttaacaatctcttgggtgcactctgacttcca

SEQ ID NO: 20383 - DNA, 201 bp, Homo sapiens
caagtaaggtcacactcacaggtaccaggggttaggacttcaacacatcctttggggcagatacaatgttgaggattgcctcaacagactctgaagaaatwgcaataatatttggaataaaaggcctttcttgcatttcattttttaaaaaatattgtatcatgtttaggatgtaaaaattttgtgacttttctatagaat

SEQ ID NO: 20384 - DNA, 201 bp, Homo sapiens
tatacaatgcaaaatggaccaaatatagtactcaagtataacctcattctaacttaaatcttaattacatctgcaaagactatttccaagtaaggtcacaytcacaggtaccaggggttaggacttcaacacatcctttggggcagatacaatgttgaggattgcctcaacagactctgaagaaattgcaataatatttgg

SEQ ID NO: 20385 - DNA, 201 bp, Homo sapiens
gtctgggcatggcaaaggcaggaaggttgtttacagaacaggtagctaggagacaaggaagtacaaggaagttggttttaagaaacaaagaacagggaackaaagctttttgaagaggaatttatcatctctgacacttcttgtacagtctgcagaactgtgaggcaattaaacttcttttctttgtaaattacccagcct

SEQ ID NO: 20386 - DNA, 201 bp, Homo sapiens
cgcttagtatagctcatctttgtcttgttcacccttcacttgtctgcatacgggaaaatcaacacccccaaaaatcccctaagaccattacttataaaatmacatgaaaacttctgttaacacgcttgataaatgagtctcaactgatttctctagcctcactttttatcactgccatcaacactgtcctgacttttcaac

SEQ ID NO: 20387 - DNA, 201 bp, Homo sapiens
ctgctcggtatctggggcatgaatctgatatatgctatacgtgtcttatgtatcagtatatgtctttcagaatgctattagtctgtgtctaaccttatcayagtactcccccattcctcacttcaaatcaagatgcataactacgctgggaacacagtaattgttgatcctgacttgccacctagtgtcaattattgattt

SEQ ID NO: 20388 - DNA, 201 bp, Homo sapiens
tcctgctactcttcaatcatccaacatattaacttctccatagctttcttttatttttcattttgcaattctatgaaaaattgggagtttaaacccaacastctcttaagttctccttagttttcccccaaattaaaaaagaatcatttttggcacctacctgattttcgaagcatttctcaattggaattgggtgctatc

SEQ ID NO: 20389 - DNA, 201 bp, Homo sapiens
tatcagggcttcagaaggaaggtctgcatggagcacttggaaggttgggttccaggcccagctgcttgttcttggtcaaagattcctatcctctgggcccrcaatgtggccacagagtggtggatctagaatggtcatgtggactacagacagatgccggtggcggagtgggtgccatatcttgatcctgtatttggtcac

SEQ ID NO: 20390 - DNA, 201 bp, Homo sapiens
taaatctccctgagcctaagattagacattaatcaaaatgggaatactgcattagttctatagggttgattaatatgagaataaaattaaataatagataygggaatactcagtagagcaagtgtcaaatagtagacctttagcaattgttatttatttttaaaagtgttgctcattttttccataagagaatcagtataa

SEQ ID NO: 20391 - DNA, 201 bp, Homo sapiens
tagaactgtcatcatacctataccaaataaacacatattgagaaagtataggatcttagatctgtaaaaactttgaaatactatttaatcagttaaataaytgctggctaaatcacattaaaactaacaaaaagtccatgaggctcaactggattttaatacattccagataaaggcactgctcaatactctttgaggact

SEQ ID NO: 20392 - DNA, 201 bp, Homo sapiens
tgctggaattgtgaattgcaaatccattcttatcagagtgaaatcagaacttcaaccctaatcaaaattgattggatgaattattgagtgttacaaaagtkatgcaatgaagggccctcatatttttgacattcatttttattagatccttcttatctggagattaggtatgtgagaagctcggagaaataatcttagaag

SEQ ID NO: 20393 - DNA, 201 bp, Homo sapiens
tcttatgaaacaaacaagtagcttttggtagagcctgtgagggcttaagaaccctaatgtctataaatcttagaggattatacactatgctttggtcatamaaacttgtactgcctttattcttttttctttttttaaagtattgtaattgtacatacttaaaggatacaattggcggggcacagtggctcacacctgtaa

SEQ ID NO: 20394 - DNA, 201 bp, Homo sapiens
ttgtgttggtccatcctttaaactcttcatctacacaggacagctacaaatagcaactggttaccatatcttttaacagcaaattggtgtgtcactgtctyccttgagtttcttttcacaacaatccagtaatctccaaacattggttctgaaatcagttggaacgagagttgggtaatatttcggaaagaagtcacattt

SEQ ID NO: 20395 - DNA, 201 bp, Homo sapiens
gggattctagaaaaaatgtatattttctaggggaaaaagaaggcaggaatcagaataaggatactggggaaggagagaggagcagcaaagtgctgatgacraagccaaccaggtcaaggaagggagacaaagaaaaccagttctagcttcacctactcctgcctaagtctaacacaaatgttgtgttggtccatcctttaa

SEQ ID NO: 20396 - DNA, 201 bp, Homo sapiens
ttgaacctgggaggcagaggttgtagtgggccgagatggtgccattgcactccagtctgggtgacagagggagactccttctcaaaaaaaaaaaaaaaaaraagaaagaaagaaagaaaagaaaatcacttcaataggccttttgattgtgaaaaagtgaaggcaaagtcctattttaaaaaggagacatttgaagtgagg

SEQ ID NO: 20397 - DNA, 201 bp, Homo sapiens
agagatggtcaagctctgtcctgaggtcatgcagctcatgagtgtggagctggggtgtgcccactggtttctgactgtgaaacccccacgacatcccaccrgctctactgacctgtgcctgggctgaattgaggctgggatgtgatggtgaccttgaaccatcactctttgtagactctaggtcttttcccaacccggtgg

SEQ ID NO: 20398 - DNA, 201 bp, Homo sapiens
cctatcatgcgccatgcatggcaccaggtgtctctggtcttcacgctgactctgccatgggggtggtgttcctgttttacattggaaacgtggagattcaragatggtcaagctctgtcctgaggtcatgcagctcatgagtgtggagctggggtgtgcccactggtttctgactgtgaaacccccacgacatcccaccag

SEQ ID NO: 20399 - DNA, 201 bp, Homo sapiens
agggagatggcatgtgtgaggcagaagtcccctcaggattggattttgtcattactgaagttgtctggaggggactgaattgaggaatgctcaagatcagygcaggctcctcctgctgccctatcatgcgccatgcatggcaccaggtgtctctggtcttcacgctgactctgccatgggggtggtgttcctgttttacat

SEQ ID NO: 20400 - DNA, 201 bp, Homo sapiens
ctcacacctgtaatcccagcactttgggaggccgaagggggcggatcacctgaggttaggaattagagaccaacctggccaacatggtgaaaccctgtctmtactaaaaatacaaaaattagccaggtgtggtggcgggcgcctgtaatcccagctactcaggaagctgaggcaggagaatcacttgaacctgggaggcgg

SEQ ID NO: 20401 - DNA, 201 bp, Homo sapiens
gggcctgccgtgaggtaaagggacttggatggttcctccagacacctgggccaagaattcctccggaggtggggcttgctacagggtgcacgagtcaaggyggtgacctcatcggaggctgaccatggctttccagtgcatcccagaactctggggaccccgctatgacagagtgcctcatttccctgcacctcacctgcc

SEQ ID NO: 20402 - DNA, 201 bp, Homo sapiens
gctcacacctgtaatcccagcactttgggaggccgaagggggcggatcacctgaggttaggaattagagaccaacctggccaacatggtgaaaccctgtcwctactaaaaatacaaaaattagccaggtgtggtggcgggcgcctgtaatcccagctactcaggaagctgaggcaggagaatcacttgaacctgggaggcg

SEQ ID NO: 20403 - DNA, 201 bp, Homo sapiens
tcttctcttccttttttttttttcttagacagagtctcactctgtcgccccagctggagctcagtggtgcaatctcggctcactgcaacctctgcctctcrggttcaagtgattctcctgcctcagcctcctgaatagctgggactacaggcctgtgccaccatgcccagctaatttttgtatttttagtagagacagggt

SEQ ID NO: 20404 - DNA, 201 bp, Homo sapiens
cacagcgtggaggtcagcggctcccaggtgcgtgggcctcccctccccgggccagggcctgccgtgaggtaaagggacttggatggttcctccagacaccygggccaagaattcctccggaggtggggcttgctacagggtgcacgagtcaaggtggtgacctcatcggaggctgaccatggctttccagtgcatcccaga

SEQ ID NO: 20405 - DNA, 201 bp, Homo sapiens
caaatgtttaatttcatttcacaattttcaaatatttctttccttccctccctccttcctctctttcttttttctttctctttctttctttctttcttctcttccttttttttttttcttagacagagtctcactctgtcgccccagctggagctcagtggtgcaatctcggctcactgcaacctctgcctctcaggttca

SEQ ID NO: 20406 - DNA, 201 bp, Homo sapiens
ggtggtgatcatcgacgaggcgcacaacctgatcgacaccatcacgggcatgcacagcgtggaggtcagcggctcccaggtgcgtgggcctcccctccccrggccagggcctgccgtgaggtaaagggacttggatggttcctccagacacctgggccaagaattcctccggaggtggggcttgctacagggtgcacgagt

SEQ ID NO: 20407 - DNA, 201 bp, Homo sapiens
atcaaatgtttaatttcatttcacaattttcaaatatttctttccttccctccctccttcctctctttcttttttctttctctttctttctttctttcttctcttccttttttttttttcttagacagagtctcactctgtcgccccagctggagctcagtggtgcaatctcggctcactgcaacctctgcctctcaggtt

SEQ ID NO: 20408 - DNA, 201 bp, Homo sapiens
ctcaggagtcagaccagccctagtttcctgtgtttcatgtattggcttttcatgtgaaactcgaggagagcttgtccgttgctacaagctgttttttgaaygtctctacacagtccaggcaggaaatagaagcactcacatcaggagctcagtgtcaggcaggcaagcctcctgcaggggagccccgccctgctcaggtgg

SEQ ID NO: 20409 - DNA, 201 bp, Homo sapiens
ataatcaaatgtttaatttcatttcacaattttcaaatatttctttccttccctccctccttcctctctttcttttttctttctctttctttctttctttcttctcttccttttttttttttcttagacagagtctcactctgtcgccccagctggagctcagtggtgcaatctcggctcactgcaacctctgcctctcag

SEQ ID NO: 20410 - DNA, 201 bp, Homo sapiens
ttccgtgcatggggacgctggagcccagaaaagttaagtgactcatattttctcaccaagcgtgggtgatggagccattcagttttccgatattttatttyttatatgagtattcctttaactggaaactttcctaacaacaaacacctaaagacctgcagagttgcttttatttttgttaccccagctccacgccttaac

SEQ ID NO: 20411 - DNA, 201 bp, Homo sapiens
atggataatcaaatgtttaatttcatttcacaattttcaaatatttctttccttccctccctccttcctctctttcttttttctttctctttctttctttctttcttctcttccttttttttttttcttagacagagtctcactctgtcgccccagctggagctcagtggtgcaatctcggctcactgcaacctctgcctc

SEQ ID NO: 20412 - DNA, 201 bp, Homo sapiens
accacttctgttatacatagtactagaagtcctagctagagcaattaggcaagaaaaagaaacaaaagacatccaaattagggaaagctaaatagtctctktttgcagatgtcatgatcttatatattaaccctaaagattccacagttagaactaataaatgaattcagtaaagttgcaggatacaaaattaacatacaa

SEQ ID NO: 20413 - DNA, 201 bp, Homo sapiens
tccagtgaaattccgtgcatggggacgctggagcccagaaaagttaagtgactcatattttctcaccaagcgtgggtgatggagccattcagttttccgayattttattttttatatgagtattcctttaactggaaactttcctaacaacaaacacctaaagacctgcagagttgcttttatttttgttaccccagctcc

SEQ ID NO: 20414 - DNA, 201 bp, Homo sapiens
ttaaaatggataatcaaatgtttaatttcatttcacaattttcaaatatttctttccttccctccctccttcctctctttcttttttctttctctttctttctttctttcttctcttccttttttttttttcttagacagagtctcactctgtcgccccagctggagctcagtggtgcaatctcggctcactgcaacctct

SEQ ID NO: 20415 - DNA, 201 bp, Homo sapiens
gagggccctgcagggccagaaagccgctcttggctctcactgtggtctaggccatgaggggcgtcctcatcacactgtagtttgggggatgccccccaccrtggtcaggttgatggcaccttaacccattctctcctgaggcgtgagttggaggaggcgcgtgggatcccttggggtctccaggcagcagggccagttggc

SEQ ID NO: 20416 - DNA, 201 bp, Homo sapiens
attaaaatggataatcaaatgtttaatttcatttcacaattttcaaatatttctttccttccctccctccttcctctctttcttttttctttctctttctttctttctttcttctcttccttttttttttttcttagacagagtctcactctgtcgccccagctggagctcagtggtgcaatctcggctcactgcaacctc

SEQ ID NO: 20417 - DNA, 201 bp, Homo sapiens
aattaaaatggataatcaaatgtttaatttcatttcacaattttcaaatatttctttccttccctccctccttcctctctttcttttttctttctctttctttctttctttcttctcttccttttttttttttcttagacagagtctcactctgtcgccccagctggagctcagtggtgcaatctcggctcactgcaacct

SEQ ID NO: 20418 - DNA, 201 bp, Homo sapiens
tccgttactaggtgggaaaagagtctgttactaggcgggaaggcatatctggacttgtctgggcatggcaaaggcaggaaggttgtttacagaacaggtarctaggagacaaggaagtacaaggaagttggttttaagaaacaaagaacagggaactaaagctttttgaagaggaatttatcatctctgacacttcttgta

SEQ ID NO: 20419 - DNA, 201 bp, Homo sapiens
tagcacttctgtgtcctttccccattggctggggttggacctcacaatctaagctaactcgattggctaaggtttaaaattgaatagggtctattaggtgragagtccgttactaggtgggaaaagagtctgttactaggcgggaaggcatatctggacttgtctgggcatggcaaaggcaggaaggttgtttacagaaca

SEQ ID NO: 20420 - DNA, 201 bp, Homo sapiens
tctgttagaaataaaagctcagagtcgtaaagaaaatgagcactcaaacacaagatttctcagcaaggcaaattttcttctgcagaagggtgcagcttgcrccagtcattatcgcaagagcacaccgagcagggtaggaaaggggtttttatctctaatgcagttcctagcacttctgtgtcctttccccattggctgggg

SEQ ID NO: 20421 - DNA, 201 bp, Homo sapiens
aacaagagaaaaacagaatttgagaaggaagaaagccaattaagagacagaagtttatgctgagagggactttccccaggctaaaatgattcttttagtcyggacagagaaaggtcagtgagtcccttcagagcagggacctactctagtttctggtactctctgagtaagtatcagggcttcagaaggaaggtctgcatg

SEQ ID NO: 20422 - DNA, 201 bp, Homo sapiens
acgtgtttcttagaccttttctgttaaaggcttcttagaaacttaagagcattgttacccagcacttttcttctcagtcaaaggtagagagggacctgtcytatgatttatcagtgtggcttttgtttactggaatggttatagattgatagaaaagaagtccatacagcttttaaaagaattctgctgccttgtactgaa

SEQ ID NO: 20423 - DNA, 201 bp, Homo sapiens
gggcgtgaacccaggaggcagagcttgcagtgagccaagatcacaccactgcactccagcctcggcgacagtgcgagactccatctcaaaaacaaaacaamacaaaacaaaaacaacgttctgtttaggccgggcgtggtggctcacgcctgtaatcccaccactttgggaggccgaggcaggcgatcacaaggtcaagag

SEQ ID NO: 20424 - DNA, 201 bp, Homo sapiens
aaattcagggcactgccactaaaagtatggcctcagggtcaagatttcaagattacagctgtagacctttgtgtagacctcagaaagatttaaaataatgyctcctgaaccctctcagctaggcaaaaagtctactaaaaatcccaaggacgtgtttcttagaccttttctgttaaaggcttcttagaaacttaagagcat

SEQ ID NO: 20425 - DNA, 201 bp, Homo sapiens
aacttacaatgttagtgacattacaatgttaatggcagttggtcaaattaataataggtaatgtcttgtgtttttctctatatttttcaaattttctacartgaggattcattgcttctctaataacattaatgtaagcatataaataattaaagtttcatggttaatctcacttctcattctctctgagctttgtgtttt

SEQ ID NO: 20426 - DNA, 201 bp, Homo sapiens
aggaaggaaatctttccctcctccccttcttagagcatttctgtcagaaaaccttgtggctgtaaagcctttttctagccttttaaaataaaaatatttcwctttagatgctaagtgcaagggcattatcctacatagccaaataaactgatctcacacagagaatttataactgtacaaggtattctattttctaataca

SEQ ID NO: 20427 - DNA, 201 bp, Homo sapiens
ccagcctgggcaacatagcaaggctccatctctaaaaagtaaaagaacaataaggtctgaatggcatgacaatgaggttaagtgaagctactaagattaartcttcagtggctttagttaactttgcagctgtaagtacccaaagagggtaggcaactgctacggggccaaatgagaagatgtaacaagaaacgggtcttt

SEQ ID NO: 20428 - DNA, 201 bp, Homo sapiens
cagccaacatattatataataaaataattaaattgggtatagtcacataaaaatatgtgcagcagaaaattggaattcatgaaaagattggcataatacgwaggcatgttttcttaattattataaatagaaaagtatgattgcagtcatggaaaatattcattaaaattagaggaaacttacaatgttagtgacattaca

SEQ ID NO: 20429 - DNA, 201 bp, Homo sapiens
gtttcactgtgttggccaggaaggtctcgatctcctgacctcgtgatctgcccgcctccgcctcccaaagtgctgggattacaggcgtgagccaccgcgcytggccattttttttttttttttttttgagacaaagtctcattgtgttgcccaggctggagtgcagtggtgcgatctcggctcactgcaacctcctcctcc

SEQ ID NO: 20430 - DNA, 201 bp, Homo sapiens
ccatgttgcccaggctggtctcgaactcatgaactaaaagcaatccactcacctcagactcctaatagtgctaggattgcctgcatgagccactgctcccrgccgcaccccccacctttgtacagggcaaagactttgttatgtattcttccagacttttacattttagggagaaatttgtgcttccatcgaaaactgcat

SEQ ID NO: 20431 - DNA, 201 bp, Homo sapiens
cgagcagatgggccttctccgggatgaggccctggcagaggtgaaggacatggagcagctgctggcccttgggaaggaggcccgggcctgtccctattacrggagccgccttgccatccctgcagcccaggtgagggccctgcagggccagaaagccgctcttggctctcactgtggtctaggccatgaggggcgtcctca

SEQ ID NO: 20432 - DNA, 201 bp, Homo sapiens
aacgttacagtgttccgatgagacacagtaggcagtacttgggagggtcttatagaccccaccctgtggaagtgggtctcaacattacacaaccccctctygggcccgtggacagttgctgtcctctctgttttctctctttgtgcctgtgccaccctcagagaagaagaaaggagctgaggaggagaagccaaagaggag

SEQ ID NO: 20433 - DNA, 201 bp, Homo sapiens
gattttacgggctctttctggagaacaaaagtaaaacgttacagtgttccgatgagacacagtaggcagtacttgggagggtcttatagaccccaccctgyggaagtgggtctcaacattacacaaccccctctcgggcccgtggacagttgctgtcctctctgttttctctctttgtgcctgtgccaccctcagagaaga

SEQ ID NO: 20434 - DNA, 201 bp, Homo sapiens
agaattaaaatggataatcaaatgtttaatttcatttcacaattttcaaatatttctttccttccctccctccttcctctctttcttttttctttctctttctttctttctttcttctcttccttttttttttttcttagacagagtctcactctgtcgccccagctggagctcagtggtgcaatctcggctcactgcaac

SEQ ID NO: 20435 - DNA, 201 bp, Homo sapiens
gagaattaaaatggataatcaaatgtttaatttcatttcacaattttcaaatatttctttccttccctccctccttcctctctttcttttttctttctctttctttctttctttcttctcttccttttttttttttcttagacagagtctcactctgtcgccccagctggagctcagtggtgcaatctcggctcactgcaa

SEQ ID NO: 20436 - DNA, 201 bp, Homo sapiens
tgattttacgggctctttctggagaacaaaagtaaaacgttacagtgttccgatgagacacagtaggcagtacttgggagggtcttatagaccccaccctrtggaagtgggtctcaacattacacaaccccctctcgggcccgtggacagttgctgtcctctctgttttctctctttgtgcctgtgccaccctcagagaag

SEQ ID NO: 20437 - DNA, 201 bp, Homo sapiens
cagagaattaaaatggataatcaaatgtttaatttcatttcacaattttcaaatatttctttccttccctccctccttcctctctttcttttttctttctctttctttctttctttcttctcttccttttttttttttcttagacagagtctcactctgtcgccccagctggagctcagtggtgcaatctcggctcactgc

SEQ ID NO: 20438 - DNA, 201 bp, Homo sapiens
tggagatgattttacgggctctttctggagaacaaaagtaaaacgttacagtgttccgatgagacacagtaggcagtacttgggagggtcttatagacccyaccctgtggaagtgggtctcaacattacacaaccccctctcgggcccgtggacagttgctgtcctctctgttttctctctttgtgcctgtgccaccctca

SEQ ID NO: 20439 - DNA, 201 bp, Homo sapiens
ttccagagaattaaaatggataatcaaatgtttaatttcatttcacaattttcaaatatttctttccttccctccctccttcctctctttcttttttctttctctttctttctttctttcttctcttccttttttttttttcttagacagagtctcactctgtcgccccagctggagctcagtggtgcaatctcggctcac

SEQ ID NO: 20440 - DNA, 201 bp, Homo sapiens
tagccgcaggtggtctggagagagtgaggcaggggtggcagtgactgaagaccattcagtgtctttcatagaaagaatggcagaggagaccccagttcctycctgagtcccctctccttgggaaaaagtgttcctactctctgggtgagcgtctggtccgaatcgttggcttggagatgattttacgggctctttctggag

SEQ ID NO: 20441 - DNA, 201 bp, Homo sapiens
tttccagagaattaaaatggataatcaaatgtttaatttcatttcacaattttcaaatatttctttccttccctccctccttcctctctttcttttttctttctctttctttctttctttcttctcttccttttttttttttcttagacagagtctcactctgtcgccccagctggagctcagtggtgcaatctcggctca

SEQ ID NO: 20442 - DNA, 201 bp, Homo sapiens
ctttgtgtaaatgaagacgtgagaagcctaggttctgtgcagcttatcaacgaccgctgcgtggacatgcagagaagcaggcacggtagccaccaggaccrtggtgtagccgcaggtggtctggagagagtgaggcaggggtggcagtgactgaagaccattcagtgtctttcatagaaagaatggcagaggagaccccag

SEQ ID NO: 20443 - DNA, 201 bp, Homo sapiens
tggggatttccatttccagagaattaaaatggataatcaaatgtttaatttcatttcacaattttcaaatatttctttccttccctccctccttcctctctttcttttttctttctctttctttctttctttcttctcttccttttttttttttcttagacagagtctcactctgtcgccccagctggagctcagtggtgc

SEQ ID NO: 20444 - DNA, 201 bp, Homo sapiens
cagaacctttgtgtaaatgaagacgtgagaagcctaggttctgtgcagcttatcaacgaccgctgcgtggacatgcagagaagcaggcacggtagccaccrggaccatggtgtagccgcaggtggtctggagagagtgaggcaggggtggcagtgactgaagaccattcagtgtctttcatagaaagaatggcagaggaga

SEQ ID NO: 20445 - DNA, 201 bp, Homo sapiens
atggggatttccatttccagagaattaaaatggataatcaaatgtttaatttcatttcacaattttcaaatatttctttccttccctccctccttcctctctttcttttttctttctctttctttctttctttcttctcttccttttttttttttcttagacagagtctcactctgtcgccccagctggagctcagtggtg

SEQ ID NO: 20446 - DNA, 201 bp, Homo sapiens
ctggcctggccggcccatcactggaaggcaaaggagaggtggcgggggcaggtccacgtgtgttggtaggatgtcatttagctggcaccatctctttgccyctttctttctcctttgttgcagaacctttgtgtaaatgaagacgtgagaagcctaggttctgtgcagcttatcaacgaccgctgcgtggacatgcagaga

SEQ ID NO: 20447 - DNA, 201 bp, Homo sapiens
aaaaacaaacaaacaaagcttagctgggcgtgatggcgcatgcctttagccccagctactcaagaggctgaggaggaaggatcacttgagcctgggaggcwgaggcttcagtgagctatgatcgtgccactgtaccccagcctgggtgagagagtccctacctcaaaaaaataaaaccaaaaaactactggggccacgtca

SEQ ID NO: 20448 - DNA, 201 bp, Homo sapiens
aacaaacaaacaaacaaacaaacaaaaaacaaacaaacaaagcttagctgggcgtgatggcgcatgcctttagccccagctactcaagaggctgaggaggraggatcacttgagcctgggaggctgaggcttcagtgagctatgatcgtgccactgtaccccagcctgggtgagagagtccctacctcaaaaaaataaaac

SEQ ID NO: 20449 - DNA, 201 bp, Homo sapiens
gtttcctttggacactctttgggcattcacagcatcgccaatgatggcttccataattttggcttgccatttttcttttcttttcttttttttttttttttgagacagagtttcacttttcttgcccaggctggagtgcaatggcacaatcttggctcaccgcaacctccgcctcctgggttcaagtgattctcctgcctc

SEQ ID NO: 20450 - DNA, 201 bp, Homo sapiens
tatctcaaaaaaaaaaaaaaaaaaaaaaaaaacgaccaggtggctcacgcctgtaatcccagcacttcgggaggccaaggtggaccgattgcttgagctcrgaagttcaagatcagcctgggctacatagtgaaaccctgtctctaaaacaaacaaacaaacaaacaaacaaacaaacaaaaaacaaacaaacaaagctta

SEQ ID NO: 20451 - DNA, 201 bp, Homo sapiens
agtgctgagattacagccataagccactgcgcccagccctggcttggtattattttcaattgggaaaatagctggggtctttaagctgtgttttgactggmacttttgttttagccttccccggtttcccagtataccatgctagcaggttagcctgtttattaatgtggtctgggacattgtatttttgactattagcaa

SEQ ID NO: 20452 - DNA, 201 bp, Homo sapiens
agttttttgtttttagtacagatggggtttcaccatgttggccaggatggtctcgatctcttgacctcttgatccacccacctccgcctcccaaagtgctkagattacagccataagccactgcgcccagccctggcttggtattattttcaattgggaaaatagctggggtctttaagctgtgttttgactggcactttt

SEQ ID NO: 20453 - DNA, 201 bp, Homo sapiens
tcactgcaacctccgcctcctcggctcaagtgattctcctgcctcagcctcttgagtagctgggactacaggtgtgcaccaccacacccagctaagttttktgtttttagtacagatggggtttcaccatgttggccaggatggtctcgatctcttgacctcttgatccacccacctccgcctcccaaagtgctgagatta

SEQ ID NO: 20454 - DNA, 201 bp, Homo sapiens
gctggtctcaaactcctgacctcaggtgatccacttacctcggcctcccaaagtgctgggattacaggcatgagactccatgcctggctgggtatttttttgtagttgttgttgttgttttgagacagagtctcactctgtcaccaggctggaatgcagtggcgtaatctcggctcactgcaacctccgcctcctcggctc

SEQ ID NO: 20455 - DNA, 201 bp, Homo sapiens
aagcaattcttgtgcctcagcctcctgagtagccgggattacaggcatgtgccaccatgcccagctaatttttgtatttttagtacagatggggttttacyatgttggccaggctggtctcaaactcctgacctcaggtgatccacttacctcggcctcccaaagtgctgggattacaggcatgagactccatgcctggct

SEQ ID NO: 20456 - DNA, 201 bp, Homo sapiens
ggagaattgaagggttttcagagcccatgggtaagtaatatctcagctctggatagctcaactattttaactatgaagccttttcttgcttccagcttaaytggtttcttatttttgtttttgtttttgagacagagtctcactctgttgcccaagctggagtgcagtggcacaatctcggcttactgcaaccttcacctc

SEQ ID NO: 20457 - DNA, 201 bp, Homo sapiens
gcagtgagctgagattgtgccactgcacaccggcccctgcaacagtgtgagactccgtctcagaaaaagaaaaagaaaaagaaaaagaaaagaaaagaagyaggtggttggtctgggttctgatcctaatttctgggctagtactcccatagctatggccctcttctctgctacatacaaggagaagggcttagttagctc

SEQ ID NO: 20458 - DNA, 201 bp, Homo sapiens
gagttcaagaccagcctggccaacatagtgaaattctgtctctactaaaaatacaaaaaaaatagccaggcgaggtggtgggcgcctgtaatcctagctaytcaggaggctgaggcaggagaattgcttgaatctgggaggtggaggttgcagtgagctgagattgtgccactgcacaccggcccctgcaacagtgtgaga

SEQ ID NO: 20459 - DNA, 201 bp, Homo sapiens
actactgccatctatgaaccagtcaccctcagaatctggaagaggctgatttttttttttttaagacggagtctcgctctgttgccaggcttgagtgcagkggcatgatcttggctcactgcaacctccaactccctggttcaagcgattctcctgcctcagcctcccgagtagctgggattacaggcacccaccaccatg

SEQ ID NO: 20460 - DNA, 201 bp, Homo sapiens
ccagcatgcctctggtggacttcctgatgtagctggaggattatacacctatgatcctggatgctgtgactgattattttttatttttgagatggaatctygctctgttgcccaggctggagtgcagtggcatgaacttggctcactgcaacctccgcctcctgagttcaagtggttctcctgcctcagcctccccagcag

SEQ ID NO: 20461 - DNA, 201 bp, Homo sapiens
gctgatgattttacaaaaatctaaaatatgtggcattggtttggggaccaggtgatgagaagaatctggaagggactctaagaaattctttgtaaaggctrgaaggacaaggaacacattttttattgggagctagaaaaaaggtcgcttgtgtaatgtagtggcaaaaagtttagcaatgcttcagcttgtgataaggtg

SEQ ID NO: 20462 - DNA, 201 bp, Homo sapiens
agttgttcaatgggaatgtcaatgggaagacaactaagtttatgcatgaagagggaaaggcaagtgaatcacgaccactgcccacctgacagcagctgtgyaaaatgctgtgacagactgtttccaaagatgcacatcactgcgtatcttccaacagacatgccctttaaaaacaactttattgccaggcgtggtggatca

SEQ ID NO: 20463 - DNA, 201 bp, Homo sapiens
ctgcaaaccattcttgaaagaaactaaaaaacatccaaataaatggaaaaacattctatgttcatggattgggagataatattgttaagatagcaatactyggccaggcacagtggtgcatgtctgtaatcccagcactttgagaggctgagctaggatgatcacttgagcccaggagttcaagaccagccgaggcaacat

SEQ ID NO: 20464 - DNA, 201 bp, Homo sapiens
gttcaacccaaatatttattgtcctgtcatgaaatagcaatgatatatttggaatgtcagctagcttttctgtccagtgcctccctcccatcttcatctcrgatattaaattttactaaaacttacttttatttagaatgtaattcttctgaatcactttcagactttctgtttttatatgtggttgtgtggtctgtgaca

SEQ ID NO: 20465 - DNA, 201 bp, Homo sapiens
ttgcttgaactcgggaggcagaggttgcagtgagctgagatcgcgccactgcactccagcctgtgcgacagagcaagactctgcctcaaaaaaaaaaaaaagaaatgtaagtccttggctgtacccctcccctaaccttgatttccaactagagtttaagccttaagaggggagattagaactaataaataattttagcaa

SEQ ID NO: 20466 - DNA, 201 bp, Homo sapiens
gtgtttagatagatataattagatatctatatataatagattctatgctatgggcattgtaagttctaaattgcttcagtggcattattgtacattcttayataagattgaagaattttgtgattttgattaatttatatccttcaaagtgaccaggaaggtagagtttgcatgcagaaaatttgcatgtatattaattcc

SEQ ID NO: 20467 - DNA, 201 bp, Homo sapiens
tgcagataaataaatgagatgttaatgccactgaaagctctggctttgcgtttggcttttctagtgaaacctgtttagtattctggatttcttccaacttraatttatcacctcatcatttttaacatcagtgatctacacagtctctcatctattacgtatattaaattctggtattttcaactactcttcattaaaact

SEQ ID NO: 20468 - DNA, 201 bp, Homo sapiens
atcgtgcagataaataaatgagatgttaatgccactgaaagctctggctttgcgtttggcttttctagtgaaacctgtttagtattctggatttcttccarcttgaatttatcacctcatcatttttaacatcagtgatctacacagtctctcatctattacgtatattaaattctggtattttcaactactcttcattaa

SEQ ID NO: 20469 - DNA, 201 bp, Homo sapiens
ttttgtttttagcatactatcgtgcagataaataaatgagatgttaatgccactgaaagctctggctttgcgtttggcttttctagtgaaacctgtttagkattctggatttcttccaacttgaatttatcacctcatcatttttaacatcagtgatctacacagtctctcatctattacgtatattaaattctggtattt

SEQ ID NO: 20470 - DNA, 201 bp, Homo sapiens
atatgtcaaaaagtgactgggcatggtggcatgtgcctgtaatcccagctactcgggaggctgaggtgggaggattgcttgagcccaggaggttgagaacrgcctcagcaacatagcaagaccctcatttcaaaaaaaaaaaaaaaaaaaagaaataaaataaaataaatgtaaaaatgaaaaaacaaaaagtgaagtgtg

SEQ ID NO: 20471 - DNA, 201 bp, Homo sapiens
gggtgacagagtgagactccgtctcaaaaaaaaaaaaaaaaaaaaaaaaaaagatttatgcctgtatatcccaaggactccggtttgaagaaaaaaaaaaactacttgaatcaataaaagtagtgatatggtagttgtattcaagataaaaatacaggccagatgcagtagctcatgcctataatcccaacacttttagag

SEQ ID NO: 20472 - DNA, 201 bp, Homo sapiens
cttggtggaacccattgctgggaatggccagggctcagcaccagcgctcagcagatgctcagtgcgttttgctgagtttgctgagggaagactgttttctrttctctctcacacacacagagtggatgaggatgaggatgacctggaggaagaacacataactaaggtaacacgagtgtcctcagctggtgctgtgctggg

SEQ ID NO: 20473 - DNA, 201 bp, Homo sapiens
tgctttcctttttttttctttttccttttcctttcctttcttttcctttctttttttggagacagggtgggtctcactctgttgcccaggctggagtgcartggtgcaatcttagctcactgcaacctctgccttcctggctcaaatgatcctcttgtgcctcccgagtagctgggactacaggtgcccactaccatgttc

SEQ ID NO: 20474 - DNA, 201 bp, Homo sapiens
gctgaagtgggagggaggtggagaccatagggagcagagatcacgccactacactccagcttgggtgacagagtgagaccatgtctcaaaaaaaaaaaaaatgcaatgaccaccaaaaactactctctgcagtaacatggcaatgaaaatagatgccattgttatgtactttaacttctactatgattatttgacatgaga

SEQ ID NO: 20475 - DNA, 201 bp, Homo sapiens
atgatgaagagcaaatatcccccctggggcctcagaggggtccagcttgctggagggagggcagagaggagagcagcctgccatgagtcccgaggcttccractcaagacttgggtttggggtgctgagctcatgtctcctttttacatttccctacccacagacctgagcggccacgggaggttggggttggcatttgcc

SEQ ID NO: 20476 - DNA, 201 bp, Homo sapiens
gtggctcacgcctgtaatcccagcactttgggaggccaaggcaggtggatcacctgaggtcaggagttcgagaacagcctggccaacatggtgaaactccrtctctattaaaaatacaaaaaaattagtcaggcatggtggcaggcacctgtaatcccagctacttgggaggctgaggcatgagaattgcttgaacctggg

SEQ ID NO: 20477 - DNA, 201 bp, Homo sapiens
tttctgctgctatctcagagttgactgggagctggtgaggggagacaacattccaggcacagaacatccgaaggcccgagatgatgaagagcaaatatccsccctggggcctcagaggggtccagcttgctggagggagggcagagaggagagcagcctgccatgagtcccgaggcttccaactcaagacttgggtttggg

SEQ ID NO: 20478 - DNA, 201 bp, Homo sapiens
atagcttgagtccaggaagtcgaggctgccatgagctatgattgcaccactgccctccagcctgggagacaaagcaagactctttctctaaaaaaagaggwaaaaaaaaaaaaaggaacgagattgtgtcctttgcagggacatggatggagttggaagctgttatcctcagcaaactaacacaggaacagaaaaccaaac

SEQ ID NO: 20479 - DNA, 201 bp, Homo sapiens
gaaggcttcctggaggaggtgatgtttctgctgctatctcagagttgactgggagctggtgaggggagacaacattccaggcacagaacatccgaaggccygagatgatgaagagcaaatatcccccctggggcctcagaggggtccagcttgctggagggagggcagagaggagagcagcctgccatgagtcccgaggct

SEQ ID NO: 20480 - DNA, 201 bp, Homo sapiens
aggaactacagaagcatctccaccaaagctcttcttgccaaagtttacttctgtattgtttaggccttggaggtaaaggataaaattgtccagacagctaattattttcttcaggtggctgaggtaggaggatagcttgagtccaggaagtcgaggctgccatgagctatgattgcaccactgccctccagcctgggagac

SEQ ID NO: 20481 - DNA, 201 bp, Homo sapiens
ctcccttgtggacatgacagtctggggagatagaccgagaggaagcaattttgaatgagatgggtgtgaaggggccatgaatctgtgtcagagcagccagrcctaccagggaaggtcaaagaaggcttcctggaggaggtgatgtttctgctgctatctcagagttgactgggagctggtgaggggagacaacattccagg

SEQ ID NO: 20482 - DNA, 201 bp, Homo sapiens
aaaaggaactacagaagcatctccaccaaagctcttcttgccaaagtttacttctgtattgtttaggccttggaggtaaaggataaaattgtccagacagytaattattttcttcaggtggctgaggtaggaggatagcttgagtccaggaagtcgaggctgccatgagctatgattgcaccactgccctccagcctggga

SEQ ID NO: 20483 - DNA, 201 bp, Homo sapiens
ccaagctctaggtgaggccacggggactcagcagaaacaaggccgacctgggtcctcccttgtggacatgacagtctggggagatagaccgagaggaagcrattttgaatgagatgggtgtgaaggggccatgaatctgtgtcagagcagccagacctaccagggaaggtcaaagaaggcttcctggaggaggtgatgttt

SEQ ID NO: 20484 - DNA, 201 bp, Homo sapiens
atacatcccgtaatggagggtgctctgacttcagctggttcgggaaaggccactcctgggattgcttcctcttttctgcccagcatttcttcttcttcttyttttttttttttttgagacggagcctcactctgtcgcccacgctggagtgcagtggcgccatctcagctcactgcaacctctgcctcccgggttcaagat

SEQ ID NO: 20485 - DNA, 201 bp, Homo sapiens
taagtgacagcatcctctgttcactcgattggtcagttgtagcttcatccaggagatggtcatggggttcctgctgcataccaagctctaggtgaggccayggggactcagcagaaacaaggccgacctgggtcctcccttgtggacatgacagtctggggagatagaccgagaggaagcaattttgaatgagatgggtgt

SEQ ID NO: 20486 - DNA, 201 bp, Homo sapiens
ggttcctgccactttctaaataaaaatcattaagatactcaatcaccaaattgcccacactatctgactgcacccagtccagagcaggcctcgctcggctsagcccttccccaagtcatctaacataaactcaaatcctactataagcccctcctaatggcctcttacctagaccacacttccctagggtgtgtaaaccca

SEQ ID NO: 20487 - DNA, 201 bp, Homo sapiens
cacggatgggattagcgctttataaaagggacatggggaactagcctaggccttttttttttttttttttttttttcgcttctgctcttccaccatggaaracacagaaggaaggtaccaccttggaagcagagagcagccctcgccagacaccaactctgctggcaccttgatcttgtacttcccagcctctagaactga

SEQ ID NO: 20488 - DNA, 201 bp, Homo sapiens
atgggatgcagggctggcttccctgccaacgcctggcgctgatggattcttcccgcattgctggaaagggcagactgaggcgctgacaaaagaagagttgyagctggtcataagtgacagcatcctctgttcactcgattggtcagttgtagcttcatccaggagatggtcatggggttcctgctgcataccaagctctag

SEQ ID NO: 20489 - DNA, 201 bp, Homo sapiens
ctctttcatcttgtcactatgtaggatttatggctctttgttaaactatgatttaagcaaagcccctaagccactgccttgagagagaaatacttttgaactgaggcctctcccgtgtgatgggtactgcatgcattaataaatttctgctttttttttttttttgttaatctaacttttgttttcaggagagtatctcaa

SEQ ID NO: 20490 - DNA, 201 bp, Homo sapiens
aagaggtgagacctttagggggtgattcaggcatgcgggttctgccctcacggatgggattagcgctttataaaagggacatggggaactagcctaggccytttttttttttttttttttttttcgcttctgctcttccaccatggaagacacagaaggaaggtaccaccttggaagcagagagcagccctcgccagacac

SEQ ID NO: 20491 - DNA, 201 bp, Homo sapiens
ggaaggagtcaagcagggtttttacaattctccattgggctgtttgagggagatatgcttttgatcccatataccaccaggatccttgtttttgtcccccsctccgttattaactctacagtgtgtattcaggttctattgggaaatcatagaaaggaagtagtgctaggatctgttgggattgcaccctgagggcttcag

SEQ ID NO: 20492 - DNA, 201 bp, Homo sapiens
tttcctcctaccatagagaaaccctttgcaacctttgagatgtttacagaccttccagtcccagcattcccctccctccattgcaggagtacccccgcaaygccctggcaataattccttcgaatgaaggtctctcttttaccacatccagaattttttttatttgacaaaccagaaatggaagacaacccatcagctcgt

SEQ ID NO: 20493 - DNA, 201 bp, Homo sapiens
aacccaggaggcggagcttgccatgagccaatatgtcgccactgcactccagcctgggtgacagagagagagtcttgtctcaaaaaaaaaaaaaaaaaaaataggcaaagaggggttcagagcctcaaaaatggagagcagcagaaactcaccaagagaaacaataagaagcacattttataaaaggaattgacaacggtt

SEQ ID NO: 20494 - DNA, 201 bp, Homo sapiens
gaacccaggaggcggagcttgccatgagccaatatgtcgccactgcactccagcctgggtgacagagagagagtcttgtctcaaaaaaaaaaaaaaaaaaaataggcaaagaggggttcagagcctcaaaaatggagagcagcagaaactcaccaagagaaacaataagaagcacattttataaaaggaattgacaacggt

SEQ ID NO: 20495 - DNA, 201 bp, Homo sapiens
tgaacccaggaggcggagcttgccatgagccaatatgtcgccactgcactccagcctgggtgacagagagagagtcttgtctcaaaaaaaaaaaaaaaaaaaataggcaaagaggggttcagagcctcaaaaatggagagcagcagaaactcaccaagagaaacaataagaagcacattttataaaaggaattgacaacgg

SEQ ID NO: 20496 - DNA, 201 bp, Homo sapiens
gctgtggaatactgtgctaaccaggaaatagccaattcttccttcagggcatgttatgagatacatgaattgttttctaagtcacaatagccttttttttycttttctttttttttgcttgctttcttttctttttctttttttctttttcttttttttttttttgagatgaagtcttgctctgtcacccaggctggagtg

SEQ ID NO: 20497 - DNA, 201 bp, Homo sapiens
tctgaggtaacctaaacttagggattatttctttttaagagaaactttaggctgggcgaggtggctcacgcctataatcctagcactttgggaggctgagkggggcagatcacctgaggtaaggagttgagagcagcctgaccaacatggagaaaccctgtctctactaaaaaatataaaattagccaggcatggtggctt

SEQ ID NO: 20498 - DNA, 201 bp, Homo sapiens
ttacagtctaaggacatccagaacagagtttccacaccaaaggcacatctagtttctcatccacaagctttttatctttgtctttgtgtttgttttttatwccggaacttcttgacaaatattattccatcatcagaaggaaggtcctgggaaaaagaaagacatgagcacttgtgctaggtattttacaggcatatcttc

SEQ ID NO: 20499 - DNA, 201 bp, Homo sapiens
taggggtattacaggtccttaagaaggctatgggcagtaggctgaccaaagtttctaatgtttcctgacatagcttagataacactcattttagagtttgrttagccctttctactttcctggaggattgaggccttcatgctgaatgtaaatagtatttgattctatgatggctaatattgagtgtcaacttgattgaag

SEQ ID NO: 20500 - DNA, 201 bp, Homo sapiens
ttttagtagagatggggtttcaccatgttgcccaaggctggtgtccaactcctgacctcaagtgatctaccctcctcggcctcccaaagtgctgggattayaggcgtgagccaccacgcccaaccttgagttaaatttctaaaaatctcaacataatgtgtttggctcctcttcttattatgcttagagttaggcactagc

SEQ ID NO: 20501 - DNA, 201 bp, Homo sapiens
ccactttgggaggccgaggcaggcgatcacaaggtcaagagatcaagaccatcctggccaacatggtgaaaccctgtctctactaaaaatacaaaaattakctggacgtggtggtgcgtgcctgtagtcccaggtactcagaggctgaggcagaagaatcacttgaacccgggaggcggaggttgcaatgagtggagatca

SEQ ID NO: 20502 - DNA, 201 bp, Homo sapiens
ttacaaaactaactcttgtcacaaagctaggatacgtttatttctcctttttgttgatttttgaacaattagaatttatttctcacagttctgaaggctgygtgtctgagagcagggtcccagcacagccaagttctggtgaggaccctcttccagtggcagatgcccacttctggtgctatctcccatggaggacagcag

SEQ ID NO: 20503 - DNA, 201 bp, Homo sapiens
gggtggatcatgaggtcaggagatctagaccatcctggctaacccggtgaaaccctgtctctactaaaaatacaaaaaattagccagggttggtggtgggygcctgtagtcccagctactcaggaggctgggcgtgaacccaggaggcagagcttgcagtgagccaagatcacaccactgcactccagcctcggcgacagt

SEQ ID NO: 20504 - DNA, 201 bp, Homo sapiens
ggaattacaggcacccgccaccacactaatttttgtagtttttagtagagatggggtttcaccatgttgcccaaggctggtgtccaactcctgacctcaartgatctaccctcctcggcctcccaaagtgctgggattacaggcgtgagccaccacgcccaaccttgagttaaatttctaaaaatctcaacataatgtgtt

SEQ ID NO: 20505 - DNA, 201 bp, Homo sapiens
agagcttccacaccctccctaggtgcaccatcctccaggaatgtccgcgtgtttgctatacagaagctccctgaatccagtcctcttggattttttgttcrtttgttttgttttgttttgttgagatggagtctcactctgtcgcccaggctggagtgcagtggcatgatctcggcttgctgcagccttcgtctccggggt

SEQ ID NO: 20506 - DNA, 201 bp, Homo sapiens
agaattgcttgaacctgggaggcagagattgcagtgagccgagatcgtgccactgcacttcagcctgggcaacaaagtgagactccatctcaaaaaaaaaataaaaaataaaaaacaaaactctgatcaccaaatactcgaatgcttggggagactgatttgagtaataataaaactctgatttcccacacagccaggtct

SEQ ID NO: 20507 - DNA, 201 bp, Homo sapiens
ctatgagactttgggcaaattaatctctaaacctcaatttctcaatctgtaaaatgttcaaggtcaagcaactcacttttccacattgtaattgatgaaaytaaaattcagactcagatctgcctcactccacagtctgtgctttttccttcccactcatctttttctctttctattaaaaatttcataacacatttgaga

SEQ ID NO: 20508 - DNA, 201 bp, Homo sapiens
gtttctgtgggttgtatactcatgaaatgtatgtatgtgtttttcttccatttttctcacgggttgtttggtatttctttatttttttcttttttttttttgagacagaatctcgatgcattgcccaggctggagtgcaggggtgatctcggctcactgcaacctccacctcctgggctccagtgattctcgtgccttaga

SEQ ID NO: 20509 - DNA, 201 bp, Homo sapiens
aaagtctcttctattcaatcactagaggaaaaaccattttctcactaccttgattctagaaaaatttgtgcattcttttgataatactcagacacaaatarttctttagtggccattcaattattccctttgttactgtacatttccaagatagattatttgattagcaaaaatgcctgcgcaatgcattcaggttattgc

SEQ ID NO: 20510 - DNA, 201 bp, Homo sapiens
ttctgggttcaagcgattctcctgcctcagcctcccgaatagctgggactacaggcacacgccaccacgcctggctaattttttgtatttttagtagagcyggggtttcaccatattggccaggctggtcttcaactcctgacctcatgatccagtcacctcagcttcccaaagtgctgggattataggcgtgagccacca

SEQ ID NO: 20511 - DNA, 201 bp, Homo sapiens
gagaaaaccagcttagattgcgtatgtgaaatactagaaagtgagattgtattttccttctctgatgactttacaaatagaatgattaaaaagtatttttytctaataatttgtgtacacagaaacttaggattgacaaaacgatcttatttgttcttgacatatgtataattttatgcttttttaaaaaacttttttttc

SEQ ID NO: 20512 - DNA, 201 bp, Homo sapiens
ggtaatccacccacctcggcctcccaaagttctgggattataggtgtgagccactgtgcctggcctgcattccagctttcttgtagctatttgtgtgataytttttcatcattttactttcagtctgtgtttttggatctaaggtatatctcttggaaacaataacatatagttggatagtttttaaaatccagactgaca

SEQ ID NO: 20513 - DNA, 201 bp, Homo sapiens
tatcattcctcagggtgtgtataacttaataaataactttttttttttttgagacagagtctcactctgttgcccaggatggagtgcaatggcccgatctyggctcactgcaagctccacctcccgagttcaagcaattctcctgcctcagcctcctgagtagctgggattacaagttcatgccaccatgcccagctaatt

SEQ ID NO: 20514 - DNA, 201 bp, Homo sapiens
cgggtgtggtagcaggcatctgtaattccagctacttgggagactgaggcaggagaattgcttgaacctgggaggggcaggttgcagtgagctgagattgygccactgtgctccagccttggtgataaagtgagactctgtctcaaaaaagaaaaaaaaaaggaaagaagagattctggaggtagaaacaagaaatagttt

SEQ ID NO: 20515 - DNA, 201 bp, Homo sapiens
gcccagggcagagaccaccgtgttgctttatgcctcgctggtgagagggggtcataaacagtttgtgctccatgaaccgttcctgcccacctccaaggtcrtgtttctgctccctctcttctcccttagagcccatggggacaaggcagagaacttgagtggagatgaaggtggtgaatattagaggaacaaagtgctcct

SEQ ID NO: 20516 - DNA, 201 bp, Homo sapiens
cagttacctactaaattttgaagttatatgaataatctttattttcaagaatcttatgaattttatatgttctgcaaaaacaggtaaaacttcattcctcytttactctatttaaaaaaactgtaatggatggatatatataattgcgtgtgtgtaaaagtaatattaatatatcaatatcatgatcttactggtatatgt

SEQ ID NO: 20517 - DNA, 201 bp, Homo sapiens
gtggacttcgacttctgcccctgcccagggcagagaccaccgtgttgctttatgcctcgctggtgagagggggtcataaacagtttgtgctccatgaaccsttcctgcccacctccaaggtcgtgtttctgctccctctcttctcccttagagcccatggggacaaggcagagaacttgagtggagatgaaggtggtgaat

SEQ ID NO: 20518 - DNA, 201 bp, Homo sapiens
tgggaggtggaggttgcagtgagcccagatcatgccactgcactccagcctgggtgacaagagggagactgtctcaaaaaaaaaaaaaaaaaaaaaaaaaaagatggtcatggtcatcccagggtgggggcaggcttgaggactctgcggtggtctctcaggatctactccagatccaggctggcttccagaaatactgca

SEQ ID NO: 20519 - DNA, 201 bp, Homo sapiens
ttcgtttggaaaagggttttttattctcactccttgttttgagtctcaaagctagttgcttacactcagttcgtgcaaatgctgtagtggcatatttagamgataggctttgtgtggacttttggaaaagtttaatagtttatgtctgcatgtttttctttatctaatctcccctcaacctgtccccaacaaatacattaa

SEQ ID NO: 20520 - DNA, 201 bp, Homo sapiens
ggtgtgctcaataaaatcgagttgacatgaatgagcagatgctgcctcgttgcagtctggtagtgtaattccaggctgcccatgtggacttcgacttctgsccctgcccagggcagagaccaccgtgttgctttatgcctcgctggtgagagggggtcataaacagtttgtgctccatgaaccgttcctgcccacctccaa

SEQ ID NO: 20521 - DNA, 201 bp, Homo sapiens
aggctgaggcaagagaattgcatgaacctgggaggtggaggttgcagtgagcccagatcatgccactgcactccagcctgggtgacaagagggagactgtytcaaaaaaaaaaaaaaaaaaaaaaaaaaagatggtcatggtcatcccagggtgggggcaggcttgaggactctgcggtggtctctcaggatctactccag

SEQ ID NO: 20522 - DNA, 201 bp, Homo sapiens
cctggcctaaaagtgcatttttttaatgtagctttcaaaagtacatgttttatgtaacgaagcatcctctaattctagctattgaagttagccatatcacygttaattgttgctttgagacaaagttacatctttaaaattttgtatcatgggatgcaatgaaacatccttctgtaaagcaaagggattgactacctgata

SEQ ID NO: 20523 - DNA, 201 bp, Homo sapiens
tgacccagtgtttggcataggggtgtgctcaataaaatcgagttgacatgaatgagcagatgctgcctcgttgcagtctggtagtgtaattccaggctgcscatgtggacttcgacttctgcccctgcccagggcagagaccaccgtgttgctttatgcctcgctggtgagagggggtcataaacagtttgtgctccatga

SEQ ID NO: 20524 - DNA, 201 bp, Homo sapiens
ctcatgcctgtaatcccagcactttgggaggccgaggcgggcggatcacttgaggtcaggagtttcagaccagcctgaccaacatggtgaaaccccatctytactaaaactacaaaaattagccgggcatggtggcgggcacgtgtaatcccagctactcaggaggctgaggcaagagaattgcatgaacctgggaggtgg

SEQ ID NO: 20525 - DNA, 201 bp, Homo sapiens
tccctggctgggctcgagctgcttcagggcaggaaccacgtctttacagtttgatgttcccagagctgacccagtgtttggcataggggtgtgctcaatamaatcgagttgacatgaatgagcagatgctgcctcgttgcagtctggtagtgtaattccaggctgcccatgtggacttcgacttctgcccctgcccagggc

SEQ ID NO: 20526 - DNA, 201 bp, Homo sapiens
tcggccgggtgcagtggctcacgcctgtaatcccagcactttgggaggccgaggcaggtggatcacctgaggtcaggagttcaagaccagcctgaccaatrtggtgaaaccctgtctctactaaaaatacaaaaattagccgggcaatgtggcatggacttgtaatcccagctactctggaggctgaggcaagagaattgc

SEQ ID NO: 20527 - DNA, 201 bp, Homo sapiens
tgtctgcaccttatacacaaggaggctgcagccccacaaggagagactccttggctgaggccacaagcctcggcagtggagagctgggctagaactcagcyggcctggctctagatctcaggctctgaggcagctgactgcactgggtaacctttgaggtgccaaccgtcaaggcgtccttagcctgagctttccttctcc

SEQ ID NO: 20528 - DNA, 201 bp, Homo sapiens
cctgggaggcggaggttgcagtgagccaaggtcgcaccactgcactccagcctgggtaacagagcgagactccatctcaaaataaataaataaaataatasctactggtgggaatggttattcatgcctgtaatccagctttttgggaggcagaggcagggggatcgcttgggcccaagagttcgagtgagctatgattgc

SEQ ID NO: 20529 - DNA, 201 bp, Homo sapiens
gccagtgttcaatctgagactttccaaggtcagaagagaggaggattggtattgatatttaataagcatttactgtgtccaaggcattttggtacgaattktatatctcttatctgatatccttgccttttaggactaggctgtttttacctttaaggtagatgttattattctcattttacacatgaggtaactgaaaca

SEQ ID NO: 20530 - DNA, 201 bp, Homo sapiens
tgggctgtgagtggttgaggcgtggatcctaggagtcgacctctctccagccaggcagccaggcctatgtgaatgggcgtggtgtgctttgtctctggcaygtggggaggtgggtactggtgctgagacttcttcctccctccccacctccactgcccctgtccagaggcaggaagaagaagaaacagagaatctcctccg

SEQ ID NO: 20531 - DNA, 201 bp, Homo sapiens
gctgggcaggatggcatgggtctttagtcccggctacttgggaggccgaggtgggaggatcactcaaacctgggaagttgaggttgcagtgagctgagatyacacccttatactccaactggagtgacagagcaagaacctgtctcaaaataaataaataaatgattaaaaataaaatattatataaaaccaccttcggtc

SEQ ID NO: 20532 - DNA, 201 bp, Homo sapiens
gaggtatagcatctaacaatactgcacttccatagagcggacttgggataacagttaactcctaagacatcagctgaagatgacaaaggtaaaaatatctrccgttaagataaagttgaaaactctgtacttactgtactttattcaaaatgttagccttctcttagcagattcttcaataagcttgcttttaggtttcaa

SEQ ID NO: 20533 - DNA, 201 bp, Homo sapiens
agcgaggctgggacctgcagggatgaggtcccgggaggggatgcggcagcccttgagtgctggttggggaaggagagctgcccccagtgaggaggcgccgrgctgagtggcccagactccttaggagaggcctggttttgggcttcctggtgattttccttcatgtctgcctcctgtaggcggagcaggccaggaggaagc

SEQ ID NO: 20534 - DNA, 201 bp, Homo sapiens
tttagaaaccctggattggataaattcattatgataaagattaaaatatcaccttatgtttatgtgtcgtgggagctttttttttttttttttttttttgrgacggagtctcgttctgtcgcccaggcgggagtgctgtggcgcgatctccgctcactgcaagctccgccttccgggttcacgccgttctcctgcctcagc

SEQ ID NO: 20535 - DNA, 201 bp, Homo sapiens
cgccttccacagtgagcagcgaggctgggacctgcagggatgaggtcccgggaggggatgcggcagcccttgagtgctggttggggaaggagagctgcccscagtgaggaggcgccgagctgagtggcccagactccttaggagaggcctggttttgggcttcctggtgattttccttcatgtctgcctcctgtaggcgga

SEQ ID NO: 20536 - DNA, 201 bp, Homo sapiens
ccagctactcaggagtctgaggcaggagaatcgcttgaacctgggaggcggaggttgtagtgagccgagatcatgccacttcactccagcctgggcaacaragcaagactttgcctcaaaaaaaaaaaattgtttttgcaattatttaatcagactttcttaagactttgacctttatgcacttttaccttccttaataac

SEQ ID NO: 20537 - DNA, 201 bp, Homo sapiens
tttgggaggagcgtgccgccttccacagtgagcagcgaggctgggacctgcagggatgaggtcccgggaggggatgcggcagcccttgagtgctggttggrgaaggagagctgcccccagtgaggaggcgccgagctgagtggcccagactccttaggagaggcctggttttgggcttcctggtgattttccttcatgtct

SEQ ID NO: 20538 - DNA, 201 bp, Homo sapiens
atctaaacacttccctcattcaggttttccccagttattaactatgttaacataattagtggctatgccaactcatgatatgttctttttttaaaaaaacrtttctgtagccaggcatggtggcagatgcctgtaatcccagctactcaggagtctgaggcaggagaatcgcttgaacctgggaggcggaggttgtagtga

SEQ ID NO: 20539 - DNA, 201 bp, Homo sapiens
gtgacttttacaaaaggttgtagtttttgttccctccacacttaagaattttatctcacatcatgaatatctgacttctggctttttttttttttttttttaaggtaagcaagctaacatttaaaactgtgattaaataagagtatctttcaaggtttggctaaggagagctaacatttccgtgctgtgctgttaatcaaa

SEQ ID NO: 20540 - DNA, 201 bp, Homo sapiens
tagtggtgagatctcagctcactgcaacctccaactcctgggttcaagggattcttccacctcagcctgccaagtagctagaactacaggtgcacaccacyatgcccggctaatttttgtatttttagtagagacaggatttcaccatgttggccaggctggtattgaactcctaacctcaagtgatttacccgcctcagc

SEQ ID NO: 20541 - DNA, 201 bp, Homo sapiens
tgtgacttttacaaaaggttgtagtttttgttccctccacacttaagaattttatctcacatcatgaatatctgacttctggctttttttttttttttttttaaggtaagcaagctaacatttaaaactgtgattaaataagagtatctttcaaggtttggctaaggagagctaacatttccgtgctgtgctgttaatcaa

SEQ ID NO: 20542 - DNA, 201 bp, Homo sapiens
ttgtgacttttacaaaaggttgtagtttttgttccctccacacttaagaattttatctcacatcatgaatatctgacttctggctttttttttttttttttttaaggtaagcaagctaacatttaaaactgtgattaaataagagtatctttcaaggtttggctaaggagagctaacatttccgtgctgtgctgttaatca

SEQ ID NO: 20543 - DNA, 201 bp, Homo sapiens
gaagcttccatttttgtttcaggaagctagatgctatgctttgaagaagctcagccaagacaactggaagagaagagactacatggagagagaaaggccaygtggaggaccactggggctccacgcattgagtgaagcctttttggacttttgagccagccaactaataagaagtaaaaccaacactgtggagtggcaaac

SEQ ID NO: 20544 - DNA, 201 bp, Homo sapiens
tttgtgacttttacaaaaggttgtagtttttgttccctccacacttaagaattttatctcacatcatgaatatctgacttctggctttttttttttttttttttaaggtaagcaagctaacatttaaaactgtgattaaataagagtatctttcaaggtttggctaaggagagctaacatttccgtgctgtgctgttaatc

SEQ ID NO: 20545 - DNA, 201 bp, Homo sapiens
ctgacctccctcttcttagagcatttgctttagaaaacttgtaaattttctctctgatacttcgagatgccaattttttttttttttttggtcattttacytttagtcgatgcataatctttaaaaaagctttgtcagttttacaacccaggaaagtctttctccaagacctgggaactatttctttgaaatgcaatcagc

SEQ ID NO: 20546 - DNA, 201 bp, Homo sapiens
ttttgtgacttttacaaaaggttgtagtttttgttccctccacacttaagaattttatctcacatcatgaatatctgacttctggctttttttttttttttttttaaggtaagcaagctaacatttaaaactgtgattaaataagagtatctttcaaggtttggctaaggagagctaacatttccgtgctgtgctgttaat

SEQ ID NO: 20547 - DNA, 201 bp, Homo sapiens
gggaggcccctgacctccctcttcttagagcatttgctttagaaaacttgtaaattttctctctgatacttcgagatgccaattttttttttttttttggkcattttacttttagtcgatgcataatctttaaaaaagctttgtcagttttacaacccaggaaagtctttctccaagacctgggaactatttctttgaaat

SEQ ID NO: 20548 - DNA, 201 bp, Homo sapiens
gacagggtcttgctctgtcacccaggctggagtgcagttttgcagtggcatgatcccggctcactgcagccttaactgctcaggctcaagtgaccctcccrccacaacctcccaagtagctgtgtcccacaggcacacaccacagtgcctaatttttttattttctgtagacatggagtctccccatgtactcaggctggt

SEQ ID NO: 20549 - DNA, 201 bp, Homo sapiens
gtttttttgagacagggtcttgctctgtcacccaggctggagtgcagttttgcagtggcatgatcccggctcactgcagccttaactgctcaggctcaagygaccctcccgccacaacctcccaagtagctgtgtcccacaggcacacaccacagtgcctaatttttttattttctgtagacatggagtctccccatgtac

SEQ ID NO: 20550 - DNA, 201 bp, Homo sapiens
aaattacatagtatttgcatatgacctactcacatcctcctacacactttaaatcatctctagattacttataatacataatacaatgtaaatgctatgtwaatagttgtaattctgtattgtttagggactagtgacaagaaaaaatagtctgtacatgttcagtacagaagcaatcttttttttttttttaagagacag

SEQ ID NO: 20551 - DNA, 201 bp, Homo sapiens
ctcgttagctggtttctagttgaattggttatgtatctagttaccaatatgctgcaaccgtgcagtcacctacacattatttaagtatatttaactgttamatgcactacccaccaatcatgaaataaactttatgaaaaaaattttttaaaatgaatttactatagcttgagtatacagtgtgtataaagtctacagtaa

SEQ ID NO: 20552 - DNA, 201 bp, Homo sapiens
agggtttcatggtgttagccaggatgatctcgatctcctgacctcgagatccacctgcctcggcctcccaaagtgctgggattacaggcgtgagccaccgygcccagccaattgcttgatttttgataccatgccagatcattttccaagtccacttgcccgaatgtcacactcgtaagaaatgataagtatccatgtggg

SEQ ID NO: 20553 - DNA, 201 bp, Homo sapiens
ggtgcctgccactgcgcccagctaattttttgtatttttagtagagacagggtttcatggtgttagccaggatgatctcgatctcctgacctcgagatccrcctgcctcggcctcccaaagtgctgggattacaggcgtgagccaccgtgcccagccaattgcttgatttttgataccatgccagatcattttccaagtcc

SEQ ID NO: 20554 - DNA, 201 bp, Homo sapiens
acaataatattgcacacatagagatgcatttattcctcagttatcatttctctagaccaagggtgggtgcaaattatttttagagcctaaggattacacartttgggagggtaggggattcgctttaagaaaaagaaagcaaaataggctgggcacaatggctcatgcctgtaatctcagcactttgggaggctgaggcgg

SEQ ID NO: 20555 - DNA, 201 bp, Homo sapiens
tgtgagccgaaatcgcaccactgcactccagcatgggcaacagagcgagacatcacctcaacaacaaaaaaaagagtgccctttggaaaggtgaatgtctrcatagtgtgagtttaatggagtcacatttgtctaaatagaaattcctctcaacctgtcattgcactctcttgccactgtgaacgtccaccaatagtgtcc

SEQ ID NO: 20556 - DNA, 201 bp, Homo sapiens
ctcagttaaggacttgtttatttaaatgggactgtaaatatgttttggtttctaagctatattagcaaaatttatttttcaaaaatgcccactgtgatgtsaatgtcaaaatatattcttaagtgttttataactaattgtaaactttttttcagaagtcttattttatacttgtgaaactgaacacaattttgggacaac

SEQ ID NO: 20557 - DNA, 201 bp, Homo sapiens
tcaattggagttttttgttttgttaatagacaaccaaatgtaaaactagcatataataaaagtgaatattattttcacagattatattacttttttctaaytgttggacactgatatatatcatttatttttcccagtgaccctgatttgtaaaatgaggtcaagtaacttctccacattgtaattgatgaaactaaaatt

SEQ ID NO: 20558 - DNA, 201 bp, Homo sapiens
atttcaaacacctgggttcaagtgatcctctggcctcagcctcccaaaatgctgggattataggcgtgagccactgtgcccagccccttttgttgatcgckccacaattttccaaaacgttcatagggactctatattagttttctagagctgccataacaaagcaccacaaactgggtgggttaaaaaaacagaaaatgt

SEQ ID NO: 20559 - DNA, 201 bp, Homo sapiens
aaaaaaatccaggtggcatggagagtaatatcacagactcatttaaaggatgattaacgattctccaaagaaaaatcaggaaggccacctaggcgatatayaaaacaacaaagcccacgatacctttcatattctaaaaatcccatgaatctataggtggagaacaatttacatggtctatggaataaaaaactgctttaa

SEQ ID NO: 20560 - DNA, 201 bp, Homo sapiens
gtcctatgcagaaggatggttctctgagcaagtcttctccaagaacacaaaagaatgggggattttgaaaaacaaaaggtggtggaggatgggggttgcayggggttcaggttgggggtgggggtactgggggtgcagggtgctttatcatccctgctttcttttctttttaaataaatacattttctttctgtcttcttt

SEQ ID NO: 20561 - DNA, 201 bp, Homo sapiens
agctgtttccactaaaaaaaaatccaggtggcatggagagtaatatcacagactcatttaaaggatgattaacgattctccaaagaaaaatcaggaaggcyacctaggcgatatacaaaacaacaaagcccacgatacctttcatattctaaaaatcccatgaatctataggtggagaacaatttacatggtctatggaat

SEQ ID NO: 20562 - DNA, 201 bp, Homo sapiens
ctgcttgggaggctgaggcgggaggatcacttgtgactgggagtttgagaacagcctggggaacatagtgagaacccatcaggaaaaaaaaaaaaaaaaaaaagttgattaaaaaaagaaaaacaaaagaggccaggcacggtggctcacacttgtaatcccagcattttgggtggccaaggtgggaggatcgcttgaggc

SEQ ID NO: 20563 - DNA, 201 bp, Homo sapiens
tcaagaaatatgaattatagccaggtccagtggtgtgtgcctgaagtcccagctgcttgggaggctgaggcgggaggatcacttgtgactgggagtttgaraacagcctggggaacatagtgagaacccatcaggaaaaaaaaaaaaaaaaaaaagttgattaaaaaaagaaaaacaaaagaggccaggcacggtggctca

SEQ ID NO: 20564 - DNA, 201 bp, Homo sapiens
aaacaagttttaacatctggaaagaaaaagcatccatcaacttttcttatcaagaaatatgaattatagccaggtccagtggtgtgtgcctgaagtcccasctgcttgggaggctgaggcgggaggatcacttgtgactgggagtttgagaacagcctggggaacatagtgagaacccatcaggaaaaaaaaaaaaaaaaa

SEQ ID NO: 20565 - DNA, 201 bp, Homo sapiens
tgggaggctgaggtgggcggattgtctgaggtcaggagttcgagaccagtctggccaacatagtgaaaccccttctctactaaaaatacaaaaattagccrggtgtggtggcgcacacctgtagtcccagctacttgggaggctgagatgggagaatcgcttgaacccaggaggcagaggttgcagtgagccgagatcgtg

SEQ ID NO: 20566 - DNA, 201 bp, Homo sapiens
tatcagatagaattatcaattccttctctatgttattttgaatttctttgagtttcctcaacacggctattgtgaattcactgtctgaaaggtcacatatytctgtttttccaggattggtccctggagctttatttagttcatttggtgaggtcatgtttccctggatgccgctgatgctcgtagatgttcttcagtatc

SEQ ID NO: 20567 - DNA, 201 bp, Homo sapiens
tttacttgtttgctgggaatcaaagagcttagttttgttttttgttttttttttttttgagacggagtctcgctctgtcccccaggctggagtgcagtggygcgatctcagctcactgcaagctccccctcccaggttcacgccattctcaaagagcttagtttaagctcaattcaagtgactatttgaggcctggtcagg

SEQ ID NO: 20568 - DNA, 201 bp, Homo sapiens
caaggctggggcgcagtggtgcgatctcactgcaacctctgcctcccgggttcaagcaattctcctgtctcagcctcccgagtagctgggattacaggcayaccaccacacccagctaattttttgtattttttgtagggacagagtttcaccatgttgcccatgctggtctcgaactcctgagcccaggtgatccacctg

SEQ ID NO: 20569 - DNA, 201 bp, Homo sapiens
ggtgcagctgtcatgggttggagtcttgtgtctgtggctctcccaggctagtgttgcatgctaatggctctacagttctgatgtcttaggagtggccctgwcccacgactttactaagcaatgccctatttgggtatctttgcagtgacccccaatcccacagttccactgggcaaggggatttagaaaacagagttccga

SEQ ID NO: 20570 - DNA, 201 bp, Homo sapiens
aaaatcagataactagaattatataactctatgtgctttattttttacttgtttgctgggaatcaaagagcttagttttgttttttgttttttttttttttgagacggagtctcgctctgtcccccaggctggagtgcagtggcgcgatctcagctcactgcaagctccccctcccaggttcacgccattctcaaagagct

SEQ ID NO: 20571 - DNA, 201 bp, Homo sapiens
ccattccataggttgtctctttgctcttattgtttccttggctgtgcagaagctttttagtttgatataagtccatagtagggtgcttttagacataggcmcagtaacaggagttatgtctgacaatctgacatcaagaatagaaaaattggctaggcctgtagttccagctacttgagaagattacttcagcccaggagt

SEQ ID NO: 20572 - DNA, 201 bp, Homo sapiens
acattctgagatgctgggggttaggatttcaacacaggaatttggaggaatacaattcaatcaggcttatggacaattctggtcttaagtcaagagtagtsttctccagtctgtatgtggaggcgcacacctatggtcccagccacttgggaggctgaggccagagaattgtgtgagcccaggaggagttccataccagcc

SEQ ID NO: 20573 - DNA, 201 bp, Homo sapiens
gctcagctcatgattctgttttgtggaacaaagtgttacctgtttctagaattgcaaataaagccaattgagatttttttttttttttttttttggcagaktcacactctgttgcccaggctatagtgtagtggtgagatctcagctcactgcaacctccaactcctgggttcaagggattcttccacctcagcctgccaa

SEQ ID NO: 20574 - DNA, 201 bp, Homo sapiens
agtattagcttgctcctagttccacaacatcaacaatggagcatgaaaatgtaaacacctaaccaaatatttgcaccttttggatgatttcccacttctaraaaatgaaaaatatttggttgtttacagtccccatccatttatctgttcccttccttccagttttttgctaagacagtgggacaccctggctggagagca

SEQ ID NO: 20575 - DNA, 201 bp, Homo sapiens
agttactactgtaaggcagagagtttagattgcaattcagcagcatctccaaaaaactcgtagtgctagaatggctttgaggtggaattttggaaatgagraccatgatgaatgaatgatggaaatggtgactccttgccatagttaagctgttgtccttaacatttcttttaggtagcacagtatacaagcttacattaa

SEQ ID NO: 20576 - DNA, 201 bp, Homo sapiens
ataggatttagaatatcccataaacttagctgataaagcaggggcaggctttgagaggatcgactgcaattttgaaagaagttgtaccgtgagtaaaatgygatcaaacagcattgcatgcttcagagaaatctttcttcacaaaaggaacaattggtgcagcaaaattaattttcttattttaagaaattgtcagccggg

SEQ ID NO: 20577 - DNA, 201 bp, Homo sapiens
cataaatcatgtaactgttgatgataccccaggaaggtgagcctttggttataaatccttttaacattttccagtctaaaagttttgtggtcttattacasgatgtagaaaacagtgggcctcagttattcttttgctgttgtgccggagtataccacggttgtttttgaaagataactttgaccatacccttaggaactt

SEQ ID NO: 20578 - DNA, 201 bp, Homo sapiens
gtagctgggattacaggcatgggccaccacacccggctaatttttgtattttttagtagagatggagtttcagcatgttgcccaggctgatcttgaactcrtgacctcaagtgatccacccttctgggcctcctaaagtgctgggattacaggtgtgagccactgcacccagcctgcttctttcttcattccttcttgctc

SEQ ID NO: 20579 - DNA, 201 bp, Homo sapiens
caccttttggatgatttcccacttctagaaaatgaaaaatatttggttgtttacagtccccatccatttatctgttcccttccttccagttttttgctaaracagtgggacaccctggctggagagcaatattcagtttatagcttgattttgtttacccctgagaccaaggacaattttatctatgtttttaaaggcaga

SEQ ID NO: 20580 - DNA, 201 bp, Homo sapiens
ttttggaaatgagaaccatgatgaatgaatgatggaaatggtgactccttgccatagttaagctgttgtccttaacatttcttttaggtagcacagtatayaagcttacattaaaatattcacggccaggtgcggtggctcacacctgtaatcccagcactttgggaggccgaggcaggcggatcacaaggtcaggagttc

SEQ ID NO: 20581 - DNA, 201 bp, Homo sapiens
cgaaatgacaccataggatttagaatatcccataaacttagctgataaagcaggggcaggctttgagaggatcgactgcaattttgaaagaagttgtaccrtgagtaaaatgcgatcaaacagcattgcatgcttcagagaaatctttcttcacaaaaggaacaattggtgcagcaaaattaattttcttattttaagaaa

SEQ ID NO: 20582 - DNA, 201 bp, Homo sapiens
ctgtgccttgtgtaacactgcagttccgggagtcctccaacctggaatgcatgctttgcggggatctatgatgccctcgaattgtatgttacatgtgaacytgtgagcattttctaggggctctgcacctttgtgttctcagctctgagccccatgcttgctgcaaccagcaggtgttcagagtgaatgaatttgcttatc

SEQ ID NO: 20583 - DNA, 201 bp, Homo sapiens
cagcttcccgggtagctgggattacaggcatgggccaccacacccggctaatttttgtattttttagtagagatggagtttcagcatgttgcccaggctgrtcttgaactcgtgacctcaagtgatccacccttctgggcctcctaaagtgctgggattacaggtgtgagccactgcacccagcctgcttctttcttcatt

SEQ ID NO: 20584 - DNA, 201 bp, Homo sapiens
ctagctcatccagaccgatgactcctttgagaaaatttttctgtgtagtggagctgccactattttataggtagtcacccattttatctggggagtcattrggctgaaaataaaacccttgcttgtaccccttaccttaaaaaggatattggcttaggattggacaaatttaaatctttggtcccttaaattttgttattc

SEQ ID NO: 20585 - DNA, 201 bp, Homo sapiens
agttgattccaaacctcatggtgactttgagggctttaagacttcagtagagcaggctgggcatggtggcctataattccagccctttggaaggctgaagmgggtggatcacaagcatagagttcaagaccagcctgggcaacacagtgagacccccatctcctaaaaaggatttttttttaagacttcagtagaggaagt

SEQ ID NO: 20586 - DNA, 201 bp, Homo sapiens
gagacgtgggagaagaaagctgcaaaagtcattatgagcaacacccttgatcttaggggtgctggtctttgagaagagagctctaagccttttgtagaggyattagaaaggtatcggcgccacggtgaaatgcaggggagattgggtttaggggctttcctggtctgcattctgctacagccgttaaatgccgctagatgg

SEQ ID NO: 20587 - DNA, 201 bp, Homo sapiens
agtggtgccatctcagttcactgcaacctccacctcatgggctggtccaccatgatcctcccacctcagcttcccgggtagctgggattacaggcatgggycaccacacccggctaatttttgtattttttagtagagatggagtttcagcatgttgcccaggctgatcttgaactcgtgacctcaagtgatccacccttc

SEQ ID NO: 20588 - DNA, 201 bp, Homo sapiens
attttatctggggagtcattgggctgaaaataaaacccttgcttgtaccccttaccttaaaaaggatattggcttaggattggacaaatttaaatctttgrtcccttaaattttgttattccttcactggactttcatgttttagaaccatttttacatttctcagtgagtagtttatggggtgtggttggttgactcaaa

SEQ ID NO: 20589 - DNA, 201 bp, Homo sapiens
atataagaaatacattttataaagatatagctgctgtagatagtgattcctctgatggatctgggcaaagtctattgaaaaccttctggaaaggattcacmattctagatactgttgggaggaggtcaaattatcaacatgaacaggagtttcgaagaagttgattccaaacctcatggtgactttgagggctttaagact

SEQ ID NO: 20590 - DNA, 201 bp, Homo sapiens
gaccatcctggctaacacggtgaaaccccgtctctaccaaaaaaaaaaaaaaaaaaaaattagccggccgtggtggcgggcgcctgtagtcccagctactygggaggctgaggcaggagaatggtgtgaacccgggaggcgagcttgcagtgagccgagatcgcgccactgcactccagcctgggtgacagagtgagactc

SEQ ID NO: 20591 - DNA, 201 bp, Homo sapiens
gttgttctatctccttgtctcatcttacaagaaaagtcactttgaaacaatggacataatctttgcttcttcttttttttttttttttcctgagacagagkctcgctctgtcgtccaggcaggagtacagtggtgccatctcagttcactgcaacctccacctcatgggctggtccaccatgatcctcccacctcagcttc

SEQ ID NO: 20592 - DNA, 201 bp, Homo sapiens
gcaaatggagcagagtcatatggactcatagaaaaaggggtgcttggctgggcgcgggtagctcacccctgtaatcctagcactttgggaggctgaggcgrgtggatcacctgaggtcaggagttcgagagcagcctgaccaacatggtgaaaccctgtgtctactaaaaatacaaaattagccaggtgcggtggcacatg

SEQ ID NO: 20593 - DNA, 201 bp, Homo sapiens
gggtaaaataatgctagttctgtgagttctcttcttgtgcaaatccataaactgccaccaatctgtagtcattttaattgctcctaaaccgaagagcatcrtggcaactacctttcccctcgtagagtgacactatcactagtcttattgaggccaaagttataaagatgggctctcgatctactaatattagtaaaatgg

SEQ ID NO: 20594 - DNA, 201 bp, Homo sapiens
gtttcattttgctaggcatgtgaaactgctgcctggaattttctgttctcttgcaaccaccctgtattattcctgtctcaagagaaagcaggagagagagatagccaaattcccaaacaggtcacttaatcttcaagagtcacgataatgagtttccctctgctttaatcctttcacacacagaaaaagtagccccaagaa

SEQ ID NO: 20595 - DNA, 201 bp, Homo sapiens
tcaaagtcaggtaattacacgagatgtggttcctatatattattttttaatttcaaaaactatctcaaatatacagaaatttttttttcctaattgatttratagtaagttacccactgccccatcatttctgtatatttagtgcctttgtttttttgtcttaacaaacaaggacatgcacctacatagctgtaatatagc

SEQ ID NO: 20596 - DNA, 201 bp, Homo sapiens
atacctctgtaaagacagagggtaaaataatgctagttctgtgagttctcttcttgtgcaaatccataaactgccaccaatctgtagtcattttaattgcycctaaaccgaagagcatcatggcaactacctttcccctcgtagagtgacactatcactagtcttattgaggccaaagttataaagatgggctctcgatct

SEQ ID NO: 20597 - DNA, 201 bp, Homo sapiens
agtttcattttgctaggcatgtgaaactgctgcctggaattttctgttctcttgcaaccaccctgtattattcctgtctcaagagaaagcaggagagagagatagccaaattcccaaacaggtcacttaatcttcaagagtcacgataatgagtttccctctgctttaatcctttcacacacagaaaaagtagccccaaga

SEQ ID NO: 20598 - DNA, 201 bp, Homo sapiens
ccttcttgtaataattcctctacctctgtagtcatgtttttcttttttcattttgtcttgtccccagaatgtctaacaaaacagccaaatatacctctgtraagacagagggtaaaataatgctagttctgtgagttctcttcttgtgcaaatccataaactgccaccaatctgtagtcattttaattgctcctaaaccga

SEQ ID NO: 20599 - DNA, 201 bp, Homo sapiens
cagtttcattttgctaggcatgtgaaactgctgcctggaattttctgttctcttgcaaccaccctgtattattcctgtctcaagagaaagcaggagagagagatagccaaattcccaaacaggtcacttaatcttcaagagtcacgataatgagtttccctctgctttaatcctttcacacacagaaaaagtagccccaag

SEQ ID NO: 20600 - DNA, 201 bp, Homo sapiens
aaactacttaacttcattagtaatcagggaaatgcaaatgagaagcaccaggtgatactgtttcacactctccggggcggccaaaatttttaagtcttaamaaacaaccctaacaatgtagagtcacaaacaggaatccttagacactgctggtggcagttgaattagtacagccactttggagaactctgcagccttgtc

SEQ ID NO: 20601 - DNA, 201 bp, Homo sapiens
gagctgccttgcagctctagtctgcttctgtttttggctttcccagatagtttcaattcttactctcagtttgtgaacctcccttcagtgaacctcccttyacttatgctggatatctcttgcgactggatgagcttcactaaagcacagtcatttggacctggattcgaatccctggttttccactttttagctgtgagt

SEQ ID NO: 20602 - DNA, 201 bp, Homo sapiens
acagtttcattttgctaggcatgtgaaactgctgcctggaattttctgttctcttgcaaccaccctgtattattcctgtctcaagagaaagcaggagagagagatagccaaattcccaaacaggtcacttaatcttcaagagtcacgataatgagtttccctctgctttaatcctttcacacacagaaaaagtagccccaa

SEQ ID NO: 20603 - DNA, 201 bp, Homo sapiens
aggtgcctgccactgcgcccagctaattttttgtatttttagtagagacagggtttcatggtgttagccaggatgatctcgatctcctgacctcgagatcyacctgcctcggcctcccaaagtgctgggattacaggcgtgagccaccgtgcccagccaattgcttgatttttgataccatgccagatcattttccaagtc

SEQ ID NO: 20604 - DNA, 201 bp, Homo sapiens
aagaaacaacccataaatacttgaggaagatacttgccatacatgtaactgacaaattaataaaggaaaaaggtactctggagaaaaatgaacaaaagccytgaatagaaactacacagaagtggaaatgtgaggttgggcgtggtggctcacacctgtaatcccaacattttgggaggcctagacaggtggattgcttga

SEQ ID NO: 20605 - DNA, 201 bp, Homo sapiens
aaaaggtgaagatttctcagaactgtgatgctgcccattttaacaccaaatacagtgttcttgtcacagtgtaggtgggtgtgcgatttgtttattaatgrgtgaataatgaggtcctaggagaaacctaggtcaaatcctgctctctgttgggtccagttggttttagccagcttggcccacatcctgtttttcatggtc

SEQ ID NO: 20606 - DNA, 201 bp, Homo sapiens
gtacctaaatataattcttataaaacaaaacatctggtcagttgtgaaatgtttaaaacattgcttcttgatcaccaaataattaatatggtgaataacasataggggcttttgtgcagtagaagattcaagaccaagacaagctcatgtttccctttaggcgggcttcctcctgagggaggcccctgacctccctcttct

SEQ ID NO: 20607 - DNA, 201 bp, Homo sapiens
agtggcgcgatctcagctcactgcaaactccgcctcccgggttcatgccattctcctgcctcagcttcccgagtagctgggactacaggtgcctgccactrcgcccagctaattttttgtatttttagtagagacagggtttcatggtgttagccaggatgatctcgatctcctgacctcgagatccacctgcctcggcct

SEQ ID NO: 20608 - DNA, 201 bp, Homo sapiens
ggggtagagggagtatggctaacagctgttttttccttaaatctgcgctgtggatcttagaaccagatgcctgttattcactcccaagcctcctaggcaayccgccagtgagatcgtcccgccagtgagatcgtcccgctgttagtctttgagttgatggccagtcagccctgggtcttagtgggtgggaatagaagtggg

SEQ ID NO: 20609 - DNA, 201 bp, Homo sapiens
cagtggcgcgatctcagctcactgcaaactccgcctcccgggttcatgccattctcctgcctcagcttcccgagtagctgggactacaggtgcctgccacygcgcccagctaattttttgtatttttagtagagacagggtttcatggtgttagccaggatgatctcgatctcctgacctcgagatccacctgcctcggcc

SEQ ID NO: 20610 - DNA, 201 bp, Homo sapiens
gctaagtttttttttttttttttttgagacagagttttgctcttgttgcctgggctggagtacaatggcatgatctcagctcactgcaacctctgcaaaayacaaaaattagctgggtatggtggcatgcacctgtagtcccagctactcgggaggctgaggcaggagaatcgcttgaacctgggaggcagaagttgcaat

SEQ ID NO: 20611 - DNA, 201 bp, Homo sapiens
gagaagacagctgtgccaaattaggtcgttcatcaccaagagacatctaagctgtcaatcagccattgtcaatcatagactgtgctaaaattttccacttrtataaacttgccaggaacctttataagcccctgcccagcttgtctgtatggaatatgatttagctgcttgctcgatttgtgtctctcaaattgcaattta

SEQ ID NO: 20612 - DNA, 201 bp, Homo sapiens
ctgtttacactgggcctgatcacaaatctcctgagaagacagctgtgccaaattaggtcgttcatcaccaagagacatctaagctgtcaatcagccattgycaatcatagactgtgctaaaattttccacttgtataaacttgccaggaacctttataagcccctgcccagcttgtctgtatggaatatgatttagctgct

SEQ ID NO: 20613 - DNA, 201 bp, Homo sapiens
accacatatgtgcaccacaattggggcccacatcctcaactcctccttgttgctcaaatttggactattccatttgacacagatcatccactatcattacyatgactccctcctccatgggacatgacttcctgggacaaatctattccagaaccaaagggcttactgaaataattgatctcagtggtttctaaggaaata

SEQ ID NO: 20614 - DNA, 201 bp, Homo sapiens
tactgcatgtctacagcacagttgatgggcataacccttcttagcaacagcaagcagctgagcagaaagtaattgcaggaggcagagccaagaggaaaacygctgagagtgctgacggtaggtggagagaacagaagcacacaccgtagggtgcaatcttagtgagctttgttttccttcaatagaggtgagttcagaccc

SEQ ID NO: 20615 - DNA, 201 bp, Homo sapiens
gaggacacgggggaagttgctttcctggtgctgaggcccccggccaccgtggtagtgtacagcaagtacagggtaacagaagggccagcaggaggacacgstgcaatggtgtaccgagggacaggagagtgaatcagagccacaggacagagctccacctgtttccagggaagtgcatggggggctcccggaagccaaagg

SEQ ID NO: 20616 - DNA, 201 bp, Homo sapiens
atagattaaaggaaacacaaagaccgcaatggaaaaattgcaaaagatggaaagagaagaaatagaaataataaataaataaatgtagtggtttgagtcasaaggttcgatctcattagttaccaataaaatgtacattggaaggacaataagatgatactccttttttacctgtcaaattggcaaagagtcttttttttt

SEQ ID NO: 20617 - DNA, 201 bp, Homo sapiens
cctagctggttctttcttttctcctctctcagcttgatgccacactgttgctgtcaacgaaactaaaattatggtggctcaacacattgaactgacagatyaggcctacaatcatgaatcctaccctaaccacatatgtgcaccacaattggggcccacatcctcaactcctccttgttgctcaaatttggactattccat

SEQ ID NO: 20618 - DNA, 201 bp, Homo sapiens
tgtggccagtgtggatttcttcatcatatgttaaccttggcaaagctgccagagatatttttaacaaaggatttggtttggggttggtaaaactggatgtragaacaaagtcacgcagtgctgtgggattttcaacatctggttcatttaatgcagacactggaaaagcttttgaagtcttggagaccaaatataaacggt

SEQ ID NO: 20619 - DNA, 201 bp, Homo sapiens
tttcaggttgttcctttgtttgaaagaattctactgagcacctgccctaaccgccttcctagctggttctttcttttctcctctctcagcttgatgccacrctgttgctgtcaacgaaactaaaattatggtggctcaacacattgaactgacagattaggcctacaatcatgaatcctaccctaaccacatatgtgcacc

SEQ ID NO: 20620 - DNA, 201 bp, Homo sapiens
gggtatttcccctcccaccctgattccaagtgagaggggaaacaagagggcactttggggaaattgggcactgcttgctgaaggcagacagagtcttactycttggctctatgcttgctcagctatgggagcttgtaaatttgagacagcatggagaataaaaaagtgtttggaagaacctgacctatgtcccttactgaa

SEQ ID NO: 20621 - DNA, 201 bp, Homo sapiens
cagctatgggtatatcctaggcaagctgcctgtgctagttcccttatctgtatctgtagcctgagttttcaggttgttcctttgtttgaaagaattctacwgagcacctgccctaaccgccttcctagctggttctttcttttctcctctctcagcttgatgccacactgttgctgtcaacgaaactaaaattatggtggc

SEQ ID NO: 20622 - DNA, 201 bp, Homo sapiens
gcctgggtgatagaggctacaatgggctacaatcataccactgcactccagctagggtgacagaatgagactctttaaaaaaaaaaaaggggattactggrgtatttcccctcccaccctgattccaagtgagaggggaaacaagagggcactttggggaaattgggcactgcttgctgaaggcagacagagtcttactcc

SEQ ID NO: 20623 - DNA, 201 bp, Homo sapiens
aggacacgggggaagttgctttcctggtgctgaggcccccggccaccgtggtagtgtacagcaagtacagggtaacagaagggccagcaggaggacacggygcaatggtgtaccgagggacaggagagtgaatcagagccacaggacagagctccacctgtttccagggaagtgcatggggggctcccggaagccaaaggc

SEQ ID NO: 20624 - DNA, 201 bp, Homo sapiens
atctgaaggctcaacacagggggaccggagtccaagctccctcacatggtcaccagcaggattcagttcctcgaaggctgtcatttagaggcctccctccrtccctccttacaggtccttctcacagggcacttcgtgacatggcagctgactttctggggaccatccaagtgagaaagagcccttagaaagaagtgacag

SEQ ID NO: 20625 - DNA, 201 bp, Homo sapiens
acaacaacaacaacaacaacaacagttatttacatcaagggtccccaaaccctgttaggaatggggccacacagcaggaggtgagtggtgggcgagggagyattactgcctgagctccgcctcctgtcagatcagcagtggcattagattctcataggggcgtgcaccctattgtgaactgtgcatgtgagggatcttggt

SEQ ID NO: 20626 - DNA, 201 bp, Homo sapiens
aaagagaaacagcagtctcatctcagccgctggtcccaccatacctgctccctttacacaaaacagaaaagactgtgatcattattcggttctaataatayaccccatggaaacacagtagttgggagcaaaagtacttgtttttggaaaatgtaaaatccaaggaaaacctaccttgtgagtagagaaggatttgcatct

SEQ ID NO: 20627 - DNA, 201 bp, Homo sapiens
tttggtggtctcttcacacggatgcgcgtgacaccacagagtcacatttatattcctggcagaaagaggaatataaagtaaaggaagaagaaggcaaatargctttgtctttttattctgaaaaggacactaccctcagaaaccaccaccttcatcttattgctaaaagcagcgtcacatgaccagcacaagtgcaaatga

SEQ ID NO: 20628 - DNA, 201 bp, Homo sapiens
attagattctcataggggcgtgcaccctattgtgaactgtgcatgtgagggatcttggttgcacactccttatgagaatctaatgcctgatgatctgaggyggaacagtttcatcctgaaaccatccccaccccaccaccagtccatggaaaagctgtcttccacgaaattggtccctggtgccaaataggttggggacca

SEQ ID NO: 20629 - DNA, 201 bp, Homo sapiens
ctgttgcccagccttgagtacagtggtgcgaacacaattcactgcagccttgacctcctgggctccagtgattctcttgcctcagcctccctgtagctggraccacagatgtgcaccactgtgcctggctaatttttgtagagaaggggctcactatgttgcccaggctggtttcgatctcctggagtcaaatgatcctcc

SEQ ID NO: 20630 - DNA, 201 bp, Homo sapiens
ctgggtgacagagcgagactccgtctcaaaaaaaaaaaaaaaaaaaaacccaagctgtgccccgaccaccttgggcgcatattctcagaatctcctgaggsctgtgtcatgggccatggtcactcatatttggctcagaataaatctcttcaaatatttaacagagtttgactcttttcatcaacatatccactgtggcag

SEQ ID NO: 20631 - DNA, 201 bp, Homo sapiens
caccagtccatggaaaagctgtcttccacgaaattggtccctggtgccaaataggttggggaccactgcttcacatcactatttcatagtgttgaaccagrctttcaaaattagtgaaatgcagaacgtacaaccactggtccccttcccatgatagtgggaaagacctgggtctagagtctatatttttgtacttatgag

SEQ ID NO: 20632 - DNA, 201 bp, Homo sapiens
tatataaagatagttccaccggacagattttttttttttttctttttctgaggcaggtcttgctctgttgcccagccttgagtacagtggtgcgaacacamttcactgcagccttgacctcctgggctccagtgattctcttgcctcagcctccctgtagctggaaccacagatgtgcaccactgtgcctggctaattttt

SEQ ID NO: 20633 - DNA, 201 bp, Homo sapiens
tgtactctacttgtactctattaatgaaacaacaaagtctgaatgacagcacgtctgtttatagagtggtttatcaaacgtttaaagcctgctgttgagayctaccactcagaaaaaaaggttcctttcaaaatattactgctcattgacagtgtacctggtcacccaagagctctgaaagtataaggagatgactgttgt

SEQ ID NO: 20634 - DNA, 201 bp, Homo sapiens
gtccctaaaatacgtaattgataaagcattggttatctgctaggttttaaacataatttctaagaatataaaaatttaatcaccaccatctttataattgytttaaaattacctctaatttcttcgcacaaggtccactaacaagtgcaatcacaccactgtcagatacctaagcaaagggaaaaagaaacacagtccatg

SEQ ID NO: 20635 - DNA, 201 bp, Homo sapiens
agtggttctagatagaagatcaaaccagccataacattcctttaagccaaagtctaattcttttttttttttttttttttttttcagagtcttgctctgtygcccaggctggagtgcattggcacaatctcggctcactgcaagctctgcctcctgggttcacgccattctcctgcctcagcctcccatgtagctgggact

SEQ ID NO: 20636 - DNA, 201 bp, Homo sapiens
cttcctaaatgtgtcataaaatgccactataacttgtaactgtaaaactttcctgctttacagctaggtaaggcctgggacacgtaaatgctaaaaaaaaatcagaccttatctgcacttctgtctgctgtcctcggctccatacctaattaaaaccctgaacttaccaaggttttcaccaaaagttaaagtcactaagag

SEQ ID NO: 20637 - DNA, 201 bp, Homo sapiens
aggtcaagaattcgagaccagcctggccaatatggtgaaaccccatcgctactaaaaatacaaaagttatgttggcatggtggcgggcacatgtaaccccrgctactctggaggctgagacaagagaatcgcttgaacccaggaggaggaggttgcagtaagctgagattgtgccattgcactccagcctggatgacagag

SEQ ID NO: 20638 - DNA, 201 bp, Homo sapiens
ggctgcaggggaacagagactaggcatgtatttgtaaggggacagtggatgaacagttaccctttagtcaatctatttttctttacttctttctgttttcwtagcacctgagtaatttctatttagtggctcacatgagactactgtagtaaaaggatactaccccttggttgttggaattgccagctttgggagaattta

SEQ ID NO: 20639 - DNA, 201 bp, Homo sapiens
gggttgtttgtttttttcttgtaaatttgtttgagttcattgcagattctggatatcagccctttgtcagatgagtaggttgcgaaaattttctcccattytgtaggttgcctgttcactctgatggtagtttcttttgctgtgcagaagctctttagtttaattagatcccatttgtcaattttgtcttttgttgccatt

SEQ ID NO: 20640 - DNA, 201 bp, Homo sapiens
ctgtctcaaaaaaaaaaaaaaacttaaaatcttttttttaattctctcaatttcaatctcacttacttcttctttcaaagccaccactgtctgaacctggkgcccttccttctgattatagttttcgttgttgttactgtgttttgtttacttttacaattttggaatatgaaaatatctttcttttgtaacgacaaatat

SEQ ID NO: 20641 - DNA, 201 bp, Homo sapiens
ccttggtttattaaattagtatggaataacatgtactgttaacagtgtttattgagcttctgagatgtcttcagtggactcagaatacaaggattgctttytgtgggtgtgtgtaaatgtgtaaataaatgtttactggactcttactaaaatgatcagtttatcaggtactattaaaaatattacatggttatttgtgcc

SEQ ID NO: 20642 - DNA, 201 bp, Homo sapiens
tcacctactttttgatggggttgtttgtttttttcttgtaaatttgtttgagttcattgcagattctggatatcagccctttgtcagatgagtaggttgcraaaattttctcccattttgtaggttgcctgttcactctgatggtagtttcttttgctgtgcagaagctctttagtttaattagatcccatttgtcaattt

SEQ ID NO: 20643 - DNA, 201 bp, Homo sapiens
accatatattttttattttaataaagttcaattaatctacttttactatattttatttttaacaaccttgtcaatatattatttattatttttgtttatcttatttttatagttagtggttttttatgtgtgtcttgtataaaaaatatttgcctatccctttgttataaagataaacttatttaaaaaaaaaaaatctag

SEQ ID NO: 20644 - DNA, 201 bp, Homo sapiens
aatctcacttacttcttctttcaaagccaccactgtctgaacctggtgcccttccttctgattatagttttcgttgttgttactgtgttttgtttactttyacaattttggaatatgaaaatatctttcttttgtaacgacaaatatggaatacaaacattacaacttctttttttgcccatcctggattaaaaaggaaat

SEQ ID NO: 20645 - DNA, 201 bp, Homo sapiens
tgcataaatgtcttcttctgagaagtgtctgttcatgtccttcacctactttttgatggggttgtttgtttttttcttgtaaatttgtttgagttcattgyagattctggatatcagccctttgtcagatgagtaggttgcgaaaattttctcccattttgtaggttgcctgttcactctgatggtagtttcttttgctgt

SEQ ID NO: 20646 - DNA, 201 bp, Homo sapiens
aaccatatattttttattttaataaagttcaattaatctacttttactatattttatttttaacaaccttgtcaatatattatttattatttttgtttatcttatttttatagttagtggttttttatgtgtgtcttgtataaaaaatatttgcctatccctttgttataaagataaacttatttaaaaaaaaaaaatcta

SEQ ID NO: 20647 - DNA, 201 bp, Homo sapiens
ttcaccatgttggccaggatggtcttgatctcttgacctcatgatccgcccaccttggcctctcaaagttctgggtttacagacgtgagccaccgtgcccrgcctttttactttactttattttattttatacagagcctcactctgtcatccaggctggagtgcaatggcacaatcttggctcactgcaacctctgcctc

SEQ ID NO: 20648 - DNA, 201 bp, Homo sapiens
cacaagggttgaactagtttacagtcccaccaacagtgtaaaagtgttcctatttctccacatcctctccagcacctgttgtttcctgactttttaatgaytgccattctaactggtgtgagatggtatctcactgtggttttgatttgcatttctctgatggccagtgatggtgagcattttttcatgtgttttttggct

SEQ ID NO: 20649 - DNA, 201 bp, Homo sapiens
cactgcactccagcctgggcgacagtgagacccggtctcaaaaaaaaaaaaagaagaagaaaaagctatttttgagtattttataatataatagtagagtrgtacatgtatagaatttataagtggacatatcctggagtggagagtcaaaaagtcaatggattgcatgatgaaaacttgaaacaacttagagaaagatgc

SEQ ID NO: 20650 - DNA, 201 bp, Homo sapiens
gctgaaaggtccaggggctgatgaggccacgtgtaagcgaaagtttgggataagcagaaaccgagtgcgctgagggagtgagattgtggctgtatccggcrcctggctgagcaggagagtgaaccccgtgggtgtgtgtttgctggtgacgttcctggagctgtcttgaagtccgagctgccttgcagctctagtctgctt

SEQ ID NO: 20651 - DNA, 201 bp, Homo sapiens
tcccataccttgccctatgcatcctttcaagtatcctttacaatatatatatatttttgagacggagtcttgctctatcaccaagctggagcgcagtggcrcgatcttggctcactgcaacctccagctccctggttcaaacggttctcctgcctcagcctcctgagtaactgggactacaggcacgtgccaccatgccca

SEQ ID NO: 20652 - DNA, 201 bp, Homo sapiens
tgttttgtgccagccgtatgaaacttctcactttccttcaaatcagcttgccagtccctagaatgtgcaagctgctcatgttgctcatgttgtatgtgtcstgtatctagaaaacccttttactgcttctccagctgacggaaaaaatcctactcgctttactccaaaggccagctcaagtatcacctcatctgtgaagca

SEQ ID NO: 20653 - DNA, 201 bp, Homo sapiens
ccaaatgttgaacatcatttggacacagcttcaaaatggtaccaattcttttaatttgtgactgctttatttatttatttatttatttatttatttatttwtttattattatactttaagttttagggtacatgtgcacattgtgcagattagttacatacgtatacatgtgccatgctggtgcgctgcacccactaactc

SEQ ID NO: 20654 - DNA, 201 bp, Homo sapiens
ctcctgggttcaagcaattctcctgcctcagcctcccgagtagctgggattacgggtgcccgccaccacgccaggctaatttttatgtttttagtagagaygggctttcaccatcttggccatgctggtcttgaacttctgacctcgtgatccacccgcctcagcctcccaaagtgccaggattacaggcatgagccaccg

SEQ ID NO: 20655 - DNA, 201 bp, Homo sapiens
gaaccatatattttttattttaataaagttcaattaatctacttttactatattttatttttaacaaccttgtcaatatattatttattatttttgtttawcttatttttatagttagtggttttttatgtgtgtcttgtataaaaaatatttgcctatccctttgttataaagataaacttatttaaaaaaaaaaaatct

SEQ ID NO: 20656 - DNA, 201 bp, Homo sapiens
atggaatattcaaactgatcactagatccacttcacagattttgtccagggcttcggcttgtcctaatgtcctaggaaaaccatcaaggagccagtgctgkccacgcctattctccaactcggacatcattaggcgtgtgatcacatggtctggaaccaaaagacttttctctatatactgctttgccatctcaccaactt

SEQ ID NO: 20657 - DNA, 201 bp, Homo sapiens
gtgccagccgtatgaaacttctcactttccttcaaatcagcttgccagtccctagaatgtgcaagctgctcatgttgctcatgttgtatgtgtcctgtatmtagaaaacccttttactgcttctccagctgacggaaaaaatcctactcgctttactccaaaggccagctcaagtatcacctcatctgtgaagcatttcct

SEQ ID NO: 20658 - DNA, 201 bp, Homo sapiens
gcagtgagctgtgatcataccactgcactccagcctgggtgacagaacaagaccctgccccctaccccctcctccaaaaaaagcatatttaaatattcccrgaatccaaatgttgaacatcatttggacacagcttcaaaatggtaccaattcttttaatttgtgactgctttatttatttatttatttatttatttattt

SEQ ID NO: 20659 - DNA, 201 bp, Homo sapiens
agagaaaaagataagaagacattttctttttaggtttatttttctgtcttaactgaagaccttccaggctggcaatatccaagggccagattcaaagtgaraaggttatatacctcttgaaatatgtaaggttggatgattagaccttgatgcttaaaatagtgctttcagggcagtgaaattttcatcagctcaccccac

SEQ ID NO: 20660 - DNA, 201 bp, Homo sapiens
tcctctatttatggaatgtatattccagtgaggaagaataaataggttcagatggtgctaagagctatgaataaattaaatacagagtaatgtgatttttwaaaagtgacttagagcaagctagggggtgaggagtgggggtggtgtttgaccactgtccagcggccagacagccggagaggcttctctgaggaggtgagc

SEQ ID NO: 20661 - DNA, 201 bp, Homo sapiens
attcaatgactggctttgccgcgtctttgtactgtcttagcctggcagcaactgcttcgggtttatcatcctcctgctggactaatggttcaccagtgacrtcatcaataccatgtacatgaggtggattgaagtccaggttatatacccttccgctaggagggtgaatccaacggcggctgagacgatctttaagtgttt

SEQ ID NO: 20662 - DNA, 201 bp, Homo sapiens
tccttaactcctgcaacacttttgcttagtggttttatcattatatattgtataaatatatatatatagtatacatctataaccatttatttattatactyacattaatttttttcctatagactcttccagcaagaataaggtttttttttgtttttgttttgagagggagtcttgctctgtcacccaggctggagtgca

SEQ ID NO: 20663 - DNA, 201 bp, Homo sapiens
gaaataattttttccatgatttggaaagtgatattatatttgtcaatgagaaataatgtaatagctttttaatagttcacaaaatgatgtcacttgctctytattcaaaaatatctttagcctttttgaggttattttggggagatgataaggacaggcatctccataatcccaaatatttgggagaaaacttcaaaaatt

SEQ ID NO: 20664 - DNA, 201 bp, Homo sapiens
ggctttctgaccactgcccacttctttgaagaagcattagtccatgtgggcagaaaatgaaatgttgtggttaaagacaagagataaaaaatggcagaagragatttatttgctatttatttgctacttggatttagaatgtagccttgtgaagactttgtcagtgttgtataaagtgatcccatgaagaaagaattcagt

SEQ ID NO: 20665 - DNA, 201 bp, Homo sapiens
cccagcgatactaactttagcaaggatacagctgggatcctaaacttggcgatcagagcccagagccgataaagttagctgcgtgagtctagcttcccccrgggcgggaatcgaggcggagcagggtacagtacggaggccagggatgagtgcagttgaccagattgttgacggaagtgtcataaaagtggacttaaatgt

SEQ ID NO: 20666 - DNA, 201 bp, Homo sapiens
ctcggctcttgtataattcaatgactggctttgccgcgtctttgtactgtcttagcctggcagcaactgcttcgggtttatcatcctcctgctggactaayggttcaccagtgacgtcatcaataccatgtacatgaggtggattgaagtccaggttatatacccttccgctaggagggtgaatccaacggcggctgagac

SEQ ID NO: 20667 - DNA, 201 bp, Homo sapiens
cacttttgcttagtggttttatcattatatattgtataaatatatatatatagtatacatctataaccatttatttattatacttacattaatttttttcmtatagactcttccagcaagaataaggtttttttttgtttttgttttgagagggagtcttgctctgtcacccaggctggagtgcagcagcatgatctcagc

SEQ ID NO: 20668 - DNA, 201 bp, Homo sapiens
gtctctactaaagatacaaaaatcagccaggcgtggtggcgcatgcttgtaatcccagatactcgggaggctgaaacaggaaaatcacttgaagatgggartgggaggttgcagtgagccaagatggcgtcactgcactccagcctgggcaacacagcgagagtctgtctcaaaaaaaaaaaaaaaaaaaaaaaaattagc

SEQ ID NO: 20669 - DNA, 201 bp, Homo sapiens
catatagattacatatggcagtgaattgacagaggattcactgggacatcttcagaaagtaagtaatgtgtttcaacaccactaaagtgttaaaataggcytcttttcttctcgccagtatgaaaagttagacaggagtcactcccaagaatagtaaaggacactcactggggacagtcatgatgggtgaagaagggatac

SEQ ID NO: 20670 - DNA, 201 bp, Homo sapiens
tatgtttgagaggatggatggggagaagactgatctatatttccactaaggtagccaagaaatattcacatgaagggacaatgggagaggagctggcaagrgtttgggcagtacttggaagatgcattccttatcatatagattacatatggcagtgaattgacagaggattcactgggacatcttcagaaagtaagtaat

SEQ ID NO: 20671 - DNA, 201 bp, Homo sapiens
caaaacaatgatgatttttttctggaattggtcatgttttaaaagaacaagaggagacagattatgggtatgttcttctataaactgtgtttagattttakaactgtgcatccattctcagctaatcagatgacagctcactctgcaggactcacatgctggtctgatcgtttacgtgttcttggtcaccctttttctgtt

SEQ ID NO: 20672 - DNA, 201 bp, Homo sapiens
aactgctcaactgctggacaatctcagcaaacacacccactgttgagacttattgagtgactcaatgttggctagaattgtccatttagctggaggggaaragggagggaaggatggatggaggagtgaagtatggaagcaggcatcaggccacttcccgtacctctcccaaactccaaaggcaatgatcacattggaggg

SEQ ID NO: 20673 - DNA, 201 bp, Homo sapiens
  misc_feature (1)...(201): n = A,T,C or G, or insertion/deletion polymorphism (see Tables 1-2)
gatagagctgttgatggcactaaatgagacaatgtgtatatagttcttagcacagagcctggaacaccagagttgttcagtaagtgatctgtgattatctnagaacacacatccccacttcacaacttggttccaatatcacctgttctgtgaaacctcactgacaacactcactagcagaggtaatgaaaaatcatagga

SEQ ID NO: 20674 - DNA, 201 bp, Homo sapiens
taactattaaatatttgaataatacccctctgataaataaatatatgagcatactacactgacttgcacatatgagaattttctagattgccagttagcasctaaaatttggagtaaatgccctaaccttctatctgggactcatgtttagaattatgatttattttcttattccatggaattataatacatatggagtaa

SEQ ID NO: 20675 - DNA, 201 bp, Homo sapiens
gtttaatttagattgtgaggtccagctccagccaatggagacaggacacattagcagggacaagctgtgtaaggaataaaattgcttccctcctttgttcrggtgtggtctcaccattgttccatctgtgaggagcaccctttctgcagaaggtaaaattgccttgctgagaaaactttttgtctaaatgctgatttttcc

SEQ ID NO: 20676 - DNA, 201 bp, Homo sapiens
taagaggggccaggatttcttcagttttgtcttgggggtgagtaatagaatctctggtcctgaggtgaaaaagtgatttttaaaaattagttggttatgtygtgatatgagttatcccccagcccaccctgtccacattgctcaaccagatttcttcccttggggccctgcatgttcagcttcacgatatcctcccatagt

SEQ ID NO: 20677 - DNA, 201 bp, Homo sapiens
ggctgctgcttacacaaagaacaaaggtgcttctatgttgggccttgcttccttatctgtgcagctatgggtatatcctaggcaagctgcctgtgctagtkcccttatctgtatctgtagcctgagttttcaggttgttcctttgtttgaaagaattctactgagcacctgccctaaccgccttcctagctggttctttct

SEQ ID NO: 20678 - DNA, 201 bp, Homo sapiens
atttttgcctccagatcaaacagaacaactcacctctacacatgtattcaggtagctgaaggcattgacaatcaaatcaaattgttcattttgaacaaccraaaagggtgaggcaatttcaataaagaaaggttgggagacttctagagtggttgtagaggaaatgccaaatccaacgtcgccattcacacaaaagccact

SEQ ID NO: 20679 - DNA, 201 bp, Homo sapiens
gagcagcctggcaacatagcaaactccatttctaaaaattatttaattaattcaataagaaaaatttttaaatgactactaaaaaatcacaaaaataatarcatattttagcctttaaaaattagtagagattgggtgcaggggctcatgcctataatcccagcactttgggaggctgatgtgagaggatcacttgaggct

SEQ ID NO: 20680 - DNA, 201 bp, Homo sapiens
tgttggagtgatgattcatagaggtttggctcacagtccaaagtatgcccaaaaaaggaaaggaatgtactcaccacagcccaccatctacatgcccacaraaggaaaagaaactatttcctggaaggctgctgcttacacaaagaacaaaggtgcttctatgttgggccttgcttccttatctgtgcagctatgggtata

SEQ ID NO: 20681 - DNA, 201 bp, Homo sapiens
aacccagaggaaccagatgggtctgggcatttcatttgcataactgaaattgcataagttgtgaatttctggtagctccaccctgtacccctagtgtgctsgctgactggtggttgtctttagaaaaggcaccacttagaaaatggcatgatggtgtaaaggaccaactggagccttggctcacaaccagcctagtgttgg

SEQ ID NO: 20682 - DNA, 201 bp, Homo sapiens
ctcagcctcccaagtaactaggaccacaggcgcatgccaccatggctggctaatttatttttatttttttgtagaaatgaggtctcactatgttgttcagsctgctctggaactcctgggctcaagtgatctgcccgctttgaccttgcaaagtactaggattacaggcataaaacacgacatgcagccccaaatttgctg

SEQ ID NO: 20683 - DNA, 201 bp, Homo sapiens
gattcagttcctcgaaggctgtcatttagaggcctccctccgtccctccttacaggtccttctcacagggcacttcgtgacatggcagctgactttctggrgaccatccaagtgagaaagagcccttagaaagaagtgacagtctttatataacctaatctcagaagtgacaactcatcccttctacaaggttctattatt

SEQ ID NO: 20684 - DNA, 201 bp, Homo sapiens
caacagtgcaaaaaataacgctttaaatctgcttccttttttgagaaagaaattcacttaaaatacaatttccttttatattcctccaaagcctgagctgkatgattttttgtgtgtgcttcctaaaaaactttatctctagaggtaaatgctgagttttgaaaaagtttagagcttttgctaaatagactgaagacttgc

SEQ ID NO: 20685 - DNA, 201 bp, Homo sapiens
taaaatttgctttttttttttttctttggagacagggtctcactctgtcaccactcaggctggaatgcagtggtgtgatcatagctcactgcagccttgamctcctgggctcaggtgatcctcccacctcagcctcccaagtaactaggaccacaggcgcatgccaccatggctggctaatttatttttatttttttgtag

SEQ ID NO: 20686 - DNA, 201 bp, Homo sapiens
acaccatgatacttcttatagaacgataatgtaaacaatattatttggttattgagaaacatttacattataaatgtaaaaactcataattcataatattyacccatatggaaggagagaaaatggtttaaaatttttccacattgcaatttcttatatacctatgtttaatgagacagtattttatatggacacctgagt

SEQ ID NO: 20687 - DNA, 201 bp, Homo sapiens
gattctcttcaaaaggtggtttataatcagctacagtctaaaatttgctttttttttttttctttggagacagggtctcactctgtcaccactcaggctgraatgcagtggtgtgatcatagctcactgcagccttgaactcctgggctcaggtgatcctcccacctcagcctcccaagtaactaggaccacaggcgcatg

SEQ ID NO: 20688 - DNA, 201 bp, Homo sapiens
ctacaggcgtgagccactgcacctggcctaccttgatcttgattctcttcaaaaggtggtttataatcagctacagtctaaaatttgctttttttttttttctttggagacagggtctcactctgtcaccactcaggctggaatgcagtggtgtgatcatagctcactgcagccttgaactcctgggctcaggtgatcctc

SEQ ID NO: 20689 - DNA, 201 bp, Homo sapiens
ttaaaaaacaaagtgcctgattcggccgtacatgtactaaaattggaacactggaacggtaacagagaagattagcatggctcctgcacaaagatgacacrcaaattcatcaagcattccttttttttttttttttggagacagtgtttcactcctatcaccaaggctggactacagtggcgtgatctcagctcactgcaa

SEQ ID NO: 20690 - DNA, 201 bp, Homo sapiens
ctgggctcagtggctcatgcctataatcccagcactttgggaggctgaggtgagagtattgcttgaggccaggagttcaagaccagcctaggcaacacagygagaccctctttctacaaacaattaacaaaaattcaataatattaaacaaaaataataaaacatagttgttagttgccctcatgtggtagcaaaggtggc

SEQ ID NO: 20691 - DNA, 201 bp, Homo sapiens
attccagcctgggcaacaagagcgaaattctgtctcaaaaaaaaaaaaaaaaaatcctgtaggtttgttatcaagaaaatgctgatgactataattaggaytataaatttagttgagagtgagagctagattagtaaataaaattgtctataaacatttgtaaatcagtcatcctcctgggtacggtttgtaaaagaaccc

SEQ ID NO: 20692 - DNA, 201 bp, Homo sapiens
actccagcattttccaggcctttctcagtcctttggagatgtaaaccttaccatgtttttgaaatgttagcatttagggaattagctaagcagcattccakcgagattggatttgaaacagagctaaagttctccggaccaaccaaaaaattcctttcctcaggggatgtctttagctcaggggagaaacatttataagaa

SEQ ID NO: 20693 - DNA, 201 bp, Homo sapiens
catatttcctgaacaccaaaacgggaaagggctgtctagagtgaaagtataagacagacaggccctgttccaggaagctccctgcactctgctcttctccycaagccgaccccaaactcacagccagctttagcaagcaggcccgtcatccttccaggtgctatgtaatattaagaagcagcagctaacaattattagtgc

SEQ ID NO: 20694 - DNA, 201 bp, Homo sapiens
gcccctgcccagtcttgtctgaatggaacagatttgtgtctcctaaattgcaagtcatgaaagaccccaattaaaataccttttttttttttttttttttytgagacagggtctcttgctctgtcacctagcctggagcacagtgacacaatcttggctcattgcaacctccacctcccaggctcaagtgatcctcccacc

SEQ ID NO: 20695 - DNA, 201 bp, Homo sapiens
tacccgttccaccgggggagaagcttgaactcagtgggacttcaacgggccgctgctggtaccttagctctggtttcgggcaactctttcagggtcctgartcttctctgaggcctcatgtatttgggcaccaaaatattgtcaacaaaaagagtcaaactctataaaatatttgaagatttattctgagctaaatatgag

SEQ ID NO: 20696 - DNA, 201 bp, Homo sapiens
aataaatcaaggactgtcaaacaaagggaggtctggggctcaggaggacttacccgttccaccgggggagaagcttgaactcagtgggacttcaacgggcygctgctggtaccttagctctggtttcgggcaactctttcagggtcctgagtcttctctgaggcctcatgtatttgggcaccaaaatattgtcaacaaaaa

SEQ ID NO: 20697 - DNA, 201 bp, Homo sapiens
aatatgtaattatgtattcacgtgtttattgtccatctccaacacccacctctatcccaaatgtcaactccatagaggcagggaccttattagtcttgttyaccagtgtattccttttagctagaataatgcctagcacacagcaagaaaagtaagaaaaatgatgtggggaatcttttaacaaatgattattcattcaga

SEQ ID NO: 20698 - DNA, 201 bp, Homo sapiens
gtccctgagtaacgaatcttattgtgagttcctcaaattgtcaagtactgattaatgcacaacctcctgacactgaagaggactctgactcacttttgaawcaaatgtcgatattttagcctttatattgcagtctgtagccaatgattgtaacctctgtgttgtacctccagtgaaaaggatggttgtgctgtcaggagt

SEQ ID NO: 20699 - DNA, 201 bp, Homo sapiens
actgaaagtttccatttcacatgaacagaaaaacatgggtaattaagagttctcaaatccaaattgataacaaaaatatgaaaagttgctcaaactaaatmgaaattagatagcacaagttaaaacaagctaaatttgtgtctatcaaaatgacaaaaacttttaaaacttctaaatatattgctgaaagtaatttggaaa

SEQ ID NO: 20700 - DNA, 201 bp, Homo sapiens
agagaattccctttagaatgcatctctgaattagaattaggatccttaaacaacaatttcctaggagaaaaccagctcagaataaatcaaggactgtcaamcaaagggaggtctggggctcaggaggacttacccgttccaccgggggagaagcttgaactcagtgggacttcaacgggccgctgctggtaccttagctct

SEQ ID NO: 20701 - DNA, 201 bp, Homo sapiens
tcaccagtgtattccttttagctagaataatgcctagcacacagcaagaaaagtaagaaaaatgatgtggggaatcttttaacaaatgattattcattcakagattccccacatcatttttctttcttttttgccctctagttacattggctttgaattcttttttctttttttttgagacttagtctggctctgtcgccc

SEQ ID NO: 20702 - DNA, 201 bp, Homo sapiens
aggctggaaacccaggaacataaggaaggtgggtatgtcaaaaatatgacaaagtaaatgagttgcctatttaaataacaggcttgaaaaaaaatgcttgkaggatggaaggcagtacttacactgaaagtttccatttcacatgaacagaaaaacatgggtaattaagagttctcaaatccaaattgataacaaaaatat

SEQ ID NO: 20703 - DNA, 201 bp, Homo sapiens
cagcctatacaatctgcacaactctacctggtggccctatgggagcctatggccatttagtgtgaactctagtctgtaaaacgaatatcatgcccactatrtcgactaatcaagcccatcctgtaccatagtctggaaaaggctgacattcctaaaagctttgcactctaagataagccacgaaaaccagaaatatttcaa

SEQ ID NO: 20704 - DNA, 201 bp, Homo sapiens
gccagtgagattttttttctaaggctggaaacccaggaacataaggaaggtgggtatgtcaaaaatatgacaaagtaaatgagttgcctatttaaataacrggcttgaaaaaaaatgcttgtaggatggaaggcagtacttacactgaaagtttccatttcacatgaacagaaaaacatgggtaattaagagttctcaaat

SEQ ID NO: 20705 - DNA, 201 bp, Homo sapiens
gaggcagagtctcaatctgtcacccaggctggaatgcagtgagtggtgcaatcttgggtcactgcaacttctgcctcccaggttcaagcgaatcttctgtstcagcctcccaagtagctgggattacagatgtgcaccaccacacctggctaatttttgtatttttagtagacacggggtttcgccatattaactaggctg

SEQ ID NO: 20706 - DNA, 201 bp, Homo sapiens
acgaggtcaggagatggagaccatcctggctaacacggtgaaacgccgtctctactaaaaatacaaaaaaaaataggtgggcatggtagcaggcgcctgtrgtcccagctactcgggaggctgaggcaggagaatgacgtgaacccgggaggcggagcttgcagtgagcggagatcgcgccactgcacttcagcctgggcg

SEQ ID NO: 20707 - DNA, 201 bp, Homo sapiens
tctgtgtgggtattgagaatgccaggaattaagaccagaaattctagagatgatggcaatggcaatgagaaatgaaggggaatgagttggtgtttgctacrtaacagtaacagtgctggatagcggatgatagaatctgatgacatgaggtttaaagcacagaatttttagagaggagagaaggagaatgctctgaaagca

SEQ ID NO: 20708 - DNA, 201 bp, Homo sapiens
tgctaaccttcagcctatttattttattttaaacagaaaaattatactatgtcaaccccaaaccctcaatcaatttcttaaaaggttaactaaagcatggkaaggtacctaaatataattcttataaaacaaaacatctggtcagttgtgaaatgtttaaaacattgcttcttgatcaccaaataattaatatggtgaata

SEQ ID NO: 20709 - DNA, 201 bp, Homo sapiens
gtcatgggagtgagtgcctgccataggagagaagatccctcaaaaagaggaattcagggctggatgcagtggctcctgcctgtaatcctagcaccttaggrggctgagatggaaggattgcttgagcccaggaggtcaggactgcagtgagccaaggtcacaccactgcactccagtctaggcaacagaatgagaccctgt

SEQ ID NO: 20710 - DNA, 201 bp, Homo sapiens
cttgaatctgggaggcagaggttgcagtgagccgagattgcgccactggactccagcctgggtgacagagtgagactccatctcaaaaaaaaaaaaaatcmcaaacattaaaaacataagatggtgatctatttcaagtactttgttaatttttttttttttttttttacctattctaagtttccttctggaggaatatgg

SEQ ID NO: 20711 - DNA, 201 bp, Homo sapiens
gacagatttacttattttgaaaaacaattctatggagatgtagttcacatattatacaattcacccatgtaaagtggacaggctgactttgttttcttttytttttttttttttttgagacagggtctcactctgttgcccaagctggagtacagtggtgccatcatggctcactgcagtctcgacctcccaggctcacgc

SEQ ID NO: 20712 - DNA, 201 bp, Homo sapiens
acagcgagagtctgtctcaaaaaaaaaaaaaaaaaaaaaaaaattagcaattacacctcctacggaatgtggtacaggcaaggcctttttagagggcatcrgccttcaccaccctactcccagagcttctctccaagcccagcatttttagctacatttttattgcacatatattttattaggtagaaatatattttatta

SEQ ID NO: 20713 - DNA, 201 bp, Homo sapiens
ctcttggtttgacatagctctcctagtcctgccattgttcataagaacaacatgtcccaccagcactgcttcttcagcctgggtcccagaataagactcasgaaacagatatgagcacaacctgaaccccagagcctaggcatctgagtgtcagtctgaggcacaattatcagctgacctgcagatctgccagtaagataa

SEQ ID NO: 20714 - DNA, 201 bp, Homo sapiens
atgctaatggccatgaccccataaagtgggaaattttaatgatgtaagaaggaaagagaagaaagcctagagcaattgatttccttgagtaaaggagaaarggatggaatctagtacaaaaatggagggattgcccttagaaggagctagaaaatttaatatatggtaacacttggaaaagcagaatatgtggatgtggat

SEQ ID NO: 20715 - DNA, 201 bp, Homo sapiens
agtagaagattcaagaccaagacaagctcatgtttccctttaggcgggcttcctcctgagggaggcccctgacctccctcttcttagagcatttgctttaraaaacttgtaaattttctctctgatacttcgagatgccaattttttttttttttttggtcattttacttttagtcgatgcataatctttaaaaaagcttt

SEQ ID NO: 20716 - DNA, 201 bp, Homo sapiens
tgatccacccttatcagcctcccaaaatgctggggttataggcatgagccattgcgcccggcctattctggtggtttctatcggatttttaaaatacataygcaaacagtatatacttattgtttaaatggaattatactatttattcaacttgtttttttatttatatatactagaaattttccacagaaatcttttaaa

SEQ ID NO: 20717 - DNA, 201 bp, Homo sapiens
ctcccaggctcaggtgatcctctggagtatctgggactacaggaatgcagcgccacacctagtggtggcgaaacatggagaagccctaatttttttgtatrttttatagagatgggatatcactatgttgcccaggttgtctttctctttaaaaaaaaaaagccagaatgaaagtgaatggtgcagccttcaagttcagtg

SEQ ID NO: 20718 - DNA, 201 bp, Homo sapiens
taactcttgtcacaaagctaggatacgtttatttctcctttttgttgatttttgaacaattagaatttatttctcacagttctgaaggctgtgtgtctgaragcagggtcccagcacagccaagttctggtgaggaccctcttccagtggcagatgcccacttctggtgctatctcccatggaggacagcagaggctataa

SEQ ID NO: 20719 - DNA, 201 bp, Homo sapiens
ggcatgagccattgcgcccggcctattctggtggtttctatcggatttttaaaatacatacgcaaacagtatatacttattgtttaaatggaattatactrtttattcaacttgtttttttatttatatatactagaaattttccacagaaatcttttaaaattccctaatttgttatcttttatttatttattgagacag

SEQ ID NO: 20720 - DNA, 201 bp, Homo sapiens
caccatgcctggctaatttttgtatttttagtagagacagggtttcaccatgttggtcagctggtctcaaactcctgacctcaggtgatccacctgtctcrgcctcccaaagtgcttggattacaggcgttagccatcacacctgacctatttttaaattttatattaatatattaactggatttttgtcaaatagagaat

SEQ ID NO: 20721 - DNA, 201 bp, Homo sapiens
ttgaggataaagagaatatggaaatattaagaaatattttagctttgttagatttttgcctccagatcaaacagaacaactcacctctacacatgtattcmggtagctgaaggcattgacaatcaaatcaaattgttcattttgaacaaccgaaaagggtgaggcaatttcaataaagaaaggttgggagacttctagagt

SEQ ID NO: 20722 - DNA, 201 bp, Homo sapiens
tacggtcctttgtgattaaattattatcatacgtgtgatatgaaatagacttctgagttgggcatggtggctcatgcatgtaatcccagcaactcaggagkctgaggccagagcatcacttggggccaggagtttcagagcagcctggcaacatagcaaactccatttctaaaaattatttaattaattcaataagaaaaa

SEQ ID NO: 20723 - DNA, 201 bp, Homo sapiens
gaccctcttccagtggcagatgcccacttctggtgctatctcccatggaggacagcagaggctataattcctttggagaaagcctactagcaaatacacamtggaattttatttagcctttcaaaaaaaggaatttctgccatttgcgacaacatagatgaacctggagaactatgctaaatgaaaaaaagccaggcaggg

SEQ ID NO: 20724 - DNA, 201 bp, Homo sapiens
ctgggttcaaggaattctcctgcctcagcctcccaagtagctgggactacaggtgtgtgccaccatgcctggataatttttttgtatttttagtagaaacrggatttcaccatgttagccaggctggtctcaaactcctgacctcaggcagtctacccgcctcagcctcccaaagtgctgggattacaggcgtgagccacc

SEQ ID NO: 20725 - DNA, 201 bp, Homo sapiens
tttttttttttttttttttagacggagttttgctcttgtccaggctggagttcaatggcatgatctcagctcactgcaacctccaccttccgggttcaagkgattttcctgccttagcctcccgagtagctgggattacaggcacctacaaccacacccggctaattttttgtatttttagtagagacgaggtttcgccat

SEQ ID NO: 20726 - DNA, 201 bp, Homo sapiens
ttttttaaaatcaggttttgaagtaagaaatgccacaaacaatcctgtaaaataatgaagctgtacacaattaaggatgcatccttaaatttaagacacayctttttattttgcacatttgcattaacgtgattcccctctggggaagttttgagcatttaccatgaatactatttgatactaagcacacaactagctcac

SEQ ID NO: 20727 - DNA, 201 bp, Homo sapiens
gttcttcctcctcctcctcagcctactcaatatgaagatgatgaggatggagacttttatgaagagctacttccacttaataaacagtaaacatactttcwcttccttatgattttcttcacattttcttttacttagcttactttaagaatacaatacataacacatataacatacaaaatatgtgttaatcaactgttt

SEQ ID NO: 20728 - DNA, 201 bp, Homo sapiens
tttcccactagcaatgtgtaaaagttcctgttgcccctattctttccagcccttggtatttgacagttctttttttctgttttttttttttttttttttaracggagttttgctcttgtccaggctggagttcaatggcatgatctcagctcactgcaacctccaccttccgggttcaagggattttcctgccttagcctc

SEQ ID NO: 20729 - DNA, 201 bp, Homo sapiens
ccacttcccgagctcaagtgattctcctgcctcaacctcccatgtagctaggattatgggtgcctgccaccatgccccctgctacatacaatttctcttgktcttttttttttttttttttttttgagattaggtctcactccgtcatctaggctagagtacaggcacaatcatggctcactgaagcctccacctcccagg

SEQ ID NO: 20730 - DNA, 201 bp, Homo sapiens
gctttcccactagcaatgtgtaaaagttcctgttgcccctattctttccagcccttggtatttgacagttctttttttctgtttttttttttttttttttwagacggagttttgctcttgtccaggctggagttcaatggcatgatctcagctcactgcaacctccaccttccgggttcaagggattttcctgccttagcc

SEQ ID NO: 20731 - DNA, 201 bp, Homo sapiens
tctctctcgctctctttttcttttttcttttctttttttttttttttttgagatggagtctcactctgtcacccaggctggagtgtagtggtgcgatctcrgctcactgcaacctccacttcccgagctcaagtgattctcctgcctcaacctcccatgtagctaggattatgggtgcctgccaccatgccccctgctaca

SEQ ID NO: 20732 - DNA, 201 bp, Homo sapiens
tgagttgcagtcttgctctgttgcctaggctggagtgcagtggcatgatcttggctcattgctcctgggttcaagcgattcttctgcttcagcctccctastagctgggagcacaggtgcacaccactacacctgggtaatttttgtatttttggtagagagagggtttttccatgttggccatgctggtctcgaactcct

SEQ ID NO: 20733 - DNA, 201 bp, Homo sapiens
gaggcggagaatcgcttgaacgtgagaggcaggtgttgcagtgagccaagatcgcgccactgcactggagcctgagtaacagaaagagactttgtctcaawaaaaaaaaaaaaaaaaagaatcaaagagagcccttgctctggattaggctttggctggtttgatcttctatccagacctttcttcatgtcagaaatgaga

SEQ ID NO: 20734 - DNA, 201 bp, Homo sapiens
ttcacatgtgatttctctctctcgctctctttttcttttttcttttctttttttttttttttttgagatggagtctcactctgtcacccaggctggagtgyagtggtgcgatctcagctcactgcaacctccacttcccgagctcaagtgattctcctgcctcaacctcccatgtagctaggattatgggtgcctgccacc

SEQ ID NO: 20735 - DNA, 201 bp, Homo sapiens
catccctgggcctccagcttgcagatggccagttatgggacttctgggcctccataatcacatgagccaatttccctagtgaattccctctcatccatccrtatctctctctatctgatctatatcctatttgttatgtgtctctggagaaccctgactaatatgtactgtagaaaagcctcctgagacttagacgctatg

SEQ ID NO: 20736 - DNA, 201 bp, Homo sapiens
cttcttaaggatgtgacagtgatctgcactagagcttcaggcagctaaggtaggctttcctggaaatcagcccataagatgagaaagaaatcttttttttktttttttgagaaggagagtctcgctgtgtcacccaggctggagtgcagtggcgcaatctcggctcactgcaacctctgcctcccgggttcaagcgattct

SEQ ID NO: 20737 - DNA, 201 bp, Homo sapiens
gacttagacgctatgtttcctttgtttaaatgttgttgaattgatcataggtataatgcattagatttttcagaagaaagaaaaggtttattccacattayatctcttcagaagcctacccaaaggggatatctgttttggctatttattgcagtgtaataaactactctaaagcttagtagcttcaattagtgatttatt

SEQ ID NO: 20738 - DNA, 201 bp, Homo sapiens
aagccaacaacttctctcaccacaaatacctttttttttttttttttttttttttttttgagacagagtctccctctgttgcccaggctggagtgcagtgrcacgatctcagctcactgcaacctccacctcctgggttcaagcgattctcctgcctcagcctccagagtaactgggatattacaggcatgtgccaccacg

SEQ ID NO: 20739 - DNA, 201 bp, Homo sapiens
ctaccatattcatagaattcatacatattcatataaatcatcagcaaatctcgttgggcctaccttcaacatctatctagaatctgagtccttcctgctgsttcaccaagccaacaacttctctcaccacaaatacctttttttttttttttttttttttttttttgagacagagtctccctctgttgcccaggctggagt

SEQ ID NO: 20740 - DNA, 201 bp, Homo sapiens
aaaaggatagacgtgcttttatacaaaacttgcatttaaatgaaaccactagacttcttcatacaatgtaatgaagtcttggtattccagcgatttggcayctaaatgcataggcactcagtaaatattggagggaaggaggatggtggaaagaaagaaagggggagcagggaaaattaggggggaaattattttttcttc

SEQ ID NO: 20741 - DNA, 201 bp, Homo sapiens
agaggttgcagtgagccgagatcacgctactgcactccagcccgggcaacagagcaagactgtgtctgggaaaaaacaaaaacaaaaacaaaaacaaacaacaacaacaacaagaatttagcacagtgtctggcatgtggaaagcactctataaatgttagctattttactatttcatcatagattcttataggacagtgg

SEQ ID NO: 20742 - DNA, 201 bp, Homo sapiens
caggaggcagaggttgcagtaagccaagattatgccactgcactccagactgggtgacagagcaagaccctgtctcaaaaaaaaaaaaaaaaaaaaggatrtaaaagaacacctggataaatggagagacagtctctggatcagaggactcaacataaaattaaaaattaaaaacaggaaaatctcttccaattaatctat

SEQ ID NO: 20743 - DNA, 201 bp, Homo sapiens
ggcagaggttgcagtgagccgagatcacgctactgcactccagcccgggcaacagagcaagactgtgtctgggaaaaaacaaaaacaaaaacaaaaacaaacaacaacaacaacaagaatttagcacagtgtctggcatgtggaaagcactctataaatgttagctattttactatttcatcatagattcttataggacag

SEQ ID NO: 20744 - DNA, 201 bp, Homo sapiens
gagcccaggaggcagaggttgcagtaagccaagattatgccactgcactccagactgggtgacagagcaagaccctgtctcaaaaaaaaaaaaaaaaaaaaggatataaaagaacacctggataaatggagagacagtctctggatcagaggactcaacataaaattaaaaattaaaaacaggaaaatctcttccaattaa

SEQ ID NO: 20745 - DNA, 201 bp, Homo sapiens
cctgtaatcccagctactcaggaggctgaggcaggagaatcgcttgaatccaggaggcagaggttacagtgagctgaaattgcaccactgcaccccagccyggcaacagagcgagagtctgtctcaaaaaaaaaaaaaaaaaaaaattagctgggcatggtggtacacgcctgtaatctcagctactcaggaggctgaggc

SEQ ID NO: 20746 - DNA, 201 bp, Homo sapiens
acgatcttagctcactgcaacctctgcctcctgggttcaagcaattctcctgcctcaacctcctgagtagctgggattacaggcacacgccaccatgcccrgctaatttttgtatttttttagtagagacgggtttcaccatattggtcaggctgatcttgaactcctgaccttgtgatccacctgcctcagcctcccaaa

SEQ ID NO: 20747 - DNA, 201 bp, Homo sapiens
caaagtagctgggactgcagctgtgcacgaccatgcccagctaattttttgaaaaaattttttgtagagacaggagtctcactatgttgcctgtctttggkttggattaatttgctaaagcagctcacagaactcaggaaaacacatttaccaatttattatgaaggatattacaaaggataccgaggaagcaatgcatag

SEQ ID NO: 20748 - DNA, 201 bp, Homo sapiens
agtcagtcctcccacctcagcctcccaaagtagctgggactgcagctgtgcacgaccatgcccagctaattttttgaaaaaattttttgtagagacaggartctcactatgttgcctgtctttgggttggattaatttgctaaagcagctcacagaactcaggaaaacacatttaccaatttattatgaaggatattacaa

SEQ ID NO: 20749 - DNA, 201 bp, Homo sapiens
tggcctcagtcagtcctcccacctcagcctcccaaagtagctgggactgcagctgtgcacgaccatgcccagctaattttttgaaaaaattttttgtagakacaggagtctcactatgttgcctgtctttgggttggattaatttgctaaagcagctcacagaactcaggaaaacacatttaccaatttattatgaaggat

SEQ ID NO: 20750 - DNA, 201 bp, Homo sapiens
ttgcagtgagccgagatagcaccactgcactcccacccgggtgacagagcgagactccttctcaaaaaaaaaaaaaaaaaaaaaaaaaaaaaaagagattmctactctgttgcccaggctggagtgcagtggtgtgatcacagctcactgcagtctcgaactcctggcctcagtcagtcctcccacctcagcctcccaaag

SEQ ID NO: 20751 - DNA, 201 bp, Homo sapiens
tctactaaaaacacaaaaaattagccgggcgtggtggcgggcgcctgtagtcccagctactggggaagctgaggcaggagaatggcatgaacccaggaggyggagcttgcagtgagccgagatagcaccactgcactcccacccgggtgacagagcgagactccttctcaaaaaaaaaaaaaaaaaaaaaaaaaaaaaaag

SEQ ID NO: 20752 - DNA, 201 bp, Homo sapiens
ggggcacaaggcggggaagagactcaaacaataagagctactactgtttgctgaacacttatgtactgagtacattccatcctcagaatcaaccttaaacwgttaacatcctcattttacagatgaggaaaatgaggctcagaagagttaactaacctaagagaccctgaagtcctagcattttccacatggaacattttc

SEQ ID NO: 20753 - DNA, 201 bp, Homo sapiens
aaccccgtctctactaaaaaaatacaaaaaaaaattagccgggcgtggtggcaggtgcctgtagtcccagctactcaggaggctgaggcaggagaatggcrtgaacccaggaggcagagcttgcagtgagccgagatggcaccactgcactccagcctgggcaacagagcgagactccacctcaaaaaaaaaaaagaagag

SEQ ID NO: 20754 - DNA, 201 bp, Homo sapiens
ggggagtgaaaaggtgctattaataattacaccaggacaataggcaggcataaactgaggctgtcctggacacatcaggacatatgttcactctaggtgtmggtcacatcagaatggctttgagcaattcaccctaacctccttgagcctcaatttcttcttcttcttcttcttttcttttttttttttttgagacagggt

SEQ ID NO: 20755 - DNA, 201 bp, Homo sapiens
atgctgaggctagtcttgaactcctggcctcaagtgatcctcctgcctcagcttcccaaagtgttgggattacaggcgtgagccaatgcacctggctgagrctggtattttcaaatttcaattctagctgtcagggagagagaaattgattggcccaccagggaccaggtgtttgcttctggtccattcttctataaccag

SEQ ID NO: 20756 - DNA, 201 bp, Homo sapiens
tttgtcttcagagctgaaaaactcagtctctcatttagctttgaaaacaacagttcagttcctcagaatcaagataaattttaggagaaaaagcaatagaraattccctttagaatgcatctctgaattagaattaggatccttaaacaacaatttcctaggagaaaaccagctcagaataaatcaaggactgtcaaacaa

SEQ ID NO: 20757 - DNA, 201 bp, Homo sapiens
cctgggctcaagtgatcctcccgtcttagcctcccaagtacctagggctacaggtgcatgccaccatgctcagctaattttcttgccatgatgctgaggcyagtcttgaactcctggcctcaagtgatcctcctgcctcagcttcccaaagtgttgggattacaggcgtgagccaatgcacctggctgaggctggtatttt

SEQ ID NO: 20758 - DNA, 201 bp, Homo sapiens
cctaaaggaactatttttacatgataaaaaacaatggtatggagtcagcaaggaaaaccacaataacacaaatgctgactttcctctcttccactacttcyactctccttgcaacttagtagcctcattttgagaggacataattttaagaaacagttggcttgtagttaaggcaaagaggagtggggatgttctatgtaa

SEQ ID NO: 20759 - DNA, 201 bp, Homo sapiens
tttgctcaccattatccagcctcctttctttggcaaaaccatcttaatctgcaccatgctgtattccagtcttggaggcagctccccaactaagaatatgmctctagctaagccagacagtgtctccccaccatcccctctctctggaattggactctggggtggagtgatccaaagatattaagcaatatacaggcagct

SEQ ID NO: 20760 - DNA, 201 bp, Homo sapiens
aaattgacaaatgggatctaattaaactaaagagcttctgcacagcaaaagaaactaccatcagagtgaacaggcaatctacaaaatgggagaaaattttygcaacctactcatctgacaaagggctgatatccagaatctgcaatgaactcaaacaaatttacaagaaaaaaaccaacaaccccgtcaaaaagtgggcga

SEQ ID NO: 20761 - DNA, 201 bp, Homo sapiens
taaaaaccctagaagaaaacctagccattaccattcaggacataggcatgggcaaggacttcatgtataaaacaccaaaagcaatggcaacaaaagacaamattgacaaatgggatctaattaaactaaagagcttctgcacagcaaaagaaactaccatcagagtgaacaggcaatctacaaaatgggagaaaattttcg

SEQ ID NO: 20762 - DNA, 201 bp, Homo sapiens
gtaacccacctttgatatgttttcatatacattatggggaaaccatatttttttgaagtcaagaaatgtatattgcttcatgttgcaaaatttgtatgctwtgtcaaagaagcattgccagaaaatgatctgaaatgtagaacaataaagttacattatagatgtcttaggtgaaccaagagaaaaattagtgtcagagtt

SEQ ID NO: 20763 - DNA, 201 bp, Homo sapiens
cttactgcagctttgacctcccaggctccagtgatcctcccacctcagccttctgagtagctggactacacacgtgctccaccacacccagctaatttttkttcttttttttttgagacagagtctcgccctgtcacccaggctggagtgcagtggtgcaatctcagctcactgcaacctctgcctcctgggctcaagcga

SEQ ID NO: 20764 - DNA, 201 bp, Homo sapiens
tctctactaaaaatacaaaaaaaaaattagccgggcgtgttggtgggcacctgtagtcccagctactcgggaggctgaggcaggagaatggcgtgaacccrggaggcggagcttgcagtgatccgagattgcaccactgccctccagcctgggcgacagagcgagactccgtctcaaaaaaaaaaaaaaaaaaaaaaaaag

SEQ ID NO: 20765 - DNA, 201 bp, Homo sapiens
aaatgaaggtgacatgaattttgatgggcttattaacactgaactatttcttgataagagttgtctaaaaaaatgagaacatatgccaggcgcggtggctyatgcctgtaatcccagaactttgggaggctgagacgggcggatcacaaggtcaggggatcgaaaccatcctggctaacaaggtgaaaccccgtctctact

SEQ ID NO: 20766 - DNA, 201 bp, Homo sapiens
agtaggagaattgcttgaacccaggaggcagaggttgcagtgagccgagatcataccactgcattctatcctgggtggcaagctagactccatctcaaaargaaaaaagaaccatgtgaaaaggcatttcagaaaagtgtcattccacctcatcccttctgtcacgtttcagtctcccattcttcccatctaccccgtaag

SEQ ID NO: 20767 - DNA, 201 bp, Homo sapiens
atatttctgtctcactgatgcttagggaccatcttttgattttgatccgtgtcaagattctaaggcagtttaactaagacatgggttttcagtgtttttttgtttttgtttttgttttaatttctgtttctgtgagtgtaatttagggaggagtaccagcttgttttttataagttgtttcttacaatgattaacacataa

SEQ ID NO: 20768 - DNA, 201 bp, Homo sapiens
tccatgtagataataattgggagtccattaattgacattaagatttcaaaatgcttcttaaaaattgtagctttcggccaggcacagtggcctgtaatccyagcactttgggaggccgaggcgggcagatcacctgaggtcgggagcccgagaccagcctgaccaacatggtgaaactccgtctctactaaaaatacaaaa

SEQ ID NO: 20769 - DNA, 201 bp, Homo sapiens
attgcttttactcaggcagagtgaagaaaatggccctgtgacagacatttccagtttcctgtacatagaaatggggaaacagttgtgaaaaaaaaaaaaaagccagctggggttcttgacacacagttcatgctaattttaaattgtactaatacttgactatatagtgagggatcctttgcaggatgatgatctgttgaa

SEQ ID NO: 20770 - DNA, 201 bp, Homo sapiens
tgacatcctgggttcaagcgattctcgtgcctcagcctcccgagtagctgggattacaggcaaacaccaccacgcccagctaatttttgtatttctagtasagacagagttccgccatgttggtgagcatgctcacaaactcctgacttcaagtgatccacccgtctcggccacccaaagtgctgggattatagggctaag

SEQ ID NO: 20771 - DNA, 201 bp, Homo sapiens
catgctgctgctctcagggtgggggaagggtggtgctggcaattcaggagtgttgttgtgttttttttttttttggttttttttttggagacggagtctcrctgtgtcacccaggctggagtgcagtggtgcaatctcggctcactgcaacctccgcctcctgggttcaagtgattctcctgcctcagcctcccaagtagc

SEQ ID NO: 20772 - DNA, 201 bp, Homo sapiens
ccagaaagtggagactgaagtgagccaagatcatgccactgcactccagcctgggggacaaagtgggacgctgtctcaaaaaaaaaaaaaaaaaaaaaaaactacaaccctaacattattaactccatcacatttttgtttgttcgtctttagctcagatcaccttttggatcattttttattgtaatttataaatactct

SEQ ID NO: 20773 - DNA, 201 bp, Homo sapiens
cttgccttaactttttcaacactatgccatgccatgcacctattgatttgtttatgttccactagaatacatgctctggatcacagagttttttttttttkttttcccagaacatagctgaatcctcagtgcctaaagcagtgcctgacatagtacagtgctttgtaaatacttgccgagtgaatgaacaacaaatgaatg

SEQ ID NO: 20774 - DNA, 201 bp, Homo sapiens
aggattcagcacttcagtcttcacagcagaactgaatgaaaaaattctacagggtccagtgcagtggctcacgcctgtaaacctaagcactttaggaggcygaggcagactgatagcttgagctctggagttcgagaccagcttcggcaacatagtgaaaccccatctctacaaaaaatacaaaaattagccaggcgtggt

SEQ ID NO: 20775 - DNA, 201 bp, Homo sapiens
gaggctaaggtgggctgatcacctgatgtcaggagttcaaggccagcctggccaacaaggtgaaacctcatatccactaaaaatacaaaaattagctgggygtggtggtgcatgcctgtaatcccagctactcaggaggctgaggtaggagaatcacttgaacctgggagatggaggttgcagtgagccgagatcacgcca

SEQ ID NO: 20776 - DNA, 201 bp, Homo sapiens
ttcagttgactgggaaaaaaccttttccaggaaaacaagatttatgaagagaaaaacataaaggcctttgaatatactcatagcttggacatcgattttarttaagctgagtgctctttttcatcaggggtgagggttgaggttagaattatataaataatataccaagttaaattaaaggattgggttatgtgcaggaat

SEQ ID NO: 20777 - DNA, 201 bp, Homo sapiens
tttaaatggtgtatttcacagatggacagaagtcattttaagttccttgccaacagagtaacactctccagcaccattggttgtgtcaaagtttgtgtgtracaggaaagtgtgaatgtgtttatacatcttgatcttaccagtgaacggtgtattttttttaaaataaagcttgtcttatacactactaagtgtagagaa

SEQ ID NO: 20778 - DNA, 201 bp, Homo sapiens
gctactcaggaggctgagacaggagaacggcgtgaacctgggaggcagagcttgcagtgagctgagattgcgccactgtactccagcctgggcgacagaamgagactctgtctcaaaaaaaaaaaaaaaaaaaaaaaaaatctttaaactgggtttcacagtttaaaatctagaggtccacaaactatatttaaggattca

SEQ ID NO: 20779 - DNA, 201 bp, Homo sapiens
ggagaatcgccggaacccaggcaggtgaaggttgcagtgagccgagattgcaccactgtgctccagcctgggagacagagtgagactttgtctccaaaaartaaaataatataatataaaattccaggcaagcagcttcaggaagtctatcatggaatcacaggttctctccagttgtaataagaagtcaagaggatatag

SEQ ID NO: 20780 - DNA, 201 bp, Homo sapiens
cttatataaatatcaatataatttatatacatatatagtttatatacatatatatacacatttctaaatttctaagatataactcttgagttgaatctcayaaaaaatgagaagatattttccaagcagactgtggcagacactgctcattggctaaactacccacaacatccctctctctaggcatcttcaaaccagagt

SEQ ID NO: 20781 - DNA, 201 bp, Homo sapiens
ggcgtggtggcgcacacctataatcccagctacttggaaggctgaggtaggagaatcgccggaacccaggcaggtgaaggttgcagtgagccgagattgcrccactgtgctccagcctgggagacagagtgagactttgtctccaaaaagtaaaataatataatataaaattccaggcaagcagcttcaggaagtctatca

SEQ ID NO: 20782 - DNA, 201 bp, Homo sapiens
gtaaaattcctggatcatatggtagttctatttgaattttttgaggaaacttgacggtgttttccatagcagttaaaccattttacaatcccaccaactgygcacaagggtttcaatttgtccccatccttgccaacacttgttactttctgttttttttttatagcagccatcctcacagatgtgaagtagtatgtcatt

SEQ ID NO: 20783 - DNA, 201 bp, Homo sapiens
tgttgcagtgagccgtgatcatgccactgcactccagcctgggagacagagcaacacaccatctcaaaaaaaagtaataataatgaaagataagaaagagmcagagaaaagagagaaagaaaagaaaaaagaaaaaaagaaatttcccagtttctgctagaaatgaaggtaaatggaagattcagacagacatttccaaga

SEQ ID NO: 20784 - DNA, 201 bp, Homo sapiens
cttctctgctatctttccaacaaacttttgagaatgtctgtccagtcctcctaggaattgattcatctctccacagcagtacatttttgccgtctgggttkttctgtctagaataatgccagggaacggcctttggtaggacacccagtggtgggcttggttagctttctgaggaatatggactgtgctttaaattctgtg

SEQ ID NO: 20785 - DNA, 201 bp, Homo sapiens
tgagcctgggaggttgaggttacagtgagctatgactgtgccactgcactccagcccgtgtgacagagcaaggctctgtctccaaaaaaaaaaaaaaaaaraagaagaatgaggccgcgcgcacaggggctcacacctgtaatcccagcattttaagaggccaaggtgagtggatcatttgaggtcaggagttccagacca

SEQ ID NO: 20786 - DNA, 201 bp, Homo sapiens
cctagttcaaccccatcgagaccatcctggctaacacggtgaaaccccgtctctactaaaaaaatacaaaaaaaaattagccgggcgtggtggcaggtgcytgtagtcccagctactcaggaggctgaggcaggagaatggcatgaacccaggaggcagagcttgcagtgagccgagatggcaccactgcactccagcctg

SEQ ID NO: 20787 - DNA, 201 bp, Homo sapiens
tgctgagagcagtagatgttgggaagacctgcctacggagaggagctacccactgtgggtctcctctgagctgttctaaaatttagtaaagctcatcttcrtcttgtccttcacttgtctgggtacctcattcttattgtgcacccttcacttgttcgtgtacctcattcttcctgtcattcttcctggatgcaggacaag

SEQ ID NO: 20788 - DNA, 201 bp, Homo sapiens
atatctgggcctctgccccataatgattcaacaaggtatgtctacttcatggccttatgttcacattcagaaaaagctaaatttttactcttgcttagagrtttcattccagggaaaagtgaatgtaatttcgttcaatattcattaagtaggctcaacacttgtgcaagagactcttataatgactccatgattcttcaa

SEQ ID NO: 20789 - DNA, 201 bp, Homo sapiens
aggccacctagttcaaccccatcgagaccatcctggctaacacggtgaaaccccgtctctactaaaaaaatacaaaaaaaaattagccgggcgtggtggcrggtgcctgtagtcccagctactcaggaggctgaggcaggagaatggcatgaacccaggaggcagagcttgcagtgagccgagatggcaccactgcactcc

SEQ ID NO: 20790 - DNA, 201 bp, Homo sapiens
actgagccagagagagcccgggacaagcgggagacctgcccattcccagttggctgcgcgggagattccctggtgcagctgcggcaccctcacaggtgcasgtccaggcatctctgcagcctgcaccctcgagagccgggaagaccctccccttctctcgaccctgcaggctcaggggtgtctgctcccattgcctggcct

SEQ ID NO: 20791 - DNA, 201 bp, Homo sapiens
gacggggttttgccatgttggccaggctggtctcgaactcctgacctcaggtgatccaccgccttggcttcccaaagtgctgggattataggtgtgagccrctgcgcccggccattgccgttacttttaatgtcaaaaaccacagttacttttgcaccaaacccattaaaaggcagcattgttttcacccagacttctcat

SEQ ID NO: 20792 - DNA, 201 bp, Homo sapiens
aaatgattctcctgcctcagcctcctgagtagctgggattacaggcgcccaccatcacacccggctaatttttgtattttttagtagagacggggttttgycatgttggccaggctggtctcgaactcctgacctcaggtgatccaccgccttggcttcccaaagtgctgggattataggtgtgagccactgcgcccggcc

SEQ ID NO: 20793 - DNA, 201 bp, Homo sapiens
tggagtaatcctccaaaatagagggggactagatcttataatggctgaaaaaggagatcttaaatggcctctgcctctcgttggatgaggaatgttgcctmtacctcaaccaatcaagcctagtaagagatgctgctgaaaaacttacagaaagggctaaaagactaagggaataccaaaacaaccaaatagattgttggt

SEQ ID NO: 20794 - DNA, 201 bp, Homo sapiens
tcacctgatgcaaatggggcatttccacaactggctcgttttacagcctctccctcaaccgatgcctctgacctaatttgtgctgtccctagtgcccgctktattcatggctcaatatcaatggtgcaacatctgattgtattaaatgtataaagaataactcttcctatatctctactatagtggatgtctctctggcct

SEQ ID NO: 20795 - DNA, 201 bp, Homo sapiens
tctactaaaaatataaaaattagctggggatggtggtacacgcctgtaatcccagctactcaggagactgaggcaaaaggatcacttgagcccggaaggcrgaggttgcagtgagccgagatcacaccattgccctccagcctaggtgacagagcgagactctctctcaaaagaaaaagaataggaagtgaaagatagtat

SEQ ID NO: 20796 - DNA, 201 bp, Homo sapiens
agtagctgggattacaggcatccgtcaccatgcccggctaattttgtatttttagtagagatggggtttctccatgttggtcaggctggtctcaaactccygatctcaggtgatctgcccacctcggcctcccaaattgttgggattacaggcatgagccaccatacccagcttgtttcttcttgtgatgtttttgcttta

SEQ ID NO: 20797 - DNA, 201 bp, Homo sapiens
cgggttcacgccattctcctgcctcagcctcccgagtagctgggactacaggcgcccgcccccacgcctagctaattttttgtatttttagtagagacggrgtttctccttgttagccagtatggtctcgatctcctgacctcgtgatccgcccgcctcggcctcgcaaagtgctgggattacaggcgtgagccaccgtgc

SEQ ID NO: 20798 - DNA, 201 bp, Homo sapiens
tgcaagctccgcctcccgggttcacgccattctcctgcctcagcctcccgagtagctgggactacaggcgcccgcccccacgcctagctaattttttgtayttttagtagagacggggtttctccttgttagccagtatggtctcgatctcctgacctcgtgatccgcccgcctcggcctcgcaaagtgctgggattacag

SEQ ID NO: 20799 - DNA, 201 bp, Homo sapiens
gtgctgagattacaggtgtgagccactgtgcccggccctctcttaagctggctttaattattatttggtttcacattttgatctttaattaatttttgcarttgtgataactaacttggaagagagaagacagactgagttctgggcaaagtcttggatcattgagagggaaggaaaaggtttgaagatgaaagtgatgag

SEQ ID NO: 20800 - DNA, 201 bp, Homo sapiens
taagtttaataaagtcaaaactgtcattttttcccccttattgtggattttggtattccacctagaattgcctgcttgggattttacttgtattttcccamaatttttttctaataagtctgtatttttaattaattaatttatttatttgagacagtctcactctgttgcccaggctggagcgcaatggcatgatctcgg

SEQ ID NO: 20801 - DNA, 201 bp, Homo sapiens
ttgaggcagttttcctaagatattgccacctccaactgtagaaagaatgagcagaagctatttactctgaatccatgaaactctcaagggaaaaaaaaggwgtgtgtgtgtgtgtacatatataaacatatatatgtacacacacacacacacacacacatatatatatacatattccttttttttctttgagacagggtc

SEQ ID NO: 20802 - DNA, 201 bp, Homo sapiens
ttggttgtttcaaagctcaaccatccaatgaagagcttcctccgctggtcaggctctttaggagactcagacttagacatgacggcagaaagaagagagaytttaatgatgcttcctcggtggtgtccaagggcagaaaggcaaaatctattttcttagcaattttcaagaatacaatacattgtgtgtgttttttaaaat

SEQ ID NO: 20803 - DNA, 201 bp, Homo sapiens
cttctctgtgatgctggtgccctcctcaccaggccatgacttagcacgccggtaaacggagtatgctctgggccctcctagggaacactgtggggggtggrttttctggcctctatagtctaaccagtttggcatgcccactgctctggacatcctgattccttccttcaccatttgctgtggcagttcttccaattctac

SEQ ID NO: 20804 - DNA, 201 bp, Homo sapiens
tctaaagctgcttagaatgaagctcttccaggagccatccgcacaatttcccacttaaccaggaaacatttctcctctaaaatacatgaaatcatcttgaygtattattttggagattacactaattaatacatatccgagactcgaaaaaaactaaaaaagaaggtttcataaacagaagacaattcaagggagttcctg

SEQ ID NO: 20805 - DNA, 201 bp, Homo sapiens
cggccaggccaagaagcttccaagcttgatcctcctcttaatatttattggagctggaggtcctggagcagcactgtatgtcttgcatctggcactgttcratcagatgttagtaggggcagaaagaataacccaaaaaccctgagacaaactgggtgccaatgatcagtacaagttcaactcggtgaatgtggattacag

SEQ ID NO: 20806 - DNA, 201 bp, Homo sapiens
aactcgtttaatcctaaatgggtcctgttaagaattcctttgttattttgttatgctttaaggcccaggaaaagcctaggcaaaactcttggtgggctttygttacattccagcctttgtataagggcactggcttttttaacttttaatatttaacttaaccactcagtcagtactgaaacagttgttatggaggcctgc

SEQ ID NO: 20807 - DNA, 201 bp, Homo sapiens
agcttatataccttctaagctatatgtctacgtgtaagtgtgcattcatctaaagacataagtgattaacttcttctaatctatagctaaggtctgagtcytgaagaccttcctctggagcctcagtaaatttacttaatctaaatgggtccagctgctggggtgattacccttattatgtctcctgcttaaatcacggag

SEQ ID NO: 20808 - DNA, 201 bp, Homo sapiens
cttgatttatactattaatatagctatcaataataaacaagggcaacctcttttggctctgatatattctgagacccctgaataatgcctctagaattttytttttgaggtcccttgatggtcttttcttgaggcagttttcctaagatattgccacctccaactgtagaaagaatgagcagaagctatttactctgaatc

SEQ ID NO: 20809 - DNA, 201 bp, Homo sapiens
agccattgtacagtttgacaggcctgtgtgaatatcctgctttgtagctgagtgttcttgcttgttaatctgcttcccctatccccactcttttttttttwttttaatctggtggttgagaggtgcttccaagcctacctattttatttaccacttcctcgttagttttttgggcttcttaaaatggtcctccactcttat

SEQ ID NO: 20810 - DNA, 201 bp, Homo sapiens
aactagctaggagatttttatgatgatatgatacagatcagcaatacgtaagacagaaagggggcttcacccagcaagagttaggatttatagtcccagtrtgcccgagttttacatattgtgaactttgctaaccttcacctttatcaacaagctgtgagtgactctccagcacaaagctttgagtatcaagcatgcata

SEQ ID NO: 20811 - DNA, 201 bp, Homo sapiens
ccacttctgggatgaaataaaatctgtgtcttgaagagacatctgcaccccatgttcatagcagcactattcacaatagccaagatatggaaacaacctamgtatctgtcagccaatgaatgaataaagaaaatgtggtgtgtatacacaatggaatattatttagccatgaagaaggaaatcctgccatttgcaaaaaca

SEQ ID NO: 20812 - DNA, 201 bp, Homo sapiens
ttgctttctgaacactagttaccatctacccaagctaaggtttcctgggaatacaggtccggaaacggtactgtaatccctttagatcccatcaggaaacmtagaggatgatctgaacaataattccctccaattgatagcttaggaagatctctccattctgttattttaaggatttttaaagaccacctcaaccaagat

SEQ ID NO: 20813 - DNA, 201 bp, Homo sapiens
gacaggtagtccaggggaggggtgtggaaatactgctttacacaagggtagtctgggacagctccgctgtcaaggtggtatctgaatagaaatgagagagyaagccatatggatatgtgatgaaagtgtccctggccgggcgcggtggctcacgcctgtaatcccagcattttaagaggccgaggcgggcggatcacgaga

SEQ ID NO: 20814 - DNA, 201 bp, Homo sapiens
attgcgtgattccaggagtttgaggctgcagtaagtcatgattgtgccactgcactgcagcctgtgtgacagagtgagaccaaaaaaaaaaaaaaaaaaaattgaagacagaaataaatggaaaggtatcctctgttcaaagagtggaatagttaatattgttaaaatgtccatactactgaaagcaacatacagattcaa

SEQ ID NO: 20815 - DNA, 201 bp, Homo sapiens
atttatgtgcccgggatccaggaatcctggttttggtggcagtttcccttgattttattgagacttttaagttggtccctttacatttttatttctagttsacaatccaaaaaaaattattaatcagaattcagttttgggaagacgaggggtcatacggtttgtattttcacatgtgaatgtaggaattatgttctctat

SEQ ID NO: 20816 - DNA, 201 bp, Homo sapiens
tgggcagttgttcagtttggtgttactgtgggggatgaggagggtggtcaatggaggcttctattctgcctcttgctctgcctcctgagctccaggcctgygtttggactttaccttactctcagagcaggttttgtaaaaaagtaaaacctgttggggttttgctgactcagcgcatgtgtgaggaaggaggagggatag

SEQ ID NO: 20817 - DNA, 201 bp, Homo sapiens
caatcacacccagctagttttttgtatttttggtagagacagggtttcaccctgttgcccaggcgggtctcaaacccctgggctcaaacgatccacctgcytcagtctcccaaagtgctgggattacaggtttgagccaccttagaaccctcttttaccccttgttgttgttaaccactttttactagctaacaattataa

SEQ ID NO: 20818 - DNA, 201 bp, Homo sapiens
gagcaagtctgttggcaacgtttttcccgcatgtgctcactctgtgtctctgtgtcccattttggtaattcacacaatatatcaaagtttttcattattgkattatatatataatattatgtatatataatatgtaatatatataatacgtatataatatataatatatgttatatattatatgttatatgcaatatatgt

SEQ ID NO: 20819 - DNA, 201 bp, Homo sapiens
catggaaaagaaagtagaagagcaaaatacaggaaaacacataacagtaagaacaaacaaggaatatttgggaaatgagagaaattaggattaggaggtasgtgggccttaacaaaaataaatagaatcaaattttctccttgtattgctatagtgcttcccaggaactgaatataacttatttaattgtaccaattgtac

SEQ ID NO: 20820 - DNA, 201 bp, Homo sapiens; identical to SEQ ID NO: 2862

SEQ ID NO: 20821 - DNA, 201 bp, Homo sapiens
gccaaggcgagaggctcacttgaggtcaggagtttgagacaagcctggccaacatggtgaaactccgtctctactaaaaaaaaaaaaaaaaaaaaaaaaaatcaataaaataataattagtaaaatataagaagaattggccgggtgcagtggctcatgtctgtaatcccagcactttgggaggccaaggcgggcggatca

SEQ ID NO: 20822 - DNA, 201 bp, Homo sapiens
cttgtgtgtgttttcaaatagcctatcttcaggctcactaattcttctgcttaatctattttgctaataaaagaccctgatgccaattacattttttagcyccagaacttctgcatgattctttttaattatttcaatctccgttaaatttatcagatagaattatcaattccttctctatgttattttgaatttctttga

SEQ ID NO: 20823 - DNA, 201 bp, Homo sapiens
ggccaaggcgagaggctcacttgaggtcaggagtttgagacaagcctggccaacatggtgaaactccgtctctactaaaaaaaaaaaaaaaaaaaaaaaaaatcaataaaataataattagtaaaatataagaagaattggccgggtgcagtggctcatgtctgtaatcccagcactttgggaggccaaggcgggcggatc

SEQ ID NO: 20824 - DNA, 201 bp, Homo sapiens
tataaaatactttatttcttgaggtccaaaagacttcaaaataggggctgagtgatataatggaaagaacactggattaggagccagaatatctgggttaygttgcctgctctctcactaactggctcagtgaatttgggcaggttatttgaactctctggatctcggtttcttctatggtgagtttatgggcttagatta

SEQ ID NO: 20825 - DNA, 201 bp, Homo sapiens
atataactgatcaaaacaaaataaatacaaagtatgattcatacatattagatataaaattaaaatacttttgaagcacatctttaatgagaatgatgagytgttttttcccccagtgaatttatgcatccatggattgcaagaattaaacaacattaattctgttactatttttgttttgtgtagctataagtgctaaga

SEQ ID NO: 20826 - DNA, 201 bp, Homo sapiens
cctcctgctgccctatcatgcgccatgcatggcaccaggtgtctctggtcttcacgctgactctgccatgggggtggtgttcctgttttacattggaaacktggagattcagagatggtcaagctctgtcctgaggtcatgcagctcatgagtgtggagctggggtgtgcccactggtttctgactgtgaaacccccacga

SEQ ID NO: 20827 - DNA, 201 bp, Homo sapiens
gcatttgagtccaggaattcaagaccaacctgggcaaaatagtgagagaccctgtctctataaaaataaaatgaggccgggtgcagtggctcaagcctgtmatcccagtcctttcggaggccaaggcgagaggctcacttgaggtcaggagtttgagacaagcctggccaacatggtgaaactccgtctctactaaaaaaa

SEQ ID NO: 20828 - DNA, 201 bp, Homo sapiens
tcctgcctcagcctcccgagtagctgggattacagacgcatgccaccacgcccagctaatttttgtatctttattagagatggagtttcaccatgttggcyaggctgctcttgaactcctgacctcgtgatccacccacctcggcctcccaaagtgctgggattacaggtgtgagccaccgcgcccggccaaaataattgt

SEQ ID NO: 20829 - DNA, 201 bp, Homo sapiens
aagagaggcattgctatcaacagcacttttttccatcatcataattatcatcatcagttctacaccaagagaagatgtactgatgagcatgaaatttggcygttgaaggccatgcataagaattatttcccttttccctcacatgccatggcagtgaacattttacttgaggtaggtcttaaacagattaaaacttgtagg

SEQ ID NO: 20830 - DNA, 201 bp, Homo sapiens
catttccctgcacctcacctgcccccatgctcctgagtccctccagccctggatgccagcagccagttctgcaagccagggagatggcatgtgtgaggcaraagtcccctcaggattggattttgtcattactgaagttgtctggaggggactgaattgaggaatgctcaagatcagtgcaggctcctcctgctgccctat

SEQ ID NO: 20831 - DNA, 201 bp, Homo sapiens
aaaataacatttatttatttaaaaaataattttttaagagacagggtctcactgtattgaccaggctgctctcaaactcctgggttcaagtgatcctcccrccttggcccccaaatgtgctaggattacaggcataataagccactgtgcccggccatgtaagtaaaaataaaacttaaaagatagaaaactgaatgcaat

SEQ ID NO: 20832 - DNA, 201 bp, Homo sapiens
tacatttctgaggtctgcacatctgaagatattataaactagctaggagatttttatgatgatatgatacagatcagcaatacgtaagacagaaagggggyttcacccagcaagagttaggatttatagtcccagtatgcccgagttttacatattgtgaactttgctaaccttcacctttatcaacaagctgtgagtgac

SEQ ID NO: 20833 - DNA, 201 bp, Homo sapiens
catcggaggctgaccatggctttccagtgcatcccagaactctggggaccccgctatgacagagtgcctcatttccctgcacctcacctgcccccatgctmctgagtccctccagccctggatgccagcagccagttctgcaagccagggagatggcatgtgtgaggcagaagtcccctcaggattggattttgtcattac

SEQ ID NO: 20834 - DNA, 201 bp, Homo sapiens
tagtagagatagggtttcacattgttggtcaggctggtcttgaactcccgacctcagctgattcacttgcctcggcctcccaaagtgctgggattacaggygtgagccaccatgcccagctaaaaggccattcttaattttcaaaagagaactttatgacatctgggaatttcagaggctttgcagaacaatattaagaaa

SEQ ID NO: 20835 - DNA, 201 bp, Homo sapiens
ttgctgcatagaggcaatgtttccaggagaacctcacctggccagaaacatctgccttgaacatggttagaacaaatgaaacttttttgtattaaaacacwtgagattctgtggctcttcgttactgtgttaccctatcctgaccttgctttgtggtttatttaatgatgcacatttactagagtggtgtacattcaatag

SEQ ID NO: 20836 - DNA, 201 bp, Homo sapiens
acaccagttatgaggaaccaggaacttggccatcactgtgagacagaactggagcaggggcctagctgaatagtaggtgtattacatgtgtgatctttggrcaggactatacctgctcttcctgctactgctactgtgtgccaccatggatgggaacataagatccaggaaacaagacttttcaaggttggaacagactgt

SEQ ID NO: 20837 - DNA, 201 bp, Homo sapiens
acaatgggagctgtagaccggagctgttcctatttggccatcttggctcctccccccttttttttctttttttaagatgcagtctcactctgtcacccagrctggagtggagcagcatgacctcggctcactgcaacctccgcctcctgggttcaaacagttctgtctcagcctcccaagtagctgggactccaggcacct

SEQ ID NO: 20838 - DNA, 201 bp, Homo sapiens
gacttctagagtggttgtagaggaaatgccaaatccaacgtcgccattcacacaaaagccacttgcctcccattgggttatcgtatcaggaatgaggaacraaagattggcagagcctgaggaactggaagaagaggttatcggtaaaacacattctttgtctgaaccaagaacttaaaattaagtgcagagcaagcagaa

SEQ ID NO: 20839 - DNA, 201 bp, Homo sapiens
acctactgtctggcactccccagtgagatgaacccggtacctcagttggaaatacagaaatcacccgtcttctgcgttgctcacaatgggagctgtagacyggagctgttcctatttggccatcttggctcctccccccttttttttctttttttaagatgcagtctcactctgtcacccaggctggagtggagcagcatg

SEQ ID NO: 20840 - DNA, 201 bp, Homo sapiens
cacagggtagttcatgagacatgggctcaaggtggacaaagctcttgcttggggagaacacaagataagcagtgtgatgtgcctcttcgtgttcttctgayacccactggtagccgtaacagggactacgatccttgtaattgacctaatgaattagaaaaattatattatttttagattatacgtcataaagattaatgt

SEQ ID NO: 20841 - DNA, 201 bp, Homo sapiens
caggtgccctctgtcactgctttctttgactaggaaagggaattccctgaccccttgcgcttcccgggtgaggtgatgcctcgccctgcttcggcttgcgygtggtgcgctgcacccactgtcctgcacctactgtctggcactccccagtgagatgaacccggtacctcagttggaaatacagaaatcacccgtcttctg

SEQ ID NO: 20842 - DNA, 201 bp, Homo sapiens
gccatctcggctcactgcaagctccgcctcccgggttcacgccattctcctgcctcagcctcccgagtagctgggactacaggcgcccgcccccacgcctrgctaattttttgtatttttagtagagacggggtttctccttgttagccagtatggtctcgatctcctgacctcgtgatccgcccgcctcggcctcgcaaa

SEQ ID NO: 20843 - DNA, 201 bp, Homo sapiens
ttgccattatctgcaaaaaaggaaataaaaagaaattaaatgtgccagagagaacacgcttcagtctcacttcaatatacttgttttattgagtccctgcyggcaataattcacctcaagagaaatcaaactttcaaaaggaacatggataagaagttgaagtaatgacatctaaagagcttcatgattacttgctccaca

SEQ ID NO: 20844 - DNA, 201 bp, Homo sapiens
cccacttgaggaggcagtctgcccgttctcagatctcaagctgcatgctgggagaaccactactctcttcaaagctgtcagagagggacatttaagtctgyagaggttactgctgtctttttgtctgtgccctgcccccagaggtggcgcctacagatgcaggcaggcctccttgagctgtggtgggctccacccagttcg

SEQ ID NO: 20845 - DNA, 201 bp, Homo sapiens
tgccatctcggctcactgcaagctccgcctcccgggttcacgccattctcctgcctcagcctcccgagtagctgggactacaggcgcccgcccccacgccyagctaattttttgtatttttagtagagacggggtttctccttgttagccagtatggtctcgatctcctgacctcgtgatccgcccgcctcggcctcgcaa

SEQ ID NO: 20846 - DNA, 201 bp, Homo sapiens
aaaaagacaacacatatttgataaagggtgagaaaaaaaccattattgttttccctccctcaactttcttttaattaatattagatggaaatggtctctcrttacttgaaagtattcctgatattcccagctcaggaatggaaaaccaaacatcatatcttctcactcagaagtaggagctaagctattaggaagtggcag

SEQ ID NO: 20847 - DNA, 201 bp, Homo sapiens
agtagagacagggtttcgccatgttgcctaggctggtctgaaactcctgacctcaggtgatccgccctcctcagcctcccagaatgttgggattacgggcrtgagccactgcgcccggccaagtttatacatttctttctacacactacgtagctgcatcccacagttgtcatctgtaatactttttttttttttttgaga

SEQ ID NO: 20848 - DNA, 201 bp, Homo sapiens
cacgcctgtaatcccaacactttgggaggccgaggtgggcggatcacgaggtcaggagattgagaccatcctggctaacacagtgaaaccgccgtctctaytaaaaatacaaaaaattagctgggtgtggtagcaggtgcctgtagtcccagctactcgggaagctgaggcaggagaatggcgtgaacctgggaggaggag

SEQ ID NO: 20849 - DNA, 201 bp, Homo sapiens
atggtagtgcacccctgtagtcccaactactcgggaggctgaggcaggaaaaacacttgaacccgggagtcagaggttgcagtgagcctggatggtaccaytgcattccagcctgggtgacagcaagactccgtctcaaaaaaaaaaaaaaaaaaaagaagtaagaagtaaggaaagaacaaaggaaggaaggaagcaaga

SEQ ID NO: 20850 - DNA, 201 bp, Homo sapiens
gctacttgggaggctgaggcagaagaatcgcttgaacccaggaggcggaggttgcagtgagctgagactgggccgctgcactccagcctgggcaacagggygagactccatctccaaaaaaaaaaaaaaaagaaatagttgaagaaacacactcagaatagaagaaccaaattgaaagtgtccatcataatagatgaaaat

SEQ ID NO: 20851 - DNA, 201 bp, Homo sapiens
ctatgaagttcagcagccaaataatagaatttccaggaagagtaaaacagaggggaagaaatcaacaatgaaatagttcaggctgggcgtggtggctcacrcctgaaatcctagcactttgggaggctgaggcgggcggattgcctgagctcaggagttcaagaccagcctgggcaacacagtgaaaccatgtctctacta

SEQ ID NO: 20852 - DNA, 201 bp, Homo sapiens
gggtgcaggttacagtgagccgagagcgccactgcattccagcctgggtgacagagcgagactccatctcaaaaaaataaataaataaaagaccaggcccrgtggcttacacctgtaatcctagcactttaggaggctgaggcgggcggatcacttgaggtcaggagtttgagatcagcctggccaacatggtgaaacccc

SEQ ID NO: 20853 - DNA, 201 bp, Homo sapiens
cggtggctccctcactcactttgggaggccgagggaggtgtatcacaaggtcaagagatcgagaccatcctggctaacatggtaaaaccccatctctactraaaatacaaaaattagctgggcatggtggcggtcgcctgtagtcccagctactcaggaggctgaggcaggagaatcacttgaactcagggggtgcaggtt

SEQ ID NO: 20854 - DNA, 201 bp, Homo sapiens
agagacggggtttcaccatgttggccaggatggtctcgaactcctgacctcaggtgatctgcctgcctcagcctcccgaatgctgggattacaggcatgarccacactgcacctggccgatgataaacctttgaaagctaaaaagcaaagagatgattgcagactaactcagaagaactgagaaagctgaattatgtggca

SEQ ID NO: 20855 - DNA, 201 bp, Homo sapiens
ctcatttatagaacttcacttgatttatactattaatatagctatcaataataaacaagggcaacctcttttggctctgatatattctgagacccctgaawaatgcctctagaattttctttttgaggtcccttgatggtcttttcttgaggcagttttcctaagatattgccacctccaactgtagaaagaatgagcaga

SEQ ID NO: 20856 - DNA, 201 bp, Homo sapiens
aataacataaacttatagaatataaattggaattcactcatttatagaacttcacttgatttatactattaatatagctatcaataataaacaagggcaayctcttttggctctgatatattctgagacccctgaataatgcctctagaattttctttttgaggtcccttgatggtcttttcttgaggcagttttcctaag

SEQ ID NO: 20857 - DNA, 201 bp, Homo sapiens
cttatccacggagtcatggttgtcaaaggttacaaaggcaaagtcccttttcttgccactgccttggtcagtcatgatttcaatcacttcaatttttccamactgttcaaaattatctgttcttcagtgtcgtcgtcttcttctttttttttttttttttctgagacagagtctggctcttgtcacctaggctggaatgca

SEQ ID NO: 20858 - DNA, 201 bp, Homo sapiens
gagccaccacacctggtcttaggtttcttaattttatttctctgtgtttctacaggcttttaggccattttactaataattacttttttttttttttttttagtttttttgagacagagtcttgctctgtcaccaggctggagtgcagtggtgcgatcttggctcattgcaaccgctggttcaagcgattctcctgcctca

SEQ ID NO: 20859 - DNA, 201 bp, Homo sapiens
atcgcttggacctgggaggcagaggttgcggtgagcagagatcaccccacggcactccagcctgggcaacagagcgagactctgtctcaaaaaaaaaaaaatttactttttattataaatttgtcatatttaatgccatggtgcattatagttctggctacaaaatgaaacaatttatttttaaacttgattttttttctc

SEQ ID NO: 20860 - DNA, 201 bp, Homo sapiens
aggtctgcaacatcagtcactcctcgcccatctgtatcccagcttttaacagtttgttactgctctttcctatcatattctcttgtgggcaccaaattttyttttttaattttattgtatctttagaggagttttaggggagagtaaaaataaatatatttttcaatccatctttacccagaaattgaaatattacttttt

SEQ ID NO: 20861 - DNA, 201 bp, Homo sapiens
gcagtaataaggatttttaaaaattatgtgacaattgtgtattagactgaagtaattaatacctttgtcacagggaccgggtgcaatggctcatgcctgtwatcttagcactttgggaggccgagacaggcagatcacttgaggtcaggagtttgagaccaacctggccagcatggtgaagcctcatcttactaaaagtac

SEQ ID NO: 20862 - DNA, 201 bp, Homo sapiens
cggggtttcaccatgttagccaggatggtctcgatctcctgacctcgtgatccgcctgccttggcctcccaaagtgctgggattacaggcgtgagccactrcgcccggccctacaacatgttttaaaatatgaatacgttgtggaatgattcgatcgatttgaccagtgtcttcattttttgatcgagctaattaacatat

SEQ ID NO: 20863 - DNA, 201 bp, Homo sapiens
taaatatatttatatatttataaaaatatataaatatatttatatatttatataaaatatatataaatattttaatatatatttaatatataaatatttataaaaatataaatatttatataaaatataaaatatttattgcaaaaactttttaatgataaaaatattggaaccagcataaagatgagcttaccaaagtta

SEQ ID NO: 20864 - DNA, 201 bp, Homo sapiens
ataaatatatttatatatttataaaaatatataaatatatttatatatttatataaaatatatataaatattttaatatatatttaatatataaatatttataaaaatataaatatttatataaaatataaaatatttattgcaaaaactttttaatgataaaaatattggaaccagcataaagatgagcttaccaaagtt

SEQ ID NO: 20865 - DNA, 201 bp, Homo sapiens
tataaatatatttatatatttataaaaatatataaatatatttatatatttatataaaatatatataaatattttaatatatatttaatatataaatatttataaaaatataaatatttatataaaatataaaatatttattgcaaaaactttttaatgataaaaatattggaaccagcataaagatgagcttaccaaagt

SEQ ID NO: 20866 - DNA, 201 bp, Homo sapiens
atataaatatatttatatatttataaaaatatataaatatatttatatatttatataaaatatatataaatattttaatatatatttaatatataaatatttataaaaatataaatatttatataaaatataaaatatttattgcaaaaactttttaatgataaaaatattggaaccagcataaagatgagcttaccaaag

SEQ ID NO: 20867 - DNA, 201 bp, Homo sapiens
acctctaggaagctgtacatatccttttcatttgtacttgatactggagtatatgtgattccattaatatagacattatgacgattgatgcagtcttcatygtcctggtcattcaaaggcccagggaagccagtgaggtccttttctggtagcaggttgtaaacctgtacaaatacgaaagacaaaaaggcaaacttattt

SEQ ID NO: 20868 - DNA, 201 bp, Homo sapiens
tgaggccaagagttcaagaccagcctggccaacatggtgaaaccccatctctactagaaatacaaaaattagccaggcgtggtggtgcgcacctgtaatcygagctacttgggaggctgaggcataagaatctcttgaacccgggaggtggagattgcagtgagctgagatcacaccatggcactccagtctgggcaacac

SEQ ID NO: 20869 - DNA, 201 bp, Homo sapiens
aaaaaaaaacaaaaaacaaatcgtctgatgaaatagagaggaaggaggagagggcgcttgggtcatcaaggaaagcttctttgaggaggaaatatgttggwtgacttaacaagccaggagaggccgggcgcggtggctcatgcctgtaatcccagcactttgagaggccgaggccgagacggcgccactgcactccagcct

SEQ ID NO: 20870 - DNA, 201 bp, Homo sapiens
agaatttccttagaataacagcaaaggaacttaaagtgttcagaaaaacaaagtgaggatggtaggaatcctttcgcctgaaactttggaaaaaggtggaygaattacaactaagtcatcttttagctttgctttcttgatcttccttcaaagtttatgatacctaaattctctcttcaactcataaaatgtgttttatgg

SEQ ID NO: 20871 - DNA, 201 bp, Homo sapiens
ctccaggagtagatggagctctgcaatcaggagtctccctagaccacagtgaacacagaggtggttttaaataggcctttgagcaatgccagtggctaccygcccccaccaccccttggctcaatacagagagaacaggcaaaatctcccatttctggctgtctcctaagggttgggcttctaaacagcctgcatctggga

SEQ ID NO: 20872 - DNA, 201 bp, Homo sapiens
gtcgtgagttcaagatcagcctggccaagatggtgaaatcccgtctctactaaaaatacaaaaaatttagctgggtgtggtggtgggtgcctgtccctagmtgcttgggagtttgaggcagagaattgcttgaacccgggaggcagaggttgcagtgagccaagattgcgccactgtactccagcctggcgacagagcgag

SEQ ID NO: 20873 - DNA, 201 bp, Homo sapiens
ctgagattacaggcacgcgcgccatcacgcccagctaatttttgtatttttagtagagacagggtttcaccatgttggccaggctggtcttgaactcctgwccttgtgatctgcccacctcggcctcccaaagtgctggcattataggcgtgagccactgttcccagcctgctaatagcttttaaaaaggaatattgattt

SEQ ID NO: 20874 - DNA, 201 bp, Homo sapiens
gatgtatttatgttaaacatctcctgaaattagcaatgcgtttgaaagaagtacttcagtactgaaaaattagctaacagctcccagtttctccctggaasggcttcgtctacccactttatcagttgctgactgagtgttgggcttctaactagcctgcactgggaagcagaaggagcagggaaacgacagacttacagg

SEQ ID NO: 20875 - DNA, 201 bp, Homo sapiens
tgcaggggagccccgccctgctcaggtggcctcatctcccctcccagctggtggtgctgccctatcagatgctgctgcatgcggccactcggcaggctgcvggcatccggctgcaggaccaggtggtgatcatcgacgaggcgcacaacctgatcgacaccatcacgggcatgcacagcgtggaggtcagcggctcccagg

SEQ ID NO: 20876 - DNA, 201 bp, Homo sapiens
gattgcgccactgtactccagcctggcgacagagcgagactctgtctcaaaaaataataatgataataataataattttataaaatacagggagtataaasaaaaactgatcacccaaattggagaaccaaattaatagttaatcttaacctaattaggagttaatcctacagggccaataataggcagagtgaagaaatc

SEQ ID NO: 20877 - DNA, 201 bp, Homo sapiens
agtgattctatcagaaaatatcatttttcactcactggcttttgaaacataattagattttctgagcaactgttgcttataattggaatttgcttattatmattttaacagagaaaaacactgacctatgtaattttagtgcaattaaatttttctccttatgcctgtgtgtacctcatcaattcagcaaaagcaaaacct

SEQ ID NO: 20878 - DNA, 201 bp, Homo sapiens
ttgagatgggaatataagtccttttcttccaactgtttttaattgtagtatatcagaattgtagcataatcttttacagacaatatagttataaatttaayatgcagtttgagattgttcttaagttctcttctctaaaatgctatttcactgagggctgctttataattttaaattctactactattgtgtatagtgggc

SEQ ID NO: 20879 - DNA, 201 bp, Homo sapiens
tcctgcaggggagccccgccctgctcaggtggcctcatctcccctcccagctggtggtgctgccctatcagatgctgctgcatgcggccactcggcaggcygcgggcatccggctgcaggaccaggtggtgatcatcgacgaggcgcacaacctgatcgacaccatcacgggcatgcacagcgtggaggtcagcggctccc

SEQ ID NO: 20880 - DNA, 201 bp, Homo sapiens
gactacaggcgcatgccaccacacatggctaattattgtatttttagtagagacggggtttcaccatgttggccaggatggtctcgaactcctgacctcargtgatctgcctgcctcagcctcccgaatgctgggattacaggcatgagccacactgcacctggccgatgataaacctttgaaagctaaaaagcaaagaga

SEQ ID NO: 20881 - DNA, 201 bp, Homo sapiens
aatttaacataggtaaatctccaagacaggatgctgagtgaaaaacaaacagtgatttatagaatgaaacttatacagtttattatatgtaaatcacacawccacaaacatatacatctacacacattatttctaaagataaatggatggcaaagtactgaaaaatgttcaggggggtgacattaacctttaatgtgatgt

SEQ ID NO: 20882 - DNA, 201 bp, Homo sapiens
aaagaaaaattacccagtttcaggtatttctttatagtagtgcaagaatggactaatacaatgaaaacaccaaacatcaggctgggtgtggtggctcatgmttgcaatctcagcactttgggagcctgaggtgggaggatcacttgaggccaggagttcaagaccagcctgggcaatatagtgagacccaattgctacaaa

SEQ ID NO: 20883 - DNA, 201 bp, Homo sapiens
gctgaacaaatcttatttcagcaaatgacaaaataagatttgttcagcacatctcatgtgagtgctcacatagcgtgggctctgtggtcagacaaacactrggcacttctcttggtgttatcaccttaagctgtgtgccttggggaaagttactcaatttctcattccctccatttcctcgtgcacaaaatggcagaaaat

SEQ ID NO: 20884 - DNA, 201 bp, Homo sapiens
tttaataatttaccagccttgtatttcttcacattcttgtttcagagatagtttgaaaatagtccaaaaggaagataattccaaattcctgaggattttcmccaagtgttgagtgtactatataaagtgataacagaggattatgtggatgcataacccagtggcaacgaattccattttggccgtgaactactgaacaga

SEQ ID NO: 20885 - DNA, 201 bp, Homo sapiens
aatggcttgaacccgggaggcggaggttgctgtgagccgagatcgcgccattgcactccagcctgggcaacaagagtgaaactccatctcaaaaaaaaaaagagagagaaataccattacatgtcccttgcttctaggagctaccttgatcaagtttgccgaagaaggaatcatatgcctcccctttgtttagtttactat

SEQ ID NO: 20886 - DNA, 201 bp, Homo sapiens
ggtggcagtttcccttgattttattgagacttttaagttggtccctttacatttttatttctagttcacaatccaaaaaaaattattaatcagaattcagktttgggaagacgaggggtcatacggtttgtattttcacatgtgaatgtaggaattatgttctctatacctagcaaaggggtctcgtgtctctgagtccag

SEQ ID NO: 20887 - DNA, 201 bp, Homo sapiens
cactgtgctttttctagctattccttagcttaagcagctgaaaccagcatgtagacaagccgataaatgtcagaatgacctgggtcatagattttaattgkgagttcaaattctttggtaaagcaaatccgatcttcataagggtcaggaaattccttaactatggcccataatttggccttcgactagggttgatagaga

SEQ ID NO: 20888 - DNA, 201 bp, Homo sapiens
ttttttgtttgtttgtttgtgtgtgtttttttttttgagatggagtctcgctctgtcacccaggctggagtgcagtggcgcgatctcaactgcaacctccrcctcccgggttcacgccaatatcctgcctcagcctcctgaggagctgggactataggagcccgccaccacgcccagctaattttctgtgttttttttagt

SEQ ID NO: 20889 - DNA, 201 bp, Homo sapiens
tggagtgcagtggtataatcacagctcacagcagcctcgaccttctgggctcacaggatcctcccacctcaacctcccaagtagctggggctacaggcacrcaccatgtctggctaattttttttttaataggaatgaagtctcactatgctgcctaggctggtctcaaactcctgggctcaagcaatgctccagcctcag

SEQ ID NO: 20890 - DNA, 201 bp, Homo sapiens
cagcagcagcggctgggtgtgtttggtgggaggtggcacctaccaccccgtggttcccacccaggggagccaagtcctcttccttggctgtagtcctgccragggtctctcctcagttttgagtctcaaggtgaagacgcggtttgtgggtggctgaggggttgctccatgggggctccctccctcccttccttccttaga

SEQ ID NO: 20891 - DNA, 201 bp, Homo sapiens
tttacacaatgccactgtacggattgtagagttcttgggctggcataattttatgtgaccaaaatttggcaaagggtcttatcagtttgaggagagattaktggagcattgaatttcagagtttgaaatgacattagagattatctggtccagtgattctcaaccagggagacatttggttatttccggagatatttttgg

SEQ ID NO: 20892 - DNA, 201 bp, Homo sapiens
taaaaacatagtatatatgaatatcattttcatatatcttgctacttccttagccttcttaattataaacttgagtcagctattatttactgagtacttayattttagatgctgttctaagtgctccacatgtataaacttgcttagtcatcacgagtgggaactattaccctcatcgtacagaagaggaagcagaagccc

SEQ ID NO: 20893 - DNA, 201 bp, Homo sapiens
tctcttgccctttggttatatctgcccctgctgggggcagggatgtggggcttgggggcatctcctgtggtgtgcctggggtgtgcagcccctgattgtcrttgtggtgcccatcaggaccctggacagaagaagggaggactcagtgccagggcaatagggaggccccccagggacgctagtgctgtgacatgtgtcaga

SEQ ID NO: 20894 - DNA, 201 bp, Homo sapiens
tttgagctggaggtcagcagggccttctccacacaaggaactgttggtgcccatttattactcacctgggaaaggacctgatcgttgccattggcagcatrgttcaatggctgcaaatggatctgatggagagcgtgtggctttgggaggagcgtgccgccttccacagtgagcagcgaggctgggacctgcagggatgag

SEQ ID NO: 20895 - DNA, 201 bp, Homo sapiens
tccttacctgtttccccctatttttcttacttcctttccattttattttgtatgcctctttgtaagctgccttaaatgctttttggaatgaggcaggatayacattcaataaataaaatatgtctgagccacttatgaacaaaaccttcttgggccagagcctaaacattacttatataaaaagacctgattcctcacctt

SEQ ID NO: 20896 - DNA, 201 bp, Homo sapiens
tctcagttcagagctgttttactccttctccctgggacatttggcaatgtctggagacatttatttatttatttatttatttatttatttatttattttttatttattttttggagccagcgtttcgttctgtcacccaggctggagtgcagtggcgcaatctcggctcactgcagcctctgtttcctgggttcaagcgat

SEQ ID NO: 20897 - DNA, 201 bp, Homo sapiens
aaaatgtagttgcacagtatttactgcctctagataatagtttattaaatactctcccagactatataactgagaaaatacactaacaaattcccctcccmcttttctaaattaaaaacatagtatatatgaatatcattttcatatatcttgctacttccttagccttcttaattataaacttgagtcagctattattta

SEQ ID NO: 20898 - DNA, 201 bp, Homo sapiens
tcgggaggctgaggcaagataattgcttgaaccagggagtcggagattgcagtgagctgagatgcgccactgtactacagtctggtgacagagccagactstgtctcaaaaaaaaaaaaaaaaaagtatttgagttgatgctctgtcaaaactcatttatcaagaggatttggttttaggcaacgaaaccttgcctcaaac

SEQ ID NO: 20899 - DNA, 201 bp, Homo sapiens
tacaaaaaaattagacgggcgtggtggcgggcgcttgtagtcccagctactcgggatgttgaggcaggagaatggcgcgaacccgggaggcggagcttgcrgtgagccgagatcgagccactgcactccagcctgggcgacagagcgagactccgtcacaaaacaaaacaaaacaaaaattagctgggcgtggtggtgcgt

SEQ ID NO: 20900 - DNA, 201 bp, Homo sapiens
ggcctctaaggacaaaagtgaatccactaacactctaggaagcagtgtgactactggaagaaagacattcaagaggtaaaatggattttagaaggtcacasgagccaattgtcagtgtttgtactcttcatcaaaattatttttaatgagctccctgacaactgcgcatcctgacagcacgggtgaagtggctcatctggg

SEQ ID NO: 20901 - DNA, 201 bp, Homo sapiens
aatccctaacaaattactgatgtctgtctagttatggaatcataagtgtcatcaacagatgaacagataaagaaaatttggtatatacacatagaattccrttccattttaaaaaacaagaacattctgctatttatggcagcatgattaaatctggaggagattatgttatgtgaaataagccaggtataggaaaacaaa

SEQ ID NO: 20902 - DNA, 201 bp, Homo sapiens
tgcttgaacctgggaggtgaagtttgcagtgagccgagattgcaccactgcaccccagtctgggtgacagagtgggactccatgtcaaaaaaaaaaaaaaagggaaaaagaaaacaaatcacacagaacatgaaggggctgctgaacaatgcagcaggaatgtaaatacattctctttcgggtcagacgtttggccagacg

SEQ ID NO: 20903 - DNA, 201 bp, Homo sapiens
ggcagaggttgcagtgagccaagattgtgcctctgcactccagcctgggtgatagagccagactttgtatatatatgtgtgtgtacatatatatatatatrtgtgtgtgtgtgtatatatgtaatacatatatattacatacctaatatatataatatatatgtaataaacatcatgtatatatgatgtttattagccctc

SEQ ID NO: 20904 - DNA, 201 bp, Homo sapiens
ttgagggacatgttacaaaattcaaaacatcacataatccaaaagacaaaattttaaactgtcaacatcatgaaagacaaagaaaaactaaggaattgttrcagattgagaccaaagagacatgacaactaaatgtactgtgtgaacctagattggatcccagaccagagaatcttctttttctataaagaacattattgg

SEQ ID NO: 20905 - DNA, 201 bp, Homo sapiens
tccttccctgtggccatagtggaagatggaggcttcacagttcctgagactagatgtcttcagttcaagcagtcagcagagacttgtttttttgttgttgktgttttttgtttttgttttttgagacagagtctcgctgtgtctcccaggctggagtgtagtggcgcgttctcagctcactgcaacctctgcctcccgggt

SEQ ID NO: 20906 - DNA, 201 bp, Homo sapiens
agttctttaaagaccattgatatgtaaatcaatgtgtaagaagatatcgtttaagaggggttatggcacatggtggaaggaatgctgctttgcatttatcygtgtgaagtaatctgcctgtgcatctgaagaaacagcaggccccgccgcaagtgatgaagcagttctgtggagaaacccatttacaccagtttccagatg

SEQ ID NO: 20907 - DNA, 201 bp, Homo sapiens
cttagcaatattaaaacctcaggcaggtggcttgttggtctgagcagcctctaaatttgtacaaaagcctggtggctggctgggttggtaaaaatggcagytgtcctgcatgctgacattgggagttactctgcactgctgcaggctgtcctggcacactgcaggccgggcatcatttcatggtggaggacgtcactcagt

SEQ ID NO: 20908 - DNA, 201 bp, Homo sapiens
ctccagggaagaatctgttccatgccttacttttagcttctggtgttgccagtaaatgcttgttgatacagcactttaatcactgtctccattgcctcatrgcattcttcctgggtctgtctccgtgtctcttctctgcttctcataaggacagcagtcatattggattgagtccatactacttaatatagtttgaatatt

SEQ ID NO: 20909 - DNA, 201 bp, Homo sapiens
gaggcaatggagaagtgtgtgtttgggatttaaagaacctcaagaaactgtgatattatgaaatatatatctggtcttcatcttgattcctggcataaaastcctataattcttggaatccaaaattttaaatctaaattgcgactgtaagaaaataacgtggtgctgccttgtgctgcctttcattctaaatggattttg

SEQ ID NO: 20910 - DNA, 201 bp, Homo sapiens
aagttaccaaccacatcctgcggctagaattaagctccactgtggtattacttgaacctaaacttcacactgtgaaatagtactgtataaagaccacatayctaaattggaaactcaaagtttaaagaaaaaaaagactctcacactccttaattgaggggaagttaaagaatattgaccattacattcagttggttataa

SEQ ID NO: 20911 - DNA, 201 bp, Homo sapiens
ctgccttaagaacccattgtttgagtcacttcttatggtccttatcacttttgatctcgtgttagagcaaaatgcacactgccatcctctccactagtttrtaagctcttgaagcagggctgagtcagactcatccatagatcccccgaagtgcctggcactctccaagtgaatagaggcacttaataaacttcagtagaa

SEQ ID NO: 20912 - DNA, 201 bp, Homo sapiens
atggctcacactgggctgacactgctgaccttacagccttgcaaatgatgtcatcaccatacgttcttcactcatgacgtggcatggatttgaccaaaggygtgatcatgtttaaaataaaaaccctttatgagagttcccttgtgcaatgcttccagtgtttaggcactgctgggtcaattttctcattattcacataag

SEQ ID NO: 20913 - DNA, 201 bp, Homo sapiens
ttgacctatatttggcattttttgactcttagatttattgtggaaggaaggctcatatggattcatttctgagtcagatcttaccaccttttggcatcaakaatttagcatcagagtttccagaaattatgtatgccacttgatatgtcagatgtcttagctagtctgggctactaaagcagcataccaaagactgggtgg

SEQ ID NO: 20914 - DNA, 201 bp, Homo sapiens
cacacatgttttacaatcaatttgtacagttaatacaattgtcatagtggtcctgaggtgacgtacatccttcagcttatgaagataacacgattaagagwttaaagtaagacaggcataagaaattataagagtattatttgggaactgataaatgtccatgaaatcttcacaatttatgttcctctgccacagctccag

SEQ ID NO: 20915 - DNA, 201 bp, Homo sapiens
gttgcaggcagctgggccaaaccgcctgccctggaccctagagctcatcagattggcacctgctcttcccacacaggcaaacacggatggtgccactggcygaaccccgccatcagccttcacacagttgagctcaccaggaaagcagaatctctaaaactccagctgcagtgcaagcccagcccccagggacaccgctgt

SEQ ID NO: 20916 - DNA, 201 bp, Homo sapiens
gcatgcaatatgatcactggattatggtacagctttggctaaatcacttacatttttcattcttattaatttggagacatgcacgtgccaacccaagtacrataaatggcacactgtttattgcaagcactaaatagatacatcgaaggttatgttctcaggcatccctagcttataagtgtacattatgttgatttgata

SEQ ID NO: 20917 - DNA, 201 bp, Homo sapiens
gacattgttagagaatgttctcggttaatttactaaatctccctgagcctaagattagacattaatcaaaatgggaatactgcattagttctatagggttkattaatatgagaataaaattaaataatagatatgggaatactcagtagagcaagtgtcaaatagtagacctttagcaattgttatttatttttaaaagtg

SEQ ID NO: 20918 - DNA, 201 bp, Homo sapiens
ttgtgccctgacagcccttctgatggctctggagcctctggctgcctgccttcctactcaccaggtgcaacttgttaattacttgcatgcaatatgatcaytggattatggtacagctttggctaaatcacttacatttttcattcttattaatttggagacatgcacgtgccaacccaagtacaataaatggcacactgt

SEQ ID NO: 20919 - DNA, 201 bp, Homo sapiens
aaaatgtaggatccactggcttatatcttctgtgtaggcatcaaaacagatggtggtggggttgttgggaagatggtagcagacagggttgcttaaaaatrtaagacttccttgatgtccaagaatactgagatttatatgattagaaatttctatacaaagctggaaacagtggagcatgttcccacatagaagcacagg

SEQ ID NO: 20920 - DNA, 201 bp, Homo sapiens
taaaatgtttctttttagctttacaaatgcactgcttgttaacatctatgaattcatgtacttgcttttccatgctatagacgggtaacttccagggctgytgtgtggcacaagtttggggagtagggatggaaatggtacccttaaagttatgcagtgcagacctgcacaacctgacacaggggccttgggtcagtccat

SEQ ID NO: 20921 - DNA, 201 bp, Homo sapiens
actgagcagagagactgatgatctgaaaggacaccaggtaaaatgtttctttttagctttacaaatgcactgcttgttaacatctatgaattcatgtactygcttttccatgctatagacgggtaacttccagggctgctgtgtggcacaagtttggggagtagggatggaaatggtacccttaaagttatgcagtgcaga

SEQ ID NO: 20922 - DNA, 201 bp, Homo sapiens
aggcagggaaaagcgtatgttttttccttgaccttgaaaatttagcttgggctttctttgtacaaacatgaagatcctaggagaagcccaatcaattttakagagacaagtggatgaagatagggattaaaagaattgtgcttgactgagcagagagactgatgatctgaaaggacaccaggtaaaatgtttctttttagc

SEQ ID NO: 20923 - DNA, 201 bp, Homo sapiens
tagatggtagaagagagtcaactgtattttttcatagaaaacaattcatttttccccacaagcagtatataaataacctatataatcctatgaatatcctrtgtagaactgtcatcatacctataccaaataaacacatattgagaaagtataggatcttagatctgtaaaaactttgaaatactatttaatcagttaaat

SEQ ID NO: 20924 - DNA, 201 bp, Homo sapiens
caggagaactcccctttataaaaccatcagatctcatgagacttactcactatcatgagaatggcatgggaaagacctgtccccatgattcaattaccttycaccgggtccctcctacaacacatgggaattatgggagctacaattcaagatgagatttgggtggggacacagccaaactgtatcaactatcatacctct

SEQ ID NO: 20925 - DNA, 201 bp, Homo sapiens
cacggcactttaaggccatcttctaagttaagtcctctgaaataatagccatgtagttcgctggaatgtagctgactatacacctagatggtagaagagartcaactgtattttttcatagaaaacaattcatttttccccacaagcagtatataaataacctatataatcctatgaatatcctatgtagaactgtcatca

SEQ ID NO: 20926 - DNA, 201 bp, Homo sapiens
aggccagcaatttgtgggaaaaaagcgataatggattttaatttaatttaaaaggcatggcaaatgtacctgcttcttttaaagtgctgcatttctgatayatagatgtccgcaaggtgggtgcccttacattatacagccttatcttatcaatccgagtgtcaaagacccgaagcaaaggatctttctcttcccactgag

SEQ ID NO: 20927 - DNA, 201 bp, Homo sapiens
tacattgttcctgtactgcactgggtctccttgtgctgaactgcatgggataggccatttccatacaatctcatcctctgaataaggaaccatgatgctcmtaaagacatactaaatatagatcttgggtaatattggagtcagtgctggtcatcaatgattttctctgtgatgatagagggggtccactatgaatgatag

SEQ ID NO: 20928 - DNA, 201 bp, Homo sapiens
tggcatttttgttgaactagggatattatctcacttataaacactttaaatatagtagaatactttaaaatagtagaaatcaaattcgagggtagacgtargagcaaaatggggatttatattagacaccagtatataatgtacataatattatgtcaggaaagctgataattccctcacatattagttcttttcctaata

SEQ ID NO: 20929 - DNA, 201 bp, Homo sapiens
tccaaaaaaaaaaaaaagagttctgtaattgtaaaaatgtgacataggcattctctaatgtgcaatgaatagtcatttttaagcatttcatacattgttcstgtactgcactgggtctccttgtgctgaactgcatgggataggccatttccatacaatctcatcctctgaataaggaaccatgatgctcctaaagacata

SEQ ID NO: 20930 - DNA, 201 bp, Homo sapiens
tatgaccatgcagctttccactgggaacttttacaggttgctgctatttttataaaaatgatagactgtaatgttgccggggacagtggctcatgcctgtwatcccagcagtttaggaggctgaggtgggagaaacacttgaggtcaggagtttcagaccagcctaggcaacatggtgaaaccctgtctctactaaaaata

SEQ ID NO: 20931 - DNA, 201 bp, Homo sapiens
aaacacttctctaagaaatttgtatatttttggaattcagtcaacattttttggataaatgaatgtgaacactttaggaattgcttattccacaaatgatytcttaccaagatttccagaaactattttcatattgaaacaaaaacaaaacaacacaccactctgcttcttcccacagagttctgagacagcttttacata

SEQ ID NO: 20932 - DNA, 201 bp, Homo sapiens
gtaaccatctgtgaatggtaatgccataaggtagagagactaaatctaattgatatgcaaaaaggagaatttcagctgtccagctatggagattcaaattsaacctttaataggctgaggatttcagctaaatttttaaaatcatgatatctagttcaggcactcatcttttaggtttctcacagattaaagtacagccgt

SEQ ID NO: 20933 - DNA, 201 bp, Homo sapiens
agcctgggtgatagagccagactttgtatatatatgtgtgtgtacatatatatatatatgtgtgtgtgtgtgtatatatgtaatacatatatattacatayctaatatatataatatatatgtaataaacatcatgtatatatgatgtttattagccctccaatgcttgaaatcaggggttggaatcaaggctaaccaact

SEQ ID NO: 20934 - DNA, 201 bp, Homo sapiens
agcttgggaggatgaggctgcagtgagccatgattgagccactgcactctgcactccagcctgggcaatagagcaagactgtcttaaaaaaaaaaaaaaagaggtatttctcttttaggggagaaggtttacctgggaggcattatgcagggtgagcagtaatctatctggaggacacacttgggtttggtgaaggtgaca

SEQ ID NO: 20935 - DNA, 201 bp, Homo sapiens
aaaggcttcccaggggacaggcttgaccccgtgtgtctgggaactgcccctttttctcatacttggtgcaggctttgccttgttcatggcaggcttcctgrcaggaggtgaaggagcaggcagggtgggactccagcagctcctcctgctcccagaggccacctctttcttcagggactgaggtctgatttcagctgagca

SEQ ID NO: 20936 - DNA, 201 bp, Homo sapiens
tgaagagaagcagcaattggtgaggcccctgtccccaagccccatgctcctccagatcctgaacataggagttgtcacggagatggagagcagagcatgcraccccagctcctgggcctctctgaaaggcttcccaggggacaggcttgaccccgtgtgtctgggaactgcccctttttctcatacttggtgcaggctttg

SEQ ID NO: 20937 - DNA, 201 bp, Homo sapiens
aactctggatctcatacacctcataattcctccaagatggctgaggtctggggcttctgcaagaggaaagaagtcaaggtgagctgaagatggggcctcaygtccttgtcaaaggagaggggagttggagtcagagccggcccccaaaagacccatgcccagcacagtcacttcccagctctgcttgtcctcctccttccc

SEQ ID NO: 20938 - DNA, 201 bp, Homo sapiens
ctctttctcccacccaatgagtctcctggcattgggccctttgccgggtctgcaattgcggtagctgtttctcaagactgcctttatgttaaacaaagaarcagttattggctttaagtccaaagggttcttctagttttttgctgtgtcactgtctctaaaacagaggaggaaacaaggcctccccaggtccttttcctc

SEQ ID NO: 20939 - DNA, 201 bp, Homo sapiens
gctccactgtcctgccagactgcctccaaaccttacaagctgtcagtcttactggggaggttcttttttacaaagggtgggggtgtcacacaaaaagagcsttcagctgctctatgcatctgtctgcaatatgtcacctcagagacctcacccccatagcaccatcggagaggagctgtgtcctcatatgtcttcataact

SEQ ID NO: 20940 - DNA, 201 bp, Homo sapiens
aggtgtctcctgtagcagacagctccactgtcctgccagactgcctccaaaccttacaagctgtcagtcttactggggaggttcttttttacaaagggtgrgggtgtcacacaaaaagagcgttcagctgctctatgcatctgtctgcaatatgtcacctcagagacctcacccccatagcaccatcggagaggagctgtg

SEQ ID NO: 20941 - DNA, 201 bp, Homo sapiens
tttcgcctacaacaaataatacatagttaatatctagaacttttccaaaagcatgtcatagttttctatttattttatagtcctactactgactgataatrttgagatctgattcaatttctgcctctaaccatctgtattgtaaaatcccgatggacaactaaaaaactgttaacaacagagcagcatttaaaacttcag

SEQ ID NO: 20942 - DNA, 201 bp, Homo sapiens
cacctactagggggtgctgaggttggaggatcacttgagcctgggacgttgaggctgcggtgaactgagatcccaccactgcactccagcctggtgacgaygtgatagcctgtctcaaaaaataataataataaaaaaattcaggtagtactggaaacctcgaagattccaagattagtcagatccttaaaaggtatacct

SEQ ID NO: 20943 - DNA, 201 bp, Homo sapiens
tcctggtgaaccctccctgtatgaccatgcagctttccactgggaacttttacaggttgctgctatttttataaaaatgatagactgtaatgttgccgggsacagtggctcatgcctgtaatcccagcagtttaggaggctgaggtgggagaaacacttgaggtcaggagtttcagaccagcctaggcaacatggtgaaac

SEQ ID NO: 20944 - DNA, 201 bp, Homo sapiens
aaatgtctcctccctcatggaccagccatgtgaccttggcaaagtaacttaaccgctcttaccttgggtgtcatctgctgtggagctataaaatgaaacartcatcacttccttccagggccccatgagaatcaggtgaggatgacacaggggaggcaggtacacacggccacacacccgaggggactcagcagggggcag

SEQ ID NO: 20945 - DNA, 201 bp, Homo sapiens
aattctaatggcttttgctctattttcctaattaagagctgttgatgaaaacctttaaataagagaggacaaaaaaagacatctcatatcataccccactrtactttcactactttgaatttggcatttttgttgaactagggatattatctcacttataaacactttaaatatagtagaatactttaaaatagtagaaat

SEQ ID NO: 20946 - DNA, 201 bp, Homo sapiens
cggtggtggatttttttcccttagccgtcattttggatatttgattaattatcgaccattatatttccttcttcttgttagttacgatttactaagaagaatttttatgctattttaaagttaaatgatctgtgattgtaaaatcattcattatttacctcaactgctcacttaattttttaaaaacatcttcaaggctcc

SEQ ID NO: 20947 - DNA, 201 bp, Homo sapiens
agtttgagaccagcctggctaacatggtgaaaccccatctctactaaaaatacaaaaattagctgggcattgtcgtgggcacctgtaatcccagctactcrgcagtagaattgcttgaacccgggaggcagaggttgcagtgagctgagatcatgccactgcactccagcctgggtgacacagcgagactccgtctcaaaa

SEQ ID NO: 20948 - DNA, 201 bp, Homo sapiens
gcggtggtggatttttttcccttagccgtcattttggatatttgattaattatcgaccattatatttccttcttcttgttagttacgatttactaagaagaatttttatgctattttaaagttaaatgatctgtgattgtaaaatcattcattatttacctcaactgctcacttaattttttaaaaacatcttcaaggctc

SEQ ID NO: 20949 - DNA, 201 bp, Homo sapiens
tagcagtctggactggttttttgttctatgtatattttcaatttccacttatttatttctccatctctaattgtcatatatttagagatacttcactgacrtttcctaaattccatgtctttgagttccttagtttctctaattctaatggcttttgctctattttcctaattaagagctgttgatgaaaacctttaaata

SEQ ID NO: 20950 - DNA, 201 bp, Homo sapiens
ggcggtggtggatttttttcccttagccgtcattttggatatttgattaattatcgaccattatatttccttcttcttgttagttacgatttactaagaagaatttttatgctattttaaagttaaatgatctgtgattgtaaaatcattcattatttacctcaactgctcacttaattttttaaaaacatcttcaaggct

SEQ ID NO: 20951 - DNA, 201 bp, Homo sapiens
aatgacaatatgcagccatttgtatattgtctgcatcccaaattcaatgtaaacttcacgaatataaagatttacctgcattattctcactgtatttctarcatctgacatgacaggcacattaaatgaattaaaagacaaagcaaaagaaaataatcacctcccctcttttcccaatcagtttaaaagcattaagagatt

SEQ ID NO: 20952 - DNA, 201 bp, Homo sapiens
gtcaccacacttccagcctgggcaaaagagtgagactctgtctaaaaaaaaaaaaaaaaaaaaaaaaaaaacaaaaccacccctatctatcctatctatcctatctatctatctatctatctatctatctatctattggtctatctatctagataaaaatagcagtcaactaatttttcaaattaaaaatgctttattgtt

SEQ ID NO: 20953 - DNA, 201 bp, Homo sapiens
taggaggccaaggtgggcgggtcactagaggtcaggagttcgagaccagcctggccaacatggtgaaaccccgtctctattaaaaatacaaaaattagccrggtgtggtggcaggcgcctgtactctgagctactggggaggctgagacaggagaatcgcttgaacctgggaggcagaggttgcagtgagctgagatcgtg

SEQ ID NO: 20954 - DNA, 201 bp, Homo sapiens
ccaccacgcctggctaattttgtatttttaatagagatggagtttctccatgtttgtcaggctggtctcgaactcccgacttcaggtgatccgcccacctyggcctcccaaagtgctgggattgattacaggtgtgagccaccgtgcctggccacttcatttctttaaagtgaaatgaaactagttgagagatctagctca

SEQ ID NO: 20955 - DNA, 201 bp, Homo sapiens
cggagtacaggcgcccgccactacgcccagctaatttttctatttttagtagaggtggggtttcaccatgttggccaggctggtctcaaacccctaacctyaaatgatccatccgcctcagcctcccaaagtgctgggattacaggcgtgagccaccgcgcctggcctggacacccattttgaatagcacttaccacagat

SEQ ID NO: 20956 - DNA, 201 bp, Homo sapiens
gtctgtagacaaaaagcaaaatgttggggtttagtttcttcaggtgaataaaatgttacttgcatctcctcattgtcacagtgttcgtattacatacttcgtgtgtgtagttttggcatttaaggaaacagagctaaaaaaaaaacaaaggacaataactgcatcaacaacatgttatacaccagaggaaatgcggcgact

SEQ ID NO: 20957 - DNA, 201 bp, Homo sapiens
tgtctgtagacaaaaagcaaaatgttggggtttagtttcttcaggtgaataaaatgttacttgcatctcctcattgtcacagtgttcgtattacatacttcgtgtgtgtagttttggcatttaaggaaacagagctaaaaaaaaaacaaaggacaataactgcatcaacaacatgttatacaccagaggaaatgcggcgac

SEQ ID NO: 20958 - DNA, 201 bp, Homo sapiens
aagatagccctttaggcatgcacaactgtgaaagaaagaaaaaaaaaaatcagaatgcagtacacaaataacttcaagccagaaataaatgttgtttttttaacataacaggattcaaaaagacaggttttatccagatttaatattcgcaatagccttaaattagaaatatattataaattcctcatacacatgtatata

SEQ ID NO: 20959 - DNA, 201 bp, Homo sapiens
gaagacagcttgagcacgggatgtcaaggttgcagtgacccatgattgcactactgcactccagcctgggtgacggagtgagaacttgtctaaaaaaaaaagtgaatccaaatatttgtgtaaccttttttgaagaatctatcagtgtacaggtactattttataatttccttcaattcactatccattaagacatagcat

SEQ ID NO: 20960 - DNA, 201 bp, Homo sapiens
ccttgggaaaaagtgttcctactctctgggtgagcgtctggtccgaatcgttggcttggagatgattttacgggctctttctggagaacaaaagtaaaacsttacagtgttccgatgagacacagtaggcagtacttgggagggtcttatagaccccaccctgtggaagtgggtctcaacattacacaaccccctctcggg

SEQ ID NO: 20961 - DNA, 201 bp, Homo sapiens
tggcctgggcactcccttggcctctgccatgtaagcctgtacatagagcacctcataacagcagaactcgcttccccagtttaaggaatgcaatggagacygagagagacagagagagagagagagagagagagagagaaacaagagactgagagattgggggaggaaaaacagaagagagtgaacagcagaaaaatggca

SEQ ID NO: 20962 - DNA, 201 bp, Homo sapiens
tggctattctgacgtcatagcatactggattactggtgtgtttgtggtgatgctggtgtaaacaaacctgctgtgctgccagtcatataaaagtatagcakgcacacttatgtacagtccataatactttataatgataataaaagactatgttactggtttatgtacttactctattctttgttgttattttagagtata

SEQ ID NO: 20963 - DNA, 201 bp, Homo sapiens
agtcactgtgtggggagaatccaaatgcctcactgaggtgacatttatgccatggccagaatgacaatgggggaccaacgctgcccaagtcagggacagcrgtgtcagaaagaagccaccctggggcacagcctcacaggtggacctgagtttggcagaggaggttagaaaggggacagtgtggctgcagggaggctgggg

SEQ ID NO: 20964 - DNA, 201 bp, Homo sapiens
ggaggccgaggcaggtggatcacgaggtcaggagatcgagaccacggtgaaaccccatctctactaaaaatacaaaaaattagccgggcacagtggtgggygcctgtagtcccagctactcgggaggctgaggcaggagaatggcgtgaacccaggaggcggagcttgcagtgagccaagatcgcgccactgcactccagc

SEQ ID NO: 20965 - DNA, 201 bp, Homo sapiens
atgacgggagggagggccggggagtcactgtgtggggagaatccaaatgcctcactgaggtgacatttatgccatggccagaatgacaatgggggaccaaygctgcccaagtcagggacagcggtgtcagaaagaagccaccctggggcacagcctcacaggtggacctgagtttggcagaggaggttagaaaggggacag

SEQ ID NO: 20966 - DNA, 201 bp, Homo sapiens
ggtgcccacggagctttgctggagcaggtggagctccgggatagcctcctgagaaaggcacctcctgttagtatcaatgatccccacattatgaggacaayggaagcaggaaggggtttaatcactttctccccgtgctgacttattcactcagcgactctgccctgagcactcaccttgtgccaggtggcctggtgggct

SEQ ID NO: 20967 - DNA, 201 bp, Homo sapiens
ggctggcatagcgtgagaagcagaggttccaagccagacagccctgggtttaaatgtctcctccctcatggaccagccatgtgaccttggcaaagtaactkaaccgctcttaccttgggtgtcatctgctgtggagctataaaatgaaacagtcatcacttccttccagggccccatgagaatcaggtgaggatgacacag

SEQ ID NO: 20968 - DNA, 201 bp, Homo sapiens
gatttctttgattactagtgatgttctgcattccttctcatgtttattgattgctaatatttcatgtacaaacctagttacagcaacaaccagcaagccayaactctcaaacatccttgccatcttagtgccattgctgtaatatataaaacacacattaaaccacagcagttaatattgtgctcgtggttaataccacag

SEQ ID NO: 20969 - DNA, 201 bp, Homo sapiens
aggcagctatagttcactttcagttctgtatagcttttattatatgcgtctatatatgcaatatcatattttaggacttttgtatatatatatttcatgtmttctttttattattgatgtacatgcgagttgtttccagtttggaaaagtgctaaataatgatgtattgtagaaaagagaaaaatagtctaaggagaaact

SEQ ID NO: 20970 - DNA, 201 bp, Homo sapiens
aattttaatattttaattttaatattagtttaaaattttattaaatgaaatggtacagaataaactctgtcaggataatttattatatttgaaagtctcaygtgtatttctaaaggcagctatagttcactttcagttctgtatagcttttattatatgcgtctatatatgcaatatcatattttaggacttttgtatata

SEQ ID NO: 20971 - DNA, 201 bp, Homo sapiens
tgttgccataatttggatttctttgattactagtgatgttctgcattccttctcatgtttattgattgctaatatttcatgtacaaacctagttacagcamcaaccagcaagccataactctcaaacatccttgccatcttagtgccattgctgtaatatataaaacacacattaaaccacagcagttaatattgtgctcg

SEQ ID NO: 20972 - DNA, 201 bp, Homo sapiens
cttcatttcttttctttccttcttttcttttttttttcttttcttttctttcttttttttgcccaggctggagtgcagtggcacagtcttggctcaccgcwacctctgcctcccgggttcaagtgattctcctgtctcagcctcccgagtagctgggattacaggcatgcgccaccacgcctggctaattttgtattttta

SEQ ID NO: 20973 - DNA, 201 bp, Homo sapiens
tgagcactctaacacataagatatttgatagcttttcttattattttcttaatatggagttttagaagtgcagttactggtccaaagatatgcctttagtrcccttagccttagttcttaaggcttgtagtaccctttgcaaagaggcttttctcaaaggttttgacacgctatactccaccagtgctggagtagagggct

SEQ ID NO: 20974 - DNA, 201 bp, Homo sapiens
aggtctttgcagtgggtctcatatcattccacgtacactgaggcgcacttgttgccagagaccaaaaactttactgagcaccctttcacccccagcgcccmcttggctgggtctatttccaattcttttagtctctggggctgatgaaatgaagatgggagggtagggcaagagaaacaagaagagctagccaagaagata

SEQ ID NO: 20975 - DNA, 201 bp, Homo sapiens
cttcctgggttcgagcgattcctcgtgccttagcctcccaagtagctgggactacagacaagcgccaccacgcccagctgatttttgtatttttagtaaaracggggtttcaccatgttggccaggatgctcaaacccctgacctcgcgatccgcccgcctcggcctcccaaagcgctgagattaccggcgtgagccaccg

SEQ ID NO: 20976 - DNA, 201 bp, Homo sapiens
ggtctatttccaattcttttagtctctggggctgatgaaatgaagatgggagggtagggcaagagaaacaagaagagctagccaagaagatagaaaataaygattttcagctcactgccacctccacttcccgggttcccgcgatcctcccaccacagtgaagtggtgtcatttgcctgggaaaatacccaaggttcattg

SEQ ID NO: 20977 - DNA, 201 bp, Homo sapiens
cttacacgtcgctcagtaaatacttgctgattgactttcaaattcagattacttttacgctagcatacggtgggcacaaagggtttttttgtttatttgtktgtttgagacggagtctcgctctgtcgccaggctggagcgcagtggtgcaatctcggctcactgcaacctcctcttcctgggttcgagcgattcctcgtg

SEQ ID NO: 20978 - DNA, 201 bp, Homo sapiens
acacggacacacaagagatgagtaagagcagaggcttaataggcaaaagaaagagaaaagagaatagctccctctcctgcagagagaggggtgcccgagtrggtcttccagttccatggtgaggtgcacgggttttatagactggcttgaggaggcagtgtctgatttacatagggcccaaagattggttagaccaggtgt

SEQ ID NO: 20979 - DNA, 201 bp, Homo sapiens
agatgaaaaaaatcaaatatagtggtgaatgatacaaatttcttttctgagaggagcagcttcgcttcatttcttttctttccttcttttcttttttttttcttttcttttctttcttttttttgcccaggctggagtgcagtggcacagtcttggctcaccgctacctctgcctcccgggttcaagtgattctcctgtct

SEQ ID NO: 20980 - DNA, 201 bp, Homo sapiens
tcttttattatgcaaatgggttttctacctggccagagccatgttgcctgttccttactggacatgtggttgacaaagaaaagggaagatggagctgccaygttgaacatgcctagcccccaggtaaccttttcctattgtcacagctgccggcattcacccatgcaaggttccagcttgcttatctatgtctgcagctca

SEQ ID NO: 20981 - DNA, 201 bp, Homo sapiens
gaggagaggctgggggatcggtattgtagcaatgcaggagtcctgtcctgagtggctgctcagggtattgacatgccattttgataaatacatgaattaatgagtgagtttcgagagtagggggagagagaataactgggcatccccttctgtagatcctcagtcttctagtctcatctctctagaaggatattcacccat

SEQ ID NO: 20982 - DNA, 201 bp, Homo sapiens
gagtccccaccattccatctcatctgagttatctcactatctctgttcttccctcatttacatcatctgtcacttacctgttgacatgtgagttttgactyttgattgagatgctgacaccctccttcccttctaggaaaggaaaataaagggggaaggaaggtggagagggacaaaggagaggcgtgtggaggatgatag

SEQ ID NO: 20983 - DNA, 201 bp, Homo sapiens
ctggagtgcagtgagacaaacacagctcactgcagcctagacctgctgggtttaagtgatccttacatctcagcctcctgagtacctgggactacaggtgkgcatcaccacacctggctaatttttaaatttattgtagagacaacacttcactatattggctggcctggtctcaaattccttgcctcaagcgatcttctg

SEQ ID NO: 20984 - DNA, 201 bp, Homo sapiens
ggtctcttgcgctgtcacctaggctggagtgcagtgagacaaacacagctcactgcagcctagacctgctgggtttaagtgatccttacatctcagcctcstgagtacctgggactacaggtgtgcatcaccacacctggctaatttttaaatttattgtagagacaacacttcactatattggctggcctggtctcaaat

SEQ ID NO: 20985 - DNA, 201 bp, Homo sapiens
ttttttttttttttgagacagggtctcttgcgctgtcacctaggctggagtgcagtgagacaaacacagctcactgcagcctagacctgctgggtttaagkgatccttacatctcagcctcctgagtacctgggactacaggtgtgcatcaccacacctggctaatttttaaatttattgtagagacaacacttcactata

SEQ ID NO: 20986 - DNA, 201 bp, Homo sapiens
tttttttttttttttttttttttttgagacagggtctcttgcgctgtcacctaggctggagtgcagtgagacaaacacagctcactgcagcctagacctgstgggtttaagtgatccttacatctcagcctcctgagtacctgggactacaggtgtgcatcaccacacctggctaatttttaaatttattgtagagacaac

SEQ ID NO: 20987 - DNA, 201 bp, Homo sapiens
cacctgaacctggaggcaaaggttgcagtgagccaagatcacgccactgcactccagcctgggtgacagagacagactccatctcaaaaaaaaaaaaaaaagaagaagaagaagaagaagaaatatagaggagcttctggactggcaaatacattaaggtgctgggtaagtccaaggaaagcatagcagttctgcacccac

SEQ ID NO: 20988 - DNA, 201 bp, Homo sapiens
  misc_feature (1)...(201): n = A,T,C or G, or insertion/deletion polymorphism (see Tables 1-2)
atattatcctcagagttctaagagaaaaaaacttttaacatataatttaacatccaatgaactatttaagatgatagaatattatcctcagagtactaagnaaaaaaaaaaaacttttaacatagaatttaacatccaatgaactatttttcaaaaacaaggacaaaataagatctaatagagaaagctatctcaggaaag

SEQ ID NO: 20989 - DNA, 201 bp, Homo sapiens
tttaggttgattctgtgaatttgtgtgttgaagcatagcatagcatagcatttcgtatgcctaaaaatatggaaataataagtgcgtggctcaatgaattrtccaaagcaagtgcacccagtaaccagtacccataagaaacagaacatcgtcagccctctaggagttccctcatgttgtcatctcaggccactgcgctgg

SEQ ID NO: 20990 - DNA, 201 bp, Homo sapiens
tgtatttgcaccacattttctttatccagtcttccatttatgggcatttaggttgattctgtgaatttgtgtgttgaagcatagcatagcatagcatttcrtatgcctaaaaatatggaaataataagtgcgtggctcaatgaattatccaaagcaagtgcacccagtaaccagtacccataagaaacagaacatcgtcag

SEQ ID NO: 20991 - DNA, 201 bp, Homo sapiens
tatttcttgtgaggatttaatcctctgaataactatgaaatgggaagcataattaactccttttacagataatgaacctggagcttggagagttagtaccrtggccaagatctctgagataggaagtggtgatacccaggacaggaatctagatgctacgatgccagagtcttgaaccaacccctatgcctgctggccttg

SEQ ID NO: 20992 - DNA, 201 bp, Homo sapiens
aacatgaagtcccacaagagctagtatttcttgtgaggatttaatcctctgaataactatgaaatgggaagcataattaactccttttacagataatgaamctggagcttggagagttagtaccatggccaagatctctgagataggaagtggtgatacccaggacaggaatctagatgctacgatgccagagtcttgaac

SEQ ID NO: 20993 - DNA, 201 bp, Homo sapiens
acaacatctttgggttgagcctcatgcttctccttcctttaccacaggtcatcatctgtcttctccatagttcatagaacaaaaaacaacatgaagtcccrcaagagctagtatttcttgtgaggatttaatcctctgaataactatgaaatgggaagcataattaactccttttacagataatgaacctggagcttggag

SEQ ID NO: 20994 - DNA, 201 bp, Homo sapiens
agagcgcgtgtcatctgcgggtggcactgcccacggtgggcgggcgggcctctctactcgaaggtgaccacgtttagattctgagacgggaagtggagggygaataggtcacggcggccttttttttttagtttaacttttccttttttgctgtctggtcatcctcgtcggtcttctgcttctgggtatcgacatcgttat

SEQ ID NO: 20995 - DNA, 201 bp, Homo sapiens
attaatggatggcctcaaaatttacaactatagattgtatttatcggttcaagccaagaggccctgtctacatttcaccttgacaacatctttgggttgarcctcatgcttctccttcctttaccacaggtcatcatctgtcttctccatagttcatagaacaaaaaacaacatgaagtcccacaagagctagtatttctt

SEQ ID NO: 20996 - DNA, 201 bp, Homo sapiens
atgggagccatcgcagagtattgagcagaagagtggcatgacctggctggattctttcatagagtccttctggctgtgatattactctctattagacaggmaagctccttgagggcaggcattgtgtcctattgacctttattataaggacatagcacatctagcctgtagaagacttcaatatgttttttcaaatgaatg

SEQ ID NO: 20997 - DNA, 201 bp, Homo sapiens
aggcttgcaaggaagggagggtaggtgtttgggggaagagcatctagacaaaaaaagacaagtacagtgcaaggttctggaggcaggcgcgcacttggctrctgtgtttgaaaatgagggcggtgcggctgcaggggagaggacggggggtggacaagaactatggggtggccaggtcctatggggctgtgggaaggacct

SEQ ID NO: 20998 - DNA, 201 bp, Homo sapiens
aatgccactgtgaggctcaactgatgaatctcagtagggtggtgaatgtaaaggctagactatgggaggttatggggctgggaggttgagagaaggaaaaycatattttatactgttcctgagacatttaatgaaggaaaaaaaggaaacaaaaaagcaacttaaaggttaagtcccacaaatgaattcttcaagtgaact

SEQ ID NO: 20999 - DNA, 201 bp, Homo sapiens
ttatttgttctttatctggaattcagaattaactaggcattttatatttttatttgctaactctggctaccttattctcttcttaatattcttcaactctmctagctttgccctccttccctgccccctcttctaggggagtcggatcgagttgtaaggagaacatgccctcccctcccctccccttcccttcccctccct

SEQ ID NO: 21000 - DNA, 201 bp, Homo sapiens
cgggattctgagcatttccttttggccctctttgactttgatttgcttttatttccattatccttggatactgaaaacttttcctcatttcaagttactgwcatctgtatttttttcttcttggatgtgtttgtttctttttcattcaaatcttttgctacctgaaggtgaaataaaaggttttggcaaatcaccaacctg

SEQ ID NO: 21001 - DNA, 201 bp, Homo sapiens
cctgttcagttgcctcactgcttaatccccttgtgagacagagagcatgcagacaggcaggtgcagaggctggggtgagcgctctggggtctggcccggcygtagtgtctaggagtggatgcctgcagccccagcgttacaaagctttcagcttggccgcccgaagacagcttgaatgttaaccagcttaatggacctttt

SEQ ID NO: 21002 - DNA, 201 bp, Homo sapiens
ccggccgtagtgtctaggagtggatgcctgcagccccagcgttacaaagctttcagcttggccgcccgaagacagcttgaatgttaaccagcttaatggamcttttgccttttcacaagggcagagggccaacatgatagcttgctgtatcccgagctcttgttcagcgtcctggaaaaatcaggtcacacacggactcaa

SEQ ID NO: 21003 - DNA, 201 bp, Homo sapiens
actcctttcctaccgcccccagctgaactcctcttggcatccagacgtctctcctcttctctctttccctgctgtgctgttccaccgtccatctgctggtmtcctcctctactcacctgctgctctgctgtggagcttggggtttgcggtttacgtgggggcaggatagagggtgtggagggacaaaaggcaacctctttg

SEQ ID NO: 21004 - DNA, 201 bp, Homo sapiens
ctcttctctctttccctgctgtgctgttccaccgtccatctgctggtatcctcctctactcacctgctgctctgctgtggagcttggggtttgcggtttaygtgggggcaggatagagggtgtggagggacaaaaggcaacctctttgtcttgaaaacaggaatgcctgtcctcatttagggccgcaggtcttcaggcttg

SEQ ID NO: 21005 - DNA, 201 bp, Homo sapiens
tcttctctctttccctgctgtgctgttccaccgtccatctgctggtatcctcctctactcacctgctgctctgctgtggagcttggggtttgcggtttacrtgggggcaggatagagggtgtggagggacaaaaggcaacctctttgtcttgaaaacaggaatgcctgtcctcatttagggccgcaggtcttcaggcttga

SEQ ID NO: 21006 - DNA, 201 bp, Homo sapiens
tgataacttttaattttctctttttcattttattcccctgaaaccttcatctttctgaagcttactgccccaaggcaggggagaatggctattggttctcytttgtagtctctcacatttatcacatcaagggttaattctggagggatgaagttaagttttctccttataaagggagaaaacaccccttctgcttgtgac

SEQ ID NO: 21007 - DNA, 201 bp, Homo sapiens
tttctgtttctgatatgcataatgggacagttgtggcctcacacacttcagtagaaagaataacatatgcaaatgttaatggacccaaacaactaactcamaatttgcagatgtcttcaggagttacccaaaatgtatggttgaactcaccaatgaggaatcctgtgcattctcatataggggcaactgtatctcatcaaa

SEQ ID NO: 21008 - DNA, 201 bp, Homo sapiens
tgtaccattttttatcttttataccatatttttaccgtacctacttatgtttagatacacaattacttaccattgtgctacaattgcctacagtatttagyatactaacacactgtacaggtttgtaacctaggagcaatttgctattccatatatagtaggctgtatcatctaggtttgtgtaagcacactctataaggt

SEQ ID NO: 21009 - DNA, 201 bp, Homo sapiens
tggcctcacacacttcagtagaaagaataacatatgcaaatgttaatggacccaaacaactaactcacaatttgcagatgtcttcaggagttacccaaaaygtatggttgaactcaccaatgaggaatcctgtgcattctcatataggggcaactgtatctcatcaaactgattttggagctaacgtacccaatatgccgg

SEQ ID NO: 21010 - DNA, 201 bp, Homo sapiens
agcagtacgggggtagtccttctattttagggttgccagataaaatacagtatgcaaaatcaatgtgcattggagaaaataatttattattagagaatacrtaatttctttagcataaatatgtcttgtgccattcttagtttgggacatacttatgctaaaaaattatttgttctttatctggaattcagaattaactag

SEQ ID NO: 21011 - DNA, 201 bp, Homo sapiens
atgacctaggggggctgtagtatcagaagaacagaaataacataaccagaaggagtggcaaaacagctataaccaacacttcctgccgcataaggtttgtmttcttaagctttgagacttagggagaggacacgtggcaggtctgaggcccgtgggacctatgtgacttccctctcccctttgacttataacctaaatatc

SEQ ID NO: 21012 - DNA, 201 bp, Homo sapiens
gagggacttgtgcctcctcagcgggaggagtggggctacctcctcctgccgtggccgcgatcaggaggcaataggtggagagcccacaggggaggtagtgsaggagacaagagaacattctgagggagcaggagggttataaggcggtggaactgggtgaaggaaactttcctcttcctcacaaggaggcaatacaggagg

SEQ ID NO: 21013 - DNA, 201 bp, Homo sapiens
ttccagttgtacaggtcagaagtagagaagccgacataaactaagaatgggcctgagtgcttatcgcccggagggacttgtgcctcctcagcgggaggagkggggctacctcctcctgccgtggccgcgatcaggaggcaataggtggagagcccacaggggaggtagtggaggagacaagagaacattctgagggagcag

SEQ ID NO: 21014 - DNA, 201 bp, Homo sapiens
gtccggagcatggactccatcagtgaggtcaagacctggggcttttcagaaaagggggggttatgagtcttccagttgtacaggtcagaagtagagaagcsgacataaactaagaatgggcctgagtgcttatcgcccggagggacttgtgcctcctcagcgggaggagtggggctacctcctcctgccgtggccgcgatc

SEQ ID NO: 21015 - DNA, 201 bp, Homo sapiens
gcccttggttcccagcgagagagcctgtgagcacagtggagcctcaggacagcacgatcagagctggcttctcaaaggcggtgcccttgagctcagtcacytctcgcccctttgccgcccattgctggcacctggcttgggctctccgtctgcccaacagctcacttcagaggaaacaggaaaccaacggggccttcgctg

SEQ ID NO: 21016 - DNA, 201 bp, Homo sapiens
gttatgagcttcctcctctggtctaccgtctgatgtaaggaaatattttctggcctctcttcgggtacgttccttctcttcagaggtggaaagggttaaarggagctgttgacagtcctcccaggtgggccggtgagtccggagcatggactccatcagtgaggtcaagacctggggcttttcagaaaagggggggttatg

SEQ ID NO: 21017 - DNA, 201 bp, Homo sapiens
aggggtgtaactctggtaggcctcctggaggcgttccaaaaacgccccgggtggctcatcaggcccctggacaacttcaaatgtcttagacaaatttatgkgttttcgagcagctcctttgatacccgcaaggagatactggtgaaaatcatctaaagctctcttcctgcctgaggagtttggatcctaattaggccgggt

SEQ ID NO: 21018 - DNA, 201 bp, Homo sapiens
ccacaaatgccaaattaatagcacagctattctcaggagccgccgggtcaaaaggggtgtaactctggtaggcctcctggaggcgttccaaaaacgccccsggtggctcatcaggcccctggacaacttcaaatgtcttagacaaatttatgtgttttcgagcagctcctttgatacccgcaaggagatactggtgaaaat

SEQ ID NO: 21019 - DNA, 201 bp, Homo sapiens
ttgtaattttcttttaatatcagggcctgcctgagccacaaatgccaaattaatagcacagctattctcaggagccgccgggtcaaaaggggtgtaactcyggtaggcctcctggaggcgttccaaaaacgccccgggtggctcatcaggcccctggacaacttcaaatgtcttagacaaatttatgtgttttcgagcagc

SEQ ID NO: 21020 - DNA, 201 bp, Homo sapiens
taatgttcattccagcaaatccttccagtttttgtaattttcttttaatatcagggcctgcctgagccacaaatgccaaattaatagcacagctattctcrggagccgccgggtcaaaaggggtgtaactctggtaggcctcctggaggcgttccaaaaacgccccgggtggctcatcaggcccctggacaacttcaaatg

SEQ ID NO: 21021 - DNA, 201 bp, Homo sapiens
tgctatgcaggcctgtctgtttgactgtcatgcaggtctgtctgtgtgatcatcagggagaatcggccggccacattttcaatctttctcctcttctggaraaaataaccactcagtctttagcgtcagctcacccttcagggtttgacacctggagcagcagtcaaagaagctgaaaacacgaccttcctttctaggtgt

SEQ ID NO: 21022 - DNA, 201 bp, Homo sapiens
atctttctcctcttctggaaaaaataaccactcagtctttagcgtcagctcacccttcagggtttgacacctggagcagcagtcaaagaagctgaaaacasgaccttcctttctaggtgttaactttagccactgtggtagatggtccagaaagatgaccactgctaattcctttcctccctgaatgtgcatactgttgca

SEQ ID NO: 21023 - DNA, 201 bp, Homo sapiens
tgaattaaatagctagtgatataatgtaattaatcatcttatgttttgtaaaaggctgtggcacactcttatccatatttcatttcaaagaccttacatgktaatcctcagtaccattaacaataagtaacaattaggccaggcacggtggctcatgcctgtaatcccagcattttgggaggccggggcgggcagatcacc

SEQ ID NO: 21024 - DNA, 201 bp, Homo sapiens
tgtttttgataagcattgttttacatatatatgtatatatatatgtgtgtatatatatgtgtgtatatatatgtatatatatatgtgtgtatatatatatrtgtgtgtgtgtatatatatatatatatatatatatatatgtatagttttgggggtttgtttttttttcttttttttttgagacggagttttcctctgtca

SEQ ID NO: 21025 - DNA, 201 bp, Homo sapiens
tcgctgttgctgctactgctcacagacaacttggctacttggtggaggccacagggtctagcctcttaagacaagtaggctaccggacgtcaccatggccstccactgtggcggtcaccgtgggctactgggggccaagagagaaggagccccggtctcgtcagtcatcagactcctccgctgcggggagggtgaggactt

SEQ ID NO: 21026 - DNA, 201 bp, Homo sapiens
aagcatcttgtgggagagaaagttaaatgaggctgatctaacagtaaactgtgatactgcaggatgcgggcatttgacatccatttgccagaggcacttcrtagtaaagtgtctacagcatgaggacctgtaagggttaaattttggcccagagtcagtttatcagcttcctggaccaggctcgctgttgctgctactgct

SEQ ID NO: 21027 - DNA, 201 bp, Homo sapiens
gcctttcctgctgagatgagtagcccatgctcttggtagatggctccatgtacatgcacagtagcaaaagcatacctgctgtcagtgtgaattttaatacrttcgtcgttaccctatcggagggcctgagagagggcaatcaactcagccctctgtgccgaggtacctgctggcagtgcttgggcccacagtatattcgtc

SEQ ID NO: 21028 - DNA, 201 bp, Homo sapiens
atgggtatcccttagcttaggcaagataggcggagccctcctatacatgatttcaaaaggtgaaaacctagcccggtaaggagtgcatctcactctaagargggctaaaggaaggagtctcacctaattttcaccggtctctaagatcaattttgtaagagtattttttagggtgtggttcatgcgttctacctgcccaga

SEQ ID NO: 21029 - DNA, 201 bp, Homo sapiens
ataaagccactaataaccacaaaaggaaaactatggttctttttactttgtcaaagttctgcatctgttcccggttggtcagccaggattccatgtcctgsgcagtctgaatgacaaatgcttcgtaatctgcaaacatctgtgtaaaacggttagcaaagacctctcggagctgtacattgagctggtagtcccttagtt

SEQ ID NO: 21030 - DNA, 201 bp, Homo sapiens
caggaaggagcctgactgttagcacctgggtgagaaattgcataaacaaacattatcataaactgtaatacctgccattggtttccctaaaagcccatttktacttcccacagaagctctagctttcccgctccttctgcctattaaattgttgttgtaatatacccttacccctagctgttcagcaagctactgctttct

SEQ ID NO: 21031 - DNA, 201 bp, Homo sapiens
catctggaaggttttagcatagttcataatggatgatggctggttaacaatttagtacgtctttgatgatcaatctagttcagcatagctgtctcttgtcrgtaaaaaaaaaaaaaaaaaaaagccaatctctgcaaaatatttaaagagctttattctgagcccatatgagtgaccatggcccagggaacagtctaaaag

SEQ ID NO: 21032 - DNA, 201 bp, Homo sapiens
tacagcttggttttatacattgtagggagacagaagttataggcaaagacaaatcaatacatctaaggtatacattggtttggccaggaaaggcgggacakcttaaggaaggagcaatacaggtcataggtggattcaaagattttctgatttggaattggtcaaaagagttaagctgaagacttaaagtcaggctgggcg

SEQ ID NO: 21033 - DNA, 201 bp, Homo sapiens
aaaaaaaaaaaaaaagacaaagtcagtagaaagaaatgcttgggttgagataagggggggtgggctgtgattcttgttatatagatgaagcctcagatagmaggcttcagagagaatagatggtaaacgtctcttttggaatttcacaggtgtcagactcttagttaatctctgctagatctgggaaaagcctagctgcat

SEQ ID NO: 21034 - DNA, 201 bp, Homo sapiens
gagatagttgaagattttccttatatttaacagtgttgttttgttataaagaaatgaaacctacttgggaaaatgcttccaaagattaacaaaatcttaarttatgaaggattaattaaaacttcattgtagagtctagaggtaaaaatagaccaaatatagaaagaagacgtaacttgcatctgtgtttaattaatacat

SEQ ID NO: 21035 - DNA, 201 bp, Homo sapiens
agggagagagtataatgaggtacgtccaacccttccttcccatcatggcctggaatttagtttttcagcttgctctggggtcccctcggcctagacagctstctgttcagttggttgggggcttaggatataatttttggtttacactcttcaggttgatgatcaggcaaagcataaacagttcaaatcaaatgcagctgg

SEQ ID NO: 21036 - DNA, 201 bp, Homo sapiens
tattttgggaagctaggaaggctggagaggctttcagctgcacactgacctatcaccccatgtgaggcagagacagaaatgatcagaatatggaacgacaygaacacatagaattggggccaagtgtgagatgctgcagtaaattgggatttgtaagaaaaatgtatgtcacatagattcatccatgctttaagaagcatg

SEQ ID NO: 21037 - DNA, 201 bp, Homo sapiens
attttctttttttttttttcctttctggctaatagggtttctatgtgattattaagctgacttttagtttgcctgtaaatatttgtctcccatggctggakagtcatgcattgctccttaatttctatacttagtttgctacatttggattccttcctgcagttcttaccaacctcccaaagcctcatctgacagaatact

SEQ ID NO: 21038 - DNA, 201 bp, Homo sapiens
tgtatcagaatgtttttgataagcattgttttacatatatatgtatatatatatgtgtgtatatatatgtgtgtatatatatgtatatatatatgtgtgtrtatatatatgtgtgtgtgtgtatatatatatatatatatatatatatatgtatagttttgggggtttgtttttttttcttttttttttgagacggagttt

SEQ ID NO: 21039 - DNA, 201 bp, Homo sapiens
ttaatttttgtcacattgtatcttttaaaaaatttaaaatttggtgaatatattaggcaatatatatttattaattttttgtttaccataaaaacctacaygtagaccttcaggtccatgcatttcatactgttgaagctgtggacacattttgggtttacgaatctttgagttggtgaatgcctttaagcccatgtcctg

SEQ ID NO: 21040 - DNA, 201 bp, Homo sapiens
gaaaattctctattaatgtatcagaatgtttttgataagcattgttttacatatatatgtatatatatatgtgtgtatatatatgtgtgtatatatatgtrtatatatatgtgtgtatatatatatgtgtgtgtgtgtatatatatatatatatatatatatatatgtatagttttgggggtttgtttttttttctttttt

SEQ ID NO: 21041 - DNA, 201 bp, Homo sapiens
taaaacctgaagaactggtctttgagacatttttcagatttagcatttcaggagaccaagagatgccacttcgtcctgagaccgcttcccaggaaatgacytggctgtgtgaatatggttttagacacccctgcaatttcatccccagccaatccgttgtttcagttctccagccccctgcctgccaaagtagtagttaaa

SEQ ID NO: 21042 - DNA, 201 bp, Homo sapiens
actggggcaatttagacgattcgtggcataaagataactgctggaaaacttataaacataggggtgcaacaatcaggaagagaatgaaatggaagggcccrgtagcccccttttaatatgctacaattagattctcaaggtacaagagtttgtctatatactttggaaataaggagcaggattttatgatcttgaaaaatc

SEQ ID NO: 21043 - DNA, 201 bp, Homo sapiens
gccatctaagttaccccaatcctccaacaagtgtcgacagctgccagaaaaagttatttattacttaatcaaaattaacttttcaaatttctggacataamagcttaaagaattatcaaaaacttattcttagagtatcctgaacttatagaaatcttgttttataatagtatcttatgacatttgaacagcatgatttta

SEQ ID NO: 21044 - DNA, 201 bp, Homo sapiens
ctttataagggtgttaactcacatttaaggatatggagagggttcttattacgatgaatttaacatatgttaagttcaccttagttggcatgcatgctttraaggacatcattatttactctaacttccccaattccactttctagattccttcttctggcttttttatatattcagaagtaaagcgttttttaatattca

SEQ ID NO: 21045 - DNA, 201 bp, Homo sapiens
accctatctcattaaaaaaaaaaaaaaagagagagagaagaaaagggaaaagaagatatgcagttgttcctgcaccatttgttgaaaagactggaatgttgattttaataatgcatgtaaattctccaccaccttgggaaatggtgttggctgaaaattacatgtgccctgataacatatgctttaacagagtacctggtg

SEQ ID NO: 21046 - DNA, 201 bp, Homo sapiens
ccaggcccctataattaggcctaatcgtagcctgttgtttgaaaagggtatgaaggacattcatcaggcttggcacggtgccctagacctgctctcctggktagtggggccctccattgcaacagaggtgtgggtgggcctgggagagtgtggcaagaaatgcttaggaggctctacttggccttaaagggctgtgtgacc

SEQ ID NO: 21047 - DNA, 201 bp, Homo sapiens
atttcttcaatccttataaggtgctgggtacctgccaggaaccctgtccatacacgatctcagttcagctcctcaccttgggtacacaagaaaggatcccyggctgaagagggaaatagaggctggaaacaggggtacatgggcagggtggtggtggtgagagaattgcccgaatcagctgccaaatggtgcccaggttgg

SEQ ID NO: 21048 - DNA, 201 bp, Homo sapiens
atgcctgctgagtgaatgagggagggagggggcaggacaagggactggggatttggtagggacaatggaggagctcggagaagaggcaacatttcttcaayccttataaggtgctgggtacctgccaggaaccctgtccatacacgatctcagttcagctcctcaccttgggtacacaagaaaggatccctggctgaagag

SEQ ID NO: 21049 - DNA, 201 bp, Homo sapiens
ccctgacctacccactcaccctcaggttttaccacaaatgctatttcctcacatccaccttccctgacccagccaggccccccatgatgagcctcgcagawcctcatctcccctccacagaggtgatcataacccacagaacccagggccacgatccctggctttgaaccctggctctgccactcagctaagtctctgtct

SEQ ID NO: 21050 - DNA, 201 bp, Homo sapiens
tatcagatgctgctgcatgcggccactcggcaggctgcgggcatccggctgcaggaccaggtggtgatcatcgacgaggcgcacaacctgatcgacaccaycacgggcatgcacagcgtggaggtcagcggctcccaggtgcgtgggcctcccctccccgggccagggcctgccgtgaggtaaagggacttggatggttcc

SEQ ID NO: 21051 - DNA, 201 bp, Homo sapiens
ggaggcccgggcctgtccctattacaggagccgccttgccatccctgcagcccaggtgagggccctgcagggccagaaagccgctcttggctctcactgtrgtctaggccatgaggggcgtcctcatcacactgtagtttgggggatgccccccaccgtggtcaggttgatggcaccttaacccattctctcctgaggcgt

SEQ ID NO: 21052 - DNA, 201 bp, Homo sapiens
cctgagcccaggaggcggacattgcagtgagccaagataacaccactgcactccagtctgggctacagagtgaaactctgtctcaaaaaaaaaaaaaaaaagattaaataaatgcaaacaaagtggtttaaagtactttaaagtacttacactatgcactaggcactgttctaaagtgtttactactacactactaccaat

SEQ ID NO: 21053 - DNA, 201 bp, Homo sapiens
tgtatccacacatctataacagtatctggcacatagctggtgctcaaaaaatagttcttgaataaatgaatgaacaaatggaaagtgcaaatggctgttatattccctgacaacgagaagaaactgaatatgctttgtgatggttagttttatatgtcagattggcgaagtcatagtacccagtttattcaattaaacaca

SEQ ID NO: 21054 - DNA, 201 bp, Homo sapiens
attccagttttctgctattgtgggttatctacattctattgctagacctttaaaccagtcttctaaatttctaaatttcggtcaaatttattacttttcarcttaactcccaaattcagtttcaccaagattttcctctgaccacttctctgttttggttccagatgtgatgaatatgtcacccagttggatgagatgcag

SEQ ID NO: 21055 - DNA, 201 bp, Homo sapiens
tcattgtatggatgaacatatattccagttttctgctattgtgggttatctacattctattgctagacctttaaaccagtcttctaaatttctaaatttcrgtcaaatttattacttttcagcttaactcccaaattcagtttcaccaagattttcctctgaccacttctctgttttggttccagatgtgatgaatatgtc

SEQ ID NO: 21056 - DNA, 201 bp, Homo sapiens
agtctcaaaaaacaaataaacaaaacaacaacaacaaaataataataaattttttaaaaatgtcccatatatctcattgtatggatgaacatatattccarttttctgctattgtgggttatctacattctattgctagacctttaaaccagtcttctaaatttctaaatttcggtcaaatttattacttttcagcttaac

SEQ ID NO: 21057 - DNA, 201 bp, Homo sapiens
gaggatcacttcaacccaggaggcagaggttgcagtgagccgagatggcaccactgcactccagcctgagtgacagcgagattctgtttcaaaaaaaaaaagggtgctgggctcacacctgtaatcccagcactttaggaaactgaagcaggtggatcacttaagcccaggagttcaagaccaaccaaggtaagataataa

SEQ ID NO: 21058 - DNA, 201 bp, Homo sapiens
ttagaataatacggatattattagaatattattagaataatatggatattattagaatagaataaggtgctctttaaaaatacactttctgaggctccccmccccagactcatggaaatgaaatctctaacatttaggctatgtaatctatatttttattttgtatttttaagcaggttctctaataaactttaatacaat

SEQ ID NO: 21059 - DNA, 201 bp, Homo sapiens
tctactagaaatagaatgtgatcgccctgtgtaattttaaattttaaattttctagtaaccacataaagagaaacattaaattaattttaatagtgtattktatttaatccaatatatccaaaatatgatcatttcaacatttagccaatataaaattgttaatgatatcttaaagacttttttttcataatttgttttca

SEQ ID NO: 21060 - DNA, 201 bp, Homo sapiens
taaaatacagtagccaaacatattattgcagaagttcaggatgctctgggagcacataagagagcacataacccagacctggaaccttttaaaaaaattttgagggaaagcaaaatgtaaattaagctctgaagtatgagtagtggttgtctcgaagaacaaagagatgaaaagagctttctaagcataacgaatgacaga

SEQ ID NO: 21061 - DNA, 201 bp, Homo sapiens
tttgtaggggcttggcctggtggctcacacctataatcccagcactttgggaggccaaggagttcaggttgcttgagcccagaagttcaacaccagcttgrgcaataaggcaaaatcctgtctctataaaaaaatacaaaaattagctaggtgtggtggcatgtgcctttagttccagctacttgggaggctgaggcagga

SEQ ID NO: 21062 - DNA, 201 bp, Homo sapiens
taactaataggcaccaaacatattcatttatcacattttttagtgcctcctctatgttgaacatggttccaggcactgaggacacagcagtgaaaaaaaaacgaagtttcttccatcacagagcttactgtctagtgaaagagatagatgctaaataaatatatacataacatacactaatttagtagtaatcaatcctaa

SEQ ID NO: 21063 - DNA, 201 bp, Homo sapiens
aaattcagcttttgctttggactaaaataatgttatttgaatatcagaggcctagttagtaggcaaccctttaaaaatctcaggtctatttgcctttagcygtttgctgaaaaggagtttttgtttgtttgtttgttttgttttggctgtttgttcatcaatttggtttattttgttaaagatttctttccatactataca

SEQ ID NO: 21064 - DNA, 201 bp, Homo sapiens
tgagagattcttctgcctcagcctccccaagtagctgggattacaggtgcccaccaccacacccggctaatttttgtatttttagtagagatagggtttcmccatgttggccaggctggtctcgaactcctgacctcaaatgatctgcccacctcagccttccagtgctgggattacaggcgtgagccactgcgcctggcc

SEQ ID NO: 21065 - DNA, 201 bp, Homo sapiens
agcatttaaaactgcaaagtctaaccccaatcttatgatactcttgatctcccttgctgtgcctttttaaaaataacatttgtcattttatgacatgttayaaaatgaacttacttatatttcttgtttattgcctgtctctcctctctggaatataaggcagagatgtcttgtttttcactgtttcttattattcagaag

SEQ ID NO: 21066 - DNA, 201 bp, Homo sapiens
ccttcaatgcctctcccgtgtgaccgctccttttctttcaaaagtaaatcctatgtctgggaggtaacccgatcaccgcggaaagaacgccgacatggaartcttaggattggtttctcgttccaggaagttgcgctactttgggcaaatcacgtcacctctgggactgtttctaatcagaataaagaaagggctggacca

SEQ ID NO: 21067 - DNA, 201 bp, Homo sapiens
aacttccttactgccttaaacctttgctcatctatcagcttctcaatgaggtctaccctgatcacagcatttaaaactgcaaagtctaaccccaatcttaygatactcttgatctcccttgctgtgcctttttaaaaataacatttgtcattttatgacatgttataaaatgaacttacttatatttcttgtttattgcct

SEQ ID NO: 21068 - DNA, 201 bp, Homo sapiens
attcataatgccaagttttagtgaggatgtggagcaaccgaatctctcatccaattgtgaaaatgaatcatcattatctactagaattcatcatccacagrgcctctgtcccagcaatttttaccgctacataaatacccaggagagtgacagcaaatgtgcaaaaagtcacgtataagaacatttgcggttgcattattt

SEQ ID NO: 21069 - DNA, 201 bp, Homo sapiens
taaagttaagattcataatgccaagttttagtgaggatgtggagcaaccgaatctctcatccaattgtgaaaatgaatcatcattatctactagaattcaycatccacagagcctctgtcccagcaatttttaccgctacataaatacccaggagagtgacagcaaatgtgcaaaaagtcacgtataagaacatttgcggt

SEQ ID NO: 21070 - DNA, 201 bp, Homo sapiens
tattcagagatcaggccagtgggcttgtcaactgagctgtaattccaccagcctgctttagtcaatactgcaatggcgcttccttctatacatattattaraaactgccctagtggaaaataatcttctaccagcccagtcttgctttttatattagaattaaaatttttattcattaaaaacattattaggagagtgaaa

SEQ ID NO: 21071 - DNA, 201 bp, Homo sapiens
agtatacattgggggaggcagagctggaatcattggcatatgtggaatgaaattaatgcatgtattagcacataagggatgtgaatagcaatacttttcayaaacaaaaaaagcaggattattggttgtaaaatttatctaccatgttaatatgctgaataatcctgtacgttttctatccttgtgaatacttgggctggc

SEQ ID NO: 21072 - DNA, 201 bp, Homo sapiens
gagaaatgtgtttacgaagcattgagcaactttgggtgggttgagaccgaaagtatccttgccacttgagtatacattgggggaggcagagctggaatcaytggcatatgtggaatgaaattaatgcatgtattagcacataagggatgtgaatagcaatacttttcataaacaaaaaaagcaggattattggttgtaaaa

SEQ ID NO: 21073 - DNA, 201 bp, Homo sapiens
attaaaatcaactcataagttatgccttgattatattacagcaagatgacagtggttttataacattgcttacaacaatcgtaagattattgatcattcayaatttcaaggatcccagaaatgacactgacataaactgagggcaaagctgactgtaactaaaagattttagccaaatgtcaaagtcaaagataaatgtca

SEQ ID NO: 21074 - DNA, 201 bp, Homo sapiens
gtttttcactccaagatacatctaaaatacatattataactgaaagagaaaatgtatattaaaatcaactcataagttatgccttgattatattacagcawgatgacagtggttttataacattgcttacaacaatcgtaagattattgatcattcacaatttcaaggatcccagaaatgacactgacataaactgagggc

SEQ ID NO: 21075 - DNA, 201 bp, Homo sapiens
tgtattcttggatgaatattgcttattgctggattaaaacaagtttcatctattctctatttgttctaccctgctctatttcaattctagaatattgctaytctgttttctattgtatagatgtaagcactaaggaaacctgttcacataaagagagaaatagaaataggggacgttctattataacaatgttatctaatt

SEQ ID NO: 21076 - DNA, 201 bp, Homo sapiens
gtagccagtatttccaccaggggccatcctgctcctttccccacaactttgtcctgctcgtccaggcctgggagacgctgggtctgtgacaggctgaaccrtgtgaggagcagccccctccctggcctggccggcccatcactggaaggcaaaggagaggtggcgggggcaggtccacgtgtgttggtaggatgtcattta

SEQ ID NO: 21077 - DNA, 201 bp, Homo sapiens
ccttagagtgtaacccactaaggatgcctggtcactaggctctaaagtcacgtggaaccaggcttctctccgtgtgcttctgttgtcagtttcatagatarctaggctgtttttgtttcattttcttttcaattttagaatttgctttcttcttttctgacttgtagtttttaaatatgtaaatatttgtatggctcaaaa

SEQ ID NO: 21078 - DNA, 201 bp, Homo sapiens
tagttcaaaggagattcataaatgaatcatgtaattttaagcaattctcactagatggagctagttacaaataaatacttttttaatatttttcttctttwtttttaattttttatttttatttattttttattttttgaggaattaacagtctttattgggctcagatcaggaggccgtgggtcttgaggacctctgtgt

SEQ ID NO: 21079 - DNA, 201 bp, Homo sapiens
ttatctgctctatcctataatatacttaaaagttttgaaatcatagtaccaatattacttctaacaatagatctgattgaaattgcctttcctctttgccyttagagtgtaacccactaaggatgcctggtcactaggctctaaagtcacgtggaaccaggcttctctccgtgtgcttctgttgtcagtttcatagatagc

SEQ ID NO: 21080 - DNA, 201 bp, Homo sapiens
ttgtgaactgttaacaaggttattcttctcatcctaaagtctggagcaatctcatcaccatctttctattatgccccacacccacttctcgtctcaagaartcagtattttacttttctaccaggatttagctttactgtccactttactgcttctccaaaaagttgcagtgatgatgttgagaagtgactaattcattag

SEQ ID NO: 21081 - DNA, 201 bp, Homo sapiens
acgcgcagccccgaccgcggccccggagggagccccaggaactttgtttctcggccccctacctctggcaccctccgctctcactgggactcgccggccgsccctacagggggaaggcggtcttgatttcttaatctcatgcttcagtctcctcacctgcaaaatgagaatggtgataataggacctacattagggatgtg

SEQ ID NO: 21082 - DNA, 201 bp, Homo sapiens
tggtcttgctgtctcgaggtagtagaggtggaagaggtggaggaggtggaaggggaggcaggcgaggcaggcacactcggggtaacatttgttggaaaaartccgcacagcctaggcaacaatgcaaaacctctctataaacgatagaaaaattagctgggtgtggtggtgtgcacctgtagtcccagctactggagaggt

SEQ ID NO: 21083 - DNA, 201 bp, Homo sapiens
gcccgaggatgaccgcgcgcaggagtttggaagccattgccttcgcgaggaggggggcggtcaaacgcgcagccccgaccgcggccccggagggagccccrggaactttgtttctcggccccctacctctggcaccctccgctctcactgggactcgccggccgcccctacagggggaaggcggtcttgatttcttaatct

SEQ ID NO: 21084 - DNA, 201 bp, Homo sapiens
gagttgagatcacggcactgcactccagcctgggcaacagagactctgtctcaaaaaaaaaaaaaaaagaaaaaagaaaaaaatagaaaatatatatttaytattcattacatggaagtagatcatcataaaggtcttcatcttcatcatcttcacattgagtaggctgaggaggaggaagaggaagacgaggagttggtc

SEQ ID NO: 21085 - DNA, 201 bp, Homo sapiens
agccagtgctggccacgcctattctccaactcggacatcattaggcgtgtgatcacatggtctggaaccaaaagacttttctctatatactgctttgccayctcaccaacttcggtgctggccttgatgttctcccgcaagaagtggccgctggagagatgctggagaccaaagttctgggcgatcctctggcacacggtg

SEQ ID NO: 21086 - DNA, 201 bp, Homo sapiens
attttgtccttttaaaaattcttttatttgattcaatatattgtattttgtttatttttttaactgcagaagtgagtagttatatatatatatatataaaattccttaccaatgaaagcccacaagagagctcaaagcaattaattcctagataaatataattttaattgatcttatcctacttatccagtcatttttcct

SEQ ID NO: 21087 - DNA, 201 bp, Homo sapiens
ctgttgtgcctaccatgcccttccccgccttggatgcacaggtgccccaccttagctgcccgagatgctgtttatccttgatagtcaccttttaagccttmtacaggtctatcaagttgagtcaccattaccacttggtgtgtgctgtgccttgtgtaacactgcagttccgggagtcctccaacctggaatgcatgcttt

SEQ ID NO: 21088 - DNA, 201 bp, Homo sapiens
gttcttccattgggcagggtcaatatgcttctttggactgaataggtgtgatcttgtttgagaaaagtgtgtaaacgtagggccagattttgttcgtctcygttccggaaaattggtggagcactcctcggctcttgtataattcaatgactggctttgccgcgtctttgtactgtcttagcctggcagcaactgcttcgg

SEQ ID NO: 21089 - DNA, 201 bp, Homo sapiens
acacatagaggggaacaacacacactggttcctgttggaggctgaaggatgagaggaaggagatgatcaggaaaaataacaaatggatactaggcttacakacctggtgaagaaataattggtacaacaaacccccatgacacacatttacctatgtaacaaacctgcacatcctgcagctgtacccctgaacttaaaagt

SEQ ID NO: 21090 - DNA, 201 bp, Homo sapiens
actaaaataagtgtagtataatactgatgtttaaaaaataaaatgtaataccactttttaaatgtatccgatgaaatgtagacactgcagtgattttttttggccaccaccgttcctgtaaaacacacatgaacacttttttcaccagcaggaaattttatatcactcttgtttctttttggtcttatattttcattctac

SEQ ID NO: 21091 - DNA, 201 bp, Homo sapiens
atctacacacattatttctaaagataaatggatggcaaagtactgaaaaatgttcaggggggtgacattaacctttaatgtgatgttctgtttttttttttaaagaagaatatatttttgtaaaattaggtaggcacatttgattatgttggtaattaaaatgaaatttagtaaaactatttgatgattagcccttacact

SEQ ID NO: 21092 - DNA, 201 bp, Homo sapiens
tctatatcactttttccaggcatgatcatactttttagatacgtaccaaacctgtatttgaccaaatgctgaatgactaaacataaaatccttttttgtaygtatgaagcaaaaattgtcatcacagtttgaacttctggaatagaagaataaatctcaagaattatcagaattttatcattttaatttttaattaaaata

SEQ ID NO: 21093 - DNA, 201 bp, Homo sapiens
catgcaatctaaaaatggggaagagaagcattttttaaaatcaggttttgaagtaagaaatgccacaaacaatcctgtaaaataatgaagctgtacacaaytaaggatgcatccttaaatttaagacacacctttttattttgcacatttgcattaacgtgattcccctctggggaagttttgagcatttaccatgaatac

SEQ ID NO: 21094 - DNA, 201 bp, Homo sapiens
ggaggatcacctgagcctgggaggtcaaggctgcagtgagccgtgatggcaccactgcactccagcctgggtgccagaaagagaccctgtctcaaaaaaawttttatgttattatttgtggtaactacatatgattaaacaattaataccttaagtagtaaaagattaaaaggacaatacatccactatcaaccattggtg

SEQ ID NO: 21095 - DNA, 201 bp, Homo sapiens
actctgtttaaaaaaaaagaaaaagaccctgcagaaattaaaattgtaaaaatataaatatacaaggaacaggcaccaggcacctttggctccacatcctygtcatcacttcataccttgtggctctagtttgcatttttgtggctgcttatgaggtcgtgcctcttcagtatttacaggcatttatgactatcctgcact

SEQ ID NO: 21096 - DNA, 201 bp, Homo sapiens
tgggatgcttgcattttcacagcaaaatggtgatattaaaataattattaaattttatttttcaaaggtcaacaacattatatattatctggccaggcacrgtggctcatgcctatagtcccagcacttcgggaggccaaggtgggcagattgcttgagcccaggagttcaagaccagcctgggaaccatagtgagacccc

SEQ ID NO: 21097 - DNA, 201 bp, Homo sapiens
atttgggctccagaggaccctacaactattgtggggggaactggatgtggtgggaaaaattgtatacctcttctcagacttcataccccaccaatgggctstcaccacggtttgcagactgttcacaccgagtgtgtgtagaaaggatgaaatcttaagattagaatgagagtgaacgcaggttggtcatgcctgcagctc

SEQ ID NO: 21098 - DNA, 201 bp, Homo sapiens
aaatgggatgcttgcattttcacagcaaaatggtgatattaaaataattattaaattttatttttcaaaggtcaacaacattatatattatctggccaggsacggtggctcatgcctatagtcccagcacttcgggaggccaaggtgggcagattgcttgagcccaggagttcaagaccagcctgggaaccatagtgagac

SEQ ID NO: 21099 - DNA, 201 bp, Homo sapiens
gatctgctgctcccatgccctcctttgtgtgttttaaatctgtttgagccttctgggctcctgtgaattagggagtggcagctcctcagtctaactcctaytgtgaccaggttgcctaattggccctttggtttgggcacccactgtccttctgcgtggttggatagatgctgctcccaatgtccctgatctcttacagac

SEQ ID NO: 21100 - DNA, 201 bp, Homo sapiens
ctgtgactaacaaggggtctgggaggatctgctgctcccatgccctcctttgtgtgttttaaatctgtttgagccttctgggctcctgtgaattagggagwggcagctcctcagtctaactcctattgtgaccaggttgcctaattggccctttggtttgggcacccactgtccttctgcgtggttggatagatgctgctc

SEQ ID NO: 21101 - DNA, 201 bp, Homo sapiens
tggggcacccccttgctggaaggtgtctgtggaagtggaagctgcagaaagcctgtgggagctcctggcgggagctggtctcgtgttgctgctctgagccrccagctctgctttgcctcaggctcaccagtggcctgggtagctcctctgtgctccggtgccctgcataccttggtctggctgctgtgtcccggcctcctg

SEQ ID NO: 21102 - DNA, 201 bp, Homo sapiens
gaatccttgttgatagacgcataaactagagctcggagcaagggctgctcccagcacgggagcctgggatcttctgactccagctcccacgcctctttgcrtgaccctgtcacgtccccttcttttatgatggggcacccccttgctggaaggtgtctgtggaagtggaagctgcagaaagcctgtgggagctcctggcgg

SEQ ID NO: 21103 - DNA, 201 bp, Homo sapiens
gagccaccgcacccggcccaaattggcaaagagttttaaaagtaatagcattcagcattgataaaggcatgggaaaggtggagctcttttccactccaackgatacataaactagttcacagccttcaaaacattcacactcttggacctagtactaactctacttggagtgagttagttatacaaggttaaactccaata

SEQ ID NO: 21104 - DNA, 201 bp, Homo sapiens
gtgaggaagcaggatgatgactgtcattctcagagatgttttgatattgtctatacctatcaacactgctttgccaagatagggaagtgcaaaccagaaastggtaagccatcaccttcttgataaaggagatggacttaatttaatgaaatgtacctcttactgactttgctgcttgatttaaacaatccttctagggat

SEQ ID NO: 21105 - DNA, 201 bp, Homo sapiens
ctttgcatcccaagtctttaacacaaaagctagcacacagtgggcatgaaatattttatgaaagaatcagtttgtactagaagaaggcacacttttatcargggttcactagtcaatattgattagtgttagataaatactaagaaaattaggatgtataggaagtgacagatgttaataaaactacctgtattagtttca

SEQ ID NO: 21106 - DNA, 201 bp, Homo sapiens
gtatttttagtagagatagcgtttcttcatgttggtgaggttggtcttgaactcccgacctcaggtgatccgcctgcctcagcctcccaaagtgctgggaytacaggcgtgagcccccacgcccagccccttctttttatttgaaatcaagatttcgtctctggcgaagttatttctcagatataacttagcaagaattta

SEQ ID NO: 21107 - DNA, 201 bp, Homo sapiens
acaaagttgggaaggccttgcttttgagagccagaccaggagtacctgtgactaacaaggggtctgggaggatctgctgctcccatgccctcctttgtgtrttttaaatctgtttgagccttctgggctcctgtgaattagggagtggcagctcctcagtctaactcctattgtgaccaggttgcctaattggccctttgg

SEQ ID NO: 21108 - DNA, 201 bp, Homo sapiens
taacaaagttgggaaggccttgcttttgagagccagaccaggagtacctgtgactaacaaggggtctgggaggatctgctgctcccatgccctcctttgtrtgttttaaatctgtttgagccttctgggctcctgtgaattagggagtggcagctcctcagtctaactcctattgtgaccaggttgcctaattggcccttt

SEQ ID NO: 21109 - DNA, 201 bp, Homo sapiens
cagtgtctgtgttgttgcagtagggaggtagatggaatggggtgagaggggaggtgagcctggagagatggtttggggccagatggggaaagctgtgttayggggcttgtcagtttctgccagccaaggcttcagcatagctgactgtaacaaagttgggaaggccttgcttttgagagccagaccaggagtacctgtgac

SEQ ID NO: 21110 - DNA, 201 bp, Homo sapiens
ttgagcctatgtgtgtcctgcacttgagatgggtctcctgaatatagcacactaatgggtcttgactccttatccaatttgccagtctgtgtcttttattwggggcatttagcccatttacgtttaacattaatatacttgtgtgtgaatttgatcccgtcattacaatgttagctggttattttgcccattaattgatgc

SEQ ID NO: 21111 - DNA, 201 bp, Homo sapiens
acttgagctttttttagacccatgggttctttgcccatgttctgaggactttttatttcaggcgctgctctggggggatattaaggatacagcatcacatrgacacacggtgtttccgtgatgggcatagttctgtgggttgttcgaagcacttgcatatgcggttttgtgtgccctgtgagaacgcagtgctggtatttg

SEQ ID NO: 21112 - DNA, 201 bp, Homo sapiens
tacgggtgagatgtgactctctgaggtagtgggacagtcccttggtggccccctgcatgggcctctgagaggcagcactttggttcccacctctggcccgkgctgtggcggggtggagctgcatgccattcatgtcctaggcacatcatggtgtgtgctgcacacagacctggaaggctggggactgaccgctggctctga

SEQ ID NO: 21113 - DNA, 201 bp, Homo sapiens
tgaggaatgctcaagatcagtgcaggctcctcctgctgccctatcatgcgccatgcatggcaccaggtgtctctggtcttcacgctgactctgccatgggkgtggtgttcctgttttacattggaaacgtggagattcagagatggtcaagctctgtcctgaggtcatgcagctcatgagtgtggagctggggtgtgccca

SEQ ID NO: 21114 - DNA, 201 bp, Homo sapiens
acattttatcagagctaggttatgaacattgcaggtgggcctttcaacttcctgcagaagtgcagaggtgcaactgagcattcactaagaactggcacttstccaaactgtgcaaaagagggagtgcaagtctgtctcacacacgtaattgaggaaggaaaagaaggccagtgttgctgaagcttagggaaggagataaag

SEQ ID NO: 21115 - DNA, 201 bp, Homo sapiens
ctgatcaggcaacatttgagggggctttgaagaataagtagggattttccggggagagaagaggggcaaagtcattcaggaggatgaaacagcctgtagargagggaaggctggagagagtgctgcttgtcagtgtctgtgttgttgcagtagggaggtagatggaatggggtgagaggggaggtgagcctggagagatgg

SEQ ID NO: 21116 - DNA, 201 bp, Homo sapiens
cttgaatcagagtaatctcctgatcaggcaacatttgagggggctttgaagaataagtagggattttccggggagagaagaggggcaaagtcattcaggargatgaaacagcctgtagaagagggaaggctggagagagtgctgcttgtcagtgtctgtgttgttgcagtagggaggtagatggaatggggtgagagggga

SEQ ID NO: 21117 - DNA, 201 bp, Homo sapiens
tgcatgtgaaggatttaatacagtacctgacacatgacaagcacttgataaatgatggatgtgatggtgacaataatagtaataataataaaataataatrtgttggctgtgctcgataggagtggagggtagcaaactcagcttgaatcagagtaatctcctgatcaggcaacatttgagggggctttgaagaataagta

SEQ ID NO: 21118 - DNA, 201 bp, Homo sapiens
ctgcctacctccggcgctgagctctgcggtccttcggctctgcctgtccgagtcttctggctattcattctgctgcgcttcatgctgtctgtccgtcaccytagctgcctctgactgctcattttcttattcatttttccttctctgactttggtccttccagccgagcatgctgtctagttatctccctgctttcgtggt

SEQ ID NO: 21119 - DNA, 201 bp, Homo sapiens
cctgaacaaaattgtgagaatatagcacaggcatgtgtgttacagatgccatgataattctcacaccaaattgtaaaaaaaaaaaaaaaaaaaaaaaaaaagcaaaccctaaagtgtttaatgtgcctcatatctttgctacatcaaatttttggatcagaatttataagatctaccagaaaagtatcaaaagattattct

SEQ ID NO: 21120 - DNA, 201 bp, Homo sapiens
tcattttacttttctggacttagttttctctggggtaaaatagatggcacctacagtatcatttatttgtgttcttttaattttatgttaaatcgctcacyttgttggctagacagttttcaatctcaaatttttcagagtctccaacaacttctccatctggtaaaatggcaaagatgaacattcgtgcaatgggggcaa

SEQ ID NO: 21121 - DNA, 201 bp, Homo sapiens
tttctctggggtaaaatagatggcacctacagtatcatttatttgtgttcttttaattttatgttaaatcgctcaccttgttggctagacagttttcaatytcaaatttttcagagtctccaacaacttctccatctggtaaaatggcaaagatgaacattcgtgcaatgggggcaacgtctgactccacagggaaggata

SEQ ID NO: 21122 - DNA, 201 bp, Homo sapiens
aatattctttataatgaactgataaatgtagatatgtatttccctgagctctgtgagcagctctagcaaataaatcccccaagaagggggtcatggaaccstgatttatagttggtaggtcagaagcacagacaaaacaacctggggcttgcaattgcattggaagtgggactgagtcctcaacctatggcatctgacact

SEQ ID NO: 21123 - DNA, 201 bp, Homo sapiens
gctctagcaaataaatcccccaagaagggggtcatggaaccgtgatttatagttggtaggtcagaagcacagacaaaacaacctggggcttgcaattgcaytggaagtgggactgagtcctcaacctatggcatctgacactacccaagtagatagtatgagaatcggattgaattagaggacctgccccccccaccccct

SEQ ID NO: 21124 - DNA, 201 bp, Homo sapiens
taaccctcactttgaaataggatgtgtcaaccctattttgcagatgaggaaagcaagggtcagagaggttagacaactcttccagagtcacacagctgggragtagcagctccaggagcagaagctggggccgcttcctggtgcaccgatggtcttcaggtgttttgtggaaactcgggggcctccggggcgaccttgagg

SEQ ID NO: 21125 - DNA, 201 bp, Homo sapiens
gaagggggtcatggaaccgtgatttatagttggtaggtcagaagcacagacaaaacaacctggggcttgcaattgcattggaagtgggactgagtcctcarcctatggcatctgacactacccaagtagatagtatgagaatcggattgaattagaggacctgccccccccaccccctgctgccaccaccaccacccagct

SEQ ID NO: 21126 - DNA, 201 bp, Homo sapiens
ggtgggcggatcacctgaggtcgggagtttgagaccagcctgaccaacatggagaaaccccgtctctactaaaaatacaaaattagccgggcgtggtggcrcatgccataatcccagctactaggggggctgagacaggagaatcgcttgaacctgggaggcagaggttgcgatgagccgagatcatgccattgcactcca

SEQ ID NO: 21127 - DNA, 201 bp, Homo sapiens
ttttccagtttttcctttttgtaatatcagtactcttaactggaaagctttccctaacttacacctacctgcagcacgtgagaatactgtcttctctgccwcaacttctcttgatttttaaacagaaggaagaactgctaatgtagcagatgaaaagtagtatctcactgttacttggtgggtgcagtttcactatttcct

SEQ ID NO: 21128 - DNA, 201 bp, Homo sapiens
accgagtaactactaggtaagcatttattaaatgaaacaccaatttcaggttaaaaaagaaacctgaaatgttgattctgttgaataaaaagtataggagrttgtttttttggattaagtttctgtactatgctccaacagacaaaaccaaaaatcaaaatggagtcacccatgctaaagttctgtcaccaaacttcaata

SEQ ID NO: 21129 - DNA, 201 bp, Homo sapiens
aacaaagtgctccttcaggtctgggcaagagccgtggatcctgtaggtcagcttccggggcttcccatgccctcacgtttcaggagataacgtgagcctcrgaggacctgagttctgaatagaaaatttttgctcttcatttcttcacacacccagcctctcagtgagctcctgctggctttgtccagcatgcgacataag

SEQ ID NO: 21130 - DNA, 201 bp, Homo sapiens
taagcatttattaaatgaaacaccaatttcaggttaaaaaagaaacctgaaatgttgattctgttgaataaaaagtataggaggttgtttttttggattargtttctgtactatgctccaacagacaaaaccaaaaatcaaaatggagtcacccatgctaaagttctgtcaccaaacttcaataagttgttatctgatctt

SEQ ID NO: 21131 - DNA, 201 bp, Homo sapiens
aatgaaacaccaatttcaggttaaaaaagaaacctgaaatgttgattctgttgaataaaaagtataggaggttgtttttttggattaagtttctgtactakgctccaacagacaaaaccaaaaatcaaaatggagtcacccatgctaaagttctgtcaccaaacttcaataagttgttatctgatcttcagagtgagacca

SEQ ID NO: 21132 - DNA, 201 bp, Homo sapiens
gggtcttcatcaacatagtgttgaacttagaaaataaaaagcagacaaacaaaaaactaagctgctgaaatattcaaaaatgtttctcttgtttcttgaayaagagagaaataaaaatcttgtttctctcaagatgaaacacatgtgaagattctaaatattagttagggatacatatgcagcaaaaatataaggaaatcc

SEQ ID NO: 21133 - DNA, 201 bp, Homo sapiens
ttattaagcacggtgtcgttctataaccattttctgaacatttccccaaatctttaccaaaacaaagctctcttaaattctttctccattatatttctttycaactcctccctgagtaatacatatttagtgggaataaagtttttattttggccaggtgcggtggctcacacctgtaatcccagcactctggaaggctaa

SEQ ID NO: 21134 - DNA, 201 bp, Homo sapiens
aaacttcagaatctgaattttaaaatcctggctactcaactgatactaaaaatcaaaatatggtaatataatcattgctgtaacctaattatggtccacawttcagtgtgtggtaataataaactatatgaaaacatttacttcagaaaagaaaagtcttacattaagctaatcatatgtcttatgatcctaaaattttat

SEQ ID NO: 21135 - DNA, 201 bp, Homo sapiens
tttgaaatgatgtgaacgttggtttcctcctcagtaaaatggagaatgataataactataagtggtaaggaaaaatgcatgtgaaggatttaatacagtayctgacacatgacaagcacttgataaatgatggatgtgatggtgacaataatagtaataataataaaataataatgtgttggctgtgctcgataggagtgg

SEQ ID NO: 21136 - DNA, 201 bp, Homo sapiens
cgtctcaaaaaaaaaaaaaaaaaggttttatggctgggcttggtggctcacacctgtaatcccagcacttttggaggctgaggtgggaagattgcttgagyccagaagtttaagaccaaacaaaacaacaaaaccaaaaaagccagacccagtggtgcccaagtgcctgtagtctcagtgactcaggaggctgaggtggga

SEQ ID NO: 21137 - DNA, 201 bp, Homo sapiens
ttctttggactgaataggtgtgatcttgtttgagaaaagtgtgtaaacgtagggccagattttgttcgtctccgttccggaaaattggtggagcactcctyggctcttgtataattcaatgactggctttgccgcgtctttgtactgtcttagcctggcagcaactgcttcgggtttatcatcctcctgctggactaatgg

SEQ ID NO: 21138 - DNA, 201 bp, Homo sapiens
tggagaaccggcctgggttactcagtttgtgcagaagaaagaagagagggacctggtgaaccgactgaaggtgagacctggggtatccggaagtgggagtrctggaggaaacagggcttcagcgattgttgtggggcgattccgagactcaggcagtgcatgctcccctgccgttgctgtgcctctcagctcttccctcag

SEQ ID NO: 21139 - DNA, 201 bp, Homo sapiens
cctgcgaaggggctgcaggcaccccgaggcctgctggagaaccggcctgggttactcagtttgtgcagaagaaagaagagagggacctggtgaaccgactraaggtgagacctggggtatccggaagtgggagtgctggaggaaacagggcttcagcgattgttgtggggcgattccgagactcaggcagtgcatgctccc

SEQ ID NO: 21140 - DNA, 201 bp, Homo sapiens
ctaggcagggaaaagcgtatgttttttccttgaccttgaaaatttagcttgggctttctttgtacaaacatgaagatcctaggagaagcccaatcaatttkagagagacaagtggatgaagatagggattaaaagaattgtgcttgactgagcagagagactgatgatctgaaaggacaccaggtaaaatgtttcttttta

SEQ ID NO: 21141 - DNA, 201 bp, Homo sapiens
agctcaccaggaaagcagaatctctaaaactccagctgcagtgcaagcccagcccccagggacaccgctgtccacatctgaaatagctggcgatcatcacrgggtgggagacaggatgcagtgggcaccttccacattgaaacccactcaattaaaaccccacgtgtgggggacagacacacacgtacccatcacacccag

SEQ ID NO: 21142 - DNA, 201 bp, Homo sapiens
cctttgatctcaaaaatgccccagcctctaagtaacccatggcagtatgaagccaacaatgaggaatttcttccgagctctcccctggagatggggtggcrggagggcatgcctgcgactgagataactcccaaagcacagcagggaaggaagaggagaacaatgaggaagaaagggagctgagaagggaggggaagcaga

SEQ ID NO: 21143 - DNA, 201 bp, Homo sapiens
tgctcctcacctccagaataaggagactccttcagctttgaagatgtgggaagagcaggggtgagggcaaggaagaggatgtctgagcattgaaaaggccragaaaagaggctggagccctgaaggcaatcagcacctgttcccaagaatgcaaggctgggccttctcccctctcagacacatccatcatctgtcaagatc

SEQ ID NO: 21144 - DNA, 201 bp, Homo sapiens
gagaggagctggaagctttttggaccctgagataaaggctttcctggaggagaacactgaagtcaccagcagtggtagcctcacccctgaaatccagttgmggcttttgacccccagatgcaaattctggtgggagagagctgacctgtggccccacagtgatccttactgggcaatctactggccaggaggccaagccct

SEQ ID NO: 21145 - DNA, 201 bp, Homo sapiens
tgcagttagcttttttgttggaacacaaaaggttggagggttttggaaaacaacacgatgggtaaatttcttaactgacctgttttacagaagcacagggytcaggtggttcaccagtgtcagagactaagtgaatgcaagaaaggagagtaagggaagaggctgggaagactgccagaattctagactgtggattacata

SEQ ID NO: 21146 - DNA, 201 bp, Homo sapiens
tacaggtccttaattaaaagtgtactgttggtttctgctgagttttttattgatatgtgctgctgttttctctggaagcctctttagggaatcgaggagcrcactggtgcaggggctgggtggagccatcctccgatggagcacaggcagatggaagcccccaccccagctgcgtggcctgaagccagcctcccgctcccc

SEQ ID NO: 21147 - DNA, 201 bp, Homo sapiens
cattgatgccaggcactctctttgcagagctccatgcaggagatgggttcaacaacaccatctccttgaacgaagggcaggtgcaacatgccatcaaccayggccagtgctgggctagggtgagagcaggcacagaggggtctccacagacagagactcaagaagtccagggtggcccatgactcagacgcacaaatgggg

SEQ ID NO: 21148 - DNA, 201 bp, Homo sapiens
ggcaggccattgatgccaggcactctctttgcagagctccatgcaggagatgggttcaacaacaccatctccttgaacgaagggcaggtgcaacatgccaycaaccacggccagtgctgggctagggtgagagcaggcacagaggggtctccacagacagagactcaagaagtccagggtggcccatgactcagacgcaca

SEQ ID NO: 21149 - DNA, 201 bp, Homo sapiens
cagaacagtgagctggataattaaagaagctttttcctgcttcttgggcccagtttccatttcttccttttttctgtttttcctggctattctagtgctartttccttcctttcctttcctaggctggccttagagcatcctctcctatgtacagccagaccttctttcaagcttttattaaaatggggaaaggtcatttg

SEQ ID NO: 21150 - DNA, 201 bp, Homo sapiens
tacggagatttattgcaaagtaaaaatacacactcaagaaaggggagcatgggcatactcatgagagagctgcacaaaggggcttggggtttcttatatgrgtttctttacccaaggggtggactattcatgaagattcctggaaaaaggtgaagatttctcagaactgtgatgctgcccattttaacaccaaatacagtg

SEQ ID NO: 21151 - DNA, 201 bp, Homo sapiens
tcattgctgtattcccagtgcctagaacagtacctagcacgcactgtgtacaggtgtttgataaatattcagttaatgatgaaagggtacatactatatakacgtttatatatttgtgttttatgtatgcttatataaatatcaatataatttatatacatatatagtttatatacatatatatacacatttctaaatttc

SEQ ID NO: 21152 - DNA, 201 bp, Homo sapiens
ttagtcacatgctctagcatgtaggctgggcactgtggctcacacttataatcctagatctttgggaggccaaggtgggcagattgcttgagcccagaggktcaagaccagcctgggcaacatggtgaaaccctgtctctaaaaaaaatacaaaaattagctggatgtggtagtgggtgcctgtagtcctagctactcagg

SEQ ID NO: 21153 - DNA, 201 bp, Homo sapiens
tttatttctgcattctcttctgttcctttttaaaatatatctatcctgtcacttctaccccactgtaattttatagtaagtctataagtaagaatatagcrtagtatagttctccaactttgtttttctttttaaaaattgttttatctgttcttggtcctgagggttttactacagattttagataaatgttcttttcat

SEQ ID NO: 21154 - DNA, 201 bp, Homo sapiens
atagcttatcttttttccctcatacatcttctatttttttctatccagtctctctctcctgtattgcttttgcttgttctttctctatactggcatcaaascaaattttctaaaatgcaaaatttagcattatcctccctaaaacattgtagtgactgctctgataggccatggttatttgctagaaatctctttctcatt

SEQ ID NO: 21155 - DNA, 201 bp, Homo sapiens
agtgggtgatctcagcttactgcaacctcctcctcccaggttcaagtgattctcctgccttatcctcctgagtagctgggatcacaggtgtgcaccaccaygcctggctaatttttgtatttttaatagagacaggggtcactatgttggccgggctagtctcaaactcctgacctcaggtgatccgcccacctcagcctt

SEQ ID NO: 21156 - DNA, 201 bp, Homo sapiens
attttcaattgtatctttttaacattttctgtttccagcttatcacatttgttcctgttgctattccttgtatcaatagcttatcttttttccctcatacrtcttctatttttttctatccagtctctctctcctgtattgcttttgcttgttctttctctatactggcatcaaagcaaattttctaaaatgcaaaattta

SEQ ID NO: 21157 - DNA, 201 bp, Homo sapiens
tgaggaaggaggattggttgagcccaggagtttgaggctgcaatgagctatgattgcaccactatgttctaacctgggtgacagagagagaccctgtctcwaaaaaagcaaaactgaaaaaacctacaaaaatatttaatatgtacagtttctgatagacactaactctcttttccaatttcctaagaaacaatgctcagt

SEQ ID NO: 21158 - DNA, 201 bp, Homo sapiens
tatttgggtatgtaaacgtatatgtgtccaagaaaaactgagcgatgccatttacatctgtggtgtagtttcccacgattttgtccttcagatgcaactgracaacttcatttgggattggagagttgtctggattaagcaatttaatctgtacaagaggaagaaaatacatttcggaagcatgtagtaaatttgggaatc

SEQ ID NO: 21159 - DNA, 201 bp, Homo sapiens
caggaggctgaggaaggaggattggttgagcccaggagtttgaggctgcaatgagctatgattgcaccactatgttctaacctgggtgacagagagagacyctgtctctaaaaaagcaaaactgaaaaaacctacaaaaatatttaatatgtacagtttctgatagacactaactctcttttccaatttcctaagaaacaa

SEQ ID NO: 21160 - DNA, 201 bp, Homo sapiens
gtgactcaggaggctgaggaaggaggattggttgagcccaggagtttgaggctgcaatgagctatgattgcaccactatgttctaacctgggtgacagagmgagaccctgtctctaaaaaagcaaaactgaaaaaacctacaaaaatatttaatatgtacagtttctgatagacactaactctcttttccaatttcctaag

SEQ ID NO: 21161 - DNA, 201 bp, Homo sapiens
acatagaatctgataaactgcttcaaatttgttttcagaacagtgagctggataattaaagaagctttttcctgcttcttgggcccagtttccatttcttycttttttctgtttttcctggctattctagtgctaatttccttcctttcctttcctaggctggccttagagcatcctctcctatgtacagccagaccttct

SEQ ID NO: 21162 - DNA, 201 bp, Homo sapiens
actcgtgactgatcatcctgtatccacgcacgagctgcacgaaggccgcgcggtcactgtggctccccgttggcgagtacctgggatttcttgctcagcaktttggggccttaattcttttaggggactttttgtctaatgtctccccttcttctaattatgtgcgatatttacatagaatctgataaactgcttcaaatt

SEQ ID NO: 21163 - DNA, 201 bp, Homo sapiens
aaaaaaaaaaaaacacaaaccgtaaacactggcactcgtgactgatcatcctgtatccacgcacgagctgcacgaaggccgcgcggtcactgtggctcccygttggcgagtacctgggatttcttgctcagcagtttggggccttaattcttttaggggactttttgtctaatgtctccccttcttctaattatgtgcgat

SEQ ID NO: 21164 - DNA, 201 bp, Homo sapiens
actatccgacaggggtctgaacgcagctcgggatcagaaaaaaagcaggtcatttgcaatgtaccggagccagccccccttcccctctggctcttaggacmcccattgctggtgagggaggcaccccccgcgaggcagggactgagagccagcctctcttcctcccctggctcttaggacccccattgcgggggggggagg

SEQ ID NO: 21165 - DNA, 201 bp, Homo sapiens
tactatccgacaggggtctgaacgcagctcgggatcagaaaaaaagcaggtcatttgcaatgtaccggagccagccccccttcccctctggctcttaggasacccattgctggtgagggaggcaccccccgcgaggcagggactgagagccagcctctcttcctcccctggctcttaggacccccattgcgggggggggag

SEQ ID NO: 21166 - DNA, 201 bp, Homo sapiens
ggagggtgagacacaccccagaaggctgggactgagagccagcccctctccccccgctggctattaagacacccaacgcagggggtgaggcaccccctacraggctgggactgagagccagcccctctttcaacctggctcttaggacccccatggcagggggggaggcatcccccacgaggcggggactgagagccagcc

SEQ ID NO: 21167 - DNA, 201 bp, Homo sapiens
ccaacaacaggaaggctttcatgagttaaaggaaaaacttctggcagccccagccctggggctacccgatgtgacaaagccttttccattgtatgcttcasagagagaaaagatggcagctggacttttaacccaaactgtggggacctggctgaggccagtggcctacgtctctaaacaactagacagggtttctaaaag

SEQ ID NO: 21168 - DNA, 201 bp, Homo sapiens
tctttcactcagcataattattctgagattcatccatgttgttgtttgcatcaatattttactcttttttattgctaatattctactgtgtggatttaccrcaattaatttatccatttactctttgatggacgtttaagttgtttccagcttttggctattaaaaataaagctgttatgaacatttggatacgaatcttt

SEQ ID NO: 21169 - DNA, 201 bp, Homo sapiens
aggaaagaaggaagagaagaccgcaaaacagcaagaagacatataacaaaatggcaggagtatgttttatcaataacaatattgaatgtaagtgaactaaattctccaatcaaaagacagagtggctgaatggataaaaacacaagacccaacaatctgtcacctacaagaaacacatttcacttataaaaacacaagtag

SEQ ID NO: 21170 - DNA, 201 bp, Homo sapiens
tatctttttcagtagagatgaagttttgccatgttgcccaggctggccttgaactcctgggctcaagagatccacctgcttcagcttcccaaagtggtatrattacaggcatgagccattgcgcctggcctctatgcatatgttgagaagccccagtctgagctcagagatgacctctggttaaaatgagggacttggttt

SEQ ID NO: 21171 - DNA, 201 bp, Homo sapiens
ttttttgagacagagtctcgccctgtcacccaggctggagtgcagtggtgcaatctcagctcactgcaacctctgcctcctgggctcaagcgattctcttrcctcagcctccagagtagctgggactacaagctcaggccaccacacccaactaattatttttatttttatttttattttttgagacagagtctcactctg

SEQ ID NO: 21172 - DNA, 201 bp, Homo sapiens
tgttaacaacagagcagcatttaaaacttcagaatctgaattttaaaatcctggctactcaactgatactaaaaatcaaaatatggtaatataatcattgytgtaacctaattatggtccacatttcagtgtgtggtaataataaactatatgaaaacatttacttcagaaaagaaaagtcttacattaagctaatcatat

SEQ ID NO: 21173 - DNA, 201 bp, Homo sapiens
aatttaagcagaaagggatttgtcttagtccattctgtgctgctataacagaataccacagactgggtaacttatgaggaacagaaatctattctctcacrgttctggagcctaggacattcaagataaaggcaccaatggttgagtctctggttccatgatgatgccttgttgctgcatcctccagagaagaggaacgct

SEQ ID NO: 21174 - DNA, 201 bp, Homo sapiens
agtatgcagccaagcgcctggtgagcctcatttcttggggggcaggattatgtccaggcagggtcgccctgcttggaggctcatgggtgcgtggccagggycttggtctcccctccatgaccctcactggctatgtgctcccgtacagaagctgggctgtgagtggttgaggcgtggatcctaggagtcgacctctctcca

SEQ ID NO: 21175 - DNA, 201 bp, Homo sapiens
atggaaatttggtaccatttgctgtttgctctcacctttttttgcacagtttttaaaaaaacttttattatttatctatttatttatttattttttaaatkttattttattttaagttctggggtacatgtgcaggatgtgcaggtttgttacataggtgtgccatggtggtttgctgcatgtatcagcccatcacctggt

SEQ ID NO: 21176 - DNA, 201 bp, Homo sapiens
tcttaactaattacatttgtgacagtcctatttccagataaggccacattctgagatgctgggggttaggatttcaacacaggaatttggaggaatacaaytcaatcaggcttatggacaattctggtcttaagtcaagagtagtgttctccagtctgtatgtggaggcgcacacctatggtcccagccacttgggaggct

SEQ ID NO: 21177 - DNA, 201 bp, Homo sapiens
cgtgtcccctttccaataaggatattagccctttaggctgggtcccgtcctagtagtctcatcttaactaattacatttgtgacagtcctatttccagatmaggccacattctgagatgctgggggttaggatttcaacacaggaatttggaggaatacaattcaatcaggcttatggacaattctggtcttaagtcaaga

SEQ ID NO: 21178 - DNA, 201 bp, Homo sapiens
tctgtgcatgtctgcatccacgtgtcccctttccaataaggatattagccctttaggctgggtcccgtcctagtagtctcatcttaactaattacatttgygacagtcctatttccagataaggccacattctgagatgctgggggttaggatttcaacacaggaatttggaggaatacaattcaatcaggcttatggaca

SEQ ID NO: 21179 - DNA, 201 bp, Homo sapiens
ctctctcaactgcatgtgaaagatcttagctgaagatgactgacagtgttatttattccatgttagagttgcctacggcaacccaagcccagaatgactayggaccacagcaaaaatgtgagttaaccaaggtagcatggaagacgatgcatagcaacagtaggctatggatgaatggggagtagaataagtttaaagcag

SEQ ID NO: 21180 - DNA, 201 bp, Homo sapiens
acttttatttatttgaaaaaaacaagccccagagctgccaaggggctgccttctctgtcttgtggagacagtgcttgatcctggagagcagccatgttgaraaaaagatattttgagccctaaaataatgagaaaacaggacagagagaggtgttctgagccagttccagattttgccaactgttgcaagaactctagaat

SEQ ID NO: 21181 - DNA, 201 bp, Homo sapiens
acactaactagagaaggcaatatttgaacacaagcattcagacttcagattttaaactcttctgatacggtgaaatgtttatggtacactgttaagctaawaaaaaggatgatattgaatcgcacatatagtgtatcttaataagagaacatgcatagaagaaaagtacagaagaaaatgtgaaatacttagtgttcttta

SEQ ID NO: 21182 - DNA, 201 bp, Homo sapiens
aacaactaaaagtgctttgtggagcagggattgccaagaggcaaatcaagagtgttcctctgacaagtgctgattcttgttgaggatgacgggaactgcaygggagtgtaggacaagtagatttgtctcttgaatttgagaatcggaaaaagagaaggaagagaaataggtgtacaggaaacatcttgactcagaaacaaa

SEQ ID NO: 21183 - DNA, 201 bp, Homo sapiens
aaggtgtcagcatgcttggtcccttctgagggtcgcgagggaaagatctcttcaggcccctttccttggcttataggggcgtgttctccttgggtatcatsacatcgcctgccttctgtgcatgtctgcatccacgtgtcccctttccaataaggatattagccctttaggctgggtcccgtcctagtagtctcatcttaa

SEQ ID NO: 21184 - DNA, 201 bp, Homo sapiens
cacaaactggggcttaaacaacagaaactgacatcccacagcgctggaggctggagtccgagatcaaggtgtcagcatgcttggtcccttctgagggtcgygagggaaagatctcttcaggcccctttccttggcttataggggcgtgttctccttgggtatcatgacatcgcctgccttctgtgcatgtctgcatccacg

SEQ ID NO: 21185 - DNA, 201 bp, Homo sapiens
atatctttttctatcccttcacttcagtctatgtctgttcttaagtctaaagtgagtttcttgtagacattgcatcactagctactgatttttttttttttgagacggagtctggctctgccgcccaggctggagtgcagtggcgtgatctcggctcactgcaagctccgcctcctgggttctggccatattcctgcctca

SEQ ID NO: 21186 - DNA, 201 bp, Homo sapiens
tggagaatgttctctgtgctcttgaaaagaatatttttctgttgttgggtgaaaatttctgtatatatctgttgggtctatttggtctatcatgttgttcmaatcagctgcttttttaattgattttttgtccatatgttctattcattactgaaagtgggggtagtgaggtctactaatttattgtattgctgtcaattt

SEQ ID NO: 21187 - DNA, 201 bp, Homo sapiens
tttatagtagcattttgcacttgaggataaagagaatatggaaatattaagaaatattttagctttgttagatttttgcctccagatcaaacagaacaackcacctctacacatgtattcaggtagctgaaggcattgacaatcaaatcaaattgttcattttgaacaaccgaaaagggtgaggcaatttcaataaagaaa

SEQ ID NO: 21188 - DNA, 201 bp, Homo sapiens
agttaccatctacccaagctaaggtttcctgggaatacaggtccggaaacggtactgtaatccctttagatcccatcaggaaacatagaggatgatctgawcaataattccctccaattgatagcttaggaagatctctccattctgttattttaaggatttttaaagaccacctcaaccaagattttcaaatcatagtga

SEQ ID NO: 21189 - DNA, 201 bp, Homo sapiens
ttttttgagacagagtcttgctctgtcagccaggctggggtgcagtggtgtgatctaggctcactgcaacctctgcctcccagattcaagcaattctcctrcctcagcctccagagtagctgcgattacaggcacctgtcaccacgcctggctaatttttttttgtatttttagtagagatggagtttcaccatgttggcc

SEQ ID NO: 21190 - DNA, 201 bp, Homo sapiens
aaacttgttggcgtgtttcagttttcagagtcttctataaggtcttataccagccgagaagcagcagaaccatctgtccgtgtaccgaggacggatctcarcagctctctgttcagtggctcctgcctttgtagtggattcccttgctgtgctgtaattaagtcagccggcaggagttcctgttttgagggggcctctccc

SEQ ID NO: 21191 - DNA, 201 bp, Homo sapiens
gggtctgtatctgtttagtgctttgatattttggcaaaagatgtggggagaaggtagactagttgaagctgatatgatttttcctatgtactttttgggtratatacatgtttgcagtgacatttgctagtcctaaatgaaactaaagattggggggggataatagtgtgattggatgatactgggaatgagataataaga

SEQ ID NO: 21192 - DNA, 201 bp, Homo sapiens
gggttcctcagcctccagttccttgacttctgcctctgctctctgtatgcacatgtcccagctcacttgggtcagttcattcccggcgcaccactggatcyacccccttcccccagtgtatttgatttctctttgaaacatcattttcatcaaggttctatatagaacgaggacccttgggcgtctactccctgttctctt

SEQ ID NO: 21193 - DNA, 201 bp, Homo sapiens
gcaaaaccgtgtctggctcctccagccaggctgagtctgctgtgcctccctgcccaggccttgggaaagaggagggtgcagtggctcctggctagttccamagtggagtgtgaaaatggtgagttgtttacatgcagtggccagtacagcgtggtactcacacctctttctggaagttgccattgggtggctctgtgggct

SEQ ID NO: 21194 - DNA, 201 bp, Homo sapiens
actcagcgcatgtgtgaggaaggaggagggatagaggaaagattctgagcaggaggccgagcgcggtggctcacgcctataatcccagcactttgggaggscaaggcaggtggatcacctgaggtcaggagttcatagaccagcctggccaacatggtgaaaccctgtctctacaaaaattagccaagtgtggtggcacct

SEQ ID NO: 21195 - DNA, 201 bp, Homo sapiens
atggtaaggcaaggaactgggtggaatgtcaggttgcctgcccaatgggagaggtagggtttttctagcttgtgtgacagaagtagcaaaatctggtcctyccccctcccagtgtagctgtggctcagagttttttctttttgttgtcacttactcccttgtgattgaattttttctcctgcatccatggcaggatcccca

SEQ ID NO: 21196 - DNA, 201 bp, Homo sapiens
aatatgcatattatatatgtttgtatatatatacataaagcaatataataaagccatataagaaggctgctttcttaaatatagcagaatctgtaaactgmttcccctcgagatcatttaagcttatgctgtactgatttagtagatgttattcattcacaaacaaggtcaattactttctcttaacacgctatggctgca

SEQ ID NO: 21197 - DNA, 201 bp, Homo sapiens
cctgagccacagagctgcaggtaggggaggcagctggaaccctggcgcctggctgtggagtttgaggctctgactcctgcgccgcgctgctgccccaaccstagtcatacgaggtgtttcaccccgccctggatactctgagatcccctctgggttcagcaggctcagagagctgactgcctggagcagaaggcatggggt

SEQ ID NO: 21198 - DNA, 201 bp, Homo sapiens
tctgcactcgtggaaacaagcgtagtgaggccagcctgagccacagagctgcaggtaggggaggcagctggaaccctggcgcctggctgtggagtttgagrctctgactcctgcgccgcgctgctgccccaaccctagtcatacgaggtgtttcaccccgccctggatactctgagatcccctctgggttcagcaggctca

SEQ ID NO: 21199 - DNA, 201 bp, Homo sapiens
ctgctgttgtcatttccatttctgcactcgtggaaacaagcgtagtgaggccagcctgagccacagagctgcaggtaggggaggcagctggaaccctggcrcctggctgtggagtttgaggctctgactcctgcgccgcgctgctgccccaaccctagtcatacgaggtgtttcaccccgccctggatactctgagatccc

SEQ ID NO: 21200 - DNA, 201 bp, Homo sapiens
ataaagatctaatcttcactacagatgtcactgatacccagatacaatctatggttacagccttggttaaggctggcaacctaaaaataaaaaagagaagytgtcaaagggacttcctaaaaataaaagagaagttgtcaaagggacttccaggataatagcttaacctacagaataattgtttagactggctgggcatgg

SEQ ID NO: 21201 - DNA, 201 bp, Homo sapiens
aggcaggagaatcacttgaacctggaaggcagaggttgcagtgagccaagattgcaccactgcactccagcctcggcgggtgacagagcgagattctgtcycaaaaaaaaaaaaaagaataattggaataattatttagactgtaataagaaaaatgagctggaaggactgggcataactactgatttacaagttagatcc

SEQ ID NO: 21202 - DNA, 201 bp, Homo sapiens
cataaaaatattttttaagtaagctaatattaataggttgtttctagaatttatgcaccccaaagagagtctccctccaaataaaaagctttcaataaggraaaaaaccccacttcctagaatagctaaatattatcacctctgaaatagagttctgtgaaggaagtacatgaaagtatataaaagtgccttacctttagt

SEQ ID NO: 21203 - DNA, 201 bp, Homo sapiens
ctttaaaattcacagccctgcctttgtgcatgttgagtgtattcggtgagtagtctaggatggctaagtgtgaagaaaatctgtggaagtccactctgacrtatctaaaagcaagccttctgtgctgttttccagagccccctactgaacactctggatccagaaattctattacataaaaatattttttaagtaagctaa

SEQ ID NO: 21204 - DNA, 201 bp, Homo sapiens
aggctttgaaagaagatgctgcaaccttctcatccctgagagcaatgtttgcaacaaggtaacagtattttcttcctatgactgggtgtggtaggtggggwaaaggctttaaaattcacagccctgcctttgtgcatgttgagtgtattcggtgagtagtctaggatggctaagtgtgaagaaaatctgtggaagtccact

SEQ ID NO: 21205 - DNA, 201 bp, Homo sapiens
taggagggtgaatccaacggcggctgagacgatctttaagtgtttcaaatggaatattcaaactgatcactagatccacttcacagattttgtccagggcytcggcttgtcctaatgtcctaggaaaaccatcaaggagccagtgctggccacgcctattctccaactcggacatcattaggcgtgtgatcacatggtctg

SEQ ID NO: 21206 - DNA, 201 bp, Homo sapiens
gtaacaaagtctgggtggctttaaaacaacagaaatttatcgtctcacagttctggaggccaaaagtcagaaatcatggtgtcggcagggccatgctcccyctggcagctctagggaaaggcctttccttgccccttcctggcttctggtgtttgctggcaatccttgatgttccttggcgtgtagatgggtcacttcggt

SEQ ID NO: 21207 - DNA, 201 bp, Homo sapiens
tcccaacactttgggaggcttaggagggaggatcacttgagaccaggagttcaagaccagcctgggcaacataatgagcttctgtctctacaaaagaaatwaaaaaaatagccagatggtagttgtgtcctacttggaaggctgaggtggaaggatcacttgagtctgggaggtggaggctgcagtgaagcaagatcacat

SEQ ID NO: 21208 - DNA, 201 bp, Homo sapiens
gttggaaaccagcctgggcaacatagtgagatcttgtctctacaaaaaatttaaaaaatagctggttgttgtggcgcatgcctgcggtcccagctactcaratggctgaggcaggaggatcgcttgaacccaagagtttgaggctgcagtgagctatgattgtaccagtgcacttcagcctggacaacagagtgagacctt

SEQ ID NO: 21209 - DNA, 201 bp, Homo sapiens
caccacgcccagctaattttttgtatttttagtagagacggttttcaccgtcttgggcaggttggtcttgaactcctgacctcaggagatccgcccgcctyggcctcccaaagtgctgggattacaggcatgagccaccgcgcctggacccatattcagatttctttttttttttttttttgagacggagtctcactctgt

SEQ ID NO: 21210 - DNA, 201 bp, Homo sapiens
agactagtctgggcaacatagtgaaaccctgtctctacaaacaaaaaaaggaagaagacaaaggagaaagagtagaaggagaaggagaagaagaaggagarggaagaaggaggaagagaaggaggaggaaggaagtggctcttgcctgtaatcccagaacttttgggatgctgaagtgggtggataccttgagcccaggag

SEQ ID NO: 21211 - DNA, 201 bp, Homo sapiens
ttgggagaccaaggtgagagaatcacttgagcccagcaattcaagactagtctgggcaacatagtgaaaccctgtctctacaaacaaaaaaaggaagaagmcaaaggagaaagagtagaaggagaaggagaagaagaaggagaaggaagaaggaggaagagaaggaggaggaaggaagtggctcttgcctgtaatcccaga

SEQ ID NO: 21212 - DNA, 201 bp, Homo sapiens
aagaatactgcagtgaacacctttatgccatttttcctagattcaatcactgaatttttgccatgtttactttaattccacgcccccacctccaccatccrtttatctattgtaagggtagatttcaaaaatgagtttcccatttgccaagaaggaaggaaatctttccctcctccccttcttagagcatttctgtcagaa

SEQ ID NO: 21213 - DNA, 201 bp, Homo sapiens
ccccacaactttgtcctgctcgtccaggcctgggagacgctgggtctgtgacaggctgaaccgtgtgaggagcagccccctccctggcctggccggcccakcactggaaggcaaaggagaggtggcgggggcaggtccacgtgtgttggtaggatgtcatttagctggcaccatctctttgcctctttctttctcctttgt

SEQ ID NO: 21214 - DNA, 201 bp, Homo sapiens
caattggaactccaaaggtaacagttttctcctttcctttccttccttcttcttttctctttttctttctttctttcttcctttcttttttttttttttttggcagggtctcactctgtcaaacaggcaggagtgtagtggtgagatttctggtcactgcaacctccatccacctcctgggttcaagcagttctcccacct

SEQ ID NO: 21215 - DNA, 201 bp, Homo sapiens
aatttggggaggacatgaacattcaaaccaaagccagtagaattaggagcaaaggtggatgacttggtcttggtcttgagcgatagaaggatatttcaggyctggcgcagtggctcagccctggcgcagtggctcagcactttgggaggccgaggcgggcagatcacttgaggtcagaagttcgagaccaacctggccaac

SEQ ID NO: 21216 - DNA, 201 bp, Homo sapiens
cctggaaaatccatgatctcctaaagtaaagcaatttaaaattgttcacattatttgtgtgtgagtgtgagggggcgctttatcaccctccacctctcatycccccaccacaagcagttgccaaattcaaataatttttccttcaatgcctctcccgtgtgaccgctccttttctttcaaaagtaaatcctatgtctggga

SEQ ID NO: 21217 - DNA, 201 bp, Homo sapiens
gtgttcttttagcaatttcccatcctttgacatcctcatgctgttcttggctataaatcttcacttgctcttgctgtttcagagttgagccccttcttttsccccctccaattgcaatggttttgaatgaagtcttccttaccattttaacaagtgtcagaataatttttttaacatctgtctttacaccacagtcaacaa

SEQ ID NO: 21218 - DNA, 201 bp, Homo sapiens
ccctgaggagctgagactcagctccctggaggtgaaaagctaaagcattcccctgttgtgccattttcttccctttctctcatgcattatttttcttactstggttattcttgatgggaatttttagcagagctcagtgccatcttatcccaggaagaaaaaaaaattgtaggagataaatgtatgatgaatggtgcaaaa

SEQ ID NO: 21219 - DNA, 201 bp, Homo sapiens
acattttgatttagggagctgcttttttcaagaaacagaatcacataaacaggatttcaggccagtctcaaaaaactggaagatttcacagagccttgggyccacatttctgtgtggcatcagagggctagaggtgaatgagtcctcctctcctctcctctccccctcctcccctccattcccctcccctccccttccccg

SEQ ID NO: 21220 - DNA, 201 bp, Homo sapiens
cagataagatactgtcgaaaggacgtttggcccagcagcaggacctccaccaatgaacggactccaattcttgatttgagccttgggaaccaatcaacttwgtttccaagagtttatgtgaacttccctcctttaccagtaaaatcttccccctattcttcccttctccagacccgtggcttgccatagctgtacatcttg

SEQ ID NO: 21221 - DNA, 201 bp, Homo sapiens
aattaaacttatataatacagattaatagaagagaagcatacaaattttattataattttacttgcacatgaaagtcctcacaagacaatgaagacccaargaagtgaccagaagtagtaaacttatatatcttttagatgaagaaatgataaatttgtgaagaagtgataagacaaagcagtttggattataggcagtaa

SEQ ID NO: 21222 - DNA, 201 bp, Homo sapiens
tggacaagggcagccactgagagagctggtatccaagcagcttggagatgaagtcctggccccagaaggcactggtgtggaagccacacatctcccttgaragtgcatctggaggtctcagtatgtgaagtgctcttgaagggaagatttcccaccggccattcacagcagagcaccccagtgccccacagatacaccctc

SEQ ID NO: 21223 - DNA, 201 bp, Homo sapiens
gagtcttgctcttgtcgcccaggctggagtgcagtggtgccgtcttggctcactgcaacctcctcctcccaggttcaagcgattctcttgcctcagcctcstgtgtagctgggattacaggcgcctgccaccacatctggctaatttttgtatttttagtagagacagggtttcagcatgttggccaggctggtcttgaat

SEQ ID NO: 21224 - DNA, 201 bp, Homo sapiens
aggtgattaaagtggacaagggcagccactgagagagctggtatccaagcagcttggagatgaagtcctggccccagaaggcactggtgtggaagccacayatctcccttgaaagtgcatctggaggtctcagtatgtgaagtgctcttgaagggaagatttcccaccggccattcacagcagagcaccccagtgccccac

SEQ ID NO: 21225 - DNA, 201 bp, Homo sapiens
acttagctgctgacctctggagaattcactgcagaatcgattgcttgcttggcatgtggggaaaaatccctacacatttggtcacaaaagcattttgttgkgagagtatagtatgggagaaacagattttggtgttttttttcctattcaatcttttgcattatagcttattctttttgtatgttgttaaggaaatctttg

SEQ ID NO: 21226 - DNA, 201 bp, Homo sapiens
gcctcccaaaatactgagattacaggtgtgagccactgcttccggttaatcttcaactatatatatatatatatatatacacatacatatatatatatatwcatatacatatatttatttattgagatggagtcttgctcttgtcgcccaggctggagtgcagtggtgccgtcttggctcactgcaacctcctcctcccag

SEQ ID NO: 21227 - DNA, 201 bp, Homo sapiens
acagggtacaggtgattaaagtggacaagggcagccactgagagagctggtatccaagcagcttggagatgaagtcctggccccagaaggcactggtgtgraagccacacatctcccttgaaagtgcatctggaggtctcagtatgtgaagtgctcttgaagggaagatttcccaccggccattcacagcagagcacccca

SEQ ID NO: 21228 - DNA, 201 bp, Homo sapiens
ctgtatcttttgtaatattctttaaaacaaatgagtaaatgttaagtgttttcctgagttctgtgagccatccagcaaattggacctgaggagggtgtcarggatacctagatttaaagccagtcagtcagaaactcaggccacatcctgtgcttgtgactggcattggaagtgggagacagtcttgtcaggctgagccct

SEQ ID NO: 21229 - DNA, 201 bp, Homo sapiens
cctcaagtgatctgcctgccttggcctcccaaaatactgagattacaggtgtgagccactgcttccggttaatcttcaactatatatatatatatatatayacacatacatatatatatatatacatatacatatatttatttattgagatggagtcttgctcttgtcgcccaggctggagtgcagtggtgccgtcttggc

SEQ ID NO: 21230 - DNA, 201 bp, Homo sapiens
agagtagattttttatttattatttattattatttttgagacagaaaaatatgtcacctaggctggagtgcagttgcgtgatctcggctcgctgcaacctytgcctcccaagttcaagcaattctcttgcctcagcctcccaagtagctgggattacacactgggctaatttttgtattttttgtagagacaaggtttcac

SEQ ID NO: 21231 - DNA, 201 bp, Homo sapiens
atgtttgtctcccccagattcacatattgaagccctaatcctcagtgtgactgtatttggagatggagtgtttaaggaagtaattaaggttaaatcaggtyacaagggtggggccctgatctgataggattaatgttcttgtaagaagagagaccagagccctctctctttcttcccttgtgcacacactgaggaaaagcc

SEQ ID NO: 21232 - DNA, 201 bp, Homo sapiens
ttccctacaaaaataatgcaatatttctatctatctatctatctatctatctatctatctatctatctatctatcatctatcatctatctatgtctatatmtatcagtatgtgtgtatatatatgtatatacatggctgtatattttatgtattcctacacaattatgatgtcatggtttgtactgtagaaaaagtggggg

SEQ ID NO: 21233 - DNA, 201 bp, Homo sapiens
gagttttttatttgtttgtctttagacagcatcttgctctgtcactccaggctaatgtttttgttttgttttgttttttgacacaaaatctcactcttatsccccaggctggagtgcaatggcgtgatctcagctcactgcaacctccacctcccaggttcaagcgattctcctgcctccgcctcctgagtagctgggatt

SEQ ID NO: 21234 - DNA, 201 bp, Homo sapiens
tgctgttctgttctggaatagtcacttgattctttttggtagtttctacttctctgagattcttcaaatttttattcattatgactatattttcttctaaktctttgaacgtatttatgcagatattaaagtccttgtttgctagttccagcatctatgttacataagtttcttttctacttactgacttttctttgatcc

SEQ ID NO: 21235 - DNA, 201 bp, Homo sapiens
tagaaaactggagtcaaaaactcttccctacaaaaataatgcaatatttctatctatctatctatctatctatctatctatctatctatctatctatcathtatcatctatctatgtctatatatatcagtatgtgtgtatatatatgtatatacatggctgtatattttatgtattcctacacaattatgatgtcatggt

SEQ ID NO: 21236 - DNA, 201 bp, Homo sapiens
tttccagatccaggagataatcaactaagagccaagcacccttttagttccgataagaaacattttgcaacctgctctccctgaagtctgctatctgagakcttcctctgcacaataaaacttggtacccacaatcctttatcttaacctgaacatttcctttctattgatcccaggccttcagataaactcaaccaattg

SEQ ID NO: 21237 - DNA, 201 bp, Homo sapiens
cccttttttgtccttccttcctttccagatccaggagataatcaactaagagccaagcacccttttagttccgataagaaacattttgcaacctgctctcyctgaagtctgctatctgagagcttcctctgcacaataaaacttggtacccacaatcctttatcttaacctgaacatttcctttctattgatcccaggcct

SEQ ID NO: 21238 - DNA, 201 bp, Homo sapiens
acattccggaagtggagggccgggccagcgtgattgacaagcgggaacccctgtgtggggacggggcaggcctaggaaggttgtgcctgcggtggaacggsgcggtgcgcaggagtgggcattaacagcagccgcgtgtctgggtcttagatttggcctagctgtgttgagcttttcatggattatgttacgtagataaga

SEQ ID NO: 21239 - DNA, 201 bp, Homo sapiens
agacggagtttcaccgtggtctcgatctcctgaccttgtgatacgaccgcctcggcctcccaaagtgctgggattacaggcgtgagccaccgtgcccggcyggagaagcttgatttaaaggacagaggaagatgtgtgtaagtcatatacaaatactgtaccattttatataaggaacttgagcatttacaagtttttggt

SEQ ID NO: 21240 - DNA, 201 bp, Homo sapiens
tgcaaaggtgggtggcccgtccggagcggaaaaacattccggaagtggagggccgggccagcgtgattgacaagcgggaacccctgtgtggggacggggcmggcctaggaaggttgtgcctgcggtggaacggcgcggtgcgcaggagtgggcattaacagcagccgcgtgtctgggtcttagatttggcctagctgtgtt

SEQ ID NO: 21241 - DNA, 201 bp, Homo sapiens
actgcaatctccgcctcccggtttcaagtgattctcctgcttcagcctactgagtagctgggattacaggtgtgcaccaccacacccagctaatttttgtrtttttagtagagacggggtttcaccatgttggccaggctggtctcaaattcctgacctcaggcaatctgcccaccttggcctcccaaagtgttgggatta

SEQ ID NO: 21242 - DNA, 201 bp, Homo sapiens
cttcgtggtgccactttcttcatatgaattaaagtgaaaattgccagggtcagtggcttacgcctgtaatcccagcactttgggaggctgaggcgggtggwtcaccggggtcgggagttcgagaccagcctgactaacatggtgaaaccccaactctactaaaaatacaaaattagccaggcatggtggcacatgcctgta

SEQ ID NO: 21243 - DNA, 201 bp, Homo sapiens
agattatagtattttatatctgcaaaacttattccaaaacaaatcagtaaatccaggttaaaatacccaggtcagacagtcacatttttactaataaaaawtaactagcagcccgggtgaggtggctcatgcctgtaatcccagcactttcggaggccgcggccggcggatcacgaggtcaggagatcgagaccatcctgg

SEQ ID NO: 21244 - DNA, 201 bp, Homo sapiens
gagagcagccgctggccagccggaagccaccatgcgctgtcctcaacagagcagctccaggctgtatgacccccaggcaattaggcaccaaaagaagatgytcacactttccaaaattctttcccagggctgggggaagggagccagacttggagcccctatgtggaacttagtctccaaggaaagaaagcatgttctcat

SEQ ID NO: 21245 - DNA, 201 bp, Homo sapiens
ttccaaagtaaaatacatcaaggaaacagtgcttaccattactcattgaaattgtctgttctattctatcctattgtattctagtacttttttttttttttaatgctggaatcaactccctaaattgatttcacaaaccacttctgggtcatagcccataggttgaaaacatggttgtctatcatgttacttgtctgtttc

SEQ ID NO: 21246 - DNA, 201 bp, Homo sapiens
ggtctgctccacatcagcatcattctggcagcttctgtgaagggacagcctcaatatggggcattgctggtctccaggcagagagaaaggagagatggcaacacaatgggccacacacaagttcttagaactttggctcagaagtggcacacacttcacttacactcacatttcattggccaaaggagatcagatgtccaa

SEQ ID NO: 21247 - DNA, 201 bp, Homo sapiens
ttagtctgcttgggctgccataacaaaatatcacagaccaggtggcccaaacaacagaaattgatttctcacagttctggagtctgagaggtctaagatcraggtctctgctgatttggttcctgctgagggccctcttcctgcttgtgacagccaccttcttgctgcatcctcacgtgacttttcctctgtgcttgcatg

SEQ ID NO: 21248 - DNA, 201 bp, Homo sapiens
ctaatgtgtgtgtttgcatcttagtttcgaacaaaaaaagtttaaaaaataaaaaaagcttatagattaaggatataaagaaaggaaatatttttgtatcmctgtacaatgtgtttgtgggttttttttttttttttttttgagacagagtcttgctctatcgcccaagctggagtacagaggcatgatctcggctcactg

SEQ ID NO: 21249 - DNA, 201 bp, Homo sapiens
gattgtgaaaaagtgaaggcaaagtcctattttaaaaaggagacatttgaagtgaggacccagctctgatttttttttttttgcccaaattcctgtctaaragatctggggagtcatgccctacaaactataaattctcatcagatgggttttatttaaccttatatatcgtgttttactttccaatctgactcaggcata

SEQ ID NO: 21250 - DNA, 201 bp, Homo sapiens
cctacaaactataaattctcatcagatgggttttatttaaccttatatatcgtgttttactttccaatctgactcaggcataacattacgtgacaaagaaraaaatcaaaatattttatcccaaaacatgtttctttgccatattttgaaatggccctgcaagccatcctttgtgggggaaattttgcatgtgtaaagaat

SEQ ID NO: 21251 - DNA, 201 bp, Homo sapiens
tttttttttttgcccaaattcctgtctaagagatctggggagtcatgccctacaaactataaattctcatcagatgggttttatttaaccttatatatcgkgttttactttccaatctgactcaggcataacattacgtgacaaagaagaaaatcaaaatattttatcccaaaacatgtttctttgccatattttgaaatg

SEQ ID NO: 21252 - DNA, 201 bp, Homo sapiens
ttctaaatccccactgaactctatcctccttcacctccttgcaagccctcctcaggtaattcctatattatataaaataaaatttttatgtctcaccatakgcttcctttctgactctgctgccaaaacacactataggaaccatcagagtttttgaaagataattgcctttgataacctaaaatagaacattgtaggaaa

SEQ ID NO: 21253 - DNA, 201 bp, Homo sapiens
caacaagagtgtcctctgattgtcctctctgctacactccgtccagtgccatgacagtttacaaatgccatggcaacgtcaggaagttaccctatgtggtmtaaaaaggggaaacatgaataatccaccccttgtttagcatatcatcaataaataactataaaaatgggcaaccagcagccctcggggctgttccgttca

SEQ ID NO: 21254 - DNA, 201 bp, Homo sapiens
tgtgccacaatggcagtcctgagtacacacagcagagattctaaagtccacagatttagacttgagttctcaacacagaaatcctaaagctcacagtagaracagggtttctacctgactcagagcctgagaaatttactatgacttagagcctgagaaatttactatgtgaacctttacatgctggggaaagcctgaggg

SEQ ID NO: 21255 - DNA, 201 bp, Homo sapiens
gtgctacaattgcctacagtatttagtatactaacacactgtacaggtttgtaacctaggagcaatttgctattccatatatagtaggctgtatcatctargtttgtgtaagcacactctataaggtttgcacgaggacaaaatcacctcacgcatttctccctgctgttaagcaatgtgtgacctgtatctgtcccacca

SEQ ID NO: 21256 - DNA, 201 bp, Homo sapiens
caggttttgccatttggctaggctggtcttgaactcctgacctcaagtgatctgcccacctctgcctctcaaaatgctgagattacaggtgtgagccaccrtacttggccccaataaacctttatcaaattatttgtgccccaacagccttaattttggtaaacatgtcctatacaggtgtaccattttttatcttttata

SEQ ID NO: 21257 - DNA, 201 bp, Homo sapiens
tatcagcagcagtggctgcagaacagcggatattggtgaaccgcagatgctgctgcctgatcgttcttctggaagttttgtctcagaggagtacctggccrtgtgaggtgtcagtccacccctactggggggtgcctcccagttaggctactcgggggtcagggacccacttgaggaggcagtctgcccgttctcagatct

SEQ ID NO: 21258 - DNA, 201 bp, Homo sapiens
tagcctcccgagtagttgtgattatacgctgtgccaccatgcccagctaatttttgtatttttagtagagacaggtttcgccatcttgcccaggctggtcycaaactcctgaccttgtgatctgcctgccccggcctcccaaagtgctggggttacaggtgtgagccaccgcgcctggccaatttttgtatttttaaaaga

SEQ ID NO: 21259 - DNA, 201 bp, Homo sapiens
tcagctgcaggtctgttggagtttgctggaggtccactccagaccctgtttgcctgggtatcagcagcagtggctgcagaacagcggatattggtgaaccrcagatgctgctgcctgatcgttcttctggaagttttgtctcagaggagtacctggccgtgtgaggtgtcagtccacccctactggggggtgcctcccagt

SEQ ID NO: 21260 - DNA, 201 bp, Homo sapiens
cttccaataaaccgttttttgttgttgttgttgttgtttggagacagattcttgctctgttcccagtctggagtgcagtggcacgatttcagctcacagcmacctctgcctcccaggctcaagtgatttctcgagcctcagcctcctgagtagctgggattatagacacgcaccaccacgcccagccaatttttttttttt

SEQ ID NO: 21261 - DNA, 201 bp, Homo sapiens
tcccatctttgtggttttatctacctttggactttgatgatggtgacgtacagatgggtttttggtgtggatgtcctttctgtttgctagttttccttctwacagacaggaccctcagctgcaggtctgttggagtttgctggaggtccactccagaccctgtttgcctgggtatcagcagcagtggctgcagaacagcgg

SEQ ID NO: 21262 - DNA, 201 bp, Homo sapiens
aacgtagccggacccggcttggttccgtgaacataagtacactctatgatgttcacaccatttggcttccaataaaccgttttttgttgttgttgttgttktttggagacagattcttgctctgttcccagtctggagtgcagtggcacgatttcagctcacagccacctctgcctcccaggctcaagtgatttctcgagc

SEQ ID NO: 21263 - DNA, 201 bp, Homo sapiens
tcgtcagtcattctttgtccagctttgttccgttgctggtgaggagctgcgttcctttggaggaggagaggcactctgatttttagagtttccagtttttstgctgtttttttcccatctttgtggttttatctacctttggactttgatgatggtgacgtacagatgggtttttggtgtggatgtcctttctgtttgcta

SEQ ID NO: 21264 - DNA, 201 bp, Homo sapiens
caataaattctcttctttcctagtttttctgcttcttgttattgggccttgagaaaacgtagccggacccggcttggttccgtgaacataagtacactctrtgatgttcacaccatttggcttccaataaaccgttttttgttgttgttgttgttgtttggagacagattcttgctctgttcccagtctggagtgcagtgg

SEQ ID NO: 21265 - DNA, 201 bp, Homo sapiens
cagagtgttttccaacttggttccattctccccgtcactttcaggtacaccaatcagatgtagatttggtcttttcacatagtcccatatttcttggaggytttgttcacttctttttattctttttgctctaaacttctcttctcgcttcacttcattcatttcgtcttccatcactgataccctttctgccagttgatc

SEQ ID NO: 21266 - DNA, 201 bp, Homo sapiens
tcctgaatttgaatgttggcctgccttgctagattggggaagttttcctatatcctgcagagtgttttccaacttggttccattctccccgtcactttcasgtacaccaatcagatgtagatttggtcttttcacatagtcccatatttcttggaggctttgttcacttctttttattctttttgctctaaacttctcttc

SEQ ID NO: 21267 - DNA, 201 bp, Homo sapiens
tataattgtgtggattgtcacctgtcatgaggattacagtttggtaaaagaaaaataaacccttttttcattttgagcctggaatgtatgttactatacayggtgcaataagggccttattagatctacaggaaaattctgtctccattctaagggagagtggcttgtgggaccttaggaaccctggctctactacccaac

SEQ ID NO: 21268 - DNA, 201 bp, Homo sapiens
tggctggatatgatattctgggttgaaaattcttttctttaagaatgttgaatattggcccccactctcttctggcttgtagaatttctgccaagagatcygctgttagtctgatgggcttccctttgtgggtaacccgacctttctctctggctgcccttaacattttttccttcatttcaactttggtgaatctgacaa

SEQ ID NO: 21269 - DNA, 201 bp, Homo sapiens
attagtagagataaaacagaagttttcagaacttgcaaggaaaattaaaatcaataaagatcttttgatggcagcaggttgtattaaaatgactaatactwcttatagtgaaccagctcagaattctaaattgtctctaaaacaaactgccaaaatccagtctggaccccagataactccagtaatgccagagaatgcaga

SEQ ID NO: 21270 - DNA, 201 bp, Homo sapiens
ctgtagatgtctattaggtccacttggtgcagagctgagttcaattcctgggtatccttgttaactttctgtgtcattgatctgtctaatgttgacagtgrggtgttaaagtctcccattattattgtgtgggagtctaagtcactttgtaggtcactaaggacttgctttatgaatctgggtgctcctgtattgggtgca

SEQ ID NO: 21271 - DNA, 201 bp, Homo sapiens
tctctatttcctccagttctgctctgatcttagttatttcttgccttctgctagcttttgaatgtgtttgctcttgcttttctagttcttttaattgtgaygttagggtgtcaattttagatctttcctgctttctcttgtggacatttagtgctataaatttccctgtacacactgctttgaatgtgtcccagagattct

SEQ ID NO: 21272 - DNA, 201 bp, Homo sapiens
ttattggtgtaaaagaatgcttgtgatttttgcacatcgattttgtatcctgagactttgctgaagttgcttatcagcttaaggagattttgggctgagaygatggggttttctagatagacaatcatgttgtctgcaaacagggacaatttgacttcctcttttcctaattgaataccctttatttccttctcctgcctg

SEQ ID NO: 21273 - DNA, 201 bp, Homo sapiens
gcaggctggatgtagcatgttagccgtcatattctgtgtgctccctgcgatgtgggcacttcccttccatcgtggtgaggccaaagcaaaggcacagagasctgaacacaaacatgaaaaacaccttaccacctgggagtcaggggcaggttcaggcacatccattcctctggcatttgagcagctgttttccacagcatt

SEQ ID NO: 21274 - DNA, 201 bp, Homo sapiens
gagccactgtgcccggtcaacaatcatcttttttttttttttttttttttttttaccaggtacacaatgatgggagagttgagtcctgctttctaacttaraaaacgcatgtgtgttcatcacctggtcactgagaaacagctctggaataggtgccatgcagaagaagagagggaactggaaagacccactgatctgtgg

SEQ ID NO: 21275 - DNA, 201 bp, Homo sapiens
ttttttttttttttttttttaccaggtacacaatgatgggagagttgagtcctgctttctaacttagaaaacgcatgtgtgttcatcacctggtcactgaraaacagctctggaataggtgccatgcagaagaagagagggaactggaaagacccactgatctgtgggtctcacagcctcccgttacacagaaattgcttc

SEQ ID NO: 21276 - DNA, 201 bp, Homo sapiens
tggtcactgagaaacagctctggaataggtgccatgcagaagaagagagggaactggaaagacccactgatctgtgggtctcacagcctcccgttacacaraaattgcttcttttctctcatgttgcgttcttcctcttgattctcgacccttctccactctttcatttactccactcttactttgctttcacctcctttt

SEQ ID NO: 21277 - DNA, 201 bp, Homo sapiens
cttggacaagatcttggccactgtattagtctgcttgggctgccataacaaaatatcacagaccaggtggcccaaacaacagaaattgatttctcacagtyctggagtctgagaggtctaagatcgaggtctctgctgatttggttcctgctgagggccctcttcctgcttgtgacagccaccttcttgctgcatcctcac

SEQ ID NO: 21278 - DNA, 201 bp, Homo sapiens
gggatgaaaaatgagacaggttttatcttgttttgttttatttttgcctctcattaggtatccacctacttttcaaaattgtgttattttaatctttattrcatacagacatattctcagtaaattgaggccaccatatggaagtgtaaggatgaagccaggcgcagtggctcatgcctgtaatcctagcactttgggagg

SEQ ID NO: 21279 - DNA, 201 bp, Homo sapiens
ccacctttctggacgaaaccaatctgtttctcaaatgtatgtgattgatgtctcatgccctccctaaaatgtataaacccaagctgcaccccaaccaacckccttgggcacatgttctcaggacctcctgaaggctgtgtcacagaccatggtcactcatatttggctcaaaataaatctcttagaatattttacagagtt

SEQ ID NO: 21280 - DNA, 201 bp, Homo sapiens
cagggaggtcaaggctgcaatgagccatgattccaccactgcgctccagcctaggatacagagtgagaccctgtctcaaaaaaaaaaaaaaaaaaaaaaaaggccatatgcagtggctcatgtctgtaatcccagcactttgggaggccaaggcaggtggatcgcttgaggtcaggagttcgagaccagcctggtcaacat

SEQ ID NO: 21281 - DNA, 201 bp, Homo sapiens
ctcccgttcttcccccttcctcctccttccttccttccttccctccctccctcccctttcctatcttctgagtagggtcaaacaccagttctctacttctyggaccataagaataaagatctgtgcacaatccattttgtacatattgattcttggactaaaaatagctcaatttggtttcaaactttttctcccacccta

SEQ ID NO: 21282 - DNA, 201 bp, Homo sapiens
tgtggaatgggtaaataagctaattaacatatgcattacttcacatatttgtgtgtgtgaggtgagaacacttaaaatctattttctttttcttttttaaragagacgtttattcagcctcacgatcagactattccatttagcaatcaacagcatgggtgcaaaaaaaaaaaaagtctacattaaaaccctttgttggaa

SEQ ID NO: 21283 - DNA, 201 bp, Homo sapiens
atgtttaagaaaatacaatatccatttatagataataactttacactgaatccaagcatatccttgaacatagagatttcattttattccaagtttccacwtctgtgattacacctatgatttttaaaaatcacagttgtaaaattcctaaactgttataattatctatcaaattctgtattgttataagcatgctcttag

SEQ ID NO: 21284 - DNA, 201 bp, Homo sapiens
gaattatctccagcctgctccctgtaactggttacagcaataaattctcttctttcctagtttttctgcttcttgttattgggccttgagaaaacgtagcyggacccggcttggttccgtgaacataagtacactctatgatgttcacaccatttggcttccaataaaccgttttttgttgttgttgttgttgtttggaga

SEQ ID NO: 21285 - DNA, 201 bp, Homo sapiens
tgagttggtcttgtggaattatctccagcctgctccctgtaactggttacagcaataaattctcttctttcctagtttttctgcttcttgttattgggccytgagaaaacgtagccggacccggcttggttccgtgaacataagtacactctatgatgttcacaccatttggcttccaataaaccgttttttgttgttgtt

SEQ ID NO: 21286 - DNA, 201 bp, Homo sapiens
gcactccagttacacagatttccacagagctgccttaacattgagcaaatagttaaacctagcaaaatcggcacccagacagcaaagctagaaatgaaacrtatggtcagtaggagccttgcgtgggcttctccctaacctggagcaaaccaaaataatacagtctttcattcctagtgcaggacccatctcgggtcaacg

SEQ ID NO: 21287 - DNA, 201 bp, Homo sapiens
gtttaaaaaataaaaaaagcttatagattaaggatataaagaaaggaaatatttttgtatcactgtacaatgtgtttgtgggttttttttttttttttttttgagacagagtcttgctctatcgcccaagctggagtacagaggcatgatctcggctcactgcaacctccacctcctgggttcaagcaattctcctgcctc

SEQ ID NO: 21288 - DNA, 201 bp, Homo sapiens
gactaatgtgtgtgtttgcatcttagtttcgaacaaaaaaagtttaaaaaataaaaaaagcttatagattaaggatataaagaaaggaaatatttttgtawcactgtacaatgtgtttgtgggttttttttttttttttttttgagacagagtcttgctctatcgcccaagctggagtacagaggcatgatctcggctcac

SEQ ID NO: 21289 - DNA, 201 bp, Homo sapiens
aaccttctagtgggacaagacgtagaggtggaagacagtgatattgatgatcctgagtataagtaggcctagactaatgtgtgtgtttgcatcttagtttygaacaaaaaaagtttaaaaaataaaaaaagcttatagattaaggatataaagaaaggaaatatttttgtatcactgtacaatgtgtttgtgggttttttt

SEQ ID NO: 21290 - DNA, 201 bp, Homo sapiens
tgtccctgaaccttctagtgggacaagacgtagaggtggaagacagtgatattgatgatcctgagtataagtaggcctagactaatgtgtgtgtttgcatyttagtttcgaacaaaaaaagtttaaaaaataaaaaaagcttatagattaaggatataaagaaaggaaatatttttgtatcactgtacaatgtgtttgtgg

SEQ ID NO: 21291 - DNA, 201 bp, Homo sapiens
tgtaaaagtgttcctatttctccacatcctctccagcacctgttgtttcctgactttttaatgattgccattccaactggtgtgagatggtatctcattgyggttttgatttgcatttctctgatggccagtgatgatgagcattttttcatgtgtttttttggctgcataaatgtcttcttttgagaagtgtctgttcat

SEQ ID NO: 21292 - DNA, 201 bp, Homo sapiens
tactttataatgataataaaagactatgttactggtttatgtacttactctattctttgttgttattttagagtatactcctacttatttaaaaaaaaaaagttaactgcaaaatagcctccggcaggtcctttaggaggtgttccagaaggcattgttatcatagtagatgacagctccatgcatgttattgtccctgaa

SEQ ID NO: 21293 - DNA, 201 bp, Homo sapiens
acaatggttgaactagtttacagtcccaagaacagtgtaaaagtgttcctatttctccacatcctctccagcacctgttgtttcctgactttttaatgatygccattccaactggtgtgagatggtatctcattgcggttttgatttgcatttctctgatggccagtgatgatgagcattttttcatgtgtttttttggct

SEQ ID NO: 21294 - DNA, 201 bp, Homo sapiens
atgttaatgtccaacaagccacaaatcgggagttacagtcatgcactgaataacaacattttgatcaatggcagactgtatatatgacagcagttctgtargcttataatggagctaaaacattcctattgcctagtgacactgtggctattctgacgtcatagcatactggattactggtgtgtttgtggtgatgctggt

SEQ ID NO: 21295 - DNA, 201 bp, Homo sapiens
ctttgctattgtgaatagtgccactataaacatacgtgtgcatgtgtctttatagcagcatgatttataatcctttgggtatatagccagtaatgggatgkctgggtcaaatggtatttctagttctagatccctgaggaattgccacactgacttccacaatggttgaactagtttacagtcccaagaacagtgtaaaag

SEQ ID NO: 21296 - DNA, 201 bp, Homo sapiens
ttccgaggctttcacacttgggctgaaccacactactgacatcccaaggtctccagctcgcagatggcctgtgatggaacttctcagcctccataattgtgagagccaatccctctaataaatcctttttcctatatctatatttatatctatatcatctatctgatctatatctatcatgtcccattgattctgtctctc

SEQ ID NO: 21297 - DNA, 201 bp, Homo sapiens
aggttggttccaagtctttgctattgtgaatagtgccactataaacatacgtgtgcatgtgtctttatagcagcatgatttataatcctttgggtatatasccagtaatgggatgtctgggtcaaatggtatttctagttctagatccctgaggaattgccacactgacttccacaatggttgaactagtttacagtccca

SEQ ID NO: 21298 - DNA, 201 bp, Homo sapiens
ttaggttggttccaagtctttgctattgtgaatagtgccactataaacatacgtgtgcatgtgtctttatagcagcatgatttataatcctttgggtatayagccagtaatgggatgtctgggtcaaatggtatttctagttctagatccctgaggaattgccacactgacttccacaatggttgaactagtttacagtcc

SEQ ID NO: 21299 - DNA, 201 bp, Homo sapiens
agcattaggtatatctcctaatgctatccctcccccctccccccaccccacaacagtccccagtgtgtgatgttccccttcctgtgtccatgtgttctcaytgttcaattcccacctatgagtgagaacatgtggtgtttggtttttggtccttgcaatagtttgctgagaatgatggtttccagtttcatccatgtccct

SEQ ID NO: 21300 - DNA, 201 bp, Homo sapiens
atgcctgtgattccagctactcaagaagctgaggcagtaggatagcttgagcccaggaggcagaggttgcagtgagccatgattgtgtcactgcattccarcctgggcaacagagtgagactctgtctcaaaaaataacagttaagagccactgccagtcacagtacacagtacttaggaacaactaaaattcatctcaat

SEQ ID NO: 21301 - DNA, 201 bp, Homo sapiens
gaactcatacaaaatcagtaaagctgcaggatacaaaatcaacctacaaaaatctagcatttctataggccaatagcaaacaatctaaaaaagaaatcaakaaagtaatcccatttacaataactacaaataaaattaaatacctaggaactaaccaaataagtgaaaagtccctacaatgaaaactaaaacactggagca

SEQ ID NO: 21302 - DNA, 201 bp, Homo sapiens
tacaataagaattttaaaaatgtgagggagaaaatcacgtttgtatagacaatttaaggaaagtaaatggagacaataaatatgggctggtttttccatgrgtgactggtgtagacagatagctgcttacccaatttcttaggtataatagtccagatgtttgttttcctccctccagcttgaataacctcactgccattg

SEQ ID NO: 21303 - DNA, 201 bp, Homo sapiens
aaaattgatgcaaaaatcctcaacaaaatactagcaaaccaaattcaacaacacattaaaaagatcattcatcatgactaaataggatttatcccagggaygcaaggatagttcaacatatgcaaatcaatcaatctgatatatcatcatatcaacaaaatgaagaacaaaaaccatatgatcatttcaatggatgcttaa

SEQ ID NO: 21304 - DNA, 201 bp, Homo sapiens
caaaaggtttttttttttttgaaaaaaaaaattgacaaactgctagacagactaagaaaaagagaagacacaactaagtaaaaccagagataaagaaggamacattcaactgataccacagaaattcaaaggatcattagtggctgctatgatcaactatatgccaataaatgagaaaatctagagaaaatggataaattc

SEQ ID NO: 21305 - DNA, 201 bp, Homo sapiens
ttggggtgcgtcttgaaagctttgggaaacccagcggtcttttgggggcaggtggcccaaaaagccttctgcgcgcccaggggacgaggaggatgcgcggrccgcgaccgcgatagttttgtttgcttttctcgggagaaagcgttccaggcagtttcctgagcttcggccctcgacgtagcaaaagagcccgggcgccca

SEQ ID NO: 21306 - DNA, 201 bp, Homo sapiens
tactgccaccgggacaaagccctgggaggagctcccgcccccgcgagccggacagggcggaggctcccccgccgcgcgcgccccaccgcttcccagtcccrgacccgtcgcctgcgcctcctcctggcgcgcctcacggtgcagcgggcggcggccccgcgcgccctgcgggaggcgcctcgggatgtttccgtctggtcc

SEQ ID NO: 21307 - DNA, 201 bp, Homo sapiens
ccccgccgcgcgcgccccaccgcttcccagtcccggacccgtcgcctgcgcctcctcctggcgcgcctcacggtgcagcgggcggcggccccgcgcgccckgcgggaggcgcctcgggatgtttccgtctggtccttccctccgccccccgcgctgactccatccgctccccgccccctgctcggagccgccgccacgcgg

SEQ ID NO: 21308 - DNA, 201 bp, Homo sapiens
accctaccttgtgctgctaaccaccgagactgccgttcgcacagcagaaaaggatagacacatcatacccaagtcaaaaaagcgtcatcaccatcaaagtyataggtcattgttccagggtcaagccctaccaagttaaagctaagaaaactttatctatcttttctttcctttaactactccccatcttattaatgtaac

SEQ ID NO: 21309 - DNA, 201 bp, Homo sapiens
cgaaaattttctcccattttgtaggttgcctgttcactctgatggtagtttcttttgctgtgcagaagctctttagtttaattagatcccatttgtcaatkttgtcttttgttgccattgcttttggtgttttatacatgaagtccttgcccatgcctatgtcctgaatggtaatggctaggttttcttctagggttttta

SEQ ID NO: 21310 - DNA, 201 bp, Homo sapiens
agttagttatttgtatttcctctgagttacatgtttatatcctttggctattcactctatcagggtttttttctttttttctttttttgtcttttttcttwtcaatatgtaggcactctttgaggcacatgccacctgcttatttgtcagtcatatgtgttgcaaatattttatattatttgttttcttaaaacattatgg

SEQ ID NO: 21311 - DNA, 201 bp, Homo sapiens
gtgagtggatcacttaaacccaagagtttgagaccatcctgggcaacatggcgaaactctgtctctacaaaaaatacaaaaattagcagggcatggtggcrtgtgcctgtagtcccagatactcgggaggttgaggctgcagtgagctgtgatcataccactgcactccagcctgggtgacagaacaagaccctgccccct

SEQ ID NO: 21312 - DNA, 201 bp, Homo sapiens
gattctgaaagcttctaactaaaagtatttttgctccctgtaatagaaaacttaaatgtatttatgttttgcattgagaaaaatgttttatataatgatcyatagttattcaatattattactgaattctataattttatacttaaaactggacttactacagaatgttgaaagcaaaatacaaaactattttttggtgag

SEQ ID NO: 21313 - DNA, 201 bp, Homo sapiens
caggccaagggtctacgggagttctctgtgtaattcttgcacttttaaaaattatttaaaactaaaaactaagcttacatagataatacaaaaaataacayaaacttatagaatataaattggaattcactcatttatagaacttcacttgatttatactattaatatagctatcaataataaacaagggcaacctctttt

SEQ ID NO: 21314 - DNA, 201 bp, Homo sapiens
ctgaaatggcataaactctgtgtgtgtgtgtgtgtgtgtgtgtgtatgtatgtgtgtgtgtgtaggggtggagagagtgagaaagagaaaacaagtacggygaaatgttcacaaactggtgaatcaggccaagggtctacgggagttctctgtgtaattcttgcacttttaaaaattatttaaaactaaaaactaagctta

SEQ ID NO: 21315 - DNA, 201 bp, Homo sapiens
gttccgaggctttcacacttgggctgaaccacactactgacatcccaaggtctccagctcgcagatggcctgtgatggaacttctcagcctccataattgtgagagccaatccctctaataaatcctttttcctatatctatatttatatctatatcatctatctgatctatatctatcatgtcccattgattctgtctct

SEQ ID NO: 21316 - DNA, 201 bp, Homo sapiens
cattgtttctgggtgtgtctgtgaggatgtttccagaggagactaccatatgagtctgagtggactaagtggggaagattcccctcaatgtgtgtgggcayggtccaacttgctgggggcccagagagaacaagaacagaaagggagaatgtgtccatctgtctgccagagctgggatgcacttttcttcttctgtcctcg

SEQ ID NO: 21317 - DNA, 201 bp, Homo sapiens
gccgagatcatgccactgaacttggggttgcagtgagccgagatcatgccactgaactccagcctgggcagcagagtaagactctgtctcaacaacaacarcaacaacaacaacaacaacaacaacaacaacagttatttacatcaagggtccccaaaccctgttaggaatggggccacacagcaggaggtgagtggtggg

SEQ ID NO: 21318 - DNA, 201 bp, Homo sapiens
tggcctcccaaagtgcagggattacaggcatgagccaccatgcctgcctgattatcactgctttccagaggtgcagggtctcagataaaggtcaacagtgytcagtggtcaggaggaagaaagacctatgtgtcactgagcagagactgtaacttcctgccttcagttattcccagttactcttagaagtggtttatttat

SEQ ID NO: 21319 - DNA, 201 bp, Homo sapiens
ctgccttggcctcccaaagtgcagggattacaggcatgagccaccatgcctgcctgattatcactgctttccagaggtgcagggtctcagataaaggtcawcagtgttcagtggtcaggaggaagaaagacctatgtgtcactgagcagagactgtaacttcctgccttcagttattcccagttactcttagaagtggttt

SEQ ID NO: 21320 - DNA, 201 bp, Homo sapiens
cgggaggctgaggcaggagaattgcttgaatctgggaggcagaggttgcagtgagccgagattgcgccactggactccagcctgggtgacagagtgagacyccatctcaaaaaaaaaaaaaatcacaaacattaaaaacataagatggtgatctatttcaagtactttgttaatttttttttttttttttttacctattct

SEQ ID NO: 21321 - DNA, 201 bp, Homo sapiens
aggcggatcacaaggtcaggagttcgagaccagcctggccaacatggtgaaaccccctctctactaaaaatacaaaaattagcagggagtggtggcaggcmcctgtaatcctagttactcgggaggctgaggcaggagaattgcttgaatctgggaggcagaggttgcagtgagccgagattgcgccactggactccagcc

SEQ ID NO: 21322 - DNA, 201 bp, Homo sapiens
aattgtaattgtatatggacccaacactggatccatataccagtgttggagcacccagatacataaagcaaatattgttacagctaaaaagagagacagaycccaatataataatagctggtaacttcaacatcccattttcagcgttggacagatcttccagagagaaaatcaatgaacatcagacttaatctgtaccaa

SEQ ID NO: 21323 - DNA, 201 bp, Homo sapiens
gagcttgggaggatgaggctgcagtgagccatgattgagccactgcactctgcactccagcctgggcaatagagcaagactgtcttaaaaaaaaaaaaaaagaggtatttctcttttaggggagaaggtttacctgggaggcattatgcagggtgagcagtaatctatctggaggacacacttgggtttggtgaaggtgac

SEQ ID NO: 21324 - DNA, 201 bp, Homo sapiens
actgaatgtaaatggactacattctccaataaaaagacagagtggctgaagggattaaaaaaacaaaaaacaaaaaaacaagactcagtgatctgttgccyacaagaagcacatttcacctacaaagacacacatagactgaaaataaaaggatggaaaaacacattccatgacaatggaaatcaaaaaagactaggagta

SEQ ID NO: 21325 - DNA, 201 bp, Homo sapiens
atggcaaaaccctgtctctactaaaaatataaaaattaactgtgtatggtggcgtgcacctgtaatcccagctacttgggaggctgaggtaggagaatcayttgagcccgggaggcagaggctgcaatgagccgagattgggtcactgcattccagcctgggagacagagtgagactcagtctcaataataataataataa

SEQ ID NO: 21326 - DNA, 201 bp, Homo sapiens
acaataagatataaataaaaacaacaaaaagttagaaagcagggggatgaagttaaggtgtagagtttttattagttttctttttgcttgtgtgtttatgmaaacagtgttaggctatcagtgtaaaataataggttataagatagtatttgcaagcatcatggtaacctctaatcaaaaaacatacaacagatacgctga

SEQ ID NO: 21327 - DNA, 201 bp, Homo sapiens
tgagaccagcctggccaacatggcaaaaccctgtctctactaaaaatataaaaattaactgtgtatggtggcgtgcacctgtaatcccagctacttgggargctgaggtaggagaatcacttgagcccgggaggcagaggctgcaatgagccgagattgggtcactgcattccagcctgggagacagagtgagactcagtc

SEQ ID NO: 21328 - DNA, 201 bp, Homo sapiens
gtgtgtaaattactcttattttaagtagactaaaagataaatcaaaaataactacaacaacttttcaagacacagacagtacaataagatataaataaaamcaacaaaaagttagaaagcagggggatgaagttaaggtgtagagtttttattagttttctttttgcttgtgtgtttatgcaaacagtgttaggctatcag

SEQ ID NO: 21329 - DNA, 201 bp, Homo sapiens
ttataatctccaatgttggaggtggggcctggtgggaggcgactggatcatgagggtggtccttgatgaatggtttagagccatcccctcggtactgttcctcctgatagtgagttatcgcaagatctggttgtttagaagtgtgtagcagctctccgcccctcttcctcctgcttctaatcatgtgagacgtcttgctcc

SEQ ID NO: 21330 - DNA, 201 bp, Homo sapiens
ttgaatctgtatccccaccaaatatcatgtcaaattataatctccaatgttggaggtggggcctggtgggaggcgactggatcatgagggtggtccttgaygaatggtttagagccatcccctcggtactgttcctcctgatagtgagttatcgcaagatctggttgtttagaagtgtgtagcagctctccgcccctcttc

SEQ ID NO: 21331 - DNA, 201 bp, Homo sapiens
tagtcccagctacttgggaggctgaggcaggaagatagcttgaacctgggaggtggaggttgcagtgagcgcagattgcaccactgcacccaagcctgggygacagagcaagactctgtctcaaaaaaaaaaaaaaaaaaaaaaaaaggcttttgtttgggcattgatatctgcatcacactgaggtaagaaagaagccac

SEQ ID NO: 21332 - DNA, 201 bp, Homo sapiens
aaccccatctctaccaaaaatacaaaaattggccagtctcataacccagtctcaaaataaataaataaataaaaatttaaaaataattttttttaaaaaaraaaacatcctttaaaaaatgcccaacacaaaatcacatcagtttttattaagaatctcttacatttttaaaacacagagtgataaaaactgctataattg

SEQ ID NO: 21333 - DNA, 201 bp, Homo sapiens
gcgggcggatcatgaggtcaggagttcgagaccagcctggccaacatggtgaaaccctgtctctactaaaaatacaaaaattagctaggcatggtggcccrcacctgtaatcccagctactcgggaggctgaggcaggagaactgcttgaacccgggaggtggaggttgcagtgagctgagatcatgccactacactctag

SEQ ID NO: 21334 - DNA, 201 bp, Homo sapiens
ggctggagtgcagtggcgtgatctcggctcactgcagcctccgcctcccaggttcaagcgatcatcccacccgaacctcccaagaaactgagattaccggmatgcaccaccacacctgcctggctaatttttgtatttttagtagagatgggggtttgccatgttggccaggctggtctcaaactcctggcctcaagtgat

SEQ ID NO: 21335 - DNA, 201 bp, Homo sapiens
cttaagtgtgagcgcaacccagcccgcctcctcctccacgcccctcacactcacgtgtcgtgggaaactggagtagccaaagctcagaatccccagtgaayacccttctggggatgggagacggggccagctaggggccggccgcagaccccggtcccagagctagtttcagaggccagcgttccccctagcgcctcgctg

SEQ ID NO: 21336 - DNA, 201 bp, Homo sapiens
tggggtcagttagtaactcaattcttgcaccttacctagtgaaataaagtttggtaaaactagaaactaacattttttgattagcacttacattgcacagyggacttctttgatgaacattatacattaaacatatctgggacattcagtgtttggaataggacatttattaaagataataacagagcagtcacaaaatta

SEQ ID NO: 21337 - DNA, 201 bp, Homo sapiens
aattgggtgtagttcttcactgctttgtctcccttaaggttgttacaagagaagtaacagtttacttcctggttgcttatttattccttagacttatttakgaagggctggggtcagttagtaactcaattcttgcaccttacctagtgaaataaagtttggtaaaactagaaactaacattttttgattagcacttacat

SEQ ID NO: 21338 - DNA, 201 bp, Homo sapiens
taatttttaaaacatttttgtagaggcagggtttcgccacactgcccatggtcttgaacccctgggctcaagtgatctgcccgcctcagcctcccaaagtrctggaattacaggcatgagccaccttgcctagacttagttaagattttagtaagagtacatcaacatcaatccagtaagctttgagtttttaagagattc

SEQ ID NO: 21339 - DNA, 201 bp, Homo sapiens
tcccatcccctagtgatctcttccctttggttctggtgcaggaagtatcccttagttatgaatattttggtagtgactctcaattaaggatgtaatgatarcgattccatgtgggccatggcttggctactacagggtgcacaatttcatttacttattgaaagataagaaaaggagaactacagtcgggtcttaaattct

SEQ ID NO: 21340 - DNA, 201 bp, Homo sapiens
ccttgcctagacttagttaagattttagtaagagtacatcaacatcaatccagtaagctttgagtttttaagagattcacaatatctttcctcttgattayatcaaaattaaagagccatgttatatttacctaacactaaatatagtttctctttttaatttattatttatttatttttttaaaggccagtcaagtgaag

SEQ ID NO: 21341 - DNA, 201 bp, Homo sapiens
cctgagctgcacgtctattggagtttgctggaggtccactccagaccctgtttgcctgggtatcatcagcagaggctgcagaacagcaaatattgctgtcygatccttcctctggaagcttcatctcagaggggcacctggctgtttgaggtgtcagtcagcccctactgggagggtctccaagtcaggctacacgggggt

SEQ ID NO: 21342 - DNA, 201 bp, Homo sapiens
tcacaagatattttaaaattttatttttccttattaagcgaattgaattatttcaagcatcagtgagagctgctagactgttatatttcgggggtcttgcrgggtagcttttcttacacatataagcagaagaaaacattttcccaagtcttaaaagagggttatgatgcatttcattgtgtactctttttcttcccatat

SEQ ID NO: 21343 - DNA, 201 bp, Homo sapiens
ttttttaaaggccagtcaagtgaagcagtgggagtggagaaggaacaaagaaatctgtaactgattgtaatgaattagttatcaacaccactgcactcggwcctgcctaaatacacttgcaattactaaaatttattcactgaaaaccaaaatttcacaacacagttattctgtttcaatctcaactgagtgtactgcaat

SEQ ID NO: 21344 - DNA, 201 bp, Homo sapiens
ttagcatcgtgaattggggtccggagttgtttgtatttttctttcacaatagactgatgtatgtaacctagtctcaaatgattcagaaaaaactgaaatgscataaactctgtgtgtgtgtgtgtgtgtgtgtgtgtatgtatgtgtgtgtgtgtaggggtggagagagtgagaaagagaaaacaagtacggtgaaatgtt

SEQ ID NO: 21345 - DNA, 201 bp, Homo sapiens
cctcgtggatagaaaacaaactgataatagagactatatcttctcaacacatgagatatattcgcaaaaactcattatatatttgggcacaaaaatatacyggtggaaatattgctggccatgaagatatagaacttgaaatttaaaagaaaactctaaaataaattcctttttatatgaaaattataaagtactccagta

SEQ ID NO: 21346 - DNA, 201 bp, Homo sapiens
tagagtgaatagactttattctcctttagaagacaaagatatgcatatttaaaacaaaacataatgctgtacttcatacaaaaaacaagtgaagtgcatayttcaaaaggtgaaatccaaaggaaaagtaaaggaaaataataagaatgcaaaggctgcaatcctcctgttatcggaaatcgtagaagtaaggccaaaaga

SEQ ID NO: 21347 - DNA, 201 bp, Homo sapiens
ctgggagatagagcaagactccatctctaaaaaaaaaaaaaaatgctaatgtgagaatataaattgtgggaaatgagtgagggcaaggtggtacttcctcyttctgagctcttcacacgtaatgcaaaaacccggtcttaactgattttgttttttttctgagtatgcatatatgtggttgaatgaaccaatgtgtgattg

SEQ ID NO: 21348 - DNA, 201 bp, Homo sapiens
tgaaattcatcaagccaccagttatcagaacaattgttactctctttgtatttgacctaatggaagaataaataagctgttttatatataatatatatatrattgcaaaaatatataaaaatatgcatattatatatgtttgtatatatatacataaagcaatataataaagccatataagaaggctgctttcttaaatat

SEQ ID NO: 21349 - DNA, 201 bp, Homo sapiens
aaaaaataaacatttagctggggccgggcacggtggctcatgcctgtaatcccagcactttgggaggccaatgcaggcagatcacctgaggtcaggagttygagaccagcctggccaacatggcaaaaccctgtctctactaaaaatataaaaattaactgtgtatggtggcgtgcacctgtaatcccagctacttgggag

SEQ ID NO: 21350 - DNA, 201 bp, Homo sapiens
ggcagacagtttgcttgagcccaggagttcaagaccagcctgggcaacatagcaaaatcctatctctacaaaaaataaacatttagctggggccgggcacrgtggctcatgcctgtaatcccagcactttgggaggccaatgcaggcagatcacctgaggtcaggagtttgagaccagcctggccaacatggcaaaaccct

SEQ ID NO: 21351 - DNA, 201 bp, Homo sapiens
taagctgttgtccttaacatttcttttaggtagcacagtatacaagcttacattaaaatattcacggccaggtgcggtggctcacacctgtaatcccagcmctttgggaggccgaggcaggcggatcacaaggtcaggagttcgagaccagcctggccaacatggtgaaaccccctctctactaaaaatacaaaaattagc

SEQ ID NO: 21352 - DNA, 201 bp, Homo sapiens
ggctggggttggacctcacaatctaagctaactcgattggctaaggtttaaaattgaatagggtctattaggtggagagtccgttactaggtgggaaaagwgtctgttactaggcgggaaggcatatctggacttgtctgggcatggcaaaggcaggaaggttgtttacagaacaggtagctaggagacaaggaagtacaa

SEQ ID NO: 21353 - DNA, 201 bp, Homo sapiens
cctcctgggctcaagcgattctcttacctcagcctccagagtagctgggactacaagctcaggccaccacacccaactaattatttttatttttatttttrttttttgagacagagtctcactctgtcacccaggctggagtgcagtggcaacctcctcctcctgggttcaagcaattctcctgcctcagcctcctgagta

SEQ ID NO: 21354 - DNA, 201 bp, Homo sapiens
cacctcagccttctgagtagctggactacacacgtgctccaccacacccagctaatttttgttcttttttttttgagacagagtctcgccctgtcacccasgctggagtgcagtggtgcaatctcagctcactgcaacctctgcctcctgggctcaagcgattctcttacctcagcctccagagtagctgggactacaagc

SEQ ID NO: 21355 - DNA, 201 bp, Homo sapiens
ccaggctccagtgatcctcccacctcagccttctgagtagctggactacacacgtgctccaccacacccagctaatttttgttcttttttttttgagacasagtctcgccctgtcacccaggctggagtgcagtggtgcaatctcagctcactgcaacctctgcctcctgggctcaagcgattctcttacctcagcctcca

SEQ ID NO: 21356 - DNA, 201 bp, Homo sapiens
gcagtggcacgatctagctcactgcaacctctgcctcctgggctcaagccatcctccccagttcaggctcccaagtagttgggactacaggcacacaccaycatgcccggctaattttgtattttttgtcgagatgaggtttcaccacgttaccccggctggtctcgttacttgtgagctcaagcgacacacctgccctgg

SEQ ID NO: 21357 - DNA, 201 bp, Homo sapiens
tgacctcccaggctccagtgatcctcccacctcagccttctgagtagctggactacacacgtgctccaccacacccagctaatttttgttcttttttttttgagacagagtctcgccctgtcacccaggctggagtgcagtggtgcaatctcagctcactgcaacctctgcctcctgggctcaagcgattctcttacctca

SEQ ID NO: 21358 - DNA, 201 bp, Homo sapiens
cacagaggttcacacctgtaatcccagcactttgggaggctagggcaggtggattgcttgaacccaggagtttgagaccagcctgggcaacatggtaaagycccatctctagaaaaaaaaatataaaaattagctgggcatggtggcatgcacctgtagtcccaactacttgggagactagggtggaaggatcgcttgaac

SEQ ID NO: 21359 - DNA, 201 bp, Homo sapiens
tgcagctttgacctcccaggctccagtgatcctcccacctcagccttctgagtagctggactacacacgtgctccaccacacccagctaatttttgttctyttttttttgagacagagtctcgccctgtcacccaggctggagtgcagtggtgcaatctcagctcactgcaacctctgcctcctgggctcaagcgattctc

SEQ ID NO: 21360 - DNA, 201 bp, Homo sapiens
actcatttcttcctaacacatgggaacaaaaccaggtgacttgtacaaaatgaaactatttaagtattcatctataaactgctttcctttttccttttttwttttttttaacaaattctaaatacttacgtagataaggcttcctctgcccctaagcaaactttctgcacaataactgcacctagcttggtgagacagatg

SEQ ID NO: 21361 - DNA, 201 bp, Homo sapiens
cgtgatcatggcttactgcagctttgacctcccaggctccagtgatcctcccacctcagccttctgagtagctggactacacacgtgctccaccacacccrgctaatttttgttcttttttttttgagacagagtctcgccctgtcacccaggctggagtgcagtggtgcaatctcagctcactgcaacctctgcctcctg

SEQ ID NO: 21362 - DNA, 201 bp, Homo sapiens
ttttttttaattagcttttttttttttttttaaatcagctgagcatggtggtgttcacctgtagcaccagttgcttgggaggctgaggttgggaggatcayctgagcccaccactgcactccagcctgggcaacagaatgagactgtctctgaaaaaaaaaaaaaaaggccaggcgctgtggctcacacctgtaatcccag

SEQ ID NO: 21363 - DNA, 201 bp, Homo sapiens
acggggtctccctatgttgcccaggctgggctatattattaacacagtaaatcagctattttcttttcttttttttttgagatggagtttcgctcttgttstctaggctggagtgcaatggcacgatctcagctcaccgcaacctccacctcccaggtccaagccattctcccgcctcagtctcccgagtagctgggatta

SEQ ID NO: 21364 - DNA, 201 bp, Homo sapiens
acgacactgcactccagcctgggcaacagaatgagacgccatctcaaaaaaaaaaaaaaaagcccctgtctctactaaaaatcaaaaaaattagctgggtrtggtggcaggtgcctgtaattctagcgacttgggaggctgaggcagaaggattgcttgagcctgggaagttgaggctgcagggagtgatgattgtaccac

SEQ ID NO: 21365 - DNA, 201 bp, Homo sapiens
gcttgaacccgggagacagaggttgcagtgagctgagatcacgacactgcactccagcctgggcaacagaatgagacgccatctcaaaaaaaaaaaaaaaagcccctgtctctactaaaaatcaaaaaaattagctgggtgtggtggcaggtgcctgtaattctagcgacttgggaggctgaggcagaaggattgcttgag

SEQ ID NO: 21366 - DNA, 201 bp, Homo sapiens
tgttctttatatagcaggattgtaagtgattatcattttcctctttgtactttggccactatgagcataaatcactttttttttttttttgagacagtttygctcttattgcccaggctagagtgcaatggcacgatcttggctcaccgcaacctctcgtctcccaggctcaagcgattctcctgcctcagcctccaagta

SEQ ID NO: 21367 - DNA, 201 bp, Homo sapiens
tctttcttcttcgcaacgtagaaaagcatatcgcttataaagcttcctaggaaagggtaagacaagcacaagacagtagtatcaaagaaaaaaaaaaaaaaccaagacagtagtatcatgtacttttcattatgtcttttttttttttttttttttttaaacagagtttctctcttgttgcccaggctggagtgcaatggt

SEQ ID NO: 21368 - DNA, 201 bp, Homo sapiens
ccaggaggtggaggctgcggtgagctgagatcgtgccactgcactccagcctgggtgatggagtgagactctatcaaaaaaaaaaaaaaaaaaaaaaaaaattctccaatcagcatttccttccaaagttgaatgatgtccaattgcataagtttattattaacacacagatactttgattttatgtgttttcgttaagat

SEQ ID NO: 21369 - DNA, 201 bp, Homo sapiens
aatgggcaagagggaaaggaagaattctttgtgaacttttgctttcagcaaacttattcttattgctgtcaaccttctttaacccgcattatctggttttscttttcagtactccatggtggaactacaggtaagcggaagtttctttctcttctctgtcagttgtggaagaggaagaatgagaatttggtggtacacctt

SEQ ID NO: 21370 - DNA, 201 bp, Homo sapiens
aatctgattcagggaggcagaggttgcagtgagctgagactgcaccactgcactccatctgggtgacaaagtgagactccgtctcaaaaaaaaaaaaaaawtaagatttgtgacactgggtgcagtggctcacgcctgtaatcccaacactttgggaggctgaagcaggagaatcactttggaccagcctgggcaacatat

SEQ ID NO: 21371 - DNA, 201 bp, Homo sapiens
tggggctgtggtgctttccaggtgtgtgaagttaaaacattttagggccatacggtaggtagcacctgccacatagttgtcttggtcagccccggctgccrtgacaaaataccataaactgggtggcttagacacagaaatgtgttttctcacagtcccagaggcttgggatgtccaggatcaatgtggggaggacacaac

SEQ ID NO: 21372 - DNA, 201 bp, Homo sapiens
aagacctttttctctacaaaaaaaaaaatttttttttaattaggcatggtggtgcacacctgcagtcctagctactcaagggactgaagtgaaaggattayttgagcacagaagttcaaggctgcagtcagctctgatagtgccactgtactgcagcctgggcaacagagtgagaccctgtctctaaaaagaaaacagaac

SEQ ID NO: 21373 - DNA, 201 bp, Homo sapiens
ggaaggatcacatgagcccataagttcaaggctgcagggagctatgattgtgccactgcacttcagcttgggtgacagagtgagaccccatctctaaatayatacacatacattttttaaaattgcgattataattatactgaaattatgtttaaattatcattattattattattgtaacagtattggattctttcacag

SEQ ID NO: 21374 - DNA, 201 bp, Homo sapiens
tggatattgctttccaaatttgaaaatacggtaattaattacttgcatgttgaaatatacataaaggacttgcccacacataagattccacctgtaattayggctttgaggagaggagggcatgaagggctgcatagtcttagtattaaataattcattacgctaaaggagaatgcacgtaaagtcaagtggcaggagatg

SEQ ID NO: 21375 - DNA, 201 bp, Homo sapiens
atggcattagatgcaagacaacctcctagggattgatgcctaactgatggattctctttgagactatttagatattatgtgagcaatttaaagaccagatytaagcaaattttgaaatagatgtttgttttttgtatttctcagtatggaaactaatgctgccactctcatccccgtcccaaccatctctgtcaaaaatat

SEQ ID NO: 21376 - DNA, 201 bp, Homo sapiens
tgggaggtagggtggaacaggcattggatgttactatatgtggaaagtgaggaagacagtggagctgagaatcttctcaggctggataggaggtggttctrtttacaaaggaaggtattatggggcagagcagttttagagggtgaaattgatgctcaagttacatgagtttctgttgtttttgacacagggtttctctct

SEQ ID NO: 21377 - DNA, 201 bp, Homo sapiens
aagcggactatgagtagttagcaccctgtatcacacccagctctatgccctaattctgtattggctgtttgctgcctttgtcttgagacttaaggtgaaarccatcttagctgaggtgaagggcagtgaaaagtatagcacagtactgaatgagaagtgcatagaaatatgaactgataaaagaaacaatctctccataac

SEQ ID NO: 21378 - DNA, 201 bp, Homo sapiens
ttggttttcaacctctcccttagagcctgctccaagttttcctcagtgaggccttttgctggattggtctgaggaacaattctggctggaggtgggaagayggatcacctctaaacttctcaaggtaaggggcttcaaaggaatgcaaaaaaagagagagaggaaaaaggaaagccaaattatgatacttggggaatagat

SEQ ID NO: 21379 - DNA, 201 bp, Homo sapiens
aaaacttgattcaaatattttaggaaataacactacacaaacaaataattcaaaaaatgttagacttgaattatctttaagagcctgagcagtccctctcyctctctcattgtttacattaggagaacacagatgctcagctaacatggtttgcctaaggtgagaattaaagacagagctgaggcttgaattaagagtctc

SEQ ID NO: 21380 - DNA, 201 bp, Homo sapiens
gtttatctttttattgttgaattgtaagagttctttacatattttggatctttgatctttatcagatatataatttgcaaatatttactcctgttctgtgrgttgtctcttcatgcatgatagcgtcctgagacacatagaagtttttagttttaataaaatacaatttaaaacattttttggttcattgtgcttctgatg

SEQ ID NO: 21381 - DNA, 201 bp, Homo sapiens
ccccagttcaggctcccaagtagttgggactacaggcacacaccatcatgcccggctaattttgtattttttgtcgagatgaggtttcaccacgttacccyggctggtctcgttacttgtgagctcaagcgacacacctgccctggcctcaccctgggactacaggtgagcgactgcacacggccttttttaacctttaac

SEQ ID NO: 21382 - DNA, 201 bp, Homo sapiens
gtatgatagagctgaggcctaacacatacatcatatcaatagagtgaatagactttattctcctttagaagacaaagatatgcatatttaaaacaaaacayaatgctgtacttcatacaaaaaacaagtgaagtgcatacttcaaaaggtgaaatccaaaggaaaagtaaaggaaaataataagaatgcaaaggctgcaat

SEQ ID NO: 21383 - DNA, 201 bp, Homo sapiens
tcataagaaaaatagtatgatagagctgaggcctaacacatacatcatatcaatagagtgaatagactttattctcctttagaagacaaagatatgcatakttaaaacaaaacataatgctgtacttcatacaaaaaacaagtgaagtgcatacttcaaaaggtgaaatccaaaggaaaagtaaaggaaaataataagaat

SEQ ID NO: 21384 - DNA, 201 bp, Homo sapiens
atccaaaatatataaggaattcacataaaggatttcacataactcattagcaagaaaacataaagcccaatttaaaaacggacaaaggacttgaatggacrtttttccaaagaagacatacaaatggctgacagacatgtgaaaagttgcccaagattactaatcatgagagaaatgcaagtcaaaaccaccatgagctat

SEQ ID NO: 21385 - DNA, 201 bp, Homo sapiens
aaaagacagcctaaagaatgggacaaaatatttgcaagccatatgtttgataaggagttaatatccaaaatatataaggaattcacataaaggatttcacrtaactcattagcaagaaaacataaagcccaatttaaaaacggacaaaggacttgaatggacatttttccaaagaagacatacaaatggctgacagacatg

SEQ ID NO: 21386 - DNA, 201 bp, Homo sapiens
tatgaaaatgtcagagaattctatacttatgtgatatcctgaggactctagcagagaatgcactttttaaaaatttttatttatttattcctgagacaggktctcattctcttgcccaggctgaagctcagtggtatgataatggctcacagcagcctcgatctcccaggctcaagcaatcttcccgtcccagcctcctgg

SEQ ID NO: 21387 - DNA, 201 bp, Homo sapiens
gggtcactgggacagaatagaaagactagaaataaacccaaacatatatggtcatctaatctttgacaagggtgccaagaatacacaatggggaaaagatmatctcttcaataaatagtgttggaaaaactggatatctatatgcaaaagattgaaattggacccttgatttacaacatatacaacaattcaagtgaattg

SEQ ID NO: 21388 - DNA, 201 bp, Homo sapiens
acttgattatgtggccaaagggacagaaaacccagctggaaacttctgctttaccgctgtgcgtgcgcgcacatgtgtgtgtgtgtgtgtgtgtgtgtgtkttttctcttttccccctacactacacagaagtaagttagcctctcctgaagccaagtttccttgcacttgataggtcaatctggtgatgaagtcgcatcc

SEQ ID NO: 21389 - DNA, 201 bp, Homo sapiens
gcaacatacagattcaatgcgatgcctatcaaaattttaatggcatttttcacagatatcagaaaaacaatcctaatatttgtatggaatcgcaaaagacyccaagtaaccaaagcaatcttgagaaagaaggacaaagctggaggaaccacttcctggtttcaaactacttcctggtttcaaactacattacaaagctct

SEQ ID NO: 21390 - DNA, 201 bp, Homo sapiens
tcacccaggcttgagggcagtggcgtgatcatggcttactgcagctttgacctcccaggctccagtgatcctcccacctcagccttctgagtagctggackacacacgtgctccaccacacccagctaatttttgttcttttttttttgagacagagtctcgccctgtcacccaggctggagtgcagtggtgcaatctcag

SEQ ID NO: 21391 - DNA, 201 bp, Homo sapiens
gcttgagcccaggagttcaaagttacagtaagctataatggtgccactgcactccaatctgggcaacagagtgaaaacttgtctctctaaaaaaataaaawaaaaaaaagatgagtattgaggtaatgggtatgttaattagcttgatttaataatttcacattgtttacatatattacaacatcactccgtaccccataa

SEQ ID NO: 21392 - DNA, 201 bp, Homo sapiens
tgccaaggcaggcagatcacttgaggccaggagttcaaggccagcctaggcaacatagtgaaaccctgtctctatagaaaattaaaaaaattagacagacrtgatggtgtgtgcctgtagtcttagctactcaggaggctgaggtgggaggatggcttgagcccaggagttcaaagttacagtaagctataatggtgccac

SEQ ID NO: 21393 - DNA, 201 bp, Homo sapiens
ggatgccaaggcaggcagatcacttgaggccaggagttcaaggccagcctaggcaacatagtgaaaccctgtctctatagaaaattaaaaaaattagacasacatgatggtgtgtgcctgtagtcttagctactcaggaggctgaggtgggaggatggcttgagcccaggagttcaaagttacagtaagctataatggtgc

SEQ ID NO: 21394 - DNA, 201 bp, Homo sapiens
actttgggaggccaaggcaggcagatcacttaaggccaagagtctgagaccagcccagccaacatggggaaacccgtctctactaaaaaaaaaaaaaaaaattagcagggtatggtggcgcatgcctgtaatcccagctagttgggaggctgaggcacgagaatcgcttaatcctgggaggcagaggttgcagtgagccaa

SEQ ID NO: 21395 - DNA, 201 bp, Homo sapiens
tttgggatgccaaggcaggcagatcacttgaggccaggagttcaaggccagcctaggcaacatagtgaaaccctgtctctatagaaaattaaaaaaattasacagacatgatggtgtgtgcctgtagtcttagctactcaggaggctgaggtgggaggatggcttgagcccaggagttcaaagttacagtaagctataatg

SEQ ID NO: 21396 - DNA, 201 bp, Homo sapiens
aatgttggtcaatgggtacaacatttcagttagacaggaggaatatttttttgagatctattgcacagtatgagaactatagttaataataatgtactgtrtattccaaaaatgctaagtgaatacatttcaaatgctcttcctaccaaaaaaatgatgagtattggctgggcatggtggctcacacctgttatcccagag

SEQ ID NO: 21397 - DNA, 201 bp, Homo sapiens
tgagggaggcccctgacctccctcttcttagagcatttgctttagaaaacttgtaaattttctctctgatacttcgagatgccaattttttttttttttttggtcattttacttttagtcgatgcataatctttaaaaaagctttgtcagttttacaacccaggaaagtctttctccaagacctgggaactatttctttga

SEQ ID NO: 21398 - DNA, 201 bp, Homo sapiens
ccaaaaacaataacaacaacaaaaacaacaaaatctccaggtccagcgtggtggctcatgcctgtaatcccagcactttgggaggctgaggcaggtgggtyacttgaggtcaggagttcgagaccagcctggccaacatggtgaaaccccatctctactaaaaatacaaaaattagccgggtgtggtggggcgtgcctgta

SEQ ID NO: 21399 - DNA, 201 bp, Homo sapiens
ctaaatataattcttataaaacaaaacatctggtcagttgtgaaatgtttaaaacattgcttcttgatcaccaaataattaatatggtgaataacagatakgggcttttgtgcagtagaagattcaagaccaagacaagctcatgtttccctttaggcgggcttcctcctgagggaggcccctgacctccctcttcttaga

SEQ ID NO: 21400 - DNA, 201 bp, Homo sapiens
ctcatgtgatccacccgccttggcctcccaaggtgctggcattacaggtgtgagccactgtgcctggcctcttcgatttaattaaattaattaattaattwatttatttatttattttgagacggagtctcgctctgtcgcccaggctggagtgcagtggcgcaatctcggctgactgcaacctccgcctcccgggttcaa

SEQ ID NO: 21401 - DNA, 201 bp, Homo sapiens
agtaattataatgctataagagaggcaagcctgagtcctgggattacccctttacctctatttaggtttatctattccattccagtaatagttactcaccrctattttaaaaaagaaaagaggctttttgacatcagctgttgctattctatatgttatcttctttctgtaagggaaggtacccttatcaccattctggat

SEQ ID NO: 21402 - DNA, 201 bp, Homo sapiens
cccaaaccctcaatcaatttcttaaaaggttaactaaagcatggtaaggtacctaaatataattcttataaaacaaaacatctggtcagttgtgaaatgtktaaaacattgcttcttgatcaccaaataattaatatggtgaataacagataggggcttttgtgcagtagaagattcaagaccaagacaagctcatgtttc

SEQ ID NO: 21403 - DNA, 201 bp, Homo sapiens
tgacctcatgtgatccacccgccttggcctcccaaggtgctggcattacaggtgtgagccactgtgcctggcctcttcgatttaattaaattaattaattwatttatttatttatttattttgagacggagtctcgctctgtcgcccaggctggagtgcagtggcgcaatctcggctgactgcaacctccgcctcccgggt

SEQ ID NO: 21404 - DNA, 201 bp, Homo sapiens
agccttctgagtagctgggattataggcatgtgccaccacgcccagctaattttgtatttttagtagagacagggtttctccatgctggtctcgaactccygacctcaggtgatctgcccacctaagcctcccaaagtgctgggattacaggcgtgagtcaccgcgcctggctgttttcttttcttttctttgtttagaga

SEQ ID NO: 21405 - DNA, 201 bp, Homo sapiens
aacctgtcacccaggctggagggcagtggtgtgatcttggctcactgcaacctctgcctcccgggttcaagtgattctcccacatcagcctcctgagtagstgggactaaagcaagcgccaccacgtccggctaatttttgtattttttggtagagatgaggtttcaccatgttggccacgtcagtctcgaactcctgacc

SEQ ID NO: 21406 - DNA, 201 bp, Homo sapiens
gcaatctcagctcactgcaacctctgccgcccgggttcaagtgattctcctgccttagcctcccaagtagttgggattacgggggcttgccaccgtgcccrgctaatttttgtacttttagcagagacggggttttatcatcttggccaggctggtcttgaactcctgaccacgtgattcacccaccaaggcctcccaaag

SEQ ID NO: 21407 - DNA, 201 bp, Homo sapiens
gcctgccttggcctcccaaagtgttaagactaccggcatgagccacctgccatgtatgtatgtatgtatgtatgtatgtatgtatgtatgtatgtatgtatttttgaggcagagtttcactctatctcccaggctggagtgcagtggtgcaatctcagctcactgcaacctctgccgcccgggttcaagtgattctcctgc

SEQ ID NO: 21408 - DNA, 201 bp, Homo sapiens
tgcctgccttggcctcccaaagtgttaagactaccggcatgagccacctgccatgtatgtatgtatgtatgtatgtatgtatgtatgtatgtatgtatgtatttttgaggcagagtttcactctatctcccaggctggagtgcagtggtgcaatctcagctcactgcaacctctgccgcccgggttcaagtgattctcctg

SEQ ID NO: 21409 - DNA, 201 bp, Homo sapiens
ctgcctgccttggcctcccaaagtgttaagactaccggcatgagccacctgccatgtatgtatgtatgtatgtatgtatgtatgtatgtatgtatgtatgtatttttgaggcagagtttcactctatctcccaggctggagtgcagtggtgcaatctcagctcactgcaacctctgccgcccgggttcaagtgattctcct

SEQ ID NO: 21410 - DNA, 201 bp, Homo sapiens
tctgcctgccttggcctcccaaagtgttaagactaccggcatgagccacctgccatgtatgtatgtatgtatgtatgtatgtatgtatgtatgtatgtatgtatttttgaggcagagtttcactctatctcccaggctggagtgcagtggtgcaatctcagctcactgcaacctctgccgcccgggttcaagtgattctcc

SEQ ID NO: 21411 - DNA, 201 bp, Homo sapiens
atctgcctgccttggcctcccaaagtgttaagactaccggcatgagccacctgccatgtatgtatgtatgtatgtatgtatgtatgtatgtatgtatgtadgtatttttgaggcagagtttcactctatctcccaggctggagtgcagtggtgcaatctcagctcactgcaacctctgccgcccgggttcaagtgattctc

SEQ ID NO: 21412 - DNA, 201 bp, Homo sapiens
tttttaaaaaattctattaatactttaagggcaagtttaaatgtgatcttctccctatttctcacctcacccagttaacattaataatttcctctgtgctrtcaaaccagttgttattacagtctgttagttatatattacctatattagaacccaggctagtaaaaaacttactcaaatttctttacatcccccttcaca

SEQ ID NO: 21413 - DNA, 201 bp, Homo sapiens
aactaaatgcaatgtggtatcctggattggacagtggaacagaaaaagggtattagtggaaaaattcacgaaatccaaatgaagcctggagtttagttaayagtattattccaatgttaatttcttagttttgatgaatgtaccatggttatgtgaaacgttaacatttggagaaactgggtgaagggtaaacaggaattc

SEQ ID NO: 21414 - DNA, 201 bp, Homo sapiens
aggcagacatgaaggaggtgagacagtgagccaaaagatccttggggggaagagctttccaggcaaccagaacagctaaagcaaagatcataagacaggarcatgctcagattgtctggaaaagagcaagacaaaagcaatataatgagtgaagaggagagaaagctccagaggttacgggcggccagatcatatgaggga

SEQ ID NO: 21415 - DNA, 201 bp, Homo sapiens
catatgagggatctggcttttcctctgaacaaatgggaagtcactggagactttcaaacagaggaatgctgcgctttgaaagaatcactccaggctgggcrtggtggctcatgcctataatcccagcactttgggaggccgaggcgggcggatcatgaggtcaggagttcgagaccagcctggccaacatggtgaaaccct

SEQ ID NO: 21416 - DNA, 201 bp, Homo sapiens
ctagatttgtaaaatctggaaggaatcttagagataagaagatgacagtatcataggaaagaaaaaggaatgatataaagaaaaatctgcaataaatgaargactctaggttcatgcttcacgctctctgtgtggaactcacggttttccagagactgaggcgtctgtgggcaggaggaccaagaggagaagaaccagact

SEQ ID NO: 21417 - DNA, 201 bp, Homo sapiens
attgttacaatttatcatgaaatttagtgagtattacagagctttgtacactgggttagaaaatttgtgtttttttctttttcttttcttttctttctttyttttttttttttttttttaaagagatagtgtcttgctctgttgacaaggctggaatgcagtggtgtgatcacagatcactgcagccttgacctagactcg

SEQ ID NO: 21418 - DNA, 201 bp, Homo sapiens
tcataatcaccataggcagttgaaattgtattgctttcttagtagtttctagataaaaaagaatattttattccaaaggtatttaaccaattaagctgtcwttagaaaatattgaaagtgtaattgttaattacaccaacactaaatcctacaacaaaattaccttggattatctttctaaccttttattttaatctattt

SEQ ID NO: 21419 - DNA, 201 bp, Homo sapiens
catgaggtcaggagttcgagaccagcctggccaacatggtgaaaccctgtctctactaaaaatacaaaaattagctaggcatggtggcccacacctgtaaycccagctactcgggaggctgaggcaggagaactgcttgaacccgggaggtggaggttgcagtgagctgagatcatgccactacactctagcctgcgtgac

SEQ ID NO: 21420 - DNA, 201 bp, Homo sapiens
ctaatatatattcccgggatgactctcccactttgcaattctaagatgaagagttgtgctgaatatttgttacctagatgaagtaagacaaccctactttkgtatttctttccatgctttctgctttattcttatggaactctcagggggaatacaacattgacaagagttggaaaagggaagaggggaattttaaatgtg

SEQ ID NO: 21421 - DNA, 201 bp, Homo sapiens
cttcccagagacctggctctgggatctgtttcctattgggtaagtgatgactcaaaagtacagtaaagggccaggtgcatggctcacgcctgtaatcccarcactttgggaggcttaggagggaggatcacttgagaccaggagttcaagaccagcctgggcaacataatgagcttctgtctctacaaaagaaattaaaaa

SEQ ID NO: 21422 - DNA, 201 bp, Homo sapiens
ttcctgaccttgggattccccgagcttttgatgtcggcttctcacatatttaggatttacatctaataatatccaaagtttccttctttgggtgcagcaawgcaaacactatggtaacatggtcacttttctgtatatttttaatcaggtaatgaaaacagcttggtttctttcagacagtcatgagtgtgcttttactat

SEQ ID NO: 21423 - DNA, 201 bp, Homo sapiens
cattttactatattctcaatggtatccattattccaacatagtttaaaactctcaggtttgaattaacattgctaaagacctgaaaatcaaaataaatcayagttgaatatgtcagcactgaaaaaatattaaattttaaaaatagaatacacattttcacgctctttaaaaataattatactaaacaaagaagggaaatt

SEQ ID NO: 21424 - DNA, 201 bp, Homo sapiens
ataattctgaatatgaaaatgtcagagaattctatacttatgtgatatcctgaggactctagcagagaatgcactttttaaaaatttttatttatttattyctgagacaggttctcattctcttgcccaggctgaagctcagtggtatgataatggctcacagcagcctcgatctcccaggctcaagcaatcttcccgtcc

SEQ ID NO: 21425 - DNA, 201 bp, Homo sapiens
aaaaatgttgcattatttttaatttcaataaactcactaatatatattcccgggatgactctcccactttgcaattctaagatgaagagttgtgctgaatrtttgttacctagatgaagtaagacaaccctactttggtatttctttccatgctttctgctttattcttatggaactctcagggggaatacaacattgaca

SEQ ID NO: 21426 - DNA, 201 bp, Homo sapiens
tttgcatatgttcaacaagacaactttttctactaattgtcttctggtttcttttctatacatatttaaaaatttttttgaattgacatacagaatgtacrttgtatgaccgtggatatttaaatttatttattgtgatgaggtctcactatgttgcccaggctggtcttgaactcctgggctcaagtgatcctctcgcct

SEQ ID NO: 21427 - DNA, 201 bp, Homo sapiens
aggctttagaaaaaataattctgaatatgaaaatgtcagagaattctatacttatgtgatatcctgaggactctagcagagaatgcactttttaaaaattkttatttatttattcctgagacaggttctcattctcttgcccaggctgaagctcagtggtatgataatggctcacagcagcctcgatctcccaggctcaag

SEQ ID NO: 21428 - DNA, 201 bp, Homo sapiens
gtccttattgtcaaaataaccagtcaaactggacttatttctaacagaaaaaaatgttgcattatttttaatttcaataaactcactaatatatattcccrggatgactctcccactttgcaattctaagatgaagagttgtgctgaatatttgttacctagatgaagtaagacaaccctactttggtatttctttccatg

SEQ ID NO: 21429 - DNA, 201 bp, Homo sapiens
caaatacctgtctttcatttattaaggctttagaaaaaataattctgaatatgaaaatgtcagagaattctatacttatgtgatatcctgaggactctagyagagaatgcactttttaaaaatttttatttatttattcctgagacaggttctcattctcttgcccaggctgaagctcagtggtatgataatggctcacag

SEQ ID NO: 21430 - DNA, 201 bp, Homo sapiens
tagtcttaaacaaaacaacccaccttgttggcaaaacagttttcaatctcaagcttgtcagtgtctgcaacaatttctccattaggtaaaacagtgtaaayaagcagatgagcactaggagcagagtctgattccactcgaaaggagaaggaaaacacccctttcactggagaatttaaaaagaagaacaagttcagaata

SEQ ID NO: 21431 - DNA, 201 bp, Homo sapiens
aatctcttgaacccgggaggtggagattgcagtgagctgagatcacaccatggcactccagtctgggcaacacagctagactcagtctcaaaaaaaaaaaagaatgacagtttctaaaatatcgtgtctttgattttctaaattattatacaatttgctgataggtataattttgagttagatctttatctgttgatctgg

SEQ ID NO: 21432 - DNA, 201 bp, Homo sapiens
aaactttgaagactgatataagtacattagtaatttaatatttcaggaacagaaattttgctgaaatatcagttacatatgcgtaagtttaaaagtactayagtaacacaaagtggtcagcacagaaaaaagcatttcaaggattaagacttaccattttgtgctttaggaagaaggggtattaggtccaggagatacaag

SEQ ID NO: 21433 - DNA, 201 bp, Homo sapiens
cctttattttttttttttatgagacggagtctcactgtgtcacccaggctggagtgcagtggtgtggtctcagttcattgcaacctccatctcccaggttyaagccattctcctgcctcagcctcctgagtagctgggattacaggtgcatgccaccatgcctggctaattttatatttttagtagagatgggctttcacc

SEQ ID NO: 21434 - DNA, 201 bp, Homo sapiens
aatgattgctttcttacctggccaaaataagggagtccctgtttgtaggacatatccatattctcaaaactaatcttcaccactgatgagtctatgtataygtacttggagcctgtaagctgcacacctgcagtcaattaagtattattgagaaaatgtcacttccaaaaacagacaaacagagcttctgaaaaaaaccac

SEQ ID NO: 21435 - DNA, 201 bp, Homo sapiens
cttgaacccgggaggcggaggttgcagtgaaccgagatcgtgccactgcactgcagcctaggcgacagagcgagactctgtctcaaaaaaaaaaaaaaaaagatcttgagatgagaatgaactgggtttttgtgaaaatggcaaatggcattttgggtactgcaagcctttgcggctcggaactgtgctgtgcactgtggg

SEQ ID NO: 21436 - DNA, 201 bp, Homo sapiens
attgaacttaaaaattgttaagatggtaaatttgatatgtgcattttttcataatttaaaaaataaaaatagtatagaaaaacacctgtgaggaggaaagwagtattcaggaaaaattgtataaatctgaaaacatggaagtttaacataagtatttataacaagatgctagaaaaaaaaaaccaaaagaggtagaagaaa

SEQ ID NO: 21437 - DNA, 201 bp, Homo sapiens
ccaaagatttaatatacaaatacctgtctttcatttattaaggctttagaaaaaataattctgaatatgaaaatgtcagagaattctatacttatgtgatrtcctgaggactctagcagagaatgcactttttaaaaatttttatttatttattcctgagacaggttctcattctcttgcccaggctgaagctcagtggta

SEQ ID NO: 21438 - DNA, 201 bp, Homo sapiens
ttcaaagtcttccatattgagaatgcagtgcactagcaccctcttctgctggttgcatctcagttcttccatctcttggacaatctttaggaagctattcrtcttggagtaaaatcgatatgcaaagtactcgggctgagggtattgaggcaacacccagccatgagcctggcaattttcattggccttgtaggctgccta

SEQ ID NO: 21439 - DNA, 201 bp, Homo sapiens
gctgggtgtggtggcaggcgcttgtaatcccagctactcaggaggctgaggcaggagaattgcttgaacccgggaggcggaggttgcagtgaaccgagatygtgccactgcactgcagcctaggcgacagagcgagactctgtctcaaaaaaaaaaaaaaaaagatcttgagatgagaatgaactgggtttttgtgaaaat

SEQ ID NO: 21440 - DNA, 201 bp, Homo sapiens
taagttttatcatttatgttaactttgagcttcctcgtggcatataggtacagggatttcattaggttcaaagaagttttaaagaaaagaagcaattttgrttgtggaagaatattttcagctcataccaaataattgaagtctgctgtgtaggttttgtcttcaaagtcttccatattgagaatgcagtgcactagcacc

SEQ ID NO: 21441 - DNA, 201 bp, Homo sapiens
accattcccggctaatttttgtatttttagtagagacggggtttcgtcatgttggccaggctggtctcgaactcctgacctcaggtgatctgcccgcctcrgcctcccaaagtgctgggattacaggtgtgagtcaccacgccaggctgctccgtgacatttaaataaaatcatattttaaagtccagttgtaagcctata

SEQ ID NO: 21442 - DNA, 201 bp, Homo sapiens
agtctcccagtgcttgtctggttttctgaaaggtgtgtttgatatgcaaggtataagcaaggcctgttcatccatctccacccaaaatttaaagaaaagaraataaagtagcaagctgggggtgctccagaaaaaagcttctctcacttcacctttatcagcaactgtgtgcaaatttgcatcagcagacttttgttatga

SEQ ID NO: 21443 - DNA, 201 bp, Homo sapiens
gattcttctgcctcagcctcccgagtagctaggactacaggcatgcaccaccacgcccagctaatttttgtatttttagtagagatggggtttcaccatgwtagccaggatggtcttgatctcctgacctcgtgatccgcccgcctcagcctcccaaagtgctgggattacaggcatgaaccactgtgcccggcctgataa

SEQ ID NO: 21444 - DNA, 201 bp, Homo sapiens
tcaaacttcagtctacttttgtttctttttaaaaatcccttcttgtttgaatgtaaaagtacttacctgtctttcttggaaaagaaagggaaggacaatgrccctttcccattatagtagtgtttggaatataattaatgcactattaattaagtaattattttttcatttggcattgtgcctattcacatgtctttacat

SEQ ID NO: 21445 - DNA, 201 bp, Homo sapiens
ggagtcttgctctgtcgccaggctggagtgcagtggcgtgatcttggctcactgcgacctccgccttctgggttcaagcgattcttctgcctcagcctccsgagtagctaggactacaggcatgcaccaccacgcccagctaatttttgtatttttagtagagatggggtttcaccatgttagccaggatggtcttgatct

SEQ ID NO: 21446 - DNA, 201 bp, Homo sapiens
agatagctgactgtcatcttgcagaaaccctccactgagtttctagccatcctacccactgccaaagagactgccccgacccaccaaatttaatttataargcatttctaggaggagttcataacctattccataaattataaaagaaagaaatagttgaacatttcttattacgtcaaacttcagtctacttttgtttct

SEQ ID NO: 21447 - DNA, 201 bp, Homo sapiens
tgatctgctcacctcggcctcccaaagtgctgggattacaggcatgagccaccgtgcccggcccctagctaactttttaattgttcttttgttgagacagsatgtcactattttgcccaggctagtcttgaactggactcaagcgatctttttgccttggcctctcaaagtgctggaactccaggcatgagccactgcacc

SEQ ID NO: 21448 - DNA, 201 bp, Homo sapiens
cccaggaggtggaggttgcagtgagctgagatggcgcaactatactccagcctgggcgacagagcgagattccatctcaaaaaaaaaaaaaaaaaaaaaaattctgtaaacacaaggtgtcactatgtttcccaggctggtctcaaactctgggctcaaccgatcttcccacctcagcctcccacagtcctgggattatag

SEQ ID NO: 21449 - DNA, 201 bp, Homo sapiens
caaattgaattacacgttaacaaaacttacttaaattttccttgtatatttaattctatctcttcccaggccaagtcaaaaaaaatatgaacctttggaasaattacatctagaagtgaccagtcctagtctaaatatttaaatacataacatgaggaattcaggccaaaagtttattctgataggtctattttttgatgt

SEQ ID NO: 21450 - DNA, 201 bp, Homo sapiens
acggccagctattttttgtatttttagtagagatggggtttcaccatgttgaccaggatggtctcgaactcctgacctcaggtgatctgctcacctcggcmtcccaaagtgctgggattacaggcatgagccaccgtgcccggcccctagctaactttttaattgttcttttgttgagacaggatgtcactattttgccca

SEQ ID NO: 21451 - DNA, 201 bp, Homo sapiens
tgtggaggctgtggcaggacaattgcttgaacccaggaggtggaggttgcagtgagctgagatggcgcaactatactccagcctgggcgacagagcgagaytccatctcaaaaaaaaaaaaaaaaaaaaaaattctgtaaacacaaggtgtcactatgtttcccaggctggtctcaaactctgggctcaaccgatcttccc

SEQ ID NO: 21452 - DNA, 201 bp, Homo sapiens
caatagaacaccagaactcattccttcttcattcttttcagattaaataaaattttaaaacactcgtagagtgtcagatgtgttccaaggactgatccaartgctcaaggcacaaaaatgtatatgacatgttcacagcccatattagcttaaaattttaagccactgtgctccttgttattatagtcatataattttctt

SEQ ID NO: 21453 - DNA, 201 bp, Homo sapiens
cccgggctcaagcgattctcctgcctcagcctcctgagtagctgggattacaactgcacaccaccacggccagctattttttgtatttttagtagagatgsggtttcaccatgttgaccaggatggtctcgaactcctgacctcaggtgatctgctcacctcggcctcccaaagtgctgggattacaggcatgagccaccg

SEQ ID NO: 21454 - DNA, 201 bp, Homo sapiens
attttgtatcatgggatgcaatgaaacatccttctgtaaagcaaagggattgactacctgataatatatttacttatttatttatttatttattattattwttttttgagacggagtcttgctctgtcgccaggctggagtgcagtggcgtgatcttggctcactgcgacctccgccttctgggttcaagcgattcttctg

SEQ ID NO: 21455 - DNA, 201 bp, Homo sapiens
cgattccagctctttagataaactatgttaatcaagtgccaatcagaaaatctttgaatccacctaggacctggaagcacagttccctgccccctttgagstgtcctgcctttctagacctaaccaacgtgtaccacaaatgtatcgattaatgtcgtatgtctccctaaaacatgtagattcaaactgtggcccaaccac

SEQ ID NO: 21456 - DNA, 201 bp, Homo sapiens
tcccaaagtgttgggattccaggcataagccaccgcgtccgacctctagcttttttttttttttttttgagacagagttttgctcttgtggcccaggctgragtgcaatggcatgatctcggctcactgcaacctctgcctcccgggctcaagcgattctcctgcctcagcctcctgagtagctgggattacaactgcaca

SEQ ID NO: 21457 - DNA, 201 bp, Homo sapiens
gggtgtggtagcaggcatctgtaattccagctacttgggagactgaggcaggagaattgcttgaacctgggaggggcaggttgcagtgagctgagattgcrccactgtgctccagccttggtgataaagtgagactctgtctcaaaaaagaaaaaaaaaaggaaagaagagattctggaggtagaaacaagaaatagtttc

SEQ ID NO: 21458 - DNA, 201 bp, Homo sapiens
tgagaagccctttgtccagagcctcagtaggcagctggttcataccaaccaatggtaagcaatgctcatctgttctctcccttaaggcctctctttgtgtraagacccacaagcataagtatctgtggtggggctgtgtcatgagggcaggctcacagtgctctcctctgagttaccactactgaacataatcagggtgtg

SEQ ID NO: 21459 - DNA, 201 bp, Homo sapiens
atcacttgaacccgggaggcagaggttgcagtgagctgagattgcaccactgcattccagcctgggcaacagagtgagactctgcctcagaaaaaaaaaaraaaagaaaaaagaaaacggctggatgtggtggcctgtaatcctagcactttgggaggccgaggtgggtggatcacaaggtcaggagcttgagaccaggct

SEQ ID NO: 21460 - DNA, 201 bp, Homo sapiens
tagtagagacggggtttcttcattttggtcaggctggcctcagactcccgacctcaggtgatccgcctgcctcggcctcccaaagtgctgggattacaggygtgagccactggcccggccagagctacgagttcttaaagcactttattctttgtatctcagtgagaaggcatcaccatgctctaacttagggatgatggc

SEQ ID NO: 21461 - DNA, 201 bp, Homo sapiens
ctcccggattcaagcgattctcctgcctcagcctcccgagaagctgggattacaggcatgtgccaccatgcccggctaatttttgtgtttttagtagagasggggtttcttcattttggtcaggctggcctcagactcccgacctcaggtgatccgcctgcctcggcctcccaaagtgctgggattacaggcgtgagccac

SEQ ID NO: 21462 - DNA, 201 bp, Homo sapiens
ctgtggaaaaagcaaccttcagatactgcaaaagaaaaggagtgtgataaactcagaacaaacacaacagcagttggaatttcaaagcctgctaacatccrcgttaagagtccttgttcagttgtgggaaattcaaattctcagaataaaataagtaatccctcacagcagacagctttgtcgatggtaatgcacaattat

SEQ ID NO: 21463 - DNA, 201 bp, Homo sapiens
gcgtacaccaccatgccctgctaatttttttttatttagtagagatggggtttcaccatgttggtcaggctggtctcaaactcctgacctcaggtgatccmcccgccttggcctctcaaagtgctgggattataggtgtgagccactgtgcctggcctacaattcttaaaccttttcttacctgaagagtcttaaaacaaa

SEQ ID NO: 21464 - DNA, 201 bp, Homo sapiens
gtggagattacaggcatgagccattgtgcccagccacataagtccttttaattcatgttttctttgctggggaagcgtacattgcatgatggattcagatmctcaactttcttttttttctttttttgagatggggtctcattttgtcacctaggctggagtacagtggtgtgatcgtggcttactgcagccttgacctcc

SEQ ID NO: 21465 - DNA, 201 bp, Homo sapiens
gattacaagcgtacaccaccatgccctgctaatttttttttatttagtagagatggggtttcaccatgttggtcaggctggtctcaaactcctgacctcargtgatccacccgccttggcctctcaaagtgctgggattataggtgtgagccactgtgcctggcctacaattcttaaaccttttcttacctgaagagtctt

SEQ ID NO: 21466 - DNA, 201 bp, Homo sapiens
ggaggcgggggttgcagtgagctgagatcgcaccactgcactccagcctgggtgacagagtgagattccatctcacaaaaaaaaaaaaaaaaaaaaaaaaaaaggctagatatggctatctgggagtactgtaatatataactattattatttctcttttaagtttcaggcaaggccaggtctggtggcacacgcctgtaa

SEQ ID NO: 21467 - DNA, 201 bp, Homo sapiens
agtaactggctatggtaatgtagagaagacagatgactgcatcaatatttaagacttaaattttgagttacctcaccttataaaaatatatatcaatataytaaatactcaacaaagatccaggatgtacagtatttaaaaatacatttctcttggatcagcaccaaaaataatcagtttctgttcaacttgtgtcaagtt

SEQ ID NO: 21468 - DNA, 201 bp, Homo sapiens
gagctcaaagtgatctgcctgccttggcctttgaaagtggtgggattacaggcatgagacaccatgcctggccttcaaaaagttaatctaaaaatatatawacatatatcccagaaggagaagcagaagggtcagataggtgagaaccagggctttgaatatcagaaaaaccaggaagagataatatgtcaagtatggagt

SEQ ID NO: 21469 - DNA, 201 bp, Homo sapiens
ttagccaagcgtagtggcagacgcctgtaatcccagctaatcgggaggctgaggcatcagaatcgcttgaacccgggagacagagtgtgttgcagtgagcygtgatcatgccactgcactccagcctgggagacagagcaacacaccatctcaaaaaaaagtaataataatgaaagataagaaagagacagagaaaagaga

SEQ ID NO: 21470 - DNA, 201 bp, Homo sapiens
aaatttcccagtttctgctagaaatgaaggtaaatggaagattcagacagacatttccaagagttttttcaggtcaggcgtggtggctcacacctataatyccagcacttttgtaggatgaggagggaggattacttgaagtcaggagttcgagaccagcttgagcaataaagcaagaacccatctctacaaaaaaaaaat

SEQ ID NO: 21471 - DNA, 201 bp, Homo sapiens
acagaacgagactctgtctcaaaaaaaaaaaaaaaaaaaaaaaaaatctttaaactgggtttcacagtttaaaatctagaggtccacaaactatatttaargattcagcacttcagtcttcacagcagaactgaatgaaaaaattctacagggtccagtgcagtggctcacgcctgtaaacctaagcactttaggaggccg

SEQ ID NO: 21472 - DNA, 201 bp, Homo sapiens
ttaaaaccacaactgaagctacaagtgctctttagtacaaccactttctgaaatttcataaatactgcccatcatttacatgctcatcacttggcactagyttataaataaataagacatgtttgcttaaaaaaaaatcaaagccttgttggtacctgcatgcttgcttgcatatacctggtaaaaatggttaattttatt

SEQ ID NO: 21473 - DNA, 201 bp, Homo sapiens
tcccagctatcccaggaggctgaggcaggaagatcccttgagcccaggaggttgaggctgtagtgagctatgatggcctgttaatagccactgtgctccaytctgggcaacaaagggagactctttatctcttaaaaaaaaaaaaaaaggcacagtggctcatgcctgaaatcccaacagtgggaggccaaggtggaagaa

SEQ ID NO: 21474 - DNA, 201 bp, Homo sapiens
aaactagacaaaattatatcataaataaactctaaagtacaaggacatcaagagaaaattgttcagagaaaactttaaaagcagcacagaggaaaaacaamagaacaaaactgaaaaagaatgaattaaaacaggtcacaaagtgattgaattggaaagcaggcaaggaagatccaacaaatgtacagagatttttttaga

SEQ ID NO: 21475 - DNA, 201 bp, Homo sapiens
attctgatatagtgactctcaggatttgagctgactaaagtcagtagcagaagtgagccatgaacttgaaacattgagggcaaaactgataaacaggagtygtgagtcatagcacaagacactgccacagaaaattgtggtgtagcagctgctataaatttcacagtgtgatcatgagaggtgaggagggaaaggatgaag

SEQ ID NO: 21476 - DNA, 201 bp, Homo sapiens
tacaggtgttggtggttaccttagactttagagcaagttcctgacacatctagaaaaggaatctttatggcctggatctcagttcccactaggccaaattrctttaagatgcgatatccttccctgactttctcttttctttcaacctgtcatctgactcaggattgtgctttgactctgttgttgcagcttcctcttcca

SEQ ID NO: 21477 - DNA, 201 bp, Homo sapiens
ccaaagtgctaggattataggcgtgagccacagcatccagcctctcacctcaaatactgaaagagctccctaactggtctcttgcctctacccctgccctratatagtctacccaacatggcagccacaacagtcattttagaaggcacatcagatcttgtcattactctgctcaaaaccttccaatactttcccatctca

SEQ ID NO: 21478 - DNA, 201 bp, Homo sapiens
tattgaactcaggaaaactagacaaaattatatcataaataaactctaaagtacaaggacatcaagagaaaattgttcagagaaaactttaaaagcagcayagaggaaaaacaacagaacaaaactgaaaaagaatgaattaaaacaggtcacaaagtgattgaattggaaagcaggcaaggaagatccaacaaatgtaca

SEQ ID NO: 21479 - DNA, 201 bp, Homo sapiens
taaacttactgctcttttaataacgacagtttacaaagcacttctgaaatgtagattatttttatttaaattttatgtatttcaatttcgagtagataatrtgtttacatggttcaaaattcaaaaggtacaaaagaaaatagggtaaaaagtctttttcctattttgtctccagtgactgttttttccattccagaggca

SEQ ID NO: 21480 - DNA, 201 bp, Homo sapiens
aacacttggtccaaactcacttttcttctggattcatattttctgatctcacctattatgttatagaactgatatgttacgtttgttttcattgatgcgtstgtacttggcttcagagagcagaacaaggccctgtgagtcactgggagccagattttggatcaaaataaatcactttctgacaagtgtagttgtctagta

SEQ ID NO: 21481 - DNA, 201 bp, Homo sapiens
ctcatctagctattttgtaatttgctaaatcttactgtaaactattgtcagcctactgtgcaatagaacaccagaactcattccttcttcattcttttcarattaaataaaattttaaaacactcgtagagtgtcagatgtgttccaaggactgatccaaatgctcaaggcacaaaaatgtatatgacatgttcacagccc

SEQ ID NO: 21482 - DNA, 201 bp, Homo sapiens
tcaggtttactgtagttaatgaggccaaaaaaaaaaaaggacattttcaaggagaaacagaaacattattagaaaagattctgggctgggcgcgctggctyatgcctgtaatcccagcactttgggaggctgaggcaggcagatcacctgaggtcaggagtttgggactagcctggccaacatggtgaaatcccgtttcta

SEQ ID NO: 21483 - DNA, 201 bp, Homo sapiens
tacttcatccatttatcttttttttttatggtgaagacattcaaaaacctctcatctagctattttgtaatttgctaaatcttactgtaaactattgtcakcctactgtgcaatagaacaccagaactcattccttcttcattcttttcagattaaataaaattttaaaacactcgtagagtgtcagatgtgttccaagga

SEQ ID NO: 21484 - DNA, 201 bp, Homo sapiens
gtcaactccaggtaagagaaagtctagcattgttaaaaatacaaatcatagttttcggactcaacagttcccagtacagcacacagggaaagggcttggastgaatgggcctggaagtggaagcttccaaaaaacatggctaaggggaaataatcagatcacaagaagaggtatgcagatccttggagacagggaatttaa

SEQ ID NO: 21485 - DNA, 201 bp, Homo sapiens
attaaggaaaaggaatatgcttatatctaaaaccagatactcccattataaatcaataaattggcattcttacttctattgtagccttatttgaatgtaayacttgaccatccatcaacatgtgtgtgaaaattttggttgatatatgaaacattcagaatttgaatcagatgaacccaatgaaaagccctcagggaaaaa

SEQ ID NO: 21486 - DNA, 201 bp, Homo sapiens
gcagagaaaaagagagcagaatggcatggagaaatgagaagaaacacacaccaagtcaactccaggtaagagaaagtctagcattgttaaaaatacaaatyatagttttcggactcaacagttcccagtacagcacacagggaaagggcttggactgaatgggcctggaagtggaagcttccaaaaaacatggctaagggg

SEQ ID NO: 21487 - DNA, 201 bp, Homo sapiens
gttttccttctaacagtcagggtcctctgctgcaggtctgctggagtttgctggaggtccattccagaccctgtttgcctgggtatcaccagtggaggctkcagaacagcaaagattgctccctcttccttcctctggaagcttcgtcccagaggggcaccctccacatgccagacagagctctcctgtacaaggtgtctg

SEQ ID NO: 21488 - DNA, 201 bp, Homo sapiens
tgcttcaattttgatttctgtatctagcactaattgtttttgtcttagattattggccattcctatactccaccatttccttatcagacaagtaaataaaygtagacatttgcccaagtttcccttgcagagtttcctctccttcttccttctccttccacctctctgtatctcctctcagttctctccatgtttaccact

SEQ ID NO: 21489 - DNA, 201 bp, Homo sapiens
ctttatttcattaagttgtcttcaatctctgatgtcctttcttccgtgtgattgattcagctatggatacttgttatgcttcacaaagttctcatgctgtrtttttcacctccatcaggtcatttatgttcttctctaaactagttattctagttagcaattcctctaaccttttttcaaggttcttagcttccttgcatt

SEQ ID NO: 21490 - DNA, 201 bp, Homo sapiens
ggtgtcgattttagatctttcccactttctcctgtaggcatttaatgctatgaatttccctctaaacactgctttagctgcatcgcagagattctggtacrttgtttctttgttctcatgggtttcaaagaacttatttatttctgccttaatttcgttatttacccagtagtcattcaggagtaggttgttcggtttcca

SEQ ID NO: 21491 - DNA, 201 bp, Homo sapiens
aattactgcctcaatttcagaacttattattggtctattcaggaattcgacttattcctggtgtagtcttgggagggtgtatgtgtccaggaatttatcartttcttctagattttatagtttatttgcatagaggtgtttatagtattctctgatggtagtttgtatttctgtgggatcagtggtgatatcccctttatc

SEQ ID NO: 21492 - DNA, 201 bp, Homo sapiens
ttaagttctgggatacatgtgcagaacatgcaggtttgttccataggtatacacgtgccatggtggtttgctgcatccatcaacccgtcatctacattagrtatttcttctaatgctatccctcccctagcccccaaccccctaacaggccccggtgtgtgatgttcccctccctgtgtccatgtgttctcattgtacaac

SEQ ID NO: 21493 - DNA, 201 bp, Homo sapiens
aggggctccatgagatccatttagttgcattcatcctcctgtccccaaagtatatcagtaaatgtactgtttcttgacagtttggctgtgttatcccagasgactggatgtgggaatctccaaatggccagataatactctcagcttccaattcagtgaaactattcttaagcatgttaatgaaaatatacttctttcctg

SEQ ID NO: 21494 - DNA, 201 bp, Homo sapiens
cgccatgttggtcaggctggtcttgaactcctgacctcaggtgatccacccacctcagcataatgcctggccagcatttgttgttgttgttgttgttgttktttttttttttaaagacagagtcatgcttgttttggcagcacatatactaaaaaactggaacaatacagagaagattattagcatggcccctgcacgagg

SEQ ID NO: 21495 - DNA, 201 bp, Homo sapiens
gctgaggcaggcggatcatgaggtcaggagatcgagaccatcctggccaacgcggtgaaaccctgtctctactaaaaaaaaatacaaaatattagccgggygtggtggcgggcacctgtagtcccagctactcgggaggctgaggcaggagaatggcgtgaacccgggaggctgagcttgcagtgagccgaaatcatgcca

SEQ ID NO: 21496 - DNA, 201 bp, Homo sapiens
ggtttcgccatgttggtcaggctggtcttgaactcctgacctcaggtgatccacccacctcagcataatgcctggccagcatttgttgttgttgttgttgytgttttttttttttttaaagacagagtcatgcttgttttggcagcacatatactaaaaaactggaacaatacagagaagattattagcatggcccctgca

SEQ ID NO: 21497 - DNA, 201 bp, Homo sapiens
aaatggagtctctctctgtgctaaaccacctggaccttggggggtggggtgtcaccagcacaccgtggccaccacaactgggactgtaccggttcagaccygaagccaggatagcactcgatcttgcccaaggcccggtgtaaccactacctggctaccacctaagtttactccaggccctaggactctgcagtcagcagg

SEQ ID NO: 21498 - DNA, 201 bp, Homo sapiens
cggagtctcactctgttgcccaggctgtagtgcatgtagtgcagtggcacgatattggcttactgcaacctccacctctcaggttcaagcaattctcctgyctcagcctcccaagtagctaggattacaggtgcacactaccatgcccagctaatttttgtatttttagtagagacggggtttcgccatgttggtcaggct

SEQ ID NO: 21499 - DNA, 201 bp, Homo sapiens
gggtttcgctgtgttagccaggatggtcttgatctcctgacctcgtgatccgcccgcctctgcctcccaaagtgctgggattacaggcgtgagccaccgcrcctggccctggtgccttagttctttgggcgaggtcatgttttcctggatggtcttcatccttgtagatatttgtctatgtctgggcattgaagagttagg

SEQ ID NO: 21500 - DNA, 201 bp, Homo sapiens
aaggaagggagacaaagaaaaccagttctagcttcacctactcctgcctaagtctaacacaaatgttgtgttggtccatcctttaaactcttcatctacayaggacagctacaaatagcaactggttaccatatcttttaacagcaaattggtgtgtcactgtcttccttgagtttcttttcacaacaatccagtaatctc

SEQ ID NO: 21501 - DNA, 201 bp, Homo sapiens
taggggaaaatcccttccttgcctcttttagcttctggtggctgttggcattcctgttttttttttttttttttttttttgagacggagtctcactctgtygcccaggctgtagtgcatgtagtgcagtggcacgatattggcttactgcaacctccacctctcaggttcaagcaattctcctgtctcagcctcccaagta

SEQ ID NO: 21502 - DNA, 201 bp, Homo sapiens
acaatctcggctcattgcaagctccacctcctgggttcacgccattctcctgcctcagcctcccgagtagctgggactacaggcgcccgccaccacgcccrgctaattttttgtatttttagtagagacggggtttcgctgtgttagccaggatggtcttgatctcctgacctcgtgatccgcccgcctctgcctcccaaa

SEQ ID NO: 21503 - DNA, 201 bp, Homo sapiens
aaaaaaaaaagcaaggtgtcagcagggctgtattcccttgaaattctaggggaaaatcccttccttgcctcttttagcttctggtggctgttggcattccygttttttttttttttttttttttttgagacggagtctcactctgttgcccaggctgtagtgcatgtagtgcagtggcacgatattggcttactgcaacct

SEQ ID NO: 21504 - DNA, 201 bp, Homo sapiens
taaccaccaccacaatcatgatacagaacatttccatcatccccaaaagttaccctgtgatctttttttttttttttttgagacggagtctcgctctgtcrcccaggctggagtgcagtggagcgatctcaggtcactgcaagttccgcctcccgggttcacgccattctcctgcctcagcctcccgagtagctgggacta

SEQ ID NO: 21505 - DNA, 201 bp, Homo sapiens
aaattttgcaatgaatacattcttgtaaaagcacttaactttacataagtgtttaaaggaaaacacatagatatatccccaaccttcttttttcttttttytttttttttgtggcagggtcttactttgtcacccaggctagagtgcagtggtgtgatcatggctcactgtagtcttgacctccgggtgcaagtgatcctc

SEQ ID NO: 21506 - DNA, 201 bp, Homo sapiens
agtcaccaattttgatgagctttgacaaatggatagtcatgtaaccaccaccacaatcatgatacagaacatttccatcatccccaaaagttaccctgtgmtctttttttttttttttttgagacggagtctcgctctgtcacccaggctggagtgcagtggagcgatctcaggtcactgcaagttccgcctcccgggttc

SEQ ID NO: 21507 - DNA, 201 bp, Homo sapiens
agtagaaatagggttttaccatattggtcacgctggtctcgaactcctgacctcaggtgatccgcccacctcagcctcccaaagtgctgggattacaggcrtaagccaccatgcccggctaacgtttctttcagtaaaattcaagtaggttttttctacactaatgcataaaaattgttaaaatgaaaacctcttataatt

SEQ ID NO: 21508 - DNA, 201 bp, Homo sapiens
gccatgcctgactaatttttgtattttttttgtagacacagggttttgccatgtaagccaggttggtctagaactcttgagctaaggacagtccgcctgtkttggcctcccaaagtgctaggattacaggctaactttcaatttaataaaaaaaattaatttgtgcaattggttgttattttatagaagcctaatttctag

SEQ ID NO: 21509 - DNA, 201 bp, Homo sapiens
ggctcactgcaccctccgcctcccaggttcaagcaattctcctgcctcagcctcccgtgtagctgggactacaggtgccggccaccatgcatggctaattyttttgtatttttagtagaaatagggttttaccatattggtcacgctggtctcgaactcctgacctcaggtgatccgcccacctcagcctcccaaagtgct

SEQ ID NO: 21510 - DNA, 201 bp, Homo sapiens
tttgtagacacagggttttgccatgtaagccaggttggtctagaactcttgagctaaggacagtccgcctgttttggcctcccaaagtgctaggattacasgctaactttcaatttaataaaaaaaattaatttgtgcaattggttgttattttatagaagcctaatttctagaatatgggatataaacaatttaataatg

SEQ ID NO: 21511 - DNA, 201 bp, Homo sapiens
ttcagggtaaatttctagaaatgagattgctgggtcaaaatataagtgcatatgtcgtttattcagatattaccaaatttctctccagaagcgttgaaccmattttcattcccaccagtaatgaatgagactgtgtatttcccttacagtctctccaacagaatatactgtcagtctgtatttttaaatttttgtctatct

SEQ ID NO: 21512 - DNA, 201 bp, Homo sapiens
ttcatactgctcaaggatttcttgcatgaacatttcttttttcttttttgagatggagtctcgctctgtctcctaggctggagtgcagtggtgcaatgtcrgctcactgcaccctccgcctcccaggttcaagcaattctcctgcctcagcctcccgtgtagctgggactacaggtgccggccaccatgcatggctaattt

SEQ ID NO: 21513 - DNA, 201 bp, Homo sapiens
cgagatcacgccactgcactccagcgtgggcgacagagcgagactccgtctcaaaaacaaaaaatcaaacctgcaataaacttatgcatatatatgtttayattgttggaagtttatcttcagggtaaatttctagaaatgagattgctgggtcaaaatataagtgcatatgtcgtttattcagatattaccaaatttctc

SEQ ID NO: 21514 - DNA, 201 bp, Homo sapiens
tacaatctcccctgccctttctctttgatcttacctactactctccctctccctcagctccagccatactggactccttgctgttaccagcacaaactagkgactgtcccactcagggtcttcgcacttgctgtttcttctgcgtgcaatgctgtgcccccaggtgatccatctggcctgcttcctcatgtccttcaaggc

SEQ ID NO: 21515 - DNA, 201 bp, Homo sapiens
ggattgtaggtgtgaactactgtgcctggccttctacattttttttttaaccatttcatagttccctttttctttgaacacttggtccaaactcacttttyttctggattcatattttctgatctcacctattatgttatagaactgatatgttacgtttgttttcattgatgcgtctgtacttggcttcagagagcagaa

SEQ ID NO: 21516 - DNA, 201 bp, Homo sapiens
ggcagagtccgaccggtccccgccccgcgctcgctccgcacggccaccggctcctccgcggacgctaccccggcgggagccgagctgagtccgactccccstctcccgaagaggcccgaaagccgcgtcacgtgcggggccgaaacttcgcggccggggccgggtggctggcgggtgggaggcaggcacggcggtcggggg

SEQ ID NO: 21517 - DNA, 201 bp, Homo sapiens
ttgaacttctgggctcaagtgattctcccacctcagcctcccaaagtgttgggattgtaggtgtgaactactgtgcctggccttctacattttttttttamccatttcatagttccctttttctttgaacacttggtccaaactcacttttcttctggattcatattttctgatctcacctattatgttatagaactgata

SEQ ID NO: 21518 - DNA, 201 bp, Homo sapiens
tccgtatacttttttaattatcacttcaggatgacactgtgtaagtatattctgcattaagctacaatgaaacgaagttgaaaggatactcaagaattagstatgtatcattatatgcagattgtcctctgaaataatgacagagaagtaaattagctcagtgaacaaaaatctgagcaatgatctgctgtctccaaagga

SEQ ID NO: 21519 - DNA, 201 bp, Homo sapiens
tttttggtagagacagggtttcaccctgttgcccaggcgggtctcaaacccctgggctcaaacgatccacctgcttcagtctcccaaagtgctgggattamaggtttgagccaccttagaaccctcttttaccccttgttgttgttaaccactttttactagctaacaattataataaattttcgtgttcaaattactggt

SEQ ID NO: 21520 - DNA, 201 bp, Homo sapiens
gaatgttgatggtatattctctggtcaccagctcactgatggcagaactgtaattcttctcaccacccttctttgcgggaggcattctgaggggcccaagytggaaaggaagagtgcgagggattgtgggcgaagtgcagtggtgtgattatagctcactgcagcctccatcttccaggctcaagtgatcctctcatctca

SEQ ID NO: 21521 - DNA, 201 bp, Homo sapiens
gcttccttatctgtgcagctatgggtatatcctaggcaagctgcctgtgctagttcccttatctgtatctgtagcctgagttttcaggttgttcctttgtytgaaagaattctactgagcacctgccctaaccgccttcctagctggttctttcttttctcctctctcagcttgatgccacactgttgctgtcaacgaaac

SEQ ID NO: 21522 - DNA, 201 bp, Homo sapiens
gtctatataagctgaaaaaaacatcaagctcctcaaacaggttgactagtaaataaatggcccaacacaaaaagggtaatctcagttttaatttttttttraattgacagataaaattatatgtatttactgtgtataacaatattttgaagtatatatacatggtataatgactaaatctagctaacatatgcattacct

SEQ ID NO: 21523 - DNA, 201 bp, Homo sapiens
tcatgttcacagaatttctcagcttgggcgcaggatttaagagagaatgtaagaaagcaatgcctgactattgattaatccaaggcccattgtacacacartcaattataatgctagaatttctaagtctggagaataatcttagctgcctgattttaaatcttcttacataatcttctgaagaaaacataaaatcaacaa

SEQ ID NO: 21524 - DNA, 201 bp, Homo sapiens
tattgcttatcactgcccaaaagttccaagaaatgatgaagtcagtctcatttggcatacatctactttttcagaaggaaacaaagcagagaaaaaattcygagagaaattcatagctagtaaccactctcacttttattttagtttccataactgaaattgctggacttgagagcaatttttccttgctcaacagaatta

SEQ ID NO: 21525 - DNA, 201 bp, Homo sapiens
ttttattaacttttcacctactaaaaacaaattactaagatgttagaatgtatttgtttactttgctcttctttttagttatctttgcatgaagtataatmataaaaaaaataagacaacaaagagaaaaaatataatggaatttctgatactgtgaagggtaaagaccatcacacaatttggacaaggttttggggaaga

SEQ ID NO: 21526 - DNA, 201 bp, Homo sapiens
attccagccatttaagcagctcaaaactccaatatctgcctcctcattttagtaagactgctgttctgtttaggattcatttttgtgctctgtactagaamgtggtcctagatagaaagctagggtgatcattgcactcacctttgtattctctcaaggatcacaatgctgcctgtgtgttcctgaaaatagctgccttgt

SEQ ID NO: 21527 - DNA, 201 bp, Homo sapiens
gatgtcatgttcacagaatttctcagcttgggcgcaggatttaagagagaatgtaagaaagcaatgcctgactattgattaatccaaggcccattgtacasacagtcaattataatgctagaatttctaagtctggagaataatcttagctgcctgattttaaatcttcttacataatcttctgaagaaaacataaaatca

SEQ ID NO: 21528 - DNA, 201 bp, Homo sapiens
aaattggcaaattgtctactgtaccatttattcttgttcttttctttaagagcacggccatcatatttaatccagtattttcacataagctcttcctttcraaagagcaaaccagttttgttttaggcaactgatgtcatgttcacagaatttctcagcttgggcgcaggatttaagagagaatgtaagaaagcaatgcct

SEQ ID NO: 21529 - DNA, 201 bp, Homo sapiens
tttgaattctttgtctgaaaggtcacatatctctgttttttccaggaatggtccctggtgtcttagttcttttttttttttttttttgagacagagtctcrctctgtcgcccaggctggagtgcagtggcacaatctcggctcattgcaagctccacctcctgggttcacgccattctcctgcctcagcctcccgagtagc

SEQ ID NO: 21530 - DNA, 201 bp, Homo sapiens
gagaaaaaacatttcccaataattttaagcacttcttttaaaattacaaaattggcaaattgtctactgtaccatttattcttgttcttttctttaagagsacggccatcatatttaatccagtattttcacataagctcttcctttcaaaagagcaaaccagttttgttttaggcaactgatgtcatgttcacagaattt

SEQ ID NO: 21531 - DNA, 201 bp, Homo sapiens
cttaccacagctcttttgaattctttgtctgaaaggtcacatatctctgttttttccaggaatggtccctggtgtcttagttcttttttttttttttttttgagacagagtctcactctgtcgcccaggctggagtgcagtggcacaatctcggctcattgcaagctccacctcctgggttcacgccattctcctgcctca

SEQ ID NO: 21532 - DNA, 201 bp, Homo sapiens
gattacaggtacatgtcaccatgtctggctaatttttgtatttttagtagagataggatttcctcatgttgaccaggctggtctccaacgccaggcttacyaattctttcttctgcttgatctgttctgctaataagagactctgatgcattcttcagtatgccaattccatttttagtttctgcataattctttttagtt

SEQ ID NO: 21533 - DNA, 201 bp, Homo sapiens
gttggaattacgggcatgagccaccgcgcctggcctaacgtccttttctttctgattgaagtaccatttagcattttttgtaggacaggtctggtgttgayaaaatctctcagcttttgtttgtctgggaaagtctttatttctccttcaagcttaaaggatatttttgctggatacactattctagggtaaatttttttt

SEQ ID NO: 21534 - DNA, 201 bp, Homo sapiens
aataggataaattcttgaaagattgctctgcaaatctgatcatttgtttctcatctcttttttttatattttattttattttatttatttattttttttttgagacagatcttgctctgtcacccaggatggagtgcagtggttgttcgctgcaacctccacttcctgagttcaagcgattcttgtgcctcaccttcccaa

SEQ ID NO: 21535 - DNA, 201 bp, Homo sapiens
gatttcttattgctcattaacgtccttttctttttctttttctttttttttttttgagatggagtcttgctctgtcacccaggttggagtgcaatggcacratctcggctcactgcaacctccgcctcctgggttcaagcaattctcctgcgtcagcctcctgagtagctgggactacaggcgcatgccaccacgtctgct

SEQ ID NO: 21536 - DNA, 201 bp, Homo sapiens
catccatgctgttgcaaatgatatttattgatattttgtattttattcatttcaaatgtatttatttctgctctgatctttattgtttgttctaattttgsgttcggtttgctcttgctcttctagttctttaagatgaatgttaggttatttatttgaagtttttcttctttttgatgtaggccctcataggtgtaaatt

SEQ ID NO: 21537 - DNA, 201 bp, Homo sapiens
gcggaggttacagtgagccaagaccgcaccactgcactccagcttgggcaacagagtaagattccgtctcaaaaaaaaaaaaagaaaaaaaatatatatayccttatcactaacccttattcactcagattcctgggtctttgagttcctaagaaaggcttcagtgaccttaatgtaatacacatctactttatttaccta

SEQ ID NO: 21538 - DNA, 201 bp, Homo sapiens
gggtgggggctaggggagggatagctttaggagaaatacctaatgtagatgatggtttgataagtgcagcaaaccaccatagcacatgtatacctttgtarcaaacctgcacgttctgcacgtgtatcccagaacttaaagtatatataaaaaaaattaccaaaaacctatttatagaaaaaaaaacttttaacaaaatga

SEQ ID NO: 21539 - DNA, 201 bp, Homo sapiens
ttgcctcagcctcccaggtagctgggaccacaggtatgtgctaccacacccagctaatttaatatttattttaaaatatatatatccttgccgggcacgayggctcactcctgtaatcccagcactttgggaggctgaggcgggtggatcacaaggtcaggagttcaagaccagcctggccaatatggtgaaaccccttct

SEQ ID NO: 21540 - DNA, 201 bp, Homo sapiens
cctgcctcagcctcctaaagttctgggattacaggcatgagccaccgcgcctgtccagagaccccttttctagaaatttttttttttttttttttttttttaattagccagccatggtggtgcatgcctgtggtcccaactactcaggggactgaagtgggaggattgcttgagtttgggaaatcaaggctgcagtggagc

SEQ ID NO: 21541 - DNA, 201 bp, Homo sapiens
ggcgtggtggcaggcacctgtaatcccagctactcaggctgaggcaggagaattgcttgaacccaggaggcagaggctgcggtgacccaagatcacaccaytgtactccagcctgggcaacagagcgagactccatctaaaacaaacaaaaaaaattaaatagatttaaattttaaatggctatatgtggctaatggttac

SEQ ID NO: 21542 - DNA, 201 bp, Homo sapiens
gaggccgaagcaggtggatcatgaggtcaggagattgagaccatcctggttaacagggtgaaaccccatctctactaaaaatacaaaaaattagccgggtstggtggcgggcgcctgcagtcccagctactcgggaggctgaggcaggagaatggcgtgaacctgggaggtggagcttgcagtgacccgagattgtgccac

SEQ ID NO: 21543 - DNA, 201 bp, Homo sapiens
gagtgttactctgtggcaaggcatgccacagtatactgaccttttggaagaaagactacactaaactgtagggacttgcttttttttttttttttttttttaacttatataacataacagggtgaggaacaaaatcaaagcagaaaaacattaagtagattttataaaccagatgagagtttgcaatggtctaataaatca

SEQ ID NO: 21544 - DNA, 201 bp, Homo sapiens
tccctgcaacctccgcctcccaggttcaagtgattctcctgcctcagcctcccaagtaggtaggactacaggcgcctgccaccacacctggttaatttttmtatttttagtagagacggggtttcactgttggccaggctggtctcaaactcctgacctcaggtgatccgcctgcctcggctttccaaagtgctgggatta

SEQ ID NO: 21545 - DNA, 201 bp, Homo sapiens
ggagtgttactctgtggcaaggcatgccacagtatactgaccttttggaagaaagactacactaaactgtagggacttgcttttttttttttttttttttttaacttatataacataacagggtgaggaacaaaatcaaagcagaaaaacattaagtagattttataaaccagatgagagtttgcaatggtctaataaatc

SEQ ID NO: 21546 - DNA, 201 bp, Homo sapiens
agtttttttctttttttttttttgagacggagtctcgctcttgtcacccaggttggagtgcagtggcacaatctcggctcactgcaacctccacctcctgygtttaaacgattctcctgcttcagcctcctgagtagctggaattacaggccctgccaccacccccccgctaatttttgtctattttttttttttagtaga

SEQ ID NO: 21547 - DNA, 201 bp, Homo sapiens
tgtaatcccagttatttgggaggctgaggcagaagaattgcttgaacccaggaggtagaggttgcagtgagctgagatcacatgccactgcactccagccygctgcgtgatagagcgagactctgtctcaaaaaacaagaaacaataaaaaaagaaaatgtactgtcagaatatggaaccccatcctgccaccacaacttg

SEQ ID NO: 21548 - DNA, 201 bp, Homo sapiens
gcccaccaccatgcccggctaattttttttaatttttagtagaaacagggtttcaccatattgaccaggctggtcttgaactcctgatctcaggtgatccrcctgccttgccctcccaaagtgttgggattacaggcgttgagtcaacatgcctggcctcattactatttttttaacagaaaaactggcagagaagatgga

SEQ ID NO: 21549 - DNA, 201 bp, Homo sapiens
caatttaaactgatgttttaatacatatttcatattcctataaatatacatcttttctgagaaggagtcttgctctgttgcccaggctggcatgcagtggygcaatcttggctcactgcaacctctgcctcccaggttcaagcgattctcctgactcagtctcctgagtagctgggattacagatgcccaccaccatgccc

SEQ ID NO: 21550 - DNA, 201 bp, Homo sapiens
aaaacttaatttttgcataattacaacttattacttaagaatgagagatttcaatttaaactgatgttttaatacatatttcatattcctataaatatacatcttttctgagaaggagtcttgctctgttgcccaggctggcatgcagtggcgcaatcttggctcactgcaacctctgcctcccaggttcaagcgattctc

SEQ ID NO: 21551 - DNA, 201 bp, Homo sapiens
aaaaatcataaactataaagtaagggaagtgctatgatagggtaaataagggttgctatgggaaaaacatataatagtaggaagacacacattagaaaagraggagctaccaggaaaaaatgaagcccaactgaaacctcaggacgagtataggtcttagtggataaagaagattccaggcagagaggacatgtgcaaaag

SEQ ID NO: 21552 - DNA, 201 bp, Homo sapiens
gacaaagagtaaaaacacaagaaaaatgttaaaatcctattatgttcaaccgctgatgattttcagaatttacatctttaatttttattaacattaggaawgttttgcctatactgtttagcttaattaaagtgtaatggaaatgtaagaatctgacagcacttattaatatctgtttagcaattatacacttgaagttta

SEQ ID NO: 21553 - DNA, 201 bp, Homo sapiens
tcatcccttacttaaattactgcaggcttcccaacagatcttcctgcttctacccttgaacctccctgcatacacacacacaatttagtcttaatacagcyagctgccaggatgatccttttaaaactaagtcagaggtctctctaccctgttcaaatcaggcaatggctccccccattctcttagagtaaaaaccaaagt

SEQ ID NO: 21554 - DNA, 201 bp, Homo sapiens
atcaccaaaaaaatttttataagaagtcaaaaacacaaggaactcagttaagcttacacaaaaataccactttcttcctcctacattagaaatcaacaaasttctctaaaagaaagatataaattacaaggtagagaagggggtacatttgttctactaatgtaaaatatcacattagtcaatgcagtctattagtaaata

SEQ ID NO: 21555 - DNA, 201 bp, Homo sapiens
ggtcacaacttttgtatcccctcaaaattcgtacattgaaacctaatctccaatgtgatagtattaagagttggggtcatttgagaggtgatgaatgggcytcacgcccttataagagggccaaaggagattgtttaccccttccaccatgtgagtgcacagctgtaaggcaccgtctgtgaggaataggctctcaccaga

SEQ ID NO: 21556 - DNA, 201 bp, Homo sapiens
tagaactctcacctctgagaactgagctcaaggttcttgctggggcaaaaattgaaatgagcagaatttttttttgtttgtttgtttgcatttctggcctkcctcctttcttagcctcattattaacaagcacactccccacaataaacctacacccacactgccttctctcacacaaggtaaattgttcaccttgtttag

SEQ ID NO: 21557 - DNA, 201 bp, Homo sapiens
gggcttaggatataatttttggtttacactcttcaggttgatgatcaggcaaagcataaacagttcaaatcaaatgcagctggttttacaatttggcccarttacagtcagatttcatctgagggtccaactcttcatgccttctcaactcaactgttagatacctccaacaaaaccatcaaccatctccattgtggattt

SEQ ID NO: 21558 - DNA, 201 bp, Homo sapiens
ctgggtgctttctgtgttagaactctcacctctgagaactgagctcaaggttcttgctggggcaaaaattgaaatgagcagaatttttttttgtttgtttktttgcatttctggcctgcctcctttcttagcctcattattaacaagcacactccccacaataaacctacacccacactgccttctctcacacaaggtaaa

SEQ ID NO: 21559 - DNA, 201 bp, Homo sapiens
ttgtggcttgtacctggctttagcatgttttcattccgcttccactcttacgttgcttctatgtgtgcctctctggctctatgcaggtgcctggatttttkattcttacccctctcattagaactactacagtgttttgagtctaataataataaaagctaacggatgcatatctcggtggtgcccggcacttttgtaagt

SEQ ID NO: 21560 - DNA, 201 bp, Homo sapiens
ccagtaatttttcttttttttcttttttttttttttgagttgaagtctcactcttgtcccccaagctggagtgcaatggtgcgatctccgctccctgcaamctccgcctcccaggttcaagtgattctcctgcctcagcctcccaagtaggtaggactacaggcgcctgccaccacacctggttaatttttctatttttag

SEQ ID NO: 21561 - DNA, 201 bp, Homo sapiens
gtaaagtgtcaaatggtcgatattgacaaaaatatcaatcttttttctcttttgtgcaatatggagagtggtgtgaatcttcggtttcttattgtaagtcwttttctttgaaaaaagagttttataaaactaagacttagaaacttacttgccctggccttgaaaattacctttggaaaaatgcttgtgctttatgggtcc

SEQ ID NO: 21562 - DNA, 201 bp, Homo sapiens
cctccccccagtaatttttcttttttttcttttttttttttttgagttgaagtctcactcttgtcccccaagctggagtgcaatggtgcgatctccgctcsctgcaacctccgcctcccaggttcaagtgattctcctgcctcagcctcccaagtaggtaggactacaggcgcctgccaccacacctggttaatttttcta

SEQ ID NO: 21563 - DNA, 201 bp, Homo sapiens
ctatttctcaacaatagtgttgctattcattctatataactctttcctccccccagtaatttttcttttttttcttttttttttttttgagttgaagtctyactcttgtcccccaagctggagtgcaatggtgcgatctccgctccctgcaacctccgcctcccaggttcaagtgattctcctgcctcagcctcccaagta

SEQ ID NO: 21564 - DNA, 201 bp, Homo sapiens
tgcctcccgggttcaagcaattctcctgcctcagcctcccgagtagctgggattacaggcatgtgccaccatacctggctaattctgtatttttagtagasacggggtttccccatgttggtcaggcttgtcttaactctcaacctcaggtgatccgcccaccacggcctcacatagtgctgggttgacaggtgtgagcca

SEQ ID NO: 21565 - DNA, 201 bp, Homo sapiens
ggttcaaacgattcccctgcctcagcctcctcaatagctgggattacaggccacaccatcatgtccagccaattttttttttttttttttttgagacagartttcgctctcgttgcccaagctgtagtgcaatggtgcaatctcggctcactgcaatctctgcctcccgggttcaagcaattctcctgcctcagcctcccg

SEQ ID NO: 21566 - DNA, 201 bp, Homo sapiens
ccacccacctcggcctcccaaagttctgggattacaggcatgcaccaccgtgcccggcctgctaattggttttttaactaaagaaataatttatggagaaycaaacataaaaaggtataagacaaaaagaaaaagtcaaatggtgtcaaagaatggtgtcccagactcccaagcaggaatccttgcagaaattttccatgt

SEQ ID NO: 21567 - DNA, 201 bp, Homo sapiens
ttagtagagatggggtttcaccatcttggccaggctggtcttgaactcctgacctcgtgatccacccgcctccgcctcccaaagtgctgggattacaggcrtgagccaccacgcccggccaagaagctgtatttttttttttttttttttttgagacagagtctcactcttgttccccaggctggagtgcaatggcacgat

SEQ ID NO: 21568 - DNA, 201 bp, Homo sapiens
aaaaacttaatttttgcataattacaacttattacttaagaatgagagatttcaatttaaactgatgttttaatacatatttcatattcctataaatatacatcttttctgagaaggagtcttgctctgttgcccaggctggcatgcagtggcgcaatcttggctcactgcaacctctgcctcccaggttcaagcgattct

SEQ ID NO: 21569 - DNA, 201 bp, Homo sapiens
cctcagcctcccgaagtgctgggattacaggcgtgagccaccgtgcctggctccaagaacagtttaaagagcagtcagtggtttttttttttttttttttttagaaggagtttcactcttgtccaggctggagtgcaatggagtgaactcggctcaccacaacctccgcctcccgggttcaagcaattctcttgcctcagc

SEQ ID NO: 21570 - DNA, 201 bp, Homo sapiens
attttaaaaacttaatttttgcataattacaacttattacttaagaatgagagatttcaatttaaactgatgttttaatacatatttcatattcctataaatatacatcttttctgagaaggagtcttgctctgttgcccaggctggcatgcagtggcgcaatcttggctcactgcaacctctgcctcccaggttcaagcg

SEQ ID NO: 21571 - DNA, 201 bp, Homo sapiens
ggggtttcaccgtgttagccaggatggtctcgatctcctgaccttgtgatccacccgcctcagcctcccgaagtgctgggattacaggcgtgagccaccgygcctggctccaagaacagtttaaagagcagtcagtggtttttttttttttttttttttagaaggagtttcactcttgtccaggctggagtgcaatggagt

SEQ ID NO: 21572 - DNA, 201 bp, Homo sapiens
gattttaaaaacttaatttttgcataattacaacttattacttaagaatgagagatttcaatttaaactgatgttttaatacatatttcatattcctataaatatacatcttttctgagaaggagtcttgctctgttgcccaggctggcatgcagtggcgcaatcttggctcactgcaacctctgcctcccaggttcaagc

SEQ ID NO: 21573 - DNA, 201 bp, Homo sapiens
tggcgcaatctcggctcacttcaagctccacctcccgggttcacgccattctcctgcctcagcctccagagtagctgggactacaatcgcctgccaccacrcccggctaattttttgtatttttagtagagacggggtttcaccgtgttagccaggatggtctcgatctcctgaccttgtgatccacccgcctcagcctcc

SEQ ID NO: 21574 - DNA, 201 bp, Homo sapiens
gggtttcatcatgttggccaggctggtctccaactcttgatctcaagtgacccatccacctaggcctcccaaagtgctaggattacaggcatgagccaccrtgcccagcccatcataaatctttaaggatctttcctaaatatgacaatgcagactgtttattgccattcattaggaagcttaataattggcaaaaaaagt

SEQ ID NO: 21575 - DNA, 201 bp, Homo sapiens
gtggcgcaatctcggctcacttcaagctccacctcccgggttcacgccattctcctgcctcagcctccagagtagctgggactacaatcgcctgccaccayacccggctaattttttgtatttttagtagagacggggtttcaccgtgttagccaggatggtctcgatctcctgaccttgtgatccacccgcctcagcctc

SEQ ID NO: 21576 - DNA, 201 bp, Homo sapiens
ttctttcagagagcatacattctggtagaagagtacttagtcctgggcctggcagatttatttctttcaggacccaaggcctctgctgcaaacatgttccrccagatctttggtcagaataagaagcatatgagcttgatcattgttatggtcacaacttttgtatcccctcaaaattcgtacattgaaacctaatctcca

SEQ ID NO: 21577 - DNA, 201 bp, Homo sapiens
ataagtagcaaactgatgtttgaatctaagtttaaaacaatgtttcttctttaaattttttttttttttttgagacagagtcttgctcttgtcgcccaggrtggagtgcaggcgtgagccaccacacccggcccttctttaaatttttaaatgtaattaattgatactacaactagtcagtgaaagtttgataaggagcat

SEQ ID NO: 21578 - DNA, 201 bp, Homo sapiens
ctggccaaaagaagagaatcttggtgatgacttttggggatgagagatgggggaacaacctatacttctcattttaaacacaagttttacctctaacttaraatttactgctgggaaaaaaaaacaggaaaataaccaagtctaagaatttggattcccaggaaatgaaaaattacataagcatcctgtacttaaaattta

SEQ ID NO: 21579 - DNA, 201 bp, Homo sapiens
tattatctacaatctacacatgaggaaactgaggctcagagccatctggtgagttgccctaaggtcacacagctgataagtagcaaactgatgtttgaatytaagtttaaaacaatgtttcttctttaaattttttttttttttttgagacagagtcttgctcttgtcgcccaggatggagtgcaggcgtgagccaccaca

SEQ ID NO: 21580 - DNA, 201 bp, Homo sapiens
tgaacccgggaggtgggggttgcagtgagccaagatcacaccaccgcactctagcctgggtgacagagtaaggctccgtctcaaaaaaaaaaaaaaaaaaragaatttagaaatgactggatgcagctattcctactagcactggccaaaagaagagaatcttggtgatgacttttggggatgagagatgggggaacaacc

SEQ ID NO: 21581 - DNA, 201 bp, Homo sapiens
aatatatttgcttaggcaactaaactactatttctaactgaagtccttggctaatgatcattattttctttagattcctctgacttatttaggcaaacatktcatctctgtatttttctactccatacttccatcttctaagagttgagagcattcatttctagaagagaaattgtcagacatccttaaggagagtttatc

SEQ ID NO: 21582 - DNA, 201 bp, Homo sapiens
gatcgcagaaggacgaaaaagtcacactcaaaaatcttgctggagacaacaatataaaatacataggaatttttttgaacaaggacacataatttaaatayatttgcttaggcaactaaactactatttctaactgaagtccttggctaatgatcattattttctttagattcctctgacttatttaggcaaacatttcat

SEQ ID NO: 21583 - DNA, 201 bp, Homo sapiens
gggaaaaaaaacacataccatgttcaccgcatcttgatcaaaagggttccattctatattctgaggatagtgggcgagaactttggatttgaatgttcttytcaaaggactctggtcaaaattttcgcctacaacaaataatacatagttaatatctagaacttttccaaaagcatgtcatagttttctatttattttata

SEQ ID NO: 21584 - DNA, 201 bp, Homo sapiens
tcacttgaggtcaggagttcaacaccagcctggccaatatggtgaaaccctgtctctactaaaaatacaaaagattagctgggcatagtggtgtgcgcctrtaatctcagctactcgggaggctgaggcaggaggattgcctgaacccaggaggtggaggttgcagtgagccaagattgtgccactgcactccagcctggg

SEQ ID NO: 21585 - DNA, 201 bp, Homo sapiens
tcttttgttacctaaaatatatttatgatgtttcattaggacagacataaaaaatagaatccttatattttcatacagtttgcttaaaagttattgaccaygttttcttcctatgaattcttaggtacaacacaggcttaaagataagatctatcaactagaatattacatagtcatggatgccaataagcagattacctc

SEQ ID NO: 21586 - DNA, 201 bp, Homo sapiens
actgacaaaagactggtgggacgaataatgaattcagttttggatatgttgcatttgagatgccagtgaaatattctagctgcaatgttaaggaaacgggsgagaggatgggggtggcgggggcaaaagggtcttccagcaatggtcctccagcaatgaaagccccattcctataattttactgtgagatatggctaggca

SEQ ID NO: 21587 - DNA, 201 bp, Homo sapiens
tttctggaatgttctccctgacctacccactcaccctcaggttttaccacaaatgctatttcctcacatccaccttccctgacccagccaggccccccatsatgagcctcgcagaacctcatctcccctccacagaggtgatcataacccacagaacccagggccacgatccctggctttgaaccctggctctgccactca

SEQ ID NO: 21588 - DNA, 201 bp, Homo sapiens
agagggtgagtaagtgagaactttcagggtgatgtgtacattgttggacttggcaagtaggtggatggttgtaccattcactgacaaaagactggtgggaygaataatgaattcagttttggatatgttgcatttgagatgccagtgaaatattctagctgcaatgttaaggaaacgggggagaggatgggggtggcgggg

SEQ ID NO: 21589 - DNA, 201 bp, Homo sapiens
gcttccttctttctggaatgttctccctgacctacccactcaccctcaggttttaccacaaatgctatttcctcacatccaccttccctgacccagccagrccccccatgatgagcctcgcagaacctcatctcccctccacagaggtgatcataacccacagaacccagggccacgatccctggctttgaaccctggctc

SEQ ID NO: 21590 - DNA, 201 bp, Homo sapiens
ttaactaaagaaataatttatggagaaccaaacataaaaaggtataagacaaaaagaaaaagtcaaatggtgtcaaagaatggtgtcccagactcccaagyaggaatccttgcagaaattttccatgtttatacaataaccaccataaacattgaacatttactatgtgtcaagtactctcctaaacactttatatgcatt

SEQ ID NO: 21591 - DNA, 201 bp, Homo sapiens
aatggtgtcaaagaatggtgtcccagactcccaagcaggaatccttgcagaaattttccatgtttatacaataaccaccataaacattgaacatttactaygtgtcaagtactctcctaaacactttatatgcattaattcagcagaaagcaaattttttatgttaaagttacatagcaaatattttaggctttgtagagc

SEQ ID NO: 21592 - DNA, 201 bp, Homo sapiens
gaccatagaaccatttcgcccctttccccttcccgggctccctgataatcttaaactctgattggccagtattctgggactttagctccgccctcgttccrtcagctccaatcactatcgaggttgtcgtttcgccttttctggttgcctttctttcaatggggtcccagagtcccgcttccagggcctctcggctcgcgc

SEQ ID NO: 21593 - DNA, 201 bp, Homo sapiens
ccaaaatactgagattacaggtgtgagccactgcttccggttaatcttcaactatatatatatatatatatatacacatacatatatatatatatacatayacatatatttatttattgagatggagtcttgctcttgtcgcccaggctggagtgcagtggtgccgtcttggctcactgcaacctcctcctcccaggttca

SEQ ID NO: 21594 - DNA, 201 bp, Homo sapiens
gagtgtggtggcacaggcctgtaatcccaactactcaggaggctgaggcaggagaatcgtttgaacccagtaggtggtggttgtggtgagccaagatggckccattacactccagcctgggcaacaagaatgaaacagtgtcccccactcaaaaaaaaaaaaaaaaagatcagcaacaacataaaaccaccaagggctaga

SEQ ID NO: 21595 - DNA, 201 bp, Homo sapiens
ggcctcccaaaatactgagattacaggtgtgagccactgcttccggttaatcttcaactatatatatatatatatatatacacatacatatatatatatayacatatacatatatttatttattgagatggagtcttgctcttgtcgcccaggctggagtgcagtggtgccgtcttggctcactgcaacctcctcctccca

SEQ ID NO: 21596 - DNA, 201 bp, Homo sapiens
ttatttatttttattttttatttttattttttgagacggagtctggctctgttgcccaggctggagagcagtggcgcaatctcggctcacttcaagctccrcctcccgggttcacgccattctcctgcctcagcctccagagtagctgggactacaatcgcctgccaccacacccggctaattttttgtatttttagtaga

SEQ ID NO: 21597 - DNA, 201 bp, Homo sapiens
ggcaacaagaatgaaacagtgtcccccactcaaaaaaaaaaaaaaaaagatcagcaacaacataaaaccaccaagggctagagggacaaattgaggagccrgtgtgaccagaggctagaagctgggtgggaagggctgtcctgcctggtgggagctgggtcatatatgagacagatgcagccgctgctgggaagaccccca

SEQ ID NO: 21598 - DNA, 201 bp, Homo sapiens
gtgatctgcctgccttggcctcccaaaatactgagattacaggtgtgagccactgcttccggttaatcttcaactatatatatatatatatatatacacayacatatatatatatatacatatacatatatttatttattgagatggagtcttgctcttgtcgcccaggctggagtgcagtggtgccgtcttggctcactg

SEQ ID NO: 21599 - DNA, 201 bp, Homo sapiens
aaagatgggctctgaaattggaaccaggaaaagtttcttataagaatttccttccaagaacagcttatttatttttattttttatttttattttttgagayggagtctggctctgttgcccaggctggagagcagtggcgcaatctcggctcacttcaagctccacctcccgggttcacgccattctcctgcctcagcctc

SEQ ID NO: 21600 - DNA, 201 bp, Homo sapiens
aaaggggcttaggaactgtagtttgcagggctcagcctctgtgggacagagcagagcagaagggtagggaatgggttggaaagcaaacaggaaatgactgrtgtaaagaatattgtgttttacattttgaaatactatgcagccataaaaaagaatgagttcaatgtcctttgcagggacatggatgaagctggaaaccat

SEQ ID NO: 21601 - DNA, 201 bp, Homo sapiens
ggcctcaagtgatctgcctgccttggcctcccaaaatactgagattacaggtgtgagccactgcttccggttaatcttcaactatatatatatatatatayatacacatacatatatatatatatacatatacatatatttatttattgagatggagtcttgctcttgtcgcccaggctggagtgcagtggtgccgtcttg

SEQ ID NO: 21602 - DNA, 201 bp, Homo sapiens
gtgcccggcccaatgctcccttttatggaaccttagttccaggcctcaggttcagctttttcctattgtgaaaacccaaggccaaaacttccgtcccctgmaaggctcttagtcccctaggctttcgggttcctggcaatgactttgcctcttgggcagcatggtcttacaagttagttacttgtgtttaagttttgggtt

SEQ ID NO: 21603 - DNA, 201 bp, Homo sapiens
ttcagtactaattcacccaatcctttaaaacctatcccttctgggccgggtgcggtggctcatgcctgcaatcccagcactttgggaggcagaggcaggcrgatcacgaggtcaggagatcgacgtcaacctggctaacacagtgaaaccccgtctctactaaaaatacaaaaaattagctgggcgtggtggtgggcacct

SEQ ID NO: 21604 - DNA, 201 bp, Homo sapiens
cggaaaactaaacaccgcatattctcactcataagtgggagttgaacaatgagaacacaagaacacagggaggggaacatcacaccctggagcctgtcagrgggtggggggcaaggggaaggagagcattaggacaaatacctaatgcatgcggggcttaaaacctagatgacgggttgttgggtgcagcaaaccaccatg

SEQ ID NO: 21605 - DNA, 201 bp, Homo sapiens
gacggggtttcaccttgttggctaggatggtctcaatatcatgacctcgtgatccgcccgcctcggcctcccaaagtgctgggattacaggtgtgagccaycgtgcccggcccaatgctcccttttatggaaccttagttccaggcctcaggttcagctttttcctattgtgaaaacccaaggccaaaacttccgtcccct

SEQ ID NO: 21606 - DNA, 201 bp, Homo sapiens
ggaaagaagaaagggataacaagtcccaagtaaaagcccaaaacccaacgggaccaacaacattagattttaaggcctgagagccatcttctttgactccrtgacagaccatctggacacaatgggtgagggttggactctcaaagctcctggtggccctacccccatggctttgctgggtgcagctgtcatgggttggag

SEQ ID NO: 21607 - DNA, 201 bp, Homo sapiens
ttgaaagaccatccttttcccactacattacagcatgttgcttttatcataaataaggtagccatacatgggagagtttattcctggattctgttttgtcycattgtttacttcgcctatccttcaacaatatctcacacacacacacacacacacacacacacacacactatagttttattatagttcttgattttgggt

SEQ ID NO: 21608 - DNA, 201 bp, Homo sapiens
aatgcatgcggggcttaaaacctagatgacgggttgttgggtgcagcaaaccaccatggcacatgtatacctatgtaacaaacctgcacgttcagcacatrtatcccagaacttaaagtataaaaaaaaaaaatgccaaattgcccaccaatgcagctacaaagatttatagttccaagtatgtctattttccagcaaatt

SEQ ID NO: 21609 - DNA, 201 bp, Homo sapiens
ttttttttttttttttttttaaagagacgggattgcttggcacgggggctcacgcctgtaatcccagcactttgggagaccgagggggaggatcgcttgascccaggagtttgagaccggcctgggaacatttcaaaaccccgtctctgcaaaaaatgaccccttgtggactgaagtgggaggatcgcttgcgctcaggag

SEQ ID NO: 21610 - DNA, 201 bp, Homo sapiens
ttgttgggtgcagcaaaccaccatggcacatgtatacctatgtaacaaacctgcacgttcagcacatgtatcccagaacttaaagtataaaaaaaaaaaawgccaaattgcccaccaatgcagctacaaagatttatagttccaagtatgtctattttccagcaaattccccagcaccatggagatttatccatctaagtt

SEQ ID NO: 21611 - DNA, 201 bp, Homo sapiens
ttttgtacttttagtagagacggagtttcaccatgttggccaggcatttttttttttttttttttttaaagagacgggattgcttggcacgggggctcacscctgtaatcccagcactttgggagaccgagggggaggatcgcttgagcccaggagtttgagaccggcctgggaacatttcaaaaccccgtctctgcaaaa

SEQ ID NO: 21612 - DNA, 201 bp, Homo sapiens
ccaagtagctgggattgcaagcatgcgccaccacgcccaactaatttttctgtttttagtagatacgggggtttcaccatgttgcccaggctggtctcgarctcctgatctcaagtgatccgcccgcctcagcctcccaaagtgctgggattacagatgtgagccaccacatccggcctcaaattctttattctatcattt

SEQ ID NO: 21613 - DNA, 201 bp, Homo sapiens
actcgggaggctgaggcaggagaatcccttgaatccgggaggaggaggttgcagtgagccgagatcgcgccattgcactccagcctgggcaacgagcaaawctctgtctcaaaaaaaaaagaaaaaggttgctctaagccaacgtgctactatagtattgttgatttcaacaccatctttttattgaggcaaataaactaa

SEQ ID NO: 21614 - DNA, 201 bp, Homo sapiens
tgatgcttgaggttggaggatacaaggctgcagtgagctgtgatcgtaccactgcactccagcctgggcgacagtgagacccggtctcaaaaaaaaaaaaagaagaagaaaaagctatttttgagtattttataatataatagtagagtagtacatgtatagaatttataagtggacatatcctggagtggagagtcaaaa

SEQ ID NO: 21615 - DNA, 201 bp, Homo sapiens
aggagaatggcatgaacccgggaggtggagcttgcagtgagctgagatcgcaccactgcactccagcctgggcgacagagcaagactccgtctcaaaaaawaataataaataaaataaaataaaaacaaaatcaaagatgagaataaaacctaattggtgaaaatcttacctattaaaagtctattcaattatttgttgtg

SEQ ID NO: 21616 - DNA, 201 bp, Homo sapiens
acatttctaattaacccttaactttgctatctactaacaataccccctcaccatcccacaataaaacaactaaaaattagaggtgtcactgatgatcagaytactactagtaaccagattactttagccaaagcaggcttataatgacaagtgtgtaactttcccagtttgagtcagcaaatgttcttatatttctctaga

SEQ ID NO: 21617 - DNA, 201 bp, Homo sapiens
gctcttccaacaaatcaaaaaaagtaagaactatatatctaatcgggaaacatgaactgcaaaatgctattatttttccatttttaaaagatatacagtaytgttttatatcaggaactacaagatactttctcagaaaacctgagtttcatcagaattgttaaactgtcaggaactacaagaaatctcagaaaacctgaa

SEQ ID NO: 21618 - DNA, 201 bp, Homo sapiens
taagaaaaacccttaggtcaaatacaatctgccacctgatctgtaaatagtttcactgggattcagtcacaaccatccacttatgcactgtctatggatgycttcacactacaacagcagagctgggtgactgtggcagaaactgtatgcccacaatacctcaactacttattatttggttcttcatgaaaaaaattgcca

SEQ ID NO: 21619 - DNA, 201 bp, Homo sapiens
tattttgattaataaggatgtgcttgagcctagttatgatttaaaattctgtccaaaaccacaattacttttgtaccaacctttaaacacgtaagtatggytttgttccaacacaattttatttataaaaacagtcagctggacagatttggcctgggggccatgtatgcccacccctggcctagtcaagtaaaatgcaac

SEQ ID NO: 21620 - DNA, 201 bp, Homo sapiens
aatgctgaaagaactcaagagagaaggagcctcagacaagtagcggctatgtcccaagagcggaagctccccacaacgaggaacacaagataatccgtccrtcagccattcttatccacaccacagtcgcatccccctcaaagctctcccagggtgccagaaattctcgctctgtctagtgtcccgactttccaagcgctt

SEQ ID NO: 21621 - DNA, 201 bp, Homo sapiens
tttccaagagttcatcaaatcccaaagcacggatattttacgttacaggaataaacaaacttatttctcattggcaaaaatgtgttgattgtaatggttcytattttgattaataaggatgtgcttgagcctagttatgatttaaaattctgtccaaaaccacaattacttttgtaccaacctttaaacacgtaagtatgg

SEQ ID NO: 21622 - DNA, 201 bp, Homo sapiens
gttcatcggatagtctcgtttcttagggaccaacttcagatttatatatctgaaggttcctgacacttataatgacatgtgtcggcctaaatatgtttatytgatatttctaaagtcctattatatgtaggtgtcaaataatccttaaatttctacaagctggtctcttggatccagtcttggaaatagctacacttctgt

SEQ ID NO: 21623 - DNA, 201 bp, Homo sapiens
gcagcgggcactggtcaacagaaagggcccaattcttttccacaacaatgcctgaccgcacatcacacaacaaatacttcaaaagtttaacgaattgggcyatgcagtcatgcctcatccaccatgttcacctgacctcttgccaactgaccacttcttcaagcatctcgacaattttttgcagggaaaacgcttccacaa

SEQ ID NO: 21624 - DNA, 201 bp, Homo sapiens
cctcttcagcaacatgaaaagttgctgaagaactcaacgtcgaccattctatggccgtttgacatgtgaagcaaattggaaaggtggaaaaactcggtaastgggtgcctcatgagctgagtggaaattttaaaaaatcgtcatcttggagccaggtgcggtggctcatgcctgttatcctagcactttggaaggctgaag

SEQ ID NO: 21625 - DNA, 201 bp, Homo sapiens
caacatcgacaatgcatttggcccagggactgctaactaacgcacagtgcagtggtggttcaagaagttttgaaaaggagatggcagccttggagatgagragcatagtggctggccatcagaagttgacaatgatcaattgagagtaatcactgaagctgaccctcttcagcaacatgaaaagttgctgaagaactcaac

SEQ ID NO: 21626 - DNA, 201 bp, Homo sapiens
acacaattggtttttgtatttgtaactgtattctgttagtttgccacttattttggcagttgctttttagatttgttaggattttatatttagacaatgartttgtctgctagtttaatatctattttcagacttctggattctgttcatgatggtataactgggactggatttattcttctatcttaaacaactggcaaa

SEQ ID NO: 21627 - DNA, 201 bp, Homo sapiens
atgccaacaagagtcctggagaaaagtgtttctgttataacgtggcatggttagggcctgaagtatacatttgcttatatttgctgtatacctttgtgctktgctctcttaatgatcccccaaaagctcctttcccgccttccccaggccacaatgttgcagaaaaaaagttcaagaattgctaacttgactgtgacttga

SEQ ID NO: 21628 - DNA, 201 bp, Homo sapiens
agtcagtgttttgctctgtcctcaagcctcgagcgcagtggtacaatcacagctcactgctgcctccaccttcagggctcaagcaatcctcccacctcagyctcctgagtagctgagactatgcccagctaattttttattttttgtagagatggggtctcactatgtaacccaggcttgtcttaaactcctgggctcaag

SEQ ID NO: 21629 - DNA, 201 bp, Homo sapiens
aaagctcctttcccgccttccccaggccacaatgttgcagaaaaaaagttcaagaattgctaacttgactgtgacttgaaatgattaaaatgcatgcttasaaaccagtttcttaaaccagtttcttaattcacaaagactagataaaatcacagctgggaataggaaggagatagaagaacaagcagcttgattgcaggg

SEQ ID NO: 21630 - DNA, 201 bp, Homo sapiens
accttagagacatacttctggctattggatgtagactttctttcttttttttttttttttttttttgagtcagtgttttgctctgtcctcaagcctcgagygcagtggtacaatcacagctcactgctgcctccaccttcagggctcaagcaatcctcccacctcagtctcctgagtagctgagactatgcccagctaatt

SEQ ID NO: 21631 - DNA, 201 bp, Homo sapiens
ctcatgaagccaaccatcaggcctcccagatattatcaaggaactgaaacttaccagatcactgcatctggacaatgaggagccagacccctcacccatcrtgattgcctaagcaaccacctgcttcttgttgaccaactcctcccctttacccctccctaattcttgttttcccaaaaatggttacatttcttttctgtt

SEQ ID NO: 21632 - DNA, 201 bp, Homo sapiens
ctgcagcacccaactaaagccttcttccctggcaatacccattgtctcagtgatcaagcagcagtacctagacagaacccctggcatttcggtaacagggygaataaatggatgtgcaaggaaaacctcttcatcttaaataaagggcagatgaacactaagccttaggatggtgccaatgaacacatgttgggttgtttc

SEQ ID NO: 21633 - DNA, 201 bp, Homo sapiens
ataactatggaacaactagagtatttgtgtccactatagtaaatttctctggactctgaatagtgagagctaatcagtgcaaaatcttgctctctggctgkcctttacttatctcttctgacctttgttttgattgcaaactttctttggacagtataaaaatcagtattttaggattagaacccaatcaatatattgagt

SEQ ID NO: 21634 - DNA, 201 bp, Homo sapiens
tcatcacattctatacctaggtaagtactaggagtacttaacaaatatcaaacagctgggtgtggtggctcacacctgtaatcccagcactttgggaggcygaggctggcggatcacttgaggtcaagagttcaagaccagcctggccaatattgtgaaaccccgcctctattaaaaatacaaaaattagccaggcatggt

SEQ ID NO: 21635 - DNA, 201 bp, Homo sapiens
aataaagggcagatgaacactaagccttaggatggtgccaatgaacacatgttgggttgtttccactttttgactattatgaataatgctgttatgaacaytgtatacaagtagaggaaggagtctaaaggcccagggaaacaagaatgatgcatgaatctgttatgaacagcctgccctgccactctgaaagacagtcat

SEQ ID NO: 21636 - DNA, 201 bp, Homo sapiens
gctagaggtgatttgttatacaacaaaggctaactgaaacagacatatcttgagatcatttggctacttgggcaagggctcagaggtgaaaatgttaagarttatcaacttatagtctggtccccagttctcaggcgtgaaaattcaaaattgtgaatgaatccagaattgatgagattccatgaataccaggataaccaa

SEQ ID NO: 21637 - DNA, 201 bp, Homo sapiens
cgggaagtggaggtttcagtgagctgagatcacactattgcactccagccagcctgggcaacaagactgagactccgtctcaaaaaaaaaaaaaaaaaaaaggagtattattacattgctaagctttgcattagttttttggttttttttttgtcaatgttaccatttttcttaggtttatatagattcaaacttcaaagt

SEQ ID NO: 21638 - DNA, 201 bp, Homo sapiens
ctttttgactattatgaataatgctgttatgaacattgtatacaagtagaggaaggagtctaaaggcccagggaaacaagaatgatgcatgaatctgttaygaacagcctgccctgccactctgaaagacagtcatccctggaagagcctggaggacgtcccctatacccaggcattacagatgcaacagtaaggagactt

SEQ ID NO: 21639 - DNA, 201 bp, Homo sapiens
cttgaaaccaggaagcagaagttgcagagagctgagattgtgccactgtgctccagcctgggtgacagagtgagacactgtctccaaaaaaaaaaaaaaaagttataaaaaaaaagaaactgggctttgtttttaacaaaatatacttctaagtttctgtgcttggaaggaaaaatactaatgtgtttacgtcctggggaa

SEQ ID NO: 21640 - DNA, 201 bp, Homo sapiens
ccagttgcaatccttagcttgcagtgacaaggtgtcttagtcagtttgggtttagtcagtcagaataccatagatgggtacttaaacaacgaacatttatygctcaagttctggagactggaagtcctgagattagggtgccagcatggctggtttgcggtaaaggcttgcctcctggttcacagatggctgtcttctcac

SEQ ID NO: 21641 - DNA, 201 bp, Homo sapiens
tgtgagccactgcacctgacctcgaagagggtttcttgatagagtaaacagaagaaattaaaagttaacaattaattgacatgtacttgactggtttcccrgctctaaaccagtggttcccaacctttttggcgccagggacctgtttcatggaagataatgttcccatggctgtcgcaggggctggggagggggaggtgg

SEQ ID NO: 21642 - DNA, 201 bp, Homo sapiens
ttcgtgcctcagcctcctgagtagctgggattacaggcacgtaccaccatgcccagctaatttttgtatttttagtagagacggggtttcaccatgttggmcaggatggtcttcatctcctgacctcatgatccacccgcctcggcctcccaaagtgctgggattacaggcgtgagccaccgcacccagccggattttttt

SEQ ID NO: 21643 - DNA, 201 bp, Homo sapiens
gaaatacttagtgttctttatatagcaggattgtaagtgattatcattttcctctttgtactttggccactatgagcataaatcactttttttttttttttgagacagtttcgctcttattgcccaggctagagtgcaatggcacgatcttggctcaccgcaacctctcgtctcccaggctcaagcgattctcctgcctca

SEQ ID NO: 21644 - DNA, 201 bp, Homo sapiens
tcttcttcttcttcttcttcttcttcttcttcttcttcttcttcttcttcttcttcttcttcttcttttcttcttctttcttcttctccttctccttctcttctcctcttcttcctcttcctcttcttccttcttccttctttcttcttcttcttcttttttaaagagggagtcttgctctgtctcccaggctggagtgca

SEQ ID NO: 21645 - DNA, 201 bp, Homo sapiens
gtcttcttcttcttcttcttcttcttcttcttcttcttcttcttcttcttcttcttcttcttcttcttttcttcttctttcttcttctccttctccttctcttctcctcttcttcctcttcctcttcttccttcttccttctttcttcttcttcttcttttttaaagagggagtcttgctctgtctcccaggctggagtgc

SEQ ID NO: 21646 - DNA, 201 bp, Homo sapiens
tttccgtcttcttcttcttcttcttcttcttcttcttcttcttcttcttcttcttcttcttcttcttcttcttttcttcttctttcttcttctccttctccttctcttctcctcttcttcctcttcctcttcttccttcttccttctttcttcttcttcttcttttttaaagagggagtcttgctctgtctcccaggctgg

SEQ ID NO: 21647 - DNA, 201 bp, Homo sapiens
ggaagggatttccgtcttcttcttcttcttcttcttcttcttcttcttcttcttcttcttcttcttcttcttcttcttcttttcttcttctttcttcttctccttctccttctcttctcctcttcttcctcttcctcttcttccttcttccttctttcttcttcttcttcttttttaaagagggagtcttgctctgtctcc

SEQ ID NO: 21648 - DNA, 201 bp, Homo sapiens
cttgtggaagggatttccgtcttcttcttcttcttcttcttcttcttcttcttcttcttcttcttcttcttcttcttcttcttcttttcttcttctttcttcttctccttctccttctcttctcctcttcttcctcttcctcttcttccttcttccttctttcttcttcttcttcttttttaaagagggagtcttgctctg

SEQ ID NO: 21649 - DNA, 201 bp, Homo sapiens
acttgtggaagggatttccgtcttcttcttcttcttcttcttcttcttcttcttcttcttcttcttcttcttcttcttcttcttcttttcttcttctttcttcttctccttctccttctcttctcctcttcttcctcttcctcttcttccttcttccttctttcttcttcttcttcttttttaaagagggagtcttgctct

SEQ ID NO: 21650 - DNA, 201 bp, Homo sapiens
cttaggaggctctacttggccttaaagggctgtgtgaccttgggtaaattgccttctttgaatctctggtcctttccatttcccattctccaggctaagarctgcactctgatacacggttattcccaataataataaccatccaccccgtgcagtggtcataaaccagagagagaaatgtccacatgaaactatgtgctg

SEQ ID NO: 21651 - DNA, 201 bp, Homo sapiens
gtgccaatcagaaaatctttgaatccacctaggacctggaagcacagttccctgccccctttgagctgtcctgcctttctagacctaaccaacgtgtaccwcaaatgtatcgattaatgtcgtatgtctccctaaaacatgtagattcaaactgtggcccaaccaccttgagcgcatgttctcaggatctcctggggctgt

SEQ ID NO: 21652 - DNA, 201 bp, Homo sapiens
agcacatttaaagggggaggttctaaactggtcacagtcccattgaaaaagcccatgggaaatgaaaagcccacacactcgcccattccattgccacaggmagggggcaggtggaggaggagcggtgggtgctccccacaccactcccaattatcaccgactcctccctttccttcattctccttcccaatctgtcagtgt

SEQ ID NO: 21653 - DNA, 201 bp, Homo sapiens
ttgtggatcttcagtaaaacattccccagaaataagtagggccatttcccagtgtgactataaactggagacaggtaaatattttttttggtggagggggsggctaattgattttggctctgaactgatgctaatccatggagacacaaaataaagtaagatgaaatgaaacaaacgcaacaacaacaaatccagcatagt

SEQ ID NO: 21654 - DNA, 201 bp, Homo sapiens
gctccctgttccaccgcctccaaagacgacatccccattccccatgagaatgtttcctatgaagccaggctggcccttgacctctgcagggctgccactgrccctggcccatcatcatgccagtccctagaggctgatggtgagaagggagcagaaagcgcccactcctgacccagattcgctgcttctcctcccctgcct

SEQ ID NO: 21655 - DNA, 201 bp, Homo sapiens
taaatattttttttggtggaggggggggctaattgattttggctctgaactgatgctaatccatggagacacaaaataaagtaagatgaaatgaaacaaaygcaacaacaacaaatccagcatagtccaccactcagagtagaagtttacagaacccaggtgatagatggaaccttgaccagagtcagtttcccagtgtgt

SEQ ID NO: 21656 - DNA, 201 bp, Homo sapiens
ctcagcattggctattattgcctgcaagacggggagtagtgaggggcttcaggcactcaggaaacccagaactcccacaagtgggcagggcaaagtaggcraaatttcagggaggaggcggtctagagcagatcacctggagagggaagctccaggcttaggagacagacactctgcaagagaacgccacggaggacgaaa

SEQ ID NO: 21657 - DNA, 201 bp, Homo sapiens
acctcgaaggtgaaaaggagctggtgatgtctggtgctcctgtcctggctgacacagctaggtcctcagcattggctattattgcctgcaagacggggagyagtgaggggcttcaggcactcaggaaacccagaactcccacaagtgggcagggcaaagtaggcgaaatttcagggaggaggcggtctagagcagatcacc

SEQ ID NO: 21658 - DNA, 201 bp, Homo sapiens
aatggcgtgatggagccattcagtggttacttctctagtctcagaatgaatggtgggaaaaggtatatttagcaactgttctttgattgatgaagcgaggragggctattatattaagaacattcaagtgaaagcctctgaaaatcctcagatcaccaaaatagtgttcccaaagtaactctgcaatctgggggaaattca

SEQ ID NO: 21659 - DNA, 201 bp, Homo sapiens
ggaacttgtggaagggatttccgtcttcttcttcttcttcttcttcttcttcttcttcttcttcttcttcttcttcttcttcttcttcttttcttcttctttcttcttctccttctccttctcttctcctcttcttcctcttcctcttcttccttcttccttctttcttcttcttcttcttttttaaagagggagtcttgc

SEQ ID NO: 21660 - DNA, 201 bp, Homo sapiens
aagcctctgaaaatcctcagatcaccaaaatagtgttcccaaagtaactctgcaatctgggggaaattcagtggcgacagttgtgcaacggtgagtgtacrtaatgccaccgaatgttacacttaaaaacggttaaaaaaggccgggcacggtggctcacgcctgtaatcccagcactttgggaggctgaggcgggcggat

SEQ ID NO: 21661 - DNA, 201 bp, Homo sapiens
gggaacttgtggaagggatttccgtcttcttcttcttcttcttcttcttcttcttcttcttcttcttcttcttcttcttcttcttcttcttttcttcttctttcttcttctccttctccttctcttctcctcttcttcctcttcctcttcttccttcttccttctttcttcttcttcttcttttttaaagagggagtcttg

SEQ ID NO: 21662 - DNA, 201 bp, Homo sapiens
aaaaacggttaaaaaaggccgggcacggtggctcacgcctgtaatcccagcactttgggaggctgaggcgggcggatcacgaggtcaggagatcgagaccwtcctggctaacacagtgaaaccccgtctctattaaaaatacaaaaaattggctgggcgcggtggctcacgcctgtaatcccagcactttgggaggccaag

SEQ ID NO: 21663 - DNA, 201 bp, Homo sapiens
gaatcgatgggaacttgtggaagggatttccgtcttcttcttcttcttcttcttcttcttcttcttcttcttcttcttcttcttcttcttcttcttcttttcttcttctttcttcttctccttctccttctcttctcctcttcttcctcttcctcttcttccttcttccttctttcttcttcttcttcttttttaaagagg

SEQ ID NO: 21664 - DNA, 201 bp, Homo sapiens
gggcggatcacgaggtcaggagatcgagaccatcctggctaacacagtgaaaccccgtctctattaaaaatacaaaaaattggctgggcgcggtggctcaygcctgtaatcccagcactttgggaggccaagacgggtggatcacgaggtcaagagttcgagaccatcctggctaacacggtgaaaccccgtctctactaa

SEQ ID NO: 21665 - DNA, 201 bp, Homo sapiens
gagaaagagagcagaatcgatgggaacttgtggaagggatttccgtcttcttcttcttcttcttcttcttcttcttcttcttcttcttcttcttcttcttcttcttcttcttttcttcttctttcttcttctccttctccttctcttctcctcttcttcctcttcctcttcttccttcttccttctttcttcttcttcttc

SEQ ID NO: 21666 - DNA, 201 bp, Homo sapiens
tgggaatgggaggttgcagtgagccaagatggcgtcactgcactccagcctgggcaacacagcgagagtctgtctcaaaaaaaaaaaaaaaaaaaaaaaaattagcaattacacctcctacggaatgtggtacaggcaaggcctttttagagggcatcagccttcaccaccctactcccagagcttctctccaagcccagc

SEQ ID NO: 21667 - DNA, 201 bp, Homo sapiens
gagaatcgcttgaactcgggaggcggaggctgcagtgagctgagatggagccactgcacaccagcctgggcaaaacaacgagactccatctaaaaaaaaaaggggggggggtgaaatataaaactcttccttatacctccaagcccaagcaggtagggggaattcttagagcaaattagacttccacaggcaaattcttta

SEQ ID NO: 21668 - DNA, 201 bp, Homo sapiens
acaggcgtgcgccaccgcgcccaggcttattttccaatttataaatgaggccgggcacggtggctcgtgtgtgtaatctcagcactttgagaggccgaggygggcagatcacttgaagtcaggagttcgagaccagcctggccaaaatggtgaaagtccgtctctactaaaaatacaaaaaattagccggacgcggtggtg

SEQ ID NO: 21669 - DNA, 201 bp, Homo sapiens
ccaacactttgggaggctgaggcgggtggatcacaaggtcaggagttcgagactgtcatggctaacacagtgaaaccccgtctctactaaaaaaaaaaaaatacaaaaaattagccaggtgttgtggcatgtgcctgtagtcccagctactcgggaggctgagacaggagaatcacttgaacccggaaggtggaggtggca

SEQ ID NO: 21670 - DNA, 201 bp, Homo sapiens
cctttatcaaaaagagtattggggccaggtgcagcggctcacgcctgtaatcccaacactttgggaggctgaggcgggtggatcacaaggtcaggagttcragactgtcatggctaacacagtgaaaccccgtctctactaaaaaaaaaaaaatacaaaaaattagccaggtgttgtggcatgtgcctgtagtcccagcta

SEQ ID NO: 21671 - DNA, 201 bp, Homo sapiens
cttcctttatcaaaaagagtattggggccaggtgcagcggctcacgcctgtaatcccaacactttgggaggctgaggcgggtggatcacaaggtcaggagwtcgagactgtcatggctaacacagtgaaaccccgtctctactaaaaaaaaaaaaatacaaaaaattagccaggtgttgtggcatgtgcctgtagtcccag

SEQ ID NO: 21672 - DNA, 201 bp, Homo sapiens
aggctgaggcaggagaatcacttgaacccaggaggcagaggttgcagtgagccgagcacgcaccactgcactccagcctgggtaacaagagtgaaactctmtctcaaaaaaagaaaagaaattacccaaactgcctgctcaacaccattgctaatgaaaaagcctgccttggtctctccttccctgatcttagcttttctt

SEQ ID NO: 21673 - DNA, 201 bp, Homo sapiens
cctttggggtggtcatgttttgggggaaaccagagagaacctgaagtgaggaaacagcttggggatgaaggtgctgtacagacaccgggccagtcccgccrgctactcatgtttactatgcacagccagcacacccatgggcgaaagaccttcggtgccccctgctcctaagagctaagcactaaatagtgcatccgctgc

SEQ ID NO: 21674 - DNA, 201 bp, Homo sapiens
cagacagaccactagatgtcactgccctatcactgtcctttgctcaaatgtggaagcacgagaggttagatgttatgcatgtcctcccttctttttttttyttttttttttttgccaacatggcaaaaccccgtctctactaacagtacaaaaattagccgggtgtggtggcaggcgcctgaaatcccagctacttgggaa

SEQ ID NO: 21675 - DNA, 201 bp, Homo sapiens
aagggacaaatcagggtgccctcaggtctaatgccagccatgtcctgccatactgggtgcctgcggaacccacatacccctctccaggctgagaagatggmcacctgacctcctttgggaggtcattcctttggggtggtcatgttttgggggaaaccagagagaacctgaagtgaggaaacagcttggggatgaaggtgc

SEQ ID NO: 21676 - DNA, 201 bp, Homo sapiens
caacctcaggtgatccgtcagcttcagcctcccaaagtgttgggattacaggtgtgagccaccgcacctggctgtaccttcatttttcaactgccatgcaraaaaaggaggggttgtaaagggagtagtctctgatatccagtcagcaatcggccttaggttccctgcctctagaccctattttcctgcctcaaatctaga

SEQ ID NO: 21677 - DNA, 201 bp, Homo sapiens
tgtctctaattctcaattttctcttatttctttgaccctcttaaaaatgtttgaagcagaggccaggcattcgagaccagcctggccaacatggtgaaackccatctctactaaaaatacaaaaatgtggcgggtgcctgtaatcccagctactcgggaggctgaggcaggagaattgcttgaacctgggaggcggacgtt

SEQ ID NO: 21678 - DNA, 201 bp, Homo sapiens
tcactctgaaaagcacgatgtgctccaagtgaaggtggcctctttctgtgatgtttttgctaaagccctaccttgccttgttctataatcaagagaaagtkaattacagtgttacttttggggtttgtggtaactctaaggtatcacagaaacttaaccaaatgctcttgagctttggttagtgaatttctattaaaaaaa

SEQ ID NO: 21679 - DNA, 201 bp, Homo sapiens
ttctttgaaccagatgagacttcgctcagagctggaggctatggccccttagttctgtttccacagtgcttccagccctctccccagtttggaggcccccraaatgaggcgcttatctctttgattttgtgaaagaaaatgcacagttcgtctatttggggcttctgaaagatgttaggccctgaagaaggttgactggga

SEQ ID NO: 21680 - DNA, 201 bp, Homo sapiens
tacctcagtcacattctagtaagaaaccattcctccctgtgggaattagagccctgcccccagaaccctggctctgaggtttgacttctgttatgtactgrcagtccccattacgctcatggttccatggtgccagcacaggagtggctgatgacagaggctgacatgtcatgcacatcattctgtctatctcattgttta

SEQ ID NO: 21681 - DNA, 201 bp, Homo sapiens
atctaaccctttgctctataatcaagtcacaacagtaaaatcaggagctttcgaatctggttgtaactaattttatgactcaggtgttatcaactaatgtktgtgcatctcagcttgttaaatgggcataaaacatgcccccctacctccccaaaaggctataggatcactctgaaaagcacgatgtgctccaagtgaagg

SEQ ID NO: 21682 - DNA, 201 bp, Homo sapiens
gagatgaggtcagtccaacctgagcatccctttgtctgctggcctcttctggggcccagactggttgcacttgcttgcagtgcagcccccaagtacctccygggagccttcattatagctcctgagctggtggacttcacctgaccaatacagtgctccaacagagcagccctcatggacatgtactagcctgcccgttcc

SEQ ID NO: 21683 - DNA, 201 bp, Homo sapiens
ttgctgaacaaatcttatttcagcaaatgacaaaataagatttgttcagcacatctcatgtgagtgctcacatagcgtgggctctgtggtcagacaaacastgggcacttctcttggtgttatcaccttaagctgtgtgccttggggaaagttactcaatttctcattccctccatttcctcgtgcacaaaatggcagaaa

SEQ ID NO: 21684 - DNA, 201 bp, Homo sapiens
tagctcaaggaaagggcattagagttaaaatggagggaaaaaatatctactaatcagaatattctactggccacagtctctgaccttctggcaattaaaawtttaaagttaaagattacttaaaattggctgggtgtggtggctcacgcctgtaatcccagcactttgtgaggccgaggtgggtggatcacaaggtcagga

SEQ ID NO: 21685 - DNA, 201 bp, Homo sapiens
tggagtgcagtggcgtgatcttggctcactggcacctccacctcctgggttcaagcaattcttctgcctcagccacccgagtagctgggattacaggtgtstgccaccacacccagctaatttttgtatttttagtagagacagggtttcaccatgttggccaggctgcccttgaactcctgacctccagtgatctgcctg

SEQ ID NO: 21686 - DNA, 201 bp, Homo sapiens
caacagcactaatttcggttagaaataataatgataggtcaggcgtggtggcgcaggcctgtaatcccagcactttgggaggccaaggccggtggatcacraggtcaagagatcgagaccaccttggccaacatggtgaaaccccgtctctactaaaaatacaaaaattagctgggcatggtgatgtgcgcctgtaatctc

SEQ ID NO: 21687 - DNA, 201 bp, Homo sapiens
tgaaattaaataattaaataattaataattaatgacaggattgttttcttttaattaggtaacataatttcctcatttatgatttttcactttttttttttaattttcattattttctaccatttctctgcttgggagtacgagcctgaattcaaagtgaaataacaggtacaaatgaatacagattaagagggaaacctc

SEQ ID NO: 21688 - DNA, 201 bp, Homo sapiens
tgattgaaagtttcctgaggcctccccagcatgcttcctgtacagcctgtggaaccgtgagccaattaagcctcttttatttaaaaattacccagtttccrgtggcacacacctgtaatcccagaactttgggaagctgaggtgggtggatcacctgaggtcaggagttcaaggccagcctgaccaacatggaaaaacccc

SEQ ID NO: 21689 - DNA, 201 bp, Homo sapiens
aggctgaggcgggaggatggcttgaacccagaacttcaagaccagcctggggaacacagggagacctccacccccgacctctaccaaatttttttttttttaaattagccaggtataatggcacatggctgtagtcccagctatttgggaagctgaggttggagggtcacttgagctcgggaggtcaagactgcagcaagc

SEQ ID NO: 21690 - DNA, 201 bp, Homo sapiens
cttttatttaaaaattacccagtttccggtggcacacacctgtaatcccagaactttgggaagctgaggtgggtggatcacctgaggtcaggagttcaagrccagcctgaccaacatggaaaaaccccgtctctactaaaaatacaaaattagccaggcatagtggcgcatgcctgtaatcccagctacttgggatgctga

SEQ ID NO: 21691 - DNA, 201 bp, Homo sapiens
ccccacctctactaaagatacaaaaattagccgggtatagtggcacactcctgtgatcccagctactagggagactgaggcaggagaattgtttgaacccrggaggcgaaggttgcagtgagctgagatcgaatcactgcactccagcctgggcgaccgagaaagactgtgtctcaaaaaaaaaaaaaaaaagtccttgat

SEQ ID NO: 21692 - DNA, 201 bp, Homo sapiens
cacagataaaaaatatttggaaactaaaaattccaccctgcgcttctggacctcagcaccagccccagggctgctctaggggccacatggctgaagggagygcaaggagctaccagaggcagaatgaagagactgaagcaatgacagccacttattttgaggaattacgtgtcattgatgactatgccaaaacattttgta

SEQ ID NO: 21693 - DNA, 201 bp, Homo sapiens
taaggagaaggcacttcactgggaaagctggaagatgggggtgcttacagcagaggagcaggaggaaggaagaaagaaagagcaaataacccgggccacaraaagccaagagttttggctgttgcagtccacagtattatcttgttcctagtattagcttgctcctagttccacaacatcaacaatggagcatgaaaatgt

SEQ ID NO: 21694 - DNA, 201 bp, Homo sapiens
tgtccgggtgttcaagaccagcccaggcaacataatgagaccctgtctctataaaaaattaaaatatcagccaggtgtggtagcatgtgcctgtggtcccrgctacttgagaggctgaggcaggaggatcatttgagccttggagtttaagggtgaaacaagccagaatcgcaccattgcacaccagcctgggtgacacag

SEQ ID NO: 21695 - DNA, 201 bp, Homo sapiens
tgggttcaagcgattcgccgacctcagtacctgggattacaggcagctgccaccacgccccgctaatttttgtatttttagtagagacggggtttcaccaygttggccaggctggtcttgaactcctgacgtcaggtaatccgcccaccttggcctcccaaagtgctggatttataggcatgagccactgcgcccagccca

SEQ ID NO: 21696 - DNA, 201 bp, Homo sapiens
gcccaggctggagtgcaatggcacgatctgggctcactgcaacctcagcttcctgggttcaagcgattcgccgacctcagtacctgggattacaggcagcygccaccacgccccgctaatttttgtatttttagtagagacggggtttcaccatgttggccaggctggtcttgaactcctgacgtcaggtaatccgcccac

SEQ ID NO: 21697 - DNA, 201 bp, Homo sapiens
aagaaaacataaaaagccattaccgggagaatagaatgcattgttctgaatctaaatgacaaagcaatctttgtttgtttgtttgtttgtttgtttgttttgagacagagttttgctcttgttgcccaggctggagtgcaatggcacgatctgggctcactgcaacctcagcttcctgggttcaagcgattcgccgacctc

SEQ ID NO: 21698 - DNA, 201 bp, Homo sapiens
gaaaatcagtgcgcagttgagtcagaaagcttataattgaatttgcttagctaagtatcttagcaactcagttcacgtcagcggaactttgttgaagggtrtattttcatcatttcttgccagatttttaaagcatgacatgttgtgttactaaaactaagtaattcttccagggggaggaagcagtagtgtctattatat

SEQ ID NO: 21699 - DNA, 201 bp, Homo sapiens
ctggagtgcagtggcacaatctcggctcaccacaacctccgcctcccaggttcaagcgattatcctgcctcagcctcccaagtagctgggattacaggatrcccggctaattttgtatttttagtagatatggggtttctccatgttggtcaggctggtctcgaactcccgacctcaggttatccacccgcctcagcctcc

SEQ ID NO: 21700 - DNA, 201 bp, Homo sapiens
ggctcccatcatcaatgcctttccccagccaccgcccacatgggaatctggtaggacagaaaacaagttttttattttttatttttttgagacagggttcycgctcagccccctgagtagttgagactacaggtgtgcaccaccacacctggctaatttttgtgttttttatagagaggtctcattacattgcccaggctg

SEQ ID NO: 21701 - DNA, 201 bp, Homo sapiens
tatgagagatgctccacaaacggtggctgtgatggcagtggggtcaccaccacatgatggctgagcccagcagacaataagacatggaaatcaaccactgygcagccactcgcaacaaggaagaaggtggaaaagctcatgagaaacaaacatccttatgacaggcttgcagggacgcctctgtattcagttatttttttc

SEQ ID NO: 21702 - DNA, 201 bp, Homo sapiens
ctagatggagtgcgtgattctggtatggcctcatgtggacctgcgaaggatggagagaacatggtctctgcttcccagaaaaaaaggagaaatttggtaayaagtgtggagactgctcttaaataatgctccagatttcaagccacttcttcctggaccatgagagagctccctaatgttgtatttatttttcctaggtcc

SEQ ID NO: 21703 - DNA, 201 bp, Homo sapiens
tttaatatgtgtgttggtcatttgatatgctattattttaaagtaataaatatagggtccagacctatggggcttagcgggtgttctctccgtgtgtggaracgagagatctaagaaataaagacacaagacaaagagataaagagaagacagctgggcccgggggaccactaccaccaagacgcagagaccagtaatggc

SEQ ID NO: 21704 - DNA, 201 bp, Homo sapiens
gtcccccaggctggagtgcagtggcgcgatctcagctcactgcaagctccccctcccaggttcacgccattctcaaagagcttagtttaagctcaattcargtgactatttgaggcctggtcaggatatctgctgttatttggaacacaagctgtttgcccaggactaagatcaagtgattttcctaaagcaaacagtgta

SEQ ID NO: 21705 - DNA, 201 bp, Homo sapiens
acctatggctggggaagcttggaataaccctgatgtccaagctatgcccttagatcaagggatttaaattgtggtcttggggctagtagtgccagtatcamttgggatcctcttaaaaatacaagttcttccatggtgtatatgtgtcacattttcttaatccagtctatcatttttggacaccgtggaatactatgcagc

SEQ ID NO: 21706 - DNA, 201 bp, Homo sapiens
acatgttagctgaataaccttaggcaagtaaattatcctctctgggcctcgatcttgttagctattaagtgggaataatgacaattcctaactcaagggtstgttgtgaggattaaatgagtccttacatgtgacatacttgaaatagtacctggtgcagagttagggctgggtgagtgttagctattatattattatttc

SEQ ID NO: 21707 - DNA, 201 bp, Homo sapiens
tctatataatgatgctatagaataaaggaggaaaggaattgaaaaagaaaagtaagaacatctttgtcaggtgcaagtaacagaatacctaaacagacttytaaaaaatcaaacatttataatctcatttggcacaaatcctgagaatggaggactggcattggttcagcagctcatgcatgccatcaaacagtttcctaa

SEQ ID NO: 21708 - DNA, 201 bp, Homo sapiens
aactacaattactcaacctgactttaaaatattaacatattaagaatttggtttgtgtgtaaaacattcattcctttccttgtaaggtagttacagagaargacaaaggccttggagcctcatggtgagtgtttggatcttggttctaccacttctcagatgatcaaccttggatgagttatttgaattccctgtgcttcc

SEQ ID NO: 21709 - DNA, 201 bp, Homo sapiens
gctgggattacaggcgtgagccactgcgcctggccaatagctgactcttaataaaggacgaagatagcactccttctcagctgtctgcagttctttatatwttggttaactctcatggcttcaattaccacctgtgcatctataacaagatgccaaaagtggctgcttctgttgaatcaaaatcaaggactaacgtcaaaa

SEQ ID NO: 21710 - DNA, 201 bp, Homo sapiens
accaagcccaactaatttttgtatttttagtagagatggggtttcatcatattggtcaggctggtctcaaactcctgacttcatgtgatccgcccacctcwgcctcccaaagtgctgggattacaggcatgagccaccacacccgacctgttgtttattctttataagtcatcccgcatatggtatttttttcttttcttt

SEQ ID NO: 21711 - DNA, 201 bp, Homo sapiens
gctaaatctattttgagaactcagtaccaatttctggttggcaatgctctgtatagttattacaatggaagcaatgtaaaaataacaaaggcttaaggaarctctaattgaaaaaaaattaaatattaccatgtcttttttattactaattgttgatgttgtattttccatacgacatatttttatataaaagtatcctgg

SEQ ID NO: 21712 - DNA, 201 bp, Homo sapiens
ccacctcagcctccgaaggtgctaatagctgactttttatttattttttgagatggaatctcactctgtcaccagtgcagtggtgcaatcttggctcactrcaacctctgcctcccaggttcaaatgattctcctgcctcagcctcccgagtagctgggactacaggcgcccgccagcacgcccagctaattttttgtact

SEQ ID NO: 21713 - DNA, 201 bp, Homo sapiens
gcgacagaacaagactctgtctcagaaaaaaaaaaaacagaatgacaacagatattttcagagtatcttgtagtttacaaagcacattcacatagttattygcttgataaatcagagtacttctgcaattaacactcttgccagctatttatgtcactcaagatgtttgaaaaatgccttttgtgaattgtaactgaatgg

SEQ ID NO: 21714 - DNA, 201 bp, Homo sapiens
ctcagcctcctgagtagctgggattacaggcatgcaccaccatatccagctaatttttgtatttttagtagagagagggtttcaccatgttggccaggctrgtctccaactcctgacctcaggtgatctgcccacctcagcctccgaaggtgctaatagctgactttttatttattttttgagatggaatctcactctgtc

SEQ ID NO: 21715 - DNA, 201 bp, Homo sapiens
gagcgtgagaatcacttgaacccaagaggcagaggttgcagtgagccgagattgacccactgcactgctgcctgggcgacagaacaagactctgtctcagaaaaaaaaaaaacagaatgacaacagatattttcagagtatcttgtagtttacaaagcacattcacatagttattcgcttgataaatcagagtacttctgc

SEQ ID NO: 21716 - DNA, 201 bp, Homo sapiens
gaagtttctcttccctgagaggtggaagacgggtgtcagattgcatggttcgttttagagaacgttattttttctagaataacttcctggtagtgtgtagrttgtgtgacagagaacttctaattgtttctctcttcctcatacacatttaccaaacacagaacatcttgtccttcacacatttcacatggcaattctgga

SEQ ID NO: 21717 - DNA, 201 bp, Homo sapiens
ctcaggtcctcaccacatggacctctccagaggaatgctgaagtcttctgccagaacaagtgaaccagcacagagagatcaaggagaaagccacaatggcyggccgcagaaatcacacttcatcatttttgcaatatcatactggtattacaaaaaagctccgttcagtgggaagtgggaataggggtgggctcaggtggt

SEQ ID NO: 21718 - DNA, 201 bp, Homo sapiens
aatagaacacatcatgcattggccctgcctcctgcctttgaagtttctcttccctgagaggtggaagacgggtgtcagattgcatggttcgttttagagarcgttattttttctagaataacttcctggtagtgtgtagattgtgtgacagagaacttctaattgtttctctcttcctcatacacatttaccaaacacaga

SEQ ID NO: 21719 - DNA, 201 bp, Homo sapiens
cctcaataggaaacaaataaaagcaaaacttttaaatggcaaaatgccctactttttctatgaaattataaaggttacaaatataaatactcaatggtaaygaaggtacaatactataaacattctcacatactacttttttttctttctttctttctttttttgagacagggtcttgctgtgtcacccaggcacaatcac

SEQ ID NO: 21720 - DNA, 201 bp, Homo sapiens
gaaactagggtcaaggctcaggcaggtctccttgggacaatagaacacatcatgcattggccctgcctcctgcctttgaagtttctcttccctgagaggtrgaagacgggtgtcagattgcatggttcgttttagagaacgttattttttctagaataacttcctggtagtgtgtagattgtgtgacagagaacttctaat

SEQ ID NO: 21721 - DNA, 201 bp, Homo sapiens
cactaagaaaaacactaagaccccaatagaaagttgagcaaattatatgtaaagaggtttcccagaagaggaaatataaaaagaaacatgaaaaaaaaatwaacctcaataggaaacaaataaaagcaaaacttttaaatggcaaaatgccctactttttctatgaaattataaaggttacaaatataaatactcaatggt

SEQ ID NO: 21722 - DNA, 201 bp, Homo sapiens
attaccaatcaacaggaaagaaggaaattgttctatttattgcataaatagcattgtagaaattggcttgctatttggtgataaaataaataataagtcargtacggtggtgcacgcttgtattcccagctactcggtagctgaggcaggaggatcgcttgagcctaggaattcaaggctgtagtgcaccatgatcacacc

SEQ ID NO: 21723 - DNA, 201 bp, Homo sapiens
aattaccaatcaacaggaaagaaggaaattgttctatttattgcataaatagcattgtagaaattggcttgctatttggtgataaaataaataataagtcragtacggtggtgcacgcttgtattcccagctactcggtagctgaggcaggaggatcgcttgagcctaggaattcaaggctgtagtgcaccatgatcacac

SEQ ID NO: 21724 - DNA, 201 bp, Homo sapiens
tctttcttctctttctttccttctttctttctttccttccttccttccttgcttctttctttctttctttctttctttctttctttctctctctctctctytctttctttctttctttctttctttttctttcctgacagagtctcatcctattgcccaggctggagtgcagtggcccaatcacagctcactgcagtctca

SEQ ID NO: 21725 - DNA, 201 bp, Homo sapiens
gaaatgcaggggagattgggtttaggggctttcctggtctgcattctgctacagccgttaaatgccgctagatggagtgcgtgattctggtatggcctcaygtggacctgcgaaggatggagagaacatggtctctgcttcccagaaaaaaaggagaaatttggtaacaagtgtggagactgctcttaaataatgctccag

SEQ ID NO: 21726 - DNA, 201 bp, Homo sapiens
ttctctctctctcctttctttcttctctttctttccttctttctttctttccttccttccttccttgcttctttctttctttctttctttctttctttctytctctctctctctctctctttctttctttctttctttctttttctttcctgacagagtctcatcctattgcccaggctggagtgcagtggcccaatcaca

SEQ ID NO: 21727 - DNA, 201 bp, Homo sapiens
gaatacaggtccggaaacggtactgtaatccctttagatcccatcaggaaacatagaggatgatctgaacaataattccctccaattgatagcttaggaaratctctccattctgttattttaaggatttttaaagaccacctcaaccaagattttcaaatcatagtgaaacacaaaatttgatcaacttacccacaacag

SEQ ID NO: 21728 - DNA, 201 bp, Homo sapiens
attgcttatcactgcccaaaagttccaagaaatgatgaagtcagtctcatttggcatacatctactttttcagaaggaaacaaagcagagaaaaaattccragagaaattcatagctagtaaccactctcacttttattttagtttccataactgaaattgctggacttgagagcaatttttccttgctcaacagaattag

SEQ ID NO: 21729 - DNA, 201 bp, Homo sapiens
ttggtaagagcataaagaaagcagattgctataggatttaaatagatatttagtaaacaagtttgaatttcattttttctatcttcaacctgtaggtatamtatactagaagatagcctaaaatttgggtaatatttacttttatacttatttatactaaactaaactaaaatccacattaatgaaatcataaaataggat

SEQ ID NO: 21730 - DNA, 201 bp, Homo sapiens
gaaggtagactagttgaagctgatatgatttttcctatgtactttttgggtaatatacatgtttgcagtgacatttgctagtcctaaatgaaactaaagaytggggggggataatagtgtgattggatgatactgggaatgagataataagaaatatcctcagctttattgccaaggccaagcagtttgatactttgcttg

SEQ ID NO: 21731 - DNA, 201 bp, Homo sapiens
cctgtccctagctgcttgggagtttgaggcagagaattgcttgaacccgggaggcagaggttgcagtgagccaagattgcgccactgtactccagcctggygacagagcgagactctgtctcaaaaaataataatgataataataataattttataaaatacagggagtataaagaaaaactgatcacccaaattggagaa

SEQ ID NO: 21732 - DNA, 201 bp, Homo sapiens
gacagagcaagactccttctcaaaaaaaagaaagaaggaaagaaaactcttccttcagcaaatgtattttgaaaagtactagcctaagttaaatgcccaasagtgttcacagctacattgtttataatagcaaaagactggaaacaatccaatcatccattgtcaagagaatggattattaatatgaagtatatatccagt

SEQ ID NO: 21733 - DNA, 201 bp, Homo sapiens
ttggttaccctacccttgatagtaaattggtgtgtcagtgtctttcctgattttcttttcacgacaattgagtaacctccaaacactgtttctgaaatcartgggaatgagaggaatcatacagtatggactgttttgtgactggcttccttgtttccacattatgtctgtgaaattcatccctcttgtggcagacaggag

SEQ ID NO: 21734 - DNA, 201 bp, Homo sapiens
cccacaaggattagaaataaaactctcccaggccgggagcaggggctcatgcctgtaatcccagcactttgggaggctaaggtgggctgatcacctgatgwcaggagttcaaggccagcctggccaacaaggtgaaacctcatatccactaaaaatacaaaaattagctgggtgtggtggtgcatgcctgtaatcccagct

SEQ ID NO: 21735 - DNA, 201 bp, Homo sapiens
atgtttctcatgtatacaatcaaactcgcaccctagtattattggcaggctaatatatgcccatgagacatgtagcttaaatctctatgggataggataartattctccctttgtttgtgatttgaaagctttccatggatgctaaagcgatttgttaaaataccttcacctgtaagtgtttttcctctcttaaaagccta

SEQ ID NO: 21736 - DNA, 201 bp, Homo sapiens
tatctcatttgccagctctcggtctcttctttggcctctcttctttggcctctcgaacctgtgctatccctatccaactcaataggggtctggcacaatarcatgtaactaacaattaggaaacagaaacctgtcttttagaatgtgggacttctcttcatcaaaagcactgtaaaatgagttaagaaacaacccataaat

SEQ ID NO: 21737 - DNA, 201 bp, Homo sapiens
ttgaacacctgggctcaagagatctgcccgcctcagcctccccaaatgctgggattataggcgtgagccaccgcaccaggcccaaagttaaaataacttamtgaataaggtttggatgatgtcaggtaccccttttttctcaggggaactggctcctacttagatatcttatgaccattagtgggacattataggatagcc

SEQ ID NO: 21738 - DNA, 201 bp, Homo sapiens
gcagtggcacgatctcagctcactacaacctctgcctcccaggttcaagagattcttatgcctcagcctccggagtagctgggattacaggcatacttcaycatgcccaactgatttttgtatttttggtagaggcggggtttcaccatgttggccaggctggtcttgaactcctgacctcaggtgatctgcccaccttgg

SEQ ID NO: 21739 - DNA, 201 bp, Homo sapiens
tttccccctacactacacagaagtaagttagcctctcctgaagccaagtttccttgcacttgataggtcaatctggtgatgaagtcgcatcccaccataaygaccctggggaatttgtgtttattgttgttttaagctactatgttattggctaatttattttttttatttttatttatttatttatttatttgagacaga

SEQ ID NO: 21740 - DNA, 201 bp, Homo sapiens
taacctgtgtaaaacccttccatttgttgaatttggcaccaaaggctcttaaaggccatttgttgggaatgtgtggataataggctgacttacatctgtaytggaaaaactctatctttgcctttggagaattatggacgtttggttttttacctttagcggatagaagggcagcaagatttgtcatgtgctgtttaaaat

SEQ ID NO: 21741 - DNA, 201 bp, Homo sapiens
tgtgcctaagttaggacagtcccttctgagcaacatcctggcataaggggaagttcttaaccacatttcttcccattagctgcagaggcggtgtaggtackgtcctgctagcgttcttgtgaacactgcccttctccagagaccctccctctctatctgcctaaccagcctctaactgccttctctctcagcaggaagtct

SEQ ID NO: 21742 - DNA, 201 bp, Homo sapiens
ttctttctctctctctcctttctttcttctctttctttccttctttctttctttccttccttccttccttgcttctttctttctttctttctttctttctytctttctctctctctctctctctttctttctttctttctttctttttctttcctgacagagtctcatcctattgcccaggctggagtgcagtggcccaat

SEQ ID NO: 21743 - DNA, 201 bp, Homo sapiens
cacataagaaatgaatgaaaagtagtgaatgatctcaagtatgtctacaaggcgagaggaaagtgatcctattcaccagacatgctagggaggcatttggygctgttggctctgctgttgcacaataggcctgggactctgaaggctggcacttcctcatcctaaacctcaaattttaatgaattacctccaagtgggcaa

SEQ ID NO: 21744 - DNA, 201 bp, Homo sapiens
tgtattaatttattctttggtgacagagtctcattctgttgccaaggctgcagtgcagtgacatgatctggcctcctaggatcaaacaattcttatgcctyagcttcccaagtagctgggattacaggcgtgtgccaccacgctcggctaattctttttgtatttttaatagagatagggtttcaccatgtcgaccaaact

SEQ ID NO: 21745 - DNA, 201 bp, Homo sapiens
caaagtgatgccttgacaccctctgaggttctacaggctcttccaaatcaaagagaggtcacatcatgcatagtattatttgggggttagcatacgttttrtaataattatgttaaaattggtaatccctttttgggttcaatgatagctctattaattatattgtcttgttaactgaaatattccactctgtcaatggga

SEQ ID NO: 21746 - DNA, 201 bp, Homo sapiens
cagggtatggtggcgcatgcctgtaatcccagctagttgggaggctgaggcacgagaatcgcttaatcctgggaggcagaggttgcagtgagccaataacktgctgctgcactcttacctgggcaacagagtgagattctgtctcaaaaaaaaaagaagtgaatggcatcaatcgtgaaaggtatcacataaatatgaaag

SEQ ID NO: 21747 - DNA, 201 bp, Homo sapiens
ggtaggagcctcggtaagagttggtgttcatccgcttgcggaggaaagcgaggtacttcaacttgtttctgtagaaattgccagaaatgttgatgccttcrcagcgtacgaccaccaccttccggcccagcagtacctgtttaccacgatggccgccaggcggcccaggagatggcctcgaccatcaagcaccaggacctg

SEQ ID NO: 21748 - DNA, 201 bp, Homo sapiens
tactaaaaaaaaaaaaaaaaattagcagggtatggtggcgcatgcctgtaatcccagctagttgggaggctgaggcacgagaatcgcttaatcctgggagscagaggttgcagtgagccaataacttgctgctgcactcttacctgggcaacagagtgagattctgtctcaaaaaaaaaagaagtgaatggcatcaatcgt

SEQ ID NO: 21749 - DNA, 201 bp, Homo sapiens
gccccagataggcaaactttcttgtaggcttcagacgcacaaccttgagggcaacaggaaccaccatccgctttttcttgtcgtagggcggtgggatgccrtcaaacaccttgaggcggtccagagcggcctggcctcgcttggtcttgtggggcagcatacctcgcacggtccgccagaagatgcggctgggggcccgga

SEQ ID NO: 21750 - DNA, 201 bp, Homo sapiens
ggtggctgtccctgcctggtacttccagccaaactcgtgagccaggcgccccagataggcaaactttcttgtaggcttcagacgcacaaccttgagggcarcaggaaccaccatccgctttttcttgtcgtagggcggtgggatgccatcaaacaccttgaggcggtccagagcggcctggcctcgcttggtcttgtgggg

SEQ ID NO: 21751 - DNA, 201 bp, Homo sapiens
agggcaaacagtgatggattacaagaaaagtggctggccagaatgccgtttccatctctctcggtttctcttctgcatgattctcccaacctctccccacrtgggctatctatcacctatcaccgtgcaagcacttcctcagaggaatgcttttgttttggaaacaggtttggaggcaaagggataagggaagtaagatga

SEQ ID NO: 21752 - DNA, 201 bp, Homo sapiens
caaaggagattcataaatgaatcatgtaattttaagcaattctcactagatggagctagttacaaataaatacttttttaatatttttcttctttatttttaattttttatttttatttattttttattttttgaggaattaacagtctttattgggctcagatcaggaggccgtgggtcttgaggacctctgtgtatttg

SEQ ID NO: 21753 - DNA, 201 bp, Homo sapiens
tttaaagatgatgatcatcctttcccccaaaactcacaatttggtttcttccttaaaccttttaacccagacttctcaaagaatcatcttaaagatgtgasgacaggttagaatagagaattttaattatggggctctgctcaaccagcccgctactgcagggcaaacagtgatggattacaagaaaagtggctggccaga

SEQ ID NO: 21754 - DNA, 201 bp, Homo sapiens
agccaggtgtggtaagcgcctgtaatcccagctactcgtgaggctgaggcaggagaatcgcttgaacccgggaagcagaagttgcaatgagttgagatcayggcactgcactccagcctgggcaacagagactctgtctcaaaaaaaaaaaaaaaagaaaaaagaaaaaaatagaaaatatatatttactattcattacat

SEQ ID NO: 21755 - DNA, 201 bp, Homo sapiens
ataagatgatttcctgattacttgccatttttaaaggaatgccttataagttatagtcttcatcttcactttttaggacccaatggtgagtcagggtctayggtgtctcaagaattcggccacctccacgaccaacctctacacacaggccctgttggcttacattttctccctggctggggaaatggacatcagaaacat

SEQ ID NO: 21756 - DNA, 201 bp, Homo sapiens
aggagttcgagaccagcctgaccaacatggtgaaaccctgtctctactaaaaatacaaaaattagccaggcatgatggcacgtgcctgtaatcccagttaytcgggagactgaggcaggaaaattgcttgaacccagagggtggaggttgcagtgagctgagatcgtgccactgcactccagcctgggcaacagagcaaga

SEQ ID NO: 21757 - DNA, 201 bp, Homo sapiens
gaagggtttagggaaatttgccaggaacttaccatgagtcatgggacaaatgggaacccgtcattccctctgcaaaacctgttcttgagaagccctttgtycagagcctcagtaggcagctggttcataccaaccaatggtaagcaatgctcatctgttctctcccttaaggcctctctttgtgtgaagacccacaagcat

SEQ ID NO: 21758 - DNA, 201 bp, Homo sapiens
gagtttgctcttgttgcccaggctagagtgcagtggcacaatctcagctcacagcaacctcttcctcccaggttcaagcaattctccagtctcagcctccsgagtagctgggattacagccacccgtcaccaagcccaactaatttttgtatttttagtagagatggggtttcatcatattggtcaggctggtctcaaact

SEQ ID NO: 21759 - DNA, 201 bp, Homo sapiens
acgaatccgtggaggtagaaactcatctaggaaaagttagagagcaagccacttgggtacaacagcctcccagactgtctctgaggactggttttcttttytgttttcttggattcctcgtggaaaacagtctatgttttctgggtggctaaaactaggcatgtcagtcttgttaattgtgcttatgctttctattatgac

SEQ ID NO: 21760 - DNA, 201 bp, Homo sapiens
gtacagaaatccctggattatagaaagttcttctaaaattttgtcttgagaacccctgccattccccatcttctattgtgtcacctttttttctgcatctsacaggaaaggtggcatctgaatctgtctccctggagctcccagtggacattgttcctgactcgaccaaggcttatgttacggttctgggtaagcagttag

SEQ ID NO: 21761 - DNA, 201 bp, Homo sapiens
gggcctcactcagtatctcatcacatgaatctctctggtggggtgcctcatcacacaacagctgtttttcccagagcaagcagtttgagaaaaggggtgcrcccaagatggaagctgcagtcttttagtagctgggattacaagtatgcccccccatgcctggcttttttttttttttttttttttgtatttttagtagag

SEQ ID NO: 21762 - DNA, 201 bp, Homo sapiens
acacagagtgtgacttccagaatcctaataagaatagcagctatcgcctgtaatcccagcactttgggaggccgaggcgggcggatcatgaggtcaggatrtcgagaccatcctggtgaacacggtgaaaccccgtctctactaaaaatacaaaaaaattagccgggcgtggtggcgggcgcctgtagtcccagctactcg

SEQ ID NO: 21763 - DNA, 201 bp, Homo sapiens
gaggcgggcggatcatgaggtcaggatatcgagaccatcctggtgaacacggtgaaaccccgtctctactaaaaatacaaaaaaattagccgggcgtggtrgcgggcgcctgtagtcccagctactcgggaggctgaggcaggagaatggcgtgaacccgggaggcggagcttgcagtgagccgagatcacgtcactgtac

SEQ ID NO: 21764 - DNA, 201 bp, Homo sapiens
ataaaaatataagtatatgagtgaagaactgatttttgaattttgctttaattaatttaaatttaagtggtcacatgtgggtagtggccaccgtattggaycacagaaccttaagcagtaggaagctttttgctacgtgatgtattataaatctttccactgtctcagcaatctaaacataaaaccaacatgtctaaattt

SEQ ID NO: 21765 - DNA, 201 bp, Homo sapiens
gcaaagttaccctagtcttaactggaagagcatggctcccttaaagagtctaaaataagccttttcctttagtgactcccagctctggtcttgtcaggttscatttttctcctaaccttcttctttcctaatcctcactcactaattcaaaaatgttattctgccttccagaacatcacactttgtaaacattttgttaat

SEQ ID NO: 21766 - DNA, 201 bp, Homo sapiens
actatactttctgcaaatgctcacagtcacatgtccagggacaggcttcccatatgtgtatctgtcatgagaacattcccaaaggaatcagagcagacacygaacctccccattttctagctatttatatctcccctttagctacagtatattccctgtctgtacttccctctgctctctgctgggctcacacaatattga

SEQ ID NO: 21767 - DNA, 201 bp, Homo sapiens
gcctgagctcagacttgaatttcttttttagactttcattttctccctttatgaagtggcaaagtcagttaagtatagatgtggccgtctatgtccctgarcttctgggttcaataatcagctctgcgactcctcttaaagaatccagaggatttcctgcctggaccttgaagtcacctccccgctacatatttcccagct

SEQ ID NO: 21768 - DNA, 201 bp, Homo sapiens
ggatggtctcgatctcctgacctcatgatctgcccacctctgcctcccaaagtgctgggattacaggcgtgagccaccgcgcccagctttttttctagttmtgtgaagaatgatgatggtattttgatggaaattgcattgaatctgcagattgcttttggcagtatgttcattttcgcaatattgattctactgatccat

SEQ ID NO: 21769 - DNA, 201 bp, Homo sapiens
tatgcgattagccatagcaaccaaaactcaggatcacaacaatgagaccaggggtacatcatcaatctcaatgtttgtgcaaagcaaattagcaagccagyatggcatggtacattgctccaagtgtacacaacaaaatcatcaattagtgacataaagaacatcctaagaacatttccgagggtttgccaagggtcaatc

SEQ ID NO: 21770 - DNA, 201 bp, Homo sapiens
aacatcctccgtaggttcagactgacctggctaaatcgcatgagtaccagctagaatcatgggcagattctcagacctccagttgtctctgtgctgatgamgcaaaaacccaccactggaacatcacagctgtcaaattgggtaagagagggaagtggtagacgggcgaggaaagccagcagcagaagaccagtgactgag

SEQ ID NO: 21771 - DNA, 201 bp, Homo sapiens
ccaggctcccttggaggtgtaaggactgagcaactagacctacttgctatgtagatttatctcagaaatggcctcttaaagagaattctcatcattctagwacctcatttgtcaacaggatttatacactaaaattcaatcttcctaaagaattgagaacaaatttaataaggagtaaactcagattgcaaagataattgt

SEQ ID NO: 21772 - DNA, 201 bp, Homo sapiens
gagagaggtgtgggaaccaggatggaagagtcaggcctccagatagcgtttacttctcctttcttccttgaatcactgtctcagagataattaggttcagragaggaggaaaaaaaagatgacgtcaacatggagcagagtttttcttagaccttagcctagcaaggaaagagaaatgcctggtctcagtgctgggaagct

SEQ ID NO: 21773 - DNA, 201 bp, Homo sapiens
ttcctgacgccatcaccgagtggaaggcgatgagtttctgcacttcccagtcaagaggcttcgggctttcacccactgttggactaactgctttcaagccrttctttgttgacctgactctcccttactcagtagtccgtggggaatcctttcgtcttactgccaccatcttcaattacctaaaggattgcatcagggtga

SEQ ID NO: 21774 - DNA, 201 bp, Homo sapiens
attcctagtctgaggaattgcctattcaaggaatcatttttggtgatatatctgcctagtagccaaatactctgataagaacaaaaacccgtgtgtgtgtstaagattagctgatgcttcacttttctcaatgttttatattgcatattatcataagaagtctcactggatcaggccgggcgccatggctcacactggtaa

SEQ ID NO: 21775 - DNA, 201 bp, Homo sapiens
tttctaaaatatcgtgtctttgattttctaaattattatacaatttgctgataggtataattttgagttagatctttatctgttgatctggaggagtttcygggactttttttttttttaaagaagcacacaagttgcccagaaatgtatatagtataatccaaattttgtaagacaaacaataacatgtatgtatatgtt

SEQ ID NO: 21776 - DNA, 201 bp, Homo sapiens
gagctcaggcaatccgcccgcctcggcctcccaaagtgccgggattacaggcctgagccaccgtgcccggcccaggcagagttttaattgaccaccatccyttgtccgactcctagaaactttcacctggattccttaaagtgatgccttgctgacctgattggataactcagtattcattgctgagtagctgaggtaagc

SEQ ID NO: 21777 - DNA, 201 bp, Homo sapiens
tcccaatccttgccagacctcatttaactaatagcttccttttcaaggactgcaggcagaggcagagtgcttgctgttacatgaagtgtgctccagtgctkgtggcttgggacaatgaattcatgcagatctcaggcgatggcaggagaagtattggatgctcctgatcagttggtacatctgtatatgaaatacaggagg

SEQ ID NO: 21778 - DNA, 201 bp, Homo sapiens
aggagaagtattggatgctcctgatcagttggtacatctgtatatgaaatacaggaggaaacaggccgggcagtcctgcccgctgtacagagaaagtggtygacacagcaggggaatttaaagatcacctctaaccatctcagttcttaagtggcatctttagttgggcctaggaattaaattgacataaggcagattaac

SEQ ID NO: 21779 - DNA, 201 bp, Homo sapiens
tctttgtacaaacatgaagatcctaggagaagcccaatcaattttagagagacaagtggatgaagatagggattaaaagaattgtgcttgactgagcagaragactgatgatctgaaaggacaccaggtaaaatgtttctttttagctttacaaatgcactgcttgttaacatctatgaattcatgtacttgcttttccat

SEQ ID NO: 21780 - DNA, 201 bp, Homo sapiens
gcaatggtggaaggaggggaacgggagtcatttcatcagaaagatgcattgtatctactggagaattttcttgtcttagaaacactagaaattatattttytggaaatttcaaattttactaaaatgtggtcattgtcaattatgtaacaggggctttccttttcaatatagcgactatcagtaatagtgctggaaatatg

SEQ ID NO: 21781 - DNA, 201 bp, Homo sapiens
ggactgaactcagttttcacactgaaagtgaggaatctaaatggaaaatcatgatatctgtccagcatgttgttaaagtataggaaaaggggatttagtakaatatggttgaaagcactgatttgaggaaaaataattttttcatatatactccccactgagttgagactcataaaatggttactggttgaggacaccaac

SEQ ID NO: 21782 - DNA, 201 bp, Homo sapiens
tttttatatacatcgtgttagaaaacaggagatctctgagtcagagacaaagacgtgtattcacagtaaaagcagcagccaaggtgacttcagagcttggrttccctgagccccaattcccataaggcaacatagggagggccagatggtacttacaggtgctttcaggtgcaatacaggaggcgaagtctgagtttagga

SEQ ID NO: 21783 - DNA, 201 bp, Homo sapiens
ggaaagatgtctgtaaatctctcggtgaaagttaccgttttgatctttatttatctaggaatgtaaatacatttgcttcaggggaagtccttgtctttatytctccagggctgcctgcttgcactaggcattcctagaaagataatcctggcacacaggagcgaaacatgtaggagtgctgaagattcacagacagtcgtc

SEQ ID NO: 21784 - DNA, 201 bp, Homo sapiens
gaagttttttttcccttaaacttctccttttggacattccccttcattttccttttaaaaatctcatcctttccaacactttcagttgtaagaatttccawatcaagcactcaatatcaaaacaatgtgtgtgacaaacttaaagtgttgaatctgactatgtcagcagaaagcataattatcgatgatgtatgggacagc

SEQ ID NO: 21785 - DNA, 201 bp, Homo sapiens
atatgattccctcctacataacccaaggataccctggatcccttcgaatgaggaaaaattttatttgaggttttttttttttcctctagcttgatgtgatrtatctctgaagtcaatctttatcttgtccttgagagggtgaacagctccaatcagattttggagaggaggttctccttagattcttttgatcacactaca

SEQ ID NO: 21786 - DNA, 201 bp, Homo sapiens
agtttatttaaggtatcctgtttttatccaaaggtaaagacataaaactatactgtgggtggtaaacaaagatggttttaatcactcacagtttgtgctgrcagctgaccataattccttagtagcaataccctctggtctaccgcccaaagagcataaagagagtttgaagcagccgagacttgaagatcgacattggat

SEQ ID NO: 21787 - DNA, 201 bp, Homo sapiens
attacacaaaggcatgaagatgaaacttcaggtgtaacttttttgggggtattactttttaaagtaatggttttattcataggccgcaaatccaactttgsctgcagtttttttctttttttttttttgagacggagtctcgctcttgtcacccaggttggagtgcagtggcacaatctcggctcactgcaacctccacct

SEQ ID NO: 21788 - DNA, 201 bp, Homo sapiens
catttttgaatcgatgctgaaccagctaattacttcaggaacatgctacctaaataatgcctccttcattagatccattaatttaattctcactgtttatrcccctctgctcactgcctgtctgactgattcctcctccagtgctttctccatttctccttttactctcttcagtgctgccgaagtttaaggtggaagtgg

SEQ ID NO: 21789 - DNA, 201 bp, Homo sapiens
actcagtgctgttatttagcagctgtgtgtatgacttcataatttagggggctgtctgttttgtgttctaagccacgtggctgctgtggtgactgctttaraaactttcagttccctttgctgtgaaacaggtttcagtgcatcgtccctgtgtataaggtcaggtttcttacatggactcactctgtttctgtaaatttg

SEQ ID NO: 21790 - DNA, 201 bp, Homo sapiens
ctagaaatagtcaccatagatagtattcttaaaaaaaaaaaagttgctggccgggtatggtggctcacacctgtaatcttagcattttgggaggccgaggygggtggatcacttgataccaggagttcgagatcagcctggccaacatagtgaaaccttgtttctactaaaaatacaaaaattagtttggcatggtgatgc

SEQ ID NO: 21791 - DNA, 201 bp, Homo sapiens
tagagtctctcactctgttgcccaggctggagtgcagtggcacaattttggcttgctgcaacctccacctcctgagtggaggttactcaggcaatcctccwgcctcagcttcctgagtagctgggactacagccatgtgccatcacacctgaataatttttatattttttgtagagacaggatcaccccatgttgcccagg

SEQ ID NO: 21792 - DNA, 201 bp, Homo sapiens
cctcccaaagtgcttggattacaggcgttagccatcacacctgacctatttttaaattttatattaatatattaactggatttttgtcaaatagagaattmtctttaaataaccatctcctcacttcacacttagtctgggaaaaaatgagagcaaatttctgtgcatccagggagcatatcaccaaccaggcatgaagct

SEQ ID NO: 21793 - DNA, 201 bp, Homo sapiens
tatttcaaacactattctctgttgtattgtattcactattgtaatccatgagaagagaaaaccttggtattagtgtcctgaggagagtggtttccacatamctgttgattgaattcttcacagatactttgtgaatgtgtgttgtggcagtcggaacggcatagtgaatatcttctgcatacactaagtgtcaccagacca

SEQ ID NO: 21794 - DNA, 201 bp, Homo sapiens
gttggtgtggaagaggcagggctcagctgtttaatatcttctgtttattttgtcttgtggtccttcctttccatctcttctgtctcttctttccctcttgkcctctttgctcttcctcttcctctccttgccagccacagctgggaaacctattgcaggtaaaccgaaccctgggtcggaatgtgcctctagcctcccaac

SEQ ID NO: 21795 - DNA, 201 bp, Homo sapiens
agcctcttgctttttctctgacccacagtggacactggaggaaaccttcccttccttcccttttctcttagctcccaccagcctaagggctgtggaaaccmgtaccttttgtctgcacccagccccctctcctccctttggtggcttcctgtgtgtccagggctagcgtcttctaggtgaatctaagatgtcagtacctta

SEQ ID NO: 21796 - DNA, 201 bp, Homo sapiens
tctcttagctcccaccagcctaagggctgtggaaaccagtaccttttgtctgcacccagccccctctcctccctttggtggcttcctgtgtgtccagggcyagcgtcttctaggtgaatctaagatgtcagtaccttagccctcggctgcttgctcagagcctggtttgtgttctttccccagctctgccaggcccattcc

SEQ ID NO: 21797 - DNA, 201 bp, Homo sapiens
tctgacgacccagaggggactatagtgtggaaactcccaactcaaaggctaactttggttaagtgttggggtctgataacatctttctcatgaaccacaartgggacaatactgaaaatacttctcaacccaaaggaaacagactgcagcactaattggccaactttgggtaattggggtacccaagtaaaggatgggatt

SEQ ID NO: 21798 - DNA, 201 bp, Homo sapiens
ttctctctctcctttccctttcttattttttctattactcagggtaaccatctttcccagagatcacaagtcaaaactctctggtcagaggttggattaaygatgatggggcccaacagggggcaagtttgagccttgccagtttgatattgggtgctaagcagagtggcaggtcataaactgcttctttgacttttacaa

SEQ ID NO: 21799 - DNA, 201 bp, Homo sapiens
tcagcttgaaataatcagtacatcacatcagccaattttggggtggctcatccttaactcctgcaacacttttgcttagtggttttatcattatatattgyataaatatatatatatagtatacatctataaccatttatttattatacttacattaatttttttcctatagactcttccagcaagaataaggtttttttt

SEQ ID NO: 21800 - DNA, 201 bp, Homo sapiens
ctttccctttcttattttttctattactcagggtaaccatctttcccagagatcacaagtcaaaactctctggtcagaggttggattaatgatgatggggyccaacagggggcaagtttgagccttgccagtttgatattgggtgctaagcagagtggcaggtcataaactgcttctttgacttttacaaattgttcaatt

SEQ ID NO: 21801 - DNA, 201 bp, Homo sapiens
tataaagaaaaagattttatataacaaaggatcttgtatggtaaattcttgttctaaagtaaaatggttgtttgacaagaggtatgtttaggacaagtccraaagtccaagcatgtcataaatggtctgtgtaagtcataaaaatatgaaaataatttatgcaaaaaatgttgtacaatttaaaggtaattaggcttccta

SEQ ID NO: 21802 - DNA, 201 bp, Homo sapiens
agcctcctgagtagctggaattacaggccctgccaccacccccccgctaatttttgtctattttttttttttagtagagacggggtttcaccatgttggcyagtctggtcttgaactcctgactgacctcagatgaaccacccgcctcagactcccaaagtgtcaggattacaggcgttagccaccgtacctggcctgctc

SEQ ID NO: 21803 - DNA, 201 bp, Homo sapiens
ctcggatctaaaaaaatcttatctaagattccttctatggaacagagttccaatttacaaaaagcttatgtgaaaaataattattcttgctacactttatrcaaacaatcaggccaagtataataaagcaagttggtgttaccataatttgtctttaataaaaatgggaaactggagacagaaaacttaatgtttcaagaa

SEQ ID NO: 21804 - DNA, 201 bp, Homo sapiens
gtttcaccacgttggccaggttggtctcaaactcctgacctcaggtgatctgcccacctcggcctcccaaagtgctgggattacaggcgtgagtcactgcrcccaggccaatgctttctaactaagctcctctctaccgtaaacacaaaagaccctaatagttaggcaggaatatcattgcccctattcagcataaagaag

SEQ ID NO: 21805 - DNA, 201 bp, Homo sapiens
aaaacccaccaaaaccaagatggtaccaagagtgacctctggtcatcctcactgctacactcccaccagtgccatgacaacttacaaatgccatgacaacrtcagaaagttattatatatggtctaaaaatgagaggcatgaataacccaccccttgtttagcatattaagaaatagccataaaaatgggcaaccagcagc

SEQ ID NO: 21806 - DNA, 201 bp, Homo sapiens
attacaggccctgccaccacccccccgctaatttttgtctattttttttttttagtagagacggggtttcaccatgttggccagtctggtcttgaactccygactgacctcagatgaaccacccgcctcagactcccaaagtgtcaggattacaggcgttagccaccgtacctggcctgctcccagtttttacaagatgtt

SEQ ID NO: 21807 - DNA, 201 bp, Homo sapiens
tgacaacttacaaatgccatgacaacgtcagaaagttattatatatggtctaaaaatgagaggcatgaataacccaccccttgtttagcatattaagaaayagccataaaaatgggcaaccagcagcccttggggctgctgtctatagagtacccattctttcactcctttactttcttaatacattgttctcactttaat

SEQ ID NO: 21808 - DNA, 201 bp, Homo sapiens
agactcccaaagtgtcaggattacaggcgttagccaccgtacctggcctgctcccagtttttacaagatgttaattcccaataatctgagagcaatgtgtkaatatgaatattaattcttctaaatgaatattcatccttatttcctacttgtataggtggatgaataaagatccaatagtataatagaaagactattagt

SEQ ID NO: 21809 - DNA, 201 bp, Homo sapiens
aaccagctgtggggtaagtgtaagatttaatctctctattccttaagtgttcccatccacaaagtaagaaggctggatgaggtgtgtcaatcctagcacaytaacctaagtcatcccccaggttgcctagacctgtcaggagcatggccttatgaagatacaaacatgaaatcctgggttggacccctctatagtttctga

SEQ ID NO: 21810 - DNA, 201 bp, Homo sapiens
gtacaaaatgtatccaagctaagaggtcaggagagaggaaatcaaagccaagaagttgaatattttctggtaaaaagacagtgatgagacagtgtaaagawagctaaagggaaaacccattattttaaacccaatttaatgtactttaagagtttaaagtacattagaaagtctatgcacattaaagacattctctattct

SEQ ID NO: 21811 - DNA, 201 bp, Homo sapiens
aaatgtctgatcctgcttgaagtaaattatcaaagccatctacgttgagagatgaaatgtattacgtctctcctgctaacttgaggagtaaaggaatttaytaaaaagttactaggatgtttttattccttttctttttttttcttgcagtgaagcctgtagatccttaagattctttaccagttgtgtggtcttaatttc

SEQ ID NO: 21812 - DNA, 201 bp, Homo sapiens
gtcatagctggggcatatttgctgatgacccaaattatgttgtttcccttcctttccaggctgacctgatccccaagttatacctttcccttccccaggtktcccttggcttctccccctcccagcagcttccaggagcagaagtggagctgcagctgcaggcagctcccggatccctgtgtgcgctccgggcggtggatg

SEQ ID NO: 21813 - DNA, 201 bp, Homo sapiens
attcccagctactcggtagctgaggcaggaggatcgcttgagcctaggaattcaaggctgtagtgcaccatgatcacacctgtgaatagtcgctgcagtcyagcctagacaatatagtaagactctgtctctaaagataaataaataaatcccagatgaattagagatccaaatataaaataaaaccaaaaactatatcat

SEQ ID NO: 21814 - DNA, 201 bp, Homo sapiens
gcaaccaggccattttctccacacagcaacacggtgaggcttcctctctgtggggcataacacacagtgccaaagaaaaatctcctgcatctatgtctaaraaaaacactagagaagcaagtgctgaaggtagctatatgaagcatgtttttacagctaccagaaagcttacaaatgaaaattcaagcaccccatattgcc

SEQ ID NO: 21815 - DNA, 201 bp, Homo sapiens
ttaacaacaacaacaacaacaacaacaaaaacaggaaaaattcatcatgacaataaattttacttcttgtatccaaaatattgctccaacatgtaataaayatacaaaaatgttagtgagatattaaatctttgaaatccagtgagtattttacatctacagctcatttcattttgaactagtcaagtttcaaatactcaa

SEQ ID NO: 21816 - DNA, 201 bp, Homo sapiens
agttttaaaaattagccagacatggtggcatatacctatagccccagctattcggaaagctgaggtataggatcacctgagcccaggaggtcaaggctgcmgtgagctgtgatcgctctactgcacagcagcttaggcaacatctgtctcaaaaaacaaaaaaaaaagaagaagaaaaaaaaaagaatttaagcgactctc

SEQ ID NO: 21817 - DNA, 201 bp, Homo sapiens
gagccaagattgtgcccccgcactccagcctgggcaacagagcgagactccatatcaaaaaaaaggaaaaagaaaaaagaaaatgattctatggaaacagyagacactggggactccaaaagaaggacaaagatgtaagaactacctattgggtactatgtttattatttgggtaaggaattcagcaggaacccaaacctc

SEQ ID NO: 21818 - DNA, 201 bp, Homo sapiens
tccagtgcacacagacttttaccaagatagcacatattctggccataaaacaagttttaatacatttacaaggactgaaatcatgcaaagtatatttgacsaaaacagaattaaactagacatcattaataaaacaatacctggaaaatccccaaatatttgaaaattaacagtttttctataacccatgggtcaaagaag

SEQ ID NO: 21819 - DNA, 201 bp, Homo sapiens
ttagtccaacaaatgaataatgtacattcttttccagtgcacacagacttttaccaagatagcacatattctggccataaaacaagttttaatacatttamaaggactgaaatcatgcaaagtatatttgaccaaaacagaattaaactagacatcattaataaaacaatacctggaaaatccccaaatatttgaaaatta

SEQ ID NO: 21820 - DNA, 201 bp, Homo sapiens
gtaccagagaaaagagagatgcgcaaagagtgagctctagataactacagaggaatcctctcaagcctttggttgagttctgagctgaaccacttcaaagkagtaggcagaacaactcttagatctcacacagtgctaggaatagtgttttcacctgccagagtggaaagatgttcttaatatatgggattttcagtaaag

SEQ ID NO: 21821 - DNA, 201 bp, Homo sapiens
tatatggaacaatggcttcctgatattggacaacaggtaacacaagacagtgattcctgagaggaggggaataagttaggcgagccccacaattccccctrcttaatgcatggagagactatccaaggtgcagtgcaggaagggggaacccagacagagcctgccagtttcactgagcttcagagggagagagtgtggagt

SEQ ID NO: 21822 - DNA, 201 bp, Homo sapiens
gttgttgcctcctctccctggctgggctcgagctgcttcagggcaggaaccacgtctttacagtttgatgttcccagagctgacccagtgtttggcatagrggtgtgctcaataaaatcgagttgacatgaatgagcagatgctgcctcgttgcagtctggtagtgtaattccaggctgcccatgtggacttcgacttctg

SEQ ID NO: 21823 - DNA, 201 bp, Homo sapiens
tcgcttgagcccaggaggtcaaggcttcagagagccgtggttgcaccactgcactccagcctggacaacagagtgataccctgtatcaaaaaaaaaaaaaatcctgctggggttacaattggggttgatatgaatctgtagataaatttggggaaaattgacatcttaatgttgagtcttataattcatgaatatgaaacc

SEQ ID NO: 21824 - DNA, 201 bp, Homo sapiens
agaactgggaaatagtaaaaactcagataggataacctctgcatttattgtcagctgtttcctaagatacattccctgaaaaggaaaaatgagtagtgatwctaaatgaaaaagggggctggtaactcttagaaaaccagttagagtgctgtcagtccaagagaagcaaaggcccagacaaaatgtgacagcgtgtgattc

SEQ ID NO: 21825 - DNA, 201 bp, Homo sapiens
gtgtatagttgaggtaggactgaggttcctttttttccccatatggatatataatgacttcctataacattgtttgactatttttcctctcttaattgcgycagagctttgttgagaatcagttgattgtataaatgtagttctgtttctggacttaattctgtttagttgatacctttattattaagctaataacacact

SEQ ID NO: 21826 - DNA, 201 bp, Homo sapiens
cagtgatgcaaacctgtagagagagaaagacatctatacttaagaactgggaaatagtaaaaactcagataggataacctctgcatttattgtcagctgtytcctaagatacattccctgaaaaggaaaaatgagtagtgatactaaatgaaaaagggggctggtaactcttagaaaaccagttagagtgctgtcagtcca

SEQ ID NO: 21827 - DNA, 201 bp, Homo sapiens
ctagggtccatgagtgccagtggcagtgaggacagtcaccggcctggcctgtgtcctctcagctgtcctcacagcagctcaggcagggcaggaacatttgygtctgcaccttatacacaaggaggctgcagccccacaaggagagactccttggctgaggccacaagcctcggcagtggagagctgggctagaactcagcc

SEQ ID NO: 21828 - DNA, 201 bp, Homo sapiens
tttttaaagaccacctcaaccaagattttcaaatcatagtgaaacacaaaatttgatcaacttacccacaacagtgaaaaagcctctggctgacccttctdctacatcatttggcaagtccaaaactccctgcttggaggctttggcacctagaatgaaaatactgatttaaaaaatgtgatggcttctttatatcagcag

SEQ ID NO: 21829 - DNA, 201 bp, Homo sapiens
tatataaacagatatatatcactatctgtttatcctttcaccagttgatgtatattggggttgtttccatttttggctattatgaataaatctctcaaaayatctgggtacaagtctgtgtagatatatgtattcatttcttttgtgtacatatctaggagtaagattgctgggccaagcgtacggtaagtgtgcatgtat

SEQ ID NO: 21830 - DNA, 201 bp, Homo sapiens
actgctttgttaataaactaaggacctattaggtacctttgttattctacttgtggttataatctatagataaaaagccccttcactgataaacttctgtratttttccctaaataccgcctctatattcatgttctgtggctgccttctgtggctgctgtaatagactcacaaaacttggtggcttgagtgacagaaata

SEQ ID NO: 21831 - DNA, 201 bp, Homo sapiens
tttcgccatgttggtcaggctggtcttgaactcctgacctcaggtgatccacccacctcagcataatgcctggccagcatttgttgttgttgttgttgttkttttttttttttttaaagacagagtcatgcttgttttggcagcacatatactaaaaaactggaacaatacagagaagattattagcatggcccctgcacg

SEQ ID NO: 21832 - DNA, 201 bp, Homo sapiens
cactaacaatacaaaaaattagccgggcgtggtggcaggtgcctgtagtctcagctactcgggaggctgaggcaggagaatggcgtgaacctgggaggtgsagcttgcagtgagctgacatcacgccactgcactccagcctgggtgacagagcaagactccgtctcaaaaaaaaaaaaaaaaaaaaaatcagcaaaggtg

SEQ ID NO: 21833 - DNA, 201 bp, Homo sapiens
tgcaggtggagctgcctgccagtcctgcgccgtttgctcgcattcctcagcccttgggtggtcgatgggactgggcgccttggagcagggggtggtgctcrtcggggaggctcgggccgcacaggagcccacagagggggtgggaggctcaggcatggcgggctgcaggtcccgagccctgccccgtgggaaggcagctaa

SEQ ID NO: 21834 - DNA, 201 bp, Homo sapiens
caagtacaaaataaagcaatgataataggaatagcaaaaatgaatactaattaaattctgacttctaaaatctgataatgaaaagatcactgaccccaacwatgtgctggatgacaacatcagaattgtaagttcttttttttggttaattttaatttttaatttttatgggtacctagtagatgtgtatatttatggatt

SEQ ID NO: 21835 - DNA, 201 bp, Homo sapiens
gtctcccagcccagtgacagctgaagctgactgcttccgatatcacaggcagcacagaagagccgccctccaggtgctgctgggaaatgctgcctggaacyctttgccatttactttctatcaaaagctgagggaaatggtacatatggggctttcctaaaaatatgggatccatccatttgtcagcaatgtcattctatc

SEQ ID NO: 21836 - DNA, 201 bp, Homo sapiens
gaacttcctcagctcactttcaaatggagggcactggctttctaaccattgtgtctcccagcccagtgacagctgaagctgactgcttccgatatcacagrcagcacagaagagccgccctccaggtgctgctgggaaatgctgcctggaactctttgccatttactttctatcaaaagctgagggaaatggtacatatgg

SEQ ID NO: 21837 - DNA, 201 bp, Homo sapiens
  misc_feature (1)...(201): n = A,T,C or G, or insertion/deletion polymorphism (see Tables 1-2)
tgatagtcaccttttaagccttctacaggtctatcaagttgagtcaccattaccacttggtgtgtgctgtgccttgtgtaacactgcagttccgggagtcntccaacctggaatgcatgctttgcggggatctatgatgccctcgaattgtatgttacatgtgaacctgtgagcattttctaggggctctgcacctttgtg

SEQ ID NO: 21838 - DNA, 201 bp, Homo sapiens
attctgaggatagtgggcgagaactttggatttgaatgttcttctcaaaggactctggtcaaaattttcgcctacaacaaataatacatagttaatatctwgaacttttccaaaagcatgtcatagttttctatttattttatagtcctactactgactgataatgttgagatctgattcaatttctgcctctaaccatct

SEQ ID NO: 21839 - DNA, 201 bp, Homo sapiens
caattgatagcttaggaagatctctccattctgttattttaaggatttttaaagaccacctcaaccaagattttcaaatcatagtgaaacacaaaatttgwtcaacttacccacaacagtgaaaaagcctctggctgacccttctactacatcatttggcaagtccaaaactccctgcttggaggctttggcacctagaat

SEQ ID NO: 21840 - DNA, 201 bp, Homo sapiens
tttacaaataaactttttaatagcataatatttagttctatgcattgctacttaaccaatgacattaatgttgagcatttaagttatttctactgacttaytttttatcaagtaactcaacacagctttactgagcaattactatgtgccaaaaccacagaatatataatatagatcttggggatacagcagagaaaaaag

SEQ ID NO: 21841 - DNA, 201 bp, Homo sapiens
accattttgcttgatgggtatttcaaacactattctctgttgtattgtattcactattgtaatccatgagaagagaaaaccttggtattagtgtcctgagsagagtggtttccacatacctgttgattgaattcttcacagatactttgtgaatgtgtgttgtggcagtcggaacggcatagtgaatatcttctgcataca

SEQ ID NO: 21842 - DNA, 201 bp, Homo sapiens
ggtaaagtgtctgcattgctgtgcagatttgcttacttgtaacttcttcataaaaagtgagaacaaaaccataggtgcgagaaccatcttccctggtaatkataaatgagtgaaactgggggtctttattgtccgtttgtgtcctgaaagatagccctttaggcatgcacaactgtgaaagaaagaaaaaaaaaaatcaga

SEQ ID NO: 21843 - DNA, 201 bp, Homo sapiens
cccagcactttgggattccggggcaggaggatcacttgaggtcaggaattcaagactagcctgggcaacatagtgagaccccttctttcaaaaaaaaaaaatcagctgggcttggtggtgcacacctgtagtcccagctgcttgggagcctgaggctggaagattgcttgagcctgggagttggaggctgcagtgagctat

SEQ ID NO: 21844 - DNA, 201 bp, Homo sapiens
ctatgaaaaatatttctgaaaatctcattactagagagaggaggaagttaggagaatgcatttgtttgcttgtttgctagttttttttttaatcaatcaaycctatgaattacaaagtgtaatccatcccttccaagagatgttcatgttaataacagacaaagaagtttgcctttcgtatcaacaacaaacatttctcct

SEQ ID NO: 21845 - DNA, 201 bp, Homo sapiens
agtcccacactgtggctcatgcccgtaatcccagcactttgggattccggggcaggaggatcacttgaggtcaggaattcaagactagcctgggcaacatrgtgagaccccttctttcaaaaaaaaaaaatcagctgggcttggtggtgcacacctgtagtcccagctgcttgggagcctgaggctggaagattgcttgag

SEQ ID NO: 21846 - DNA, 201 bp, Homo sapiens
ttcttactgtggagcaagaaaagaggaggaggagaaaaacaaatctttggtgtctctttctcttttatgaggacaagggctgctcccttatggctgctcckttatgacctcctttacccttgaaggccagatctgtagtacagtcacatggcagggttaggatttcaacatatgtttgtttgttaagatgggcagtctcac

SEQ ID NO: 21847 - DNA, 201 bp, Homo sapiens
agcccacagctgggctgcgactgctcagaccagccagctggagggaggggctcagcagctctgggtttggccctgagagagtagttggattttaggctggycattgctgtatcaggacccaatcaattggcctagacgggatctctcagccttacaagccctctccaggtggtaggtacagagtggagagaggctgagttt

SEQ ID NO: 21848 - DNA, 201 bp, Homo sapiens
tttccttcatgaatatatgttgtttccttttttcaaaaatgtatcagtcccacactgtggctcatgcccgtaatcccagcactttgggattccggggcagraggatcacttgaggtcaggaattcaagactagcctgggcaacatagtgagaccccttctttcaaaaaaaaaaaatcagctgggcttggtggtgcacacct

SEQ ID NO: 21849 - DNA, 201 bp, Homo sapiens
tttggcataggggtgtgctcaataaaatcgagttgacatgaatgagcagatgctgcctcgttgcagtctggtagtgtaattccaggctgcccatgtggacytcgacttctgcccctgcccagggcagagaccaccgtgttgctttatgcctcgctggtgagagggggtcataaacagtttgtgctccatgaaccgttcctg

SEQ ID NO: 21850 - DNA, 201 bp, Homo sapiens
tgaaatgaatccaaatacccaaatgactggtaaccaactgaatttgaagaacatggaaactccaagtacttctaatgtaagtggcagggttttggacaacwccttttgcagtggacaagaatcctcaacaaaaggaatgcctgctaaaagtgacagtagctgttccatggaagtgctagcaacctgtctttccctgtggaa

SEQ ID NO: 21851 - DNA, 201 bp, Homo sapiens
gaaagttgaagatccagattctggcagggttctggttctggggagggggtctcttcctggcttgcagatggctgcgttcttactgtggagcaagaaaagasgaggaggagaaaaacaaatctttggtgtctctttctcttttatgaggacaagggctgctcccttatggctgctcctttatgacctcctttacccttgaag

SEQ ID NO: 21852 - DNA, 201 bp, Homo sapiens
tataattctaagttttagtctctgctgagtgaaccagtgcgttatgattatgttttgaacataattttgtcttgaacaatatgtcttaatattctgttttytctagttaataattgcccttttaaagttagtttagtttttaatatacctatgccagttcctcccacatcatccagtggcctctcaatatgattttccgta

SEQ ID NO: 21853 - DNA, 201 bp, Homo sapiens
ctctcactgccacagccaggagtagtagtagcagtccagtcctccagcagctgtagaaagggaacatcctttgggagagagtgtgtgttggggagggcagrtaggatcaggagagagaggaaagagataaagcgtatgaatgtgtaataaatcgatggtattttaattatccagaaagtacaagattctctggcatatgca

SEQ ID NO: 21854 - DNA, 201 bp, Homo sapiens
aagtatttgggtgaataaaaggactctaggctacagaattctggctagagttggctgggcgcggtggttcatgcctgtaatcccagcaccttgggaggccraggtgggcagatcacgaggtcaaagatcaagaccatcatggccaacattgtgaaaccctgtctctgctaaaaatacaaaaattagctgggcatgatggca

SEQ ID NO: 21855 - DNA, 201 bp, Homo sapiens
ttgcagactgagtagtttgcaaaaaaaagtttgagctcttaaaatttaactggtaaactttgattaatttgatgaaaagtggtggtggtggttggtatttktaagtctagtgtgaaactcattaaaagtatttgggtgaataaaaggactctaggctacagaattctggctagagttggctgggcgcggtggttcatgcct

SEQ ID NO: 21856 - DNA, 201 bp, Homo sapiens
tttcttcattttaaaacaccagggtgtgggggagggatgcaaacaaataacaaaaaagatgcttttgtaacattattttccctgtttagaaagaaaaaaaatcactccaatagtattgaaaagtccaaagatgaaatagtttcattttcttttcctaaggcttataaaaggccccctgcctgttgattccatccctctttt

SEQ ID NO: 21857 - DNA, 201 bp, Homo sapiens
gtgaagaaaggactggacaaagggatccaggttggggacagtaaattctaggggagtcactaggagatttatggggggatgtaaacctagtggaagataakgatttattaagtaagtttatctgtacaggtccagctcagtggcagttcccagtccctggagataagggttattttcttgccctggtaccggaaaggcctc

SEQ ID NO: 21858 - DNA, 201 bp, Homo sapiens
agctgcaaaagtcattatgagcaacacccttgatcttaggggtgctggtctttgagaagagagctctaagccttttgtagaggtattagaaaggtatcggmgccacggtgaaatgcaggggagattgggtttaggggctttcctggtctgcattctgctacagccgttaaatgccgctagatggagtgcgtgattctggta

SEQ ID NO: 21859 - DNA, 201 bp, Homo sapiens
tgaggaggagagcaatgtctgaaaaggtgagaaaaatggtagaaggctctcatgtcattgattctgtggggaatgaagaacccatggaggttcaatacccsagtaaagagcacatgaggtcaatgccacagtaaaagttttcttctagcaaaattacatgcttaaatgggggttaactcagttcatcttagcctcacacat

SEQ ID NO: 21860 - DNA, 201 bp, Homo sapiens
gaagtagcttcggcttgtgaatgtgcattgcagagacgtgggagaagaaagctgcaaaagtcattatgagcaacacccttgatcttaggggtgctggtctktgagaagagagctctaagccttttgtagaggtattagaaaggtatcggcgccacggtgaaatgcaggggagattgggtttaggggctttcctggtctgca

SEQ ID NO: 21861 - DNA, 201 bp, Homo sapiens
tagtctttttattgggaatacaaaaggttgtgaagtcaggactgtggttgggacaaaaaaatttaggtgtttagatcacaaatccaaggttctgcaggagyccagctgttctcagatcactgatttcctccactcctttccccatacagtaagacttaacatacctctagcctcctgggcagtgctctccaatctaaccct

SEQ ID NO: 21862 - DNA, 201 bp, Homo sapiens
atgattttccaggacttcacaacgggataaagtgaagtagcttcggcttgtgaatgtgcattgcagagacgtgggagaagaaagctgcaaaagtcattatragcaacacccttgatcttaggggtgctggtctttgagaagagagctctaagccttttgtagaggtattagaaaggtatcggcgccacggtgaaatgcagg

SEQ ID NO: 21863 - DNA, 201 bp, Homo sapiens
ggatgcatctttcagtccatatgcatgtttaatatatactttttcctaaaagcctttgagttaattgcagatcgtacaaccaacagtagaatcaagaaaayatactcaaaacaaccgaaatgttcaacagtagagggtagtatacaatgaaatctcatgcagtcattaaaaaattcaaatttctaataatatgagaatgct

SEQ ID NO: 21864 - DNA, 201 bp, Homo sapiens
ttcctcagtaaaaggatgaaaattggtttcagttgtcttactctattccagtctttgcccactttcacacaaatgacaaggccaatatgttttgtttgttktttaatcattaagagtttttgtacaaaaagtgatggttttttttcttcattttaaaacaccagggtgtgggggagggatgcaaacaaataacaaaaaaga

SEQ ID NO: 21865 - DNA, 201 bp, Homo sapiens
ttattttttaaaatctttacagttctcaccatttcacgtaccttaatccaatctttataaaagaggcagtctagagaactaggactgctcagccttatccyggagtggagcatttagcccaggtcttaattctccaagaggaggaatacatagtatggtaaggcaaggaactgggtggaatgtcaggttgcctgcccaatg

SEQ ID NO: 21866 - DNA, 201 bp, Homo sapiens
ataaatccaaataaccacagaaagattcacagtagtctagaaatcagttcaccttcaccaataaacatcttacttttcatacatcaaatagcctttttttwaaaaaagtgggccaaagatctggcttttgatattcagaccctcatagactataaaattttaggtcaacaacgatttggcttgtacgactagtatgtcctg

SEQ ID NO: 21867 - DNA, 201 bp, Homo sapiens
tctgctcttctccccaagccgaccccaaactcacagccagctttagcaagcaggcccgtcatccttccaggtgctatgtaatattaagaagcagcagctarcaattattagtgctactaggggcaggagatttgcagttccctcgctttcacacaaaagtatgaggtctgttttattattcccactctaaaggcaaaatgg

SEQ ID NO: 21868 - DNA, 201 bp, Homo sapiens
acagcagcaacagcagcagccgcaagccaccaccctcactgcccctcagccaccacaggtcccacctactcagcaggtcccaccttcccagtcccagcagmaagcccaaaccctggtcgttcagcccatgcttcagtcttcacccttgtctcttccacctgatgcagcccctaagccaccaattcccatccaatccaaacc

SEQ ID NO: 21869 - DNA, 201 bp, Homo sapiens
cctcataccccgtgtcttcgcttttccagtcctttggctgccctccggtttcttccctcacatacctgtctgactagttcctagaagcctggcagaaattsttctccgattttaatctggctgccacaaatgaaagaccttggagtccaaatactcctctctcaaagcaaaatctaaatggatataatttataagcaaaga

SEQ ID NO: 21870 - DNA, 201 bp, Homo sapiens
ttaccaactgggagacagaggtgaggtaaatcacaagcatggatgttagcagggctgcagaagtttataaataaatgatcttagaatctccagcagccccrttctttcatttggtaaccggcctcctccctgccctcatccctgtagcgcccttcccccatgagggtgaagggtcagctctaaaaatgcagtcaggaagga

SEQ ID NO: 21871 - DNA, 201 bp, Homo sapiens
tctctaattcatttctatataattctattttatttgctcctttttcttccgtagaatgtgttgccttcttttgagatttattgtcagccactttagaattyaatattcttggaatggaggataaattatatataaaggattgtagaagaggacaaatcttgcttgattatgaaggacattgctagcaatttagtcatgttt

SEQ ID NO: 21872 - DNA, 201 bp, Homo sapiens
gctggagtgcagtggcatgatctcagctcactgcaacctccgcctcccgggttcaagtgattctcctgcctcagcctccagagaaggtgggactacaggcrcgcaccaccatgcctagggaatttttgtatttttagtagagacggggtttcaccatgttggccagaacggtcttgatctcttgacctcataatctgtcca

SEQ ID NO: 21873 - DNA, 201 bp, Homo sapiens
ggggtggaatgtaactatatgcagtagcggtaattctgctccatttgtaaggagggtgaaatgcgatatggtcatgtaccctcttggtacacaagttccayaggctatagaaaaacaagtccataccctctgatatctgcattccttattcttgttatagcttacaaatcttctttagacacttaacagtgataattctcc

SEQ ID NO: 21874 - DNA, 201 bp, Homo sapiens
tcctatttcaagatccctatcacatctgcaaaaatcctttttccaaataaggcaatatttacagattctagaggttagaattttatatttttgggagacaytatttagtctattaaagcctacattagtaatttagtctattaaagcctacattagtataaattagaagtttactatattactaaaaatgacacatgaaca

SEQ ID NO: 21875 - DNA, 201 bp, Homo sapiens
cctcaggtgatccacccacctcagcataatgcctggccagcatttgttgttgttgttgttgttgttttttttttttttaaagacagagtcatgcttgtttyggcagcacatatactaaaaaactggaacaatacagagaagattattagcatggcccctgcacgaggatggcaagcaaattggtgaagcattccatatttt

SEQ ID NO: 21876 - DNA, 201 bp, Homo sapiens
gctgggattagaggtgcctgcaaccatgcccggctaatttttgtatttttactagagatggggtttcaccatgttggccaggctggtctcgaactcctgayctcgtgatccacccacctcagcctcccaaagtgttgtgactacaggcgtgagccaccgtgcccggcctgtttttttcttttctgtgtgtgtgacggagtc

SEQ ID NO: 21877 - DNA, 201 bp, Homo sapiens
actaaaaacacaaaaattagccgggcatggtgacatatgcctatatacagatgtgtgatttgggaggctaaggcaggagaatcgcttgattcccaggggayggaggttgcagtgagctgagattccaccactgcactccagcctaggtgacagagccagacaccatctcaaaaaaaccaaaaacaataacaacaacaaaaa

SEQ ID NO: 21878 - DNA, 201 bp, Homo sapiens
gcatgaacaaccacgcccagctaatttttgtatttttagtagagatggggtttcaccatgttggccaggttggtctcgaactcttgacctcaggtgatccrcccaccttggcctcccaaaatgccaggattataggtgtgagccactgctctggcctctttgggtcttacattttccttctgaagtctcccacgtacatgt

SEQ ID NO: 21879 - DNA, 201 bp, Homo sapiens
ttataccataaagataaagcatgaaacacaagaatcctccatgagttatttaaagtgaaatcacagggcacatggactcatgtggaaggagaggacatgamctgattcttttggtgaattttatttaggactaatttgactccctaaaagatcctcttaccttctgtacagataaggaaactctgggtcctttccttttca

SEQ ID NO: 21880 - DNA, 201 bp, Homo sapiens
agatggagaggctatttcctgttttagcttaagtgtgaattggccttatgctccctgcctccagaccctattttcctgcctcagcacaatctcagctcacygtaaccatctcccaggttcaggtgattctcctgcctcagcctcccgagtaactgggatcacaggcatgaacaaccacgcccagctaatttttgtattttt

SEQ ID NO: 21881 - DNA, 201 bp, Homo sapiens
ccttcccacagaaacagtcgattaacacatattttgtatgtggtgggtattatatcctgtatctttacaataaagtaagctagagaaaaggaaattataargaagaaaatatacatttacgctgggcacggtggctcacgtctgtaatcccagcactttgggaggccaaggcgggtggatcgcctgaggtcaggagttcga

SEQ ID NO: 21882 - DNA, 201 bp, Homo sapiens
aggaaattatctactctgctatttaataacctttaaaatcagaggctgaaggttaagccctaatctcacgggctgtttagcagaacaaagagtgattaacyatctttttctagtgcttggggctctctgccttggagctcatcactccagcccctctccaggcctccaccccctatgtcagcttagtagggccgaaacaga

SEQ ID NO: 21883 - DNA, 201 bp, Homo sapiens
ctgcagcattctttcccgccttcttggagttgaggtgagggattaaacaatcaaccttctctctcctttctctcattctcaaagtttttctcgccttttcyttcctttcctttgcttcatttcttttcccagtctatcgtttctctaggggtcgttgctttgctctttctccctctctgtctgttggtccctttgatcctt

SEQ ID NO: 21884 - DNA, 201 bp, Homo sapiens
gtcttgaactcctgacctcaggtgatccacctgccttggcctcccaaatttctgggatgacaggagtgagccaccgtgcccagcctaattttttttttttwagagatggagtctcactctgttgccaggctggagtgcagtggcgcgatctcggctcactgcaagctccacctcctgggtttaagtgattctcctgcctca

SEQ ID NO: 21885 - DNA, 201 bp, Homo sapiens
ccaaatttctgggatgacaggagtgagccaccgtgcccagcctaattttttttttttaagagatggagtctcactctgttgccaggctggagtgcagtggygcgatctcggctcactgcaagctccacctcctgggtttaagtgattctcctgcctcagcctcccaagtagctgggactactggctggcgccaccacgccc

SEQ ID NO: 21886 - DNA, 201 bp, Homo sapiens
gagtttatttgatttttaaaatctatcaaccattaccagcagagaagtcaaatgtaacaaggtctatataaatggtctgaaggttagtttttatttatttmttattattattttttttcttgagacgaagtctcgttctgtcacccaggctggagtgcagtggctcggtcttggctcaccacaaactccgcctcctgggtt

SEQ ID NO: 21887 - DNA, 201 bp, Homo sapiens
ggcataaccttatatataatagggtcctaacttataaataggttatattgtaacagttatctgtaagtcagttgtctggatcttagaacatgtatccacayatctataacagtatctggcacatagctggtgctcaaaaaatagttcttgaataaatgaatgaacaaatggaaagtgcaaatggctgttatattccctgac

SEQ ID NO: 21888 - DNA, 201 bp, Homo sapiens
tatatataatagggtcctaacttataaataggttatattgtaacagttatctgtaagtcagttgtctggatcttagaacatgtatccacacatctataacrgtatctggcacatagctggtgctcaaaaaatagttcttgaataaatgaatgaacaaatggaaagtgcaaatggctgttatattccctgacaacgagaaga

SEQ ID NO: 21889 - DNA, 201 bp, Homo sapiens
atgaatgaacaaatggaaagtgcaaatggctgttatattccctgacaacgagaagaaactgaatatgctttgtgatggttagttttatatgtcagattggygaagtcatagtacccagtttattcaattaaacacaaagctaggtgaaggtattccatagatatggttaacagctacacttaattgactttaaataaaaga

SEQ ID NO: 21890 - DNA, 201 bp, Homo sapiens
tccctgacaacgagaagaaactgaatatgctttgtgatggttagttttatatgtcagattggcgaagtcatagtacccagtttattcaattaaacacaaakctaggtgaaggtattccatagatatggttaacagctacacttaattgactttaaataaaagagataatctttcataacttaggtgggcttcatccaacca

SEQ ID NO: 21891 - DNA, 201 bp, Homo sapiens
aaactgaatatgctttgtgatggttagttttatatgtcagattggcgaagtcatagtacccagtttattcaattaaacacaaagctaggtgaaggtattcyatagatatggttaacagctacacttaattgactttaaataaaagagataatctttcataacttaggtgggcttcatccaaccaggtttaaattttttctc

SEQ ID NO: 21892 - DNA, 201 bp, Homo sapiens
ataataacatcttcactgagatacaggtatacttcagagataagcccatatatcaggaatatcaggttttgtgatatcaggttttgttctagaccactgchataaagtgaatattgtgataaagcaagtcacacaaattttttggtttcccagtgcatgtaaaagttatgcttacactatactgtaacctactaggtatgc

SEQ ID NO: 21893 - DNA, 201 bp, Homo sapiens
aggcaggagaatcgcttgaaccaggaggcagatgttgtagtgagccgagatcacgccactgcactccagcctgggagacagagcgagactccatctcaaamaatttttatttccaagagtataaaattattctgcatttaaaagcaacattataaccccacatctaaaagacccagggaggagtgaaaaacatttgttgga

SEQ ID NO: 21894 - DNA, 201 bp, Homo sapiens
agtaggtctcaacagtgggattaaaatattcggtcaattggccaggtgtggtggttcatgcctgtaatcccagcacttaggaggctgaggcaggtggattkgttgagctcaggagttcaagaccagcctgggcaacatggcaaaaccctgactctaccaaaaatataaaaaaattagccaggcatggtggtatgcacctgt

SEQ ID NO: 21895 - DNA, 201 bp, Homo sapiens
ggtttctcctttaaatatttgtatcaaataatttaactcaactgccttattgataactgtaactcctttttttttttttgagatagagtctcgctctgtcrctcaggctggagtgcaatggcgagatctcagctcactgcaacccccacttcccgggttcaagccgttgacctgcttcagcctccctagtacctgggatta

SEQ ID NO: 21896 - DNA, 201 bp, Homo sapiens
atgtaaattaagcagaatctaagatttactgttttaaataaatatcctttcttggatatagagaagaggtgagaagtaaaaatgaaacataaggccgggcrcagtggctcacgcctgtaatcccagcactttgggaggccgaggtgggcgatcacgaggtcgggagatcgacaccatcctggctaacacagtgaaaccccg

SEQ ID NO: 21897 - DNA, 201 bp, Homo sapiens
aactgaatatgctttgtgatggttagttttatatgtcagattggcgaagtcatagtacccagtttattcaattaaacacaaagctaggtgaaggtattccrtagatatggttaacagctacacttaattgactttaaataaaagagataatctttcataacttaggtgggcttcatccaaccaggtttaaattttttctca

SEQ ID NO: 21898 - DNA, 201 bp, Homo sapiens
tgtgatggttagttttatatgtcagattggcgaagtcatagtacccagtttattcaattaaacacaaagctaggtgaaggtattccatagatatggttaasagctacacttaattgactttaaataaaagagataatctttcataacttaggtgggcttcatccaaccaggtttaaattttttctcaaagtaaaaaatatt

SEQ ID NO: 21899 - DNA, 201 bp, Homo sapiens
caagatcttgtctctaaaaaggttttttaaaagaaggagggtaaatggagtgaaagtgtttaaagccctcacattgtccagaaactggtgacaatacttayattacaattgtaattaagcaaggatttgtattataatctctggggtaaccattaaaagagtagtaaaacaatgaataacaagctactggcagggacatgg

SEQ ID NO: 21900 - DNA, 201 bp, Homo sapiens
ccactgcactccagcctgggtgacagagcaagactccgtctcaataaaaaaaaataaaaataaaaaataaaagaggaagtgtgataatggaagcttttggrgtttttttttgccttctaaaaaaagcatggtatacaatataaaagaacatttattaggttctcaactctggaataaactcttgactgtatcatttaaaaa

SEQ ID NO: 21901 - DNA, 201 bp, Homo sapiens
atggagtgaaagtgtttaaagccctcacattgtccagaaactggtgacaatacttacattacaattgtaattaagcaaggatttgtattataatctctggkgtaaccattaaaagagtagtaaaacaatgaataacaagctactggcagggacatgggggatagaataattttaaaaactactccaaataaaggcaagaaa

SEQ ID NO: 21902 - DNA, 201 bp, Homo sapiens
ttttaaaaactactccaaataaaggcaagaaaagtgaggaaaagtgagcatacaaaacagatgggataaaatagaaacaaatagtaagatggcagacaaayccaaatatgtctgtttacactcaatgtaaacagattaatcaaatgagaatagttgtcagactggaattttaaatgattctattttgataccgatagtaag

SEQ ID NO: 21903 - DNA, 201 bp, Homo sapiens
aatctatgctatatccttgccaaaagtaaaatccacatctactaagaaaacaaccaaacctggacaacatagtgagaccccatccctaccaaaaaagaagwtagccaggcatggtggcacaggcctgtagtcccagatactcaggaggctgaggcaagagaattgcttgagcccaggcattcagggttacagtaagctata

SEQ ID NO: 21904 - DNA, 201 bp, Homo sapiens
aaccatatttttttgaagtcaagaaatgtatattgcttcatgttgcaaaatttgtatgctatgtcaaagaagcattgccagaaaatgatctgaaatgtagmacaataaagttacattatagatgtcttaggtgaaccaagagaaaaattagtgtcagagttaaaaagatgcaagtcaggaattaaggcaaaacattgaccc

SEQ ID NO: 21905 - DNA, 201 bp, Homo sapiens
tctctactaaaaatataaaaattagcctggagtggtggtgcacacctgtaatctcagctacttgggaggcaggagatttgcttgaacctgggaggcgggggttgcagtgagctgagatcacgccactgcactccagcctaggtaaaaaagcaagactccgtctcaaaaaaaaaaaaaaaagaaaagaaaaaaagaagaatg

SEQ ID NO: 21906 - DNA, 201 bp, Homo sapiens
ttctactaaaaatacaaaaatttagccaggtgtggtggccatgcacctgtaatcccagctactcgggaggctaaggcaggagaatcactgaacccgggagrcagaggctgcagtgagcagagatcgagccattgcactatagcttggcaacaagagcaaaactccgtctcaaaaaaaaaaaaaaaaaagaaactgtcaatg

SEQ ID NO: 21907 - DNA, 201 bp, Homo sapiens
tgattaaatcatttgcctttggtgatcaacttaaccttcagcccttctttgctccctggaggttgaggggtggggctgaaagtcccaattcttattctgaygttggtttttgaggtaaccagaccccactgaagctacctagaggctgccaaatttaagtcaactcgttagcatacaaaaagacacatcactttgaagatt

SEQ ID NO: 21908 - DNA, 201 bp, Homo sapiens
aaaggttgctaagagagcattctctttagggcaaaaggtcaaagtaagtgtagcttgacaccgacaccttcctggtgacccgagtttcttctgcccacctygttttctgtgaggagtccttctgagctcatacgcctggtcttatggaaggaagtggctttgagtgcacctctacctgtctatactcagccagagctgaag

SEQ ID NO: 21909 - DNA, 201 bp, Homo sapiens
cccagaaacaggggctgtttatccctttatttaggtcttctttcatttctttcaacaatgctttataattttcagagtacagatggtccttgacttgtgawggttcgtctagacttttttatttaacaatggtgttaaagcaataccatttagtagaaaccatactttgagtacctatacaactgttctgtttttcatttt

SEQ ID NO: 21910 - DNA, 201 bp, Homo sapiens
ttccaatggctcacaaaatggtaagtatacgtttggttgtttccctcaggatactgtagttgctctccaagctcttgccaaatatgccactaccgcctacrtgccatctgaggagatcaacctggttgtaaaatccactgagaatttccagcgcacattcaacatacagtcagttaacagattggtatttcagcaggatac

SEQ ID NO: 21911 - DNA, 201 bp, Homo sapiens
tgcctattaggggcgagtgaagctggttctggagaagggatctctgggaaatagtgaattatataccttagacaaagaggctggagaacagtgaaccaacyatgaagtgagagaaaaatgccatgaactcccaatctgctataaagaaacatacatctggcctggtgtggggcccatgtgtgtcatcccagcacttgggag

SEQ ID NO: 21912 - DNA, 201 bp, Homo sapiens
gcgcatgcctgtaatcccagctactcgggaagctgaggcaggagaatcacttgaacccaggagatggaggttgcggtgagctgagattgtaccactgcattccagcctgggcaacaagagcgaaattctgtctcaaaaaaaaaaaaaaaaaatcctgtaggtttgttatcaagaaaatgctgatgactataattaggacta

SEQ ID NO: 21913 - DNA, 201 bp, Homo sapiens
gggagagtttattcctggattctgttttgtctcattgtttacttcgcctatccttcaacaatatctcacacacacacacacacacacacacacacacacamtatagttttattatagttcttgattttgggtagtataatcctctagattttgtgattcttcttcaagatagccctagctattcttggcattttgaatttc

SEQ ID NO: 21914 - DNA, 201 bp, Homo sapiens
agctgagaaaaataccaaaaccaataaatgtcaaactgattgagatcaatagtcactgaatctactattctgtctctaatgacaagaaaacttttttttttgcattaagtaagttaattgaccttcgagaacttaatactcatatctgctttgtaacctccaaagttagtcgtccaaatgagaatcttgttgactaagaac

SEQ ID NO: 21915 - DNA, 201 bp, Homo sapiens
atgtaacccacctttgatatgttttcatatacattatggggaaaccatatttttttgaagtcaagaaatgtatattgcttcatgttgcaaaatttgtatgmtatgtcaaagaagcattgccagaaaatgatctgaaatgtagaacaataaagttacattatagatgtcttaggtgaaccaagagaaaaattagtgtcagag

SEQ ID NO: 21916 - DNA, 201 bp, Homo sapiens
tggtaaattggcccaaaggtattagcaaagttttataggaattccaacctgagataagggcaataagtttactagctatgagatattacagataacatttygtactgatgcctctttttggtattatgtatatttattttggtcagaaatattggatgagtcactaaattgcatcatctcaagaaatgttcctgcatttac

SEQ ID NO: 21917 - DNA, 201 bp, Homo sapiens
gattcggggtatgcttatgagcacaggaataaaggaaaaaggcagtaatctaagttgcatatataatgcctataaaacaaaaggcaccgtttgacaaggtrtctggctgatataatgggaaaaccaagaattcaggcttcaaaggaggttttttaatgcttaaatgatgtggtttgtctgatttaattatataatcagcag

SEQ ID NO: 21918 - DNA, 201 bp, Homo sapiens
cccggctaaatttcccctccgttcagaaggtttgtttggacctgagccctgggtacagtgatgttaaattcacggttactctggagaccaaggacaagacycagaagttgctagaatactctggactgaagaagaggcacttacattgtatctcctttcttgtaagcacagactcagccctcactcgaatcccttacttgc

SEQ ID NO: 21919 - DNA, 201 bp, Homo sapiens
tgccagaacaagtgaaccagcacagagagatcaaggagaaagccacaatggctggccgcagaaatcacacttcatcatttttgcaatatcatactggtatyacaaaaaagctccgttcagtgggaagtgggaataggggtgggctcaggtggtggtacttacacaacagcagtaataacagaaaaggggaccatattgtta

SEQ ID NO: 21920 - DNA, 201 bp, Homo sapiens
gcttctgttctcttttgacaagttcttataattctttgagcatgtctagctgacacaagatgttctaggctcatcttgttcttccctaccctgttactagmatcagcgatttctccaagagccctggtttcttagtggaaaagggtgtatacaaaccaagatctgtctgctaagtatgatcaaaggttgtttctcctttca

SEQ ID NO: 21921 - DNA, 201 bp, Homo sapiens
caagctggcttctgttctcttttgacaagttcttataattctttgagcatgtctagctgacacaagatgttctaggctcatcttgttcttccctaccctgktactagaatcagcgatttctccaagagccctggtttcttagtggaaaagggtgtatacaaaccaagatctgtctgctaagtatgatcaaaggttgtttct

SEQ ID NO: 21922 - DNA, 201 bp, Homo sapiens
gtctttctgtgactgacctatttcacttagcataatgacttctggttccatccatgctgttgcaaatgatatttattgatattttgtattttattcatttyaaatgtatttatttctgctctgatctttattgtttgttctaattttgggttcggtttgctcttgctcttctagttctttaagatgaatgttaggttattt

SEQ ID NO: 21923 - DNA, 201 bp, Homo sapiens
ctcagacagccaccgtccttgttgattgataggcccttttgggtactgtcactcacccagagttttaggagtcactgtccaagacaaggtttgtctctcayttccacagatacaataggattcttctccctttgtattttgggaagctaggaaggctggagaggctttcagctgcacactgacctatcaccccatgtgagg

SEQ ID NO: 21924 - DNA, 201 bp, Homo sapiens
tacacaaggaggctgcagccccacaaggagagactccttggctgaggccacaagcctcggcagtggagagctgggctagaactcagccggcctggctctasatctcaggctctgaggcagctgactgcactgggtaacctttgaggtgccaaccgtcaaggcgtccttagcctgagctttccttctcccataaagcctctg

SEQ ID NO: 21925 - DNA, 201 bp, Homo sapiens
tctgggctcgagggatcctcccacctcagcttcccaagcagctgggactacaggtgcacgccaccagcccactgctaatttttttttttttttttttttttgcagaggtagagtcttactatgttactagggccgatctagaactcctggcctcaggcgatcctccccccttggcctcccaaagttctgggattataagca

SEQ ID NO: 21926 - DNA, 201 bp, Homo sapiens
ttgtggaaacattaacaagaccaaggaagtgagatctgggcatttggggcagtaagttatgggaaggtaaatatatcggaggcactaatggaagataatgrccattttagtaagatttgtttacgcagattcaagttggtgctgactttctgtctcttgtcatataagttattctccttctcctgatatgggagaggggga

SEQ ID NO: 21927 - DNA, 201 bp, Homo sapiens
gttgtggaaacattaacaagaccaaggaagtgagatctgggcatttggggcagtaagttatgggaaggtaaatatatcggaggcactaatggaagataatraccattttagtaagatttgtttacgcagattcaagttggtgctgactttctgtctcttgtcatataagttattctccttctcctgatatgggagaggggg

SEQ ID NO: 21928 - DNA, 201 bp, Homo sapiens
aacatggtgaaaccctgtccctactaaatatacaaaattagctgggcgtggtggcatgcgcctgtaatcccagctactcgggaggctgaggcaggagaatygcttgaacccgggaggcggaggttgcagtgagctgggattgcaccactgcactccagcctgggggacagagtgagacttggtgtccaaaaaaaaaaagaa

SEQ ID NO: 21929 - DNA, 201 bp, Homo sapiens
ttaccttatgagcttcaaaattgtttttagtaatccttagtaaattagcatttatgcctcttatcattattgtgacttccaacctttaagacctatgtgayttctgaaactttaagccttgcagataatgttttgcgcacaattctatttcccttgtggtaactgctccttagcttttcttcaaagtgcacttattttttt

SEQ ID NO: 21930 - DNA, 201 bp, Homo sapiens
cagttctggctcagggtttttcatgaggtttcattccacctggtggccagggcttcggcggtctgaaggcttagccagggctggaagatctactcccaagkcagctcattcacatagtagttggcggaggcctcaggtcctcaccacatggacctctccagaggaatgctgaagtcttctgccagaacaagtgaaccagca

SEQ ID NO: 21931 - DNA, 201 bp, Homo sapiens
accctaatatttagcaatttaaatattttaaagaaccataacatttattatctcacatagtttctactagacaggaatctgggagcatcttggcctagacrgttctggctcagggtttttcatgaggtttcattccacctggtggccagggcttcggcggtctgaaggcttagccagggctggaagatctactcccaagtc

SEQ ID NO: 21932 - DNA, 201 bp, Homo sapiens
acaggaaccaccatccgctttttcttgtcgtagggcggtgggatgccatcaaacaccttgaggcggtccagagcggcctggcctcgcttggtcttgtgggkcagcatacctcgcacggtccgccagaagatgcggctgggggcccggaagtggtaggagcctcggtaagagttggtgttcatccgcttgcggaggaaagcg

SEQ ID NO: 21933 - DNA, 201 bp, Homo sapiens
acataaaattacaggatttatagttctttaaaatggaaaagtgctctcaaaaaatgttactagttcaaaggagattcataaatgaatcatgtaattttaarcaattctcactagatggagctagttacaaataaatacttttttaatatttttcttctttatttttaattttttatttttatttattttttattttttgag

SEQ ID NO: 21934 - DNA, 201 bp, Homo sapiens
cccaaagtgctgggattacaggtgtgagccaccgcacccggcctcttttttttttttttttttttttgagatggagtttcgctcttgttacccaggctggwgtgcaatggtgccatctcggctcactgcaacctccgcctcccgggttcaagcaattctcctgcttcagccttctgagtagctgggattataggcatgtgc

SEQ ID NO: 21935 - DNA, 201 bp, Homo sapiens
agtcatctaattccaaaattcttgtatttacttaatttcccctgaaactctcaacctcctatatgtgtcacttgccagcctatccccttctaccagtttcrtgtcccagtttgccacctgtaaacatgtgaacactggcactggcatggatgcctggggcaactagcgcttcacctatgatgggggctagcgctctaccag

SEQ ID NO: 21936 - DNA, 201 bp, Homo sapiens
tatcttatgacccaggacacaggcacacagacacacatacgtgactgaattaatacttagccttacaccattgcactgttttattttctttccttttcctttttttttttttttgagacggagtcttgctctgtgcccagcccaggctggagtgcagtggcgcaatcttggctcactgcaaactctgcctcccgggttcac

SEQ ID NO: 21937 - DNA, 201 bp, Homo sapiens
ctgtgtcaacccaaattgagagaccaagatgggaatctcaatcaaacaaagtttatcaggccgagcttgaggatgtgcgcccaggaagcacaggttccaayaggttataacctgtgtttcaaagcagattacacgaggcacggtattcatacatttttttaaacagggggatacctgcagtacagtgaagcaacaattaca

SEQ ID NO: 21938 - DNA, 201 bp, Homo sapiens
ttatcttatgacccaggacacaggcacacagacacacatacgtgactgaattaatacttagccttacaccattgcactgttttattttctttccttttcctttttttttttttttgagacggagtcttgctctgtgcccagcccaggctggagtgcagtggcgcaatcttggctcactgcaaactctgcctcccgggttca

SEQ ID NO: 21939 - DNA, 201 bp, Homo sapiens
ggatggtctcgatctcctgacctcatgatccgcccacctcggcctcccaaagtgctgggattacaggcgtgagccactgcacccggcctaatttttcatakttttttgtagagatagggtttcgccatgttgcccaggctggtctcaaacccctgagctcaagtgattggcttgtcctcccaaagtgctgattataggcgt

SEQ ID NO: 21940 - DNA, 201 bp, Homo sapiens
cagtggcgtgatctcagctcattgcaacctccacctcccgggttcacgccattctcctggctcagcctcccaagtagctgggactacagatgcccgccacyacgtccggctaatttttttgtatttttagtagagacggggtttcaccttgttagccaggatggtctcgatctcctgacctcatgatccgcccacctcggc

SEQ ID NO: 21941 - DNA, 201 bp, Homo sapiens
ttcgacttcctgggctcaagcaatcctcccatctcagcttcctgaatctctggggctacaggcgtatgccatcatgcccagctaattttcgttgttttggytttttgttttttgttttttgagacggagtctcactctgtcgcccaggctggtgtgcagtggcgtgatctcagctcattgcaacctccacctcccgggttc

SEQ ID NO: 21942 - DNA, 201 bp, Homo sapiens
tgactccaggtaaattcaggatgaatggagaggaatggcagcttcactcaccaccacaaggtgctgcctcctgctgtgttccagacagtcccaaagccccrgaagcacagcgcagggactccagagtgagactgaatgaaaacatatccacacgtaagtgccactcacacactctgtgtccggggcgtggaataggccagg

SEQ ID NO: 21943 - DNA, 201 bp, Homo sapiens
ataaatatatatatatagtatacatctataaccatttatttattatacttacattaatttttttcctatagactcttccagcaagaataaggtttttttttgtttttgttttgagagggagtcttgctctgtcacccaggctggagtgcagcagcatgatctcagctcactgcaacctccgcctagcgggttcaagcgact

SEQ ID NO: 21944 - DNA, 201 bp, Homo sapiens
ctccaccttggaaacacaagaaaggagccgtggctgcagagaaaaacagaggctggaaacaggggtacatgggcagggtggtggtggtgagagaattgccygaatcagctgccaaatggtgcccaggttggaaaagcaaatgtgcacacatgggttcttcccactctaaccctgaggaattagaggcctgcttctgacaca

SEQ ID NO: 21945 - DNA, 201 bp, Homo sapiens
gtacatcacatcagccaattttggggtggctcatccttaactcctgcaacacttttgcttagtggttttatcattatatattgtataaatatatatatatwgtatacatctataaccatttatttattatacttacattaatttttttcctatagactcttccagcaagaataaggtttttttttgtttttgttttgagag

SEQ ID NO: 21946 - DNA, 201 bp, Homo sapiens
actatttcataaattcaggcatatttgcttaaaataatctcctgtagagaggcaagaaacagaagcccatttttttgtttttaggaaattcatagaagccwttggtaaggttcttttaagttggcaaactctattttcagaagacttctatgttgacacttgtgacctacagaattgctttaagaggtcagcactgataaa

SEQ ID NO: 21947 - DNA, 201 bp, Homo sapiens
gcgagccggagcgcgccagacccagggcgagactgcagtgacgcggcccgggagacatggcggacgggcgtctctgaataagcagaatccggagcccctcsctacccgcggccgccgcagcccgggccatgccgcacggctgctgaccgcacgcaggggccggccccgaggacacatgcggcggcctttgccgcctcgccc

SEQ ID NO: 21948 - DNA, 201 bp, Homo sapiens
catgaacccaggggacggaccttgcagtaagcagagatgcgccactgcactccagcctcggtgacagagacagactctgtctcaaaaaaaaaaaaaaaacaaaaaccataaacagggtattgttaatagtgttatcaaaattagctgggatgggtttggtagacttgcactttgcacttctagcttctatcatggtctcat

SEQ ID NO: 21949 - DNA, 201 bp, Homo sapiens
gcctggctatttttgtgtatctttttcagtagagatgaagttttgccatgttgcccaggctggccttgaactcctgggctcaagagatccacctgcttcascttcccaaagtggtatgattacaggcatgagccattgcgcctggcctctatgcatatgttgagaagccccagtctgagctcagagatgacctctggttaa

SEQ ID NO: 21950 - DNA, 201 bp, Homo sapiens
ttaagcaaaggtgaattggatgttcgagttcttttcaaggtgcttcctcagcgacacctctattctggtctaaacgctgttgccacctctcagttcagatsaacagcctatgtgccaggtgctgtgctaggttggacagacacaagaatccatagggcatgattcttgtcctctgtaaacttagaagccagcccagatgta

SEQ ID NO: 21951 - DNA, 201 bp, Homo sapiens
gagaaaatacaatcaacctgacaactgggagtaggaggaattcagatctgaaaatttttaaagtagttcatctgtctagagtattatcagaacctcctacyctctaaaagcactaatttccttataagatactttttctgatacttacctcaaggtatatcagtggaatctatatgataaaaggaaagaagagatgtgatt

SEQ ID NO: 21952 - DNA, 201 bp, Homo sapiens
agattgcagtgagctgagatgcgccactgtactacagtctggtgacagagccagactctgtctcaaaaaaaaaaaaaaaaaagtatttgagttgatgctcygtcaaaactcatttatcaagaggatttggttttaggcaacgaaaccttgcctcaaactcatttccaactcagcgggtttgaagatgtgcaaggattcatc

SEQ ID NO: 21953 - DNA, 201 bp, Homo sapiens
gcttgaaccagggagtcggagattgcagtgagctgagatgcgccactgtactacagtctggtgacagagccagactctgtctcaaaaaaaaaaaaaaaaaagtatttgagttgatgctctgtcaaaactcatttatcaagaggatttggttttaggcaacgaaaccttgcctcaaactcatttccaactcagcgggtttga

SEQ ID NO: 21954 - DNA, 201 bp, Homo sapiens
gcattttggcagaccgaggcaggaggatcgcttgaattcaggagtttgagaccagcctgggcaacatagcaagaccttgctctgctaaaaacaaacaaaaraattagccaggcgtagtgatatgtgcctgtggtcccagctactcaggaggctgaggcaggaggattgcttgagtttgggaggtggaggctgcagtgagct

SEQ ID NO: 21955 - DNA, 201 bp, Homo sapiens
ttttgttttcctggcaggaaacggagattctttaattaaaaattaaaatttgaggttgggtatggtggctcatgcctgtaaacccagcattttggcagacsgaggcaggaggatcgcttgaattcaggagtttgagaccagcctgggcaacatagcaagaccttgctctgctaaaaacaaacaaaaaaattagccaggcgt

SEQ ID NO: 21956 - DNA, 201 bp, Homo sapiens
gcatgaacccaggggacggaccttgcagtaagcagagatgcgccactgcactccagcctcggtgacagagacagactctgtctcaaaaaaaaaaaaaaaacaaaaaccataaacagggtattgttaatagtgttatcaaaattagctgggatgggtttggtagacttgcactttgcacttctagcttctatcatggtctca

SEQ ID NO: 21957 - DNA, 201 bp, Homo sapiens
cattcaagataaaggcaccaatggttgagtctctggttccatgatgatgccttgttgctgcatcctccagagaagaggaacgctgagtcctcatgtggcasaagtgcaggagagagagaacacactcctgcaagcttgttttatggcaaagttaatccattcaccagggcagagccctcatgatttaaccacctctcatta

SEQ ID NO: 21958 - DNA, 201 bp, Homo sapiens
taccacagactgggtaacttatgaggaacagaaatctattctctcacagttctggagcctaggacattcaagataaaggcaccaatggttgagtctctggktccatgatgatgccttgttgctgcatcctccagagaagaggaacgctgagtcctcatgtggcagaagtgcaggagagagagaacacactcctgcaagctt

SEQ ID NO: 21959 - DNA, 201 bp, Homo sapiens
tgttaggtttttttattattattattttattttttatttttatttttttgagatggagtctcgctgtgtcacccaggctggagtgcagtggcgtcatctcrgctcactggaagctcggcctcctgcgttcacgccattctgcctcagcctcccgagtagctgggactacaggcacctgtcaccatgtccggctaatttttt

SEQ ID NO: 21960 - DNA, 201 bp, Homo sapiens
aattagatgggcgtggtggcacacgtctgtaatcccagcgacttgggaggctgaggcaggagaatcgcttgaaccccggaggcggaggttgcagtgagccragattgtgccattgtgctccagcctgggcaaccagagcaaagctctgtctcaaaaacaaacaaacatttgcttttttgtttttaatattactattttact

SEQ ID NO: 21961 - DNA, 201 bp, Homo sapiens
agtaatgcaatctagccaatttaagcagaaagggatttgtcttagtccattctgtgctgctataacagaataccacagactgggtaacttatgaggaacasaaatctattctctcacagttctggagcctaggacattcaagataaaggcaccaatggttgagtctctggttccatgatgatgccttgttgctgcatcctc

SEQ ID NO: 21962 - DNA, 201 bp, Homo sapiens
agtagagacggagtttcaccgtgttagccaggatggtctcgatctcctgacctcgtgatctgcccacctcggcctcccaaagtgctgggattacaggtgtragccaccgcgcccggcacctatttttattttttttgagacagagtctcgatctgtcacccaggctggagtgcagtggcgtgatcttggctcactgcaatc

SEQ ID NO: 21963 - DNA, 201 bp, Homo sapiens
tcaggttcttaattccaagcaaagtaatgcaatctagccaatttaagcagaaagggatttgtcttagtccattctgtgctgctataacagaataccacagwctgggtaacttatgaggaacagaaatctattctctcacagttctggagcctaggacattcaagataaaggcaccaatggttgagtctctggttccatgat

SEQ ID NO: 21964 - DNA, 201 bp, Homo sapiens
gcacctggccgggcgctgtggctcacacctgtaatcccagcactttgggaggccaaggtgggcggatcatctgaggtcaggagttcgagatcagcctgacsaacatggtgaaaccccatctctactaaagatacaaaattagccaggtgtggtggtgcatgcctgtaatcccagctacttgggaagctgaggaaggagaaa

SEQ ID NO: 21965 - DNA, 201 bp, Homo sapiens
ctttgggaggccaaggtgggtagatttcttgaggccaggagttcaagaccagcctgggcaacatcgtgagccctcatctctactaaagataaaataattakccgggtgtggtgtcatgagcttgtagtcctaactgctcaagaggctgaggtgggaggatcccttgtgcctaggaggtggaagttgcagtgagtcgtaatc

SEQ ID NO: 21966 - DNA, 201 bp, Homo sapiens
aaaaaaaaaaaaaaaaaaaggtaaagctgatctgaagaaagagcaggtctgtggcagagatttgctacattactttccatcccttcaatcttttcttcccrctgaccaaaccctggctcaggccaccgaaggggatatttgaatctgtagagcatctacatttagttcagtattgctgtcccatgtaagccccaggtggga

SEQ ID NO: 21967 - DNA, 201 bp, Homo sapiens
caaaattagccaggtgtggtggtgcatgcctgtaatcccagctacttgggaagctgaggaaggagaaatgcttgaatccaggaggtggaggttgtagtgcrccgagaccatgccattgcactccagcctgggcaagaagagtgagactccccctaaaaaaaaaaaaaaaagagagagagagattgtttgcatctacaatgt

SEQ ID NO: 21968 - DNA, 201 bp, Homo sapiens
tggtggcgagcacctgtaatcccagctacttgggaggcttaggcaagagaattgcttgagcctgagaggcagaggtcgtggtgagctgtgatagcaccacwgcactccagtctgggtgagagagtgagagaccctgtaggaaagaaaagaaggagggaaggagggaaggagggaaggaaggaaggagggagggagggaaag

SEQ ID NO: 21969 - DNA, 201 bp, Homo sapiens
ttgtagtgcaccgagaccatgccattgcactccagcctgggcaagaagagtgagactccccctaaaaaaaaaaaaaaaagagagagagagattgtttgcayctacaatgttcattttcagcctccatccagaagagccaagtatggtttggacctaatattatgaagtaaatagctttaaacatggtttggtggattaata

SEQ ID NO: 21970 - DNA, 201 bp, Homo sapiens
atggtggcgagcacctgtaatcccagctacttgggaggcttaggcaagagaattgcttgagcctgagaggcagaggtcgtggtgagctgtgatagcaccaytgcactccagtctgggtgagagagtgagagaccctgtaggaaagaaaagaaggagggaaggagggaaggagggaaggaaggaaggagggagggagggaaa

SEQ ID NO: 21971 - DNA, 201 bp, Homo sapiens
catttgaacccgggaggccggaggttgcagtaagccaagattgtgccactgcactccagcctgggtgacagagtgagacttcgtctaaaaaaaaaaaaaaacagataaaaatgtgttatttgtaaattagctgggtgcagtggtgtgggcctgtaatcccagctactcatggggctgaggtgggagaatctcttgagccaa

SEQ ID NO: 21972 - DNA, 201 bp, Homo sapiens
ggctttgggaggagcgtgccgccttccacagtgagcagcgaggctgggacctgcagggatgaggtcccgggaggggatgcggcagcccttgagtgctggtbggggaaggagagctgcccccagtgaggaggcgccgagctgagtggcccagactccttaggagaggcctggttttgggcttcctggtgattttccttcatg

SEQ ID NO: 21973 - DNA, 201 bp, Homo sapiens
ccacccttagagtcatcttttaacaatcttgaaacaaacagagttattctagagaaaagtagtttggagcatgccactgaaaaaagcacagctaacgatamgtgctcgtcagctgctattcaggaggatatttaccctcaggaaatagatgcatccagcaactatactccccaagatcctgcaagaaatgaaatccacagt

SEQ ID NO: 21974 - DNA, 201 bp, Homo sapiens
tctcagtcctgttcagcttcagccactactatcctttgtctattaatacagcaccaaccacttggtcccaaaggaacgttctggcgagaaatgtgcagagwgaatcagttcgccagcaggtgcgattctggaattgtttggctgccagagacccggtatttggtgtgtccgtcattactgggtgtttgtgtccccaagcca

SEQ ID NO: 21975 - DNA, 201 bp, Homo sapiens
tctttagggaatcgaggagcgcactggtgcaggggctgggtggagccatcctccgatggagcacaggcagatggaagcccccaccccagctgcgtggcctsaagccagcctcccgctccccgaaggtggtctccacacagaactgggacagttccatccccgccccttcctccagggcagcagggctgaggatcccattct

SEQ ID NO: 21976 - DNA, 201 bp, Homo sapiens
tgggctcagtggctcacacctgtaatcccagcactttgggaggcttacacaggacgataatttgagcctaggggttttttttttcttttttttttttttttgagatggagtttcactcttgttgcccaggctggagtgcagtggtgcaatctcagctcgctgcaacctccgcctcccgggttcaagcgattctcctgcctc

SEQ ID NO: 21977 - DNA, 201 bp, Homo sapiens
gatatgtgctgctgttttctctggaagcctctttagggaatcgaggagcgcactggtgcaggggctgggtggagccatcctccgatggagcacaggcagayggaagcccccaccccagctgcgtggcctgaagccagcctcccgctccccgaaggtggtctccacacagaactgggacagttccatccccgccccttcctc

SEQ ID NO: 21978 - DNA, 201 bp, Homo sapiens
cagttgagccagggaggcagaggttgcaatgagctgagattgcatcactgcactccagcctgtgtgacagagtgagaccctgtctcaaaaaaaaaaaaaaacttaaaatcttttttttaattctctcaatttcaatctcacttacttcttctttcaaagccaccactgtctgaacctggtgcccttccttctgattatagt

SEQ ID NO: 21979 - DNA, 201 bp, Homo sapiens
ccaggagttcaagaccagcctgggcaacataatgagcttctgtctctacaaaagaaattaaaaaaatagccagatggtagttgtgtcctacttggaaggcygaggtggaaggatcacttgagtctgggaggtggaggctgcagtgaagcaagatcacattgcttcactcctgcttgggtgacagagcaaaacccttctcaa

SEQ ID NO: 21980 - DNA, 201 bp, Homo sapiens
ctcctgaataactgggattacagtcacgcaccaccacgcccagctaatttttatatttttagtggagacagggtttcaccatgttggccaggatggtctcratctcttgacctcatgatctactcgccttggctttccaaagtgctggaattactggcttgagccaccacgcccagcggtgtgtagctttttatctttttt

SEQ ID NO: 21981 - DNA, 201 bp, Homo sapiens
tcggctcactgcaatctccgcataccaggttcaagcgattctcctgcctcagcctcctgaataactgggattacagtcacgcaccaccacgcccagctaayttttatatttttagtggagacagggtttcaccatgttggccaggatggtctcgatctcttgacctcatgatctactcgccttggctttccaaagtgctgg

SEQ ID NO: 21982 - DNA, 201 bp, Homo sapiens
ggcgcgtgcctgtaatcccagctacctgggaggctgaggcaagtgaatcacttgaaccccggaggcggaagttgcagtgagctgagatagcaccactgtaytccagcctgggcaacagagcaagactccatctcaaaaaaaagaaaagaaaagaaaagaaagatttatatacatctcacaggggcagagagaatttacaat

SEQ ID NO: 21983 - DNA, 201 bp, Homo sapiens
ctgcctctcgggttcacgccattctcctgcctcactcagcctcccgagtagctgggactacaggcacccgccaccacacccggctaattttttgtttttgktttttttttttttttttttttagtagagacggggtttcaccgtgttagccaggatggtctcgatcttctgacctcgtgatctgcccgcctgggcctccca

SEQ ID NO: 21984 - DNA, 201 bp, Homo sapiens
aagcaggccaattactcagaagaagccaacgattctaggtagtaagaccagacatagatttattctgcagaacacaaaatgttcttgtaaaaagagacacygtgtgagctaatggataatgagctcaacagcatccttgtttagacaaggtgaccactgatatggtttggctgtgtccccacccaaatctcatattgaatt

SEQ ID NO: 21985 - DNA, 201 bp, Homo sapiens
tagccggcttctttactgcaaactgttttatcaacaacctgttctatggtctgtatcttgtgctgacctcctatctcatcctgtgatttagaatgccttawcctcctgggaatgcatcccagcaggtctcagcctcattttacttagcccctattcaagatggagtcactctggttcatacgcctctgacagtgttacata

SEQ ID NO: 21986 - DNA, 201 bp, Homo sapiens
agacatagatttattctgcagaacacaaaatgttcttgtaaaaagagacaccgtgtgagctaatggataatgagctcaacagcatccttgtttagacaagrtgaccactgatatggtttggctgtgtccccacccaaatctcatattgaattgtagtttccataatccccacgtgtcatgggagggacccggtgggaggta

SEQ ID NO: 21987 - DNA, 201 bp, Homo sapiens
tttttaatagagacggggtttcaccatcttggccaggctcatcttgaactcctgacctcgtgatccacccgcctcggcctcccaaagtgctgggattacasgcgtgagccactgcgcccggccttaagtctctaaatttttaaaaaatgcatttaatactaaggtctcaaacagttttctagacatgtaaatcaaaaaccc

SEQ ID NO: 21988 - DNA, 201 bp, Homo sapiens
aaactctccctcttaagtctctaaacttttttttttttttttgagacggagtctcgctctgttgcccaggctggagtgcagtggtgcgatctcagctcacygcaacctccgcccctccaggtttaagcaattctcctcctcagcatctagagtagctgggattacaggcgtgtgccaccacgcccagctaattttttttgt

SEQ ID NO: 21989 - DNA, 201 bp, Homo sapiens
tgggggctctgggtctttatgtagattggggaaaaatctcttccaaggcctgataatctctaagagtttttattttatttatttatttattatttattttwtttatttatttatttatttatttatttatttatttatttattttcagacagggtctcactctgtttgttgcccaggatggagtgtactggctcccttgag

SEQ ID NO: 21990 - DNA, 201 bp, Homo sapiens
tttttagcagagatagggtttcaccatgttggccaggctggtctccaatgcctgacctcaagtgatctgcccacctggacctcccaaagtgttggaattayaggcactagcctcagcacctggccccaaacacttatataacctcttttcagaggggtgggggagatggggaatataggtagttcagtagaggggcattaa

SEQ ID NO: 21991 - DNA, 201 bp, Homo sapiens
gctaaaggaccatttaaaaatgtaaaaggacaatcccctggatgagagaaaatcattccaaatcaaatatctgataaggggcttgtatctagagtatacaragaacccatacattcagtaataaaatgataactaactcaaacaatagacaaaggatctggacaggcattttgccaacaaagataaacaaatggccaagaa

SEQ ID NO: 21992 - DNA, 201 bp, Homo sapiens
tttaaagcactggtgaagtgtgaagaaaatgagaccgattagggaagaaaacccgagaagctcagagtttgggtgaccctggggatgtgggaaggtggtgwaaatggtaccctgagggtagcatggatggtaagtgaaagaggaaaaggtgtaggtttgcataaaagaaactgatggaatttggatgccccatagcagacc

SEQ ID NO: 21993 - DNA, 201 bp, Homo sapiens
gaaggtggtgtaaatggtaccctgagggtagcatggatggtaagtgaaagaggaaaaggtgtaggtttgcataaaagaaactgatggaatttggatgcccmatagcagacccaggggaatgataccaggggaaaagatggacagttttgtgggtaaattagcagtgattttgattccttgtcttgttagctgctgatggag

SEQ ID NO: 21994 - DNA, 201 bp, Homo sapiens
gctttcaacagcagtggcaaaaccctaatgaaaatgtcagcacaattggaaatttcactaacttgaaagtaaataccaacagcaaacagccttttaacggwcccattagatcttctgtggatggtgttcagactcttgctcaaactaatgaagagaaaataatggattcttgcaatccaacttcaaatcaagtactggaca

SEQ ID NO: 21995 - DNA, 201 bp, Homo sapiens
gtataatttaaaaaaaaagaaaaagagaaaagcaggggttgcaatactaatttcagacaaaacagactttaaaccaagaaaggtcaaaaaaaaaaaaaaaagacaagagaattgcataatggtaaagggtttaattcaatgagaagacctaactaaacaaaatctacatgcacccaacacaggagcacccagattcataaa

SEQ ID NO: 21996 - DNA, 201 bp, Homo sapiens
tatcatacctcttaatactatcacattggattttaggttccaacatacaaattttgggaggacatgaacatctggacagtagcaatgctagtccattattytggtctgtctgaaggttttatctaggcagggaaaagcgtatgttttttccttgaccttgaaaatttagcttgggctttctttgtacaaacatgaagatcc

SEQ ID NO: 21997 - DNA, 201 bp, Homo sapiens
caagatgagatttgggtggggacacagccaaactgtatcaactatcatacctcttaatactatcacattggattttaggttccaacatacaaattttgggrggacatgaacatctggacagtagcaatgctagtccattattctggtctgtctgaaggttttatctaggcagggaaaagcgtatgttttttccttgacctt

SEQ ID NO: 21998 - DNA, 201 bp, Homo sapiens
gaaccatgttatacacctatgagaaaaaacatttcccaataattttaagcacttcttttaaaattacaaaattggcaaattgtctactgtaccatttattyttgttcttttctttaagagcacggccatcatatttaatccagtattttcacataagctcttcctttcaaaagagcaaaccagttttgttttaggcaactg

SEQ ID NO: 21999 - DNA, 201 bp, Homo sapiens
atgtactctattggcagattacagacacgaatctcaaagtataggaagaaaactacataattaagaaaacattaatatgcattatgaatactaaaaattgygatgaaatattttccaaaatccttagtgatcttaccctgacaatattatagatatctccatccccatagttgcttacaggtgtgtaatataaaccattgt

SEQ ID NO: 22000 - DNA, 201 bp, Homo sapiens
cataattttctgtttccagataaagcggcttagggagtggcagccttctctccatcacacatacttctggttttcggtaatggagattggtaaagactttkagacccatgttctttaaagaaacaaacaacaaaaatattgttcattcttttcatgcaagaactataaaaggcctattatttatattgcaaagataaatgg

SEQ ID NO: 22001 - DNA, 201 bp, Homo sapiens
acttgaccatgcacatggagaaaaccagtgtgattgctcaatatcccaataggacacaaataataataataattattattatttttaattttttgagacasagtctcactctcttggccaggttggagtgcagtggcacaatcccagctcaccacaacctccgcctcccaggtttaagcaattctcctgtctcagcctcca

SEQ ID NO: 22002 - DNA, 201 bp, Homo sapiens
atcccacattcagtcttcaaaaaggtcttaagaattctactctcccattccactccttcctcaatataaatccatgtacttcttttcccagctgctatcayctcagtctaggccatgattttctttttcctggacaactgcaacagcttcctaactagggaccctacttctatcttttgatatcttccaacttttttgtgt

SEQ ID NO: 22003 - DNA, 201 bp, Homo sapiens
aataccaccttaacagaatcttagttgtgtctcagaagagggaactgtgtctgcacacacacacttacacataggctaaaaaactgtgactaggccaggcrtggtggctcacacctgtaatcccagcactttaggaggctgaggcaggtggatcatgaggtcaggagttcgagaccatcctggctaacacggtgaaacccc

SEQ ID NO: 22004 - DNA, 201 bp, Homo sapiens
cattccactccttcctcaatataaatccatgtacttcttttcccagctgctatcacctcagtctaggccatgattttctttttcctggacaactgcaacarcttcctaactagggaccctacttctatcttttgatatcttccaacttttttgtgtgtgcagtagaaaaattttaattaaaaaaattttttttgtagggac

SEQ ID NO: 22005 - DNA, 201 bp, Homo sapiens
tgcactccagcctgggcgacagagcaagactccgtctcaaaaaaaaaaaaaaaaaggttttatggctgggcttggtggctcacacctgtaatcccagcacytttggaggctgaggtgggaagattgcttgagcccagaagtttaagaccaaacaaaacaacaaaaccaaaaaagccagacccagtggtgcccaagtgcctg

SEQ ID NO: 22006 - DNA, 201 bp, Homo sapiens
ttttcttcctttcttcctttctctttcttttctttctttctttctttcctctttcttctttccttcttttccctccctccctccctcccttccttcgttcmttccttccttccttccttctctctttctctctttctttgcatctgctgttcctgaatcatcttcagctcaaaacagtccttatttaggggtggcatattc

SEQ ID NO: 22007 - DNA, 201 bp, Homo sapiens
tgcctcagcttcctgagtagctgggactacaggcgcctgccaccacggccagctaattttttgtatttttggtagagatagggtttcaccctattagccargatggtcttgatctcctgacctcgtgatctgcctgcctcagcctcgcaaagtgctgggattacgggcgtgagccaccgcgcccggccttcattaactttt

SEQ ID NO: 22008 - DNA, 201 bp, Homo sapiens
tcctgcctcagcctcccgagtagctgggattacaggcgcccaccaccacacccagctaatttttgtatttttagtagagatggggtttcaccatgttggtygggctggtctcgaactcctgacctcagatgatccgcccacctcggcctcccaaagtactgggactacaggtgtaagccaccgagcctggcctttttttct

SEQ ID NO: 22009 - DNA, 201 bp, Homo sapiens
tttttttttttttttgagacggagtctcgctctgtcacccaggctggaatacagtgatgcgatctcggctcactgtaacctctggctcccgggttcaagckattcccctgcctcagcttcctgagtagctgggactacaggcgcctgccaccacggccagctaattttttgtatttttggtagagatagggtttcacccta

SEQ ID NO: 22010 - DNA, 201 bp, Homo sapiens
cctatacttcattaacttttttttttttttttttgagacggagtctcgctctgtcacccaggctggaatacagtgatgcgatctcggctcactgtaacctytggctcccgggttcaagcgattcccctgcctcagcttcctgagtagctgggactacaggcgcctgccaccacggccagctaattttttgtatttttggta

SEQ ID NO: 22011 - DNA, 201 bp, Homo sapiens
ttagctgggcgtgatggcccgcacctgtagccccagttactcaggaggctgaggcaggagaatcgcttgaacctgggaggtggaggttgcagcgagcagasatcacatcactgtactccagcctgggcaacagagcaagactctggccactccaccccaccctccaaccaaaaaaaatcaaaaatcaaaaaagagataaaa

SEQ ID NO: 22012 - DNA, 201 bp, Homo sapiens
gagcccaggagtttgggagatcaagcctgcagtgagctatgatcacaccactgcactccagcctgggcagcagagtgagaccttatttctaaaaaaaaaaagagcgagctttttcactatgaggttttacataatgatacaagaacttttttgtcaaaagaatatttcttcttctacaggtttttctcaaaaagggacaac

SEQ ID NO: 22013 - DNA, 201 bp, Homo sapiens
aactcacctacaaatagtctgaaagagtggtgtatatcaaatacgtgggtagtgttgcatttcaaatgaggctcttctggttgaaatgatatatttataaraccagaatatcacaaatgggtgatgtataatgtctctttagttttttggtatttggcctcttttaaagcctgtcggatgtatgggagaaaacaatgaacg

SEQ ID NO: 22014 - DNA, 201 bp, Homo sapiens
ggtgggcggatcaccggaggtcgggagttcgagaccaacctgaccaacatggagaaaccccgtctctattaaaaatacaaaattagccgggtgtggtggcrcatgcctgtaatcccagctactagggaggctgaggcaggagaatcacttgaacccgggaggtggaggttgcggtgagccaagatcgtgctgttgcactcc

SEQ ID NO: 22015 - DNA, 201 bp, Homo sapiens
gaacgtgctttgatttcctatcagtcactcttaagaacatacatattgtttaagtaactcggtcttttttatctgattcttgaggcactatgggtagcaartaaccacttacaaatttaaatgtaatatacactccttttctgtgtgtcaagtccttatttttaggtgcatattgacatttaaatgttaattattgtttgg

SEQ ID NO: 22016 - DNA, 201 bp, Homo sapiens
tctcgatctcctgaccttgtgatccccccgccttggcctcccaaagtgctgggattacaggctgagccaccgcacccggccggaactttgtttttttttttccaagtggctacttttatttatttgaaaaaaacaagccccagagctgccaaggggctgccttctctgtcttgtggagacagtgcttgatcctggagagca

SEQ ID NO: 22017 - DNA, 201 bp, Homo sapiens
ctttgggagaccgagggggaggatcgcttgagcccaggagtttgagaccggcctgggaacatttcaaaaccccgtctctgcaaaaaatgaccccttgtggrctgaagtgggaggatcgcttgcgctcaggaggtggaggctgtagtgagccatgatcgtttcactgtattccagcctgggcaacagagtgagaccctgtct

SEQ ID NO: 22018 - DNA, 201 bp, Homo sapiens
cagctttcaacagcagtggcaaaaccctaatgaaaatgtcagcacaattggaaatttcactaacttgaaagtaaataccaacagcaaacagccttttaacrgtcccattagatcttctgtggatggtgttcagactcttgctcaaactaatgaagagaaaataatggattcttgcaatccaacttcaaatcaagtactgga

SEQ ID NO: 22019 - DNA, 201 bp, Homo sapiens
tagtttcttttatatctttaagttctaaatcacaaaatcatatggcaagaaaaaccccagatttcttttccaatctatgaataaacataaagagacagttwatacttaattgatctatctgaactatgatttttaacttctctcattgtttttatttttttattttattttattttattttgagatggagtctcgcacttt

SEQ ID NO: 22020 - DNA, 201 bp, Homo sapiens
tcatctgaaataaggaccagctttcaacagcagtggcaaaaccctaatgaaaatgtcagcacaattggaaatttcactaacttgaaagtaaataccaacarcaaacagccttttaacggtcccattagatcttctgtggatggtgttcagactcttgctcaaactaatgaagagaaaataatggattcttgcaatccaact

SEQ ID NO: 22021 - DNA, 201 bp, Homo sapiens
attatgaaagtggaaattgataccttttcctcttgggatttaattaagtctataaaattgaggtgttgcaatacataatgtctatgatttttttttaccasctctaaatctctgagatggctgtgttttagagctgcatgttctgcttatttactgcctgtcctttacatttcaaattcattcaatatttttccaaagtac

SEQ ID NO: 22022 - DNA, 201 bp, Homo sapiens
aaagagttctgtaattgtaaaaatgtgacataggcattctctaatgtgcaatgaatagtcatttttaagcatttcatacattgttcctgtactgcactggrtctccttgtgctgaactgcatgggataggccatttccatacaatctcatcctctgaataaggaaccatgatgctcctaaagacatactaaatatagatct

SEQ ID NO: 22023 - DNA, 201 bp, Homo sapiens
cactaagtgaagcatgattgtatttctgacattgtattttatcaataaaaataaactacatctcacatctgaagctaatttcttgttatagccaaaagcaygtctagtctgtcttattctgctttatccaactataggatgtctaattgtagccaaaaacatggcataattcacacataaaattccaaaattgcatcattt

SEQ ID NO: 22024 - DNA, 201 bp, Homo sapiens
catctaggtttgcgtaagtacactctatgatgttcgcacaacaatatcacctaacaatgcatttttcagaacaaattctccatcactaagtgaagcatgaytgtatttctgacattgtattttatcaataaaaataaactacatctcacatctgaagctaatttcttgttatagccaaaagcatgtctagtctgtcttatt

SEQ ID NO: 22025 - DNA, 201 bp, Homo sapiens
cacaaatagttatcatcgtggtacaactgcctacagtattcagtatagtcacatgctgcggaggtttgtagcctaggaaaaatgggctgtaccacatagcmtaggtgtgttgcaggctacagcatctaggtttgcgtaagtacactctatgatgttcgcacaacaatatcacctaacaatgcatttttcagaacaaattct

SEQ ID NO: 22026 - DNA, 201 bp, Homo sapiens
aatttgctattccatatatagtaggctgtatcatctaggtttgtgtaagcacactctataaggtttgcacgaggacaaaatcacctcacgcatttctcccygctgttaagcaatgtgtgacctgtatctgtcccaccaacagaagttatttgcatttcttcctgacaaaaatcttcaagttaacaagtaatttcacgaatt

SEQ ID NO: 22027 - DNA, 201 bp, Homo sapiens
tcaccaagttatgctcccttttaaggtcacttggcagacaggcaggtaggaactttcctggtgaaccctccctgtatgaccatgcagctttccactgggarcttttacaggttgctgctatttttataaaaatgatagactgtaatgttgccggggacagtggctcatgcctgtaatcccagcagtttaggaggctgaggt

SEQ ID NO: 22028 - DNA, 201 bp, Homo sapiens
atattatcagggtgtaaggtctccataaaacacctcactttcctgtatcacagtcacttactatgactgttttcctgtatcaccatacattgcctgttccyctacacagtcaggtaccacataatgacactgtgatcaatgacagaccacttagactacagtggtcccataaagttagaatggagctgaaaaattcctacc

SEQ ID NO: 22029 - DNA, 201 bp, Homo sapiens
gtttatttgtttattgttctctcctactagaatttaaatttaaatctatgaggacaggaactttgtttttttgtttgtttgtttgtttgagatggtgtctygctctgtcgcccaggctggagtgcagtggtgcgatctcctctcactgcaagctccacctcccgggttcaagccattctcctgcctcagcctccccagtag

SEQ ID NO: 22030 - DNA, 201 bp, Homo sapiens
tgctagagaaaaaaataaaataaaatgtatgataagtacatgcaaatcaatgatacatattttacaaatatggtactgttttatatacccaggaataaacmtgaagaaagaaaaagaaaatagaaataaagacacataggagagaaaatggttaaaactcactcgacactgacgaggtcccacatccatgtctctgggaag

SEQ ID NO: 22031 - DNA, 201 bp, Homo sapiens
aggcacgcattcatcatgcttagctaattttgtatttttagtagagacggggtttcaccatgttggtcaggctggtctcgaactcccgacctcaggtgatycgcccacctcgcctcccaaagtgctgggattacaggtgtcggccactgtatctggccctcaaatgttctaagcagactctacctcgaggcctttgcacag

SEQ ID NO: 22032 - DNA, 201 bp, Homo sapiens
cggattacaggtgtgtgccactgcacccagccaacattttccctttttaaagaaaagaaacataattcagacatacatataaagcatacaattcagtgatatttttttagtatatttataaagttgtacaaccatcaacactatctaatttcagcagattttcatcatctccaaaagaaactccatatccattagcagttc

SEQ ID NO: 22033 - DNA, 201 bp, Homo sapiens
tctatgttgcctgggctagtctagaactcttgatctcaagtgatcttcctgccctggcctcccaatgtgctgggattataggcatgagacaccatacccartgataagaacttattatttatttatttatttttgagacagagtcttgctctgtcatgcatgctggaatgcagtggcggaatctcagttcactgcaacgtc

SEQ ID NO: 22034 - DNA, 201 bp, Homo sapiens
ttttgtggttttagtagagaaggggtctcactatgttgcccaggctggtctcctactcctgggttcaagcaatcaacctgccttggcctcccaaagtgctyggattacaggtgtgtgccactgcacccagccaacattttccctttttaaagaaaagaaacataattcagacatacatataaagcatacaattcagtgata

SEQ ID NO: 22035 - DNA, 201 bp, Homo sapiens
cctcccaatgtgctgggattataggcatgagacaccatacccaatgataagaacttattatttatttatttatttttgagacagagtcttgctctgtcatscatgctggaatgcagtggcggaatctcagttcactgcaacgtccgcctcctgggttcaagtgattctcctgcttcagctgcacgagtagctgggattaca

SEQ ID NO: 22036 - DNA, 201 bp, Homo sapiens
gcttaataggcccatttataaagtgccatggcaacaagaaaggaggtctgcatggacttctcactgaggcttctctgcccatgcaccaagagtcaaggctrtgctgggcccctgactgatcacaccattctccagggaaccaatgagcctcttggtggtagattgatacattggaccctttctacacagaaggagaagcaa

SEQ ID NO: 22037 - DNA, 201 bp, Homo sapiens
gctggaatgcagtggcggaatctcagttcactgcaacgtccgcctcctgggttcaagtgattctcctgcttcagctgcacgagtagctgggattacaggtrtgtgccaccacatctggctaatttttttgtattttttttttttttagtagaaatggggttttgccatgttggctaggctggtcatgaactcctggcctca

SEQ ID NO: 22038 - DNA, 201 bp, Homo sapiens
gtgaaaccctgtctctactaaaactacaaaaaaattagccgggcatggtggcgggcgcctgtagtcccagctactcgggaggctgaggcaggagaatggcrtgaacctgggaggcggaggtggcagtgagccgagatcgtgccactgcactccagcgtgggcgacacagcaagactccatctcaaaaaaaaaaaaaaaaaa

SEQ ID NO: 22039 - DNA, 201 bp, Homo sapiens
cctcctagtgctgggattacaggtgtgagccaccacacccagccttttcaaaattttctttatactttttgtataagctcttttttattaaatttttttttaactttttttcaaattgaaaactaaaagatgggcacagtggctcaccaaggtcaggagatgactggacacagtgcctcatgcctgtaatcccagcacttt

SEQ ID NO: 22040 - DNA, 201 bp, Homo sapiens
aggcatgggccactgcatcaggccattaattgtaattttttttattcatttcaagacagggttaagaaactgctaattttgtatttctggtagagacaggrttttgccatgtttcccaaaacagtctcaaactcatgggctgaagcaatcctcccgcctgggcctcccataataaagtgctgggattacaggtgttagcca

SEQ ID NO: 22041 - DNA, 201 bp, Homo sapiens
ttgagcccaggaggcagaagttgcagtgagccaagatggtgccactgcactccagtctgggtgacagagccaaaccctatctcattaaaaaaaaaaaaaaagagagagagaagaaaagggaaaagaagatatgcagttgttcctgcaccatttgttgaaaagactggaatgttgattttaataatgcatgtaaattctcca

SEQ ID NO: 22042 - DNA, 201 bp, Homo sapiens
aaaatctacaaacccatgaaatgtttaaaaaaacaacaaaaaaaaaacactacttaatccctagagcaaaaccaaggacataaaatggtctctgaaaccargttactttatatatttaacaaagtactgggtgggcgtggcataacttgattttaaactggagatttgttttttcaagcaatctggtggttctttagaata

SEQ ID NO: 22043 - DNA, 201 bp, Homo sapiens
tttttgtgtgtggtgtgaggtagggattgaggttttttttttttccaatatagatatgcagaatttaggctgggtgtggtagatgacatctgtaatcccascactttgggaggccaagatggttaattgcttgacgtcaggagttcgagactagcctgggcaatatggtgaaaccctgtctctaccaaaaatacaaaaaaa

SEQ ID NO: 22044 - DNA, 201 bp, Homo sapiens
aaaaaaaagaataattggaataattatttagactgtaataagaaaaatgagctggaaggactgggcataactactgatttacaagttagatccagtttatrttacggtgtggacctattataggggtaatatgaaagggtgccatggtttctagggtaggaggatatataccatggctcttatacaggcaaaatgggctac

SEQ ID NO: 22045 - DNA, 201 bp, Homo sapiens
catttatatcacatatcttttagatttttataaattttgttttccataattgttttttttttttttttgagatagagtcctgcccactcttgcccaggctkgagtgcagtgaggagatcttggctcactgtaacctctgccttccaggttcaagctattctcctgcctcagcctcccaagtagctgggattacaggcaccc

SEQ ID NO: 22046 - DNA, 201 bp, Homo sapiens
gatagtgaaatgtcttctatgaactagaaaataagaaaatagacacttaaagttcagagtagagaaggaaactcaaagagacataatggttccagggcagsctaactgtacagtacccttaagaaaagtattcgtatctatatctctactgcagtaggccaagtgctgtggcacatgcctaaaattgtagcactttgggag

SEQ ID NO: 22047 - DNA, 201 bp, Homo sapiens
attatggtttaaaccagcaaaatatgtcttcttagatatacgaaacattttgtcaaatagcccctggcatcatctgggctaaatgaagaatcaccaggacrtgtgatacagtgaaactattccacttatagtaacagcacttagtaattgctttcattaatccaggcaggttaatattctatctacttgcataacaatgtc

SEQ ID NO: 22048 - DNA, 201 bp, Homo sapiens
atgattaaaagtaagcaagtaatgagtaaactagatttgtaaaatctggaaggaatcttagagataagaagatgacagtatcataggaaagaaaaaggaakgatataaagaaaaatctgcaataaatgaaggactctaggttcatgcttcacgctctctgtgtggaactcacggttttccagagactgaggcgtctgtggg

SEQ ID NO: 22049 - DNA, 201 bp, Homo sapiens
ctcttgaccttgtgatccgcccgcctcggcctcccaaagtgctgggattacaggtgtgagccaccgagcctggcctagtccaatattttataatctgcatygtcaactagtcaggccccagaatctgtgggttcagcatccttggattctgcatccttggattgaaaatatttggaaaaaaaattgcatcggtactaaacg

SEQ ID NO: 22050 - DNA, 201 bp, Homo sapiens
cgtgatcacagtggtgtagaattgccaatcttcaacctgcctgtattttccaaagcgatcataccaatttatttaccttccagcagtgtatgagaattctstattctcaccatcattggatattgtcagattttaacatttggctcaactgatgggtgtataatggtatcctatggtacttataatttgcattatccctag

SEQ ID NO: 22051 - DNA, 201 bp, Homo sapiens
gaatttctatgagcgtgatcacagtggtgtagaattgccaatcttcaacctgcctgtattttccaaagcgatcataccaatttatttaccttccagcagtktatgagaattctctattctcaccatcattggatattgtcagattttaacatttggctcaactgatgggtgtataatggtatcctatggtacttataattt

SEQ ID NO: 22052 - DNA, 201 bp, Homo sapiens
tgcataaaatgaatagaagagaaactcttggtgaagggaaaacaatgctagagaaaaaaataaaataaaatgtatgataagtacatgcaaatcaatgatayatattttacaaatatggtactgttttatatacccaggaataaacctgaagaaagaaaaagaaaatagaaataaagacacataggagagaaaatggttaaa

SEQ ID NO: 22053 - DNA, 201 bp, Homo sapiens
atggtaggtgaaggacccagcgagaagtcaaataattaaggtggcattaatgatagcatggccttcatttgggatatggcatatgccaaacatatagtccrtgataggtcatgccagttagcatttatattgtattttaattacattatgctcttgtaaaaatgaatggtggttttgatctacacagcattaacaaccaga

SEQ ID NO: 22054 - DNA, 201 bp, Homo sapiens
gcagcaattttcttgaaggtggcctgggttcatgatggtaggtgaaggacccagcgagaagtcaaataattaaggtggcattaatgatagcatggccttcrtttgggatatggcatatgccaaacatatagtccatgataggtcatgccagttagcatttatattgtattttaattacattatgctcttgtaaaaatgaat

SEQ ID NO: 22055 - DNA, 201 bp, Homo sapiens
aatgaatatagtacattaaagaacatttgaatggccattttttaaaagtagtgattaaaagtgtcacgcacatcgtatctagcattccttgtttactagarttttaaactttttccattccatgtattttcaatatttcaataggagacaagtttatttttccatcttgcagatagcataggcactaagacaatattctca

SEQ ID NO: 22056 - DNA, 201 bp, Homo sapiens
tggctggctaatttttttgtatttttggtagagatggggtttcatcatgttggccaggctggtcttgaactcctgaactcaagtgatcctcctgcctcagyctcccaaagtgctgggattacaggtgtaagccactgtgcccggccagttgtgagaattttgtatgtattctgactaccagtcctctgtcagatatatgta

SEQ ID NO: 22057 - DNA, 201 bp, Homo sapiens
cgacaggcacgtgccaccttggctggctaatttttttgtatttttggtagagatggggtttcatcatgttggccaggctggtcttgaactcctgaactcargtgatcctcctgcctcagtctcccaaagtgctgggattacaggtgtaagccactgtgcccggccagttgtgagaattttgtatgtattctgactaccagt

SEQ ID NO: 22058 - DNA, 201 bp, Homo sapiens
acgacaggcacgtgccaccttggctggctaatttttttgtatttttggtagagatggggtttcatcatgttggccaggctggtcttgaactcctgaactcmagtgatcctcctgcctcagtctcccaaagtgctgggattacaggtgtaagccactgtgcccggccagttgtgagaattttgtatgtattctgactaccag

SEQ ID NO: 22059 - DNA, 201 bp, Homo sapiens
ggttgtctttttattactaagttgtaagagtttttttttttttttttttttttttttttttttttttttttttgagatggagtcttgctctgtcacccagrctggagtgcagtggtgcaatcttggctctctgcatcctttgcctcctgggctcaagccatcctcccacctcagcctccagagtagctgggacgacaggca

SEQ ID NO: 22060 - DNA, 201 bp, Homo sapiens
cagtcaggttgtctttttattactaagttgtaagagtttttttttttttttttttttttttttttttttttttttttttgagatggagtcttgctctgtcrcccaggctggagtgcagtggtgcaatcttggctctctgcatcctttgcctcctgggctcaagccatcctcccacctcagcctccagagtagctgggacga

SEQ ID NO: 22061 - DNA, 201 bp, Homo sapiens
gtctgagaccctttcagggttgtgaactgaactagttacttttctcatggaacaccatttttactttttaaaagaatgattgatatggtttgactgtgtcrccacccaaatctcatcttgaattgtagctcccacaattcccatgtgtcgtgagagggacccggtgggaggtaattgaatcatgggggcaagtctttcctg

SEQ ID NO: 22062 - DNA, 201 bp, Homo sapiens
tttggtttgggcagccagtcaggttgtctttttattactaagttgtaagagtttttttttttttttttttttttttttttttttttttttttttgagatgragtcttgctctgtcacccaggctggagtgcagtggtgcaatcttggctctctgcatcctttgcctcctgggctcaagccatcctcccacctcagcctcca

SEQ ID NO: 22063 - DNA, 201 bp, Homo sapiens
gtttggtttgggcagccagtcaggttgtctttttattactaagttgtaagagtttttttttttttttttttttttttttttttttttttttttttgagatrgagtcttgctctgtcacccaggctggagtgcagtggtgcaatcttggctctctgcatcctttgcctcctgggctcaagccatcctcccacctcagcctcc

SEQ ID NO: 22064 - DNA, 201 bp, Homo sapiens
ttgcagtgggccgagatcacgccactgcactgcagcctgggcaacagaacgagactctgtctcaaaaaaatacacacacacacacacacacacacacacamtatgtgcatacacacatacgtgcacgcacatgtacatatatacatacgtgcacgcacatgtgcatatatacatacatgcacgcatgtgtatatatacata

SEQ ID NO: 22065 - DNA, 201 bp, Homo sapiens
cccctccaaaggacagctgtgcagggccatttcaaaatatggcaaagaaacatgttttggggtaaaatattttgactttcttctttgtcacataatgttaygccagagtcagattggaaagtaagtcacgatatatagggttaaatcaaacccatctgatgagaatttatagtttgtaggccatgactctccagaccctta

SEQ ID NO: 22066 - DNA, 201 bp, Homo sapiens
tggtggggacctccacaaaacttacccagcacccctagcaagacattccagtcataagctgaggaatattcttcttagacataggggagaataggctgatrtcttaggattcataatccattttcatatagttccgtgaccttacttttgtcctgacaaaattattctgcctgaacatctgagagggatctaaatcctagg

SEQ ID NO: 22067 - DNA, 201 bp, Homo sapiens
agcaagacactatatatatatgcagatttcacacagaaaaaaatcaaaacttacttgttgtataattatggtcttattttcaaagagtacaaataaaagtktaaggatcttaatttaaaaatagttttaaaacactttcaaaaatataaagtagatttagagattcaagaaaaaaaactggtgccagcaagccaagaacaa

SEQ ID NO: 22068 - DNA, 201 bp, Homo sapiens
agattgtggagacttcgctggcctggtggctcacgcctgtaccccagcacttaggccaggcgcagcggctcactcccgtaatcccagcacttaggccagtygcattggctcacatctataatcccagcactttgggaggccgaggcaggcggatagcctgaggtcgggagttcgagaccagcctggccagcatggtgaaac

SEQ ID NO: 22069 - DNA, 201 bp, Homo sapiens
attacaacagccttcgcttcacatctgactcttgcagcattcttataaagagatctcacaccatatttgagggcttcattagttttctaagccttaaaaawatttcatcattaagattattctctcatgaagcacccaaaatatagacagcttttcttattttcttttcttcaattgttgacagtctaatgctgccagatc

SEQ ID NO: 22070 - DNA, 201 bp, Homo sapiens
tgaataaaatgttacttgcatctcctcattgtcacagtgttcgtattacatacttcgtgtgtgtagttttggcatttaaggaaacagagctaaaaaaaaaacaaaggacaataactgcatcaacaacatgttatacaccagaggaaatgcggcgacttaggttctgtgatgggaaacccggatttttttgttgtacttgaa

SEQ ID NO: 22071 - DNA, 201 bp, Homo sapiens
tttcactgattttaatgcacaactgtcctgagctgtggcttacagaggagctgtggaattaggcatcctgtggtatattacagtctcaggtgtgccgaacsacacgtatgatatgctgaagacactagaaacggccaagacatacaggattgtcagagggattgacttgggatcagttagtcaatcgatggtaggaagggg

SEQ ID NO: 22072 - DNA, 201 bp, Homo sapiens
aagactttgacctttatgcacttttaccttccttaataactcttcaaaagaggccttgaaaaaaatgcaatgactagcaagttatgggagtactggaatgmaatgactgttcaaaggttggtttcacccatagccatgagtgtcatagtcccaggaagatgggttgaattcagggccactctaggaattttgcttgcggtt

SEQ ID NO: 22073 - DNA, 201 bp, Homo sapiens
aaaatgttggggtttagtttcttcaggtgaataaaatgttacttgcatctcctcattgtcacagtgttcgtattacatacttcgtgtgtgtagttttggcatttaaggaaacagagctaaaaaaaaaacaaaggacaataactgcatcaacaacatgttatacaccagaggaaatgcggcgacttaggttctgtgatggga

SEQ ID NO: 22074 - DNA, 201 bp, Homo sapiens
tttcacgaatttgagtttggatacaatgtttgtgatttcactgatcctgtttgcagtgacttccaggtctgaaaaatataaagagtcagtacttttagaarttactttagtcataaaatttctttcttacaaatgacctttattttgttatggaaagtaaactattgttttatttcccatattcgttcattactcacacct

SEQ ID NO: 22075 - DNA, 201 bp, Homo sapiens
agtgagccgagattgtgccactgcactccaggctgggtgacagagagagactccgtctcaaaacaaaacaaaacaattctggctagagtcttcattttgcrtaagtttttcactgattttaatgcacaactgtcctgagctgtggcttacagaggagctgtggaattaggcatcctgtggtatattacagtctcaggtgtg

SEQ ID NO: 22076 - DNA, 201 bp, Homo sapiens
atatattatttgctgttaaaataatacaatgaatatagtacattaaagaacatttgaatggccattttttaaaagtagtgattaaaagtgtcacgcacatygtatctagcattccttgtttactagaattttaaactttttccattccatgtattttcaatatttcaataggagacaagtttatttttccatcttgcagat

SEQ ID NO: 22077 - DNA, 201 bp, Homo sapiens
aaagtttattaaccgagatactggtagtattgattgaaaactgtgcaagaccctgctcattggtggttgcattggagtaataattggcgtcattcacagaratgaagaagagtttattggggatgggcacaccttttccatccaccagaagcacctaaagaagaaaagtacttgatagttgatgtgaacaacacccagaga

SEQ ID NO: 22078 - DNA, 201 bp, Homo sapiens
gttacttttttattgtattatttaccaggagtaaatagctaccttgtataacttatttatctgtatgggagggaattggaccataggtgcttacatggtcmtctccagcaatatgacttttaagaaatatcaccaccatagcacaaaaatcagtgggtaaagttttgcagactgagtagtttgcaaaaaaaagtttgagct

SEQ ID NO: 22079 - DNA, 201 bp, Homo sapiens
tttgggaggctgagtcaggtggatcacctgaggtcaggagtttgagaccagcctgaccaacatggtgaaaccccatctctactaaaaatgcaaaaattagmcgggtatggtggtgcacacctgtaatcctagctactcgggaggttgaggcacaagaatcacttgaacctgggaggtagaggttgcagtgagccaagatcg

SEQ ID NO: 22080 - DNA, 201 bp, Homo sapiens
gattttcatgattccttacattaaatgataaatttacttaattaaaacttaagaaattttaggaaaagtaacattttacaaagttgtctgagtcaatttcytgatattgattgtttataaaggttacttatgacaatataggctaataatgtcagcgaactagggctcctaacttcccaaaatcaagcaagcatagtaaaa

SEQ ID NO: 22081 - DNA, 201 bp, Homo sapiens
tggtcttctgctacccatgaatagtgaaaacacaagttgggatgcacagtgaaaacctgagtaaacagaaaagcaaagaaagaatactgtcttgaaattcktcaccttagcttctcaccaaaatgaatagttacaacggtgtcttccactctaaaatacactatgcctctccctcatactggtcgacagccaaataaatga

SEQ ID NO: 22082 - DNA, 201 bp, Homo sapiens
tctgggagataggtgaaaaaaaactggcagaagaatccagtaccccttagaaatcacaggacaaggaaagctggtatattttctgacttctctttccaaartctttggaattgttttacacttacagccataaaacttaatttagtcactctttttctccttttatcttaaaatgagatagagaaatttggcttctgaaac

SEQ ID NO: 22083 - DNA, 201 bp, Homo sapiens
gatgaactttatgctgttttaattcatttaaaatggcatgtcttgtgtcaaaagtaaatgttgtcaactaattaagtctcttcaatgagaagatcttttartacaaaacctcttagatgtctgtttcttttcaggaaaagcttgactgtttgcatatccatacctctactaagaagcttttgaccacagtgtctttccagt

SEQ ID NO: 22084 - DNA, 201 bp, Homo sapiens
gggaggcggaggttgcagtgaaccgagatcgtgccactgcactgcagcctaggcgacagagcgagactctgtctcaaaaaaaaaaaaaaaaagatcttgaratgagaatgaactgggtttttgtgaaaatggcaaatggcattttgggtactgcaagcctttgcggctcggaactgtgctgtgcactgtgggactgtgtgg

SEQ ID NO: 22085 - DNA, 201 bp, Homo sapiens
ttcgtttaacttactttcaaagtgatatttgggtatgtaaacgtatatgtgtccaagaaaaactgagcgatgccatttacatctgtggtgtagtttcccaygattttgtccttcagatgcaactggacaacttcatttgggattggagagttgtctggattaagcaatttaatctgtacaagaggaagaaaatacatttcg

SEQ ID NO: 22086 - DNA, 201 bp, Homo sapiens
gctaagaatacacatgatggaaaaaaaaatagataggagcagaccagcctcagaaagtgaactaaaaaccacctcctgaatattctttttgatggataaamttataccataaagataaagcatgaaacacaagaatcctccatgagttatttaaagtgaaatcacagggcacatggactcatgtggaaggagaggacatga

SEQ ID NO: 22087 - DNA, 201 bp, Homo sapiens
gaggagctaagaatacacatgatggaaaaaaaaatagataggagcagaccagcctcagaaagtgaactaaaaaccacctcctgaatattctttttgatggmtaaacttataccataaagataaagcatgaaacacaagaatcctccatgagttatttaaagtgaaatcacagggcacatggactcatgtggaaggagagga

SEQ ID NO: 22088 - DNA, 201 bp, Homo sapiens
gggttcaccatgttagccagactagtctcaaactcctgacctcatatgatccacccacctcggcctcccaaagtgctgggattacaggcgtgagccaccgygcccggcctgagcgcctatattcaactgcacatttaacatttccacttgaatatcccattgaatggcaccaacattcatccaatttctcctttcaggagc

SEQ ID NO: 22089 - DNA, 201 bp, Homo sapiens
ggattacaggcacaagccaccgtgcccagcctctgagctcctattttccttttattattattattattattattattattattattattattattattattttgagacggagtctcactctgtcacccaggctatagtgcagtggcacgatctcggctcctgggttcaagcctcctgggttcaagtcattctctagcctca

SEQ ID NO: 22090 - DNA, 201 bp, Homo sapiens
gggattacaggcacaagccaccgtgcccagcctctgagctcctattttccttttattattattattattattattattattattattattattattattattttgagacggagtctcactctgtcacccaggctatagtgcagtggcacgatctcggctcctgggttcaagcctcctgggttcaagtcattctctagcctc

SEQ ID NO: 22091 - DNA, 201 bp, Homo sapiens
tgggattacaggcacaagccaccgtgcccagcctctgagctcctattttccttttattattattattattattattattattattattattattattattattttgagacggagtctcactctgtcacccaggctatagtgcagtggcacgatctcggctcctgggttcaagcctcctgggttcaagtcattctctagcct

SEQ ID NO: 22092 - DNA, 201 bp, Homo sapiens
caggcatgagccaccaagcaccagctaatttttgtatttttttgtagagaaggggttttgccatgttgcccagactggtctcaaactcccgagctcaagcratctactggcctcggcctcccagacagctgggattacaggcacaagccaccgtgcccagcctctgagctcctattttccttttattattattattattat

SEQ ID NO: 22093 - DNA, 201 bp, Homo sapiens
gggtctcactctgtcacccaagctggagtgcaatggtgcgatcatggctcattgcagccttgacttccagtgctcaagccatcctcccacctcagcctccsaagtgtctgggactacaggcatgagccaccaagcaccagctaatttttgtatttttttgtagagaaggggttttgccatgttgcccagactggtctcaaa

SEQ ID NO: 22094 - DNA, 201 bp, Homo sapiens
ccggccaatttttgtattttttaattagcaacggggtttcaccacgttggccaggttattaaccacatccatggctctgattaccacctgtggataaataygtccccagttctcctctgagctcctattttcctttttttttagagggtctcactctgtcacccaagctggagtgcaatggtgcgatcatggctcattgca

SEQ ID NO: 22095 - DNA, 201 bp, Homo sapiens
tctctcttcccttttatgtctacgtttctcacagtcatctacactccctgtcacttgtacttattcccttgacactgcaatctagcttcatccactccccyaaaatgactcttcccaacgctatcaatgacccctttgtctttccatccagtggctgtttttcaatcctcgtattccttaactctcagcagcattctgtga

SEQ ID NO: 22096 - DNA, 201 bp, Homo sapiens
aatgactagtaaatagtaataacaaaactgttatttatggagggatgagtctgtggcctatctctcttcccttttatgtctacgtttctcacagtcatctmcactccctgtcacttgtacttattcccttgacactgcaatctagcttcatccactcccccaaaatgactcttcccaacgctatcaatgacccctttgtct

SEQ ID NO: 22097 - DNA, 201 bp, Homo sapiens
ggccgaggcgggtggatcacaaggtcaagagatcgagaccatcctggctaacatggtgaaaacccgtctctactaaaaatataaaaaattaaccgggcgcrgtggcgggcgcctgtagtcccagctactccggaggctgaggcaggagaatagtgtgaacctgggaggcagagcttgcagtgagccgagatcgtgccactg

SEQ ID NO: 22098 - DNA, 201 bp, Homo sapiens
gcagatcgtgccactgcactccagcctgggcgacagagcgagactccatctgaaaaaaaaagaaaaagaaaactgagcttatagtacagagcattcccatrtaagagctttataggaacctcccatctccaaaactctaaggttccactattagcaacttggattagtcatactgatatgttattattaaagtccatcact

SEQ ID NO: 22099 - DNA, 201 bp, Homo sapiens
aggtgaaaaaaaactggcagaagaatccagtaccccttagaaatcacaggacaaggaaagctggtatattttctgacttctctttccaaaatctttggaaytgttttacacttacagccataaaacttaatttagtcactctttttctccttttatcttaaaatgagatagagaaatttggcttctgaaaccaaactgtta

SEQ ID NO: 22100 - DNA, 201 bp, Homo sapiens
tctcctgagctcaggaggtcaaggctgcagtgagctgtgccaccacattcctgcctgggtgacagagtgagaccctgtctaaaaaataaaataaattattycctcagaatctcagggcaagatatgacaagaacaaagttgcaaaagcagctctgtttcagtttttctcttaactttttgtctaccagttactgtgaagat

SEQ ID NO: 22101 - DNA, 201 bp, Homo sapiens
catcagtgagagctgctagactgttatatttcgggggtcttgcggggtagcttttcttacacatataagcagaagaaaacattttcccaagtcttaaaagwgggttatgatgcatttcattgtgtactctttttcttcccatatactctgcaggcatttgggcagtccttctccatccaccggaaggttgctgaagatgga

SEQ ID NO: 22102 - DNA, 201 bp, Homo sapiens
tcattaagctggaaaatgtggatcttaagaaaaaaatttctgcgttaaaagtaaatatttctttatgatcatacagaaaataggtcagttctattccactrtaattaaagaattaaatggtttcatttgaatagttttaagggggtgtgggtaggtgggaaacatcacactctttgcttcttaaaatcatgggtagacgaa

SEQ ID NO: 22103 - DNA, 201 bp, Homo sapiens
cccactaaaaatgtacaagatacagtgtaacattgttattatttttgagatggagtctcgctttgttgcccaagctggagtgcaatggtgcgatcttggcrcactgcaacctccacatctcggattcaagcgattctcctgcctcagcctcccaagtagctgagattacaggcgcccaccaccacaccaggctaatttttg

SEQ ID NO: 22104 - DNA, 201 bp, Homo sapiens
gagatggagtctcgctttgttgcccaagctggagtgcaatggtgcgatcttggcgcactgcaacctccacatctcggattcaagcgattctcctgcctcarcctcccaagtagctgagattacaggcgcccaccaccacaccaggctaatttttgtatttttcgtagagatggggattctccatgttggccagggtgatct

SEQ ID NO: 22105 - DNA, 201 bp, Homo sapiens
tagtcagtgaatgtaaattaaggaagtttactttttttcccattaatttacaaaaattttaaatatgataatatacagtgacaaaatttttttttttttttgagatggagtctcgctctgtcgcccaggctggagtgcactgggcaatctcggctcactgcaagctccgcctctcgggttcatgcccttctcctgcctcag

SEQ ID NO: 22106 - DNA, 201 bp, Homo sapiens
aaggaaagcataacaaattagagtcagctatccattctcctatgaacgatcagcaaatctcacaggagtcaaggaatagtactgttgtgagtagtgatacrttacagattgacaatatttgttctctggttgaaggtgatacctcttacaattcccaaatagcaaagatattcagctctcttcccttgaaaatggttgagc

SEQ ID NO: 22107 - DNA, 201 bp, Homo sapiens
agatagtgagaaaagagtagaggcaatgtgtaaagagataatggctgtgaatttcccagaactggtgagaagcatatacccacagatcttgaaagcaaagaaaaaaaaaaataaggaaacagggaaacaaatttaaaatataatttttaaaaaattgcagagaaaaaggaaacgagtctaaaaatgtaaaatggcatatta

SEQ ID NO: 22108 - DNA, 201 bp, Homo sapiens
gcagctcctgaagtaagagcaaagactaatcatggagtacttgacccctgtcctcagtatgacatcaatgtggagccaccacaccacctaagccacccaayctaaacatgtttgtctgtaacaagcttcactgtgaccaaaaaatgtcaaagaaagggctaattgtagattaaacacaggtaaagagagaattcataaagc

SEQ ID NO: 22109 - DNA, 201 bp, Homo sapiens
catcaagaactcatcttcagaggaagagaaacaaaaagagcagtgttgtcctttggataccaacagttgtaaacaaggagagagaacttctgatagagatrtcactgttgttcaatttaagagccttgtaaataatccaaagactcctccagatgggaaaagtcattttcctgaactacaagacgacagtagaaaagatac

SEQ ID NO: 22110 - DNA, 201 bp, Homo sapiens
aggcaatgtgtaaagagataatggctgtgaatttcccagaactggtgagaagcatatacccacagatcttgaaagcaaagaaaaaaaaaaataaggaaacagggaaacaaatttaaaatataatttttaaaaaattgcagagaaaaaggaaacgagtctaaaaatgtaaaatggcatattactaaaaaagattccaagtag

SEQ ID NO: 22111 - DNA, 201 bp, Homo sapiens
ctaaacatgtttgtctgtaacaagcttcactgtgaccaaaaaatgtcaaagaaagggctaattgtagattaaacacaggtaaagagagaattcataaagcwggagacagatgtggagaaattacccagaatgcagcacagagacacacagaaaattggaatgaggctgggtgtggtggctcacgcctgtaagcactttggg

SEQ ID NO: 22112 - DNA, 201 bp, Homo sapiens
caaaatatcatttgattcagtaattgtgaggtgaataaggtaaagattctgctcctagttttgcatatgagaaaacaaggtcaaaaggtgatacgactttycagtcacaggattaggaaacaggaggagaacctggtcacatgatccccagccccaaacccttttgttacttttttattgtattatttaccaggagtaaat

SEQ ID NO: 22113 - DNA, 201 bp, Homo sapiens
ggcaatgtgtaaagagataatggctgtgaatttcccagaactggtgagaagcatatacccacagatcttgaaagcaaagaaaaaaaaaaataaggaaacagggaaacaaatttaaaatataatttttaaaaaattgcagagaaaaaggaaacgagtctaaaaatgtaaaatggcatattactaaaaaagattccaagtagt

SEQ ID NO: 22114 - DNA, 201 bp, Homo sapiens
ggtgcagtggctcacacctataatcccagcactttgggaggctgaggcagaggactgcttgagcccaggacttcacgaccagcctggacaagacagtgagwcccccatctctacaaaaagaaaaaaaaaaagtaagaaaaaaattagcccagcatggtggcgtgtgcctgtagtcccagctatcaggaggctgaggcagta

SEQ ID NO: 22115 - DNA, 201 bp, Homo sapiens
tttactgtgttcagttcttttgcaaaatatcatttgattcagtaattgtgaggtgaataaggtaaagattctgctcctagttttgcatatgagaaaacaasgtcaaaaggtgatacgactttccagtcacaggattaggaaacaggaggagaacctggtcacatgatccccagccccaaacccttttgttacttttttatt

SEQ ID NO: 22116 - DNA, 201 bp, Homo sapiens
ccacaaccctgctcccccaacgtccaccgtgatccacatccgcagcaagacctccgtgccccaccatgtcgtctggtccctgttcaacaccctcttcatgracccctgctgcctgggcttcatagcatttgcctactccgtgaagtctagggacaggaagatggttggcaacgtgactggggcccaggcctatgcctccac

SEQ ID NO: 22117 - DNA, 201 bp, Homo sapiens
gcagaggactgcttgagcccaggacttcacgaccagcctggacaagacagtgagacccccatctctacaaaaagaaaaaaaaaaagtaagaaaaaaattakcccagcatggtggcgtgtgcctgtagtcccagctatcaggaggctgaggcagtaggattgcttgagcccaggagttcagtcgcatcactgcactccagcc

SEQ ID NO: 22118 - DNA, 201 bp, Homo sapiens
ctggtttagtgcctgaactatttatgtatgaaaaaatgtaaaaactacactgactgtaacacataaaacaacacacacaaaaggtaaagcttgaagactcwgatgaaggagtataatcagatcaccatcaaccaggtaaaataatacccctcatggccataaaaccggagactgaggggcaggggcagtgatgtatctatg

SEQ ID NO: 22119 - DNA, 201 bp, Homo sapiens
aaaccagttagagtgctgtcagtccaagagaagcaaaggcccagacaaaatgtgacagcgtgtgattctatggccaagaataatcaccattaagtatatgmttccatttctctagaagttctcataatctaatgaaataatataaaaattgcctagtcctgcagtaggggaaaaaagcacctccaaatgcaaatctatacc

SEQ ID NO: 22120 - DNA, 201 bp, Homo sapiens
ggtgcctgtagtcccagctacttgggaggctgaggcaggagaatggtgtgaacccgggagacggagcttgcagtgagccgagattgcaccactgcactccrgcctgggcgacagagcgagactccgtctcaaaaaaaaaaaaaagtcatattgttagatatgaattctaaacttgttttcaaagaatatgtcagtatgttc

SEQ ID NO: 22121 - DNA, 201 bp, Homo sapiens
ggactgcttgagcccaggacttcacgaccagcctggacaagacagtgagacccccatctctacaaaaagaaaaaaaaaaagtaagaaaaaaattagcccakcatggtggcgtgtgcctgtagtcccagctatcaggaggctgaggcagtaggattgcttgagcccaggagttcagtcgcatcactgcactccagcctaggc

SEQ ID NO: 22122 - DNA, 201 bp, Homo sapiens
attccattacttatttttattttacaagttgtttattagaggagatgaatttggagttttgacccagtttaggataatagtacattcagaaaatggcatayaaatctgtgtgttagattgtggcccccgttcttcactggtttagtgcctgaactatttatgtatgaaaaaatgtaaaaactacactgactgtaacacata

SEQ ID NO: 22123 - DNA, 201 bp, Homo sapiens
gcctcggcctcccaaagtgctgggattacaggcatgggccaccatgcctggcctgcttattttttaaaaaaataaaattaatgttaaaataattaattaasgctgggcacagtggctcacacctgtaatcctagcactttaggaggccgaagcaggtggatcacttatgcccaggagttcgagaaccagactgggcaacat

SEQ ID NO: 22124 - DNA, 201 bp, Homo sapiens
caccacgcccggctgatttttatatttttagtagagatggggtttcaccatgttggccaggctggtctcgaactcctgacttcagatgatctgcctgcctyggcctcccaaagtgctgggattacaggcatgggccaccatgcctggcctgcttattttttaaaaaaataaaattaatgttaaaataattaattaaggctg

SEQ ID NO: 22125 - DNA, 201 bp, Homo sapiens
tgccttggcctcccacagtgctgagattacaggtgtgagccaccgtgcctggcctctttctgaattttgaagcatttggatgtattgctttttttttttttgagacggagtctcgctctgtcaccaagctggagtacagtggcgagatctcggctcactgcaacttccacttcccgggttcaaacgattctcctgcctcag

SEQ ID NO: 22126 - DNA, 201 bp, Homo sapiens
ggctaatttttgtatttttagtatagatggagtttcaccatgttggccaggctggtctcgaactcctgacttcaggtgatccgcctgccttggcctcccamagtgctgagattacaggtgtgagccaccgtgcctggcctctttctgaattttgaagcatttggatgtattgctttttttttttttgagacggagtctcgc

SEQ ID NO: 22127 - DNA, 201 bp, Homo sapiens
cttcccgagtagctgggattacaggtgtgcatcgccacacccggctaatttttgtatttttagtatagatggagtttcaccatgttggccaggctggtctygaactcctgacttcaggtgatccgcctgccttggcctcccacagtgctgagattacaggtgtgagccaccgtgcctggcctctttctgaattttgaagca

SEQ ID NO: 22128 - DNA, 201 bp, Homo sapiens
tctcggctcaccgcaacctccgcctcctaggttcaagtgattctcctgcctcagcttcccgagtagctgggattacaggtgtgcatcgccacacccggctmatttttgtatttttagtatagatggagtttcaccatgttggccaggctggtctcgaactcctgacttcaggtgatccgcctgccttggcctcccacagtg

SEQ ID NO: 22129 - DNA, 201 bp, Homo sapiens
aactttcactgaacttttagttctttctgaatttttttttttttgagacagagtctcccccttgcccaggatggagtgcagtggcacgatctcggctcacygcaacctccgcctcctaggttcaagtgattctcctgcctcagcttcccgagtagctgggattacaggtgtgcatcgccacacccggctaatttttgtatt

SEQ ID NO: 22130 - DNA, 201 bp, Homo sapiens
gttcaggaatacggtgaaaagtaaactttcactgaacttttagttctttctgaatttttttttttttgagacagagtctcccccttgcccaggatggagtrcagtggcacgatctcggctcaccgcaacctccgcctcctaggttcaagtgattctcctgcctcagcttcccgagtagctgggattacaggtgtgcatcgc

SEQ ID NO: 22131 - DNA, 201 bp, Homo sapiens
ataaagtacagctgccccaggaaggaaactaggggttcaggaatacggtgaaaagtaaactttcactgaacttttagttctttctgaatttttttttttttgagacagagtctcccccttgcccaggatggagtgcagtggcacgatctcggctcaccgcaacctccgcctcctaggttcaagtgattctcctgcctcagc

SEQ ID NO: 22132 - DNA, 201 bp, Homo sapiens
tcctgtgtttcatgtattggcttttcatgtgaaactcgaggagagcttgtccgttgctacaagctgttttttgaatgtctctacacagtccaggcaggaartagaagcactcacatcaggagctcagtgtcaggcaggcaagcctcctgcaggggagccccgccctgctcaggtggcctcatctcccctcccagctggtgg

SEQ ID NO: 22133 - DNA, 201 bp, Homo sapiens
aaatcacttgcctacgaagctccaccagtctcagcttctagggaaatagactgaagacactcacgtatgcacaaaatgacatatacaagattatccattgyttcattcataatagaagactgttaacaagcaaatgttcatcactaggctcctggttaaataaagtacagctgccccaggaaggaaactaggggttcagga

SEQ ID NO: 22134 - DNA, 201 bp, Homo sapiens
tggtggcgtgtgcctgtagtcccagctatcaggaggctgaggcagtaggattgcttgagcccaggagttcagtcgcatcactgcactccagcctaggcaayagagtgagaccttatttcaaagaaaaacaaaataaggtcactatgagtaaatttaaacaaaaccaagtgtatagaataaaaatgtctaatttgagggatt

SEQ ID NO: 22135 - DNA, 201 bp, Homo sapiens
agtggatgaggatgaggatgacctggaggaagaacacataactaaggtaacacgagtgtcctcagctggtgctgtgctgggggctatgggctgggctgtgyacccttggggaagaggctggagtcactcggctacttctcaccctcctctccacaaaggaggagcttccagcacttggactctgttgcttcttgcacgcaa

SEQ ID NO: 22136 - DNA, 201 bp, Homo sapiens
aagccacaatgggcatggagttaaagcattttatagttatctgtgaagattctataacataagagtaactgttcatgttgaaatctcaaaatttatcattmagaaaaagagcatataacatctaaacagaaaaaactgcaatgagaaaaaaatttaaatcaattcaaaacatcaaaaacagagagagagagaaaagcaaga

SEQ ID NO: 22137 - DNA, 201 bp, Homo sapiens
atgggcatggagttaaagcattttatagttatctgtgaagattctataacataagagtaactgttcatgttgaaatctcaaaatttatcattaagaaaaakagcatataacatctaaacagaaaaaactgcaatgagaaaaaaatttaaatcaattcaaaacatcaaaaacagagagagagagaaaagcaagacaaatggc

SEQ ID NO: 22138 - DNA, 201 bp, Homo sapiens
tagtactacattacttactagctgtatcatcttgggcagattacttagtttccccaagcctcaatctcctcctcaacaaaaaatgcacaacagcactaacycactgctgttgagaggattaaatgtagggaaaagatccaaaatatacaatgcctttttgtagcacaattcctaacatagagtgattttagtgaatggtta

SEQ ID NO: 22139 - DNA, 201 bp, Homo sapiens
ataacgttatgacaatcatcaaaagtatagcagcatacaaacaagttgctaggaaaaaaagagaaagcccacagacactagtatatgtaattacttagcaygtaataaaaggaaaattagaaaacagaaagggaatgtttattcaataaacacagactggaacatgtggctggtttttgaaaaataatctactcagatcct

SEQ ID NO: 22140 - DNA, 201 bp, Homo sapiens
gaggctgaggtaggagaattgcttgaacctgggaggtggaggctgcagtgagccaagatcgtgccactgcactccagcctgggcaacagagcaaaattccrtctcaaaacaaaatcaaaaacacataccatcacaccggagattagggcttcaacagagaaattttgaaggaacacaattcagtccatagcaagtagtaca

SEQ ID NO: 22141 - DNA, 201 bp, Homo sapiens
gtgctaccattttgaaaaaaggtgagaaattagaaaaaggttagtcctattagaaattctcttataacgttatgacaatcatcaaaagtatagcagcatayaaacaagttgctaggaaaaaaagagaaagcccacagacactagtatatgtaattacttagcatgtaataaaaggaaaattagaaaacagaaagggaatgt

SEQ ID NO: 22142 - DNA, 201 bp, Homo sapiens
ttctgggctcctgtgaattagggagtggcagctcctcagtctaactcctattgtgaccaggttgcctaattggccctttggtttgggcacccactgtccttctgcgtggttggatagatgctgctcccaatgtccctgatctcttacagacccctctgattcttcactcttggctttgagagcccctgatgccctgcagtc

SEQ ID NO: 22143 - DNA, 201 bp, Homo sapiens
ctaaaaatacaaaaattagccaggtgaggtggcgactacctgtaatcctagctactcaggaggctgaggcacaagaatcgcttgaacctgggaggcagagrttgtagtgagccaagactgtgccactgcactccagcctgggcgacacagtcagactctgtcccgccccccaacccccccaccaaaaaaaaaagaaaagaa

SEQ ID NO: 22144 - DNA, 201 bp, Homo sapiens
cccccagctggtcatcccccacaccacgatatgctgcaggcacatttcgaggtttagaacggcagacaaagtcacagccatcctgtagggggagaaaaaaraaggaaataattcgcagcatctaactttaggatatgagaaagtgtacttatggtctaggaatgtggcaagaattggttttctatagggataatgagaaaa

SEQ ID NO: 22145 - DNA, 201 bp, Homo sapiens
gactcctcccccagctggtcatcccccacaccacgatatgctgcaggcacatttcgaggtttagaacggcagacaaagtcacagccatcctgtagggggaraaaaaagaaggaaataattcgcagcatctaactttaggatatgagaaagtgtacttatggtctaggaatgtggcaagaattggttttctatagggataat

SEQ ID NO: 22146 - DNA, 201 bp, Homo sapiens
ctcccagtgtagctgtggctcagagttttttctttttgttgtcacttactcccttgtgattgaattttttctcctgcatccatggcaggatccccagccartatagagacttggttggcatcttctgctgcagggactaaaagtatttgactggggcacatgtggctgttgtcattctttctgcatcccactgttcccctc

SEQ ID NO: 22147 - DNA, 201 bp, Homo sapiens
gaccacctcaaccaagattttcaaatcatagtgaaacacaaaatttgatcaacttacccacaacagtgaaaaagcctctggctgacccttctactacatcrtttggcaagtccaaaactccctgcttggaggctttggcacctagaatgaaaatactgatttaaaaaatgtgatggcttctttatatcagcagatttgggg

SEQ ID NO: 22148 - DNA, 201 bp, Homo sapiens
gctttttaaaactgttagattcagggggtacatgtgcaggttagttacagggatatactgcatgatgctgaagtttaggcttcaattgaacccatcacccmaagagtgaacacagtacttgacaggtagtttttcaatccttgcttcccttcctccttcctcccttttgaagtccccagtgtgtatttttcccatctttat

SEQ ID NO: 22149 - DNA, 201 bp, Homo sapiens
ttttccttaacctcacagttcacaacattggccctctttgtgtatacaaagccaatcacttcactgcaacagaccacagctgagcaaacaaatacagacgytgatagatgaaccactgacaacaactcctaacaaaaacaacaataataacaacaataaacaaggtagcttgcaaaataccagacattaaaaaaaaattaa

SEQ ID NO: 22150 - DNA, 201 bp, Homo sapiens
tgaactctatcctccttcacctccttgcaagccctcctcaggtaattcctatattatataaaataaaatttttatgtctcaccatatgcttcctttctgaytctgctgccaaaacacactataggaaccatcagagtttttgaaagataattgcctttgataacctaaaatagaacattgtaggaaattattttttaacct

SEQ ID NO: 22151 - DNA, 201 bp, Homo sapiens
ataaaaactatcaaactcttgtgcagatttggcctgagggatggcgggatctgagcaaatctcagtgggttgtgacagcgtgtgtggcttgatagtttccytgtttgattctcacatagtgcccacccacagacagcttttttttttttaaagatggagtttcgctcttgtcaccctgctgggttcaagcgattctcctgc

SEQ ID NO: 22152 - DNA, 201 bp, Homo sapiens
aacctgggaggtggagcttgcagtgagcagagatcacgccactgcactccagcctgggtgacagagcgagactccgtctcaaaaaaaaaaaaaaaaaaaaacccaagctgtgccccgaccaccttgggcgcatattctcagaatctcctgagggctgtgtcatgggccatggtcactcatatttggctcagaataaatctc

SEQ ID NO: 22153 - DNA, 201 bp, Homo sapiens
tgaagggatcagactgctaagcaaatcgtcatgagactgaaggaacattgttgcattagaattggaatcactaaatctttagttttatctatttctcttcygtaaattgactttgaaacccactttgcttctaaatccccactgaactctatcctccttcacctccttgcaagccctcctcaggtaattcctatattatat

SEQ ID NO: 22154 - DNA, 201 bp, Homo sapiens
gaacctgggaggtggagcttgcagtgagcagagatcacgccactgcactccagcctgggtgacagagcgagactccgtctcaaaaaaaaaaaaaaaaaaaaacccaagctgtgccccgaccaccttgggcgcatattctcagaatctcctgagggctgtgtcatgggccatggtcactcatatttggctcagaataaatct

SEQ ID NO: 22155 - DNA, 201 bp, Homo sapiens
tgaacctgggaggtggagcttgcagtgagcagagatcacgccactgcactccagcctgggtgacagagcgagactccgtctcaaaaaaaaaaaaaaaaaaaaacccaagctgtgccccgaccaccttgggcgcatattctcagaatctcctgagggctgtgtcatgggccatggtcactcatatttggctcagaataaatc

SEQ ID NO: 22156 - DNA, 201 bp, Homo sapiens
ttcagtgagctatgatcgtgccactgtaccccagcctgggtgagagagtccctacctcaaaaaaataaaaccaaaaaactactggggccacgtcagaactraaagagttctgcaggcccttcagagaaaggagaagtgagagtcaattaacctcaagattacatttaaaagcattttcctctttagtatagaggtgtgtta

SEQ ID NO: 22157 - DNA, 201 bp, Homo sapiens
ctggctaacacggtgaaaccccgtctctactaaaacaaaaaattagccaggcgcagtggcaggcacctgtagtcccagctactcgggaggcttgaggcagragaatggcgtgaacctgggaggtggagcttgcagtgagcagagatcacgccactgcactccagcctgggtgacagagcgagactccgtctcaaaaaaaaa

SEQ ID NO: 22158 - DNA, 201 bp, Homo sapiens
gaccagcacaagtgcaaatgaggatgggaaagtgagtttttaaattgaacacatggctatttcaaataaaagcagggttctattacaaaaaatggggtgtrtgtgtgtgtgtgtgtgtgtgtgtatgtgtagagggggatattttttaaataggcaactaatagtgttgacttcatccagcaattttacctccaggaatgt

SEQ ID NO: 22159 - DNA, 201 bp, Homo sapiens
gcccacagagggggtgggaggctcaggcatggcgggctgcaggtcccgagccctgccccgtgggaaggcagctaaggcccggcgagaaatcgagcgcagcrccggtgggccagcactgctgggggacccagtacaccctccgcagccactggcccgcgtgctaagtcccccattacctggggccagcagggctgactggct

SEQ ID NO: 22160 - DNA, 201 bp, Homo sapiens
ccgcacaggagcccacagagggggtgggaggctcaggcatggcgggctgcaggtcccgagccctgccccgtgggaaggcagctaaggcccggcgagaaatygagcgcagcgccggtgggccagcactgctgggggacccagtacaccctccgcagccactggcccgcgtgctaagtcccccattacctggggccagcaggg

SEQ ID NO: 22161 - DNA, 201 bp, Homo sapiens
cagggggtggtgctcgtcggggaggctcgggccgcacaggagcccacagagggggtgggaggctcaggcatggcgggctgcaggtcccgagccctgccccrtgggaaggcagctaaggcccggcgagaaatcgagcgcagcgccggtgggccagcactgctgggggacccagtacaccctccgcagccactggcccgcgtg

SEQ ID NO: 22162 - DNA, 201 bp, Homo sapiens
aaggtagaaactctggacatatctgaaggaacaaactcctgacacaccatctttaagagctgtaacactcaccacgaaggtctgcagcttcattcttgaastcagtgagaccaagaacccaccagaaggaaccaattctggacatgctggcatcaagtcatctgctcaccttggcctcccaaagtgctgggattagagatg

SEQ ID NO: 22163 - DNA, 201 bp, Homo sapiens
cttgagctaaacacagggtgctgattggtgtatttacaatccctgagctagatataaagactctccacgtcctcaccagagcagctagatacagactgtasactggtgcactcacaaaccttgagctaaacacagggtgctgattggtgcatttacaatccctgagctagatataaagactctccacgtcctcaccagagc

SEQ ID NO: 22164 - DNA, 201 bp, Homo sapiens
ccttgagctaaacacagggtgctgattggtgtatttacaatccctgagctagatataaagactctccacgtcctcaccagagcagctagatacagactgtmgactggtgcactcacaaaccttgagctaaacacagggtgctgattggtgcatttacaatccctgagctagatataaagactctccacgtcctcaccagag

SEQ ID NO: 22165 - DNA, 201 bp, Homo sapiens
taatacataccttcattctacattcttttaataagccttctacgaatttacagttggtctgtgcaataactgcaggagagaggtctgacagtttgggttgyctcaggttttttcctaaacttcgtgcctcttgcatatatttctaaaaaatcaaggagtatttttaatgcgtaaacattagctattcttctaatcttctta

SEQ ID NO: 22166 - DNA, 201 bp, Homo sapiens
acatggtgaaaccccatctctattaaaaatacaaaaaataagccaggcgtggtggcaggtgcctgtaatcccagctacccgggggctgagccaggagaatmgcttgaacctgggagatggaggttgcagtgagccgagattgcgccactgcactccatcctgggcgacagagcaagactccgtctgaaaagaaaaaaaaaa

SEQ ID NO: 22167 - DNA, 201 bp, Homo sapiens
actcagtatcccatgaggtatatggcattctcttccttcccaccatagcaggtgtttaatagatggttatggtattgcactgatttaggctgggaaaaaawtaaagatgaagttattaagacagccagttgtggtcgggcacagtggcgcacgccggtaatcccagcagtttgggaggctgaggcgggcggatcacctgag

SEQ ID NO: 22168 - DNA, 201 bp, Homo sapiens
gtccttctaatttcactttcccgaatctatatgggactctgagaagcacagagtaagacgtgccgtgccctcttcggtggagttaaccagcggtgcatgtmtaggggctgtcatgaagggatcagactgctaagcaaatcgtcatgagactgaaggaacattgttgcattagaattggaatcactaaatctttagttttat

SEQ ID NO: 22169 - DNA, 201 bp, Homo sapiens
cgactaagacccccttcagggaaaagaagttttcattaactcagtatcccatgaggtatatggcattctcttccttcccaccatagcaggtgtttaatagrtggttatggtattgcactgatttaggctgggaaaaaaataaagatgaagttattaagacagccagttgtggtcgggcacagtggcgcacgccggtaatcc

SEQ ID NO: 22170 - DNA, 201 bp, Homo sapiens
ttcaagttgacttcctaatttttttctgggttgacattatcttctgtaatgtcagcaattttacagtatttgattctcatcttatgatgtagctgcatttytcactaaatttttggataaaatgtttttgtgtaattaactatgatacctcccatggggaaaaaattttttttttcagtggagcagggtattagaaactaa

SEQ ID NO: 22171 - DNA, 201 bp, Homo sapiens
attacatggcatcaaccctgtgttcctgtccagtaatcccagccgttggagtgtagaggaggtgtacgagtttattgcttctctccaaggtactgaccctytcttcaacagaacccaggttgttttccttaacatcatcccacaggggccttgataagagggaaagtaattgacttttaagcagtaggagcttgaatgcta

SEQ ID NO: 22172 - DNA, 201 bp, Homo sapiens
atatttgcggagcctacattttgtgggggaagagagatgataaacaaaatgaatgagttaagtagatagcacgttagatcatccaaaatgctatggggggraaaaaccctgggaatagggagatggcatgtgaagtggaagaaggttatgattttcaatagagtgatcagagaaagcctcattgagaagacacgctaagga

SEQ ID NO: 22173 - DNA, 201 bp, Homo sapiens
ttttttcaagagtaccaatgtgtccggaattggtgggttcttggtctcacttcaacaatgaagctgcggaccctcgcggtgttacagctcttaaggtggcrcgtctggagtctgtcccttctgatgttcagatgtgtttggagtttcttccttctggtgggttcgtggtctcgctggctcaggagtgaagctgcagatctt

SEQ ID NO: 22174 - DNA, 201 bp, Homo sapiens
ctaataatgtcttctgctggtttcccactgctatatattacagagaactagaaaagattaaagccagtatctgtatttagggtatggtcaacttaatgagrcattagcttttattttattgttactctattttcacataaccctttctaaaaagcctgttatcatgcacttctttacctatgaaattttggccaaatctaa

SEQ ID NO: 22175 - DNA, 201 bp, Homo sapiens
cgcatgttctcactcataggtgggaactgaacaatgagaacacttggacaccgggtggggaacatcccacactggggcctgtcgtggggtgggggcagtgrggagggatagcattaggagatatacctaatgtaaatgacaagttaatgggtgcagcacagcaacgtggcacatgtatacatttgtaacaaacctgcatgt

SEQ ID NO: 22176 - DNA, 201 bp, Homo sapiens
tctaagctttgtgtctccttgtgaaggcaaatctcctgaataaatgcttacttagcacgcgcatccacttggaatccatcatctgaaatagttactgttcrtggtgcattgactttaacttcaaacttgggcaacactggaaacaaagagaaatatacttcagcccccacaatcactggtgagcaaaatttattgcaatca

SEQ ID NO: 22177 - DNA, 201 bp, Homo sapiens
attctagttaaaatcacattttttcccatctggtttccagtagctatttaatcttctgcatttccttgctgcttcattcttgtctaaaccattctatacakcctgagctaacctgatcatgttactctctttcttaaaaccattagtcacttctcaatccaaaattcttaccatatcttaaaagaccttaataactgttct

SEQ ID NO: 22178 - DNA, 201 bp, Homo sapiens
aatatttttaactgtttatgtaaagtgcaagagagttattgattaggagagtagctctgaagccgaacagcctaggtctaaatcccggttctttcatcaayaagctccattactgttgataagttatttgaattatcggtgtcttagtatctttccttatagaggtgatgattgctcctacctaatagcactgtagcaatc

SEQ ID NO: 22179 - DNA, 201 bp, Homo sapiens
gaaggagctcctgtctgctgaggacacggttccatccaatgaggtcagcagggctatcagcagcttccgttaattccgttggggtaggcgtgtggcaagcrgcagttatttgagctgaggatgctgggatggattttcacatgagcagttggcccttagatcatgagaccagcctaagtgcccaaggaaatggaacagcag

SEQ ID NO: 22180 - DNA, 201 bp, Homo sapiens
tggccgctctggggaattttcacatgaatgaggttgttcgtttgagaggttctgtacagcaaacatggaaggagccccgtgaagagcttctcttgtgggamagagacatcgatgtgtttaatgcaggagacacagtcccttcctcatttgtttccatacttcagggactaataagtgctggggttttgttgtacagattga

SEQ ID NO: 22181 - DNA, 201 bp, Homo sapiens
cccataaaagcctcgggctcaggcagagcaagagagaggatggagggacaggaagaccagttgcagagagaagctgccctctctgctaatagcaggagacratgggacaaccagctgcacagaggaactaccctctctgctgagagcttcagagacctgcagagacttcgggactacagtgcagagaggagcaaggagcac

SEQ ID NO: 22182 - DNA, 201 bp, Homo sapiens
ctcccaagtaactgggactacaggagcataccaccatgcttgggtaatttttttttttttttttgagctggaatctcactctatcacccaggctggagtgyagtggtctgatctcagctcactgcaacctccacctcccaggttcaagcgattctcctgcctcagcctcctgaataggtgggactacaggtgcctgccacc

SEQ ID NO: 22183 - DNA, 201 bp, Homo sapiens
aaaatctagatcaattgttaggtcatggggagaatcaaggaagtgatacagtttctatttgaaagactttgagagtagattttgggaatttgcaaataaartgctgcttatttcacatatgataagatgagtttttcttctacgcccaacccagggtggtttgggaagaaagagagaggaataaacctttgacactgacct

SEQ ID NO: 22184 - DNA, 201 bp, Homo sapiens
ggatcgtctcatagctgatattttatgtctccctccttgcttttattcccttccccaaatcagctcataagcagaaattcacatttagagcagggtggtcytctgtggcactattgacatcctatatatgccctgtcctgtaggtacaatgtgagctgtagccatcagttccggctgaagaggaaaaaaatgaaagagttt

SEQ ID NO: 22185 - DNA, 201 bp, Homo sapiens
ccaaacattgtatagagaccagttactactcttgattaccgtattgaaagtgattctctctgaaccagacttggtcattaactcagagatccaagcagagrcataattgatggggaaatgttggggaaagctatagagaagcagaaggggatcaggctaacttaactctcaatgttttctgggacaggtgggttgttctca

SEQ ID NO: 22186 - DNA, 201 bp, Homo sapiens
tgctgtcatatcctcacccctttctgcttttacaaatgttttccctcagtttaagacatcccccactcaatccttgcccacttagcaaacatctgctcatrgtgcagagttacattctcagtgaaaatttccccatctcccactagggagagttagataaacacctctaaacgctgatttacagcatctatcacattgtgc

SEQ ID NO: 22187 - DNA, 201 bp, Homo sapiens
ggtttctgtaaaagggaagcctctaggatctttaaaagtatttttttctatttttaaatataacattcattgtagaaagtttggaaacatagtacaagtayaaggaagaaaatttttataacttacaatcacattgctgaggataacattttgttaatgtttttgcatagttttttttccaatttttgtcttcctcttgtc

SEQ ID NO: 22188 - DNA, 201 bp, Homo sapiens
gtgaatcgagaactggaggacttagctctgcaaatacagcagccctctatacttcggtacatctttggcttgtgaaaaccaaacatcttttcttctgggcratagtctgtaaagccaagggaattgacatatctttgttgagggctgtaacaaggaaccattaaagagttctctctgctccaccccacccccaagcaactt

SEQ ID NO: 22189 - DNA, 201 bp, Homo sapiens
acatgctgatgttattagtacagacattgccgttctttttgtcattgaccaagtctttcagaaccatattcttcagtttgctggtactctcactgcaatgyaggctgccctcaggagggatcccaaattgaacaagaacctcagagagttcttggataaaatccactttattggggaactgtggaaattcttcaggcaact

SEQ ID NO: 22190 - DNA, 201 bp, Homo sapiens
gcccaggctggtgtgcagtggcgtgatctcagctcattgcaacctccacctcccgggttcacgccattctcctggctcagcctcccaagtagctgggactrcagatgcccgccaccacgtccggctaatttttttgtatttttagtagagacggggtttcaccttgttagccaggatggtctcgatctcctgacctcatga

SEQ ID NO: 22191 - DNA, 201 bp, Homo sapiens
atctgtttcttcctccaggaaataaggttaacaacacaggtggtgaaagcccagcaacctccgattgcacaaggatactgatgccatggctttgcttttcrgccacaactgggaataaaactgggagctctgctgaggcaattttgctgctaaaaatgtacaaatgcctaattagagttacaggacctaccagaagatgag

SEQ ID NO: 22192 - DNA, 201 bp, Homo sapiens
tgactcaaaacccccacaggccatcgtgaagccccagattctcacccacatcattgaaggctttgttatccaggaaggagcagaacctttcccggtgaggrcagggccataaggtgggactttgaagtggggacttggtctgattgttgtcttttcaaactccagtaaaagtaaaaggcacagaactatttaatgaaagaa

SEQ ID NO: 22193 - DNA, 201 bp, Homo sapiens
ccttgcaatatcccaggcacagcttccaagcttatcatttcatgggtcatgctcagttacaagggatgaaggtaaagcaagatggaccaccttggcactgsgaagctcttctactatctgctctttgactttttataacttattagtcatatcattcctcagggtgtgtataacttaataaataactttttttttttttga

SEQ ID NO: 22194 - DNA, 201 bp, Homo sapiens
attccattgtaaaggatatgtccatcttcaagacacggcactttaaggccatcttctaagttaagtcctctgaaataatagccatgtagttcgctggaatrtagctgactatacacctagatggtagaagagagtcaactgtattttttcatagaaaacaattcatttttccccacaagcagtatataaataacctatata

SEQ ID NO: 22195 - DNA, 201 bp, Homo sapiens
gctggagtgcagtgacacgatctcagctcactacagcttcgacttcctgggctcaagcaatcctcccatctcagcttcctgaatctctggggctacaggcktatgccatcatgcccagctaattttcgttgttttggttttttgttttttgttttttgagacggagtctcactctgtcgcccaggctggtgtgcagtggcg

SEQ ID NO: 22196 - DNA, 201 bp, Homo sapiens
catggacgagaagagcagtcttggaggtgagtaactgacttctaatgctgttggagagcacacagagtagaggaatgttctgagtgagctaaaagataaawctggttgagtagaaaatgggccagaagttggtggacaaatgaatagatccaaaaacagggaatccaggtgaattgtcaagggtggacatagattattatg

SEQ ID NO: 22197 - DNA, 201 bp, Homo sapiens
ttgttcagtgaatgatgataactcttagagggtcccttcttctctgtacccctaccttctctctctccttttggatcccaggagacattatgggcacagcyctgcagaacctggatggtctggtgcagatgcccagtggctgtggcgagcagaacatggtcttgtttgctcccatcatctatgtcttgcagtacctggaga

SEQ ID NO: 22198 - DNA, 201 bp, Homo sapiens
cggtatagggtaaaccccagacattggctgtcaaacgcaaggctgactctgaggaggagagagatgatgtctccacattgggttcaatgcttcctgccaargcatctccagtagcagaaagcccaaaagtcatggacgagaagagcagtcttggaggtgagtaactgacttctaatgctgttggagagcacacagagtaga

SEQ ID NO: 22199 - DNA, 201 bp, Homo sapiens
ataaaaacagagcatgcaagttttttaaaaaattagattttaacatctaaactcttccggcttttgaatatttatgaattttcctcaactttcttctttttaaaatctcctcactacattcattaacacaactgttttctatcaaatggtcacatgaagcctacatcataggagcacataagaaaaatttaaataaattta

SEQ ID NO: 22200 - DNA, 201 bp, Homo sapiens
ttagcacaaaccataactattgtgctaattaggtaacagtacatgggttgatgagtgaactggaaaatactccacctgcccaaagaagggaattccctgtygaaagtgtgagtccactttcacaaatgagagtttggttatggttcttgtgatttcactggactgccttccagtcaattccaccactgaaaaaagagaaaa

SEQ ID NO: 22201 - DNA, 201 bp, Homo sapiens
aaaaaaaaaaggctagatatggctatctgggagtactgtaatatataactattattatttctcttttaagtttcaggcaaggccaggtctggtggcacacrcctgtaatgccagcactttgggaggctgaggcaggcagatcgcttgagctcagaagttcaagaccagcctgggcaacatggcgaaaggcagtctataaaa

SEQ ID NO: 22202 - DNA, 201 bp, Homo sapiens
gaggcagaggttgcagtgagccaagattgtgcctctgcactccagcctgggtgatagagccagactttgtatatatatgtgtgtgtacatatatatatatrtgtgtgtgtgtgtgtatatatgtaatacatatatattacatacctaatatatataatatatatgtaataaacatcatgtatatatgatgtttattagccc

SEQ ID NO: 22203 - DNA, 201 bp, Homo sapiens
caaggaaagttttttgttagtgtgtttgttacgttttattgtgtgaataacttgaacatgttcataggcttggacgtagggttgtattctattctgcatgrtaggaactcagtaaatattttttgaaaaaatgaaaagattgcgaagccgatgcaggtagatcatttgaggtcaggttttcaagaccagcctggccaacat

SEQ ID NO: 22204 - DNA, 201 bp, Homo sapiens
ttaattgaataggggaataaagagttaagagggttaatattggtatttatctgcttcttctgtaagagagtgacacattatataatatctgaactttataytcctaaatttgttgctgatactattctgggtttttgggtatgtaataagttagatcaagatagccttaaccaaatcagtctttgaaaaaacaacagttct

SEQ ID NO: 22205 - DNA, 201 bp, Homo sapiens
cttcacccttgtctcttccacctgatgcagcccctaagccaccaattcccatccaatccaaaccacctgtagcacctatcaagccgcctcagttaggggcygctaagatgtcagctgcccagcaaccaccaccccatatccctgtgcaagttgtaggcactcgacagccaggtacagcccaggcacaggctttggggttgg

SEQ ID NO: 22206 - DNA, 201 bp, Homo sapiens
tgtaataaattccattgtaaaggatatgtccatcttcaagacacggcactttaaggccatcttctaagttaagtcctctgaaataatagccatgtagttcsctggaatgtagctgactatacacctagatggtagaagagagtcaactgtattttttcatagaaaacaattcatttttccccacaagcagtatataaataa

SEQ ID NO: 22207 - DNA, 201 bp, Homo sapiens
agtgaacctgaagcaggaggctttttcaacactagcaagtggcaacagcaaaatggcagctctgatgaagacagagaatggaccattggcagttagttttwagaaaatgagtttctagattctcaacttctgtctatgctttttcttaaaagagatcttctatcatgctagctctcagatgttacccagtcctactcttcc

SEQ ID NO: 22208 - DNA, 201 bp, Homo sapiens
attgtgaaagaatactccactggagcaaacaaggttagaaggaacagagtatgggggaaatggaatcagagagtggcacattggacaatttttctttgcartcagccaattctggaagggtcattaaggaggttgttccacattccaatgcttgtttaaactcaacagtaggccaaagttcaggggcctcaggggaaaaga

SEQ ID NO: 22209 - DNA, 201 bp, Homo sapiens
agtctcgctctgtcacccaggctggagtgcagtggagcgatctcaggtcactgcaagttccgcctcccgggttcacgccattctcctgcctcagcctcccragtagctgggactattgacacctgccaccatgcccggctaattttttgtatttttagtagagacggggtttcaccatgttagccaggatggtctcgatct

SEQ ID NO: 22210 - DNA, 201 bp, Homo sapiens
aggtaaagttcaacattgccaacctttttgtttgtttgtttgtttgtttgtttttgagatggagtttcgctctgtcgcccaggctggagtgcaatggtgcratctcagctcacagcaacctccgcctcccaggttcaagtgattctcctgcctcaggctcccgagcagataggattacaggtgtctgccaccacgcccagc

SEQ ID NO: 22211 - DNA, 201 bp, Homo sapiens
tcagctattagtgttaagttcaggaatgacagaaggactcattagatacaatttgtttccataatatagatgcttattccatgcaaactgcttcattatgmagaatccacaattacatttttggcatcctgatcattttatctaaggatccaagatcacaaggatttcttaagcagttgctgttatttttcaacaaaatta

SEQ ID NO: 22212 - DNA, 201 bp, Homo sapiens
cattccaaaagagctttgatcagtattattataaaactgattttaaaaattttcagttctctgaataccattttacatataacatactgtgagaaaatacygttatccatttctgagtcttgggtcatttagacttttctgcttatagcatgagaaaagaaagtacgattaaaaaaaaatgggggataaaagcctctcaga

SEQ ID NO: 22213 - DNA, 201 bp, Homo sapiens
gctgtagcacctcaatgaaaggttatacaacaaatagccccaacaaccagatacacttcaggtggaaaaagcatggtccacacaacattctacacttaccrtaacttagtacattttgagaactaattttgcaagaaagtaaattcagggtcagcttcccaggtgtccctggacctggaccaagagtttcaattctctgag

SEQ ID NO: 22214 - DNA, 201 bp, Homo sapiens
gttgcttaaaaatataagacttccttgatgtccaagaatactgagatttatatgattagaaatttctatacaaagctggaaacagtggagcatgttcccayatagaagcacaggttcccagctcccccagaggccctcatacagagctgcagctgcctgtgatggagcctgcacagattcttccagtagacagtcactttc

SEQ ID NO: 22215 - DNA, 201 bp, Homo sapiens
attatctgtttaatgtttattatctctattacactataaactccataaaagcagtgataaaagtgcctctctacatcaccattttattcctaatactgatrtagactatataatttattgtccaaacttggacacttttagagtgaagtggttgtaactattaacagttacaacttgataaaacatatacaccaggacaga

SEQ ID NO: 22216 - DNA, 201 bp, Homo sapiens
aaggcaggcctctgtctgatttgcctatgggctgtggtttgtcagctcctgatgtagagtagttaaatggtcagtatttcactgacatagcacctatcacractacaataattctttgtaaaattatctgtttaatgtttattatctctattacactataaactccataaaagcagtgataaaagtgcctctctacatcac

SEQ ID NO: 22217 - DNA, 201 bp, Homo sapiens
cctaaatattacttcctcagggaaactttccatgatcatttagtccagattttagcaaacttcttttgtaaaacaccatggtctctctctcatatattttkttattttttaaataatcttttaaaaatgttaaaaccactcatagttcactggctgtatcaaggcaggcctctgtctgatttgcctatgggctgtggtttg

SEQ ID NO: 22218 - DNA, 201 bp, Homo sapiens
acaattaaatctacagaagctctggggtctagggcatttgctggctatccctctaccacttctactctaaccacaaattttgtgttctaagtggcagagarggtgatagaggtatcaaagagataaagagaattctggccaggcaccgtggtgcacgccattagtcccagctatcccaggaggctgaggcaggaagatccc

SEQ ID NO: 22219 - DNA, 201 bp, Homo sapiens
agagactcttataatgactccatgattcttcaatggacaattaaatctacagaagctctggggtctagggcatttgctggctatccctctaccacttctaytctaaccacaaattttgtgttctaagtggcagagagggtgatagaggtatcaaagagataaagagaattctggccaggcaccgtggtgcacgccattagt

SEQ ID NO: 22220 - DNA, 201 bp, Homo sapiens
taaaaaaatatacaaccataatcacacatactagagaagaaaacttaaaactctaagtaattcttaggtaaaaataaaaataaaaataatgaaatcatcaraaatgattttaattgaacttaaaaattgttaagatggtaaatttgatatgtgcattttttcataatttaaaaaataaaaatagtatagaaaaacacctgt

SEQ ID NO: 22221 - DNA, 201 bp, Homo sapiens
gtgtaataaattccattgtaaaggatatgtccatcttcaagacacggcactttaaggccatcttctaagttaagtcctctgaaataatagccatgtagttmgctggaatgtagctgactatacacctagatggtagaagagagtcaactgtattttttcatagaaaacaattcatttttccccacaagcagtatataaata

SEQ ID NO: 22222 - DNA, 201 bp, Homo sapiens
tgtgtaataaattccattgtaaaggatatgtccatcttcaagacacggcactttaaggccatcttctaagttaagtcctctgaaataatagccatgtagtwcgctggaatgtagctgactatacacctagatggtagaagagagtcaactgtattttttcatagaaaacaattcatttttccccacaagcagtatataaat

SEQ ID NO: 22223 - DNA, 201 bp, Homo sapiens
caactccctgagatcttcaccttccccatcctgccacaggcaaggcttttctctctctcctttccctttcttattttttctattactcagggtaaccatcyttcccagagatcacaagtcaaaactctctggtcagaggttggattaatgatgatggggcccaacagggggcaagtttgagccttgccagtttgatattgg

SEQ ID NO: 22224 - DNA, 201 bp, Homo sapiens
gagttagttattactatacttggtatttatatactctagcagttctatttctaaattgctttatcatcacatgctttgatctctggacaatctggtacaayatggagaagtagagtttgtcactcccagtttacagtggaggaaactgagttaggtcagagctgacaggtgctgactctcaagactcagatggtggtctaa

SEQ ID NO: 22225 - DNA, 201 bp, Homo sapiens
gacagggcaagactctgatagtttatacttgctttcagactgcgggtaagatgtagttagatgtgtgtatcttatttggtcatgttgatttttgccttttyttgtttctagtaccttagttgttgatgtatttagataatttactcacaaaaaaattaagagttagttattactatacttggtatttatatactctagcag

SEQ ID NO: 22226 - DNA, 201 bp, Homo sapiens
gtccttccaactggcaccagaggcaatgctgggcacctacactgtggcagtggctgagggcaagacctttggtactttcagtgtggaggaatatggtaggkggggaaatggacaggccaaagtattgggcataatctcatcttaaaatcagcaaaggtggagccgggcgcagtggctcacgcctgtaatcccaggactttg

SEQ ID NO: 22227 - DNA, 201 bp, Homo sapiens
atagcatcccagggtccatgggtccaggtggaggtgggcaggcacatggtggtttgggtcagttgccttcctcaggaatgggtggtgggagctgtcccagraagggtacaggagtggtgcagcccttgcctgcagcccaaacagtgactgtgagccagggcagccagacagaggcagaaagtgcagcagccaagaaggcag

SEQ ID NO: 22228 - DNA, 201 bp, Homo sapiens
ctatccgagggttcttttagtactctcttaatctagccatagcccttagatctatcctcaccgtaagaaacacatgtttttctccaattactttaggggckactactgtatgtcaaagatcatgtcacttgattttatttatcttttcgttgcaacactattcacaacttgtcacttttgaaaaaacacaaggtcagttag

SEQ ID NO: 22229 - DNA, 201 bp, Homo sapiens
gagttagataaacacctctaaacgctgatttacagcatctatcacattgtgcagtagaaaaggctaagctgagagtcaataacctttggaaacttcttagraaagcatggccatatcaggaactaaaatttgctgtactctgcagtcctaaattcatgtacctccctttgaaagctgggctgatcccaatttcctaggtga

SEQ ID NO: 22230 - DNA, 201 bp, Homo sapiens
gatctatcctcaccgtaagaaacacatgtttttctccaattactttaggggcgactactgtatgtcaaagatcatgtcacttgattttatttatcttttcrttgcaacactattcacaacttgtcacttttgaaaaaacacaaggtcagttaggtagatcacatgactattcttagtttttcatactctgtatccaaattt

SEQ ID NO: 22231 - DNA, 201 bp, Homo sapiens
ttctccaattactttaggggcgactactgtatgtcaaagatcatgtcacttgattttatttatcttttcgttgcaacactattcacaacttgtcacttttkaaaaaacacaaggtcagttaggtagatcacatgactattcttagtttttcatactctgtatccaaattttacctttatactctttgccatgtgactttgc

SEQ ID NO: 22232 - DNA, 201 bp, Homo sapiens
ttgtcacttttgaaaaaacacaaggtcagttaggtagatcacatgactattcttagtttttcatactctgtatccaaattttacctttatactctttgccrtgtgactttgcagttctccccactagggaagggatgtatttcctgtgagttactttgactaatgaaatatgagttgaggccgggcatggtggctcacgcc

SEQ ID NO: 22233 - DNA, 201 bp, Homo sapiens
gggggcagatcacctgaggtaaggagttgagagcagcctgaccaacatggagaaaccctgtctctactaaaaaatataaaattagccaggcatggtggctygtgcctgtaatcccatcactttgggaggccgaggcaggcaggtcaccagatgtcagaagattgagaccaatttggccaacatggtgaaaccccatctcta

SEQ ID NO: 22234 - DNA, 201 bp, Homo sapiens
tggtggcttgtgcctgtaatcccatcactttgggaggccgaggcaggcaggtcaccagatgtcagaagattgagaccaatttggccaacatggtgaaaccscatctctactaaaaaaatacaaaaattagctgggtgtggtgacacacacctataatcccagctactcgggcagctgaggcaggagaatggcttgaacccg

SEQ ID NO: 22235 - DNA, 201 bp, Homo sapiens
tcccagctactggggaggctgaggtgggagaatggcgtgaacctgggaggcagagcttgcagtgagccgagattgcgccactgcactccagcctgggagacagagtgagactccatctcaaaaaaaaaaaaaaaaaaaaaagaaagtttgaatagatactttcctttagatatgaagacattcagcatcaattcattgctc

SEQ ID NO: 22236 - DNA, 201 bp, Homo sapiens
ggtggcttgtgcctgtaatcccatcactttgggaggccgaggcaggcaggtcaccagatgtcagaagattgagaccaatttggccaacatggtgaaacccmatctctactaaaaaaatacaaaaattagctgggtgtggtgacacacacctataatcccagctactcgggcagctgaggcaggagaatggcttgaacccgg

SEQ ID NO: 22237 - DNA, 201 bp, Homo sapiens
tttgggaggccgaggcaggcaggtcaccagatgtcagaagattgagaccaatttggccaacatggtgaaaccccatctctactaaaaaaatacaaaaattmgctgggtgtggtgacacacacctataatcccagctactcgggcagctgaggcaggagaatggcttgaacccgggaggtggagattgcagtcagctaagat

SEQ ID NO: 22238 - DNA, 201 bp, Homo sapiens
ggaagaaaacaaactagcggattacagacactcctctttaggactgtgaactgtgaaaacaaatcacagcagagaatcagacagatgtccatggtaatggytcattctctaatggaatagactgcaatgatgctgctaatcaagtatacaccatccagactgctgccactgctgccaggatcagcagtctgcacactgtaa

SEQ ID NO: 22239 - DNA, 201 bp, Homo sapiens
gataaactgatttgcaaaaatttcctagagcaaaaagttaggttgacataagtggtgttgattctcaggccccacagttggcacaggcagtctcatttctyaagacaaaatgaaaagaagtcagctaaaacttataatctttaaaagctgtaaaacaattggggagacgggtggatatcccaaccaatattagttgctcta

SEQ ID NO: 22240 - DNA, 201 bp, Homo sapiens
tgtgaaccactgcgcccggccttacctgttaaattaatgttagtggaaacacattgccaaactcaatttttcaagtacatgtatcttcaaaatacaaatayacttcaaagctactgtactttgaaatatgttatcttcaaaaatgacattatcactaagaatataggaagccttaagaattgaatatggtggttcaaaatt

SEQ ID NO: 22241 - DNA, 201 bp, Homo sapiens
agaccccaccctgtggaagtgggtctcaacattacacaaccccctctcgggcccgtggacagttgctgtcctctctgttttctctctttgtgcctgtgccmccctcagagaagaagaaaggagctgaggaggagaagccaaagaggaggaggcaggagaagcaggcagcctgccccttctacaaccacgagcagatgggcc

SEQ ID NO: 22242 - DNA, 201 bp, Homo sapiens
caggcaggcaagcctcctgcaggggagccccgccctgctcaggtggcctcatctcccctcccagctggtggtgctgccctatcagatgctgctgcatgcgrccactcggcaggctgcgggcatccggctgcaggaccaggtggtgatcatcgacgaggcgcacaacctgatcgacaccatcacgggcatgcacagcgtgga

SEQ ID NO: 22243 - DNA, 201 bp, Homo sapiens
ggcgaggaaagggataattgaagagatattttgaaggaataaaagaccacacttgatgataaacttgctagtgagtgaagatggctgaagaatcagatacrgagccagagttcctccttaggaggtaggaaggccttaaagtatatggtaaaggcagagatacgagctgaggtattctgtggaatacgacacaatagcagt

SEQ ID NO: 22244 - DNA, 201 bp, Homo sapiens
gagaacagcaagcgtaagagtatagtcatatatttaaatacgagtatgtgtggtaggcgttggagatgaggggataaataaaatagaatcaacaggcatgrtgatagaagaggtcattgctggggtagagcatataaaggaggttgtagttaacttcataggtcacagggatcattgctagctattgaacagcagattaac

SEQ ID NO: 22245 - DNA, 201 bp, Homo sapiens
gtcagaataccatagatgggtacttaaacaacgaacatttattgctcaagttctggagactggaagtcctgagattagggtgccagcatggctggtttgcrgtaaaggcttgcctcctggttcacagatggctgtcttctcacatggcaaagagagtgagagctcttctctttctcttctctaaggacactaatcctatag

SEQ ID NO: 22246 - DNA, 201 bp, Homo sapiens
ggatttctgaccatttgccctgccttttaaaaaataggtctaattgcaggatggtgtcataattaaggctactattgaccacccattgttccaggctggasagcttataatggggacaaacagtattggagaaacaaaaatcatacgttttctctttagattgtcagggtcaaattgatttcaatcccagaggatgcagcc

SEQ ID NO: 22247 - DNA, 201 bp, Homo sapiens
gaacccgggaggtggaggctgcagtgagctgagactgtgccagtgcactccagcctgggcaacagagtcagactcagtctcaaaaaaaaaaaaaaaggctyaagtaggcacagtagctcacacctgtaatcatggcacttttagaggctgaggtgggtggatcacttaagcccagaagttcaagaacaatctgggcaacat

SEQ ID NO: 22248 - DNA, 201 bp, Homo sapiens
atgtgctagacacactggaggtgctggggtataagggaccattgctagaggagcaagcccttatgaaggcagcagagtggactatatgtaggagcatatayggtataggattatatatataggcttttatacaggaagaaggtggtatatactgtaaaggaatagatatataaactatataaattcctatacaggatatgg

SEQ ID NO: 22249 - DNA, 201 bp, Homo sapiens
acaagcactaactaaccacctctgccctttctcatcccttaatcattcagacaagatttccttgtttacttcctcctataaaaaccctaagtctatttcaytttctttgaaaagattcctctgcattaatggatgttgtccttactacaatagcatgaaaaaaaaaaaaagtctccttaatgcagcttagcaattttccag

SEQ ID NO: 22250 - DNA, 201 bp, Homo sapiens
gtgttctggtgaagatcaagtgagataaggcacacttagcaaaatgcctggcacatggcacaaaattttgtattcctcttcagatgtttatttcataagtrtatggactcctactatcagtcagtttgaccagagaaacataaacactatgagtaacagagtatggtttacgatagagattatgaggatttatcataggga

SEQ ID NO: 22251 - DNA, 201 bp, Homo sapiens
cctctgccttaattatcaggaatgttgagtgaattgttttgcttctctgaggctcattcaaaaggggaaggtaataaattagccccaccatttgtctctgycatgcctttgttggaactatggaaaaaacaaaacaaaacaaaacaaaaatcaggtctccttcttgaagccatcatactgccatctgctgggaaatggtaa

SEQ ID NO: 22252 - DNA, 201 bp, Homo sapiens
tggttacaagatggcacagagtttataagtagaaattctcttgactgcacagctttccatagtctagcaatgtgcccttgggaaaatgtattcatctcttygagctcaatgtcttcacctgtacaatggtgttctggtgaagatcaagtgagataaggcacacttagcaaaatgcctggcacatggcacaaaattttgtat

SEQ ID NO: 22253 - DNA, 201 bp, Homo sapiens
acctctgccttaattatcaggaatgttgagtgaattgttttgcttctctgaggctcattcaaaaggggaaggtaataaattagccccaccatttgtctctkccatgcctttgttggaactatggaaaaaacaaaacaaaacaaaacaaaaatcaggtctccttcttgaagccatcatactgccatctgctgggaaatggta

SEQ ID NO: 22254 - DNA, 201 bp, Homo sapiens
attcctagagttcacatgcctctcaaatatctttaaattatctctggccacagtaatttctctatttttggtcccagatgcccctttccacttactgaaaytgtgagaaaaggtgatatgtagttggtggtgtccatggaaatgttcaccaaaccatgctcatcagtagttgcactgaaatagtatctagtattcacatga

SEQ ID NO: 22255 - DNA, 201 bp, Homo sapiens
gtctcatttctcaagacaaaatgaaaagaagtcagctaaaacttataatctttaaaagctgtaaaacaattggggagacgggtggatatcccaaccaatawtagttgctctacgttttatacttaaaagaaacaacctattactatttggccaaatcatcatatggtgaattgatctaacaaataaaagagttttggcaac

SEQ ID NO: 22256 - DNA, 201 bp, Homo sapiens
gcaagtgtcaaatagtagacctttagcaattgttatttatttttaaaagtgttgctcattttttccataagagaatcagtataattggagtagagtcattktacatgatttctaacctaaaatattttttatgcctggaactctggacaatttttttctcctctagtttatttaaggtatcctgtttttatccaaaggtaa

SEQ ID NO: 22257 - DNA, 201 bp, Homo sapiens
gaagtctatttacccacctcttgaatcttgggctggtcttgtgactttgaccaataaaatggagaagtgatgacttctgaatttcattttgaaaaggtctyctggcttctgctcttgctcttagaattctgccctgagactattgtataaagaagctcagtatagcgtattaaagatgaggccacggcctgaagtatacaa

SEQ ID NO: 22258 - DNA, 201 bp, Homo sapiens
ctcaaatttctcctggggataacattactattgtaaaacataagattagtgcttgagacattttgcagaccgtacacttgatggatcagctggcactaccyagcttggtaaactggctcatctaatcttgtagcccccgcccaggacctgactcaagcaaaaggacagctttgactccctgtgatttcatctctgacccaa

SEQ ID NO: 22259 - DNA, 201 bp, Homo sapiens
gtttgaagattttcctgtttccaaaaatcacatactttcctcttttgagtattctatagaataactctctacatttcctagtttgtggaaattttctctayggcataactactctaaattgtgcaattttcctcatatcagacttatttttctctatacctggttccctagcaaacctgagctttatttatatatctgata

SEQ ID NO: 22260 - DNA, 201 bp, Homo sapiens
atacatgtttggactacatgcctacgtgcagtatcacatttgcctaagtttatcagtaattaattttgcttcaactagaaggtcagaggccaaaaatgccytctaaatctacctaatccgtgagggtcctcgtaccagggtgattaagaaatgtctcctaaatttacttaaggaggatcctggcaccagagcaattacttc

SEQ ID NO: 22261 - DNA, 201 bp, Homo sapiens
tctataagattagaaattaatctgtaaacattgatacattgttaggatgcttttgccacctgatagagacattaattccaaatgttccaggtctttattgycctgagaaagttaagcaatcttataactaatttagcaaatttgtgtaaggattttgcctttcaatatgaatgtatgttcaaagacaaaggtctggaaaga

SEQ ID NO: 22262 - DNA, 201 bp, Homo sapiens
ttctgggatcacaggcgtgagccaccgcccccaactgcttttttaaaaatattttgatctgcagttggttgaatcctcaaatgtaaaacccacaaatatgragagccgacaagaaccaacatctgacgaaggtacagaaaaactactgcactactgctctataagattagaaattaatctgtaaacattgatacattgtta

SEQ ID NO: 22263 - DNA, 201 bp, Homo sapiens
tgtactcaggctggtctcaatctcctgggctcaaatgatcctcccccatcttgttctcccaaagttctgggatcacaggcgtgagccaccgcccccaactrcttttttaaaaatattttgatctgcagttggttgaatcctcaaatgtaaaacccacaaatatggagagccgacaagaaccaacatctgacgaaggtacag

SEQ ID NO: 22264 - DNA, 201 bp, Homo sapiens
agtgatctcggctcactgcaacctccacctcctgggttcaaggaattctcctgcctcagcctccagagaagctgggattacaggcgtctgccaccatgccygactaattttctgtatttttagtagagatgaggtttcaccatgctggccaggctggtctcgaactcttgacctcaggtgatccagccacctcggccttcc

SEQ ID NO: 22265 - DNA, 201 bp, Homo sapiens
ctaaacagcagagaccttctgatgtctggcaatgctgggtgcagcttccatgcccctccaccacacagcatgctcagctgcaagaggtgaggctgaagcgygtgcagaagacttgacctctgggcagccaccctttccattctctacctatgtgtagtccatgcttgctgcatagcctctgggagaaagtgctaaatcaca

SEQ ID NO: 22266 - DNA, 201 bp, Homo sapiens
aacctgagctttatttatatatctgatatgcaccccatctccacagctggcattcaattgcaactctaaattctaaagtgctcagagtcaatataatgcaytgacgattcagacctgactgggcattttcactgcataaatctaaaaagtaaacaatctcattatgtttgagaggatggatggggagaagactgatctata

SEQ ID NO: 22267 - DNA, 201 bp, Homo sapiens
tcactggaaggcaaaggagaggtggcgggggcaggtccacgtgtgttggtaggatgtcatttagctggcaccatctctttgcctctttctttctcctttgytgcagaacctttgtgtaaatgaagacgtgagaagcctaggttctgtgcagcttatcaacgaccgctgcgtggacatgcagagaagcaggcacggtagcca

SEQ ID NO: 22268 - DNA, 201 bp, Homo sapiens
ttgtgaagtcagaaactgaaaagtctgagattttctgctacttgcaagctaacaagttaccgtgccacaattttttttttttttttttagacagagtctcrctctgtcgcccaggctggagtgcaatgcagtgatctcggctcactgcaacctccacctcctgggttcaaggaattctcctgcctcagcctccagagaagc

SEQ ID NO: 22269 - DNA, 201 bp, Homo sapiens
cgagtagctgggactacaggtgcatgccactacgcccagctaatttttgtatttttagtagagacagggtttcacagtgttggctaggatggtctccatcwcttgacctcgtgatccgcccacctcggcctcccaaagtgctgggattacaggcgtgagccaccagcacccggcctactaaatcttacaaacaagagtgtt

SEQ ID NO: 22270 - DNA, 201 bp, Homo sapiens
tcggagctgtacattgagctggtagtcccttagttctgcctcttcacaatgcagttttaaatccttgtctttttcacccagagaagcagagaggtccattytttccacagccacaccagtacgcttggccagagcctgcaagcgggctatggtttcattgcccttcagtaactcatacatgctgatgttattagtacagac

SEQ ID NO: 22271 - DNA, 201 bp, Homo sapiens
tgcactccagcctgggagtcggagggagactctgtcccagatttaaaaaaaaaaaaaaaaaaaggctatggtaatgacctgtctccctcttgcttaagttytttctttctttctttctttctttctttctttctttctttctttctttctttctttctttctttcttttttaatctatctttctttctttctctctctctc

SEQ ID NO: 22272 - DNA, 201 bp, Homo sapiens
accatgcccagctaattttttattttttatagagacgggggtctccctatgttgcccaggctagtcttcaactcctgggctcaagcaatcctccagcctcmgcttcccaaagcgttgggattacagatgtaaaccactgcacctggcctgagttttcagtaaaccaaataattaatgtaattctgactgtattagaaccta

SEQ ID NO: 22273 - DNA, 201 bp, Homo sapiens
actcaatgttggctagaattgtccatttagctggaggggaagagggagggaaggatggatggaggagtgaagtatggaagcaggcatcaggccacttcccrtacctctcccaaactccaaaggcaatgatcacattggagggtcagctaaacacaaagggaagtgaagaaagaagtttgaagattttcctgtttccaaaaa

SEQ ID NO: 22274 - DNA, 201 bp, Homo sapiens
tgcatttataatcccagctatctggaggctgaggcaagaggatccctcgagccccagagttcgaggctgtagtgaactatgattacaccactgcactccarcctgggtgatagagtgagaccctctctctctcaaaaaaaaaaaaaaaaaaaagatttatatgtattatatatgtataaatacatagcctaaatatcaact

SEQ ID NO: 22275 - DNA, 201 bp, Homo sapiens
ttttttatgcctggaactctggacaatttttttctcctctagtttatttaaggtatcctgtttttatccaaaggtaaagacataaaactatactgtgggtrgtaaacaaagatggttttaatcactcacagtttgtgctggcagctgaccataattccttagtagcaataccctctggtctaccgcccaaagagcataaag

SEQ ID NO: 22276 - DNA, 201 bp, Homo sapiens
cgagctgctactgaaattcttctttataatttgatagtgttggacttgaaggtcccatctggttacacagtaatttaccactttactgtgggttctggtaygccaaagaaggcagtactctccagtctttgtttaaacaactctaggatcagaatgttcctggtttgtcctggtaccagagacactgtttgaaattgtttg

SEQ ID NO: 22277 - DNA, 201 bp, Homo sapiens
aatattttttatgcctggaactctggacaatttttttctcctctagtttatttaaggtatcctgtttttatccaaaggtaaagacataaaactatactgtkggtggtaaacaaagatggttttaatcactcacagtttgtgctggcagctgaccataattccttagtagcaataccctctggtctaccgcccaaagagcat

SEQ ID NO: 22278 - DNA, 201 bp, Homo sapiens
ttttaacgtttagaaacccacgtttctagcagagcgtggtggcacacatctgtagtcccagcactttgactgggtgaggctggtggatcgcttgagcccargagcttgataccaacctgggcaatacagtgagacctcacctctatagttgaaagaaagaaaaaaagaagggcagggtagggcagcggaggggaggggagg

SEQ ID NO: 22279 - DNA, 201 bp, Homo sapiens
tagggcagcggaggggaggggaggggaaggcaggggaggggagggatgtttccttggatgaaatgtgtttcttcttgtggtccccgaccagttttaaactytagaactgtggcactactaactggcttctaggcagcctcttccacttagatgggtttgaagtacagaaatgatttcatcagcctgaccattgaggctcta

SEQ ID NO: 22280 - DNA, 201 bp, Homo sapiens
atgttgcctaggctggtcttgaacccctggcctcaagtaatacacctgtctcggcctcccaaagtgctgggattacaggcgtgagccactgcactggcccrgattgtcagagctttctttcagaggctggagtgtgagagggaagaagtggtgtttgagggaagagttggatctcaagtggaatttcccaactctgactcc

SEQ ID NO: 22281 - DNA, 201 bp, Homo sapiens
aagaggagaggaattcaggctgggtgagatggcccacactttgggagaacaaggtaggaggattgcttgaggccaggagttcaagaccagcatgggcaacrtagtgagacgaagtctctacaaatatatatttttttgattagccagcatggcagcatgcatttataatcccagctatctggaggctgaggcaagaggatc

SEQ ID NO: 22282 - DNA, 201 bp, Homo sapiens
tggggctctacgaggaaaacagtgatcctcccacccccagaaaaggaatatgtggccttcaaggggtcctcaaggagacccaggactgttataagtcttcrttaccagctgggctcagtggctcatgcctataatcccagcactttgggaggctgaggtgagagtattgcttgaggccaggagttcaagaccagcctaggc

SEQ ID NO: 22283 - DNA, 201 bp, Homo sapiens
gaaaaagagtagagagttagacctgagaggaacctatccacccacagctcttggggctctacgaggaaaacagtgatcctcccacccccagaaaaggaatmtgtggccttcaaggggtcctcaaggagacccaggactgttataagtcttcgttaccagctgggctcagtggctcatgcctataatcccagcactttggga

SEQ ID NO: 22284 - DNA, 201 bp, Homo sapiens
ttatttttaagttaatttggtaccatgtagacaatacacaaacatatgtatagacatataaatacatgtagatacaacatatatcatacacatgtatgtgyctatttggctttgtttctttgtttgggacatggtctcgctatgctgtccaggatggcctcaaactcctgagttcaaatgatctttctgcctcagcgacct

SEQ ID NO: 22285 - DNA, 201 bp, Homo sapiens
aatcgacttttgacttttgactttttagagcatgagaatcccttgaacttgggaggcagaggttgccatgaaccgagatcgtgcccctgcactccagcctsggtgacagagtgagactctgtctcaaataaccaaacaaacagagccaaaagtatataagcttaaactcgaatttagtaattaatgtcttagcattatatc

SEQ ID NO: 22286 - DNA, 201 bp, Homo sapiens
gctcactgtagtctcgacattccaggctcaagtgattctcccacctcagcctcccaagtagcagagacttatacatgcatgtgccaccatgcctggctaawtttttaaaaaaaatttttgtagagatggctttctcactatattccccatactggtttcagactcctggactcagagatcctccagccttggcctcccaaa

SEQ ID NO: 22287 - DNA, 201 bp, Homo sapiens
gatctctgatgccaccatggacccaagcaaaggtacctgcaggacgcttttgcactccattgatcttgatagccctggaattcactgggtgagtcctcttrtgttctaaacctcctgacatggttcagattgaggccttttttcaggtgttttctgttgccacttttaattacaaggatggcttcattgttttggggagtg

SEQ ID NO: 22288 - DNA, 201 bp, Homo sapiens
aagtgggatacagagcagttccctcttgatctctgatgccaccatggacccaagcaaaggtacctgcaggacgcttttgcactccattgatcttgatagcyctggaattcactgggtgagtcctcttgtgttctaaacctcctgacatggttcagattgaggccttttttcaggtgttttctgttgccacttttaattaca

SEQ ID NO: 22289 - DNA, 201 bp, Homo sapiens
cataaggagttgggagttgaaccccagtcacgtacacacccagaaggaatttgacctctttgaactgagccaaatttaaaacttctttaagaagcagctgyatttgatttgaactatttacaccaggtctaatcaccaacctcctgaggagacaactgtgctgaattaagctcattactgcctagagacatacaagctgtc

SEQ ID NO: 22290 - DNA, 201 bp, Homo sapiens
tttgaagtacagaaatgatttcatcagcctgaccattgaggctctagagattcaagcatgtggagaagttctgagtgctcaatctcaatgccaatcatttyactggtgaaaataaggttcatagcttgaataagaggaaacatctatccacctgacatcaggttttgttcctgattaaggatacattttgatactggagtg

SEQ ID NO: 22291 - DNA, 201 bp, Homo sapiens
acatacccacgactgggtaatttatttaatggacttgcagttccaggtggctgcggaggcctcacagtcatggcagaaggtgaaggaagaccaaaggtacrtcttacatggcagcaggcaagagggtgtgtgcaggagaactcccctttataaaaccatcagatctcatgagacttactcactatcatgagaatggcatgg

SEQ ID NO: 22292 - DNA, 201 bp, Homo sapiens
aagagggcataaggagttgggagttgaaccccagtcacgtacacacccagaaggaatttgacctctttgaactgagccaaatttaaaacttctttaagaarcagctgtatttgatttgaactatttacaccaggtctaatcaccaacctcctgaggagacaactgtgctgaattaagctcattactgcctagagacataca

SEQ ID NO: 22293 - DNA, 201 bp, Homo sapiens
ccaggaggcagaggttacagtgagctgaaattgcaccactgcaccccagcccggcaacagagcgagagtctgtctcaaaaaaaaaaaaaaaaaaaaattarctgggcatggtggtacacgcctgtaatctcagctactcaggaggctgaggcaggaaaactgcttgaaccggaactggggaggcagaggttgcagtgaact

SEQ ID NO: 22294 - DNA, 201 bp, Homo sapiens
cgcctgtaatcccagctactcaggaggctgaggcaggagaatcgcttgaatccaggaggcagaggttacagtgagctgaaattgcaccactgcaccccagyccggcaacagagcgagagtctgtctcaaaaaaaaaaaaaaaaaaaaattagctgggcatggtggtacacgcctgtaatctcagctactcaggaggctgag

SEQ ID NO: 22295 - DNA, 201 bp, Homo sapiens
gacaacacgatgaaatcccatctctactaaaaatacaaaaactaggccaggcatggtggctcacacctgtaatgccagcactttgggaggcttaggcgggygaatcacgaggtcaggagttcaagaccatcctggccaatgtggtgaaaccctgtctctactaaaaatacaaaaattaactgggcgtggtgtgcgcctgta

SEQ ID NO: 22296 - DNA, 201 bp, Homo sapiens
taagcccagcacttagggaggttgaggcgcgaggatcacttgagcacaggagtttgagaccagcctggacaacacgatgaaatcccatctctactaaaaayacaaaaactaggccaggcatggtggctcacacctgtaatgccagcactttgggaggcttaggcgggtgaatcacgaggtcaggagttcaagaccatcctg

SEQ ID NO: 22297 - DNA, 201 bp, Homo sapiens
tcttagcactttgggaggccaaggcaggaggttcccttgagcccaggagttcgagaccagcctgggcaacatagggagacactgtctttattttttttaayaaataaatagtttttttaaatgaagattctaaggattttagaagttgtgtgcccagaaacaagatgaagaccaaatatacatttcagagaaatcacaata

SEQ ID NO: 22298 - DNA, 201 bp, Homo sapiens
actcgttagcatacaaaaagacacatcactttgaagattctaaggaggccgggcatggtggctcacgcctgtattcttagcactttgggaggccaaggcargaggttcccttgagcccaggagttcgagaccagcctgggcaacatagggagacactgtctttattttttttaataaataaatagtttttttaaatgaaga

SEQ ID NO: 22299 - DNA, 201 bp, Homo sapiens
tggctataatacctattttcttagctgatatccatttaatcattcatttgataaatatttattgtatgtgacattagtattaactttatagaaagcaatgytgcttttaaagtgattagtagggtgataaatgagctatttgctagtatatccaagttatctagtaagaagggtttactgagcaaagaagtatgggtaata

SEQ ID NO: 22300 - DNA, 201 bp, Homo sapiens
attatatgatttcctttgcatatgttatgtgacatgatgttaacaataatcttctgaaataaatattgccattttatagtcagcaagactgaggctcagaraagtgtaataacctgcccatgcgcacaatcactgtattgcagattctgtatttcagcctcagtcttctacctaaactctttctacatactgtttctattg

SEQ ID NO: 22301 - DNA, 201 bp, Homo sapiens
cagtatgaagccaacaatgaggaatttcttccgagctctcccctggagatggggtggcgggagggcatgcctgcgactgagataactcccaaagcacagcrgggaaggaagaggagaacaatgaggaagaaagggagctgagaagggaggggaagcagacaggagatgaggcggtgcatggaagagagcctggtgccaccc

SEQ ID NO: 22302 - DNA, 201 bp, Homo sapiens
gaccatctctaacggcagcctttgatctcaaaaatgccccagcctctaagtaacccatggcagtatgaagccaacaatgaggaatttcttccgagctctcycctggagatggggtggcgggagggcatgcctgcgactgagataactcccaaagcacagcagggaaggaagaggagaacaatgaggaagaaagggagctga

SEQ ID NO: 22303 - DNA, 201 bp, Homo sapiens
ccagggcagctcattgctgggaaggccacagcacccagctccctctgctgccagattccaggccctgtggacagcatgtgtcacacagcaggtgcacactkactgtcatctcccttccttagtcctggaggtggtctctgctgtggctctgcatgccaccaatgctctctgaccatctctaacggcagcctttgatctcaa

SEQ ID NO: 22304 - DNA, 201 bp, Homo sapiens
ccttcaagatcattgcaaagaaaaactaagttaacataagaaacagtgcctggtggctagtgaacattctacaggtgttggatgctgttgtcatcattgtyatcattatcagaatggacaagacagaaccccacagtcattcatttcagctctctttttggtgaagaaatgtgttgagcatttagctggaaacctggcact

SEQ ID NO: 22305 - DNA, 201 bp, Homo sapiens
tatccttccccaaaacctcagcccaactcagcctcatttttccatctcttctcccttcctccatgggagagctttctgttggcacaggaatagctgagaartgggaaagatcaagtgtagtaaaagctgccccagataatctacagaaaactttgctggaatgaggttgtgcatctctgaacctgagctagatttgttggg

SEQ ID NO: 22306 - DNA, 201 bp, Homo sapiens
aatctaacatgtataattagggtttcagaaagaggacaaatttggcccaaatttttccaaatgagataaaaactaaaaactcatagatcaaagatgctcartagattttaggcagaagaaacatgaaaaattatatatactgagctacattattaagctgctgaaagtcaatgataaagagaacatgttaaaagcagccag

SEQ ID NO: 22307 - DNA, 201 bp, Homo sapiens
gttattgagttgaatgcaataatgcatgtgaggccatgagcagaggctctaagtatattttgaattgtttttccctttagatgttttcccaggtacctggytctctgggcctaggacacataatcccagagggtataaatctagtgcttggtcccaacatggttttgctccctaaatactgaaatagtagacaagacgaca

SEQ ID NO: 22308 - DNA, 201 bp, Homo sapiens
gggtaacaaatgaatatgtctgaacctcagctataatactttctactacctttgcaaggagatgggataggaacaatcactcagaggaggcgttgcatggrcagggtcatagggggaagaaaggtggtttagctgttttatttagccattcagggggctctccagagaggagacggtggtagagggtgaactagagaagat

SEQ ID NO: 22309 - DNA, 201 bp, Homo sapiens
cgaatctaaacaaggaagtagcaagtccattcaagcattaagaggctgattagtggtttattcattctgtctacaagcatctactgatcatctattcagtrcagaccattatcacaacaaaggtgaataagacactatgcaatagccagggaaacagcctcaaaaacagttaaactctaatccagccatgagtacaatgct

SEQ ID NO: 22310 - DNA, 201 bp, Homo sapiens
catttccactgtcctctcttctttcacagccattttcttcctctttctttgctcattgttttttcattattaggacttggctttttaggtcaagactcctrataaaaggactcctttcttctgctgttgccttaccagtcacatatgtggtgctgtctctagtgggctttgctttaaaagcaaaaaacaaaaaaccaacaa

SEQ ID NO: 22311 - DNA, 201 bp, Homo sapiens
gtagagacggggtttcaccgtgttggccaggacggtcttgatctcttgacttcatgatctgcctgcctcagcctcccaacgtactgggattacaggtgtgmgccaccgcacccagccaagtcttattatttttatatggaaccagtacatatctttgtctccccaccaactgtaccagaacatgtactctagtttatcttt

SEQ ID NO: 22312 - DNA, 201 bp, Homo sapiens
atatcacctgatgcaaatggggcatttccacaactggctcgttttacagcctctccctcaaccgatgcctctgacctaatttgtgctgtccctagtgcccrctttattcatggctcaatatcaatggtgcaacatctgattgtattaaatgtataaagaataactcttcctatatctctactatagtggatgtctctctgg

SEQ ID NO: 22313 - DNA, 201 bp, Homo sapiens
ctatacagcccttcctacaccctttcatgaccttttaacaggaaacataaccataatctataaactccaaaaaggagcttccttttttgaaagagctgacrccctggtaggtgattatgccccttccagggccaatcaagccaacaaatcatttcaaacctattacaactccctacaatgcctcaagccccaaggccctcc

SEQ ID NO: 22314 - DNA, 201 bp, Homo sapiens
ccaaccaatcttgttacagacctttattggtaccattatgaaactcccattatccatcctgatcagctccttactattctatgggacttacggcttcaagsaattttccaggactttactcctactcaaataacctttttctccttttgcttgtttctttcaatataaattctgtaatcacatcaaccttaccaatacaac

SEQ ID NO: 22315 - DNA, 201 bp, Homo sapiens
gtcactgtttcacaaactgcctttgttctgcttctgtaagcctgcttgcccgccctacaggttttgcaccatcaaactggtgagcccctttttggatgcaygtatagccaacccccttttggatgcatgtataaaagtcaagccctgtctttgttcggggctcagcctttggatgttaatcctctgggctggtacacacct

SEQ ID NO: 22316 - DNA, 201 bp, Homo sapiens
acaggtgtgagccaccgtgcctggcctcatttccccacttctacataccatctgccatttcatttgggaatatgctgacgaatacctgacacgacccatcrccgacttctctaatcacttcctacagccaggagactgggttctggtaaaagatcccagtcctctcctcaatcctcccctcacacttaaatggaatgggtc

SEQ ID NO: 22317 - DNA, 201 bp, Homo sapiens
caataagataaattttaaaaccacttggaaggccatctctataaaaatgattttcccaggacagtaaccagatgtaacctaacctaacaccatcttaaccrgcagaggttcagtgggctagagctttgtgctcctcccctacaccaagtttttataatacaaatgccacaagaaaaagaacttcagtactgtttcctctta

SEQ ID NO: 22318 - DNA, 201 bp, Homo sapiens
gtcagagaggttagacaactcttccagagtcacacagctgggaagtagcagctccaggagcagaagctggggccgcttcctggtgcaccgatggtcttcargtgttttgtggaaactcgggggcctccggggcgaccttgaggacatggacaaggctaagcaggggttcccttcacccagccctgcccttggtttactcag

SEQ ID NO: 22319 - DNA, 201 bp, Homo sapiens
gacctcaggtgatccgcccgccgcagcctcccaaattactgggattacaggtgtgagccactgcacccggcctttcaaagctcatttcaatcccacctccktcacaaagcattcttcagccaccttcgttttcatcctttttttctctgcactctttctacccttatcatttacttgacactatgcaaattctacatgtat

SEQ ID NO: 22320 - DNA, 201 bp, Homo sapiens
caggagccatggtggtgcagaccaggagctgtgtctagcaaggcttatgccctgccaagcactgccaatggagatgtgaagctgctggtggtatccagcaygcctctggtggacttcctgatgtagctggaggattatacacctatgatcctggatgctgtgactgattattttttatttttgagatggaatctcgctctg

SEQ ID NO: 22321 - DNA, 201 bp, Homo sapiens
agaactcccctttataaaaccatcagatctcatgagacttactcactatcatgagaatggcatgggaaagacctgtccccatgattcaattaccttccacygggtccctcctacaacacatgggaattatgggagctacaattcaagatgagatttgggtggggacacagccaaactgtatcaactatcatacctcttaat

SEQ ID NO: 22322 - DNA, 201 bp, Homo sapiens
ccatccaccccgtgcagtggtcataaaccagagagagaaatgtccacatgaaactatgtgctgcatgctggccatcactcatggatcattaatgaaaactracttggaatcactattttaaggacaggatggcggggaggcatgcttgtaaacagagcccttggcgactcaattcatctgcaactcatttttcatatatgt

SEQ ID NO: 22323 - DNA, 201 bp, Homo sapiens
cccctgtctctagcctctcccaggcctctagccaggccctagcggtggcacaggcttcctctggggccacaaaccagtccctcaaccttagtcaagctggyggaggcagtgggaatagcatcccagggtccatgggtccaggtggaggtgggcaggcacatggtggtttgggtcagttgccttcctcaggaatgggtggtg

SEQ ID NO: 22324 - DNA, 201 bp, Homo sapiens
aacaaactggggagagttgggttagatgatgactaagctgtcttccagctctgagaatcttaggagtttacaaatgtttaggcaagcaaacagtgaaatcyggtctttcaaataaggatttaaaaaacacattcagtccatctagctagattctaactaaccctttctcatactggattgccaggtttttaatctttggcc

SEQ ID NO: 22325 - DNA, 201 bp, Homo sapiens
ggagtctgggtttaggggaggaaggcatggcggcgcccgctaggatttccagttgtcctcttcttcctctgcctgtggctgctgggggttagcagacacgrtttgttgtctgacatacgggctctctcctcccggcccctcaccagccccagaggtgaaaaggctggagggcaaaggctgagtgagggaggtctgtgggga

SEQ ID NO: 22326 - DNA, 201 bp, Homo sapiens
aattatcaattccttctctgtgttatcttcaatttctttgagtttccttaccacagctcttttgaattctttgtctgaaaggtcacatatctctgttttttccaggaatggtccctggtgtcttagttcttttttttttttttttttgagacagagtctcactctgtcgcccaggctggagtgcagtggcacaatctcggc

SEQ ID NO: 22327 - DNA, 201 bp, Homo sapiens
aatcagctcagttctgacactatccacctggagatagcatcagattccacaggttgaggactcaattcccgagactgccctgttttccattcagatgccarttgcaagctccaggttgttttacctgtgcttctgactgaccaagctatacatcgggtttcccaaaaacccctccttgggtttgatggatttgctacagca

SEQ ID NO: 22328 - DNA, 201 bp, Homo sapiens
ccacttttaattacaaggatggcttcattgttttggggagtgtctcaaataagaacctatgagggaaagaaaaaaattatattttctcctctacaatttgrcaactcagttgggaccaatagagacactccactcactccaagacctataagtggaatcctgggagaacttgcagaagccaatataaataggtaggatttt

SEQ ID NO: 22329 - DNA, 201 bp, Homo sapiens
gggattacaggtgtgagccaccgtgcctggcctcatttccccacttctacataccatctgccatttcatttgggaatatgctgacgaatacctgacacgamccatcaccgacttctctaatcacttcctacagccaggagactgggttctggtaaaagatcccagtcctctcctcaatcctcccctcacacttaaatggaa

SEQ ID NO: 22330 - DNA, 201 bp, Homo sapiens
aattgatcctaaatgaagctacaagaagaaacaacatgtaaaaaagactttgggtaagtataaaatattaactataaaacaatgataatgtttagtaatakttaaatttgaaagaaaaaagataatattaaaacatatgacaggtctgtgttctggaggagataaagaaatagattaactttgtaatttaagtaatcacaa

SEQ ID NO: 22331 - DNA, 201 bp, Homo sapiens
ttgttagtatagcgttctatgcttctaccatagtaaatatgtaatcatgtttatcaaatctactcgatgaacattttctgtcaattattaattttcaaatyctccaatatgattgaatataaatttgtctgtttcttcttttttttttttttggagatagagtctcactctgttgccaggctggagtgcagtgacgcaatc

SEQ ID NO: 22332 - DNA, 201 bp, Homo sapiens
catagctgatattttatgtctccctccttgcttttattcccttccccaaatcagctcataagcagaaattcacatttagagcagggtggtcttctgtggcrctattgacatcctatatatgccctgtcctgtaggtacaatgtgagctgtagccatcagttccggctgaagaggaaaaaaatgaaagagtttcaagaagcc

SEQ ID NO: 22333 - DNA, 201 bp, Homo sapiens
cattcaggtagaaaaagacaaaacaagaccccattattcagaagaaaatagctgcagcaggaatgaaatgtacagatagtccctgacttggcagtggtttracttaggatttcttgactatgatggtatgaaagtgatacacattcagtagaaagtgtatttcgcatacccatacagcaattctgtttgtttgtttgtttg

SEQ ID NO: 22334 - DNA, 201 bp, Homo sapiens
atgatacattttattgagccaagagtaaggtagaacagaacagcccagggcaatgaggatggggcaaggaggcaggagtagaaaacagcccccaaaagaarggcaagatgtcacgtgtatataacttacaattctataagtgaagagctatggttctgaaacttttgcttaactccttgccttaattttttatccctccaa

SEQ ID NO: 22335 - DNA, 201 bp, Homo sapiens
agattccatacttgaggaattcagcctcttgctttttctctgacccacagtggacactggaggaaaccttcccttccttcccttttctcttagctcccacyagcctaagggctgtggaaaccagtaccttttgtctgcacccagccccctctcctccctttggtggcttcctgtgtgtccagggctagcgtcttctaggtg

SEQ ID NO: 22336 - DNA, 201 bp, Homo sapiens
aggacctaccagaagatgaggacttacagtaactagccaatactacatttacttaacttctttataaactatcaaactggaaagttactcacaacttttgktctttcaaaattgttgccacctcttgctttgcttccattttgtcagcctgtgctgccagtggcttttagcttctctgggtcagttgttttacattattac

SEQ ID NO: 22337 - DNA, 201 bp, Homo sapiens
cccgccccttcctccagggcagcagggctgaggatcccattctggctgtgtccacgtccgggccatggctggagtctgggtttaggggaggaaggcatggyggcgcccgctaggatttccagttgtcctcttcttcctctgcctgtggctgctgggggttagcagacacggtttgttgtctgacatacgggctctctcctc

SEQ ID NO: 22338 - DNA, 201 bp, Homo sapiens
atatgtgctgctgttttctctggaagcctctttagggaatcgaggagcgcactggtgcaggggctgggtggagccatcctccgatggagcacaggcagatrgaagcccccaccccagctgcgtggcctgaagccagcctcccgctccccgaaggtggtctccacacagaactgggacagttccatccccgccccttcctcc

SEQ ID NO: 22339 - DNA, 201 bp, Homo sapiens
cccatattggtgtttctaagtaaaaatcaaaggatttgtttacttgaccttttattgtacctctttttctcttaagcctgaacatgtgtgctacattaacwtacttatctgctctatcctataatatacttaaaagttttgaaatcatagtaccaatattacttctaacaatagatctgattgaaattgcctttcctcttt

SEQ ID NO: 22340 - DNA, 201 bp, Homo sapiens
ctgagggtcgcgagggaaagatctcttcaggcccctttccttggcttataggggcgtgttctccttgggtatcatgacatcgcctgccttctgtgcatgtytgcatccacgtgtcccctttccaataaggatattagccctttaggctgggtcccgtcctagtagtctcatcttaactaattacatttgtgacagtcctat

SEQ ID NO: 22341 - DNA, 201 bp, Homo sapiens
agagaacagcctcatcttgtacttttggacagaaagataactgagagataggggagcgaaggtcagagagaccttgaggatacttttttttttttttttttgagacggagtcttgttctgtcaccaggctggagtgcaatggcatgatcttggctcaccgcaacctccgcttcctgggttcaagggattctcctgcctcag

SEQ ID NO: 22342 - DNA, 201 bp, Homo sapiens
tcacttgaatctaggaagcggaggctgcagtgagatgagattgcgccactgcactctggcctggcgacagagtaagatgccgtctcaaaaaaaaaaaaaaattggtgttttcttggtttgttttgtgttttagtttaaggagacacatttcctcatcttaaggacttttttgctgctctgatgctggtcatctagtccatt

SEQ ID NO: 22343 - DNA, 201 bp, Homo sapiens
atgactagaaagcactgggtagatagcataagcgctgctggtaaattggcttaaaactaaaataaatgtgggattgttgttattaaacagaacaaatatamacattaagaaacataatataattaacaaaaattgagaagttgtagagagaaaaaggaggtggaaggaagaagaaagctactaatttaattattagcaatt

SEQ ID NO: 22344 - DNA, 201 bp, Homo sapiens
aaacagagccaaaagtatataagcttaaactcgaatttagtaattaatgtcttagcattatatcttatttggaaatgacctagatattcaatgactatccrtaatttaatttagcttagcaaaattctaaaggtaaccattttttattactgtatgttaggtaaatatcataaaagtaagaaacttaaagttaaatacatg

SEQ ID NO: 22345 - DNA, 201 bp, Homo sapiens
ctggagccggccctcttgtgtgattgaattagtcagtgatggttctcaggactagattagattgttactcttaaaataattacttaaaaaaaaaaaaaaaacttccataacttgaaaattttgtggccaggtgtggtggctcacgcctgtaatcccagcactttgggaagccgaggtgggcggatcgcttgaggtcaggag

SEQ ID NO: 22346 - DNA, 201 bp, Homo sapiens
tggaggtcactgtgtaaaatctacgcttctaaataaatgttatgatatctcagcatactataccatacttataacatgtatgcttataacagcatactatwccatatagtatagttcccaagaaaagggaatgtttcttcccccctaaaaaaaggaaaattcccattatctaatatataaaacaaacttttttgatgattt

SEQ ID NO: 22347 - DNA, 201 bp, Homo sapiens; identical to SEQ ID NO: 2855

SEQ ID NO: 22348 - DNA, 201 bp, Homo sapiens
gcttaattgggaaaagtttcattagagtaacaaagtaaatttttctctgtctcacttaccagtgatgagatagccaacggccttggccttgatctcctgcrtcagctgctgggtttcattcagatagttcaagacatagatgttaggagcaaataggaccatgttctgttctccacagccatatggcatctggaggagatt

SEQ ID NO: 22349 - DNA, 201 bp, Homo sapiens
aaaatactaagacaaaagtaaaggttacctgattctacacctgtgagataacactattaataatccaactgtgcatttgtgagatttttttgtatatatakagagaggtcaagtatcctctatgtatgtaatgagcttctgagtatcacagtgtcttctattttttgtttgattgttcgcttttcaggataggagctggaa

SEQ ID NO: 22350 - DNA, 201 bp, Homo sapiens
actgcagcctctgcctcccaagttcaagcgattcttgtgcctcagcctcctgagtagctgggatgacaggcacgtgccatcacgcccagctaattttttttgtatttttaatagagatggggtttcgccatgttggtcaggctggtctcaaactcctggcctcaggtgatccgcctacttcagcctcccaaagtgctggga

SEQ ID NO: 22351 - DNA, 201 bp, Homo sapiens
aagcatgagccaccacactcagccctgttattgtcttttggaagctattgttgatagaaagtgagctttccttttttgtcttaaactttttttttttttttaaacaggatctggctctgttgcccaggctgcagtgcagtggcgtgatctcagctcactgcagcctctgcctcccaagttcaagcgattcttgtgcctcag

SEQ ID NO: 22352 - DNA, 201 bp, Homo sapiens
cacttgagcctgggacgttgaggctgcggtgaactgagatcccaccactgcactccagcctggtgacgacgtgatagcctgtctcaaaaaataataataawaaaaaaattcaggtagtactggaaacctcgaagattccaagattagtcagatccttaaaaggtataccttctggtagtctttttaattgggttaatcttg

SEQ ID NO: 22353 - DNA, 201 bp, Homo sapiens
ggaaattgaatttttgcaactttttgtacttttgtatttttcagaagttcttgtttttaaaatgtcaatgtaaaagcacacacacaataaatgtctccatsaactctttgtccacgactagagaaatggtttagtaaactatatttcttttccttggaaacatattcaatcattaaaattatgtttataaggattacatta

SEQ ID NO: 22354 - DNA, 201 bp, Homo sapiens
ggtgaagatcaagtgagataaggcacacttagcaaaatgcctggcacatggcacaaaattttgtattcctcttcagatgtttatttcataagtatatggamtcctactatcagtcagtttgaccagagaaacataaacactatgagtaacagagtatggtttacgatagagattatgaggatttatcatagggattagagt

SEQ ID NO: 22355 - DNA, 201 bp, Homo sapiens
tcacttgtggcttctaaaacttgttcatgtttcttctgtggtcaactgcaactcagaatcattcagggaaggaagctgggacacttagtttgaatttatcyaagtcgacagagtacaaagccatcacacttttgtattacttataaccctggctactttagtctgaaactaaaaacttggaggcaaaaaacacacagcata

SEQ ID NO: 22356 - DNA, 201 bp, Homo sapiens
aaaaagagctttcttttcttttttctttttaaaaattattcatctattcagaggggaggctgttttgcaatctgcacataattcttgcagctgctgcctgytgccctgactcactgcctccctgtttgcctctagggtggtgttgatgatgaggtctccttgactgcgtatgtcacagctgcattgctggagatgggaaag

SEQ ID NO: 22357 - DNA, 201 bp, Homo sapiens
ccatactccagtccaaccaggcagcttcaactttctccttccctggccccttgaacatttgcctaatccacacccacggcctatgaaagcacctaaaaccsggcacctcataggcactcaacaaatgttagtttacctaattaaaatgtctgtcttcatcaatagctgcctttttcgtcccatcatgaagcccattgtcaa

SEQ ID NO: 22358 - DNA, 201 bp, Homo sapiens
tggaaatgcttaaaaaagaaaatacaaattaccaaatatcagatatctccaagagaatcaaaattagcattttaggctttttcccacaagttctatttctytttatatttatcatttatattaatatgtttgagattgtgtgtgtatatgtgtacatgcacacatacactcaatatgtgcaaatgtgtatgtagttttaca

SEQ ID NO: 22359 - DNA, 201 bp, Homo sapiens
tttattaatagtaagaattgtaatatatgtgtattattaaaaatggaaatgcttaaaaaagaaaatacaaattaccaaatatcagatatctccaagagaaycaaaattagcattttaggctttttcccacaagttctatttctttttatatttatcatttatattaatatgtttgagattgtgtgtgtatatgtgtacatg

SEQ ID NO: 22360 - DNA, 201 bp, Homo sapiens
atctcccaggttcaagtgattctcctgcctcagcctcctgagtagctggggttacaggcacccaccaccatgctcagctaatttttgtattttttttttttagtagagacagagtttcaccatgttggccagcctggtcttgaactcctgacctcaggtgatctgtctgcctcggcctcccaaactgggattacaggtgtg

SEQ ID NO: 22361 - DNA, 201 bp, Homo sapiens
tttatgttttgcattgagaaaaatgttttatataatgatctatagttattcaatattattactgaattctataattttatacttaaaactggacttactayagaatgttgaaagcaaaatacaaaactattttttggtgagatctcaagtttgtaaaatatatatgccttcagaaaagagacttgaaaaattacagcaaaa

SEQ ID NO: 22362 - DNA, 201 bp, Homo sapiens
tccccccctccgttattaactctacagtgtgtattcaggttctattgggaaatcatagaaaggaagtagtgctaggatctgttgggattgcaccctgaggscttcagcttttgcttctctatcagcctttctgttcctttgtgccataggagttaagttcctttgatgccccccacaatggattatagctacggcctttgg

SEQ ID NO: 22363 - DNA, 201 bp, Homo sapiens
ggtaagggtcaaagattcttccctggccctcttccccatggatatgtagatcacccagcaccatttaatgaaaagatcactcttttctttttttttgagasgcagttttgctctcgttgcccaggctggagtgcaatggcacgatctcggctcactgcaacctccacctcctgggttcaggcgattctcctgcctcagcct

SEQ ID NO: 22364 - DNA, 201 bp, Homo sapiens
ctgtcgcccaggctggagtacagtggcacaatcttacctcactgcaacctccacctccctggttcaagcaattctcatgcctcagcctccgaaaaagctgrgactacaggtgtgcaccaccacacctcgctaatttttgtatttttagtagagattgggtttccccatgttggccaagctggaatcgaactcctggcctca

SEQ ID NO: 22365 - DNA, 201 bp, Homo sapiens
gggcttactgctcatttttactgataagaagataataaaaataataaagcattgacttaggtacaaggctccatttagaactaggttctttacaagcctcrcctctaattcatgcagcaatccttactcaaggtaggtgtttcttgcattatacagaagaggaaactgggtcttagagaggtttaggtctcttcccagggc

SEQ ID NO: 22366 - DNA, 201 bp, Homo sapiens
ggattacaggcatgagccattgcacccagccttttctatttttcatttcaagagtttgctttttaagaattaaaattgtgtaattatgacagtttttattrcagtactccaagctagagaaaagcatatataaattaatagttttcccttcttctcccacagttctgtctctgttgttaacactttgctgagtattcttct

SEQ ID NO: 22367 - DNA, 201 bp, Homo sapiens
ttatacaacatctcagattcagcatgctgtgcaggaggtggggagaaaagggtacaaaagaggaaaatgttcagtgaaggtgttattacaatggaggggawtatgaaagtggaaattgataccttttcctcttgggatttaattaagtctataaaattgaggtgttgcaatacataatgtctatgatttttttttaccagc

SEQ ID NO: 22368 - DNA, 201 bp, Homo sapiens
agaggaaaatgttcagtgaaggtgttattacaatggaggggattatgaaagtggaaattgataccttttcctcttgggatttaattaagtctataaaattraggtgttgcaatacataatgtctatgatttttttttaccagctctaaatctctgagatggctgtgttttagagctgcatgttctgcttatttactgcctg

SEQ ID NO: 22369 - DNA, 201 bp, Homo sapiens
tattgagtggctactgtgtcgggcatggtgccacttgctggagatacagcgttgaacaagacagacccaatggggctgcctgggtggagcttatgtttcakactgggaagagagtcaacgaacatccacacatatttcagttgtgagaggtgccatgagggaagagacagactggctggggaaagcgtgatcaggcagtct

SEQ ID NO: 22370 - DNA, 201 bp, Homo sapiens
gactgggagactgagtggggagtgacagaccatgaccttaattactgaccttttgttatagattaacttccttcctattttattgttcctggcccagaccwgatagcacttgagataaaagatcccttgattattacatccttaatgtggaatgttaaatactcccttcccccaaggaatcactgcctaaaaccagtcaga

SEQ ID NO: 22371 - DNA, 201 bp, Homo sapiens
caggcgtggtggcacgtacctatagtcccagctactcgggaggccgaggcaggagaattgctgaacccaggaggcggatgttgcagtgagccaagatggcrccactgctctccagcctgagcgacaaagccagactccctctaaaaaaaaaaaaaaaattattattatttagttttatcttctctatctgttaatgagaga

SEQ ID NO: 22372 - DNA, 201 bp, Homo sapiens
tcaccatcagccaaagtgtgctggtcaccaacttgaaaccagcaaccatcaaggtctatgactactacctaccaggtgagagggctgagctgaaatgagakctgagatcttacctgcatctcccaacttacttctgcctcattcttcatggcttctctcttaattttacaaatactccttcccaagccaagtagcacataa

SEQ ID NO: 22373 - DNA, 201 bp, Homo sapiens
agacctcctcctcctccttacaactgtagatatggaagccagcctttgcaaagtactcagcatattactaaacacttgtctatggaagttcctcagagtcragaaatgctgtcatctgaaataaggaccagctttcaacagcagtggcaaaaccctaatgaaaatgtcagcacaattggaaatttcactaacttgaaagta

SEQ ID NO: 22374 - DNA, 201 bp, Homo sapiens
ttaaaaatagtcagcttccaaattctgtattaactttaccatcaaggcagacctcagctgtaccatcacagcagtatgccacgcaaactgacaaaagaccwcctcctcctccttacaactgtagatatggaagccagcctttgcaaagtactcagcatattactaaacacttgtctatggaagttcctcagagtcgagaaa

SEQ ID NO: 22375 - DNA, 201 bp, Homo sapiens
gatcccttctaattctacacgacttcctgtagcttaccaaggaaatcagggacttaaccagtctttttcagagcaacaggttgattggacacaacagtgtrtatctaagggactgacttacccagattacagaccacctccaaagctataccgttactcaccacaaagctttttaccagattctaccattcaaaaacaaaa

SEQ ID NO: 22376 - DNA, 201 bp, Homo sapiens
caatcaagtacttattaaatatttataaggcatcaaatcctatgttacatgctgcatggaaagaaacagactaaagaaaatttgggtttttttttttttttaattatttttatcttttggttttccttgagaccggatctcactctgtcacccaggctgaagtgcagtggcatgaccacagctcactgcagtctcaacctc

SEQ ID NO: 22377 - DNA, 201 bp, Homo sapiens
tgtagtcaaacctttggattttttttcctatcccacttaaaacaattatttaactctctacatttaggcaagattaaattgtatataaattccctcttatkaatccacccccatgactcacacagaccatctacaacatgcccaagccctctgacttgtccttagccagtcgagtagggaaggaaagaattcagcataagg

SEQ ID NO: 22378 - DNA, 201 bp, Homo sapiens
ggcaccggctcagcaaggaaaaaaggttaaccgtggctccaccaggtaaacattttttccttgggtgcatgtgatgcaaatgattagttgaatagactctycccttccttccggtcactcaggctcacccagctgcagagtatacctttgatgatgtgtaaattcctataagtcaagtaaaaacttccttacacttagctt

SEQ ID NO: 22379 - DNA, 201 bp, Homo sapiens
taatatctcgggtcccacacatatgatcattcacaattatcatatcgggctgagcagggtggctcacgcttgtaatcccagcactttggaaggccgaggtrgacagatcacatgagtttgggcccagcctggccaacgtagcaaaaccccatctctactaacaataaaaaaattagccaggcgtggtggcacgtacctata

SEQ ID NO: 22380 - DNA, 201 bp, Homo sapiens
gctaaaatcaaaaagataggtaaatatttaaggaatcattgtagtattcccaacagttttatagatgaaattttaagttctctgggttataacttgctttstgatgccattataaacctgacggctgagacactggtcgatcacccattaggaatatatgctaaaattgttgctttcagtttttaaaatatggcttaattt

SEQ ID NO: 22381 - DNA, 201 bp, Homo sapiens
tctgagtcttctacttcctgctttccctattcagtctcccatttccttctccagccccatccctggtactagcaagtccctccctgatgtcttcaccatcygttcctttcagacacctgccacccttcacattagcaaaatgacaaaaaataagaataaataaggtgagtatagtagattgcatagtggcccccaaaagat

SEQ ID NO: 22382 - DNA, 201 bp, Homo sapiens
ggcattaccgcttgaccagggagccctcaagtggcccttatgtgggcgtaagagagggctcacctcttgccttcttggtcacttctcacaatgtcccttcrgcacctgaccctatacccgccgttattccttggttatattagtaacacaacaaagagtaatattaaaagttaatgattaataatgtccacgatcatctct

SEQ ID NO: 22383 - DNA, 201 bp, Homo sapiens
aaattctgtttagacgttgagttaaactttctcaactgtattcagtacaggattaagtggttgagatgggccattctgcagttacactgtttccgttccartctgggtctcctcatgtattagctgtgtggaccttgggcaggtaactcctttgtgcctcaaagaaatggagatgacgataatacctacctcagtggggtt

SEQ ID NO: 22384 - DNA, 201 bp, Homo sapiens
ttgggctggctctccatggtttacgaaggagtacctcagtgtcagtgtaattccatcaagaactcatcttcagaggaagagaaacaaaaagagcagtgttstcctttggataccaacagttgtaaacaaggagagagaacttctgatagagatgtcactgttgttcaatttaagagccttgtaaataatccaaagactcct

SEQ ID NO: 22385 - DNA, 201 bp, Homo sapiens
atgcaatgactgttcaaaggttggtttcacccatagccatgagtgtcatagtcccaggaagatgggttgaattcagggccactctaggaattttgcttgcrgtttcataagcatagactattccagactccacatcctttttacctacaatgagtcccaaggcaaacagaacactgtgaagtgggagaccagaattaatct

SEQ ID NO: 22386 - DNA, 201 bp, Homo sapiens
gagtttatttgggacaagaactcaggtgtgtcaactagttttgattatagaaagggggagccagtatagacaaattcagaatccagtgtctacaatatcaygagtccaagaaattctctaaattatgttctggtaattggccaggtaaaatcataaagagcttcctttctctgaaggaaaagagattttcccttttgcatg

SEQ ID NO: 22387 - DNA, 201 bp, Homo sapiens
tctgccataggatccaatatttaattctatttaccgcacaacattgagctcatattcaaataaaaagaacaaagaagaaataaatacacaggccccaaaawtctcttggaactatgagcccaggtcatctgtgagaaccttgagtagtaaaaacaaatcatatccagaggcttataccaaagacaataaaggtaacgaagg

SEQ ID NO: 22388 - DNA, 201 bp, Homo sapiens
aatagcaacaggattgcacagtggctggaagtggtacctgagcaaggcattgtagacctgtccttccaactggcaccagaggcaatgctgggcacctacaytgtggcagtggctgagggcaagacctttggtactttcagtgtggaggaatatggtaggtggggaaatggacaggccaaagtattgggcataatctcatct

SEQ ID NO: 22389 - DNA, 201 bp, Homo sapiens
ggagtgacatgatttgtttcatgtgtgtaagtaattctagatgtagtacagaggacggataaaaaaataagactgcaggcaagcagattccttaaaattgyattcctatagttttgtcaaaatactattgagggccataactagataaggataaagaggacagatctaggaaaccaaggcagatttttaaggagggaaaag

SEQ ID NO: 22390 - DNA, 201 bp, Homo sapiens
accatgcatgcctttttaaattttatttttattttagtatcttcatttcctcaacctcccaggctcaggtgatcctctcacttcagcctccgacgtagctwggactacaggcatgtaccgccacgtctggtgagttttttgtttgtattttttgtagagatgggtttccccatgttgcccaggctggtttcaagctcctgg

SEQ ID NO: 22391 - DNA, 201 bp, Homo sapiens
gctggagtgcaatggtgcgatcttggctcactgcaacctctgccttctgggttcaagctattcttctgcctcagcctcccgagtagctggaactacaggckcctgccatcatgtctggctaatttttatatttttagtagagatggggtttcaccatgttggccaggctggtctcgaactcctgaccttgtgccgcccacc

SEQ ID NO: 22392 - DNA, 201 bp, Homo sapiens
taaaatgctctgggttcgggagtgtcttcctggagatcactaagggcttcaggactccttgagatggagttttcttttctctctctctcttttttttttttagtattttaaaatgtatttcgttaattagcagcagtatgccaaagttgttccattattatattttgttcattcttttgtacaagtgtcttccaatgtgat

SEQ ID NO: 22393 - DNA, 201 bp, Homo sapiens
taattataccactatactgtcattaataatggataaatgtacttcaaagtaatttattagtttgtctgtgaatatgtctttccttgtctcttttccccctyacctagaatgtaaacaagagagaagagaactccagatctgattttcatggaggaaggtgatacagatcattatggctgtaaggggaggattcttgtgttt

SEQ ID NO: 22394 - DNA, 201 bp, Homo sapiens
tcccttactgtctgcctaaagcaagctggctaacttcttacacctgtgtattatacagcaccagtctttagggaaaggaacttcaggtgggtagggtagastatagcaatagctggcaagaaaaaaaagatttgaagaaacaaactctgtggtgccctagggagcagatgtgggatggaaaagtgaggctgggccttaaat

SEQ ID NO: 22395 - DNA, 201 bp, Homo sapiens
ggcaggagagtttccctgaggtgataggaaccaaggtctgatgagagtaggctgaagagcaaatgtggagaaacagagatggcaagaatcaacagttcatrtcaggattttgctgtgaaaggcagcagagggatggggtaccattattttcattttgttttgttgttggtttctgctgcagtggtagtttatgttgagatg

SEQ ID NO: 22396 - DNA, 201 bp, Homo sapiens
ctcctagagcagtcacctagaatcctagagaaaaatgtctttccaaaaggaagaaatgcagaactgtgtgagtaaaatgaagctaagaattaattactggrtttggcaagatggaggttgctgatgacttggcaggagagtttccctgaggtgataggaaccaaggtctgatgagagtaggctgaagagcaaatgtggaga

SEQ ID NO: 22397 - DNA, 201 bp, Homo sapiens
tgtgagatggacataaacatagtactgtgctgtcatgttgtaaaatgggacctctcattgagaagctgggttggtttgggggtggggagtatgacatcaakagttctgttttgatcatgtttagttcaagatgcctgttatggtcaggcaccgtggctcacacctgtaatctagaactttgggagactgaggtgggtggat

SEQ ID NO: 22398 - DNA, 201 bp, Homo sapiens
gggggttgaggctgcagtgagctgtgatggtgtcgatgaactctatcctgcagtacagagtgagaccttgtctcaaaaaaaatcatctttacagttatttkattatttgcagattttcagtgtttattgtttttactttccttgccccactattctgcattcatcaaatattcattgaacactgtctttttgccagagact

SEQ ID NO: 22399 - DNA, 201 bp, Homo sapiens
catggtgccgtgtgcctatagtctcaactactttggaggctaaggcaggaggaatgcttgagcctggggggttgaggctgcagtgagctgtgatggtgtcratgaactctatcctgcagtacagagtgagaccttgtctcaaaaaaaatcatctttacagttattttattatttgcagattttcagtgtttattgttttta

SEQ ID NO: 22400 - DNA, 201 bp, Homo sapiens
gcttgggaggctgaggcgggaggatcacttgtgactgggagtttgagaacagcctggggaacatagtgagaacccatcaggaaaaaaaaaaaaaaaaaaargttgattaaaaaaagaaaaacaaaagaggccaggcacggtggctcacacttgtaatcccagcattttgggtggccaaggtgggaggatcgcttgaggcca

SEQ ID NO: 22401 - DNA, 201 bp, Homo sapiens
aagaatcaggaagatctcaaactaaatgaaaaggccaacactaagatgacaaagacattagaattatctgaccaagattttaaagcagccacgacaaaaatgcttcagtgagcaattatgaacatgtttgaaataaatgaaaacataggcttggcaaagaaataggaagcctcagtaaaaataagatagaaaactataagg

SEQ ID NO: 22402 - DNA, 201 bp, Homo sapiens
cgcttacaggataattctatctacattgtgctaccataatgggcggggagggtgttaattttttttttttatcaagatagggtttcactgcattgcccacrctggtctcaaactcctagcctcaagcagtcttcccaccttggcctcccaagtgctaggattgagtgtgagccactgcacctgacctataattctggtttt

SEQ ID NO: 22403 - DNA, 201 bp, Homo sapiens
ttgcaaataaaaaaacctaaatataactaaaaagtatccagatgaataggcagaggttagatctagccctgactcacatactgagcttttgtgtgatcctyacaagagactttaacctttttattggcttcatttttctctgctgaaaaatggagaggcaaggctacataattactaagattatgaatagatacagagttt

SEQ ID NO: 22404 - DNA, 201 bp, Homo sapiens
acatctagctgcaagagagacttgggggaatataatctctacttacattccaagtgactacatacaaactgactttgtacccagctaaccattactaacawgaaggggaaagaaacaaaaaagaaggggaggcctggcgtggtggctcatgcctgtaatcccagaactttgggaggctgaggcaagcagatcacttgaggt

SEQ ID NO: 22405 - DNA, 201 bp, Homo sapiens
tgatccctcattccctgaaaagagaggagtctttgtcaaaggtggaaattctatgtatcctagacatagcataatttgatgtgaatggaagctggaaaaaygagatcacttggagacagttttatgggttttgtggcgaaggaccaattttgaaattgagacagtattgcttcattcttagagaaactgagcaggaattgt

SEQ ID NO: 22406 - DNA, 201 bp, Homo sapiens
ctatgaggggaatctttcccaagcctgaccagttgacaaggctttctggcacactaggttgtaaatctcttagagagaagacagtgtaaagcttggctctygagtaaacaaactttcaggtccatgagattgcattctccctttgcaagtttcttactggtgaccatttaagactactctattgatgaatatcacttgtac

SEQ ID NO: 22407 - DNA, 201 bp, Homo sapiens
tgatactctgtctcaaaaaaaaaaaaaaaaaaaaaaaaaaggaaaaaggatgaaatcacaacttggagcaaaaaaacccaaaggcatatttaaagatttgygtattgggttaaaacaagttttaacatctggaaagaaaaagcatccatcaacttttcttatcaagaaatatgaattatagccaggtccagtggtgtgtgc

SEQ ID NO: 22408 - DNA, 201 bp, Homo sapiens
tacaaaaaagctccgttcagtgggaagtgggaataggggtgggctcaggtggtggtacttacacaacagcagtaataacagaaaaggggaccatattgttrgaggctggtcaacagaatctctttgtaggaatctaatttaaccaaataatctgaaatgcagataaaactttatgcattaagatattcattataataatat

SEQ ID NO: 22409 - DNA, 201 bp, Homo sapiens
ttaattggagttacctccaattgcctacttcttattctattcctatcaaaaacccagctgacaggtacacaaggggcatagcccaaattacatgtaatccrtaaatctctccattttttcttaagtcttagttttctcttgatataggattttttttttttttttttgagatggagtctcactctgtcgccaggctggagt

SEQ ID NO: 22410 - DNA, 201 bp, Homo sapiens
ttgggggagaaagagaaatatatgatgatgatactggtcaatgttccctattcttcagtttttaaaatattttttaaaattcaagttcaaactaatatatrtgctaaaataaatatgaaactaagcacatagtttgtattagcatctaatatcatgatgactttattttactttttctactttattttttcattctccata

SEQ ID NO: 22411 - DNA, 201 bp, Homo sapiens
tgggcaacgtgaggaccgtgtgcacacgcatgcaggtggtttatggagaagaatgtgaccaatgagtcgagtattcttgatggccagttggatggatcctytgaaagctgcaatccccattgtgtgtagcagctgcagctgagccaagaacagccaaggttgaggatggggcagggaatccacagatgcttttctgtgtga

SEQ ID NO: 22412 - DNA, 201 bp, Homo sapiens
actgtatgccattctgcatttctttgtttattagtaatacattcagttcaggctaggtagtaatcatatctgggttggatgttgccccaataaaaaaaaaattaaatttttttcttcctgaaaaggaaagtaatttgtgatcagataacacagaaaacaacaaaacaaaaatcatacataaactcaccaggagggtgtgta

SEQ ID NO: 22413 - DNA, 201 bp, Homo sapiens
ctcgttatctttggatatgcccaaatatagcaatatgacttgtgaagacagagaaaggatctaatgaagtggaagttagtgttgagtactaagaagaagaygagacagttttcaggataccaggacctcctcatttccctccaacgtgaacaactgttaaaaacagagctactctctggttccttctttctgagacagggt

SEQ ID NO: 22414 - DNA, 201 bp, Homo sapiens
ctggcagagtcatcctttagtggaggggtgatgttggaaacagagatagccaaaagtagcttcatccatcaaacccctgtaagaacatttttggaagctayattcaatcattcactccgtattttgatatgaaagctatagaagagacgcagacgtcctctaactcctacaccaatgcagtgatcattgacaggtccacaa

SEQ ID NO: 22415 - DNA, 201 bp, Homo sapiens
aatgtggatatataattagttactataatttttttctcaaaatatctcagatttggccattggaagccccttcagacaggctcctgtctccttttgacatrtcctcatcatcttttaaatgcatgttgtaactctggcatcacaagatgtgtctggcttattttgctccagccctagaatcagtaacttctccaaagaccc

SEQ ID NO: 22416 - DNA, 201 bp, Homo sapiens
agtgcctgacatagtacagtgctttgtaaatacttgccgagtgaatgaacaacaaatgaatgaatgaattttagtattattttgcagtttcaaatcaaaastattttgtctaatgtccctgggtgacctagtacacgttctgccacagtttttgagatgaaagaacgaaaattctgtgatcaaagagaacattttaaagat

SEQ ID NO: 22417 - DNA, 201 bp, Homo sapiens
attaatgagcctatgcaattgcgcattttacttaggtctatcctaaagaggaagaggttaagataattattcagaacttttcaggaagattgtcttagaawtgaaaatgttggaggaaccacattccctcccctccagcaaatggaggaaagtaaagttacttacttcactgccaccaactcccagatccaagtctcagga

SEQ ID NO: 22418 - DNA, 201 bp, Homo sapiens
aagtccagcatcttcagacaggcagaaggcccctgccttccactcggtgatggtgtcagggactgttactcctacctcagccacacctgatgagctggggrggagggcaagtgaagaacagaaataatgaatgtaagccaccttttctcaagtgagaattaatatgcataaagctaacgtcaagaactgaatccacttaag

SEQ ID NO: 22419 - DNA, 201 bp, Homo sapiens
cccattgagtaggggaaaagaggaagtgcccttttagcagtaagggtaaaagggagttgtggcagtctacaaatcatttctgtaaggtagctctgcttttyctcttttccattctttttttttttttttttttgagacgcagttttgcgcttgtcccgcaggctggagtgcagtggcgcaatctcggctcactgcaacctc

SEQ ID NO: 22420 - DNA, 201 bp, Homo sapiens
ctaaattacaaacccattgagtaggggaaaagaggaagtgcccttttagcagtaagggtaaaagggagttgtggcagtctacaaatcatttctgtaaggtrgctctgctttttctcttttccattctttttttttttttttttttgagacgcagttttgcgcttgtcccgcaggctggagtgcagtggcgcaatctcggct

SEQ ID NO: 22421 - DNA, 201 bp, Homo sapiens
tcatggaagaattcccattctgccactgagcctctctgttagggacttgaaaatggaaggtagtgcagttctttctgaccatctgccaggcaaggagcccmgggcttctaggggtaagttcgtcccttttcccaagtctttcactttgcactcttcattcagagttaaatggcataaaactcggattttcaaagccagttg

SEQ ID NO: 22422 - DNA, 201 bp, Homo sapiens
gattcctccagtacaatctatcttatttgttcaaatgacaccatcagctatgaaactatctgtgaattttgcctctattctcataggcatcatatcactcrgcactatgttttaaaggaagaaaggtaatactatctgctttctaattgattaatagttacagctgagaacagaccccatacaatctcatccttaaccatg

SEQ ID NO: 22423 - DNA, 201 bp, Homo sapiens
tcagtactttggtcataccagccacatttcaaaagctcagtagccatgtgtggcaactgggcatattggcaacacagatacgtcatcgcagaaagttccaytgggcactgctagcctatgctcttgccttaactttttcaacactatgccatgccatgcacctattgatttgtttatgttccactagaatacatgctctgg

SEQ ID NO: 22424 - DNA, 201 bp, Homo sapiens
aacatagtagtcactagccatatatgacaattaaaattaattaaatgacaaaataaaaaattcagtactttggtcataccagccacatttcaaaagctcartagccatgtgtggcaactgggcatattggcaacacagatacgtcatcgcagaaagttccactgggcactgctagcctatgctcttgccttaactttttca

SEQ ID NO: 22425 - DNA, 201 bp, Homo sapiens
ctgtgagctcttcttttctaattgaatctactctctaagactctttgctgctggaatatgcagcagtagtttgagagacacttctcagtcagttctaacaygtttagctaggttcttcctattttttgtgcttcatcagatcatttgggctcagtgttttctttctttttatttttttctttttttttgagacagtatctc

SEQ ID NO: 22426 - DNA, 201 bp, Homo sapiens
ttaggaatttgttctaggggtgcctagaaccctgaaaaaattgagccacttagtagtgtcccttcaactgagaatatttgggaatctctttcccaaattarttaactcagaatggagatggaatctctatgtctttgtttttaaaaagctccccaagtgattctaatgggttcgtaaggttgagaaccactgcttgagaga

SEQ ID NO: 22427 - DNA, 201 bp, Homo sapiens
tagtcagaaaatgtgtgcctttaagttttgcttctgaatagacatattctgctaagcaagcaatctcctcttagactgcttgctgagcacatatactttcygtatgctgatttttaaagtgtctgtatttggttggtggctttagtaataagagactagcttttaacacagccagaagaagctgatgtgaaccagcagaaa

SEQ ID NO: 22428 - DNA, 201 bp, Homo sapiens
ttaatactaaaagcctcttgatctgtttcctatatcctagtcacaactgaattttaagaaagtcgaggtcatgttggtaactccatgtcaatactgctttktgtactaactgcaagatcaggaatcgtccctcattacttccatcttggctttcaaaagagcctactgtaattttttcttctgaaatagtatgaaataact

SEQ ID NO: 22429 - DNA, 201 bp, Homo sapiens
gtggtgctacttagaagctgagaggttatgaaccttatatgcaaccatagggaatagtgttgttactataaataatgattgtactgaaccttatatgcaayagtgaataatgttattataaataatgattgtactgaaccttatatgcaacatagggaataatgttattataaataatgattttcagactgaggcagtttt

SEQ ID NO: 22430 - DNA, 201 bp, Homo sapiens
tgcctcagtacccctttcaacagtgggtagattatccagacagaaaatcaatgaggaaacagtggcctgaataacattatagaccaagtggacctaacagrcatacacagaccatctcatccaatagcagcagaatacacgtttttctcaaggacgcttggaacattcacaagggctagattatatgttgggccacaaaac

SEQ ID NO: 22431 - DNA, 201 bp, Homo sapiens
tatttggcaggggaagcagagactctgccatcttcaagccactggtagagcccctttcacatgacctgggaggtaatttcacaagcaaagaagtctaaagraaaggttgtacctaatttaaattattgcttttgtcatattctctaccactcacaggaatgttttattattaatcacaaatcataagcaatttatactctt

SEQ ID NO: 22432 - DNA, 201 bp, Homo sapiens
aaatttttgttctctatttgtcttttaatttgaggattctttaaatgtaaaaatctatagtttgtaaaatctccttaccatctttttttttttttttttgrgtcattttcactcttgttgcccaggctgcagtgcaatggcacaattttggctcaccgcaacttccacctcctgggttcaagcaattctcttaccttagcc

SEQ ID NO: 22433 - DNA, 201 bp, Homo sapiens
gggtttccccatgttggtcaggctggtctcgaactcccgacctcaggtgatctgcccgcctcagcctcccgaagtgctgggatcacaggcatgagccacckcgcctagcctgttttttgtttttttgagacagggtcttgctctgtcacccaggctggagtgcagttttgcagtggcatgatcccggctcactgcagcctt

SEQ ID NO: 22434 - DNA, 201 bp, Homo sapiens
aaaggcacatagagaaaaagcatacagatttattaacgtgcacacgtgagaatcacagaatgattgcccagtatcccaatggggcccaaatacttacatawtcttatttcagaggggaagaggagatagggaatattggtattctgctgagtaataattgattactgtggagaatgaatggatgagggaacagagactgat

SEQ ID NO: 22435 - DNA, 201 bp, Homo sapiens
agtacaatggcatgatctcagctcactgcaacctctgcaaaacacaaaaattagctgggtatggtggcatgcacctgtagtcccagctactcgggaggctraggcaggagaatcgcttgaacctgggaggcagaagttgcaatgagccaagatcacaccactgcactccagcctggcgacagagcgagactccatcttaaa

SEQ ID NO: 22436 - DNA, 201 bp, Homo sapiens
cccaggaggtggaggttgcagtgaaccgagattgcgccactgaactccagactgggcgacagagcgagactccatctcaaaagaaaaaaaaaggcacatakagaaaaagcatacagatttattaacgtgcacacgtgagaatcacagaatgattgcccagtatcccaatggggcccaaatacttacataatcttatttcag

SEQ ID NO: 22437 - DNA, 201 bp, Homo sapiens
aggctttcagctgcacactgacctatcaccccatgtgaggcagagacagaaatgatcagaatatggaacgacatgaacacatagaattggggccaagtgtragatgctgcagtaaattgggatttgtaagaaaaatgtatgtcacatagattcatccatgctttaagaagcatggcaatggcaatgatacaaatcaagatt

SEQ ID NO: 22438 - DNA, 201 bp, Homo sapiens
caccccatgtgaggcagagacagaaatgatcagaatatggaacgacatgaacacatagaattggggccaagtgtgagatgctgcagtaaattgggatttgkaagaaaaatgtatgtcacatagattcatccatgctttaagaagcatggcaatggcaatgatacaaatcaagattggttgtgtattaggaggatttggcat

SEQ ID NO: 22439 - DNA, 201 bp, Homo sapiens
gcaggaaattccattagtcttacaggatgtattgtgtgagcatgatattaatggttctttgttgtctcaagagtgaccgcccggtgttgcattcttacagktgttagggactcccaaaaatatgttacctccaccaacagggttttgatgactgtgtcttttcttttaatctcagggacctcaacaacctcatttccacag

SEQ ID NO: 22440 - DNA, 201 bp, Homo sapiens
atctcctgacctcgtgatccgcccgccttggcctcccaaagtgctgggattacaggcgtgagccaccgcgcccggcccctgttgcatatgttaacaccccwttcccaacaaatcgaacagtgggcacagactaggagggtactggaagaccacatgctcaaggatgctgatcttggagggggcagggtgcgtgtgaggaat

SEQ ID NO: 22441 - DNA, 201 bp, Homo sapiens
gatgattctgatacgtgctcttggttaagaatcactgctctggttttcttcccagtgcctcttacccaccactgttagatcagttctttaaacaccacttmaactcccacttttgtcagcaacctcctcttgacagtcaagctccttagtctggcatgtagcactcaccattacttggtgtgagtcctgaattctgagcag

SEQ ID NO: 22442 - DNA, 201 bp, Homo sapiens
gggacagacgtttctctggaggtaagcatggacggaggaccagcttcctagaaaggaaggcttccctgaaggaaaacttcagaattttcctgtttcctatyctcccctctgcttggaattacatctttctcactcacaagtcctgctctcccgttgacaaaaagttttccttagatgctttctgtttttaatatcaatcaa

SEQ ID NO: 22443 - DNA, 201 bp, Homo sapiens
gcaatttggtgatttctcaaagatcttaaaatggaattaccatctgacccagaaatcccattattgggtatatacccaaaggaatataaatcattctaccrtaaaggcacatacatgcagttcattgcagcattattcacaatagctaagccatggaatcaatctaaatgcccaccaatggtagactggataaagaaaaca

SEQ ID NO: 22444 - DNA, 201 bp, Homo sapiens
cagagttctctcactctcattatgatgaagaaaaaatgttttcttaatgacgattatatattatcaggaaaaaagggctatttccattaataaataaatayacccaaatcagccaagttaacacttgtgttccttcctatttctctctgcagtcactgactgccacctcaaagagaaacagcagtctcatctcagccgctg

SEQ ID NO: 22445 - DNA, 201 bp, Homo sapiens
ccttgatcaagtttgccgaagaaggaatcatatgcctcccctttgtttagtttactatcagattgatgggaattctagatgcccttactcttattactgtsattccctaacagcctgttcaggaatgcctccaagctgtatcttggatcgagttaaattcagcaactccttactacaaagcaacactcggaaatagaccta

SEQ ID NO: 22446 - DNA, 201 bp, Homo sapiens
tggccaacatggtgaaaccccatctctactagaaatacaaaaattagccaggcgtggtggtgcgcacctgtaatccgagctacttgggaggctgaggcatragaatctcttgaacccgggaggtggagattgcagtgagctgagatcacaccatggcactccagtctgggcaacacagctagactcagtctcaaaaaaaaa

SEQ ID NO: 22447 - DNA, 201 bp, Homo sapiens
tggacatgtaggttgtttctactttttggttattatgagtaatgctccagtgaacttcacatgtaagtctctgtgtggacatatgttttcatttcttttcrgtaggtacctaggagcggaattggtggttcattttatgttttttgagaaattgtcaaactattttccaaagtggccacaccattttatatttctagcagt

SEQ ID NO: 22448 - DNA, 201 bp, Homo sapiens
cccgtgcctgacactgccctaattagctgacactgctctgctttgctgaagcacagggaggtctctcgagaaagatccagaagggaccatgataaatcggrcaaaatattccttgagagcctgaggttcacatgagagctcagaggaattacaataaagatggattaggaaaatggaatattaggaggggaaagactagag

SEQ ID NO: 22449 - DNA, 201 bp, Homo sapiens
agtgatgctgtctgaagtcaaatcctcttccacctctatgggaatccatttccatatctataaaatgggtatcatctttcttcaaaatatggctttgaggrataaataagaaaaacagtacgatatgcctagcagagtgcctggctaatggtaattcatcaatagaggttagctattatacttccaatccttattcttcaa

SEQ ID NO: 22450 - DNA, 201 bp, Homo sapiens
cagtgtgctgatggttggaggtggtaatacagtttcttggttaaggtgtggtctttggaatttgactgcctgtttaggtcctggctccccactattagctktgagaccctgggcaaattacttaacttttctgtggctcaggttccagatgtaaaatgaaatttttaaaaaagcaacacctttaagttttcttaagaatta

SEQ ID NO: 22451 - DNA, 201 bp, Homo sapiens
ggcgggcggatcatgaggtcaggatatcgagaccatcctggtgaacacggtgaaaccccgtctctactaaaaatacaaaaaaattagccgggcgtggtggygggcgcctgtagtcccagctactcgggaggctgaggcaggagaatggcgtgaacccgggaggcggagcttgcagtgagccgagatcacgtcactgtactc

SEQ ID NO: 22452 - DNA, 201 bp, Homo sapiens
gcggatcatgaggtcaggatatcgagaccatcctggtgaacacggtgaaaccccgtctctactaaaaatacaaaaaaattagccgggcgtggtggcgggcrcctgtagtcccagctactcgggaggctgaggcaggagaatggcgtgaacccgggaggcggagcttgcagtgagccgagatcacgtcactgtactccagcc

SEQ ID NO: 22453 - DNA, 201 bp, Homo sapiens
ccgtctctactaaaaatacaaaaaaattagccgggcgtggtggcgggcgcctgtagtcccagctactcgggaggctgaggcaggagaatggcgtgaacccrggaggcggagcttgcagtgagccgagatcacgtcactgtactccagcctgggcgacagagcgagactccatctcaaaaaaaaaaaaaagaatagcagcta

SEQ ID NO: 22454 - DNA, 201 bp, Homo sapiens
cctcccaaagtgctgggattacaggcgtgagccactgtgcctggcctacattatgttatttaatattctctctctctctctttccactgcccaccaccccmctgcccgcccccaagggattggtcattgccattttacaaatcgggaattaagaccctgagagcttaagtagccaacataaagaacatagccaaaaggagt

SEQ ID NO: 22455 - DNA, 201 bp, Homo sapiens
tataattaagtccagagtcttattttcagagataagtacttgatccctacttttgtgtgtcaatttgaatttaattttttaatgcatgtcttttaatactrccctttattatagatgcagacgttaatgaagaatccagtcccatttgtacaaatgccaaggagtttaccctctattgaagggatgaaatgttggtagagc

SEQ ID NO: 22456 - DNA, 201 bp, Homo sapiens
ccaggctgcctggcagggcaccacggagggctggggaaatgggaatatagatgccatgatgatcatattaatgagggtaaaaattaggaccaacaggggaygtcccctctgcacatgtgtacaagtgtgtgcctttcacagacaatagaggctgaagtcagggaggcagcatgcacaggcaggcctggctcagacaggggc

SEQ ID NO: 22457 - DNA, 201 bp, Homo sapiens
tgatcccagcccacctggacatatctagcaattctgcagaccagcacatacttctggaaagatgttgcatggtgatttatagatctgtgtggacacataamacctttacaatggagtgaggtcttgaaatagccctgctgttgctgcccattgagagataagtattctcctgaggtattccccaacagctggaaatgaagt

SEQ ID NO: 22458 - DNA, 201 bp, Homo sapiens
tgaggcaggagaatggcgtgaacctgggaggcagaggttgcagtgagccaagatcatgccactgcgctccagcctgggtgaaacagcaagactccgtctcaaaaaaaaaaaaaaaaaaaaaaaaatctgcctttctttacctacaactgtcttggtaaattcttttaccaccatcccaccagcctggatagatgccgctca

SEQ ID NO: 22459 - DNA, 201 bp, Homo sapiens
cctcctgctttatcctgtatccaattaaaatgatccctcgtcagtttttcctctgattcaaacattttaccccacattgtttctgcaattagacagaaaartaagcatctgtgaagtcaacctttttgctttttttactctgaagtgctgctttttttttcagtaagttgtggttttaaaaaaatccagttatttgaatga

SEQ ID NO: 22460 - DNA, 201 bp, Homo sapiens
ctctttgtactctttctctttatttctcagaccagccgacacttaggaaaaatagaaagaacctacattgaaatattgggggcaggttcctctgataattrcatatggacattttggttatctggagggaaaaaaacaaacccttatactttataatattctaaaatgtgggccaggcatggtggctcacacctgtaatcc

SEQ ID NO: 22461 - DNA, 201 bp, Homo sapiens
cttttggtttcctacacagtttcctctcttgtccttccccctccattagctctctacaccaatgtagcatatattctttcttatttttctctgttcttgtmcacacacacacacacacacacacacacacacacacatttaaaggcttgtgtgggggaggggtcattgtttcctaaaacggcaccacagtacacttacttt

SEQ ID NO: 22462 - DNA, 201 bp, Homo sapiens
tgttcagaagtcactgctgctgctacttctacaaggcaaacaaaggagagcccccatccctcagaacctgtttgctgggatccacctcaggcagcagaacrgggacatggaccaggctgcctggcagggcaccacggagggctggggaaatgggaatatagatgccatgatgatcatattaatgagggtaaaaattaggac

SEQ ID NO: 22463 - DNA, 201 bp, Homo sapiens
tcacctctaggcatccctagtgcctagtattgccatctttatgtccataagtacctgatgtgtagctctcatttgtaagtgagaacatacggtatttgttwttcttttcctgcatttctttgcttagaataatggcctccagctgcatctatgttgctgcaaaggacatgattttgattttttatggctgcatagaattcc

SEQ ID NO: 22464 - DNA, 201 bp, Homo sapiens
cttgtcaatctttaggaaaggtccttagacctttaatcaaattgatttccaaattataaataatttagcaacattaataatttaatttcccagaatggaayaaattaaaagcaacagattaaaatgtgatgaaaggtaggcctccgcattacctatgagagtagttagtaaaaaaaaaaaaaaattagggctgggtgcggt

SEQ ID NO: 22465 - DNA, 201 bp, Homo sapiens
gccaactttttatttttatttttaatagagatagggtatccttacattgcccaggtgtgcaatgtaagtctcgaactcctaaactcaaatgatcctcctgycttggcctcccaaagtgggcatgagccaccacgcccagtcatgaaaatcagtccaagaggtctagcacttcttgcgtagcacttcagaatacaataggtc

SEQ ID NO: 22466 - DNA, 201 bp, Homo sapiens
ctcacctctaggcatccctagtgcctagtattgccatctttatgtccataagtacctgatgtgtagctctcatttgtaagtgagaacatacggtatttgtytttcttttcctgcatttctttgcttagaataatggcctccagctgcatctatgttgctgcaaaggacatgattttgattttttatggctgcatagaattc

SEQ ID NO: 22467 - DNA, 201 bp, Homo sapiens
cctcccaaagtgttgggaatacaggcatgagccaccgtacccagcagatttcattattttttaatggctgaataatattccatcatatatatgtattataycacattttctttattcattcatccattgatgggcacttaggttgattccatattttggttatttttatttttttgagacagagtcttgctctgttgccag

SEQ ID NO: 22468 - DNA, 201 bp, Homo sapiens
tttattttctttttaagaaatcaagtctacttaatatgataataatatagtcaaagaagtacacagccacgtatggctggatttgatttcttatccaatasctggatctgagaaaaggttgttcagttacattccagaagcttcagtagcaaaactgctcttttttcccccaacttttactttatattcagagggtacatg

SEQ ID NO: 22469 - DNA, 201 bp, Homo sapiens
aaatcatttcacaggagttgctacagcagcatggaaagcttttttaatattattatattctcaaagctgtactatgagtcgggggtaaagaaaaaagcccmaaaaattttccaattctcaaattatagcttttacggcaggaaagcattagaatacacctccacctgtaacataaagcaagcaaaccaccagatatctcca

SEQ ID NO: 22470 - DNA, 201 bp, Homo sapiens
gatttgatattgggtgatgaccaaacacagttggtcaaatcctccctctgggagttggagagacatagaaggaaaggaacagaaatgccagtggtgataayagggacagcagaaggaagaggagcagggactgaaagccactgagtcagagtacactgaggcatatgagcaatacctgagtggaatctgtggttgcagggc

SEQ ID NO: 22471 - DNA, 201 bp, Homo sapiens
aactcttcaaagctttaatgattcagtgattcatgattcaatatctgcagggttaggccatttatagagtaaatttgcaagtaaaaactattattttcttrtattattttactacccttactttccattgccaacataaactcttactttttaaattgttttctggacaggcaatttgacacaagaaacccaatattgttg

SEQ ID NO: 22472 - DNA, 201 bp, Homo sapiens
gcaaatacttgaaaaaaatgtaggatccactggcttatatcttctgtgtaggcatcaaaacagatggtggtggggttgttgggaagatggtagcagacagrgttgcttaaaaatataagacttccttgatgtccaagaatactgagatttatatgattagaaatttctatacaaagctggaaacagtggagcatgttccca

SEQ ID NO: 22473 - DNA, 201 bp, Homo sapiens
ttaagaacttactaggccttcagcaacaaatatacatgtaaagtgccatttactaaaaatggattaacatgtcttaagtgcttatagcatcctagtgaagwtcaatcctttgctatgcaattttacaggttgagaaataaacacttatgtaactataagtaaatatgttcagatgtaatcattaagatgggtcatagaatt

SEQ ID NO: 22474 - DNA, 201 bp, Homo sapiens
agatttggcctgagggatggcgggatctgagcaaatctcagtgggttgtgacagcgtgtgtggcttgatagtttccttgtttgattctcacatagtgcccmcccacagacagcttttttttttttaaagatggagtttcgctcttgtcaccctgctgggttcaagcgattctcctgcctcagcctctgagtagctgggatt

SEQ ID NO: 22475 - DNA, 201 bp, Homo sapiens
ctgctccttcctggttcagcagcctattttccatggaagatgcgtgtctgacacagagagaaactgagctcctagttttctaatgtccatcccaacgtatygtgtcccctctggatattctccccaacctcaggtcagtcctttcagtctcctccctcggcttatacaacacagggtgcctcaccgctagggtgtgtcgat

SEQ ID NO: 22476 - DNA, 201 bp, Homo sapiens
tttctttttagtcaaactaggttctgatttccaagataaggcgaaatccagagcagtttgggaaatgaaggaatctgactgaacaataagagtcagaaccrttgccctaccataagcaacaccttaacagaaacaaattcctttgtccgttcattctatccacagactattttcagagaagagaatgtcccagctagaaat

SEQ ID NO: 22477 - DNA, 201 bp, Homo sapiens
tggtgaaatcgcaaactgggcgtctgttccggcgccggacccctgtttgcaaaggtgggtggcccgtccggagcggaaaaacattccggaagtggagggcygggccagcgtgattgacaagcgggaacccctgtgtggggacggggcaggcctaggaaggttgtgcctgcggtggaacggcgcggtgcgcaggagtgggca

SEQ ID NO: 22478 - DNA, 201 bp, Homo sapiens
aaaaaaaaaaaaagcaaaaagattgatttacatatttaaaaaattaaatgccagtataaataatgttgtcactggtgaggcgttaaaaggtaattaaagtraaacttttttgtttcctatatgtatttttcttggatctcctgcaagacaattttcaccttccctttgtgatcagagccgtcccaggacttcaggggcttc

SEQ ID NO: 22479 - DNA, 201 bp, Homo sapiens
acatcctattagagtgtgggaagattgttgttttcataaaaattatcatcatgggttaatatttgatgatataactgaagcttaattgggaaaagtttcaytagagtaacaaagtaaatttttctctgtctcacttaccagtgatgagatagccaacggccttggccttgatctcctgcgtcagctgctgggtttcattca

SEQ ID NO: 22480 - DNA, 201 bp, Homo sapiens
aggaaaaatgcagtgctgaggctcttttcattgagcactttactgctctgttttgtacacacaggctcccccatcacagtgtgcacccaagaaagtcaatyagctgttactgagagtttggagactttttctttttagcttagacatctctttttcttttttcttttcttttctttttttttttttttttgctgccacatg

SEQ ID NO: 22481 - DNA, 201 bp, Homo sapiens
ttgcaatttccttgtgcctccttcctcccttcacccctgggggatgttatgttgatgtgtgtcaggctcagaagtttgtggaacagttcacctttatggcrttgttgagcagtgacccagagctcctgaaacagccattgtccttctgcatctgggagagccacgtgagagattgggtaatgtgtgcttcatcaatgaaga

SEQ ID NO: 22482 - DNA, 201 bp, Homo sapiens
ccctgtctctactaaaaatacaaaaattagctgggcgtggtggtgtgcacctgtagtcccagctacttgggaagctgaggcagaagaatcgcttgaacccrggaggtggaggttgcagtgagccgagatcactgcataccagcctgagtgacaaagtgagactctgtctcaaaaaaaaaaacaaacgaaaaaaaacatatt

SEQ ID NO: 22483 - DNA, 201 bp, Homo sapiens
tctgttgctggtgaggagctgtgatcttttggaggagaaggggcgctctggtttttagaattttcagcttttctgctctggtttctccccatctttgtggktttatctacctttggtctttgatgatggtgacctacagatggagtttttgtgtggatgtcctttttgttgatgttgatgctattccattctgtttgttag

SEQ ID NO: 22484 - DNA, 201 bp, Homo sapiens
gccaggagtgggggcacatacctgtagccccagctatttaggaagctgaggtgggaggattgcttgagccagggcagtcaaggctgctgtaagccatgatygtgccactgtactccaccctgggtgacagaacaagaccctgtctcaaaaaacaaaatttaagtttgtccttcagtttgagtcagaggatgctataaacca

SEQ ID NO: 22485 - DNA, 201 bp, Homo sapiens
atcgcttgaacccgggaggtggaggttgcagtgagccgagatcactgcataccagcctgagtgacaaagtgagactctgtctcaaaaaaaaaaaacaaacaaaaaaaaacatattaaattaaggcattaaaaaaaagaaaatatttctggcagattagggtcttactgaaattgcatactcatagcataacttttatggaa

SEQ ID NO: 22486 - DNA, 201 bp, Homo sapiens
tcacaggaacaagaacagagaattctgaattctaaaatccacaacgctcatttcactgaaaggtcgttcaggtggcggtggtggatttttttcccttagcygtcattttggatatttgattaattatcgaccattatatttccttcttcttgttagttacgatttactaagaagaatttttatgctattttaaagttaaat

SEQ ID NO: 22487 - DNA, 201 bp, Homo sapiens
tcgcttgaacccgggaggtggaggttgcagtgagccgagatcactgcataccagcctgagtgacaaagtgagactctgtctcaaaaaaaaaaaacaaacgaaaaaaaacatattaaattaaggcattaaaaaaaagaaaatatttctggcagattagggtcttactgaaattgcatactcatagcataacttttatggaaa

SEQ ID NO: 22488 - DNA, 201 bp, Homo sapiens
ttctgatacccccactggagagtgactgatcagtgcattatctgtcacctcagagctcagagtgcccctcttttctattcaaatacaaagccattcatttmctttgatggacaaatagccgtggcattagtatgggtaggggcaagtgctgttgtctcttatctaggaaggagttggttcttttctgatggttgaataata

SEQ ID NO: 22489 - DNA, 201 bp, Homo sapiens
agagagccccctttggggcggagccactgagggctgcgcggaagaggctgggtgtgataaactataaagaggccctaaactcggatgcaacgtgacgggarttgtagttctttcacctggcgggcgtctgctccggttcagctgcaggaggtttcttgggagttcagcccagcgcgcagccccgccgcgacgccgcgagcc

SEQ ID NO: 22490 - DNA, 201 bp, Homo sapiens
tcgcttgaacttgggacatggaagttgcagtgagctgagatcacaccactgcactccagcctgggcgacagagcaagactccgtctcaaaataaataaatwaattaattaattaaaattaaaataaaaaagtatttatttatttatttatttaagatataagttctcactatgttgccaggctggactccaactcttgggt

SEQ ID NO: 22491 - DNA, 201 bp, Homo sapiens
aagtgcacaaacatgaatatacagtttaacaaataatataaacctgctattcatgtagccaccacccagatgaaggaaatagaatatcataagcaccgcasaatctccatttgtgcccttctccatcgtagctttctctgtcccagacaaccattgtccacaacttgttgtaataatttacttaattttcttttatagttt

SEQ ID NO: 22492 - DNA, 201 bp, Homo sapiens
agccagtttatccatctgggtggtgccagctgatccggcaattgcagggtctggaaaatatctcaagcactgagatatttgaagaaaatcttgaagcctcyagttgcatgactcttaaaccataatttctaatcttgtagctaatgttagtcctacaaagggaatctagtccccaggcaagaaggaggtgtgctttgggaa

SEQ ID NO: 22493 - DNA, 201 bp, Homo sapiens
ctatataacctttctgaaaaacatcctgtgggaaatataccatatatacagaaaaagtgcacaaacatgaatatacagtttaacaaataatataaacctgytattcatgtagccaccacccagatgaaggaaatagaatatcataagcaccgcacaatctccatttgtgcccttctccatcgtagctttctctgtcccaga

SEQ ID NO: 22494 - DNA, 201 bp, Homo sapiens
tttttttggtaaagggattaaatatcaaaaacattttgaaaattaataagaatagcttcatctgagccaaaataataattattatagtttcctttttttcttttttttttgagacagtctcacactctcgcccaggctagagtgcagtggtgtgatcttggctcactgcaatctccgcctcctgggttcatgtgattctcc

SEQ ID NO: 22495 - DNA, 201 bp, Homo sapiens
cttgagtcacatcaactcaaagacctgaccaagcataaacaggatgttttccatttaaattttttgtgtcattttataattttaaatgactacctttttgktaatgaatcatcagttatccacagcccaagtttacttaaaattttccttatttgattcataaagattcaaattttaggtgaaaatctgtttataggaata

SEQ ID NO: 22496 - DNA, 201 bp, Homo sapiens
cctgcttttcttttcttcatagcacttattacctcctgattatattttttgtttgccttttgtctatcacctgtcattcttttaccagaccatctagtctyatatgtctatataacctttctgaaaaacatcctgtgggaaatataccatatatacagaaaaagtgcacaaacatgaatatacagtttaacaaataatata

SEQ ID NO: 22497 - DNA, 201 bp, Homo sapiens
ttgggaggctgaggtaggcagatcacttgaggtcaggagttcgagaccagcctgaccaacatggtgaaaccctgtctctactaaaaatacaaaaattagcygggtgtggtggcgtgcacatgaagtcccagctacttgggaggctgaggcaggggaattgcttgaacccgggaggtggaggttacagtgagccaagattgt

SEQ ID NO: 22498 - DNA, 201 bp, Homo sapiens
acttgagtcacatcaactcaaagacctgaccaagcataaacaggatgttttccatttaaattttttgtgtcattttataattttaaatgactacctttttrgtaatgaatcatcagttatccacagcccaagtttacttaaaattttccttatttgattcataaagattcaaattttaggtgaaaatctgtttataggaat

SEQ ID NO: 22499 - DNA, 201 bp, Homo sapiens
gcattcaatttgcattgcctttgctgtgttcacagtggcactccatgaggcttaactatggagatcctggtgctacaagccgttaaatagttctctcttcycaacctattcccctatcctgcttttcttttcttcatagcacttattacctcctgattatattttttgtttgccttttgtctatcacctgtcattctttta

SEQ ID NO: 22500 - DNA, 201 bp, Homo sapiens
ccgtgcaacacaggtgagccccaaaattggggcttagcctggggaagtccttggctttacccaggaaataattcaagggtgagctgatagtagaaaacaggtttgtttgtttgtttgtttgtttttgagacatggtctcgctctgtcacacaggctggagtacagtggcatgatctcagctcactgcagcctccacctcct

SEQ ID NO: 22501 - DNA, 201 bp, Homo sapiens
ggttcaggtctggttttgctgatgaatgagttacaaaaagaatgtttggttttcagaattttttggatttgtagaattgaggataatggattgtgggcttrtaataatcctttcacagaacccactgtgaacaaacacagtaaaatctttgggaggaagaatttaggggagtctttttaaaaaggttaagaaaatgatcag

SEQ ID NO: 22502 - DNA, 201 bp, Homo sapiens
aagtctagctcctaaaactaaagtttgctagagtcacactgataatgtcaattacaagctgatcttcccaggagcagaacaaatcattcctccacctaccstgagatgtttgcataattgattcttcctctactccctttttctctgaattctttataatataatcaccttatctgtataaaatgtagatttactgagctc

SEQ ID NO: 22503 - DNA, 201 bp, Homo sapiens
gagagatgaaatgaattgatcaaaatctcaaaattcattttggttgagtaaaaataaaaccgtctctatttcccacaaaaaaaaatgcctacttttaaaaraaagtaggaaatgtggacagcagaggcacataatgaaagaataaaagcctctcacagccccctcacctaaaataatccccataaatacttgattcatttc

SEQ ID NO: 22504 - DNA, 201 bp, Homo sapiens
ccttatcaagtgagttcagtatttctctattctgattttgctttcccagtagggaaaaagcataggccagcaatgccttggtgtagacatggctcccatgrgtcccctcctttgctacattccaggctgactccaggcagaacagggcattgcgaacaatagggttctgtaaaggcaaaatgtggttgtgtcaaactaggg

SEQ ID NO: 22505 - DNA, 201 bp, Homo sapiens
cattgaccgtaacttcaaacttgggcagcactggaaacgaagagaaatatacgttagcctgcacaatcacaggcaagcaaaccttattgcagtcatatagyttactatgattccttgtaccctccatctgtatgagctatgtatcatttgccccaaattgtgtggcaccattctacatggtggtgtctcactaatgattaa

SEQ ID NO: 22506 - DNA, 201 bp, Homo sapiens
atttcctgggttacctaggagacctggtaatgaatggtgactatcttctattctcattcacttccagagaagtgtccttacccgaatgcaggtggacaagyagttaaacacagtggctttgagtgtgaaggcttctcctcgcaccacagaataaggaagggtgagttctaggaagaaaggctggaaggcttgaagagacac

SEQ ID NO: 22507 - DNA, 201 bp, Homo sapiens
gctggtgtctcctgccccctccggaagcttggatgcccctccacaccctcttgatcttccctgtgatgtcacctggacccctgctgctggcattggccacraagcctcctggtctggctccaaagcctggcagggtcttttccccgggggagctgcaggcagggaacagtcctgatgggtcatccccttcactcccagccc

SEQ ID NO: 22508 - DNA, 201 bp, Homo sapiens
cgtgcaacacaggtgagccccaaaattggggcttagcctggggaagtccttggctttacccaggaaataattcaagggtgagctgatagtagaaaacaggtttgtttgtttgtttgtttgtttttgagacatggtctcgctctgtcacacaggctggagtacagtggcatgatctcagctcactgcagcctccacctcctg

SEQ ID NO: 22509 - DNA, 201 bp, Homo sapiens
ctattacaggagccgccttgccatccctgcagcccaggtgagggccctgcagggccagaaagccgctcttggctctcactgtggtctaggccatgaggggsgtcctcatcacactgtagtttgggggatgccccccaccgtggtcaggttgatggcaccttaacccattctctcctgaggcgtgagttggaggaggcgcgt

SEQ ID NO: 22510 - DNA, 201 bp, Homo sapiens
gtgcaacacaggtgagccccaaaattggggcttagcctggggaagtccttggctttacccaggaaataattcaagggtgagctgatagtagaaaacaggtttgtttgtttgtttgtttgtttttgagacatggtctcgctctgtcacacaggctggagtacagtggcatgatctcagctcactgcagcctccacctcctgg

SEQ ID NO: 22511 - DNA, 201 bp, Homo sapiens
tgagaaagttatccacattctattttctctaggactgtgtgtgtccctatttccatacagtcacaacaatactgagtagtattaattttttttttttttttgagacagagtctcgttgtgtcacccacgctggagtaaagtggcatgatctcggctcactgcaacctccacctcccgggttcaagcgattctcctgcctca

SEQ ID NO: 22512 - DNA, 201 bp, Homo sapiens
tgcaacacaggtgagccccaaaattggggcttagcctggggaagtccttggctttacccaggaaataattcaagggtgagctgatagtagaaaacaggtttgtttgtttgtttgtttgtttttgagacatggtctcgctctgtcacacaggctggagtacagtggcatgatctcagctcactgcagcctccacctcctggg

SEQ ID NO: 22513 - DNA, 201 bp, Homo sapiens
taggcgtattaaatgtatttttgacttatgatatttttcaaactatgatgggtttactaggacataatctcatcatcagttgaggagcatctgtatatgtrtgtgtttagatagatataattagatatctatatataatagattctatgctatgggcattgtaagttctaaattgcttcagtggcattattgtacattctt

SEQ ID NO: 22514 - DNA, 201 bp, Homo sapiens
cctgggaggtggaggttgcagtgagccaagatcgcgccactgcactccagcctgggcaatagagcgagactccatctcaaaaaaaagaaaagaaaaaaaamatcaaaatgaaagcatcattaacttcatgtcaaaacttgacagacttacttaaaagataaacatggtgtaaaaaaaagagtagctggattgctcattttc

SEQ ID NO: 22515 - DNA, 201 bp, Homo sapiens
gcttatggctccagaagtggccattaatacctggagctaaaacactgttttggtttagcatgactctagttttcactgaatatttagtatttttaagttargtttttttgttgttgttgtttttgtttttgttttgtttgagacagtgtctcgctctgttgcccagactggattgcagtggtgtgatttcggctcactgca

SEQ ID NO: 22516 - DNA, 201 bp, Homo sapiens
tcatcactatgttttggtttagtgaaatactttcaaagtcctcgataacatttttttctataaattttttattttttaattatccgggcatggtggcttcrcctgtggtcctagctacttggtaggcagaggcgggaggatcacttgagcccatgaggtcgaggctacagtgagccatgatcacgccactgcattccaacc

SEQ ID NO: 22517 - DNA, 201 bp, Homo sapiens
  misc_feature (1)...(201): n = A,T,C or G, or insertion/deletion polymorphism (see Tables 1-2)
gaccagaactaaggctctggtctagagctccaaaccagaagcaaaaaggaatggtgctgggctggggcactttcctctaacatcacccaaacccagaaaangaggatcgtaagccccttcatgggccaaatgcagggctggggcccttgggctaaccctttagtgcctctggctgcatcactgtcagagtaaggtaaccag

SEQ ID NO: 22518 - DNA, 201 bp, Homo sapiens
tctccgttgcaactaatcaacactttgttgtagtaagaaagcagctatagggagtatgtaaactaacggatgcagctatgttccaataaaactttatttawaaaaacaagctatagcgccaggcgcagtggctcacgccagtaatcctagcactttgggaggccaaggcaggcagatcacgaggtcaggagatcgagacca

SEQ ID NO: 22519 - DNA, 201 bp, Homo sapiens
agtgcgatgtggatgacttacaaacaattattattcctaaaatataggtacgatgagtttattgaaaacaacataatgcaataggaaaaaaggacaaagascaactagtcagagaggatttgcaagtaaatcagtaaatgggaagagatgttcaatctgagtagtcagtgaatgtaaattaaggaagtttactttttttcc

SEQ ID NO: 22520 - DNA, 201 bp, Homo sapiens
gactgacttatttggttttagaaatgaaaaagaacagtttggaagaaatagtgcgatgtggatgacttacaaacaattattattcctaaaatataggtacratgagtttattgaaaacaacataatgcaataggaaaaaaggacaaagaccaactagtcagagaggatttgcaagtaaatcagtaaatgggaagagatgtt

SEQ ID NO: 22521 - DNA, 201 bp, Homo sapiens
accaaagttgagcaaaattcaccagcagtttgtgaaacaatttctgttcccaagtccatgtccactgaggaatataaatcaaaaattcaaaatgaaaataygctacttctcgctttgctttcacaggcacgtaagactcagaagacagtattaaaagatgctaatcaaactattcaggattctaaaccagacagttgtgaa

SEQ ID NO: 22522 - DNA, 201 bp, Homo sapiens
tagggaaccaggagcctaggagggccagagtagcaccattttaagttcagctccatcttgagaaatagtaaagcccattctctgctggtcacgacccacaktcatgggctgtttacagtggaagaaacagcctaaagatacctacaaggacacactcctactacagccaagagtccagatgtccaatacccataacaatct

SEQ ID NO: 22523 - DNA, 201 bp, Homo sapiens
ttctgacccatccctgccctgctcaggacccaatcacagttccctcaccctcctgaatcaaacctgaagtcctgtcctgagtaccccatgggccttaactyactcatcccaacttcactcattgccttgccccacaccctgccagggagcctcccatggcaccgtggaggacgcagaggaaccaaggcaaagctcctgtgg

SEQ ID NO: 22524 - DNA, 201 bp, Homo sapiens
tatcatataagtgacattagttgagggtaacctgatttaggtacactcacctttctgtccaggcttgtaggtgggtttatcagtctgtacaaagaccacaytctctctggatctgattgccacagatctcctctcttccaggttgagagtggctcctttagcagaaaatgtaataaatgccagtgggtcagatctggcctg

SEQ ID NO: 22525 - DNA, 201 bp, Homo sapiens
ctttttttgcacagtttttaaaaaaacttttattatttatctatttatttatttattttttaaattttattttattttaagttctggggtacatgtgcagratgtgcaggtttgttacataggtgtgccatggtggtttgctgcatgtatcagcccatcacctggttattaggtcccccatgcattagctatctatcctga

SEQ ID NO: 22526 - DNA, 201 bp, Homo sapiens
ccgggtggggaacatcccacactggggcctgtcgtggggtgggggcagtggggagggatagcattaggagatatacctaatgtaaatgacaagttaatggrtgcagcacagcaacgtggcacatgtatacatttgtaacaaacctgcatgttgtgcacatgtaccctagaacttaaagtataatttaaaaaattttaaata

SEQ ID NO: 22527 - DNA, 201 bp, Homo sapiens
agtgtggagcagggaggggaccagcaccatatactgcctgggaaaggaagaagtctaaattagagaaaaactgatgatagtaagcgttttcatccataaakgtgttttcataacaatatgtattaattggtgcaatcagttttattctaaaagtcaatggactaagtcaatggaggttctgtcacagatcagcacaaaaat

SEQ ID NO: 22528 - DNA, 201 bp, Homo sapiens
taaagccataaaaaccctagaagaaaacctaggcaataccattcaggacataggcataggcaaggacttcatgtctaaaacaccaaaagcaatggcaacamaagccaaaattgacaaatgggatctaattaaactaaagagcttctgcacagcaaaagaaactaccatcagagtgaacaggcaactgacagaatgggagaa

SEQ ID NO: 22529 - DNA, 201 bp, Homo sapiens
gctagccatatgtagaaagctgaaactggatcccttccttacaccttatacaaaaattaattcaagacagattattaaagacttaaatgttagacctaaarccataaaaaccctagaagaaaacctaggcaataccattcaggacataggcataggcaaggacttcatgtctaaaacaccaaaagcaatggcaacacaagc

SEQ ID NO: 22530 - DNA, 201 bp, Homo sapiens
gcaaaggacatgaactcattcttttttatggctgcatagtattccatggtgtgtatgtgccccattttctttacccagtctaacattgatgggcatttggrttggttccaagtctttgttattgtgaatagtgctgcaataaacgtacgtgtgcaggtgtctttatagtagaatgatttataatcctttgggtatataccc

SEQ ID NO: 22531 - DNA, 201 bp, Homo sapiens
ctggaattgtctaggagattagaaagtttcatttaagccaagagatgaatgctgaggaggaatcagctcggaaaatgaggtgcaggcaggttgggaactgyggtagcaaatgggaacgaagattgttatgggcagaagggaaaacctgtgggaggcttcggagccagaaaagcacatggcttgtccaagaaaatgaaagcc

SEQ ID NO: 22532 - DNA, 201 bp, Homo sapiens
ataaagcaatttaatgttccacattccaaaacagttttctaagaccaataaacaactttttattcatatttgcaaatgctgaattacatctaaatttattwagttcagtgaaacaaagttacacaaaggcattaagagtctcccagtgcttgtctggttttctgaaaggtgtgtttgatatgcaaggtataagcaaggcct

SEQ ID NO: 22533 - DNA, 201 bp, Homo sapiens
aaggtggctttaactgagagagcagatccaactgagcttataacaatatttttgaagtatgcaagcattgagaaaaatggtgaatttttcatgtctcccartgactttatcactccatacttgaacatttctggagaaagccagcctaacccaaagactgtggaacttttaagtggggtggtgggtcagaccaaagatggg

SEQ ID NO: 22534 - DNA, 201 bp, Homo sapiens
gcatcactgtggagaataaggtcagcccctcaagggcaacagaggggtctaggtctggacctgtggctggcggcacaggagccatggtggtgcagaccagragctgtgtctagcaaggcttatgccctgccaagcactgccaatggagatgtgaagctgctggtggtatccagcatgcctctggtggacttcctgatgtag

SEQ ID NO: 22535 - DNA, 201 bp, Homo sapiens
cagctcaaagaggtgagttgcctgtcacctctccctttcctggccctcactccccccacccgcaaggcccactcatcatgatcaagaagtcataaaggagktgattgaaaggactgttttttcttctagggccctttgttggtaagagaagattgaaagagtccattgtttcctcccccaagagaaaaattgcctaagaaa

SEQ ID NO: 22536 - DNA, 201 bp, Homo sapiens
gccaagacagttcaatggaggaaagaataatctttcaacaaatggttctgaacaactagatatctacatacaaaataatgaatttggcacctgagtaccayacactatatacaaaaattaactcaaaatggatcaggacctaaacataagagctaaaattataaactcttagaagaaaacatagatgtaaatccctgtgac

SEQ ID NO: 22537 - DNA, 201 bp, Homo sapiens
agcaatttcactccttggtacgtaccttagggaattgaaaacatatgttcatataagatagcaaaaaaaggaaacaactgaaatgttaatcaactgatgartggataaacaaaatgtggtatatccataaaatcgagtattatttagtcataaaaaggaatgaagtatgaaagatgctaaaacatagatgaacctcaaaaa

SEQ ID NO: 22538 - DNA, 201 bp, Homo sapiens
atgaaatattacctaagtaggaattaattgctttttatcactttacattatttcatttttagtattatgaaaaatataattgttccttttcttaaaaaaaaccagcgtaatttgtgcttagttttaaaccaaaatttttcctatatgtttatagtttatattttcaagccaaaatacttgagtttttttcctgtcataata

SEQ ID NO: 22539 - DNA, 201 bp, Homo sapiens
ttgggatcacaggcgtgagccaccgcacccggcctgagctaattcttaagaagtcactttggaaaaaaatattatttaagggcttttcataaagtattcaraaaggtacaagttctaatctaacagttctatttgtgatttttgaggaagcatatgcgtatttccacttaagcatctgaaatattgcctctagtgctgaac

SEQ ID NO: 22540 - DNA, 201 bp, Homo sapiens
gctccagcaagggaactcaattgtctaattagatgttaccagaaatcttattggggctgtgatctaattcttttttttttttttgagacagactcttgctstgtcatccaggctgcagtgcagtggcgcgatctcagttcactgcagcctctgcctccgaggctccagtgattctcctgcctcagcctcctaggtagcggg

SEQ ID NO: 22541 - DNA, 201 bp, Homo sapiens
ttttcccatgattccaccccaccccccaataaaattagccagtgatctcaataccacaggttactgaacagttgatctttcctgcactaatttccaatgtstgttttgtgataaatcaagtttttatatatgcatgggtctatttttggactattctgttacattggtttgttggtctattcttgtgcaaatgccacactg

SEQ ID NO: 22542 - DNA, 201 bp, Homo sapiens
cctggaattgatttttgtgtttggtgtgaggtagaaatctaatttaaattttttcccatgattccaccccaccccccaataaaattagccagtgatctcartaccacaggttactgaacagttgatctttcctgcactaatttccaatgtgtgttttgtgataaatcaagtttttatatatgcatgggtctatttttggac

SEQ ID NO: 22543 - DNA, 201 bp, Homo sapiens
atcctttccatgaagtcataaaaacatgcacctatattgtcttctgaatatcttctggtttgacttttatatttaaatctttaattctccctggaattgakttttgtgtttggtgtgaggtagaaatctaatttaaattttttcccatgattccaccccaccccccaataaaattagccagtgatctcaataccacaggtt

SEQ ID NO: 22544 - DNA, 201 bp, Homo sapiens
ggaaatatcttttcctagtccatgggttgtctttttactctttctgtggtatcctttgaagaagagaagtttataattttaatttagttgatttatcactsttttgtgtttctaggttgtatttttctattcttaagaaatcctttccatgaagtcataaaaacatgcacctatattgtcttctgaatatcttctggtttg

SEQ ID NO: 22545 - DNA, 201 bp, Homo sapiens
gggggaactggatgtggtgggaaaaattgtatacctcttctcagacttcataccccaccaatgggctgtcaccacggtttgcagactgttcacaccgagtktgtgtagaaaggatgaaatcttaagattagaatgagagtgaacgcaggttggtcatgcctgcagctctctttgaagacactcgctatcatggcgggctag

SEQ ID NO: 22546 - DNA, 201 bp, Homo sapiens
cagcctgggcgacagagcgagactccgtctcaaaaaaaaaaaaaaaaaaaaaaaaaggagaacataaagcaagtaacaatgtttttcaagttttctttaaygcattacatctttttttcacaagatattttaaaattttatttttccttattaagcgaattgaattatttcaagcatcagtgagagctgctagactgttat

SEQ ID NO: 22547 - DNA, 201 bp, Homo sapiens
tcttgtgctctctgtcctttattctccataatgcgagctatccagtagaccctagccaaaggggacataaagacagtctcaacattgtattactggttctktgctacagttgtcattcaagttcctgagaaaatggaatgaatgtctgttattcatttatttattaaatctttagagagcatcatctatatgccaggtatt

SEQ ID NO: 22548 - DNA, 201 bp, Homo sapiens
attttaggaaagtctttttataattgatactcaaagtgatgaatgtataaaagaagttattttaatatttaagacaggcctcagcaaggcacatgaggctyttcatgatttggcccttgtctgcctcattccttatcatcactccatatgcagtaagaccacttgcttgcagtccatgttttcacaggccttgtgcccctt

SEQ ID NO: 22549 - DNA, 201 bp, Homo sapiens
gcgagattctgagaaagaaaaggagaaagagagaaagagtgagagaaagagggaaggggaggggaggggagggaagggagagagggaggaagggaggaagkaaggaaggagggagggagggagggaggagagaagagagaagagagaagagtaatggggaaagacagtcccatatcaaaaatttttggaatctctggccaa

SEQ ID NO: 22550 - DNA, 201 bp, Homo sapiens
cactgcactccagcctgggtgacagagcaagactccgtctcaataaaaaaaaataaaaataaaaaataaaagaggaagtgtgataatggaagcttttggaktttttttttgccttctaaaaaaagcatggtatacaatataaaagaacatttattaggttctcaactctggaataaactcttgactgtatcatttaaaaag

SEQ ID NO: 22551 - DNA, 201 bp, Homo sapiens
agcatttaatgaagggaatatttaccaaaaaagtaggattaaagaaagccaataggtacggtaaaccaccttgggaagctgcaacacacccaaagggttaraggaggtagtagtcaccgaacgtgacaagttgacctgtagctgaacatttttccatgtctgtataatactactataaagcatgattttaaatagataacc

SEQ ID NO: 22552 - DNA, 201 bp, Homo sapiens
agagttacattctcagtgaaaatttccccatctcccactagggagagttagataaacacctctaaacgctgatttacagcatctatcacattgtgcagtaraaaaggctaagctgagagtcaataacctttggaaacttcttaggaaagcatggccatatcaggaactaaaatttgctgtactctgcagtcctaaattcat

SEQ ID NO: 22553 - DNA, 201 bp, Homo sapiens
atacaaaaaaattagctgggcatggtggtgggtgcttgtaatcccagctatgcgggaggctgaggcaggagaatcgcctgaacccgggaggtggaggaggytgcagtgagccaagatggcaccgctgcactccagcctgggtgacagagtgagactgtatctgaaagaaaggaaagggaaaaaaaagaaagaaaaaaaaaa

SEQ ID NO: 22554 - DNA, 201 bp, Homo sapiens
acggggttttgctatgttggccaggttggcctcaaactcctgatctcaagtgatctgcccacttcggcctcccaaagtgttgggaaagaatacatatgatkgcatttagggtccacgtagatgtgatccaggacaatctcctatttcaagatccctatcacatctgcaaaaatcctttttccaaataaggcaatatttaca

SEQ ID NO: 22555 - DNA, 201 bp, Homo sapiens
tttaatacaggctctcccagaattttctagtaaacgccctagccctttacaagttggtgttcaacttgtgaagagaagaccattgtaaaatagatttaagytagtatgacataatgggggaaaactataagcaagatttctaagttgcttgttgcctcaagtgaacagtggttagtgcaagctggcatgcagggtaaatgg

SEQ ID NO: 22556 - DNA, 201 bp, Homo sapiens
ggtgaaagtggctgctccatacctggacagggcatggagagccaccactgtgtcctggaagagacgagtggacaaccgccccaaagagtaaatttttggcrtctgggattttcccccaaagtctgtgttagcctaccatgagggaagctggctttttacccctaaggtagatcttcactaattacctttcctttttctctg

SEQ ID NO: 22557 - DNA, 201 bp, Homo sapiens
cccctcacttcctcattacttaacgtctccagaggtgccttttactttcccaggaaggaaggaacagagtttccatttcaattggcaagtttaaagttgaytctcacccatataagcttggagccctacctgaagatacacacatctttccccagttactgttatgacatattctccagggagctctggcaatgagatctg

SEQ ID NO: 22558 - DNA, 201 bp, Homo sapiens
ttcctttccctgaaaagcttctcccccacattttgtatatccgactcctttttgttcctcatagataataaaatgaatatcacttcttcagagagatctcyactgattatctttttttcttctttctacctaaattttatccttgtttttcttttaaaacttttaaaaagcacatataaaatgcttatgtgtgtgatacta

SEQ ID NO: 22559 - DNA, 201 bp, Homo sapiens
ctctggcctggaagtttctctgaatctgagtgaattagagtgtaatgagtgtcccctttgccttccctgcacttagtacatgtacctaccaagtattgagyactgaccattaaaattgtaattctcttcttttcttctcatttttattttttgtgatgctataacaataaagaagaaaatctaaggcttacataatcttac

SEQ ID NO: 22560 - DNA, 201 bp, Homo sapiens
aaactcccatctcctctggtttctgtccttcccatggccccctttcacacaaatacagtgatttacatagaataggagctaggagtggtccattctaaatrttttatcctctcttttcctaggctctgcaagcactgcagcggcagcccaatgcagctcagtatttccaccagttcatgctccagcagcagctcagtaatg

SEQ ID NO: 22561 - DNA, 201 bp, Homo sapiens
cacagcgagattctgagaaagaaaaggagaaagagagaaagagtgagagaaagagggaaggggaggggaggggagggaagggagagagggaggaagggagkaaggaaggaaggagggagggagggagggaggagagaagagagaagagagaagagtaatggggaaagacagtcccatatcaaaaatttttggaatctctgg

SEQ ID NO: 22562 - DNA, 201 bp, Homo sapiens
agcaaaattcaccagcagtttgtgaaacaatttctgttcccaagtccatgtccactgaggaatataaatcaaaaattcaaaatgaaaatatgctacttctygctttgctttcacaggcacgtaagactcagaagacagtattaaaagatgctaatcaaactattcaggattctaaaccagacagttgtgaaatgaatccaa

SEQ ID NO: 22563 - DNA, 201 bp, Homo sapiens
tgaggcggccataatcaggggctgatggctcttaaagacttccgtcctcttgccgaggcatcccttgggcacatttagcataacaataagcacaaaggagygtccaacactttctgtaactgttggtagcaagttgatgaatggccaccattcaatgggcagtcaacgagtagagattatcaacaggcaagagctagcatt

SEQ ID NO: 22564 - DNA, 201 bp, Homo sapiens
tctacaggtgcctagtaccaggatgggaaaggaaagccaccaaaatctaaggctgccctcagagaagggcaagcatgcagtcctcatcttgatgaggaaasagtttctgagggaatagttttcccctccattccaagcgttggacatgaggcggccataatcaggggctgatggctcttaaagacttccgtcctcttgccg

SEQ ID NO: 22565 - DNA, 201 bp, Homo sapiens
gcacacggtgggagatggatgtggtgacctggaactcaggtgtgagggagctgggacacaggcccaggattcctgagagacatcctcccctccctgggccrtgcgagccacttggagaacctgcacccactctcaacgaactcagcactcccttccccaggatatgccttcctgccttctcctcatcccatccctgggcag

SEQ ID NO: 22566 - DNA, 201 bp, Homo sapiens
tgctctcccattccggcctctaagctcctaaggacaccgtgttggccacatctttggtgtctctcagggtccagcacaatggggagcacacggtgggagayggatgtggtgacctggaactcaggtgtgagggagctgggacacaggcccaggattcctgagagacatcctcccctccctgggccatgcgagccacttgga

SEQ ID NO: 22567 - DNA, 201 bp, Homo sapiens
accaatttttagtgatttctctcccctctagacccctggaagcctgtgcgattcatgctatgcaatgaagaatcagcctcgccctgtgctctcccattccrgcctctaagctcctaaggacaccgtgttggccacatctttggtgtctctcagggtccagcacaatggggagcacacggtgggagatggatgtggtgacct

SEQ ID NO: 22568 - DNA, 201 bp, Homo sapiens
ttcctcatgttaccgactattctagtaaagagactcacttagaaagacgacccatatgtagtctcagccaggatgtcagagccctcacctgttccacataratgaggacatggttgttgctcacttctgtccggctcacagagctagatctttcaagctggagagaattagaaaacttcagttaaagttagagaacagatg

SEQ ID NO: 22569 - DNA, 201 bp, Homo sapiens
ggcatgcaccatcacatccggcttatttttttatttttgtagagacagggtttcatcatgttggccaggctcatctccaactcctggcctcaagtgatccrcccacctcagcctcccaaagttctgggattacaggcatgagccactgcgcccggctaaaggaccatttaaaaatgtaaaaggacaatcccctggatgaga

SEQ ID NO: 22570 - DNA, 201 bp, Homo sapiens
cttattgttctttgactctttttcaccagtgtctttaggtgaccagacatttgtggatgtcaagatgggttttagaatgcatccttgggaactctatttamagtcaacaaattttcacagattttcttctaaacaactgagccaaccctattcttttgtagtcccttgttatgagattaactctctgggcccatgtgaatg

SEQ ID NO: 22571 - DNA, 201 bp, Homo sapiens
ggtgtgaggacatgccatgtggattgtctcagatgtaggaaaagccttgtagagaatttaaattgcaggggcccttggagagtgggttaatgccatctagyactggtcataagtggtgaactcttacctgtgctgcagggggcgatatactcagcaaccacagactcatctgaaagataacgttgggtgaaggaagaaacg

SEQ ID NO: 22572 - DNA, 201 bp, Homo sapiens
actttggctgttcaggtggcccttctcagtgttgccccaaacagtggaatttccctacttacctgtctgtcctggtttatacatgggtttgtctgtctggmcaaagaccagactttgggtgttcagtaccagaactgtgttcctcttcctgaaatcttgcgtaggcccctttatctggatgctaaggaatgccacctctga

SEQ ID NO: 22573 - DNA, 201 bp, Homo sapiens
cagtcatacaatttacagtatccataagataaaagcaggccaattactcagaagaagccaacgattctaggtagtaagaccagacatagatttattctgcrgaacacaaaatgttcttgtaaaaagagacaccgtgtgagctaatggataatgagctcaacagcatccttgtttagacaaggtgaccactgatatggtttg

SEQ ID NO: 22574 - DNA, 201 bp, Homo sapiens
tggagagaacaaaggaaatctctttctttttaacagattttaaaatgtgataatgtcccttaggaaatttaaaagattatggtgtttatttaacatgtgcwtgcttacattatgaaaagcaacacagagaatcatggagtaatatcagaggtcatggatcctaattcttttgttgtgcaaaagaaagtaatatatagagag

SEQ ID NO: 22575 - DNA, 201 bp, Homo sapiens
ctacctggcctctcagatttctgccttcagttccataaatcctcttaaactaagagagtcacccggtcactttcggatgggacagatacctcagtttattyacatttttcctgacttttcttaattccttcttgtgaagtcagaaactgaaaagtctgagattttctgctacttgcaagctaacaagttaccgtgccacaa

SEQ ID NO: 22576 - DNA, 201 bp, Homo sapiens
aatattcaattgtgttactaaaatgacaatttatactttaaatcccaaggcaaatttgaatattatgaaataatatacttttaagagcaaaaaatgtaagmagttacctcttctacatttgaaaaaaacaccaatctctcgctcacacatataccagtgcttcaactgtccctcaaagactgatgttcagataaaagctgt

SEQ ID NO: 22577 - DNA, 201 bp, Homo sapiens
ggattatttctacgtaatacatttataaggatatgattataggttgtggccaggcacggtggctcacacctgtaatttcagcactttgggaggccgaggcrggtggatcacctgaggtcaggagttcgagaccagcctggccaacatagcaaaaccttgtctctactaaaaatacaaaaattagctgggggtggtggcgca

SEQ ID NO: 22578 - DNA, 201 bp, Homo sapiens
tacaggcatgatcctccatctttttatattgtgtaattataatgcagagtagtttgagcttggtgatgagaaagctttcttttcgccttcctgccactcaytgtttgtatactttattttcaaaggccattaacatgtcgacagccactgagctgctgtttttgttttattgttcccttgaccacacaccaaccaaccatg

SEQ ID NO: 22579 - DNA, 201 bp, Homo sapiens
ttagttactttttgctcaacctggtctggagagttccgactgacagggtgccaccaatttttagtgatttctctcccctctagacccctggaagcctgtgygattcatgctatgcaatgaagaatcagcctcgccctgtgctctcccattccggcctctaagctcctaaggacaccgtgttggccacatctttggtgtctc

SEQ ID NO: 22580 - DNA, 201 bp, Homo sapiens
cctatgaagtaggtacttcttgttctctcatttttcaattttattttgttttgtacttttagtagagatggggtgtcgccatgttgcccaggctggtctcraactcttgagctcaagcaatacacccacctcggcctcccaaagtgctgggattacaggtgtgagccaccgtgcccggccttgttctctcatcttatagac

SEQ ID NO: 22581 - DNA, 201 bp, Homo sapiens
aaagcgctgggattacaggcatgagccaccacacccggccatactgtactttttcatttaatagattgaaaaatttgcctccactaaatttctttgggtgmacatctaaagtccctcaaacagcattagtgtcaacatttccatattcagttatttcttctataactccatttaggtagttttggggatttttttagaggc

SEQ ID NO: 22582 - DNA, 201 bp, Homo sapiens
aatttttatattcctcttcatcctgttaaaatctcccctgtttttcttaaattaccacctttcaaggtaaataaaacgctgctggttctctttttatcagkgtgccatttaattttcggttattacaatagaatggtcttaaatttgtctttaaactgaaaacatgcaactctcaagtgataacacggcttagagaacctt

SEQ ID NO: 22583 - DNA, 201 bp, Homo sapiens
agtgagtgtggcttctggaggaagtggggacaaaggagagcattctttcctgccagacctaaccctgggtcatgagtccagccccactggttgtcacctcrccaccacgagagcaaggcctgtctgggaatgtagccagcccaaaagaagcaagctgacatggaaggaaagcaaaccaggcctggatgacgtcgtgtaagc

SEQ ID NO: 22584 - DNA, 201 bp, Homo sapiens
aagatctctagagaagaaaaacaaaaaacaaagtcgaggcgttcctcctcttgctttctgaggatgccctactctaacagtgtagtttctaataacgttgyttctttcactgcactctgtgactcgttttgaagtccctcctgctcgagatccaagaacgttctcttggggtctggatagagatcccttttccggtaacac

SEQ ID NO: 22585 - DNA, 201 bp, Homo sapiens
gagcctgccctgtgtggagtaggcacatggttttcctctccagcacccatttcctccttactcaagcaatggccctgtttcctctggggaatccatctcarttcatgagcatcagatcagactgcccccagagctcctcagtctaagccaatcagtgtgtcatagtccccagcctcagtgatggattctgggacagacacg

SEQ ID NO: 22586 - DNA, 201 bp, Homo sapiens
caccccgggacctgcacaccagcctcgctaccttagccccctcctccaggagcctgccctgtgtggagtaggcacatggttttcctctccagcacccattkcctccttactcaagcaatggccctgtttcctctggggaatccatctcaattcatgagcatcagatcagactgcccccagagctcctcagtctaagccaat

SEQ ID NO: 22587 - DNA, 201 bp, Homo sapiens
gtctggggcatgagatggggtggtggggaggagagagacagtctctcctctacccacctgtctcttctgtgcaggtggtttccgagcaggtgaagcacatktaaagggggaggttctaaactggtcacagtcccattgaaaaagcccatgggaaatgaaaagcccacacactcgcccattccattgccacaggcagggggc

SEQ ID NO: 22588 - DNA, 201 bp, Homo sapiens
agcagatgactggagacagaaaataagagtccatcatcttatttaaatagattaaaggaaacacaaagaccgcaatggaaaaattgcaaaagatggaaagrgaagaaatagaaataataaataaataaatgtagtggtttgagtcagaaggttcgatctcattagttaccaataaaatgtacattggaaggacaataagat

SEQ ID NO: 22589 - DNA, 201 bp, Homo sapiens
ctccagctttctccacctggaccggatcagttgttctcccttactcccctctaggatccagaattcctggtttgactatcaaaagtaacactacttataaktatttataggatacatcattgactctcacattcactttattataaaatttctttttctataacaactctaggtacttttattgttattaggccattgttc

SEQ ID NO: 22590 - DNA, 201 bp, Homo sapiens
agaattcctggtttgactatcaaaagtaacactacttataattatttataggatacatcattgactctcacattcactttattataaaatttctttttctmtaacaactctaggtacttttattgttattaggccattgttccttactctttgttttcttgtattatcacatcagtcagcgaccaaatcctgttcattcta

SEQ ID NO: 22591 - DNA, 201 bp, Homo sapiens
ggatacttgagcagagtcttggacgagtggatttgatttggagtgagaagaaaactagagagagaacagcaagcgtaagagtatagtcatatatttaaatrcgagtatgtgtggtaggcgttggagatgaggggataaataaaatagaatcaacaggcatgatgatagaagaggtcattgctggggtagagcatataaagg

SEQ ID NO: 22592 - DNA, 201 bp, Homo sapiens
tgttgactaagaacagaaattcgttttttggtgggggatattttgcgacaagcttgtcctgatgccctctttctagttagtaaaatggagtctcactggtygtaaacagtgatagcactgagggagaataccgcctactaacctgttgactgaattcctcacagacctcctgcttgtcacaattaagaacacgagataatt

SEQ ID NO: 22593 - DNA, 201 bp, Homo sapiens
gcctacctactttctatatataagtacttgttctaaaatcctaattttctctatttctttgacgtgtgactctttgacatcaatctgtagttttctatgcwttctaggttttcttctggatggttcattacatgtggagaatatgaggctcctgggttggtgtggaagaggcagggctcagctgtttaatatcttctgttt

SEQ ID NO: 22594 - DNA, 201 bp, Homo sapiens
gggggatattttgcgacaagcttgtcctgatgccctctttctagttagtaaaatggagtctcactggttgtaaacagtgatagcactgagggagaataccrcctactaacctgttgactgaattcctcacagacctcctgcttgtcacaattaagaacacgagataattttctacacaggctcacagttgcaagtcctggg

SEQ ID NO: 22595 - DNA, 201 bp, Homo sapiens
aaacagtgccaaaccatctaacttccctccaccagcaatgagagaaagcgttttaaactgaaatgatttagtagctatactgattggtttgacttggtttrataaaaatgatctgtgcaagctggttccatgcccatagcatcagctggggttccatggcaacaaaaataattactcatctgcaaacagtctttgtaacag

SEQ ID NO: 22596 - DNA, 201 bp, Homo sapiens
gtatacaaattctgtgttatcgctcagcctacctactttctatatataagtacttgttctaaaatcctaattttctctatttctttgacgtgtgactcttkgacatcaatctgtagttttctatgcattctaggttttcttctggatggttcattacatgtggagaatatgaggctcctgggttggtgtggaagaggcagg

SEQ ID NO: 22597 - DNA, 201 bp, Homo sapiens
actgaattcctcacagacctcctgcttgtcacaattaagaacacgagataattttctacacaggctcacagttgcaagtcctgggacaggcttcccataartgtatctggtacatgagaaataaatcaggaattgagaatggctgtttgcattttccactaccactcctccacagaactgtccctctttagagttgcctac

SEQ ID NO: 22598 - DNA, 201 bp, Homo sapiens
aaaatgtttcttattgcacttagaagggtgcctggctcttagctgattatctcctggatctggaaaggaaggaaggaaaacaaagcggggaaaggggattytctacagaatgtggatttttcccacaagagactttgcagggcaatttcaaggtatggcaaggaaatatattttggttttctttctttgccagtatcagat

SEQ ID NO: 22599 - DNA, 201 bp, Homo sapiens
ttaagagatgaacagcctaggaactaccaattcagtgtctctggaacaacctggaaatttgattccagttaactcaggttttccattccttatataaatgrtgaaatataaattgacttaatcatatagaaataaaatgctgcatagaattgaaaacacacgtacaagaaagatgcataccttgctatcactgacctatct

SEQ ID NO: 22600 - DNA, 201 bp, Homo sapiens
ttgccaaatatgccactaccgcctacgtgccatctgaggagatcaacctggttgtaaaatccactgagaatttccagcgcacattcaacatacagtcagtyaacagattggtatttcagcaggataccctgcccaatgtccctggaatgtacacgttggaggcctcaggccagggctgtgtctatgtgcaggtaagtagag

SEQ ID NO: 22601 - DNA, 201 bp, Homo sapiens
agaatcgcttgaacccgggaggcggaggttgcagtgagcgtaaatcacaccactgcacttcagcctggtgacagagctagactccatctcaaaaaaaaaamaaaaaaaaaaacttaggacactgagcaagaatcttttctatgctttggcaaattgtcatcctcatttctaagtttggatcaccttccaacattttatcct

SEQ ID NO: 22602 - DNA, 201 bp, Homo sapiens
acaatgctttataattttcagagtacagatggtccttgacttgtgatggttcgtctagacttttttatttaacaatggtgttaaagcaataccatttagtrgaaaccatactttgagtacctatacaactgttctgtttttcattttcagtacagtagtcaataaattacatgagatagtaaacattttattataaaatag

SEQ ID NO: 22603 - DNA, 201 bp, Homo sapiens
gactaatactctatccacacccactcccctatttaaccagtgtgtcccctctaagaatctttatcctcatggttcacatggtgtattagtctgttctcacrctgctaataaagacatacccgagaccgggtaatttataaaagaagtttaattgactcacagttctacatgactagggaggcctcacaatcatggcagaag

SEQ ID NO: 22604 - DNA, 201 bp, Homo sapiens
tgggtttacaggcgtgagccattgcacctggcctaggagttcttatatattctagatatgagcttctttgggttacatgacttacacaaattttttttttyctactttgtggcttgccacaaagcaaaactcaaaatgttttccacagccattcttccattttaaattcctaccagcagtatataacagtcctgattaatc

SEQ ID NO: 22605 - DNA, 201 bp, Homo sapiens
tgggaggccgaggcaggtggatcacctgaggtcaggagttcaagaccagcctgaccaatatggtgaaaccctgtctctactaaaaatacaaaaattagccrggcaatgtggcatggacttgtaatcccagctactctggaggctgaggcaagagaattgcttgaaaccgggaggcagaggttgcagtgagcccagatcatg

SEQ ID NO: 22606 - DNA, 201 bp, Homo sapiens
ccaaactcccaacctcaggtgatctgcccaccttggcatcccaaaatgctgggtttacaggcgtgagccattgcacctggcctaggagttcttatatattstagatatgagcttctttgggttacatgacttacacaaatttttttttttctactttgtggcttgccacaaagcaaaactcaaaatgttttccacagccat

SEQ ID NO: 22607 - DNA, 201 bp, Homo sapiens
agtggggaacagaagtctccccagagcaaaataggagtactctaagatgtggttgcaaatcagcacaccccacctatctctgtttgactactatttatgcrttctcagcagacataaatgtgttaagagtagtagatcggccgggtgcagtggctcacgcctgtaatcccagcactttgggaggccgaggcaggtggatca

SEQ ID NO: 22608 - DNA, 201 bp, Homo sapiens
tagccaaattcccaaacaggtcacttaatcttcaagagtcacgataatgagtttccctctgctttaatcctttcacacacagaaaaagtagccccaagaarcctgatgttaactaatcagttatttttctgttgttctatctccttgtctcatcttacaagaaaagtcactttgaaacaatggacataatctttgcttctt

SEQ ID NO: 22609 - DNA, 201 bp, Homo sapiens
gcagtggacaagaatcctcaacaaaaggaatgcctgctaaaagtgacagtagctgttccatggaagtgctagcaacctgtctttccctgtggaaaaagcarccttcagatactgcaaaagaaaaggagtgtgataaactcagaacaaacacaacagcagttggaatttcaaagcctgctaacatccacgttaagagtcctt

SEQ ID NO: 22610 - DNA, 201 bp, Homo sapiens
ggctcactgcaacctctgcctccctgttcaagcgtttctcctgtctcagcctcctgagtaactgggatcacaggcacctgccaataatattctttataatraactgataaatgtagatatgtatttccctgagctctgtgagcagctctagcaaataaatcccccaagaagggggtcatggaaccgtgatttatagttggt

SEQ ID NO: 22611 - DNA, 201 bp, Homo sapiens
cctcctgagtaactgggactacaggcacgtgccaccatgcccagctaatttttgtattttttgtagagatggggtttcaccatgttggccaggatggtctygatctcttgacctcatgatccgcccaccttggcctctcaaagttctgggtttacagacgtgagccaccgtgcccagcctttttactttactttattttat

SEQ ID NO: 22612 - DNA, 201 bp, Homo sapiens
gaggaagggagaaggaatgactataaacaacaagcaccatcctccacagattcaaggaagaattaaaaggggtagtaaggtggtctctctagagaggcaaygttttacttgagatttgccaagaaattgtcagacttgtgaaatctgcggactagcaatccgtggggtgggtaaggaagagcaaatatactgcttagaggt

SEQ ID NO: 22613 - DNA, 201 bp, Homo sapiens
gtcagagagacctgccccaggagttctaattctaatcaccataacagctattatttattgagcccttcctgtgtgctgaatcttgttccaagcctttacaratagtgtcttgttccatcccccagtgattctatggctatatactaaaagcccacagtcctttatctgcaatttggaagcccaaaaaactctgaagccaaa

SEQ ID NO: 22614 - DNA, 201 bp, Homo sapiens
agtcagcccatgcaggtgtgtaataaattccattgtaaaggatatgtccatcttcaagacacggcactttaaggccatcttctaagttaagtcctctgaartaatagccatgtagttcgctggaatgtagctgactatacacctagatggtagaagagagtcaactgtattttttcatagaaaacaattcatttttcccca

SEQ ID NO: 22615 - DNA, 201 bp, Homo sapiens
tagtcctggttcctttctgtaccacacagatcaatctggccaccacatcggccgcccagctcatcagccgatcccagagtgtgagctctcctagtgctacyaccttgacccaatctgtgctactggggaacaccacctccccacccctcaaccagtctcaggcccagatgtatctacgggtaagccacagatgcagtcacc

SEQ ID NO: 22616 - DNA, 201 bp, Homo sapiens
aagacagcaagggtcttttattccacattgcatacagtgtaattttcattttacttctaaggtactgtttcatctgtcttccccacagctcattaagaacrctcagacttacaccttcaccatcagccaaagtgtgctggtcaccaacttgaaaccagcaaccatcaaggtctatgactactacctaccaggtgagagggc

SEQ ID NO: 22617 - DNA, 201 bp, Homo sapiens
ttgaaacatttgcatttctgtctacctggtcccttcagaatttggaaaccatttgtgattaatcttcttttatggcaatatagtcatttgcataagttcartaacaatttgctgtctttgtaggaagagacattagacccaacaaaactccttagaatccctagcatgtgaaagattagataatagaagagtttcagatta

SEQ ID NO: 22618 - DNA, 201 bp, Homo sapiens
ccaaatccttagtcctggttcctttctgtaccacacagatcaatctggccaccacatcggccgcccagctcatcagccgatcccagagtgtgagctctccyagtgctaccaccttgacccaatctgtgctactggggaacaccacctccccacccctcaaccagtctcaggcccagatgtatctacgggtaagccacagat

SEQ ID NO: 22619 - DNA, 201 bp, Homo sapiens
gaaattcatgaaaaaaaaccataacaagcattcttgaatacagattttttataatttttgagatcataccattggactaggtaaaaacttccagaactctratgagtaaactaaagtgttcatgaagattcctaatccgacatcaagaaaaacaagaattaattacatgggactcaactgatgaagaattgaaatttttta

SEQ ID NO: 22620 - DNA, 201 bp, Homo sapiens
ctccggtttcttccctcacatacctgtctgactagttcctagaagcctggcagaaattgttctccgattttaatctggctgccacaaatgaaagaccttgragtccaaatactcctctctcaaagcaaaatctaaatggatataatttataagcaaagataacacttctgtttttttctctataaacaaaccatgcatggg

SEQ ID NO: 22621 - DNA, 201 bp, Homo sapiens
ggctggctaatttatttttatttttttgtagaaatgaggtctcactatgttgttcaggctgctctggaactcctgggctcaagtgatctgcccgctttgaycttgcaaagtactaggattacaggcataaaacacgacatgcagccccaaatttgctgcttcttcaaggaaattcatgaaaaaaaaccataacaagcattc

SEQ ID NO: 22622 - DNA, 201 bp, Homo sapiens
cctcagcctgtagctgggattacaggcatgcgccaccacacccggctaatttttgtgtttttagtagagatggggtttccctgtgttggccaggctggtcycaaactcccaacctcaggtgatctgcccaccttggcatcccaaaatgctgggtttacaggcgtgagccattgcacctggcctaggagttcttatatattc

SEQ ID NO: 22623 - DNA, 201 bp, Homo sapiens
aggtattgcagacggtggaccattataagactgagatagagaggctaaccaaggagctcacggagaccacccacgagaagatccaggctgccgagtacggrctggtggtgctggaggagaagctgaccctcaaacagcagtatgatgaactggaggctgagtacgacagcctcaaacaggagctggagcagctcaaagagg

SEQ ID NO: 22624 - DNA, 201 bp, Homo sapiens
ttaccatctgctatacctttgtttatttttaaatgatgtttaaaaattactttagaaattattttaagcagaaaaaattgtgtatatttaccatgtacaaygttttgaaatatatattcattgtagaatggttaagtcaagctaattaacatgtacattacttcatatagttgtcatatggttaaactctactccttagca

SEQ ID NO: 22625 - DNA, 201 bp, Homo sapiens
tgggtgaaggaagaaacgaaagatctatgaactagggaccatgctaaatctgtctagtcactttactactggagaaaagcacgccctatcagaattgtcaraacttcatgtaaatagacaagaattaaacaggatcattaacatatttatattctctttccctgagactggagatggggactgaagcctgttcagatggca

SEQ ID NO: 22626 - DNA, 201 bp, Homo sapiens
taaatgagaacaggaattggaatgagaccagaaaaaaagggaggagttcaaaatatgttctgagagctttaccattatgaatactcagctctggttttccyccaaaactggctgaaccagtatggatgttccaggcagaaacaactttaaagaagtgaatagtggccctaccctggtccaccacctaacctggtggttaca

SEQ ID NO: 22627 - DNA, 201 bp, Homo sapiens
aaagtcctaatgtttcattacagtgatctggcaaaaataaacatgtcatgtaggattagtaatgaatgaatgaataatgaggaaacagaataatacaggaytaagacaaatatgaaataaaaaaatgagttctcctttaagcaaggaaccagctttaattaaagggaaaccctgaagcaaaccacttgggtcttaaaatac

SEQ ID NO: 22628 - DNA, 201 bp, Homo sapiens
ttgataaatttgttcagtaagtttttgttttgttttgtgttgttttttcttttttttgagacggagtctcgcaccgtcacctgggctggagtgcaatggcrtgatctcagctcactgcaacctctgcctcccaggcttacacgattctcctgcctcagcctccatagtagctgggattacaggcacacaccaccacaccca

SEQ ID NO: 22629 - DNA, 201 bp, Homo sapiens
gttccagggcagctcccctcctggaatagaatctttctttccatcctgcatggctgagagccaggcttcctgcttggagtccgcaggaggctgtggcagcwgtggcatccactgtggcatctccgtcctgcccaccttaagaggtgagatggagcaggtccatctgcctctgccctttctagccaaggttatagctgccct

SEQ ID NO: 22630 - DNA, 201 bp, Homo sapiens
ggaagttgaatgataaatgtgaatccaatgacgccatacccctgcggataatggcaggctggatgtagcatgttagccgtcatattctgtgtgctccctgygatgtgggcacttcccttccatcgtggtgaggccaaagcaaaggcacagagacctgaacacaaacatgaaaaacaccttaccacctgggagtcaggggca

SEQ ID NO: 22631 - DNA, 201 bp, Homo sapiens
tttcttggctctggttaagattgtttcatttttctttcactcacctgtctcatagtaatcatagactttaacaattgctggcttcaagtctcctactgggwtgtcttgcagaaccatgaaggaaaaacttagcgtctgatttgtcacctgaaaggaaaagtgggagtaatcaagaacctagaaaacctccttctttctccc

SEQ ID NO: 22632 - DNA, 201 bp, Homo sapiens
tggaaactttcctaacaacaaacacctaaagacctgcagagttgcttttatttttgttaccccagctccacgccttaaccctcactttgaaataggatgtrtcaaccctattttgcagatgaggaaagcaagggtcagagaggttagacaactcttccagagtcacacagctgggaagtagcagctccaggagcagaagct

SEQ ID NO: 22633 - DNA, 201 bp, Homo sapiens
ttctcagtattacttttcttttttttttcagagtcagaggttccggttgagatcaagttgggagacacacccttgttcattctccttgagaagcagctatwatcaacagaacattgacagaacctgtgtttggggaaaggactgatggctttgagtctaggttggaaagcacacaggaaccactgtggtctcctcttgcag

SEQ ID NO: 22634 - DNA, 201 bp, Homo sapiens
agtaatcatagactttaacaattgctggcttcaagtctcctactgggatgtcttgcagaaccatgaaggaaaaacttagcgtctgatttgtcacctgaaasgaaaagtgggagtaatcaagaacctagaaaacctccttctttctcccatgagcaaaacatattcttattgttctttgactctttttcaccagtgtcttta

SEQ ID NO: 22635 - DNA, 201 bp, Homo sapiens
aattgcttgaaaccgggaggcagaggttgcagtgagcccagatcatgccattgcactccagcccagacgacagagcaaccctccgtctcaaaaaaaaaaaaggtagatcacaaccttctttgactaatactctatccacacccactcccctatttaaccagtgtgtcccctctaagaatctttatcctcatggttcacatg

SEQ ID NO: 22636 - DNA, 201 bp, Homo sapiens
cccagagttcgaggctgtagtgaactatgattacaccactgcactccagcctgggtgatagagtgagaccctctctctctcaaaaaaaaaaaaaaaaaaaagatttatatgtattatatatgtataaatacatagcctaaatatcaacttttacttaaattatacaggaggtatttcattgtcaaataagaaataacgttt

SEQ ID NO: 22637 - DNA, 201 bp, Homo sapiens
aataaaaaaaaatctttaggggtggaatgtaactatatgcagtagcggtaattctgctccatttgtaaggagggtgaaatgcgatatggtcatgtaccctyttggtacacaagttccataggctatagaaaaacaagtccataccctctgatatctgcattccttattcttgttatagcttacaaatcttctttagacact

SEQ ID NO: 22638 - DNA, 201 bp, Homo sapiens
cttccccactgcaccatacccacagagtgtgaaagtaggtattgtatgtaaattgtattttatgattttttggggtcattgttaacttttttcagttatcytggcagaaataagaaaattcttttttgctattccatatatctattgtgatatcagagtctgttgtttgtttgtgtgtttgtttgtttaagacagtcttgc

SEQ ID NO: 22639 - DNA, 201 bp, Homo sapiens
aagtattcatcgcttatcccctaacattatctagtagctataggagccggtgacctagtaaataataaaaaaaaatctttaggggtggaatgtaactatawgcagtagcggtaattctgctccatttgtaaggagggtgaaatgcgatatggtcatgtaccctcttggtacacaagttccataggctatagaaaaacaagt

SEQ ID NO: 22640 - DNA, 201 bp, Homo sapiens
tttcatttcactaccagagataaagtaaaaaatgcatgtttttgcttgaagtaacaacctagttgaaatgcagtcagtcagcaagtataaaggaaaggtgrctggatgctttagtgtgggaaaggttgtttgctcggtggaaaaggttggagagagtcagtcacagggcaggagcagtgaactcaaatgaccacaagcagc

SEQ ID NO: 22641 - DNA, 201 bp, Homo sapiens
accttaatgccataatccgggaccaaatcaagcatctgcagaaagctgtggaccggtccttgcaactgtctcgtcaaagagcagcggctcgggagctagcycccatgattgataaagacaaggaagccttaatggaagagatcctcaagctaaagtccctgctgagcaccaaacgggagcagatcgccacattgagggcgg

SEQ ID NO: 22642 - DNA, 201 bp, Homo sapiens
aggtatgcatgcagcgatcttcatagtacggtgcagtggccagattttagttaactgcaaaaataaatgtgctcttgttgtggaggatggaggaggggaavcaaaagaaaaaatgggagctggcatataaatggtcttgctaatgtgggtctttccagatcaaaacctttttgataattgtgtttatgtagtcctttctaa

SEQ ID NO: 22643 - DNA, 201 bp, Homo sapiens
ggtatgcatgcagcgatcttcatagtacggtgcagtggccagattttagttaactgcaaaaataaatgtgctcttgttgtggaggatggaggaggggaagsaaaagaaaaaatgggagctggcatataaatggtcttgctaatgtgggtctttccagatcaaaacctttttgataattgtgtttatgtagtcctttctaac

SEQ ID NO: 22644 - DNA, 201 bp, Homo sapiens
agccaacaagcaggtaatctcattctactggtgaaagcatgccagtcaaagctttcttaactaatttattccctaattttattgagtatcgagtatcgtcragatgagagttcagattcttggtaagtggataaataaaactgtcccagtgccagatcagaatgtcataataattattgtttttaaatgatgaaatacctg

SEQ ID NO: 22645 - DNA, 201 bp, Homo sapiens
gttttcacagtttcagttaccagctgatctgagaagtgcctatcagccttgatgaccttgactcaaaagggaccctgttgtcatcaaggagtttgtaattrgacagcagattgtatgtcttcacaaaattgttgcctattttttagccagcattttatcttgactccttaactacctaggcctatatccttctcctcctcc

SEQ ID NO: 22646 - DNA, 201 bp, Homo sapiens
tttcacagtttcagttaccagctgatctgagaagtgcctatcagccttgatgaccttgactcaaaagggaccctgttgtcatcaaggagtttgtaattggrcagcagattgtatgtcttcacaaaattgttgcctattttttagccagcattttatcttgactccttaactacctaggcctatatccttctcctcctcctc

SEQ ID NO: 22647 - DNA, 201 bp, Homo sapiens
cacctgaaaggaaaagtgggagtaatcaagaacctagaaaacctccttctttctcccatgagcaaaacatattcttattgttctttgactctttttcaccrgtgtctttaggtgaccagacatttgtggatgtcaagatgggttttagaatgcatccttgggaactctatttacagtcaacaaattttcacagattttctt

SEQ ID NO: 22648 - DNA, 201 bp, Homo sapiens
ctttgctacattccaggctgactccaggcagaacagggcattgcgaacaatagggttctgtaaaggcaaaatgtggttgtgtcaaactagggtgaatagarggcagagcaagccgagagctggatattgacagtcagatgttattaatagatttcagacagataggcagacagctagatattcatcatatttaaatagaaa

SEQ ID NO: 22649 - DNA, 201 bp, Homo sapiens
ctaaaaatacgaaaacttagccgggcgtggtggtgggcatctgtgggcccagctacttgggaggctgaggcaggagaatcacttgaacctgggaggcggargtttcagtgagccgagattgtgccactgcactccagcctgggcaacagagcgagactcttgtctcaaaaaaaaggaaaaactgtgactagttcttgttta

SEQ ID NO: 22650 - DNA, 201 bp, Homo sapiens
tccttctctgtagaaagtgtaatactctttccctgatgccatcccacatcatccaggacttcatctttgcaatttccttgtgcctccttcctcccttcacycctgggggatgttatgttgatgtgtgtcaggctcagaagtttgtggaacagttcacctttatggcattgttgagcagtgacccagagctcctgaaacagc

SEQ ID NO: 22651 - DNA, 201 bp, Homo sapiens
caattctcctcctcagcatctagagtagctgggattacaggcgtgtgccaccacgcccagctaattttttttgtatttttaatagagacggggtttcaccrtcttggccaggctcatcttgaactcctgacctcgtgatccacccgcctcggcctcccaaagtgctgggattacaggcgtgagccactgcgcccggcctta

SEQ ID NO: 22652 - DNA, 201 bp, Homo sapiens
cttcagtacaaaagctgtgagcctagggggaggaaaaatgcagtgctgaggctcttttcattgagcactttactgctctgttttgtacacacaggctcccscatcacagtgtgcacccaagaaagtcaattagctgttactgagagtttggagactttttctttttagcttagacatctctttttcttttttcttttcttt

SEQ ID NO: 22653 - DNA, 201 bp, Homo sapiens
ttcaagtgattctcatgcctcagcctcccgagtagcttggattacagctgtgcaccaccacgcctggctaattttttgtgttttttgtagaaaggggtttygccatgttggccaggctggtcttgaactcctgacctcaagtgatctgcctgcctgcctccgcctcccaaagtgctgagattacaggcatgagccactgtg

SEQ ID NO: 22654 - DNA, 201 bp, Homo sapiens
ctgtgagcctagggggaggaaaaatgcagtgctgaggctcttttcattgagcactttactgctctgttttgtacacacaggctcccccatcacagtgtgcmcccaagaaagtcaattagctgttactgagagtttggagactttttctttttagcttagacatctctttttcttttttcttttcttttctttttttttttt

SEQ ID NO: 22655 - DNA, 201 bp, Homo sapiens
cacactgaatatgttttctcctctgtaaaatgaagctaataactctcacttcccagggtagctataagaattaaataaggtaacattatggtttagaaatkgtttctccaccaaaactcatgttaaaacttaatccccaatgtggtagtattgagaggtggagcctttaagaggtgattggctcatgagggttctgctctc

SEQ ID NO: 22656 - DNA, 201 bp, Homo sapiens
tggcacagagaaacactgctggccaggtgtggtggttcacagctgtaatcacaacactttgggaggtcgaagcaggaggatcatttgaggccaggagttcragaccagcctgggcaatataatgagactggcccatcactacttaaaatgtaaacatttagctggggatggtggtgtgctcctctagtcccagctactggg

SEQ ID NO: 22657 - DNA, 201 bp, Homo sapiens
ggagaatggcgtgaacccgggaggcggagcttgcagtgagccgagatcacgtcactgtactccagcctgggcgacagagcgagactccatctcaaaaaaawaaaaaagaatagcagctatcaagaacttgataattcaaatacaaatacgtagataagatgtacagtggcaactcttttggcccaggtttactaaatggaa

SEQ ID NO: 22658 - DNA, 201 bp, Homo sapiens
ttttgtgctttaggaagaaggggtattaggtccaggagatacaagaaattagtcattagaaatattattggccgggcgaggtggctcacgactgtaatccmcgcactttgggaggccgaggcgggaggatcacctgaggttaggagtttgagactagcctggacaacatgatgaaaccccgtctctctactaaaaatgcaa

SEQ ID NO: 22659 - DNA, 201 bp, Homo sapiens
ttgcccaggctggagtgcagtggtgcgatcatggctcactgcagccccaacctcctgggctcaagtgatcctcccaccttagcctcctgagtagctgggaytacagctgcatgacacaacacccagctaattttgtattgtttgtagagacggggtctcactatgttgccaccgaggatggtctcaaactcctaggctcaa

SEQ ID NO: 22660 - DNA, 201 bp, Homo sapiens
ttccaggcagcctcagtgagagcaccctgaagtttttgctcctgaatccagctgtgcactttgcccaagtggtgaaggaatgccgggcagtggtcattgcsgggggtaccatgcagccggtaaggacacctttcccagcccctcgtgccccaggtgttgggatgagatggggacttgggagagatgcattatcagtcctgt

SEQ ID NO: 22661 - DNA, 201 bp, Homo sapiens
gtctgttgggcttgcactcacctcccaccgatctgtttttccaggcagcctcagtgagagcaccctgaagtttttgctcctgaatccagctgtgcactttscccaagtggtgaaggaatgccgggcagtggtcattgcggggggtaccatgcagccggtaaggacacctttcccagcccctcgtgccccaggtgttgggat

SEQ ID NO: 22662 - DNA, 201 bp, Homo sapiens
gccggtaaggacacctttcccagcccctcgtgccccaggtgttgggatgagatggggacttgggagagatgcattatcagtcctgttctctcctggggccscaagccagaaagggtcagctcgagcaggcccagtggtgtccactgggtgacactgctattctctcactgctgtgccttttaggctgcaggagcagtgcag

SEQ ID NO: 22663 - DNA, 201 bp, Homo sapiens
gtgatattttgctttttactgatctttaaagcaactcacagaagtgtattagccttagatacgtaatcaccccttgagatatatagtcaacagtacacacygacatgttcatagtaaaaactgcctttatgtttcactgcattcaagcaagtagatatttgtttgtttcacgtattgcaaagcctatgttcttaagcatgt

SEQ ID NO: 22664 - DNA, 201 bp, Homo sapiens
tcagcactacaacctggtgcaggacttcgaagtaatagaaagcgaggctgcaaaggtggacagggacctgaagacagagggccaggttagtgagagcagacttaccacgggcatagcttagcagttttaagaataggatcagattttcatttgataaaatcaccctgatgacaaggtggagagtggattagatgtgggtaa

SEQ ID NO: 22665 - DNA, 201 bp, Homo sapiens
atcatcgtaccaccttgagttaactctgtgccagctggccttgctcttgagaaggtcatttctaaacagaaggttattttttgaaagatttttaactggtrtaagaatctggcagcagaatgtacttttacctcttggtgccactgtatttaattaccctctccccatttatcctccatgtctttcctaccataagctatt

SEQ ID NO: 22666 - DNA, 201 bp, Homo sapiens
attacttgccatttttaaaggaatgccttataagttatagtcttcatcttcactttttaggacccaatggtgagtcagggtctatggtgtctcaagaattyggccacctccacgaccaacctctacacacaggccctgttggcttacattttctccctggctggggaaatggacatcagaaacattctccttaaacagtta

SEQ ID NO: 22667 - DNA, 201 bp, Homo sapiens
tgattaattgcccatttaaagaaactaggaattctagaagagctgcataccaaaagaaagatcacaaagcttagcaagctagaacagaaacactccaaaakagcttcctgtgatgatgaaaatgttctctatctacaaggtccaatttggtagccacaagtggctcctgagcacttgaaatgtggccagtgttattaagaa

SEQ ID NO: 22668 - DNA, 201 bp, Homo sapiens
gacattaatcaatatgtgtaagatgtgcattggttcgttctggtaacgcgggataacttgaggcaagggcttccaggtcccacataggtaagagacaaaargttgcattcttttaaatccttgatcatctttccactgaatacacaatttaggctggctcagtgaatctgcatttttacataaacaatagggcaggggaag

SEQ ID NO: 22669 - DNA, 201 bp, Homo sapiens
gcaaattgtgagggaggtatgtagcttttttttgagacggagtcttgcttattcgccaggctgaagtgcagtggcgccatctcggctcactgcaatctccrcataccaggttcaagcgattctcctgcctcagcctcctgaataactgggattacagtcacgcaccaccacgcccagctaatttttatatttttagtggag

SEQ ID NO: 22670 - DNA, 201 bp, Homo sapiens
tttgagatggagccttgctctgttgcccaggctggagtgcagtatgcgatctcagcactttggggcgggggcaagatgaacagatcgcttgagttcaagasttcaagaccagcctgggcaacatgtctaaaccccatctccacaaaaaaatataaaaattagctgggcgtagtggtacccgcctgtagtcccagctactca

SEQ ID NO: 22671 - DNA, 201 bp, Homo sapiens
taaacatttttacatataagaaatggtggtccgtacagggatacattttcctctggggtggtctctagtcctctcatgagggggtctcccactgcctcatygtggtggcctcaggggtagtaagaaattgagacccatctggtgtgatgaatagacccggactctcaacaaggcagaagaaactggccagcaatctggagt

SEQ ID NO: 22672 - DNA, 201 bp, Homo sapiens
cagtaccctgagggtcagccccccgagggccattcagcctccatcttccaagaccaattttacctcgtgtctccaacgataaaaggaaaatttagcgtacyttgaagacttaacatgatacagcgaggtcaggcacttccaaaagctaacccatcagtccacccttattcatccccaagcggatgcatagtaatactgtaa

SEQ ID NO: 22673 - DNA, 201 bp, Homo sapiens
caagttctatttctttttatatttatcatttatattaatatgtttgagattgtgtgtgtatatgtgtacatgcacacatacactcaatatgtgcaaatgtrtatgtagttttacatgttttttatcattattttataaagtttttgtaaaaccttataaaaacttatttttaattgctacattatttctcatataaatatg

SEQ ID NO: 22674 - DNA, 201 bp, Homo sapiens
tcttgttaactgaaatattccactctgtcaatgggattaatggttggagattatgatacaaccaaaaccaaagctgggcaatgggctcttggactggaatyacccattatgaactatccatctgaccaactctttaactttcttcctaaacgtcagatcaccagggcgtttcagtgcagcctgcacaattcagagagtagg

SEQ ID NO: 22675 - DNA, 201 bp, Homo sapiens
catcaacatgtgtgtgaaaattttggttgatatatgaaacattcagaatttgaatcagatgaacccaatgaaaagccctcagggaaaaaatgattgtattracattgtatagttggcaatcaggtaacaattcgaatgagacagtgatatccattggggtctggcttcttagagagcattacctgttccgttctctgtaac

SEQ ID NO: 22676 - DNA, 201 bp, Homo sapiens
tatattgtcttgttaactgaaatattccactctgtcaatgggattaatggttggagattatgatacaaccaaaaccaaagctgggcaatgggctcttggamtggaatcacccattatgaactatccatctgaccaactctttaactttcttcctaaacgtcagatcaccagggcgtttcagtgcagcctgcacaattcaga

SEQ ID NO: 22677 - DNA, 201 bp, Homo sapiens
agtactgcttgtcatttctatcatctgatacatctatacttccaaataatcctaactgatactcaaagtgatgccttgacaccctctgaggttctacaggmtcttccaaatcaaagagaggtcacatcatgcatagtattatttgggggttagcatacgttttgtaataattatgttaaaattggtaatccctttttgggt

SEQ ID NO: 22678 - DNA, 201 bp, Homo sapiens
tctaccagtttcgtgtcccagtttgccacctgtaaacatgtgaacactggcactggcatggatgcctggggcaactagcgcttcacctatgatgggggctrgcgctctaccagtgatgggggccttattacagccagccaggtgcagcaacaacatcctattttagagtcagttcctaggaccacatccagtaccagctgt

SEQ ID NO: 22679 - DNA, 201 bp, Homo sapiens
cacatgaagaatccaccaatggacaaatgttgtcaaaccagagatgactagaaagcactgggtagatagcataagcgctgctggtaaattggcttaaaackaaaataaatgtgggattgttgttattaaacagaacaaatataaacattaagaaacataatataattaacaaaaattgagaagttgtagagagaaaaagga

SEQ ID NO: 22680 - DNA, 201 bp, Homo sapiens
ttattgagccacctgcacaatcaaacatctcggcatggtaaaatctcagcttgcttctaggtatctgcctggtccttcaaatcatcacagggttttcttarctatacactacatgtcagatactctgaccgccttctcttcagtcactcacttctgctgagatgtaaattattgctgaattataattatgctacatgctaa

SEQ ID NO: 22681 - DNA, 201 bp, Homo sapiens
acaacttcaaagactgaaggaatatcagcctataaaaatgagaaagaaccagcatgagaactatgacaactcaaaaagccagaatgtcttctttcctccaratgactgcattagctttccagcaagagttcttaatcaggctgatatggctgaaatgacagaaatagaattcagaaatatggataggaatgaagatcactg

SEQ ID NO: 22682 - DNA, 201 bp, Homo sapiens
cttcactttcttcctttcctccccacccctcactgttcaacagataacctgagtgcattcagtttgtaaagcacagtgctggggccgtgaaagccagagaygaatcagacaacacacaaccactctcaaagagattcagggatcccaggagggaagaaaggaacatcagtaagcacaacgccccgcaagcctgggtttcac

SEQ ID NO: 22683 - DNA, 201 bp, Homo sapiens
tggcatgactgatgcatgatttctaagctgtgctgggctaagcagacgtgcaattgaacaggattccaggaacccactgactgagacttaccaaatagaakaactttacattggaatcatcctcatatgcttcactgtttagggagtaatgcacagtaacaaccttctggtgattacattcaagctgctttggttctggaa

SEQ ID NO: 22684 - DNA, 201 bp, Homo sapiens
tggggccgtgaaagccagagacgaatcagacaacacacaaccactctcaaagagattcagggatcccaggagggaagaaaggaacatcagtaagcacaacrccccgcaagcctgggtttcacatctgtttagcagcagcatgaccttaaggaggtcactaacaggtcaacgcctcagcttcttccactgaaaaacaggaat

SEQ ID NO: 22685 - DNA, 201 bp, Homo sapiens
ccaaggctcgcagaaccctgttctcttgttatgtaagtttcagtacgttcagtacgtaggcatgattgattaaatcatttgcctttggtgatcaacttaamcttcagcccttctttgctccctggaggttgaggggtggggctgaaagtcccaattcttattctgacgttggtttttgaggtaaccagaccccactgaagc

SEQ ID NO: 22686 - DNA, 201 bp, Homo sapiens
aaagaaaagacacttcagccttaattcacttgctttctttccatatctctgcctatatttacaacaaggcttattttttattttattttatttttttttttgagacaaagtctcactctgttgcccaggctggagtgcagtggcacaattttggctcactgcaacctccacctcctgggttcaagtgattctcctgcctca

SEQ ID NO: 22687 - DNA, 201 bp, Homo sapiens
cagtggtcattgcggggggtaccatgcagccggtaaggacacctttcccagcccctcgtgccccaggtgttgggatgagatggggacttgggagagatgcrttatcagtcctgttctctcctggggccccaagccagaaagggtcagctcgagcaggcccagtggtgtccactgggtgacactgctattctctcactgctg

SEQ ID NO: 22688 - DNA, 201 bp, Homo sapiens
gacaagagggaggcctcctccccattctgctctgtgcagctcttgcagcccctgcagacgagagtcaggccagcgtcccgcaaccagcttccccactgatkcacatcgaaggcttcctggcagctctcactacggccaaccaggacggcagggtcatcctgagccgccaaggtaatcaggtggttcttggccaggttcagt

SEQ ID NO: 22689 - DNA, 201 bp, Homo sapiens
gggaggcctcctccccattctgctctgtgcagctcttgcagcccctgcagacgagagtcaggccagcgtcccgcaaccagcttccccactgatgcacatcsaaggcttcctggcagctctcactacggccaaccaggacggcagggtcatcctgagccgccaaggtaatcaggtggttcttggccaggttcagttcccagg

SEQ ID NO: 22690 - DNA, 201 bp, Homo sapiens
ccagagttacccacaggatgagtgagggagctggttatgaactgctgggggagtgttacagttcaggctgccagagcaaaccttgtcatggaaatcagccrggcatacactacagagtcagaagtagggatggaggcactgaagatggcaggcacaaacacagtgcaaaattttcatcatcaactctatgttttatatact

SEQ ID NO: 22691 - DNA, 201 bp, Homo sapiens
tagaagatgctcagtaaatgtttgtgaaatgaagttgaataaaatccttactctcaaaactcatttttgctatattctatacaaccaaaggtaaatgggargattggtagaagttttccttggaccggcaaacctttcccttgtcccattttaaaaaaacataaaccgaggcgggcagatcacgaggtcaggagattgaga

SEQ ID NO: 22692 - DNA, 201 bp, Homo sapiens
ccttctctactaaaaatacaaaaaaattggccgggcatggtggcgggtgcctgcagtctcagctactcgggaggctgaggcaggagaatggcatgaacccrggggacggaccttgcagtaagcagagatgcgccactgcactccagcctcggtgacagagacagactctgtctcaaaaaaaaaaaaaaaacaaaaaccata

SEQ ID NO: 22693 - DNA, 201 bp, Homo sapiens
cccaatccttgccagacctcatttaactaatagcttccttttcaaggactgcaggcagaggcagagtgcttgctgttacatgaagtgtgctccagtgctgstggcttgggacaatgaattcatgcagatctcaggcgatggcaggagaagtattggatgctcctgatcagttggtacatctgtatatgaaatacaggagga

SEQ ID NO: 22694 - DNA, 201 bp, Homo sapiens
gccgggcagtcctgcccgctgtacagagaaagtggtcgacacagcaggggaatttaaagatcacctctaaccatctcagttcttaagtggcatctttagtkgggcctaggaattaaattgacataaggcagattaacagaagaaaagcacacaagttttattaatttttacctgtacaaagggacacttacaagagagtga

SEQ ID NO: 22695 - DNA, 201 bp, Homo sapiens
aaaactatactgtgggtggtaaacaaagatggttttaatcactcacagtttgtgctggcagctgaccataattccttagtagcaataccctctggtctacmgcccaaagagcataaagagagtttgaagcagccgagacttgaagatcgacattggatcctggtaaacttttttctttagaaaaatttaagttgacctgaa

SEQ ID NO: 22696 - DNA, 201 bp, Homo sapiens
cagagaaagtggtcgacacagcaggggaatttaaagatcacctctaaccatctcagttcttaagtggcatctttagttgggcctaggaattaaattgacataaggcagattaacagaagaaaagcacacaagttttattaatttttacctgtacaaagggacacttacaagagagtgaacacctgaggaaatggccaaagc

SEQ ID NO: 22697 - DNA, 201 bp, Homo sapiens
gacttgctacatgtaggaaaggacaggtcagagagccctttctgcaattacagtctctcaagtactttcagcttgaaataatcagtacatcacatcagccrattttggggtggctcatccttaactcctgcaacacttttgcttagtggttttatcattatatattgtataaatatatatatatagtatacatctataacc

SEQ ID NO: 22698 - DNA, 201 bp, Homo sapiens
aggtgagctgagctaccggagtccttggaaagacccagtgcccttcttcttagggtcaagaaggaaggcacaaagagggagagaggctcagcagaagaggyccctaagctcccaaggcaggctgctggatgctgagagatgaggccaggtcaactgccctaggaggggaaggggaggggagagccctggcaaggaagcccc

SEQ ID NO: 22699 - DNA, 201 bp, Homo sapiens
ccttgtctcatcttacaagaaaagtcactttgaaacaatggacataatctttgcttcttcttttttttttttttttcctgagacagagtctcgctctgtcrtccaggcaggagtacagtggtgccatctcagttcactgcaacctccacctcatgggctggtccaccatgatcctcccacctcagcttcccgggtagctgg

SEQ ID NO: 22700 - DNA, 201 bp, Homo sapiens
ccctggcaaggaagcccccaaggctactgactccacaggaatcatctcctgagcctggctggggtggtgtgagcctagtgaaccacacgcgctcctttctytgctactccagcaggaactggccgctgtgaaccctcttcccacattagccggctctcacactgtgactaaagagaccagccaccacatggtcccggttac

SEQ ID NO: 22701 - DNA, 201 bp, Homo sapiens
cacgcccggcccatagtaggtacttattaaatgatagctaatacgtgtttgttcagtgaatgatgataactcttagagggtcccttcttctctgtaccccyaccttctctctctccttttggatcccaggagacattatgggcacagccctgcagaacctggatggtctggtgcagatgcccagtggctgtggcgagcaga

SEQ ID NO: 22702 - DNA, 201 bp, Homo sapiens
tttctctgctactccagcaggaactggccgctgtgaaccctcttcccacattagccggctctcacactgtgactaaagagaccagccaccacatggtcccrgttacaggggcggctggggccttgccatctggcaggacctgctgccactggcgctcgctgtctgtgagcacagggtctggtgggcaggaggtgactggag

SEQ ID NO: 22703 - DNA, 201 bp, Homo sapiens
ctgaaacctactgggaaatccagttgaaataacattcaagttttcccttactcaagtaatcactcaccagtgttgagatagccaatggccttggacttgayctctggagtaagctgctgtgtttcatttagataatccagtacatagatgttaggagcaaagaggaccatattctgctctccacagccatagggcatctgg

SEQ ID NO: 22704 - DNA, 201 bp, Homo sapiens
cctggttccctagcaaacctgagctttatttatatatctgatatgcaccccatctccacagctggcattcaattgcaactctaaattctaaagtgctcagrgtcaatataatgcactgacgattcagacctgactgggcattttcactgcataaatctaaaaagtaaacaatctcattatgtttgagaggatggatgggga

SEQ ID NO: 22705 - DNA, 201 bp, Homo sapiens
ctttctgcaattacagtctctcaagtactttcagcttgaaataatcagtacatcacatcagccaattttggggtggctcatccttaactcctgcaacactkttgcttagtggttttatcattatatattgtataaatatatatatatagtatacatctataaccatttatttattatacttacattaatttttttcctata

SEQ ID NO: 22706 - DNA, 201 bp, Homo sapiens
aggatactcactgtctcctgactccacaggcagagtgtgggttccagatctgacgatgactcccttagccatgatctgaaatgaaaaaacagtgaaggaartttcttgagctggacacagttctcagccttctattccccacatgacccactttcagttgtcaagtctgtgctggagagaatcaacctcaagaaaactcat

SEQ ID NO: 22707 - DNA, 201 bp, Homo sapiens
attttgcaattctatgaaaaattgggagtttaaacccaacactctcttaagttctccttagttttcccccaaattaaaaaagaatcatttttggcacctamctgattttcgaagcatttctcaattggaattgggtgctatcagtgaccatttctcctccaggatgcaagctatagacaagcatatgtactgagggcgcta

SEQ ID NO: 22708 - DNA, 201 bp, Homo sapiens
tctcctaaagtgatgggattacagccgtgaaccgccgtgcctggcccattttaccattttaaagatgacatctcattgcttttctccttttttgtttctgwtgagaatttagctatcattcatgtgttgtttcccattattaatgtgttatttattttcctctggctgttttcagtattttctttttatctttggttttta

SEQ ID NO: 22709 - DNA, 201 bp, Homo sapiens
tcatcatgttagccaggatggtctggatctcttgaccttgtgatccgcccaccttggcctcccaaagtgctgggattacaagcgcttgtaatcccaccackcctggcctatttttttaaacatttgaaagtacaacacacagaaagtataactttaaggtggcataaaaactaggtgttagaatttttatctcaaccacca

SEQ ID NO: 22710 - DNA, 201 bp, Homo sapiens
ctgaatgaaaacatatccacacgtaagtgccactcacacactctgtgtccggggcgtggaataggccaggagaaccttggtctgaaaatacgaagagctcrtttcttcctcttaatctatcactagtaccacaatactgagttgagatcattattgctatattacctcaagccaatcattaatgtcaatggtattaacttt

SEQ ID NO: 22711 - DNA, 201 bp, Homo sapiens
tgacaagccttgagaagaccaccaaggagagtggtgagaagatggcccacatggagaaggagttgcaaaagatgaccagcatagccaacgaaaatcacagyacccttaatacggcccaggatgagttagtgacattcagtgaggagttagctcagctttaccaccatgtgtgtctatgtaataatgaaactcccaacaggg

SEQ ID NO: 22712 - DNA, 201 bp, Homo sapiens
ccacaatactgagttgagatcattattgctatattacctcaagccaatcattaatgtcaatggtattaactttttctcatttgtaaaaatgataaaacttsgtttaagatgttccgtatagtcccttgaaattacttttgtttgtttgttcatatctatctataaaaacaagctgatgtagcattttttgttttgttttgt

SEQ ID NO: 22713 - DNA, 201 bp, Homo sapiens
atgacaaaatgaacggtcatatccatgggcctcttgtgaaactgaatggagactatcggactcccaccttaaggaaaggagagtctctgaaccctgtctcygacttattcagtgagctgaacatttcagaaatacagaagttgaagcagcagcttatgcaggtaagaactttgtttagggccgctagagtgaatttcttgt

SEQ ID NO: 22714 - DNA, 201 bp, Homo sapiens
aaaggagagtctctgaaccctgtctctgacttattcagtgagctgaacatttcagaaatacagaagttgaagcagcagcttatgcaggtaagaactttgtktagggccgctagagtgaatttcttgtagattgcaggtagcatgttgtgggacttctgattctcgcatttcacttctagatttcttttcttttttcttttc

SEQ ID NO: 22715 - DNA, 201 bp, Homo sapiens
ttttaaaggaatgccttataagttatagtcttcatcttcactttttaggacccaatggtgagtcagggtctatggtgtctcaagaattcggccacctccaygaccaacctctacacacaggccctgttggcttacattttctccctggctggggaaatggacatcagaaacattctccttaaacagttagatcaacaggct

SEQ ID NO: 22716 - DNA, 201 bp, Homo sapiens
gatccgcccacctcggcctcccaaagtgctgggattacaggcgtgagccactgcacccggcctaatttttcatagttttttgtagagatagggtttcgccrtgttgcccaggctggtctcaaacccctgagctcaagtgattggcttgtcctcccaaagtgctgattataggcgtgagccactgcacccggccatgttttt

SEQ ID NO: 22717 - DNA, 201 bp, Homo sapiens
ttttttctttatgcatacttaccctctttatttcttactggcttacctaaaatatgtgaagaggctgcttgccaggaggtgagagaaactggaggagagtrgtaatgcaatgagttttggatttcttttttttttttttttttgaggcagagtctcaatctgtcacccaggctggaatgcagtgagtggtgcaatcttggg

SEQ ID NO: 22718 - DNA, 201 bp, Homo sapiens
aaaatatgtgaagaggctgcttgccaggaggtgagagaaactggaggagagtagtaatgcaatgagttttggatttcttttttttttttttttttgaggcmgagtctcaatctgtcacccaggctggaatgcagtgagtggtgcaatcttgggtcactgcaacttctgcctcccaggttcaagcgaatcttctgtctcagc

SEQ ID NO: 22719 - DNA, 201 bp, Homo sapiens
gaatccaatgacagctttggacgtccccttcccccataatctctgtgcagaccctcaacctcaccccagatgcctttggagttttcattctttattataarcaattgatagtttctcagacttttatatacagcgtaaagaaaatccgtacccagccgggcggtggctcacgcctgtaatcccagcactttgggaggccga

SEQ ID NO: 22720 - DNA, 201 bp, Homo sapiens
tagattaatatctgtggttcaagagcctgagtttgcaggaacactcagtaatacagagaaaatgtatttcccacagactatagtgcaaaacttcagaatarataaaagttgacttcagtaacacatgggtatcccttctgccctccttccctcccatttactgcatcttttttttgatctttggtgctctcaccggactct

SEQ ID NO: 22721 - DNA, 201 bp, Homo sapiens
ggggcaggtccacgtgtgttggtaggatgtcatttagctggcaccatctctttgcctctttctttctcctttgttgcagaacctttgtgtaaatgaagacrtgagaagcctaggttctgtgcagcttatcaacgaccgctgcgtggacatgcagagaagcaggcacggtagccaccaggaccatggtgtagccgcaggtgg

SEQ ID NO: 22722 - DNA, 201 bp, Homo sapiens
ggcaggaggggtctcagggaggggacgatcatggagggctgtcctgcatgcccatgctaaggagtctggaccagggcctggaaggatccgataagcccccraagggtttcattaggagaacaaccagagcagacctgcactttaaaatgacagctccctgttctgcctgtggaggacagacgtggcaggatggagaagggc

SEQ ID NO: 22723 - DNA, 201 bp, Homo sapiens
cttcttttatgtacaatccatgcatttgttccacagacatctgatgtttactgaatgccctgtgcaacagagattgaggattcaaaggtgaacaacagatkatctttctctgcagggggctgtctctatgcacatcactcacaaatatccatctacggtccctcacaaatatccatctacagtcccaagctccttccccta

SEQ ID NO: 22724 - DNA, 201 bp, Homo sapiens
gttgccttaccttcacaaggtcatagccatcttttccaaagtcagcccatgcaggtgtgtaataaattccattgtaaaggatatgtccatcttcaagacayggcactttaaggccatcttctaagttaagtcctctgaaataatagccatgtagttcgctggaatgtagctgactatacacctagatggtagaagagagtc

SEQ ID NO: 22725 - DNA, 201 bp, Homo sapiens
ccaagatcccgccattgcactccagcctgggcaacaagagcgaaactccatctcaaaagaaaagaaaaaaaaaagtaaaaacaacacctaggaggtgttaytattcttactttatagatcagaaatatgctttcaataattcttgtttatttatttatttttgagacggaatctcgctctgtcaccctggagtgcagtggc

SEQ ID NO: 22726 - DNA, 201 bp, Homo sapiens
cacctgccttggcctctcaaagtgctgggattacaggtgtgagccactgcgcctggcccatcttttttttttttcttttctttttgtagagagagagagasagacagagttttgccgtgttgctcaggctgatctcaaactcctggcctcaagtgatcctcccaccttggcctcccaaaggatataatcccatgcctggaa

SEQ ID NO: 22727 - DNA, 201 bp, Homo sapiens
ttataaagcttcctaggaaagggtaagacaagcacaagacagtagtatcaaagaaaaaaaaaaaaaaccaagacagtagtatcatgtacttttcattatgkcttttttttttttttttttttttaaacagagtttctctcttgttgcccaggctggagtgcaatggtgcaatctcagctcactgcaaactctgcctcctgg

SEQ ID NO: 22728 - DNA, 201 bp, Homo sapiens
aaagaggaaggtgtggctttcttttcctccgggacacagaaggtcgtccttcctacctactggctgccctcgggggcaaccccttgcccagcaccaaggaygtcaagaagatcctgtacaatataagcaataaggccaatggcaaccagtgcagcaagatcatcagtgagctgaatggaaaaaacattaaaggtgtcattg

SEQ ID NO: 22729 - DNA, 201 bp, Homo sapiens
agattaagcgatttgaggaggagacggtactgctgaacagccagctggaagatgccatccgattgaaagagattgctgagcaccaactggaagaagccctygagactttaaaaaatgaaagagagcaaaagaacaacctgcggaaggagctctcccagtatatcagcctcaatgataaccatatcagcatctcagtagatg

SEQ ID NO: 22730 - DNA, 201 bp, Homo sapiens
acaagatattttaaaattttatttttccttattaagcgaattgaattatttcaagcatcagtgagagctgctagactgttatatttcgggggtcttgcggrgtagcttttcttacacatataagcagaagaaaacattttcccaagtcttaaaagagggttatgatgcatttcattgtgtactctttttcttcccatatac

SEQ ID NO: 22731 - DNA, 201 bp, Homo sapiens
gccttgacatattgctacactccccaaataagacttacttcaagtgaatatacattagatatctgcaggaaaaatgaagaagagcaagacagcaaccatcmcttccctttaagaattcccttcaagaacaaggatttttctccatataacaagaatgtgattgcaaattgcttcacaaaaaagtaatctggcagagctgta

SEQ ID NO: 22732 - DNA, 201 bp, Homo sapiens
caagtctttgtgtggacatgttttcatttcttttggggaagtacgtaacagttggattgctgggtcatgtggtaactctgtctttcacataatcagaaacyaccaaactcttttcaaagtattcataccactgtggtttgtgtccctccaaaactgatgttggaatttaattaccatggcgactctattaagaggtgggac

SEQ ID NO: 22733 - DNA, 201 bp, Homo sapiens
tttagtagagataaggtttcgccatgttggccaggttggtctcgaactcctgacctcaagtgatccgcctgcctcagcctcccaacatgcgtgagccaccrtgcccggccagcattacataagctttcaaaacatgatttttactatcctatcctaaaagtttttttttttttttttttttttgagactgagtctcactct

SEQ ID NO: 22734 - DNA, 201 bp, Homo sapiens
tgttttggagaaggggtctccatctgttgccctgcctggagtgcagtggcacaatctcagctcactgcaacctccgtctctcgggttcaagtgattctcckgcctcagcctcccgtgtagctgggaccacaggcacacaccaccacgcctggctaatttttgtatttttagtacagacagggttttgccatgttggccagg

SEQ ID NO: 22735 - DNA, 201 bp, Homo sapiens
catcctatacttttagagtagctcatctcagctagttgttataaggaaagtaaactaagtcaaaattagtcatcaatgaattattagcttttagtactgcrggagattttttttttcaagagtaccaatgtgtccggaattggtgggttcttggtctcacttcaacaatgaagctgcggaccctcgcggtgttacagctct

SEQ ID NO: 22736 - DNA, 201 bp, Homo sapiens
gcaagaacgcttaaccaaccttgggttagaggcccaaattagaagagttatcccttctaagatttagggagttagaggcctctctcagtaaagtccttctyggctaagaatgggtttgacactattaactgctattctctttcaaataatctgccttgcactctttgctgacagctatgggtgacaggattaggcatgaac

SEQ ID NO: 22737 - DNA, 201 bp, Homo sapiens
tggggagacagcactggcctgcccacctcactgggctctgacaggaggcatgccaggcgtgctgttcattattatttcagaacagtgctgcttaactccasggaccaagctgcttctgtgaatgaggggtagggaatcccagaggccaaggccgcctcatctctcagggaccttctggctcattagatggcctcgtccctc

SEQ ID NO: 22738 - DNA, 201 bp, Homo sapiens
gggaggtgaggtccattgggtggatccactaagctttggaagcagagagtttgggctggagatggtgagaaaccacatagtggttggagcattttagggtytgtcagaagggtcagggctgctggctggggtaggagcaggtgctggggagacagcactggcctgcccacctcactgggctctgacaggaggcatgccagg

SEQ ID NO: 22739 - DNA, 201 bp, Homo sapiens
actgcgggaggtgaggtccattgggtggatccactaagctttggaagcagagagtttgggctggagatggtgagaaaccacatagtggttggagcattttrgggtctgtcagaagggtcagggctgctggctggggtaggagcaggtgctggggagacagcactggcctgcccacctcactgggctctgacaggaggcatg

SEQ ID NO: 22740 - DNA, 201 bp, Homo sapiens
ctactcgggagcctgaggcagcagaatggcttgaacccgggaggcggaggttgctgtgagccgagatcgcgccattgcactccagcctgggcaacaagagygaaactccatctcaaaaaaaaaaagagagagaaataccattacatgtcccttgcttctaggagctaccttgatcaagtttgccgaagaaggaatcatatg

SEQ ID NO: 22741 - DNA, 201 bp, Homo sapiens
ctcgaacttctgagctcaagtgatctgcctgccttggcctcccaaagttctgggattacaggtgtgagccactgtgcccagcctaggtctattttcttatrcttctttctattcatgtgtatgtgtgcttgtgcatgtgtgtttaacatggatagtaatatggttatttcctataggtataattttagattattttttgct

SEQ ID NO: 22742 - DNA, 201 bp, Homo sapiens
cgagcgtggtggcgcatgcctgtaatcccagctactcgggagcctgaggcagcagaatggcttgaacccgggaggcggaggttgctgtgagccgagatcgygccattgcactccagcctgggcaacaagagtgaaactccatctcaaaaaaaaaaagagagagaaataccattacatgtcccttgcttctaggagctacct

SEQ ID NO: 22743 - DNA, 201 bp, Homo sapiens
gaaaggcaggcactagaataccaggtactgggtgagtgaaagcacagtgtgacctggcaagggaaggggaggcgagagcaaagcagttgctgtctctccartttctccttcactaaccacctcagcccagggcctggaaagaaaaagaacttaaggacttccacaggctgagactggatgctgaaggtggacagtggctca

SEQ ID NO: 22744 - DNA, 201 bp, Homo sapiens
gcagatcacctgaggtccggagttcgagaccagactgaccaacatggagaaaccccatctctactaaaaatacaaaattagccgagcgtggtggcgcatgyctgtaatcccagctactcgggagcctgaggcagcagaatggcttgaacccgggaggcggaggttgctgtgagccgagatcgcgccattgcactccagcct

SEQ ID NO: 22745 - DNA, 201 bp, Homo sapiens
tcaagtgattctcctgcctcagcctccccagtagctaggattacaggcgcccactaccaagcctggctaatttttgtatttttagtagagataaggtttcrccatgttggccaggttggtctcgaactcctgacctcaagtgatccgcctgcctcagcctcccaacatgcgtgagccaccgtgcccggccagcattacata

SEQ ID NO: 22746 - DNA, 201 bp, Homo sapiens
tctatttttcctcacttgaaattacatggacacacctgcaactgtatgtgttttttaaaactccaagaactgtacaccaaaaagagcaaacttaaagctgrgagttgtggctcacgcctataatcccagcactttgggaggctgaggtgggtgagtcgcttaagcccaggagtctgagacaagtctggacaacatggcgaa

SEQ ID NO: 22747 - DNA, 201 bp, Homo sapiens
tcccagcgcttttttctttttttttaagatggtgtctcactttattgcccaggctggagtgtagtggctcgatctctgctcactgcagcctctgcctcccrggttcaagtgattctcctgcctcagcctccccagtagctaggattacaggcgcccactaccaagcctggctaatttttgtatttttagtagagataaggt

SEQ ID NO: 22748 - DNA, 201 bp, Homo sapiens
ggccatgccccaccgcctctccagccccactgggcacactggtaaggctggggcctctgcccacagtcagggcctatcgtggcctggagcccacacctacyaccctgactacagcgggactgagggcactcatggtatctcatggaaaacaaactgaggcccaggaggaaaatgtttgtttaaaattttgcacgccatttc

SEQ ID NO: 22749 - DNA, 201 bp, Homo sapiens
cctgggccccaactctgaagcagctgcctggcagagacagtgaggagggtgcagggagaggactttgccctccactgctctccagccaggacacggccccrgctggcagcctttcattctatactgagccaagagacacacaccagagccccaggctggccatgccccaccgcctctccagccccactgggcacactggta

SEQ ID NO: 22750 - DNA, 201 bp, Homo sapiens
tttctttttttttttttgagacagagtctcactctgtcacccagtctggagtgcagtggcacaatctcggctcactgcaagctccgccgcctgggttcacrccattctcccgcctcagcctcccgagtagctgggactacaggtgcccgccaccacatccggctaattttttgtatttttagtagagatgggatttcactg

SEQ ID NO: 22751 - DNA, 201 bp, Homo sapiens
gtgcagtggcacaatctcggctcaccacaacctccgcctcccaggttcaagcgattatcctgcctcagcctcccaagtagctgggattacaggatgcccggctaattttgtatttttagtagatatggggtttctccatgttggtcaggctggtctcgaactcccgacctcaggttatccacccgcctcagcctcccaaag

SEQ ID NO: 22752 - DNA, 201 bp, Homo sapiens
gagtgcagtggcacaatctcggctcaccacaacctccgcctcccaggttcaagcgattatcctgcctcagcctcccaagtagctgggattacaggatgcchggctaattttgtatttttagtagatatggggtttctccatgttggtcaggctggtctcgaactcccgacctcaggttatccacccgcctcagcctcccaa

SEQ ID NO: 22753 - DNA, 201 bp, Homo sapiens
aggagaactcagataaactcgtgggagaaccacaatgtgctgtggaggggagcaggcatgcgggtacactcctgacctccacagacggcccctaccaccargcctgatggagctgcctacctagcatgggtaggcctcattccttcagagaaatggaagaaattttaatttctttaaaataaaatcctttaattttaagag

SEQ ID NO: 22754 - DNA, 201 bp, Homo sapiens
attacaggcatgcgccatcatgtccagctaattttgtatttttagtagatgcagggtttcaccatgttggtcagcctggtctcgaactcctgacctcaggwgatccactcgcctcagcctcccaaagtgctgggattataggcatgagccactgtgccaggcctatgtgaagccatcttttaaaactttacactgctataa

SEQ ID NO: 22755 - DNA, 201 bp, Homo sapiens
catgccaggaagaatattaagggaccaggcccctataattaggcctaatcgtagcctgttgtttgaaaagggtatgaaggacattcatcaggcttggcackgtgccctagacctgctctcctgggtagtggggccctccattgcaacagaggtgtgggtgggcctgggagagtgtggcaagaaatgcttaggaggctctac

SEQ ID NO: 22756 - DNA, 201 bp, Homo sapiens
ggttctgatcctaatttctgggctagtactcccatagctatggccctcttctctgctacatacaaggagaagggcttagttagctctgggatgccaagagygagagcctgggtaagggcctgttttagcttggcaaaggcttctctcatttctggggcccattccattagctcattttcaggcccccttgttgcttcatat

SEQ ID NO: 22757 - DNA, 201 bp, Homo sapiens
tttatatcctaacaatttttatttactctggcaataaagagatagaacacccaccaacaaagtccctaaaatacgtaattgataaagcattggttatctgstaggttttaaacataatttctaagaatataaaaatttaatcaccaccatctttataattgttttaaaattacctctaatttcttcgcacaaggtccacta

SEQ ID NO: 22758 - DNA, 201 bp, Homo sapiens
cccaaaatttggtacccatattctgcaaaacccagccattccccaaaaagaatgaagctgctgcttggtgttggaggcagggctcaaaccacatatggtcygtgctcattctggggatatttgccaggctccgggtgttaagacatatccaaaatattggaaccattggagggtaatctgagccatctttgtatcccgtat

SEQ ID NO: 22759 - DNA, 201 bp, Homo sapiens
tttaaaggtgctttatcaactaaatttatggaatattctaaatccttcattatcatttcaacaatatccacagcatcttcaccaggaatatattccctctyaagaaaccactttctttgctcatccataaaaagcaactcttcatccattaaagctttttttagcatgtgattgaagcaattcagtcacatctttaggccc

SEQ ID NO: 22760 - DNA, 201 bp, Homo sapiens
actactgaaagcaacatacagattcaatgcgatgcctatcaaaattttaatggcatttttcacagatatcagaaaaacaatcctaatatttgtatggaatygcaaaagaccccaagtaaccaaagcaatcttgagaaagaaggacaaagctggaggaaccacttcctggtttcaaactacttcctggtttcaaactacatt

SEQ ID NO: 22761 - DNA, 201 bp, Homo sapiens
tataatcagctataggactctaacaggtgctcttaaattcaggtttctaatacctttgaacactgtaatattaaaatacaggaaaaaactttcggactcayggaaagctgaaatgttcataaatatcaaacaggaattaactgcatggactaaactaatagaagctatttacagcttttaacaattaagtatactcctgta

SEQ ID NO: 22762 - DNA, 201 bp, Homo sapiens
gtctttgtcttaggtaaacaagggggtcgtcatccattggtcttatctaaatcatatagggaagggtggatttttgcagtaagccattttcaggaccgcaraagagtggagggatttttaaactattgctattttccaggagtatgatgctcaggtaaagttcaacattgccaacctttttgtttgtttgtttgtttgttt

SEQ ID NO: 22763 - DNA, 201 bp, Homo sapiens
aaaggcaggcactagaataccaggtactgggtgagtgaaagcacagtgtgacctggcaagggaaggggaggcgagagcaaagcagttgctgtctctccagwttctccttcactaaccacctcagcccagggcctggaaagaaaaagaacttaaggacttccacaggctgagactggatgctgaaggtggacagtggctcac

SEQ ID NO: 22764 - DNA, 201 bp, Homo sapiens
acattttctttccattgatccccggccttcagataaactcaaccaactgtcaaccagaaagtatttaaatttacctatagcgtggaagccccggctttgcrttgtcctgcctttctgaaccaaaccaatgtatttcttaaatgtatttgattgatgactcatgtctccctaaaatgaataaaaccaagctggccgggcgca

SEQ ID NO: 22765 - DNA, 201 bp, Homo sapiens
cagttgctgtctctccagtttctccttcactaaccacctcagcccagggcctggaaagaaaaagaacttaaggacttccacaggctgagactggatgctgraggtggacagtggctcacacaccttcttgaagtcaagtggctcctcccctgcccaccagatgccaagagggtctgttggacccagacctgtggtgacagc

SEQ ID NO: 22766 - DNA, 201 bp, Homo sapiens
attagctggatgtagtagcgtgcacctgtagtctcagctactcaggaggctgaggtgggaggattgcctgagaggttgaggctgcagtgagctaggattgyaccactgcacttcagcctgggtgacagagcaagaccctgtttcaaagaacaaaatgcatcttattcttggtacttgtaatttgtaaacacattcatttac

SEQ ID NO: 22767 - DNA, 201 bp, Homo sapiens
aaggacttccacaggctgagactggatgctgaaggtggacagtggctcacacaccttcttgaagtcaagtggctcctcccctgcccaccagatgccaagasggtctgttggacccagacctgtggtgacagctacaagagaaggaggagacaccaaagttgagtttgctttataagtgacattgcaggctgggctgcagtg

SEQ ID NO: 22768 - DNA, 201 bp, Homo sapiens
atgaagattcaggctgtacttttcaagggaccaagggcttgggatccacataggcctcccacaccgtcagatgtcagctccatcaatactgaaagacaatrggagatgaggtagggagggggtgagaacgtggggagagggaagggaggtggtgggaaagagaggaaggaagaggtgaggaaaggcaaggaggaaagggaa

SEQ ID NO: 22769 - DNA, 201 bp, Homo sapiens
ccccaaatggacactttgctcataggtgatgctactgaattaatatacaggtacagctccacctacttattagtaggtaagactcttggcttaaaggacaagaatgtgcagatttatcaaatgggcttgagaaaatacaattcagaatattggtgaaagtattctttacctgtgggtggagaaaataagagatgctcggcc

SEQ ID NO: 22770 - DNA, 201 bp, Homo sapiens
cctgcctcagcctcccaagtagctgggactacaggcgcccgtcaccacgcctggctaatttttttttttttttttgtatttttagtagagacagggtttcwccatgttagccaggatggtcttgatctcctgacctcgtgatccgcccgcctcagcctcccaaagtgctgggattacaggcgtgagccactgtgcccagcc

SEQ ID NO: 22771 - DNA, 201 bp, Homo sapiens
gcgcagtggctcatgcctgtaatcccagcactttgggaggccgaggtggacggatcacgaggtcaggagatagagaccatcctggataagatggtgaaacyccatctctactaaaaatacaaaaaattagccaggcgtggtggcacgcacttgtaatcccagctactcaggaggctgaggcaggagaatcgcttgaacccg

SEQ ID NO: 22772 - DNA, 201 bp, Homo sapiens
caggcctggatgacgtcgtgtaagccctggaactccgaagcctgctctactgattagttactttttgctcaacctggtctggagagttccgactgacaggrtgccaccaatttttagtgatttctctcccctctagacccctggaagcctgtgcgattcatgctatgcaatgaagaatcagcctcgccctgtgctctccca

SEQ ID NO: 22773 - DNA, 201 bp, Homo sapiens
catgaaataacatgatatagtcatgaccaaacatgtctttcatatcaaaaattttaaacaattgtaataattgtaaatgagtttaattcatctagtaaaargggaaaaagtcagatagaaccacaaataaaaaataattcaataccataaaaacaaagacaaacctaaaactaatagattcagaaggacagaaaatgaaga

SEQ ID NO: 22774 - DNA, 201 bp, Homo sapiens
ttatttatttatttatttatttatttatttttgagacggagactcgctctgtcccccaggctggagtgcagtggcaccatcttggctcacagcaagctccrcttcccaagttcacaccattctcctgcctcagcctcccaagtagctgggactacaggcgcccgtcaccacgcctggctaatttttttttttttttttgta

SEQ ID NO: 22775 - DNA, 201 bp, Homo sapiens
cattatgcaggccacttgggggccaccagatgccaatgagtagaaggagagagaaggacagatggaggaagtaaggacaaggggaaaggggaagggagaaagggagaagaaaggaaggggagtggggaaagaaggagaaagagagggaggaaaggaccaagagccttgcagagaaaattccccctttttctaaggaaaggt

SEQ ID NO: 22776 - DNA, 201 bp, Homo sapiens
tcattatgcaggccacttgggggccaccagatgccaatgagtagaaggagagagaaggacagatggaggaagtaaggacaaggggaaaggggaagggagaaagggagaagaaaggaaggggagtggggaaagaaggagaaagagagggaggaaaggaccaagagccttgcagagaaaattccccctttttctaaggaaagg

SEQ ID NO: 22777 - DNA, 201 bp, Homo sapiens
tgcaggtgtctttttcatataatgacttcttttcctttgggtagatacccagtagtgggattgctagatggaatggtagttctatttttagttctttaagkaatctctacactgttttctgtagtggtaaatgcgtttgcatttactttacactcccatcagcagtgtagaagtgttcccttttcaccacatccatgccaa

SEQ ID NO: 22778 - DNA, 201 bp, Homo sapiens
cattatttactataaaaatctggacacggaaaatgacttcagtactctgttcaaaaagaaactggggaaaggttttattgaaaagggcaagggccgggcayggtgactcacgcctgtaatcccagcactttgggaggccgaggcgggcggatcacaaggtcaggagatcgagaccatcctggctaatgtggtgaaaccccg

SEQ ID NO: 22779 - DNA, 201 bp, Homo sapiens
tgcttttgcatcctcatagcttagctcccatttataagtgagaacatacaatatttcgttttccattcctaaattacttcacttagaataatggcctcccrctccatccaagttgctgcaaatgccattatttcgttcccttttatggttgagtagtattccatggtgcatatataccacattttctttatccagtcattg

SEQ ID NO: 22780 - DNA, 201 bp, Homo sapiens
caattgtcaattatcaacactgagagaaaatgagatgagagagagaaggaggtaaatttgacccttaggtgatgggtgatgatattgtcacacaccgaagmggggatctaagttggagaaactggtttggagtagattatggatcctattgaagtgcctgtgggacattcagttaaagaagcaccttaggcagtgggatat

SEQ ID NO: 22781 - DNA, 201 bp, Homo sapiens
tttgcttacatggatactttctttagtggtgatttctgagattttggtgcaactgtcacttgagcattgtacacggtgcccgatctatagtcttttatccytcactcccctcccaccttttcctgagtctccaaagtccaaagtctattgtatcattcttatgcttttgcatcctcatagcttagctcccatttataagtg

SEQ ID NO: 22782 - DNA, 201 bp, Homo sapiens
atcaacaattgtcaattatcaacactgagagaaaatgagatgagagagagaaggaggtaaatttgacccttaggtgatgggtgatgatattgtcacacacygaagcggggatctaagttggagaaactggtttggagtagattatggatcctattgaagtgcctgtgggacattcagttaaagaagcaccttaggcagtgg

SEQ ID NO: 22783 - DNA, 201 bp, Homo sapiens
ttgcctcaacatggatgacttctgactgatctgagtggtggttgctgaaggctggagtggatgtggcaacttcttcaaatcagacaacaaaaaagtttgcygcattgatggactcatttttaaaatattttattttatttcaatagttcttggggaacaggtggttttgcttacatggatactttctttagtggtgatttc

SEQ ID NO: 22784 - DNA, 201 bp, Homo sapiens
acaagcgattctcctgcctcagcctcctgaacagctgggactacaggtgcccgccaccacgcccagctaatttttgtatttttagtagagatggggtttcmccatattggtcaggctggtcttgaactcctgaccttgtgatctgcccgcctcggccacccaaagtgctgggattacaggggtgagccaccatgcccagcc

SEQ ID NO: 22785 - DNA, 201 bp, Homo sapiens
tcatttgaggtcagaagttcgagaccagcctgaccaacatggtgaaaccctgtctctactaaaaatacaaaaaaaattagcctggtgtggtggcacatgcytgtagtcccagctacttcggatgctgaggcaggagaatctcttgaacccgggaggtggaggttgcagtaagtggagatcgtgccactgcattccaacctg

SEQ ID NO: 22786 - DNA, 201 bp, Homo sapiens
aaaaaagcaagtaacatctttgtccaggcgcggtggctcacgcctgtaaccccagcactttgggaggccgaggtgggcagatcatttgaggtcagaagttygagaccagcctgaccaacatggtgaaaccctgtctctactaaaaatacaaaaaaaattagcctggtgtggtggcacatgcctgtagtcccagctacttcg

SEQ ID NO: 22787 - DNA, 201 bp, Homo sapiens
atgagcatattttgggttatattgtaaaatgataaaattatttaaaatcaaatcactgcaataaaaatgtaatgtttaattattattattattattatttatttttttttttctagacagagtctccctctgtcgcccaggctggagtgcccagtggcacgatcttgcctcactgcaacctccgcctcccaggtttaagcg

SEQ ID NO: 22788 - DNA, 201 bp, Homo sapiens
gaagctgaggcaggagaatcgcttgaacccgggaagcggaggttgcagtgagccgagatcacaccattgcactctagcctgggcaacaagagcaaaactcygtctcaaaaaaaaagcaagtaacatctttgtccaggcgcggtggctcacgcctgtaaccccagcactttgggaggccgaggtgggcagatcatttgaggt

SEQ ID NO: 22789 - DNA, 201 bp, Homo sapiens
aattagttgggcgtggtggcaggtgcctgtaatcccagctactggggaagctgaggcaggagaatcgcttgaacccgggaagcggaggttgcagtgagccragatcacaccattgcactctagcctgggcaacaagagcaaaactccgtctcaaaaaaaaagcaagtaacatctttgtccaggcgcggtggctcacgcctg

SEQ ID NO: 22790 - DNA, 201 bp, Homo sapiens
aagtggtgtcattggccgttggtcatgatgttatgtagtgcttttatagactgaagtgctggcagcaaagattgtgcgttatgcattgctcacaatcaatrtatttggtcattgaaatttggaccatggtttgaggagtagctggtgttttaactaaagcatagtaactgaaacttacccatattagaacctcgccaagag

SEQ ID NO: 22791 - DNA, 201 bp, Homo sapiens
gattttatgattagcagatgtgtgtcatctgctactgtacctgctccctactgtgagcttaggcaagctacaaagagaggtattcctctcctaattaaaayacttccaacttcagtaactgttatttacaatacctcccctcagatagagtacagaaatagaaatgagatgaaaaaaatgcaactcacaaggcacaggttg

SEQ ID NO: 22792 - DNA, 201 bp, Homo sapiens
ggagatcaacctggttgtaaaatccactgagaatttccagcgcacattcaacatacagtcagttaacagattggtatttcagcaggataccctgcccaatrtccctggaatgtacacgttggaggcctcaggccagggctgtgtctatgtgcaggtaagtagagatccatgagaatgagcggacattgggaaggagagtcg

SEQ ID NO: 22793 - DNA, 201 bp, Homo sapiens
gaaaagttgctgtcaaataactccaacatttgaagggaaagaaataaaagggagggccgtcaggtgataggtatctgcttatctggcaaagaacaggttarggaccaggcataattgtataaaataagtgtggactagtacattttacatagttctttcttgaatgaacagctaacatgatgttaaggcttcctgtgccag

SEQ ID NO: 22794 - DNA, 201 bp, Homo sapiens
taccagtttacttattttattcaaaggatgcaggacaggtagttcagcatccaagcaagcactgctttgagcaaaaggccttgcaatatcccaggcacagyttccaagcttatcatttcatgggtcatgctcagttacaagggatgaaggtaaagcaagatggaccaccttggcactgcgaagctcttctactatctgctc

SEQ ID NO: 22795 - DNA, 201 bp, Homo sapiens
tcaccctcaggtacccttgcctccttcttcctgccctctacttagacaatacacacacataaacatcctcatctttcttctaatctcaaagtataaaatayattagccaaggctcaaaactgtgtcttccacttgcatccttgaccaattctcccgtcttttcaacccgctccattagtcacctcctttgctgtatcgcca

SEQ ID NO: 22796 - DNA, 201 bp, Homo sapiens
tcttggccctattcattatcaaaacaatttcagaataagttgttaatttccacaaacatcctgctgggattctgaatgcactgaatatgtgtaatatctgkgtgtatatgtgtaattaaatgtttttttgtttgtttgtttgttttttctgagacggagtttcgctcttgttgcccaggctggagtgcaatggcacgatct

SEQ ID NO: 22797 - DNA, 201 bp, Homo sapiens
gaatttcccagaactggtgagaagcatatacccacagatcttgaaagcaaagaaaaaaaaaaataaggaaacagggaaacaaatttaaaatataatttttwaaaaattgcagagaaaaaggaaacgagtctaaaaatgtaaaatggcatattactaaaaaagattccaagtagtcaagagcaatctatgtcctgataaaat

SEQ ID NO: 22798 - DNA, 201 bp, Homo sapiens
cttcttgactcttaaagacttccagcctaaagtagacacaggaaggaggacaggcaaagctttcaccttaaagtttggcatggaattttagattactgtartgaagctctcctaataactagaaatttccaggtcacttttttatttttaattatgcaaaattaaaaggaaaagtagtacacatgagtcagggaaaagtag

SEQ ID NO: 22799 - DNA, 201 bp, Homo sapiens
cttccttatctcaccatttaaatggattcttttgcctttcttaaaacttcccttttctgcacaagagtcattctttctatatgtcttattcccttcaacarttttctatcataaaatcaaatgttttggctcttgcccttgttaccatttatgactgtacttaacatcatctcatactgaggactatattattcttttaaa

SEQ ID NO: 22800 - DNA, 201 bp, Homo sapiens
atatgtgattagaatgttattagaataatacggatattattagaatattattagaataatatggatattattagaatagaataaggtgctctttaaaaatrcactttctgaggctccccaccccagactcatggaaatgaaatctctaacatttaggctatgtaatctatatttttattttgtatttttaagcaggttctc

SEQ ID NO: 22801 - DNA, 201 bp, Homo sapiens
tatatcacattttattttatttttaattattatactttaagttctagggtacttgtgcacaacgtgcaggtttgttacatatgtatacatgtgccatgttkctgtgctgcacccattaactcgtcatttacattaggtatttctcctagtgctatccctccccctctccccactgcacgacaggccttgttgtgtgatgtt

SEQ ID NO: 22802 - DNA, 201 bp, Homo sapiens
ttccaggcttgagggtgaagtttagcctggagcccagcagttctgcatcaagaagatttaacatacacttagtttcaattagaaagatagtgagaaaagaktagaggcaatgtgtaaagagataatggctgtgaatttcccagaactggtgagaagcatatacccacagatcttgaaagcaaagaaaaaaaaaaataagga

SEQ ID NO: 22803 - DNA, 201 bp, Homo sapiens
tacatagtgtagtataataataacagatgtttttgtcagcctaaaaataatgagttgaaggttctaacggttgcctttatagaaaataacatctttggccrggcgcggtggctcacgcctgtaatcccagcactttgggaggccgaggcaggcggatagcctaaagtcaggagtttgagaccagcctggccaacatggtga

SEQ ID NO: 22804 - DNA, 201 bp, Homo sapiens
tgcattataaatatgaagcaacaataaactgtgcaatgaggttttagcaatcatagttaatatcacaccatatttttattcaaaaagaagcatgatgctgrgtagattatgaatatttgtagcattataatctcagattgtaatgatcaattttttgaaaactgaatatctctcaattgtgtaagactcctggctcaattt

SEQ ID NO: 22805 - DNA, 201 bp, Homo sapiens
tttctaggtaaaattaacaactagcaaggggttctagcagagtgtaatttcaaaatactctattatgcttgtaaaataaactattcacaatacatagtgtrgtataataataacagatgtttttgtcagcctaaaaataatgagttgaaggttctaacggttgcctttatagaaaataacatctttggccgggcgcggtgg

SEQ ID NO: 22806 - DNA, 201 bp, Homo sapiens
tagactaccatcaccatattagtctggtctcactttctattttatctgtttactatgctttttcatattttgttcatgccactatatagtagttaatataytgcattataaatatgaagcaacaataaactgtgcaatgaggttttagcaatcatagttaatatcacaccatatttttattcaaaaagaagcatgatgctg

SEQ ID NO: 22807 - DNA, 201 bp, Homo sapiens
tcttttgacagttttcactgttgatcgccttggttctcagattgtcgctagctagattgtagtcttctgctgaaatactgtcttagactaccatcaccatrttagtctggtctcactttctattttatctgtttactatgctttttcatattttgttcatgccactatatagtagttaatatattgcattataaatatgaa

SEQ ID NO: 22808 - DNA, 201 bp, Homo sapiens
aggataaagattaacttaaatataactagctcttactatacactctgtggaacaaaatggcctacttaattttattttcaaaacagggaaatgagcactgygcttaagcaaattgctatgaagtccacacattcctggtcttgttaagtaattaatttattctttgcattattaaactttatttactaagcataattttac

SEQ ID NO: 22809 - DNA, 201 bp, Homo sapiens
ctgagagaccacaaaagaatgcttagttctaacaggtttctaaactacatgaaatgaaatttgtcaggtatcctgttgtaaagactgaagtccaggtcatrattcgttgtcttttgacagttttcactgttgatcgccttggttctcagattgtcgctagctagattgtagtcttctgctgaaatactgtcttagactacc

SEQ ID NO: 22810 - DNA, 201 bp, Homo sapiens
aacttaaatataactagctcttactatacactctgtggaacaaaatggcctacttaattttattttcaaaacagggaaatgagcactgcgcttaagcaaaytgctatgaagtccacacattcctggtcttgttaagtaattaatttattctttgcattattaaactttatttactaagcataattttaccaatgataatca

SEQ ID NO: 22811 - DNA, 201 bp, Homo sapiens
taattctgattggtagctttacttgataatttgttgccctgatagtaatgttgtaattgacatttctgcatgtgtaaataggataaattcttgaaagattrctctgcaaatctgatcatttgtttctcatctcttttttttatattttattttattttatttatttattttttttttgagacagatcttgctctgtcaccc

SEQ ID NO: 22812 - DNA, 201 bp, Homo sapiens
catcatttttggaaatgctacatcaatttccatctctatacataagcacatgcagtttgttgtgccatggaaactccttgccataaacatttggtacaaaygatcttcttatctatgacccatatttgagggaacagtccattaatcctgttcttatgcaaatgtagttattactaaagcagggagttgggtaatcatatt

SEQ ID NO: 22813 - DNA, 201 bp, Homo sapiens
ccctccatgctggtcacagtaaggtgcttttggcacgactacaaattatacgaacatatatgagatgtctctgcccacgtaagtccacttaggtctgaggwcccggagttcttacaggagtctggttgcacaaggcacattcctcccacgtgacaatctatggtgcagatctttacccaggaggcaggtgctcatggcaca

SEQ ID NO: 22814 - DNA, 201 bp, Homo sapiens
ctagatccacttcacagattttgtccagggcttcggcttgtcctaatgtcctaggaaaaccatcaaggagccagtgctggccacgcctattctccaactcrgacatcattaggcgtgtgatcacatggtctggaaccaaaagacttttctctatatactgctttgccatctcaccaacttcggtgctggccttgatgttct

SEQ ID NO: 22815 - DNA, 201 bp, Homo sapiens
agaagaaactaggtatatgctctatatcttggctcatttgataatgagcccagttgcatcattactatatttttattatgtagtcaaatttattatgaatrcccaaatctcataggccagccatgcattgaatctatttatctaaatggaatactgaaccagataatgtccagcaattagaaacactggcttgcaaagata

SEQ ID NO: 22816 - DNA, 201 bp, Homo sapiens
tgattttgtaaagtgtcaaatggtcgatattgacaaaaatatcaatcttttttctcttttgtgcaatatggagagtggtgtgaatcttcggtttcttattrtaagtcattttctttgaaaaaagagttttataaaactaagacttagaaacttacttgccctggccttgaaaattacctttggaaaaatgcttgtgcttta

SEQ ID NO: 22817 - DNA, 201 bp, Homo sapiens
tgacttaaaggaaaagaaaggcaccatcagcaatgaaattgcagaaaatgaaagaaaagaccgatgtaagatttgggcagaagaaactaggtatatgctcyatatcttggctcatttgataatgagcccagttgcatcattactatatttttattatgtagtcaaatttattatgaatgcccaaatctcataggccagcca

SEQ ID NO: 22818 - DNA, 201 bp, Homo sapiens
taaaggatatgctcctctcccctatagcacagagaggaggatgtctttctgagatataacacatattcaaaatatctgattttgtaaagtgtcaaatggtygatattgacaaaaatatcaatcttttttctcttttgtgcaatatggagagtggtgtgaatcttcggtttcttattgtaagtcattttctttgaaaaaaga

SEQ ID NO: 22819 - DNA, 201 bp, Homo sapiens
aaaattgtctgttacagaaatatatatgtgagcatgcaactgcataaaaataaggcagcttttagtgtattttgtgcatattgccataaatttgtacagastgacattctaatgatatttcttttattttcagatttataaatatgtgattacatattgtggaaaaataatgctataggctctgtatttcagttattatta

SEQ ID NO: 22820 - DNA, 201 bp, Homo sapiens
ttacattagctcttccatgccttgactctcacttaagacccctggtgctttctcgtctttctgttatgaacataaattctgcggaaagccacctaaactaytcccattctagcactctctcctctgtaataatcctctacttccctccttacctgcccaccagagccccaaaccgcggatgaagactatcccctcacttcc

SEQ ID NO: 22821 - DNA, 201 bp, Homo sapiens
aagcttccaaccttttaaggaaagatttctatccaacttgactagttgcaatggcttacacctgtaatcctagcactttggccggatcacttgaggccagkagttcgagaccagcctaggcaacatagtgagactctgtctctacaaaaaatttaaaaaattagcctccttagctacttgggaggctgaagtgggaagata

SEQ ID NO: 22822 - DNA, 201 bp, Homo sapiens
gtttgtcctgggagcaacagcaggcgctggtttggcttgattgtgaaaagaggggtcctgtgatgctcttatatctttctgagaacacagagtatgtgatygctcccacacccggctgtagccactgggtttctgttttaaatatgagtacctcagtgagtcatagggagtccatttggtctgtgggctgtgaacatactt

SEQ ID NO: 22823 - DNA, 201 bp, Homo sapiens
tggataagatggtgaaaccccatctctactaaaaatacaaaaaattagccaggcgtggtggcacgcacttgtaatcccagctactcaggaggctgaggcargagaatcgcttgaacccgggaggcagaagttgcagtgagcagagatcgagccgctgcactccagcctgggcaacagagggagaaaaaaaaaaaaaaaaca

SEQ ID NO: 22824 - DNA, 201 bp, Homo sapiens
tccatcacaaggtgatgggtgcaagggctttgggtgctatctactggatacaaatgcaggggcttaggatactatcacccgagcgaattcctgggaactgyggacataacttgccacaggaccttatcagttaattgcactctgatgtgctgggagtcagcttgcacaagttaagtccttgaggaattgggtgggcaagga

SEQ ID NO: 22825 - DNA, 201 bp, Homo sapiens
ccgaggcgggaggatcacctgaggttaggagtttgagactagcctggacaacatgatgaaaccccgtctctctactaaaaatgcaaaaacctagtcgggcstgatggcgggcgcctgtaatcccagctactcgggaggctgaggcggaagaatcgcttgaacctggcgggcggaggtcgcagtgagctaagattacgccac

SEQ ID NO: 22826 - DNA, 201 bp, Homo sapiens
acaagaaattagtcattagaaatattattggccgggcgaggtggctcacgactgtaatccccgcactttgggaggccgaggcgggaggatcacctgaggtyaggagtttgagactagcctggacaacatgatgaaaccccgtctctctactaaaaatgcaaaaacctagtcgggcctgatggcgggcgcctgtaatcccag

SEQ ID NO: 22827 - DNA, 201 bp, Homo sapiens
ggactgcaggtgcataccaccacgcccagctaatttttgtatttttagtagaggcagggtttcaccgtgttggccaggccggtcccaaactcctgacatcrggtaatccacctgcctcggcctcccaaagtgctgggattacagacatgagacaccgtgcctggcctctaattaaactttatctaccaaaataggcagcag

SEQ ID NO: 22828 - DNA, 201 bp, Homo sapiens
ctctaaaactttgaagactgatataagtacattagtaatttaatatttcaggaacagaaattttgctgaaatatcagttacatatgcgtaagtttaaaagyactacagtaacacaaagtggtcagcacagaaaaaagcatttcaaggattaagacttaccattttgtgctttaggaagaaggggtattaggtccaggagat

SEQ ID NO: 22829 - DNA, 201 bp, Homo sapiens
gaaaaagtatgtttgaatattctacaaaacactgacttaaaggaaaagaaaggcaccatcagcaatgaaattgcagaaaatgaaagaaaagaccgatgtargatttgggcagaagaaactaggtatatgctctatatcttggctcatttgataatgagcccagttgcatcattactatatttttattatgtagtcaaattt

SEQ ID NO: 22830 - DNA, 201 bp, Homo sapiens
ggtaagcatttcaaatagaaatcatttttccagtcctttttttagagttgtgttacatgtggttatatctagggcctttcaaaatctattttcagcttacrtgattttcctttgttatagtactaaaggagatgattagcaatatctagagttctgaaaatgaatatttaaatagtttcaggaataaaaagtacaaaagaa

SEQ ID NO: 22831 - DNA, 201 bp, Homo sapiens
atgtgacagatacctctaaaactttgaagactgatataagtacattagtaatttaatatttcaggaacagaaattttgctgaaatatcagttacatatgcrtaagtttaaaagtactacagtaacacaaagtggtcagcacagaaaaaagcatttcaaggattaagacttaccattttgtgctttaggaagaaggggtatt

SEQ ID NO: 22832 - DNA, 201 bp, Homo sapiens
aaaaactagtgaacaagaacctagtaaaatcacattttcattgttctaagctgcttgatttttctctaaaaacaattattaaaatgaggctgattctgctstagtcactaatgactgtctgcactaaatcttgtataaaccagccaagaaccaatacaacaactccttcatgtccccttctggttcatactatctctccct

SEQ ID NO: 22833 - DNA, 201 bp, Homo sapiens
ggtcaatatttgggctagcacctctcatgctgtctgggctgctgggaaagactttaatgtgttatgccactacctagtatttgttttgcctggtaaaccartgtttcattgggcaatatttgttttgtgttcattgccaccttattgtaaattgtagaaaattggtcgtcatgacgagctatatgtaaaacttgccagata

SEQ ID NO: 22834 - DNA, 201 bp, Homo sapiens
acctagagtactatccctttttgtttgctatttgtaatacttccaatgcagatggcttcaactgtgttcaacaaatttagtttttattacttaatttgtcytttttttttagatttttttttaaactcagcttggtctatttcaaaaaactagtgaacaagaacctagtaaaatcacattttcattgttctaagctgcttg

SEQ ID NO: 22835 - DNA, 201 bp, Homo sapiens
acacccaaatttattatctttaacttcaagatcgattatctcctgtcacatcaaagtaaaattgtctgttacagaaatatatatgtgagcatgcaactgcrtaaaaataaggcagcttttagtgtattttgtgcatattgccataaatttgtacagagtgacattctaatgatatttcttttattttcagatttataaata

SEQ ID NO: 22836 - DNA, 201 bp, Homo sapiens
aatattgagatggtattgaagaaagctactgctgcaacattaactcaagcattaagagaggtagagcttctcatgagatttcctcataggaagaaaatgawtatattacccaaaggtgccatgggaagacgttaaccatttggatgagattctaataatgagaaatgaacctagagtactatccctttttgtttgctattt

SEQ ID NO: 22837 - DNA, 201 bp, Homo sapiens
ggccttttgtgaaaagtaaatgatttacatatcagagataattaagataaccctatgcctctgatgagcaacctcacattttaaccatcttgctataaatmtatatagatcaactgaaatttatacaccttagtcacacccaaatttattatctttaacttcaagatcgattatctcctgtcacatcaaagtaaaattgtc

SEQ ID NO: 22838 - DNA, 201 bp, Homo sapiens
gagtacatagggtcctttgcccactccccaagttgctaagtgctccttcccactaattgcagcattcattcactaataaaacgtaatgtgtctggagatargaacaggattcataaaccttgtccagaattcttggaactgagaaatataacagttgaattaagggcctacttgttattctaaattcatggaattgaatct

SEQ ID NO: 22839 - DNA, 201 bp, Homo sapiens
tacttattttaatttatggttgtttgtgtttacacaagaaagagggccttttgtgaaaagtaaatgatttacatatcagagataattaagataaccctatrcctctgatgagcaacctcacattttaaccatcttgctataaatctatatagatcaactgaaatttatacaccttagtcacacccaaatttattatcttta

SEQ ID NO: 22840 - DNA, 201 bp, Homo sapiens
attcgtggtcagtcttcactctgacagttgcaatgttttacactgctggttgcctctttttgaaatgcttcaattttgatttctgtatctagcactaattktttttgtcttagattattggccattcctatactccaccatttccttatcagacaagtaaataaatgtagacatttgcccaagtttcccttgcagagtttc

SEQ ID NO: 22841 - DNA, 201 bp, Homo sapiens
atttacttctctctctttcacaacatacaccctgcagtctcagtaagcaatcctgcccttgggtctctccaacataataaaaatgccctcttagatgaatmataacttccttatcaacaaattcgtggtcagtcttcactctgacagttgcaatgttttacactgctggttgcctctttttgaaatgcttcaattttgatt

SEQ ID NO: 22842 - DNA, 201 bp, Homo sapiens
ccaggcttgtcttaaactcctgggctcaagggatccttttgcctcaacctcccaaagtgctgggattacaggtgtgagccaccacacctggctgcaaataractttcaataaaaaaaactttcattccaggatcatcagtgcaggagtaagctagttgacctggtaacaaaacacatgacctcaataataaacaggaactc

SEQ ID NO: 22843 - DNA, 201 bp, Homo sapiens
gagccaccgcgcctgtccagagaccccttttctagaaatttttttttttttttttttttttttaattagccagccatggtggtgcatgcctgtggtcccarctactcaggggactgaagtgggaggattgcttgagtttgggaaatcaaggctgcagtggagccataattgcgccactgcactccagcctgggtgacagag

SEQ ID NO: 22844 - DNA, 201 bp, Homo sapiens
catgcataattttttgcttagtagtcaaatttatcattctaaaacaatctcttctgtgttttgcattatacttggaaggtcaaggaccttagagacatacytctggctattggatgtagactttctttcttttttttttttttttttttttgagtcagtgttttgctctgtcctcaagcctcgagcgcagtggtacaatca

SEQ ID NO: 22845 - DNA, 201 bp, Homo sapiens
gaaaagatgctgcaagctacctcagctagcttctaatttggacacagcaccaatactacacacactattgaatgaatgaccacatcttcctggttcttccwttgggcagggtcaatatgcttctttggactgaataggtgtgatcttgtttgagaaaagtgtgtaaacgtagggccagattttgttcgtctccgttccgga

SEQ ID NO: 22846 - DNA, 201 bp, Homo sapiens
atatctattgattatattgaaactcatctgcctagttttcaagaattttcatttacttctctctctttcacaacatacaccctgcagtctcagtaagcaaycctgcccttgggtctctccaacataataaaaatgccctcttagatgaataataacttccttatcaacaaattcgtggtcagtcttcactctgacagttgc

SEQ ID NO: 22847 - DNA, 201 bp, Homo sapiens
gtgatcactggatactgaaataaaaataaaaataatgttaatatatgaactcaaggttttttttctagatgagtgaagaggttaattataaatctattatkaagcaaagaaacataaacacatttaggacaacccaaacaaatactgatttctgactgaaagtttgaatatctattgattatattgaaactcatctgccta

SEQ ID NO: 22848 - DNA, 201 bp, Homo sapiens
ctatttctgtcctcttgaggctgtctacatgaaattaataattctgcgacaatttaaatagacaatcttccctgtgagctgccttttgattttgaggtttrgagagatgttcaaaaaatgagaaaacaattcttcaactattagttatcttacctgaagggtgatcactggatactgaaataaaaataaaaataatgttaa

SEQ ID NO: 22849 - DNA, 201 bp, Homo sapiens
tcagcatgtctcattaatggcctagggatatctggagtccacactctcttagcctcttgatttgacaatctttgcataagatttattgtattaattggagrctgtcttatttttttaagtgaggttttgtaattatagctacatgatttattttcagcagaaaattttaaaatcaacaaaattaatatctcctttttataa

SEQ ID NO: 22850 - DNA, 201 bp, Homo sapiens
ggacaaagatgatctcttcctacacactactaaaatttaaagaatttccgtaaaaactagtgaaataaaataaatggtaatcgctctgctaagtactttayatgtattacccacatcaattttatgataaaaatattattatctacaatctacacatgaggaaactgaggctcagagccatctggtgagttgccctaaggt

SEQ ID NO: 22851 - DNA, 201 bp, Homo sapiens
cacacacacccggcacactcagtaaattaaagaactggaacctgataaagtctgtctgattcaataccccttttcttacacacttgtgatgttaattataragattatttcatggaaggctcagcatgtctcattaatggcctagggatatctggagtccacactctcttagcctcttgatttgacaatctttgcataaga

SEQ ID NO: 22852 - DNA, 201 bp, Homo sapiens
cagagagaagggatgactaaattatgttaaactatgtgactatccgagggttcttttagtactctcttaatctagccatagcccttagatctatcctcacmgtaagaaacacatgtttttctccaattactttaggggcgactactgtatgtcaaagatcatgtcacttgattttatttatcttttcgttgcaacactatt

SEQ ID NO: 22853 - DNA, 201 bp, Homo sapiens
ccagcctgggcaataaagagcaaaactccgtctcaaaaaacaaacaaacaaacaaacaaacaaataataaaaaaaagaaaagaactatgagttgaaggaayggtgtgacagttcttgcttcaagagacaataatttccgatatgttcctgcgattatttatttatgtatgtatttatttattcttttttgagatggagtct

SEQ ID NO: 22854 - DNA, 201 bp, Homo sapiens
gtttgtgctggcagctgaccataattccttagtagcaataccctctggtctaccgcccaaagagcataaagagagtttgaagcagccgagacttgaagatsgacattggatcctggtaaacttttttctttagaaaaatttaagttgacctgaaaatgaaaataaaagggcaaaaggatggcaagccatatgagaagaatc

SEQ ID NO: 22855 - DNA, 201 bp, Homo sapiens
ttatttcaagacaaaaagtttacaggacatgccccagttagctgctggtccaaagaactgaggaaacatgttgagcagtcctgaacccaagtagaagcctrgagccacactcaggcaccctatagcctaaagcaaggttgctccagcccatgcaaagatccatgaacttgttgttgtaagtctgagacataggaggtgtgt

SEQ ID NO: 22856 - DNA, 201 bp, Homo sapiens
aaattaattcaagacagattattaaagacttaaatgttagacctaaagccataaaaaccctagaagaaaacctaggcaataccattcaggacataggcatrggcaaggacttcatgtctaaaacaccaaaagcaatggcaacacaagccaaaattgacaaatgggatctaattaaactaaagagcttctgcacagcaaaag

SEQ ID NO: 22857 - DNA, 201 bp, Homo sapiens
gcaagcccctctgcaaggtccagtatgattttcttggtggtgtctacaacattgtaaagagtcgtaggtcaatatttgggctagcacctctcatgctgtctgggctgctgggaaagactttaatgtgttatgccactacctagtatttgttttgcctggtaaaccagtgtttcattgggcaatatttgttttgtgttcatt

SEQ ID NO: 22858 - DNA, 201 bp, Homo sapiens
tacaaactctgtggaagaacggaaggatgtaaagcctcatcctaggaaggagcaagcccctctgcaaggtccagtatgattttcttggtggtgtctacaayattgtaaagagtcgtaggtcaatatttgggctagcacctctcatgctgtctgggctgctgggaaagactttaatgtgttatgccactacctagtatttgt

SEQ ID NO: 22859 - DNA, 201 bp, Homo sapiens
gtgattctgaacatatgagaccaagtaaacttgccgtgcaggttgaaagttgtgggaaatcaaatgagaaacacagcagcggcgtgcagacctctaaagartcattaaatggcttgacaagccatggtaaaaacctcaaaatccaccattctcaggagtctaaaacatacaacattctaaggaatgttaaagaaaaagttg

SEQ ID NO: 22860 - DNA, 201 bp, Homo sapiens
caattaaatgtttgtttaatacttgaatttcctctggatgtgacagatacctctaaaactttgaagactgatataagtacattagtaatttaatatttcasgaacagaaattttgctgaaatatcagttacatatgcgtaagtttaaaagtactacagtaacacaaagtggtcagcacagaaaaaagcatttcaaggatta

SEQ ID NO: 22861 - DNA, 201 bp, Homo sapiens
cagctggacaaagtcgtgattctgtgatactggactctgagaaagatgatatccactgctgtgcattgggctggctctccatggtttacgaaggagtaccycagtgtcagtgtaattccatcaagaactcatcttcagaggaagagaaacaaaaagagcagtgttgtcctttggataccaacagttgtaaacaaggagaga

SEQ ID NO: 22862 - DNA, 201 bp, Homo sapiens
cttttgtatttcttttttagtgttcttgtgtcaacctaaatattacttcctcagggaaactttccatgatcatttagtccagattttagcaaacttctttygtaaaacaccatggtctctctctcatatatttttttattttttaaataatcttttaaaaatgttaaaaccactcatagttcactggctgtatcaaggcag

SEQ ID NO: 22863 - DNA, 201 bp, Homo sapiens
aagctgtatttcaatctaaatttgttcattaaatgacttttactgaaatttgtttcagtaagtcctttaggtgatgctgatgccagtttgagaaactgctytgtaagatgtaagccaggctacccacttttgtatttcttttttagtgttcttgtgtcaacctaaatattacttcctcagggaaactttccatgatcattt

SEQ ID NO: 22864 - DNA, 201 bp, Homo sapiens
ctgtattaatgggtgcatgctaatatgaatcacatggtggtgggggtggaaacctatttctgtcctcttgaggctgtctacatgaaattaataattctgcracaatttaaatagacaatcttccctgtgagctgccttttgattttgaggtttagagagatgttcaaaaaatgagaaaacaattcttcaactattagttat

SEQ ID NO: 22865 - DNA, 201 bp, Homo sapiens
acctccacctcccaggctcaagtaatcctcccacctcagccttccaagtagctgggacaacaggtgtgcacacctggctaattttttttttgtatttttgrtagagacaggatttcaccatgttgttcaggctggtcttgaacttctgacctcaagcagtcgcccagctcagcctcccaaagtgctgggattacaggcaag

SEQ ID NO: 22866 - DNA, 201 bp, Homo sapiens
gatacaatgcctgcatcagtatctatgccagtttgaagcctttaaaggcaccttcttaacaacatctaaggccacaacaaccagaagaagactgtctgagmcatcctttttttagctcagtcagtttctgcaaaacaacttctgctttgagcctttcatcttatttctgccacttatcattttcctgctggtccaggcaaa

SEQ ID NO: 22867 - DNA, 201 bp, Homo sapiens
cgttgtctatattattattgtctgtattaatgggtgcatgctaatatgaatcacatggtggtgggggtggaaacctatttctgtcctcttgaggctgtctrcatgaaattaataattctgcgacaatttaaatagacaatcttccctgtgagctgccttttgattttgaggtttagagagatgttcaaaaaatgagaaaac

SEQ ID NO: 22868 - DNA, 201 bp, Homo sapiens
ctgataggccatggttatttgctagaaatctctttctcattctcttactagtacaggcaatgattgctttaaaaagtcccttctgaaattgtatgatttgyagtagatacaatgcctgcatcagtatctatgccagtttgaagcctttaaaggcaccttcttaacaacatctaaggccacaacaaccagaagaagactgtc

SEQ ID NO: 22869 - DNA, 201 bp, Homo sapiens
atacttgcccgttgtctatattattattgtctgtattaatgggtgcatgctaatatgaatcacatggtggtgggggtggaaacctatttctgtcctcttgrggctgtctacatgaaattaataattctgcgacaatttaaatagacaatcttccctgtgagctgccttttgattttgaggtttagagagatgttcaaaaaa

SEQ ID NO: 22870 - DNA, 201 bp, Homo sapiens
tactaaaatttaaagaatttccgtaaaaactagtgaaataaaataaatggtaatcgctctgctaagtactttacatgtattacccacatcaattttatgakaaaaatattattatctacaatctacacatgaggaaactgaggctcagagccatctggtgagttgccctaaggtcacacagctgataagtagcaaactgat

SEQ ID NO: 22871 - DNA, 201 bp, Homo sapiens
tttccaacttacttaggattcaaaacatgagtgcgtcctcacatcacccaaggagaattggttactctcctatctgaggtcacatagatgcatattacagyacttagtatattttagagctagctgtgatttttttacatttattttctgtgtcaatctctgatttcttaaaggcgagccatattttatccccagtgcata

SEQ ID NO: 22872 - DNA, 201 bp, Homo sapiens
actagtgaaataaaataaatggtaatcgctctgctaagtactttacatgtattacccacatcaattttatgataaaaatattattatctacaatctacacrtgaggaaactgaggctcagagccatctggtgagttgccctaaggtcacacagctgataagtagcaaactgatgtttgaatctaagtttaaaacaatgttt

SEQ ID NO: 22873 - DNA, 201 bp, Homo sapiens
ggtgatttcataccatccgaggatgggctctgagattaactggaaggagagttgtagaatccctcccacagactcctcattcacccactgttgtattcgaytgccttctggatcctgagaataagaaagcgtatttttgcatgctggatgtttttattcattataaagtttcagcaaggtgtttcctacttaggtttccaa

SEQ ID NO: 22874 - DNA, 201 bp, Homo sapiens
tatcattaccctaattaacatcaaacacacacacacacacacacacacacacacacacccggcacactcagtaaattaaagaactggaacctgataaagtytgtctgattcaataccccttttcttacacacttgtgatgttaattatagagattatttcatggaaggctcagcatgtctcattaatggcctagggatatc

SEQ ID NO: 22875 - DNA, 201 bp, Homo sapiens
tataatttttttattgataggtaatattttcattgctattatttaccatattcttccacagagaaggagtgatatgttttcttctcattgagcatctccayggtgatttcataccatccgaggatgggctctgagattaactggaaggagagttgtagaatccctcccacagactcctcattcacccactgttgtattcga

SEQ ID NO: 22876 - DNA, 201 bp, Homo sapiens
atcaagagtgttcctctgacaagtgctgattcttgttgaggatgacgggaactgcacgggagtgtaggacaagtagatttgtctcttgaatttgagaatcrgaaaaagagaaggaagagaaataggtgtacaggaaacatcttgactcagaaacaaacaaaaaattgtcaagtctatttcaaatgttaagttttactatcc

SEQ ID NO: 22877 - DNA, 201 bp, Homo sapiens
ttgtggagcagggattgccaagaggcaaatcaagagtgttcctctgacaagtgctgattcttgttgaggatgacgggaactgcacgggagtgtaggacaartagatttgtctcttgaatttgagaatcggaaaaagagaaggaagagaaataggtgtacaggaaacatcttgactcagaaacaaacaaaaaattgtcaagt

SEQ ID NO: 22878 - DNA, 201 bp, Homo sapiens
gaggacaaggaaagaggaaaggaagagatactcacttgaaaattcattatttaataatcttgcccttgcaaaattggaaagattttataatttttttattrataggtaatattttcattgctattatttaccatattcttccacagagaaggagtgatatgttttcttctcattgagcatctccatggtgatttcatacca

SEQ ID NO: 22879 - DNA, 201 bp, Homo sapiens
gataaaaatcacagtagatggagaaccctaaaatagtaacagaggacaaggaaagaggaaaggaagagatactcacttgaaaattcattatttaataatcytgcccttgcaaaattggaaagattttataatttttttattgataggtaatattttcattgctattatttaccatattcttccacagagaaggagtgatat

SEQ ID NO: 22880 - DNA, 201 bp, Homo sapiens
tgccattaataaacagtgtgaggaggacgttgaagtgcctaagactggattttggaattggatagaaaaatgcatattttgaattccaaattcatcacttytcaggtgttgaacttgggaaagtgtttctcaatatcttcatctttaaaatagtaataaagatactacaatagaaattttatgaagattttaggagaaaat

SEQ ID NO: 22881 - DNA, 201 bp, Homo sapiens
catattaacataaatacattcatacaaaacaattgtttctcctttacaaaccatcaacctttgcttatgtttgccattaataaacagtgtgaggaggacgytgaagtgcctaagactggattttggaattggatagaaaaatgcatattttgaattccaaattcatcacttctcaggtgttgaacttgggaaagtgtttct

SEQ ID NO: 22882 - DNA, 201 bp, Homo sapiens
cccgggtgttatctgcgggccgggtccgcggcttctctggtggcactaggaccgcggcggcgcggccctcgcagccaccgcctcgggcgtgaggcggagcstagctgttcctggatcctgggcctggctcctcgacccgcccctggaggcggaccccacttgacttaaactctggggcccgggaggccgccggttttctcc

SEQ ID NO: 22883 - DNA, 201 bp, Homo sapiens
ttaagaggtcgtgcttcgtgatctggtctccaaagtcaactttcctcagggactttcagaatccccaaatagactatccactttctttcacacttatttgyctctaacttgttgatttcttttttttttttctgttttttaagggttaacaatctcttgggtgcactctgacttccatgcgctttatagaaaaaattggtc

SEQ ID NO: 22884 - DNA, 201 bp, Homo sapiens
aagcattattgtggtaataactgactgttttagtccattctcacactgctgtaaagaactgcctgagacttggtagtttaaaggaaaggggtttaattgaytcacagttccgcagggctggggaaacctcaggaaacttataatcatggtggaaggggaagcaaaaccttcgttcttcacatggcagcagcgaggagaagt

SEQ ID NO: 22885 - DNA, 201 bp, Homo sapiens
tgctacagttacttagtaggtttacgcattacatttttaaaagcattccccaaaatatgcaaaatacaaccaggaagtccactatcatctctaatattcawattggagatctttgccaatcgaataaaacaaactaataacaaaaacctcagaagattaagttcagaaaggaagctaaaatataacattttcacacaaaat

SEQ ID NO: 22886 - DNA, 201 bp, Homo sapiens
agccaagtttaataacaagtagtatagacaataaccatcaaatgaacaccagtgtacccaccacctagtttaagaaatacccagttttgtttgtttgctgrgatgtcaaggcaagaaatatctagttttaagaaatacgctgtagactcttccctgatcctgcctgcaaatttctccaaccatagttttcctcattctgta

SEQ ID NO: 22887 - DNA, 201 bp, Homo sapiens
ggagagcttatgacatggtgcagtttggactaacactgagagaccagagttcagtgtaaaatgaatgtgcgttcagagaacagagaggagtcgggctttayagcaaaatttgctgcccaggttccccatcaggttcatttgcatatgaacccagattcatttgcatttgctttcctctgatgcagctgagccctgattaac

SEQ ID NO: 22888 - DNA, 201 bp, Homo sapiens
tcaccaaaaaaccaataaaagactgaatgtggccctttatcagctagacctcaaaatcttctttgctttctatgcgtatttccaataaaaaagtacaaggrttgttaaaagtccttatttatttatttatttatttatttatttatttatttatttttagaaccagggtctcactctgttgcccaggctggagttcagtgg

SEQ ID NO: 22889 - DNA, 201 bp, Homo sapiens
cttctcattaaaagcctgagtcttagccgggcatggtggtgtgttcctgtaatcccagctacttgggaggctgaggcaggagaatcacttgaacccaagasgtcaaggtagcagtgagcccagattgtgccactgcactccagccttggtgacagagtgagactccgtcttaaaaaaaaaaaaaaaaaaaaaaaaagcctg

SEQ ID NO: 22890 - DNA, 201 bp, Homo sapiens
gtgctgggatttacaggcgtgggccaccatgcctggcctgtttctggaaactttaaaacgataatctacctgggattgatttgtttgtatatgtctcttgstgtgtaattggataaggcttattttcattcgtggcatatagataaccaattgacctagcttcatgtattgaaaagaacttttttcctaactttgtcataa

SEQ ID NO: 22891 - DNA, 201 bp, Homo sapiens
cacagctgggaagtagcagctccaggagcagaagctggggccgcttcctggtgcaccgatggtcttcaggtgttttgtggaaactcgggggcctccggggygaccttgaggacatggacaaggctaagcaggggttcccttcacccagccctgcccttggtttactcaggagtcagaccagccctagtttcctgtgtttca

SEQ ID NO: 22892 - DNA, 201 bp, Homo sapiens
ctcttacagcagttttctctgtgatacatcttgagcttcagctttcttttataatcatgtaatacataaagattgaattgagaaatcatcataaacagaaratattgtccaatggaaatttctgggagatggaatgttctatgttttatgtctatgctctccaattcagtggccactagtcacatgtgacagcttgaaatg

SEQ ID NO: 22893 - DNA, 201 bp, Homo sapiens
gagccacttgtaactcttacagcagttttctctgtgatacatcttgagcttcagctttcttttataatcatgtaatacataaagattgaattgagaaatcrtcataaacagaagatattgtccaatggaaatttctgggagatggaatgttctatgttttatgtctatgctctccaattcagtggccactagtcacatgtg

SEQ ID NO: 22894 - DNA, 201 bp, Homo sapiens
ctgtctgcccttagtatcctccacactgtgccccgccattaccctagagccacttgtaactcttacagcagttttctctgtgatacatcttgagcttcagytttcttttataatcatgtaatacataaagattgaattgagaaatcatcataaacagaagatattgtccaatggaaatttctgggagatggaatgttctat

SEQ ID NO: 22895 - DNA, 201 bp, Homo sapiens
attaagaggtcgtgcttcgtgatctggtctccaaagtcaactttcctcagggactttcagaatccccaaatagactatccactttctttcacacttatttscctctaacttgttgatttcttttttttttttctgttttttaagggttaacaatctcttgggtgcactctgacttccatgcgctttatagaaaaaattggt

SEQ ID NO: 22896 - DNA, 201 bp, Homo sapiens
tcagggaaaagtagtacacatcaggtctgaggagacaaagttttaatgtttgcaccctggctctctttgctggttatataaactctgtgaatgttgcttamcttagtgacaagaggggaaaacaacctgacctgcttcactgctactcctgccacacgttaatcctcactatttgcccctaagtccctgtctgcccttagt

SEQ ID NO: 22897 - DNA, 201 bp, Homo sapiens
atcaggagctcagtgtcaggcaggcaagcctcctgcaggggagccccgccctgctcaggtggcctcatctcccctcccagctggtggtgctgccctatcaratgctgctgcatgcggccactcggcaggctgcgggcatccggctgcaggaccaggtggtgatcatcgacgaggcgcacaacctgatcgacaccatcacgg

SEQ ID NO: 22898 - DNA, 201 bp, Homo sapiens
agtagtacacatgagtcagggaaaagtagtacacatcaggtctgaggagacaaagttttaatgtttgcaccctggctctctttgctggttatataaactcygtgaatgttgcttaacttagtgacaagaggggaaaacaacctgacctgcttcactgctactcctgccacacgttaatcctcactatttgcccctaagtcc

SEQ ID NO: 22899 - DNA, 201 bp, Homo sapiens
agccaccgcgcccggccaaaaacattttttttttttgtagaactggaatctcaccatgttgcccatgctggtttcaaactccgatcctcaaatgatcccaytgcctcagcctcccaaagtgctgggattataagtgtgggccaccgtctccagcctgagcctcaatttctttattgtgaaatgggaggattgacattatgg

SEQ ID NO: 22900 - DNA, 201 bp, Homo sapiens
agctgacctgtggccccacagtgatccttactgggcaatctactggccaggaggccaagccctgtctaggtactaccctaatgaaacctttaaggcgctayagatctttgctgttttcagttccctccaacctctacaaaaaaccagagcaatgctaggcgtggtggctcatgcctgtagtctcagtactttgggaggctg

SEQ ID NO: 22901 - DNA, 201 bp, Homo sapiens
accgcgcccggccaaaaacattttttttttttgtagaactggaatctcaccatgttgcccatgctggtttcaaactccgatcctcaaatgatcccattgcytcagcctcccaaagtgctgggattataagtgtgggccaccgtctccagcctgagcctcaatttctttattgtgaaatgggaggattgacattatggggtg

SEQ ID NO: 22902 - DNA, 201 bp, Homo sapiens
ttttatttttaattatgcaaaattaaaaggaaaagtagtacacatgagtcagggaaaagtagtacacatcaggtctgaggagacaaagttttaatgtttgyaccctggctctctttgctggttatataaactctgtgaatgttgcttaacttagtgacaagaggggaaaacaacctgacctgcttcactgctactcctgcc

SEQ ID NO: 22903 - DNA, 201 bp, Homo sapiens
taaagtagacacaggaaggaggacaggcaaagctttcaccttaaagtttggcatggaattttagattactgtagtgaagctctcctaataactagaaattwccaggtcacttttttatttttaattatgcaaaattaaaaggaaaagtagtacacatgagtcagggaaaagtagtacacatcaggtctgaggagacaaagt

SEQ ID NO: 22904 - DNA, 201 bp, Homo sapiens
aactctggaggtgaagcacaaggtagtgacatcaaaaagttagccatgcttcttcttgactcttaaagacttccagcctaaagtagacacaggaaggaggrcaggcaaagctttcaccttaaagtttggcatggaattttagattactgtagtgaagctctcctaataactagaaatttccaggtcacttttttattttta

SEQ ID NO: 22905 - DNA, 201 bp, Homo sapiens
ctgttactcaggggattttccagcaatgctggcaattccctgcctttatgacccaactacaatgagacttttcagtctctgccttttctgtattcttccamctctggaggtgaagcacaaggtagtgacatcaaaaagttagccatgcttcttcttgactcttaaagacttccagcctaaagtagacacaggaaggaggac

SEQ ID NO: 22906 - DNA, 201 bp, Homo sapiens
caacacacagccactgtgatagggaagtacctagacatttgggctttggggatttctgttactcaggggattttccagcaatgctggcaattccctgcctytatgacccaactacaatgagacttttcagtctctgccttttctgtattcttccaactctggaggtgaagcacaaggtagtgacatcaaaaagttagccat

SEQ ID NO: 22907 - DNA, 201 bp, Homo sapiens
tgtaaagaaggggttttgccatgttgcccaggctggtctcgaactcatgaactaaaagcaatccactcacctcagactcctaatagtgctaggattgcctrcatgagccactgctcccggccgcaccccccacctttgtacagggcaaagactttgttatgtattcttccagacttttacattttagggagaaatttgtgc

SEQ ID NO: 22908 - DNA, 201 bp, Homo sapiens
gactctcactattcacaccaggtgattaaagctggggtgctggtggccggcagagcacctggtcataggagctgagctgggacacttgtgtgtgtgtgtgkctgtgtatgtgtgtgtgtacgtgtgtgtgtgtgtgtgtgtgttggggatgcagagtgcactgaagtaataggctcacatgtgttttcttcttcctgctct

SEQ ID NO: 22909 - DNA, 201 bp, Homo sapiens
ttttttttttttctgagacagggtctcactctgtagcccaggctggagtgtagtggcatgatcatggctcactgcaggcttgacctttggggctcaagcartcctcccacttcagccccctgactagctgggactaaaagtgtgcaccaccatacctggctaattttggcatgttctttttttgtacaaaataatcttctg

SEQ ID NO: 22910 - DNA, 201 bp, Homo sapiens
tcccactcaaaagtcataatctattttctactttaatgcatctgtaattggtgtttgtctatggtgtgaggtagggaacccaagcccaatttttccacatgaataaccatgttgttcttaatatcctagcaacacttattgaacagaccattttcgcccaccaatcacccccacatcatgtatcacataacaagtgctata

SEQ ID NO: 22911 - DNA, 201 bp, Homo sapiens
caaacatggcgaaaccctgtctctaccaaaaaatacaaaaattagccaggcatggtggcacatgcctgtaatcccagctactcgggaggctgaggtgggamaatcccttgaacccaggaggcagaggttgcagtgagctgagattgagccactgctctctagcctgggctacacagtgagactctgtctcaaaaaaaaaaa

SEQ ID NO: 22912 - DNA, 201 bp, Homo sapiens
tgcttcaacagtaccctatctttatttccatcccaggaattattcatctcactgaaacattacaattctatcataattctctcttcatggtctctcttccycaataccccatcatctcctagagagcaatatatgtatttttctttttatttatttatttttggagacagggtctcactctctcgtccaggctggagtgca

SEQ ID NO: 22913 - DNA, 201 bp, Homo sapiens
tctcaaagaggtagaaacaatcttggactttgccacgctcctcagacacagggttaaaattgtcctgatgatgagatggcataacacattcaggtggttargtgttttgactcctgtccaacaaaataaaaaacccaaaaaacatctgctccttcctggttcagcagcctattttccatggaagatgcgtgtctgacacag

SEQ ID NO: 22914 - DNA, 201 bp, Homo sapiens
ggccgggctggtctcgaactcctgacctcaggtgatccacacgcctttgcctcccaaagtgctaagattacaggcgtgagccactgtgcccagcccacacrctttttaataatgcaattactcagcagaaataagacaattctttttaactgaatcaagaaataaaaggcagagttttcttctttaagcattttttttaaa

SEQ ID NO: 22915 - DNA, 201 bp, Homo sapiens
ccactatacctggctaattttttgtatttggtggagacggggtttcaccaggttggtcaggctggtatcgaattcctgatctcaggtaatccacccacctyggcctcccaaagttctgggattataggtgtgagccactgtgcctggcctgcattccagctttcttgtagctatttgtgtgatattttttcatcattttac

SEQ ID NO: 22916 - DNA, 201 bp, Homo sapiens
agcaaatactgaaacctgctagacattatctacatgcatgtgtcttttgggttggcctgaaagacttttatgcctgtcgtattggctgttaatagtacttwgattcactctgatgatgttccacttacctttaataaattgtcaacccacttttctttcccttttttgagacagatcttgctgtgtcatccaggctggagt

SEQ ID NO: 22917 - DNA, 201 bp, Homo sapiens
ttttgggattcccagctggcttgtcctagagtgctttattttgcttatgcaatacttctccagtaaaaatgacacaggagccaacacacagccactgtgayagggaagtacctagacatttgggctttggggatttctgttactcaggggattttccagcaatgctggcaattccctgcctttatgacccaactacaatga

SEQ ID NO: 22918 - DNA, 201 bp, Homo sapiens
aaattagctgggcatggtggcacacgcctgtaatcccagctactcaggagaccgacgcaggagaatggcttgaacctgggaggtggaggttgcagtgagcygagatcgtgccattgcactccagcctgggtgagagactctgtctcaaaaaaaaaattaactgcattatgacagacttttttccttttagcaattgaaact

SEQ ID NO: 22919 - DNA, 201 bp, Homo sapiens
ctcatatctgagtatacacattttacttatttctaaatttttttctgattgatgttcaacagttttctcaggtatatattgctcttttttttgtttatatwataccttgatttcaagtcattagaatcttcaaccatttagtgattcatgcttatgttttgggattcccagctggcttgtcctagagtgctttattttgct

SEQ ID NO: 22920 - DNA, 201 bp, Homo sapiens
ttcgagaccaccctgaccaacatggtgcaaccccgtcaaatacaaaaattagctgggcatggtggcacacgcctgtaatcccagctactcaggagaccgasgcaggagaatggcttgaacctgggaggtggaggttgcagtgagccgagatcgtgccattgcactccagcctgggtgagagactctgtctcaaaaaaaaaa

SEQ ID NO: 22921 - DNA, 201 bp, Homo sapiens
ttttaaattaataatatgcctacttccaaggtctttaattatttttaaagttacactattgactcatatctgagtatacacattttacttatttctaaatytttttctgattgatgttcaacagttttctcaggtatatattgctcttttttttgtttatataataccttgatttcaagtcattagaatcttcaaccattt

SEQ ID NO: 22922 - DNA, 201 bp, Homo sapiens
tggcaatacgcgataaaggaagctgcatggccaggatggaaaagttgctggtcacagtagcagcaaagggcttagctagttcttcctggcagcctcctcartaattcatagtttactgggaatcatatatcaaatagttttagctcttcagaagaaaatgaaatttataattaactgcattgcccgggtgcagtggctcac

SEQ ID NO: 22923 - DNA, 201 bp, Homo sapiens
tctcaatttcatcttccaaattactaattctctcttaagcatcatcgatccttctagtcagcctttctacacatatatttttaaattaataatatgcctamttccaaggtctttaattatttttaaagttacactattgactcatatctgagtatacacattttacttatttctaaatttttttctgattgatgttcaaca

SEQ ID NO: 22924 - DNA, 201 bp, Homo sapiens
agaacaaaattgcttgtaaggaataacagtagattcctctgggctacgttttatgacaatttctcaatttcatcttccaaattactaattctctcttaagyatcatcgatccttctagtcagcctttctacacatatatttttaaattaataatatgcctacttccaaggtctttaattatttttaaagttacactattga

SEQ ID NO: 22925 - DNA, 201 bp, Homo sapiens
gaacttaaagtataatttaaaaaattttaaataggtagaaagagcaaagaacaaaattgcttgtaaggaataacagtagattcctctgggctacgttttakgacaatttctcaatttcatcttccaaattactaattctctcttaagcatcatcgatccttctagtcagcctttctacacatatatttttaaattaataat

SEQ ID NO: 22926 - DNA, 201 bp, Homo sapiens
ttgttttggaaagaagtaaaactgttcattattttttattattatattttaagttctgggatatatgtgcagaaggtgcaggtttgttacataggtatacrtgtgttatggtggtttgctgcacccatcaacccatcatctacattaagtatttctcttaatgctatccctccccttgcccccaacccccgacaggccccg

SEQ ID NO: 22927 - DNA, 201 bp, Homo sapiens
gtttgttttggaaagaagtaaaactgttcattattttttattattatattttaagttctgggatatatgtgcagaaggtgcaggtttgttacataggtatrcatgtgttatggtggtttgctgcacccatcaacccatcatctacattaagtatttctcttaatgctatccctccccttgcccccaacccccgacaggccc

SEQ ID NO: 22928 - DNA, 201 bp, Homo sapiens
tttttgtttttaaactgctattatgagcatattttatggtttttacttttaaaatgtaaattatatttatttatttattttttataaatgtcattttaagycatcagattttggggtaatttctttttgtttgttttggaaagaagtaaaactgttcattattttttattattatattttaagttctgggatatatgtgca

SEQ ID NO: 22929 - DNA, 201 bp, Homo sapiens
caatgtaaacaaaaaaacaaaaaaatacatcagtcattatttcattaaaaataatattttttgcatactgatagcaatggagtattgaaaaacaaaaaatraaataaaataacattttgcttcttttagtttttttgtttttaaactgctattatgagcatattttatggtttttacttttaaaatgtaaattatatttat

SEQ ID NO: 22930 - DNA, 201 bp, Homo sapiens
tgaacatagtataatattcataaaattcactcctttatagtattttgtttcatccttactataggaagaaagttgggacagaaggggtagaaggaaatttkaatctcttagaataagagacactggggcgggcgtggtggctcatgcctctaatcccagcactttcagaagctaaggcgggtggatctcaaggtcaagaga

SEQ ID NO: 22931 - DNA, 201 bp, Homo sapiens
ctgtgttagtttgctgaggataatggctcccaggtcccagtctatcattgatgggcatttgggttgattccacgtctttgctactgcagatagtgcttcartgaacatacgcatgcatgcatctttgtaacaggatgatttatattcctttgggtatatacccagtaatgggattgttgggtcaaatggtatttctggttc

SEQ ID NO: 22932 - DNA, 201 bp, Homo sapiens
gtaaaataattcttatctatatatatgacaatggtctgttagggggaggccaacccacctgccccaccccaagccagtttgcacaatcatttctacatttstttactccacataaatttcttcttctttgacgcctttgaacaggttataacatctgcctacttttctcatttaattaatacgttaagtaaaatctttagc

SEQ ID NO: 22933 - DNA, 201 bp, Homo sapiens
ttatgggtttcttacatcactgcccattagtcccctccagccaccagaccagactgattatttatggttttgcttgctttgcttttgttttctaggtggckatctcttaggaaccccagtagtttggacacacacacacacacacacacacacacacacaggcaaggtcacagtcagatccctggcacgttaatttggcca

SEQ ID NO: 22934 - DNA, 201 bp, Homo sapiens
ccattcagatgccaattgcaagctccaggttgttttacctgtgcttctgactgaccaagctatacatcgggtttcccaaaaacccctccttgggtttgatkgatttgctacagcagctcacagaactcagaaaaacacttaactaacctttactggtttattataaaggatattacgaagaataatgatgaacaccagatg

SEQ ID NO: 22935 - DNA, 201 bp, Homo sapiens
cccaatgaattacttctttcactggcttcctttgctctggcaaaggtggattttttttccatggcagagaaattttataaaaaatgtaatattttagaaawtgcctaaatgtcaagaatacaacatcttgtttgttgttgttgttgttgttttgtttgttttttgatacggagtctcgctctgtcgcccaggctggagtgc

SEQ ID NO: 22936 - DNA, 201 bp, Homo sapiens
acagtatttacagcctattagaatttgagagattcaggactatttgttttttttaagtccatcactcttatcagtgattttgaccaaatttagttaatacygaagtcaggatctgaacccggggacgtcttgctcagagtctgggcatttgaccactccactccactccactccactccactccactgcctctccacgagt

SEQ ID NO: 22937 - DNA, 201 bp, Homo sapiens
ggaggggcttggtacagacctggatggctcaacctttagaggttgagcagagacgaggggactgcaaagaagcagccaggcaggtaagagttcagatgtcygggaagccacacgagaaagtgtttccaaaagcaacacatgctgttgaagaagcccagaaagaggaagatacagaggtggccaccgatccaatgacaacgt

SEQ ID NO: 22938 - DNA, 201 bp, Homo sapiens
ctcctgcctcactcagcctcctgagtagctgggattacaggcacacgccaccacacctggctaatttttttggatttttagtagagatggggtttcaccaygttggccgggctggtctcgaactcctgacctcaggtgatccacacgcctttgcctcccaaagtgctaagattacaggcgtgagccactgtgcccagccca

SEQ ID NO: 22939 - DNA, 201 bp, Homo sapiens
tataattttgctagatatctataacttaaaaagacatgcttagattttattccatccatgtgttgtgagtgttctatgtctattcttctttccagttctgyattctcttcaagactggttgaagtaccacacacattattaattttttttttgagatcgagttttcactcttgctgcccaggctggagcgcaatggctcaa

SEQ ID NO: 22940 - DNA, 201 bp, Homo sapiens
aaatacaaaaaaaggccgggcaggcacagtggcttatgcctgtgatcccagtactttgggagaccgaggtgggtggattacctgaggtcagaagttagagrccagtctggccaacatggtgaaaccccatttctactaaaaatacaaaaattagcagggcatggtggcaggcacctgtaatcccagttacttgggaggcta

SEQ ID NO: 22941 - DNA, 201 bp, Homo sapiens
ccaggggcgggggcggggtgaggatgaaaagctgacctgaaacccctgaggtcggctggatggcccctagaagtagaaactgtgccctaatcagaactaaytgaagttctgcactatcacaggactccattatggcacttggcccccgtactgtctctcctctctgtgggtttcctaaggacagagtggcatccactttct

SEQ ID NO: 22942 - DNA, 201 bp, Homo sapiens
aaacaaaatttataacgtgaataaagaaaaaaaatatgttactagaataaagcaatgagatcatgctaccactgctccatcttcagaaatttatagttgtraaaatcagccactgtcttgttttaaaccaggtttaatgactatgtagtagtcatcatcaagagtctgcattctatagctcaggctctcccctagccatac

SEQ ID NO: 22943 - DNA, 201 bp, Homo sapiens
ttcaatttaaaataccagagcgaatttatatattttaggtataagaatagtattttaatgtatattatttatttcttaagtcctacgtcttttaggtactkaaatgcttacagatgaaatcatgctatgtctgtggttggcatagatagaaaaggaaacagaagtggtcaggactttttcccatctataagtttacattag

SEQ ID NO: 22944 - DNA, 201 bp, Homo sapiens
tatttttttaaacatttgaaagtacaacacacagaaagtataactttaaggtggcataaaaactaggtgttagaatttttatctcaaccaccaagccaagytgacatttagaacaaataactggccttgtatctgaaaacagagaatactgaagtgtttgatatttccattatccctagtttgctgcaacatgttactttt

SEQ ID NO: 22945 - DNA, 201 bp, Homo sapiens
caccagcctgcctccgcaggggggatttttgttttttttgtgtgtgtgtgtgtttttcattgattgttaatgctcatgatcacgtggctgactgggtgctmtggcttgctgccaccacccagcgtggaagaatatcatactgcctatcacaggcccgggaaaagatcaaaattcaaagtacaatttctgctgaatgcctgt

SEQ ID NO: 22946 - DNA, 201 bp, Homo sapiens
tttttccttatggggacaaaaaccatgtacaggcacaaataaggttgtacacaggtgcatacacagacacaaaagtgttgcctttcacataagatgacaayattcctgacgcaaattatgagtggcttaagacatccgttcatgttggtgaggaggagagcaatgtctgaaaaggtgagaaaaatggtagaaggctctcat

SEQ ID NO: 22947 - DNA, 201 bp, Homo sapiens
atgaagcattccacatagttctttacatacagattttcaaatgttagttgtttatagtagtacagatgtacctcagcttacgatggagttacatttcgatwacctgtattaagtagaaaatgtaagtcaaaaatggggttttatagacatgatgggatgggaaaacacaacatccaaaaaacttagctaacacagtacacc

SEQ ID NO: 22948 - DNA, 201 bp, Homo sapiens
agacagaggacactcatatgccaccccataacaactgttaactcctgtgagaagtaaagtgacagaaaccccatcacgttaaaactcattcaaagtgagakgacatttcatttcatttagtctttttattgggaatacaaaaggttgtgaagtcaggactgtggttgggacaaaaaaatttaggtgtttagatcacaaatc

SEQ ID NO: 22949 - DNA, 201 bp, Homo sapiens
taatatatgaatccatttggccttttgctgactgcagttacagaagcatagagaactgttctgccccttctaaccactgtgctgcaagagggaggattgckagtctttgttaatttgttgtgatacttaaatgagataaaagtatatgaagcattccacatagttctttacatacagattttcaaatgttagttgtttata

SEQ ID NO: 22950 - DNA, 201 bp, Homo sapiens
ttagctggcaccatctctttgcctctttctttctcctttgttgcagaacctttgtgtaaatgaagacgtgagaagcctaggttctgtgcagcttatcaacraccgctgcgtggacatgcagagaagcaggcacggtagccaccaggaccatggtgtagccgcaggtggtctggagagagtgaggcaggggtggcagtgact

SEQ ID NO: 22951 - DNA, 201 bp, Homo sapiens
tttgaacccaggaggcgaaggttgcagtgagctgagatcgaatcactgcactccagcctgggcgaccgagaaagactgtgtctcaaaaaaaaaaaaaaaaagtccttgatgaagcattaaacattaattttatcaatctcaagtacagttatttttagtacataaagaatttcagcagtcttctcctactgccctgtcttc

SEQ ID NO: 22952 - DNA, 201 bp, Homo sapiens
ctctcacacacacagagtggatgaggatgaggatgacctggaggaagaacacataactaaggtaacacgagtgtcctcagctggtgctgtgctgggggctrtgggctgggctgtgcacccttggggaagaggctggagtcactcggctacttctcaccctcctctccacaaaggaggagcttccagcacttggactctgtt

SEQ ID NO: 22953 - DNA, 201 bp, Homo sapiens
tctaatagaagaatataacaataacacaattacagaggtcaaggtcgtttttaatctgtatagggttttgaaacctttatttagtagctgaaaccagcacygtaacaacatttaaatagctagttaccataaattttattttctggaggaaatctaaaacaatggtatggactaaaattgagttgaatgctttaggcaaaa

SEQ ID NO: 22954 - DNA, 201 bp, Homo sapiens
ccctgtggagtgtgctgtcctttaaaataagtctctgctttggctgccttgcttgtgtggtttgttcagttctttgttcaagacgccaagaacctggacarctaccctcaactgcatggtttagaggaactcttctgttccactgaaggcattttgtctatctccagtggcagaaaattgactcactcataataggagcga

SEQ ID NO: 22955 - DNA, 201 bp, Homo sapiens
gctttgtctctggcacgtggggaggtgggtactggtgctgagacttcttcctccctccccacctccactgcccctgtccagaggcaggaagaagaagaaasagagaatctcctccgcctcagcagggagatgctagagacaggcccggaggctgagcggctggagcagctggagtctggggaggaggagctggtcctcgcc

SEQ ID NO: 22956 - DNA, 201 bp, Homo sapiens
gagcacatgaatgataagccgtagattctctgcacacactaagttggaccttcccgtccacaggttcaccataggtatatctaatagaagaatataacaayaacacaattacagaggtcaaggtcgtttttaatctgtatagggttttgaaacctttatttagtagctgaaaccagcactgtaacaacatttaaatagcta

SEQ ID NO: 22957 - DNA, 201 bp, Homo sapiens
tttggattgtcaggttgtaagtttttaagatatcctggattctgatccttccttactagggaccataaatgtgagggtttactcctgggttctaggttctrttccattgatcaatgcctgtcctgtgtcagtactatatggtcttgtttattgtagttttgtcgttttgtttttttgttttttgtttttaagactgaatct

SEQ ID NO: 22958 - DNA, 201 bp, Homo sapiens
cccccagtgaggaggcgccgagctgagtggcccagactccttaggagaggcctggttttgggcttcctggtgattttccttcatgtctgcctcctgtaggyggagcaggccaggaggaagcagcgagaagaacgcctgcagcagctgcagcacagggtgcagctcaagtatgcagccaagcgcctggtgagcctcatttct

SEQ ID NO: 22959 - DNA, 201 bp, Homo sapiens
aataggaatagaaatatagaataaaagtatatattttaactgtaaagaggaaaacaagaagaaaggaaggtaaatggaaggtgaggataaaaagttaacgsaaacctatttataattttgctgatatacctcttacctgaatggtaaaatttttacagagtgaactgataagatgagcacatgaatgataagccgtagatt

SEQ ID NO: 22960 - DNA, 201 bp, Homo sapiens
ctggaggtcagcagggccttctccacacaaggaactgttggtgcccatttattactcacctgggaaaggacctgatcgttgccattggcagcatggttcartggctgcaaatggatctgatggagagcgtgtggctttgggaggagcgtgccgccttccacagtgagcagcgaggctgggacctgcagggatgaggtcccg

SEQ ID NO: 22961 - DNA, 201 bp, Homo sapiens
ccgctcacttgttatttgccaggtaatcctctaatccagaggatttggccttttgtgtgtgttaatgtcctgcttgcaccagctctatgaggaaggtgctrctgttgtcatttccatttctgcactcgtggaaacaagcgtagtgaggccagcctgagccacagagctgcaggtaggggaggcagctggaaccctggcgcc

SEQ ID NO: 22962 - DNA, 201 bp, Homo sapiens
caaataggaatagaaatatagaataaaagtatatattttaactgtaaagaggaaaacaagaagaaaggaaggtaaatggaaggtgaggataaaaagttaaygcaaacctatttataattttgctgatatacctcttacctgaatggtaaaatttttacagagtgaactgataagatgagcacatgaatgataagccgtaga

SEQ ID NO: 22963 - DNA, 201 bp, Homo sapiens
agcaatcctccctccttggcctcccatagtgctgagatgacaggcgtgagccactgtacctgaccccttttaccttgtttagcctgacaacccatcttctscctctcaggtctttccatctcagtcttctgcactccaggcttctgcatcttcctcctatgctcagcctttaattgtcgatgtttctggttctatagcttc

SEQ ID NO: 22964 - DNA, 201 bp, Homo sapiens
gaaaatgaaacttagcatgacaaaagaggaatataaaatttacaaataggaatagaaatatagaataaaagtatatattttaactgtaaagaggaaaacargaagaaaggaaggtaaatggaaggtgaggataaaaagttaacgcaaacctatttataattttgctgatatacctcttacctgaatggtaaaatttttaca

SEQ ID NO: 22965 - DNA, 201 bp, Homo sapiens
ttggcacaatagtcttatagcctcagtgtgtcaccttctgttgatcttaccatggtatgtacaaaagtataatatggccgggcgtgatggctcacacctgkaatcccagcactttgggaggccgaggcgggcgggtcacctgaggtcaggagttcgagatcagcctggccaacatggtgaaaaccccatctctactaaaaa

SEQ ID NO: 22966 - DNA, 201 bp, Homo sapiens
tttcagcctgaccctcctctccctccctcttgcctcctcaatctgccagttgcctccagggctctcctagctcagcttccacttagagcccacttcctgtsttctgcaaggagcaggagcagggattgcaacctgggaatctaattgttcttaaacagaatttcaacccgtccctttgttttcagtggcctgctgtgttcc

SEQ ID NO: 22967 - DNA, 201 bp, Homo sapiens
atagggttcccatctggagctcctatatacacttatttccagtgagaataggttgagaggaaaataattatacatctaatactcttgaatatgcagaaacrtcacatctccctgactaaattcacaaagtataaaataaagaacaggacatatgttcccagtaaattgatagggtgtagattttgatatgaaaccaaatgt

SEQ ID NO: 22968 - DNA, 201 bp, Homo sapiens
accttccaagtagatcttttaggaaattcctcctttgtcagtttggaaaagttgattcttctctttagtggttaagaacctgactgatagggttcccatcyggagctcctatatacacttatttccagtgagaataggttgagaggaaaataattatacatctaatactcttgaatatgcagaaacatcacatctccctga

SEQ ID NO: 22969 - DNA, 201 bp, Homo sapiens
ttcgggaggtggaagttgcattgagcggggatcacgtcactgcactccagcctgggcgccagagcaagactcctctgtcacaaaaaaaaaaaaaaaaaaaagacagggtcttgctgtgttgcccaagctggacttgaacgcctgggctcaaggagtcctcctgcctcagcctcccaagtagctaagactgcaggtgtgcac

SEQ ID NO: 22970 - DNA, 201 bp, Homo sapiens
acctaaagtattctctaaacaggacaggaatatgtgacactgtgtgtgtgcacctgtgtgtgtgtgtgcacacatgtgtgtggataaatggtatcacactrtagtatggggattgcagctggcagttgtatattagacagtcagatctggcatgattatagctgaaagccttgctacatcctagaccagcctgtttgtgtc

SEQ ID NO: 22971 - DNA, 201 bp, Homo sapiens
tattataattgttactattgttagcgtttattgtccacattttttaaatttaagaattagaaggttcttaattatttccaacctaaagtattctctaaacrggacaggaatatgtgacactgtgtgtgtgcacctgtgtgtgtgtgtgcacacatgtgtgtggataaatggtatcacactgtagtatggggattgcagctg

SEQ ID NO: 22972 - DNA, 201 bp, Homo sapiens
taagcatccattaaatgttagcaattattattattataattgttactattgttagcgtttattgtccacattttttaaatttaagaattagaaggttcttmattatttccaacctaaagtattctctaaacaggacaggaatatgtgacactgtgtgtgtgcacctgtgtgtgtgtgtgcacacatgtgtgtggataaatg

SEQ ID NO: 22973 - DNA, 201 bp, Homo sapiens
cgggtatagtggcagtgctgagatcactccattgcactccagcctgggcaacaaaagcgaaactccatctcaaaaaaaaaaaaaaaaaaaaaaaaaaaaargtaagttactacttaagatcatgctgatattctaaagataacaataacagagtttcctacctgcccgagctatgttcccgtggagatccttcttcaaaaa

SEQ ID NO: 22974 - DNA, 201 bp, Homo sapiens
gtttagtttgaaatcaagtaatgtgatgcctccatagttttttgtttgtttgtttgtttgtttttatttgtttgtttttttaagtctttctttggctatgygggatccttttatgttccatatgaattttaggatttttttctagttctgtgaagaatgatgatgatattttgataacaacacaattcgcaattgcaaaat

SEQ ID NO: 22975 - DNA, 201 bp, Homo sapiens
accaccctccaagaatctccatgtgttcagtcatccgaaaaacctctgaacactgatttttggggtttttatggagtctttgttacataagcatgattgaytaaaccattggctactggtgatcaacttaaccttcagcccctgtcccctcccaggaggttgaggagtagggctaaaagttcgaaccagcaaatcctacct

SEQ ID NO: 22976 - DNA, 201 bp, Homo sapiens
agcaaagtggatgagtgggagaaggatacttcctgagctctttcaaggaggtcagggcaagtcgcatagggttttgttaaccctgacgtggatttgagaawcatcagcacgcaaggaggtatctaaagctggaggcctggatgaggttgcctttgggaagtgaggaaacagcaaaaggaggggcttggtacagacctggat

SEQ ID NO: 22977 - DNA, 201 bp, Homo sapiens
tcctagtgaaaagagtgtgaacaaggagaaagaaatccaggcagaggagacagctgctgcaaaaactctaaagcaagacccagcttcaggtcttcttcttyttttttttttttttttttttgacacagggtctcactctgttgcccaggttggagtgcagtgacatggtctcggcccactatagcctccacctcctggact

SEQ ID NO: 22978 - DNA, 201 bp, Homo sapiens
acctcgatccttgactctcactattcacaccaggtgattaaagctggggtgctggtggccggcagagcacctggtcataggagctgagctgggacacttgygtgtgtgtgtgtctgtgtatgtgtgtgtgtacgtgtgtgtgtgtgtgtgtgtgttggggatgcagagtgcactgaagtaataggctcacatgtgttttct

SEQ ID NO: 22979 - DNA, 201 bp, Homo sapiens
ggaagcatatgcgtatttccacttaagcatctgaaatattgcctctagtgctgaacaaattcttcccttggttattttcctcttatctcagtccctggaaraataaatgcctgtactaattctctatatacataaatggtctctttaggtataaataacctcataatcacataaaagttaaagttttaatggaaaaggctg

SEQ ID NO: 22980 - DNA, 201 bp, Homo sapiens
aggaagcatatgcgtatttccacttaagcatctgaaatattgcctctagtgctgaacaaattcttcccttggttattttcctcttatctcagtccctggaraaataaatgcctgtactaattctctatatacataaatggtctctttaggtataaataacctcataatcacataaaagttaaagttttaatggaaaaggct

SEQ ID NO: 22981 - DNA, 201 bp, Homo sapiens
tctgctcgcctcggcctcccaaagtgctgggattacaggcgtgagccatcgcaccggcccgcttagtccaatattttattttattttattttattttatttattttttttgagatggagtctcactctgtcgcccaggctggagtgcagtggcgcgaactcggctcactgcaagctccgcttccctgggttcatgccattc

SEQ ID NO: 22982 - DNA, 201 bp, Homo sapiens
caacctccacctcccagtttcaagcaattctcctgcctcaggctcccgagtagctgggattacaggcatgcaccaccatgcccagctaattttgtattttyagtagagacagggtttctccatgttggtcaggctggtcgcgaactcctgacctcaggtgatctgctcgcctcggcctcccaaagtgctgggattacaggc

SEQ ID NO: 22983 - DNA, 201 bp, Homo sapiens
agtgctagttctataataatcttctctgctactaaactgctggtatcgaaactgcctttcagatgagatcaggtgcgttcaaggtggtatggccgaagatrtaagttgccttccagctcaaatacctttgtttttggttaataatgattcaactcatgtgccctagacccagacctgccctggatgatatgaggggcttaa

SEQ ID NO: 22984 - DNA, 201 bp, Homo sapiens
agtcatatatatatatatatacacaaatatatatacacacacacacacacacacacatatatatatatatatatatatttttttttttaagaccatatttygctctcgttgtccaggctggagtgcaatggcatgatctcagctcaccgcaacctccacctcccagtttcaagcaattctcctgcctcaggctcccgagta

SEQ ID NO: 22985 - DNA, 201 bp, Homo sapiens
aattctgcggaaagccacctaaactactcccattctagcactctctcctctgtaataatcctctacttccctccttacctgcccaccagagccccaaaccscggatgaagactatcccctcacttccctattcccgtacccacacagactagttcccaatttctctcacgactacccatgaatcacttcacctgcctttta

SEQ ID NO: 22986 - DNA, 201 bp, Homo sapiens
ctacagtgactgtgagaggaatctccagaagggcgatggtgatataggcggagagggtcacttcatcttctactcctccctgtgaatacgagagagagatytgaataattcaacttctgagaatgctattgattagttctttctattctgctgtgtcatggaattcatccttacccatatccatccctatagggcaaagta

SEQ ID NO: 22987 - DNA, 201 bp, Homo sapiens
cacatgtgcatgtgcatgactttatattttgtcatttacgcttagtcatatatatatatatatacacaaatatatatacacacacacacacacacacacayatatatatatatatatatatttttttttttaagaccatatttcgctctcgttgtccaggctggagtgcaatggcatgatctcagctcaccgcaacctcca

SEQ ID NO: 22988 - DNA, 201 bp, Homo sapiens
ttttcaacccgctccattagtcacctcctttgctgtatcgccaatctttttctcagtggaatctcttcagctgacaagcatgttggtctccctcgtggccytctgtagtcatgttaacatctgtttcttcacacctctgatgtaaaaattcttaaaatatttagatgtaagacttctacttatttacgtttggatcttcag

SEQ ID NO: 22989 - DNA, 201 bp, Homo sapiens
gcacatgtgcatgtgcatgactttatattttgtcatttacgcttagtcatatatatatatatatacacaaatatatatacacacacacacacacacacacmtatatatatatatatatatatttttttttttaagaccatatttcgctctcgttgtccaggctggagtgcaatggcatgatctcagctcaccgcaacctcc

SEQ ID NO: 22990 - DNA, 201 bp, Homo sapiens
ccacacccggctaatttttgtatttttagtagagatggggtttcaccatgttggccaggctggtctcgaactcctgaccttcatgtgatccgcccacctcrgcctcccaagtaggtgggattacaggtgcaagccaccaatgctcagctaatttttgtattttttgtagagacagggttttaccatgttgcctagatcagt

SEQ ID NO: 22991 - DNA, 201 bp, Homo sapiens
aatcttctttttcacacacacgggcacatgtgcatgtgcatgactttatattttgtcatttacgcttagtcatatatatatatatatacacaaatatatayacacacacacacacacacacacatatatatatatatatatatatttttttttttaagaccatatttcgctctcgttgtccaggctggagtgcaatggcat

SEQ ID NO: 22992 - DNA, 201 bp, Homo sapiens
tttttgtatttttagtagagatggggtttcaccatgttggccaggctggtctcgaactcctgaccttcatgtgatccgcccacctcggcctcccaagtagstgggattacaggtgcaagccaccaatgctcagctaatttttgtattttttgtagagacagggttttaccatgttgcctagatcagtcttgaactcctgag

SEQ ID NO: 22993 - DNA, 201 bp, Homo sapiens
ttctcatcatttagctcccacttatgtgtgaaagcatgcaatatttggtttcctgtgttagtttgctaaggataatgtcctctagctccaagctcctgcawaggacatgatctcattctttttttatggctgcatagtattccctagtgtatgtgtactgttttctttatgcggtttaccgttgatgggcatttaggttga

SEQ ID NO: 22994 - DNA, 201 bp, Homo sapiens
ccagaaagtgttctatgactctttcaaatctaagttagctacccatcctgtacgcctcaattatagtatctatcacagagtattatagttacttatctccrttttctataaaatctcctctagaagggccagtatcttgtctgtcagccatcttactggcaaagtctactatagcacctgccccccccttttttttttttg

SEQ ID NO: 22995 - DNA, 201 bp, Homo sapiens
agttacttatctccattttctataaaatctcctctagaagggccagtatcttgtctgtcagccatcttactggcaaagtctactatagcacctgccccccscttttttttttttgagacggagtctcactctgtcgtccaggctggaatgcagtggcacaatcttggctcactgcaagctctgcctcccgggttcacgcca

SEQ ID NO: 22996 - DNA, 201 bp, Homo sapiens
attatccaaagtagatttaccactttattttttatttaacttttgttttatgtttgggggtacgtgtgtaggtttgggggtacgtgtataggtaaagttgygtcatgggggtttgtggaacagattatttaatcacccaggtattaagcctagtacccaattagttgtttttttttcaaatcctctccctcctcccacgct

SEQ ID NO: 22997 - DNA, 201 bp, Homo sapiens
tggcaaagaacaggttagggaccaggcataattgtataaaataagtgtggactagtacattttacatagttctttcttgaatgaacagctaacatgatgtkaaggcttcctgtgccagaaatcagacctggattcaaaccatggctcgaccaatcactagctatgcaaccaccaaccacaggcaagttacttaacctctca

SEQ ID NO: 22998 - DNA, 201 bp, Homo sapiens
tgaacccaggaggggaggttgcagtgagctgagatcacaccactgcactccagcctggacgacagagcgagactgtctcaaaaaaaaaaaaaaaagttcayggagcgcaacctttgggttttgatggatccaggatctaaatccaaaagagagttttaaagatttgggacactgtatctttgagctctgctgtcctctgct

SEQ ID NO: 22999 - DNA, 201 bp, Homo sapiens
aaagaaaaagaaaaagaaaaagaaacataagtagcaagacagaaattaacattttttccatttaggcaataaagagaataaaacaaaagtcaggctggacrtggtggctcacacctgtaatcccagcactttgggaggctgaggagggcagatcacctgaggtcagcagttcaagaccagcctggccaacatggtgaaatc

SEQ ID NO: 23000 - DNA, 201 bp, Homo sapiens
ggaaggggatccaggtggagagtccccctcagtgcctgctttcagcctgaccctcctctccctccctcttgcctcctcaatctgccagttgcctccagggytctcctagctcagcttccacttagagcccacttcctgtgttctgcaaggagcaggagcagggattgcaacctgggaatctaattgttcttaaacagaatt

SEQ ID NO: 23001 - DNA, 201 bp, Homo sapiens
gagactctgtcttagaaaataaagtccatgggctggtcgcagtggctcacgcctgtaatcccagcactttgggaggccaaggcaggtggatcatgaggtcmggaaatcgagaccaccctggctaacaggtgaaaccccaaaattagccaggtgtggtggcatgcgcctgtagtcccagctaactcaggaggctgagatagg

SEQ ID NO: 23002 - DNA, 201 bp, Homo sapiens
caaactcaagcgatcctcccctctcagcctcccaagtacctggtggctggcaagatccaagattactggtgcacaccaccatacacagcttcttttgtttkgtttttgttctttaaaaacttttttttaacatgcattttggtggggatacaattcagtccacagcagtgaccaattccatttttaccttggagccctcct

SEQ ID NO: 23003 - DNA, 201 bp, Homo sapiens
agtacagtcacatggcagggttaggatttcaacatatgtttgtttgttaagatgggcagtctcactatgtggcccaggctggtctcaaactcaagcgatcytcccctctcagcctcccaagtacctggtggctggcaagatccaagattactggtgcacaccaccatacacagcttcttttgttttgtttttgttctttaa

SEQ ID NO: 23004 - DNA, 201 bp, Homo sapiens
cttagctcagtgactgacacaaaataagcatccattaaatgttagcaattattattattataattgttactattgttagcgtttattgtccacattttttwaatttaagaattagaaggttcttaattatttccaacctaaagtattctctaaacaggacaggaatatgtgacactgtgtgtgtgcacctgtgtgtgtgtg

SEQ ID NO: 23005 - DNA, 201 bp, Homo sapiens
agagctgtaccgggttttggaggctggcaagattgggatatttgagagtccaactggcactgtgagtatgaacagtgagagatactgaaaaggacaacttwacggcagctgtgctagcttttcctgtttgcccatccagagattttcatagtatgaagttgggcagaatagttgctctcagtttatctttctgagtaatag

SEQ ID NO: 23006 - DNA, 201 bp, Homo sapiens
ccactcatcggtaagggggcgataatagtaccccctcatagggtactatttgttttgagaatcaaatgcacataaactacttagctcagtgactgacacamaataagcatccattaaatgttagcaattattattattataattgttactattgttagcgtttattgtccacattttttaaatttaagaattagaaggttc

SEQ ID NO: 23007 - DNA, 201 bp, Homo sapiens
cataggtcttgaggccagaaaagttagtaggtggcggctctggtcggtgctggaaatggaggccaggatgaactaagaagcaaactaaagatacttgtaakataaggacgtgtaggctgggtgcggtggctcacgcctgtaatcccagcacttcgggaggccaaggcgggcggatcacgaggtcaggagatcgagaccatc

SEQ ID NO: 23008 - DNA, 201 bp, Homo sapiens
aataggtagtttttttgatcctcaccccttcccaccctacatgtacattttaaatttccagagctctcaaatctcctgaagggcatcctataatatagccrccttcgataatgcattctgggatctacctaccctgtgcactcggcttatattggtttagtctcttctagagtgtgcatctttaaagattatgactgcttc

SEQ ID NO: 23009 - DNA, 201 bp, Homo sapiens
gagaagtgagttccaaagagagaggtgtgggaaccaggatggaagagtcaggcctccagatagcgtttacttctcctttcttccttgaatcactgtctcasagataattaggttcagaagaggaggaaaaaaaagatgacgtcaacatggagcagagtttttcttagaccttagcctagcaaggaaagagaaatgcctggt

SEQ ID NO: 23010 - DNA, 201 bp, Homo sapiens
taagcatagtatccaataggtagtttttttgatcctcaccccttcccaccctacatgtacattttaaatttccagagctctcaaatctcctgaagggcatyctataatatagccaccttcgataatgcattctgggatctacctaccctgtgcactcggcttatattggtttagtctcttctagagtgtgcatctttaaag

SEQ ID NO: 23011 - DNA, 201 bp, Homo sapiens
taaactgccaccaatctgtagtcattttaattgctcctaaaccgaagagcatcatggcaactacctttcccctcgtagagtgacactatcactagtcttaytgaggccaaagttataaagatgggctctcgatctactaatattagtaaaatgggtttgggacttactaacatttgtgcttagaagagacagacctggcaa

SEQ ID NO: 23012 - DNA, 201 bp, Homo sapiens
cagattatttcactatccaggtaataagcatagtatccaataggtagtttttttgatcctcaccccttcccaccctacatgtacattttaaatttccagakctctcaaatctcctgaagggcatcctataatatagccaccttcgataatgcattctgggatctacctaccctgtgcactcggcttatattggtttagtct

SEQ ID NO: 23013 - DNA, 201 bp, Homo sapiens
tttggtgtacagattatttcactatccaggtaataagcatagtatccaataggtagtttttttgatcctcaccccttcccaccctacatgtacattttaartttccagagctctcaaatctcctgaagggcatcctataatatagccaccttcgataatgcattctgggatctacctaccctgtgcactcggcttatattg

SEQ ID NO: 23014 - DNA, 201 bp, Homo sapiens
ttactctcagtttgtgaacctcccttcagtgaacctccctttacttatgctggatatctcttgcgactggatgagcttcactaaagcacagtcatttggayctggattcgaatccctggttttccactttttagctgtgagtttgagcaattatttaatttctgtaagcatcagtatccagtagctgtatccttatagtgt

SEQ ID NO: 23015 - DNA, 201 bp, Homo sapiens
ccactatactaaaggtgaataatgagataaattatttagtccacactcctgctttacatgtgcatttgattattttaacttttattttaggttcaagggtrcctgtgcaggtttgttatataggtaaattgtgtgtcatgggggtttggtgtacagattatttcactatccaggtaataagcatagtatccaataggtagt

SEQ ID NO: 23016 - DNA, 201 bp, Homo sapiens
gtgctacttcagggggtccttgaaactataagaaggtctagaaccatttccagaagcttaaagatctagaaaaatttccactatactaaaggtgaataatkagataaattatttagtccacactcctgctttacatgtgcatttgattattttaacttttattttaggttcaagggtgcctgtgcaggtttgttatatagg

SEQ ID NO: 23017 - DNA, 201 bp, Homo sapiens
aagagcttgtagaactgtattacattagacaataactggaaagtgtttatttagcacagggcctggcacttagtaaacattcagtaggtagtagatttttwaattagattcctttacatttctctcagtgtctagtcaagtgacaatgtctcactaagtgaaatttttaaagtgtcacaattagtaaccaaaattaaacag

SEQ ID NO: 23018 - DNA, 201 bp, Homo sapiens
ttacagtcaaacaccagaatttgaaccctggctttaccacttattacttcatacaaaatgaaatcttaataaagagcttgtagaactgtattacattagayaataactggaaagtgtttatttagcacagggcctggcacttagtaaacattcagtaggtagtagatttttaaattagattcctttacatttctctcagtg

SEQ ID NO: 23019 - DNA, 201 bp, Homo sapiens
tctgaatagaaatgagagagtaagccatatggatatgtgatgaaagtgtccctggccgggcgcggtggctcacgcctgtaatcccagcattttaagaggcmgaggcgggcggatcacgagaccatcctggctaacacggtgaaaccccgtctctactaaaaatacaaaaaattagccgggcgtgttggcgggcgcctgtag

SEQ ID NO: 23020 - DNA, 201 bp, Homo sapiens
atatacccaaatcagccaagttaacacttgtgttccttcctatttctctctgcagtcactgactgccacctcaaagagaaacagcagtctcatctcagccrctggtcccaccatacctgctccctttacacaaaacagaaaagactgtgatcattattcggttctaataatataccccatggaaacacagtagttgggagc

SEQ ID NO: 23021 - DNA, 201 bp, Homo sapiens
tatccacatgagccttcccatttctcagcctcctttgcattcagggcaggaacatgggcggaagtgatgtataccattcccactcctggctttaagagtcwagtgcaacctccttccccatgggtatgaccttgaaagccacgttggcgatggcagagtcaccagaggaaagcagactggttctctctgactcactgtttg

SEQ ID NO: 23022 - DNA, 201 bp, Homo sapiens
tgctctgcctcctgagctccaggcctgcgtttggactttaccttactctcagagcaggttttgtaaaaaagtaaaacctgttggggttttgctgactcagmgcatgtgtgaggaaggaggagggatagaggaaagattctgagcaggaggccgagcgcggtggctcacgcctataatcccagcactttgggaggccaaggc

SEQ ID NO: 23023 - DNA, 201 bp, Homo sapiens
ggaaagcagactggttctctctgactcactgtttggcacggggctgttctggagagtgtctgaactcacaagtagattttgtgtgagcaaaaaccaaaccrttaggtgcttacccgctgagatgtgggagtttgtttgttactgccattgaatctaattctgactaattcaggtattgactccatcatggacaaggaagat

SEQ ID NO: 23024 - DNA, 201 bp, Homo sapiens
cttcaccccatccagcaggaagtagctagagcggtcatcggccaaattcccaacagcagttggggtgtcctgtttagaggggggattgagaggtgacagcrtgctggcagtcctcagccctcactcactcttggcacctcctctgcccgggctcccactttggtggcacttgaggagcgcttcagcccaccgctgcactgt

SEQ ID NO: 23025 - DNA, 201 bp, Homo sapiens
ctacagcctccagaatcttctttttcacacacacgggcacatgtgcatgtgcatgactttatattttgtcatttacgcttagtcatatatatatatatatacacaaatatatatacacacacacacacacacacacatatatatatatatatatatatttttttttttaagaccatatttcgctctcgttgtccaggctgg

SEQ ID NO: 23026 - DNA, 201 bp, Homo sapiens
caggttctggcccccgttttctgtgggtaatacctcataccgtgaccaggcacaggggcggaggagaccccgggatgggagcctcacccttcgtgcgctcrcccaggctctcctgctttgctccctgctgcctgctgcccagtgtgactggcgatggtgggtgggtgagcgctgtcagtcgctgttcctgtgctggatgat

SEQ ID NO: 23027 - DNA, 201 bp, Homo sapiens
tctacagcctccagaatcttctttttcacacacacgggcacatgtgcatgtgcatgactttatattttgtcatttacgcttagtcatatatatatatatatacacaaatatatatacacacacacacacacacacacatatatatatatatatatatatttttttttttaagaccatatttcgctctcgttgtccaggctg

SEQ ID NO: 23028 - DNA, 201 bp, Homo sapiens
tgttaacactttgctgagtattcttctgtacttgttttaaatgtctttaaacatataggcagggtttttgtgtgtgtggtgtttttggtttttttttttttgctgtttttcttcctttgtttttataaaaacaggatcttgcagcctggtgttttaaatttagtagtatgtcctttcaaaaggcaggtatttacgagacaa

SEQ ID NO: 23029 - DNA, 201 bp, Homo sapiens
gttctgtctctgttgttaacactttgctgagtattcttctgtacttgttttaaatgtctttaaacatataggcagggtttttgtgtgtgtggtgtttttgktttttttttttttgctgtttttcttcctttgtttttataaaaacaggatcttgcagcctggtgttttaaatttagtagtatgtcctttcaaaaggcaggt

SEQ ID NO: 23030 - DNA, 201 bp, Homo sapiens
cgtgcccaccatagacacttacctcctgcatagtcagggcccacagacacccaacattcgggtcagcagtggcactcagaggaaaaggtatgcatgcagcratcttcatagtacggtgcagtggccagattttagttaactgcaaaaataaatgtgctcttgttgtggaggatggaggaggggaagcaaaagaaaaaatgg

SEQ ID NO: 23031 - DNA, 201 bp, Homo sapiens
tccgaggctccagtgattctcctgcctcagcctcctaggtagcggggattacaggtgcatgccaccacacccggctaatttttgtatttttagtagagacrgggtttcaccgtgttggccaggctggtctcaaactcctgacctcaggtgatctgcccgcctccgcctcccaaagtgttgggatcacaggcgtgagccacc

SEQ ID NO: 23032 - DNA, 201 bp, Homo sapiens
agtaggagtaggactcagaaagaaaaatttacaaagcatttcgtgatatagtaccaggattagccatgaagtctaaaactgaaaattaattttgttgtacrtaaggccagcaatttgtgggaaaaaagcgataatggattttaatttaatttaaaaggcatggcaaatgtacctgcttcttttaaagtgctgcatttctga

SEQ ID NO: 23033 - DNA, 201 bp, Homo sapiens
tttttttcctcttttcttttggtggggggtgtgggcggcgggggagtttcaatatgttgaccaggctggtcttgaactcctggcctcaagcgattctccckcctcagcctcccaaagtgctgggattacaggcatgagccattgcacccagccttttctatttttcatttcaagagtttgctttttaagaattaaaattgt

SEQ ID NO: 23034 - DNA, 201 bp, Homo sapiens
aattctgagcagccagtgtctccttatctgtcacattcgtactcatttttatgactttgcaggtcttgctgaaaattcttccttaacttgccttgagaacyaccttttccaccaagcattcccaatgaatgtagctcgtggtgttctttccttccaaattcctgttctcttatctctactgcttataacccaatacttgac

SEQ ID NO: 23035 - DNA, 201 bp, Homo sapiens
cccaagtagctgggactacaggtgcacaccgccatgcctgactaatttttgtattttttttgtagacacagggttttgccatgtaagccaggttggtctakaactcttgagctaaggacagtccgcctgttttggcctcccaaagtgctaggattacaggctaactttcaatttaataaaaaaaattaatttgtgcaattg

SEQ ID NO: 23036 - DNA, 201 bp, Homo sapiens
caaaattcactaaacctcctagagcaaaaccatttcagaagtcattatacctaatgcaggaggcagagagaggtggtagaggcaagtgcatatgtaactaygcacttgattaacctttgaataattaagagttcacacaagatatttttgagttgagtagaagaggtgacagaaatcagaagaaatgtttgagtttgttta

SEQ ID NO: 23037 - DNA, 201 bp, Homo sapiens
gattataggcatgagccaccgcgcccagcctaatttttgtacttttagtagagagaagatttcaaacatgttgcccaggctggtctgaaattcctgagctmgagcgatctgcctgccttgccctcgtaaagtgtggagattacaggcatgagccattgtgcccagccacataagtccttttaattcatgttttctttgctg

SEQ ID NO: 23038 - DNA, 201 bp, Homo sapiens
ttggggctgtgatctaattcttttttttttttttgagacagactcttgctctgtcatccaggctgcagtgcagtggcgcgatctcagttcactgcagcctytgcctccgaggctccagtgattctcctgcctcagcctcctaggtagcggggattacaggtgcatgccaccacacccggctaatttttgtatttttagtag

SEQ ID NO: 23039 - DNA, 201 bp, Homo sapiens
tggggggtggagtgccaaaagtgtagcccatcacataaaaataatattgattacatcaatggttgaacataagacatggggtggaagttaataaacaaaayaggaagcttcactatgtgtttctccctggctcccccacccccaggcaccaaggggaaaattcacactgctctctgatcctagacggcaaagtaaggggaa

SEQ ID NO: 23040 - DNA, 201 bp, Homo sapiens
gagagctgagaacataactaaccaatactttcgtgttcaaagaataaatactctgaaacagtgggacagaagcttgctccttagggactttctcaaagtayccttggtggacataaggttatcctcactcaacggaaggacatatctgctgtcgggggaggacacagaatgacgatttcatttacctaggatattttcctt

SEQ ID NO: 23041 - DNA, 201 bp, Homo sapiens
ttttttccaagacagaatctcgctctgtcgcctaggctggagtgcagtggcgcaatctcggcttactgcaacctctgcctcccgggttcaagtgattctcstgcgtcagccacctgtagatgggattataggcgcgcgccaccacgcctggctagtttttgtattttttttagtagagacagggtttcaccatgttggcca

SEQ ID NO: 23042 - DNA, 201 bp, Homo sapiens
ttagagtgtttcttcaaaactagttcaatctcgatctaattagtccccaaagagatgcaaaccaaacgagatgcgatttttgttctattaggagggcacamaaataaaaaataaaaattaagcctgataatagcctgtttgggccagcttgctgggaagcggactcatttttatactgctggaggggttcggaatcaagaa

SEQ ID NO: 23043 - DNA, 201 bp, Homo sapiens
gcccgccaccacgcccagctaatttttgtatttttagtagagatggggtttcaccatattggtcaggctggtcttgaactcctgaccttgtgatctgcccrcctcggccacccaaagtgctgggattacaggggtgagccaccatgcccagcctatagaaattatttttaaagtcgggatgagaaaaaaaaaaaaagaaaa

SEQ ID NO: 23044 - DNA, 201 bp, Homo sapiens
tacggaggccagggatgagtgcagttgaccagattgttgacggaagtgtcataaaagtggacttaaatgttgataagcagctggttgggttccacacaggktgcgagctcaggatgcacgttggaggggacacagggccagagcaaggtgggaatgcgggtattatgggccaggccatcctccagctggtggagcaccgca

SEQ ID NO: 23045 - DNA, 201 bp, Homo sapiens
gggccgggccagcgtgattgacaagcgggaacccctgtgtggggacggggcaggcctaggaaggttgtgcctgcggtggaacggcgcggtgcgcaggagtsggcattaacagcagccgcgtgtctgggtcttagatttggcctagctgtgttgagcttttcatggattatgttacgtagataagacactgcaacagtgagt

SEQ ID NO: 23046 - DNA, 201 bp, Homo sapiens
ttaggaacacaggctttacagtcaaacaccagaatttgaaccctggctttaccacttattacttcatacaaaatgaaatcttaataaagagcttgtagaaytgtattacattagacaataactggaaagtgtttatttagcacagggcctggcacttagtaaacattcagtaggtagtagatttttaaattagattccttt

SEQ ID NO: 23047 - DNA, 201 bp, Homo sapiens
tatttagttaccatgccttggacatttatgggactatttacacagcagttaggaacacaggctttacagtcaaacaccagaatttgaaccctggctttacyacttattacttcatacaaaatgaaatcttaataaagagcttgtagaactgtattacattagacaataactggaaagtgtttatttagcacagggcctggc

SEQ ID NO: 23048 - DNA, 201 bp, Homo sapiens
taataaacacatccatcactagtcacgtattcacacatgatatttgcaattttggtaatttcagccatattcttttacagttttgaaactgagttttataytatttagttaccatgccttggacatttatgggactatttacacagcagttaggaacacaggctttacagtcaaacaccagaatttgaaccctggctttac

SEQ ID NO: 23049 - DNA, 201 bp, Homo sapiens
agttcatgtatttacctataactatttattttttaataaatattaactcttacaatattgtgttttaaaaaactcttcatggtgacattattttgttattrtacaagataataaacacatccatcactagtcacgtattcacacatgatatttgcaattttggtaatttcagccatattcttttacagttttgaaactgag

SEQ ID NO: 23050 - DNA, 201 bp, Homo sapiens
cttagagagcattacctgttccgttctctgtaacaagagcatgcactttgaggaaactccagtatccttaccgatttaactcaaaagcacctgtgttaatraacttggagacacagccatctttccccaactgaaaagaacaataaaaaaaagttatattttaaaggaagactgtaagaaatacctatataatataatagg

SEQ ID NO: 23051 - DNA, 201 bp, Homo sapiens
gggtctggcttcttagagagcattacctgttccgttctctgtaacaagagcatgcactttgaggaaactccagtatccttaccgatttaactcaaaagcayctgtgttaatgaacttggagacacagccatctttccccaactgaaaagaacaataaaaaaaagttatattttaaaggaagactgtaagaaatacctatat

SEQ ID NO: 23052 - DNA, 201 bp, Homo sapiens
ttttctttggacatgaaaaagaaagcaactttgagagtagtcatttagcagtagatgtgcattattatgagaaaacagttctataaattcagggttaattmtattaattggaatgtcggtctctaatgtctagcttattatagggtagaaaagagctttctactcagctaatcattaatcattgatccaaaacttaaatac

SEQ ID NO: 23053 - DNA, 201 bp, Homo sapiens
gcatgggctagaaagtgtaaaattcttggaaaagattttcaacagtagctttccctggttatcgagcctcttattaagactgcttcagctaaacctgatgytgctctcttagacacacaggatgtggagaatatgaatgatgatgatggctggcaacatgtaaatcttggagaccaacagcgttttggaattaaaacttca

SEQ ID NO: 23054 - DNA, 201 bp, Homo sapiens
ttcagcatgggctagaaagtgtaaaattcttggaaaagattttcaacagtagctttccctggttatcgagcctcttattaagactgcttcagctaaacctsatgttgctctcttagacacacaggatgtggagaatatgaatgatgatgatggctggcaacatgtaaatcttggagaccaacagcgttttggaattaaaac

SEQ ID NO: 23055 - DNA, 201 bp, Homo sapiens
tttctctatactggcatcaaagcaaattttctaaaatgcaaaatttagcattatcctccctaaaacattgtagtgactgctctgataggccatggttattygctagaaatctctttctcattctcttactagtacaggcaatgattgctttaaaaagtcccttctgaaattgtatgatttgcagtagatacaatgcctgca

SEQ ID NO: 23056 - DNA, 201 bp, Homo sapiens
agattttgtcagtgtgctatatatgagtcagaggattgaataagatgaaaaaaatcaaatatagtggtgaatgatacaaatttcttttctgagaggagcascttcgcttcatttcttttctttccttcttttcttttttttttcttttcttttctttcttttttttgcccaggctggagtgcagtggcacagtcttggctc

SEQ ID NO: 23057 - DNA, 201 bp, Homo sapiens
taataaatattatatattatatatttataataaatattatatattatatattacatattatatatttataataaatattatataatatatactatatattwtatatatattatatatcttgtatatattatatatataacttctctttttacttcgtttcacttgagttataaatttgccatgtttggaggttttcgatgg

SEQ ID NO: 23058 - DNA, 201 bp, Homo sapiens
attatatattatatatttataatatatatttataaatattatatttataataaatattatatattatatatttataataaatattatatattatatattayatattatatatttataataaatattatataatatatactatatattttatatatattatatatcttgtatatattatatatataacttctctttttactt

SEQ ID NO: 23059 - DNA, 201 bp, Homo sapiens
tagctccttagaaatgttaggccttttcaaagaggaaagccttaattacactgtattcctcaggaaggttatttccttcatgtaaattatgacttttgtgmttccagtagctctgtgatttcttcatgaatgtcattaacttaattgccttctcattgctttatgctagaaaaatgggaatgtgctttaaacttttgtaga

SEQ ID NO: 23060 - DNA, 201 bp, Homo sapiens
tttgtatttttaatagagatggggtttcgccttgttggccagactagttttgaattcctagcttcaagtgatccacctgcctcgacctcaccatcctagaytttaaaccttgaaattttctagagctgcctcccagtgactttaacttactgtgtggacctgccttgctgccctcacttcttcatcttctcaccccgtcct

SEQ ID NO: 23061 - DNA, 201 bp, Homo sapiens
ccttgctttgtcgcccaggctggagtgcgatggtgccatcttggctcactgcaaatttcacctcccaggttcaaacgattcccctgcctcagcctcctcartagctgggattacaggccacaccatcatgtccagccaattttttttttttttttttttgagacagaatttcgctctcgttgcccaagctgtagtgcaatg

SEQ ID NO: 23062 - DNA, 201 bp, Homo sapiens
ggtgctgtgaaggcagaacaagaagggaactaagctatgtaaacaggcatattagcattcccaggcaaatacacggatcacagcacagaagtttttcaaaygcatttttccaacgattcctcattcttatcaatagatataatattatttttatctgttattctcacattcaaaagatacatctttaagattcttttttga

SEQ ID NO: 23063 - DNA, 201 bp, Homo sapiens
ctaacttaacattacatcttgactgtcttgccatacaagcaggtatactgctgtctcaattttttaaacagcaacataaaattttattatttgtttctacrataatttatttccttggcttagttaaatgaaataactcagtattcttccaataaattctcactcccccctcccccgccaccattttttgagacagggtct

SEQ ID NO: 23064 - DNA, 201 bp, Homo sapiens
cctcgtcggtcttctgcttctgggtatcgacatcgttatcctcatcatcttcagctgcccgcttgcccgtagctgactcagctccctcatcttcatctccrtcctcttcctcaccatcaccttcttcctccccaccttcttcctcttcttcatctacctcgttgtcagcctccggctccccattttcctcattagcattcc

SEQ ID NO: 23065 - DNA, 201 bp, Homo sapiens
atcctcctgcccttctcttcattttatattttccatagcacttatagcctcttaatttcctagactttgcttacccattatgttcattattatgtttgcgyatttcgtttgattgtattatacgtattgtttgtctcccccattagaatgcaagcaccacaagggcagctgtttttactattttcatgcattgatatttcc

SEQ ID NO: 23066 - DNA, 201 bp, Homo sapiens
gtgggaaaagatttcatcatttactagacaagaaggatctcattcataaagttaagggtgtggagagagtgggaaaaatgatggtgtgggttgtctgttargcaaactgggaatgccgtttccagcatatgaaaaaaatccctctttattcacatacattccaatgttcacttcctcatcctgtaaagcagagatgtgttt

SEQ ID NO: 23067 - DNA, 201 bp, Homo sapiens
gttgtttctaattctcagtctacgcatgggaaatccccttctactgtgggaaaagatttcatcatttactagacaagaaggatctcattcataaagttaarggtgtggagagagtgggaaaaatgatggtgtgggttgtctgttaggcaaactgggaatgccgtttccagcatatgaaaaaaatccctctttattcacata

SEQ ID NO: 23068 - DNA, 201 bp, Homo sapiens
tgatttattttcttattccatggaattataatacatatggagtaattctattaatattatttatacttgcctccaactctctaagttacatctgacttaargtatgattgttcatttttttagattttcccccagatctcaaaagtgaactttgtacataaacattatccaaattgagagatagatataaatatagacctc

SEQ ID NO: 23069 - DNA, 201 bp, Homo sapiens
tcatcttcattgatcccaagaacatccaggatgctctcaagtggatggcaggaaaccagctccccagtggctgctatgccaacgtgggaaatctccttcayacagctatgaaggtgcggatctgtccaggagcctgcagccaaccactgtctcgaaggaccccacacctctgaccgagtagaagcaaaagagcactggcct

SEQ ID NO: 23070 - DNA, 201 bp, Homo sapiens
attacaggcgtgagccactacgcctggccaagaagctgtatttttaacaagtgcccagacgatcctgatgtacaaccaggtttataagcttctgtgcattyccaaacatgggtaaaccccactttggtcctgaggacaggttgccgagatttgcaggaataagacaaggaatgctatagattgtccctcaatacataatct

SEQ ID NO: 23071 - DNA, 201 bp, Homo sapiens
agataattctgatgatctgcttggcttccaaatgccattctaccagctgtttcagaattacttgggattgctaattaaaaatctctagccacacccttgayatagtgactcagaatctgaggggtagggttagagaagctgtttttttttgtttgtttgctttttgtttttttgagacagagtcttgctctgtcacccagg

SEQ ID NO: 23072 - DNA, 201 bp, Homo sapiens
gccgctcgcggctggacgggagcgggaggagtcggggagcggcggtcgagcccggcaggatgagcgacgagggcggctccaacttcaggcgggtggcgatscggcggaagtccaacccctcctacctgccgcccggggtgccccggccctggagcaggcccgcgtcgcacctgggacgtgtagggaccgctgccttcaagg

SEQ ID NO: 23073 - DNA, 201 bp, Homo sapiens
aagaagagcccctttggcaaggatgttcggctggtctccctcggctcccagcaggtaaacagtagccagtatttccaccaggggccatcctgctcctttcsccacaactttgtcctgctcgtccaggcctgggagacgctgggtctgtgacaggctgaaccgtgtgaggagcagccccctccctggcctggccggcccatc

SEQ ID NO: 23074 - DNA, 201 bp, Homo sapiens
cctcaccaacctctggaagggcagcttccggatgagcagctcggtcgacttctgataacgacgaatctctcgaagcgccacggtcccaggcctgtagcgakgaggcttcaccccgcaggtagagggggtgcttttcctggcagctttcgtggccagctgtttgcggggggctttcccaccggtggatttacgagcagtctg

SEQ ID NO: 23075 - DNA, 201 bp, Homo sapiens
acggtcccaggcctgtagcgatgaggcttcaccccgcaggtagagggggtgcttttcctggcagctttcgtggccagctgtttgcggggggctttcccacyggtggatttacgagcagtctgcttggttcgggccattttctttcacccaacgccgaagttttaggccacttctccgacctccgcgctgcttccgctgccc

SEQ ID NO: 23076 - DNA, 201 bp, Homo sapiens
aacaatctacctgtaacattcccttgccttcatatcccaaagctctgcaagcaaagaagagttctggtgggcagctagggccatttgttgtagtccagagraagagagccatccgtatcttctgtgctgtactcatacctatttaatccaatctgctggcaccagtctattatattcaactgtttgcccccactgtaacta

SEQ ID NO: 23077 - DNA, 201 bp, Homo sapiens
ctctaactcctgggctcaagtgatccgccgcagcctcctgagtcactgggactacaggcatgggccatcacttctggctaatttaaaaagtgtttttttttgaagaaatggtgtcttactgtgtagcccagactggcctcaaactcctggccttcctcccacctcagtgtcccaaagcactgggattacaggtgtgagcca

SEQ ID NO: 23078 - DNA, 201 bp, Homo sapiens
tttttcttcaagttatccattatctgtcatcttggctgtcacagaggtttcttttggtctcattctattggactgccttctaagcatgtttcatatagttracctcattagcatttcttcatggtttctcagaattctttcatatactctgccatttttattctacttaaaatgttaaatctttttttttttttgagactg

SEQ ID NO: 23079 - DNA, 201 bp, Homo sapiens
ggatatgttaaatttgagaagcattttaaacatccaagtggagaagtcaaaatgtaattggagcctggtgtggtggaacatggatgtagtcccagttactraggctgaggtaggaggattgcttgagctcaggagtttgagaccagcctgggcaaaatagtgagacccccatctccacaaaaatttaaaaattagccagct

SEQ ID NO: 23080 - DNA, 201 bp, Homo sapiens
cggtccctagggagggagcttaatcttgggcagtgtctttctttggctaaaagcaacactgggaaagcagcacaggtgagaggtgccaggcagcggctccmccagcggctggagaatgagcagtgcctcagtcctggaggggaatccgggcagcacccacagcatccacaatgccctgcagcactgggagcagccctcacc

SEQ ID NO: 23081 - DNA, 201 bp, Homo sapiens
agccagccaggtgcagcaacaacatcctattttagagtcagttcctaggaccacatccagtaccagctgtcacaggtggagttcactgggaaacacactckgagacaccgagatttctatacagaagttattggagagtaatcgcagaaatagcacctgtaagtgttgaaagacaaagaatttggcagatagaaaagtcga

SEQ ID NO: 23082 - DNA, 201 bp, Homo sapiens
cggcatggtaaaatctcagcttgcttctaggtatctgcctggtccttcaaatcatcacagggttttcttagctatacactacatgtcagatactctgaccrccttctcttcagtcactcacttctgctgagatgtaaattattgctgaattataattatgctacatgctaatgaggcttcgatagtctgcatctgcctgtt

SEQ ID NO: 23083 - DNA, 201 bp, Homo sapiens
gcactccagcctgggcaacagagcaagactccatcacaaacaaaacaaaacaaaaaaactattaaacctacaaaagccccaccacaatttaacatagtackgcaacccacacctccactagtaattaatcccaagcctccataaataggagaaggctttgaagaaaatcccataaagcctataataagaataatacttaat

SEQ ID NO: 23084 - DNA, 201 bp, Homo sapiens
ggagttcgagaccagcctgaccaacatggtgaaaccctgtctctactaaaaatacaaaaattagccaggcatgatggcacgtgcctgtaatcccagttackcgggagactgaggcaggaaaattgcttgaacccagagggtggaggttgcagtgagctgagatcgtgccactgcactccagcctgggcaacagagcaagac

SEQ ID NO: 23085 - DNA, 201 bp, Homo sapiens
ccatgcctgtaatcccagcacttagggaggctgaggcgggcggatcatgaggtcaggagttcgagaccagcctgaccaacatggtgaaaccctgtctctaytaaaaatacaaaaattagccaggcatgatggcacgtgcctgtaatcccagttactcgggagactgaggcaggaaaattgcttgaacccagagggtggagg

SEQ ID NO: 23086 - DNA, 201 bp, Homo sapiens
gtctcaggatactcctcagtagccattgccattgtataaccaaaaaccaccatcattccccctaaataaaattttaaaactattaaaccaggccaggcacrtggcccatgcctgtaatcccagcacttagggaggctgaggcgggcggatcatgaggtcaggagttcgagaccagcctgaccaacatggtgaaaccctgtc

SEQ ID NO: 23087 - DNA, 201 bp, Homo sapiens
tgacggaagtgtcataaaagtggacttaaatgttgataagcagctggttgggttccacacagggtgcgagctcaggatgcacgttggaggggacacagggycagagcaaggtgggaatgcgggtattatgggccaggccatcctccagctggtggagcaccgcagcactgcagtgtgtggccctggcttaacagcagtgcg

SEQ ID NO: 23088 - DNA, 201 bp, Homo sapiens
caagattccattccttggaatccgtgaggccaagaaccccaggtcagagaacacgaggcttgccaccatcttggaagccgcccaccaccatcttggaagcsgcttgccaccattttgggagctctgtgagcaaggatccccggtaacattttggcgaccacgaagggacctccgaagcgtttgtctcttccagaattgaaa

SEQ ID NO: 23089 - DNA, 201 bp, Homo sapiens
atgaacccaggtccatgtccagaactgtttaccactcacctctttataaaacggtaactgtggccaggcacggtggctcactcctgtaatcccagcacttygggaggccgagggaggtggatcacttgaggccaggagttcaagaccagcctggccaatctgttgaaaccccatgtctactaaaaatagaaaaattagttg

SEQ ID NO: 23090 - DNA, 201 bp, Homo sapiens
gagtagctgggattacaagcgagtgccaccatgcctggctaatttttatatttttagtagaggccgggtttcaccgtgttggccaggctggtcttgaaccyctgaccttaggtgatccacccacctcggcctcccaaagttctgggattacaggcatgcaccaccgtgcccggcctgctaattggttttttaactaaagaa

SEQ ID NO: 23091 - DNA, 201 bp, Homo sapiens
taatgggacagttgtggcctcacacacttcagtagaaagaataacatatgcaaatgttaatggacccaaacaactaactcacaatttgcagatgtcttcargagttacccaaaatgtatggttgaactcaccaatgaggaatcctgtgcattctcatataggggcaactgtatctcatcaaactgattttggagctaacgt

SEQ ID NO: 23092 - DNA, 201 bp, Homo sapiens
aaacagggatgcagggtggctgctttccattagacgtgcctaccagtgtgccatgtcagtttaccattgccgtggcgacacccgaagttaatgcctctttycatggcaatggcctgacaacccagaagttaccactttttcctggaaatttctgcataatctgcctcttaatttccatgtaactaaaatgggtgtaaatat

SEQ ID NO: 23093 - DNA, 201 bp, Homo sapiens
tctaatacaaactttatttccagaaagacctgtcgtttccctgcgtgagctatccaaaggatagtgaacacctggtgcttttccattcaatgatgtgtacyctgtatcttgttcttatcaaaaacacagtgctatcaaattcttaaaagattccctacttgccctccatatcgaattctcatctcagacttcattgtacat

SEQ ID NO: 23094 - DNA, 201 bp, Homo sapiens
agaaataaaccagaaataaatatttagagattaaacagctggttaataaaccaagaagtattcttttcatccttctaccatctgatttgtgattccagaasgtccagaagagagagatttaaattgctttcagctaagctgtagacctctagcagatgaacgacatattttcctgaaggtatgatgaaagtttttagtgct

SEQ ID NO: 23095 - DNA, 201 bp, Homo sapiens
ccaagtctggtcatctaatcagcaggatataagagggtcattcttcactgcggccattccagtttcctggaaacttggctttctcctgaccgtttccccakgagcacggtggtgacaagcttgagctctgacatcagaaagtccccagtttgaaacctctagcttcttactcgctagctatgagactttgggcaaattaat

SEQ ID NO: 23096 - DNA, 201 bp, Homo sapiens
catccaagtgttctcattgttcaattcccacctatgagtgagaacatgcggtgtttggttttctgtccttgtgatagttttgctcagaatgatggtttccmgcttcatccatgttgctacaaaggacatgaactcatcattttttatggctgaatagtattccatggtgtatatgtgccacattttcttaatccagtctat

SEQ ID NO: 23097 - DNA, 201 bp, Homo sapiens
gtctcactcagaagaggaaggagctcctgtctgctgaggacacggttccatccaatgaggtcagcagggctatcagcagcttccgttaattccgttggggyaggcgtgtggcaagcggcagttatttgagctgaggatgctgggatggattttcacatgagcagttggcccttagatcatgagaccagcctaagtgcccaa

SEQ ID NO: 23098 - DNA, 201 bp, Homo sapiens
cctcggatctttgtccagcatgatatgatagagatgtgtctttggttaggcctttgtctgccttgtggtcaggtggttaggcaggacgtttctcacacccraacccctgtttcactttgactaaggtctgcaaaatagcagggagagcttatgacatggtgcagtttggactaacactgagagaccagagttcagtgtaaa

SEQ ID NO: 23099 - DNA, 201 bp, Homo sapiens
tatgttcattgcaaccctgttgcaatgaacagtagcaaagacatggaatcaacctaaatgcccatcagtggaagactgaataaagaaaatgtggtacatayacaccatggaactatgcagccataaaaaagaacgccatcatgtcctttgcaggagcatacatggagctagaagctatcattcttagcaaaataatgtagg

SEQ ID NO: 23100 - DNA, 201 bp, Homo sapiens
cctgagattggtggcactcaattaaaaattgttataactctacgtagaatatggaatttttccaacttcatgcaaatttgactttagcttaacattacttrttttatatcactatgtgtttatactgcaaagctcttaagtttgggaagaaaggaagcttaaaatatccttaaggcagtgttatgccattcatatttgtgt

SEQ ID NO: 23101 - DNA, 201 bp, Homo sapiens
acaggcgtgagccaccaggcccagccataattcttataaaaacggaaatctgatatttcatttagcctgtatagcctcagtgcaggtatatgtatcacttytgttaggctttttgaaatgttgaaactagtttgacaactcctattactggttgcatggagctctgggattttaaggactttgggtactgtatggtctttt

SEQ ID NO: 23102 - DNA, 201 bp, Homo sapiens
ttggactgcaaccaagtaatcactgcaaagtagttccaagcagcaagaaataccagattctcatggaggctactatagggtacagaataacaacatgaaarcaatcaaccctgtataaataatgtttcttggcattttttttttaattaaagaaatccagtgtctcaaaaacttgtgaaaatgtgtttaaaaaacaaacgg

SEQ ID NO: 23103 - DNA, 201 bp, Homo sapiens
tgtatgcctctttgtaagctgccttaaatgctttttggaatgaggcaggatatacattcaataaataaaatatgtctgagccacttatgaacaaaaccttyttgggccagagcctaaacattacttatataaaaagacctgattcctcaccttctacaacaatattatttagtcatttctctgcattgtactcaactcttt

SEQ ID NO: 23104 - DNA, 201 bp, Homo sapiens
ttcttacttcctttccattttattttgtatgcctctttgtaagctgccttaaatgctttttggaatgaggcaggatatacattcaataaataaaatatgtytgagccacttatgaacaaaaccttcttgggccagagcctaaacattacttatataaaaagacctgattcctcaccttctacaacaatattatttagtcat

SEQ ID NO: 23105 - DNA, 201 bp, Homo sapiens
tctatattaatattaatatttccaaatattcaggaaacaggcgtacatcaggggctgttcttttgctgcaaatgaagttgatggaattacactgtgatacractgactgtgagtaatagatctagactgatagcatatctgtttatcatctgtatctaatctgtcatctaccttatttatctattatctatctagctatct

SEQ ID NO: 23106 - DNA, 201 bp, Homo sapiens
aatcctaagaaaaaccttgtttcactagcaaataattcccttctctgagaaggcaaattaattattttatttccaactttctcttaggcatcctgaaattytgagctcagtttcatgctctgaaaaagaaaaaataactgctagagtcacagaaatggtattgactttttggattggaatatttgttttctctgttcctta

SEQ ID NO: 23107 - DNA, 201 bp, Homo sapiens
acacactgtggaaaagaggacattttgtttaaaggtctgattggcttaattgtaaactctcttgagggagtggctgctgttctggttgtgtgtcacagagrcttgagaacagctcgcaggagatcctggatgatctgacctgtggtgcacggccctggcagcctggtgtctgtgcctcctctcgttgagatgagatttttc

SEQ ID NO: 23108 - DNA, 201 bp, Homo sapiens
attaaatgagttttgtattttgaacttgtgctacttctggaatgtgtgtgtgtgtgtgtgtgtgtgtgtttgtgcacgtgtttatgtagtccttggaatayaccataaccaagtgggttcttcctgggaatgcaagactgcttcaatacttgaagatcagtcaatgtaatctgccatagtaataatctaacaagaaaatca

SEQ ID NO: 23109 - DNA, 201 bp, Homo sapiens
tatatagactcaatcatttcattttttcagagatagtacaaatgcaattattttaaaatgttgattttctgttagttattgttagtatatacaaattaaatgagttttgtattttgaacttgtgctacttctggaatgtgtgtgtgtgtgtgtgtgtgtgtgtttgtgcacgtgtttatgtagtccttggaatacaccata

SEQ ID NO: 23110 - DNA, 201 bp, Homo sapiens
attattttaaataactgcatttataaaatagccacattttataaaattattttaaataacctcactcgtgaatactggggtagctggggataaatttttargctcattgttattgtccctgaaaacgtggaagttattattccattgtctcatctactgctgctgatgatttaggctcattgttattttccctcaaaacgt

SEQ ID NO: 23111 - DNA, 201 bp, Homo sapiens
attacaggtgtgagccaccggtgcccagccgatactactgttttttgtgtctctttccatccatggtacatatatgatagtaacttccaaaaggtatgaamcttcgttttcttccctaatgcatcttaaacgcctagagtagaatctggcacaaaataagttctcaatagttggtgaattgccaggcgcggtggctcacgc

SEQ ID NO: 23112 - DNA, 201 bp, Homo sapiens
agtggctcaggcctgtagtcttagcactttgggaggctgaggtgggtgggttgcctgagctcaggagttcgagaccagcctgggcaacatggcaaaaaccygtctctactaaaaatacaaaaaattagctgggtgtggtggcacatgcctgtgaccccagctaggaggctgaggcatgagaatcgtttgaacctgggaggc

SEQ ID NO: 23113 - DNA, 201 bp, Homo sapiens
ctgccccttctacaaccacgagcagatgggccttctccgggatgaggccctggcagaggtgaaggacatggagcagctgctggcccttgggaaggaggccmgggcctgtccctattacaggagccgccttgccatccctgcagcccaggtgagggccctgcagggccagaaagccgctcttggctctcactgtggtctagg

SEQ ID NO: 23114 - DNA, 201 bp, Homo sapiens
tggcagaatgcctgctaacagcttagttactacattagctggagaaaattagctggaggattagaaggctgtcttacagaatgaatatatgacttaagccwgtagctaatatttggtgacgtctcccgcatagccaaataccgcatgaaccgaataaccaaggggtggaggtttggaatggcccctttcactttttccctt

SEQ ID NO: 23115 - DNA, 201 bp, Homo sapiens
tctgtctccaaaaaaaaaaaaaagagttctgtaattgtaaaaatgtgacataggcattctctaatgtgcaatgaatagtcatttttaagcatttcatacaktgttcctgtactgcactgggtctccttgtgctgaactgcatgggataggccatttccatacaatctcatcctctgaataaggaaccatgatgctcctaaa

SEQ ID NO: 23116 - DNA, 201 bp, Homo sapiens
gtacatagctggtgtatatatatttatggggtagatgagatatttttatacacacacacaatgtgtaatcattacatcagggtacatgtgtatccatcacytcaagcatttatcatttccttgtattacaaacaatccaattatactctcttagtaatttttaaatgtgcaataaattattgttgactgtagtcactcttt

SEQ ID NO: 23117 - DNA, 201 bp, Homo sapiens
gcactccccacttcccaagcccctacctgccaaattatctttaaaaactctgatccacgaaggctcaaggatttaagtaataataaaactccagtctcccrcacagccggctctgcgtgaattactcttttgccattgcagttcccctgtcttgataaatcggctctgtctaggcagcaagcaaggtgaatccattgggtg

SEQ ID NO: 23118 - DNA, 201 bp, Homo sapiens
ccaaaagtacaaaaattagccaggtttggtggtgtgcacctgtaatgccagctacttgggaggctgaggtgggaggattacttcagccctgtctccaccccgcccccccaaccaaaaaaaaaaaaaacagaaccaggaaaacattaaccttggcttccacgtagtcaggatcatcagtatcacttgtcttcctcctctaca

SEQ ID NO: 23119 - DNA, 201 bp, Homo sapiens
tcaacctagatgtcctactgcatacctaatcactatggtgtatcttattgcttataggctacaaatgtggacatcatgttactgtactgaatgctgtaggraattataacaatagttaagtatttgggtcttcaagcatagaaaagctactgtaaaaatgcagtataaaaaaaaatgatgccgggcacagtggctcacacc

SEQ ID NO: 23120 - DNA, 201 bp, Homo sapiens
tccctaaactagataagctgctttagaccttttccttatcccttacacgtcgctcagtaaatacttgctgattgactttcaaattcagattacttttacgmtagcatacggtgggcacaaagggtttttttgtttatttgtttgtttgagacggagtctcgctctgtcgccaggctggagcgcagtggtgcaatctcggct

SEQ ID NO: 23121 - DNA, 201 bp, Homo sapiens
ccagaaacaggggctgtttatccctttatttaggtcttctttcatttctttcaacaatgctttataattttcagagtacagatggtccttgacttgtgatkgttcgtctagacttttttatttaacaatggtgttaaagcaataccatttagtagaaaccatactttgagtacctatacaactgttctgtttttcattttc

SEQ ID NO: 23122 - DNA, 201 bp, Homo sapiens
aaaaaatgaggcgagaggatgacttgagtccaggaggttgaggctccaatgagccatgattgtgccactggactcctgcctgggtgacatagcaagagatygggtcttacaggaagtctaggccatcaattgaataaatactactgaattttaaactctgcagtgcaaactaaattaatgtcttcaagtcaagaccagagt

SEQ ID NO: 23123 - DNA, 201 bp, Homo sapiens
cctttatggctatttttttttcctagttgccacaaaattaaacacaggcatactgtgtcttactgtgctttgctttcttgctcttggaagatattgtgggktttttttttacaaattgaaggtttgtggcacccctacattgagcaagtctactgggaccattttcttttcaacagcatatgctccttttatgactgtgtc

SEQ ID NO: 23124 - DNA, 201 bp, Homo sapiens
agagcacttaggagctcagatttacactgtatatcatgagaaaagcattgaaagtttcaaagcaggagagtgacataattagctttatgttttaaagcggmtttttgactttagattctggcaatacagtggtcctgtggtctaagacatctgactaaccttcctgctagcaacaattaaaaatgctgagtgcaataaaaa

SEQ ID NO: 23125 - DNA, 201 bp, Homo sapiens
agaggtgagatggagcaggtccatctgcctctgccctttctagccaaggttatagctgccctggactgctcactctctggtctcaatttaaaatgatcccrtggccacagggctcctgcccaggggcttgtcaccttcccctcctccttcctgagtcactccttcagtagaaggccctgctctctatcctgccccacagcc

SEQ ID NO: 23126 - DNA, 201 bp, Homo sapiens
tcctgcctcagtagtacccactgttccttattactccaatccgaagatcaagagtcagctgaaatttgttatttcagcgtttctccatccctcttcgcttktttggtaactatttagctccagtccaaattccttggttgaattggactttgagttttaccagagaggtcattatactacatttcaagcagcaggaaaatc

SEQ ID NO: 23127 - DNA, 201 bp, Homo sapiens
ggaagacgtcataaagttctcaagggacaagtcttcgtgattttaggttttgaactttgcgttttagggattctcaactaggttgtgtaggtttttgggggtgaaccctgagaataattttagaatccagctctgagcctaatgattgcctgaggggcagcagaaacccatggtgactgtccagcaataccttgtttttta

SEQ ID NO: 23128 - DNA, 201 bp, Homo sapiens
tgagccaaggtcacaccactgcactccagtctaggcaacagaatgagaccctgtctcaaataaataaataaataaataaataaataaataaataaataagyaagcaaataaataaataggaattcaagaattgagatcatctgtgtgggtattgagaatgccaggaattaagaccagaaattctagagatgatggcaatgg

SEQ ID NO: 23129 - DNA, 201 bp, Homo sapiens
ccatcagcttgttattggctggcaccacagagatgtgtttctctggccctcattaattgtaaccaaccctaagagagttaagttgtatcaggcatgtgtayaccttacagtggataagtttgtcagatactttccttagtgcatattttttaaagagatagaataaagtataaatacacatggaatggatgtcaccaataa

SEQ ID NO: 23130 - DNA, 201 bp, Homo sapiens
aggcctggggaatttcttcagactgacaataaaacttgtttattccagtctggccaacatggtgaaaccctgtctctactaaaaataccaaaaagttagcygggcgtggtgacgtgcacctgtaatctcagctactagtgagacctggcctgccacaatgtggttaaggaaacatattaaaacatttttaaaaatcaagat

SEQ ID NO: 23131 - DNA, 201 bp, Homo sapiens
tggattactataggcagagcagagtcacccgcagtggcagcctgaaagggcccgatgatcccagaggacttttgtccccacgattagccaggcggggtgtstcatccccggtagaaacaaggacctcatctgaaccagttgcaaaagaaagcacagaggccagcaaagaaccaagtccaactaagacccccacaatctctc

SEQ ID NO: 23132 - DNA, 201 bp, Homo sapiens
gccttctacattttttttttaaccatttcatagttccctttttctttgaacacttggtccaaactcacttttcttctggattcatattttctgatctcacmtattatgttatagaactgatatgttacgtttgttttcattgatgcgtctgtacttggcttcagagagcagaacaaggccctgtgagtcactgggagccag

SEQ ID NO: 23133 - DNA, 201 bp, Homo sapiens
ttagctcccaccagcctaagggctgtggaaaccagtaccttttgtctgcacccagccccctctcctccctttggtggcttcctgtgtgtccagggctagcrtcttctaggtgaatctaagatgtcagtaccttagccctcggctgcttgctcagagcctggtttgtgttctttccccagctctgccaggcccattcccagc

SEQ ID NO: 23134 - DNA, 201 bp, Homo sapiens
aagacagattcgctgatgtctcttcatataaaggcactgattccatcaggccactgatcccatcatcccccagcctcatagcctcatccaatcccatttamttcccaaaggccctatctccaattaccatcacattgggaactggggcttcaacataggagtttgggggaactcaaacattcagttcataacagccaccat

SEQ ID NO: 23135 - DNA, 201 bp, Homo sapiens
attatatatcttgtatatattatatatataacttctctttttacttcgtttcacttgagttataaatttgccatgtttggaggttttcgatggtcctagcraaccagtttccctagaagcaacttcccttcagtccgattcacatcaaagatgtgacttcaataccatctgatgttcaagctatttattttagcagtggtc

SEQ ID NO: 23136 - DNA, 201 bp, Homo sapiens
caatgttaatggcagttggtcaaattaataataggtaatgtcttgtgtttttctctatatttttcaaattttctacagtgaggattcattgcttctctaayaacattaatgtaagcatataaataattaaagtttcatggttaatctcacttctcattctctctgagctttgtgttttcttgtgaaggtaaatctctgaat

SEQ ID NO: 23137 - DNA, 201 bp, Homo sapiens
tgttcttttgtctcaactccaccctctccctcttgaagtagacctgaatttgtgccgatacacaatttttatcagactggggtatctgaggtgagctcaamcgacctgtcacttcagacttggtttatagactcctttattgcagccctctcctttttactaatctggcagataaacccagtcctcagagacatttctcct

SEQ ID NO: 23138 - DNA, 201 bp, Homo sapiens
cctgcctcagccttccgagtagctgggattacaggcacctaccactatgcccagctaatttttgtacttttagtagagacggggtttcaccatgttggctrggctggtcttgaactcctgacctcaggtgatccacctgccttagcctcccaaagtgctgggattacaggcgtgagccactacgcctggccaagaagctgt

SEQ ID NO: 23139 - DNA, 201 bp, Homo sapiens
ctcttttctttattcttgccagtttcccacatttacaagctatttgaccagcaactggacattagcttcaccttcacatgaaacattattggtatccatcrtccctcattcctctggttttccacctatgttctttattttctcaactcctctgtgatcttgctccatctttgtttttccctctctcacatccctgctctc

SEQ ID NO: 23140 - DNA, 201 bp, Homo sapiens
tggcatgtgccaccacgcctggctaattttgtatttttagtaaagacaggttatctccttgttggtaggctggtctcgaactcccgacctcaggtgatcckcccgcctcagcctcccaaagtgttgggattacaggcgtgagccactgtgcccagcctacatgatgcatttaaatatatggatgtggggctgggcgcagtg

SEQ ID NO: 23141 - DNA, 201 bp, Homo sapiens
gctataaacagtgaaaagcaaaacaaagccgttcaaatacagatgctcttcttacttgatgtgcagtgtggagggagagaagatagggaagggttgggggkcctgagaaccaccattgtgacctatttccattctcttttttagggaacattaagcaaaatcccaatacacagagtctgtcacagacaggtaagagagttg

SEQ ID NO: 23142 - DNA, 201 bp, Homo sapiens
tttcccaccggccattcacagcagagcaccccagtgccccacagatacaccctctcattgtgtgttatccctgccatcatttctggggacatggagttgtmtgattaggctgtctccacatcttaaattttttgagatggagtctcgctctgttgcccaggctggagtgcagtgccacgatcttggctcactgcaaccacc

SEQ ID NO: 23143 - DNA, 201 bp, Homo sapiens
gcatctggaggtctcagtatgtgaagtgctcttgaagggaagatttcccaccggccattcacagcagagcaccccagtgccccacagatacaccctctcaktgtgtgttatccctgccatcatttctggggacatggagttgtctgattaggctgtctccacatcttaaattttttgagatggagtctcgctctgttgccc

SEQ ID NO: 23144 - DNA, 201 bp, Homo sapiens
tcctggaggaaaaggaagagaaatttacataagctgctatgtctctttctctctcaaactttcattgcttcccaaccaatcttgttacagacctttattgrtaccattatgaaactcccattatccatcctgatcagctccttactattctatgggacttacggcttcaaggaattttccaggactttactcctactcaaa

SEQ ID NO: 23145 - DNA, 201 bp, Homo sapiens
gtaaaagatcccagtcctctcctcaatcctcccctcacacttaaatggaatgggtcttaccagatcatctttactacacccacttaagcaggaaaaaaaaagtttcttgtactaggctaactcactttgaggctcagcgataggcagggctctggcagggctttgatagccctgtctgcagagccagggccctcaagggat

SEQ ID NO: 23146 - DNA, 201 bp, Homo sapiens
cagcctcccaagtagctgggattacaggatgcccggctaattttgtatttttagtagatatggggtttctccatgttggtcaggctggtctcgaactcccracctcaggttatccacccgcctcagcctcccaaagtgctgggattacaggtgtgagccaccatgcccggcctctgctttggtttttaagactcaacaatg

SEQ ID NO: 23147 - DNA, 201 bp, Homo sapiens
ctgctcctcacctccagaataaggagactccttcagctttgaagatgtgggaagagcaggggtgagggcaaggaagaggatgtctgagcattgaaaaggcyaagaaaagaggctggagccctgaaggcaatcagcacctgttcccaagaatgcaaggctgggccttctcccctctcagacacatccatcatctgtcaagat

SEQ ID NO: 23148 - DNA, 201 bp, Homo sapiens
gttctccctcactgctcctcacctccagaataaggagactccttcagctttgaagatgtgggaagagcaggggtgagggcaaggaagaggatgtctgagcrttgaaaaggccaagaaaagaggctggagccctgaaggcaatcagcacctgttcccaagaatgcaaggctgggccttctcccctctcagacacatccatca

SEQ ID NO: 23149 - DNA, 201 bp, Homo sapiens
ggagagacgcttctcacttcccagacagtgcggcagccaggtagaggcgctcctcacttcccagacagtgtagtccctgggcagaggggcacctcacttcmcagatggggcagcgaccgcagaggcactcctcacttcccagacggcgggggagccaggcagaggagctcttcacttcccagacggggtggcggccgggca

SEQ ID NO: 23150 - DNA, 201 bp, Homo sapiens
acttcccggatggtgcggcggccagggagagacgcttctcacttcccagacggtggggcggccaggtagaggcgctcctcactccctagactgtggggcgkccagggagagacgcttctcacttcccagacagtgcggcagccaggtagaggcgctcctcacttcccagacagtgtagtccctgggcagaggggcacctca

SEQ ID NO: 23151 - DNA, 201 bp, Homo sapiens
aagtcaattaatcatgcttttcagtttcttttttttaaacaaacatgccattaaaggaatcatgattttttttttttcattttatggtcacaatacctcartgagtttggtgttgtcattctgacttcagatttaaagaaattgagcctctaaaaggttaagtgagtctgcaaatttccaaagtcacatagtcatagcaga

SEQ ID NO: 23152 - DNA, 201 bp, Homo sapiens
tagtttcctcaaaaaactgaaaatagaactatcatatgatccagcaataccactgctaagtatatacacaaaagaaatgaaatcagtatattaaagagatmtctgcactcccatgtttattgcagcactattcacaatagccaagatttgtcagcaatctaagtgtcaatgaatagaagaatggataaagaaaaatgtggt

SEQ ID NO: 23153 - DNA, 201 bp, Homo sapiens
aactctgttttgtttatgttttaccagaagatatggcttttcctgaatatctatgcttaactcgttcctgtggtcctttcctcttttttctcagtttcttytagtcgtctcaaatgtctgcatctaaaacccacattcagatgcccacggttgtctacagtccacctgtttccagcttcccccttcttcaatgttagtcac

SEQ ID NO: 23154 - DNA, 201 bp, Homo sapiens
acttttgatctcgtgttagagcaaaatgcacactgccatcctctccactagtttgtaagctcttgaagcagggctgagtcagactcatccatagatccccygaagtgcctggcactctccaagtgaatagaggcacttaataaacttcagtagaatcagatttaatttaatggaagttgattaaaattcactttctccttc

SEQ ID NO: 23155 - DNA, 201 bp, Homo sapiens
cttcaccattacctactgagtgtcacatcagtatcacttgttttaggaagcccttccttgatctccctagtcttagttgatattccttctctgtactcctrtggtactgggtgcatatctatacatcttattatgtcataagtgataattttcttgtcttctgtagtagaaagtaatcattaagagcagagactgtgtctt

SEQ ID NO: 23156 - DNA, 201 bp, Homo sapiens
actttttaaaactttgcatagtagaaaattataaatgtggttcatattatatttatattggatacctctggactagacttttactgactcatgatatgacytgaccaaaagatctttttctagctgggcgtggtggcttacgcctgtaatgccagcactttgggaggctgaggcaggtggatcacttgaggtcaggagttc

SEQ ID NO: 23157 - DNA, 201 bp, Homo sapiens
ttgcatcttactttcttgaagattttcattgtgtgtatttctatgtttcataccccggagtcatttcttaaaatgatatattacattcagtatgaagcctyctttgcagtgaggaaacaggtataaggaaggaaagcaacatgcctgaggtgttattagtagcctgagctggaaccaggcagctatttgggctatgtgggc

SEQ ID NO: 23158 - DNA, 201 bp, Homo sapiens
cttctctgacaacctaggccggtaagtagtggttctgctcatctcctgggtcgtgatacatggccggccctcactcccagcagctgggcccctgcctgctstctgctgccattagagcccacagctgggctgcgactgctcagaccagccagctggagggaggggctcagcagctctgggtttggccctgagagagtagtt

SEQ ID NO: 23159 - DNA, 201 bp, Homo sapiens
gggtacctgagagtgagtggactgatagcctttgatagatgctgtgagaaatgagagactgagattgtgcttttcaacaaatatgtagaattcatcttttmtattttgtaagcccccccaccttttttttttgagacaggatgttgctctcaggctggagtgtggtgatgttatcttggctcactgtagcctccatcttgc

SEQ ID NO: 23160 - DNA, 201 bp, Homo sapiens
gagactcagtctcaaaaaaaaaaaaaaaaaaaaaaaaaagacaggttttgcctggagtgcaccctataatggtcgagagggaagcacattcactctttaaraaggaaggccctaaggagaaggcacttcactgggaaagctggaagatgggggtgcttacagcagaggagcaggaggaaggaagaaagaaagagcaaataa

SEQ ID NO: 23161 - DNA, 201 bp, Homo sapiens
ggcacttcactgggaaagctggaagatgggggtgcttacagcagaggagcaggaggaaggaagaaagaaagagcaaataacccgggccacagaaagccaaragttttggctgttgcagtccacagtattatcttgttcctagtattagcttgctcctagttccacaacatcaacaatggagcatgaaaatgtaaacaccta

SEQ ID NO: 23162 - DNA, 201 bp, Homo sapiens
gtgggccttgctggggtggtgggatgtgcgcttcaggtgtcttgagcctggcagagcctccgatccacccagcctctctctcatggctgttcctcgttccyctccactgctctctctcatcccacccagctctttggcttcactgaacggtacggagcagtgttctcatcccgggagcagcccaaactggctgggtttcag

SEQ ID NO: 23163 - DNA, 201 bp, Homo sapiens
cctgcagcccaggacgactgaaggtgaggcaggagggtgagcaggcagagccggctgcacgcatgggcaaggacttctgttcctcatgtgtggacctgacmagagggaggcctcctccccattctgctctgtgcagctcttgcagcccctgcagacgagagtcaggccagcgtcccgcaaccagcttccccactgatgcac

SEQ ID NO: 23164 - DNA, 201 bp, Homo sapiens
aaggtgaggcaggagggtgagcaggcagagccggctgcacgcatgggcaaggacttctgttcctcatgtgtggacctgacaagagggaggcctcctccccrttctgctctgtgcagctcttgcagcccctgcagacgagagtcaggccagcgtcccgcaaccagcttccccactgatgcacatcgaaggcttcctggcagc

SEQ ID NO: 23165 - DNA, 201 bp, Homo sapiens
ggaaaagcaactgaaaatttggaattctaaacccaattaaatttttttttttttgagctcaatctcagctcactgccacctctgcctcccaggttcaagtrattctcttgcctcagcctcccgagtagctgggattacaggcatgtgccatgatgcccaggtaatttttgtattttttatagagacggggtttcaccatgt

SEQ ID NO: 23166 - DNA, 201 bp, Homo sapiens
gggtgtttgaggctggcaggctctgagctgaggagaatctcaaatttacctgtaaagaggatatgattaaagcagccattttataattattacagtaaccrgcccttcttctactccaggctaagagtagccttttctatacttcctttctctttattcatcttacagcaggattaagagatgaacagcctaggaactacc

SEQ ID NO: 23167 - DNA, 201 bp, Homo sapiens
aacaatgacaaagaatgattataaaacagcaggagagaaaggagattatcttcttttttctttttgagacagagtcttgttctttcacccaggctggaatrcaatggctcgatctcggctcactgcaacctccgcctaccgggttccagcgattctccctgcctcagcctcccaagtagctgggattacaggcacccacca

SEQ ID NO: 23168 - DNA, 201 bp, Homo sapiens
caaaccttgagctaaacacagggtgctgattggtgtatttacaatccctgagctagatataaagactctccacgtcctcaccagagcagctagatacagastgtagactggtgcactcacaaaccttgagctaaacacagggtgctgattggtgcatttacaatccctgagctagatataaagactctccacgtcctcacc

SEQ ID NO: 23169 - DNA, 201 bp, Homo sapiens
gcaaacccagtatgtcatcctattacatcagcttcttcatctttggatgaagaggttggtgactgtttcttctaatgtgagaatagctccaaattgctaaattgttcagaatttgacaagatgaaagaggaaagaaaaaggaaatcttgaaaacatttactgtttccttgttcaatggataacacatggattcctgattgg

SEQ ID NO: 23170 - DNA, 201 bp, Homo sapiens
ggacctgacaagagggaggcctcctccccattctgctctgtgcagctcttgcagcccctgcagacgagagtcaggccagcgtcccgcaaccagcttccccrctgatgcacatcgaaggcttcctggcagctctcactacggccaaccaggacggcagggtcatcctgagccgccaaggtaatcaggtggttcttggccagg

SEQ ID NO: 23171 - DNA, 201 bp, Homo sapiens
tgagcaggcagagccggctgcacgcatgggcaaggacttctgttcctcatgtgtggacctgacaagagggaggcctcctccccattctgctctgtgcagcwcttgcagcccctgcagacgagagtcaggccagcgtcccgcaaccagcttccccactgatgcacatcgaaggcttcctggcagctctcactacggccaacc

SEQ ID NO: 23172 - DNA, 201 bp, Homo sapiens
ctccaggtgcctcagaaggtagcactgcgttgtgctgcctgggtggtagaagtggtgttttttgttttgtgtttaagattacagcttgctcagtttgcacwcatgcctacagctgggcttggtttttgcaggtgcagcgatactgtgagaagagcatgatcagcagaaaggtaactgctcccatcttgtggtcctgaacaa

SEQ ID NO: 23173 - DNA, 201 bp, Homo sapiens
caagatgagatttgggtgcagccacagccaaaccctataattctgcccctggcccctctcaaatctcctgtcttcacatttcttttttctttttttttttytttttttttttttttgagatagagtatcactctgtcaccaggctggattgcagtggcacaagcttggctcactgcaacctccacctcctgggttctagcc

SEQ ID NO: 23174 - DNA, 201 bp, Homo sapiens
acacatacgtgactgaattaatacttagccttacaccattgcactgttttattttctttccttttcctttttttttttttttgagacggagtcttgctctstgcccagcccaggctggagtgcagtggcgcaatcttggctcactgcaaactctgcctcccgggttcacgccattctcctgcctcagcctcccgagtagct

SEQ ID NO: 23175 - DNA, 201 bp, Homo sapiens
atttatttctcacagttctgaaggctgtgtgtctgagagcagggtcccagcacagccaagttctggtgaggaccctcttccagtggcagatgcccacttcyggtgctatctcccatggaggacagcagaggctataattcctttggagaaagcctactagcaaatacacaatggaattttatttagcctttcaaaaaaagg

SEQ ID NO: 23176 - DNA, 201 bp, Homo sapiens
ttctgaaggctgtgtgtctgagagcagggtcccagcacagccaagttctggtgaggaccctcttccagtggcagatgcccacttctggtgctatctcccawggaggacagcagaggctataattcctttggagaaagcctactagcaaatacacaatggaattttatttagcctttcaaaaaaaggaatttctgccatttg

SEQ ID NO: 23177 - DNA, 201 bp, Homo sapiens
ggtacaacatttcagttagacaggaggaatatttttttgagatctattgcacagtatgagaactatagttaataataatgtactgtatattccaaaaatgytaagtgaatacatttcaaatgctcttcctaccaaaaaaatgatgagtattggctgggcatggtggctcacacctgttatcccagagttttgggatgccaa

SEQ ID NO: 23178 - DNA, 201 bp, Homo sapiens
atgggtatgttaattagcttgatttaataatttcacattgtttacatatattacaacatcactccgtaccccataaagacatcaaattataaaaagccaayggcaaacacaaatggcctgtgacttcccttatgtccttcagtactaattcacccaatcctttaaaacctatcccttctgggccgggtgcggtggctcatg

SEQ ID NO: 23179 - DNA, 201 bp, Homo sapiens
ggggtttcaccatattggccaggctggtctcaaactcctaatctcaagtgatctgcctgccttggcctcccaaagtgcaggactacaggcgtgagctaccrcacctggccagaaaatgatatgctattcttgctgcaaatgttgaagttgactgataatttttctttaccataaagcagtggttcccaaagtgtagtctgc

SEQ ID NO: 23180 - DNA, 201 bp, Homo sapiens
caccattgtgacctatttccattctcttttttagggaacattaagcaaaatcccaatacacagagtctgtcacagacaggtaagagagttgccctcagagsgcccagagctgatctgagccacttccgagcttaaccctgggactgaaacctgaggcttagggtgaagctcccaaggcccttcatgtgtttgctctcaggg

SEQ ID NO: 23181 - DNA, 201 bp, Homo sapiens
aaaatttagttaataccatgactttcacattttttccactatagaacgctcaaacagctgggcgtggtagctcacgcttgtaatcccagaactttgggagkccaaggcgggcagatcacctgaggtcaggagttcgacaacagcctggccaacatggtgaaacaccatttctactaaaaatacaaaaattagccagacctg

SEQ ID NO: 23182 - DNA, 201 bp, Homo sapiens
agttgggtttaaatgcactgaacgtgaaagcatttctctcaccaaattagaaagttcacccaggaagcttcataaagataagagacaggaaaataaacatmagacctttttaccggtgaaaggtaacacagaaaaatcaaacatgctggagtttaaattatgtccagatatcttactaaagaatacaaactctgtggaaga

SEQ ID NO: 23183 - DNA, 201 bp, Homo sapiens
tgaggcaggagaatcacttgaacctgggaggcggaggttgcagtgagtcaagattgcaccactgcactccagcctgggcgacagagcaagactcattatcaaaaaaaaaaaaaaaaagaaagaaagaaagaaaaaaggaatgctcaaccgcatttgttattatttttttttttttggaaacggagtttcactcttgttgcc

SEQ ID NO: 23184 - DNA, 201 bp, Homo sapiens
cccttttcaaagtagtccacctgtgaggaaatactgattttccagtgatgctgtcattattcagaactcttttggaatgtttcaggaattctctacacagkctgtagtatctgcaattaatggcaaggctttattgtccacaggttgaattccttttaggaaataggcaaaagtcattcagaacccaattagatagtgaaa

SEQ ID NO: 23185 - DNA, 201 bp, Homo sapiens
aacttaaaagtgcaccattaagtaactcctgggaccaagcagatgtcatgagaaaaattaagaaatatttgccacttcatcagttataagacaaaaaaaawttttttttaaattttaagacatacttaaattgagtgataatgaatgatatggttgggtctgtgtccctgcccaaatctcatgacaaattgtaatccccaa

SEQ ID NO: 23186 - DNA, 201 bp, Homo sapiens
gttcatcaagcatgcaccaaaaaatggaaagaaaatggaaatcagtttcatgtaagttaatttgcatcagtcttagtagcttttataaaatgtaaaatgaragagaatctagctcttttaggcaagaactttaattcaccactatatactgatgctgaaaatagtagtacatttattgaatatgcagagaaggtactcaag

SEQ ID NO: 23187 - DNA, 201 bp, Homo sapiens
tgtaacatgaaaaccactgacattaagagacaggtaacagctttaataatttaccagccttgtatttcttcacattcttgtttcagagatagtttgaaaayagtccaaaaggaagataattccaaattcctgaggattttcaccaagtgttgagtgtactatataaagtgataacagaggattatgtggatgcataaccca

SEQ ID NO: 23188 - DNA, 201 bp, Homo sapiens
gcattaacaggaagcattaagaacaaggatgtggttaggtgtctattggtttgtcagaaagacatgtaacatgaaaaccactgacattaagagacaggtarcagctttaataatttaccagccttgtatttcttcacattcttgtttcagagatagtttgaaaatagtccaaaaggaagataattccaaattcctgaggat

SEQ ID NO: 23189 - DNA, 201 bp, Homo sapiens
gagcaagactccctctcgaaaaaaataaataaataagtaaaataaataaataataaagtgtactccatatgtattcaatctgttttattttatttttatttgtatgaacatatacaacacaaatttaaaatatataagtaattaattgtggaaaatgggatctatcgtgaggataaagcaaagttatgcaacaagatgaag

SEQ ID NO: 23190 - DNA, 201 bp, Homo sapiens
tcttagacttgggagagacatttggaaagagggtctcccccctgaggaggacactgcgttgtgggcaggggcagtagaggcgggggtggcctcggagaggrgatgacaaggttggtggcaaggaggctccaggtgcctcagaaggtagcactgcgttgtgctgcctgggtggtagaagtggtgttttttgttttgtgttta

SEQ ID NO: 23191 - DNA, 201 bp, Homo sapiens
ctcccatcttgtggtcctgaacaagacccagctgtgccccaaccccctgccgttgccatgctttcctcccctgccctcagggaactccagagtccccttcrtctccaccctccttggtgcagtgggccttgctggggtggtgggatgtgcgcttcaggtgtcttgagcctggcagagcctccgatccacccagcctctctc

SEQ ID NO: 23192 - DNA, 201 bp, Homo sapiens
tagctaacttagtgctgttccaagtactttatgtgtattcattttaatctttagaataatgcaatgaggcagacactgtattggccccattttatggatamtgagacaggcaacagaggctaagtgatttttccaaggtgatcacaaatagatgggaactatgaccaaatccaggaagcctgcctcccgggtatacactct

SEQ ID NO: 23193 - DNA, 201 bp, Homo sapiens
atcagcagaaaggtaactgctcccatcttgtggtcctgaacaagacccagctgtgccccaaccccctgccgttgccatgctttcctcccctgccctcaggraactccagagtccccttcgtctccaccctccttggtgcagtgggccttgctggggtggtgggatgtgcgcttcaggtgtcttgagcctggcagagcctcc

SEQ ID NO: 23194 - DNA, 201 bp, Homo sapiens
gcaacacgcctgtgagacaaaagtcatcatcttttagagtgaaggccacagggatgagggatgggtgagaaagggacctttcttggtgccccatagaacakatagagactccaggtccttgctgtctcaccccatcttctggcacagtctccctcaggcttatggacaggaataggatgttgatttgttctgtgcaacccc

SEQ ID NO: 23195 - DNA, 201 bp, Homo sapiens
acagagcaagactccctctcgaaaaaaataaataaataagtaaaataaataaataataaagtgtactccatatgtattcaatctgttttattttatttttrtttgtatgaacatatacaacacaaatttaaaatatataagtaattaattgtggaaaatgggatctatcgtgaggataaagcaaagttatgcaacaagatg

SEQ ID NO: 23196 - DNA, 201 bp, Homo sapiens
cagtggtgtgagcacagctcactgcaacctcaacctcccaggctcaagtaatcctcccacctcagcctcccaagtagctgggactacaaacatgcgccacyacccccagcttatttttgtggttttagtagagaaggggtctcactatgttgcccaggctggtctcctactcctgggttcaagcaatcaacctgccttggc

SEQ ID NO: 23197 - DNA, 201 bp, Homo sapiens
gaattgctttaacccaggaggtggaggttgcagtgagctgagattgcaccattgcactccagcttgggtgacagagcaagactccgtctcccaaaaaattwaaataaaataaaataaaataaagaattgtcagataatcatgactaagtctatgaggtaggtactctcattatgcctgttttacagatgaggaaactgaat

SEQ ID NO: 23198 - DNA, 201 bp, Homo sapiens
gcactaagcagaaggcctattcattgctgtgatattccatacaaatcactaagcaacctgtctacagtgaaggacacgatgagagagaattacactgatamaatttactagcactaccacaagccccaaggacccagaagcatctgacttgacaaaatggcagaatgcctgctaacagcttagttactacattagctggag

SEQ ID NO: 23199 - DNA, 201 bp, Homo sapiens
tgttcaattttctcatattgggaagctgccagttttagagttataccaacactgccataataaaaaaaagctgtcaagatcaggaaactgcagatactttygcaggttccagaaccagcaaaggaatgccccttaccatacccgtcagcacccatgaagtaagggaatggacactgcaacttctggtagcaccatcacaga

SEQ ID NO: 23200 - DNA, 201 bp, Homo sapiens
gttttaataggactgggatgtctcagataagacaagacagtgccactgtactcttcactgggcatatcttaccacacatgatttcctttcttatcacctcrtttttagaaggatgtgcacaaaccggaacaaggtcagagagcaaggagacgagtgagggaaattgacatcacgtcttaaaaggaagaaatggggttgggc

SEQ ID NO: 23201 - DNA, 201 bp, Homo sapiens
aagactctgtctcaaaaaaaaaaaaaaaaagttaaaatgataaattttatgtaatatatactttgtcacaataaaaaagtaaatgatcataaacagctctrttgttttaacttgtacatatcgtgtttctttcattttaaagtagaaacagtagctatttaaaatcaaaagataatttcaaacattgcttgttgtcattga

SEQ ID NO: 23202 - DNA, 201 bp, Homo sapiens
atagtctgaaagagtggtgtatatcaaatacgtgggtagtgttgcatttcaaatgaggctcttctggttgaaatgatatatttataagaccagaatatcamaaatgggtgatgtataatgtctctttagttttttggtatttggcctcttttaaagcctgtcggatgtatgggagaaaacaatgaacgtgctttgatttcc

SEQ ID NO: 23203 - DNA, 201 bp, Homo sapiens
ttgaacaaatatgatttatttaaaaataattgaaccagtttatgggaatgtcaacagaaaactactgtattaagtccaaattggacattagtaatttgcartatagcaacatggctcagtctttgcagatcattttgttttccagagtcagtacccaccaatgttgctaccttccttcccaggctaggtactgctgtgaca

SEQ ID NO: 23204 - DNA, 201 bp, Homo sapiens
tgcagtggctcatgctggtaatctcagcactttgggaggctgaggcaggaggattgcttgagtccatgaatttgtggttacagtgagtaaaatcacatcamtgcactccagcctgggtaacagagcaagaccctgtctctagataaatagatagatagacagacagatagaacagctgtataaaagtgtttctgtgtttct

SEQ ID NO: 23205 - DNA, 201 bp, Homo sapiens
ctggcgaagttatttctcagatataacttagcaagaatttatcatcttttatcacattccccatgtttatgtgaacatgtatgacagcgatggtttgaagrtttcttcagaactttctgcttgcaaatattttgccctatcatccccttaaatatagttgtactcatggatattgctttccaaatttgaaaatacggtaat

SEQ ID NO: 23206 - DNA, 201 bp, Homo sapiens
ccctgcacaaaatatcaagaactagaaaaaatcaactccatacaaagcttctgtaagagaaaataggaaatgcaaaccaaaacacttcagctaatgaaacytctccactaaagtcactaagtaaataaataagtaaacaaagaaaagccatgccaaaataatttaacatgagtgaaatattctcaagcatgtatttgaggt

SEQ ID NO: 23207 - DNA, 201 bp, Homo sapiens
tcccaaagtgctgggattacaggcatgagccaccacgcccgaccaatagttgtattttttttggagacggagtctcgctttgtcacctaggctggagtgcagtggcgtgcaattggctcatgccaacctctgcctcagcctcccaagtagctgggattacaggcgcccaccaccatgccgggctaatgttttgtattttag

SEQ ID NO: 23208 - DNA, 201 bp, Homo sapiens
ccactatcatggagactgagagcgagcagaactccaattccaccaatgggagttctagctcagggggcagctctcggccccagatagctcaaatgtcactwtatgaacgacaagcagtgcaggtgagactcagctctgaggggccatggtctgtgagtcttggcttgtggtaggcagtgatgctggaaaataattgtactc

SEQ ID NO: 23209 - DNA, 201 bp, Homo sapiens
gaagaccatcaacgactttctcttccagagccagatcgacaacatcaacctgttcaaggtagaggtttccaccttgccatgttccacatccaatttccttyctgtcaccacctgtgggtagagtactatgttaagactatagaaggaagaaaaagcaaaacagacgtgtaattacttaacccttaacgcaacacgcctgtg

SEQ ID NO: 23210 - DNA, 201 bp, Homo sapiens
tgagccacttccgagcttaaccctgggactgaaacctgaggcttagggtgaagctcccaaggcccttcatgtgtttgctctcagggacggagctgaagacyatcaacgactttctcttccagagccagatcgacaacatcaacctgttcaaggtagaggtttccaccttgccatgttccacatccaatttccttcctgtca

SEQ ID NO: 23211 - DNA, 201 bp, Homo sapiens
aaaacatgaacttacagggctttgggttccacgtgcaagcacgtgagtcagacgtgggaggctcctggacccacctgccctctaagtgggtccgttgcatrctataaacagtgaaaagcaaaacaaagccgttcaaatacagatgctcttcttacttgatgtgcagtgtggagggagagaagatagggaagggttgggggg

SEQ ID NO: 23212 - DNA, 201 bp, Homo sapiens
agtaaccaagaagcatgcatgtatcccggtaattcaaatccaatttcacagccactgctgaatatccaaaattatcctcaacaaatttctgtttctgataygcataatgggacagttgtggcctcacacacttcagtagaaagaataacatatgcaaatgttaatggacccaaacaactaactcacaatttgcagatgtct

SEQ ID NO: 23213 - DNA, 201 bp, Homo sapiens
ccctcaaaacgtggaagttattattccattgtctcatctactgttgctgatgagatgtctgctgttggcttggcaatcttttctttgcagcaaatctttcttttttcttttaaccttttggtgtttcctcattttttaaattttttcttttatcccaatgtgtctaggggtttatctactatctaataaataaatatgtat

SEQ ID NO: 23214 - DNA, 201 bp, Homo sapiens
cagacccaggggaatgataccaggggaaaagatggacagttttgtgggtaaattagcagtgattttgattccttgtcttgttagctgctgatggagatacrtgtatcagcataatacctggctagtttccatggccggcaagagccagtcctgcagtgtgaccacatcctgtccattctgggtcttggtggcaagccagga

SEQ ID NO: 23215 - DNA, 201 bp, Homo sapiens
gagatcatagcatcagtaatccctgtaccgtatgtagtcccagattggaatccttgaccgaaggcaagttctcaacctctctaagactcagttacaaaaamgagggcataatagtgtctcttgccttataggttttggtgaaaattgaataagaaaacatcagtaaggatgtggcatggtgcctgacaatctttagatgcc

SEQ ID NO: 23216 - DNA, 201 bp, Homo sapiens
agcctgctctctgggaaaggatttgtagcttgtgacccagtttgagaggcaccgggcagcaaggcttccactggggtgggcggggcgagtcgccatcaggrcaccaccacttaatgtccgttggcttcttctcaggaagcgtttgaaggccaagaacctgatgtacctgaagcagatcctgtatttgctggagaaattcgt

SEQ ID NO: 23217 - DNA, 201 bp, Homo sapiens
ccgggcagcaaggcttccactggggtgggcggggcgagtcgccatcagggcaccaccacttaatgtccgttggcttcttctcaggaagcgtttgaaggccragaacctgatgtacctgaagcagatcctgtatttgctggagaaattcgtggctgtgctagggggtgagagcctcgccccccggctaacccccggcctgca

SEQ ID NO: 23218 - DNA, 201 bp, Homo sapiens
accgagtgtgtgtagaaaggatgaaatcttaagattagaatgagagtgaacgcaggttggtcatgcctgcagctctctttgaagacactcgctatcatggygggctagaaatagtcaccatagatagtattcttaaaaaaaaaaaagttgctggccgggtatggtggctcacacctgtaatcttagcattttgggaggccg

SEQ ID NO: 23219 - DNA, 201 bp, Homo sapiens
ggtggagctgcatgccattcatgtcctaggcacatcatggtgtgtgctgcacacagacctggaaggctggggactgaccgctggctctgaggcctggggcygtggccagcctgctctctgggaaaggatttgtagcttgtgacccagtttgagaggcaccgggcagcaaggcttccactggggtgggcggggcgagtcgcc

SEQ ID NO: 23220 - DNA, 201 bp, Homo sapiens
atgttcgtatattgattttgtatcctgccaccttgctatacttgcttattagtcctaatagttgtttcttagtgaattccttaagaatttctattaatatwtacaagagcacgtcatctgcaaataaagatcattttacttttttctttccaatctcaataccttttatttgattttctcacctaagttccctggctagaa

SEQ ID NO: 23221 - DNA, 201 bp, Homo sapiens
caaattatccaggataccgtatgattaaaaatacagaacaggtataatctaagaccaaaggattcttattgcaacatgagttaaaccttaaatttttagcrtcttcaaaacaaatgtcttgtgaagatcccagccttgaaaaaatcgctttctagtttagagtcttgccttcctgccacatgtaatggaaatgttgtttaa

SEQ ID NO: 23222 - DNA, 201 bp, Homo sapiens
ctgcttgggctgccataacaaaatatcacagaccaggtggcccaaacaacagaaattgatttctcacagttctggagtctgagaggtctaagatcgaggtstctgctgatttggttcctgctgagggccctcttcctgcttgtgacagccaccttcttgctgcatcctcacgtgacttttcctctgtgcttgcatggagag

SEQ ID NO: 23223 - DNA, 201 bp, Homo sapiens
tttaagtcctcggtggtgatttcggagctggtgtctacggctgcgtctgacatggtggggcacgccggtgacgcgatgcaggggataaaaaagaaagcgasagttcagggactctggcgataaagctgccggagtccgcggcggcggaggcggctgcggcgagcaaggaggctgacgacgcacaatgcaaagacggctttt

SEQ ID NO: 23224 - DNA, 201 bp, Homo sapiens
gaaaaaaaaagccaagaaacaactgacattggtgaaagtctgtaattttcagatccattgatttacagaagaagatgccctgaacctctcagaatattttmtagtgtgattttttttaatgattaaaaaaaatgaagaaaatattaaacaagaagatcaaacacatttcattgagtggtgtctcatatgtttttcttgttt

SEQ ID NO: 23225 - DNA, 201 bp, Homo sapiens
aaggctggtttggtcatccgagatcattaaaaatggccgaccctaacaatatgtacaaaaatataaaatgtaaataaaaaatacaagtttcctttttaaastacttttaagaaaaaaaaaaagcagggccttggaagttttggttctttttccctcccctgttgcaaattctcatggtttgggttgggtggtggagagcgc

SEQ ID NO: 23226 - DNA, 201 bp, Homo sapiens
atcacagtgaagacatggaccatttccagcatccttcagagttcccgtgtgccctttagggctcctccccagcagcctccctcctggccttcagtatccayagacctgctttctcgcattgtcattttgccttttctagaatttcaggtaaaagaatcctacagtaggtatcttttgtgtctggctgctttcacttagtgt

SEQ ID NO: 23227 - DNA, 201 bp, Homo sapiens
tggtagcctcacccctgaaatccagttgcggcttttgacccccagatgcaaattctggtgggagagagctgacctgtggccccacagtgatccttactggkcaatctactggccaggaggccaagccctgtctaggtactaccctaatgaaacctttaaggcgctacagatctttgctgttttcagttccctccaacctct

SEQ ID NO: 23228 - DNA, 201 bp, Homo sapiens
ataattccccttatcatgaaaacattatttttaatggcagcagagtattgctttatattaacatgacagtttattcaaccgaactctttatggggcattgyaatagacttaatgttttatgtttgcagctctttacaccaacacttttcctactgtagtgatttctttgaacaatttcccctccccaactccctgtggttc

SEQ ID NO: 23229 - DNA, 201 bp, Homo sapiens
gacccaggcagtattgaatactcagctttcatcagaaaatgttaccaaagttgagcaaaattcaccagcagtttgtgaaacaatttctgttcccaagtccwtgtccactgaggaatataaatcaaaaattcaaaatgaaaatatgctacttctcgctttgctttcacaggcacgtaagactcagaagacagtattaaaaga

SEQ ID NO: 23230 - DNA, 201 bp, Homo sapiens
aattatatctgaatagagttgggtttaaatgcactgaacgtgaaagcatttctctcaccaaattagaaagttcacccaggaagcttcataaagataagagrcaggaaaataaacataagacctttttaccggtgaaaggtaacacagaaaaatcaaacatgctggagtttaaattatgtccagatatcttactaaagaata

SEQ ID NO: 23231 - DNA, 201 bp, Homo sapiens
agccaaaaataacaaaacaattattaagtactaatgttgtaatatcaaacttactatgacgtttaaattccttctgcagtttactgatctggttgcttttyatcctgttcccagatagagttttcactttctttggtttcaatgtagtctttagactgggtccagcccttgcatctaccacctggaagaaaatactgaata

SEQ ID NO: 23232 - DNA, 201 bp, Homo sapiens
gatgctgctgcatgcggccactcggcaggctgcgggcatccggctgcaggaccaggtggtgatcatcgacgaggcgcacaacctgatcgacaccatcacgrgcatgcacagcgtggaggtcagcggctcccaggtgcgtgggcctcccctccccgggccagggcctgccgtgaggtaaagggacttggatggttcctccag

SEQ ID NO: 23233 - DNA, 201 bp, Homo sapiens
gtttcattgaataagaaaaagaattttagtttttattttagctctgtgttcatttatttcataagtcaaatgtatcgtaacaaatttaacctgacaacttytcattaaaagcctgagtcttagccgggcatggtggtgtgttcctgtaatcccagctacttgggaggctgaggcaggagaatcacttgaacccaagaggtc

SEQ ID NO: 23234 - DNA, 201 bp, Homo sapiens
acttgcaaagggacctccacttccccactgcaccatacccacagagtgtgaaagtaggtattgtatgtaaattgtattttatgattttttggggtcattgytaacttttttcagttatcctggcagaaataagaaaattcttttttgctattccatatatctattgtgatatcagagtctgttgtttgtttgtgtgtttgt

SEQ ID NO: 23235 - DNA, 201 bp, Homo sapiens
tctttcactatttcttttatgactgagaaatttcttttcaatgtataaatcatatacatgttgctcctggacaaaactgagggtcaggctgctacttctcstggcccaataatgagatgcagacaaactggggaagagaggttttatttttgcatctggttacagggagaaggcctagaaattgtcaccacaccaactcaa

SEQ ID NO: 23236 - DNA, 201 bp, Homo sapiens
gtctcaagtttcccaaaagaataggccttcctttttccctcagccatcacccatcattacgagactcaccatttcatccaaagggtggaaattgacatccrtagagacaacacggaatttcactgaaacagaggtattttcctgtgaaatcaccccgtggagcctggggtagtaatagcatgcctgaattcccaggattgc

SEQ ID NO: 23237 - DNA, 201 bp, Homo sapiens
tttctttttcttttttttttttttttgagacggaatctcactctgtagcccaggctggagtgcagtggctcaatcttggctcgctgcaagctccgcctccygggttcgcgccattctcctgcctaagcctcccgagtagctgggactacaggcacccgccaccacgcctggctaattttttgtatttttagtagacggggt

SEQ ID NO: 23238 - DNA, 201 bp, Homo sapiens
gctttttcctgcttcttgggcccagtttccatttcttccttttttctgtttttcctggctattctagtgctaatttccttcctttcctttcctaggctggycttagagcatcctctcctatgtacagccagaccttctttcaagcttttattaaaatggggaaaggtcatttgggaggctttgttgttttcctgtttctaa

SEQ ID NO: 23239 - DNA, 201 bp, Homo sapiens
cttaatatttaactatttttcagtactctagattcacaccaaggtgtatcttttcatttctgttccataaatataatttcgcacagacctaaaccttagckagccagtgcagttttttgtttgcttgtttgtttttattttacttgcctttcgtttaacttactttcaaagtgatatttgggtatgtaaacgtatatgtgt

SEQ ID NO: 23240 - DNA, 201 bp, Homo sapiens
atgcggccactcggcaggctgcgggcatccggctgcaggaccaggtggtgatcatcgacgaggcgcacaacctgatcgacaccatcacgggcatgcacagmgtggaggtcagcggctcccaggtgcgtgggcctcccctccccgggccagggcctgccgtgaggtaaagggacttggatggttcctccagacacctgggcc

SEQ ID NO: 23241 - DNA, 201 bp, Homo sapiens
ttcatagggcctatattcttaatatttaactatttttcagtactctagattcacaccaaggtgtatcttttcatttctgttccataaatataatttcgcayagacctaaaccttagcgagccagtgcagttttttgtttgcttgtttgtttttattttacttgcctttcgtttaacttactttcaaagtgatatttgggta

SEQ ID NO: 23242 - DNA, 201 bp, Homo sapiens
aagctgttttttgaatgtctctacacagtccaggcaggaaatagaagcactcacatcaggagctcagtgtcaggcaggcaagcctcctgcaggggagcccygccctgctcaggtggcctcatctcccctcccagctggtggtgctgccctatcagatgctgctgcatgcggccactcggcaggctgcgggcatccggctgc

SEQ ID NO: 23243 - DNA, 201 bp, Homo sapiens
ttcccgggactcttaaaataatttttaacctacttttcatagggcctatattcttaatatttaactatttttcagtactctagattcacaccaaggtgtawcttttcatttctgttccataaatataatttcgcacagacctaaaccttagcgagccagtgcagttttttgtttgcttgtttgtttttattttacttgcct

SEQ ID NO: 23244 - DNA, 201 bp, Homo sapiens
gacagttgctgtcctctctgttttctctctttgtgcctgtgccaccctcagagaagaagaaaggagctgaggaggagaagccaaagaggaggaggcaggaraagcaggcagcctgccccttctacaaccacgagcagatgggccttctccgggatgaggccctggcagaggtgaaggacatggagcagctgctggcccttg

SEQ ID NO: 23245 - DNA, 201 bp, Homo sapiens
actatggtttttacaatttagtctattcaagtcctacttcaataatattacattcaatattttactgtattctttactataattattacttttgctagcawgtagattgctatatctccctcactataatacgaagaacccatgagtgcaaacgtttaccttgctactgataacataatatgaagttttgctgaaagatgg

SEQ ID NO: 23246 - DNA, 201 bp, Homo sapiens
cctgccatgagtcccgaggcttccaactcaagacttgggtttggggtgctgagctcatgtctcctttttacatttccctacccacagacctgagcggccaygggaggttggggttggcatttgcctgggggagtttctgagcaagcagcacctgctaccttggtggaacccattgctgggaatggccagggctcagcacca

SEQ ID NO: 23247 - DNA, 201 bp, Homo sapiens
aaatctaacccaattccccattttctagttatactctagagcgaccactatggtttttacaatttagtctattcaagtcctacttcaataatattacattmaatattttactgtattctttactataattattacttttgctagcaagtagattgctatatctccctcactataatacgaagaacccatgagtgcaaacgt

SEQ ID NO: 23248 - DNA, 201 bp, Homo sapiens
aaaaatcaaaattacgggtattttaggataaagagaaaggatgagtgaaagaatatttgataagatggtttatcatcatgctgctttatctctgcaagaarattttatagccattctacattaaatctaacccaattccccattttctagttatactctagagcgaccactatggtttttacaatttagtctattcaagtc

SEQ ID NO: 23249 - DNA, 201 bp, Homo sapiens
ttatgttaactttgagcttcctcgtggcatataggtacagggatttcattaggttcaaagaagttttaaagaaaagaagcaattttgattgtggaagaatrttttcagctcataccaaataattgaagtctgctgtgtaggttttgtcttcaaagtcttccatattgagaatgcagtgcactagcaccctcttctgctggt

SEQ ID NO: 23250 - DNA, 201 bp, Homo sapiens
tcccaattcctccctacccccattgcctggcaaccactaatctagtttccgtctctatggatttgcctattccggacatttcatataaatgggatcatatyacatttgttcttttgtgtctggcttgtttcacttagtatatagtatttccaagatgcatccatgttgtagcatatatcagtgcttcattcctttttggct

SEQ ID NO: 23251 - DNA, 201 bp, Homo sapiens
gggaggcggaggttgcagtgagttgagatcacaccattgcactacagcctgggcaacaagagcaaaactccatctcaaaaaaaaaaaaaaaaaaaaaaaamcaaagagtcaggagctctccatgtttaagataatcaaatccacattttatggttgtatacattttatttaaccacacaatgagcacacaaaaattaataa

SEQ ID NO: 23252 - DNA, 201 bp, Homo sapiens
ccagttatataagttttatcatttatgttaactttgagcttcctcgtggcatataggtacagggatttcattaggttcaaagaagttttaaagaaaagaarcaattttgattgtggaagaatattttcagctcataccaaataattgaagtctgctgtgtaggttttgtcttcaaagtcttccatattgagaatgcagtgc

SEQ ID NO: 23253 - DNA, 201 bp, Homo sapiens
acatatcagaactctggtttgatcccagcaatgtccaaatagaaatgggtaactctgaagaaagggtctgagaatgacagagtgcatatgggttgtggtgkcatggccttttccctcctttcttaaaaatagataccagttatataagttttatcatttatgttaactttgagcttcctcgtggcatataggtacagggat

SEQ ID NO: 23254 - DNA, 201 bp, Homo sapiens
catcttcctaaatctcaatgaagtatcatgcacccatttagacagtgtaaaataatccataatagcaatatattaaaatcaaactaatacttaatatcttytgtgtgccagaagttgggcaaagggctttatatgtattattaaataattatcttgatgattagacaatatattacaaaaaactaagattctctagaggtt

SEQ ID NO: 23255 - DNA, 201 bp, Homo sapiens
ggggtgctgagctcatgtctcctttttacatttccctacccacagacctgagcggccacgggaggttggggttggcatttgcctgggggagtttctgagcragcagcacctgctaccttggtggaacccattgctgggaatggccagggctcagcaccagcgctcagcagatgctcagtgcgttttgctgagtttgctgag

SEQ ID NO: 23256 - DNA, 201 bp, Homo sapiens
cagcttgaaattgcaggagctggtactcctagtccgtttaatatttcactgaatattaaaattgctttaaatctctgaagtgccaagtttgggttattagytcataaaaaaagaactgagcctcaactagctggaaaatattgttttgggaactagaacatttgcaaaaaggcataaagctcaaagtttaatgagcctgag

SEQ ID NO: 23257 - DNA, 201 bp, Homo sapiens
aggcaggtgttgctcggagccccagcctctgttcctatgcaggcagggccatcaggcaccagaaggattttgccagcatagtgctcctggaccagcgataygcccggccccctgtcctggccaagctgccggcctggatccgagcccgcgtggaggtcaaagctacctttggccccgccattgctgctgtgcagaaggtca

SEQ ID NO: 23258 - DNA, 201 bp, Homo sapiens
ggccatcaggcaccagaaggattttgccagcatagtgctcctggaccagcgatacgcccggccccctgtcctggccaagctgccggcctggatccgagccmgcgtggaggtcaaagctacctttggccccgccattgctgctgtgcagaaggtcagtcctacctttttctttctgagagcctcccaaccccgagatcacat

SEQ ID NO: 23259 - DNA, 201 bp, Homo sapiens
tgcctccaccaccaagtgcctgaacatctgggccctgattttgggcatcctcatgaccattctgctcatcatcatcccagtattaatcttccaagcccatmgatagatcaggagacatcactgaggccaggagatctacccatgacctgtatcctttgtactccaccttccattcctcgccctgctcccggagccaagtcc

SEQ ID NO: 23260 - DNA, 201 bp, Homo sapiens
ggagacttgaaatctagtacaaactccttgaatttttaaattacagttttagaatattattttaaaagatgctgagacttgcagaaaatttaaagcttccrtaagatcttgcagcttgaaattgcaggagctggtactcctagtccgtttaatatttcactgaatattaaaattgctttaaatctctgaagtgccaagttt

SEQ ID NO: 23261 - DNA, 201 bp, Homo sapiens
gagtcacagataaacttgctataaagcaatttaatgttccacattccaaaacagttttctaagaccaataaacaactttttattcatatttgcaaatgctraattacatctaaatttatttagttcagtgaaacaaagttacacaaaggcattaagagtctcccagtgcttgtctggttttctgaaaggtgtgtttgatat

SEQ ID NO: 23262 - DNA, 201 bp, Homo sapiens
tcctctcttgccccttttggaaatcagctgccacgtggggcagagatttttcttccacttcaataacccttgacttcaaccttccaggtaaaactattggkttaatttaagcttcttttttttttttttttttttttttttttttaagaaacagagtcttgctctgtcacccagttcagtggtgcaatcctggctcactgc

SEQ ID NO: 23263 - DNA, 201 bp, Homo sapiens
tataaacgaatgtgatttacctccttttcttgtctgagcaatactattgacatgtttactagtaaactcaggttaccagtaaacaagcatatgactctaayagctatattcaagagaatttaggagtcacagataaacttgctataaagcaatttaatgttccacattccaaaacagttttctaagaccaataaacaactt

SEQ ID NO: 23264 - DNA, 201 bp, Homo sapiens
ataatgggacattagcaaacgagatgcaagcagaggcctgaaaaacatttatgcaatggggcttgtcctctcttgccccttttggaaatcagctgccacgyggggcagagatttttcttccacttcaataacccttgacttcaaccttccaggtaaaactattggtttaatttaagcttcttttttttttttttttttttt

SEQ ID NO: 23265 - DNA, 201 bp, Homo sapiens
aaaattagaggcctcaccattttcgttgatctcaattttctgttgcccatgaagaatgattacaccttttgaaatcacctaggaaaatgaaaatataatcrtaaagtttagaggatagaaactaaatttcatttaattataaacgaatgtgatttacctccttttcttgtctgagcaatactattgacatgtttactagta

SEQ ID NO: 23266 - DNA, 201 bp, Homo sapiens
taaattataaaagaaagaaatagttgaacatttcttattacgtcaaacttcagtctacttttgtttctttttaaaaatcccttcttgtttgaatgtaaaartacttacctgtctttcttggaaaagaaagggaaggacaatgaccctttcccattatagtagtgtttggaatataattaatgcactattaattaagtaatt

SEQ ID NO: 23267 - DNA, 201 bp, Homo sapiens
caaaccgaaaaagtgctttggtgagatagctgactgtcatcttgcagaaaccctccactgagtttctagccatcctacccactgccaaagagactgccccracccaccaaatttaatttataaagcatttctaggaggagttcataacctattccataaattataaaagaaagaaatagttgaacatttcttattacgtca

SEQ ID NO: 23268 - DNA, 201 bp, Homo sapiens
agaaatggaaaatatgcccttcctccctgtgaaaagaaaatttcaaaccgaaaaagtgctttggtgagatagctgactgtcatcttgcagaaaccctccaytgagtttctagccatcctacccactgccaaagagactgccccgacccaccaaatttaatttataaagcatttctaggaggagttcataacctattccata

SEQ ID NO: 23269 - DNA, 201 bp, Homo sapiens
atttttggcacctacctgattttcgaagcatttctcaattggaattgggtgctatcagtgaccatttctcctccaggatgcaagctatagacaagcatatstactgagggcgctaattcagggttaatgtctatagaaatggaaaatatgcccttcctccctgtgaaaagaaaatttcaaaccgaaaaagtgctttggtga

SEQ ID NO: 23270 - DNA, 201 bp, Homo sapiens
agatttaggtgacagctcagcttcaggcttcattagcagcacactctggtctacagcacggagggcacaaagggagaggggggtggctctcaccttcaggygggtgtttgaggctggcaggctctgagctgaggagaatctcaaatttacctgtaaagaggatatgattaaagcagccattttataattattacagtaacc

SEQ ID NO: 23271 - DNA, 201 bp, Homo sapiens
aattcatgttggaagttattccccaatgcaacagtttaagaggtgagacctttagggggtgattcaggcatgcgggttctgccctcacggatgggattagygctttataaaagggacatggggaactagcctaggccttttttttttttttttttttttttcgcttctgctcttccaccatggaagacacagaaggaaggt

SEQ ID NO: 23272 - DNA, 201 bp, Homo sapiens
gagacatgggctcaaggtggacaaagctcttgcttggggagaacacaagataagcagtgtgatgtgcctcttcgtgttcttctgacacccactggtagccrtaacagggactacgatccttgtaattgacctaatgaattagaaaaattatattatttttagattatacgtcataaagattaatgttctcacaaaactacg

SEQ ID NO: 23273 - DNA, 201 bp, Homo sapiens
aagtacatacacaaaaaagttactggaatgctcggaataagatggtttttctgttgtcatttttgcattttttacaagttttttttttctcctttgagatyataatgaacatggccacaccacaagtaaagtgagaagtaggacagagaacgctccgaaggctggtttggtcatccgagatcattaaaaatggccgaccct

SEQ ID NO: 23274 - DNA, 201 bp, Homo sapiens
gatttttaaagcatgacatgttgtgttactaaaactaagtaattcttccagggggaggaagcagtagtgtctattatataccttccactttacttatttargaaaacataaaaagccattaccgggagaatagaatgcattgttctgaatctaaatgacaaagcaatctttgtttgtttgtttgtttgtttgtttgttttg

SEQ ID NO: 23275 - DNA, 201 bp, Homo sapiens
taatggtaagaagaaagaaaacaacagaaaaactcactgatcttgggagagtgttaccaaaattatttcatttttcagtccaacaaattgcaaagtcattktgaagaaggtgtaacctattaatctgtatgtattatgtacacgagttaaaaaacagaatgacagttgggcgcggtggctcatgcctgtaatcccagcgct

SEQ ID NO: 23276 - DNA, 201 bp, Homo sapiens
aagtgaaccagcacagagagatcaaggagaaagccacaatggctggccgcagaaatcacacttcatcatttttgcaatatcatactggtattacaaaaaasctccgttcagtgggaagtgggaataggggtgggctcaggtggtggtacttacacaacagcagtaataacagaaaaggggaccatattgttagaggctggt

SEQ ID NO: 23277 - DNA, 201 bp, Homo sapiens
cacaaacacattacaaatcatataattctatttacagaaacactggtgtgttcattctaagtcatccagactagtcttctttcttgctcttagtgaatcaycaatggaagttttgctcaggagaatgaaatgtcccatacttgtacatgcaaacactgggatccccagttaccacaaccccaacctgatgggtctcctacc

SEQ ID NO: 23278 - DNA, 201 bp, Homo sapiens
catcatccacagagcctctgtcccagcaatttttaccgctacataaatacccaggagagtgacagcaaatgtgcaaaaagtcacgtataagaacatttgcrgttgcattatttgtaatagctctaaattgaaaacaactcaaatgtcccacaacaggatatgtaaattgtggcatattcatacaattaaaactttatagtg

SEQ ID NO: 23279 - DNA, 201 bp, Homo sapiens
aaatctctacatatcctccaaaatggttaaagttaagattcataatgccaagttttagtgaggatgtggagcaaccgaatctctcatccaattgtgaaaakgaatcatcattatctactagaattcatcatccacagagcctctgtcccagcaatttttaccgctacataaatacccaggagagtgacagcaaatgtgcaa

SEQ ID NO: 23280 - DNA, 201 bp, Homo sapiens
tacaaaaattagccaggtttggtggtgtgcacctgtaatgccagctacttgggaggctgaggtgggaggattacttcagccctgtctccaccccgcccccmcaaccaaaaaaaaaaaaaacagaaccaggaaaacattaaccttggcttccacgtagtcaggatcatcagtatcacttgtcttcctcctctacatcttgcc

SEQ ID NO: 23281 - DNA, 201 bp, Homo sapiens
attttcaaagagaaatgtgtttacgaagcattgagcaactttgggtgggttgagaccgaaagtatccttgccacttgagtatacattgggggaggcagagytggaatcattggcatatgtggaatgaaattaatgcatgtattagcacataagggatgtgaatagcaatacttttcataaacaaaaaaagcaggattattg

SEQ ID NO: 23282 - DNA, 201 bp, Homo sapiens
gtttgaaaaccactattttatgagccaagtagaacaagaaatgacaactattaaaaaaaataagggatttctgaccagctaacaaccccacagaaaatctrccagggatccagaaatgagactgaggtggcctcagagagcggctccctcctgaaggggatgctgctgctgtcatcctgcccggcaccttggactgcagtg

SEQ ID NO: 23283 - DNA, 201 bp, Homo sapiens
agtttgaaaaccactattttatgagccaagtagaacaagaaatgacaactattaaaaaaaataagggatttctgaccagctaacaaccccacagaaaatcygccagggatccagaaatgagactgaggtggcctcagagagcggctccctcctgaaggggatgctgctgctgtcatcctgcccggcaccttggactgcagt

SEQ ID NO: 23284 - DNA, 201 bp, Homo sapiens
tattagaccctttttcctccttggtttaggaatgggggccccagggccacccttgtccaggctccctctaccgtagaggtgagaattccagggcgctacartttgaaaaccactattttatgagccaagtagaacaagaaatgacaactattaaaaaaaataagggatttctgaccagctaacaaccccacagaaaatctg

SEQ ID NO: 23285 - DNA, 201 bp, Homo sapiens
tgacaagaatagctttcagtgaaatagaatagagagcacagaaagtcacaagattttaaaacaactcaacatataataattaccaatcaacaggaaagaakgaaattgttctatttattgcataaatagcattgtagaaattggcttgctatttggtgataaaataaataataagtcaagtacggtggtgcacgcttgtat

SEQ ID NO: 23286 - DNA, 201 bp, Homo sapiens
gggattagcgctttataaaagggacatggggaactagcctaggccttttttttttttttttttttttttcgcttctgctcttccaccatggaagacacagmaggaaggtaccaccttggaagcagagagcagccctcgccagacaccaactctgctggcaccttgatcttgtacttcccagcctctagaactgagcagaaa

SEQ ID NO: 23287 - DNA, 201 bp, Homo sapiens
tcggcctcccaaagtgctgggattacaggtgtgagccaccaggcccgaccaatgctaggtctttgcagtgggtctcatatcattccacgtacactgaggcrcacttgttgccagagaccaaaaactttactgagcaccctttcacccccagcgcccacttggctgggtctatttccaattcttttagtctctggggctgat

SEQ ID NO: 23288 - DNA, 201 bp, Homo sapiens
gaattcgggatgagtccatagggtaaagtgaaagcaagtttattaagaaagtaggccaggcacagtggcttacgcctgtaacctcacaactttgggaggcygaggccagcggatacgaggtcaggagttcgaggctagcctggccaacatggtgaaaccctgtctctattaaaataacaaagattggcccagcctggtggt

SEQ ID NO: 23289 - DNA, 201 bp, Homo sapiens
aactgactttgtacccagctaaccattactaacaagaaggggaaagaaacaaaaaagaaggggaggcctggcgtggtggctcatgcctgtaatcccagaactttgggaggctgaggcaagcagatcacttgaggtcaggaattctagaccagcctggacaacatggtgaaaccccatctctactaaaaatacaaaattggc

SEQ ID NO: 23290 - DNA, 201 bp, Homo sapiens
ctttgtaatctcacatattttattttatgcattcaaaagattattctggccaggcatggtggctcatgcctgtaatcccagcactttaggagaccgagacrggtggatcacttgaggtcaggagtttctgaccagcctggccaacatggtgaaaccctgtctgtaattagccgggcttggtggcccatgcctataatccca

SEQ ID NO: 23291 - DNA, 201 bp, Homo sapiens
cttacaatcacgacagaagaaggggaagcaagctaccttcttcaaaaggtggcaggaagaagtgctgagcaaagggggaagagtcccttataaaaccatcrcatctcaagataactcactcaatatcacgagaacagcatgggggaaaccacccccataatccaattacctccacctggtctctctcttgacacatgggga

SEQ ID NO: 23292 - DNA, 201 bp, Homo sapiens
agtaaaacagaaataattaacactgtgtgtagataccttccctcctgaattcaacaaatgttaacactttgctatattcatttcacaactttttaaaacaraaatatgaatcttaaattcggctggggaaaaaaaaacagaaataaaaactttagataaatgaaaattccctcagctggagctcagaacatcagcctccat

SEQ ID NO: 23293 - DNA, 201 bp, Homo sapiens
gaccctatctcaaaaaaattaaaaagaagaaattagagcatatagagaagtaaaacagaaataattaacactgtgtgtagataccttccctcctgaattcmacaaatgttaacactttgctatattcatttcacaactttttaaaacagaaatatgaatcttaaattcggctggggaaaaaaaaacagaaataaaaacttt

SEQ ID NO: 23294 - DNA, 201 bp, Homo sapiens
gtaatggttcttccctcagcatttatagaagaaattcttgaaaaggcaaaaattcaactgttagagacaattatagcacaatggagaggctttagagcatrtcttaaaataatttaaatatatgcattaaaagctactctttccgaaaaaagtgattacacttatcttgcacgtagatgtatgggtatgaaaactaggttg

SEQ ID NO: 23295 - DNA, 201 bp, Homo sapiens
caataggaaagccacggagtggggtgtggggttcagtcacattggacccccggctccgtgttcctgtcccctgtagtgtttttgttattagaccctttttyctccttggtttaggaatgggggccccagggccacccttgtccaggctccctctaccgtagaggtgagaattccagggcgctacagtttgaaaaccactat

SEQ ID NO: 23296 - DNA, 201 bp, Homo sapiens
tttgaaaaacaattctatggagatgtagttcacatattatacaattcacccatgtaaagtggacaggctgactttgttttcttttctttttttttttttttgagacagggtctcactctgttgcccaagctggagtacagtggtgccatcatggctcactgcagtctcgacctcccaggctcacgcaatgctccacctcag

SEQ ID NO: 23297 - DNA, 201 bp, Homo sapiens
tcctaagtaagctgacctgacagcactatttgtaacaaatagttcattctaaattcacctggtaattaagggtgaccatctgtggtaattggtaaagttasctgaaaggggtcctgattcagaccccaagaaagggttcttagctctcgcacaagaaagaattcgggatgagtccatagggtaaagtgaaagcaagtttat

SEQ ID NO: 23298 - DNA, 201 bp, Homo sapiens
gctctccctgtgccctaccatggaacttggtaagcctttgttaactcactggcactgctagatcatgctatggtccccgagggccagggaggcaagtgtgytagtccaagtaaaaagctgatatgatctttgtatgaacagaaacactgtttgtaatgtgatgataacgttggtttcttgctcctgggatattgtgttcta

SEQ ID NO: 23299 - DNA, 201 bp, Homo sapiens
gtagcaaaacatgccactccaaacatgccactttggcatattgattattttgagataaagacagtgaaaggaagggaaatgggatacttccctgattcccyttgcaggacgtgcaacagaagtgtagctcacctgttcagttgcctcactgcttaatccccttgtgagacagagagcatgcagacaggcaggtgcagaggc

SEQ ID NO: 23300 - DNA, 201 bp, Homo sapiens
atgccactccaaacatgccactttggcatattgattattttgagataaagacagtgaaaggaagggaaatgggatacttccctgattccccttgcaggacrtgcaacagaagtgtagctcacctgttcagttgcctcactgcttaatccccttgtgagacagagagcatgcagacaggcaggtgcagaggctggggtgagc

SEQ ID NO: 23301 - DNA, 201 bp, Homo sapiens
tgtgatctcggctcactgcaagctccacctcccgggttcacgccattctcctgcctcagcctccggagtagctgagactacacgcattcaccaccacaccyggctaatttttcgtatttttagtagagatgggctttcaccttgttagccaggatggtctcgatgtttttaaagaaaaaatatttacatttattatcaaat

SEQ ID NO: 23302 - DNA, 201 bp, Homo sapiens
gggatggatagcattaggagatatacctaatgctaaatgacgagttaatgggtgcagcacaccagcatggcacatgtatacatatgtaactaatctgcacrttgtgcacatgtaccctaaaacttaaagtataataataaaaaaaaagagtttttttttaacttaaaaatggttgaaatttaaaatgttgtaaagttgaaa

SEQ ID NO: 23303 - DNA, 201 bp, Homo sapiens
atttaccagcattatttttactaaacgattcttgttcatatatttattttcagttgcatttagcataagtgaaattcgagattcctaaaaaactggtttayacagttatataaaaatgtattttaggtaataaaattattatagttgattatttgatagtgaggcctattatttttattctttaaacatagaatatacttt

SEQ ID NO: 23304 - DNA, 201 bp, Homo sapiens
aaacgttttgtaggaataatgtaactgtggtttcttaatacagaataatgcaaataccaactaaaattttttctataaatattttaatatatattttgttmtatatagcaggaggttaataaaaatttaccagcattatttttactaaacgattcttgttcatatatttattttcagttgcatttagcataagtgaaattc

SEQ ID NO: 23305 - DNA, 201 bp, Homo sapiens
aaaaagttgaactattttaataatggattttctgtgtgtatagaaactcctacaattgatttaaattttttttttttttgagacagattcttgctttgtcrcccaggctggagtgatctcggctcactgcaacctccacctcctggattcaagcaattctcctgcctcagcctcccaagtagctggaattacaggcacccg

SEQ ID NO: 23306 - DNA, 201 bp, Homo sapiens
accagcagtaatgagaaaaatgtgaaaaaaacgttttgtaggaataatgtaactgtggtttcttaatacagaataatgcaaataccaactaaaattttttmtataaatattttaatatatattttgttctatatagcaggaggttaataaaaatttaccagcattatttttactaaacgattcttgttcatatatttattt

SEQ ID NO: 23307 - DNA, 201 bp, Homo sapiens
tttctgtcattgcacttaccttgcatagcaaaccttaatgcaattgtgttttgcctttgctacaccatgagctttgcatcccaagtctttaacacaaaagmtagcacacagtgggcatgaaatattttatgaaagaatcagtttgtactagaagaaggcacacttttatcaagggttcactagtcaatattgattagtgtt

SEQ ID NO: 23308 - DNA, 201 bp, Homo sapiens
acctatcaacactgctttgccaagatagggaagtgcaaaccagaaagtggtaagccatcaccttcttgataaaggagatggacttaatttaatgaaatgtrcctcttactgactttgctgcttgatttaaacaatccttctagggatatttctgtcattgcacttaccttgcatagcaaaccttaatgcaattgtgttttg

SEQ ID NO: 23309 - DNA, 201 bp, Homo sapiens
acagggtcttgctgtgtcacccaggcacaatcacagctaactgcagccttgacctcccacctcagcctcccaagtagctaggactgtagatgtgtgccacyacgcctggctaatttttttattttttgtatagatgtggcctcactatgttgcccaggctggtcttgaactcctgggctctagcaatcctcttcccttggc

SEQ ID NO: 23310 - DNA, 201 bp, Homo sapiens
ttgattctcgacccttctccactctttcatttactccactcttactttgctttcacctccttttgtaaccgttcatcatcactcttcatatggattaatgkgattatcttaaaagcatgtaatatgtagttgctgggtttgtatgagtaatgagtgaacctgaagccaacataatgatcccgtttagtgctcccgagttaa

SEQ ID NO: 23311 - DNA, 201 bp, Homo sapiens
tctccaacattcatttcccctgcttcggcaccatagacttgaaggattggactcaggagttggggaggacacgggggaagttgctttcctggtgctgaggmccccggccaccgtggtagtgtacagcaagtacagggtaacagaagggccagcaggaggacacggtgcaatggtgtaccgagggacaggagagtgaatcag

SEQ ID NO: 23312 - DNA, 201 bp, Homo sapiens
agcctagacaatatagtaagactctgtctctaaagataaataaataaatcccagatgaattagagatccaaatataaaataaaaccaaaaactatatcatragcatttatcttctcttcaaatgaaagcacgttccaagcttaaacacaaaagaagataccataatccactgaactgcataaaaatttaaaacacctacat

SEQ ID NO: 23313 - DNA, 201 bp, Homo sapiens
tttgttttatttttagatcagacaatcacatgagaatattctgttgtgatcgctggcgtttagaaggaaacttgtctggtttgtgaagcaatggaaaacayatccagacagcctgctagtggaaactttggaagggcactgtcatatgctttttctcccacgccatcaacaagtgtcctttttttttttttttttttgaga

SEQ ID NO: 23314 - DNA, 201 bp, Homo sapiens
gctgtagtgcaccatgatcacacctgtgaatagtcgctgcagtccagcctagacaatatagtaagactctgtctctaaagataaataaataaatcccagaygaattagagatccaaatataaaataaaaccaaaaactatatcatgagcatttatcttctcttcaaatgaaagcacgttccaagcttaaacacaaaagaag

SEQ ID NO: 23315 - DNA, 201 bp, Homo sapiens
cctgtaatcccagctacttgggaggctgaggcaggagaattgcttgaacccgggaggtgaaggttgcagtgagccgagatcagatcacgccactgcactcyagcctgggcgacagagtgagactctgtttaaaaaaaaagaaaaagaccctgcagaaattaaaattgtaaaaatataaatatacaaggaacaggcaccagg

SEQ ID NO: 23316 - DNA, 201 bp, Homo sapiens
gtttttttgttttttttagacggagttttgctctgcctcccatacaggctggagtgccgtggcacaatcttagctcactgcaacctctgcctcccaggctyaagctattctcctgcctcagcctcccaagtagctgcgattaacaggtatgtgccaccacgcccagctaatttttgtattttaactaaagatagtttcacc

SEQ ID NO: 23317 - DNA, 201 bp, Homo sapiens
caagtacagggtaacagaagggccagcaggaggacacggtgcaatggtgtaccgagggacaggagagtgaatcagagccacaggacagagctccacctgtytccagggaagtgcatggggggctcccggaagccaaaggcagcgcccagaggcagtgtgaagaggccttcctcagacctcagggtttcggcagggatagtg

SEQ ID NO: 23318 - DNA, 201 bp, Homo sapiens
agagggcaaacatggacagaaacttaatatttgagaaatactgagtttgaggtgctttgtaggccatctgagaataaatgcctcgtaggcagttgacatgyggggatctggaaagcctcttaaagaaatggtgagagatggagacttgaaaatccaagcacctagacgcccgtgatgggagtagttaacatggccctggga

SEQ ID NO: 23319 - DNA, 201 bp, Homo sapiens
gccttgtctagaaagatagtctcctgcagttctgcagttgctaccgctggccgggaaggtgtagattccgctttccctctgcgcacgcgcggctcccggcrcaaaattctcttgaatcgaacttatttgcatacgggcgcgcgcacgttgcgggctgggagggggagaagtcccggcgaccgcgcgcgctcccgaggcctc

SEQ ID NO: 23320 - DNA, 201 bp, Homo sapiens
aaccccgtctctaccaaaaatgcaaaattagccgggcgtggtggcacatgcctataatcctagctacttgggaggctgaggcaggagaatcccttgaatcyaggagacagaggttgtggtgagccgagagatcaagccattgcactccagcctgggcaacaagagctaaactctgtctcaaaataataataataataataa

SEQ ID NO: 23321 - DNA, 201 bp, Homo sapiens
ttttgggaggtcgaggtgggtggatcacaaggtcaggagtttgagaccagcctggccaatatggtgaaacctcgtctctactaaaaatacaaaaaaattasccgggcatggtggcacgtgcctgtaatcccagctacttgggaggctgaggcaggagaattgcttgaatccgggaggcagaggttgcagtgagccgagatc

SEQ ID NO: 23322 - DNA, 201 bp, Homo sapiens
aatcactgtcctaaactccagctagagttaatcattcatttttctgtaacacctcagtggccatacatgtttcgtttgtaacacttatgtaattctaatayatgttttgtccccagttatactttttctatttcttctattgttacaattgctaatacagcacctggaatatgaaaaacattcaataagtgttggctgatt

SEQ ID NO: 23323 - DNA, 201 bp, Homo sapiens
ctgctactctaggaaatatactctgataatcactgtcctaaactccagctagagttaatcattcatttttctgtaacacctcagtggccatacatgtttcrtttgtaacacttatgtaattctaatatatgttttgtccccagttatactttttctatttcttctattgttacaattgctaatacagcacctggaatatga

SEQ ID NO: 23324 - DNA, 201 bp, Homo sapiens
tatataggcatatatctttttcctaaactagtggttgtcaaattttaatgtgcttcggaggacaagatttctaacttattcctatgttttttttttttttktttttttttttttttgagacagagtcttgctctgtcacccaggttggagtgcagtggcaccatcacggctcactgcaagctccgcctgctgggttcacac

SEQ ID NO: 23325 - DNA, 201 bp, Homo sapiens
aatgtaaatatataggcatatatctttttcctaaactagtggttgtcaaattttaatgtgcttcggaggacaagatttctaacttattcctatgttttttktttttttttttttttttttttttgagacagagtcttgctctgtcacccaggttggagtgcagtggcaccatcacggctcactgcaagctccgcctgctgg

SEQ ID NO: 23326 - DNA, 201 bp, Homo sapiens
cactccagcctgggcgactgagcgaggctctgtctcaaaaaaaaaaaaaaaaaaaagaggttcagcttctcattcaaggatgcttggtatttctcacaccscagtatggcaatattattgttgacatgttgaaggatttctgtaccggttggtaaagagccacttccctgagctccccagagtcccctccctgcttcccta

SEQ ID NO: 23327 - DNA, 201 bp, Homo sapiens
gaacccaggacgcggagctttcagtgagcggagatcgagccactgcactccagcctgggcgactgagcgaggctctgtctcaaaaaaaaaaaaaaaaaaaagaggttcagcttctcattcaaggatgcttggtatttctcacaccccagtatggcaatattattgttgacatgttgaaggatttctgtaccggttggtaaa

SEQ ID NO: 23328 - DNA, 201 bp, Homo sapiens
ctcaggtgatctgcctgcctcagcctcccaaagtgctgggattataggtgtgagccaccgcacttggcccctattttctttgtaaattacccagcctcaartatttctttacagcaacacaagaaatatacaaatgacaatatgcagccatttgtatattgtctgcatcccaaattcaatgtaaacttcacgaatataaag

SEQ ID NO: 23329 - DNA, 201 bp, Homo sapiens
cctattttcttccttttttttttttttgaaaaggagtttcactcttgttgcccaagctggagtgcaatggcacaatcttggctcactgcaacctctgcctyctgggttcaagtgattcttctgcctcagcctcccgagtagctgggattagaggcatgcaccaccacgcctggctaattttttgtatttttagtagaaaca

SEQ ID NO: 23330 - DNA, 201 bp, Homo sapiens
ccttaagattctttaccagttgtgtggtcttaatttcacaaattgaggaatctgatccatagatggttccacttgaacgtggtgggagggtaacattctcyttccatgaaatgtaaagactgcattgtgggacatggaggggctccatgagatccatttagttgcattcatcctcctgtccccaaagtatatcagtaaatg

SEQ ID NO: 23331 - DNA, 201 bp, Homo sapiens
gctactcggcaggctgaggcaggagaattgcttgaacctgggagacagaggtttcggtaagccgagatcctgccactgcactccagcctggcaacagagcragactctgtctcaaaaaataaaataaaataaaataaaatggattcaggtgataacactctttcctgcctacggaccctgtccctctatcctaagaggtgt

SEQ ID NO: 23332 - DNA, 201 bp, Homo sapiens
aaattctctagtagtctagtagtcatgttagaaaaagtaaaaagaagtcaggcaccatggctcacgcctataatcccagcactttgggaggccaaaatgaaggatcacttgagcccaggagttcaagaccagcctgggcaacatggcgaaaccatgtctctacaaaaaataaaaagattattcgggcatagtggcatgcgc

SEQ ID NO: 23333 - DNA, 201 bp, Homo sapiens
acgcgggaagggagggagccggccccgagactgcatcattccgcaccggctgctgcagggccagagggagcaggtggagcgagagagcgagccgcgagccrgagcgcgccagacccagggcgagactgcagtgacgcggcccgggagacatggcggacgggcgtctctgaataagcagaatccggagcccctcgctacccg

SEQ ID NO: 23334 - DNA, 201 bp, Homo sapiens
tctaagaaatgtgccccaagaagcattaacctttgttttgtgccatcctgaagacttgcacattttatttttcagatagcttaacatttttaatcgagtgygttctctaccatgcggtaatgctttggtactattcatacagggtcttgcctatcctaaagacttgccatttccccaagaggagctttgattctgctttag

SEQ ID NO: 23335 - DNA, 201 bp, Homo sapiens
agtctcgctctgttgcccaggctggagtgcagtgccacgatcttggctcactgcaaccaccacctcccaggttcaagcaattctcctgcctcagcctcccragtagctgggactacaggtgtgcgtcatcacacctggctaatttttgtatttttagtagagacagggtttcgccatgttggccaagctcatctcaaactc

SEQ ID NO: 23336 - DNA, 201 bp, Homo sapiens
cttgaagggaagatttcccaccggccattcacagcagagcaccccagtgccccacagatacaccctctcattgtgtgttatccctgccatcatttctgggsacatggagttgtctgattaggctgtctccacatcttaaattttttgagatggagtctcgctctgttgcccaggctggagtgcagtgccacgatcttggct

SEQ ID NO: 23337 - DNA, 201 bp, Homo sapiens
cagcttggagatgaagtcctggccccagaaggcactggtgtggaagccacacatctcccttgaaagtgcatctggaggtctcagtatgtgaagtgctcttraagggaagatttcccaccggccattcacagcagagcaccccagtgccccacagatacaccctctcattgtgtgttatccctgccatcatttctggggaca

SEQ ID NO: 23338 - DNA, 201 bp, Homo sapiens
ttcacgtgtttgtctgctgaccctctccccacaattgtcttgtgaccctgacacatccccctctttgagaaacacccacagatgatcaataaatactaagrgaactcagaggctggcgggatcctccatatgctgaacgctggttccccgggtccccttatttctttctctatactttgtctctgtgtctttttcttttcc

SEQ ID NO: 23339 - DNA, 201 bp, Homo sapiens
aaaattaaaaactttcattttttaaaggaccactttatttatttacttattattttgagacagaatctcaccctgtcacccaggctggagtgcagtggtgwgacctccgctccaggttcaagcgattctcctgcctcagcctcccaagtagctgggattacaggcatgcaccatcacatccggcttatttttttatttttg

SEQ ID NO: 23340 - DNA, 201 bp, Homo sapiens
tgatcagtaagcaccttcaggaggctggtgaggcttatcggtctcagcctgctgctgccacgaccccctggactaggcctcaggcaaccggaatttaagcytctgcaacatctagaagcataagttctcttcttcagtttcttcacctataaaaaaaacagagtttcactctacgatttttaaagtttgttgtatcatcta

SEQ ID NO: 23341 - DNA, 201 bp, Homo sapiens
ttctaggtatgaccgaccatcaaaccaaggggaaagaagaagaaaacagttttgatttgatttgattaggaagcaggcatgtatatgatgaggcataaagmccatgtgggggaaaaaactggggagaaacgtagcaatgtgaaggatttccagaggggcctttagaaacctaaaaagctaatctctgaagttgtccatgag

SEQ ID NO: 23342 - DNA, 201 bp, Homo sapiens
ggctgtagtgcaccatgatcacacctgtgaatagtcgctgcagtccagcctagacaatatagtaagactctgtctctaaagataaataaataaatcccagmtgaattagagatccaaatataaaataaaaccaaaaactatatcatgagcatttatcttctcttcaaatgaaagcacgttccaagcttaaacacaaaagaa

SEQ ID NO: 23343 - DNA, 201 bp, Homo sapiens
gatgggttggaatatcttagaaagaggcatcagttttcaggtactaattgcttgggttctaggtatgaccgaccatcaaaccaaggggaaagaagaagaamacagttttgatttgatttgattaggaagcaggcatgtatatgatgaggcataaagaccatgtgggggaaaaaactggggagaaacgtagcaatgtgaagg

SEQ ID NO: 23344 - DNA, 201 bp, Homo sapiens
ctgaatagaaagatgaaagacaatttctggatgggttggaatatcttagaaagaggcatcagttttcaggtactaattgcttgggttctaggtatgaccgmccatcaaaccaaggggaaagaagaagaaaacagttttgatttgatttgattaggaagcaggcatgtatatgatgaggcataaagaccatgtgggggaaaa

SEQ ID NO: 23345 - DNA, 201 bp, Homo sapiens
gatagctctctctccgtcacctactgcatctacaccatgtctagtgtcatcggttctatctccaacatgtctcaaatccatacttctctgccatcacctgktccaaactagcatcttctctgccctaacctatcgcctataacctcctaactggtctctcttctcttttgtccttcttccattaattctcttttttaaagg

SEQ ID NO: 23346 - DNA, 201 bp, Homo sapiens
tttactgaatagaaagatgaaagacaatttctggatgggttggaatatcttagaaagaggcatcagttttcaggtactaattgcttgggttctaggtatgmccgaccatcaaaccaaggggaaagaagaagaaaacagttttgatttgatttgattaggaagcaggcatgtatatgatgaggcataaagaccatgtggggg

SEQ ID NO: 23347 - DNA, 201 bp, Homo sapiens
tctcaaaaaaaatttatatatatggagcaaggtctgaatctttagtttttcttgctatagaaattttttttcttttatttactgaatagaaagatgaaagmcaatttctggatgggttggaatatcttagaaagaggcatcagttttcaggtactaattgcttgggttctaggtatgaccgaccatcaaaccaaggggaaa

SEQ ID NO: 23348 - DNA, 201 bp, Homo sapiens
catgagcatacaagacctggaatgcactttaaaatgtgtactgccaaagctgggcacagtggcacgtgtctgtagtcccatctgcttgaaaggctgaggtsggaggatcgcaggaacccaggagttctgggcagcagtgaacagtgactgcgattgtgagtagccttcactacggccgggcaacataacaggattctgcct

SEQ ID NO: 23349 - DNA, 201 bp, Homo sapiens
cttgaaaggctgaggtcggaggatcgcaggaacccaggagttctgggcagcagtgaacagtgactgcgattgtgagtagccttcactacggccgggcaacrtaacaggattctgcctctaaagaataataaacataaaattaacttcctacccactgtctttcagggcaagccataactgtgaagggaaacaagttaagga

SEQ ID NO: 23350 - DNA, 201 bp, Homo sapiens
ttgtagagacagggttgtgccatgttggccaggctggtctcgaactcctgacctcaagtgatctgcccaccttggcctcccaaagtgttgggattacaggygtgagccactgcacctgacctcgaagagggtttcttgatagagtaaacagaagaaattaaaagttaacaattaattgacatgtacttgactggtttcccg

SEQ ID NO: 23351 - DNA, 201 bp, Homo sapiens
aaaacagaaatctcagtaaactagatgattaacataaagatataatggccaaaattgactcaacaagttgaaaacctaaaacttatggtgaaagaagaaartatttaagttatcaaagaaatatttgttagacatttcccaggctcagatagttttactgtttaattattttaaactttccatagctagacaaaaatacac

SEQ ID NO: 23352 - DNA, 201 bp, Homo sapiens
tttcaccatgttggtgaggctggtctcgaactcctgacctcatgatccactcgcctcagtctctcaaagtgctgggattacaggcgtgagccaccacaccyggcctcacattttctttctattgcaatctcttagatctctcctagaagactgtggggattctagaaaaaatgtatattttctaggggaaaaagaaggcag

SEQ ID NO: 23353 - DNA, 201 bp, Homo sapiens
atgcacgaccacgctgggctaatttttgtatttttagtagagactgggtttcaccatgttggtgaggctggtctcgaactcctgacctcatgatccactcrcctcagtctctcaaagtgctgggattacaggcgtgagccaccacacctggcctcacattttctttctattgcaatctcttagatctctcctagaagactg

SEQ ID NO: 23354 - DNA, 201 bp, Homo sapiens
ctcccgagtagctgggattacaggcatgcacgaccacgctgggctaatttttgtatttttagtagagactgggtttcaccatgttggtgaggctggtctcsaactcctgacctcatgatccactcgcctcagtctctcaaagtgctgggattacaggcgtgagccaccacacctggcctcacattttctttctattgcaat

SEQ ID NO: 23355 - DNA, 201 bp, Homo sapiens
ttttgtttctttttgtttgtttgtttgagacggagtttcactctgttgcccaggctggagtgcagtggtgcaatcttggctcactgcaacctctgcctacrgggttcaagccattctcctgcctcagcctcccgagtagctgggattacaggcatgcacgaccacgctgggctaatttttgtatttttagtagagactggg

SEQ ID NO: 23356 - DNA, 201 bp, Homo sapiens
aagtcaaaagaagatttgaaatgctactgaaaaaaaaaaaagaaggctgaaaactggtttgcaagattctctggggcatcaaaggcatcttaagaaccacscttgcacgttcattagacagccctttaatcaatgtatctttaatagactgctggaaatactcaaaggcaagtaattttcatgtcataaattaaacaaagt

SEQ ID NO: 23357 - DNA, 201 bp, Homo sapiens
gactgtgtggttgttaaactttctaagtgaaacaccatagtgtcgggagcaatgccgacaagcctggccacctttggtctacagcagatattgcaagctgrtatcccgtggccacagtcaggcttggtgattgataaacattttgatttagggagctgcttttttcaagaaacagaatcacataaacaggatttcaggcca

SEQ ID NO: 23358 - DNA, 201 bp, Homo sapiens
agtaaataccacaaggttacaaaaggtacaaaaatgtgtgaaacatttaaatttcagagggaaatccacacttctgcaaggttgaagtttctcatatcaamttctcattcccagtggaaaacaaggtggggagggttgggaggtttttgtcctcagtagcctgctttttcccacgtaggactccactttatactacttcac

SEQ ID NO: 23359 - DNA, 201 bp, Homo sapiens
tgtcaggtttcatgattatataaaggccagacttagatctggccacacatattatacctgaacatttcttcttatttctacttaatgttttttatttatamaataaaagtcttattgtattatctgtaagctaacatatgcctataagacatgtagcttaaattttaaaaacaggacagaataatcccttcgtgatttgaa

SEQ ID NO: 23360 - DNA, 201 bp, Homo sapiens
aataaaatcatgtgtcaggtttcatgattatataaaggccagacttagatctggccacacatattatacctgaacatttcttcttatttctacttaatgtyttttatttataaaataaaagtcttattgtattatctgtaagctaacatatgcctataagacatgtagcttaaattttaaaaacaggacagaataatccct

SEQ ID NO: 23361 - DNA, 201 bp, Homo sapiens
gctccatgacttgcgctaagaggtactctgggcaccctcctccttgccctcagcactggtatctccatctaatgttacaccccttccccaggatcgtctcmtagctgatattttatgtctccctccttgcttttattcccttccccaaatcagctcataagcagaaattcacatttagagcagggtggtcttctgtggcac

SEQ ID NO: 23362 - DNA, 201 bp, Homo sapiens
agcccatggtcccagctactcaggaggctaaggagggaggatcacgcattcagaaggtcgagactgcagtgagccatgattttaccactacactgtagcckgggtaatagagtgagactctgtctcaaaaaaataataataataaaataaaacatatgttaactttgctgctaattagtttaagattctgaatttgcaaag

SEQ ID NO: 23363 - DNA, 201 bp, Homo sapiens
ttctttttctgaggcaggtcttgctctgttgcccagccttgagtacagtggtgcgaacacaattcactgcagccttgacctcctgggctccagtgattctyttgcctcagcctccctgtagctggaaccacagatgtgcaccactgtgcctggctaatttttgtagagaaggggctcactatgttgcccaggctggtttcg

SEQ ID NO: 23364 - DNA, 201 bp, Homo sapiens
ctgcagttcagaagaaatgtaaaacagtgaatgtgcttattactaaaagaaacagctaatatattttttaaaccccaacaaaatcaactacaaatattagraaaaagaattaataagatgaaagagaaaataaattatttaggaacacaaaataataaaagaaagaaaatagtaaaaataagaaccaataaaatagacgaa

SEQ ID NO: 23365 - DNA, 201 bp, Homo sapiens
cccccaccttttttttttgagacaggatgttgctctcaggctggagtgtggtgatgttatcttggctcactgtagcctccatcttgccaggcttaggtggkcctcctacctcagcctcctggatagctgagactacaggcatgttccatcacacctggctaattttgtattttttgtggagatggggttttgccatgttgc

SEQ ID NO: 23366 - DNA, 201 bp, Homo sapiens
tgaatcaagggggcagttacctccatgctgttctcgcgatagtgagttctcatgagatttgatagttttataagaggctttcggctttctcccttttgctstgcacttatccttgctgccaccatgtgaagaaggacatatattgtaagtttcctgaggcctccccagccatgctgaactgtgagtcagttaaaccccttt

SEQ ID NO: 23367 - DNA, 201 bp, Homo sapiens
cacccaaatctcatattgaattgtagtttccataatccccacgtgtcatgggagggacccggtgggaggtaactgaatcaagggggcagttacctccatgstgttctcgcgatagtgagttctcatgagatttgatagttttataagaggctttcggctttctcccttttgctctgcacttatccttgctgccaccatgtg

SEQ ID NO: 23368 - DNA, 201 bp, Homo sapiens
gctgagtgcaataaaaaactagcccttaaatggaatgaatgagttgactacttggtaaggatgctcagaggctaaaactgaatcaaagcaggaactcttaraagtaagcagtgtgttggctaggcgcagtggctcagcctgtaatcccaacactttgggaagccaaggcaggtggatcacttgagctcaggagtttgagac

SEQ ID NO: 23369 - DNA, 201 bp, Homo sapiens
accttcaggaggctggtgaggcttatcggtctcagcctgctgctgccacgaccccctggactaggcctcaggcaaccggaatttaagcttctgcaacatckagaagcataagttctcttcttcagtttcttcacctataaaaaaaacagagtttcactctacgatttttaaagtttgttgtatcatctaattccaaaggga

SEQ ID NO: 23370 - DNA, 201 bp, Homo sapiens
atctttgccagatacctaattgtatcttgataaataaaagttacttttaatggctaagtactttaaaatattatcttaagttacttttagaatttataaayatttctccctctttttaacccctttaaggtaaagagtcccaaagcagctttagggagggaaaaaggtcacagtgggaccttggcctggccttaactgtca

SEQ ID NO: 23371 - DNA, 201 bp, Homo sapiens
gtggtcctgtggtctaagacatctgactaaccttcctgctagcaacaattaaaaatgctgagtgcaataaaaaactagcccttaaatggaatgaatgagtygactacttggtaaggatgctcagaggctaaaactgaatcaaagcaggaactcttagaagtaagcagtgtgttggctaggcgcagtggctcagcctgtaat

SEQ ID NO: 23372 - DNA, 201 bp, Homo sapiens
cacacctcacgaagctcagccaccaactcaaaaaggactggacaatacttttaccactttcgcttctcagaattcaggcctgtcctcagaatgctacaagrtacagcccatttaagctcctgtatagacgctcctttttattaggccccagtctccttccagacaccagaccaacttagactgtgcccccaaaaacctgtc

SEQ ID NO: 23373 - DNA, 201 bp, Homo sapiens
ggctcttccaaatcaaagagaggtcacatcatgcatagtattatttgggggttagcatacgttttgtaataattatgttaaaattggtaatccctttttgrgttcaatgatagctctattaattatattgtcttgttaactgaaatattccactctgtcaatgggattaatggttggagattatgatacaaccaaaaccaa

SEQ ID NO: 23374 - DNA, 201 bp, Homo sapiens
agagtgacataattagctttatgttttaaagcggatttttgactttagattctggcaatacagtggtcctgtggtctaagacatctgactaaccttcctgmtagcaacaattaaaaatgctgagtgcaataaaaaactagcccttaaatggaatgaatgagttgactacttggtaaggatgctcagaggctaaaactgaat

SEQ ID NO: 23375 - DNA, 201 bp, Homo sapiens
ttgtcgctcaggctggagtgtagtggcacattcttggctcactgcaacctctgcctcctggattcaagtgattctccagcctcggcctcccaagtagctgrgattacaggcgtctgccacctcgcccagctaatttttgtacttttagtagagaaggggttttgacatattggccaggctggtctcgaactcctgaactca

SEQ ID NO: 23376 - DNA, 201 bp, Homo sapiens
aatattttattattacccttagtatcctggggcctggggtgttgtaaggggtaagtttatctatctatctatctatctatctatctatctatctatctathtatccaaatcatgtttgtgtgtgtgtgtgtgtttttttttgagacagggtcttgctctgtcatccaggctggagtgcagtcacacaatctcagctcactg

SEQ ID NO: 23377 - DNA, 201 bp, Homo sapiens
tagaaagatgagatctagtttgcaaaccagaagtctcaatactcgtagcagtggttttcacagcatgtatatcatcatgtatgtatgatgcatatatcaayattaaacgtatgaacaatctcaagcattagcacgagaatacctaaagatgtgaacactgactgtgtatattgtgttttcattgcttaaattttcttaaaa

SEQ ID NO: 23378 - DNA, 201 bp, Homo sapiens
tagcagaggtaatgaaaaatcataggagttgcttcaacttttcaccttacaaagatctttcacctccgtcatctcacttgatttctgtgactgccctgtgmagttagtattattattattctcatgtgacagatggtgaaaccgaagcccagtggggttaagtgactttaccatggccacatgggacatgaatctaagtct

SEQ ID NO: 23379 - DNA, 201 bp, Homo sapiens
ggtcaggctggcctcagactcccgacctcaggtgatccgcctgcctcggcctcccaaagtgctgggattacaggcgtgagccactggcccggccagagctrcgagttcttaaagcactttattctttgtatctcagtgagaaggcatcaccatgctctaacttagggatgatggcatcttgaattagttgtgcagcagaga

SEQ ID NO: 23380 - DNA, 201 bp, Homo sapiens
ggtatttcatgttttgtgtagcaattgcttcagttgtccattccaatttttcagttgtactaaatgcttcaggagtgatgtttagaaacatgaaaaaaaaatcaccaactctgttttttttttcacgtggctcatttgcatcgcgtatgccttaaaatgcattcattagcttgttgctttataagttggaggtccattttg

SEQ ID NO: 23381 - DNA, 201 bp, Homo sapiens
gcttgaatccaggaggtggaggttgtagtgcaccgagaccatgccattgcactccagcctgggcaagaagagtgagactccccctaaaaaaaaaaaaaaaagagagagagagattgtttgcatctacaatgttcattttcagcctccatccagaagagccaagtatggtttggacctaatattatgaagtaaatagcttta

SEQ ID NO: 23382 - DNA, 201 bp, Homo sapiens
cacagtgctagattagagatgtaaaaagtgctagaagaacgctggggaaggaacagttacttctacttggggaacccacaaacaacacagacagtgacttrtgccttgaagggtaagaataatttctaaaaacaggaaaaagatgctatttagattttgttacaaagaggtcaagaaaacaattatagattttaaaaatca

SEQ ID NO: 23383 - DNA, 201 bp, Homo sapiens
agttaatctatcatcagtaataataattagagaaatataaatttagttatattttataacacagtgtttattccagatttaaaatgttataaggatatatyagtttatttgatactcaaaactattacatgagctaggtactgttattatcttactatatagatgaagaaactaaactaggtccatcatgtaacctgtcca

SEQ ID NO: 23384 - DNA, 201 bp, Homo sapiens
actttttaaggtatattgcttatttaaaataacaaaaaatctatagttaatctatcatcagtaataataattagagaaatataaatttagttatattttayaacacagtgtttattccagatttaaaatgttataaggatatattagtttatttgatactcaaaactattacatgagctaggtactgttattatcttacta

SEQ ID NO: 23385 - DNA, 201 bp, Homo sapiens
tataaactggaggataaggtacagcgggagaaagcaagtaccagcagacacagagggggctgagactcctgcaagcagcgcctttcctcaggctcactggrtgtgctctgtgtttgggtgtgaaccaccaagatgcatgcatgatatctgttttcagggaagccaagatacaagtgtacagaaaagccattatacccccgt

SEQ ID NO: 23386 - DNA, 201 bp, Homo sapiens
ctcagcacatgtgtaacaacaaaacaaacactttttaaggtatattgcttatttaaaataacaaaaaatctatagttaatctatcatcagtaataataatyagagaaatataaatttagttatattttataacacagtgtttattccagatttaaaatgttataaggatatattagtttatttgatactcaaaactattac

SEQ ID NO: 23387 - DNA, 201 bp, Homo sapiens
caacagatatagaataatagcactttaaagatgtttaagagtaaagcacaaaccatgtatataccaagacttagctaattctctgagagttataacttaasacaataaaataattaaaaatagtgttaacattaagtagaatgcaaatctctatagatggtttcctgggaaagtagttttgataagctttcctagcattga

SEQ ID NO: 23388 - DNA, 201 bp, Homo sapiens
acttttagcttcccatcctcttgaacaagtattctcatgtattatttagtgaacaagcaaatttataaaataagttacattttaaattttctttaaaatakattctgtatacaagctatcttttgagatattcctaatgtttaacatttctgatatccaaatcctctgtgggatgtctaatggtcttcttctgttctttga

SEQ ID NO: 23389 - DNA, 201 bp, Homo sapiens
ccaggaggaggaggttgcagtaagctgagattgtgccattgcactccagcctggatgacagagcaagagtctgtctttaaaaaaaaaaaaaaaaaaagtargcttacacatattccctttactgtttttcaaggtcattacatttttatctgttattgttcaccatttaaaaataagcagtggaaagcagcctacttttta

SEQ ID NO: 23390 - DNA, 201 bp, Homo sapiens
gcagaaaataaacagaaagtataggatctcccctatctatgcatgaaatgatctgaggaagaaagtcaaatcatcctcatgagctacttcttgtttcctaraggaaaatattagttgttagcaaatttataacaatcgtgatagacttttagcttcccatcctcttgaacaagtattctcatgtattatttagtgaacaag

SEQ ID NO: 23391 - DNA, 201 bp, Homo sapiens
cactttaattgaagccacagaattgggtttcagttctgtttctttcagctacatgtgaacactgacaaattatttaactgcaaaattctgtttaagcagcrgaaaataaacagaaagtataggatctcccctatctatgcatgaaatgatctgaggaagaaagtcaaatcatcctcatgagctacttcttgtttcctaaag

SEQ ID NO: 23392 - DNA, 201 bp, Homo sapiens
ggaaatcagaacagaacaaagcattcctagctgaagttttattttcactgtgctttgtggtacaggttgagtatcccttttccgaaatgttttgggggacragaaatgtttcagattttggattttggacatttgcatatatacataatgagttatcttggggatgggatccaggtccaaacatgaaatttacttatgttt

SEQ ID NO: 23393 - DNA, 201 bp, Homo sapiens
ggaggaatctcagcttgtggctgacgttttaatgttaagttattggaatcaaaataataatagcacctgctctttgtatacaaaacgtgaccatgaaagaytgtgtaaatatttcattagactgatggtgaattgttatgttttttacactttaattgaagccacagaattgggtttcagttctgtttctttcagctacat

SEQ ID NO: 23394 - DNA, 201 bp, Homo sapiens
ccgtggctgaaacaaagttttgactgccactcatgacatgaggtcaggtgtagaattttgtggctcatgtcagcactcaaaaggtttcagattttgaagcrttttggattttggattaaggatgctcaacctgtaccatttgcattacattagagttacagtctatatgggctcagtaaattaaatgaaaacacatttcta

SEQ ID NO: 23395 - DNA, 201 bp, Homo sapiens
acaatcttcaggaagctgttggttcgggagtaaaagcgtgagactaagaagtgagcatccaagtactgaggcgtcaaccagctgggaagatagcagctctyaggtcgaacatatgtggcctgagatgacaaaagaaagtgaagggtcttagtatcatgacatccgaagacagttgttactgagaatggaggcttctcaact

SEQ ID NO: 23396 - DNA, 201 bp, Homo sapiens
cctcatatgcttcactgtttagggagtaatgcacagtaacaaccttctggtgattacattcaagctgctttggttctggaacaatcttcaggaagctgttsgttcgggagtaaaagcgtgagactaagaagtgagcatccaagtactgaggcgtcaaccagctgggaagatagcagctctcaggtcgaacatatgtggcct

SEQ ID NO: 23397 - DNA, 201 bp, Homo sapiens
cgttctatgtgtttgtttgttgttaatggatcgaacagtattcaccagcaaagtgagaaggctgcccttactctggtcaccgtggcatgactgatgcatgmtttctaagctgtgctgggctaagcagacgtgcaattgaacaggattccaggaacccactgactgagacttaccaaatagaagaactttacattggaatca

SEQ ID NO: 23398 - DNA, 201 bp, Homo sapiens
gttactttcaaatagattttatttctatgagatggtaaacagaaagcctcatctccttaaatgcacaatttctccattctggagaatcaactatagggtgrggcactgattttcaacattagtagaatattgtatagtaattgattaatgcattatactgatcggtttgctgcattagtacaaccttttaagggaaaattc

SEQ ID NO: 23399 - DNA, 201 bp, Homo sapiens
aaagataacatctcaataaggttaaaaattaataatcaatgttaacaacaataactgttttcatttttgtatgactggtttttgtttacatgaatatataytttatattgttatcattacattgtttaagccatgaacattatatcacaagcttttccatgttgctatctagtcttgtttttatttgttaaagttattgta

SEQ ID NO: 23400 - DNA, 201 bp, Homo sapiens
aacacacacacacagacacacacactcacttgcacacctgactttgaatcttattcaaaatgaaatgacagtattgaagttttaaagaaggggaatgatamccgtgcaacacaggtgagccccaaaattggggcttagcctggggaagtccttggctttacccaggaaataattcaagggtgagctgatagtagaaaacag

SEQ ID NO: 23401 - DNA, 201 bp, Homo sapiens
ttaacaattactgtcacatggtcactgttacatgttagccaatagtgcctcacattcactgtggcttccaaagcttgggcttggggaagcaggtggatggygatatcatgagctcagatagagatcatgggagaagagatttgagatgttttaaaaaagtgttttgagcagatgaagttaaagagttaaagggaactatgg

SEQ ID NO: 23402 - DNA, 201 bp, Homo sapiens
ctgtgctgttccaccgtccatctgctggtatcctcctctactcacctgctgctctgctgtggagcttggggtttgcggtttacgtgggggcaggatagagrgtgtggagggacaaaaggcaacctctttgtcttgaaaacaggaatgcctgtcctcatttagggccgcaggtcttcaggcttgaaggtgaggtctttgcca

SEQ ID NO: 23403 - DNA, 201 bp, Homo sapiens
ttgggaggcagaggtagggggattgcttgagcccaggagttctaaaccagcctgggcaacgtagtaggaccttgtctctataaataaataattaatttaawtttttttttaaaaagacaggcctgaggtccaaaccgaaatggcctcccgactccattttatgtgctttgactaacccgtcactgtttcccttcatcattt

SEQ ID NO: 23404 - DNA, 201 bp, Homo sapiens
ttaaaaagacaggcctgaggtccaaaccgaaatggcctcccgactccattttatgtgctttgactaacccgtcactgtttcccttcatcattttgttaagwtgctggacaagccccagttctagccaccctttttagttactcatcactgaatgctcccatgtgtatacaggcagcacatgttaaaaaactttttcggcca

SEQ ID NO: 23405 - DNA, 201 bp, Homo sapiens
tgcttgaatccaggaggtggaggttgtagtgcaccgagaccatgccattgcactccagcctgggcaagaagagtgagactccccctaaaaaaaaaaaaaaragagagagagagattgtttgcatctacaatgttcattttcagcctccatccagaagagccaagtatggtttggacctaatattatgaagtaaatagcttt

SEQ ID NO: 23406 - DNA, 201 bp, Homo sapiens
atgcttgaatccaggaggtggaggttgtagtgcaccgagaccatgccattgcactccagcctgggcaagaagagtgagactccccctaaaaaaaaaaaaaraagagagagagagattgtttgcatctacaatgttcattttcagcctccatccagaagagccaagtatggtttggacctaatattatgaagtaaatagctt

SEQ ID NO: 23407 - DNA, 201 bp, Homo sapiens
aatggttgatcagacccttgaatgttgagctctttccatactagacttgaatattctcctgcccatttgatttgttaattaggattcattggctgtttctstgctctcctcttttctctctgttcctgctggttcaagtttaacctccattttctttctcctctgggaagtttcccttatgcctcttgaacagggtcaaga

SEQ ID NO: 23408 - DNA, 201 bp, Homo sapiens
tcctgcgttcacgccattctgcctcagcctcccgagtagctgggactacaggcacctgtcaccatgtccggctaattttttgtatttttagtagagacggrgtttcaccgtgttagccaggatggtctcgatctcctgacctcgtgatctgcccacctcggcctcccaaagtgctgggattacaggtgtaagccaccgcgc

SEQ ID NO: 23409 - DNA, 201 bp, Homo sapiens
ataaaaaaataaaaaataaataaaataaaataaaaacgtttttatcttgttaatctgtcttttgtcaatctaatttacagggcccagcctgtaaatctaaratgagtagaaggaaaaagaatttttcccctcctgggcagaacactcttgggcacgtgagccttggcttcttaaccacatatctgagcagccagtgtggca

SEQ ID NO: 23410 - DNA, 201 bp, Homo sapiens
ccacaacctttacacaaaggaggaagagtgaaatgaatattgaacatagttgttaactgacataacatcatttgaacttacctaaatgttaggtttttttrttattattattttattttttatttttatttttttgagatggagtctcgctgtgtcacccaggctggagtgcagtggcgtcatctcagctcactggaagct

SEQ ID NO: 23411 - DNA, 201 bp, Homo sapiens
cccatgtattcccacgtgtgttagaacatcatggtgccccgcttttgcatattaaaaggctatggtgggagggccagctttttcgcagatatgtgaatgayatgcctagtcaaaccaatcccctgagccctatgcaattcagacaccgcctcctccagcctctgtgtacatatatctagctggtatctgtggcaggtcggg

SEQ ID NO: 23412 - DNA, 201 bp, Homo sapiens
accatgttggccaggctggtctcaaactcctgacctcaggtgatccgcccgccgcagcctcccaaattactgggattacaggtgtgagccactgcacccgkcctttcaaagctcatttcaatcccacctccgtcacaaagcattcttcagccaccttcgttttcatcctttttttctctgcactctttctacccttatcat

SEQ ID NO: 23413 - DNA, 201 bp, Homo sapiens
tttaaaaattttcagttctctgaataccattttacatataacatactgtgagaaaataccgttatccatttctgagtcttgggtcatttagacttttctgyttatagcatgagaaaagaaagtacgattaaaaaaaaatgggggataaaagcctctcagataatacccccatgaaattggactgactcagatgttataata

SEQ ID NO: 23414 - DNA, 201 bp, Homo sapiens
taaaaataccaaaaaaattagccgggcgtggtggcggcatgcgcctgtaatcccacctactcaggaggctcaggcaggagaatggcctgaacccgggaggyggagcttgcagtgagccaagatcgcgccattgcactccagcctgggtgacagagcaagactctgtctcaaaaaaaagagaaattcatcaaaattctaaca

SEQ ID NO: 23415 - DNA, 201 bp, Homo sapiens
tgttgttgttttgttttttgagacggagtctcgctttgttgcccaggctggagtgcagtggcgtgatttcggttcactacaacctccacctcccaggttcsagcgattctcctgcctcagcctccagagtagctgggattacaggcgcctgccaccacacctggttaatttttgtatttttagtagagacggagtttcacc

SEQ ID NO: 23416 - DNA, 201 bp, Homo sapiens
attcaaatcccagcattaccatctgcaatctataaccctagcctagtgtctaacttcctctgagctttcagtttcctcaactgaaaataggaaaaatacaygcctcactgggaaaactggtaagttataggagtaaataactagcatggcgcctgtcacaaaatgctagcaagcccccaaatatgagaagcaaggttgaga

SEQ ID NO: 23417 - DNA, 201 bp, Homo sapiens
cacgaggtcaggagatggagacgattctggctaacacggtgaaaccccatctctactaaaaataccaaaaaaattagccgggcgtggtggcggcatgcgcytgtaatcccacctactcaggaggctcaggcaggagaatggcctgaacccgggaggtggagcttgcagtgagccaagatcgcgccattgcactccagcctg

SEQ ID NO: 23418 - DNA, 201 bp, Homo sapiens
gaagggcagcttccggatgagcagctcggtcgacttctgataacgacgaatctctcgaagcgccacggtcccaggcctgtagcgatgaggcttcaccccgyaggtagagggggtgcttttcctggcagctttcgtggccagctgtttgcggggggctttcccaccggtggatttacgagcagtctgcttggttcgggccat

SEQ ID NO: 23419 - DNA, 201 bp, Homo sapiens
ttgttcacagcttctccaattccttcttgtatctgcccagcattgggttctgtaaaataataaacagtggctgcattctcatgggagagaaataaaccaargtactatgggacatcaactgtgtccacctaggcaggaaatacgtcatcagagcaggctggctttgccaggggctccatagaacttgcctctggcctgttt

SEQ ID NO: 23420 - DNA, 201 bp, Homo sapiens
  misc_feature (1)...(201): n = A,T,C or G, or insertion/deletion polymorphism (see Tables 1-2)
tggggggaaaaaaccctgggaatagggagatggcatgtgaagtggaagaaggttatgattttcaatagagtgatcagagaaagcctcattgagaagacacnctaaggaggccatgtggctggaggggactgagttagggggtgaatagtaggtgagaccagagggggccacatgatgtagcagcttctagattatcaggac

SEQ ID NO: 23421 - DNA, 201 bp, Homo sapiens
tattactgtagtcggacacactcccagctggcccagtttgtgcatgaggtgaagaagagcccctttggcaaggatgttcggctggtctccctcggctcccrgcaggtaaacagtagccagtatttccaccaggggccatcctgctcctttccccacaactttgtcctgctcgtccaggcctgggagacgctgggtctgtga

SEQ ID NO: 23422 - DNA, 201 bp, Homo sapiens
attacatttttagataatggtcacagtaagtcttttcagaaaaaagcaacgaagaaagctctagaccaatgagattttagtcatcattaatcaatgccaarcgaaaaaatcttaagatgtatttaaatttgtgatgccagtgtgattcagaaatttgaaaaatggatttcaaagtaatgctgtgagcagataggtcattgt

SEQ ID NO: 23423 - DNA, 201 bp, Homo sapiens
ctttctcatctttaaaatgaaaaaatcggttgctacctcatgtagtggtggtggtgaattaaagaaacccaagggaggaggcagaggttgcagtgagccamgattatgccacggtactccagcctaggcgatggagtgagactctgtttcaaaagaaaaagtaaaaggaaagaaacccaaaggagagctctggaaggggta

SEQ ID NO: 23424 - DNA, 201 bp, Homo sapiens
aatttagaagtagaaccctttcttaaggctgggcgcgctggctcacacctgtaatcccagcactttgggaggccgaggtgggtggatcacgaggtcaggaratcgagaccatcctaacacagatcgagaccatcctaacacagatcgagaccatcctgactaacatggtgaaacccccgtctctatgaaaaatacaaaaaa

SEQ ID NO: 23425 - DNA, 201 bp, Homo sapiens
ttttctactttctcatctttaaaatgaaaaaatcggttgctacctcatgtagtggtggtggtgaattaaagaaacccaagggaggaggcagaggttgcagwgagccaagattatgccacggtactccagcctaggcgatggagtgagactctgtttcaaaagaaaaagtaaaaggaaagaaacccaaaggagagctctgga

SEQ ID NO: 23426 - DNA, 201 bp, Homo sapiens
tcagtctcaagttggggctcttaaggttcaggaaaaaacaaatactacatgggtaacttaaaaaaagaaatctaaaggtctgtatgtttcatttcttacarttctgagatctgttttaaaagtaatggattgtatcgctcctatgtgccactttcaaaaaataaaggggtaggaaatagtcttaaagagaagatgatattt

SEQ ID NO: 23427 - DNA, 201 bp, Homo sapiens
tggggtaagtgtaagatttaatctctctattccttaagtgttcccatccacaaagtaagaaggctggatgaggtgtgtcaatcctagcacactaacctaaktcatcccccaggttgcctagacctgtcaggagcatggccttatgaagatacaaacatgaaatcctgggttggacccctctatagtttctgatcaccaaac

SEQ ID NO: 23428 - DNA, 201 bp, Homo sapiens
ctcccgaccagggcacagatctcacacatgcttccaacatcagtgtaatgccactgtgtcataaaggtcaagattaggggtttcatgacatatgaaaaacwttgggaaaataaatttttcaagaggtaatacttttggcaatttaattttaaaacaacttcttcaccagctattactatgcaaaaataatcattatggtcc

SEQ ID NO: 23429 - DNA, 201 bp, Homo sapiens
ccatgaagccagtccctggtgccacaaaggttgggggctcctccttagaaagacaaaatggacagaaccaagagaataaagtccttttactgcttatcaamataagctttccaccttactttctggcatctgcccaatattttactattacaaagtgtcataaatacttgatatgagttacatttgaatgcttaaacaagt

SEQ ID NO: 23430 - DNA, 201 bp, Homo sapiens
aatagaaataaagtgaacaataaatgtaatatgcttgaatcatcctgaagccatcccaccatccccaccccatctgtggaaaaattgtcttccatgaagcmagtccctggtgccacaaaggttgggggctcctccttagaaagacaaaatggacagaaccaagagaataaagtccttttactgcttatcaacataagcttt

SEQ ID NO: 23431 - DNA, 201 bp, Homo sapiens
aagtagagaaaaaaaagagatgagagtagagaccattttatgtaaagatgatctgaatacatttaatctctcctgaataaatccttatagatttctatackgtatttcctttgcccactctcaccctcagctttctttgcaggagacccccttcaccacgtgctgccgtctcaggattggcactgctgccaaggatcatgc

SEQ ID NO: 23432 - DNA, 201 bp, Homo sapiens
tgcccgccttggcctcccaaagtgctgggattacaggcgtgagcacagcacatggccatattccatatttatagataaatttatcctttatttgttgatgycccctcagattctgaaagcttctaactaaaagtatttttgctccctgtaatagaaaacttaaatgtatttatgttttgcattgagaaaaatgttttatat

SEQ ID NO: 23433 - DNA, 201 bp, Homo sapiens
tctgcccccgccagggctcaagtgatcctcccatgtcaatctcccaagtttctgagatcacaggtgcacaccactgtgccctgctcattttttatattttygggggagacagagtctcatcatgttgtgcaggctggtctcgacctcgtgagcacaaacgatctgcccgccttggcctcccaaagtgctgggattacaggc

SEQ ID NO: 23434 - DNA, 201 bp, Homo sapiens
tatgtaacctagtctcaaatgattcagaaaaaactgaaatggcataaactctgtgtgtgtgtgtgtgtgtgtgtgtgtatgtatgtgtgtgtgtgtagggktggagagagtgagaaagagaaaacaagtacggtgaaatgttcacaaactggtgaatcaggccaagggtctacgggagttctctgtgtaattcttgcactt

SEQ ID NO: 23435 - DNA, 201 bp, Homo sapiens
gcgatctcggctcactgcaagctctgcctcccaggttcatgccattctcctgcctcagtctcctgagtagctgggactacaggcacccgccaccacgcccrgctaattttttaatatttttagtagagacgcggtttcaccgtgttagcgaggatggtctcgatctcctgacctcatgatccacccgccttggcctcccaa

SEQ ID NO: 23436 - DNA, 201 bp, Homo sapiens
tattttactttttctactttattttttcattctccatagttctttattcagcaaatgcacattgaacagcagaattctgttttaaacaccatgaaggaacwctgaagcactatgaggagcaatgaggtggataaaaaagtacttactttctctaaggagattacagtgtacttgtggagataaaatgtttcttaaaaggtg

SEQ ID NO: 23437 - DNA, 201 bp, Homo sapiens
gagtgcagtggcgcgatctcggctcactgcaagctctgcctcccaggttcatgccattctcctgcctcagtctcctgagtagctgggactacaggcacccrccaccacgcccagctaattttttaatatttttagtagagacgcggtttcaccgtgttagcgaggatggtctcgatctcctgacctcatgatccacccgcc

SEQ ID NO: 23438 - DNA, 201 bp, Homo sapiens
atcatgatgactttattttactttttctactttattttttcattctccatagttctttattcagcaaatgcacattgaacagcagaattctgttttaaacmccatgaaggaacactgaagcactatgaggagcaatgaggtggataaaaaagtacttactttctctaaggagattacagtgtacttgtggagataaaatgt

SEQ ID NO: 23439 - DNA, 201 bp, Homo sapiens
tggtatgattaataaataactcctattgctgtttaattaaaaagataacatctcaataaggttaaaaattaataatcaatgttaacaacaataactgttttcatttttgtatgactggtttttgtttacatgaatatatactttatattgttatcattacattgtttaagccatgaacattatatcacaagcttttccatg

SEQ ID NO: 23440 - DNA, 201 bp, Homo sapiens
ggagtgcagtggcgcgatctcggctcactgcaagctctgcctcccaggttcatgccattctcctgcctcagtctcctgagtagctgggactacaggcaccygccaccacgcccagctaattttttaatatttttagtagagacgcggtttcaccgtgttagcgaggatggtctcgatctcctgacctcatgatccacccgc

SEQ ID NO: 23441 - DNA, 201 bp, Homo sapiens
aatatcatgatgactttattttactttttctactttattttttcattctccatagttctttattcagcaaatgcacattgaacagcagaattctgttttamacaccatgaaggaacactgaagcactatgaggagcaatgaggtggataaaaaagtacttactttctctaaggagattacagtgtacttgtggagataaaa

SEQ ID NO: 23442 - DNA, 201 bp, Homo sapiens
caggctggagtgcagtggcgcgatctcggctcactgcaagctctgcctcccaggttcatgccattctcctgcctcagtctcctgagtagctgggactacargcacccgccaccacgcccagctaattttttaatatttttagtagagacgcggtttcaccgtgttagcgaggatggtctcgatctcctgacctcatgatcc

SEQ ID NO: 23443 - DNA, 201 bp, Homo sapiens
gaagcagccatttccctatcctgggtgcttcctgtttctgtctaatgctacacatagtccatggtttcagtatgttgtatgtgtttgattgtcaatccctrtaattacatcctacctaaaatatgcatttttgttcccggaaccaagccgggtccggctgcattttcttgaggcccaataacgagaagcagacagactagg

SEQ ID NO: 23444 - DNA, 201 bp, Homo sapiens
tgtctaatgctacacatagtccatggtttcagtatgttgtatgtgtttgattgtcaatccctgtaattacatcctacctaaaatatgcatttttgttcccrgaaccaagccgggtccggctgcattttcttgaggcccaataacgagaagcagacagactaggaaagaagggaatttattgctgtaaccagatacaggcag

SEQ ID NO: 23445 - DNA, 201 bp, Homo sapiens
gttcacgccattctcctgcctcactcagcctcccgagtagctgggactacaggcacccgccaccacacccggctaattttttgtttttgtttttttttttkttttttttttagtagagacggggtttcaccgtgttagccaggatggtctcgatcttctgacctcgtgatctgcccgcctgggcctcccaaagtgctggga

SEQ ID NO: 23446 - DNA, 201 bp, Homo sapiens
atattacctaagtaggaattaattgctttttatcactttacattatttcatttttagtattatgaaaaatataattgttccttttcttaaaaaaaaccagygtaatttgtgcttagttttaaaccaaaatttttcctatatgtttatagtttatattttcaagccaaaatacttgagtttttttcctgtcataatatatca

SEQ ID NO: 23447 - DNA, 201 bp, Homo sapiens
gccaaaccctataattctgcccctggcccctctcaaatctcctgtcttcacatttcttttttctttttttttttctttttttttttttttgagatagagtmtcactctgtcaccaggctggattgcagtggcacaagcttggctcactgcaacctccacctcctgggttctagccattctcctgcctcagcctctgcagta

SEQ ID NO: 23448 - DNA, 201 bp, Homo sapiens
tctcgtgagaacttactatcacaacaatagcatgggagaaactgccaccatgattcaattacatcccaccgggtcccttacacaacatgtggggactatgrgaactaaaattcaagatgagatttgggtgcagccacagccaaaccctataattctgcccctggcccctctcaaatctcctgtcttcacatttcttttttc

SEQ ID NO: 23449 - DNA, 201 bp, Homo sapiens
tctcatactactataagaacacatccaagactgggtaatttagaaaggaaagaagtttaactgactcacagttcagcatggctgaggaggccttaggaaaytgatgatcatggtggaaagggaagcaaacatgttcttcttcacagggcagcaggaaggagaatgagggtcaagtgaagcagcaagctccttataaaacta

SEQ ID NO: 23450 - DNA, 201 bp, Homo sapiens
gaggttttttttttttcctctagcttgatgtgatatatctctgaagtcaatctttatcttgtccttgagagggtgaacagctccaatcagattttggagakgaggttctccttagattcttttgatcacactacatcagcaacctcttcaaaaagcttagaattcagttgattcaagggatttataaatttattttaatag

SEQ ID NO: 23451 - DNA, 201 bp, Homo sapiens
cagatgcctgccaccacatctggttaattttttgtatttttagtagagatggcatttcaccattttgcccaggctggtcttgaactcctgacctcaggtgrtccacctgcctccagcctcccaaagcactgagattacaggcatgagccaccgtgcctggccctgtctggcctttttactgctttttatggcttattgaaa

SEQ ID NO: 23452 - DNA, 201 bp, Homo sapiens
gagattcataaatgaatcatgtaattttaagcaattctcactagatggagctagttacaaataaatacttttttaatatttttcttctttatttttaattwtttatttttatttattttttattttttgaggaattaacagtctttattgggctcagatcaggaggccgtgggtcttgaggacctctgtgtatttgtcaat

SEQ ID NO: 23453 - DNA, 201 bp, Homo sapiens
agtccctctctgttgcccaggctggagtgcagtggtgcgatctcggctcactgcaacctccgcctcccggcttcaagcaattctcctccctcagcctccaragtagctggggttacaggcacgcgccaccacgcctggctactttttgtatttttagtagagatagggtttcaccatgttgttcaggctggtctcaaactc

SEQ ID NO: 23454 - DNA, 201 bp, Homo sapiens
aattctcctgcctcagcctcccaggtagctgggactacagatgcctgccaccacatctggttaattttttgtatttttagtagagatggcatttcaccatkttgcccaggctggtcttgaactcctgacctcaggtggtccacctgcctccagcctcccaaagcactgagattacaggcatgagccaccgtgcctggccct

SEQ ID NO: 23455 - DNA, 201 bp, Homo sapiens
gttcaaaggagattcataaatgaatcatgtaattttaagcaattctcactagatggagctagttacaaataaatacttttttaatatttttcttctttatytttaattttttatttttatttattttttattttttgaggaattaacagtctttattgggctcagatcaggaggccgtgggtcttgaggacctctgtgtat

SEQ ID NO: 23456 - DNA, 201 bp, Homo sapiens
gccagcagactgccttttggcttgaactgtctcttccctgagtctccaacctgatggcccacaataaagatttagactccccaggcctccacaattgtgtragccaattccttaaaatgtttctctatctataacatatcctattagttctgtttctctggagaaccctaatacattatacttttttttttttttttgaga

SEQ ID NO: 23457 - DNA, 201 bp, Homo sapiens
tgatttccattccatttcattgagacactcacactgttaaaggaatattgccttttttttcttttttcttttttgattatataaatagagatgcgtctcaytatgttgcccaggctggtcttaaatactgggactcaagtgatcctcccacctcagcctcacaaagtgttgggattacaggcatgagcctttgtgcctgac

SEQ ID NO: 23458 - DNA, 201 bp, Homo sapiens
tcaaaaaaaagacagttctaaaaaatgaacataaggtataaacaccaacattcaacatgtacacacacacacacacacacacacacacacacacacacacmtgcagttggccctctgtatttgtgggttccacatctggggattcaaccaaccacagataaaaaatatttggaaactaaaaattccaccctgcgcttctgg

SEQ ID NO: 23459 - DNA, 201 bp, Homo sapiens
gtggactagtcaaagtagtgagaggaacagagtcctaacgcctgagagttgtaaaatgagtgtcagcatgtggtggctgccttttttttttttttttaacrgatagactttattttctagaagagttttaggtttaaagaaaattgaggtcaggcatggtggttcacgcctgtaatcccagcactttgggaggccaaggca

SEQ ID NO: 23460 - DNA, 201 bp, Homo sapiens
ctgtctcaaaaaaaagacagttctaaaaaatgaacataaggtataaacaccaacattcaacatgtacacacacacacacacacacacacacacacacacayacacatgcagttggccctctgtatttgtgggttccacatctggggattcaaccaaccacagataaaaaatatttggaaactaaaaattccaccctgcgct

SEQ ID NO: 23461 - DNA, 201 bp, Homo sapiens
ctataccgttactcaccacaaagctttttaccagattctaccattcaaaaacaaaactttataccacatacatcattgcaagttaaaaatagtcagcttcyaaattctgtattaactttaccatcaaggcagacctcagctgtaccatcacagcagtatgccacgcaaactgacaaaagacctcctcctcctccttacaac

SEQ ID NO: 23462 - DNA, 201 bp, Homo sapiens
aatctcagcactttgggagcctgaggtgggaggatcacttgaggccaggagttcaagaccagcctgggcaatatagtgagacccaattgctacaaaaaaawttaaaattagctgggtgtggtggcaagcacttgtattctcagctacttgggaggttgaggcaggcaggaggagcacttgagcccatgaatttgagattgc

SEQ ID NO: 23463 - DNA, 201 bp, Homo sapiens
actttgaccatacccttaggaacttcctcagctcactttcaaatggagggcactggctttctaaccattgtgtctcccagcccagtgacagctgaagctgwctgcttccgatatcacaggcagcacagaagagccgccctccaggtgctgctgggaaatgctgcctggaactctttgccatttactttctatcaaaagctg

SEQ ID NO: 23464 - DNA, 201 bp, Homo sapiens
ctctcaaaaaatgttactagttcaaaggagattcataaatgaatcatgtaattttaagcaattctcactagatggagctagttacaaataaatactttttwaatatttttcttctttatttttaattttttatttttatttattttttattttttgaggaattaacagtctttattgggctcagatcaggaggccgtgggt

SEQ ID NO: 23465 - DNA, 201 bp, Homo sapiens
gactagattttttttttttaaatggagtctcgctctgtcgcccaggctggagtgcagtggcgcgatctcggctcactgcaagctctgcctcccaggttcaygccattctcctgcctcagtctcctgagtagctgggactacaggcacccgccaccacgcccagctaattttttaatatttttagtagagacgcggtttcac

SEQ ID NO: 23466 - DNA, 201 bp, Homo sapiens
atagcctgttctacatagtcagcattctcccctctgattccactagctaaaaaaaaaaaggaagaagtaccttattcagaccttggactctgcaaattatrgtctatatattatcagggtgtaaggtctccataaaacacctcactttcctgtatcacagtcacttactatgactgttttcctgtatcaccatacattgcc

SEQ ID NO: 23467 - DNA, 201 bp, Homo sapiens
gaaagcaattgtatttgtttgaggaatatggacctaagtcttatacctttatagtagcattttgcacttgaggataaagagaatatggaaatattaagaaatattttagctttgttagatttttgcctccagatcaaacagaacaactcacctctacacatgtattcaggtagctgaaggcattgacaatcaaatcaaatt

SEQ ID NO: 23468 - DNA, 201 bp, Homo sapiens
agaatttacaataagaattttaaaaatgtgagggagaaaatcacgtttgtatagacaatttaaggaaagtaaatggagacaataaatatgggctggtttttccatgagtgactggtgtagacagatagctgcttacccaatttcttaggtataatagtccagatgtttgttttcctccctccagcttgaataacctcactg

SEQ ID NO: 23469 - DNA, 201 bp, Homo sapiens
attgtgatggagcagcaattttcttgaaggtggcctgggttcatgatggtaggtgaaggacccagcgagaagtcaaataattaaggtggcattaatgatarcatggccttcatttgggatatggcatatgccaaacatatagtccatgataggtcatgccagttagcatttatattgtattttaattacattatgctcttg

SEQ ID NO: 23470 - DNA, 201 bp, Homo sapiens
gttgaattctgacattcaggaagtcaattgcagaaggtttaaccaagttgattctgttttaccaaatcctgtctattctgaaaagcggccaatgccagacycatctcatgatgtgaaagttctcacttcaaagacatcagctgttgagatgacccaggcagtattgaatactcagctttcatcagaaaatgttaccaaagt

SEQ ID NO: 23471 - DNA, 201 bp, Homo sapiens
atccaatcatttagtgattttggtatccccatggcacatctagtaaatttacaaacctgacaattccctcattggtcattgtgatggagcagcaattttcktgaaggtggcctgggttcatgatggtaggtgaaggacccagcgagaagtcaaataattaaggtggcattaatgatagcatggccttcatttgggatatgg

SEQ ID NO: 23472 - DNA, 201 bp, Homo sapiens
actttttccattccatgtattttcaatatttcaataggagacaagtttatttttccatcttgcagatagcataggcactaagacaatattctcagtttttkatctcaatccaatcatttagtgattttggtatccccatggcacatctagtaaatttacaaacctgacaattccctcattggtcattgtgatggagcagca

SEQ ID NO: 23473 - DNA, 201 bp, Homo sapiens
gtcataaaactatacaagttggtacagtattctgtctcaattgccaaggtaggattttgaagatcttgtgcagtagaaatattgagaaacttcaaatctartagaaaaatagtctgagaacagcatcacaactgagctaaaataatctcatagatatattatttgctgttaaaataatacaatgaatatagtacattaaag

SEQ ID NO: 23474 - DNA, 201 bp, Homo sapiens
agcacaggtgacaaaatttgagttctaacatattccaatttgattattcctattgaagctgtgcttctttactaaataattggtaaaaaaattttttttghataaagtttcattttggctccctccttgtcctaaaatcgcatactttcagcaatctgcattaaatatttattaaactactgtcattctcttagctcctga

SEQ ID NO: 23475 - DNA, 201 bp, Homo sapiens
ttgaaaacaatcattcttttaaggttattattatttacgtgactatataccaatatacataaccaatatattgttctttttgttgttgttgttgttgttgkgttttagtgtttctctgtctcaggaagcttgctatttcactcttaaaactgtgtcttcgacttaatgtcataaaactatacaagttggtacagtattctg

SEQ ID NO: 23476 - DNA, 201 bp, Homo sapiens
ttataaattacaatggtgtatgtcttttattctatgttttgggcccacagagcacaggtgacaaaatttgagttctaacatattccaatttgattattccwattgaagctgtgcttctttactaaataattggtaaaaaaattttttttgtataaagtttcattttggctccctccttgtcctaaaatcgcatactttcag

SEQ ID NO: 23477 - DNA, 201 bp, Homo sapiens
ttttaaacttcctgatttcacattatgtaattagaactgatctccagtttccttgcttgtgaaaattacaggattgaaaacaatcattcttttaaggttaktattatttacgtgactatataccaatatacataaccaatatattgttctttttgttgttgttgttgttgttgtgttttagtgtttctctgtctcaggaag

SEQ ID NO: 23478 - DNA, 201 bp, Homo sapiens
gtgatagtgagtggattatcaggagatctggttgtttaaaagtgtgtagcacctccccactctctctattcctcgtgctctggccctgtaagacgtgcctkcttctcttttgtctttcaccatgattgaaagtttcctgaggcctccccagcatgcttcctgtacagcctgtggaaccgtgagccaattaagcctctttta

SEQ ID NO: 23479 - DNA, 201 bp, Homo sapiens
tgttctcgtgatagtgagtggattatcaggagatctggttgtttaaaagtgtgtagcacctccccactctctctattcctcgtgctctggccctgtaagaygtgccttcttctcttttgtctttcaccatgattgaaagtttcctgaggcctccccagcatgcttcctgtacagcctgtggaaccgtgagccaattaagcc

SEQ ID NO: 23480 - DNA, 201 bp, Homo sapiens
aaacttaaaagtgcaccattaagtaactcctgggaccaagcagatgtcatgagaaaaattaagaaatatttgccacttcatcagttataagacaaaaaaawattttttttaaattttaagacatacttaaattgagtgataatgaatgatatggttgggtctgtgtccctgcccaaatctcatgacaaattgtaatcccca

SEQ ID NO: 23481 - DNA, 201 bp, Homo sapiens
aatcagaaggcggaggttgcagtgagccgagatcatgccactacactccagcctgggcaacaagagcaaaactctgtctcaaaaaaaaaaaaaaaaaaaargattacttaaaatttacttggaaacttaaaagtgcaccattaagtaactcctgggaccaagcagatgtcatgagaaaaattaagaaatatttgccacttc

SEQ ID NO: 23482 - DNA, 201 bp, Homo sapiens
agagttaaaatggagggaaaaaatatctactaatcagaatattctactggccacagtctctgaccttctggcaattaaaaatttaaagttaaagattactyaaaattggctgggtgtggtggctcacgcctgtaatcccagcactttgtgaggccgaggtgggtggatcacaaggtcaggagttcgagaccagcctgacca

SEQ ID NO: 23483 - DNA, 201 bp, Homo sapiens
agagcaagactccctctcgaaaaaaataaataaataagtaaaataaataaataataaagtgtactccatatgtattcaatctgttttattttatttttatttgtatgaacatatacaacacaaatttaaaatatataagtaattaattgtggaaaatgggatctatcgtgaggataaagcaaagttatgcaacaagatgaa

SEQ ID NO: 23484 - DNA, 201 bp, Homo sapiens
cagagcaagactccctctcgaaaaaaataaataaataagtaaaataaataaataataaagtgtactccatatgtattcaatctgttttattttatttttatttgtatgaacatatacaacacaaatttaaaatatataagtaattaattgtggaaaatgggatctatcgtgaggataaagcaaagttatgcaacaagatga

SEQ ID NO: 23485 - DNA, 201 bp, Homo sapiens
ggtgacagagcaagactccctctcgaaaaaaataaataaataagtaaaataaataaataataaagtgtactccatatgtattcaatctgttttattttatktttatttgtatgaacatatacaacacaaatttaaaatatataagtaattaattgtggaaaatgggatctatcgtgaggataaagcaaagttatgcaacaa

SEQ ID NO: 23486 - DNA, 201 bp, Homo sapiens
tgggtgacagagcaagactccctctcgaaaaaaataaataaataagtaaaataaataaataataaagtgtactccatatgtattcaatctgttttattttatttttatttgtatgaacatatacaacacaaatttaaaatatataagtaattaattgtggaaaatgggatctatcgtgaggataaagcaaagttatgcaac

SEQ ID NO: 23487 - DNA, 201 bp, Homo sapiens
tgaactccagcctgggtgacagagcaagactccctctcgaaaaaaataaataaataagtaaaataaataaataataaagtgtactccatatgtattcaatytgttttattttatttttatttgtatgaacatatacaacacaaatttaaaatatataagtaattaattgtggaaaatgggatctatcgtgaggataaagca

SEQ ID NO: 23488 - DNA, 201 bp, Homo sapiens
gaatccattgtttttaaacttcctgatttcacattatgtaattagaactgatctccagtttccttgcttgtgaaaattacaggattgaaaacaatcattcytttaaggttattattatttacgtgactatataccaatatacataaccaatatattgttctttttgttgttgttgttgttgttgtgttttagtgtttctct

SEQ ID NO: 23489 - DNA, 201 bp, Homo sapiens
aagattatattatgtgctattgggcctcaatcctaatatctcattgtccaatattgtgtgacaaccatatcataagaggagctaagaatacacatgatggraaaaaaaatagataggagcagaccagcctcagaaagtgaactaaaaaccacctcctgaatattctttttgatggataaacttataccataaagataaagc

SEQ ID NO: 23490 - DNA, 201 bp, Homo sapiens
caaaaggtaaagcttgaagactcagatgaaggagtataatcagatcaccatcaaccaggtaaaataatacccctcatggccataaaaccggagactgaggkgcaggggcagtgatgtatctatgggttattttctcctaagagtacaaaagccaagattatattatgtgctattgggcctcaatcctaatatctcattgtc

SEQ ID NO: 23491 - DNA, 201 bp, Homo sapiens
ttttttttttttttgagacggagttttgctcttgttgcccaggctagagtgaaatggcacgatctcggctcactgcaatctccgcctcctgggttcaagtrattctcctgcctcagcctcccaagtagctaggattacaggcgtgcaccaccacacccagctaattttttgtatttttttttttagtagtcacagggtttc

SEQ ID NO: 23492 - DNA, 201 bp, Homo sapiens
acatggcaaaaccctgtctctactaaaaatacaaaattagccgagcgtggtggcgcatgcctgtaatccaagctactcaggaggatgaagctcgagaatcrcttgaacccaggaggcagaggttgcagtgagccgagatcacgccattacactctagcctgggcaacaagagtgaaactccgtatcaaaaaaaaaaaaaga

SEQ ID NO: 23493 - DNA, 201 bp, Homo sapiens
ctggagtgcagtggcacaatcacggctcactgcaacctccacctcccaggctcatgagatcctctgaccttagcctcccaagtagctgggactataagcaycatgcaccaccatgttcagctaatttttaaattttttttgtacagacggggtcttgctatattgcccagactggtctcgaactcctgggctcaagcgatc

SEQ ID NO: 23494 - DNA, 201 bp, Homo sapiens
taagaaagaatttatttctatagatgttggcactttgcatatgaaggtttgaagctgcccatttcaagcaacaaaaagaaatgttaaaaaccaaggtagtsttcctgggaaatcccgttagtaatggatttctctgctagtaatggggttgttcattagtatggggtatttgtatacactttgaaaagttatagtttccag

SEQ ID NO: 23495 - DNA, 201 bp, Homo sapiens
tgaggatcaggtagtttaagcaatgtgggggtggctagtgggtgaactatgaggattaaaggtgccggctgggcactgtggctcacgcctgtaatcccagmactttgggagggtaaggcgggtggatcacctgaggtcaggagttcgagaccagcctggccaatgtggtgaaaccctgcctctactaaaaatacaaaaata

SEQ ID NO: 23496 - DNA, 201 bp, Homo sapiens
tcactatatttatttagacattgtgaaatgtttgtttttaaggttaaggtgagaattctggggtacaggggaaaaaaggaaatctccctgttttaaaatasgcattctactatacagccataagaaagaaaagaatgagatcatgtcatttacagggacatggttggagctggagaccattatccttagcaaactaacaca

SEQ ID NO: 23497 - DNA, 201 bp, Homo sapiens
cgaggcgggcggatcacgaggtcaggagatcaagaccatcctggctaacacagtgaaacccccgtctctacaacaaaatacaaaaaaaaattagctgggcrtggtggcgtgcacctgtagtcccaggtactcgagaggctgaggcaggagaattgcttgaacccgggaggcggaggttgcagtgagccgagatcgtgccac

SEQ ID NO: 23498 - DNA, 201 bp, Homo sapiens
tggggatgggatccaggtccaaacatgaaatttacttatgtttcatgtattcctatatacatagcctgaaggtaattttatacaatttttttaatgattcygtggctgaaacaaagttttgactgccactcatgacatgaggtcaggtgtagaattttgtggctcatgtcagcactcaaaaggtttcagattttgaagcat

SEQ ID NO: 23499 - DNA, 201 bp, Homo sapiens
gcaaatgccaggtggggcatggtggctcacgtctgtaatcccaacactttaggaggccaaggcaggtggatcccttgagctcaggagttccaaaccagccygggcaaaatggtgaaacctcgtctctacaaaaagtacaaaaattagctgggcatggtggtgcacacctgtggtcccagctacttggggggctgaggcgga

SEQ ID NO: 23500 - DNA, 201 bp, Homo sapiens
gagttttgctcttgttgcccaggctggagtgcaatggcatgatcttggctcactgtaagctctgcctcccaggtccaagcgattctcctgcctcagcctcycgagtagctgggactacaggcgcgcacccctaatttttgcgccctgctaatttttgtgtttttaatagagacagggtttcaccgtgttggccaggctggt

SEQ ID NO: 23501 - DNA, 201 bp, Homo sapiens
cctaagtctactggtaactaattttgtttcaactagaaggtcagaggcaaaaatgctttctaagtcggattaagctgtgagcggcccagtacctacaaggyctgtctactgtggtaccagagtgattatttctatcttatctgctttacagcttggtctggagggctgccttagactctccaatgaatctattcgaacagc

SEQ ID NO: 23502 - DNA, 201 bp, Homo sapiens
aacagtgacattgatgatactaataaataaatccaaggattttttttaagggaggtggtttgcaccacataaattccctagcaaagtgttgtggggaattraagaattataaggcagggtcctgcctgctctcaaggagctgcatagtgtggctagagagaatagatatactgcaagggaagcaggggtctagaattctgt

SEQ ID NO: 23503 - DNA, 201 bp, Homo sapiens
ctactggtaactaattttgtttcaactagaaggtcagaggcaaaaatgctttctaagtcggattaagctgtgagcggcccagtacctacaaggcctgtctrctgtggtaccagagtgattatttctatcttatctgctttacagcttggtctggagggctgccttagactctccaatgaatctattcgaacagctgcctct

SEQ ID NO: 23504 - DNA, 201 bp, Homo sapiens
tattttccctcagctgaactatatagggtaagacatatcaaacattttttatgatgcttttactatataaaatcttttcaataagccaagaaagagaaaakatgacatataataccagtcttatgttctatataagaaatatcataagcccatgggaaatagtagattttatgagtatttttaaattcaggagtttaacca

SEQ ID NO: 23505 - DNA, 201 bp, Homo sapiens
ggaaaattacttgaaaccgggaggcggagtttgcagtgagcagagattgtgacactgaactccagcctgggtgacagagcaagactccctctcgaaaaaaataaataaataagtaaaataaataaataataaagtgtactccatatgtattcaatctgttttattttatttttatttgtatgaacatatacaacacaaatt

SEQ ID NO: 23506 - DNA, 201 bp, Homo sapiens
ctgaggtgggaaaattacttgaaaccgggaggcggagtttgcagtgagcagagattgtgacactgaactccagcctgggtgacagagcaagactccctctygaaaaaaataaataaataagtaaaataaataaataataaagtgtactccatatgtattcaatctgttttattttatttttatttgtatgaacatatacaa

SEQ ID NO: 23507 - DNA, 201 bp, Homo sapiens
agaccaacccggccaacacagcaaaacctggtctctagtaaaaatacaaaaattagccgggcatggtggtgcacacctgtaatcccagctactcaggaggmtgaggtgggaaaattacttgaaaccgggaggcggagtttgcagtgagcagagattgtgacactgaactccagcctgggtgacagagcaagactccctctc

SEQ ID NO: 23508 - DNA, 201 bp, Homo sapiens
gaaacagtagctatttaaaatcaaaagataatttcaaacattgcttgttgtcattgaattcaagaagaaaactttaaaaaagaaaaaccacacaaaactctaaaaataataaggccaggcgttggtggttcacacctgtaatcctagcactttggaaggccaaggcaggtggatcacctgaggtcaggagttcaagaccaa

SEQ ID NO: 23509 - DNA, 201 bp, Homo sapiens
agaaacagtagctatttaaaatcaaaagataatttcaaacattgcttgttgtcattgaattcaagaagaaaactttaaaaaagaaaaaccacacaaaactctaaaaataataaggccaggcgttggtggttcacacctgtaatcctagcactttggaaggccaaggcaggtggatcacctgaggtcaggagttcaagacca

SEQ ID NO: 23510 - DNA, 201 bp, Homo sapiens
ggaggcagggcttgcagagagctgagatcgtgccactgcactccagcgtgggcaacaaagcaagactctgtctcaaaaaaaaaaaaaaaaagttaaaatgwtaaattttatgtaatatatactttgtcacaataaaaaagtaaatgatcataaacagctctattgttttaacttgtacatatcgtgtttctttcattttaa

SEQ ID NO: 23511 - DNA, 201 bp, Homo sapiens
gtgaacccaggaggcggagcttgcagtgactgagatcgcgccactgcactccagcctgggcgacagagggagactctgtctcaaaaaaaaaaaaattagcygggcgtggtggcgggcgcctgtagtcccagctactcgggaggctgaggcaggagaatggtgagaaccggggaggcagggcttgcagagagctgagatcgt

SEQ ID NO: 23512 - DNA, 201 bp, Homo sapiens
aatggcgtgaacccaggaggcggagcttgcagtgactgagatcgcgccactgcactccagcctgggcgacagagggagactctgtctcaaaaaaaaaaaaattagccgggcgtggtggcgggcgcctgtagtcccagctactcgggaggctgaggcaggagaatggtgagaaccggggaggcagggcttgcagagagctga

SEQ ID NO: 23513 - DNA, 201 bp, Homo sapiens
gaaaccccgtctctactaaaaatacaaaaacaaaagtagccgggcatggtggtgggcgcctgtagtcccagctactcaggaggctgaggcaggataatggygtgaacccaggaggcggagcttgcagtgactgagatcgcgccactgcactccagcctgggcgacagagggagactctgtctcaaaaaaaaaaaaattagc

SEQ ID NO: 23514 - DNA, 201 bp, Homo sapiens
tggtggaggggggggctaattgattttggctctgaactgatgctaatccatggagacacaaaataaagtaagatgaaatgaaacaaacgcaacaacaacamatccagcatagtccaccactcagagtagaagtttacagaacccaggtgatagatggaaccttgaccagagtcagtttcccagtgtgtccaatggcgtgat

SEQ ID NO: 23515 - DNA, 201 bp, Homo sapiens
ttccattgtctgtaataatgccctcggatgagttgtgtctaaaattaagttcatctttatttatatgcgaacttaactgccatagtccctaatgtattgcrtttgtaacctgatcgtattatgtttacagctgaaagatttcatctagacatgtctttcgtccttattattcaaagtgtaattgaaagagatatttagtat

SEQ ID NO: 23516 - DNA, 201 bp, Homo sapiens
aagcacagaccctgatgtgataaaacattttgtggtttctctgagtcacagataaacttctgccatcaaatggctacagttcatttaaatttaaaaaaaaraaaaaagaaacagaaaacgtgtctcagatggctggctttacctcgatagcataagagagacctaagacatgtaaaatacgtatattgcagtatcatcttt

SEQ ID NO: 23517 - DNA, 201 bp, Homo sapiens
gccatcagaggcggagtcggtttccttcccttgaattccgtctggttttgcgacttcccttgactaataaacagaatgaggtggaagttaaagggaatcayaacccaccctatggtacaatgattcttttaagacattcaagttatagatgcagaaagaagcctcttctgagcttcccttatctgactataggcagggcct

SEQ ID NO: 23518 - DNA, 201 bp, Homo sapiens
tttgtatttttagtagagatggggtttctccatagttggttaggctggtctcaaactcccgacctcaggtaattcacccaccttggcctcccaaagtgctrggattacaggcgtgagccaccacaccctgccctgagtattttttaatgactacaatgctatgttgaactcataagtagttttcaaacattttgaagttga

SEQ ID NO: 23519 - DNA, 201 bp, Homo sapiens
ctgggattacaggcatgagcctgcatgcccggctaattttgtatttttagtagagatggggtttctccatagttggttaggctggtctcaaactcccgacytcaggtaattcacccaccttggcctcccaaagtgctaggattacaggcgtgagccaccacaccctgccctgagtattttttaatgactacaatgctatgt

SEQ ID NO: 23520 - DNA, 201 bp, Homo sapiens
tcctgcctcagccttccgagtagctgggattacaggcatgagcctgcatgcccggctaattttgtatttttagtagagatggggtttctccatagttggtyaggctggtctcaaactcccgacctcaggtaattcacccaccttggcctcccaaagtgctaggattacaggcgtgagccaccacaccctgccctgagtatt

SEQ ID NO: 23521 - DNA, 201 bp, Homo sapiens
cacgatcttggctcaccacaacctccacctcccgggttcaagcgattctcctgcctcagccttccgagtagctgggattacaggcatgagcctgcatgccyggctaattttgtatttttagtagagatggggtttctccatagttggttaggctggtctcaaactcccgacctcaggtaattcacccaccttggcctccca

SEQ ID NO: 23522 - DNA, 201 bp, Homo sapiens
gcctgaacccgagaggcggaggttgcagtgagccaagatcacgccactgcactccagcctggacaatagagcaagactctgtctcaaaaaaaaaaaaaaaatatatatatatatatataataaatatataaattagctgggcattttcgcacagacctgtaattccagctacttgggaggctaaggcacaagaatcacttc

SEQ ID NO: 23523 - DNA, 201 bp, Homo sapiens
tgcctgaacccgagaggcggaggttgcagtgagccaagatcacgccactgcactccagcctggacaatagagcaagactctgtctcaaaaaaaaaaaaaawatatatatatatatatataataaatatataaattagctgggcattttcgcacagacctgtaattccagctacttgggaggctaaggcacaagaatcactt

SEQ ID NO: 23524 - DNA, 201 bp, Homo sapiens
ttgcctgaacccgagaggcggaggttgcagtgagccaagatcacgccactgcactccagcctggacaatagagcaagactctgtctcaaaaaaaaaaaaawaatatatatatatatatataataaatatataaattagctgggcattttcgcacagacctgtaattccagctacttgggaggctaaggcacaagaatcact

SEQ ID NO: 23525 - DNA, 201 bp, Homo sapiens
gggagaagctccgcggcgcgggaaacgcggcggccagagggaaacgggggcggggactgcttactacggcggacgtcacataaacaaacgcccccccccccggctgcaggccgcggcggagagggagaggcgaggtgggaaagggaaaggttagcaactgaggggagggctgcgctgcttggcgtgttttccgcccccgaa

SEQ ID NO: 23526 - DNA, 201 bp, Homo sapiens
ctatttaatacagaaatgtactaatataggttgccttttggtattgtaatttggtcaaccaaaacttgggaaaaataggtccaaagtttttcattttcctracatgctctttctatttactacagaaatgtactaatataggttgccttttggtattgtaatttggtcaaccaaaacttgggaaaaataggtttattaata

SEQ ID NO: 23527 - DNA, 201 bp, Homo sapiens
tggcataggttaaaaataaaattacaaattcaagtctctgggctttagatagtgtaaaacaccaggcccctccaattttggtagagcgaaaaaaaaaaaaagagaaacaaaactaggtctcccaattctagattaagaggaattccagtacatgaaaaaaaaaactgaaagtgtcagaaagaatatttatttgcttttaat

SEQ ID NO: 23528 - DNA, 201 bp, Homo sapiens
ttaattaaaaagataacatctcaataaggttaaaaattaataatcaatgttaacaacaataactgttttcatttttgtatgactggtttttgtttacatgratatatactttatattgttatcattacattgtttaagccatgaacattatatcacaagcttttccatgttgctatctagtcttgtttttatttgttaaag

SEQ ID NO: 23529 - DNA, 201 bp, Homo sapiens
gtatccagaacagtttccaaatagggttgtatcctgatgtggaaactaaaaaaaaaaaaagcaaaaagattgatttacatatttaaaaaattaaatgccartataaataatgttgtcactggtgaggcgttaaaaggtaattaaagtaaaacttttttgtttcctatatgtatttttcttggatctcctgcaagacaattt

SEQ ID NO: 23530 - DNA, 201 bp, Homo sapiens
taaaaataacaccggtcctatgcttatctcttaaagtcatgttgttttctgcaaggtgttaaaaatcaaaataagattgttctaataacattgaagtttcktcagtatatgtgtatgatacaagcgaaattgatgggtaactacttgcagtataattcttttagaattatgtacttttagattgacttaccagaactgctg

SEQ ID NO: 23531 - DNA, 201 bp, Homo sapiens
tgtgttttgtggatcttcagtaaaacattccccagaaataagtagggccatttcccagtgtgactataaactggagacaggtaaatattttttttggtggaggggggggctaattgattttggctctgaactgatgctaatccatggagacacaaaataaagtaagatgaaatgaaacaaacgcaacaacaacaaatccag

SEQ ID NO: 23532 - DNA, 201 bp, Homo sapiens
ctgggaggcggagcttgcagtaagccgagatcacgccactgcactccagtctgggtgacagagcgagactccgtctcacaaaaaaaaaacaaaaaaaaaamccaaaatacaaaattagccgagtgtggtggcacaggcctgtaatcccaactactcaggaggctgaggcaggagaatcgtttgaacccagtaggtggtggt

SEQ ID NO: 23533 - DNA, 201 bp, Homo sapiens
actaaaaacaatacacaaaaattagccgggcgtggtggcgggcgcctgtagtcccagctacttgggaggctgaggcaggagaatggtgtgaacctgggagkcggagcttgcagtaagccgagatcacgccactgcactccagtctgggtgacagagcgagactccgtctcacaaaaaaaaaacaaaaaaaaaaaccaaaat

SEQ ID NO: 23534 - DNA, 201 bp, Homo sapiens
ctcaccttggcctcccaaagtgctgggattagagatgtgagccactgcgcccggctgtgctgttttgttttgtttgttgttgttttttaatttgagatggmgtctcgctctgtcacccaggccgtagtacagtggcgcaatctcagctccctgcaacctctgcctcctgggttgaagcgattctcctgcctcggcctcccg

SEQ ID NO: 23535 - DNA, 201 bp, Homo sapiens
aacccaccagaaggaaccaattctggacatgctggcatcaagtcatctgctcaccttggcctcccaaagtgctgggattagagatgtgagccactgcgccyggctgtgctgttttgttttgtttgttgttgttttttaatttgagatggagtctcgctctgtcacccaggccgtagtacagtggcgcaatctcagctccct

SEQ ID NO: 23536 - DNA, 201 bp, Homo sapiens
ggtcaccttccatgctgtggaagcttttttcttttgctctttacaataaatcttgctgctgctgactctttgggtctgcaccacctttaagagctgtaacrccatgaaggtcggcagcttcattcttgaagtcagcaagaccatgaactcactggaaggtagaaactctggacatatctgaaggaacaaactcctgacaca

SEQ ID NO: 23537 - DNA, 201 bp, Homo sapiens
taaacgcaccaatcagcgctctgtgtctagctaaaggattgtaaatgcaccaatcagcactctgtaaaaacataccaatcagtactctgtgtctagctaamggattgtaaatgcaccaatcagcactctgtaaaaatgtaccaatcagcgctctgtgtctagctaaaggattgtaaacgcaccaatcagcactcggtaaaa

SEQ ID NO: 23538 - DNA, 201 bp, Homo sapiens
ttccacttacaaatgtgaacatgtggtatttgacagcatggttttaacagtgaaaaattataaatgacaaaagaatgttaagcaaattaaggcatacccaraatgtaatattatacagcctctaaaatgtatgtagtaatgaaaaggatatataataatgaaaagtacatatttcaaatgtttagtgaaaaatcaggataa

SEQ ID NO: 23539 - DNA, 201 bp, Homo sapiens
tttttaaattttgtagagccaggtcttgccatgttgcccaggctggtcttgaactcctggtgagagctgaagccagctggacttcctgggttgggtggggmcttggagaacttttctgtctagctaggggattgtaaacgcaccaatcagcgctctgtgtctagctaaaggattgtaaatgcaccaatcagcactctgtaa

SEQ ID NO: 23540 - DNA, 201 bp, Homo sapiens
caagcgatcctcctctctcagcctcctaagtagctaagaccacaaacatgcaccactatgccttgctaattttttaaattttgtagagccaggtcttgccmtgttgcccaggctggtcttgaactcctggtgagagctgaagccagctggacttcctgggttgggtggggacttggagaacttttctgtctagctagggga

SEQ ID NO: 23541 - DNA, 201 bp, Homo sapiens
ctcaagcgatcctcctctctcagcctcctaagtagctaagaccacaaacatgcaccactatgccttgctaattttttaaattttgtagagccaggtcttgmcatgttgcccaggctggtcttgaactcctggtgagagctgaagccagctggacttcctgggttgggtggggacttggagaacttttctgtctagctaggg

SEQ ID NO: 23542 - DNA, 201 bp, Homo sapiens
agcatcgctggattttaatctaatctacgatctttttttttttttttttcctgagagagtctcactctgtcgccaggctggagtgcagtggtacaatctcmgctcattgcaacctccgcctctgaggttcaagcaattctcctgcctcagcctcctgaggaactaagattacaggtgtgtgccaccacgactggctgattt

SEQ ID NO: 23543 - DNA, 201 bp, Homo sapiens
aggcaggcggatcacctgaggtcaggagttcgagaccagcttgaccaatatggagaaatcccttctctactaaaaatacaaaattagccaggtgtggtggygcatgcctgtaatcccagctactcgggaagctgaggcaggagaatcacttgaacccaggagatggaggttgcggtgagctgagattgtaccactgcattc

SEQ ID NO: 23544 - DNA, 201 bp, Homo sapiens
tccttggccgggtgcggtggctcacgcctgtaatcccagcactttgggagaccgaggcgggcggatcacctgaggtcaggagttcgagaccagcctgaccmacacggtgaaaccccatctctactaaaaatacaaaattagccggtcatggtggcacatgcctgtaatcccagctacttgggaggctgaggcaggaaaatt

SEQ ID NO: 23545 - DNA, 201 bp, Homo sapiens
tttgacatcactcatttaaacctctaagaaatacttttcagctgggcgcagtagctcacgcctgtaaccccagcactttgggaggccgaggcgggtggatsacctgaggtcaggagttcgaaaccagcctgaccaacatggagaaaccccatctctactaaaaatacaaaattagccaggcatggtggcacatgcctgtaa

SEQ ID NO: 23546 - DNA, 201 bp, Homo sapiens
aggtcaggagttcaagaccagcctggccaacatggcgaaactctgtctctactaaaaatacaaaaattagctgggtgtggtggcatgcacctgtaatcccrgctactcgggaggctgaggcaggagaatcgcttgaacccagtagggggaggttgcagtgagctgagatccgtgccactgcactgcactccagcctggttg

SEQ ID NO: 23547 - DNA, 201 bp, Homo sapiens
catggtggtgcgtgcctgtagacccagctatttgggcggctgaggtgggagaattgcctgagcccaggaggcggacattgcagtgagccaagataacaccmctgcactccagtctgggctacagagtgaaactctgtctcaaaaaaaaaaaaaaaaagattaaataaatgcaaacaaagtggtttaaagtactttaaagta

SEQ ID NO: 23548 - DNA, 201 bp, Homo sapiens
ttgtttgaacctgggaggcagaggttgcaatgagtggagatcatgccattgcactccagcctgggcaacagagtgaaactccgcctcaaaaaaaaaaaaaattaaaactgtcacttccaaacaccattaaaaaacaaagtgcctgattcggccgtacatgtactaaaattggaacactggaacggtaacagagaagattag

SEQ ID NO: 23549 - DNA, 201 bp, Homo sapiens
aagactaaaaactacatacagtttatcatacaacaaatcccatctctgtcccctgaaattcccctagtttcattcattagaaggggattaaaaaaaaaaaagacttaaagagcactttacagcagcattcagctttcctatgaaatactcagcatcttaaatattatatacaactctttttttagtaagctagacactggc

SEQ ID NO: 23550 - DNA, 201 bp, Homo sapiens
ctgggaaggaaaagatgattgattcataggcaccctgatacagtcacttataatctgaaaagcagatgtactctaaggcactcaaaataaaaataacaccrgtcctatgcttatctcttaaagtcatgttgttttctgcaaggtgttaaaaatcaaaataagattgttctaataacattgaagtttcttcagtatatgtgt

SEQ ID NO: 23551 - DNA, 201 bp, Homo sapiens
aatgcagaaattaattaaaaagcgggaataaaattctccttataacaaaacatatattaagaactcttgttggttttcattgataatttgctttttatgakctatcaagatgtacttatacgaaaagttgagatcataacctttcagtctagaaagatgagatctagtttgcaaaccagaagtctcaatactcgtagcagt

SEQ ID NO: 23552 - DNA, 201 bp, Homo sapiens
aaattagccaggcatggtggcacatgcctgtaatcccagctactcgggaggctgaggtgggacaatcccttgaacccaggaggcagaggttgcagtgagcygagattgagccactgctctctagcctgggctacacagtgagactctgtctcaaaaaaaaaaaaaaaaaaaagaaaaggaaaggaaaaaaaaaaaaagtat

SEQ ID NO: 23553 - DNA, 201 bp, Homo sapiens
atttagggagttaaagccttaggttttaaacctgatttggggttgagctctgggaaggaaaagatgattgattcataggcaccctgatacagtcacttatratctgaaaagcagatgtactctaaggcactcaaaataaaaataacaccggtcctatgcttatctcttaaagtcatgttgttttctgcaaggtgttaaaaa

SEQ ID NO: 23554 - DNA, 201 bp, Homo sapiens
attgagtttcttgggcaatgctttaaagcactgcatttcagaactttcctgtcccaagtttacagaacaatatgcaaaaaccacaaataataaacaatggmacctccactctggacatatcgtgaagtctataaaccacaactttgaaagctattaaggtgactcacacgcaagaggagcccagggaggctcttccacaga

SEQ ID NO: 23555 - DNA, 201 bp, Homo sapiens
tgagaggcagagcctgcagtaagccctgattgtgccactgcactccagtgtgggtgacagagtgagaccctgtcttaaaaaaagataaaagctatcaaatrtagtgcgtgtttattttggggactaaatgcttatttttaaggggatggttaaagtactcagcattatttagggagttaaagccttaggttttaaacctga

SEQ ID NO: 23556 - DNA, 201 bp, Homo sapiens
acccaccctatggtacaatgattcttttaagacattcaagttatagatgcagaaagaagcctcttctgagcttcccttatctgactataggcagggccttkggagaatgaagctgccataaatcccctctctgggggagcttccagccaggaaggagcctgactgttagcacctgggtgagaaattgcataaacaaacatt

SEQ ID NO: 23557 - DNA, 201 bp, Homo sapiens
agttcagctgtgactctgtctggtcctgggctttttttggttggtagtctattaattactgcctcaatttcagaacttattattggtctattcaggaattygacttattcctggtgtagtcttgggagggtgtatgtgtccaggaatttatcaatttcttctagattttatagtttatttgcatagaggtgtttatagtat

SEQ ID NO: 23558 - DNA, 201 bp, Homo sapiens
cagtggcatgaacacagcacactgcaacctcgacctcccagactcaagcgatcctcctctctcagcctcctaagtagctaagaccacaaacatgcaccacyatgccttgctaattttttaaattttgtagagccaggtcttgccatgttgcccaggctggtcttgaactcctggtgagagctgaagccagctggacttcct

SEQ ID NO: 23559 - DNA, 201 bp, Homo sapiens
ctcactctgttgccccagctggagtacagtggcatgaacacagcacactgcaacctcgacctcccagactcaagcgatcctcctctctcagcctcctaagyagctaagaccacaaacatgcaccactatgccttgctaattttttaaattttgtagagccaggtcttgccatgttgcccaggctggtcttgaactcctggt

SEQ ID NO: 23560 - DNA, 201 bp, Homo sapiens
gagatcgagaccatcctggccaacatggtgaaatcccatctctactaaaaatacaaaaattaactgggcatggtggtgcgtgcctgaagtcccagctactygggaggctgagacaggaaaatcacttgaacccaggaggcggaggttacagtgagctgacattgggccactgcactccagcctggtgacagagcgagaccc

SEQ ID NO: 23561 - DNA, 201 bp, Homo sapiens
tcaacactttgttgtagtaagaaagcagctatagggagtatgtaaactaacggatgcagctatgttccaataaaactttatttataaaaacaagctatagygccaggcgcagtggctcacgccagtaatcctagcactttgggaggccaaggcaggcagatcacgaggtcaggagatcgagaccatcctggccaacatggt

SEQ ID NO: 23562 - DNA, 201 bp, Homo sapiens
agcaattctcctgcctcagcctcccgagtagctgggattacaagcgagtgccaccatgcctggctaatttttatatttttagtagaggccgggtttcaccrtgttggccaggctggtcttgaacccctgaccttaggtgatccacccacctcggcctcccaaagttctgggattacaggcatgcaccaccgtgcccggcct

SEQ ID NO: 23563 - DNA, 201 bp, Homo sapiens
caccaggcccagctaattttttgtatttttagtagagacagggtttcaccatgtttgccaggctggtctcaaactcctgacctcaggtgatccatctgccytggcctcccaaaatgctgggattacaggtgtgagccactgctcttggcccagtttagggtttatagtgtgccaaactacgagatccctcccagttctgct

SEQ ID NO: 23564 - DNA, 201 bp, Homo sapiens
acgtgccaccaggcccagctaattttttgtatttttagtagagacagggtttcaccatgtttgccaggctggtctcaaactcctgacctcaggtgatccayctgccttggcctcccaaaatgctgggattacaggtgtgagccactgctcttggcccagtttagggtttatagtgtgccaaactacgagatccctcccagt

SEQ ID NO: 23565 - DNA, 201 bp, Homo sapiens
tctcctgcctcaacgttccaagtagctgggattacaggcacgtgccaccaggcccagctaattttttgtatttttagtagagacagggtttcaccatgttkgccaggctggtctcaaactcctgacctcaggtgatccatctgccttggcctcccaaaatgctgggattacaggtgtgagccactgctcttggcccagttt

SEQ ID NO: 23566 - DNA, 201 bp, Homo sapiens
gattggtctaaacatttgaaactcacaggtaggttttggcaggaaactcatttacagaaagggtgagaaatgttacctcccttacagcaacacaaactggraattttaaaagcaacaaaagccaaaacataataagacaatcaaaagattgtccctgttatcattctgctgcatgaaaagggaaactgcaagcattctccg

SEQ ID NO: 23567 - DNA, 201 bp, Homo sapiens
ttcatgttatctctgccttcctgggaacttgcaaatgaaccagccctcaaatgcagctctggatatgacaaaccatcccagatggacccctaaaggtcccsaatagctttgtatctttcaaaaccacataaatcttagaatctacagtttaggttttgtttgtttgtttgtttgtcttagacagagttttgctcttgttgc

SEQ ID NO: 23568 - DNA, 201 bp, Homo sapiens
aaaaaattgaactcacctacaaatagtctgaaagagtggtgtatatcaaatacgtgggtagtgttgcatttcaaatgaggctcttctggttgaaatgatayatttataagaccagaatatcacaaatgggtgatgtataatgtctctttagttttttggtatttggcctcttttaaagcctgtcggatgtatgggagaaaa

SEQ ID NO: 23569 - DNA, 201 bp, Homo sapiens
agcttgcagtgaaccaagattgcaccactgcactccagcctgggtgacagagcgacactccatctcaaaaaaaaaaaaaaaaaaaaaaaagacaaagtcartagaaagaaatgcttgggttgagataagggggggtgggctgtgattcttgttatatagatgaagcctcagatagcaggcttcagagagaatagatggtaa

SEQ ID NO: 23570 - DNA, 201 bp, Homo sapiens
tatgggagaaaacaatgaacgtgctttgatttcctatcagtcactcttaagaacatacatattgtttaagtaactcggtcttttttatctgattcttgagrcactatgggtagcaagtaaccacttacaaatttaaatgtaatatacactccttttctgtgtgtcaagtccttatttttaggtgcatattgacatttaaat

SEQ ID NO: 23571 - DNA, 201 bp, Homo sapiens
tcagcctctcgagtagctgggattacaagtgtgtaccaccacgcccagctagttttttgtatttttagtagagacggggtttcaccatgttggccaggctrgtcctgaactcctgacttcaggtgatccgcctgccttggcctcccagagtgctgggattacaggcatgagccactgcgcccagccaaacttgttttcttt

SEQ ID NO: 23572 - DNA, 201 bp, Homo sapiens
aatacaaaaattagccaggcatggtggcacatgcctgtaatcccagctactcgggaggctgaggtgggacaatcccttgaacccaggaggcagaggttgcrgtgagctgagattgagccactgctctctagcctgggctacacagtgagactctgtctcaaaaaaaaaaaaaaaaaaaagaaaaggaaaggaaaaaaaaaa

SEQ ID NO: 23573 - DNA, 201 bp, Homo sapiens
cctggcaaacatggcgaaaccctgtctctaccaaaaaatacaaaaattagccaggcatggtggcacatgcctgtaatcccagctactcgggaggctgaggkgggacaatcccttgaacccaggaggcagaggttgcagtgagctgagattgagccactgctctctagcctgggctacacagtgagactctgtctcaaaaaa

SEQ ID NO: 23574 - DNA, 201 bp, Homo sapiens
ggctgtgtgaatggcctcttttgtgaaatacttatttgacccatttataaagatttttattgtcatttgttattaatctgtggggtttctttttctttttcttttttttttttttttgagacggaatctcactctgtagcccaggctggagtgcagtggctcaatcttggctcgctgcaagctccgcctcccgggttcgcg

SEQ ID NO: 23575 - DNA, 201 bp, Homo sapiens
cagacaccggaccaaattgagaacttactaaaacagggatgcagggtggctgctttccattagacgtgcctaccagtgtgccatgtcagtttaccattgcygtggcgacacccgaagttaatgcctctttccatggcaatggcctgacaacccagaagttaccactttttcctggaaatttctgcataatctgcctcttaa

SEQ ID NO: 23576 - DNA, 201 bp, Homo sapiens
aaaaagtgcagacagggccaggcacgggggctcatgtctgtaatcctacctagcaccttggaaggctgaggtgggcagatcacttgcgctcaggagttcaygaccagcctgggcaacaaagtgagaccttgtctctatacaaaataaaaaacataattagccaggtctggtggtacacacttgtagtcccagctactcagg

SEQ ID NO: 23577 - DNA, 201 bp, Homo sapiens
gaccccaacatcctcatgaagaaagtataaaaagaagactaaattaaaatcaatctttaattgataaagatcagtggataccaatgacataaaaataaaawaaaaaacaagaaaaatcaattaaaccaaaaaccagttgtttgaaatgatcagtacaattgagaaacttctagccaaactgatcaaaagaagacataaatt

SEQ ID NO: 23578 - DNA, 201 bp, Homo sapiens
tttcatgaagaattcctcaaattgaaagagttactcagatgaagagaaatctacagatataaggaggattttaggaatcctctactgctactacttcttayttatttagagacagtctcaacctgtcacccaggctggagggcagtggtgtgatcttggctcactgcaacctctgcctcccgggttcaagtgattctccca

SEQ ID NO: 23579 - DNA, 201 bp, Homo sapiens
tttatgattcaaagaaataaagaagaaaagtgtgatctaagatagagaaactctattaacccagttgacctcaatgacgttcagagaacactccacttaayagcagcagaatacacattctaacatttatcaagatagaccatattttctgagctataaaatgtctccataaatttaaaagaattaaagtcatacaatcat

SEQ ID NO: 23580 - DNA, 201 bp, Homo sapiens
caaacttaaattcgtgattaattaaaaaggtatcttaggctgggcgcggtggctcacgcctgtaatcccagcactttgggaggccgaggcgggtggatcaygaggtcaggagatcgagaccatcttggctaacacggtgaaacgctgtctctactaaaaatacaaaaaaaattaatccggcgtgttggcgggcgcctgtag

SEQ ID NO: 23581 - DNA, 201 bp, Homo sapiens
aacagttaataaaacacttttaacctaataattaaggaaaaaatgcatctattttatctatcaaactaataaagacttaaaagtgatgaccagtgttgacraggaagaaatgaatgccattctcacagttggtgagactgaaaatttcaggaaagcaattcaggtaacaattactttaaaccaatcataccccttgactca

SEQ ID NO: 23582 - DNA, 201 bp, Homo sapiens
cacttgagcctgagaggcagagcctgcagtaagccctgattgtgccactgcactccagtgtgggtgacagagtgagaccctgtcttaaaaaaagataaaarctatcaaatatagtgcgtgtttattttggggactaaatgcttatttttaaggggatggttaaagtactcagcattatttagggagttaaagccttaggtt

SEQ ID NO: 23583 - DNA, 201 bp, Homo sapiens
ttacttttaggattcagtcctaaagaaacagatgaaatggggcaaagatttcattaaacacttacatttaagcactttcccaagtgttttataggtattartacatttaattctcactctatgaggtaagtctattagtgcctttttattatttatttatttatttatttttcttgagatgaggtctcgttctataaccca

SEQ ID NO: 23584 - DNA, 201 bp, Homo sapiens
ctgtgcagcaaaccaccatggcaaatgtttacctatgtaacaaacctgtacatctggcacatgtaccccagaacttaaaataaaagttaaaaaaaaaaaaagattctgtgccaggcatggcacagattgtcttggtaagcaagattgctcccttaaggagaatataacagagaatacaatgagttaaaatatgtaaagtac

SEQ ID NO: 23585 - DNA, 201 bp, Homo sapiens
gctactcaggacactgaggtggaaggatcacttgagcctgagaggcagagcctgcagtaagccctgattgtgccactgcactccagtgtgggtgacagagygagaccctgtcttaaaaaaagataaaagctatcaaatatagtgcgtgtttattttggggactaaatgcttatttttaaggggatggttaaagtactcagc

SEQ ID NO: 23586 - DNA, 201 bp, Homo sapiens
ttagccctaaaattctgtatgtattctttgacttttatattagaaaccatcaaagctgggcgtggtggctcctgcctataatcctagtactttgggaggcrgaggcagggggctgacatgcgcctaggcattcaacaccagcctggacaacatagcaagactctgtctctacacacacacaaaattagccaggtgtggtgg

SEQ ID NO: 23587 - DNA, 201 bp, Homo sapiens
tttaacacttattcactctttcaggctttattatgtccttgtggcagactcatagatatctgtaaataagaatttggttattcctgatgctccaaaaaaaktaatgaaacagggtgaatactcaagtttcttttcaaaataactgttctatagcataattaaatatcagtcacaactttaatccactgaattacttttcaa

SEQ ID NO: 23588 - DNA, 201 bp, Homo sapiens
aggaggcagagcttgcagtgaaccaagattgcaccactgcactccagcctgggtgacagagcgacactccatctcaaaaaaaaaaaaaaaaaaaaaaaagmcaaagtcagtagaaagaaatgcttgggttgagataagggggggtgggctgtgattcttgttatatagatgaagcctcagatagcaggcttcagagagaat

SEQ ID NO: 23589 - DNA, 201 bp, Homo sapiens
ggatcacaaggtcaggagatcgagaccatcctggctaacatggtgaaacccgtctctactaaaaatacaaaaaaaaaaaattagccaggcgtggtggtggrcacctgtagtcccagctactcgggaggctgaggcaggagaatggcgtgaacccaggaggcagagcttgcagtgaaccaagattgcaccactgcactccag

SEQ ID NO: 23590 - DNA, 201 bp, Homo sapiens
ctttgggaggccgaggcgggcggatcacaaggtcaggagatcgagaccatcctggctaacatggtgaaacccgtctctactaaaaatacaaaaaaaaaaaattagccaggcgtggtggtgggcacctgtagtcccagctactcgggaggctgaggcaggagaatggcgtgaacccaggaggcagagcttgcagtgaaccaa

SEQ ID NO: 23591 - DNA, 201 bp, Homo sapiens
ggacagcttaaggaaggagcaatacaggtcataggtggattcaaagattttctgatttggaattggtcaaaagagttaagctgaagacttaaagtcaggcygggcgtggtggctcacgcctataatcccagcactttgggaggccgaggcgggcggatcacaaggtcaggagatcgagaccatcctggctaacatggtgaa

SEQ ID NO: 23592 - DNA, 201 bp, Homo sapiens
cttaattttcctgattggtttgcattgtggattttcagaactattaataattattgaatctgtaattttagaagaatttatttatgaatacagttgaatcragtagttaattaagcaaaggtgaattggatgttcgagttcttttcaaggtgcttcctcagcgacacctctattctggtctaaacgctgttgccacctctc

SEQ ID NO: 23593 - DNA, 201 bp, Homo sapiens
aaggcagctctggggaaattcgtctgtgtaactggggtgctatgcaggcctgtctgtttgactgtcatgcaggtctgtctgtgtgatcatcagggagaatyggccggccacattttcaatctttctcctcttctggaaaaaataaccactcagtctttagcgtcagctcacccttcagggtttgacacctggagcagcagt

SEQ ID NO: 23594 - DNA, 201 bp, Homo sapiens
tgactgtctcagatttcgttgacccgagacgggtcctggcactaggaatgaaagactgtctctattattttggtttgctccaggttagggagaagcccacrcaaggctcctactgaccatatgtttcatttctagctttgctgtctgggcaccaatttccctaggtttaactatttgctcaatgttaaggcagctctgggg

SEQ ID NO: 23595 - DNA, 201 bp, Homo sapiens
gcaaaaatgctttctaagtcggattaagctgtgagcggcccagtacctacaaggcctgtctactgtggtaccagagtgattatttctatcttatctgcttyacagcttggtctggagggctgccttagactctccaatgaatctattcgaacagctgcctctgttaccttgactgtctcagatttcgttgacccgagacgg

SEQ ID NO: 23596 - DNA, 201 bp, Homo sapiens
agaaggctggagataattccaccaggccaactcaaagtgtcaacaattgtcttagtgtttatataggttggggttatgcgcctgtgtgcagtgtagcattygcctaagtctactggtaactaattttgtttcaactagaaggtcagaggcaaaaatgctttctaagtcggattaagctgtgagcggcccagtacctacaag

SEQ ID NO: 23597 - DNA, 201 bp, Homo sapiens
tgactatttttcctctcttaattgcgccagagctttgttgagaatcagttgattgtataaatgtagttctgtttctggacttaattctgtttagttgatayctttattattaagctaataacacactcctgattcttctagttttatattaagtcttgaagaaaggtattataagtctttcttctcttttcaagattgttt

SEQ ID NO: 23598 - DNA, 201 bp, Homo sapiens
gaatttattgctgtaaccagatacaggcagaaggctggagataattccaccaggccaactcaaagtgtcaacaattgtcttagtgtttatataggttgggrttatgcgcctgtgtgcagtgtagcattcgcctaagtctactggtaactaattttgtttcaactagaaggtcagaggcaaaaatgctttctaagtcggatt

SEQ ID NO: 23599 - DNA, 201 bp, Homo sapiens
ataacgagaagcagacagactaggaaagaagggaatttattgctgtaaccagatacaggcagaaggctggagataattccaccaggccaactcaaagtgtyaacaattgtcttagtgtttatataggttggggttatgcgcctgtgtgcagtgtagcattcgcctaagtctactggtaactaattttgtttcaactagaag

SEQ ID NO: 23600 - DNA, 201 bp, Homo sapiens
tctgtgcagcaaaccaccatggcaaatgtttacctatgtaacaaacctgtacatctggcacatgtaccccagaacttaaaataaaagttaaaaaaaaaaaaagattctgtgccaggcatggcacagattgtcttggtaagcaagattgctcccttaaggagaatataacagagaatacaatgagttaaaatatgtaaagta

SEQ ID NO: 23601 - DNA, 201 bp, Homo sapiens
ggacatggatggagctggcagccattatcctcagcaaactaacgctggaacggaaaatcaaacactgaatgttctcacttataagtgggagctgaatgctraaaacacatgaacacatggtggggaacaacacacactggggcctgttggggtgggggcagggggagagagagcatcaggaagaatagctaaaggatgctg

SEQ ID NO: 23602 - DNA, 201 bp, Homo sapiens
cagccctttgggaggccgaggcgggagaatcacttgagcccaggagtttgaggccagcctgggcaatttaagaccccatctcggccgggcacagtggctcrcgcctgtaatcccagcactttggacggctgaggcaggtggatcatgaggtcagatcgagaccatcctggctaacatggtaaaaccctgtcgctactaaaa

SEQ ID NO: 23603 - DNA, 201 bp, Homo sapiens
tgagtagggcaatcaggcaaacaaaataaataaagggtattcaaataggaagagaggaagtcatattatctttgttgacagatgacatgatcctatatctrgaaaaccccatcatctcagcccaaaagcttcttaagttgataagcaactttagcaaagtctcaggatacaaattcaaggtgcaaaaatcactagcattcc

SEQ ID NO: 23604 - DNA, 201 bp, Homo sapiens
ccataaaatgctggcaaaccaaatccagcagcacatcaaaaaacttatccaccacaattatgttggcttcatccctgagatgcaaggttggttcaatgtaygcaaatcaagaaatgcaattcatcacataaacagagctaaagacaaacccacatgattatctcaatagactcagaaaaagcctagaataaaattcaacat

SEQ ID NO: 23605 - DNA, 201 bp, Homo sapiens
aattagctgggtgtggtggcaggtgcctgtaattctagcgacttgggaggctgaggcagaaggattgcttgagcctgggaagttgaggctgcagggagtgrtgattgtaccaccgaattccagcctgggtgacaaagcaagaccctgtcgcaaaagtaaaataaaataaaaaaatttagagatgctttaaaactcttctca

SEQ ID NO: 23606 - DNA, 201 bp, Homo sapiens
ttataaggccagcatcatcctgataccaaaacctggcaaagatacaacaaaaaaagaaaacttcaggccaacatccgtgatgaacatcgaagcaaaaatcytccataaaatgctggcaaaccaaatccagcagcacatcaaaaaacttatccaccacaattatgttggcttcatccctgagatgcaaggttggttcaatgt

SEQ ID NO: 23607 - DNA, 201 bp, Homo sapiens
tgggtgtggtggcaggtgcctgtaattctagcgacttgggaggctgaggcagaaggattgcttgagcctgggaagttgaggctgcagggagtgatgattgyaccaccgaattccagcctgggtgacaaagcaagaccctgtcgcaaaagtaaaataaaataaaaaaatttagagatgctttaaaactcttctcagctgcat

SEQ ID NO: 23608 - DNA, 201 bp, Homo sapiens
tccctaactcgttttataaggccagcatcatcctgataccaaaacctggcaaagatacaacaaaaaaagaaaacttcaggccaacatccgtgatgaacatygaagcaaaaatcctccataaaatgctggcaaaccaaatccagcagcacatcaaaaaacttatccaccacaattatgttggcttcatccctgagatgcaag

SEQ ID NO: 23609 - DNA, 201 bp, Homo sapiens
aatgtcaggaaacactacaatggtataaaaataagataaatgaaatcataaaaaatgctttcttcagaatacataagccaaaaataaacacagccataatyatttgagcaatttagttaaaagccacaaaatacttcaaagttatcaccacatgctaacacatgtattaataacaaatacctcatgtcctgaataagagag

SEQ ID NO: 23610 - DNA, 201 bp, Homo sapiens
aatttacagatgaatgttaccagaggtacaaagaagagctgataccacttctaatgaaactattctaaaagattgaaaaggaggggctcctccctaactcrttttataaggccagcatcatcctgataccaaaacctggcaaagatacaacaaaaaaagaaaacttcaggccaacatccgtgatgaacatcgaagcaaaaa

SEQ ID NO: 23611 - DNA, 201 bp, Homo sapiens
acataaactagaaaatcaagaagaaatggataagttcctggactcatacaccctcccaagactgaaccaggaagaagttgagtctctgaatagaccaatamtgatttcagaaactgaggcattaataaatagcctaccaaccaaaattccaggactagacaaatttacagatgaatgttaccagaggtacaaagaagagct

SEQ ID NO: 23612 - DNA, 201 bp, Homo sapiens
taaagcagatctcatgatggtttattttttaaaaagaagaagaaagaaaagaaaacacaagtgcagaaggatatgaacaccatgatacttcttatagaacrataatgtaaacaatattatttggttattgagaaacatttacattataaatgtaaaaactcataattcataatatttacccatatggaaggagagaaaatg

SEQ ID NO: 23613 - DNA, 201 bp, Homo sapiens
acataatggtaaagggttcaactcaacaagaagagctaactacctaaatatatatacaaccaatacaggagcacccagcttcataaagcaagttcttagakaattacaaagagacttaggcgcccacacaataatagtgggagactttaacactccactgacaatattaaacagatcatcaagacagaaaattaacaaaga

SEQ ID NO: 23614 - DNA, 201 bp, Homo sapiens
cctatgaaatatactttcaagccacaaggtagtgagatgattaactgatacaataaacacatcagcattaatcttaaaaaagacatggaatttatgcttakgggtgaagttcttttgttcttctttaagtgaatgcttttctagactctttaactctgtgagaaatcaatagatgagtgttaagccaaggaaaaattcctt

SEQ ID NO: 23615 - DNA, 201 bp, Homo sapiens
gcatcgcgctgctcattcatccggccgcactttcttttccgtttccacccatcccttcccatttccttctccctttccccgccagcttcgcatccatctcycccaccccgtaaccccctcctgcctccatccaccggggctatggccgcagaagaggtattgcagacggtggaccattataagactgagatagagaggcta

SEQ ID NO: 23616 - DNA, 201 bp, Homo sapiens
ggagagcagtggcgcaatctcggctcactgcaagctccgcctccggggttcacgccattctcctgcctcagcctcccgagtagctgggactacaggcgccygccaccacacccggctaattttttttatatttttagtagagacggggtttcaccttgttagccagaatggtctcgatctcctgatctcgtgatccaccca

SEQ ID NO: 23617 - DNA, 201 bp, Homo sapiens
agaaatttggcttctgaaaccaaactgttaactttacatggacaagttgtgacttcctgataggataaagactaaataaatgatttctagactaaataaakagatttcttcaaaaaggagtaggcttatttaaccatacttgatcataaagtaagagtaaataaaactgttataaggttaaacagtattaacagatttgga

SEQ ID NO: 23618 - DNA, 201 bp, Homo sapiens
ccaaagttccccttgctcatttgattcctcatacctgtttgtcctggtttgtatatgggtttgtctgtctggacaaagactaggttctctgctgtagttayatatattgatttgctctttgtgaaatgcagagttgccccctctacctccacagcaatgaccacccaggaagatggtaattctggaatctgtaaaacagaa

SEQ ID NO: 23619 - DNA, 201 bp, Homo sapiens
aatgcttcgtaatctgcaaacatctgtgtaaaacggttagcaaagacctctcggagctgtacattgagctggtagtcccttagttctgcctcttcacaatkcagttttaaatccttgtctttttcacccagagaagcagagaggtccattttttccacagccacaccagtacgcttggccagagcctgcaagcgggctatg

SEQ ID NO: 23620 - DNA, 201 bp, Homo sapiens
tatccctcaggtatctgtagtagacttcaaacagtatttaacctctactgtccatactctcttaatcaggacaaggttgttagttaaaaagaaggttgtgyttctagattggggggtggagtgccaaaagtgtagcccatcacataaaaataatattgattacatcaatggttgaacataagacatggggtggaagttaat

SEQ ID NO: 23621 - DNA, 201 bp, Homo sapiens
cacatgcataatttggcttatctccctagtttcacagaaattcatctcaggtattgccaacaatgacctacggcactagaaaatgaaaggcacagcctctsgcagctcctgaagtaagagcaaagactaatcatggagtacttgacccctgtcctcagtatgacatcaatgtggagccaccacaccacctaagccacccaa

SEQ ID NO: 23622 - DNA, 201 bp, Homo sapiens
aggcaaaatgaactacagactgggacaaaaggtgtgaagtctctcgtttacatagattggattcatcacaaatttaccaggtcaagaattccatataaagsgtttcagccttcacttgcagatcatgaaaaatatgacggagatccacagaatcctcagaaactgcatattgttaccagaataaaaaagtacaaaaaggtg

SEQ ID NO: 23623 - DNA, 201 bp, Homo sapiens
catcctgggcaataaagtgagactctgtctcaaaaacaaaacaacaacaacaacaaaaaaaagtttcactagaatttcaggaggattaaaaaaagatacaygaatgcaatatttacaaagatagttgagaattttccaaaatgggtaaaggacattaattcttaaatttcaggaaacataatgaaccacaagcagaacaaa

SEQ ID NO: 23624 - DNA, 201 bp, Homo sapiens
attgctcacaatcaatatatttggtcattgaaatttggaccatggtttgaggagtagctggtgttttaactaaagcatagtaactgaaacttacccatatyagaacctcgccaagagaggactaccatgaaagttaaatgaggggcattaggttccataaaggatcataaaaatactactctactctattatacatttaca

SEQ ID NO: 23625 - DNA, 201 bp, Homo sapiens
tgtctatgagtgaactgaataacagatacctagtaaccaatcactggccgactttgaatgaagtggtgtcattggccgttggtcatgatgttatgtagtgmttttatagactgaagtgctggcagcaaagattgtgcgttatgcattgctcacaatcaatatatttggtcattgaaatttggaccatggtttgaggagtag

SEQ ID NO: 23626 - DNA, 201 bp, Homo sapiens
gcccagggaggtcaagactgcagtgagcctagatcgtgctactgcactccaggatgagcgacagggtgaggccctgtctcaaaaaaccaaacaaacaaaargaagtaatataattgacaaacttcaggtaaaaataattgggggaaaaagagaatgcacaaacagtattaggaatgaaaaggaggacaaaactacagatat

SEQ ID NO: 23627 - DNA, 201 bp, Homo sapiens
gtaattcatttttgtaaaacatcacatggatttatcactaggagacaagacaaggcaactacatccttagctgtctatgagtgaactgaataacagatacstagtaaccaatcactggccgactttgaatgaagtggtgtcattggccgttggtcatgatgttatgtagtgcttttatagactgaagtgctggcagcaaag

SEQ ID NO: 23628 - DNA, 201 bp, Homo sapiens
ttcaggtaaaaataattgggggaaaaagagaatgcacaaacagtattaggaatgaaaaggaggacaaaactacagatataacaggggtcaagaaaacaagraaatattaagactttttgctaatatattgaaagcttaataaaaattttcttagagaaaatagcaaggaacaaaaatttattcaagaaaaaaatagaggtg

SEQ ID NO: 23629 - DNA, 201 bp, Homo sapiens
tctgcacaacaaaggaaacaatcgacaaaatgaaaaggcaacctatggaataggagaaatatttacaatctgtatatctgataaggggttaatatctcaamattttttttcttttttctttatttttcttttatgtccacttccaagctcaaatatctcaaatattatgtaagaaactcacatagctcaatggcagaaaac

SEQ ID NO: 23630 - DNA, 201 bp, Homo sapiens
ccattgcactccagcctgggcaacaaaacaagacgccgtctaaaaaacaaaaaaaattccaaaagctcctgtgggcagaaggattcttccccagctttttkctgtcttggcttatctctgttgctgacctgctgtcttaaccactgccctccagttgccgcatgcctgttgatgataagagtgtcctggcacatgatcagt

SEQ ID NO: 23631 - DNA, 201 bp, Homo sapiens
agaggttgcagtgagccgagattgctccattgcactccagcctgggcaacaaaacaagacgccgtctaaaaaacaaaaaaaattccaaaagctcctgtggrcagaaggattcttccccagctttttgctgtcttggcttatctctgttgctgacctgctgtcttaaccactgccctccagttgccgcatgcctgttgatga

SEQ ID NO: 23632 - DNA, 201 bp, Homo sapiens
gttccttctccactgggacagctaggaaggcgggagaggcttccagctgcacactgacctgaaaccacacataagaaagggagtagagagggaaggagaasagagggagaatgggtttgaagtaaagcatcttgaggaattggttagatttcaggttgcctcacattaaagatgatataaatgaagatcaagtacctgaaa

SEQ ID NO: 23633 - DNA, 201 bp, Homo sapiens
cacagtaggcagtacttgggagggtcttatagaccccaccctgtggaagtgggtctcaacattacacaaccccctctcgggcccgtggacagttgctgtcytctctgttttctctctttgtgcctgtgccaccctcagagaagaagaaaggagctgaggaggagaagccaaagaggaggaggcaggagaagcaggcagcct

SEQ ID NO: 23634 - DNA, 201 bp, Homo sapiens
atttattactcacctgggaaaggacctgatcgttgccattggcagcatggttcaatggctgcaaatggatctgatggagagcgtgtggctttgggaggagygtgccgccttccacagtgagcagcgaggctgggacctgcagggatgaggtcccgggaggggatgcggcagcccttgagtgctggttggggaaggagagct

SEQ ID NO: 23635 - DNA, 201 bp, Homo sapiens
cttcggattacaagtgtgagccaccatgcctggccaggagaacttaatatattgctgacagttaatttaaaaactttcagccaggcatggtggctcacacytgtaatcccagcactttgggaggccaaggcaggcagatcactagagttcaggtgttcaagaccagcctgggcaacatgacaaaatgccatctctacaaaa

SEQ ID NO: 23636 - DNA, 201 bp, Homo sapiens
ggatgcacgttggaggggacacagggccagagcaaggtgggaatgcgggtattatgggccaggccatcctccagctggtggagcaccgcagcactgcagtrtgtggccctggcttaacagcagtgcggaaaagcttttctcttggggctgtggtgctttccaggtgtgtgaagttaaaacattttagggccatacggtagg

SEQ ID NO: 23637 - DNA, 201 bp, Homo sapiens
atcatccgcttctctacaaggctggaatttatggtggctgcacatttggaatgttttctccttttatttatttatttttagatcagacaatcacaagagamtattcttttgttttatttttagatcagacaatcacatgagaatattctgttgtgatcgctggcgtttagaaggaaacttgtctggtttgtgaagcaatgg

SEQ ID NO: 23638 - DNA, 201 bp, Homo sapiens
  misc_feature (1)...(201): n = A,T,C or G, or insertion/deletion polymorphism (see Tables 1-2)
gggatggtgttggggaacccctgattttgtagtcatccaagaaaaaatgtatgtggcctggtgctacggtttggacatggtttgttggccccaatgttggnggtgaggtgtttgggtcctgggggtggatctctcatgaatggctttgtgccattctcatggttgtgagtgagtagtttttcactcttactttccatgaaa

SEQ ID NO: 23639 - DNA, 201 bp, Homo sapiens
tgcctgtctcagcttcccagagtgctgggattacaggtgtaagccactgcaccaggccaaacttcttttctttataaattaaccagcctcaggtattttayagtaacacaaataaaccaagacacctgatacctcatttgtggctggcatcagaagtgaggacagtcttgtgagaatgaactcttaaacctgtggagtctg

SEQ ID NO: 23640 - DNA, 201 bp, Homo sapiens
tggctggcatcagaagtgaggacagtcttgtgagaatgaactcttaaacctgtggagtctgacattcagttaggaatgaattgaactgttgggcatccagytggtatcacaaattgacaggtgttggggaggaaagactctctcacttggtgtcagaaaaactgagatttgttataacagcccaggctcatggaaacctgt

SEQ ID NO: 23641 - DNA, 201 bp, Homo sapiens
gtgtagtccccagtgggtaaattctgacatgttagtagattataaagttgcatcttactttcttgaagattttcattgtgtgtatttctatgtttcatacyccggagtcatttcttaaaatgatatattacattcagtatgaagccttctttgcagtgaggaaacaggtataaggaaggaaagcaacatgcctgaggtgtt

SEQ ID NO: 23642 - DNA, 201 bp, Homo sapiens
ctcactatggaacaatcacagatggctatatgtgatccagacacaaaggtgatgattcagtcagaaatgaattgaactgttttatccaatccttgagggamcagccagtctcaaggactggataaaagctactcgaagtctgtttaccttgagaagggagactgcccaattccccctataaattccaagtggaacacccca

SEQ ID NO: 23643 - DNA, 201 bp, Homo sapiens
cctcaacacctacttaatattgtgcctggcaataaaaatgttcgttgagtaaatggatagatgaataaaaactgtactcttaggtctgaattatatactcyaaaatttttaagacacttatttaaaatattggtagctttgaaaatgattcatttcaaagccttgactatatataaactaaaatataatttaagaaataaa

SEQ ID NO: 23644 - DNA, 201 bp, Homo sapiens
gcctgcaaatgaaaccgagaaaagacagatgaaagggaaaggcttatttcacaagcatgtgacaacttcacagggaagaagtgaaaataagagaagcaatkaggaatgggggcttatatgccattttaacaaaggacaagttgtggaaacattaacaagaccaaggaagtgagatctgggcatttggggcagtaagttatg

SEQ ID NO: 23645 - DNA, 201 bp, Homo sapiens
ttaaaacattaggaacattgagagttaaccttttatttctttgtaaacagcttatcaagagtattttgatcttgccttcccataaagcttagggccgggcrcggtggctcacgcctgtaatcccagcactttgggaggccgaggtgggcagatcacgaggtcaggagttcgagaccagccgccaggctgaaaccccatttc

SEQ ID NO: 23646 - DNA, 201 bp, Homo sapiens
gactgaaggacataaaacaatgctgaaacttgaaatatccacggtatctaaggcgattttggaaaaacactctaatgggagaggacagtgcccaaaagagwtccctattgaaaaagaaatggtttatactggatcttgttaccagaggaatgcaaggaagagattctcacatatagggagcctctttttcccttggactga

SEQ ID NO: 23647 - DNA, 201 bp, Homo sapiens
ggaggccaaggtgggtggatcacttgacattaggagtttgagaccagcctggccaacatggtaaaaacccatctctactaaaaatacaaaaaatttgccargtgtggtggcgcgtgcctgtaatcccagctactcgggaggctagggcaggagaatcacttgaatctgattcagggaggcagaggttgcagtgagctgaga

SEQ ID NO: 23648 - DNA, 201 bp, Homo sapiens
taatagcacagctattctcaggagccgccgggtcaaaaggggtgtaactctggtaggcctcctggaggcgttccaaaaacgccccgggtggctcatcaggyccctggacaacttcaaatgtcttagacaaatttatgtgttttcgagcagctcctttgatacccgcaaggagatactggtgaaaatcatctaaagctctct

SEQ ID NO: 23649 - DNA, 201 bp, Homo sapiens
tgtgaaacattaaaaagtctcttactgttggttataaatatatatagaaatgaaaatatagtaaaactacttagtacttcataatttaaaacattaggaayattgagagttaaccttttatttctttgtaaacagcttatcaagagtattttgatcttgccttcccataaagcttagggccgggcacggtggctcacgcct

SEQ ID NO: 23650 - DNA, 201 bp, Homo sapiens
tgggccctgtggctcacaccttctaatcccagcactttgggagactgaagtgggagggctgcttgagtccaggatgttgaggctgcagtgagccctgatcrtgccactgcactccagcctgggcaacagagtgagaccctatctcaaaaaaattaaaaagaagaaattagagcatatagagaagtaaaacagaaataatta

SEQ ID NO: 23651 - DNA, 201 bp, Homo sapiens
cctaattttcaccggtctctaagatcaattttgtaagagtattttttagggtgtggttcatgcgttctacctgcccagagctctgggatcgagaggcacartggagcttccattgaatgtttagtgccttactgactgactgagctatggacgaggtgaaggccggtccattatcagaccctatggcagcaggcagcccat

SEQ ID NO: 23652 - DNA, 201 bp, Homo sapiens
cttgagataacaaaactgtatcttaggttctaatatatgtgatcatactatacaggcagtccttggtttgcatagtagtctgggacagtaaaaaatggtcrtgcaaactgaaaccatgcaaaacaaacttaataattaatggggaaatttacaattgttttgtgatctttaaatatttttgtgaaacattaaaaagtctct

SEQ ID NO: 23653 - DNA, 201 bp, Homo sapiens
ctatccacgtgagaggattgtacagacacgaatctaaacaaggaagtagcaagtccattcaagcattaagaggctgattagtggtttattcattctgtctrcaagcatctactgatcatctattcagtacagaccattatcacaacaaaggtgaataagacactatgcaatagccagggaaacagcctcaaaaacagttaa

SEQ ID NO: 23654 - DNA, 201 bp, Homo sapiens
cctgtggctgctgggggttagcagacacggtttgttgtctgacatacgggctctctcctcccggcccctcaccagccccagaggtgaaaaggctggagggsaaaggctgagtgagggaggtctgtggggagcactggtttccccaggccccagagacttaaacacaggaagaaaaaggcaagagagaattaacgatgccac

SEQ ID NO: 23655 - DNA, 201 bp, Homo sapiens
tcccgtggccacagggctcctgcccaggggcttgtcaccttcccctcctccttcctgagtcactccttcagtagaaggccctgctctctatcctgccccayagccctgcctggatttgtatccttggcttcgtgccagttcctccaagtctatggcacctccctccctctcaaccacttgagcaaactccaagacaccttc

SEQ ID NO: 23656 - DNA, 201 bp, Homo sapiens
cagtgtttgtcgtgggcgtggtctgcagggatcctgttacaaaggtgaaacccaggaggagagtgtggagtccagagcgctgccaggacccaggcacaggygttagctcccgtaggagaaaatgcgggaatcctgaatgaacagtgggtcctggctgtccttggggcgttccagggcagctcccctcctggaatagaatct

SEQ ID NO: 23657 - DNA, 201 bp, Homo sapiens
tcctgccctctggagacagtgtttgtcgtgggcgtggtctgcagggatcctgttacaaaggtgaaacccaggaggagagtgtggagtccagagcgctgccrggacccaggcacaggcgttagctcccgtaggagaaaatgcgggaatcctgaatgaacagtgggtcctggctgtccttggggcgttccagggcagctcccc

SEQ ID NO: 23658 - DNA, 201 bp, Homo sapiens
aatcactggtctctcactcccttaaaattttttctgtaaattgctttcaaatcgtagaggggaatggattatgaagtataaatcaagaagagcaaaattayaagaaaaagaggccgggcgtggtggttcatgcccgtaatcccagcactttgggaggccgaggcgggtggatcacctgaggtcaggagtttgagaccagtc

SEQ ID NO: 23659 - DNA, 201 bp, Homo sapiens
ttcggcccctccctgatcttaccaggtcacgtgatccctccagacaacatctgccccttgtcatctgcagcgggatctccaaccagccgctggaattcacsttccagaaaagagacctgcctcagatggtcagtcccagccagctcgctgcaccacagcctggcctcaggcagcaaagggttttctggggcagggacgctc

SEQ ID NO: 23660 - DNA, 201 bp, Homo sapiens
tgaagggcgttttggaaacagccttatctgtaatcatgtgtactaattgaataacgtttacactttccagtgcaaatttgcttaattttcaaaggaaaaarggaaaacaaaaacacttctgacataatcagttttcactgagattgtatagaatagagattttccatctcctttatgaaaaattcaaatgacatggctatt

SEQ ID NO: 23661 - DNA, 201 bp, Homo sapiens
taaatttgatatgtgcattttttcataatttaaaaaataaaaatagtatagaaaaacacctgtgaggaggaaagaagtattcaggaaaaattgtataaatytgaaaacatggaagtttaacataagtatttataacaagatgctagaaaaaaaaaaccaaaagaggtagaagaaaaaatataataaaaataaatgatgtaa

SEQ ID NO: 23662 - DNA, 201 bp, Homo sapiens
caatttgatgtttcaatacacacacacacacacagacacacacacatatctatatatgtagtataatgatcatattggggcagtgttaccagtacttcatycatttatcttttttttttatggtgaagacattcaaaaacctctcatctagctattttgtaatttgctaaatcttactgtaaactattgtcagcctactgt

SEQ ID NO: 23663 - DNA, 201 bp, Homo sapiens
tatggtgtgttctaagaaggatctgtgtgcctttacgttaatattttttctgattataaaagtcgtgtgcttactgttaaaaagatattataggcctgggygcagtggctcatgcctgtaaacccagcactttgggaggctgaggcaggcagatggcttgagtccaggaggttgaggctgcagtgagctatgatcgcccaa

SEQ ID NO: 23664 - DNA, 201 bp, Homo sapiens
agtgagactttgtctcaaaaataaaaaaaaaagtgggggggtacaatttgatgtttcaatacacacacacacacacagacacacacacatatctatatatktagtataatgatcatattggggcagtgttaccagtacttcatccatttatcttttttttttatggtgaagacattcaaaaacctctcatctagctatttt

SEQ ID NO: 23665 - DNA, 201 bp, Homo sapiens
tgatatccattggggtctggcttcttagagagcattacctgttccgttctctgtaacaagagcatgcactttgaggaaactccagtatccttaccgatttmactcaaaagcacctgtgttaatgaacttggagacacagccatctttccccaactgaaaagaacaataaaaaaaagttatattttaaaggaagactgtaag

SEQ ID NO: 23666 - DNA, 201 bp, Homo sapiens
ctcccacctcagccttccagtagctgggaactacaggtgtgcctcactatgcccagccactgcttaactctgattttatcctcaatcattgtctactgtargatgaatgctgtattttttttttttttaattctagagaggaaacctttctgtagtgtaacttgcaaaagagttggtgtttttctttctcagtgatctctt

SEQ ID NO: 23667 - DNA, 201 bp, Homo sapiens
agtatccttaccgatttaactcaaaagcacctgtgttaatgaacttggagacacagccatctttccccaactgaaaagaacaataaaaaaaagttatattktaaaggaagactgtaagaaatacctatataatataatagggaaaatgtgtgacctcactgaagcaactttaagaatattgtattacccaagttttagttt

SEQ ID NO: 23668 - DNA, 201 bp, Homo sapiens
cccacatttctgtgtggcatcagagggctagaggtgaatgagtcctcctctcctctcctctccccctcctcccctccattcccctcccctccccttcccckctcccctcctttattttttttttttatgagacggagtctcactgtgtcacccaggctggagtgcagtggtgtggtctcagttcattgcaacctccatctc

SEQ ID NO: 23669 - DNA, 201 bp, Homo sapiens
gaagaaaggaagagagaattacttaaggtaaaatttttcagatacaaaaaggtgatctgtaagtaataatggaagcagtgagtcctcagcttctgctggtsggaaggttcatgctgaatatttagcaggcgctctctctaaagagaacagccaccacacttatggcagggactttgctgtcagtagctcaagaggcaaaat

SEQ ID NO: 23670 - DNA, 201 bp, Homo sapiens
ttcactatccattaagacatagcatctctattttctctacacattcatattcagatgacaactagtatcctagtctaggctcagcattagtcttcacaaaygtactggtaaaataaaatccatagtttgttattttcttaatatgtgttggaagaactttgaatgaaagataccacaaagataacttccttctgagattaa

SEQ ID NO: 23671 - DNA, 201 bp, Homo sapiens
gaaagcaagagaaataatcaggggctagcccatgaagggccttggtaggccatgttagaactgtggggaggacaatgggaaacctctgaagggtttttagragagggacagaattagacgtgcctcttagcacatccatcttggaacactaaggggagtggttttcaaaggggttccaaagaggcagcaggaatgtctcag

SEQ ID NO: 23672 - DNA, 201 bp, Homo sapiens
caggggctagcccatgaagggccttggtaggccatgttagaactgtggggaggacaatgggaaacctctgaagggtttttaggagagggacagaattagaygtgcctcttagcacatccatcttggaacactaaggggagtggttttcaaaggggttccaaagaggcagcaggaatgtctcagggccttggaagggagtga

SEQ ID NO: 23673 - DNA, 201 bp, Homo sapiens
gcactcacatcaggagctcagtgtcaggcaggcaagcctcctgcaggggagccccgccctgctcaggtggcctcatctcccctcccagctggtggtgctgycctatcagatgctgctgcatgcggccactcggcaggctgcgggcatccggctgcaggaccaggtggtgatcatcgacgaggcgcacaacctgatcgacac

SEQ ID NO: 23674 - DNA, 201 bp, Homo sapiens
tgtaacagcctgtttctgcccttgtcccccataatctatttcccttataagagccaaagcaatccttaaaaaatatgttagatcttgtcactcttgccaamattctccaatggactcttatctcactaaaagctgatgtccttataatggcctgcagggaagccctgcatgactcagcccccaacaacctctctgccctca

SEQ ID NO: 23675 - DNA, 201 bp, Homo sapiens
taggtcctttgcctttccatataaattttatgaccatcttgtcaatttctgcaaagaatccagctgaaattctgttggagtttgcattgaatatgtaaatmaatttgggtagtattgccatcttaacattcagttttttgacccagaaacaggggctgtttatccctttatttaggtcttctttcatttctttcaacaatg

SEQ ID NO: 23676 - DNA, 201 bp, Homo sapiens
aggctggtctcaaactcctgacctcatgatccgcctgcttcgtcctctcaaagtgctgggattacaggcttgagccactgagcctggaccatcattttaakgggcatttctcgctttatgtttttttgctaatgacttattacttgctgtttattttagattttagactgaaaatgttagacaaaaaagcaaattagagca

SEQ ID NO: 23677 - DNA, 201 bp, Homo sapiens
tttccctttcctgttttatttacacagaaggcatcttagtcagttgtctgaccatcgctcctctagtgggctgcgtggttctctgttggacagatgtaggragcttatccaaccagtaccctctggataggcaggcgcatgattacagggaaaggtccgggggcacatgctgtttggtatttgtgggctgtatcttctcac

SEQ ID NO: 23678 - DNA, 201 bp, Homo sapiens
attttttttttttttttgtacttttagtagagacgaggtttcaccatgttggccaggctggtcttgaacttctggtctcaagtgatccactcgcctcagcytcccaaagtgctgggattacagtgtgagccacagtgcctggacttcagcttgtaattctttttccatcaagtaggcaatacagaaacatagtgaccacca

SEQ ID NO: 23679 - DNA, 201 bp, Homo sapiens
atacaaaaatatcacaaagggtccagtgtgacccataacatttccagtgtagatcaaaactcagttacacagtttttcttttgggaaggcagcaaggcagwtgagaaaaaaagtgagctagagagtaaaaatgatctggatttaatttctgagtcttactgcctaactttgggcaaattacttaacctttgaaaatataag

SEQ ID NO: 23680 - DNA, 201 bp, Homo sapiens
atccctttccagcccattccccacccccatagggaatccgttttactagcttatcctttcagtctttctttttcccctaaataagcaaaaacgtgtcttcwtttttccctttcctgttttatttacacagaaggcatcttagtcagttgtctgaccatcgctcctctagtgggctgcgtggttctctgttggacagatgta

SEQ ID NO: 23681 - DNA, 201 bp, Homo sapiens
gtatttttcacctccatcaggtcatttatgttcttctctaaactagttattctagttagcaattcctctaaccttttttcaaggttcttagcttccttgcwttgggttagaacatgttcctttagctcagaggagttttttatcacccaccttctgaagcctacttctgtcaattcatcacacttattttccatccagttt

SEQ ID NO: 23682 - DNA, 201 bp, Homo sapiens
ttaatcttgtcttgtgctttatttcattaagttgtcttcaatctctgatgtcctttcttccgtgtgattgattcagctatggatacttgttatgcttcacraagttctcatgctgtatttttcacctccatcaggtcatttatgttcttctctaaactagttattctagttagcaattcctctaaccttttttcaaggttc

SEQ ID NO: 23683 - DNA, 201 bp, Homo sapiens
atggttgaactaatttacactcccaccaacagtgtaaaagcattcctatttctccacatcctctccagcatctgttgtttcctgactttttaatgaatgcyattctaactggtgtgagatggtatctcactgtggttttgatttccatttctctaatgaccagtgatgatgagctttttttcatatgtttgttgcctgcat

SEQ ID NO: 23684 - DNA, 201 bp, Homo sapiens
tgaacccgggaggcgaagcttgcagtgagccgagatcacgccactgcattccagcctgggcaacagagtgagacttcatctcaaaaaaaaaaaaaaaaaaagaaagaaagtgaaggaataaataaaaggctggctactccataggcagagcagccccatgggctgctggttgactatttttatggttatctttgatcacat

SEQ ID NO: 23685 - DNA, 201 bp, Homo sapiens
ccaccctgaaatggccaagaaacttagccagatggaccaggtgatccagtgagtgtggggtattggctgggggagtgggtttgtgtctgagaatctcgaaraagctcttatcttagagcttctttcctggctgaattctgtcttctctaggccttctgctgaagctagaggctccatccatcttgattaactcaatgtgta

SEQ ID NO: 23686 - DNA, 201 bp, Homo sapiens
tacccgtcaccacccctggtaaatatctcagctctgattcacttaaagacaatagtgatgtgagttcggcccctcttgttttcaaggaggtgttgctcctyatgttcctgagcttgacagagggtcccatgccccacacaactaggaaggtcttcttggtgtcctctctcttacctgccatagccaagcaaattgatccct

SEQ ID NO: 23687 - DNA, 201 bp, Homo sapiens
aggaggacctgggggtgtggcagcgaggaagggccgagccacggactgtggggccgaaactcgctcccgcccaccctttctcgaggctgtggcctccgcgrgagccgagcgggccgcaccgccggccgtgcgactgccccagtcagacacgaccccggcttctagcccgcctaagcctgtttggggttgctgactcgtttc

SEQ ID NO: 23688 - DNA, 201 bp, Homo sapiens
gctcaggccgcttaagcctgcatggagatatccgcctgcttttttcccgccggagcctggagctggacacagggctcccctacgaactgcaggctgtgacygaggcccctcataatccacgttattcacctttgccctgattgccagcactctgaacccatgcgggctaatgacctgcccatcctgctccatcttagagaa

SEQ ID NO: 23689 - DNA, 201 bp, Homo sapiens
tggttctacagacaatgtaactctgcaaatcgatggagtcctttacctgcgcatcatggacccttacaaggtacctgtcccctactttatccagccttttsagttgccctcttcactaaaatcttgtgcccaagcttcttacactatccgtgtccatctcaggcaagctacggtgtggaggaccctgagtatgccgtcacc

SEQ ID NO: 23690 - DNA, 201 bp, Homo sapiens
ggaggtgactacggaggtctcttgactaccagagcattagggatgtgggcaaggtgacatgctccagacaaggttgaacgttgaggctgtttgctggactstatttaagaccgggcataacaaaccttgcttgggaagacagggaaggagctgcagtgtctttgaggaaagaggggaggggaaaatctcggcccaatcgcc

SEQ ID NO: 23691 - DNA, 201 bp, Homo sapiens
caacctcagcctcccaagtatctgggaccacaggcacatgacattgcacccagctaatttttggtatttttggtagaaatggggtttcgccatgttgcccmagctggtctcgaactcctgagctcaaatcatcgacccaccttggccttctaaagtgttgtgattacaggcgctcaagccactgcgcctgtccttcatgta

SEQ ID NO: 23692 - DNA, 201 bp, Homo sapiens
agggacagcttcatctattcactgtttctttcctaagtatgagttttagagactggcgaggcgcttggggcaggagtatctactgactccatttcctcctyctagttcaaaaggtgatgacctatcaacagccattctcaaacagaagaaccgtcccaatcggttaattgttgatgaagccatcaatgaggacaacagtgt

SEQ ID NO: 23693 - DNA, 201 bp, Homo sapiens
gccgccctaattagtcgtggactggaatgggtagccagcggccaggataccaaagccttacaggacttcctcctcagtgtgcagatgtgcccaggtatgtrtacttgcatgacgtcggctatgcatagatgtgcaaggacagagaggcccatgggaaatacttgggcgtaagtgtaagagtggtgttctcagacaggaggg

SEQ ID NO: 23694 - DNA, 201 bp, Homo sapiens
ttcagcatgttggccaggctggtctccaattcctgacttcaactgattctccagcctcagcctcccaaagtgctgggcttacaggtgtgagtcatcgtgcytggcattttttttttttttttttgagagggagtcttgctctgttgcccaggctggagtgcagtggtgcaatctcggctcactgcaacctccgcctcctgg

SEQ ID NO: 23695 - DNA, 201 bp, Homo sapiens
gttctacagacaatgtaactctgcaaatcgatggagtcctttacctgcgcatcatggacccttacaaggtacctgtcccctactttatccagccttttcasttgccctcttcactaaaatcttgtgcccaagcttcttacactatccgtgtccatctcaggcaagctacggtgtggaggaccctgagtatgccgtcaccca

SEQ ID NO: 23696 - DNA, 201 bp, Homo sapiens
tagcactaatctgctgtttctctatatatttgcccattttggatatttcacagaaatgggatcataataatatgtggtcttttgtgactggcatcttccasttagtataatgttttccggtttcatctatatagcagcacacagcagtacttcattctttttcttttttaaaattgaagtaaaattcatataaaattcacc

SEQ ID NO: 23697 - DNA, 201 bp, Homo sapiens
tgttgtacttggttgcagccctgaaagagggatcagcctggggtcctccacttctggaggcctctaggctctatcagcaactgggggacacaacagcagagctggagagtctggagctgctagttgaggtagggaactgccaggtgaagatgtggggtggaggattcctgaggtgcttgtgatggggtgacttgactagtc

SEQ ID NO: 23698 - DNA, 201 bp, Homo sapiens
tttcttttagaagttttatatttttggctcttatatttagtttgtgatccattgagttgattttatgtacgtatgtatggtcgcgttcttttctttcctgkcttttttttttttttttttttgcatatggatattcaattctcctagctccatttaatttgaaatgattgggcaggtacttttgagcagtgcaagtacaga

SEQ ID NO: 23699 - DNA, 201 bp, Homo sapiens
ccagccttctgaggacccatgactcctctttccagggtttgaacatcctcatccctgtgttagaccggatccgatatgtgcagagtctcaaggaaattgtyatcaacgtgcctgagcagtcggctgtgactctcggtgaggggttcagggtgacatgggtgctctgaggctattaggatgtggttgctgtagatccagagc

SEQ ID NO: 23700 - DNA, 201 bp, Homo sapiens
ctccaattcctgacttcaactgattctccagcctcagcctcccaaagtgctgggcttacaggtgtgagtcatcgtgcctggcattttttttttttttttttgagagggagtcttgctctgttgcccaggctggagtgcagtggtgcaatctcggctcactgcaacctccgcctcctgggttcgagtgattctcctgcctca

SEQ ID NO: 23701 - DNA, 201 bp, Homo sapiens
gcccttctcagtgtaggcccttgataggtaggttgaggctgtggggcttacacctctttttccaggaacgggagtccctgaatgccagcattgtggatgcyatcaaccaagctgctgactgctggggtatccgctgcctccgttatgagatcaaggatatccatgtgccaccccgggtgaaagagtctatgcagatgcagg

SEQ ID NO: 23702 - DNA, 201 bp, Homo sapiens
gggggagggagctgccggaagtacatccgggggagcggaactgcaagaggaaaggctcgggtaggcttctgggagcgaccgctccgctcgtctcgttggtkccggaggtcgctgcggcggtgggaaatgctggcgcgcgcggcgcggggcactggggcccttttgctgagggtgagagcgaggcaacctttccagagggtc

SEQ ID NO: 23703 - DNA, 201 bp, Homo sapiens
aaaaaaaaaagtttgttggtgcactcttttgccccttttcattgctaaatcattggctttgaccaactgatggacattttgattgttttcagtttttagcyattatgaacatttttagctactatgagtatttgcaacaaatctcagtgtggacgtatgttttcatttctcttgggagtattctttggagtggaattgctg

SEQ ID NO: 23704 - DNA, 201 bp, Homo sapiens
cgggctaatgacctgcccatcctgctccatcttagagaacatatatggagagacagcaagagacccttcaggcttgaattaaagccctcaccatgctcacrcccaaatggattatttgggtgtttaaagcttctgattcttactacaccctgccctacttcgggtactccatgtgcctgtcccctcccttgggtttcccag

SEQ ID NO: 23705 - DNA, 201 bp, Homo sapiens
accagtgcaggtcagtgtgggccactttgaaggccagaagtaccttggcaaatttcttcaaaatttgaagtcagggagtcagacctttgggtgcccagatrcacacttgattatggtgtagggggacagaggagaagaaagaggccagggccctgctggtagggagctcagtttgggggacagaggagaagaaagaggcca

SEQ ID NO: 23706 - DNA, 201 bp, Homo sapiens
ctgccccccatcaaatgcttcctgcaatactttgcacaccagagactgggcctccccagatccagggggacagggttccctgggggagtccccagggccarcccctccaggccagctgcacacacttgacactgatttgcacagtcttgcacaaatagggggtaagagcccagtggctggggtgggcaatgggggtagcct

SEQ ID NO: 23707 - DNA, 201 bp, Homo sapiens
gtctccaggagctgatcacagggaacccagacaaggcactaagcagccttcatgaagcggcctcaggcctgtgtccacggcctgtgttggtccaggtgtayacagcactggggtcctgtcaccgtaagatggtaaagacagtcctagggtggattggggaaaccacaagcattatgtatagctttttgctttgtaagggta

SEQ ID NO: 23708 - DNA, 201 bp, Homo sapiens
tggacttcaggggcctggagtcccccctgccccccatcaaatgcttcctgcaatactttgcacaccagagactgggcctccccagatccagggggacaggkttccctgggggagtccccagggccagcccctccaggccagctgcacacacttgacactgatttgcacagtcttgcacaaatagggggtaagagcccagtg

SEQ ID NO: 23709 - DNA, 201 bp, Homo sapiens
agggaccggggctgggactaggtgtggccagccagcatttctcccaccgtggcctctgtgttgtggaacagagaagtagtgtcacctcatcttggacttcrggggcctggagtcccccctgccccccatcaaatgcttcctgcaatactttgcacaccagagactgggcctccccagatccagggggacagggttccctgg

SEQ ID NO: 23710 - DNA, 201 bp, Homo sapiens
ctgggctttttcatcgttgccctgaagagacacctgtttgccactcctctccctggctgagtcctctggcatccatggtgggtggtcgagccaagaatttrtggtatggagcttgtgtggcggcgctggtggccctgttagctgccgtgcgcttgtggcttcgccgctatggtaatctcaagagccccgagccacccatgc

SEQ ID NO: 23711 - DNA, 201 bp, Homo sapiens
atcccccccttcttctccgtatcggtgatctctgatttttatccccctgtgatcacagaatggagatgcagcagcttcactgactgtggccgagcagtatrtcagcgcgttctccaaactggccaaggactccaacactatcctactgccctccaaccctggcgatgtcaccagcatggtggctcaggttagagctctctg

SEQ ID NO: 23712 - DNA, 201 bp, Homo sapiens
ccgctggggttgggagcttgggcaggccagcttcacccttcctaagtccgcttctggtctccgggcccagcctcggccaccatgtcccgccagaccacctytgtgggctccagctgcctggacctgtggagggaaaagaatgaccggctcgttcgacaggccaaggtaacacggttgctggcaccctcggtttgcagcctc

SEQ ID NO: 23713 - DNA, 201 bp, Homo sapiens
tggagtggggtgatctctgagttgggattttatttggaggatcttccatgggggagcagtctgtaagaccaacattgttgctccagggctccctgcagctkttcctgttcttcccttggagctgactgtcacctgcaacttcattatcctgagggcaagcttggcccagggtttcacagaggatcaggcccaggatatcca

SEQ ID NO: 23714 - DNA, 201 bp, Homo sapiens
gctcaccctcttctttccttcagggctctctactggcttctggccgcgctccgcgccgcgcctcctctggattgccccgaaacaccgtggtactgttcgtrccgcagcaggaggcctgggtggtggagcgaatgggccgattccaccggatcctggagcctgtgagaaacctcttctgcccaccctgggccagccagatga

SEQ ID NO: 23715 - DNA, 201 bp, Homo sapiens
gcaaaatgccacaacttaattttagaacatttctatcatccccccaaaattccctacattgactccctaatcctaccccaggccaatgatctgttttcggkcttttatttatttatttatttatttatttatttagagatggagtttcactctgttgcccaggccggagtgcagtggcgtgatctctgctcactgcagcct

SEQ ID NO: 23716 - DNA, 201 bp, Homo sapiens
ctcaccaccctgaaatggccaagaaacttagccagatggaccaggtgatccagtgagtgtggggtattggctgggggagtgggtttgtgtctgagaatctygaagaagctcttatcttagagcttctttcctggctgaattctgtcttctctaggccttctgctgaagctagaggctccatccatcttgattaactcaatg

SEQ ID NO: 23717 - DNA, 201 bp, Homo sapiens
tcctcaagtgttgggattgcaggtgtgagccattgcacccagccctgattcttttttaaaaaagctttattgaaatgcaatttaccataaaatttacccaygtaaggtgtaagatttaatggtttttgtgtatttacagaattgtacaaccatcaccagaatcaattttagaacattttcaccaaccccaaaagaaaatct

SEQ ID NO: 23718 - DNA, 201 bp, Homo sapiens
taaagtattactcagttgcttatttaaaagagtcacttattctgaaagtattcttttggtttatatgcagtcagcctcttattttcaaaagtaaaaatctraaattcttggaacctggcatcatcagctgtttctaacctcttggtcaccttgatgactcttagctgaaacccttccaagtcccgtggagtcccctgtgca

SEQ ID NO: 23719 - DNA, 201 bp, Homo sapiens
tgtcccttcagattcttcgactatttttaattggattattgttattattattatttttggaccagggtcttgctctgtcacccaggctataatgcagtggygtgatcatggctcactgaagccacagcttcctgggttcaagcagtcctcctgtctcagcttcctgagtaactgggactacaggtgtgcaccaccatggcc

SEQ ID NO: 23720 - DNA, 201 bp, Homo sapiens
acatggcaaaaccccatctctactaaaaatacaaaaattagccaggtgtggtggtgtgcacctgtaattccggctactcaggaggctgaggcaggagaatygcttgaacctgggaggcagaggttacagtgagccaagatcacgctactgcactccagcctgggagacagagccagactctctctcaaaaaaaaaaaaaaa

SEQ ID NO: 23721 - DNA, 201 bp, Homo sapiens
agtgatggctgagctattctcagggggtgaggactcccagccccactcctctgctttagcccaagcctcagctctccatctcaatgctcagcaggtaggtragcgggctgggtttccaggtgacagagctagggtgggcatgaaagaagcataatgaaccactcttttgtcctttgactagtcttagtcccaccttccata

SEQ ID NO: 23722 - DNA, 201 bp, Homo sapiens
ctttgggagtggtccccaggggcagctttcaactgtgagcagggatgtaagtcagatgcggcactgcagcagcttcgggcagccgccctaattagtcgtgractggaatgggtagccagcggccaggataccaaagccttacaggacttcctcctcagtgtgcagatgtgcccaggtatgtatacttgcatgacgtcggct

SEQ ID NO: 23723 - DNA, 201 bp, Homo sapiens
cttatctacgcttgaggagagttccgcctctgtgggctctgttgagccagattacatggtcctttttattgtgaactgctttcttcattccccatcccccscttcttctccgtatcggtgatctctgatttttatccccctgtgatcacagaatggagatgcagcagcttcactgactgtggccgagcagtatgtcagcgc

SEQ ID NO: 23724 - DNA, 201 bp, Homo sapiens
ggggaggttgtaggcttggagcttctggttgtccttctttccccagagtggagcctctaaggatctgctgttacttctgaaaacttggagtcccccagctkaggaattagatgctccattgaccctgcaggatgcccagggattgaaggatgtcctcctgacagcatttgcctaccgccaaggtcagctagcaacctgact

SEQ ID NO: 23725 - DNA, 201 bp, Homo sapiens
tgtttctttttgagacagagtctcgctctgtcgcctaggctggagtgcagtagcacgatctcagctcactgtagcctctgcctcctggcttcaagcaattstccagtctcagcctcctcagtagctgggactacaggtacacatcgccacgcctggctaaattttgtaatttttagtagagttggggtttcagcatgttgg

SEQ ID NO: 23726 - DNA, 201 bp, Homo sapiens
gtgtgcagggccatgtagagccaatgcaagaacttttactctgagatgagaaaccagtggacgggttttgtttctttttgagacagagtctcgctctgtcrcctaggctggagtgcagtagcacgatctcagctcactgtagcctctgcctcctggcttcaagcaattctccagtctcagcctcctcagtagctgggacta

SEQ ID NO: 23727 - DNA, 201 bp, Homo sapiens
gtactctgggctggggctacaggtaatcgagacacttactttcacctgcttcagactctgaagaggctagatcggagggatgaggccactgcactctggtrgaggctggaggcccaaactaaggggtcacatgaagatgctctgtggtgaggctcaggcctgctggcttggggctgaggggcagttggtgtcctagagtcc

SEQ ID NO: 23728 - DNA, 201 bp, Homo sapiens
ggtgctttctccaaagctttcttcttcccatccttcaatgtcagagacctagacacagtggacaatggcatcctggaacacctctaccccaccagtgagcmtggggccagagcacttagttctaagactgggagctggggagaactgctttagtccacaaattctgagccacctatgggtgtaacagcctgggcttgtatc

SEQ ID NO: 23729 - DNA, 201 bp, Homo sapiens
agttgtccctctcctcctacctgtgtctccttgttttggggtcctgactgaagaaggtgtccagggggcagagtcagggccaagcactggggtgcctcctytcacctggccagactctgacccacctacctcagctggggtgaggggcacccctcaaactcagtcatgtggttccaaactaccccattccccactccagac

SEQ ID NO: 23730 - DNA, 201 bp, Homo sapiens
gggccggatcgtgctgtgtcatgcaggccccggcccgcccgattggctcccttagaacggacgtctgggcctggccaggtcttccggcccactccgccggsgcggcgccccggggctttggggcgccagtctgccgtccggcctaccacccgccgaaagcctttggtccccggagagagcaggccccgcgagcccgaggcc

SEQ ID NO: 23731 - DNA, 201 bp, Homo sapiens
cttcttgctttgtaagggtagctgaggcctgtgtcctcaaggatcaagaggacccttgagctcaaggtctagccaggatagatggagataggagaagacgrggaggttgtaggcttggagcttctggttgtccttctttccccagagtggagcctctaaggatctgctgttacttctgaaaacttggagtcccccagctga

SEQ ID NO: 23732 - DNA, 201 bp, Homo sapiens
gaccggctcgttcgacaggccaaggtaacacggttgctggcaccctcggtttgcagcctcaagatccctgaaagcgggtttgcagtggatttaccccaacmgatggggagggactgagcttgaccaaagagccagaaatgactggagaatgcatcccttgccactgctgcaaggggagaaaaaaggattgatcctcagtga

SEQ ID NO: 23733 - DNA, 201 bp, Homo sapiens
cagaatgttgactgtaaggaggttgggctgataggcatgtgagtgtgtatgagaattgatactgaagtagtaggagtatatgattgtggagcagtagcctrtggattagggaataagaagtgactgtaacgtggcatatcttttcttccaggtccttttactgtgccatggcaggcagtctcggcttgggccctcatggcc

SEQ ID NO: 23734 - DNA, 201 bp, Homo sapiens
tgctccgcttcctcctctccttcacaagtaacgtggcccctcctctcctcctctagattctggcctgtgccttggcagcctccatccttcgcaggcatctyatggtctggaaagtgtttgcccctaagtgagtagatttgcttgagaagtagaggtggtggggagggagaaacttggaacaaagtatgaagatcctaaaca

SEQ ID NO: 23735 - DNA, 201 bp, Homo sapiens
ctcgggccatgtgcatcgagtcttgggctcgtttctctctggtccgcatggcggggggtactgctctcttggctgcttcctgctttatctgcctgctggcmtctcagtgggcaatatccccaggctttccattctgccctctactcctgacacctgtggcctggggcctggttggggccatagcgtatgctggactcctgg

SEQ ID NO: 23736 - DNA, 201 bp, Homo sapiens
tccaagatggtctgatctggataacttttttgccctttccagactctctgtccaaaggttgggttctttttttaaatccttagctaattggctggagggtrggttctttattgtagctgttttggttggagtggggtgatctctgagttgggattttatttggaggatcttccatgggggagcagtctgtaagaccaacat

SEQ ID NO: 23737 - DNA, 201 bp, Homo sapiens
gggcgtaagtgtaagagtggtgttctcagacaggaggggtgattggggttgtgctatatatacctagggatatatccaggtgttcaaatatacacagtgtrtatgcagggctcccaagagttccctggtttccccgatatcctcagacacaaagaccatgactctgctgttgtgggttgcacaggagtagggggcagatga

SEQ ID NO: 23738 - DNA, 201 bp, Homo sapiens
ttgtaggcttggagcttctggttgtccttctttccccagagtggagcctctaaggatctgctgttacttctgaaaacttggagtcccccagctgaggaatkagatgctccattgaccctgcaggatgcccagggattgaaggatgtcctcctgacagcatttgcctaccgccaaggtcagctagcaacctgactcatctct

SEQ ID NO: 23739 - DNA, 201 bp, Homo sapiens; identical to SEQ ID NO: 2873

SEQ ID NO: 23740 - DNA, 201 bp, Homo sapiens
ctggcattgccctcttcaccagtggcttcctgctcacccgtttggagctcaccaaccatagcagctgccaagagcccccaggccctgggtccctgccatgkgggagccaagggaaacctggggcctgctggatggcttcccgattttcgcgggttgtgttggtgctgatagatgctctgcgatttgacttcgcccagcccc

SEQ ID NO: 23741 - DNA, 201 bp, Homo sapiens
agtgtgcagggccatgtagagccaatgcaagaacttttactctgagatgagaaaccagtggacgggttttgtttctttttgagacagagtctcgctctgtygcctaggctggagtgcagtagcacgatctcagctcactgtagcctctgcctcctggcttcaagcaattctccagtctcagcctcctcagtagctgggact

SEQ ID NO: 23742 - DNA, 201 bp, Homo sapiens
aggcagatagtgtgcagggccatgtagagccaatgcaagaacttttactctgagatgagaaaccagtggacgggttttgtttctttttgagacagagtctygctctgtcgcctaggctggagtgcagtagcacgatctcagctcactgtagcctctgcctcctggcttcaagcaattctccagtctcagcctcctcagtag

SEQ ID NO: 23743 - DNA, 201 bp, Homo sapiens
ttgacgtggcgttactaggcgtgtcgcatcactgaggcgggagccaggccgcaagcgaatttcctgattggctgtgatctgcgggttgctggggagaggcscggagaggcgggcgagagtccgcagggcaggcgctgattggctgaggtgggagcagcttcccttccgatgattcggctcttctcggctcagtctcagcga

SEQ ID NO: 23744 - DNA, 201 bp, Homo sapiens
gctgatgagttgtgctatggaagaaattaaggaagtgaggggaaatttttccagggggtgtggtggtgggaggtgctgaactagtaaagtaggggattgcmggaagccttgctgatgttacagttgagcttcaatatgaaggtgatggagatccatttcggcatcgggaactgaagctgacagaggagatggcaaatgcaa

SEQ ID NO: 23745 - DNA, 201 bp, Homo sapiens
gctgataggcatgtgagtgtgtatgagaattgatactgaagtagtaggagtatatgattgtggagcagtagcctatggattagggaataagaagtgactgkaacgtggcatatcttttcttccaggtccttttactgtgccatggcaggcagtctcggcttgggccctcatggccacacagaccttctactccacaggcca

SEQ ID NO: 23746 - DNA, 201 bp, Homo sapiens
gagtcaagggctgcggaagagacagcagcccccagggaatgaagctgatgccagagtcagacccgaggaggaagaggagccactgatggagatgcggctcygggatgcgcctcagcacttctatgcagcactgctgcagctgggcctcaagtacctctttatccttggtattcaggtgggtgtaggagagagatcagggag

SEQ ID NO: 23747 - DNA, 201 bp, Homo sapiens; identical to SEQ ID NO: 2887

SEQ ID NO: 23748 - DNA, 201 bp, Homo sapiens
gtcagtatgtgaacctcaaatatatgctaggtgctgaggatatcataatgaagaaaacagaattccctgacctcaatgagctcacattctactcggagggkataaaccataaatacgtgtagaatttcagatgctgatgagttgtgctatggaagaaattaaggaagtgaggggaaatttttccagggggtgtggtggtgg

SEQ ID NO: 23749 - DNA, 201 bp, Homo sapiens
aggaatcattgctgcgaggacgttttgcaccatctggccacattgagggcttcacagcagaaattggagctagtgggtcatactgcccccagcacgtcacrctgcctgtcactgtcacattctttgatgtttctgagcaaaatgccccggctcccttcctggtatgccttgactccaaccccaaagtcagctcatcaagag

SEQ ID NO: 23750 - DNA, 201 bp, Homo sapiens
ctaactcctagcccaggacatgcaatattttttccactgacatgcactattctcctgcttccattttttacaggggcctatagaaactctccttttgctcygcttcctcctctccttcacaagtaacgtggcccctcctctcctcctctagattctggcctgtgccttggcagcctccatccttcgcaggcatctcatggt

SEQ ID NO: 23751 - DNA, 201 bp, Homo sapiens
cacagtggagtatgatccctaactcctgatttggatgcatctgagggacaaggggggcggtctccgaagtggaataaaataggccgggcgtggtgacttgsacctataatcccagcactttgggaggcagaggtgggaggattgcttggtcccaggagttcaagaccagcctgtggaacataacaagaccccgtctctact

SEQ ID NO: 23752 - DNA, 201 bp, Homo sapiens
ggaggaaaagtcttgggtaggcattcaaagggcacttcttgaaggggaaagagcaccgtgaatgtcagacagcaaaagagaaggctgaccctgggggcagytggctttcaacttgacattcccctcaccctagtatgggctggaatagttagtgaagaccatcttatgcaccagtggtttggggttttggtgttgggtgtg

SEQ ID NO: 23753 - DNA, 201 bp, Homo sapiens
agagcactgttgtacttggttgcagccctgaaagagggatcagcctggggtcctccacttctggaggcctctaggctctatcagcaactgggggacacaayagcagagctggagagtctggagctgctagttgaggtagggaactgccaggtgaagatgtggggtggaggattcctgaggtgcttgtgatggggtgacttg

SEQ ID NO: 23754 - DNA, 201 bp, Homo sapiens
tccaggtgttcaaatatacacagtgtgtatgcagggctcccaagagttccctggtttccccgatatcctcagacacaaagaccatgactctgctgttgtgsgttgcacaggagtagggggcagatgatggacactgggatgggaatggttgtgaatgatctgcccccgcttccatatgtgagtgtaggcaagatacttcct

SEQ ID NO: 23755 - DNA, 201 bp, Homo sapiens
cctgcaggagaggaaagccagagtgtgtggggagatggaggatgaggtgctacttcagctgtgtgtgtgtctatgtgtgtgtgtatactctacagtgctgkagacacaggagcagcaggggcccaggttggaacaggggctcagggagctgtgggactctgtccttcgtgcttcctgccttctgccggagctgctgtctgc

SEQ ID NO: 23756 - DNA, 201 bp, Homo sapiens
ctgtactttaggttgcatggttgggacttctgatgggtctttaaagggcctcttttcctcttttctcctaaccctgacgtttgctcaggctctgacttctytttcatgtccctgcaggaaggcgtgtagtcttcatgggagatgatacctggaaagaccttttccctggtgctttctccaaagctttcttcttcccatcct

SEQ ID NO: 23757 - DNA, 201 bp, Homo sapiens; identical to SEQ ID NO: 2888

SEQ ID NO: 23758 - DNA, 201 bp, Homo sapiens
ggtgatccagtgagtgtggggtattggctgggggagtgggtttgtgtctgagaatctcgaagaagctcttatcttagagcttctttcctggctgaattctstcttctctaggccttctgctgaagctagaggctccatccatcttgattaactcaatgtgtagctttgggcatcaggatcatggccgaagacatgtctctt

SEQ ID NO: 23759 - DNA, 201 bp, Homo sapiens
ttatgtagcattccaccttgtcccattcattattcctgacttgaagccaaaattgtgtgaatccactggttcttttctcatgtgtatgttttgtgccctcygttcaccccagcactcctgtcatgtttgaaatgctggcatgaaatcctcctagagatgtccatcaaaagagttgggaagaggccctggagagaagcatca

SEQ ID NO: 23760 - DNA, 201 bp, Homo sapiens
agagtggatggtgctgtgagctcctggttcaggcagctatttctggcccagcagaggtagcctagtctgtgattactggcacttggctacagagagtgctkgagaacagtgtagcctggcctgtacaggtactggatgatctgcaagacaggctcagccatactcttactatcatgcagccaggggccgctgacatctagg

SEQ ID NO: 23761 - DNA, 201 bp, Homo sapiens
ggccatagcaggattcagataagcctgatggcgcttttgtaccacagagagaattagaataacagaatgttgactgtaaggaggttgggctgataggcatktgagtgtgtatgagaattgatactgaagtagtaggagtatatgattgtggagcagtagcctatggattagggaataagaagtgactgtaacgtggcatat

SEQ ID NO: 23762 - DNA, 201 bp, Homo sapiens
gtatttttagtagagacggggtttcaccgtgttagccatgatggtctcgatctcctgacctcgtgatccgcccgcctcggtctcccaaagtgctgggatcrcaggcgtgagccacggcgcccggccccagcgtatgacttcttaatgatgtctttgtagtacaagagtttttaattttaataaagttaacttttttttaaa

SEQ ID NO: 23763 - DNA, 201 bp, Homo sapiens
agacacaggaggctgggaggacagtgagaaggctgcctcagtgatcctggagaagggatgaggtctgaactgagataaggggctatggggatgaaggtggragaataactcaactttttttaaaaattaacatattcctttattcgtttggtcagtatgtgaacctcaaatatatgctaggtgctgaggatatcataatga

SEQ ID NO: 23764 - DNA, 201 bp, Homo sapiens
gcttcagggaatcctccagcctcagcctcccaaagtgctgggattacagcatgagccacatccagcctatgatttttcttcttttcttttcttttcttttyttttttttttgagatggagtctcgctgttgcgcaggctggagtgcagtggggcgatctcggctcactgcaggctctggcccgcggggttcacgcctttct

SEQ ID NO: 23765 - DNA, 201 bp, Homo sapiens
ttgataatatcctttaatgcacaaacattctttttttttttttttttttttgagacggagtcttgctctgtcgccaggctggagtacagtggcactatctsggctcactgcaacctccgcctcctgggttcaagtgattctcctgcctcagcctcctgagtagctgggactacaggcgtgcatcaccacgcccagctaatt

SEQ ID NO: 23766 - DNA, 201 bp, Homo sapiens
tggttgagtgctgaccgtcttggggacctggccttgttactagagaccctgaatggcagccaggtaatagggaaagtgacctgaagctgagggtctcctcyttccttcctcctcctttctctccagctgcagtagcatcatcatgtactggacaggcggctgggttggtggtcggaaaacctggattctctctgggactct

SEQ ID NO: 23767 - DNA, 201 bp, Homo sapiens
tatctcattgtggttttggtgtgcatttccttaatgattaatgatgctgagctgagcatcttttcttgtgcttactggagaaatgtcccttcagattcttygactatttttaattggattattgttattattattatttttggaccagggtcttgctctgtcacccaggctataatgcagtggcgtgatcatggctcactg

SEQ ID NO: 23768 - DNA, 201 bp, Homo sapiens; identical to SEQ ID NO: 2864

SEQ ID NO: 23769 - DNA, 201 bp, Homo sapiens
tttgccactcctctccctggctgagtcctctggcatccatggtgggtggtcgagccaagaatttgtggtatggagcttgtgtggcggcgctggtggccctsttagctgccgtgcgcttgtggcttcgccgctatggtaatctcaagagccccgagccacccatgctctttgtgcgctggggactgcccctaatggcattgg

SEQ ID NO: 23770 - DNA, 201 bp, Homo sapiens
agagcactggtgccagggaccaaactgagaccccaccaccgtcatcaacacttacataccataaaggtcttcagagtgccttggccctagacctcccttcrttctttgtagagatggaatctaagaatgaaacatctccactcagtcctgcaaatatggaagttcttgagatacctttttttggtagatacttgtgctggt

SEQ ID NO: 23771 - DNA, 201 bp, Homo sapiens
agaggtgaggcctgggatgttcctcatctgttctcccagtaatcagcccatgttaccattacagcatcctcatgaatacctctattttaggcccccaaatycatgatcctgggtatcctccactctcatttcttacctaggcccctatgtctgccatcccaaacattgacttcagctttgtgatgaatctgttgaccactg

SEQ ID NO: 23772 - DNA, 201 bp, Homo sapiens
tccaaactggccaaggactccaacactatcctactgccctccaaccctggcgatgtcaccagcatggtggctcaggttagagctctctgaggacccagcayagagcactggtgccagggaccaaactgagaccccaccaccgtcatcaacacttacataccataaaggtcttcagagtgccttggccctagacctcccttc

SEQ ID NO: 23773 - DNA, 201 bp, Homo sapiens
cccagctgaggaattagatgctccattgaccctgcaggatgcccagggattgaaggatgtcctcctgacagcatttgcctaccgccaaggtcagctagcarcctgactcatctcttctacctttaagtggtcctccagactcatgccctctctcttgtcccattcagttccatgggcttcttagacccttgttccccatca

SEQ ID NO: 23774 - DNA, 201 bp, Homo sapiens
ggattgaaggatgtcctcctgacagcatttgcctaccgccaaggtcagctagcaacctgactcatctcttctacctttaagtggtcctccagactcatgcyctctctcttgtcccattcagttccatgggcttcttagacccttgttccccatcatgacccctgctctatagccctctccaagctcacaccctgactgtcc

SEQ ID NO: 23775 - DNA, 201 bp, Homo sapiens
cctgctagggcctagggtgaggcttatgggcttttactcctcagggcaggagacgctgcagagcattacttggacctgctggccctgttgctggatagctyggagccaagggtgggtgtgtcttcaagcttctctgcaatggggtagacgggttggtgtcccctttgaaatacagcaagactgcaattttttgttttttcc

SEQ ID NO: 23776 - DNA, 201 bp, Homo sapiens
attcccctgaccaccttttcttctcttctcttacacagatgtccccaggccccccagcccaggcccagcataaaggccgtgttggggggcccccctgaccyaaggggggcttcatgcgccacgtgcaggcggagccgtctccatcctcagagccggaggctggcccttcacagcctccagtcaggcagggggccctccagg

SEQ ID NO: 23777 - DNA, 201 bp, Homo sapiens
tctctaggccttctgctgaagctagaggctccatccatcttgattaactcaatgtgtagctttgggcatcaggatcatggccgaagacatgtctctttgcyaaaggtctaggccttactaatggagttatagctggggatgaataggcccctggagaaaaatcttttttctttttgagaaaaatatttatccgtttctact

SEQ ID NO: 23778 - DNA, 201 bp, Homo sapiens
gtcccattcagttccatgggcttcttagacccttgttccccatcatgacccctgctctatagccctctccaagctcacaccctgactgtcctcaggtctcyaggagctgatcacagggaacccagacaaggcactaagcagccttcatgaagcggcctcaggcctgtgtccacggcctgtgttggtccaggtgtacacagc

SEQ ID NO: 23779 - DNA, 201 bp, Homo sapiens
agatgtccccaggccccccagcccaggcccagcataaaggccgtgttggggggcccccctgacccaaggggggcttcatgcgccacgtgcaggcggagccrtctccatcctcagagccggaggctggcccttcacagcctccagtcaggcagggggccctccagggtggcctgctcatgggctacagcccagcaggggggg

SEQ ID NO: 23780 - DNA, 201 bp, Homo sapiens
cattgaggtagaattactactgccaccacctgacctagcctcaccccttcattgtggcactcagagccagaccaagcacatactagcaagcaggtgcctayagacggggaggtgaggttccccttgctcacctgagcttctcttcccacttctgatgcctcccctggggtgtgactctgcttttgttcttgtgacttgggg

SEQ ID NO: 23781 - DNA, 201 bp, Homo sapiens
acttcctctctctaggcctcagtttccctttttataaaacaatgcctaagactatgtcaagttctaagactctgtactctgggctggggctacaggtaatygagacacttactttcacctgcttcagactctgaagaggctagatcggagggatgaggccactgcactctggtggaggctggaggcccaaactaaggggtc

SEQ ID NO: 23782 - DNA, 201 bp, Homo sapiens; identical to SEQ ID NO: 2893

SEQ ID NO: 23783 - DNA, 201 bp, Homo sapiens
gtgggagcagcttcccttccgatgattcggctcttctcggctcagtctcagcgaagcgtctgcgaccgtcgtttgagtcgtcgctgccgctgccgctgccrctgccactgccacctcgcggatcaggagccagcgttgttcgcccgacgcctcgctgccggtgggaggaagcgagagggaagccgcttgcgggtttgtcgc

SEQ ID NO: 23784 - DNA, 201 bp, Homo sapiens
tcatcgtgcctggcattttttttttttttttttgagagggagtcttgctctgttgcccaggctggagtgcagtggtgcaatctcggctcactgcaacctcygcctcctgggttcgagtgattctcctgcctcagcctcccaggtatctgggatcacaggcgcccgccaccactcccgggtaacttttgtattttcagtaga

SEQ ID NO: 23785 - DNA, 201 bp, Homo sapiens
atgttttggaaaaagagccttgtttacagacattcactcttccctcgatttaaaaaaatattttttttcattctcatattgtcaagagagtgctctgaaamgttacagtgtaacagtaattgaatattctatttatttttgcctttgaatactaagatatataagtcaagggtggactattccttgtcataaagctgaaag

SEQ ID NO: 23786 - DNA, 201 bp, Homo sapiens
cttttttcgtggcactgtgatacaaacacaagcgcaaaacctgtgccagatttccatagtttttgagcaatagaaatgaccttttaggtgacattaggtghatcctaattgcagattctcacaaaggattgtagctattaggatataaggaattaatttgtaagtacttaacaaaagttgcaggaaaaataaatttggtga

SEQ ID NO: 23787 - DNA, 201 bp, Homo sapiens
agggctgaataattcatttcatcttcacaataaatctgtgaggatggttacattttaccaaagaggaaattgaggtttaaagaggttaaatgagttgcccytcacagccagttaacagcataatgctaggaagaggcagagctggactttgaacccaggattctggctccagaggccatgctcttaactactgtcttttat

SEQ ID NO: 23788 - DNA, 201 bp, Homo sapiens
gggagtcctgaaagggatatgttattcattaaggttgcattgcacatttaaagattgttctagcttggttaagtagaaggtgctttttctttaaaaaaaawaaaaataataataaagttacctctttttcccaagatgccaagcaatacaaatttattttatttaaatctaatcagattggcactgatgaaaagtacacaa

SEQ ID NO: 23789 - DNA, 201 bp, Homo sapiens
tcagtgtcctaagtagatgatatgaatgtgcataattaactacgttctgcagttctcagctcaggaatacttttcagctcttacagatagacacttaggcrtaacagttgttacttatgagctcattttaaaagtagataaatgtctgaattttcaaagacaaagggtttcagagttcttgatagtttcttatagaggtgg

SEQ ID NO: 23790 - DNA, 201 bp, Homo sapiens
atcagacagtatattagtctgttctcatgctgctataaggacatactcgagactgggtaatttataaagtaaagaggtctaattgactcagttccacaggrctaaggaggcctcaggaaacttacaatcatggcagaatgggaagcaaacacgtccttcttcacgtggcgggagaaaagagaagaatgagagcccagcaaa

SEQ ID NO: 23791 - DNA, 201 bp, Homo sapiens
gacactactggccccttaggtagatggagtggaacttttacagagtcaaattggaaccatgtctgtgatatacatttaactgtctttattttcaatattarcaaatcaggcttagatctgaagctttcagggtcacacagttcaggtgcaaatcattgagtccaaggctggtgatattttgtgtatgactttttcactcta

SEQ ID NO: 23792 - DNA, 201 bp, Homo sapiens
ggctaaggaggcctcaggaaacttacaatcatggcagaatgggaagcaaacacgtccttcttcacgtggcgggagaaaagagaagaatgagagcccagcaragggggatgccccttataaaaccatcagattttgtgagatctaagtcactatcacaagaacaggagggggaaaccgcccccatgattcaattatctccac

SEQ ID NO: 23793 - DNA, 201 bp, Homo sapiens
ttttgttcaaagtatttgcaaaactaaagccaataaaaggctgccttctcggtggcccttttatttagttcctggctttttccttggaatcagagaaaagwatggcaagtttccccacagaagagagtggaatgtcaaggaagattgttcataaaccacattcattgagtgactgctgtgtttagggtgacattttaatgc

SEQ ID NO: 23794 - DNA, 201 bp, Homo sapiens
tgatgtaaggctgctcagaaggctgaggtggtaggatcacttgaggccaggagttcgataccagcctgggcaacatagcaagactctgtccctaaaaatattttttttaattagcagggcatggtggtatgcacctgtagtcccagacactcaggaggctggtgtgggaggatgtcttgagcccaggagttcaaggctgaa

SEQ ID NO: 23795 - DNA, 201 bp, Homo sapiens
gaaagaatcaaccagtggaccgtgattcacctcatggagcctgtgagattttcttttaacgtagtcggccaggatgtgagaaggtccagcaaggctcttgrtgattaaagcagcatgattcttgttgactggagcttacatttgtatgctggatggtttctgcttgtccagctctctgggcctggtcgtggaggagaattg

SEQ ID NO: 23796 - DNA, 201 bp, Homo sapiens
agaaattaaccttattactttatttagtatattacattattttgtgtattattttctatgcaggttcaaggcaatttcattatcataatggaacactttattttttttttacaaaaaggaaagatgtatttatgcttgaacataacaagttgaaatgataagttctttattaagttaaaaatgacttgataaaaggtttta

SEQ ID NO: 23797 - DNA, 201 bp, Homo sapiens
caaatttgggtaaaagaaggcagctgagatctgggctttataaatagtacttcatgctgctgagcacttcttttgagagattgacttgttagaaattgacygctaattaatattattttctgcgtcatttggaacaaaagaatattcaaatccagaacccatcagtaatataatgaaactgatgtgcaagaagtttgggga

SEQ ID NO: 23798 - DNA, 201 bp, Homo sapiens
tccaagtctttgctattgtgaatagtgccgcaataaacatagtgtgcatgtgtctttatagcagcatgatttatagtcctttgggtatatacccagtaatrggatggctgggtcaaatggtatttctagttctagatccttgaggaatcgccacactgacttccacaatggttgaactagtttacagtcccaccaacagtg

SEQ ID NO: 23799 - DNA, 201 bp, Homo sapiens
tattgtggtttcagagctttgtcaatcaccccctattcagagggctgaaggaaaacttcactctctgccaagagtcaccagccctctttgaaacagctctkgtttgagcacaaaatcgcacaggtaaaatgcactctggggtgtgaggcaccaggtgcgatccaagtagagaaaagtgctcattattttgaaggttacaaa

SEQ ID NO: 23800 - DNA, 201 bp, Homo sapiens
aacagcatttgaaggccatgaatgtcccattggaattgttttcctgggagaaaggacaccagaatgctggcgttgtcagttagtaacttttggaggaagtaaaaaaaaaaaaattagttgacatattattgatcgttgataaaagcactcatcattttcagcaccttccacatccactttgaaaacctgaaaaatagtaga

SEQ ID NO: 23801 - DNA, 201 bp, Homo sapiens
caaacatgggactgttcttttggttacttccggagatgaaagtgcaattttcacaacatactttttcaaaagctatcagaagcttcatattttttaaaaaygcgggatgtcactccctatcgtctctgtggttcccttgtggttgaatattttaatcaggtgtttctgtgctttaaagattttttcatttgatttacaact

SEQ ID NO: 23802 - DNA, 201 bp, Homo sapiens
aacatgggactgttcttttggttacttccggagatgaaagtgcaattttcacaacatactttttcaaaagctatcagaagcttcatattttttaaaaacgygggatgtcactccctatcgtctctgtggttcccttgtggttgaatattttaatcaggtgtttctgtgctttaaagattttttcatttgatttacaacttg

SEQ ID NO: 23803 - DNA, 201 bp, Homo sapiens
ttcatttgatttacaacttgtaggagtggagttgcagtgagtaattaggaagaatgccataaagaggacaaaaggaaggtgaaacccagcgttaataattyagtttcaataaccttaaaaggtttactgttcacttttaaccttgtatcccaaaaagcaagctactgcagtgaatcataaaaatgtttcttttaatttgca

SEQ ID NO: 23804 - DNA, 201 bp, Homo sapiens
tgtttacattactgccatttataaaacatttaaagcagctattctgctgaataaacattcaagagcctgaaggataagcatatcacttaaacttcttaagrctaaactttccaaaccatttcctgccagagggacccaacagcaaaattgcaaactctgtgccctgagatgagataggctgaattagattaagcagcttac

SEQ ID NO: 23805 - DNA, 201 bp, Homo sapiens
aaaaatgtagcttctttattttccaagtcccagaaaaaaccaaccaaccaaaagaaatctttgaaaatcatgctccacagcatgcagatttgaggaggggractggatccggcaggcatgatttttccacttgcctccagcctcatctttctcctcctctgggtgactctgcctgagtttgtggtgcctatactgcctttc

SEQ ID NO: 23806 - DNA, 201 bp, Homo sapiens
atttccaaagagatcatccagtgttgttctctgcaggtagtcgtacaaatagcattatgaatgcttattgttaaagtggtatatcccacttgctcaatttygtgcatgtttcctaaatatttgcatacaaatattgagctgggtagcaggacatcaagaatgttgtggcgccatcttagaccatcagctgtgcccaaatga

SEQ ID NO: 23807 - DNA, 201 bp, Homo sapiens
gattacttcaggaggattataagaaataatattaatatggaatatggcctgtgtactaaaaaaaaaaaaaaaaaagaaaaaaagaaaaccaactcaggcartgtaagtcattgaacagtttgattcctgtagacacctctattactgttcggccttagattttctcctaacaaaattatcttgttttcccaaaagcttctt

SEQ ID NO: 23808 - DNA, 201 bp, Homo sapiens
aaagtggtatatcccacttgctcaatttcgtgcatgtttcctaaatatttgcatacaaatattgagctgggtagcaggacatcaagaatgttgtggcgccrtcttagaccatcagctgtgcccaaatgagggaatgcagttgatgtaagaaataagtgtcgaccatctgacttgggtattttcttttctctgggaccaatc

SEQ ID NO: 23809 - DNA, 201 bp, Homo sapiens
cctttgcaacattcacaccattcttttccattttataccttccaagaatgaggcaaaatgagtgtatttaaagtgtatttagcgtttattggcaaagtttyaggttttatcttttaatgcaattttaattggttttattgcaggattgatgcaagatgcccggaatgccaataggtgagagggctctaataagcaaaatgg

SEQ ID NO: 23810 - DNA, 201 bp, Homo sapiens
ttcgaaagtctccagatcttattctatcctggcacccatggtgactaaaaaaatcaaagacgttaaatctttgaaagcagccttcaaaccacatactccarccaacttaccttatatgtcggggagttatggagcaaatacattaattaacttgacagaagttgcacactttctgtacttctgaaccaaaatttggatgca

SEQ ID NO: 23811 - DNA, 201 bp, Homo sapiens
cgcaacacccactgcctccaatttgtgaaccctgaagagctataaatttaggtactctacttaatcaaaagcatccacacatgagaattaatataaggccrgcacgatggctcacacctgtaatcccagtgcttgggagcctgaggcaggagtatcactcgaagctaggagttcaagaccagtcttggcaacatagcaaaa

SEQ ID NO: 23812 - DNA, 201 bp, Homo sapiens
tatagtggcgtgatcatggctcagggctcactgcagcattgaactcctgaaatcacttgtaatcccaaagtgctgggattacaggcatgagccactgtgcscagctacaattttttaagcaatagaaggcctgtccacattgccgagtcttcctttggtgatggttcatctgaggattgcatgcccaaagccctggagtgg

SEQ ID NO: 23813 - DNA, 201 bp, Homo sapiens
agtcttggcaacatagcaaaaccccgtctctacaaaaaatatatttttttaattagctgggcatggtggtgcacacctgtcattccagctactcaggaggstgaggtgggaggattgcctgagcccagaagttcaaggctacagtgagctatgatcacaccactgcaactgcactctagcctgggcaacagagcaagaccc

SEQ ID NO: 23814 - DNA, 201 bp, Homo sapiens
aatggaagtaaatgccaggcatcattccttgagtgttgaaaatagcctctatatgagaattatgctgagttttaaatattttaaggacattaatatttgtrgaaattactgtaatttaacatagcttccaggcattttattatatccatgttagaagtgattttatgtaaagctttttcttagtgccagtagagaatatcg

SEQ ID NO: 23815 - DNA, 201 bp, Homo sapiens
atgaatctatcatgaataaccagagcttcaataaaaggcccctttggtataaaattctgaactttgaaacagttggcctccgcctaagttttggtatattkccactagctagaaatttcactactcttaataaaaataattctgcagaaggtttcccagcctttctgacggtaatgtcaaatgatttttctcgtctcatag

SEQ ID NO: 23816 - DNA, 201 bp, Homo sapiens
aacgagactggagtggaatggaagtaaatgccaggcatcattccttgagtgttgaaaatagcctctatatgagaattatgctgagttttaaatattttaargacattaatatttgtggaaattactgtaatttaacatagcttccaggcattttattatatccatgttagaagtgattttatgtaaagctttttcttagtg

SEQ ID NO: 23817 - DNA, 201 bp, Homo sapiens
catttctgaattattttgttctgtcttactgtgctatcctactttttattaatacttaagcagtagtgttatgtagttgtaacctcatgggtggataccartgtaacagtggcactcatgatagagagtagagcaagaggggtttatattatatttggcaggtgggtcagttagctgatggctatacgaatttgcatattt

SEQ ID NO: 23818 - DNA, 201 bp, Homo sapiens
aatgattttcttgatacctgggacttaacactaggttttggggttttaaaactacacttttacaatggaaatatcacaaaaagatttctatgccatattcygccttaatttaaccaaacataacatctttcttcacaactcgggcctgtccttatcatctccgtgtatacaacatacagccattctgcattctggtcccag

SEQ ID NO: 23819 - DNA, 201 bp, Homo sapiens
tgccagtatgaagttcacatttttaaaaatcacagctgaattatatatgtgtacatatataatatatttattttatatatagcaattatatgtatatagtrtgacatagccctgctgctcagagtcacaaaagggtaatggtcactcagaccagcagcactgatgtcaccaggacaatgaaatgcagaatttcagatccta

SEQ ID NO: 23820 - DNA, 201 bp, Homo sapiens
tgaatttggctgtgatgtcatggtatcacctccattgtctgttcttgtcaaagagaaagctacatagaaaagtgtttctcagacttgaggagtataggaattttttttttttatagaaagacaatctcttggtactgcagtattgaactaaattgttttgattataatgttacttaaatatgtgtaaaaataaaataggac

SEQ ID NO: 23821 - DNA, 201 bp, Homo sapiens
tctttctttgagacagagtctcactctgttgcccaggctggggtgcagtggtgtgatcgtggctcactgcagcctcagcctcctgggttcaagcaattctyctgcctcagcctcctgagtagctgggattacaggcacgtgccatcatgcttggctaatttttgtatttttagtagaggcaggggttcaccatgttggcca

SEQ ID NO: 23822 - DNA, 201 bp, Homo sapiens
cagttgagaatacagttgggctgcacttgtctttttttccaagtgagttattttgtattttttgatactctgaaatgatcagtaagtgtgtgtgtctgtgygtgagcccatgtgcgtgccacgcatgcgcatccctgtgcatgcgtgtaggaggctgggatggaagggatggccataactgactgttggaatttccaggaa

SEQ ID NO: 23823 - DNA, 201 bp, Homo sapiens
ctggtctcgaacgcctgatcttgtgatccacccgccttggcctcccaaagtgctggaattataggagtgagccaccactcccggccttaaaatttttttartttgtttgtattcatcaggtacaagtgcagtgttgctacattggtatattatattgtgggaagtcagggccttcagtgcacccatcactggagcaatgtg

SEQ ID NO: 23824 - DNA, 201 bp, Homo sapiens
gggtctgactgtgtctccttagctagggtgcagtggtgcaatcacagctcactgtagcctcgacctcctgggctccagtggtcctcccacttctgccactsgaagtgctaggactacagtgactaatttaaacaatttttttttgtagagatggggttttgaatccctggcctcaggcgattgtcacagctgggcctccca

SEQ ID NO: 23825 - DNA, 201 bp, Homo sapiens
gccatttttctacctgtgtgtgcaggtgtgtgctggtgctgggaggtgctattgtagacagagcatgaggcattggattcagatcctggctctgccacttacttggatgttgggcaagttatctgacctctgtgagcctcattatattcatctgtatttccatttttttgtcctattgttagaccatatgtcagctgtgtc

SEQ ID NO: 23826 - DNA, 201 bp, Homo sapiens
tgttttcatcccgagttgtctttagttgtgatttgctctccttagcatgttccatgagaacccaacatgccagtaccttgcatgtgctgtgctgagcaagrcagttttctcatctgtttatccccttttccctctgtgtggttttgctgagaatttgccatttatttatcccataccctaattttacagttattcctccac

SEQ ID NO: 23827 - DNA, 201 bp, Homo sapiens
gtgcagatgaaggtagtcgcctcctaccatcgtctttccttttacggatgtcctctcacatgtgatatggatttggacacctgcaggctagaggggccackgtccttaaataggagtgctgccttggacaaggtcacctgattatcagtagccttttaataaatttataaacaggcatgatcataccaattaaaaaaggaa

SEQ ID NO: 23828 - DNA, 201 bp, Homo sapiens
accttcagaggtaactaatatatttccagtagtgtgacttctggaagtaatatagttcaggaaccaaaagttgattctttgtagttaatgaacaagttctttttttttttttttttttttttgcctaagattatattaataacactagtgtatgtcaaaaggaaaaaatatctcatgtatatattttttcctgtaagaata

SEQ ID NO: 23829 - DNA, 201 bp, Homo sapiens
ccttcagaggtaactaatatatttccagtagtgtgacttctggaagtaatatagttcaggaaccaaaagttgattctttgtagttaatgaacaagttctttttttttttttttttttttttgcctaagattatattaataacactagtgtatgtcaaaaggaaaaaatatctcatgtatatattttttcctgtaagaatag

SEQ ID NO: 23830 - DNA, 201 bp, Homo sapiens
aaggttggcttcatctgcgctgtggttaggacatagttcatccccaccaaaactcatattgacgtttgacccccaatgtggtggtgttgggaggtggggcrtggtgggcgtgcttgggtcactgaggcagatcctcatgaatagattaatgccctcccataggggtgagttcttgctctggtgggagtggattagttccca

SEQ ID NO: 23831 - DNA, 201 bp, Homo sapiens
ttgcatgagaagttcaggcatatattatccagagagagctcattacttttttctcttttacagaaagttagataacagcctcttttgacagaaaaatgtcwattttctgacaaaggaccggaggcattcttcttaaaatcagtcattctgggttttctaacaaagcctcgatgttgttcattctaaagaaaattgtgtcac

SEQ ID NO: 23832 - DNA, 201 bp, Homo sapiens
gttggaatgtccataaagtttactgtgtctcttcattagtgggcggttttggggatttgtaaaaagggtgaaaatatcatcttggtaaaagaaaaggtagwgtacacatttaacccttaaatgattctgtgccttatttgtgtaacttgctttgtcctgaagtgagtgaaacttgatccatggtgtcccagcctgcagtga

SEQ ID NO: 23833 - DNA, 201 bp, Homo sapiens
ttgttataaatgtattcttatcatatcaaatgacctgaaatttgccatttttgattaattcctggagattacaagaatgatgagggcagttgcattcagawgttgcatacagttgccctttgcagaagtacatggtgcacatgcttcagtgtatttaatgatgttaacagttcattgattaaagttcaccttggaaataaa

SEQ ID NO: 23834 - DNA, 201 bp, Homo sapiens
caccacacacatcgcttcaccctctccctggccgcccacttcctcttcttagagcctggcattcttctttcaaaattcaagtccctctgcttgccattgcrtctgacaccttaccgcactcatacaggattaaggtttgtggatttgacttctgaaaactgataaagtgaacagaggagtgtttttcttaaaataattttt

SEQ ID NO: 23835 - DNA, 201 bp, Homo sapiens
gtgcaccaaggatctgtgacatctcagaggcctcacccgaccctgaagtgacacggctcactgtttctgctctgggtacatgaacagggactgtttattcygattctgtggctttgagcagaaatcgatttgtctgaaaagactgcccttagtcacaacagatccttttcgttgtggttttttttacctagttttctttca

SEQ ID NO: 23836 - DNA, 201 bp, Homo sapiens
ataggaatatttatcaattgagttcagatgtcagcataacaggctaaatacagtcagattaggcaagttcaacaaacaggtgttaaagatctcatttcctkctgattctcacctgaaagtcccagtgacctcagcatcagatgtctcttagttgagaaatacaaaatcaaagattttttttccagcaggtgtataacacac

SEQ ID NO: 23837 - DNA, 201 bp, Homo sapiens
ggatctaggttgcacgccccttttgagaatctaactaatgcctgatgatctgaggcggaggccagatggtttcatcctgaaaccatcctcccaagcccccrtttgtggaaaaattgtcttacatgaaactggtccttgttgccaaaaaaaagttgggggccactggtttagatcttgcagtattgtgaagtaatttttggt

SEQ ID NO: 23838 - DNA, 201 bp, Homo sapiens
tgagtttttaatgaaccatgctagcaagtaaggctcagagaatgattaaggatttagtattgtctctgtgtcattaaagtaaattcagtcatcagaaagcktacaaattgatttttagttccctttttgttgtgtctacgtaataattagttactacatcatcgcatttgcttctgagattattcatcttgcccatttgcc

SEQ ID NO: 23839 - DNA, 201 bp, Homo sapiens
ggttaatagaggttccacacggtacttgcaactttctttgaaaagggaatacgttatcattaacatcaatactgtcaacactatcagtaaatgttgatgtrcttacctttctacataccttccatttgctaagtgagatctaggcttagtcaacacatttactattcagaaacctctaatcaagtgatagaactctgactt

SEQ ID NO: 23840 - DNA, 201 bp, Homo sapiens
tttgattaataaaaatattttggccgggcacagaggctcacgcctcttagaaaaaaaaaatcttttttttttcttttaagcaaaatccctactgcagactrtgttgttaatttaaagagttactattgagggattctcttatttatcatttgttaatgcaggcatttctggatacacgtaaacatatgaattgtcaagcta

SEQ ID NO: 23841 - DNA, 201 bp, Homo sapiens
catttagaaccttctttgaaagacattagatatctcccaaacttcccttgcacatgaacaaaatgtcttcacattatcccttattttattacttgagtgtrtcttctgctgttgcaaaaccaggcattgacagatcaatagaactcaggtgtgtggattcctggtggtacttgtctctgaatatacagtcggccctctgca

SEQ ID NO: 23842 - DNA, 201 bp, Homo sapiens
tctccaaagcattctatgcccttagtatagatggcttttcatttccttctaattatagttctctttgatttcttcataatttatttaaataaactttttaygctgagataaggatctgcgtttgttataaaatactgcttttaaataatgagagaatactgttcccttccaataagtttttcagtggaaataaaatgattt

SEQ ID NO: 23843 - DNA, 201 bp, Homo sapiens
aactagttgttgcaaggcggtcagggttgcaagacaatttttccataataccaaacaggaaaaacaacagtagcgcaacaaaaggtttctaccttgctaaraggaaaagaatatttttataattaaagcttttagttatttgtcatatactcattatcggaaaatgttgttatctttagtcctgtattgacacaaatgtgt

SEQ ID NO: 23844 - DNA, 201 bp, Homo sapiens
tcgtagcttgttttatttgtaagagtctctgctgggacttgaattcagtcctcctgtcttctgagtccaaaaaaatatctgtccttttctggctctctccrtctttctttctaaagataattgctttattattgagtcacttttttcttttatcacataatcgctttactttcaacatatcagaaaaacctttttatttta

SEQ ID NO: 23845 - DNA, 201 bp, Homo sapiens
tagttagcctcgaactcttttttgtaccatggactcccatctccagttgtgtcccaggaactggctgagagcatgtgatagttttccctgtaactgaatgyatcatcttttgtttttgtttgtccttgtgcctgtcctctgcccaaccacccaaatgacaaacctagacacctaaaatctgtcattttccttcataatggc

SEQ ID NO: 23846 - DNA, 201 bp, Homo sapiens
ctccatccccttgaatttctgtacctaaaagactatatctgcttacccttgattaagtaatagattctgaaatgctagactctgtcatctcagtattttastattcgatgtctaggtatttcttcatgaatgaatgcctttggctgtttgtctcattgtgaaaagttgatttgattttaatgtaaatatatccattcctca

SEQ ID NO: 23847 - DNA, 201 bp, Homo sapiens
gcccagtaacaaaaacaacaaaaattgattaggtgtactgaaaacataagaaatatgaggcagaacagagtttgtgacctggagtttttgagcaggttgaacacacacacacacacacacacacacgcaccctcaactagagaagaattatgatgggacgtatgaacaagagcaaaatgatagtattaaagaggcatattt

SEQ ID NO: 23848 - DNA, 201 bp, Homo sapiens
cccagtaacaaaaacaacaaaaattgattaggtgtactgaaaacataagaaatatgaggcagaacagagtttgtgacctggagtttttgagcaggttgaacacacacacacacacacacacacacgcaccctcaactagagaagaattatgatgggacgtatgaacaagagcaaaatgatagtattaaagaggcatattta

SEQ ID NO: 23849 - DNA, 201 bp, Homo sapiens
aaaacaacaaaaattgattaggtgtactgaaaacataagaaatatgaggcagaacagagtttgtgacctggagtttttgagcaggttgaacacacacacacacacacacacacacgcaccctcaactagagaagaattatgatgggacgtatgaacaagagcaaaatgatagtattaaagaggcatatttaggcataacag

SEQ ID NO: 23850 - DNA, 201 bp, Homo sapiens
gaggtcatgcatatgctaattgatttagccattccaccacctatacatatatcaaaacatcgtattgtacaccataaatagctacaatttttacttatcaaaaaaaaaaaaaaaaaaggcaagtcctggtttgaatggaaaagagtggcctcctgaggctctcagcacctctgcggaactcccaggcttccctggtccatg

SEQ ID NO: 23851 - DNA, 201 bp, Homo sapiens
gtgccactgattatagaacagttaggttttcaccctttttcttcctctttctggttttgcatcccccaccccacacgacatccctcctcccccatgccatstcccatcccccatttcccatgccctcctcatctcctgtcctccatgacctctccaatccatctttccactcatggctgattcttctttttttcttcctct

SEQ ID NO: 23852 - DNA, 201 bp, Homo sapiens
tgcttctcctgaaaaagagggtcctctctgtatgatgctttcagatatccgttatacaatgatgaacccgatgtaaacaaccacactttaaaataatatatttttttttattttttgcagagacagagtcttgctacattgcccaggctggtcttaaacttttggcctcaagcagtcctcttgcctgagctcccgaagtgg

SEQ ID NO: 23853 - DNA, 201 bp, Homo sapiens
caggctagtctcgaactcctgatctcaagtgatccgtctgcctcggcctcccaaagttctgggatgacaggcgtgaaacatcactcccggcctccattttytaactagaactttgctcccttcctctgtcgtttctgctttccctttttcttctgccttctctctgcgtatgccccactcagttctgagcatttgtaagtg

SEQ ID NO: 23854 - DNA, 201 bp, Homo sapiens
aatttattagctcacgcagcatacacctagtctaagtaagagagaagggatggaataatttttatgtcccaaagtcattaaatgcaaattaatgatgtctrcattgttgaagttttgacaaaggaacacatgctggaagcttggaggttgattgctgaggaggtttgtttggtgggaatgggcgggtggcctgtgtttctt

SEQ ID NO: 23855 - DNA, 201 bp, Homo sapiens
tattcctaaatgaccattgtgcactgaattctagttttcctagaaattacatggttgaaatcatcccagacaccctatttcctgagaaccaagtccaggcygtggctgtgatgatagtgatgtggtgaacttcctctaggagaccacagagttagagtcactcttgttgaatagtctgagcaccttcccaggtatcaagtt

SEQ ID NO: 23856 - DNA, 201 bp, Homo sapiens
gcctgggcaacatggcaaaaccctgtctctacccaaaacaaaacaaaaacaaacaaacaaaacccacaaacaagaattagctgggcatggtgacatatgcstgtagtcccaactactcaggaggctaaggtgggaggatcacttgagcccaggaggcagaggttgcaatgagccgggcactccagccagggtgacagagcc

SEQ ID NO: 23857 - DNA, 201 bp, Homo sapiens
caccttggcctcccaaagtgctaggattacaggcgtaagccaccacacccagccaaaattgttttattattatattttagagacaagctcactgtagcctygaacccctgggctcaagagatcctccaccttagcctcccaagtagctggactatgggcacaggtgcacaccaccacacgttggtgatttttccagttttt

SEQ ID NO: 23858 - DNA, 201 bp, Homo sapiens
aaaggaaaaaaaaaaaacaagcaggaaagtggtttttgctagttttcagaatgcctgattttgaagtgttccactgacctccacttcttttagtgagagtycttgctttctaccagatggcatattcctccaatttcagctgagcccgtgttttagcctgtaagcctatagtctctatttgctggcctcacagaggagaaa

SEQ ID NO: 23859 - DNA, 201 bp, Homo sapiens
tggcctggaaaactcctactcactttcctactcctcagagagttttttcttttctcaccctcccaggctgaatttgtcacgctctcttttgttgcattccsggcctctggttacagcatttatcatgcagtacactgaagagttgtttcctggtgtatctcccatttaggccatgggctcccaagggcagaaattgtgttg

SEQ ID NO: 23860 - DNA, 201 bp, Homo sapiens
actgtgcagattgtatttgtgaataacttcttttctgacatctgagggaggacaggaggggtaggaggaccatgtagtctcatgcgttgaaacagtggacrcacagttcctgcaacattgtcaaaatccatgtttttactaaacatacattaatatttctttctcttacttctacaagttaaattaatatcactttgtgga

SEQ ID NO: 23861 - DNA, 201 bp, Homo sapiens
ctagttaaagagactttggttttcttataaggcatgaataaacgctctgggcagtctgccccattggaaaacagaataatgctaataatttgcatttatayaataccccccggcttgtggatctacaagcactttgcaaacattaattaattctctaaaccccctatgagccagggggtgccatcagtaactaatcacgaa

SEQ ID NO: 23862 - DNA, 201 bp, Homo sapiens
attctggaagaagttttcagtatagactgtctcttcattgggccttaactttgtgatctcagcctgcctttgcggcttcacagccatttttctacctgtgygtgcaggtgtgtgctggtgctgggaggtgctattgtagacagagcatgaggcattggattcagatcctggctctgccacttacttggatgttgggcaagt

SEQ ID NO: 23863 - DNA, 201 bp, Homo sapiens
tttttttttttttttttttgtcaattaagtattttaaaaatattagagctggtaggaatcttggctgacgtctagtctcattagaatgtgtatctgtactrtgatttttccattaacttttgcctcaggagtttcgaatcagctttggggctagtagcaaatgtagataattgtttcctgattaggagtcagatttgacac

SEQ ID NO: 23864 - DNA, 201 bp, Homo sapiens
atagtgctttctaacactttgtgtgtgtgtgtgttggagttaacatggcttgctttgtgtgagtatgaattttaatactattctttgtttatgatgatctkcaggattctggaagaagttttcagtatagactgtctcttcattgggccttaactttgtgatctcagcctgcctttgcggcttcacagccatttttctacc

SEQ ID NO: 23865 - DNA, 201 bp, Homo sapiens
cccggcttgtggatctacaagcactttgcaaacattaattaattctctaaaccccctatgagccagggggtgccatcagtaactaatcacgaaggagggcmagtgattcttgacagagtggatatgcaagttagagaacactgcgagcttgggagctgaagaggttgagtggaatttttatgagaaagaacaaccaaggta

SEQ ID NO: 23866 - DNA, 201 bp, Homo sapiens
cttaccttaatatttcattagaacctgctgatttgcagactccttctgggctttgattcattatgactgcagacataatttaactttctctctttttctckttctgtattatgctctttcatctctgagacactattaagatgtttccagcattcagaaggctgctaattgatccaactttttttttctttttttaactgt

SEQ ID NO: 23867 - DNA, 201 bp, Homo sapiens
ccagtgtgcggcagaaaagtggttgcttatattgggatgctggaggagacggtgtgttatttacgtagccccgtgaaaacctggccctcccaccttagacytttaatatgcaaatgcagacgccatgatgttttgaacacatggtgttatccgcaggtggccatgacacttggtacacctggtgagaagagggcgggaatc

SEQ ID NO: 23868 - DNA, 201 bp, Homo sapiens
tcggttctgtgagatggtattacttgatggtagagacggaattacccttgtttctgacgacactggatatgaactgtagcagggagctcaacggtacaagytggtaggaggaggcagttgtagcttaagtgggactcctactttccctgcatctaaacattcgtaacttgctggtggcacagcaggaggagggtttgaggg

SEQ ID NO: 23869 - DNA, 201 bp, Homo sapiens
gttgctgttacaagcaggagacctctagtgttaactaatttcagaggaaatttgtaaatattaagaatagaaaactgtgtatgtatctactcaacacataytgagaaaatgacagattgtggtgatgtgacactttgggttgtatctgccttttgaaagcatcctttatgttttctcactcatttcttctacagcacttta

SEQ ID NO: 23870 - DNA, 201 bp, Homo sapiens
agatggaagctaagtcattgctgaggttcttgttcaaattgtgaagtcagcaggtaaagggattatgaactcccaagtgagtcccctatacaaagggcagrttgccttggaaacaaggctagttcttagagttggaaataccatcttgtctttaaatgccagggctggtgatgtgctgacccctgctgcatcatctctaga

SEQ ID NO: 23871 - DNA, 201 bp, Homo sapiens
atacgtatttttgaacagtgatttacaaacccaacttttgttaactggatcatagcttcccactgagttaaggcttcagagctggctgatcagtgtttatrgttggtctggtgttgtcattggtctttgcactttagtttgaagtacctcaagaagttaatgacctgttaaaagaaaatccactacagaatattctcctta

SEQ ID NO: 23872 - DNA, 201 bp, Homo sapiens
cttaataaaaataattctgcagaaggtttcccagcctttctgacggtaatgtcaaatgatttttctcgtctcatagtttattgcctagcactttgtaacaktctgctaatttctgctggttttaaaaacacgatcaagagagtgaagtaagaggctgggcgcactttgggaggttgaagtgggagaattgcttgaggccag

SEQ ID NO: 23873 - DNA, 201 bp, Homo sapiens
agcccagaggagtgaagaagttacctagggccacgcagctggtgagttgtttgaggctgactcatcttgagagctcattcatgattagcaaccttgtggtrgtagaatgagtggaattcctggcaaaccgcaggataaagtgtctccatctccattattctgggtcacttgtgtggacgttgtcttgggaagcaaatgaag

SEQ ID NO: 23874 - DNA, 201 bp, Homo sapiens
ttatttccctctgagagagagcccttatgtaatctgtttccgttcaaagcttgtgttactcttcctatagaatatccatatttcccagggttgggtttctrcctgctgccaggttgccctaactgttttggtgacatgttggcccccgtggtcttactccttatgcagtgttgtgggtctgcagtttagcaaggaagagac

SEQ ID NO: 23875 - DNA, 201 bp, Homo sapiens
aaaacatttttcatttcacccggcctatctagcatgctaagagaatttaggccagataggaatatttatcaattgagttcagatgtcagcataacaggctaaatacagtcagattaggcaagttcaacaaacaggtgttaaagatctcatttcctgctgattctcacctgaaagtcccagtgacctcagcatcagatgtct

SEQ ID NO: 23876 - DNA, 201 bp, Homo sapiens
aattttatagacctgatagaaattactctaaagacataatgtgtctgatagtaatgtccatgtaagaattttaaaaataatattcagcagtttcaaataamacttaaccccaagttgatagtaaaaatgttttttgaaccctagtttatatttaggtgttgctgcataaccaacccaaaacttaatggcttaaataaacaa

SEQ ID NO: 23877 - DNA, 201 bp, Homo sapiens
ttgcagtgtacccacactccaaagtgccataaaacgaccttcaaaactaaaccatcatattttcttggcacaggcagagcgagaaactggggatggggctgcagctggcagtggggccagggtgctggagtgggggtgttagcaaaaggtaactgtgcccatttggttgtgttcaagtgcagacctcagtgaattgaagtt

SEQ ID NO: 23878 - DNA, 201 bp, Homo sapiens
tgcagtgtacccacactccaaagtgccataaaacgaccttcaaaactaaaccatcatattttcttggcacaggcagagcgagaaactggggatggggctgcagctggcagtggggccagggtgctggagtgggggtgttagcaaaaggtaactgtgcccatttggttgtgttcaagtgcagacctcagtgaattgaagttc

SEQ ID NO: 23879 - DNA, 201 bp, Homo sapiens
ttgaaaaatgttaagctttaattgtttataataaaataaattcatacttattgtaggaaatgtggccagcacagatgattttaaagaagatagtaaacacycatattcttaccacccagaataatctacaaaagagcatttctttcatttctttgcattctttctgtttgtttgtgtatatataaatacaaatgcttattt

SEQ ID NO: 23880 - DNA, 201 bp, Homo sapiens
gcagtgtacccacactccaaagtgccataaaacgaccttcaaaactaaaccatcatattttcttggcacaggcagagcgagaaactggggatggggctgcagctggcagtggggccagggtgctggagtgggggtgttagcaaaaggtaactgtgcccatttggttgtgttcaagtgcagacctcagtgaattgaagttct

SEQ ID NO: 23881 - DNA, 201 bp, Homo sapiens
cactggggtggggatcctgtcattcagtgtttcctccctggtatccagcacaaggtcagcagaagtgagtgctcagtgaatgtttgcgaaacagaacgacrtttcttccctttagtttttacgataatggaagctctgtatcctgatggtgtggttggtacatgaatctcttgatgtgttaaaattcattttattttttaa

SEQ ID NO: 23882 - DNA, 201 bp, Homo sapiens
agagtattttaaatctgctcttgtaccttgaagtgtttcccttggcaaatacccacttctgacctgctagtgtcagctttgggtgatccccccacgtcccmcatacaggattacacagatccttactaagaagtctgataaaatacaagtaataaaacataatttagtattggttaatccatgatgctttattctgatgca

SEQ ID NO: 23883 - DNA, 201 bp, Homo sapiens
aattagccaagtgtggtggcgggcacctgtagtcccagctactcgggaggctgaggcaggagaatggcatgaacccaggaggcagagcttgcagtgagccragatcgagccactgcactccagcctgggcgacagagcgagactccgtctcaaaaaaaaaaaaaaaaaaaaaaagaaaagggtacaaagtatttgtaactc

SEQ ID NO: 23884 - DNA, 201 bp, Homo sapiens
ggaaccattagggtacaatggtccaaattccagcctgcacctgaaaatcccagtgtttgggaatctgattggggagcatcctggaggcaggctgggtttcttttttttttttttttttaagagggtctcattctgtcacccaggctggagtgcagtggtgcaatcacagcccgctacagccttgaactcctgggctcaagc

SEQ ID NO: 23885 - DNA, 201 bp, Homo sapiens
agttctgttttctcatgttaaagaagtcctttttgtcatttagaactcaactcccctctctttagagagctcaagcaggccagcacttagactcctcctcmcagcaagacacgagggcagttgtttccttagattcccattgatttagattttccacaaatttgcacaaaactttataaattagtagaaaagccaatttca

SEQ ID NO: 23886 - DNA, 201 bp, Homo sapiens
ccgcctccattattgctatcctgtattaataaggagttttataaacagtgtaatttggattgtttgcaactcaatggaaaaatgcttgaaggggtccaggygcattggctcatgcctgtaatcccaacactttgggtggctgaggcaggcggatcatgaggtgaggagaccgagaccatcctggccaacatggtgaaaccc

SEQ ID NO: 23887 - DNA, 201 bp, Homo sapiens
tattgctatcctgtattaataaggagttttataaacagtgtaatttggattgtttgcaactcaatggaaaaatgcttgaaggggtccaggcgcattggctsatgcctgtaatcccaacactttgggtggctgaggcaggcggatcatgaggtgaggagaccgagaccatcctggccaacatggtgaaaccccgtctctact

SEQ ID NO: 23888 - DNA, 201 bp, Homo sapiens
ctgatttctagttgagtttgcaaaatatatccctaaaatttgtttttaattatattgtttgatacagctttaagttgcaaatgagggctatggaaatgtakctgctcgcgagcacacatttttcaggaaagtgtctcttcttactacttttgatttccttcggaggttcttttcattctcagtctagctgttatcagttgg

SEQ ID NO: 23889 - DNA, 201 bp, Homo sapiens
gaggcaggcggatcatgaggtgaggagaccgagaccatcctggccaacatggtgaaaccccgtctctactaaaaacacaaaattagccaggcgtggtggcrggtgcctgtaatcccagctactcaggaggctgaggcaggagaatcgcttgaacccgggacggggaggttgcagtgagctgagatcgtgccactgcactcc

SEQ ID NO: 23890 - DNA, 201 bp, Homo sapiens
ccactgacaaacagaactgcatttattacaacctgaacaccacaaatcctggtaccgtggacatgggtttgcttattgcatggccttgaaatattacaagytgaggtttgccagtactctggttattcaggatgtacagtttatttcacagtcaaccaggaagccatgttgcaagacttcggggtttttcggaaggaggaa

SEQ ID NO: 23891 - DNA, 201 bp, Homo sapiens
ctgtgcttcccacacactctatgcttacctctatcctgatgtttgtcacagtggtatataattaactgtttacatgccagtcttccccagggtagtctctrtcttgtgcatctctgtgtctaccacctaactcagaggaggcactcaatgaagttattgaattaatagatccatgactgaagaagtttcctaagggccagg

SEQ ID NO: 23892 - DNA, 201 bp, Homo sapiens
cttccccagggtagtctctgtcttgtgcatctctgtgtctaccacctaactcagaggaggcactcaatgaagttattgaattaatagatccatgactgaaraagtttcctaagggccaggcatggtgggccacacctgtaataccaatactttgagaggctgaggtgggaggattgcttgacaccagagttctagaccagc

SEQ ID NO: 23893 - DNA, 201 bp, Homo sapiens
cagggtagtctctgtcttgtgcatctctgtgtctaccacctaactcagaggaggcactcaatgaagttattgaattaatagatccatgactgaagaagttycctaagggccaggcatggtgggccacacctgtaataccaatactttgagaggctgaggtgggaggattgcttgacaccagagttctagaccagcctgggc

SEQ ID NO: 23894 - DNA, 201 bp, Homo sapiens
gttgaacacacacacacacacacacacacacgcaccctcaactagagaagaattatgatgggacgtatgaacaagagcaaaatgatagtattaaagaggcrtatttaggcataacagttgtggaatgtatttaaaaagaagagttggggccagatgtggctcacacctgtaatcctagcgctttgggaggtcagggtagga

SEQ ID NO: 23895 - DNA, 201 bp, Homo sapiens
ctgggagctgcttactttctaaaatcattaagagctgaaaatttcaaactcccccccacctctccccatcaccacacaccaccctttacagacataaatargtcttgtatattttcagtaatcaaaagctgtgggtacttctaattgttctattgcatatcaaactttataaaacttagagtatacctactagttaatcat

SEQ ID NO: 23896 - DNA, 201 bp, Homo sapiens
agtacagtgacatcttgtacaggtttgtatcctaggagcaaataggctgtaacataatagcttaggtgtgtaatagggtatacctccaggtttatgtaatrtactctatgatgttcacacaacaatgaaatcacctaaccagaatgtatccctgttgttaagtgacatgactgtatcataaagtagaaaaatggagtagaa

SEQ ID NO: 23897 - DNA, 201 bp, Homo sapiens
catatatgttctacaggagtgatcaccagatgggatgaagtatagggtcagttagtggcctttaactttttggttgtctcctataatggggtttctcagcmtctgcataaatgacattttggactggattattctttgttgtgtgggactgtcctgtgtattgaggatgttttgcagtttccctgacctatactgtttaga

SEQ ID NO: 23898 - DNA, 201 bp, Homo sapiens
ttaagtagctccctgcccagtagtagccttcacggttaggcctgcaggtcaaaggagcagaatttaaccatctccccagggtgcttacatgcaggatctgrctgcaggaccttctttccagtggggctttcaaggtagaaatctgcctctttcttggactgctgcactactccatgattgggaacctttatctaacattga

SEQ ID NO: 23899 - DNA, 201 bp, Homo sapiens
ggtgagatgatatctcattgtagttttgatttgcatttttctgatgatgggtgatgttggggaaagggaacattttgagaatgaggaatactgatgaaagrgccagaagttcattttaggcactccgagatgtcagccgagcagttgtcttaagtagctccctgcccagtagtagccttcacggttaggcctgcaggtcaa

SEQ ID NO: 23900 - DNA, 201 bp, Homo sapiens
ttaaagaagatagtaaacacccatattcttaccacccagaataatctacaaaagagcatttctttcatttctttgcattctttctgtttgtttgtgtatawataaatacaaatgcttatttttttgggggggcgggtggtaacaggatcttgctctgttgcccaggttagagtgcagtggtgctatcagagctcatggtgg

SEQ ID NO: 23901 - DNA, 201 bp, Homo sapiens
aatgactttttttcttcttcttaattactttgtctaaggtagagggtttccttcttaaacattttgaaatctggctgatgaatacttgtcaaactgatttggggggtatttgtctaatcttttatcttattccatcagatcatgaatgaaaatgaaagctctgaaagagttttgctcccaatggaaaaaaataatagcaca

SEQ ID NO: 23902 - DNA, 201 bp, Homo sapiens
caagtggattttctgctaacaagcacatctgtctacaactttaatctcctgtgcttttctgccctgtccccgttttatttatactcattccaatttttcttaataatgttacatattagacttaaagtctctccttttgcatcctcttggcttagaagtcagtgactgccattttattgtaggacaatttttaaaattgaa

SEQ ID NO: 23903 - DNA, 201 bp, Homo sapiens
gaggacacaaatgagaagctatcaaaataatttaattagaaaacaaattagaaattaaatacatcttataaaatgaccttccattcctagggcagagacaygttcaagcgtaaacaagttattctggctgaagttgatagaataagcttagcatatatcaaagaaaaaactacccttaagcaaaacgtttttctattttat

SEQ ID NO: 23904 - DNA, 201 bp, Homo sapiens
aagtggattttctgctaacaagcacatctgtctacaactttaatctcctgtgcttttctgccctgtccccgttttatttatactcattccaatttttcttaataatgttacatattagacttaaagtctctccttttgcatcctcttggcttagaagtcagtgactgccattttattgtaggacaatttttaaaattgaaa

SEQ ID NO: 23905 - DNA, 201 bp, Homo sapiens
cctagggcagagacatgttcaagcgtaaacaagttattctggctgaagttgatagaataagcttagcatatatcaaagaaaaaactacccttaagcaaaaygtttttctattttattcggttctgctttccatatgcgttctcatatttttttcatttcagatgttcttccttacatatacctaaatattaccttttgcca

SEQ ID NO: 23906 - DNA, 201 bp, Homo sapiens
agtggattttctgctaacaagcacatctgtctacaactttaatctcctgtgcttttctgccctgtccccgttttatttatactcattccaatttttcttaataatgttacatattagacttaaagtctctccttttgcatcctcttggcttagaagtcagtgactgccattttattgtaggacaatttttaaaattgaaat

SEQ ID NO: 23907 - DNA, 201 bp, Homo sapiens
aaacgtttttctattttattcggttctgctttccatatgcgttctcatatttttttcatttcagatgttcttccttacatatacctaaatattaccttttsccattttctactgctaaccacagaagtaacttcaggacttgagggttttgggggctttggggtgttttttttttaatgtttcatatttcttcagagaagg

SEQ ID NO: 23908 - DNA, 201 bp, Homo sapiens
ttatttattcttaatatcagcctttgagaatattgaggcacctctgtagactcatagaattctgagaaatattgtttgaaaaattatcatcttctggatagaacccaagctctttgatgacttccttacttcatccacaacctaaatttttgcctgatactgtcccttttatgccagccagacaggtggcctcactgtgca

SEQ ID NO: 23909 - DNA, 201 bp, Homo sapiens
atattgttatgtaaatttcacagcaattatctgtacctttttagcaggatattttaactcccatttatgtcattttgcttgggtgggttttttttttgttkttttttttgttgtttttttgtttttgtttttgtttgttttttgtcgccaaatgatgaatctcagaagatttgtaacagagcataaactgacttgtgcagt

SEQ ID NO: 23910 - DNA, 201 bp, Homo sapiens
atatcaaagaaaaaactacccttaagcaaaacgtttttctattttattcggttctgctttccatatgcgttctcatatttttttcatttcagatgttcttccttacatatacctaaatattaccttttgccattttctactgctaaccacagaagtaacttcaggacttgagggttttgggggctttggggtgtttttttt

SEQ ID NO: 23911 - DNA, 201 bp, Homo sapiens
atcaaagaaaaaactacccttaagcaaaacgtttttctattttattcggttctgctttccatatgcgttctcatatttttttcatttcagatgttcttccttacatatacctaaatattaccttttgccattttctactgctaaccacagaagtaacttcaggacttgagggttttgggggctttggggtgtttttttttt

SEQ ID NO: 23912 - DNA, 201 bp, Homo sapiens
gaaacagaaggccacattgtttcctcagctcagggcctccccagagctgggcaaggaaaggttattcatatttgacactaatgtatttgccttttctgtcrcacctcattgctgcccaagtgtataaatgtgaactaacgcttcagtatttttaaactgtccaaatgcaaataggaattcgtttgagagccacatgacaaa

SEQ ID NO: 23913 - DNA, 201 bp, Homo sapiens
tcaaagaaaaaactacccttaagcaaaacgtttttctattttattcggttctgctttccatatgcgttctcatatttttttcatttcagatgttcttccttacatatacctaaatattaccttttgccattttctactgctaaccacagaagtaacttcaggacttgagggttttgggggctttggggtgtttttttttta

SEQ ID NO: 23914 - DNA, 201 bp, Homo sapiens
gatcaagaaatgtagccagtaaacttaattcctattcaaaggggaaagtgtgtactgtgtacagaagaggcattttacatagagaagctcagcaccaaaakctaatgtgcaaaagcaagatgcagagcagagaagattctgtactctacatttgagagctctttatttgtcaacaaggcagcagatatttctaggtagcgt

SEQ ID NO: 23915 - DNA, 201 bp, Homo sapiens
ttttaactgtacttaaagctaagagttctaggctgtggaaagctgtgtgtgtgtggagggggagcagttttctttaattctttaaacagctgataataacrtgtaaattttctatttcatatgttccaagaattaggatggacttattgtatgcagcaggcaggaagtacatagtttggccacattcttaagagtatgcca

SEQ ID NO: 23916 - DNA, 201 bp, Homo sapiens
cttcttttttaatgtaaagattttacatttaattactcttcatatttcctgtatcaacccaaatattgatggttgtgggtgaatatattgtaaagagagayttaaaaaaaaaaaccttatatgtatttgtgacatcaaagtggattttaattgctttagttaagatcttttgcataggaaatagaacagcatattagatga

SEQ ID NO: 23917 - DNA, 201 bp, Homo sapiens
ttgggttcattggctcacacctgtaattccaggcacaggagttcgagacgagcctgggccacacagtaaggccctgtctctattaaaaaaaataaataaawaaaaataaataactgaagtcttgaaaaccatctgataaagggtattgtggattgggttgagtgcctgtgagaaggcttgacctctgctctgacttgaaag

SEQ ID NO: 23918 - DNA, 201 bp, Homo sapiens
aatcaaagtacgcagcaagggagtgatctactaggctttcatatcaaatataaaactaccactaaataactgtttctgaaacttcatgtgtagtttatcayatattaaattattaacatttctgttggaggaggtatttttcataaaatatttaagcttcacatctcagaacactatttcaacaacagataccaaagctat

SEQ ID NO: 23919 - DNA, 201 bp, Homo sapiens
agaaaggtttttggtaataactctttaaaagagtgatcctattgtttttcttccttcacccacatatattgaaaggttttttaaaaatgaaatagagctayttttagagtagagtgtctgaggagtcatctatttgaactttctcccagttgctgaaaccactctacaataccactaataaatgtcacctgattccttcat

SEQ ID NO: 23920 - DNA, 201 bp, Homo sapiens
agtcctgaaagggatatgttattcattaaggttgcattgcacatttaaagattgttctagcttggttaagtagaaggtgctttttctttaaaaaaaaaaawaataataataaagttacctctttttcccaagatgccaagcaatacaaatttattttatttaaatctaatcagattggcactgatgaaaagtacacaatca

SEQ ID NO: 23921 - DNA, 201 bp, Homo sapiens
aaacatgctgtccctcctgcatttcttttttgcccagggacatttaaagtcattatcttgccttgaaaagattaaaaaatgttggcacctccgtctttgtrgtgcaaagtgatcttgggctgttgaccaagctgacttgatccctggaatgtcttgatctaaattcatcttttcttttgttgctgaaagtttagggtttcc

SEQ ID NO: 23922 - DNA, 201 bp, Homo sapiens
atatgagcccatgaacagaaaaaagaaaaaaaatccagtaaatgaaggaattactttaaaagatttcagtcttttccttttgtctttttctgtttttaatrtacatgaagactaatttaaagacccttttctctttttaagtatgtttggagatctgtatgacaaattggctcctaacattgtataatactaatgacagga

SEQ ID NO: 23923 - DNA, 201 bp, Homo sapiens
gttttcctcaaagggacaggctcattttgctcattttcaagaaaatggctttttaaatgcctaagtctgaataacaggtttttgtcagttgtccttttttrggaaaagtggtgttctgtgaagcaggtggctagttcagctcacaactcaattgcacaggtgcttttccttgagacaaacatcatacttcagtaggtcatg

SEQ ID NO: 23924 - DNA, 201 bp, Homo sapiens
aaaccacaggagtggagatgccaaagagagaagaaatggaaagagatgacttcagaagattctaggttctttaatgcctcccattaaagttgtctcctacmtcatgggtcttggtgactctaatttgtcttttctctctctctcttttgtggtttttgtttgtttgttttttatttggagaaacgaagtcttgcttcattg

SEQ ID NO: 23925 - DNA, 201 bp, Homo sapiens
atacctaatatttaccactgtagccatttttaagccgtttagttcagcagcagtaagtgtgctcacgttgttgtgcacttcaccgccaccattagtttctrgaacgcctttcgtcttgcgaaactctgtacccatcagccgctatctccccagttccctcttcccccgtccctggaaaccaccactttactttctgtctct

SEQ ID NO: 23926 - DNA, 201 bp, Homo sapiens
tgcctcccattaaagttgtctcctacctcatgggtcttggtgactctaatttgtcttttctctctctctcttttgtggtttttgtttgtttgttttttatktggagaaacgaagtcttgcttcattgtccaggctggtttcaaactctgggcttcaagagatcctcctgcctcaacctcctaaagtgctgggattacaggc

SEQ ID NO: 23927 - DNA, 201 bp, Homo sapiens
tgatttgtggatatctttgtttttcagggcaacagtgtccatctttcatgtctatccaaagagacataaagtccttggtatgttcaaactattaatgtgarctttttatttgtacatgcatttttaatttcgtgagtcactctgtgtatgatgtactctccggttattgcattcggaaacattttaactggaattatttct

SEQ ID NO: 23928 - DNA, 201 bp, Homo sapiens
aaaatgtttgagtatgttggaaatagaaatggttttatttcataatctgttgcagttttatatttatgtacatttgtgctggttgctacatgaaatatagygcttttattgtaggttgtggtcaaagtttgaaaaatcctgggttagaattgtagttaacacaataaacagaattctttttctaattttccaacatctctt

SEQ ID NO: 23929 - DNA, 201 bp, Homo sapiens
atgccctgagatctcattagtgacagtgcacatacccacttttctttggaatgtaattagggttcttttaaatataatggctaacatttagactgtgattwaaaaaaatatttttgacaaaacctctaacttaagactttgtagtttgttcttctgttgtatagttgcacatcttccatagtttgaaaagcaaagaggagc

SEQ ID NO: 23930 - DNA, 201 bp, Homo sapiens
tctatttccatgatttcagttgttttaatttttagctcccacaaatgagtgagaacatgcaatgtttgtctttctgtgcctggcttgtttcacttaagatratgatcttcagtttgattctttttttttttttttctgagacagtttctcactgtcacccaggctggagtgcagtggcactatctcacctcactgcaacat

SEQ ID NO: 23931 - DNA, 201 bp, Homo sapiens
gtgcagtgcattttttgtcatcattaagcaatagcattttaattggagtcaccacttggtcaatagatgtcaggtcatggcatgggaagaaaaggaaagcrcactcagtgataacctgtcctatcgggaactcacccaagtacttactatccactaccctgccttcagtgatcctttctatgtaatgttaaagttaaacat

SEQ ID NO: 23932 - DNA, 201 bp, Homo sapiens
ttttaattatctgttttacaaaatgagctttttgcatcttggaatccttctcttctcttatgtattctgaccttgaagggtcactgtatttggaagggatrggaccatgatctcattctttggaatggtttgtaatcattttagttttaaggaaccacaaactcaccttcaagctgtgtgtacaactgagcccatattagt

SEQ ID NO: 23933 - DNA, 201 bp, Homo sapiens
caaagaaaaaactacccttaagcaaaacgtttttctattttattcggttctgctttccatatgcgttctcatatttttttcatttcagatgttcttccttacatatacctaaatattaccttttgccattttctactgctaaccacagaagtaacttcaggacttgagggttttgggggctttggggtgttttttttttaa

SEQ ID NO: 23934 - DNA, 201 bp, Homo sapiens
aagaaaaaactacccttaagcaaaacgtttttctattttattcggttctgctttccatatgcgttctcatatttttttcatttcagatgttcttccttacatatacctaaatattaccttttgccattttctactgctaaccacagaagtaacttcaggacttgagggttttgggggctttggggtgttttttttttaatg

SEQ ID NO: 23935 - DNA, 201 bp, Homo sapiens
ctatcttggtgtgctttattagaatatttggtcccgattttcatattgttctgtacactactgaagtgattattgcagctactatcttgtacttaaacatyacagtaaagataataccatgattattcttaatttctagcaggaggaatttaaaatcagtgtgttgttcaagacatctgagctgatatctttaggtcttgt

SEQ ID NO: 23936 - DNA, 201 bp, Homo sapiens
gaaaaaactacccttaagcaaaacgtttttctattttattcggttctgctttccatatgcgttctcatatttttttcatttcagatgttcttccttacatatacctaaatattaccttttgccattttctactgctaaccacagaagtaacttcaggacttgagggttttgggggctttggggtgttttttttttaatgtt

SEQ ID NO: 23937 - DNA, 201 bp, Homo sapiens
aaaactacccttaagcaaaacgtttttctattttattcggttctgctttccatatgcgttctcatatttttttcatttcagatgttcttccttacatatacctaaatattaccttttgccattttctactgctaaccacagaagtaacttcaggacttgagggttttgggggctttggggtgttttttttttaatgtttca

SEQ ID NO: 23938 - DNA, 201 bp, Homo sapiens
aactacccttaagcaaaacgtttttctattttattcggttctgctttccatatgcgttctcatatttttttcatttcagatgttcttccttacatatacctaaatattaccttttgccattttctactgctaaccacagaagtaacttcaggacttgagggttttgggggctttggggtgttttttttttaatgtttcata

SEQ ID NO: 23939 - DNA, 201 bp, Homo sapiens
ttcagatgttcttccttacatatacctaaatattaccttttgccattttctactgctaaccacagaagtaacttcaggacttgagggttttgggggctttkgggtgttttttttttaatgtttcatatttcttcagagaaggaaaaagtcttgtcatttatggagcaccttttcacgaaaaccacgcagtgctgttcctag

SEQ ID NO: 23940 - DNA, 201 bp, Homo sapiens
actacccttaagcaaaacgtttttctattttattcggttctgctttccatatgcgttctcatatttttttcatttcagatgttcttccttacatatacctaaatattaccttttgccattttctactgctaaccacagaagtaacttcaggacttgagggttttgggggctttggggtgttttttttttaatgtttcatat

SEQ ID NO: 23941 - DNA, 201 bp, Homo sapiens
aaaaagcattactggcagactaattgtgtatggtgtagcatgcagtctatcacagtaacccatcacacaccaaaatgcacatgccggcagacccgtgcaaygatggttgatgttcacagtgaccctgaggtgttctgtgtaattttgagctaaggatactttattatagtcaaactttttggaggtaaggtctatatgaat

SEQ ID NO: 23942 - DNA, 201 bp, Homo sapiens
ctacccttaagcaaaacgtttttctattttattcggttctgctttccatatgcgttctcatatttttttcatttcagatgttcttccttacatatacctaaatattaccttttgccattttctactgctaaccacagaagtaacttcaggacttgagggttttgggggctttggggtgttttttttttaatgtttcatatt

SEQ ID NO: 23943 - DNA, 201 bp, Homo sapiens
tgttctgtgtaattttgagctaaggatactttattatagtcaaactttttggaggtaaggtctatatgaatacttattagtgaacagcatatagttggtcrttgtgggtaagtgggagatttccttgacaggttattccctcagacacacagacccaggcccgtaagcagcagatttagacagcagaaaatccaagctcga

SEQ ID NO: 23944 - DNA, 201 bp, Homo sapiens
ccttaagcaaaacgtttttctattttattcggttctgctttccatatgcgttctcatatttttttcatttcagatgttcttccttacatatacctaaatattaccttttgccattttctactgctaaccacagaagtaacttcaggacttgagggttttgggggctttggggtgttttttttttaatgtttcatatttctt

SEQ ID NO: 23945 - DNA, 201 bp, Homo sapiens
aaggtggccagagagagttctaaggcccctttgaatatcactggcgctcagggcaggaatggggcagaggaaggagctgttggtaactgagaagaggccaytgcagagagaggaggaaaaccaaaagagtgcagtcactaaagccattaaagcaaggatgtgtttttaattaattagaatgatgtggtcaacattgttcct

SEQ ID NO: 23946 - DNA, 201 bp, Homo sapiens
aagttacactctcttcttctctttcccagcacataacacaattctagttgatttattactagcacagttgttctgtaagggcaggaagcatactcttctastgatcactttatgcataacacatagcatagtaggcactgccaaaatgcatataataacacgaatatgtgtatatacatactcacatgtgtatgtgacaca

SEQ ID NO: 23947 - DNA, 201 bp, Homo sapiens
tctctgggcctcagtttcctcatcagtaaagcgaagaggttggtcctgataatcacaaggctaccttatcattggaatgctctttaattctgtcactcatyccacaacatataattaacacctacatcttacttttctctgcctttaaccttccattcagtgctatgtacggccagttgtctgcatgggaaaacaggaaag

SEQ ID NO: 23948 - DNA, 201 bp, Homo sapiens
ttttaagcagctataaaatgaggtttttacaattcagtttgaatcttctcatacaataatcatgttcatgattcagcacaggtttttacatgttgcattcytactcaagggcagggttttttttcccctccttttgtccactgaaagaatgccaacaggaataaattgagtgggatgagccttcatggttaccttttttct

SEQ ID NO: 23949 - DNA, 201 bp, Homo sapiens
aaatgaggtttttacaattcagtttgaatcttctcatacaataatcatgttcatgattcagcacaggtttttacatgttgcattcctactcaagggcaggkttttttttcccctccttttgtccactgaaagaatgccaacaggaataaattgagtgggatgagccttcatggttaccttttttcttcacttgggtattta

SEQ ID NO: 23950 - DNA, 201 bp, Homo sapiens
attgtacactacagattcaggcctgggctccgtgaaggacagcacccagacccaagggccagctactgcacctcatcttcagaatttcagtgattggtcayggaatacatgttctgtttttttttttcttttaaagaattctttgggaataacaaaaactgagggggaaatgaaaagttttgtggatgaatagaagaatga

SEQ ID NO: 23951 - DNA, 201 bp, Homo sapiens
actcaggataataacacaatatcctggaatcactaaaccgtttttcatggatgtggtattctgtttttttggggtcgggcagttgtaacacattcgaatartctttgttgctaaagaacctaggagaagccaggtagaaattgctctaacgagggacttgcctcattttatggcccagttactgatttctccggttctcat

SEQ ID NO: 23952 - DNA, 201 bp, Homo sapiens
agtttgaatcttctcatacaataatcatgttcatgattcagcacaggtttttacatgttgcattcctactcaagggcagggttttttttcccctccttttktccactgaaagaatgccaacaggaataaattgagtgggatgagccttcatggttaccttttttcttcacttgggtatttatagtaagatgaaatgtgcag

SEQ ID NO: 23953 - DNA, 201 bp, Homo sapiens
ttcctgggctcagccatcctcccgcatcagccttcagccttccaagtagctgggactacaggcatatgccaccatgcctggctaatttaatttaatttttkttttggtagagtcagggtctcacttggttgtcaagctgatctcaaactcctggcttcaagtaagccccttgccttggcctcccgtggtgctagaattata

SEQ ID NO: 23954 - DNA, 201 bp, Homo sapiens
atagcaccactgcactccaccctgggtgacagttagattctgtctctaaaaacaataataatcagaaaaatatgagaatcagtcatccaatttaatacttwtctgtagccttgaggtcacatggcatgcataggcttcccacttcctgctgaaagtactgtcttaaaattatcagagtgggagcagcctccagatcaggtg

SEQ ID NO: 23955 - DNA, 201 bp, Homo sapiens
gacagaattatgttaatctgcttatattgtttggcataattgactcaatccattcctactacatttcttgaaacaggattcttttgtgatgtgtgataaahtcttaactatgtatatttacacaaagaggctgaaaagagtaatgagcatggtgtcaagctgaaggagaaaacagcagctgaatatggaaatagttaacac

SEQ ID NO: 23956 - DNA, 201 bp, Homo sapiens
gcgtgagccacaacacctggccctttttattaaaatactttatggatctcgtctttttattttaattaattaatttaattgatttttgggacaaggtttcwctttgttaccccagctggagtgcagtggtacaatcgtggctcacagcagcctcaaccttccaggctcaagtgatcctcatgcctcagcctcctgagtagc

SEQ ID NO: 23957 - DNA, 201 bp, Homo sapiens
ttggacagtcattattttattgggaacaggagaggaagagatgggaaagaaagaaatgtattcactagttatttaagaggataaatatttaaaactgcacrtatatatttattatggaatgccaggaaatatagacaagcactgccagttgtgcatagcagttcttttgtctatggctgtagataatacattcttcaaact

SEQ ID NO: 23958 - DNA, 201 bp, Homo sapiens
ttagagccatgaagacctgggttagaatccaggggctgccacctgctggctgtgtgtccttgagtgtgtgacatggtctctgagccccagtttcccattcwatacaagcagtgttcacacctgtctcacagagatgttacaaaggttaatgaggaaatatatagaggctgggtggacctaccttgtgcataagaagttatt

SEQ ID NO: 23959 - DNA, 201 bp, Homo sapiens
aaaatcttccatgaatgcgctttagtcttctacagggcaagtatgacctagatattcagcaattggaattacttttaaactgctcacctgtctactgttgktccttgttgatgaggaaaatcaggtgatgcttatcttaaagataaggtgtttgtatcctcccttgctcaggatccaagcaggcttcattccaggcatcat

SEQ ID NO: 23960 - DNA, 201 bp, Homo sapiens
atgacctagatattcagcaattggaattacttttaaactgctcacctgtctactgttgttccttgttgatgaggaaaatcaggtgatgcttatcttaaagrtaaggtgtttgtatcctcccttgctcaggatccaagcaggcttcattccaggcatcattaagtgagtctgttgccaggaaagctgcagtgtgggcgttca

SEQ ID NO: 23961 - DNA, 201 bp, Homo sapiens
taaagataaggtgtttgtatcctcccttgctcaggatccaagcaggcttcattccaggcatcattaagtgagtctgttgccaggaaagctgcagtgtgggsgttcaccatgactgctaaatttgcagcatttcttttcattcaaactcatggatggaggagagggtctcacttgtatttgcccaacacgtattattagtag

SEQ ID NO: 23962 - DNA, 201 bp, Homo sapiens
ttttcctgttgtttaaaaaaggccttcattaaaagttggtacaaagaaagatcttaagctaccctcattcagaatctttcacattcttaatacattgaaarcatttgtcaacacttcattactaacatggaatataagttaatgatgcacaaagtttaaaaccttatattcaattagagaacctattagctttgaaagcag

SEQ ID NO: 23963 - DNA, 201 bp, Homo sapiens
cgtcattactgttcatgcctccctggggatcagactgattggtaaattagtgccagcagaggaagtagaagacaatgtgtgagcgtgttttatttaaacamatacactctacaatttgttttattggattttgtcctttgagaacaccacaagtaatcccattacagtctagaaactgcttgctcaccacgcctccacctt

SEQ ID NO: 23964 - DNA, 201 bp, Homo sapiens
gtggtttcatgtgtgagaggagcgccttctctcccgctgtgctgtgtgatgctgccctcctgcccactcccccacattggcccttcctgtctgtctaacaycaaagcatcatgagataccagtccttgtggtgaacctcacagtctgcgttatgaggattgtagttaaatgttctttcattaaaacagatttgtttgaagg

SEQ ID NO: 23965 - DNA, 201 bp, Homo sapiens
tcaagaaagaatcaagcaagacaaggtctttaagttttacccgtattccacatcccttactccagatagaatttttgccacttcatactactaagtaaagyaggcaacagatgtcaaagtacaggaggatcaacatggaaccattgcttattttgaagaaaaaaatgtagatcatatagttagaggattaatacatatttc

SEQ ID NO: 23966 - DNA, 201 bp, Homo sapiens
agaacttgcttatttgggaaagtacaggacaaagcacgtgatgtttcataagacgggttgtagaaagagctacttatgacttgaaagtgtttttattggtraggtaaatagatgcttgtatgtttctcaataaattaatctagcagtataaaaaattccaggccaggcatggtggttcatgcctgtaatcccagcactttg

SEQ ID NO: 23967 - DNA, 201 bp, Homo sapiens
agttcaaatccagcctggataacatagcaagatcccatctctacgaaaagtaaaattagccacatatggtggcatgtgtttatagtcccagctattcaggrggctgagatgagaggatcacctgacccaggaggctgcagtgagctatgactgcatcagtgcacctccagcctgggcaacaaggagacgatgtctctaaaa

SEQ ID NO: 23968 - DNA, 201 bp, Homo sapiens
tgtctgtgattctctgcttctctccatggctggatttgctggtctagagatacaagaagatttgaaacctatgtcctcttggattttattaatcaaacatmtgcatgtccagaattcacacaaccctctgccatgccctccagggatgggctactgggaggatatttttatcaataagtaggctaaatatttatttttatc

SEQ ID NO: 23969 - DNA, 201 bp, Homo sapiens
gattacaaggcatgactcactgtgcccagccaagtttagaatatatctgaaatattctaaaaggtctgaaatgtatgtttgtgtgtgtgtgtgtgtgtgtrtatatatatatatatatatattttttttttttttttttttttttttttagggggaggggtaggtgaggtggaaggttctgtatgcaaatcaaggtctggt

SEQ ID NO: 23970 - DNA, 201 bp, Homo sapiens
ctccccaaagaggcagtcttgaatattctttctacctttagttaacacaactaattacttctcaaactgtcgctgtgaaggactagatttgcttttttttyccctccaacctgtggcagaacaatacttttaaaatacaatgcaaataaattactgggataaagtggcttgtgttttatgggcctttattttagctattat

SEQ ID NO: 23971 - DNA, 201 bp, Homo sapiens
tcttggatttttgtgcatcagtttttttgttcaattattacattaaactatttctcttgactactgagattttggtcctcccttaaattttgtgtcagagscaagtgcctgtagtctcacctctgttccagcccttgtaaacgctatgattccttgtagtttgtcattaaaaatagttatcaaagccaagtaatttggaag

SEQ ID NO: 23972 - DNA, 201 bp, Homo sapiens
atgataagatttaattgaatatttgctaagtccagtgcatactattaggccttcaacatatgaatttataatccaatgaattagatattacgttcctttcwtacaaaaggacattgaggcttggcgatattaataaatggctgagtggtacttggcacccaagaccgtgtgactccgaagctcctgctttcagtgaaggag

SEQ ID NO: 23973 - DNA, 201 bp, Homo sapiens
gagctatgatagcaccactgtgctccagcctgggtgacagagcgagaccttgtctcttaaaaaaaaaaaaaaaaaggttaggctaggtgtggtggcttacrcctgtaatcccagcactttgggaggctgaggtgggtgtatcatgaggtcaagagatggaaagcatcctggccaacatggtgagacgccgtctctacaaaa

SEQ ID NO: 23974 - DNA, 201 bp, Homo sapiens
acagcgagaccttgtctctacaaaaaatttaaaaatgtgctgggcgtggtggtgtgtacctgtaatctcagctacttggaaggctgaggcaggtgggttgyttgaggccaggagttcaaggctgcagtgagctatgatagcaccactgtgctccagcctgggtgacagagcgagaccttgtctcttaaaaaaaaaaaaaaa

SEQ ID NO: 23975 - DNA, 201 bp, Homo sapiens
tgtcttgcagagatacatttcagccaggaactgaaatgtgggtaagatttccgcaagggaaggggtagggatggctttccaggaggtatagacaagcagawaacaagtttgagcaacaggaagatcctgtggacttcatggcttgtatcttgtcatatatgaaggtacatcccctgtgtgtatggctcagtccatgctcat

SEQ ID NO: 23976 - DNA, 201 bp, Homo sapiens
tgatagtaatgttgaacattttttcataagcttattggccatgtgtatgtattcttttgaaaagcgtctgttcttgttctttgtccactttgttttgagayggagtctcgctcttttgtccaagctggagtgaagtggcacaatctcagctcactgcaacctccatcccctgggtttaagcgattctctggcctcagcctc

SEQ ID NO: 23977 - DNA, 201 bp, Homo sapiens
atagttcagtgcatagagcaggtttaaacaggcagaaatgttgtcaaaaatggaaatttctatttgtttggaaggagataatcatcgctctttgtgtaggstatctgcaaaaggaaagcaaatagtctgtcaaaatgagcaaaattaaagagaaaaaaatcaagaaatgtatatagcacttaaaatagtacattatctaaa

SEQ ID NO: 23978 - DNA, 201 bp, Homo sapiens
ctgcttccaggacacttaatgaacacggaaactgaaaagtaaagaacttggcctgtagggtctgtgagacgggaccacccctgggagccgtgttgtgtagmggccatccagccaaggactgcaaacgtggagatctgttgtggcagtggattggattaatctctattaatcagtctattaatctgttgatctctagctgaa

SEQ ID NO: 23979 - DNA, 201 bp, Homo sapiens
catgtggattctttaacttagcattcatctgttcatttaacttagcattcatgctgttgtatatatcaatagttccttcctttattttgcttcatagtatyccattataagatatactactttttttaattcattcaacagtagatgaatatttgggcttttcagtttggggctatgatgaatcatgctgttatgaacttg

SEQ ID NO: 23980 - DNA, 201 bp, Homo sapiens
cggtggcacgatctcaggtcactgcaacctccacctcctgggttcaagcgattcagcttcccaagtagctggaactacaggcatgcaccaccacacccagmtaatttgtatatttttagtagagacagggtttcaccatgttggccaggatggtcttgatctcttgacctcgtgatccacctgccttgacctcccaaagtg

SEQ ID NO: 23981 - DNA, 201 bp, Homo sapiens
gcatgggaagagtttttgtgctgacagcagggcattctctttgttctgtggtccatttgtagatggctgcgctcctctgcacaggggctgtcgcttctgcrtggattggtgtctaaaaaccccacctaaatgagaattagatattccctttcttctttacccagaattttctttttataaataaaaataggctgggcacag

SEQ ID NO: 23982 - DNA, 201 bp, Homo sapiens
tgccttccaactctggttctgccctcctcctgacttatcctttctccctttctttgacagagatagggaatattttccagcaagcttcagaaaacattctrtgtggtatgtgcagagagatcctctatgcatagaatcttgcacaggatttaagaggtcagtgcatggggcattttctatcccctgctcccactttattga

SEQ ID NO: 23983 - DNA, 201 bp, Homo sapiens
gcacttactagatgcccttgtcatcaaggcccaggtcaccagctgcacacaatttatctgtatgtctttaaagcaggggggtccaatcttttggtatcccygggccacactggaagaagtggtgttatcttggaccacacataaaatacactaacaatatctgatgaggtaaaacaaaaattgcaaaaaaaaatctgatat

SEQ ID NO: 23984 - DNA, 201 bp, Homo sapiens
attttccagcaagcttcagaaaacattctatgtggtatgtgcagagagatcctctatgcatagaatcttgcacaggatttaagaggtcagtgcatggggcrttttctatcccctgctcccactttattgaatatcatactgaactcagtagtttaggatgcattcctaagtttagggaaagctgtgaggatcttttgattc

SEQ ID NO: 23985 - DNA, 201 bp, Homo sapiens
cactttgttgcccaagctggtcttgaactcctgggttcaagcaatcctctggcctcggcctcccacagtgctgggattacaggtgtgagccactgtgcccrgcctcactgtgcatgttttgacctcctcacctttgtcctaagatttctcctgattgaaaataaatgaccatttcttcatgaagcgttctttgtctttagt

SEQ ID NO: 23986 - DNA, 201 bp, Homo sapiens
atgagtgccaccatgcctggttaatttttaaattatgtgtagagatggggtctccgtatgttggcttttcttccattttaatgaggtattttaatgaggtagtgatgtgctgtggagcttattaaaaatgggattctgaggccatgtgaggtggctcacacctataaccccagcactttggggggaccccaagacgagaag

SEQ ID NO: 23987 - DNA, 201 bp, Homo sapiens
ctcaggatgtagctgcattgttaaacaatgcaagactgtagttctaaggttgatggaatttttttttaagtctctgctagctacagggaaatttttccaawgtaaaagaaagatcttgtgaaaaatcacataagaagcacattgggtctctggggtaaaattaaagggttcaaccagaagacatccttcttcctcttcaag

SEQ ID NO: 23988 - DNA, 201 bp, Homo sapiens
ctgaaggctgggaagtccaaactaggtgccagtgtctggtgtgggcctggattctgctgctaggttggtgcctagcagctgagcactcacgtggtgggggrgccgagggcccttttctaaggctaatctccttctaaaggcacctcctctctactgttgcgttggggattaagtttcagcatgaattgtggaggggacaca

SEQ ID NO: 23989 - DNA, 201 bp, Homo sapiens
ttggaggggagaaggaaagaggggcatggtttgagggttatactgaaataatctgcttgctgtatgatatcgagcaggtctaactaaaaaggtaggtggtkgtttctcttgcatgcatacaaacatgtttctggccccagttgtcaaacgagttttgtgttttccttgtctagtcttgttgacctgctatttattttagtc

SEQ ID NO: 23990 - DNA, 201 bp, Homo sapiens
tttattcatttcctcctaagtgagcttattttagagtgtaaagaagcaaatatttaaatttgctgccaagcagagcagcaaatggctaattaattcagaargatgacttcccaacatttaagtgttttgtgggtactggtttggccacagttcatcaatttgtgggagcacagggcccagatatggtacaggtagagcagt

SEQ ID NO: 23991 - DNA, 201 bp, Homo sapiens
aattccattgcttgtgtgtccatccaaaataaagacaagtttttgcaggaatgtcagatgactgtgggacaggcctagacaggaacaaaactggaggcttygcatcaaaacaaacacccacctaaccacatgggttttgccctgtgagttgtttgtcatcctagattttcagcaagaatgggctttagtaccatatttcac

SEQ ID NO: 23992 - DNA, 201 bp, Homo sapiens
cttatgttctgatgctatttttcttggtgccgtttctccttcttgggcttttgagtgagccaggcttagggtaactctgaaatccttttctgcagtccacrtgaagagtaccatctttcatttattgtgtggctcaattccaacactcaaggcaactacagagatttatgaagaatttaaacaggtgctctttttccacca

SEQ ID NO: 23993 - DNA, 201 bp, Homo sapiens
tagtttcaatattgaatcaaagctaagtggcctccctctccctctcaaaggttaataagtttttcaaaccagagtgcgtgaataatttaaaagatagcatrtggaataatttcctttgcaagaaaatcagactaatatttttaggtaattcagtttactaagcacctagtttgtaccaggcattgggcttagtgctactat

SEQ ID NO: 23994 - DNA, 201 bp, Homo sapiens
taaccaaacataacatctttcttcacaactcgggcctgtccttatcatctccgtgtatacaacatacagccattctgcattctggtcccagcgttggcccwgagaagatccatcccaaccgtggccttggcggtgcaccgtgctcctgtgcagtgggcgagtgtgtcccaggcagcctaccctgtgcagggcctggccctc

SEQ ID NO: 23995 - DNA, 201 bp, Homo sapiens
ctaatagccacttctactaaacagaaattggttaaggaagggcagtgagagacagcacgggggagttgtaatgagatgggggaaggaaaggccaatttggrtaaaatatatgagttatcctttgagccaggttatgtcctctgggtgtttgtatatatagaaaccggtcaactatggtatttggttttgggtaaagcagag

SEQ ID NO: 23996 - DNA, 201 bp, Homo sapiens
ataattaaacataagtgaatattgaggtgtattttagcatttgctgtactctgctaagtagagtttgtgacgtgttgataatgggagaatgggtgctactrtagtaaagaaaaacagagagctggtgctgggtgcggtacctgtgcctgaagtcccagtgctttgggaggctgaggcaggcgcgtcgcttgaggccaggag

SEQ ID NO: 23997 - DNA, 201 bp, Homo sapiens
tttaacaaaaatctttgaaaaataacctaaataggccgggcgcggtggctcacgcctgtaatcccagcactttgggaggccgaggtgggtagatcacgagrtcaggagttcaagaccagcctggccaagatggtgaaaccccagctctactaaaaatacaaaaaattagccgggcgcagtggcaggtgcctgtagtcccag

SEQ ID NO: 23998 - DNA, 201 bp, Homo sapiens
atacatactgtcgccaaatgattttcttattgataaatggagcaatatactttgttttattactcaattgtctctccccctcttccattttcaaggcaaawaaattagggcatgtcttcctttctggcacagaattgttttatttcatcatagccaatcttattgtaaattcataaaaccatctagagacttgatagtaaa

SEQ ID NO: 23999 - DNA, 201 bp, Homo sapiens
aagtcacatttgatttgttgcaattttaaggattctttgagtggacgttggtgtgggctggccggcagggcatcagggggacgttgtgagtcctgcccctmctttagcactaattttaaattagatttgaagagtggttggtgaacagccttccactgcccatttgcagtgaaagagaagagccttgagaaggacgtcctg

SEQ ID NO: 24000 - DNA, 201 bp, Homo sapiens
ccaagggaatgtaaaggccaaattgtttcctcagttcagggcctacttggagctaggcaaaaaaaaaaaaaaaaaaaaaattaacatttgaggatgggccrggcacggtggctcaggcctgtaatcccagagctttgggaggctgagactggaggattgctggaggcccaggagtttgagaccagccttggcaacatagcg

SEQ ID NO: 24001 - DNA, 201 bp, Homo sapiens
cagcattcctctactgtgtgtcagaagtgaaaaggcgttttgttaaattgttttaccgactgtgtctgtgtttgacaacagcccacgctgaagtttctccyaagcacccggggatatatttcctttgtagtagagtcctctttggtggggagcgcattcgtttgggtgcagtatttcccatttgttcccgacagtggcctg

SEQ ID NO: 24002 - DNA, 201 bp, Homo sapiens
agctgggattacaggcgcccaccaccatgctcagctaatttttgtatttttagaagacgaggtttcaccatgttggccaggctagtctcgaactcctgatytcaagtgatccgtctgcctcggcctcccaaagttctgggatgacaggcgtgaaacatcactcccggcctccattttctaactagaactttgctcccttcc

SEQ ID NO: 24003 - DNA, 201 bp, Homo sapiens
tcttatttatttggacatttcagcagcctcttttaaaagaataatcagtccccagtccagaaacccctggaaccacttggtacttcttaaacctgccttcmcttcacataggctgaccgctcaacctgacttcaattcctcactccaaacccagcccaaatttagggaacctatggaaatgcatctggcctggtctgtacc

SEQ ID NO: 24004 - DNA, 201 bp, Homo sapiens
tgcccaaaggttcatcttctgccctgacccatcacccttcttcagaggtacccagtacctccaattcccaagtctttctggggttctgctgaaccaacacktagccgtttatcccttcatgtaagcttagggttctacattttccaatatgctaactaagccccatccattagccttacagctcctaaaatgttatctttc

SEQ ID NO: 24005 - DNA, 201 bp, Homo sapiens
cacacacacacacacacacacacacacacatttttagagggcttgtggtttctgaagatgacgaaagaaaaaaaaactgtgaaaagcaaaaatgcccaaargttcatcttctgccctgacccatcacccttcttcagaggtacccagtacctccaattcccaagtctttctggggttctgctgaaccaacacgtagccgtt

SEQ ID NO: 24006 - DNA, 201 bp, Homo sapiens
tataaatatatatgctacacacacacacacacacacacacacacacacacacacatttttagagggcttgtggtttctgaagatgacgaaagaaaaaaaarctgtgaaaagcaaaaatgcccaaaggttcatcttctgccctgacccatcacccttcttcagaggtacccagtacctccaattcccaagtctttctggggt

SEQ ID NO: 24007 - DNA, 201 bp, Homo sapiens
ataaatgtattcttatcatatcaaatgacctgaaatttgccatttttgattaattcctggagattacaagaatgatgagggcagttgcattcagaagttgyatacagttgccctttgcagaagtacatggtgcacatgcttcagtgtatttaatgatgttaacagttcattgattaaagttcaccttggaaataaacaaac

SEQ ID NO: 24008 - DNA, 201 bp, Homo sapiens
tgcctctttccttctaggatcaacccagtgtctgtctgtggtccttccctgggcccctctgtctagggtcagtgtctacaatctgtgcttcccacacactmtatgcttacctctatcctgatgtttgtcacagtggtatataattaactgtttacatgccagtcttccccagggtagtctctgtcttgtgcatctctgtgt

SEQ ID NO: 24009 - DNA, 201 bp, Homo sapiens
acaaaaagatttctatgccatattccgccttaatttaaccaaacataacatctttcttcacaactcgggcctgtccttatcatctccgtgtatacaacatrcagccattctgcattctggtcccagcgttggcccagagaagatccatcccaaccgtggccttggcggtgcaccgtgctcctgtgcagtgggcgagtgtgt

SEQ ID NO: 24010 - DNA, 201 bp, Homo sapiens
tttctcactggatactggactcttgccttgaaaataaagcaagtcctctgttcattgaaagagaattatggtatgaaagctgccagttaaaatttcccaaragaccactgttctacggagttgtatttttcagtggcaaaaatatccttcctggtttttaaactcttgtgggaggaggtcatttttatatgtttatttttt

SEQ ID NO: 24011 - DNA, 201 bp, Homo sapiens
cccctcaatttatgatggggttacttccccataaatttgtcagtaaacccactctatgttgaaaatattgttatgatgaaaatgcatttatacacctaacmtacaacgctgtaacccagcctaccctacctcatgtgctcagaaggtttaccttagccttcagttgggcaaaataattaacacaaagttattttacaataa

SEQ ID NO: 24012 - DNA, 201 bp, Homo sapiens
acatgctctttaagtacaacttagagttctgtaggtgaattttaacgggggctttgcagtataccaagttcagtcattggatcccaagattgttgaccctyaaatgttgccagagctggagtgtcttctaggtctcctttttctcgtttttcttctgaaattgctagacaatgattaagattaatttttagtctttcttac

SEQ ID NO: 24013 - DNA, 201 bp, Homo sapiens
agttgagaccagcctgggcaacacagtgagaccctgtctctacaaagaataaacataaattagccaggcgggatggcatgcacctgtagtctcagctactygggaggctgaggtgggagaatcgcttgagcccaagagttcaaggatgcagtcagttatggttgtgcccctgcactgcagcctgggtgacagagcaagacc

SEQ ID NO: 24014 - DNA, 201 bp, Homo sapiens
gttgagaccagcctgggcaacacagtgagaccctgtctctacaaagaataaacataaattagccaggcgggatggcatgcacctgtagtctcagctactcsggaggctgaggtgggagaatcgcttgagcccaagagttcaaggatgcagtcagttatggttgtgcccctgcactgcagcctgggtgacagagcaagacct

SEQ ID NO: 24015 - DNA, 201 bp, Homo sapiens
ttggctgtcttaccccacagaactgtgtgttctaggtcgggggcaatattttatatcttttacactctgtgtatagtgctgagcatgttacagttggaaaytgttaattaatttttgttctattttcctgcactcaacttttcctcccagaggccccacctgaatttaagaacaaataagttattataaagtcttgtagga

SEQ ID NO: 24016 - DNA, 201 bp, Homo sapiens
attattgagtcacttttttcttttatcacataatcgctttactttcaacatatcagaaaaacctttttattttaaagcagtgagaaagacctgcaacctgyatgtctttcgagttaggctttatttccatagctgtcatctttgtcttaaaatggaaacttcatttttgcatgctttaagcccaaccttctagtatctaca

SEQ ID NO: 24017 - DNA, 201 bp, Homo sapiens
tcaatgtccatgtcaacaaatttcttactgataccatgtccaaatgtttatatctgttgacaagtgctttggggcagtgctggtgtttggccctaacacckgagtttgagggagatgttactttgaaaactctactcccaggttatctgttaagttcttaaccatctgaccttgctctttagatttggaatgttgaagttt

SEQ ID NO: 24018 - DNA, 201 bp, Homo sapiens
cagggactcctggatgatgttgtaattgggattcatgtgcagtcagaataggccccacaaatgaagaggatgccaacgtgtgtgtgtgtgtgtgtgtgtgwgtgtttgttttacaaacttactctctgtgttctagataaatgattcctttcatagaggtccagatagatgagggtgcagaggaactctgttacttgcaaa

SEQ ID NO: 24019 - DNA, 201 bp, Homo sapiens
attcattgaagtttttctaaaaaaaaaattaagatttaaagttttaacttggcattcctttaaactttctccttttggtgtccatgctttcagtggcagtrctttctgggctcatgtaggtagttgctggccccccatgggctgtactcagggagctgagcggttcttgttgatgagaccctattctgcccactcatattc

SEQ ID NO: 24020 - DNA, 201 bp, Homo sapiens
gctgattctgttggcagaatcttttctcttccctttcgaaaaatcatagtttaaaactgcttgaacctgagggtggtggcctaagtgttggtatttgccarttgagaatttaagaatgagtgccttgtattgtcattaagaattccataatattgtttatagaagtagggtgttgacctagagatctctgccaaaacctaa

SEQ ID NO: 24021 - DNA, 201 bp, Homo sapiens
taacgttcagggcacagcactgaggaagttttctgttagtgcctatacagttctcacttccaggatttacccaaatttgttcaaatggtactattatattrccctggccccttggagtaggtttgattttctaaggtgtagaatactctagatctctttgagtgtaaaaaggtactttgttttgtttgtcctttctctgtg

SEQ ID NO: 24022 - DNA, 201 bp, Homo sapiens
aaacactattttcccttttatatctaagcccatatgaattcaattttgtggaaaatttaagccacatgtttctgattcgtttacacttaacccttgagaakgttgtgttgcaacagcaattgcctgtccaaaaaaatctctttttagtaaatctttcacaagggtagagagattgggaaaaagagaaatgggaagaagtca

SEQ ID NO: 24023 - DNA, 201 bp, Homo sapiens
gtgatgttgtgtaaaagactgcatcttctcggaacagcaatttggcatgattatcaagatctacaaaaatgttcatgcccttgcagtcctctgtaatactwgttatccctagggaactgaaattatgggtaaggatattcagtcccacattatttaatttccgaaaccattagaatagcttcagaagttcaacaagaggaa

SEQ ID NO: 24024 - DNA, 201 bp, Homo sapiens
ctgttaggaaaaagtgtcattttaacttgctgtattcctctgaagctccagaatacaagatctgagctcactctgttgaaaaactcctttgtttctacctraaagcacaggatgttcatttctatcagatcagttcttttctgtataccagcctgaacatgtgtgtgtctttgtctaagcacctcttgcttcataagatac

SEQ ID NO: 24025 - DNA, 201 bp, Homo sapiens
ggctctctggacagatccagtggcttcagagaaatccgcgcccgttttagtttgatcagacctgcatctccaggagagatttttgaccaatcctttttcawattggatccctttatgttcatagcctgatacagatccatactcctgtgattatttttcttgtttgataagaccgttaacaagatactggccagttacagg

SEQ ID NO: 24026 - DNA, 201 bp, Homo sapiens
taacagctttgtttactgtagttataatggaattcagtgtatagttcttgctaaaagtaactacattcagtcacagcttgaaagaaaaagtaccagacaayagaataaaaccatacaggagctgataatttacacatccaaatattgggaaaatctaagttgaggttccacagcaactgcagctcagcctcagggcagtga

SEQ ID NO: 24027 - DNA, 201 bp, Homo sapiens
aactcagattagcagtggtatttagtgctttagttatatcttccagcagataactgaatggatctcactttatttttatcataattggtgagagctgggamtcttatgtctccaggagatggctgtacaggaactgtgtgtgattcgcaatgtggaagagcagggtcttgctcccttgggaaccctgcaagtagttgagcc

SEQ ID NO: 24028 - DNA, 201 bp, Homo sapiens
gcctcctttcctgacacctacctcttttattttttgcaaagtggtttcttcttaggatggaacatggttgacccaataaggaattctggtattagctgccmagaaggaacactgttctctctaccagcacactgacgtgccaaaatgtttagaacttcatttgctttgattactttctctaataaaactgttgcagcagcc

SEQ ID NO: 24029 - DNA, 201 bp, Homo sapiens
attaaagccattgtttttctagtgttagagtttgtatgttataatttagtacatgcttaattgaaggtattggtgtaaccccaaaatatatatttttcacrtaactcagattagcagtggtatttagtgctttagttatatcttccagcagataactgaatggatctcactttatttttatcataattggtgagagctggg

SEQ ID NO: 24030 - DNA, 201 bp, Homo sapiens
tagtagagagggggtttctccatattggtcagtctggtattgaactcctgacctcaggtgatctgcctgcctcagccttccaaagtgctgggattacaggsgtgaaccactgtgcccagccaataattcctttgattcctatgatagaacactttgttcagttgcagatagaaacaaacaatagggaatcctagggagata

SEQ ID NO: 24031 - DNA, 201 bp, Homo sapiens
gcatggcagagtgagaacctgtcttaaacaaaaacaaaataaggccgggcatggtggctcatgcctgtaatcccagacctttgggaggccaaggtgggcaratcacctgaggtcaggagtgcgagaccagcgtggccaacatggtgaaaccctatgtatactaaaaatacaaacattagccaggtgtggtgatgggtacct

SEQ ID NO: 24032 - DNA, 201 bp, Homo sapiens
tgctggctcatgcctgtaatcccagcactttgggaggctgaggtgggaggattgcttgaagccaggagtttgagaccagcctgggcaacataatgagatgyctactgttaaaaattagaaatgaaaaaatttggtagatgtagatgtatatgtattcagaagtgtaagtatattcattggactagaccttttattaactta

SEQ ID NO: 24033 - DNA, 201 bp, Homo sapiens
aactttgaggattaaggtctgagttacttgctgtgctggttaaaaagtgacaaggattggtcattctgcatttttaaaataagtgttccgtttcagtgatwcttaggcatgctttgttagagatggacttggagagcttcttaataatatggattctccccgcacccctgctccagggtcttagtcagtagatctggaaca

SEQ ID NO: 24034 - DNA, 201 bp, Homo sapiens
cctctttcttattcacccccaggacattatttccaattttccttgaagaggaaataccatttaccatcagtaaatggttttgggacttcattctttggggwctcaacacatctggagatgccaaattctggagctgtctcagtggcaggtgtcccagggactcctggatgatgttgtaattgggattcatgtgcagtcaga

SEQ ID NO: 24035 - DNA, 201 bp, Homo sapiens
tgcacttgtctttttttccaagtgagttattttgtattttttgatactctgaaatgatcagtaagtgtgtgtgtctgtgcgtgagcccatgtgcgtgccaygcatgcgcatccctgtgcatgcgtgtaggaggctgggatggaagggatggccataactgactgttggaatttccaggaaaggcttggaatttatttttgg

SEQ ID NO: 24036 - DNA, 201 bp, Homo sapiens
ggaggtgacagccataattttggctccctgggaagggtctcaggcagtgtcctgatttttttttttttttttaaacgaggcagggtctgactgtgtctccytagctagggtgcagtggtgcaatcacagctcactgtagcctcgacctcctgggctccagtggtcctcccacttctgccactcgaagtgctaggactacag

SEQ ID NO: 24037 - DNA, 201 bp, Homo sapiens
gtttctactgtgagtctctggaataacatgattgaaaatataaaatttttctccagtgttggacttcctgtcctaatatagatggcttggtaaattcccartgtgtgcacctatgaattatgttgaaaaaagttcacaataaaatcaccattgtcaaatttatgtaatagaaaagatcaacctaacaaattatatgtatac

SEQ ID NO: 24038 - DNA, 201 bp, Homo sapiens
gggtgtgtggcttgtctatttgactgctgtgtgtgcccaaaccccttaggggagggggagcatgcagatgtacaggtacgggagccggggttccagccccrcggtagtgtctgggtgtgggtgcctgcagctcctgaagctccagtgggcatgttgcagtgctcttttagctctcccatctgcagatggcttaagtgttaa

SEQ ID NO: 24039 - DNA, 201 bp, Homo sapiens
gcatggtctgtagtaagcactatttgtttgctgttgcaactgttacttaggaaatgggcttttactctcaggaaaacacatatgctttcagcatcgccacmtaggtgcagaaacaagcaaggaatgaaattgaaatcaataaagacaggtttgattctttatacttaacatagatataggagtgtgggaatgcaattctgc

SEQ ID NO: 24040 - DNA, 201 bp, Homo sapiens
tgtgtaaagtctctgcttcactttcctcatctataatatggggataataatggtacttgcctcattaggtttgggaaggattaactgtgttaatgacatakaaagcacttcacactgagcatggtctgtagtaagcactatttgtttgctgttgcaactgttacttaggaaatgggcttttactctcaggaaaacacatat

SEQ ID NO: 24041 - DNA, 201 bp, Homo sapiens
tgaggtctcattgtgttgcccaggctgctctcaaactcctggcctcaagtgatcctcccgccctagcctcccaaagcactgggattatgggcgtgagccaycacaccaatcccagcccctagtttgtttttttaagttgccagttgtacaatttcctctctgctctccaaacttgttattttagaatagagagaaaaagag

SEQ ID NO: 24042 - DNA, 201 bp, Homo sapiens
taaaatgtagcttggtctatggttttaattatctgttttacaaaatgagctttttgcatcttggaatccttctcttctcttatgtattctgaccttgaagrgtcactgtatttggaagggatgggaccatgatctcattctttggaatggtttgtaatcattttagttttaaggaaccacaaactcaccttcaagctgtgt

SEQ ID NO: 24043 - DNA, 201 bp, Homo sapiens
gattacatcacaggcgctgaataattcttcatagaatcctaaataatttgatgttgagctttgttcagtagagcatagtttatattataaggaactggacyttgtctaaaactgtaacagctgttaatttccctctacaagggaatatttttaattttaaaatatcttatttttgctatatattattatattattatatct

SEQ ID NO: 24044 - DNA, 201 bp, Homo sapiens
aaaaccaaaacccagatcattactgaaccaaaagcaaaccctcttcatttagttagaacgtgaaattaagttccagttgggtacaaagccaatgtgttggyggaggctgagtgttggtattggactaaaactgtcttatagctgtctgtgtggatgttttatacagaaagtatctctctgttcctctcagcatccctgtgt

SEQ ID NO: 24045 - DNA, 201 bp, Homo sapiens
gattgggccagaaggtgctttctataggtaattttccatcgggggagatggcatgctaagcccacacagcatgctttcatcctgcttggccactcgctcarcattcctggctgggaccaaggtcaatggcagtagagctggacatcagtaaatgtatacagttttacctgttttgggtaccttttctgtacaaaagcaaat

SEQ ID NO: 24046 - DNA, 201 bp, Homo sapiens
atctccaggaggctggctctccatcccaagctgctagaggatctttctccctgcctgctgcctctcctggggacgtcctgggtgtagctcctgtaccgacwcagatgcttgggctgtgctgtgtggttttcaagtgtatccgtgcgcccttcctccctccgggtgaaatgcttgaagcggtggctgagcttcagtcttggt

SEQ ID NO: 24047 - DNA, 201 bp, Homo sapiens
ggtttttatgaaaaatcttgtggttggtatggaatttttctgtgaataaatgtatgactgcatgttattcatttacaagcgtattgaaacttttaagaaamtagttgtactgttgcagagattgaaagaaaatagaggcaagcataaaaatagtgaaatgaaagcagctttatttatttatttatttttttaacattttct

SEQ ID NO: 24048 - DNA, 201 bp, Homo sapiens
ttaggtttacaagccatttaaccttgggtataggggagctttgtattgggtttggtgacttaggtttacaggccatttaaccttgggtacaccaaccctayggagccccattatctcaagtggaatattccctggcagggttaatgtaagtattaaacaggatgatgagagggaaactctaaagtcctgggcccggcccat

SEQ ID NO: 24049 - DNA, 201 bp, Homo sapiens
atagctgttcatcctcatccacccatctgcattaggagcctcgctgaggacagtgcggtgctagacattgggaaccgcgttacatggaccgttctcatgakggcgcaggatgggaggatggaccgtgtctgcatctgttcttctgcgcttgcgacctgacacgcgtgattccaggtggacatggtgctgagctgcagcgct

SEQ ID NO: 24050 - DNA, 201 bp, Homo sapiens
gatggttgggaatagctgttcatcctcatccacccatctgcattaggagcctcgctgaggacagtgcggtgctagacattgggaaccgcgttacatggacygttctcatgagggcgcaggatgggaggatggaccgtgtctgcatctgttcttctgcgcttgcgacctgacacgcgtgattccaggtggacatggtgctga

SEQ ID NO: 24051 - DNA, 201 bp, Homo sapiens
ctttcactatgatatctttaatctcacttgcaattttaaattccagctagaatggcagcaagactttttgctgatagattaaggggaataaggggtatgtktgtctttttgtctgtctccctatctccctcctcccccatctctgtctgttagagcagctgtctaagaactgagaaggatctaagattttatcctacttgc

SEQ ID NO: 24052 - DNA, 201 bp, Homo sapiens
gtagtgtgacttctggaagtaatatagttcaggaaccaaaagttgattctttgtagttaatgaacaagttctttttttttttttttttttttttgcctaarattatattaataacactagtgtatgtcaaaaggaaaaaatatctcatgtatatattttttcctgtaagaatagagtatataaagctattttaataaattt

SEQ ID NO: 24053 - DNA, 201 bp, Homo sapiens
tccccacttttatatctagtccgttcttgaaaatgtgtaacaaatgactatgcatatatatatatatagacatacatacacacatacacatatatataaarttatatatatacacacacataaacatatatattcacagaagttgtgttctcagaataatagtaaaataaacaatgatgcttcatgcaggcactggtgata

SEQ ID NO: 24054 - DNA, 201 bp, Homo sapiens
tgtaatttgcaatttgtagtattgtattatgaaacaataatgcattaaaatgaacagcacaagaattaggaatatagtcataaagaaaggatccacagaartagttgtgtgaaagacactctccaaatcattttaagtggacatgaccgatttcaatgccaaattaagcatttagaaaaatcagaattctgtgcttttact

SEQ ID NO: 24055 - DNA, 201 bp, Homo sapiens
atgtaaaagttaattaatttcttattaaatcctcccagtatagaaggaatatttataaatctccttaggaaacagatgatctgaaactttccattattcartgttctaatcatctttcaaagccttgtgttttcaataccagaccgttgaactatctgtgtccttcagtgggatactccccattcttggtgtgtcattttg

SEQ ID NO: 24056 - DNA, 201 bp, Homo sapiens
acagggttttctacccttaacttaattatgcctgaattatttcctcaatagagtctctgaactcctttgctaaaaaaagatatataggttatttctacccrctgagatttgtgtatatactgtccccagtgaagtgagttttgctaatacgtcatgagtatacacactagtttagacaagatagtttccacctgcagccag

SEQ ID NO: 24057 - DNA, 201 bp, Homo sapiens
gccactcatcagtttctgtgaaccagaaattaaggataacaatgataataaaatagctcatatttatttagtgtttttatgtgccaacacacagggctgartaattcatttcatcttcacaataaatctgtgaggatggttacattttaccaaagaggaaattgaggtttaaagaggttaaatgagttgcccttcacagcc

SEQ ID NO: 24058 - DNA, 201 bp, Homo sapiens
ctttcctccggctctcttccttctaggtggctctgtgctgcgcattccctgcctcttcctgttcccaccctcattttcccctttccttactgcatgccacsttgtacctctatcttgctccaccattgctgcctctgatttttccctatcaaaacaattatgaggtcttttccgcagactgtgttagcagtttttgcatcc

SEQ ID NO: 24059 - DNA, 201 bp, Homo sapiens
ttttttttgagacagggtcttgctctgttgcccaggctggagtacagtggtgcagtcagctcactacagcctcaaaatgctgggctcaagtgattctcccmcctctcagcctcccgagtagcagggactacagatgcgtgccaccatgcctggctaatttttgaatttatgtagagatagggtcatactatgttgcccagg

SEQ ID NO: 24060 - DNA, 201 bp, Homo sapiens
atgtagagatagggtcatactatgttgcccaggctggtcacaaattcctgggcttaagtgaggctcttcctttggcctctcaaagtgctgagattataggyatgaactaccatgcctgctctgaaatacgttttactaccagtgaactggaattgggcatctccctccggacctgccgtgattttaatcttgccaaagcca

SEQ ID NO: 24061 - DNA, 201 bp, Homo sapiens
aggtcatctggctgcactgtaggtgatggagccaggtaagaggccctgtagtctaggcaggaggtgtgggtagctctgaccagcagtggaaagagggcaargtggccagatttgagagatgctatttagggaggtggattggaagggctctcgtgggggtcatggggagggggccgtctaggtagctgtcctcagggttta

SEQ ID NO: 24062 - DNA, 201 bp, Homo sapiens
ggctccgtgcctcttctcctctgccacctccacccttgtgccctcctccacgctcccttctggatgcctcatgcacctgtatttcacgtgcaggacagggytccatggtctgtcagccaccacctactgagctgttcccacgaggcgcatgcctcccagccagtgggtcatcagcccatttcacgaatgggggcaggctca

SEQ ID NO: 24063 - DNA, 201 bp, Homo sapiens
gctcagcatcacctgtctcacatctgtctgggatcctcaaacctgacctttgtaaatttccactaactgaagattgtagaggaaaaaaaaaaacatcttaycgaattcctgctcttatagctgattttagctattaggaaaacatcccaagttgagcttttctattcctagaatttcagatttctttcctttttaaaaatt

SEQ ID NO: 24064 - DNA, 201 bp, Homo sapiens
cggcagctcagggtgcgggcaggtgccgggagggagaacctggttaattttaattggcttacatttttggcctctgtgatttccttgttggcctccttggrtgtgtgtttaattcaagtaagagttcattatcggagttcttttaattataaaataaagtgtgttcgtggtaaggaggtcacatcatagaaagctgtaggg

SEQ ID NO: 24065 - DNA, 201 bp, Homo sapiens
ctcaaaaccatgcctggtttatgtaatgtggctttctttctcctgagctgggggttgcactagctgttacctgggacacaaatagtatggatggaatgctwtaaatcggaagtatgggtttttggacatcttgcttagatttgagctttcacccttaaactttgtatttttctttggacggaagtattggataaaggtacc

SEQ ID NO: 24066 - DNA, 201 bp, Homo sapiens
gatttacatatcatggctctccagcatcctgtgtaatatatactcgtgtgtttatttccatcttacaatctctattgttattatggctctggcagccatgktttttttttatttaaaaggtcattgcttgtaaccaatttcatcacagggttatttgtaatttgcactgttagaacagagcttcgccttgttctctggtga

SEQ ID NO: 24067 - DNA, 201 bp, Homo sapiens
aatgctcttcccctctttcttacacatttttcctgaccttcaatgtgtaacacaagcatttcttttctgtagtgaatacagtttcataatatctcttgcaytgggatccttggctctgtaaactacttacctgcttatgtgtgtacatcttatcttcccatctagattgcaagtgtcttcagtaaaaagtaagggaaaaac

SEQ ID NO: 24068 - DNA, 201 bp, Homo sapiens
gccattttattgtaggacaatttttaaaattgaaattaaaattaaatttgtttaactcttcattttcttggctctaatacgtcaaagaagggagcccaaaygcatagaaaacctagtaattttagtggcatgataatagcctcctttttttatactgacaccttatggtaaaaatcatgtcaaattagaatgatcactttt

SEQ ID NO: 24069 - DNA, 201 bp, Homo sapiens
ccattattttcgttggaaatgcgtaagaaaaccattcctcaaagtggaaacaataaacacattatctacttccaccatcagctaattgaggctgtctctcrataaacaagtggattttctgctaacaagcacatctgtctacaactttaatctcctgtgcttttctgccctgtccccgttttatttatactcattccaatt

SEQ ID NO: 24070 - DNA, 201 bp, Homo sapiens
acatcctaaccaagtcatttatcttcttggaacctcaattccatcactggtaaggcagttatgataatactctgggtccttgttaaagttatgaaagcatkctattaggtgaccactaagcaaattatgggaagttaaaattattgtatccattatcaccaaattgttttttctttctaccacagagctttctttctttct

SEQ ID NO: 24071 - DNA, 201 bp, Homo sapiens
acagcagaaatgttccactggagggctatccttccagagccccttgctagttatagatacctccacttagggcctctgtgacctgcaataaatttaaaaakacagtctctaaattttatatgtgtgtgtgtgtgtgtgtgtgtgtgtgtgcgtgcgcacgcacatgcgtgctataaatgaattccctatatgctatttctg

SEQ ID NO: 24072 - DNA, 201 bp, Homo sapiens; identical to SEQ ID NO: 2910

SEQ ID NO: 24073 - DNA, 201 bp, Homo sapiens
ttctagtctgtacttattttttcatcttctaattagagcttttcacagaggaaaagttttttattttgatgatgttcaatgtatatacttttaaagttttwtggataatggttttggtattagtcctaaaaacccttctccacgcactagttcctaaagaatcccttacattttttcttaagttttatacttttacattta

SEQ ID NO: 24074 - DNA, 201 bp, Homo sapiens
gccccggtgtctattgttccctctttgtgtccatgtgtactcaatgtttagctcccacttataattgagaacgtacagtatttgattttctgttcccacaytcatttccttaggataatggcagctccatctgtgttgctgtaaaggacaggatctcattcctttttatggctgcctagtattgcatggtgtatatgtgcc

SEQ ID NO: 24075 - DNA, 201 bp, Homo sapiens
gagggcagttgtttccttagattcccattgatttagattttccacaaatttgcacaaaactttataaattagtagaaaagccaatttcagtagtctagctytttccaagttgtaggaattaatggtatgtgaatttttgaggtttttatgttcacacatgtatgtttctactacagtatgagtcaaatgaaatggtttaat

SEQ ID NO: 24076 - DNA, 201 bp, Homo sapiens
tctctgaggatgagtcctgtttccaactgtgcaccttttccctctatccttaccctgtccttggaagaatcttgatgttaaaatttgggactgtgtctttrttggaggcatcagatgcactgtcggtagcgatttctgaaagtccagagagtcatttgcatagaggtcaaacacaatatttcctgcaggaacttcctgaat

SEQ ID NO: 24077 - DNA, 201 bp, Homo sapiens
acaccaatagttacgtctcactaaatcgggcctgttagattaaaggactgttggtattcatgacttttttttttttttttttttaagaaatgtagtttgargctaaaccaacaaagtgccacttattggtggtactgagggagtttgcatttactgaatagataagatttgttcgtgatcttttggctgatatcacaatgg

SEQ ID NO: 24078 - DNA, 201 bp, Homo sapiens
acccatttacaccaatagttacgtctcactaaatcgggcctgttagattaaaggactgttggtattcatgacttttttttttttttttttttaagaaatgyagtttgaagctaaaccaacaaagtgccacttattggtggtactgagggagtttgcatttactgaatagataagatttgttcgtgatcttttggctgatat

SEQ ID NO: 24079 - DNA, 201 bp, Homo sapiens
ttcttgctccccgttagacttgggggttatcccccaaaggcttatatatgagaaaagcaattccctgctcttggtctagtggctcagtgatactttctttmttctctatcatgtattttttgtttccccagtctgcttatctgacatagatgttaggataattgaaatgtttttgcaatgttgatgtaatttatgagtaaa

SEQ ID NO: 24080 - DNA, 201 bp, Homo sapiens
tcaaagtgtggtccacagaacagcacctttagcatcacctagaaacttgttaggaatacatattcttggtccctgcattgaccctactagatgtaaacctytacgggtggggcccaggaatctggtttttaatgagccttccaactcattctgaaacaagttcaactttgagaatcactgttctaaagtctagacgatctc

SEQ ID NO: 24081 - DNA, 201 bp, Homo sapiens
atgcagttttcaaagaccaataaaagttggcaaagaaatttgcagatcaggacccaggacaatgcttacataacctctcaactgtttttccaggtttgaartgcaaataacagagataaagacagaaactacacatgtaaacttgatatattaatagctcatccaatctacataacaaaataaaccaggggtctaggccct

SEQ ID NO: 24082 - DNA, 201 bp, Homo sapiens
gaggctggatcctgttagctgctgctgaagatcagagcttctcaaagtgtggtccacagaacagcacctttagcatcacctagaaacttgttaggaatacrtattcttggtccctgcattgaccctactagatgtaaacctctacgggtggggcccaggaatctggtttttaatgagccttccaactcattctgaaacaag

SEQ ID NO: 24083 - DNA, 201 bp, Homo sapiens
cagtccttaccctcctccctccagtaagccccggtgtctattgttccctctttgtgtccatgtgtactcaatgtttagctcccacttataattgagaacgyacagtatttgattttctgttcccacattcatttccttaggataatggcagctccatctgtgttgctgtaaaggacaggatctcattcctttttatggctg

SEQ ID NO: 24084 - DNA, 201 bp, Homo sapiens
aagatgaaggtgatacgtaacccctggggttgtgagaattaaaggaggcacattttaaagcactttttaaactgtaaaactctgcaatataatgtgtaatrtggatattcctatgcaaatataatataatataatataatataatataatataatataatatagaagatgttactgtgttcagttttattattttacctgg

SEQ ID NO: 24085 - DNA, 201 bp, Homo sapiens
aacaaaggtttcctctctgtaagatgaaggtgatacgtaacccctggggttgtgagaattaaaggaggcacattttaaagcactttttaaactgtaaaacyctgcaatataatgtgtaatatggatattcctatgcaaatataatataatataatataatataatataatataatataatatagaagatgttactgtgttc

SEQ ID NO: 24086 - DNA, 201 bp, Homo sapiens
tttacacatgccgctcaactccttggaaacaaaggtttcctctctgtaagatgaaggtgatacgtaacccctggggttgtgagaattaaaggaggcacatwttaaagcactttttaaactgtaaaactctgcaatataatgtgtaatatggatattcctatgcaaatataatataatataatataatataatataatataa

SEQ ID NO: 24087 - DNA, 201 bp, Homo sapiens
aaggatcttgtagacccctaggagtccatagaccacactttgggagccatgggactgactggagtgaagcagaggcccctcataccaggttgcagagtccrtgctgtgttgggaagggtgtggggggagaagtgctgtggtcagatttgtttcttggaatgaccatggtggcaagagagtggagcagtggagcatcttctg

SEQ ID NO: 24088 - DNA, 201 bp, Homo sapiens
gagttcagtgttgtggtcacagctcgctgcagcctccatcttctgggctcaagggattctcctgcctcagtctgccaaagtcctgggattacaggcacgcrccatagcacctggcccacagtctggctttcttagatgatggtgttctcttgtgagattatcaatagcatatacctccctctctttcctcagtccccattt

SEQ ID NO: 24089 - DNA, 201 bp, Homo sapiens
acaagttttccaaagttctgattttcacttgaaagctcaaattttatcattggcaacaaatactgtcagtggttttcctcaaagggacaggctcattttgmtcattttcaagaaaatggctttttaaatgcctaagtctgaataacaggtttttgtcagttgtccttttttgggaaaagtggtgttctgtgaagcaggtgg

SEQ ID NO: 24090 - DNA, 201 bp, Homo sapiens
aataggttgtaggactagatgtgccattcagtttttacttgaagagcctgtgccacgtgtctgttatgtggttggagcaagagtttgtgcttgaacaagcrtcctagccttactgatttggacatgaccagtatagagatggtggaaatcttggtcatgggcgggattgctgaggaggaggagctcagaaggctgagtgct

SEQ ID NO: 24091 - DNA, 201 bp, Homo sapiens
gggtgggacctttgctgaggaaccgccctctcctacccagtatttccctgtctcccgtccacgtcactgataggatgaaacttactgctttagtgaatggyatagaccaaaagtgctgtgagatttatgattgatttaattttggtcatcaatctctattactcttggcgaaaatactctttttaaaatttgtactttaca

SEQ ID NO: 24092 - DNA, 201 bp, Homo sapiens
gatatatttgatctttttttgcccacaatacattggttttatttgagctaaaattgttctctgggaatattttattttattttattttttgttatgggacrgagtcttgctctgtcgcccaggctggagtgcagtggcatggtctccactcactgcaaggtccacctcctaggttcacgccattctcctgcctcagcctcc

SEQ ID NO: 24093 - DNA, 201 bp, Homo sapiens
caatatgttaaatgatgaaagactattccatatttttagaagatgttaacatgatgatcctgtacatgaacatgttcaattttagatgcttaaacctttgrgattcttcaaaatatgtggaattatatgtagacttatgtccgtttgagaattttacgtactctactgtgacagaatttctctttccaagctacctctcac

SEQ ID NO: 24094 - DNA, 201 bp, Homo sapiens
actcttatttccttttttatagataacacctttgctgcagattaactgtggatttgggcctataggccagctctattctcagttttttggactgtgatttsgggaagaaggaaaagggggccatgatggtgcccacttgtgactctttgtctcactgcagatagaaatgtacatcttttctgctgttctctggagggtggg

SEQ ID NO: 24095 - DNA, 201 bp, Homo sapiens
gcagttctaccctcgcccccgcccaagtgaaagccctcagttctagtaaggagacacacagaagagtgtttatttgtcatgctagttttttatgacttggrcctaattgccatggggattaatgtgaccagtttcacattggtacatcaagtggcatcctgtgcaatctgctgatgatttaaggaatacagttaaagtaag

SEQ ID NO: 24096 - DNA, 201 bp, Homo sapiens
taggattcttcctttgaaaagccttaaacatttttctaatggttggtctctcttaactaacaataaaaaacagcaacaatgcagctgggcacagtggcttwtgcctgtaatcccagcactttgggaggcccaggcaggtggatcaactgaggtcaggagtttaagaccagcctggccaacatgtgaaaccctgtctctacg

SEQ ID NO: 24097 - DNA, 201 bp, Homo sapiens
agtattctaaagtctggatgtcacttagtacttggcaggattgcaaagcaatgacatatgtgcatgcaggtagttttaattcaagccaattgtgagaaggatgttttattggtataagatcagtgtagtgttgagttggttgtggttttcaattgctgcttttgttttggttttaaattataaattagttcatttgtcttt

SEQ ID NO: 24098 - DNA, 201 bp, Homo sapiens
gtgcaggggctgaaggtttttttttccccctaaaaattaggctgatattctcccagtgtttaagaatgactgttaagaaaataacagacattcatactttyttaggtatgtggaatcattggtttattggaatcagcccaccttggctggtgagagccaattgatcaatttttagaaactttgcaagctggttgtcaaaca

SEQ ID NO: 24099 - DNA, 201 bp, Homo sapiens
catgatggtagacacaagttttccaaagttctgattttcacttgaaagctcaaattttatcattggcaacaaatactgtcagtggttttcctcaaagggayaggctcattttgctcattttcaagaaaatggctttttaaatgcctaagtctgaataacaggtttttgtcagttgtccttttttgggaaaagtggtgttct

SEQ ID NO: 24100 - DNA, 201 bp, Homo sapiens
agttatgcaaatcctccaacagatggtacactctgtcatacaataaaaaaagataacagaaatcttaattatgcaaccatcaaagtcatgatggtagacasaagttttccaaagttctgattttcacttgaaagctcaaattttatcattggcaacaaatactgtcagtggttttcctcaaagggacaggctcattttgct

SEQ ID NO: 24101 - DNA, 201 bp, Homo sapiens
tcttacagctaccttaaaaccgctcatctctcttgcacctccaatagcccttttgcccatgaatgttttacttataccatgcattggtcacttggaaaatrtgagaccactgagttatgcaaatcctccaacagatggtacactctgtcatacaataaaaaaagataacagaaatcttaattatgcaaccatcaaagtcat

SEQ ID NO: 24102 - DNA, 201 bp, Homo sapiens
gtacaggggcccctcccaatatgttaaatgatgaaagactattccatatttttagaagatgttaacatgatgatcctgtacatgaacatgttcaattttaratgcttaaacctttgggattcttcaaaatatgtggaattatatgtagacttatgtccgtttgagaattttacgtactctactgtgacagaatttctcttt

SEQ ID NO: 24103 - DNA, 201 bp, Homo sapiens
tctgaattgcacttacaaaattatcgtttatcgaattatactttgaccattgtttttctttccaagtttgcctgtgtttatgcttagggacactcaatttyaatgaatactcatgccatttctgaaatttattatttaagtttttattgctgtcagtacactaagtaaaatctcagctaactttacacaaagaaaagcttt

SEQ ID NO: 24104 - DNA, 201 bp, Homo sapiens
ttgcaaaatggtagatgatagaaccgatttcatggacttcagtaaagataatgtaaaataatatggttcaatattaatcagtgttagttattttagttacygtatgctagttcatgcaagcctaatataaaatttatttttcttctcgctgcttatccaatcctagtgattgctacaaatttttgatagtcatattctatc

SEQ ID NO: 24105 - DNA, 201 bp, Homo sapiens
ttaacatattttgggggactgttactagagcaccaccagccttattattttggtgcaatgaaagtaaatagcctggagaagcgacagataaaataggcagygtctgcagaatgtgaaccagtggttacaggctagccaacaatggacaaaattgttatttggcttacctagaatttcaaaagtaaagtaagtgaacatttt

SEQ ID NO: 24106 - DNA, 201 bp, Homo sapiens
gaatattgatagggaagaattaattttgtcatagtttaagaatatttagttatttaagactcttactaatgcacaaactcatttgacattttaaattgtayatgtagttcactgcacagttgtcgaaggccatgtcaaatggctaaacttacttgtttacttatagaatatactattttcaatccattaatcaattgagag

SEQ ID NO: 24107 - DNA, 201 bp, Homo sapiens
ggctaaaatggtcacttaatgaaaactgatatccaaaaaagaaagtgtgtggtagaattttgtggaaatccaaatcatttatttcagttaatgatctgtcyagaaaacgccaatcagtttttatcacatgacctacatgttcctcttcatttctgtggagtaaaagatgttgcggtgctccctctgtgtcacaccctgtga

SEQ ID NO: 24108 - DNA, 201 bp, Homo sapiens
gaaggtgtggacattagggccaccttaaatccatccatcacaaatatttgctgatcaatttgttctgccacagggaagtgacatacaagatatgtacatgktgaatggctatgatgaaggcacaaacctaagagagaaaagcccatacacatgccgattctggtaaactctgtaagtcagtatttgggtcaggggacaatt

SEQ ID NO: 24109 - DNA, 201 bp, Homo sapiens
tgaatgtgatagttatgatgttattttgaggctattttcactaaggaaaagacagtccaggatcctgatattgcaccttttatcagccattgatatttagrgtgttctttactttttcctcctcttttctgtatgcctctaatcttggcaattgtatttttaaattcattcatccctctgcatcttcattactacttccaa

SEQ ID NO: 24110 - DNA, 201 bp, Homo sapiens
tctgctctgtctcttcagcggggccaggaatccttctgaatcaatgccagacttctttcatcctccctccccctaggctcccagaccccatcttcaccccyacccccacccccaaggctgaagcacagaccaaaccatgcaggactgtgaattgaaaagcatcttctggctggtgacatctgtttccaaatatccagcaag

SEQ ID NO: 24111 - DNA, 201 bp, Homo sapiens
acaatggagtgttcgttttcttttgctacaaaacaaagtaacacaaactttgcagcttaaaacaacacatattgattatatcaccgtgtctgtgggcctgragttccagcatgactgagctggatcctctgctcagggtctccctcggggtgcaatcaaggagtcagccagactgggttctcacacagaggcttctactag

SEQ ID NO: 24112 - DNA, 201 bp, Homo sapiens
ccatttgtttggttccacttgtgggcagggcctatgtgtttctaggacattagggccaccttaaatccatccatactttatttccttgaatttaacaagartgtacagcccccataatgctgtttaaagtgatggggtggtagtattggtgtgggggcggtctgaggagggaggtctagaacgtttattgctgcagtgctg

SEQ ID NO: 24113 - DNA, 201 bp, Homo sapiens
ctgtgaagattgagttgttacccaaggacatcatcaaggcttggaaaagtcagggttgaagaaaataggatctttgagtataagtgaattgagtcttagargctttaacctactatcttctcctttctatgtgtgctgagatgcagaccatgatgatgtttcttaagttgtaggactttgaatgctggctggtgaaagaga

SEQ ID NO: 24114 - DNA, 201 bp, Homo sapiens
tcagtatggttataatcatttctacaataggctgggctcactgagttattgataacctagtctcatctttttctatgctacattaggaatacagtctgccytcatatgctttaaatattttgtgttcaaagtgataaaatcctaaggtgttattgataaaattttggagcttggatgcgatatttttagagttcacaaacc

SEQ ID NO: 24115 - DNA, 201 bp, Homo sapiens
ttggtgatgcattgccttggctaattatgatatgctaacatataacacacatgtctgtgaaatgaaatgactggcatattgcatggagacactgctttttyttcctccttttttgattatgaatgtttgcttgatgtttcatagtatttgcatgaaatattagctgaggatcgtcacctaactaaaaagatctgggaatgg

SEQ ID NO: 24116 - DNA, 201 bp, Homo sapiens
ggatttaggtagtgagtacaatctccatgaatctttatctaaataagttttaaatgctttcaggataaaattgatggtcccaagcagatgtctgtttactytgagcaatagagaaaataaatgtgaaatgtggcaatttggcaaaaattagtttttctcccagtttgagataacgatattactcataagtggcatgtttac

SEQ ID NO: 24117 - DNA, 201 bp, Homo sapiens
cttgaggaatatacatatgtatatttacacttgcaggtatgtatgaacctccctaaaatggatgcgtgctatttttagtaaatatttttatttttattttytcttcactccagctctttgagtccagatgttgatccagttcttgcttttcaacgagaaggatttggacgtcagagtatgtcagaaaaacgcacaaagcaa

SEQ ID NO: 24118 - DNA, 201 bp, Homo sapiens
aaccaaaacaatgacaaaactactaccagtcaaaaaaccgtgctcatttgtttttcactttcactttatgatttatttcacatctgtgttaatttgatgcmttgttttttaattaaataaattcttggtaactccctaaattgatggcaacaattagatacttttgcaaaactaagagttgatgtgttctaagagtgggag

SEQ ID NO: 24119 - DNA, 201 bp, Homo sapiens
tgggggagctccctgccatgttccagtgaaatcggagagataaaattttaatgttggaggcttttctaccattttgcttcttctgcagtccttgcagaagsagctgctataggaaatctatttccagagccctgtccaagcccatgcccagggtcacaggaggaggagcaccccgtagtttgtgatgttagtagaaaattc

SEQ ID NO: 24120 - DNA, 201 bp, Homo sapiens
tttaagtggcttactgctaaatacagttaatcatttttttaatagctctgtcttcatggtttttatatacttatcactcttataataaaagattatacccraactctgtaaatttaattgttttagccttcaagagctatagttagtaatataaccaaaacaatgacaaaactactaccagtcaaaaaaccgtgctcattt

SEQ ID NO: 24121 - DNA, 201 bp, Homo sapiens
tttaaaggatttttctctgataagcacctagcatgttactgtgtgttgtcagttactactcgttttagtacgtgtgtgtgtgtgtgtatttgtagcaggcrttctgtgcatgtgcattgtattcattatatgcacagaatgccagttctaagtgccaggcactacttgaacaacaaagaaaagagtagacactttgctcag

SEQ ID NO: 24122 - DNA, 201 bp, Homo sapiens
cccattttatgtttaagtggcttactgctaaatacagttaatcatttttttaatagctctgtcttcatggtttttatatacttatcactcttataataaargattatacccgaactctgtaaatttaattgttttagccttcaagagctatagttagtaatataaccaaaacaatgacaaaactactaccagtcaaaaaac

SEQ ID NO: 24123 - DNA, 201 bp, Homo sapiens
tcactttatgatttatttcacatctgtgttaatttgatgcattgttttttaattaaataaattcttggtaactccctaaattgatggcaacaattagatamttttgcaaaactaagagttgatgtgttctaagagtgggaggaggctttttttaaagtgttttttttttttttttcagagtgctataaccatactgtttaa

SEQ ID NO: 24124 - DNA, 201 bp, Homo sapiens
gtaacactttgatcgatgtctagaattttctcttcttcttttttcactggacaggtaaataccagctgtcccctacagtgaatatgccccaagatgacacwgtcattatagaagatgacaggttgccagtgcttcctccacatctctctgaccagtcctcttccagctcccatgatgatgtggggtttgtgacggcagatg

SEQ ID NO: 24125 - DNA, 201 bp, Homo sapiens
agaaatgctgccctcagtaggataatgggtgagtcaggtaaaactctgtttatcacatcttattttgatgctttcattggtttactgagaggttattggtrtaatattaatgtactattagtgtaatattaatgtaaataaaaatattaatgttttcaagacaaaagagaacaggtttattaaaatcattcaggaagtgtt

SEQ ID NO: 24126 - DNA, 201 bp, Homo sapiens
gtttgaggataccccatacaggctatagaggattttttgtttttttgagttgatgatgataggtgtcccaattccttattatcattagggttcattagacktctgtatgagacacaggattctaatcttccctgttcccatgggatacagtataactcttcagactatagggggattaatttgataacattctttttttaa

SEQ ID NO: 24127 - DNA, 201 bp, Homo sapiens
tatctatttgcttggcttattgaattttttacaactttaatttctgaatcttgctgttatcattgttaatgttagaagctgcaatgtgaatagcaaggtcygaaaaccatttttcacttttagcttcttattaaataacagcagattcggccgggcgcggtggctcatgcctgcattttgggaggctgaggcaggcggatc

SEQ ID NO: 24128 - DNA, 201 bp, Homo sapiens
gttgaacatggattcagtgttagaagataagcccgctcagtctgtccccgctggcctgtatccagtggtgtctgctgtatcaccgctgatcacactagccktgggaaagccacctggctctccagaggctttgtagagggagtgagggggcagagggtaagagctgctatgagctacttatgtgagatttttgtgggacaa

SEQ ID NO: 24129 - DNA, 201 bp, Homo sapiens
tgacaaaaagaaaaaaatgattataaactaaaggaccaagaaatggagggaaatgtaagttctctcaaagtaatgcaatgttcctatttttttaaatcttratatgatggagagcacagcctttcttgtgcataagtttaatcgtttgtgaactttcttcaagaatgtcttgtagttgaacatggattcagtgttagaaga

SEQ ID NO: 24130 - DNA, 201 bp, Homo sapiens
gaatactgttcccttccaataagtttttcagtggaaataaaatgatttcttagcctttcttgaagcagcaacgaacagaagtattagtgaacagcattcaytgagtgcggtatgccacactgctagctcagtaacctgccttggttccctttatcctcagagctcccccaaggtacatgactgcatctttcttcgacagat

SEQ ID NO: 24131 - DNA, 201 bp, Homo sapiens
tgctaaaatctgactggctaaaaatagtaaaaatgaaaacaaaaaatgatactttgcaagccccctgatccttttctccaagagcaatggtgcactggggyggggatcctgtcattcagtgtttcctccctggtatccagcacaaggtcagcagaagtgagtgctcagtgaatgtttgcgaaacagaacgacgtttcttcc

SEQ ID NO: 24132 - DNA, 201 bp, Homo sapiens
agccactgcactccagcctgggccacaagagcaaaacttcgtctcagaaaaaaaagaaaattgacatttaaaaatgaaatattacttaagtaatttgagcyaaagaggtgctgcaatacgtcttttggcattcaaaatctctggattctgaccagtgtttctggttgcagactccaccatagtttagcaaactattaatta

SEQ ID NO: 24133 - DNA, 201 bp, Homo sapiens
tattacttaagtaatttgagctaaagaggtgctgcaatacgtcttttggcattcaaaatctctggattctgaccagtgtttctggttgcagactccaccakagtttagcaaactattaattatcactaatgatcccgatgtggttgttttgacaaaaatgtatggatgtttgagtttcctctttgtcttgccatagttctg

SEQ ID NO: 24134 - DNA, 201 bp, Homo sapiens
ttctacaacattaggcattacacataggaagttggtttgcatggatttcaaatattgctttttagttggttcattatacttaggaatagacatgcacctarggtaaatgataatgaatactgtgtttggaataaaattctgggtttccttatttaaaaaaaagtcttaataggcatttagtttattattccaataggaact

SEQ ID NO: 24135 - DNA, 201 bp, Homo sapiens
catcacaaattattttggtacagggtgaaaagttctagttcatttggtacccagttggatacaggcctcgggcaagttgttataattctcccatgctgctrattggcctccaggtactgatttttctttgcccccatacccgttactctgtagctgaagtcacctgggagcccccctggacctgagctgcccattgaaaca

SEQ ID NO: 24136 - DNA, 201 bp, Homo sapiens
aagaaacattggactataatgtgctgtgcaattttgttccctattagaaagcagaagatgaggatattgttcttacacctgatggcaccagggaatttctsacatttgaagtcccacttaatgattcaggatctgcaggccttggtgtcagtgtcaaaggtaaccggtcaaaagagaaccacgcagatttgggaatctttg

SEQ ID NO: 24137 - DNA, 201 bp, Homo sapiens
ataactttgagaaagaaacattggactataatgtgctgtgcaattttgttccctattagaaagcagaagatgaggatattgttcttacacctgatggcacsagggaatttctgacatttgaagtcccacttaatgattcaggatctgcaggccttggtgtcagtgtcaaaggtaaccggtcaaaagagaaccacgcagatt

SEQ ID NO: 24138 - DNA, 201 bp, Homo sapiens
atcatgcgtatgcctattaacaaaaattttaatttcaaccctgttcctattttggaaacatatacagttaacagaagttttctcatttctttatggtaccyacattcacatttaaacaactaggtgtatcagtgatgtgtcacgtggggatggagtccataacttcaacctttcattttttctctcacagaacatacaacc

SEQ ID NO: 24139 - DNA, 201 bp, Homo sapiens
acacacacatcagcaaaattttggaagacagagcattatgtcagccatcatataattaccctttatatattttgtggattttaagaatcaacaaaattttmtttaaaataaatcattgtgtccctgtgtgttgaagatggctttggtcagtctgtatttatgtttttcttcaattcttctagaatgcagagccaagccaga

SEQ ID NO: 24140 - DNA, 201 bp, Homo sapiens
caacttttaaagtagtagaagaaatgtggaccattgtgaaagttacaaaatgtcaagttgaggttgagtatactggtgcaatacacctgtaaaattcaagrtatctcattttatttacttttcttctccttcacatacctaggtacagaaggtttgggattcagcatcacttccagagatgtaacaataggtggctcagct

SEQ ID NO: 24141 - DNA, 201 bp, Homo sapiens; identical to SEQ ID NO: 2906

SEQ ID NO: 24142 - DNA, 201 bp, Homo sapiens; identical to SEQ ID NO: 2909

SEQ ID NO: 24143 - DNA, 201 bp, Homo sapiens
ggagctttcctaacctcagaacagccattcatttgatctgtgtctagaatgagagtttctctgtgtgagctatgggtgattaatccattttgccttcattmttcagtggtttggcatatagattgaagtgttttgcttttctatttattggcggaggcaaatagaaacagagctctctctctctctcttgcagtgtaccca

SEQ ID NO: 24144 - DNA, 201 bp, Homo sapiens
aaccaccatccgctccagcctcggcacctcagaatgtatttagtacgactgtaagcagtggttataacaccaaaaaaataggcaagaggcttaatatccarcttaagaaaggtacgacctatcctgtttttgttttgtggaatttcttttcttagcagcaacacacaagggtagaaatggaatttattttaaaagtcaacc

SEQ ID NO: 24145 - DNA, 201 bp, Homo sapiens
ccactaataaaaccccatgtgtcattcgcttgctctgggtctctcctttggcctcttgaacttggtgcctttcctattgaggttaatagaggttccacacrgtacttgcaactttctttgaaaagggaatacgttatcattaacatcaatactgtcaacactatcagtaaatgttgatgtacttacctttctacatacctt

SEQ ID NO: 24146 - DNA, 201 bp, Homo sapiens
gatatcatgtattatgggtggatctttgttgggtgaactatattgactcttttataatgccatataatgtgatatggtgattttcattaattatgggctayaaactgtagattataggtaaataaatgaaaacttgatgaagacatgtacatttgtaaacctcataaatagttgtactattttgatgacattattgcttat

SEQ ID NO: 24147 - DNA, 201 bp, Homo sapiens
attacatgtgtaatcatttgcattcttaatgttccagaaccctggggttattagtaaaacgattggagaaaggtggtaaagctgaacatgaaaatcttttkcgtgagaatgattgcattgtcaggattaatgatggcgaccttcgaaatagaagatttgaacagtaagtgtgtgctcgctgcacttctgttcttacttgca

SEQ ID NO: 24148 - DNA, 201 bp, Homo sapiens
ttaactcttctgacctagctttttattccattgaaaaaatgaaagcctggttcccaccaccatttttacagccctgcccttcctcgcatgcagaagcttcsctgacctctcaaacaccaaagttttcactctcatcctgtctcccaacccttcccagtattaggacgttgcttttgtattaatctcctgtctacggagtca

SEQ ID NO: 24149 - DNA, 201 bp, Homo sapiens
gtaagatcagctacctagggctttcttgtgtgtatttattgctgggtcctgaaattatgtatgtctttgcgcttgcatgttctctgttgctggaggacttsccctcaaaaagtaaaactaaatttttcttactcctgcctgagaccaatgacaagctaataaggaagagtgatgaaagtaataaaatagggcgaggggtac

SEQ ID NO: 24150 - DNA, 201 bp, Homo sapiens
ataaccacagaaatatttgtctaaaaacctcaaagtcagtatcaagaccatttgtgcaatatcataaatgtctgggattatcatagaaaaatgcaaagacyataacaagatatttaccaactataatttttttcaatgttcaaatttggaaaagagagtttagacttacataccagtatacaagtggtaagattaaagaag

SEQ ID NO: 24151 - DNA, 201 bp, Homo sapiens
cataaatatcttacctgatacagttttatcattataacaactttgtgataaaaataataatgttaatgataactaataatagctaacatttactaaatgckttctctcccaagaatttgcatgcattttctcatttggtttctgtagcatccctgtgaggtaagcacttttttaaaaaaccacattacagtacacagaata

SEQ ID NO: 24152 - DNA, 201 bp, Homo sapiens
aattagaggcatcagccacttcttttcatttatatattggttgtggtgtctgcaaggaagagccaaagggaggctgcttttctctcccatgtgcccagaarcgggcatcaccaccccacgttgcttatgttgctcaaaaccataagggcctttgtggtcagtttagcttgtcattgatgatgtgcaaggaagaattattaa

SEQ ID NO: 24153 - DNA, 201 bp, Homo sapiens
tgacatctgtagattagaactatttatctagagatcaggcatattttatggaattgctaatcagtatagaaaaatatctaagtgggaagcaggttgtttayctgcctctctgaatggtgtcaatatctggtagttctgtatcataggatccctttttagttcagtgacatttatccccccaatgctttagtcatcccagtt

SEQ ID NO: 24154 - DNA, 201 bp, Homo sapiens
agtcaaccagttgtgtgatctgtacagaactttctggttaacgatgtgcttgtattttcctcttccagccgaacgcacggccggcgacgcagagcgggcgrcactcggtgtccgtggaggtgcagatgcagcggcagcggcaggaggagcgcgagagctcccagcaggcccagcgccagtacagctctctgcctcggtatg

SEQ ID NO: 24155 - DNA, 201 bp, Homo sapiens
ccagcgccagtacagctctctgcctcggtatgaggacgcttggccgagcctccagatccccccggccctttaagatcccccgccctttaggaacgcgctcyttcccaagtcactggggcctctccagcttgcccctggtagcaacagaggaaccaataaatgtcccgtggctactgttccttagcgtggggggctgtcgta

SEQ ID NO: 24156 - DNA, 201 bp, Homo sapiens
atcttacaaggaaacagctcagagtaagtaaatttcccccagctcacacagctagcaagtcattttgccagcattcaaacctgaatctgcccatgccctamaccatgattttataaggcccgttgctatcaagggcttctgttcccaaattttttgagacagagtcttgttctgttgccccggctggagtgcagtggcgcg

SEQ ID NO: 24157 - DNA, 201 bp, Homo sapiens
gggtgagctgacagtgtggacgaattggcccacctggcatggccctccctgcacgaccacacgggtgggccagggcacttcatagcttgtgtggatggtgktgtcagggcaggggctgtgttcttatttttattggccagttgtttggcttcatatattttggccgtgcctgagagtgtctctaaggattgaaggagaaac

SEQ ID NO: 24158 - DNA, 201 bp, Homo sapiens
catagaaccctgcgttcggcttgatgccttgcaaagcagccccactctgtggcaggctgtgtgcagagatctgagggaagggaaagaaagcaaacaggagrtcaggggggactgcaaccacctccgtgagcttgagtcaagtccaagtttctgacatgtgatattcttcaaagacacttgacctctgcttttcggatgttg

SEQ ID NO: 24159 - DNA, 201 bp, Homo sapiens
tacattttggcatgtcaatgagaaacactggccaggtggtaacactagttggcaggaaaagggacctgtgtggtggccccacactcagttctcaatcagartaggatttttgtttgtttttctttttctaaaataatttattttttattataaattataggctgggcgtggtggcttacgcctgtaatcccagcatttggg

SEQ ID NO: 24160 - DNA, 201 bp, Homo sapiens
cagagaacattgttttcaataacccctttacacctcataataaccctataaggtactaattttagccctgttttatgaatgaagaaactaaaacataaagktgtggagaagaacttaccaaggtcacaaggtaattggtggtagagtcacaccgaatttgaacaatggtcaacctcaaaggccgtgttcctaacactctcc

SEQ ID NO: 24161 - DNA, 201 bp, Homo sapiens
catattttgatgaatgtttctatatgcagttcctaaaaaaggaaaggtttctcttatttcaactttgttctgatttcataggattcaagccaaaactcgasaatttagggaacgacaagctcgagagcgtgactatgctgaaattcaagattttcatcggacatttggctgtgatgatgagttaatgtatgggggagtttc

SEQ ID NO: 24162 - DNA, 201 bp, Homo sapiens
atatcgcaagggaagaacctgaggaaatcaaaagtactaacataattgggccaaactgtgtaatcaaaagcaaatgatatggttattaaatctaatgaaaygatttcccagcatttaattcatttctcggattcaagatattttagtaataaatacatctgttgaaatggacattctgtgttgtcaccacttttaaacagt

SEQ ID NO: 24163 - DNA, 201 bp, Homo sapiens
attatacttaggaatagacatgcacctagggtaaatgataatgaatactgtgtttggaataaaattctgggtttccttatttaaaaaaaagtcttaatagrcatttagtttattattccaataggaactgccaaaattttctgccttcatttacaagttggtgattaagcctgcgttttgtgtgtgtgagtcattttattt

SEQ ID NO: 24164 - DNA, 201 bp, Homo sapiens
ggaatatttgaaaccatatgatgcatagaggttctgaatgaaatgtatatgcattgagtattttgtatttcaaaatatgctatgatttctcataattcttwaaaaaaatgagatttttgcactgaaacgaggtggaaacatagttgggtttcctgtgccaacacagaaatgtttatgacttctataatgcttatgaaaccc

SEQ ID NO: 24165 - DNA, 201 bp, Homo sapiens
tcttgttttcaattttagctttttacaacacacactgatcctgtcattaaaggtcatccttcttagaggaaacagttaccaagatcataatgcctattagrcttccattttatccagtttcctttcacattgtagcaagaaacctaacacagagtgtacttttctttgtgttggctgcctctaggatgaggatgggacaga

SEQ ID NO: 24166 - DNA, 201 bp, Homo sapiens
actctaacaaattaatttatgccattagtaagttttataatcattagaattatgtatatttgatttaaaatttttgatttatagttataatttgattcatwagtgagcatatatagtcttgaatagattggttacgagtgccatattttaacaattatttatgctaaagcaaatattttcaaattgaaaatagagtgcatg

SEQ ID NO: 24167 - DNA, 201 bp, Homo sapiens
aacatagcaagacctcatctctattaaaaaaaaaaaaaaaagctagacaggcatggtgacatacacatgtggtcccagctacttgaggggctgaagtgggrggattgcttgagcctgggaagtcgaggctgcagtgaggtatgatggccccacaacactctagcctgggtcatagagcaagaccccatctcaaaaaaagag

SEQ ID NO: 24168 - DNA, 201 bp, Homo sapiens
aggaaggtaaccacctctgcttgtttgctgctgtctcttgcccctcctgacttcttggtgtccgtgatgagtgtcgtgtcttgggtaaaccattggattcyagggcatcttcatgatggccttttgtgagcgtggtaccaactttcatatcaaagttcagatagtctcctattttatatcacacttggattttctgatgaa

SEQ ID NO: 24169 - DNA, 201 bp, Homo sapiens
gagaccagcttgggcaacatagcaagacctcatctctattaaaaaaaaaaaaaaaagctagacaggcatggtgacatacacatgtggtcccagctacttgrggggctgaagtggggggattgcttgagcctgggaagtcgaggctgcagtgaggtatgatggccccacaacactctagcctgggtcatagagcaagacccc

SEQ ID NO: 24170 - DNA, 201 bp, Homo sapiens
ctttgtgtgcctgtatccaactgtgatgagcgcgtgtgtgtgtgtgtgaagttggtggaggcccatgtgctgaacaccagattagcctaattaaggttgaygaaaacaagaaactagggaatgggtgggcctctgtaatactgacagagggaagaccctgtagaaaggttggttgaagttgtgtaatagttaaggactatg

SEQ ID NO: 24171 - DNA, 201 bp, Homo sapiens
gattccagggcatcttcatgatggccttttgtgagcgtggtaccaactttcatatcaaagttcagatagtctcctattttatatcacacttggattttctratgaaaatcagtgccgtgtatggtgtgcacttattaatatatccattttttgaatagattccatttcatatcgttaaaaatgaaaacattcaacacatta

SEQ ID NO: 24172 - DNA, 201 bp, Homo sapiens
aatgtacgacttagaattatacaagtaaagcatcaaaatttagggaaacactgtttctttgaggtttttcttcgtaaaacttaccattctagggtcatttrtatcagtatttttgcactgtagaattatgtcaaaatagtacaaaattttggtagttaattaagtgcctttatttataagtgcacatttacctttcatttc

SEQ ID NO: 24173 - DNA, 201 bp, Homo sapiens
cagccccaggcattgtccagatggtgcctttgcggattctccacccacaacccagggagatgcaaaagtagattatgttgaattcaaggtatataaagaakcactgtacaaacatgtgctttttgaaaggaagttactccgataattttgaccgtgttattacatgttttattagttgtaaataattaaaagtggatgaac

SEQ ID NO: 24174 - DNA, 201 bp, Homo sapiens
gcagtattgttgatatgaggttgattcctttttatgggcaggaagttatcacggtttaaaatgtctaattcccttttggtgatgctaacttgctatattcrgtgtttctgttctttcgtataggatccaaactactggatacaggtgcatcgcttggaacatggagatggaggaatactagaccttgatgacattctttgt

SEQ ID NO: 24175 - DNA, 201 bp, Homo sapiens
taagactatgcgcttgctgaggacagtcatttttgaattctccagcccctatcgcagtgtctggcatgtgatgagagaacaggaatatttgttgaaaagtkaaaatgcatattccatcccatcctgccccctttcctccctctccctccttcttcctaccctcacactaacctttgggttttgctttctaggcaaagcagg

SEQ ID NO: 24176 - DNA, 201 bp, Homo sapiens
tctccgttgcagaacaaccctgtagacttttagggttttgagttcccagaggagcatctcaaagcctttccaaatccaatgatgtcagaccttaaagatcmcggggcccagggctggcaaatccatggcctcactttgctgcccacctttccgggtctgtcatggaaactgagaacagggcacatccctgtctggagtctt

SEQ ID NO: 24177 - DNA, 201 bp, Homo sapiens
agaatcgaaatggagtcaaccagttgtgtgatctgtacagaactttctggttaacgatgtgcttgtattttcctcttccagccgaacgcacggccggcgaygcagagcgggcgacactcggtgtccgtggaggtgcagatgcagcggcagcggcaggaggagcgcgagagctcccagcaggcccagcgccagtacagctct

SEQ ID NO: 24178 - DNA, 201 bp, Homo sapiens
ttttttttttggagtgtggtattgcattatttccaggattgttgatacaatttggaaattaactttttgaatttttttttaattgggaaaagaataatgtycctttttcatctgcagtaattggatgccaaatgcaggtgtgaaattcactagcatttggaatagaattttgtacataggccaaaaagtaaattgctaggg

SEQ ID NO: 24179 - DNA, 201 bp, Homo sapiens
gcatttctttttctgagaagaatgtcattcaatgaggatggggatggggacagagtttaaagatggcatttgctaaaaatgtggacccaagcagtttcctytaaagtgtaattggctgtagtgttaatctttatgtccatagtcaaggaaatcaccattatagttttcacatgtgagggaagtcagacatgccttgtttac

SEQ ID NO: 24180 - DNA, 201 bp, Homo sapiens
tctggttaacgatgtgcttgtattttcctcttccagccgaacgcacggccggcgacgcagagcgggcgacactcggtgtccgtggaggtgcagatgcagcrgcagcggcaggaggagcgcgagagctcccagcaggcccagcgccagtacagctctctgcctcggtatgaggacgcttggccgagcctccagatccccccg

SEQ ID NO: 24181 - DNA, 201 bp, Homo sapiens
cggcagcggcaggaggagcgcgagagctcccagcaggcccagcgccagtacagctctctgcctcggtatgaggacgcttggccgagcctccagatcccccyggccctttaagatcccccgccctttaggaacgcgctccttcccaagtcactggggcctctccagcttgcccctggtagcaacagaggaaccaataaatgt

SEQ ID NO: 24182 - DNA, 201 bp, Homo sapiens
tccaggattgttgatacaatttggaaattaactttttgaatttttttttaattgggaaaagaataatgttcctttttcatctgcagtaattggatgccaartgcaggtgtgaaattcactagcatttggaatagaattttgtacataggccaaaaagtaaattgctagggctgagaagtagatagcaaaaagaaaatggcc

SEQ ID NO: 24183 - DNA, 201 bp, Homo sapiens
ccaatccatctttccactcatggctgattcttctttttttcttcctcttccaacttcttcattgctgtcacgaccttctttaaaataaatttgaaaacttyaaaaaaaaatttgtttttctcttggagaagtgccccaaatggcaaagtatttcccgcccttcccagttttaccagtgatttgctaagtagtccgtctgtt

SEQ ID NO: 24184 - DNA, 201 bp, Homo sapiens
gcgagagctcccagcaggcccagcgccagtacagctctctgcctcggtatgaggacgcttggccgagcctccagatccccccggccctttaagatcccccsccctttaggaacgcgctccttcccaagtcactggggcctctccagcttgcccctggtagcaacagaggaaccaataaatgtcccgtggctactgttcctt

SEQ ID NO: 24185 - DNA, 201 bp, Homo sapiens
aaaatctttaccatgtacctgtgcttttgtaagtagtggatttgaaggggcatcttttaagtcctgagctcttggcaaactaagtaaatcaaatgttaacrgggattacctttttgtgagttgtgtgtttgacccagatcccagcaggtcatcaatctctgccagaaagagaaaccagtaatgagcccttgagttcagttt

SEQ ID NO: 24186 - DNA, 201 bp, Homo sapiens
ggcctctaataacaagcattgattttttgctcagacatctacagagaggctaggggttggctgatctaggccaggctccactgggcttgacttataagctrcaggttggattcatattcactccatgtgtctcttagactgtgggcgtgttcttgttatggtagaagtcaggagcacaaagaatacacccagcatacaatc

SEQ ID NO: 24187 - DNA, 201 bp, Homo sapiens
aggctaggggttggctgatctaggccaggctccactgggcttgacttataagctacaggttggattcatattcactccatgtgtctcttagactgtgggcrtgttcttgttatggtagaagtcaggagcacaaagaatacacccagcatacaatcagtttcaaactccttttgtgtcacatccacaaacatcctgttggcc

SEQ ID NO: 24188 - DNA, 201 bp, Homo sapiens
agaatacacccagcatacaatcagtttcaaactccttttgtgtcacatccacaaacatcctgttggccaaaacaagtcacatggccaaggccaacaacaayggagtgttcgttttcttttgctacaaaacaaagtaacacaaactttgcagcttaaaacaacacatattgattatatcaccgtgtctgtgggcctggagtt

SEQ ID NO: 24189 - DNA, 201 bp, Homo sapiens
agtcaatataattgtggacgcaagttttgcctaggttttagcttgttcttataaaatggtgggtgtctgggatgatcaacctgtggttcctgtgtccacaygacttaccagagttgttttttttccactgatctgcctacatagaagaaaatccccttccttgcccaagtgcttactagccttttctaagtgaaaaaaaaa

SEQ ID NO: 24190 - DNA, 201 bp, Homo sapiens
gctcagggtctccctcggggtgcaatcaaggagtcagccagactgggttctcacacagaggcttctactagggaaatatcagcttccctgcttccgtcatygttgacagcattgtgttccatgcagctgtgggattcttggctccttgcgacttcagtaccagcaaggagagagacagaggcataaagagggacaccacga

SEQ ID NO: 24191 - DNA, 201 bp, Homo sapiens
ttctcctccctgccttccacaatgattgtgaggcctccctagccgcatggaactgtaacatgtccattaaacctcttccttttgtaaattgcccagtctcrggtatgtatttatcagcagcatgagaacggactaatacaatacacaatatataagttatattcaaaaattatttgagaaggtaagtttctatgagtttaa

SEQ ID NO: 24192 - DNA, 201 bp, Homo sapiens
agattccttttgcataattaaaaatgcaaatgttaaagcatttttaatccatgaagaattaatcagtcacatcacaaactcctctctttcagcatatactsctctgaatagataggtgagacttcaagcctgcaaggaaggatacccaggttcaggcttaggcagctgggaaggaggggacagtttaggagaaacaagact

SEQ ID NO: 24193 - DNA, 201 bp, Homo sapiens
gaagaatttgaaatttccatgtgactctgatttacttgcctatcctggggtgacagaaagcaagttaagtaggtcaccctggcctttggtgaaggtaaatrtataagaaaatagtgcttactttacagacttccggactctccgtccaatctggatgagcaggtatcccggagagtgtaagttgctgacatacacaacttg

SEQ ID NO: 24194 - DNA, 201 bp, Homo sapiens
tatcctggggtgacagaaagcaagttaagtaggtcaccctggcctttggtgaaggtaaatgtataagaaaatagtgcttactttacagacttccggactcyccgtccaatctggatgagcaggtatcccggagagtgtaagttgctgacatacacaacttgaaagccagagctttaagggactgcctgttgcattttttat

SEQ ID NO: 24195 - DNA, 201 bp, Homo sapiens
gaagcaacaccaggccagcatcccttcatggcagtagtctactaactgcaggcattatcttcagagtgttgtccatatacctgcagtatgttctgaattcrtatacgtgtaagttcttgggccctgcactagactgactcagaatttctcaaggcaagccttggcaatcagtatttttttaacaagctctctgaatggttc

SEQ ID NO: 24196 - DNA, 201 bp, Homo sapiens; identical to SEQ ID NO: 2897

SEQ ID NO: 24197 - DNA, 201 bp, Homo sapiens
aagtggtgttaccagtgtacgcgcagtgaccttggatgacagtggctctttctcacagcctcccctgagctgtgagaaacagctttctctgtacatatgcractcctaataaaaggcatatttcttcctgttcttttggtgtctctggtgttcctgggcagccttgcctagctgggcttttttaaaaggtctattaacaga

SEQ ID NO: 24198 - DNA, 201 bp, Homo sapiens
agagcttttttcgtggcactgtgatacaaacacaagcgcaaaacctgtgccagatttccatagtttttgagcaatagaaatgaccttttaggtgacattargtgaatcctaattgcagattctcacaaaggattgtagctattaggatataaggaattaatttgtaagtacttaacaaaagttgcaggaaaaataaatttg

SEQ ID NO: 24199 - DNA, 201 bp, Homo sapiens
ccatgcctggccaaaattacctttttaggaagcttttcttttccaatattgtgacatttaaccattataacacataatcaggagcccccactatgtactcrcatacatttccagactgtgttttcccagggtttgttttttccaagattcgtgaatgcttctattcccatgacttccaaaaaaattgtaatatactatgat

SEQ ID NO: 24200 - DNA, 201 bp, Homo sapiens
ttctattcccatgacttccaaaaaaattgtaatatactatgatttgtggatatctttgtttttcagggcaacagtgtccatctttcatgtctatccaaagrgacataaagtccttggtatgttcaaactattaatgtgaactttttatttgtacatgcatttttaatttcgtgagtcactctgtgtatgatgtactctccg

SEQ ID NO: 24201 - DNA, 201 bp, Homo sapiens
tcagaaggtcccacattcaaattagttttatccatgcaggtcttattatcttttattctcaaagttctatgctttactctttggctacactcctgtctatstgacagaatttctttaagcattatttatcttgtaagacagacattctctgagtcataaaagcaacatttttatccagtttccatttagtctggtcagcaa

SEQ ID NO: 24202 - DNA, 201 bp, Homo sapiens
agtgtgtgtcaggatttccttccttttgaagctgagtagtattttattgtatgtatatacgtcattttgtttatccattcccacgtcgatgcacgctagckgttgtaataaggctgctgtgaacgcgagtgtcttaacatgtgtttctatcctcagtgtcacaactctcagagttacaactctagctaagtcagcttcttt

SEQ ID NO: 24203 - DNA, 201 bp, Homo sapiens
tgtgggtcttgtttgttggtcagttggttggttggtttttaagagatggttttgctctttgcccaggctgttctcaaactcatttgacctcagcctcccamgaatctgggattataggaacatgccgtggtgcctaactctcttgtgattactttgaaattatcccccaaagtattcttgttctagcatgttagatcttgt

SEQ ID NO: 24204 - DNA, 201 bp, Homo sapiens
gttggttggtttttaagagatggttttgctctttgcccaggctgttctcaaactcatttgacctcagcctcccaagaatctgggattataggaacatgccrtggtgcctaactctcttgtgattactttgaaattatcccccaaagtattcttgttctagcatgttagatcttgtcttctgggacttagatggaatgcttt

SEQ ID NO: 24205 - DNA, 201 bp, Homo sapiens
ttgtggttgctcaatgtattaaatagaaacagaaggccacattgtttcctcagctcagggcctccccagagctgggcaaggaaaggttattcatatttgayactaatgtatttgccttttctgtcgcacctcattgctgcccaagtgtataaatgtgaactaacgcttcagtatttttaaactgtccaaatgcaaatagga

SEQ ID NO: 24206 - DNA, 201 bp, Homo sapiens
aaagctattttaataaattttgttgaacatgtatatatatgtggatgtctaaaacaaatatgacaaactgagaaatttttgtggctaggatgaacctccgyttttggatacaactggagtaacctgagtttcagttggggttttcttttttaagatacagggtctcgctctgtcacccaggctggaatgctagtggtgcga

SEQ ID NO: 24207 - DNA, 201 bp, Homo sapiens
tctggattaaggccttgcattctgtttccccactgggaattctcgtcccctgattttaggtgggctcctctttatcttgggtttgtcttcagtcttgatgmtcagaaaagtctcccctgatcgacaagtcatgctccatcacatcctcctattttaattcttactttactatatgatattaccttattagtgtaatgtgag

SEQ ID NO: 24208 - DNA, 201 bp, Homo sapiens
tctaactttgaccccaattaagtttatcactgaagccctaatttttctttcgctcagttacccacctaggggcctcatcactttttctttcagtcttttgstcatgaatatcaaaaatttaatgttttaaattaattatgtcccatccaaggtgttgactgtgttgacttctgcttagaagagcagggtgatgagtcaagg

SEQ ID NO: 24209 - DNA, 201 bp, Homo sapiens
tctttcagtaacagatcaactcctagcaatcatgatcggatacagcgtctgaggcaagaatttcagcaagcaaagcaagatgaagatgtagaagatcgtcrgcggacctatagttttgagcaaccctgggtaagtaattggttcttcagcacggtgaatggtcctacaacttccctgcagcaaaggccactaagctatgac

SEQ ID NO: 24210 - DNA, 201 bp, Homo sapiens
tatgccattagtaagttttataatcattagaattatgtatatttgatttaaaatttttgatttatagttataatttgattcataagtgagcatatatagtyttgaatagattggttacgagtgccatattttaacaattatttatgctaaagcaaatattttcaaattgaaaatagagtgcatgatgtatatttcagtgga

SEQ ID NO: 24211 - DNA, 201 bp, Homo sapiens
gcaatcatgatcggatacagcgtctgaggcaagaatttcagcaagcaaagcaagatgaagatgtagaagatcgtcggcggacctatagttttgagcaaccstgggtaagtaattggttcttcagcacggtgaatggtcctacaacttccctgcagcaaaggccactaagctatgacctcaatgctctatgaaacgagacaa

SEQ ID NO: 24212 - DNA, 201 bp, Homo sapiens
ttataatcattagaattatgtatatttgatttaaaatttttgatttatagttataatttgattcataagtgagcatatatagtcttgaatagattggttaygagtgccatattttaacaattatttatgctaaagcaaatattttcaaattgaaaatagagtgcatgatgtatatttcagtggacagtggtatctagtata

SEQ ID NO: 24213 - DNA, 201 bp, Homo sapiens
ttctatagctgcaagaaatcaaatatattttacaacatattttgatgaatgtttctatatgcagttcctaaaaaaggaaaggtttctcttatttcaacttygttctgatttcataggattcaagccaaaactcgagaatttagggaacgacaagctcgagagcgtgactatgctgaaattcaagattttcatcggacattt

SEQ ID NO: 24214 - DNA, 201 bp, Homo sapiens
gtaagcagttggtgtaataatcacctcaaatggtgggaaatgagtatgaaagcctggtccctagtcaatgatagcctcaatttttatttttgacataaaarttatacttgcatttcagtgtactttaattcctccttctctttgtcgacacataaggttctgtcactaataaataaagttctgtcattaacaagtctaccc

SEQ ID NO: 24215 - DNA, 201 bp, Homo sapiens
gaaggataaaatgaaagccaagaagggaatgctgaagggcttgggagacatgttcaggtaagtcgttaccatcccaaaccagaatctccttaaacatacasgagtgtgagcttagcaaaaagtactaaaaactggacacggtagtgcacacctgtaatcccagctacttgggaggctgaactgggaggaatgctggagccc

SEQ ID NO: 24216 - DNA, 201 bp, Homo sapiens
attgcagtccatgttgctagcagggccatactgcagtaaaagtgtgggaaagtaaagtccttgaatgtattttagctttattatttttgttgcgttggttyactgtgtccctatttttttttctttccttccaagtggaagaagacacagaagaaagttcaagatcagggagagagtctgtatccacagccagtgatcagc

SEQ ID NO: 24217 - DNA, 201 bp, Homo sapiens
cacagtctctgcctttctaccttttgatggccaaggatctgttttaggctttttgaatattgctagttcttggcacatagtattgctcaaggaaaactccrtgataggcttttgctctttttattagtgtttcttaatgacttgttttaggttctaggtctgtgaaatctttgattatctattttgtcaatgcctagaaat

SEQ ID NO: 24218 - DNA, 201 bp, Homo sapiens
cgattgttggctaccagcttctttgtctgggacccctatgtgtgggagatgtttgggactaagggagtttgttagccctactgacatttgtattgtttaaktggaactagctattgaaaaatgctaacacaaaacctcagctattcttttattaatgtattaaaaattctgaccaaattaaaacaaccaggagagccttgt

SEQ ID NO: 24219 - DNA, 201 bp, Homo sapiens
catccacatcacatgttccattttaattctactcaaagttaaacagcattgcagtccatgttgctagcagggccatactgcagtaaaagtgtgggaaagtraagtccttgaatgtattttagctttattatttttgttgcgttggttcactgtgtccctatttttttttctttccttccaagtggaagaagacacagaaga

SEQ ID NO: 24220 - DNA, 201 bp, Homo sapiens
aggatcacttgagcccaggagattaagaccagtctgggcaacacagcgagacctcatctctaccaaaaagttaaaaataaacaacaataaaaaacatgtartcagtcgtgttgaggaaactgatgatcggctgtgaattcctcagtcaccagagggaaagaagcatcttttgatgtggtattctgttaagaaatgcaagct

SEQ ID NO: 24221 - DNA, 201 bp, Homo sapiens
tagcaactattacttcatttattctttgtcttttccatctgcattccagaactcatcattgagcaaataattgttatgtacctgaagttttcgacagtgcrtattcaggtacataattttcactaattcacactaacattttttttcttgtaaacctcccaggttctcccagcagagatgtgggtccttccctgggtctga

SEQ ID NO: 24222 - DNA, 201 bp, Homo sapiens
tcctttccatcgtccacggccgcggataatcagaggcaggggatgcaatgagagcttcagagctgccatcgacaaatcttatgataaacccgcggtagatsatgatgatgaaggcatggagacctgtaagtttataatggctgaaagaataataattaaaattagactctatttcttaaagtgagctccagggagccctgg

SEQ ID NO: 24223 - DNA, 201 bp, Homo sapiens
tatttgaacaactgttctgccaaaggcttctaccatctctttacctcattcttactcttaaaccccttaaaatgggcttcagcccctctctactgaagaarattcttttcaggtgacaaaattgccaaatctggaggccatcaggaaaatgtgtccacatttgacttataggacacccttcttccttggtcactagtgctc

SEQ ID NO: 24224 - DNA, 201 bp, Homo sapiens
ggtggctgcagtgtggtttggttttgctccctgcactgcagtgcccagaaagccaaggtgatggtggggcaccccttctttttttccttttctcaggggtwacagtcttagccatcttggtccccagttcctgctgaaaatagttgtttcctatttttgactagttttctagttgcttatagtaggaagttaattctggac

SEQ ID NO: 24225 - DNA, 201 bp, Homo sapiens
gattccaacaccattggaatagaaagtagttattctaagttcccctcaaatgaatccccctaaaatcttatttatactacaaatgtatatagaaaaatgtrcttaatagtggaaaagtacgtttctttataaattttcaaaagctacaaatagtggcgtgtaaaataattataaatcacctctgtgaaaaatactgcttta

SEQ ID NO: 24226 - DNA, 201 bp, Homo sapiens
aactctattataggttgtttttaattccaattttgaaatcagatttgcttacattttgttttgatgtgattcatgtgttgattccaacaccattggaataraaagtagttattctaagttcccctcaaatgaatccccctaaaatcttatttatactacaaatgtatatagaaaaatgtgcttaatagtggaaaagtacgt

SEQ ID NO: 24227 - DNA, 201 bp, Homo sapiens
gtaggtggtctgttcagattgacagatacaaatctccaagaacccagagatccccaccttcctcattctcagaaatgctcggaaatggattcctgttactkcataagaaacctttccaagcatttctgttgtgacaatccctgtgttaggtgctaggaaacaaagatgaacggaatatgttcttcctccagagatttgcag

SEQ ID NO: 24228 - DNA, 201 bp, Homo sapiens
aaattcggacaaaagcttcagtacttggaattgattgataatgtccatctaagtagaggaaatgatataaagtctgaattagtgaataattagcgaatatrttgaaagatatgatattccgaactttaaagtgtatccagcaactcagatgaaatgcttacactgcttcagttagtaaatctttattttttaaactctatt

SEQ ID NO: 24229 - DNA, 201 bp, Homo sapiens
tataaacaatattcacatgatacatgttgtggtttggctgtgtccccacccaaatctcatcttgaattgtaactcccacaatttccacgtattgtgggagrgtcctggtgggaggtaattgaatcatgggggcaggcaggtctttcccatgctgttctcatgatagtaagtctcatgaactctgatgattttaaaaatggg

SEQ ID NO: 24230 - DNA, 201 bp, Homo sapiens
tttaaattaacttcccagatgttctagagcttttccttgggtaccctaagtccttggtgtaaataactatttgattactttctttctcttgttgtttcatktcttcttccattttttccccaattggttgattttgtgtaactaaaggagatgcagtagttgattttaaaagatacctgttttcttttccaatcaagcaag

SEQ ID NO: 24231 - DNA, 201 bp, Homo sapiens
ttgctttgttgcctaggctggtctcaaactcttggcctcaagtgatcctgctaccctggcctcccatagtgctgggattacaggtgtgagcggctgtaccyggcctaaagttttcttctctggatcttttttttttttccttttgagatagcttctcactctgttgcccgggctggagagtagtggctcactgcagcttca

SEQ ID NO: 24232 - DNA, 201 bp, Homo sapiens
ttaagcatttagaaaaatcagaattctgtgcttttactatatttaaagtatatatatagtatgtttgtatatattttataataacgtcaatttagttgggrgaaacagaaatataatgtgattattatttgcatttgggtatttggggttatggggttagtgtggtttgattacctgggtaggtataatttgaaaaaaata

SEQ ID NO: 24233 - DNA, 201 bp, Homo sapiens
tttgtctgaaagttttcaattgtgcattctcagccgcagactcatttgttataataaagaactataacatacgcattggttttagagagacaagttgcagwttacacttacatgaatcatgtctctttatatatagcaatatgacatctgtgatttctgctgtaatctaaaggaattttccatttttatttacctttttgg

SEQ ID NO: 24234 - DNA, 201 bp, Homo sapiens
ctgtaagaatagagtatataaagctattttaataaattttgttgaacatgtatatatatgtggatgtctaaaacaaatatgacaaactgagaaatttttgkggctaggatgaacctccgcttttggatacaactggagtaacctgagtttcagttggggttttcttttttaagatacagggtctcgctctgtcacccaggc

SEQ ID NO: 24235 - DNA, 201 bp, Homo sapiens
atcctgtgaatgggtatgtgggcagtttttctgatcttttgcaatgattaggagcagttcctgaccttgccttcaaatccctggccttccgagataagttmtattcaggaacaatgtcctttggacctaatttccaccggcaatgcaagatttactcattgattgatggtggagagggtagcctcgctctgttgcccaagc

SEQ ID NO: 24236 - DNA, 201 bp, Homo sapiens
ggttttagagagacaagttgcagtttacacttacatgaatcatgtctctttatatatagcaatatgacatctgtgatttctgctgtaatctaaaggaattytccatttttatttacctttttggcctgatttatctcattcattgaagtttttctaaaaaaaaaattaagatttaaagttttaacttggcattcctttaaa

SEQ ID NO: 24237 - DNA, 201 bp, Homo sapiens
tgttaatttgttggatagttaatttgcttggaaaaattattttcaaatttttttacttactcctgttcaaaactttaactcagttgaaaaagaaaattggycaggcacggtggctcacgcctgtaatcctagcactttgggaggccgaggtgagcggatcgcctgaggtcaggagttcaagaccagtctgccgaacatggt

SEQ ID NO: 24238 - DNA, 201 bp, Homo sapiens
gtcactgtctttggttcctaaagcttatgaggtgtctggctgtggtaaaaagtgtcttgggtatgaattctagctttgctactcactcactatatgacctracaaatccttcaagcccctgtgcttactgaggtttcccctaagcatgaggatgataacacctgtcttgcatgctggttgtgggaatcaatgagataaaag

SEQ ID NO: 24239 - DNA, 201 bp, Homo sapiens
gactttgtatttcaataacaactttttgcaagtatgttttatttaaacttatggattttgtaatagagcaagtgaatgcaagaaacggactgaactaggargtggagtaggtttggcacttgtattttaatagggcaagcattcttccatatgtcgttctttctgttctgtctgtggtattggcagtgttctttttgagaa

SEQ ID NO: 24240 - DNA, 201 bp, Homo sapiens
ggagtgcagtggtgcattctcagttcactgtagcctccacctcctaggttcaagtgattctcctcagcctcagcctcctgagtagctgggactacaggtgsctgtcaccacgcccagctaattgtgtatgtgtttgtgtgtgtgtgttttgagacagggtctcactctgtcgcccaggctggagttcagtggcacaatctt

SEQ ID NO: 24241 - DNA, 201 bp, Homo sapiens
aagttctttttttttttttttttttttttgcctaagattatattaataacactagtgtatgtcaaaaggaaaaaatatctcatgtatatattttttcctgwaagaatagagtatataaagctattttaataaattttgttgaacatgtatatatatgtggatgtctaaaacaaatatgacaaactgagaaatttttgtggc

SEQ ID NO: 24242 - DNA, 201 bp, Homo sapiens
gtctttgttcttgagttctaagggcatttcaaagctaaaaggtttgccacagagattgtttttgcatgggtatgatattggattctgtatcttatttttarcatcttttatgtgtaaacaccacttaagttagatttgtcacctttgtatttcatgatacaactgatgtctgtacctctttaccttacatactgctgctaa

SEQ ID NO: 24243 - DNA, 201 bp, Homo sapiens
ttgcaagatcctgaacattgttttgaagatagtcaacaactatctgatatgtagcaatctgaaatttattaaaaacattttttctgttaaactaatattaktatattctatcttctgcagacataactttttaaattaaaaatcgttaaaagacagtttctatttcttgtagtctttaaaaaaatacaacatgtaaaaaga

SEQ ID NO: 24244 - DNA, 201 bp, Homo sapiens
gcttttataccagatcaaggcaaactggatgtaaatatagcgttatccttgctgaacactgttgcagaccaacaggttcacagtttcctacatcctacccrtttataactgaaacagtatgtcagttgatttttaaaagtgcaggtggttttctgatcgttcactatgatttcctttacagcaagggcatgagagcaccat

SEQ ID NO: 24245 - DNA, 201 bp, Homo sapiens
gtcacccaggctggagtgcagtggcatgatcgcggctcactgcaagctctgcctcccgggttcaagcaattctcctgcctcagcctcccgagtagctgggattacaggtgcccactaccacgcctggctaattttttgtatttttagtagagatggggtttcacctggtttatcaggctggtcttgaactcctgacctcag

SEQ ID NO: 24246 - DNA, 201 bp, Homo sapiens
cagtatgataagtatatgtttaatttttaaagatactaccaggctattttccagggtgacagtaccattttaaatttccaactgcaatatatgagaagccyggtttccctacattcatggctgcatttggtattgtcactgttttttattttaaccagtcaggtgtgtagtaatagctcatcatggtcttatttgcatttc

SEQ ID NO: 24247 - DNA, 201 bp, Homo sapiens
catttgtatttactttgatttaaagatactgtcttacatttgatattgtcagttggtatcaacatttaaaaacaggtttacaattgataatgagaaaatamcttttattcgaggaatgcaagtccttttattttttatttgtttttgagatggagtcttgctctgtcacccaggctgaagtagctgggattacagggggcc

SEQ ID NO: 24248 - DNA, 201 bp, Homo sapiens
ccaggctggtcttgaattcctgacctcaagtgatccacccgccttggcttcccagagtgctgggattacaggtgtgagtcaccgtgcctggtcgggagtcytaccttttaataccacctgctttgtggggttgttgtctgggttcaaagagagaatgtgaaaaggtattgtaggaggccaggtggactacatgttagctgt

SEQ ID NO: 24249 - DNA, 201 bp, Homo sapiens
aaaagagttagtgacaactgttccttggctggcatcaaaaccagacaccaaagaaaagccagcaagtaattttgtaagactaggtcgggctgaccgacgtyatttttctttctcagttttgtgtaacttttctgttttaaaaaattgttttgcattaacacgctgacagaaatatgctgctaatgacatagtcatgatctt

SEQ ID NO: 24250 - DNA, 201 bp, Homo sapiens
aggagttcgaggctgcagtgagctgctgtggttgtgccactgccctccagcttttgtgacagagtgagagcttgtctctaaaaaaaaaaaaaaaaaaaaarggaaaaaatatagatgaatacttgaggaaaattaagcgttaggcatactatatatctgaaaccgattttattgacagatactgcaaatgaagtaggaaaa

SEQ ID NO: 24251 - DNA, 201 bp, Homo sapiens
gcctttcctgtgatttaaattaaaaataaagattttggtaagctgtatgtggcatgatgaaaaaactaggagactgtggaagaaggaattaggagatgggratgttggatattgctattcaactactatttgattgtgaaaaaaattacttcttgatttttgaacttcaacttttctcaattgttggtgacctctagagtc

SEQ ID NO: 24252 - DNA, 201 bp, Homo sapiens
atgagccaccgcgcccggccaactcctgaactttctatggtggagtcatttttgtcttttacgttttaagactcacacagatgtttgcaaaaacaccgttwgctgaaagtggaaagtttggtgatgggtattttgcttctaggaagcaaaaacatcagagtgacacatcatggatcaggattctgaagaggaatctctccc

SEQ ID NO: 24253 - DNA, 201 bp, Homo sapiens
gcctatgtcccccaacaccctcccctcaaaaaaagacccgcagggacaatatgggaaaccgcatctctaccaacaaaaatacaaaaattagctgagcatgrtaggtaccatgcacctgtagtcccagctactcaggaggctgaggtgggaagaaggcatgagcccaggaggttgcagtgagctgagattggattgcaccac

SEQ ID NO: 24254 - DNA, 201 bp, Homo sapiens
aacaagtctaccctttatgacttatctgaatttcttattagtataagaaagtcttatcagaataagcttatcaatgtatctatggactatcatatgaaacrgtatttcctttccttttttctgaagcttaagttttaaggagagactcttagtatcttgagatacggtgaaccttagtttctagtttgcttccttagttag

SEQ ID NO: 24255 - DNA, 201 bp, Homo sapiens
gtaatgtgtaatgggggttgtttatttatgtatttattttagccttagaggaagtttaaatattctgcagaaatgtggggataaatgaaagctgttttagwctttggtcgttagcaggcaaataatcctccagcagagtatctgcatttttgttttaatgtctttcccttcatagaccactgaacttttaggtctttaaag

SEQ ID NO: 24256 - DNA, 201 bp, Homo sapiens
ctcttgaccttgtgatctgcccgccttggcctcccaaagtgctgggattacaggcgtgagccaccatgcccagccagagctgtcttattgatagacagactttttttttttttttttttttttgaagacacgggggtctcactatgttgcccaggctggtcttgaactcctggcctcaagtgatcctcctgcctcagcctc

SEQ ID NO: 24257 - DNA, 201 bp, Homo sapiens
agtaatgtgtaatgggggttgtttatttatgtatttattttagccttagaggaagtttaaatattctgcagaaatgtggggataaatgaaagctgttttakactttggtcgttagcaggcaaataatcctccagcagagtatctgcatttttgttttaatgtctttcccttcatagaccactgaacttttaggtctttaaa

SEQ ID NO: 24258 - DNA, 201 bp, Homo sapiens
tcttgaccttgtgatctgcccgccttggcctcccaaagtgctgggattacaggcgtgagccaccatgcccagccagagctgtcttattgatagacagactttttttttttttttttttttttgaagacacgggggtctcactatgttgcccaggctggtcttgaactcctggcctcaagtgatcctcctgcctcagcctcc

SEQ ID NO: 24259 - DNA, 201 bp, Homo sapiens
tgcctcctagaagcatgattcaatgaaagttgagtcctttgcattctagattactctgtggcattcctgaaactctgttctctttgtttttgtggcactgytttctccttcctttgaaactatcctttttttttagagacagaatcttgctctgtcacccaagctggagtcagtggtgcaattatagctcactgcaacctc

SEQ ID NO: 24260 - DNA, 201 bp, Homo sapiens
cttgaccttgtgatctgcccgccttggcctcccaaagtgctgggattacaggcgtgagccaccatgcccagccagagctgtcttattgatagacagactttttttttttttttttttttttgaagacacgggggtctcactatgttgcccaggctggtcttgaactcctggcctcaagtgatcctcctgcctcagcctccc

SEQ ID NO: 24261 - DNA, 201 bp, Homo sapiens
ttgaccttgtgatctgcccgccttggcctcccaaagtgctgggattacaggcgtgagccaccatgcccagccagagctgtcttattgatagacagactttttttttttttttttttttttgaagacacgggggtctcactatgttgcccaggctggtcttgaactcctggcctcaagtgatcctcctgcctcagcctccca

SEQ ID NO: 24262 - DNA, 201 bp, Homo sapiens
ttcttgtaggagttttgaagtcactggtagatgattgtctagattccagtattgctgtgactccttttccctcactgtggcctgtgctttattttctggaygttctccttcccttccccccaccaatcttctgtttttcttctgtgttctgatgtgccttggtgtatgtctgcttttatacattgtgttggggtctctatg

SEQ ID NO: 24263 - DNA, 201 bp, Homo sapiens
agtggcatacctagtgtagttgacatccggcatggattatttttacaccaccctagtgtacaacaaaattattttcattaataattagagcaggaaacatrtaataataatcaccagaagagaaactcagtgaaagttttcccttagtgaatctacaatttttaattctatcagttaaaaataaatattactgtacaaaga

SEQ ID NO: 24264 - DNA, 201 bp, Homo sapiens
gtaacttttcttctttgatctgttaatatgatggattgtagtaattgatttttgaatattgaaccaggcttgaatttttgcagtaaacaccatttggtcayggtgtataatttcttttatatattgctgaatttcatttactaatatttcattaagggttttttgctttcatattcatgaggaatattggcctatatagct

SEQ ID NO: 24265 - DNA, 201 bp, Homo sapiens
ggcttatagatgtgtatctgtgtgttttgtttcgttagggattataaatagcattgcatttttaatttcagtgactacgtgttcattgccagcatatggaraatacaatggatttttatatgttgatcttatatcctctgactttgttgaacttgctttttagttctgggagatttttgtagattctttggaattttcttt

SEQ ID NO: 24266 - DNA, 201 bp, Homo sapiens
aataaatgataataagtaactaaatattatctacataatattgtttttactagtcactaatatttttagactcatacactagtaggtgctgattctcaacrctaaaattacaattcttgcaagctgataggcttcactctagtataatgccaccttattatatttattaataaaagttagaatgaaattaatcgttgacct

SEQ ID NO: 24267 - DNA, 201 bp, Homo sapiens
gattggcattatttgaacctctcactgacgtttttctgttgggtcatttgtttttccaaatgggaatattgacaataaatgacttacttttgggagacctracaggttttgaaattcacaatactaagcactatcaaattcaaatgcaaagcatggaaactcctttattcctgaaatctttcctattatcattctcaaacc

SEQ ID NO: 24268 - DNA, 201 bp, Homo sapiens
gaatctagaagtgaagaactttggaatggtggcgtttactggagtgtgttctaaatccctgtctgtgtttcaagtcgttgctaatctcccttgtggctttytgctgttaccatccatcgtaccttaggcctgcagctgcatagaggacagggcgtgataatcatgattgtgttggctcatcccagaagctggcatgtttag

SEQ ID NO: 24269 - DNA, 201 bp, Homo sapiens
gtgtagttctgtgtcatcacctgtgcacattagtgtagccactcctacagtaaagaaacagaactatttcatcacagaggtcttcctctgtagctaacccytagccatcactaacctgttcaccaactccatacttttgtcattttgagaatgctatataagtgaaatcatatatgacctgtgagattgactggggttttt

SEQ ID NO: 24270 - DNA, 201 bp, Homo sapiens
gattctccaaaaaaaggaaaataatgagtatatctaatttttatgttatagtaagtctgaagtgataaataaatcaaattgatacattttacttacaaaamtggtaccattgttttgaatacagatattattttaatagcatttaatgaaaaatatgattgcatttacacaagctaatttagaaagactatgcttaatcac

SEQ ID NO: 24271 - DNA, 201 bp, Homo sapiens
tgtttgttggctggaattgccctactcttctgcccatatcaaaatcaaagggagtaaaagcaccagtataggttttgatggatagagcttgacccctggarctggggctgcggtgggagctcccttctttaccttccctgaaacacagtttcccatcacttcacacagtcagatctgttaagcaagggatatgtgggcagg

SEQ ID NO: 24272 - DNA, 201 bp, Homo sapiens
gaaaaacattctcccccggggggcggccattcaggatggccgacttaaggcaggagacagacttatagaggtaagtgacttccccagcaggatgttccctrattcttgaaatgttccatttccaggagccaacttttaaaaacattttcataaaatatgaaattcagttatatacattttagcggaagtatgcgtcacaaa

SEQ ID NO: 24273 - DNA, 201 bp, Homo sapiens
atttagattaatgacagctgtagaaagaaatcataaatgttttacatatttcatctcagcctatgttttatggtataaagatcctaaagtaatttcatggrtgtagggtattaaaatatgaaacagcaaaaagggacagcttgccttgcacaccgtgatggcacaggaaatgtcctaattttgtcatatattaagtgttag

SEQ ID NO: 24274 - DNA, 201 bp, Homo sapiens
cagggcccaggcaatcctctcacctcagctgggtggctgggattacagctgtgcaccaccatgcccagctaatttttgcattttttgtagagacagggttwtactgtgttgcctaggctggtctagaactcctgggctcaagcagcacgcccccatcagcctcctaaagtgctgggattacaggtatgagccgagaaggct

SEQ ID NO: 24275 - DNA, 201 bp, Homo sapiens
tgtggcatctccacttctctcccaagtgtttcttcccttaaaccactgtcctgaatccttgtcccagggtctgcttgtgattaaatccagactaaaacagygttgagtgaatgaataaataaaacttttgagccgggtgcggtggctcacgcctgtaatcccagcactttgggaggccgaggtgggcggatcacgagttca

SEQ ID NO: 24276 - DNA, 201 bp, Homo sapiens
ttttgcattaacacgctgacagaaatatgctgctaatgacatagtcatgatcttgatgatggtgataataactgtagccagccttccttcactctttgctscccatgtgccaggcactatgctacacgtgggacccctttaatctcacagtgatcctgtgtggggggcatagttgttgctgttacctcagatgaagagggg

SEQ ID NO: 24277 - DNA, 201 bp, Homo sapiens
ggaggaaaacaatgatcaaattaatcatgttttctatttagacatctatccctaaatttagtgagtttgtttagataagacgacctggcttgattacagcyctgagtagccattggtaaatgaaagagcatttgaattccgcgtctagcacattattccagggagccagcaaatacatattcatatgacagatgcactaat

SEQ ID NO: 24278 - DNA, 201 bp, Homo sapiens
aaagttgggaattatcatacctgtaaagcacttcttcatctgcctttaacaggatgtgaatttggctgtgatgtcatggtatcacctccattgtctgttcytgtcaaagagaaagctacatagaaaagtgtttctcagacttgaggagtataggaattttttttttttatagaaagacaatctcttggtactgcagtattg

SEQ ID NO: 24279 - DNA, 201 bp, Homo sapiens
tgccaggcactatgctacacgtgggacccctttaatctcacagtgatcctgtgtggggggcatagttgttgctgttacctcagatgaagaggggaggctgrgcaatgttgagtcaaaccacagggacaggcagagccacgttctgagctgcaccgtctttcttcctgatgtaaccattgtgcccagcacatttagcatcac

SEQ ID NO: 24280 - DNA, 201 bp, Homo sapiens
ttccatgaagaaaagtgttatttaaaaggaaaaaagtttgccatttcagaacttactgatgatcatgacctggaaacagttccctccagataaatctgcatgacaaccacctaacagatatctttttcctcttttctctggcctctgctttgattacttaacaggtcattcattaccaggcagaaagtttgaaaagcagta

SEQ ID NO: 24281 - DNA, 201 bp, Homo sapiens
gaaactgagaacagggcacatccctgtctggagtcttggaatctctacatcattgcaggtgatacccctaggaaactggaacttaagatacaatttatctrcctttcctaatttactctgaaagcaaaagttctagattagattcctgtggtccgtggtgggagagtcatctgtccaaggccacataccttgtaagtggca

SEQ ID NO: 24282 - DNA, 201 bp, Homo sapiens
tgcaagctattagcataatttaaaaaatacctgctttgtaacaaaaactaaagctgattgaggttacagacttctagttattcttttccttctatttcctyctttcctttggtctgtatgtttcagccctgtgaaatagtcaagggtttaaagtctttgcacaagcccagagttcttgtacacatctgtctgtcagtgtat

SEQ ID NO: 24283 - DNA, 201 bp, Homo sapiens
ctgcttgtaatttgtatatctggaaatgttcttctcttaaaacatttttacagcaaccattttgataaaaaaatcttattccatagatagtatatattttyttacattgaatgattaacttttcaagaatctcctctagattaaattggagaaagtttgaggggagggcaaggaatgttagtttgattatatcagcagaaa

SEQ ID NO: 24284 - DNA, 201 bp, Homo sapiens
taggaaatgactgtcccggagggtcttggatgaagggccatccgctaatactgaggaagtcattgggagccagtgaaaatttttgagcagggaaattgggrctgtattttaaccagatggagctggtttgatggtaagggtgtactagagaaggggaaccccacattctgaattaatgtcacttaggaaaggaccccttgt

SEQ ID NO: 24285 - DNA, 201 bp, Homo sapiens
tattgatgggcattaaggttatttactatcctttgctgttgcataaatatactgcagtaaataacctgttatagataagtcattttgtattgagtttctcrcagaagtatgcctaaaaatgaaattgtatgtttacacattgtacaggaatattacatacatttgtaactttgatagatgttgtcaacctgacctcagtag

SEQ ID NO: 24286 - DNA, 201 bp, Homo sapiens
aggaagtcattgggagccagtgaaaatttttgagcagggaaattggggctgtattttaaccagatggagctggtttgatggtaagggtgtactagagaagsggaaccccacattctgaattaatgtcacttaggaaaggaccccttgtaagtatgaaatggttataattgtgtgtgtgtgtgtatgaatttgagaaaagtg

SEQ ID NO: 24287 - DNA, 201 bp, Homo sapiens
accatcaaagtcatgatggtagacacaagttttccaaagttctgattttcacttgaaagctcaaattttatcattggcaacaaatactgtcagtggttttyctcaaagggacaggctcattttgctcattttcaagaaaatggctttttaaatgcctaagtctgaataacaggtttttgtcagttgtccttttttgggaaa

SEQ ID NO: 24288 - DNA, 201 bp, Homo sapiens
taggaggtggtttattcagcaatctgattacaacaacttcagatcggtcagggaaatgactgaggggtcacagcattaaaccgtggaagagctatagaaaktctgatataggaatagatagggcttcatggtatctgccatcattggtgagacttaaggatagattctgatgctgccagatagtagttaagatgtgggttt

SEQ ID NO: 24289 - DNA, 201 bp, Homo sapiens
aaagtgttaggattacaggcgtgagccactactcccagccataaatttagatttaaattatttgtaggctgggtgtggtggctgtctgctgtaatcccagyctttgggaggctgatgtgggaggatcacttgaggccatagtttaactccagcctggatgacatagcatctctacataaagataaaaaaatttagccaagt

SEQ ID NO: 24290 - DNA, 201 bp, Homo sapiens
tacaaaaataattaagtttgtcttgaagttaggattagaaaagatgaatatttattaaagaaagcataaacattggattaattgtgttcaactttttgcamcttattttgcagctactccgttaattattgattgcagttttccttaagagacattgtttggcatatttatttgtgaagtaaagcaatttggattctccta

SEQ ID NO: 24291 - DNA, 201 bp, Homo sapiens
ttaccccttgtctggcataatgaagtcacagcatttacgtgtccacacctgtctcagcccccttgatccctcttagtcctgtctgttacctttctaaattctagtcagggtggcctcactcaccctctccaaagaacgacggcagaatcaagtccaacttacttggcgtggcattctcattctagggaagcactgctgact

SEQ ID NO: 24292 - DNA, 201 bp, Homo sapiens
aaaatttaaaacagtcaagcatttgaaacaacaacaacaatgaaaatagagccagggaaccagcttgttcaggaaaaggaataaatcattctagctgacartactcagtagactgctttgtagctttttgagatagacatataaaaagggacactgatttgatggaacttgaacaggatgatggataagtgctccaggcct

SEQ ID NO: 24293 - DNA, 201 bp, Homo sapiens
taacatatcaatgacatgggacagaatatatcactttacaaatctattattacactgtaattttttgctaggacttctttcctcaaaaataaccataattyagaattgataacgttgcatttttttcttggtgaatttcttaagccagtggtcatgatataatatcctcctgatactgctggattcaagaacaggtatcaa

SEQ ID NO: 24294 - DNA, 201 bp, Homo sapiens
cacaaacaccaatttttaaaaactttggttttagcagaaagatcttaggggaaccaggattccatctgaaagtagacttcagcccacttctctcagtctgygtctgcctctgccttgacacttcttcccctgagccctctgctcaaggcggaggctccgcttttggtactgatgtccaccaggctgtttcagaaagaagcc

SEQ ID NO: 24295 - DNA, 201 bp, Homo sapiens
cagagagacaatgctcgctcgtctctgagtgccagtcacccaatggtgggcaagtggctggagaaacaagaacaggtaacatgacaaatccttatatgtgygtcattgctgtaacatcctgtcccataccccaaagatgtttctcccatctcaatcactggtgatgattaaaagttaattattctaacaaactttagttaa

SEQ ID NO: 24296 - DNA, 201 bp, Homo sapiens
gtggctggagaaacaagaacaggtaacatgacaaatccttatatgtgcgtcattgctgtaacatcctgtcccataccccaaagatgtttctcccatctcartcactggtgatgattaaaagttaattattctaacaaactttagttaagtaccaatctctatgtcagagtttatctaacataaatgcaggatatttctggc

SEQ ID NO: 24297 - DNA, 201 bp, Homo sapiens
atgtaactgagaggtttaaggacaccactggttttgcatcccaaggagtttggaaatgaaagtatttagtatgtaactgagaggtttaaggacaccactgrttttccatcctaaggagtttggtcacttcggtggttattcccgtacctggtaccttttctggatatataaagactagactttatgatcataaaaagttcc

SEQ ID NO: 24298 - DNA, 201 bp, Homo sapiens
gagaactctgcagcccagatgtcagtagtgccacggttagaaaccctgaattaaatacatcattgtttgtatagtcaaaatagcagttaacttaaaacttragaaacattttgttgattccagtatattgaacagtatcctgaataacactcttaaactagaagacaaacatgtgattactagttaataaaaatgtaagaa

SEQ ID NO: 24299 - DNA, 201 bp, Homo sapiens
aaaaactgagctcatactgatgtcctggattccattctgagcaccagtttattctagctttttcttctctgtaacttctgtttctgactgtgaaaacatcygcttttattatcaaacatatttgcactcttttgttcattcttggtgtgtgtgtgtttgtgtgtgtgtggggggcgtgtagtagagtaagaattgctaaag

SEQ ID NO: 24300 - DNA, 201 bp, Homo sapiens
atcttagcctctaatctcagcactttggggaggctgaagcagcaggattgcttgaggccaggagttcatactgagacactgtctctacaaaggaaaaaagaaaaaaaaaaagagcaacagaaaacaaaaaaacatagccgcatgtagtgaggtgtgctggcatgttcctgtagtcccagctactcaggaggccgaggcagg

SEQ ID NO: 24301 - DNA, 201 bp, Homo sapiens
aatagtacttcatgctgctgagcacttcttttgagagattgacttgttagaaattgactgctaattaatattattttctgcgtcatttggaacaaaagaayattcaaatccagaacccatcagtaatataatgaaactgatgtgcaagaagtttggggagattatttaggtttatgcctcccttgaaaagagtgtgttcct

SEQ ID NO: 24302 - DNA, 201 bp, Homo sapiens
taaggcagaagaatcacttgaacccaggagacagaggttgcactgagccaatatcataccattgcactccatcctgggtgacatagcaagactccatctcaaaaaaaaaaaaaaaattagcaggcgtggtggcgtgcacctatattcacagctacttgggaggctgaggcaggagaatcgcttgaacccgggaggtggagg

SEQ ID NO: 24303 - DNA, 201 bp, Homo sapiens
gcagggggaggatcacccaaaggaaggatgagttgagctgcagtatttttgaagtctgccatctgctgaagtactctgagggcccaataaagccttccatrgtggactaaaactgctttctcaacagacggttctttccagttgttttgtagcttaaatttcatttcgccatgaatttgggttttatttgatcaatttctg

SEQ ID NO: 24304 - DNA, 201 bp, Homo sapiens
aaggcagaagaatcacttgaacccaggagacagaggttgcactgagccaatatcataccattgcactccatcctgggtgacatagcaagactccatctcaaaaaaaaaaaaaaaattagcaggcgtggtggcgtgcacctatattcacagctacttgggaggctgaggcaggagaatcgcttgaacccgggaggtggaggt

SEQ ID NO: 24305 - DNA, 201 bp, Homo sapiens
accattgcactccatcctgggtgacatagcaagactccatctcaaaaaaaaaaaaaaaattagcaggcgtggtggcgtgcacctatattcacagctacttkggaggctgaggcaggagaatcgcttgaacccgggaggtggaggttgcagtgagccgagatcgtgccactgcagtccagcctggtgagagtgcgagactct

SEQ ID NO: 24306 - DNA, 201 bp, Homo sapiens
tgtatttttagtagagatggggtttcaccatgttgaccaggctggtctcaaactcctgacttcaggtaatccgcccgcctcagcctcccaaagtgccgggrttataggcatgagccaccccccaacaagcctttttttttttttttttttttttttttttgagacagtcaggctccgtcacccaggctggagtgtagtggc

SEQ ID NO: 24307 - DNA, 201 bp, Homo sapiens
tgaccaggctggtctcaaactcctgacttcaggtaatccgcccgcctcagcctcccaaagtgccgggattataggcatgagccaccccccaacaagcctttttttttttttttttttttttttttttgagacagtcaggctccgtcacccaggctggagtgtagtggcgtgatctcggttcaccccccctcccaggttcaa

SEQ ID NO: 24308 - DNA, 201 bp, Homo sapiens
aaaaaatcaatgctatcaaccaagccattaatagaaataattttttctcttttatgtcaactttgggacccttttctcctctctgtttctttctttctttyttttttttgaaataaggtctccctctttttcccaggctggagcacagtggcgcaatcacagttcacacagcttcgaactcccaggctcaagccatccttc

SEQ ID NO: 24309 - DNA, 201 bp, Homo sapiens
gccatcaccctccccgtcagtcctggtctccttactctgctttgctttcccccttagcactgtgcagtctgatgttgttatatgctaattcgttacctgartataagcagtagaagctctatggcagttgaaatgacctaatgtgctctgtttactgtttatagcctgggtgtcccaaataagccctgactgcatggtaga

SEQ ID NO: 24310 - DNA, 201 bp, Homo sapiens
attagccgggcgtggtggtgggtgcctgtattcccagctactctggaggctgaggcgagagaatggcgtgaacctgggaggcggagcttgcagtgagcggrgatctcgccactgcactctagcctgggcgacagagcaagactctgtctcaaaaaaaaaaaaaaagaaagaagaaaaggaattggaagggtggtagcgcag

SEQ ID NO: 24311 - DNA, 201 bp, Homo sapiens
tactggtttgggattgagagcaaaaattcaaagcagttggtaaacctttaacaagataagattcccatcatttcacctttacaattgtcatgatgaaaaaygtattttaaggctggagtcatttcattccctggagaagaaaaaggttcggggatggtggccaaaggatttcagagacctcttgattttcttattcctcct

SEQ ID NO: 24312 - DNA, 201 bp, Homo sapiens
actggactgtactacgctatacattcccatgtggcagcgtggcagcatgtactgtttttttttttttcttttgagacagagtttcattcttgttgccctcrgctcaccgcaacctcggcctcctgggttcaagcgattctcctgcttcagcctcccgagtagctgggattacaggcatgtgccaccatgcccggctaattt

SEQ ID NO: 24313 - DNA, 201 bp, Homo sapiens
aggtaaggtcaaattatatcgctgtcctgggagtcatccttttcatcacttattgcgtgtctctttgttgggtgagtaactccatttattaaactctggartaatgatttatggaagaaattgtggcattgatgagtgggcattcacttcgagaatcttgatgtgttgggatgttaaaaaggtagcaatcttgttttctct

SEQ ID NO: 24314 - DNA, 201 bp, Homo sapiens
gtactacgctatacattcccatgtggcagcgtggcagcatgtactgtttttttttttttcttttgagacagagtttcattcttgttgccctcggctcaccrcaacctcggcctcctgggttcaagcgattctcctgcttcagcctcccgagtagctgggattacaggcatgtgccaccatgcccggctaattttgtatttt

SEQ ID NO: 24315 - DNA, 201 bp, Homo sapiens
cacaaacctagatggtgtagcctacaacacacctaggttacatggtatatcctgttcttctaggctggaaacctatatagcatgtagctatactgaatacrcagctgggacacaatgcattcatatttagatatttgtgtatccaacatatctaaacatagaagaagtatagtaaaaatacaggattttaatcttatgtga

SEQ ID NO: 24316 - DNA, 201 bp, Homo sapiens
ctttaagaattcacatgaccttaaataaaatgttcgatttaacttaaaacaaatcatgtcaagcatgtaagcaaacaaattccgaaatggtgaactgtttytcttattttagattattttcttaaaatacccatctgtatttgtaatgaaggtctattctccttttaaaatatgtcagtgctcttaaactggtggcatgag

SEQ ID NO: 24317 - DNA, 201 bp, Homo sapiens
gagctttctctgccgccttgggcaagtgactttggccctgggtcaatgtcctggagtaagatggggctaacaccactgcactgatttgctgggacaggtgstggaaagtggtggtccagggctgggagaggagaggaagggcaatgtttcctaggagaaactgcactatgctggggcagctgcggtgctgcaaagcgcagg

SEQ ID NO: 24318 - DNA, 201 bp, Homo sapiens
agaaactaaaaaccctcaggaagcaagcctctcatctgtggttaagagtttacagacacatgctcattctcacaacccagcaatgtgtatcgagggctgtrataggttttgtattagctgtaaaaggctagttgtcttgacctcagcatctgtccgttacagcttctctgttattcggataaatttaaacactctttttgt

SEQ ID NO: 24319 - DNA, 201 bp, Homo sapiens
gtatctctgttaattcaaatacttttaaaagtgtttgaatatacttatatggttggatatttttagagagaaataccatgtttggaaacatttcagctggmaaatgcattgaactggatattgtcagacattttctgagaacaaatcaaaatcgtttagtacaatgtaaaatataaaagacatgcaaaagccagagcaatt

SEQ ID NO: 24320 - DNA, 201 bp, Homo sapiens
agggagcgggcagggcagaaacccagccgagcaagctgcaggctcgagtccccgcgggcggagaggctcgggctggagcctccggggcggtgaggaggggrctcaccgcactgagcacaaactgctttccccgggagcgcctgcacccaaaaccctccagttcgaggaatgggattaaaagtgacaaagaaaggggaaggg

SEQ ID NO: 24321 - DNA, 201 bp, Homo sapiens
tttggaaacatttcagctggaaaatgcattgaactggatattgtcagacattttctgagaacaaatcaaaatcgtttagtacaatgtaaaatataaaagamatgcaaaagccagagcaattattgcaaccttccttcttcatacatatgcatacctgactcacattcagaccagtaagaccacaagtggatatcattagtc

SEQ ID NO: 24322 - DNA, 201 bp, Homo sapiens
aaagaatccgccatggactagtatttttaagttattttctccataaagtgcatgtatgttatcaatttgccttgcaaaatcatttttataagaaagagagstatttctgtttttaccaattatttgtggtatttgaaagtcattcatttacaaaaacataagaatgatatccatttactcattcattcattcattgagcaa

SEQ ID NO: 24323 - DNA, 201 bp, Homo sapiens
caagtgattctcctgctttagcctcccaaagtactgggattacaggtgtgagccatgatgcctgtattttctttctttctttttttttaacgaatgtgagrccttttaaatgttgcccaggttggcctcgaatgcgtagcctcgcctccttgtgcgccaggacaaccggcctgagccaccggggctcccctcagtgcctat

SEQ ID NO: 24324 - DNA, 201 bp, Homo sapiens
gctaattaaaaaaatttttttgtacaggtggggtcccgctatgtttcccagactggtctgaaactcctggcttcaagtgattctcctgctttagcctcccraagtactgggattacaggtgtgagccatgatgcctgtattttctttctttctttttttttaacgaatgtgaggccttttaaatgttgcccaggttggcct

SEQ ID NO: 24325 - DNA, 201 bp, Homo sapiens
ttctgagcagctgggactactgatgcacaccatcactcctggctaattaaaaaaatttttttgtacaggtggggtcccgctatgtttcccagactggtctsaaactcctggcttcaagtgattctcctgctttagcctcccaaagtactgggattacaggtgtgagccatgatgcctgtattttctttctttctttttttt

SEQ ID NO: 24326 - DNA, 201 bp, Homo sapiens
acatctctgccctgtggaaattgcgtcagttagagatggacctgaaagatgatcatctgtaagccacagctgccactttgaatgtcgaggtttggaatatkccatagacagccctgacattctaaaattgattgaaattttgtgaccttcagaggtaactaatatatttccagtagtgtgacttctggaagtaatatagtt

SEQ ID NO: 24327 - DNA, 201 bp, Homo sapiens
gctgctgtgctcacctgtacgcttttccctttggcactctctgtactctgagcagctgagatgagcacgcctgtttctccaccacgtttcctttttacttytacagacgcaggttttccctcggggttctgccatccttctttacaccttgactttgtgcctttccatagagctagcgaggcgtggcttataacatgtttt

SEQ ID NO: 24328 - DNA, 201 bp, Homo sapiens
ttgtatttttagtagagacagggtttcaccatgttggccaagctggtctcgaactcttgacctcaactgatccaccctcctcagcctcccaaagtgctagkattacaggtgtgagccaccatgtccggcctggcttttttttttcttttctttttgagatggagtttcgctcttgtttcccaggctggagtgcaatggtac

SEQ ID NO: 24329 - DNA, 201 bp, Homo sapiens
ctgacagtctttgtcagctggaatagcagccttggcctgaatatctattggtgtttatttgcagttgtctcaattagttctgctcttagccttttgggagrcactgggctcctcctcgcactctgttggccactgtgggttggctttgagggtgccatcctgacaaaatcagttgttggggactataagactgaacaagtt

SEQ ID NO: 24330 - DNA, 201 bp, Homo sapiens
tttctaggatctctgtgtggacagagctgggaactctttatactcacacattcattaacatttattgatatacttacccatttgtcggtgtatttacttawctatgtacttataaaaactgtgagtttggccgggagcagtggctcacgcctgtaatcccagcactttgggaggctgaggcgggcagaacagttgaggtca

SEQ ID NO: 24331 - DNA, 201 bp, Homo sapiens
tttgcttctgagattattcatcttgcccatttgccagtcttaccatgttctctttgagggaacactgcatgtgttcatgataaaatcacaactcgtgccayttcctccagtttggagtcaacctatctgtatgtgattagcccatttctgaattattttgttctgtcttactgtgctatcctactttttattaatacttaa

SEQ ID NO: 24332 - DNA, 201 bp, Homo sapiens
tgaggcgagagaatggcgtgaacctgggaggcggagcttgcagtgagcggagatctcgccactgcactctagcctgggcgacagagcaagactctgtctcaaaaaaaaaaaaaaagaaagaagaaaaggaattggaagggtggtagcgcagttgtgtctattaaattcttcttgcacacaggatgttacactatattcatt

SEQ ID NO: 24333 - DNA, 201 bp, Homo sapiens
acatagtgagactgtaccactacaaaaaataaaaaaacttagccagatgtggtggtgcatgcccgtagtccagctactagggaggctgaggtgggaggatyacttgagcccaggaagttgaagctgcagaaggttgtgatcgcaccaccacactccagcctgggcaacagagtgagactcactctctctcaaacaaaaaaa

SEQ ID NO: 24334 - DNA, 201 bp, Homo sapiens
tcactgcaacctctgctgcctgggttcaagtgattcttgtgcctcgacctcctgagtagctgggactacagtcatgtaccaccatgcctggcttttttttktgtgtgtgtgtgtttttagtagagttagggttttgccacattgcccaggctagtctctaactcctggcctcaagtgattcacctgcctcagcctcccaat

SEQ ID NO: 24335 - DNA, 201 bp, Homo sapiens
tttgcttttataagtaacctttagaagtacccttcagagaatgtccttatttatcaatttatgttggcatctctgattattttctttgactagattcctcmagtagacttatttggtaaggagatgaacatttttaaagctattagtaattgtttcacataaattctaggctaataaagtatgaagtagttaggatgtata

SEQ ID NO: 24336 - DNA, 201 bp, Homo sapiens
ttgccacattgcccaggctagtctctaactcctggcctcaagtgattcacctgcctcagcctcccaatgtgttgggattacaggcatgagccaccacgccygcctgcccatactattttaaacagtggagaaacttctgtaggaaatgagacggacaaatgaagagagaaagagcctgcctgtgacctacagaaaatggag

SEQ ID NO: 24337 - DNA, 201 bp, Homo sapiens
tgtataaaagtgtattcatctagtacattcagtattttgcagtagttatttaaattaaaatttgccaggccagcccgggtgacagtgagactcgggtctcaaaaaaaaacaacaacaaaattccacttttttttttttgagacagagtcttgcactgttgcccgggctggtgtgcagtggtacagtctcggctcgctgcaa

SEQ ID NO: 24338 - DNA, 201 bp, Homo sapiens
gtataaaagtgtattcatctagtacattcagtattttgcagtagttatttaaattaaaatttgccaggccagcccgggtgacagtgagactcgggtctcaaaaaaaaacaacaacaaaattccacttttttttttttgagacagagtcttgcactgttgcccgggctggtgtgcagtggtacagtctcggctcgctgcaac

SEQ ID NO: 24339 - DNA, 201 bp, Homo sapiens
gtgtattcatctagtacattcagtattttgcagtagttatttaaattaaaatttgccaggccagcccgggtgacagtgagactcgggtctcaaaaaaaaacaacaacaaaattccacttttttttttttgagacagagtcttgcactgttgcccgggctggtgtgcagtggtacagtctcggctcgctgcaacctctgcct

SEQ ID NO: 24340 - DNA, 201 bp, Homo sapiens
attcagtattttgcagtagttatttaaattaaaatttgccaggccagcccgggtgacagtgagactcgggtctcaaaaaaaaacaacaacaaaattccacttttttttttttgagacagagtcttgcactgttgcccgggctggtgtgcagtggtacagtctcggctcgctgcaacctctgcctcctgggttcaagtgatt

SEQ ID NO: 24341 - DNA, 201 bp, Homo sapiens
gctccacatccaagtgactttaaatatcaattatttatttttttcacctaaacagagtatattttgtatatagtctctgtactctattctgtatatatttyatatatactctttatatatatacacacacacacaagcacacaagagaaatgaaaatgtgtacacaaaacctgtacatcagtgttcatagcagcaagccca

SEQ ID NO: 24342 - DNA, 201 bp, Homo sapiens
cttttaatgtaaatcacatcatgctcagaagtgactaagacaattccctttgtgaattacagatgtatgatattgcatgatacgaactgtacggtgtatawatatatatatatatatatatatatgcacatacgtgtgtatttctggggtgatcttttatggtggtataaatttaagtcattttagagatgatagtcaagt

SEQ ID NO: 24343 - DNA, 201 bp, Homo sapiens
tcggctcactgcaacgtccgtctcctgggttcaactgattctctcacctcagcctcccaagtagctgggattacaggcatgcaccaccacgcccagctaatttttttttttttttttttcatttttagtagagacggggtttcatcttgttggccaggctggtcttgaattcctgacctcaagtgatccacccgccttggc

SEQ ID NO: 24344 - DNA, 201 bp, Homo sapiens
taaagatcttaacttgaagtgtaagatcatgaaagcaatgtctctatgtgtcaattcatcccacctgtgtgagtataagagttgactttttaatttttttwtttatgttatgttatgttatgttatttttgagatggagtttcgctcttgttgcccaggctggagtgcaatggcacgatctcagctcactacaacctccac

SEQ ID NO: 24345 - DNA, 201 bp, Homo sapiens
actgctgccctggagtcctactgccctccagctcccttgtgttcgtgagttgtccctggcctgggatactctgcccctccttttccctctcctcttggctytcccattttttcatctgcactgctgccagagctgtgctttttgttcagaaagctctttgtggcctctgcgacggccccccggctccccaggtgggctcaa

SEQ ID NO: 24346 - DNA, 201 bp, Homo sapiens
atttgctgccaagcagagcagcaaatggctaattaattcagaaggatgacttcccaacatttaagtgttttgtgggtactggtttggccacagttcatcartttgtgggagcacagggcccagatatggtacaggtagagcagtgaggtgttagtgaaagggagttcggagggggccaggcctcctgcatgaaaagtgagg

SEQ ID NO: 24347 - DNA, 201 bp, Homo sapiens
aacaagcgagcaaacaaaccaggctatcctagatatttgtgttatgaaatgagtttctgtaggtaatcagtttcacttatttttttatttctatgaatttrtagagagcatggtatatacttggcacccagagatagttgtaagaaatacattgtttattttctgtgtgttagaatttgaggattctcaatacattattaa

SEQ ID NO: 24348 - DNA, 201 bp, Homo sapiens
gctgtgaataaagaggccagctagtctgtggagagcatgtgatttatcccatcaagaaagatgtaatgagctcttagaagaatctgctttccatgcagtgycggggataaggactgtggactatttcactgtgcagttgctacaagccattgttccttccctctaaataatgagtggcattgtttttgtaaatgatatttc

SEQ ID NO: 24349 - DNA, 201 bp, Homo sapiens
caagcattctcctgcctcagcctcccaagtagctgggtctactggcactagccatcacacctggctggttgtttaatttttttagaaacggggtcttgctrtgttgcccaggccagtctcaaacttttggacttgggtgttcctcccatctcagcgtcccaaaggctggaattacagacatgagccaccatgcccagcctg

SEQ ID NO: 24350 - DNA, 201 bp, Homo sapiens
gttagatgattttacaaaattcaacaaaaaagctttaaaagctgtaaattagagatataaattataggttacctgttaaaaaagacttccttttcaaggargtattaatagaagacacaactcaaaataatactgccttgatcttgtaaggccttgaggtaattgtgaatccccttgatagaaaaggtaagaagcaaagca

SEQ ID NO: 24351 - DNA, 201 bp, Homo sapiens
tctaagagtgactatatagttcttattggtgtttatttttattttggggggtgtaaattaataagcagcaaaggttgtcatgaatgtttacagacactaawatccagaaattattaaaatcctcatgtttatgtttctctcagcacattaagatagccaccaaagtattaaatttggagttgactaaatttttgccctagt

SEQ ID NO: 24352 - DNA, 201 bp, Homo sapiens
cttgaggtaattgtgaatccccttgatagaaaaggtaagaagcaaagcaaattgggtggattttatatttaagcaatctagagatttataatatctattaygtgcatatacatgtgtgaagacaacatagtaaggtgtgttgttttatagttttctgtgtcctacttaaattggcttgcagtagaattatagttaaattga

SEQ ID NO: 24353 - DNA, 201 bp, Homo sapiens
tatttcatatttctcttctaagaattgtgaaagaacttaattttatttccccagagagagaactataaatcatacgtatatagtaacaaagacaaagaatrtttgtggaggattgaactcaatttagaactgatttacacatcagagcaagcctgctgaaagcataagatttttacgtggttttgccagacaggttgaagg

SEQ ID NO: 24354 - DNA, 201 bp, Homo sapiens
gtcacagaagatattgctgtttcctgctacctagatgtactgaacattttgcagttagctacttagcatggtttagctaattggggactgttactgacacrtggctggatccctactttgcctctcctccttgaatttgagttatataaaggaaatctcagtacttaggaatttaggggaaaatgtttaatttttgatgtg

SEQ ID NO: 24355 - DNA, 201 bp, Homo sapiens
ccaaattaaatatccactgtaaattatcctatagtaaatgtcctgtggtaacatgaacatttcctccccaaaccctcattattctgttgaatgattttgcrtttctctacaatttccacatgttgatgtttgaaccttaatgcaatacaatttttctcatgttgtatttggctaatgttgtctgctgtctgcttactcagg

SEQ ID NO: 24356 - DNA, 201 bp, Homo sapiens
tataaacctgtgatcattatggtggcaaacttcaaccacacttgtagtactaactttagcagggtaaatttcgatttacctttatggtcagtgatattccmgcagcataaaatgcaatttttggaaggctgttcctaaaactcattcccttttcactaagaactgtggataacagactcaaatgtggttcagggtggttgc

SEQ ID NO: 24357 - DNA, 201 bp, Homo sapiens
tgtcccacagaggtgcttcctgttgttttcacatccctttcaggaatacacaagcccccctgtttgtccatctctgagaaagacaaaatagctcaatactycttgcaaaatagaaaatgtcatttgttggttgtggtggtaacagggccggacattattcctcattcccatcccaaaacattgttgactcagctccagacc

SEQ ID NO: 24358 - DNA, 201 bp, Homo sapiens
gtgctcatggtattttagtgttcttttctaagttttaggtcttttttatcagacagtatatacccttcttaatatgctgatgaagcgtggaattaatctcrcatgcataacatttaaagttttccagtggcaagcttaagattcttgttctgtagcgagtttttattggtatagtttgtattactatgattacaaaacatc

SEQ ID NO: 24359 - DNA, 201 bp, Homo sapiens
ggctaatttttgtatttttagtagagagggggttttgccatgttggtctcaaactcctgaccttaggtgatctgcccgccttggcttcccaaagtgctggraatacaggcgtgagccactgcgcctggctgagttttacttatttattactctgctttttaatttatttaactgtaagtttatatatcttaatttttaaat

SEQ ID NO: 24360 - DNA, 201 bp, Homo sapiens
gacttatgcctgggagtgaagggagtggtgtttagtggagattaggaagaagatggaaagtatttcacccccagttgcttgctcactaacgtttaacattrtgattggtgctgtgggttttggtggtggttgtcttttaattacagtttagagaggctgtgtgtgtgtctgtgtatgagagaaagagagattttggtttat

SEQ ID NO: 24361 - DNA, 201 bp, Homo sapiens
aaatataatttgcaaaatttaggactaaggaagtgatccttcaagtttctattttagaatgaaaagttttccactactgattgccaaaaaataaagtataragtttaccagatggcaagacattttagtgatgagtcattttttacaagttcaacaatggaatgagtgatgcgttaaggaagcccaacgagggaatgtctc

SEQ ID NO: 24362 - DNA, 201 bp, Homo sapiens
tcatcagtatttcttttttcttttctcttttttttcctttttgatggagtctccctctgttgcccaggctggagtgcagtggtgccatctcggctcaccgygacttccacctcctgggttcaagtgattctcctgcctcagcctctccagtagctgggattacaggcacctgccacaattcccggctgatttttgtatttt

SEQ ID NO: 24363 - DNA, 201 bp, Homo sapiens
ctaaaattacaagaattagcctggcatggtggcgtgtgcctgtaatcccaacttgggaggctgaggcaggagaatcgcttgaacctgggaggcagaggttrcagtgagccaagattacaccactgcactccagcctgggcgacagagtgagactccgtctccaaaaaaaaaaaaagtatgttggaaaataccaggagagtg

SEQ ID NO: 24364 - DNA, 201 bp, Homo sapiens
gtgaggaggggactcaccgcactgagcacaaactgctttccccgggagcgcctgcacccaaaaccctccagttcgaggaatgggattaaaagtgacaaagraaggggaaggggggctccgtggagacttctggaggcgtggaaggggcgtccccgaggaggggcgacgcagccctgcagggtgctgggcgggcggggtgaa

SEQ ID NO: 24365 - DNA, 201 bp, Homo sapiens
gctggtttgatggtaagggtgtactagagaaggggaaccccacattctgaattaatgtcacttaggaaaggaccccttgtaagtatgaaatggttataattgtgtgtgtgtgtgtatgaatttgagaaaagtgtataactgaagaacactaggtatggttttcttgttttttttttttgttttgtttttttgttcgtttgt

SEQ ID NO: 24366 - DNA, 201 bp, Homo sapiens
ctggtttgatggtaagggtgtactagagaaggggaaccccacattctgaattaatgtcacttaggaaaggaccccttgtaagtatgaaatggttataattgtgtgtgtgtgtgtatgaatttgagaaaagtgtataactgaagaacactaggtatggttttcttgttttttttttttgttttgtttttttgttcgtttgtt

SEQ ID NO: 24367 - DNA, 201 bp, Homo sapiens
tggtttgatggtaagggtgtactagagaaggggaaccccacattctgaattaatgtcacttaggaaaggaccccttgtaagtatgaaatggttataattgkgtgtgtgtgtgtatgaatttgagaaaagtgtataactgaagaacactaggtatggttttcttgttttttttttttgttttgtttttttgttcgtttgttt

SEQ ID NO: 24368 - DNA, 201 bp, Homo sapiens
cacttggtttttctcttaggttcacttctgtttttgtttctcttgctccttcaactcactgatgacaggtgctttccaaactgccggcctgatgcagaggkgctgattccccatttgctctgcccttctttagggctgctgtaccggcagtgcccactggggggcagcgtgattgcacaccagcctgcaagggtctccttg

SEQ ID NO: 24369 - DNA, 201 bp, Homo sapiens
agcagtgttttcagtggagccatcgtgatgccatctgggtgtgctctgaaacacagtgactatttggggacccagtgtaggccgccattcttcaggtggaygctagacatgaagcaccactgtgccctggactcctgcttcgcctgtggtgatgccatcatggctgtcccctcacctcattcatgttcagattccccctgt

SEQ ID NO: 24370 - DNA, 201 bp, Homo sapiens
cccacctctgcccatcatttcttcctggaatcagtaatcttcccacataacactttaaactatttcagtcagagggcttatgtatggtctgttagttttgwagggacgtcataacaaagtaccaagaactggatggcttgacacacagaaactcattgtctcacagttctggaggctggaattctggcatcaaggctttgg

SEQ ID NO: 24371 - DNA, 201 bp, Homo sapiens
tgggcagtttgaagatattttgagatagaatattgattaggcaaggtctcggcatctcttttgagttagacttaagaacctgtccccacattaagatgggrctctggtgaagttgacttgtttttgtttttgttttgaggtggagtttcgctcttattgctcagtctggagtgcaatggtgtgatctcggctcacctcaat

SEQ ID NO: 24372 - DNA, 201 bp, Homo sapiens
atcctattggaaacagtcagtcaggaaggatgtcctagctaagaagacatttgaagttttgaaagtggctcatctatttcctgattgatacataccattarttcagtttgggtctattattttttgggtccagttttttttttaaaatgaattgataggcatgtttaccagagtgctattactttgtttttggagatgtca

SEQ ID NO: 24373 - DNA, 201 bp, Homo sapiens
tgccactgttgtggaagcgttcttacattctgacttcacagtacaagatgtcacttgatgtcaccaagagttaagaaaagctattttaagtatgctggaaraggaatctatttcagtgtttgcgggagtcactattttgaagcaaactaagaatttctaaggagcttggagacttgcacatcttctgatattgggaggtct

SEQ ID NO: 24374 - DNA, 201 bp, Homo sapiens
ttaaccaatctcttcctaccttccccttcccagtctctggtaagcactggcttactctctacttctatgagatcaactttttatttttatttatttatttwttttttgagacagagtcttgctctgtcgcccaggctggagtgtaatggtgcgtgatctcggctcactgcagcctccacctcccgtgttcaagtgattctc

SEQ ID NO: 24375 - DNA, 201 bp, Homo sapiens
tgatcttcccacctaaggctcctgagtagctgggactgatgcaggacatgtgagccccacagtggggcttagcccataaaggtccttgtgtttgcccaggraagaattcaagggcaagctggggctagaagaaaacagctttgttgaagcaacagtgtcgcagctctgtgactgcttctgcagagcaggggtgctctatgg

SEQ ID NO: 24376 - DNA, 201 bp, Homo sapiens
atttatggtcacctatgtaggtttaggttttgtacactgtggataattatatatgttaactttttaaaagattaatttttattgaagatacagagaaacartaactagcattatttatttgattggctgttcaacttactttatcacctcttcagctgttttccagtccacaattgctcaattatttcacaggcaagtaag

SEQ ID NO: 24377 - DNA, 201 bp, Homo sapiens
gccagtggttcttagcgtgtggtctctgggccctaagggatcactaagatcatttcaggaaggccataagtgcagtactgttttcagagtattatgaaacscgattttgtgttgttcaccgagttgacatctacatcagtggtgcccaggacctgaggggcaaaaatgtagagatcacttggcacaaatcaagacggtggc

SEQ ID NO: 24378 - DNA, 201 bp, Homo sapiens
caaaacaaaagataaaaataacaggacatggtggctagatagccctagctactatggaggctgagacgggaggatcactggagtccaggagttcaggaatrcagcgagctatgattgtgcccctgcactccagtctgggtgacaaagggagaccttgtctctaaacaaacaaaaagagggaagtaagtactcaagacctcg

SEQ ID NO: 24379 - DNA, 201 bp, Homo sapiens
tattatttctaattactgtaatgaacacaaattacatcagattattaataatgctgaaataggccatgggccccagaaacgtagcaaatcataggtgagamgatcatgttttattcatccgaggccaaagcaaaattaccttctttatgcaatgttatattagtcaggacagttagaggtggggaaccttttaggtgaact

SEQ ID NO: 24380 - DNA, 201 bp, Homo sapiens
gtggtgtttgccttgcattgtttgaaatttccatttttacaaaacctgccctacagactttctcatgctaaattattggagcttatatttatctactggtrataattttggcctgcttttgacagaggaatcttattttaatgttgtgtgaatattaattaattttagactcataattaattgacaaaaataactgagttg

SEQ ID NO: 24381 - DNA, 201 bp, Homo sapiens
gctgcatctatactcctacgaactcatccaaacaggattattttgaaacatatttcagacctcatgtcacttcttctgaaaacattttagtatacattttaaaaatagtatactatttttaaacgttaaaaatagtactgtttaataacaaaaatacttaagctatatgtaatagtgttattaaaatatctgaatgttttg

SEQ ID NO: 24382 - DNA, 201 bp, Homo sapiens
ctgcatctatactcctacgaactcatccaaacaggattattttgaaacatatttcagacctcatgtcacttcttctgaaaacattttagtatacattttaaaaatagtatactatttttaaacgttaaaaatagtactgtttaataacaaaaatacttaagctatatgtaatagtgttattaaaatatctgaatgttttgt

SEQ ID NO: 24383 - DNA, 201 bp, Homo sapiens
atttaggctaatgtcaaggacaccgttatctctcctttgtagaaggtgttgaaataatgagagtagcaaaaaaggagtcagaaaatgaagtttttcatctktgcccctgggtgggtatttaaaaatcacacccttccttcttgcatgcaaattaaactgaaagtcattttgtactgtaatattaaccttacattttacaaa

SEQ ID NO: 24384 - DNA, 201 bp, Homo sapiens
tgcatctatactcctacgaactcatccaaacaggattattttgaaacatatttcagacctcatgtcacttcttctgaaaacattttagtatacattttaaaaatagtatactatttttaaacgttaaaaatagtactgtttaataacaaaaatacttaagctatatgtaatagtgttattaaaatatctgaatgttttgta

SEQ ID NO: 24385 - DNA, 201 bp, Homo sapiens
atttgtggattgggggaaatatttaacttgcaagttatttcttttacctgtcaaatatgggagtgaaaagatgggcacacaatatttattctgtgttcagwtttttaaaaacattgctaaacaggttatactaatgaagagttgataaaaagaattttattatttagttactttttgaataaacctgccagttgattaaaa

SEQ ID NO: 24386 - DNA, 201 bp, Homo sapiens
atctatactcctacgaactcatccaaacaggattattttgaaacatatttcagacctcatgtcacttcttctgaaaacattttagtatacattttaaaaatagtatactatttttaaacgttaaaaatagtactgtttaataacaaaaatacttaagctatatgtaatagtgttattaaaatatctgaatgttttgtaaat

SEQ ID NO: 24387 - DNA, 201 bp, Homo sapiens
ctatactcctacgaactcatccaaacaggattattttgaaacatatttcagacctcatgtcacttcttctgaaaacattttagtatacattttaaaaatagtatactatttttaaacgttaaaaatagtactgtttaataacaaaaatacttaagctatatgtaatagtgttattaaaatatctgaatgttttgtaaatgt

SEQ ID NO: 24388 - DNA, 201 bp, Homo sapiens
tatactcctacgaactcatccaaacaggattattttgaaacatatttcagacctcatgtcacttcttctgaaaacattttagtatacattttaaaaatagtatactatttttaaacgttaaaaatagtactgtttaataacaaaaatacttaagctatatgtaatagtgttattaaaatatctgaatgttttgtaaatgtt

SEQ ID NO: 24389 - DNA, 201 bp, Homo sapiens
ctacgaactcatccaaacaggattattttgaaacatatttcagacctcatgtcacttcttctgaaaacattttagtatacattttaaaaatagtatactatttttaaacgttaaaaatagtactgtttaataacaaaaatacttaagctatatgtaatagtgttattaaaatatctgaatgttttgtaaatgttgctttat

SEQ ID NO: 24390 - DNA, 201 bp, Homo sapiens
tacgaactcatccaaacaggattattttgaaacatatttcagacctcatgtcacttcttctgaaaacattttagtatacattttaaaaatagtatactatttttaaacgttaaaaatagtactgtttaataacaaaaatacttaagctatatgtaatagtgttattaaaatatctgaatgttttgtaaatgttgctttata

SEQ ID NO: 24391 - DNA, 201 bp, Homo sapiens
acgaactcatccaaacaggattattttgaaacatatttcagacctcatgtcacttcttctgaaaacattttagtatacattttaaaaatagtatactatttttaaacgttaaaaatagtactgtttaataacaaaaatacttaagctatatgtaatagtgttattaaaatatctgaatgttttgtaaatgttgctttatat

SEQ ID NO: 24392 - DNA, 201 bp, Homo sapiens
cattctgtgctcattttctgcctcctctgatccttctactccctgtctaatatgttgggatgaatattatggcctcacgtactattacttgcctctggttmtaaagatcatggcaaagaaatgagtcgtttggagttcctaatcaaggttctagtctgcatattgaactctgattgacttggaaacccctttgcccaaaca

SEQ ID NO: 24393 - DNA, 201 bp, Homo sapiens
gcacatgaagatacagaacactttctgtatccagaaggctcgcctgtggccttcccagtcaatatcctgcccgatgttcacaccatagattatacatatgyacattatacattctctcattgctggctgcttttctcatattacatctgtgagattcatctgtgttgttgagtgtaacagtagtccatcttgtgcagtatt

SEQ ID NO: 24394 - DNA, 201 bp, Homo sapiens
ttcctgtagacacctctattactgttcggccttagattttctcctaacaaaattatcttgttttcccaaaagcttcttgtttttgtgaagaaactgaaaaygactggctgaagtttgtccaagaaattcattcaaccgtaatttattcagtgtttccatgtagcctgatggggcctaactggaattgataatcttgcttac

SEQ ID NO: 24395 - DNA, 201 bp, Homo sapiens
ccatgtagaatgacagaatggaaataagttgtatttctttatcattgcaataaactttgctatcattttttaatgatatttaatgaatttcaaatgtagtsggaaactgaaggattccatagtgccacagggattggagaaacaagctgtgcttagggcaagcttgaatggttctcaactcttaggagcttacctgaaatg

SEQ ID NO: 24396 - DNA, 201 bp, Homo sapiens
gaagtttcacatgtgacctgtacactcttacagctcttatacatggctgaggggccaggagaggaaaacaccacagtccatttgtcaggaaaaaaagacayacatggggaaaaaggtcctgaaaagacccactttacactcttcatagtgattacttcaggaggattataagaaataatattaatatggaatatggcctgt

SEQ ID NO: 24397 - DNA, 201 bp, Homo sapiens
catgtagaatgacagaatggaaataagttgtatttctttatcattgcaataaactttgctatcattttttaatgatatttaatgaatttcaaatgtagtckgaaactgaaggattccatagtgccacagggattggagaaacaagctgtgcttagggcaagcttgaatggttctcaactcttaggagcttacctgaaatga

SEQ ID NO: 24398 - DNA, 201 bp, Homo sapiens
actttctccatttcctctctccctccctcttctagtttgataggccctaagtttaggcagcctgtgtaggggctacacgttttcatcagtaatacaggccrtgtttcgctgaccacagttggggacagctgcatgtattctttgtgtgttttgttttgttatacattagatacttagataaatatctacatatatgaaata

SEQ ID NO: 24399 - DNA, 201 bp, Homo sapiens
gtgcagtccttaggtgtctttggtgatgctgctgtgaagaaacctactgtgctgtggttgtataaacgtctagcacatacagttgtgcacggtgcatggtrcttgatcatgacaatctttgactctgttactggcttatgtatttactgtactttttattgttattttagagagtcatccttctttaaaaaaaagcccgtt

SEQ ID NO: 24400 - DNA, 201 bp, Homo sapiens
gcagtggtatgatgtttgctatagccttgagctctctgggcacaagtgatcctctcacctcaccctctcaagtagctgagactacgggcatgagccatcayacctggctaatttttgtatattttgtagagttgaggtctcaccatgttgcacaggctggttgacttattttgaagccgattttctttttgtcgtcctcct

SEQ ID NO: 24401 - DNA, 201 bp, Homo sapiens
agcattatcctatgaaccattaagaaatggcctctgggtgctacaatgtgagtggcacttcctttaaaataccccagccaaaaataaaaaaagtgaagcartgaaacagttttggcgaagattaataattactacagctgagtgagtgatacataggagttcaataaattatcctctctacttttttgcaagtgtggcaaa

SEQ ID NO: 24402 - DNA, 201 bp, Homo sapiens
atttttgaaactctgtattgtttcataataaactgttcctttattaattatagatgagttagctttgtcagcacattgggtacaagaaatgcatcgttttrttccttgtttctcaagtagagtgattatagcttcaattaaaaatgacttttttaaaaaactgagattcccatgatgctctgaagggctatgttatgtcaa

SEQ ID NO: 24403 - DNA, 201 bp, Homo sapiens
agcccttaaactatgtttgtggtgctcattgcacttatctgtaaaatgtaatatttcagtttatcactaagcatcttccaaccatagtatcctgtatttaytgcttatatagaaaaaaaatttaataacaaggtgataagattcatttttatatccttctctctgagtcatttgttgcttttcaaagcttatttcttgccc

SEQ ID NO: 24404 - DNA, 201 bp, Homo sapiens
tactggtatgttttgttcaagtgtataagaattgttttgtgtctttgcagccttgtctcttctacctcatgactagcacgctgggcctctgaatttcttgsatgagtcttcttcctgcttaactctaggcactctcttttccctttgtctggtaaaacttctctttggtgctctcctgtctagccttacttatgccatagg

SEQ ID NO: 24405 - DNA, 201 bp, Homo sapiens
ggcactatcttggatcactgcagtctccgcctcccaggttcaagtgattctactgcttcagcctcccgagtagctggaattacaggtgcctgtcaccacasccagctaatttttgtatttttaatagagatggggttttaccatgttagccaggctggtctggaactcctgacctcaggtgatccgcctgccgtggcctcc

SEQ ID NO: 24406 - DNA, 201 bp, Homo sapiens
aacttctgtcccctaaaatgtataaaatcaagctgtaacaaatcaccttgggcaattgttctcaggatctcctgaggctgtgttgggggcatatctttaaycttggcaaaaatgaactttttttttttttgagacagagtcttgctctgtctcccaggctggagtgcagtggcatgatcttggctcactgccgcctctgcc

SEQ ID NO: 24407 - DNA, 201 bp, Homo sapiens
gttctaccctggggatgaaaggaaaggagtccctgaacacacactggggcctacatgagggtggagagagggagagggaaagggaggagggtgatgataaaaataaataaataaataaataaataaaacaactgttggatactatgcttattacttggttggtgaaatattctgtacaccaaacctgtgacacaaaactta

SEQ ID NO: 24408 - DNA, 201 bp, Homo sapiens
tagcacagactgcactactatagtaatatcatagccccctcctgttgttacttgcagtgagctcgagtgttgtgcgtgtctgcttaaagtgcagtgtgatrctcatcatctccttgtgagcaatttgtcttcccaggaaattgcatatcacaataaaaagtaattgctcttggttctcatgcatttttcatcatgtttaat

SEQ ID NO: 24409 - DNA, 201 bp, Homo sapiens
ttctaccctggggatgaaaggaaaggagtccctgaacacacactggggcctacatgagggtggagagagggagagggaaagggaggagggtgatgataaaaataaataaataaataaataaataaaacaactgttggatactatgcttattacttggttggtgaaatattctgtacaccaaacctgtgacacaaaacttac

SEQ ID NO: 24410 - DNA, 201 bp, Homo sapiens
tatgtcatgaatgtgtaaaatatatatatagataccctgtcatttacaaccataaaatatacaaaaatctgttacaagaagttaaaatttatcaaaacgtmcatatacacagagcatacgtggtgccattcacagttgagagaaatgtaagtaaccataaagatgcaatattaaatcgcaactgcataaaattaactgtag

SEQ ID NO: 24411 - DNA, 201 bp, Homo sapiens
tctaccctggggatgaaaggaaaggagtccctgaacacacactggggcctacatgagggtggagagagggagagggaaagggaggagggtgatgataaaaataaataaataaataaataaataaaacaactgttggatactatgcttattacttggttggtgaaatattctgtacaccaaacctgtgacacaaaacttacc

SEQ ID NO: 24412 - DNA, 201 bp, Homo sapiens
ctaccctggggatgaaaggaaaggagtccctgaacacacactggggcctacatgagggtggagagagggagagggaaagggaggagggtgatgataaaaataaataaataaataaataaataaaacaactgttggatactatgcttattacttggttggtgaaatattctgtacaccaaacctgtgacacaaaacttacct

SEQ ID NO: 24413 - DNA, 201 bp, Homo sapiens
tctgaatatgtacgtaagagtgatgtagaagttcagaaacacacaactatgtttcttcttcagatcatttgaaagcagagttttaaggattttaaaatatrcgtacaccatatagaagtgtataaaatttaaaatgatgtccttttttttccttctcctcaatcccactgcaggataaccactgcaaattttgaggggtgt

SEQ ID NO: 24414 - DNA, 201 bp, Homo sapiens
ttatgcagatgtggtggcaggcacctgtaatcccagctacttgggaggatgaggcaggagaagagcttgaacctgagaagcggaggttgcagtgagccgakatcgcgccactgcactccaggctggtgacagagcaagactccgtctcaaaaaagaaaaaaaaaaaaaaaaaaagaaaaagaaacctgcagatgtacccct

SEQ ID NO: 24415 - DNA, 201 bp, Homo sapiens
attttgtttaactctttgtgctttaaaaaaaatttaaaggctgggtgccgtggctcacgcgccccaaagtaatcccaggactttgggaggccgaggtgggyggatcatgaggtcaggagatagagtccattctggctaacacagtgaaaccctgtctctactaaaaatacaaaaaattagccgggcgtggtggcaggcgcc

SEQ ID NO: 24416 - DNA, 201 bp, Homo sapiens
taggtttgatttatttcttattcttttttttggagctctgttacatggtgtagtgaatgtagctaataattgagttccgtacattttaatactgctgagartaaatttcatatgttctcatcataaaaaatgttgaatatttgaggggatggaaatgttagttaacttgatttattcattccacattgtattaaacaataa

SEQ ID NO: 24417 - DNA, 201 bp, Homo sapiens
cctgggctgcagtcttaggcactaagatgtgttgctggcagatttgactctagaagccccaaagggcaggcagggataaatagttttgaattttgtttctwgtctcttctgtgttgtattggtttcagagttcagtatccagtcacagtggacagttttgtagtattttgcagcctaaaaaatttatgcaagcagtaaatt

SEQ ID NO: 24418 - DNA, 201 bp, Homo sapiens
aaatgtcacatacaaggacatagattttcacattgtgtagtattgtttatatcaggggtccccaacccgcagaccactgtgtggtactggtccatggcccrttaggagccaggctgcacagcaggaggtgagcagcaggggagggagcattactgactgagctccgccgcctgtcaggtcagcatcggtgttagcggaact

SEQ ID NO: 24419 - DNA, 201 bp, Homo sapiens
tgctaagagtttgtttctctcttatgtgaaagaagtcaagcagttggcagtccaggtctggtatgtattgacaaccccagtgtcagagaaccagacacttktctccccgaagtatcattcttagcagtatcacctcatggttcagggtagctgcctgagcttcagccatcaggctgatattccaggcagcagaaaggaaga

SEQ ID NO: 24420 - DNA, 201 bp, Homo sapiens
aaccttgctgcagccctcagctcttcaaaaatagtgacctttccttagaaagttactatttcaggaatgcattgcccatgcactgtcaacactgggcaaamatactttgtgtttatgagctcaaggctcagaaaattatagacaaatttctgacccgagtgtctggtgggacctttagatattgaagacaatttcttcctt

SEQ ID NO: 24421 - DNA, 201 bp, Homo sapiens
tcaagcaccatgaggagtttagttcacaaataatcatttctttttatatcagacatacgcatgttattgtcataaatgatacactcagcccatcatctctyatagtggtttcttataagtgttgctctatttaggaactgggccttgaacattatgaatagcaggtttcattaaaaccaggggctctcaagctttagtgtg

SEQ ID NO: 24422 - DNA, 201 bp, Homo sapiens
catttgtatgttcaagcaccatgaggagtttagttcacaaataatcatttctttttatatcagacatacgcatgttattgtcataaatgatacactcagcycatcatctcttatagtggtttcttataagtgttgctctatttaggaactgggccttgaacattatgaatagcaggtttcattaaaaccaggggctctcaa

SEQ ID NO: 24423 - DNA, 201 bp, Homo sapiens
atgctctttaattctgtcactcatcccacaacatataattaacacctacatcttacttttctctgcctttaaccttccattcagtgctatgtacggccagttgtctgcatgggaaaacaggaaagcaaacaatccaagtacagactggatactgttctatgccagttctatcaattatctgggaaatgattgaataatcct

SEQ ID NO: 24424 - DNA, 201 bp, Homo sapiens
tcttatcatattcacatgatgatattgcctaacaacccatttctcaggatgtagctgcattgttaaacaatgcaagactgtagttctaaggttgatggaatttttttttaagtctctgctagctacagggaaatttttccaaagtaaaagaaagatcttgtgaaaaatcacataagaagcacattgggtctctggggtaaa

SEQ ID NO: 24425 - DNA, 201 bp, Homo sapiens
tcttaaattcaacaattaaaagggttatagttgtttacttcgtaaatacttcctacagttctgcaacacaaaattcagaccatattcattaaaaacaaacaaaaaaaaacttgattctggcaatagagggatagaggattaattctttgaagtttttgacatataaaagggattgtggggtctccttttattggaaagaca

SEQ ID NO: 24426 - DNA, 201 bp, Homo sapiens
aaaaaaaaacttgattctggcaatagagggatagaggattaattctttgaagtttttgacatataaaagggattgtggggtctccttttattggaaagacagagaattaacaccttaactgaatccatattgtaataaaccctaggacttggaaacaatgttgcaaatattaagtatcatataaatttatctctatggaaa

SEQ ID NO: 24427 - DNA, 201 bp, Homo sapiens
aaaaaaaacttgattctggcaatagagggatagaggattaattctttgaagtttttgacatataaaagggattgtggggtctccttttattggaaagacagagaattaacaccttaactgaatccatattgtaataaaccctaggacttggaaacaatgttgcaaatattaagtatcatataaatttatctctatggaaaa

SEQ ID NO: 24428 - DNA, 201 bp, Homo sapiens
acatataaaagggattgtggggtctccttttattggaaagacagagaattaacaccttaactgaatccatattgtaataaaccctaggacttggaaacaawgttgcaaatattaagtatcatataaatttatctctatggaaaacatcttcaacttcattaaatgttctgtatgatgccacttatctatttcatgcacccc

SEQ ID NO: 24429 - DNA, 201 bp, Homo sapiens
cccagctactcggaaggctgaggcaggataattacttaaacctgggaggcggaggttgcagtgagccgagatcgcaccattacactccagcctgggcaackagagtgaaactccgtctcgaaagaaaattgcatatgtttttttccccttgactttattttccctccttatgtgtgttggattcagtgcaaccattgaaaa

SEQ ID NO: 24430 - DNA, 201 bp, Homo sapiens
tccagattaaagaatcacctagtgctgagcaaaatcaatttttcaaaaaggacagcattgtgaagttttggaataccagaaagagaagatcctgtaaaaaaaaaaaaaaaaaaaatatatatatatatatatatatatatatatatacacacacacacacaatgaagagttgagaatcagaatataatcagatttcttcac

SEQ ID NO: 24431 - DNA, 201 bp, Homo sapiens
aaaggacagcattgtgaagttttggaataccagaaagagaagatcctgtaaaaaaaaaaaaaaaaaaaatatatatatatatatatatatatatatatatacacacacacacacaatgaagagttgagaatcagaatataatcagatttcttcacatcagtcttgtaagctagaagataatagagcaacacattcaaatat

SEQ ID NO: 24432 - DNA, 201 bp, Homo sapiens
gttttacatttctgcagtttttttcatggaagcctcacattctactttccagtctcacaggccatcctcaccacgatacacatgatcatttagtagcaaartctgttcgtcagaaaactctaattgctttatgtgtgagaacattaaactgcaataaatttatggatgcagctgctccattactggagaacaagttttatc

SEQ ID NO: 24433 - DNA, 201 bp, Homo sapiens
aaggacagcattgtgaagttttggaataccagaaagagaagatcctgtaaaaaaaaaaaaaaaaaaaatatatatatatatatatatatatatatatatacacacacacacacaatgaagagttgagaatcagaatataatcagatttcttcacatcagtcttgtaagctagaagataatagagcaacacattcaaatatt

SEQ ID NO: 24434 - DNA, 201 bp, Homo sapiens
aaaatggctcctggacaggcgcagtatctcacacctgtaattccagcactttaagaagccaagttgggaggatcacttgcggcctctcaggaggctgaggygggaggattgcctgatcccaggagtttaaggctgcagtgagctttgattgcatccgtgtatactcagtgtacttcagccagggtgatagaggaaaacact

SEQ ID NO: 24435 - DNA, 201 bp, Homo sapiens
acagcattgtgaagttttggaataccagaaagagaagatcctgtaaaaaaaaaaaaaaaaaaaatatatatatatatatatatatatatatatatacacayacacacacaatgaagagttgagaatcagaatataatcagatttcttcacatcagtcttgtaagctagaagataatagagcaacacattcaaatattgaag

SEQ ID NO: 24436 - DNA, 201 bp, Homo sapiens
gttttaaatgacatgctactatcattgtagaaaatttggcgaacttatagaacaaaataaaattattcataactccagaacccagcaacaaccagtatttacacacacacacacacacacacacacacacacaagttggagtcatgctatgttcatatatttgcatcctgattatttcaacattatttttcgtacaatagg

SEQ ID NO: 24437 - DNA, 201 bp, Homo sapiens
gtcaatgacagactgcacatatcacagtggttccataagattataataccacatttgtactgtaccttttctatatgtagatatatttagatacacaaatrccattatgttccaattgcctgcagtattcagtgcactcacatgctgtacaggtttgctgcctaggagcaataggctacaccatacagcctagctgggtag

SEQ ID NO: 24438 - DNA, 201 bp, Homo sapiens
ttttaaatgacatgctactatcattgtagaaaatttggcgaacttatagaacaaaataaaattattcataactccagaacccagcaacaaccagtatttacacacacacacacacacacacacacacacacaagttggagtcatgctatgttcatatatttgcatcctgattatttcaacattatttttcgtacaataggg

SEQ ID NO: 24439 - DNA, 201 bp, Homo sapiens
ttattttggattcaggagatatatgtgcaggtttgttgcatggatatattgcgttatgttgaggtttggggtatggatgatcccgcaatccaggtagtgarcatagtacccagtaggtagttcttcagcgcatgtccttttcccttcctccctcttctagtagtgttcagtgtctattgttcccatctttatgtccaggtg

SEQ ID NO: 24440 - DNA, 201 bp, Homo sapiens
aaaatacaaaaaaaaaaattagctgggcatggtggtgggcgcctgtagtcccagctgtgctggaggctgaggctggaggatggcgtgaacccgggatgcgstgcttgcagtgagccgagatcacgccactgcactccagcctgggccacagagcgagactccgtctcaaaaaaaaaagaaagaaaatgaaatgttgttgcg

SEQ ID NO: 24441 - DNA, 201 bp, Homo sapiens
gggaggttgaggcttcagtgagctatgattgtgcttctgcactccagcctgggtgacagagtgagaccctgtctccccaaaaaataaataaaaaattaaamcaaaattaaaaaattattttaagaatgaaatgagacaattttaaagccaacattttacgtatgattattcgtaacactgtatagtatttcttagtgaacc

SEQ ID NO: 24442 - DNA, 201 bp, Homo sapiens
aaagggttcaaccagaagacatccttcttcctcttcaagaactcggatctaagacctctgcagagccatttttggtcttttaagaaaaggcaaaagtattrtaatatttagttattagcatgttcatttgccaaagttctaaaaattccttagtactatatatgtatattttatagaatcttgaggtctcttgaataagta

SEQ ID NO: 24443 - DNA, 201 bp, Homo sapiens
actcctggatgatgttgtaattgggattcatgtgcagtcagaataggccccacaaatgaagaggatgccaacgtgtgtgtgtgtgtgtgtgtgtgagtgtktgttttacaaacttactctctgtgttctagataaatgattcctttcatagaggtccagatagatgagggtgcagaggaactctgttacttgcaaaatggt

SEQ ID NO: 24444 - DNA, 201 bp, Homo sapiens
gccttagaaactgcattaactaaatagttcatctgcaaagaaatcctgaggatatggtgaacttggtcaagagaaggatacaatttctttccctcttttcwtgagaaatctagccagactatagaagggacaaaacatgtatttgacagcaggtattcatctcacattgaggaagtaggaaggttagtcttagagatggac

SEQ ID NO: 24445 - DNA, 201 bp, Homo sapiens
catagcccaggtattccccaagcctgaggcccagctggagggagcagcgagattcaggtctcccacctgctcccagcaatgaatcttttgcggcagagtcsggcacgtcacctcacatactgctctcaaacccagcacattgtaacatcccacgagatcccgacttcatgagcaagccaggcttcttttttgcttctctct

SEQ ID NO: 24446 - DNA, 201 bp, Homo sapiens
acatacttgtaatagataaattgtgaaacagaataagcattttcaaacaaagacttgtttgagattcatgaattttcttatgctcaattctttgataaacktgagatcatctgtagcaacaccttctctggcattaaattgtgctgtataatttcactgtgaagtctatatacattatagaagaaaaattatataacaaat

SEQ ID NO: 24447 - DNA, 201 bp, Homo sapiens
aatttaaaatccctgatatcaagatacttattatacaatggcattttaattgacagcattttctgtcttcttagacatttataaaatgtgtcatgatcaayggtttcttaaattcaacaattaaaagggttatagttgtttacttcgtaaatacttcctacagttctgcaacacaaaattcagaccatattcattaaaaac

SEQ ID NO: 24448 - DNA, 201 bp, Homo sapiens
taaaattattttaaatacttgattgggattagaacagggcagcctcttatatataacttaatttttttactagcaagtttagaaatttaccagcaagtttwtaattttttctagccaatgtatgagcttataaacaaaacaaaaaactctttagttatgtaagagaactgaagggaaattacagtgctatcttcaccactg

SEQ ID NO: 24449 - DNA, 201 bp, Homo sapiens
gggtttcaccatgttggacaggctggtcttgaactcctgactctgtgatccaccctccttggtctcccaagtgctgggattacaggaatgagctactgcgygcagccttataattttctctttgaataagcagatatcttgaaaaggtatatgcttaggctatctagctcccctccatcttcctcaacacctctacctata

SEQ ID NO: 24450 - DNA, 201 bp, Homo sapiens
agagaactgaagggaaattacagtgctatcttcaccactgcaagagggtaggtgcttgtataagcttttaaaaatgggcatgacttgcaaggctattttarttgcatggagaaagccatagatcacaatgcagtttccaaccatactgcattgacttaaaaaaaaataccctgagagataaataattaaacaatatgggat

SEQ ID NO: 24451 - DNA, 201 bp, Homo sapiens
ccactcatcgtggcacgcacctgtagtcccagctgcttggtaagctgaggcaggaggatcgtgtgagcctgggagttcaaggatgcagtgatctacgatcrtgacactgctctccagcctgggtgacaaagtaaaaccctgtctcaaaaaaaaaaaaaaaaaaaaaaacccaaaacgtttaaacagccacattatagtctc

SEQ ID NO: 24452 - DNA, 201 bp, Homo sapiens
cggtgggctctgggcagtgtcccagtgctacccctcggccctgggaccttaggtgttcattaccatttagtcttgtttacagcctgggagtttctagtcargcacagctggtggggaggctccgtgcctcttctcctctgccacctccacccttgtgccctcctccacgctcccttctggatgcctcatgcacctgtattt

SEQ ID NO: 24453 - DNA, 201 bp, Homo sapiens
gatacatgtaaatcaaaggcatcctctaacctttcaagtcaatatatgatttcttttttgtcccccagacagagcctcgctctgttgcccaggcctcctakgttctcctgccgcagcctcccaagtagctgggattacaggcatgtgccaccatgcttggctaatttttatatttttagtagagacagggttcttgccgtg

SEQ ID NO: 24454 - DNA, 201 bp, Homo sapiens
tgtaattgtttctttgctacagagattgccctttcaatacttgagacaatcaatgtgaaaaggacagagatagatggaagtcctgtatctcaagatggaartcattcattttcttaatttatttatacagtaacactttaacaaacattttctcggtgtcctttgctggattaaaaactgggggtagaatcacaaaattta

SEQ ID NO: 24455 - DNA, 201 bp, Homo sapiens
gacagtcactgagggaacttcatatgtaggcttgagttcaggtatatgaaatgcaggctaagttttaattagaatttatttacagctcgaagctgctcctktgtttttctgcctgaagtcagtaatgaaccattcctctttgcctagtcattagtattcagagctccatcagcctgcagttcaaaccctttcccttgtttt

SEQ ID NO: 24456 - DNA, 201 bp, Homo sapiens
atgtaaatcaaaggcatcctctaacctttcaagtcaatatatgatttcttttttgtcccccagacagagcctcgctctgttgcccaggcctcctaggttcycctgccgcagcctcccaagtagctgggattacaggcatgtgccaccatgcttggctaatttttatatttttagtagagacagggttcttgccgtgttggc

SEQ ID NO: 24457 - DNA, 201 bp, Homo sapiens
gcagttgcatttctgtaacagcatccttttctttcatctagccctcacatatttattgagcatctgttccattctaggcaggacttgagagattgaagtamatagagaacacttgtccttagggatctgttgtaaaatggggagatgaaaatgttggcggggtgctggtagctcatgcctataatctcagcactttgggag

SEQ ID NO: 24458 - DNA, 201 bp, Homo sapiens
attgcctccctgtgcctgggcaatttcagaaaatggtggttttcctttcgtttccatcttttttaagacttaaaaagtatctgctctcattttctcctagmggcctccatgccttgactcaaaaaatgctgccttagttgacagccttgaaatgagtatgaccctagctctagttgggtggaaatcacctcgcatagaaat

SEQ ID NO: 24459 - DNA, 201 bp, Homo sapiens
tgctcgtcttagctaaagggaacttatttcattcttaaaatgtttttcatggtctttctttttccctgtgaagaatgattacaagatccaagcatgagatragtcattgtctaatgaatagtgtcttttcttccagctctgacttgcagtgtggttgagttcagctaatgtgcatttactgcactcctaccgtgtgatggc

SEQ ID NO: 24460 - DNA, 201 bp, Homo sapiens
ctgtatgttcacccccacacgcaggggagaaaattgagttttactgctgatgacgttaattgattgcaagttgttttagtgggagtgtgatgttgaaaacyagatttcctttcatttttatgcattagatgcagagaagctatacagtgacatgttcattccactgtaactaaaaatatcatagaggtatctaaatttggt

SEQ ID NO: 24461 - DNA, 201 bp, Homo sapiens
gcattttgttatcagcacttgtgggtagtgtcaacagggatctcttggctgctgggaacttgaggttgagatgacactgcagttgcatttctgtaacagcwtccttttctttcatctagccctcacatatttattgagcatctgttccattctaggcaggacttgagagattgaagtaaatagagaacacttgtccttagg

SEQ ID NO: 24462 - DNA, 201 bp, Homo sapiens
ttcctttcatttttatgcattagatgcagagaagctatacagtgacatgttcattccactgtaactaaaaatatcatagaggtatctaaatttggttttgyatgttttatattcagatcttgacactggtcagcttacaggattatctttgggttggagactgtttctgtagtgatttctttagttcccagtaaattcaca

SEQ ID NO: 24463 - DNA, 201 bp, Homo sapiens
agcatccaaaagtactgtgattataggcatgagccactgtgcctggccaagtttttcttcttttgcttatcaatgaaaattaaatatgtaccataagatayatctttgaagataaaaggctttggagtgttttcttcttcctgtgtttgaatatatatattgtgggagtcagaataatgctatagagccaggtttggagga

SEQ ID NO: 24464 - DNA, 201 bp, Homo sapiens
taagtttctcttaaaaaaaaaaatcaaacttttaaaaatttttagtagagacggggttttgctatgttgcccagcctggtcttgaactcctgggctcaagygatcttcccactgcagcatccaaaagtactgtgattataggcatgagccactgtgcctggccaagtttttcttcttttgcttatcaatgaaaattaaata

SEQ ID NO: 24465 - DNA, 201 bp, Homo sapiens
ccttgtagctgcttcatgtgctggggtgtcatctgtctgacagtgtgtttgtgacaatatgtgcttttctattgtttttctaaaattttatttttcggttkctgatatgtagtattcatggatttcacccacatgaacaaaagctctctggagttctccgtgatttttaagagcacccagattcccaaggcatcgaaactt

SEQ ID NO: 24466 - DNA, 201 bp, Homo sapiens
aatatatgtatttgagtattttggccagaactgggagagtaagcaacttttataattcaaaactaaaacttctttacttattataggattagatagatgtrctatgttaagttttctattttgagaaaattttgtctgagcctaatatttgtctctgtttgagggaaataaaaaagtcttacgataacattggaatcacct

SEQ ID NO: 24467 - DNA, 201 bp, Homo sapiens
taagctagaagataatagagcaacacattcaaatattgaagggtaatgttttgttacctgaaattccatacctagccaaactgtcagtgagtggtaatgayagaatacatacatttaaagcatgcaaacgcaaaatattttagttctaatacccttttaggcagccaccgaatgtgtgctttaacaagtcccaggacttct

SEQ ID NO: 24468 - DNA, 201 bp, Homo sapiens
taataatttaactaaatctgaaatgagaagttaaattaattaacatttctatgtcatttattccctctctccagataaataatggccaagttgtaaatagaaaaaaaagctcagaaaattattaatgaataattatgaagttcatcaagagcataaatagaagtaaaaaaatcaatcaggaagaatattttaatgatcttt

SEQ ID NO: 24469 - DNA, 201 bp, Homo sapiens
acatgatccttgcaaccttgaactcctgggtgattctcctgcctcagtctcctgagtagctgggactataggtgcatgtcaccatgcccagctattttttwaaattttttactttttgtaaagacacggtctcactttattgcccagggtattttcaaactcttggcctcaagtgatcctcctgcctggcctcccagtcta

SEQ ID NO: 24470 - DNA, 201 bp, Homo sapiens
aggctagagtgcagtggtgcaatcatggttcactgcagcctcaaactcctgggctcaagcaattctcctgcttcagccttccaagtagctgggcctacacscaccaccacacccagctaatttttttttttttagagatggggtcttgcgatgttgcccaggcttgtctcaaactactagctaaagcgatgctcccatctt

SEQ ID NO: 24471 - DNA, 201 bp, Homo sapiens
cgaggcggcaggtaacgtatcttggaggtttttaattgaatcataatgtagagtgttttatcttcatttatgctcagatagagagtggtgttgacttagcrtatgcttaataggaaacattctcatttggaggcaactgctccttcattcctatatatatgtcataatcacagaaagcacttagcctgatgaagagaggtt

SEQ ID NO: 24472 - DNA, 201 bp, Homo sapiens
tgggctcaagcaattctcctgcttcagccttccaagtagctgggcctacacgcaccaccacacccagctaatttttttttttttagagatggggtcttgcratgttgcccaggcttgtctcaaactactagctaaagcgatgctcccatcttggccacccaaagtgttgggattacagggataagccccggcacccagcca

SEQ ID NO: 24473 - DNA, 201 bp, Homo sapiens
agtctgacgttctgttgtggaggcagtagatgcctgatgggcttgaatagctttcctgatgaaatgagagagttccctgactcccctcacaggacatgcarcaggggtgtgtggcttgtctatttgactgctgtgtgtgcccaaaccccttaggggagggggagcatgcagatgtacaggtacgggagccggggttccagc

SEQ ID NO: 24474 - DNA, 201 bp, Homo sapiens
tacgggagccggggttccagccccgcggtagtgtctgggtgtgggtgcctgcagctcctgaagctccagtgggcatgttgcagtgctcttttagctctccyatctgcagatggcttaagtgttaaccagcccagtgccccccttggtacccaggcccttgtctggcatccaggaaaaatcaggtcccacagggtcttgtaa

SEQ ID NO: 24475 - DNA, 201 bp, Homo sapiens
acgggagccggggttccagccccgcggtagtgtctgggtgtgggtgcctgcagctcctgaagctccagtgggcatgttgcagtgctcttttagctctcccrtctgcagatggcttaagtgttaaccagcccagtgccccccttggtacccaggcccttgtctggcatccaggaaaaatcaggtcccacagggtcttgtaag

SEQ ID NO: 24476 - DNA, 201 bp, Homo sapiens
taaggagagactcttagtatcttgagatacggtgaaccttagtttctagtttgcttccttagttagtttttgtccatgtcttctccttaccatttctattaaaaaaaaaaaaaaaacttgctgctaaagtttcatcttgctactgagtttttaaagattttgtttcttgcaggttaattcttaaagtttatgaagtttcat

SEQ ID NO: 24477 - DNA, 201 bp, Homo sapiens
gttgtttctgacttttaatgcaatgtcctttccaaaaaaacttccctgccaacaccttgccagattacagaaaggaaatgaaacttttaaagaacagtgcaaaaaaaaaaagaatatctaaaaatattgtttaccctctcaaatatctgtctaaaatacctcaataagccttaatcctaaaaccaaaatgaaaacatattt

SEQ ID NO: 24478 - DNA, 201 bp, Homo sapiens
ttcttttttttaaagagatgaggtctcgctttgtcacacaggctggagtgcggtggtgcgatcatagcttactgcagccccaaactcctaggcttaggcartcctcctacctcagccaccagagtagctggactataggcaagtgccaccacacctggctaattttttagttttttgtagagactgagtctcactatgttg

SEQ ID NO: 24479 - DNA, 201 bp, Homo sapiens
atcagaattgtttaccactcagaaataattgttttctgccttgggaagaatgactatttacaaagttgttgcatcacttagcaaagtcctcctttcatatggaagactcagaatgtatctgatgagttacttttttttttccactttttttttatactttaagttttagggtacatgtgcacaatgtgcagatttgttaca

SEQ ID NO: 24480 - DNA, 201 bp, Homo sapiens
ccaccagagtagctggactataggcaagtgccaccacacctggctaattttttagttttttgtagagactgagtctcactatgttggccaggctggtctcraattcctaggctcaagtgatcctcattcttcagtctcccaaagtgtcaggattacagttgtgaaccactgtgccaggtctagtaattcttgattctttaa

SEQ ID NO: 24481 - DNA, 201 bp, Homo sapiens
tatctctctctattcattctgggcttctgatgcttccaaacacatcattagtcccatttggtcttggcttagtttccctacacaccagtacttggacatcrgttggaagtataaaatacaggcaaggcagtgttccaatctgcttgggaagggtcatgctgagttttagcagatgttttgctccattcttttctcctctgt

SEQ ID NO: 24482 - DNA, 201 bp, Homo sapiens
gaagaatgactatttacaaagttgttgcatcacttagcaaagtcctcctttcatatggaagactcagaatgtatctgatgagttacttttttttttccactttttttttatactttaagttttagggtacatgtgcacaatgtgcagatttgttacatatgtatacatgtgccatgttggtgtgctgcacccattaactcg

SEQ ID NO: 24483 - DNA, 201 bp, Homo sapiens
ttttcaaacacaaggattgaaacaaaaaaggctttcagtaaacctttggctaatcagcttaccactcggttcttctaagactgtgattttcagaaactttwatcaggttcagtttacttgtatcgatttgcacgccttagccacaaaactacaatatctactggtggggatgtgctggagcctgaaattgtattcttgagg

SEQ ID NO: 24484 - DNA, 201 bp, Homo sapiens
tttcatatggaagactcagaatgtatctgatgagttacttttttttttccactttttttttatactttaagttttagggtacatgtgcacaatgtgcagatttgttacatatgtatacatgtgccatgttggtgtgctgcacccattaactcgtcatttagcgttaggtatatctcctaatgctttccctcccccctcccc

SEQ ID NO: 24485 - DNA, 201 bp, Homo sapiens
tatgtatacatgtgccatgttggtgtgctgcacccattaactcgtcatttagcgttaggtatatctcctaatgctttccctcccccctccccccacctccratgagttaattatttcagtgttttttttttaatgcttcagttgtttttattgactcacaatgggttttttgtagtagggaatcccagtgttttataattt

SEQ ID NO: 24486 - DNA, 201 bp, Homo sapiens
aaccaatagctgttaccattttggaacatttacatccatgtctttcgtctacttaaaaaaatatataagcatccatataccagttttattcttgaaaagayatttaagctatttgaaaataattgagaattaagaataacagaaattagaaagtctaacattagagagtaaagctatttcttcctcttttccttttggaaa

SEQ ID NO: 24487 - DNA, 201 bp, Homo sapiens
ttagcataatgccctttaggttcatccatgttgtcacaaatgtcagaatgtccttttttattaaaggctgaataatattccattttatacatttatgtgtmcacacacacacacacacacacacacacacgcagtgtatatcacattttctttatccattcatcggttgcaggtcacttaggttgtttccatatcttggct

SEQ ID NO: 24488 - DNA, 201 bp, Homo sapiens
tgctttttagtgcttcactcttaaatataaaagggcagaaaaacatgtgaaacatttcagaaaagccataattgtggaagacagagtccaaaacaaacaaygtttgtttgttttctttaagaacttggaggaaacataaaattaagagaagagaaaaatattaaggaattataaacagtaattctgtgaaatagaaatgat

SEQ ID NO: 24489 - DNA, 201 bp, Homo sapiens
tggtagagatatctatatttacacgcagaggagggttgcagccgctaccgctagtgcctccgctgttatttagtggtgccctaaataactacagctttccstctgggttaattgtagctccctatttttagtcattttatcctatttagatatgagaaaagcagacatcctcaaattaaagagttatgtaagtttgggcag

SEQ ID NO: 24490 - DNA, 201 bp, Homo sapiens
aagtttcatttaagaagtttcttttaatgattcttttaaggcttttagcattttaaaatataaactatgcacatgtagtattactttgaaaaaaaaatgtmattgacaaaagaatgttgcaagccctttcacaatctatcagtaactccaaaatctgtcaataactccagttttcaaaatctatcaataactccaaaccaa

SEQ ID NO: 24491 - DNA, 201 bp, Homo sapiens
gctcataagagcaaatatatgtatgccacttttctcaaagaaacgattttgaaaaacaaatcacagaattttcaaaattttcaaagtcaattcataagaakcgaaatggagtcaaccagttgtgtgatctgtacagaactttctggttaacgatgtgcttgtattttcctcttccagccgaacgcacggccggcgacgcag

SEQ ID NO: 24492 - DNA, 201 bp, Homo sapiens
ggcctaactggaattgataatcttgcttacaaatacaaactcatttttatcactgaaatgactttctcccccaaccatcaaggagggaataacttctcttrtgacaaatatttttgaacctgtgcttttctaacaattgaaatggccagctttttagatgaaagttctaatgtattatttttagaaatttcagagaaggaa

SEQ ID NO: 24493 - DNA, 201 bp, Homo sapiens
agcctcggcaatatagtgagactttgtctctccaaaaagttaaaaaattagctgagtgtgttggcttgcacccgtagtcttaggtacttgggagtctgagrtgggaggatcgcttgagcccgggaggtggaggttgcagtgagccaagattgtgccattgctctccaacctggatgacagagtgagaccctgtctcaaaaa

SEQ ID NO: 24494 - DNA, 201 bp, Homo sapiens
aagtacggtattgcggtagggttggcgtaggcttttgggtctcatttcatgtgtcagtattattactgtcctttatagtaggcacgtaatacttttgacakttattatttttagtaatctcagcactttgggaggctgaggcaggtggattacttgaggtcaggcgtttgagaccagccttgccaacatgatgaaaccctg

SEQ ID NO: 24495 - DNA, 201 bp, Homo sapiens
tatgaagttcatcaagagcataaatagaagtaaaaaaatcaatcaggaagaatattttaatgatctttaaaatgttttaaaaacagtaatacaaactcttyattaatggtttctttttagaaaactggttattagatgtatgtttcactacttttattctaattctcaaagaagtttcagagttagcctcttatgaaactt

SEQ ID NO: 24496 - DNA, 201 bp, Homo sapiens
tctgtagaatttagccatgatttagaattatgacatgatttggaattaagtactgcattgcactggaattttttcttttaaaaaaacatagcttagtttcrtatagtgttttgcaattatgctgtcattaaagacagaaagcaaaaacaaagaaaatgttcgccttgaattctttgtaatcatttcatgattaaagaatta

SEQ ID NO: 24497 - DNA, 201 bp, Homo sapiens
acatgatttggaattaagtactgcattgcactggaattttttcttttaaaaaaacatagcttagtttcgtatagtgttttgcaattatgctgtcattaaaracagaaagcaaaaacaaagaaaatgttcgccttgaattctttgtaatcatttcatgattaaagaattaaaataatggttctataattagtttctatgcct

SEQ ID NO: 24498 - DNA, 201 bp, Homo sapiens
ttggactttagtatgaattggcataggaactgaatgatttaaagattttgataacctggaaatgaaataacttgtataaattgacttcattaactagatgrctttattcatttcctcctaagtgagcttattttagagtgtaaagaagcaaatatttaaatttgctgccaagcagagcagcaaatggctaattaattcaga

SEQ ID NO: 24499 - DNA, 201 bp, Homo sapiens
cgagcattttgttttgtgtacacacaccctctccctctgtctctctctctctctctctgtaatgtgcccttccttcaatgtaccactccccatttcttctyacaaatcccctaataataaaataaattgtgatgaattttctgtttgctcgtcttagctaaagggaacttatttcattcttaaaatgtttttcatggtctt

SEQ ID NO: 24500 - DNA, 201 bp, Homo sapiens
ggcgcgatctcagcccactcagcaacctctgcctcctgggttcagtcagttttccctcagcctcccaagtagctgcgattacaggcatgagccaccacacycacctaatttcgtagagatggggtttcactatgtatgccatgctggtctccaactctggacctcaaatgatccgcccacctgtgcctctcaaagtgctgg

SEQ ID NO: 24501 - DNA, 201 bp, Homo sapiens
agcaattcctcgagtgccacctagagtctagtggtaatactgaattaacttctaagctttgtcaaggagcatggagaacttgagattctcagacatttttrttctgtatcatgaagaaactcaatagtaattggaatcaggatcagtttctggctgcttgatcagccatgtaattagtcagcatggtatgaatatgtacat

SEQ ID NO: 24502 - DNA, 201 bp, Homo sapiens
tgcatggtagcaaactgtaatatggtatttccatgataatagatggagaaggtgcatcatgtgtgtagatactaataaaatatagtaaaataattcgaacrtgaagatttttgagtattatctttgttttaatatagtttagttggaagtttatgtactataattttcttttcttttttttcttttttttttgagacagag

SEQ ID NO: 24503 - DNA, 201 bp, Homo sapiens
gcagacctaggacaatccaaggccacacagagtagtaaaatgcaacacagatgataggaagttttactttctttttgagacggagtctcgctgtgtcaccraaactggagtgcagtgtcgtgatctcggctcactgcaacctctgcctcccaggttcaagcgattctccctgcctaagccttcagagtagctgggattaca

SEQ ID NO: 24504 - DNA, 201 bp, Homo sapiens
gtcacacaggatgtgcctgtccttaagtacaatcacatagtacgttgtttagttcattatgtggcatcattttatagggcatttgagtatttgaagtggcygcttcatctaaggacgaagtcacttcaagttggcattgacgtagtttcagttggtgttactgttatattaggttggtgcaaaagtaattacagttttaaa

SEQ ID NO: 24505 - DNA, 201 bp, Homo sapiens
ctgggactacaggcgcccgccaccatgcccggctaattttttccttctgggtcttaagacctcctcacactgatacttgttgccttacaagtagacctgcytccaaaagttaacccgttggctatgtggaaattgaagtgcagcctttcatggaaatgggggtgtttattatctcttgccgacgtactgaatgctttctag

SEQ ID NO: 24506 - DNA, 201 bp, Homo sapiens
ctgtggtcccagctactcaggaggctgagttgggaggattgtttgaacctgggaggttgggactgcagtgagaccctggctcaaaaaaaaaaaaaaaaaagaggcttgacattacaaaaaaaaaggaacatttgatttgaggaagggtaaactacccagctgagaggttggttatgttgaagggaaggggagattaaaggt

SEQ ID NO: 24507 - DNA, 201 bp, Homo sapiens
cagctactcaggaggctgagttgggaggattgtttgaacctgggaggttgggactgcagtgagaccctggctcaaaaaaaaaaaaaaaaaagaggcttgacattacaaaaaaaaaggaacatttgatttgaggaagggtaaactacccagctgagaggttggttatgttgaagggaaggggagattaaaggtagaaatgta

SEQ ID NO: 24508 - DNA, 201 bp, Homo sapiens
gctactcaggaggctgagttgggaggattgtttgaacctgggaggttgggactgcagtgagaccctggctcaaaaaaaaaaaaaaaaaagaggcttgacattacaaaaaaaaaggaacatttgatttgaggaagggtaaactacccagctgagaggttggttatgttgaagggaaggggagattaaaggtagaaatgtagg

SEQ ID NO: 24509 - DNA, 201 bp, Homo sapiens
ctactcaggaggctgagttgggaggattgtttgaacctgggaggttgggactgcagtgagaccctggctcaaaaaaaaaaaaaaaaaagaggcttgacattacaaaaaaaaaggaacatttgatttgaggaagggtaaactacccagctgagaggttggttatgttgaagggaaggggagattaaaggtagaaatgtagga

SEQ ID NO: 24510 - DNA, 201 bp, Homo sapiens
actcaggaggctgagttgggaggattgtttgaacctgggaggttgggactgcagtgagaccctggctcaaaaaaaaaaaaaaaaaagaggcttgacattacaaaaaaaaaggaacatttgatttgaggaagggtaaactacccagctgagaggttggttatgttgaagggaaggggagattaaaggtagaaatgtaggaag

SEQ ID NO: 24511 - DNA, 201 bp, Homo sapiens
ttactgttcttcgtcatggaagatgctgaaatactctcgtctcattgcatgaactgtctggtatccgttttgacttccctgtttccctttgtgtcttagakgggggattttcaggcacaccaagacagcgttctctgatggcgataagccctttgatcttttccccaatacttaacactttttgctaatgtgttagaagaa

SEQ ID NO: 24512 - DNA, 201 bp, Homo sapiens
gacatttactctttaactaattatttaattcatcaaattcattgagttcttactatgtcccaggcattgtggttggtatgggagaacaaagatcgaaaagaaaaaatgccctcagaactctccagtagaactgataaaaaataaaggaatacttggtaccatatagcagaggtaggctaggggtgtgcatggggtgttgag

SEQ ID NO: 24513 - DNA, 201 bp, Homo sapiens
tcacttgaacccaggaggctaaggtggcagtgagccaagatcacgccattgcactctaacttggcgacaagagcaagactccgtctcaaaaaaaaaaaaaraaagaaatagacctggagataagccatctgcagagaggtgcccatcacacatggagagagcctctgtactgtcgcaaagtcagcactttattctgccctg

SEQ ID NO: 24514 - DNA, 201 bp, Homo sapiens
aatctccagcactttgggaggcaaaggtgggaggatcacttgagagcaggagttcaagaccagcctgggcaacacagcaagaccctgcctctacaaaaatkaaaaagaaaaaaaaaattaaccaggcatggtggtgcatacctgtagtcctggctactgaggacagcttgagcccaggagtttgaggctgcagtgagctgt

SEQ ID NO: 24515 - DNA, 201 bp, Homo sapiens
ccatctctacaaaaaaaattaaaaataactgggttaggctgggtgcagtggctcacgcctgtaatcccagcactttgggaggccgaggcgggcggatcacraggtcaggagtttgagatcaacctggccaatatagtgaaaccgtgtctctactaaaaatacaaaaaattagctgggcatgttgatgggcatctgtaatcc

SEQ ID NO: 24516 - DNA, 201 bp, Homo sapiens
taccctactaaatgataccaacattgtatagcttcctcaagcttgaattattatccctttataatctatgagaaagacaagtactttgtagtccacttacaaaaaaaaatacatatttttcacttgtggttttaaacataggccatgaagagatttacatatcatggctctccagcatcctgtgtaatatatactcgtgtg

SEQ ID NO: 24517 - DNA, 201 bp, Homo sapiens
ctaatttgtatatttttagtagagacagggtttcaccatgttggccaggatggtcttgatctcttgacctcgtgatccacctgccttgacctcccaaagtkctgggattacaggcataagccaccgcccccagcctttatttcaaatttttataatgtattcctgtttttcactctttttagtttgtcaagatttttcacc

SEQ ID NO: 24518 - DNA, 201 bp, Homo sapiens
tctgtaatcccagctactagggaggctgaggcaggagaattgcttgaacccgggaggcggaggttgtggtgaactgagatcacatcattgcactccagcgygggcaacagtgcaagactccgttttaaaacaaaacaaaacaaaacaaaacaaaacaaaacaaaacaaaacaaaactgagttagagtggggctgtattctt

SEQ ID NO: 24519 - DNA, 201 bp, Homo sapiens
aactgagggtggcgagtactgaaaaggatcacttaaggggcctactgctgatgctgtgacaaaccattgggatgtttcataaatgtagaggcaccattgtmtattttgagcacagctacttttatttcaaaaggccagatctagaaggtaaggtaaccattgtcagtgagaaattgaagcatcccagaaacctgatctata

SEQ ID NO: 24520 - DNA, 201 bp, Homo sapiens
tgaggcaggagaattgcttgaacccgggaggcggaggttgtggtgaactgagatcacatcattgcactccagcgcgggcaacagtgcaagactccgttttmaaacaaaacaaaacaaaacaaaacaaaacaaaacaaaacaaaacaaaactgagttagagtggggctgtattcttagctacccagaaggctgaggcaggat

SEQ ID NO: 24521 - DNA, 201 bp, Homo sapiens
gccagactttcaggttatctcccttgttccctgaaaatcgctgttatcctgttcttaaggtgcccagatttcatattgttcaaacacacatgctctacaawcaatttgtgcagttaacgcaatcatcacagggtcctgaggcgacatacatcctcagcttacaaagatgacaggattaagagattaaagtaaagtcaggca

SEQ ID NO: 24522 - DNA, 201 bp, Homo sapiens
ctcccttgttccctgaaaatcgctgttatcctgttcttaaggtgcccagatttcatattgttcaaacacacatgctctacaaacaatttgtgcagttaacrcaatcatcacagggtcctgaggcgacatacatcctcagcttacaaagatgacaggattaagagattaaagtaaagtcaggcataggaaatcacaagagta

SEQ ID NO: 24523 - DNA, 201 bp, Homo sapiens
tcatattgttcaaacacacatgctctacaaacaatttgtgcagttaacgcaatcatcacagggtcctgaggcgacatacatcctcagcttacaaagatgayaggattaagagattaaagtaaagtcaggcataggaaatcacaagagtattgattggggaagtgataaatgtccatgaaatcttcacaatttatgttcgga

SEQ ID NO: 24524 - DNA, 201 bp, Homo sapiens
agaccttttccctgcagaaaatacaaaaattagcctgttatggtgacatgtgcctgtagttccagctattcaggaggcagaggcaggaagattgcttgagmccaagaggtggaggctgcagtgagctgtgattatgccactgcactccagtctgagtgacagagaaagaccctgtctccaaaaaatacagaaattctaaag

SEQ ID NO: 24525 - DNA, 201 bp, Homo sapiens
gctgggctcactgagttattgataacctagtctcatctttttctatgctacattaggaatacagtctgccttcatatgctttaaatattttgtgttcaaaktgataaaatcctaaggtgttattgataaaattttggagcttggatgcgatatttttagagttcacaaaccactgcaggagtataaatcctgaataaagtc

SEQ ID NO: 24526 - DNA, 201 bp, Homo sapiens
  misc_feature (1)...(201): n = A,T,C or G, or insertion/deletion polymorphism (see Tables 1-2)
ggagttcaagactagtctgggcaacatggagaaaccccatctctagaaaaatataagaattagccaggtgtggtggtgagtgcctgcactctcagctactnaggaggctgaggtgggaggatcacttgaacccaggaggtcgagtatgcattgagctaagatcaagccactgcactccagtcgggcgatagaacaagacca

SEQ ID NO: 24527 - DNA, 201 bp, Homo sapiens
aggtggatcatttgaggtcaggaggtcaagaccagcctggccaacatggtgaaaccctgcttctactaaaaatacaaaaattagccaggtttggtcatgcrcgcctgtcgtcccagttacttgagaggctgaggcatgagaatcgtgtagggccaggaggcggaggttgtagtgagccgagattgccccactgcactccag

SEQ ID NO: 24528 - DNA, 201 bp, Homo sapiens
ctctctccatgagtccctggaagagttatggtatagaggcacttgggaggtcttttcagtttccttttcccagtacttacttagtgacgttgctttttaattttttttatttgttttctaaatatataatacttatacatgtgatattttgttatatccatagaacatataatgatcagagtactgggcatgtctatcacc

SEQ ID NO: 24529 - DNA, 201 bp, Homo sapiens
gaaatgtatggagacatattttttggtctagcatatggcctttttggtggacattttatgggtacttgaaaataatgtattctgcagtcattgggctattrtaaaaatcagtgaggccatccgggcatgctggctcgtacctgtaatctcagccctttgggaggctgaggtgggcagatcacttgaggtcaggaaatcagg

SEQ ID NO: 24530 - DNA, 201 bp, Homo sapiens
agtcaaagaagttaaatgttatcttaaaatacacttaaaaaaatcctggaagtacctgaaccattttagaaatattcttgtcatttttactctttaaaatrgtacattcaaaaaaagagtgttaataataacacttaaagatatattcttatctttaagcaatattggcttcaacagcagtcacatcagtgtcttgtgctt

SEQ ID NO: 24531 - DNA, 201 bp, Homo sapiens
tcttcctatttttatcttattgtttaaatgaataatgtcattactactttaaaagccactgaaaaatttaaattagattaaattgtcaaagtgcataactratgtttgtatctctctgtccttgtgttaattaaggatttgtaggaagtgctgtggatgaatttaacccgtgagtggttgtaaatctgactagactacttg

SEQ ID NO: 24532 - DNA, 201 bp, Homo sapiens
ccttttgtggactcctggacgttagtaagggtggacctaagtatctggcaatgtgctcggggttttcttgagcaattcctcgagtgccacctagagtctartggtaatactgaattaacttctaagctttgtcaaggagcatggagaacttgagattctcagacatttttgttctgtatcatgaagaaactcaatagtaat

SEQ ID NO: 24533 - DNA, 201 bp, Homo sapiens
ctagtcagtgaaaatgtgtggatttgaatctttgtcttctgacctccagggctgccccctcaaatttctcctgccgctcttcagcctgagaggcacgcccrtcctttggagtggaactcacctctttccattgacttgacccagacagactcctcctgtctgcatttccacagcattcacattccttctgggtcttttttt

SEQ ID NO: 24534 - DNA, 201 bp, Homo sapiens
atgcctgtcctccagcaatcctcacaccttggcctccaaggttatccttttgaataaaaatcatatgtaactaaacccagttttttgtgatatgtaaatctagagttatatctttaaaactgtaaagcatgtttttgtaattcatgacctacttcttttttaccttaggagtgctacttctgaattcttgcagaagtacag

SEQ ID NO: 24535 - DNA, 201 bp, Homo sapiens
ctataggttgttcctcctgcctgacccctgtgcatgtgtttcagtttcttcgttgaaattgggcttgctttctcctgcagcttcctcctgtcttgacttcrctgaatccatccctgtggtatctaccatgttctataacctcggtgtttcttataaactgataggtggatgtagagtcttaatataactccgatttcaatt

SEQ ID NO: 24536 - DNA, 201 bp, Homo sapiens
gacattgtgattcacccacctcggcctcccaaagtgctgggattacaggtgtgagccactgtgcccggcctaaaatttgccacattttaactgttaacttmaaaaaaaagagtgttaacttcaaaatgtaagacaacttttcatcatttaaaaaatattaatagttactatatgttggtaatttgttaggttttaaaagta

SEQ ID NO: 24537 - DNA, 201 bp, Homo sapiens
aatacttaagctatatgtaatagtgttattaaaatatctgaatgttttgtaaatgttgctttatatttggctggtttagaatccacacgaaatccacaccktacatttgattgatatatctcttcggattcttttagtctataggttgttcctcctgcctgacccctgtgcatgtgtttcagtttcttcgttgaaattggg

SEQ ID NO: 24538 - DNA, 201 bp, Homo sapiens
tgtctccaggtttcttcggtgggtttggacctatccttgggagccttgccccatgaggacattcactgcttgatcatctatttgatggatgaactctgccyctcgtttattgctgtgtgtgatggacttttggttgtcataatacacaattattgttagtgtttaactcttttgttattttaaatggacatatcctgaatg

SEQ ID NO: 24539 - DNA, 201 bp, Homo sapiens
aaaactacttgctaagaatatgtaacaagttgggaattagaactctcctcctgtttgtttgtttttttttttttgatgcagactctcgctctgtcttccaygctggagtgcagtggcacgatcttggctcactgcagcctctccctcccgggttcaagtgagtcttcagcctcccacatagctgggatcacaggcatgctt

SEQ ID NO: 24540 - DNA, 201 bp, Homo sapiens
ttatggaaatcaaaataatataagaagttctttgaggaggtaggagaggggggaaagcacttctttacatttctttgtcacggtttttgtatattacttcrgtgccccttgaattattttccaagatctaagtatgtgtgggtaaaatgcaactgttttacatgtgtaactttattataattaattgtgtttcatcttttt

SEQ ID NO: 24541 - DNA, 201 bp, Homo sapiens
agatggacccattggctcccccttgtgtctactctttgtattgtcatcctccaggctcttggttaaacagcttgtaaggtaactttattactgctcttgargaagggacaatggctatattcgtcagcgttctcatccccttatttactctcctctgcattctgccctcttctgcggggttggtagagaatagcttgggaa

SEQ ID NO: 24542 - DNA, 201 bp, Homo sapiens
cttcttccgaacatctttatcaaaagtaataattatgctaccctcgatatgaaatgcacgtcactctcctttcatatgttctctgatttcaactgtgccawgttttaattaatgtacttcaatagtacgaaaacttgagcatctataattacatctttagtagcaatatttaaaacctttactgacaatatatttatcata

SEQ ID NO: 24543 - DNA, 201 bp, Homo sapiens
tttgaagacacgggggtctcactatgttgcccaggctggtcttgaactcctggcctcaagtgatcctcctgcctcagcctcccaaaaggctggaattatargcatgagccactatgccaggctgatgctccaacttttataaaaatgtagcttctttattttccaagtcccagaaaaaaccaaccaaccaaaagaaatctt

SEQ ID NO: 24544 - DNA, 201 bp, Homo sapiens
ggtatacacgttcagtaatctgatttcggtgagaagcaccaatcaccagatgacttgctgaccaaagtatgttttttcttttctttcttttcgtttttccttttttttttttctttttttgagacagggtcttgcaccatcacccaggctggagtgcaatggcacggtcatggcttactgcagcctcaatctcctaggctc

SEQ ID NO: 24545 - DNA, 201 bp, Homo sapiens
taataaaaggcatatttcttcctgttcttttggtgtctctggtgttcctgggcagccttgcctagctgggcttttttaaaaggtctattaacagatgtgattttttttttttttttatatttagagaaagttggaagtttcctcacatctgaggaaagtttgcaggaaagggggcaggagaaccctggggcccactcttgg

SEQ ID NO: 24546 - DNA, 201 bp, Homo sapiens
cctcatttccatctgggtttcatcattgctaatttcattttatatcttgttccaccatctgtccattgcctaataggtttcactagccttatgacaagacrtagcaaaagtattctcactctcaactaagcattttttaaatttagtaaatatttttctgtagatacatattctcagaatcagagccaaaattaatttgtt

SEQ ID NO: 24547 - DNA, 201 bp, Homo sapiens
caaaataaaattaatataaatatatatgctacacacacacacacacacacacacacacacacacacacatttttagagggcttgtggtttctgaagatgaygaaagaaaaaaaaactgtgaaaagcaaaaatgcccaaaggttcatcttctgccctgacccatcacccttcttcagaggtacccagtacctccaattccca

SEQ ID NO: 24548 - DNA, 201 bp, Homo sapiens
gaccgtgttgcatctgcctcctgcctctgaatacggtggtcccagcaatagatgctcaattctcagagcatctgcatgaccccccatggtcagtactgctycactgtgctcctttcattgatcctgttgttgctgccacgagagcaaaataaaattaatataaatatatatgctacacacacacacacacacacacacaca

SEQ ID NO: 24549 - DNA, 201 bp, Homo sapiens
gagacttagtttttctccaaattttcttctgttcagtgaagtcactgtagtcactgtagatttgaagatataacaacattaaatgatttaagtactttttrtatgcatatttgagggagtgagtaaaactattagaatattaaaaattttttttttgttatactgaagtcctacaagtggctccaatgtgtggaagcgtag

SEQ ID NO: 24550 - DNA, 201 bp, Homo sapiens
atgtcccatccaaggtgttgactgtgttgacttctgcttagaagagcagggtgatgagtcaaggccactgtgccaacccaaagggacaggaggtaccactrtaaaggttcaaccaagaatggtgagaaccataattcaagacttcacactggtgattgtattctggtgtggacactgtccacactaaagattgtgagatgt

SEQ ID NO: 24551 - DNA, 201 bp, Homo sapiens
tgtttctcccccctccctttttttttttaagagcgagggtcttgctctgtcacccaggctggagtcgctctgtcacccaagctggagtgcagcggcatgawtatagctcactgcagtgttgacctctggggctcaagtgatcctcccacctcagcctcctgagtcgctgagactataggcacgtgttaccactcccagcca

SEQ ID NO: 24552 - DNA, 201 bp, Homo sapiens
gtaatttctgtggttgcagagataaagttgttagtgggaagtgtggaccccagtgtagtcaaggtctgggttggttggacttcgaatctgtgaacacccaktgtctccttggctttggcagatgcatcctggttgctccttttgtagtactgctcttatttccttctgtgtcattggctctctcattcttcaccagaaatt

SEQ ID NO: 24553 - DNA, 201 bp, Homo sapiens
aaagggctatgagacttattttagaaattgcctaatgacagattcagggttttgaataggaaatagtatctggtagtcaaaaggtttctcaaataagtggaaaaaaaaaaaaaaaggtagagctggcccttgaaatgctaatctgaataacaaaagaccgagctgactttccaggaaaagtgtgaaaggcttctgaaccca

SEQ ID NO: 24554 - DNA, 201 bp, Homo sapiens
tttgttgggtaagtactatgtgtcaggcaccatgtaatgcttgtgatatggaggattttcgtactgattctttcagtactaagaggaagagtttttaaagtgtgtgtgtgtgtgtgtgtgtgtgtgtgtgtttgtgatggggtctcactctgtcacccaggctggagtgcagtggcatgcatggtcatagcttactgcagc

SEQ ID NO: 24555 - DNA, 201 bp, Homo sapiens
gcaccatgtaatgcttgtgatatggaggattttcgtactgattctttcagtactaagaggaagagtttttaaagtgtgtgtgtgtgtgtgtgtgtgtgtgtgtgtttgtgatggggtctcactctgtcacccaggctggagtgcagtggcatgcatggtcatagcttactgcagccttgaactcctgggctcaagcttctt

SEQ ID NO: 24556 - DNA, 201 bp, Homo sapiens
caaccaagccacaggttgtgcattgtgagtggaccgtgttgcatctgcctcctgcctctgaatacggtggtcccagcaatagatgctcaattctcagagcrtctgcatgaccccccatggtcagtactgctccactgtgctcctttcattgatcctgttgttgctgccacgagagcaaaataaaattaatataaatatata

SEQ ID NO: 24557 - DNA, 201 bp, Homo sapiens
ctgggcgtggtgatgtgcgcctgtaatcccagccactcagaaggctgaggcaggagaattgcttgaacccaggaggtggaggttgcagtgagctgagatcrcgccactgcactctagcccaggtgacagagcaagactctgtctcaaaaaaaaaaaaaaaaaaattactactattcttacttgggcttcataatctaactt

SEQ ID NO: 24558 - DNA, 201 bp, Homo sapiens
attaacgtatcaatctttcaatgtcttcctcttctcccttcttcttcgtccttcttttttttgtttctttttttttttcttctccctctctttctcagtcyctctctcttgctgttacttcctatgtaaaaatagcacaactccttgtgaggaaaaattggaaaatgcagaaacatacaaaggaattaatcacctgacatc

SEQ ID NO: 24559 - DNA, 201 bp, Homo sapiens
ttcaccgtgttagtcaggatggtctcgatctcctgacctcgttatccacccgcctcggcctcccaaagtgctgggattacaggtgtgagcccccgcgcccrgccttgtacctattttattggtgagcaagtagagccctggagagtttaaatagctcacctaatagttcaaccagctgttaaatgttacacctaatagttc

SEQ ID NO: 24560 - DNA, 201 bp, Homo sapiens
cataatctaacttaaagtagatactctaaatcttttcccctatggaaaacaattatggctaaaacattttaaattaattaattaagtagaaactgggtctygctttgttgcctaggctggtctcaaactcttggcctcaagtgatcctgctaccctggcctcccatagtgctgggattacaggtgtgagcggctgtacctg

SEQ ID NO: 24561 - DNA, 201 bp, Homo sapiens
aaaaatacaaaaaaaaaaattagctgggcatggtggtgggcgcctgtagtcccagctgtgctggaggctgaggctggaggatggcgtgaacccgggatgcrgtgcttgcagtgagccgagatcacgccactgcactccagcctgggccacagagcgagactccgtctcaaaaaaaaaagaaagaaaatgaaatgttgttgc

SEQ ID NO: 24562 - DNA, 201 bp, Homo sapiens
cttttgagatagcttctcactctgttgcccgggctggagagtagtggctcactgcagcttcaacctgccgggcttaggtgatttttccacctcagcctccsaagcagctgggactacaggcaagtgcctccatgcccggctaattttttatattttttgtggacatgaggtttcccaatgttgcccagtctcgtctcaaac

SEQ ID NO: 24563 - DNA, 201 bp, Homo sapiens
agataatctaagttatacctggaaagagattttctcttgttttgagagaggatctctctctgttgcccagactggattgcagtggtccagctgttgctcastacagtctcaagctcctggaattaatcagatctttgttttgtaaaataatttgaggctgggcacagtggctcacacctgtaatctcagcactttgggagg

SEQ ID NO: 24564 - DNA, 201 bp, Homo sapiens
atttacatctacctttattcttaagtctgtggcacttaaatttgtttcacattacttttccttgtgaaaatagtaattgtatgttggtgtttatatacactttttttttttttttaagatctagtatctactagttagcatttttggtgcctttgatatctcagatcaaagattcacaaactttctgtaaagggtcagata

SEQ ID NO: 24565 - DNA, 201 bp, Homo sapiens
tttacatcctgcattcatgtcttgaataatttccccctcaaatataaactgatgtttctctgtctacaagactagtagtcaaacatctttggatggtcttragacataccatactcatccatttaattcagcagaatctgagcttcactctcccctcaactaagatttacatgattataattatattgtttgtcattttta

SEQ ID NO: 24566 - DNA, 201 bp, Homo sapiens
  misc_feature (1)...(201): n = A,T,C or G, or insertion/deletion polymorphism (see Tables 1-2)
aggttggcaggatcctgtgaatgggtatgtgggcagtttttctgatcttttgcaatgattaggagcagttcctgaccttgccttcaaatccctggccttcngagataagttctattcaggaacaatgtcctttggacctaatttccaccggcaatgcaagatttactcattgattgatggtggagagggtagcctcgctct

SEQ ID NO: 24567 - DNA, 201 bp, Homo sapiens
tttgacagacatccttgcagtttaagatgacacttttaaaataaattctgtcctaatgatgacttgagccctgccactcaatgggggagtcagcagaaccygtaggatcttatttggaattgacattctctattgtaattttgttcctgtatatttttaaattttctttttgtttcgctggaaaggaaagatgatgctcag

SEQ ID NO: 24568 - DNA, 201 bp, Homo sapiens
tttccccattcatcctccagttcaggttttgtccatcattgttgactgtaatggtacatatggctgatctggcagacagcagtgatctcatttgtaacgcrttattgtaaaacccatttagcagattagtttgagattacgttagctgaatgaagacattgctgtgtcctttatgaagaaagccatacatttaagacatgt

SEQ ID NO: 24569 - DNA, 201 bp, Homo sapiens
ctgtagtcccagctactcaggaggctgaggtgggaagaaggcatgagcccaggaggttgcagtgagctgagattggattgcaccactgcactccagcccgrgtgacagagtgagaccctgtctccaaaaaagaaggtcgttcttctattttaatatgacttaaggcatgactagcaaattcttcctgaggtaccagtgtag

SEQ ID NO: 24570 - DNA, 201 bp, Homo sapiens
atacgtacaccatatagaagtgtataaaatttaaaatgatgtccttttttttccttctcctcaatcccactgcaggataaccactgcaaattttgaggggkgtgtgtgtgtgtgtgtgtgtttacgcattttaatatgtgtgtgtgtgtgtgtgtgtgtgtcattttgtctctgtaaaaagaggctcaagccacacaggat

SEQ ID NO: 24571 - DNA, 201 bp, Homo sapiens
tagaatagctttctatgtgaattcttttcccccttattcattactggaaccagtaattgcctagagaatgatgggcaaaatgccagctcatcatttctttwagggtctaagaattggctttggagaatggaagaaaattccagaaacactgtcaagaaagttattatttatttcaaatgttatttggaacagcaaaggaca

SEQ ID NO: 24572 - DNA, 201 bp, Homo sapiens
gggtagtaaagttttctctttgaacgtttgtgtgagtcagagcagattgcaaaactctgattctgtgctgagaatgggtttggtcctggagcaactattarcacagtatttcttcagctatgctgtttcttggaaggtggctcatctgacattcatccatggcttttaaaagataacatacaaataattgatatcttccag

SEQ ID NO: 24573 - DNA, 201 bp, Homo sapiens
gttatcctaacactgggtttctgtactgtctttaattttcacattatctctaaagtcttcaggaggaaatataagcagtgtggtgctagaatagctttctrtgtgaattcttttcccccttattcattactggaaccagtaattgcctagagaatgatgggcaaaatgccagctcatcatttctttaagggtctaagaatt

SEQ ID NO: 24574 - DNA, 201 bp, Homo sapiens
cctgggcaacagagtaagacccctgtctctgggcagggggaaaagacaatataatcaattgttaaaatagatgattacagagctttgggaaggggaacgaycagtggggctggagttagtagtgactgcttcatagagatgatagtttgggagctagatcttattcccaagaatatgtataatttagcaaactagaaaaat

SEQ ID NO: 24575 - DNA, 201 bp, Homo sapiens
tgcagaatgaaaatgcgagtctattgtttaaaagtgattcagaattttgaactggtcaccgcagagcaagacacctattgtggcccctgtgtgagtatacrggtgattccacccacggagccagccctgagctgtgtgggagtgctgatggaaattatctcagggcacttatccgcaatgatttgtaagatgatggctttt

SEQ ID NO: 24576 - DNA, 201 bp, Homo sapiens
tattaaaacatacctatgttctggctaagtgctgtgttagaaaactacttgctaagaatatgtaacaagttgggaattagaactctcctcctgtttgtttktttttttttttttgatgcagactctcgctctgtcttccatgctggagtgcagtggcacgatcttggctcactgcagcctctccctcccgggttcaagtga

SEQ ID NO: 24577 - DNA, 201 bp, Homo sapiens
ttgtaaagttgttataagaattaaatgagttgcatgaacattggagatgtgttgattattgtatttcatacatacattaaaattatattaatggcttgcarttgtagacagatcatcaaatgtggttactattttcacaaaacaagaacatcctaagtgtctactcattcaacttgtatgcaagtaacagaaaatccatcc

SEQ ID NO: 24578 - DNA, 201 bp, Homo sapiens
ggagggcattgctgctggcggtgtgatggttgttaacactgctttacaagcggtgctgaagaccactctcgtccatgatggcccagcacatgagattcgcrgagccgccagagccttagacaagtaccaagcccatctttgtgtgcctgtatccaactgtgatgagcgcgtgtgtgtgtgtgtgaagttggtggaggccca

SEQ ID NO: 24579 - DNA, 201 bp, Homo sapiens
tattgtatttcatacatacattaaaattatattaatggcttgcaattgtagacagatcatcaaatgtggttactattttcacaaaacaagaacatcctaartgtctactcattcaacttgtatgcaagtaacagaaaatccatccgaaagagatttaaacaataaaggatctgtatgttgcataatcacaaaataggttga

SEQ ID NO: 24580 - DNA, 201 bp, Homo sapiens
tttctgtacctaaaagactatatctgcttacccttgattaagtaatagattctgaaatgctagactctgtcatctcagtattttagtattcgatgtctagrtatttcttcatgaatgaatgcctttggctgtttgtctcattgtgaaaagttgatttgattttaatgtaaatatatccattcctcatcttaataatttttt

SEQ ID NO: 24581 - DNA, 201 bp, Homo sapiens
aaattttttgtttacctttttgggttgtgaaccagctgcactgtaatttatgttaatttgtgctttaaaagttttcagggttgtactcgatcttaattgtrggtgagaaagatgaaaattatgcataaatactaatggcagtcgtgaaagggagagaggttattcttttttgaaaaaacagaatcctcctctgtcacccag

SEQ ID NO: 24582 - DNA, 201 bp, Homo sapiens
ttattggtaaatataatctttttgaacatcttatagtaatatatcttatggaaatcaaaataatataagaagttctttgaggaggtaggagaggggggaargcacttctttacatttctttgtcacggtttttgtatattacttcggtgccccttgaattattttccaagatctaagtatgtgtgggtaaaatgcaactgt

SEQ ID NO: 24583 - DNA, 201 bp, Homo sapiens
atgagcagagtaaattattttagaataatgttaccaatcaattaaaatcttgtttctaagcaggaaagttgtattctgatatgttagagcaccatcatgtsaaactctctcctttggttcaaaatcacaaacgagaggtggagtcttccttgttgaaatagtggtcataatctcattccactattagcttagtgggcagag

SEQ ID NO: 24584 - DNA, 201 bp, Homo sapiens
taaccattgggggcatacttttattctcaggaacttggctgctgtatgtcttcctctggactcatctacagtaaatgatgtttcaccatctattggtaatsaaaatggtgatatgtgtgttatactttcttatgcaagagtcagggctattacttcagtgctattctaagtgtctaaaaaaggtaggagtgtgtgtatgtg

SEQ ID NO: 24585 - DNA, 201 bp, Homo sapiens
agaacaacttacattaactgtgaaaagaattctccctgatgtggaaatacatataatcttattttggcaagcattttacccctttcagtttctgcttttcytgatgtttaaatttatcttgtagccttgtatggtgatagcaactccttggtatttttcttgattttaattttcttctgcagtttgaaagattgtattcat

SEQ ID NO: 24586 - DNA, 201 bp, Homo sapiens
aaatctgtggtaacaaattagttatttttaactcttttgcacaattaaaagtaatatagtaattttttagtgctgtagatgggaaattttgatgagaaaarttatgtacaggttgtgaatattgtgcatgttaggaagtttcattctttcactggtactctctcttgttcaagctctcctctttccttctgtatgacttat

SEQ ID NO: 24587 - DNA, 201 bp, Homo sapiens
tcaaaattttggtatttctgtagcaaaatgtgaatattcaccaagtaaataaatactacaaataatcttggattggttcagagttgcttttgccaccaaakgtacttctaacaaacttatgaaaaatttttcattttgagagtcatttgattttggaattgtggacaaggcatcatgaatctgtgtcattgtgtttgcaag

SEQ ID NO: 24588 - DNA, 201 bp, Homo sapiens
ttttcttactgaaatatgtatctccacagagtggaaatacataacatgcaaatataaccttttggtcgtgttagaaagttcatattctcactttgtaacawgacattcaaatatcaaagaatataataaattcatttgtgtcttttgttaattttgcttgtgaattgccactaaaatttatgaaaatcacagtgcatgctt

SEQ ID NO: 24589 - DNA, 201 bp, Homo sapiens
tggtatcttttctgaattcttttgaatatatgtttatgtattgtttttgctagcagaggtctacttcaaacatgaaaagaataactgcaataaaagattawattcagtctaaagtgttgctttatagaagtaagattttactgcatttaagtgtgtacttaaatttgtaagtatataaaggagatattttttccattaaaa

SEQ ID NO: 24590 - DNA, 201 bp, Homo sapiens
gtctccccaaaaaataaataaaaaattaaaacaaaattaaaaaattattttaagaatgaaatgagacaattttaaagccaacattttacgtatgattattygtaacactgtatagtatttcttagtgaaccaaccatctctatgaaaatataatttgtgatcaaatatatcatcattttgaattcaagaactaccttccca

SEQ ID NO: 24591 - DNA, 201 bp, Homo sapiens
tagtggcacctacctgtagtcacagctacttgggaggctgaggcaggaggatcattgagtccaggagttcgaagcttcagtgagctatggttgttgtaccratgttctccagcctaggcaacagaatgagaccctgcgctccaacctgggcgataaatgagattctgtctctcaaaaagaaaaaaagaaaaattccctttt

SEQ ID NO: 24592 - DNA, 201 bp, Homo sapiens
tgacccccagaactataatataataaatgtgtgttgtctcaaggcaatacagttgtggtgatttgttgcagtacccatcgtgtatttgtttcctaattgcytcctagaagcatgattcaatgaaagttgagtcctttgcattctagattactctgtggcattcctgaaactctgttctctttgtttttgtggcactgtttt

SEQ ID NO: 24593 - DNA, 201 bp, Homo sapiens
aatgtgtgttgtctcaaggcaatacagttgtggtgatttgttgcagtacccatcgtgtatttgtttcctaattgcctcctagaagcatgattcaatgaaasttgagtcctttgcattctagattactctgtggcattcctgaaactctgttctctttgtttttgtggcactgttttctccttcctttgaaactatcctttt

SEQ ID NO: 24594 - DNA, 201 bp, Homo sapiens
gttgtctcaaggcaatacagttgtggtgatttgttgcagtacccatcgtgtatttgtttcctaattgcctcctagaagcatgattcaatgaaagttgagtsctttgcattctagattactctgtggcattcctgaaactctgttctctttgtttttgtggcactgttttctccttcctttgaaactatcctttttttttag

SEQ ID NO: 24595 - DNA, 201 bp, Homo sapiens
cctgtctgtttctattgattgatttttctcctgattgtggccacatttccctcttcctttctatgtctaataattttttatcagatgtcagacattatacrttttgtattactgagggcttgggtttcatttttttttttcctttggaaggaggctcttgctctgatacccaagttggagtgtggtggctcactgcagcct

SEQ ID NO: 24596 - DNA, 201 bp, Homo sapiens
acttctgtgaacactagacaccctgtgccctcccgctgctgaggcccgccaggaccaccgggtctcccaccaccctcccctccaccggtgctccccagtgytcactgtccagccacgctggcctccttgcactccttgactaggccaaatgtagagtcctaggctgctagtgcccctgcccttgccatttcatctgctggg

SEQ ID NO: 24597 - DNA, 201 bp, Homo sapiens
ggttaaggaagagaagctttgtttaaatatttggggtcaccagaaaagaatgttagctgtggcttgtatcacctcagatagactttacagcaaagaacaaraagagctgtcagaggcccgccctcagttttctctcacctgagctctgcgtgccagcaggtctgtttagtaggggtccaggtttctgaaaaacaggacata

SEQ ID NO: 24598 - DNA, 201 bp, Homo sapiens
cctttgtttgggcacacacagagataaagtaagatttatttattattggcaagcaggtccaggctcacaaattggtattccattaccagaggtggatgaaygatgtggagtgggatggggagggggtgatggggggtctgggaacaagctggtcttcgtgactgggactggggccctctgggttgggacagaatggtgtgc

SEQ ID NO: 24599 - DNA, 201 bp, Homo sapiens
ttgagcccaggagttggagggtgcagcgagctgttattgtgatactcctactccagcctgggtgacacagtgagaccttgtctcaaaaataataataatartaaataaataaaaatttaaaaagttaaaaaagtaagatgttgatgccagcaaaacttattggtgatgattgaaagccaaaaatatattataaaacacaca

SEQ ID NO: 24600 - DNA, 201 bp, Homo sapiens
gcagaaaaggtggtgttggctactaatgtcaccccagccctaaaggagtaatgtgttcttgataagtttgtgacattgctttcctgtgtaaatatgaaaayattctggaacttgatttcttgttactcttgtgttgtgcaaattgtgtgttctggcttcctttaccaaccacaagtaatgagaggttccaaaacttaaata

SEQ ID NO: 24601 - DNA, 201 bp, Homo sapiens
gaactgctcattagcagtctttaaaaataactttgagaaagaaacattggactataatgtgctgtgcaattttgttccctattagaaagcagaagatgagratattgttcttacacctgatggcaccagggaatttctgacatttgaagtcccacttaatgattcaggatctgcaggccttggtgtcagtgtcaaaggtaa

SEQ ID NO: 24602 - DNA, 201 bp, Homo sapiens
ttgtcatttatggagcaccttttcacgaaaaccacgcagtgctgttcctagtgtagaccattaaagtgaaaaagcattactggcagactaattgtgtatgstgtagcatgcagtctatcacagtaacccatcacacaccaaaatgcacatgccggcagacccgtgcaacgatggttgatgttcacagtgaccctgaggtgt

SEQ ID NO: 24603 - DNA, 201 bp, Homo sapiens
ggagttatggatgtggaaatcaacatgcagatggtatttaaaaccatggaaatggacgatatcatcgagggagagaatggaagagagagaagggctagttytgagcccttgggaatctcctgtgttgagagatcagtacagaagcgacaaggagcaaaggaaactgagatggggtagcaggaataatagaaatcaagagaa

SEQ ID NO: 24604 - DNA, 201 bp, Homo sapiens
aaatcaacatgcagatggtatttaaaaccatggaaatggacgatatcatcgagggagagaatggaagagagagaagggctagttctgagcccttgggaatytcctgtgttgagagatcagtacagaagcgacaaggagcaaaggaaactgagatggggtagcaggaataatagaaatcaagagaatgcagtcctatagaaa

SEQ ID NO: 24605 - DNA, 201 bp, Homo sapiens
gcgacaaggagcaaaggaaactgagatggggtagcaggaataatagaaatcaagagaatgcagtcctatagaaaccaagacaggaaggaggcagcagtccmctgtttctagcggacctaagagatgcttaagatgtaacagaatgatgtccatggatttagctacatgaggatatctggctacacgcctgatggggtagta

SEQ ID NO: 24606 - DNA, 201 bp, Homo sapiens
aggaaggaggcagcagtccactgtttctagcggacctaagagatgcttaagatgtaacagaatgatgtccatggatttagctacatgaggatatctggctrcacgcctgatggggtagtaggctgaagagtttacgggaggcaagggcactccattctgacacagagagtccaagggaatgtaaaggccaaattgtttcct

SEQ ID NO: 24607 - DNA, 201 bp, Homo sapiens
agggaagatattggggatggcactgcttttgggagccccttaaatcaggccatttgaagtggccagtccgtctcccaaaggtggccctgctcccattcctwgccctttcctcacattcaatagctctcccgctgctatcccagatgtaatgcgtgggtaccaagaggtgggattgggtaggctttattagtcagaatccat

SEQ ID NO: 24608 - DNA, 201 bp, Homo sapiens
ttgggagccccttaaatcaggccatttgaagtggccagtccgtctcccaaaggtggccctgctcccattcctagccctttcctcacattcaatagctctcscgctgctatcccagatgtaatgcgtgggtaccaagaggtgggattgggtaggctttattagtcagaatccatttaactaattcaaactgtttggggaatc

SEQ ID NO: 24609 - DNA, 201 bp, Homo sapiens
catatttaatgcaaaaagtgtatacaatacagaaaagcaaatgcaaaccacaaatgtcaccacccgatgacaattattttgaatttttggatgctaacagyattttaagtattatttttaaatacaccctcctccatccacctgtgccagcgtgtgacacacacacttctttgctaagcactcatttaactgcgaatataa

SEQ ID NO: 24610 - DNA, 201 bp, Homo sapiens
cacagagttagagtcactcttgttgaatagtctgagcaccttcccaggtatcaagtttttgatcattaatatctactatgtcaatcaggagagaatgatcrattatttccactttgtaccgccggatgtatctcttctccttgtaagtagaaaggtcataacaccttgagctgttacgtatactccacaggccagcaggct

SEQ ID NO: 24611 - DNA, 201 bp, Homo sapiens
ttgtgtccacgacagagacttttattttttagaagacatgtaagaaaaaaagtaaatcatgtgttcatggttatgtctctaaaaaatgcaattctgctgawgtgtagctaaagcagcctattaattagcaaaggcacttaaaattgttttacaccacagacagtattcaagctttgagaaataaaaaggtgtgttctttgc

SEQ ID NO: 24612 - DNA, 201 bp, Homo sapiens
ctgtcctgcatcaataggagctgacaaatcttagtagcccaaggaaggccataaaaggggctcactccaggcaaacgccgcccatttcctatttcctaccygtgctggatttgctgaaaccgtcaccatagtgaatgacatctgagacctgtagtctggtttcataccccaatatgctgaagatgtgcaatgaatagctag

SEQ ID NO: 24613 - DNA, 201 bp, Homo sapiens
agtctcactttccatattctatctctagcaaatggatgtcagtgttaatactgggcagtgtctggctaggttttcattttcattttacatcaggttgttcycttagtaatccagcgcattctggacaactaaacactagagtcagggactgagctagatgctgtaggtgcaaagatgcctgagggaagcctggccctgata

SEQ ID NO: 24614 - DNA, 201 bp, Homo sapiens
ttctatgttcaggaccactttgttgatgggtagatttgggggtgcaatgccacctatacactgcaccccaagctgtgtcccctccaagtgtctcctttccytaatcccactgaggtgccataccggtgagcagaggcactatggtgtttaatccctttctactggtcttttatgcaattcaggttcctttttagataagaa

SEQ ID NO: 24615 - DNA, 201 bp, Homo sapiens
gctttctattttgaaatatataatagattgtttatttttttcttttaatttttttttttatagagactgggtctcgctgtgttgcccaggctggtcttgarctcctgggctcaagtgattggcccatcttggcctcccaaaatgctgggattacaggtgtgagcccacgcccagccagattgttgttaactgtggtcagta

SEQ ID NO: 24616 - DNA, 201 bp, Homo sapiens
cttcaccctctccctggccgcccacttcctcttcttagagcctggcattcttctttcaaaattcaagtccctctgcttgccattgcatctgacaccttacygcactcatacaggattaaggtttgtggatttgacttctgaaaactgataaagtgaacagaggagtgtttttcttaaaataattttttaaaaacactgcag

SEQ ID NO: 24617 - DNA, 201 bp, Homo sapiens
acaaaagttggtgttaaccccccactgctaaaatctgactggctaaaaatagtaaaaatgaaaacaaaaaatgatactttgcaagccccctgatccttttytccaagagcaatggtgcactggggtggggatcctgtcattcagtgtttcctccctggtatccagcacaaggtcagcagaagtgagtgctcagtgaatgtt

SEQ ID NO: 24618 - DNA, 201 bp, Homo sapiens
tgtatcctgatggtgtggttggtacatgaatctcttgatgtgttaaaattcattttattttttaacataccctagagttgcttttttgggtgaacaactcyttgaattttaacacacagaacttcataccacaaaaaaagtccattttactgtatgttaatttaaagataaaattttaaaacatggctccccttttgaaag

SEQ ID NO: 24619 - DNA, 201 bp, Homo sapiens
tccctggtcaccctcatgaaaccatggccatgacctcgttaactctgagctctgccttcactgaccagccactggggattgtcagcttagggcaattaccycttagtcctcacaccagctccacgtgtgagatgcctgtggcttctccaggctaagccctgtcaccgaaccaaactgggtccatttgcctgttcacaacag

SEQ ID NO: 24620 - DNA, 201 bp, Homo sapiens
tggccttgaaatattacaagctgaggtttgccagtactctggttattcaggatgtacagtttatttcacagtcaaccaggaagccatgttgcaagacttcrgggtttttcggaaggaggaagacacagccgatacccgcacagagattcagatgtagttgtgaaaataaggcatccatatgtgcaaaattaatgcctgcaa

SEQ ID NO: 24621 - DNA, 201 bp, Homo sapiens
gctgttccacaatggagcagggctcctgagcattaatgatcacccatcgtgacacagtcccaaatacatgggaggcctggggttaaatctgactgtttgastttccctctgtatttgcctgttttctgacacctttctaaggggttgactgtttggggcaatttttgtaatctgtaaaggacatcagggtgcacttcagtt

SEQ ID NO: 24622 - DNA, 201 bp, Homo sapiens
aaaggttttttctccaagaagaaacacttcaaggggcaggaacctgccacacatatcctgaccatgtctctctgcttcaatgtttttatctaggattttaycaagaatgctcctgatttgagagccaggagaaaaatattctaaaaaaaaaacaacgaaaaacaaaagcaaatgacaagtgttccattttaacacacgggg

SEQ ID NO: 24623 - DNA, 201 bp, Homo sapiens
gaatcttccaactcaggcgattccattgtgattgatctgagccaattttttgaggtaattgatgatattgccttagttgagtctgttagtgcaaataattrttaatcaatatgctctcagctcttagttcagaagataattctaacacatgatttatgctgaacatttcaattgagctacctttacaagaggaaaatcaat

SEQ ID NO: 24624 - DNA, 201 bp, Homo sapiens
aggaggttaaggtgtaaaacattttaggggctaaatttacatcactcccctaaactgttgtttagattctttgtgacttccttgtgctaaggctttctagsatggaatttgttgtttttcccttttagacaatgtcttgatgaatattgtggtttgatttttcccccctgtgagaggagatgcagaagaaattaatcacca

SEQ ID NO: 24625 - DNA, 201 bp, Homo sapiens
tatacttggtcggaaacctcagtgtgaaggtctggattcagttcactattcccagtataaaaggatgtgcagactgagcacagtggctcacacctgtaatyctagcacttcaggaggcagaggcaggtgggttgcttgagcctaggagttagagaccagcctgggcaacacagcagaaaccctgtctctacaaaaaataca

SEQ ID NO: 24626 - DNA, 201 bp, Homo sapiens
ttttctgatctgattgcaccagcctttccaaaacctaagtctcttaacccagaagtccaggcctctttctaatggtgctggaggaatgattggcaagcctkagatccgggagtggagattatagggaacggtacaggtggcaggagctgccccagagacaaagtcaacaccactggggccattattttcgttggaaatgcg

SEQ ID NO: 24627 - DNA, 201 bp, Homo sapiens
attggcaagcctgagatccgggagtggagattatagggaacggtacaggtggcaggagctgccccagagacaaagtcaacaccactggggccattattttsgttggaaatgcgtaagaaaaccattcctcaaagtggaaacaataaacacattatctacttccaccatcagctaattgaggctgtctctcaataaacaagt

SEQ ID NO: 24628 - DNA, 201 bp, Homo sapiens
ggaagtgaaaagttcattctgggaggtccaatatttaaagaaaacaatttctagaaagagagaacagagataataaaggatagattattagagaaataacmcaagaatcttttccagaactggagaacttaagattccagattaaagaatcacctagtgctgagcaaaatcaatttttcaaaaaggacagcattgtgaagt

SEQ ID NO: 24629 - DNA, 201 bp, Homo sapiens
acaatacaataaagtctcaattagctagaaaccaagcaaacccacagttagccaatatgtttccaaattacacttttagaaacaagaggtagatacctatraaagtgctgttatcggggtgaggtggggggtctgtcagaaaaatagtgagaaaccaaaagaactcaatttcgtcctttttttctacaaagtactcaacag

SEQ ID NO: 24630 - DNA, 201 bp, Homo sapiens
gcaggtgcgagcctgtctttgcagcagatgatcttcagccacatgcttcgtcctgtgctagcccgtcatcctggatgactcttctttttatgttgattcartgtatggtaatgtttgcagagaaaactaacgaggcatattagaaatccgtactaatgtagatacattttgtaaaatcaaataagattgatcaccatccct

SEQ ID NO: 24631 - DNA, 201 bp, Homo sapiens
aatgacatatttttaacgttttctcttgaaaaatttctaatgtacactttagtgaaatgcaccactgatactttagattcaccagttgtttacatttgctrcgttgtttttctatctctataaacataaagatacacattagtaatagtatgcatttttttgtcctgaaccatttgagactaaagtacagatattataaca

SEQ ID NO: 24632 - DNA, 201 bp, Homo sapiens
aacgctgaggctggtcacaaaccggcttgggatgagctttgagtgcttggccaagaacactggattttgacttttagaaagtagtgagtcattggaaatgrctcatattacaggacagtcacatgataaagggaatattttgtgaagataaatgtagcaagatgtggcacaggattgaagagatggggtctagaagtgaat

SEQ ID NO: 24633 - DNA, 201 bp, Homo sapiens
gtgatgctcctgccctggcttcctggagtgctgaggttatgcgtgccagttactgtgtccggccaaggggatggtttataaactggatttgggaagatacmtacaatttgggtagttggaactctgggggtgaaagctttgcagatatgtggaagagaataaacaaaaacataagggtctcttcacttgaccagtatttat

SEQ ID NO: 24634 - DNA, 201 bp, Homo sapiens
tcctgcctcagtctccggaatacctgggactacaggtgtgcaccgtgacacctggctaatttttaattgctttatagagatggagtcttgctatgttgacsaggctggtcttgaattcctggcatcgagtgatgctcctgccctggcttcctggagtgctgaggttatgcgtgccagttactgtgtccggccaaggggatg

SEQ ID NO: 24635 - DNA, 201 bp, Homo sapiens
ttcccgatggagtaggatataaactagtagcagagcaggtagtgatgaatatttactgtttcttatttgttttctcattgttcatatgtaataatgaatayattactcattacttctaatcagtgaatattgttatgtaaatttcacagcaattatctgtacctttttagcaggatattttaactcccatttatgtcattt

SEQ ID NO: 24636 - DNA, 201 bp, Homo sapiens
atttttaaaaggtccctaaataacacacgtgcacattacatggaagaaatcactcgtctcagatatttgcattaagcctttagtgttccattctcattctsttatgttggagctttttacaaaattgtgaaggtgggtgtttaatctctacagatgtaattttctctgagcatgacacattatttagtagaatgaagtttt

SEQ ID NO: 24637 - DNA, 201 bp, Homo sapiens
agatgaggaaggactcttaaggaattctattttaaactgtattttccaaccaccattttttattcaaggagattgcattcattggctaaagtacgtaggckggccataacatgtcaggtgagtgtataattaggagatcttatatttaatgagcaccctgcatttagaatgccttccttcagaagtttcaaagaaatccta

SEQ ID NO: 24638 - DNA, 201 bp, Homo sapiens
caaaattgtgaaggtgggtgtttaatctctacagatgtaattttctctgagcatgacacattatttagtagaatgaagttttatagtactatggatgagtrattctgaccgtagttaaaagtttagtgaatacctaaactattttcccagcacttggagtttttcaaaactcaagtcatgttttggaaaacactattttcc

SEQ ID NO: 24639 - DNA, 201 bp, Homo sapiens
ccttaaggtcttgcagacaaactcttgttgattaagaaatttctattgggtttcttgagaatcataaagctgcaataatatatgaccagtgcctgggtcakcttcccaactagcatgcaggacggtgatgcaccttagtccttgaggaagccaggtatgagcagtcccacggtgttgtacaaattccgttttctttttatg

SEQ ID NO: 24640 - DNA, 201 bp, Homo sapiens
aaggtgggtgtttaatctctacagatgtaattttctctgagcatgacacattatttagtagaatgaagttttatagtactatggatgagtgattctgaccrtagttaaaagtttagtgaatacctaaactattttcccagcacttggagtttttcaaaactcaagtcatgttttggaaaacactattttcccttttatatc

SEQ ID NO: 24641 - DNA, 201 bp, Homo sapiens
tgcagctcctcgccctcccaatgacttaccaaatcacacgcctgccctagagagacccaccagtgtcttaggaagtattggctaaatggaaccacatagcratgtgtggccttggatatttaacatcaaaatcatgctttggcaagacatgttggcatcactcatcaacaggctctcagttctctggattaaaggcaaaaa

SEQ ID NO: 24642 - DNA, 201 bp, Homo sapiens
gttctcttgctttatttttccattggaaagcaattgctttgagcaccaccaacaacaaaaaaaagattatagaaaattataccttttaaaggcaatctctkcatcttgtttaatgcaagaacacagtctgtaaaatgtagtgtgacttgcacagcaattattcactgtgttagatctaatttcagaatgtttcaattgccc

SEQ ID NO: 24643 - DNA, 201 bp, Homo sapiens
atagatacctccacttagggcctctgtgacctgcaataaatttaaaaatacagtctctaaattttatatgtgtgtgtgtgtgtgtgtgtgtgtgtgtgcgygcgcacgcacatgcgtgctataaatgaattccctatatgctatttctgtgttagaaggacagggagaaatattgacgtcttttcttcctattttggtatt

SEQ ID NO: 24644 - DNA, 201 bp, Homo sapiens
tttctgcagtttttttcatggaagcctcacattctactttccagtctcacaggccatcctcaccacgatacacatgatcatttagtagcaaagtctgttcrtcagaaaactctaattgctttatgtgtgagaacattaaactgcaataaatttatggatgcagctgctccattactggagaacaagttttatctcctaata

SEQ ID NO: 24645 - DNA, 201 bp, Homo sapiens
aaaattctctggactttgatgaatatttaattcatcttttctacaagacgtttgaattaaactgactactgataaaagatacagtgtggacaatggagttwtgtaaatttggcttgctctgaggggatctgaatttaaatggccaaaggatggtttctttttgttgtttatgataattcaaatgtactaatcttgtaatac

SEQ ID NO: 24646 - DNA, 201 bp, Homo sapiens
gtaatactgtacattaaggacttcaattgtctggtcccatgtgaaataagaaatagtatcaggtttactttatgttcatattatggactaaaagtttattrtacgtgtgtgtgtctctgcactcatgaatatgtatgtgtgtgtgtgagggagagctctcccctaattcaaatatgacacagattaaaatggctcctggac

SEQ ID NO: 24647 - DNA, 201 bp, Homo sapiens
tctttccctcttttcatgagaaatctagccagactatagaagggacaaaacatgtatttgacagcaggtattcatctcacattgaggaagtaggaaggttwgtcttagagatggacttggagaggataattatgataatactttagagctgtcatattttatgaatttaaacaaatttttaatttactttagagttttttg

SEQ ID NO: 24648 - DNA, 201 bp, Homo sapiens
tctacttgttacttcctaaataattgcagccgcaacactgctacttcaaaggaaattacataaattttatttgctgtatttaaagtacattaaaaggcatsacttacacatttttcattaaaaatacttttaaaacttggaaaggataaaagtataaaatgtaaatactgtctgtattaataaaatgcagagatgttttaa

SEQ ID NO: 24649 - DNA, 201 bp, Homo sapiens
tacatggtgaccagcgtactgttttttgctgatcaggtaggtgagttgttgaattccttgccttccttcaggtgaagtggatgtagcccaggagaacatgmttttaatgcaggcatcttaatctttccatcttggggaaatatacattttaaagaagcagtgttttctgaaggcataccttatcataaatcctacttacag

SEQ ID NO: 24650 - DNA, 201 bp, Homo sapiens
ttatattcttccaagttaaatgagcagagtaaattattttagaataatgttaccaatcaattaaaatcttgtttctaagcaggaaagttgtattctgataygttagagcaccatcatgtcaaactctctcctttggttcaaaatcacaaacgagaggtggagtcttccttgttgaaatagtggtcataatctcattccact

SEQ ID NO: 24651 - DNA, 201 bp, Homo sapiens
ttatagatacctccacttagggcctctgtgacctgcaataaatttaaaaatacagtctctaaattttatatgtgtgtgtgtgtgtgtgtgtgtgtgtgtgygtgcgcacgcacatgcgtgctataaatgaattccctatatgctatttctgtgttagaaggacagggagaaatattgacgtcttttcttcctattttggta

SEQ ID NO: 24652 - DNA, 201 bp, Homo sapiens
caacatcctcagtcatggcctgaaaaacctctggccactcagatcctaattttttgcatcaagatcactccaggtatctctccttttctaggctttgtttytggtaatactcatcttttaagtttcacctgactgcatcatgggcttttctccatcatgcatttaataatgatgttgttgctatctaaaataaatatcatc

SEQ ID NO: 24653 - DNA, 201 bp, Homo sapiens
aaaacctctggccactcagatcctaattttttgcatcaagatcactccaggtatctctccttttctaggctttgtttttggtaatactcatcttttaagtktcacctgactgcatcatgggcttttctccatcatgcatttaataatgatgttgttgctatctaaaataaatatcatcatttcttctggcagaaaagatca

SEQ ID NO: 24654 - DNA, 201 bp, Homo sapiens
gacccactctatgtctctccctagatgtccttattcttcatcgtattgagtgtttatgaagtgcctcttctgtggtcagcactggattagatgtttacttrtatctcatctcatattattcacatatacttgaagccaatatgatgatttctataaggggtatcagaagaaattattcaaaatatgacaagaaactctgtg

SEQ ID NO: 24655 - DNA, 201 bp, Homo sapiens
tagtttccctacacaccagtacttggacatcggttggaagtataaaatacaggcaaggcagtgttccaatctgcttgggaagggtcatgctgagttttagyagatgttttgctccattcttttctcctctgtcctcaggtagaagctggcactgcccccttccttactgagccttgaggcaccaggtggttttgaaatgtg

SEQ ID NO: 24656 - DNA, 201 bp, Homo sapiens
cttaatgtttatgcctagtaattatatacatcaataagcaaaagcagagctcctcttggggacgacctcacaaggttgtagtgataattaacacaaaccaygtgaagtattgtaccagaattttctcattgccctttctctggggtcttttatgaatatatcagcaaaatcatatttaaatgttatggtgttgttccttca

SEQ ID NO: 24657 - DNA, 201 bp, Homo sapiens
gtgacctttggccctagagctcatgatctggcagcaccttggctgggtaatactagtactctgttttcccagccctttcataggagctgaaagattttttwaaaaaattatatatataaagagaaaaacaaatattttaaaaatctataatcatattaagttgggatttttttccaaaacaaagttagtaaagtatcaaat

SEQ ID NO: 24658 - DNA, 201 bp, Homo sapiens
ggagcacttgcaaacaaaccctttccttttaagttcttacctcctattgaccattttgttccaacttaaaaaacttaaaaattatacctttagtttgaccrtgagccgtctctttatgagcattagagtattggaaattgtgatgttcagcaaaatctagaacacatggctgctttataaaaatatgagattcatggccag

SEQ ID NO: 24659 - DNA, 201 bp, Homo sapiens
aggaggggactcaccgcactgagcacaaactgctttccccgggagcgcctgcacccaaaaccctccagttcgaggaatgggattaaaagtgacaaagaaasgggaaggggggctccgtggagacttctggaggcgtggaaggggcgtccccgaggaggggcgacgcagccctgcagggtgctgggcgggcggggtgaaggg

SEQ ID NO: 24660 - DNA, 201 bp, Homo sapiens
tgataattaacacaaaccatgtgaagtattgtaccagaattttctcattgccctttctctggggtcttttatgaatatatcagcaaaatcatatttaaatrttatggtgttgttccttcaccacttagccattcctgcttcctactgtttttctggcttgtgtcaacattaaatattagataggaggtgtctgggggactg

SEQ ID NO: 24661 - DNA, 201 bp, Homo sapiens
attataaagcagtatattagtgaaaatagataaataagtagaagggatagattgtggcattaatttccctaagggggatttgcaaaatggtgaggacttgkataattttgctgtggggaatgtggggcaaagaaaataatatgaatgaagggttatccaaacaagaatgccagctgttctgaatcacagcagaaaatgcaa

SEQ ID NO: 24662 - DNA, 201 bp, Homo sapiens
tcatattatgaactgtggctagaacaccttatagcactttagaatgtgttcacagatttttacaaacaggagtgattctgggacatcttcaaccacttgcrttggaggaacacttcagaaggcatcctgttaccagggatttgccatatgcttccttatcatgcccgcttgagccactgtgttggtgtcacccaaatcaaa

SEQ ID NO: 24663 - DNA, 201 bp, Homo sapiens
gcatcctgttaccagggatttgccatatgcttccttatcatgcccgcttgagccactgtgttggtgtcacccaaatcaaatgtcatctaaacttagtcatkttcttcctgattctcatatactgtttattcactcatctatgcatcctcagcatctgtttcagacttctggtttagtatttttcttatgagctcatagagt

SEQ ID NO: 24664 - DNA, 201 bp, Homo sapiens
gttgttccaggcattcgttccacagaaattctgaagctttgactgtgtccatggcactgttctgggtgctggacatctaagggacccactggctgtgagargctgagcaagaggctgcggggtcctccaggtgaaggagctggtgatgacatggggagaagaggtggcctctgggatgctgggtggctagagtgcagggcc

SEQ ID NO: 24665 - DNA, 201 bp, Homo sapiens
acccaccttggcctcccaaagtgctaggattacaggcatgagccactgcacctgctcgattctgtgtattcttacttagcgaagactgtaatacattcttkaaattcttacctatttttaagagacagggtcttactctgttgcctaggctggagtgcagtggtgtgatcatggttcactacagcctcaacctcctgggct

SEQ ID NO: 24666 - DNA, 201 bp, Homo sapiens
ccactgtgttggtgtcacccaaatcaaatgtcatctaaacttagtcattttcttcctgattctcatatactgtttattcactcatctatgcatcctcagcrtctgtttcagacttctggtttagtatttttcttatgagctcatagagtacagggaatctttcttatctgttatttggatctacgtacctggcacaatgcc

SEQ ID NO: 24667 - DNA, 201 bp, Homo sapiens
taactatttctttataatgcttctccacttccattggaaccatgacattgcaacagaaattatattcacaggcaaagtcccacagcaactgtcttatgctrtgtgttgcagcctaaacgcttatttcttttgatttgaaggctgtaattcttactgcgagtctcagtaacttttgcaagagcagccattgacaggtgcccg

SEQ ID NO: 24668 - DNA, 201 bp, Homo sapiens
ctccaaccaaggaagggaaagctaactttaaaaaacaatttttggccgagcagagtggctcatgcctgtaatcccaggactatgggaggctgaggtcggcrgatcacttgagttcaggagttcaagaccagcctggtccaacatggtgaaatcccatctctactaacaatacaaaaattagccaggtgtggtggtttgttc

SEQ ID NO: 24669 - DNA, 201 bp, Homo sapiens
ctaggtttttaagtcagctatgtgatgtctaggttaacatccaaaaagtgattctcagagtggtgattttgatttgaaagataatagtgccaatataaatrtttttcattgtaggacaacgtccggtattgctatcattagtcattcagaaaggcatattctttttttgatgctggaattagcttataattaacctgacgt

SEQ ID NO: 24670 - DNA, 201 bp, Homo sapiens
aaatcgaatgttagcaagctttttctgtaaaggaacagatggtaaatattttagatctctgttgcaacttttacattctaccattgttgaatgaaagtagycatagacaatatgtaaatacatgggcatggctgtgttccagtaaaattttccacatttgactcacagtttgctgatctgtgttacaggttcagaagttgt

SEQ ID NO: 24671 - DNA, 201 bp, Homo sapiens
tgtgttccagtaaaattttccacatttgactcacagtttgctgatctgtgttacaggttcagaagttgtagataattgacattttgtataattttttattrtaaaagttttcatctatacataaatatacagagagtagttcattgaccttccacaaacccagggcccaccatccacaatggtcaacagtttgccaaaagg

SEQ ID NO: 24672 - DNA, 201 bp, Homo sapiens
atgacaaccagatgaagtgttttatctcaaacattttagccactgggtggtctctttttaatgggtctcaaataatgcagtgcaatattaattttgatcartctgtgtacatacatatgaaacttgcaactgaggccctctttgtaggttttcgtctagcagattggaagtgatctttcttgagttttcatttagccacac

SEQ ID NO: 24673 - DNA, 201 bp, Homo sapiens
tagagaaaggaaaagtgaagccacagtgaaatgtcacctccctcttgttagaatagctgttatccagaagaccccacaaaatgaccagtattgtgaggatktggagaaaaaggaaccctcatacactgttggtgggaatgtaaattaatacagacattatggaaaacagcatggaagttcttcaaaaacctaaaaatagaa

SEQ ID NO: 24674 - DNA, 201 bp, Homo sapiens
tctgcaggtgtacagggagtgctggccctggtttggtttaaactgatgagggccctgggcacatgcaaatgcgtaaatctatccttcaggcaagggatgaraaaccgttgaagagttttggcttcttcttcttccttcttccttccgtcttccttccttcttccttcttccttccttccttcttccttcctttcttctttc

SEQ ID NO: 24675 - DNA, 201 bp, Homo sapiens
cagcaaaccaccatgacacacgtttagctaggtaacaaacctgcacatcctgcacatgtatcctggcacttaaaatcaaattaaatcttaaaaaaagcaartgtgggttctgtccacattcaagggtagaggagtgcataaaggtgtgaaccccagaaggtgtggacattagggccaccttaaatccatccatcacaaata

SEQ ID NO: 24676 - DNA, 201 bp, Homo sapiens
tttttgcatcttggaatccttctcttctcttatgtattctgaccttgaagggtcactgtatttggaagggatgggaccatgatctcattctttggaatggkttgtaatcattttagttttaaggaaccacaaactcaccttcaagctgtgtgtacaactgagcccatattagttgaaattgtcatgcttgttagaaatgcc

SEQ ID NO: 24677 - DNA, 201 bp, Homo sapiens
tgagcttccaggttattctggttcttttagattattcctattaccggagcaaaacgatttgacaacaatttcatctgttgaaattttttttaaaaagtaaygacttagagtttttcctaatgcaaagagagaaaatagaccaaatctaatataagtttgggaaaaataaaaattagcaactattacttcatttattctttg

SEQ ID NO: 24678 - DNA, 201 bp, Homo sapiens
aattttcactaattcacactaacattttttttcttgtaaacctcccaggttctcccagcagagatgtgggtccttccctgggtctgaagaagtcaagctcrttggagagtctgcagaccgcagttgccgaggtgactttgaatggggatattcctttccatcgtccacggccgcggataatcagaggcaggggatgcaatg

SEQ ID NO: 24679 - DNA, 201 bp, Homo sapiens
ctgtaagtttataatggctgaaagaataataattaaaattagactctatttcttaaagtgagctccagggagccctggagttttctaagattcttcagggkaatctctgagatctctgaggtctaataatctcttatttcataataagacgatattatttgccctttactcacattctcttataagtatacactggggttt

SEQ ID NO: 24680 - DNA, 201 bp, Homo sapiens
caatacttcagcaaactctttgtttttgtttaaaaaaaaattgtctatcaaatgtggtgttactgctggtggctgtcagcttacataaaactgaagacgcraaggcactttctgcctccagctttggaaagaaggctggctcagttagccctccttcggcttcctaaccacaccattttcagcgtctggcttgtggacctg

SEQ ID NO: 24681 - DNA, 201 bp, Homo sapiens
gttatgtctccaatctacttcccaacttcttagcctcgctccctctgtcttcctccttctgtctgtgtccccctcatcctggtggcttaatggctttcctygggcatcagatctttggtttgagtcctctccatgctgatggtctccaggccatgttggaggtggttgtaatctttaggtgataatctttaggtgatagtt

SEQ ID NO: 24682 - DNA, 201 bp, Homo sapiens
catgccctttatctagaaagatggcttttctccccctgcatcagctgcctctttccttctaggatcaacccagtgtctgtctgtggtccttccctgggccyctctgtctagggtcagtgtctacaatctgtgcttcccacacactctatgcttacctctatcctgatgtttgtcacagtggtatataattaactgtttaca

SEQ ID NO: 24683 - DNA, 201 bp, Homo sapiens
atgttaacttttgccaagatttccagcacttcctacccccagtaacccaggcaattacaacacaagtgaatggctttggactcatctctacaccaccatayaattatcactgcttgtaattctttctccttcactagggcatacgtcctttaaggacagagactgtgtcttgcagtacctgctctgcagcagttgctcaat

SEQ ID NO: 24684 - DNA, 201 bp, Homo sapiens
agagaagactgttggcacactttcacaaagtaggtaagggattccttttctacatgtttagactttactttggccaggtgcggtgcctcacgcctgtaatyccagcacgttgggagactgaagtgggaggattgcttgaggccaggagttgagaccagcctgggcaacacagtgagaccctgtctctacaaagaataaaca

SEQ ID NO: 24685 - DNA, 201 bp, Homo sapiens
gtaccagctttcccaggactagtggtgcttataaaatcctgatcattccctccagctatcttattagaagtgttttccttaaagtcatacatgcatgtatmatgtaggatggttagtctagcatatgtgtgtttgtctttggtggtggggcaagagtgggagaagaggaggttgtatttcttcgtaggttaaaattggctt

SEQ ID NO: 24686 - DNA, 201 bp, Homo sapiens
accaacacaatggtcatacggagtttctttttgctccttgagaccagcgacttcatttctggattaaggccttgcattctgtttccccactgggaattctmgtcccctgattttaggtgggctcctctttatcttgggtttgtcttcagtcttgatgctcagaaaagtctcccctgatcgacaagtcatgctccatcacat

SEQ ID NO: 24687 - DNA, 201 bp, Homo sapiens
gcttgagttaaaatactgtttcctttcacttccaaaattctataactctgtgcaatggtttttaacaaaaatctttgaaaaataacctaaataggccgggygcggtggctcacgcctgtaatcccagcactttgggaggccgaggtgggtagatcacgaggtcaggagttcaagaccagcctggccaagatggtgaaaccc

SEQ ID NO: 24688 - DNA, 201 bp, Homo sapiens
acaactgagggtcttgctctgtcacccagactggagtgcagtggcatgatcatggctcactgtagcctcaacctcctgggctcaagcattcttcctgcctyagcctcccgagtagctgggactacaggtatgtaccacctatgcctagttaatttatttttatgtttgtagagatggagtctcactgtattgcccaggctg

SEQ ID NO: 24689 - DNA, 201 bp, Homo sapiens
agtctcagcatcacagactctcacaccccaccccagacctgctgaatcaaaatttgcatttttaaaaggtccctaaataacacacgtgcacattacatggwagaaatcactcgtctcagatatttgcattaagcctttagtgttccattctcattctgttatgttggagctttttacaaaattgtgaaggtgggtgtttaa

SEQ ID NO: 24690 - DNA, 201 bp, Homo sapiens
ggccttttgaaatgctttttttcccttgaaacctcaaattctggatttacatttgatgtttctgttggtggtatattacattgctttaaggttgtttagawcaaacgtcacaattaatgatgacatgaaggttaggattcgagcactagcttttttcagacaggtctaaaaagggctctgccctagtctatccctagcaga

SEQ ID NO: 24691 - DNA, 201 bp, Homo sapiens
gtgcccacaaagaggaaatgacttgtgcagtttcaggccacttaaccacagagtcattttattgtcctttttgtggctactgatagataaggcttgcactyactagatgcccttgtcatcaaggcccaggtcaccagctgcacacaatttatctgtatgtctttaaagcaggggggtccaatcttttggtatccccgggcc

SEQ ID NO: 24692 - DNA, 201 bp, Homo sapiens
ttactagatgcccttgtcatcaaggcccaggtcaccagctgcacacaatttatctgtatgtctttaaagcaggggggtccaatcttttggtatccccgggmcacactggaagaagtggtgttatcttggaccacacataaaatacactaacaatatctgatgaggtaaaacaaaaattgcaaaaaaaaatctgatattatt

SEQ ID NO: 24693 - DNA, 201 bp, Homo sapiens
caatctctatacaagtaattaggaaacgtcttacagataaaagataattttgcctgagtttcataaacatctcatttcacagtaaattccaggaattgcarttttttcccgcttctggggattaaactagtgagtttcaaatgatgtctccatagctgaaaattttaagcacacataaaaagtccaagggcccatgtagaa

SEQ ID NO: 24694 - DNA, 201 bp, Homo sapiens
accatctcccagactcaggcgatccttcaccttaacctcctgagtagctaggactaccggctggtgacaccacgtttggttaattttttttttttttttgkatttttgatagagacagagttttaccatgttgcccaggctggtctcgaactcctgagctcaagccatccacctgcctcggcctcccaaagtgctgggatt

SEQ ID NO: 24695 - DNA, 201 bp, Homo sapiens
tgtgagatcagactaatacaagggctttaaacatttgtgtgtttgtgatagaaggaaattccatatgcaggtatggtcaactaagtgagtacatttccttaaaaaaaaaaaagtaaaaatttggatttgatggatattgcttacaaacttgagtgctcccaaagttatttccacaggcatgctgaatctcatctgatctgt

SEQ ID NO: 24696 - DNA, 201 bp, Homo sapiens
cactaagcaccagggtttcaggactccacgcccccgaccttgaatgctcttcccctctttcttacacatttttcctgaccttcaatgtgtaacacaagcakttcttttctgtagtgaatacagtttcataatatctcttgcattgggatccttggctctgtaaactacttacctgcttatgtgtgtacatcttatcttccc

SEQ ID NO: 24697 - DNA, 201 bp, Homo sapiens
tttgaaacgaattgtattataaataaaataacagatactgtttttcctgtgataactaaaaagatggtttcccattatcagtgtcattatttttttccagyaaaatcatatatacaaccataatatagaagaacaatcaaaacaatgttagtttactagtatacatttattttaaggtcaaagtcaccacatttatttatt

SEQ ID NO: 24698 - DNA, 201 bp, Homo sapiens
ctaccttctgcacctatcttataaggtatttctgagaataaaacaaaattcaatactatacaaaaagaaggccgtattgttattaactagatggttaaatsaaactaccacttgaacttatttttaaaatgtttttcatttttgctgtgagaattgcattttatttatagacctctgatgactcataaataggaacctcgt

SEQ ID NO: 24699 - DNA, 201 bp, Homo sapiens
atgatttcctttacagcaagggcatgagagcaccatttccccacttttatatctagtccgttcttgaaaatgtgtaacaaatgactatgcatatatatatrtatagacatacatacacacatacacatatatataaagttatatatatacacacacataaacatatatattcacagaagttgtgttctcagaataatagta

SEQ ID NO: 24700 - DNA, 201 bp, Homo sapiens
cctccaactccgggttcaagcaattctcctgccttagcctctggagtagctgggactacaggtgtgtgccaccacgctcggctaatttttgtatttttagyagagacagggtttcaccatgttggccaggctgatctcaaactcctgacctctggtgatctgtctgccttggcctcccacagtgctgggattagaggtgtg

SEQ ID NO: 24701 - DNA, 201 bp, Homo sapiens
aaataacacaagaatcttttccagaactggagaacttaagattccagattaaagaatcacctagtgctgagcaaaatcaatttttcaaaaaggacagcatwgtgaagttttggaataccagaaagagaagatcctgtaaaaaaaaaaaaaaaaaaaatatatatatatatatatatatatatatatatacacacacacaca

SEQ ID NO: 24702 - DNA, 201 bp, Homo sapiens
gtgggcaaaaactaaagccaaactgtgattttcatcacatgtcaaagaaaggaaaactagtttgagtatagcaccaggtcatgtgcttgggagaaaaagtktggaggactcggttaaatctttaaaacagtatttgtatttggagctttgtagattacaaactcaatgttttaaaaatgtactccctaaattaaccataaa

SEQ ID NO: 24703 - DNA, 201 bp, Homo sapiens
atcctgaggatatggtgaacttggtcaagagaaggatacaatttctttccctcttttcatgagaaatctagccagactatagaagggacaaaacatgtatktgacagcaggtattcatctcacattgaggaagtaggaaggttagtcttagagatggacttggagaggataattatgataatactttagagctgtcatatt

SEQ ID NO: 24704 - DNA, 201 bp, Homo sapiens
gcagagccagaggtgcacatcctcacgcaaggtagtgcttagaggcgctggggtttattgaaaaggatgctgctacactggtttaataattttctttttctttttttttttttttgagaccagtctcactctgttgcccaggctggagcgcagtggcgcgatcttggctcactgcaacctctgcctcctgggttaaagcga

SEQ ID NO: 24705 - DNA, 201 bp, Homo sapiens
gccaggcctggttaattttattttttgtcttttggtagagatggtgttttaccatgttgcccaggctgatcttgaactgctgagctcaggcaatccacccrccttggcctcccaaagtgctaggattacaggcatgagccactgcacctgctcgattctgtgtattcttacttagcgaagactgtaatacattcttgaaat

SEQ ID NO: 24706 - DNA, 201 bp, Homo sapiens
atatgtatattttatagaatcttgaggtctcttgaataagtaacagaatatatttaaagccgtcttgtggtacttgcaatctacttttactattaaagttrctataaagatttagagatattatatctttgcctgtgtgatccattgttgccatatcatggagccaactccttggtcagaaacataacctccaattataac

SEQ ID NO: 24707 - DNA, 201 bp, Homo sapiens
taattaagtctctaccagttgaagtgtttcatattcagtattattagaaaagtgaagagtaggaattgagcaattaacatttgagtgcatcttttttacarttgaggaaattgaagttcagagaggttaatttgccctgaagtcaaacagccagcaagttctggagcaggactttagctcttctttaactgcagcatctct

SEQ ID NO: 24708 - DNA, 201 bp, Homo sapiens
cctaggagcaataggctacaccatacagcctagctgggtagtagactacatcatctatgttcatataagtatactcttatcatattcacatgatgatattrcctaacaacccatttctcaggatgtagctgcattgttaaacaatgcaagactgtagttctaaggttgatggaatttttttttaagtctctgctagctaca

SEQ ID NO: 24709 - DNA, 201 bp, Homo sapiens
atgcttacataacctctcaactgtttttccaggtttgaaatgcaaataacagagataaagacagaaactacacatgtaaacttgatatattaatagctcayccaatctacataacaaaataaaccaggggtctaggccctaaaagtgatagccgtggtgttagatttctgggcctcctttattccaggggatggggctctg

SEQ ID NO: 24710 - DNA, 201 bp, Homo sapiens
atatatttagatacacaaataccattatgttccaattgcctgcagtattcagtgcactcacatgctgtacaggtttgctgcctaggagcaataggctacamcatacagcctagctgggtagtagactacatcatctatgttcatataagtatactcttatcatattcacatgatgatattgcctaacaacccatttctcag

SEQ ID NO: 24711 - DNA, 201 bp, Homo sapiens
agcagatatttctaggtagcgttggtgcaatccagtatagaaagtggatttgttggtattacacataattaggaagcaggaacatcagtaattactgtgasaggattttgtatggcataattaatgccctcaaactatttagaaattcttagatgaaagaaaatacagaagtgggaattttggtgttgaaaagacaaaggc

SEQ ID NO: 24712 - DNA, 201 bp, Homo sapiens
atgcaaaaatgggatgagttgcagggtggggatcccagaaatgtgtttaatttccattaggatgtggcatcatatgattactacctcgaattttaaaatgwttgcagaaaggccgggcatggtggctcacctctgtaatcccagcagtttgggaggctgaggcaggtggatcatttgaggtcaggaggtcaagaccagcct

SEQ ID NO: 24713 - DNA, 201 bp, Homo sapiens
tgaaatagcggtagtagattcatttgggttgctgcaatggggaatataattacgtattcaactttttttttttagcaaaaagatgtgcagtccacatgcaragtgagaacatggtgagaaacgttcagtgtattctgtagaggagtgtggggagccatacttagcacatacagccagcaacaccaaagttgtggtcatctt

SEQ ID NO: 24714 - DNA, 201 bp, Homo sapiens
ctgccttgatctgtgccaagttgccagctgttttgccccctcccctatggcgtttgcaccaccaacaaagtgttaaccccataaagaaggaaagaaatgtyttagcagcatttttaaaatttatttttatttttgtaatgtagagtcttgctctgttacccaggctgcagtgcagtggcactgttatggctcactgcatcc

SEQ ID NO: 24715 - DNA, 201 bp, Homo sapiens
taaatagctgtgtttgttgtactgcttttgtaagtcaaccaagccacaggttgtgcattgtgagtggaccgtgttgcatctgcctcctgcctctgaatacrgtggtcccagcaatagatgctcaattctcagagcatctgcatgaccccccatggtcagtactgctccactgtgctcctttcattgatcctgttgttgctg

SEQ ID NO: 24716 - DNA, 201 bp, Homo sapiens
aagccaggatcttctgcccccgcatcacccttgtcttccctagcaagtgtgcagatctctgccttgataacgcgtgttcttttgtacgtttgctgagatcmatgtacaactattctcagggtttttaagcagctataaaatgaggtttttacaattcagtttgaatcttctcatacaataatcatgttcatgattcagcac

SEQ ID NO: 24717 - DNA, 201 bp, Homo sapiens
cttgtctgacactggcatcagggctaaggaaacaaaggtgaatatgactggctccctgccctcaaaatctgacttcttaattccggagagaggcaagtccrgtaaacaaacagctacaacgcagcatgaatctaagacagctgagcacagagggcactcagatgtgtggatgcatctgactcagccagcagagggatattt

SEQ ID NO: 24718 - DNA, 201 bp, Homo sapiens
gtggtcaaagtttgaaaaatcctgggttagaattgtagttaacacaataaacagaattctttttctaattttccaacatctctttccataacagtattatrcttgttttgtcatatgttttatgtcaccgttttatgtgtatcagaaccatgaaaaacaagtgcttcatttgggcatgtgtcattgggaatagggaaccct

SEQ ID NO: 24719 - DNA, 201 bp, Homo sapiens
gtggtttttgtttgtttgttttttatttggagaaacgaagtcttgcttcattgtccaggctggtttcaaactctgggcttcaagagatcctcctgcctcarcctcctaaagtgctgggattacaggcatgagttaccttgcattgtcaggctttgaaattgtctgagtaggctgacatcagcaatgtttaaagagaatgag

SEQ ID NO: 24720 - DNA, 201 bp, Homo sapiens
gtcacacatcaagtgcttaatagccacttgtagctagtggtaaccacagtaactagtgatatggaacacttccatcatggcagacagttgtgttggacagygttctaggagaatcatcacagagatagttgccatatacacactctttctcactagccagggcttgggacccggtttcttatagatgggctggaagtcttc

SEQ ID NO: 24721 - DNA, 201 bp, Homo sapiens
tgtttttttcagtccgtttattaaaggtctcttcaaacttaaaattagtcatggtcataggcagtagttaaaaattagattctggaagagtaaatttagattttttttttttttgagatggagttttgttcttgttgcccaggctggagtgcaatggtgaggcctcagctcactgtaacctccgcttcctgggttcaacca

SEQ ID NO: 24722 - DNA, 201 bp, Homo sapiens
aaagatagttcatttataaaaatccactttctttgaccatgatcttcacttaccaatcatgtttcatggctgtcaagatgatttcctctactttaccaaaytcaggataataacacaatatcctggaatcactaaaccgtttttcatggatgtggtattctgtttttttggggtcgggcagttgtaacacattcgaatagt

SEQ ID NO: 24723 - DNA, 201 bp, Homo sapiens
aatgtcaaggaagattgttcataaaccacattcattgagtgactgctgtgtttagggtgacattttaatgccagctggtagttaattgcatgctattttatttttttttctgttatcttaaaatatccttcatacgtgaccacgctattttatttattagtttattttattttgagacagagtcttgctctgttgcccagg

SEQ ID NO: 24724 - DNA, 201 bp, Homo sapiens
ttctgaattcgtatacgtgtaagttcttgggccctgcactagactgactcagaatttctcaaggcaagccttggcaatcagtatttttttaacaagctctytgaatggttctcatatacacagtgcatatagatgagaaccgctgttgtaaggtttctgttccctctcatcgtacctaaggaagtggttgagttggcttgc

SEQ ID NO: 24725 - DNA, 201 bp, Homo sapiens
ggcttgcctgtggggcacaggtgcggggcaggcttcagtgattccctgcagataggctcattgctccttttagcctgaatgggtatccttagccacattcrggaagcacatagtagtatccaatttgaagatgtagaagccttgtacaccgcatggtctgcctctgacatcaaagactgcaatccccgtagtaattatgga

SEQ ID NO: 24726 - DNA, 201 bp, Homo sapiens
taataattatgggcttaaaactctctgtgctgcatgaaaataacagaagaatacttctggttagatttgtaaaatactttgtcagtcaaacctcctataakcctcccataaaagctataaagtatgccaggaacaaaaaagcacaggtggaaaaatgacagtgagattcgggaatgcccactttcctgtctcttttgtctt

SEQ ID NO: 24727 - DNA, 201 bp, Homo sapiens
atttatgctcctccccattctgcacttttctccagggttggttgtgatgtcatgaacttctctccatctcacacacacccacagtcatgtatgatcaggartaacacaggctagggcagtgcttattgtgtgttatacataaaacacacaaatcaatgtgaactaatattctagaacaatttatagacaaacaggtgcatt

SEQ ID NO: 24728 - DNA, 201 bp, Homo sapiens
gcattgtgaaaaaagctaaatgggggccttagaagagaaactcatatatacctttatgttgcatacaattcgaactccactttgtaatgatttgatagggygttaagtttatttttcctttgaacaaacctcgtcttcaaattgtaactataacacaggtaggattgcagagcaagtgtgttaaggcacataaaagtcact

SEQ ID NO: 24729 - DNA, 201 bp, Homo sapiens
ctgtctaaaatacctcaataagccttaatcctaaaaccaaaatgaaaacatattttaaatgcccacatattgttttaaaaattcactttctcttaaatggygtcatttcacagcaagttgccatgttttgctagcaactgcagttcacagataatatttctgaagggtattcactgctgcctcatctctctttcagtaaca

SEQ ID NO: 24730 - DNA, 201 bp, Homo sapiens
aattgcaactattactgtaaaagttgttgacgtgctcagcaaatggtgggtggaaatgttggactcagaaaaaggatttgtcctgggcacgtccgttttcrtaacaagaatataaggtaatttttaagtgctaatttaatggttcttactgtaaggcaacgggagtgtagatggggaaagctggtaacaggtgtgtgcagt

SEQ ID NO: 24731 - DNA, 201 bp, Homo sapiens
ataatgtttacagtagttctttgaacttttttttttttttttacagttttactggcaccaaatgtgtttatctacacctagtccccattagaaccatgcarttacattcatgtttgtataaaggttgtcagtttaatattcaagcaattaataaagacaaggtgtgagtttttctgttaatgcacctctgtcttaatgtga

SEQ ID NO: 24732 - DNA, 201 bp, Homo sapiens
taatcttttgcaccccccatgtgtgtttgttgaatccatcttattccagttcatccccctcatagccaccagagtgaaaaaacttcagatggctttctcartgccagaactgtgttctgatcttgtgtctcaccctagagatgacagcacttctgagagtggaggggttgggacagattttttgagatgatggggagtttg

SEQ ID NO: 24733 - DNA, 201 bp, Homo sapiens
acctaaccggcaatgcttagaagactgggaatagaaggaataaatttgtggattaattctttagtgggggttggaagatagacatggcagaaagccaaggsaggtgctggagtcctaccaaggatactggggaagcatcgtgtggtccaggtggggtggcaagtatagctcaaggaaggattagcctcacagcctagcagt

SEQ ID NO: 24734 - DNA, 201 bp, Homo sapiens
tattttaaacacaagttcctgggtgaaaatgttaagataactgccctcctcatagagtccactcctcgtatcaaggcagattcatgcagggatgaaaagtrtgcactctgtttaattccagcactgtttcctagtagctgttgatcttgggcaagttacttaagctttcaatttctctctcttaacctcatctataaaatg

SEQ ID NO: 24735 - DNA, 201 bp, Homo sapiens
tatctactttctctctagtcctctatgatttttcagttcttccaatgcacccttgatgctattaacatgcttattttaaacacaagttcctgggtgaaaakgttaagataactgccctcctcatagagtccactcctcgtatcaaggcagattcatgcagggatgaaaagtgtgcactctgtttaattccagcactgtttc

SEQ ID NO: 24736 - DNA, 201 bp, Homo sapiens
gcacagagcttggggtgagcagaatgtcatcactcaaagtagaatttggccagggcctcccagggtcccaccaagggatgcagtgaactttctaaaagtcmagacctctgtcttatctcctccaaaagatgagaaagtgagatgtgaagctcctttctggagatgggatatgtttttcatggtaggttctgatctcttttg

SEQ ID NO: 24737 - DNA, 201 bp, Homo sapiens
ttgacatacttcttgatgactggtagtggaccagcaaagtagttaacctgtcccaaaatcacacacgaagagaggctagtgtttacagaatttcagccagygagcctggtgcagtggcgtatgcttcttgtcccagctgcttagaaggctgaggtgggagaatcacttgagcccaggagttcagatgtagcacgggaagca

SEQ ID NO: 24738 - DNA, 201 bp, Homo sapiens
tgattatgattgttatttgtaaccaagatctacatgatcatagctcacaaagatagttcatttataaaaatccactttctttgaccatgatcttcacttaycaatcatgtttcatggctgtcaagatgatttcctctactttaccaaactcaggataataacacaatatcctggaatcactaaaccgtttttcatggatgt

SEQ ID NO: 24739 - DNA, 201 bp, Homo sapiens
aagttcatggatgcaaataaatgttgagttatttggacactttcatatcatcttagaattttttaagtcaatcctaacatctaactcttgagcatgttctsatggcctgagtgagaattgtcttatcattaaagttcttgtgtgaaaatagtgacgtttaaacaaaaattctggaaaatagtgaatttattcacaatatgt

SEQ ID NO: 24740 - DNA, 201 bp, Homo sapiens
atcccccaataagtttactgtctgcaggaaaacgaagattttttttttcctgttattgcttaagaggtgttggaagtcagcagtctcgggtcttgctctamctgcctctaattagctaggtgacattataccagttacttaaagtctataagctatattcttccatgaaagaagaattataaaactccctatcttacaagg

SEQ ID NO: 24741 - DNA, 201 bp, Homo sapiens
catcccccaataagtttactgtctgcaggaaaacgaagattttttttttcctgttattgcttaagaggtgttggaagtcagcagtctcgggtcttgctctwactgcctctaattagctaggtgacattataccagttacttaaagtctataagctatattcttccatgaaagaagaattataaaactccctatcttacaag

SEQ ID NO: 24742 - DNA, 201 bp, Homo sapiens
ttactctttaactaattatttaattcatcaaattcattgagttcttactatgtcccaggcattgtggttggtatgggagaacaaagatcgaaaagaaaaawtgccctcagaactctccagtagaactgataaaaaataaaggaatacttggtaccatatagcagaggtaggctaggggtgtgcatggggtgttgagaacca

SEQ ID NO: 24743 - DNA, 201 bp, Homo sapiens
ttcctgggcctttgttcaaaataatgtctgggcctgagggagctgatttgtggcacaaaaggtctttagatgagcagaggcccagaaaatttccttagctscataattgaagtgaattctctcccaagttgagcaagagaagaagaaaaggcaacttcttcctcacgtagtgccaggtgcaacataaataaagcagcaagt

SEQ ID NO: 24744 - DNA, 201 bp, Homo sapiens
gtgaggttagggttattatcacagagcttcgatatggacaggacttagtgttgcttttaaaagaactaaattgcaggctgcagacgtaagtacagtatgcygtaaaaactttgcagatacctgagtgttgccaacaaggagacttgctggctgagacgactgatagatgggataatggagcctttaataatagctgtattg

SEQ ID NO: 24745 - DNA, 201 bp, Homo sapiens
gtttactgtctttgaaggaaaagcatttttgtaccaacaaaattttgagcattgacatggagttaattataatcagatttggctttttaaagcctaactatttttttttttttaaagataattgtgggttaaacattaatttaaaactgtcttggccaggcagggtggctcacgcctgtaatcccagcactttggaaggct

SEQ ID NO: 24746 - DNA, 201 bp, Homo sapiens
accaatattagcactggccacttttcaacagagtcaacagttgacactcttcacatgatttaatggcataaaaatgatttctgctccctaccaaatctttraattgctactcttatcagaatatggaattcctattagggtcacagctcatgtgaattgctaaagtaaggattgtgaatctcaagggaatgccattagtct

SEQ ID NO: 24747 - DNA, 201 bp, Homo sapiens
tttttattttgaagcaatgattttatttaattaagagaaatgcttaaagacttaattcataaaacaccgtatgagaccattacaagcatgtaatctccagmactttgggaggcaaaggtgggaggatcacttgagagcaggagttcaagaccagcctgggcaacacagcaagaccctgcctctacaaaaattaaaaagaaa

SEQ ID NO: 24748 - DNA, 201 bp, Homo sapiens
cctttataatctatgagaaagacaagtactttgtagtccacttacaaaaaaaaatacatatttttcacttgtggttttaaacataggccatgaagagattyacatatcatggctctccagcatcctgtgtaatatatactcgtgtgtttatttccatcttacaatctctattgttattatggctctggcagccatggtttt

SEQ ID NO: 24749 - DNA, 201 bp, Homo sapiens
ttatctggttcctccagcttggatggctctaatcttagtctaattgttttctcccacgccttgtgggtgtgtcctcccccccaccggctgtggagtggccrggaacacaagcctcctccccaagacttaacttcctaggtgaatacgcaactccctcccaggagtggtggccactctaagtcctaccaagggtattggact

SEQ ID NO: 24750 - DNA, 201 bp, Homo sapiens
caatctctattgttattatggctctggcagccatggtttttttttatttaaaaggtcattgcttgtaaccaatttcatcacagggttatttgtaatttgcrctgttagaacagagcttcgccttgttctctggtgaatctccagagttattacagttatgcctgcgcaggtatttccctatgtgggtgttactttgtcgct

SEQ ID NO: 24751 - DNA, 201 bp, Homo sapiens
agtgtgatctccactcttctctctttttccgtggttgagtgttctgtgtcccagccaaaccgacattcctttctatttaactacaacattttgcctgtgcwatcttttcatctcatgccctttcttcatcttttcaaattctgcttctcttttaagaaccagcatatatgccacctcacccaagaagccttatctggttcc

SEQ ID NO: 24752 - DNA, 201 bp, Homo sapiens
ctgtcgccttttaaagttcttttgatattgaccaacgcccctggctacccagagccccaggagttcaaggcgttgaagtagtctagttgcctcaaacacartggctctaatttagacctgtaaggctcattacacacagtaccctttggaaaggatggtcgttactatggaagggaccactgatagaacattattatgaaa

SEQ ID NO: 24753 - DNA, 201 bp, Homo sapiens
gaggcaggggaattggcttgaacctgggaggtggaggttgcagtgagccaagattgcaccactgcactccagcctgggtgacagaacaagactccatctcaaaaaaaaaagtaaagtaaaaaatatattctttgccttatgattttcttaataatattttcatttctctaggtttactttattataagaattcagtgtgga

SEQ ID NO: 24754 - DNA, 201 bp, Homo sapiens
ttgagtaacatttcacaaatttaaaagacttttcctttactttttgaagggcatgatggagatttttaatacgcagttttttgtgaaggttccccccacctttttttttttttttttttgctgtgttactatatgcattcttatagagtagattttctaaaattatatatctttcccagtttaacacaaaattatttcata

SEQ ID NO: 24755 - DNA, 201 bp, Homo sapiens
gtcattgcttgtaaccaatttcatcacagggttatttgtaatttgcactgttagaacagagcttcgccttgttctctggtgaatctccagagttattacarttatgcctgcgcaggtatttccctatgtgggtgttactttgtcgctgcagttgttgatgatattttatttgaaaacatacacttctctgtgaggttacaa

SEQ ID NO: 24756 - DNA, 201 bp, Homo sapiens
tgaaacaggagaattgcttgaacgattggaggttggagatggaggttgcagtgaaccgagattgtgccactgcactccagcctgggcaacagagtgagagaaaaaaaaaaggattatttattttttaggtacatctatttggaaacacttcagtttttttcaggtagaaaatttgggtcttacgtgtctttactgattggt

SEQ ID NO: 24757 - DNA, 201 bp, Homo sapiens
taaaaagagaaatggagtaaactattaatggtgaagccaatgtttatgtttcttcctggtgagcatgatagtatgaaatatgtcagtttgctgatcccaarctcattcactccttttaagttttcagaccccatatgctgataatgtcatcattggaatgtatccagatccaactagatacttgtagctgataaagtttga

SEQ ID NO: 24758 - DNA, 201 bp, Homo sapiens
aatagaaataatattcctattgtatttccttttaacttgtgaagtggagcatggcatacaaatggtattctcagtatttcaaataattaccttcttactgkgcaagttctattcagcatataaaacccatccagttttgttgtagatgcaatctgattattacatgttgacaaggtcatatatctattaattggattggag

SEQ ID NO: 24759 - DNA, 201 bp, Homo sapiens
gaaatggagtaaactattaatggtgaagccaatgtttatgtttcttcctggtgagcatgatagtatgaaatatgtcagtttgctgatcccaaactcattcrctccttttaagttttcagaccccatatgctgataatgtcatcattggaatgtatccagatccaactagatacttgtagctgataaagtttgaggcgaaca

SEQ ID NO: 24760 - DNA, 201 bp, Homo sapiens
gatgatgcttgatttctttctgtgctggccaaagccaaccataggagccattcttttggtaacaaggctacctgttatcttacagctcgccaaatgaatgytcagactctgttgttttagaaaatcattatcagggcaaagtctaccattagctttcaactctaaaagaaaatcaataacttgtttcaaacagacattcct

SEQ ID NO: 24761 - DNA, 201 bp, Homo sapiens
tattttgtgtttactcaatttatttatattgattggtaaattagtaatttacaaactattatttgtcaatttattgcctacatatcaacaaatacttttcttttttttttttttttaatcttggggacaagcacattggctcagcctgtaatctcagcactgtgggaggcagacgtgggaggaccacttgaggccaggagt

SEQ ID NO: 24762 - DNA, 201 bp, Homo sapiens
gctgtgacaaaccattgggatgtttcataaatgtagaggcaccattgtatattttgagcacagctacttttatttcaaaaggccagatctagaaggtaagstaaccattgtcagtgagaaattgaagcatcccagaaacctgatctataccatgcggtatacacgttcagtaatctgatttcggtgagaagcaccaatcac

SEQ ID NO: 24763 - DNA, 201 bp, Homo sapiens
tttttttagacaggatcttactctgttacccaggctggagtgaagcggcatggtcatggttcactgtaggctcaaattcctggactcaagcaattccgccygcctgcccccgccttagcctcctgagtagttgggactataggctcaccaccatcccccagctaattaaaaaatatatattttttgtagagacaggatctc

SEQ ID NO: 24764 - DNA, 201 bp, Homo sapiens
tttttttttttagacaggatcttactctgttacccaggctggagtgaagcggcatggtcatggttcactgtaggctcaaattcctggactcaagcaattcygcccgcctgcccccgccttagcctcctgagtagttgggactataggctcaccaccatcccccagctaattaaaaaatatatattttttgtagagacagga

SEQ ID NO: 24765 - DNA, 201 bp, Homo sapiens
aatacttattagtgaacagcatatagttggtcgttgtgggtaagtgggagatttccttgacaggttattccctcagacacacagacccaggcccgtaagcrgcagatttagacagcagaaaatccaagctcgacgctgcagcaggcgtaactctttagtggtacagcaggtttacatcattactgcccagacaaattggtc

SEQ ID NO: 24766 - DNA, 201 bp, Homo sapiens
attgttttgcaaggcacagtgtatgaatagatgaatacatgtatatactcttaaaatgtcgtatatttgtacataattgccctaaaagatttatcgaggtwtgttttctgtattatgtgttatctatttctgtcttcaataatgtttataaaataaccatttgttgggtaagtactatgtgtcaggcaccatgtaatgctt

SEQ ID NO: 24767 - DNA, 201 bp, Homo sapiens
ccgcctcccgggctcaatcgattcttgtgcctcagcctcccgagtagctgggattacaggcgcacgccaccacacccagctaattttggtatttttagtasagacagggttttgccgtgttggacaggctggttttgaactcctgacctcaagtgatctgcctgcctcaccctcccaaagtgctgggattacaggcgtgag

SEQ ID NO: 24768 - DNA, 201 bp, Homo sapiens
acttgcctgttttgtgaagaatgctattttgtgactgttcctgcgtctcgctatgttttgggggttctggcctagttcctacaacatatactcttatcccrgttctgtgttgtcctggtgattctcccaagagctaatcagttaaagagattttcttttccattttggattttagcttggagttttactcttagtagtaaa

SEQ ID NO: 24769 - DNA, 201 bp, Homo sapiens
caaaatttcagtaataaagtatattattttctaaattattcatcagggagttgagtttgtttttcatgtacctggacttaatcacgattacaaaaaaatgyttagctaattgtagtcattcatctatactaatccaaaaacaaaaatgaggagttattgatggtttttatttaggtaaaacaatttatttgactgtgagtg

SEQ ID NO: 24770 - DNA, 201 bp, Homo sapiens
aatgcagtcctcagactcatgtgcaggccgcatggcgatcccgggatgaagtagatatttctatttataaacagattcctgagtacttcagatattatttrtatgttggactcctgtctagaattggcacatatctacatgtacagagaagaataatgaaatgtcaggggtctcactgcaccctcctctttgatcccattc

SEQ ID NO: 24771 - DNA, 201 bp, Homo sapiens
tactcctacgaactcatccaaacaggattattttgaaacatatttcagacctcatgtcacttcttctgaaaacattttagtatacattttaaaaatagtatactatttttaaacgttaaaaatagtactgtttaataacaaaaatacttaagctatatgtaatagtgttattaaaatatctgaatgttttgtaaatgttgc

SEQ ID NO: 24772 - DNA, 201 bp, Homo sapiens
tcctacgaactcatccaaacaggattattttgaaacatatttcagacctcatgtcacttcttctgaaaacattttagtatacattttaaaaatagtatactatttttaaacgttaaaaatagtactgtttaataacaaaaatacttaagctatatgtaatagtgttattaaaatatctgaatgttttgtaaatgttgcttt

SEQ ID NO: 24773 - DNA, 201 bp, Homo sapiens
cagagaaggaaaaagtcttgtcatttatggagcaccttttcacgaaaaccacgcagtgctgttcctagtgtagaccattaaagtgaaaaagcattactggmagactaattgtgtatggtgtagcatgcagtctatcacagtaacccatcacacaccaaaatgcacatgccggcagacccgtgcaacgatggttgatgttca

SEQ ID NO: 24774 - DNA, 201 bp, Homo sapiens
gaactcatccaaacaggattattttgaaacatatttcagacctcatgtcacttcttctgaaaacattttagtatacattttaaaaatagtatactattttkaaacgttaaaaatagtactgtttaataacaaaaatacttaagctatatgtaatagtgttattaaaatatctgaatgttttgtaaatgttgctttatattt

SEQ ID NO: 24775 - DNA, 201 bp, Homo sapiens
aaaatgatagtattaaagaggcatatttaggcataacagttgtggaatgtatttaaaaagaagagttggggccagatgtggctcacacctgtaatcctagygctttgggaggtcagggtaggagaatcactcaatgtcagaagttcagagaccagcctgggtcacatagcaagaccctatcactagaataaaattctacac

SEQ ID NO: 24776 - DNA, 201 bp, Homo sapiens
gaagttcagagaccagcctgggtcacatagcaagaccctatcactagaataaaattctacactacaataaaaattctaaaattctaaaattagctgcgcayagtggtacacacctgtagtcccagcttactcaggaggccaaggtgggagaattgcttgagcccaggagttcaaggctgcagtgagctgtgatcatgccac

SEQ ID NO: 24777 - DNA, 201 bp, Homo sapiens
ctcctgtcaaccttccattatggatagctagtatttagtggtaaccagcttttataatagcatccttaactgtcataattgctcttaaatggataaatggygtaaaaatttaaaaactgtctagtagaattttagctaaatttgacattagaatttgagttgctgtttctcttgtgggtattctgtctgtggaacctacag

SEQ ID NO: 24778 - DNA, 201 bp, Homo sapiens
atggaaatgggatgagaggaattccaggccagtgcacaaatcaacaagttgtatatttggacgcttgttgaactatttggtcaaataaggaagaatgtggwggtttgacatttgccgaatttcttgtcccttttacatgagcagcattcagactggagatgagacaacacatctccgtgttctgaccccttgctgcttcac

SEQ ID NO: 24779 - DNA, 201 bp, Homo sapiens
ttaatatctgagatggagttgctttggccactgcacctctctgtcttataagcatggagtatcaagataattgttattttgacccaaatcatcagcacagmaaccaattccatttattaggtaattatgtaccaaatacgaggctattttttttttattacatttaatacttgtaacagctcagttgagggtattatcccc

SEQ ID NO: 24780 - DNA, 201 bp, Homo sapiens
actccgtctcaaaaaaaaaaaaaaaaaaaaaggtgcatttttttgccatggggagattggaggagggagggtgaggggtactgccaacctgtacagtgatwtcaacccagattagcatcctagcccctctctctgctggtttggtttaacaacttattgtaagtttggtgctcctgtgtgagactagagtaaaggaccatg

SEQ ID NO: 24781 - DNA, 201 bp, Homo sapiens
ttttatgtctacagatgcaggtttatctagaagagaggagaattttctaatagtatactgaagcatcatcagcagaacccttccagtgcaaggacaaaatsgggcatcgtttactctgaattttatgaccagcggcagaaaaatgtgtcactgatgaggttaactggggaccagaatcctgggcatggtcctagttggcat

SEQ ID NO: 24782 - DNA, 201 bp, Homo sapiens
atatgcccaaacattttatgtctacagatgcaggtttatctagaagagaggagaattttctaatagtatactgaagcatcatcagcagaacccttccagtkcaaggacaaaatggggcatcgtttactctgaattttatgaccagcggcagaaaaatgtgtcactgatgaggttaactggggaccagaatcctgggcatgg

SEQ ID NO: 24783 - DNA, 201 bp, Homo sapiens
tcctgccatatattagaaacagtctttctgctaaactgtcctcaaagacccctctctgagtccgcaaaacacttggtgccaggacacaaatactagatctgatgggttggaggaggtgctgtcatttgaggaggacttgtagagtacaggacacactgaagtgggtggagaggagggcaaaggttcctgataatggaagtt

SEQ ID NO: 24784 - DNA, 201 bp, Homo sapiens
tgggagttatttccctaagtgagacccttttctgaatatatctgtgccctcatagcctagcagagtattcagacttttgaatgatggaaacaaagctgtgrgaaaagagcagaatacaaaataacaataccaatttgagctagcagacattgctgtcaggggtcgggctagaaagatgagaaaaactgaagcctgcttaga

SEQ ID NO: 24785 - DNA, 201 bp, Homo sapiens
tagccagtcctcagtttggtctggtgtccaagccctgcctctgcagtcaagtcctgcctcctacactaggactacaggaaagtgctaccacagttgtctatttttttttttttattttttgtagagacaggatctcactgtgttgcccaagttggtcttgaactcctgacctcaagcaattctcccactttggcctcccaa

SEQ ID NO: 24786 - DNA, 201 bp, Homo sapiens
tcctcagtttggtctggtgtccaagccctgcctctgcagtcaagtcctgcctcctacactaggactacaggaaagtgctaccacagttgtctatttttttwtttttattttttgtagagacaggatctcactgtgttgcccaagttggtcttgaactcctgacctcaagcaattctcccactttggcctcccaaggtgctg

SEQ ID NO: 24787 - DNA, 201 bp, Homo sapiens
tatgcagagaactggattgagacacaggaatgacacaggacagggtatgtgcttttgctgtacaggatcttgaggccagctcattgggcagctggtatctstcaaggatctttaggacaaatgacagcattaccacagctggccatggtcaaagacaggttatgcaatggctgtacaaacacatggtcttcaaaaacatca

SEQ ID NO: 24788 - DNA, 201 bp, Homo sapiens
tgggaagtagaacattagccttaaaacctctgcagcacaggaacacgttaggagagcactgagactctcactgccaattaaccacatccacctagctgacrcagtttcatttttaaatatttatttatttatttatttatttagagatggggtcttgctttgtcacccaggctggagtgcagtggtgcaatctcagctcac

SEQ ID NO: 24789 - DNA, 201 bp, Homo sapiens
agattaaacattccatgttgggaaattccctgttttcaggctgaggattgtatagttgagtggtgatagatttaagcaaagagttcgtgttaaaattgccstttcatgtctgcctacgcctgaaaacgtcagagtctaggagttgtgtaagattctgtttctaaagaagtcaaaactggttttactccttacaagctttgt

SEQ ID NO: 24790 - DNA, 201 bp, Homo sapiens
cttggatatttaacatcaaaatcatgctttggcaagacatgttggcatcactcatcaacaggctctcagttctctggattaaaggcaaaaaataaaataaycaaagtcactttaaaattagtgacatgttttatactaagataattttgcagaaaaactgccattttaaatcaaagtacgcagcaagggagtgatctacta

SEQ ID NO: 24791 - DNA, 201 bp, Homo sapiens
tgggtgattctcctgcctcagtctcctgagtagctgggactataggtgcatgtcaccatgcccagctatttttttaaattttttactttttgtaaagacasggtctcactttattgcccagggtattttcaaactcttggcctcaagtgatcctcctgcctggcctcccagtctactaggattgcaggcgtgcaccactgt

SEQ ID NO: 24792 - DNA, 201 bp, Homo sapiens
ttgcaggacctaatggagtacgtttttcaaatttaaatttttattaatttcaattttattttattttggagacagagtcaccttggctgagtgcagtgttrcagtcatagctcactgcagccttgtactcctgtgcccaagtgagcctcccacctcagcctatccagtacaggtaggactacaggcatgcatcatcacaca

SEQ ID NO: 24793 - DNA, 201 bp, Homo sapiens
cgtagaagtttgtagctgtgaaattcttaagtttggggcacaatgttgtgtacttacactaatagagctatataaccgggtcaaattgtgggttggtttargaatttcacaagagaaatgaatagttgtggttctttccttgtgtgtatgcgctcattaaggctgctggaatcctcacagcgtctactcgctttgcaggac

SEQ ID NO: 24794 - DNA, 201 bp, Homo sapiens
gacagtgtggtctacaggccccgtgtgtttcctgctctgcctctgctctccgaccccacacgtccagcttcatctctcagaacctgcttctcttccaactrtgggacttaccgaacacagagggttactatgagttcccaatgagatgactaaagggaaggcctgaacaattccgggcccacggtacacctgcgaaaaggt

SEQ ID NO: 24795 - DNA, 201 bp, Homo sapiens
ttaaaggattttgactttttagcgtgaacatttgaagtgagttcttcttcctgctctaggcctttaaatactatggctacttttggcccatcctgaaatcytgtgatgatttgaactatttattcggttttggttgatggacttggaatgcggatctgatcttaaaataggaatcttgatgggctattattttcaggtgcc

SEQ ID NO: 24796 - DNA, 201 bp, Homo sapiens
acagggaagcagtgaggtggacatcctcccaccgagatgttgatgtctaaggcaggccagagttactggatttcacactgtgtcttccataccaacccacsatttcctatcacccacactatcacactattccaaggaagaagaatgatgctctgatggataagcgtttgaggtttcataaccacagaagtcatttgtcta

SEQ ID NO: 24797 - DNA, 201 bp, Homo sapiens
tagttaaagagacaaatatttatataaatcaaagcatttctttttctgagaagaatgtcattcaatgaggatggggatggggacagagtttaaagatggcwtttgctaaaaatgtggacccaagcagtttcctctaaagtgtaattggctgtagtgttaatctttatgtccatagtcaaggaaatcaccattatagttttc

SEQ ID NO: 24798 - DNA, 201 bp, Homo sapiens
gcagcagatatttctaggtagcgttggtgcaatccagtatagaaagtggatttgttggtattacacataattaggaagcaggaacatcagtaattactgtsagaggattttgtatggcataattaatgccctcaaactatttagaaattcttagatgaaagaaaatacagaagtgggaattttggtgttgaaaagacaaag

SEQ ID NO: 24799 - DNA, 201 bp, Homo sapiens
ctgcccaatcttgaaccttctagccaccagaattgtgggccaagtaaaactcttttctttgtaaattacatggtcttaggtattctgtgatagtaacacaraacagagtaagataatgtgataaaacacttgggcaagctttggaaaggcctaagatagtgtggagagcaaagagaagccagtgaatttttagggtgactg

SEQ ID NO: 24800 - DNA, 201 bp, Homo sapiens
cagtgaatttttagggtgactgaagctgattttaagagtgaaatagatgaagaaagatgaaggggcttcgagaagaatgttctgatgatgcctctgagccygaggtttggtggcagtgttggtgaagataagttagactctcctggatgtttgcaaggcctctgaactggtttttaatcatgagtttctttttttccagtt

SEQ ID NO: 24801 - DNA, 201 bp, Homo sapiens
aaaaggtgttaatttttgactgccccccacaacacactaatatctaacattaattttaatatcatttatctcacagaagacagaatcaactatacttggcktcttgaagcaattctcttcctcgctcaaactccgttactgcccctgatgacatctccacatcagctctgccttgttcatgtcgagaatatttaatagcat

SEQ ID NO: 24802 - DNA, 201 bp, Homo sapiens
agtgggaccccatctctacaaaaaaaaaaaaaaaaaaaagtcaggcatggtggcatgtgtctgtgttcccagctgaaggctgggatgggaggaaggctgargtgggaggatcacctgagcctgggaggttgagtctgcagtgagttgtgatcgtgttactgtactccagcctgggcgacagagtgagaccccatctctctc

SEQ ID NO: 24803 - DNA, 201 bp, Homo sapiens
taaatatttatttatttatttatttatttagagatggggtcttgctttgtcacccaggctggagtgcagtggtgcaatctcagctcactacaacttctacmtcccaggttcaagcattctcctgcctcagcctcccaagtagctgggtctactggcactagccatcacacctggctggttgtttaatttttttagaaacgg

SEQ ID NO: 24804 - DNA, 201 bp, Homo sapiens
gctgaaacacaggcattactcacaccaacagattcctttacccactccagaaaatttgtgtgcttccttaaagctcttctgtggttttcagggctcggtcttttttttttttttcccgcaggacctcgggtctagctgaaaacaaagtatggttacattttaagggagagcaaataggaatatagtcatgccttgcttaat

SEQ ID NO: 24805 - DNA, 201 bp, Homo sapiens
ggaattagaaaaatggatttgttttttaaaatcaataaataaggtcaggtggggtggcttatgcttgtaatcccagcactttgggagatcaaggttgaagrattgcttaaaggcgggagtttgagaccagtctaggcaacaaaggtagacacctgtcactacaaaatataaaaattagccaggcgtggtgacacatgcctg

SEQ ID NO: 24806 - DNA, 201 bp, Homo sapiens
aggctgaggtgggaggatcacctgagcctgggaggttgagtctgcagtgagttgtgatcgtgttactgtactccagcctgggcgacagagtgagaccccayctctctctctctctctctctctctgtctctctgtctctttgtctctctctctctccctctccctccctgcctctctctttctcacacacaaaaaagtaaa

SEQ ID NO: 24807 - DNA, 201 bp, Homo sapiens
cacctgagcctgggaggttgagtctgcagtgagttgtgatcgtgttactgtactccagcctgggcgacagagtgagaccccatctctctctctctctctckctctctgtctctctgtctctttgtctctctctctctccctctccctccctgcctctctctttctcacacacaaaaaagtaaactgtttagtaaagtgggt

SEQ ID NO: 24808 - DNA, 201 bp, Homo sapiens
gaggttgagtctgcagtgagttgtgatcgtgttactgtactccagcctgggcgacagagtgagaccccatctctctctctctctctctctctctgtctctytgtctctttgtctctctctctctccctctccctccctgcctctctctttctcacacacaaaaaagtaaactgtttagtaaagtgggttgataaatgtttt

SEQ ID NO: 24809 - DNA, 201 bp, Homo sapiens
gtctgcagtgagttgtgatcgtgttactgtactccagcctgggcgacagagtgagaccccatctctctctctctctctctctctctgtctctctgtctctytgtctctctctctctccctctccctccctgcctctctctttctcacacacaaaaaagtaaactgtttagtaaagtgggttgataaatgttttagggtttt

SEQ ID NO: 24810 - DNA, 201 bp, Homo sapiens
ctttcaactccaagtttatcaccagaatatccagcttcttttgtcatctcctgctctcctgcgtgtcttctcccaaactattttctgtttccttttgtcascatcatggaaaacggaacttattctttcactgtgctctatattttatcttcttgtgcaattgtaagcatcttgagagtaaagattgtacagatcttcttt

SEQ ID NO: 24811 - DNA, 201 bp, Homo sapiens
ctgcagtgagttgtgatcgtgttactgtactccagcctgggcgacagagtgagaccccatctctctctctctctctctctctctgtctctctgtctctttstctctctctctctccctctccctccctgcctctctctttctcacacacaaaaaagtaaactgtttagtaaagtgggttgataaatgttttagggttttgt

SEQ ID NO: 24812 - DNA, 201 bp, Homo sapiens
tgaattgctgatgtaggcttgataagtcttgttttcctagttaaattgtaagcagagaggcctcacccatcccaaccaaacacacaggtgagcatacctgygtgccagcacacaccatggcagatggtggcttaaagctgggcacacagtgacagctaggtgcttgtcagttgatgaagctgtgtaatctagagtccagga

SEQ ID NO: 24813 - DNA, 201 bp, Homo sapiens
tttgattactggaagccatttaattttgtcttcatttattttagttttcatttatcttcagtgcctatgattctgtagctttttccttccgcctctttctrttctttttgtgcagcaaaaatcatcctccatgtcatagtctttgtttgcataacctgttctgtctgacacaaccatctatcatgacctaatttagccgtt

SEQ ID NO: 24814 - DNA, 201 bp, Homo sapiens
ggtgtccttctgtagacagtgtgacgtgataagaggaagaaggaaattgtgggcaacacagtgacttcccagtgacaattcacttgcctctcctaatatcyttcattccaaagctgctcttctgcagatggttatgaggcatagtgtggtggagtggaaagactttggaataatgctctgccactttctagctgtgttatt

SEQ ID NO: 24815 - DNA, 201 bp, Homo sapiens
gtgaaagggttttttaaatgatccatgtggatctgcttttctctggctgtatgggacaagacctcgatctagtagtgaggcaggaggcaagaccccacacmgccacaggtgctgcccctcctcccaacatcagcatcggtcctcagccatgaagtgctgtagtttagtggcagcagccatcagatgcgcagccccagggga

SEQ ID NO: 24816 - DNA, 201 bp, Homo sapiens
gtttgcttattagaatatttctgtagattgcattgggggttaataagtataataagtatttcatatattgggcaataggaaatctagtatgctttagagaratcagtattacttatgcagtacatattgcaggtttgtgcagttcctatcataatagagtatcagcatcagagccaaagggaagagtgtgtatgagtcact

SEQ ID NO: 24817 - DNA, 201 bp, Homo sapiens
gttctgtgacaggatcatatataaagaaatatattaattatccaatttaatttaatttatttattgcagtataacacattatcccaaaacttagtggtttmaaaaacagacatttactgactcatagtttctgtgggccaggacttgaggtgtgtgttagttggatctccacggctgtctgtctcaggttgcagtcatctg

SEQ ID NO: 24818 - DNA, 201 bp, Homo sapiens
gaaggttgcaaggtggaggtcgttaaggggagggtgttaagtgaaaacgctgtatataaactgcatgctgtttgcaagtggttgtggttttcctacccagmctgccaacactgcgccgtgaggttatgctttccagcctgccaccactggaccatatgtaaggtggttatcttgtccagcccactgccactggactctctt

SEQ ID NO: 24819 - DNA, 201 bp, Homo sapiens
agctatgggtgattaatccattttgccttcattcttcagtggtttggcatatagattgaagtgttttgcttttctatttattggcggaggcaaatagaaasagagctctctctctctctcttgcagtgtacccacactccaaagtgccataaaacgaccttcaaaactaaaccatcatattttcttggcacaggcagagcg

SEQ ID NO: 24820 - DNA, 201 bp, Homo sapiens
cagagctctctctctctctcttgcagtgtacccacactccaaagtgccataaaacgaccttcaaaactaaaccatcatattttcttggcacaggcagagcragaaactggggatggggctgcagctggcagtggggccagggtgctggagtgggggtgttagcaaaaggtaactgtgcccatttggttgtgttcaagtgca

SEQ ID NO: 24821 - DNA, 201 bp, Homo sapiens
actgtgcccatttggttgtgttcaagtgcagacctcagtgaattgaagttctagcctctcaggatgccagacattgtggctgcttctcaatcacagccagytcagtacagccattgtcactgagagggtttactgttgtatttttttctgaatctgagccatttgtgtgtcacagtaagggaaatagattcatgtattgtg

SEQ ID NO: 24822 - DNA, 201 bp, Homo sapiens
gcttgaggccaggagttcaagacccagcctgggcaacatagtgagaccccgtctctttttaaaaaaattagccaggcataggccgggtgtggtggctcacrcctgtaatcccagtactttgggaggccgaggtgggtggatcacgaggtcaggagttcgagcctggccaaagtagtgaaaccccatctctacttaaagtac

SEQ ID NO: 24823 - DNA, 201 bp, Homo sapiens
accataagtgatgtgcagtggcttttcagatggttatacagggtccaggacctcttactgcttccctccatgctgtgagaatattttgcctcaccccgacycccccaactttgaaatgacggggcttgctctccaggtcaaatggatgctattcagagttagggtaaattttgcttagggttggctgggtgagaaggctca

SEQ ID NO: 24824 - DNA, 201 bp, Homo sapiens
ttctcatattcagaggtgctgggctggactcccactgccagttccctgagctgtgcagggactcctgctctgcatggtttgttttggtgctcatgggaccrtaagtgatgtgcagtggcttttcagatggttatacagggtccaggacctcttactgcttccctccatgctgtgagaatattttgcctcaccccgaccccc

SEQ ID NO: 24825 - DNA, 201 bp, Homo sapiens
cattaaggaggaggctttagcctgctgccttggctgttttcttccattagaaaacatctcatgaatggagcatttggaaaaacaggtagttttagaaaaadagaatttccactcagactttgagaccaatctctgtaattgttttggtagggtaaggataggctttcttgaaacactagcctttagctgaggtattcgcac

SEQ ID NO: 24826 - DNA, 201 bp, Homo sapiens
tagaacagcgttttcatttgaaatacggacagaaaaactggttattcagacctgagtgtctggcagagagtttattaaaaatgagtgacacaagcctgtcrctgtaaggcaaaaaatgggcaatatttgttgctaaagataaaattcaaactttctaggtaaaattaggttttggaaaacttatgtcccactgtgagcatg

SEQ ID NO: 24827 - DNA, 201 bp, Homo sapiens
tataagcatggagtatcaagataattgttattttgacccaaatcatcagcacagcaaccaattccatttattaggtaattatgtaccaaatacgaggctattttttttttattacatttaatacttgtaacagctcagttgagggtattatccccattttgcagctgaatggatggacttaatgggagataagcagcttcc

SEQ ID NO: 24828 - DNA, 201 bp, Homo sapiens
ttacatgccagtcttccccagggtagtctctgtcttgtgcatctctgtgtctaccacctaactcagaggaggcactcaatgaagttattgaattaatagawccatgactgaagaagtttcctaagggccaggcatggtgggccacacctgtaataccaatactttgagaggctgaggtgggaggattgcttgacaccagag

SEQ ID NO: 24829 - DNA, 201 bp, Homo sapiens
tgtttcttaatttttttttcttttttgttttttgagatggagtcttgctctgtcgcccaggctggagtgcagcggtgcgatctaggctcactgcaggctcygcctcctggattcacgccattctcctgcctcagcctcccgagtagctgggactacaggcgctcgccaccatgcccggctaattttttgtatttttttagt

SEQ ID NO: 24830 - DNA, 201 bp, Homo sapiens
agctactcgggaggctgaggcaggagaatggcgtgaacccgggaggtggagcttgcagtgagccaagattgtgccactgcactccagcctgggcgacaggrcgagactctgtctcaaaaaaaaaaaaaaaaaaattaaatttgagctaatcatagaatctgatgcaggtataagaaatgatacagagagattcatttcaat

SEQ ID NO: 24831 - DNA, 201 bp, Homo sapiens
ataattaactgtttacatgccagtcttccccagggtagtctctgtcttgtgcatctctgtgtctaccacctaactcagaggaggcactcaatgaagttatkgaattaatagatccatgactgaagaagtttcctaagggccaggcatggtgggccacacctgtaataccaatactttgagaggctgaggtgggaggattgc

SEQ ID NO: 24832 - DNA, 201 bp, Homo sapiens
tttcttttttgttttttgagatggagtcttgctctgtcgcccaggctggagtgcagcggtgcgatctaggctcactgcaggctccgcctcctggattcacrccattctcctgcctcagcctcccgagtagctgggactacaggcgctcgccaccatgcccggctaattttttgtatttttttagtagaggcggggtttcac

SEQ ID NO: 24833 - DNA, 201 bp, Homo sapiens
  misc_feature (1)...(201): n = A,T,C or G, or insertion/deletion polymorphism (see Tables 1-2)
aagaccacgcctcaaacagtaaatatctaaaaataaaaaatatataatataatcatccatggcactttactgtcttgaaaagttaaatgatagacacttanaatttactttttaaatttcgaagttcactattcttgcttctagagtatagaattacactcctttttcagagttaggacaaattattgaaaatgaatagct

SEQ ID NO: 24834 - DNA, 201 bp, Homo sapiens
tgggaggcttagattcttatcctagcctttcctccaacagtcgacaccccagagcgtgtgtattcatttctttcttccctttcttctctctctctctttcyctctctctttctctctctttcctctctctttctctctctctttccctccctcccttcctccctctctttccttcctttccttccttttacttcctttctt

SEQ ID NO: 24835 - DNA, 201 bp, Homo sapiens
attcttatcctagcctttcctccaacagtcgacaccccagagcgtgtgtattcatttctttcttccctttcttctctctctctctttccctctctctttcyctctctttcctctctctttctctctctctttccctccctcccttcctccctctctttccttcctttccttccttttacttcctttcttttctatcttttg

SEQ ID NO: 24836 - DNA, 201 bp, Homo sapiens
gggtaggaggaccatgtagtctcatgcgttgaaacagtggacacacagttcctgcaacattgtcaaaatccatgtttttactaaacatacattaatatttytttctcttacttctacaagttaaattaatatcactttgtggaatttttggttttgggctccagcagagatctcgtccatatttagtattagccagcgtct

SEQ ID NO: 24837 - DNA, 201 bp, Homo sapiens
atcctagcctttcctccaacagtcgacaccccagagcgtgtgtattcatttctttcttccctttcttctctctctctctttccctctctctttctctctctttcctctctctttctctctctctttccctccctcccttcctccctctctttccttcctttccttccttttacttcctttcttttctatcttttgtagata

SEQ ID NO: 24838 - DNA, 201 bp, Homo sapiens
aattattgattgcagttttccttaagagacattgtttggcatatttatttgtgaagtaaagcaatttggattctcctattaattttacatagagaaattamgttggtatatcttgagataggaaggtacaaaatcaggacaggcttattctgccaggcccaatgtggcacatctgttttataagtaaacagaagttgaaat

SEQ ID NO: 24839 - DNA, 201 bp, Homo sapiens
cagattgtatttgtgaataacttcttttctgacatctgagggaggacaggaggggtaggaggaccatgtagtctcatgcgttgaaacagtggacacacagwtcctgcaacattgtcaaaatccatgtttttactaaacatacattaatatttctttctcttacttctacaagttaaattaatatcactttgtggaattttt

SEQ ID NO: 24840 - DNA, 201 bp, Homo sapiens
tcctagcctttcctccaacagtcgacaccccagagcgtgtgtattcatttctttcttccctttcttctctctctctctttccctctctctttctctctctttcctctctctttctctctctctttccctccctcccttcctccctctctttccttcctttccttccttttacttcctttcttttctatcttttgtagatat

SEQ ID NO: 24841 - DNA, 201 bp, Homo sapiens
ctagcctttcctccaacagtcgacaccccagagcgtgtgtattcatttctttcttccctttcttctctctctctctttccctctctctttctctctctttcctctctctttctctctctctttccctccctcccttcctccctctctttccttcctttccttccttttacttcctttcttttctatcttttgtagatatag

SEQ ID NO: 24842 - DNA, 201 bp, Homo sapiens
aggtgggtgggtgggtgggtgtgtgaaatactaccttctgcacctatcttataaggtatttctgagaataaaacaaaattcaatactatacaaaaagaagrccgtattgttattaactagatggttaaatgaaactaccacttgaacttatttttaaaatgtttttcatttttgctgtgagaattgcattttatttataga

SEQ ID NO: 24843 - DNA, 201 bp, Homo sapiens
gcacaccaccatgcttggctgattttttttatttgtagagatgaggccttgcaatgttgcctgggctggtctcaaactcctgggctcaagcaatccccccsaccttggcctcccaaagtgttgggattacagacatgagtcactactcctggcctgttttgcagtttaaaattacagattgaagattattaaattttgttc

SEQ ID NO: 24844 - DNA, 201 bp, Homo sapiens
caaagtgctgggattacaggtgtgagccaccgcacctggcctgaggactctgaatcttgatacaggactgtgcagattgtatttgtgaataacttcttttytgacatctgagggaggacaggaggggtaggaggaccatgtagtctcatgcgttgaaacagtggacacacagttcctgcaacattgtcaaaatccatgttt

SEQ ID NO: 24845 - DNA, 201 bp, Homo sapiens
agccattgtaacaggtggaaggtgatatgtcattctggttttaatttgcaattccctgatgattagtaatcttaagcatttttcatatacctgttggctayttgtatgtcttcttttgagaaatgtctattcagattatttgcccatttttaaatcgagttatttgttttctttttgttaagttgcttgagtttttttttt

SEQ ID NO: 24846 - DNA, 201 bp, Homo sapiens
aagagagagacaaaagagagaacgcttaggagggtgagcaaaaatattctaaatgcaggctattccagtagagatggaaaaaaattggaagataggaggtrgaataaaaaaaaaagtggtcttggtcatgattaagatgtaattttcatatgattgagacattaaaaatggctcacagcaatgtcagtagaatggagggac

SEQ ID NO: 24847 - DNA, 201 bp, Homo sapiens
gtggtcagatttgtttcttggaatgaccatggtggcaagagagtggagcagtggagcatcttctggggagttggaaaattggaactgaacatcattgctgraaaaaaaaaaagcgattttaagttgccatatgaatataggatgattatgtaagccccaaattcttcaaccctttggagtgatgttttcattccaaatcac

SEQ ID NO: 24848 - DNA, 201 bp, Homo sapiens
ggggctccagaaggtaatgctcttaagcactgaattgtgagttcatactatcaattaaacagcaggagagaggaaagggaggttttgacttgggatttttsaggagcgaattcagtaggcatttttggaatgcctggcttggagctagctctacagggaagaccaagaaaaacgaagccctgcttttgcctttaggaagtc

SEQ ID NO: 24849 - DNA, 201 bp, Homo sapiens
gaaagggaggttttgacttgggatttttcaggagcgaattcagtaggcatttttggaatgcctggcttggagctagctctacagggaagaccaagaaaaaygaagccctgcttttgcctttaggaagtcacagtcctgttgggaagggttggagtggagaggggagacctcagccattaagaatacaggagagaggggctg

SEQ ID NO: 24850 - DNA, 201 bp, Homo sapiens
gggtttttccacattggtcagctggtctccaactcctgacctcgtgatctgcctgcctcggcctcccaaagtgctgggattacaggcgtgagccactgtgsctggcctatctttatattcttggtgtatagtagattcatagggatttttgctaagtctctaaggattgataaaagatgtaaaagatctagcagttttctg

SEQ ID NO: 24851 - DNA, 201 bp, Homo sapiens
tcaagcaattctcctgcctcagcctcctgagtagctgggattacaggcgcccgccaccacacccagctaatttctgtattgttagtagagttggggttttyccacattggtcagctggtctccaactcctgacctcgtgatctgcctgcctcggcctcccaaagtgctgggattacaggcgtgagccactgtgcctggcct

SEQ ID NO: 24852 - DNA, 201 bp, Homo sapiens
atacactctacaatttgttttattggattttgtcctttgagaacaccacaagtaatcccattacagtctagaaactgcttgctcaccacgcctccaccttygaaagcacataagtctttaataaatgaggcaatttccagattcatcaataattaacccagaacatgacaagttttatcacaactcaaagctttcccatga

SEQ ID NO: 24853 - DNA, 201 bp, Homo sapiens
ataagccgtgcattgctgtcgtgtgcagctgtgcaccctcctgctgcccgtcacggcatcgggtctttcctgtgggcctcctcgccctgccccaccttttytccaggcatgaatcctcccctagagcgcatgcagtcaaattaacgtggagacagagcccattatgaaggaaatcaatttattctaattgggtgacaacat

SEQ ID NO: 24854 - DNA, 201 bp, Homo sapiens
cttcgaaagcacataagtctttaataaatgaggcaatttccagattcatcaataattaacccagaacatgacaagttttatcacaactcaaagctttcccrtgattcaaacggtctgctcctgccactgaattgtctgtatagtttctggttcagcttcccagagctcaggattctgccatggagacactggtttgagcaa

SEQ ID NO: 24855 - DNA, 201 bp, Homo sapiens
ggaaagtagagatttgggaagaagagggtggaaacagggtgggtctccgtggattgcaggggagggtttgtctgcaggtgtacagggagtgctggccctgrtttggtttaaactgatgagggccctgggcacatgcaaatgcgtaaatctatccttcaggcaagggatgaaaaaccgttgaagagttttggcttcttcttc

SEQ ID NO: 24856 - DNA, 201 bp, Homo sapiens
gtaaagatgaatggaatcaccaatatgttttatccaccaagcagttttacacccagggaactttcccaggtgtcccactattgctgcttggatttttcctstttacttaaaaacgcagcatgtaatttcattgaaggataggtaagaatgtgagattgaatgacgtgcagcaccacaatcaggagaacaaaattgtgtgtt

SEQ ID NO: 24857 - DNA, 201 bp, Homo sapiens
tgctctatgaaaaaaatataagactgaattcgtgcaattttcaaaaaaaagtataatctaggagacaggaagaatatataacagtataaataacaggaggyggtagcattaattggcaccactgtgatacagtcagtaatcgcttctggattttggaggtgggtgctatcattatggggtgtgtgtgggagtctcatttag

SEQ ID NO: 24858 - DNA, 201 bp, Homo sapiens
cgctgtgtggggttggttgaagggctgctgtgtataaaaagtcatgctctatgaaaaaaatataagactgaattcgtgcaattttcaaaaaaaagtataayctaggagacaggaagaatatataacagtataaataacaggaggcggtagcattaattggcaccactgtgatacagtcagtaatcgcttctggattttgga

SEQ ID NO: 24859 - DNA, 201 bp, Homo sapiens
tagcctttcctccaacagtcgacaccccagagcgtgtgtattcatttctttcttccctttcttctctctctctctttccctctctctttctctctctttcctctctctttctctctctctttccctccctcccttcctccctctctttccttcctttccttccttttacttcctttcttttctatcttttgtagatatagg

SEQ ID NO: 24860 - DNA, 201 bp, Homo sapiens
gcctttcctccaacagtcgacaccccagagcgtgtgtattcatttctttcttccctttcttctctctctctctttccctctctctttctctctctttcctctctctttctctctctctttccctccctcccttcctccctctctttccttcctttccttccttttacttcctttcttttctatcttttgtagatatagggt

SEQ ID NO: 24861 - DNA, 201 bp, Homo sapiens
ctttcctccaacagtcgacaccccagagcgtgtgtattcatttctttcttccctttcttctctctctctctttccctctctctttctctctctttcctctctctttctctctctctttccctccctcccttcctccctctctttccttcctttccttccttttacttcctttcttttctatcttttgtagatatagggtct

SEQ ID NO: 24862 - DNA, 201 bp, Homo sapiens
tcctccaacagtcgacaccccagagcgtgtgtattcatttctttcttccctttcttctctctctctctttccctctctctttctctctctttcctctctctttctctctctctttccctccctcccttcctccctctctttccttcctttccttccttttacttcctttcttttctatcttttgtagatatagggtctttc

SEQ ID NO: 24863 - DNA, 201 bp, Homo sapiens
aggtaccctaagtctcgattgcggcaggccttgacattgagaatttgcaactgggattttgtttaactctttgtgctttaaaaaaaatttaaaggctgggygccgtggctcacgcgccccaaagtaatcccaggactttgggaggccgaggtgggcggatcatgaggtcaggagatagagtccattctggctaacacagtg

SEQ ID NO: 24864 - DNA, 201 bp, Homo sapiens
cctccaacagtcgacaccccagagcgtgtgtattcatttctttcttccctttcttctctctctctctttccctctctctttctctctctttcctctctctttctctctctctttccctccctcccttcctccctctctttccttcctttccttccttttacttcctttcttttctatcttttgtagatatagggtctttct

SEQ ID NO: 24865 - DNA, 201 bp, Homo sapiens
ctccaacagtcgacaccccagagcgtgtgtattcatttctttcttccctttcttctctctctctctttccctctctctttctctctctttcctctctctttctctctctctttccctccctcccttcctccctctctttccttcctttccttccttttacttcctttcttttctatcttttgtagatatagggtctttctc

SEQ ID NO: 24866 - DNA, 201 bp, Homo sapiens
tccaacagtcgacaccccagagcgtgtgtattcatttctttcttccctttcttctctctctctctttccctctctctttctctctctttcctctctctttytctctctctttccctccctcccttcctccctctctttccttcctttccttccttttacttcctttcttttctatcttttgtagatatagggtctttctct

SEQ ID NO: 24867 - DNA, 201 bp, Homo sapiens
gattggggagcatcctggaggcaggctgggtttcttttttttttttttttttaagagggtctcattctgtcacccaggctggagtgcagtggtgcaatcayagcccgctacagccttgaactcctgggctcaagccatctctccacctctgccttccagagtgctgggattacaggcgtgagctaccccgtccggctttag

SEQ ID NO: 24868 - DNA, 201 bp, Homo sapiens
ccaacagtcgacaccccagagcgtgtgtattcatttctttcttccctttcttctctctctctctttccctctctctttctctctctttcctctctctttctctctctctttccctccctcccttcctccctctctttccttcctttccttccttttacttcctttcttttctatcttttgtagatatagggtctttctctg

SEQ ID NO: 24869 - DNA, 201 bp, Homo sapiens
agagtgctgggattacaggcgtgagctaccccgtccggctttagggctgggttttgaggaagttgtgtcctcgtggcctgagctttccttttcttcctgcrtctcctcccctatgtgatgcctcccccctgctcgttgtttgggttgcagggtgagagagagaaccttctccaagtcctgactgctccctgggcccaagtt

SEQ ID NO: 24870 - DNA, 201 bp, Homo sapiens
ttgttgacagggagaccagatgcactgatccattttttatccttttgccttcagagcatccttgtctccttgaattcactgctgtctcagaacccaggagkgctgtcggagccctctcctgcagctcagctcccagggggctctcccagcaggctggggctgtctcccagccggccagctctgctggaactggaggaggca

SEQ ID NO: 24871 - DNA, 201 bp, Homo sapiens
ggctgagcggtaaagtttgggcaccgagggtgacgtgaactggagttcggcgctgggaactggatattcacctcccttcagagctctgtcaccatgcctgrggtggagccgcaccctgagtgcgctcagcagggagtggcatgtgtgcagggcttcagccagggctggcagccaaggaccaagccatttgcctggctccac

SEQ ID NO: 24872 - DNA, 201 bp, Homo sapiens
ctgcccaaaacactaaagctgctttgggtgaataaatagtattgactttaggctttgaagcacaagtaagagttaaactagaaggggattaaaatccttgrcaaaaagtcagagtttaggtgaaaatggattacagtagcatgtccccatgcccagcgccacctattttcacagggacatgcgcctgtaatcccagcactt

SEQ ID NO: 24873 - DNA, 201 bp, Homo sapiens
ccaggatccagtccagagggctacattgcatttagttgtcaacttcattttatgtaataaaaactttacctacatttcagtggttggtaattttgtttaaggaggtgatcccttaaacaaaacggagaaagtgagttactttctgctagctgaagtgttactttacatccatttgtaaatttttgttcagatatatcaatc

SEQ ID NO: 24874 - DNA, 201 bp, Homo sapiens
gttgcagggtgagagagagaaccttctccaagtcctgactgctccctgggcccaagttcaggctgagctccttcactggccctgcaattttacacatgccrctcaactccttggaaacaaaggtttcctctctgtaagatgaaggtgatacgtaacccctggggttgtgagaattaaaggaggcacattttaaagcacttt

SEQ ID NO: 24875 - DNA, 201 bp, Homo sapiens
aagaaaaatgatgcctgcctgccttcctgccttcctgccttccttccttccttccttcgtcctttcttccttccatccgtctttccttctttcctccctcsctccctgccccccgcttcctttcctttcccttgtttcttttctttgtttctttctttttctttgacagagtctcggtctttcacccaggctagagtgcag

SEQ ID NO: 24876 - DNA, 201 bp, Homo sapiens
ttgcatgttacctacctagtaagtgatagagatacaatttaaaaaccagttgattctggtttttaaacctattacttgtacggttgaaaatataatactawatttgccattttgtttttgctcagttaaatatttctttagtattgactctaggctttggtgttcagtattgattaaaaaaaattcaactctgtcctcaga

SEQ ID NO: 24877 - DNA, 201 bp, Homo sapiens
aatggaacagataggttacttttcaggtcctcaaaagttggatataccaggtgttttccgaaattgattctcattcttgtagatgtcccaaaaattcaagkaatttgcacaataaacctgtataaattagtagaaaagccaatttcactttagctctaagtggtaggaatcaatggtatatgaattcttgagatgttttta

SEQ ID NO: 24878 - DNA, 201 bp, Homo sapiens
gtagcagaaacctatagaaacaatgttgtggtgacaaaatgaaatgtcagtggaggtctgttgtaacataatgtcaaaacaaaatgtcagccaaaatccayggagacactattatgatatcaaaatgaaacaatgtcagcgccagtctgtagagacattacaatatgagaaaagacaaaacaaaacggtatctgtggaggc

SEQ ID NO: 24879 - DNA, 201 bp, Homo sapiens
ttatagaagtggattctatagcactgtaactattttggttctcttttccttatctcttttctacaaaaaaataccattctccaaaaggacattttagtgtraagtaagccaccaagcacatgcaaaaagtggatggattctgtttactgtgttttcagttgtttaacatttatattgaaaatgctatgagtaacgaggaaa

SEQ ID NO: 24880 - DNA, 201 bp, Homo sapiens
ttatgttactttcgagttaactagtatatgtagagaaatctatgtgtaaagaagtatcaatatttctcttcaagtattttgaactctaggacagatgatgstaatgaggcccgtccttgctggagctgcctgtcagaacagcaaggtaggcatggcctggggcaggggagctctgtctggtctgtggaccatcaatccagc

SEQ ID NO: 24881 - DNA, 201 bp, Homo sapiens
ggtctccttttattggaaagacagagaattaacaccttaactgaatccatattgtaataaaccctaggacttggaaacaatgttgcaaatattaagtatcrtataaatttatctctatggaaaacatcttcaacttcattaaatgttctgtatgatgccacttatctatttcatgcacccccataccttctccaaaagttc

SEQ ID NO: 24882 - DNA, 201 bp, Homo sapiens
tccaactgtgcaccttttccctctatccttaccctgtccttggaagaatcttgatgttaaaatttgggactgtgtctttattggaggcatcagatgcactrtcggtagcgatttctgaaagtccagagagtcatttgcatagaggtcaaacacaatatttcctgcaggaacttcctgaatgatgaagtttcagagcaatcc

SEQ ID NO: 24883 - DNA, 201 bp, Homo sapiens
gcggggtttcaccgtgttagccaggatggtctcgatctcctgacctcgtgatctgcgtgccttgacctcccaaagtgctgggattacaggcgtgagccacygcgcctggccgtttcttaattattttctaagaattactgtgccatttcctttacatagtatggactatagtggcgtgatcatggctcagggctcactgca

SEQ ID NO: 24884 - DNA, 201 bp, Homo sapiens
atgtatctactcaacacatattgagaaaatgacagattgtggtgatgtgacactttgggttgtatctgccttttgaaagcatcctttatgttttctcactcatttcttctacagcactttatatggcttggtagggaaattctgagactaaaaattaatatcatcatccctctgagtttttgcatatgaatgcttttcaac

SEQ ID NO: 24885 - DNA, 201 bp, Homo sapiens
tacaggcgtgagccaccacacctggccaagagcagagctttctaagtgatgcagcatggaggggttccggtggctgagatgtggattgcagcccttgatgrctggctgacctagacacctcctcccgcattttctgctttttccatgatgttccggacagcaaagtggcttgtcatggtggtaacccccacgtccattcct

SEQ ID NO: 24886 - DNA, 201 bp, Homo sapiens
tggcttggtagggaaattctgagactaaaaattaatatcatcatccctctgagtttttgcatatgaatgcttttcaacttgcaaactggtcgttatacagrtacgtatttttgaacagtgatttacaaacccaacttttgttaactggatcatagcttcccactgagttaaggcttcagagctggctgatcagtgtttata

SEQ ID NO: 24887 - DNA, 201 bp, Homo sapiens
ttgcttttttaccttggactcagtcttctcctttcataaacctgaatatgcatgttgtgtagcttcgctggattcaaattagataatttcatttcaaacakatacagccaagcatatggtatttggtatgagttgtgcaaagaaagtcaagttaggttatgaacaagtgagttctgagtttctttttagcgaagggacatt

SEQ ID NO: 24888 - DNA, 201 bp, Homo sapiens
gttttgccgtgttggacaggctggttttgaactcctgacctcaagtgatctgcctgcctcaccctcccaaagtgctgggattacaggcgtgagccaccacrcctggccaagagcagagctttctaagtgatgcagcatggaggggttccggtggctgagatgtggattgcagcccttgatgactggctgacctagacacct

SEQ ID NO: 24889 - DNA, 201 bp, Homo sapiens
ggtgttaggaagcatctaactacatgcaagacttcatcataatgatttttggtgtcaggacatcatggtctaccataagaacatgtgactgctatatttayaattttggaaacagataaagggaaaataaaagcaaaagtatatggggtgaagtaagagaataggactagaatttggaaagtacataatggacaaatctag

SEQ ID NO: 24890 - DNA, 201 bp, Homo sapiens
cattgttagatttttcaaaacattcttttaaactaccttccttccataccttctggatctgattgtttgagatgaatataccctcaggttgattcttttasgtttccttctttttttttttctcctaacaacataggggactacagtaagatttaaaaattggtctcttcctttctctttgttcttttaagaaaactagga

SEQ ID NO: 24891 - DNA, 201 bp, Homo sapiens
aacaaaaggctaagggacattcagtagtgggagtctagttttgtaggtaaatatagcagcacatgagcttgttctctttagtctgcctgaggaagtaataygttttcctttaaaaacaggctcacaggctctcctccctctaccatcctgtcctacccccatcatcctgttgcctccctgcaactcccactcatacactat

SEQ ID NO: 24892 - DNA, 201 bp, Homo sapiens
aaaaacaggctcacaggctctcctccctctaccatcctgtcctacccccatcatcctgttgcctccctgcaactcccactcatacactattcctaccccarcaggttgtctgtgatatttggttaaatatgatgagggtcaaatagataggccttgttttaaaaactctaccagaggaaatgatggtaccttgagtagata

SEQ ID NO: 24893 - DNA, 201 bp, Homo sapiens
ggcataagataaaagtaggattgaagatggttgtcttgcagagatacatttcagccaggaactgaaatgtgggtaagatttccgcaagggaaggggtaggsatggctttccaggaggtatagacaagcagataacaagtttgagcaacaggaagatcctgtggacttcatggcttgtatcttgtcatatatgaaggtacat

SEQ ID NO: 24894 - DNA, 201 bp, Homo sapiens
ggaggtggaggttgcagtgagcctagattgcaccacttcactccagccagggcaatagagcaagactctgtctcagtaaataaataaataaataaataaataaataataaattaataaataaataaagtaacctatttccaacattttgaaataactctttcttcagtgtagttgtcactttctttatgaacacagacagt

SEQ ID NO: 24895 - DNA, 201 bp, Homo sapiens
gaggtggaggttgcagtgagcctagattgcaccacttcactccagccagggcaatagagcaagactctgtctcagtaaataaataaataaataaataaataaataataaattaataaataaataaagtaacctatttccaacattttgaaataactctttcttcagtgtagttgtcactttctttatgaacacagacagtg

SEQ ID NO: 24896 - DNA, 201 bp, Homo sapiens
aggtggaggttgcagtgagcctagattgcaccacttcactccagccagggcaatagagcaagactctgtctcagtaaataaataaataaataaataaataaataataaattaataaataaataaagtaacctatttccaacattttgaaataactctttcttcagtgtagttgtcactttctttatgaacacagacagtgg

SEQ ID NO: 24897 - DNA, 201 bp, Homo sapiens
ggtggaggttgcagtgagcctagattgcaccacttcactccagccagggcaatagagcaagactctgtctcagtaaataaataaataaataaataaataawtaataaattaataaataaataaagtaacctatttccaacattttgaaataactctttcttcagtgtagttgtcactttctttatgaacacagacagtggt

SEQ ID NO: 24898 - DNA, 201 bp, Homo sapiens
gtggaggttgcagtgagcctagattgcaccacttcactccagccagggcaatagagcaagactctgtctcagtaaataaataaataaataaataaataaataataaattaataaataaataaagtaacctatttccaacattttgaaataactctttcttcagtgtagttgtcactttctttatgaacacagacagtggtg

SEQ ID NO: 24899 - DNA, 201 bp, Homo sapiens
taattatagaagtggattctatagcactgtaactattttggttctcttttccttatctcttttctacaaaaaaataccattctccaaaaggacattttagygtaaagtaagccaccaagcacatgcaaaaagtggatggattctgtttactgtgttttcagttgtttaacatttatattgaaaatgctatgagtaacgagg

SEQ ID NO: 24900 - DNA, 201 bp, Homo sapiens
tggaggttgcagtgagcctagattgcaccacttcactccagccagggcaatagagcaagactctgtctcagtaaataaataaataaataaataaataaataataaattaataaataaataaagtaacctatttccaacattttgaaataactctttcttcagtgtagttgtcactttctttatgaacacagacagtggtgc

SEQ ID NO: 24901 - DNA, 201 bp, Homo sapiens
gggaaatcttccttgcctgagcacatagttacagaataacccttggctcctgttgaaaagtgaaaggcacattgtatgcatgagatacctttgacctcacygactatttgctcaaccacctaaataaacaccccgtattcttgggaccaggtcaatactgcagacccctgcttctctccgtccccctttctccccttcacc

SEQ ID NO: 24902 - DNA, 201 bp, Homo sapiens
tggcttagcaaaggacctggggataccacgtttttatgcacaggattcagtagccaatgcctgttttgataagtagctggtcatttacatcattgcctcargccaggtccttcactctcgcctgagaggcaggaagagagaagtcaaaggcttttcacctctgatgtccatttcttatgccccttaaccactctgttctac

SEQ ID NO: 24903 - DNA, 201 bp, Homo sapiens
aggttgcagtgagcctagattgcaccacttcactccagccagggcaatagagcaagactctgtctcagtaaataaataaataaataaataaataaataatwaattaataaataaataaagtaacctatttccaacattttgaaataactctttcttcagtgtagttgtcactttctttatgaacacagacagtggtgcgga

SEQ ID NO: 24904 - DNA, 201 bp, Homo sapiens
attagttttgaaaatcactaggataatgatgtctagttagatgctaatcaaatatgtattggttgaagtagctggatggtagctctcccatagcaaaatarggacaccaaaatatatataaaagaggaaaagtcattgttgtgaactgctgctttccatttgctctctgggtggccagatcactccctgatgtgtctggca

SEQ ID NO: 24905 - DNA, 201 bp, Homo sapiens
tcttaacagggttcaagagcagagaaccggtctgactagaattcgccaggctggaatttcctaatcctagcaagcctaggggcactgcaggagactagggmgtgtttcatccctacctacgtctgcataaggcagacactcccagggtggccatttgagaggccccgcctgggaatgcattcttttctcagagctgttaat

SEQ ID NO: 24906 - DNA, 201 bp, Homo sapiens
gtgagcctagattgcaccacttcactccagccagggcaatagagcaagactctgtctcagtaaataaataaataaataaataaataaataataaattaatwaataaataaagtaacctatttccaacattttgaaataactctttcttcagtgtagttgtcactttctttatgaacacagacagtggtgcggattcaagtg

SEQ ID NO: 24907 - DNA, 201 bp, Homo sapiens
gcctagattgcaccacttcactccagccagggcaatagagcaagactctgtctcagtaaataaataaataaataaataaataaataataaattaataaatwaataaagtaacctatttccaacattttgaaataactctttcttcagtgtagttgtcactttctttatgaacacagacagtggtgcggattcaagtgatct

SEQ ID NO: 24908 - DNA, 201 bp, Homo sapiens
gcaccagggaattttactgttttctcacatgtttacatccttttctcagaatttcctattaatttatccattttgctcttggggttttttttttttttttccccataagccctttgtaatagtaactttaaatgcagtacacattgaaaatatattttctgtattttgtctgctgtttaactttttaaaatggcatatacc

SEQ ID NO: 24909 - DNA, 201 bp, Homo sapiens
ggacccccactttctggtgtctctctggtaactggaagggcggatatgagcggttcgcaggcaccagtctttaaagcgcctgtgatgttctcctgactggygtgggcttcctgccctttcaagagaactccttgatcatgcattctactaaaacgaggcagccctgggaggcgagtcttgcgttctaattgcccagtgggt

SEQ ID NO: 24910 - DNA, 201 bp, Homo sapiens
ttggcttttggtcaaatctgaagatatatcattacattgtaaagatattttcctgggatttaagttaatagaatttagaagtatgcagctttagaggtcartattcttggtcttattacaaatagtaacatgttcatagagaattttgtgaatacaagaagaaagaggagactaccaggaaagggggaagtctgtttcaaa

SEQ ID NO: 24911 - DNA, 201 bp, Homo sapiens
acagactaagactccttaactagagatgaggcaaggaaacagatagaccccatctgctgccacagattcatttcctgacttgcatttcttgcctctcctgmgggtttgttaactcttcagtctttggcaaaagttccattgggcagcaaccacaaatatcagccatcccccaataagtttactgtctgcaggaaaacgaag

SEQ ID NO: 24912 - DNA, 201 bp, Homo sapiens
acttcactgtccagctcccccattcctctacatggtgatatggtgtgtttgtgtctttgtgtctgtgctatgtagttgccacttccccctaccccttcatsgcctccacatatcgggggaacctgtccccgataattcaacgtagtttcttttatattttccctaagtgtcagccagtctgagaaataaagagaaagagta

SEQ ID NO: 24913 - DNA, 201 bp, Homo sapiens
gagccttggtctaccggccttctctctcaggtagcatttgcccattgccatcacatattccacttcactgtccagctcccccattcctctacatggtgatrtggtgtgtttgtgtctttgtgtctgtgctatgtagttgccacttccccctaccccttcatcgcctccacatatcgggggaacctgtccccgataattcaa

SEQ ID NO: 24914 - DNA, 201 bp, Homo sapiens
gtccccgttttatttatactcattccaatttttcttaataatgttacatattagacttaaagtctctccttttgcatcctcttggcttagaagtcagtgastgccattttattgtaggacaatttttaaaattgaaattaaaattaaatttgtttaactcttcattttcttggctctaatacgtcaaagaagggagcccaa

SEQ ID NO: 24915 - DNA, 201 bp, Homo sapiens
ccccgttttatttatactcattccaatttttcttaataatgttacatattagacttaaagtctctccttttgcatcctcttggcttagaagtcagtgactrccattttattgtaggacaatttttaaaattgaaattaaaattaaatttgtttaactcttcattttcttggctctaatacgtcaaagaagggagcccaaat

SEQ ID NO: 24916 - DNA, 201 bp, Homo sapiens
tagcctcctttttttatactgacaccttatggtaaaaatcatgtcaaattagaatgatcacttttagttcaaaaatatgaaataaagttttagagaaacayatttgctaaactaattacctactaatttatctatttgtgaattgttctcagtgtgtgaagaatgctgagtgactgaagtcaccatttgaaaattgtctca

SEQ ID NO: 24917 - DNA, 201 bp, Homo sapiens
cacacacatgtacacacacactagcagaaagcataaacagggctttcccaagttatccaggcaattttctgaatgagttgcaaaactgaaattaatatctrtctttagagtcttcaaggacaaaagcacatcatctgccagccctgctcgatgcttagctctccatgaagttaatgtgggttttgtgtatataaaggcaaa

SEQ ID NO: 24918 - DNA, 201 bp, Homo sapiens
tacaaccataatatagaagaacaatcaaaacaatgttagtttactagtatacatttattttaaggtcaaagtcaccacatttatttattcttaatatcagyctttgagaatattgaggcacctctgtagactcatagaattctgagaaatattgtttgaaaaattatcatcttctggatagaacccaagctctttgatgac

SEQ ID NO: 24919 - DNA, 201 bp, Homo sapiens
acatgacttgtaaatgtaatcattctgtgtgcagattgcagagcaaagcggggagcacaaagtttgagtctgtgtatgtttgattctcagacactcggctrttcaaatttaatactggaggatatttctgagaattcttcaattgtatgaaattgtcacgaaagaggaaattgagtatgtactttaggaggagggagatat

SEQ ID NO: 24920 - DNA, 201 bp, Homo sapiens
gggaggataagggtggactaggatgctctggtcgggacttgtggccatagttggtcatgggtgtttggaggttgggaacctggatgtgaaaagctgcattyctgcaggaggagtctctgccacatctgggcagggtgttttgaccattgtttaaacttccttgaaatcaggcaaggcctggtcgtggatgcagaagggaat

SEQ ID NO: 24921 - DNA, 201 bp, Homo sapiens
aaattagcagggcacagtggtgtgtgcctgtagctgagcatggtggggggcacctgtggtcccagctacataggaggctgtggcgggtggattgcttgagsccaggagttaaggctgcagtgagctatgattgtaccactctactcccatttgggagacagagcaagaccctgtctcaaataaatgaatgaatggtcagaa

SEQ ID NO: 24922 - DNA, 201 bp, Homo sapiens
cacttttttttctgaataagtgattgttatgtttggggttaattttgtcaatgggaaataagtataaaacagctttgttctttctatgactgcttatggtaaaaaaaaaaaaacagctttgattttactttcgcagaagcataatttactctcttcttttgtgaattggtgttagctttatattaggagttttgagaaaga

SEQ ID NO: 24923 - DNA, 201 bp, Homo sapiens
tatgatcatagctcactgtagccccaaactcctgggttcaagcaatcctcccgcctcagcctcccaaacagctggaactacaggcacatgccactatgccyggctaattaaaagaaaattttttcgtagaaatggagccttgctgtgttgcccaggctgatctcaaactcctggtctcaagctgtcctcccaccttggcct

SEQ ID NO: 24924 - DNA, 201 bp, Homo sapiens
tgtatgtattttaaaaataaaatcaagatatctcacaaaatacttcaaagacaatttgtatgggtgggggtggacaaagggattagtgcagtttacttcargcctcctaccctagagtgtctccattttactacttttgcatgtacttgagaagacctgcattgtgaggcttagctgtacttttgttaatgtgactgtttt

SEQ ID NO: 24925 - DNA, 201 bp, Homo sapiens
gatgtcgttttttgggagttgctcaccttgcaagagccttggtctaccggccttctctctcaggtagcatttgcccattgccatcacatattccacttcaytgtccagctcccccattcctctacatggtgatatggtgtgtttgtgtctttgtgtctgtgctatgtagttgccacttccccctaccccttcatcgcctcc

SEQ ID NO: 24926 - DNA, 201 bp, Homo sapiens
tgactttttttctgatttggaagatcattataaaggtgagagaaaacagcgtaaaaaaattgctcatagcgtattcaacagatgattataatgatgacttmatcaagtatgcacaaatatctttatcatatggaaaccctgcccgtagaagtttgtagctgtgaaattcttaagtttggggcacaatgttgtgtacttaca

SEQ ID NO: 24927 - DNA, 201 bp, Homo sapiens
tatataattttgtcaaatattcaagagcctaaatttgagtgttttctaaaaacagtattttattacatatggtaaatttggtaaattcttaactagatagaaaatagagaataaagggcttttactctgtgtttttcttgcctacagattcatcatacatactgtgaagcctcgaaatgcctagagtctaataaattagac

SEQ ID NO: 24928 - DNA, 201 bp, Homo sapiens
catacttgtgtttcacctgcagtagggaaaccttttcattctccagcaggccggggtttcgtaacagggctggaggaatgttattctggcaacagtgtgtrtgattgggaatggagagatgagagaccgggagcagaaagaaaaccttaaaggcttcaaagtgcctataaatcattatgtatataaacttggactgttttt

SEQ ID NO: 24929 - DNA, 201 bp, Homo sapiens
ccggggtttcgtaacagggctggaggaatgttattctggcaacagtgtgtatgattgggaatggagagatgagagaccgggagcagaaagaaaaccttaarggcttcaaagtgcctataaatcattatgtatataaacttggactgttttttttgttgttgtcgttcaaaaaaaaataaacatagcaatctctcattgctg

SEQ ID NO: 24930 - DNA, 201 bp, Homo sapiens
ttgatttagcaaaaccactggctttataatccttcctggcccttttgtcccattggcagggctgtaacctctttactccagagaaaacacagctgttgtcktcttctttctgaacagtgaagggggctacatcattttcaactgtattttgaagaattaatttgtgcactaatataaatgagttttctaaatttaaatgtt

SEQ ID NO: 24931 - DNA, 201 bp, Homo sapiens
ggcagatgtctttatcatgacttattttaggtgggttaagaattctttttttttttggagacagagtttcgctcttgttgcccaggctggagtgcaatggygcgatcttggctcactgcaacctccgcctccctagttcaagtgattctcctgcctcagcctcccaagtagctgggattacaggcatgtgctaccacgccc

SEQ ID NO: 24932 - DNA, 201 bp, Homo sapiens
atttatttattcttaatatcagcctttgagaatattgaggcacctctgtagactcatagaattctgagaaatattgtttgaaaaattatcatcttctggakagaacccaagctctttgatgacttccttacttcatccacaacctaaatttttgcctgatactgtcccttttatgccagccagacaggtggcctcactgtg

SEQ ID NO: 24933 - DNA, 201 bp, Homo sapiens
aaaaatagttcttacagtctctcaccccaccagtgatttgatttagcaaaaccactggctttataatccttcctggcccttttgtcccattggcagggctstaacctctttactccagagaaaacacagctgttgtcttcttctttctgaacagtgaagggggctacatcattttcaactgtattttgaagaattaatttg

SEQ ID NO: 24934 - DNA, 201 bp, Homo sapiens
tttctcaattcatgtactgcttggttggcagttacaatttccataactgagtattgttagtgaccttttcatatacctatggcttgcctcccaaaattgattttttttttttttttttttgagatggagtctctgttacccaggctggagtgcagtggcaccatcttggctcactgcagcctcctcctcccaggctcaagc

SEQ ID NO: 24935 - DNA, 201 bp, Homo sapiens
gccgaggcaggtgcatcacctgaggttggcagtgcgagaccaacctgaccaacatggagaaaccctgtccctactaaaaatacaaaattagccgggggtgktggcgcatgcctgtaatcccagctactcgggaggctgaggcaggagaatcgcttgaacccaggaggcagaggttgcagtgagccaagattgcaccattgc

SEQ ID NO: 24936 - DNA, 201 bp, Homo sapiens
gacatccctgacacagaggtttaacggtccatccaccagtcagcacatgttgctttcatgaccaaccatgtaacatgctgatatgaggaaatcatatcagwtcttgccttgggggtgcagcagtgtctaggtaaagctcccttggtgatagggacctagggccttgggatttggctgtagcaaaactcaaaacagagatgg

SEQ ID NO: 24937 - DNA, 201 bp, Homo sapiens
atgatagctagaattcctggggccacattcaccagttaaacttcttcatttgccttgggcatttggcaaatgaagccaggagctctgatgtggaaaattarggcagtgactgggtggcttattcagtagcaggtgtgtaagctggttttctagaagctggtgatgacctgcccttagagaggcagtcaaatcagtgtcttc

SEQ ID NO: 24938 - DNA, 201 bp, Homo sapiens
gtggtccatgcacagcagtctcagcatcacagactctcacaccccaccccagacctgctgaatcaaaatttgcatttttaaaaggtccctaaataacacaygtgcacattacatggaagaaatcactcgtctcagatatttgcattaagcctttagtgttccattctcattctgttatgttggagctttttacaaaattgt

SEQ ID NO: 24939 - DNA, 201 bp, Homo sapiens
ataacacacgtgcacattacatggaagaaatcactcgtctcagatatttgcattaagcctttagtgttccattctcattctgttatgttggagctttttayaaaattgtgaaggtgggtgtttaatctctacagatgtaattttctctgagcatgacacattatttagtagaatgaagttttatagtactatggatgagtg

SEQ ID NO: 24940 - DNA, 201 bp, Homo sapiens
agaaccccaggcagaggtatccagggaaccttcattcaattgtcggaacttaatgccataatgccttaactgtggtttccatgagtctatacgtgccatcyttcactccattctttaggttgttgaaactgtatcccagttttaaagactttcacagatgacatcttcatcgtttccttctctaacctgttccatcgtgtg

SEQ ID NO: 24941 - DNA, 201 bp, Homo sapiens
agtaaagattgtacagatcttctttctatttcctgcaatgcacagcacatagaaattgaatttcctggcagctgtaactgtctttgatatacctagccccrgtttgtctgaaattgatcaagaaatgtagccagtaaacttaattcctattcaaaggggaaagtgtgtactgtgtacagaagaggcattttacatagagaa

SEQ ID NO: 24942 - DNA, 201 bp, Homo sapiens
gtcgttctttcaactgcaaaaagtttggggtattgaagtgcccttggaccatgtgcttacgaagtgttggttcaaggaatggaatattgttatcactaagyagatcttttatctgcaaagtccagagaagtgcacttattgatttactcattttcatggctccctctacctctgttcagccgccatgatgcagataggcat

SEQ ID NO: 24943 - DNA, 201 bp, Homo sapiens
aagaatcagtgtgtcctaaagggaaaatgtggatttccaggttagcgtctgagcctaagctatgcttgactgtgacattatgtggtgttgatctcaggcamgtcaagtgtcctattccttagtctcttcttctacaaaatacagttgaaaacattgatcttgcaggattgtcacatggaaaagcaggtgtcatgtcagaag

SEQ ID NO: 24944 - DNA, 201 bp, Homo sapiens
tcttttagaaactgttcttttatttctttacatcagagaccttgaatatttaatttacttttcagtaaagctgtcagttgtaatctacaattttaaaaaamacaaatgaaacaaatcctcgtttcacaatttaaaccttattgagtctaattcactagagctgcaagtttattattctcctgcagtttgatgtgcctccaa

SEQ ID NO: 24945 - DNA, 201 bp, Homo sapiens
aaaaaagtgtccttttcatgggctatttggtgccatgtttttcgtgctttttgctggtgattttgctgttaaaatggcgcccaagcataataccaacatgmtgtctagcattcctaagcacagttagtctgtgatataccttccggagaaaatatattattaggtaagctttgttcaggtatgagttatagtcctgttagc

SEQ ID NO: 24946 - DNA, 201 bp, Homo sapiens
gaaccattgcgcccagctgtagatatttgtctttggaagaaagactttgtaaacctccttagaaagcttttagtggggcgggcaagcggcggggccatgcrcatggcatgctgggctgtgggcgctggctgctgggaacccggcagaacatggccgtgcatgtgtgctgaagggagaggtggccacagagatagcgtgttc

SEQ ID NO: 24947 - DNA, 201 bp, Homo sapiens
gaggcaggagaatcgcttgaacccaggaggcagaggttgcagtgagccaagattgcaccattgcactctagcctaggcaacaagagcaaaactctgtctcaaaaaaaaaaaaaaaaaaaaaaaagaaaagccatcctgggccacacgtagcccatggggctgcaggttggacaagcttgctttcaagcttcacaacctact

SEQ ID NO: 24948 - DNA, 201 bp, Homo sapiens
gaggcaggagaatcacttgaactcgggaggcggaggttgcagtgaaccaagaatgcaccactgccctccagcctgggtgacagagtgagactccatctccaaaaaaaaaaaaaaaattttgatgtgtgttctttgcttacaaagatgtctgtggtaatgagactcaggagcaccctgtgatcttatggaaatcttttgaag

SEQ ID NO: 24949 - DNA, 201 bp, Homo sapiens
gtttgctgagctggttctgttcatgtgctatggctggagacatgaggcagaggacacagaggccctgccctgatggcactcacactgtaaacttgaggcartgaggacgcacagttaggagctgaagttgtaccacagaacacataaagggagagttagacacaagacgagggggctccaggtgagccagtgagagccgtg

SEQ ID NO: 24950 - DNA, 201 bp, Homo sapiens
tgtttttaaaattgtgtaaacgtaaggaatacaagtgcagtttcgttacatggatatattgtgtggtggtgaattcttggcttttaaccatcattcaatakgttgctgtacccattaagtactttcccatccttcaccccctcccatcctcctgagtctccaccgtctatcattccacactctgtgtccgtgtgtatacat

SEQ ID NO: 24951 - DNA, 201 bp, Homo sapiens
ttcttcagttgtcctttcctttttcatagtactttttctttccagatgcagtatccactccaggatcatacattgcacttagatatcagacgaagtggacttttttttttttttcctttaaagatcagtgcaattgcgttgtaaagacaagacaaaaaacaaagaaaaactcatattctggatttgtctgattgtttcctt

SEQ ID NO: 24952 - DNA, 201 bp, Homo sapiens
actaggactttatttgtcttgttaacttaactatcatgtggctaatctggttggtggatgctaaactgtaaactgtgtgccatggttattatttaaaggayttttcaaacttgtttctctttagtctttgtgtttctcaatgtgacatgtgcacatgatcagatagcactactaggattgttatgaaaaagagcagagcct

SEQ ID NO: 24953 - DNA, 201 bp, Homo sapiens
tttgtatttttagtagagacttgctttcaccatgttggccaggctggtttcaaactcttgacctcaagtgatccacccaccttggcctcccaaagtgctargattacaggcgtaagccaccacacccagccaaaattgttttattattatattttagagacaagctcactgtagccttgaacccctgggctcaagagatcc

SEQ ID NO: 24954 - DNA, 201 bp, Homo sapiens
caaaatgtgtcgcctctgggccatctgcttctcagcttccaaaaactgtgtttccctcatttccctctgttctctttgtctttgtgcgattatgcttggamacaacaacaacaacaacaacaacaacaacaacaacaacaacatcatccccgcgtgtattgtggtttcagtgggctttcagtaggaaataaaaataagtgt

SEQ ID NO: 24955 - DNA, 201 bp, Homo sapiens
aactgtgtttccctcatttccctctgttctctttgtctttgtgcgattatgcttggaaacaacaacaacaacaacaacaacaacaacaacaacaacaacawcatccccgcgtgtattgtggtttcagtgggctttcagtaggaaataaaaataagtgtgtctttttgatatgatgtttttaccctttcatttttatctttg

SEQ ID NO: 24956 - DNA, 201 bp, Homo sapiens
acaactatgtttcttcttcagatcatttgaaagcagagttttaaggattttaaaatatacgtacaccatatagaagtgtataaaatttaaaatgatgtccttttttttccttctcctcaatcccactgcaggataaccactgcaaattttgaggggtgtgtgtgtgtgtgtgtgtgtttacgcattttaatatgtgtgtgt

SEQ ID NO: 24957 - DNA, 201 bp, Homo sapiens
gtcaacatattcaggtgaaacacttaccaggtgattagaataatggttgtgttttttagatgaggtagatttcactgcatgaaaatgaccattgatatggratataccagccaatgaatgagaacggaacaaacaaagagatgtaaaagatgagcagtaatttgggttgctcctcaacaaacatggaaaattaacgtttta

SEQ ID NO: 24958 - DNA, 201 bp, Homo sapiens
gttgggtgttgagaaggcagagaggggtggcactggctctgtgcattagccttgtgcaagaacaaagcggtttttcctcttggggcacgaggacatttgtytcccagtggcaccttgcaaaatgctagacattgaggaaaattccagtaaacacatggttctggctcttaaaatttcgaagtgtcctgattttaatataag

SEQ ID NO: 24959 - DNA, 201 bp, Homo sapiens
tagtcatggttcctcacagatggttaacaatgggagagaaaaagtaggtggtctgttcagattgacagatacaaatctccaagaacccagagatccccacyttcctcattctcagaaatgctcggaaatggattcctgttacttcataagaaacctttccaagcatttctgttgtgacaatccctgtgttaggtgctagga

SEQ ID NO: 24960 - DNA, 201 bp, Homo sapiens
gagtgtttgtgcaacaggtatcaacaaacactacatatacggcttccccacctcctgaccctttttttttgtttgtggagattctattagatgtttattarcacgctcctggctctctgatttcttcataccagttcttgcacattggtggttattcctccagaagttggtggttcttcttcctgatcatggctttaacag

SEQ ID NO: 24961 - DNA, 201 bp, Homo sapiens
agctgatggcgctgggttccctgtttgtataaggtttgaattcctggtggctccaccccttccccccagtgtgcatatggtcccttagtctgctctgggcrtgttcaggcaaactccctgtgcaggttgccttatctgcacaaaacatgtggtataaatacttggggggtgggtcggagattcttcagggacccttcccta

SEQ ID NO: 24962 - DNA, 201 bp, Homo sapiens
caaacttctcaaactagacgcattccctgttttctgggttctggtggttagcttgggaagaaagtgaaatgtgacttgcctaagaaagtaagacccctctscccatcacacccatatgtgaaagcttcttgggccattattcttttcatctcagccaatagcctctgtccttgctccttgacatacttcttgatgactggt

SEQ ID NO: 24963 - DNA, 201 bp, Homo sapiens
gaaatattctaaaaggtctgaaatgtatgtttgtgtgtgtgtgtgtgtgtgtgtatatatatatatatatatatttttttttttttttttttttttttttkagggggaggggtaggtgaggtggaaggttctgtatgcaaatcaaggtctggtttccaaattaggtcctccaaacaaggtcagattgaaaactgaaggctt

SEQ ID NO: 24964 - DNA, 201 bp, Homo sapiens
agagagaggatggaatttatcatcctagaggtattaacaacaaaaaagactgctgaatacagttcaatcaagaaagaatcaagcaagacaaggtctttaarttttacccgtattccacatcccttactccagatagaatttttgccacttcatactactaagtaaagcaggcaacagatgtcaaagtacaggaggatcaac

SEQ ID NO: 24965 - DNA, 201 bp, Homo sapiens
agatgatggatggaccatagccaggcccaatttttgctgcagatgaataaataggtcatgttcattcttgcttcttccccctttattctatgcaataaaayatccggctctactaatagctctaacttgctttttctaacctccgtagaaaatagatttgcccgtttttcccctcccaggttgctttgtattgattaaccc

SEQ ID NO: 24966 - DNA, 201 bp, Homo sapiens
tttggccattgatgaggacttatttagaaagacaaccattcaagaaatggaacattacatgcttttctactttggattattagtctagaatgattaccagaaaaaaaacacataggtttaaaactgaaaaattatgagatgaatataaatctgttcatctacttatctgaaaaaaattattgatgttacttctagaattaa

SEQ ID NO: 24967 - DNA, 201 bp, Homo sapiens
caccatgccaagctaattttatacttttagtagagagggggtttctccatattggtcagtctggtattgaactcctgacctcaggtgatctgcctgcctcrgccttccaaagtgctgggattacaggcgtgaaccactgtgcccagccaataattcctttgattcctatgatagaacactttgttcagttgcagatagaaa

SEQ ID NO: 24968 - DNA, 201 bp, Homo sapiens
gctgagaagccaggccattgactcttgtcttttgttttcttgtattattgcattacttccctttcttttttttcttttcttttcctctcttttctttttcyttctttttttttttttttttttttttttttttgagacagggcctttctttgttgcccaggctacagtgcagtggtgcagtcatagctcaccgtagcccgc

SEQ ID NO: 24969 - DNA, 201 bp, Homo sapiens
agaagccaggccattgactcttgtcttttgttttcttgtattattgcattacttccctttcttttttttcttttcttttcctctcttttctttttctttcyttttttttttttttttttttttttttttgagacagggcctttctttgttgcccaggctacagtgcagtggtgcagtcatagctcaccgtagcccgcaaca

SEQ ID NO: 24970 - DNA, 201 bp, Homo sapiens
ataaaatatgaaattcagttatatacattttagcggaagtatgcgtcacaaaatgtgtttctgttttatgtttagattttccatgttattttttatatatwtttttttaattgttaaaatttttgtagaggcagagtcttgctatgttgccccagctggtcttgaattgctggcctcaggcgatcctcttgcctcccagtg

SEQ ID NO: 24971 - DNA, 201 bp, Homo sapiens
gggttctctagatccactgctgtgttgggaaatgtttaatagccggctctctgaaaaccgcagaaacctggctttgtcacattttcccatttccatggtgyaaatatgagtattatggccagattcaggctaccaaattgatgtcactgaatgttgagttgggatgagatgcatggtagcaaactgtaatatggtatttcc

SEQ ID NO: 24972 - DNA, 201 bp, Homo sapiens
tagtttctttattagtcacaaaaccttagtggttcccagatcatggcagaattgtgcatgaaatgagttatgttccatagcagatatggctagtcctagaktgtgtgtgtgtgtgtgtgtgtgtgtgtgtgtgtgtgtgttttcctgttgtttccacaggattacagctgaaaacttttgttttgttttaggtaaatggag

SEQ ID NO: 24973 - DNA, 201 bp, Homo sapiens
gggtttttgtttgttttttttttgctttttttgtttatgggtacagatagttaggaagcaatggtatctcaatgagtttaacattttcttttgccccctgygaaattgagtgccaggaaattgggctcaaccattgtgttgtcttcagtaggcaaattgggttggggggctggaaattggtcacagtcatggtgctaagtt

SEQ ID NO: 24974 - DNA, 201 bp, Homo sapiens
tgatgtccttttttttccttctcctcaatcccactgcaggataaccactgcaaattttgaggggtgtgtgtgtgtgtgtgtgtgtttacgcattttaatakgtgtgtgtgtgtgtgtgtgtgtgtcattttgtctctgtaaaaagaggctcaagccacacaggatgtgctttgttcactacggtcttgtcagcatccttct

SEQ ID NO: 24975 - DNA, 201 bp, Homo sapiens
ttttttaaagatggaaaaaatcacactgcaatagtatttgttacttcttttcatagtcaaagcacatctaagtaaattgagttgaggccacatcttgaccygctgatcatcttgttaaatttcatgttgcttcctagctcatttaacttgtgaggaacagcattttaggaggcttgatttagcaattcttttcagtaaaac

SEQ ID NO: 24976 - DNA, 201 bp, Homo sapiens
tgagttgtgaaatgctaaattataagtggccacaaaatggaaagaaaagttaaaaaacttgattcaatcatggaaaaaaagggagggctaagagaatacaktaaaaaaagtatacacaggaaaattaaagtgacgtgtcagtattaggctaagcatagttgttagaataactataaaagagataatttaacaaaagttaag

SEQ ID NO: 24977 - DNA, 201 bp, Homo sapiens
ttacattcccaccagcagcgtataaacattcccttttctccacacccttgccagcatctgttattttttgacttttaatttttttcttcgaatttctcacrcgacacggatgtattgttttatttaataattgccactctgactggtgtgaggtggtgtctcattgtggttttgatttgcatttctctaatgatagtaatg

SEQ ID NO: 24978 - DNA, 201 bp, Homo sapiens
acaatgtccatgacttagttcaggcacgtccaatatcttggcttccctgggccacactggaagaagaattgtcttgggccacacataaaatacactaacastaacgatagcagataagccaataaataaataaataaataaataaataaataaacaaataaataaataaatcacaaaaatctcataatgttttcagaaagc

SEQ ID NO: 24979 - DNA, 201 bp, Homo sapiens
caccagcagcgtataaacattcccttttctccacacccttgccagcatctgttattttttgacttttaatttttttcttcgaatttctcacacgacacggwtgtattgttttatttaataattgccactctgactggtgtgaggtggtgtctcattgtggttttgatttgcatttctctaatgatagtaatgttgaacatt

SEQ ID NO: 24980 - DNA, 201 bp, Homo sapiens
caggggacggaggttgcagtgagctgagatcgcccactgtactccagcctgggcgacatagcaagactctgtctcataaataaataaataaataaataaataacatgtaaaaatcagtgagggtaaggtggatgatgttgttttggatctttactgaataatgtgttattcagcaactgaaagtcatgcactcttgttttg

SEQ ID NO: 24981 - DNA, 201 bp, Homo sapiens
aggggacggaggttgcagtgagctgagatcgcccactgtactccagcctgggcgacatagcaagactctgtctcataaataaataaataaataaataaataacatgtaaaaatcagtgagggtaaggtggatgatgttgttttggatctttactgaataatgtgttattcagcaactgaaagtcatgcactcttgttttga

SEQ ID NO: 24982 - DNA, 201 bp, Homo sapiens
ggccgcttgtccttggggtataaattgagtggtatattagcccatgtgtgcagtcgtagcttgttttattttgtaagagtctccactggaacttgaattcrgtccttctgtctgcaattccttaatagtagtaccttgaggtatatgaggttgatttttttcagaaggggaaatgttctgaaatatattttaactacagga

SEQ ID NO: 24983 - DNA, 201 bp, Homo sapiens
ggggacggaggttgcagtgagctgagatcgcccactgtactccagcctgggcgacatagcaagactctgtctcataaataaataaataaataaataaataacatgtaaaaatcagtgagggtaaggtggatgatgttgttttggatctttactgaataatgtgttattcagcaactgaaagtcatgcactcttgttttgac

SEQ ID NO: 24984 - DNA, 201 bp, Homo sapiens
aaatgacttgattactattatgaatacatttagtcagtgcgcttcagaaatgctattgcttgttttcgctcatccccaaaatgactatggaaataattgtrtatgtgtgtatgtgtgtgcgtccagctaggagggaaactacaagtagtactttctgatttttgaaaaaagaacaactttacatacaattcagttttacat

SEQ ID NO: 24985 - DNA, 201 bp, Homo sapiens
ttgtatgaaaaggaatacctttttaaaaaaattattattaaaaataaaaagacctaagtggcaataagcctcatggctattaattatacaaatataggtcwtgttacttaggatgacataaatgaaggaaatgaaaaggcatttacaacttttgcaacctatctccttcactttccatacatacattaatacatctgagta

SEQ ID NO: 24986 - DNA, 201 bp, Homo sapiens
acaaaaacagaagcaggttttttttatggccaattcttccttttcttccttagttggtggctctttgttttgaattcccatagtagctgtttatttttccrctttgcacaatgtctgtattagtgatttactactcgctgtctttcacaagacctatgagcgtggtggtttaattaaccatattttgtgcatgtttactct

SEQ ID NO: 24987 - DNA, 201 bp, Homo sapiens
tgtatttattgagcagcagcatagggtagtggctaagaacctaaactctaaatttagatgtcctgagttcaaatcccagctgtatgctcaccagccttgtrtgtggggccagttaattaacctctttgtgttttacttttttcagttgtgaagtgtggataataatggtacctgcctcacagggttgttttgaagctaatg

SEQ ID NO: 24988 - DNA, 201 bp, Homo sapiens
agaaaattgttttatttcaagtacaagtggtattttaaatatttcaaaacagattctacttggatcattttggaatacatccttttcatctagctcttagygctaaacaaaaattaatttgtataatctagagtgacaaggttttagaaacgaggtttccaaatttatcatatagcccaaattctcttgtgtcttcaagta

SEQ ID NO: 24989 - DNA, 201 bp, Homo sapiens
cagagtattaatgttactcattggactccttccttcttccagtagatccttgctgtaaaacatcctggattctcattcttctgcctgagcagttcccccgyaacggtgcgtgagcagatcacatctctctgacagaagggtttgcaaactatgcccacagaccagatccccagggctatttgtttatgcatttcctgtgac

SEQ ID NO: 24990 - DNA, 201 bp, Homo sapiens
tttaaatggtaagtaagtgccactaaatcaatttcaggtcttcagtgagttccaaaacaaaatttgaaaaacaccatttagatggtggaaatcctctcggyttgcgagggtgggatgaggaacctggaggcattggagaggcaggtggcctctcataaatgactcgatatggcttgactctgctcctaaagatagtgggta

SEQ ID NO: 24991 - DNA, 201 bp, Homo sapiens
gaaaattgttttatttcaagtacaagtggtattttaaatatttcaaaacagattctacttggatcattttggaatacatccttttcatctagctcttagtkctaaacaaaaattaatttgtataatctagagtgacaaggttttagaaacgaggtttccaaatttatcatatagcccaaattctcttgtgtcttcaagtat

SEQ ID NO: 24992 - DNA, 201 bp, Homo sapiens
aactatgcccacagaccagatccccagggctatttgtttatgcatttcctgtgaccacttttgcagtatgatggcagagttgagtagttgcaacagactgrcccacaaggccaaaaatatttattattagggcctttatagaaaaagtttgctagtggttcccagttccgctgtaaaggattttgtccctgtttctttcta

SEQ ID NO: 24993 - DNA, 201 bp, Homo sapiens
cccagccacatcagggttttactagtaaggagaaagaagagaatggatgttgggtgagcagcttgcagcacctgcctctctagctcactgctctgaagccmggtggcctcgggcctctgaaagtgcagctgctttgtaactctgggctgctgtccacccttactttattgtgctggccaagactaaccatcactggccaga

SEQ ID NO: 24994 - DNA, 201 bp, Homo sapiens
cctcagtgtctcggagtgcactagttagcattattagattgccaaagcttagacactgctcttaagcagccttttccagagttagtgccagcatatagccrgcttaaggttattcaggttcttcttgtccaattttgatcttccaggcttctgtttttcccttctgctacctactttttttttttcttggttatgtaattt

SEQ ID NO: 24995 - DNA, 201 bp, Homo sapiens
tacataaatgggagatctgtgctgatgccagggtgggtggtatccacaaagcctgctctgatctgatgttaggtgaaagaaaagcacctaaatgtttctcrcaaagctttggttcttaattctaatatgagacaacagaatggcgtgggagttgacttagccctaaacattctagatctttaaagttttcgttggtccttc

SEQ ID NO: 24996 - DNA, 201 bp, Homo sapiens
ggagtggccaggaacacaagcctcctccccaagacttaacttcctaggtgaatacgcaactccctcccaggagtggtggccactctaagtcctaccaaggktattggactgaaacgccattgtctttcatgtagtgatgacaagtcatttgtttctaaagtcaaaaataattacctagtgtaattaggtaattatttattt

SEQ ID NO: 24997 - DNA, 201 bp, Homo sapiens
ctttaagcaaatatgtgacctctagtccctttttcttcaaaagggcattgtgacacaggtagatggcgggtgtttgcctcttgacttgaacctgctccctytgtgggaatcttttctttcctgttctaagaattaggtttagtttccaattcttagcagtttgtccacagagccctttattgggccttaaaaacatgtcag

SEQ ID NO: 24998 - DNA, 201 bp, Homo sapiens
cacacataaacacacacatcagcaaaattttggaagacagagcattatgtcagccatcatataattaccctttatatattttgtggattttaagaatcaasaaaattttctttaaaataaatcattgtgtccctgtgtgttgaagatggctttggtcagtctgtatttatgtttttcttcaattcttctagaatgcagagc

SEQ ID NO: 24999 - DNA, 201 bp, Homo sapiens
gttggtgcctactgattgtacaaagctgtatactgtctcttgagtattagtgcttagaggacattgagatcaatctgctttgttaattgaagccttattarttctacatgagtgtgcagtgtgctcaatacagtgaatcatccaaataaccaaaacttactacttttaagaatcaaagtttttccctatatttaggattta

SEQ ID NO: 25000 - DNA, 201 bp, Homo sapiens
agctacattagctttgtttgttgtagatacactaatggataaggaccttgttgaaactgtcttttagttcagagaacttctgattttgaccagccatattscagctttcaggacttactagttgcctagatgttagaagttggaacatttgctattcagattatcctatctcccacaattttttgattacctcaacatttc

SEQ ID NO: 25001 - DNA, 201 bp, Homo sapiens
tcccactcctcctcacagaggaaaggatgaatatgtaatagccatcacagcagcctgttgtctatcctgcggtgtgtttctaccatatcacacaaagcctytttttcttgtctttttagtagtactttggtagtaatttttttaaaaagtatgtaatgtctgtatatacaaatacatatatacgtaggcacacacagagct

SEQ ID NO: 25002 - DNA, 201 bp, Homo sapiens
gttaagaaagcctgtttaaatcaaagcaagaaatcccatttccaaatggtagtaagacgtgtgttacatggagaaaataattgcctgaaagtgtttgttgyatttgccaagattagattgtacactggtcaataaacaagagttctttttttttgtttttatctttcaatccaaccaggtacttgggttcgtttttctgtt

SEQ ID NO: 25003 - DNA, 201 bp, Homo sapiens
tagtaaatgctagttcagtttgcagttttccttgggatcattttggaaagataaattatactttgcatttcatttttgttttgttttgagatgtgatcttrctttgttgccaaggctggagtgcagtggaatgatcatggctcactgcagccttgaccacccaggctcaagcagttccacctcagcctcttgagtagctgg

SEQ ID NO: 25004 - DNA, 201 bp, Homo sapiens
gccagcatttatgaattgtgacctcttgccggctatttatgctctctgagtctcagttctctcctctgaaaataggaattataagccctctttccacatgwgataatgcacatgaatgcattttttaaaattgtaaaatgcagtgcagatctaactggtggttactgctgtctcattcttgccttggctgtgtcctgtgcc

SEQ ID NO: 25005 - DNA, 201 bp, Homo sapiens
tacttaaataactagttataataattattaataagtagtacaataacttatatatgttaataactagtaaatgctagttcagtttgcagttttccttgggrtcattttggaaagataaattatactttgcatttcatttttgttttgttttgagatgtgatcttgctttgttgccaaggctggagtgcagtggaatgatca

SEQ ID NO: 25006 - DNA, 201 bp, Homo sapiens
cctctttccacatgagataatgcacatgaatgcattttttaaaattgtaaaatgcagtgcagatctaactggtggttactgctgtctcattcttgccttgrctgtgtcctgtgccagcgctgtagtctgaggccattcccttcatttctgtagaatggtggaggagttgaaggacttccatgactttgtgttggcatgaaa

SEQ ID NO: 25007 - DNA, 201 bp, Homo sapiens
aatcatgaatatggtggtggctgctccatggcaggttcatttgggtttgtttgccgacccccacagtcttgcccatcccttttctctgttgaatttctgcwgttcttttgtatgttcctgttcagcagcctttggcctgcagctcccacaggggcatcatgtgtgcacgaagttcagcccgcttctgttgtcattaaccgg

SEQ ID NO: 25008 - DNA, 201 bp, Homo sapiens
aactgtggtgagatgatatctcattgtagttttgatttgcatttttctgatgatgggtgatgttggggaaagggaacattttgagaatgaggaatactgaygaaagggccagaagttcattttaggcactccgagatgtcagccgagcagttgtcttaagtagctccctgcccagtagtagccttcacggttaggcctgca

SEQ ID NO: 25009 - DNA, 201 bp, Homo sapiens
atcagaaaatgtgttagatcctgaggacatagcagtgaataagacagatggcatgcattctactggacaacgtatcaccttagtcttttagagaccaattmaaatttttaacaccttctcaatgttttccttcacagaaaacattgaatgctacaggaggacttaaaatgcagaaatgaactgaagatcagtgttctgctt

SEQ ID NO: 25010 - DNA, 201 bp, Homo sapiens
tcttctctaagggttcctcttttctgcctgttctttcattattcctgtctctcaaagttcctctgggtctgttgtctgtttttttgtttggttttgttttkttttttttttttttttttttttgagacggagtgtcactctgttgcctaggctggagtgcagtggcgtgatcttggctcactgcaacctccgcctcccggg

SEQ ID NO: 25011 - DNA, 201 bp, Homo sapiens
aagaaatcagaagcatagtggtgcagatcacctgcctgagagccagcggcggcctggcgagccggtgtgcacgcgctggctggtattggtgtcagctttcrtgaaggcgtcccttgtgttttgaggcttctcaagttctgaggaagcacctgcagctgcacagaggtgcgtgtgcatggagttgggaggctagccgccaaa

SEQ ID NO: 25012 - DNA, 201 bp, Homo sapiens
aggataccgctaccagggagcagcaaattaatatgcatttcccagccggagtggctttttgacacctgatgctgtggcagtacatttagatgataaggaaratccctgatcacagcaggaacatctgtttttccctggcaagaaggaaaatttcccacctcgcacaaagctgagcagctatttggggcagcctcataagtg

SEQ ID NO: 25013 - DNA, 201 bp, Homo sapiens
aatacacaaagtaagaagagaaaaattgttttcacttacctcaaaggacacatttgttgaagacttttattttttattttatttatttatttatttatttwtttatttatttatttattgatcattcttgggtgtttctcggagagggggatttggcagggtcataggacaatagtggatggaaggtcagcagataaacat

SEQ ID NO: 25014 - DNA, 201 bp, Homo sapiens
gaataccaattgtatattttgaagagaaggaacacaacccagaccacctcaaatatcaaatgtcattaaggaaaatagtaatgtaagcttgtgaagttaaygttagagagttttttacagccatgtagatcttattgtgacctgatgtgtgatgaagttttttttgttgttgttggtttttttgtgtttgttttttggttt

SEQ ID NO: 25015 - DNA, 201 bp, Homo sapiens
tagatgataaggaagatccctgatcacagcaggaacatctgtttttccctggcaagaaggaaaatttcccacctcgcacaaagctgagcagctatttgggrcagcctcataagtggaggattaaagttataatttaaaaacgggagagtaatttcttatggcatttttttttgtataatcttttaaataaagtcataactc

SEQ ID NO: 25016 - DNA, 201 bp, Homo sapiens
ggtgtaataatcacctcaaatggtgggaaatgagtatgaaagcctggtccctagtcaatgatagcctcaatttttatttttgacataaaaattatacttgyatttcagtgtactttaattcctccttctctttgtcgacacataaggttctgtcactaataaataaagttctgtcattaacaagtctaccctttatgactt

SEQ ID NO: 25017 - DNA, 201 bp, Homo sapiens
gtttacagtacacgttcatgctccctcattcatcattgtctcacagtgatatggtaaagctcgtagaagtccccaacgatggagggcctctgggaatccaygtagtgcctttcagtgctcgaggcggcaggtaacgtatcttggaggtttttaattgaatcataatgtagagtgttttatcttcatttatgctcagataga

SEQ ID NO: 25018 - DNA, 201 bp, Homo sapiens
tggtccaggcattggaggccttgggcacagagtggggggaaaatggtgcagggcctaacaggctgtgaaagggaaagtgctggggaaaaggtggaaatgtrgcaagttctgaaggatgaagttatgaggttgagaaagtccataggtgcggatttatttccaaggggtggctacaaatattatataaaggctgcagataat

SEQ ID NO: 25019 - DNA, 201 bp, Homo sapiens
gatgggcgaccaggcagagaggctcctcacttcccagatggggtcgcggccgggcagaggctgcaatctcggcactttgggaggccaaggcaggcggctgsgaggtggagattgtagcgagctgagatcacgccactgcactccagcctgggcaagattgagcactgagtgagcgagactccgtctgcaatcccggcacct

SEQ ID NO: 25020 - DNA, 201 bp, Homo sapiens
tggtagctcatgcctataatctcagcactttgggaggccaaagtgggaggtctgcttgagcccaggagtttgagggcagcctgggcaacatagtgagaccytgtcttacttaaaaaaaaaaaaaaaaaaaaaaaaaaaaaaaatatatatatatatatatatatatatatatatatatataaaatacatacgtaaaataca

SEQ ID NO: 25021 - DNA, 201 bp, Homo sapiens
aagattgagcactgagtgagcgagactccgtctgcaatcccggcacctcgggaggcccaggtgggcagatcactcgcggtcaggagctggagaccagcccsgccaacatggcgaaaccctgtctccaccaaaaaatacaaaaaccagtcaggcgtggcggcgcgtgcctgcaatcccaggcactctgcaggctgaggcagg

SEQ ID NO: 25022 - DNA, 201 bp, Homo sapiens
tataatctcagcactttgggaggccaaagtgggaggtctgcttgagcccaggagtttgagggcagcctgggcaacatagtgagaccttgtcttacttaaaaaaaaaaaaaaaaaaaaaaaaaaaaaaaatatatatatatatatatatatatatatatatatatataaaatacatacgtaaaatacatatataaaatataa

SEQ ID NO: 25023 - DNA, 201 bp, Homo sapiens
agaattattaatcaaatgaagctgagaaatactgaagtgtctctttctacatctgactgcttcttataatttgctgtcagttcctatgggtttcaagcttrattctatgctactcgtatttgaaatttttgttttttttctgcctacttacctacaatcttattggtaaatataatctttttgaacatcttatagtaatat

SEQ ID NO: 25024 - DNA, 201 bp, Homo sapiens
atggcgggtgtttgcctcttgacttgaacctgctccctctgtgggaatcttttctttcctgttctaagaattaggtttagtttccaattcttagcagtttktccacagagccctttattgggccttaaaaacatgtcagctccctaatgtagaatctgaatatgcgaattaacttaaagataaataaaaagaaaatctgca

SEQ ID NO: 25025 - DNA, 201 bp, Homo sapiens
gaaattatgactcactcacttttaggaatgaatttactaatctaattattccaccagtgcctgctctacgctaggcattggggataaaatacaatatgctaaaaaaaaaactgaaatattgaataatatgatcttgccaatcaccagtgagaatccagttttaggtttgttgaagggggtttaaggccattccaatacgaa

SEQ ID NO: 25026 - DNA, 201 bp, Homo sapiens
ggccaaagtgggaggtctgcttgagcccaggagtttgagggcagcctgggcaacatagtgagaccttgtcttacttaaaaaaaaaaaaaaaaaaaaaaaawaaaaaaatatatatatatatatatatatatatatatatatatataaaatacatacgtaaaatacatatataaaatataaaaatctaattatatacatgta

SEQ ID NO: 25027 - DNA, 201 bp, Homo sapiens
ctcccaaagtgctgaaattacaggtgtgagcaacactgtgcccaggggatagtggcctttttacttcaagtattcatagcaggaataaagcgtgacataartggcatgtatgaaatgagaatgatgtgtataaaactcatgggacagtgactaatatgtcttaaataaatgaaatgttatattccgtggattattttctag

SEQ ID NO: 25028 - DNA, 201 bp, Homo sapiens
atagtattcatactgcagagagaattatgttgctttgctgaaaacccaaatgatggttttaatagcaaggaaacttgccagtagttacttttcaatgacayttatttcattataaaaacagtagaatttgttgtcatcctttgttgtcattttgtttgctttttgctttccccattcatcctccagttcaggttttgtcca

SEQ ID NO: 25029 - DNA, 201 bp, Homo sapiens
cacattaaaccacaaatagacaacaaaatgaaaatcgcagttgtgcttactttggtttcttcttctaatgaagcttaattctaccaccccccctccccccycgccaagatggagtctctctgttagccaggctggagtgcagtggcgtgatctcggctcactgcaacctctgcctcctgggttcaagcaattctctgcctc

SEQ ID NO: 25030 - DNA, 201 bp, Homo sapiens
ccaaagtgggaggtctgcttgagcccaggagtttgagggcagcctgggcaacatagtgagaccttgtcttacttaaaaaaaaaaaaaaaaaaaaaaaaaawaaaaatatatatatatatatatatatatatatatatatatataaaatacatacgtaaaatacatatataaaatataaaaatctaattatatacatgtata

SEQ ID NO: 25031 - DNA, 201 bp, Homo sapiens
taatttgttatttaaaacagcttgagaagtatttattttaaatacagaatttgtgttaatgaattggaaaagaatattgtattgcttggcagagatgttayagcctaatgatttgtggcttagaacaaggaaaaccagctggtgatcagtttgtctaagtagtacatgagtatctactaatatttgataatagccaatttt

SEQ ID NO: 25032 - DNA, 201 bp, Homo sapiens
aggaaacttgccagtagttacttttcaatgacatttatttcattataaaaacagtagaatttgttgtcatcctttgttgtcattttgtttgctttttgctwtccccattcatcctccagttcaggttttgtccatcattgttgactgtaatggtacatatggctgatctggcagacagcagtgatctcatttgtaacgcat

SEQ ID NO: 25033 - DNA, 201 bp, Homo sapiens
tgctaaattataagtggccacaaaatggaaagaaaagttaaaaaacttgattcaatcatggaaaaaaagggagggctaagagaatacagtaaaaaaagtayacacaggaaaattaaagtgacgtgtcagtattaggctaagcatagttgttagaataactataaaagagataatttaacaaaagttaaggactcacagctc

SEQ ID NO: 25034 - DNA, 201 bp, Homo sapiens
aaagtgggaggtctgcttgagcccaggagtttgagggcagcctgggcaacatagtgagaccttgtcttacttaaaaaaaaaaaaaaaaaaaaaaaaaaaawaaatatatatatatatatatatatatatatatatatatataaaatacatacgtaaaatacatatataaaatataaaaatctaattatatacatgtatatt

SEQ ID NO: 25035 - DNA, 201 bp, Homo sapiens
gcctgtagtcccagcactttgggagtctggtgcgggtggatcccttgaggccaggagtttgagaccagcctggccaacatggcgaaaccccgcctctactraaaatgcaaaaattagccaggtgtggtggcgcacgactgtagtcctagctccttgggaggctgaggcaggagaatcacttgaacctgggaggcggaggtt

SEQ ID NO: 25036 - DNA, 201 bp, Homo sapiens
agtgggaggtctgcttgagcccaggagtttgagggcagcctgggcaacatagtgagaccttgtcttacttaaaaaaaaaaaaaaaaaaaaaaaaaaaaaawatatatatatatatatatatatatatatatatatatataaaatacatacgtaaaatacatatataaaatataaaaatctaattatatacatgtatattat

SEQ ID NO: 25037 - DNA, 201 bp, Homo sapiens
tatacatgtatattatatataacatgtataatactatatatttgatatatattatatataataaaggaaaatgctagcaaaatgtttgcagctacaacagkggtgttccatgttctataaggtatgtaaagttttgtatcctttttttcttagtgtagctgcattccacatacttttaaagcaagaaaagtcccatatgta

SEQ ID NO: 25038 - DNA, 201 bp, Homo sapiens
attcatccatggcttttaaaagataacatacaaataattgatatcttccaggtttttgagcattttgctattaagtgattgtcttcataggttgattgccratttcagctgtgaaactgtctttgcgagtatatgtataggtgaaatttttcaatgactccctccccttttcaggaattaagcaactataaattaggaagt

SEQ ID NO: 25039 - DNA, 201 bp, Homo sapiens
tatgtgttttaaaaaataattccatgcctcttgttaccttgaacgttttctttctttatctttccccctcccgcttctcattccccttcccctcccctcattttttttttttagacggagtcttactccatcactcaggctgcagtgcagtggtgtgatattggttcactgcaacctccacctcctgggttcaagtgatct

SEQ ID NO: 25040 - DNA, 201 bp, Homo sapiens
ttaacaatgtaggaccaataccattttctacaaagattttaacatagctaattaactcaacattagcttttggctgaaaatatctacactgttttaaaacwtgcaaaatcaaccaatctaaatctttcctcaccattactaaaggagcatatgtacactatttcttaaagactaaactgtaccttttggtacagatagaga

SEQ ID NO: 25041 - DNA, 201 bp, Homo sapiens
agtaaaatgatgtattaaaatttgaacttatacttttctggaagttaggatttgtacatcttatacttggagatgcctcagtgttgcagaacttccaggaygaagtgaatgccctggctttaaatgctgtctgctgacactcagattaatccatcccgccttatgctgtcccttgaatttttgccgttatgatatcttcac

SEQ ID NO: 25042 - DNA, 201 bp, Homo sapiens
aaaatattaaaacatacctatgttctggctaagtgctgtgttagaaaactacttgctaagaatatgtaacaagttgggaattagaactctcctcctgtttktttgtttttttttttttgatgcagactctcgctctgtcttccatgctggagtgcagtggcacgatcttggctcactgcagcctctccctcccgggttcaa

SEQ ID NO: 25043 - DNA, 201 bp, Homo sapiens
gaacttatacttttctggaagttaggatttgtacatcttatacttggagatgcctcagtgttgcagaacttccaggacgaagtgaatgccctggctttaartgctgtctgctgacactcagattaatccatcccgccttatgctgtcccttgaatttttgccgttatgatatcttcacccccaagtcctccaaaccttttc

SEQ ID NO: 25044 - DNA, 201 bp, Homo sapiens
actgccctccagcttttgtgacagagtgagagcttgtctctaaaaaaaaaaaaaaaaaaaaaaggaaaaaatatagatgaatacttgaggaaaattaagcrttaggcatactatatatctgaaaccgattttattgacagatactgcaaatgaagtaggaaaatgcagtttgctttctgatgagagctgtcctagatatat

SEQ ID NO: 25045 - DNA, 201 bp, Homo sapiens
tttttacatgcttggcgtaagtgaatgtcagggaagagtgccacacctgttgggttgaacacctgtcaggtgaaaggctttgtacatagtttatcactttyaaatctttgcttattacttaccactctcttcactgctgttggattttctgtactttcttggctttggtataaatctttatctttgttaaattattttttt

SEQ ID NO: 25046 - DNA, 201 bp, Homo sapiens
tttgtcaacatttttctttttacatgcttggcgtaagtgaatgtcagggaagagtgccacacctgttgggttgaacacctgtcaggtgaaaggctttgtasatagtttatcactttcaaatctttgcttattacttaccactctcttcactgctgttggattttctgtactttcttggctttggtataaatctttatcttt

SEQ ID NO: 25047 - DNA, 201 bp, Homo sapiens
tcccattgggctcatgaaaattgagacatgtgcatgacttctccccattgaggtcatcaatatattgtataggagagacttagaaaagattttcataaatstgttgggtgcaacagctccttaggaaacttcccagttcaccttcctgatgtttaccatttggaaattgaggcttgatgtaaaataataacatattctgta

SEQ ID NO: 25048 - DNA, 201 bp, Homo sapiens
tttgtcattttttcgatgcgtgtgtttgttgtttgttttttaattttgcaaagcagaagagctattcaggacactatcatgactttcctggactctgggcrctttggccatcatgggccgccctcaccatagtaatatcagtcataaaattatattttatttaactttaaatatttcagtattgtactttttccattttat

SEQ ID NO: 25049 - DNA, 201 bp, Homo sapiens
ggcttatgatatccttcttttttgttgaaaggagggatctagaaactagttgagtggcaaaagtgtttgttatccagagggatttatgttctcagccttgwggctgctgtattaaactgtgctttgtcatcctggaagtttttatgcacagttgtacatcaattgtaagattcaggacaggtgatgctttttttttgttgt

SEQ ID NO: 25050 - DNA, 201 bp, Homo sapiens
tattttgaagaattaatttgtgcactaatataaatgagttttctaaatttaaatgtttgaaataaagacaatttatataattttaggcctcttttttcttytagagatgggatctcactatgaggcccagactgggtttgagtttctgggctcaaatgatcttgctgcctcagcctcccaactagctggaactgcaggcac

SEQ ID NO: 25051 - DNA, 201 bp, Homo sapiens
ccattttgcattgctaacaaattttccttgactgattcgtacttctattttggatgtgtgtatatatttgtgtgtttgtgcaagcttacataaaatttagygttagtgtttctgcatgatttcctttagtttataatgtaggaaaaaaatagttcttacagtctctcaccccaccagtgatttgatttagcaaaaccactg

SEQ ID NO: 25052 - DNA, 201 bp, Homo sapiens
agattcctactgttattattttaaactttttaatgcaaactactacaaagtggaatcaataagtatgcgctaactttttctcactggatactggactcttsccttgaaaataaagcaagtcctctgttcattgaaagagaattatggtatgaaagctgccagttaaaatttcccaaaagaccactgttctacggagttgta

SEQ ID NO: 25053 - DNA, 201 bp, Homo sapiens
cattggcccttcctgtctgtctaacaccaaagcatcatgagataccagtccttgtggtgaacctcacagtctgcgttatgaggattgtagttaaatgttctttcattaaaacagatttgtttgaaggccttactaacatgaatttcttactcatattatttttatgtaaaatatgacttattagacacagctagctgtttt

SEQ ID NO: 25054 - DNA, 201 bp, Homo sapiens
ccagcctggccaacatgtgaaaccctgtctctacgaaaaatacaaaaattagccggatgttgtgttgcacacccgtagtcccacctactggggaggctgasgcaggagaattgcttaaacccaggaggcagagcttgcattgagctgaaatcgtaccacagcactccagcctgggcaacagagtgagactccatatccaaa

SEQ ID NO: 25055 - DNA, 201 bp, Homo sapiens
tgaaccagggaggtggagattgcagtgagccgagattgtgccattgcactccagcctgggcgacagagcgagactccatctcaaaaaaaggatataaagtsgtttgtttaattagtctcctcttctgtatgtttaagggtgttttaaatgatttttttgtaaggcagttataatattttttctgtcaatgtccatgtcaac

SEQ ID NO: 25056 - DNA, 201 bp, Homo sapiens
gaggcaggagaattgcttaaacccaggaggcagagcttgcattgagctgaaatcgtaccacagcactccagcctgggcaacagagtgagactccatatccaaaaaaaaaaaaaaaaaaacaaaaacaaacaaacaaacaaaaaaaccagcaacagggatagtcagcataactaatttaaccagcacatccatttcgtaaaa

SEQ ID NO: 25057 - DNA, 201 bp, Homo sapiens
atatgccagtacttcttctaacttggtgtactgagttaagtggatccaactgaaggtaatattttactttgttcttataggagatgatttagatttcgtckttgaactaaaaagtttgactcccctagtttatcctagctttctcatttcttttcagaacattgaaatgaggttttacagctcataagccaaaggaagtta

SEQ ID NO: 25058 - DNA, 201 bp, Homo sapiens
aggcaggagaattgcttaaacccaggaggcagagcttgcattgagctgaaatcgtaccacagcactccagcctgggcaacagagtgagactccatatccaaaaaaaaaaaaaaaaaaacaaaaacaaacaaacaaacaaaaaaaccagcaacagggatagtcagcataactaatttaaccagcacatccatttcgtaaaag

SEQ ID NO: 25059 - DNA, 201 bp, Homo sapiens
ttgttatatccatgtcacagtgaacaattacgtatctgttatgtaacaaataatagtgataggccagttttttcccctgatgtttgagttaatgctgactrctatcttgtgaagtaggtaatagaaacagcctgaataatctaaatctcttatccaaaaatcacaaaaccataaggctttgaagaaagggcaaatttatta

SEQ ID NO: 25060 - DNA, 201 bp, Homo sapiens
tgtttacaagtttggtgcagtattggagttgaggttttttttgttttgtttttgttttttttttgagacggagtctcgctctgttgcccaggctggagtgyagtggcgcgatcttggctcactgcaagctccgcctcccaggttcacaccattctcctgcctcagcctcccaagtagggagttgaagttttaaattattct

SEQ ID NO: 25061 - DNA, 201 bp, Homo sapiens
cctcccaaagtgtcatggttataggcatgagccactgtgcctagcttcttagcaaatttcaagtataaaatatgtttattagactcacctaatgctatacrttaggtctccagagttcattcatcttacaattgaaagtttttaccctatggccaatatttttcctttttccacacccaactccctgtggtaactgccatc

SEQ ID NO: 25062 - DNA, 201 bp, Homo sapiens
ttcatgctgaagaactggagttataacttaagtcagtctccccaaaggcttgaagcttagggtttttatgtacaatttggtgggcagagggctggggaatkggtgctactgattgggtggggatgaaatcataggggtgtgggaaccattcctcatgcctctgggtgggaccacaggatctgttgagttatgagtaagggg

SEQ ID NO: 25063 - DNA, 201 bp, Homo sapiens
ataggcacgtgccaccatgccaggctaatttctgtatttttagtagaggtggggtttcaccatattggccaggctggtctggaacccctgacctcgtgatccgcctgcctcgccatcccaaagtgttgggattacaggtgtgagcaccgtgccaggcccagaatttcttttttttaaaaatttttaaaatttttttgtgat

SEQ ID NO: 25064 - DNA, 201 bp, Homo sapiens
gcgttagataactttcatggaaagtcattacataagtttcaaggcagattttatagtctaatcaaaaatcaaactgtgctagattctagagaaaaagaacttttttttttttttttgcactttgtgcagtctattctaccaaattaaattagaaaatattggggcaaaaaattattacaaagatgtcaaaatacttggtct

SEQ ID NO: 25065 - DNA, 201 bp, Homo sapiens
ctgcaacctctacctcccaggttcaagtgattctcctacctcagcctcctgaggagctgggattacaggcatgtgccaccacgcctggctatttttttttgtttgtttttttcagcagatacagggcttctccatgttggtcaggctggtctcgaactcccgacctcaggtgatccacctgcctcggcctcccaaagtgct

SEQ ID NO: 25066 - DNA, 201 bp, Homo sapiens
tgggcaacatagcaagactctgtccctaaaaatattttttttaattagcagggcatggtggtatgcacctgtagtcccagacactcaggaggctggtgtgsgaggatgtcttgagcccaggagttcaaggctgaagtgagctatgattatactactgcactccagcctgggcaacagagtaagacccctgtctctgggcag

SEQ ID NO: 25067 - DNA, 201 bp, Homo sapiens
cttatgcagtgttgtgggtctgcagtttagcaaggaagagacttgacaatgcacattgatgtgcatgtctagcttctgttctaaagaattttaaattgccaaaaaaaaaaaggttttaattaagtgcaaagcttattcttggttgttgaccttagccttctcctcatcttcccttgcttttcaaatgagcttccaggttat

SEQ ID NO: 25068 - DNA, 201 bp, Homo sapiens
atacagggcttctccatgttggtcaggctggtctcgaactcccgacctcaggtgatccacctgcctcggcctcccaaagtgctgggattacaggcatgagrtgcgcccagccttagaatttcttttttagtatgattatcccctagcttatttgaattactattttaataaacacgttctggaaatcttaattattaataa

SEQ ID NO: 25069 - DNA, 201 bp, Homo sapiens
agagttaatgattttaccattgggctactggtatgtatttatgatacatagctctattattcctacaagatatacttcgtaattgcacagatgttgttgarctccaatttcaagccataaaagtgttttggggctgctttctttttatatatctttgtaattcactagcaagccctaagaaaggtgatactaaaagctgaa

SEQ ID NO: 25070 - DNA, 201 bp, Homo sapiens
aacttttaaccgttttgtattttaaaaccagtttcatctcattttagcattgagggatgcaagttaactttccctcccagctattctaagggaccactatrtatttcagcaacttgcattcttccctggaattggaaatgtacctttaaaacagttgttttcactcaagaaaatttttttcagggctcatttagaatatgg

SEQ ID NO: 25071 - DNA, 201 bp, Homo sapiens
ctctctatttccatgatttcagttgttttaatttttagctcccacaaatgagtgagaacatgcaatgtttgtctttctgtgcctggcttgtttcacttaasatgatgatcttcagtttgattctttttttttttttttctgagacagtttctcactgtcacccaggctggagtgcagtggcactatctcacctcactgcaa

SEQ ID NO: 25072 - DNA, 201 bp, Homo sapiens
taaggatagcctaggtagtacattcttaatgtttgctatagttttatatcttgaataagttagttcaggaaaagatttgctgacaatagatgataaattcrtagcttgtgatgcaacatcattttaaaaagcaagtttaaaaattaaagttattagaaaaagatgcaaaatggtttctccacattcaccctagttggtttc

SEQ ID NO: 25073 - DNA, 201 bp, Homo sapiens
ctagggtactcaacctatcatcacatttaattaaaatgtcattttgagccatggccgactcattcgttaatttgttatttaaaacagcttgagaagtattyattttaaatacagaatttgtgttaatgaattggaaaagaatattgtattgcttggcagagatgttatagcctaatgatttgtggcttagaacaaggaaaa

SEQ ID NO: 25074 - DNA, 201 bp, Homo sapiens
gacaccaaacatgttttcttcctgagccaaatattttcttactgaaatatgtatctccacagagtggaaatacataacatgcaaatataaccttttggtcrtgttagaaagttcatattctcactttgtaacaagacattcaaatatcaaagaatataataaattcatttgtgtcttttgttaattttgcttgtgaattgc

SEQ ID NO: 25075 - DNA, 201 bp, Homo sapiens
ttgcagtgagccaagatcgtgccactgtactccagtctgggcaacagaacaagactccgtctcaaaacaaacaaacaaacaaacaaacaaacaaaacaaamctgagaagcagaaaggtgacagtgatgtgttaattactaaaatcatgtggctttggggaaggacacagatccaatgagaataaatggttatcaggtgatt

SEQ ID NO: 25076 - DNA, 201 bp, Homo sapiens
aggaaatgtacttaatttttatttagaaagttaagcaaaaatatcaaccagtattaaaaatgttttaaatatgtgttagacatttagacatctttaaaatsttttaaatatatgtagacatttatatttaaaacatttaaaaatacatgtctatgtttagttatgtttatgcctgcatgatttaaagaaagaaatgatctg

SEQ ID NO: 25077 - DNA, 201 bp, Homo sapiens
aagtgctatttgtacagcaagcctcgttagcattaatttctagaatgaacttgagaatgcacattagttcaggctactgaccagatccgttagccttttgyggcagtagttctacctggtggaccacacgtatgctatagttttattctaaggttttcaccaccagtgtaagctgccacattggaaagcagtgatgcaggt

SEQ ID NO: 25078 - DNA, 201 bp, Homo sapiens
atctaagtcaaaaagagcaaaatctaagccagtggacatgctgaggctatctcagggtcttctggaatgatcaaggccagaaatcccatcttcatatacattttttttttttttttttggagtcgaggtcttgctatgttgcccaggctagagtgcggtggctattcacaggtgcgaacatagctcactgcatccttgagc

SEQ ID NO: 25079 - DNA, 201 bp, Homo sapiens
tatggtgcaaagaataaaattatctcctaactcctgtcaaccttccattatggatagctagtatttagtggtaaccagcttttataatagcatccttaackgtcataattgctcttaaatggataaatggcgtaaaaatttaaaaactgtctagtagaattttagctaaatttgacattagaatttgagttgctgtttctc

SEQ ID NO: 25080 - DNA, 201 bp, Homo sapiens
cctgggaggtagaggttacagtgagccgagatcatatcactgcactccagtctgggtgacagagtgaaactgtgtctccaaaaaataaaataaaataaatyaaaataaaataaaaataaaataaaataaaataaaaatagtgttggctgggtgtgatggctcatgcctgtaattccagcactttggaaggccaaggcgaga

SEQ ID NO: 25081 - DNA, 201 bp, Homo sapiens
ctaactcctgtcaaccttccattatggatagctagtatttagtggtaaccagcttttataatagcatccttaactgtcataattgctcttaaatggataartggcgtaaaaatttaaaaactgtctagtagaattttagctaaatttgacattagaatttgagttgctgtttctcttgtgggtattctgtctgtggaacct

SEQ ID NO: 25082 - DNA, 201 bp, Homo sapiens
accagtatctcagctcagcagtcagacaggactcctcttcctcagcctttttgttctattcaggtctccaaatgattggatgatgctcacccacattaggkaggacactgggcttttctcaatttcctgatttaaatgttaatctctttcaaaaacaccctggcagacacacccagaataatgttgggccaaatgtctgga

SEQ ID NO: 25083 - DNA, 201 bp, Homo sapiens
tacagtgagccgagatcatatcactgcactccagtctgggtgacagagtgaaactgtgtctccaaaaaataaaataaaataaattaaaataaaataaaaawaaaataaaataaaataaaaatagtgttggctgggtgtgatggctcatgcctgtaattccagcactttggaaggccaaggcgagaggatcatttgaggcca

SEQ ID NO: 25084 - DNA, 201 bp, Homo sapiens
ggcaagaggattgcttgaagcccagcgtctgagaccagcctaggcaacaaagtgagaccccgtctctacaaaaataaaaataaattagccaggcgtggtgrcatgcatctacagtcccagctactcgggaggccagggcaggaggatcacttgaacctaggaatttgaggctgcagtgagctatgattgcaccactgcact

SEQ ID NO: 25085 - DNA, 201 bp, Homo sapiens
gcagtgcagacgcccttcgtgcaaaacaagcggtgccagtgttcctggcatggtggtatctgcttgagtggtcatctgggataaatatgtataggaatgcrgcagatgatggcaggtaaggtgctgggactagttattagattcagtgatttttagtaagcatcaatatgtaaatcttcctgtgtgaatcattgatgacag

SEQ ID NO: 25086 - DNA, 201 bp, Homo sapiens
tgttacttaggaaatgggcttttactctcaggaaaacacatatgctttcagcatcgccacataggtgcagaaacaagcaaggaatgaaattgaaatcaatmaagacaggtttgattctttatacttaacatagatataggagtgtgggaatgcaattctgctgatgccacttccttcattaaatagcttggtctcctaagt

SEQ ID NO: 25087 - DNA, 201 bp, Homo sapiens
gtagggaatggtgaaacatgcaatttagtatattttcatctgaatatgtacgtaagagtgatgtagaagttcagaaacacacaactatgtttcttcttcaratcatttgaaagcagagttttaaggattttaaaatatacgtacaccatatagaagtgtataaaatttaaaatgatgtccttttttttccttctcctcaat

SEQ ID NO: 25088 - DNA, 201 bp, Homo sapiens
ctctgggaaatggaaatttcatggactgtgttaaatactacatttgatcagtactagcttgagataagaatagtaggaatctggttgaggggatggcgctyatatacagtgattacatcacaggcgctgaataattcttcatagaatcctaaataatttgatgttgagctttgttcagtagagcatagtttatattataag

SEQ ID NO: 25089 - DNA, 201 bp, Homo sapiens
ctatatattattatattattatatcttatctaatattgtcttttctaaaaagtatttgcatttttttcatgaatgtttttattctggcagaatataatgaycatgaattaaaattgtattacacatttcctgattttatttctttggaaggttgctatagatttatcattttgtattgtgaagcccctctctcctacagat

SEQ ID NO: 25090 - DNA, 201 bp, Homo sapiens
atctcagctcactgcaacctctacctcccaggttcaagtgattctcctacctcagcctcctgaggagctgggattacaggcatgtgccaccacgcctggcwatttttttttgtttgtttttttcagcagatacagggcttctccatgttggtcaggctggtctcgaactcccgacctcaggtgatccacctgcctcggcct

SEQ ID NO: 25091 - DNA, 201 bp, Homo sapiens
cctagaagcatgattcaatgaaagttgagtcctttgcattctagattactctgtggcattcctgaaactctgttctctttgtttttgtggcactgttttcyccttcctttgaaactatcctttttttttagagacagaatcttgctctgtcacccaagctggagtcagtggtgcaattatagctcactgcaacctcaaatt

SEQ ID NO: 25092 - DNA, 201 bp, Homo sapiens
tctgaattagacagtatggtttatatttcttgttttgtaaacatttgtgttcctgttttctgtggtgagagatggaggcaggattctagtctcaagtgttytagttacaagtcctgtactttttttgtggtaggatcacttaagtttttggattttttttttcttttttttttaggcataaggactcactctgttgcccag

SEQ ID NO: 25093 - DNA, 201 bp, Homo sapiens
  misc_feature (1)...(201): n = A,T,C or G, or insertion/deletion polymorphism (see Tables 1-2)
atcatttgtcaatcctttgattaaactctgcagtttggagataactcctcattgttctcttggcattttgtacagatgactcatctaagaggaggaggttntatatgtatatatacacacacagaacagaagtcttcattgtggacaatcttttcaaggatgtttgtagagcaagataggtataagatctcctctgacagc

SEQ ID NO: 25094 - DNA, 201 bp, Homo sapiens
actgtatgtagcttcatgaaataatattctccatgctctttggtgcctgataatggccactgtgggaacaatgtgtgaattatcagtgactgttttatcaytgtagtttggggcatttcatttatgtggctgtttcacagtgcaacataggtgtttcaagtggtgatacatcttggtggcatttcagtagtccttaaatta

SEQ ID NO: 25095 - DNA, 201 bp, Homo sapiens
gactggccttatgtgttaaaatttaaatggtgttttaaaccccaaatatctctttttatcttgtttttattgagaaaaagaagttacatttgaagcatatrtgttgtcttgcagccaccagtgggagaatatgcaaatcttattttcttgttctcattttggtatgctaaggtttagattttcagatcttggcaggcattg

SEQ ID NO: 25096 - DNA, 201 bp, Homo sapiens
acctataactcttgcttatctgttgttcctattgatggcatacacgtttctactgtgagtctctggaataacatgattgaaaatataaaatttttctccartgttggacttcctgtcctaatatagatggcttggtaaattcccaatgtgtgcacctatgaattatgttgaaaaaagttcacaataaaatcaccattgtca

SEQ ID NO: 25097 - DNA, 201 bp, Homo sapiens
cgttgtagtgttgtacttgtatcttttctaaagcaatttgtagctttaatatagccacaccataaaaaatattagaagaaaggttaatttctttatgttgrtttatgaatttgattaacatactttccgtcaatttttaccttttgactcctctggactcaacaaaatttctaacacataaccatccacatttgactggcc

SEQ ID NO: 25098 - DNA, 201 bp, Homo sapiens
ttatgtgaaattttacgggatgaagcctgtaaaatctggaactataccactgcctgttccttttgacaagctgtgttagcaggaatcaagaactgagaaayatgactttgaagcttttggtaatggttatggtttataatcgttgtaactgttttgagtaggaagctgttttcagacatgcatttccaatgtcatgtatat

SEQ ID NO: 25099 - DNA, 201 bp, Homo sapiens
agctggtagcagtgtttgatgagcaggatccacatcacggaggtgatggcaccagtgccagttccacgggtacccagagcccagagatatttggtagtgascttggcaccaacaatgtctcagcctttcagccttaccaagcaacaagtgaaattgaggtcacaccttcagtccttcgagcaagtaagtgaaagctctttc

SEQ ID NO: 25100 - DNA, 201 bp, Homo sapiens
tatgtaatatttgtctccctctccatctgtttgtttttaaaatcaattctgcgttttcctatttgcttagtcttccaaattgccacttggatttcctcacytgcaagtttaaaagcatgcaaaacactccctactgtattttgatttaagttaaatcaaatttattatcttgatattctgggttctctgcattcttttttt

SEQ ID NO: 25101 - DNA, 201 bp, Homo sapiens
tggagcagtagtattagagaagactgttggcacactttcacaaagtaggtaagggattccttttctacatgtttagactttactttggccaggtgcggtgsctcacgcctgtaatcccagcacgttgggagactgaagtgggaggattgcttgaggccaggagttgagaccagcctgggcaacacagtgagaccctgtctc

SEQ ID NO: 25102 - DNA, 201 bp, Homo sapiens
cctcctctgatccttctactccctgtctaatatgttgggatgaatattatggcctcacgtactattacttgcctctggttctaaagatcatggcaaagaartgagtcgtttggagttcctaatcaaggttctagtctgcatattgaactctgattgacttggaaacccctttgcccaaacaaaagatgaaatgttccatcc

SEQ ID NO: 25103 - DNA, 201 bp, Homo sapiens
tgtttaataatagccaatttagaagcaaaagactaaaatcagattaaattttggatcatagtgaaataaccaggtctcctattaacctctctgcttgcagttttttttttttttttttggatggttgatccttttccccacttgcatctcatgctttaagccaagagccaaaccattctggtcctctcttgcctcctgcaa

SEQ ID NO: 25104 - DNA, 201 bp, Homo sapiens
tcctttttccacacccaactccctgtggtaactgccatcgtactctgttagcatgagttcatttttttttttttccaagattccacttataagtaaaatcrtacagattttgtctttctgtgtttggcttatttcttttagcataatgccctttaggttcatccatgttgtcacaaatgtcagaatgtccttttttattaa

SEQ ID NO: 25105 - DNA, 201 bp, Homo sapiens
atgttctgcccttgtaaacatgcctttaaattattaagttctaagctggcaggtaaaatggaattacttttcatcttaaagatgagatgtggccttttggrggatgtgtgtggatggggacattgcgggtagacgaagaatcaggtagacttcttgtacaaaattcctggatcatttgtttattgtgggaaggagcactgc

SEQ ID NO: 25106 - DNA, 201 bp, Homo sapiens
ctcttgttgcccaggctggagtgcgacggcacgatttcagctcactgcaacctccgcctcccaggttcaagcgattctcctgcctcagcctcccgagtagytgggattacaggcatgcaccaccacacctggctaattttgtaattttagtagagatggggtttcaccatgttggtcaggctggtctcaaactcctgacct

SEQ ID NO: 25107 - DNA, 201 bp, Homo sapiens
gaaaagagccataggaaaattatcgcacaaggaccgaggttgtaagttattatccagattctaatttgttaacatttcacagagctacaagctgtaaaaayaagacatattaaatgagggagggcttcacatactacatttgtaacaattgtagttcacacttaaggaattcaagtaaattatgtgttagtgaaaagcagt

SEQ ID NO: 25108 - DNA, 201 bp, Homo sapiens
atttttgtaaattaaaaaacattaattttgattttttttttttgagacattcttgctctgtcgcccaggctggagtgcactggcgcgatctcagcccactsagcaacctctgcctcctgggttcagtcagttttccctcagcctcccaagtagctgcgattacaggcatgagccaccacactcacctaatttcgtagagat

SEQ ID NO: 25109 - DNA, 201 bp, Homo sapiens
tttttgtaaattaaaaaacattaattttgattttttttttttgagacattcttgctctgtcgcccaggctggagtgcactggcgcgatctcagcccactcagcaacctctgcctcctgggttcagtcagttttccctcagcctcccaagtagctgcgattacaggcatgagccaccacactcacctaatttcgtagagatg

SEQ ID NO: 25110 - DNA, 201 bp, Homo sapiens
ttttaaattttttactttttgtaaagacacggtctcactttattgcccagggtattttcaaactcttggcctcaagtgatcctcctgcctggcctcccagwctactaggattgcaggcgtgcaccactgtgcccagccatgatttaagtattctctacataagactgtcagaaaagataattatgattaccagattaaaca

SEQ ID NO: 25111 - DNA, 201 bp, Homo sapiens
tcttctcttcccaaaataattcttttttttttttttaattttgtagagatggggactcactttgttgccctggctggtctcaaactcctggcttcgagtgwttctcccacctcggcctcccaaagtgctgggattacaggcatggaacacaatgcctggcaccaaaataattcttaaggatttttactgctaatgaaaaac

SEQ ID NO: 25112 - DNA, 201 bp, Homo sapiens
taggaaaacatcccaagttgagcttttctattcctagaatttcagatttctttcctttttaaaaattttatctccttttatagtagtaaaaatattttccttttttttttggaatggaggtcttaagctcagtgtcaaaaataaaatcattttcttaattgagaaagtgatgacatctgtttaatttatctcaggatatct

SEQ ID NO: 25113 - DNA, 201 bp, Homo sapiens
aaaaaaaaattcacctgggcagtaaaataaattctgagggttttatttttcacctggcaaaaatggtttctaatgatgggcaggtggattttttttttttwaacttggttttggagcaggtgtgatgattttagtaattgagaggtaaaaccatttgtttcatacattcaacaaatatttactggagtgcctactacatcc

SEQ ID NO: 25114 - DNA, 201 bp, Homo sapiens
tttttcctcttaggttttggatttcctagggaaatagctctggaccactgctatttcctatgtgtttttcttggttaaggttttcactaccattaggcatratgatgcctgatctcactagcccagttctctctttataagccccagatttctccagcaccaccagctgggaatgcacatttcctgtgcctatcagtcacc

SEQ ID NO: 25115 - DNA, 201 bp, Homo sapiens
aaaaaaaattcacctgggcagtaaaataaattctgagggttttatttttcacctggcaaaaatggtttctaatgatgggcaggtggatttttttttttttwacttggttttggagcaggtgtgatgattttagtaattgagaggtaaaaccatttgtttcatacattcaacaaatatttactggagtgcctactacatcct

SEQ ID NO: 25116 - DNA, 201 bp, Homo sapiens
cctcattcttactcttaaaccccttaaaatgggcttcagcccctctctactgaagaaaattcttttcaggtgacaaaattgccaaatctggaggccatcasgaaaatgtgtccacatttgacttataggacacccttcttccttggtcactagtgctctcctgtgtcttcactgctgatccccaccttttggggagttcat

SEQ ID NO: 25117 - DNA, 201 bp, Homo sapiens
aaaaattgtggccagtgatggaggtagccgtagggacagagacatatagatgtatttctcaggtagactctaggggacttgcttatttgatttgatgttaaaaaaaaaaaaaaaaaaaaagaaaggagaaagaacaataagaaagaattgccacagttttagcctggtcagctgggtggatagtcacacaccggctagtaa

SEQ ID NO: 25118 - DNA, 201 bp, Homo sapiens
ggtgagatgacatcacagtgtggttttgatttgcgtttttcttatgaataatgatgttgaacatattttcatatgtttcttggccatttgtatgtcttctyttgagaactctctatttagatcattttctcatttttaaattggattatttggtttttgtctgttgcgtttcttatatatcgtatattttactcccttggt

SEQ ID NO: 25119 - DNA, 201 bp, Homo sapiens
ttagcatggtctacctgatgtcctgtctaaagcacaagccaagccccaccacagacacgtcctctcaagcgcatggtccctcttgaatgctttttatacayagatccatatctcacattgccctgttcatccctgtgtttttctatttctgattctgccctcttaagtgtaactctaggagagcagagaccccatctgtcc

SEQ ID NO: 25120 - DNA, 201 bp, Homo sapiens
agttgtcgcttcacttttttcattgcttctgttgctgtgcagaagcttttagtctgatataattttatttgtctatttttgcttttgttgcatgagttctyagccataaaatctttgcccagaccaatgtcgggaagcctttttcctgtgtttgtttgtagtagtttcagagttttggccttacatttaagtctttaatcc

SEQ ID NO: 25121 - DNA, 201 bp, Homo sapiens
tgtatcatgtcatttatatctgcttgcgttgcccgggaattctttgctcccattgggctcatgaaaattgagacatgtgcatgacttctccccattgaggycatcaatatattgtataggagagacttagaaaagattttcataaatgtgttgggtgcaacagctccttaggaaacttcccagttcaccttcctgatgttt

SEQ ID NO: 25122 - DNA, 201 bp, Homo sapiens
aatggtgaaatttctggaaatggtgttgctataaaaatttggggaaacaaagtatctgatttatttcatttctttttttgctgccttttaaatcttttgtyatttttaactttttattagctatgttaattttagttaatttttatccattacttgggaaatttgtctgaaatgatggtatttaattaactgataagattt

SEQ ID NO: 25123 - DNA, 201 bp, Homo sapiens
taccaggtttcctaaactgtttaggtgtgtgctgtgacgctgcagagcagagatgttactgtgaccttttcaagctcccctttctgtctgtcatatccagktccagtcatctttaccaaatagatagggtcataaaattgcaattgactggagtccttggaagaaacattttgtgagttttatcagtcccccaaatatctc

SEQ ID NO: 25124 - DNA, 201 bp, Homo sapiens
tccaactgtgggacttaccgaacacagagggttactatgagttcccaatgagatgactaaagggaaggcctgaacaattccgggcccacggtacacctgcraaaaggttttcggcagctgaataggcgcaggagtgctgcccagagaggtgagaggagagccgggtgggccaggcgaggatgggagcagagagtgtcctga

SEQ ID NO: 25125 - DNA, 201 bp, Homo sapiens
aaaggttttcggcagctgaataggcgcaggagtgctgcccagagaggtgagaggagagccgggtgggccaggcgaggatgggagcagagagtgtcctgagygtggtcaaagctagcaaatgcttaagagagcggttttgtttttggtttcctttcttggacttatcgtgctgtgatttggaatacagaggagcaatgtgac

SEQ ID NO: 25126 - DNA, 201 bp, Homo sapiens
agcttcaaaataaataaataaatacataaatgggagatctgtgctgatgccagggtgggtggtatccacaaagcctgctctgatctgatgttaggtgaaaraaaagcacctaaatgtttctcacaaagctttggttcttaattctaatatgagacaacagaatggcgtgggagttgacttagccctaaacattctagatct

SEQ ID NO: 25127 - DNA, 201 bp, Homo sapiens
aggagtgctgcccagagaggtgagaggagagccgggtgggccaggcgaggatgggagcagagagtgtcctgagtgtggtcaaagctagcaaatgcttaagrgagcggttttgtttttggtttcctttcttggacttatcgtgctgtgatttggaatacagaggagcaatgtgactctgtaaactgaggtagcagattcagc

SEQ ID NO: 25128 - DNA, 201 bp, Homo sapiens
cagccctgcaggaagggaagatattggggatggcactgcttttgggagccccttaaatcaggccatttgaagtggccagtccgtctcccaaaggtggcccygctcccattcctagccctttcctcacattcaatagctctcccgctgctatcccagatgtaatgcgtgggtaccaagaggtgggattgggtaggctttatt

SEQ ID NO: 25129 - DNA, 201 bp, Homo sapiens
ccctcattgtgcctgctctgcaacattgtctagggaagggagggataatggaggtgacattctaccattatctgtgggagcattttacctgcttcatttgrgggggatgggttaaagagaagtttagaatgtcaagtaaaagtgaagaaaggtttttggtaataactctttaaaagagtgatcctattgtttttcttcctt

SEQ ID NO: 25130 - DNA, 201 bp, Homo sapiens
cctcattgtccatggatctgggccatatatagcaacctatgtgttcagaattaccttacccctgtgaaatcatgagtagttaatttctggtgtttcctacrcccagaaaattctatgattggccattcttttcttgtttcttttaattttgctctgtgtctcccaggcttcaaacttactctcttattatcttctctctaa

SEQ ID NO: 25131 - DNA, 201 bp, Homo sapiens
ctgagaactttgtattataatcataaacagatccagttcagtaatactttcataaacttctggctgagactttggtattaatgtcctgaactcttagaaaragaaacatatttttgtaggttggccaagaaaaataggtcttgattcaaataaaataatgtatttgttatttttaaaaggtttttccattgagcaatctgt

SEQ ID NO: 25132 - DNA, 201 bp, Homo sapiens
tctcagtgagtctccatctcaaaacaaaacaaaacaaacaaacaaacaaaaactgagctcatactgatgtcctggattccattctgagcaccagtttattytagctttttcttctctgtaacttctgtttctgactgtgaaaacatctgcttttattatcaaacatatttgcactcttttgttcattcttggtgtgtgtgt

SEQ ID NO: 25133 - DNA, 201 bp, Homo sapiens
cctggcaattctgcttggtagaaggctgacatgggtcagaatgccataaaatcagtgtgttaaccgtgctcctttctcgaggctctaggggagaatctatrtccttgccttctaaatgctgctcactttccttggctcatgactccctttgtttgtcttcaaggtgggcagtgtagtatttctctggccatcatcacgttt

SEQ ID NO: 25134 - DNA, 201 bp, Homo sapiens
cagaaaaaggatcatgtgaacagatatcacctagggtagctgtcatttggaatttgtgtaattattagaatttgtacaaaacacagaatatcccttttttwaaatccattcattctacatttgcactcttttccctcccactatcccaggaagttacttaattattcagtggctcttctagctgttatgcattaagaattc

SEQ ID NO: 25135 - DNA, 201 bp, Homo sapiens
agggccaaaatatgatgcctttttaaaagaattataagtctttatttcataggaaaacaattgcatatattgacattgagtgtccaatgacacccatcatrattgactttccctggatatgtctagcttatacatgaagaaagcaatggaaagtgagagattgctcacagggtgtcacattaaaatggcttctcagggtgt

SEQ ID NO: 25136 - DNA, 201 bp, Homo sapiens
tattattttttgtagagatagggtttcacagtgttgcccaggctggtcccaaacttccggactcaagccatctgcccacctcggcctcccaaaatgctggrattataggtgtgagctgctgcacccaagctattttattttcatttttctcttaaaaatatttgtagtggtggctctgtgttaaattttttcatttttttt

SEQ ID NO: 25137 - DNA, 201 bp, Homo sapiens
ttagagtgggcggcccacatgcgcagtgccctccttatacttgggaggtgagcatgcacagtgtgtttagaaagttgtatgcatgcccatcggaggctttyttcccttttctggtggagtgccccaggaaggtcgtatactgccattttgtctcttaatgcccctgcctgggctcactcactcagtgcctgagattttatt

SEQ ID NO: 25138 - DNA, 201 bp, Homo sapiens
aggcttttttcccttttctggtggagtgccccaggaaggtcgtatactgccattttgtctcttaatgcccctgcctgggctcactcactcagtgcctgagattttattggagcccccttttttgcttctccctggtgcctgcattcatttaacactttaatgtttaacacttgtggactgttaggagcttctctctccttg

SEQ ID NO: 25139 - DNA, 201 bp, Homo sapiens
ctcctgcctcagcctccccagtagctgggactacaggcacccgcccctatgccctatgcccggccaattcttttcttttctttttttttttttttttttgkatttttagtagacacgtggtttcaccatgttagccaggatggtctcgatctcctgacttcgtgatccgcccatctcggcctcccaaagtgctgggatcac

SEQ ID NO: 25140 - DNA, 201 bp, Homo sapiens
cccacctcagcctcctgagcagtttcaaaaatatataggaagtactttcaaggctctgacttcatgcagtactagagagaataaatacatgggacactgamaacataaaagcaaaattggagtctccataactatgaatttcaaaagtttgtctagttgataataaagtgaaaacataaagttgcctaaaggttggtagct

SEQ ID NO: 25141 - DNA, 201 bp, Homo sapiens
tgccattttgtctcttaatgcccctgcctgggctcactcactcagtgcctgagattttattggagcccccttttttgcttctccctggtgcctgcattcawttaacactttaatgtttaacacttgtggactgttaggagcttctctctccttggtgcaagctgccaatttatcacttttagagaggcaatgtgataattg

SEQ ID NO: 25142 - DNA, 201 bp, Homo sapiens
caagtgtttataacagtacctggcacatggctgaatgagtgcaactctgcctgcttttgattgaagtcatattttgtgacagtttctgttgaagactgggyaccaagctagaccacttcatgtgcattttggagataaaagttttatctagcattgcagctgcaaagcccctcctctctctcttcactttgttggtttcct

SEQ ID NO: 25143 - DNA, 201 bp, Homo sapiens
cgcactgggtaagtatttagcgtttcaaaggatttttattctttctttttaaaaaacacgaaaggccaggtgcagtggcttgcacctgtaggcccagcccytcggtaggatgaggtgggaggatcgcttgagcccaggagttagaggctgcagtgtgtgatgattacacccatgaacagccaatgtacacgagtcagggca

SEQ ID NO: 25144 - DNA, 201 bp, Homo sapiens
aacctagtagatttgtagaatgaatggtccatgaacttctgttgcacatgggaaagaagcaaatagcttagtggtggagatcatgtactctagagggagawtgcctgggttcaaatcttggctctagccatttagctatgtcatactgggtaagtaacttatctttctgggccttacttttccagtttaccacctaagaat

SEQ ID NO: 25145 - DNA, 201 bp, Homo sapiens
gcgtatttgactcgagctttctagcggcaaatcaaggtcagtgaggattgttgttgtttttggtaggcaggttttttagcactcctcagtttatatatatstgagaggctatctcttgttacataaaattttggtgttaaagctcactgtttttcagacttctgtcatcctaggacagtcttattgttagttggggaaggt

SEQ ID NO: 25146 - DNA, 201 bp, Homo sapiens
cgtagaaactctacacctttgaaataatggctgtccatttcccctcctagccactagttacttttttctatgttctatctttatgaatttgtctattctasatacctcatggaagtggaaacatagaattttttgtgcttttgtgtcagacttatttcacttagcataatgttttcaaggtccatccatgttgtatatagc

SEQ ID NO: 25147 - DNA, 201 bp, Homo sapiens
atagttatctttggaatacataatttgcctgaggcctgttagttccataagtgttgaatcagaactttgaacttaacaaaacaatgaaaaataccattagraaaaaataattctaataaacaaaattataaattccacttttgatacttgagacactcaatccttaagaatggaatgacaaaatgtgatacaagggtttct

SEQ ID NO: 25148 - DNA, 201 bp, Homo sapiens
tagtaaagataggacttaattttcatcctttgatctagatgttataaagtatgtaacagctaatcttgtcatagtggctatatttcacctacaagaaatayatataaagtaaaatatgatgaggtagaatgatttttttagtggtttctgaaaagcttattagaaaccctacatgtaaagagcttcacattaaatgaaaaa

SEQ ID NO: 25149 - DNA, 201 bp, Homo sapiens
agaataatttacattgtatttgttcagtaaaaataggagttttcatgctgttccaattttgttaatttatttttaaactttcagttgtgaatgaatgaatraactgacaaaatgatttttgttcaatgtatcaggatatgttctagtttctaactatactattgaaggaagaataccttttatcttgatgtctttttctac

SEQ ID NO: 25150 - DNA, 201 bp, Homo sapiens
gactgcttaaaatgaaaattgtgaataatttacattgaaaattggtatccatttcaaaaaaacagaattattttgacttgggaagagttttttttttttttagcatacttatgtcactttcactctctgatgattaattcgtttctcaagctattttccttttacacagaacatagtttttaaattttaaataattacttt

SEQ ID NO: 25151 - DNA, 201 bp, Homo sapiens
aaaatacaaagattcgctggacgtggtggtgtgcgcttgtaatcctagctacttgggaggctgaggcaggagaatcgcttgaatctgggaggcggaaggtcgtagtgagccaagatcatgccactgcactccagcctgggagacagagtaagactccatctcaaaaaaaaaaaaaaaaaaagaaaagaaaagaaaagaaaa

SEQ ID NO: 25152 - DNA, 201 bp, Homo sapiens
gccttaggtcaccacattagttggagaaatgtagcattaaattaccgtctcttataataaattaccatcaaataatgaatttgtgccaagtacaagagcaytgaatttcccaacaatagatttataaataacaattggaggaaagtttagaagtaggcagtattttgaaaatttggcagttgctttttatattgcttgttt

SEQ ID NO: 25153 - DNA, 201 bp, Homo sapiens
gcacaggcacaacttctagaaacctttccagcagtgttaggattgcccaggaatgctcctgcactgccctctcttgcactactcatcctcaaagagttacrtgttagagatgcttggggattttcaagcattattcggttgtcagatctagtatcccgaagtgaccttaagggggatgatggcaaggcccacatgtcagaa

SEQ ID NO: 25154 - DNA, 201 bp, Homo sapiens
tggtgctgaatcctggctcattttacttttcaaaacttgaaatatagttaatgttgttttgaccctttgcatattaataataataatcattaccttatacmtatgaatgaatctaatactgagagtattatcagtttacatacttttagtgcaaagaaatcccatatggtcatcggtagaaaactttcaagtatattagga

SEQ ID NO: 25155 - DNA, 201 bp, Homo sapiens
attaaaatttgcaggtgttttttaaaaatcagttcaaattgatttaaagttcttcctgtagtgtctctcttacttactgccttagtccatttgggctgccrtaacaaactaccgtagactaactggtttataaacaacaggaatttatttctcacagacagattgactgtgtgttgaaggcccactttctggtttgtagaa

SEQ ID NO: 25156 - DNA, 201 bp, Homo sapiens
acatgaacatgtttgttaaataatagtcaaataacatcactgtatatatttatattcacgttccattatctcataagaaatgcctacttaataagcttaamattaagggaataatttgatatttgtactctatattttgctccttttatatgttgtgtggattatgttttatgtaatgtatgttacaaatcaaatttgcat

SEQ ID NO: 25157 - DNA, 201 bp, Homo sapiens; identical to SEQ ID NO: 2928

SEQ ID NO: 25158 - DNA, 201 bp, Homo sapiens
ttcaggggctgtataccctccactctagctttttttggcccataatgtcctcccactatgacgttcccaaagaatctcccaaatgtggtcccatccatccctttgttgtatttacattttagtatattctgacctggttcattaatttaattgaaaatttttaactactgtgtgttacatatcgcgttcccttttctccat

SEQ ID NO: 25159 - DNA, 201 bp, Homo sapiens
tcacaaactcatcacggtgaggtgaggttatagggaataactagccagatactggccgggtgcggtggctcatacctgtaatcccagcacgttgggaggcygaggcgggtggatcacgaggtcaggagatggagaccatcctggctaacatggtgaaaccctgtctctgctcaaaatacaaaaaatttagcctggcgtggt

SEQ ID NO: 25160 - DNA, 201 bp, Homo sapiens
tgtgtaccagaaagagcaatgatttaggaatggagactgaaaataagagcctgtctttatagctcattacaaagacttcttactctggagcctgtgaaccrtctgaagctgacaattttttcgtattggtgcctctttttttgggagagagtccataactgcagagcatgcattggcagtcaagaagataaacaactgtgt

SEQ ID NO: 25161 - DNA, 201 bp, Homo sapiens
attttactgttgattcttgtttggagttagtgctgttacagctgtttaagtgcccccagttatctataactataaaatctggctaataaatatctgtggtyagcgtcatgcggccgccccatttgtgctaatgagtggtggagcctctgtggtattccagtaccagccagcaagctggtcctctgctcccgactcgctcaa

SEQ ID NO: 25162 - DNA, 201 bp, Homo sapiens
cacttttgaaaaaaattacagatatatccatcccactccagacctattgaatcagaatcctcagggttgaggccctttttttttttttttttttttttttttgaggcggagtctcactccgtggcccaggctggagtgcagtgctgcaatctcagctcactgcaagctccgccttccgggttctcgccattctcctgcctc

SEQ ID NO: 25163 - DNA, 201 bp, Homo sapiens
tgagccaagatcatgccactgcactccagcctgggagacagagtaagactccatctcaaaaaaaaaaaaaaaaaaagaaaagaaaagaaaagaaaagaaaatacttgcagaagcagactaatcatctatgtagaaaccctacttctttgacactaaataattttaaatattgtatagtattctgtaagcaaacaaaacgga

SEQ ID NO: 25164 - DNA, 201 bp, Homo sapiens
gtgagccaagatcatgccactgcactccagcctgggagacagagtaagactccatctcaaaaaaaaaaaaaaaaaaagaaaagaaaagaaaagaaaagaaaatacttgcagaagcagactaatcatctatgtagaaaccctacttctttgacactaaataattttaaatattgtatagtattctgtaagcaaacaaaacgg

SEQ ID NO: 25165 - DNA, 201 bp, Homo sapiens
gaataaaaagtgcagttcagaaacatgcggcttcacatagcttatttctgcgcttctctactggtagagatttcttcacacaccataaaagttcaaatctrtctaattgtgaagtttgccaaattgtgaacaaaaatttatgtaaaccgtaaaacttatttctgaccaggcatacctgtagttttcagaagtgtctgataa

SEQ ID NO: 25166 - DNA, 201 bp, Homo sapiens
tattctgtagagtggccttaccatgatttatttaatctattgttgaatgcctaggttgtttacagtttttacagtgtagtagtgagattttttttttttttgaacatctatctttgtgtttctttagggtagatattcaggagtgaaactattgagttgaaggatttgtgtattttccatgttaatagataatgtcaaatt

SEQ ID NO: 25167 - DNA, 201 bp, Homo sapiens
cttgggtagaatttgaattcttataattttctatccaaacgaagtgttctgttcaacattttagaacctggtaaaatgaaaaatggcactttaagattttyagattaatattttagattaagttgtcaccattatactttaagaaaatcaattttgggttctgtagactaaggttaaagaatgtatatttttattactcca

SEQ ID NO: 25168 - DNA, 201 bp, Homo sapiens
agtgagccaagatcatgccactgcactccagcctgggagacagagtaagactccatctcaaaaaaaaaaaaaaaaaaagaaaagaaaagaaaagaaaagaaaatacttgcagaagcagactaatcatctatgtagaaaccctacttctttgacactaaataattttaaatattgtatagtattctgtaagcaaacaaaacg

SEQ ID NO: 25169 - DNA, 201 bp, Homo sapiens
tagtgagccaagatcatgccactgcactccagcctgggagacagagtaagactccatctcaaaaaaaaaaaaaaaaaaagaaaagaaaagaaaagaaaagaaaatacttgcagaagcagactaatcatctatgtagaaaccctacttctttgacactaaataattttaaatattgtatagtattctgtaagcaaacaaaac

SEQ ID NO: 25170 - DNA, 201 bp, Homo sapiens
tagatcctggagccatttcatctttttttttttttaagtcatatagcaatgcagcttcaatatgagttttctagtttttctcatgtttttcactctggacratctaaaagagaaactgaagcatcagagcctatgtagtggggttgtagttctcaagcgtggagaacaggtgcaggtgctagcatgatccccagagcatca

SEQ ID NO: 25171 - DNA, 201 bp, Homo sapiens
catacctgtagttttcagaagtgtctgataattaaaacattatctaaagaaaattgcaactagagataggtcagaattgagagtgtttaaagttgtattcygtgaacaccaaaaagtttttttcttctcagctcttctaaaaataaatgcctggccgggcgcggtggctcacgcctgtaatcctagcactttgggaggccg

SEQ ID NO: 25172 - DNA, 201 bp, Homo sapiens
cttgaaggtaaaacttttctatttaccttgcaaataaagagtagttagaggttaataactggtgtcctgttaaagaatgggttttgaggataatattaaamatggaacatttctcacttctccttgacccaggctcactctcatatgcagttgaaaccttgggtagaatttgaattcttataattttctatccaaacgaag

SEQ ID NO: 25173 - DNA, 201 bp, Homo sapiens
attttttattacccagaataatttacattgtatttgttcagtaaaaataggagttttcatgctgttccaattttgttaatttatttttaaactttcagttrtgaatgaatgaataaactgacaaaatgatttttgttcaatgtatcaggatatgttctagtttctaactatactattgaaggaagaataccttttatcttg

SEQ ID NO: 25174 - DNA, 201 bp, Homo sapiens
agatagacatttgtaaataatatagtgacattgttgaaaacttactgtgggccattcaaagacatttgaaatttcacttttcttggaaaagagaattgcargaatgcaaaattgcttttagttttccttgatcctctgactgtagaattgagctgtatcatatacatgtttaacctactgaatttaactgtattcttttcc

SEQ ID NO: 25175 - DNA, 201 bp, Homo sapiens
ataatctcactaactggtgaccgcgcctaacattgagctatagatctctcataactgtacaacagtatacctataagtagatagacatttgtaaataatayagtgacattgttgaaaacttactgtgggccattcaaagacatttgaaatttcacttttcttggaaaagagaattgcaagaatgcaaaattgcttttagtt

SEQ ID NO: 25176 - DNA, 201 bp, Homo sapiens
taagtcataatctcccctctaggaaaacagaaaaatatgttcaaatctagaaagatttgtatttgtaataaaatatttaaaatttttaaagagcttatatrtataggttgatatgctacagttatttggcaaaatatctcattatcgttttttaatgctagatagaagggatcaaagaaaattacaaaccacaagatgctt

SEQ ID NO: 25177 - DNA, 201 bp, Homo sapiens
cactttttaattttacatatttttttgtctctagacttttatctgggccctttttaatatatttcttcatcattatgtggatgatttccagcatgcttatmatagcttatataaagtccttgactgctaatttcatcatctttgttatttctgcattctcagttgactgaattttctgctagttgtgtatggtagttttct

SEQ ID NO: 25178 - DNA, 201 bp, Homo sapiens
tgagtaactagtgaagaatgcccagccaattaggtcatatgatgggctgaacagccttcatttgtttagaaatcaagagaactttcacaatgataatagcmgttttctttaacatgtcttcacataaataatttttctatgttagtgttgattgatttgtttatatttatgtaaacatagacgtgaggataaatactgatt

SEQ ID NO: 25179 - DNA, 201 bp, Homo sapiens; identical to SEQ ID NO: 2931

SEQ ID NO: 25180 - DNA, 201 bp, Homo sapiens
ctccttttaaatttttttgcttcccctttttgcaacttctaaaagttgagtgccctgcggctcagttccggagcctcttctctccttccacttttttttttcccttagagtattaggaagcaatttagcttagtgttaagaattcagactggggccacactgcttggattcagtcccaggtttgctgcttaccggtagtgt

SEQ ID NO: 25181 - DNA, 201 bp, Homo sapiens
agctaaaataattgacaggtgaaggggcatttgagatttttaaataaactgcaacatgaggggactgacgtgattggagctgggcagttttaggaaagagrgagagtggtttggaagaggcaagggaaatgaatgcacattgcttagcataatgcatattgaacagatagtacagaggtcaactccgacacaatttcccca

SEQ ID NO: 25182 - DNA, 201 bp, Homo sapiens
tatcctttaattcttcattaaaatggaaataagtagatgtttcaaagtaatctacattcctggctttgcttaacgtttatataggtattgttttctttcamactggatttttgggttgctctttctggccttttaaaattctaatggaattattttggcttcttacttgggaatattttcaaatgaatgcttttcttttaa

SEQ ID NO: 25183 - DNA, 201 bp, Homo sapiens
tgaattgcatggttttgccccaggcaactgggtggacggtggaactgtaaattgagaatgattacaataatgctaacatttaaggggtatttagtatgttmcaagcactgtgctgtatgctttacacaaagtaacttattcctcataataacctgtgaagtcggtaaactattacccccattttatagatggggaagctga

SEQ ID NO: 25184 - DNA, 201 bp, Homo sapiens
gtagtgagccaagatcatgccactgcactccagcctgggagacagagtaagactccatctcaaaaaaaaaaaaaaaaaaagaaaagaaaagaaaagaaaagaaaatacttgcagaagcagactaatcatctatgtagaaaccctacttctttgacactaaataattttaaatattgtatagtattctgtaagcaaacaaaa

SEQ ID NO: 25185 - DNA, 201 bp, Homo sapiens
aatctgggaggcggaaggtcgtagtgagccaagatcatgccactgcactccagcctgggagacagagtaagactccatctcaaaaaaaaaaaaaaaaaaagaaaagaaaagaaaagaaaagaaaatacttgcagaagcagactaatcatctatgtagaaaccctacttctttgacactaaataattttaaatattgtatag

SEQ ID NO: 25186 - DNA, 201 bp, Homo sapiens
tagttaagttttatagaaatatctgctgttactgcatataaagaaaagattaaaactggctacctttttcatctttaagcgtgtttatgaaaaaataaaaagtatgtttgtggttgtctttttctactcaaacttattaccatgttttaaaaataacattaacaactgttgagttaataatacattaaattatgcaactag

SEQ ID NO: 25187 - DNA, 201 bp, Homo sapiens
gttccggagcctcttctctccttccacttttttttttcccttagagtattaggaagcaatttagcttagtgttaagaattcagactggggccacactgctkggattcagtcccaggtttgctgcttaccggtagtgtgatttttggcctagttgcttagataatctgtgtctcagtttccttatctttaatatggaatata

SEQ ID NO: 25188 - DNA, 201 bp, Homo sapiens
ttagttaagttttatagaaatatctgctgttactgcatataaagaaaagattaaaactggctacctttttcatctttaagcgtgtttatgaaaaaataaaaagtatgtttgtggttgtctttttctactcaaacttattaccatgttttaaaaataacattaacaactgttgagttaataatacattaaattatgcaacta

SEQ ID NO: 25189 - DNA, 201 bp, Homo sapiens
aattattaaaaaggatttttttgtatttattacagtgctaactaattatacttaagcatattgctttgctttccagggctcattggagttcaaattgcccrataaaagtttttacttttataaatacatatatatttcacataccatcaaatttaccattttagaatatacaattcagtgggttttaatatgttcataagt

SEQ ID NO: 25190 - DNA, 201 bp, Homo sapiens
ctatttagttaagttttatagaaatatctgctgttactgcatataaagaaaagattaaaactggctacctttttcatctttaagcgtgtttatgaaaaaataaaaagtatgtttgtggttgtctttttctactcaaacttattaccatgttttaaaaataacattaacaactgttgagttaataatacattaaattatgca

SEQ ID NO: 25191 - DNA, 201 bp, Homo sapiens
aatacaaaaaattagccaggcgtagtggcaggtgcctgtagtcccagctactcaggaggctgaggcaggagaatggtgtgaacccgggaggcggagcttgsagtgagccaagatctcgccactgtactccagcctgggcgacagagcgagactcaaataaataaataaataaataaatgcctgtgcatttgtttgacaaca

SEQ ID NO: 25192 - DNA, 201 bp, Homo sapiens
tcacccaggctggagtacagtggcgtgatctcagctgactatagcctctgcctcccgggttcaagtgattctcctgcctcagcctcctgagtagctgggawtacaggcatgcgccaccacgcctggctggtttttgtagtgttagcagagatggggtttcaccatggggatggtcaggccagtctcgaactcctgaccttg

SEQ ID NO: 25193 - DNA, 201 bp, Homo sapiens
tgtaagatagcactcaactatgatagtaggcaatttatatttgatcagataaactgttaactttttaataagttttaatatgcttagctattatgtttttraataaggtggcaggttttagaatttaagtgtgttcttttaaaaaatgcacttaaaaaaaaaacaacctgcttggctaccagtcagtgagaatgatgaatt

SEQ ID NO: 25194 - DNA, 201 bp, Homo sapiens
ctttgtcaacacttaccattttttctgtttttctttatagtagccatcctgatgggtgtgaggtggtattgagatcgtctttttttttttttttttttaaygtaggtgcttataggtataaattaccttctcaccgttttactacacccttaagttttcttgggttatgttttccttttcattaatctcaaagtattttct

SEQ ID NO: 25195 - DNA, 201 bp, Homo sapiens
tgcacctgcagcatttactcttagtaaatggacacaatgtatagttggataggtataggacccctttgaattcactttctactttggtaaatagggatagmaatatccattatacatcatgcggatgctatgaggattacttgtgaaaacacatgacattctgactctttaccagagttgaataggcttcaaatatctcaa

SEQ ID NO: 25196 - DNA, 201 bp, Homo sapiens
catctttgtcaacacttaccattttttctgtttttctttatagtagccatcctgatgggtgtgaggtggtattgagatcgtctttttttttttttttttttaatgtaggtgcttataggtataaattaccttctcaccgttttactacacccttaagttttcttgggttatgttttccttttcattaatctcaaagtattt

SEQ ID NO: 25197 - DNA, 201 bp, Homo sapiens
tcgtagtcattttattgatgaggaatttgaggcaccaagaggctaatttgcccagtgtcatccagctagaaagtggtagatctgggatttgaactcatgtytgtctgactccacaacttacattcttaaccactcatatcacagtaccttgtttaaaggtgttatcataataacaaacaagagaatgtgtaattaacaggt

SEQ ID NO: 25198 - DNA, 201 bp, Homo sapiens
aacttgagcaatgataggtaaatttgagctagttctcctcttttccctcttccaaactgcttttacatattggtgatagattaatatttttcaaaaaagtstaggtcttgttgttttatttccttatttggaactcttggcattctgatgtttcttgaagcagtgcaaacacctgagatagtattttaggtcttaatgttg

SEQ ID NO: 25199 - DNA, 201 bp, Homo sapiens
ggatgaacatagttttggctgttgtgaccataacatccaatttgccttggacaattgtagtttatgcctgctgttcctctgttatgtccagttaacaccayctttcactcgcgaaagggtactgccatagagaatgaattatatagacaccatgcttgtaatcaactttcatttgtcattggaaggataatagccagaagt

SEQ ID NO: 25200 - DNA, 201 bp, Homo sapiens
tacccagaataatttacattgtatttgttcagtaaaaataggagttttcatgctgttccaattttgttaatttatttttaaactttcagttgtgaatgaakgaataaactgacaaaatgatttttgttcaatgtatcaggatatgttctagtttctaactatactattgaaggaagaataccttttatcttgatgtctttt

SEQ ID NO: 25201 - DNA, 201 bp, Homo sapiens
cataaccatgtaaaaaccatgcatggagaaaggtttgtaattattttagtagtggtcatggtaaagtagatctgtttggattttttaaaaaacataaatamatatatacttatatatcgtatagatgtgtgtatgtaataatggtttcattcattccattggtctgtacaacaaaagattctgaaatagatctgtgtcact

SEQ ID NO: 25202 - DNA, 201 bp, Homo sapiens
taatgaaattgaatttgatgctttcagttcatcagctgacatatgtaggcagttatgtacattcctgcaaagtctgttctttgtctggtctgtgatttgaraaaaagacattggaagctgcaacggtatagaaatactgcccccttttcttttaccctcttacgaactatatgacccagatctattcataaaaagatgatt

SEQ ID NO: 25203 - DNA, 201 bp, Homo sapiens
aaaggtgttatcataataacaaacaagagaatgtgtaattaacaggttgagggatgcttcattgacagtgatattttagctgattactgactgatgtgttsaaactcaaaagggaaaaagtgaacggagcaaaggagccatagggggagaacgttgtaagtagaagtaaatgagtgtgagacctgtaaagtaccggtatag

SEQ ID NO: 25204 - DNA, 201 bp, Homo sapiens
agttttaacttatacagggattcacttaagttttagaaaaaaacactaggctagactatgaacttcatgaagcagggtcagtctcttcttgttcactactktattcctaaagccttgcataatgcttgtcacctagaaggtaattaatgaacgttagttatggaaagtattattaacagagttctttggtacctattgaat

SEQ ID NO: 25205 - DNA, 201 bp, Homo sapiens
gctcggagcatgcatattttatctaacatagtcctgtatgcaagccagcttcttcagctgttgctcaaagtaacagttttgctttaataattgaggaaaakttggctgtattggacacatttgagagacggttcatgagttctccaatagttaaatccctaatcaaagaaaatggagtaactgcagttttggcctttatac

SEQ ID NO: 25206 - DNA, 201 bp, Homo sapiens
cctgagtgacatatggtgatggtctgcacttgggaagtagtggtggagatagagacacgtttgagatctattttggaggatttgttaggttgagtctttasactggtaagaattacccttggagcaataaaatctcgattctccaagattgcctttaaggctttgatttattaagtctgcagtgaagcttgatattcttga

SEQ ID NO: 25207 - DNA, 201 bp, Homo sapiens
tcatgtctgtaccgaacacatagagacatttttcttgtcattatgccctatacagtatagttatttacataacatttacattgaattaggcatgataagtratctagagaaattaaagtatataggaggatgtgcaaaggctttatgcaaattcaatgccattttatattagggacttgagcatccatacattttggtatc

SEQ ID NO: 25208 - DNA, 201 bp, Homo sapiens
ctggaaacaagctatttgtgaaaatgctttgtgatgtgtggattcatctcacagagttaaatgtttgttttggtaaaacaggttgttttgataaaacaggwtaaaaactctgaacactgaagctcagttaagcattctggtaggtgatacacattgtggtgatacacactgatgtatttggagggtgatgaagcttcctag

SEQ ID NO: 25209 - DNA, 201 bp, Homo sapiens
tctaatttccaccttcttacaaaatcctctaacttattttagcatttttgcctttaccgaattatttagcattcaagatagttttatactccttaatgagwggttgctacataggaggtgtttaataatgtttgttgagttgagaatgtgtcagttgagcctgccagacattatacttcttcagtgtagcaacattgtttt

SEQ ID NO: 25210 - DNA, 201 bp, Homo sapiens
cttgtcttactgatgtacaaaccttgcttcgttgcaaaatattctgaaaagtcctttcagatctccaaaatcttattacctatttaatgctttaatttgamgtgagatatatatgatgggttttttcatagtgtgaacattagttttatttcgaataactatattttcttgtctatagctatgcataacttgtgattcaaa

SEQ ID NO: 25211 - DNA, 201 bp, Homo sapiens
atattgtgaaatccctttgttatatattgtatataaataatatatttttttacacacacatagtattagttcctgtgagaaaaggggttgcaaacttgcgygtcaagagctgttagaatatgaagtctgccatgtttttcttatgggtaatggccaatgcagtgctatcccagctttctacttgtaatagctcaagatata

SEQ ID NO: 25212 - DNA, 201 bp, Homo sapiens
actggcacaggccagatttcagtagtatgggctagtagagcaagatagattggcattcaaatccaggctttgtcatttattagctttctcttttacaaaastttttaatctttccaaactaccttatttataaaaagggcatatctcataagattgggagattcattggaggaaatgtaatattccatcaagcatattcaa

SEQ ID NO: 25213 - DNA, 201 bp, Homo sapiens
gggagagagtccataactgcagagcatgcattggcagtcaagaagataaacaactgtgtgttgaatagcttcttaccttttctgaggcttcttcttctttygtaataaaggaagattcattggctttttcagtgggttattgtgagattcaaattttgtaatagtgtaagttgaatactacaaaagataaagatgtacaga

SEQ ID NO: 25214 - DNA, 201 bp, Homo sapiens
ccaaagtaattttactgttgattcttgtttggagttagtgctgttacagctgtttaagtgcccccagttatctataactataaaatctggctaataaatayctgtggtcagcgtcatgcggccgccccatttgtgctaatgagtggtggagcctctgtggtattccagtaccagccagcaagctggtcctctgctcccgac

SEQ ID NO: 25215 - DNA, 201 bp, Homo sapiens
atttttaagctagtatgtaaaaagatactgctgtgtttgcacaaacaaggtgttcatcagcgcttcattcttactggctttgcagctctgtccttttaatkgttcagtagccaattttattttggtgccagagatatctttgctttggtttttacaattggctgtggtaaaacaacataggaatgtctaaaataaaaagga

SEQ ID NO: 25216 - DNA, 201 bp, Homo sapiens
ttatttctgcattctcagttgactgaattttctgctagttgtgtatggtagttttcttcttcatatcatgtcttcatatcattttattgaatgcttagtaytttgaattttatatttttgagcatcaggtgttgtattcctgttaaggagtattggactttattttttcagaagtggttacattcgtctgtggcttatgtt

SEQ ID NO: 25217 - DNA, 201 bp, Homo sapiens
tattattgggatttaaatttgagatttcttgaattaagttaatcactcctatttagttaagttttatagaaatatctgctgttactgcatataaagaaaakattaaaactggctacctttttcatctttaagcgtgtttatgaaaaaataaaaagtatgtttgtggttgtctttttctactcaaacttattaccatgtttt

SEQ ID NO: 25218 - DNA, 201 bp, Homo sapiens
gaattgggttgttgttcgttgttgagatgtaggagttctttatatattctggctgttaatctcttgtcatatatatgatttggaaatattttctcccattstgtgggttgacttttctttattgatggtatcccttaatgcacaaaaacttttaattttgatgtttaatttgcgtgtgttttttttttttaaatgaagtgt

SEQ ID NO: 25219 - DNA, 201 bp, Homo sapiens
gatcaactttcttcatgtggtgtaatttttttttggaagacagagtctcgctgtgttgcccaggctagaatgcagcggcacaatctcagttcactgtaacstgcacctcccaggttcaagcgattctcctgcctcagcctcctgggtagcttggatggggtacatgccactgtgcctggctaagtttttgtatttgtagta

SEQ ID NO: 25220 - DNA, 201 bp, Homo sapiens
attttggtgccagagatatctttgctttggtttttacaattggctgtggtaaaacaacataggaatgtctaaaataaaaaggaatagtttcatttcaacamccctttccccaccatcctttccaaaagtcacagtttaggtttcctaccttaaaaaaaagtggtttataaacaaaatacataatcaattttatttaacatt

SEQ ID NO: 25221 - DNA, 201 bp, Homo sapiens
agtagcataaccatgtaaaaaccatgcatggagaaaggtttgtaattattttagtagtggtcatggtaaagtagatctgtttggattttttaaaaaacatwaatacatatatacttatatatcgtatagatgtgtgtatgtaataatggtttcattcattccattggtctgtacaacaaaagattctgaaatagatctgtg

SEQ ID NO: 25222 - DNA, 201 bp, Homo sapiens
tcaactttcaagtgagaaatctaattgatatttaggattcttttatataacttaaaatagcggaagtgttccagcagagttaaataatttttttttttttttgagacagagtttcacttttgttgcccaggctggagtgcgatggtgcgatctcagctcactgcaacttctgcctcccaagttcaagcgattctcctgtct

SEQ ID NO: 25223 - DNA, 201 bp, Homo sapiens
attttgctgaatatgtgttcaaattttataattgcctgcaagtaaatcgctttattgagatcatgaattgtttggatctttgtattaattcttatgcaagkaattaatctgtgtgaataacctgcttttgctatcttctatgttagaagattttagggtagctaggtaggtaccctacctaaccaatacctattggttatt

SEQ ID NO: 25224 - DNA, 201 bp, Homo sapiens
gaccatttctggctaatttttgtattattttttgtagagatagggtttcacagtgttgcccaggctggtcccaaacttccggactcaagccatctgcccayctcggcctcccaaaatgctggaattataggtgtgagctgctgcacccaagctattttattttcatttttctcttaaaaatatttgtagtggtggctctgt

SEQ ID NO: 25225 - DNA, 201 bp, Homo sapiens
attggtgttttgtgaaaaatacaaatgtaagcctttgggaaggagtttgttaaaaatgtttttccttggctttgtatttttttttttttttttttttttttgagacagagtcttgctttgttgctcaggctggagtgcagtggcacgatcttggctcactgcaagctccgcctgccgggttcaccccattctcccgcctca

SEQ ID NO: 25226 - DNA, 201 bp, Homo sapiens
tattccattttgctgaatatgtgttcaaattttataattgcctgcaagtaaatcgctttattgagatcatgaattgtttggatctttgtattaattcttaygcaaggaattaatctgtgtgaataacctgcttttgctatcttctatgttagaagattttagggtagctaggtaggtaccctacctaaccaatacctattg

SEQ ID NO: 25227 - DNA, 201 bp, Homo sapiens
aggtatgattgagctgcattgctagggtctaaactcccctgtatatccactgaatcctctggattttcaatagatgcttcactgtggcctcatctctgacractgtgtgagcgttggatctctttagcatatcgccctcggtcactttttgaccagtttcatggagtttttcacctgtgcatgcgtgggtttttcagaagg

SEQ ID NO: 25228 - DNA, 201 bp, Homo sapiens
aaaatttgtatgaaagtgtgtatggcttctgtgtttcatattattcctgttgattgcagttaccaaatacaataataaatattgacccagatgctgctctrtatgacagttggctgatttgcttgtgttatactgggtggattcttattttgttgtttaatttttttcttatttattacttagtttataatttgttttgga

SEQ ID NO: 25229 - DNA, 201 bp, Homo sapiens
cttcattatacttcttttctgttttgatgactttactttttactttattcacttaattagaaacagattaattcattattctgtcctcttcttattttctraatacatcgggaagcccttcctgattctcctcttctctctctccaggatctttacctgtctttcaatttgctttgggctttgcattatttgaaacccttt

SEQ ID NO: 25230 - DNA, 201 bp, Homo sapiens
taataagagagcctgttaattttgtttgaaaaatttaaaggaactagtttacagtttttcaaccgtgttattaataaaaattaaatttccctactttatcrtagtctccctttttatcgtagtcttttgtctataacagttaaggggcagggggaagctagatgtattattaagtaatttttacttttctcatttttttag

SEQ ID NO: 25231 - DNA, 201 bp, Homo sapiens
ttcagatagcttgcttgtttgcccatggctaatactggagaaatcaaaagcacattggaagttctgatcatgtggttaggtctcattgacttttaacttcwctgtaggttggtctggtgggccattgactatggaattctgcctctccactcctccccctgcaatattactgtctttaggtctttcctcttgggctgacat

SEQ ID NO: 25232 - DNA, 201 bp, Homo sapiens
gctagaggtttgtaaaatggaccaattagcactctgtaaaatgaaccaatcagcaggacatgggcggggacaaataagagaataaaagctgggcaccctarccagcagcagcaaccggctcgggtccccttccatgctgtggaagctttgttctttcactctgcacaataaatcttggtgctgctcactctttgggtccgt

SEQ ID NO: 25233 - DNA, 201 bp, Homo sapiens
catggttaaatgataattctttccctttcctgctttatgcagttaatatttattttctactaattaataaacattgtcttttaatgtcctgaatgtccatygagattacaactgtttatgaagagattctaataccatgttttttgtaatgtaggtgaaaaatgtggtatacttacctatgtataatagtgcaagcagcca

SEQ ID NO: 25234 - DNA, 201 bp, Homo sapiens
gctactcaggaggctgaggcaggagaattgcttggacctgggaggtggaggttgcagtgagccgagatcgcaccactgcactccagcctgggtgacagagygagactccgtcttaaaaaaaaaaaaaaaaaaaagatagtttcagatagcttgcttgtttgcccatggctaatactggagaaatcaaaagcacattggaag

SEQ ID NO: 25235 - DNA, 201 bp, Homo sapiens
atttatcaaagagtagactcactgcagagaacccacctagaataggtagagaaaatgcaagcccactaaatatctagagtctttggttcttgttaactcaraacttggtttgaccagcatcactggcattacctggaggcttgttagaaatgcagcatggttgaacccactccagacctatgggttcattatctccatttt

SEQ ID NO: 25236 - DNA, 201 bp, Homo sapiens
cattagaaggtagtttcctcacgcctgcaatcccagcactttgggaggccaaggtgggtgagtcaccaggtcaggagattgagaccatcctggctaacacrgtgaaacccgtctctactaaaaatacaaaaaaattagctggacgttgtggcatgtgcctgtagtcccagctactcaggaggctgaggcaggagaattgct

SEQ ID NO: 25237 - DNA, 201 bp, Homo sapiens
tgctagccctctgggtagttagcagtgcattgtagagggtttctgcatttgaaagttaagtttgaaaaccattaaaccaggtattattgttattattattrttattattatttttgagacggaggcttgctctgtcacccaggctggagtgcagtggcatgatctcagctcactgcaagctccacctcccaggttcacgcc

SEQ ID NO: 25238 - DNA, 201 bp, Homo sapiens
tatagttatttacataacatttacattgaattaggcatgataagtgatctagagaaattaaagtatataggaggatgtgcaaaggctttatgcaaattcartgccattttatattagggacttgagcatccatacattttggtatctgtggaagatcctggaaccaatctcccatgtataccaagagacaactgcgtatct

SEQ ID NO: 25239 - DNA, 201 bp, Homo sapiens
aaaacttgagcaatgataggtaaatttgagctagttctcctcttttccctcttccaaactgcttttacatattggtgatagattaatatttttcaaaaaartctaggtcttgttgttttatttccttatttggaactcttggcattctgatgtttcttgaagcagtgcaaacacctgagatagtattttaggtcttaatgt

SEQ ID NO: 25240 - DNA, 201 bp, Homo sapiens
ttgccaaatccaatggtcactttctagtccatttcttttttgatctcttaagcattcctctttgatatacagtattttattcatgggatttcaggacaccraactttttctcattttctacttagctccttttaaatttttttgcttcccctttttgcaacttctaaaagttgagtgccctgcggctcagttccggagcct

SEQ ID NO: 25241 - DNA, 201 bp, Homo sapiens
ccgcaaacccagcccttcctagtcagcagactcaggccgcttacccaaagtaattttactgttgattcttgtttggagttagtgctgttacagctgtttawgtgcccccagttatctataactataaaatctggctaataaatatctgtggtcagcgtcatgcggccgccccatttgtgctaatgagtggtggagcctctg

SEQ ID NO: 25242 - DNA, 201 bp, Homo sapiens
taatgcttcagtatggagataacatgagtttagcatatgtttaactaaaaatgaaaaccatcaacagcctatttcattgaaaagcgtttttcaaaatgccygttgacagaaataactttgaaaaaaggattccagagtggtgatttttcttgtttttgtaactgaatacctctacagagaaagttcagtatgcttattaaa

SEQ ID NO: 25243 - DNA, 201 bp, Homo sapiens
tgttagaagattttagggtagctaggtaggtaccctacctaaccaatacctattggttattatccacttggtctttactagatgcttattttagttgtccrgtggtagtgactaactagcaggtgatgctgtgatatatagcaggtattatacacctgtaaaatatttggtcagagttgactgctttttattttctgcgat

SEQ ID NO: 25244 - DNA, 201 bp, Homo sapiens; identical to SEQ ID NO: 2929

SEQ ID NO: 25245 - DNA, 201 bp, Homo sapiens; identical to SEQ ID NO: 2930

SEQ ID NO: 25246 - DNA, 201 bp, Homo sapiens
aaggtgaaacccatcaaggcatagggttatttccttctaattttgtgactgcagatctcactgctgaaccagaaatgagtaagtattttccagcctgccartaaatgatgttttctaatccttttcttaatggaagttgagtaaactgaactttttagagcagtgttgcccaggctggagtgcagtggtgcgagctcggat

SEQ ID NO: 25247 - DNA, 201 bp, Homo sapiens
gatcgagaccatcctggctaacatggtgaaaccccatctctactaaaaatacaaaaaattagccgggcgtagtggcgggcgcctgtagtcccagctactcrggaggctgaggcaggagaatagcgtgaacctgggaggcggagcttgcggtgagccaagatcacaccactgcattccagccttggtgacagagcgagagtc

SEQ ID NO: 25248 - DNA, 201 bp, Homo sapiens
aaagaaaagaaaagaaaagaaaagaaaatacttgcagaagcagactaatcatctatgtagaaaccctacttctttgacactaaataattttaaatattgtrtagtattctgtaagcaaacaaaacggaaaccatctgtgtgttaatggactctcactttcatttgacctttttttgtgtgtggtaggcaaactttcttgac

SEQ ID NO: 25249 - DNA, 201 bp, Homo sapiens
ttccttaaattgccccctcctgtcttcctttccatcatgattcttaatatttttatgaattgattgaccacattgatgcaaggattaaaaatatagaaagraagtttgtttagtagagttgtatatgcctttcagtagtatttggaggttgttatatagctactgttatgttaaattgtttttaaagattgctttggtgag

SEQ ID NO: 25250 - DNA, 201 bp, Homo sapiens
tgcaaggattaaaaatatagaaaggaagtttgtttagtagagttgtatatgcctttcagtagtatttggaggttgttatatagctactgttatgttaaatygtttttaaagattgctttggtgagtaggagaaatctgtgcttctggccaatgaattgttgatccctcaatgaccactttttaatgtcaaatgataatatt

SEQ ID NO: 25251 - DNA, 201 bp, Homo sapiens
tgtcaaatgataatattatataactagaaaatacaggctgatttgttggaagactgagacccctgtcaaggccacctgcaaagttctccactggcatggayggcgctctctaaacgcctacgtggcacgccagataatacatagctgattttcccattcattacattggagtagtgtggattttctgtcaaaccagatttt

SEQ ID NO: 25252 - DNA, 201 bp, Homo sapiens
ataactagaaaatacaggctgatttgttggaagactgagacccctgtcaaggccacctgcaaagttctccactggcatggacggcgctctctaaacgcctrcgtggcacgccagataatacatagctgattttcccattcattacattggagtagtgtggattttctgtcaaaccagattttttttttctaccaaatgaga

SEQ ID NO: 25253 - DNA, 201 bp, Homo sapiens
tacggaagaaaggcttaccgcttgcccgtagtgaagattactgtggtacattgcctcagagtataagaattaccagggatgatttcatatactggttttgstattaagaaagtcatggctctaatgactagttaacacagctgagatggttccatattttttgtttttaaaaaataggaccaaaatgaattttcagctagt

SEQ ID NO: 25254 - DNA, 201 bp, Homo sapiens
cagctaaaaaagaaaagtagatttaagagtttgtattttttattacccagaataatttacattgtatttgttcagtaaaaataggagttttcatgctgttscaattttgttaatttatttttaaactttcagttgtgaatgaatgaataaactgacaaaatgatttttgttcaatgtatcaggatatgttctagtttctaa

SEQ ID NO: 25255 - DNA, 201 bp, Homo sapiens
caggcagcgccaaggtcgcccagattcccgacaagctccgcgcgggggcttcctcggctccttgctgttgccgccgccgcagctgctgccgcggttggtgrggttgggtgagaggaggagctgtcgcggaccctgtagagtcggtctctgttgctctttttgcctgaggagtcttccatcctacgtcgagctctgactccc

SEQ ID NO: 25256 - DNA, 201 bp, Homo sapiens
cagtagcttccagctgttcttccctgcttccagtttttccctagttattttccagatggctgatggtgatatttttaaaatgtgaatgtacgcgtggcccytccgtttaaaatatttctagagagggctgggcgcggtggctcacgcctataatcccagcactttgggaggccgaggtgggcggattatgaggtcagcaga

SEQ ID NO: 25257 - DNA, 201 bp, Homo sapiens
ggcgcctgtagtcccagctactcaggaggctgaggcaggagaatagcgtgaacctgggaggcggagcttgcggtgagccaagatcacaccactgcattccrgccttggtgacagagcgagagtccgtctcaaaaaaaaaaaaaaaaaaaaaaaaaaagttctgaagaatctaccgctttcacagtactttgaacttttcag

SEQ ID NO: 25258 - DNA, 201 bp, Homo sapiens
acgtaaaccttaaacagtttgggttgcttcagggctaaaatgcaggatatttttgttataagtgaaatttttaataatgtctactagtactactttttgcyatttttgatattttgatgtatcattatttagagcattatatcattttagtaacagctatgcttcaaattattgtgtcatgtttcagaaaacattcagaac

SEQ ID NO: 25259 - DNA, 201 bp, Homo sapiens
acatcttcgggctgactgaatgacagtcctttcctcaccacctaaatgtgatgcgaagtcctcctgtcagcatttcttacctccccagatctttgacagtsataaattttgagaaaaatcaaaagttgctgcttatcagaaaaagttctctaatcttttgaaaagactattgaaattcaaatgaggctctgtgtatgtttt

SEQ ID NO: 25260 - DNA, 201 bp, Homo sapiens
gaaccatgttgtaggtagtttatatccttctgattaaaaaaaaaatacttgttcttttataactgagaagaattgtgccactgattttgatgattttgagrcagcctcaataaatgatgtgaacaattttagatttctgaagtgggttgtgtttctgatccatccatacaaatatgaatcagatgctgattctatttatgt

SEQ ID NO: 25261 - DNA, 201 bp, Homo sapiens
ttatgtgtaggaaagtaataaagtagttcatgagttttcaacataatatctgctgataactgtatcatatgttcctggatgtatcattaatcaagaactgyaagatagcactcaactatgatagtaggcaatttatatttgatcagataaactgttaactttttaataagttttaatatgcttagctattatgtttttaaa

SEQ ID NO: 25262 - DNA, 201 bp, Homo sapiens
cgtgctgtcgagagggagtccccggggacacctcggcacgcagcggagatgcctctttttgccaccaatcccttcgatcaggatgttggtaagtgtttttscctctccctgcccattcctcaccggactgcacgctcactctgccagcccctgcctgcattcaggaccctcgggccagggccaaggaagagctcgctcttc

SEQ ID NO: 25263 - DNA, 201 bp, Homo sapiens
agatgagaacttttcattttttttcccctaatactttagggatagtgtctggtacatagaaagcactcaagaattatttatcaaataatgaattattggtrtttttctagaacattagtcttgtatttctatttgctgttcttttttccctccaaaacaaattcatctgtcagaaaactgaagttatctttctaagtctgg

SEQ ID NO: 25264 - DNA, 201 bp, Homo sapiens
tacagtggaaacgcatgtattccgttggaaacaggaagacaggaagtagaggcagtggataaagacaaccctttgaagaatttttttctttctttttttartgggagcagtgcacaagtgcagggacttgagatgggagtactggcagcggagcggtgggagcggtagggaagctcagtacgtgaggggtgcagctgcaga

SEQ ID NO: 25265 - DNA, 201 bp, Homo sapiens
atgacaagttgttagtcataagcaatgccatcttgagatggatagtacacttgttggcatggctaagctaaagctgctccgaaacaaagcaaaatcctctrgcatgacataagaggtggaagaactcacgcattgtaagtttaaatgtggcttgatttcttctcgcttaagagaatctctgttagcagttggttggttggt

SEQ ID NO: 25266 - DNA, 201 bp, Homo sapiens
tcagcgagaccacaaacccaccagagggaacaaactccggacacatcatcacctttttctgtctcaccattcttaccttacttcagtcattgttatctctyatagtcagtggcaagagccttctggtaggtttctttgttaccactcttgcctctacaatcagttctcatttacaaaggtcagtgatcttttaaaaatgtt

SEQ ID NO: 25267 - DNA, 201 bp, Homo sapiens
ggctaatttgcccagtgtcatccagctagaaagtggtagatctgggatttgaactcatgtctgtctgactccacaacttacattcttaaccactcatatcrcagtaccttgtttaaaggtgttatcataataacaaacaagagaatgtgtaattaacaggttgagggatgcttcattgacagtgatattttagctgattac

SEQ ID NO: 25268 - DNA, 201 bp, Homo sapiens
ctataaatcagtattgatgtaattgagtgtttttcttcctccacagtacaatggtcagttccgttcaaggaaacacatatcccagccaggcgccagtatayagtcctcctcctgccgctactgctgctgctgcaactgccgatgtcactctgtaccagaatgcaggacctaatatgccccaggtgccaaactataacttaa

SEQ ID NO: 25269 - DNA, 201 bp, Homo sapiens
ctgttcctcccagcactacttattgtgcgttttccccctcatggctttattatagttctattaactacattttatgaaaggatgtatgttttccacttagygaactcagtggaagatacacagaacttggtaataaatagaactttataaggaagatgacttattctaaatattagttgtacaatagtgaaaagcagtatt

SEQ ID NO: 25270 - DNA, 201 bp, Homo sapiens
ctgtcttctctcagccaggcagtggtcccaccatccgcaaacccagcccttcctagtcagcagactcaggccgcttacccaaagtaattttactgttgatkcttgtttggagttagtgctgttacagctgtttaagtgcccccagttatctataactataaaatctggctaataaatatctgtggtcagcgtcatgcggcc

SEQ ID NO: 25271 - DNA, 201 bp, Homo sapiens
taaaatgaaccaatcagcaggacatgggcggggacaaataagagaataaaagctgggcaccctagccagcagcagcaaccggctcgggtccccttccatgytgtggaagctttgttctttcactctgcacaataaatcttggtgctgctcactctttgggtccgtgctacctttaagagctgtaacactcaccacaaaggt

SEQ ID NO: 25272 - DNA, 201 bp, Homo sapiens
ccttcctttaggatgcccaactaatcaagaggcttaaaatatgtgctgatttactacactgtctttccccagtttattgactgggacagactgtaatgagygatgtgaaaccatgaacagaaatctgtgagtgtggaggggcttatgttttgaccacttcagggagtcatgtagcttatctacattcatccagacctacat

SEQ ID NO: 25273 - DNA, 201 bp, Homo sapiens
aaaaattaaatttccctactttatcatagtctccctttttatcgtagtcttttgtctataacagttaaggggcagggggaagctagatgtattattaagtratttttacttttctcatttttttagacctaaggattgtcttcggtctattatgagaagagtgaaccacaaagatcctcacgttgctatgcaggctttgac

SEQ ID NO: 25274 - DNA, 201 bp, Homo sapiens
gtcagaagtgcctggggaccccagagcttgtgtctgaggtttgaagtgaagggagtcttatggagagctgtgtcttcaacctgtgaagtctttgctgactrggtagttagcatcagaagtatgctagccctctgggtagttagcagtgcattgtagagggtttctgcatttgaaagttaagtttgaaaaccattaaaccag

SEQ ID NO: 25275 - DNA, 201 bp, Homo sapiens
tcatatgcagttgaaaccttgggtagaatttgaattcttataattttctatccaaacgaagtgttctgttcaacattttagaacctggtaaaatgaaaaayggcactttaagattttcagattaatattttagattaagttgtcaccattatactttaagaaaatcaattttgggttctgtagactaaggttaaagaatgt

SEQ ID NO: 25276 - DNA, 201 bp, Homo sapiens
cttttccctcttccaaactgcttttacatattggtgatagattaatatttttcaaaaaagtctaggtcttgttgttttatttccttatttggaactcttgrcattctgatgtttcttgaagcagtgcaaacacctgagatagtattttaggtcttaatgttgttctcttattattccaaattttcacaaagtagtctgtat

SEQ ID NO: 25277 - DNA, 201 bp, Homo sapiens
ttctaccttagtttgatgcttttggtccttttgtttcttgaggatggaatgttttcctctttaatttcccatctctgtgtctcatatcctttcagacccartgtagataccacttcttccacaaagcctttccttatcccctttactgacaatggtatgatcctctgaatcctcaaagcactctatcaaaactattcttat

SEQ ID NO: 25278 - DNA, 201 bp, Homo sapiens
tgtgacttgtctaaaacgagtgagcagaggcaaaattagaagtcagatttctttacttcccattttatgtttttttctaccttcactgtgctgtgtgcttmggtgcttgtatgagcagttatatttgaaggttaaaattatgaatcaagacataccaatcttacattaaagtttttggtgattcctctctccccatacgtt

SEQ ID NO: 25279 - DNA, 201 bp, Homo sapiens
gctttatgtttggaaccctcccagatctagctccatacaggtggttgtttgtatctgggggtctgcattcatggattcaaacaacagtggatcaaaacttrtagaggaaaaaatatcatgtctgtaccgaacacatagagacatttttcttgtcattatgccctatacagtatagttatttacataacatttacattgaat

SEQ ID NO: 25280 - DNA, 201 bp, Homo sapiens
acatgtgctttcttcccaaggcatttccagtttatctgagcactcttgagatgtgaagactcaaaaatgtatctgggagaggaaggaagcaaaggacattyttcttcttaaaaaaattttggtttaaaattttcttaaaaaaattatgtctttgaaaattcattcattcataactgatagctggtttttactactcagtat

SEQ ID NO: 25281 - DNA, 201 bp, Homo sapiens; identical to SEQ ID NO: 2932

SEQ ID NO: 25282 - DNA, 201 bp, Homo sapiens
ctctgccacttctcagctcacggtgaaatcataggcaagttaaattctttgagttccagtgttcttgtctttaaagaggggaaaacacatcattccattcygcagttaaataatatgtctagagggcctgctacagtacctttatgtggttggcacttactagatgctaccttttttgttccaccttaaatgagtgtcctg

SEQ ID NO: 25283 - DNA, 201 bp, Homo sapiens
agttacgttcccagctattggctctcaggtattttgggaatgaagttgtgtgtgtgctacagtttgtttctcttaaatagctatatttatttgaatttttktcttcattcccaggtaatttttactacttcagaggaattttcgttagctaattgtgttagtaactagttgtattgctagttagtaatactagttttctgg

SEQ ID NO: 25284 - DNA, 201 bp, Homo sapiens
aaaaagagatgaagcaagtttcagagcaggagtggaagtttattaaaaagctttacagcaggaaagaaaggaaagtgcccttggaagaaatccaagtgggygacttgaagagtaagtgcggtttttaactttgatcccaggactctataggttggcccctttcctgtgattcttcccttagagtgggcggcccacatgcgc

SEQ ID NO: 25285 - DNA, 201 bp, Homo sapiens
ggcaaatgagccctctggggtctcttttataaggtcgctaatctcattcatgacttaatcgctttccaaagtccccaccttctgataccattgctttgggkgttaggatttcaacctgtgaattttgggaagacacaaacattcagacatattttaacatttttttttttttgagtggaagaaaataaagtttgagctggt

SEQ ID NO: 25286 - DNA, 201 bp, Homo sapiens
gtattttccatgttaatagataatgtcaaattgttgagcaaaacaagtttttacactcgtattcatatcatgcgagaactcctgtttcccagcatactcamcaaggatattaagattgtttgcacatgactgaggaagggacactcattgactatctattgaaacaaataaattactgttgtaaaaataaaattgtcatta

SEQ ID NO: 25287 - DNA, 201 bp, Homo sapiens
aataaataaataaataaattctcaaatgcatttgagattatttggaatagctgtttgaaactttctaaaactaatgtttaaaattaaaataaagtttaacrgaatttttttacttggcagttacagcatataatatactaattatgctaatagttttttgttgttgttgttgtttaaaggaaatagcttttatacagggtt

SEQ ID NO: 25288 - DNA, 201 bp, Homo sapiens
aggatggagtacggtggtgccatcacagctcactgcatcctcgacctctggggctcaagtgaacctcccacctcaggccattcactgcgcccataggagcygggaccatttctggctaatttttgtattattttttgtagagatagggtttcacagtgttgcccaggctggtcccaaacttccggactcaagccatctgcc

SEQ ID NO: 25289 - DNA, 201 bp, Homo sapiens
gaacctcccacctcaggccattcactgcgcccataggagctgggaccatttctggctaatttttgtattattttttgtagagatagggtttcacagtgttkcccaggctggtcccaaacttccggactcaagccatctgcccacctcggcctcccaaaatgctggaattataggtgtgagctgctgcacccaagctatttt

SEQ ID NO: 25290 - DNA, 201 bp, Homo sapiens
ggtgaagatgtgcttttacagttcctcatcctgcacacccagctctgggccatggcaggaccacctttctgaaggttctggactttcaaggccctgctccstgccctgctgcaatgggcgttcggctcatggctgggccacaatgtgtctcctcagattattggaagaaaatggccaaagttctgagaagtgccggccatc

SEQ ID NO: 25291 - DNA, 201 bp, Homo sapiens
ttttgaagaaccaactaaagtggttaagtcagcttgtatcatctgtgcttccactaagtgagtacaagagactattcctgactatagatatagatgaaacmagtttaagaatttctagtaggaccagagttaacatctttaacatttcattttaattagttttatatttctattcctattttgtattttctaaagctggtg

SEQ ID NO: 25292 - DNA, 201 bp, Homo sapiens
gggccaagtgagaaagagaagatgaaacaaaatacctgatgcttcttgtttgttgtaggaaataatgaggaaagaaaatagtcctcagactcacagcaggraacagaggactagaccatgaccttgagatccaggcagccagctgactgaggggtgtgtgcactcaggtgtatgccacacaccctccacatacacacacat

SEQ ID NO: 25293 - DNA, 201 bp, Homo sapiens
ttatcctgccattgtggttctctatgctggcccttctagtatctccctggaggctggtttgaggctgtgattgccggtgccttggtgaaagaggcagtccttttttttttttttttaatttttgttttaattttttgagacaaggtctcactctgttgcctaggctggaatacagtggcacaatcatgcctcactgtgcag

SEQ ID NO: 25294 - DNA, 201 bp, Homo sapiens
gatttgctgcagatcacattgctgtgcatttcactcctgtactgggggccttctactatttgctgcctcatgattcagagtgagataaaggcaaggagtcwttggcaacagaagccagaaagctttcccctgaggctctctctgaggatcttggatttgcttctggaagcttagctctggagaagagcagcattcaggaca

SEQ ID NO: 25295 - DNA, 201 bp, Homo sapiens
atcatttcataaatataaaaacaccaaagctacagattgttgcctgttgctgcagttgatttctctttccctttctctctctctctctctctctctctctcacacacacacacacacacacacacacacacacacacacacacacacaaaggcaggcatttgaagctggctgttataaatggacaagctagtggcctttaa

SEQ ID NO: 25296 - DNA, 201 bp, Homo sapiens
cagtgtttcattgctgcaccttgcatgcccacatgattgaactattctttcggccagttactctttgtagggcagataatgtcttcttaaaatatctggcttttaaaatatctggtcatttgccctttactatttagcctttattttggagtcactttagggagtttttggtttgggtctgcatcgtcatcacttatcacc

SEQ ID NO: 25297 - DNA, 201 bp, Homo sapiens
gaaccgagtttcagcctgtgatatagaagcaaaaagaaaatgcaaaccagatgctccacattgactctctgcagaaaggtgtgggttcccagtctttcccygctccccaaggtcacctttcagtaaccctttttattcctctctgtatctttgcttcaaagttttaacaatttttatttttaaaaagtttttgaacttttt

SEQ ID NO: 25298 - DNA, 201 bp, Homo sapiens
tcatttcataaatataaaaacaccaaagctacagattgttgcctgttgctgcagttgatttctctttccctttctctctctctctctctctctctctctcacacacacacacacacacacacacacacacacacacacacacacacaaaggcaggcatttgaagctggctgttataaatggacaagctagtggcctttaaa

SEQ ID NO: 25299 - DNA, 201 bp, Homo sapiens
aaaaattacatgtggggtagtaaaattgctccttgctgtggagtcaggcttatctgctttacgaggttcatttaactaattattggaataagacatttggmgaaatttttaaagcattctgctaaggttagggcagctcaggtgtaagtttaaatataatagctttggccttctcttgagtcaggaaatgcctttgaggct

SEQ ID NO: 25300 - DNA, 201 bp, Homo sapiens
gaataagggtacagcagttaagaagctagggtaaaagctgtgcaggtggtataagaatgcttgaagcttgggaaatgcttctctaccccctccttctgccrcaccacattttatagctaaggacacttgaggctcagagaggattggggagttggggatttggggatttgtcaaattcaagtgatagtgatagccttgccc

SEQ ID NO: 25301 - DNA, 201 bp, Homo sapiens
tcagattatcctcccacctcagcctcctaaatagctgggactacaggcacgtgccaccatgcctggctaattattgtattttttgtagacatgaggtttcrccatgctcccaggctggtctcgagttcctgggctcaagcagtcctcccacctcagccgcccaaagtgctaggattacaggcatgagccactgtgcctggc

SEQ ID NO: 25302 - DNA, 201 bp, Homo sapiens
gctttatcctgccattgtggttctctatgctggcccttctagtatctccctggaggctggtttgaggctgtgattgccggtgccttggtgaaagaggcagwccttttttttttttttttaatttttgttttaattttttgagacaaggtctcactctgttgcctaggctggaatacagtggcacaatcatgcctcactgtg

SEQ ID NO: 25303 - DNA, 201 bp, Homo sapiens
gaatctaaacctcaagttacaatctcgacaatactgactcctgcaattcactctactgatctgtcaccgccacaaggatagacggtcgcgggcccctcccyacccaaatggtttcagaggctgtgtaagggaatattttggtataatctccaggaaaatccccccagtagcctgccctgggctctccttgggcataggagg

SEQ ID NO: 25304 - DNA, 201 bp, Homo sapiens
ctttgctgatggagaagtctaggtaaaccctgcggatcttccatctctcccaagcttgcccagaaaggggtggggcatccctagagtactatgtccctgartggaagagtccagccgggctcagacctgcactgcattctctgccagtctttgccagtatcttcaccctgtgtcacgggtggaagagccccaagcctgtgg

SEQ ID NO: 25305 - DNA, 201 bp, Homo sapiens
acttaccctagatagaacttctggtacaatgttgaatagaaatgccaagagtagacatccctgtctactctgccaagagtagacattccctagattatagrggaaagcattcagtctttcagcattaagaatgatgttagctgtaggttttgtaataacttttgtcaggttgaggaatttttcttctagtttgctgagtac

SEQ ID NO: 25306 - DNA, 201 bp, Homo sapiens
agggcaactgagaagaggcactgctttatctttttgccttctcactagagaatgagaccctactgcagtgtcctctctcttcagtccctgcatcttccatycacaaaacattgtcaagtgtgtcagtgacttacatccctaattaacttaatgatctcaacgtcagagaaaaacacctgtaaaacttttctctctccctga

SEQ ID NO: 25307 - DNA, 201 bp, Homo sapiens
gtctcatctttgtaattctgaaaccttagggtcgcagagctggcaagggaacgtccatgtctgatacggcctctgtgtgctgtaggtgtctatccccgctmaccagcatcctgaatggatgatcgcctagcttcagactgagctctgatggtttctcaggagctctgattgttagaaagttcttccttgtgctgtgctgaa

SEQ ID NO: 25308 - DNA, 201 bp, Homo sapiens
aagcattctgctaaggttagggcagctcaggtgtaagtttaaatataatagctttggccttctcttgagtcaggaaatgcctttgaggctggggatgagakagtgaaatacatgctttataagcagtgcctagatttgattttgaaggccacccccttctttttttgagattcttatttacaggcttaactctctggaaac

SEQ ID NO: 25309 - DNA, 201 bp, Homo sapiens
tagagatgggctcctgttttctttgccttcttctgtcttgttcataaccccagtgatagtgtctctcgtgaaacagcccttatgctgtagaccaagaatgygtgtatcaggggctgacgtcactcccagtttatttagccatccctgcattcacactttgtttcattttttaaaataacttcattggggtaaaatttatgt

SEQ ID NO: 25310 - DNA, 201 bp, Homo sapiens
gggccgcgctcgccggagccccggaacaggagccgggggaaggggtccatgaggccgggcgagatccggttcgtttccggagggtcggtgggcacggggcsgcccgagtctggttcctggacgcgtatgcccgcggaactgctgcactcggcctgagggggcggcggccgtcacagttcctggcccgcgggaaggccccgt

SEQ ID NO: 25311 - DNA, 201 bp, Homo sapiens
cgtttattgtggtcaaagtctgcaacttcctgttctttctctccttaagggtgaatcaccaggattttcaactgagaaatttaagaataattgaacctaasgaggtgacacactcaggagacacaggtgtggaaacaggtaataattttgtctggaaattagatggaacatctgtaaaggattttagatctccaccccaac

SEQ ID NO: 25312 - DNA, 201 bp, Homo sapiens
gcacatgatgattatgtagcagttggtttgggcagttctgtaagtcccctggcacagttgtctgaaattggggccctcctccgaaagggttctcacaggtsgtcatggagcctcagctgaagactcctaatagctctactatttgtgaatctttacctccaggggaggcctcagtgtacagaaagattcgacctgctaatg

SEQ ID NO: 25313 - DNA, 201 bp, Homo sapiens
tgccctttactgagcccttgctgggcagtgctaagcagctgacacttgttgcctcattttcattagggtctgagatgggactggaatccaggcctctttaraggtaggcttttctactgtcctcccctgggcctctggctgccaagtggcctttggcaagcccagtgatgtcctttcttctccactgagcagtggggcatc

SEQ ID NO: 25314 - DNA, 201 bp, Homo sapiens
tagcaagagcctgagggcccttattgcttgttgagtcttgtgttttccagagtgtggcatgagagattattttaggtggtacacattattatttaggtttrcttaaatatatctgttttaacagcatttagcatataatagaaaaaacataactagcatgagttcatgatataattatttaaaataaagttgaatttaata

SEQ ID NO: 25315 - DNA, 201 bp, Homo sapiens
ggagaacagtggcctggttaagaccatccatgaattacccctgactggtcatggttgtccttgaccaccagaatcaggattttagagtgacatgatcagakggagcagtgtttagtatgggttggagaaaggagactctgggaattgagaaacctgttaggccttgcaggatctcagagttggggtaaagagggcctggac

SEQ ID NO: 25316 - DNA, 201 bp, Homo sapiens
ccaggagcctcgtgctgattttcttgctagttgaatgaggctggaagggccctgaatcttagcacagtaaaaacctttaagccactctgctttctgtcttkctgttacaggcaacaggcagactttgtggacctgagcttcccaacaatttccagtacgggacccaacggcgccatcattcactacgcgtaaggcatgcgg

SEQ ID NO: 25317 - DNA, 201 bp, Homo sapiens
ccagataattctcccaagtgcttggcttttggtttctgttttcactcttggcttaaataacaaaggttaactctaagctgcattggtgttcctcaaaaccrttatgcctttgagttttagggtggactccccacttcaggtttgttctctaaagcaagctggacaaggtgggagctcccctcccctcatggttagcatgct

SEQ ID NO: 25318 - DNA, 201 bp, Homo sapiens
ggcttgaatccaggcctcctgcctgtttaagtagcgtgctcctgtaagaaatggtgctgattaaagatgtttagggtaggttctttcactgggttcctacygctttctgggaccagggctggagttaaagcacatttgtttcttgcaggcatctcctggaaggacaaggttgcagaccttcggttgaaaatggctgagagg

SEQ ID NO: 25319 - DNA, 201 bp, Homo sapiens
gtaattttgagcctgtaatcccagctacttgggaggctgaggcaggagaattgcttgaatccaggtggtggaggttgcagtgagctgagatggtgccaccrcactctagcctgcataacagagtgagactctgtcttcagaagtaaataaataaataaagacaaccggacaggtgcctgtgtgcctctcttaaaatcttcg

SEQ ID NO: 25320 - DNA, 201 bp, Homo sapiens
ggattacaggcatgagccaccatgcctggactttatgtaaattattattattacatttttattatttttttttatttttgagacagagccttgctccatcrcccaggctggagtgcagtggagcgatctcggctcactgcaagctccgtctcctgggttcacgccattctcctgcctcagcctcccgactagctgggacta

SEQ ID NO: 25321 - DNA, 201 bp, Homo sapiens
ggagagtagtggtgtgatcacagctcactgcagcctcagcctccccaagctcaggtgatcctcccacctcagcctcccgattagttgggactacagcccasctgattttttctgatttttttgtagagataaggttttgccatgttgcccaggctgatctgaaactcctgggctcaagcgatccacctatcttggcctccc

SEQ ID NO: 25322 - DNA, 201 bp, Homo sapiens
ccagcagagtgcctggcacgtatctatgcctggcagatctagatgttacacaggcatttgtgggatgcgtaaatgaatgaattttactggtgaggcaatcraggctcacgacagtcaagtggcttggacacttcttgtatagggcttgaatccaggcctcctgcctgtttaagtagcgtgctcctgtaagaaatggtgctg

SEQ ID NO: 25323 - DNA, 201 bp, Homo sapiens
aggacaaggttgcagaccttcggttgaaaatggctgagaggaacgtcatgtggtttgtggtcactgccttggatgagattgcgtgtgagtgctctggtttygctgtttgggcatgttacccgatctctcctttgggtctctgggtatctgtgtgttcatgccattcaactttctgagtggccagggaataagaagaagact

SEQ ID NO: 25324 - DNA, 201 bp, Homo sapiens
ctctgatgagcccttggaggcaggcatgattgtcactgatggtaagtgtccctcacatagagggcatgcgtggatccttgagcctttttgaaagctattcrttgttttgtattttttaattagtttaaagtaaattggcaatacttttcccttccaacaaacttttctgattatagaactgatacatgttcattttagaaa

SEQ ID NO: 25325 - DNA, 201 bp, Homo sapiens
tgagttaggtgaatggcagggtgaggaggggcggggaaccatgatccaagcagagggaacagcattttcagagactctggacagtagagagcacagtgcatgtggaggacctgaagtggttcagtgaggtcagaacatagtgaggccagaatgtgagcaggggccacagaaaagagaggccttgtgggccacattcaggag

SEQ ID NO: 25326 - DNA, 201 bp, Homo sapiens
gatgactagctttttttttttttgtagtttacagatgctttatttggctatgtattgtttatattgttggaattagatgccaacatttaaaaattgggtartttctcatgaacccatatttctggcttcttctgaaatattgaaggttagcaacatgtggcctgcatttcagaaatcagagctgagtaggagctgctgtct

SEQ ID NO: 25327 - DNA, 201 bp, Homo sapiens
ttcacccagctagtaagtggggaaccaggcttgaacagagttctaactgctggttgtaggagatgtctattctgtggctgatgaaagtagaggtaagtgcrgcatacacctcgtattccttgttccctcagaatttataatccaattgtgagactagatgtgtacaacttctgtacaaaagtagaagaggttgcttggcag

SEQ ID NO: 25328 - DNA, 201 bp, Homo sapiens
ctctgcagctgctcccttgaacttcttgcccctgccattaggctaattgggtgtcgcctcatgacaggcctcttgcctcttgcttctgggccttgtcacasctttccctctggactgttttcctgctctcttcgcctatccttggtggcccagtcaaacctctgagcttggtctgatggatctaaggcacatctgagcatc

SEQ ID NO: 25329 - DNA, 201 bp, Homo sapiens
taagcgtatgagctctagagcctctctgggttcagatgccagatttgctacttactagttgcttgacatcaggcaagttacatgaaattctgaagtgtcarttaaactttctgggtctcagtttctgcattcgcaaaaaggagattgtgacagtgtggtatgtaccgcatgggctattgttaggatgaaatgggttcatac

SEQ ID NO: 25330 - DNA, 201 bp, Homo sapiens
tcttcatcacccctctccactctttcttttataatcttaactgtcatttctattgctgtagcttagctgtctgtcttacatacgtggagaaattgtgtttkgtttgtttgcatgttttctgactgctgctcagggctaggtctggggcaaatgcagagggcaggtagttagcatataggtaagcgtatgagctctagagcc

SEQ ID NO: 25331 - DNA, 201 bp, Homo sapiens
gaatcggggtggtggcatgtgaggaagccatgaggctgggtgcataactgttagatctagtaggcagtgggaaggtaaggatagacttggtgaggttcgtytgtgttcattagaatagacaaataagattggtcaacttcaggctgggtgtggtggctcacgcctgtaatccgagcattttggaaggttgaggcaggtgga

SEQ ID NO: 25332 - DNA, 201 bp, Homo sapiens
tcctgttttccattcttttggatatatgcccacaagtgagattgccagatcatatgatccttctatttttaatttttgggggaacttccatactgttttcygcagcacctgtactattttgcattcccaccaatggtacacagcattccagttcttccacttcctcaccaacacttgctattttttgttttgttgtgaggt

SEQ ID NO: 25333 - DNA, 201 bp, Homo sapiens
tatttaagaactgtgaacattagtgtttctggcagctttggtcttggtctggtggtggagtggtcaatttgaagacctaactgggagtggggcagaacgtrgaaggcacttctctctgtggcccacttcgaactggacgttgaattgctgggggcaggctggttttgaaatttgctctcctgttgttgcagacggcagaat

SEQ ID NO: 25334 - DNA, 201 bp, Homo sapiens
ggggtttcaccatattggccaggatggtctcgatctcccgaccttgtgatctgcctgctttggcctcccaaagtgctggaattaaaggcgtgagccactgygcccagcctgtcatctgtttttaatcacccacaaatgttgtctaggtatctttccaaatcaaatatataagtctatgtaattcttttctaggtctgtgta

SEQ ID NO: 25335 - DNA, 201 bp, Homo sapiens
tctgcctcagaagggagagagtgctcgtctccttcctttttatttgggagcgccagaggtttgtcggcttcaaggccaggcctggcaggtcaccactaggyggatcatttcaactccttgtgggggcagttctcaggatttcaactaatagcttttattcccttctccgggcagtgatgtggaagcctgagaaacagctct

SEQ ID NO: 25336 - DNA, 201 bp, Homo sapiens
ttgaggatctagtcacctgtgctgagtgcagggacaggacagataccctgatctcatggaacttatatgcttggggttaagatgggggttgaggaacaagmcaataaacatataaaaagttcattaagaagagaaacattgcccagcatggtggctcttgcctgtaatcctagcactttgggaggctgaggcaggctgatc

SEQ ID NO: 25337 - DNA, 201 bp, Homo sapiens
tcccagttcccagacttcaccaaatcactgcccaaattctcatcaagtgaccagtagtggggaagtgactgaacgctgaggagacaatctttgtggtgacrccatgtgtgtacgtggcagtgatccccaagatatttttacaaggggtcaagtgaaaaatcatacttttttcccttctgtctcacccttgtcttatgtttt

SEQ ID NO: 25338 - DNA, 201 bp, Homo sapiens
ctgaacttttctggccacaaatggctatttggaggtagtatttaagaactgtgaacattagtgtttctggcagctttggtcttggtctggtggtggagtgrtcaatttgaagacctaactgggagtggggcagaacgtggaaggcacttctctctgtggcccacttcgaactggacgttgaattgctgggggcaggctggt

SEQ ID NO: 25339 - DNA, 201 bp, Homo sapiens
tcatgcctgcctgtctgcttgcagtctggttagagtctcatctttgtaattctgaaaccttagggtcgcagagctggcaagggaacgtccatgtctgatayggcctctgtgtgctgtaggtgtctatccccgctcaccagcatcctgaatggatgatcgcctagcttcagactgagctctgatggtttctcaggagctctg

SEQ ID NO: 25340 - DNA, 201 bp, Homo sapiens
gacttcagtttttgtttaactcaggatgaatttcctggctggatactatcctagaattttccgtataattaaaacattaaacagtttcatgccagtggaaraaatttgcctctgcgttggcatttcttcattgtgggtggttggaagcctgtttagaggcggggttctggaggtactggttgtcttttttagttgttcagc

SEQ ID NO: 25341 - DNA, 201 bp, Homo sapiens
ctttgaaccccttgggctgaaatggagagggtacattctcaaaaggaaaaccaaggttcccatcaaaaggagggatggattctgggtagacaaagacaacrttgcttacttcccaaccttagaacttgttccagtttacccttgtctcatccactaggtgtgattgagcatcttgttccttgttttgccccatgctgaacg

SEQ ID NO: 25342 - DNA, 201 bp, Homo sapiens
atttcataaatataaaaacaccaaagctacagattgttgcctgttgctgcagttgatttctctttccctttctctctctctctctctctctctctctcacwcacacacacacacacacacacacacacacacacacacacacacaaaggcaggcatttgaagctggctgttataaatggacaagctagtggcctttaaatt

SEQ ID NO: 25343 - DNA, 201 bp, Homo sapiens
ttcctctggaagttagaagatttcccttaggactcaggctgttgtcttctctgatatcccaaagtcttctcttgctgaggaaatgggaggcatgaatcgcwgttgatttggagttgaaatagtcgtaactcaagtgtgacggcaactccactgtctgttcatcaggctgttaaacctgttcttccccaaggcagcctcaga

SEQ ID NO: 25344 - DNA, 201 bp, Homo sapiens
ctcctcacactgggcctggattacacaggtcagaatcaatggttctgcccagcagggcccctgccattgtccccccacctcttgctattgtctccaacctygtcctccgaatccaagtcgagttggagctgacaggaggattttgccctactctgccccagtgggatatttgaagaagcaggagctttgtttgtttccact

SEQ ID NO: 25345 - DNA, 201 bp, Homo sapiens
attgagcctggcacaaggttagaatctctctgagcctcagcctcctggccttccaggaggagttattgagggaatgaaataaaatacttgatggattagayctttacaaagtataatacacaatacaaaaggagatattgatgttcacagtgtagatgatggtgatgacgtgatgctgatgaagaaagattttgggcccag

SEQ ID NO: 25346 - DNA, 201 bp, Homo sapiens
tttctggcagctttggtcttggtctggtggtggagtggtcaatttgaagacctaactgggagtggggcagaacgtggaaggcacttctctctgtggcccayttcgaactggacgttgaattgctgggggcaggctggttttgaaatttgctctcctgttgttgcagacggcagaatgcctccaaaggtgacttcagagctg

SEQ ID NO: 25347 - DNA, 201 bp, Homo sapiens
gcaagaatagtacaaagagctcttgtgtgtcctcctcccagattcactaagtgtttacatttgtggaataattaatttttaattaactttgttaggccagkccctgagacgaataggaccttgtccctggatgaggtgtaccttattgactcgggtgctcaatacaagtaagtaaaccaggactgctgtggaacttgacta

SEQ ID NO: 25348 - DNA, 201 bp, Homo sapiens
ttaggctctaggctttacctaaaagacctgtttgtgcctcctccattggtggaattgaacaattggagggaagtagcttcctgtgtctacaaggaggttawctgcggggatctgctctctgctttggcatggaagtcactattcttggaagtgacctcccatcttattcccaaaagctgccatgaacagaaacccgacatg

SEQ ID NO: 25349 - DNA, 201 bp, Homo sapiens
agctcttcaaatgatttgtctaaagtaagttttgctgagcaaaaaggttgttgccttggtcttgggtgggtggagccggtttgatttcccaccctactgcyctttgcctctaggaccaccgctgctgtatgccttacacccccatctgcatcgccaaagctgtgaagaattcagctgagtcagaaggcatgaggcgggctc

SEQ ID NO: 25350 - DNA, 201 bp, Homo sapiens
atgcatatatcattttatagcctgattttttcactgtatcagtacactataagcatatacaagcataattttaagtgagtattaaatactccatcatgtgrttataccataatttatttaactgtttccctaaggatgacctttgggttatttgcagtaatcctgtaatttattatgatgctaccatcaaaatcttggttc

SEQ ID NO: 25351 - DNA, 201 bp, Homo sapiens
agaatttctagtaggaccagagttaacatctttaacatttcattttaattagttttatatttctattcctattttgtattttctaaagctggtgattccarctctggttttatttgaatggtagactcccctggagccttgggacttcgtttgaaaaccttgggtctcatccactcccgccatactttatttatttatttt

SEQ ID NO: 25352 - DNA, 201 bp, Homo sapiens
acccccagtggaggtgttgacatataaacttggatcagaccagatacttccgatccctttttctctgataggtgagaaattataggcccagtagattagaygaaaggatagctggatgtggtggtgtgtacctgtagtcccatttacttgggaagctgaggcgggaggatcacttgaacccaggagtccagcctggacaat

SEQ ID NO: 25353 - DNA, 201 bp, Homo sapiens
ctgttgctgccactgccccttaccacatcctaactattggttatggtattgggacttctttcatcatgtctaatattgatgataaagaagtagctgcattkcacccagaacatgaatgtgatcggcctgaaggatgaggaagtaggaagagggaaagtgttgagtgttgatgggggtaggtagcattgtggaggggagtgt

SEQ ID NO: 25354 - DNA, 201 bp, Homo sapiens; identical to SEQ ID NO: 2941

SEQ ID NO: 25355 - DNA, 201 bp, Homo sapiens
catgatcagaaatacttttataggcacaaggaagcacatgtgccaaggccttgaggcaggaatgagctcaggatatgcaaagagcagaaaggaggtgggtrtgtctggagcatggtgaatgggagcagagctgcaagaggactggcaaagtcagatcagctggtaccttgactgggccagagtttggattttatcttaaat

SEQ ID NO: 25356 - DNA, 201 bp, Homo sapiens
ttacgaggttcatttaactaattattggaataagacatttggagaaatttttaaagcattctgctaaggttagggcagctcaggtgtaagtttaaatatartagctttggccttctcttgagtcaggaaatgcctttgaggctggggatgagatagtgaaatacatgctttataagcagtgcctagatttgattttgaagg

SEQ ID NO: 25357 - DNA, 201 bp, Homo sapiens
ggtaaggtggaggtaaaaaactcaagaggtcctctctgctttcttaagaagagcattgcttttatgaaaagggattgtataaagaagtaaaaattacatgkggggtagtaaaattgctccttgctgtggagtcaggcttatctgctttacgaggttcatttaactaattattggaataagacatttggagaaatttttaaa

SEQ ID NO: 25358 - DNA, 201 bp, Homo sapiens
ggagtatgtcagagtgttcattataaagtcatgtggggtcatctctctgacagtgctcttctactaaattgaatttcaagattttctgggaaattggtccygtggccaggctttttttccaccagatttttttctttttacttacattttctctatgatattgctaaaaactttagcaggcaggattttctgaactaccag

SEQ ID NO: 25359 - DNA, 201 bp, Homo sapiens
ccttattgactcgggtgctcaatacaagtaagtaaaccaggactgctgtggaacttgactatggattcgaggcagtggagaaggtggacagctgagctccrgctgagagcactcagctggtcatcgccctctgtgctggccactaatggaatcgttcctgtgtcttgtcatttttttcacccctatttgaaatagcccagt

SEQ ID NO: 25360 - DNA, 201 bp, Homo sapiens
ttccaccagatttttttctttttacttacattttctctatgatattgctaaaaactttagcaggcaggattttctgaactaccagaaaactacaggattasacatctgtccccattctgcaacatgcccctgggttttctttgcaggaatgcttcacatatgtcctcaagggccacatagctgtgagtgcagccgttttcc

SEQ ID NO: 25361 - DNA, 201 bp, Homo sapiens
cccaatccccaagcctctgccttttgggagcctcttcttaggctcagtatggcactggcattctctgcagggtagtcagatgggtgtccctctttcctttytgaagctgcaggaactgtatgcatagcccttgcatcttgatgactaagtttttttttttttggagacaaggtcttgctctgctgcccaggctggagcgca

SEQ ID NO: 25362 - DNA, 201 bp, Homo sapiens
caaatttttgggctctattttaataattctctctggaaatttggtgtgtgtagatttcaaaattccttaattatgaaaatagtaacaagaatgaagaaaarttccataatagagtggatgctttttgggttagggaatcataactaagtggaatttcattataaggaaaaatgagtcttataatattattataggcaagct

SEQ ID NO: 25363 - DNA, 201 bp, Homo sapiens
tgtaaattattattattattttattttattttattttttgagacggagtctcactctgtcacccaggctggagtgcagtggtgtgatctcggctcactgcracctctgctgcccaggttcaagagattctcctgccttagcctcccaagtagctgggattataggcgcctgccactgcgcctggctaattttcgtagttgt

SEQ ID NO: 25364 - DNA, 201 bp, Homo sapiens
tatgtctaggactgacagatcttcctgtggagatggggggaaatgtcattaggtgtggccattgggcttcagcctcagctctgcctggttcaaaccgcttkgctttgcactgggtattttgagttctgtgcatccccatctgttacatgcacagccaacaaaagaacactgtgcttgggcacacacttttttccccctttt

SEQ ID NO: 25365 - DNA, 201 bp, Homo sapiens
ctagtgtaactttttccctcatgtttccttctggtgattgttcatctatgtaaattattattattattttattttattttattttttgagacggagtctcmctctgtcacccaggctggagtgcagtggtgtgatctcggctcactgcaacctctgctgcccaggttcaagagattctcctgccttagcctcccaagtagc

SEQ ID NO: 25366 - DNA, 201 bp, Homo sapiens
tgtcaaattcaagtgatagtgatagccttgccctttactgagcccttgctgggcagtgctaagcagctgacacttgttgcctcattttcattagggtctgrgatgggactggaatccaggcctctttagaggtaggcttttctactgtcctcccctgggcctctggctgccaagtggcctttggcaagcccagtgatgtcc

SEQ ID NO: 25367 - DNA, 201 bp, Homo sapiens
tttcagagactctggacagtagagagcacagtgcatgtggaggacctgaagtggttcagtgaggtcagaacatagtgaggccagaatgtgagcaggggccrcagaaaagagaggccttgtgggccacattcaggagcttgggttctttttctgaacaagaatagtgggaagctattgaacgaatttttcagagggaaccac

SEQ ID NO: 25368 - DNA, 201 bp, Homo sapiens
aggaagggccaagtgagaaagagaagatgaaacaaaatacctgatgcttcttgtttgttgtaggaaataatgaggaaagaaaatagtcctcagactcacarcaggaaacagaggactagaccatgaccttgagatccaggcagccagctgactgaggggtgtgtgcactcaggtgtatgccacacaccctccacatacaca

SEQ ID NO: 25369 - DNA, 201 bp, Homo sapiens
agtttcctcatctgtcatgcctgcctgtctgcttgcagtctggttagagtctcatctttgtaattctgaaaccttagggtcgcagagctggcaagggaacrtccatgtctgatacggcctctgtgtgctgtaggtgtctatccccgctcaccagcatcctgaatggatgatcgcctagcttcagactgagctctgatggtt

SEQ ID NO: 25370 - DNA, 201 bp, Homo sapiens
tacttgaattaagagttgaaggtttctggttaagggtgtgttggaagctttgtagtgtttgtatttcagtttcagttttcttttgcctggagttaggataytatctgtgtgtttactagtaggagacaccgacatcttatagctgagtcaagtttatcttgatgttcttggtcctgggtgctgttcctttgccagcttttt

SEQ ID NO: 25371 - DNA, 201 bp, Homo sapiens
tcagtgtacagaaagattcgacctgctaatgttacttgaattaagagttgaaggtttctggttaagggtgtgttggaagctttgtagtgtttgtatttcartttcagttttcttttgcctggagttaggatattatctgtgtgtttactagtaggagacaccgacatcttatagctgagtcaagtttatcttgatgttctt

SEQ ID NO: 25372 - DNA, 201 bp, Homo sapiens
ggagctcagaatctcacggagccaatctgagaacagccactaacactgggagcagtttgcacctccagtgggtgagtatgagaggtttttggtaaggcccrcaggggctggagcagtcagcgtcccaggaactcccacgaccaagccccacgctgagggataggagccaaagaggagcaggacaggtacagcggaggcaaa

SEQ ID NO: 25373 - DNA, 201 bp, Homo sapiens
aggagctcagaatctcacggagccaatctgagaacagccactaacactgggagcagtttgcacctccagtgggtgagtatgagaggtttttggtaaggccyacaggggctggagcagtcagcgtcccaggaactcccacgaccaagccccacgctgagggataggagccaaagaggagcaggacaggtacagcggaggcaa

SEQ ID NO: 25374 - DNA, 201 bp, Homo sapiens
gaatagaaactattggattttagatagctttggtgagagcctttgggagttctcccttgctaaagatgtgtcctgtagattggtcagttgggatgaagcarttgaggaaaaagtgagcttttaatgtacctcctctaatttgtaagaggcacacatgaatttatctcaccagatgatttataagcaattttctcataggtt

SEQ ID NO: 25375 - DNA, 201 bp, Homo sapiens
ttgggcttggcttagtcaaagggtgatgttttgtcagggactgactctgccaatgtgaatttttggctttgtttgtggttcctcctcctggaagacatgawtcagattttcctaaactctttggaccctactccattctcctggagtcagcttcctgttttgttttgtatttcataaacaggctttctcttggggtggggt

SEQ ID NO: 25376 - DNA, 201 bp, Homo sapiens
agagtgggtgttcctggttggtgggggacttccctctaccttgagggaaagtgattcagggatctaggctcttccatcccatagtaccaccattttagctrgtggaaggggacagagtatggacagggcacactcatttgttagagccccgacccaggtatcacctctcacccacatttcattggtaagaataagtcatgt

SEQ ID NO: 25377 - DNA, 201 bp, Homo sapiens
gagtaaggagaaagggtgttgcacaccttttctctcagcttgtgatcttagcacatgggggcctttgctgttgacctgtgtagccagttgttaaagatgtrgtggtgaataccgtgtctgtccttctcttccctgcagtgcgactggctcaacaattaccacctgacctgcagggatgtgattgggaaggaattgcagaaa

SEQ ID NO: 25378 - DNA, 201 bp, Homo sapiens
ttcgtagctcctgtgatcctgacagaaaggtggaggtgttgatgctcacacagagagtttgagctcacctgtcagacctagtttctggtcttggctttgcrgctactgagttatatggcctatggtaagttatctttgtttttttattctgtaaaatgaatgaataggattaccttaaggtaaccttggctaggcacggtg

SEQ ID NO: 25379 - DNA, 201 bp, Homo sapiens
ttctcaggagctctgattgttagaaagttcttccttgtgctgtgctgaaatctgaaccctccagtaacttacctattggtttctgtttcacgttctggagscacacataataaatttaatctctaaagcgctgtacaaatacaattaagtggctctttatgtctttcaggtcaccttcttgactcctttgcccgttcagct

SEQ ID NO: 25380 - DNA, 201 bp, Homo sapiens
atgggctcctgttttctttgccttcttctgtcttgttcataaccccagtgatagtgtctctcgtgaaacagcccttatgctgtagaccaagaatgtgtgtrtcaggggctgacgtcactcccagtttatttagccatccctgcattcacactttgtttcattttttaaaataacttcattggggtaaaatttatgtaccat

SEQ ID NO: 25381 - DNA, 201 bp, Homo sapiens
cttcagaaaattattaaaaaaaaaaaatcaggttggtgtgatggcacatacctgtagtcctaggtccttgggagattgaggcaggagaattgcttgagctyaggagtttgaggctgccataagctaagattgtgccactgcactccagcctgagtgacacagcaagaccctgtctctaaaaaaatgataaccttccacctc

SEQ ID NO: 25382 - DNA, 201 bp, Homo sapiens
ccgggttaggattgggcccagtaccccctgtgcaccattctcctgaccacttatggtattggatgacacatgtggatggctcccaggagaggacaaaccakatatgaaggtcacagggcctgagtggaagttggtgcagcctcctgtctgccctttagtactgggccagtgcttcctttcgggattcttaggatttatttt

SEQ ID NO: 25383 - DNA, 201 bp, Homo sapiens
atgatttataagcaattttctcataggttcccaaaggtggtgtgacagagatctcagctgctgacaaagctgaggagtttcgcaggtaaggatccatttgrggggacccaggagcctcgtgctgattttcttgctagttgaatgaggctggaagggccctgaatcttagcacagtaaaaacctttaagccactctgctttc

SEQ ID NO: 25384 - DNA, 201 bp, Homo sapiens
gctatcatggctcactgcagccttgacctccagggctcaagtgatccaccccacctcagcctccagagtagctgagactacaggtgcacaccaccatgccygactaatttttgtattttttgtagaaacggagttttgccatgttggaaactttattcttttgcatgtggatattcacttgtcccagcaccatttgtggaa

SEQ ID NO: 25385 - DNA, 201 bp, Homo sapiens
gccatcttaccaatagtaaaccttccaatccatgaccatggaatagcttttgtttatttaggtcttcttcagttactttcagcagtcttttttagtttttrtggtgtacattttgcacttcttttgttaaatttatttctaactattttttgtttttgatattgtaaatggacttttcttaattttatttttgaattgctc

SEQ ID NO: 25386 - DNA, 201 bp, Homo sapiens
aattcaaaaccttttctatggccccacagtaggccccctggtgcctcaatgatgttgtctctgaaccacttacctccccatcccctgatacaatcacactgcgctgaccttcttgcttttcctcaggtaaactagacatactcctgcctcatggcctttgcacttgctgttgtcctggaacattgttcccctagccgttca

SEQ ID NO: 25387 - DNA, 201 bp, Homo sapiens
attcaaaaccttttctatggccccacagtaggccccctggtgcctcaatgatgttgtctctgaaccacttacctccccatcccctgatacaatcacactgygctgaccttcttgcttttcctcaggtaaactagacatactcctgcctcatggcctttgcacttgctgttgtcctggaacattgttcccctagccgttcac

SEQ ID NO: 25388 - DNA, 201 bp, Homo sapiens
atgggttgccagaaacctgaattctgaaaagtggtgtattactgtatttctatcccagtaagccagtactgctctaacgactactaaggagaaccatgtgttttttttttttttagctgactgaaaaattgatctcttgaagtacataagaaaccatgcccgtctaatctctgtttggaagatcagtgctataattgcatg

SEQ ID NO: 25389 - DNA, 201 bp, Homo sapiens
tgggcaagtacttaactccttttaactcctgttcctttatgtgtaaaatgagaatagtgaaacctcccttggaggattgttgtgagaattagccactaatrtatgtaaagcccttagcgttccctcagctgtgcaacagagaaacaaaccactacctctaaagctattgatgctggaagagcatctgtgcccgtgttaaga

SEQ ID NO: 25390 - DNA, 201 bp, Homo sapiens
gcctctcctcacactgggcctggattacacaggtcagaatcaatggttctgcccagcagggcccctgccattgtccccccacctcttgctattgtctccarcctcgtcctccgaatccaagtcgagttggagctgacaggaggattttgccctactctgccccagtgggatatttgaagaagcaggagctttgtttgtttc

SEQ ID NO: 25391 - DNA, 201 bp, Homo sapiens
acaaagtttttgtccccagaagttttggaatctagtgacaagcagttaggaattggtagggtcattgctctgaaggaggtgagtacaggatacaagggaarggaacagattttgtaagcagaggaggaggagagcttaaatctgcctgggtaagtcagggagggtcttcaagaggagatgccttgcaagccaagtgagtct

SEQ ID NO: 25392 - DNA, 201 bp, Homo sapiens
gatgaggaacatagccaagaattaaaggagtggagagagaaattgagacctaggaaaaaggtaattttaaaagctttaattaaaatgatatgtgtgtactygtccgtctacccagctattggctctttacctactgtgtcaggtacagtgtcaggggcaggaaacatagagatgaaaagacaaagtttttgtccccagaag

SEQ ID NO: 25393 - DNA, 201 bp, Homo sapiens
tacaggtgtgtgttcagatctcagtactgacacttactgattaattttctcacttaccatttctaggcctagttttcctaatttgtaaaatgagagtgatrctacctatttggtgttgtttatatagcagttatctagtacctgagctatagtaatggttcagtgaatggttgctgttgctattattgtttcttgttttta

SEQ ID NO: 25394 - DNA, 201 bp, Homo sapiens
atttcttttccatttagagggaaatagtttattttcttctaggtttttgaaataagtgataagttaaatatatgggaatttttctcctaggaaatttaaargttattcgagagagggctgatttaggaccttacatagaatgtacagcccatctaaaatgtttaagatttcagagtagtgtataaatgtgggtatctatat

SEQ ID NO: 25395 - DNA, 201 bp, Homo sapiens
tcattctctgtgttctttatccccttttgtctcctgaaatgtagacatttctcagttttgcccctttagtaaagaacagtctttaccttgatgattttatygctagtcatggcttcaactgttgcagatagacaactccaaaacttaaatggtagcagttgtatagagcatgaattgtaaagtcatacaggtgtgtgttca

SEQ ID NO: 25396 - DNA, 201 bp, Homo sapiens
aagcaacagctcatgagaggtaatttttttaaaattaagaaatactgcaaaatgtagaattccttatgacagtagaagtgaatgtaaacatataacccttraaatttcttcttgccctgatgatgctggaaatatatctgaataattttgtgtactcattatgccttatagttgttagtatacctaatggtcgtgtgttag

SEQ ID NO: 25397 - DNA, 201 bp, Homo sapiens
tccactgctgatactagcagtattgacttgaatttatccatctctagctttctaagtaaaactaaagacagtggatcgatatctttacaagtaagtgtacrtgagtcattgtttgggttttcctttgccattttctcaattcagagtttatgtgaaattgatgtcttgaaaataaaacagcattaaattaatgtagtatta

SEQ ID NO: 25398 - DNA, 201 bp, Homo sapiens
tctcctctcacctggcttttgtgacacagctctgctcattctctgtgttctttatccccttttgtctcctgaaatgtagacatttctcagttttgcccctktagtaaagaacagtctttaccttgatgattttatcgctagtcatggcttcaactgttgcagatagacaactccaaaacttaaatggtagcagttgtatag

SEQ ID NO: 25399 - DNA, 201 bp, Homo sapiens
tagtcccggctactcaggaggctgaggcaggagaatggcatgaacccgggaggcggagcttgcagtgagccgagaccgtgccactgcattccagcctgggygacagagcaagactctctttcaaaaaaaaaaaagaaaaattttacaattgaaattagagaaacagtttaattttgttacaaatagtaggaaaaagaaaag

SEQ ID NO: 25400 - DNA, 201 bp, Homo sapiens
tgggcgtggtggtgggcgcctgtagtcccggctactcaggaggctgaggcaggagaatggcatgaacccgggaggcggagcttgcagtgagccgagaccgygccactgcattccagcctgggtgacagagcaagactctctttcaaaaaaaaaaaagaaaaattttacaattgaaattagagaaacagtttaattttgtta

SEQ ID NO: 25401 - DNA, 201 bp, Homo sapiens
aaaaatgttgaacaaaagaaaaccctttgatatttttgcaggttatgttgtttattgaacaagtttgtatatagaaattttacagttgaggctgggcgcgktggctcacgcttgtaatcccagcactttgggaggccgaggtgggcgaatcacaaggtcaggagatcaagaccatcctggctaccacggtgaaaccccgtc

SEQ ID NO: 25402 - DNA, 201 bp, Homo sapiens
atacccctggaacacactttctattattattttgttacccccacacttgaagcccttagtctgcgacagacactgttaaatgttgagtatacaaagatgartaaaatggcttctcattctcaagaattttagaaccatgtcaaaaatacaggtgtttatagatacttctaacagaattctaaagctttttataattttgag

SEQ ID NO: 25403 - DNA, 201 bp, Homo sapiens
gttaggttattatgtaactccatcatagtgttttaggttgacctatttatctgggggaataaagcaggaaaaaattgctttgttgtgtgcagcaagtatayccctggaacacactttctattattattttgttacccccacacttgaagcccttagtctgcgacagacactgttaaatgttgagtatacaaagatgagtaa

SEQ ID NO: 25404 - DNA, 201 bp, Homo sapiens
gagggtaaatagtaaatattgttgacttaaaaaaatgttgttaaagcgattgggtaaatttaattttgctttatagaaggactacttgtaatatattaatwaaaaattgtcaattttataggtgggcaaataaaatgacaaatcttgaggcaattactgttaggttattatgtaactccatcatagtgttttaggttgacc

SEQ ID NO: 25405 - DNA, 201 bp, Homo sapiens
tgaaggcagaactctctttcattaattttagtaaccttctaagtagtatagtgtccaccatttactaagtgcttaataaaggttttctttgaattgaactcttactgtgtttaatttagacataaatacagtaatatgaacaaaaattgcatagatgagaaattacatttactgttttagtggcactggcttatatttacc

SEQ ID NO: 25406 - DNA, 201 bp, Homo sapiens
gagatggagattgcagtaagttgaaatcgtgccactgccttctagcctgagtgatagagtgagactccgtctcaaaaaaaaaaaaaaaaaaaaaaaaaaaagtaataatgtagtgacctgacatttgctttaaatttcaattaaaattttttattacgaagttttcaaacacacagaaagtacatgtacctactacccaga

SEQ ID NO: 25407 - DNA, 201 bp, Homo sapiens
ggagatggagattgcagtaagttgaaatcgtgccactgccttctagcctgagtgatagagtgagactccgtctcaaaaaaaaaaaaaaaaaaaaaaaaaaaagtaataatgtagtgacctgacatttgctttaaatttcaattaaaattttttattacgaagttttcaaacacacagaaagtacatgtacctactacccag

SEQ ID NO: 25408 - DNA, 201 bp, Homo sapiens
gcttgctggcaaccccaaatgctggtgaggatgtggagcaacaggaactcattcattgctggtgtgtatgcagactctttcagccattttggaagacagtrtggcagtttctttttttttttttttttttttggagacagagtcttgctctgtcacccagactggagtgcagtggcgcaatttcggctcactgcaagctcc

SEQ ID NO: 25409 - DNA, 201 bp, Homo sapiens
gggagatggagattgcagtaagttgaaatcgtgccactgccttctagcctgagtgatagagtgagactccgtctcaaaaaaaaaaaaaaaaaaaaaaaaaaaagtaataatgtagtgacctgacatttgctttaaatttcaattaaaattttttattacgaagttttcaaacacacagaaagtacatgtacctactaccca

SEQ ID NO: 25410 - DNA, 201 bp, Homo sapiens
cgtgagccaccgcgcccggccaacaatttggcagtttcttaaaaaactaaacatactcttacgatatgatccagcagttgtactccttgtttattacccaratgagttgaaaaacatgtctacacagaaacccgcacatacatgtttatagaagctttatccataattgccaaaacttggaaacaaccaacatatccttaa

SEQ ID NO: 25411 - DNA, 201 bp, Homo sapiens
tgggagatggagattgcagtaagttgaaatcgtgccactgccttctagcctgagtgatagagtgagactccgtctcaaaaaaaaaaaaaaaaaaaaaaaaaaaagtaataatgtagtgacctgacatttgctttaaatttcaattaaaattttttattacgaagttttcaaacacacagaaagtacatgtacctactaccc

SEQ ID NO: 25412 - DNA, 201 bp, Homo sapiens
attatgcctagtgttccattaacggaacgctaagcttgtgggggttatttatatcctactgcccaaggtaattgccaaggtctgatttttcacaaaaaaaatttgcaacctctagcataaatgggttaatttcacacacaaaaatttgcaacctccggcataaatgggtttcaacctccagcagaaagggctttggaaaca

SEQ ID NO: 25413 - DNA, 201 bp, Homo sapiens
ccagggactggtttcatggaagacaacttttccacagactggatgcggggatgttttggggataattcaagtgtgttatgtttattgtatactttgtttgtattattactacattgtaatatataatgaaataattacacaactcaccataatatagaattagtgggagctctgagcttgttttcctgcaactaaatgttc

SEQ ID NO: 25414 - DNA, 201 bp, Homo sapiens
accagggactggtttcatggaagacaacttttccacagactggatgcggggatgttttggggataattcaagtgtgttatgtttattgtatactttgtttgtattattactacattgtaatatataatgaaataattacacaactcaccataatatagaattagtgggagctctgagcttgttttcctgcaactaaatgtt

SEQ ID NO: 25415 - DNA, 201 bp, Homo sapiens
caccagggactggtttcatggaagacaacttttccacagactggatgcggggatgttttggggataattcaagtgtgttatgtttattgtatactttgtttgtattattactacattgtaatatataatgaaataattacacaactcaccataatatagaattagtgggagctctgagcttgttttcctgcaactaaatgt

SEQ ID NO: 25416 - DNA, 201 bp, Homo sapiens
gcaccagggactggtttcatggaagacaacttttccacagactggatgcggggatgttttggggataattcaagtgtgttatgtttattgtatactttgtttgtattattactacattgtaatatataatgaaataattacacaactcaccataatatagaattagtgggagctctgagcttgttttcctgcaactaaatg

SEQ ID NO: 25417 - DNA, 201 bp, Homo sapiens
caatattttatctttgggtttctctttttttgttgttgttttgtttttgttttgttttgttttgagatggagtccctctctgtcgcccaggctgcagtgcygtggcgcaatctcggctcactgcaacctccgcctcccaggttcaagcaattctcctgcctcagcctccggagtagttgggattacaggcacgcaccaccg

SEQ ID NO: 25418 - DNA, 201 bp, Homo sapiens
tttgttaatccaagtgattaagttcatctttttttttttaaggtgtgtttgtgtaatctatttgaaatgtgagtgctcttttcatacctgaaagtaatttmtaattataaattccatgtgaatgttattgtatttggcttttgaagttagggaatttagtgaatgtgtaataacattaacattttgtttgttttgaggtaa

SEQ ID NO: 25419 - DNA, 201 bp, Homo sapiens
aagggggttctactagcttaaaaaacaacagcaacacactagagtttggaaaccactgatctagttcaaatccttcattttacagatgagaaagaggtccrtctgttaagtgacttgttccaggcctcaagaaactcaacatttgtataattattcttttcgtttacaaaaagtcattcagatatattctcacctgggagg

SEQ ID NO: 25420 - DNA, 201 bp, Homo sapiens
taagatgggtgaattcttttttttttttttggtgaattggagtctcgctctgtctccaggctggagtgcagtggtgtgatctcggctcactgcagcctccrcctcctgggttcaagcgattctcctgcctcagcctcccgagtagctgggactacaggcatgcaccaccacgcccagctaatattttgtatttttagtaga

SEQ ID NO: 25421 - DNA, 201 bp, Homo sapiens
tcttttaaaaatagtattatttgacatataaatgaagatatgtaatatccttcacaatattttatctttgggtttctctttttttgttgttgttttgtttktgttttgttttgttttgagatggagtccctctctgtcgcccaggctgcagtgccgtggcgcaatctcggctcactgcaacctccgcctcccaggttcaag

SEQ ID NO: 25422 - DNA, 201 bp, Homo sapiens
atctctgacccttcgttactcaaacttaaacctttgttttggggggagcttcctgcctactgtacatttccaccattcctttcttccatccatacaatcartcaaggaaatatgtatttagctatgtgccaaaggaagtgaaatgactaaatgagttcatagtgtggctttttgtttgtttgtttagacagagtctcactc

SEQ ID NO: 25423 - DNA, 201 bp, Homo sapiens
tagatacgtttataattttatgatctttcaacaaggtcagttgagtttatcacctgtagttcagcatcagtgctgcaagtaattcttcgctggttgtcttyggacctttaagaaagagaatgatacatagggttattaagcaactaattaacctttgtgtggtgtaatgtccctttctgcactgagattatgcatgttctc

SEQ ID NO: 25424 - DNA, 201 bp, Homo sapiens
aaatgtatgcaggctgccttctgaagtgtcagttttatgagcaaatcttcttagaaaggaaaaacaaaagctcaagctagttctttttaagttctttttayatggtatgtaatagttctagcttctaaacttgtaaaaatgaagctatgattcatttcctaattcatggcccttggtttttatagaggaaaacttgaatct

SEQ ID NO: 25425 - DNA, 201 bp, Homo sapiens
gaacaagagaaagagttgtccaaatttcagaatatgctgaagaaccgaaagaaggaggtaagtgtaaactactgtttttaattactaaagctttttttttwaaaaaattgttttaagactatctaaggatttaggaatactaataatacttgagagttaaatagcacctattcattctttcattcggtcttctcaacagtc

SEQ ID NO: 25426 - DNA, 201 bp, Homo sapiens
tattgagtatggtttttagtatattttgcaagaagatgtggagagtttcaaaatgatgtagacagttttgttgtcatattctgaattttttgtcagattcwaaatttaaaatttcttttccatttagagggaaatagtttattttcttctaggtttttgaaataagtgataagttaaatatatgggaatttttctcctagg

SEQ ID NO: 25427 - DNA, 201 bp, Homo sapiens
tggttgcttggtgtgattaggttcctttattggacatatctagatgcaacattagcaagaatcaacaatgtatgagagaattagaaattgaaagaatgatstctttttaagcacatttagggtgtaaacaatccttgatttaccattggcccatacagtcacagacattgctactgccatgagaaccattgtggggaaaac

SEQ ID NO: 25428 - DNA, 201 bp, Homo sapiens; identical to SEQ ID NO: 2955

SEQ ID NO: 25429 - DNA, 201 bp, Homo sapiens
aaagacttaaaatgctttttctccccattgaatacaatgaacaatgcttaaaagttctcattaatgcttttgtgtgattatttcaagcggattttggagtrtcagctaaaaacacgaggacaattcaaagaagagattcctttattggtacaccatattggtatgtattcagttttatgaatttatagtattagtcatgtc

SEQ ID NO: 25430 - DNA, 201 bp, Homo sapiens
tagcaagacatacactgtcctaaaggttgctttagtataatttctatttttcacactatagaaaaaatgttaatgactcttagtttaattgtgccacatakcactagttggcatttattttgaagtggatagactggtctgcttttagagttaccattttttattttcaattttgaaggatttgtcatctgaagataaggt

SEQ ID NO: 25431 - DNA, 201 bp, Homo sapiens
tataatggatgtccgtacgcacatagtatatttccatgacattctcttaggttaaatttttaggagaattgttagagcaaaacaaatgattatttattaatgcttattttgaaattacaaaatttgtgcacatttatttttcaattttttaattgtagtaaaatacacataaaatttactgtcttgactattttttatatc

SEQ ID NO: 25432 - DNA, 201 bp, Homo sapiens
atataatggatgtccgtacgcacatagtatatttccatgacattctcttaggttaaatttttaggagaattgttagagcaaaacaaatgattatttattaatgcttattttgaaattacaaaatttgtgcacatttatttttcaattttttaattgtagtaaaatacacataaaatttactgtcttgactattttttatat

SEQ ID NO: 25433 - DNA, 201 bp, Homo sapiens
catataatggatgtccgtacgcacatagtatatttccatgacattctcttaggttaaatttttaggagaattgttagagcaaaacaaatgattatttattaatgcttattttgaaattacaaaatttgtgcacatttatttttcaattttttaattgtagtaaaatacacataaaatttactgtcttgactattttttata

SEQ ID NO: 25434 - DNA, 201 bp, Homo sapiens
taattttaattttaatatttttttgagacagggtctcactctgtcgcccaggcaggagtgcagtgccgcgatcttggctcactgcaacctccgcttcccaygttcaagtgattctcatgcctcagcctctggagtagctgggattacaggcgcccgccaccacacccagctaatttttgtattttttagtagagatggggt

SEQ ID NO: 25435 - DNA, 201 bp, Homo sapiens
agtgtgagcaaagttaataaatttcatttctctttgtatgttgtcattttagcatctcaattttaaagaaatgtactggaaatcaagatattttattttttaattttaattttaatatttttttgagacagggtctcactctgtcgcccaggcaggagtgcagtgccgcgatcttggctcactgcaacctccgcttcccac

SEQ ID NO: 25436 - DNA, 201 bp, Homo sapiens
aagtgtgagcaaagttaataaatttcatttctctttgtatgttgtcattttagcatctcaattttaaagaaatgtactggaaatcaagatattttattttttaattttaattttaatatttttttgagacagggtctcactctgtcgcccaggcaggagtgcagtgccgcgatcttggctcactgcaacctccgcttccca

SEQ ID NO: 25437 - DNA, 201 bp, Homo sapiens
aaagtgtgagcaaagttaataaatttcatttctctttgtatgttgtcattttagcatctcaattttaaagaaatgtactggaaatcaagatattttattttttaattttaattttaatatttttttgagacagggtctcactctgtcgcccaggcaggagtgcagtgccgcgatcttggctcactgcaacctccgcttccc

SEQ ID NO: 25438 - DNA, 201 bp, Homo sapiens
gaaagtgtgagcaaagttaataaatttcatttctctttgtatgttgtcattttagcatctcaattttaaagaaatgtactggaaatcaagatattttattttttaattttaattttaatatttttttgagacagggtctcactctgtcgcccaggcaggagtgcagtgccgcgatcttggctcactgcaacctccgcttcc

SEQ ID NO: 25439 - DNA, 201 bp, Homo sapiens
aagctccttggggacaggggccgtgaactaattaattaaaaaatgtcttacagtgagggtaaatagtaaatattgttgacttaaaaaaatgttgttaaagygattgggtaaatttaattttgctttatagaaggactacttgtaatatattaattaaaaattgtcaattttataggtgggcaaataaaatgacaaatcttg

SEQ ID NO: 25440 - DNA, 201 bp, Homo sapiens
aagcttaataagaaacaaatgatactaggaagcagaacttgatgttatattctcacaattttccaagagtatttaaaattggatacatggttcgaagactrtatgaattagaaaagtgatttttggtatatttctcttaaagaccattaaaactcttcgagctcacttttcccatatatctgaaaatatgaatgatttgag

SEQ ID NO: 25441 - DNA, 201 bp, Homo sapiens
ttgtcaacactttttttttttctatgctacatccatcctactgggtgtgaagcggtaatgggtatgaatttgttgtattatttgctcttgctttccctagkttagcctttgtttctaaagtttttcttttttattttaaattttttctggagctctgtcgcctttcagaatttttctaattctgacttacatggctctttt

SEQ ID NO: 25442 - DNA, 201 bp, Homo sapiens
actcttagtttaattgtgccacatagcactagttggcatttattttgaagtggatagactggtctgcttttagagttaccattttttattttcaattttgraggatttgtcatctgaagataaggtggtattaaatgtattgataatgggatctttagcaggtttttttgggagatggtagaaagagatggtcaagattaa

SEQ ID NO: 25443 - DNA, 201 bp, Homo sapiens
gtgatgtgatcatagtttactgcagccttgaacccctgggctccagggatccttccaccttatcctccctagtagctggaactgcaggcatgcaccaccaygcctggcgaatttttaaaaatttttttgtagagatgaggtcttgctctgttgaccagactggtcttgaattcctgggtgcaagtgattcttctgccttgg

SEQ ID NO: 25444 - DNA, 201 bp, Homo sapiens
attgagtctttcaaaagcagtattgagtatggtttttagtatattttgcaagaagatgtggagagtttcaaaatgatgtagacagttttgttgtcatattmtgaattttttgtcagattctaaatttaaaatttcttttccatttagagggaaatagtttattttcttctaggtttttgaaataagtgataagttaaatat

SEQ ID NO: 25445 - DNA, 201 bp, Homo sapiens
cccagtttacagttgagggaactcaagcacaggaaggctgagtgaccctcccaaggtcacacacctgggtagtggtagagccaggattctcatccagatawgtttgggtacatgtttcacacactgattcgctgcaccatgctgcctctcatatttaagctacctacttgtgctgcaacttaaactctcgtcagcttgact

SEQ ID NO: 25446 - DNA, 201 bp, Homo sapiens
aggtcttatgaaagttatagcgctctttacccaagataggaattatttaaaaagtctagagatgaagtccaaatttgtatattttggaaggctattcaaargacaaaatatattcagaagtcaagttgataccagtgactatagtcatttcactttactttgtcaagacatttaaacagatggtgtactaaattttattct

SEQ ID NO: 25447 - DNA, 201 bp, Homo sapiens
cttaatgtggttttattactacttaaatatgtgaaacatggagaactaactccatgctggtttttaaaaaacacttttttaggtaaatactcatttttctrtaatttctaaatatcagcacctaattgaatgctttaaaaagaagataagaaagaatgaatttttattttcaaaaaggcatgctttttaaagaccaatttc

SEQ ID NO: 25448 - DNA, 201 bp, Homo sapiens
gaagaaaaatagcaaatggtaactttaaatggtagttcaaacatgtattgcttttaagcttgacaacataagcaactttaaaactggattttaaatattamgtaccttgtttttctttttggttcacaatccagcagttaaacaaatagactatttttacctatatagagtttaaagcaacccaatctaggttatgataaa

SEQ ID NO: 25449 - DNA, 201 bp, Homo sapiens
ctgatatttgaaatctttttatcaacagaagttatatttttaaattaagattgggatttgttattccatttttgtttttaacatttgtttagttcagtagwgcccatcctctttggcaccagggactggtttcatggaagacaacttttccacagactggatgcggggatgttttggggataattcaagtgtgttatgttt

SEQ ID NO: 25450 - DNA, 201 bp, Homo sapiens
taatatgagggtgtaatttttttagaatatgaaaccagtatggaactttcagacaacttatgtttcccagtatccctcatttgtttatgtaatgtggccawgctctactgatgattcatgaaaataaaaacagtgattttaggtgatcatgactgatatttgaaatctttttatcaacagaagttatatttttaaattaag

SEQ ID NO: 25451 - DNA, 201 bp, Homo sapiens
taaaaattattcctgtactcaccacccagggaataccttctgttcaaacaagagtaatatgagggtgtaatttttttagaatatgaaaccagtatggaacwttcagacaacttatgtttcccagtatccctcatttgtttatgtaatgtggccaagctctactgatgattcatgaaaataaaaacagtgattttaggtgat

SEQ ID NO: 25452 - DNA, 201 bp, Homo sapiens
gcatcttgtgatcacccaaatatagtcaagcttctagatgccttctattatgagaacaatctttgggtaagtattttctgttgatctaaaggagtagccaraatgagttaattgtcctaaagagatgtttatgaattattaaaacctattttatgtcttatctcttctatttagttacttgtgtcacttgaatgagagttg

SEQ ID NO: 25453 - DNA, 201 bp, Homo sapiens; identical to SEQ ID NO: 2951

SEQ ID NO: 25454 - DNA, 201 bp, Homo sapiens
gggcacctacttgtgaggtagctgatcagctcgctccggaagctgtcgctgttttcagctgcataggttgccagggctcctgagacacccgggggccctcraggccctgggggaccaggaggtcctggagggcctgggatgaatgacaagccggcagctgggcagaaggaagagaaagaaaggtcggggtagtgctgcgga

SEQ ID NO: 25455 - DNA, 201 bp, Homo sapiens
cttctttagagacttttagtatttgtttgttggatctttgcctgttgtccatgtttgtaactttttctcaagtccttttttagcttgctttcttttttatygtaggaaaatatatacaacataaaatttacctttttgatcatttttaagtgtacatttctgtggtattaagtacattcccattattatacaaccattacc

SEQ ID NO: 25456 - DNA, 201 bp, Homo sapiens
ctgacccaccagaggctgtgatttgaaatgctgtcccctatgtatatgaagcccttagcacagtgcatagccatagcatgcattaattcatatttatgttkaggctgtcttttataaatagtgtgtcaagagaatgagaagacaagccacagactgagaaaatatttgcaagacacatatttgataaaggaaagttatcca

SEQ ID NO: 25457 - DNA, 201 bp, Homo sapiens
caccacaccgtgctaatttttgtattttttggtagagacagtatttcgccatttgtccatgctggtctcgaactcttgggcccaagtgatctgcccacctygtccttccaaagtgctgggattccaggcatgagccaccgcgctcagccttctcatctttcttattagtttactttttcccacagtactaattgctaatat

SEQ ID NO: 25458 - DNA, 201 bp, Homo sapiens
atatgaatgtataatccactgttatctgattttaatcttgatgggagcttatagttttaagtagtaatgccaatgtttgttagaaaacttttaggacatamaaatagaggatggtatataagctttgtgcttacaaaaagtatgcccattaaaacgctattatttctataaagtgcagttagaagaaaaatagcaaatggt

SEQ ID NO: 25459 - DNA, 201 bp, Homo sapiens
aggtaattgccaaggtctgatttttcacaaaaaaaatttgcaacctctagcataaatgggttaatttcacacacaaaaatttgcaacctccggcataaatrggtttcaacctccagcagaaagggctttggaaacagacctggatttaaattctgtttctgcttcttactagctacatgacctgggaaagccttttaaccc

SEQ ID NO: 25460 - DNA, 201 bp, Homo sapiens
ctccttggttaagttaattcccaagtgttttattctctttgatgctatcgtaaatgggattgttttccttactatttaaaagtctttatttttcttgaatyaatttccagacgtggtacattttttgtcttattttaaaatatatttttgaaattgtctttttgtgttctgtttttcatcttttccaactatgcaatctat

SEQ ID NO: 25461 - DNA, 201 bp, Homo sapiens
aatgtacttcattctgtattttatctgctataataaatcatagcttactaaacttacttttaagagtgcttatattaccaatttttaagttgacaggcttrgcttaacttgtcagcaaaggggaatattctaatcctattcaagatcatcagatacattcatttttaccacaccgtgtataaaatggtgtgtttatgaaaa

SEQ ID NO: 25462 - DNA, 201 bp, Homo sapiens
tgttcttttcattcttttttaaagtaatagtcatcctagtgggtgtaaggtggtacttatatagttttgacttatatatctctaatattagtgacgttgarcatcttttcatgtgcttattggccatttgtatatcttcctgggagaaatacctgttcggctcctttgcctatttttgaattgggctagttgtgggttttt

SEQ ID NO: 25463 - DNA, 201 bp, Homo sapiens
agtaagagaggttttagtgacctgtttaagttcacctcaagagaggttttaatgacctgttcacagactacccctaaatatccagctaaaccttgaatcargtcttcaaattgagtttaatccatcttaaggtctaccattgtccttaatgcaacacatttaagtccttatataaaagtattttttagaaaacttactatg

SEQ ID NO: 25464 - DNA, 201 bp, Homo sapiens
attttttctatgtagatacccagttgtcccagcaccatgtactttaaagaccgtccttttcttactgctttgcaatgcttccatcatataatggatgtccrtacgcacatagtatatttccatgacattctcttaggttaaatttttaggagaattgttagagcaaaacaaatgattatttattaatgcttattttgaaat

SEQ ID NO: 25465 - DNA, 201 bp, Homo sapiens
ggggtttcgccttgttggccaggctggtccccaactcctgggcttaagctatccgcctgccttggcctcccaaagtgctgggattataggcgtgagccacygtatccagccaagatattttatttttgcttgtaaagcatgttttatttccagttggtatgttgtatggcatgagctttataaagtctcttaaaattttaa

SEQ ID NO: 25466 - DNA, 201 bp, Homo sapiens
tgatccatagaggtatttttaaattagaaaataaatttattagaaaacaaaggttgaaaataaacagaatgaacaaactctatttttgcttgccccaaaayctcaataaaaactgttatctggccaggtgcagtgactcatgcctgtaatcccagcactttataagtttgaggcagtaggattgcttgagcccaggaattc

SEQ ID NO: 25467 - DNA, 201 bp, Homo sapiens
ttctagaattttttaataagtggaaacatacaatatgtattcttaatatgtatggctttttgcacttagcacagggtttctcagtgttggcactacagccrttttggacaggataatccttttttgtggagggctgtcctatgcactgtaggatgcatccctgaccctacccctttgtgacaacctaaaatacttccagac

SEQ ID NO: 25468 - DNA, 201 bp, Homo sapiens
gtttgggttttcctttgccattttctcaattcagagtttatgtgaaattgatgtcttgaaaataaaacagcattaaattaatgtagtattaacaatataarttcttacagcctatgaaagcaattaaaaagaactaaggagattgtggatctaatctttaaattttgtggtaggatctacctatttttgcagacctgatgc

SEQ ID NO: 25469 - DNA, 201 bp, Homo sapiens; identical to SEQ ID NO: 2952

SEQ ID NO: 25470 - DNA, 201 bp, Homo sapiens
agcagggacagtaaacatggcaattaacaaaaatgcccatgctttcacagtgggctttatcaaatgcatattgtttgagatttgtaactcttttgacaaartcttcgtttagtatatcgtttccataaccagattatttgatagctatttctttatcttttttgctaagctgaagaaaaaatactgaaactcaaaactcca

SEQ ID NO: 25471 - DNA, 201 bp, Homo sapiens
atgcaactttacttggctgatcatccaaggagtagctaagaagtcgggtttacggtggaacaaaatggggcctggatggagtttaaagagcgattggaaarggagacagggttataaagtctactctttcaaacttcaaaggaaatgagagtgttctttaatttataggaggggtctggttgtgcccttcaagtattttag

SEQ ID NO: 25472 - DNA, 201 bp, Homo sapiens
aatataagttttatgtgacatgggagccctcaaaagaaaatgaagtcatagagaaatggcaaaacctacatgcttttgtgttaggttgaaagaagagaggygattgtagaaaagtagatatgttatatggggaggctaaaggaagatgtttaatttaacaaggtctgtttgtacacaattctcttgactgtgactccctat

SEQ ID NO: 25473 - DNA, 201 bp, Homo sapiens
acaagatagagtagaggagaaaagcatagacatttaatataagttttatgtgacatgggagccctcaaaagaaaatgaagtcatagagaaatggcaaaacytacatgcttttgtgttaggttgaaagaagagaggcgattgtagaaaagtagatatgttatatggggaggctaaaggaagatgtttaatttaacaaggtct

SEQ ID NO: 25474 - DNA, 201 bp, Homo sapiens
tttctccatgttggtcaggctggtcttgaactcccgacctcaggtgatccgcccgcctcggcctcccaaagtgctaggattacaggcgtgagccaccgtcyccggctgcctactactttctaagcaccattacagttctgcctctgccctgcctcaaatgcatcttgtcaaaaccccagtcctcattctttatccaggcta

SEQ ID NO: 25475 - DNA, 201 bp, Homo sapiens
cgacctcaggtgatccgcccgcctcggcctcccaaagtgctaggattacaggcgtgagccaccgtccccggctgcctactactttctaagcaccattacasttctgcctctgccctgcctcaaatgcatcttgtcaaaaccccagtcctcattctttatccaggctaaaatatctactcctctctgtgtgctttcagaaca

SEQ ID NO: 25476 - DNA, 201 bp, Homo sapiens
aaaggcaaaaataaatgctcaaggcacctagaatcttgtagttagaaggtggtaggtgattatgggcagttttcatggtgtaaataagttttatcgaatayaaacagcttagtagtaagagcactggctctggagttggaatataacttagctctctcactcaatagcagcatatgaccttgagcaagtttcttatttgtc

SEQ ID NO: 25477 - DNA, 201 bp, Homo sapiens
ttttttaaaaaattgttttaagactatctaaggatttaggaatactaataatacttgagagttaaatagcacctattcattctttcattcggtcttctcarcagtcatatagagttgtaataaggtcaatcattattcccattttactgccaagaaaactggagtaagagaggttttagtgacctgtttaagttcacctca

SEQ ID NO: 25478 - DNA, 201 bp, Homo sapiens
tctgtcttcttatggcctcttttttctaaaagtttttgtttttcaagattccatagaaattgaggatttataaacttccttatatttggaagaaaaagctrtggaaccttaacatagtacgtagtagtatgtagtagaaaactgtttataaacttgattctaactatcatttgcttacagaaattagtaactgttacaaag

SEQ ID NO: 25479 - DNA, 201 bp, Homo sapiens
tatcattaccattaaattttatcagacgtcaggaacttcgggaattaagatttcttcagaaagaagagcaaagagcccaacaacagctcaatagcaaactrcagcaacaacgagaacaaattttccggcgctttgagcaggaaatgatggtaaagtctgattgttataccattttatatcattttgtgttaataatgacat

SEQ ID NO: 25480 - DNA, 201 bp, Homo sapiens
attctttcctaaccaagatggtgaagatatcctgctgtgttatctttgtaaagttttatggtattgccttctacattaggtgtgtaattaaactggtgttkatttttgcttatagagtgaggtaaggaccgaattttattttttctatgtagatacccagttgtcccagcaccatgtactttaaagaccgtccttttctta

SEQ ID NO: 25481 - DNA, 201 bp, Homo sapiens
gaccctatgactacaaagctgatgtttggtccctgggtatcactttaatagaaatggctgagatagaaccacctcatcatgaattaaatccaatgcgagtrctgctaaaaatagcaaaatctgagccacctacattagcacagccatccagatggtaaaaatattcttaaaaaagcttaataagaaacaaatgatactagg

SEQ ID NO: 25482 - DNA, 201 bp, Homo sapiens
attttcccctcaacattgaagtttttcaatcctataaaaatgttgatatgtaaaaaaagttgtatagagaacatacacatatcaactacctagattctacrgctgttcatattttgctatactgactttattacacacgtctatccatccattcatccatttatccattcattatctgtttctctttttcattttcttaag

SEQ ID NO: 25483 - DNA, 201 bp, Homo sapiens
tgtttgccaggtttcaatgtgggctgcagctttttgtgctccttctctggtttgcagtgtaatgagttcataagctaaattttcagaaagaattttgtttmagattatgcctcttatctacttgagagcaacatgtcttttcaatcatgggattgacacatgaaaaataaagttatttcttaatcaattttgggaagcagt

SEQ ID NO: 25484 - DNA, 201 bp, Homo sapiens
taccacaaaattcacccatataattttgtgagttttagtaaatctgtatagttttgcagccattactacaatccagctttggaagctttctgtcacccccmgaaagttctcatgtgcctattttgcagtctgtctctattcccacaccaagctcaagatagcccttacttgctttcggaatggctctgtaattttgccttt

SEQ ID NO: 25485 - DNA, 201 bp, Homo sapiens; identical to SEQ ID NO: 2957

SEQ ID NO: 25486 - DNA, 201 bp, Homo sapiens; identical to SEQ ID NO: 2973

SEQ ID NO: 25487 - DNA, 201 bp, Homo sapiens
cagctcattgtaatccagatctccagcaaagtcagctcccaatagtccgccattgccagcatacatgccgccttctgctgctgccccatagcctccgcctrggccgatgtcagtgccatagggacccctgtctcctgcagcttcaccaaaggcaccgcctgcacccagggagcctgcaccacctcctcctgtgctcatgga

SEQ ID NO: 25488 - DNA, 201 bp, Homo sapiens
taaggtgttataactggttccacagatgagtctattgctttatatttatactttctatgtgtagtctgcatggctgttcagttgttttgttttaaaaaagmaagaaatgtttaaggaagaagaaaatgttttctacctccagtattccttgtacaaagcctaactaaaataaaatctcactcaggaaacaagaagacaaaa

SEQ ID NO: 25489 - DNA, 201 bp, Homo sapiens
tgtaaagttctactgattagctatgtgaactgctcatcacttatgcctaattataatgtgtcataaaagctatacatgaagatgatcaaaatgcatacttkgaaaaaatttgatttcatctgtaaagacgtgtaagtcagatgacgtttaaggtgttataactggttccacagatgagtctattgctttatatttatactt

SEQ ID NO: 25490 - DNA, 201 bp, Homo sapiens; identical to SEQ ID NO: 2961

SEQ ID NO: 25491 - DNA, 201 bp, Homo sapiens
gggacccctgtctcctgcagcttcaccaaaggcaccgcctgcacccagggagcctgcaccacctcctcctgtgctcatggaagagctgtaggagctgcccygcctgacagatgagctgtgtgaggaggagctgctaccccgactgtgggaggcatccgtggacaggaggcggctgtccccagggggtccctgcggcccagg

SEQ ID NO: 25492 - DNA, 201 bp, Homo sapiens; identical to SEQ ID NO: 2950

SEQ ID NO: 25493 - DNA, 201 bp, Homo sapiens
tggatgcccttactttggaagaagtccatgaggtccgcagtcacgttgctgtaggcagagaagaccttgctgatgccgggtggcccctgtggcccaggctrgcctggtgggccctggacagtgtaggccatcccttgcagtaggccctgacctgtaaaacaccagagcttgggcacaggaagcagggatcgcccagtaccc

SEQ ID NO: 25494 - DNA, 201 bp, Homo sapiens
ctagttccctttcctttcttcccactcgcctgccatcaccggaggatttatcctcaaggacatctcttgacactgtcatactgatgttgagaaatcttcakttccatcagagtaaaatgtaaattaatgcctcagtttgactgtgaagccttcatagtgccacacctgagtcacagtcaccctttctagcttcctctccca

SEQ ID NO: 25495 - DNA, 201 bp, Homo sapiens
agctgtgatgtggactccaggtttgagtctcagcatattattacttgtagcttcagtttattgtgccttgttttgttaaattcctttatatcttcagaatrtatagaaatcacatgcttctgaactatagtttatctttttttcttatttatagtttgctgcacaagaagaaaagaggcagaaaaatgagagaatggctca

SEQ ID NO: 25496 - DNA, 201 bp, Homo sapiens
atggtcacacacacaaattaactcagatcactaagcagataggaggatcaaggttttaatcagaagttcctgctcttctctgaagctgtgatgtggactcyaggtttgagtctcagcatattattacttgtagcttcagtttattgtgccttgttttgttaaattcctttatatcttcagaatatatagaaatcacatgct

SEQ ID NO: 25497 - DNA, 201 bp, Homo sapiens
agaccaacctggcaaacatggtaaaaccccgtctctactaaaaatacagaaaaattagctaggcaggatgtcacatgcctgtaattccagctactcaggcrgctgaggcatgagaatcatttgaatctgggaggcggaggttgtagtgagcagagattgtgccactgcactccagcctgggcgacagagggagatcctgtc

SEQ ID NO: 25498 - DNA, 201 bp, Homo sapiens
ttagtagcaaggttgctcgtcgctgcacatttttgttatatttcccttttttttgagatggagtctcactctgtcacccaggttggagtgcagtggtcacyacaacctctgcctcccggtgtcaggtggttcttgggcctcagcctcccgagtagctgggactacaggcatgcgccaccacacccaactaatttttgtatt

SEQ ID NO: 25499 - DNA, 201 bp, Homo sapiens
taatcaatgtgattttcctcctgtctggaccctaactgatacaaggattaaataagttactaaatggaaagtgcagagaacagtgcctcttctaatagcamgatggatattactatatacgataacatacttgaaataatttgagatttttcttactgatttctttgcaaaatactaatatttccaatttatataggtaaa

SEQ ID NO: 25500 - DNA, 201 bp, Homo sapiens
ttttatatgcttattcaatatttgggtatctttttttggtggaattcctggttatttgcccaattaaaaaaaaaaagctctattttgaggtataatttatrtaccacaaaattcacccatataattttgtgagttttagtaaatctgtatagttttgcagccattactacaatccagctttggaagctttctgtcaccccc

SEQ ID NO: 25501 - DNA, 201 bp, Homo sapiens
taagactatctaaggatttaggaatactaataatacttgagagttaaatagcacctattcattctttcattcggtcttctcaacagtcatatagagttgtmataaggtcaatcattattcccattttactgccaagaaaactggagtaagagaggttttagtgacctgtttaagttcacctcaagagaggttttaatgacc

SEQ ID NO: 25502 - DNA, 201 bp, Homo sapiens
ctggtctgcttttagagttaccattttttattttcaattttgaaggatttgtcatctgaagataaggtggtattaaatgtattgataatgggatctttagyaggtttttttgggagatggtagaaagagatggtcaagattaagatgggagagacatctttttctttctgtttaacttactttttataataagattagcct

SEQ ID NO: 25503 - DNA, 201 bp, Homo sapiens
tttttctggagctctgtcgcctttcagaatttttctaattctgacttacatggctcttttatgtttttcatcatttttaaaagtgtcctagcttattttgmaataggatgttacagttttgatcaattttgggggcattttttttgtaaatatattgaaattttatttgaatatagggacatacttgtgtaaaataatgtg

SEQ ID NO: 25504 - DNA, 201 bp, Homo sapiens
tagataggtgtattttttggagtctgccaactttagattttagaggaatcctgggtagggtaccatagtcctggactttggaagaagagcatgaggatccyggaagcttggagaagagaacagtaagaggagaggatgcagaaaggtgattggaaggtgccaaagagaaactgtttaaaatttggatgcattttgagttta

SEQ ID NO: 25505 - DNA, 201 bp, Homo sapiens
aaaaaggcaggaagctacctaattagttaaaaatatgttattttttaaaattatagttattattaatgtggtgttttctgaaattattgttcagggctgtygcagaatgtttccaaagattataatgcaaatgaacccatagactagttaataaacagataagacctttacttgggactattgcacaataaaaatttagac

SEQ ID NO: 25506 - DNA, 201 bp, Homo sapiens; identical to SEQ ID NO: 2959

SEQ ID NO: 25507 - DNA, 201 bp, Homo sapiens
atatttttttatcccagtgctgccacttacggaacttggataagtcagttaacttttatgagtctgtttactcatctgtaggatgagtaatgatctacctyccaaattattttctgaataatgtaatgaatttgaaaacaatttctaattggcaagcacttgtaaaaaaaaataaagcattatgctgagggaaaaaaggca

SEQ ID NO: 25508 - DNA, 201 bp, Homo sapiens
cgaactcctgacctcaagtgatcttccctcctcggtctcccaaagtgctgggattacaggtgtgtgccaccgcacccggcccatttttgttatatttcttrtgagaagaattgttaattctttaaattcagcaacatttactgaataaagatctgaaatcactgtaggtctgtaaacattgttttggtcactctaaggtca

SEQ ID NO: 25509 - DNA, 201 bp, Homo sapiens
tcaaatgcgagatcttcagttgcagtgtgaagccaatgtccgcgaactgcatcagctgcaggtcagatacagaagcctgacagcaaagcccataggatgcrgcagcacaagtggctgcttttgagagaacagtagctagccaaagtcaactgcatcatacacgaacatgctgggtttgagaggttctgttttttgtacaga

SEQ ID NO: 25510 - DNA, 201 bp, Homo sapiens
gctacttaagcgccacgagaaggttaatgaaaggaaaatttcttcatttttttgttcgttttaaagtttgcaaagctatttagttttgaaacttaagtttsttagataatgaattttagatttcctttctgtcttttatcctacaatttcttggatgaagtttggagtaattaattgtatcttgatcatgattgcaaactt

SEQ ID NO: 25511 - DNA, 201 bp, Homo sapiens
aaagtcagaagaatagagaaacaagggtaaattattggctaatttttttttattcttttactaccgttccactcgaaagaaaatttttaaagctttaaaaraaaacgtatttcagaagtgtaatttttgctgtcttctctatcattaccattaaattttatcagacgtcaggaacttcgggaattaagatttcttcagaaa

SEQ ID NO: 25512 - DNA, 201 bp, Homo sapiens
gatgctcccacgctccttccccccagcaccaaggcctaaatgtccccacttacgctgcatgctctctgacaccctcacagccagctcattgtaatccagayctccagcaaagtcagctcccaatagtccgccattgccagcatacatgccgccttctgctgctgccccatagcctccgcctgggccgatgtcagtgccata

SEQ ID NO: 25513 - DNA, 201 bp, Homo sapiens
caattaatttggactctttttcataatgtgtctcctttctttctcactgctatcctggtgcttgtttaaattattcaggaatttcctaatgggccttctartttctagttccctttcctttcttcccactcgcctgccatcaccggaggatttatcctcaaggacatctcttgacactgtcatactgatgttgagaaatct

SEQ ID NO: 25514 - DNA, 201 bp, Homo sapiens
aactcagcatccttttccttcatctccatctcacctttccccactcactgcaggcccactcactgccagatgttccttcatctccatctcacgtttccgcrctcactgcaggccactcaccatcagatgttcttttctgcattcctgttctcttaactgacatctacgctagaaaccagaattatttttcatttctgtcac

SEQ ID NO: 25515 - DNA, 201 bp, Homo sapiens
gtgagaatataaactccttaaaagcatgccatgatcgcttcatttattgatatgtacccagtttctagaacagttcctggcacattgtacagatgactacrtacctgttcagtgttgactaaagagtataaactcagtagagagaaaaccaaactcagcatccttttccttcatctccatctcacctttccccactcactg

SEQ ID NO: 25516 - DNA, 201 bp, Homo sapiens; identical to SEQ ID NO: 2965

SEQ ID NO: 25517 - DNA, 201 bp, Homo sapiens; identical to SEQ ID NO: 2966

SEQ ID NO: 25518 - DNA, 201 bp, Homo sapiens
ttgctggtgtgtatgcagactctttcagccattttggaagacagtgtggcagtttctttttttttttttttttttttggagacagagtcttgctctgtcayccagactggagtgcagtggcgcaatttcggctcactgcaagctccacctcccaggttcatgccattctcctgcctcagcctcccgagtagctgggactac

SEQ ID NO: 25519 - DNA, 201 bp, Homo sapiens
ctggctaattttttgtatttttagtagagacggggtttcaccatgttagccaggatggtctcgatctcctgacttcgtgatccgcctgcctcggcctcccraagtgctgggattacaggcgtgagccaccgcgcccggccaacaatttggcagtttcttaaaaaactaaacatactcttacgatatgatccagcagttgta

SEQ ID NO: 25520 - DNA, 201 bp, Homo sapiens
aagtctctgtataaatattttcaggatttattcctatttaatacagtttaaaaaaacaaatgtatatttgttcacttaaagcacaagttgccttaaaaatrtaagtaataaaatctttcattggtgaccaaatagctgtgcagtacaataccaaatgaaaaagttctgtacctggtagttgtagagaagcagggacagtaa

SEQ ID NO: 25521 - DNA, 201 bp, Homo sapiens; identical to SEQ ID NO: 2953

SEQ ID NO: 25522 - DNA, 201 bp, Homo sapiens
tggcaattaacaaaaatgcccatgctttcacagtgggctttatcaaatgcatattgtttgagatttgtaactcttttgacaaaatcttcgtttagtatatygtttccataaccagattatttgatagctatttctttatcttttttgctaagctgaagaaaaaatactgaaactcaaaactccatgtagttttagacacac

SEQ ID NO: 25523 - DNA, 201 bp, Homo sapiens
ttttgtatgtgcatgaattttattttatgaaattatctccttctgataaattcttaaaagtgagatttagacatttatttattgaaacatttattaacttwaaaaaatttagtatctgtttttaatgtaataagtggagttttgctgaagtgatgttaatatacatcatagtgaaatgtcttataaaaacaacctagttag

SEQ ID NO: 25524 - DNA, 201 bp, Homo sapiens
gttggggaaccccgggtttagttatttcattaagcctttatgtgaagagttttttttttttttttttttttttccctgagacagagtcttggtctgttgcscaggctggagtgcaatggcacgatctcggctcactgcaacctctatctcctgggttcaagcaattctgctgcctcaggctcccaagtagttgggattaca

SEQ ID NO: 25525 - DNA, 201 bp, Homo sapiens
ctctgaatacagatgaagctttgcttacttgcctgctgctcatctcctgctatgcggcctggttcctaacaggccgtggactggtactggtttgtggcccygtggttggggaaccccgggtttagttatttcattaagcctttatgtgaagagttttttttttttttttttttttttccctgagacagagtcttggtctgt

SEQ ID NO: 25526 - DNA, 201 bp, Homo sapiens
gcaactaaatgttcccatcttgggctgatgggagacagtgacagatcatcaggcgttagattctcataaggagcacacaacctagatccctcacatacgcrgttcacaatagggttcacagttcacgatagagttcatgctcctctgagaagctaatgctgctgctcatctgacaggagacagagctcaggtggtattgtg

SEQ ID NO: 25527 - DNA, 201 bp, Homo sapiens
tggttttatttacctgcagtctgaaaataggtgagtacagtacagtaagatgtattgagagacatcattcacataatttttatgatagtatattgttacarttgttctattttattattattgttgttagtctcttaccgtgcctaatttataaattaaactttatcataagtatgtatgcaaggaaaaaacatagtatac

SEQ ID NO: 25528 - DNA, 201 bp, Homo sapiens
ggttacagttgcacttggacagctcagaatgtcaacatgtgtgtacgagttagtgtatttagaatacttctatgtaaatattaaaatgaagagcaaagtayattagtaaaaaaagagcaaagtgacattttgaaaactgctgtcttctagctcgagaagctgcaatttgggagctcgaagaacgacacttacaagaaaaac

SEQ ID NO: 25529 - DNA, 201 bp, Homo sapiens
tgtttcagtagtcgctaattcagtgcttgcagtgattttataaaacataactaccacaaataatgagaattaactctgtgtgtttgctaaatgatgatgartgattttattcttttttaatattgatacttgttcctaccaaaatcttagcaggactgaaaagatcaccataatttgcatgtaatttaaaacagataacag

SEQ ID NO: 25530 - DNA, 201 bp, Homo sapiens
catcttttcatgtgcttattggccatttgtatatcttcctgggagaaatacctgttcggctcctttgcctatttttgaattgggctagttgtgggtttttkttgttgttgttgttgttgttgttgagttttaggagttgtctgtatattctggatattaatcctcatcagatacatgatttgtaaatattttctgtcactt

SEQ ID NO: 25531 - DNA, 201 bp, Homo sapiens
gaacgtgggtgtacaagtatctctttgagaccctgctttcagttttttagggtatatacccaggagtgggattcctggatcttgtaggaatctatttttarttttttgggggaactgccatattgttttctgtagctgtaccaattttacatttccatcgatttgtgcacaagagttctaatttctccacatctttaccta

SEQ ID NO: 25532 - DNA, 201 bp, Homo sapiens
ctattcaagatcatcagatacattcatttttaccacaccgtgtataaaatggtgtgtttatgaaaaaacttagtatccatttatttctcctttgtgtattstaagacttgctttccttttttgtttttggcctcattaagtagattttatttagcattatttctttagtatgatcaagccaattatgaaattttgcacttt

SEQ ID NO: 25533 - DNA, 201 bp, Homo sapiens
tacgaagttttcaaacacacagaaagtacatgtacctactacccagatataacaattcttatcatttttgataaatttgcttcagattcttaaaaatgtayagatccagttgcaggtagtccctgcttttgctcaagccctctcccctctttctttctcagatgtagcattatctgaagttttctgtcattttcctgccca

SEQ ID NO: 25534 - DNA, 201 bp, Homo sapiens
agcgtaatgagccttaaggttcatccatgtcatagcatatgttagaatttccttcctttttaaggctgaataatatttgtggtatgtatatacacattttkcttatccactcatctattgatgtcacttggattgcttgcatgttttagctgttgtgtatttagctacgaacgtgggtgtacaagtatctctttgagaccc

SEQ ID NO: 25535 - DNA, 201 bp, Homo sapiens
tggtaaatacctttttgttctttctgttcatatcttaaattatacttgataagatgaaagaatttcaaccatatataaatatattcaaatatgtaagtatygagtaaagttcagtaagttaactcaagtatgtttttatattcttggataattatagtaaaattctaaaatgaaatgttgagtgtgtcaagaatgtgatct

SEQ ID NO: 25536 - DNA, 201 bp, Homo sapiens
ttctcagatgtagcattatctgaagttttctgtcattttcctgcccacatgttcatattttttaccacataagaatgtgtgttgtgtgtgtttgaaacttrgtttagtagtattccagttgttgagtatgttctttttaatgatcaacagcatccctttgttactgttgattccaacaaacccatccgagaattgattgca

SEQ ID NO: 25537 - DNA, 201 bp, Homo sapiens
catttttttgttcgttttaaagtttgcaaagctatttagttttgaaacttaagtttcttagataatgaattttagatttcctttctgtcttttatcctacratttcttggatgaagtttggagtaattaattgtatcttgatcatgattgcaaacttcttttctacaaattataaggaaagtaactaattacaatgcttaa

SEQ ID NO: 25538 - DNA, 201 bp, Homo sapiens
taataattccaatcttttccctttgttcccatagtcctaggggtggtagcttttgcctgtagttgttacctccctgatcctttgtattattttttcagttrgcaacagagttagtcattgtttttattaaatttctctattaaaataatcaatgtgattttcctcctgtctggaccctaactgatacaaggattaaataag

SEQ ID NO: 25539 - DNA, 201 bp, Homo sapiens
atcactaagcagataggaggatcaaggttttaatcagaagttcctgctcttctctgaagctgtgatgtggactccaggtttgagtctcagcatattattasttgtagcttcagtttattgtgccttgttttgttaaattcctttatatcttcagaatatatagaaatcacatgcttctgaactatagtttatctttttttc

SEQ ID NO: 25540 - DNA, 201 bp, Homo sapiens
tcttcttcttttggtggggggaagaatacctcagccttgagatgaaatcaaccagattgatagaatcagtcccagtgattattttttctttttattccttrttttttagattccttttgtatttatcttacatattttttgtttgtttgtttgtttgcctttgattgactaacacctctgtgggactgaaatcatctctgt

SEQ ID NO: 25541 - DNA, 201 bp, Homo sapiens
taaaagctttaattaaaatgatatgtgtgtactcgtccgtctacccagctattggctctttacctactgtgtcaggtacagtgtcaggggcaggaaacatagagatgaaaagacaaagtttttgtccccagaagttttggaatctagtgacaagcagttaggaattggtagggtcattgctctgaaggaggtgagtacagg

SEQ ID NO: 25542 - DNA, 201 bp, Homo sapiens
ttaaaagctttaattaaaatgatatgtgtgtactcgtccgtctacccagctattggctctttacctactgtgtcaggtacagtgtcaggggcaggaaacatagagatgaaaagacaaagtttttgtccccagaagttttggaatctagtgacaagcagttaggaattggtagggtcattgctctgaaggaggtgagtacag

SEQ ID NO: 25543 - DNA, 201 bp, Homo sapiens
cctttacttttgtgtttgatttttttgtgcctaaatgtaagatttatatttatgctagttaatttagacccattgtttctgtctacacagattttttttttaatcctgtatgtaaaccaatgataaaaatgttgaacaaaagaaaaccctttgatatttttgcaggttatgttgtttattgaacaagtttgtatatagaaa

SEQ ID NO: 25544 - DNA, 201 bp, Homo sapiens
gaaggcagaactctctttcattaattttagtaaccttctaagtagtatagtgtccaccatttactaagtgcttaataaaggttttctttgaattgaactcttactgtgtttaatttagacataaatacagtaatatgaacaaaaattgcatagatgagaaattacatttactgttttagtggcactggcttatatttacct

SEQ ID NO: 25545 - DNA, 201 bp, Homo sapiens
actgcgctttgctaattttttttgtatttttagtagagacggggtttcaccatgttagccaggatggtctcgatctcctgacctcgtgatcctcccgcctyggcctcccaaaatgctgggattacaggtgtgagccaccgcgcccggccaggggttatttttttgtgctacctcctcccaacttcccttcttcaaccccaa

SEQ ID NO: 25546 - DNA, 201 bp, Homo sapiens
ccttagactcagtagcatttgatgatggtgggcatgtcatcacaggaaactcactgtgtttccttggctgtatgaatgaagctgttgttagagaattagtrattctaggctgggcacagtggctcacgcctgtaatcccagcactttgggaggctgaggcaggtggatcatttgaggtcaggagttcgagaccagcctggc

SEQ ID NO: 25547 - DNA, 201 bp, Homo sapiens
cccagagacaggtttctaagaattggaccaatccttaaggaggccagctgcctgctgtgtgcaggaggccctctccagtgagtccccatgtcagagggccrtgattagaagcaggcgtagagcgggggacatgccccagccatcagaattgcaccagcagtgtgaagcatgtctcttgccccatgcaaggaaaggaggaga

SEQ ID NO: 25548 - DNA, 201 bp, Homo sapiens
aagccgagcctgcactcttagagtaagtgtagtggcctcagacagaggagagatccctgggacctgggcagtctgagccttccactggacagtcatgtgtraggagattgcatttcctgagcaggacactgtgttgcgttacattggtaaccccaatttaaggcagcataaatgcactgggaaaacagcgatattggttag

SEQ ID NO: 25549 - DNA, 201 bp, Homo sapiens; identical to SEQ ID NO: 2997

SEQ ID NO: 25550 - DNA, 201 bp, Homo sapiens; identical to SEQ ID NO: 3000

SEQ ID NO: 25551 - DNA, 201 bp, Homo sapiens
gacagtgaactggtctgcgacaagcagggcagatgcagcagtttcttctgcagggtcccagttgtggtggtggctgccctttcaagaagctgggtcccacrggccagcaggggctctcaggcagagcctgaatgtgctttcgtcttctcttccagatctaaccatgagctaccctggctatcccccgcccccaggtggcta

SEQ ID NO: 25552 - DNA, 201 bp, Homo sapiens
agtttaccaggctctcctgggtgacctgggcctggggtctgggtgtggcctgtgccacatgtgcgtcttcctctctctccaggagctgtatgcggccgggragaaccgcctgggaacagacgagtccaagttcaatgcggttctgtgctcccggagccgggcccacctggtagcaggtaaggcaggctggggtccctcaga

SEQ ID NO: 25553 - DNA, 201 bp, Homo sapiens
tcagacattccaccatcccctctaggaccagggtttcgtatgtccacttggatctctcttgctttttacccatttttttcagttgttgtcatctcgcttcyggctgaactctgaataaagcaggcctcggtccacattttaacccaaccatttactgtgtggcctcggaccagccagtacccctctctgatgctcagtttt

SEQ ID NO: 25554 - DNA, 201 bp, Homo sapiens
gttgatagatcatggttttggacgtgggattttgtgtgacagcgtactttccccatgtttagttgcacatagcattatgtttgcaaaggggcaaaatttgyacttgcttattaagtttttgaggatttgagcctagaaaccagctgccacattagttgagcacccttagaattctgtcgttgtccctcttgtgagttgcag

SEQ ID NO: 25555 - DNA, 201 bp, Homo sapiens
tgctcagttttctgatccatggggatgcccctttgtgtgagccctactcatcaccactgccactgtcattgtgcttgcccgggctgtggagaagagctgaygccctcgagcctgggagtggctggagggtgtgtctctgtgtcaggggcctctgttgctgggattaaggcagcagcgtagcccccacccttcttcccgagt

SEQ ID NO: 25556 - DNA, 201 bp, Homo sapiens
aagaccccagtcctctttgacatttatgagataaaggaagccatcaaggtgtgtacgtgtgtgtgtgtgtgtgtgtgtgtgtgtgtgtgcgcgtgtgtgcrcacgcgcgcatgcgtgtggacacacagcccagaaggaggcctggatggcgtgctgtgttctagcccactcattagctgctgttgtcagtatggctcccag

SEQ ID NO: 25557 - DNA, 201 bp, Homo sapiens
gcagtgaggaaggaagggcggtatttgtgctgcagcctgccctgagaggcaggaccagaggccagaaggtccccagagacaggtttctaagaattggaccmatccttaaggaggccagctgcctgctgtgtgcaggaggccctctccagtgagtccccatgtcagagggccgtgattagaagcaggcgtagagcgggggac

SEQ ID NO: 25558 - DNA, 201 bp, Homo sapiens
tcatggggagtgaatcctgtcactgtgggtggggccgggggtgtggccctggcccagaagtcaggcagcatgctggtgggtactgtttctagctggaggcrccagcaggagacagtgaactggtctgcgacaagcagggcagatgcagcagtttcttctgcagggtcccagttgtggtggtggctgccctttcaagaagct

SEQ ID NO: 25559 - DNA, 201 bp, Homo sapiens
tagattcctgtgttaggggactccagctagtacccttttagagcctgtggagttgaatggtacacttacgtacacgtaacatggctttagggaacaggccrttttgcagccactgagaagcacccccagatagctgctctatgcttttggcattcaccagacgctttgaggctggcttctgatgcagtgctgtcatgccag

SEQ ID NO: 25560 - DNA, 201 bp, Homo sapiens
acctttctggtgcaccccctccttcctcctggattcacccctcttcttctgctgtctttttttttttttttttttttgagacagatttcgccctgtcaccyaggctggagtgcagtgatgcaatcttggctcactgcaacctccgctccctgggtttaaatgattctcctcccttggcctcccgagtagctgggattacag

SEQ ID NO: 25561 - DNA, 201 bp, Homo sapiens
ggccaggtcagcctggaggtcacaggcttgtatatccctggagggccatatgggctatttgttctcttgagcccgagccaagacctccagcctttttctcsccagtacccacttttgatagtgttttgcaatgggcagctccataaagagagctacaggatggaccttccttgcttctccctttcagaattcaaaaagacc

SEQ ID NO: 25562 - DNA, 201 bp, Homo sapiens
gctctgatgaagaccccagtcctctttgacatttatgagataaaggaagccatcaaggtgtgtacgtgtgtgtgtgtgtgtgtgtgtgtgtgtgtgtgcgygtgtgtgcgcacgcgcgcatgcgtgtggacacacagcccagaaggaggcctggatggcgtgctgtgttctagcccactcattagctgctgttgtcagtat

SEQ ID NO: 25563 - DNA, 201 bp, Homo sapiens
ggaatggtgagtccagctctcctgctgaggcagccctggggccacacctgcgtggccagaggaatcaaagctgctggcctctggggctccagagttgtctrtgtgtgtgttgctgtggtgtgtagtgtgttgagctgtaccttagaacagggttttcatcaggcttctgccacctgctctctgcccctctctgggtctcac

SEQ ID NO: 25564 - DNA, 201 bp, Homo sapiens
ctttggcctcatcttgacctgtgggatctcagcccctgattgctgctttctgctctttttcagggctgctacctgaggcctagcaggcactttagaggccrtctagttcagaggttgcaaattggcaaatactttaggctcaaaccttcagaagtttaccaggctctcctgggtgacctgggcctggggtctgggtgtggc

SEQ ID NO: 25565 - DNA, 201 bp, Homo sapiens
ttggctctgatgaagaccccagtcctctttgacatttatgagataaaggaagccatcaaggtgtgtacgtgtgtgtgtgtgtgtgtgtgtgtgtgtgtgtrcgcgtgtgtgcgcacgcgcgcatgcgtgtggacacacagcccagaaggaggcctggatggcgtgctgtgttctagcccactcattagctgctgttgtcag

SEQ ID NO: 25566 - DNA, 201 bp, Homo sapiens
gagggcagtcaggggattgtggggaaacaaagctatgggaacacttggtcgttcctccctgcgtggggctttcgcctcctcaaaagagccccctggtgggratttaaaagacactgtcagagggtttcctgagttctggcaaacatccagttctggaggttctaccggtgtagaaacctggtgtctttgtacgtgggaatg

SEQ ID NO: 25567 - DNA, 201 bp, Homo sapiens
agctgatgccctcgagcctgggagtggctggagggtgtgtctctgtgtcaggggcctctgttgctgggattaaggcagcagcgtagcccccacccttcttyccgagtgctggtgaggctgctggaacaagcacatggttggttgtattctctgcccctgcagggggttggcactgatgaagcctgcctgattgagatcctc

SEQ ID NO: 25568 - DNA, 201 bp, Homo sapiens
cagcgaaacaggcccatgctgaggaaagctggcttggctccaggatggtggtgtgcctcttacattgcccatgtcctctagcagggccctcccactgtgcrgagttgggtccctgccctgaggccctcacaacccctctttctactcacttgggaaaatcagtctgccccttttttcattatgctttttttggagctttct

SEQ ID NO: 25569 - DNA, 201 bp, Homo sapiens
ctttgggtagggagaatgttggcagttcctccagggttgatcttggctcattttggagaacagttcgtgtttgcagagcctagaattcgttgtcatggttytgtggcccaaccagccagcacaggggtagtggtatgtgctcaatgactatttttagacagagggtctcctttcctccttcccttccatacccacacgttc

SEQ ID NO: 25570 - DNA, 201 bp, Homo sapiens; identical to SEQ ID NO: 3009

SEQ ID NO: 25571 - DNA, 201 bp, Homo sapiens
gcagggggctaaagggcttggtgttgctttcaggtggtggtccctggggaggtgctgcctaccctcctccgcccagcatgccccccatcgggctggataaygtggccacctatgcggggcagttcaaccaggactatctctcgggaatggtgagtccagctctcctgctgaggcagccctggggccacacctgcgtggcca

SEQ ID NO: 25572 - DNA, 201 bp, Homo sapiens
tgctgatgtgaggaaggaatgggtgggggcaactaagaaattgggggacagagttctctgtgctaggtatcctaggacaagccacccagccacacagagaccccccccttcccccccacagaacagttctggatgataaaatgcctgcctggaatggagaatcagatgagaagatgtttgcaaaggggtttgagatcagtt

SEQ ID NO: 25573 - DNA, 201 bp, Homo sapiens
gatcaagcctgctgggtcctggcaggagccccagggagtagctcatctgcagacatttgcttgaggactaccccctaaacataaaggaagaatgacatccraagggtgtggagcagccatgagctgagaactagcctggtctacctgagattgatggcaggtcctggtcaacacgtcagctctgcgtcagagtccatgcct

SEQ ID NO: 25574 - DNA, 201 bp, Homo sapiens
actgcctgggctgtgtgttttgtaagaactgcccaggccacctgtctcaaggctttgtgctcaacagctgtcttcggtcccttgatatgcaccacccccgccccccccggcacagacaggttttggaggattattaaaattccctttgggtagggagaatgttggcagttcctccagggttgatcttggctcattttggag

SEQ ID NO: 25575 - DNA, 201 bp, Homo sapiens
gaggaaggaatgggtgggggcaactaagaaattgggggacagagttctctgtgctaggtatcctaggacaagccacccagccacacagagacccccccctkcccccccacagaacagttctggatgataaaatgcctgcctggaatggagaatcagatgagaagatgtttgcaaaggggtttgagatcagttagcgggtgg

SEQ ID NO: 25576 - DNA, 201 bp, Homo sapiens
ctgatgccctcgagcctgggagtggctggagggtgtgtctctgtgtcaggggcctctgttgctgggattaaggcagcagcgtagcccccacccttcttccsgagtgctggtgaggctgctggaacaagcacatggttggttgtattctctgcccctgcagggggttggcactgatgaagcctgcctgattgagatcctcgc

SEQ ID NO: 25577 - DNA, 201 bp, Homo sapiens
tgcccaggccacctgtctcaaggctttgtgctcaacagctgtcttcggtcccttgatatgcaccacccccgccccccccggcacagacaggttttggaggattattaaaattccctttgggtagggagaatgttggcagttcctccagggttgatcttggctcattttggagaacagttcgtgtttgcagagcctagaatt

SEQ ID NO: 25578 - DNA, 201 bp, Homo sapiens
gcccaggccacctgtctcaaggctttgtgctcaacagctgtcttcggtcccttgatatgcaccacccccgccccccccggcacagacaggttttggaggattattaaaattccctttgggtagggagaatgttggcagttcctccagggttgatcttggctcattttggagaacagttcgtgtttgcagagcctagaattc

SEQ ID NO: 25579 - DNA, 201 bp, Homo sapiens
tcaacccatcttctgccacccccaatactttgggctttgacccaagacccagcccttccttctgtttatacatggtgcaaatgactaatgtaagggagagscagggaaaacctggatgtggtttgggccaaggctgactagaggccaggtcagcctggaggtcacaggcttgtatatccctggagggccatatgggctatt

SEQ ID NO: 25580 - DNA, 201 bp, Homo sapiens
cccaggccacctgtctcaaggctttgtgctcaacagctgtcttcggtcccttgatatgcaccacccccgccccccccggcacagacaggttttggaggattattaaaattccctttgggtagggagaatgttggcagttcctccagggttgatcttggctcattttggagaacagttcgtgtttgcagagcctagaattcg

SEQ ID NO: 25581 - DNA, 201 bp, Homo sapiens
catctctctctctcaggtacttttcccacgacagggctcggggcccccaagccatggaagtcaaagagatgggatccccgcaatgaggaaagggaaaatamatggggaaggagtgggcatgaccatacacctgcttcctttcagggaaaccgtgatgaaagcacaaacgtggacatgtcactcgcccagagagatgcccag

SEQ ID NO: 25582 - DNA, 201 bp, Homo sapiens
ggccacctgtctcaaggctttgtgctcaacagctgtcttcggtcccttgatatgcaccacccccgccccccccggcacagacaggttttggaggattattaaaattccctttgggtagggagaatgttggcagttcctccagggttgatcttggctcattttggagaacagttcgtgtttgcagagcctagaattcgttgt

SEQ ID NO: 25583 - DNA, 201 bp, Homo sapiens
aagcagggatgcaccccgctttcttgcttcctgagagaggtaccctagggtggaaagaacaatagataagcagtgggttgcagatgctgtgagtttcagaygcgctgaactgttcaactgtatgacctagaacaggtaatctgacctccagggcttcagcttccccacctataggagggaacatgtgagataattagtatt

SEQ ID NO: 25584 - DNA, 201 bp, Homo sapiens
tgccctggtctcagacctgctgctcctgcagggtctgccttattcagtgtctctctggctggtaacatccattcccattctgggagtcagggctggacacscctggggctcagggctctggcttttgctccagcgagagttttgcatgccacttttagcggggcaaaaattgtctcatgctctgccttctcagtccagagc

SEQ ID NO: 25585 - DNA, 201 bp, Homo sapiens
gttttgaggctgaatgatattctctttttatgtggagatcttgttttgtttatccattcatccatcaatgggcacttgagttgtttccaccttttgactaytgtgaatgaggctgctatgaacatgggtatacaaatgtctgttggagtccctgctttcatttcctttaggtatataggttgagtatcccaaatctgaaat

SEQ ID NO: 25586 - DNA, 201 bp, Homo sapiens
cagaggttgcaaattggcaaatactttaggctcaaaccttcagaagtttaccaggctctcctgggtgacctgggcctggggtctgggtgtggcctgtgccrcatgtgcgtcttcctctctctccaggagctgtatgcggccggggagaaccgcctgggaacagacgagtccaagttcaatgcggttctgtgctcccggagc

SEQ ID NO: 25587 - DNA, 201 bp, Homo sapiens
agtatttgttcttttgtgcctggcttgtttcatttagcataatgtgttgaagatttatccacattgtagcatatgtcagttttcttctgttttgaggctgratgatattctctttttatgtggagatcttgttttgtttatccattcatccatcaatgggcacttgagttgtttccaccttttgactactgtgaatgaggc

SEQ ID NO: 25588 - DNA, 201 bp, Homo sapiens
aggaggccagctgcctgctgtgtgcaggaggccctctccagtgagtccccatgtcagagggccgtgattagaagcaggcgtagagcgggggacatgccccrgccatcagaattgcaccagcagtgtgaagcatgtctcttgccccatgcaaggaaaggaggagagaggcattggtcagggtgaaaggtatgattctcatgg

SEQ ID NO: 25589 - DNA, 201 bp, Homo sapiens
tgtccaataccttaagggaaagagtgtttcctagagtgtggaccacagaaccagttacatcagaattactggggactggggggtatgtatgcttgtttacrcttcagattcctgggcctatcccaggttagaaggcccagaatatgggggctagggcgctagcatgtttagtgagctctccaggtgattatcatgcatgat

SEQ ID NO: 25590 - DNA, 201 bp, Homo sapiens
aatttagcatcctccttcctaaccacctccacctggcaaccttcatttaacgcagaacaaagggccttgatctcctgtatggccatggaatggcttagggrttctgatgttccttatagataaggaatggatctccaggttggccacagttcctcagctcagaactctgaacacacattcttcttagactatagggtcgtt

SEQ ID NO: 25591 - DNA, 201 bp, Homo sapiens
gtctcagctgcagagcatctcatgacccctacccgacccacccctgctgcctcttcctccagggacggatgagcaggccatcattgactgcctggggagtygctccaacaagcagcggcagcagatcctactttccttcaagacggcttacggcaaggcgagctgcggggtgggggcgcgggacagtgaggcgtgtcctgg

SEQ ID NO: 25592 - DNA, 201 bp, Homo sapiens
taggtctagtctgtgtccctagagcttactattgtgaagaagagtatattcgtccattctcacacgactataaagaaatatctgaaactgggtaatttatraagaaaagaggtttaattggctcacagttctgcaggctgggcctatgccaggttgaagggcccagaatatgggagccaaggtaccagcatttttagccag

SEQ ID NO: 25593 - DNA, 201 bp, Homo sapiens
attgttttgctggtccctcctaggcgggccctggcagaagctccctctgctcaggtggtgtaactggcggtggcttccccttgcggaagtgggtaaacaaagacagagacctgtgtctcctccccgcccctgccacctgcacttataaacacaacccactgtttccctttttgggagtgtgtgagagagagagagagtgtg

SEQ ID NO: 25594 - DNA, 201 bp, Homo sapiens
accatggccaggctggtctcgaactcctgacctcaggtgatctgcccacctcggcctcccaaagtgctgggattacaggcatgagccactgcgcccagccracatctgtgtatttttaattggtgatttcctcagcacattggtgaaggtgagcatcttcagctccttttctgtaactgccagatctgttcacatcatttg

SEQ ID NO: 25595 - DNA, 201 bp, Homo sapiens
ttgttttgctggtccctcctaggcgggccctggcagaagctccctctgctcaggtggtgtaactggcggtggcttccccttgcggaagtgggtaaacaaagacagagacctgtgtctcctccccgcccctgccacctgcacttataaacacaacccactgtttccctttttgggagtgtgtgagagagagagagagtgtgt

SEQ ID NO: 25596 - DNA, 201 bp, Homo sapiens
gactgttttccagaagcaccgatttaactggagagggccccagctggatgaaatcaggtgcacagctgcaggtggatggtcgcagtgaggaaggaagggcrgtatttgtgctgcagcctgccctgagaggcaggaccagaggccagaaggtccccagagacaggtttctaagaattggaccaatccttaaggaggccagct

SEQ ID NO: 25597 - DNA, 201 bp, Homo sapiens
tgttttgctggtccctcctaggcgggccctggcagaagctccctctgctcaggtggtgtaactggcggtggcttccccttgcggaagtgggtaaacaaagacagagacctgtgtctcctccccgcccctgccacctgcacttataaacacaacccactgtttccctttttgggagtgtgtgagagagagagagagtgtgtg

SEQ ID NO: 25598 - DNA, 201 bp, Homo sapiens
gttttgctggtccctcctaggcgggccctggcagaagctccctctgctcaggtggtgtaactggcggtggcttccccttgcggaagtgggtaaacaaagacagagacctgtgtctcctccccgcccctgccacctgcacttataaacacaacccactgtttccctttttgggagtgtgtgagagagagagagagtgtgtgt

SEQ ID NO: 25599 - DNA, 201 bp, Homo sapiens
gctggggtgagtgctgctttccgtcttctgatgggggcctggagaaggctgaactgcattttttaaggtctgtgacgcctgctgcaggacctgcagtgggrgaaaattccccagggtggggctttctccctataagggtgctcagggctgaatatcaggacccagaaggctgaaagtgactgtccctcccttaacggatgt

SEQ ID NO: 25600 - DNA, 201 bp, Homo sapiens; identical to SEQ ID NO: 3008

SEQ ID NO: 25601 - DNA, 201 bp, Homo sapiens
aggtcatcaggctgccatgcacagttgtggaggctcaatacctgcatccactggaggggacacatgggctagccagccctgttaggagtacccatgtgtgmtcacatgtgctgtggaggccaggcatcgatgagagaggccacagcccctgctcccgagacctgcccttcatcaggagcctgagccccagccctggaggac

SEQ ID NO: 25602 - DNA, 201 bp, Homo sapiens
gccacctgtctcaaggctttgtgctcaacagctgtcttcggtcccttgatatgcaccacccccgccccccccggcacagacaggttttggaggattattaaaattccctttgggtagggagaatgttggcagttcctccagggttgatcttggctcattttggagaacagttcgtgtttgcagagcctagaattcgttgtc

SEQ ID NO: 25603 - DNA, 201 bp, Homo sapiens
gctgtatggatgtctagggaatgccggtgccctgaggtgccaaggggtgtgaggtgctcagggacagggaggagaggccagtgtggctaaagtggaaaggygagggggtgagatgggaaatgaagtctgggggtctagctcttgcagggtgtaggaggctatccatcctaaggatttaggtttttattcctggtgagtgca

SEQ ID NO: 25604 - DNA, 201 bp, Homo sapiens
ccacctgtctcaaggctttgtgctcaacagctgtcttcggtcccttgatatgcaccacccccgccccccccggcacagacaggttttggaggattattaaaattccctttgggtagggagaatgttggcagttcctccagggttgatcttggctcattttggagaacagttcgtgtttgcagagcctagaattcgttgtca

SEQ ID NO: 25605 - DNA, 201 bp, Homo sapiens
gagccgatccgaagctgccatgtagaagaaagcatctaacaggccagaggccccatgatgatgtcgaatgcccatcgggcacccagctgagccctgcaggygttaactcagtcttcgtcacagcagtctaggcatacactcaccattagcccatttgtaagctgaggaaacaagcctaaggagggtgaaagccttgcccca

SEQ ID NO: 25606 - DNA, 201 bp, Homo sapiens
ttttttcctaagtttttttctcatctttattttttttaatttgtctcttatgctgaaattttatttatgtcgttggtttttggggctacttctttcactgyattatttggcctggctggaatttacttggtataaggaacagggtggtatccagcttctgtttcttgggttttttccctggcctggctgtggatggagctt

SEQ ID NO: 25607 - DNA, 201 bp, Homo sapiens
cagcctcccaaagtgctgggattacagatgtgagccattgcgcctggcagaagtaatgttctctttctaaagttagatgataaaggatgcttattttattrtgctttataattcatatatatgttgtatttattgctatattgtaaaaatattttataataatacacgaaaaaagccaaatatgttgatccaaaaggctta

SEQ ID NO: 25608 - DNA, 201 bp, Homo sapiens
tgagcagcaagagaggaggaggcaggaaatttagggaaggttcttcctggagggtctggagccctggagatgaagagccgatccgaagctgccatgtagargaaagcatctaacaggccagaggccccatgatgatgtcgaatgcccatcgggcacccagctgagccctgcaggtgttaactcagtcttcgtcacagcagt

SEQ ID NO: 25609 - DNA, 201 bp, Homo sapiens
caaggctttgtgctcaacagctgtcttcggtcccttgatatgcaccacccccgccccccccggcacagacaggttttggaggattattaaaattccctttgggtagggagaatgttggcagttcctccagggttgatcttggctcattttggagaacagttcgtgtttgcagagcctagaattcgttgtcatggttctgtg

SEQ ID NO: 25610 - DNA, 201 bp, Homo sapiens
aaggctttgtgctcaacagctgtcttcggtcccttgatatgcaccacccccgccccccccggcacagacaggttttggaggattattaaaattccctttgggtagggagaatgttggcagttcctccagggttgatcttggctcattttggagaacagttcgtgtttgcagagcctagaattcgttgtcatggttctgtgg

SEQ ID NO: 25611 - DNA, 201 bp, Homo sapiens
aggctttgtgctcaacagctgtcttcggtcccttgatatgcaccacccccgccccccccggcacagacaggttttggaggattattaaaattccctttgggtagggagaatgttggcagttcctccagggttgatcttggctcattttggagaacagttcgtgtttgcagagcctagaattcgttgtcatggttctgtggc

SEQ ID NO: 25612 - DNA, 201 bp, Homo sapiens
ccctggctatcccccgcccccaggtggctacccaccagctgcaccaggtaagagggtctggggtggggaggagagtgaatgctgcctctgtacagtggctrggagtggagaggggagaacagtagtttcctcactcccctcctcccctcacagcacggcccagcaggggaggagaggacaacaggagtagtgggacagcca

SEQ ID NO: 25613 - DNA, 201 bp, Homo sapiens
tagtagcttatttggctcacagttctggaggctgagaagatcgtgaggctgcatctggcaagggccttcttgctgcttcataacatggcagaagacatcaygcgggtaagagagagcatgttatacttttgtaacaaacacactggtggtaaggagcccacttcctccataacacattaatccattcgtgagggtagagcc

SEQ ID NO: 25614 - DNA, 201 bp, Homo sapiens
gtcccttgatatgcaccacccccgccccccccggcacagacaggttttggaggattattaaaattccctttgggtagggagaatgttggcagttcctccagggttgatcttggctcattttggagaacagttcgtgtttgcagagcctagaattcgttgtcatggttctgtggcccaaccagccagcacaggggtagtggt

SEQ ID NO: 25615 - DNA, 201 bp, Homo sapiens
tcccttgatatgcaccacccccgccccccccggcacagacaggttttggaggattattaaaattccctttgggtagggagaatgttggcagttcctccagggttgatcttggctcattttggagaacagttcgtgtttgcagagcctagaattcgttgtcatggttctgtggcccaaccagccagcacaggggtagtggta

SEQ ID NO: 25616 - DNA, 201 bp, Homo sapiens
cccttgatatgcaccacccccgccccccccggcacagacaggttttggaggattattaaaattccctttgggtagggagaatgttggcagttcctccagggttgatcttggctcattttggagaacagttcgtgtttgcagagcctagaattcgttgtcatggttctgtggcccaaccagccagcacaggggtagtggtat

SEQ ID NO: 25617 - DNA, 201 bp, Homo sapiens
atcacttaaggtcctgccttgaggtgggggagagaggggaatgtcctagatgtgtcctccctgcccccagaattcctggggcctacgtaatagaggctacygaaacaggtgccacccagagagtgaaagaaatgagtcagagtccaccggggttcctgccagtattcagtatgtgtcaagggcctcacagtgccagccctg

SEQ ID NO: 25618 - DNA, 201 bp, Homo sapiens
ccaaggctggtcatcctgagggtgcctgagccgctgcccctctccccaggggactcctaggcatcattgatttctttggagctgaggtcctgtggtttgarcaccccagacctgcaggccatttaccttccctcccattcagcaggtgaagaacagactcagacctagaggtggctcagctgctgtcccagggcatgttag

SEQ ID NO: 25619 - DNA, 201 bp, Homo sapiens
ccttgatatgcaccacccccgccccccccggcacagacaggttttggaggattattaaaattccctttgggtagggagaatgttggcagttcctccagggttgatcttggctcattttggagaacagttcgtgtttgcagagcctagaattcgttgtcatggttctgtggcccaaccagccagcacaggggtagtggtatg

SEQ ID NO: 25620 - DNA, 201 bp, Homo sapiens
tagccttttgagtttggctttcgtgtttcatgtatataggcttatcaagctgatcttcctacctgtcatttgctggttatttaatgcctttggtctttggycttaaattccatattgtctgtgttttaggagaatacatggccaaggatctgggagaatctcttttctttacagtcttaaaattaataaataagtgcattt

SEQ ID NO: 25621 - DNA, 201 bp, Homo sapiens
atcagatgggaaatcctgtagaggaaaatcaagctggaaacaggtagggagtgatggtagggtccaccgggaggtgcttgggccagtccccactgaggtcrtgacatttgatttaaaaacctaaagggagatgcaggggcagaggcctgcctggggctcccagcacgactgagaacagtgaagggggaccatgtggagcag

SEQ ID NO: 25622 - DNA, 201 bp, Homo sapiens
ttcattctcatgaatgaatgaatgagtgaatgaagcatgttgcccaggttggtctcaaagccctggcctcaagcaatccccccgccccgcctcagcctccyaaagtgctgggattacaggagtgaaccactgcacctggctggtattaaattttctttgtggccaactgcatgataaatattaacatgtttcatgggcgtg

SEQ ID NO: 25623 - DNA, 201 bp, Homo sapiens
cggggaggaatggtggtaataggggcttgtggtgaggaggtgtcaggttccggccatgtttgctgatgaattggacacgtgacgtgtgggagagagagggktcgaggattatacagggtttctttaggccaagcagtgggagaatggccctcaactgagacagggggactgtaggtggagctggctttaggtgcctgtagg

SEQ ID NO: 25624 - DNA, 201 bp, Homo sapiens
ttcacaaagtggattcattctcatgaatgaatgaatgagtgaatgaagcatgttgcccaggttggtctcaaagccctggcctcaagcaatccccccgcccygcctcagcctcccaaagtgctgggattacaggagtgaaccactgcacctggctggtattaaattttctttgtggccaactgcatgataaatattaacatg

SEQ ID NO: 25625 - DNA, 201 bp, Homo sapiens
gaacccagaccacccgaccccagagcacactttttaacctctgcactatcctgtaatggagcctgagtgaaagcattttcatcttaatcattatttctttwaatgagtacagaacatgtaagtagtgcatcaagcccatggcttcacaaacattattacttaggagaaaagagtagctgattggaagaagatattaattga

SEQ ID NO: 25626 - DNA, 201 bp, Homo sapiens
gcggaagtgggtaaacaaagacagagacctgtgtctcctccccgcccctgccacctgcacttataaacacaacccactgtttccctttttgggagtgtgtgagagagagagagagtgtgtgtgtgtgtgtgtgtgtgtgcacgcgcgcacatgcgcgtgcatccttaggttccgtctaaatccgttcaagctgctgtaata

SEQ ID NO: 25627 - DNA, 201 bp, Homo sapiens
acctcgaacagctgagtaaaggaagatgagcctataaaggacccagaaaaagagcgacctgagaggggcccagaaagccaggacagagttgtatcccaggrgccagggtgagtctgcttcgtgggatggagtggtcagcttggcatcgcggctgtggtgagtgatatggaggagatgtggctgccttcactgctttggtgg

SEQ ID NO: 25628 - DNA, 201 bp, Homo sapiens
acacagagcagaaatcacaactttaaaatgcaaatggtagctgagactcaggctggggaaggagagttttatgtcctgggtcagaactggagtcaggaccraggtctccatcatgccacctgtctctctaggagccagccatccactcctgtgggtgcttagcgtgtcctaggtcgaggtgagcagcaagaagccaggctg

SEQ ID NO: 25629 - DNA, 201 bp, Homo sapiens
tgtggttaaaatataggaccttgaaggctgggtttggatagagaaacgtggggagggtgagatggagatgaattgggactaagaggtgggagtggaagccycacctgacgcctttatgcatgatactatagaaagggcccaccctgggtggatgtgtctagaaggccaggatcgattagtgatgcctagttcacgtgattg

SEQ ID NO: 25630 - DNA, 201 bp, Homo sapiens
ccttcgccccttccccaaccttgatccccagtttcaggaagggattcctggacttgtatctcccatgggtgcaggccaggcccttaagacttaggtaaaayggtctgttggtttaaaggagacacgcgaagtttgttacctagagactttggaggggaaaagttaagccagccagtgctagcccaagctggaaacagtcag

SEQ ID NO: 25631 - DNA, 201 bp, Homo sapiens
tcagttttgaaatatgttgacttcctgcttggtagattaggaaccaatacatacatcaatatttaatgtatgcattattgtgaccataaattgtattgttygatgctgtgcaagtaatgtgccgtggtcacacattaggagtacaatccttcctgtcccaatattcctcaggtggatgctttccctccttgggggcctgat

SEQ ID NO: 25632 - DNA, 201 bp, Homo sapiens
attttctgaattctttgtcttcccccccgactcttcctaggagtggctcttaaatattgtagtgtgtgtttccctggaagtgcgctattgtgtttatctcsctagctagagggaaagcatgatgcaggccaggactttatttttttcttccctatcctagggggtgtagcccagcccctggtgcctccataaacccaggtg

SEQ ID NO: 25633 - DNA, 201 bp, Homo sapiens
ggacctgcagtgggggaaaattccccagggtggggctttctccctataagggtgctcagggctgaatatcaggacccagaaggctgaaagtgactgtcccwcccttaacggatgtcttccttgtttctgtggccagggagatacttcaggggattaccggaagattctgctgaagatctgtggtggcaatgactgaacagt

SEQ ID NO: 25634 - DNA, 201 bp, Homo sapiens
gtggtttgaacaggccccgaggactggctgatgggcatcagggcctttccgggagaggctgggggacacactgctgccatcacactcttcagtcttcttcrcctctcttcctcagcctgtggtgagagacgggtctgtgccggccattcataaggagatgagatggctcataacacaccaactggaagggccctggtaaac

SEQ ID NO: 25635 - DNA, 201 bp, Homo sapiens
aagacactgtcagagggtttcctgagttctggcaaacatccagttctggaggttctaccggtgtagaaacctggtgtctttgtacgtgggaatgtggaacrtcagagttgggagggtccttcgggagcacccaatccagtgttttccaaagcctggcataagaaacagtcataacaataaaactgggtgccattcatttac

SEQ ID NO: 25636 - DNA, 201 bp, Homo sapiens
agccccaggttctgggaggcagcatgcaaaccactgaggccctgcaggcgcactcattgaaaataggtgaggtagacaaggctgggagggcttagatttgycaaggcccctcagagagaagccagtttctcagacgcccctatgctccactgccagggaacacattttctgaattctttgtcttcccccccgactcttcct

SEQ ID NO: 25637 - DNA, 201 bp, Homo sapiens
tgtgaggaaggaatgggtgggggcaactaagaaattgggggacagagttctctgtgctaggtatcctaggacaagccacccagccacacagagaccccccscttcccccccacagaacagttctggatgataaaatgcctgcctggaatggagaatcagatgagaagatgtttgcaaaggggtttgagatcagttagcggg

SEQ ID NO: 25638 - DNA, 201 bp, Homo sapiens
aaagtgctgggattataggcatgggccactgtgcctggcctcatcttttcattttaaagaatatatcagcagggattattggacctgcctggtttaaactrttgtcttagttaattttgtgctgctctaacaaaatatcacagactgagtaatttataagcaatagtagcttatttggctcacagttctggaggctgagaa

SEQ ID NO: 25639 - DNA, 201 bp, Homo sapiens
cctaggtttgaaactgcctccagaaagccctggaccaggcccagggctgggtctcttgccttactctctagtaacagtgggcaaatgctgtcactttgagrctcagttttcttctccgcaaaattgcttcaaggatttctccctcattaggtggtcctggatactgatgagataggcaggcagagcgacacggtgtcctcc

SEQ ID NO: 25640 - DNA, 201 bp, Homo sapiens
gaagagagacaggggcctctgacttcccctgttgctggagggatggcaataaggacacaggaagataaatagacagacctggagtcctgagaatgaggcartgcgtctctacctctgaggtgggagaacaggcccagaggcgcactgcacccttgccagcagaggcaggagcaaagcttcagtgagagggcctttcaagga

SEQ ID NO: 25641 - DNA, 201 bp, Homo sapiens
tcgacctgccctgtggggccatgcagggcagagctcctagccaggaggcagattttgactcctgctgggaactcccttaaaagccaccccaagaatgagckccacgagcgccatcaaggctggcctgcaggccctccagggttaccaaggctgcctggaactgaatggaccctgtgtgtgttcttttagtcttggaagacc

SEQ ID NO: 25642 - DNA, 201 bp, Homo sapiens
attctatggcttgtttttccttcctttcattttattttatttatttattttttatttttttgagacagggtttcacttccatcgcccaggctggagtgcartggcgtgatctgggctcactgcaacctccacctcccaggctcaaatgattctcctgcctcagcctcctgagtagagtagctgggaccacagtcgcatgcc

SEQ ID NO: 25643 - DNA, 201 bp, Homo sapiens
accaattctctgactctaactgggtgtcctataatgcagctcaattctgaccctaactggagtcactgcagaccctataggttaaagggctcagtcccacmagactgccagatatatatttcttatatcacattatcacctgagacattacttaaccagagccgagccttctcccggagtgaagagagtttgcagatgcgt

SEQ ID NO: 25644 - DNA, 201 bp, Homo sapiens
actcttgcaccatcataaagttgaaaaatcataagtcgaaccatcataagttggggactgctgtgttgccagcattaaatgcattttcaactcatgatggstttatttggatgtaaccctatcataagtcaaggagcatctgtatgtatttatatttaaagttcctaacatttagagatatgaacagttacagatgaaata

SEQ ID NO: 25645 - DNA, 201 bp, Homo sapiens
cggaagtgggtaaacaaagacagagacctgtgtctcctccccgcccctgccacctgcacttataaacacaacccactgtttccctttttgggagtgtgtgagagagagagagagtgtgtgtgtgtgtgtgtgtgtgtgcacgcgcgcacatgcgcgtgcatccttaggttccgtctaaatccgttcaagctgctgtaataa

SEQ ID NO: 25646 - DNA, 201 bp, Homo sapiens
acaaagacagagacctgtgtctcctccccgcccctgccacctgcacttataaacacaacccactgtttccctttttgggagtgtgtgagagagagagagagtgtgtgtgtgtgtgtgtgtgtgtgcacgcgcgcacatgcgcgtgcatccttaggttccgtctaaatccgttcaagctgctgtaataaaatatcatagacc

SEQ ID NO: 25647 - DNA, 201 bp, Homo sapiens
caaagacagagacctgtgtctcctccccgcccctgccacctgcacttataaacacaacccactgtttccctttttgggagtgtgtgagagagagagagagtgtgtgtgtgtgtgtgtgtgtgtgcacgcgcgcacatgcgcgtgcatccttaggttccgtctaaatccgttcaagctgctgtaataaaatatcatagaccg

SEQ ID NO: 25648 - DNA, 201 bp, Homo sapiens
tgtccctcctcacaatttaactggcaggggacattgccaagggatccgtgttcagagggacttcgtgagagcaggtgtctcacctggcacctgtccaggcygctcttcctcccttactgacagatctgcaaatcacttacttctcttaatcagcagcctctactgcagaaacagggtgatgctgcctcatttgccctggtt

SEQ ID NO: 25649 - DNA, 201 bp, Homo sapiens
atgatttacccctgtcgaggtcaccttgacggctgggtggtttgtcaggtttctccacgatagtcactgaccgctcccttcctcacatactgtgcgtgacyttcccccctccaccaccaccgagtgttgctataaaggaaatgcgtttgaccttttcagtgtaaaaagttttctcgaccttaaagagagtcactaaccgac

SEQ ID NO: 25650 - DNA, 201 bp, Homo sapiens
atatgcattgcagcgtgaaacccagtgtgtaaaaagaagccacatactcgagacgagcaggtgtgattgttgagggaccctgcaggtttcctcacatgtcygcctgccattgggtgtctctgcagactgcagcagcagctgctattagcaagagcaggcaggttgcacaatgtggctggtgtcacagcagatctgtgtccc

SEQ ID NO: 25651 - DNA, 201 bp, Homo sapiens
cagactggggaaggccagtggaaaatcactccatgaaagcatccactgtagtcccggtctgcttggtttgctgttaggccctgaggggcagggggtgtcactgctgtgtggcttctggcccgagatgatgtttctaggcccttgcctctcagcattaacctggtgtaggctctgttcccaaatgagccctgtgttgtcttt

SEQ ID NO: 25652 - DNA, 201 bp, Homo sapiens
cttggctctgatgaagaccccagtcctctttgacatttatgagataaaggaagccatcaaggtgtgtacgtgtgtgtgtgtgtgtgtgtgtgtgtgtgtgygcgcgtgtgtgcgcacgcgcgcatgcgtgtggacacacagcccagaaggaggcctggatggcgtgctgtgttctagcccactcattagctgctgttgtca

SEQ ID NO: 25653 - DNA, 201 bp, Homo sapiens
gttagcgggtggtgatgacaatgttgataccgtgggtgtgtgactgccaggagctgtgaagcagagggtggagtgtgcggtggtcaaagcctggttctggratctctagctttccaggggcttaggctccgccttagcagaaaagaaggaaaggaaattgagaaggaagtcaggtgtcccctgcccctcacacttggggat

SEQ ID NO: 25654 - DNA, 201 bp, Homo sapiens
aagtcgctgtaccacgacatctcggtacgggcctgctgcaggccaactgggctcccttttggcatctcagtcacctgtggaacctccctccttggagtggycatatgcttggcctctgtgctgtgtgtgggcatcttgattatggacctcggacttgttcatccccttgcccttaaacagattataaatttctgagggcag

SEQ ID NO: 25655 - DNA, 201 bp, Homo sapiens
caggactcagctataggtgagctcccagccactggagccaggaaaaagcttcagtactagaacacaaggccagataacagtcaagttaggtagacgcggcrtaaagtcctctgcattgttgactgtggactcctttagatactccaactcttagagaaagggctgttcccagagtctaggggtggagcagccttgaatgtg

SEQ ID NO: 25656 - DNA, 201 bp, Homo sapiens
ttggggagacagaagtattcaaactatagcaggtcctggccacactttggagtcaggacttgggtggggggctttttctgtcactgccactgtgtctgttrcaagaacctcagcgtcctccaggacctgagtgcccatcacgtgctggcctgcgaggcagccagatattagcactgtgtctctgtcactttcttcctctgc

SEQ ID NO: 25657 - DNA, 201 bp, Homo sapiens
agtggagaggggagaacagtagtttcctcactcccctcctcccctcacagcacggcccagcaggggaggagaggacaacaggagtagtgggacagccagcygaggcaggggctggagaagagcatgacactaaggccatcggaggcctaggtttgaaactgcctccagaaagccctggaccaggcccagggctgggtctct

SEQ ID NO: 25658 - DNA, 201 bp, Homo sapiens
acagagcgagaccctgtctcaaacaaacaaaacccaatatgcccagttcttcaagatagatatgaagggcagctagactcttatagttggatagcgtggcyagaacagtggtcttcaaagtgagttccctggaccagtaacatcatctggaaacttgttccaaatgcaaaaactggttccactgtctcagaaactcttggt

SEQ ID NO: 25659 - DNA, 201 bp, Homo sapiens
tttcaataaatgaattttggggagacagaagtattcaaactatagcaggtcctggccacactttggagtcaggacttgggtggggggctttttctgtcackgccactgtgtctgttacaagaacctcagcgtcctccaggacctgagtgcccatcacgtgctggcctgcgaggcagccagatattagcactgtgtctctgt

SEQ ID NO: 25660 - DNA, 201 bp, Homo sapiens
agactggggaaggccagtggaaaatcactccatgaaagcatccactgtagtcccggtctgcttggtttgctgttaggccctgaggggcagggggtgtcactgctgtgtggcttctggcccgagatgatgtttctaggcccttgcctctcagcattaacctggtgtaggctctgttcccaaatgagccctgtgttgtctttc

SEQ ID NO: 25661 - DNA, 201 bp, Homo sapiens
gactggggaaggccagtggaaaatcactccatgaaagcatccactgtagtcccggtctgcttggtttgctgttaggccctgaggggcagggggtgtcactgctgtgtggcttctggcccgagatgatgtttctaggcccttgcctctcagcattaacctggtgtaggctctgttcccaaatgagccctgtgttgtctttct

SEQ ID NO: 25662 - DNA, 201 bp, Homo sapiens
ctgggaatctgaaagaccatacacatgcctagggctgggcatgtgcttaaaaagacttgagagggccctatgctgtcacctctgcctgaccttcaggctcygtgcaagcaggaagtgaaggctaaggcatagttataaactgcatgggtgaaggttgaaaggtgtgtcccaacacagaacacatctgcaaatgctacgagg

SEQ ID NO: 25663 - DNA, 201 bp, Homo sapiens
gcagatcacctgaggtcaggagttcgagaccagcctggccaacatggtgaaaccctgtctctgctaaaaatacaaaaattagccagacatgatggcgggcrcctgtaatcctagctacttgggaggctgaggcaggagaatcacttgaacccaggaggcagaggttgcagtgagccgagatcacaccattgcactccagcc

SEQ ID NO: 25664 - DNA, 201 bp, Homo sapiens
tcttggggagaggggaagacccagggtcgcaggaccacagctcacagtggggtcgacctgccctgtggggccatgcagggcagagctcctagccaggaggyagattttgactcctgctgggaactcccttaaaagccaccccaagaatgagctccacgagcgccatcaaggctggcctgcaggccctccagggttaccaag

SEQ ID NO: 25665 - DNA, 201 bp, Homo sapiens
cagaattgcaccagcagtgtgaagcatgtctcttgccccatgcaaggaaaggaggagagaggcattggtcagggtgaaaggtatgattctcatggatgccagagagagagagagagagagagagcagatcttctggattatagctcactgtgttgcctctctcctggggagtgggtgctggacaggctagggagggggacc

SEQ ID NO: 25666 - DNA, 201 bp, Homo sapiens
agaggtatatcttggggagaggggaagacccagggtcgcaggaccacagctcacagtggggtcgacctgccctgtggggccatgcagggcagagctcctakccaggaggcagattttgactcctgctgggaactcccttaaaagccaccccaagaatgagctccacgagcgccatcaaggctggcctgcaggccctccagg

SEQ ID NO: 25667 - DNA, 201 bp, Homo sapiens
agaattgcaccagcagtgtgaagcatgtctcttgccccatgcaaggaaaggaggagagaggcattggtcagggtgaaaggtatgattctcatggatgccagagagagagagagagagagagagcagatcttctggattatagctcactgtgttgcctctctcctggggagtgggtgctggacaggctagggagggggacct

SEQ ID NO: 25668 - DNA, 201 bp, Homo sapiens
gaattgcaccagcagtgtgaagcatgtctcttgccccatgcaaggaaaggaggagagaggcattggtcagggtgaaaggtatgattctcatggatgccagagagagagagagagagagagagcagatcttctggattatagctcactgtgttgcctctctcctggggagtgggtgctggacaggctagggagggggacctg

SEQ ID NO: 25669 - DNA, 201 bp, Homo sapiens
aattgcaccagcagtgtgaagcatgtctcttgccccatgcaaggaaaggaggagagaggcattggtcagggtgaaaggtatgattctcatggatgccagagagagagagagagagagagagcagatcttctggattatagctcactgtgttgcctctctcctggggagtgggtgctggacaggctagggagggggacctga

SEQ ID NO: 25670 - DNA, 201 bp, Homo sapiens
tattgagctccaaaaccttcaggagccccaggttctgggaggcagcatgcaaaccactgaggccctgcaggcgcactcattgaaaataggtgaggtagacraggctgggagggcttagatttgtcaaggcccctcagagagaagccagtttctcagacgcccctatgctccactgccagggaacacattttctgaattctt

SEQ ID NO: 25671 - DNA, 201 bp, Homo sapiens
tctcagggccagaagtcagaaagacgcgggccccaagtcataagctcatctctgtgcttgtgttttaagccacataaactgtctcagcgggctggactagsctatgccttgttgtaccctgagatcctagtgagtagttctccaagtactgtgtttacagataaaggcaaatgccagagagaaatggctggaaaaacccct

SEQ ID NO: 25672 - DNA, 201 bp, Homo sapiens
atctaggggtagacattgtgaaagccaatgtcagtgaggctcaggcccagtgtcttggagctgcagagcttccctttacctcccactgcaaaatgagggargggtttagagaagtttctgcttccttccggcagagctgctgcaagggttgtcttgtagatagtaactaccacaggacttggggtgtggcacatccctgtg

SEQ ID NO: 25673 - DNA, 201 bp, Homo sapiens
ctttcagaattcaaaaagaccctggaagaggccattcgaagcgacacatcagggcacttccagcggctcctcatctctctctctcaggtacttttcccacsacagggctcggggcccccaagccatggaagtcaaagagatgggatccccgcaatgaggaaagggaaaataaatggggaaggagtgggcatgaccatacac

SEQ ID NO: 25674 - DNA, 201 bp, Homo sapiens
tgacgctcaaaggaagtgctcattgaagcattttggattttggatttttggattttggatacacaatggtaagtatgatgccagtattccaaaatctgaartcatctggtctgaagaccacaatgtctgaaacattgctgatcccacacattttgaatgagaggtactcggcctgtatgcccaggagtgagattgctggat

SEQ ID NO: 25675 - DNA, 201 bp, Homo sapiens
ggcccaggccagggaagtctcagctgcagagcatctcatgacccctacccgacccacccctgctgcctcttcctccagggacggatgagcaggccatcatygactgcctggggagtcgctccaacaagcagcggcagcagatcctactttccttcaagacggcttacggcaaggcgagctgcggggtgggggcgcgggaca

SEQ ID NO: 25676 - DNA, 201 bp, Homo sapiens
gggccctggcagaagctccctctgctcaggtggtgtaactggcggtggcttccccttgcggaagtgggtaaacaaagacagagacctgtgtctcctccccrcccctgccacctgcacttataaacacaacccactgtttccctttttgggagtgtgtgagagagagagagagtgtgtgtgtgtgtgtgtgtgtgtgcacgc

SEQ ID NO: 25677 - DNA, 201 bp, Homo sapiens
gacatctatccctgggttctagcccttgctctgccacatctcactgaggttgtggccacatcattttccttcccctgccctcttcatgaccaccctggggrgtttagctgatgtaagagctttgcagggaaaggctgtgagtgctgcccaagtacgaggggcgtgtatgagcatattttgaacttctggggttttgaatct

SEQ ID NO: 25678 - DNA, 201 bp, Homo sapiens
gcggggtgggggcgcgggacagtgaggcgtgtcctgggctcagcacagccctgctctcccctgcttttccttgggtgggcccggatctcccggatggacartaaggagcaggagggcatttccttctgcccatccagctggtggcatcgttgggaggtgaaggatgccaccgggtgctgaggtttgctgagaggctccaga

SEQ ID NO: 25679 - DNA, 201 bp, Homo sapiens
gcctgtcccccatagtaggtctcatggcctgggaagcctagggagatgcacattccactcagccacggtttctccatgacggtcatggcctctccagtctrcccctcctgcctgagcagcagcacagttcctcatcaccatccacattgcttccctgtgtagctcctagccccactaagacccccgcccctctgactcttg

SEQ ID NO: 25680 - DNA, 201 bp, Homo sapiens
gttaaaaaaaaaaaaaactaatatacaaatcaatattccagccaccagactggggaaggccagtggaaaatcactccatgaaagcatccactgtagtcccrgtctgcttggtttgctgttaggccctgaggggcagggggtgtcactgctgtgtggcttctggcccgagatgatgtttctaggcccttgcctctcagcatt

SEQ ID NO: 25681 - DNA, 201 bp, Homo sapiens
accctgggcagccaccagtgacctaccctggtcagcctccagtgccactccctgggcagcagcagccagtgccgagctacccaggatacccggggtctggractgtcacccccgctgtgcccccaacccaggtgagtgtcagcccactgcctcccttggtccaggcctgggccccaaaggctggagacacatggctcagta

SEQ ID NO: 25682 - DNA, 201 bp, Homo sapiens
tggttatgccgagtttctctcttctagtgaaatgtctcaagaataccccagccttctttgcggagaggctcaacaaggccatgagggtatgtaacttccaygtgcaggttgcgatggaaccttagcctcgcctgtgcctgggaccaagggctgagggcagaaggcctggggagagctaaatctcagctgagagttccgagg

SEQ ID NO: 25683 - DNA, 201 bp, Homo sapiens; identical to SEQ ID NO: 3001

SEQ ID NO: 25684 - DNA, 201 bp, Homo sapiens
agcaccagccctcttagggtcttgctgtatcaccttggcatgccacaaccctctctctggttgtcagtgtgaccatttgtgaaatggggtgaggtggggtyggtgggagtgaactgagtcgtctctgaggtgctgagctggcctctggcatccggttgtgaggtcctggctgatggggtgtgatggccctgcctgtgcaaa

SEQ ID NO: 25685 - DNA, 201 bp, Homo sapiens
ggctgttcccagagtctaggggtggagcagccttgaatgtggggaaggcggcatgcacgacatcttacctgagactgtttgtccgagtagtttggaagccraggcaccatcactgatgctcccggctttgaccccctgcgagatgccgaggtcctgcggaaggccatgaaaggcttcggtaagagaccctgggtggctcaa

SEQ ID NO: 25686 - DNA, 201 bp, Homo sapiens
ccatgcttattgcatccatggatgtaaaacaaagctgagagagagggggaagatgtttgatgttgagcagaatcccagaaggtctcaggagactggagcartgggcagaacccaggggagaaatttcacaggagcccacataaggtctccgtggcctgaaaacccacttgtaccagtccggggaggtagggagtagcatcc

SEQ ID NO: 25687 - DNA, 201 bp, Homo sapiens; identical to SEQ ID NO: 3004

SEQ ID NO: 25688 - DNA, 201 bp, Homo sapiens
tgtgaggtcctggctgatggggtgtgatggccctgcctgtgcaaatccgactgggcaaatgctgactgggcatgcgtagcctggccacacggaagccactragggcccaagtcccctggtgactcatgttgattggtaattcaagttagcacacctgtgccgagcctgttcccgacacatgggagaggcgagcacctggtt

SEQ ID NO: 25689 - DNA, 201 bp, Homo sapiens
tagcctcttttgaaaaaatgcagaggtcacagttaccagaagactggaccatgagcagatttcttaattttcaaagaaaaggaggagaagaatgctgcttstgtgagtcagagagcagtgtgctaatcctgcagcctctagcctcctagaacatggatagcttggggggagattggtcagcgctgggagcctgtgtccacc

SEQ ID NO: 25690 - DNA, 201 bp, Homo sapiens
ccctggtgactcatgttgattggtaattcaagttagcacacctgtgccgagcctgttcccgacacatgggagaggcgagcacctggttcctccttgtgccrttggaaagggttttttttgtagtcttggtggtttaatatttcccttgttgaagaaagctggctgagttaggtagacatgttcacagagctcttatgcaaa

SEQ ID NO: 25691 - DNA, 201 bp, Homo sapiens
ccgattcatccttgttgttcctaccttttcctagttgttttcagacattccaccatcccctctaggaccagggtttcgtatgtccacttggatctctcttkctttttacccatttttttcagttgttgtcatctcgcttccggctgaactctgaataaagcaggcctcggtccacattttaacccaaccatttactgtgtg

SEQ ID NO: 25692 - DNA, 201 bp, Homo sapiens
caggctagggagggggacctgagggccttagaagtcttgccgagcccagatatggcagccctggggtgccaggaacgacttctccaaggacagccccttgyggtagcctcttttgaaaaaatgcagaggtcacagttaccagaagactggaccatgagcagatttcttaattttcaaagaaaaggaggagaagaatgctgc

SEQ ID NO: 25693 - DNA, 201 bp, Homo sapiens
ttgattggtaattcaagttagcacacctgtgccgagcctgttcccgacacatgggagaggcgagcacctggttcctccttgtgccattggaaagggttttytttgtagtcttggtggtttaatatttcccttgttgaagaaagctggctgagttaggtagacatgttcacagagctcttatgcaaagagaacagaggcctt

SEQ ID NO: 25694 - DNA, 201 bp, Homo sapiens
gtaagctgcagagccaggattcaaaccaacatacaagccaggctgcccagcctgtcctctatggtcttactgtccctggcgtggttgtccgattcatcctygttgttcctaccttttcctagttgttttcagacattccaccatcccctctaggaccagggtttcgtatgtccacttggatctctcttgctttttacccat

SEQ ID NO: 25695 - DNA, 201 bp, Homo sapiens
ccgaggtcacacagctggtaagctgcagagccaggattcaaaccaacatacaagccaggctgcccagcctgtcctctatggtcttactgtccctggcgtgkttgtccgattcatccttgttgttcctaccttttcctagttgttttcagacattccaccatcccctctaggaccagggtttcgtatgtccacttggatctc

SEQ ID NO: 25696 - DNA, 201 bp, Homo sapiens
gggtatggctagcatgcccagaacagttgaggggcccaggccagggaagtctcagctgcagagcatctcatgacccctacccgacccacccctgctgcctsttcctccagggacggatgagcaggccatcattgactgcctggggagtcgctccaacaagcagcggcagcagatcctactttccttcaagacggcttacgg

SEQ ID NO: 25697 - DNA, 201 bp, Homo sapiens
ccacctgcacttataaacacaacccactgtttccctttttgggagtgtgtgagagagagagagagtgtgtgtgtgtgtgtgtgtgtgtgcacgcgcgcacrtgcgcgtgcatccttaggttccgtctaaatccgttcaagctgctgtaataaaatatcatagaccgggtggcttataaacaacagaagtacattgctcaca

SEQ ID NO: 25698 - DNA, 201 bp, Homo sapiens
tgccccctcaagcattccaagctcatactcttcctaaggtgaatcagcacctgagtcttttgctgatgtagaagcctgatctcaacttagagtcccagctrtattatagttatataaacacactgtctgtctgtctgtctctctctctcgtattagttatataaacacactctctgtctctctctcacacacacacacggt

SEQ ID NO: 25699 - DNA, 201 bp, Homo sapiens
ccaggctggtctcaaacttctgagctcaaatgatctgcctgcgtcagcctcccaaagtgctgggattataggcatgggccactgtgcctggcctcatcttktcattttaaagaatatatcagcagggattattggacctgcctggtttaaactattgtcttagttaattttgtgctgctctaacaaaatatcacagactga

SEQ ID NO: 25700 - DNA, 201 bp, Homo sapiens
ccagatctgttcacatcatttgacagtttctctagtggttattgatctttttcttattatattaataaaacttttttcctaagtttttttctcatctttattttttttaatttgtctcttatgctgaaattttatttatgtcgttggtttttggggctacttctttcactgcattatttggcctggctggaatttacttgg

SEQ ID NO: 25701 - DNA, 201 bp, Homo sapiens
aaaccctgtctctactaaaaatacaaaattagctgggcttgcctgtaatcccagctaattaggtaggctgcggcaggagaattgcttgaacccgggagacrgaggttgcagtgagctgggatcacgccattccacttcagtcttggtgacagagtgagacttcgtctcaaaaaaaaaaagagagttaataattcattacag

SEQ ID NO: 25702 - DNA, 201 bp, Homo sapiens; identical to SEQ ID NO: 2996

SEQ ID NO: 25703 - DNA, 201 bp, Homo sapiens
tgtgcagttgaacccctagctgtcctggaggtgtcttgtgtgtgtttgcggtgcagctctggagtagggaactgcagtgtgggtattagtgggagggcatycaactgcgctcccggaggagtatgactcatatcctgccacgtttcctctaaaaatacatccctgcaggcagttgtcagatgtttgtgatggaaacacgtg

SEQ ID NO: 25704 - DNA, 201 bp, Homo sapiens
cctctccagtctgcccctcctgcctgagcagcagcacagttcctcatcaccatccacattgcttccctgtgtagctcctagccccactaagacccccgccyctctgactcttggtcctttcaccgcagtggttgccaggaaagagggtgggttggtttccaggctttgcgtgtttctgttccaaatagctggagccaagat

SEQ ID NO: 25705 - DNA, 201 bp, Homo sapiens
attccaagctcatactcttcctaaggtgaatcagcacctgagtcttttgctgatgtagaagcctgatctcaacttagagtcccagctgtattatagttatrtaaacacactgtctgtctgtctgtctctctctctcgtattagttatataaacacactctctgtctctctctcacacacacacacggtccctgactcaaga

SEQ ID NO: 25706 - DNA, 201 bp, Homo sapiens
cactaagacccccgcccctctgactcttggtcctttcaccgcagtggttgccaggaaagagggtgggttggtttccaggctttgcgtgtttctgttccaartagctggagccaagatcatgggatagttgagcctggaacagaaggaggaggagaaaagatggatgcagtgatgggtttgacatctgggcctctaagagga

SEQ ID NO: 25707 - DNA, 201 bp, Homo sapiens
ggtcacccctggctattgggctgcgtttacttttctcctgggggtaattaggcagataaacaggctctcttcagagtaaatgtgctagaaccctcacttgrgcatgtggagaaatgtgtactgggtggtggcagagtgagttgggggagagctggttaaatgcctgcacccacatgatgcctagtgtttgatgttgaactg

SEQ ID NO: 25708 - DNA, 201 bp, Homo sapiens
catgagggtatgtaacttccatgtgcaggttgcgatggaaccttagcctcgcctgtgcctgggaccaagggctgagggcagaaggcctggggagagctaartctcagctgagagttccgaggacctgggtagggaggggactggagggcccagggcaggtgggaaggtgaggaggcctggtgctcatgctcttgggtggac

SEQ ID NO: 25709 - DNA, 201 bp, Homo sapiens
catgaccttgctgtcgcccccaccttgcatcccccagcagcatcagagaacactcgggacctccccaaccttgaccgtgaccttcagcgttccgatcaccstgtgattccttgatctgtcagtgagaactcatgtcccaaaggctctgtggagctctgctgtcactccctgacaaagcacttcctgcactcagctttatgg

SEQ ID NO: 25710 - DNA, 201 bp, Homo sapiens
tccgcccagcatgccccccatcgggctggataacgtggccacctatgcggggcagttcaaccaggactatctctcgggaatggtgagtccagctctcctgytgaggcagccctggggccacacctgcgtggccagaggaatcaaagctgctggcctctggggctccagagttgtctatgtgtgtgttgctgtggtgtgtag

SEQ ID NO: 25711 - DNA, 201 bp, Homo sapiens
accttagactcagtagcatttgatgatggtgggcatgtcatcacaggaaactcactgtgtttccttggctgtatgaatgaagctgttgttagagaattagygattctaggctgggcacagtggctcacgcctgtaatcccagcactttgggaggctgaggcaggtggatcatttgaggtcaggagttcgagaccagcctgg

SEQ ID NO: 25712 - DNA, 201 bp, Homo sapiens
gattcgcatcatggtgtctcgcagcgagaccgacctcctggacatcagatcagagtataagcggatgtacggcaagtcgctgtaccacgacatctcggtaygggcctgctgcaggccaactgggctcccttttggcatctcagtcacctgtggaacctccctccttggagtggccatatgcttggcctctgtgctgtgtgt

SEQ ID NO: 25713 - DNA, 201 bp, Homo sapiens
tggggctacttctttcactgcattatttggcctggctggaatttacttggtataaggaacagggtggtatccagcttctgtttcttgggttttttccctgrcctggctgtggatggagcttttggcttcatttctctgagaggaggccaggagtggagagtgtctttggtgctcaaaggtcctgcctagtggtgtctccag

SEQ ID NO: 25714 - DNA, 201 bp, Homo sapiens
tagctcactgtgttgcctctctcctggggagtgggtgctggacaggctagggagggggacctgagggccttagaagtcttgccgagcccagatatggcagycctggggtgccaggaacgacttctccaaggacagccccttgcggtagcctcttttgaaaaaatgcagaggtcacagttaccagaagactggaccatgagc

SEQ ID NO: 25715 - DNA, 201 bp, Homo sapiens
aggtaaggcaggctggggtccctcagaggccagttagatgagggcagtcaggggattgtggggaaacaaagctatgggaacacttggtcgttcctccctgygtggggctttcgcctcctcaaaagagccccctggtggggatttaaaagacactgtcagagggtttcctgagttctggcaaacatccagttctggaggttc

SEQ ID NO: 25716 - DNA, 201 bp, Homo sapiens
tcctgctgaggcagccctggggccacacctgcgtggccagaggaatcaaagctgctggcctctggggctccagagttgtctatgtgtgtgttgctgtggtktgtagtgtgttgagctgtaccttagaacagggttttcatcaggcttctgccacctgctctctgcccctctctgggtctcacttttcccatctgtaaaatg

SEQ ID NO: 25717 - DNA, 201 bp, Homo sapiens
gagagagagagagagagagagagcagatcttctggattatagctcactgtgttgcctctctcctggggagtgggtgctggacaggctagggagggggaccygagggccttagaagtcttgccgagcccagatatggcagccctggggtgccaggaacgacttctccaaggacagccccttgcggtagcctcttttgaaaaa

SEQ ID NO: 25718 - DNA, 201 bp, Homo sapiens
ttaagtaatgtgcccgaggtcacacagctggtaagctgcagagccaggattcaaaccaacatacaagccaggctgcccagcctgtcctctatggtcttacygtccctggcgtggttgtccgattcatccttgttgttcctaccttttcctagttgttttcagacattccaccatcccctctaggaccagggtttcgtatgt

SEQ ID NO: 25719 - DNA, 201 bp, Homo sapiens
gtgttattctagggagggggtcaggaggccatcaggcagggcgatggcccggggccccagggagtggacccagacatctccctggcccccgtcttcagccrgagtcatgagctggtggttgtggagtgttagaaaccacacaggtttggggcagctgtcactcaccagctgtgtgtccttgagcacctgtgaaatggggac

SEQ ID NO: 25720 - DNA, 201 bp, Homo sapiens
tctggggtggggaggagagtgaatgctgcctctgtacagtggctgggagtggagaggggagaacagtagtttcctcactcccctcctcccctcacagcacsgcccagcaggggaggagaggacaacaggagtagtgggacagccagccgaggcaggggctggagaagagcatgacactaaggccatcggaggcctaggttt

SEQ ID NO: 25721 - DNA, 201 bp, Homo sapiens
ttggacagaagtggcacacgttttgcaatgcagcactgtgaggggatgtcaggttttgtcgtcagctgcctgcaggccaagctctaccatggaccctctcygccacacccgtgtgatgtgagcaagccatgtccctggtgtattttagctgcaaagctgaggaagttagaacatgatcccttccaatgtggacattttgtg

SEQ ID NO: 25722 - DNA, 201 bp, Homo sapiens
agcaaatgtgcatggcctagccttgctggtggctggagcccatatctccacctccaattgttgggtagagacacagcaaggcttcccttttggtagggggrtgactgagtcggggcagtgaggctcttcttgctctggcagttgcctcctgtcccagtgtagcatttctagattcctgtgttaggggactccagctagtac

SEQ ID NO: 25723 - DNA, 201 bp, Homo sapiens
gtatacaaatgtctgttggagtccctgctttcatttcctttaggtatataggttgagtatcccaaatctgaaatgttccaaagtccgaaactttgtgagcyccaacatgacgctcaaaggaagtgctcattgaagcattttggattttggatttttggattttggatacacaatggtaagtatgatgccagtattccaaaa

SEQ ID NO: 25724 - DNA, 201 bp, Homo sapiens
aatcagtctgccccttttttcattatgctttttttggagctttctggatgggagagatggaaaatcctcatttccctgcctgtcccccatagtaggtctcrtggcctgggaagcctagggagatgcacattccactcagccacggtttctccatgacggtcatggcctctccagtctgcccctcctgcctgagcagcagca

SEQ ID NO: 25725 - DNA, 201 bp, Homo sapiens
cagtcatgtgtgaggagattgcatttcctgagcaggacactgtgttgcgttacattggtaaccccaatttaaggcagcataaatgcactgggaaaacagcratattggttagccctgggaagtggtttttaggatgattataatttttttttgtgggtattcatttgatgtggatagctggggtgagtgctgctttccgtc

SEQ ID NO: 25726 - DNA, 201 bp, Homo sapiens
gccttggtgggtgtgtggcaggtatcttgggcagacatgctactttttaaatttgttgtttcacttttaaaataatacattttatgatttgaaaacaaacrtatgcttagtttatgatttgaaaacaaacgtatgcttagaggaaattatgcaaccaatacacaccctaatttgtgccaggcccagttctaggcactgggg

SEQ ID NO: 25727 - DNA, 201 bp, Homo sapiens
tgcagtttgtatagcattttaatttagcatcctccttcctaaccacctccacctggcaaccttcatttaacgcagaacaaagggccttgatctcctgtatrgccatggaatggcttaggggttctgatgttccttatagataaggaatggatctccaggttggccacagttcctcagctcagaactctgaacacacattct

SEQ ID NO: 25728 - DNA, 201 bp, Homo sapiens
ttgggtcagaacacccctggcgagtactccttattcctctgtgtcatttactgcctgggctgtgtgttttgtaagaactgcccaggccacctgtctcaagrctttgtgctcaacagctgtcttcggtcccttgatatgcaccacccccgccccccccggcacagacaggttttggaggattattaaaattccctttgggta

SEQ ID NO: 25729 - DNA, 201 bp, Homo sapiens; identical to SEQ ID NO: 3007

SEQ ID NO: 25730 - DNA, 201 bp, Homo sapiens
atcaatgggcacttgagttgtttccaccttttgactactgtgaatgaggctgctatgaacatgggtatacaaatgtctgttggagtccctgctttcatttsctttaggtatataggttgagtatcccaaatctgaaatgttccaaagtccgaaactttgtgagctccaacatgacgctcaaaggaagtgctcattgaagca

SEQ ID NO: 25731 - DNA, 201 bp, Homo sapiens
ggtctggcatccgcatactccattgctgcagccaccaccagatcttccagaccccatgggatcgaggggccccctccaagacccagtgggataggggttatttttttttttttgagacggagtctcactctgtcgcccaggctggagtgcagtggcatgatctcggctcactgcaagctctgcctcctgggttcacgccat

SEQ ID NO: 25732 - DNA, 201 bp, Homo sapiens; identical to SEQ ID NO: 3010

SEQ ID NO: 25733 - DNA, 201 bp, Homo sapiens
gagggcccagggcaggtgggaaggtgaggaggcctggtgctcatgctcttgggtggactctctttagggggcaggaacaaaggaccggaccctgattcgcrtcatggtgtctcgcagcgagaccgacctcctggacatcagatcagagtataagcggatgtacggcaagtcgctgtaccacgacatctcggtacgggcctg

SEQ ID NO: 25734 - DNA, 201 bp, Homo sapiens; identical to SEQ ID NO: 3012

SEQ ID NO: 25735 - DNA, 201 bp, Homo sapiens
aactggttgaagggtggatgggtgaaagatgagcctcttctgtcttattattactattaccaaagaggcaacagtgctttagcttgttccttcccctcccygatcttttctctcccactccaccttttgaaacttttgttaatcttgctttcttctaccttgtctcatttccgccttgctttcctctctcctctgccacct

SEQ ID NO: 25736 - DNA, 201 bp, Homo sapiens
gcttaaagatactttgtcatctttccgtgtatctcaaactctgtgccatgttaggggatgcggcaaatatttgcagaatgaattaataactggttgaaggrtggatgggtgaaagatgagcctcttctgtcttattattactattaccaaagaggcaacagtgctttagcttgttccttcccctccctgatcttttctctc

SEQ ID NO: 25737 - DNA, 201 bp, Homo sapiens
taaactgtaggttaggatagtccttctctgaatatatataatctgtgaaggaattctttcactcagaggtggatgtgaggcagcattctgcagcatctcakaaactggtgctcattaaggcacaggatcctggctgaggccagtggcaaagcttgcttaaagatactttgtcatctttccgtgtatctcaaactctgtgcc

SEQ ID NO: 25738 - DNA, 201 bp, Homo sapiens
tactgaggcatggaccttgttccacaagggactgagagataacagtgctaactctgagagtgtgcatttgtgtgtgtgtgtgtgtgtgtgtgtgtgtgtgtgtaagagaatattagtagcctaaagggagatctcatgctgctttgctttgtttcatttttttggttgtaaagttgaataaaaggcacttagtccaaaact

SEQ ID NO: 25739 - DNA, 201 bp, Homo sapiens
gtactgaggcatggaccttgttccacaagggactgagagataacagtgctaactctgagagtgtgcatttgtgtgtgtgtgtgtgtgtgtgtgtgtgtgtgtgtaagagaatattagtagcctaaagggagatctcatgctgctttgctttgtttcatttttttggttgtaaagttgaataaaaggcacttagtccaaaac

SEQ ID NO: 25740 - DNA, 201 bp, Homo sapiens
tcagcctcctcgtttaatatttatccgcccctcttctctcttacttgggacctgtactgaggcatggaccttgttccacaagggactgagagataacagtgctaactctgagagtgtgcatttgtgtgtgtgtgtgtgtgtgtgtgtgtgtgtgtgtaagagaatattagtagcctaaagggagatctcatgctgctttgc

SEQ ID NO: 25741 - DNA, 201 bp, Homo sapiens
tgtgctagtcttgtcttattgactagataatcaatttctcaaatgagaaacattcagccttctcttgagtctttcttccactctgccttagactggacacmtaggtgactactcaagaagtcttactacacatccaatagcatttgacagggagttagccacataaaatccaatgagcctctagccagagagaattcagtt

SEQ ID NO: 25742 - DNA, 201 bp, Homo sapiens
atcagcctcctcgtttaatatttatccgcccctcttctctcttacttgggacctgtactgaggcatggaccttgttccacaagggactgagagataacagtgctaactctgagagtgtgcatttgtgtgtgtgtgtgtgtgtgtgtgtgtgtgtgtgtaagagaatattagtagcctaaagggagatctcatgctgctttg

SEQ ID NO: 25743 - DNA, 201 bp, Homo sapiens
catcagcctcctcgtttaatatttatccgcccctcttctctcttacttgggacctgtactgaggcatggaccttgttccacaagggactgagagataacagtgctaactctgagagtgtgcatttgtgtgtgtgtgtgtgtgtgtgtgtgtgtgtgtgtaagagaatattagtagcctaaagggagatctcatgctgcttt

SEQ ID NO: 25744 - DNA, 201 bp, Homo sapiens
acatcagcctcctcgtttaatatttatccgcccctcttctctcttacttgggacctgtactgaggcatggaccttgttccacaagggactgagagataacagtgctaactctgagagtgtgcatttgtgtgtgtgtgtgtgtgtgtgtgtgtgtgtgtgtaagagaatattagtagcctaaagggagatctcatgctgctt

SEQ ID NO: 25745 - DNA, 201 bp, Homo sapiens
ttccatgaagcataccattctactcagtttcttataggttttaacaaattgttttgtgactgtatgatggaaggtccaatggatcctctcttctctccatsatgtgggtctaattgtttctggcatcatgttactcagctatataaacccttctgggatgggactgtatctcttcagtattcttgattttccttacagctc

SEQ ID NO: 25746 - DNA, 201 bp, Homo sapiens
taaatggaaatagctaagtgcaaactttccagaaaagagtgagctatatgtgtgtgtgtgtatacatgtatgtcaagtggtatgaatgggaatccctgctycaagggtgtttgtggagttttgagaaactgagacaaaatcagcctgtgtgcgagattcttaatgacctgcctagtaaagaatatgaaatgttagcaagtg

SEQ ID NO: 25747 - DNA, 201 bp, Homo sapiens
gcaagactgaattatttatattagtgatttcttatgacaatcttataagtaactgtacaatttaggtttattttctcttttttttttttttttttttttttgagacagagtctcactctgttgcccaggctggctggcgtgcagtggtgcgatttcagctcattgtaacctctgcctcctgggttcaggggattcttgtgc

SEQ ID NO: 25748 - DNA, 201 bp, Homo sapiens
gtatctgaaattatgaacacagggaacgaagaggtgattttatatataagtatatatacatttatacataaatgtaatatttatatataaatatatgattyatgtaaataataacaaaataatatatatgaatgaatttatagaaaaatactggctttggagagatgtggtgactgctattccttatagtctcaaaatgag

SEQ ID NO: 25749 - DNA, 201 bp, Homo sapiens
caggcattgctgtgcttcctcaccctgcaatgctgccgccacatcctgttgctctctgtttgtttgattggagtggctctcctgaagctgggctgtttgcwtgcttggtaggcccccttcctgaatgtgccagccagctctggagccctactcagtaactgtttcggatgtgatcctcatcagatatatttctacctacta

SEQ ID NO: 25750 - DNA, 201 bp, Homo sapiens
tatgtggatgttacagaacctaaaggaagatctaaatggcattataagaagctgcttttaccccaagacttattatctttctccatctcacttatagtttrgcatctttgcatttgtagttccaaaaatctgaattacttcccctcgccttcttgtgaattaattccatatacttgtgaccatgggagagaagcagactca

SEQ ID NO: 25751 - DNA, 201 bp, Homo sapiens
gcccccattgcatcagggaaatctctgactttgtgggataggtttgacgtgtcagtcaatctctctctacccccatttgagactgagagtgtatctctccctgtgttttctctgagcgtgtttagtgagcttattggccccctaggtttcattgccagccacagcttagtccttgtcagagagattattatatgaacccta

SEQ ID NO: 25752 - DNA, 201 bp, Homo sapiens
tgaaagctcccctccactattatgctagtgtttggaagggcaggcgactttgtgtgtgtgtgtgtgtgtgtgtgtgtgtgtgtgtgtgtgtgtgtgtgtgtgtgtgtaggggaggggatgttttcatgtgagctgtggataaactgaacaaatttaattaaggtctaaactgaagtaggatcccatagtctaggtaggatc

SEQ ID NO: 25753 - DNA, 201 bp, Homo sapiens
acggggtttcaccatattagccagaatggtctccatctcctgacctcgtgatctgcctgcctcggcctcccaaagtgctgggattacaggcgtgagctacygcgcccggctggcttgcgtttcaatctaagctaatcacctgggtcagacccacacctcgtaccaggaactgggctcatgtccatcagaatcatatgaaat

SEQ ID NO: 25754 - DNA, 201 bp, Homo sapiens
ctgaataactgtttctaaaagacagagctagaaggcagggagggagagagagagagagaaagggagtggagaagagagggggagagagagagagagagagagattgatttggcctagctcattctaggtaaaaagatgtactagctcttaaaagttgctactatcttttcaacgtgctcatatatcatatatttaacataa

SEQ ID NO: 25755 - DNA, 201 bp, Homo sapiens
ctcactgcaacttcagcctcccaggttcaagtgattctcttgtctcagcctcctgggtagctgggattacaggcatgtgccaccacgcctggctaattttktttgtatttttagtagagatgaggtttcgccatgttggccaccttggtcttgaactcctgacatcaggtgatccacctgcctcggcctcccaaagtgctg

SEQ ID NO: 25756 - DNA, 201 bp, Homo sapiens
tgttgggtagacatgtcctaaaggctttttgtacccgatctcagaagcttgtttttcaactgaattgaaatgtattttcaattcagtaaatgaagtatatrtaaaaaccacaatgactaaaggggcattttaaagaaggttaggggcaggaaaatcaactaaatttgatgactgaaatgttctatttttcaaatgtccata

SEQ ID NO: 25757 - DNA, 201 bp, Homo sapiens
aagtatgagttcagtttagtttttgcttatggaccacaaagatggccctcacctctaaaccttgaagaattccagaatttttctgggagaggaacatctctatcacatctgccacagcggaaggctttgtgcaggataacatatcattggcttgagaacagagtgagcatgtgtggaagggcctgtaattattaatatgac

SEQ ID NO: 25758 - DNA, 201 bp, Homo sapiens
cttgggggaaaggtgggtgggtggtgagggataaaagactacaaattaggtacagtgtacactttgcaggtgatgggtgcaccaaaatctcagaaatcackactaaagaccttattcatgtaaccaaacaccacctgttcccccaaatcctattgaaataaaaaattaaaaataaaactgtatcttatcagtaggttcaga

SEQ ID NO: 25759 - DNA, 201 bp, Homo sapiens
tttagtacttaaagcaatctgcaattaacatatcatggggagctgcctccgagcaaaggcatgcaaattgaagtgcttagataaaaagccattcatgttgkgggggaaagagaaagaaagaaaaaagaaaaagaaaaaaaaatcaaagaaagggtggcaaagtactcagagggtgctggtttttatatttgagattaagga

SEQ ID NO: 25760 - DNA, 201 bp, Homo sapiens
catcagctcttctcttattttgagtgtttgattatggctcccccctggcacatctacatgttttgtaactatgtcacacagggagatcggctttgttgaayttcctgtaacttggatagagaggagaaaaaacaggaaagggccctctgcgttgcatcctttaataaaagaaccacatgggggcagagagagaagaagctg

SEQ ID NO: 25761 - DNA, 201 bp, Homo sapiens
atgaaagctcccctccactattatgctagtgtttggaagggcaggcgactttgtgtgtgtgtgtgtgtgtgtgtgtgtgtgtgtgtgtgtgtgtgtgtgtgtgtgtgtaggggaggggatgttttcatgtgagctgtggataaactgaacaaatttaattaaggtctaaactgaagtaggatcccatagtctaggtaggat

SEQ ID NO: 25762 - DNA, 201 bp, Homo sapiens
aatgaaagctcccctccactattatgctagtgtttggaagggcaggcgactttgtgtgtgtgtgtgtgtgtgtgtgtgtgtgtgtgtgtgtgtgtgtgtgtgtgtgtgtaggggaggggatgttttcatgtgagctgtggataaactgaacaaatttaattaaggtctaaactgaagtaggatcccatagtctaggtagga

SEQ ID NO: 25763 - DNA, 201 bp, Homo sapiens
caatgaaagctcccctccactattatgctagtgtttggaagggcaggcgactttgtgtgtgtgtgtgtgtgtgtgtgtgtgtgtgtgtgtgtgtgtgtgtgtgtgtgtgtaggggaggggatgttttcatgtgagctgtggataaactgaacaaatttaattaaggtctaaactgaagtaggatcccatagtctaggtagg

SEQ ID NO: 25764 - DNA, 201 bp, Homo sapiens
tgctctctcctctttccagattcctttgattcacagtgcctgactcacattcctcctttttttcatatgtgctagtcttgtcttattgactagataatcartttctcaaatgagaaacattcagccttctcttgagtctttcttccactctgccttagactggacacataggtgactactcaagaagtcttactacacatc

SEQ ID NO: 25765 - DNA, 201 bp, Homo sapiens
acgccgattcacgctgacttcctagaactgaatcaaaaggaaagccccaactttccacactaagtaacaaaaggacgagaggctactccctttgcaaatcyctcccccccactacccctacttttctgcatggcagatggaaaattgaaagtacctctgattgatggctttttgcaaccaatcagatgtttgcataggagt

SEQ ID NO: 25766 - DNA, 201 bp, Homo sapiens
actcacccactcacagacagtctcctgtgctctggttggagggtttccattggtccaacacttcacctgtcttgtcctttgtcctgggtatgtgggtcccycttactcatctgcttttctagcccccatgtgattttacttttcaccttccatgtctttgctcatcttgggctgaaatgtccttcctctctgtctgcacct

SEQ ID NO: 25767 - DNA, 201 bp, Homo sapiens
atactctgtatatgaagattggcagggaatacaaaagtgcataattattatttagtgtgttgatcatactcgtatatttccaaatggctttgtgatcatttggttagtttttctctctaagctctggcagtcttccagctaatgtcatcagcggggaacagcagcaaggagaggtggcagaattgtgactacctatggctt

SEQ ID NO: 25768 - DNA, 201 bp, Homo sapiens
ttgtaaatgacttctttaaatgatttttgttccaaagaagggtgtctctctgaacatggagccagcccctcggatttgtggctgcttccattgctgatgtrtcacgtacaatcctgtatgaacatccattgtgtgtactctgagagagtgtcctatagcaccagcacatggggacactatccagggagagatggcaggatg

SEQ ID NO: 25769 - DNA, 201 bp, Homo sapiens
gttacatttatactctgtatatgaagattggcagggaatacaaaagtgcataattattatttagtgtgttgatcatactcgtatatttccaaatggctttrtgatcatttggttagtttttctctctaagctctggcagtcttccagctaatgtcatcagcggggaacagcagcaaggagaggtggcagaattgtgactac

SEQ ID NO: 25770 - DNA, 201 bp, Homo sapiens
cagcattccaggctacagtgctcacagagttcaaccagtggggactgtggagggcatggaaggttcttaatggaaattgttagtcttttttttttttttttagacagagtctcgctctgttgctaggctggaatgcagtggtgtgatctttgctcactgcaacgtccgcctcccgggttcaagtgattctcctgcctcagc

SEQ ID NO: 25771 - DNA, 201 bp, Homo sapiens
aacattggaacgcttctcataggctttgaggcatgtgagtcaaagtgatggtgacagggtgtccatcagaagatacaggttctaattttaattctgccctwagttctgtggccacagattacttaccctgcctgttatacactggggaagaactcggattgagtagacctagcatcctggcttgcacctgccacttattga

SEQ ID NO: 25772 - DNA, 201 bp, Homo sapiens
ggcttgcatgacttttagttattggtttctaggacatctttatatattcagggcatacacacacacacacaaacacacacacacacacacacacacacacatacatctggcctcgatgcctcatacattgcaattattttcttctaatttgttgccattcagctttatggtaccctttttatatataggttttaaattttg

SEQ ID NO: 25773 - DNA, 201 bp, Homo sapiens
tcagcattccaggctacagtgctcacagagttcaaccagtggggactgtggagggcatggaaggttcttaatggaaattgttagtcttttttttttttttttagacagagtctcgctctgttgctaggctggaatgcagtggtgtgatctttgctcactgcaacgtccgcctcccgggttcaagtgattctcctgcctcag

SEQ ID NO: 25774 - DNA, 201 bp, Homo sapiens
ggctagccagttttcccagcaccatttattaaatatggaatcgtttccccattccttgtttttgtcaggcttgtcaaagatcagatggttgtagatatgckgcattatttctgagggctctgttctgttccattggcctatatctctgttttggtgccagtaccatgctgttttggttactgtagccttgtagtatagttt

SEQ ID NO: 25775 - DNA, 201 bp, Homo sapiens
tattagtccatgttcacactgctgtaaagaaatatctgagactgggtaatttattttatttatttatttatttatttatttatttattattatatatatatttttattatattttaagttctagcatacatgtgcacaacatgcaggtttgctacatatgtatacatgtgccatgttggtgtgctgcacccattaactggt

SEQ ID NO: 25776 - DNA, 201 bp, Homo sapiens
ctaaagaagaggggtgtgtgtgtgtgtgtgtgtgtgtgtgtgtggtcacatgcacacacagtcatctgcacagctgaaagaacaatctgctttcaagtgartggtgcaaattctcatgtgtgagtgtgttctggtgttggggttagttgctgctaaatcatttgtgcatctgaataacccattctcaaaactaaacttaat

SEQ ID NO: 25777 - DNA, 201 bp, Homo sapiens
gtattagtccatgttcacactgctgtaaagaaatatctgagactgggtaatttattttatttatttatttatttatttatttatttattattatatatatatttttattatattttaagttctagcatacatgtgcacaacatgcaggtttgctacatatgtatacatgtgccatgttggtgtgctgcacccattaactgg

SEQ ID NO: 25778 - DNA, 201 bp, Homo sapiens
tgtattagtccatgttcacactgctgtaaagaaatatctgagactgggtaatttattttatttatttatttatttatttatttatttattattatatatatatttttattatattttaagttctagcatacatgtgcacaacatgcaggtttgctacatatgtatacatgtgccatgttggtgtgctgcacccattaactg

SEQ ID NO: 25779 - DNA, 201 bp, Homo sapiens
ctaatggtctttctgccttgcttctggaagtccaggagggccctgccagtggtctgtgctgcaggacagagtgaggcatctgtgggcattccttgcctggsagctgatattgtgtgtctctgttggtcctcattcatctagcttgcgttttagagttgtggttatgtaatgggggcgtgtaataaagatttgttgattgtt

SEQ ID NO: 25780 - DNA, 201 bp, Homo sapiens
ctgtattagtccatgttcacactgctgtaaagaaatatctgagactgggtaatttattttatttatttatttatttatttatttatttattattatatatatatttttattatattttaagttctagcatacatgtgcacaacatgcaggtttgctacatatgtatacatgtgccatgttggtgtgctgcacccattaact

SEQ ID NO: 25781 - DNA, 201 bp, Homo sapiens
ctcatgcgaatgagtggctctagtatttttggatttgtttctgaggtttgtacaggataggcaaagtctcgaccatctataagactgtcctcctggcatgygtcatttattgctcaaggtttctggattttagaacatccttctttgcttgggtgatattcccctgtgtggtatataatcaagtaaccatatgtcctggtt

SEQ ID NO: 25782 - DNA, 201 bp, Homo sapiens
ttggctcctgtattagtccatgttcacactgctgtaaagaaatatctgagactgggtaatttattttatttatttatttatttatttatttatttattattatatatatatttttattatattttaagttctagcatacatgtgcacaacatgcaggtttgctacatatgtatacatgtgccatgttggtgtgctgcaccc

SEQ ID NO: 25783 - DNA, 201 bp, Homo sapiens
acattggctcctgtattagtccatgttcacactgctgtaaagaaatatctgagactgggtaatttattttatttatttatttatttatttatttatttattattatatatatatttttattatattttaagttctagcatacatgtgcacaacatgcaggtttgctacatatgtatacatgtgccatgttggtgtgctgca

SEQ ID NO: 25784 - DNA, 201 bp, Homo sapiens
catacattggctcctgtattagtccatgttcacactgctgtaaagaaatatctgagactgggtaatttattttatttatttatttatttatttatttatttattattatatatatatttttattatattttaagttctagcatacatgtgcacaacatgcaggtttgctacatatgtatacatgtgccatgttggtgtgct

SEQ ID NO: 25785 - DNA, 201 bp, Homo sapiens
tgtacatacattggctcctgtattagtccatgttcacactgctgtaaagaaatatctgagactgggtaatttattttatttatttatttatttatttatttatttattattatatatatatttttattatattttaagttctagcatacatgtgcacaacatgcaggtttgctacatatgtatacatgtgccatgttggtg

SEQ ID NO: 25786 - DNA, 201 bp, Homo sapiens
aatatcggactgattgtgttttaaaatcctaggctccctgggtttgtttgatatcagcttatcttactaattttatcttcccctactcacctttacccttygttttcatcaaaccaggttccttaagggcagagattgtgtcttattcatctttgtttctccatttgctcaatatccaagatctgaggaaactgaaggcaa

SEQ ID NO: 25787 - DNA, 201 bp, Homo sapiens
acctcaaactcctgggctcagttgatcctcctgcctcagcctcctgagtagctgggactacaggtgtgtgccaccacatctgggtgatttaaaaaaaaaawtttttttgtatagatggggtctatgttgcccaagttggtcttgaactcctggcctcaaggatcctggtgccttggcctttcaaagtgttgggattacaga

SEQ ID NO: 25788 - DNA, 201 bp, Homo sapiens
cccatgcaggtgtgtataccagcttcaatctctctgtgtgtatacatatgcatgttctgggaggtatgtgtacaccagagtcagcttctaagtggcgagcratttcctttcctgatttttccacctgattttcccatcgtgtagtttgtgtatttgtgtagtttgttgtagcttgtatatttgtgtgtgtgcctacgtttt

SEQ ID NO: 25789 - DNA, 201 bp, Homo sapiens
ctcttacttctttgtgttgtgataatcagagtgtcctggcatgttctaaagcatccacctaaagaagaggggtgtgtgtgtgtgtgtgtgtgtgtgtgtgtggtcacatgcacacacagtcatctgcacagctgaaagaacaatctgctttcaagtgagtggtgcaaattctcatgtgtgagtgtgttctggtgttggggt

SEQ ID NO: 25790 - DNA, 201 bp, Homo sapiens
cctaaaactcttcccttcaaaagcaatggtaaaaattattactggagcataagtaaatgtttatcatataaaggaaactatatctctagaaatgttatacrtgtaaaattttaaaattctataaaatggttggtttcttttagaccttttagttttgtgatattttaatccagaaattgaactctggactgaagttcacct

SEQ ID NO: 25791 - DNA, 201 bp, Homo sapiens
ttgaacaacgagaacacatggacacaggaaggggaacatcacactgtggggactgttgtggggtggggggagtggggagggatagctttaggagatatacytaatgctaaatgacgagttaatgggtgcagcacaccagcatggcacatgtatacatatgtagctaacctgcacattgtgcacatgtaccctaaaacttaa

SEQ ID NO: 25792 - DNA, 201 bp, Homo sapiens
tcatttaggaccattacctgtcatttaaagttctgaatttgagactgctgattaaaaaaaagcaaaacaacaacaacaacaaaaaaaaaacaacaaaaaartagtaatctcttgggtgtggtctcaaaaatttggtccagctttgagatgtgatcctggattgttagcaaatctattcagagctgacaaggaaattctctg

SEQ ID NO: 25793 - DNA, 201 bp, Homo sapiens
ccaattttggagatttaactaattctgccctaaaactcttcccttcaaaagcaatggtaaaaattattactggagcataagtaaatgtttatcatataaakgaaactatatctctagaaatgttatacatgtaaaattttaaaattctataaaatggttggtttcttttagaccttttagttttgtgatattttaatccag

SEQ ID NO: 25794 - DNA, 201 bp, Homo sapiens
catgctggaagcagcaggctgggcagctctagacactggcatgggcactagctccctgtgaggctgcatctggaccaggcataccacaaccagcttccackgcaggcactggggaacgtggtggcacctggaagcttgaagatgccaggaaccacagagccccaaagagggtgtcacagcctttgcttggggagctgttag

SEQ ID NO: 25795 - DNA, 201 bp, Homo sapiens
gagtctagctcagtttctcatacgtaaagcagagataatactgctaccaattttggagatttaactaattctgccctaaaactcttcccttcaaaagcaayggtaaaaattattactggagcataagtaaatgtttatcatataaaggaaactatatctctagaaatgttatacatgtaaaattttaaaattctataaaat

SEQ ID NO: 25796 - DNA, 201 bp, Homo sapiens
ataaaaaacatgagctatcaccttatacccatttggatggccagtatcaaaggaatagaaagtaacctgtactgctaaggatatggagaaattggaacccytgtgtactgttggaaggaatgtaaaatgatgcaactgctatgaaaaacagtatagaggttcctcagaaaattaaaagtagaattaccttatgatctagca

SEQ ID NO: 25797 - DNA, 201 bp, Homo sapiens
acttgcctttcacacaaactgtctcccctaataagctaaggagagtcactctcacctaaaaacagactgtgcttccatgcctctgagcatttgctcagtcmtgttcccctcctcacagcctcctagatacatctgactcatctttccaggcccagctgagacccaggcttccctatgcaggtcgcctccttgtgtgactgc

SEQ ID NO: 25798 - DNA, 201 bp, Homo sapiens
tgcatttacttcttgcagaaacgctgttgcttttgttacttatttgtgtgtgtgtttgtgtgtgtgtgtgtgtgtgtgtgtgtgtgtgtgtgtgtgtgtgkatgagcttttctctttaaactaagcaggatataagcagaccccacccagcttagtgagtaaattcataccaaccattcaaaataattaaagggaaagaag

SEQ ID NO: 25799 - DNA, 201 bp, Homo sapiens
aataaatgaataaaataaaaaaaaacttgcctttcacacaaactgtctcccctaataagctaaggagagtcactctcacctaaaaacagactgtgcttccrtgcctctgagcatttgctcagtcatgttcccctcctcacagcctcctagatacatctgactcatctttccaggcccagctgagacccaggcttccctatg

SEQ ID NO: 25800 - DNA, 201 bp, Homo sapiens
ctgggaggcagaggttgcagtgagcagagatcatgccactgctctccaacctgggcaacagagcaagactccatctcaaaaaaaaaaaaaaaaaaaaaaaraaaaagaaaaagaaaagaaagaaacaaagaaaggaaagatatttgggtgttttgtggcactttcttgattttgggtgaggttagcaggtatttggaggga

SEQ ID NO: 25801 - DNA, 201 bp, Homo sapiens
ctgaaagtataattatatcattcatgttaggtgaaggacaattactataatttttgtataaaattgaatataacttaaatgtgtaaatatgattttttttkgtttttttttacaaaagtttcttgggggaaagctgctttttatacattacatttttcagtcaattcctttgtcggcttaaattatgagccacaggttttt

SEQ ID NO: 25802 - DNA, 201 bp, Homo sapiens
ccaggattaaatttacaagggttgaattgatattgtaaaagccttcattctgtggctttgggaatcctctcttgtatttttatggcaaacttgtattacactcaggattgaagctgtgccttttgacaccctgacatgacctagaacaaagggaaatagatctcccaggaccatgaaaggacaggcaagcaggaagcccac

SEQ ID NO: 25803 - DNA, 201 bp, Homo sapiens
tttatcttcccctactcacctttacccttcgttttcatcaaaccaggttccttaagggcagagattgtgtcttattcatctttgtttctccatttgctcartatccaagatctgaggaaactgaaggcaaatgtatatttttagtgagcaaattaatgaatgagtgaattgaatgtattcatcttcacatgtgcatccatt

SEQ ID NO: 25804 - DNA, 201 bp, Homo sapiens
cccaggattaaatttacaagggttgaattgatattgtaaaagccttcattctgtggctttgggaatcctctcttgtatttttatggcaaacttgtattacactcaggattgaagctgtgccttttgacaccctgacatgacctagaacaaagggaaatagatctcccaggaccatgaaaggacaggcaagcaggaagccca

SEQ ID NO: 25805 - DNA, 201 bp, Homo sapiens
cttagtagtgatcttcacctccactaacttgacaaagcaccccatctctaccactgtacggtacttttaaatttctactttatgtttttttacgtgtcttracttctaatatataaattccttgagagaagcgatgttgctttattttctttatatttccccacagatcttatgggtacatggttccttaataaatgttgg

SEQ ID NO: 25806 - DNA, 201 bp, Homo sapiens
tcacctcagattgtgactgcatttggaagtagagagcctttaaagaggtaatttagttaaaatgagactgttaaggtgggccctaatccatctggctgttkcccttataagaagaggagattaagacatgcaaagaggcatcaggggtgcccacgcacagagagatgaccaagtaaagaggcagcaagagagttgccctgt

SEQ ID NO: 25807 - DNA, 201 bp, Homo sapiens
agaaaagggccaggcatctagacacctgtgtaactacatgggataaaattttaaaatggggcagaattgttacagaaatactgagttacacttaataagcrcatttctctttgttatatcagctattctttatagcagctctgtgattttggtccaacatggagtagtgaccctacttcgtgaatgaggaaactgaggccc

SEQ ID NO: 25808 - DNA, 201 bp, Homo sapiens
ttctctttgttatatcagctattctttatagcagctctgtgattttggtccaacatggagtagtgaccctacttcgtgaatgaggaaactgaggcccaagrattttagggacttgcctaaagtcacagtgctaataaaaggcagaattaagtttcaagagacctaggtattatggctccatagtgtagtgatgtttctaca

SEQ ID NO: 25809 - DNA, 201 bp, Homo sapiens
tggtgggaggacatcaggcctgattggagggcagtgattggacctggtagcaggacacatggcatgaagagaagcaggtgcagctgaggctgcagtcagcytgaagagtgtcctggggagctggctaaggaattggaatccttcttggggaggcagtgaaagttgatttgcttattttaagcaggaagtgatatgcttaga

SEQ ID NO: 25810 - DNA, 201 bp, Homo sapiens
tctttccttaccttgctgcgcattttgtccaattctttgtccaaacttccaagaacctagacaacttgcagtcaagaccctctcctggtaacaacaggggmtaaggtttcagaaaaaggatatggtgttgtggtgggaccttgtttgacagatggaggtctggattttcctgatgaagtgttggctcacctgggagctgaa

SEQ ID NO: 25811 - DNA, 201 bp, Homo sapiens
ccccaggtcaggaaacctcctccttctccttgctagctcagcacgctggttgctccagtgctctcattttgacctctcaagccaaatgctgatgacatcaragctacccattctactaccgattagcagtaaaaccatcgggcactctctgggcagagttcaggtgctatgttccttcctcttttcccacaggagttggct

SEQ ID NO: 25812 - DNA, 201 bp, Homo sapiens
tgagattgcaacttgtgtgttgaaaatgctggcactgatatcctagaagtctagtttatcctcagctattgacttatagcactctgcatgtgcattggaartgattaaaggggggaaagaaaaaacaaaaacaaaacagaacaatgaaacatcttccatcaagttgctctgctggtagcagacctcaggccactttctttc

SEQ ID NO: 25813 - DNA, 201 bp, Homo sapiens
aacaaaatgttagactgtaaggtgctgatggcatattctaggagtcctgggaagggagaaagcaatgaagggtggaggtgtacaaaaaaaccttcacaggrgatgaggcttgaaagatgagtatatgctgaggaggctgggtataggaaggaaatgacagattcccttggagataatccattgctcttgacactgtgtact

SEQ ID NO: 25814 - DNA, 201 bp, Homo sapiens
cctctaaactattctctctggctttgggatggtcagccaagccttttacctggataagcatatgcaggccacttggtgataatgtcaccgaatccttgggktgttacttcctcagttgggaacctctgtgactggtggttcctttgcctgagttttgcttgggcctgctgagcttgttccacctactcggcctggtgggct

SEQ ID NO: 25815 - DNA, 201 bp, Homo sapiens
aaacaatgcagctgccttttttttcttttggtaaaacattttcctggcccttcatccacaaaacacgaggtttgccttccttctagctgtttcccagagcytaatagtagagcctctatgtaaatttatgtgacgttttcactagaaaattgcttaaaaatgaatgatatttctagagtttactgtttttcactttaagta

SEQ ID NO: 25816 - DNA, 201 bp, Homo sapiens
tctttgggagattcttctaggagcatccatggagtacagagtgaaaggaaaaagaactcgaaaaccatttaggttcatcattatattaataattgaggacrtacaatgaatgggttacaaagctacacacagtgtttggataaaggatgtggcgatggtgaatttccatttctggaccacagctagaaagtatgtagaggt

SEQ ID NO: 25817 - DNA, 201 bp, Homo sapiens
ctataaggccatctcctgaagtcaccgtgttttttatataacattttgtccttttagaaattatcctgacgcatgtcaagagctttcacaccgaaaaaatrtgtcacattagcttccaagtttctgattgtctaaataacgcagcaactcaacatacagctgtctggcattttgacagtacaataacccataattcttcct

SEQ ID NO: 25818 - DNA, 201 bp, Homo sapiens
tgctggataatcatatttgcagagatttcttcatacttgatgccagacattcaagccaaaaaggtagtccttggctgggagtatttatttgatcccctacrtagagccagcttaggtatctctcccatccatcaacaacagacaattcaagataatgagaaagagagagagggagacagagagggaaagggagatgcaaga

SEQ ID NO: 25819 - DNA, 201 bp, Homo sapiens
gcaacatggtaaaaccccttctctacaaaaaggacaaaagttatccgggcatggtggtgtgtgcctgtagtcccagctactcacaaggcagaggcaagagrattgagcctgggagttcgagactgcagtgagctatgatcacaccactgcactccagcctgggtgacagagtgaaaccctgtctcaaagaaaagaaaagaa

SEQ ID NO: 25820 - DNA, 201 bp, Homo sapiens
tttggcaaagcagaactgacttaacagcccttataaactatagttataaaggaaggagctccagtcagataaccatagtatctggatagaatattagaagycatcgaatctgatctctatgaagaaattccctctaaacattctccatgattttagcctctgttcaaataagtatagtggctctgagggcagctcatcctt

SEQ ID NO: 25821 - DNA, 201 bp, Homo sapiens
cttgaactcccttgaaccagggaggtcaaggctgcagtgaactgcaattgtgccagagtgaggaccacagagggaactctgtctcaaaaaaaaaaaaaaamaaccacacacacacacacaaaaacaacaacaaccaaaaaaaccagaatgtgaacaacaaccaccaaaaaaaccagaatgtgaactcaaacactcagacaa

SEQ ID NO: 25822 - DNA, 201 bp, Homo sapiens
cactttcccaagcttccatttgaacctccagattggaaatggggggctgcctgatgttctttttattccttcaaccccagtgcaggcccctcactctaagrtgaggacatctgggcatccacagccactgactcctgtccaagctgcctgctcagggggccctgggtatggggcctggaaagggcctgtgagaagagtctc

SEQ ID NO: 25823 - DNA, 201 bp, Homo sapiens
gcagtttctttaccctcccactccccctctcatgcctccttactctctcaggaaggagccaaggaaagaattcctctttctccctgaatcctgacctctgycacctctgaatcctgcctgtggctggccctcaacaggtggcctggccacaggaacgggaggaggactggcctgtctcaggccctctgcagagatgcaagc

SEQ ID NO: 25824 - DNA, 201 bp, Homo sapiens
accaggatgtctataaacattcttgcttccaggcccaaagaaacagggtaggccttaaaaaggacttttatcaatgccagccagaaagaaggctcgggaaygtggcacagaacacatcccagcccacgttccaggagcatccagcctgtttctagggcggcacttgccattcaagttgcatgtaagtgagatctggagtcg

SEQ ID NO: 25825 - DNA, 201 bp, Homo sapiens
tcttacattcatctctgtatttatggctctgttgtgcttttttattgaattggaagaggaatatcttcattcacagccaaaataaaataaatctaggcagsttatctagtaaaatgactaaggtatagggtatgggatgtgtatgtgtgtgtgcacttgtgtgtgaatgtgtgcctaaaaatacagatgtcatctgtgtcg

SEQ ID NO: 25826 - DNA, 201 bp, Homo sapiens
acactccatgttgcctgaggccaccaccctttggactaagagacagaaagaaaatcgcgctcacctctggaaagaccaagtcgttgatgtcctgcttcccytcttcagggctgttctacctataaggccatctcctgaagtcaccgtgttttttatataacattttgtccttttagaaattatcctgacgcatgtcaagag

SEQ ID NO: 25827 - DNA, 201 bp, Homo sapiens
ctgaggaaggtacttgaaagcacagggcacctgaggtgtctgtgcccatatctaagggcaatactagcaatgagacttttttctttgttttttttttttttcttttgttgttgtagtaatgactgtgaagtatttaaagatagaaactgctagaaaagctgaacttaccctggaattgttcactgtcattttaattggctc

SEQ ID NO: 25828 - DNA, 201 bp, Homo sapiens
tacatgtattagtcaggggaaactaactgctgtaacaaacagtcccagatcccggtggtttagtcagtctccattcactgataactccttgatggagagtraggagtgtccagggacctaggcttcttccatgcaatggctctgcatttttcttgggccttgagtccttcctgggttcagcccatggatggagcaagcatg

SEQ ID NO: 25829 - DNA, 201 bp, Homo sapiens
catataaactcagaattggtagaaaaccaaaactagctcatctaaccaactgctcagtagagatgcctttgccaaatgggcatgtctttaagatataaccrtaggtatatggtgaagtctgtgccagagatttatgttaaattcttgcagattcttgtgtaggtgctctcagactggtctctaggaaatatggtaaatttg

SEQ ID NO: 25830 - DNA, 201 bp, Homo sapiens
aggtagttgaaaggcttaggaagatggagcttctgccatacaaaatacccaaaagcaggcaggctcttagaaatctctttgattcattggcaaaggatggytgaagcttcttggaacctgcagaccccttgcccaggaaagtcccatgatcagagcattcaaatgatccacttctttgtggccagggacagatccaggttt

SEQ ID NO: 25831 - DNA, 201 bp, Homo sapiens
ctggaaaagtaggaacagtctcctcaccagtcacccaagaaggtataaactggccgctcaatgtgttttagactcatataaactcagaattggtagaaaaycaaaactagctcatctaaccaactgctcagtagagatgcctttgccaaatgggcatgtctttaagatataaccataggtatatggtgaagtctgtgccag

SEQ ID NO: 25832 - DNA, 201 bp, Homo sapiens
agtagaaatggtagactccaacacattgggtgtgataggagaattcttcattgtcatttgggataggacagctgtttactgtgaggctgccccatgcattmtaagaggtttacctctcagaggtttatcctcccatcacccaagggtatggccttacccttggatgatggccatttctccagtgaagtttcctgtagcctg

SEQ ID NO: 25833 - DNA, 201 bp, Homo sapiens
cacccccaacactcatgagagcccataaaattaagagttaactttcagcgatgtgtataagcaaggctatttttccctttctgctgtttttttttttttttcctggagccgggtacttaattctttctgttgcctttttatttactgcctcaacatctacagggttgcactctacacttctttcaaaaattaagtgagaaa

SEQ ID NO: 25834 - DNA, 201 bp, Homo sapiens
agaacaggagagttcagatgggctattgacaggcccaaattcacacaacaggaaatagaggagcggaggcaaagtcccaaaccttcctgcctagatgtgcrtacattgtgggtttttaaattttttttttgtttgtattttttgtgggtacataagaggtgtagatatttatgggtcacatgacatattttgatacaggca

SEQ ID NO: 25835 - DNA, 201 bp, Homo sapiens
gattttggccttgtcagactcaatgcggggaaaccagctgtgcccactggcttttgaccttcagaaataggaggaaacacatgtgcattgcattcagcagygaagcccagggtaatctgttagagcagccatggaaaaccaacccagcaagcatgtcctcccctctgcttgtgcctatccagaccaccaatcccatatttt

SEQ ID NO: 25836 - DNA, 201 bp, Homo sapiens
atggtgaggaccatatggatgacttttaattttcatgcatgagatctttgtgtgtgtactatattacattgtgacttaatttggggtacttaaatgtatarcatgaaaattgtactggctcattagatagctgcctacaatattatttttaattcctgtgtaatattttatgatacagatatattgagctttatttaatca

SEQ ID NO: 25837 - DNA, 201 bp, Homo sapiens
agcactttgggaggccaaggcaggcagctcacctgaggtcaggagatcgagaccagcctggccatcatggtggaacctcatttctactaaaaacacaaaarttagctgggcgtggtggcacatacctgtaatcccagctacttggaagcctgagacaggagaatcacttgaacccgggaggcagaggttgcagtgagccga

SEQ ID NO: 25838 - DNA, 201 bp, Homo sapiens
ttatctcttttccttatgttccctcaccaccaaatgtggaataaggtatcagcagatgctcaaaagattagaattcatttgcattgagacttagctcaagyccatctccttcaccagccccagccccttctcagagtagcactaatcatcccaatctattaccctgcattatctggtaactgcttccctgtctatacctac

SEQ ID NO: 25839 - DNA, 201 bp, Homo sapiens
tagttgagaaacatgccacattattactgacttacgtatttatttttggttgggggatggggtgattttttaaaaaacaatgcccagtgtgtgtgacttcygcacatagtcatgtgagtcacttcctgtttagtggaagccctctttatccacccctacctatccaatgggatcatctcgccttttccacctcctctgtcc

SEQ ID NO: 25840 - DNA, 201 bp, Homo sapiens
actgctggtcagcccaatatggtctgctgtttctgtttaaaaaaaaaaagtatatatatatatatataattatatatatatatatataattatatatatatataattatatatatatggtaacattgttatgcctattcatttacatattgtctatgactgcttctacatggagctgagtcttaacagagatcatatgacc

SEQ ID NO: 25841 - DNA, 201 bp, Homo sapiens
ggcctggggagaactccagttcaggaggccgggggaggacagcagttcaggaggccagagaatgacagcagttcaggaggctgggggatgacagtagttcrggaggcctgggaaggacagcagttcaggaggccaggggaggacagcaggcatacccaaggcctctcaggcattgctgtgcttcctcaccctgcaatgctg

SEQ ID NO: 25842 - DNA, 201 bp, Homo sapiens
aactgctggtcagcccaatatggtctgctgtttctgtttaaaaaaaaaaagtatatatatatatatataattatatatatatatatataattatatatatatataattatatatatatggtaacattgttatgcctattcatttacatattgtctatgactgcttctacatggagctgagtcttaacagagatcatatgac

SEQ ID NO: 25843 - DNA, 201 bp, Homo sapiens
ctgagctccattgcagcagggaccacacctgtcttatttaccactaggtctcaagttccttgagcatgactaggcacatagaagttgtttggtatgtttgytgaatagatgaatgaataaagatatgacatgaaagaagcgtagttgaactttccaaggttatttggattatttggtgagagaatataaacctggaaaaga

SEQ ID NO: 25844 - DNA, 201 bp, Homo sapiens
agaagttggtggtcaactgctggtcagcccaatatggtctgctgtttctgtttaaaaaaaaaaagtatatatatatatatataattatatatatatatatwtaattatatatatatataattatatatatatggtaacattgttatgcctattcatttacatattgtctatgactgcttctacatggagctgagtcttaac

SEQ ID NO: 25845 - DNA, 201 bp, Homo sapiens
tggtgactgctattccttatagtctcaaaatgaggataaagctttacataaaattatgtattaatggaaaaataatggaaaaataggatacaaatatattrgtacacgcacatttttagaaatgtatctataggagaaaatgagactcttctatgaattaaactagggagtgttgacggaggcctgggtgggtgaatttgt

SEQ ID NO: 25846 - DNA, 201 bp, Homo sapiens
cacgttcaggtacagttgcaactagaggtcagtttaattaatatctgtcctttcctctcagatgacatacactgaaccgttgtcactagaaactccacatscctgatctgggcccagcagctggtgacagcttggcaaattatgaatttcctagcttaaaacagcctaaattgcagacaaaacaagccatcagctgagtaa

SEQ ID NO: 25847 - DNA, 201 bp, Homo sapiens
tgtccctgtcaccttgaattggctcagcccagggagctctgggtggcagggccctgaaatcctgccctattgcagcacaaagcaggatggatgagatattscaactcactacttacaggtgttctttaagggagcgcttaggaagttttactcagtttaacttaagacataagtaataccattcccaattcagggcaatgg

SEQ ID NO: 25848 - DNA, 201 bp, Homo sapiens
tccccctcccactcttccccccaagtccccaaattccattgtatcattcttatgcctttgtgtcatcatagcttagctcccacatatcagtgagaacataygatgtctggttttcagttcctgagttgcttcactcagaataatagtctccaatctcatccaggtctctgcaaatgccgttaattccttcctttttatggc

SEQ ID NO: 25849 - DNA, 201 bp, Homo sapiens
tcaccttgctggcactcttaccacctgggaggtgaggacagcaccttggcaaagctaagctaggttacagtgtggccattgtgggctctcttcacagcccytatttgactgtggtttgtgatactgatggagattaacgaaattgtcattctgcttcacgtcactgcttctcagagctttctgggcttttcctctccccct

SEQ ID NO: 25850 - DNA, 201 bp, Homo sapiens
aaatccccagcagggaagagttccttgcacaaagaaattgagtagggtttagaacagcacgtgaaggaaggcagaaggcctttctgaaataagcgggtttmtgtttagaacatgggagaagagatagcataggaaattgccattctgatggccctgcatgtactctgataaaaaccatggaagttgtatgagaaatgagta

SEQ ID NO: 25851 - DNA, 201 bp, Homo sapiens
gtcctgcttcccctcttcagggctgttctacctataaggccatctcctgaagtcaccgtgttttttatataacattttgtccttttagaaattatcctgaygcatgtcaagagctttcacaccgaaaaaatatgtcacattagcttccaagtttctgattgtctaaataacgcagcaactcaacatacagctgtctggcat

SEQ ID NO: 25852 - DNA, 201 bp, Homo sapiens
atgatggaaaaatcataggctatgaaaggagaaattgaaaaatatactagtcttaggggattctccttcacctgtctcatttactgacagattaagtgggraaaaaataaggatatgaaagacaaaaatagcaaaattattaaggtagatttgattaaaacatatcaaactctgtaccctaacaatataggatatgcttct

SEQ ID NO: 25853 - DNA, 201 bp, Homo sapiens
tttattcaccctaagttatagatgaatgacagaagatgaatgtgtttcttgtcccagcaatatttgtattttcattgtagtcgaagaagtgaagatggaawttcaggtgcaactgaccaggtgctgcttcccactctatggtctttatatatccaagctaacctgagatgcaaagctaggaattcacttaaactgtctgcc

SEQ ID NO: 25854 - DNA, 201 bp, Homo sapiens
aactatgaagatataatgggaatctaaaacaatcatgaatcttaatgtacccaatgacatggctttgaaattcataaagcagaaacttctagaaataccasaaaaaactaacaaagtcaccatcatgaagactttagcacatctcctatgaaaatgacagctaaatgaatggactttttacaataccttccttttgttaca

SEQ ID NO: 25855 - DNA, 201 bp, Homo sapiens
attttgtataactatgaagatataatgggaatctaaaacaatcatgaatcttaatgtacccaatgacatggctttgaaattcataaagcagaaacttctakaaataccagaaaaaactaacaaagtcaccatcatgaagactttagcacatctcctatgaaaatgacagctaaatgaatggactttttacaataccttcct

SEQ ID NO: 25856 - DNA, 201 bp, Homo sapiens
atgacaaagagggttattttgtataactatgaagatataatgggaatctaaaacaatcatgaatcttaatgtacccaatgacatggctttgaaattcatamagcagaaacttctagaaataccagaaaaaactaacaaagtcaccatcatgaagactttagcacatctcctatgaaaatgacagctaaatgaatggacttt

SEQ ID NO: 25857 - DNA, 201 bp, Homo sapiens
gactccagagcatgtgtttttaatcactggacatctcctttgtgcttgtgaatggtgccatccctagaggtagcatagatgcatcctccgagtaccatgargaaagatgtacatgtaaagtagcaaaggaagctggggtcagtgggtggtcgatgctcctgacagacaacatttaggcgtcggggaagaatgtccttgcca

SEQ ID NO: 25858 - DNA, 201 bp, Homo sapiens
gaagtgatccacattacatcccataccattctagagaagaagttggtggtcaactgctggtcagcccaatatggtctgctgtttctgtttaaaaaaaaaaagtatatatatatatatataattatatatatatatatataattatatatatatataattatatatatatggtaacattgttatgcctattcatttacatat

SEQ ID NO: 25859 - DNA, 201 bp, Homo sapiens
cacccactgatcatttgtccgatgtgaagggcaatttatcctaacttccacacatatttatgggtcattttctatgtaccaggcatgaggctgtctgttargttgagttctcagtcaaaaccatggacaaaggcctccttttggacattttcccaaacctgcttggttctttgttaaaatggtacttgttccaaccttctt

SEQ ID NO: 25860 - DNA, 201 bp, Homo sapiens
gggggcattgcccctctatttctggtggcttaactaagttttctggaatttatccttaaatgaaatacttctgctcttctgagacatctacttcctagtaagagtaaaatacctaaaagaaaggaatgtgagaggggaaagaaggcctcacattcatcctggggaggtccaggctcctgagcttgggcatctcctcagcca

SEQ ID NO: 25861 - DNA, 201 bp, Homo sapiens
cccgaacatcatctctgtcttagcaggcttcagtgtggtctaactgaggtgttggcaaactttgacttgtaagccaaatcctgttgctaccttttttttttgtaaataaagttttattggaacacagctgcacccatttatatactgtcatctgtgactgtctttgagctgcaacttcagatttgtgtcattgtgacatat

SEQ ID NO: 25862 - DNA, 201 bp, Homo sapiens
cagggggcattgcccctctatttctggtggcttaactaagttttctggaatttatccttaaatgaaatacttctgctcttctgagacatctacttcctagtaagagtaaaatacctaaaagaaaggaatgtgagaggggaaagaaggcctcacattcatcctggggaggtccaggctcctgagcttgggcatctcctcagc

SEQ ID NO: 25863 - DNA, 201 bp, Homo sapiens
gcagggggcattgcccctctatttctggtggcttaactaagttttctggaatttatccttaaatgaaatacttctgctcttctgagacatctacttcctagtaagagtaaaatacctaaaagaaaggaatgtgagaggggaaagaaggcctcacattcatcctggggaggtccaggctcctgagcttgggcatctcctcag

SEQ ID NO: 25864 - DNA, 201 bp, Homo sapiens
ggctggagtgcagtggcgtcatcttggctcactgcaagctccgcctcctgggttcacgccattctcctgcctcagcctcccgagtagctgagactacaggygcccgccaccatgcccggctaattttttgtacttttagtagagacggggtttcaccgtgttagccaggatggtctcaatctcctgacctcatgatccacc

SEQ ID NO: 25865 - DNA, 201 bp, Homo sapiens
atgatttctaaaattacgtgttttttttgtttgtttggtgtttttttttttttttgagacggagtctcggtctgtcgtccaggctggagtgcagtggcgtsatcttggctcactgcaagctccgcctcctgggttcacgccattctcctgcctcagcctcccgagtagctgagactacaggtgcccgccaccatgcccggc

SEQ ID NO: 25866 - DNA, 201 bp, Homo sapiens
gttcaagaccagcctggccaatgtggcaaaactccatctctactaaaaatacaaaacttagccaggcgtgatggtgggtgcctgtaatcccagctacttgrgaggctgaggcaggagagtctcttgaacccaggaggcagaggttccagcaagctgagatcatgccactgcactccagcctgggtgacagagcgagacttc

SEQ ID NO: 25867 - DNA, 201 bp, Homo sapiens
aggaccccttcattccactcaggaccctctgatttcccctcctccccatgtttcttcccacaccccaattaccagctagtccatatgtgccagctgtttcycaggtcccttcccactctcagaactgccctgtccatcatctgtgttcctgcaggacacaacaggcaaaagctagtctaatgaactaatctatgaaaatgg

SEQ ID NO: 25868 - DNA, 201 bp, Homo sapiens
gtctgtgaagccctgggaagggggctgggagtgtgagctgccattttgcctttaactttgtcctgttagttgagaaacatgccacattattactgacttamgtatttatttttggttgggggatggggtgattttttaaaaaacaatgcccagtgtgtgtgacttctgcacatagtcatgtgagtcacttcctgtttagtg

SEQ ID NO: 25869 - DNA, 201 bp, Homo sapiens
ttcatttttttggttgtaaagttgaataaaaggcacttagtccaaaacttcaaaaaaattgctactgggcaaagtaattttgtgtcaggcttctgttcagrgcagatttacactggttataaatctctgaaattaaggtcttaccgtagaaaagctgaaatgtattcaacattagcagacacccagccctgttctgaacca

SEQ ID NO: 25870 - DNA, 201 bp, Homo sapiens
ctctctttcctcacacatcaaactcctgtcacctttcataagcttgctcacatggcatcttttctgggaaacattcctcattttccccaggtaggattagrtactgtaccttctgtttacttatgcctctaataaattacagtagtacaggaaagtatgcatgtctgttttcctttctggactgggaactcctggaggatc

SEQ ID NO: 25871 - DNA, 201 bp, Homo sapiens
gggtgggaacgtttggagaattgtctgaatcataatgctactgagaaagttagaaaatataggattattattccctaaattacttttctttgtgggggtgyggggtgaaggggaggaggttgaggagaaattgtcagtatgctctagatggcagagagtggtgtttcatttagctattccagtgggtggattgtaccagtg

SEQ ID NO: 25872 - DNA, 201 bp, Homo sapiens
tgcgcctggccttcctactactttttaaagcaaatatattccatttgatcttggaccatgataaaccagtaaagactattggtttgaaacaaagaaattgmctgttgctacttagtccaagaatttaaaaaataataaaaaaagaaggaatccattagaagaaccttagggattctcataactggtcagagattgaaggac

SEQ ID NO: 25873 - DNA, 201 bp, Homo sapiens
atttgccagtgctttgcctgccgggaaagcagggagaggagaggtatggatgctctagcttctactggaccctgggaacgggcactgcccactgaaaaaawaaacacacattttggggaatttctcaaaacaagaaaaaaaaagagtccaggttttagattgtcccaaactcaagaaatgtctaagataaaagactttatg

SEQ ID NO: 25874 - DNA, 201 bp, Homo sapiens
cacatcaggcccagaagagaaatgtttctttgaagacctgtctctattaatttgcatagatatttgtgtatgattttatttacattggtgaggcagaacartagttctccagctttgatgtgtgtgagccttggagattagagctggggctcttcctttgagaaaacaaatacttttgtgttgatttctatgagatataaa

SEQ ID NO: 25875 - DNA, 201 bp, Homo sapiens
cacatcttttatcatcatgactgcttttccaaataatacaacttgtgacaaatgcgaacattaattacagttaacaaagaaatgtcatgtgaagtattcayggggggagaaaaaagaaccgagacaatcaatgagattacatcttgcaccaagcttcaagtcaaagtgcaaaagtcagaaatcaaataccatcagttatca

SEQ ID NO: 25876 - DNA, 201 bp, Homo sapiens
aaatgacaaagagggttattttgtataactatgaagatataatgggaatctaaaacaatcatgaatcttaatgtacccaatgacatggctttgaaattcayaaagcagaaacttctagaaataccagaaaaaactaacaaagtcaccatcatgaagactttagcacatctcctatgaaaatgacagctaaatgaatggact

SEQ ID NO: 25877 - DNA, 201 bp, Homo sapiens
ttgctcaatgctcccttctcttttccttcagccccacattccccccacaagaggcctttgcacacatccacatgggcacccagcttgcccatccaaggtcyacccaccaatggctgctctttggctaccccttggccttaggggtgcatgcccgtggcaccatgcactattgagagataggacccagggaagaggtcattg

SEQ ID NO: 25878 - DNA, 201 bp, Homo sapiens
caagtggcttgcaacctcaaagagagaaagcatcctgattttttgtgtgtaggaaggtggggggcagtgataaacaggtcttggcctgttattgtcttccygcatgataatgaacccatcactagcacaggaatttaatgcaatgatttttccaagaaccatccagccccattgtagccctgcctgaaaatgtaaatacac

SEQ ID NO: 25879 - DNA, 201 bp, Homo sapiens
tctactttctctgcttgttctaaataggagaaaataattttaaagactccttttaaggtgtcttaagactcctctgtgtgtgacacccttcagaggaatgrccttccattttagggattcccttttttgcacccctcccttacccccttgcattggagtaagtctcttgagactcactacggcctaggaccaggatgtagg

SEQ ID NO: 25880 - DNA, 201 bp, Homo sapiens
gcagtgaatgcttgcatttcccagtgagtttcctgtgcttagagatttgtttttagatcaatgccattttttatgtgttgctcatgcatggaagagctctrctttctctgcttgttctaaataggagaaaataattttaaagactccttttaaggtgtcttaagactcctctgtgtgtgacacccttcagaggaatgacct

SEQ ID NO: 25881 - DNA, 201 bp, Homo sapiens
taataaatatagggtgactgaaattttctatttcttcttgtgtcagttttgttaagttaatttttcaaggaatttgtttacctaaatttttgaatttattygcatagaattatttatagtgttaccatattatctttttaatatctgtaggctctgccattataccatttttcatttctgaattgttattttagaattttt

SEQ ID NO: 25882 - DNA, 201 bp, Homo sapiens
attctattgttgaccctgatctgatcactatatacattacatgttttgaagcatcactatgtgctccatgaatatgtaaaatggttgtcaattaaaaaaayttaaaaagaatttaatttagatatttattaggacttattttaattatcattatggcatatggtctatgttcatgaatacatcttgtgtacttgaaaatgt

SEQ ID NO: 25883 - DNA, 201 bp, Homo sapiens
atgaaaagtctgctaattagtgattttaaatgtcatccagatatattagtagacaggtgttattttagaaatacagggcaacatgacctcttgtgttgtarcctatacaaaggtaaaagtctatatggtgttatttaatgacaaaagaaaaataaaatcctcaaaatacacctccttcccctcatatgcactcactggccc

SEQ ID NO: 25884 - DNA, 201 bp, Homo sapiens
ctccaagttggagctgacttgatgggagtctgtgcttggaaggcttgatttgaatggtgccagtcagagttaaattacaggctgggaaaaaggaaacaaawtttttaaaaaggaggtgtttatggttcccggttcccctaagtacttcttgaggatcaaaatagcctctttaaaataaattgcagaccattagtacatgat

SEQ ID NO: 25885 - DNA, 201 bp, Homo sapiens
gctccacaccaaagcaggcatccacccaaggccagcccaacagttgaacccttccactagtaaggagcaaagcagcctggatcatggctgcacagttctckggagaacagttgtctttgttttaatgggctgtctgtggccctgcagcttctctctactggccccaattctgagaatgcagttttaaaaatcactttttgg

SEQ ID NO: 25886 - DNA, 201 bp, Homo sapiens
tagggaattagcgtgacagtgatgatcaatgggttttggtgatcatggtggtattgctggaacttaatcagctctaatgtcctctgattccatatagtgcrcttgctcgttatattccttgtctattctcattttgaatgtaattttaatattcatcaattgcagcaaaaggaagaaaatatgttattaactggacccttc

SEQ ID NO: 25887 - DNA, 201 bp, Homo sapiens
aactgcctggcacctgatgagtgctatgtaagttggcagtcatttaacctgacagggtgaagtcctgtgacttggtactttggttctggtatgatagcagyggttggggtattttgatagtttgggtctggtgcaatagcaagctcgtggtcacggaaggctctgtgtacaagagaatgactgtcctgagtcttaaagggt

SEQ ID NO: 25888 - DNA, 201 bp, Homo sapiens
cgggaagcacatcagactgtgttgaatttccttcgctggctaaattggtacattagggcaaaaacgatgtccacatttgcatagttgatttcattactatygccattattgatgcctagctcctctgaaagaaaggagccataaaagcaaataaaatcacttcgcgattccattattggataaattaccacattactgcct

SEQ ID NO: 25889 - DNA, 201 bp, Homo sapiens
gtcactgagtccccctagccaaaggttttttttttcttttttttaaaaatgatctcattatttgttctctagtctcttcctaagggagggtgcagaaaggyagcatggtgaggtcagaagaacctcatcctagatgctcccagtcccagctctcaccccagctccacccctgccacagaggaagactctcccctgcctctg

SEQ ID NO: 25890 - DNA, 201 bp, Homo sapiens
tttatttggaatccggatgctggagttttctgtttggaaaagaattttaatgaaactttatcaggtgtgtgttcaccaaaatgaagaggactcttttgtgyccagagaaagctatctggcagtcaggagccctttagaaaaaggactgcagaatgaaggaaagctaaacctctctttaatgattttctctttttaaaacat

SEQ ID NO: 25891 - DNA, 201 bp, Homo sapiens
aaaaatgtctagggaaaaatagtggtaggacagttagctttactcaggttaaaatttattagtgatagtattaacattttggagggtttaaatgctgtgcygtccagtattttgctgtcactctaggaatgaaatgtaacatacactctgggttgaagatccttaggactctatgtaatgtaaaggctggaagtgggggac

SEQ ID NO: 25892 - DNA, 201 bp, Homo sapiens
agggtgcccctggagaggagcaaggggacaggagaacgtcctggagcccctgaaattgggtccggctttctatctgtctaggccacctgagcaggctcccrtttgcttattttcccgtatgaatcccttgtgagcttatcctccaaaaggcttgccccgccgtgggggtaagtgaaagcttctctgcctgctgcagcatca

SEQ ID NO: 25893 - DNA, 201 bp, Homo sapiens
aggtatgagccagcaagtctggcctcgtgtctaacctttttaatttaacagttgagagaactgaggttcagagaggttaagtgacttatccagatcacagyttgtaggacgacctaggcttgactccatgtcttcatttcccaagttttgggccctttctaagctctgaactaggctactttatttagattcagggggcag

SEQ ID NO: 25894 - DNA, 201 bp, Homo sapiens
gtgggtattctggagttgagtgagacatggtccacctaagaggctgtctattcagctagctctgcagggggatagggtcagaatataagtagctagaatamcaggccagtgagttggtgtcataaaattggccaccgttcctgtggactgaatacttaatgagggagtggtcctacctcatggtatcagggaaggcacctt

SEQ ID NO: 25895 - DNA, 201 bp, Homo sapiens
gcagggtgataagaaagagcaaggggcttggacactggccccagaatggtgcaatgagttctttatacctcacaacatggcaggaacatttaaaaaacaargtaaaaggaagtcactgggagcaaacagaagaagtgaagagctgacttagagcacagtgaccttgggcaaataaacttctataagtctcggtttctttct

SEQ ID NO: 25896 - DNA, 201 bp, Homo sapiens
gaatgccattaaaagtcgatgatgacctttacagtgactaatagtttctaaggggctttaattgtgattttttttttttttttttttttttttagcagagyggcattagtttgcttcatatgtcttttgtatcagggaatcaataaaaactcctgccttttgttgatgctataggatattttatgccgatgacaagggatt

SEQ ID NO: 25897 - DNA, 201 bp, Homo sapiens
gagcctagtatccattagttacttctcctgatcctctccctcctctcaacctctaccctccagtaggccccagtgtctgttcttcctctcttatgtgtccrtgtgttctcatcatttagctcctacttatcagtaagaacatgtgatatttggttttctgttcctgtgttagtttgctaaggataatggcctccagcttca

SEQ ID NO: 25898 - DNA, 201 bp, Homo sapiens
catgtgcaggtttgttatataggtaaacttctgtcatggatgtttgttgtacagattattttgtcacccaggtactgagcctagtatccattagttacttytcctgatcctctccctcctctcaacctctaccctccagtaggccccagtgtctgttcttcctctcttatgtgtccatgtgttctcatcatttagctccta

SEQ ID NO: 25899 - DNA, 201 bp, Homo sapiens
agagactccacccactgatcatttgtccgatgtgaagggcaatttatcctaacttccacacatatttatgggtcattttctatgtaccaggcatgaggctrtctgttaggttgagttctcagtcaaaaccatggacaaaggcctccttttggacattttcccaaacctgcttggttctttgttaaaatggtacttgttcca

SEQ ID NO: 25900 - DNA, 201 bp, Homo sapiens
ataggtatctgagacatgtctcacaataaatttagaaagtttattttgcaaagacttaaggatgcgcctgtgacacagcctcaggaggtcctaatgacatrtgcccaaggtggtctgggtatggcatggttttatacattttaggaagacatgagacatcaatcaaatacatgtaagatatacattggtttggtccagaaa

SEQ ID NO: 25901 - DNA, 201 bp, Homo sapiens
atgtgaggccttcatgggaacctgccccattcttgcctttattcacctgtttagtttaaagacgttgattgggcaccagttatatttcaacccaggcactstgtgtgaagaaaaaaaaagatggagcagacagttcctcccacaaatagttgggagttaggagagttgtcctgcagagtaaaaagagaaaataacagcttt

SEQ ID NO: 25902 - DNA, 201 bp, Homo sapiens
tccctgggatgtgccacctggagaaggtccagggagcagccctgtggcttttgagaaatggttcagtttgctctggggccttctgatgcttctctgacacrtccgagtaggcagcatttttttttaaacccttgattttcagaaacgcattgtccctgagttattaataattatctctctctcctctctactctttctttc

SEQ ID NO: 25903 - DNA, 201 bp, Homo sapiens
cctgggttttataatgccagtcataggaggtgctcaataaatgcttatgacttgctgcacccccaggaagtactgcctcttctttatgtgcatagcttcgygcagttgcaggcatgattccagcctctggagatgtctgatagggtgtgcggatgggccatgttgttccactagagtaatttcctagagagaggagagaag

SEQ ID NO: 25904 - DNA, 201 bp, Homo sapiens
tgctcagtgccggtgatgggtaccctcaaaatcagagactagatttaatgacaggacatgtagaaatcagcgctgtcataaaaacagccgggagaggaackccataggagaggaaaacccctagaaatggcttgacgttattggttccagtctcataaatctcagtctccgatccttcccgtgattccccctttccatcca

SEQ ID NO: 25905 - DNA, 201 bp, Homo sapiens
aacagccgggagaggaactccataggagaggaaaacccctagaaatggcttgacgttattggttccagtctcataaatctcagtctccgatccttcccgtrattccccctttccatccagctgcacctaagtgttccccctttgcagtgaatgcttgcatttcccagtgagtttcctgtgcttagagatttgtttttagat

SEQ ID NO: 25906 - DNA, 201 bp, Homo sapiens
cagtaaagtagatttggactcaggtctgccgacaataaagcctcagctatttacaaagcaggtctaatgtactggttataattatggattctggagcccakcaggcctgggttcaagtctccatatactaattggtgaccttgggaaagttatttagcctctctgtatctcagtgtcctcattggtggaacagtaataata

SEQ ID NO: 25907 - DNA, 201 bp, Homo sapiens
taggtgatctgcttagattctcccagtactgggacatttgccacatccagagttattagaacattctaccagggacagatagactacaaagtattggtacyattaggcaaagttgcaggattttgccaactgaaaccccaaggcattttctaaggaacagacaagggacaattatgccatcctatctagttcccgctactg

SEQ ID NO: 25908 - DNA, 201 bp, Homo sapiens
gagggaagcagcgaactgcagagcactggcctgtttcaatagcaccaattaccttagtgaaaccagcgctcggcatgaaatcccagggtggccgcaaacgrtgaattagccatgattaggctttttagatggatccccccaaaatcatgccagcttaacattctgtctcaattatccttgtggtcctaaaaacatattttg

SEQ ID NO: 25909 - DNA, 201 bp, Homo sapiens
tcttatcagacttaaggtctatgttgatgttaaatgctggttggcttttcctgaattccaacagggaggagggcataatgaggcatgtccaacccaccccmgactttccatcatagcctgaatcagtttttcaggttaactttggagtgccctggccaacaggagggagtctattaagatagttgagggaggcttagaatt

SEQ ID NO: 25910 - DNA, 201 bp, Homo sapiens
gctttccttgttatgtctaatttctccccacccccctttttttaatctgcctccttggaaactctctggaacttttatttcatataatgttcaaatcagawaatgaaactcctccagagacaggttagatagggcagtgaatgttggcatgtctgcatgattctaaagtacaaggggaactaggatagcagacttaacata

SEQ ID NO: 25911 - DNA, 201 bp, Homo sapiens
tccttagaaacataaactgtaaaacaaggaatagaagataaaaatatatgaactatgttttcatatatcctaattaaaaaaccaagcaaacctaatgacayatggaaggacttaataaaataaaaacaatgtacaatatactttatcaacaataccaacagatatttaagaaaaaggtgagcctagcagatcaaagtaaga

SEQ ID NO: 25912 - DNA, 201 bp, Homo sapiens
atgctctgtgttgtggaagagaaacagaaacaaactgactcaggaaagttaaaataaaaggatggacaaatgtgaataaaaagaaagcaggtgttgtagtygttatagtgttttacaaggtagaattcaagcagaacagtaaatgaggcaaagaaagatgcctggtactgaaggttgaaattcatattagaaataactatt

SEQ ID NO: 25913 - DNA, 201 bp, Homo sapiens
tactagagcctgggaataaagagggactgcttaacctagggaagtggtctttggtaattgggtctctgatccaattgatcggcgaacaaatctgtcatcatagagtcactggggcagctaccctcggcccaactctgctgtaggtgcctccatgacctgactagatgtagttgtgaatggagctgggattgtggagggact

SEQ ID NO: 25914 - DNA, 201 bp, Homo sapiens
acttaaaaaaggttaaggtaagcaaaatactaatataacagaaagatctccaagacatatttttgagcaaaaacatgtttgagtgcaaaagatttgtatgrtgttggcagaacttatttatttaagagtacagtgctatacacctttttgtgtttaaaagcacaaaagtatacacacatgcagacacacacagaaatctat

SEQ ID NO: 25915 - DNA, 201 bp, Homo sapiens
tggcagaagaggatgcaaacatatccttcttcacatggcagcaggagagagaagaatgagtgaaggaggggaatagccccttataaaaccaccagatatcrtgagaactcatgatcatgagaacaatatgagggtagccgcccccattatttaattatctcttaccaagtcccccccacaacacgtgtggatagtgggagc

SEQ ID NO: 25916 - DNA, 201 bp, Homo sapiens
tgcccagccaaaaagagagttttttttgagacagagtcttgctctgtcacccaggctggagtacagtggtgtgatcttggcttactgtaacctctgccttygggttcaagcaattctcctgcttcagtctcccaagtagctgggactacaggcatgcacgtccatacctgactagcttttgtatttttagtagagacgggg

SEQ ID NO: 25917 - DNA, 201 bp, Homo sapiens
gcttcttctgggccactgagaaagggtgaacgatcttagggaacctctggtacccaagcaaagggcctgggggctcctgtgcattgatagctatccatcaygggcaatgtggtagagtggggtagagctagaaggatgtattcaggaagctgccattattagaaatgtgcttctcaagcctacataagaatctcctaggga

SEQ ID NO: 25918 - DNA, 201 bp, Homo sapiens
agcagacagaaactcagacaaataaatgcagcaaactgtgacatttgctgtgaaaagccatttgtattggataatggggacaaatggggtttggtcattarctgaagggttgcctaggtcagcataaggcttgcacaaaggagtggcagatgaggacatcacaggagccgtgttgaggaggtcaaatacttgggtagtagc

SEQ ID NO: 25919 - DNA, 201 bp, Homo sapiens
agaatccctaagctgcccaaggagaacctactttctcagctctagcccgtttacatagcctctggcccactgagtcaacacaggccttgaatgacatgtawtgaggctggcaggagtccctgtttgagattacacaacctttgttaatcagttctttagacaagttaacattaaaatcctcaaaaccatgaaaaattggag

SEQ ID NO: 25920 - DNA, 201 bp, Homo sapiens
  misc_feature (1)...(201): n = A,T,C or G, or insertion/deletion polymorphism (see Tables 1-2)
acctcagggtattgctccagctacttctcaagatcataaaacatgggtgtttattcctttccagttccccatgtattcacggcctgcacttaacaaagacngaggaatgtgctttctggggaatgtcccttcccactgtatgatgtttacagctctttaggccagatgataatgttcactgcacttctctcttttcaacta

SEQ ID NO: 25921 - DNA, 201 bp, Homo sapiens
tggtctgggaggctagccccacagccttgcctgctgatcaccttcacgacaaattttgccagtatcccttccctgctgactgacttccttcccctgttttyccttccctacaaacaagtgggtgagacttgacaaggcccagcatttgtctgagcaggctgtataatctgtcctctcccagtggaaagctgcactggacgg

SEQ ID NO: 25922 - DNA, 201 bp, Homo sapiens
aacagatctgaagcccaaaagcaaatttctgcttgagagcaaagccaaaattcccattcagactctgcaggaggacccccactgctcagatttcttcatayaagattctgtcagttttggggaagtccaaagtctttctgtgaaatttttcctgcaagttattttttgattatactccataaatgatggttcagatctatt

SEQ ID NO: 25923 - DNA, 201 bp, Homo sapiens
  misc_feature (1)...(201): n = A,T,C or G, or insertion/deletion polymorphism (see Tables 1-2)
ctatatgaagaggtttatcctctgccacatttctgttgaaagcctgtgaaacatgaataggatggagcaaagtgaaaacacattaaaaattatgtcagatncccaaatgcagtaaagcaactgcatctctgacaggtaatcaagaattgggtgactctgagttctgatttggcgtaatgatatcaacatgttcacacacac

SEQ ID NO: 25924 - DNA, 201 bp, Homo sapiens
aaaatcaatagagaaaagtgtgccagcgagaggcacagactgattaagtgctgtctatatgaagaggtttatcctctgccacatttctgttgaaagcctgwgaaacatgaataggatggagcaaagtgaaaacacattaaaaattatgtcagatacccaaatgcagtaaagcaactgcatctctgacaggtaatcaagaat

SEQ ID NO: 25925 - DNA, 201 bp, Homo sapiens
ccaaagtggtacatttgttacaattgattaatctacattaacacattattatcacccaaagtccatggttgacatcagggttcactcttagtggtgtatawtctatgggttttcatagatatgaaattacatgtttccactattagagcatcatacagaatagtttcactgccctgaaaatcttttttgcttcacctattc

SEQ ID NO: 25926 - DNA, 201 bp, Homo sapiens
acctctgatcatagtctctgcctcgaagcttactttgtccaatatcagtgtagccataccacttttttatgtgtactttttttgcagcctatatatgtttyttatcctattactttcaacctaatttggtatttatattttaaatgcatccttgttgattgcatttagttggatcttggtgttttattcagtctgataatc

SEQ ID NO: 25927 - DNA, 201 bp, Homo sapiens
tgaagccattgtgaggatcagcatttggaagaactggatttgaagagaatgttgaatatgaagtattcatagtctgtaaatggagatgttctaatttgtgrgtcagcaaacttttatcacaaatggccacatagtaggcattttaggcattgcaggtcagtctttgccatgaccactcaactctagcattctagtgtgcag

SEQ ID NO: 25928 - DNA, 201 bp, Homo sapiens
cctttccaggcactgtgctaggccctgcatatacattctctcactaatcctcaacaagccccggtgattcttagaactctagtctgaaaaaaaaaaaaagsccctgtgagataggtcttatcagcatgttgattttacacataaggacaactagggctaagagacttagagctcatttgaggtgccacagaaacagaactc

SEQ ID NO: 25929 - DNA, 201 bp, Homo sapiens
aactcactaggccggactcctgtataggagcaggcgctatgtaagaagtgttggttctctaacttcatcaacagtaaaaggtgggtgccagtacctctagrggacagagtacaggatagtatagtgtcaagagcatcaggctgaagtctgggtttgaatcctggctttgccacttattgactctgtgactctggagaaggt

SEQ ID NO: 25930 - DNA, 201 bp, Homo sapiens
tttaagatactggctgctggcactagtgatgtcatggcaactgttattgcagggcacgttgaaatccattagcaggcattcaaggctcctcatgagtaaartaggggcaatgtaaaaaagttagtttggcttccccaacttccttaatcccaagaccccgtgccaggtacttgtattttctatttgctaaatgttagttga

SEQ ID NO: 25931 - DNA, 201 bp, Homo sapiens
aactgtgttcctgccttcaacatcccaatgcaaattaaggcttgggaagccctagtgacagcaactgactgcaggtgttggagatatccccgtcccacccraatacatatggctcagggtataatattaaaggacttccacacttgggctaggtctctggtgacagtgtaagccaatattgaagatttcaaaggagaatct

SEQ ID NO: 25932 - DNA, 201 bp, Homo sapiens
ttgagcagatgagtgaatgtgcctaagagacccagtgaagaggattgctggatgttgggcggtggcaggggaggggggaagggctttaaagaaacagaackgaggagaaaggacagctgcagattcactcagtctcttctgcttcactgctttgttctcttcatagccttggtcataactgaaattatcttgtctatgagt

SEQ ID NO: 25933 - DNA, 201 bp, Homo sapiens
tttgtgcccgtaaccagcctctcttcatccccctgcactgcaccaattctaccttttgataattctctgaaacgaaattttcactggcagtgctgtccttmaaattcaactcaactcaacaggtacttgttcagagcctcctatgggctttatattgtgttgtgtgccctgggacctataaaataagtatcaaacatgacc

SEQ ID NO: 25934 - DNA, 201 bp, Homo sapiens
aacagtattccaaaatattggagttcaatgtattagtctttttccttatggttagtatttttgaagtcctgtctaagcaacatttgtctactcaaaggtcmtgacggtattatcctgtgttatcctttagaagtgttgtattttacattcacatttagaactacagtacacctaacatttttatatggtgtgtagtaaggg

SEQ ID NO: 25935 - DNA, 201 bp, Homo sapiens
gagagtcagaaaaatgagagtaggttgtactggaactgtcagagaagctcttatggatgaggtgggacaaagacacaaatatcctaaacccagaactctcygttaaagaaattgtaagaagcacagcatcaggttaccaagaaattatggagcccttttaagtgaaagtaatttgttcaatatgagaatggattaatttag

SEQ ID NO: 25936 - DNA, 201 bp, Homo sapiens
ggcatggatacttttcccctctcttccaaccctgctcctctgtgaagccattgctgaggtgggggtgcgatcaggagagtatataaaggagcttggacttygcagttgtaactcttgtttttgatgaaactgttttggaagctttcttcttgaatagagctgggggatctgagtgggactcagaagagaggagaaaggcca

SEQ ID NO: 25937 - DNA, 201 bp, Homo sapiens
tagttaaaatgagactgttaaggtgggccctaatccatctggctgttgcccttataagaagaggagattaagacatgcaaagaggcatcaggggtgcccaygcacagagagatgaccaagtaaagaggcagcaagagagttgccctgtgcaagccaaggagagaggtctcaggagaaaccagccctgtgggcaccttgatc

SEQ ID NO: 25938 - DNA, 201 bp, Homo sapiens
tcgtctccagtctccctttaggaaggctgtgagcaaacctggccttcgtggttctttcttccgtctgtaaactccctgtaattattatgcagttccttatrctaggtaccatgggactgtgaggcctccggaagaaactcttgactttgaggagcttggaggccattgtgaaaacaggaaagacaagcacaatcctggtaa

SEQ ID NO: 25939 - DNA, 201 bp, Homo sapiens
aaaataagatggcaagagttggtacaaatgtattaagtcataataaatgagaatgaactagactaaaagacagagcactaccagatttggttaaaaaaaaatgtaaaataaaatactttttcaagaggtgcatgtaataaaatgacatagaaaacttgaaaatactggaattaaaggacagaaatactggatacctgctaa

SEQ ID NO: 25940 - DNA, 201 bp, Homo sapiens
gagactgaacacaaaggctttgtgtttttactaaaacattattgttttgtcagatattgaaatgtccactgatgatttaatgattaaaactgagaattttktagatttacttttctcagttccatcatattatagagctggcagagagggtagagtaggtatttattttactacccaatgagtagtctcgagaaagacagt

SEQ ID NO: 25941 - DNA, 201 bp, Homo sapiens
tttaggaaggctgtgagcaaacctggccttcgtggttctttcttccgtctgtaaactccctgtaattattatgcagttccttatgctaggtaccatgggastgtgaggcctccggaagaaactcttgactttgaggagcttggaggccattgtgaaaacaggaaagacaagcacaatcctggtaaatgaagtgtgtacaaa

SEQ ID NO: 25942 - DNA, 201 bp, Homo sapiens
accctctgaagtttcctaggaaaattcatggactctcagagaaccaagtctggaagcctctttagaaatcatttaattaaaatgtttgatttttttttccratgagaaatcagaggtaaggaatttgctctaggtcccaaggtgagtttcctgcataggagactgaacacaaaggctttgtgtttttactaaaacattatt

SEQ ID NO: 25943 - DNA, 201 bp, Homo sapiens
atcagcatctcacaccaaagtggtacatttgttacaattgattaatctacattaacacattattatcacccaaagtccatggttgacatcagggttcactsttagtggtgtatattctatgggttttcatagatatgaaattacatgtttccactattagagcatcatacagaatagtttcactgccctgaaaatcttttt

SEQ ID NO: 25944 - DNA, 201 bp, Homo sapiens
accctcacctcaggggctgtttttctctcactgaagaatgaaaatggtaaatggcctcaagcaagctaaaagcagatccctcagctttattcatttcctgrctgcaatacttggtggtagtattagaaaaggctctggcagtcctcgtaggagaaatgccagtaatgaggcaatggaacgttcattcacctgctttatgtt

SEQ ID NO: 25945 - DNA, 201 bp, Homo sapiens
ggaaagaaatagccccaaggagttttttctttacatgctaagaagctgaggcccagagagatggaacaggtttcccagggcaatagcactaggaactggarctgcaaacttttgagtccaccatatccaccctgagttgaggtgatctttcttatgatcctgagagggaacctttgaaatcaagcaggcacccctacttcc

SEQ ID NO: 25946 - DNA, 201 bp, Homo sapiens
tgggatttcagccgtgaggcaccatgcccagcccccatcctcttaaacagatcttatttctagataaataattattgttagtgcatttctgggtcagctakaaataggagctatcaccaaacaggagaaaacttaagaaaaatgccaagctgaaatcagagaaagaagtacgtgttttccccaaattcagacattgaaata

SEQ ID NO: 25947 - DNA, 201 bp, Homo sapiens
gtaataaagttaaaaattcagaaataaagccttacatttaaggtcaattaatttttgacagtggtgccaagacatttcaatgggaaaagaacaaccttttygacaaatgatgatgaggcaacagaatatgcctgtactcataaataaagtttcaccccttccttatacaatatacaaaaattaactcaaaatggatcatag

SEQ ID NO: 25948 - DNA, 201 bp, Homo sapiens
tgactgagtctggctaaagttacatggtgtttgtagtctttctcaaggccaactttggtttcatagatctttcttttttgttgttctcactattatggatytttgttctttattattatttctctactgcttacttagtgtttaatttcttcttttacaagtttataaatgtggaaatggaagtcattgatttgagatctt

SEQ ID NO: 25949 - DNA, 201 bp, Homo sapiens
agagtttttaactaaaaatttagtttttaaaatacacgatactactcaggctacatagctttttttttttttttaaatgactgttaatgttttgtaatttwaaaaaattttcaattttttcttagttgttaaaattattgacatgaaattgtttacaatgtccccttattatcccttaaatttccatagcatgatgtcacc

SEQ ID NO: 25950 - DNA, 201 bp, Homo sapiens
ttctgatcgtaggtagagtttttaactaaaaatttagtttttaaaatacacgatactactcaggctacatagctttttttttttttttaaatgactgttartgttttgtaatttaaaaaaattttcaattttttcttagttgttaaaattattgacatgaaattgtttacaatgtccccttattatcccttaaatttccat

SEQ ID NO: 25951 - DNA, 201 bp, Homo sapiens
ggtttaaacctcagttgaaatggagtctcattaagtccttttgggcaagcagccttcccagatgtcaactttgagaggagactatgctctcaaggcagccrttttgattgacaggagtcctgagggtagccatttttacattaaagggaaactggtttgtattgagtttcatctggtgagcctggcttctcttcttccacc

SEQ ID NO: 25952 - DNA, 201 bp, Homo sapiens
cctgtcatcagtctcatcagcacacagatgttcggcaagggacagcattcctctagtcttcattgtgaggcctcttctctgttctcccagcccatccactmgggctcctgtgacagtcagccacagaacacactgcaggtcacccatggagctaggtgcagaaactgtccaccacaccattttgtcattgtggttttatcc

SEQ ID NO: 25953 - DNA, 201 bp, Homo sapiens
atttataaattaaacttaacataggtctgaatgtataggaaaaacatagtatacatactatatatagtaagtggagagcacaccaaatgtatatcattttygtactgtagtaaatttgaaaaattgtaggtcaacccattataagttgaggatggaaggtctgtctatagggttcagtattacatgtggtttcaggcatcc

SEQ ID NO: 25954 - DNA, 201 bp, Homo sapiens
tactgtagtaaatttgaaaaattgtaggtcaacccattataagttgaggatggaaggtctgtctatagggttcagtattacatgtggtttcaggcatccaytagtggtcctgatgtgtcctctacagacaaagggggactactgtaagtttgtaaaaccactgaacaaggagtttcaaatgtgataaaatattaaaatggg

SEQ ID NO: 25955 - DNA, 201 bp, Homo sapiens
accattaccacaggcccatgaggagtactgccagtttaccaccaatgttcgcttaagactcaagggctcttgggtcagcttgtggtgaatgctgccaggcytgggacccattcttcagggcaatgggttcccactctggctcagggtaggtccagaaatgccatcaaagagccaaggcctggaatcagggatgatcccatt

SEQ ID NO: 25956 - DNA, 201 bp, Homo sapiens
gcatactgcacaagatgcagaaaagaagatataaaagtgcatagggagactgaatcccacaattttggcatgaggtagacaagtacttctgagtcaatcaraagtttcttgtctcccaagaagacaccaacgctcagttgaatatagcagccactgaattatcttgagtatacgacacaaataagcagcgtcattgcatta

SEQ ID NO: 25957 - DNA, 201 bp, Homo sapiens
aaaagttcttaatgtaaaaaaaaagactgaaatgatcagggaaatctgacactgactggatatttgataacagtaattataagcttttttaggtatgacarttgtggttatatttaaaattttttttcttagaggtacctaagagtatgtatggaagaaattatttgatgtctgggattcattcaaaaaaaatttgcttgg

SEQ ID NO: 25958 - DNA, 201 bp, Homo sapiens
attaatttagtggtagagttaaaaatgttattccttctaataacctagaaattctcatacatatgtatatgtcctaaagaagcttggatatattcataaartaacattacagagatatctactaatagcattgttttgtgataatgaaaaatttgaagcaaaataaatgttcattaataggaaattagatagataaaatgc

SEQ ID NO: 25959 - DNA, 201 bp, Homo sapiens
ccctgtctgcctctgcctctgagaaatcactaaatgacttatcttgttatagattatttcacattttctagactattatataaaaaatacaatatgtactrttttttctggcttctttcagtataattattttgagattcaaccatgtgtgtatcaatagttcatttaaaaatattattgctgacaaatatttcattgtgt

SEQ ID NO: 25960 - DNA, 201 bp, Homo sapiens
gactgagcattttatatgattctatatctctcctcttttatcatatcaactatatttctttaaaaatttttgtagtggttgacttaaagtttgtaatacaygtttacagctattctaagtttgacttcaaatagcactataccacattatggatagtgtgggtaccacataacagagtattcataattatttcacttatcc

SEQ ID NO: 25961 - DNA, 201 bp, Homo sapiens
atgctcactaatactgggtattatgagccttgctcatttttggcataatgttccatatgaagtggtagctcatcatatagttctcatttgcattttccctsttggctgatgaagttgaacactctttcatacatttcttgaccatttaaatttcctctattgtgaaatggattttcagtctttgttcattttttaaaattg

SEQ ID NO: 25962 - DNA, 201 bp, Homo sapiens
gccaggaatataatttatgagttaaagtgaattattggctcatcactcttcccaaacatttccttgcctccctttggtcagttttatctagatgaaataaracaaccaatttgatggtttgacagatttcttcttcaatggaaataacttgcatggagtttagatagtctgtggatttcctgtaatatgggagttgtaaca

SEQ ID NO: 25963 - DNA, 201 bp, Homo sapiens
aattgtgatgaaaagtgaagattgcttttgcttgaaagaggctgacatatttcccagacccgggatcactttctgtggtgtatgatttaagggtgagcgarcatgccaaagcgctccacttgagctgagtgatggggaatgagttgtggagctgtggtcttagatggtattttgtgaaaaacagtgggagatttatggcta

SEQ ID NO: 25964 - DNA, 201 bp, Homo sapiens
tgcattaaagggctgtgcggagtggagaaagcacattgggctggaaatcagatgacctggattctaacccctgcctgtccattaaccaacccggtgacccygggcttttctagtcttggggccttcattgttccacatttttaaagtgagagggttgtgaaagaacagtggttttcaaactgcatttcaagaggtacgaat

SEQ ID NO: 25965 - DNA, 201 bp, Homo sapiens
ccaagtttctgattgtctaaataacgcagcaactcaacatacagctgtctggcattttgacagtacaataacccataattcttcctgccactcaacacttyaaggttagcattttgtagtttgctctcaaggagtagtcatttaaattttcaagagcaaagaaatgaatgtggctgcttcatacctctcttttgatctttc

SEQ ID NO: 25966 - DNA, 201 bp, Homo sapiens
gttgtacatcttgtttcagagatattttgctgtaatgttctgtgaccttttccattgagtgaggtagttggaaaggcactcagtaagggaaaattgagctrttttattcctccccaaggaggctcctgtttcctttccaccattcatttgaaagctatcattttcttgattttatagctgaaaaacaccattgattcactg

SEQ ID NO: 25967 - DNA, 201 bp, Homo sapiens
aatagtagagctggaagaaattttaaagcactcctgtgccaatccatacatttcacagatgttgaaactgaggttaagataggtttaatattttttctgtrttcacataatagatgtatggctttagtgacaaagccaggaatataatttatgagttaaagtgaattattggctcatcactcttcccaaacatttccttgc

SEQ ID NO: 25968 - DNA, 201 bp, Homo sapiens
aatcagaacagagtgttggtgagagtcagtttccaagggtcgcctcttcatgctgtattgctttttcttgaccaatgaaaagccccctttttcagatttcsccccatttctcatccatagcagaaagggcagtgcttctagaaattgagatgtgtctccaggtaaaagccacacaaggcagtgggaagggatgtggctgtc

SEQ ID NO: 25969 - DNA, 201 bp, Homo sapiens
gcgttgaaatattcagaagcatctcatagtgtcttagaagatccaagacctagcccgatgggtcttctctgttattagaattgtgtggaagggtggcagaygcagttgaggggatgggatgctgagagacaaggcatttattaaaacgacctctagagacttttttttttccactgggcttgaatttcttgggcttggaga

SEQ ID NO: 25970 - DNA, 201 bp, Homo sapiens
aaatcttctagtttggaaatctcttccatactccatggaaaacattgggtgtctcctgtggggccagtgtggtgagttacttggaacagaatgggcaatcwagtaggcgttgaaatattcagaagcatctcatagtgtcttagaagatccaagacctagcccgatgggtcttctctgttattagaattgtgtggaagggtg

SEQ ID NO: 25971 - DNA, 201 bp, Homo sapiens
tatatcattcccaataggtaatttctcatcccttacccctcagccacccctccaccttttggagcctccagtgtctattattccattttgtatatctatgygtatacattatttagctcccacttatgagtgaaaacatgcagcatttgacattctgagttatttaactttagataatggcatctagtttcacccgtgttg

SEQ ID NO: 25972 - DNA, 201 bp, Homo sapiens
tattgtaaatgggattgacttttgtattttgttctgagtttgattatttttggtgtatagaaatgctactgatttttgtaggttgaatttttattctgaaytttactgaagtcagttatcaaatctaggagtcttttggaggagtcgttaaagttttctaggtatcagatcatatcatcagaaaacagagataatttgact

SEQ ID NO: 25973 - DNA, 201 bp, Homo sapiens
taggagattttttactactgattcaatctcactacttgttattggtttattcagggtttctattttttcctggttcaattttgggggttatatatttatcratttcctataggttttctaatttgtatgcatagaaatgcccatagtagtcttttatgagcttttgtatttctgtggtttcaattgtaatgtgttctttat

SEQ ID NO: 25974 - DNA, 201 bp, Homo sapiens
caaaaaattttttaattcttgccttaattttgtcattgatccaaagatcattcagaagcaagttgtttcatttccacatacttgtataattttgagagttyctcttggtatcgacttatagttttattctactgtggtccaataaaatacttggtatgaatttgagtttttaaaacttattgagacttgttttatggccta

SEQ ID NO: 25975 - DNA, 201 bp, Homo sapiens
aaaaagtcttatgtttgtgtatcttaagaatatacataatataggccaggcatgatggctcacacctgtaatcccagcactttgggaggccgaggcaggcrgatcacaaggtcaggagatcgagaccatcctggctaacatggtgaaaccccatctctactaaaaatacaaaaaattagtcgggcgtggtggcgggcgcct

SEQ ID NO: 25976 - DNA, 201 bp, Homo sapiens
ctactttaaaacacgtttttcttggtggttaagcttttatttttgtggacccaatagccttggatccaaatttaaacaccatatatttgccttggagctgragtgaagaaatgctacctgaaaactgttttctacctagggacagagcttctgattttgctccactcacactcttcctgtaagtctccactgaaagccgct

SEQ ID NO: 25977 - DNA, 201 bp, Homo sapiens
atgaaggtgaaataaagacatttctaagtaaacaaaaactgagaagctttatttgctagcagacttcctttacaagaaatactaagggaagtaatacaggytgaaagcagtacaccccagacattaattcaaaaccacacgaataaacaaaaagcaccagtaaaggtaattatataataataaaaagatagtataaataca

SEQ ID NO: 25978 - DNA, 201 bp, Homo sapiens
acatgaatgctagggctgacttgactggaaatgggaatgatctgaagactcatgttcatacattcatctgtttgggctaggaggacccacagatgaggatktctaactgaaatgcctacatactccttgtggcctggcttgcttgtggtttggcagcctcagggtagttggatttacatgaaagtgcaaggtttcatgccc

SEQ ID NO: 25979 - DNA, 201 bp, Homo sapiens
tttattctggatatgtgggactgaccttgcgttgaggctaaatcatttcatcccagacaaagtctgtttggagttaattggggaagcagtgtgggtgtacrgcaggtcactctgggctttttattctctttctggccctcattcaaagagtcgctgtagcatacattttctgatgccagttcttccattattttataaata

SEQ ID NO: 25980 - DNA, 201 bp, Homo sapiens
taaaacgtgacaccctttctttgttcccctgcatggagcagccctggggcctgcccagtgtctgcagcactcagccaaagggaaggagggagggaccctcygccgtctggtcgctctgggctgccaccatttcccagacgaataggagctgtaaaacttgtggcttacataacccagtgagcattctccagctaatctaca

SEQ ID NO: 25981 - DNA, 201 bp, Homo sapiens
tctggctcattactgctgcctcggcactttagaaagaacacagtgctttttaagtccttgatgagaaaaccatacctgtcacacgtagtgattttaacccrtattaaacagaatttagtagcagtctattcaggaggcaaataaatctacggtataatataattttgtgatttttttttctttaaataaagagattagagt

SEQ ID NO: 25982 - DNA, 201 bp, Homo sapiens
ttgctgatagctgcctttaattattatttatgtttttaggcacttattctacttctccaaacttaagactagtgaatacatggtcctttgtgatttagctwgagtagaaagctcagtcttatgaaatgaaaactgatatattttttaaagagaacgtactacgaagaaacaacaaagaattaataaaaatgttaaaatcag

SEQ ID NO: 25983 - DNA, 201 bp, Homo sapiens
tattatctcaacaaaaacagctcttgcttcctaagaagtatcttggtgaataatattttctccaagctcagatcccaaggagacaggtctggtaaatgagsgtatttggtatttggtgtttggtgttgcttcatgttgactttgcttttgtcacacaggcttctagtgaggacgttgccagctccccggagcgccactaca

SEQ ID NO: 25984 - DNA, 201 bp, Homo sapiens
acaagtgcctcattccttctacccaaccgaggcagtgcacagagccacaatgcataaagctggcaagttattagttcagggccccttaaaagatctcttargattgatttgttactagtccatggggtcccttggttagtctggtggcattttgctagactgcagcttcagggaggctcagggatgggtagtgggcctact

SEQ ID NO: 25985 - DNA, 201 bp, Homo sapiens
cctcatcaaactattatgggaggctctgccctctgagaagagaagtgctgtcttaagaaatttccttgatactcaaagggtgttttacacagaatcacctrggcttttgttaagaatgtggactcaggccgggtacaggggcacacacctataattccagaactttgggaggccgaggcgggcaggtcctttgagtccagg

SEQ ID NO: 25986 - DNA, 201 bp, Homo sapiens
ttggtaaatagattcagatttggtatgattcaatgaactaaaaaatatcccctgctcaaagcttgtctatgcctgctaattgcatgaagcttaacagatcytccacacacggcaccaaataagggctggctggaaatcaaaacctccttgccaagcactttggattttccaaaggaactgtaatgttcctggagatgttta

SEQ ID NO: 25987 - DNA, 201 bp, Homo sapiens
tatcaggggtttccacttttgcttcctcctcattttctcttgccgctgccatgtaagaagtgccctttgcctcccaccatgattctgaggcctccccagcmatgtggaactgtaagtcgaattaaatctctttttcttcccagtctcaggtatgtctttatcagcagcatcaaaatggactaatacatagggtaaagagtg

SEQ ID NO: 25988 - DNA, 201 bp, Homo sapiens
gatgccatcaattttttcgtcctctggggaaacagagtcattttttccttctttatcttgcatagtcagtgctcccttacaacacagtaattcccatcagrttttgagaactctgtcttctccctttaagcaaccaccctaccagaagccctcttcagttctttctctttttgctttagtgtcaaattttcaaaagacctg

SEQ ID NO: 25989 - DNA, 201 bp, Homo sapiens
tctagacagactgagtcagaatcacttagtctttatctcaagagcagccttgtcacccacagtagaaggcagaattactgtggagtctaacagaaattagrgaagtaagaaatttataccaaatggaaatatggaagatttatctcacttatttcaagcttggggaaatactagcctttaaatgtctgattactagagcct

SEQ ID NO: 25990 - DNA, 201 bp, Homo sapiens
aaaatgcttaccgttcaagttgggtaatagccatccttccattgactgatcatccactaccggctcttgactctggcatcacatcttcgagataatccgarctagagtttggctgtcatctagaattcacagttttagtttagcactttgctgactagtactttgcggattagataatggtagttagctttctgagactct

SEQ ID NO: 25991 - DNA, 201 bp, Homo sapiens
gcttgcatatggcatttcttctacccttgtatgttttgttcctgtagctctgctgccattccctggctgggacccccttttatctgccaacttggttaacycctctctcatatgtctctcgaagtcacggcctaaccaggcatgcctatctaaccatcaccttacctaggctcagcttgtctgtatgtggcttaagccagg

SEQ ID NO: 25992 - DNA, 201 bp, Homo sapiens
tggtgcttgtttttaataatgctttcttgaacttctacagtaaatacactttcccactccactggataggagaggagttgacaagctgggtgttctgataktggctgtgctgatgtttgctcataaattcatccagcaatctcttgcggaaaatacgttctaaacttggtattaagtttttgggcctatgaccagagtgaa

SEQ ID NO: 25993 - DNA, 201 bp, Homo sapiens
aacatcatagtatatgcttaatacaaacctagatggtatagcatgcaatacacctaggccatatggtatagcctattgctcctgagctgcaaacctgtacrgcatgttcctgtacagaatactgtaggcaattgtaacacaatggtaagtatttgtgtatctaaacaaaaaaaaagttacagtaaaatacgatattataat

SEQ ID NO: 25994 - DNA, 201 bp, Homo sapiens
tgttttgtttttttcttttgagacagagtctcgctctgtcacctgggggcatgatctctactcactgcaacctccacctcccaggttcaagcgattctccygcctcagcttcccaagtagctgggattacaggctcctgccatcatgcccagctaatttttgtatttttagtagagacgggtttcaccatgttggccaggc

SEQ ID NO: 25995 - DNA, 201 bp, Homo sapiens
atattatctcaacaaaaacagctcttgcttcctaagaagtatcttggtgaataatattttctccaagctcagatcccaaggagacaggtctggtaaatgasggtatttggtatttggtgtttggtgttgcttcatgttgactttgcttttgtcacacaggcttctagtgaggacgttgccagctccccggagcgccactac

SEQ ID NO: 25996 - DNA, 201 bp, Homo sapiens
ttcataaatatttgtgaactgctactctgggccagatgccactgtgggcactggcagaactgggccccctgtagatcagatagaaacaaatgggaagctcygggccattgccttcaaaaggctttcttattccagagaggtttttgacataatcctcccctccccaccagcctctgctgtgaccagcttcttacttgaatt

SEQ ID NO: 25997 - DNA, 201 bp, Homo sapiens
  misc_feature (1)...(201): n = A,T,C or G, or insertion/deletion polymorphism (see Tables 1-2)
cctactttctttgggtctcttgggggaaatgaaactcaagtgtagcagctagtcctaagtctgtaggtcttcagttccacatcctaagtcacacatgacanggggcatggatcttcaggggcttacctaagctgtccaggacacattgtcctcatcctcaacacaatgaacctggaggcttggatatattcaaggcaaaca

SEQ ID NO: 25998 - DNA, 201 bp, Homo sapiens
gaaaacttgcttggcagaatgaacacctgactgcgtcaaaaaataaagcataagtaccagctggcgtggttctgtgaagctggaggttttgttctgagtcwtttgttccacttctgtggaagtccaaccaagaagaagggagaggtgcccgtccagcgctcacttgctgggcactatctgtgaaacctctagctctcagtg

SEQ ID NO: 25999 - DNA, 201 bp, Homo sapiens
gtctgagactttgcaacctttctctcttctgattgtgaattccaagtgtcaagacaaaatagcactaagaaatcagtaaaatgtgacggtttttctcaagygtctactaagagcctagccagatgcacatttcttattccttttggtaaatagattcagatttggtatgattcaatgaactaaaaaatatcccctgctcaa

SEQ ID NO: 26000 - DNA, 201 bp, Homo sapiens
cttactagtttccctctcttgctagtttcccctctcttgttagtttccccctcttgcttgtttccccttctcttgctactttcccctcccttgctagtttytcccctctcttgctagtttccccctctcttgctagtttaccttctcttgctagtttttcccctcctttgttagtttccccctctcttgctagtttaccta

SEQ ID NO: 26001 - DNA, 201 bp, Homo sapiens
  misc_feature (1)...(201): n = A,T,C or G, or insertion/deletion polymorphism (see Tables 1-2)
aagtcgagatattatccattgatcatggtaggaaagcaggcaagaaagctgtgttctatcctgggcaagccatcaatgcctggggaaggccctttatttcngtctctgtgttctcatctgtctaatagagaagttaatacctttccaacatacttcacatgtgaaaatcagacagtgtaacaggttctctgtctttctctc

SEQ ID NO: 26002 - DNA, 201 bp, Homo sapiens
ttggctacattctcaaacacaataaatgtccaaatgcctccagttagaacacttacctcccctcctcttttaaaaaacttcatttggtgtgctcactcagmatgatccattttcagaggatcacaatagagtataaaaatattgggacttaatggtcaacacattccttgaaggtctagaataaatgatgataatgaaggt

SEQ ID NO: 26003 - DNA, 201 bp, Homo sapiens
agtagaaacttaaacttcctgaaaattttcacccactatgcttaacagcttaaagtctaacctaacccccaaataattgctttcactgtaaacctatcaayagcgtatggagaatgaactcacaaattattggttcttcaggcagtggatgggaacccctgttggtctttagccatgaaatatccctgtatcatttcccca

SEQ ID NO: 26004 - DNA, 201 bp, Homo sapiens
caggcagagactggagttatgtagccccaagccaagacatgcctgaagccaccagcaactggaagcggcaaggatggattctcccctagagcctttggagrgagtgtggccctgcagacttcttgatttcagaaacctggcctccggaactgggaaggaataaatttgtgctgttttgttttgtttttttgagatagtctt

SEQ ID NO: 26005 - DNA, 201 bp, Homo sapiens
atttcacaaagtcgagatattatccattgatcatggtaggaaagcaggcaagaaagctgtgttctatcctgggcaagccatcaatgcctggggaaggcccwttatttccgtctctgtgttctcatctgtctaatagagaagttaatacctttccaacatacttcacatgtgaaaatcagacagtgtaacaggttctctgtc

SEQ ID NO: 26006 - DNA, 201 bp, Homo sapiens
catgttggccaagctgtttttaaactcctggcctcaagtgatctgcccacctcggcctcccaaagtgctggaattacaggtctgacccaccatgcccagcmtagtctgtgtgccttaatcattgtatatctttaggcaaatatgttatctctttagccccatgtctgtaaaacgagagggtaatgtttgccttatgatgct

SEQ ID NO: 26007 - DNA, 201 bp, Homo sapiens
ggactttactgaattgtttcccattcccaagtttttaatatgtacagacagaaaaatagacagtctctttttgacaccctaagttgtacctgccaaatcakcagagtggcagaattggcctctgagaatgtgaggtcgccttcttttatgactatttccaatgttatttttttcaacatctcctccttagtgtttgtaatg

SEQ ID NO: 26008 - DNA, 201 bp, Homo sapiens
caaaaaaagaatgatggaacatctctactttttataaaaattagatcaacaatcactgtaatggtagaaaaagagagtatatgtgttttgatattggagcratttttacaaaaatcatatatgtcaattttacacaggatcactcactgcttttctgctctgaaggatgaagatcacaactttccctaccattcccctacc

SEQ ID NO: 26009 - DNA, 201 bp, Homo sapiens
gatctgatgtaactcttaatgatttcctttttaaggaggacattaggaaagcctgcatcaaggacatcacttaccttcatttagaactgtgggcatctgcrctgtgtccatttcttacagcgataaaatggcagtaaatcagaaaaaatgccatgcccttcagaaccttgagaatgagctcctgagcattctgcttacagg

SEQ ID NO: 26010 - DNA, 201 bp, Homo sapiens
tgccatgataaagaatggcattcccacagttgagatgaatttccacaggtcaccatatgcagcttcctttctcagcaagaatatccttaactttatgcacrtaatttttttttgttttttttaaacagctattttgaggtataattcacatactatattgtttgcccattcaaattatataattcaacaatttttgacata

SEQ ID NO: 26011 - DNA, 201 bp, Homo sapiens
aatgtgataatagggaccataagttgatgcctttgcattggctggtttgggaatagctgttgagaggatacaatgtagtttcttttcagttttatttgtcrgccttgatcttggtggaggaacatgttcttaacacctacaagataacaggattgtttaaacattacaatatcacaccccatatttgagttttatgaaaaa

SEQ ID NO: 26012 - DNA, 201 bp, Homo sapiens
aagaaaatctagagggactttgaacacttgattagaactctaaaagggagaaattctttcagtgttggtcagtaatataaaaattattttgaatgattttwtcaacttgacatatctggctattattacaagtgtttgtttatgtgttaatctctcctaaacttgacaaggatagggtcttcttaagcacaaagtctatat

SEQ ID NO: 26013 - DNA, 201 bp, Homo sapiens
ctgcatttggtcccaccctgggtcattgtttagaagcatcaacacatgttttctccctggcataatatgggcagccagaattctgtgcaagggcagctagmcgagtcagatgtcatatccaatctagccacacatatatccttgtctttataaaaggctttaaccctgcctcaaacaataaaaaagcacttgtgaactgac

SEQ ID NO: 26014 - DNA, 201 bp, Homo sapiens
agaaattggggattaggggccaaggagaaagcatgaccaaggaggaggaatgagccacagtaaacttactcatgggaacatggcaggaagtaaaactaatragagtgagcccaaggccagctttgaggccgtggaacaatgtcaccctctctccattgccaactctgatagactatttgaccccagcaatttctagctttg

SEQ ID NO: 26015 - DNA, 201 bp, Homo sapiens
tgtatttaataatggaaactgccctccaccaatatcaccttggcagccaagggcctccttcatcttggtctgtgtttcttttttccagaacacttaccacrttttaagaaactgcatttgacttatatatttattgacataaatattatgcttaatatttatcatctgtctctacctgctagaatttaaactccaaaaggc

SEQ ID NO: 26016 - DNA, 201 bp, Homo sapiens
aatcacttgaacccgggaggcagaggttgcagtgagcctagatcacaccgctgtactccagcctgggcaacgagattgagactctgtctcaaaaaaaaaaatgtattaagatgaaattcatattgaacatttagaagtgaacaattcagtgacatttagtacattcgcagggttgtgtgactgccctttctatctagttct

SEQ ID NO: 26017 - DNA, 201 bp, Homo sapiens
gggcaaaaaggaaaaaagaaaaaaaactctcagaaagcaagaggggttcctgctaacaggcccccatctcacagattgatttcaggccatacacaggaackgaagaggccaggctcctccccacctccacatgacacaagcttcccgtggcttcagccctttctcccagtgtgcaggcaggtcggagattccagggaccct

SEQ ID NO: 26018 - DNA, 201 bp, Homo sapiens
atgtagcatgaaacaaaaagttagcagcctggtataaattagcacgtacaatgtgtctttgggaagggtggtacatatttacgattgtgtgttaaaatatrtatatttagagatttctttctgctctttcgaccataagtgggaaatgcagagaggaacatttcattaccaccaccttccaaaccgcaaactttctttgcc

SEQ ID NO: 26019 - DNA, 201 bp, Homo sapiens
acatgttcacattgtcctcttagaaagataccagccatattgagttaagggccaaccctactccagcatgacctcatcttaactcattacatctgcaatgwctttatttccaaataagctgacattctgaggtactggggtttaggactcaacatatctttctgggggatacaactcaacccataacaattgtgtaaccat

SEQ ID NO: 26020 - DNA, 201 bp, Homo sapiens
acagtggcatatcaagggcaggggggaagacagtggtctgctccaggtacagacaatgaggggatgcattgtttgtagaaagttttaaaacaataataaamccaactaaaattttgtgtatattctgttatcaccatgaactggcaattcaggcaattaaagtgataaaaatactcatctctggaaaaaagctgtcaatct

SEQ ID NO: 26021 - DNA, 201 bp, Homo sapiens
gatctatagtggtaaaagcaggctggcatcctcttctcaaatgtctagcactctctttactattattttatgtacctcaaactttattattatgtcctctmttattaatggcagagacaatgatataattatttatgctggaactcatgcttttgaatttattggatagagatcttctgaaactagaagatataacatata

SEQ ID NO: 26022 - DNA, 201 bp, Homo sapiens
gatttcatccttataggaattcctgcccagccactctagattccacaaagatcctgttctgaattccttcagaacctaattgggaccaaaaatgctcctaytgtataacacagtgtcttatactattcattattggtttatttttcttaatctaacttgactctaagcaatttgaggacagagatcctgcaattctttggt

SEQ ID NO: 26023 - DNA, 201 bp, Homo sapiens
tgaattccttcagaacctaattgggaccaaaaatgctcctactgtataacacagtgtcttatactattcattattggtttatttttcttaatctaacttgrctctaagcaatttgaggacagagatcctgcaattctttggtatcttctgtagtggtagatatttaacataataacaaaagtatttattataataaaataa

SEQ ID NO: 26024 - DNA, 201 bp, Homo sapiens
tccaacctgcactccaatgtcaaatgcatttttgtatttttatatgcagattgtttttcaccactaaaatattaatgacagaccacttgctttgatggctrggctttagttctgttgaatacggagttatgagacttgggcttatgccaaagccagtgggatacagcttagttagtggtcagcacttctagctgtatgaaa

SEQ ID NO: 26025 - DNA, 201 bp, Homo sapiens
cttcagaacctaattgggaccaaaaatgctcctactgtataacacagtgtcttatactattcattattggtttatttttcttaatctaacttgactctaakcaatttgaggacagagatcctgcaattctttggtatcttctgtagtggtagatatttaacataataacaaaagtatttattataataaaataatatttat

SEQ ID NO: 26026 - DNA, 201 bp, Homo sapiens
catcctaggggtaattataaactcctagtatcacaatgggatcaagatatgtttgtgatttcatagctacatttataaactcatatgaaatgcatttaaartaatgatccctaaagtgatgactaccaaaactaacaatagtgataattattctattttacaaatataaatgtgttggtccaacctgcactccaatgtcaa

SEQ ID NO: 26027 - DNA, 201 bp, Homo sapiens
tgaaaaaacttaaaacagaattaccatttgacccaacaatcccattattgggtatatacctaaaggaatataaatcattctactataaaagacacatgcaygtgtgtgttcatctcagcacatttcataatagcaaagatatggaatggaacctaaatgcccatcaacagtagactggataaagaaaatgtggcacatacc

SEQ ID NO: 26028 - DNA, 201 bp, Homo sapiens
tttatttaacaaatatttattgaacatctcatctgtaccaagtgcagatgctctccaacttacgaaggttcaacctataattgtttaaccttacaaagccktacacatttgatagaagatgtaaccccattgtaagttgaagggcttacaacttcagatagtttcaagtaatgatgcatttttgatttacaataatttcaa

SEQ ID NO: 26029 - DNA, 201 bp, Homo sapiens
tctaagatgacaagcctcatttcagctgccctgggagcccagggtatgttttcttgaggctctggtttgtcacacgacaatgagcctgcccactctgtgastacctgtgtagcctccctggtctgggaggctagccccacagccttgcctgctgatcaccttcacgacaaattttgccagtatcccttccctgctgactga

SEQ ID NO: 26030 - DNA, 201 bp, Homo sapiens
attatgaacatattttaccatttggcactgggatgagctagtgtccaagaattatgctgtgctttctgcaacaacagactgggtcattttttgtaaagcawacttctttcggttagattatatatcatcagattccctttgttttcttttcagagaaagcaatttagggtgtgctggaattaggaaagattatggtgatat

SEQ ID NO: 26031 - DNA, 201 bp, Homo sapiens
atttttggagagctagaaattaatccctacaagtcttaaatcctgatgttactagtaagtaaacttctaagtgttccatgctgaattttttttttttttttcggggggagaggatatttgacttggtggagtcataccaatacagtgtaaagtgggcttgataaagagcatagtctaaagttaaatcaagttttacatttg

SEQ ID NO: 26032 - DNA, 201 bp, Homo sapiens
tgtggctgtgcccaatgttcattcaaataaaatttcaattgtatagcattgctggaggcctaccaatagttacatcagcttcctggagtcctgagcccccsccaggagaggtcatgtgggcttctccctgcaccacagagcaccctgtagacggaattctctgtgtgatgctaagcacagtttctcctcaggctgccccac

SEQ ID NO: 26033 - DNA, 201 bp, Homo sapiens
ttgttgttgttttaatttttttaatttttaattttttttttgaggtggagttttgctcttgttgccctggctggagtgcaatggcatgatctcagctcacygtaacctctgcctcccaggttcaagtgactctcctgcctcagcctcgcaagtagctgggattacaggcatgtgccaccatgcccggctaattttgtattt

SEQ ID NO: 26034 - DNA, 201 bp, Homo sapiens
tgcctctgcctcccctatgtgtctcatttcagtgtaaaatttcaagcacttccctgtccttacgccgcaaaaggttaatagtcatcttttttttatgtacygtaaatgctcaattcctaaggatagtgtttcagggcaagttgagtgtaattgctaaataatatagtaattctctttttaaatgagtcatacttgcgttgt

SEQ ID NO: 26035 - DNA, 201 bp, Homo sapiens
attgctatcctaggggtggttattactttaaactacttgtttgataaggctggggaaattttgaccccaaattgtaacaatttagaaaagtttatgtaaaatttccagggaatttttccatgttgggggaaccaggagccttaggagcttggtggggtgtcaaggattaggggaggggcatgggaagagggaaaaaggata

SEQ ID NO: 26036 - DNA, 201 bp, Homo sapiens
gcatgccagtccagagtagtttaaaacgagctctgtaaatgtcatggaacccctgcctctgcctcccctatgtgtctcatttcagtgtaaaatttcaagcrcttccctgtccttacgccgcaaaaggttaatagtcatcttttttttatgtactgtaaatgctcaattcctaaggatagtgtttcagggcaagttgagtgt

SEQ ID NO: 26037 - DNA, 201 bp, Homo sapiens
ggccactcatctcaagattggaatgtgccatctccatctttcctgacctccttcagtcaagtcagctgtatttgtggaggtgcattgttcagtctcagagmattgtttaaatttaaaatcaatagagaaaagtgtgccagcgagaggcacagactgattaagtgctgtctatatgaagaggtttatcctctgccacatttc

SEQ ID NO: 26038 - DNA, 201 bp, Homo sapiens
ggtccagaaaaagtaccatatgttctcactctgatttacgaaactggtagcccagcccctatgctttaggccacctctggcctgatggtggggtttcaccrgggacacacccctttccacctaggagcctgtctgcctcctgctgccagccatcaacctgctgtctatagtgcccatggtgcccaggctgtttgtgccaag

SEQ ID NO: 26039 - DNA, 201 bp, Homo sapiens
gaaagatatttgggtgttttgtggcactttcttgattttgggtgaggttagcaggtatttggagggaaggcagaacccagggtaggaaaaggacaatagaytgaggccagggaggaaacaggaagtagccagagtcaaatttccaggacaccaggcatggggtggacatttctgaaggaagaaaagaatttcataatattt

SEQ ID NO: 26040 - DNA, 201 bp, Homo sapiens
aaagggacaactttaacatgataatgggaataatatcttttgtttgtttagcactttaccattttacttgacataaattagagtgatctaaaaactatatrgacgttagggattattattgctatcctaggggtggttattactttaaactacttgtttgataaggctggggaaattttgaccccaaattgtaacaattta

SEQ ID NO: 26041 - DNA, 201 bp, Homo sapiens
cagcaggactagcagcatcagcatcacctggggacatattagaaatgtaaatttcaggcccagttccagaaatactgaatcagaaactctggggatggggmcctgccatctgtgtgttgggaagtctccaggaaatactgatgcccactgaagtttgagaaccactgtgcaagaatagaagctcactgaaagagcacagat

SEQ ID NO: 26042 - DNA, 201 bp, Homo sapiens
agttcttatgtgttgggtgagtctcctgaaggcagcagatagttggttgctgggttcttatccattctgctgttctgtatcttttaagtggagcatttagrccatttacattcaatgttagtattgaaatgtgaggtgctgttgcttttatcatgctctttgttgcccatgtacttggttttttgtttttgctttttaact

SEQ ID NO: 26043 - DNA, 201 bp, Homo sapiens
gaaaacgatagttaattgtgtccctgtgatgataattagtgttcagctaagaggaccttttcattgttggcccgaggtgaggcctgagttactaagaattrtactggtggtagctgttttcttttaagtaactgcacagctctgtctgttttgccaactggcaaaatgaattaacaggaagtgaaacatttagtgtttaca

SEQ ID NO: 26044 - DNA, 201 bp, Homo sapiens
gtgttgttagataacacactttgtattatttaaattctgttaaatttattgaggtttgttttattgcccagaatactgtctgttttagtgactgttttgtwtgtatttgaaaataatatgtatttttactgttgtttcatatgaggcttcataatgttaattaggtcaggttggttgatagtgttgttcaggtcttccata

SEQ ID NO: 26045 - DNA, 201 bp, Homo sapiens
ctggagtgaggagaggctacattctggggagtaattggccaaattagaaaagtacctagcatgtggaagagaagtcatgcagaaagtgatattcctaggarcctatacttgtagtgacattttatttcaatgtcaactctgaggttgacagaatcttcttgtctgtgaggacaaaaagggagagttcttcccttctggagc

SEQ ID NO: 26046 - DNA, 201 bp, Homo sapiens
tattgtttcaataaaaccatcttttacattttatttaaatatttttggtgagctgtatgtacttgattttgtaacacctattaggaaaacttaaggcattyatatctgttgctatagcatatatttgggcttaattttataactttgtttaatgctttcttgctttttcctttttattctgggttttgtctgttttcatct

SEQ ID NO: 26047 - DNA, 201 bp, Homo sapiens
cacatcacatctgtattagtctgttctcacactgctaataaagacatacccaagaccaggtaatgcacacagaaaaagaggtttaatggagtcaccgttcyacctggctggggagacctcataatcattgaggagggcaaaaggcacatcttacatggcagcaagcaagaaagaatgaaagccaagtgaaaggggtaatcc

SEQ ID NO: 26048 - DNA, 201 bp, Homo sapiens
ttggtttggtctgttctgttggggcctagtgcaggagctcagtctaaaagcatggcttcccataaattttatttaacagtagaattcttcagtactactayaattctttttaaatgctatgaccagatttgcacctccaaccccaaacccctcaatgttagttactacaatataaggagaaactgtggtttccgtaggaga

SEQ ID NO: 26049 - DNA, 201 bp, Homo sapiens
tgctgcatttttctgttcaaacccccagtctgagagaagtgggctcaagaacgtaagctgttggactcttcctcaccctctgctcaaaaggcattcttaaygagcctcaattcagaaaatgaagtgtccaagtccaaggcctgaaaacctgatgcattatagtaggatgaatattttgtctaattatttgtattaatacaa

SEQ ID NO: 26050 - DNA, 201 bp, Homo sapiens
ccccaaacccctcaatgttagttactacaatataaggagaaactgtggtttccgtaggagaaaggaagagattcttggaaaattgcttgggatgtacaaarccagagccaatcagtcaatcagaaaacatgatggagggccagccccttgcaaatcaaatgaagccttgctctctgcccatgatgataaagattatgttac

SEQ ID NO: 26051 - DNA, 201 bp, Homo sapiens
gttacagcagcactgggaaactgattctgtcttgcaaattccaaccagcttgacagagagtttaaccctgattttgaaatcttgggttttttttgtattayttgtttaagatagggactgatatggtttgactgtgtcccacccaaatctcatcttgaattgtggctcccataatccccaggtgttgtggtagggacccag

SEQ ID NO: 26052 - DNA, 201 bp, Homo sapiens
taaagtgctccacagacatggagcatttccattaccctatgcagtattacaggaagtagtttataaggagttcaatattaggaagagttatctaataaaaygcattgtctaatctccctattacaggcgatatttggatagattctggttaactatagtctggcattttcaggaatacatttatgtgtacggtgaggcatt

SEQ ID NO: 26053 - DNA, 201 bp, Homo sapiens
tgcagcagcacaatctcggctcggctcactgcaagctccacctcccgcctcccaggttcatgcaattctcttgcctcagcttcccaagtagctgggactayaggcatgtgccaccacacctggctaatttttgtgtttttagtaaagtcattgttttgccatgttggccaagctgtttttaaactcctggcctcaagtgat

SEQ ID NO: 26054 - DNA, 201 bp, Homo sapiens
atgcctggcggccctcatcctttatgcagtattatggcagctgaattaagatgaataatgacagcaccgtgacttgggggcggtggggtagtgggggtcasaagtaccccaggaggtggaggagaaaggccacctgaactcaaagggaaaagttctatagttgaaagcaacctggatttagagtgaatctctacaaaaggg

SEQ ID NO: 26055 - DNA, 201 bp, Homo sapiens
ttacttactcattaactgagcctgtgcaaagggccttctgtgtcaggcctggtactagtgcctaaattacaaaggtaggagaggaaatgaactctgacttrgagactctcaaagtctgtcaagaactcagtcaccaccaagtactttcacataggcacccatgacgtgccgtgcaaccctaagaggcctggggtagccaaa

SEQ ID NO: 26056 - DNA, 201 bp, Homo sapiens
cctgaactaacacttgattcttctcatacagagaaatccacaaaaatgagatatggcacaaatttgtatagaagtgttttgtgtgaccacttatttctgcragtcctaagtagccctttctagaaggtttccatgtaatacctttataaaaatatagacagtttgttaaaaggaaaacacaacgcaacaaaaccccttttc

SEQ ID NO: 26057 - DNA, 201 bp, Homo sapiens
gatagaaaccccaaggaaggcaaggaagagtacaagggttgtagatactctaggaagaagagaggatgaatcaaggaaaggaaaagaggagacagaaagaraaggtctgtatcatgatgtccactatgtgaggtactcacagcacaggaaatctgcctagatgataataggagtgatgttcattaggaaagaaatagcccc

SEQ ID NO: 26058 - DNA, 201 bp, Homo sapiens
atttatatacagttatatatatgtatatatatatacacacacacacacacacatatacagtatatcctgggaatcactctatattaggtagtcatggaaaycttgaaaggagtaattattaaattcttaaatacgtcttctggattgtttaacttgttacaactctgtataatatttgtgacttaacacaactataaaaag

SEQ ID NO: 26059 - DNA, 201 bp, Homo sapiens
ttgcatatttctctctcctttgtacttacagttgtattaggttaccaaaagaaattatgatcacttctataatgtccaatatttagatggttttatttttktcttctgttatataagtgtctgctaaaaatattttggaaccactgctctagatgatttgtaagatctttaacaactcttacattctgtgattgaattagt

SEQ ID NO: 26060 - DNA, 201 bp, Homo sapiens
atccagtatttaatcaaagtttatactttgcatttgatggttaaggcttttaagtcttttccaatctagggtgatggttctcaagggtgggccccagaccrgcagtgtcacatcactggggtctccgggggtcgatccagcaatctttgttgaaagaagctctccaggtgattctgatgaaactgaagagcgattgatcta

SEQ ID NO: 26061 - DNA, 201 bp, Homo sapiens
cacttcatccctcaatacttcggcatgggtctcctatacgtaagggcattttcctgtgaaacaataataccattatcatacctaagaaaattaatgttaaktcaccattgttacctaatatgtgcagtccatagtaacatttccccaattttcccaatggtgtctcttgtaactctttttgttttaatccagtatttaatc

SEQ ID NO: 26062 - DNA, 201 bp, Homo sapiens
tgcacctggcatatagataccattttaaatgagacatttaaataaattacagacaccatcacacttcatccctcaatacttcggcatgggtctcctatacrtaagggcattttcctgtgaaacaataataccattatcatacctaagaaaattaatgttaagtcaccattgttacctaatatgtgcagtccatagtaacat

SEQ ID NO: 26063 - DNA, 201 bp, Homo sapiens
tttagtagagacggagtttcatcatgttagacaagatggtctcgatctcctgaccttgtgatccacctgcctcggcctcccaaagtgctgggattacaggygtgagccaccacgcccggccattcatatggtattttgtcaacaccacctctcttccttaatcatcccatatgtgctcaatgcctggtgcctgccagaatt

SEQ ID NO: 26064 - DNA, 201 bp, Homo sapiens
atccttgggttcaagtaaatttcttttaagagggagtaatagcaatcaaatgcttgactgtgctgcagtgggatatgtgtagtggttgtgtgatgggtagygcacagaaagagaaaacaaggaaccattaattctgccaaggggaaatcagagaagtcttctaagaagaaatggcattttatttgggccttgaatgataag

SEQ ID NO: 26065 - DNA, 201 bp, Homo sapiens
tttttcataattatagctttaacagcttatggtgatgggaaagctggctacttaagaaaaattaggagtctcatttggcaggagagaattccccaggggaygttgccctgtcatttttcagggtctttcgaaaagaaaccccacacagacagctgcacgtcagcctgacacagggcaagcctgctttacttactatggcca

SEQ ID NO: 26066 - DNA, 201 bp, Homo sapiens
ctaatatgggagagaccagcccctgtgctgaagcagtcagggactgtaattaccttaatacccagtaatggatcgttaggatcatgccacacagtccctayggtacaagagactcggaaattcaagatgggaagatgagaatatgtgaattgaatgacatgggtgagagtaaatttcccatcttttttctagtggaggaaa

SEQ ID NO: 26067 - DNA, 201 bp, Homo sapiens
tctgcacatagaaggtgatcaaataaataactgattctgtgaagggctaaaggagattttcagaatgtgccatgcttctggggacaattggctttctgctrtggtctcaatgctgatgtagaagataattctatgaaaagatcctcagaactgagaacttctgttttttccatgttaatgtttagatagccagaggactta

SEQ ID NO: 26068 - DNA, 201 bp, Homo sapiens
ccaggaggcggaggttgcagtgagccaagatcgtgtcactgcactccagactaggtgacagagtgagaacctgtatcaaaaaaaaaaaaaaaaaaaaaaaagagagagagagggagaaacctatgaaatttaacaaccatttctgctaaaatctctcagtaaacacagaatagataggaacttccctaacttgataaagtg

SEQ ID NO: 26069 - DNA, 201 bp, Homo sapiens
agcatagatcttggcctacatacccttacaggccttccttcacttggaagcacagtccaggcttctcatcttgatccttggacccttgactaccaccaaaaggattgagaaccctctcttttttaacctcatttcccagtttgtgaaatgaagatggtaatgcttcctttccagggttggtctaagtaaaagcattttgtg

SEQ ID NO: 26070 - DNA, 201 bp, Homo sapiens
ccctgatgtgattgttatgcattgtatgtctgtatcaaaatatcttgtgtaccccatagatatttactatctactatttacacattaaaataaaaaaaaaattccaaggctccttggtgtggaccatggttctcggaatctgtggagtaggaccttagtaaatacttgtgtgatggtgatggatttctggttaagatttct

SEQ ID NO: 26071 - DNA, 201 bp, Homo sapiens
gtacacaccatgctgctattttgggatgaatgtggaatggaggtgaatgtgataatcagcagcctccaggatttgggcaggaagagaacagcagtgcaagmcttggccggagagaccaccatgctactgagaaaccactttagtgccccttgtggatttcaacgctagccaaaataacaaatcaatatgggaaagttgggt

SEQ ID NO: 26072 - DNA, 201 bp, Homo sapiens
atgtgaagatagagagtgggaagcattgtcacgcacgtgatctcattttatcctcatgagaggataagacagatgaagtggagccttattttacaaataargagcactaagatgggggagttgtgggattcactgacaattccagagaaaagtgaaagtgagatcgaacttgggcctcctcttggcccagtgctgtgttgt

SEQ ID NO: 26073 - DNA, 201 bp, Homo sapiens
gagcctttctttctagcagagggctttgggctcctgagcaacattcatgaacggaggaagactgtgtggacaagtggctagggaaaggcacaacaatttgwtggagaagaagccattaactgagataccacctcttccttagtatccaagggacttggctcagtaggaatattatgttttttcttttcttttcttttctct

SEQ ID NO: 26074 - DNA, 201 bp, Homo sapiens
tgggaaagtttgtttgtacactttgttagggaagctctgtttcaattttgcaattgatcttagtgtaaatttgtaatcctaaggcatacctgcactttaargtgtcttccttcaggagttttcatgcaaagcttaaaatatttaccaagcgccttcaccatgtcagaattaaaactccagaccctgactttttaatgatgg

SEQ ID NO: 26075 - DNA, 201 bp, Homo sapiens
tgaccagtcttgacctacaaaaatgtcagttttgtgcggttcaacctaattctggcctttttctttgggtgagtgttgatttgggggatgagttggctcargtgaccggaacatggtgctgatgagctgagatcacaggtcagaggactgtgtagctttccaagcttgtctgtttccccatgctagttcgcaagcctcact

SEQ ID NO: 26076 - DNA, 201 bp, Homo sapiens
ttacagtcatggtatgtagttttttttttgtttgtttgagacagagtctggctctgtcgcccaggctggagtggagtggcacgatctcggctcactgcaarctccgcctcctgggctcacgccattctcctgccttagcctccagaatagctgggactacaggcacccgccaccatgcctggagaagtttttgtattttta

SEQ ID NO: 26077 - DNA, 201 bp, Homo sapiens
agatgtggaatccgtgctcccttccctttttatacttgctctgctctgcttgtacaatgaatggtcagttagaatgcctttgaaccaccccccttcctttctttttttttttttttatgggactcattcctgcaaggacagttgtttcctgcagaataactttctcattcctctcaggactactgcctgggggccaaaact

SEQ ID NO: 26078 - DNA, 201 bp, Homo sapiens
tgcaaatgaggtaactgaagtttagaaaggttaagttacttgcccaaggacacacagctagtaaacagtaaagtagatttggactcaggtctgccgacaayaaagcctcagctatttacaaagcaggtctaatgtactggttataattatggattctggagcccagcaggcctgggttcaagtctccatatactaattggt

SEQ ID NO: 26079 - DNA, 201 bp, Homo sapiens
tttaggccagcttaatagcttagcatcaaggaatcttttgcctactgcctcttggttatcactgaccatttataaacatgaggccaggtgccgtggctcaygcctgtaatcccagcactttgggaggctgatgcaggtggatcacttgaggtcaggagttcgagaccagcctggccaacatgatgaaaccccatctctact

SEQ ID NO: 26080 - DNA, 201 bp, Homo sapiens
ttctaaataggagaaaataattttaaagactccttttaaggtgtcttaagactcctctgtgtgtgacacccttcagaggaatgaccttccattttagggaytcccttttttgcacccctcccttacccccttgcattggagtaagtctcttgagactcactacggcctaggaccaggatgtaggccaagtggaaacacacc

SEQ ID NO: 26081 - DNA, 201 bp, Homo sapiens
gctctactttctctgcttgttctaaataggagaaaataattttaaagactccttttaaggtgtcttaagactcctctgtgtgtgacacccttcagaggaaygaccttccattttagggattcccttttttgcacccctcccttacccccttgcattggagtaagtctcttgagactcactacggcctaggaccaggatgta

SEQ ID NO: 26082 - DNA, 201 bp, Homo sapiens
ttcatcatgaagcttcttttagtatatgttccacagagtttaaacattttagaactttttctaattataaaagcaagaaaataaactcatagaacatttgrtaaaaaatagagacatattttctataatattaactccctattatgaattatatatatttccttgcagtatttcatatgaatacatagttgtaactctagt

SEQ ID NO: 26083 - DNA, 201 bp, Homo sapiens
ttaaacagtgcttcatttcctcactgatagaaaatatcaactttatcatagtatatattattttgtgatagaatcttgttcttttccttctattttgtaayactaatctttcagtttttttttttacaagttccatgttgtttaactattgcagcattatttctgagatcatgataattcttattactcaccctgattatt

SEQ ID NO: 26084 - DNA, 201 bp, Homo sapiens
acccagcctcaaaaaaaatttttttttgaaattgaaacacatggctcataaaaaataatggaaattaaaaatccctagagttgaacatttatgaaaatacygtatattgaaaaagtggcatgcattcatttataatgaaaatctgtcaaggaacaaggagttgaatggaactttttagctaaataaagagtatctacctaa

SEQ ID NO: 26085 - DNA, 201 bp, Homo sapiens
agagttcccacatgtgtgccaatttttgcatgatttgaacttccctccttgtgccaagcgagggagcacactggctttcttaccagcctgcccagatgtgrggctgggggaaaagtgaaggagtgcagcctgaaaactgtcaatggtcaaatatcaaaactggaatcacatactttattacaccatttaaagtaatgccat

SEQ ID NO: 26086 - DNA, 201 bp, Homo sapiens
tctaaaagacagagctagaaggcagggagggagagagagagagagaaagggagtggagaagagagggggagagagagagagagagagagattgatttggcytagctcattctaggtaaaaagatgtactagctcttaaaagttgctactatcttttcaacgtgctcatatatcatatatttaacataattttttacaattt

SEQ ID NO: 26087 - DNA, 201 bp, Homo sapiens
ttggcttgagtgaaggaaggagcaaaagcctttggttttttattgtgcttagggagtagtgttggggagagagttcccacatgtgtgccaatttttgcatkatttgaacttccctccttgtgccaagcgagggagcacactggctttcttaccagcctgcccagatgtggggctgggggaaaagtgaaggagtgcagcctg

SEQ ID NO: 26088 - DNA, 201 bp, Homo sapiens
aggccctgaggtgggagcgtgctcctggcatacatgaagcacaaccaagaggtcagtgtggctggagttagtaatctagggggagagtggtagatgaagcsagaacaataccaggggctagaacttgtagcccattgttaaatgttaaacccaggagcattaaaattttaaagaatttatttgagcagatggtgattcatg

SEQ ID NO: 26089 - DNA, 201 bp, Homo sapiens
agtactatttgcctctcagtgttgttgtgatggctaaatgaaaggacacatcggaaattgtctatacattatttgttccatagtggatactcaaatatacrttgaatttgagctatattcactcagtattcataaacacccactttgttcgcagcactgaggtagaaaatatgcaggtacatgcatatttcctggtaagag

SEQ ID NO: 26090 - DNA, 201 bp, Homo sapiens
agttaggcacaattagcaatcctacatttttaatgaaataactgagaactcaagaagttaaataatacatctgatgccacacaactgaaggtgatagaacyactatttgaacccagtctaaagtttggtctccagtgtccatacttaaatttaatttctctctgggattggaaagcttttccagtgtctctgagtcttctt

SEQ ID NO: 26091 - DNA, 201 bp, Homo sapiens
ctctacttttctcaacctctgttaaccactattctactttttagctccatggcataagtattttttagttcccacatatgaattataacatacaatatttktctttttgtgcctggcttatttaacataatatcctccagttccatctatgttgctgcagaatgacaggatttcattctttttatggctgaatattccatt

SEQ ID NO: 26092 - DNA, 201 bp, Homo sapiens
cagggttcccagcttcctccctcttcagccttggggtctgcctcacctctcttttgactcttggtattttctctttgaaaatctgttcaaaatatgttagyttacccaatttttggtctttcttggtgacagcagtgcttcctgactgtgtccagttggacgtcttgtccagaacccctggtgattatttttaaaatgaag

SEQ ID NO: 26093 - DNA, 201 bp, Homo sapiens
cttgtagataatccatatatcacagggatagtaacatgtcgtattttgcttcctgcatgaaacttttactgatctgagttatgttgattttcttctttctrtaggtatgtctgatatttgtttctatcttctaggtgcaattgttcatattctactttgtatgatagaggtcaggttatgtgtatcttaaactcctcataa

SEQ ID NO: 26094 - DNA, 201 bp, Homo sapiens
gaggtttgccttccttctagctgtttcccagagcctaatagtagagcctctatgtaaatttatgtgacgttttcactagaaaattgcttaaaaatgaatgmtatttctagagtttactgtttttcactttaagtacattttctgacaatatgtcttctattaatcatttaagcaatactaggagccttaaaggagtgtatt

SEQ ID NO: 26095 - DNA, 201 bp, Homo sapiens
aggctggaatcctgtgactgaaacttgttacaaagaataaagtaatagagaggtgttcaaacccaagaggaggaggatggttcccaaaatttctcagttcwtcataccctttgtttctcagtcattttttttcacaatgcctctaggcgaatgattgcatgtacacacacacacacacacacacacacacacacacagttc

SEQ ID NO: 26096 - DNA, 201 bp, Homo sapiens
gacccatgggagactgtaagtcagaggaggttctgggggaccgtgctcactaaaatgcctggaaccccaagaagggaagtagattttcctatcatgtctgyagcccacctgaattgttcattgactttggagctggtgtcagcctgtcatttttttttcctcctaggtgaaattcattgacccttgatgtgttatggaaag

SEQ ID NO: 26097 - DNA, 201 bp, Homo sapiens
tgggcaacgtggcctgtcccaacgagctggtcagcttggaaaaggatgaggaagactacaagagatacaggtgagtgtccaggggttggaccatggtgggmaaagggaaaaagagaaactttaggggatgatattatactctggggtgcatagtagatgtttggtacatatcagtgggtttcccatgacaatgttaaactt

SEQ ID NO: 26098 - DNA, 201 bp, Homo sapiens
ggtgggtatggttctagaagcaaggcttagattctgtacaaagcatgcattgacctgctaagttgtagtcctagggaattacgggttccctagagcatccygaaaattattagtggcacgaagtcctgatcagtgtgaatgtgccttcagactgtaagccaaatctttgcataataccaatcattctacctataaaagcac

SEQ ID NO: 26099 - DNA, 201 bp, Homo sapiens
gatgcctggtgcagaagtgagcccttaagctctttcatttgagtgacctcgcactcaactctcttaatcctcctctaattcccttggcgaatctggaaatsaaggctgatgtttagatcctagaatttgtcattggaatcaggcccctctgcccccagagtgaaatgaaaaaactggggaatgaaatttgggagcttgtta

SEQ ID NO: 26100 - DNA, 201 bp, Homo sapiens
agacagaacataccagatagatgttcctcctgcatatacgtcaggaacatctgctgttagagaagagccgtgtgtgtgtgtgtgtgtgtgtgtgtgtgtgtgcatgcacgcacgcgcaatatgttttaagtatattgtgtgtgtccatatgttctgggatattgaggtttctcaggagtcctgcagtttgcatggctgata

SEQ ID NO: 26101 - DNA, 201 bp, Homo sapiens
ctgccaaaaacttttaaatccatcaactcttacgagaactcactcactatcatgagaacagcatggaggaaactgcccccatgatccagtcacctcccacbgggtccctccttcaacatgtggggattacaattcaagatgcgatttgggtggggacacagagccaaaccatatcaaggactaaccacttatttttttttc

SEQ ID NO: 26102 - DNA, 201 bp, Homo sapiens
gtggaaggcaaagagggagcgggcacatcacgtggggaaagcaggagcgagcgagagagaggagcaggaggtgccacaccctttcaaataaccagatctcrcaggaactcactaggacagcaccaaggggatggtgctaaatcattcataagaaatccacccccatgatccaatcacctcccaccagaccccacctttaat

SEQ ID NO: 26103 - DNA, 201 bp, Homo sapiens
cttcctcttctctttatattaacaccatatacatatatgttagatcttttcatattgttccacaggtccttgaggctgtattcattatcattgttttcctrttttccaggttggataatttatttttatgtatcttcaagttcactaaatctctcctccgttatcttcattctgttattgagacaatctagtgaatctatc

SEQ ID NO: 26104 - DNA, 201 bp, Homo sapiens
gtattatgccattctttcattggtataaagaactatttgagactgggtaatttatttttttaaaaagagccttagttggctcacagttctacaggctgtayaggaagcatagcagcatctgcttctggggaggcctcagggagtttccaatcacggtggaaggcaaagagggagcgggcacatcacgtggggaaagcagga

SEQ ID NO: 26105 - DNA, 201 bp, Homo sapiens
ttgagacaatctagtgaatctatctatctatctatctatctatctatctatctatctatctctttctttctctctttctttctctctctttctttctttcwtttgttaattcttttgttcattctgtctttctttcgttctgtatttctgtttttgctgttgttgttgagaatgggtctcctgttcacccaggctggagtg

SEQ ID NO: 26106 - DNA, 201 bp, Homo sapiens
taactatgttccttggggattgtcatcttgtatagtattttgcaggggttcttggtatttcttgaatttgcatgccagcctgtctagcaagattggagaartgttcatggattaataataatgtcaatgacttgtaggtttggtctctttatataaccatatatttctcagatgttttgttcattttttaaaaattatttt

SEQ ID NO: 26107 - DNA, 201 bp, Homo sapiens
aatctctttcctataataggtatatttagactattttcatttacagtgattaccgacatagttggattaacatctaccatgtttgtaacttttccacttaytgaacttgttcgttgtttcttttccccctctttttctgcctgccctatttttgactgagcattttatatgattctatatctctcctcttttatcatatca

SEQ ID NO: 26108 - DNA, 201 bp, Homo sapiens
agagttaatctgaagttaacttttttatgtgaactgggtgcaagattcattattgtccacatggatagctacttgattcatcacaatttattggaaaaaarttccatttgcaaccatgatgcagctgtttatttacctctctttctactaataccatgccatagtaattactatagctttataactacagcatctgtaggg

SEQ ID NO: 26109 - DNA, 201 bp, Homo sapiens
tgagtgcataaataaaatgcagtatattcttacagtagaatatttggcaattaaaagaaatgaagtactgatatatgctacaatgtgggtaaaccttgaamacattatgctaagtaaaaaaacccagttaccaatgaacatatatagcttaaggtaaattcatagagaccaaaagaatagtggttgcttagggatgaggag

SEQ ID NO: 26110 - DNA, 201 bp, Homo sapiens
gtgtctgctaagggggaacaaaggcaaaacgtagttctgttggtgaaaatagtttgactgtgtttaaaaactaatcattctgcaaatatcaacaagctcakcagatgcaagctagccaccttatagtttaaatggagcccttcacgctgtattggaaatgccgccgcctccagcccaccctatactccacaggccagctcc

SEQ ID NO: 26111 - DNA, 201 bp, Homo sapiens
gaaaaaggcatcataagaaagaaaaatatgatatttcgtgaaatgaaaaatccttaacaaattattagcacatcccatctagcaatgtgtacaaatattayacacaatgaccaagtaggatttatttcggtaatgcaagattaatttaacattacaaaaccaattaacataatacaccatatcagaagaataaaggacaaa

SEQ ID NO: 26112 - DNA, 201 bp, Homo sapiens
ttgtaaggcagtactatgatcaattaaatgccaatgaattagataacttggatgaaatggacaaatttctaaagacagactcaagaagaaatagaacattygaatggacctatagaaagttaattgattgagtttgtaaacaaacaaacaaaaaacaaccgtctacaaaaaaagaccccgggcccagaatttacttcactg

SEQ ID NO: 26113 - DNA, 201 bp, Homo sapiens
ataaataataaaatgtattggtaggtttgtaatatatttaaatataatgtgtataacaatattagcacaaaaggaggaagatggaacagagctatataggygcaattttaaaattttttgtgaaattaagttagcatatatctgaaagagattctgatgagttaaccactaataaaatctaataaaataactcaaaatata

SEQ ID NO: 26114 - DNA, 201 bp, Homo sapiens
ttttccctttacttgtccttttatgtaacttccaatgtcaactatgataggtccaagattcatgtcctaaaaactgtagattcaaatgcaaaggaagtccrggcttagaataatgatcaggagacctgggactcaatttttccatctgttgcttgtagataatccatatatcacagggatagtaacatgtcgtattttgct

SEQ ID NO: 26115 - DNA, 201 bp, Homo sapiens
ggctctttctgaatagtcttagagaagctgtaaaccttgcatagaacaggaaagatgaatttaccacaaagaaaacatttttttcacatgagggatgattsagcagggagtttgtaattaggcactttagttgtttttcctactttttaatcattttcaggtatacacatctgacaatagctatcctttaagtaaggcatg

SEQ ID NO: 26116 - DNA, 201 bp, Homo sapiens
ttcagtgcatccaggacattcagagatatccaccggactgtagtttttcattgaatgcacctattggaaaggggcttgaattttatgcatttatcagtttyggtaatcaccgagtgaaattctcgctttgcacgtctgttgtagaatacactgtatgtgcattgaatcttttccaagcgggttgccaaagttctaccttcc

SEQ ID NO: 26117 - DNA, 201 bp, Homo sapiens
gagaaaataaatgtttttagaagagtcagctttataccatggtttcaggggatgaattgtgatgaaaagtgaagattgcttttgcttgaaagaggctgacatatttcccagacccgggatcactttctgtggtgtatgatttaagggtgagcgagcatgccaaagcgctccacttgagctgagtgatggggaatgagttgt

SEQ ID NO: 26118 - DNA, 201 bp, Homo sapiens
tgatttggagaacctgctggatcacttggcagaagtgacaccagctctggagtacctcagtctgctgggcaacgtggcctgtcccaacgagctggtcagcytggaaaaggatgaggaagactacaagagatacaggtgagtgtccaggggttggaccatggtgggcaaagggaaaaagagaaactttaggggatgatatta

SEQ ID NO: 26119 - DNA, 201 bp, Homo sapiens
atttctctgtctttgtttgggaagcagggaggatgttggtgaattgaagccaacagcaaatgagtgtgctcacaactttcttttgctagtttcccctcttrctagtttccctctcttgctagtttcccctctcttgttagtttccccctcttgcttgtttccccttctcttgctactttcccctcccttgctagtttctcc

SEQ ID NO: 26120 - DNA, 201 bp, Homo sapiens
ggctgctgactgatcagggaggttgttgctgaaggttgggatggctgtgacaatttcttaaaagaagacaacaatgaggtttgccacattgattgactcaygaaagatttctctgtagcatgtgatgctgtgtgatagcattttactcacattagaacttcttttaaaattagagtaaatcctctcaaaccctgcctatgc

SEQ ID NO: 26121 - DNA, 201 bp, Homo sapiens
tggcttaactaagttttctggaatttatccttaaatgaaatacttctgctcttctgagacatctacttcctagtaagagtaaaatacctaaaagaaaggartgtgagaggggaaagaaggcctcacattcatcctggggaggtccaggctcctgagcttgggcatctcctcagccaccgcacgagacccttttgttcttgt

SEQ ID NO: 26122 - DNA, 201 bp, Homo sapiens
atttgggggtacgcattcagtccacagcagggggcattgcccctctatttctggtggcttaactaagttttctggaatttatccttaaatgaaatacttcygctcttctgagacatctacttcctagtaagagtaaaatacctaaaagaaaggaatgtgagaggggaaagaaggcctcacattcatcctggggaggtccag

SEQ ID NO: 26123 - DNA, 201 bp, Homo sapiens
tggagtcttgctctgttgcccaggctggagtgcaatgatgtgatcttggctcactgcaacctctgcccctgggttcaagcaattctgctgcctcagcctcytaagtagctgggattacaagcacgtgccaccacgcctggctaatttttgtgtttttagtagagatggggttttgccatattggccaggctggtcttgaac

SEQ ID NO: 26124 - DNA, 201 bp, Homo sapiens
gtagaaacacataaggatatacttgattttgagctgactttcctaacgtccctaattggataaataaagctaacacaaagggaacacacagataatgttcratgacaaacacggacaacatcaacaatgtaataataataattgtgatgatgataatagctaacatttattgaatgcatactattttaaggattttccaaa

SEQ ID NO: 26125 - DNA, 201 bp, Homo sapiens
aaagaataataattccatagggcttttcaatacccagtccatattctaattttcccagttgtctcaaaaatatctttttgtatccagttcgtttgattcartgtccaaacacagcccataccttttattgcgttgctgtatccctttgatcttttttagtctttaatcatctccctccccttctcctttttcatcttctct

SEQ ID NO: 26126 - DNA, 201 bp, Homo sapiens
ccacaagccgaataaaactcctcaagctgcatttctaggatgatcccccgccacctctccctgagggcctgaaaagttgtatgctgctgatttctggtgcrggcaactcctgggcagggacaaggatggctccagatggatggatgcctttgtggagggctcccttttatccttagttgtaagccgcctgagcagttatat

SEQ ID NO: 26127 - DNA, 201 bp, Homo sapiens
tgtgatttctcacttcagtcaaaatttatttcttcaggaatttaatttccttcttcatctcttttattcgagagagcaagactgttctggaacaaatgtcktttaatcactggctggcaagttttgaggcttgcttttcattaataattgctgacccctttagggggagtgttggaggatatttctgttttatttaagcta

SEQ ID NO: 26128 - DNA, 201 bp, Homo sapiens
ctcccagttcgggaggctggaagcctaagatcaagatgttggtggggttgatttcctccgagaaccatgaggggaggagttgtttgtggcctctcccctcsccttgtaggtggctgtcttctccctgtgtcttcacatggtcttccctctgtgcctgtctgtgccccaatcttttcttacaaggacaccagttatatggga

SEQ ID NO: 26129 - DNA, 201 bp, Homo sapiens
ataagaaccaaggacagtagctatttgttcccgagacacttggtgcactatccacagtgacccatagcaataaagttaatttcaatacaactacctatgamaaaggaaagtgaaggatgtgtctaaaacaaccctggaaccccatctttgaggatctgttttgtacgaccactcctggacactagcgtatgagttattttt

SEQ ID NO: 26130 - DNA, 201 bp, Homo sapiens
tttacaaagggttatctttccagctgttacttcctctcttccagctcatctgttggccaccttgttgtttacccctttgagtaaaaataagcaaaaagccrgaagaatggggtaacctcaaatacctccttaattttgttttttgagcagctgcttaaaatgtctgaaacattttttgagttagaaatctgaaacaaaaca

SEQ ID NO: 26131 - DNA, 201 bp, Homo sapiens
agcttcacaggggccacagaaatctcctctatgtgacacttctggctacagtgcattattttgttttattctgattttttaaggaggtccctagtaggcaycttaggaaactttgaaaatatattaagaagattcggcatttgatgcacagatacaaataaggccattttcctcagcctgcaagcccagtctgagactttg

SEQ ID NO: 26132 - DNA, 201 bp, Homo sapiens
gaatgacctcaactctgtttcacatcagacacagtttggaagaccccacaggccattgcactgttgtatcattcatgtgggaagcccagcttcacaggggycacagaaatctcctctatgtgacacttctggctacagtgcattattttgttttattctgattttttaaggaggtccctagtaggcatcttaggaaacttt

SEQ ID NO: 26133 - DNA, 201 bp, Homo sapiens
ttctttaaggaatgacctcaactctgtttcacatcagacacagtttggaagaccccacaggccattgcactgttgtatcattcatgtgggaagcccagctkcacaggggccacagaaatctcctctatgtgacacttctggctacagtgcattattttgttttattctgattttttaaggaggtccctagtaggcatctta

SEQ ID NO: 26134 - DNA, 201 bp, Homo sapiens
gaagttgagtgttggttttttcaaattgtggtcttagccgtaactccgactttgaacattttcggcagttccatggatgtctgcggatggtcagagtcacrtttcattgtctccaagaactgtcatgaccctgtctttagcattccttcaggcttctctttactacagatcaagaaagtacttggcaacagtctcccatta

SEQ ID NO: 26135 - DNA, 201 bp, Homo sapiens
cctggtgtcatctaaaataaggaacaacaaatagccagattcaatttcagcattatggtttgagcaagggcctggcttctagagtggggtgtgttgagatsgttttcccactatttttatttaactcaccaaatatattctgtaattgggcatgacccagcaaaatgttccactctgaagttttatcatggaggccaaaga

SEQ ID NO: 26136 - DNA, 201 bp, Homo sapiens
atgatcagttaacagcaaaatgtttatgtatttgttttattcactcatacacttgtatattctttcattcaataagtaaactcatatttatcaaataaccrctacatgtgatggagttatatcctaggattccaaattcctagtataaggggtatttctattatgccatgcaacttctctactggacagtaaactttgtgt

SEQ ID NO: 26137 - DNA, 201 bp, Homo sapiens
cctcctctcatgtctcatggctaacaacctgttttcttctgcattctaatctcctgagaattctctctaaaatggaggggtcattagaaggcagatatttytggagcatgtcttccctggggcaagcaagtgcttggaaccaggggtgcagggaaagcctacgaatccacacctgactgtgggacagtaatagggtctgag

SEQ ID NO: 26138 - DNA, 201 bp, Homo sapiens
agctttgaggaatgtttcctaagaggaaagtaggttttggtccgggctttccatctgcagtagagagggcttccctcagtcgtgtagggcccttgtctacrtaaataattagaatcactccaagtcagtatgtcagcaccattctggtagcccactttcttgcagtcccacaaaagaaatactgtgctggccagaagcagt

SEQ ID NO: 26139 - DNA, 201 bp, Homo sapiens
tctagtttgatatttctccacaatgctgtactgaaagctggatttttctgtctttaaggcatggagaaaagtgagggagtcttggggtttctcagaatttraggcaacatccttaacattgggcgaggtagtctggctattaaccatgaaaccctatggagtgagcttagttgaaggggactgagcaagccatttcagagc

SEQ ID NO: 26140 - DNA, 201 bp, Homo sapiens
ttcctgcatatccccaccttcatacagcagacagaaaaaagagccaagctttgaggaatgtttcctaagaggaaagtaggttttggtccgggctttccatstgcagtagagagggcttccctcagtcgtgtagggcccttgtctacgtaaataattagaatcactccaagtcagtatgtcagcaccattctggtagcccac

SEQ ID NO: 26141 - DNA, 201 bp, Homo sapiens
aagtggaagggtattgttatatgcagtcctatcatgttttctcaaataatggggaaaggacacaggtgtccatatatgctcgtgaatccagccgtcttcaytggaaaacgtgtggcctgcagagattcagtggaatgatcttaccccaatagtccaggacagtggctctcaattgggagctattttgactcccaagagtca

SEQ ID NO: 26142 - DNA, 201 bp, Homo sapiens
cctcatcctatgaaatgctaaatgcctttcttatcaacacttgatgggaaaatgctgttctggcatcttcctctaagggaaacagaaatctaaccatgttycttacagcctagaactctgtacacaaagatcagacttgtttttctccctgaaaatttataggtatttacaaggactcatatcctgtttgctatttagagg

SEQ ID NO: 26143 - DNA, 201 bp, Homo sapiens
attagaatggaatcctacagccaagagaaaactgtgtctcacattcaaagaggcagacattggaaggaaaatattcaccttctgacaagttttaaagaaayagaaaatattgcttctttttaaatatttgcctgggtttgatcacttaatattttttaataggtcacaatactgcatttccaggtagatcgactaaaatgc

SEQ ID NO: 26144 - DNA, 201 bp, Homo sapiens
aattgatctgctatgaattgcatctcatttattttatttgttgcaaagcaatatcatgggggatttttgttagatgtcttattgaaatcaatttataatgyttatggtctcactgatctaccagctgaataactgtttctaaaagacagagctagaaggcagggagggagagagagagagagaaagggagtggagaagaga

SEQ ID NO: 26145 - DNA, 201 bp, Homo sapiens
tctagacaggatatggctgttcctgctttcaaacctgtctattattcccaacttaatctgtctgtcagtgacaccttctctcttgctttactgaaaggcayggcaccttaatctgtgagaggggtgggaagcttcagccttctacctggttctttagtttctctaacttaatccttcagaagatggcaagtctttactttt

SEQ ID NO: 26146 - DNA, 201 bp, Homo sapiens
ccttggccccctccagactttgggcgtcagtgagcgcaggaagcagcagcccagggggtgctgagggcagctccctgcgggcctgtagacacccctcaacrtgaacagcctgggcaacgtggaaggcagacaggtccctgggcggaagggggtgggtgcccagtgaaaccccaccttcaagccagggatggcttgaagcct

SEQ ID NO: 26147 - DNA, 201 bp, Homo sapiens
tactatggccaaagccagatcttttaattaaaaacactgcatatgccattaaatgtgttgttccccctccagtcccaagaagttgtagtttgaagagatasaaacaaatgaatccgttgcagatgtgtagagaaaccattgcctactgagtcacaaaccagcgggttcccaaattccagcctcggagtgcctccccatcaa

SEQ ID NO: 26148 - DNA, 201 bp, Homo sapiens
ggcagcggcggcctgtctggagcagccgcttcgaagattagcttcagtggggcaggaagggctggtgggagccaggaacagacaagagccccaccccctamccagttgaaggggcgggagcccgcactccttggtgcagctgcagcttcccagccgcactctggaccctggcatccctgtgctctcaggggcctgggaagc

SEQ ID NO: 26149 - DNA, 201 bp, Homo sapiens
tttttggtgagctgtatgtacttgattttgtaacacctattaggaaaacttaaggcattcatatctgttgctatagcatatatttgggcttaattttatarctttgtttaatgctttcttgctttttcctttttattctgggttttgtctgttttcatcttatgtagaggtttggaagatcaaaatattttcattaattgt

SEQ ID NO: 26150 - DNA, 201 bp, Homo sapiens
catgttttcccaattcaactgaatatgaaaaagtgctaacattttgtcatatggacttcagatcatttttattattaagaaataaaatatttagaaataaytgaagtccctcacattcctctccctagtcccagcttccccaaagcaaatattgtcatgcatttggtgtgtagctagtccttttatccttttattgcgtag

SEQ ID NO: 26151 - DNA, 201 bp, Homo sapiens
atctgccacctcgtctctctgcctggaatatccagaaacactttggtgtattattcccacatttaaatggacaaagtttgctcatagaaagtactaatttygatgagcatttctttttaatttaattgctctgatgaaaaccctcataatcatgtaattcttaaagattagtgtaaggttattgccctgaaaatatgtcta

SEQ ID NO: 26152 - DNA, 201 bp, Homo sapiens
gccaaggcacacataaagtacggtcattcatgttccccattcatcaatagagagccccctaaaatgttcctgtaccagaatgtgtttggaattgcacaggsggagtggcagcctttccagcccccatccagcaggatgtggatgtgcgaggctctgcccccctctcctctccccagctgtgtacctcctcttgttcttctt

SEQ ID NO: 26153 - DNA, 201 bp, Homo sapiens
aacatgatttgttcttttattcgttcacctctttgggctttccccccagaccttttctagttttcttaattagaaagtgagtcaccaaaaaggtcattaamatcaagtctttcattgccttttgtttttttctctatgaagaataaaataattttatggtgcaaaatgaacttttgaaggctaagaaagaacataaagttt

SEQ ID NO: 26154 - DNA, 201 bp, Homo sapiens
atcagaggctctctgtgtgttttatggttgattgagctttatgaccccaaagaatccgttatttgttttctttatagcaggcctcaaacactgggctttgsttattctttaaacttacaatactcattgcatgacagaattatttttcatttctctctttctttcagagccttggaatcccattaggaaatttctagtaca

SEQ ID NO: 26155 - DNA, 201 bp, Homo sapiens
caccacctctcctcacctactttgggatgctcatttgattgaatttgtaacaaacaaggcctttgggtcagtcctgcttcttccaccaacctaagggatgrtggtcattgctaaagcttcctctgagccagtccttcgccaagtggctttacctgtttattttatttggtcctcataacaaccataaggtaggttgtatca

SEQ ID NO: 26156 - DNA, 201 bp, Homo sapiens
tgctgacaagtattcagtacggttgagtgaccttctataggtcagagcaggctgtgttctgattgagtttagaaaactcataactctggccaagccttcarttggtcaggtggatggggctttgttaggggagactgcagccagagccagtgtcgcccaccttccttctccctccacctacctgagctgccagtcccttcc

SEQ ID NO: 26157 - DNA, 201 bp, Homo sapiens
ctgtgaaatgtcttaaatgatccgcagataccttctgcctgttctcatggcaatcccagtttatgttgcaataaatgttatcttaatctcaattgattgaygagttcttaaaataacagcattaccaaagttcccactcacattgtaaatcgcaaatattccactctttggaaagcattcagggtggctaaccactatttc

SEQ ID NO: 26158 - DNA, 201 bp, Homo sapiens
cctccccagtagctgggattacaggcgtatgccaccacagctggctaattttatatttttagtagagacaggatttcaccatgttggccaggctggtctcraactcttaaccttaggtgatccaccagcctcagccttccaaagtgctgggattacaggcctgagccactgccctcagactctgtcctctattccaatggt

SEQ ID NO: 26159 - DNA, 201 bp, Homo sapiens
ttttgttttttttaaacagctattttgaggtataattcacatactatattgtttgcccattcaaattatataattcaacaatttttgacatattacactayaacttttaaaattgtggtaaaaatatatataaaaaatttaccatttaaacttgtaagcataaaattcagtggcattaatgatattcaaagtgttgtgcga

SEQ ID NO: 26160 - DNA, 201 bp, Homo sapiens
gcgctgtgtccatttcttacagcgataaaatggcagtaaatcagaaaaaatgccatgcccttcagaaccttgagaatgagctcctgagcattctgcttacrgggatgtaggcttgtcagtgagtaaatcagctctgtccttacgcccccattgcatcagggaaatctctgactttgtgggataggtttgacgtgtcagtca

SEQ ID NO: 26161 - DNA, 201 bp, Homo sapiens
ggggttccattcctgcatatccccaccttcatacagcagacagaaaaaagagccaagctttgaggaatgtttcctaagaggaaagtaggttttggtccggsctttccatctgcagtagagagggcttccctcagtcgtgtagggcccttgtctacgtaaataattagaatcactccaagtcagtatgtcagcaccattctg

SEQ ID NO: 26162 - DNA, 201 bp, Homo sapiens
ccccattgcatcagggaaatctctgactttgtgggataggtttgacgtgtcagtcaatctctctctacccccatttgagactgagagtgtatctctccctgtgttttctctgagcgtgtttagtgagcttattggccccctaggtttcattgccagccacagcttagtccttgtcagagagattattatatgaaccctagg

SEQ ID NO: 26163 - DNA, 201 bp, Homo sapiens
gaaatctctgactttgtgggataggtttgacgtgtcagtcaatctctctctacccccatttgagactgagagtgtatctctccctgtgttttctctgagcrtgtttagtgagcttattggccccctaggtttcattgccagccacagcttagtccttgtcagagagattattatatgaaccctaggtgacttctgactgca

SEQ ID NO: 26164 - DNA, 201 bp, Homo sapiens
actaatggaacactgggccaccgaatatttatatatctattttgaaatttacatttctccctttcttatgatggggtttgctgctcccggggtcgtagttsatgggccagtagcatccgtggtgacaaagcaatcatctggggagagtgcttcccagccccagtggcacactgtgatgtgctgcaggttattatgccagca

SEQ ID NO: 26165 - DNA, 201 bp, Homo sapiens
aaaggaggtttaattgactcacagttccacatggctgaggaggcctgaggaaacttacaatcacggtggaaggcaaaggagaagcgacacacaacttacayggcagggagagagagcaaagggggaactgccaaaaacttttaaatccatcaactcttacgagaactcactcactatcatgagaacagcatggaggaaact

SEQ ID NO: 26166 - DNA, 201 bp, Homo sapiens
acctaaaatgaggttctttaaattctttctcagcttgagaatcctccaatacagttaaagaaatacttacaaagaaaagtttaccattctgtattgaagcrtactaggcagtacagcaaatcacagagaatccttataggacagtataagcaattcattgtttaggaagtcaagaataaaaactgtttcaggcttcatctt

SEQ ID NO: 26167 - DNA, 201 bp, Homo sapiens
tctgcctctttgataattaagtatgcactaccatgtgccagcttccatttttgtgtattctgtacagagtgtttaagaaggtgggtcagagactcactgtmtagatccagatcttggctctataagttactatcagtgtaatctcatgcaaattacataacctctctgcagattgaacttttggagaccagggacatgatt

SEQ ID NO: 26168 - DNA, 201 bp, Homo sapiens
gacagtgctacatatattgtatatatgatatccctgttcccaaatgtaaacatctccacatgtatcccttctagaccaaaacctttttatctggcttcatrgaaagctgtagtgttttgggctagtatttaccattagatctaaaaacggtgcatccttggattccttttgttgaattttgtgtaaatatttagggtattt

SEQ ID NO: 26169 - DNA, 201 bp, Homo sapiens
aggcctcttctgtgggctctttcatggacactgttaccaaaagttaccaatatgcctggtgcctttgatatttgtgggcactgcagaccagagaaaaagarttgctgccttgtacagctgcacactggctttcacatgtcctgcaaatgggtacctgccagccatcttccccagatgtcatactgaccattgatttttttt

SEQ ID NO: 26170 - DNA, 201 bp, Homo sapiens
tcgcctcattaagcctgcaaagatcaggcctcttgtgatccccacaaatatacttgcatttactcctaattaaaatggccctcttaaattgtctcaagttyattaatataaataagaagctaagcaaaatagccacagttgaacagttagcagggcaagatgaccaggtccccaaacctcacacagagcagactgtggtat

SEQ ID NO: 26171 - DNA, 201 bp, Homo sapiens
aaaaaaagaatgatggaacatctctactttttataaaaattagatcaacaatcactgtaatggtagaaaaagagagtatatgtgttttgatattggagcgrtttttacaaaaatcatatatgtcaattttacacaggatcactcactgcttttctgctctgaaggatgaagatcacaactttccctaccattcccctacct

SEQ ID NO: 26172 - DNA, 201 bp, Homo sapiens
tctggtcctgaaagacgaagatggatagggagccacatggtggctgttcactggccccaggaaaggccgtgcttgtttcccctcccaagactacttccatrgaccgagacaggtaactgcagttacccagtgactggaggagatggagaagattccagtagaaccagccaatctaaacccaggtccttctctgtgaagtca

SEQ ID NO: 26173 - DNA, 201 bp, Homo sapiens
ctttccatagttgtttagtgttggctccatatttaagtgaactcagagctcagtggaagttctttggatgatagctctccactcctgaattcttactccarccctaactggctgggctttcttctatctttttcaaaaagggctcatgaggcctgaatttcttaagttccatgcttgttgtatttgaatgatattttagtt

SEQ ID NO: 26174 - DNA, 201 bp, Homo sapiens
cttgaaggttttcctgtggtttcatcctggcatctggtcctgaaagacgaagatggatagggagccacatggtggctgttcactggccccaggaaaggccrtgcttgtttcccctcccaagactacttccatagaccgagacaggtaactgcagttacccagtgactggaggagatggagaagattccagtagaaccagcc

SEQ ID NO: 26175 - DNA, 201 bp, Homo sapiens
agccaggcacttgtgagatggagaccggggcgaaactgcaagcagatgccctttgctgactgttgaagaaagaggatctggctgaaagacccgcaactttyacttgttgagaacctttagccagcgccggcgtgcatgtgttttagttttattctttttcccttgcccccaaagccgtggagtacctgctgttgctctcat

SEQ ID NO: 26176 - DNA, 201 bp, Homo sapiens
ttttttttctttttttttcttttttaaccattgtcatgagacagactcaagttcaaatcccaactcagtcatttattgattgtgtggacttggccaagttrcttaacctctgcgtctcaatttcttaacttttaaaatggagataaaatctaccttgaaggattataaggaagaaaggttatttgtaggcagtacttggca

SEQ ID NO: 26177 - DNA, 201 bp, Homo sapiens
tattgaccatacacttttctccccattagcatctcagcttttagaaatggacattttgtgaacctccccattgcattgcatctcagttgttgtatttgagrtgctggaacgtggagatgcaatgcagtgaactcaacaatccaaaatagccaatccaaaattttggtgtctaaagagttaccatttccactataacagatc

SEQ ID NO: 26178 - DNA, 201 bp, Homo sapiens
agactccatctcaaaaaacaaaaacaaaaacaaaaacaggtaggaccacaacagtaacaataactgccattcatcaagtgtattttgtttgcaaaaatatyttcactttcatttcttatttaattcatatgctaatccttcaaagtgggtgatatcattacccatttaataaaatggcaattgcagctcagaaggcaaaga

SEQ ID NO: 26179 - DNA, 201 bp, Homo sapiens
attagcccttaaacatatttcccaaaatgctcaattctgaaaggaatttatttccttgttaagactgagttgaaaagcatgggtctgcagcaagactgaaktatttatattagtgatttcttatgacaatcttataagtaactgtacaatttaggtttattttctcttttttttttttttttttttttttgagacagagtc

SEQ ID NO: 26180 - DNA, 201 bp, Homo sapiens
tgtctctactaaaaatacaaaaaaaacaaaaaaattagtcaggcgtggtggcaggcacctgtagtcccagctacttgggaggctgaggcaggagaattgcrtgaacctgggaggctgagcttgcagtgagccaagatcgtgccactgcactccagcctgggccacagagcaagactccatctcaaaaaacaaaaacaaaaa

SEQ ID NO: 26181 - DNA, 201 bp, Homo sapiens
ttttccctttacagttgatgtttacttacatgattgacctgcgtaacagtttaaaacaggtaggaccacgaggtcaggagattgagaccatcctgacaaayatggtgaaaccctgtctctactaaaaatacaaaaaaaacaaaaaaattagtcaggcgtggtggcaggcacctgtagtcccagctacttgggaggctgagg

SEQ ID NO: 26182 - DNA, 201 bp, Homo sapiens
gttctggttcaccttctatatggagttgtgttctggtcttaagggacttacccttccattccatcactttctgccatcaaaactttcctttctgttttctragacaatatcaatggctgtggatattgaacaattgtctgataaaagtgatttttgacattaaggatctaagtgctcatatttgagagtctgatctagtga

SEQ ID NO: 26183 - DNA, 201 bp, Homo sapiens
tacattcccaaagggaaacagacctgtatgcctgcagtggcgaacagcagggtgatttaagagtatgcctcagagcccaccagccagcctggggtcatagycctgctctgaagcttatcacttatgggaacttgtacaaattaattaatgttcatatgcctctgtgtccttatccacaaaagaaaaaatagtaataatatc

SEQ ID NO: 26184 - DNA, 201 bp, Homo sapiens
aatattttgtgcctctgtagaggtgatcatttgcttttctcctttattatattaatgtgatgaattacattgatcattttttaaaatagactttattttargaagaagtttcaggttcaaagcaaatttggacagaaaatagagtaacttcccagatactccctgccttgacacttggacagcctttcacacgatcagcat

SEQ ID NO: 26185 - DNA, 201 bp, Homo sapiens
tacaatctctttaatgggccttatccttcaggtgagtcagctggtttaaagagttacgtaaggtacattagcccttaaacatatttcccaaaatgctcaaytctgaaaggaatttatttccttgttaagactgagttgaaaagcatgggtctgcagcaagactgaattatttatattagtgatttcttatgacaatcttat

SEQ ID NO: 26186 - DNA, 201 bp, Homo sapiens
catggatatataggcaattttgacatgtaacttctaagggtctgcttaacaggctcatgtgtcagaatttgacaatccatgaaatagagatcaagtagtcrtaataatatcactgccttcatggcagaggctgcatatctgtttctcctattccacttcatctccccagtgctcacacatacaccctgttggtttgtagtt

SEQ ID NO: 26187 - DNA, 201 bp, Homo sapiens
gttgcccattgtgggatctcaaagcacattcattatcatgtgctgacggctgttctgcaggagtggaaaatggaggtagagagaagtgaatgcaacggtgmcagcagtgggggatggagccacgcccctgacagggggcacagtctctgaactcagcaccaggctgggaagctttgccggggcctccctgtgctcttttgg

SEQ ID NO: 26188 - DNA, 201 bp, Homo sapiens
gtaaattacctactttttcaaattaaaaaaaaaaaaatcacatgatcatgtgactctattaccagggtctttcccagggccttggaaggggcctatgcaarcaagaaacccttgacgcatgagctttattagctccatggtagatctacaagtgaaggttcactcaacttaatctaggcctacttccccgaacatggtggc

SEQ ID NO: 26189 - DNA, 201 bp, Homo sapiens
ctcccatctttttccaccagccctttttctcattgtgttcagccctcgtgttgatatcctgctctggtatatctgaaagcctggttgtctgagattacctyatctcttggttcgtagggatctcattttctttctttgtttcattgagactggccaggtagtcactggctatggacttgaaccccttccccactgctcaca

SEQ ID NO: 26190 - DNA, 201 bp, Homo sapiens
ggctgttgataacgaatgtaaagtgtttatagcagtgcctggaacataatacaggcaaaaatgttatctgttatcatcatcatcatcattattcttttatraattcttccttgaagcttcacaaggcaagtacaggacaaatgaaaagaaataaagtttacacagcatgggataagaatatgagatttactatgccaaaag

SEQ ID NO: 26191 - DNA, 201 bp, Homo sapiens
gcagtgacaggttgagaatagggaacagtgaaattgttaaagatagactgggactataatttggaggaccttgagtgccctctacttctggggtacataayggccctattgaaaaccctaattctatatccaataggtggctcattgagtaaatcactgttagcagtcagatctgatgtgttccccaaatccacatccttt

SEQ ID NO: 26192 - DNA, 201 bp, Homo sapiens
tgctaatcttcactcatgctaatcttcactcatccctttctttgggactgatacatctttggaattatctagcatagtgcttaattgttttcacattttcmtgtctcttaattttatctcccaatctccatagtacgtaatttgggattagggactttgccttactgagtactgcatgaatacattttattgatttactga

SEQ ID NO: 26193 - DNA, 201 bp, Homo sapiens
acctcccctaacttcaacccaatctctaaagaaatgagagaaactctaaatctgttctaaaactaggggtagtcatggcataataggtatgaaagatctgytcttatctcttccttgtataggggcagatatatagtggcagaattgagaataaaccaaacaattgagtgttttcagtagaaactgatatatgactaacca

SEQ ID NO: 26194 - DNA, 201 bp, Homo sapiens
aatacctttccaacatacttcacatgtgaaaatcagacagtgtaacaggttctctgtctttctctcctggaacagatgaaatctcttccatcattcagacsctaggctgttttgtttggactctcttctatgggcatttgccccaatccctttttctatggtagttattgacttatctcatttcctcctacaacagtgtaa

SEQ ID NO: 26195 - DNA, 201 bp, Homo sapiens
tcaaagctgaggtttaaaactagtatgctccaaccaggctgtgaaagtaactaaagtagctgagtgcctcagatcacctaatgtttatttttgttttgttktattttttgtttttccatttttgttgttgtttgtttgttgttttttctgagacagagtctggctttgttgtctaggctggagtggagtggcacgatctcg

SEQ ID NO: 26196 - DNA, 201 bp, Homo sapiens
ttgttctaaacaccttttggatgactccatttggcagaagcgcaccttaaacttgtagtcctttcacatacgagaaatcaactgggctctgctagaaaggrgtgtccacatggggaattttggagggaggaactatgcatgccacctgtccaacactgagaagccctgtttgcaggggttggggtatggggtagagagctc

SEQ ID NO: 26197 - DNA, 201 bp, Homo sapiens
ggcaaagcatgttgggagggagttaggaaggaagactaggctttgcaaagatctccagcaggatggggcacagtgccctgcgggagcaggagaacaccacrtgatgactctcagggtgaggagtgaaggcaaaagagaggctgagaaggcaggggctggggcagagggccttctaggaaatggatggtgctctttgcttac

SEQ ID NO: 26198 - DNA, 201 bp, Homo sapiens
gctgagaaggcaggggctggggcagagggccttctaggaaatggatggtgctctttgcttaccccaagagcaaggtgaatcactacgtttttaagcagagrggccccagtttccttgtgaatcttcgtggagtcctttgagctctgtaaccatctgggttacaggtcttctttgtgtgtctcactaccatgccttaccctt

SEQ ID NO: 26199 - DNA, 201 bp, Homo sapiens
acgtttagatgaatgaaacttttgatgttaacagttattgatagtataaagcaaataaaaaaggcctctttcaagaacggctctgtgaataatttacagawaattttgaaaaaagaaaataaaggagaaaagatttttgggggttatttctcaaatgactttccatctattaagctattttccaccatttcccttggctcc

SEQ ID NO: 26200 - DNA, 201 bp, Homo sapiens
agaacggctctgtgaataatttacagataattttgaaaaaagaaaataaaggagaaaagatttttgggggttatttctcaaatgactttccatctattaarctattttccaccatttcccttggctccaatctactatattaactatattttataataaacacattagtattgtgaaaattaatatttaataatgtagagt

SEQ ID NO: 26201 - DNA, 201 bp, Homo sapiens
gtaaaccctaaagccttttattgagaaaggagcattataaaatgttggagactctgttagtttaggtcagtgaataactacagtcaccagagcccctttcyaccagccaacccacactggacatgtagaatgagagagaattaaccttttgttagtttaagccactgagatttgggacttgttattgcagccaaaataatc

SEQ ID NO: 26202 - DNA, 201 bp, Homo sapiens
gactcccacccctttgtgcagagtagctcacttcaatagcaaaaatcaacccaccatggcctaggaaagcttcaaagattctgccaaacactttaggtgtytaagatatttggggcaatttctccctaaagtttgtcaaggcagatgttggatcaagcacaatgaattgagtcatccattcttttgggagtagaaataact

SEQ ID NO: 26203 - DNA, 201 bp, Homo sapiens
gcatctgtgaggatggccagatactttcattaattggattcaggttatatgtgtttcgtttaaaagcagctgcgatcactaatggaatgacctctgtgtcrctttccattctgaagcaggaggcacgatagctcctcttaggatgttgtgtttgccacttgcgctgacaccaaatgctggtaaaatatggttgctccccgc

SEQ ID NO: 26204 - DNA, 201 bp, Homo sapiens
tggatgacaaagccaacatggtagaaaggctcttgtatcaacaggagttggtcaagatgttttctagacagcattttaaattcagagcatcccttttattstaggctttagaatgaaggaatgtggttgtttgggcctatggatcttaaccattgctagaacctattattttggagagctctgagagttagtgaggagaga

SEQ ID NO: 26205 - DNA, 201 bp, Homo sapiens
tttgaaattgattgctgggactgtcacaaagtaatttatatagcaacttattataattagttatcatttgcagtttcctaaatgtgagttgcattttatgyttagcaattgatttttctgtatatctccatgaagcagctcaatgtatgccatccaaaaaagaagaaaaagaccgaaagaaaaactgtgtttttttaaatt

SEQ ID NO: 26206 - DNA, 201 bp, Homo sapiens
aatgtgtaaaagaaagaaagcaaaaagaaaaaaaatgaagaggaaatttgctgtgaaacttgcttagagatgataacctttctactttgactattgttggyaatcttgccattatttttattgacacagttgttaggtactcatcttcctctccaaccaggggcttggtctatttgtgtttgaaattgattgctgggactg

SEQ ID NO: 26207 - DNA, 201 bp, Homo sapiens
tgtcccgaatctctttactaacatgccatcttgctgcttctgtttggcctgattttcctcatcatgctctacatttctggaagtcctttggtcttccttcygttgaagttttctagctccttcatatcccaccttatcctcatttcctggagtgaactctttcttctttgactctctatagcactcaggtgcttcttcatt

SEQ ID NO: 26208 - DNA, 201 bp, Homo sapiens
tcctgtcatctttgtgtgactgagaggctaagtgtcagaacactgtagatatagttagtttgaaggaattcattcattctttgaacgaaaaatgtagtatrtattatgagtctggtaccatgctagatcctgtaacaaggagcttagaatgaaatgtgcgatacagctaggtcagtagatatctatgttctaagtattatt

SEQ ID NO: 26209 - DNA, 201 bp, Homo sapiens
aagggagaacggcatgtagaaagcccccaggcaagtgagtacggcatattcaggcaattgcaagttgctcctcagtgctagaattcagagctgtggtggcragtttcgaatggtgaggctggagagattgacaggaataaaattagaagggcccaagcaatccaatgattgcttgatcaccatactgagagatcaccagga

SEQ ID NO: 26210 - DNA, 201 bp, Homo sapiens
tggtcattactgaatcttccgtaagaaattctttaaaaatataatgagataatgactgtgaaagtgctttataaactataaagtgctcaacgcatgtaaarctgtgatattatcatcactcatgtcccctatgctgctaatcgtcagtggatcagccagggaggcaggcgttcctcgcttctgctttgttatactgtctta

SEQ ID NO: 26211 - DNA, 201 bp, Homo sapiens
gatgcaactaatgaaattgtatggggcagtggtggtggtagatagcattgaaagattgttttgcaaattaagcagaacaaaaaaaaaaaaaacaagaaaamtcaatgttaagtggatgatggcaccatgactggtattcagtcagtatgtacctgtgtagccattctggctgaaatacttccatggcagctcccccaagag

SEQ ID NO: 26212 - DNA, 201 bp, Homo sapiens
atttcttgacacatgtactgatgtggaaaagatttttggaaggtatgaagggagttcaccaaaggtgataagttttatttggggcctgtttgtgtattcaygtggagagagttagcattcttggttctagagaaaaagatttaggaattttcaacatatgatagtcatagaacccaagaacttaccatccaatggaaatat

SEQ ID NO: 26213 - DNA, 201 bp, Homo sapiens
aatgttaccagaagctgatgaggcttattttggttttgtttcgttttgtggaaaaccagaagggatctcagtgttgctgcctgcaggataagtaaagatawcctactatgtattttattggcaatcctgatagcattttctccattggtggtttatgtgtaatagagaccaaactgcaattttctgacctgccaagatcca

SEQ ID NO: 26214 - DNA, 201 bp, Homo sapiens
atgggggatctggatggaaatgaaacgcagacttggctcatcagagggcagcttggcttcacttgtatgccacaaacattgtcacctcataacactgacartagtcactgatgagcacatttgaacccattcccaaaagtgcattgcctccacaccacatgaattagagccatttgtgttattttgcttatgtgttctttt

SEQ ID NO: 26215 - DNA, 201 bp, Homo sapiens
ggatctggatggaaatgaaacgcagacttggctcatcagagggcagcttggcttcacttgtatgccacaaacattgtcacctcataacactgacaatagtyactgatgagcacatttgaacccattcccaaaagtgcattgcctccacaccacatgaattagagccatttgtgttattttgcttatgtgttctttttcttt

SEQ ID NO: 26216 - DNA, 201 bp, Homo sapiens
tggatggaaatgaaacgcagacttggctcatcagagggcagcttggcttcacttgtatgccacaaacattgtcacctcataacactgacaatagtcactgrtgagcacatttgaacccattcccaaaagtgcattgcctccacaccacatgaattagagccatttgtgttattttgcttatgtgttctttttcttttctct

SEQ ID NO: 26217 - DNA, 201 bp, Homo sapiens
tgaaacgcagacttggctcatcagagggcagcttggcttcacttgtatgccacaaacattgtcacctcataacactgacaatagtcactgatgagcacatytgaacccattcccaaaagtgcattgcctccacaccacatgaattagagccatttgtgttattttgcttatgtgttctttttcttttctctgttgtgtatt

SEQ ID NO: 26218 - DNA, 201 bp, Homo sapiens
gggataataaaaaagtgtgtatgaaaatgcttggcatataataagtacacaataaatattcacactagtattagtagtataataataatcatcttttttttgtaataaaggtaattggatatgttcctaggccatttcatcctataatgttagaatctggagacttacacctgcttctccatagaatactcctttgcaagg

SEQ ID NO: 26219 - DNA, 201 bp, Homo sapiens
gcatgatggttactttatcttttttgccttttagactcaataagatatttctccatagcacattactcaagcttctacataactcatctcacatagttacraagttttgtccccttggactgtaagcccaggcagggatgggagcttgttcattcttggatccctaccgtcttgcatagtgcttgctatgtagaaagcact

SEQ ID NO: 26220 - DNA, 201 bp, Homo sapiens
atcctttcctctgcccgctgcccccactccccacccagccccacagtcgtcccccaaccccaccctgcacaaatacctgcaaaatgtcaaatgagttttaygtgtcagctaaattaaagtatgtgaaatacagttcgtgggcagacaaagcattctgtcttctggcactcgggacacttcagagtaatttattataggtca

SEQ ID NO: 26221 - DNA, 201 bp, Homo sapiens
ttttgttttatggaggaaggggtattaataattatctgctctgggtatcaaatatgctagctatggcactgggtattttctttttctttttttttttttttgagacaaagtctcactcttgttgcccaggctggagtgcaatggcatgatctcagctcactgcaacctctggctcccaggtttaagcaattctcctgcctc

SEQ ID NO: 26222 - DNA, 201 bp, Homo sapiens
agaggtctgttgcagcatcttgtggttcagctcttagtctagctttttgtggttgtttctttttccatgtcatactgtgaccccagcagctacccttgccyacccctcatgttgctctatttagatgcctgtggctgtttttaatcttctgtgggataccaaagcttagaagaataaaattgtatgataaacctgcctgat

SEQ ID NO: 26223 - DNA, 201 bp, Homo sapiens
gtatgtcttcttttgagcaatgtctgtttagatcatttgcctattttcattcttaattttttccttcactcattggttgttcaggagtatgttgtttaatytccatatattcatacagtttccagcattccttttgttattgacttctagttttattctattgtcatctgagaagatgcttgatataattttgacttatca

SEQ ID NO: 26224 - DNA, 201 bp, Homo sapiens
cagatgtggggggctcctgggaggccaccacgtggagaaaccaagaaacaaagctgagatagaaatttctgatgagaagtttgaacacctggatctaaccrtatatgaaaccatataccttgagctcattaaagccccctgctcctctttttaaacttaaagcactttgaggtggatttcatgacttaccatcaaaaggat

SEQ ID NO: 26225 - DNA, 201 bp, Homo sapiens
atagaaatttctgatgagaagtttgaacacctggatctaaccatatatgaaaccatataccttgagctcattaaagccccctgctcctctttttaaacttmaagcactttgaggtggatttcatgacttaccatcaaaaggataatcttattttcctgaactgttcaacaagggagattctacaacttaccctggaaatgt

SEQ ID NO: 26226 - DNA, 201 bp, Homo sapiens
catttagtgtttacatgagctaggacattgttacccaacacaaggagaaagctcactttgggccttctttggttatgggatgcttattgtctaatttcttyagcaaacatggagtacctactcaatattaggacctggtgtgccctgcacaattagaagctctcagagagcagggactccacagtagcataattgaaatct

SEQ ID NO: 26227 - DNA, 201 bp, Homo sapiens
caaagctgaatgccagctcattattttctggcgttcagtagtccaaaaataatgtccgcacattaagcggcattctcaaaaaagttggaattggccaggcwccaggcacatcaattacactccatcatccttaataaggaagaaatatcagatgtcctcttggaggttttttgaatcagtaatgctcagcctttaccttcc

SEQ ID NO: 26228 - DNA, 201 bp, Homo sapiens
tctttggaggatgttggcactgagctttgaagaacatgttaagtggagagcaaaagaagggcattccagaaagataaatgggtaaagataaagcacaaggrcaagaacaggtagaactgatgagagaaagggaccctgttttgaaaaggtcagaaataaggttccttatgtaggataggtccacattatggcaggccttgg

SEQ ID NO: 26229 - DNA, 201 bp, Homo sapiens
atccaaaaaagaagaaaaagaccgaaagaaaaactgtgtttttttaaattatttaaaacatttttagcctgagatatcataaaatacgtttccacagaagmcataaatacagagtgttttgcttcaactcattaaatcgccaaagtgaaagtgaataaaaggaaatttaaatgtctgtatgtgaagaggtagcaatgtaga

SEQ ID NO: 26230 - DNA, 201 bp, Homo sapiens
aggtctttcatgagaaagggaatcaggaagattggctgaaacaaatgtgaacaattagaagttcatttgcctcttgcaaagagtgagagcatttaaagagrgattcagtgtctgagaactatagactcacttgcatttttttttcaacccctggtacctatgaataaagaaataaagacttgatcaacatgtaatttattt

SEQ ID NO: 26231 - DNA, 201 bp, Homo sapiens
ggaatcaggaagattggctgaaacaaatgtgaacaattagaagttcatttgcctcttgcaaagagtgagagcatttaaagagggattcagtgtctgagaaytatagactcacttgcatttttttttcaacccctggtacctatgaataaagaaataaagacttgatcaacatgtaatttatttccctgctgttcttagaga

SEQ ID NO: 26232 - DNA, 201 bp, Homo sapiens
caagttccttcttttaagccaaaataaatcaagcccttaggactaccatgacataatatcatttttaagacagtcctacaaacccagttgagatatgccaygtgtagccttctcgtctgagttagatgagaccatctaaatgttgttagagcatcacaataatgcagtgaattgatggatgaattcggattataatgaagc

SEQ ID NO: 26233 - DNA, 201 bp, Homo sapiens
ttagatgagaccatctaaatgttgttagagcatcacaataatgcagtgaattgatggatgaattcggattataatgaagctagggatctcacaatttttgytcccagaagggatctcagtagtgctcttctgcttgacaagtgagaagcaaaattaattcatataatgcctatttaattatgaaatatgggcatgtctctg

SEQ ID NO: 26234 - DNA, 201 bp, Homo sapiens
acagtctctctgtaatgtaaataacaaaccaaccctacttgccctctccccaaatcaaaaaatcctcaaacccaggaacaaaattttgattagtctactcyttccaaagacaccttcatctacttgaacatcaattttcaatggtcccttcaaccttctctttaaatactgtctttattatgcaactttgaaatgatctac

SEQ ID NO: 26235 - DNA, 201 bp, Homo sapiens
acgtggaaggcagacaggtccctgggcggaagggggtgggtgcccagtgaaaccccaccttcaagccagggatggcttgaagcctgggggccgggctgccrgtgccgggtggagtccccctcctggagtgagaatttatgatgctttttccggctggcccatggcagcccatggaccaatcagcactcacttcctcccttt

SEQ ID NO: 26236 - DNA, 201 bp, Homo sapiens
ggggtacttaaatgtatagcatgaaaattgtactggctcattagatagctgcctacaatattatttttaattcctgtgtaatattttatgatacagatatrttgagctttatttaatcattcttcaatccttgggcatttaggcttgtttgcaatgttattgtaaatgctatagtgaacatacttgtacataaacttatac

SEQ ID NO: 26237 - DNA, 201 bp, Homo sapiens
atagaggtgtaccccaaggggatcattagcagataaatctcaagccagtcccacctaatgcatacttaacttcaaaggaaaaaaaaaatctaagaactagytctttgggagattcttctaggagcatccatggagtacagagtgaaaggaaaaagaactcgaaaaccatttaggttcatcattatattaataattgaggac

SEQ ID NO: 26238 - DNA, 201 bp, Homo sapiens
ttactgatacgctgtcctgtatggtgtccccttattccaagcccagcgtctctgtctccttcatagatggtaagagcattgagagcagattccatgacttrtgcatcatttgtatccccagatgcatgtgctcactgaattcctgtcatgttggaaatggataccacaccacatgctttttggtagcaaatcagctttctg

SEQ ID NO: 26239 - DNA, 201 bp, Homo sapiens
cctctttagggctctgtggttcctggcgtctcccagcttccaggcaccacagcattccctggtgcccatggtggaagctacttgcaggacgcctggtccakatgcagcctctcttggagccagcgcctatactggcacttggagctgcctgccccaccgcagccagcacacctggccgtgcgctgtggccgaaccccgtgc

SEQ ID NO: 26240 - DNA, 201 bp, Homo sapiens
ttttcatttcccttgctcagaattccatatgcttcaggtcactgcaggggcctgttgctgtttcttcaatcagtcactcaaccatggttttcatgagagcygtaacatgtggaaccctgcaccagggcatgtaggagatgaaaaagaagctgtgggctctgccttcaggaatcctacagtctaattggagacaaggtccta

SEQ ID NO: 26241 - DNA, 201 bp, Homo sapiens
tttagaagagtcagctttataccatggtttcaggggatgaattgtgatgaaaagtgaagattgcttttgcttgaaagaggctgacatatttcccagacccrggatcactttctgtggtgtatgatttaagggtgagcgagcatgccaaagcgctccacttgagctgagtgatggggaatgagttgtggagctgtggtctta

SEQ ID NO: 26242 - DNA, 201 bp, Homo sapiens
tatttcccagacccgggatcactttctgtggtgtatgatttaagggtgagcgagcatgccaaagcgctccacttgagctgagtgatggggaatgagttgtrgagctgtggtcttagatggtattttgtgaaaaacagtgggagatttatggctattaaacaactttgtagctgcccccttcttgtttcgaagtctgccaaa

SEQ ID NO: 26243 - DNA, 201 bp, Homo sapiens
aacagaaatgggatatttcatcacaaaaagtcaatcagaggtggcattcatccatgttatacaagtactagagaattgttacaggaatttttctctcattrtgggttcatgtcaatataggagtgcatggattagaaaagaaatagggccttttggtgtttttaaaaaaatttcaggcttaagtctgagaaattccaaaat

SEQ ID NO: 26244 - DNA, 201 bp, Homo sapiens
catggattagaaaagaaatagggccttttggtgtttttaaaaaaatttcaggcttaagtctgagaaattccaaaatgtagaaaacttttaaaaataatgarcacatgtagagatcatccagaatttgtggtttctaatattttgacatttgttttaagtcttctttaaatgaaagaaagaacatcatatatacagctgaag

SEQ ID NO: 26245 - DNA, 201 bp, Homo sapiens
gcctgtaatcccagcccttttggaggtcgaggcaggtggatcacctgaggccaggagttggagaccagcctgggcaacatggcaaaaccccatctctactraaaatgcaaaaattagctggatatgatggcacgtgcctgtaatcccagctactcgggaggctgaggcatgagaattgcttgaaccagggaggcagcggtt

SEQ ID NO: 26246 - DNA, 201 bp, Homo sapiens
cgctaaaatatctgttggagaaatgtccctttaaatatattacgagtacaggacatgccccagcgtgccaggtattgccgttctttatctggtagctcttwgaagtagaattcacatttgtacagggcattatgtcttttggggaaaacatttctatttagaatgtaaactatatcatcctcagggtaaccctgtaaagtg

SEQ ID NO: 26247 - DNA, 201 bp, Homo sapiens
cttttcctccaaggatgatttttcatttgcagtctctgagattgctttatttctattctttgggcagaattgtggtatacttgtagacagagaagggctaygaatctggtttttctctcccagagcaaagcaaggaggaaaaaatggatttcagttttcccctgcccctcaaatagtagcaaaccctacttctgtaaaatg

SEQ ID NO: 26248 - DNA, 201 bp, Homo sapiens
tttaagaattaattttattaaaaccagtcaaattaaagctgcctctgtccagggcatctcaagatccatccattatggcttcttatcttggcaggcgatcrgcttggaaaggcagctcagccattatgcacatacaaagcccatcacttcacaaccaatggtcaattcatcaaacatttatcttttgccctctgagcgtgt

SEQ ID NO: 26249 - DNA, 201 bp, Homo sapiens
caggtctggtaaatgagggtatttggtatttggtgtttggtgttgcttcatgttgactttgcttttgtcacacaggcttctagtgaggacgttgccagctycccggagcgccactacacgcccttgccttctgcttccagggaactcaccagtcaccaaggttggaactcagctttttattgctctcagtgggtgcaggga

SEQ ID NO: 26250 - DNA, 201 bp, Homo sapiens
gaatgaaggatccagtctgtgattgttagggtacctttctattcaaccaggctgtttaatttccgtatctcaagcatctctgtctggacaatggacaatgytgggcacctataaactttttgatgacttatagaggtaataaaatcaaactttcttcttctgcttacttgactagtgcgatgaattaaccaatggttaatg

SEQ ID NO: 26251 - DNA, 201 bp, Homo sapiens
acctgctcataaaactttatattctccaatagtgtgagccttgctgagctgtttagtaatgagtgactttccttttgcagtcatggaaaaatgtatacctrcagaggcaggagcagggggaagatattttttcaatgttgcgctttgcatacgctttttcctatgcagaaaggaaaagtgtcctcctgacactggaaaaaa

SEQ ID NO: 26252 - DNA, 201 bp, Homo sapiens
agcatcagcccaatgctttaattttctctttctgaaagaaggatgatgcctttagtagcatcttaaactatgtgtcaaataggcttccctggactttttttaggaaactcaccaccatcagtgacattatttcttgaggaaattgagctctgagtcctcagacccaatatttaaatataatgtcttccaaaagttagcttg

SEQ ID NO: 26253 - DNA, 201 bp, Homo sapiens
cggcccttgtgcaccggtatgagaaatgctaattggtgtgtgagcctgagatgctcttccaaaggatttatcgtcagaatcagaggaggggaaggggagcygaggccgtctttgtgatggcttggaggctgcactcactcgcttcagattatttttaaaaccaatggtcatgatggatctgaatccagtaatttattcgat

SEQ ID NO: 26254 - DNA, 201 bp, Homo sapiens
aactaccaaatgtaattcagctcaaataagcatattcggcaatctttattctggatatgtgggactgaccttgcgttgaggctaaatcatttcatcccagrcaaagtctgtttggagttaattggggaagcagtgtgggtgtacagcaggtcactctgggctttttattctctttctggccctcattcaaagagtcgctgt

SEQ ID NO: 26255 - DNA, 201 bp, Homo sapiens
cttctgccgactgagctgtgtgacaagaaggcctcactacaactcagttttctcccctgatgacagccctgaaggccctttcacggctttctctaaccttyctagccttcccctttggtccctggaggagcacaacagtgactaatggtgtgcgtacctgcactcctgggggcttcatttggattatacttttaattactc

SEQ ID NO: 26256 - DNA, 201 bp, Homo sapiens
ctcacttgctgggcactatctgtgaaacctctagctctcagtgatctcttctttcttactgcacacaggcgcgcacatgaggccttaactcccttcttccwctatcatttagtgggtagtacatctgtgatagatagttgtcaatctaagctaataaaattgttgaactccagtgatcttgaataaacaaatcttcaccga

SEQ ID NO: 26257 - DNA, 201 bp, Homo sapiens
aataagattggaagcagcaagatcagtgatagccttacacgagtggtgcacctgttgttggaggtcagaaggaaagggagatagagttcttcccactgggraagcatgaaggagcatgaatgagacaagtgcttgagggacagatcggatttcaagtaaggggaagaggaagttctggaaatttcagtgatctgtactgaa

SEQ ID NO: 26258 - DNA, 201 bp, Homo sapiens
ccaacaaatttacaagaaaaaaacaaacaaccccatcaaaaagtgggtgaaggacatgaacagacacttctcaaaagaagacagttatgcagccaaaaaaacacatgaaaaaatgctcaccatcactggccatcagagaaatgcaaatcaaagccacagtgagatatcatctcacaccagttaggatggcaatcattaaaa

SEQ ID NO: 26259 - DNA, 201 bp, Homo sapiens
tcagaaataacgccacgtatctacaactatctgatctttgacaaacctgagaaaaacaaacaatggagaaaggattccctatttaataaatggtgctgggraaactggctagccatatgtagaaagctgaaactggatcccttccttacaccttatacaaaaattaattcaagatggattaaagacttaaacattagacct

SEQ ID NO: 26260 - DNA, 201 bp, Homo sapiens
ctatactacaaggctacagtaaccaaaacagcatggtactggtaccaaaacagagatatagatcagtggaacagaacagagccctcagaaataacgccacrtatctacaactatctgatctttgacaaacctgagaaaaacaaacaatggagaaaggattccctatttaataaatggtgctgggaaaactggctagccata

SEQ ID NO: 26261 - DNA, 201 bp, Homo sapiens
aactatactacaaggctacagtaaccaaaacagcatggtactggtaccaaaacagagatatagatcagtggaacagaacagagccctcagaaataacgccrcgtatctacaactatctgatctttgacaaacctgagaaaaacaaacaatggagaaaggattccctatttaataaatggtgctgggaaaactggctagcca

SEQ ID NO: 26262 - DNA, 201 bp, Homo sapiens
aaaaaactactttaaagctcatatggaaccaaaaaagagcccacatcgccaagtcaatcctaagccaaaagaacaaagctggaggcatcacactacctgamttcaaactatactacaaggctacagtaaccaaaacagcatggtactggtaccaaaacagagatatagatcagtggaacagaacagagccctcagaaataa

SEQ ID NO: 26263 - DNA, 201 bp, Homo sapiens
cccttgcagacttacatattacagtaaggcgcacacttgtcacggatctgggttgacttcagtgtgtctttaggaagcctcccctagtgctccacgctgcsctctggctgcagcaaacctaaaagctggagagcaatactgccagtctcaagttgcaccatcagggacaccactgagatttcaactcttgaatcaaagaat

SEQ ID NO: 26264 - DNA, 201 bp, Homo sapiens
caataaaatactggcaaaccgaatccagcagcacatcaagaagcttatccaccatgatcaagtgggcttcatccctgggatgcaaggctggttcaatataygcaaatcaataaatgtaatccagcatataaaaagaaccaaagacaaaaaccacatgattatctcaatagatgcagaaaaggcgtttgacaaaattcaaca

SEQ ID NO: 26265 - DNA, 201 bp, Homo sapiens
acaaccaaaaaagagaactttagaccaatatccttgatgaacattgatgcaaaaatcctcaataaaatactggcaaaccgaatccagcagcacatcaagargcttatccaccatgatcaagtgggcttcatccctgggatgcaaggctggttcaatatacgcaaatcaataaatgtaatccagcatataaaaagaaccaaa

SEQ ID NO: 26266 - DNA, 201 bp, Homo sapiens
cctccctaactcattttatgaggccagcatcatcctgataccaaagccgagcagagacacaaccaaaaaagagaactttagaccaatatccttgatgaacwttgatgcaaaaatcctcaataaaatactggcaaaccgaatccagcagcacatcaagaagcttatccaccatgatcaagtgggcttcatccctgggatgca

SEQ ID NO: 26267 - DNA, 201 bp, Homo sapiens
cagaattaacataggatacagattttgcactacagatttttctttttgtatggtgtgaaaattaaaacacacacacacacacacacacacacacacacacataaaaaaaaaaaactatagagaaatataaaaaatgaccaagtgctaactatggttcccaggtactatgagaatttggaaagaagaaaaatcattatggaa

SEQ ID NO: 26268 - DNA, 201 bp, Homo sapiens
acagaattaacataggatacagattttgcactacagatttttctttttgtatggtgtgaaaattaaaacacacacacacacacacacacacacacacacacataaaaaaaaaaaactatagagaaatataaaaaatgaccaagtgctaactatggttcccaggtactatgagaatttggaaagaagaaaaatcattatgga

SEQ ID NO: 26269 - DNA, 201 bp, Homo sapiens
gataggtctctggaggacatgatgcaggtagccttctggtagtcaggaggaccccagctgtttctccacatggctcctaaaacaggcaagaaaatggtggrtctagacctgtactgtcaaatatggtaactgctagtagccatatgtgactattgagcacttgaaaatatggcaaattgagatgtgccataagtgtaaaat

SEQ ID NO: 26270 - DNA, 201 bp, Homo sapiens
aggatgcctgtaagaagccatttaatgggaggctcttgttcctgtccatgtggtgtttttttttgtttttgtttttttgtttttttgagacggtgtctctytctgtcgcccaggctggagtgcactggcgcgatctcggctcactgcaagctccacctcccgggttcacgccattctcctgcctcagcctcccgagtaatt

SEQ ID NO: 26271 - DNA, 201 bp, Homo sapiens
tatagctatagtatcggagaaccagagggaacttgttttaggtagaatattatttgctgtaagagaacacccaagagaaagtgacttaagcagggaggatmtttcattatctcacgtaagagtaagactgagttaaagaattaagggattgctccagcagatgacatcagggaccaagactctttccatcttttttctctg

SEQ ID NO: 26272 - DNA, 201 bp, Homo sapiens
aataatttggcagccttatcagcatgttattggactttcgttttgtttgtaatcttaagacacctttttcccactcagccattcagcaacattttcccttycccagccttggccccgccacctgaaacattcatgttcttcctctaagacagaataccaaccaagtgcaggcagccggttgacacaaccagatcaaaaggc

SEQ ID NO: 26273 - DNA, 201 bp, Homo sapiens
tacagaattaacataggatacagattttgcactacagatttttctttttgtatggtgtgaaaattaaaacacacacacacacacacacacacacacacacacataaaaaaaaaaaactatagagaaatataaaaaatgaccaagtgctaactatggttcccaggtactatgagaatttggaaagaagaaaaatcattatgg

SEQ ID NO: 26274 - DNA, 201 bp, Homo sapiens
cagagctgatggacaagaaatgtttggggtgagcacatgggtacagtcgtggcagtgtcagagacctgggagagtccagagcttcctagatgagagttacrcggctcctgggacaaagtgaggctttttcagaacagcagcagacaagtgagggatcactcacgggcaatgtggatcatgttagcaggataggaatggata

SEQ ID NO: 26275 - DNA, 201 bp, Homo sapiens
atacagaattaacataggatacagattttgcactacagatttttctttttgtatggtgtgaaaattaaaacacacacacacacacacacacacacacacacacataaaaaaaaaaaactatagagaaatataaaaaatgaccaagtgctaactatggttcccaggtactatgagaatttggaaagaagaaaaatcattatg

SEQ ID NO: 26276 - DNA, 201 bp, Homo sapiens
ccaaagacttgatcaattgacaaggggagcatcaaaagtggctgagaaccatttatgtttactgtgtttgaaagcactttggagggcagggcgtgcgtctygtgcatctgtataatatgaaagcatgttttgtgaggcacatcttaacatatggttccagaaaaaggaaggtggtgccctgcactcaaactttttcttttc

SEQ ID NO: 26277 - DNA, 201 bp, Homo sapiens
cagcctggccaatgtggtgaaaccttgtctctactaaaaatacaaaaatcagccaggtgtggtggtgggcacctataattccagctacgcagcaggctgargcaggagaatcacttgaacccaggaggcagaggctacagtgagctgagatcacacccactgcactccagcctaggcaacaagagtgaaactccatctgaa

SEQ ID NO: 26278 - DNA, 201 bp, Homo sapiens
ctcaagcctgtctgacttactaattggcactttgaaatgctactctgtgccacaacaggggtaatgaatcagccggggaaacccatgaaggtgctaacctaccattgtacataattgatcaaaacacttgctctgaacagtgagctgttttagatacactttaccagggggaagagaataattacaagtgaccgcagtaga

SEQ ID NO: 26279 - DNA, 201 bp, Homo sapiens
accatgcctggccaattttttttatttcgtaacgcttagtgaccccatattattagtattattatttttatttatttatttatttatttatttatttatttatatttagacggagtttcgctcttgctgcccaggctggagtgcaatagtgtgatctcggctccccgtaacctctacctcctgggtacaagcgattctcct

SEQ ID NO: 26280 - DNA, 201 bp, Homo sapiens
gccaccatgcctggccaattttttttatttcgtaacgcttagtgaccccatattattagtattattatttttatttatttatttatttatttatttatttatttatatttagacggagtttcgctcttgctgcccaggctggagtgcaatagtgtgatctcggctccccgtaacctctacctcctgggtacaagcgattct

SEQ ID NO: 26281 - DNA, 201 bp, Homo sapiens
ggctggagtgcagtggcacaatctcggctcactgcagcgcctgcctcccaggttcaagctattctcctgcctcagcctcctgagtagctgggattacaggygcctgccaccacgcccagctaatttttgtatttcagtagagatggggtttcgccatgttggccaggctggtctcaaattcctgacctcaggtgatctgcc

SEQ ID NO: 26282 - DNA, 201 bp, Homo sapiens
ttccccaatccttgcagggtttgaattatgacaaacccagttgttacagggtctgcttaattttatttgaaaggtttctttttttttgttttttattttgttttttttttttgtagcttgaagaattaggaaaacaagaaagcaaattgtctttattttcagtgactctcttgagaaatttcagcctgcagaaccagacag

SEQ ID NO: 26283 - DNA, 201 bp, Homo sapiens
ggcacaatctcagctcactgcaacctctgcctcctgggttcaagtgattctcctgcctcagcttgccatgtagctgggattacaggctcgcaccaccacayctggctaatttttgtatttttagtagagacggggtttcaccgtgttggccaggctggtttcgagctcctgacctcaagtgagatgccctcctcagcctcc

SEQ ID NO: 26284 - DNA, 201 bp, Homo sapiens
tcaaactcctgacaagaagaaataggtaaactcaatagccatttataattttttttttgagacggagtctcactctgtcacccaggctggagtgcagtggygccatctcggctcactacaacctccgcctcctgggttcaagcaattctcctgcctcagcctcccgagtagctgggactacaggcacgtgccaccacactt

SEQ ID NO: 26285 - DNA, 201 bp, Homo sapiens
cccagctctgtgtaatgtctgaagattgtttcctctggtcctttcaggtagttttcttctagctcttttctaaaaactcatgtagttgcctcccacatatyccctgactagtattcagctgaagacttgcaggtaactctctgcaactttccagagcttttttgatacagctctatctgctgcagtaatctgcctattgag

SEQ ID NO: 26286 - DNA, 201 bp, Homo sapiens
agaataacgaacctttgtctcgttatctcatgcaactcacaacaaccctgtaaaatagattttatgatcactgtcagttttataggtaagtaaaaagagayacaggaggggttaagaaatatgcacaagatttcatagccaaagggtgaccacatgagagccaaaactgtctgctatccttaaatcctaggttatttcttt

SEQ ID NO: 26287 - DNA, 201 bp, Homo sapiens
acttcagaatctgcccattcgtgcaacctttgatccctccatccacccacaaacatttgttgaatgcccataaataagatccagtccatgcctcaaaaagytcatatgcacaggaaggatgggaatgtagggctgtggactaggtgttacgcagagatgtggcagctgaagggtgcacagaacagggagtgtgcacatcag

SEQ ID NO: 26288 - DNA, 201 bp, Homo sapiens
cttgtaaccagcagattatcgaaaaaagtaatgggatgtcactttcatgattaagtgacataggattgtgacttctgccttagtagaaaacttttttcctsctgatcttgatgaagtaagaagctatgttggagaggcccacacggcagcagcagagggtggcctctggccagcagccagtaaggaactatggccctctac

SEQ ID NO: 26289 - DNA, 201 bp, Homo sapiens
agctccctccctctgttcttctagtaatgcagaaaatattaatgtaatggcagatgtggcatagattgtcatttcaggaagaaaaccaagccataaccaaytccactgattgcattctaattataatgtgacctcctgttgctttgcatagaggcagtattcatttcagtacaccactgtaaaacttgcctagtcaacgac

SEQ ID NO: 26290 - DNA, 201 bp, Homo sapiens
gggcaacagtttatgagtattttgggataaaaactatgaagtgggactaatcacagggcagccagcaaggaaacatggacctcaatcccggagcccagtgkaactgaattctaccagcaacctgactggggctaagaagggacagattctaccccagagcctggtccagccagcaacttgattttggccttgtcagactca

SEQ ID NO: 26291 - DNA, 201 bp, Homo sapiens
cttgccattactcaagtggcatacaaaataaaattcaaatcaaaacagcaaaagagatgtgatccctctcttttgtgccttcttttaggcttaattctcakaagtagaacatatctaagaagagtaggcttttgagttccaggcatactacttctaaactcttcacttaaagctagcacattcacctgaccttgaaaaggt

SEQ ID NO: 26292 - DNA, 201 bp, Homo sapiens
tttattatacattaggtaaaaccctgcatgagattgcccccatgattggagaatttagttgttattggggtgtgcctgtgtgtgtgtgtgtgtgtgtgtgkgtgtgtgtgtgtgtgtagagagtgatgataagaagggatttctgcagacagtttcttatattgtcaattactcctctccctggccttatatgacactttc

SEQ ID NO: 26293 - DNA, 201 bp, Homo sapiens
aaagatcagatagttgtagatatgtggccttgtttctgagttctttattctgttccattggtctatgtatctgtttttgtactagtgctaggctgttttcrttactgtagccctgtagtatagtttgaagttgggtagtatgatgcctccagctttgttcttttttgcttaggattcccttggctatttgggctctttttt

SEQ ID NO: 26294 - DNA, 201 bp, Homo sapiens
tgtttgtttatttgtttttgtttttgtttattgagacgaagtcttgctcttgtcccccaggctagagtgcaatggcacaatcttgtttcactgcaaactcygcctcccaggttcaagcaattctcctgcctcagtttcccaagtagctgggattacaggcacctgccaccatgcccacctaatttctgtattttaagtaga

SEQ ID NO: 26295 - DNA, 201 bp, Homo sapiens
atttataaagaaaagagggtttgtttgtttatttgtttttgtttttgtttattgagacgaagtcttgctcttgtcccccaggctagagtgcaatggcacartcttgtttcactgcaaactctgcctcccaggttcaagcaattctcctgcctcagtttcccaagtagctgggattacaggcacctgccaccatgcccacct

SEQ ID NO: 26296 - DNA, 201 bp, Homo sapiens
gaaagacagtgtccacctgttttttctagaataggggttggcaaattacagcccataaaccaaatatggccagtggcttgttttttgtttgtttgtttttrcatatgagctacgaatgctttttacatttgtaaaaggtggcaaaaaaccacccaaaaaacaaagaatatttgagatatgtggtgaaggccatgtgtggtc

SEQ ID NO: 26297 - DNA, 201 bp, Homo sapiens
attaaatgttcagaaaagaacaaatcacagatccttggttccaaataagcacatgggaaattatgtgaatattattaaaacgtgagcttcttgtgacaatmgtgacattattggaacataaatggcagctcagtcagcgtctccttgtaactatatcaaagaaaagacagttgcagctttgttctctgtgtgacccacttg

SEQ ID NO: 26298 - DNA, 201 bp, Homo sapiens
ttattaaatgttcagaaaagaacaaatcacagatccttggttccaaataagcacatgggaaattatgtgaatattattaaaacgtgagcttcttgtgacartagtgacattattggaacataaatggcagctcagtcagcgtctccttgtaactatatcaaagaaaagacagttgcagctttgttctctgtgtgacccact

SEQ ID NO: 26299 - DNA, 201 bp, Homo sapiens
tgtttttaggcacttattctacttctccaaacttaagactagtgaatacatggtcctttgtgatttagctagagtagaaagctcagtcttatgaaatgaaaactgatatattttttaaagagaacgtactacgaagaaacaacaaagaattaataaaaatgttaaaatcagtaacatatcactaacaatattactaaagat

SEQ ID NO: 26300 - DNA, 201 bp, Homo sapiens
atgtttttaggcacttattctacttctccaaacttaagactagtgaatacatggtcctttgtgatttagctagagtagaaagctcagtcttatgaaatgaaaactgatatattttttaaagagaacgtactacgaagaaacaacaaagaattaataaaaatgttaaaatcagtaacatatcactaacaatattactaaaga

SEQ ID NO: 26301 - DNA, 201 bp, Homo sapiens
agatggtatagcatgcaatacacctaggccatatggtatagcctattgctcctgagctgcaaacctgtacagcatgttcctgtacagaatactgtaggcarttgtaacacaatggtaagtatttgtgtatctaaacaaaaaaaaagttacagtaaaatacgatattataatcctatgggaccaccatcttatatgtggtcc

SEQ ID NO: 26302 - DNA, 201 bp, Homo sapiens
ataaccctttggtggatgctttacaatggaggctgggtggggtctgggaagagtggcagtggctatgattattattttttagttttgggttttttttttttacactttgagaagattgctacagttatctggaaatctattgctcgggcaaaagcaggattgcgtgatacaatttaaaaggccggcagctgcatttcatcc

SEQ ID NO: 26303 - DNA, 201 bp, Homo sapiens
taatttttatattactacaaaaatatggtagctaccctttggctcaacaattttttagaacacaaaaatgcagtcaaagatgtatataaaagactgaaagyaattcttcatagccttgtttatatgaagggaaactgaaaacagcctaaatatttaacaataggtgaaatgattagaaatgtggtatattcagagcaggca

SEQ ID NO: 26304 - DNA, 201 bp, Homo sapiens
ttgtagctgcccccttcttgtttcgaagtctgccaaatctctcctcctgtggtctgtatcaggttctttcagtgcatccaggacattcagagatatccacyggactgtagtttttcattgaatgcacctattggaaaggggcttgaattttatgcatttatcagtttcggtaatcaccgagtgaaattctcgctttgcacg

SEQ ID NO: 26305 - DNA, 201 bp, Homo sapiens
aacaaatcaattcagccttcagaggggcatccattgccttgtgattatgtttgtgtaaagtcttggggtctttgatcaaagaatggcatttcaggccaggycctaatcctcactgccttaagatgtttaaatgggttaaaaaaaaaaaagttgataacagctgggatttaaatttgcctttgcccagcttttgttttgaaa

SEQ ID NO: 26306 - DNA, 201 bp, Homo sapiens
aaacaaatcaattcagccttcagaggggcatccattgccttgtgattatgtttgtgtaaagtcttggggtctttgatcaaagaatggcatttcaggccagkccctaatcctcactgccttaagatgtttaaatgggttaaaaaaaaaaaagttgataacagctgggatttaaatttgcctttgcccagcttttgttttgaa

SEQ ID NO: 26307 - DNA, 201 bp, Homo sapiens
tctctgtggcgttgtctgatgcatattgagaactggtgggttattttgaactggctctattttttttttccagagcgccctcaggtgctcatggaacatasttctcagcaatgccatttcatgttcagttcagattttccagcacaactaaatttagtagccttgctggagggaggaagtggagcagagctacctacctga

SEQ ID NO: 26308 - DNA, 201 bp, Homo sapiens
gaaagatacccttgtctcattttcaatctcagcttttaattttattatgtctaatgagtgctatagaactgttatcattatcctttatcaattagaaaagkcatcttttcttttgttatgagttttcaacatcaatgggtattgaattttgtcaaatattaaatattttgtgcctctgtagaggtgatcatttgcttttct

SEQ ID NO: 26309 - DNA, 201 bp, Homo sapiens
acctctgacttctgacccttcctccttaagcagcctgatatactctgcaggctgcccttctgatggccacagatgacaggaagagttgctgaaaaaaaaaatatgggcttaaccaacattcacagaccaactccatgcctggcagtccctgagccacatctttgacttatgatattagaggagtattatgggccattggtt

SEQ ID NO: 26310 - DNA, 201 bp, Homo sapiens
ttttatttcaaggatgtgttgctatggggcacccttcatttgctggcagtaacctgaaacctgggatgaaatgaacatacctgaaatctctgtcactcttstccctaaaggtcatcagaggagttgcttctacaacctaagaggaaggatcattaatttcttaatctgtctaagggtagatcgtcacttacctggaagctg

SEQ ID NO: 26311 - DNA, 201 bp, Homo sapiens
tgaacttttatttcaaggatgtgttgctatggggcacccttcatttgctggcagtaacctgaaacctgggatgaaatgaacatacctgaaatctctgtcactcttctccctaaaggtcatcagaggagttgcttctacaacctaagaggaaggatcattaatttcttaatctgtctaagggtagatcgtcacttacctgga

SEQ ID NO: 26312 - DNA, 201 bp, Homo sapiens
ccatgaacttttatttcaaggatgtgttgctatggggcacccttcatttgctggcagtaacctgaaacctgggatgaaatgaacatacctgaaatctctgwcactcttctccctaaaggtcatcagaggagttgcttctacaacctaagaggaaggatcattaatttcttaatctgtctaagggtagatcgtcacttacct

SEQ ID NO: 26313 - DNA, 201 bp, Homo sapiens
tcctggattcaagcaattcttctgcctcagcctcccaagtagctgggattataggcatccgccaccacgtccagctaatttttgtatttttagtagagacrgggtttcaccatgttggtcatgctggtctcgaactcctgacctcgtgatctgcccacctcggcctcccaaagtgctgggattacaggcatgagccaccac

SEQ ID NO: 26314 - DNA, 201 bp, Homo sapiens
tgtctattcacattttttggcttttttttttgagacagagtatcactctgtagtccaggctggtgtgcagtggcgtgatctcggctcactgcaacctccayctcctggattcaagcaattcttctgcctcagcctcccaagtagctgggattataggcatccgccaccacgtccagctaatttttgtatttttagtagaga

SEQ ID NO: 26315 - DNA, 201 bp, Homo sapiens
ttacagtgatcctgtgggtgtgaaacagtatctcttttggctttcatttgtactactctaaagactaatgaagttgagcatcttttcatgtgctctttgaytatttgtatatcttctttaaaaaactgtctattcacattttttggcttttttttttgagacagagtatcactctgtagtccaggctggtgtgcagtggcg

SEQ ID NO: 26316 - DNA, 201 bp, Homo sapiens
tgagtgactcacatgaaaacctcatttttcagtgtttccatttcctcatctgttatttaagggtgttgatcacagagagtatgctctggtctacatttttktcatttagtaaatcataatcatcacattcttttgggtgtttctttaaagcatttggcctccattttctcaggtgatatttccaatacctaagtaatgtag

SEQ ID NO: 26317 - DNA, 201 bp, Homo sapiens
caatggcgggcacccctcccccaacctcgctgccgccttgcagtttgatctcagactgctgtgctagcaatgagcgacacacggtgggcataggaccctcygagccatgtgtgggatataatctcctggtgtgccattttttaagcccattggaaaagcacagtattagggtgggagtgacccgattttctaggtgccatc

SEQ ID NO: 26318 - DNA, 201 bp, Homo sapiens
gaggcaggcaggcctccttgagctgtggtgagctccacccagttctagcttcccggctgctttgtttacctaatcaaacaactaactgggcaatggcgggmacccctcccccaacctcgctgccgccttgcagtttgatctcagactgctgtgctagcaatgagcgacacacggtgggcataggaccctccgagccatgtg

SEQ ID NO: 26319 - DNA, 201 bp, Homo sapiens
gcacatcaccttaactggtgcccctgacctatttttggtgcatgtccttgagtttcattttggtaatggaagaaatatcaagcagaagaaaagataaatasccagagctggtcaacatgatctactgtgtttgaacaggaatattggaacataacttctaagaatgccatttcaattatttgtaaaatatttaaatagtat

SEQ ID NO: 26320 - DNA, 201 bp, Homo sapiens
ctcctttgctttttatacatgcttcttacagtatttgcctgtttacctataaaaattctattcttccttcaagtccaagcttaaatgccatctttttcatraagcttttcccaatccaccctgttaaatcatcacctcttctgcaacacacgcctgttatacatttgtattattctgctttatgtagcataattttatgtg

SEQ ID NO: 26321 - DNA, 201 bp, Homo sapiens
ggtgtttgtgggagatgggcaacactcagctttgtggcctacaactctggaatacacactcagcctgtaaggggactggctggctgctgcctttccctggmttcagacatccaagtacctgtaggcatgtggggagcttgcaaacaacaagatgtaaagctttggtagcaatgaagattgcttgttggttttgctgcttct

SEQ ID NO: 26322 - DNA, 201 bp, Homo sapiens
gaacatgtaaggagctggaaaaaggccttttttattaactttcaaagtataaagttggagaggtcagaacattccacaggttttagatcatggttccaagyggtcccagcaagctaaaacactgcctgacacctatcagacaaaatttaataggattgtaagttagaagtcctagctttatattttcaaaaatctattatt

SEQ ID NO: 26323 - DNA, 201 bp, Homo sapiens
aagacaatgaagatcttcccgctggagattcttcattagatgccctactttaccatattttaaaatgggcagtttgtcaccgatgcattaaagggctgtgmggagtggagaaagcacattgggctggaaatcagatgacctggattctaacccctgcctgtccattaaccaacccggtgaccccgggcttttctagtcttg

SEQ ID NO: 26324 - DNA, 201 bp, Homo sapiens
ttttcaggctgcaagtgagtgtgtaaggtcacttagctcataatatggtgacacatttcacaggtctcttgatcagatgaggaagcacatagtatcattcrgccttttatacaggtccactggttacctgttcttggtaacagggtgaaggctggggtaacaagtcctgccgggagactgtaagaggttgcatggcactgt

SEQ ID NO: 26325 - DNA, 201 bp, Homo sapiens
aaagacaatgaagatcttcccgctggagattcttcattagatgccctactttaccatattttaaaatgggcagtttgtcaccgatgcattaaagggctgtrcggagtggagaaagcacattgggctggaaatcagatgacctggattctaacccctgcctgtccattaaccaacccggtgaccccgggcttttctagtctt

SEQ ID NO: 26326 - DNA, 201 bp, Homo sapiens
catgcttggcaaaaagtattatgtaagacccaagtagacaaatggctgttaacagtagaaataaccttttgtttaattagaaaataggagctatatgggayaataaaaatggttactgatgccctctgtcactgtttaataaatacgatcgcgctagagataatgggaagtgttatttatttgtgcaatatcacagacttg

SEQ ID NO: 26327 - DNA, 201 bp, Homo sapiens
tacttatctgtcaaatgaagatggtggtgcagttttcaggctgcaagtgagtgtgtaaggtcacttagctcataatatggtgacacatttcacaggtctcwtgatcagatgaggaagcacatagtatcattcggccttttatacaggtccactggttacctgttcttggtaacagggtgaaggctggggtaacaagtcctg

SEQ ID NO: 26328 - DNA, 201 bp, Homo sapiens
gaagctaagaacatgaccccaggtgggacagatgggatctgagtccaaatgtgatgttcttttccttgtattcctctccttcctaactgtatgacataaaygtaaagtatcacaagagcttatgctgctcctcttcttggtaccaagctcggccttcactttcttatgaaaaccaaaagcagttttcaaagaatcatgcac

SEQ ID NO: 26329 - DNA, 201 bp, Homo sapiens
caccacattctcctctgggaccagtagagaaaacagtgatattatcagcaaaagcctaattacactacccaggaaaaacaagaaacctcccaaagtcatgkccaagccaagcaaagctctgggagaaattcctgggacattcagcaagagcaacctaaaagggcttttgagcagaaattgaagccaaataaaaatactgca

SEQ ID NO: 26330 - DNA, 201 bp, Homo sapiens
atcttgtgctcttttcacttctgtaagaaagggacactagctactgtttttctcatttcagttttggatgaattaagctagaaaacatttatatttgaccycttttgcccctctcccccaccccaataaaagcaagaaataactaccattggccaccacattctcctctgggaccagtagagaaaacagtgatattatcag

SEQ ID NO: 26331 - DNA, 201 bp, Homo sapiens
attagcttttgctgggtaaaaaactactccccacaattagtgacttaaaacagcaaatatttctttagttcccagttgtgcagattggcagtttggactcrgttggatggttctttgcaatcagagcggtcctggctcttcttggctggtctttctcacaggtctttggtctcagctggggaccctaggatggcttatatg

SEQ ID NO: 26332 - DNA, 201 bp, Homo sapiens
tgttttccaacttggttccattctccccgtcactttcaggtacaccaatcagacgtagatttggtcttttcacatagtcccatatttcttggaggctttgbtcatttctttttattcttttttctctaaacttctcttctcgcttcatttcattcatttcatcttccatcactgataccctttcttccagttgatggcatc

SEQ ID NO: 26333 - DNA, 201 bp, Homo sapiens
ttggcaggatatgaaattctgggttgaaaattcttttcttaagaatgttgaatattggtccccactctcttctggcttgcagagtttctgctgagagatcmgctgttagtctgatgggcttccctttgtgggtaacccgacctttctctctggctgcccttaacgttttttccttcatttcaactttggtgaatctgacaa

SEQ ID NO: 26334 - DNA, 201 bp, Homo sapiens
accataccataccataccataccatcctatcctatcctatcctatgctatgctatgctatgctatgctatgctatgctatgctatgctatgctatgctatrctatgctatgctatactatactatactgaaatgctatagtctcttaaaaataaagcaaatccaatcaagagtattcatatatttgtgttccaaaatatgc

SEQ ID NO: 26335 - DNA, 201 bp, Homo sapiens
agtttcttcctagccttgatagtctttacaatttggcatgtttttgcagtggctggtaccggtcgttcctttccatgtttagtgcttccttcaggagctcwtttagggcaggcctgctggtgacaaaatctctcagcatttgcttgtctgtaaagtattttatttctccttcacttatgaagcttagtttggcaggatatg

SEQ ID NO: 26336 - DNA, 201 bp, Homo sapiens
aatggccttctttgtctcttttgatctttgttggtttaaagtctgttttatcagagactaggattgcaaccactgcctttttttgttttccatttgcttgrtagatcttcctccatccctttattttgagcctatatgtctctgcacgtgagatgggtttcctgaatgcagcacaccgatgggtcttgactatccaatttg

SEQ ID NO: 26337 - DNA, 201 bp, Homo sapiens
gattgcactgtggtctgagagacagtttgttataatttctgttcttttacatttgctgaggagtgctttacttccaactatgtggtcaattttggagtagrtgtggtgtggtgctgaaaagaatgtatattccgttgatttggggtggagagttctgtagatttctattaggtccacttggtgcagagctgagatcaattc

SEQ ID NO: 26338 - DNA, 201 bp, Homo sapiens
tttctgccttcattttgttatgtacccagtagtcattcagaagcaggttgttcagtttccatgtagttgagcggttttgagtgagtttcttaatcctgagytctagtttgattgcactgtggtctgagagacagtttgttataatttctgttcttttacatttgctgaggagtgctttacttccaactatgtggtcaattt

SEQ ID NO: 26339 - DNA, 201 bp, Homo sapiens
tagttatttcttgccttctgctagcttttgaatgtgtttggtcttgcttttctagttcttttaattgtgatgttagggtgtcacttttagatctttcctgstttctcttgtgggcatttagtgctataaatttccctctacacactgctttgaatgtgtcccagagattctggtatgttgtgtctttgttctcgttggttt

SEQ ID NO: 26340 - DNA, 201 bp, Homo sapiens
ttcttctctcttttcttctttagtagtcttgctaacagtctatcagttttgttgatcttttcgaaaaaccagctcctggattcattaattttttgaagggwtttttgtgtctctatttccttcagttctgctctgatcttagttatttcttgccttctgctagcttttgaatgtgtttggtcttgcttttctagttctttt

SEQ ID NO: 26341 - DNA, 201 bp, Homo sapiens
attcttctctcttttcttctttagtagtcttgctaacagtctatcagttttgttgatcttttcgaaaaaccagctcctggattcattaattttttgaaggkttttttgtgtctctatttccttcagttctgctctgatcttagttatttcttgccttctgctagcttttgaatgtgtttggtcttgcttttctagttcttt

SEQ ID NO: 26342 - DNA, 201 bp, Homo sapiens
aaccctaataaccccttgtcatctctgttatgaggccaaggttgcacgtttagaataggtttctggaaggctaagctgcagagccataggcagatgtgctsccactcctgcaggcttattcacgaggtggagaaaaattctcttccaagtccctggcttcccattgcaaagtaaaatgatctctggtttagagctactcaa

SEQ ID NO: 26343 - DNA, 201 bp, Homo sapiens
tagattttctagtttatttgcgtagaggtgtttatagtattctctgatagtagtttgtatttctgtgggatcggtggtgatatcccctttgtcattttttattgcgtctatttgattcttctctcttttcttctttagtagtcttgctaacagtctatcagttttgttgatcttttcgaaaaaccagctcctggattcatt

SEQ ID NO: 26344 - DNA, 201 bp, Homo sapiens
ttgttttttttttcttagcaatagcttcaagaacgaagaagattaaacaaacactatcgaatgaaagaaccaagcccagtacctggcacataataagtgcrtagaaagcattacttgaaattagatttactgcttttttgattaaaaaatactcttccaatttaatgtcttaagggttctctataaagagtacaaattata

SEQ ID NO: 26345 - DNA, 201 bp, Homo sapiens
gcttctcatgctgtttgcccaattcagcactacagattttgctctctgaaattccagcttcatcccataggagaggtgcagatttctatttctcatctctygtctgttttaattctttgggagaggagtcctgagtactaaacagaaaggtacgcatggagaaatgtaaaacatattttcaggcacctttgtgaaaggaaa

SEQ ID NO: 26346 - DNA, 201 bp, Homo sapiens
cctgtctttctgtatcaacatctttagctgtggctttcattttctaagacacttcatgatataaggctggagttccagtcatatcatccaagttttaagcrggaaggaagaagaaggggagaggaaaagaaaaagcacatgctagctagttgtccgtcccatttttatgcagggacttatttgtttacattgctcagcact

SEQ ID NO: 26347 - DNA, 201 bp, Homo sapiens
agtactgcatgaatacattttattgatttactgatttgattacaaatatgatcaccacacagaaccaactggctgaaaagaattgtgccctgactttggcytcatcagcacaaggtcaaaactaaccaatttatttaagtatctaaaggatagggcatcatgtgaattatattaactatcaaataagcctagtttgcttat

SEQ ID NO: 26348 - DNA, 201 bp, Homo sapiens
ccataagctttggggaatggagaagactggaaaggagatgtggaacacaggatagaaggcacaagaggctggagcttatcttgactagaccacagcccacrcccgagaccgccctatgggcatgggccactggagggtaatcagagactttggtgtgacgcctccttaaaaatctcttcccactttcttctcccaaaataa

SEQ ID NO: 26349 - DNA, 201 bp, Homo sapiens
gggacaaacatatggactgacttaagaggtccagtgaccccaatgagcagccatagtacatttaaattatttggggtggtaaagatattttagacccaagmggtttcatcatcaagaacctttttcaaggaggtgtgtagacctaacaccttcattatcagctgacgccataagctttggggaatggagaagactggaaag

SEQ ID NO: 26350 - DNA, 201 bp, Homo sapiens
agggactggatgttaccatgatccatacaaacacctgcagagctcttttgtatgtagtggttgatttctggggtccttgctttgagttatctctccttcartatcaagataaggatttgatctcttctaaagtgtcttgtaaatgacttctttaaatgatttttgttccaaagaagggtgtctctctgaacatggagccag

SEQ ID NO: 26351 - DNA, 201 bp, Homo sapiens
attacttgcataagaggggattggggtgggatggtcatatgggtttgtaggcatctacaaacagcatgctgtaaagtcttatttcttgagttttcaccagkagcaatagtcttattgctaatcgacttcatcataaaaattgtacttgatattggatagcatgccacatattaccaaccactttcacgtgtatattttttc

SEQ ID NO: 26352 - DNA, 201 bp, Homo sapiens
cataaatttagcatttgcagctataagtttgtcattcttttcttgaaataagataagggtactattataaaacagcagaaggctgaatgtgagagcagccracatattgttgactgattcatctggggcatttagttcttcaaaatggaaaaacaaaatagggtctaaaaagcaaacacagtaaattaaaggaatgttatt

SEQ ID NO: 26353 - DNA, 201 bp, Homo sapiens
ctgaggctcctaacacttctttcctgacatctgcttccattatttttttgtcatggggcagtcagggatgcctgggctctaacactgtttgggtatccggrtacacaaggtaggatgaagagagaaaggaatgaagagtagaaaaatgaacataatagaattatgagcttgaatctcacataggctcacatgtccaggcat

SEQ ID NO: 26354 - DNA, 201 bp, Homo sapiens
aatgcttccagtttttgcccattcagtatgatattggctgtgggtttgtcatagatagctcttattattttgagatacgtcccatcaatacctaatttatygagagtttttagcatgaagtgttgttgaattttgtcaaaggcctcttctgcatctattgagataatcctgtggtttttgtctttggttctgtttatatgc

SEQ ID NO: 26355 - DNA, 201 bp, Homo sapiens
gaataccctttatttccttctcctgcctgattgccctggccagaacttccaacactatgttgaataggagtggtgagagagggcatccctgtcttgtgccygttttcaaagggaatgcttccagtttttgcccattcagtatgatattggctgtgggtttgtcatagatagctcttattattttgagatacgtcccatcaa

SEQ ID NO: 26356 - DNA, 201 bp, Homo sapiens
aatagggaatcctttccccattgcttgtttttgtcaggtttgttaaagatcagatagttgtagacatgcggcattatttctgagggctgtgttctgttctrttggtctatatctctgttttggtaccagtaccatgctgttttggttactgtagccttgtagtatagtttgaagttaggtagtgtgatgcctccagctttg

SEQ ID NO: 26357 - DNA, 201 bp, Homo sapiens
tttctggtggttgctctcacactgttctgaggacagctgaagtgccctggaccccatgtgtctgttcattttccaaggctcaggtaaaaagccgtgccttycacgaagccattctggtttccaccaactaaaagtgagagtttgcaccctgagttcctgtgtaacctcctatctctgttccacattggcacttggcacttt

SEQ ID NO: 26358 - DNA, 201 bp, Homo sapiens
gttgccattgcttttggggttttaaacatgaagtccttgcccatgcctatgtcctgaatggtattgcctaggttttcttctagagtttttatggttttagktctaacatttaagtctttaatccatcttgaattaatttttgtataagttgtaaggaagggatccagtttcagcttctacatatggctagccagttttccc

SEQ ID NO: 26359 - DNA, 201 bp, Homo sapiens
ttaggagaagatcttatgtcagccacaaacccccagtgcaacaacactgcagaactctaagaaacctttcaagacttctggttgaacaccttcacgtcacrtaggaggaactggggctgaaaggaacaggaagccactggaagcctgtagctggttaggggcagagacacatctggaactcagttttctaggccctgcccc

SEQ ID NO: 26360 - DNA, 201 bp, Homo sapiens
accatgcctagcaggaaattgtcttttaggggctcttggctgctgactctgccagccctgtgtgaggctgagtgggtaataccagcttcctgttcagataygtggggccctgttgaaaccctcctgcattttcactgctgctagtaatttagttcctgaagggtctatgtgcccaaatgaaattggaagtagctttattta

SEQ ID NO: 26361 - DNA, 201 bp, Homo sapiens
gcctgttcactctgatggtagtttgttttgctgtgcagaagctgttgagtttaattagatcccatttgtcaattttggcttttgttgccattgcttttggkgttttaaacatgaagtccttgcccatgcctatgtcctgaatggtattgcctaggttttcttctagagtttttatggttttaggtctaacatttaagtctt

SEQ ID NO: 26362 - DNA, 201 bp, Homo sapiens
aagaggatgcttggcttcatctgccatgtggtctttgaacccaggactggggagatgaaggaatatttcattaatccttgcaccatttagtctccttatcraatggcccaggcctattctttgttacagacaacaatgaagggtgcctttaagaaatctccagtgagtaccgaggcattgcagattaggtcagtagaactg

SEQ ID NO: 26363 - DNA, 201 bp, Homo sapiens
ccaagtctttgctattgtgaatagtgccactgtaaacatacgtgtgcatgtgtctttatagcagcatgatttattatcctttgggtatatacctagtaatrggatggctgggtcaaatggcatttctagttctagatccctgagaaatcgccacactgacttccacaagggttgaactagtttacagtcccaccaacagtg

SEQ ID NO: 26364 - DNA, 201 bp, Homo sapiens
agtatgtgtattgtataacacaacttacataaagacacacagaagacacacacaacacacatacaaacacctacatgcccatattcaacacacatgcacgmaaaacatgcaacacacattagtgcctgcacacatgtgcacatgtgcacacattgagcaacacaataaagatgtaacttttccatctcccaattcattcta

SEQ ID NO: 26365 - DNA, 201 bp, Homo sapiens
tgtgtgccaccacacctggctaatttttgtattttttggtggagatggggtttcgccatgttggcgaggctggtcttgaactcctgatctcaagtgatccrctcaactcggcctcccaaagtgctgggattacaggtgtgagccactacacccagcctgaagcctagttttaacatgaactatttggcacccttaagcaag

SEQ ID NO: 26366 - DNA, 201 bp, Homo sapiens
actgaagtccatcgtaaacaacaccaaaaacaacgaaatgcatttattttaaaactactattttgaaaaaacacagtccctatggcaaaaaaaaaaaaaacaaacaaaaaaccctaaactttgacttggggtgacaatgtgtcggaatcctggcaaggctgaatgtccctttaagagacttgatcagagagggatccatca

SEQ ID NO: 26367 - DNA, 201 bp, Homo sapiens
gtgagggagggggcttgttggctctgcagtgggagtgctcgcagcatctctccacctggtctgtggtcttggtggacagggtcaagcaggctcaaaaggayaggcctgtgaatcatgttagtggggagctcttgtgagccccactagagctgtaaggacagagggacccttccggaggagtggctgctcatagaagttgtg

SEQ ID NO: 26368 - DNA, 201 bp, Homo sapiens
gactgaagtccatcgtaaacaacaccaaaaacaacgaaatgcatttattttaaaactactattttgaaaaaacacagtccctatggcaaaaaaaaaaaaaacaaacaaaaaaccctaaactttgacttggggtgacaatgtgtcggaatcctggcaaggctgaatgtccctttaagagacttgatcagagagggatccatc

SEQ ID NO: 26369 - DNA, 201 bp, Homo sapiens
aaatgactgaagtccatcgtaaacaacaccaaaaacaacgaaatgcatttattttaaaactactattttgaaaaaacacagtccctatggcaaaaaaaaamaaaacaaacaaaaaaccctaaactttgacttggggtgacaatgtgtcggaatcctggcaaggctgaatgtccctttaagagacttgatcagagagggatc

SEQ ID NO: 26370 - DNA, 201 bp, Homo sapiens
aatcatggattattgtggaaatgtcttaggcctgaacattgtcaacctccaagagcagagggcatggcactgtctacgtgggtatgaaatgccccataacygtaaatggggtctgctcacaccacatttgctatttatactttatactagatagagccctctagctcgatggttcttttcttcccttttttttttttttcc

SEQ ID NO: 26371 - DNA, 201 bp, Homo sapiens
ctggacttagtcttacctgcctagcgaaagttgggctgtgttcccaacagtgggagtgaaaaagtagcaataccgtatacccacagctgaattgatttcakcccccaccctgaggtctcacaggagcagactggactcatcagcgcctgtcagtcatggcctatgctcattgctaagccttttgtcttactggaccaagat

SEQ ID NO: 26372 - DNA, 201 bp, Homo sapiens
aagactgggtcagcactgagcaaaattgtcaagggagatgggactatccagtaaccactttcccctctcatgcctggcatacctccgattgccccagactytcatgcagcccctgcactgaggttggttccctgtggctaaattccacccctcccaaatcagagcctacctatctccttaaagagtcagtgcccatttgtc

SEQ ID NO: 26373 - DNA, 201 bp, Homo sapiens
gtgaccttgttacttaacttctctattcctcctttcccttatccttaaagtagggataatactgaagtgtctatcttgcagaaccatgctgaggcttagarccacaggcatttacttgtatccttgacacccatgcagcaagtatgtgctacgtggagaccattattagtattaacccaaacttaaaacggctaaatatag

SEQ ID NO: 26374 - DNA, 201 bp, Homo sapiens
ttgcaaagacacaacttccggttctggtgggcagaatggggtctgttgggaaggttccagcaaaaggcaactcttcttgaccttgtaccattgaaagtcamagagctattaaagtagcgaccagggcattcagaagagctgtgactaggcataatgtgccttttgagggtgaccattcatttgtccatctaattagcactc

SEQ ID NO: 26375 - DNA, 201 bp, Homo sapiens
tgtgttttgagaaaaagtttttggaatcaggagcatctcaattgcatcccatgcccttggaaaatggaagggaaaatctgaggctcctaacacttctttcytgacatctgcttccattatttttttgtcatggggcagtcagggatgcctgggctctaacactgtttgggtatccgggtacacaaggtaggatgaagagag

SEQ ID NO: 26376 - DNA, 201 bp, Homo sapiens
acgtttactatgggaaaaactcagagggcaacaggtttatccgagatgaccagctctgaagccaacttctgtataccttcacccatttcatgaaaataaawtcaaaagggaaatcaaaaataaagaaaacgctaaagaaaaaacaatagcccacattgcctctctttgggaaaagctatgacttcagcttttggtaccttc

SEQ ID NO: 26377 - DNA, 201 bp, Homo sapiens
taatggcggtaagatggggtgcactgataaatacaaaagctaaagtgattcttataaatgcactatgtctctttctatttaaataaatcagacagaatacmtagatcctggatggtgttgagtgtcccctccccattttcctctatagccctgagctgttttctttccaaatctgaagctttgaaatgagcggctatttac

SEQ ID NO: 26378 - DNA, 201 bp, Homo sapiens
gacaacaggtgacctctatttggaattgtcaacaaacattaataggccttccaaaacacatacgctgtaatataagggattggttgcctgaagggagggcygggtattcagcagcactggggcagctcttacaggatgtcagcagacgtggttaattggtaatgattagggctgtctgcaagctgattccctaagtttggt

SEQ ID NO: 26379 - DNA, 201 bp, Homo sapiens
tagtagccctgcactgggttcctccttggtagccagctccaacaggtactgtgggacttgtttcttgtgctagcatagcctcgacctcaaggaagaagcartcttggggagactgtcacaagctcaaggtggacaaagattctctgtctgaaggctcacaattcaaactggtcatttttgcagaatgcttctctttcctcg

SEQ ID NO: 26380 - DNA, 201 bp, Homo sapiens
aaagcaactgcatctctgacaggtaatcaagaattgggtgactctgagttctgatttggcgtaatgatatcaacatgttcacacacacacacacacacacattccttgtatacacataacacacatacaagatacacacacgaagtagacacacaacatgtagtatgtgtattgtataacacaacttacataaagacacac

SEQ ID NO: 26381 - DNA, 201 bp, Homo sapiens
taaagcaactgcatctctgacaggtaatcaagaattgggtgactctgagttctgatttggcgtaatgatatcaacatgttcacacacacacacacacacacattccttgtatacacataacacacatacaagatacacacacgaagtagacacacaacatgtagtatgtgtattgtataacacaacttacataaagacaca

SEQ ID NO: 26382 - DNA, 201 bp, Homo sapiens
attttgttttccctgggagccagactatgtatttacttcaagttttattaaatgagttataaattttcccagcaatttactcatagctcaagaggtttaayttgcatgtgttgccttttacaatatgcttttcgtaatgttgcagatgcttcttccccagcttcagtaaacaacaggcactccgccaggtttttgactgaa

SEQ ID NO: 26383 - DNA, 201 bp, Homo sapiens
ctggggagctgagtcgaattcctgaggggcaggagcaaagattttctgaatcttctttttggacatctttttaatatttttttccacacgcaaaataaatmaataaacagacatttctgcctaagtatcaggtttgcactggtcctaattagaaagtagtgttaataggatgacagaaagcatttgctagggcccccaggg

SEQ ID NO: 26384 - DNA, 201 bp, Homo sapiens
gggaggctgaggcgggcagatcacgaggtcaagagatcgagaccatcctggccaacttggtgaaaccccagctctactaaaaatacgaacattagctgggmatggtggtgggcatctgtaatcccaggtactgaggaggctgaggcaggagaatcactcgaacgtgggaagtggaggttgcagtgagccgagaccacacca

SEQ ID NO: 26385 - DNA, 201 bp, Homo sapiens
caggtaaacttcccctaagggaggcaacgtggctgtgaactccacaaggctttcatattctcttctcatcaacctcagtcaaaaaagagagatttcctctyaccagcagttccacaagatcccagactgggtcttccagtccctgattgggccacatacccaccaacctcagcagtctgtgagagatgacaccctggttgg

SEQ ID NO: 26386 - DNA, 201 bp, Homo sapiens
tattccatttattctctactgtctgtgtattggggcccattttcccatattctctataaccctgggtattattttcttgccaccttttgctattttgatgktttttttttttaaagaaaaacctttgttttaattcatattgcattgctctaatttctagtgagactgaacatttcaaaaatgtgcttattagccatgcac

SEQ ID NO: 26387 - DNA, 201 bp, Homo sapiens
tggagggaggtgggaggagtttccctggggcacatcagggtacttgtacaggaggatgtgaatgcacactgggcaggaaaagacccgccaaaggaagatgygatgaagcgaaaaggggtcctggagaagagctgttgatgtgatggttcaatgaagatggagaaacaaggaaaatcaaacctgtgcattgctttgggtggc

SEQ ID NO: 26388 - DNA, 201 bp, Homo sapiens
aggggtcctggagaagagctgttgatgtgatggttcaatgaagatggagaaacaaggaaaatcaaacctgtgcattgctttgggtggccagactggatgayaaagccaacatggtagaaaggctcttgtatcaacaggagttggtcaagatgttttctagacagcattttaaattcagagcatcccttttattctaggctt

SEQ ID NO: 26389 - DNA, 201 bp, Homo sapiens
gagcctgggaggtcgaggctgcagtgagctgtgattgtgccactgcactccagcctgggcaacacagtgagaccgtgtctcagaacacaaaaacaaaaacraaacaagtcaatatatgtaaaacacagaaaggtgctgatgagtggtctacaaatggaaaccattgatactgttattgttgttagtgttcttccagtgtgc

SEQ ID NO: 26390 - DNA, 201 bp, Homo sapiens
ttgacagattaaaagatgttgtaccttctttccactgggggagggaggattggcatttgcaatgctcgttgtcatatgaatggctccaagaagtttggcartaatgaaagcttttagatgttgtttaacctggcattacaactagcttatgtgatgatggtgtacttctttcatgacactagtatagtattgaacatggtt

SEQ ID NO: 26391 - DNA, 201 bp, Homo sapiens
agtactttgggaggccaaggcagtcagattgagcccaggagtttgagaccaccctgggtaatatgactaaactttatttctaccaaaaaaaaaaaaaaaaattagccaggtatggcggctcacacctgcggtcccagctacttgggagactaaggtgggaggatcacctgagcctgggaggtcgaggctgcagtgagctgt

SEQ ID NO: 26392 - DNA, 201 bp, Homo sapiens
tctcctgtcttttgcctctttgggttttctcctcaagaactagtcacagtaattctgttctttggagtctgggaagactgactgagattcactttactggyatcatcatctactggtggtacccaagatgattttggaggtgcatagctacatcattaattgtgtgaagaaatgctttttccctctcagttctcctttctg

SEQ ID NO: 26393 - DNA, 201 bp, Homo sapiens
tagtactttgggaggccaaggcagtcagattgagcccaggagtttgagaccaccctgggtaatatgactaaactttatttctaccaaaaaaaaaaaaaaaaattagccaggtatggcggctcacacctgcggtcccagctacttgggagactaaggtgggaggatcacctgagcctgggaggtcgaggctgcagtgagctg

SEQ ID NO: 26394 - DNA, 201 bp, Homo sapiens
ctagtactttgggaggccaaggcagtcagattgagcccaggagtttgagaccaccctgggtaatatgactaaactttatttctaccaaaaaaaaaaaaaaaaattagccaggtatggcggctcacacctgcggtcccagctacttgggagactaaggtgggaggatcacctgagcctgggaggtcgaggctgcagtgagct

SEQ ID NO: 26395 - DNA, 201 bp, Homo sapiens
accccttctcccaccccagctacctctgcttcttgctttctctctacagcctcagagtcctccacgacactctgcagccctcatttcccatgcaggttgcrtgccttccattgcgggaatccaactccacaagggctggggtcccatccgttgtagtcattggggtatccctggcatctgacacacagggatgctcaataa

SEQ ID NO: 26396 - DNA, 201 bp, Homo sapiens
tgtagacttagaattgtaataaataatctacagatctctgtatatgaggcctaaagagagaactcgggtatggcaagcatctcagagcaggattggaaaawacatatacatatgtatgtacatatacacacatatagagatacatgtatttttggtgtgtgtgcataattgctggctgtcgagtggaagatagggaatata

SEQ ID NO: 26397 - DNA, 201 bp, Homo sapiens
tattgattttatttttgcttgttgcatttttacttaacaggatatcttgcatatatatgtatatatatatgtatatacatatttatatagttatatatgtrtatatatatgtatatacatatttatatacagttatatatatgtatatatatatacacacacacacacacacatatacagtatatcctgggaatcactcta

SEQ ID NO: 26398 - DNA, 201 bp, Homo sapiens
ttagttttaatttcttcaagataaggattttggtttgatttgattcaacagttatttacaaacttcctattgtgtgtaagacttgacattcttcactactyccagcctctcccagggtgaagaggcaaaatgtacccccttccctcttgcctagcccatccaggaaggccgtcaagaaagggcaagttatataccacacga

SEQ ID NO: 26399 - DNA, 201 bp, Homo sapiens
agtagctgagtttattgattttatttttgcttgttgcatttttacttaacaggatatcttgcatatatatgtatatatatatgtatatacatatttatatmgttatatatgtatatatatatgtatatacatatttatatacagttatatatatgtatatatatatacacacacacacacacacatatacagtatatcctg

SEQ ID NO: 26400 - DNA, 201 bp, Homo sapiens
atgaaaggtgaacagaggcagcattttagctccttctgcaccctaggattgtacagtgccacagtctccagtagcatgctctgaacatgatcactgtatcrctcttccagatggaaggtgatcctgcaatcagtgggctttgcttagcacagtgtaggctacagtcagaaacctgactctgcgagaacattccttaggtgc

SEQ ID NO: 26401 - DNA, 201 bp, Homo sapiens
aatgatacagtactgaagtttgcgaatgatgtacattcatgtaaattagaccagattcactttggctgccttcctctgtaatttcttgagcagagagagaggagtggagttaattaacttagggagaatcacatctcaccttaagggagcccttgggagtgggttgggctctataaaatcatcctccaagcacttgggcag

SEQ ID NO: 26402 - DNA, 201 bp, Homo sapiens
taatgatacagtactgaagtttgcgaatgatgtacattcatgtaaattagaccagattcactttggctgccttcctctgtaatttcttgagcagagagagaggagtggagttaattaacttagggagaatcacatctcaccttaagggagcccttgggagtgggttgggctctataaaatcatcctccaagcacttgggca

SEQ ID NO: 26403 - DNA, 201 bp, Homo sapiens
aaacacaagaaaatactcctttattacttctttaaggtggttagggagattgctcataggtatataaatcttcatttgactcttcagtacaagcacagacrtgcgattccctgccttcccattcaatgcatttttgatctttgcgtctctgcattatatgtggattggcgaggccaagagaggagagtagtaaggaagcag

SEQ ID NO: 26404 - DNA, 201 bp, Homo sapiens
accatgcccggctaattttttgtacttttagtagagacggggtttcaccgtgttagccaggatggtctcaatctcctgacctcatgatccacccgcctcgscctcccaaagtgctgggattacaggcatgagccaccgtgcctggccaaaattttgtttttaaggattttttcctgactatgaaaataatgcatattcatt

SEQ ID NO: 26405 - DNA, 201 bp, Homo sapiens
gaaaatactttatcccggtctgtatcttcctttttcattttattaacagtgtcttttgaagagcaaaagttttaaagtttgataaagtccactttatcaamatttttcttttataagtcatagttttggtagcgtatctaacaagtcttggctaataaaagattataaagattttctcttgttttattttcaaaattttat

SEQ ID NO: 26406 - DNA, 201 bp, Homo sapiens
cgtttgtaaagcatatcatgctgttcctggtgcatgacaaacctctagtctgctgcctcagtggacccctttgtattcctattctatagtatttgttttgmccagacttatccccaaaagtcttctcacttttgctcctttttgctccttgtctgctttgacttacttcccattgtttttgtacgcagtgggcacctaata

SEQ ID NO: 26407 - DNA, 201 bp, Homo sapiens
actcctgagctcaagtgattctcccaaagtgttgggattacaggtgcaagccaccatgcccagccaaattggagagttattatagacaaaaaaaaaaaaaagaaaggatcttcccctccttaccttcatcagacctcccactgtgaactctcccttctgaacaaactcactgtgtcccttatatctctctttcttcaccat

SEQ ID NO: 26408 - DNA, 201 bp, Homo sapiens
ttggagcagcctcattcaggggctgtggtgaatgtgaatcgagtggtgaacctcgagtttaggaagacatatggtgggctgcaggtgaggcttattgctcmtgagggaggcctgtgcatctgtgagaaaggtggcctcacatgttgggaatgagggaccatttcagagctgtatcatgtgaccccaggatgtgttgctagc

SEQ ID NO: 26409 - DNA, 201 bp, Homo sapiens
ccgggctggtcttgaactcctgagctcaagtgattctcccaaagtgttgggattacaggtgcaagccaccatgcccagccaaattggagagttattatagwcaaaaaaaaaaaaaagaaaggatcttcccctccttaccttcatcagacctcccactgtgaactctcccttctgaacaaactcactgtgtcccttatatct

SEQ ID NO: 26410 - DNA, 201 bp, Homo sapiens
tggtgtccccaccacctcttccagggtgagacgatagagtggcacttagggaagaaagttctcccttctccccgccatcccaaacctagaggacatctccyggcatcacaattcaggcaatttccagactaatttactatggaatcacttttcacggcccttgtgcaccggtatgagaaatgctaattggtgtgtgagcct

SEQ ID NO: 26411 - DNA, 201 bp, Homo sapiens
gatggggtctatgttgcccaagttggtcttgaactcctggcctcaaggatcctggtgccttggcctttcaaagtgttgggattacagatgtgagccaccartatccccctttcactggcttttgacactttcttggcctcttttggccctgagccaagtaaccctagggcatatttcaggaggaggttgttggcatttctg

SEQ ID NO: 26412 - DNA, 201 bp, Homo sapiens
aacctagaggacatctcccggcatcacaattcaggcaatttccagactaatttactatggaatcacttttcacggcccttgtgcaccggtatgagaaatgytaattggtgtgtgagcctgagatgctcttccaaaggatttatcgtcagaatcagaggaggggaaggggagccgaggccgtctttgtgatggcttggaggc

SEQ ID NO: 26413 - DNA, 201 bp, Homo sapiens
aacctcaaactcctgggctcagttgatcctcctgcctcagcctcctgagtagctgggactacaggtgtgtgccaccacatctgggtgatttaaaaaaaaaattttttttgtatagatggggtctatgttgcccaagttggtcttgaactcctggcctcaaggatcctggtgccttggcctttcaaagtgttgggattacag

SEQ ID NO: 26414 - DNA, 201 bp, Homo sapiens
gggccggggagaagcctctggaaaactcccattgccggggtgtttgcgttggggtggctaatgtcctaagaaggctacacaatagactgtcaaaatggttstttcagagtggggcatggatcacagtttagaaatgggggaaaaggaaggaaaggagcaggcctccatggagtgatcctgcctgtagactgaataaaatag

SEQ ID NO: 26415 - DNA, 201 bp, Homo sapiens
gatcctttccactgctgactttttaagttgaaatatttagggagaaaatatgagttcttagaaacttttaagtggaagagatttagtaatgatttagccartccccttatttttttgcagatgaagagcctatggcatagatatatcaagttccttgtccaaaatcacacatactgcagggagcagaagtgatcctgaacc

SEQ ID NO: 26416 - DNA, 201 bp, Homo sapiens
agcgagtactcaataaatgtcagcatccctcactttggtgtttcagaaatcctctcttatgcccaccccaaactgttctcctgaaataaacatggtggacrtgtgtgtgtgtgtgtgtgtgtgtgtgtgtctgtgtgtaaaatctttgtatacatggtaagttatgcatggacttctttctgggctgaagtttggctctat

SEQ ID NO: 26417 - DNA, 201 bp, Homo sapiens
cctggcctcaagtgatgctccaccttggccttccaaagtgctgggattacaagtgtgagccaccccacccggccctactttatttatttttttttttttttggagacggagtcttactctgttgcccaggctggagtgcagtggcacaatctcagctcactgcaacctctgcctcctgggttcaagtgattctcctgcctc

SEQ ID NO: 26418 - DNA, 201 bp, Homo sapiens
ttcagttccactttcagattctcccttgacccttcattttctccttgcaatggaaatcctaccattttttccaaggctcagctcaattccatttccttccwaaagtcacctctttgctaatcttcactcatgctaatcttcactcatccctttctttgggactgatacatctttggaattatctagcatagtgcttaattg

SEQ ID NO: 26419 - DNA, 201 bp, Homo sapiens
accttcttcccagtcagacatcagaacccatagcccagactctgcatgtatttaaagggactagaagacaatatggacccaaaagaggacagtctgcccakctttaggaaggagtcccctctcattttccttgtggatgctgtccatggaagtagacagccctcaactttcttcacagagcaaacttaccttcacctcagt

SEQ ID NO: 26420 - DNA, 201 bp, Homo sapiens
ggaggcagagcttgcagtgagctgagatcgcgccatgcactccagcctgggcgacagagcgagattctgtctcaaaaacaaaaacaaaacaaacaaaaaaatggatttcaggtgattctttttggaaggtctttcttctcacccattggctagtttctacccattaacaccaagcctcagtttttccattcttcttcccac

SEQ ID NO: 26421 - DNA, 201 bp, Homo sapiens
cccatgtatcatcagagcctagggggaacctcccagtggtctgagggcctgaccagcttttatgtgtgtctctttgtggtcatctcggccagactggttgytatccaggtttttcttctcctccgcagccgctccctgaaatgggtgggtaaatatcccagtctgacttcagctgccgagtcatcagtcctgacagacggc

SEQ ID NO: 26422 - DNA, 201 bp, Homo sapiens
tacggaaggggtccagtttcaatctttggcatatggctggccagttatctcagcaccatttattaaatagagaatcgtttccccattgcttgttttgtccratttgtcaaagatcagatagttgtagatatgtggccttgtttctgagttctttattctgttccattggtctatgtatctgtttttgtactagtgctaggc

SEQ ID NO: 26423 - DNA, 201 bp, Homo sapiens
attctcaagggtgaagactggacaagacagactggcagaaggagaggagctaaggggtgatggtcccaggagagaatggtgagcagcatcaagggtagtcraagttgaaatagagaaggacaagccagttataaaatgagttgactggggcagcaaggctccaccttcttcccagtcagacatcagaacccatagcccaga

SEQ ID NO: 26424 - DNA, 201 bp, Homo sapiens
ggcgtgaacccaggaggcagagcttgcagtgagctgagatcgcgccatgcactccagcctgggcgacagagcgagattctgtctcaaaaacaaaaacaaaacaaacaaaaaaatggatttcaggtgattctttttggaaggtctttcttctcacccattggctagtttctacccattaacaccaagcctcagtttttccat

SEQ ID NO: 26425 - DNA, 201 bp, Homo sapiens
gagagtggatatattttttagtggcatcccacactaattgtgggagcgtcatcaaagctcattttgggtgtgaagtgactaatttctaagcccaggggttctgaaggaggattttcatccatttatcacaaaagaccccaacagccagtcaggaaaggggtctgctggctatagccactggtgtagtccacccagaagaat

SEQ ID NO: 26426 - DNA, 201 bp, Homo sapiens
tgcagcctttgaaatggatcttaatttgaatgttgacattccagtaacaaaacaaaaataaccacttgtagatggagagcgagagcgagagtgagagagagcgagagagagaatgaatcacaaacacctgtaaagtgtaactattagtttcaaataggatattattgaatctgtcctaaaaccagttgattgtgattattc

SEQ ID NO: 26427 - DNA, 201 bp, Homo sapiens
atgcagcctttgaaatggatcttaatttgaatgttgacattccagtaacaaaacaaaaataaccacttgtagatggagagcgagagcgagagtgagagagagcgagagagagaatgaatcacaaacacctgtaaagtgtaactattagtttcaaataggatattattgaatctgtcctaaaaccagttgattgtgattatt

SEQ ID NO: 26428 - DNA, 201 bp, Homo sapiens
aaagaagatgcagcctttgaaatggatcttaatttgaatgttgacattccagtaacaaaacaaaaataaccacttgtagatggagagcgagagcgagagtgagagagagcgagagagagaatgaatcacaaacacctgtaaagtgtaactattagtttcaaataggatattattgaatctgtcctaaaaccagttgattgt

SEQ ID NO: 26429 - DNA, 201 bp, Homo sapiens
ttagaaagtatggtagattagacactctgaatacacgtctttttttctcttttttttgagacagggtttcactctgtcacccgggctggagtacagtggcrtgatcttggtttactgcaacctctgcctctcaggctcaagcaatcctcccacctcagcctcctgagtacttgggactacaggcttgtaccaccacaccca

SEQ ID NO: 26430 - DNA, 201 bp, Homo sapiens
ccacctcggcctcccaaagtgctgggattacaggcatgagccaccacgcctggccttttttggctatttttaaattgagttatttgtctttatattgttgwgttacaagagttctttatatattctggatactaaacctttatcagataaatggtttctaaatattttcacccattctataggttgtatttttggtttctt

SEQ ID NO: 26431 - DNA, 201 bp, Homo sapiens
ttctaggtgccatctgtcacccctttctttgactaggaaagggaattccctgaccccttgcacttcctgggtgaggcgatgccttcccctgctactgctcrtgcacagtgcgctgcacccactgtcctgcacctactctctggcactccccagtgagatgaacccggtacctcagttggaaatgcagaaatcacccatctt

SEQ ID NO: 26432 - DNA, 201 bp, Homo sapiens
gagatggaattgcttaatcatagggtttgcacattttaaatggtactggatgctgtaagtttggcccctgtggtgatttttatcagtactcacccctcccrgtgatttatggaaagtattatttgaccagctgccctgcccacatttggtattagcatgctttcaaaatgtttgcagtctcttgggtatgacatggtacat

SEQ ID NO: 26433 - DNA, 201 bp, Homo sapiens
tagaggggagtcacccctctcctccagacaagggtgggttgttgaattttatgtgaaatcttgacattgcaataaatctctgaacctgaaccagcctgcaytggatatttaatactgttttcatttccaatactaatcaatcctggaagaatgtgctgttattttttagttacatgtaaacatttagatgaatataaaatg

SEQ ID NO: 26434 - DNA, 201 bp, Homo sapiens
atcatgtgaccccaggatgtgttgctagcctgtctcctggggcccctccgtgccctgcatttgagggtttcttggaagtctgattacgtaaagttgatgtkaataggcagggagcagaatggaagaggatgcttggtgttgagagtctgcttccctcccttcccgcttctccaccataaggggtcttcacatgcaccatta

SEQ ID NO: 26435 - DNA, 201 bp, Homo sapiens
gatgcagatggctagaaagctggtacaaagatgtgaagtagagggtctaaaagaaagccaggaatagttgacgtatagtgggctagcaagaaaatggaaarcagtgtccaggaagaagatatttttatgttggggtaaggagtttggatttaattaaagtgttattggaaggccctgggggaggatggtttaaaaagttaa

SEQ ID NO: 26436 - DNA, 201 bp, Homo sapiens
gtggcagatgtatacatatgtttttctatgctcatttttgaatagggattgttgtgctctaagaccaacaagcaggttctgtggcatgttccttgcttctrtgtcactctaatttggtaggattctactcttgaagtttgaagtgatgtacttaatttgggatgtctaggaagcattcttctgtgtgtttctgatttgcat

SEQ ID NO: 26437 - DNA, 201 bp, Homo sapiens
gctttggagcaggcactacaggttcctatgcggagagcatcggtgctcagggaagggaaatccacccctgtgctcttcacacccagacagatgctcacagkttccagggatatacagggacatttctaaatctgtcttggacgtccattcactttatctttagccatggaatgctgacaagtattcagtacggttgagtga

SEQ ID NO: 26438 - DNA, 201 bp, Homo sapiens
agtgtctaaatgaagagtttgctacacacattctcaagggtgaagactggacaagacagactggcagaaggagaggagctaaggggtgatggtcccaggaragaatggtgagcagcatcaagggtagtcgaagttgaaatagagaaggacaagccagttataaaatgagttgactggggcagcaaggctccaccttcttcc

SEQ ID NO: 26439 - DNA, 201 bp, Homo sapiens
cattttaactgaggtgagttaataattcattgtagttttgatttgcagttccttgatgattagcaatgttgaacattttttttttcatatacctattggcyatttgtatgtcttcttttgagaaatgtctattcagatcttttgcccattaaaaaaaaatcagattgttattaatattatttttgctattgatttccttat

SEQ ID NO: 26440 - DNA, 201 bp, Homo sapiens
tgtgcagggaggtgtggcactccctgtgcctttgcttctcaagctgctgagtgacagtgacaagatgctggctttggagcaggcactacaggttcctatgyggagagcatcggtgctcagggaagggaaatccacccctgtgctcttcacacccagacagatgctcacagtttccagggatatacagggacatttctaaat

SEQ ID NO: 26441 - DNA, 201 bp, Homo sapiens
tgggtaaacaccatgtccaagacacccttctccctttttgcagacatttcttctatatacatttctcaagggcccactgacctcttccaggctgatgatgkgtaacccaaagccttgagctcattctcactgggtcattcagtccatcctcccagaggactgcttcatcaattgctttgtttgtgcttttccccaggatct

SEQ ID NO: 26442 - DNA, 201 bp, Homo sapiens
acagatacctctgcaatatatttatttactttcttttggacatatacccagcagtgggatttctggatcatatggtagttctactgtttataaattttttrtactggctgtgctaattctaattcccaccgtaagtatatgaatgttcccctttctctgcatctttaccagcatctgttattttgtgtctttttgataata

SEQ ID NO: 26443 - DNA, 201 bp, Homo sapiens
atcttctgggtttttttcattattagtctagctagagatctatgaattttgtttattcttttgaagatctaggtcttggtttcattgatcttttgcatggrtttttgcatttcaatttcatttagttgttctctaattttaattatttatttctctgttatctttggggttggttcttttttttttttaagttcctctaag

SEQ ID NO: 26444 - DNA, 201 bp, Homo sapiens
tgcatctattgagatgatcctatggcttttggttttaattctgtttatgtgatggatcacatttattgatttgtatatattgaaccaacctcacatcacakgaataaagcctatttgatcttggcaaattaactttttaatgttgattcaccaagatcaagtagaatttattctggagcctacggactggcgctgacattg

SEQ ID NO: 26445 - DNA, 201 bp, Homo sapiens
tggctcttattattttgaagtatgttcttttaacacatagtctgttgagtgtttttatcatgaagggatgttggattttatctaaagctttttctgcatcwattgagatgatcctatggcttttggttttaattctgtttatgtgatggatcacatttattgatttgtatatattgaaccaacctcacatcacaggaataa

SEQ ID NO: 26446 - DNA, 201 bp, Homo sapiens
gcttttgtctcttcagtatgacattggctatgggtttgtcatagatggctcttattattttgaagtatgttcttttaacacatagtctgttgagtgttttkatcatgaagggatgttggattttatctaaagctttttctgcatctattgagatgatcctatggcttttggttttaattctgtttatgtgatggatcacat

SEQ ID NO: 26447 - DNA, 201 bp, Homo sapiens
atattgcttcttctaatccatgaccatggaatgtttttccatttattcatgttgtctctgatttctttcaacagtgttttggagttctccttgtggagatmtttcaccctcttggttagctgtgttcctaagtattttaatttctttgtagtgattgtaagtgggattgttttcttgatttcactctcagcctggacattg

SEQ ID NO: 26448 - DNA, 201 bp, Homo sapiens
ctctttttttgtttcatatgaattttaaaatagtttcttctaattctgtgaagaatgacattggcagtttgatagaagtaaccttgaatctataaatttcyttgggcagtatggccatttttatattgcttcttctaatccatgaccatggaatgtttttccatttattcatgttgtctctgatttctttcaacagtgttt

SEQ ID NO: 26449 - DNA, 201 bp, Homo sapiens
cacagcttttaatagcttagaactgggtgcagtggctcacacctgcaatctgagctacttgggagtctgagtcaggaagatcacttgaggctaggagtttsagaccagctgagcaacatagccagaccctgttgccaaaaaagttttttaaaaaattagccaggtgtgatagcatgcacctatagtctcagctactcagag

SEQ ID NO: 26450 - DNA, 201 bp, Homo sapiens
ctttgacttatgatattagaggagtattatgggccattggtttagattctttatgatagcattgacatgtcatagaatgtcagctggggacttaaggctcrtgatagctcaagatgacataccattaggcttagactaggcaacaagtggctattggaatgatgggacatttataggagagcaggtaagatcagatttctt

SEQ ID NO: 26451 - DNA, 201 bp, Homo sapiens
tgtgcttaggttaatggggctctttagtttaccatctgagctgcttctcccaaggaatcacagcaaccagcagtctccaagggctcaaaaaccctggaggmcttctctttggtccctgggagctgcaccctgggcacttacagcaagctcacaggtgatgagaactcatagttcagcattttgcttctcttctatgaaaaa

SEQ ID NO: 26452 - DNA, 201 bp, Homo sapiens
agaggtaattaagatacagacccttcttattcttaagtttctcatgaaacacagcctggattatccttccctcccaccctgccacgtttctgccccataarctagaccattctctggtaatctacttagttttttagataaactaagaataatctatatgacatagtccttcccagtacttaaggaagggaaagtatcatt

SEQ ID NO: 26453 - DNA, 201 bp, Homo sapiens
gttgtggagcccagataggggatagctttgaaagtaagggctgctgctacttataggatgaaagtggaaatgcgttagtttcgattttgggtaaacttgakgatagggaaaaaaaaggcacccatggctgggatctctagttttagtccaaaggtggtaaatcagtcccaggatagaaagactcctgtgagcccagtagag

SEQ ID NO: 26454 - DNA, 201 bp, Homo sapiens
tgtgttaggagttgggtttacagaggtaattaagatacagacccttcttattcttaagtttctcatgaaacacagcctggattatccttccctcccacccygccacgtttctgccccataaactagaccattctctggtaatctacttagttttttagataaactaagaataatctatatgacatagtccttcccagtact

SEQ ID NO: 26455 - DNA, 201 bp, Homo sapiens
tttcatatttaaacagcttgagaaatatgtcggaaacaaggtatattttcccccatctctgtgtgttttctcctctcgtattaggctaccttaggagtgtyggcagtatcattcagaagatactgaggctccaggatttttattagcctggcattgttaattgctgctcccttgcaaacctcttcctataaatgctgagaa

SEQ ID NO: 26456 - DNA, 201 bp, Homo sapiens
aagtgttgtattttacattcacatttagaactacagtacacctaacatttttatatggtgtgtagtaagggggtcagtaattattttttcataaggatatmtgaaaagacctgacattcctcactgcttttttcataaatcaattgtcttcatatatgtgaagttgtcttggactctctattctgtcccattagtattctt

SEQ ID NO: 26457 - DNA, 201 bp, Homo sapiens
ttttgattacttttaaattttctataaatggaagagtgaagtatgtatatttggggatttttgttgttgttgttcaatgttaaacagtattccaaaatatwggagttcaatgtattagtctttttccttatggttagtatttttgaagtcctgtctaagcaacatttgtctactcaaaggtcatgacggtattatcctgtg

SEQ ID NO: 26458 - DNA, 201 bp, Homo sapiens
accttctggttctctaaagctgacagatttctgcccctttttggacttcctaaggttccatttaagttttacagttaagggttgacataaagacatcagtycagagtctgaatcttctcctgccttgtttaagacctgctacaagggctttctgtccagaagagctttagttccatttggggaaaggtagataaagctggg

SEQ ID NO: 26459 - DNA, 201 bp, Homo sapiens
ctgatctagaagaaaggaaaattagatgatataaagtaaacaacaattatatgctagacatttaacccattgagtccttgcaacaagcctgaattgcagaygttgctaaaattatttttgtggaaagagaggtgggattccaagaagctaagaacatgaccccaggtgggacagatgggatctgagtccaaatgtgatgtt

SEQ ID NO: 26460 - DNA, 201 bp, Homo sapiens
tctgcttatggcatagtgttgcccattgtgggatctcaaagcacattcattatcatgtgctgacggctgttctgcaggagtggaaaatggaggtagagagragtgaatgcaacggtgccagcagtgggggatggagccacgcccctgacagggggcacagtctctgaactcagcaccaggctgggaagctttgccggggcc

SEQ ID NO: 26461 - DNA, 201 bp, Homo sapiens
aagggattataaagaccatcctcaaacatttgaaccgtttccacactgcagcatagggagatttattctttgtaattgctaagggcacagctagaatccayggacatatttatatgaagagcgagtttgactcaagatgaggaagatgttgatctgccttcaatatgagcctggaatgcctgaaagagtagtgagtccact

SEQ ID NO: 26462 - DNA, 201 bp, Homo sapiens
tctgttttcatgctgctgataaagacatacctgagactgggcaatgtacaaaagaaataggtttaattggacttacagttccatgttgctggggaagcctyacaattatggtggaaagcaaggaagagcaagtcatatcttatgtggatggcagcaggcaaagagagggcttgtgcagagaaacttctgtctttaaaacca

SEQ ID NO: 26463 - DNA, 201 bp, Homo sapiens
ccttgagttaattagattattactaattttatatttattacaaagtggcatttttgatgagtttttagaaatgccctagtatatttacatacattgaatgkatgacaatttgaaacttaatttcaaaatttcacaagttagaatttaaaaactagacttgtaacaggagatgagtttgttttgattccggagaacattcaa

SEQ ID NO: 26464 - DNA, 201 bp, Homo sapiens
ctgggtcatatggtaactctatgtttaattttttggggaaccacccagctgttttccataggtagtgccattttacacatttccactagcaatacatgagrgtttcaatttctctacatcttcaccactacttgttattttttcttacagtgatcctgtgggtgtgaaacagtatctcttttggctttcatttgtactact

SEQ ID NO: 26465 - DNA, 201 bp, Homo sapiens
atcctgcatctttatttataactcagtatattagaccttgagttaattagattattactaattttatatttattacaaagtggcatttttgatgagttttkagaaatgccctagtatatttacatacattgaatgtatgacaatttgaaacttaatttcaaaatttcacaagttagaatttaaaaactagacttgtaacag

SEQ ID NO: 26466 - DNA, 201 bp, Homo sapiens
cccgaccacgttttctaaagcagttgcctaagcccacagccatccctcagttacctctattccattacccagtttttttttcccctccaaggcatctgtcrctatttgaaataatcgtatttgtttgtatttcttgtctgtttgatactagaatgtaaacctcttgtatcctttgcacttagctcttgatcgtcgcctggc

SEQ ID NO: 26467 - DNA, 201 bp, Homo sapiens
agcataagcaactaggcacttcacaatcaatactgggctcagtggttgagccctggttaatagagctgcttcttttcaggtgctcacactcagcgcagccraattctgccttctctgtcctgggaggacacagggacctgtgcccttctccaacagtgggatcattctcgggaagtgctcctcactttccacatggtcagg

SEQ ID NO: 26468 - DNA, 201 bp, Homo sapiens
aggttataaagagagaggtggaccaaccagggctccctagggtttggccatttgctgcttcccacaggctcatctctagccagaagctcaaaatccagctkgtcaaacacactgggctactgctgtctccttggggggaagtttcctcttagaactaactaaaggctgccaaccagcggcaaaccctcctgtgtctgcaaa

SEQ ID NO: 26469 - DNA, 201 bp, Homo sapiens
aaacattccaaccatattaattccagtgacagttatcctctaagttatttgaaatggattctccctcttcaactttcgaaacttatatttgatccccatgrcctctggggcctgcacaggggcactctctgtgactgagtgcgtgaacagcaggaggcagaagcaggaaattgttgatccggtccgtttatgtctttcctc

SEQ ID NO: 26470 - DNA, 201 bp, Homo sapiens
catggctgtaattgaatacattaatcctgtggcattttcacccattagcactgcagcataagtccttagaaagaaccatgttttgaggaaaagtgggcacrgggaagacaaattccaatataagaaggaaaggagagcagtctgcagtcaaagaggcattccagagggcactggatggtggtagggaaacagggatcctct

SEQ ID NO: 26471 - DNA, 201 bp, Homo sapiens
tgaaggcatgtccactgcgagtatttcggtcagcttggctgcttctcatgctgtttgcccaattcagcactacagattttgctctctgaaattccagcttyatcccataggagaggtgcagatttctatttctcatctcttgtctgttttaattctttgggagaggagtcctgagtactaaacagaaaggtacgcatggag

SEQ ID NO: 26472 - DNA, 201 bp, Homo sapiens
attgccaaggtagaccgtaacccaagaggggttacaggtaatgtgtaattgtatcaaggtgatggtaagacacttgtatcctgataattcacgtaatacckgtttcttccagcaccatccaattagtggcaccatttcagacctccaaaagtctagtttatacccattgaggctgattttccaatagagtcttccagagca

SEQ ID NO: 26473 - DNA, 201 bp, Homo sapiens
tggtcattttagttgaaggcatgtccactgcgagtatttcggtcagcttggctgcttctcatgctgtttgcccaattcagcactacagattttgctctctkaaattccagcttcatcccataggagaggtgcagatttctatttctcatctcttgtctgttttaattctttgggagaggagtcctgagtactaaacagaaa

SEQ ID NO: 26474 - DNA, 201 bp, Homo sapiens
atggataaaaaaacaaaatccaactataggttgtttataaaacacacactttagattcaaagatacagatagtttgaaagtaaaagaattgaaaagatgtwtcatgcaaacaacaacaataagaaaattggagtggctatacgaatagcagaaaaaaatagactttaagacagaaaaagttactagagtaaaagaggacat

SEQ ID NO: 26475 - DNA, 201 bp, Homo sapiens
ttctgtggaagtccttgaacgggtgtggaggcagcaaagctctcccagttcccaggtgagcccagggtggagatgtaagaccacaccgaacactgagcatrgtcaccaggctgcttttgagaagcgactgtgaagctgtcctcctgcaggggcatgatggctatatttgagaatttctggaaaacattctctgcctctctg

SEQ ID NO: 26476 - DNA, 201 bp, Homo sapiens
tactcccagcctgctccactcatgtacgcgcttctcatcaacatgctttattttctgaatgattctccgtgaaaagaacaaagtggggtgatggaaagtayagtcacttggcattcaggtttaggttctggctccggcaccgtgtgaagtttatgagtcttttcccatttctgggtctcagcttcatcttctgtcaagtga

SEQ ID NO: 26477 - DNA, 201 bp, Homo sapiens
ccattgtgtgtatggtcaaatgattttcaaaaagagtgccaagacttcaccatgggtaaaggacagtctcttcaacaaatgatgttggcaaaagtggatamccatatgcaaaagaatacagttgggtcctaacttcatattatatacaaaaatcaattcaacattttatagttttagttattactcttagggtctaaaact

SEQ ID NO: 26478 - DNA, 201 bp, Homo sapiens
atgaacagtgaattaatgctgggcatgcaaaaataagagcctttgactaccctcttgtgcttaggtcatagtatcaaggagataactagatttaggctttyctacttaggtttattgttatttaaactcacttctcataagccttgaaaagcaacacacatgccttcaataatgggtctgcaagttgaactttaaatattt

SEQ ID NO: 26479 - DNA, 201 bp, Homo sapiens
gtcagacccacacctcgtaccaggaactgggctcatgtccatcagaatcatatgaaatgaaaggtggaagacactggttctaaaaaaaaaatgacaccctrgttgttacaaaatgaacagtgaattaatgctgggcatgcaaaaataagagcctttgactaccctcttgtgcttaggtcatagtatcaaggagataactag

SEQ ID NO: 26480 - DNA, 201 bp, Homo sapiens
ggatgcctgtaagaagccatttaatgggaggctcttgttcctgtccatgtggtgtttttttttgtttttgtttttttgtttttttgagacggtgtctctcyctgtcgcccaggctggagtgcactggcgcgatctcggctcactgcaagctccacctcccgggttcacgccattctcctgcctcagcctcccgagtaattg

SEQ ID NO: 26481 - DNA, 201 bp, Homo sapiens
cacattcttttgggtgtttctttaaagcatttggcctccattttctcaggtgatatttccaatacctaagtaatgtaggcagagaaaagatgaaataaaarcctacaaattttggcaggggtctccgtagtgtgactgtggggagaccaggaagctcctcaagcccataaatatctctgttctggcctcccttagagccta

SEQ ID NO: 26482 - DNA, 201 bp, Homo sapiens
cttgcgtttcaatctaagctaatcacctgggtcagacccacacctcgtaccaggaactgggctcatgtccatcagaatcatatgaaatgaaaggtggaagrcactggttctaaaaaaaaaatgacaccctggttgttacaaaatgaacagtgaattaatgctgggcatgcaaaaataagagcctttgactaccctcttgtg

SEQ ID NO: 26483 - DNA, 201 bp, Homo sapiens
ttttctccagcacttcttattgtccaatttattatttttgaggacaattaagtgggtgtaaagtggtatcccctagaattttggtttgaatgttcatcttyccttaggtgatttttccagaactggaattctgtatctcctttgcactaacaaagcagtagattactgtaaagctataaaacacaaattaaataatatgat

SEQ ID NO: 26484 - DNA, 201 bp, Homo sapiens
aattgccaaggtagaccgtaacccaagaggggttacaggtaatgtgtaattgtatcaaggtgatggtaagacacttgtatcctgataattcacgtaatacstgtttcttccagcaccatccaattagtggcaccatttcagacctccaaaagtctagtttatacccattgaggctgattttccaatagagtcttccagagc

SEQ ID NO: 26485 - DNA, 201 bp, Homo sapiens
cttgggaggctgaggcaggagaattacttgaacccaggaggcggaggttgcagtgagctgagattgtgccaccgcactgcagcctggcaacagagcgagaytctgtctcagaaacaagaaaatcaaaataacagtggcttaaaatgggagttttagtttcttttacaaaaaggaacagattcagcctcttgtgttagcttc

SEQ ID NO: 26486 - DNA, 201 bp, Homo sapiens
aaattttgtgtatattctgttatcaccatgaactggcaattcaggcaattaaagtgataaaaatactcatctctggaaaaaagctgtcaatctaagttctragtaattgccaggagttctgttgtattttaaaataatgactattattgttaatatttattacattttaacacacttaaaagtttatcttttaagacacat

SEQ ID NO: 26487 - DNA, 201 bp, Homo sapiens
gggaggcggaggttgcagtgagccaagatcgtaccactgcactccagcctgggcaacagagcgagactccgtctcaaaaagagaaaaattataaattgccraggtagaccgtaacccaagaggggttacaggtaatgtgtaattgtatcaaggtgatggtaagacacttgtatcctgataattcacgtaatacctgtttct

SEQ ID NO: 26488 - DNA, 201 bp, Homo sapiens
tctctggccactggtgtggtcattactgttgttaacaggccagataagggtctgatattctagcaagaaatggtcctagcaagaaggattcacaaaccaargtgaggacaccaggtaacagagtcactgagtgctcgagtttgctcagcctccagattttatttggctccgttgaaagcagacctgcctggccctgactca

SEQ ID NO: 26489 - DNA, 201 bp, Homo sapiens
caccaatctttttattttttaagtttgatcatgttggcatttgttctgctatataatgtatattatgttgctactttttgaatatgttcactaaatgcacktctgcctgattttcctggtttccaaaaaggattttccctcttcacctcttctcctctcctctctctctattggaaatacctttcttttcagcaaggtgtt

SEQ ID NO: 26490 - DNA, 201 bp, Homo sapiens
atactcagaatttcacttttagtagcatccttccttcttgaatttcatgtcctattaggatcaatatctgtggaaattactatactatactatactatacyataccataccataccataccataccataccataccataccataccataccatcctatcctatcctatcctatgctatgctatgctatgctatgctatgct

SEQ ID NO: 26491 - DNA, 201 bp, Homo sapiens
tgctgactgttccttttgctgtgcaaaagctctttagtttagttaggtctcagctatttatctttgtttttattgcatttgcttttgggttcttggtcatraaatccttgcctaagtcaatgtctagaagggtttttccaatgttatcttctagaatttttatagtttcaggtcttaggtttaagtccttaatccatcttg

SEQ ID NO: 26492 - DNA, 201 bp, Homo sapiens
ttgaaaagtttacaaatcctgccgtgagggctgtaaacagagtccagccggtggtggagcgtgttaaatactgccacattgatagggacctggttccccgrcactagaaatccactcatgtaaacagaggaactgttgctgtgaatcgggtctgttttgacttaaagtctaagaaacacattgccttcaaagtgaattctt

SEQ ID NO: 26493 - DNA, 201 bp, Homo sapiens
agaaaccctgtttgaaaagtttacaaatcctgccgtgagggctgtaaacagagtccagccggtggtggagcgtgttaaatactgccacattgatagggacmtggttccccggcactagaaatccactcatgtaaacagaggaactgttgctgtgaatcgggtctgttttgacttaaagtctaagaaacacattgccttcaa

SEQ ID NO: 26494 - DNA, 201 bp, Homo sapiens
tatcacatctgccacagcggaaggctttgtgcaggataacatatcattggcttgagaacagagtgagcatgtgtggaagggcctgtaattattaatatgayattggccataatttatcatgtcataccacccacttacagcagcctcatcctatgaaatgctaaatgcctttcttatcaacacttgatgggaaaatgctgt

SEQ ID NO: 26495 - DNA, 201 bp, Homo sapiens
ggaacatctctatcacatctgccacagcggaaggctttgtgcaggataacatatcattggcttgagaacagagtgagcatgtgtggaagggcctgtaattwttaatatgacattggccataatttatcatgtcataccacccacttacagcagcctcatcctatgaaatgctaaatgcctttcttatcaacacttgatggg

SEQ ID NO: 26496 - DNA, 201 bp, Homo sapiens
atctgtcacccctttctttgactaggaaagggaattccctgaccccttgcacttcctgggtgaggcgatgccttcccctgctactgctcgtgcacagtgcrctgcacccactgtcctgcacctactctctggcactccccagtgagatgaacccggtacctcagttggaaatgcagaaatcacccatcttctgtgttgctc

SEQ ID NO: 26497 - DNA, 201 bp, Homo sapiens
aaggggagaggctacaaatggcagagccaggtcaggtcttggagagtaactagtcacagattgcagtcagatcctgggctaacatattttaagtgaaaacratggatttaaatgccattaacagagcatgtattctccaggttcttttataccagccagcttcactcattccagtgacgatcttgtcttacctcctctgtc

SEQ ID NO: 26498 - DNA, 201 bp, Homo sapiens
cccctaatgtagatgatttttttctttcaatggatttcaggtgcatggaattgaattaatcataattcttggtttatgacacactatcaattggtttatgygtaacatttataattatatgtgtgcatttacatagtcttaaaaatgcaatgaatgaaccaacccaagaattagaatatagataataacttatgtttttct

SEQ ID NO: 26499 - DNA, 201 bp, Homo sapiens
tggtccttctttgagtcttgtattttgtatggctcccatgcacaccagcacattattaaatgtgtataccttttctgctaatctattatcagtttctttcmgcaggctcaaactttcagaagaggagggaaaaattctctttgctcctatatcacacatgttaataagcttctatttgttcttctctgttaatctgtcttt

SEQ ID NO: 26500 - DNA, 201 bp, Homo sapiens
atgaaactcaaaaagcctgtatggaaatagccttgtggtcatatcagagatcaggtttctaacgcaggttcttaccacctcatggtaggaccttgcagtarttgcagggcttttcccacacctcctctcatgtctcatggctaacaacctgttttcttctgcattctaatctcctgagaattctctctaaaatggaggggt

SEQ ID NO: 26501 - DNA, 201 bp, Homo sapiens
gcagaaggtccctattcatatggcctcatatttgtcacccagagggtagcaacaatctaggacccagcgaccctcagaagtgtgtgagacttgggactagyggaaacagaatgggttttggagtcagaccttggttcaaatacaagtttcaccatttgttgaacaaattatttaatgtttctgagctttagagaaattatg

SEQ ID NO: 26502 - DNA, 201 bp, Homo sapiens
gccctgttataaggtagtggtgtttgtttttgggacattagccctcttcccattgtctgttatgttgaggtcagcttccatgtacatttccctatgtctcygagcacattctgatcaattcattgatggtgagagggaaggaaagggaaggaaatagacatttttaaatgcctatgatgagctccctactgggaaggatct

SEQ ID NO: 26503 - DNA, 201 bp, Homo sapiens
tttataaggggtatctgagtgcttactgatcagagcatgatgtgaggaaactccctgaagcttggggaagaaactctctaaaggagcagatggagcacccyttggagctcacacaggaccagaagtagtgctgttgccaccagctggagcagaaaatcagaatatacagggcatccagtagactactcaggagagtattgt

SEQ ID NO: 26504 - DNA, 201 bp, Homo sapiens
cttttagaccttttagttttgtgatattttaatccagaaattgaactctggactgaagttcaccttctcttatttgaaaatttatatgaggttagagaggrggaaaataaactaaaaaatattatctgttactactaatcttgcaaggtatttgtggtattggtattcaaggagttaataaatatgaaatgcttagaagaa

SEQ ID NO: 26505 - DNA, 201 bp, Homo sapiens
ggaaataatctgacaacgtagtgagaaaatgagctgtggagtaagacaggcctgagatgaaaactttgccatagtgggttgagtggtagcccccccaaaakatatcgctccatcctatccctgggacctgtgaatgtgaccttcagtggaaaatgagttgttgaagatgtagctaaggatctcaagaaaagatcatcctgg

SEQ ID NO: 26506 - DNA, 201 bp, Homo sapiens
aagtactattacattatgtctgaatcttatttaaatatattggccttttatcttaaacttattagtgggtggctgtagcttacgtcgacaccagctagctmttttactcttgcaaaaggagggctgagctatacaaaggagtcaatcatttgatgtttagaagcaatggcacggtatttaaggcagttctccctgttgatt

SEQ ID NO: 26507 - DNA, 201 bp, Homo sapiens
tagtgaagagatcattataaagagaaattataatagagttccctgtactcatgggtctggtaataaaagattgatataattagatggggcttggtaacaartactattacattatgtctgaatcttatttaaatatattggccttttatcttaaacttattagtgggtggctgtagcttacgtcgacaccagctagctctt

SEQ ID NO: 26508 - DNA, 201 bp, Homo sapiens
ctctttaatatcaccaaagaactcttggtttgtattaattctgtttcatttgtgtattttatgtgtttagtggtcatatttgaaaaacatctcttgtgagmgctctgtataattttggcagaaaattactttttttgtgtttctgtgatgatcccctgagatcatttttgcataaatccggccttctattttcagatacaa

SEQ ID NO: 26509 - DNA, 201 bp, Homo sapiens
tctcgtataaacagcagaagcagtacagccttagagaacccatccacacctcagaacttcccagccaagctcatgctggcaggcacccagtgattctcccrtccgtatcacgacaagcctcggagtgaactgtttatttatcaattcttaattgagttgatgtttactcatgattgccagtggatgagtaatttactacag

SEQ ID NO: 26510 - DNA, 201 bp, Homo sapiens
ataaatccggccttctattttcagatacaaatctgttgtacagatgattcttcttagaagaaaagatgcatttgtagctaaaaaatgtaaattacttttcmtggaaaatacctctctgggcccccatttccaaaatgtgatgattgcacatcgcatgtttttgtgcgtgctcaggggactgcttttcttataattagaaaa

SEQ ID NO: 26511 - DNA, 201 bp, Homo sapiens
cggaagtgggaggctgagggtcccctgcaggcacaggattcccttcatcctctgtacctgtagcagaggagcccttgggctccagcagtacaattggggartgccctggtgaataacactgcctgacccccatcctcaccaggcttacaatgtggggtcctggagactgaagggtatgcctgtagtacagagagggtagcc

SEQ ID NO: 26512 - DNA, 201 bp, Homo sapiens
tatagtaattgcttgaaatcttttttttctcacagcagataacttggtttgaaacatagtttctgtgggcattgactgtatgaaatgggaatatgaagtgkttccagatgcagcggaagtgggaggctgagggtcccctgcaggcacaggattcccttcatcctctgtacctgtagcagaggagcccttgggctccagcag

SEQ ID NO: 26513 - DNA, 201 bp, Homo sapiens
aaataaggccattttcctcagcctgcaagcccagtctgagactttgcaacctttctctcttctgattgtgaattccaagtgtcaagacaaaatagcactargaaatcagtaaaatgtgacggtttttctcaagcgtctactaagagcctagccagatgcacatttcttattccttttggtaaatagattcagatttggtat

SEQ ID NO: 26514 - DNA, 201 bp, Homo sapiens
agacctttctttttattttattttacttttttgtgaaactttaagttctgggatacatgtgcagaatgtgcatgtttgttacataggtgtaaacgtgccawggtggtttgctgcacccatcaacccatcatctaagttttcaaccagcattcaagaccatttgtgttgaattctggttcctgctggtaccatgtcctggga

SEQ ID NO: 26515 - DNA, 201 bp, Homo sapiens
catccaagaaaggaggctgattcccacccacttaggcagccccaaggttataacttaacctgcataattaggatgtccattccagaggggaaaaacatggraaagataaagggcctctttaaaacagattcttcctgatacatttttttcataattatagctttaacagcttatggtgatgggaaagctggctacttaaga

SEQ ID NO: 26516 - DNA, 201 bp, Homo sapiens
agaaagaaaatcgcgctcacctctggaaagaccaagtcgttgatgtcctgcttcccctcttcagggctgttctacctataaggccatctcctgaagtcacygtgttttttatataacattttgtccttttagaaattatcctgacgcatgtcaagagctttcacaccgaaaaaatatgtcacattagcttccaagtttctg

SEQ ID NO: 26517 - DNA, 201 bp, Homo sapiens
atatgttctcattcaccaccttactcccgcaagaagggccataataataaatatacgtaatatatatatttgtgtatatatatgttatatataatatatamatgttatatattatatatatgttatatttatatatgttggcatggatgtggtgaaaagggaacacttttacattgttggtgataatgtaaactagtacaa

SEQ ID NO: 26518 - DNA, 201 bp, Homo sapiens
ccattattctaagtgaagtaactcaggaatggaaaaccaaacatcatatgttctcattcaccaccttactcccgcaagaagggccataataataaatataygtaatatatatatttgtgtatatatatgttatatataatatataaatgttatatattatatatatgttatatttatatatgttggcatggatgtggtgaa

SEQ ID NO: 26519 - DNA, 201 bp, Homo sapiens
gattctttctcatttgagaggactggtgtttctttagctgtagcataagttgagtataatcaattggctttgtttctgggcgctttcagggtgccaatgcyctgtacaggatctgtacttaaagctggatttttgccccttctctaggagctatttggggccaggaactgtccctgacatttgacaaatctatgcagggtt

SEQ ID NO: 26520 - DNA, 201 bp, Homo sapiens
atacatacacaagcatatgtcgaattattacattgtacaccttaaacactatatacagttttattggttaattatatctcaatatagccgggaaatttttraaaataaaaacaaaaacaatcccatcaaaaagtggactaaggacatgtatagacaattctcaaaaaagatatacaaatggccaacatatgaaaaaaatgc

SEQ ID NO: 26521 - DNA, 201 bp, Homo sapiens
attctcaggtttcttgcatggattctttctcatttgagaggactggtgtttctttagctgtagcataagttgagtataatcaattggctttgtttctgggygctttcagggtgccaatgctctgtacaggatctgtacttaaagctggatttttgccccttctctaggagctatttggggccaggaactgtccctgacatt

SEQ ID NO: 26522 - DNA, 201 bp, Homo sapiens
ataaatagggacttgtttctggcattttgtgatttgttttctagttgttttgcggtcatctcttccttctttccttccttgctgtcttttagtgaaggtgrttttctcttgtggtatgatttaacgtcttgctttgttttttgtttctattgtatatttttttatttgaggttacaaataatatgaggcttgcaaataata

SEQ ID NO: 26523 - DNA, 201 bp, Homo sapiens
aagaaagttctcccttctccccgccatcccaaacctagaggacatctcccggcatcacaattcaggcaatttccagactaatttactatggaatcactttkcacggcccttgtgcaccggtatgagaaatgctaattggtgtgtgagcctgagatgctcttccaaaggatttatcgtcagaatcagaggaggggaagggga

SEQ ID NO: 26524 - DNA, 201 bp, Homo sapiens
catgctaacatctctgcctcccacccccaaccagttagcagcatagggaaggagctggtaccagctgcatattggagaaatccagttggctgagctggacrtggtgagagattgtcagctgcttccaagcagcattggagaggaaggcaggaagacagaaataatctggagtggctgccatcctctctccttgtcctttac

SEQ ID NO: 26525 - DNA, 201 bp, Homo sapiens
ggaagagaaggaaatggggagttattgtttcacatgtacagagttttggttttggaagaggaagagttctggagactgtaccacaatgtgaatgtatttamcactactgagctatatatttagaaatggttaagatggtaaattttgtgttatgtgtattttaccacatataatattactgcatctttgtaagagaaggag

SEQ ID NO: 26526 - DNA, 201 bp, Homo sapiens
aaaggattgacttctcctgcagacaggccccttttaatggatggaaagggaggaagcttcatttagaagggaaaggctgtttgctgtgcagatatgacaarggggaagtagacaaccattgatttacgtttgggaatgacagttgaaaaattcagcaataatcatgacaaatgagaagagatgcagtcagaggaaaaaatg

SEQ ID NO: 26527 - DNA, 201 bp, Homo sapiens
caacagtgaactaatactctgtctaggctccaaagctgtcttttttttttttttcttttttgaagtgggggatatgtactggggcttctactttatgcagyttttaactcttgagtgaaatttagaagtgagtcacctcttctttttttgttgagcattttgaattgtcacagaggctatctggctcggtgacctgtcacg

SEQ ID NO: 26528 - DNA, 201 bp, Homo sapiens
catcccccatcacgtgggtatcatataccatttctagtgtgaggtataaggatattttcaatggacatttttatgtttgaatcttgtatatacctgcaatkatcactttaggaaatagtcttagaaatatttaagatctttgatgcatattgcaaaattgccttttaggcaatattattccatttattctctactgtctgt

SEQ ID NO: 26529 - DNA, 201 bp, Homo sapiens
aggcttgtccttggggtcgctgaaggctggtgctacaattagcccttctgtttgcttttctgctccttacagtagagtgtcttagatgaacagacagggcwccatcaataatgcacagatgctctgtaattgggacttcctttgatgttaatttagctaagttcaacgccattgtcagtgatagcaattacgtgcagcctt

SEQ ID NO: 26530 - DNA, 201 bp, Homo sapiens
tgctgggttttgttgagtgctttttctgcatctgttaagatgatcatgtgatttttgtttttaattctgtttatgtggggtatcacatttattgacttgcrtatgttaaaccatccctgcatccctggtatgaaatctacttgatcatagtggattttcttcttggtatgttgttggatttcgctagctagtattttgtta

SEQ ID NO: 26531 - DNA, 201 bp, Homo sapiens
agctgtgtgggctgtgttaatcataaatttctggatccatgaggctcccaagttaaagactgggtcagcactgagcaaaattgtcaagggagatgggactrtccagtaaccactttcccctctcatgcctggcatacctccgattgccccagactttcatgcagcccctgcactgaggttggttccctgtggctaaattcc

SEQ ID NO: 26532 - DNA, 201 bp, Homo sapiens
ccccacctagcctattgtatacaatgcaagtggagtaatcttccaagggcatgattttgattatgtattttttcattccggaaagcagcgagggccacccygttgcctaccaaaaatgcacatttatggtccatggcaacctgttgcaccttaatgggtgagagagctgctctttccactgcccccttcaccatcttggtg

SEQ ID NO: 26533 - DNA, 201 bp, Homo sapiens
cctgaagtccctgctctttgttgtagatccgatatgacgtttgaggttttcaaagctgcagagatgaaagaatcaacagtcaaatattgctcattctgatrtgcttaaggagcgaggagggggcattgcccatgagggctgcagagccggggagggaaagctggtgccctctgcttttgatggcaaccttgagtggggagc

SEQ ID NO: 26534 - DNA, 201 bp, Homo sapiens
ctgtcgtgactcagctgcgtttgcgtgcactcagggcagcactcacacgctagcgccccctgctgccttggccccctccagactttgggcgtcagtgagcrcaggaagcagcagcccagggggtgctgagggcagctccctgcgggcctgtagacacccctcaacgtgaacagcctgggcaacgtggaaggcagacaggtc

SEQ ID NO: 26535 - DNA, 201 bp, Homo sapiens
ccaggtcatgaatccaggggttctcaaacatgttcaagaagcagggcatttgaaaattatggtgtttcttgagtgataccatggatttcatatgccccggkttaagggcacaggctctagagttaggcaacctagaggaattcccgtttcctccatggactggctatgtgaccttgttacttaacttctctattcctcctt

SEQ ID NO: 26536 - DNA, 201 bp, Homo sapiens
cctgacgtcagcccgtgcaactcttgtcaacaaagagagctcccagttggagaaattaaaagcaaactttgactgggaatgtgtgggaagtggtagctcastgagtgaggccagatgccacatcagctcaaagtaaagccatgcacttggctttactgatggagatgatggatgtttatgatccccagtgtgaaaaatcct

SEQ ID NO: 26537 - DNA, 201 bp, Homo sapiens
ataatgagatctctattttggagagagtactttggtgttagtgggtgcaagacaaactcaagagcttctaggtttccagttctggctccacctgctagctrtatgatttggggtaattcacttaaccaatttctcatctgaaagcaaggaaaacagtattacctaacttgtgggttgatgatgatgattatgtaaatatga

SEQ ID NO: 26538 - DNA, 201 bp, Homo sapiens
tacttatgtatcagagaacaaagtcacaagctttgctaaggtagacacatgtgtttgacagtcctggccccaggtattctgttttgttgtcagattacgtrtcagaagaatatatccccataaggagtgagaaaatgagataaaaaatacaatattcagaatgacaattagagcatctagaccaaacaatatcataggcaa

SEQ ID NO: 26539 - DNA, 201 bp, Homo sapiens
gttatggtttttaagccaggggtcagcacactttttctataaagggccagatagaaaatattttaggcttttagtttatggaccatgcagtctctgtcacractcctcaactctgtccccatagtgggaaaacggccataggaaatatgtgcacacatgggcatggctatgttccaatcaacttttgtttacacaaacagg

SEQ ID NO: 26540 - DNA, 201 bp, Homo sapiens
tcctgtttttaccaggtcatgaatccaggggttctcaaacatgttcaagaagcagggcatttgaaaattatggtgtttcttgagtgataccatggatttcrtatgccccggtttaagggcacaggctctagagttaggcaacctagaggaattcccgtttcctccatggactggctatgtgaccttgttacttaacttctc

SEQ ID NO: 26541 - DNA, 201 bp, Homo sapiens
ttactgttatgcttctcgttattacagtcattcatgggtgttaaaacagaataatgagatctctattttggagagagtactttggtgttagtgggtgcaasacaaactcaagagcttctaggtttccagttctggctccacctgctagctgtatgatttggggtaattcacttaaccaatttctcatctgaaagcaaggaa

SEQ ID NO: 26542 - DNA, 201 bp, Homo sapiens
ggattacatttattgatttgcatatgttgaaccagccttgcatccagggatgaagcccagttgatcatggtggataagctttttgatgtgctgctggattyggtttgccagtattttattgagaatttttgcatcaatgttcgtcaaggatattggtctaaaattctcttttttggttgtctctgccagactttggtatca

SEQ ID NO: 26543 - DNA, 201 bp, Homo sapiens
ttagattatactgcttgggtgataggtacaccaaaatctcacaaatcatcactaaagaatgtactcatgtaaacaaacactatctgttccccaattatatrtatatatatagcttccctcttcacttgacactcattctctctcctgctgccctgtgaagaggtgccttctgccatgattgtaagtttcctgaggcctcct

SEQ ID NO: 26544 - DNA, 201 bp, Homo sapiens
caacaattcaagatgcaaatcttgaatgcaccattcagtgtgatcatgacagtgcctttcacttagtaagtcttccacttgtgaggttggttaagaggagygtgaggttagatttgcaaacataaaaacctctggggtagggaggtcttttggtcactctctatgatcctggaacatcacgtgctctttatttatacttct

SEQ ID NO: 26545 - DNA, 201 bp, Homo sapiens
attatcctataatcaaataagctaattaagctgtttcctatccactgatcagagaatattaaagctcggaaggtgactctagctatcctctgctccagctycttcatttttcagagccagttaaggctcagagaggttaagtaaagtgtctcaggtcacacggttatttataaaagaattgggactaaatcgtcagggccc

SEQ ID NO: 26546 - DNA, 201 bp, Homo sapiens
attttgattatgtattttttcattccggaaagcagcgagggccaccccgttgcctaccaaaaatgcacatttatggtccatggcaacctgttgcaccttartgggtgagagagctgctctttccactgcccccttcaccatcttggtgcttccgccgaattggctgactcctgcttgtcacaaatgctttttgccttcttc

SEQ ID NO: 26547 - DNA, 201 bp, Homo sapiens
tgaatgtgtgcctaaaaatacagatgtcatctgtgtcgttctaatattaaattttgttttggaacttcatattcatgaagccagcattatgtcaaactctrtgataatggtcctgtttttaccaggtcatgaatccaggggttctcaaacatgttcaagaagcagggcatttgaaaattatggtgtttcttgagtgatacc

SEQ ID NO: 26548 - DNA, 201 bp, Homo sapiens
tataatctgtgtgacagtgtttttctctatttaaaactagctagtcttgcatggctatttaactcactcctttggcctcattagtattatcctataatcarataagctaattaagctgtttcctatccactgatcagagaatattaaagctcggaaggtgactctagctatcctctgctccagctccttcatttttcagag

SEQ ID NO: 26549 - DNA, 201 bp, Homo sapiens
ggaagaggaatatcttcattcacagccaaaataaaataaatctaggcaggttatctagtaaaatgactaaggtatagggtatgggatgtgtatgtgtgtgwgcacttgtgtgtgaatgtgtgcctaaaaatacagatgtcatctgtgtcgttctaatattaaattttgttttggaacttcatattcatgaagccagcatta

SEQ ID NO: 26550 - DNA, 201 bp, Homo sapiens
atggctctgttgtgcttttttattgaattggaagaggaatatcttcattcacagccaaaataaaataaatctaggcaggttatctagtaaaatgactaagrtatagggtatgggatgtgtatgtgtgtgtgcacttgtgtgtgaatgtgtgcctaaaaatacagatgtcatctgtgtcgttctaatattaaattttgtttt

SEQ ID NO: 26551 - DNA, 201 bp, Homo sapiens
catgtatattattggttcatgtttctgttggcttgcatgacttttagttattggtttctaggacatctttatatattcagggcatacacacacacacacamacacacacacacacacacacacacacacatacatctggcctcgatgcctcatacattgcaattattttcttctaatttgttgccattcagctttatggta

SEQ ID NO: 26552 - DNA, 201 bp, Homo sapiens
ccttttgtgcatatgtacaggtgtttctcttgagtatgttctaagagatggaattgcttaatcatagggtttgcacattttaaatggtactggatgctgtmagtttggcccctgtggtgatttttatcagtactcacccctcccagtgatttatggaaagtattatttgaccagctgccctgcccacatttggtattagca

SEQ ID NO: 26553 - DNA, 201 bp, Homo sapiens
caaatggcaaattattatttttctgttcttttctgtcttcgggattgtatttgcatctcaaatgtgtgtaaagggaattttgcacattcgacaaacttttwctttaaaggcagcaggttggagaaaggagctccatcacattaaatgctggctattgtgcttttcattcagcttgacgaacagtggccgaaaatggcaggg

SEQ ID NO: 26554 - DNA, 201 bp, Homo sapiens
taggaaggtagtaaatatgggtttgaaaggagcagcactgttcagaataggtggtccagactttggtctcccaggaacccctgctaacatatgctgaaagracctataggtatgatgaggttggcttctgagatggaacgatagactccaaatctttctctcaacttaccaaatagagacctttctttctcattatataag

SEQ ID NO: 26555 - DNA, 201 bp, Homo sapiens
gggtagaatggccaaatgatgtgctacttcttaggatgaaacagccttctcttatttctctgttttccaggtggtggcatttatagaagtgttccagaggyccacacctgtccttacctgagcccttcttcttcatccctatacttaccacatcccaccctcacccccagcaaacctctttgaactcaagaggtggtagat

SEQ ID NO: 26556 - DNA, 201 bp, Homo sapiens
gcttcacaagctccccaatatcggactgattgtgttttaaaatcctaggctccctgggtttgtttgatatcagcttatcttactaattttatcttcccctrctcacctttacccttcgttttcatcaaaccaggttccttaagggcagagattgtgtcttattcatctttgtttctccatttgctcaatatccaagatctg

SEQ ID NO: 26557 - DNA, 201 bp, Homo sapiens
cctgtatacacactcagattccaaatgcatcttctttgtcactctgaccagcagaagtgccatttcacaagcatgatagggaaggcttgtccttggggtcrctgaaggctggtgctacaattagcccttctgtttgcttttctgctccttacagtagagtgtcttagatgaacagacagggctccatcaataatgcacaga

SEQ ID NO: 26558 - DNA, 201 bp, Homo sapiens
gtcaccatagcttccttctggggcctgtatacacactcagattccaaatgcatcttctttgtcactctgaccagcagaagtgccatttcacaagcatgatrgggaaggcttgtccttggggtcgctgaaggctggtgctacaattagcccttctgtttgcttttctgctccttacagtagagtgtcttagatgaacagaca

SEQ ID NO: 26559 - DNA, 201 bp, Homo sapiens
taccagcatgcagtagcacgcaagtaatggcaccccgttccaccaccctgcagactcagtgaggggccagatgctcacaagagaggggcttctcatttcaraagaaattatctctgccctttatcccaaatggtccattgagaagcaaagagaacatctttctttcctgtttccccagagagcctgtttctcctcaccaac

SEQ ID NO: 26560 - DNA, 201 bp, Homo sapiens
caattctgtagtgcattacatgcatgcaattgcattatatccaacgtgtaataaatatgtgctgaatgcatgaatgagagaatgaatgaatgatcttgccrtatttcaacttagcacagggtccattctctacctttgtgacatctagctacatcttgcgttgtcttctggtggtagggtcctggctaccttatggtgcaa

SEQ ID NO: 26561 - DNA, 201 bp, Homo sapiens
gaatacactcaaccaagtgtagataaggcagttgtaaaagcttgggaggaaaaaaaaaatcataaaattctagaagaagtctgcactcagattgccttagragacttttaaagttctagttcctctttaaagaaaacaaaacaggaaattttagagctacatagtaagaatggtttgtacaaagtagtccatgctaagctt

SEQ ID NO: 26562 - DNA, 201 bp, Homo sapiens
gagtttactggagagagggcactcatggtgggtggtgtgtgtgtgtgtgtggtgtgtgtgtgtgtttgcctttcatccttttgcttaagagaaagattgtrttctttatgacatccgacagacctatctgttcctttttattaaaattcatgttatcctagtgccatagaaataaattagcatcctttggccccatgcttc

SEQ ID NO: 26563 - DNA, 201 bp, Homo sapiens
agaaatgttctcacccacctgaggcttgaccatgttttcagagctgccacgtggcaggaaaagagtccaaatctgctccttctgcagtgatctctccctgygctacttccttacactgctttgctctgtaccagccattcaggaagatttatcaagtggctagttattatagaacaggacagaatactgggccagatcccc

SEQ ID NO: 26564 - DNA, 201 bp, Homo sapiens
atagtagaagcactcttaaccaacttgcatttcagcaacttggcgtattcacccacgccagccatcttcctgcgaaatatactggctgcagcacatcaccytacagatgcatggcagggcacttctgttcccaccaggtgaactgtatgtttaccaagtcagctgagcctgttcccaaacctacttatgttagttgtgttt

SEQ ID NO: 26565 - DNA, 201 bp, Homo sapiens
ccaaggttataacttaacctgcataattaggatgtccattccagaggggaaaaacatggaaaagataaagggcctctttaaaacagattcttcctgatacwtttttttcataattatagctttaacagcttatggtgatgggaaagctggctacttaagaaaaattaggagtctcatttggcaggagagaattccccaggg

SEQ ID NO: 26566 - DNA, 201 bp, Homo sapiens
tgagttggtgtggatgggaacaatgaagagcaggaggctgaagttctgtcaatgcttttcaggtcaagagtgggaggtggctcaggaatgtggcccctgaygtcagcccgtgcaactcttgtcaacaaagagagctcccagttggagaaattaaaagcaaactttgactgggaatgtgtgggaagtggtagctcagtgagt

SEQ ID NO: 26567 - DNA, 201 bp, Homo sapiens
ggacatcaggatcctgtatgcctgcctagccactgtggcttgtgcaagtagaaataaggtcattttttaattcatagcagagttgccagatgatcttaatwagtatgttgtctcattatttaaataccatctcaaaaaatgcatatatgtgcgcaaatatttatacacatgcatgcatgcatacatgcacacacacattca

SEQ ID NO: 26568 - DNA, 201 bp, Homo sapiens
tttttttacaaaagtttcttgggggaaagctgctttttatacattacatttttcagtcaattcctttgtcggcttaaattatgagccacaggtttttttttaaatgcaatattttgtttgcagacgggtggctgttgcacaaattcaacaacacttaggcttatcagcaacaatggttttcacattagtgagcatggtttg

SEQ ID NO: 26569 - DNA, 201 bp, Homo sapiens
tttatgtttaatggactaaatattttttattggaagggagcaaatgtcagcttaactttgtgagccccgcattcaactttcctttgaggttggtgaaagayggctgacgtgtcattggaaatgaaatgttaagggagaaaaaaagcacaacggagacaaagcgaggatgggagccgtttggagacgtggtgcagcgcttac

SEQ ID NO: 26570 - DNA, 201 bp, Homo sapiens
agggactaggaacagcacaaggaacagtaaatatgttcccatgtagttacacattcactgcacagcaactggttgaagagtggaatggtaggctgattctmtagcacatttaaattttttattcatttaatctctttattttttactgttggtttgatgagtgctcacacttgtatatggaaaagatagatatgtgcttga

SEQ ID NO: 26571 - DNA, 201 bp, Homo sapiens
atgcagttggtggcaattacaacacaacagtccataggtgtttctgatgtccagttggctttagaattcggagacactcagctcccaacaagttcaatttyttcctttactgtctcacaccattttatagatcctatcttgtgtattttttctcacttcttcatgtatttccacatctagagaatggcttccagtgggtag

SEQ ID NO: 26572 - DNA, 201 bp, Homo sapiens
catattgcctttcaagacttgttagttgggataaaaacagccttaatctacagctaattttgcccccactatatagagccaatgcctttctgggtcttgtrcccagtgcaccatggtttactagattttccactctagttggtgggaacatgaactatcccagctctgtgtaatgtctgaagattgtttcctctggtcctt

SEQ ID NO: 26573 - DNA, 201 bp, Homo sapiens
tgtgggccagatgcttccccaggggaaaacagccaacaacagtgaaatgagatgcaagtgggacctatggattttgtttgaaattcaggaaagggaagtgmcaataaatcaaaaggaaaagctatcattctaaacagacctcttcctgctgctgaagtttatggggtgctttggttaccactaggatcttgtggggcactg

SEQ ID NO: 26574 - DNA, 201 bp, Homo sapiens
gctgactctcataattgcctcattattatattttctatataatatgcatctttggattcatagcccaacaatctcagctggttctcctctgtagtttgttyagcagacaattgtagtcattgcccctcagcccatacaacatgggggatctggatggaaatgaaacgcagacttggctcatcagagggcagcttggcttca

SEQ ID NO: 26575 - DNA, 201 bp, Homo sapiens
atgagttagttaagggctttagcatcctaccatgggctgtggtttttccccctgaacctatgggcatgttttgattgaagatgatggctggaagctgccaygtttgaagggctagagaaagagcctgggtttcctgtgtcagatgatacaaactagaaactagaaacgctacatggtagggaggcagtgggggacagaaga

SEQ ID NO: 26576 - DNA, 201 bp, Homo sapiens
cacattccccaaaagaaacatttagcagtaatttttaaatgtctgtgtgtgagcaagctaaataaaatgaaataaaataaaataaatccctaaaaaatctycaaccctaaatgtgcttacttgatggctggcttttacttacaataaaagccaaggtcttacaatggtgtatgaggcccccatgagatctctctgccctca

SEQ ID NO: 26577 - DNA, 201 bp, Homo sapiens
ttcacaaaacataagctatttaaccaccaccattttcagagattgctcataggaagaccaaagaacatagccctagtcctctaaaactggtgtcctaggaygctagaaagtcccttgcctccacaggaaagcaaaaggcaactataattgaagtaccctattgccatgtgttttcagctacacttgttccccactttatcc

SEQ ID NO: 26578 - DNA, 201 bp, Homo sapiens
atataaaagaaaactcatgtaagctcagtgatgaaatgaatgtttctgatacttaacatttacctgatctttttgttgttcccaaaagcaaagttgtggasaagataaagtagtaagataatcttagggcagcagtcaccaacgtttctggcaccagggactagttttttggaagacaattattccacagactgggggtgg

SEQ ID NO: 26579 - DNA, 201 bp, Homo sapiens
tgtatattgagtttttcttgaatttcagactcattttatcctagttcttatccaattaattcacaaaacataagctatttaaccaccaccattttcagagwttgctcataggaagaccaaagaacatagccctagtcctctaaaactggtgtcctaggatgctagaaagtcccttgcctccacaggaaagcaaaaggcaac

SEQ ID NO: 26580 - DNA, 201 bp, Homo sapiens
acatgtgcatgtatttgcaattccatggctaaggaagaaggagaaaacagggatggcatggtcccattttctactctgcagttctggctatttccaaaccrcctgctactataggtaatagcagataagaagagcaaattgtaagaagaaaatataaaagaaaactcatgtaagctcagtgatgaaatgaatgtttctgat

SEQ ID NO: 26581 - DNA, 201 bp, Homo sapiens
tggcttgcatgacttttagttattggtttctaggacatctttatatattcagggcatacacacacacacacaaacacacacacacacacacacacacacacatacatctggcctcgatgcctcatacattgcaattattttcttctaatttgttgccattcagctttatggtaccctttttatatataggttttaaatttt

SEQ ID NO: 26582 - DNA, 201 bp, Homo sapiens
ctgacattgttgaggggacatcaggatcctgtatgcctgcctagccactgtggcttgtgcaagtagaaataaggtcattttttaattcatagcagagttgmcagatgatcttaataagtatgttgtctcattatttaaataccatctcaaaaaatgcatatatgtgcgcaaatatttatacacatgcatgcatgcatacat

SEQ ID NO: 26583 - DNA, 201 bp, Homo sapiens
accagcctgcccagatgtggggctgggggaaaagtgaaggagtgcagcctgaaaactgtcaatggtcaaatatcaaaactggaatcacatactttattacrccatttaaagtaatgccattgtagcatgctggtgcacacgtcttcatgggatccatgaagaaatgggcttcctggaaagctagaaatatgaagatagtgc

SEQ ID NO: 26584 - DNA, 201 bp, Homo sapiens
caaaagatggagccagtcacctgctctaaccccacattttgcatacggaagaaacaaaggtccaccagtgattgactcatgggcacagctagagtttttcytaggcctcaacggcagctcttttcttccatctgcctgtctaattgctgctcttggccttatgatgttttcacaagcaacgtgttattctaatggagacta

SEQ ID NO: 26585 - DNA, 201 bp, Homo sapiens
atctgctttctctctccttcccacatcatagattgaatactactctaatgtaatgactttggctttttgtttgtttgtttttattcacaattgcagatagygcataggcattctgcatatatcaatcttagggttctgtttgttttttcatgaaaacattgctttgttcagtgccctgtggtataacctgtggctgcagga

SEQ ID NO: 26586 - DNA, 201 bp, Homo sapiens
ggtcctgctaaagtttgcaggatggagaaggcgtgtgtgtgtgtgtgtgtgtgtgtgtgtgtgtgtgtgtgtgtgtgtgtgcgcgtgtgtgtttatatatwtattttccgtctctctgccccctgggcctgcagtcttctgtagccgatgtaacaatcctcctggatgaacctcttgtatctcatgctagccaatttcgac

SEQ ID NO: 26587 - DNA, 201 bp, Homo sapiens
gatccacctaccttgacctcccaaagtgctgggattacaggcgtgagtcaccatgcctggccaagtatgtgttgatttttaattttcatactgcgccatgyttcatggatggtttgaggtagcttataagaataaaaactataaaacaacaacaaaaataggatcttaccagtatattggaaaatatttaaaaatgggatg

SEQ ID NO: 26588 - DNA, 201 bp, Homo sapiens
atatagggcaggttatggtgaggactgtgaaagacccaagagccctggagctccctgtgcggcggctgagggtgttcagaggagtgagggtttgaactgarttcagaaggagagtcagcctgagctccgctgagcaaaggctctgggtgactctgccgcttacctggagagaaccgttttgcctctgtccggccatgtgaa

SEQ ID NO: 26589 - DNA, 201 bp, Homo sapiens
ctttacacatattagcttattaaagcacacgtcttcgtggggttagggttactgttgtcccatttctcaggtgacgatccagggcccaaggccacatagcygggtggtgggaccatgaggcaggcagacattagagattactctcttgacattgtcctctactttcttaggacccttgccttacattgtacttggaatggc

SEQ ID NO: 26590 - DNA, 201 bp, Homo sapiens
accagcttgacagagagtttaaccctgattttgaaatcttgggttttttttgtattatttgtttaagatagggactgatatggtttgactgtgtcccaccmaaatctcatcttgaattgtggctcccataatccccaggtgttgtggtagggacccagcgggaggtaattgaatcttgagggtggatttttcccatattgt

SEQ ID NO: 26591 - DNA, 201 bp, Homo sapiens
tctttcagatgggagcgtgtttgtatgtgtgtacatgctgggtcaccatgtcaaatataacgtgggtcatggcccaaagaggtggaaaagggtggggcatrgtgtctgacacctataatgccagcactttgggaggccaggatgggaggatggcttgagcccaggagctggagtccagtaacacagtgagacccctgtttc

SEQ ID NO: 26592 - DNA, 201 bp, Homo sapiens
tatttaaaaccaacattacccggggttctgtgcagagctacagggcaggactggctgctgttcttcagctatgggtgcatgggtgagcttgacaaatcctycccatgcttttgtccatcctccagcccacccctcccaattctttgctttgagcttggtgattctaggctagtgatgaagaagaataagttggaaatgcag

SEQ ID NO: 26593 - DNA, 201 bp, Homo sapiens
agtatgccacagggtgactgtttgtgacacaatggcacccaaagggtccatgtattacatagcttatcagtatcagtcttttctgtcattattgaataggrttctttcctggttgagacacagaacaaatagtattagggtaagaattgtttccctgaacctatcataaaccacagcttatgctagaatagagatttaatc

SEQ ID NO: 26594 - DNA, 201 bp, Homo sapiens
agcaccctaagagtatggtaactctttattacatatagatcaatgtaataaatttatgtttaaactcttaggggagttaccacatgcaaaatagaggacartttaaatttggtgagatccccaaacataactgtaatttgagccacagaattagttaagaccatgaaggtttgccaattcttttcagcttagcagatttta

SEQ ID NO: 26595 - DNA, 201 bp, Homo sapiens
ctctcagcccttgtgattcctgtctagaaaatgggctcttctctgcatggtgcagtcagcaaactactggtctcctcctgggctgggtgtgggttgctgcmctgcctgggtcacatagaaggaagctcaggaaattctttgatccaaagctacttttctgtcctaggaaaggggtcccagaaggatttcacttctccccaa

SEQ ID NO: 26596 - DNA, 201 bp, Homo sapiens
ggctgattcaggcttctagaattctagggcagctgcaggtgaccccagtaggctgaagttaggagacctaggtaaacgagtgtcatggtgaaatccccccygctcctgagaccccacaggctcctcccagacaggccggcctccttaggccttgggtataattagcctagaggtctccggccttgatacaataactggtaa

SEQ ID NO: 26597 - DNA, 201 bp, Homo sapiens
ctcctggaatggaagaatcaatataattaaaattaccatactgcccaaagcaatctatagattcaacccaattcctgtcgaactaccaatgtcactattckcagaatttaaaaaaaaacttaaaattaatatggaaccaaaaaaagcctgaatagccaaagcaactctaagcaaaaatataacaaagctagtggtaccata

SEQ ID NO: 26598 - DNA, 201 bp, Homo sapiens
cttctcctggactctctttgtatctactatacattctttattttccatttgtacattggtgacatgtctacaggtatgtgttgatttttttttttttttttgagacagagtctcactctgtcacccaggctggagtacagtggcgcaatcttggcttactgtaacctctgcctcccgggttcaagtgattctcccacctca

SEQ ID NO: 26599 - DNA, 201 bp, Homo sapiens
tttctgagcaatggacatatttctgagtaatgagttaaatgcagtttttgaatatttggatcttattgtacatcacaataagagcatttttgttgctcaaytgggttcctgttacagaggcacacagtatgtgggcatttgtggattattcatttgctaaagggcattcttcttatttttaggaaaattcacctttgtctt

SEQ ID NO: 26600 - DNA, 201 bp, Homo sapiens
catcagaggacagtcactcttaagtctagaggctgattccccccaaacccatgaaaccatgttttcccaagggacttccaggaaagcagcactctggaacyttgtaattctgtacattcctgaggttctgggctttctccaaaatgcatgtcccagtttggtataataattcgtcatggctttggcatgatgaatctcaat

SEQ ID NO: 26601 - DNA, 201 bp, Homo sapiens
tgtgattacagaacatggttggtttgctgtgtgctaggacccccatgtcttaaccacagttgatttattttaaacactggaaattgcaaaaaaaaaaaaacaaaaaccacacacaaaaaaacctaccttgggagttctttgaccccacagttcttcctattctatgtcttaggctcttaaagtgcttctcctttctgcatc

SEQ ID NO: 26602 - DNA, 201 bp, Homo sapiens
gtgggaggagtttccctggggcacatcagggtacttgtacaggaggatgtgaatgcacactgggcaggaaaagacccgccaaaggaagatgtgatgaagcraaaaggggtcctggagaagagctgttgatgtgatggttcaatgaagatggagaaacaaggaaaatcaaacctgtgcattgctttgggtggccagactgga

SEQ ID NO: 26603 - DNA, 201 bp, Homo sapiens
taattcaacatgagatttggatggggacaaatatccaaactatatcaagggcccatagtgctttgtcttcgacactgagtgaaccatggaatgcgtcagcrttcttgagaattcatatctcttgtactttgctttagttgttcatgtttatttatctggactagttctgaaattgtcaatgattctgggtaaggagagata

SEQ ID NO: 26604 - DNA, 201 bp, Homo sapiens
aaatgtagagtgcaggagacattcatttatcttggaggagaagaccattctgtggccccatcagcctggactcccaagcccagggtaccaagccctcttaytcccttttgcattaaaaacatcacaatcatatcttttttatcctgttatttatttttgagactctgaaaatggatttcttttgtgggtggttgtttaaag

SEQ ID NO: 26605 - DNA, 201 bp, Homo sapiens
gaacctgggaggtttaagctgcattgagctgtaattgtgccactgtacttcattctgggcaacagagagagaccctatctctaaacacacacacacgcgcrcacacacacacacacacacacacacacaatagggaaggaaacttgattaaggaaggccggtctagcataaagctttgggtgaaggatttacttgtgtgtg

SEQ ID NO: 26606 - DNA, 201 bp, Homo sapiens
gaacaaacctattcattcgttcattcatcttagaatctttaacaagctattccttttgtatacaacattcttggttaagttggtcccttcttatcttttargtctcaactcaaatattgccttctcgaacactcatataacccacttataactggcagtctctctctattctgttgcttttttgttttcttcagatcacgt

SEQ ID NO: 26607 - DNA, 201 bp, Homo sapiens
accacaattgtggatttatcaattttttcttttacctctgtctagtttttgtgtcatctgttttcaaactttgtatttaagtgcacacatatttatgattygtatgtcttcctgattatcatcatgaaacaccatgtttaaacctctgatcatagtctctgcctcgaagcttactttgtccaatatcagtgtagccatacc

SEQ ID NO: 26608 - DNA, 201 bp, Homo sapiens
aaagtgaccccagcagctgtggagggaatcggtcaagccattgctaccaaccagaccagggtggagaaggaggccgggctttgctcagttgtcacaaggtyccaggcggctccccaggagccttggaactgatgaggccctgtttttattggccatgcctgtggtaggctgacttccttcactctgagcttcaggccagcc

SEQ ID NO: 26609 - DNA, 201 bp, Homo sapiens
ttctgccttagtagaaaacttttttcctgctgatcttgatgaagtaagaagctatgttggagaggcccacacggcagcagcagagggtggcctctggccarcagccagtaaggaactatggccctctacccaagaccccacaagaaactgaatcctgtcaacaatcttttgagcttggaagcttccccagttaagcctcag

SEQ ID NO: 26610 - DNA, 201 bp, Homo sapiens
cttcttctgattcatctttccatgcccttgagcttccaatataatgacttaatggatggtatgctctcagtggatgagactcaatggatggtatgctccartgactcaatggatggtatgttcttgttcatgaagagcaagccagtgtgcccacaggacagcaaaacagaagtggtttgtggaactattcgtttatttact

SEQ ID NO: 26611 - DNA, 201 bp, Homo sapiens
aggcctgggcacaaccacagggagagttggggttgggtacacatgccctgtattccaggtcacagagtaaggaccctgggtacctgggaggatctgtactygctgcatagtcaggaagtaactatgtaagtatcatattaaataagaaatactatgacaggttgagagaaagagaggagagcattagtgagcttacagaca

SEQ ID NO: 26612 - DNA, 201 bp, Homo sapiens
actatgactttctgagaatcaaatgaggtgatatgctggtgagtccctgagtatggtgcaggaagcatgttaccttaaagaaagatgatgagggaaccgtygctgagaaggtggcatttgagtggacatctgcaggaggtaaagaggttaggccgttccaggaatatggggcagtttctaggcagaataatgtgctaggtc

SEQ ID NO: 26613 - DNA, 201 bp, Homo sapiens
ttgtcttagcaaagctggacaccctcaatggtgcccgctctccactagtgaaacagatgcaggatgcctgggtcctgcctgagcccagggaagaggctcarttcctttccctctttcgcaactgcccccttcacccaattgcccatgagtcaccttaaaaaaaaatgtcttgcatatactagcactggactaaaaaaattg

SEQ ID NO: 26614 - DNA, 201 bp, Homo sapiens
agaaaagaggaagagaaaatggaaaactaatgattcaagaaatcacatagcacgagataattctattttgaaatcacagcagtggcacccagaggcggacrctccccaaattactagtgaaaaccctttgatgtatccagttgtaagaaagcccaaggcacttttttattattattatgagtgtttcacattccccaaaag

SEQ ID NO: 26615 - DNA, 201 bp, Homo sapiens
gggaggtatggtgcccaggtgtgtttcaacacagttcagatgagggacaggggagctggggagaagcaaatgcagccctgccaggaacagtgcgctgctgyttatacaacagggtaaaggaccagacttgtcattattttaacccaagtagacagttctcgcctgtctaaggatgtgattgactggtggtatcttttcatg

SEQ ID NO: 26616 - DNA, 201 bp, Homo sapiens
tctcattgattctgtaaggaaatgtcctatgcacatggttctagaaatataaattactcctgtcaatatttaaccaaaaaccagacttggtccttcaggcrccagggcagagattgctcatttatattgatgtgattttcactaaataagagctgtaatgtttgaggatcaaactgtccagtttttgaaattagctgcttt

SEQ ID NO: 26617 - DNA, 201 bp, Homo sapiens
catggcaacatgacctagattgcattgactacatgtgcttgtttcctgtgcttttgataaactgacatctggggctgggctaaccagggaaagactgtccytcccagggctagccaattcttagagattgcaaatgactcacttagaggtgtgcctttgatatgcaaaggaacaaatccagagcccctgctgtgaaccact

SEQ ID NO: 26618 - DNA, 201 bp, Homo sapiens
gcaatgactaagatggagcctttatttgtctttagtctgcacattatcagcttgacattttcttgatccactttggaaaagtatctttggcattttgtttktgcaatgtagattctttttatcattatttttattaagtttgaaaggaaagagaagagggaaaaggagaggaaaataaagatgtttacttaagaaattggg

SEQ ID NO: 26619 - DNA, 201 bp, Homo sapiens
aactacctgaatgtgctcatgtttttatgatttttttttctgttttcatgcagatgtttcttgtctagagacatattcagattctattttcagtttctttytagtaaattttggagagaggaaaattttttaattaactgttttttttaagaaaatgcttagatggtgtgttcaaaaacaactctgggagccaaacatttg

SEQ ID NO: 26620 - DNA, 201 bp, Homo sapiens
ggcatactggccattggttctgagtgatagctgaccccaagctgaagtactttcttttggctttagctcacaaggatgttgggttctgaaaagagagcctyagcagcctgggccatcttggacacagttctatggttaaagagttgtctgcgtacagtgaaaaagcatcatcctagatgtatgttatgttattttctttta

SEQ ID NO: 26621 - DNA, 201 bp, Homo sapiens
actcatcaaaggaatgaaccatgaacagcagagcatattggaagatccatcatgaaaaggtcgttgtatgtgttctaattacttcagtcaacatggttacmttaaaaggcaggaaagaaaccattgcctttagactgtgtgttaattgccacctgtacactggcagaaaagacagattctgggcatcgtatttgtttttcc

SEQ ID NO: 26622 - DNA, 201 bp, Homo sapiens
ttcttgtccacttctttcctatgataattgtgtctttctgaattgtacatctaatcctaaggttcagagaaccagtgtgaacatcactgttgaaaggatcrcaagggcttcattttgaaaaaagccaagtcaaagagctggtagttggatcattgatttgtagttgttttcctaaacatccagccatagaagtcccaccaa

SEQ ID NO: 26623 - DNA, 201 bp, Homo sapiens
ggttgtcaattaaaaaaatttaaaaagaatttaatttagatatttattaggacttattttaattatcattatggcatatggtctatgttcatgaatacatyttgtgtacttgaaaatgtgcattgtgcaatttttggatatagtgttctaaaaatatcaattagattaatttattcagtagtgtgtccacatctacagtat

SEQ ID NO: 26624 - DNA, 201 bp, Homo sapiens
tgctgcctcttgattttatagcacctgcattttccatataattacatattcctaatgaaaagtactttaatgactacctaatattctcgtagcaaggtgtygttttgttttactattattcaattcacaggtacatgtgttcccccacgggggttttggtttctttagtctaaagctctagaagtagaaataccaggttag

SEQ ID NO: 26625 - DNA, 201 bp, Homo sapiens
gtaatgatctgaccgcttgctaaatgtcactggtcaagaggactttgtttagtgacaagttgattttgggattccaggatcttttttttttttttttttttgagatggagtctcactctgttgcccaggctggagtgcagtggtgctatctcggctcactgcaagctctgcctcccaggttcacgccattctcctgcctca

SEQ ID NO: 26626 - DNA, 201 bp, Homo sapiens
ttgggaggtttaaaatatagtgttatacctctgcagtctgtattattattttacatattatacattttgtgtggatttgtaatcacagcgtgtagggtttrcttgggcaggttctcatttctaacatgtcatcctgccagtgggatggaggctctctggtcttcttcttctttggctcctctgactccaaacacttcaaca

SEQ ID NO: 26627 - DNA, 201 bp, Homo sapiens
atttcactgcccctaggggtaggtgtgtaagctaattgatggttagaaaaatcccagagtaaaccaggaatgtctctaattcataagtgtatattataaakatatttaaaatcatctttatgacaattcagttatgtttctttagcatatcagatcctttagttgtggaacttgacagaaatcaacataaatgttcttttt

SEQ ID NO: 26628 - DNA, 201 bp, Homo sapiens
ctaccagggacagatagactacaaagtattggtaccattaggcaaagttgcaggattttgccaactgaaaccccaaggcattttctaaggaacagacaagrgacaattatgccatcctatctagttcccgctactgcatcaatttgcttgggagctaaaactgctttttactctaaaaacaagttgaaaaacctgagtatc

SEQ ID NO: 26629 - DNA, 201 bp, Homo sapiens
aataagaaaacactctttgctacattctccccactttgtattccacagactggatctgcttcccctgtttaggttgttaactcttgtctccttttcaagttatgcaacagtcaacatagttttacatttgtgtttctgcacatgaaccagcatttgtggacaatagcttctttgaggtagatttgctaggtcaaagggtat

SEQ ID NO: 26630 - DNA, 201 bp, Homo sapiens
gtttcatcctggcatctggtcctgaaagacgaagatggatagggagccacatggtggctgttcactggccccaggaaaggccgtgcttgtttcccctcccragactacttccatagaccgagacaggtaactgcagttacccagtgactggaggagatggagaagattccagtagaaccagccaatctaaacccaggtcct

SEQ ID NO: 26631 - DNA, 201 bp, Homo sapiens
aagaggtgctttaaaagtaagaatttgctattggtggttgtgggaagggattacctatagatccaataggaaaccattttgagtctgtaatgtgaaattttggggagtagaggagggtaaaggaaacaaaattcaagcaatgaaaatatttctttttggtaggggaaatgcttctagagttcaattgctctcctcagatac

SEQ ID NO: 26632 - DNA, 201 bp, Homo sapiens
attttttttttcagagacagggtcttactctttcacccaaagctggagtgcactggtgagagctcaatgtagcctcaaattcctgggctcaaacagttctycagcctcagactcccaagtagttgaaactacaggcatgcaccaccatcctggctgataccctatccaataaataatgctggcataattggagagccatat

SEQ ID NO: 26633 - DNA, 201 bp, Homo sapiens
tataattttttttttcagagacagggtcttactctttcacccaaagctggagtgcactggtgagagctcaatgtagcctcaaattcctgggctcaaacagktctccagcctcagactcccaagtagttgaaactacaggcatgcaccaccatcctggctgataccctatccaataaataatgctggcataattggagagcc

SEQ ID NO: 26634 - DNA, 201 bp, Homo sapiens
ccaggatcaaactttggtattaaatcatgcttaaagatggaggtaactgtgagcagcaagaatggtgagattgggtgattgtgcaattgtgccagcacacrcctagaactggcaacttactaaagatcagagctgaacttggagaggtggcatgtgggtaccaaacaaatccggttgcagctcttgaagtcactcagcagt

SEQ ID NO: 26635 - DNA, 201 bp, Homo sapiens
tcagctattgtcttgagttagaaggaattgctggtagagcatagccttgctttttggagtagagattattagagtcttaggtttcccctccttgctttctyctggtgttaggggtattgcactgtcagtaacattgcaatggattattattttttttccaggatcaaactttggtattaaatcatgcttaaagatggaggt

SEQ ID NO: 26636 - DNA, 201 bp, Homo sapiens
taggcatgagccacggcacctggctaagagtgcatattcattatgtgtctcctctacgcgaggtctttgtatatcctcttccagttaatattcagagaggmctaataaatagtccccatccttgttctagaggggaagagagaaactcagagattgccatggcacatggtgcttgtggtgagccggggttgagttagactt

SEQ ID NO: 26637 - DNA, 201 bp, Homo sapiens
caacttttcgaagtttaatgcttttccattttcttttctccgcgtcagccatgggacaagtaacgtatagttgatcttcagtattccctgattctgtgttkgcaaatttgcctgcccactaaaatctgtagcccccaaatcaatattcatgacacactttctcagtcattcatagtcatgcacaaagcagtgaaatgttga

SEQ ID NO: 26638 - DNA, 201 bp, Homo sapiens
gtggggaggtgaaggctgcagtgagctgtgaacacaccactgcactgggtggagtcacagagtgagaccctatctcaaaaacccccataaaaaccaatacrtaaatcatatgtatagtcaagtattttatcttaaaaatcagttgatttctctttttaggcgtgcatagaaatatttgtttgctgagcttctgcgacaagt

SEQ ID NO: 26639 - DNA, 201 bp, Homo sapiens
gaaattagaaccacctttaggaacactagaaatcatctttcctttcacaaggaaaaatatgaacaggtcctttcccttcagctattgtcttgagttagaargaattgctggtagagcatagccttgctttttggagtagagattattagagtcttaggtttcccctccttgctttcttctggtgttaggggtattgcactg

SEQ ID NO: 26640 - DNA, 201 bp, Homo sapiens
tagacaagatgccaaaagtaggtattaggataaaaatgggccttttgtagcaatctagtttagacatgttttctttaaaaatgccttattacctttctgtrtaagaatttctttcttcctctgcccattgactatagtacaaagatataaatggaaatagctaagtgcaaactttccagaaaagagtgagctatatgtgtg

SEQ ID NO: 26641 - DNA, 201 bp, Homo sapiens
ttaggctcgggctgactggagattatttcattatatccaattaacacccacttgattattcttaattacttctgcatgatgacagaggagtaaagatgtcrtacttcaaatgtacaaataacatctgggccatcaacgtacatgtatttgtaatataatatcctgctcattttgggatggctaatatggtcttagcagagg

SEQ ID NO: 26642 - DNA, 201 bp, Homo sapiens
acatttctagagaaacctgtcttacttcttataaggaggtgctataccttcaaggtggagacataccttgcttatttagtatataatgaagagatgagagrccagttgactctgagaagtagtatgggtatgtgtgatgtgaaaaagagtcatgaactactttgctagtttcagatgtaaattaatgttgacctctaatta

SEQ ID NO: 26643 - DNA, 201 bp, Homo sapiens
cacatcctaagtcacacatgacacggggcatggatcttcaggggcttacctaagctgtccaggacacattgtcctcatcctcaacacaatgaacctggagkcttggatatattcaaggcaaacatccttggcatctcttttagaaataggcctgaaagataaagagggccgagtgatagagtaatggggaaatgcttttgg

SEQ ID NO: 26644 - DNA, 201 bp, Homo sapiens
tatctctagtacctagtctatagcagaggctcagtcaatactcatcaaaggaatgaaccatgaacagcagagcatattggaagatccatcatgaaaaggtygttgtatgtgttctaattacttcagtcaacatggttaccttaaaaggcaggaaagaaaccattgcctttagactgtgtgttaattgccacctgtacactg

SEQ ID NO: 26645 - DNA, 201 bp, Homo sapiens
ccttaggtgatccaccagcctcagccttccaaagtgctgggattacaggcctgagccactgccctcagactctgtcctctattccaatggtggtggttagrtggacatttctagagaaacctgtcttacttcttataaggaggtgctataccttcaaggtggagacataccttgcttatttagtatataatgaagagatga

SEQ ID NO: 26646 - DNA, 201 bp, Homo sapiens
ccttcccctttggtccctggaggagcacaacagtgactaatggtgtgcgtacctgcactcctgggggcttcatttggattatacttttaattactcattcrtcagaggaaaggaacaaaaaccatccattgaaggagacagaaagatgggtataacaaaaagaaagctgagccaagcaggtgctaccttagatcactcctg

SEQ ID NO: 26647 - DNA, 201 bp, Homo sapiens
ataaactttggagtacatgcatttccaaaagtctctcttattcttttcccctaaactgaaaattggaaactatttgggcctgagaatcacctgctcccacraataccctacatagtcctgccattgactcttggagttaggtcctcactcccctgggtacctttagtttcttccatctgtgtctgtgtttttaggtttcca

SEQ ID NO: 26648 - DNA, 201 bp, Homo sapiens
caagaacctagacaacttgcagtcaagaccctctcctggtaacaacaggggctaaggtttcagaaaaaggatatggtgttgtggtgggaccttgtttgacmgatggaggtctggattttcctgatgaagtgttggctcacctgggagctgaagggtgcagagttaactagaggaaaagaggagagggaagagcatcacagg

SEQ ID NO: 26649 - DNA, 201 bp, Homo sapiens
gctaaggaattggaatccttcttggggaggcagtgaaagttgatttgcttattttaagcaggaagtgatatgcttagatttatattttagaaatgtcactygagggagtgatttagaacaatagactggaagggagaaaaggctggagaaggggacagtagtggaagccagtgtagaaattcagaagagagagacagaaag

SEQ ID NO: 26650 - DNA, 201 bp, Homo sapiens
aacctgattagagaaagtgcaagccactgctgaggatcttgtttctggtgaaaattgacctcacccaggaacggccagacatttgggtatttgcaaagcastgctgaacattaaggaacagttaaaattaatcctgtgtactgcagctcctgagaaagccagcccacatgtcaataaatctagatctgtttgaagctaacg

SEQ ID NO: 26651 - DNA, 201 bp, Homo sapiens
gacttaagcagggaggatatttcattatctcacgtaagagtaagactgagttaaagaattaagggattgctccagcagatgacatcagggaccaagactcyttccatcttttttctctgcccattttaccatcttggcttggtgcttacacttgtttcctcatagtcacagcctgagcatgatggttccatgaattgcagg

SEQ ID NO: 26652 - DNA, 201 bp, Homo sapiens
ggcctccctaggctggagtaaagtatctgcatatttttagcccctcagttttgaggacagaatctctgtggcgttgtctgatgcatattgagaactggtgsgttattttgaactggctctattttttttttccagagcgccctcaggtgctcatggaacatacttctcagcaatgccatttcatgttcagttcagattttc

SEQ ID NO: 26653 - DNA, 201 bp, Homo sapiens
tgaatgagaggagagccttatacggagccacagagttacttaaagtaaaactgaaaatggaaatcaaatgcattctgaccagagaaagagagttcaggatkcctgtaagaagccatttaatgggaggctcttgttcctgtccatgtggtgtttttttttgtttttgtttttttgtttttttgagacggtgtctctctctgt

SEQ ID NO: 26654 - DNA, 201 bp, Homo sapiens
tagctctccactttaattattcatccttatgaagaaaaatttcccccgtgtgctttattgtcctccagccccgacctgagctcacgcagactcttccttcyttccctccccaaagtggcttgtgtgtcgaagggctttccactggggtgcttattccatttatgcctttagtatgcattttgtgttctgccaagggggtca

SEQ ID NO: 26655 - DNA, 201 bp, Homo sapiens
aataaatggatgtgcataaattattgtaatatattcttctggcatgattatgcaagctttgagtgtaaagggcagttgtattgaaaaaaaatgagctgtcyattaccttgcaaagacatgtcccaacctactaaacatgcctttcagggactctgagaactaagaaataccatggtatgctgtgatgtgctgtttctgctt

SEQ ID NO: 26656 - DNA, 201 bp, Homo sapiens
gtttctttgcagctgttcttacaacctgcctgttgttcttcagaaaccaaattccgaaatatcatctcacaggcagttaaaatgctaaatgaggagcactsggttgagaatggtgtagtaaggtgatggttgggggatgtcagcaggactcaaagacctgggcctcagctgtttctctcatcagtttgctattttacacat

SEQ ID NO: 26657 - DNA, 201 bp, Homo sapiens
tttgcatattagcatggtgtctacagccttagagggcagtccatttcttaccatgaaacgatgtgggagaacccaatggagtgttgaaaattcatcgtcasaccagggcatctatgtaaacaaagggttaattttcttataattctttttgtttggtcctggcttataaaaaaaaaagccctgcatgtaaatatatctttt

SEQ ID NO: 26658 - DNA, 201 bp, Homo sapiens
gaattgccttgaactggggaggcagaggttgcagtgagccaagatcgcaccaccgcactccagcctgggcgacagagctagactcagtctcacaaaaaaaraaagaaagaaagaaagaaagtttcctggccatattgtgttgtgtagcgtagtggctggcccacctgagaaaactgccaggaagctgttgagaggtccctg

SEQ ID NO: 26659 - DNA, 201 bp, Homo sapiens
aagttccagaaatcaccatgatcagaagtattctaaatcagggctgtaattgatcctttcaaagtaccctcaggatgtttttctgttcgcttcacttccartggcatttgcatattagcatggtgtctacagccttagagggcagtccatttcttaccatgaaacgatgtgggagaacccaatggagtgttgaaaattcat

SEQ ID NO: 26660 - DNA, 201 bp, Homo sapiens
gatttccagccttcatagcattcctgaaatttagcattgctaagtatatggtcaccttgaatagtattctaggatctcgaattcagtacgttctctttttycccccaaaacaatggcaaccagcctctcctctgttctctctttctcttaactgctcctgtagttccagttactagagttcaaaaccttggaacttttatt

SEQ ID NO: 26661 - DNA, 201 bp, Homo sapiens
tgtccttacctgagcccttcttcttcatccctatacttaccacatcccaccctcacccccagcaaacctctttgaactcaagaggtggtagattgaaagargcttcaatgaagggtacatatgccttagacttaattctgatcaataaatgtaagttaattaagtaaaagtcgggggaaagaaggggcttcaagctcattt

SEQ ID NO: 26662 - DNA, 201 bp, Homo sapiens
acacacgcacttaagtcagtttaatgtttgagcatgaaatgatttttcatatctgagaagttggtgtttttggacttgggttcaggctactttatcaggaratacttttatttacttcctaaatttagttcagactcaagatggagcattgcatttggggtatgtccatttcattaagaaaaaggtagtgaaagaactacc

SEQ ID NO: 26663 - DNA, 201 bp, Homo sapiens
ctgatcaaaaagttagctttgtcaaaagcatcaggctcattcttacctacagacaacccatggtgatcctaagtcattaatccacccagaggcctgtcctracctgagtttccttgctttgaagtgtgctgtcctctgcaacatgaggaaataatttgctgcctgcttcagtgaaccatcaggagagccagcagacctaat

SEQ ID NO: 26664 - DNA, 201 bp, Homo sapiens
cataggtaggtagaggataaacatttgttcttttcctcagaatatgccaagaaacttggcgggttgggggccagaggctttggcatgtttccgaacttccyttcaagttgatgcaggcagttcagtcagcatcaggtgtcacaaaaagagagagaaaaatcatcctctcaccacctggtgtgggtgagagaaggtcctctt

SEQ ID NO: 26665 - DNA, 201 bp, Homo sapiens
tggacatttgcactaaatatgcttacttagcaattctgcgcctgaggaatgtcaaccttgtgtttttccatgccttcctatgagtgtctttcacttttcaycactcttccttcaattttccctcagttagtgttctctttagaagtgatgtttttcaagctgccttcagataaatttctggctctcttcttggacttttct

SEQ ID NO: 26666 - DNA, 201 bp, Homo sapiens
agggctgggcctgggcttctgaatttttgataagtctcaggagattctggtgcaggtggtccacgagccactcttttacacagtctgatgtggtcactccycttgattccactccagaggaatctgagcccagataagggagggctctgttcatgtagtgagttcagcccactgacccctgagtagtgttttcctggatgc

SEQ ID NO: 26667 - DNA, 201 bp, Homo sapiens
gtctctctctacaagaggatggacacgtaccacactcaataatggtgagattgtcagtgattttcgtactcttttcctttgagctttttggtagtttgacrtttttctgcaatgagaatattttattttgtagttcaaaagtattagcccttttatgcccagtgttccattattggaatgctaagcttgtgggagttattt

SEQ ID NO: 26668 - DNA, 201 bp, Homo sapiens
ctgccaccacgcctggctaattttttgtatttttaatagaaacagggtttcaccatgttagccaggctggtctcgaattcctgacctcaggtgatccaccygccttggcctcccaaagtgctgggattacaggtgtgagccatcatgcctggcggccctcatcctttatgcagtattatggcagctgaattaagatgaata

SEQ ID NO: 26669 - DNA, 201 bp, Homo sapiens
tgctggtagcagacctcaggccactttctttccccgaatccatgaggtgcaacttattttccattatgctgaataaaattgctagcagttgtggaaatatrtgatatggagggtatattactggcagataaatgtattgttacctctttcagcatgtgggaaattaattgagtgattcatttcatagctattaaagtgtta

SEQ ID NO: 26670 - DNA, 201 bp, Homo sapiens
ctccagctatccccaccaagattcttgagatataagtgaagccatcttggacgttccaattcatgccactatctgacaacaaatacatgaggggcctcaartgagaccagtagaagaactgagcccctatcaacctacagaattatgggcaggtaaaatagtggttgtttaaatccactacatttgttatatagcaataga

SEQ ID NO: 26671 - DNA, 201 bp, Homo sapiens
attaaaggggggaaagaaaaaacaaaaacaaaacagaacaatgaaacatcttccatcaagttgctctgctggtagcagacctcaggccactttctttcccygaatccatgaggtgcaacttattttccattatgctgaataaaattgctagcagttgtggaaatatatgatatggagggtatattactggcagataaatgt

SEQ ID NO: 26672 - DNA, 201 bp, Homo sapiens
ggtcttcttggaatgcttgctcttagaatccacctgccaggtaaagaagctctacctagccaatgtggagagaaagagctcacagcctccagctatccccmccaagattcttgagatataagtgaagccatcttggacgttccaattcatgccactatctgacaacaaatacatgaggggcctcaagtgagaccagtagaa

SEQ ID NO: 26673 - DNA, 201 bp, Homo sapiens
atagcactctgcatgtgcattggaagtgattaaaggggggaaagaaaaaacaaaaacaaaacagaacaatgaaacatcttccatcaagttgctctgctggyagcagacctcaggccactttctttccccgaatccatgaggtgcaacttattttccattatgctgaataaaattgctagcagttgtggaaatatatgatat

SEQ ID NO: 26674 - DNA, 201 bp, Homo sapiens
tgggattacaggtgcaagccaccatgcccagccaaattggagagttattatagacaaaaaaaaaaaaaagaaaggatcttcccctccttaccttcatcagwcctcccactgtgaactctcccttctgaacaaactcactgtgtcccttatatctctctttcttcaccattagctccttctcccacctgaaagatgaagttt

SEQ ID NO: 26675 - DNA, 201 bp, Homo sapiens
ttcttcaccattagctccttctcccacctgaaagatgaagtttcattgatcctttaaaaataaaagaaagaaaatcaagccttgtcgaatgttgttaccayctcctcttccattctcctttccttctcctcctccttctcctccatctttccctttccttcattgcccgacttaagaacagtcttgtcccgattcctttac

SEQ ID NO: 26676 - DNA, 201 bp, Homo sapiens
tatgagaggagcccaagaggtcgccttgtgcaagaggtcaccttgctctttgctggctgttggcttcaactgaacagtaatctctagagcctgaggactaygctcgattcctgtgttcttggaaagctagatcattatgatgtttctggttttttttttttttttttttttttgagacaagtgtcttgctcttttacccag

SEQ ID NO: 26677 - DNA, 201 bp, Homo sapiens
ctcccaggttcaagcgattctcctgcctcagcctcccgagtagctgggattacaggcgcccgccaccatgaccagctaatttttgtatttttagtagagayggggtttcaccatgttggccgggctggtcttgaactcctgagctcaagtgattctcccaaagtgttgggattacaggtgcaagccaccatgcccagccaa

SEQ ID NO: 26678 - DNA, 201 bp, Homo sapiens
ctctccctggaaaacattactgagaccgttagggcaccatgaactaagttggagagttattgttattattattttttgagatggagttttgctcttgttgyccaggctggagtgcagtgacatgatctcggttcactgcaacctctgcctcccaggttcaagcgattctcctgcctcagcctcccgagtagctgggattac

SEQ ID NO: 26679 - DNA, 201 bp, Homo sapiens
aattggataaataaagctaacacaaagggaacacacagataatgttcaatgacaaacacggacaacatcaacaatgtaataataataattgtgatgatgadaatagctaacatttattgaatgcatactattttaaggattttccaaaagttgtttctttttttttttaatttgatcacatatcccataaagaagagtgtg

SEQ ID NO: 26680 - DNA, 201 bp, Homo sapiens
agaaaatcaagccttgtcgaatgttgttaccatctcctcttccattctcctttccttctcctcctccttctcctccatctttccctttccttcattgcccracttaagaacagtcttgtcccgattcctttactgctcatatcatatccacattgctaaaaccttgtctggctttgtcccctgctgctgcctttatgtggc

SEQ ID NO: 26681 - DNA, 201 bp, Homo sapiens
ggaaatgtggatggcagtgcctaatatgtacaattccaatattaaggaagttgtgcagggcccaataggtacacacatccctttagtaaacaagtgtgaaycttgaagaatgaaataaaaatgtttcctttcaatttatgcatttttttatcaaatggctattgagttattaggacataaatacttattaagttgttccat

SEQ ID NO: 26682 - DNA, 201 bp, Homo sapiens
ggtaggtagaggataaacatttgttcttttcctcagaatatgccaagaaacttggcgggttgggggccagaggctttggcatgtttccgaacttcccttcmagttgatgcaggcagttcagtcagcatcaggtgtcacaaaaagagagagaaaaatcatcctctcaccacctggtgtgggtgagagaaggtcctctttgag

SEQ ID NO: 26683 - DNA, 201 bp, Homo sapiens
ggcacataggtaggtagaggataaacatttgttcttttcctcagaatatgccaagaaacttggcgggttgggggccagaggctttggcatgtttccgaacytcccttcaagttgatgcaggcagttcagtcagcatcaggtgtcacaaaaagagagagaaaaatcatcctctcaccacctggtgtgggtgagagaaggtcc

SEQ ID NO: 26684 - DNA, 201 bp, Homo sapiens
atattttaatattacgataatatagatgcttaaatctcagggttaaagaactagattagtcctctgtgatgctgggctactcagaccataaaggtaactcrgtgtttactgttatgtttttctattcttatcctgttgtgtcttgcctcctggcttctctctttttctttttttcctcttctttccttccaactcaaaact

SEQ ID NO: 26685 - DNA, 201 bp, Homo sapiens
ttacgccattttcctggcataatcagtagtagtgtcccctttattctaggaagtatcccaatttagacagcaaattttatggtcatcttaccctcgggccrggtgcagctcactgtggtgtttgtggacagcacaaatgctaatatggctgtcactcagtagagtgtgtgctctctgattccttcagtcctcgccactcct

SEQ ID NO: 26686 - DNA, 201 bp, Homo sapiens
gcatcagtgctcagggtcctcagttcgtaatacctggctcacacagctgcttgggatgttgcctccttgtgaaaccacttccttaggcctggatgagaacsttggcatttcttataagaatagtagtaacttagaagttgtatatgggctgaattgtgatcttcttccaaattcatactttgaaaccctaacccccagtac

SEQ ID NO: 26687 - DNA, 201 bp, Homo sapiens
cctttcctttaccagctgagtctgtaagtgaatttggtgtcatgctaatggcagctctgatgaggcagtggagaattggcttggggtcttggattcagacmcaaggagattttttaaggacatggatgactatctctttgggaggagttgggagtccttcagtgaagccagaggctggggaatggactcggtgacccctga

SEQ ID NO: 26688 - DNA, 201 bp, Homo sapiens
accaaagggaagctagggaagagtgattttcttccatcacaggcaagggctccacggccctctgagatatcgttagtgtggaaggtgatgttttctgacartgtgtccctaggctggcatgtgccccccacatgtatctctccagagctgattagagtggtgtttactgacctttcctttaccagctgagtctgtaagtga

SEQ ID NO: 26689 - DNA, 201 bp, Homo sapiens
aggggggattcttctagtacttcagagggggactttcttgtttgccaccaaagggaagctagggaagagtgattttcttccatcacaggcaagggctccayggccctctgagatatcgttagtgtggaaggtgatgttttctgacagtgtgtccctaggctggcatgtgccccccacatgtatctctccagagctgattag

SEQ ID NO: 26690 - DNA, 201 bp, Homo sapiens
agcatttgtaaaggagaaacctaggactatggtttaatggtataaggagggaagttttggcacaatgtaagaagaaagttttattaaaggatcttattaaacaaaatgatattcttccttacaaagatgtgggtgctgattgttctggaagagctaagagcagagctggaagaccatttttgtaaggcattgtagaagaga

SEQ ID NO: 26691 - DNA, 201 bp, Homo sapiens
tccacaaaagaaaaaatagtaataatatctgcttgtaggttgttatgaggactaaatgagttgatatatgaaaagtgcttaaaaaactgcctggcacctgrtgagtgctatgtaagttggcagtcatttaacctgacagggtgaagtcctgtgacttggtactttggttctggtatgatagcagcggttggggtattttga

SEQ ID NO: 26692 - DNA, 201 bp, Homo sapiens
gagtgctgcagcagactcacagggatgatacgggatattttaaatgtttgaaggcaatacaaccacatgcaacatctgacagacgctatgtgaattaccakctcaggtgtttcacagtttcatcattagatcatgctacaattctttggataatactgtatctttgcaaagttgcataatttttttcggtagttgctgtga

SEQ ID NO: 26693 - DNA, 201 bp, Homo sapiens
tataataaaacacataggaagatgaagtagaaagtttaccagtgtcctgggatcctccgcaaccactttgaggagaatctgagctcttggtatgcaggctyggaatcatggctctgtctggcgttggacataaaatggtagacttgatgcagactccagctcagtcatccttgtctgttatgcttggaggcgacagctctg

SEQ ID NO: 26694 - DNA, 201 bp, Homo sapiens
tgaacttcagataaatagtgtgctgtacttttatagtctgaatgatggtcatcttacactaggaatcagaggccaggtcttaggaaaagagaataaaaatwaatgggtttaaggaggttggatttgaccgccgcatcagtgctcagggtcctcagttcgtaatacctggctcacacagctgcttgggatgttgcctccttg

SEQ ID NO: 26695 - DNA, 201 bp, Homo sapiens
gaatgagttggggaacttaattgcactggtgaaaaatgaagacattttataataaaacacataggaagatgaagtagaaagtttaccagtgtcctgggatsctccgcaaccactttgaggagaatctgagctcttggtatgcaggcttggaatcatggctctgtctggcgttggacataaaatggtagacttgatgcagac

SEQ ID NO: 26696 - DNA, 201 bp, Homo sapiens
aacaattgttttttctttatttatcttctttgtgattctattgattctgttgggatcccttctcagtctttgactttctttctagacaaagccctcctaaytgttctcattagtttgagtatgacaattctgtccgtgtgattaattcaacacacacctaacatttattaagttcctactctatggaagtcgttgagcgag

SEQ ID NO: 26697 - DNA, 201 bp, Homo sapiens
tagggcagaactgtttgttctgtcctaggaattgtagggccaaggcttttgaccaggttttgccacttacttgttctgcgactttcagattctctacaaayagagtggggactgggttatctctgaggttcctagaagccctgacattaattttatgcctttgtgttctctataacttctgcatagcgtaagcttttgcat

SEQ ID NO: 26698 - DNA, 201 bp, Homo sapiens
cccagccaaaggaagtcaggcacattctagaactgcagaccgctgtgtacagggcatctcagtatatttagcaaaatgagattgcaaaccacagaaaaaarggctgagtgggtggagaggaagaacattctctggccagaaacttgctgaactttgaggccagggaccggaggctttgcagaggtggggagagacgttctt

SEQ ID NO: 26699 - DNA, 201 bp, Homo sapiens
gtttgagacttgaaggactaataaaatggacagtagttagctgggctgtgggtagatggttggaatgggaaaatgcctcatgaagggagaacggcatgtasaaagcccccaggcaagtgagtacggcatattcaggcaattgcaagttgctcctcagtgctagaattcagagctgtggtggcaagtttcgaatggtgaggc

SEQ ID NO: 26700 - DNA, 201 bp, Homo sapiens
accccagggcatgcagaatgtcctctgagtgtttagaatgcagttggaatctcacatgaagggtccttccatggatacattgttggccaaacatgaaatarggttaggtgtaaattggatcttcctgttttaccaataaagcagcactatgcatagcccaatggtgaagttctgtgggggactgcaggtctccttcttgga

SEQ ID NO: 26701 - DNA, 201 bp, Homo sapiens
gaggaggcgttggtcagaggagtcttcatgaaggtggtgaagcccaaggtgagctgcctacttgctgttcttcacaagggatttacatctcatggcagtgyttacaccccagggcatgcagaatgtcctctgagtgtttagaatgcagttggaatctcacatgaagggtccttccatggatacattgttggccaaacatga

SEQ ID NO: 26702 - DNA, 201 bp, Homo sapiens
ctggggtggaagctggaggcccatgggctggaatgaagtttacatccagggatccctctaagccattgaacttcggcatttgctctgagtgagagataagragctgtcgaatggcttccttagagaaaaaatgttatctaattttttgccttgtactctaggaaggcaagagaagaagcaggtagaccagttaggaggcag

SEQ ID NO: 26703 - DNA, 201 bp, Homo sapiens
cacactcttcctgtaagtctccactgaaagccgcttagtcaaacgtctcaaatgtcagaaatgaaatttaaagggtttttctagcaagtaggtctaatctsctacttagttttgattcctataatataggtaatctctttggagaaaaggcctgcttttagaagggcaaatatatcccatagaatgtatttcccgctccgg

SEQ ID NO: 26704 - DNA, 201 bp, Homo sapiens
gttcttcataccctttgtttctcagtcattttttttcacaatgcctctaggcgaatgattgcatgtacacacacacacacacacacacacacacacacacmgttctgtttattaagtagttagatcccaataagttaatttatgtcttaacagcttagtagccatttgaaaaaataggtatacattgaaagaaaatgtttt

SEQ ID NO: 26705 - DNA, 201 bp, Homo sapiens
ctctctgtcgcccaggctggagtgcactggcgcgatctcggctcactgcaagctccacctcccgggttcacgccattctcctgcctcagcctcccgagtarttgggactacaggcacctgccaccacgcccagctaatttttttaatatttttagtagagacggagtttcatcatgttagacaagatggtctcgatctcct

SEQ ID NO: 26706 - DNA, 201 bp, Homo sapiens
cactgcaagctccacctcccgggttcacgccattctcctgcctcagcctcccgagtaattgggactacaggcacctgccaccacgcccagctaattttttwaatatttttagtagagacggagtttcatcatgttagacaagatggtctcgatctcctgaccttgtgatccacctgcctcggcctcccaaagtgctgggat

SEQ ID NO: 26707 - DNA, 201 bp, Homo sapiens
tctctgtcgcccaggctggagtgcactggcgcgatctcggctcactgcaagctccacctcccgggttcacgccattctcctgcctcagcctcccgagtaaytgggactacaggcacctgccaccacgcccagctaatttttttaatatttttagtagagacggagtttcatcatgttagacaagatggtctcgatctcctg

SEQ ID NO: 26708 - DNA, 201 bp, Homo sapiens
tttattaatccaatgtgcatctgttaaaaataactccagataatgcaacatttgattaaatggaacttaatacagccattagctggtgggattttttttttccatttacgcattccaagctgagcctgataagatggcactaacatttagcctgaggtgtggaatgttaatagtgggatcttggacagtttgtttattttt

SEQ ID NO: 26709 - DNA, 201 bp, Homo sapiens
gagaccctcacatgttttcatgcccgcattggctttttgtcttttatgtgataggtaggtagggagtgttttctacctatgtattattccaggttttatgmccctgagggtcttttagctggagacttataggcatagtccactccactgagtacagatgttaaagttgccaatgaagctctttatgagggatggagacag

SEQ ID NO: 26710 - DNA, 201 bp, Homo sapiens
tggctgcccaggtggcgctgtccttaatcccttctttactgctgcagccccaggcctagtcccaattacataataagatgatttaatttttttttttttttgctttgactttaactggatgtagaaaagaggaagggtcatttttctccccttcagtgaggatggggtggggcttctgatggtagacttggtagctgcaca

SEQ ID NO: 26711 - DNA, 201 bp, Homo sapiens
accccaccactccagcagaacagaactgccaggacctttgcagccacagtgagttttgtaatgatgtctggggagagatgttctgcaggggcaggcagagwcgaccccaagtgatggggagtgatgtcagctttcgttagagccgcaggcagcgttagaatatccttggcataatatggcgctggtatctctgtcagtatc

SEQ ID NO: 26712 - DNA, 201 bp, Homo sapiens
cccccgacccctgtaacccctccaaacaattataaagcataggaacaaagcgggctgggatgtaagttgtgcaactggtcagttcacaacgaggcagtgcrtgcatgcacacatatgcatgtatgtgcgtgtgacagacactgagttaaactcctcatcattaagtggtgtccttccttgggcaccagaagacactacaca

SEQ ID NO: 26713 - DNA, 201 bp, Homo sapiens
gggggtgctttcctccgagtcttttttaaactttaataagatggttctttaatttttggcattatcctttaaatacatagtccttttggctcttcccccgrcccctgtaacccctccaaacaattataaagcataggaacaaagcgggctgggatgtaagttgtgcaactggtcagttcacaacgaggcagtgcgtgcatg

SEQ ID NO: 26714 - DNA, 201 bp, Homo sapiens
catagggactccagggaagcttcctgtgattgcaacctaaatttgaaaactttctatttaaagggacaagagtgcttttttttttttttttttttttttttaagatggagtcttgctctgttgcccaggctggagtgcaatgatgtgatcttggctcactgcaacctctgcccctgggttcaagcaattctgctgcctcag

SEQ ID NO: 26715 - DNA, 201 bp, Homo sapiens
aggaagcatttctcagctacatgtgttcctcacttgtaacccacagtcatccaggtcattatagtctatgatacagatgacccataggaatggcagtgacrtaaagggtacaatcaatttataggtttattttactgagaatttctgtgtagcaaagaagctgagcctgttttctagactggaaggaagggcatgcgttga

SEQ ID NO: 26716 - DNA, 201 bp, Homo sapiens
gcaggcagaaaagaaaataaagttgtgagagaaatatctggaatggccctggtgacacctttatgtttcccagtgcattcagcatcagattttgtattggyttctagttagcagtagtcacacttaccacttgttctttttttccaatgaaagtatctggcaggatgcggtgactcatgcctgtaatcccagcactttggg

SEQ ID NO: 26717 - DNA, 201 bp, Homo sapiens
gtttttaggcacttattctacttctccaaacttaagactagtgaatacatggtcctttgtgatttagctagagtagaaagctcagtcttatgaaatgaaarctgatatattttttaaagagaacgtactacgaagaaacaacaaagaattaataaaaatgttaaaatcagtaacatatcactaacaatattactaaagatg

SEQ ID NO: 26718 - DNA, 201 bp, Homo sapiens
aaggacagaaggatttttagacatgtcctgtgtcccaggtctccgtagaatattagggtccatggactttggttcatgtctcagcttaatcatatttagcrgtgtgaccttggacaagttatcttctgtgagcttctttttctcatttttaaagaaatatgttggactggtcgatggttttattcacagtattgctgtcac

SEQ ID NO: 26719 - DNA, 201 bp, Homo sapiens
taggagtggtgagagagggcatccctgtcttgtgcctgttttcaaagggaatgcttccagtttttgcccattcagtatgatattggctgtgggtttgtcayagatagctcttattattttgagatacgtcccatcaatacctaatttattgagagtttttagcatgaagtgttgttgaattttgtcaaaggcctcttctgc

SEQ ID NO: 26720 - DNA, 201 bp, Homo sapiens
tgaatgcagtagctcaagggcatacagctagtaagtggcagagtctggattcaaggctccagagcatgtgttcctaatcgccacattacaatgcctctctrgtagatactgaataaacccttgttgggtgaattaatgaatagaagatgctcagtagagctttgttgggtaaacacaatcatggattattgtggaaatgtc

SEQ ID NO: 26721 - DNA, 201 bp, Homo sapiens
caccactccagcagaacagaactgccaggacctttgcagccacagtgagttttgtaatgatgtctggggagagatgttctgcaggggcaggcagagacgamcccaagtgatggggagtgatgtcagctttcgttagagccgcaggcagcgttagaatatccttggcataatatggcgctggtatctctgtcagtatctctg

SEQ ID NO: 26722 - DNA, 201 bp, Homo sapiens
ctttacttactatggccaaagccagatcttttaattaaaaacactgcatatgccattaaatgtgttgttccccctccagtcccaagaagttgtagtttgargagatacaaacaaatgaatccgttgcagatgtgtagagaaaccattgcctactgagtcacaaaccagcgggttcccaaattccagcctcggagtgcctcc

SEQ ID NO: 26723 - DNA, 201 bp, Homo sapiens
gaataccaaccaagtgcaggcagccggttgacacaaccagatcaaaaggctttgaattctgaaaatgattcccctcttggtatcaagcccagtgataaaarcaaagcagttgtcatcttgaaaacagagctgtatacacagcagagcctttccaattagcacacttaagatgcgtgttagaaatgatgggaagtgggatgt

SEQ ID NO: 26724 - DNA, 201 bp, Homo sapiens
gtgtgtatcgggggttggggggtgctttcctccgagtcttttttaaactttaataagatggttctttaatttttggcattatcctttaaatacatagtccytttggctcttcccccgacccctgtaacccctccaaacaattataaagcataggaacaaagcgggctgggatgtaagttgtgcaactggtcagttcacaac

SEQ ID NO: 26725 - DNA, 201 bp, Homo sapiens
ttactactgctccttttaagctacagaagtttatgcaaagtaataaaaaccatctttgctagtggagatatcacccctctaatgatgaaaaaaagtctctragtgactgtggtagttattatcacaaatagccttgtgacagaaacagtttgtaggagagaggttggattatttacattaagggcatatccacaaaatctc

SEQ ID NO: 26726 - DNA, 201 bp, Homo sapiens
agtgggccaccccctccatcctcagttcctccatgtgactagtggagcagatctcacctgcctctcagggtgagtgggcgaggcagacgagggctgcatgygaggatcgtgtgcaagtcttaagtgctcatgaaagtagccatcaccatttccttaagattaacgcctccgagcctcagtcttcattgtttaggaaaggga

SEQ ID NO: 26727 - DNA, 201 bp, Homo sapiens
gatgctctacggggccatggagccattgctgtgagccagtgtgtgaccatgagcgagtgggccaccccctccatcctcagttcctccatgtgactagtggrgcagatctcacctgcctctcagggtgagtgggcgaggcagacgagggctgcatgtgaggatcgtgtgcaagtcttaagtgctcatgaaagtagccatcac

SEQ ID NO: 26728 - DNA, 201 bp, Homo sapiens
aaaaattatcataaactattagcttgtttgcaaagggttttatgttaatcttttagtacttaaagcaatctgcaattaacatatcatggggagctgcctcygagcaaaggcatgcaaattgaagtgcttagataaaaagccattcatgttgtgggggaaagagaaagaaagaaaaaagaaaaagaaaaaaaaatcaaagaa

SEQ ID NO: 26729 - DNA, 201 bp, Homo sapiens
aagagggttattttgtataactatgaagatataatgggaatctaaaacaatcatgaatcttaatgtacccaatgacatggctttgaaattcataaagcagsaacttctagaaataccagaaaaaactaacaaagtcaccatcatgaagactttagcacatctcctatgaaaatgacagctaaatgaatggactttttacaa

SEQ ID NO: 26730 - DNA, 201 bp, Homo sapiens
acaaccctctgaagtttcctaggaaaattcatggactctcagagaaccaagtctggaagcctctttagaaatcatttaattaaaatgtttgatttttttttccgatgagaaatcagaggtaaggaatttgctctaggtcccaaggtgagtttcctgcataggagactgaacacaaaggctttgtgtttttactaaaacatt

SEQ ID NO: 26731 - DNA, 201 bp, Homo sapiens
acaaaataagactcaagatgattactgaaatgacaaagagggttattttgtataactatgaagatataatgggaatctaaaacaatcatgaatcttaatgyacccaatgacatggctttgaaattcataaagcagaaacttctagaaataccagaaaaaactaacaaagtcaccatcatgaagactttagcacatctccta

SEQ ID NO: 26732 - DNA, 201 bp, Homo sapiens
gcaatgttaatattagacaaaataagactcaagatgattactgaaatgacaaagagggttattttgtataactatgaagatataatgggaatctaaaacamtcatgaatcttaatgtacccaatgacatggctttgaaattcataaagcagaaacttctagaaataccagaaaaaactaacaaagtcaccatcatgaagac

SEQ ID NO: 26733 - DNA, 201 bp, Homo sapiens
gaaagaagccaacctgagttatatgctgtatgattctagctatatgtcattctagaaaaggcaaaactatagagagagcacaaagagcagtggttgtcagstgttatgggggaggaaaggatgaataggcagagaacagaggatttggggggcagtaaaaatactctgtatgatagtgtgatgactgatacatgtcatgta

SEQ ID NO: 26734 - DNA, 201 bp, Homo sapiens
gggcttgggagttggtggcatccttttttatagctgctccaggagcacccaacctgggtgtgtttactgaagttgtacgcatgctcctttgagccattttygacttcaccattttgccccttagttcactttcttaagcccattcacccaactcctgagatcttttcaggaagctgctgataaccagtttcaggtatttct

SEQ ID NO: 26735 - DNA, 201 bp, Homo sapiens
cgagaacgtctgttgaggtttggtatttgagtctgagaattgaaatgacaatagaccaatcaacaggagaaaaggtacataaatttactacaggcatgggrcatcacaagagacagagtgcccaataaccccgtgagattcgaagcttatatgcccttctccatgggagagagtagtgggggtctgcaggcacttttagag

SEQ ID NO: 26736 - DNA, 201 bp, Homo sapiens
gagtctcgctctgttgctaggctggaatgcagtggtgtgatctttgctcactgcaacgtccgcctcccgggttcaagtgattctcctgcctcagcctcccragtagctgggactataggcacacgccaccacgcccagctaatttttatatttttagtagagacggggtttcaccatgttggccaggatggtctccatctc

SEQ ID NO: 26737 - DNA, 201 bp, Homo sapiens
aagaatgaggagaggggccacttccaatcccctaaaaatactgaatgccaggatgaggggtgtgggaatgtggccatctcgtctcccgtacctctggatgstctacggggccatggagccattgctgtgagccagtgtgtgaccatgagcgagtgggccaccccctccatcctcagttcctccatgtgactagtggagcag

SEQ ID NO: 26738 - DNA, 201 bp, Homo sapiens
ccaaggccagctttgaggccgtggaacaatgtcaccctctctccattgccaactctgatagactatttgaccccagcaatttctagctttgttccaagccrtccaaaccagggagcatctgctctgtccttaaaagtttctaaaagtcattttgatccttatgtaagaataaggtttgaagttttgtagtggagaaacatc

SEQ ID NO: 26739 - DNA, 201 bp, Homo sapiens
gttcttaatggaaattgttagtcttttttttttttttttagacagagtctcgctctgttgctaggctggaatgcagtggtgtgatctttgctcactgcaaygtccgcctcccgggttcaagtgattctcctgcctcagcctcccgagtagctgggactataggcacacgccaccacgcccagctaatttttatatttttag

SEQ ID NO: 26740 - DNA, 201 bp, Homo sapiens
attgctcctgagctgcaaacctgtacagcatgttcctgtacagaatactgtaggcaattgtaacacaatggtaagtatttgtgtatctaaacaaaaaaaaagttacagtaaaatacgatattataatcctatgggaccaccatcttatatgtggtccattgttgactgaaatatcattatgtgatatttgactgtatatgg

SEQ ID NO: 26741 - DNA, 201 bp, Homo sapiens
agtggtatatgtggaaattcttgctgctatgaaatgagtcatatagtatccagtcctagcacccatggagcaacatgtttgaccatgaaggaaatcattcyttagtctgatttggataactgtccgtggcccaaatttggaattgtatgttcctaggtccattcatttggctcctatgtatatccagggtatccagggatc

SEQ ID NO: 26742 - DNA, 201 bp, Homo sapiens
taagagttgcagttgctccaaatcctcaccaacacttggtatggtgagtctttttaattatcatattggtttgtgtatgttgaaccatccttgaatttgcragatagatcctatttgatcatgatgaatgaagttttccatatgtggttgagtttggtttactagtattttcttggggatttttgcatcaatattcatcag

SEQ ID NO: 26743 - DNA, 201 bp, Homo sapiens
tggctcacacctgtaatcctagcactttgagaggctgacgtaggtggattgtttgagaccaggagtttgagaccagcctgggcaacatggtaaaacccctwctctacaaaaaggacaaaagttatccgggcatggtggtgtgtgcctgtagtcccagctactcacaaggcagaggcaagagaattgagcctgggagttcga

SEQ ID NO: 26744 - DNA, 201 bp, Homo sapiens
caaagaagatgcagcctttgaaatggatcttaatttgaatgttgacattccagtaacaaaacaaaaataaccacttgtagatggagagcgagagcgagagtgagagagagcgagagagagaatgaatcacaaacacctgtaaagtgtaactattagtttcaaataggatattattgaatctgtcctaaaaccagttgattg

SEQ ID NO: 26745 - DNA, 201 bp, Homo sapiens
tgggtctcagtaatacccctggggcatctacccctacacatacagccaactttgcctttgaatctcccctctccatctgaagtctttgttctttccaatgsatttatagcaatttacttcctcatgaaaaaagaacttgcattcctgaatctctgcaatgaactgaagaagctaactgtacaactcaatcctgcccacaag

SEQ ID NO: 26746 - DNA, 201 bp, Homo sapiens
ttaatactgttttcatttccaatactaatcaatcctggaagaatgtgctgttattttttagttacatgtaaacatttagatgaatataaaatggcttattsatagcttacatgcaggcaagtttattgatacttttgtcaaattctgtttgattgattgatttggccatcgtactgctatggatatggaatagaaccaata

SEQ ID NO: 26747 - DNA, 201 bp, Homo sapiens
agggacaacattctgtaatgatccagagtatgggagtgtgagggacacactatgagttggtggctcttcataaccactattaatcatagtatgtttttttwtatgacccagcaatgcaaccaatgttctcattttatttttcttggtattcttagcacagggcctggcatatagtaggtggttattaaatacttgataact

SEQ ID NO: 26748 - DNA, 201 bp, Homo sapiens
tctaacagcacaagccccatagtacaagtagtcttcaagttcaacttatatcatgtgttaatgtcccatgaccaaagcaagtcacataccaactgtagaayaaatatgggaagggactgcacagggtgtatgtataaagaagcataattcatttctgtaacaatctacccaggagaccttggcattggcatcttgtctcct

SEQ ID NO: 26749 - DNA, 201 bp, Homo sapiens
aattatcttaacgaggatagggttaattacagtggaaacttaaaagttctctccgtttgaatccactggagcccaatgcgttgtgatgttttgtcattttkatgtgactttggaaaaggcactgggatgctcccagcagccgctgcagctcctgggggagcccaggcagagccctgggaacgagggaaggaggtaagagga

SEQ ID NO: 26750 - DNA, 201 bp, Homo sapiens
gttattggggtgtgcctgtgtgtgtgtgtgtgtgtgtgtgtgtgtgtgtgtgtgtgtagagagtgatgataagaagggatttctgcagacagtttcttatrttgtcaattactcctctccctggccttatatgacactttcttagaaaagtttattgaaagccatcatcattttttctgagtccagggccatcttcatggt

SEQ ID NO: 26751 - DNA, 201 bp, Homo sapiens
tgtgaaaaacagtgggagatttatggctattaaacaactttgtagctgcccccttcttgtttcgaagtctgccaaatctctcctcctgtggtctgtatcargttctttcagtgcatccaggacattcagagatatccaccggactgtagtttttcattgaatgcacctattggaaaggggcttgaattttatgcatttatc

SEQ ID NO: 26752 - DNA, 201 bp, Homo sapiens
atcctaagccgaaagaacaaagctggaggcatcacactacctgacttcaaactatactacaaggctacagtaaccaaaacagcatggtactggtaccaaarcagagatatagaccaatggaacagaacagagccctcagaaataataccacacatgtacaactctctgatctttgacaaacttgacaaaaacaagaaatgg

SEQ ID NO: 26753 - DNA, 201 bp, Homo sapiens
acctcttcaaggagaactacaaaccactgctcaacaaaataaaagaggagacaaacaaatggaagaatattccatgctcatggataggaagaatcaatatsgtgaaaatggccatactgcccaaggtaatttatagattcaatgccatccccatcaagctaccaatgactttcttcacagaattggaaaaaactactttaa

SEQ ID NO: 26754 - DNA, 201 bp, Homo sapiens
gcctttgttcattttgtttttttttctctgcatgccacatctgaaatcccttctctcagtaacctaaatcaactttgtccttctcatcctccagttcttarcttgttatcacttcccctgggcagccttcctccaagaccagaccagatcctgctattttatggatcctcaaagcagcctgtacctctccttcctagccct

SEQ ID NO: 26755 - DNA, 201 bp, Homo sapiens
acctaggaatccagcttacaagggatgtgaaggacctcttcaaggagaactacaaaccactgctcaacaaaataaaagaggagacaaacaaatggaagaayattccatgctcatggataggaagaatcaatatcgtgaaaatggccatactgcccaaggtaatttatagattcaatgccatccccatcaagctaccaatga

SEQ ID NO: 26756 - DNA, 201 bp, Homo sapiens
tcaggcaggataaataaataaagggcattcaattaggaaaagaggaagtctaattgtccctgtttgcagatgacatcattgtatatctagaaaaccccatygtctcagcccaaaatctccttaagctgataagcaacttcagcaaagtctcaggatacaaaatcaatgtgcaaaaatcacaagcattcttatacaccaata

SEQ ID NO: 26757 - DNA, 201 bp, Homo sapiens
aattctgtgaatatgcataaagttttgaatatatattttaacgtagtaaattttacgctatgtttattatatctcaataaaacttttatttaagaaaagaygaatacaggagcacccagatttataaagcaagtccttagagacctacaaagagacttagactcccacacaataataatgcaagactttaacaccccactg

SEQ ID NO: 26758 - DNA, 201 bp, Homo sapiens
tttttaagtcactaccatcagttgcattggttttgagtcttcccaaatgtgtctacctttgggaaggcccaattggccagttcctagacagtttttttttmtgtacacagctcattttcacatatggatcataacttcccaggctatcctagcatagcctatcccatctatcccctcattgtgtttcaatgataagatgat

SEQ ID NO: 26759 - DNA, 201 bp, Homo sapiens
tcctcagcctcccaaagtgctgggattatagatgtgagccactgcacctggccaggtgatttttgcacttggaatttaagggaaacaactaaaaatctaamaaaataattcagtgagaaagtaaaatatacagtgaatatgcaaaatctttagactttttatattgaaatgaaagcctgttagtattttgaatgaaaaact

SEQ ID NO: 26760 - DNA, 201 bp, Homo sapiens
atcgttagaaaaagccttttcccacacaggccctgatcatgacaaaggttccaggacatcttctgggagtggcaccaggttcaaaatgagcaagaacacaygggaggtacagaaaaagacttgtgggcaaattggccaagacagcagaataacaaacccaggtctcgcgtgcggtatgcctgtggggaaaacatctatgga

SEQ ID NO: 26761 - DNA, 201 bp, Homo sapiens
ggtttttgtctttggttctgtttatatgctggattacatttattgatttgcatatgttgaaccagccttgcatccagggatgaagcccagttgatcatggwggataagctttttgatgtgctgctggattcggtttgccagtattttattgagaatttttgcatcaatgttcgtcaaggatattggtctaaaattctcttt

SEQ ID NO: 26762 - DNA, 201 bp, Homo sapiens
gattctgttgactatgtagtgcatttttgagagaattgacatcttaacaatattgagtctgtgaagatggtatctctctctattaatttagatctttttakaacttttaatctgttttataattttcagcatataaatcttgctcatactttgttagatttgtacataaatattgtatgtgctttgtgctattataaatgg

SEQ ID NO: 26763 - DNA, 201 bp, Homo sapiens
tatccacgtttttctgggtctttctccatgccaggcattgaaatgaaaaccattgaaattttaacattatcaatgaaaactgggtttactctaagtcgggrttggcaaactatggtctgctgcctcttttcatatgcctgcaaggcaaaaatggtttttacattttaaatcatggagaaaaatcagaagaatactttgtga

SEQ ID NO: 26764 - DNA, 201 bp, Homo sapiens
gttaaaccacttgttcacattcatacaataagttagaaatagaaaaggagacaaggcattttcctctagagtataaaataaaatcagatatacatgtaagscttggcacatatgcatatgccagcatttaagaatgatttgcagaagtatttgttagctactgtttatacttcaagccataagttaatgttttctttattc

SEQ ID NO: 26765 - DNA, 201 bp, Homo sapiens
ccttgtacccataaaagtgaaagaataaatttctgttgttttaagtcattgcatttattgtcatggctatagtagctagtatgggagatctgtactgtgawgtgactcacatcccttttttgctatattgactagaactcaaaccaactgtgagggagaatgtcaaatgttgccatctgtgtgcccaggagaaggagagtg

SEQ ID NO: 26766 - DNA, 201 bp, Homo sapiens
ttgaactcccttgaaccagggaggtcaaggctgcagtgaactgcaattgtgccagagtgaggaccacagagggaactctgtctcaaaaaaaaaaaaaaaamaccacacacacacacacaaaaacaacaacaaccaaaaaaaccagaatgtgaacaacaaccaccaaaaaaaccagaatgtgaactcaaacactcagacaat

SEQ ID NO: 26767 - DNA, 201 bp, Homo sapiens
ctctaacaagccagatagaaatgcatcattttttaggccatttcacttggatcgaagcttgttttctttcacactcctagtgctttcaaaaaaaaaaaaaacttggctgtttaattaaaaaaaatttggcctgttttgtatatatttgcagtctgagcacccatagaggggagtcacccctctcctccagacaagggtggg

SEQ ID NO: 26768 - DNA, 201 bp, Homo sapiens
tattcatgtacatatatacatatatgttcatgtgtacatatatatgtatatttatatccatatatatttatattcatatgtgtatataggtattcccatcrtatgtgcatgtatagtgtgcctatgaaggacaaagcgcggtgcaaagcactgtggggaatacttggtagattaagacacaggtcttcctctcaaggatct

SEQ ID NO: 26769 - DNA, 201 bp, Homo sapiens
ccaaaagggttagtaacagaagaataaaaaatataattcgttttctctcctaattcattttcttggtaactgttgccttctcatatcctcttctttctttyttttttgtattcaagaactttaatatcttatttttccaaaacatcaatgtcctgattatagtgaaccttgaacagacatctcctcctgcccatggaaaat

SEQ ID NO: 26770 - DNA, 201 bp, Homo sapiens
gagtcattgtcatttcagttgctgagaagtggactgaaaccttgctgttagatgaggaaataaccctgccaattatacacacacacacacacaaacacacacacacacacattccccacactggcatgccactgcctttttcaagataggaggaatcccttaactagttatttcatcatgcatgaaaaaccccaaagtaaa

SEQ ID NO: 26771 - DNA, 201 bp, Homo sapiens
gttaggcaaggattgctaggttagattcaaagctggtcagtattctacagagcaataaaataataatgtctaggactctttttttttttttttttttttttaccggacaaaaatctacaatttaacatgtaacttcattgtatctaggttgtgatcaagtaatgagcagtgaagtcaaatataggtatgatctaggaagaa

SEQ ID NO: 26772 - DNA, 201 bp, Homo sapiens
ggagaaatgatgactgtaaagtgaggaggtagaatctgtgtattcattatttagcttgaaagcactaacttgcgtcaacccatacttgatattttgatggkggacaaataatggcatttattcaggcagggagtagagccagtgcaaaggtacagagacttgaagggacaggatatagcagaaaattagtggtgtgcagta

SEQ ID NO: 26773 - DNA, 201 bp, Homo sapiens
cactgattttcatgcagtacttgctttttatcacagcaaccactgaaatctcacttttgaaaagatatggcataatcagaaggaatgtagcatgatctaaygttgacactgagaactacattgacctactggtttgcagagtgacagatgtcatgtattgctgtattttccttgaaaatttaacatatttcaaaattaagt

SEQ ID NO: 26774 - DNA, 201 bp, Homo sapiens
aactggttgtctggcaagattaaccttgtgtactttgccccatcttttgagagaaagatctctctaaatttcaaagaaaaaggcatcatttatttgcaccygaatggtacatttctgttcagaaaactgaaatcagctgcatacacagaacccggttgggacaacgtcaccactggggagagggtgagacaggccagattt

SEQ ID NO: 26775 - DNA, 201 bp, Homo sapiens
atcctttttacttttcaatttttattatatatttttagtacattttagatttctaattggatcaaattatggatctctgttttagtttcccccaccactcmcttttatttacttgcttttaaatttgacggttgctggatacactttaaaggggttgtgtcttctttgttcagatgtatatatacacattttcccttcaga

SEQ ID NO: 26776 - DNA, 201 bp, Homo sapiens
ccatgctgttttggttactgtagccttgtagtatagtttgaagtcaggtagcctgatgcctcctgctttgttcttttggcttaggattgacttggcgatgyggactcttttttggttccatatgaactttaaagtagttttttccaattctgtgaagaaagtcattggtagcttgatggggatggcattgaatttataaat

SEQ ID NO: 26777 - DNA, 201 bp, Homo sapiens
aattagatcccatttgtcaattttggcttttgttgccattgcttttggtgttttagacatgaagtccttggccatacctatgtcctgaatggtattacctrggttttcttctagggtttttatggttttaggtctaacatttaagtctttaatccatcttgaattaatttttgcataaggtgtaaggaagggatctagttt

SEQ ID NO: 26778 - DNA, 201 bp, Homo sapiens
tgtagattctggatattagccctttgtcagatgagtagattgcaaaaattttctcccattctgtaggttgcctgttcactctgatggtagtttgttttgcygtgcagaagctcttgagtttaattagatcccatttgtcaattttggcttttgttgccattgcttttggtgttttagacatgaagtccttggccataccta

SEQ ID NO: 26779 - DNA, 201 bp, Homo sapiens
aagcaaacaaagaaggaatatttgcctctcattactaccatctggagactccaaggaggccctatggttcagtctactttctttcagtttaccactttgtrtcacttgtccaggtgattttaaataaacattcattcattcattctgtctctctctacaagaggatggacacgtaccacactcaataatggtgagattgtc

SEQ ID NO: 26780 - DNA, 201 bp, Homo sapiens
gcagggatacagctgtggcagcagaggtggggtcgggggaaacagcaaacaacagacaataaacaagatgatttcagaaagtcataagtactatgactttytgagaatcaaatgaggtgatatgctggtgagtccctgagtatggtgcaggaagcatgttaccttaaagaaagatgatgagggaaccgtcgctgagaaggt

SEQ ID NO: 26781 - DNA, 201 bp, Homo sapiens
ctgacatcgttaccatttcctggattttctttatgactaaatctcacatcttttttaaaggcccacttaaatgtcacctctttcataaaagcttttttgatctctgaagctatatagatctctgagctgccatcgttctatacctcaggttcctattcattttctacctcataggggactggtttgagaacattgctgtat

SEQ ID NO: 26782 - DNA, 201 bp, Homo sapiens
tgttgcctatgcttttggggtgacatccaaaaagtcattgcccagactaatgacatggagttttcccctatgtttccttctagtggtttcgctgcttcagstcttatgttgaagtctttaatccactttgagttgattttattatatggtatgagataagggtctaatttttttcttctgttgtggatattcagttttccc

SEQ ID NO: 26783 - DNA, 201 bp, Homo sapiens
aggcatattttactaaacataatctccaggttcatccatgttgttgcaaatgacaagatgtcctttattaaggctaaatagtagttcattgtgtacaagtrcaccacactttcttaatccattcattcattgatggaaccgtagactgattccatactttggttattgtgaataattgctgcataggagtgcagatatctc

SEQ ID NO: 26784 - DNA, 201 bp, Homo sapiens
cagtccccagtaaccaccattctcctctctgcttcaatgagtttaacttttttaggatccacatataagtgagatcatgtggtatttgtctttctttgccmggcatattttactaaacataatctccaggttcatccatgttgttgcaaatgacaagatgtcctttattaaggctaaatagtagttcattgtgtacaagta

SEQ ID NO: 26785 - DNA, 201 bp, Homo sapiens
ttatgtaccaatcgagtgtactctatttctgttggtgcttcctaaacagtctaagggagctctaaaaataagtaccaaccaatttatacagtaatgttcayagcgttgtttacagaatgcctcatcacaggtcggtatcctgggagaccccaaaaggtatgatactttcagagaggggccttagtgaaggaggtatagttt

SEQ ID NO: 26786 - DNA, 201 bp, Homo sapiens
ttcaagcatgtagctggcctaattctcaaactgaacagatgaggaaacggaggcctagagagtggaggtgtttgcctcaagtgacactgatggctgatgascagttccatagctggcatactttgttcagctctgcagacgatagtttaaggcaaggacacatgacaggaggatggctgggaggatcgggagcttatgacg

SEQ ID NO: 26787 - DNA, 201 bp, Homo sapiens
gaaatatggtaaatttgtttacagtaaatattggctaattgactaaaagtaaggcttctagagtttagttcctgcttcaaccactaactagctctttgacyttaagcaagtccgtttgcttctctgagtctagctcagtttctcatacgtaaagcagagataatactgctaccaattttggagatttaactaattctgccc

SEQ ID NO: 26788 - DNA, 201 bp, Homo sapiens
gatctcattttatccttgacattggaattctgaaacatacatgcattccatgaagtccactgtttattgttgaagccaataagtaagacagaacaaaagcraagtgaagttagaaaggtatccactgtataggtactttacaaattgtgggtaacaaggtggggagaaaagaaggacattctaggagggaaaaagataata

SEQ ID NO: 26789 - DNA, 201 bp, Homo sapiens
gggttgattccatgtctttggtattgtgaatggtgcagcaatgaacattcaagtacatgtgtctttttggtagaacaatttattttcttctgggtgtatamccagtaattgggttactggttgaatggtagctccgttttatgttctttgagaaatttacagactgccttccacagtggctggactaattttcattctgac

SEQ ID NO: 26790 - DNA, 201 bp, Homo sapiens
ttttcctaccccctttgcctccttcttcctggtaaccttcatttttgctttcctatataaaaccttctaaaccaggcccctttgacctctctcttcttacrtactaatggcaggtgtagactttactgatggtttgctgatagctgcctttaattattatttatgtttttaggcacttattctacttctccaaacttaaga

SEQ ID NO: 26791 - DNA, 201 bp, Homo sapiens
atttaatattttgtttctaaatattttggggttttacagttacttttctgtcactgacttctaacattattttggccagaaaatattctttgtctttgtayctttcttaacaatgtcacaatgtctttcatatagcaaatttttaaaaaaattttcctgagctctagtatgtcacattttcctctgatgaattgtattttt

SEQ ID NO: 26792 - DNA, 201 bp, Homo sapiens
cccactgaattactttccctgttgtgttaggtatgcctcaggggcagagaacgtaatacatttcacttttaggttcttggtgcctggaggagtgtgtaatrcatagttgctgctcagttaataatgtttgtattgaatggaaataaccaagagtctttggtctagagaggaggagaatgaagtgtcatgatcaagatctgt

SEQ ID NO: 26793 - DNA, 201 bp, Homo sapiens
aacaccacccgtctctgcctgtccaattttttctcttcatatattttccttcttggttcataacatgataatcttatccagtttgggcaattgaagtaacktagataaatcctcagctcttctctcttgccacccattttataggtcattaaatatgccttttgggcactttttattgaagtattaacatacatttataag

SEQ ID NO: 26794 - DNA, 201 bp, Homo sapiens
ggattctgctaaaaaaaaaaagaaaaaagaaaaactgctaaaacaaataaatgagttcagtaatgttgcagaatacaagaccaatgtagaaacatccatcktaattgtgaaattaagaaaacaattccatttataatagcatcaaaagagtaaaagacttagaaataaacccaacaaaagaagtacaaaatctatgccctg

SEQ ID NO: 26795 - DNA, 201 bp, Homo sapiens
caaactttgtatttaagtgcacacatatttatgattcgtatgtcttcctgattatcatcatgaaacaccatgtttaaacctctgatcatagtctctgcctygaagcttactttgtccaatatcagtgtagccataccacttttttatgtgtactttttttgcagcctatatatgtttcttatcctattactttcaacctaa

SEQ ID NO: 26796 - DNA, 201 bp, Homo sapiens
taaacacaagaaaatactcctttattacttctttaaggtggttagggagattgctcataggtatataaatcttcatttgactcttcagtacaagcacagaygtgcgattccctgccttcccattcaatgcatttttgatctttgcgtctctgcattatatgtggattggcgaggccaagagaggagagtagtaaggaagca

SEQ ID NO: 26797 - DNA, 201 bp, Homo sapiens
ccaaaacactgtcatcatcccaagaagaaactctagaatgattaaaccaacaacttcccatcccttctcccctatgatcatggattaacaattagctttcmttagaaacaatggagaccagaaaccaataggatggcataatcaaagtgctggaaaaaaaataaaaaaactatcaagcaacaatcttatatccagcaaaac

SEQ ID NO: 26798 - DNA, 201 bp, Homo sapiens
agtttaaagaactattactggaaaaggaaacagagagtaagaatatcctgctgtatcatgctgtatcacaggacagatggaaacgtgtcatagtttttggkttttttttaatagacatgagggtacaagtacattattattacatggttttattgaatagtgatgaagagtgggcttttagtgtaaccaacacccaaatag

SEQ ID NO: 26799 - DNA, 201 bp, Homo sapiens
caacatttttgtcattttggaggagatgagtgcaaactgagaaagtctctctgcttgtttccctgggtggtacttatgctgtctgaatgttcctttctggratttattagttagtgattttcttttcaataaacacttgtagcatacatactagtgtgctctcctaaagggggaaataatttggcagccttatcagcatgt

SEQ ID NO: 26800 - DNA, 201 bp, Homo sapiens
tccaaagttttcctaaataaaaaagcttaattccttcttagtagaaatgggctcattttaagatgagtatctgttttggaaatagtccatcagcattggckatgtgaggaaaaaaagagtaatgagtaggcttgttgccttgcttattgcaaacagcaaaaaataaaagataagattataataatatttatatgtatcata

SEQ ID NO: 26801 - DNA, 201 bp, Homo sapiens
tcaaattcaaatgcatgacatagagatttctcttcaatggcacagttatagacttggtggttaattaaacatcttttctaatcaaattagctttcatttcstaagtggaggtttttaacctggaagtggctttgaaacattgtttctttcagccatcacctatgaaaggaaagataatgtcccttcaaaggactcctctaa

SEQ ID NO: 26802 - DNA, 201 bp, Homo sapiens
aataaaataaaataaaaaataaaataaaataaaaagaaatccttaattcccaattctaagctcctctgatagtatattcagcatcttttttatgctatgcmgagatgtactcagctaaggggtgcagacctgggtcttagacatctcctttgcaggtcctgctggggtgatacagtacctcatcttgcaatatgggaccag

SEQ ID NO: 26803 - DNA, 201 bp, Homo sapiens
ccattttgtgaactgtgctgttttgcatctcaccccaaaaacgcatcccaaattgagcatatgtgatcttcagtaacattcaggaatttcccatcacttgwagtctttagttacagccacaccttttaaaaacaaaatagatgattttgaggatgtcattggctaatttgcagacctgctttgcattggcatctagaccag

SEQ ID NO: 26804 - DNA, 201 bp, Homo sapiens
ggagggaagcattgcaagtacacttgaaaattctctttgaagaaatccttgccgggcacagtggctcacacctgtaatcccagcactttgggaggctgagyggggcagatcatctgagatcaggagtttgagaccagcttggccaacatggtgaaaccccatctctactaaaaatacaaaaattagccaggcatggtggca

SEQ ID NO: 26805 - DNA, 201 bp, Homo sapiens
atgctgggttttgttgagtgctttttctgcatctgttaagatgatcatgtgatttttgtttttaattctgtttatgtggggtatcacatttattgacttgygtatgttaaaccatccctgcatccctggtatgaaatctacttgatcatagtggattttcttcttggtatgttgttggatttcgctagctagtattttgtt

SEQ ID NO: 26806 - DNA, 201 bp, Homo sapiens
tgttccagttctcagagggaatgctttcaacttttccttattcagtattatgttggctgtcagtttgtcatagatggcttttattacattaaggtatgtcycttgtgtgcccattttgctaagagttttaatcataaagcgatgctgggttttgttgagtgctttttctgcatctgttaagatgatcatgtgatttttgtt

SEQ ID NO: 26807 - DNA, 201 bp, Homo sapiens
tggtattgcattgtggttttgatttgcatctccctaatcattagtaatgttgagcatttgttcatatgtttgttggccatttgtatatcttcttttgagamttgtctatttatgtccttagcccactttttgcttggattgtttttttcttactgatttgtttgagttcgttgtagattctggatattagtcctttgtcag

SEQ ID NO: 26808 - DNA, 201 bp, Homo sapiens
gggagggaaggaagagaaagaaagaaagaaagaaagaaagaaagaaagaaagaaggaaggaaggaaggaaggaaaggaaggaaggaaggaaggaagggagkaagggaggaaggaaaaagaaaagaaaagaaaagaaaaaagaagcatccagattggaaaggaagaagtaaaactgtctttatttgcagatgaaattatcat

SEQ ID NO: 26809 - DNA, 201 bp, Homo sapiens
cactggaaaaattccttaaatttgtgctatgcttggtgttataaaacccaaggaaccttagatgttcttcttgagtaaaatggactggtaattttgttttgttatattatccaccaagcataatgataatgggtcacatgcaatttaagaaaaaattaagtctaataagaaaaatctctaataaatactaacagcatctta

SEQ ID NO: 26810 - DNA, 201 bp, Homo sapiens
aaaagcataagataactcataattcagaaacccagatataaaaagcaaaaatggacaaatttgactttattagaaatactcttgattttatttaaaaaaaaccttttacacaggaacacaaaaccttttttttttttttttttttttttgagacggagtctcgctctgtcgcccaggctggagtgcagtggcgcgatctcg

SEQ ID NO: 26811 - DNA, 201 bp, Homo sapiens
taaacttttgctgtattagggtgataagatttagggatttctggttcctgcatatgacgcagtctatcctgactatcacattttgcaagtacttatcagcytccaggtgtaaacagagtcattgattatggagtcctggaattgactagaaataggaaaagtatttactctcaaatatcttaaaatgtggctaactcatcc

SEQ ID NO: 26812 - DNA, 201 bp, Homo sapiens
gtcacttacctggaagctgttttataaagggaatatgttagaatggtagacaatattagcatttttcaatatatgattttcatttcctttctgagctgagrtatgaaatgcccctgtgcaacttcctatttaacttacatcccagctgaggtcatcttagagggtaccttgtattttgggatggtggaatcacaacatcca

SEQ ID NO: 26813 - DNA, 201 bp, Homo sapiens
gatgtgttgctatggggcacccttcatttgctggcagtaacctgaaacctgggatgaaatgaacatacctgaaatctctgtcactcttctccctaaaggtmatcagaggagttgcttctacaacctaagaggaaggatcattaatttcttaatctgtctaagggtagatcgtcacttacctggaagctgttttataaaggg

SEQ ID NO: 26814 - DNA, 201 bp, Homo sapiens
gaacagcttagcagaccagataacaaagaatccttttgcagctgtttttcttcaagttagagaattttagagccacaaaggaaactggagattatctttayagatgaagaatctgatgtccaaagaaattttccaaggttaaagagatatctgttgccagagccaagataagagcacagcttcttccaacaccttaatttt

SEQ ID NO: 26815 - DNA, 201 bp, Homo sapiens
gattgttttggctatttgagctctttttttgtttcatatgaattttaaaatagtttcttctaattctgtgaagaatgacattggcagtttgatagaagtarccttgaatctataaatttctttgggcagtatggccatttttatattgcttcttctaatccatgaccatggaatgtttttccatttattcatgttgtctct

SEQ ID NO: 26816 - DNA, 201 bp, Homo sapiens
ttatatagacaattatgctgtcttgtaacagagactttttttttcttttccagtttacctgccttttattttacttatttactttttaacatattgcctttcaagacttgttagttgggataaaaacagccttaatctacagctaattttgcccccactatatagagccaatgcctttctgggtcttgtacccagtgcacc

SEQ ID NO: 26817 - DNA, 201 bp, Homo sapiens
aacaaacaaaaggaaaactaataaaaaatcagcacattaactttttcctcctgctttttaatttttttttgtttctatgtatattgtattataatctctaygtcttgaaaagttgttgtagttattatttttggttcattcatctttcgtcttcctacttagaataagaatagtttacataccacaattgcagtgttataa

SEQ ID NO: 26818 - DNA, 201 bp, Homo sapiens
acagattattattattttttaatccattcagccactctgtgtcctttgattggagaattcagtccatttacatgtattattattgataaatagggacttgyttctggcattttgtgatttgttttctagttgttttgcggtcatctcttccttctttccttccttgctgtcttttagtgaaggtgattttctcttgtggta

SEQ ID NO: 26819 - DNA, 201 bp, Homo sapiens
accgcaagttctgttttgccttctgtaggtggtaattccaatgtcaattaagtttgcacagccttttctatattccctgaagctgcccagtgcatgcattrgtcaaggcttcatctaggacttgggccatggattatattgtggatcattctggataccttcactgcggtggtttttgtttagatttgttttgttttttgg

SEQ ID NO: 26820 - DNA, 201 bp, Homo sapiens
gccatcattgtctttttttccactgtgtaaggagacacagaaatcataatgacctgctggacaggtgaggcctgtgcccttgtccttttttttttttttttgggacggagttttgctcttgtggctcaagctggagtgcaatggcatgatctccactcactgcaacctccacctcctgggttcaagcgattctcctgcctc

SEQ ID NO: 26821 - DNA, 201 bp, Homo sapiens
taagactatattgggagtaagtcctttcaggacaaaaccactttaacaacagcagcagcagcagcagcagcagcagcagcagcagcagcagcagcagcagvtactcctgtttacgtgttcttatgttctaggcactgtgccaagtgtttcacatccactctccactcattttccagtagtcttgcagtaggtactattttt

SEQ ID NO: 26822 - DNA, 201 bp, Homo sapiens
aaccaaagcaattagatatgagaagagattacaggcatcaaagtggaaagcctattataaaagtttcatgtttacaggtgattttttttttttttttttttgtgagatggaatcttgctctgttgcctgggctggagtgcagtggtatgatcttggctcacctcaacctcagcctcccaggttcaagaaattcccctgcct

SEQ ID NO: 26823 - DNA, 201 bp, Homo sapiens
tttagaagcatcagcccaatgctttaattttctctttctgaaagaaggatgatgcctttagtagcatcttaaactatgtgtcaaataggcttccctggackttttttaggaaactcaccaccatcagtgacattatttcttgaggaaattgagctctgagtcctcagacccaatatttaaatataatgtcttccaaaagtt

SEQ ID NO: 26824 - DNA, 201 bp, Homo sapiens
tagcagatcaaagtaagaaaaaatagagattgacatttaacattaggaataatgagacaaaaaaaaccccacaaagctattgagcttcatattgataaatytgaaaatctaagtaaaacaagtaattttaaggcaattatagttaccagtgctgtctcaagaagaaatataagtctaaacagagaaaaaaataagatgata

SEQ ID NO: 26825 - DNA, 201 bp, Homo sapiens
aaagtagtgaatctgaccctccaagtcaccgtctgggctctgggcaaatgggatacttgtattctgcaggaaacgaagaagagagtagtgcaggatttccgatgtctgtggcttggacctgtgttgcctgtttggtgtttgggcatcaatagaacttttctacatttaaatatactttagttaattttgtgaaaaatcaat

SEQ ID NO: 26826 - DNA, 201 bp, Homo sapiens
tttgtatcttattgcaagtggatgcattatttgttgtcatttgttggtttcagatattgaaattagctttcagaaaatctgtgtactacattgtggggacmactaagaatcttccacatggattgggaatcctgtgccaaggagtttgctcataatcatggaagaagatcaagatcagtgtaggtggaagtgacttggatc

SEQ ID NO: 26827 - DNA, 201 bp, Homo sapiens
ttggcatatcattttacacatcagtgattgttgccttcccctgaagatataaaatgtgtcctggcctggagcatcccctaagagttcaggttgaaaaaaaacctgcccactttctctaataagtgtagagttttgatttttaataattttttggataattgatgttttatggatttctattcaagaaatgaaggaaaaggg

SEQ ID NO: 26828 - DNA, 201 bp, Homo sapiens
ctggtcatagaatgatgactgcaaaacaacagaagccacaccattttttgctctacctacagtacgaaacaaaactaaatatctcttttacgcttggttayagaattctaatgtgtagcacagtcagagatgtttctgaaaaggtagcatttgttccagtaattgtagaaaaaagctgtcatcaaattgtcaacagcccaa

SEQ ID NO: 26829 - DNA, 201 bp, Homo sapiens
aagcagaaaatctagaagagtccttgccaagacggcaaaatgtgtgaggggaaccagatgttgccctccctgttcagccctgaatgtgggtggctgtggcctttggaggctggggtcaccccccttcctcattgctcacatctgtccagtgaccaggtactcataatcttttattaagagactcatcagctctgcccttct

SEQ ID NO: 26830 - DNA, 201 bp, Homo sapiens
taattaagtgctggtcatagaatgatgactgcaaaacaacagaagccacaccattttttgctctacctacagtacgaaacaaaactaaatatctcttttaygcttggttacagaattctaatgtgtagcacagtcagagatgtttctgaaaaggtagcatttgttccagtaattgtagaaaaaagctgtcatcaaattgtc

SEQ ID NO: 26831 - DNA, 201 bp, Homo sapiens
ttttaaattctaaatattgtaaattataagaagtaattatatgttaaataaagtttacaactccaaacatccttaatcacattgctagcaaaaatttattkatttagtttttgagatggagtctctctctgtcacccaggctggagtgcagtggcacattctcagctcactgcaacctctgcctcccgggttcaggcaatt

SEQ ID NO: 26832 - DNA, 201 bp, Homo sapiens
agatccgccaatggccagactaaaagagatttaacacaaacagggctgaaacacgcctctccgcctaacacgttgcaggtaatgagaaggagaagagctgyggcccttcagggagcccagacctaggggctctccaagtcagggctgtgacgccctctttagggctctgtggttcctggcgtctcccagcttccaggcacc

SEQ ID NO: 26833 - DNA, 201 bp, Homo sapiens
gctgacagcatgaacaccatgatagattgcctggtcctgccactgctcacaggggagcagaggtcacacctggggcctccctggacatgctcagtggctgyagtcaagtgagaaagactgtcctcagctcgcctattgaattgaaatccctctgataccatcgtgctgtgggcttatttttagtgaaatagtcacagttta

SEQ ID NO: 26834 - DNA, 201 bp, Homo sapiens
atttagaatgattgggaaacaaaaatggtagtaacaaaaaaagtatgggaatttcagggcctttacatgactcttctcctgttgcataagtctcaaaagargtatttttttccctcccatgcggttcatgcttccttttccattccccttttctcatttcacaaaggaaactaccattttgttaggtctgagttttgtttc

SEQ ID NO: 26835 - DNA, 201 bp, Homo sapiens
aacaaagctgagatagaaatttctgatgagaagtttgaacacctggatctaaccatatatgaaaccatataccttgagctcattaaagccccctgctcctctttttaaacttaaagcactttgaggtggatttcatgacttaccatcaaaaggataatcttattttcctgaactgttcaacaagggagattctacaactta

SEQ ID NO: 26836 - DNA, 201 bp, Homo sapiens
acataaaattcttcgtttttaagtatccaattcattggtttttagcatatccacaaggttgtgcaactgtcaccactattcaatcaaaaacatttccgtcwttccaaagagacaccccttaaccatttatacttactcccaatctgcctcttccttcagcccctgataaccttaatcaactttctgtctctatagatttgc

SEQ ID NO: 26837 - DNA, 201 bp, Homo sapiens
ataataaaatttcttagaacataaaattcttcgtttttaagtatccaattcattggtttttagcatatccacaaggttgtgcaactgtcaccactattcartcaaaaacatttccgtcattccaaagagacaccccttaaccatttatacttactcccaatctgcctcttccttcagcccctgataaccttaatcaacttt

SEQ ID NO: 26838 - DNA, 201 bp, Homo sapiens
agcacattattaaatgtgtataccttttctgctaatctattatcagtttctttcagcaggctcaaactttcagaagaggagggaaaaattctctttgctcytatatcacacatgttaataagcttctatttgttcttctctgttaatctgtcttttgttatgggggtccattccaactaagaacatgaagggtggagagaa

SEQ ID NO: 26839 - DNA, 201 bp, Homo sapiens
attaaatgagaaaaagcatgtaaagcagttggcacagcacctgtatgtgataaccactcagtaagttttagtttaacatcatcatcatcatcatcatcatcatcatcatcatcatctatttttaaaattatgatagagaatgtcagagctttgcacggttggctatggagcctgaaatgtggccacctaactcttggggtg

SEQ ID NO: 26840 - DNA, 201 bp, Homo sapiens
aattaaatgagaaaaagcatgtaaagcagttggcacagcacctgtatgtgataaccactcagtaagttttagtttaacatcatcatcatcatcatcatcatcatcatcatcatcatctatttttaaaattatgatagagaatgtcagagctttgcacggttggctatggagcctgaaatgtggccacctaactcttggggt

SEQ ID NO: 26841 - DNA, 201 bp, Homo sapiens
aaattaaatgagaaaaagcatgtaaagcagttggcacagcacctgtatgtgataaccactcagtaagttttagtttaacatcatcatcatcatcatcatcatcatcatcatcatcatctatttttaaaattatgatagagaatgtcagagctttgcacggttggctatggagcctgaaatgtggccacctaactcttgggg

SEQ ID NO: 26842 - DNA, 201 bp, Homo sapiens
tggcttctgtctgagctctgattgttgtagagaaagatgctgtcattcattaggaagtgatagctgaatgctacaatggatgcttccagactttatctctstgtgtgtgtgtgtgtgtgtgtgtgtgtgtgtgtgtgtgtgtgtgtgtgttattagttgatggacctgcaacagctaggctttgtcatttccaaaattcaa

SEQ ID NO: 26843 - DNA, 201 bp, Homo sapiens
gcagcatcctgcagggaaggctcacaggctgtggtggtcggtgcacacacatgcacacccacacatgcacatgtgcgcacacacacacacacacacacacaggcctggcactggccatgcccattcctgacacccccagagctgaaagccaagatggtgacaaagcaggactatgagaatcatcaggtacttccaagctct

SEQ ID NO: 26844 - DNA, 201 bp, Homo sapiens
agcagcatcctgcagggaaggctcacaggctgtggtggtcggtgcacacacatgcacacccacacatgcacatgtgcgcacacacacacacacacacacacaggcctggcactggccatgcccattcctgacacccccagagctgaaagccaagatggtgacaaagcaggactatgagaatcatcaggtacttccaagctc

SEQ ID NO: 26845 - DNA, 201 bp, Homo sapiens
tgtggtttagtgttgggagttgattggttgcgtcaatggagtaatctggcatgaacaatcaccctcagcatatcctcactattaaacagcattttttttttggagaggatgtgcattattctttactgtgtgctggccactgcaactcatcataaagatgaatgactgacaggtgacctatgtctggtgtcctaggagagt

SEQ ID NO: 26846 - DNA, 201 bp, Homo sapiens
aaacaaagctgagatagaaatttctgatgagaagtttgaacacctggatctaaccatatatgaaaccatataccttgagctcattaaagccccctgctcctctttttaaacttaaagcactttgaggtggatttcatgacttaccatcaaaaggataatcttattttcctgaactgttcaacaagggagattctacaactt

SEQ ID NO: 26847 - DNA, 201 bp, Homo sapiens
gaaacaaagctgagatagaaatttctgatgagaagtttgaacacctggatctaaccatatatgaaaccatataccttgagctcattaaagccccctgctcctctttttaaacttaaagcactttgaggtggatttcatgacttaccatcaaaaggataatcttattttcctgaactgttcaacaagggagattctacaact

SEQ ID NO: 26848 - DNA, 201 bp, Homo sapiens
ttccctctctctgtctaaggcattcagccgagccattagtctgctggggaggaggtgggagtgatggtcactgagtccccctagccaaaggttttttttttcttttttttaaaaatgatctcattatttgttctctagtctcttcctaagggagggtgcagaaaggtagcatggtgaggtcagaagaacctcatcctagat

SEQ ID NO: 26849 - DNA, 201 bp, Homo sapiens
gtcacattctgggaagattgttctacatcttttacttgggctgggttcatctttaaactcttaattttccattctttgaaactctactaagggaaactggmgtgaggagaggctacattctggggagtaattggccaaattagaaaagtacctagcatgtggaagagaagtcatgcagaaagtgatattcctaggagccta

SEQ ID NO: 26850 - DNA, 201 bp, Homo sapiens
ctgaggcatggaccttgttccacaagggactgagagataacagtgctaactctgagagtgtgcatttgtgtgtgtgtgtgtgtgtgtgtgtgtgtgtgtgtaagagaatattagtagcctaaagggagatctcatgctgctttgctttgtttcatttttttggttgtaaagttgaataaaaggcacttagtccaaaacttc

SEQ ID NO: 26851 - DNA, 201 bp, Homo sapiens
actgaggcatggaccttgttccacaagggactgagagataacagtgctaactctgagagtgtgcatttgtgtgtgtgtgtgtgtgtgtgtgtgtgtgtgtgtaagagaatattagtagcctaaagggagatctcatgctgctttgctttgtttcatttttttggttgtaaagttgaataaaaggcacttagtccaaaactt

SEQ ID NO: 26852 - DNA, 201 bp, Homo sapiens
gtcaacaccacctctcttccttaatcatcccatatgtgctcaatgcctggtgcctgccagaatttggaatattctctctggaagtcaacaatattgcttcwtgataaagggtatcaaaatagtcacattctgggaagattgttctacatcttttacttgggctgggttcatctttaaactcttaattttccattctttgaa

SEQ ID NO: 26853 - DNA, 201 bp, Homo sapiens
gtttattcagatttgctgatttgtccagagttttaatgtttttccaaatttgtttctccaaatcctagctttgccagcccataatgtcatagcagctctgmgcatcttgacatgggggatctatagtggtaaaagcaggctggcatcctcttctcaaatgtctagcactctctttactattattttatgtacctcaaactt

SEQ ID NO: 26854 - DNA, 201 bp, Homo sapiens
tggtattttgtcaacaccacctctcttccttaatcatcccatatgtgctcaatgcctggtgcctgccagaatttggaatattctctctggaagtcaacaayattgcttcttgataaagggtatcaaaatagtcacattctgggaagattgttctacatcttttacttgggctgggttcatctttaaactcttaattttcca

SEQ ID NO: 26855 - DNA, 201 bp, Homo sapiens
ctggaactcatgcttttgaatttattggatagagatcttctgaaactagaagatataacatatactaaatgtcccctcttatccctaagggatttcttttrtctgaaacctcctgtttcacttatctctacattttggtggtgaatctggttgtggcttcttctttatttgccatctgcctgccccactctcagcatacag

SEQ ID NO: 26856 - DNA, 201 bp, Homo sapiens
gggtttcaccatgttaaccaggatggtctcgatctcctgacctcgtgatccacccgtctcggcctcccaaagtgctgggattacaggcgtgagccactgcrcccagcccatggtatgtagttttatctttgactttaaaatgttttacccatcctattatcatgaattgacttcttcctgtattttttggcagtatgttga

SEQ ID NO: 26857 - DNA, 201 bp, Homo sapiens
tcatcatgttagacaagatggtctcgatctcctgaccttgtgatccacctgcctcggcctcccaaagtgctgggattacaggcgtgagccaccacgcccgrccattcatatggtattttgtcaacaccacctctcttccttaatcatcccatatgtgctcaatgcctggtgcctgccagaatttggaatattctctctgga

SEQ ID NO: 26858 - DNA, 201 bp, Homo sapiens
ggcagatttattttgttttagcacattgtctacttgtccagatgtatcaggagataaaaaggagtcatgtttacactcctcccttttttttttttttttttggagatgtaattaaatcgtgtttttgatgagtcttggggagctccagttgaagaaaacaggaattggctggagtaaagggaagaatgaaaacttgcttgg

SEQ ID NO: 26859 - DNA, 201 bp, Homo sapiens
gctcccttccctttttatacttgctctgctctgcttgtacaatgaatggtcagttagaatgcctttgaaccaccccccttcctttctttttttttttttttatgggactcattcctgcaaggacagttgtttcctgcagaataactttctcattcctctcaggactactgcctgggggccaaaacttgctaattagagggt

SEQ ID NO: 26860 - DNA, 201 bp, Homo sapiens
gacagaacataccagatagatgttcctcctgcatatacgtcaggaacatctgctgttagagaagagccgtgtgtgtgtgtgtgtgtgtgtgtgtgtgtgtgcatgcacgcacgcgcaatatgttttaagtatattgtgtgtgtccatatgttctgggatattgaggtttctcaggagtcctgcagtttgcatggctgatac

SEQ ID NO: 26861 - DNA, 201 bp, Homo sapiens
gagacagaacataccagatagatgttcctcctgcatatacgtcaggaacatctgctgttagagaagagccgtgtgtgtgtgtgtgtgtgtgtgtgtgtgtktgcatgcacgcacgcgcaatatgttttaagtatattgtgtgtgtccatatgttctgggatattgaggtttctcaggagtcctgcagtttgcatggctgat

SEQ ID NO: 26862 - DNA, 201 bp, Homo sapiens
tagacagactttgtcacaagctgtttgctgttctttggtcccattcagtttccaaaaagaattatttagaaactattgcctatttacaaattattctttgrgtccaaccaactctcctaaaaatcatactcttttcaaaattgcctacattcccccatctccctctcccctaagaagagggcagtatttaagcttgaacca

SEQ ID NO: 26863 - DNA, 201 bp, Homo sapiens
ataaaagttaccctgttaaaagggaaatttacatctctcaagggaatttccattcatgaaggtggcttctgtctgtaccaagaaaagaaggctgactgcakcaccagagactcctttcactggagaaggtgccagctgaaatctgcagaacaaaatctgaaatctgaaatctgtttttgtggaccatacttcacctgaata

SEQ ID NO: 26864 - DNA, 201 bp, Homo sapiens
agggtggatgggtgaaagatgagcctcttctgtcttattattactattaccaaagaggcaacagtgctttagcttgttccttcccctccctgatcttttcyctcccactccaccttttgaaacttttgttaatcttgctttcttctaccttgtctcatttccgccttgctttcctctctcctctgccacctctcccatcgt

SEQ ID NO: 26865 - DNA, 201 bp, Homo sapiens
ggagggcatctcaagaccccccagagtttgtaattgcatattgtggggcagctcctctcctgtaatgaaaatccacatgtatcagtgtttatagttcacayggaccgttctctgtgtctttggcctgggtggttgcgtgtctgcgtgtgctgtgctcgtgttgcgtgaggctgtgggaatgtgatcgtttgtcacacaggg

SEQ ID NO: 26866 - DNA, 201 bp, Homo sapiens
taatcttttttttttaatacatatttcttttgtttctaactctattataatcttatgggaccacatcctacatgtggtccaccatcattgactgaaacgtygttatgtggcacatgactgtcgtgcatttcagggggtgctggagtcaagtggttggggttccacaacctgaaaagactgaaaagcacagcactgggagtt

SEQ ID NO: 26867 - DNA, 201 bp, Homo sapiens
gggtgtgtgacattacagagatgagactccagctgtctctgtgaagctggatgttaaacagcctgtgtaacaaaatgcaaagcaatgatgctgttcctgcygcattgctttgttttgtaatggaaagggtggttaatgtctcataaaaaatcttatgtcaatatataatggagttttgattttttaaaaaataagtaaata

SEQ ID NO: 26868 - DNA, 201 bp, Homo sapiens
ccccatggttgggattactaccccgatgctggtgctgtcacccccaaacacccctggctcctgggggtccaggctgcgctgcctgagtgtccccttttccycacctcatgtccagaaatgcttcccaggggcaggacccacaggcttcttgtggggcaggtccccatcccacatgtggcgaggcccctgatagtggtgtgc

SEQ ID NO: 26869 - DNA, 201 bp, Homo sapiens
tagggtgacccagggctgggcagcgaggccaggggctacccagtgacctcctgtggcttgcagacagtggcatcagtctggagaatggagtgtatgctgcygctgtgctgcctggaagccctgccgctaaagaagggtcccttgctgtgggagacaggatcgttgcggtaagtctcaagccagggtcatctgccgtgcata

SEQ ID NO: 26870 - DNA, 201 bp, Homo sapiens
ggtggccagagccgcctgatcgtgttccttctgtgctgtggtccagggccctgtacgaccggctggcagatgtggagcaagagttgagctttaagaaggaygacatcctctacgtggatgacaccttaccccagggcacgttcgggtcctggatggcttggcagctggacgagaatgcccagaagatccagcgcgggcaga

SEQ ID NO: 26871 - DNA, 201 bp, Homo sapiens
tatggggatcagttactggaggtgagagggagctgccctcctgcatggcgcccatggaaacctgcacttcttccccctctcctcctcctagggaacagcastgctcccaagtccccagggcctcctccctgtccacagccccgacccccccactgagcccatcctggtgtttccccagttcaacggcataaacctgcggag

SEQ ID NO: 26872 - DNA, 201 bp, Homo sapiens
taaggctggggcaggagggtgatgtaggggtggctgtgtgctgagggctctgcagctctcaacagcacggggctgtaatccgtgttgaattggaagggacygtgggtgtagtctggggtggatctgtctgagctggagggtcaagggaggatttccagagtgggcaagtttgggaagtgggaacactttggagggtgggag

SEQ ID NO: 26873 - DNA, 201 bp, Homo sapiens
taagtgaaatgatgccgatcgggcctccccaccccgtggtgtgtcccttacgtctttgcatgtcactggaacctgggaacctggttcagatcattgttctrttgggtggctattgctgtgacttagttgcttgctcctttattgtgatacacgtgttgtacggaggtggacctctttctgctctgggcctctgtttcatca

SEQ ID NO: 26874 - DNA, 201 bp, Homo sapiens
tgcctgcccacctgctgatatctgtccaggccccagtatttggaggcactaggtctgtaccagaggggcctgtctcccttccctggagatacatgtgcccyttttggtgtcaggtttgtaagtggtgatttggatgtttctggaattgggctgttagcaggttttggcttgcctctgagtgctacagacctacctgccatt

SEQ ID NO: 26875 - DNA, 201 bp, Homo sapiens
ggtgatttggatgtttctggaattgggctgttagcaggttttggcttgcctctgagtgctacagacctacctgccattggctcctgtccgctgtatctacrggaagtgttgggacctgaggctggtgatgccctggggtggggcggggtgtgaggggctggctggggctcactgagcatgtaccgggtgtttcagcacact

SEQ ID NO: 26876 - DNA, 201 bp, Homo sapiens
acatatttttttttgagacagagttttgctcttttcgcccaggctggagtacagtggtgcaatcttggctcactgcaatctctgcctcccaagttcaaggygattcttgtgcctcagcctcctgagtagctgagattacaggcgcccaccaccacgcctggctaatttttgtatttttagtagagatagggtttcaccatg

SEQ ID NO: 26877 - DNA, 201 bp, Homo sapiens
cagggaccctgccagtgtcgttattattgttatccctgtttcacagttgaggaaactggatccagacgttggagtgacagacctgtggccacgtggttagyggctggcaccgggactcattcttaccctttgctttttccctctcattcgaagctttctgttgtgaaataaaatatacacaggaagaaagcataaatgtgc

SEQ ID NO: 26878 - DNA, 201 bp, Homo sapiens
ggccagggcacccaggcacagtcgtgggagcttggcaaaggggcagcgagtcaagaagaggtttgaggtcacagggcacaaaccctgtgggacctgcagcsgtgatgaagagtttggattttattctaaggacagtggagaccactgtagagtttaagcagggaagagatgtcacctcattacatagctggaaaaagatgc

SEQ ID NO: 26879 - DNA, 201 bp, Homo sapiens
caccagccatggagctgtcccatgggagggggctggggccagggctgctggaggagggattctgcttcttatcttagcttctgctctctacattttgccamaagtgctggtctaaaaagctgctcctagtgtgagtcagtgctgtatagagcacagtgatgggtcagaaggcataacgtgttttagaaaaatggatttatg

SEQ ID NO: 26880 - DNA, 201 bp, Homo sapiens
ttagtaaagacggggtttcaccatgttggccaggctggtcttgaaactcctgacctcaagtgagccgcctgtcttagcctcacaaagtgcaaggcactgcrcccgggattacaggcgcaaggcactgtccccggccatacttttctcattttaattctacagatactttaactctgactcagtctgtccatttgcacatca

SEQ ID NO: 26881 - DNA, 201 bp, Homo sapiens
aagggccatcggtgccaaggccagggcacccaggcacagtcgtgggagcttggcaaaggggcagcgagtcaagaagaggtttgaggtcacagggcacaaascctgtgggacctgcagccgtgatgaagagtttggattttattctaaggacagtggagaccactgtagagtttaagcagggaagagatgtcacctcattac

SEQ ID NO: 26882 - DNA, 201 bp, Homo sapiens
caaaggaagcattgctgatggccgcttaaggtaagagttgaggcccaggctctggaggcaaggtggggcccttcttcccagtgcagaggacccgaagagarccaggtagcacttaggtgaacgtttcccagccttagactcacacacagtctgtccaaggcctgcagtctcagcagctaataatgctccgaaagaaacagt

SEQ ID NO: 26883 - DNA, 201 bp, Homo sapiens
tatgtttgtaaagactgcgtttggtaactgtcatgtgtggtcatccctgagtctctttctgtggtctttgtttttcttggtcctgccccatgatatgcctrgttattgtttattgagatgtcagaagttatgtttaggggattttcagggctccgagtgatgttgccagcttccagagagggtctgccctctgctctggag

SEQ ID NO: 26884 - DNA, 201 bp, Homo sapiens
gccccagtatttggaggcactaggtctgtaccagaggggcctgtctcccttccctggagatacatgtgccctttttggtgtcaggtttgtaagtggtgatytggatgtttctggaattgggctgttagcaggttttggcttgcctctgagtgctacagacctacctgccattggctcctgtccgctgtatctacgggaagt

SEQ ID NO: 26885 - DNA, 201 bp, Homo sapiens
aataaaaggtctgggagggaaataagaatcaattgcattgctaccacctgtagataacctttctctatctctctctgtccctcaggctggagtgcagtgaygcaatcccagctcactgcaacctccaaaggcctaagcgggaaataagaaccacttgctttggtaccacctgtagataacctctattaacttttttttttt

SEQ ID NO: 26886 - DNA, 201 bp, Homo sapiens
gaccccccagagtttgtaattgcatattgtggggcagctcctctcctgtaatgaaaatccacatgtatcagtgtttatagttcacacggaccgttctctgygtctttggcctgggtggttgcgtgtctgcgtgtgctgtgctcgtgttgcgtgaggctgtgggaatgtgatcgtttgtcacacaggggtgggcccaccatg

SEQ ID NO: 26887 - DNA, 201 bp, Homo sapiens
cttttttaaaaaaccactgtgaaaactcacagatatcccagcagccttgacctgactctgagttattgggaaacaagggggaaaggaacccattttagctstttcaaatggcctgcctcgtgaggttcagagccgttacgcggtgggatgtttcacctcccaaggggctgtcaccgtggctctctctgttcacagggaaca

SEQ ID NO: 26888 - DNA, 201 bp, Homo sapiens
acagtgggtggcagtaccggggggcagatttcacagtgttccagaagcctgctgacatgggtcagattcatgcatggcaggactgggttactgacagctgmtgagcagtgttcttcccctgctccctctgctggggctcagcagggcctggggctccctgattcctgtgtctgtgcattgcagaggtgatgaaggcctccc

SEQ ID NO: 26889 - DNA, 201 bp, Homo sapiens
tagcagagcgtgacagcatccggtatggggtgacctcaagctggtgtgggcttgcgtctccccaggatgaggggacctgctagggtctgttgggagggtcrgaatcatttactgtatgtccaggtaaagtgggagggacctgggctcctcctttctcacccctagttgatgccctagccttgcctcttagttttagaattt

SEQ ID NO: 26890 - DNA, 201 bp, Homo sapiens
ggcggatgtggccaagtgccggcgggactgggccttccaggagcgagacaagattgtagcagagcgtgacagcatccggtatggggtgacctcaagctggygtgggcttgcgtctccccaggatgaggggacctgctagggtctgttgggagggtcagaatcatttactgtatgtccaggtaaagtgggagggacctgggc

SEQ ID NO: 26891 - DNA, 201 bp, Homo sapiens
acccctttggggagaggaaatgctgacccctggcctcaccgccaaagaatattttgaccccaaaggtgcggcctggagcagagaaatcctggctgtcatgrtgctggtggcttttaaacacagtctgtgttgcttaatgacagggacacattctgagaaatgtgttgtcatttggtaatttagttgttgtgtaaacatgag

SEQ ID NO: 26892 - DNA, 201 bp, Homo sapiens
gtaatggagctccatgcagaaccggtgtctatggagcacactgagaattgctggtctggagccatgggctctgatttgcaggctgcctgtgtggaagatgycccccggcctggaaggacagagctgtgctcttcgagcgaacttgatgaccttgtcacagggctgtactgttcgtatctgtgaaatgaggcggtttgacta

SEQ ID NO: 26893 - DNA, 201 bp, Homo sapiens
tacggttttgactgcccccgctaactggctttggacctggggtcttgccttcatctccagtgcaccttagcatcctgtcccgaacgccgagccagtagaastagaggccacctctcagctccctgtggttctgagaccccaagaagcaggcagaaagcggttagggcattggccactgctttgtctttttgtgcctcctct

SEQ ID NO: 26894 - DNA, 201 bp, Homo sapiens
gatgaaagaggccagctgcacaagacctgggctggagcctccagggagaagggccatcggtgccaaggccagggcacccaggcacagtcgtgggagcttgkcaaaggggcagcgagtcaagaagaggtttgaggtcacagggcacaaaccctgtgggacctgcagccgtgatgaagagtttggattttattctaaggacag

SEQ ID NO: 26895 - DNA, 201 bp, Homo sapiens
tgacagatattttttgagcacctactacatgccttggtctatcctaattataagaggatacattgctgaactaaacaaattagcttctagctcatgtcgtktggtttttcaaatgtgggaggcagacaaaaaaaaaaatgaacgaagtgatatcagatggtgccaagaggctatgaaggcagtcaaacagggtgacaggct

SEQ ID NO: 26896 - DNA, 201 bp, Homo sapiens
tcacagggtcggcccctgcagctctccacctgcggcccgagatgctggcccccagggtttgcatcccaggtatgtgaaggcaccctacgcttctctgtacyccagctgcccaagcctgcctggacatggaaccatgagtgcataaagaggctcattggtggagaagcttccttgcctgcctgggaggggactggctagagc

SEQ ID NO: 26897 - DNA, 201 bp, Homo sapiens
agactgcggctgcgtcctgggatacaggggaaaggcttgtgtaagtcctgggctggctgggtcctttggggcgtcttttctcaccaagcccatttctaggyactgttccccggagtttgacccccagcaccactgtgagctccatcctgcggaaccccatctacactgtgcgcagtcacagggtcggcccctgcagctctc

SEQ ID NO: 26898 - DNA, 201 bp, Homo sapiens
gaaaagttgggctgatacagaattcttagcactctctcaaccaccccatcaccaccatccccactcctgtccccaagtttccccaattttggcattttgcrttagtgtagttagtacatgcgttataattagtgagccaatgtggatgcattagtattaactataatgcatagtttacattaaggttcagtcttggtgtat

SEQ ID NO: 26899 - DNA, 201 bp, Homo sapiens
ggtgcatgtagctctcatggcctggcattgactgatgatcagctggcttggggtgaagacgagtgaccccttggggttagtaacatggtctcccctctttycccaggttctacctacagcgtcctgtccaccatgccctcagactcagaaagcagcagctccctcagcagtgtgggtgagtaccaccgtctggggaggaca

SEQ ID NO: 26900 - DNA, 201 bp, Homo sapiens
ggccgctctgcctgtggcctgacatgctctctgtcctgctctagatcaatggcattgcactggacaacaagtctctgaatgaatgtgaatctctgctgcgsagctgccaggactccctgaccctgtccctcctgaaggtaagggctggacctggctctgctctcacggtcaggagtatgggcagagccccggctccacata

SEQ ID NO: 26901 - DNA, 201 bp, Homo sapiens
tgcttctgtgctgaccttgcctctcctcggggtttttgttcttcgacaataccctgtctgtctcctgtcttctgggctctttttctcctgcattttccactctctctttctctccatgattcagccagcctggttgttttctactcttttttcctgttcattattccactcttctgttgcatccattatgttcttactttc

SEQ ID NO: 26902 - DNA, 201 bp, Homo sapiens
ctcccaagtgctgtcatgagcacgttcctgacaagtcaggtgttcagattgcagtccctggccaacgtcaggattcttacaggttgaatgttaagctcacygatcttggcctcaggtcctgcctggcttgcctgctcattttcacacgtgcagtggtgggtctgtctcatagcacaggtgcagtttagtgcagccacagtg

SEQ ID NO: 26903 - DNA, 201 bp, Homo sapiens
aacccccctccaaaaaaaaaaaacaaaaaacaaaacaaaaaaaaacaatgctgtccccttaccatctctggtcttcaaagtgaaacaaactcagtgaagtktggttctattttaccttctggccttcagcctctttgggaaagtctgtcatttgcagggcattagcatttgcagtcacagaggatgggacagggattctaa

SEQ ID NO: 26904 - DNA, 201 bp, Homo sapiens
gaagcagcaggagtagcttgagtgtcccagcatttgctggtgtcaccagtaagtgccatggggcactggatgcagggaggtggggcgtgtgtggatggcarggcagggagccaagagggctcacagtagatgatgctggaaatgacctgacggtgatcgtgccatcatggcaccatttacaccttcctgggcccttgttca

SEQ ID NO: 26905 - DNA, 201 bp, Homo sapiens
cctgccatgtacccagattctggactcccagtagaaagcaggtgttcagcataagccactttatttgtacaggctcagtaccagagctgcttatatcaccrgaagaaaagttttacatcagcctagagaactgtttactgttcgggttcctagacgccattcggtagggtcaaccttgcaagcaggcctttctaaggatat

SEQ ID NO: 26906 - DNA, 201 bp, Homo sapiens
gcagaatggcagccttaggggcctggccacagaaggcacctggttcgtccttggtggccagagccgcctgatcgtgttccttctgtgctgtggtccagggycctgtacgaccggctggcagatgtggagcaagagttgagctttaagaaggacgacatcctctacgtggatgacaccttaccccagggcacgttcgggtcc

SEQ ID NO: 26907 - DNA, 201 bp, Homo sapiens
catttgctgaatacattgctgtgctctggacagtgaggccaactttacctttccttaggaagtactaagttaggaaaatgagtgtgatccacatgggaggraggccatcctgatctttaaggcatgagattgatagccgggcctgggagcaggggcactgatttacggttttgactgcccccgctaactggctttggacct

SEQ ID NO: 26908 - DNA, 201 bp, Homo sapiens
ctttcctggtctagcctgggcatttgaggaatccggaagctgaaacccagagaggtggagtgactcaccccagggctcagatcccatgaggtgcttagccraagccagcagcccccctggcaacctcttaactcatcttcttggtttgtttttttctctataacagcaccccaaatgaactttagtgcctgtcatttagag

SEQ ID NO: 26909 - DNA, 201 bp, Homo sapiens
gggtggcccatagggtggggcagagagagtctttatctacctgcatgatctaagaggactttctgggaaggaggagggccagagagtggtttatcctttarctcccatgctggtagaggtctggaggggaggggggcttggtgtaaacacttcagtttcacctctttccttcaggagtaagggtctatgcctctgcacttt

SEQ ID NO: 26910 - DNA, 201 bp, Homo sapiens
gagctgaccctaattccaaagggagtgttccatcgtcccagcttctggttctctaggctgcaaacgcttgataaaccaggctgccactgaatgagccaggkgattcctcggctgttggagctggaagggccagacaagctttcctggtctagcctgggcatttgaggaatccggaagctgaaacccagagaggtggagtga

SEQ ID NO: 26911 - DNA, 201 bp, Homo sapiens
ggaggtctcctccgccacctcccacagacccttggtaagtgaaactgtctggtctccaggtgttgaagcacaacgggtcatccgagattctcaacaaactrtatgacacggccatggacaagttggaggtggtcaagaaggactatgacgcccttcggaagaggtacagtgagaaagtcgccatccacaatgcagacctga

SEQ ID NO: 26912 - DNA, 201 bp, Homo sapiens
gctgggggcagcagtgaagctcagggtcttttggtggaaaggtgtgggaagacttcgaagctgcagaggagacccctttggggagaggaaatgctgacccstggcctcaccgccaaagaatattttgaccccaaaggtgcggcctggagcagagaaatcctggctgtcatggtgctggtggcttttaaacacagtctgtgt

SEQ ID NO: 26913 - DNA, 201 bp, Homo sapiens
ggtctcccctctttccccaggttctacctacagcgtcctgtccaccatgccctcagactcagaaagcagcagctccctcagcagtgtgggtgagtaccacygtctggggaggacaccgggtgggccaggggtctgggtgaaagccaaggcagctggggttcatgggagaggaagctggttctcccttgtcagattactcac

SEQ ID NO: 26914 - DNA, 201 bp, Homo sapiens
cccttgaaagaaaatgttctgctttaaaaataaataaaggaaaaagaatgagcctgaaatgaaccaatcctccctccctctctccctccctcctttccctytctttctctctctttctctttctcctccccttccttccttccttcccttcttccctccttccctccatttctccctcttccttgacttcctctttaagag

SEQ ID NO: 26915 - DNA, 201 bp, Homo sapiens
ataaggttcacattcacatttactggattgggactttagcatcttttggggggccacaactccacccataaaaacacagttcctcccataaccctcatccygtttagggctcagggcaggcccttctgggactgcaattcaaagctcccaacggtatcctattactttgttctgcctgcttttggtgcccggagacatatc

SEQ ID NO: 26916 - DNA, 201 bp, Homo sapiens
acccaccaggtcctggcagccctgaactccgttttgatctcacctgctttggagattttcagaaacttttcgtgggttctcagccctcagcggcggccccrtgcctgggttctcagcccctcagcggcggccccgtgcctgggttctcagcccctcagcggcggccccgtgcctgggttctcagcccctcagcggcggccc

SEQ ID NO: 26917 - DNA, 201 bp, Homo sapiens
ctgtgtatgtgccgccccatcttcctctctggcaggtgcggggggtctcatctctgatgagagtattgagctctgcggaaaggcctctcgcagggcattcyggaacggggtccccaaatgcatgtgccgaacaatttcacatgcaccttctggggacaggaacgtgccttccctcagggtccctgcccctaaaagggctat

SEQ ID NO: 26918 - DNA, 201 bp, Homo sapiens
agtatctggatgctgccctgtgggaacaggttattctgtttgactccaaggctagagtgagaaccagaggttaggagttgcagggaggcggagtagctccyggtgagcacgaccctatcccaaggagctttcacttgtggagcaggccgagggtggccgtcatcgtggtggaagcaagcagtacggggcctgatctctctc

SEQ ID NO: 26919 - DNA, 201 bp, Homo sapiens
aaggtgcggcctggagcagagaaatcctggctgtcatggtgctggtggcttttaaacacagtctgtgttgcttaatgacagggacacattctgagaaatgygttgtcatttggtaatttagttgttgtgtaaacatgagtgtgcttacacaaacttagatggtatctaccccatacctaggctacacgatatggcctgttg

SEQ ID NO: 26920 - DNA, 201 bp, Homo sapiens
gctgggaagctaaacatttgactgtagttaggtgtgtgtgtgtgtgtgcgcactcgtgtgtgcatgtgcatgtggaaatacctaccaagaacataatcctytgatggcgagagggaaaaattctagaccaatagatttagttttttggattctccggagttaaccatgacctggttccccagctttgttcagaggctgttg

SEQ ID NO: 26921 - DNA, 201 bp, Homo sapiens
taaacactgaattgcatactttgtgtggtatgtaaattataactcagagaggaaaaaaaaagactcagaatttcaccttgtcataaatagagaaatccagkctgggtacagtggctcacacctgtaatcccagcactttggaaggagcaggaggatcccttgattccaggagtccaagatcagcctgggcaacatagacta

SEQ ID NO: 26922 - DNA, 201 bp, Homo sapiens
ggaagccctccaggaggcggatgtggccaagtgccggcgggactgggccttccaggagcgagacaagattgtagcagagcgtgacagcatccggtatgggrtgacctcaagctggtgtgggcttgcgtctccccaggatgaggggacctgctagggtctgttgggagggtcagaatcatttactgtatgtccaggtaaagt

SEQ ID NO: 26923 - DNA, 201 bp, Homo sapiens
ctgtgaaaggcagcctagtgattcctcaaaaaactaaacagagctaacaggtgacctcccagcgacactcctaggtgtccaggagaactgaaaatatacgyccacacagaaacttgaggtgtgaatattcatagcagcccaaaaccggtaacaacccaaaggtctactgaccgatgaatggataaataaaatgtgatctat

SEQ ID NO: 26924 - DNA, 201 bp, Homo sapiens
ctggtctccaggtgttgaagcacaacgggtcatccgagattctcaacaaactgtatgacacggccatggacaagttggaggtggtcaagaaggactatgaygcccttcggaagaggtacagtgagaaagtcgccatccacaatgcagacctgagccgcctggagcagctgggggaggagaaccagcggttgctgaagcaga

SEQ ID NO: 26925 - DNA, 201 bp, Homo sapiens
tcgcagaccctctgggggtaggggctgttttctaagttacaggcagagtgggactgagatggtacagtgtgcacagacaggtactgagctgacagactggrattttctgtactaaaatgttactttgtatcaaaagttaaacaggctttagtacaacaaataaaggtcaatttctgtaaggctatgtttgaagatgtgagt

SEQ ID NO: 26926 - DNA, 201 bp, Homo sapiens; identical to SEQ ID NO: 3072

SEQ ID NO: 26927 - DNA, 201 bp, Homo sapiens
gtgtgggcagcggaggctaggggcccatctgtccctagcaccctccagggcagtcccgttttgcagcgggatttggcaaacccccctccaaaaaaaaaaaacaaaaaacaaaacaaaaaaaaacaatgctgtccccttaccatctctggtcttcaaagtgaaacaaactcagtgaagtgtggttctattttaccttctggc

SEQ ID NO: 26928 - DNA, 201 bp, Homo sapiens
tggagtacagtggtgcagtctcggctcactgcaacctccgcctcctgggttcaagtgattgttgtgcttcagcttcctgagtagctgggattacaggtgtscgccagcacacccggctaatttttgtatttttagtagagaaggggtcttgccttattggccaggctggtctcaaactcttgacctcaagcgatccacctg

SEQ ID NO: 26929 - DNA, 201 bp, Homo sapiens
ctttgatactattcgcattttatttttttattattttattttttgaggcagaatctcgctctgtcgcccaggccggagtgcaatggtacgatctcggctcrctgcaacctctgcctcccaggttcaagcgattttcctgcctcagcctgccgagtagctgggattacaggtgcctgtcaccacatctggctaatttttgta

SEQ ID NO: 26930 - DNA, 201 bp, Homo sapiens
agacctcacagtgtgcacctttgacttactgctaagagaaatcattgctttggccacttccctgataattctaagacatcaaaccactaactccatttatytcttttctaactttgatactattcgcattttatttttttattattttattttttgaggcagaatctcgctctgtcgcccaggccggagtgcaatggtacg

SEQ ID NO: 26931 - DNA, 201 bp, Homo sapiens
catggtgaaaccctgtctctattaaaaatacaaaaattagccaggtgtggtggcatgcacctgtaatcccagctacttgggaggctgaggcaggagaatcvcttgaacccaggaggcggaggtgcagtgagccaagatcacgccaccgtactccagcctgggtgacagagcaagatcctgtctcaaaaaataattaaaaag

SEQ ID NO: 26932 - DNA, 201 bp, Homo sapiens
tgtgccacaggatggaccaagaattctccaggaggctcagcatgtctgaagtcaaagatgacaatagcgccacaaagacgctgtcagcggctgcacgccgrtccttttttcggaggaaacacaagcacaaacgcagcgggtccaaggacgggaaagacctgctcgccttggatgccttttccagtgactccattccactct

SEQ ID NO: 26933 - DNA, 201 bp, Homo sapiens
cccgaggccctcccccgcttcctgcgcctgttgttgtgacctgcccccgaccctacctggtggatctgcctggggactgcacactcgtttcaggcaatcartacttttttcctccccattcatcctgacctaatttctcagtagccttttatttctcatcttggaaaactggggaggttttaaggaggagaagagacattc

SEQ ID NO: 26934 - DNA, 201 bp, Homo sapiens
acagccttaaaggcagcaggtctttgtgccaaggcctcctcgggcagttttcatcagctaagcacacacagcttccccgaggccctcccccgcttcctgcrcctgttgttgtgacctgcccccgaccctacctggtggatctgcctggggactgcacactcgtttcaggcaatcaatacttttttcctccccattcatcct

SEQ ID NO: 26935 - DNA, 201 bp, Homo sapiens
cagtgttgtggtcgttaatgatattattctaatcctgtcaagtctgggtttaaatctgcctcatccaggatgtgtagaaattgggacctgcatacgttgtkggtgggaataaatgatacagccactgtgaaaggcagcctagtgattcctcaaaaaactaaacagagctaacaggtgacctcccagcgacactcctaggtg

SEQ ID NO: 26936 - DNA, 201 bp, Homo sapiens
ttgagatgggctggcccaacctcatccctgagaagggaaccagaatgtctgtaccaggcttgtaccagtccctcggggtggagtgcctggtggggctggcyctggctgggagcactctagcacctgccagggagttcctgctggctcagccacacctgatgagaggcagaagtctttgcaagcacacaccgccctggcagg

SEQ ID NO: 26937 - DNA, 201 bp, Homo sapiens
ctcagtcagtgttgtggtcgttaatgatattattctaatcctgtcaagtctgggtttaaatctgcctcatccaggatgtgtagaaattgggacctgcataygttgtgggtgggaataaatgatacagccactgtgaaaggcagcctagtgattcctcaaaaaactaaacagagctaacaggtgacctcccagcgacactcc

SEQ ID NO: 26938 - DNA, 201 bp, Homo sapiens
ctgtagccatctgcggtgagtggcagaagaagaaggcggggttcttatgagcaaaggaacctgttccagagtccatcagtatggcctcctttcattgaccrcagttggctgcttgtttgtgccgaaaccagtggctcacaaagcctggtcgctggaccactggggcacttattagagatgcaggtttgagcctcctcccac

SEQ ID NO: 26939 - DNA, 201 bp, Homo sapiens
attgtcctttgggtgcaggcagcagggaacacccactcataccaccttaaccaatcaggaaatgtatgagctcccatatgaggctgtgctgaggtcagccrgtacatggggatgcagctctgccctcctctgtgtggtgtcttcacacagtctcatggcggggtgtctgtagcagcagctccagccatcacatccagacct

SEQ ID NO: 26940 - DNA, 201 bp, Homo sapiens
tttagtttggattctatacttccttgagagaatcatcatttcagaggtgtatgtggctccacctcggtccaagggaagccccacagccttgctagaaagcrcgaggttggcacatctcagtgtaggagaattggtctgtatggctgtcatgaagacactgcgtagaaggcactggcgccgcgtgcccgtgtgtatgaggcg

SEQ ID NO: 26941 - DNA, 201 bp, Homo sapiens
ttgttgtgtaaacatgagtgtgcttacacaaacttagatggtatctaccccatacctaggctacacgatatggcctgttgctcctgagctgcaaacctgtrcagcatggtactgtactggctacggtagccagttgtaacacaatggtaagtatttgtgtgtctatacatagaaaagaaaagctgcagcaacagtacagaa

SEQ ID NO: 26942 - DNA, 201 bp, Homo sapiens
cattgagataaatgttaaacgtctgcttttcttgactgttccatatcaaggctcccttgggaataaacagcagggcccagctttgcatttattatcctgaytggtagcctggtggagaggaaggacagggtggtgtttaaccatgaggcctgaagttttgttcccttatggaacaataggttcttcgagtaacttgcagtt

SEQ ID NO: 26943 - DNA, 201 bp, Homo sapiens
ggttttcagtttctaaagaggcaaaaatatttttaacctcaaaagaaatcctttggaggaatcttgcgtgtgaagcaggtaaggatggcggtgctgtgtcraaacaaagctcccaggaagctgcccgaggggatggccctctaagggtttgagccccttctctgccctggggtgcgtggtaacttcccccacctgagggca

SEQ ID NO: 26944 - DNA, 201 bp, Homo sapiens
tgtgcatgtcagtggagcttcttggagcaaacagatttaaagactgtaggttttcagtttctaaagaggcaaaaatatttttaacctcaaaagaaatcctktggaggaatcttgcgtgtgaagcaggtaaggatggcggtgctgtgtcgaaacaaagctcccaggaagctgcccgaggggatggccctctaagggtttgag

SEQ ID NO: 26945 - DNA, 201 bp, Homo sapiens
tcctacataagaagcctccttgtgcataaatccacacatacttttgtttgcagatgcagataaatataagtgaaatgatgccgatcgggcctccccacccygtggtgtgtcccttacgtctttgcatgtcactggaacctgggaacctggttcagatcattgttctgttgggtggctattgctgtgacttagttgcttgct

SEQ ID NO: 26946 - DNA, 201 bp, Homo sapiens
gagactctgtctcaaaaaataaaaaacagaaaagtagaaagaagaaaaaagtcacagattatttcttcaacaagagattcaattgccattaccctttggakatatatatatatatatatatatatatatatatatatatataaacatgctttattatttatgtacataatcaaatctcccttaatattatgtttttagcta

SEQ ID NO: 26947 - DNA, 201 bp, Homo sapiens
acgcccagctaatttatttttgtattttttgtagagacggggtttcatcatgttggccaggctggtctcaaactcctgacctcaggtgatccacccgcctyggcctcccaaagtacagggattacaggcgtgagccactgtgcctggccagggttgatttttaatccctgtaaacccagaatcctgccaagcccttctgag

SEQ ID NO: 26948 - DNA, 201 bp, Homo sapiens
ttgccatttgtttttaggttcttacaggctgcttggtagtgaccaagagctgtcggtttctgcagaacttcggcatttctggcctcagtcctgtgttcatkaacaagtcttgtataatccttatggagcaagatgctagtccagggctggagttgagtgataggagatgtcagacatcccctggtagacagcccttgtgga

SEQ ID NO: 26949 - DNA, 201 bp, Homo sapiens
tcagaaacttttcgtgggttctcagccctcagcggcggccccatgcctgggttctcagcccctcagcggcggccccgtgcctgggttctcagcccctcagsggcggccccgtgcctgggttctcagcccctcagcggcggccctctgcctgggttctctgcccctcactctcactttagaagtctccagttgctctgaagg

SEQ ID NO: 26950 - DNA, 201 bp, Homo sapiens
aagaaaaaagtcacagattatttcttcaacaagagattcaattgccattaccctttggatatatatatatatatatatatatatatatatatatatatataaacatgctttattatttatgtacataatcaaatctcccttaatattatgtttttagctatttttaatagtttaagtatactttataaacctcttttgaga

SEQ ID NO: 26951 - DNA, 201 bp, Homo sapiens
gaagaaaaaagtcacagattatttcttcaacaagagattcaattgccattaccctttggatatatatatatatatatatatatatatatatatatatatataaacatgctttattatttatgtacataatcaaatctcccttaatattatgtttttagctatttttaatagtttaagtatactttataaacctcttttgag

SEQ ID NO: 26952 - DNA, 201 bp, Homo sapiens
tcagcctcctgagtagctgagattacaggcgcccaccaccacgcctggctaatttttgtatttttagtagagatagggtttcaccatgttggtcaagcttrtcttgaactcctgacctcaggtgatccacccgcctcggcctcccacagtgttgggattacagacgtgagccaccgtgcccagccagagaaaatcttatat

SEQ ID NO: 26953 - DNA, 201 bp, Homo sapiens
ttagttcactgcaacctccacctccgggttcaagcgattctcctgcctcagcctcccaagtagctgggactgcaggtgcatgccaccgtgcctggcttatwtttgtaatttttgtatagatggggtttcaccatatcggtcaggctggtctcgaactcctgacctcgtgacccgcctgcctcagcctaccaaagcgctggg

SEQ ID NO: 26954 - DNA, 201 bp, Homo sapiens
ttctgtgctgaccttgcctctcctcggggtttttgttcttcgacaataccctgtctgtctcctgtcttctgggctctttttctcctgcattttccactctytctttctctccatgattcagccagcctggttgttttctactcttttttcctgttcattattccactcttctgttgcatccattatgttcttactttcaga

SEQ ID NO: 26955 - DNA, 201 bp, Homo sapiens
cgcccagactggagtgcagtggcgtgatcttagttcactgcaacctccacctccgggttcaagcgattctcctgcctcagcctcccaagtagctgggactrcaggtgcatgccaccgtgcctggcttatatttgtaatttttgtatagatggggtttcaccatatcggtcaggctggtctcgaactcctgacctcgtgacc

SEQ ID NO: 26956 - DNA, 201 bp, Homo sapiens
caccatgagtgggtagggttttctctgccttcctttctcagaaagaaacttcttaatttcttaccacaccgtgcttcccccatgtggttttctttgtgttyatcctgctcagaaggtgcttagcactttttacatctgtagtttggtggtgtggtcggttttggagattcctggccgcagtttctttcatattgcttctgt

SEQ ID NO: 26957 - DNA, 201 bp, Homo sapiens
agtgccaccacccgtccaccaccatgagtgggtagggttttctctgccttcctttctcagaaagaaacttcttaatttcttaccacaccgtgcttcccccrtgtggttttctttgtgttcatcctgctcagaaggtgcttagcactttttacatctgtagtttggtggtgtggtcggttttggagattcctggccgcagtt

SEQ ID NO: 26958 - DNA, 201 bp, Homo sapiens
cagattttagcagcatgtctttttgtttttatttttgtttgagatagcctcactctgttgcccaggctggagtgcagtggcgtgatcttggctcactgcarcctctgcctcccaggtctaagtgattctcctgcctcagccacctgagcagctgggattacagacatgtgccatcacgccctgctagtttttttgtatttt

SEQ ID NO: 26959 - DNA, 201 bp, Homo sapiens
aactagtaagtggtagggccaggatttgaacccaggctgtctaacctcagcatttgcaaatttcaccactgtgcactcctgcaagaggagattttctgagygtgtatgtgaggcacccactccttggcagtcagccccctgagtgagagttgtgggcggtagccgctggtcccacagcctgtgtgggtgctgaactggctg

SEQ ID NO: 26960 - DNA, 201 bp, Homo sapiens
aggctgaggctggaggatcacctaagcccaggagtacagtgctgcgatgagctatgattgtgccactccacttcagcctggcaacaaagcaagagcatatmtcaaaaacaaaaacaaaccaaaaaaccaataccacagactaggtgacttaaataacaagaattcattttctcacagttcttgaggttggaaatccgagat

SEQ ID NO: 26961 - DNA, 201 bp, Homo sapiens
tgcctgtcaccacatctggctaatttttgtatttttagtaaagacggggtttcaccatgttggccaggctggtcttgaaactcctgacctcaagtgagccrcctgtcttagcctcacaaagtgcaaggcactgcgcccgggattacaggcgcaaggcactgtccccggccatacttttctcattttaattctacagatact

SEQ ID NO: 26962 - DNA, 201 bp, Homo sapiens
cggtaagtctcaagccagggtcatctgccgtgcataggcagattacatttgggaggtttgagcaagaagtaatgagcaaagtttttatattttccttgttstgggcattgtactatgtgaacatttaaaaataggtttcttgatggtatgtttctatttactgtagaaaattaggaaataaaaggtctgggagggaaataa

SEQ ID NO: 26963 - DNA, 201 bp, Homo sapiens
cccatggaaacctgcacttcttccccctctcctcctcctagggaacagcactgctcccaagtccccagggcctcctccctgtccacagccccgaccccccmactgagcccatcctggtgtttccccagttcaacggcataaacctgcggagcgccacggagcagcaggcgcggctcatcatcgggcagcagtgtgatacca

SEQ ID NO: 26964 - DNA, 201 bp, Homo sapiens
gcaatataaaaatatgtaaagtgaaaagtggcagtccctttcttccccctttaatcctgctcctagagattgtccctgcccccatttagaagataagcacycagcccaaaccatatgtgcccctacaaatctatatatacctagatagatttcttggtgttgttttgcttatttatgtacagtaatgggatctgcaatttg

SEQ ID NO: 26965 - DNA, 201 bp, Homo sapiens
gtgaggccaggatatctgagtttaacaaacacccaggtgtgtgtggtgcatagaagaccagtactggggaaccactgggctggcctaatccaggacctggytcctctatccgtgtgaatcctggggcctgtgttcatggggccattcgctctctgggccaggccctaccacaggctgaatcctgactatgagaggctgaag

SEQ ID NO: 26966 - DNA, 201 bp, Homo sapiens
accagtggacagtgtgcatcccggcagcgggcctgggctctgcagggaaggggcttagtagaagcagcaggagtagcttgagtgtcccagcatttgctggygtcaccagtaagtgccatggggcactggatgcagggaggtggggcgtgtgtggatggcaaggcagggagccaagagggctcacagtagatgatgctggaa

SEQ ID NO: 26967 - DNA, 201 bp, Homo sapiens
tcggccgaagcttgctccagtagtgattcctgctcagttcctggaggtatagctgagccccagggtgtggggaggggaggcctagagaggggcagttggcygaaggagggctgctaagtggccctgcaccagtgtcccaggcccctgtttagcctggtgcctttgcctttgctgttggactcaagtgggaagtggcccagc

SEQ ID NO: 26968 - DNA, 201 bp, Homo sapiens
tgcctgagtgtccccttttccccacctcatgtccagaaatgcttcccaggggcaggacccacaggcttcttgtggggcaggtccccatcccacatgtggcraggcccctgatagtggtgtgcttgtgtgcaaagtcagctcgtgtgtgtgtgtgtgtgtgtgtgtgtccctaccactgtctcctagacctgcctaagttga

SEQ ID NO: 26969 - DNA, 201 bp, Homo sapiens
aggccccatggttgggattactaccccgatgctggtgctgtcacccccaaacacccctggctcctgggggtccaggctgcgctgcctgagtgtcccctttyccccacctcatgtccagaaatgcttcccaggggcaggacccacaggcttcttgtggggcaggtccccatcccacatgtggcgaggcccctgatagtggtg

SEQ ID NO: 26970 - DNA, 201 bp, Homo sapiens
gcgcctcgtgaatgccagatgaacacaagttcactttattattccccttccacaggcactaccgggaaggcgccgtccccaccacccctcctcactgaccrgcaagtgaatgagaaggtggagaacctctccattcagctgcggctgatgacccgggagagaaacgagctccgcaagcgcctggcctttgctacgcatggc

SEQ ID NO: 26971 - DNA, 201 bp, Homo sapiens
ttctgttctacagacctgtgtgtctgtctccctgacagcagcacacagtcttgattgctgtagctgtatactaagtcttaaattgggtagagagtttcctyccactttagtcattttcaaaatagttttagtgattctgatgcctttttgtatacattttagaatagccgtctatatctacaaaaatcttgttggcatttt

SEQ ID NO: 26972 - DNA, 201 bp, Homo sapiens
gttctctaactggcaggatgctggtgagggggtctgtgttgctgcctgggaagcctcaggcactccctggtaatgccagatgagacaggtatagtgagcawtgaatgctgagctcagctgcactggcctggggaggggctggggcagtgttggaaggcattggagctctgccctggaggctgagtggcattctagagctgg

SEQ ID NO: 26973 - DNA, 201 bp, Homo sapiens
accttgcatgagtataatatcaaagctagcatattgacattggtactgtgtgtgtgtgtgtgtgtgtgtgtgtgtgtgtgtgtgtgtgtgtgtgtgtgtggttaaacacatgttgttctgtgtaaccaccaccgtaatgaagatacgtagctgttctatcagcactgaggtctccctcccactgcccatttgtagtaacac

SEQ ID NO: 26974 - DNA, 201 bp, Homo sapiens
agtacgtaaatgagtaagatgacgacagattgtgatttagagttttaaaggcaattgcaacccccatccagcagtctgttctgcttgtgttatttggacgyccatttggaagaccatttggggtgtcagacatcctcccctcgattacagcagcctcccagggtgtcatttaaacactcagtggcctttagtagtgcattg

SEQ ID NO: 26975 - DNA, 201 bp, Homo sapiens
cgacgaatcaccagggatgcctcccagaaacacagccccggacaaggagcgagttataaagtatccacagacacacttaaacaatatatattctaggtttyctttagcatataaaaatcagtttataagaagaactaggatacacttccagctcataatagtggttaccttcaaggagcccagtggggactgaggttgggg

SEQ ID NO: 26976 - DNA, 201 bp, Homo sapiens
gcaccttgcatgagtataatatcaaagctagcatattgacattggtactgtgtgtgtgtgtgtgtgtgtgtgtgtgtgtgtgtgtgtgtgtgtgtgtgtgtggttaaacacatgttgttctgtgtaaccaccaccgtaatgaagatacgtagctgttctatcagcactgaggtctccctcccactgcccatttgtagtaac

SEQ ID NO: 26977 - DNA, 201 bp, Homo sapiens
ttaggtgcccagtgcaaggggagggaggcccaggggctgcttcctgtctgcttctgctcagaccccttccacgggtgtctccagggggcagtcctcagccrggctctgactgaggctgggggagattcgaggctgtggagaggtaggaaccagtcctctgggtatgtccatttctggaggtggcacagagcccaggcccct

SEQ ID NO: 26978 - DNA, 201 bp, Homo sapiens
tggagcagctgggggaggagaaccagcggttgctgaagcagacagagatgctgacccagcagagggacacggccatccagctgcagcaccagtgcgccctytccctgaggaggtagggctagggccatcgggggccgggggcaaatgggtcctataaggttcccagccaccaccaggggatgagaacagcatgagttattg

SEQ ID NO: 26979 - DNA, 201 bp, Homo sapiens
agaagggcagccccccatgctcctgccgtctgctgccctgaatgcagttacacatgcagctacaggtcctgcttgaggagctgagctcagctgtggtggayagactggacagtgccaggggacaaggcaaggcagcagtggcctttccagaacttagaggcagagggctgttgtagcaagagaagcttcccaggaagcaga

SEQ ID NO: 26980 - DNA, 201 bp, Homo sapiens
ccgcggctgccccatcagctctgagagctgaaatcctcagctccttctcaagttggtctggcttcatggataagagagcactctccaccggcaagagcagrccaggaggggtgggcagtgaggcaccctggggattggccccgccaccccactggctgctgcctgtcaggggtcagctgtggggggccttctggcaggtct

SEQ ID NO: 26981 - DNA, 201 bp, Homo sapiens
atgggaatttcatacaaggaaccaccaagacttctccagacccttgaggcaaaagccagtgtgaagagaaatatttactgcaatgaaatttttgaaaagcytattagaataaatttttaataagtaaagataatgcattagaatttggtaatcatcctagaaaaaccgtgaactcatgttcacatcctggtatctgagcac

SEQ ID NO: 26982 - DNA, 201 bp, Homo sapiens
gcccaggctggtcttaaactcctgggctcaagcgatcctcctgcctcagcctcccaaagtgctaggattacaggcgtgagcccctgcacccagccagcctyagtttcttcatttgcacaatggaatggtggtcatgatgaacaaatgattcaatatagaaaatacatcattgtgcctgcacaaagcaacagtgagttgaga

SEQ ID NO: 26983 - DNA, 201 bp, Homo sapiens
gaaacgtattctcatttcatatacaccttatatacacatagcctgaagataattttgtttttcctttgaggaagcagaataaactgtatcctgcgcctgcrttttgactggcccatcacatgaggtcaggtgtggaattttctgctgtggtgtcatgttggtgctcaaaaagtttcagattttggagatttttggattagg

SEQ ID NO: 26984 - DNA, 201 bp, Homo sapiens
ctctagaacacgcctgcaggccctgcctctgggcctttgaccctgcccccctctctgcccagtgtgctctcgctgctcttcttcatttgcctctgaagtcrccttcttcaagaagcctcttcagccttagcctccctcacagacctccactctgctgctcagatggctctctccagcccattattctgttttattttttat

SEQ ID NO: 26985 - DNA, 201 bp, Homo sapiens
aaactcatctcccaagtccttttcccaaaagactgcggctgcgtcctgggatacaggggaaaggcttgtgtaagtcctgggctggctgggtcctttggggygtcttttctcaccaagcccatttctaggcactgttccccggagtttgacccccagcaccactgtgagctccatcctgcggaaccccatctacactgtgcg

SEQ ID NO: 26986 - DNA, 201 bp, Homo sapiens
tttggagagggcccctgagctgaggacaggtggaggggagaggacaggtggatgtcatgggtccaggcttctaatgtgtctgctctgctcagggcacaggrtgcagggctatgtgacctggtccccatttatagctcagatctagttgccacaggagtgggggtggctctgggtggcttcgtactgctccttatccctcct

SEQ ID NO: 26987 - DNA, 201 bp, Homo sapiens
aaaatgtaagatgtaaaaaagtctattagccctttgctgatatcaattgcttaattttgccgttttgccttcaaagcctaaaatatttactatcttgcccyttatagaaaaagtttaggccaggcatggtggcgcatgcctgtaatcccagcactttgggaagccgaggtgggtggatcacttgaggcagggagttcaaga

SEQ ID NO: 26988 - DNA, 201 bp, Homo sapiens
gagggctcgtgaggtgagactgttttcataatgatactaggatgtcactggtcttttctgcttccatcctcacatgggtgtagagtctagttttctaaagrttccatcctgggtgtgtgacattacagagatgagactccagctgtctctgtgaagctggatgttaaacagcctgtgtaacaaaatgcaaagcaatgatgc

SEQ ID NO: 26989 - DNA, 201 bp, Homo sapiens
tcccagaatgtcatatgaatggttgtgtagtatgtagcttttagagtcaggcttcttttgattaacgcagggcattccagcttcccccacaccctgtgtgygtccgcagttgtattagtcattcatcccttttcattgctgagtaatactccatcataaggacataacacagttgtttattcattccctagctgctctaaa

SEQ ID NO: 26990 - DNA, 201 bp, Homo sapiens
tccacccatttctcctaagccccttgaactcacaggccaactgtcccgtgctcaggctggagggacatcatctctaaagactgctgcctgcctgagtggaraagttgactctcaggccaggctcagggctcacgcctgtaatcttagcactttgggaagccaaagtgggtgtatcacttgagtctaggagttcaagaccag

SEQ ID NO: 26991 - DNA, 201 bp, Homo sapiens
tctttctctgagctaatatttataattttgatgaagtcaaatctatcaaatttttttttttgagatgcccaggctagagtgcagtggtatagtctttgctyactgcaacctctgcttcctgggttcaggtgattcttgtacctcagcctcctgagtagctgggattacaggtgcatgttaccacacctggctaatttttgt

SEQ ID NO: 26992 - DNA, 201 bp, Homo sapiens
taatcgaattctgtgtggagcgtcttggtggtcaacatcttcccatgttacaaaccatgtttcagtggacacacatgtctttgtgttcttttgcacacatrttttgaagtttgagccttacaggtagaattcctgggaccagggcagtgcacatgttctcctaggtcctgctaatctatttgggaaacctctcaggccccg

SEQ ID NO: 26993 - DNA, 201 bp, Homo sapiens
ggagatggaggcgctgcggcaggtaggtgggtgggccggtggctggctttcagcctctcctacagcatcccgggaagaggggctgcagagtgcgtggtgtycggattagaagcctcctgagttggagtaaatggcttctcactggaggcctaagtgcaagctgggttatcagacactgcctgagctcatgcttaatgccca

SEQ ID NO: 26994 - DNA, 201 bp, Homo sapiens
gtggcgccatctgggctcactgagacctcagtctcccaagttcaagcaattctcctgcctcagtctcccatgtagctgggaccacaggcacatgccaccawgtctggctaatttttgtagttttagtagagatggggttttaccatgttggtcaggctggtctcaaactcctgatctcatgtgatctgcctgccttggcct

SEQ ID NO: 26995 - DNA, 201 bp, Homo sapiens
tagagggtgtttttgcatcttttttctttactaaaatagtgtgtattctttagttaaaatagaaaaaaaatcttcaaccaatgtgggcagccacccacctmctcagatccagcctagctttgtggaaatgaccatcctctgtgtaaaccattgggatggatgtgtatccttgtagattttttttttaatgtcacatttaat

SEQ ID NO: 26996 - DNA, 201 bp, Homo sapiens
caccacgcccagctaatttttgtatgtttagtagagacaaggtttcaccatgttggtcaggctggtctcaaactcctgacctcaggtgatccgcctacctyggcttcccaaagtgctgggattacaggcatgtgccactgtgcctggccagggctttttttttttttttttttttttaaagaaagattttagatgtagagt

SEQ ID NO: 26997 - DNA, 201 bp, Homo sapiens
gcggatgtggccaagtgccggcgggactgggccttccaggagcgagacaagattgtagcagagcgtgacagcatccggtatggggtgacctcaagctggtrtgggcttgcgtctccccaggatgaggggacctgctagggtctgttgggagggtcagaatcatttactgtatgtccaggtaaagtgggagggacctgggct

SEQ ID NO: 26998 - DNA, 201 bp, Homo sapiens
tgccgggttcctcccacgccttgtaaacttgaagaggcccttgcagggtaaatggtgctgtttgacttgagtgtttgcttgagggatttgtggggcttccyggccctctgcatgatttatctcagaggaaatgaggcagccctaggggagggggcgccatggttgagagcagcacacaggtgttttgtccatatgtgtgtt

SEQ ID NO: 26999 - DNA, 201 bp, Homo sapiens
aaagcagactcatttggagccaatggggttctcacttggcttaggggatgtttagacagtaaaacatttgaggtaatttttttttttgagacagaatattkctctgtcgccaaggctggggtgcagtggcacagtcttggctcactgcaacctacgcctcctgggttcaagtaattctcctgcctcagcctccggagtagc

SEQ ID NO: 27000 - DNA, 201 bp, Homo sapiens
taccgttgtggtccttggcagcaggggcgggggtggggatgcatcctggtcattggggtcccccaggtcagttcagctggaccagtgcctctcagcaaacrccacctccagaccccaccaggagaagaggcctggctgccacagggagcagggctgggagcatctcagagctgctgggcgaccagccccgcgtcctggcat

SEQ ID NO: 27001 - DNA, 201 bp, Homo sapiens
gtggaaatgaccatcctctgtgtaaaccattgggatggatgtgtatccttgtagattttttttttaatgtcacatttaatacccatatagttttattttttattccctgaaacctgctttaaaaaaaaatcctacaatatatcatgggtttccttacattttctgtgaatttgcacatacaaaaaggtccttgcttgtttt

SEQ ID NO: 27002 - DNA, 201 bp, Homo sapiens
aggcacggtggcaggcacctgtagtccctgctactcaggaggctgaggcaggagaattgcttgaacccgggaggcggaggttgcagtgagctgagattgcrccactgcactccagcctgggtgacagagcgagactctgtctcaaaaaataaaaaacagaaaagtagaaagaagaaaaaagtcacagattatttcttcaac

SEQ ID NO: 27003 - DNA, 201 bp, Homo sapiens
accatgaagactcagtccttcctgcagaggggaggtagccagagtctcagttaaggagggatgttgaaattctgccgtatggtcagcactggcccctctcrggtgcccaagctgccccctggcttctgccttctgatgcatccacccccatccctggcagtatggcagcctggacgtgcggaacaagacagtggaggaagt

SEQ ID NO: 27004 - DNA, 201 bp, Homo sapiens
tagctttgtggaaatgaccatcctctgtgtaaaccattgggatggatgtgtatccttgtagattttttttttaatgtcacatttaatacccatatagtttwattttttattccctgaaacctgctttaaaaaaaaatcctacaatatatcatgggtttccttacattttctgtgaatttgcacatacaaaaaggtccttgc

SEQ ID NO: 27005 - DNA, 201 bp, Homo sapiens
gaaatgagagagtagaaagtgccgtgctagctctggtcagtactgcccacaacccattccccctgcagggacccttccttgtgcatgtcagtggagcttcytggagcaaacagatttaaagactgtaggttttcagtttctaaagaggcaaaaatatttttaacctcaaaagaaatcctttggaggaatcttgcgtgtgaa

SEQ ID NO: 27006 - DNA, 201 bp, Homo sapiens
gagactggggagaccatgaagactcagtccttcctgcagaggggaggtagccagagtctcagttaaggagggatgttgaaattctgccgtatggtcagcastggcccctctcgggtgcccaagctgccccctggcttctgccttctgatgcatccacccccatccctggcagtatggcagcctggacgtgcggaacaagac

SEQ ID NO: 27007 - DNA, 201 bp, Homo sapiens
ctttctccgatattgattgaggttttatgtggagtaaccagggcaggctcagcaagagaccctaagatggatatacttggagctattagaagtattttttrtgtgccctctgattaggggaattggtcgtgtgaggtcaggcccagtggctggggcaaaagttggtatttagcccataggtcttgactgagccttggtaat

SEQ ID NO: 27008 - DNA, 201 bp, Homo sapiens
agagagagggtttcaccatgttgtccaggatggtctcgatctcctgacctcatgatccacccaccttggcctcccaaagtgctgggattacaggtgtgagycatcacacccagccaattcctgttattcttaatttgtttacttggtcaatcccccatgtgtagctgcctcccatgccctctgcagtcccccatcccgttc

SEQ ID NO: 27009 - DNA, 201 bp, Homo sapiens
ggacctggtgtccagggagcatgcacaggacctggagactggggagaccatgaagactcagtccttcctgcagaggggaggtagccagagtctcagttaargagggatgttgaaattctgccgtatggtcagcactggcccctctcgggtgcccaagctgccccctggcttctgccttctgatgcatccacccccatccct

SEQ ID NO: 27010 - DNA, 201 bp, Homo sapiens
tgagccatcacacccagccaattcctgttattcttaatttgtttacttggtcaatcccccatgtgtagctgcctcccatgccctctgcagtcccccatccygttcccatctcctcctgaccctttgtgggctcttccaccccatgccttctctctgtcaggcctggtctcctcatgccatgccaggacccactcctctttc

SEQ ID NO: 27011 - DNA, 201 bp, Homo sapiens
ctggcctaggtggtcttacccctagattcccaagtgttcctgtgcatctggggatgggataggtgccggcaggtatttggagtgaggtggccagaccatcygctgcagaccaggaacccccttccccatgcctcttgagatgaccttgtcctctgctccttccaccaggacactgtgtgacaacctgaggcgggagcggga

SEQ ID NO: 27012 - DNA, 201 bp, Homo sapiens
ggtacccactccactctccagggcagtggcaccaccaccccggagcatccatctgtcatcgacccactgatggagcaggacgaggggcctagcaccccccmagccaagcagagcagctccaggtcagcagacgttgctgtgagccttccctgtgtccgcttcggctgggtggggctgagcacattctccaagtggcgtggg

SEQ ID NO: 27013 - DNA, 201 bp, Homo sapiens; identical to SEQ ID NO: 3061

SEQ ID NO: 27014 - DNA, 201 bp, Homo sapiens
tagccttgagacctgccaaggagtgtggggggagcccagtgtctggcccacctttgcttttctcaccaggaagggcaggaagggcagggcagcagggtctygatggccctgcccagcattgtcccctgtgccacaggatggaccaagaattctccaggaggctcagcatgtctgaagtcaaagatgacaatagcgccacaa

SEQ ID NO: 27015 - DNA, 201 bp, Homo sapiens; identical to SEQ ID NO: 3063

SEQ ID NO: 27016 - DNA, 201 bp, Homo sapiens
aataataataattagccaggcatggtagcacacccctgtagtcccagctgcttgggaggctgaggtgggaggattgcttgagcccaggaggtggaggttgyagtgagccttgattgtgtcactgcactctagcctgggtgacagagcaagaccctgtctcaaaaaagaaatttttttttgttaaggttatgttcattgaga

SEQ ID NO: 27017 - DNA, 201 bp, Homo sapiens
tgcagagggtgccaagcttttcatctctgcctgcatcctaatgtccagatctgcgggtgggctccccacacgagctcctgtcacctcctgggactgagctsatttctctactgggaagggctgcttccttcatgggccagccatgcccatgctgctgtcagagccattgctttcgccttccgctttctgtgggggccttat

SEQ ID NO: 27018 - DNA, 201 bp, Homo sapiens
cttcacaggtaggtgtgcgtgggcctggagtggggagcaggcagcagggaaggaagcagaggcttcctaaggctgttttcttagccgtggagaagcccgcrctttctacatgctcccaagtgctgtcatgagcacgttcctgacaagtcaggtgttcagattgcagtccctggccaacgtcaggattcttacaggttgaat

SEQ ID NO: 27019 - DNA, 201 bp, Homo sapiens
gctgtaagaccaaggatgcgcctccagggtcagtgggagcatgacagtgagggagcccaggacaaagggcggtggctgagaaatccacccagctgccagtycatttgctgagcctcggtggtggtgaccatagcagccagggcaactgaaggagctgaggattcctgtgatggggacactcccttctgccctccttcttac

SEQ ID NO: 27020 - DNA, 201 bp, Homo sapiens; identical to SEQ ID NO: 3068

SEQ ID NO: 27021 - DNA, 201 bp, Homo sapiens
ggagtacagcaggtacttcacaggtaggtgtgcgtgggcctggagtggggagcaggcagcagggaaggaagcagaggcttcctaaggctgttttcttagcygtggagaagcccgcgctttctacatgctcccaagtgctgtcatgagcacgttcctgacaagtcaggtgttcagattgcagtccctggccaacgtcaggat

SEQ ID NO: 27022 - DNA, 201 bp, Homo sapiens
ctcatcttggaaaactggggaggttttaaggaggagaagagacattcttgggcagcacttataaagccagccttaaattccatgaagattgaaatagcagragatttcttattaaatggagaggtctccaggcttatcggcaggagaaattgctggagggcttctctcatatcccagggaagattccttgaaagtgcttct

SEQ ID NO: 27023 - DNA, 201 bp, Homo sapiens
gaggctcagtgctcagcctggtgtctggctgtccccacagggagcagagagaccccatctacctgagggacaaggtgactcagaggcattccaaagagcartttgaggcggcgcagaagcttgagcaggagtacagcaggtacttcacaggtaggtgtgcgtgggcctggagtggggagcaggcagcagggaaggaagcag

SEQ ID NO: 27024 - DNA, 201 bp, Homo sapiens
gtggactcaactctccaccacccagaggacactgcatgtctttatgcttgctcttttaggggcttgtgcgggagtgtctcaggaatatatggaggactggktttcctcttatgttagtctgctagggctgctgtaaccaaataccacaggccaggcacggtagctcacacctgtaatcccagcactttgggaagctgaggc

SEQ ID NO: 27025 - DNA, 201 bp, Homo sapiens
ctgggaaaacaatggcaggttgtattcagcatgagaagaaattggaggctgaagcctggggcgtgtagacagcgttctctcaggcggtctgtcgggtctcrgatctccagcctggccctactcacaactcgccacacctttgccaacagccttaaaggcagcaggtctttgtgccaaggcctcctcgggcagttttcatca

SEQ ID NO: 27026 - DNA, 201 bp, Homo sapiens
tcccttatggaacaataggttcttcgagtaacttgcagttcaaggcggaacgcattaaaatcccatcaacaccaagatatccgcggagtgtcgtgggctcygagagaggtaaggacttctcgacattcccatctctcctgcttttcctgcggtctgactcctcatggtggagtctctgggcttagctgagaacttcatagt

SEQ ID NO: 27027 - DNA, 201 bp, Homo sapiens
gctgcttaggagcaggggagccagtggcctgggcacagtcccactcagccccgagctggctcatgactcaggagccgttgccttcgctgagcttcggctcytgtgctggttgggccaagggctcaccaaggccctgctccattttgcctttctgtgctgctgagcttctgggacctgcgctaggggctgctggtgcatctg

SEQ ID NO: 27028 - DNA, 201 bp, Homo sapiens
gcccttactactgtatgaaatgctgtgggcatttagggatggcagcaggctttctaggaggagctcagagctttcttcacatttcctaagatccaagatcrcagaaagcatgagaacactgatgcggtacaactccctgtctctagggtagaagatgacatatttccatcctagagagattccagtctgtaggaaccaggg

SEQ ID NO: 27029 - DNA, 201 bp, Homo sapiens
cattcttttaagcactatattgaattccaccctatagcaactgtgccataatttgagaatatgattcttatactagtaaatggagggaatggtgacgtagygtccatcagcagggaagtggataagtcgatccagaataagtgttaatgggatgcccaaaaggagcagagcggcccacgacgaatcaccagggatgcctcc

SEQ ID NO: 27030 - DNA, 201 bp, Homo sapiens
gggagcatgcacaggacctggagactggggagaccatgaagactcagtccttcctgcagaggggaggtagccagagtctcagttaaggagggatgttgaawttctgccgtatggtcagcactggcccctctcgggtgcccaagctgccccctggcttctgccttctgatgcatccacccccatccctggcagtatggcagc

SEQ ID NO: 27031 - DNA, 201 bp, Homo sapiens
ttcttgtggggcaggtccccatcccacatgtggcgaggcccctgatagtggtgtgcttgtgtgcaaagtcagctcgtgtgtgtgtgtgtgtgtgtgtgtgkccctaccactgtctcctagacctgcctaagttgagtgaagctttatgtggttggtaaacatattaattgttccctgtcacacatgtgttttatttgtttt

SEQ ID NO: 27032 - DNA, 201 bp, Homo sapiens
agccgtgcagattggggaggcctcacctgtcactgggcaggtctgggttacactgaccacaccttcctggggagtgggagctttacctgccaaaccccagrggctgccttgccagagagcagaggagaatggagatggggcaggggaagcaggcgtcgacccacgaggaaaaatcagagcagaaggaagctctgggatgag

SEQ ID NO: 27033 - DNA, 201 bp, Homo sapiens
cagaatcctgccaagcccttctgaggaggtccctgtgaagccaggcaggccattgagggaacctgagggcagagccttggctcaggccctgggcatcaggkggtgctcgccctcaggtgatgtagctgcaggactctgttctgatgagagaggatggtctttctctgtggtctcctgcctcatgggggagatggtttgtga

SEQ ID NO: 27034 - DNA, 201 bp, Homo sapiens
gccaccacaccaggctaatttttgtatttttttttgtggaggcggggtttcaccatgttgctcaggctggtctcaaacccctggcttcaagtgatccaccwgcctcagcctcccaaagtgctgggattacaggcacgagctgtcacgccgagcctacagagaagagacatttcatcacaggtttctggtggactcagacct

SEQ ID NO: 27035 - DNA, 201 bp, Homo sapiens
ctgggctcaggcgatcctcccacctcagcctcccaagtagctgtgactctaggcacgtgccaccacacccagctaattttttggtattttttgctagagayggggtttcgccatgttgcccaggctggtctcaaactcctgagctcaagggatccgtctgccttggcctcccagagtgcttggattacaggcatgagccac

SEQ ID NO: 27036 - DNA, 201 bp, Homo sapiens
ttgtattcatgaggatatgcccctcagtcagttggcccgaaggcaggatgagtgaagacgtggatgtgctagcacatgagagttggcacactatggcccaygggcccactgcctgttttataaatgaagttttattggaacacagccatgctcattggttacaaagtgtctatgactgctttcctgctacaaaggtggagt

SEQ ID NO: 27037 - DNA, 201 bp, Homo sapiens
cagcctgggcaacatagcgaaaccccgtctctaacaaaaaatacaaaaaaattagctgggtgtggtggcacatgcctgtagtcccagctacttaggaggcygaggtgagaggatcgcttgagcccaggaggcagaggttatagtgagctgagactgcgccactgtactccagcctgggtgacaacaagaccctgtctcaaa

SEQ ID NO: 27038 - DNA, 201 bp, Homo sapiens
ctgctgttccgtggctggaagtgagacttgtgcgctcctgttctggagcagtctgggcctgcacagttcattgagataaatgttaaacgtctgcttttctkgactgttccatatcaaggctcccttgggaataaacagcagggcccagctttgcatttattatcctgactggtagcctggtggagaggaaggacagggtgg

SEQ ID NO: 27039 - DNA, 201 bp, Homo sapiens
ggtgtggtggctcacgcctgtaatccgaccactttgggaggccaaggcaggcagatcccttgagctcagaagtttgagaccagcctgggcaacatagcgawaccccgtctctaacaaaaaatacaaaaaaattagctgggtgtggtggcacatgcctgtagtcccagctacttaggaggctgaggtgagaggatcgcttga

SEQ ID NO: 27040 - DNA, 201 bp, Homo sapiens
agtaaactgttgcttactgtaacttttttactttataaactttatatttttttaactttttgactgttttgtaataacacttagcttaaaacacaaacacrttgggccgggtgtggtggctcacgcctgtaatccgaccactttgggaggccaaggcaggcagatcccttgagctcagaagtttgagaccagcctgggcaa

SEQ ID NO: 27041 - DNA, 201 bp, Homo sapiens
ttgaacccaggaggtggaggttgcggtgagccgagatcgcaccactgcactccagcctgggcaacaagagtgaaactctgtctcaaaaaaacaaaaccaamcaaaaaaacccaaaacctgccaggcttgcattgtgtgctactggtggttgttatttgggaggcaccgaggcatgagggtgaagtgcatgtgtttagaatc

SEQ ID NO: 27042 - DNA, 201 bp, Homo sapiens
agaccagcctggccaacatggtgaaactccatctctactaaatacaaaaaattagccgggcatggtggcgcatgcctgtaatcccagctacttggtaggcwgaggcaggagaatcgcttgaacccaggaggtggaggttgcggtgagccgagatcgcaccactgcactccagcctgggcaacaagagtgaaactctgtctc

SEQ ID NO: 27043 - DNA, 201 bp, Homo sapiens
ctagagaggggcagttggccgaaggagggctgctaagtggccctgcaccagtgtcccaggcccctgtttagcctggtgcctttgcctttgctgttggactyaagtgggaagtggcccagctaggaggtaggtaagtggcgtggaagtgcatggtagtgggagtgtgacacaagaggggaacactttattgggcatagcatt

SEQ ID NO: 27044 - DNA, 201 bp, Homo sapiens
cagccttgacctgactctgagttattgggaaacaagggggaaaggaacccattttagctctttcaaatggcctgcctcgtgaggttcagagccgttacgcrgtgggatgtttcacctcccaaggggctgtcaccgtggctctctctgttcacagggaacagatggaatcccagttggaaaaggaggcccggttccgacagc

SEQ ID NO: 27045 - DNA, 201 bp, Homo sapiens
caccactgtgcactcctgcaagaggagattttctgagcgtgtatgtgaggcacccactccttggcagtcagccccctgagtgagagttgtgggcggtagcygctggtcccacagcctgtgtgggtgctgaactggctgtgccctttctcagggtcaatgactggctgctgagaatcaacgatgtggacctcatcaacaagg

SEQ ID NO: 27046 - DNA, 201 bp, Homo sapiens
tctatcctttgccaactcctgactttggcaccttgcatttggtgactgtctagcacaggaggttaggtaggcagagatcctgactggtaggcctgaggccrctctgcctgtggcctgacatgctctctgtcctgctctagatcaatggcattgcactggacaacaagtctctgaatgaatgtgaatctctgctgcggagct

SEQ ID NO: 27047 - DNA, 201 bp, Homo sapiens
aagccaaggcagctggggttcatgggagaggaagctggttctcccttgtcagattactcacaggatcatccttccgttgatttcatttacattttctcccrtcatcagaaacccagttctgatgttagaaggaggtggggaggtgagtgctgggaagcacatgttttgccattgtttactttgtcagggcacagggcttct

SEQ ID NO: 27048 - DNA, 201 bp, Homo sapiens
atttatcttccatttcctctgtggaggcaaggagctgggaagttctgagccaaggtcccacgccacatggccgggcacagcagtgccaagatgttccctcygggtcctcggtgttctgatcccagaaggacatgctcctcccctagcctgctgtgaaggcttatgtgttcctctacctcagaatccccttagttggactcc

SEQ ID NO: 27049 - DNA, 201 bp, Homo sapiens
tcactgctgaaagtgggcaaactctacttgggggaatgccccagtggagcatctgggggtcgggagtgcacgggcctgcactccacctggatgcctgggaygacagacatgacagacatatttcagtctcagccacacaaaggctcaccagactctggctcttcattcgctcagtctggcaaaaataaggcttcagaggcc

SEQ ID NO: 27050 - DNA, 201 bp, Homo sapiens; identical to SEQ ID NO: 3064

SEQ ID NO: 27051 - DNA, 201 bp, Homo sapiens
acttccctcctgggcctgcccaagtggtcttttcaccctgtcatccagccacagtgtctactgaagcccgccgctcctggaattgccaggcagctcttgcrtgctctcttgctgttcatgtgttgctctgttgtgactctagttaaagtgtgtgctttttaatggcaggaactctgtgttctattctttattatgtttctg

SEQ ID NO: 27052 - DNA, 201 bp, Homo sapiens
acagatccctccaggccaagcctctcatggacccttcctcccaagcctgcagtcatcttgtgctctgccctccccatcatctccatactcatcctcttgcyctgctctttctggagactctcatcccacttccctcctgggcctgcccaagtggtcttttcaccctgtcatccagccacagtgtctactgaagcccgccgc

SEQ ID NO: 27053 - DNA, 201 bp, Homo sapiens
ctcacatgttggagacagagagatctctggtgtctcttcctcttaaaaagccgcagttctatcagattagggccttgctcttctgacctcatttaacttayctcctgaagactccgtctccaaaggtagtcacactggggcttagggcttcaacatataaatgtcgaggggacatagttcagtccacagcaccttttaaag

SEQ ID NO: 27054 - DNA, 201 bp, Homo sapiens
gtcccaacaagaagccagctgactgactccaagttcccctctgcccgcctgcccagagcaggaggggccgataaagtgaggtgggaggcctggcagaaacrccgaagtccagatctgctgagcgcgcctcctctgcttggcctgtggatgtggatttctagtgcctggtgcatgtagctctcatggcctggcattgactga

SEQ ID NO: 27055 - DNA, 201 bp, Homo sapiens
gtcgttagatacatacaccttttgcattgttacaccttcctggtaaattaacctttttatcgttataaaatgcccttcttgatctccaggaatgtttcttkctgaaagtctattttacgtgatatttttattgacattaccagttttcttttggttatctttggcacagtttatctttttcttttacttcaaacttttctg

SEQ ID NO: 27056 - DNA, 201 bp, Homo sapiens
taaagtggacaaaggaagcattgctgatggccgcttaaggtaagagttgaggcccaggctctggaggcaaggtggggcccttcttcccagtgcagaggacscgaagagagccaggtagcacttaggtgaacgtttcccagccttagactcacacacagtctgtccaaggcctgcagtctcagcagctaataatgctccgaa

SEQ ID NO: 27057 - DNA, 201 bp, Homo sapiens
gctgagtgccttgcttgccatttgtttttaggttcttacaggctgcttggtagtgaccaagagctgtcggtttctgcagaacttcggcatttctggcctcrgtcctgtgttcatgaacaagtcttgtataatccttatggagcaagatgctagtccagggctggagttgagtgataggagatgtcagacatcccctggtag

SEQ ID NO: 27058 - DNA, 201 bp, Homo sapiens
cccagcccaaaccatatgtgcccctacaaatctatatatacctagatagatttcttggtgttgttttgcttatttatgtacagtaatgggatctgcaattygcatcctaccttggatatctttccaagtgtagcctggctaatgttacccaccttatggtattctgttgtttgattatatgtagtttaaattatccaccta

SEQ ID NO: 27059 - DNA, 201 bp, Homo sapiens; identical to SEQ ID NO: 3070

SEQ ID NO: 27060 - DNA, 201 bp, Homo sapiens
tggactactgcctatttttaaatggtctgtgagctgagcatgggtttttacacttcttaaaatgtaagatgtaaaaaagtctattagccctttgctgatawcaattgcttaattttgccgttttgccttcaaagcctaaaatatttactatcttgccctttatagaaaaagtttaggccaggcatggtggcgcatgcctgt

SEQ ID NO: 27061 - DNA, 201 bp, Homo sapiens
actcgtgccttgccgctccctcaaagtgtaccattcagtggttttcaacatattgataggtgtgtgcagccgccactacagttaattttagagcatttccrtcacctcaaacaaaccccagacccattagctgtcagccccttatcccactgtcctcccacccagccctcagccctaggcagccactactttacttttgat

SEQ ID NO: 27062 - DNA, 201 bp, Homo sapiens
ttgctttttgttttttttccttcactctctttggcctccactcttgtgccctctgctcctttctccgtaggtgccatctccattatgtttggcatttgtcyggtggtgctagtgtctttaaaaaatagccctttgtctattcttccttttagctcttcaggtgtttttcaatatatatcttgaagttgtcgttagatacat

SEQ ID NO: 27063 - DNA, 201 bp, Homo sapiens
gaaaatcttatatttgacttgaaaatctgaacttaaaaggcaaccaaccagagaacctgaggggtaacggaaggacagcaaaacacagaggcctggccccmgtaggggaatcgggtgtaactcggaagaaatgctgacggagctcttaccatgtggcacgcgcaggagcatgctggcctgttttactcagccccggccctg

SEQ ID NO: 27064 - DNA, 201 bp, Homo sapiens
ccctcctcactgaccggcaagtgaatgagaaggtggagaacctctccattcagctgcggctgatgacccgggagagaaacgagctccgcaagcgcctggcstttgctacgcatggcacggcctttgacaagaggtagtaattgcgccgtctcccctgcccaggccccatggttgggattactaccccgatgctggtgctgt

SEQ ID NO: 27065 - DNA, 201 bp, Homo sapiens
tctccgggcctggggtggggtggggcaggggtcgccgagggccaccagccatggagctgtcccatgggagggggctggggccagggctgctggaggagggrttctgcttcttatcttagcttctgctctctacattttgccaaaagtgctggtctaaaaagctgctcctagtgtgagtcagtgctgtatagagcacagtga

SEQ ID NO: 27066 - DNA, 201 bp, Homo sapiens
ttctctactgggaagggctgcttccttcatgggccagccatgcccatgctgctgtcagagccattgctttcgccttccgctttctgtgggggccttatggycattcaggtgacccctcagctaggagccttgctctgtgtccctgaggttgttggcctcattctggactgttttgtatggctcttcatacatttttgtatg

SEQ ID NO: 27067 - DNA, 201 bp, Homo sapiens
tgttgggcacagttgggtacatttgaatctggacccgataattagatgatcttagggaattgttgccagttttcctaggtatgatgatggcattggggttrttatacaggagaatggctttatttgggggaggtacaagctaaagttgttagaagtgatgtgtcatggccgggcatggttgctcatgcctgtaaccccaac

SEQ ID NO: 27068 - DNA, 201 bp, Homo sapiens
tccaggtgctgttatgtggagcacactggagtacccctggcctggtgtctatagacccctttgtcaaactcctatagtacagggctggcccaagttggcgycatcatctttctgtgattctcctcttggccatgagctatctggctccttaaacttgtcgtttcctgcagaatcctgctaatgattagaccaccgccacat

SEQ ID NO: 27069 - DNA, 201 bp, Homo sapiens
ggagcacactggagtacccctggcctggtgtctatagacccctttgtcaaactcctatagtacagggctggcccaagttggcgtcatcatctttctgtgaytctcctcttggccatgagctatctggctccttaaacttgtcgtttcctgcagaatcctgctaatgattagaccaccgccacatgtcctccaaacttcctt

SEQ ID NO: 27070 - DNA, 201 bp, Homo sapiens
tctgccttggcctcccagagtgcttggattacaggcatgagccaccactcttggctaatttttgtattttttgtagagatgtgatttaatctttttttttwaatacatatttcttttgtttctaactctattataatcttatgggaccacatcctacatgtggtccaccatcattgactgaaacgtcgttatgtggcacat

SEQ ID NO: 27071 - DNA, 201 bp, Homo sapiens; identical to SEQ ID NO: 3079

SEQ ID NO: 27072 - DNA, 201 bp, Homo sapiens
gatggcttggcagctggacgagaatgcccagaagatccagcgcgggcagattcccagcaaatatgtgtaagtgttctccgggcctggggtggggtggggcaggggtcgccgagggccaccagccatggagctgtcccatgggagggggctggggccagggctgctggaggagggattctgcttcttatcttagcttctgct

SEQ ID NO: 27073 - DNA, 201 bp, Homo sapiens
ccaaacatatagcaggtacacaatataattttgttttcctcataaatacatggttaggttcagcatggttattcatgaaaaacttcttttaaaaaattgarcaactgaataaattctaattgaatggctgaattatttgaaaggcaaaaaaggcaggcaataaagttagtctgaagtatcttcatgtaggtattcttggtg

SEQ ID NO: 27074 - DNA, 201 bp, Homo sapiens
acgtgaccttaatgagatatttaacctttggaagtaatgctttttcatctagaaagtgagtcagtatctactttgaaagtttgttctgtggatacaatacrttggaagacattaaattaaaaagtatgtggaataaacactcttatttagatgatagctttcatcattatcattatcatcaccatcaccatcaacatcatc

SEQ ID NO: 27075 - DNA, 201 bp, Homo sapiens
aatttattgccgttctctatcttatgcttttaattttatttaatgcatgtcttaagtttttcaacagacttttctaaatgccatgataatattaagctctktgacaacattaattatgtgtacatatattatttcgattgcacagtttttgagtgcaatgatggatccattgagaatgaggattctggaaagctctaaaag

SEQ ID NO: 27076 - DNA, 201 bp, Homo sapiens
ataggatttataacgggtgtggtgaccacatcttgattaacccttactgaggctgagttgaaatatgcatttttagctcagtgcccttcccagttcttctsctatttaagaagggaaagcagttgccttttccgtgttcttggacctttctattccctttttttttatccttgcaaacaaatctagtcttttctgagctca

SEQ ID NO: 27077 - DNA, 201 bp, Homo sapiens
ttcatgcaaattcaatgaatgaatggtaaaacaaatctgatccaaactattgacagaagtggaggcaggcacagaactccagcctcttcatcatctcctcrtttcctcctgaattccttttcatgtagtttcttggacagatgcatctggaatctgaaagtaatatttaatagagtattcacattcttaatagttgttata

SEQ ID NO: 27078 - DNA, 201 bp, Homo sapiens
gctgagttgaaatatgcatttttagctcagtgcccttcccagttcttctgctatttaagaagggaaagcagttgccttttccgtgttcttggacctttctrttccctttttttttatccttgcaaacaaatctagtcttttctgagctcatttgtctcttataccttgtcaaatacagatcacagtaaccaataaatgata

SEQ ID NO: 27079 - DNA, 201 bp, Homo sapiens
actttcaaaataaagtcgctgaataaaaatagtgatcttacgaaatattatagttggatatcatcagagaggtgatattataaatcttctaccccagatartgattttttaatagtctttctgttgcaaatgtttagtcactactgaaatacattatatgaaagagagctcaccacaaatcaaaccaatacaaaggagtat

SEQ ID NO: 27080 - DNA, 201 bp, Homo sapiens
ttgaaatatgcatttttagctcagtgcccttcccagttcttctgctatttaagaagggaaagcagttgccttttccgtgttcttggacctttctattccctttttttttatccttgcaaacaaatctagtcttttctgagctcatttgtctcttataccttgtcaaatacagatcacagtaaccaataaatgatacttaca

SEQ ID NO: 27081 - DNA, 201 bp, Homo sapiens
aaaatagtgatcttacgaaatattatagttggatatcatcagagaggtgatattataaatcttctaccccagatagtgattttttaatagtctttctgttrcaaatgtttagtcactactgaaatacattatatgaaagagagctcaccacaaatcaaaccaatacaaaggagtattacaaggaaaaaggctttgaatcca

SEQ ID NO: 27082 - DNA, 201 bp, Homo sapiens
gagctcaccacaaatcaaaccaatacaaaggagtattacaaggaaaaaggctttgaatccaagtgcacattggagcaagctgctattcttttacagattarctatttgttattgcgcattcagcaaattccttagcttttggtcttctgtctactaaaggaaaatttaaattccagctctgcaagtttgttgagtaataat

SEQ ID NO: 27083 - DNA, 201 bp, Homo sapiens
gtttgttttgttgttgttgttgttttgggtgagaaccattaagatgtgtcctgtgatatcatttttacttgtcaattatgtctccataatttttaaaagaygctgttcattataagaccttcccaattcagaggtatcaaaatgtgaaaaaaatactttaatatagcaatctattttgaaaacatctctgttaaaatctag

SEQ ID NO: 27084 - DNA, 201 bp, Homo sapiens
tattaaatttgactggcgtagtgtctatctgtgagtgtgtgttcacatgcctatgtgtagaactaaagaataatttaaataaattatgacttatacaaatrtgaatgaatgtatgcccaaaattccatttaactgattgattaatgagggaaccagtaagatgttacaactgattcaaatgagaagttaaagtatcacata

SEQ ID NO: 27085 - DNA, 201 bp, Homo sapiens
gatttcaaaccaatgcaattttattttagttacctgttaaggaaaattttatatttttacctgtggtttcaggtaaatacaaaggcatatgactgtctccrttaatgcatttgtaccacttaatgacagcatttttttgggatggatacaacatcatccattttgatcttagttgtcgaaagaagagtcaagtttttcacc

SEQ ID NO: 27086 - DNA, 201 bp, Homo sapiens
aataacagaaaatcaatagatgggagagccgggattggaattgcaggctgtctgtctctgaagtccattctccatatcactgagctattctagttttcctrggtagagaatctaggatggccaaaaaatgtccccagagcctccctgtaagctgtcctccacaacagacttctggaatagaaagaagttggcttatgacct

SEQ ID NO: 27087 - DNA, 201 bp, Homo sapiens
gatacgtgtagagactttcaaagcattacttgaatttttttcatagttttttaaaactttgtttctaattattgaaataatcaatgcttactgaacaaatyttaaaaaataaagagaagtatgtgaagagaagtacttaaaatccaagcataatataatattaaatttgactggcgtagtgtctatctgtgagtgtgtgtt

SEQ ID NO: 27088 - DNA, 201 bp, Homo sapiens
gttacctgttaaggaaaattttatatttttacctgtggtttcaggtaaatacaaaggcatatgactgtctccattaatgcatttgtaccacttaatgacarcatttttttgggatggatacaacatcatccattttgatcttagttgtcgaaagaagagtcaagtttttcaccactgatgtgagaaagacacttttaggag

SEQ ID NO: 27089 - DNA, 201 bp, Homo sapiens
atttacagtaacaacaataacagttgtcattgatttaattatacattattatcctaaaaataacagaaaatcaatagatgggagagccgggattggaattscaggctgtctgtctctgaagtccattctccatatcactgagctattctagttttcctgggtagagaatctaggatggccaaaaaatgtccccagagcctc

SEQ ID NO: 27090 - DNA, 201 bp, Homo sapiens
gagtgccagaagtctggaaatatgagaaatggaggaagtgggactgtatagtgtagagaagactaataggaactaaaacacttgtctccaactatttatamggttgtcatttagaaaaatggacacgcttatatattgccctagaaaacaaagagtagaatcaatataatgaaagtaccatgtatatttttactcagtatt

SEQ ID NO: 27091 - DNA, 201 bp, Homo sapiens
aatacttggaattttccaatttttgatttagtggaaaatataggaagaaaatgtggccgtattcttagtcaggtaagaaatgcattcattcacactaattkaaatataggaaaaacagttcctttgttgcttaaagctctgtaaattcttgacacttgtggataggtgttatgtggagaaaggaagttttagaacacaaca

SEQ ID NO: 27092 - DNA, 201 bp, Homo sapiens
tctttggcaggttattataagagggacagtgaaaagtaaatggatttagaatatattttagagacaggatcaagtggatttcctaatcgactaaaagtaaracaagataaacaaaggaaagaatcaagacccgttccctcttctggggcctgagcaactaggtagatggttatgttctttactgggatgtaacaagattga

SEQ ID NO: 27093 - DNA, 201 bp, Homo sapiens
tttaaagaactataaagtttgtttagcttttagtttagtcctgacaacccagtgtccgcaatactgaggctgattttgtagatgagtgtgtcaaactactyttttggctgccagtgttaagaaggcaagtgtctgttaaggtgtgtgtatcttttctaagtggactttcgcatcccagagcagatatgtctctctcaaagt

SEQ ID NO: 27094 - DNA, 201 bp, Homo sapiens
ctgtaatgatccagaaaataacaataggacttttaaaaagggcttttcttagctttgcaagaaaagagataagagcagaaaggttcactttttgaagagamcaagactcactcagttggaaagttactctaaatttactttttcctaacattgatttatgacattcagtatgaattttgtctgtttatatccacatatcat

SEQ ID NO: 27095 - DNA, 201 bp, Homo sapiens
aataccatgacaactgactgtcttcagaatcatctagggctgattgattcataatctaaatttagggattgttcatatcagaatctaaggaggacttcacrttgcattcattttgttaattcagcaaaagtagtactagttagatctgggaaagtggatgttaaactttatgaatgccagactggattatagttttctcat

SEQ ID NO: 27096 - DNA, 201 bp, Homo sapiens
tcagaaccagtaatgcaccaaagatcattgtatcaaatccagctcatcttctaaattaatgtagtacattaaagaccaagataccatttcctagtatcacrgacagcctcccagagaaagagttggagggatggagtggcacgtagtgctacagagatgtaggaggagacagcttccaaaaactcatcacacatcttttcc

SEQ ID NO: 27097 - DNA, 201 bp, Homo sapiens
ctttcataaataatttatcagttaatggtagtgaacagagtttgaatgagtcaaaattctacaatgaaatgctcctgtataggtgtaagtatataaatgtatatataaatatacatatacaaatgtaaatatataaatgtatatatttaatgtgtatttgcccctagtttaatttgtcagcagtaactgctggtttttatt

SEQ ID NO: 27098 - DNA, 201 bp, Homo sapiens
tctaccatcttcacgtctctcactattaactctggccctcctgcctcttcttataagtaccttgtgataacattgggcccacccagaaaatcaggatcatygctctaactcaacatccttaatcgcatctgcaaagtaacttttgccatgtacgataacttattcacaaattctagggtttagaacatggacatctttggg

SEQ ID NO: 27099 - DNA, 201 bp, Homo sapiens
gaagtttgttatgtttcacatctcacatggaacctgcccacagacatgttgggaagcagtttgatgaagggccctataggttttcctcctactgtacatayatattatcttaaggaaaaaatccaaatgtaaactcatattccctgccagaaaattaaaatacgcaaacatctgcttccttaggatggcctttagccaagg

SEQ ID NO: 27100 - DNA, 201 bp, Homo sapiens
caggaataactgttagcagctgggcctgggtgctttttccctgctttgtcctggaaagatttcacatcttaagggaaatgaactacacaccttgagaaaatttttttttctatcatattgtataaatctgtgtaaatctcattttccccctttttggagttaagtagcataattaactgtaaggcttttccaaatactttc

SEQ ID NO: 27101 - DNA, 201 bp, Homo sapiens
ggctttttgcaagaaaatatttttgtatatggcagcatggagctgccatatacaaaacaaatatatgtggagctactctggttgtataaggtgataaggcrccaagtccattggttagtgcccccaaaacacatattccagtgtctgctaacttcactggtttctagggaccatagtgggtttcagtggatagggctattt

SEQ ID NO: 27102 - DNA, 201 bp, Homo sapiens
tgtattaaaatatgggtggcagtgtctttaactcagatttgggatgctttatacagtcatgggaaatatcaggggatcaacttgaaattctttaaaagttracagaattttggaacgatcaaggaacatgggaatatggcctcaccttttctttctcactgatgacataaatgccgccctcactgtgttgtttattgtttc

SEQ ID NO: 27103 - DNA, 201 bp, Homo sapiens
caaaaacatttttaatggtcatgtgccaatttttttctatggctattacataacattctctcttgttagacatttttgttgttttcgacttttccctactrcaattaataatgacatgaaaagttttgtataaaacacttcaagttgcagaacatctctttacagaatattcctagaagtggaattattaggccaaatggt

SEQ ID NO: 27104 - DNA, 201 bp, Homo sapiens
cgcattcactttttggatttatttttttcccctcatcccagaagccagaatgtaagctacatttctgtttgtattggacctttgagagactatgctacatrgctaatggaaaaacctgcatacgagtccaagttctgcctcttctaaaattcattaccataaaggaagttggttagccacagggagtttcttaggctttct

SEQ ID NO: 27105 - DNA, 201 bp, Homo sapiens
agtttcttaggctttctcagtttgatttcttagtccctagaaagttcaagtctgtaaaaactagaagtttttataaggaagttatgagaagtaaatgacarggtatttgaaagtacatgacattgtgtatggcatatgttaattgaccagtgaatgctttacatcccttgatctcttaactagaaattaagtggcagactg

SEQ ID NO: 27106 - DNA, 201 bp, Homo sapiens
agtacatgacattgtgtatggcatatgttaattgaccagtgaatgctttacatcccttgatctcttaactagaaattaagtggcagactgataactcctargttcatatcgacagcttcccctcttctgaattccacactcatatatccaattgcaataattggcttcttgacttagatacctaacagacgcctcatactc

SEQ ID NO: 27107 - DNA, 201 bp, Homo sapiens
gagaaaaatagagagtgtgctctcacttaaccaagaaaaaaatctttctagaagaaaatatgatagaatcagagaatgtaaacagaaaaatcacttttackcaatcattccacccagtttttacggttctgtcgaaggagagttagcagaatagtactagctgattatgcttgcgatggttaaggtgacagagactggtag

SEQ ID NO: 27108 - DNA, 201 bp, Homo sapiens
taagtggcagactgataactcctaagttcatatcgacagcttcccctcttctgaattccacactcatatatccaattgcaataattggcttcttgacttaratacctaacagacgcctcatactccaaatgtgccaaatggaacttccaattattgcctccaaatctgctccatcctttctaacagctgatggcaactcca

SEQ ID NO: 27109 - DNA, 201 bp, Homo sapiens
agctcaatttatgaaatgcctaacaagtgatcattgttaagcttttgcctaatcactaccataatagggaactaagtccccttccatgccattttgttctycccttttcccctcctctctgtttagatatggtcttttgaaattgaggagtccagaatctggtacaacagatatggtatgactggaacaaagcgaagggtg

SEQ ID NO: 27110 - DNA, 201 bp, Homo sapiens
cagcctcccaagtagctgggactacaggcgcccgccactacgcccggctaattttttgtatttttagtagagacggggtttcaccgttttagccgggatgrtctcgatctcctgacctcgtgatccgcccgcctcggcctcccaaagtggtacatagatttctaaatgtaaaatctatagagaaactgtggaacaccagaa

SEQ ID NO: 27111 - DNA, 201 bp, Homo sapiens
gctcattgataaaagcttaaaagtacaaatctactaatagtacctcaatcttgttctttctctagttgctaatttgacattttcctctgcctgattatgtyggaggatttctcattttctatccctaagccgtgcacagctcataaaaaacagtagttgccaagtgacaggtgtttttggaaaacttgcttagtttatacg

SEQ ID NO: 27112 - DNA, 201 bp, Homo sapiens
tgctttttaatgtgatgatctatacaacctctaactggaatttgaaagctggggccaaataccactgcagctcagatgctaaagctgtttcttaaaatgargcagataaaaaatagagaaaatcttttttaaaggctactttgctcctttccttctccataactaaatgttggagctttctgctggggaggggagagcaaa

SEQ ID NO: 27113 - DNA, 201 bp, Homo sapiens
agctgtcacatggggtttcattcatttgcattcccagaagtggtctaaagctttccctaatgtaggagtaatgagggctctgtaccttcagagacccagagggccttttgtaggatgttgttactttaagtggctctgataagggacacaggctcagagaatgccatgtttcactgtcagcttcagaggaccataaactac

SEQ ID NO: 27114 - DNA, 201 bp, Homo sapiens
gtactctgaggttgatactgttgttctcattttacagctgaagacacaggcacagtgagcctgtctctatatatgtctctctatatgtctttatatatgtstctatatattctagtaaatcatagttaaaaatttttgtgcatatgagtgctagacatggtatcatgtgtttatatacctttgttaatttttgccagaaga

SEQ ID NO: 27115 - DNA, 201 bp, Homo sapiens; identical to SEQ ID NO: 3118

SEQ ID NO: 27116 - DNA, 201 bp, Homo sapiens
tgaccccaagactgaaaaataaccagtgcacaacagacctgagcatactacaaacagctttgctcttaccattttgccccatgctgccttgtcagcccctsctcaatatgggggaaaagtggacctttccgataatctggggccctatatgtaggagaaaaagaagttgaagtgccaggagctgctctcagaagctgaccc

SEQ ID NO: 27117 - DNA, 201 bp, Homo sapiens; identical to SEQ ID NO: 3120

SEQ ID NO: 27118 - DNA, 201 bp, Homo sapiens
agtggacctttccgataatctggggccctatatgtaggagaaaaagaagttgaagtgccaggagctgctctcagaagctgaccctggggacacattctcargccaggctggcctgtcctgtctatacctcaacccttcccactgccagaagttttcatgttttacttattttttgcctggaatttgtcaagcttttaattc

SEQ ID NO: 27119 - DNA, 201 bp, Homo sapiens
gatactggtatattaaagaatattttacaaaatcacagtatcaaccatagcctcgagaggtaaaacttatcctatttttaatttccagtggtagcactttrtaaataaaaattatggtgtatgtgccaaaagcctggacttttgtctggcaaaggttgtttaaaacttgaagagacatcaagaaatatgtgagttcatcca

SEQ ID NO: 27120 - DNA, 201 bp, Homo sapiens
ccaggctatatgtataaatatgtgtttctaatagcattaacatcttatttatggtacaggaatttttctttacagccactctagggaacaaactaaaataytgtttaatagcattcctcacaagattttatattctcatcaaaggtgctgattttcttacaaagttttaccttgggagaacaaaggtggtttagcagttat

SEQ ID NO: 27121 - DNA, 201 bp, Homo sapiens
atcagtagtattcatccctccatgagaatgacaggttttttttttttgttttttttttcgggagtactggcaatcaccatctgattcagtctaacgttttytggctggggcaggaactctgaactttatttccaaatgagtaataatgataaacaatcctagaggaaagtgggaaaatgcctgatggcttattggcgggaa

SEQ ID NO: 27122 - DNA, 201 bp, Homo sapiens
agcaagtccccaattatatctttagatactggtatattaaagaatattttacaaaatcacagtatcaaccatagcctcgagaggtaaaacttatcctattyttaatttccagtggtagcactttgtaaataaaaattatggtgtatgtgccaaaagcctggacttttgtctggcaaaggttgtttaaaacttgaagagaca

SEQ ID NO: 27123 - DNA, 201 bp, Homo sapiens
aactttaaggtttaatgactgccctattgaattttagacttgcatggggcctgtagcgcctttgtttcagcaaggaaactggtggcattttgccctagccmtagagatctgtgaaactttgaacttgagggagatgatttagggtatctggccgaagaaatctctaagcagcaaagcactcaagaggtgactttggtgcta

SEQ ID NO: 27124 - DNA, 201 bp, Homo sapiens
gttcttttctggagacagacagggactcatgtctccctccttggcaacagctattctttcatgggtaattcctatgtactatttgaatatcaaaatatttwtatctccctaagaatggggagacacaacgtatttgccccataagggtaaattgcaaacaaattgctccagtgcttcagaaaggactggttattcattcct

SEQ ID NO: 27125 - DNA, 201 bp, Homo sapiens
attaaatctgataacaatagtgtggaatttggtgattatccccagttgatgaatggtacttaggaattcacagacataggttcagtatgtatctgtggagmtttgtggatagttgtgctgctggggaagttgttaggtagaagtccaagttaaacagtagggagctaacaagacctcctgggaaattggatcctggatttc

SEQ ID NO: 27126 - DNA, 201 bp, Homo sapiens
gtctactaaaggaaaatttaaattccagctctgcaagtttgttgagtaataatataaatggattatctcatagacaaatgttttaaaataaaatattgctrtaggatacttgctatattgaaccaaaaactgccttgtaactttgactcctttgtcctagtgtttattttctatcctacatgtctgttaggattcccaagt

SEQ ID NO: 27127 - DNA, 201 bp, Homo sapiens
cattgaattcaactgtccattgtctgacctcattttcatattccttaaacattgctcttccctgggatgcactagttaaatcttattgtggtattgggctrtccttttttgtagccatcctcagggaagccacacttgtttggcatgaccctgttgtcttggctgcactcaattgtacgtccccaagctgagcagtgagat

SEQ ID NO: 27128 - DNA, 201 bp, Homo sapiens
aatatgagaacagcaccaagccattcatgagaaacctgtcccccatgatctcatcacctctaatcaggcctacctccaacattggggatgacaattcaacrtgagatttagaggggtaagatatccaaactttatcaaggaccgtaatggaaatagacttgtactcatacagcttacattttatcctagtagacatgcctt

SEQ ID NO: 27129 - DNA, 201 bp, Homo sapiens
aagaactataattggctgctcattcttctctaattactgagaccaccttacacattcacttttgaaagatttcaaaccaatgcaattttattttagttacytgttaaggaaaattttatatttttacctgtggtttcaggtaaatacaaaggcatatgactgtctccattaatgcatttgtaccacttaatgacagcattt

SEQ ID NO: 27130 - DNA, 201 bp, Homo sapiens
tgtgtttttgatttgattagagctgtcatttgttatttaggaatctgtgaatgattattaaagctttcaagtatagccagtcctgctaacataataataayattacattaagggcactcatgttctttcctcctgagaagatgactggttacagggggcacatattgtttgctgaagtgtgtgtatgtgcatgtgcatgtg

SEQ ID NO: 27131 - DNA, 201 bp, Homo sapiens
aagcacatttggacaaaatgaaataatgtggatgctggctcgcttctggtaaaagctgacttaatttagagttcttgaagaagctagctgaagaatgaaaygtcattgtaacacacatctgtttcttgaaagagtttatacttgaatgtaactagtcactgttagctctggctaattttgaagttgatttaaattaatata

SEQ ID NO: 27132 - DNA, 201 bp, Homo sapiens
cattctccaggagttattcgaaagctgaaactttcagtggattgtgggcctggggagaagaaggattccgagggtggaattgggaagagcgtgcgtgcgtktgtgtgtgtgtgtgtgcgcgcgcgcgcgtgggtcggggcgggggcgtcggggggccactgggaattcagtgaagagggcaccctataccatggcagtgcc

SEQ ID NO: 27133 - DNA, 201 bp, Homo sapiens
tttcttgaaagagtttatacttgaatgtaactagtcactgttagctctggctaattttgaagttgatttaaattaatatagaggttgttctggtacttttytttttggtcagtctttttctgttctccatctctatctacatgcacattttctttcatttcattttctttttacctaatagagtcttctccctccgaatgt

SEQ ID NO: 27134 - DNA, 201 bp, Homo sapiens
tttatggtagacattatttcatttaaaaaattctaaaatgggctttatttagatagcaacacattttatcagtattttcttctaaattttttcatttagckgatttttaacatagttctttaatacttttggaattcagttatacaaatggtagttgcatataataagcaaactgtgagtttttttctaaattgctataca

SEQ ID NO: 27135 - DNA, 201 bp, Homo sapiens
ttaaaaaaaggcttcatgttgatacaagtgggtagatatgaaaccaggtgttaaaatatacacatatatttccttgctccgcatactgcagtgttcattgytacactccagcagcaaggatcatacccagcactgagatcgtgatttctaatacctttgcaaattgaaggaaccagagatctgtgaaaaagtggcttaatc

SEQ ID NO: 27136 - DNA, 201 bp, Homo sapiens
gtacaggaagcacaggccttactttttattgttgtatggagcagagtcccagaaggaccggctgtggagtgctgaataaaatccctgtgaatgcacaccgrgttctctgaaaatacaagcttctagtcatttctgggttaaggtgtagtccatttcgctttgctatcagattacacataagttattgagcaataaaaggaa

SEQ ID NO: 27137 - DNA, 201 bp, Homo sapiens
agaaaagttctttgctttaaaatgactcatcaagtgctattgggaacatttaaaatgttatttcaattgcacatactctttaggaagatacaagtttattrctttatatgtgtgtatcactgataaaaggtattttcatatatttaacaaaaatttaaagggaggaatggttaaatgactgtctaaggactcatacctctt

SEQ ID NO: 27138 - DNA, 201 bp, Homo sapiens
acctaatattttgcttgtttttagtttcaaatcatcctaggatattattgattactcaactgattgacatggtttgggaaataaggtattttgaaaggaawaatgtcttctttttataaactgtacaggaaccttctattaaattctgtaaatgtcattgatctcaaatccatgcatcacatgtgtaaattatattatttg

SEQ ID NO: 27139 - DNA, 201 bp, Homo sapiens
aagatacatataaagaattatacttatggtatatctcaaaactgagtttgtttcctataacccatactaaaaacaatttatcaagttaatatagtaatatrttgtgtaagtatacatgtataatatagtaagatgtatatgataatatatgttcaagttaatatagcataattagcaaaatcataattgggttcaaataat

SEQ ID NO: 27140 - DNA, 201 bp, Homo sapiens
tttttggtagaacgattgctatatttagtttaaaattttagggcggcaggccgggcgcaatggctcacgcctgtaatcctagcactttgggaggccgaggygggcggatcactaggtcaggagatcgagaccatcctggctaacatggtgaaactccatctctactaaaaatacaaaaaattagccgggcatggtggcggg

SEQ ID NO: 27141 - DNA, 201 bp, Homo sapiens
gcgggaaaaagaagggtgtgtgagaggaggaattattcagttatcactggtctggagaagaaagagcatggcccatttgcaaaaatgattcttagttcacttttttttttttttttgcctttagtgatattatgggtaatagcgataaatttttattttctcaatttatatatatcagatttctcactctgtgtcatcaat

SEQ ID NO: 27142 - DNA, 201 bp, Homo sapiens
aaaagctagaaagttcaagattatgatatcagtatctgacaaggaccttcttgctgcatcatcacatggcagaagggcaaagaaagggcaagagggggccraactcatcctttcataatggtatcaatcccagccatgagggtagagccctcagggcccgttcaactcttcaaattactacatcttaatactgttacaatg

SEQ ID NO: 27143 - DNA, 201 bp, Homo sapiens
aaactccatctctactaaaaatacaaaaaattagccgggcatggtggcgggcacctgtagtcccagctactcgggaggctgaggggagaatggcgtgaacycgggaagtggagcttgcagtgagccaagatcgcaccactgcactccagcctgggcaacagagcgagactctgtctcaaaaaaaaaaaaatttagggtggc

SEQ ID NO: 27144 - DNA, 201 bp, Homo sapiens
cgggaaaaagaagggtgtgtgagaggaggaattattcagttatcactggtctggagaagaaagagcatggcccatttgcaaaaatgattcttagttcacttttttttttttttttgcctttagtgatattatgggtaatagcgataaatttttattttctcaatttatatatatcagatttctcactctgtgtcatcaatt

SEQ ID NO: 27145 - DNA, 201 bp, Homo sapiens
tatcagtatctgacaaggaccttcttgctgcatcatcacatggcagaagggcaaagaaagggcaagagggggccgaactcatcctttcataatggtatcartcccagccatgagggtagagccctcagggcccgttcaactcttcaaattactacatcttaatactgttacaatggcatttaaatttcaacgtaagtttga

SEQ ID NO: 27146 - DNA, 201 bp, Homo sapiens
ttaactattcttgatatcttatatgagtggattcatgatgtttgtccttttatgactggcttagtttacttggcataatgtcttcagagttcatccatgtygtagcacatgtcagaatttccttcctttttaaggctgaataatattccattatatacgtatgccatattttgtttatccatttattattgatggatactt

SEQ ID NO: 27147 - DNA, 201 bp, Homo sapiens
cccctaccatccattacccccacttgttctcccttcgtttattctattctaagcttctttatagctttatcatcacctggtatactatgtttctgtgtttrtcttcttccttcactaaaatataatagccaggaggcagagatacatcttgttttgttcaatggcatacagtttgtgcctagaacagtgctttgcacataa

SEQ ID NO: 27148 - DNA, 201 bp, Homo sapiens
cccatattctatattcagatctctgaaaaaagtggcctttcattgatcaaaatatatttatataaaacattttaatgaagaatacctatttataaaatatscagaggaaatatatgcagatgtaaaattgagcccaataaatccttgtgttttcataggtatgaaagttacaataaataatggcaattagatattgtgtgt

SEQ ID NO: 27149 - DNA, 201 bp, Homo sapiens
cccatctgtacatcaccatcatcaaagaccaaaagtagataaaaccacaaagatggggaaaaaacagaacagaaaaactggaaactctaaaaagcagagcrccaatcctcctccaaaggaacgcagttcctcaccagcaacggaacaaagctagatggagaatgactttgacgagctgagagaagaaggcttcagacgatc

SEQ ID NO: 27150 - DNA, 201 bp, Homo sapiens
gagtcctgctgtctaaaggagtagcacagccagacactgatgagggtggaggtagtagctgagtcttttgttataaaagctcatgttgactcgttaacatkggtttttttttttttttttttttttttgtttttttttttttttgagatggagtctcgatctgtcgcccaggctggagtgcagtggcgctatcacggctca

SEQ ID NO: 27151 - DNA, 201 bp, Homo sapiens
gcttggtgcaggataggtgctcagtaaacgtttgtgttggatgaatggatagatggatggatggatgatcagtcacagaaagtgtcctgaggaagtgttayttgaagtgacacccgaagaatgaaaatgagctgacaatgctaagaaaatgggaaaatgtattctaggcaagatgaacggcatccaaacctttaggttata

SEQ ID NO: 27152 - DNA, 201 bp, Homo sapiens
tagcacagccagacactgatgagggtggaggtagtagctgagtcttttgttataaaagctcatgttgactcgttaacattggttttttttttttttttttkttttttgtttttttttttttttgagatggagtctcgatctgtcgcccaggctggagtgcagtggcgctatcacggctcactgcaagctccacctccctgg

SEQ ID NO: 27153 - DNA, 201 bp, Homo sapiens; identical to SEQ ID NO: 3127

SEQ ID NO: 27154 - DNA, 201 bp, Homo sapiens
gccagacactgatgagggtggaggtagtagctgagtcttttgttataaaagctcatgttgactcgttaacattggtttttttttttttttttttttttttktttttttttttttttgagatggagtctcgatctgtcgcccaggctggagtgcagtggcgctatcacggctcactgcaagctccacctccctggttcacac

SEQ ID NO: 27155 - DNA, 201 bp, Homo sapiens
ccagacactgatgagggtggaggtagtagctgagtcttttgttataaaagctcatgttgactcgttaacattggtttttttttttttttttttttttttgtttttttttttttttgagatggagtctcgatctgtcgcccaggctggagtgcagtggcgctatcacggctcactgcaagctccacctccctggttcacacc

SEQ ID NO: 27156 - DNA, 201 bp, Homo sapiens
aagtattctcaagaatgtttaaatttggtttattttcttgaagcaaagttatttaattttttaatttttaacttaaaatgaaacccacaaaatgacattcygtggtactgagtattttcacataatcagaactgtaaactactgattattttcatatactcagaggctgaatattttgatataataagaactagtatcata

SEQ ID NO: 27157 - DNA, 201 bp, Homo sapiens
cagacactgatgagggtggaggtagtagctgagtcttttgttataaaagctcatgttgactcgttaacattggtttttttttttttttttttttttttgtttttttttttttttgagatggagtctcgatctgtcgcccaggctggagtgcagtggcgctatcacggctcactgcaagctccacctccctggttcacacca

SEQ ID NO: 27158 - DNA, 201 bp, Homo sapiens
agacactgatgagggtggaggtagtagctgagtcttttgttataaaagctcatgttgactcgttaacattggtttttttttttttttttttttttttgtttttttttttttttgagatggagtctcgatctgtcgcccaggctggagtgcagtggcgctatcacggctcactgcaagctccacctccctggttcacaccat

SEQ ID NO: 27159 - DNA, 201 bp, Homo sapiens
tttgtatcatccatttacattttgagaagcatagtcaatcagataaacttactgttttaattctaaattcactgactttctgtcagtctctatgttccctrtatgtagcagctgggttaagaatataattgtcttgacaacaaattattgacatttacgagctcaaaagttacctcagaagcttttgaaatcaaagaaata

SEQ ID NO: 27160 - DNA, 201 bp, Homo sapiens
agctgagagaagaaggcttcagacgatcaaattactccgagctacgggaggacattcaaaccaaaggcaaagaagttgaaaactttgaaaaaaatttagamgaatgtataactagaataaccaatacagagaagtgcttaaaggagctgatggagctgaaaaccaaggctcgagaactacgtgaagaatgcagaagcctca

SEQ ID NO: 27161 - DNA, 201 bp, Homo sapiens
tccctatcccttcttgtgagttaaaagggaattaaggaaaaggaatctcactgcagaagaatgttttggttgttcatcctatatttaatcttgctcctttragtttatggtcaaacatgagcacatttataaaatgctttcctggggcagcgtggaagaaactgtgtttggaaagtgatattacactgaggacacttgggc

SEQ ID NO: 27162 - DNA, 201 bp, Homo sapiens
aagaaaatcattccatagcatggatctcttaaaaatagaattatatatatatatgtttatttttgtctatttttgaacgcgttagaatcatactgtgtttmttctttgactcatttttttcattcaggtttgtttttgagattcaaccgtgttgatatgtataattatagttcattcattttcccactatatattaatgca

SEQ ID NO: 27163 - DNA, 201 bp, Homo sapiens; identical to SEQ ID NO: 3122

SEQ ID NO: 27164 - DNA, 201 bp, Homo sapiens
taaatgtctaaagatattaaagaatgcatactttcagattcacctttttaaatacattgaaatttttattcaccatcatggtaaatcttttaaatctgttygaattaacatattgtaaatgatactcaatatatacatattgtatgtgattttatatgcagtaagttataagacccatggctttttgaacaattgataatg

SEQ ID NO: 27165 - DNA, 201 bp, Homo sapiens
acacagagttcctactggtgcactgcacagtggagctgtaagaagagggccattgtcctccagaccccggaatggtagatccaccaacagcttgcactgtrcacctggaaaagccacaggcagtcaatgccagcctgtgaaagcagctggaggggaggtgctgtaccctgcaaagccacaggggcaaagctgcccaaggct

SEQ ID NO: 27166 - DNA, 201 bp, Homo sapiens
aaaggcattaaatatctaaaggcattaaatgtctaaagatattaaagaatgcatactttcagattcacctttttaaatacattgaaatttttattcaccawcatggtaaatcttttaaatctgtttgaattaacatattgtaaatgatactcaatatatacatattgtatgtgattttatatgcagtaagttataagaccc

SEQ ID NO: 27167 - DNA, 201 bp, Homo sapiens
gcagtgagctgagatcgtgccagtgcacttcagcctgggtgacagagtgagactccgtctcaaaaaaaaaaaaaaagaaaaaagaaaaaaaaacacattgraaaatggtgaatttaccaaaagtatcagttatttttggcttgatatataaaaccgcactttcctccactgtttatcgtactgaaatgccacattttctat

SEQ ID NO: 27168 - DNA, 201 bp, Homo sapiens
gagaggcagtacaggcttcagtgttagacagaaatgggattcagtccaaacttggacacatactaggttgtgactctggatgtgatattcaatttctatgwgtttccatttcctcatgtgtaaaatgagataactacaagccttttgaaactttgatcctgaagacgtcgttttggtagatctaaaatgaatacatggtgg

SEQ ID NO: 27169 - DNA, 201 bp, Homo sapiens
gtggaaataggtttttgtttttattgttttatttatttatttaatttatttatttattttggtagagaaatcatatctctgtgctatcttcatttataaargaactactggcccagttcatgtaggggacaaacacccacgtgcacaacatacatttctttgcacacacaatctttctcaacaacaatgtttcaccaacaa

SEQ ID NO: 27170 - DNA, 201 bp, Homo sapiens
gacttgaaagttgagcaggaggtagccaggcataaaggaacccagagagttttccaagtggagttttccaaaaagcatgtgtgaagacttgcaagcttgtrcaacccaccattttttttgttgttgctgttctgttttgttttgctttaggattttagcagcctgaagccatggatctttgtttctgtctctagttttaag

SEQ ID NO: 27171 - DNA, 201 bp, Homo sapiens
ggcaagaagcagatactgtacaaatcagttcaataatgaggcattgaaacacaagttacatactgtgctaggaataaaatgataaacagagtaacactatyctgtccttttggatttttatagtttagtaggaatgtattaagtaatgacaagtacatgaatatgattaaagggatgtaaaatactgaatagcaaagggat

SEQ ID NO: 27172 - DNA, 201 bp, Homo sapiens
taaagtctgtcgctatattagctcataccacatatgtggcaagaagcagatactgtacaaatcagttcaataatgaggcattgaaacacaagttacatacygtgctaggaataaaatgataaacagagtaacactattctgtccttttggatttttatagtttagtaggaatgtattaagtaatgacaagtacatgaatat

SEQ ID NO: 27173 - DNA, 201 bp, Homo sapiens
ccttaatttcctcctttctgttaacattgaaaaccatcatactaactgtaaaaatcaaatactgtaataagagtgagggagtgcatgttttaaagtctgtmgctatattagctcataccacatatgtggcaagaagcagatactgtacaaatcagttcaataatgaggcattgaaacacaagttacatactgtgctaggaa

SEQ ID NO: 27174 - DNA, 201 bp, Homo sapiens
tgaaatcagagacatatcttttgagtatgttaggcagatgatcatgacattagatgaactaggaatacaatatttaggaaaaaagtgatttcgaaccttayggtgtcaagtttctttttatctgtacatgtcaagtgttctcacaggcagactttttagagagattgctatcactgacaacttccagagtttgagagtttt

SEQ ID NO: 27175 - DNA, 201 bp, Homo sapiens
tcctcagttttcaaaaaatattttatggtcttttgagggcataatattagtgcatgtaaaaactagaaccctttatgatttgaaaagaggagaagatgctragagagacactcttggaagctgggcaggaaatccagccatgcattgcctcaaggtctgtcattagatcaaaagcactcaggggacgatggtctgtgtaag

SEQ ID NO: 27176 - DNA, 201 bp, Homo sapiens
aactttttagcacatttatcattttcacttatacatgtatgctaatagcaatcttatgtgaacttttacctcttatatgaccagaattgattaaaaatgtyggcaagtaagtttgttatttaatatctctgaactttctctattttacattgaatatttgctacattgtaagcattacagtatgactagattcttcttttt

SEQ ID NO: 27177 - DNA, 201 bp, Homo sapiens
tctcatataactcattagagaaccacaaataaatgcatttacttaataaataatttattttaaattatatgacaaccctatgattaaatttaatattgtattttttttttttttttttgagacaaagtctcactctgtcacccaggctggagtgcagtggctgtgatctcggctcactgcaacatctgcctccgaggttca

SEQ ID NO: 27178 - DNA, 201 bp, Homo sapiens
tgtgttgaagagctggacatcaggtgtggagtgcatactgggttgtggaaaagacaggtggaaaagacatgtgaaaaagacacatagccctgcttttgtgmtgaggagtagaggtgggatgctgggaaattttaagaggtaagataagggggatgtggggccggtgtggagaggggagcaggatgaagacttgagtgtttt

SEQ ID NO: 27179 - DNA, 201 bp, Homo sapiens
cacagtaacataggtatataactagaaaataatatttgacaatttggggagacctatagagatgcaaccttcaagacagtaaactaacgttaaaaatgccraattattaacagaggttatcaatgaggttcgttaaaaagaaaaaatattttcccttttaaaattttttattcttttattattttattttagcgacaggat

SEQ ID NO: 27180 - DNA, 201 bp, Homo sapiens
cctgtttttctgaataatgtattggtattttaaaaataaagattgcgggggaggagccaagatggccgaacaggaacagctccggtctacagctcccagcrtggtggatgcagaagatggtgatttctgcatttccatctgaggtaccgggttcatctctctagggagtgcgagacagtgggcgcaggtcagtgggtgcgc

SEQ ID NO: 27181 - DNA, 201 bp, Homo sapiens
tttaagagcagaaacaaagtttggtggggataaaatagagaacactgaaatggtaaaaccacaataatattgacaaataggatagttatattagacaaaamcatgttccttgagtctggaaattgttagtgtcaagttacactatgtattaaggcaccgtaacatattgtggcactgacttttaggcacatatatttgtat

SEQ ID NO: 27182 - DNA, 201 bp, Homo sapiens
aaaatgccaaattattaacagaggttatcaatgaggttcgttaaaaagaaaaaatattttcccttttaaaattttttattcttttattattttattttagsgacaggatattgctgtgtcactgtcactcaggctgaagtgcagtggcatgatcatagctcactgtaaccttgaacacttacgctcaagtgaccctctggc

SEQ ID NO: 27183 - DNA, 201 bp, Homo sapiens
tgtattaaggcaccgtaacatattgtggcactgacttttaggcacatatatttgtatatctttctaatttttttcaaaagtggatttttctgccatttatrtttgccatcgtataaataaaatttttatgttttgatgttcaacagccattttatactaataggagctctaactgtgacaatcaaataaattaatgttttt

SEQ ID NO: 27184 - DNA, 201 bp, Homo sapiens
tgttgccatctatcttaagggtttataactctggtatagaataagcaaatagcataaaacacttgtacctgtgtgtactcctcagagttttattggtaataaaaaaaaaaaaaaaaaccacccatgctcacttttgtgcttgggaacagaatctgtttctaacctttgctattaacaggaagtgggagaggtgaaatgagc

SEQ ID NO: 27185 - DNA, 201 bp, Homo sapiens
ctgagaaagatcctggaggaaaagctggggccagtatgctgaaaaagacacagtcctcttgccctaccccaagagtaaagggcaagaggtagtggctgccaaaaaaaaaaaaaacaaaacaaaacaaaacaaaaaaacctgaaaaaacaaaaaagttttgtggagagatatcgaatggatatttatatggctttttgctgt

SEQ ID NO: 27186 - DNA, 201 bp, Homo sapiens
tgagaaagatcctggaggaaaagctggggccagtatgctgaaaaagacacagtcctcttgccctaccccaagagtaaagggcaagaggtagtggctgccaaaaaaaaaaaaaacaaaacaaaacaaaacaaaaaaacctgaaaaaacaaaaaagttttgtggagagatatcgaatggatatttatatggctttttgctgta

SEQ ID NO: 27187 - DNA, 201 bp, Homo sapiens
gtgaaccatattataatcatctttagtatcaataaatatttttgagatgatataatgccagtaaatccataaattaaaaaattaaagcattaaagaaatayctactatgtaagcattcaattttatataatgattatctgggtcagtgtacccaaaattgtgtgctagccaaactacaattaaatcatcatgataattcca

SEQ ID NO: 27188 - DNA, 201 bp, Homo sapiens
aagcgaaggagaaataaaatactttacagacaagcaaatgctgagagattttgtcaccaccaggcctgccctaaaagagctcctgaaggaagcactaaacrtggaaaggaacaaccagtaccagctgctgcaaaatcatgccaagatgtaaagaccatcgagactaggaagaaactacataaactaacgagcaaaataacc

SEQ ID NO: 27189 - DNA, 201 bp, Homo sapiens
aacaatattaactttaaatgtaaatggactaaatgctccaattaaaagacacagactggcaaattggataaagagtcaagaccaatcagtgtgctgtattmaggaaacccatctcacgtgcagacacacataggctcaaaataaaaggatggaggcagatctaccaagcaaatggaaaacaaaaaaaggcagggattgcaa

SEQ ID NO: 27190 - DNA, 201 bp, Homo sapiens
ttggcaaggatattttcatatcattgaaggtaaatgactgtacataggaacggtacccagtatttagcattgtgaatagcgtagggcttcggatccagacyacctgggttggaatgtcatctctgcagcttaagatctttgtaaccttgggcaaattacataaccttttgtgtgcactgctttcaaatgttgaaagtcact

SEQ ID NO: 27191 - DNA, 201 bp, Homo sapiens
agcaatggcaacaaaaaccaaaattgacaaatggggatctcatcaaactaaagagcttctgcacagcaaaagaaactaccatcagagtgaacaggcaaccyacagaatgggagaaagttttgtgtttttaaaacatcatgaaatcatgtattgcctttcctaagaatgggattaattcataaatctcgaaatatggaaatg

SEQ ID NO: 27192 - DNA, 201 bp, Homo sapiens
gaagaaaaaggatttccttttctagaagcatgaagctaagttcccctcatatctcattgactcacattgacttggcctacccattcttgatcaaatccctrgctttggagttgaaattatcatgattggcacagagagtcaatcatgatagccactgcatatgctttgaagacagtttagaattagacatttccaaatgtc

SEQ ID NO: 27193 - DNA, 201 bp, Homo sapiens
ctggcaaattggataaagagtcaagaccaatcagtgtgctgtattcaggaaacccatctcacgtgcagacacacataggctcaaaataaaaggatggaggmagatctaccaagcaaatggaaaacaaaaaaaggcagggattgcaatcctagtctctgataaaacagactttaaaccaacaaagatcaaaagagacaaaga

SEQ ID NO: 27194 - DNA, 201 bp, Homo sapiens
tcaaattctactcagttcagtcaagcccctgcccagaaacctggttagctggtttgttttccctcagaactcagattctgaaatactcccctctactttgyctcattcatagagtaagtttttgaatataaataaaaaactacacactgggtacagtatacactgctctggtgatgggtgcaccaaaatctaataaaaatt

SEQ ID NO: 27195 - DNA, 201 bp, Homo sapiens
tatcaaagatgatgattggaaaatatagaaaagaccatctcatgaagcaaaaagaacatggccattgaagccatgttgaagttagaaacgtgcagtgaatkttttttttgtttgtttgttagtgggaatgaatgatgatttgggtgaccgacaggtcttaactccacttttaccactcattgtccctattcaggtgtacgg

SEQ ID NO: 27196 - DNA, 201 bp, Homo sapiens
gataatagatgtttctctgcagggactgcagatagtttaagcaatagttaattttactaagtgtacaaaagcatattttgagagagaaataaaaacaaaartaatacctattactttaagccacagtttctgaccactgttgcagttgtgacttttcttatattctttcccccagatagcttatagtacacattaagaaaa

SEQ ID NO: 27197 - DNA, 201 bp, Homo sapiens
gtgagatcatgtggtatggcttatttcacttagcatgatatcctacaggttcacccatgttgtgcaaatagtaggattttctcctttttatggctgaatartatttcattgtgtatgcacacacatacatatacacacatcacatgttctttatccatttatatattgttgaacacttaggttgtttcaatgtcttggctt

SEQ ID NO: 27198 - DNA, 201 bp, Homo sapiens
cttagccccaaatgagctgggtaatcttggaccagtcaaataatctctttatgttcattatgttgaactagtcaaataacatctttatgttccagttttgytaattttaaaaaagaatgaatctagcttggattacctctactatctcttcttcttttattttgtggttgtgttctgtggcacagaaatggaatttaacac

SEQ ID NO: 27199 - DNA, 201 bp, Homo sapiens
taagctataaaattaattaagattaagctgtaagaaaaagttctgactaaaattaggagggaaaaataaagctctgattaaataaacaattacagaaaacyaaattttaactctaagataaatttgccttgcaacttggttttgatgtacaatttgtgtattagctgattaggtaacttcaaaagtcatcagctgtctact

SEQ ID NO: 27200 - DNA, 201 bp, Homo sapiens
actccagcctgggcaacagaatgcgacgctgtctcaaaaaaaaaaaaaaaaaaaaaaaaaaaaaaaaaggtgtaaagggagtgaaatttttctctttgtcwttctgtaaggtgatatttggacaagtgaatagaacacagagcagtcagattttgcttaaatataaggaatacatttctagccattcaaattgatttaaaa

SEQ ID NO: 27201 - DNA, 201 bp, Homo sapiens
gaacttacaggatataactttcttcaaagtggtaatcattatacccagtccttctttccgttttctactctcactgtcctagtttatggccgtatcacttygtagttggatgggctgttgcagtaacttctcaactggtctccctaccctcatgccatctgaatattaatttattcattgaactaccacactacatcttct

SEQ ID NO: 27202 - DNA, 201 bp, Homo sapiens
attgacgtcaagcccaatatcatatggcttttctaacagcaagtgccactttgggcttcactaacgtatttatggcatacagaacagaataattaattcartaaattctgcactggccagatgacctctgcagtgttgaattcagttctgagtacataatttcaagaaggatattgaaaagctgatgcactcacataaaca

SEQ ID NO: 27203 - DNA, 201 bp, Homo sapiens
tatttatgtggggcacatgatattttgctacattcatcaaatgtgtaatgattaaatcaggatatttagagtatctgtcacctcgagtatttgtcatttctttttttttttttttttttttgagaccgagtctcagtctgtcacccagtctggagggcagtggcacattctcagctcactgcaagctcactccgtctcctg

SEQ ID NO: 27204 - DNA, 201 bp, Homo sapiens
accatgcccggctaatttttgtatttttagtagagatggggtttcaccatgttggccaggctggtcttaaactcctgacctcaagtggtccatccgcctcrgcctcccaaagtgctgggattacaggcatgagccactgcacccggccatatttatcatttctatgtgttgggaagtcccctcttcccactattttaaagt

SEQ ID NO: 27205 - DNA, 201 bp, Homo sapiens
aaagtaaacatagtagtcttctcaagattattagcaaattttccttaaaatgcttgcatctgaaaagatggcttcagcctgattattttaaagcctgtgtrgttcatcagtttaagtagggaagtggaacttggcgatctcagaggagttctgtagcctccatgcccctgctccccccttttcatggctcactactgccat

SEQ ID NO: 27206 - DNA, 201 bp, Homo sapiens
ttattagcaaattttccttaaaatgcttgcatctgaaaagatggcttcagcctgattattttaaagcctgtgtagttcatcagtttaagtagggaagtggracttggcgatctcagaggagttctgtagcctccatgcccctgctccccccttttcatggctcactactgccattcacataagcaaacactagcttccctc

SEQ ID NO: 27207 - DNA, 201 bp, Homo sapiens
gtgtcactgtcactcaggctgaagtgcagtggcatgatcatagctcactgtaaccttgaacacttacgctcaagtgaccctctggccttggcatcccaaarcactgggattacaaacatgagccactgcacttggcctattcttccatattgtcatattgcttaattttgttttcaaaaaacatacattccttttgtaatt

SEQ ID NO: 27208 - DNA, 201 bp, Homo sapiens
gcagatctcaccttggagctaggatgctttcatgtccctccaaccctcactgattatctttgtaacagagagcaggcctcaggctaggagtgtttgtcagaaaaaaaaaaaaaaaaaaaagaggatcttgtgagaattgaaagagatagcattgtctttccttgactttagttttatggccactttgtacttatataaagt

SEQ ID NO: 27209 - DNA, 201 bp, Homo sapiens
attactttgttatgttttttacctattatactgtgaacatttcacatgttcttttttataaaggccttggaagccaaattttaattgctctatggtatcaytttgtataccgtaatctattgagtaatttcccttttgttggataaacaattagtagcacattatagttactggatttttagatcttagtttactggttca

SEQ ID NO: 27210 - DNA, 201 bp, Homo sapiens
ttgactttagttttatggccactttgtacttatataaagtattactgagtttccatttaagtagtgacataaagttttaaaaaataaatccaattggaaasaaaattttatttatagaagactaagtgtacaatattatgggtggctggtccataacatggtagaatcaccaaggtaattgctacatgaataattgaaatt

SEQ ID NO: 27211 - DNA, 201 bp, Homo sapiens
gcaaaagtcactggtatactatacagtttgggatcagcatagatgttgattacaggctctgtgatctagagaaagttacttagcatctctgtgccttttcwttctctatttaatagggacaatatttcctatctccaaatgttattacttaatcttgagataatttgcttacagcatctgtcaaagtgccaaacatatagc

SEQ ID NO: 27212 - DNA, 201 bp, Homo sapiens
tggagcatctagcattctccaggagttattcgaaagctgaaactttcagtggattgtgggcctggggagaagaaggattccgagggtggaattgggaagabcgtgcgtgcgtgtgtgtgtgtgtgtgtgcgcgcgcgcgcgtgggtcggggcgggggcgtcggggggccactgggaattcagtgaagagggcaccctatac

SEQ ID NO: 27213 - DNA, 201 bp, Homo sapiens
acttaggttgattccatatctttgctattgtgaagactgctgcaataaatatgggggtgcaattatctttttaatatactaatttcttttcctttgataartacccagtagtgggattgctagatcatatggtagttctcttttgagattttgagaaatctgcatactgttttccatagtggctataccaacttatatacc

SEQ ID NO: 27214 - DNA, 201 bp, Homo sapiens
agcattctccaggagttattcgaaagctgaaactttcagtggattgtgggcctggggagaagaaggattccgagggtggaattgggaagagcgtgcgtgcgtgtgtgtgtgtgtgtgtgcgcgcgcgcgcgtgggtcggggcgggggcgtcggggggccactgggaattcagtgaagagggcaccctataccatggcagtg

SEQ ID NO: 27215 - DNA, 201 bp, Homo sapiens
ggagtgcgagacagtgggcgcaggtcagtgggtgcgcgcaccgtgcgcgagccaaagcagggcgaggcattgcctcacttgggaaacgcaaggggtcaggkagttccctttcccagtcaaagaaaggggtgacagatggcacctggaaaatcaggtcactcccacctgaatactgcgcttttccgacgggcttaaaaaacg

SEQ ID NO: 27216 - DNA, 201 bp, Homo sapiens
tctcattatataccagtggtgccattattctcaaatgacagggactttctgcttattaactgtataatacagctaagccctggctcagctgtggccctcartggaaggtagtgagtgtttattttatcacataaaaatattcctcaggatgctgtctctttttaccagcttccacagggctttactctaggccttaaccct

SEQ ID NO: 27217 - DNA, 201 bp, Homo sapiens
gcattctccaggagttattcgaaagctgaaactttcagtggattgtgggcctggggagaagaaggattccgagggtggaattgggaagagcgtgcgtgcgtgtgtgtgtgtgtgtgtgcgcgcgcgcgcgtgggtcggggcgggggcgtcggggggccactgggaattcagtgaagagggcaccctataccatggcagtgc

SEQ ID NO: 27218 - DNA, 201 bp, Homo sapiens
gaagataattcctttatatagaaacttgaatccttttggtaattacctatatatactttcatgataggtagtattttttattaaaggagattttttgttgytgtttgtttttttagtaaggctactatggaattgttttaactttgaactgagaatgtatgtttgtgctgttattgatataaaatatacagatttgatcac

SEQ ID NO: 27219 - DNA, 201 bp, Homo sapiens
tgcgtttttggtagaacgattgctatatttagtttaaaattttagggcggcaggccgggcgcaatggctcacgcctgtaatcctagcactttgggaggccraggtgggcggatcactaggtcaggagatcgagaccatcctggctaacatggtgaaactccatctctactaaaaatacaaaaaattagccgggcatggtgg

SEQ ID NO: 27220 - DNA, 201 bp, Homo sapiens
ttatctgtgcattagtccttgtgctaaaaatcaaaaataatatacagatagatgtgacacagcatttgtctctgcaaagtttagagcctagtgagattaaygagaagtgaacataagaaaaagggaagtcacagtgaaatatcttagataatggagaaatgcatataataacttggagcaggtttttaacctggctccagg

SEQ ID NO: 27221 - DNA, 201 bp, Homo sapiens
gtgtatatgtgccacattttcttaatccagtctatcattcttggacatttgggttggttccaagtctttgctattgtgaatagtgcctcaataaacatacrtgtgcatgtgtctttatagcagcatgatttgtagtcctttgggtatatacccagtaatgggatggctgggtcaaatggtatttctagttctagatccctg

SEQ ID NO: 27222 - DNA, 201 bp, Homo sapiens
cgcgcgtgggtcggggcgggggcgtcggggggccactgggaattcagtgaagagggcaccctataccatggcagtgcccggcgacgctgcacgagtcaggracaagcccgtccacagtggggtgagtcaagcccccacggcgggccgggactgccaccatcgtgcggaccccgcatcgccgcgggactcgggctgccgtgg

SEQ ID NO: 27223 - DNA, 201 bp, Homo sapiens
cgattgctatatttagtttaaaattttagggcggcaggccgggcgcaatggctcacgcctgtaatcctagcactttgggaggccgaggtgggcggatcackaggtcaggagatcgagaccatcctggctaacatggtgaaactccatctctactaaaaatacaaaaaattagccgggcatggtggcgggcacctgtagtcc

SEQ ID NO: 27224 - DNA, 201 bp, Homo sapiens
cttaacaggctcaacttgtcaacctagcctttagcagcaaatgctacaaccacatattccatttctttctgttctgtagggttgggttgtcataccttccmgtttttatcaagttcactaaagcaggaatgagagactttttgggttctgtttgctcatgccttccaaaagttaactgaccacattatattacaatttaaa

SEQ ID NO: 27225 - DNA, 201 bp, Homo sapiens
aaacagaataaaatgtttcaatatggtatcctaggaaaagaaggtttttatcccaccttataattaaatctgaaagattcctacagtgaactaagaggttyctaatgaagtactaagctgcatttagaattggagcaatgaaaggctctttgttctcctttcaaaaggttccagtacagaacaatttggctcccaatacag

SEQ ID NO: 27226 - DNA, 201 bp, Homo sapiens
tgaagaaattatgaatatcataatttttttttccttttgactctgcctgtgttcatttccctcagcactcattcaatttaataattgtcattctgtgtctrtatggttcaaaattaattcaagataatttaatgtcctttttattcactgtgttttaaaaattaattttattctgtacagtacaagaaatttctgcagtat

SEQ ID NO: 27227 - DNA, 201 bp, Homo sapiens
tgttcatttccctcagcactcattcaatttaataattgtcattctgtgtctatatggttcaaaattaattcaagataatttaatgtcctttttattcactrtgttttaaaaattaattttattctgtacagtacaagaaatttctgcagtatatcaaaataaaactgttaaaagaatgactagcccttccacaaagatgtt

SEQ ID NO: 27228 - DNA, 201 bp, Homo sapiens
ctaatcttcttaatgagttcatagcaaggcatgtggtatttgcgatagaaaagactcagtaaaagctgtcttccattcagtttttgaaaagtgaatggatrccagtttatgttatttcctatagtgcctatcttaaactgatttttttttttttacttgctgaatctcatttcatgtcaatatgagttttgtattggtaat

SEQ ID NO: 27229 - DNA, 201 bp, Homo sapiens
acaaaagtaaagagaaaagtccatataccaggtgatatggtttggctgtgttcccacccaaccctcatcttgaattgtagttcccataatccccatgtgtygtgggagggacctggtgggaggtaatcgaatcataaggggagttacccccatgctactgttctcatgacagtgagtgacttgtcacaagatttgctggtt

SEQ ID NO: 27230 - DNA, 201 bp, Homo sapiens
caaggaggagataaattaaatttccacctacaagatcagtatagcaatattctgaattcaaaattctgttgttaaggatggtgtaaccatatatgacaagscttttacaaactcctttttgaacattgctttaagcaatcatttgtgtatttgtattaattttcaatctaatcattccaaatgaggcaaagttttgtgtac

SEQ ID NO: 27231 - DNA, 201 bp, Homo sapiens
gagattggagggtcatatggtttggctgtgtctccacccaaatctaatcttaaattcccatgtgttgtggagggacccggtgggagataattgtatcatcrtggcaagtcttttctatgctgttctcgtgatagtgaataagtctcacaagatctaatggttttaaaaagaggagttcctttgcacaagttctctttttgg

SEQ ID NO: 27232 - DNA, 201 bp, Homo sapiens
cctgaactcctgagctcaagcaatctgcccacctcggtctcccaaagtgctagaattataggcatgagccccggcagctggccaaggcttttattctttcmctgtagagaatttataagtattacagctaaacaagaaaataacgtactaatgtggattcatggttcaggcatacaagttttttctcttaatactaggttc

SEQ ID NO: 27233 - DNA, 201 bp, Homo sapiens
ggaatgaaaggaatactgaaggaaggaaaagagatgaagtgacgaagcacttcttttggccactttcctgctgcatgtctcactttgggtgctacttagawgtagatagagttggcaccaccaaacagggttattactaatcttggatctcacatataacttttaattttaggttgaaaatatgagaaaagtgttcttctc

SEQ ID NO: 27234 - DNA, 201 bp, Homo sapiens
ttttaaagcattaatataaacttaattaataatagtaggaatgatcaggtcctactactcatggatttcttttgagagcttaatttaaggagggaaccctyatctcagaaaaatttacatgactatgtagagatataaatttacatgtaatttcagaatattctgaagtctttaaaactttatttaagaaccttgcagtag

SEQ ID NO: 27235 - DNA, 201 bp, Homo sapiens
gagaaaagtgttcttctcattgacaagtaattagccccagaatttccaaatcaattttgaatatcaggaagattaaaaattgaactactagaggccaggcrcggtggcttatgcctgtaatcccagcactttgggaggctaagatgggcagatcacttgaggtcaggagttcgagaccagcctggccaacatggcaaaact

SEQ ID NO: 27236 - DNA, 201 bp, Homo sapiens
tggataggtgttatgtggagaaaggaagttttagaacacaacattctgtagattccttgctgtgtgttaacaaaagaaactggaacttcaagtgagtcgartgtcatattctacaattaaaatatgatatatttttaaagacaaagtaggtggggatagagatatatagacaagggacaaacgatctagaattcatagaat

SEQ ID NO: 27237 - DNA, 201 bp, Homo sapiens
catggaaaactgcaactttgagggagtgatctttcctgcaaataagcctgtaacggtgccacaggatgtggcaatgagtcaggaagcattttctctcttgwttttatttttttgctagggagtgtgttccctggtatagagagacacatctcatctcattttatatttgatgtatatctcacagactctcgaaaacttaat

SEQ ID NO: 27238 - DNA, 201 bp, Homo sapiens
tgcactgccttatgaaagatgggaacaagggtgtttttgtttttgttttttttcaaaaagaaagaagtcaagacaaataatgtcagtacttttttaaaaasttctttgactctcattttctcttctcagattctgacagtggatttacacatggacatatgggatatgtattctcaaaaacgtataatgtgacagatgata

SEQ ID NO: 27239 - DNA, 201 bp, Homo sapiens
gtgtgtgtatgtgcatgtgcatgtgtgtacctgtatgtgcatttatgatttgtgtgtgtgcatgtgtgattttcccctggcagaaaattgctttggttgtrtcaatttagtgaagaaacagtgtcacccagtggctttgatgaaaacagtcctataaacattatagataagcactgtccagtagaaatacaacacaagcca

SEQ ID NO: 27240 - DNA, 201 bp, Homo sapiens
aaaataaagattgcactgaatccatacattgcttgggtagaatggtcattttaacaatattaatacttcagatccatgatcatgggatgtctttgcattcrtgtgtgttgtcttcaacgtgtttcatcagatttttgtagttttccatgtagaggtctttatccatcttggttaaatttatttctaattttttatagctat

SEQ ID NO: 27241 - DNA, 201 bp, Homo sapiens
ccacatggtaattcctcccttaaagaagtctgctgtatataatgttaaggcagggttgtcagggctgttatgctgtgtcccaagccaaatacatttctcarcattccaaggttatgcgaatacacagaaataattattttcagatgttgacattgcacttagtgatttagtaatatgagaaaatatggttcaaaagttatt

SEQ ID NO: 27242 - DNA, 201 bp, Homo sapiens
tagccaggagagttagttaagtatttctgatcttatagtgaatgataatgtttgtacaacctaatagttgccccttttcctttctttttcttctctaatartaatagcaaaaacattgtttctggcattcagtgagtgccagataaatagaaaggctatgagcttgatgcacagtttcttttctttttcctgggtcctctc

SEQ ID NO: 27243 - DNA, 201 bp, Homo sapiens
tcgaaagctgaaactttcagtggattgtgggcctggggagaagaaggattccgagggtggaattgggaagagcgtgcgtgcgtgtgtgtgtgtgtgtgtgygcgcgcgcgcgtgggtcggggcgggggcgtcggggggccactgggaattcagtgaagagggcaccctataccatggcagtgcccggcgacgctgcacgag

SEQ ID NO: 27244 - DNA, 201 bp, Homo sapiens
gtagagatggggtttcaccgtgttagccaggatggtctcgatctcctgacctcatgatccgccccgcccccctttggactcccaaagtgctgggattacargcatgagccaccgcgcccggcccccactttcttacactgtatctttctaaagaataagtctgaacaaagtagtgactattttaaaccaatagtatacatt

SEQ ID NO: 27245 - DNA, 201 bp, Homo sapiens
aggactatctgcctttgttcttaaaaaaaaaaaaaaaaacttgtgagagtctttttaaaattctatagtcagatctatgacaacaaaagagactgagacawccacaagttatttctaccatgtttgtttaactcaggagattgaatttgatgtgttatatacatggtatgaaccaaacgcataatagaaattgggtcttct

SEQ ID NO: 27246 - DNA, 201 bp, Homo sapiens
atgatgtatgtgtgctgttattataacgaaagccactttctgtgaagtgtccacctatgcttgagtactaatcatagaaaggagctctgaaaataagcagygggcctgtagtcagggactgctgaaaatgagggagagcatcagggaaattagtgcactgtgcctcttctttcttcagtactcctttatgttcattgctca

SEQ ID NO: 27247 - DNA, 201 bp, Homo sapiens
tatcttgggcatatggggcacaccctgcaaccagaaacagcacaggaatagtcattccttcatgacaacttctacgaaagtgtaaattgaggctaacaggraaatcaccctattactcctgtaaagtgacgatagctttcagttttcaaatgcgactttctgatcatgtttgaatgtgtttctgttcatgtttatggagaa

SEQ ID NO: 27248 - DNA, 201 bp, Homo sapiens
ttccccttcttttctggaatgcaatcaatggtgaaacatgttttacggtaaaacatttaatactccaaattgtgaataaagcaaagagaatgtgtttaatrtattttttaaatcatatactttctttaagaccctctcactcctaacataagctagagttttccgtttcaatatataatcaaaaaaccaagtatcctatta

SEQ ID NO: 27249 - DNA, 201 bp, Homo sapiens
gaaaataagcagcgggcctgtagtcagggactgctgaaaatgagggagagcatcagggaaattagtgcactgtgcctcttctttcttcagtactcctttaygttcattgctcatggggatctgtgtttgcctgttaattgagtgtgtttattgcaggcagttgccttaagtgacatgatactcagtaggaggttgtgagga

SEQ ID NO: 27250 - DNA, 201 bp, Homo sapiens
atcaaaattgtgaaatctttgatagatggaagaaagtagttgtctttgcttgtaatgaatactttcaaaataaagtcgctgaataaaaatagtgatcttaygaaatattatagttggatatcatcagagaggtgatattataaatcttctaccccagatagtgattttttaatagtctttctgttgcaaatgtttagtcac

SEQ ID NO: 27251 - DNA, 201 bp, Homo sapiens
ctcttccaccaaacgtgtgcacatccttgagagccgtgagcaacttgctcagcacacagctcaccttccaggccattcacaagcccagagtgaatcccgtyacttcgctcagtgaaaactatacctgttctgactctgaagagagctctgaaaaagacaagcttgctattccaaaggtaggtagtaatgacatacccctta

SEQ ID NO: 27252 - DNA, 201 bp, Homo sapiens
cacatctcatctcattttatatttgatgtatatctcacagactctcgaaaacttaatcttcatagtaactttagtgcaggttttttttttaaatatgtatyttatagaagaagaaactaaggcttaaaagaggctatgctactcttctaaagtcatatagtaaatattcaacccaggattccaaagcagatttatccatat

SEQ ID NO: 27253 - DNA, 201 bp, Homo sapiens
agacattaaactttgaacaaatgtagtttcatatgacttgctaagtagaactttttgggatttttccttttatttgagtttataagaacaaaaatcatgarattttcattatggaaaatatgtatatatttttgccatagtgagactttaggacagctgaaatgaattaatgtgaacattccaataaatcaccttttggct

SEQ ID NO: 27254 - DNA, 201 bp, Homo sapiens
ccaacagacaaatagagagccaaatcatgagtgaactcccattcacaattgcttcaaagagaataaaatacctaggaatccaacttacaagggatgtgaargacctcttcaaggagaactacaaaccactgctcaaggaaataaaagaggataaaaacaaatggaagaacattccatgctcatgggtaggaagaatcaata

SEQ ID NO: 27255 - DNA, 201 bp, Homo sapiens
atgttatttaaatcatattttagcttttaagcttttaaaagttttaaaagcttttatatttgcttatgcacctcagacttcagagtcccataactttttcktaattgtaaagagctgaaattacattaaaaaataattaatactaataaaacacaagtatttccaggaaggggtatcacatcaacttagggatttattatg

SEQ ID NO: 27256 - DNA, 201 bp, Homo sapiens
gggtatcacatcaacttagggatttattatgagcatatttattgttttcaaaatcccatccacctgctacattggaatgaatatacacagctgttagtgtrtcatagaaaaagagaatgaaaaactgaatctacaagtgagattttctgaagaatgtgggaccaaaatacagacagagtaaggcagttggagtacgggaaa

SEQ ID NO: 27257 - DNA, 201 bp, Homo sapiens
agactgaatttccaaattcatgttatattttcaaatgtattttaatgatgtaattagccatagcaaagttccactgagttcaaattgatactaaactccayagacataactaccaactttttcacaggtggtatatcattaaatcatagttgaaagatggcaaatgtttaagtacaaaaataagttttcagattctaagat

SEQ ID NO: 27258 - DNA, 201 bp, Homo sapiens
tccattttacaaaactgaaacactgtacccactaagaaattactccccatttcttcctttaccaagcctctggtagccaccattccactttctgtccctawgaatttgactactttaggtaccttttagaagtaaaataggacagtatgtgtctttttttgtgactagcttattttacttggcataatgtattcaaggttt

SEQ ID NO: 27259 - DNA, 201 bp, Homo sapiens
atcctttaatagctagtctggattacccctcataaaaatttgcaaatggtcaggaaagtgtgttataatttacaacacttttccacttgaagtattttagrcaggactagggaacaatgtaaggatgtaaaagtggaggtggtagagatggggtttatctcttttcttcttaaataataatcttggaattatgaatctgta

SEQ ID NO: 27260 - DNA, 201 bp, Homo sapiens
ctttaatatgataatgtgtgcaaatattagaaactaaatttcttattatagttctaagtgtacctttaacggttttcaagaaaagagggtaagtaggaaakcttttaaatttgtaattagaatccttacaaaaattgaagaatctagatttaaacagagaattaaagtaatttcatggtagtagcaatagaaagacaagaa

SEQ ID NO: 27261 - DNA, 201 bp, Homo sapiens
aaggcctaaggttttattactttgcacctgcgctactgaaataatgtcctaacaggtctctggagattccctccctgcttactgtcataatctgtaatgcrtgaatagtctttatatacatggctttcttctggttgttgacaataggactatcatgaatggacctccatgggtggttagtgcaatgtagaggtccgagat

SEQ ID NO: 27262 - DNA, 201 bp, Homo sapiens
tataccaaaacaatatttgatatatgatgcctttctaaaggttatctttctgatttttttcccaaaatatatttattgaatacttttttgtaatccctccyagctactgtgttggcactcaggatgtaaatgaaatggtaacatttagaatattttttaaccagcgtggcattgacgcgattggtcagaaagaacattgat

SEQ ID NO: 27263 - DNA, 201 bp, Homo sapiens
gacatggtacatgctagaggggcagaactaccagagtattaactatattccaaaagaaaaaaaaatatttaaagtgttacctctattctttattacttctkcttaccctatggtgcataggagcatagacaaaattttaaatacaaaatatataaatttggatcttaaaatctgtgaatttacatacaactccaaccctcc

SEQ ID NO: 27264 - DNA, 201 bp, Homo sapiens
ctgtgttggcactcaggatgtaaatgaaatggtaacatttagaatattttttaaccagcgtggcattgacgcgattggtcagaaagaacattgattgtaarccaccctatggtcatcctggtgcattttggctctgaatttaataccaaaagaggcagctacatccccaccctcttaaggcttatggttccttgtaaagtc

SEQ ID NO: 27265 - DNA, 201 bp, Homo sapiens
ccaacaaaaaagaagatggagctacattactgctccggagccttgggcaagttattattctccctgtgcgtcagtttcctcatctgtataaaaggaatagyaatatatgtgttgtgaggactgaatgaggtcacccaggaagtgtgcttacaaaaatatgttgtgtagtcatcatcgtttactattcttgttactatcatc

SEQ ID NO: 27266 - DNA, 201 bp, Homo sapiens
tttcaactttccacattcaatatgatattagctgtggttttattatgtgtggtgtttattatgttgaggcatgttccttcctagtatttttagtttttatyatgaagtgatgttgaattttatcaaatgctttttctgcatatattgagaggatagatgcaaaaaagcatttttatgcgaagtcacccagtactgaacttt

SEQ ID NO: 27267 - DNA, 201 bp, Homo sapiens
cccattccttgccctcagaggtaacctctgtgcactaccctcttgtggttagaagatggagctaggccgggctcggtggctcacgcctgtaatcccagcaytttgggagactgaggcgggtggatcacctgaggttggtagttcaagaccagcctgaccaacacggagaaaccccgtctctgctaaaaatacaaaaagcca

SEQ ID NO: 27268 - DNA, 201 bp, Homo sapiens
agatgcaaaaaagcatttttatgcgaagtcacccagtactgaactttttattgttgggagtctttattgctgatttaatctgattacttattattggtctrtttaggttttctatttcttcctgattcaatcttggtatatgtgtccaggaatttatccatttcatctaggttttctagtttgctaatacatacttgttca

SEQ ID NO: 27269 - DNA, 201 bp, Homo sapiens
acagagctacacagtagcttcttttatcacacagtgatattaaaatactctcaaaatgattagaagttgaaatattagctatcaaaccaggagtttgctaytaatttaggtatgttaatttattcatgatagctatttaatatattactaataaagattggaacaacctgattattctttaaaataaagaagaaaaatgtt

SEQ ID NO: 27270 - DNA, 201 bp, Homo sapiens
accacttgttcatgcatttcactgacctcgcatggcctcaccaaatgtcaaggagacagggaagcaccatcctaccacgtggctgaaagtgggagacgcayggaaatacttagttcacaccactgcaatgggttaaagatctgaaattgtaagacaattcttttgaaatttatgttcactagtagtttgtaatagtgtcga

SEQ ID NO: 27271 - DNA, 201 bp, Homo sapiens
aattttgcattttaaagacatttgtttagttacttaactctcattctttctcaggtgccctcgctaaaatttcacctctttcatcgccctgctcctcacckctccaagggactcctgccagcagcctggtcagcaaaatttctgcagtgcagtttccagaatctgctgacacaactgccaaacaaagcctaggttctcaca

SEQ ID NO: 27272 - DNA, 201 bp, Homo sapiens
gttcaaaatagtctctgatacttttgtatttctgtgctatcagttataatgtctcctttttcatttctgattttatttttggaggtcttctcatttttctyggttagtctagctagtggcttattcattttgtttatcttttcaaaaaaccaacttttgtttccttgacacattgtactttttaaatttttattttattta

SEQ ID NO: 27273 - DNA, 201 bp, Homo sapiens
ttttgactactactttgtgttgtttccattttcatttgtttcaagaaatttattgatttattccttaattatctctttgacccaaaggtcattcagagacwttttttttaattttcatgtatttatacagtttccaaagtttcttttgttattgatttctagttttattcattgtggtctgagaagaaacttgatataatt

SEQ ID NO: 27274 - DNA, 201 bp, Homo sapiens
tagcatctggtctatcctggagaatagttccatgtgctgacaatgagtactctgcagctgttcaacaaaatgttctgtaaatatctgtgaagtccattggyctaaaatgcagtttaaatccaacgtttatttattaattttctgtctagatgagctgtctggttctgagagtgggatgttgaattcctcaactatttttgt

SEQ ID NO: 27275 - DNA, 201 bp, Homo sapiens
aaaatccccacgtttattgtatgcaaattttcctaaacagagaagttgacagatttctaaaactaccctgatcattccaaaagactctttaggaagttacrgcttcaatgacagcagctgcgagatgttttagcaccacctgggagaacgggggattgggtgggggagaggggctatactaaaaaacaaaacaaaacaaaa

SEQ ID NO: 27276 - DNA, 201 bp, Homo sapiens
atcatatactttctttaagaccctctcactcctaacataagctagagttttccgtttcaatatataatcaaaaaaccaagtatcctattaagtgtatattrttgactcaaattgacaaggacattggtaaccttccttttttttttttttttttttttttttttttttgagacagggtctccctctgttatccaggctgga

SEQ ID NO: 27277 - DNA, 201 bp, Homo sapiens
cagattcattgtttgtagaatgtttcttaaggcttcacagatattgtaatttcttatagatggattgtggagagagatcatgtgtagatagaattcctacrtggtcccagtgttttaagtatagtagtcttctgccactctaatattgaataagaagtgctagtggaaaaattgggtgatcgattacttatttccactctg

SEQ ID NO: 27278 - DNA, 201 bp, Homo sapiens
gaaaaatttgtattgagatgtgctaatagagaatttggtataactaaacatctgatatataatttatattttgaggtaactctttagccaacattttaaartatgattaatttatagtacttacgaaggattttcagagacattacatttttctgttatttcactgttttaaacaagatggagattagagggtggaaaatg

SEQ ID NO: 27279 - DNA, 201 bp, Homo sapiens
tagtatattgcctacagttaacagtacatactctgttgtagacttaaaaagagggtagattttatgttgtgttcttatcacaaaaaaaggtgggaggaaayttctggaggtgatggataggtttatggcacagattgtggtgatggtttcacaagtatatatatgcttatctccaaactcatcaagttgtatatatttaat

SEQ ID NO: 27280 - DNA, 201 bp, Homo sapiens
atgttccctgtatgtagcagctgggttaagaatataattgtcttgacaacaaattattgacatttacgagctcaaaagttacctcagaagcttttgaaatyaaagaaataaaagtgttaattctctctgatctgaacaagccaggactcagtgtcagccctttataggtcaggctgtggaaggaatgcataggatgaaata

SEQ ID NO: 27281 - DNA, 201 bp, Homo sapiens
gaagtccatcacagtctattgacagtttcatcaaagctgtatagtccaactagtggggcagcttggctactatggtggaagtctcagcaaactgcctggttttgtttgtttgttttgttttaaggtacaggaaataagaggaataatagtggccaaagcaattagaacatcttcattccagaactgtgttcagcaatccag

SEQ ID NO: 27282 - DNA, 201 bp, Homo sapiens
aaattcagtcacaatgctatatatcaggctctcagtgattttttaaaggagggtcaattttaagaattctaaggaatctctttgttcctgctaatttgtcygaaggtttacgaggaatacaggagaaagctaaattgtttggggaacagtaagagatttagattctgagaaagatcctggaggaaaagctggggccagtat

SEQ ID NO: 27283 - DNA, 201 bp, Homo sapiens
aagtccatcacagtctattgacagtttcatcaaagctgtatagtccaactagtggggcagcttggctactatggtggaagtctcagcaaactgcctggttttgtttgtttgttttgttttaaggtacaggaaataagaggaataatagtggccaaagcaattagaacatcttcattccagaactgtgttcagcaatccagg

SEQ ID NO: 27284 - DNA, 201 bp, Homo sapiens
acacacaaataataattttttatttcccatctagttacagtcctccttcagctttcatccctttagtaatagttgtggtgaattttttctcccgagaagcycctaaaaaggcgttcatttttacgtaaacaaacaacaggagaaaaacatataaacatgaaagcaaaatattttacctacagaaatatattttcagcaatc

SEQ ID NO: 27285 - DNA, 201 bp, Homo sapiens
attaaacccaagttctgtaatatatacttcagaaatattgttttaatctattctctgaactagttttacctggcttgtaggactatctgcctttgttcttaaaaaaaaaaaaaaaaacttgtgagagtctttttaaaattctatagtcagatctatgacaacaaaagagactgagacatccacaagttatttctaccatgt

SEQ ID NO: 27286 - DNA, 201 bp, Homo sapiens
accactgctcaaggaaataaaagaggataaaaacaaatggaagaacattccatgctcatgggtaggaagaatcaatatcgtgaaaatggccatactgcccmaggtaatttacagattcaatgccatccccatcaagctaccaatgcctttcttcacagaattggaaaaaactactttaaagttcatatggaaccaaaaaag

SEQ ID NO: 27287 - DNA, 201 bp, Homo sapiens
agtccatcacagtctattgacagtttcatcaaagctgtatagtccaactagtggggcagcttggctactatggtggaagtctcagcaaactgcctggttttgtttgtttgttttgttttaaggtacaggaaataagaggaataatagtggccaaagcaattagaacatcttcattccagaactgtgttcagcaatccaggc

SEQ ID NO: 27288 - DNA, 201 bp, Homo sapiens
acaacaggagaaaaacatataaacatgaaagcaaaatattttacctacagaaatatattttcagcaatctatttctcatgctattgttaaaaatatctctrcttggatagaacctttttgtttccatgctgacttcttctttgcttctcctgtgaactttttaaattctgtgtttggcagcagttttgttttccttggagc

SEQ ID NO: 27289 - DNA, 201 bp, Homo sapiens
gaagaacattccatgctcatgggtaggaagaatcaatatcgtgaaaatggccatactgcccaaggtaatttacagattcaatgccatccccatcaagctascaatgcctttcttcacagaattggaaaaaactactttaaagttcatatggaaccaaaaaagagcccgcatcgccaagtcaatcctaagccaaaagaacaa

SEQ ID NO: 27290 - DNA, 201 bp, Homo sapiens
gtccatcacagtctattgacagtttcatcaaagctgtatagtccaactagtggggcagcttggctactatggtggaagtctcagcaaactgcctggttttgtttgtttgttttgttttaaggtacaggaaataagaggaataatagtggccaaagcaattagaacatcttcattccagaactgtgttcagcaatccaggca

SEQ ID NO: 27291 - DNA, 201 bp, Homo sapiens
gggtcttcattgtgcctatcttggttaatgagaactgagaagagaagaaacattctcttttaaaaaaaattttttttagagaatttcttcatcagacggaragattttatttgccatttgcaggcataaccttggtgacctatatatccccagaccttctggtaagatgcttattaaaatgtcattacccagaggagtaat

SEQ ID NO: 27292 - DNA, 201 bp, Homo sapiens
aatgcctttcttcacagaattggaaaaaactactttaaagttcatatggaaccaaaaaagagcccgcatcgccaagtcaatcctaagccaaaagaacaaaggctggaggcatcacactacctgacttcaaactatactacaaggctagagtaaccaaaacagcatggtactggtaccaaaacagagatatacaagaatgga

SEQ ID NO: 27293 - DNA, 201 bp, Homo sapiens
ttgacaaacctgagaaaaacaagcaatggggaaaggattccctatttaataaatggtgctgggaaaactggctagccatatgtagaaagctgaaactggawcccttccttacaccttatacaaaaatcaattcaagatggattaaagacttaaacgttagacctaaaaccataaaaaccctagaagaaaacctaggcatta

SEQ ID NO: 27294 - DNA, 201 bp, Homo sapiens
gcacttaattctgaaattcattgacctcaatgtgcaagctgtcttctttactatttattgtgaataaccatttttttttatttgttgtaatcacacatcargaaagggctagggagatgtctttgtgaaacatttatccctatggttctgtttaataggagtacttaccagtagctaaatgcctcattttattttaaataa

SEQ ID NO: 27295 - DNA, 201 bp, Homo sapiens
gtgctgggaaaactggctagccatatgtagaaagctgaaactggatcccttccttacaccttatacaaaaatcaattcaagatggattaaagacttaaacrttagacctaaaaccataaaaaccctagaagaaaacctaggcattaccattcaggacataggcatgggcaaggacttcatgtctaaaacaccaaaagcaat

SEQ ID NO: 27296 - DNA, 201 bp, Homo sapiens
ggtcttgtttgaatacaaggggtgggggagtcacacttttcagaccgattagaataatgagattctctaaacagttgagaaccatttgtaagaatagcacrttgtgttagaaggcaattagagctcattcttttaataattaggttttttgagttcttacagtatgctgagtactaagattataaaaatgaacaaaaattg

SEQ ID NO: 27297 - DNA, 201 bp, Homo sapiens
aaggttttattactttgcacctgcgctactgaaataatgtcctaacaggtctctggagattccctccctgcttactgtcataatctgtaatgcgtgaatartctttatatacatggctttcttctggttgttgacaataggactatcatgaatggacctccatgggtggttagtgcaatgtagaggtccgagataacccca

SEQ ID NO: 27298 - DNA, 201 bp, Homo sapiens
ccatccatgtaagatgtgagttgcttctccttgccttcctgtatgattgtgaggcttcctgagcaacatggaactgtgagtgagtgctcaattaaacctcyttcctttgtaaattgcccagtctcaggtatgtctttgtcagctgcatggaaatggacgaatacagtaaattggtactggtagagttgggtgctgctgaaa

SEQ ID NO: 27299 - DNA, 201 bp, Homo sapiens
attactttgcacctgcgctactgaaataatgtcctaacaggtctctggagattccctccctgcttactgtcataatctgtaatgcgtgaatagtctttathtacatggctttcttctggttgttgacaataggactatcatgaatggacctccatgggtggttagtgcaatgtagaggtccgagataaccccattcttgct

SEQ ID NO: 27300 - DNA, 201 bp, Homo sapiens
agagcattatgtgaaaaagctaaaaagaaatagacatttcatttgacatgataactaagagttaacagactactcagaaagctaccacaattacataagcygggggtgatcctcctgacattaccctacacccatcagaatgcacttgaaccttcctgtttggcactgtgaaccactcttaaaaagaatgtggaggtgaag

SEQ ID NO: 27301 - DNA, 201 bp, Homo sapiens
gccttatatataagtggaaagagtgacttgatgtgatctctgccattgtgaccttagatgggaagggttaagcccaggataaaggtaggtaattttatctrcattgagattcataccgagacccttaaatcaaaagcatacaacttgacatttgcatttgatatgagatcccccagcccagtcattagcctcccacaagac

SEQ ID NO: 27302 - DNA, 201 bp, Homo sapiens
gaagagccccctcgtggcaaagagtgtaagcaaatggaatcaaatgaaatgtgaagagagtctgaggaaacatgtagcagcaataggcaatgaggcggagrgaaagcgagtatgaagtaagaagaggcatacagaaagataaataccctgtttccagagagggctaatgaaatctgttctttgcgcaaatcaagtaaacag

SEQ ID NO: 27303 - DNA, 201 bp, Homo sapiens
gatcattcaagtcctcctataggcctcttgatctgtacattaattggaataatggtctgttctttttgtagaaattaatcatgttcttaaacacctccatkcagtgtaagttctgactgtttaattaaaactttatagtaagctcaaactgggatcctgaaaatgaaaagatattttttgttatctggttcaggtttttgt

SEQ ID NO: 27304 - DNA, 201 bp, Homo sapiens
gacttttaagaacttaacgcccaaggatcttgtcattcttctttgtaaaatggatcatccaaatatttacaatagaaataaggaaaatacttacaatagamataaggaatagcatacaattccattcattctcattctctcattcctgaaaatactcgtagatgtcttgtctggacattcattttcctcactgcctaatat

SEQ ID NO: 27305 - DNA, 201 bp, Homo sapiens
aattttctgtctagatgagctgtctggttctgagagtgggatgttgaattcctcaactatttttgtgttgaagtgtctctctccctttagatctattaatrtttgctttgcatatatctgggtgtgatactgcttctcagccttttggctaagatcaggtttagtatctggttgctctggtattggtgcatatatgtttag

SEQ ID NO: 27306 - DNA, 201 bp, Homo sapiens
aatgatttctgctgagaaatctgttagtctgattggagtttccttataagttactagatacttttcttttgctgtttttagaactctctatgtctttgacttttttttttttttttttgagatggagtctcgctctgtcccccatgctggagtgcagtggcgtgatctcagctcactgcaagctccgcctcctgggttcac

SEQ ID NO: 27307 - DNA, 201 bp, Homo sapiens
gtgagtgagtgctcaattaaacctccttcctttgtaaattgcccagtctcaggtatgtctttgtcagctgcatggaaatggacgaatacagtaaattggtmctggtagagttgggtgctgctgaaaagacaaccaagaatgtggaaacgactttggaactgggtaacaggaagaggttggaacagtttggagggctcagaa

SEQ ID NO: 27308 - DNA, 201 bp, Homo sapiens
tctgtaatattaagtcagtttatcacactatgagtagttttttttaatggattctgacaatatgctgcttattgtagtctttcatcctttatctgagaacwatgtttttatgacagtaaaatattttttatacaaataggataaaaattcatatgctgtcatgcgctaatatgaagtttatccttacatctcccactctcc

SEQ ID NO: 27309 - DNA, 201 bp, Homo sapiens
tctaaatcatactacttatttcattagttaattattgcttgtgaaccatattataatcatctttagtatcaataaatatttttgagatgatataatgccartaaatccataaattaaaaaattaaagcattaaagaaatatctactatgtaagcattcaattttatataatgattatctgggtcagtgtacccaaaattgt

SEQ ID NO: 27310 - DNA, 201 bp, Homo sapiens
aagaagctgaaaattatggttagggcagaccctggaaatatcagatcaagtgatggaacagcctcatattcctgtgtcctgatccccagtttgtatgactkcactctagaagaaagagcaaaggagcaaaatgtaaaagggaaggaatgtccacataagataccacatgggcaggtggtaggaatgagagccacaggcata

SEQ ID NO: 27311 - DNA, 201 bp, Homo sapiens
gagagcctaaagagattacaaccctccctaatcagatgggcccttctgctttaaaatccttgcttccctgtttgggttgatggagctaagtggttgtgacwtgtttgatgcagttgactgtgatgcatcctggttttccataaactccatggaaagaagctgggaagagccccctcgtggcaaagagtgtaagcaaatgga

SEQ ID NO: 27312 - DNA, 201 bp, Homo sapiens
tcacaacctactcatctgacaaagggctaatatccagaatctacaatgaactcatacaaatttacaagaaaaaaacaaacaaccccatcaaaaagtgggcraaggacatgaacagacacttttcaaaagaagacatttatgcagccaaaaaacacatgaaaaaatgctcatcatcactggccatcagagaaatgcaaatca

SEQ ID NO: 27313 - DNA, 201 bp, Homo sapiens
tggttccatagagattttggaattgtttttcctgtttttctgaataatgtattggtattttaaaaataaagattgcgggggaggagccaagatggccgaayaggaacagctccggtctacagctcccagcgtggtggatgcagaagatggtgatttctgcatttccatctgaggtaccgggttcatctctctagggagtgc

SEQ ID NO: 27314 - DNA, 201 bp, Homo sapiens
tactgaaataatgtcctaacaggtctctggagattccctccctgcttactgtcataatctgtaatgcgtgaatagtctttatatacatggctttcttctgrttgttgacaataggactatcatgaatggacctccatgggtggttagtgcaatgtagaggtccgagataaccccattcttgctaaaaacattacacatttt

SEQ ID NO: 27315 - DNA, 201 bp, Homo sapiens
ctgtgcattgttttcttcctattacttgaatttaagttaattttcttttttattgactttagtttttagtttctgtctcccctaaaaaagtgggagctccrttagagcagggtttttattttataacctactccatccgtggagcaagactcacaataactacttgttggatgaagaaatcattgagatactcagtacaga

SEQ ID NO: 27316 - DNA, 201 bp, Homo sapiens
ttgatttaatctatattttgtctagcattatcccaacattagaagtagttaatgtatccataggcaattgttagatacatatgtaagaaagtgaaaaaccracagacagacaaaacccacctaagtcaataatattggcaataggatttagaatgctgttatggcacatgagatgctccacatcctacctacatggaatat

SEQ ID NO: 27317 - DNA, 201 bp, Homo sapiens
catccatgtccctacaaaggacatgaactcatccttttttatggctgcatagtattccatggtgtatatgtgccacattttcttaatccagtctatcattsttggacatttgggttggttccaagtctttgctattgtgaatagtgcctcaataaacatacgtgtgcatgtgtctttatagcagcatgatttgtagtcctt

SEQ ID NO: 27318 - DNA, 201 bp, Homo sapiens
cctaaatactaggattacaggcataagccactgcgccccggcctctaatggattcttttttattgtatatacttgaggtgtacaacataatattttgatgyatatttacaatgtaaagtaattactaaggtcaagtaaattaacatcgatcgtctctcatagttttaactttgtgtttggtgaaatcaccgaaaatctacc

SEQ ID NO: 27319 - DNA, 201 bp, Homo sapiens
tattttgatgtatatttacaatgtaaagtaattactaaggtcaagtaaattaacatcgatcgtctctcatagttttaactttgtgtttggtgaaatcacckaaaatctaccctcttagcaaacttcagcacactgtataacatcatgaggtatagttctcatattctgcgttgtatcgctacacttattcatctgacataa

SEQ ID NO: 27320 - DNA, 201 bp, Homo sapiens
tgtggtcagtttcaaggaacgagagaccaacatccaagaatagtctggaggagaaaggacatatcaagaaacacaactcaagctgggtgtagtggctcacrcttctaatcgcagcactttgagaggctaagttgggaggatcacttgagcccaggagtttgagaccagcctaggcaatataaagagccctcatcttaacca

SEQ ID NO: 27321 - DNA, 201 bp, Homo sapiens
catcaccaacatcataactttatagagatattgcattagaattcatctagtttctgtacttattcatgaataagagatgcttatgtagatgttatttcttsttgacaaattctattagcataaaataaaagcattaatatttacttttaataaaagtcataacatttagcgttaagttcctttataagtaagtgctttatg

SEQ ID NO: 27322 - DNA, 201 bp, Homo sapiens
gtactggttagaagccatattaactagatttcagtttcttgaaaatttatacattagcaagcatagtgtaaatatgtattaagtgggcaataaatatttgytgtgttagtggcattttaatagtacatgatggaataaatgatagatgtgttgtaaaagcttttattgcatgattgccagtttctacctcattgttgtttc

SEQ ID NO: 27323 - DNA, 201 bp, Homo sapiens
aagggtataaaaatatgtaaataaaagtgcctagatgcaagagtgatggaaataagtcaaatgttagcagtgctttcttatcagatggagaaattatggaygacttttccttcccagtttagtgtttctttgtacctctgaaaatttgtacaatgtacatctgttatttataattttgtacattgagtgtgtatcaagtta

SEQ ID NO: 27324 - DNA, 201 bp, Homo sapiens
agattagagggtggaaaatggattctggagaaataaacccatcatattaactataaccatgagttccttgaagacaaatcaaatctgatgtcttttctttytccttatgaatatacttcagtacgaaggacctgatacttagtttggacccagtaattatttattgttgtaagtagcacagtaagaataaaaacgtttatg

SEQ ID NO: 27325 - DNA, 201 bp, Homo sapiens
gtgatctgcctgtcttggcctccgaaagtgctgggattacaggcgtgagccaccgcacccagccatctttgacttttgaaagtttggctacaatgcaccayggggaggaccttgaattttatttgtgtgagtttctctgagcttcctgcatctagatgtctaaatctctttttgttagacttgggaagttttcacctataa

SEQ ID NO: 27326 - DNA, 201 bp, Homo sapiens
ttagcattccttctccaaaaagagtatcatatcatcttaataaagtttctcttttcccagaattgcttaagtagcatgctgctattcatttctcttgaaaktttagtcaaaatgaattattttgcaaaaaggaaaattccacagtttctatttcttttcctcattgtctgtggcccattaacgtcttttatctgctactat

SEQ ID NO: 27327 - DNA, 201 bp, Homo sapiens
gtatatcatctgatttcaacttcggaaaatatataaatgtacatctaagcttctagtgaatggttgaaagaagtatatatggtgtgtaagttcttaagccratggattcagcctagagcagcagacctgttcccagcattttaacactaggtgtttatttacagtgatcaaagtgagaatgtgttacatcagaagttagat

SEQ ID NO: 27328 - DNA, 201 bp, Homo sapiens
aattaagacctcttttccagaagcaatctattatttttgtccagtgagatctatttaccctagaagtgtttgttcttataccttaatttttaaagtttttkttcagtaaaaaacagatatgaataagttggtaggaaaactattttaaaagggtatttttggccctataaaaatcccagcaggtatctctgcctacttttt

SEQ ID NO: 27329 - DNA, 201 bp, Homo sapiens
agttttgaactttaaggtttaatgactgccctattgaattttagacttgcatggggcctgtagcgcctttgtttcagcaaggaaactggtggcattttgcyctagccctagagatctgtgaaactttgaacttgagggagatgatttagggtatctggccgaagaaatctctaagcagcaaagcactcaagaggtgacttt

SEQ ID NO: 27330 - DNA, 201 bp, Homo sapiens
gttaaatgtcttttcttctctttagtgccacttagaaaacttggaaataaacaaaaaatgaagctcatatatttttttaccactgtctagaaaccattacwataatgctggtcttaattcatacttactagaattgggagatgtatttgacttactcataaatttgataggtggaaaaagtagcttatttattacgaagct

SEQ ID NO: 27331 - DNA, 201 bp, Homo sapiens
aaggggttgctgctcttcacactgaagcaaggggagagtgagatttctcatctttaacaacaacaacgacaaaaagaaataacagcgccaacaagaaattraaaagaaaattacacacgaacacacaaaatcgttcaacaaacttaatattcttttcagtggaccagaaaacctttggtatgacaactcaaacttttgagg

SEQ ID NO: 27332 - DNA, 201 bp, Homo sapiens
ccagtgcacaagggggtgtgtcttctgtgtaaagggaacatgttccaaaagcaaaaaggcaagaaacaatctgttaagaagaaaccacaaagatttcctargaagagagaatggcatgagttgagatggaaatgattgggaaaggagagttaagtcatagagggtctgggtttagatatgacaccctcccctttaaagtta

SEQ ID NO: 27333 - DNA, 201 bp, Homo sapiens
agtaacaaggagccaaatgttaatcaccaagacaatggagaaaatgtctccagggcatgtcagagaccttagtggcagtccctcctatcatagacccagakgcctaggcagaaaaaacgatttcacaggccaggccccagaccctctgctgtgtgcagcctagggacttggtgccgtgagtcccagctgtttcagccatgg

SEQ ID NO: 27334 - DNA, 201 bp, Homo sapiens
ttggaatgtttgtacttgttctccagggaatgggttacattgatattaggcatatttaattgtcagtttgcatttcccatttttgcaattttaaaatgtgwgaataatacattgcacaggatggctggactcaaatagttctctgaatgaaatttaagcaattgtatgtgctattctatcatgttgaaacaaaattacaaa

SEQ ID NO: 27335 - DNA, 201 bp, Homo sapiens
gatggctggactcaaatagttctctgaatgaaatttaagcaattgtatgtgctattctatcatgttgaaacaaaattacaaagtgttatctatcacagagkttaagaaaaaaatggcctagcatggctggagtaattattttgccaatgttgtcacgaagaaataattatctcttcttactggttaatgtatttttattgt

SEQ ID NO: 27336 - DNA, 201 bp, Homo sapiens
tgaaggttgtgttgattactaatggccagtgatacagtcagtcatacctgtagaattgaagcctctatgtaaaacctaaaggacagggttcagaggacttytggatagctgaacatgtggaggttcctagaaggtggtacaaccacccagggaggacatgggagctctgcaccccttctcctatacttcaccctatgcagc

SEQ ID NO: 27337 - DNA, 201 bp, Homo sapiens
gccaatgttgtcacgaagaaataattatctcttcttactggttaatgtatttttattgttcttcagtaacagcttgaataatttatcttaaagcattatgrtattttttaagtagaaaaacagttgagtgtttttaactatgagagtaccttgaataaaacagtatttcatttctgaggttgatgaggataactatttgaa

SEQ ID NO: 27338 - DNA, 201 bp, Homo sapiens
tgatgaagtaataatctgtgttattccagttcttttaaatgttaattcattttaacagttgcttcagaaaataaaattttatgaggcaaaatacagcaaartatttcaacaccacatttttgtttttccaaccagagtttgtttcatttacagacattgtcatttattttttatttttattcattttttagaacatcttaa

SEQ ID NO: 27339 - DNA, 201 bp, Homo sapiens
tagttttaactttgtgtttggtgaaatcaccgaaaatctaccctcttagcaaacttcagcacactgtataacatcatgaggtatagttctcatattctgcrttgtatcgctacacttattcatctgacataactgattatatatgtttatactctccaatgaaatttatattctttcaaaattaaaaatactgttagcttt

SEQ ID NO: 27340 - DNA, 201 bp, Homo sapiens
gcatttgaggaaaatgaaatgaactccatttgatatatgacctattgcacttaaaaatattcagatcactggttattgctgactgcttataaggcaaaatrttttgattttactgtattgttcatgctgcgagcaaaatgggtgtctgctaagtttttattttaaaatgcatatttctgtctttaccttgtagccttgcaa

SEQ ID NO: 27341 - DNA, 201 bp, Homo sapiens
tttagccaactaggtaaaaataaattttcacatatttctattgagcccactggacaccaatatactttaataattgtgtttaaaatagaaaactccttcarcttgaagctgtcttttatttgagaaaagtgaaaaagagattcgtgggatattataaaagatgaacaagatgcctaaaatggacaatgctcctttacatgt

SEQ ID NO: 27342 - DNA, 201 bp, Homo sapiens
tacatgttactttaacatttgagagaatgctatcaaaatgcagaactggctaaaagtgttagaaggagtagttcaagttgtcttcaaccaagagtcatctrgaatttggctgcaccctggtatatcaaatacgctgtatgggaatgtgcttatattttgatgagtaatgtgtttttataacaaatgaagatgcatgtcaga

SEQ ID NO: 27343 - DNA, 201 bp, Homo sapiens
ttacaagattttgtctctaaattaactctcttcatctgagggaaacagaaagatgaaaggacctattatttttgaaaagaaacaaattctaagtctttctrtattaccagagtgttttcattgtcttgctttatgtcttaggcaaagagaaaagcttccatgacgcatttatgctttttaatgacctaattagacaatgtg

SEQ ID NO: 27344 - DNA, 201 bp, Homo sapiens
ttaaaatatgggtggcagtgtctttaactcagatttgggatgctttatacagtcatgggaaatatcaggggatcaacttgaaattctttaaaagttaacaraattttggaacgatcaaggaacatgggaatatggcctcaccttttctttctcactgatgacataaatgccgccctcactgtgttgtttattgtttcttcc

SEQ ID NO: 27345 - DNA, 201 bp, Homo sapiens
acagccctgaaaagtgactttcatatttaggattgaatataaactcattctaagattgtctataacctatttctgtgttgcttagcatagttctatttaasagaactaagacaaacatatagaaatatgatgatgacaatgatgatattatattactttcccaagtgtctggcactatgcgtatttcaccaagcatttgta

SEQ ID NO: 27346 - DNA, 201 bp, Homo sapiens
tcattcaatagaatttaggcttgtcttccagatttaaaaaaaaatcatctaaggtgcagtatgtactgaaatagtgaacctggaacaaccccatattccaytgatattctttttttttcctggttatacaactgctggaacaatagtgtaacaatgtcaaagaaaatttgtctgggaggtaggaagattggtgataggaaa

SEQ ID NO: 27347 - DNA, 201 bp, Homo sapiens
ataggaaaagtactattattatggacaagctctagatttgggagtcataagatttgagtatggttcctggatctaattcctggtagtaaggaggccatgcrtaagtcgcttaccttgaccaatctattttctacttttctaaaatggtaattctatttgctctgcttaactcacagctcttgtaaggatcacatgagaaat

SEQ ID NO: 27348 - DNA, 201 bp, Homo sapiens
tggggttggggttgtttgtttttttcttttttcttctttctttttttctggtagagttggggtttcaccatgttggccagactggtctccgtctcctgacstcaagtgatccacctgccttggcctcccaaaatgtgggattataagtgagagccactgcgcctggcctttttcttgtaaatttaaattccttgtagattc

SEQ ID NO: 27349 - DNA, 201 bp, Homo sapiens
ttataatattgaaaagaacaatatcaacagtagaacaaccatatcaagacagtggatcatgaagcaatgactataggattccctcctaaatttcgttcatygtaacacccacactgtgttctgtctctgtgcacagcacaacaaactcacttcaaagccaaatgaggacttggcatactcaggaaattctagtaatgagat

SEQ ID NO: 27350 - DNA, 201 bp, Homo sapiens
ttcttctttctttttttctggtagagttggggtttcaccatgttggccagactggtctccgtctcctgacctcaagtgatccacctgccttggcctcccamaatgtgggattataagtgagagccactgcgcctggcctttttcttgtaaatttaaattccttgtagattctggatattagacctttgtcagatgaataga

SEQ ID NO: 27351 - DNA, 201 bp, Homo sapiens
accaataatgtctggtggtaatgcgtgttttttggagtagtctttaattactaaacaaggtggtgacatacataaagccagtgggttttttttccaccggmagatgggtgctaaagaaactgagcgattttatttttttcatcatataatatttctgatggtcttgcctccttcaagtctcaacatgtgtctctttaaaga

SEQ ID NO: 27352 - DNA, 201 bp, Homo sapiens
gatgggggcatttaagttattgtcaggattaaattcaatcgaaagaattaagtgttaggaaactgtgccttgcctgtcaaatagtgactagtcaggaaaamacacacacacacacacacacacacacgcacacacacgcacgcacaaatgcatgcacacattcctcactgctattttgacgtatatgtacctatagtatgt

SEQ ID NO: 27353 - DNA, 201 bp, Homo sapiens
ttcaatcgaaagaattaagtgttaggaaactgtgccttgcctgtcaaatagtgactagtcaggaaaacacacacacacacacacacacacacacgcacacwcacgcacgcacaaatgcatgcacacattcctcactgctattttgacgtatatgtacctatagtatgtctaaatttttcatggtattagattatacttcaa

SEQ ID NO: 27354 - DNA, 201 bp, Homo sapiens
agcagcatggtttcttttttttacaaatcttttgcaaagagcagtgataatgtgccaatgacaatgaaatatttgaacaagaaaagttgtttttatttatrgagaaacaagtaaaggccctaaggtggttaaatgattgcttaaagtcacacagaagtggcatggctctgatttcccagtttaccagatacttagatactc

SEQ ID NO: 27355 - DNA, 201 bp, Homo sapiens
tggacacaaggaggcgtttaagagggtattgtgaaagtcctgggtagagacattgaagatttattaagatagtagtggtgggcaggaaaggtgatttaagaaaaaaaaaaaaaaaactgcagttgggaggattagcttgtgattgatagtggaaggtgttaacaaagggcatgaacgccacttaaaactgtgaacctgaga

SEQ ID NO: 27356 - DNA, 201 bp, Homo sapiens
cattttctttttattctctaacccaaactgacagatttaataattagaaatattttacaggtaacgtttttctatttacactcaagggttgaaaagtaaarttacttagtatgcagatacggtctacctacctcttctcttagtgcacacacgagcacaattcaggaaaaaaaatgatgagttatttaagatattaaacaa

SEQ ID NO: 27357 - DNA, 201 bp, Homo sapiens
tgtctctttaaagagaatatttcacctttcaaaatgaagtctcctaatgactcacttaaatgtttattgttttcttgccgtaaggaactttgtgacttgtaaatatgaatttatgtatgcatttttgtatgaataaatacatttataaaattgatatttaaaaagagctagcacttaagttaggccagacgtttttctaag

SEQ ID NO: 27358 - DNA, 201 bp, Homo sapiens
tactataacgttttgtgtaataaaagttggttttgaaattttattttgatataaatgtctttatattttaaaatctgttttaacaagatgaaattttaatmaatttgtgtcattcacatgctcttccttttaaagagatgtatttgcagctgatactctacctatcttttttaaaaattttaatttaatttaattttaaaa

SEQ ID NO: 27359 - DNA, 201 bp, Homo sapiens
agaaacagtaggtcacatgaaataaattaaaatccctaaaaaatatggcaattgttattctataggattaatgtccattttaaagcattaatataaacttrattaataatagtaggaatgatcaggtcctactactcatggatttcttttgagagcttaatttaaggagggaaccctcatctcagaaaaatttacatgact

SEQ ID NO: 27360 - DNA, 201 bp, Homo sapiens
ttccatgtgccttagacctgtcttccatctaataagacttcacactgctcacttttcctttctgacactgaatacacataaacaacagagagcaatgtctsttaaacccataaacccattcaaaaaccaaaaccaaaccaaataaaatgaattggttgtattaatttgtatcatccatttacattttgagaagcatagtca

SEQ ID NO: 27361 - DNA, 201 bp, Homo sapiens
tgttttggattctgttgcccaaaatggaaattgccttatttttgttttcctgatcaaaacagtgacctacatttctgatattttggggggcgctgggagayggggtctcatgatgttggccaggtcggtctcaaactcctggcctcaagtgatcctcccgcctcagcctcttgaagtactaggattacaggcatgagccac

SEQ ID NO: 27362 - DNA, 201 bp, Homo sapiens
atgagattttatcagatcagattcaaacatggagcttacaaccaggatcactaattgcacaaagaaacaccatgagtttgagttaacagaaacaaaaatayaactttctagatctgtaaaagggttaaaatatttaaattaaaatttaatttaaaaatttacatatttaaggaaaaataatagcaatgagaaaagacataa

SEQ ID NO: 27363 - DNA, 201 bp, Homo sapiens
aagttgaggaagattccataatatgtcctctgtttcttctataaattaagaagggaagcattctctgagagtgaagaggaaggaaggtcatacatgttatktatatgtcttctccttcattcatttgctcaaaaaaacacttattgaatgtttccatgtgccatgttctgtgttaagactagaagaagcaaccaaaaatga

SEQ ID NO: 27364 - DNA, 201 bp, Homo sapiens
ataaattaagaagggaagcattctctgagagtgaagaggaaggaaggtcatacatgttatttatatgtcttctccttcattcatttgctcaaaaaaacacytattgaatgtttccatgtgccatgttctgtgttaagactagaagaagcaaccaaaaatgaagtgcacagtggagtctatcaaacaacttcagtcacgagt

SEQ ID NO: 27365 - DNA, 201 bp, Homo sapiens
gacatcatctgtttcaccttatcactgtgtactttcaaaatatcttcaagatgctttcattgaagcaacaagaaaattgttttgaacaaagaccctttagygtcagtcactatttcagaatataacaccagtcattgtttatatgatttactcttaataggattttgatattctgctgtgtaacgttgctgctgactgaat

SEQ ID NO: 27366 - DNA, 201 bp, Homo sapiens
tggaaacattctgatttggttgggggggggggcttttgacatcatctgtttcaccttatcactgtgtactttcaaaatatcttcaagatgctttcattgargcaacaagaaaattgttttgaacaaagaccctttagtgtcagtcactatttcagaatataacaccagtcattgtttatatgatttactcttaataggatt

SEQ ID NO: 27367 - DNA, 201 bp, Homo sapiens
ttgccaacaagatggagtttgagggactaaaattgattttaagaataataatgttgttgttcctttttcaaatcttttaacatggaaacattctgatttgrttgggggggggggcttttgacatcatctgtttcaccttatcactgtgtactttcaaaatatcttcaagatgctttcattgaagcaacaagaaaattgttt

SEQ ID NO: 27368 - DNA, 201 bp, Homo sapiens
atcgatcctgagtttgacagataaaacatgtgtctgaattgtagttacagccaaactacaatctatcagcttttccctcagggtaattatgcttattttaycccaaaacaaggtaattgttttgtgataaagtattcagttcactcggaataagccgttggcctccttttatctacttatttatttatttatttatttatt

SEQ ID NO: 27369 - DNA, 201 bp, Homo sapiens
atctttcagtatgctttttttttgtgctggagtagaaaacccaactaaaaatgatatacattttaataaccaaagtatattatctcacagatggaagtctrgaaggtcttaagggtgactccatcaaggagttctggctccattttcccaggaattctcttgattttgccctcctctaaatgaaacaatgtaattgaagca

SEQ ID NO: 27370 - DNA, 201 bp, Homo sapiens
ttctcccatctcagcctcccaagtagctgggcttataggcacccgccatcatgcccagctaatttttgtattttagtagagacggggtttcaccatgttgrccaggctggtcttgaactcctgacctcaggtgatctgcccgcctcggcctcccagagtgctaggattacaggcgtgagccaccatgcccggctggcctcc

SEQ ID NO: 27371 - DNA, 201 bp, Homo sapiens
tgatatgttgaaatggcagcatcctagaccaatcccaagtttaatgccttccttgaagttgccatgtttctgtttcggagtccttggtgccacaggtcccycttgactttcacaggccagggcttcttgccatacaggtaagtgttctcccttcccagcttatgggatccagactcatcagctgcccgctgtaggttgtcc

SEQ ID NO: 27372 - DNA, 201 bp, Homo sapiens
ctgtagtagacaatttaggcttaataaaaaggtttccatccagtgtttgctaaaggtaattgaagagaattggagaaaataatattttaaacaattccgcaaaaaaaaaaaaaatacataaatagaagccctatgttttgatggcattgatggcagtctgttctaaattcagtacaactgtgtttcatcagataagttact

SEQ ID NO: 27373 - DNA, 201 bp, Homo sapiens
ggtttccatccagtgtttgctaaaggtaattgaagagaattggagaaaataatattttaaacaattccgcaaaaaaaaaaaaaatacataaatagaagccstatgttttgatggcattgatggcagtctgttctaaattcagtacaactgtgtttcatcagataagttacttagcacaaatgtgattcatgtaaagaaacc

SEQ ID NO: 27374 - DNA, 201 bp, Homo sapiens
cactgcactccagcctgttgacatagcgacactccatctcaacaaaaacaaaaaacaaacaaacttctaaaagattgtaagctgtaacaaattctggcaartgacttgcaaatgagaagaaaaaaatcacgctcattcatgtaaaatggtatctgctttgagaataacccagtatcaagtatgtgttacttgaattagaac

SEQ ID NO: 27375 - DNA, 201 bp, Homo sapiens
tccaattagagactcattgatcaaatagaacaaagaagaatactgtgcaggtaaggtttatggattactctatatattactctttgccctgttctgttcarttgtgttagtatactttatgttctgctgctgtgatgactttgtgattaaacattaaccagctctcagggagtggggaggaaatcatgtaagtcaatatat

SEQ ID NO: 27376 - DNA, 201 bp, Homo sapiens
tagcttgtgattgatagtggaaggtgttaacaaagggcatgaacgccacttaaaactgtgaacctgagaaactagaaagatagtggcgctggtcactgagaaaaaaagcatcagatcagtttttgtttattttagtttcggggtgaaggagggaagatgatgtgtttggtttggacatattcagtgtatgttacttttgca

SEQ ID NO: 27377 - DNA, 201 bp, Homo sapiens
tgggcccttaaccagcatactacactgtatctccttcactgccgaagaagcaagagtctctgccacctgtctaggtttccagagtttctttttcactctgwtgaaattcacaaaaattctcttactcaaacttattagttattgtgtattatgagaatatttaaatcaaaattggatccaagtcaatgtatagggagacat

SEQ ID NO: 27378 - DNA, 201 bp, Homo sapiens
caagttgttttaaaaatatgtatatttgtatcttgctgcaggacttctctaattttttaaaaaattgatcgatgtgtaagaggctttcattctttctttctttttttttttttttttgagacaaggtcttgctctgttgcccaggctggagtacagtggcgccatctcagctcactgcagcctcgacctcctgggttcaag

SEQ ID NO: 27379 - DNA, 201 bp, Homo sapiens
tatgaaaactcagaaggcaacctatctgatttcttaaatttaaatttcctggttaatttatttagattatttgaaaattcttctttgcccaggtacctcayacatacatggactatactacttggtcacttttaatttagaaggaacttcctttaggaacagatattttgtatagctgtaaattatttaaattcacatgaa

SEQ ID NO: 27380 - DNA, 201 bp, Homo sapiens
aagttgttttaaaaatatgtatatttgtatcttgctgcaggacttctctaattttttaaaaaattgatcgatgtgtaagaggctttcattctttctttctttttttttttttttttgagacaaggtcttgctctgttgcccaggctggagtacagtggcgccatctcagctcactgcagcctcgacctcctgggttcaagc

SEQ ID NO: 27381 - DNA, 201 bp, Homo sapiens
cattacttcttaaagccctcaagaaattatgaaaactcagaaggcaacctatctgatttcttaaatttaaatttcctggttaatttatttagattatttgmaaattcttctttgcccaggtacctcatacatacatggactatactacttggtcacttttaatttagaaggaacttcctttaggaacagatattttgtata

SEQ ID NO: 27382 - DNA, 201 bp, Homo sapiens
ttatgaaacatctagaataattaaatcagaaaagggaaaatatttgttaagtcaaaggaagtattttcttcatctttgtaaacataagtctctacagcacygtaatccatataacctcagcgtcaagtcagattttttttattgcctgaaaactgctaagtgaacacattatatgtaaaattaaagtagtggaagtataca

SEQ ID NO: 27383 - DNA, 201 bp, Homo sapiens
gaataaataaaatcttctaaagtttacagttactttaaagtactccaaatttaagcatacttcacacgtgctatataaaacataaaacaacttaattcttyattagtgtgtatttcagttgcatctttaggctttttctgaatgccttcattacttcttaaagccctcaagaaattatgaaaactcagaaggcaacctatc

SEQ ID NO: 27384 - DNA, 201 bp, Homo sapiens
ctcagtaataaggagaatcatctgggaccccagcaaggtagagaaactgcatttgagaattccacattaaacccaagactcttaaaggggtgctaaagtgrttttaggtatgtaggaccccttggctccctacaaaaatatatatggatacttttggaagggaagcatcaccagttaagggccatgagattttatcagatc

SEQ ID NO: 27385 - DNA, 201 bp, Homo sapiens
tcaaatgttaagctttctggtaaattagacaaagcagatttatcatgccatttcttttttgaatggcagtgttagtccaagttcctgttgatggtctcackattctttccatagttctgttacataaatgtgaaactttaatacctaaataattctaaatatatttttaatgaggaagtcttcaggacagtggttttccaa

SEQ ID NO: 27386 - DNA, 201 bp, Homo sapiens
cattcaaaaaacatttattaagcagccactatgtgccaggaatagtagaataaataaaatcttctaaagtttacagttactttaaagtactccaaatttargcatacttcacacgtgctatataaaacataaaacaacttaattctttattagtgtgtatttcagttgcatctttaggctttttctgaatgccttcattac

SEQ ID NO: 27387 - DNA, 201 bp, Homo sapiens
cttagtttcttaatcttctgcctttagcagtttaagagttcatcaaatggttaaaaggaaaactgcccacttcccactgagatatgaaacattcaagttcwggcttccatggcaaccccaaactccaatttttatgtcaccagcctcatgacattgctagaagctctgctggcttgcctcccaaatagctgcacccctctg

SEQ ID NO: 27388 - DNA, 201 bp, Homo sapiens
cacaatttaaaacaagaccagaattaagcattcaaaaaacatttattaagcagccactatgtgccaggaatagtagaataaataaaatcttctaaagtttrcagttactttaaagtactccaaatttaagcatacttcacacgtgctatataaaacataaaacaacttaattctttattagtgtgtatttcagttgcatct

SEQ ID NO: 27389 - DNA, 201 bp, Homo sapiens
gaagactacctcatttgttcagggtccttgctcacccaaaactgtaaaaggagtttttgtcagattccgtctctgaattgcctttcccctagaagcccaaytaagaacctgggagatttcctctgacctttcctttttggaatctaacttcatggtttcacttctcagtattacagaaaatatcaatgagattttcagtaa

SEQ ID NO: 27390 - DNA, 201 bp, Homo sapiens
aagctttaaatgggaacatgaaatgatatcggggaagactacctcatttgttcagggtccttgctcacccaaaactgtaaaaggagtttttgtcagattcygtctctgaattgcctttcccctagaagcccaattaagaacctgggagatttcctctgacctttcctttttggaatctaacttcatggtttcacttctcag

SEQ ID NO: 27391 - DNA, 201 bp, Homo sapiens
tcaagaaagtgttttatttactacacatgagctatgataaggaatttagatatcaaaattaagaataataaagctttaaatgggaacatgaaatgatatcrgggaagactacctcatttgttcagggtccttgctcacccaaaactgtaaaaggagtttttgtcagattccgtctctgaattgcctttcccctagaagccc

SEQ ID NO: 27392 - DNA, 201 bp, Homo sapiens
caagcacttttcccttggagcagtccaagattgtcaacacaactttcgaaattcccttctctcccacattaggatggagtctatttcagattcaacatgtrtaagttttaagcaacacatgcagagaaattttgtcttggaatacctccaaaatttatatcacaatcattgcatgacttacataacattctctagttcagt

SEQ ID NO: 27393 - DNA, 201 bp, Homo sapiens
tgtttagaaatctactttctagtttaattgttatggagaaatcatcttcctgtatagattaaaattcaatcttttttgaactcaaagaaaaatttggaggsaaagataaatattaatgatggattatctaatatttgttccaatctcaacatgttttacttctcatagccttttatcttccagataaaattatgagcgcag

SEQ ID NO: 27394 - DNA, 201 bp, Homo sapiens
ctacataaaatattggtatggaatctgcataccttaaataaaagcttgtagttacaaaactttatattcttagtaatattgtatactctagtttaatttamatggctgtttggctctgttaatgatagaaaacccttcattattaaggacagcacttcacagaaaattgactgaagctaactttaacttgcagatggcgtt

SEQ ID NO: 27395 - DNA, 201 bp, Homo sapiens
tttttcagacaacattactaaggagatttgatgcctacatatcagtcttcatctcaaaacttctaaaagaggccttacgcggtagctcactcctgtaatcycagcactttgggaggccgaggtgggcggatcgcgaggtcaggatatcgggaccatcctggccaaaatgttgaagccccgtctctactaaaaatacaaaaa

SEQ ID NO: 27396 - DNA, 201 bp, Homo sapiens
atgggggtggttattgtcatgctgctgttcttgttataatgagttcttatgagatctaatggttttgtaagggacttttccccctttgcttggcacttctstcttcctgccaccatgtgaattaaggacatgtttgcttccccttccaccatgattatgtttcctgaggcctccccagccctgtggaactgtgagtcaatt

SEQ ID NO: 27397 - DNA, 201 bp, Homo sapiens
tttctgaatgaccttaaactcaaggtagtcgttgagtgggagggatgatttttagccatctttttcctccaactcaggtagataggatttaccagcttggycttaatttcctcctttctgttaacattgaaaaccatcatactaactgtaaaaatcaaatactgtaataagagtgagggagtgcatgttttaaagtctgtc

SEQ ID NO: 27398 - DNA, 201 bp, Homo sapiens
aagccttttgaaactttgatcctgaagacgtcgttttggtagatctaaaatgaatacatggtggatcccatcactgttttatttagaaatacaaaatcaargttattaattctaagatatgcatccatagctctgcagtatccaaagcacagcattaactttagttgcatgaaaatttcccaagttggtatatggatgtat

SEQ ID NO: 27399 - DNA, 201 bp, Homo sapiens
tttttccacttattgaatgatctttcagtctagtctgaggtagttattttggtttggccctaggagcagcaggagtcctgtggagtctcagtctactcctrttggtttcagtttataaattctgcctggagtggtcatctctttcctaacttggttacagacagtccatggatttccacttttgtgatagaagatggaaaa

SEQ ID NO: 27400 - DNA, 201 bp, Homo sapiens
ttccagacacttcatgttcagaatacctctattcattttctgctgatatggttttgctgtgtccccacccaaatctcattttgaattgtagctccaataaytctcatgtgttgtggaaaggacccaatgggagacacttgaatcatgagggcagtttcccccatattgttctcctggtactgaataagtcatggatctgat

SEQ ID NO: 27401 - DNA, 201 bp, Homo sapiens
acagttgttgaactagtttacagtcccaccaacagtgtaaaagtgttcctatttctccacatcctctccagcacctgttgtttcctgactttttaatgatygccattctaactggtgtgagatggtatctcgttgtggttttgatttgcatttcactgatggccagtgatgatgagcattttttcatgtgtcttttggctg

SEQ ID NO: 27402 - DNA, 201 bp, Homo sapiens
ggtatacaaaagagcaaaattgagaagctgggtgatctaagcctgaagtcctcaaatatttaaaagacttagtttgtcaagatttaaccatctttttctgrgttcttttcatcactgttgacaaaagcaagcactggagaaaaatttttcttttgcctatggggccagcagtgaagatgagctcatctgtccatcaagctc

SEQ ID NO: 27403 - DNA, 201 bp, Homo sapiens
aggtcaggggtttgagaccagcctggccaacgtggtgaaaccccatctctaccaaaaaatacaaaaattagccagacatgttggcacatgcctgtggtccyagctactcgagaggctgaagtaggaggattgattgaacctcggaggcagaggttgcagtgagccgagatgatgccagtgcacttcagcctgggtgacaca

SEQ ID NO: 27404 - DNA, 201 bp, Homo sapiens
aatgatgaggcaacctgggtgcccaaaaagtgaaagtggttatcactaggaccaaaggcacgaggagagggaggtgtaactgagacccagtgagagcagtrcctgtgggaaaggggctactgaacaggagctgtggctatgggtagagaaatgcagccactattggattacgctgctgcactgagcaggtgggggcagggc

SEQ ID NO: 27405 - DNA, 201 bp, Homo sapiens
aaatacatttatgaggtgtttaatgttgtgttaaaaaattgggggctattgaaatcacccgccccctcaaatgtttacactgtggaaggcaatagagattrtcaaaggggaacattttcttagttggtcagacacaatatagattttattaactcacaagtgaattattcacaaattattttgtgaagcctggggtactta

SEQ ID NO: 27406 - DNA, 201 bp, Homo sapiens
gataaccacagattggaaatgctagccctctggacactcaaactttaactctggaaactgggttacactggaaagaatctacaataaactgaccttccackggacacgtggagtattctaactaatgcagaaatccgaagcagactagagtatccctgatctccttagtggtgtagaatctcacactgtattatttattta

SEQ ID NO: 27407 - DNA, 201 bp, Homo sapiens
cacatgtacaagtatttctctaaggcatatacctgggagttaaattgttaggttaaatatggtatgtgcttgttcagctttcctaaatagaatcaaagtayactccaaagtgattgtagcaatatacactctccccggcagggtgggtgaattctagttgtcctatataccgacaaatatgatgggtgtaaaatgaaattt

SEQ ID NO: 27408 - DNA, 201 bp, Homo sapiens
atgggcaggtggtaggaatgagagccacaggcatagcaagagcccccttccattcttgccatcaagtgcataaggcatttctatcatgatcattttggagyggattttgcattgtggcatctttagacagctgtcacagcacagctaaaagtttataaaataacctatatcccaggcatgctgaatccaactaattaaatt

SEQ ID NO: 27409 - DNA, 201 bp, Homo sapiens
ctaatattttgcttgtttttagtttcaaatcatcctaggatattattgattactcaactgattgacatggtttgggaaataaggtattttgaaaggaaaaatgtcttctttttataaactgtacaggaaccttctattaaattctgtaaatgtcattgatctcaaatccatgcatcacatgtgtaaattatattatttgtg

SEQ ID NO: 27410 - DNA, 201 bp, Homo sapiens
taatattttgcttgtttttagtttcaaatcatcctaggatattattgattactcaactgattgacatggtttgggaaataaggtattttgaaaggaaaaatgtcttctttttataaactgtacaggaaccttctattaaattctgtaaatgtcattgatctcaaatccatgcatcacatgtgtaaattatattatttgtgt

SEQ ID NO: 27411 - DNA, 201 bp, Homo sapiens
ggttgtgactctggatgtgatattcaatttctatgtgtttccatttcctcatgtgtaaaatgagataactacaagccttttgaaactttgatcctgaagaygtcgttttggtagatctaaaatgaatacatggtggatcccatcactgttttatttagaaatacaaaatcaaggttattaattctaagatatgcatccata

SEQ ID NO: 27412 - DNA, 201 bp, Homo sapiens
gaccttccacgggacacgtggagtattctaactaatgcagaaatccgaagcagactagagtatccctgatctccttagtggtgtagaatctcacactgtattatttatttatttatttatttatttatttatttatttatttatttattttgagacggagtctcgctctgtcgcccaggctggagtgcagtggcgggatct

SEQ ID NO: 27413 - DNA, 201 bp, Homo sapiens
accttccacgggacacgtggagtattctaactaatgcagaaatccgaagcagactagagtatccctgatctccttagtggtgtagaatctcacactgtattatttatttatttatttatttatttatttatttatttatttatttattttgagacggagtctcgctctgtcgcccaggctggagtgcagtggcgggatctc

SEQ ID NO: 27414 - DNA, 201 bp, Homo sapiens
cttgaagaaaatagctaaggaaagtgcatttagagggagatactgtgtccttttctatttagaataaaaatattatacttatcttactttattcaaattcrttaattgtgagaacatttaccgtatgatttcaggtttttgaaacacatgtataagttttatcaatgacctaatgaatgaaaaaatatccacatctatgtc

SEQ ID NO: 27415 - DNA, 201 bp, Homo sapiens
ccttccacgggacacgtggagtattctaactaatgcagaaatccgaagcagactagagtatccctgatctccttagtggtgtagaatctcacactgtattatttatttatttatttatttatttatttatttatttatttatttattttgagacggagtctcgctctgtcgcccaggctggagtgcagtggcgggatctcg

SEQ ID NO: 27416 - DNA, 201 bp, Homo sapiens
ggctaatgagctccattaggtttaatcaacatttcagcaatttttgacttgaattttgtttaaactttctgctttgtcttttaccttttgttctttattaygttagctcatttaatttttatacgtaggataaaacatacactttgaaatggcctcagaatttgaaagtatggctgtaaagggtgaaatcactgatgttaa

SEQ ID NO: 27417 - DNA, 201 bp, Homo sapiens
gccaaaaacagataatatttgctgaatgaatcaaacgggtttctgagacgatcaattctttaaagatagagactcagttatttgtctttttcttctgagcsaagtacaaatacttacataacaattatattgaattattgttatttttttcttgtagctattttttctcatggtgtaaactgagggcaataattggcattt

SEQ ID NO: 27418 - DNA, 201 bp, Homo sapiens
cttccacgggacacgtggagtattctaactaatgcagaaatccgaagcagactagagtatccctgatctccttagtggtgtagaatctcacactgtattatttatttatttatttatttatttatttatttatttatttatttattttgagacggagtctcgctctgtcgcccaggctggagtgcagtggcgggatctcgg

SEQ ID NO: 27419 - DNA, 201 bp, Homo sapiens
ctcttgagtattcaaatttgttaaaatatgaaacacagtgcttggccaaaaacagataatatttgctgaatgaatcaaacgggtttctgagacgatcaatyctttaaagatagagactcagttatttgtctttttcttctgagccaagtacaaatacttacataacaattatattgaattattgttatttttttcttgtag

SEQ ID NO: 27420 - DNA, 201 bp, Homo sapiens
ttccacgggacacgtggagtattctaactaatgcagaaatccgaagcagactagagtatccctgatctccttagtggtgtagaatctcacactgtattatwtatttatttatttatttatttatttatttatttatttatttattttgagacggagtctcgctctgtcgcccaggctggagtgcagtggcgggatctcggc

SEQ ID NO: 27421 - DNA, 201 bp, Homo sapiens
acctcctggcagacccttctcttccaccaaacgtgtgcacatccttgagagccgtgagcaacttgctcagcacacagctcaccttccaggccattcacaascccagagtgaatcccgttacttcgctcagtgaaaactatacctgttctgactctgaagagagctctgaaaaagacaagcttgctattccaaaggtaggta

SEQ ID NO: 27422 - DNA, 201 bp, Homo sapiens
cacatctctcttgagtattcaaatttgttaaaatatgaaacacagtgcttggccaaaaacagataatatttgctgaatgaatcaaacgggtttctgagacratcaattctttaaagatagagactcagttatttgtctttttcttctgagccaagtacaaatacttacataacaattatattgaattattgttattttttt

SEQ ID NO: 27423 - DNA, 201 bp, Homo sapiens
atttatttatttatttatttattttgagacggagtctcgctctgtcgcccaggctggagtgcagtggcgggatctcggctcactgcaagctccgcctcccrggttcacgccattctcctgcctcagcctcccaggtagctgggactacaggcgcccgccactacgcccggctaattttttgtatttttagtagagacgggg

SEQ ID NO: 27424 - DNA, 201 bp, Homo sapiens
tcatccaatctgatataatcaaaatgaagatgaatgaaatgaaattctgtcagactgtataaatttctctaagtcatgcatagaaagtctcctaagtctaygtttcttgtgtaggttttgaaaaatacaattcagcttcctattgatattttgtctgaattgaattatatattgcgaaggtgtcaaaaatgttttcctatg

SEQ ID NO: 27425 - DNA, 201 bp, Homo sapiens
gtctcgctctgtcgcccaggctggagtgcagtggcgggatctcggctcactgcaagctccgcctcccgggttcacgccattctcctgcctcagcctcccargtagctgggactacaggcgcccgccactacgcccggctaattttttgtatttttagtagagacggggtttcaccgttttagccgggatggtctcgatctc

SEQ ID NO: 27426 - DNA, 201 bp, Homo sapiens
tatagcaggaaaaagtcttgtacatcatccaatctgatataatcaaaatgaagatgaatgaaatgaaattctgtcagactgtataaatttctctaagtcaygcatagaaagtctcctaagtctatgtttcttgtgtaggttttgaaaaatacaattcagcttcctattgatattttgtctgaattgaattatatattgcga

SEQ ID NO: 27427 - DNA, 201 bp, Homo sapiens
gactcaagcattccttggcttgtaatggcattcttcccatgcctctttttatatgtctgtctctgaatccaaatttcttttttataaagacacagacatattggattggaacctagcctaatgactccaacttgatcatcagcaatgaccctattttcaaataaggtcatgtttattcacactgaggattagaactgcaaa

SEQ ID NO: 27428 - DNA, 201 bp, Homo sapiens
cacaaatggccaataaggccacggaattagacaaaatatattgggagcttgtagaaaaagaagcactcttgagaatacaagtacttaacaagagagtagargtgaatttagggcagacaaccatagatttcaaatcatatagcaggaaaaagtcttgtacatcatccaatctgatataatcaaaatgaagatgaatgaaat

SEQ ID NO: 27429 - DNA, 201 bp, Homo sapiens
gacggcaaagaggaattctgtgatattatacattattgtatgttaatatatagtgtaatatttatgtatacgtatatttgattatatgcctataggatacygattttggaatcatccctccacaaatggccaataaggccacggaattagacaaaatatattgggagcttgtagaaaaagaagcactcttgagaatacaag

SEQ ID NO: 27430 - DNA, 201 bp, Homo sapiens
ctatcccttcaatgtaatttccgagacctttacaatataggtagaccctttaaaaaattaccgtgtgcttaaatttatattccaccattgttagccaaggrccttcatttcaattttatagtcatttaattttctcagtgtttatatctgtgtcttcttctttttgcctttaattcccctcagccaaaaatttcagcatac

SEQ ID NO: 27431 - DNA, 201 bp, Homo sapiens; identical to SEQ ID NO: 3129

SEQ ID NO: 27432 - DNA, 201 bp, Homo sapiens
tcattaaaacttcactattgtttcagccctgtatagttcacttagttacacgtgtaattttaaacactgttgttgactgtgttgtactggttagaagccayattaactagatttcagtttcttgaaaatttatacattagcaagcatagtgtaaatatgtattaagtgggcaataaatatttgctgtgttagtggcatttt

SEQ ID NO: 27433 - DNA, 201 bp, Homo sapiens
acttagtaaatcaatattggaattattttttcagctctcgctttttatatcaataactttgatattgagtaagttgttttttcccattgcttggctaattkttatcataattatcttttctgtacttcagtatgatgactgtccttctgtaggcccaagaaatatactctatataagtaagattttcttctggatggctat

SEQ ID NO: 27434 - DNA, 201 bp, Homo sapiens
ctttctctaggtaatgtatattaagctttgggcccaacccagtaactaaatgggatgatggtgatgacgattattattgattattgttttcttaaaagccrtgattcctattaaaatactcttgtagcaaattgtaatgaatttttcccagttggtttaccaagtgcgtaagaatcagatatcagtaaaaatgtcaaagta

SEQ ID NO: 27435 - DNA, 201 bp, Homo sapiens
actttttagagagattgctatcactgacaacttccagagtttgagagttttttgaatatactacttaaaaaaatctccatatggttttcatttgaaaaaayatattacaaactgagacattcactataaattaaattgaaataatcaaaatataattaagctatttgtgagtttacattttgcaaaacattttagaagcaa

SEQ ID NO: 27436 - DNA, 201 bp, Homo sapiens
gacctagtccctgtcatccaggggccaataggtcacagatgtgaattagccctttcccttgacttttgggattccaatttcaaagaggttgtaaaagagasagtgccatattcttgaaccttttagccaactaggtaaaaataaattttcacatatttctattgagcccactggacaccaatatactttaataattgtgtt

SEQ ID NO: 27437 - DNA, 201 bp, Homo sapiens
acagtgacctacatttctgatattttggggggcgctgggagacggggtctcatgatgttggccaggtcggtctcaaactcctggcctcaagtgatcctccygcctcagcctcttgaagtactaggattacaggcatgagccactgtgcccagcctgattttttaaattatagatttaaaaggacaagggagaaaattaaaa

SEQ ID NO: 27438 - DNA, 201 bp, Homo sapiens
gtcatttcctgagatgggaagtcacagcgaggagcccattaaccatatattaaaactccattagtaatattaagactgtccattctagaagaggtggtggstcacgcccgtaatcctagctagcactttgggaggccgaggcgggtggatcacctgaggtcaggatttcgagaccagcctggccaacttggtgaaaccccg

SEQ ID NO: 27439 - DNA, 201 bp, Homo sapiens
tgagtgatgtgtgagagtaggagaaacaatggtttttcctacattctcttacactaatggatttgtattcggagagattggaaagatggatctgtcatttmctgagatgggaagtcacagcgaggagcccattaaccatatattaaaactccattagtaatattaagactgtccattctagaagaggtggtgggtcacgcc

SEQ ID NO: 27440 - DNA, 201 bp, Homo sapiens
taaggcatttcttcattagcaaaaacagctggtaatttttttcacctgttattttgcagtgtttccttagaatttcattaaaatataagtaaatagggtawaatatcagaggaggtcatgaagaacattaccatttcgaagatggaaagctatttgagagaagtcacaaactaagcaatgtctgtgtttttgatttgatta

SEQ ID NO: 27441 - DNA, 201 bp, Homo sapiens
taggatctctgatttataactggttggtcgaaatacaggtcacaacctgggatttggaattggcatctgaagaggggggcagtcttgagggactgaggggygatgctatgtccaggtggatagtgttaggattgaattgaattagacgatgctcagctggtgtctgttgaagaatctggtgtcagaagtgttgagtgatgt

SEQ ID NO: 27442 - DNA, 201 bp, Homo sapiens
gaaagcgagtatgaagtaagaagaggcatacagaaagataaataccctgtttccagagagggctaatgaaatctgttctttgcgcaaatcaagtaaacagygtgtcctctagttcagtcaatcaatgttaattttaaatagctgaaacacaaattattatgcagttactaatataaaataaatgaacgaaatcacatagga

SEQ ID NO: 27443 - DNA, 201 bp, Homo sapiens
gacactgatgagggtggaggtagtagctgagtcttttgttataaaagctcatgttgactcgttaacattggtttttttttttttttttttttttttgtttttttttttttttgagatggagtctcgatctgtcgcccaggctggagtgcagtggcgctatcacggctcactgcaagctccacctccctggttcacaccatt

SEQ ID NO: 27444 - DNA, 201 bp, Homo sapiens
tgtttgtgctgttattgatataaaatatacagatttgatcactgagaaaaaagtctaacagatgtgcctgagttgtagtttagaggaagatgtgttgtatracaatcgtaaaaaatattagttgaccatacctgttcattgtgaatgtataccactgttttaaaagaagatgctacccatagctaatgttacccattatcc

SEQ ID NO: 27445 - DNA, 201 bp, Homo sapiens
tataggtagaccctttaaaaaattaccgtgtgcttaaatttatattccaccattgttagccaaggaccttcatttcaattttatagtcatttaattttctcagtgtttatatctgtgtcttcttctttttgcctttaattcccctcagccaaaaatttcagcatacttatgatctatccaaatatgtgttctgtgtatagc

SEQ ID NO: 27446 - DNA, 201 bp, Homo sapiens
cccagtagataataaagaacaatcaaaggattttaagtaaagaaggtttgctacatttaatgcccctctcctcacagtgttattgaactgtcaataatatsaacacacattaaactgaaccgcatattcagtttaatgtgtgtttttgtataatttgaacaaggctggaaaccaggagacctgaactcagattccagctgg

SEQ ID NO: 27447 - DNA, 201 bp, Homo sapiens
ataggtagaccctttaaaaaattaccgtgtgcttaaatttatattccaccattgttagccaaggaccttcatttcaattttatagtcatttaattttctcagtgtttatatctgtgtcttcttctttttgcctttaattcccctcagccaaaaatttcagcatacttatgatctatccaaatatgtgttctgtgtatagct

SEQ ID NO: 27448 - DNA, 201 bp, Homo sapiens; identical to SEQ ID NO: 3125

SEQ ID NO: 27449 - DNA, 201 bp, Homo sapiens
atattgtttagccctattttttcgtttgtttcttttgaactactccgttttccttaactctccttatctttttctgaatgaccttaaactcaaggtagtcrttgagtgggagggatgatttttagccatctttttcctccaactcaggtagataggatttaccagcttggccttaatttcctcctttctgttaacattgaa

SEQ ID NO: 27450 - DNA, 201 bp, Homo sapiens
tatggaacaaagctgcacgttgtgtacaagtaccctagaacttaaagtataatacaaagtattatattaattattaattatattaattattaatatataawatataaaatatatatataaatatatataaaatatatatataaatatatataaaatatatataaatatatataaatatatataaaatatatataaatatat

SEQ ID NO: 27451 - DNA, 201 bp, Homo sapiens
tatttcttgaaatgtagagtccgtatcagtggtggtataaaagattgttttacatgcaacgagatatgctggtatataatattaagtgttttgctaaattrtttgcctttcatttctactctaatgttactgattaagataaggggagcagatctcaccttggagctaggatgctttcatgtccctccaaccctcactgat

SEQ ID NO: 27452 - DNA, 201 bp, Homo sapiens
taaaatatatatataaatatatataaaatatatatataaatatatataaaatatatataaatatatataaatatatataaaatatatataaatatataaawatatataaatatatatataaatatatataaatatatataaatatatataaatatatatataaatatatataaatatataaaaatatatataaatatataa

SEQ ID NO: 27453 - DNA, 201 bp, Homo sapiens
atatataaatatatataaaatatatatataaatatatataaaatatatataaatatatataaatatatataaaatatatataaatatataaatatatatawatatatatataaatatatataaatatatataaatatatataaatatatatataaatatatataaatatataaaaatatatataaatatataaaaatatat

SEQ ID NO: 27454 - DNA, 201 bp, Homo sapiens
aaatagacaagtagagatagaagagtaatttttaatttgctttaaaaaatctgatgtattaatgtattttattgactttcatagaaagaattcaaatttakttaaatttcaattgtatctactgcccttgttaggaggctttcaaatggaagaattgatataaggggtcttggcctgtgccccatacacttttgcctatgt

SEQ ID NO: 27455 - DNA, 201 bp, Homo sapiens
tatatataaatatataaaaatatatataaatatataaaaaataaaaatataaatataaatatattaattatattaatatattatattatattatagtataktatagtataataaaaaaatactaaaaaaaaattgccattctgactggcatgtgatggtatctcaatgtggttttggtttgcatttctctaatgatcggtg

SEQ ID NO: 27456 - DNA, 201 bp, Homo sapiens
aaattaggctatattcaatgatgctagctagcatcatcgtgtgtgtgtatgtatacatatatataacatatatattctcatatatatatatatatatatayacacacacatacatgcattatacatatatatatatatacaattccggaccgttgactctggatcaagggtccggaagtgcaatccactgttgattctttg

SEQ ID NO: 27457 - DNA, 201 bp, Homo sapiens
tttttacctgagtaatgcatacctagtataataggctacagtatttcttgaaatgtagagtccgtatcagtggtggtataaaagattgttttacatgcaaygagatatgctggtatataatattaagtgttttgctaaattatttgcctttcatttctactctaatgttactgattaagataaggggagcagatctcacct

SEQ ID NO: 27458 - DNA, 201 bp, Homo sapiens
tactcttctagacttgtgtttatatatcatagtaaatttttggaggacttttttttttccgtttatgtatgtgttacttttcctgaaaaacatcagtgctkttgtatcacaggattggagggaaattaaaggtagagctcaatttatgaaatgcctaacaagtgatcattgttaagcttttgcctaatcactaccataata

SEQ ID NO: 27459 - DNA, 201 bp, Homo sapiens
caaaagaatgagctaaaatattttattctgtgaggctaaaaactataactaggatgaggaactcttttctcccaatacaaattatagaatttcaaagcagraagagcatcttgttttacccctctttgtacagatgggaaaaagagccccaggagagcacaagatttgctcgtgtctcacaggcatttactgaatggcaaa

SEQ ID NO: 27460 - DNA, 201 bp, Homo sapiens
gcccaaaattccatttaactgattgattaatgagggaaccagtaagatgttacaactgattcaaatgagaagttaaagtatcacatacatttaaagtcagraaagaagtgctaaatgaatttacaaaaaggtgcataaggctggacacggtggctcatgcctgtaatcccagcaatttgggaggctgagataggcagatca

SEQ ID NO: 27461 - DNA, 201 bp, Homo sapiens
tatggagaatgaaatgaaaggaagccaggagtaaatgtgggaaaaccagcagccaggacagtggaggagagcatctttgaccagtgtgatggtacgggagrgtgaaaatagatggactttagagacgtttagtaatagttttaaactcatgtgctgtaaattcgatttgattttaagaggtgacaggaaggcaggaggcaa

SEQ ID NO: 27462 - DNA, 201 bp, Homo sapiens
gcctgtaatcccagcaatttgggaggctgagataggcagatcacttgaggtcaagagtttgagaccagcctggtcaacatggtgaaaccctgtctctactaaaaaaaaaaaaaaaaaaaaaaaaaaattaattccagctacttgggaggctgaggtgggggaattgcttgaacccaggaggcagaagttgtagcgagccaa

SEQ ID NO: 27463 - DNA, 201 bp, Homo sapiens
tcagtctactcctattggtttcagtttataaattctgcctggagtggtcatctctttcctaacttggttacagacagtccatggatttccacttttgtgayagaagatggaaaaaggtgaggaggaggggacagcagatcacataggccatgaggggtcactgcaagactcgttctgaggcagatgggataccatcaaagg

SEQ ID NO: 27464 - DNA, 201 bp, Homo sapiens
ggaattgcttgaacccaggaggcagaagttgtagcgagccaagattgcgccactgcactccagcctgggcaacagagagagactcaggcttaagaaaaaawaaaaaataaaataaaaaaagtggtcagtttctacaaggcaatattcaattgcattccaatggatacaacatccatttctatttttgttatttttctgtta

SEQ ID NO: 27465 - DNA, 201 bp, Homo sapiens
aacaatgcaaacaaatttgcatttgattacaaaaactcacaagtcttacaaaatatgaaaatttaatggaagttaattaaaacagtattagggagttaaaktgtaagcaaagccactgccaaatgaggcatcctaggagccagataaggcaacagtagaaggagagagatctgatagggacttcagatgcttcgggtgctt

SEQ ID NO: 27466 - DNA, 201 bp, Homo sapiens
tcaatggatgataccagtcacaccatttgaaaaaagcatatgacagtgttgttcagtgttggtgaacaggaattcttgatatttatttttaaggattccawttaattgctaattacagatctttgttaaattaagccgaccttcactcacatttaaaaaatttaactttgttttggttttcatgagacaaatatctctctt

SEQ ID NO: 27467 - DNA, 201 bp, Homo sapiens
agattttgaaaaggcatttaatgttttccgttaccgatatttacctagtttcaccactgttctctttatgtctgacatacacatagggatgtttcataagkctttgtcttcttttacaggtatcttacagactttttgaagacatgggcctctttgaagcttttaaaattccaattagggaatttatgaattattttcatg

SEQ ID NO: 27468 - DNA, 201 bp, Homo sapiens
tatctctgaactttctctattttacattgaatatttgctacattgtaagcattacagtatgactagattcttctttttttctaacttctcccctgttgatrattattcttatataactataatgccatgttaatcaaactattgtttatgaattataacagtaaatgcccctggttaatagattaatcaacctgccttaga

SEQ ID NO: 27469 - DNA, 201 bp, Homo sapiens
gctgaatagagggattgcttgagcctgggaggttgaggctgccgtgagctgtaattgcaccactatactgcagtctgggcaagagtgagtccctgtctccaaaaaaaaaaaaaaaagagaaaaagaagcagttcccctaatgattctggatcattatgccagaagtatccaggttcaaagcgatattttatattttagtaa

SEQ ID NO: 27470 - DNA, 201 bp, Homo sapiens
aagaagactagatcaaaatcaaatgaataattcctcagttttcaaaaaatattttatggtcttttgagggcataatattagtgcatgtaaaaactagaacsctttatgatttgaaaagaggagaagatgctgagagagacactcttggaagctgggcaggaaatccagccatgcattgcctcaaggtctgtcattagatca

SEQ ID NO: 27471 - DNA, 201 bp, Homo sapiens
ggtataacatctagcaaataggtacttgatgacatttttatgaatactatgatttatcaaaataagtatatcctgagaagtatatatttatagatgaaacrgtatttacagagaatagactctagtttagagaaactgaagagcattagtaaaagtgttaataagaataatattttaagtactatgagggacttttttcct

SEQ ID NO: 27472 - DNA, 201 bp, Homo sapiens
agttggctgatatcaatggtccagctaaatgtaaagaactccatcttcagtggacagatggtattgtcaatgaattttatgaacaggtaactgaccactgyttaatacagcttaatctgtacttacaggttgctcatgaattgctcaaagcttctaacagctatgaaagtatgatcactctattttatattcatacttttg

SEQ ID NO: 27473 - DNA, 201 bp, Homo sapiens
aacattttagaagcaaaatcatttaactttgtttgcattttgagacaaggagctaactgtgtgtatcatcttgagtagtgtctgtttttattcctagggaytgttttccctataattggagttgttttttgctaggtaagtaggatccaaataacagcatagttattaaggcagtagcctcgttttgtccacttctcgtca

SEQ ID NO: 27474 - DNA, 201 bp, Homo sapiens
ttcatgagataaatctaatgtgagtatccaataatagattcaaatatttttcaagaattgactatgagtctgtgaatatatattaatgactatacaatacttttttttttttttttaagagatggggtctcactgtgtaactcaggctggactctagctcctgagctcaaatgattttcccactcttagctcagccacact

SEQ ID NO: 27475 - DNA, 201 bp, Homo sapiens
ttttaattgtgatcaattacaaaacaaagtttgagatggttgcttccagagatgacattgtgaaattgactttttaaaaatgtcatccaactgccgtgctrgttccatcatgtggaatgatctagaaatttggtagcataattgcagaatcaagttgaactgaaaaatcagaagcttatagggttttattgcagtgataaa

SEQ ID NO: 27476 - DNA, 201 bp, Homo sapiens
gatttattttatgttgaaaattctgacttatttttaaattgtttattccatctcataaacttctatttgttatttaattttaggaactttgaaataaaagtttttttttttaatatatcttatgtcctgtgtgcaagtctaatggatagatctgtaccttgaagttccaacttctgccctcagagatgaaagtgacaaaca

SEQ ID NO: 27477 - DNA, 201 bp, Homo sapiens
tttttttgttattgcaaattgtatttgaaggggtgtctctccattctctttataaataaagaactataattggctgctcattcttctctaattactgagaycaccttacacattcacttttgaaagatttcaaaccaatgcaattttattttagttacctgttaaggaaaattttatatttttacctgtggtttcaggtaa

SEQ ID NO: 27478 - DNA, 201 bp, Homo sapiens
ccaacaagatggagtttgagggactaaaattgattttaagaataataatgttgttgttcctttttcaaatcttttaacatggaaacattctgatttggttgggggggggggcttttgacatcatctgtttcaccttatcactgtgtactttcaaaatatcttcaagatgctttcattgaagcaacaagaaaattgttttga

SEQ ID NO: 27479 - DNA, 201 bp, Homo sapiens
gaaataaaagtgttaattctctctgatctgaacaagccaggactcagtgtcagccctttataggtcaggctgtggaaggaatgcataggatgaaataccastgcatgcctggtgcactaaaactaaatgggatttcagcagatgaagggaaagggtgaggaatcaagccttaaattgtctgcctcaggcatggtaagaaga

SEQ ID NO: 27480 - DNA, 201 bp, Homo sapiens
caggggagacatacagttcaggctcatcttctcacatggaatgctgcagagagcaaatataggtagcatagaaattaaggaaaaagagtatgccaaggaargaatccaatcaaacatgcccaggttaaagaagtgcttttagtttcttatcaaatcaaaaaccgtgtgctcatcagagtaaatgtggttctaaaaggcaac

SEQ ID NO: 27481 - DNA, 201 bp, Homo sapiens
agccactcggacaccaagtagaacaggtaattcattgttttggattctgttgcccaaaatggaaattgccttatttttgttttcctgatcaaaacagtgayctacatttctgatattttggggggcgctgggagacggggtctcatgatgttggccaggtcggtctcaaactcctggcctcaagtgatcctcccgcctcag

SEQ ID NO: 27482 - DNA, 201 bp, Homo sapiens
tgctacagtctgagaaattgtatgttgtttaaatgcaatacatcacaatgtttgataaataaaaataaaaaccgttaaacctatccaaatgcaagaactcmtaaatattgttgagttaaagcttttgatgcagctgaggctatgtctggattttattattttccctaggatttccaattttttctaagaaaggagatcaat

SEQ ID NO: 27483 - DNA, 201 bp, Homo sapiens
gaacaggtaattcattgttttggattctgttgcccaaaatggaaattgccttatttttgttttcctgatcaaaacagtgacctacatttctgatattttgkggggcgctgggagacggggtctcatgatgttggccaggtcggtctcaaactcctggcctcaagtgatcctcccgcctcagcctcttgaagtactaggatt

SEQ ID NO: 27484 - DNA, 201 bp, Homo sapiens
ttgtatttttaatcaatatatatttgtacatatttatgtggggcacatgatattttgctacattcatcaaatgtgtaatgattaaatcaggatatttagartatctgtcacctcgagtatttgtcatttctttttttttttttttttttttgagaccgagtctcagtctgtcacccagtctggagggcagtggcacattct

SEQ ID NO: 27485 - DNA, 201 bp, Homo sapiens
tgacttgaatatattatcccattatctcctggactgaatgatttctgctgagaaatctgttagtctgattggagtttccttataagttactagatactttycttttgctgtttttagaactctctatgtctttgacttttttttttttttttttgagatggagtctcgctctgtcccccatgctggagtgcagtggcgtga

SEQ ID NO: 27486 - DNA, 201 bp, Homo sapiens
aagtggctggggtgggaggattgtttgagcccagtagctcaagatcagcctgggcaacatagtgagatcctgtctcataaataaataaataaataaataaatacataaataaataaataaataaataaaatctagctggacattatggaaaacagtatggaggttcctcaaaaaactaaaaatagaactcccatgtgatcc

SEQ ID NO: 27487 - DNA, 201 bp, Homo sapiens
agtggctggggtgggaggattgtttgagcccagtagctcaagatcagcctgggcaacatagtgagatcctgtctcataaataaataaataaataaataaatacataaataaataaataaataaataaaatctagctggacattatggaaaacagtatggaggttcctcaaaaaactaaaaatagaactcccatgtgatcca

SEQ ID NO: 27488 - DNA, 201 bp, Homo sapiens
tggagtgcagtggcgtgatctcagctcactgcaagctccgcctcctgggttcacaccattctcctgcctcagcctcccgagtagctgggactacaggcacrcgccaccatgcctggctaattttttgtatttttagtagagatggagtttcaccgtgttaggcaggattgtctcgatctcctgacctcgtgatctgcctgt

SEQ ID NO: 27489 - DNA, 201 bp, Homo sapiens
gtggctggggtgggaggattgtttgagcccagtagctcaagatcagcctgggcaacatagtgagatcctgtctcataaataaataaataaataaataaatacataaataaataaataaataaataaaatctagctggacattatggaaaacagtatggaggttcctcaaaaaactaaaaatagaactcccatgtgatccag

SEQ ID NO: 27490 - DNA, 201 bp, Homo sapiens
tcattctgtgcaaatgagaaatatctcaggggaggactcaggcccgacttgggccacacacacacccattggccagtcactgtgaaacaattttgtagacyggttgtgagggcagaagtagaatttaacaaccttttctggaaccacataattgaaggaagggggaaaagttccccctaaatgattttggacgcacagtta

SEQ ID NO: 27491 - DNA, 201 bp, Homo sapiens
tggctggggtgggaggattgtttgagcccagtagctcaagatcagcctgggcaacatagtgagatcctgtctcataaataaataaataaataaataaatacataaataaataaataaataaataaaatctagctggacattatggaaaacagtatggaggttcctcaaaaaactaaaaatagaactcccatgtgatccagc

SEQ ID NO: 27492 - DNA, 201 bp, Homo sapiens; identical to SEQ ID NO: 3128

SEQ ID NO: 27493 - DNA, 201 bp, Homo sapiens
tatcatccagttacctgatttgattattacacattgtatacatatatccaaacgttacatataccccaaactatgtacaactctgatgtatcaattaaaawgtaaagaaaaacaaaacagaaaaaaagctggaaaaggaaggcttgagatttgatgcactaaattctgtgtacttttggaaataatattaacataaggtgg

SEQ ID NO: 27494 - DNA, 201 bp, Homo sapiens; identical to SEQ ID NO: 3117

SEQ ID NO: 27495 - DNA, 201 bp, Homo sapiens
tgcaactatttagttggatgtaaaatcctacactcttcagttgttaaatctgtctctgaatctagtcatccctcaggggttttattaatctaaatgaccamcattatcacagctgcaactcatcttaagaactatttctcagaaaaaaacagtaagtagctagtgactctgtacacagagaaaaaaataaagaacagttta

SEQ ID NO: 27496 - DNA, 201 bp, Homo sapiens; identical to SEQ ID NO: 3119

SEQ ID NO: 27497 - DNA, 201 bp, Homo sapiens
agtgaccaaatacttctgccacttaaagatgggggaatatttctttttccttaacatctatcacttataccaaatgtaggagaggaaaaaatgtgtgtgaktgtgtgtgtgtgtgtgtgtgtgtgtgtgtgtgtgtgtgtatgttccttcttttaaaattcctgagctcctctctttcctcccatgttaaaatcggtagca

SEQ ID NO: 27498 - DNA, 201 bp, Homo sapiens
ggtagcatgtccaagcctctgggcctactgccttcggttagctcacacttgctttttcatgtgaagtttgttctatggcataatcttagtaaagcgttttwaaaacaaaaagatacggaggctttttacaaccccttcgcctaattatatgattcattaaaagaatcttgggggtgggcatggtggtgactcatgcctgtc

SEQ ID NO: 27499 - DNA, 201 bp, Homo sapiens
aaaagagaaaaaataagtaaatggggccacatcaaactaaatagcttctgcacaggaagggaaacaatcaacaaaatgaaaaggcaactgacagactgggaaaaaaatattggcaaagcatgtatctgataaggaattaatatccaaactttataaataactcttataacacaataggggaaaaataacctgattaaaaag

SEQ ID NO: 27500 - DNA, 201 bp, Homo sapiens
tggggtttcaccatgttggccaggctgctctcaaactcctgacctcatgatccacccgcctcggcctcccaaagtgctgggattacaggtgtgaggcaccrtgcccggctgcatcagtcttcattttatagacacattgaaagatatcatggaagcaaactgttgaacaaaacatgttactatgaactcccatatttcaaa

SEQ ID NO: 27501 - DNA, 201 bp, Homo sapiens
atttctaatattgatgatactggtgtttcttaaattcactaaaaaattttatttgtaaagggtaacctgcgttacattatttaaagtttttattttaaggtttttttttttttttgagatggagtcttgctttattgccctggctggtgtcaaacttttgggttcaagcagtccccacgccctagcctcctgagtagttgg

SEQ ID NO: 27502 - DNA, 201 bp, Homo sapiens
ttgtaagcctcaagtatacacaatgcaaattatttttaaaataagtaaataaaataaaattctacttttagctcagaaaaataaaattaaccctatagataacaaatatgacatatgcatgactatgtatcctaaaattattaatattacacttaaattttcatattggttcataagagatatttatgcctgtgatcagag

SEQ ID NO: 27503 - DNA, 201 bp, Homo sapiens
tggagtttgagggactaaaattgattttaagaataataatgttgttgttcctttttcaaatcttttaacatggaaacattctgatttggttgggggggggrgcttttgacatcatctgtttcaccttatcactgtgtactttcaaaatatcttcaagatgctttcattgaagcaacaagaaaattgttttgaacaaagacc

SEQ ID NO: 27504 - DNA, 201 bp, Homo sapiens
ctcctttattcagcaacacattgttgctaaatgtggagtggggtatcattttgaaatacttcccatacaaaaccttgatgatcctgcctgacatctgcccrctaaatgtcttggtgagccaccatgtctgctgatcctaggataatcatattttttaattgtctcataacattctgaatataataagattacaactgaaac

SEQ ID NO: 27505 - DNA, 201 bp, Homo sapiens
ataaatctgtaattcaaaccaggttttattattgccttaaaggcagccacccatgtaggcacagagagctccagaaacacacaactaattgttgtggtttcccctgctgaacttgaagagtttggcgttgaatcccagtctcttggctgctgtaatgtctatgcaacaagctatttttctggcatgagagctggcatattt

SEQ ID NO: 27506 - DNA, 201 bp, Homo sapiens
catatactatcattctatttcaacctatgctgtcttaaagttctgtttagacataaaaatatcataacccaattaaataaaataaatctaataatgaggcttttttttttttttttgagatggagtcttgctctgttacccaggctggagtgcagtggtgcaatctccactcactgcagcctccatctcccaggttcaagc

SEQ ID NO: 27507 - DNA, 201 bp, Homo sapiens
ttgtaacttaggaaactaaaagtcacaagcctgctcctagctttaatggatgaaaattgtaacagtgtctgtaaagggctaacttttcactactgtttatwtaaataccactttcatggaaacacaatgaaaatggttcattctgtgtatagagcagattggagattttgatagtgtggaatttttaaagtaggaatttag

SEQ ID NO: 27508 - DNA, 201 bp, Homo sapiens
cattctgtgtatagagcagattggagattttgatagtgtggaatttttaaagtaggaatttagattaggtgagttttggagccattttctgagttcactcyggtttgcaatttcaaactgatttcagatgaaaaagtctggaaatgtttaatgtcatgtcctctccatcacctttccttatactctatgaattcgttaaca

SEQ ID NO: 27509 - DNA, 201 bp, Homo sapiens
atttggacaaaatgaaataatgtggatgctggctcgcttctggtaaaagctgacttaatttagagttcttgaagaagctagctgaagaatgaaatgtcatygtaacacacatctgtttcttgaaagagtttatacttgaatgtaactagtcactgttagctctggctaattttgaagttgatttaaattaatatagaggtt

SEQ ID NO: 27510 - DNA, 201 bp, Homo sapiens
agaactatatagaaatattattttatcttgctacttctgacattggaagtactttaagtggttcccaaaacatagcaaatactcaataaacttccttcagkcaccttagtcagctatgagaaatgtcacagttgctcagagaggatagacttcagactctgggtgtttactgattggtcttttagttagcacagtttactg

SEQ ID NO: 27511 - DNA, 201 bp, Homo sapiens
tgaaaatgtttgttttaaaccataaaacaaaatgatggatttgctgtactatggaatagctatcgaaatacacacccttaattaaataaagaggatggtgygataatatgtatcagcttatcttcacatgttttaggtgtattcttataaatttgaataagtatcacagcagagatagtaaagaccatcaaacttgtgaat

SEQ ID NO: 27512 - DNA, 201 bp, Homo sapiens
tccatcacgaatatcagttttccatgtgccttagacctgtcttccatctaataagacttcacactgctcacttttcctttctgacactgaatacacataawcaacagagagcaatgtctcttaaacccataaacccattcaaaaaccaaaaccaaaccaaataaaatgaattggttgtattaatttgtatcatccatttac

SEQ ID NO: 27513 - DNA, 201 bp, Homo sapiens
ccaacccactgaacaatattttctagacaataatttatgaatctacccacatcttttaaacaaggatagacaactttataatacagatataatgaaatttaaaaaaaaaaatttatctacttatatgtatctcggttgtcgttgccagaacactgctataccctttgtgttattgtttttatatgtttagatatttgtaga

SEQ ID NO: 27514 - DNA, 201 bp, Homo sapiens
aacaggaatcaggaaataaaggacagcgatgaaaagctgaaaactgtgagggtctcacacagcaatatatgaaagcacctgtgaactataatgcatttatwtataatacattgatttattgtattaatagtaaaatacaattatttagtgtattaagaatgtgatatgactaggatgttatttatcttgagttcattaaat

SEQ ID NO: 27515 - DNA, 201 bp, Homo sapiens
agcaattaatacaataaggacttttctaagtctacataataattttaaaatctttttttaaatgtaaaatgcttaaagatgccaagatgtaattttaaaayctttttcttttttcttatttgatgggggtgtgtatgtgtgtgtgtgtaaatgtagagaaatgaattacttgcccaattggaagggaccttcaaaagatcc

SEQ ID NO: 27516 - DNA, 201 bp, Homo sapiens
agcctctgcctcctgggttcaagtgattctcctgcctcaacgtcccgagtagctgggattacaggctcatgccaccacgcctgcctaatttttgtattttgtttttttagtagagatggggtttcaccatgttggccaggctgctctcaaactcctgacctcatgatccacccgcctcggcctcccaaagtgctgggatta

SEQ ID NO: 27517 - DNA, 201 bp, Homo sapiens
tcactcacaggatgtttttgagcagagtgagcaatgtgttcctcccaattactctgtctcatctcacccatccctctcttcaaccctgcctttaaactacygagataaaccatttggaattacagatctgatcatatagtgcatgtgcttatgatcctccggggcccacagcatgcatttcttgtttcttcccatggtgta

SEQ ID NO: 27518 - DNA, 201 bp, Homo sapiens
gggacaataaaattgtactatttagtatgactaatataagggtgtctttgtggcatgtggtgcatattctataaattcttgttgtattgaatggaattaartaagagtttggggacagaagaatccctggtgtattagtatttccctagataattttttcttgtaattttgaattaatgaagctaataattaacttgtaga

SEQ ID NO: 27519 - DNA, 201 bp, Homo sapiens
gcctctgcctcctgggttcaagtgattctcctgcctcaacgtcccgagtagctgggattacaggctcatgccaccacgcctgcctaatttttgtattttgtttttttagtagagatggggtttcaccatgttggccaggctgctctcaaactcctgacctcatgatccacccgcctcggcctcccaaagtgctgggattac

SEQ ID NO: 27520 - DNA, 201 bp, Homo sapiens
aaattaattccagctacttgggaggctgaggtgggggaattgcttgaacccaggaggcagaagttgtagcgagccaagattgcgccactgcactccagccygggcaacagagagagactcaggcttaagaaaaaataaaaaataaaataaaaaaagtggtcagtttctacaaggcaatattcaattgcattccaatggata

SEQ ID NO: 27521 - DNA, 201 bp, Homo sapiens
gtggagtggagtgagaatgttttaagtcatggacattttgggtattccattcatctttaatagctgtatgtgtttaagaggagataatgcttatgccagayagagaaagtaacctagttacctcttgaggtattgtggcattggtataattatatattatatttatatttacatatatatgtaaatataatttttttcttt

SEQ ID NO: 27522 - DNA, 201 bp, Homo sapiens
tgcactggtcaattttgatcaggagacaaaaagtgacgtataaaaattggactaaaatataatcatagaactctatgataaaagttatttgcaagcatttggggggaagaagatattgagatagtggaagtcagatgttaggaagatccttgaaatactgtttttttatagatttatttattatcatagaaggtagtttaa

SEQ ID NO: 27523 - DNA, 201 bp, Homo sapiens
gtgtatcatagaaaaagagaatgaaaaactgaatctacaagtgagattttctgaagaatgtgggaccaaaatacagacagagtaaggcagttggagtacgkgaaagaggagctcaacagtaccagggcccctgggaacatctggctgacaaatccatggaagttggaagagaaacatgaaaaaaggggtagttggaaagga

SEQ ID NO: 27524 - DNA, 201 bp, Homo sapiens
taaattactcagtcttgggagttctttatagcagtgtgaaaatggactaatacagtaagttggtaccagaagtggggtgctgatataaagatacccaaaawtgtggaagcaactttggaacacagtaacaggcagagattggaacagtttggagggctcagaagaagacaggaaaatgacagaaagtttggaacttcctgg

SEQ ID NO: 27525 - DNA, 201 bp, Homo sapiens
caaccaggatcactaattgcacaaagaaacaccatgagtttgagttaacagaaacaaaaatacaactttctagatctgtaaaagggttaaaatatttaaaytaaaatttaatttaaaaatttacatatttaaggaaaaataatagcaatgagaaaagacataactgcagagcagctaaatgtaacttttggaaatgtagtc

SEQ ID NO: 27526 - DNA, 201 bp, Homo sapiens
gatgaagaattgggaagtataatagattttaggagatatagaaaaatgagtctaatgtacatgatatatgtaatcatagttttagtagcagatagaagacaaaaatacttaggtgaagcctagtaaatggaaagaaactcacacgtagatacaaaatagtgaaactacacaacaccaaagatatacacaaacaaaaatcct

SEQ ID NO: 27527 - DNA, 201 bp, Homo sapiens
taaaggaaggctgtccttgttgctttgaggaatgcagatgactgattccattggttctgagtgctcagtttgtggcctgactgaattatgtgcaccagatytggtggtaggtttttgtgaattgacctcaccccggttgcatcttagcttttctccaccttttaggggatatactttcctcagccgtttcatttaaattgt

SEQ ID NO: 27528 - DNA, 201 bp, Homo sapiens
ataggtgctatataaatatttaaattaggatagctgattgctctgtaagttaggagtttgctaattctacattgtggttaatttctgattatgaaacattktttacatactgcttgggaacaacaaaagataagatattttaaaatgtgtgaaatgaagagtttttaaatcacatgggaaaatacttttgatgagtggaaa

SEQ ID NO: 27529 - DNA, 201 bp, Homo sapiens
aagacttgagtgttttaagattaggttgaggaatttgatattttatgtgtaccaaacattatattttttaaccaaagagtgatgtgaacagattaaacatrattattctagcagtggattaggtggggacccaaatggacacaaggaggcgtttaagagggtattgtgaaagtcctgggtagagacattgaagatttatta

SEQ ID NO: 27530 - DNA, 201 bp, Homo sapiens
tattatattgtaattatttacatgttttgtttccctctagagaatgagagttcctccaaggtggagactcattcagcttttcgtctctcttacataacctktgcctggcaggttgtaggtacccagtgattattgaattagttaatatacgcaatatggatttgcttgtcagagcatgagtatccatggctttctgaagtc

SEQ ID NO: 27531 - DNA, 201 bp, Homo sapiens
tcttttctgtttctctttctattgatcatggggctaggaaaattgctacaaattatattttgctatttattttttgtgacatcaagagcaataatgtgtgytaagtcagaggaataaatgtacagcctagtattaaagtaatgctcctttaccccctctgcacactcgcatgttgctttcctaacaaacacgcaaatatgc

SEQ ID NO: 27532 - DNA, 201 bp, Homo sapiens
gcaagatggcttttgtccatttcctctttgacttgactgtgctactgaggaaacagtaggaaaggagtcaggctgctaactttaaccctgggtatcatttktaatttttcccatggagccaactctaaattctcattcagcattagaagactgaataatcagattgagtgtcagatgtgtaaataacacaaaacttgttaa

SEQ ID NO: 27533 - DNA, 201 bp, Homo sapiens
atgaaagttcattggaaagtgggggcttctcccaagtgtttacaaagctgatttgttcttgtgttgtcattaaacttgtgtgaataactctatttaattcyggtcactaggaaaacaaaaccaagtcaatcaattgttttagttcacattttaatgactgattttatttctgtccagtatcaatttgattagtaaataatg

SEQ ID NO: 27534 - DNA, 201 bp, Homo sapiens
accaaacattatattttttaaccaaagagtgatgtgaacagattaaacataattattctagcagtggattaggtggggacccaaatggacacaaggaggcrtttaagagggtattgtgaaagtcctgggtagagacattgaagatttattaagatagtagtggtgggcaggaaaggtgatttaagaaaaaaaaaaaaaaaa

SEQ ID NO: 27535 - DNA, 201 bp, Homo sapiens
agaaagagttattgttgtgagttatactgtcctggatgtgtgaagataatcaatgcaactattgtatcatgcctttgcattgggcgatggggaaatgtctyatgctcccggaagtgatgcataaccctacaggtttatggtgaattgtttacttagctgccatatgtctcctcttcagtggagtcttcctgctccatttct

SEQ ID NO: 27536 - DNA, 201 bp, Homo sapiens
ggaattagtcaaatccctgctctgccatgtattaactctgtggctttaggtaaattgtaatgcttaatctctcaaagcttaggttttcttatatagaaaattttttttaagctaccccagaaaaatgttttggggattgactgagattataaagatgctaataataataacttaataaaccttgtatgttgcttactctaa

SEQ ID NO: 27537 - DNA, 201 bp, Homo sapiens
caaaatggaaattgccttatttttgttttcctgatcaaaacagtgacctacatttctgatattttggggggcgctgggagacggggtctcatgatgttggycaggtcggtctcaaactcctggcctcaagtgatcctcccgcctcagcctcttgaagtactaggattacaggcatgagccactgtgcccagcctgattttt

SEQ ID NO: 27538 - DNA, 201 bp, Homo sapiens
tagcaatcatgaggctgaggtgcaacttagactccagtcccctataaaatataccttatagagtttagagatttgatgcaattcaaagcaaatttactatrttgaacatcagcaatgtcccaaagaagaccataaaattctgtggtggttaaaatctgttgtttaaacattagaagtataatattaaacatttctttctgt

SEQ ID NO: 27539 - DNA, 201 bp, Homo sapiens
attttatccataattcgtttactttttttgtgaactatttttaccattaatttacacagccaataacatttttaagtagctagaggttcccaattatttgrtattatgatccctatataatatgaagacaataaatgttctattgtttttctcttctcttcaacttttgtttttatcaaagcaaaacatatattaacttta

SEQ ID NO: 27540 - DNA, 201 bp, Homo sapiens
ggttttcatttgaaaaaacatattacaaactgagacattcactataaattaaattgaaataatcaaaatataattaagctatttgtgagtttacattttgyaaaacattttagaagcaaaatcatttaactttgtttgcattttgagacaaggagctaactgtgtgtatcatcttgagtagtgtctgtttttattcctagg

SEQ ID NO: 27541 - DNA, 201 bp, Homo sapiens
atctcttgcctggattatagaactgtgtcataacaggtctttctgcttggagttacccaccttcacttgaccacaatctgtgatacccagtttctttttctttttttttttttttgttttgagacgtggtctcgtcctgtcacccaggctggagtgcagtggcgccatttcggctcactgcaagctccgcctcccgggttc

SEQ ID NO: 27542 - DNA, 201 bp, Homo sapiens
ctaatctattttctatctttatagatttgcctattccagacttttcttataaaagtaatcaaaatatttgcagtcttttgtaattaccatctttcacttakcataatgttttgaaggtttatccatggtgaagtatgtatcagtactacttcatttctttttgttgccaaataatattccattgtatggatataccatttt

SEQ ID NO: 27543 - DNA, 201 bp, Homo sapiens
gagtgggttctgaagggtgagtggaatttgaacagggagagacctgagaaagacgtagtcgaaggcaacatcattagtagcagaagagtgaaaaaaatatrgtattgaagaagaatagtgcaattatgtaatgggtcataaaatggattagattgacaagttaattctcactaagagccaggtactttgctaaaataagca

SEQ ID NO: 27544 - DNA, 201 bp, Homo sapiens
cccagtgatttctatactgacctcaagtagttgtttcatttgccctatcttaattcctactggtgatttcattaggaataagggttttgataagaatagckttaaactggatttcagtaatgagatggtactttgtagaagctaatggttaagagcacaacaggctgtagagttgcagactgcctgggatcacttactaga

SEQ ID NO: 27545 - DNA, 201 bp, Homo sapiens
ttggaggatttctcattttctatccctaagccgtgcacagctcataaaaaacagtagttgccaagtgacaggtgtttttggaaaacttgcttagtttatamgttcagagaagacattgcctctaaatcagcagctactaatgaccttttgttccagggagttgttagagatccagatgaagtcctgtaattgaagcatagt

SEQ ID NO: 27546 - DNA, 201 bp, Homo sapiens
tgaaatattcttgcaagaggcaatatttgactcagtattttcattggtcatttagattttacttttgactttaattactggtattctagccttcaatggtwgactgtttcatgtttctccagaaagttaggtttcatttttattttctatagtttatgagtccatgcttgtaacttatagggaaatcataaaaacagaaca

SEQ ID NO: 27547 - DNA, 201 bp, Homo sapiens
aaatgatatagcctaataagagagctttactctagtggccttcattatagcccatgtgcaggatgattctgaaatatataaattaaatgaatggaaacagrcatgttgacaagtttgtttagcaccaacgattggatatgctattcttaaaccaaaacttttgtttactcattcattcctagaatttcagtattttaagaa

SEQ ID NO: 27548 - DNA, 201 bp, Homo sapiens
atatagcctaataagagagctttactctagtggccttcattatagcccatgtgcaggatgattctgaaatatataaattaaatgaatggaaacagacatgytgacaagtttgtttagcaccaacgattggatatgctattcttaaaccaaaacttttgtttactcattcattcctagaatttcagtattttaagaagtctc

SEQ ID NO: 27549 - DNA, 201 bp, Homo sapiens
aacaagtattataaatgaaaaaaaccctcatagctccccaatataaatggtgaaaaatataatcgttaaaacattcctcttctaatttataaggttacccytttttgctggtttatctctattagttggttttcctcttcagtcacctttctaaaagtggataagctgtaggacccattaacattttactggcatgataaa

SEQ ID NO: 27550 - DNA, 201 bp, Homo sapiens
caatattctgaattcaaaattctgttgttaaggatggtgtaaccatatatgacaaggcttttacaaactcctttttgaacattgctttaagcaatcatttstgtatttgtattaattttcaatctaatcattccaaatgaggcaaagttttgtgtaccagtgattgaattagaagaaagaacaagttattttgtatagtct

SEQ ID NO: 27551 - DNA, 201 bp, Homo sapiens
gtagtttgtagttgttttttgcctttcaaatgaaataaatacctccttgtttgggattcaggaccctctctaatctacccttcttaacattcagtcatttyaaactgctactgccttcatcacatcaattttctagtgactttgaagcgtgccttttctctctcaagacagagataggtagatctcttgaggtcctacttc

SEQ ID NO: 27552 - DNA, 201 bp, Homo sapiens
tttagatttctacttcaacttcctaatgaattattttctttcaaaggctcttcctggaatttttctgtttttggcaggtatgtttgcatatctcaagtgasacaatttggccaggtttctgaaaaagaatactttaaaagaaaaatgtaggttggctcttaagtgttttaatgttatttgagataaactaaaatagagcat

SEQ ID NO: 27553 - DNA, 201 bp, Homo sapiens
tgagttcaactttcttagattccacatgtaagtgagatcatgtggtatggcttatttcacttagcatgatatcctacaggttcacccatgttgtgcaaatrgtaggattttctcctttttatggctgaatagtatttcattgtgtatgcacacacatacatatacacacatcacatgttctttatccatttatatattgtt

SEQ ID NO: 27554 - DNA, 201 bp, Homo sapiens
tatactatacagtttgggatcagcatagatgttgattacaggctctgtgatctagagaaagttacttagcatctctgtgccttttctttctctatttaatrgggacaatatttcctatctccaaatgttattacttaatcttgagataatttgcttacagcatctgtcaaagtgccaaacatatagcaggtacacaatata

SEQ ID NO: 27555 - DNA, 201 bp, Homo sapiens
ctgattagtgtgagatggtatctcattgtggttttgatttgcatttctctaatgctcagtcatgttgagctttttttcatacgcttgtggccacgtgtacrtcttcttttgaaagtgtttgttcatgttctttgcccactttttaatggagttgtttgttcttttcttgtgagtttaggttccttacagatgctggatatt

SEQ ID NO: 27556 - DNA, 201 bp, Homo sapiens
cagttaacgaaattgtattgtattacagatttttgttaaataaggagatttcagctgctcttgtcacaaaaatactatgcaagacgctagataatgttaayctgtctcactatagtaaccatttgactatctgtacatatacacataacatgttgtaagcctcaagtatacacaatgcaaattatttttaaaataagtaaa

SEQ ID NO: 27557 - DNA, 201 bp, Homo sapiens
atgcaagacgctagataatgttaatctgtctcactatagtaaccatttgactatctgtacatatacacataacatgttgtaagcctcaagtatacacaatrcaaattatttttaaaataagtaaataaaataaaattctacttttagctcagaaaaataaaattaaccctatagataacaaatatgacatatgcatgacta

SEQ ID NO: 27558 - DNA, 201 bp, Homo sapiens
ttctatgagatgctggaagatttcttaaaagtgaagagggtgaaatggggaggtgttagtcaaagggtatacagttttggttatgcaagatgagtaagttytaaagatctgtgtagtatattgcctacagttaacagtacatactctgttgtagacttaaaaagagggtagattttatgttgtgttcttatcacaaaaaaa

SEQ ID NO: 27559 - DNA, 201 bp, Homo sapiens
ttacactcagagtgccccagacctatcccctcaaatcctgactccacctgttatatgtagcaggtaaggattttttatgaactgaagtttaataataaaamcgatgatagttttcccctagaaatacctaccaccagcccacgcagcttggggtaggtttgccaaagtattagacaaccaagtataggataatgtgatttg

SEQ ID NO: 27560 - DNA, 201 bp, Homo sapiens
ccatccacctgctacattggaatgaatatacacagctgttagtgtatcatagaaaaagagaatgaaaaactgaatctacaagtgagattttctgaagaatrtgggaccaaaatacagacagagtaaggcagttggagtacgggaaagaggagctcaacagtaccagggcccctgggaacatctggctgacaaatccatgga

SEQ ID NO: 27561 - DNA, 201 bp, Homo sapiens
ctatccctaaaggaagagaaactttcttcagaaaggtatttgttttaatcaaggaagtttctgctgagattaataacttggtatcatcccttagttcctgrtaaacatcataccttaaatgagtcttctgttttttaactagtttttcttttgtctaaaacaaaattgcctcttttgttttagagatgaattactcaattt

SEQ ID NO: 27562 - DNA, 201 bp, Homo sapiens
tacactcagagtgccccagacctatcccctcaaatcctgactccacctgttatatgtagcaggtaaggattttttatgaactgaagtttaataataaaacygatgatagttttcccctagaaatacctaccaccagcccacgcagcttggggtaggtttgccaaagtattagacaaccaagtataggataatgtgatttgt

SEQ ID NO: 27563 - DNA, 201 bp, Homo sapiens
ggagggaagaagatattcattgtcttagggcatctgctggttttctctagtatctccttgacttagaacatgaaccaatatttgtttttcttgtcatattktcaggcatatattggcactagccacctattaaaatattctttaatgattacttactttgtgtatttaaaaagatccatttaaggaggatggaagcatata

SEQ ID NO: 27564 - DNA, 201 bp, Homo sapiens
attgtctatcaaagttaataaaaataactggcctttgagaaagagtacacctttaaaatttttgaaggccaaatgatttttttttatttttcatccagaartatctatccctaaaggaagagaaactttcttcagaaaggtatttgttttaatcaaggaagtttctgctgagattaataacttggtatcatcccttagttc

SEQ ID NO: 27565 - DNA, 201 bp, Homo sapiens
accctatgatcctatgttcttggagtgctcaggaaagcagtatttccctaaacactatatttaccatatgcatcttagcaaaatttgcttaaatgagcccyctttccccattgtagatcttgtaataagttgttctcttttaattgtagatgacactgctcaagttacctctgattatgaaaccaataacaacagtgacag

SEQ ID NO: 27566 - DNA, 201 bp, Homo sapiens
tttgtacaaaggcattttaagagaacagtgcacttaatcagagaacctccttcaaggtgactctactgcttaaacatggtttaaaaaaattaaaatatttrtggctcagcattgttgtttcattgtctatcaaagttaataaaaataactggcctttgagaaagagtacacctttaaaatttttgaaggccaaatgatttt

SEQ ID NO: 27567 - DNA, 201 bp, Homo sapiens
gttttcaaaataaccttcctttgagttctcagttttatgtgaactgtagttaaactcttttttttccatgacttgtagcatatggtatttaactgtttgcyagtatcgctttctgaaatgaacctatttgtacaaaggcattttaagagaacagtgcacttaatcagagaacctccttcaaggtgactctactgcttaaac

SEQ ID NO: 27568 - DNA, 201 bp, Homo sapiens
tgtaccacattttctttatctagtctatcgttgatgggcatttgagttgattccatgtctttgctattgtgaatagtactgctgtgaacataaacatgcaygtatttttataatagaatgactcacattcctttgggtgtattcccagtaatgggattgctgagtaaaatggtattactggttctaggtctttgaggaatc

SEQ ID NO: 27569 - DNA, 201 bp, Homo sapiens
ctaaatcctctttttaaaatataaataaatatctttaaaataatattttaggccgggcatggtggctcattcctgtaatcccagcactttgggaggctgagacgggcggatcacgaggtcaggaggtcaggagtaatcccacatcgttcaagtcagtaatgaatttatttgaatcaaaagtggatacatttaaggaattgt

SEQ ID NO: 27570 - DNA, 201 bp, Homo sapiens
agcaattagaaactgtgttatagtccagacttgaaagagattatttcctgaggcaaagggagcattcatggagtagagtagtcattgagtaggatccttcrtggagcagatagtcattgagtgggttctgaagggtgagtggaatttgaacagggagagacctgagaaagacgtagtcgaaggcaacatcattagtagcag

SEQ ID NO: 27571 - DNA, 201 bp, Homo sapiens
gtcgccccacccgacagactccagcatgttgttcccctccccatgtccatgtgttatcattgttcagctcccacttataagtgaaaacatgtggtgtttgsttttctgtttctgcattagtttgctaagaataatggcttccagctccatccgtgtccctgcaaaggagacgacctcattcctctttatggctgcatagta

SEQ ID NO: 27572 - DNA, 201 bp, Homo sapiens
tcagccattctgtatgaatattaccaagtttaagacattggtttatgttcaatttcagcagtttgtataactgatttgaaaaagcaataaataggcttcawaattttatattttttataggaaacaggtaatttaatacatttaatacattaatacatttataatgtatgtattttttcatgaggtagactatgtaaaaag

SEQ ID NO: 27573 - DNA, 201 bp, Homo sapiens
tagaagctctgctggcttgcctcccaaatagctgcacccctctgtctggatccttcacttcttactccatgccaatagtcagtaaatcatgctatgaaggsaagaacaatttgcaggattttggctcacctttctgaggttctcttctttatgggaacctagtccctcagaattgtgtgctttgcctcgatagcttttttg

SEQ ID NO: 27574 - DNA, 201 bp, Homo sapiens
gcatggatggttaaaattagacctgatggcactattggttattctaagaaaggagctaaaagtctatataattggtttactttttattcagtctagttttkaaatcttaagaatggatcaaggaacattggatgaagaagggacacagggtaatgttattttcccaaatttcagaaattcttccaatttaggttcagcagg

SEQ ID NO: 27575 - DNA, 201 bp, Homo sapiens
tatgtaaactggtaactatacctatgttgttaaaggaaaatttaccctaatgttaaataatataaaatcccaagtctcatagattggtgggcattgtggarcttgcagattaaaatataccgcccacccccccaactgaaggaaatgtaggaactctgtatagtcagccttctgtatccctggattctacatccatggatt

SEQ ID NO: 27576 - DNA, 201 bp, Homo sapiens
cttgaaaggttgaaatgaactaaattgagggttgtttatattaaataaagctattttcccccaattttagctaaacctctttttatgtaaagaaaaaggattttttttttccagtaagatttaccagtcaaagcaggaaatcattttgttacaattgtcttacaaagcagccctgtgcaaggctgttgctaatgttaagac

SEQ ID NO: 27577 - DNA, 201 bp, Homo sapiens
gcatctgtcaaagtgccaaacatatagcaggtacacaatataattttgttttcctcataaatacatggttaggttcagcatggttattcatgaaaaacttyttttaaaaaattgagcaactgaataaattctaattgaatggctgaattatttgaaaggcaaaaaaggcaggcaataaagttagtctgaagtatcttcatg

SEQ ID NO: 27578 - DNA, 201 bp, Homo sapiens; identical to SEQ ID NO: 3231

SEQ ID NO: 27579 - DNA, 201 bp, Homo sapiens
acaacaccgggataattttttgtgtttttaatagaggcggggtttcaccatgttggtcagtctggtctcaaactcctgacctcaggtgatctgcctgcctkggcctcccaatctgctgggattacagacatgacccactgtgcccggcctgatacataagttcttattatactttcctgccttttccaacatttctataat

SEQ ID NO: 27580 - DNA, 201 bp, Homo sapiens; identical to SEQ ID NO: 3139

SEQ ID NO: 27581 - DNA, 201 bp, Homo sapiens; identical to SEQ ID NO: 3140

SEQ ID NO: 27582 - DNA, 201 bp, Homo sapiens; identical to SEQ ID NO: 3141

SEQ ID NO: 27583 - DNA, 201 bp, Homo sapiens
tacaccaagaggctgagatgtctgggtccattttatgattagaaaaaaaaatcctgttcctttcagaaatagtgtgcactatttgggattctttagaaacwtccttggagaaaattaatgattcaagattgagaaaacatttatacaacctcaggccacactcttctctctcttgttattaaccattgcaccactgctatg

SEQ ID NO: 27584 - DNA, 201 bp, Homo sapiens
ctgatatccagattacaccaagaggctgagatgtctgggtccattttatgattagaaaaaaaaatcctgttcctttcagaaatagtgtgcactatttgggmttctttagaaacttccttggagaaaattaatgattcaagattgagaaaacatttatacaacctcaggccacactcttctctctcttgttattaaccattg

SEQ ID NO: 27585 - DNA, 201 bp, Homo sapiens; identical to SEQ ID NO: 3235

SEQ ID NO: 27586 - DNA, 201 bp, Homo sapiens; identical to SEQ ID NO: 3236

SEQ ID NO: 27587 - DNA, 201 bp, Homo sapiens
gaactgtgacccccaaattatcaatttgtcttgtgaagtcacttcatttaggaaaagcaatgtaaaagtaaaaattagtatttattgtgtgtactaggtgmtttgcatatgtcatttctttaatcctgtaggaaataatatgttctccaggaggtgacaatgtctatatgattagattcacagattacctatccaaatcta

SEQ ID NO: 27588 - DNA, 201 bp, Homo sapiens
ttaaggcttaccctattaacaccattttaacttaatcacctctgtaaagaccctatctcctgatacagtcacattcggatgctcaggaagttagggtatcrgtatcactatatgaatttgggagttgggggaggacacagtttagcccatgacagtcctgaatctcctttgctagatgcatgactgtgggccagtcacttc

SEQ ID NO: 27589 - DNA, 201 bp, Homo sapiens
taattttacagtttttggttcccctatattatataacataactgagagaaaaacaactatgaaattattttccaaagatgagttttatttatatttatcaygcttatttgatgtggttatggataaatttaatttacaagtgacatgcacctctgaaatgagaagactggtctatttggctccatttttttctaagcaaaa

SEQ ID NO: 27590 - DNA, 201 bp, Homo sapiens
ctggctttaggggtcttgctacagttttcccagactggaggtcttggggctggattctggttcttagcgaattcttgccaaacacctcccctttccccagyatccatttgttttgaaggttctttgcaggcttcttgccaataattgtcttaaaacaaatggagttgtttgcatacctagatggagtaaaatatttaggaa

SEQ ID NO: 27591 - DNA, 201 bp, Homo sapiens
tttcctcacccctgcgagaggttgcagtcatggtaacggctgttctgagaaattcagtgcccaaactggagggaggggaacacaaactcagcttcttcccragcttcagggcagggctggcaagttttgccttccccgccagcaagagccctggctttaggggtcttgctacagttttcccagactggaggtcttggggct

SEQ ID NO: 27592 - DNA, 201 bp, Homo sapiens
ctgacatcaactccaagggattggaattgaggaagactgttactacagttgagactcagaacttggaaggcctgcatcatgatggccaattctgccataarccctgtcctccaggtatgttacacaaaacatccagagattacagtgaaagtcacagttaggagtagcacatagtaatcatgactataataattttacagt

SEQ ID NO: 27593 - DNA, 201 bp, Homo sapiens
ttgcctccaagcaactagatgactgtttgctcatttaaacactggtgaacttcctgtgtaggtgacactttgctggccacttaagctaaagatatgagccrgacatatgcctggcatcaaggtatcagtccagaagcacagacagtcaaggaaagcaatggttattgtgtttcaacagcatgagaatagcatcagaagaga

SEQ ID NO: 27594 - DNA, 201 bp, Homo sapiens
ggtaaaactccttcaaacagagaaatagcctgaaaaaatcaaagctacaggcacagatagagcagcctggggaaaaatttagctttagctgcagagataakggagcaaggcctaacaaagaagcctttgttctttggataatcagcgggctcccaggaaaaagtttcctccccttttcagacatgtacatgatgggctcca

SEQ ID NO: 27595 - DNA, 201 bp, Homo sapiens
ttgctgtaatgagtggtgatatatttagtcctagaggaccaaagagaaataaaatggctttgattatgctggtttaagaaaatatatccgattaaacagargttaatatttgtgatgtttgatttagtaaaattataagactaccaaagaaaactagaagagcaaaataaccaaaatttatataaagaattcaatgttgat

SEQ ID NO: 27596 - DNA, 201 bp, Homo sapiens
ttcccatccctattcagcctataaagcaatgtttctcatccctggcagtgcattagaattgcttagggagctactaaaaatgtttcatgtttaggtcccayctcagggcaattacatcagagtctctgagtgaggaccttggtattggcctgatggagtaagtctggggtagagcctaacattctacatttttaacaagct

SEQ ID NO: 27597 - DNA, 201 bp, Homo sapiens; identical to SEQ ID NO: 3150

SEQ ID NO: 27598 - DNA, 201 bp, Homo sapiens
cactcttttagcttttgtcttgggagactttctgtctgttgacatgacttttaaaataatcttctcccccattgtatttatatctcattagcctacccccyctccccttgtgttttagaagagttttattgtctgtcatccctctatacttcccaccctgttacctgcccgtgtcctgttcaaacacttgctccttttttc

SEQ ID NO: 27599 - DNA, 201 bp, Homo sapiens
agaaaatatatccgattaaacagaggttaatatttgtgatgtttgatttagtaaaattataagactaccaaagaaaactagaagagcaaaataaccaaaayttatataaagaattcaatgttgataattcaaaggtttagaattttttccacctttcaaatactaagttgctgttatagatttactaccattattacccag

SEQ ID NO: 27600 - DNA, 201 bp, Homo sapiens
aaagcccatttttcttccaaatgcagaagatgtagattgtgtgatgaaggacatggtaagagtcttaaaatgcaattgaaagaggccaatcttggaatttyatgtagaaccatttataagacaatttgaaattggggcctactgtggtgctatgttgacacacaggaaagggaaggacaggtggctagggtaccgcagaac

SEQ ID NO: 27601 - DNA, 201 bp, Homo sapiens
cccagcactttgggaagctgaggcgggagcatcttctgaggtcaggagtttgagactagcctggccaacatggtgaaatgccgtctctactaaaaatacaraaaattagccatcatagtggtgcattcctgtaatcccacctactcgggaggctgaggcaggagaattgcttgaatgccggaggcagaggttgtagtgagc

SEQ ID NO: 27602 - DNA, 201 bp, Homo sapiens; identical to SEQ ID NO: 3247

SEQ ID NO: 27603 - DNA, 201 bp, Homo sapiens; identical to SEQ ID NO: 3248

SEQ ID NO: 27604 - DNA, 201 bp, Homo sapiens
atcacacatgaacctcttgagtctcctgatcaccaccggttgctaaaagtggcagcctctaagggccagctgagtaccctccctgagctacatcatgggcktggctatcacctggccattttcttggtctataggaattttttgaaattacttttgacagtttattttaagagctagtttaagctataggatttacgtgtt

SEQ ID NO: 27605 - DNA, 201 bp, Homo sapiens
tggccattttcttggtctataggaattttttgaaattacttttgacagtttattttaagagctagtttaagctataggatttacgtgttcagtttattacyaggtttaagtttatttttgtatccacttcatctctcttgtgtgtcactattttcctatcttcctttaactcttgaaatcttaagacagtcattccttatg

SEQ ID NO: 27606 - DNA, 201 bp, Homo sapiens
gaggtaaaatcctcttggccgggtgcgttggctcatgcctgtaatcccagcactttgggaagctgaggcgggagcatcttctgaggtcaggagtttgagaytagcctggccaacatggtgaaatgccgtctctactaaaaatacaaaaaattagccatcatagtggtgcattcctgtaatcccacctactcgggaggctga

SEQ ID NO: 27607 - DNA, 201 bp, Homo sapiens
ttggccgggtgcgttggctcatgcctgtaatcccagcactttgggaagctgaggcgggagcatcttctgaggtcaggagtttgagactagcctggccaacrtggtgaaatgccgtctctactaaaaatacaaaaaattagccatcatagtggtgcattcctgtaatcccacctactcgggaggctgaggcaggagaattgc

SEQ ID NO: 27608 - DNA, 201 bp, Homo sapiens; identical to SEQ ID NO: 3154

SEQ ID NO: 27609 - DNA, 201 bp, Homo sapiens
ctgtcatccctctatacttcccaccctgttacctgcccgtgtcctgttcaaacacttgctccttttttccttgggcaggtgaaaggaaagctagggactgmacagtcaatggggatgaaccagactgcgtgccctgccaagaagggaaggagtacacagacaaagcccatttttcttccaaatgcagaagatgtagattgt

SEQ ID NO: 27610 - DNA, 201 bp, Homo sapiens
gggaagctgaggcgggagcatcttctgaggtcaggagtttgagactagcctggccaacatggtgaaatgccgtctctactaaaaatacaaaaaattagccrtcatagtggtgcattcctgtaatcccacctactcgggaggctgaggcaggagaattgcttgaatgccggaggcagaggttgtagtgagccaagatctaga

SEQ ID NO: 27611 - DNA, 201 bp, Homo sapiens
ttgtttttctgcccttctctttcttcttttgccctttcttagcttgcactcccatggtgatttctgcttggtctcctgctggggttggtggtactcgttcycaccgcacagaacccggcgcctattattggccaagaaacttgagcagcctgttttgaaaagtccctcgctcagaaatgccagcttgcagatggctaatca

SEQ ID NO: 27612 - DNA, 201 bp, Homo sapiens
cttcttaaaatgtcaccagtcacattggattaaggcttaccctattaacaccattttaacttaatcacctctgtaaagaccctatctcctgatacagtcayattcggatgctcaggaagttagggtatcagtatcactatatgaatttgggagttgggggaggacacagtttagcccatgacagtcctgaatctcctttgc

SEQ ID NO: 27613 - DNA, 201 bp, Homo sapiens
aggcgggagcatcttctgaggtcaggagtttgagactagcctggccaacatggtgaaatgccgtctctactaaaaatacaaaaaattagccatcatagtggtgcattcctgtaatcccacctactcgggaggctgaggcaggagaattgcttgaatgccggaggcagaggttgtagtgagccaagatctagattgtgccac

SEQ ID NO: 27614 - DNA, 201 bp, Homo sapiens; identical to SEQ ID NO: 3259

SEQ ID NO: 27615 - DNA, 201 bp, Homo sapiens
ggctcggaagaacggcaccttttctttctcgaaaaagttatatgggggctgaatgagcttctggaggcttgtttaccgttttttattgtcacacagaaaargaaactgccttgtctcccttccgggaattctctctttaagactgtaagtcgctgcctgagtggtttcattttgttttgtttttctgcccttctctttctt

SEQ ID NO: 27616 - DNA, 201 bp, Homo sapiens
ctgttgctagattatcgtccaaaagtgttaatgcccaagtgactgacatcaactccaagggattggaattgaggaagactgttactacagttgagactcaraacttggaaggcctgcatcatgatggccaattctgccataagccctgtcctccaggtatgttacacaaaacatccagagattacagtgaaagtcacagtt

SEQ ID NO: 27617 - DNA, 201 bp, Homo sapiens
gcactttcaaaaatactcggttcaaatgtaaaataatattcgtaatattttaagacaaacctcctagaacttatatgtgtctttcttcccagagcagtctytatgggtgcctaaacaatactgcattattagatttttttcagtttataagccacacaagaaagttaacccatgtcatctctagaggcataaaaatagaca

SEQ ID NO: 27618 - DNA, 201 bp, Homo sapiens
gggacccgggccagttgccactgctggctctggcagcctgcttttattttgttatctggccccacccacatcctgctgattggtccattttacagagagcygattggtccattttacagagagctgattggtgcgttttgacagggtgctgactggtgcgtttacaatccctgagctagacacaaaagttctcaacgtccc

SEQ ID NO: 27619 - DNA, 201 bp, Homo sapiens
aaacaacgttgctgtaatgagtggtgatatatttagtcctagaggaccaaagagaaataaaatggctttgattatgctggtttaagaaaatatatccgatkaaacagaggttaatatttgtgatgtttgatttagtaaaattataagactaccaaagaaaactagaagagcaaaataaccaaaatttatataaagaattca

SEQ ID NO: 27620 - DNA, 201 bp, Homo sapiens
agttagagaacctgccttgtaagtcatcttgggaagcttttaggagttcatctaataggcttaagaaataagcacatgatgccttatgttttatttgctargaaaattttatgtacagttgtcccaggctctcccctggccacaagtgtctgagagtgcccctatgatgacaggctaggtaggcattggggaagcagctga

SEQ ID NO: 27621 - DNA, 201 bp, Homo sapiens
tttcttaaaccaacccaaagagcataaaatggaatatttatttatttttgtagcttaatttgtaatttaataatttttcttaagccaacctaacgaacatattgggctgtttattttcatttttaatgggccatatttacatcacaaaggacttgagaagtcttacaaatacaataaaatgataaaatatgaattaagaca

SEQ ID NO: 27622 - DNA, 201 bp, Homo sapiens
ggcactggcacggaacacaccctgaggccagccctggctgcccaggcggagctgcctcttctcccgcgggttggtggacccgctcagtacggagttggggragctctttcacttcggaggattgctcaacaaccatgctgggcatctggaccctcctacctctggtgagccctctcctgcccgggtggaggcttaccccgt

SEQ ID NO: 27623 - DNA, 201 bp, Homo sapiens
ttgacccaaagttagagaacctgccttgtaagtcatcttgggaagcttttaggagttcatctaataggcttaagaaataagcacatgatgccttatgtttyatttgctaggaaaattttatgtacagttgtcccaggctctcccctggccacaagtgtctgagagtgcccctatgatgacaggctaggtaggcattgggga

SEQ ID NO: 27624 - DNA, 201 bp, Homo sapiens
tttaggacttgtgatgaaaaataataaaataatttaaaacgataaaaagcaacataattttatatgttgtaccttgtacttccttataaggtacaacactrcaatagccttagtgtgtagttttctttttgctatgtatgtatatatatattcataaaagtggaaaaataacatttaataaatcctctttattttctggaa

SEQ ID NO: 27625 - DNA, 201 bp, Homo sapiens
tgccaattttgggtgggttacacttgtttaccacgttgcttacttcagaaatcaataaaattctcttcatgcttttattttacaggttcttacgtctgttrctagattatcgtccaaaagtgttaatgcccaagtgactgacatcaactccaagggattggaattgaggaagactgttactacagttgagactcagaactt

SEQ ID NO: 27626 - DNA, 201 bp, Homo sapiens
ttcaggcttgattttaaaaattgggcctatactcacagaaagacaaatactgcatgatctcgtttatatgtggaatctaaaagttttgaatccataaaagyagagagtagaatagtggttaccagaggctagttgggggcaaagttgggggatttagggagatattggtcaaaggatacaaaatttcagttaggaggaata

SEQ ID NO: 27627 - DNA, 201 bp, Homo sapiens
ctgcccaccattttcatagtctgcttataattagccgctataactaatagtttccaaactgattttctaggcttagaagtggaaataaactgcacccggayccagaataccaagtgcagatgtaaaccaaactttttttgtaactctactgtatgtgaacactgtgacccttgcaccaagtaagttttagtctttctctga

SEQ ID NO: 27628 - DNA, 201 bp, Homo sapiens
tgcttacttcagaaatcaataaaattctcttcatgcttttattttacaggttcttacgtctgttgctagattatcgtccaaaagtgttaatgcccaagtgrctgacatcaactccaagggattggaattgaggaagactgttactacagttgagactcagaacttggaaggcctgcatcatgatggccaattctgccataa

SEQ ID NO: 27629 - DNA, 201 bp, Homo sapiens
aaagaattcaatgttgataattcaaaggtttagaattttttccacctttcaaatactaagttgctgttatagatttactaccattattacccagattttcyattttactaaaaaataataacacagttcgttatgataaatcagtatagatctttaggctcaacacaaccctgctaccttttaaacttttttattatacaa

SEQ ID NO: 27630 - DNA, 201 bp, Homo sapiens
ttgggctaggtcatctataaagtcctttctgctctaaattgtaaatataatgagataccaacatttagtttaattgtttaaaattttagaagctaactggrtgctttgctggtgtcaacactcccctttacaaaaaaaaattcggccgggcatggtggctcacgcctgtaatcccaacactttgggaggccgaggcaggcg

SEQ ID NO: 27631 - DNA, 201 bp, Homo sapiens
cagttgttttgaaatttctctttccttctccactatgctccccctcactgaaactttaataataaaagtagcacacttattgggcatgtatttgttatgtkccaggttctgtgctaacagctttaagtgcattattccacgtattttcacaacaagcctgtgaggaagaggttatttccacttatagataaagaaactgag

SEQ ID NO: 27632 - DNA, 201 bp, Homo sapiens
atctaagttgcttccaaatctgtttatgctcattagtgttgtgatattcatatgtaatttgattgaatattgcataaattaatgaaatacaaatacagagraaagacagattttatttctaagaaaactaggttgagtgctttggagaattcaataaagatgagctgctaaaatgttgttgatgaattttgtgagggaaaa

SEQ ID NO: 27633 - DNA, 201 bp, Homo sapiens
aactaggttgagtgctttggagaattcaataaagatgagctgctaaaatgttgttgatgaattttgtgagggaaaaataaaagttaagtagtaggaaaaaycacaaaaatctctaaagccattcatacagattattggtatgtttatgttttcctttcatcaaaaacgaagggagggagggagggagggagggaggagaaa

SEQ ID NO: 27634 - DNA, 201 bp, Homo sapiens
cgattaaacagaggttaatatttgtgatgtttgatttagtaaaattataagactaccaaagaaaactagaagagcaaaataaccaaaatttatataaagawttcaatgttgataattcaaaggtttagaattttttccacctttcaaatactaagttgctgttatagatttactaccattattacccagattttccatttt

SEQ ID NO: 27635 - DNA, 201 bp, Homo sapiens
tatgggggctgaatgagcttctggaggcttgtttaccgttttttattgtcacacagaaaaggaaactgccttgtctcccttccgggaattctctctttaasactgtaagtcgctgcctgagtggtttcattttgttttgtttttctgcccttctctttcttcttttgccctttcttagcttgcactcccatggtgatttct

SEQ ID NO: 27636 - DNA, 201 bp, Homo sapiens
acattagcaaccaggatggaaaaacacaaatttgtaaatgatggccaggtttgcaagcaaaaattaaattgataaatggcagcacccccactaccagctayagttagactgatgaaaaatcctctaatgttcatgcctgaaatacagttaccacccttagcagcaaattagaggcaaagaagttctggaatttggacgttg

SEQ ID NO: 27637 - DNA, 201 bp, Homo sapiens; identical to SEQ ID NO: 3238

SEQ ID NO: 27638 - DNA, 201 bp, Homo sapiens; identical to SEQ ID NO: 3142

SEQ ID NO: 27639 - DNA, 201 bp, Homo sapiens
tcatccctctatacttcccaccctgttacctgcccgtgtcctgttcaaacacttgctccttttttccttgggcaggtgaaaggaaagctagggactgcacrgtcaatggggatgaaccagactgcgtgccctgccaagaagggaaggagtacacagacaaagcccatttttcttccaaatgcagaagatgtagattgtgtg

SEQ ID NO: 27640 - DNA, 201 bp, Homo sapiens; identical to SEQ ID NO: 3144

SEQ ID NO: 27641 - DNA, 201 bp, Homo sapiens
tatgaggtactttttgtttatcttattgtctcattggcaaccagcaactcctgttgcatttttgacatgggaatctatcagggtgtggttaataaagtacrtttccatggtaagtattctttaagaaaaaataaaccaagatttcatcagagacagaaattactgcaaactgtacttaccagtttctggtgatttgtataa

SEQ ID NO: 27642 - DNA, 201 bp, Homo sapiens; identical to SEQ ID NO: 3242

SEQ ID NO: 27643 - DNA, 201 bp, Homo sapiens; identical to SEQ ID NO: 3145

SEQ ID NO: 27644 - DNA, 201 bp, Homo sapiens
ggcggagcttgcagtgagccgagatcgcgccactgcacctccagcctggcaacagagcgagactccgtctcaaaaaaaaaaaaaaataaataaaaaaaaawaaaataaaataaaataaaaatctcactttctgtttctactgttctctcaagtacccctctgccttctgttacttctttgctgcattctgagaggaatggg

SEQ ID NO: 27645 - DNA, 201 bp, Homo sapiens
gattgtgtgatgaaggacatggtaagagtcttaaaatgcaattgaaagaggccaatcttggaatttcatgtagaaccatttataagacaatttgaaattgsggcctactgtggtgctatgttgacacacaggaaagggaaggacaggtggctagggtaccgcagaaccaggtgccgagctaactactggtctagaccttta

SEQ ID NO: 27646 - DNA, 201 bp, Homo sapiens; identical to SEQ ID NO: 3147

SEQ ID NO: 27647 - DNA, 201 bp, Homo sapiens
accagaggctgcgtgtttaaagcccgaagaaaactttgcttttctgaaagaatacacacacacacgcatatgtaaatattcatacatttatgtatatatayatattataatacctataagttaggtataacttatatttgtatatgatatatggcctaggaaattaaggcttattaaataaaatttataaatgcagatgag

SEQ ID NO: 27648 - DNA, 201 bp, Homo sapiens; identical to SEQ ID NO: 3149

SEQ ID NO: 27649 - DNA, 201 bp, Homo sapiens
tacttactaaaatagcatatatatttacatgtcataatttgctcatgtagtaaatattttgttttatcaaaaagaatatatgaagttattaaggaattcaygttcctaggaaacacagcagaaattaattttgctgtataggtgagcagagcagattaaactgcttatatttttaaaactagttataccattaacaattag

SEQ ID NO: 27650 - DNA, 201 bp, Homo sapiens
aacttccttggagaaaattaatgattcaagattgagaaaacatttatacaacctcaggccacactcttctctctcttgttattaaccattgcaccactgcwatgttggctgctttgaaaatctcatagtttttggacagcagtattagtaaagtgtaagaaaattgtcaaagcttggagctatgcttgttgaacttttgta

SEQ ID NO: 27651 - DNA, 201 bp, Homo sapiens
taaatgcagatgagtcaaatacaaagatcagacataactctatcacctaagtaatcattgtttacgttttgcagtttatcttccatttctcccctctaatmtgactcttttaaatttagttacacagaaattggttttgcgctcacgacatgcctaacatcaggcctttatccttaaagaagtttcaacactcttgtgtca

SEQ ID NO: 27652 - DNA, 201 bp, Homo sapiens
ttctcccctctaatatgactcttttaaatttagttacacagaaattggttttgcgctcacgacatgcctaacatcaggcctttatccttaaagaagtttcracactcttgtgtcacctcatgtgtctacagaaaatgtttgcttttatgccttcacggttatgttttcttagtagtagcaataaataaaatagatgcaaag

SEQ ID NO: 27653 - DNA, 201 bp, Homo sapiens; identical to SEQ ID NO: 3153

SEQ ID NO: 27654 - DNA, 201 bp, Homo sapiens; identical to SEQ ID NO: 3252

SEQ ID NO: 27655 - DNA, 201 bp, Homo sapiens
ctgttacctgcccgtgtcctgttcaaacacttgctccttttttccttgggcaggtgaaaggaaagctagggactgcacagtcaatggggatgaaccagacygcgtgccctgccaagaagggaaggagtacacagacaaagcccatttttcttccaaatgcagaagatgtagattgtgtgatgaaggacatggtaagagtct

SEQ ID NO: 27656 - DNA, 201 bp, Homo sapiens
ttctgaagaccatgggaaatctcttgcctatttagctcagtgatcatccaagatgggaaattcttgggctcagctgtgagggatcccaagtttatatgtamcactaatgtctcacaaatcaagaatccaagagaatcaagagactatagttcattccttatattaaattcttaggactgccaactgggtggctacagtttt

SEQ ID NO: 27657 - DNA, 201 bp, Homo sapiens; identical to SEQ ID NO: 3254

SEQ ID NO: 27658 - DNA, 201 bp, Homo sapiens; identical to SEQ ID NO: 3255

SEQ ID NO: 27659 - DNA, 201 bp, Homo sapiens
ccaggatggaaaaacacaaatttgtaaatgatggccaggtttgcaagcaaaaattaaattgataaatggcagcacccccactaccagctatagttagactratgaaaaatcctctaatgttcatgcctgaaatacagttaccacccttagcagcaaattagaggcaaagaagttctggaatttggacgttgtctctgagta

SEQ ID NO: 27660 - DNA, 201 bp, Homo sapiens; identical to SEQ ID NO: 3256

SEQ ID NO: 27661 - DNA, 201 bp, Homo sapiens
ttagccttgtctacacatatacataattgcatgtttaatttgagctatatatagtctgttttttgttcctttgcatgttacacaaacctttttctatttcyacataatttttatctcatattttttattggatacattatagagagagcatttattaaatgagctgggattactataatttttattatttattttttaatt

SEQ ID NO: 27662 - DNA, 201 bp, Homo sapiens; identical to SEQ ID NO: 3257

SEQ ID NO: 27663 - DNA, 201 bp, Homo sapiens; identical to SEQ ID NO: 3258

SEQ ID NO: 27664 - DNA, 201 bp, Homo sapiens
tgtgtgtccaaatttcctcttctttttttttaatttagaaatttatactgtctacaagctttatatagctttagttaaaaaaaagcaaaaaaaaaaaaaaatcaaaacaaaaacagtgaagccaagacactcttccaaagtctggacccttccggccttccaaatacaagagctctggaagttgtatataccaaatttcct

SEQ ID NO: 27665 - DNA, 201 bp, Homo sapiens
atgtgtgtccaaatttcctcttctttttttttaatttagaaatttatactgtctacaagctttatatagctttagttaaaaaaaagcaaaaaaaaaaaaaaatcaaaacaaaaacagtgaagccaagacactcttccaaagtctggacccttccggccttccaaatacaagagctctggaagttgtatataccaaatttcc

SEQ ID NO: 27666 - DNA, 201 bp, Homo sapiens
tgcattatcaagaaaagatgagtttagcaaaatgaagaaaaatagtcttatcaactagaaataagcaccattaaaatttctgtgtgttaaaagataatatrctgctgaaactttttttttcttgaaatgtccctcttttctttcacttttcattttcttaatccctaaccttctactgttgaattttctggaccaccgtta

SEQ ID NO: 27667 - DNA, 201 bp, Homo sapiens
cactaggcaggccgagtgcagctctgacagcaatgcaagagaaatattactatctccatcatatgcaggatgaaatttaggcttggagaaaacaacacttygttaaagattttatagctgctcaagatttgaccaaggcttttaaaacttcaaatgttcttttccttattacactgtttcttatcaggatttgtggacttt

SEQ ID NO: 27668 - DNA, 201 bp, Homo sapiens
tatgtgtgtccaaatttcctcttctttttttttaatttagaaatttatactgtctacaagctttatatagctttagttaaaaaaaagcaaaaaaaaaaaaaaatcaaaacaaaaacagtgaagccaagacactcttccaaagtctggacccttccggccttccaaatacaagagctctggaagttgtatataccaaatttc

SEQ ID NO: 27669 - DNA, 201 bp, Homo sapiens
ttttaaaataatcttctcccccattgtatttatatctcattagcctaccccccctccccttgtgttttagaagagttttattgtctgtcatccctctatasttcccaccctgttacctgcccgtgtcctgttcaaacacttgctccttttttccttgggcaggtgaaaggaaagctagggactgcacagtcaatggggatg

SEQ ID NO: 27670 - DNA, 201 bp, Homo sapiens
gtatgtgtgtccaaatttcctcttctttttttttaatttagaaatttatactgtctacaagctttatatagctttagttaaaaaaaagcaaaaaaaaaaaaaaatcaaaacaaaaacagtgaagccaagacactcttccaaagtctggacccttccggccttccaaatacaagagctctggaagttgtatataccaaattt

SEQ ID NO: 27671 - DNA, 201 bp, Homo sapiens
aagatatgagccagacatatgcctggcatcaaggtatcagtccagaagcacagacagtcaaggaaagcaatggttattgtgtttcaacagcatgagaatarcatcagaagagacttatgttccaggtgttacaaattatacagaaaaacttttcaactctgcctgaggagatggaggtgaagacatgaatgtgtctcatga

SEQ ID NO: 27672 - DNA, 201 bp, Homo sapiens; identical to SEQ ID NO: 3260

SEQ ID NO: 27673 - DNA, 201 bp, Homo sapiens
aataaagatgagctgctaaaatgttgttgatgaattttgtgagggaaaaataaaagttaagtagtaggaaaaatcacaaaaatctctaaagccattcatasagattattggtatgtttatgttttcctttcatcaaaaacgaagggagggagggagggagggagggaggagaaaaaaagaaagaaatgaaaaaggaagaga

SEQ ID NO: 27674 - DNA, 201 bp, Homo sapiens; identical to SEQ ID NO: 3262

SEQ ID NO: 27675 - DNA, 201 bp, Homo sapiens
agggtgtggttaataaagtacatttccatggtaagtattctttaagaaaaaataaaccaagatttcatcagagacagaaattactgcaaactgtacttacyagtttctggtgatttgtataactgagctttcaatttcaaaaattaaaaagttctctttagtgtaacatatttttgtgtctagtaattttacttcaaaaat

SEQ ID NO: 27676 - DNA, 201 bp, Homo sapiens; identical to SEQ ID NO: 3263

SEQ ID NO: 27677 - DNA, 201 bp, Homo sapiens
aagtattctttaagaaaaaataaaccaagatttcatcagagacagaaattactgcaaactgtacttaccagtttctggtgatttgtataactgagctttcratttcaaaaattaaaaagttctctttagtgtaacatatttttgtgtctagtaattttacttcaaaaataaaagagaattttctttaccatcaaacaacgt

SEQ ID NO: 27678 - DNA, 201 bp, Homo sapiens
ttactgcaaactgtacttaccagtttctggtgatttgtataactgagctttcaatttcaaaaattaaaaagttctctttagtgtaacatatttttgtgtcyagtaattttacttcaaaaataaaagagaattttctttaccatcaaacaacgttgctgtaatgagtggtgatatatttagtcctagaggaccaaagagaaa

SEQ ID NO: 27679 - DNA, 201 bp, Homo sapiens
ttagctcgatttagctaattatcttccaaaatatgtacataattatcttccaaaatatgtacataattcaagacatcatgttatataccataaatatatayaatttttttatttgtcgaataaaaataatacaaaaaaaccctgggcctatactgcccacaggtagtggccacaggcagagctggtcccaagcccctccct

SEQ ID NO: 27680 - DNA, 201 bp, Homo sapiens; identical to SEQ ID NO: 3264

SEQ ID NO: 27681 - DNA, 201 bp, Homo sapiens
tcagtttattactaggtttaagtttatttttgtatccacttcatctctcttgtgtgtcactattttcctatcttcctttaactcttgaaatcttaagacartcattccttatgatatttttcatccagccatccaaattatattaacttgtgccagctttagatactaatttagaaatatttgaaggaatacgtttgccag

SEQ ID NO: 27682 - DNA, 201 bp, Homo sapiens
gtttatcttatttcctgcataatatcaaacttctaaaaagttcctaggactcaataggcatttaataaacacctatcagataaatgaattttttaagagarcacattacataatgctttctaatagcaatacagtgacaaactttatttttaaagtaaattaatgcaaatatgtatattatttaaaattgtttgtttttaa

SEQ ID NO: 27683 - DNA, 201 bp, Homo sapiens
catcatatgcaggatgaaatttaggcttggagaaaacaacactttgttaaagattttatagctgctcaagatttgaccaaggcttttaaaacttcaaatgytcttttccttattacactgtttcttatcaggatttgtggactttggaaagtaaaatgaaaagtcagagcaatgtgagttagtttgataatctcagtggcc

SEQ ID NO: 27684 - DNA, 201 bp, Homo sapiens; identical to SEQ ID NO: 3269

SEQ ID NO: 27685 - DNA, 201 bp, Homo sapiens; identical to SEQ ID NO: 3270

SEQ ID NO: 27686 - DNA, 201 bp, Homo sapiens; identical to SEQ ID NO: 3271

SEQ ID NO: 27687 - DNA, 201 bp, Homo sapiens; identical to SEQ ID NO: 3168

SEQ ID NO: 27688 - DNA, 201 bp, Homo sapiens; identical to SEQ ID NO: 3169

SEQ ID NO: 27689 - DNA, 201 bp, Homo sapiens; identical to SEQ ID NO: 17722

SEQ ID NO: 27690 - DNA, 201 bp, Homo sapiens; identical to SEQ ID NO: 17724

SEQ ID NO: 27691 - DNA, 201 bp, Homo sapiens
ttgttaatccatcatacaatatatttgagcaacctgatacttgtgccacatacatcatctttgtcagataaacatgcagatgacacaatattagtttagtsccttaaaaaacaacctagcattaggaaatctattctacatatgccaagggctacaaggtagatgatttgatttgcagtggaactttgcatctaagccata

SEQ ID NO: 27692 - DNA, 201 bp, Homo sapiens; identical to SEQ ID NO: 17725

SEQ ID NO: 27693 - DNA, 201 bp, Homo sapiens; identical to SEQ ID NO: 17730

SEQ ID NO: 27694 - DNA, 201 bp, Homo sapiens
ggttgatttctcttgaaaatattttttaatattttatctctaatgaagaattttctctttattttctctctggctttacatgccaactgtatatgtgtttcccccccacacacacaattttttttaaaattctccttaaaaaaaattttttttttgctcctcacactttgccaagtcccactcctaagtttttaaatttgt

SEQ ID NO: 27695 - DNA, 201 bp, Homo sapiens; identical to SEQ ID NO: 17683

SEQ ID NO: 27696 - DNA, 201 bp, Homo sapiens; identical to SEQ ID NO: 17684

SEQ ID NO: 27697 - DNA, 201 bp, Homo sapiens; identical to SEQ ID NO: 17685

SEQ ID NO: 27698 - DNA, 201 bp, Homo sapiens; identical to SEQ ID NO: 17732

SEQ ID NO: 27699 - DNA, 201 bp, Homo sapiens
ttctcttgaaaatattttttaatattttatctctaatgaagaattttctctttattttctctctggctttacatgccaactgtatatgtgtttcccccccmcacacacaattttttttaaaattctccttaaaaaaaattttttttttgctcctcacactttgccaagtcccactcctaagtttttaaatttgtttatcat

SEQ ID NO: 27700 - DNA, 201 bp, Homo sapiens; identical to SEQ ID NO: 17686

SEQ ID NO: 27701 - DNA, 201 bp, Homo sapiens; identical to SEQ ID NO: 17733

SEQ ID NO: 27702 - DNA, 201 bp, Homo sapiens; identical to SEQ ID NO: 17734

SEQ ID NO: 27703 - DNA, 201 bp, Homo sapiens; identical to SEQ ID NO: 17687

SEQ ID NO: 27704 - DNA, 201 bp, Homo sapiens; identical to SEQ ID NO: 17688

SEQ ID NO: 27705 - DNA, 201 bp, Homo sapiens; identical to SEQ ID NO: 17735

SEQ ID NO: 27706 - DNA, 201 bp, Homo sapiens; identical to SEQ ID NO: 17737

SEQ ID NO: 27707 - DNA, 201 bp, Homo sapiens; identical to SEQ ID NO: 17739

SEQ ID NO: 27708 - DNA, 201 bp, Homo sapiens; identical to SEQ ID NO: 17741

SEQ ID NO: 27709 - DNA, 201 bp, Homo sapiens; identical to SEQ ID NO: 17746

SEQ ID NO: 27710 - DNA, 201 bp, Homo sapiens; identical to SEQ ID NO: 17747

SEQ ID NO: 27711 - DNA, 201 bp, Homo sapiens; identical to SEQ ID NO: 17748

SEQ ID NO: 27712 - DNA, 201 bp, Homo sapiens; identical to SEQ ID NO: 17749

SEQ ID NO: 27713 - DNA, 201 bp, Homo sapiens; identical to SEQ ID NO: 17750

SEQ ID NO: 27714 - DNA, 201 bp, Homo sapiens; identical to SEQ ID NO: 17751

SEQ ID NO: 27715 - DNA, 201 bp, Homo sapiens; identical to SEQ ID NO: 17752

SEQ ID NO: 27716 - DNA, 201 bp, Homo sapiens; identical to SEQ ID NO: 17753

SEQ ID NO: 27717 - DNA, 201 bp, Homo sapiens; identical to SEQ ID NO: 17698

SEQ ID NO: 27718 - DNA, 201 bp, Homo sapiens; identical to SEQ ID NO: 17700

SEQ ID NO: 27719 - DNA, 201 bp, Homo sapiens; identical to SEQ ID NO: 17701

SEQ ID NO: 27720 - DNA, 201 bp, Homo sapiens; identical to SEQ ID NO: 17702

SEQ ID NO: 27721 - DNA, 201 bp, Homo sapiens
tttatttgcaaaagtgggaaacatgatgcaaacgcaggtgtccactttatcctatatccatttatttacaatgacaatgtttgcactttatgccatatcaktttatttacaatgacaatatacaacaggcatgtatatctgcaaacccaaaggtgctgtttacctgatcttttctataatgtggttattttctttgattgg

SEQ ID NO: 27722 - DNA, 201 bp, Homo sapiens; identical to SEQ ID NO: 17704

SEQ ID NO: 27723 - DNA, 201 bp, Homo sapiens; identical to SEQ ID NO: 17705

SEQ ID NO: 27724 - DNA, 201 bp, Homo sapiens; identical to SEQ ID NO: 17707

SEQ ID NO: 27725 - DNA, 201 bp, Homo sapiens; identical to SEQ ID NO: 17709

SEQ ID NO: 27726 - DNA, 201 bp, Homo sapiens; identical to SEQ ID NO: 17711

SEQ ID NO: 27727 - DNA, 201 bp, Homo sapiens; identical to SEQ ID NO: 17758

SEQ ID NO: 27728 - DNA, 201 bp, Homo sapiens; identical to SEQ ID NO: 17713

SEQ ID NO: 27729 - DNA, 201 bp, Homo sapiens; identical to SEQ ID NO: 17715

SEQ ID NO: 27730 - DNA, 201 bp, Homo sapiens; identical to SEQ ID NO: 17760

SEQ ID NO: 27731 - DNA, 201 bp, Homo sapiens; identical to SEQ ID NO: 17761

SEQ ID NO: 27732 - DNA, 201 bp, Homo sapiens; identical to SEQ ID NO: 17762

SEQ ID NO: 27733 - DNA, 201 bp, Homo sapiens; identical to SEQ ID NO: 17763

SEQ ID NO: 27734 - DNA, 201 bp, Homo sapiens; identical to SEQ ID NO: 17719

SEQ ID NO: 27735 - DNA, 201 bp, Homo sapiens; identical to SEQ ID NO: 17765

SEQ ID NO: 27736 - DNA, 201 bp, Homo sapiens; identical to SEQ ID NO: 17768

SEQ ID NO: 27737 - DNA, 201 bp, Homo sapiens; identical to SEQ ID NO: 17769

SEQ ID NO: 27738 - DNA, 201 bp, Homo sapiens; identical to SEQ ID NO: 3393

SEQ ID NO: 27739 - DNA, 201 bp, Homo sapiens
tgacttctagcataaattcacccacttatgtgtttccttcccagctgtcttttggggagacattgccttagatgaagatgacttgaagctgtttcacattsacaaagccagagactggaccaagcagacagtgggggcaacaggacacagcacaggtaggtactgcttcctcccttctcctgcccagatgggagggatgag

SEQ ID NO: 27740 - DNA, 201 bp, Homo sapiens
tgctttagtgctgtagcgattgccttgttcattcctgaatcaaccttttaaaagggctttgccttttaatttttttctaatgaataatgaatacttcaccygattgatgtgtcttgcaggtaattttccaacaaagttgtgcagatgtttcattcattcattcattgcccttccccgggatgcttgctcaggccacacctg

SEQ ID NO: 27741 - DNA, 201 bp, Homo sapiens
taggactcccatcccccactgctctgacatacaactctgttttaatttcctcaaagtgcttaatcccacgaaatgatctcattatttattgttaatttccwtcccctccatcagaatgcaggcaccaagagggcaggcactgcctgcaggaatccagcacagtgctgcccaaagcaggtgctccaccaaggcgtactgaat

SEQ ID NO: 27742 - DNA, 201 bp, Homo sapiens
taagcaaagatcaaatatggggatatatatgtatttttttcaaactttttttttgtcttgcaatcacacccaaggaaaaatacatccccataccctgaaarctctcccctcccagccctcagtctttgtctgcatcaggctgtttctctcttccttgttctatggtgcctgcagctgcagttatagccagagccacacctg

SEQ ID NO: 27743 - DNA, 201 bp, Homo sapiens
atgcaagggttgggaacagccaggaggcttcctgacaatgtaaccggggtcaccttccttccccaccagaggtggatgagtgttcctggccagatcacggygggtgcgagcatcgctgtgtgaacacgctgggcagctacaagtgtgcctgtgaccctggctacgagctggccgccgataagaagatgtgtgaaggttggt

SEQ ID NO: 27744 - DNA, 201 bp, Homo sapiens
cccccatatttgataaagaccctgagacaattaggagagaggggaggagacccccctagaatccttcttgtgctgcccacagtgaatgacttctctctttktatgtgtccccctgccacccccagctggctgtgcacacaagatcagcagtgtggaggggaccctggcgagccccaactggcctgacaaataccccagccg

SEQ ID NO: 27745 - DNA, 201 bp, Homo sapiens
gagaattgcttgaacctggaggcagagattgcagtgagccaagatcgtgccattgcactctagcctggacgatagagtgagactttgtctctaaaaaaataaaaaaaataaaatgaagcatcagcaaccaaagggaaaagggccgtcttctttcaatgtccttaattgacgcaatttgaaatggacaaccctttgttagtg

SEQ ID NO: 27746 - DNA, 201 bp, Homo sapiens
gtggatgagtgttcctggccagatcacggcgggtgcgagcatcgctgtgtgaacacgctgggcagctacaagtgtgcctgtgaccctggctacgagctggmcgccgataagaagatgtgtgaaggttggtgtgggacctgccaagctagaatgagagggtatatgggacaagtctttggggaagtggggcagagatggggc

SEQ ID NO: 27747 - DNA, 201 bp, Homo sapiens; identical to SEQ ID NO: 3409

SEQ ID NO: 27748 - DNA, 201 bp, Homo sapiens
acatgcgcgtggagttcaagtccgacaacaccgtctccaagcgcggcttcagggcccacttcttctcaggtatgcgggttcagaggtgaggctgatgcagygcgagtgaggcggctttgcagactccaggctctggggtccctggccccctcctctctctctttgcttgctcctgcatccctccaggtatggctgccttgg

SEQ ID NO: 27749 - DNA, 201 bp, Homo sapiens
cggggttcaagcagttctcctgcctcaacctcccaagtagctgggattacaggcacacaccatcacatctggctaatttttatattttcagtagagacagkgtttcaccatgttggccaggcaggtctcaaactcctgacctcaggtgatccgcccacctcggcctcccaaagttctgggattacaggcgtaagccactgc

SEQ ID NO: 27750 - DNA, 201 bp, Homo sapiens
aatattgtctggttgagaccatttgtcctaaaggaatacagagaaaggaaagagtgtgtcggggtgggagggcaaatactggtgatggaagctgagttgarttttgcagggtggggtcttctggatgaggacaggtgggggagggagagagacaggaaccaggaggagcaaagtggaggttggagaggtaccactcttcac

SEQ ID NO: 27751 - DNA, 201 bp, Homo sapiens
cagacagcctgatggccttgacttttctttttctgtcttttttccttcctgtagaggagttttcttagacaccatccttccccgtcaagatgacaatggcrtcaggccaaccattggccagcgcgtgcggctcagtcagggagacatagctcaagcccggaagctgtacaaatgcccaggtaactatgagccgtggggact

SEQ ID NO: 27752 - DNA, 201 bp, Homo sapiens
cccccgacgccaagctgcacggcaggttctgcggctctgagacgccggaggtcatcacctcgcagagcaacaacatgcgcgtggagttcaagtccgacaayaccgtctccaagcgcggcttcagggcccacttcttctcaggtatgcgggttcagaggtgaggctgatgcagtgcgagtgaggcggctttgcagactccag

SEQ ID NO: 27753 - DNA, 201 bp, Homo sapiens
ttgatgttatatctacgccattgccaaatcaagataatgaagatttatgctgatgtttcctcctaatagttttttggttttagctcctacatttaggtcaytgattcacttggagttaaattttgtatatggcttgaagtaggaattcaactttattcttttgcacatttgtttcttttaaaagcctctggtggcttgtgg

SEQ ID NO: 27754 - DNA, 201 bp, Homo sapiens
tgcttaaggtttattatttaatgtccttaggtttcctgtgagcatgcttttgagacaacactcctaccgtggtctgaaagttctgcatgctaaagggtaaygtgagaacaccagtatgcaagatatatcttcccaaactcctcaggctttgctgccaaaactcactttatggtaattctttacagatcgtattaaacttca

SEQ ID NO: 27755 - DNA, 201 bp, Homo sapiens
attaattttttttctcgataacaaaagtttgtctatgatgatccccctttccatcaggtagtagggacttgattttggtcaatttgtgttttcagttttgktcaatttgtatgtcctggttgggggcatagtttatgccaaggcatggtggtggcggggggcatctatcctgccaccctgactggcattgctgggatgttc

SEQ ID NO: 27756 - DNA, 201 bp, Homo sapiens
tagcctttcccagacttccaaaccagacacagagtttgatcatgggatgaagtatttgaagtgaggaccgtcttagaaaatctgggctgtcacattacctyactaagcaggacccgagggatgcaaagggctgcgtggggcttgcttcctcaagaaactttagaaaatatgtccgtccagctattagtcatctgggggcgt

SEQ ID NO: 27757 - DNA, 201 bp, Homo sapiens
tcacatcatggagaatggggtatccctcccctcaagcatttatcctttgtcttacaaacaatccagttacactcttttagttgtttttaaatgtacaattracttattattgactatagtcactctgtttttttggtcaaatagtatatcttattcatgctttcatttttttttctttacccattaaccatctccaccttc

SEQ ID NO: 27758 - DNA, 201 bp, Homo sapiens
tcattttagatttcagtcaaataggagtagaataagatgttagagatagaaggggctgccatgaccatctcaacaaatttcttattgtttagtggggtaamctgagacttagagaggctcagagaggggaagggtcttgtccaagcacacacaggcctagtgtagaaatctctagtccagggcttttttcactacttcttg

SEQ ID NO: 27759 - DNA, 201 bp, Homo sapiens
ctaaatatctgaacaaccaaagtgatctggctttgtgtccccacctaaacctcatctggaattgtaatccccacgtgtcaagggagagacctggtgggagktgattggatcatgggggtggtttccttcatgctgttctcgtgatggtgagcgagttctcacaagacctgatggtttaaaagtggctgtttcctctgtgca

SEQ ID NO: 27760 - DNA, 201 bp, Homo sapiens
ctgggtcacagctgtgtctcccacataccctggcacattgtggatctgatttgatttgaggcaggtggtaagccctggccagaggtctgcaccttggatgrctccgagggcatccagtggttctgagctcagcccgaattgaaggggccctcctttatgtctggaggggacaattttctattcctgaggaaggacctgctc

SEQ ID NO: 27761 - DNA, 201 bp, Homo sapiens
tagtctttgtcctcaaatctgctccctggtgtcactacccacccagttattcaaattccaagggcaggtggcattggtggcccctgtctttcctcagatcraatccactagccctacctgcgagctctgcctatgactgttccctaacacgacaggtcccagcacctccactgcagtgtctggtccacgccaccaccctgt

SEQ ID NO: 27762 - DNA, 201 bp, Homo sapiens
tataccaaatgtcttgcaaagaaatgttattaaaaccttgaatttttacaaatgtaaaaaacaaaaagtgtattaatgtatttgttcaggaaaagctacayaccgaagggcttttgtatatgaattctgtggtggggagacccatttgtaatctatatggcagttccatctgggttttaagtttagatttcaccgtgtctt

SEQ ID NO: 27763 - DNA, 201 bp, Homo sapiens; identical to SEQ ID NO: 3396

SEQ ID NO: 27764 - DNA, 201 bp, Homo sapiens
aggcactgtgggagttctgagaatggaagagatctctaagggagggggttataaaatgagcgaagcagaaggctgacaaggcgtgctggggagggaggacrtggaaatgaagtaataatgggagcagatggtaggtccacgtctgtggcgcaagagaatgaatgaatgagggagaagcttctggtttggggaggtgatggg

SEQ ID NO: 27765 - DNA, 201 bp, Homo sapiens
gctacctgcgggggagacatgaacaaagatgccggtcagattcaatctcccaactatccggatgactacagaccttccaaggaatgtgtctggaggattayggtttcagaggggtttcacgtgggacttaccttccaagcttttgaggtgagtgctgctcagaccggcttcccaaggaaacggcaacttttgctagacatc

SEQ ID NO: 27766 - DNA, 201 bp, Homo sapiens
ctggggccacggtggggtgcagggccaggtggggcaagggtggtgcctcctcttgagtgtccatccagggagtgggtatcctcatgaaccatgaacctgaragcctgaatcaaaattgggagatgagcttaagaaattgggacaaacaagagtttagtacctgacgttctagccaaggctctttagttgtgagatacagaa

SEQ ID NO: 27767 - DNA, 201 bp, Homo sapiens
gggtagtgtgctgctgagactctcgtgtgttgagtccaaacccctgaaatccctctgtcagaggacagggctggccccagagccagggctgggctcagccygcagaaagcaatcagcaggtgctagctggaaaggagggggatgtcagcacaggaaccaggcgcagcctggcagttattccacccatgaagttttgaattt

SEQ ID NO: 27768 - DNA, 201 bp, Homo sapiens
tggtccagccctggtggagaggggcggagcggccactgctccaaccaccgccgccaccgccacactcgcagccgccgcagcctcggccgccgggcaagtakctccgagcggctgcttcccggttgcctcgacgaagacagggggcgccgcgctccgcttgctccgcgcctgagccatgcccagcagccctgtgtaaccacc

SEQ ID NO: 27769 - DNA, 201 bp, Homo sapiens
gggaaggccccaggtgacagctgtcacccaggcgggaggctggtggtgggggtccagcctgggtgcacagggccccaccagaggcagagcagaggcacagrcacagggaggctggggtgtgtgggccagagacccaggcaaatcccatcagaaaggctgtaagcaggcttcttcttccatgctgggagctcaaaagaacaa

SEQ ID NO: 27770 - DNA, 201 bp, Homo sapiens
agctgctgacgacttaggctctccatcactcccctagagaggtgctgggggtgcacaggatgtgttttgcaggcttatgggtgctaaacctcatcctgccygctattatttattcagcatctgcccgacccatcaaccagtctgtcaacagcagtgacagtctggcctttcttcttttattccagcatcaggctgggcaca

SEQ ID NO: 27771 - DNA, 201 bp, Homo sapiens
aagaccaggttactaggaggcaggaggagtttgtgagacttgagaatcttgtgaaggtttgagatcaaactagtcttgaggggcctggtcttagtaagggragtttcctgcagaatatctacctactgctgtatctcttggggcttctgagttaggaaggtgggcagaggagttggttcctggacaactggagaaaacctc

SEQ ID NO: 27772 - DNA, 201 bp, Homo sapiens
ctttgaagtgtcagaggccctgtgtttagctcctacactccattgcttctagaaacagacactggcatcacttctaaccctgttcccttgagctgctgackacttaggctctccatcactcccctagagaggtgctgggggtgcacaggatgtgttttgcaggcttatgggtgctaaacctcatcctgcctgctattattt

SEQ ID NO: 27773 - DNA, 201 bp, Homo sapiens
aggggagggtcttgaatctgttcctggcttttcaggatctgtgttaccgggacgactcccctcctctctgggcctcagttccttacctgcagaatgaaaawgtctgccttgttagaattacaaagtgacatgtccagagagcttgtgctcttggtcctcatcaaccgtcttgccctgggcctacttcataccttgcaagca

SEQ ID NO: 27774 - DNA, 201 bp, Homo sapiens
ttatttaatcttcacacaacagttctatgtggtaggtactattagtacgtgtaggtgtggaaatgaattttcagagaggtaagtaagctgttggtgagcayacagctaatcattggcagagccaagattaggactctagtctttgaagtgtcagaggccctgtgtttagctcctacactccattgcttctagaaacagaca

SEQ ID NO: 27775 - DNA, 201 bp, Homo sapiens
tttatttaatcttcacacaacagttctatgtggtaggtactattagtacgtgtaggtgtggaaatgaattttcagagaggtaagtaagctgttggtgagcrtacagctaatcattggcagagccaagattaggactctagtctttgaagtgtcagaggccctgtgtttagctcctacactccattgcttctagaaacagac

SEQ ID NO: 27776 - DNA, 201 bp, Homo sapiens
gggtttcgccattttgcctaggctggtcccgaactcctgacctcaggtgatccacccgccttggcctcccaatgtgctgggattacaggcatgaacctcartctttctgttttgcttttataaacaatgatgctggaatcatctctgtagctagatgtttatatacatcgtgagttatctctttagaataaatttctagaa

SEQ ID NO: 27777 - DNA, 201 bp, Homo sapiens
cctcagcagcagggcagcggaattcctgcagttccctttcgctcccgcagcattaacccacggcttcctagtgccaggtgcttaattagggattggtggtaaaaaagatgactaagatttcatcctgccttcaaggaggtctgttctcacagcagagaaaggtgagtgcctaaagaaaaaaaatagaaattataaaccact

SEQ ID NO: 27778 - DNA, 201 bp, Homo sapiens
cgccattttgcctaggctggtcccgaactcctgacctcaggtgatccacccgccttggcctcccaatgtgctgggattacaggcatgaacctcaatctttytgttttgcttttataaacaatgatgctggaatcatctctgtagctagatgtttatatacatcgtgagttatctctttagaataaatttctagaagtagaa

SEQ ID NO: 27779 - DNA, 201 bp, Homo sapiens
acacctaggtaagggtggctgatatttttacatctttatttccattctaacttgttatgatgtccttgctgatgggcaggtgctgatttgatggaattaaratatttcagggcaatattggagttaaatgtttgtcttttttgtttctccagatgatacaggtgcagaatctagtccaccttctctacacaatttcacaca

SEQ ID NO: 27780 - DNA, 201 bp, Homo sapiens
agcatcttcacctcgctcgcctgcctccgaagttgcgaaggtgccgggaagaggaggggcctcgcctcgggcgcccgagtgattggctgcttagggcccckggcgaaggctgtgtggtccagccctggtggagaggggcggagcggccactgctccaaccaccgccgccaccgccacactcgcagccgccgcagcctcggc

SEQ ID NO: 27781 - DNA, 201 bp, Homo sapiens
tgctcctggccctcaggcagtatctttacagtagtgtgagaatggactaatactcaaagcctggtgatttttaagggatttatgggattttaagggatttrtgttttctaatggtgccaattctgatagctcatctatactcagagactttttgtgtgtgtgcagtggtgggatcccagctcactgcaacctctgcctcct

SEQ ID NO: 27782 - DNA, 201 bp, Homo sapiens
tcgaactcgtgacctcaggtgatctgcctgcctcggcttcccaaagtgctgggattataggcgtgagccactgtacctggcggacaaattttaatgtgaaraatggccaagtgggtgcctttgtcaggtctctgagagtagaggaaggctttcccttcatctcctcccatccagcagggtagtggttgtctcatcacctaa

SEQ ID NO: 27783 - DNA, 201 bp, Homo sapiens
tttcacacaccaccatgcaatggggcagggtgtgagccagttaagagcacaggctctgatgcaggccagacctagattccaaatctgccacctaggcaagsctgtgtgaccttgagtatgttactcaacttccctgagcctcagggaaaaaaagaactagtaatatccacttttcaggattgctataaggattaaataata

SEQ ID NO: 27784 - DNA, 201 bp, Homo sapiens
ttgaagaacttgttatgccccaacaagtgtgtggagtgaactgaattgtatgaacagcactgctttccatacttctgagacagcctgtgggcaaagcagcrggtgctagaggcaaatttcctgggttcaaatactggctctaccactccacggctgtaggcaaacctgcctaggcttgctgggacactgtccttatctatg

SEQ ID NO: 27785 - DNA, 201 bp, Homo sapiens
ctggtgggaaatcacagtcacctggagccaaagccaaatgaatcctgtttctgtttcccccgtgcagtggcctgtggcggtttcattaccaagctgaatgsaaccatcaccagccctgggtggccgaaggagtatcccacaaacaaaaactgtgtctggcaggtggtggcccccgctcagtaccggatctcccttcagttt

SEQ ID NO: 27786 - DNA, 201 bp, Homo sapiens
gcccggctaattattattattattattttttgtatttttagtagagacagggtttcaccgtgttagccaggatggtctcaatctcctgatctcgtgatccrcctgccttggcctcccaaagcaaagggtctttcttacaagggctcttagttgtcctgataacataagcaggtgaaatacattgttcaaggagacattaac

SEQ ID NO: 27787 - DNA, 201 bp, Homo sapiens
cacatttaacaaaatctaacacctattcacgataaaaactcaacaaattaggaatagagaggaattatcttaacttgatacagagtgtctagaaaaaaacytacagcttacattatactcaatggtcgaaagaccaaacaccttttcccaagaccaagaacaaggcaaggatgtctgctttcgtactgtcattcagcgtag

SEQ ID NO: 27788 - DNA, 201 bp, Homo sapiens
actctctaggttttggcagctcagaaaagttacgttgtgtttttagcaagggaaatcctgattcctgaaaattcctggagtatttctattctgaacaagcttttttttttttttgaaaatatttaattgacaaataaaaattgtatatattcaaggtatacaacgtgaagatttgatatattatgtctcgatcaccataat

SEQ ID NO: 27789 - DNA, 201 bp, Homo sapiens
actgcaaagagggtgaggctggacctccagttgttgggggggcgggctgcccttcgccgcaccccatgcccctgtgtgcatgtgcatgagtaaggcggtgyggcgaggacctcttccaccttctgagctgaggcccagcaactgctgtccttgcgggagagttttccccagggcatctcgctccttcaggaggcacctggg

SEQ ID NO: 27790 - DNA, 201 bp, Homo sapiens
ggacagccggctctgggtggagttccgcagcagcagcaacatcttgggcaagggcttctttgcagcgtacgaaggtttgtgcgaggtgaaagcagctgctyggtggcccctcataagctctgtccttcccaggcagcccactgtccctctcccagcccagacactccaggccagagccacaggggtgggggcagccaccac

SEQ ID NO: 27791 - DNA, 201 bp, Homo sapiens
ccttcacctggctaagatggtgccaagagacttgctcctctgtgcacctctttcttgcctgtgtgtcctgcctacagccacagcatcttctggtatcagartctcctgcagaccccagccttggtcctttgtctatctgtctctcccaatgggctctttccttggtttccttctgcctcttccctaggtcccccagccagt

SEQ ID NO: 27792 - DNA, 201 bp, Homo sapiens
cgaccatgggcatcaggaccttggagggctgcagtgtgggaagacgtgggtgtcggagcccagcaggcctgagtttgcgtctctggctctgtactgattckctgtgggactcagggcaactcattccttatttgtaagatggaataatagtacctgcctcacagcgaggattaaataagtgtgacacgtaaaacacttatt

SEQ ID NO: 27793 - DNA, 201 bp, Homo sapiens
ggctggagtgcagcggtgcgatctcggctcactgaacgctctgcctcccaggttcacgccattctcctgcctcagcctcccgagtagctggcgctacaggsgcccgccaccacgcctggctaattttttgtatttttagtagagatgacacggtgaaacgtgttagccaggatggtctcaatctcctgacctcgtgatctg

SEQ ID NO: 27794 - DNA, 201 bp, Homo sapiens
tggggggctccctatgatatcctacagaagggacgatgtctcgattttgtgaatgaacgtcaggctggactcttgctgggccagttcattggattcaagtytgtcttctctcacgtcatgcattgccaagtgccatctctgagaaatctcagggcctctgctgccagggccacaggtttggaaatctgaagagtcacaggg

SEQ ID NO: 27795 - DNA, 201 bp, Homo sapiens
ccaccacatcagggtaatttttgtatttttagtagagatggagtttcgccatatcagccaggctggttttgaactcctggcctcaagtgatctgcccaccycagccacccaaagtgctgtgattacaggcctgagctaccatgcccagctatacccagagactttgacctaaaacttaaatcttccatgaatctcagtggc

SEQ ID NO: 27796 - DNA, 201 bp, Homo sapiens
tgccccccttccaccacccccaggaaaagagaccgcccaggcaggagaaaggatctgagggaagcgcccagtttcggcagcaggtttatttcctggcattwtgtggctcccctcagccctgacggtggggatttgtgcctccagctttggggagggggaaagggctgaaatgctcactcaacatcccctccggcagaccct

SEQ ID NO: 27797 - DNA, 201 bp, Homo sapiens
aggctggagtgcagtggtgcactgcagcctcaacctcctgggttcaagccatcctctcacctcagcctcctgagtagctggaaccacaggcacatgtcacygtgcctggctaatttttgtattttttgtggagacgagatgtcatgttgtttcccaggctggtcttgaactcctgggctcaagcaatcctcctgcctcagc

SEQ ID NO: 27798 - DNA, 201 bp, Homo sapiens
cagtctgaaggtcacatttgtgtatatgttccctgagcaccaaagcccatgaccgtctccctatctttttctttatccttgtctaggaatctgacaaggaygagagaattctggctttccaagtactctgtcctaaagcatagggaagaataaatgaataataccaggtgtcaaaatgcacctgtccccgtctctgttcct

SEQ ID NO: 27799 - DNA, 201 bp, Homo sapiens
ctaaccagtctctccatccttcccatcccaaccctcaggatgctgtcggcgccagcgctggatgcctcttgcttttatttgaatgaaagataagacacgtygtgtcaatctcaggttccctttaatcacaacttgccccccttccaccacccccaggaaaagagaccgcccaggcaggagaaaggatctgagggaagcgcc

SEQ ID NO: 27800 - DNA, 201 bp, Homo sapiens
gatttgagtgctggtgtttcaggctaaagaaaagaggggaaccaaaggctatcaggcattacagggctaaaggtaggcattgaacaccagtgcatacccargagatacccaatgtccagaatcagagaacttggatttagggtttctgggctctgctttccaaggtttgaggctctaaaaagagatccaacatgtttctgt

SEQ ID NO: 27801 - DNA, 201 bp, Homo sapiens
tgtgatcacgtttgcaagatcagacctgcttaggatcctttaatgtcaccccattgcacttgggataagagcaatcagcaggccccggggtgctctggtcrttgcttgtccctatgactcagcctccctccccttacctgccaggttccagctcacatcggttcttcttcctgcctggaaatgtctctggactctatgtgt

SEQ ID NO: 27802 - DNA, 201 bp, Homo sapiens
gttctaaccagtctctccatccttcccatcccaaccctcaggatgctgtcggcgccagcgctggatgcctcttgcttttatttgaatgaaagataagacaygttgtgtcaatctcaggttccctttaatcacaacttgccccccttccaccacccccaggaaaagagaccgcccaggcaggagaaaggatctgagggaagc

SEQ ID NO: 27803 - DNA, 201 bp, Homo sapiens
tactttggaggctgaggcaggagaattgctggaacccgggaggtggaggttgctagtacgatttcactagccaagatcgtaccactgcactacatctgagygacagagtgagactccgtctcaacaacaacaacaacaacaacaataaaatatatatatatatatatacatataaaattaaaaaggaaccacacctttatc

SEQ ID NO: 27804 - DNA, 201 bp, Homo sapiens
acatgtcatttcccccatgaggccttcccagtccccagtctcaatcaggtcccctttcaagtttctcatcgcctttgtttttctgaaaagcactctttacratctgtaactgggtctattactgatgtgagtattattgttcaatgactgtctctgcattggacaatgagctccaaggagtataaacgagactgattttgc

SEQ ID NO: 27805 - DNA, 201 bp, Homo sapiens
gagaacaaagaccttgctgacatgttgtggttctgtacccatgctttggaattgggctgacttaggtttttcttctcagctttgtcactttccttttttctttttttttttttttttttttttttgagatggggtctcgctctgtcatccaggcctgagtgcagtggcacgatctcagctcgctacaacctccacttcccg

SEQ ID NO: 27806 - DNA, 201 bp, Homo sapiens
tgtgtgtgtgtgtgtgtaacataaaagggattagggattttactcaatgtgctttggtgttgtctgaattttttacttaacactttatcatggacatcttstcatgcagcacgttgtggtctctcttattttaacggcagtagtgattcaatgtgcaactctgccatgatttacctaactaagccattatagataaatgtg

SEQ ID NO: 27807 - DNA, 201 bp, Homo sapiens
caaatcaagcacataagatgtaaaattagagcccaagaagctttgggttattaggacctaaactgcatcctctctccattacctaatggagcccgtgtgarctcatgctgtgggaacgcagcaggcatgagatagcagtaagtcatattctgcccaattaagcagtgaaaggtgttggcataggccaaagtagtcatccct

SEQ ID NO: 27808 - DNA, 201 bp, Homo sapiens
tttgatatttactagttcgttgggtgtaaaatgacccaactataaacttggacagtcagacacacttgggtttgaatcccagctcacccacttagtagctrtgactttggataagttatttaactgcttgtatgaggtttagagggaattagaaataatatttatgtaaagcacatagccaggtgtctggaacttaaaaga

SEQ ID NO: 27809 - DNA, 201 bp, Homo sapiens
tgtgtgtgcatgtttgcgtgtgtgtgtgtgtgtgtgtgtgtgtgtgtgtgtaacataaaagggattagggattttactcaatgtgctttggtgttgtctgmattttttacttaacactttatcatggacatcttctcatgcagcacgttgtggtctctcttattttaacggcagtagtgattcaatgtgcaactctgccat

SEQ ID NO: 27810 - DNA, 201 bp, Homo sapiens
ataagaggaggggctctcagcaaaccagtgtctttgtctttggagtctgaatccccaggcattagagaaatacaaaacctgtagtttccaaggattcatayaggtacccttcatttgtgaggacaaattaggggaaatacttttcacatacataaagactaggttctagactcataaccaaccctcaaacattcaagggca

SEQ ID NO: 27811 - DNA, 201 bp, Homo sapiens
gcctactgagtagctgggactataggtgtgcaccacaacaccgggctaatttttgtattttttttttttttggtagagatttttttttctttttctttttkttttttttttttaaatcatgttggccaggctgctctcaaactcctgggctcaagtgacttacctacttcagcctcccaaagtgctgggattacaggtgtg

SEQ ID NO: 27812 - DNA, 201 bp, Homo sapiens
gatatttaatttgtactcctctgactgctggtgccgttgaacattttttcctatgtttgtcagtgggaatcgcctcttcctgtcctgtgcccattttcctrttgggttgctgatcttcctcttcaatctgacttcttttagagagaggcagatcctttagtcacccatgtaactaatctgcatttgtttcttagctataca

SEQ ID NO: 27813 - DNA, 201 bp, Homo sapiens
cacaacaccgggctaatttttgtattttttttttttttggtagagatttttttttctttttcttttttttttttttttttaaatcatgttggccaggctgstctcaaactcctgggctcaagtgacttacctacttcagcctcccaaagtgctgggattacaggtgtgaggcatcgtacccagctaaaagatttttatacc

SEQ ID NO: 27814 - DNA, 201 bp, Homo sapiens
ctccaccctgggtgctctaacagcctcaggatcccgttccccaattctcagcctccctttttgcccatgctgagcctctcagatcccctggcctcctgtcytgccttaccctcactgtctacagcagtccgcatggctgggccccccactccagctggcttgccctcactgcacccctcctgctcctgccctgacagtgcc

SEQ ID NO: 27815 - DNA, 201 bp, Homo sapiens
gttgttgcccaggctggtctcaaactcccgtgctcaggtgatgttcccaccttggcctcccaaagtgctgggattacaggtgagccactgcacctggcttrggatcacttcagtttattcttttaggttatctaggagagcagctgctttgataccaaactcctggtttctctcctgcagcagcattaccctgatttcctt

SEQ ID NO: 27816 - DNA, 201 bp, Homo sapiens
aggcatgctatcagcattcttagtccatgtcttcatttgaaaccatagcgcattcagttcatcatctgccttccgagtgaaggcaggcaacactttgactraatacttcgtcaccgtcactgcataacatagagatgacttcctttcagcctctagtaacagtttccttgacacctggcccaaaggcaatggatttttgtt

SEQ ID NO: 27817 - DNA, 201 bp, Homo sapiens
tcaagtagggctgggccgtttatttatggctggcatgggcagggtctgttctgatgagctgttctgatgtgctgcgcctagcagacattaaagattttcaktattttccctgcttctagaccctgtaagtgctttgtgtgcagaagtttttccctacttgtcccagttttgtagttctttctagtgttgagttaaaggagt

SEQ ID NO: 27818 - DNA, 201 bp, Homo sapiens
acattaaagattttcattattttccctgcttctagaccctgtaagtgctttgtgtgcagaagtttttccctacttgtcccagttttgtagttctttctagygttgagttaaaggagtcacagagaacaaatattttctctcttggtactttctcttcagtctcctgttaaaaccagctgtttgcttgtttatttatttagt

SEQ ID NO: 27819 - DNA, 201 bp, Homo sapiens
agatcccacccctgaatagtggctgcattcatgtgggttgaccccaacagcagggggtgtcagagcaacatctcaggagctgagcaaatgtcccaggagcygagccactgcccctttgagcacctgttctctgcgttggctgcagagcagatgtagcactgagcagaggcaaatctctttggaacatcctcgaagctgttt

SEQ ID NO: 27820 - DNA, 201 bp, Homo sapiens
gcatgactgcaaagagggtgaggctggacctccagttgttgggggggcgggctgcccttcgccgcaccccatgcccctgtgtgcatgtgcatgagtaaggmggtgcggcgaggacctcttccaccttctgagctgaggcccagcaactgctgtccttgcgggagagttttccccagggcatctcgctccttcaggaggcac

SEQ ID NO: 27821 - DNA, 201 bp, Homo sapiens
cctaggtccatccaccgggctctctcccttcacctggctaagatggtgccaagagacttgctcctctgtgcacctctttcttgcctgtgtgtcctgcctayagccacagcatcttctggtatcagagtctcctgcagaccccagccttggtcctttgtctatctgtctctcccaatgggctctttccttggtttccttctg

SEQ ID NO: 27822 - DNA, 201 bp, Homo sapiens
aaggagacctgaaagccacagggaaggaatgtgaagggggtggaatttttccttagtgtttgtgatttgattctgacactggtcacctttctaccttcccrataccacagaggtataggcaaaagggctctggacgtggcaagtggagtttgaggtgctggtcccatgttccctactagctattcgctctcttgcagatca

SEQ ID NO: 27823 - DNA, 201 bp, Homo sapiens
aattcctaacatggctgggctggaactagaacctggatctgtaggattccacaatccgctctgtttccactaaggagacctgaaagccacagggaaggaaygtgaagggggtggaatttttccttagtgtttgtgatttgattctgacactggtcacctttctaccttcccgataccacagaggtataggcaaaagggctc

SEQ ID NO: 27824 - DNA, 201 bp, Homo sapiens
gaccacccagccctccccttccccctactaagtagtcacctatttggccatgggagcatccactacctgacctcagggatgtccagacagggctgccaagrtgctcctcatgacaatccctctcttttcagtgtttataccatagtgttctcattggcttggcccatctgcctttccccccttctctgggctccccaaggg

SEQ ID NO: 27825 - DNA, 201 bp, Homo sapiens
ccagacaagccactgcacctcaggacagtgggaggagccacaggcacctggtttagtggaacttgcgtgggggtgaaaggccaggggaaatctgaactctkctctgggccatctgccaggggagccccgagctggtgggctgcagggggaccagagccagttcacaggtacagcacctgtgtgctgaggcccagcccctgg

SEQ ID NO: 27826 - DNA, 201 bp, Homo sapiens
cagtccctcccttgcttccattctcctcttctgccccatcttagaccttctcccaggttctacgtgaacagcctgggtgtcaaaagaacccacttctgcamtgtcacccagagcaggcagccattcgtccttactgaagcttcagttttcctctctgtaaaataggaagaaggacatctgcccattgtacctaagcaattg

SEQ ID NO: 27827 - DNA, 201 bp, Homo sapiens
ctgctgctctgtagggtcctgatggaaccaggcccagaatggcatgggcagaccgagctttcctggccccagaagagccagcttccaaccctcctttgaaygggcaggtcctccttctctgctgtcaggcccctgaaagccctgaagaccacaccctaagagggaagcatggctgctccccactgcattgggcctgggcgc

SEQ ID NO: 27828 - DNA, 201 bp, Homo sapiens
gccagtgtggtgaaaaccagaaaggataagctctgggcagaggggtcatggggcacaaggccaaataacagtcctttagatttggtggggagggaatgggmacctttgaggaagccttccagcctaagggtttacttagagctagagggcccctggggctgtttgaatataaagaagtggctagtggaggggcagtgagtg

SEQ ID NO: 27829 - DNA, 201 bp, Homo sapiens
tggctccttgaccatcggggcaatggcatctcctacagtggaggaggctggaaaggaaatgctttgtttggaggtgctctcacctagtagggagcgggaasggcagaggagcaagagcagtggggagaagataggccagtgtggtgaaaaccagaaaggataagctctgggcagaggggtcatggggcacaaggccaaata

SEQ ID NO: 27830 - DNA, 201 bp, Homo sapiens
gacttcgtttcctaggagatcgcagggctttgtggaagatgtgatttgtcctgagacgaaacattgggtgggatgggcccaagggaagggatgggcactcracactaatcaagatgggcagcttgcgaggtgtggttagtgttagttgtggtatgctaagtgtacactcaatgtggactacctggtattttaagttgctat

SEQ ID NO: 27831 - DNA, 201 bp, Homo sapiens
aatgtattgatgcaaccatattatgatatagatgaggaggcgaggcaggagactgtatctgctttaagcaaggtggtcgccagcccaggtaccagccagasccccttggctcatctgtcaagtaggatgatgccagccaaggcagagggcagggctgtgtgttctcttgagaagcagtcagctttcagagcggctgtggag

SEQ ID NO: 27832 - DNA, 201 bp, Homo sapiens
catgcaccatttctgtccatttctgttgaccctctgtaacactgtgttgagatggattcagagactgtgtccaggctcaatggacaggagagctgtgatcrattaggaatatctatcctgagcaagagtgggtaaggggaggcacatgcttgtctcttatttgccttttctggtgtaggaaaagcccatggttgggagtcc

SEQ ID NO: 27833 - DNA, 201 bp, Homo sapiens
agagtcctgaaatttagggtcatggtttcaaagttcatggtcctgagaataaacaaaaaaactattgtggttgcatagagctgtagaccccattaacaccrtcccatgaatatttatagcgtggaactacaaaagaacatagaggccatattgtatttcctagaactttctttctaggggtcctttctctgtgggtcactt

SEQ ID NO: 27834 - DNA, 201 bp, Homo sapiens
atttggaaagaggaagactgggaggcacaacagtcactgatccataacagttctgaaatcaggctggacacatgttgcaagaggcgcctaggatggggaasgttccttcatgaggccctgatgccacctcctgccagtagctctccattcattttccctgtgtggctttgagctccacactctgggaggtcctgcccttcc

SEQ ID NO: 27835 - DNA, 201 bp, Homo sapiens
atggtttcaaagttcatggtcctgagaataaacaaaaaaactattgtggttgcatagagctgtagaccccattaacaccgtcccatgaatatttatagcgyggaactacaaaagaacatagaggccatattgtatttcctagaactttctttctaggggtcctttctctgtgggtcactttaatgtaagctttgcttattt

SEQ ID NO: 27836 - DNA, 201 bp, Homo sapiens
gaagactgacctgggagggtttacgattaaagtggagagtggggagctgggcattcacccctgtggtcccagctacttgagaggctgaggtgggaggatcrcttgagcctgggagatcgaggctgcagtgagcaagatcacgccactgcactccagcctgggcgacagagcaagactctgtctcaaaaaaaaaaaaaatta

SEQ ID NO: 27837 - DNA, 201 bp, Homo sapiens
tacagactgtggagatgcagacctcgtctcttcccccgtgtagaccatgcttcatgtcccaagatacagagccactgcagaatatttgtgattaggtccaygggtaggaagctgactgaacaataaaccatgccttagtgtagccctgaggtctaagtgtagaaacgaaaatcaggaagtgtcctggttgatgaaggtgag

SEQ ID NO: 27838 - DNA, 201 bp, Homo sapiens
ttcacttattgtaagtgtacatgcgattttagtaaatttataattgtgtaaccataactacaatccagttctagagcatttccagcaacccccaaatttcygcatgttcatttacagtcgatccttgtttctgcccccagtcctaaacaattacaaatatttctacttctataaattagccttttgtagacatttcatatc

SEQ ID NO: 27839 - DNA, 201 bp, Homo sapiens
cagtttgtggtttgggctacgataaataaagctgctgcagtcattcttggacgtagtgttttggtgaacacgagcactcatttccactgggcctgtgcccrggagtgggggtgctgggtcatagggcacacacagttcagcgttagtaggtactgtcgtagagttctccaaagtggttgtaccactttacgctctaagtgg

SEQ ID NO: 27840 - DNA, 201 bp, Homo sapiens
agacctcgtctcttcccccgtgtagaccatgcttcatgtcccaagatacagagccactgcagaatatttgtgattaggtccacgggtaggaagctgactgracaataaaccatgccttagtgtagccctgaggtctaagtgtagaaacgaaaatcaggaagtgtcctggttgatgaaggtgagatgaggtaaggtgggcct

SEQ ID NO: 27841 - DNA, 201 bp, Homo sapiens
catgtctttgtatgaacatgtgttttcatttcttttggaaagatccctaggagttgaattgctgggtctcacgataaatttaagttttcaggttttttcgttttttttttttttgagacgtagtctcgctctgtcgcccaggctggagtgcagtggcgcgatctcggctcactgcaagctccgccgcccgggttcacgcca

SEQ ID NO: 27842 - DNA, 201 bp, Homo sapiens
tatgaacggactctggtttatttgttcttcagttgacagacatgtgggcagtttgtggtttgggctacgataaataaagctgctgcagtcattcttggacrtagtgttttggtgaacacgagcactcatttccactgggcctgtgcccaggagtgggggtgctgggtcatagggcacacacagttcagcgttagtaggtac

SEQ ID NO: 27843 - DNA, 201 bp, Homo sapiens
acagagccactgcagaatatttgtgattaggtccacgggtaggaagctgactgaacaataaaccatgccttagtgtagccctgaggtctaagtgtagaaaygaaaatcaggaagtgtcctggttgatgaaggtgagatgaggtaaggtgggcctgcaggccactctcctcggataaaacccgggtgtttgttggtttggag

SEQ ID NO: 27844 - DNA, 201 bp, Homo sapiens
gcagtattctattgtatgaacggactctggtttatttgttcttcagttgacagacatgtgggcagtttgtggtttgggctacgataaataaagctgctgcrgtcattcttggacgtagtgttttggtgaacacgagcactcatttccactgggcctgtgcccaggagtgggggtgctgggtcatagggcacacacagttca

SEQ ID NO: 27845 - DNA, 201 bp, Homo sapiens
tggtggccttcctgccttcttctaggccttctgcaaggaggtatttgttcactcacggattcggggatgagaatgttctgaaggtcagtgccaggccctgygctggatgctggtgttttgggtgtggggggtgtttgcaggagaggaggatgtgtgcatggaaggggtagcatactgtaaagtgctataccagaatgaggg

SEQ ID NO: 27846 - DNA, 201 bp, Homo sapiens
gggaggattgcttgagcccaggctttcaaggttgcagtaagctatgatcgtgacactgcactccagactgggctacagagcaagactctgtctctctttaaaaaaaaaaaatccatcccccaacaaaaaaaacagtgttttcattttttaatccatgctgcatatccatcctgataagccacactgtgctatacatcatct

SEQ ID NO: 27847 - DNA, 201 bp, Homo sapiens
acatccctcccagttaatacgtgtcccaaagtagccactggtctgacctctatcaccccagactccttttacctgcatggagtcgtacagtctgtattacygtgtctggtttcttttgtgcagcctgtgactgaaattcactcacattgccgtgttgctctttttcattgttatgcagtattctattgtatgaacggactc

SEQ ID NO: 27848 - DNA, 201 bp, Homo sapiens
aatctctctgtgcctacagtcctcacctgacactgggtatgatgatgcacattgcacgggtttgctgtcctgagggctagaggagcgagaggagcctgcayggtgtgggtgctgcagaaccatcagtccctttctcttcagtgcactggtcctgagaggagatctaaaacaccagatttggaagaaatagagattggtgtt

SEQ ID NO: 27849 - DNA, 201 bp, Homo sapiens
ctgaggtgggaggatcgcttgagcctgggagatcgaggctgcagtgagcaagatcacgccactgcactccagcctgggcgacagagcaagactctgtctcaaaaaaaaaaaaaattaaaattaaaattaaaacaagtggagaatgagggaaatttgctgtgtacatagggaatgtggggccttaggaatgaggcctttgaa

SEQ ID NO: 27850 - DNA, 201 bp, Homo sapiens
aattctaccactccatctaatcacacttttctccccagctcttacctggaggcctggagaagctgacctgactgtaatcttgtatgtgtagttaaaatagytttaaaacttttttgatggtgttacttaaaaatagtgaacttcatgtatctcaaacatacagcatgatgaacttttacatatgtacacgcccatgggacc

SEQ ID NO: 27851 - DNA, 201 bp, Homo sapiens
ctatttaacctctctgagcctcagttttttctttagttaaaagggtctaaacatacctccttcttaaagtttttgtgaggattaaaagaatgcctagaaartatttcagactctctgacacatgttatgtcctcaaatgtcaataaagatcagccatttatgtctttgtcatatattaattaccatatgcaggtcccattg

SEQ ID NO: 27852 - DNA, 201 bp, Homo sapiens
gtactttgcgtctacctagaatagtatgaatagttattttatcgtcagaatgggaatattttttattgtttttgttgattaaactaatgctgcttgttgtaaaaaaaaaaaaaaaaaaaaagtccagtagctcataattgtataaagtggaagatgaaaatcccctgttatcccagccccaaagatccctggcattaccag

SEQ ID NO: 27853 - DNA, 201 bp, Homo sapiens
tttttgaggtctcgtataaggtttgaaattctattcacattttaaatggagttttcaattatttttaataccaatatattcagaactttacttaagctctwactaaaggaagcatctttgcataattctaccactccatctaatcacacttttctccccagctcttacctggaggcctggagaagctgacctgactgtaat

SEQ ID NO: 27854 - DNA, 201 bp, Homo sapiens
tactttgcgtctacctagaatagtatgaatagttattttatcgtcagaatgggaatattttttattgtttttgttgattaaactaatgctgcttgttgtaaaaaaaaaaaaaaaaaaaaagtccagtagctcataattgtataaagtggaagatgaaaatcccctgttatcccagccccaaagatccctggcattaccagt

SEQ ID NO: 27855 - DNA, 201 bp, Homo sapiens
tggagggaaatgtgtgggcatgtgcccagggcaggggcacctcccacggttcatgaggaaccagagcagctacagggacctgccttcaaagctccctgcargggttggtggatgagggctgacattgccaggaggtcacggggacctcatcgccagtggctgggaggaaggtggggcaattatgtactttaggatttcttt

SEQ ID NO: 27856 - DNA, 201 bp, Homo sapiens
aaaatcccctgttatcccagccccaaagatccctggcattaccagtttgctggattctttccagacttaatgtgctcaggctgtgtgtgtgcatgtttgcrtgtgtgtgtgtgtgtgtgtgtgtgtgtgtgtgtaacataaaagggattagggattttactcaatgtgctttggtgttgtctgaattttttacttaacact

SEQ ID NO: 27857 - DNA, 201 bp, Homo sapiens
gctgggttcctggctgcctgcttgggcagcttcactatgctgattgcagtggggatggtgctggggggagggttgtatcaggcaacccctcttccaggctsctcatgtatgtggtgacatccaggaagatctctggaacctggagggaaatgtgtgggcatgtgcccagggcaggggcacctcccacggttcatgaggaac

SEQ ID NO: 27858 - DNA, 201 bp, Homo sapiens
ttctagcataaattcacccacttatgtgtttccttcccagctgtcttttggggagacattgccttagatgaagatgacttgaagctgtttcacattgacawagccagagactggaccaagcagacagtgggggcaacaggacacagcacaggtaggtactgcttcctcccttctcctgcccagatgggagggatgagggac

SEQ ID NO: 27859 - DNA, 201 bp, Homo sapiens
tgcttcctcccttctcctgcccagatgggagggatgagggacttcagcagggggagatgtggaccacgagtcatcggtgtttgacttgctagtctaatgcycccctatttgtggaaaatcagaggggtcacttctccttctccactggagccagtggagctggggcttccaagtttgctgattcgtctaagaaaatctcca

SEQ ID NO: 27860 - DNA, 201 bp, Homo sapiens
ttttatttctttgctgtgttttccctggcatcccttcccaagtcaaggaaagcagatgtctaatgcccccaaaagggaagggtatacatgcaacaggaaayaccaggaaaggaaatctgctctattctctcaccattcttcccctgcctcaccttcagagcctcagcaacacccctcggcaggggagaggctgcctgggct

SEQ ID NO: 27861 - DNA, 201 bp, Homo sapiens
tgtagcaatagctcatgtaactacttcatagggccacttgctggaccaaaagcaaggcggaggttgagaccctctctacagatgtcctcaagcatcatcayggccacacaccccctgcacagccagctggacgtctccctgcactgcctcgccccttcctgtcccagaactggaaaggaggcccccaccccagctgaacgc

SEQ ID NO: 27862 - DNA, 201 bp, Homo sapiens
tagtctgttctcacattgctataaggaactacctgagactgggcgatttatgaagaaaagaggtttaattgactcatagttccacaggctgtacaggaagygtggctggggagtcctcaggaaacttacaaggaaggcgaagagaaaacaggcacatcttcacatggtggcaggagagagcgaaagaagggggaaatgcta

SEQ ID NO: 27863 - DNA, 201 bp, Homo sapiens
ttcccctatggtctttatggttcactaacgtacttaaaataattagcctgaataattatcccattcattcagatcatgaatgtgttaccaaggaagttgtwctaacatttcctttctgtaattttaaaaaagcaaaggctaaagaattattgtgcaaccagcttacaggtgttactaagctctaccacctgaatatgagca

SEQ ID NO: 27864 - DNA, 201 bp, Homo sapiens
atatgtttgaactgtgtaaacttcatcaagccttaattattagtgctaactggggacagagagaatatacatcattgaaatttctgcaccaattatttccrtttctgcttcacccagctttccccagagctgcaagtaattagcaaacttgattgattcgagtatcacctcttgttcaccacctctttcccctatggtctt

SEQ ID NO: 27865 - DNA, 201 bp, Homo sapiens
caattcatcaacctgcacttgctgaccagcccctgagagtctcacattggaccagttcccaagctctccctggggtggctccaggacttaactacacacastacttcccaatgcacagctgcagggggcgccattcacaccgtggtctctccggggtctggacctgtcagggcttcatgaaaatgctcaggacacatccct

SEQ ID NO: 27866 - DNA, 201 bp, Homo sapiens
ttttggtttttgaagtctgcaatgttcttagctctataatttaatgtatcataaggcctactgttccttgggcagcaggaaacactggctggaaggaggargattcccagaggtgagctcctggcctgcctctccatgactagctctgtgccctgggaaagtcacttaagctctgcaggctcagtcttctcccctgtagag

SEQ ID NO: 27867 - DNA, 201 bp, Homo sapiens
tctttcaaactatgaggtctgtggaaaggaaccccttggaggggttaactgagcagttaactgtgggggaagcccactttggctccactagaacctcgcargcaacagccttggaacgtggctcccattcacagaccacctggcaaaacctttctgaccaatatagtggctccatcccatttttttgtccttggatgagac

SEQ ID NO: 27868 - DNA, 201 bp, Homo sapiens
ggttcccacctgcaggtcacagatgatggaagccgctgtattcaagtagggctgggccgtttatttatggctggcatgggcagggtctgttctgatgagcygttctgatgtgctgcgcctagcagacattaaagattttcattattttccctgcttctagaccctgtaagtgctttgtgtgcagaagtttttccctacttg

SEQ ID NO: 27869 - DNA, 201 bp, Homo sapiens
gcagtgagccaagatcgtgccattgcactctagcctggacgatagagtgagactttgtctctaaaaaaataaaaaaaataaaatgaagcatcagcaaccawagggaaaagggccgtcttctttcaatgtccttaattgacgcaatttgaaatggacaaccctttgttagtgccccattttttcctccctccttctttcctt

SEQ ID NO: 27870 - DNA, 201 bp, Homo sapiens
ctctgtgtcaaatttccagtgggtggggggagtcttttgtagaagcatggtggtgctcaccaattctcctagcagaggtttggtttattggaaactaggckgtgtcaaggctgggagggctgtaaatcatcgattcattttagaggtgaagacaatgaggctccagccagctctcagatggacaggtagctgaggactgga

SEQ ID NO: 27871 - DNA, 201 bp, Homo sapiens
ttgcagtgagccaagatcgtgccattgcactctagcctggacgatagagtgagactttgtctctaaaaaaataaaaaaaataaaatgaagcatcagcaacyaaagggaaaagggccgtcttctttcaatgtccttaattgacgcaatttgaaatggacaaccctttgttagtgccccattttttcctccctccttctttcc

SEQ ID NO: 27872 - DNA, 201 bp, Homo sapiens
ggtcggaatctatgcttatgcctcgtctgtgttttactgtgcctgcggcaggcttgggttggattcctggaggtctgcggagagtgggtctctgcatgctyctagcacggctggcctgtctgtccttgaaatacagtggcctctgcgctgcagtgaaatataatctaatcaggttcccgttaataagattgaatcccattg

SEQ ID NO: 27873 - DNA, 201 bp, Homo sapiens
atcatgcactacgcccggaacaccttctcaaggtcggaatctatgcttatgcctcgtctgtgttttactgtgcctgcggcaggcttgggttggattcctgraggtctgcggagagtgggtctctgcatgcttctagcacggctggcctgtctgtccttgaaatacagtggcctctgcgctgcagtgaaatataatctaatc

SEQ ID NO: 27874 - DNA, 201 bp, Homo sapiens
ccccatctgcatgttggaaataataacagctcttccttcacagcatcaccagaagtaagagagaaaatgcgcataaatgcttggcatggaataaacactcrgcgagagtcagccaccatgagggtgctgcctggagcagcgtgcacctcatacaacctcaccagcgtcatttgtactaaagggtcgtgcagcagagtgcac

SEQ ID NO: 27875 - DNA, 201 bp, Homo sapiens
aggtttgagtggcatttggggataggtcttgggtggtggggttgggagaacacagggcttgctggaggtttcaaatttctaattattaaaaacaacaagarccactacaagccctgttatttgactgattgggccaagagagccctgggaagttgttatgggccctccttctccttcctctgcctcctttcaggtgcctga

SEQ ID NO: 27876 - DNA, 201 bp, Homo sapiens
ggtcaagttcagcttcatctgtctccagctatgtgagctggggcaggccagccagcttctctaaaactcattttccccatctgcatgttggaaataataayagctcttccttcacagcatcaccagaagtaagagagaaaatgcgcataaatgcttggcatggaataaacactcggcgagagtcagccaccatgagggtgc

SEQ ID NO: 27877 - DNA, 201 bp, Homo sapiens
actttttttttttttttgagacagagtcttgctctgtcacccaggctggagtgcagtggtgcgatcttggctcactgcaagctccgtctcccgggttcacrccattctcctgcctcagcctcccaagtagcagggactacaggcacccgccaccatgcccggctaatttttgtatttttagtagagacggtgtttcgccat

SEQ ID NO: 27878 - DNA, 201 bp, Homo sapiens
aggtgaggcagcataacctgatgactgatagcagtgggggttggagaaggctagctggggtcaagttcagcttcatctgtctccagctatgtgagctgggrcaggccagccagcttctctaaaactcattttccccatctgcatgttggaaataataacagctcttccttcacagcatcaccagaagtaagagagaaaatg

SEQ ID NO: 27879 - DNA, 201 bp, Homo sapiens
tccaaaatgtgttccttaggtcaggagacccagtgaaaggagatctcagaagcaactatgttgggaaatgccgcattcccagtctttctcttggagagccrtgatatttgttagaattgtaaagggtctgggaagtcctgcggtaaagaaggtggtttaacagcatttcttagtaacttttagaatgtggaactttgggga

SEQ ID NO: 27880 - DNA, 201 bp, Homo sapiens
gggaacagggagaggtgaggcagcataacctgatgactgatagcagtgggggttggagaaggctagctggggtcaagttcagcttcatctgtctccagctrtgtgagctggggcaggccagccagcttctctaaaactcattttccccatctgcatgttggaaataataacagctcttccttcacagcatcaccagaagta

SEQ ID NO: 27881 - DNA, 201 bp, Homo sapiens
ggagacccagtgaaaggagatctcagaagcaactatgttgggaaatgccgcattcccagtctttctcttggagagccgtgatatttgttagaattgtaaarggtctgggaagtcctgcggtaaagaaggtggtttaacagcatttcttagtaacttttagaatgtggaactttggggagaattggataagagatctgattt

SEQ ID NO: 27882 - DNA, 201 bp, Homo sapiens
agatctcagaagcaactatgttgggaaatgccgcattcccagtctttctcttggagagccgtgatatttgttagaattgtaaagggtctgggaagtcctgyggtaaagaaggtggtttaacagcatttcttagtaacttttagaatgtggaactttggggagaattggataagagatctgatttttgtttgtttgtttaag

SEQ ID NO: 27883 - DNA, 201 bp, Homo sapiens
ttttaacggcagtagtgattcaatgtgcaactctgccatgatttacctaactaagccattatagataaatgtgaagattgtttcccattttttttctgtatttttttttcctcttagaagcaatgtttctataaataactttctgcatgtatctttaaacatttgttttaattttaaaaatcacaggccaggtgcggtgac

SEQ ID NO: 27884 - DNA, 201 bp, Homo sapiens
ttgtttgtttgtttaagacggagttttgctcttgttgcccaggctggagtgcattggagcgatcttggctcactgcaacctctgcctcctgggttcaagcrattttactgcctcagcctcccgaatagctgggattacaggtgcccgccaccatgcccagctaattttagtatttttagtagagacgggttttcaccatgt

SEQ ID NO: 27885 - DNA, 201 bp, Homo sapiens
cttgctagtctaatgcccccctatttgtggaaaatcagaggggtcacttctccttctccactggagccagtggagctggggcttccaagtttgctgattcrtctaagaaaatctccatttgcctctttatcagagggttcaggctggagctcggcatttgttcttaggactctggcctcggggttcagcactttccagatt

SEQ ID NO: 27886 - DNA, 201 bp, Homo sapiens
agccaagatcgtaccactgcactacatctgagcgacagagtgagactccgtctcaacaacaacaacaacaacaacaataaaatatatatatatatatatayatataaaattaaaaaggaaccacacctttatcctcttttcctacttccaaatgtgtgggaagatgtattcttagatgcaagttaatctcatttccaagct

SEQ ID NO: 27887 - DNA, 201 bp, Homo sapiens
gttttgctcttgttgcccaggctggagtgcattggagcgatcttggctcactgcaacctctgcctcctgggttcaagcaattttactgcctcagcctcccraatagctgggattacaggtgcccgccaccatgcccagctaattttagtatttttagtagagacgggttttcaccatgttggtcaggctggtctcaaaccc

SEQ ID NO: 27888 - DNA, 201 bp, Homo sapiens
agacagtgggggcaacaggacacagcacaggtaggtactgcttcctcccttctcctgcccagatgggagggatgagggacttcagcagggggagatgtggwccacgagtcatcggtgtttgacttgctagtctaatgcccccctatttgtggaaaatcagaggggtcacttctccttctccactggagccagtggagctgg

SEQ ID NO: 27889 - DNA, 201 bp, Homo sapiens
gagaactgctatttctcccccattctccgatgggcccattcccttgtcatggggctgctggaggatgtggcagccgcattttggatgtgtgtgggggcaargcggcaagaaaggattcttcagggaaagaaagtcttctgtgtgcattttatttgcagtgagaagaatgggagtcctgggcaggcattggccacgctgttc

SEQ ID NO: 27890 - DNA, 201 bp, Homo sapiens
aatctattcctgaaacatttactagccagagcttcataaggaaacactaccacctggtgatgagtccctcagttgcaggttgaaggtctagtggggtcagycaagactggagctgagggcattttcgtggatgtgctttttttcttttcttttcttttctttttttttttttttgagacagagttttgctcttgttgctca

SEQ ID NO: 27891 - DNA, 201 bp, Homo sapiens
tgctcttctgtccccagacctttaatgagtttgagatcgagcagcaccaggaatgtgcctatgaccacctggaaatgtatgacgggccggacagcctggcycccattctgggccgtttctgcggcagcaagaaaccagaccccacggtggcttccggcagcagtatgtttctcaggttttattcggatgcctcagtgcaga

SEQ ID NO: 27892 - DNA, 201 bp, Homo sapiens
tggaccaagcagacagtgggggcaacaggacacagcacaggtaggtactgcttcctcccttctcctgcccagatgggagggatgagggacttcagcagggrgagatgtggaccacgagtcatcggtgtttgacttgctagtctaatgcccccctatttgtggaaaatcagaggggtcacttctccttctccactggagcca

SEQ ID NO: 27893 - DNA, 201 bp, Homo sapiens
aacttctctaaaacaaacgggccattgcattttactgacaaatgccagcccccaggaaagcactggttaccttaacctctatttaccgacattgtctcttaaagttaaggtcactgctctgcagttcttcttgaacagagctgacatctgtcccgcaaaggtcaaggacagggggtggagttccttgctactctttctgcc

SEQ ID NO: 27894 - DNA, 201 bp, Homo sapiens
gagctgagggcattttcgtggatgtgctttttttcttttcttttcttttctttttttttttttttgagacagagttttgctcttgttgctcaggctagagygcaatggtgcaatctcagctcactgcaacctccgcctcctggattcaagcgattttcctgcctcagcctcccgagtagccaggattacagatgcccgcca

SEQ ID NO: 27895 - DNA, 201 bp, Homo sapiens
caagacaggtgacctttcaaaataccttacagacttaggatttggattttcatggtggttggcacagccccaggctgcacagaactaatacctgctgttcytctgcctccaccagccctatctcttaggctcaaggagaaattttactggatgggctgtcttttccaaagtttaccacccaacacccaatgccctttgggg

SEQ ID NO: 27896 - DNA, 201 bp, Homo sapiens
gaattactcaacacatacaaaggttttgaaattttatacaaacttttaaggcttttgaagttaaatatgtcaaaccaaattttcttaaacttctaaacttaaaaaaattattcttactgaagctttgggaaataatttattttttggtagagtttttccatatggtttatttgtacttgaaatttctttcttatactttct

SEQ ID NO: 27897 - DNA, 201 bp, Homo sapiens
aacagtataatttatcacattattcgttttcttctacatcttggggaccataaagaagaaagaagcagctgtctttttgtggtagttttgctcagagctgcctagagcgaggacaagacaggtgacctttcaaaataccttacagacttaggatttggattttcatggtggttggcacagccccaggctgcacagaactaa

SEQ ID NO: 27898 - DNA, 201 bp, Homo sapiens
gttttggccaggctggtcttgaactcctaacctcaggcgatccgcctgccccagcctcccaaagttctaggattataggcgaaagccaccgcgcccagccrgatgtgcattttaaatgcttcctgcggcccatatgttcaagctctacatctctgtgaggaattgccctgcctaccctcttcactacagccatgtcgaaca

SEQ ID NO: 27899 - DNA, 201 bp, Homo sapiens
taaacttaaaaaaattattcttactgaagctttgggaaataatttattttttggtagagtttttccatatggtttatttgtacttgaaatttctttcttayactttctttcaatccatttgggttttattttggggtaggactgataccccccagttctaaataataatctcagtaccgtctatttcatattttccctgtg

SEQ ID NO: 27900 - DNA, 201 bp, Homo sapiens
ttttggactctctattctttgtcattcttataaaaattgtcattttcgagcctgtttctttcttgtagaaccttgtcaaacatagttaataacaaccaagkcatgctatcagcattcttagtccatgtcttcatttgaaaccatagcgcattcagttcatcatctgccttccgagtgaaggcaggcaacactttgactgaa

SEQ ID NO: 27901 - DNA, 201 bp, Homo sapiens
ttgtacttgaaatttctttcttatactttctttcaatccatttgggttttattttggggtaggactgataccccccagttctaaataataatctcagtacygtctatttcatattttccctgtgtctgtgatgtctcctctatcagagagtgtgtttttatatatagagttagcatttatatccagcaatccatgtgtctt

SEQ ID NO: 27902 - DNA, 201 bp, Homo sapiens
tgtacttgaaatttctttcttatactttctttcaatccatttgggttttattttggggtaggactgataccccccagttctaaataataatctcagtaccrtctatttcatattttccctgtgtctgtgatgtctcctctatcagagagtgtgtttttatatatagagttagcatttatatccagcaatccatgtgtcttt

SEQ ID NO: 27903 - DNA, 201 bp, Homo sapiens
tctatcagagagtgtgtttttatatatagagttagcatttatatccagcaatccatgtgtcttttcattttagctgctatatatatatatatatatatatwtatattttttttttttttttttttttttttttttttgaaacaggatcttgctctgtcactcaggctggagtgcagtggcacaattttggttgactgcaac

SEQ ID NO: 27904 - DNA, 201 bp, Homo sapiens
tatcagagagtgtgtttttatatatagagttagcatttatatccagcaatccatgtgtcttttcattttagctgctatatatatatatatatatatatatatattttttttttttttttttttttttttttttttgaaacaggatcttgctctgtcactcaggctggagtgcagtggcacaattttggttgactgcaacct

SEQ ID NO: 27905 - DNA, 201 bp, Homo sapiens
tctgacaagagcctggtatttagaatatataaagactaattataacacaacaataaaagagcctcatgcctgtaatcccagcactttgggaggccgaggcrggcagatcacgaggtcaggagatcgagaccatcctggctaacatggtgaaaccccatctctactaaaaatacaaaaaattagctgggtgtggtggtgggc

SEQ ID NO: 27906 - DNA, 201 bp, Homo sapiens; identical to SEQ ID NO: 3395

SEQ ID NO: 27907 - DNA, 201 bp, Homo sapiens
tcctatatagagggaggctggggtgcagcaggctggggcctgggaagagctttccctgaggaggcagggaggctggttcagctgtggtcctggccacagcmtaggctgcagtgtggtcaccaagatacaggaggttgaggccttccaaggggacccaaaaataatcatcagtaaggctatgtctgggtccctacaatgtgc

SEQ ID NO: 27908 - DNA, 201 bp, Homo sapiens
gttggtgccagtggttttcctgaacactgctggcagcccttcccatgggtgcaaggtgagaccactggaaccaggaagagcaatcccctcttctatttgcrgtatccttccaatgtcttttactgataaagcctaacatggtgtcaagtggtgaaggagcaatgtttacagggtccagttccagtgtcacaaagcaagaca

SEQ ID NO: 27909 - DNA, 201 bp, Homo sapiens
aaccaggaagagcaatcccctcttctatttgcggtatccttccaatgtcttttactgataaagcctaacatggtgtcaagtggtgaaggagcaatgtttayagggtccagttccagtgtcacaaagcaagacaaagaaggatagatttggagccaagaggcaatatattggtatctcggacattggcttaaacaagctaga

SEQ ID NO: 27910 - DNA, 201 bp, Homo sapiens
cgcaatctcggctcactgcaacctcctcctcccaggttcaagcgattctcctgcctcagcctcccgagtagctgggattacaggcgcccaccaccaagccyggcgaatttttgtatttttagcagagacagcgtttctccatgttgggtaggctggtctcgaactcgtgacctcaggtgatctgcctgcctcggcttccca

SEQ ID NO: 27911 - DNA, 201 bp, Homo sapiens
gaatacttctcaaggaagctggtggtgttcactgcatgtgggtggcgacagggcgccccatggacctcctgggagctccctgcctgctgagcctaaggctyccttccactgcatggccgtcccggtgccactgctcccctgtcccgtgtctctacccaccaccttggcccagtgctccctatgtcactggcgggagagctt

SEQ ID NO: 27912 - DNA, 201 bp, Homo sapiens
gaaaagtccatgatcaatggactatggcgcagggacttgcaggttgtttattggtgagagccatgagtgaggagcagaagaggcgaatgggcccccagggmgtcgaggggtgaagacagggcctctgaccacagggtgctcccagcgggcagttcacatgctgggctgcccgtggggaaactgctgctctgctaagagctg

SEQ ID NO: 27913 - DNA, 201 bp, Homo sapiens
ctttgggtaccttgttttctttcagttgtggaaaaatacacgtgacataagacttaccattttaaagcataccctttagtggcattaagtacattcacaawgctatgtaaccattacccctattgagttccagaactttttcatcaccctcaaagcagactctgtactcatgaagcagtcactcccattctcccttcccta

SEQ ID NO: 27914 - DNA, 201 bp, Homo sapiens
ggcagataaagtgtctagattaaaaaaaaatactctcttatgtcaaataattttatatggaagttaatattgagcatgaaaagtagctagttgaagaataygattgccttacaaatgctttagagaatctgaattgtgagctatttaggattgaacttaactctctgattcattttcttttgtttcttcaaattgcaagat

SEQ ID NO: 27915 - DNA, 201 bp, Homo sapiens
gattgaccctatgaactgtggacgataactcagggagaatggaagagaacagagagggaaaagtccatgatcaatggactatggcgcagggacttgcaggwtgtttattggtgagagccatgagtgaggagcagaagaggcgaatgggcccccagggcgtcgaggggtgaagacagggcctctgaccacagggtgctccca

SEQ ID NO: 27916 - DNA, 201 bp, Homo sapiens
actcccacactttggagaataaagaaccccttttgccagctggagaatgtattgtacttcaggcagatggacattttttaaatgggtttttctgactgtasaggtaagtaggattgaccctatgaactgtggacgataactcagggagaatggaagagaacagagagggaaaagtccatgatcaatggactatggcgcagg

SEQ ID NO: 27917 - DNA, 201 bp, Homo sapiens
tcactgcaacctctgcctccggggttcaagcagttctcctgcctcaacctcccaagtagctgggattacaggcacacaccatcacatctggctaatttttrtattttcagtagagacagggtttcaccatgttggccaggcaggtctcaaactcctgacctcaggtgatccgcccacctcggcctcccaaagttctgggat

SEQ ID NO: 27918 - DNA, 201 bp, Homo sapiens
tctcaacccccagggactcccacactttggagaataaagaaccccttttgccagctggagaatgtattgtacttcaggcagatggacattttttaaatggktttttctgactgtagaggtaagtaggattgaccctatgaactgtggacgataactcagggagaatggaagagaacagagagggaaaagtccatgatcaat

SEQ ID NO: 27919 - DNA, 201 bp, Homo sapiens
taaccatccttctagtctctatctgcatgagttcaattgttttaatttttagctaccacaaataagtgagaacatatgatgtttgtctttctgtgcctggygtatttcacttaacataatgatctccagttccattcctgttgttgcaaatgacaggatctcattcttttttaggctgaatagtacttcattgtgtacttg

SEQ ID NO: 27920 - DNA, 201 bp, Homo sapiens
gaaatcaaaagaccccagagcccccatttccactctagaaatgaccactctaaacacattcttatggatccttctagaaattttctgtgcacaatcatgaytgtcagtgcacagggaaatatatatgtttttgttactcaaattcctctaataaaatcccattcgtattttttctacaacttacttttttttcccattagt

SEQ ID NO: 27921 - DNA, 201 bp, Homo sapiens
aagttactcaacatttccaggtctcagtttcattatctggaaaacatggatactaatgaagcctacttcatcgggctgttgtgcagattaaaagagacaaygcacaaaagctctataggtcacacctgggcacagtgggacccgcaggaggcggcatccaccacccacatctgcagtgctgtttgagattcacttgtttcc

SEQ ID NO: 27922 - DNA, 201 bp, Homo sapiens
tagtagagacaggtgtcaccatgttggccaggctggtctcgaactcctgacctcacgtaatccacctgccttggcctcccaaagtgctaggattacaggcrtgagccactgcacccggctgagatatgttattttgaatagaatttttacattattttattttataagtaacatatagttgtttgtattgtatcatttaca

SEQ ID NO: 27923 - DNA, 201 bp, Homo sapiens
gactccaaataaagccactttgaaaaactaaaagaagcttatggatggatgatgaaggaggcctctgttagccaagatgcactgagcacttaccatgggcyggcatgccctaagcctttcccatgcattatctcattcgatcacatatcaccctgactagagtggcacccttttacaaataaggacaccgaagcttacata

SEQ ID NO: 27924 - DNA, 201 bp, Homo sapiens
gaacgcattgtgtcaggagtctaggttcccacagcagcctttggtttatttagagtatcaagggcagtttcttcttccttccacgcaggggtttccatccytggctcccagatacatgtgggccctgctggttcagacaccattgttatgagtggtcctggacttgagtcttcactctgccaaatgactcactatgtgacc

SEQ ID NO: 27925 - DNA, 201 bp, Homo sapiens
gccaagttcgagtcccagctctgccccctatcagcaaggcactgaccctctccaaacctattttcttatttgggaagtgagaaggactaaaagagaggatrcatggaaaatgctgaccacagtgcccaccacagaagagaaatggcagctattggccaagatgccaggcattgaacaagttgtgggaccactcttggcaaa

SEQ ID NO: 27926 - DNA, 201 bp, Homo sapiens
caccgtcagccactgggcccatactgcaccgtgtgatgactttccttggcgagtataaaatgggatttcacaagtgaaatgtacatgggagcctgttgtcrtggcgtttagactctggcacaatctgggaagttgagtagatgctaagagcttaggaagccgctgcgggactgggaagaaccctggcttgggggttctggc

SEQ ID NO: 27927 - DNA, 201 bp, Homo sapiens
tcagagagtgtgtttttatatatagagttagcatttatatccagcaatccatgtgtcttttcattttagctgctatatatatatatatatatatatatatattttttttttttttttttttttttttttttttgaaacaggatcttgctctgtcactcaggctggagtgcagtggcacaattttggttgactgcaacctcc

SEQ ID NO: 27928 - DNA, 201 bp, Homo sapiens
ccattcactgtggggaattcttcagggccaggtggcttttactgtccagtcatcctggaaaaagccttccttctgttcttaccctgcccagtgaagggagktcgaacatttatgacaaacacacaggcttccaggccttggctccagccacgaaaccctgcaaaggaagtcaagggtggaggaagatgtggaagacacaca

SEQ ID NO: 27929 - DNA, 201 bp, Homo sapiens
atttagcccccgctgtctggttaatattgtctggttgagaccatttgtcctaaaggaatacagagaaaggaaagagtgtgtcggggtgggagggcaaatastggtgatggaagctgagttgagttttgcagggtggggtcttctggatgaggacaggtgggggagggagagagacaggaaccaggaggagcaaagtggagg

SEQ ID NO: 27930 - DNA, 201 bp, Homo sapiens
tggtctcaaactcctgatctcaagtgatctgcctgcctcaacctcccaaagttctgggattacaggtgtgagcgtgatctgcctgcctcaacctccctaarttctgggattacaggtgtgagcaactgcatccggccttatatgttttaatatttggtgggtacatccttcttcattgcccttgctcttgattttttgaaa

SEQ ID NO: 27931 - DNA, 201 bp, Homo sapiens
acttaccttccaagcttttgaggtgagtgctgctcagaccggcttcccaaggaaacggcaacttttgctagacatcctccactctgtaaagatgggttttmatttttggctaaaaacaggaacctaagaggctattctcaagcccatagtgaattgtgcccggacatctgacatcaacatctatgcaggctttgaaatggg

SEQ ID NO: 27932 - DNA, 201 bp, Homo sapiens
agttttgcagggtggggtcttctggatgaggacaggtgggggagggagagagacaggaaccaggaggagcaaagtggaggttggagaggtaccactcttcrctgcatgcttgccacaggccaggcctggcactggctgcttaacagacctcatgttgtttaattctcacacacttctaccaggtaggcacctctatttcca

SEQ ID NO: 27933 - DNA, 201 bp, Homo sapiens
ctccactgtcccagggataacaggatgactccatataacctagtcacttgagtcctttcttagattatatctttaataaattatttatttatttaattttwttttttttgaggcggagtctcactctgtcacccaggctggaatgcagtggtgcgatcatggctcactgcaagctctgcctcccaggttcacgccagcctc

SEQ ID NO: 27934 - DNA, 201 bp, Homo sapiens
gtcacacagctcttcagtgatggcactgggattggaacccaggtctttctggcttaaaagtacatgcttttaatgagcctgcctccccaggtgaacaataygaagactgcaggcagaaagtgccttcgtaaaggatttccctgcaagggaatcagcctggggctcccaccctttggtgtcaggaggacgcctgagcactgg

SEQ ID NO: 27935 - DNA, 201 bp, Homo sapiens
cttttaaaaaataagcctctgtttcctgattataaagtaatatgttgaacaaaatttggaaattacaaaagtatataagaaaataaaattcaccccagagycaccaccagagataatcacaatggacagtgtggtgatttccatccagcattttttcggcatgttttttgcctatttttttaaagaaaagatggaatcata

SEQ ID NO: 27936 - DNA, 201 bp, Homo sapiens
cccaggtctttctggcttaaaagtacatgcttttaatgagcctgcctccccaggtgaacaatacgaagactgcaggcagaaagtgccttcgtaaaggattyccctgcaagggaatcagcctggggctcccaccctttggtgtcaggaggacgcctgagcactggacatgaggagatggagacgaagccagctgagcaggcc

SEQ ID NO: 27937 - DNA, 201 bp, Homo sapiens
gcctctgccccccttatttcctgtgtagttttgaccaagtctcttaatctctttgagcctcagtttcctcatttggaaaataacgatattgaaacccatcrtataatcttgtttgaggattaaatgaggcagtgaacacgaagtgtttagcaagcagtcattaactgctggctcttctgcttgctattattattattactc

SEQ ID NO: 27938 - DNA, 201 bp, Homo sapiens
gtgccttcgtaaaggatttccctgcaagggaatcagcctggggctcccaccctttggtgtcaggaggacgcctgagcactggacatgaggagatggagacsaagccagctgagcaggcccaggggacagtgtgggaggagtttcccagcagccctgtgactttgggaaggggctgctgcagagcggcccccgctgctctgc

SEQ ID NO: 27939 - DNA, 201 bp, Homo sapiens
tggcctgtagcaggtgttggatagatatttgttgaatgaacgaatgcccaaacaaacccattacctcatttggtccttgcaatagtccatttgacagatgaaaaatactaacacccgagttccccaccacagttgcacagctgagtgaggctgagctagacccagagcgtcggctccagctcgcctccacaccacaggtgg

SEQ ID NO: 27940 - DNA, 201 bp, Homo sapiens
acctgtcacccatctggaatcccactgtgtacaaaacccccgagtgtcaaaggaaaaatgagaaatggttggttatagagcagccttcttcgatgaggagycagagtgtcttagacctgcagctcttctgtctcttctcatctataggaatttctattaagggaaatgcttggggcagggaggaatattttgatttcagaa

SEQ ID NO: 27941 - DNA, 201 bp, Homo sapiens
acattcctggtagagacaaatgttaacacagtttataaatgatggctactagcaaacacgtacaagcatcactgtccttcgtaaacagagtgtctatggartctaatttataaggtcaacacagtaggttcctacacggaggcttaccccacagaggaaacccgaatactaagagagtgcacagggtaacaaaggcagcag

SEQ ID NO: 27942 - DNA, 201 bp, Homo sapiens
taaacctattttaccaaaccatatcatgaaacatttattccacgtatagtcaatcctcgtcttataaaatacttattattttcttttcatgagcaaaatamgtatttaaacttatcgtgaaaaatctgaagtgtcaggctaacaaagggatatgtagcttttcaaaatgattcaggaacacgtgagcacagaagttggaag

SEQ ID NO: 27943 - DNA, 201 bp, Homo sapiens
cgaatactaagagagtgcacagggtaacaaaggcagcagtcacaggacgcattgagtattcggcagcactgggcacatctccctgtgttctgcaccaagcrgactccaggcccagagaggatcctatttgcatttggcctttcttatggaggtggggggcgcgtgaggaagctgattttggggttgcctggtaactttgta

SEQ ID NO: 27944 - DNA, 201 bp, Homo sapiens
cgcattgagtattcggcagcactgggcacatctccctgtgttctgcaccaagcggactccaggcccagagaggatcctatttgcatttggcctttcttatggaggtggggggcgcgtgaggaagctgattttggggttgcctggtaactttgtaaatttgattctgggtgctcttgaaatgatccaggagagttatacttt

SEQ ID NO: 27945 - DNA, 201 bp, Homo sapiens
ctttgtaaatttgattctgggtgctcttgaaatgatccaggagagttatactttatattaatttgcgactgatgtgtgtggttattaaacaaagcaggttygtttttgccctcacatctagaatagtgtggggccatgtggtaagggctcagttgatttgtggaacgaagcttacgaatccgtggtgattctgatcctccc

SEQ ID NO: 27946 - DNA, 201 bp, Homo sapiens
ctcttccacctccacctccaggaattatattatccagcattgaaagtgcatcatctacctctggactgggattccacagctgtgcaacagctgcatagaaacacaattacagaggacaggaaggaagacggcggctgtggcccattaaaattctgcctctggtggggttgtgcacagcacccacactgcaacaaaaaatct

SEQ ID NO: 27947 - DNA, 201 bp, Homo sapiens
aacaacaagaaccactacaagccctgttatttgactgattgggccaagagagccctgggaagttgttatgggccctccttctccttcctctgcctcctttyaggtgcctgacttggttttcaaagggcttaacacagtgttgtgtcacaggtcaggagtataatttcttaaaaatggaagctggggaagtgagctctctgg

SEQ ID NO: 27948 - DNA, 201 bp, Homo sapiens
agtggttgtctcatcacctaagcagctctcctccccgtctccacacctcagaacatcatggtttcctgcctggcgagcagcatccatgtcctgctggcctyacatcctacagcctcccttttccctattcccctccccaccaatcctcccaccccacctcctgcagccaccacctcttataggccaggcaccgtcccagag

SEQ ID NO: 27949 - DNA, 201 bp, Homo sapiens
agattttatttataatcttgaaatatggatgacctttctaagcagcacataagaaaatgaatacattttgtaatactaacattaaaaacttttataatgcaaaaaaaacaaaacaatacataaaaacaaagtcaaatgagaactaacaaagtgagcaaaatacttgcaacactcttgactagtttccctaatttacaaagg

SEQ ID NO: 27950 - DNA, 201 bp, Homo sapiens
gattttatttataatcttgaaatatggatgacctttctaagcagcacataagaaaatgaatacattttgtaatactaacattaaaaacttttataatgcaaaaaaaacaaaacaatacataaaaacaaagtcaaatgagaactaacaaagtgagcaaaatacttgcaacactcttgactagtttccctaatttacaaaggg

SEQ ID NO: 27951 - DNA, 201 bp, Homo sapiens
attttatttataatcttgaaatatggatgacctttctaagcagcacataagaaaatgaatacattttgtaatactaacattaaaaacttttataatgcaaaaaaaacaaaacaatacataaaaacaaagtcaaatgagaactaacaaagtgagcaaaatacttgcaacactcttgactagtttccctaatttacaaagggt

SEQ ID NO: 27952 - DNA, 201 bp, Homo sapiens
tttataatcttgaaatatggatgacctttctaagcagcacataagaaaatgaatacattttgtaatactaacattaaaaacttttataatgcaaaaaaaacaaaacaatacataaaaacaaagtcaaatgagaactaacaaagtgagcaaaatacttgcaacactcttgactagtttccctaatttacaaagggttcttaa

SEQ ID NO: 27953 - DNA, 201 bp, Homo sapiens
aatcttgaaatatggatgacctttctaagcagcacataagaaaatgaatacattttgtaatactaacattaaaaacttttataatgcaaaaaaaacaaaacaatacataaaaacaaagtcaaatgagaactaacaaagtgagcaaaatacttgcaacactcttgactagtttccctaatttacaaagggttcttaaatatc

SEQ ID NO: 27954 - DNA, 201 bp, Homo sapiens
aaagatcaattagtcaattgggatatttgaatattgggataatttagataactctctgtgaaaaaaaaaaaagctggactcctacctcacttcttataccrataactattctagctagatcaaagatgtaagtattaaagaaaaaaatggaagaaagaaagaaaaaatcgaagagtataggaaggaaacaagagtagattt

SEQ ID NO: 27955 - DNA, 201 bp, Homo sapiens
gctccagcggggcctaggagtgttaggagccaggtggcccagaatctacaacagcgtttgcctgggcccctcggggggcatggagcacactggggaggggmtgtgcaagaatttgcttccagaatttctggtgcttgctaatctagaccagtcttatctatctattttatttatttatttactttttttttttttttgata

SEQ ID NO: 27956 - DNA, 201 bp, Homo sapiens
gtgaccctggctacgagctggccgccgataagaagatgtgtgaaggttggtgtgggacctgccaagctagaatgagagggtatatgggacaagtctttggsgaagtggggcagagatggggcaaccagctggctgtgtaggaacgatgggcaatgggcagacatggtggaagacccacctacttcctagaaggagaaacag

SEQ ID NO: 27957 - DNA, 201 bp, Homo sapiens
ccagggcatctcgctccttcaggaggcacctgggggcctcaggtgctctaggctgttatttttgtaagtgattaagcctgcaggctctggaatccaattayctaggtctaaatcctggctctgccgttccctagctgtgtgaccttgggcaagctatttaacctctctgagcctcagttttttctttagttaaaagggtct

SEQ ID NO: 27958 - DNA, 201 bp, Homo sapiens
gcccctgtgtgcatgtgcatgagtaaggcggtgcggcgaggacctcttccaccttctgagctgaggcccagcaactgctgtccttgcgggagagttttccycagggcatctcgctccttcaggaggcacctgggggcctcaggtgctctaggctgttatttttgtaagtgattaagcctgcaggctctggaatccaattac

SEQ ID NO: 27959 - DNA, 201 bp, Homo sapiens
aacgtcattcattgcttagttccctacttttcacaaatgtgcaagacctgttttatcctatgtaagttttcttagataaaacctaagggctgctttcaaaygattctacattgcaggctgtctaatgaagccagtcctcctttggtactctttttctccgctgttctcacctgattgtgcagattaacattaatatcatct

SEQ ID NO: 27960 - DNA, 201 bp, Homo sapiens
tgttttggaattgctaattaatataaattagacaagagaaagaaagaaaaactgtgaatattggcaggaacaaggcaatgtttgcactgatgggaggtaawgtgactgtgtgcctagaaaccccagaatatcaattgaaaagctgttagaaacacaaggagactctattaagtgaccacaaaattaattaattaacaagaa

SEQ ID NO: 27961 - DNA, 201 bp, Homo sapiens
aagaaaaaattatagactcatctcacatgtgaatagccatgcaaaatcctaaataaaatgttagcacatagaattcggcagcagaagaaaagaagaggagrctgccaaatacatttatctagggaatacaagattagttcaacattaggaaatctattctcaagattgattggtcaaagaagagaagctatattcatatct

SEQ ID NO: 27962 - DNA, 201 bp, Homo sapiens
cataagcaggtgaaatacattgttcaaggagacattaacaatggtgaacaagagcatatagagaggggaggaagacagggctgacccctaaagtcattctkgtgatggcagggaagcaggggagggaggctgatctttggtaaatgcaggaacaagttggcttaggatagggctgcatacaaggaccacaagtttaacaag

SEQ ID NO: 27963 - DNA, 201 bp, Homo sapiens
ctggggagacatcagcaaaggagatggagcttgcattttagaaggtgttggggagacagacaataaaaacataagcgaataaatgagatcattgccgatgmtgtttagtgggcatgaaggaaacaaatggaggctgagaagtttattctagaatcttcctcttaggcttttagcctccagtccaatttttggccttcagca

SEQ ID NO: 27964 - DNA, 201 bp, Homo sapiens
tctactaaaaatgcaaaaaataagctgggcgcgctggcgcatgtgtagtcccagctactcgggaggctgaggcaggagaatcgcttgagccagggaggcakaggttgggtgacagagcaagatgccgtctcaaaaaaaaaaagaaagaaattcataatagtgtttcaacaaagtgcaaatcttgcactgagccttgcaaac

SEQ ID NO: 27965 - DNA, 201 bp, Homo sapiens
ggtgcaaatctcaggtcactgtaacctccacctcctgggttcaagtgattctcctgcctcagcctcccaagtagctgggactacaggcgcgcacaaccacrcctggctaatttttgtatttttagtagagacaggtgtcaccatgttggccaggctggtctcgaactcctgacctcacgtaatccacctgccttggcctcc

SEQ ID NO: 27966 - DNA, 201 bp, Homo sapiens
tatgtctgggtccctacaatgtgccagacatagcattaggtgctgctcacaacctgaaaagttagcacctattattcccatttgtatggatgagaaaattkaggctcagagaaattaggtatctttccaaaaccactggggtcagaaaagctgtgctaccaaattggacgtgttgtttccctcctatgttctatcctaact

SEQ ID NO: 27967 - DNA, 201 bp, Homo sapiens
aaaatggatgaagtctttggtatggaatgttttgagattttttgaagtctcaaatgaccgatgaccaaacacctcaaagaattcacttctccaggcctggycttctcttggcagagcctaccccagctaacaaggtgttcctgctcgtgttgtcagtgtcctgccttcactgtagctgctgcctggttttcagaggtggac

SEQ ID NO: 27968 - DNA, 201 bp, Homo sapiens
tgactgggtaactttccaggtctttaccaactcatagatgttcttaatttcttttagtttgtgtgtaaagagttatttcaagatttggtgaacaacttttkttgttgttgttgagacagagtcttgctccgttgcccaggctggagtgcagtggcgcaatctcagctcactgcaacctccacctcccaggtgcaagcgatt

SEQ ID NO: 27969 - DNA, 201 bp, Homo sapiens
ttcttttcatgagcaaaatacgtatttaaacttatcgtgaaaaatctgaagtgtcaggctaacaaagggatatgtagcttttcaaaatgattcaggaacaygtgagcacagaagttggaagaccactatgtaacttccttggcttgggtggttttcccagtgcccgttcatctgttcccttctcccacccccctgcttctc

SEQ ID NO: 27970 - DNA, 201 bp, Homo sapiens
tcactggaaatttgaaagcaactctgctgctgtctatcatgatggcttctgtgtgccgatggtctgtatgccgggtacttcacatgcatcgttttcagtcrtcacaaccctaaaagtaaatattatcattctcactttaaagcaggagggaggctcagtgaggctaaatcacaagcagtcacccaatttattggaggaaga

SEQ ID NO: 27971 - DNA, 201 bp, Homo sapiens
ctctttcttctcttagaatgtttgagaagtattcctgattgcctgccattgccattgccataattgacatcggacactttttctttgggggaaaaatggcrctgcaccgtggactgtcttgtgccaaatcttcagggaagtgggaaaccgaagggctcagcgcaggcagccggaaaccatctttgaccaaaccaaccttgt

SEQ ID NO: 27972 - DNA, 201 bp, Homo sapiens
tttcctcagatcgaatccactagccctacctgcgagctctgcctatgactgttccctaacacgacaggtcccagcacctccactgcagtgtctggtccacrccaccaccctgtctcactcggacacttgcaaggctcctaactgttcaccccgcttctgcttttgtctgcctgtgtcccagggcaatcttggtaaaacaca

SEQ ID NO: 27973 - DNA, 201 bp, Homo sapiens
atgggctctttccttggtttccttctgcctcttccctaggtcccccagccagtgtcttgagttcttctgctgtgctgccctcctgcccgtccatcttcctycactggcccatccttgaagcattttccttctttctgttcttgccttgtctcccttccctcctcaggcctgcactgctccactcccacctggtccaggtat

SEQ ID NO: 27974 - DNA, 201 bp, Homo sapiens
tgtcacttcccctcactttcattagccagaaaaaaatcatggtgggccaggcgaagtggctcatgcctataatcccagcactttgggaggccgaggcaggmggatgacttgaggtcaggagttccagaccagcctggccaacatggtgaaaccccatctctactaaaaatacaaaaatattagccagcatggtggcgcatg

SEQ ID NO: 27975 - DNA, 201 bp, Homo sapiens
tcttccacctccacctccaggaattatattatccagcattgaaagtgcatcatctacctctggactgggattccacagctgtgcaacagctgcatagaaacacaattacagaggacaggaaggaagacggcggctgtggcccattaaaattctgcctctggtggggttgtgcacagcacccacactgcaacaaaaaatctt

SEQ ID NO: 27976 - DNA, 201 bp, Homo sapiens
atcagaatataatttccatgaagtcaaggtacagtttcttctgcatcatatcccaagcagcagacacagcgtctggcctgtagcaggtgttggatagatayttgttgaatgaacgaatgcccaaacaaacccattacctcatttggtccttgcaatagtccatttgacagatgaaaaatactaacacccgagttccccacc

SEQ ID NO: 27977 - DNA, 201 bp, Homo sapiens
gctggaattcctaacatcacttacgtcagtttacttgggtgtaacaactgagccccacgaacttcaggccttcctttttagcctgtctcaaatgcagactytcgtagccattgtggcagctcacactgagcccttactcaccgcaggcatttgacattcattacctgggtcaccaccgccctgcagcaggaagtgaggctc

SEQ ID NO: 27978 - DNA, 201 bp, Homo sapiens
ggcgaaagggatggaagggcggcatttggtggtcaggaacagcatagctctcagataaactctgctctcttggctggacttttctgccttgtgcatggatygtgagttgaagcccctgaagacctgggaggggcaaataatgtggctttgagaactgagtgtctgagagaatgaatgggtgagggaggcaaagaagaaaaa

SEQ ID NO: 27979 - DNA, 201 bp, Homo sapiens
attgcagtctctgttggagctatgtcctcaaagttggttaccttgctccccgatgcttcatgtggggagtgacctggaaggaccttgacggataagtgggktttgcatgatgactgtttgaggacaagccctccgcatagaagaaagtccctgagcaactgcacatggttggcttccctgtcctctgcctggatgagcgtc

SEQ ID NO: 27980 - DNA, 201 bp, Homo sapiens
ctatgtcctcaaagttggttaccttgctccccgatgcttcatgtggggagtgacctggaaggaccttgacggataagtggggtttgcatgatgactgtttraggacaagccctccgcatagaagaaagtccctgagcaactgcacatggttggcttccctgtcctctgcctggatgagcgtcctggactcagaggtcccct

SEQ ID NO: 27981 - DNA, 201 bp, Homo sapiens
ttgaccctctctacccttctcccatccttcatccctaagctctggcctcaccagccatgtgcccatcccaagacgtgcccccctcataggcccctgagcaytcacacttgaacttgccttctgtctcccttggaggccctttccccaggtctttgcatggctgtcttcttcttatcatttgagtcttatgtcaagggacac

SEQ ID NO: 27982 - DNA, 201 bp, Homo sapiens
gggcaagctgaggattccacagcccctcctgcaacattctggaagcagaggccagctgtgcccacttcagaagtagtgccatccttctgacgccatcccaytcaaccctcattccaggccagctgaggagtcggcttcccccatacaggacggtattggggggatctagaaccctgtggaaatgatagcagcctctgaatt

SEQ ID NO: 27983 - DNA, 201 bp, Homo sapiens
ggggcagtgagtggagatgctggagagagaggaactgctgagagcaaagtcctccggggttggaaaacgaatagagtcaggggtgcaggggctgggtcagsgctggagatgaggaagagtggagacgtgatggagcaggtgtgtggggcatgaggaaaggtgagcctgggccagacaagccactgcacctcaggacagtgg

SEQ ID NO: 27984 - DNA, 201 bp, Homo sapiens
cagcattaacccacggcttcctagtgccaggtgcttaattagggattggtggtaaaaaagatgactaagatttcatcctgccttcaaggaggtctgttctmacagcagagaaaggtgagtgcctaaagaaaaaaaatagaaattataaaccactacagacttttgttccttggtatcctaactgtgttctttcagatctgg

SEQ ID NO: 27985 - DNA, 201 bp, Homo sapiens
ctgcatgtgaggagttgggagcgggaccacgtggctgtctccagggtcatacaggcctaggggttgggttcgtggtgccatgtgagccttggttgagcagygtgggaagcctttatctgtggggccagggaagaccaccgggtgtctgaccaggagactgtgtcccgagcccttagcttccctgatgggctgggcaaccct

SEQ ID NO: 27986 - DNA, 201 bp, Homo sapiens
gaatggcctgcaaggccccatatgagcagattctccagaccctccactgcctgctgacctcatcatctccttgtctcttcctcactcattccattccagtygtacccacctccccctggccaagcacactcccaccccagggcctttgcacttgctgttcccatagtttgaaatgcttctctccagatatccacctacatc

SEQ ID NO: 27987 - DNA, 201 bp, Homo sapiens
tgccttacaaatgctttagagaatctgaattgtgagctatttaggattgaacttaactctctgattcattttcttttgtttcttcaaattgcaagatcagrtttttgtttgtttgttttgttttttttgtttgttttttgagacagagtctcactcttgctgcccaggctggagtgcagtggcgtgatcttggctcactgc

SEQ ID NO: 27988 - DNA, 201 bp, Homo sapiens
aatgattttccatgttttaaaggacattgaaatctaactccatttcctgaaaggaacacagtcgaccagaacactgttacagcatcagagctgataagccaaaaaaaaaaaaaaaagagttctcctggctgcttttatgagttatttttgctgacttaggcaacatattttctgaaactgaaatacaattaggacatgaac

SEQ ID NO: 27989 - DNA, 201 bp, Homo sapiens
gaatctgaattgtgagctatttaggattgaacttaactctctgattcattttcttttgtttcttcaaattgcaagatcaggtttttgtttgtttgttttgttttttttgtttgttttttgagacagagtctcactcttgctgcccaggctggagtgcagtggcgtgatcttggctcactgcaacctccgcctcctgggttc

SEQ ID NO: 27990 - DNA, 201 bp, Homo sapiens
tggaagaggagctcaaaggcccagcagaagagctggagcaagccaaagaagctcttgccttggtgccaattggcaggtgctctgcccagggcccagctggygcctgatcctggccagggtgccagttggcctctgtacctgattctggtgccagatggcagccttctcagagcatactggctggcagcaagcagagaacct

SEQ ID NO: 27991 - DNA, 201 bp, Homo sapiens
ggttatctcacttttcttcattacaatcccctggtaggaattattattgcccccgttttccagttgaggaagctgaattcctaacatggctgggctggaaytagaacctggatctgtaggattccacaatccgctctgtttccactaaggagacctgaaagccacagggaaggaatgtgaagggggtggaatttttcctta

SEQ ID NO: 27992 - DNA, 201 bp, Homo sapiens
agggcatttcaatttgcaaacatcttttcagatgcctgtcaaagtgtggactaaggcccacccaaagtaacttagtgcacagacccagcttgacttttttrtggttaaaacaactgcagagaacaacatttagaaaagaagaaatatacaacattgaccttgaccatgaatcttaaagtaggaatcaggattaacagaaac

SEQ ID NO: 27993 - DNA, 201 bp, Homo sapiens
acatactgtgctgagaagtgattgatggtttatctgaaagtcaaatttaactggacctcctgatttttttatggaaaacttactggagatgccagtcaggrcaatggaaggtatttctctgatgctaaactggtttgtaagagaccgaggaagtgcctggacctgctcaagtaaccatgatagctggctccatttgctggt

SEQ ID NO: 27994 - DNA, 201 bp, Homo sapiens
aaaaaaaaaaaacaggatgcccagttacatttgaactttagatacagaatgatttttttttagtatgtgtcccaaatatcacatactgtgctgagaagtgwttgatggtttatctgaaagtcaaatttaactggacctcctgatttttttatggaaaacttactggagatgccagtcagggcaatggaaggtatttctctg

SEQ ID NO: 27995 - DNA, 201 bp, Homo sapiens
aatggccagtgtgtcattctcatgccacattctctctgctgcatcacagacctctgctccggtcagcacatctcctccttctgaccctaacttccttccasctctttgccttacacggacctggtgttgacattgagcccacccagataatccaggagaatctcctcatctccaagatccttcatttaaccacacctgcag

SEQ ID NO: 27996 - DNA, 201 bp, Homo sapiens
atcagtgcccctagactacatgcttacccccacatgatcggggttgggaggagaataaggggtggcactctgggaacaaatttccgtgttgccctggggayctgctgctctgtagggtcctgatggaaccaggcccagaatggcatgggcagaccgagctttcctggccccagaagagccagcttccaaccctcctttgaa

SEQ ID NO: 27997 - DNA, 201 bp, Homo sapiens
ggaacaaccatgtagaaataatgagagagagagagagagagagagagagagagagaaaacagtaatgacagaggtagctatctaatggtctaaccaaacaygcagaatattaaaatgcaaaaggaagataataacaaaacagtttggaacttaagggaaaaatagatatatacaaaaaagggtccaaaatgaatataccta

SEQ ID NO: 27998 - DNA, 201 bp, Homo sapiens
cccatatgagcagattctccagaccctccactgcctgctgacctcatcatctccttgtctcttcctcactcattccattccagtcgtacccacctcccccyggccaagcacactcccaccccagggcctttgcacttgctgttcccatagtttgaaatgcttctctccagatatccacctacatcctccagacctaaatat

SEQ ID NO: 27999 - DNA, 201 bp, Homo sapiens
aagaagctagtaaaaataaatacttacaacccaccaccatcaccacaacaaaataaacctaaggagagcacaaggaaacagacaaggtgaaacattacagrgctaacaaattcaagagtaaattatttgaataaacaaacaaacagaaaacaacagataaaccacttgttagtttaattgagacaaaatatgattacatag

SEQ ID NO: 28000 - DNA, 201 bp, Homo sapiens
gctaacaaaaagaaagctgggatcacaattttagtcattgactaggttttcattgttttgttgtttttgtttttaaagtcagaaaatgttaaaagctgagwcactttataatgagaaagggtataagggacagtgagaatataactgtcataagtcttcatgcaccaaatagcatagcatcaagagtcataaaacaagccc

SEQ ID NO: 28001 - DNA, 201 bp, Homo sapiens
gttgagttagaaatgattgatttctctttttaaacactgcctacgtgactcgtatgtccatccatccatccatccatccatccatccatccatccatccakgcattcattcacccacctacccatccatccatcccttcatccatccgttctgtattttactcagtacctgccatgtgccaggtctggtgctgggtattca

SEQ ID NO: 28002 - DNA, 201 bp, Homo sapiens
gggaggctgaggctggcggatcacctgaggtcaggagtcaagactagcctgaccaacatggagaaaccccatctctactaaaaatacaaaattagccgggygtggtggcacatgcctataatttcagctactggggaggctgaggcaggagaatcgcttgaacccaggaggcagaagttgcagtgagccgagatcgcacta

SEQ ID NO: 28003 - DNA, 201 bp, Homo sapiens
ccattgtttgaagaatagttgcctccttctctccataaaagctgataaggacaatttttttccaacagttgagttagaaatgattgatttctctttttaarcactgcctacgtgactcgtatgtccatccatccatccatccatccatccatccatccatccatccatgcattcattcacccacctacccatccatccatc

SEQ ID NO: 28004 - DNA, 201 bp, Homo sapiens
tgcaacctccgcctcctgggttcaagggattctcctgcctcagcctcctaagtagctgggattacaggcacccaccaccacgcccagctaatttttgtactttttttttttttttgagacagagtcttgctctgtcacccaggctggagtgcagtggtgcgatcttggctcactgcaagctccgtctcccgggttcacacc

SEQ ID NO: 28005 - DNA, 201 bp, Homo sapiens
caccacgcccagctaatttttgtactttttttttttttttgagacagagtcttgctctgtcacccaggctggagtgcagtggtgcgatcttggctcactgyaagctccgtctcccgggttcacaccattctcctgcctcagcctcccaagtagcagggactacaggcacccgccaccatgcccggctaatttttgtatttt

SEQ ID NO: 28006 - DNA, 201 bp, Homo sapiens
aatttttgtactttttttttttttttgagacagagtcttgctctgtcacccaggctggagtgcagtggtgcgatcttggctcactgcaagctccgtctccygggttcacaccattctcctgcctcagcctcccaagtagcagggactacaggcacccgccaccatgcccggctaatttttgtatttttagtagagacggtg

SEQ ID NO: 28007 - DNA, 201 bp, Homo sapiens
ttggctcactgcaagctccgtctcccgggttcacaccattctcctgcctcagcctcccaagtagcagggactacaggcacccgccaccatgcccggctaatttttgtatttttagtagagacggtgtttcgccatgttggccaggctggtctcgaactcctgacctcaggcgatccacccgccttggcctcccaaagtgct

SEQ ID NO: 28008 - DNA, 201 bp, Homo sapiens
gggacttttgccatttgttggtggtggtgatggtttttgttttgttttgttttttgttttgaggttttttttttttggctcatattttacccactttaackgtgtgtgtgcgtgtgtgtgtgtgtgtgtgtagagtgccagcgcctgtaaccgtcattcttcatttgcagttctcctttgccaactatttggcctgctctg

SEQ ID NO: 28009 - DNA, 201 bp, Homo sapiens; identical to SEQ ID NO: 3398

SEQ ID NO: 28010 - DNA, 201 bp, Homo sapiens
accctacagctggagtgctagtcaggcatgcctacgtctgcaccttaggctggaaggacaccctggggcacacaagccattcctgagactcccctccccaycccagctgagctgggggtctcaccttgagaatagtactggtgtagctctcacctgatcaggcctttggggtactggaaggagacctcaatgctgatgacc

SEQ ID NO: 28011 - DNA, 201 bp, Homo sapiens
ttcagctcctggaacatcagtgcccctagactacatgcttacccccacatgatcggggttgggaggagaataaggggtggcactctgggaacaaatttccktgttgccctggggacctgctgctctgtagggtcctgatggaaccaggcccagaatggcatgggcagaccgagctttcctggccccagaagagccagcttc

SEQ ID NO: 28012 - DNA, 201 bp, Homo sapiens
tcacctggggaacttcacggctacgcagcgctccccaacacccactggaatcagaacctctggggagtgtggccccagcttccacagtttgcaaactcccycaggcgattttgatgcacagcgaagttagagaaccactgctttatgtggttttttctttatatgaaaaaaattcagagttaaagacaaatgcaatcgtgc

SEQ ID NO: 28013 - DNA, 201 bp, Homo sapiens
tctcaccattcttcccctgcctcaccttcagagcctcagcaacacccctcggcaggggagaggctgcctgggctcttctctggatactttgatgggaattyggaattctcctgaagtcagcctgaaaaagaattaagtcacacattattgtgtgactcttccaatcccatcttttgatcctgtgtgtgctacaggataagt

SEQ ID NO: 28014 - DNA, 201 bp, Homo sapiens
aatctttgctattgcaactaggcttgtgaaatgtaaacgccaagatggttttatttctttgctgtgttttccctggcatcccttcccaagtcaaggaaagmagatgtctaatgcccccaaaagggaagggtatacatgcaacaggaaataccaggaaaggaaatctgctctattctctcaccattcttcccctgcctcacc

SEQ ID NO: 28015 - DNA, 201 bp, Homo sapiens
actcatgcaataggtgcttggtagaaccatggtcttccagtccaaatagaccgtggctggcctgtgttctgaaccattcagtaaagatgaacccatctccmacctcgccctgggctgccatcctgacgtggcagtagggattagatggccaagaatgaccaggtactgggaagaccaggcctctgtggaggctccagattt

SEQ ID NO: 28016 - DNA, 201 bp, Homo sapiens
agtgatcttaaattctgtcctgtaaattggattccctcccttatttctgttagaggaattactctaacaatgcacttttgtatgcagaactgtctttgggyattctgtatcaccacaatgcacacaaaagccctttttccctctttccctgaaatagggagagggaagttcagaaaggccaggctggccgatcagtgtcgt

SEQ ID NO: 28017 - DNA, 201 bp, Homo sapiens
ttttaagcatttttgtgctttttgttggtgattttgctatttaacatggcccccaagtatagtgctgaagtgctgagtagcggtgttcctaattgcaagayggctgtgatgtgccttatggagaaagtccctctgttagataaatttcattcaggcatgagttataaatatagtgctgttggctgggaatccaatgttaat

SEQ ID NO: 28018 - DNA, 201 bp, Homo sapiens
tcttgtgctatatttagtgccatattttaagcatttttgtgctttttgttggtgattttgctatttaacatggcccccaagtatagtgctgaagtgctgastagcggtgttcctaattgcaagatggctgtgatgtgccttatggagaaagtccctctgttagataaatttcattcaggcatgagttataaatatagtgct

SEQ ID NO: 28019 - DNA, 201 bp, Homo sapiens
ctttattactctgaaatgaacgttgggtcttgagagctggcttcgtttgctgcgttcgtttgctttcctgctgtgacgcagtgggaagctgcaggctcaawgcctcggaagacatgaccgtaagaagcccatcagtgctggcttcgggaaccacatgggggtccttgggcccatcaaatcgaacacctctcccttctgttt

SEQ ID NO: 28020 - DNA, 201 bp, Homo sapiens
actctaatttgtgtcagttgtggaaccgaacaggatccttctgccctttcacagcagaggacatggagacccagaggagtccctggtttgcctgaggtccygaagtctggtccatcatgctgggagaacacaggtcatgagccccagcttcaggtccttcccgatacctgactacctgctgctgatgggccaggaccggcc

SEQ ID NO: 28021 - DNA, 201 bp, Homo sapiens
cagccaccgtacctggcctgttctggcagcttctacagaaaaggtctccattcagcaggctctcggctcctgcctcaaagctctatgctcctccagtgccstgagagagggcttgggtgttttgttcctctcttcgtttctttctttgaattcctggttggctctgggtcctgatctccacttcactgccccagttcagcc

SEQ ID NO: 28022 - DNA, 201 bp, Homo sapiens
taatttatttatttatttttgagatggaatctggctctgccacccagactggagtgcagtggcacaatctcggctcactgcaacctccacctcctgggatmacgtgattctcttgccccagcttcccaagtagctgggattacaggtgcacaccaccacacctggctaatttttgtattttcagtagagatggggtttcac

SEQ ID NO: 28023 - DNA, 201 bp, Homo sapiens
ggggtttcaccgtgttagccaggatggtctcggtctgctgacctcgtgatctgcccgcctcggcctcccaaagtgctgggattacaggcgtgagccaccgyacctggccaaggaataatttttaaatgccagaatcttatgtctcacggacgcctatgtaggaatgaaatagaaatcattatttattttgtgtttcagctt

SEQ ID NO: 28024 - DNA, 201 bp, Homo sapiens
aaaataaaactggagtggggattgtgggggaggtgtagactagagactccatggtctactaagtgggaagcaggtgaggtgctggttggctgtgggcaggkagccaggagcctgcccagaagcactgccactgcctgtctatatgcagatgctcagacctaagtgtggtctgctggttgtttaagagtttctagctcggag

SEQ ID NO: 28025 - DNA, 201 bp, Homo sapiens
agaggtggacatggcactctttgggaggtggtcaccaggagtggctcctgtttattagaggacacttgctggtgacactgggatatgcaagggttgggaasagccaggaggcttcctgacaatgtaaccggggtcaccttccttccccaccagaggtggatgagtgttcctggccagatcacggcgggtgcgagcatcgct

SEQ ID NO: 28026 - DNA, 201 bp, Homo sapiens
tcagggagggtgatgatagcagtgccctagtctgcagttcccccaaatggccctggtttgttcgaagcggataaggaatgtgcaggctaggccagtccctycactctgcattacagcagcagacaagcatgtctttaagcatccagggcagtcctgaagaggaaggaaatctcgaagtgaggtgagggcaggccgttctaa

SEQ ID NO: 28027 - DNA, 201 bp, Homo sapiens
agtggttcttaacctcttggggtttgtgtccccatttagaatctgatgaagcggtgggctttccttcttcaagaatagatgaatatgtatgtaaaattttrcatttaatttgagggattctacaggtttacaaacttccttcagaaaacataatatgtaataaaatgactggcttatgactaaagttatctgttatgtcaa

SEQ ID NO: 28028 - DNA, 201 bp, Homo sapiens
tggctgagatcggaccagaattctgatgtcctggtgaaggggagaggtgactgctgaacccaaggggtgccagataaaatacattatttgttgtttatccraaattcaaatgtactgggcttccttgagttttgtttgctaaatctggcaactctctacccccacctcccaggaatgggatagatttaaaggcttaagagg

SEQ ID NO: 28029 - DNA, 201 bp, Homo sapiens
ccagtagcagaggttcccaaacctggctggacatcagaacctcctgggaagatttctatgaatacagattcctgggagaccgtgaattggaatccccacarattgggtcagagaatgatcctatttacctttatataaaagggcatgtgcccaaatctagtaccacaaatgtagaaaggaccacaaatatgcccatctaac

SEQ ID NO: 28030 - DNA, 201 bp, Homo sapiens
gtcactgctagaccgagccctgacttcatgccagattctggggagccaaggctgaggtaggtcagaagaggctggacagaggggttggctggactcaaggwagcctggcagacattaatctttcgtatgactgaggggtcccaggctgccggcattagaagaagtcagtcaggtagtcagctgtccaggtagacaagcgaa

SEQ ID NO: 28031 - DNA, 201 bp, Homo sapiens
ctaagcgctcagtgaggactttgtccttggcacatattcatgtgagcagaaagcccaacttgttatgctgcaactgacgagcctgagagtgagctggtatygggtggttggccaagatggagataggaaagaagggagagggctaaactgtggggtgtcactgctagaccgagccctgacttcatgccagattctggggag

SEQ ID NO: 28032 - DNA, 201 bp, Homo sapiens
ctgcctctctcctccagttccctgagagaggactggagttggtctcttcctttctttgatctcctgagttccttgctactctttctatgacctaatgagtmtggcttgccttctgagacatctgtaaatcttcattggatctattgcatttatgcaaagaccatgtgataaaatcctaagatttttttgtaaggacaaatc

SEQ ID NO: 28033 - DNA, 201 bp, Homo sapiens
accaggagccagatgggagggtctcagctgagagtgtattgtcctcactcgtagaggggtctgtagggtgggctctggcttggacaagtctaagcgctcartgaggactttgtccttggcacatattcatgtgagcagaaagcccaacttgttatgctgcaactgacgagcctgagagtgagctggtatcgggtggttggc

SEQ ID NO: 28034 - DNA, 201 bp, Homo sapiens
ctgggatttccaggctgcggtgagccactgctctgcagcctgggtgacaaagcaagatgctgtttctaaaaaaatacctcccccaaatccctaaatttttraacttagcatcttagtttttgtaaagctatatatatttgctcttgtatttcctaacctctttttagatgggtctactttgttacagctggaaactgacct

SEQ ID NO: 28035 - DNA, 201 bp, Homo sapiens
tgggcggggagaggtgcatatgccacatcacagttgtgattttgcttgtgcagcgtgtggggagaccctgcaggacacaacgggaaacttttctgcacctsgtttcccaaatgggtacccatcttactcccactgcgtctggaggatctcggtcaccccaggggaaaaggtaggtgggaagcccccttggcaaatgggacg

SEQ ID NO: 28036 - DNA, 201 bp, Homo sapiens
gcaaacatatcttgcctcccaccacagggcagtttttctcctatctcagaattgaacaaatgtacaatcgggttttataccgagacattcagttcccaggrgcaggcaggggacagtggtcttcctctatctcaactgcaagaggctttcctcttttactaatccacctcagcacagaccctttacgggtgtcgggctggg

SEQ ID NO: 28037 - DNA, 201 bp, Homo sapiens
agaagaaatattgctccccctggcctaagacacacaaaaccatatggaagcttaccaccaaacaaggctccctgcagagaaaaggcagcgatgcatttcasagctgggtgtgagcccccagcagagttcccaactgatcaggagcaggctcagccttggcttccacacgatagaaagttctgtacttggaaattagatcta

SEQ ID NO: 28038 - DNA, 201 bp, Homo sapiens
gtgctgctggcgaaagggatggaagggcggcatttggtggtcaggaacagcatagctctcagataaactctgctctcttggctggacttttctgccttgtrcatggatcgtgagttgaagcccctgaagacctgggaggggcaaataatgtggctttgagaactgagtgtctgagagaatgaatgggtgagggaggcaaag

SEQ ID NO: 28039 - DNA, 201 bp, Homo sapiens
gagcattttccaaacctgcaatgatctcattcatgaatttacttacctgcggtttatggtccagctttccaattagaatggacacctcttgagagcaggawctcacctgcctcgttcactgctggatccatggtgcctggaattgcacctggcccatagtaggtcaaacagatatttggtgattggccacattcctggtag

SEQ ID NO: 28040 - DNA, 201 bp, Homo sapiens
gcaagtcatttcacctcttggagctttgtttcctaatctgttcatggtccgtttgttattgggtcttcatgagactgcacatataaaactgaaggtgaggraaagcacttggcactgttcttagcacatggtttgcactataattgggacttagtaaacactaattctttcccccctccatcactggggggcacttggtct

SEQ ID NO: 28041 - DNA, 201 bp, Homo sapiens
aatgcacattcaatcattgactagctgggtgaccttgaacaacttattcatgagcctcagttttctcctccttaaaagaggaataacagtacttatttacrggattgctgtgcagattacatgtgacctaaaggcccagcaaattaagaaggcctaagacatggtcagaaaggtaagagtcaagggccttgctctagctgg

SEQ ID NO: 28042 - DNA, 201 bp, Homo sapiens
cagctaattttagtatttttagtagagacgggttttcaccatgttggtcaggctggtctcaaacccctgacctcaggtgacccacccacctcggcctcccraagtgctgggattagaggcgtgagccacggcgcctagcagggatctgattttggaattagagagacttgtattgactcagaaaacctgtgcagcttcttc

SEQ ID NO: 28043 - DNA, 201 bp, Homo sapiens
cccatggctgaacctgcagcagaaggcacggggtcatcgatgtaggccaggggtctgtctcacggggcccaggcaggtggggagggtgggggcgtccggcmggatggaggggaggcgtcccaccctgctctgtgctcatttcatgaccacccagctctcaggaatttgaaatttcccaaagacaggttagacctgtaagac

SEQ ID NO: 28044 - DNA, 201 bp, Homo sapiens
gctgaggtaggtcagaagaggctggacagaggggttggctggactcaaggtagcctggcagacattaatctttcgtatgactgaggggtcccaggctgccrgcattagaagaagtcagtcaggtagtcagctgtccaggtagacaagcgaagaaagtgatccccaggccaagtacggacaggagcacgtctactgcaggac

SEQ ID NO: 28045 - DNA, 201 bp, Homo sapiens
tcattcttctgaaagcctgcattgccgtgctggtcccttccccctcccaacctccatctctgcgctgccaggccagccccgctcttttgaattgacacccmccccccccccccgcaactaatgtcctgtctccctgctctgtcatttggtccaagtcttcatctaacaccgtccccgctcaccttatcccatctcccttga

SEQ ID NO: 28046 - DNA, 201 bp, Homo sapiens
acataaagtacttggagaattcaacacataccagggccaagtacatacccaagaaacctgaggtgaagatgcttcccacttcactcctccagtgagggaamaatcagagggggaaggggagcaatcagagaggcttcccagaggaggccacttttaagtgggattctgagccctgagggacatttgcaagttggcggttcc

SEQ ID NO: 28047 - DNA, 201 bp, Homo sapiens
gcattacagcagcagacaagcatgtctttaagcatccagggcagtcctgaagaggaaggaaatctcgaagtgaggtgagggcaggccgttctaaccagtcyctccatccttcccatcccaaccctcaggatgctgtcggcgccagcgctggatgcctcttgcttttatttgaatgaaagataagacacgttgtgtcaatct

SEQ ID NO: 28048 - DNA, 201 bp, Homo sapiens
tcacattgttatgggcaagcaccatatggggaaaggtttaaagaaataccatgcctggggaacagtgggatgccttcctttcactgtcaatgactgtccaygggttctcagactgaacttggttttgttaaatctgctttgaggagaacttgaacttcttcctcagcttgtggtgcttcaggtataaaatatggcttattg

SEQ ID NO: 28049 - DNA, 201 bp, Homo sapiens
ttgctctgattcaaacgcctctgacaattacccagtgtatcttggccaatcagctccactgtcccagggataacaggatgactccatataacctagtcacytgagtcctttcttagattatatctttaataaattatttatttatttaattttattttttttgaggcggagtctcactctgtcacccaggctggaatgcag

SEQ ID NO: 28050 - DNA, 201 bp, Homo sapiens
tcccagcactttaggaggccaaggcaggtggattgcttgaggtcaggagttccagaccagcctgatcaacatagtgaaaccccatctctactgaaaatacaaaaaaaaattagccaagtgtggtggcaaacacctgtaatcccagctactcagggggctgaggcaggagaatcactagaacctggcaggcagaggctgcag

SEQ ID NO: 28051 - DNA, 201 bp, Homo sapiens
cagctttccccagagctgcaagtaattagcaaacttgattgattcgagtatcacctcttgttcaccacctctttcccctatggtctttatggttcactaaygtacttaaaataattagcctgaataattatcccattcattcagatcatgaatgtgttaccaaggaagttgtactaacatttcctttctgtaattttaaaa

SEQ ID NO: 28052 - DNA, 201 bp, Homo sapiens
acttgagcccaggccacagaggatgcttgctcactgagtgaccttgatcacattagccattctcagcgtcagtttccttacttgtttttgttttgttttgwttttgagatggagtttcactcttgttgcccaggctggagtgcactggcgcgatctctgctcactgcaacctctgcctcccaggttcaagcaattctcctg

SEQ ID NO: 28053 - DNA, 201 bp, Homo sapiens
gcctgccttggcctcccaaagcaaagggtctttcttacaagggctcttagttgtcctgataacataagcaggtgaaatacattgttcaaggagacattaayaatggtgaacaagagcatatagagaggggaggaagacagggctgacccctaaagtcattctggtgatggcagggaagcaggggagggaggctgatctttg

SEQ ID NO: 28054 - DNA, 201 bp, Homo sapiens
gaggtatcggggaagagcaaaacccaaacagcagcagaggagaatcatgatggcgctgaaggattggagacaaaactgagttgcttctttctcaagccaaaaaaaaaaagaaaaaaaaagccaggccatagcacttgtattttgaaagcaggtcagcttctgattgcacagggaagatatgacagccttagttgagatgcc

SEQ ID NO: 28055 - DNA, 201 bp, Homo sapiens
agctagagggcccctggggctgtttgaatataaagaagtggctagtggaggggcagtgagtggagatgctggagagagaggaactgctgagagcaaagtcmtccggggttggaaaacgaatagagtcaggggtgcaggggctgggtcagggctggagatgaggaagagtggagacgtgatggagcaggtgtgtggggcatg

SEQ ID NO: 28056 - DNA, 201 bp, Homo sapiens
tctaggctggagtgcagtggcgtgatcttggctcactgcaacctctgcctccggggttcaagcagttctcctgcctcaacctcccaagtagctgggattayaggcacacaccatcacatctggctaatttttatattttcagtagagacagggtttcaccatgttggccaggcaggtctcaaactcctgacctcaggtgat

SEQ ID NO: 28057 - DNA, 201 bp, Homo sapiens
gcagtgtgctgggggtctggggtggggacagggactctgggaagctccccatcatgctcccttgcaggtctgtaagtacgactttgtagaggtgcgcagcrgcctgtcccccgacgccaagctgcacggcaggttctgcggctctgagacgccggaggtcatcacctcgcagagcaacaacatgcgcgtggagttcaagtc

SEQ ID NO: 28058 - DNA, 201 bp, Homo sapiens
gaagagccacaacctcaaggacagagaggatatggcctggaggagtcatcccctacgtcattggagggaacttcactggtcagtagccacagacaaggtcygctttgggtcagggtgctttgtctccctgggttgagagagtccttctaggaaggacccgggtgggatggagcagatgttagggaccacagcaggcctaca

SEQ ID NO: 28059 - DNA, 201 bp, Homo sapiens
ataagtttttattgagcccaagagtacatcaccattagagttacccaagttcactgtccactatgtgaaatgatgggatatttacaaaccctcctttaccsagtgaaatgcaaccaggttgatgaggagtctgtgcatcacagacaaggacgactggaaggaaaggggtatatttgagttggaaaagggcagggtagaggg

SEQ ID NO: 28060 - DNA, 201 bp, Homo sapiens
cctcagcctcccaaagtgctgtgattacaggcgtgagccaccgtgcctggccaacaactttatacttactgtgttcctaccttccgtggtgctgtggaccwgaactctccttcccgcttctccccatatcctttcttcttcctaggttcaacttttttgaaaaagatgtctcagtgttcagttgtcccttcactagactcc

SEQ ID NO: 28061 - DNA, 201 bp, Homo sapiens
tgaggcaggagaatggcatgaacccgggaggcagaggttgcagtgagccgagatcgtgccactgtactccagcctgggcaacagagcaagactccgtctcaaaaaaaaaaaaaagaaaaaaaaaaggaaatgaataaataatttgaatagatatttctctgaagaagatacacaaatgaccaccaagtacgtggaagagat

SEQ ID NO: 28062 - DNA, 201 bp, Homo sapiens
ttctgaaagcctgcattgccgtgctggtcccttccccctcccaacctccatctctgcgctgccaggccagccccgctcttttgaattgacacccccccccyccccccgcaactaatgtcctgtctccctgctctgtcatttggtccaagtcttcatctaacaccgtccccgctcaccttatcccatctcccttgacgctgg

SEQ ID NO: 28063 - DNA, 201 bp, Homo sapiens
ccaggcgtggtggcaggtgcctgtagtcccagctatgtgggaggctgaggcaggagaatggcatgaacctgggaggtggagcttgcagtgagccgagatcrcaccactgcactccagcctgggcaacagagtgagactccgtctcaaaaaaaagagacaaccctaaaaccgaattaaacttacatgcagaaatccttaaaa

SEQ ID NO: 28064 - DNA, 201 bp, Homo sapiens
gtggaatatttgaacaacatatgaaacccatcaattagacatcacacattattataagaaaacatggaacatttataaaaatcagtcttgtattagcttaycaaggaaggcctaaatatcaaagaattgatactttagagcaagggctagccatcaatgatatcagtaggccaaatccaacctgctgtttttgcaaataaa

SEQ ID NO: 28065 - DNA, 201 bp, Homo sapiens
ctggagtagctgggactacaggcgcccgccaccatgcccagctaatttttttctatttttaatagagacagagtttcaccgtgttagccaggatggtctckatctcctgacctcgtgatccgcctgcctcagcctcccaaagtgctgggattacaggcgtgagccaccgcacctggctaagttactttttagagaaccttc

SEQ ID NO: 28066 - DNA, 201 bp, Homo sapiens
tataagaaaacatggaacatttataaaaatcagtcttgtattagcttaccaaggaaggcctaaatatcaaagaattgatactttagagcaagggctagccrtcaatgatatcagtaggccaaatccaacctgctgtttttgcaaataaagttttattggcacacagccatgtccatttattgacatattatctgtggctgc

SEQ ID NO: 28067 - DNA, 201 bp, Homo sapiens
agaaagccgagcagacgcaggcgggaggcacgagggtgtcttgtgctgaggggacatctcacttctctctgctccagagtgcgggggcaggctgaaggctraagtgcagaccaaagagctctattcccacgcccagtttggggacaacaactacccgagcgaggcccgctgtgactgggtgatcgtggcagaggacggcta

SEQ ID NO: 28068 - DNA, 201 bp, Homo sapiens
gaggacaagacaggtgacctttcaaaataccttacagacttaggatttggattttcatggtggttggcacagccccaggctgcacagaactaatacctgcygttcttctgcctccaccagccctatctcttaggctcaaggagaaattttactggatgggctgtcttttccaaagtttaccacccaacacccaatgccctt

SEQ ID NO: 28069 - DNA, 201 bp, Homo sapiens
ctatatgagctatgcacctaggatcatctttggaagagcagggcctgcaaagctccctggagcagaatttgcaatgttttcttttgaaaaggagcttgttyggatgcccttcagagtctctggtaccagagacacatcctgtgtccttgcataagatcctgtcccatcctcctcattttcaactccaatcacagctaaagt

SEQ ID NO: 28070 - DNA, 201 bp, Homo sapiens
gggttgcctttctcagctgtcctgctgtccttgggggcccaaggttggcagatgggagtgagagaccccaaagagaggcagggcagtggccagccaccacrccagctgcatacccggctgctagagggttgtgttgagggaaggctgcctgaggatgctgtggtggaggaagcccagcagccctgccttctccctcatgcc

SEQ ID NO: 28071 - DNA, 201 bp, Homo sapiens
actgggtgaaaggaaagcacaaatgcattcattgtttttaaaagcagtaaagatttatccccaattttgttccttcaaatattcagttgaaaccattagtyttgaacaaaggacactgaattaatcagttcaaattgtctaacattttaaaattattacagaacagcaaggctctattgctcctggtgggaaatcacagtc

SEQ ID NO: 28072 - DNA, 201 bp, Homo sapiens
taaaaccctcaggtcctcccttcctgcagctccttctacctcagacactgtgctgagggccccagccggtcagatctttctagtcatctagacccaggctsatggccacccctcagagaggccctccatgctggcccattccaaacgcttgcattattcctaggaaagggatgtactggtacagcatgagggtgtttgtga

SEQ ID NO: 28073 - DNA, 201 bp, Homo sapiens
ttctgttctcagatgctgttcttggccactttctttcccacctgggaaggcggcatctatgacttcattggggtgagaggggccagggaagggaagggagytcaggaatggggctccctgtccccctgtgcttacttaagcctcaacctgacccgcaggagttcatgaaggccagcgtggatgtggcagacctgataggtc

SEQ ID NO: 28074 - DNA, 201 bp, Homo sapiens
gatgaatgcatggatgggcgatagagttaagagtcggggcctcagctcctggaggtccttgctctgccggacacacttatctttgaaattctgacttccasgtcgtctctacggacttcctcggtgatacccactcgtccatcttcgatgctaaggccggcattgcgctcaatgacaatttcgtgaagctcatttcatggt

SEQ ID NO: 28075 - DNA, 201 bp, Homo sapiens
gctggccgcccatccagacagggcccccagtagcagaaggagggagcaggagccgaccagacgtgcaagatgcatattgctgggaaggtcgggaaggatgsagagaggagccagggaagccacgctgctatttatcctctctccctctcgccctcttctccacccctcatgactcaattacccctgtgaggcactgagttg

SEQ ID NO: 28076 - DNA, 201 bp, Homo sapiens
ctcagccctcggttgatcccttcaatgaccttctcaatggggtcatcgctggccgcccatccagacagggcccccagtagcagaaggagggagcaggagcygaccagacgtgcaagatgcatattgctgggaaggtcgggaaggatgcagagaggagccagggaagccacgctgctatttatcctctctccctctcgccct

SEQ ID NO: 28077 - DNA, 201 bp, Homo sapiens
tctacaaggcctttgttatggagtgagttgggtggggtttagggctgggtccaaagtggggtgggttatctagtctcccttccttattgtgacattttccygcaggaccttcgtccacctctgctcgctgggcagttgggcagctctactggcccgagcagtggtaacggggctgctggccctcagcactttggccctgta

SEQ ID NO: 28078 - DNA, 201 bp, Homo sapiens
ccatgtaaaagtgatgttcatggcgcttcgcgtgaggtgagctttgccctccctgtgatgcacaaaacaaggacacttggaaccttgccggggacgtgctsaccacttcgcaggcgagagctcagggaagcctcaccaccacctgagaaggccagagtgtgcccgcagtttacagagcggccaacagaggttaagagaggg

SEQ ID NO: 28079 - DNA, 201 bp, Homo sapiens
cactgttgatgccatccagggccttgcccacctctctctctgcattgctcagccctcggttgatcccttcaatgaccttctcaatggggtcatcgctggcygcccatccagacagggcccccagtagcagaaggagggagcaggagccgaccagacgtgcaagatgcatattgctgggaaggtcgggaaggatgcagagag

SEQ ID NO: 28080 - DNA, 201 bp, Homo sapiens
aatttaaaaattagcttggcatggtggtgtgcgcctgtagtcccagctactcgggaggccaaggcaggaggatggccggagccaggaagatcaaggctgcrgtgagctctgattgcaccactgcactccagcctgggcgacagaggaagaccctgtctcaaaacaaacaaaccccacaaacattgattgaaccccccattg

SEQ ID NO: 28081 - DNA, 201 bp, Homo sapiens
gaacccaggggtgctgggcttccatgtaaaagtgatgttcatggcgcttcgcgtgaggtgagctttgccctccctgtgatgcacaaaacaaggacacttgsaaccttgccggggacgtgctgaccacttcgcaggcgagagctcagggaagcctcaccaccacctgagaaggccagagtgtgcccgcagtttacagagcgg

SEQ ID NO: 28082 - DNA, 201 bp, Homo sapiens
ttccacgggggtgctggagggcaggggctcaaagcctggtgctgaaggtgtctgagtactggagaatcccatcctttgccttcctcagctgcattcccctrtgggtcggagcccggggcattgagtttgactggaagtacatccagatgagcatagactccaacatcagtctggtaggcagtcgtgctctcccacatacac

SEQ ID NO: 28083 - DNA, 201 bp, Homo sapiens
aacccaggaggcagaggttgcaatgagcccagatagcgccactgcactccagcctgggcgaaagagctggattccatctcaaaatatatatatatatatawgtatatatgggttagggaacggattgggagagggagctgaaaaagcagttaaaggggctggtgaggtcatcttggcaagagatgcccatggccagcacag

SEQ ID NO: 28084 - DNA, 201 bp, Homo sapiens
gtccagcctcaggccacaaggtctgtggcaacagggagaggtcagggagacagacaggccagctggcccccggctcccagccccaccaccccccaggtgcmtttgatttggtgccaaaaacttggactcccactacccccttccagcccttctccaccccctgctgtctccctttcctcaggaatctgtgtaggatcagac

SEQ ID NO: 28085 - DNA, 201 bp, Homo sapiens
gaacccaggaggcagaggttgcaatgagcccagatagcgccactgcactccagcctgggcgaaagagctggattccatctcaaaatatatatatatatatatgtatatatgggttagggaacggattgggagagggagctgaaaaagcagttaaaggggctggtgaggtcatcttggcaagagatgcccatggccagcaca

SEQ ID NO: 28086 - DNA, 201 bp, Homo sapiens
agttgggggagtttagaattttatttttggctgacattcacctttctaatgtaaactattagcgactcctggctctgtggctgcctggggcttttacacayacacacccacaggcccacacacatgcaaatacacacaggcacactagtgaaccctgtctgggcccaggcagggtctgcagcctccccagcgcccctcccc

SEQ ID NO: 28087 - DNA, 201 bp, Homo sapiens
gccagagtgtgcccgcagtttacagagcggccaacagaggttaagagagggcaaactacttccttagtctctcaacaagggcggcgcgcccgcgcgcgcgcacacacacacacacacactcactcactcactctagccggaggaaccaggtcttccggtgggctgcctccattcccacactgttccctcacttcccaaggg

SEQ ID NO: 28088 - DNA, 201 bp, Homo sapiens
ggccagagtgtgcccgcagtttacagagcggccaacagaggttaagagagggcaaactacttccttagtctctcaacaagggcggcgcgcccgcgcgcgcgcacacacacacacacacactcactcactcactctagccggaggaaccaggtcttccggtgggctgcctccattcccacactgttccctcacttcccaagg

SEQ ID NO: 28089 - DNA, 201 bp, Homo sapiens
gtcacgaggggccaggagccagcaacagattctgggcagcaaagacagtttgttctctttcactttggtggtcatgcaacccattccctcccttcccccgyatagtgaccagagcaccgcccccacctgagcctaaggctgaagtagagccccagccacaaccagagcccacaccagtcagggaggaaataaagccaccac

SEQ ID NO: 28090 - DNA, 201 bp, Homo sapiens
gaaggccagagtgtgcccgcagtttacagagcggccaacagaggttaagagagggcaaactacttccttagtctctcaacaagggcggcgcgcccgcgcgygcgcacacacacacacacacactcactcactcactctagccggaggaaccaggtcttccggtgggctgcctccattcccacactgttccctcacttccca

SEQ ID NO: 28091 - DNA, 201 bp, Homo sapiens
ggctccttgagggagcctcctctccattacccccttctctcccatcccttcctgtctgtccctggccagatttggacgcatcggtcgcctggtcctgcgckcctgcatggagaagggtgttaaggtggtggctgtgaatgatccattcattgacccggaatacatggtcagtagctggcagagggcaggaacagcagggtg

SEQ ID NO: 28092 - DNA, 201 bp, Homo sapiens
gatgttcctcagtgtctacaaggcctttgttatggagtgagttgggtggggtttagggctgggtccaaagtggggtgggttatctagtctcccttccttaytgtgacattttcctgcaggaccttcgtccacctctgctcgctgggcagttgggcagctctactggcccgagcagtggtaacggggctgctggccctcagc

SEQ ID NO: 28093 - DNA, 201 bp, Homo sapiens
tggagtgctgattaaaaacaggatttctgggcctccatacagacccactgagtccgatttttctaggaagagccctcctcaggtgatttttttttttttttgagacagagtctcactctgtcgcccaggctggagtgcagtggcgcaatctcggctcactgcaccctccgcctcccaggttcaagagattctcttgcctca

SEQ ID NO: 28094 - DNA, 201 bp, Homo sapiens
cacacacacacactcactcactcactctagccggaggaaccaggtcttccggtgggctgcctccattcccacactgttccctcacttcccaagggcgggggccgcaggggtaggtggggctggggctttggtccaggagaccctggaagacacaggagcagacaggcttaccagcctcatgagacttgaacccctgccctg

SEQ ID NO: 28095 - DNA, 201 bp, Homo sapiens
ttctctgtctccttccagccctcactgagaccatggtgggccccctggccaaatctcccagcctcatttccggcctgccctgcagcatggtggactccctkgccaaacctcccagcctcatttccggcctgccctgcagcattgtcgactccctggccaaacttccctgcctcacttcccgcctggttggccccgtgatgg

SEQ ID NO: 28096 - DNA, 201 bp, Homo sapiens
caaacttctctgcctccttcccaacctgaccggcagcatggtggatcccctggccaaacttctctgtctccttccagccctcactgagaccatggtgggcyccctggccaaatctcccagcctcatttccggcctgccctgcagcatggtggactccctggccaaacctcccagcctcatttccggcctgccctgcagcat

SEQ ID NO: 28097 - DNA, 201 bp, Homo sapiens
gccaaacttctctgcctccttcccaacctgaccggcagcatggtggatcccctggccaaacttctctgtctccttccagccctcactgagaccatggtggrccccctggccaaatctcccagcctcatttccggcctgccctgcagcatggtggactccctggccaaacctcccagcctcatttccggcctgccctgcagc

SEQ ID NO: 28098 - DNA, 201 bp, Homo sapiens
agctggggggatgatggtgccagaagcccctgacacctgcgcttcctccccaggaccacatctctgcaggtgctcaacgtgtggtcatctccgcgccctcrccggatgcaccaatgttcgtcatgggtgtcaatgaaaatgactataaccctggctccatgaacattgtgaggtaatgtgggcagtgacatcctgcaatgt

SEQ ID NO: 28099 - DNA, 201 bp, Homo sapiens
ctgtctgtccctggccagatttggacgcatcggtcgcctggtcctgcgcgcctgcatggagaagggtgttaaggtggtggctgtgaatgatccattcattracccggaatacatggtcagtagctggcagagggcaggaacagcagggtgggactggggtgggaaagggactcagggaagctgtatggaaggctctcagct

SEQ ID NO: 28100 - DNA, 201 bp, Homo sapiens
ccaggcgcaggtgtttttaagtgcagtctgggagcaggagtgtgtgtggagaggtgggagccaatgtgagcttccatgggtttcacagagtatgatacacrgtactctctaagcttccctgaggataagaaatgcctggagtgcttattttattttttatttttttttgggagatggagtttcgctcttgttgcccaggct

SEQ ID NO: 28101 - DNA, 201 bp, Homo sapiens
tagtgaccagagcaccgcccccacctgagcctaaggctgaagtagagccccagccacaaccagagcccacaccagtcagggaggaaataaagccaccaccrccaccactgcctcctcaccccgctactcctcctcctaagatggtgtctgtggcccgggagctgactgtgggcatcaatgggtgagtctactccagcccct

SEQ ID NO: 28102 - DNA, 201 bp, Homo sapiens
cacccctaaaatgattaagaagcactaatctaaaaagatgcctcactgtactgaagaatgctttttctttatattttttttagggacggggtatcactctyttgcccagtctggagtgcagtggtgtaatcatagctcaccgcatccttgacctcccgggctcaagtggtcctcccacctcggcctcccaagtagtgggca

SEQ ID NO: 28103 - DNA, 201 bp, Homo sapiens
cctccttcccaacctgaccggcagcatggtggatcccctggccaaacttctctgtctccttccagccctcactgagaccatggtgggccccctggccaaayctcccagcctcatttccggcctgccctgcagcatggtggactccctggccaaacctcccagcctcatttccggcctgccctgcagcattgtcgactccct

SEQ ID NO: 28104 - DNA, 201 bp, Homo sapiens
actgtactgaagaatgctttttctttatattttttttagggacggggtatcactcttttgcccagtctggagtgcagtggtgtaatcatagctcaccgcakccttgacctcccgggctcaagtggtcctcccacctcggcctcccaagtagtgggcaccagccaccacacctggcaaattttttgtagagatgaggtcttg

SEQ ID NO: 28105 - DNA, 201 bp, Homo sapiens
tagggctgggtccaaagtggggtgggttatctagtctcccttccttattgtgacattttcctgcaggaccttcgtccacctctgctcgctgggcagttggrcagctctactggcccgagcagtggtaacggggctgctggccctcagcactttggccctgtatgtcgccgttgtcaatgtgcactcctaggcttggtgtct

SEQ ID NO: 28106 - DNA, 201 bp, Homo sapiens
gactggagagtcagtgaaaattgaagaaagctgcttaacccaagtttgaaatcatgacactagaaacaactccagcaccatagttatcacgcagacttcamcgtggccaccaccattaccgccacttggagtcatccctcttccccacctagctgccccctccgtccacggtcccgactcaggtcttgccttctctggtca

SEQ ID NO: 28107 - DNA, 201 bp, Homo sapiens
tctcaccctcatcctgacgtttcataaaaccaagtctgcgtgcataccccaagaggggtaagggtggaggggtggctctgcgactcacctcacagtgtccrtgcacaccttggctgtttcagcaacgcgtcctgcaccaccaactgtttggctcccctcgccaaagtcatccacgagcgatttgggatcgtggaagggttg

SEQ ID NO: 28108 - DNA, 201 bp, Homo sapiens
agaagcccctgacacctgcgcttcctccccaggaccacatctctgcaggtgctcaacgtgtggtcatctccgcgccctcaccggatgcaccaatgttcgtyatgggtgtcaatgaaaatgactataaccctggctccatgaacattgtgaggtaatgtgggcagtgacatcctgcaatgtgtggaagggagggtagactcg

SEQ ID NO: 28109 - DNA, 201 bp, Homo sapiens
tagcgactcctggctctgtggctgcctggggcttttacacatacacacccacaggcccacacacatgcaaatacacacaggcacactagtgaaccctgtcygggcccaggcagggtctgcagcctccccagcgcccctccccacagatctaatctcagcccttctccttgtacttactgggggtagggtgagtgataaagg

SEQ ID NO: 28110 - DNA, 201 bp, Homo sapiens
ctctggcttgggcgccgcccctcggcgacgtcactgggtactgtgacgtcactgggtgctgtgacatcagggcaattagcccaggacccacagccctggcsctccgcacgcacctcggtaacatcacagcaggtccaggccaatgataaccttataagaggccatgtcgaagcgcgacatcgtcctcaccaatgtcaccgt

SEQ ID NO: 28111 - DNA, 201 bp, Homo sapiens
gctgttcctttagtctggaatgcttcccttgccaggtgaccatacagtctgtccttacttcctccaagtctctggaggaacctccctcttcagcaaggcamcccctcaaaatatgttctttttgtggccatattcctcacctgaaatttcatttcatagtcactgttggccccagtggtgtgtgcactccaagaaaacagg

SEQ ID NO: 28112 - DNA, 201 bp, Homo sapiens
gggctgctggccctcagcactttggccctgtatgtcgccgttgtcaatgtgcactcctaggcttggtgtctcagacattgatgtaccttttccctgcctcrctccaggttttagtgaagtaaacagtatttggaaagttgttgctgcctccatttctctctcttgggaactgtctcccaataccgtgtccacctgggtctc

SEQ ID NO: 28113 - DNA, 201 bp, Homo sapiens
cgcatcggtcgcctggtcctgcgcgcctgcatggagaagggtgttaaggtggtggctgtgaatgatccattcattgacccggaatacatggtcagtagctrgcagagggcaggaacagcagggtgggactggggtgggaaagggactcagggaagctgtatggaaggctctcagctgtaatgtgagaccttcaccaaagag

SEQ ID NO: 28114 - DNA, 201 bp, Homo sapiens
tgggtccaaagtggggtgggttatctagtctcccttccttattgtgacattttcctgcaggaccttcgtccacctctgctcgctgggcagttgggcagctytactggcccgagcagtggtaacggggctgctggccctcagcactttggccctgtatgtcgccgttgtcaatgtgcactcctaggcttggtgtctcagaca

SEQ ID NO: 28115 - DNA, 201 bp, Homo sapiens
ggtgctgaaggtgtctgagtactggagaatcccatcctttgccttcctcagctgcattcccctatgggtcggagcccggggcattgagtttgactggaagyacatccagatgagcatagactccaacatcagtctggtaggcagtcgtgctctcccacatacacatttctgctggcggccatactcctccccaaggcctgg

SEQ ID NO: 28116 - DNA, 201 bp, Homo sapiens
gagaaggccagagtgtgcccgcagtttacagagcggccaacagaggttaagagagggcaaactacttccttagtctctcaacaagggcggcgcgcccgcgmgcgcgcacacacacacacacacactcactcactcactctagccggaggaaccaggtcttccggtgggctgcctccattcccacactgttccctcacttcc

SEQ ID NO: 28117 - DNA, 201 bp, Homo sapiens
tgcagaagtcacttaaaacactgtgcaaccctcaggcaaggctggaccctggcctgcacacatcccctcctgtggtctgtggtggtggccccaccagcctycacacctaggccaccaacttagtcctggaaaaaagaggcatgggagcttaggagcatgaaggcctcatcttggtccttctcttccccaagaccacagtcc

SEQ ID NO: 28118 - DNA, 201 bp, Homo sapiens
tgagaccatggtgggccccctggccaaatctcccagcctcatttccggcctgccctgcagcatggtggactccctggccaaacctcccagcctcatttccrgcctgccctgcagcattgtcgactccctggccaaacttccctgcctcacttcccgcctggttggccccgtgatggaccccatgatggatcagtttgtctg

SEQ ID NO: 28119 - DNA, 201 bp, Homo sapiens
ctgggactgtgccccccggtagcagtgaggaccccaggaggccttggtgttagtttccctgttggtaggcacttggctttgcaccctgagccagatcgccrtgcatcagttttcaggactgtccagtggagtccaggtgcccagcagagtgaaaatgatagaagtcaaaggattttcataatcctttcaggtggtgggagg

SEQ ID NO: 28120 - DNA, 201 bp, Homo sapiens
cactttataatttctttgtggtttgtgaaaagtttctaaataggctgtaagacttcggattctttcatctccttggtgcccaagcatgtggtatgtgtcargttgctacttagagacacattttcagtctcagttttagtatttacttaagcatggtgatgaaagttaagaaaaacattgaaatcaaacctacatggagaa

SEQ ID NO: 28121 - DNA, 201 bp, Homo sapiens
ctattacacgaacatgtagcaaatatgcgttggaacatgtctcatgttatttaccccagagaacccagtgttactcttgatttcatcagtgcagtcaaagyggaatgtcccatgttttcctttctttagtcaacacttctaaaatcagcagactgaagctttgcaaaaaattcagcaatatccttctgaactgtggaatta

SEQ ID NO: 28122 - DNA, 201 bp, Homo sapiens
actctgtcatctttttttcttaatagtaagagcaggtgcttccatttatcattcaaggtgtactgttgcctccttttttctttagcaaagtcagtgttaaaaaaggcttcccctgagaagtcaaaggctgctacctgacatctggttgagaaggctcggttctcttgtgagctgggaggagtttcagtggattaagcactc

SEQ ID NO: 28123 - DNA, 201 bp, Homo sapiens
ctgttcagagaaggctgagacagggatcagggaggctgtggggggcgtctaactgcctctgcttcccagtcacctccccatgcttatatcttaagctcctrtcaaccccccggtttcggacatatctggtgggactcgtttcagagcctttcaaggcttctgtaggagccactgtgttggtgctcagcttttctgctgaag

SEQ ID NO: 28124 - DNA, 201 bp, Homo sapiens
ttatgcttaatcatttgtgcagctccttgtataataccggcctctttttgcctaactttgaagctccaggaaggcaaggactgtgtctttcctgtccattyttagaaacatactttcttgaccatagtagcactcattaaatacctgtccaataaatgcgtgaattcatggacatatgtcttcaactccttgaatttaatt

SEQ ID NO: 28125 - DNA, 201 bp, Homo sapiens
aatttaatttttttttttttttttttttttggaggcaatcttgccctgtcacccaggctggagtgcagtggcatgatctcagcttggccccctgcaacctytgcctcctgggttcaagagattctcctgcctcagcctctcaagtagctgggattacaggcatgcaccaccaggcccagctaatgttttttgtatttttag

SEQ ID NO: 28126 - DNA, 201 bp, Homo sapiens
tttttttttttggaggcaatcttgccctgtcacccaggctggagtgcagtggcatgatctcagcttggccccctgcaacctctgcctcctgggttcaagarattctcctgcctcagcctctcaagtagctgggattacaggcatgcaccaccaggcccagctaatgttttttgtatttttagtagagctggggtttcacca

SEQ ID NO: 28127 - DNA, 201 bp, Homo sapiens
cctcctgggttcaagagattctcctgcctcagcctctcaagtagctgggattacaggcatgcaccaccaggcccagctaatgttttttgtatttttagtaragctggggtttcaccatgttcgccaggctggtcttgaactcctgaactcaagcaatccacccacctcggcctcccaaagtgctggatttataggcgtgag

SEQ ID NO: 28128 - DNA, 201 bp, Homo sapiens
tctactgacttcctctgcttgcacgaaggtaatgttcagagaaatggtatggatgcatgggatgaggatccaactgtcttagcagttgcttcatttatttaaaaaaaaaaagagaaatcttctctcaagtttttagaagttctagcaagcagtattctttgtgcaggatccaaaaagagacacacacacacacacacacac

SEQ ID NO: 28129 - DNA, 201 bp, Homo sapiens
gcttggccatgtggccagtgctctgtgagccacagtcacttgtgacgtttgtcaacatgggtgctggaaccaggaatctgaatgtactggaaacgctgtgsagagtgtgactttctttgtattttattatctctcagtgtgtttctacacacacacaacacacacacacacacagagtccccttgccactctgccttctga

SEQ ID NO: 28130 - DNA, 201 bp, Homo sapiens
agtggctctatctcggcttactgcagcctctgcctcctgggttcaagcagttctctgcctcagccttctgaataactgggattacaggcgcccgccaccamgcccagctaatttttttgtatttttaatagagaaggggtttcactatcttagccaggctggtcttgaactcctgatcttgtgatccagccgcctcggcct

SEQ ID NO: 28131 - DNA, 201 bp, Homo sapiens
tcttttaaggccttatttttagtgtggccatgactcccgcgggcccggaggtcagaaatcaaaggttagtggaaagtggttttcaattagacatcgaagtrgaaaagtctgactttaatcaaatgtaagataatgtttcttcatgtttaaaatataattgaaggcagtattacaattccatagcaagagataaggccagaa

SEQ ID NO: 28132 - DNA, 201 bp, Homo sapiens
ctactgacttcctctgcttgcacgaaggtaatgttcagagaaatggtatggatgcatgggatgaggatccaactgtcttagcagttgcttcatttatttaaaaaaaaaaagagaaatcttctctcaagtttttagaagttctagcaagcagtattctttgtgcaggatccaaaaagagacacacacacacacacacacaca

SEQ ID NO: 28133 - DNA, 201 bp, Homo sapiens
aggtatgtatgtgtttgtaacttttggtgtaaacagtatttaattttaatatctatcatttacacatcacatcataaaagagtcctgctgtgaatcaaaasccttcatataggtaatggcaaataactctttgtttatgagtaaaaaatgaatagtttttttttccccccagaaatccgtgtttggtgtttgtatttgttt

SEQ ID NO: 28134 - DNA, 201 bp, Homo sapiens
acatttaaagcagagtctaagactttgcagaggacagtggctggattcacttgagaaactcaaatctagttttgagcattttcattccacaagtagcttattttttttttactaaaatctagttttgagcattcaaactattaagtatgattctacaagtagtttattattattttttccaatctgctaacccacaaaata

SEQ ID NO: 28135 - DNA, 201 bp, Homo sapiens
tttaatccagtgacgacttcattgttatttattgaaaagcagtgacattacctcttaatgtctggggctggggagctttggagatttagtcggtgcctgcygagcccccaaaaagatgctcgtggaagattgcaggtaagtatgtgtgatgatgtggctccaaataacaccccttggcttgtaaatggagacgtatttatg

SEQ ID NO: 28136 - DNA, 201 bp, Homo sapiens
cctctgcttgcacgaaggtaatgttcagagaaatggtatggatgcatgggatgaggatccaactgtcttagcagttgcttcatttatttaaaaaaaaaaagagaaatcttctctcaagtttttagaagttctagcaagcagtattctttgtgcaggatccaaaaagagacacacacacacacacacacacacacacacaca

SEQ ID NO: 28137 - DNA, 201 bp, Homo sapiens
tagtgactgttatttgttatgtacctgttatgtgcaagacacagtgcctgctccccaaggcactcacaatccagattcccatggctcactttttattccayttcgacatacctggggagtgtcccagacctacacactgagagaaatcgctgtctgtgtctatagttctcagcgtctgcaggggccccacgtggcaggtgc

SEQ ID NO: 28138 - DNA, 201 bp, Homo sapiens
gtattaaggaacatatgacattaaagcgtcacccagtgccgcggaggattatggctcttattagtggagcaaaatgtaaaacgttttggtttagtaaatcyataaggcttgatttattcataagcgcatgcaatgcttgcaaggggcagctgccaaataattattgtttatggtgagaatgtatggaaatcatttaatcca

SEQ ID NO: 28139 - DNA, 201 bp, Homo sapiens
aaaaaagagaaatcttctctcaagtttttagaagttctagcaagcagtattctttgtgcaggatccaaaaagagacacacacacacacacacacacacacrcacacacttacttgctttttttctctgttatcactgttgatcatcactgtttctcagcaggcagacttttttctagtttctttcattacggtaaaaggaa

SEQ ID NO: 28140 - DNA, 201 bp, Homo sapiens
gctctagcacgtgctgcctgtgcttgaggaattctcagtaaagattcactgagtaatcgagtgatttactgaagaaggtaaaagtgcggcttacatggtcrtctgaaatagcaaggaaaagaacagtcattgttacgaaaggaggaagcacgtgcgctctccttcacctttcctccttgagctgccagtagtgctgtgtgc

SEQ ID NO: 28141 - DNA, 201 bp, Homo sapiens
atgctgagaacctccttcctttccgcatcctcctcctgctccagctgtcagcatagctccctcttccacctgcaccaaggttgacactgtctgtgctcatrggccaggtcacaccctatctgcaccacgtggctgcctgcgccttcagtgttcatcacggttgcagttgtactattcttttcttttcttttttaagatcta

SEQ ID NO: 28142 - DNA, 201 bp, Homo sapiens
tgattccttaaggttgaaatcagcattcagagcaacttccagccaggaatgaaattggaagtggctaataagaacaacccggacacgtactgggtggccacgatcattaccacgtgcgggcagctgctgcttctgcgctactgcggttacggggaggaccgcagggccgacttctggtgtgacgtagtcatcgcggatttg

SEQ ID NO: 28143 - DNA, 201 bp, Homo sapiens
gttgcctgtcctgtttgagcccttagctctgcatccatatgttaatatccctgtatcctaatagtctgtttacttgtctgccaccctccagattcatgggrtgtccagagagggaacctttcctttgttcactgtgacattccccagaggccagccaagtgcctgccacttagtagatgctcaataaatattggcaagtaa

SEQ ID NO: 28144 - DNA, 201 bp, Homo sapiens
aacctctgggctctagcagtcctcctgcctcggcctcccaaagagctgagatgacaaggatgaacctccacactcaaacttttcatcttcttacaaggccrccactcctatgggattaggtccccacccttataacctcgtttaatttaattacctcattgaaagccccatcttcaattacagtcctatcgggggttatgg

SEQ ID NO: 28145 - DNA, 201 bp, Homo sapiens
acaaatgaactatcagatgaaagaatcgtttcccttctttctctctcctctctctgttcatgtctgtgtgtgtgtatagccttcaaaagtttctcatcttscttcctacagcctattactatggaaagagaaagaagatctccaagccccccatcggggaaagcaaccccgacagcggacaccccaaacccgccaggcgga

SEQ ID NO: 28146 - DNA, 201 bp, Homo sapiens
agtttttaaattttttgtagagatgggggtctcgctatgctgctcagtctggtcttaaacctctgggctctagcagtcctcctgcctcggcctcccaaagwgctgagatgacaaggatgaacctccacactcaaacttttcatcttcttacaaggccgccactcctatgggattaggtccccacccttataacctcgttta

SEQ ID NO: 28147 - DNA, 201 bp, Homo sapiens
tttacattggcaactgagtgaatgttgaatgctagaactgtggatagttttatttctttataaacatgcttaatgagattcagtgctgaaaaaatagatamaatatttaattttattttaatattttaaattaaaatgtttgatattcactaattttaatttgcatttccctattaattttagtagacactttagaaagag

SEQ ID NO: 28148 - DNA, 201 bp, Homo sapiens
ctcgacccatcagagaaactgaagaaaaacaaacacccaggggctgggatatgaaagaccctgaataaatatgaagtaaatttagtagagtatgcagatawaaagtacaagttggaatttaatccttaattttttttgccgttgatactttaaaaaaaaaagatttattagtggaaaagtatttttccagtctttagaaag

SEQ ID NO: 28149 - DNA, 201 bp, Homo sapiens
tggggcaacaagccccccagtgaaggggtccaggcagcacgccatccgccagcttccccagcccgtgccctatccttactcagtcccctctacccctcacygccatggcttctaaacagaattgttcaggaagggcagggaagagaaaaggagcccgctgtttttaaatgatgctataacttaaatcttcatacctttaga

SEQ ID NO: 28150 - DNA, 201 bp, Homo sapiens
caaaaaaaaaggaaagaaagaacaggtcatccccctacccagccatccccaggtctgtcacgtggagctcaaacccctgtccactgtgcctgggaagatcrtgtaaggatcaagtgatcaaatgctgtaagatccttgagaatatgtcagtagcttcattacataaatgcagatttactgttaattcccagccagttggta

SEQ ID NO: 28151 - DNA, 201 bp, Homo sapiens
actcagcagttctgtctgttggcttatttggaaattcgctggtgttgaattcttcaattatcataaaaacttgttattccttaggagtgtcaagtgacttsttttgccttttagatcatatttcagtgcttccatccagtatccagagcccagtctccatgcataaatccactgtgccaccttcccagaatcttttttttt

SEQ ID NO: 28152 - DNA, 201 bp, Homo sapiens
aaggtcaggttgagggcctgcgatgtagaaagggcttagggttatgggtaaaccctgcttagaaagctgactctactcagagagcaaaggttggagcaagmgttttgtggaacagagagaagcacagaatctggaatggagggaatgaagagggcgggtagaccagaagccccgtggctgtcaggatgcccctagagcaga

SEQ ID NO: 28153 - DNA, 201 bp, Homo sapiens
accctttgtaatattccaggtaccctctgaacattctcagtggacgcttgggtatttggttggatggacacacttgcttatcaacaagtagtttgtttacrgagtgcctcagtgctcgctccctgcatgccaggggcaatccaggtgaactgggggtcctgctacccactgtaagctccaggtgtagcgcagaagacctta

SEQ ID NO: 28154 - DNA, 201 bp, Homo sapiens
tttttacactttagatgaaatgggtatttggatgggatgagtcccattatgctgcggttgctcacgttggggggatgtgttcacacgtctgtgtggttgtyggtgtctgtgcatgcaatgtgattgagctcctgggtaggtgttcctttctgtcttgaatacaaactggaacagtatgagaacaagctcatgattattatt

SEQ ID NO: 28155 - DNA, 201 bp, Homo sapiens
gagggagtgctcagtgatgaataactcagagggtgggtcagtcgtttggggattctgtatccaactcagtacgggaaagggagctgggagcaaaggctttygtcagaagaacaaatagattgctttgggaaagacaaattggatttgaggaaagcaagtgagaagtaagaaagtttgtgctaatgtttgtttatgcaggtc

SEQ ID NO: 28156 - DNA, 201 bp, Homo sapiens
atctcagagaaggaaggaagggagggaggaagagagggaggcaggggagggagggaaggagggagggagggaaggagggagggagggagatctcagcattwaaaaagaaatcaaaacataaaattaaaatctcagcattaaaaaaacaaaacaaaaacaaatcatgttccacgaaatcctgttgctcacaaacctgaaatg

SEQ ID NO: 28157 - DNA, 201 bp, Homo sapiens
agtttgagaccagcctgagcaacatggcaaaaccccatctctacaaaaaatacaaaaaattagccaggtatggtggtgcacacctgtcgtcccagctaccygggaggctgaggtggaagtattgctggagcctgggaggcggaggttgcagcaagccttgattgcatcattgcacttcagcccgggtggcagagaccctac

SEQ ID NO: 28158 - DNA, 201 bp, Homo sapiens
cactttgggaagctgaagcagcaaatcgcttgagtccaggaattcaagaccagcctggacaacatagtaagaccctgtctctacaacaaataaaatatttwtatatatatatatatgtgtgtgtgtgtgtgtgtgtgtgtgtgtgtatgtgtatatatagtatgtatgtatgtgtatatgtatgtatatatatgtcatata

SEQ ID NO: 28159 - DNA, 201 bp, Homo sapiens
gcagtggctcgatctctgctcactgcaacctccacctcccgggttcaagcgattcttctgcctcagcctcctgagtagctaggactacaggtgtgcaccamcatgcccagctaatttttgtatttttttttctttagtagagatggggtttcaccatgttggccaggttggtctcgatctcttgacctcatgatccgcctg

SEQ ID NO: 28160 - DNA, 201 bp, Homo sapiens
cctatgctagaagaaactgataggaaattgtggcatgaatgacgtaacttttcagcatttaaattgctactttaaaatgggtacctctttgctttataacstatttttaaaaatggacttgccccactaacaaagctgattttctttttccgttttgccttttctacagcacaaaagaagagaaagattgcagtcgtgcaa

SEQ ID NO: 28161 - DNA, 201 bp, Homo sapiens
atgggaccagtagacactggagactactagaggggaggggggaaatgagtcatgggtcgaaaagttacctattgggtactatgttcactacctgagtatartatgcccatgtaacaaacctgtgtatgtacccctgtatctaaaataaaacctaaaaataaataaattaaaggctttgtttgcaacataaacaatgcacat

SEQ ID NO: 28162 - DNA, 201 bp, Homo sapiens
ctggattctatgggattctccttttcctaaaccatcctgcccaatggatctgattcagttggagtaatcgtttccccttacttaaaaatatttctaaaacrttgagtgtacaataattattttaatcccagggacattcttttcccctgtctcttaaaatgatgcagattctggccaggcgtggtggctcacgtctataat

SEQ ID NO: 28163 - DNA, 201 bp, Homo sapiens
agaaagtatttttactgatttctaaactgtgttttcctttttattttgctttttcttaccctttgtagcaaagataaaataagtcatgccgtttcgtatayacccctcctcttattgaccatgttttgtataacacatggattggggtatgtgcatctgtcttttagaacctaggtaggcacctctccaggttcaagactc

SEQ ID NO: 28164 - DNA, 201 bp, Homo sapiens
ctctctcccctccccacaccccccccatactcgtctaatcccatttctgtcatttccttcagcctgtttcctatgataccttgatcctggccaccagtttygcccaccgtttttggttttgtttttggttttgttttcccaggccttcggctccagagctgacccagggaggctttgcgcgctgggcttcttgataggcat

SEQ ID NO: 28165 - DNA, 201 bp, Homo sapiens
ttttaatcccagggacattcttttcccctgtctcttaaaatgatgcagattctggccaggcgtggtggctcacgtctataatctcagcactttgggaggcygaggcgggtggatcacctgaggtcatgagctcgagaccagcccggccagcatggcacaaccccatctctactaaaaatacaaaaaattaaccaggcatgg

SEQ ID NO: 28166 - DNA, 201 bp, Homo sapiens
tagaggaaaggatactggcattagaagccttgggttctgtttctgtttctgccatctcttagctgtgcagtcttgggcaagtcagttaactgctctgggcrttagttctgagtcctgtgggttatggactggatagagcacaaaacagtgcttcagaccatttaggaacatgagccctgatggatttgatgaaacttacta

SEQ ID NO: 28167 - DNA, 201 bp, Homo sapiens
taaaaaaaaaatttgtcctcacaccttagagacaagtgagctagagtggatacgagtttttcagtgtggctttctgtgtagtaaggattttcctggtaagyaaaagttagaatgttggagattttactcaattagtttaaacccaataaacagcaagtcagtttcacaggcactatgaaaagtgatcaacaaataagtaga

SEQ ID NO: 28168 - DNA, 201 bp, Homo sapiens
ggatatattgagattgcttattgaaaataattcgtattctttgcttgggaatacaagtggaggcaaccagtatcttcagtgtcttgagtttctttctttctttttttttttttttgagatggagtcttgctctgtcacccaggctggagtgcagtggggagatctcggctcactgcaacctccacctcactgcaacctctg

SEQ ID NO: 28169 - DNA, 201 bp, Homo sapiens
aattacttctttcagaaagcacaaatataataaattttttacagagtgaagaatcactttgcaatagttctgagcagtttctattctggaagaaattagtrcagaatttccaacagttgtatacattgactggggcttcattatttatttatttatttatttttgagacagagttgcaccttgtcgcccaggctggagagc

SEQ ID NO: 28170 - DNA, 201 bp, Homo sapiens
taatgaatgaaaagataggaagtcccagagaagaagtagaaactataaaaaagagaaattctagaactcaaaaatacaatatttgaaatcaacaaatttaytggattagcttaatcggaacgagagaggaaagagtccatgaccttgaaaatagaaattattttgtctgaaaaacagaagatgggcagggaaatgaaggac

SEQ ID NO: 28171 - DNA, 201 bp, Homo sapiens
tgcctgctgctcagcagggccaccatgatttatctgaattctgtgtcaatttccataactgcatatcactctacaggtacccactgggattacttacaagrgattttgctaatgaggatgtacttccgggtacagggttctgtggcatgcatttaaaaaggcagtagctggctgggcgccgtggctcacacctgtaatgta

SEQ ID NO: 28172 - DNA, 201 bp, Homo sapiens
gaagtgggtaggaagaagaggcagagacatttcacccactttttaggctcactgcctgctgctcagcagggccaccatgatttatctgaattctgtgtcartttccataactgcatatcactctacaggtacccactgggattacttacaagggattttgctaatgaggatgtacttccgggtacagggttctgtggcatg

SEQ ID NO: 28173 - DNA, 201 bp, Homo sapiens
aagagctgcagtttgagtctgaagcagggggagccagtgttgcagatgaagtccgaaggctgcctgctggagaatcccctcgggctttggggaggtcagcytttcaatctatttgggccttcgactgatttgatgaggcccacccacaagcaagaggatgatctgctggtcagtgtgtacttatttaaatgttagtcgcat

SEQ ID NO: 28174 - DNA, 201 bp, Homo sapiens
agtaatgtgtgaccagatgtcttgtctgggcaccgtggcccagccaagttgatgcataaaattaaccctgccaggcgtggattcagagctagagctgaatygcccacttgctctcccctggcgtcatcttaatgccttctggagaggcagaacattttgtgtacacttggaatcactgtgctactttgccctaacagacaa

SEQ ID NO: 28175 - DNA, 201 bp, Homo sapiens
aagcagggggagccagtgttgcagatgaagtccgaaggctgcctgctggagaatcccctcgggctttggggaggtcagcctttcaatctatttgggccttygactgatttgatgaggcccacccacaagcaagaggatgatctgctggtcagtgtgtacttatttaaatgttagtcgcatccaacaacaccttcacagaac

SEQ ID NO: 28176 - DNA, 201 bp, Homo sapiens
aaattaaccctgccaggcgtggattcagagctagagctgaatcgcccacttgctctcccctggcgtcatcttaatgccttctggagaggcagaacattttrtgtacacttggaatcactgtgctactttgccctaacagacaatgttcagttgatatttctgaatatagatgcccttaacagaaagctctggtaggaattc

SEQ ID NO: 28177 - DNA, 201 bp, Homo sapiens
tatgtgccacattttcttaatccagtctatcattgttggacatttgggttgttcttttcacacatcctccctacaaagttatgtcattggtatgctgtttktaagtctttcttggaaggtaaaaatacaaaacacactcttcttttcacttttggtaaaataaagagtagaatgaggctgagtgcgttggcctgtgcctgt

SEQ ID NO: 28178 - DNA, 201 bp, Homo sapiens
tcagctgtctcttaatattttcctcttactttgtcttcttgggacttgaaatattgcttcaaaaacttagtgtttatgagagccttgccgggccgtgtatkaaataacatcggcgtctcaccctttggtctcacagtgtcagtagaaagtgaaaagcattatctcatgctttttggtggttctttttttttaacttttttt

SEQ ID NO: 28179 - DNA, 201 bp, Homo sapiens
tttaggacttcagaggtttgagagctaatggaaaatgaggaccccatgtaataaggggagcccagtggtgtggccatgccaccgggccttgcccttcagcrctgtcacccctgcccccagggagggcacactgaggaggctggcctactttgctgggtgtcaataaaaggtgtggggactgttcattcctgagctttctct

SEQ ID NO: 28180 - DNA, 201 bp, Homo sapiens
tcccctgagaagtcaaaggctgctacctgacatctggttgagaaggctcggttctcttgtgagctgggaggagtttcagtggattaagcactcttatttayctctttttcctccagagaccccattaaaatggtagggaaaaataaaaagtacatatatcaacaacacaaagaacttaaaggccaccagcatggaaaaggg

SEQ ID NO: 28181 - DNA, 201 bp, Homo sapiens
gactctggggaatcaatcccacacccttcaggacgggcagaggcacttccacattggatgcctctggggagagtctctttacgttttgtctgttttgaacrtattctttcttgtttgattcctttagcaattaggctaaatgttggtcaagtcttacaatattagacagaaacaatgtctatttatttaaccttgttcaaa

SEQ ID NO: 28182 - DNA, 201 bp, Homo sapiens
ttccttttgaagtactacttttaatgaccttgaaaatgttatttgtagctaaatgtaaatctggaaagataaatatatttagtagaggaatctaacctgtyagcaaaatgtttgagtagctaagaaacaaatgctctttgggtctgcggaggagaaaatgaccttgtgtaccaggaacctgcccggggacctgctttattg

SEQ ID NO: 28183 - DNA, 201 bp, Homo sapiens
ggaaaagaatttgaaatgatgaagtgagtaaaggtcccgaagaggaggaggaggaggggacagaggagtctaagctgttggaatgtcagggaaatgagcahgttctagggacggaataattaactgttgcttacaacatagccagcaagacttgattttatctagaaattatcagattagaaatggctctccatagacaga

SEQ ID NO: 28184 - DNA, 201 bp, Homo sapiens
atcggaacgagagaggaaagagtccatgaccttgaaaatagaaattattttgtctgaaaaacagaagatgggcagggaaatgaaggacaaatggaatctcrggatctgagggacaattattatgtagaattgaagacccaaaagaggtggctgaataagaattaaaaaagacatttcatcaaagaagatgtatggatcaca

SEQ ID NO: 28185 - DNA, 201 bp, Homo sapiens
tgccacagcagcctgagcagattaatatacttacgtttacatgaaaagttgtaccagaatgtttaatgtttatggcagctttaatcacaatcactgaaaaygactcaaatgtcctttaactggtaagtggatagataagctctggtgcatctgtacaaactactcagcaagaaagcagcacaaacttccatttcatgtaat

SEQ ID NO: 28186 - DNA, 201 bp, Homo sapiens
ccatttacatgacttacagaataaaatggggattctgatcctaaagtttaagaactatagttatacaggaaaattttctcataatgagaatataaagaaakataaaggaaattataagaacagaaaacagattggtggttgccaggaactgagtgctttggagggactaattaccaaaggtccccaatgcaagggtatttt

SEQ ID NO: 28187 - DNA, 201 bp, Homo sapiens
ttcagccatctgtgcccagcgtggcctcgtctttctctgtggctttggacggtcacgctgtgcacacggatctgagtgcccatgcccatggcatcacacayggatctgagtgcccgcaccatggcctcgcacacggatctgagtgcccgcgcccatggcctcgcacacggatctgagtgcccgcgcccatggcctcgcaca

SEQ ID NO: 28188 - DNA, 201 bp, Homo sapiens
tctccagaaggctctgcagcaggaaccatagcaaagttcaggttttccagctgccattgtggtgcatgtgacttcccggtgagcacattctcactgaaggkgtcccaagcctgccttcatctgcctgcaggtctggggttgacctggcttttcctgtagcagcaggcaacagctactacatggtgggaattctgcaagaac

SEQ ID NO: 28189 - DNA, 201 bp, Homo sapiens
ttctgagctctcaagattgcccctgtgagtatacatccatcatcgttcttgggaggattgtgaggcaatacctgtaaaccactgtttcattctgtttcgtrttcctataacagaatacccgagtctgcataatttataaagaaaaggtttattcaactcctgattctggtggctgcgaagtctatgacgggcagctgcatc

SEQ ID NO: 28190 - DNA, 201 bp, Homo sapiens
gaatttaggcttgtttgttcagtgatgttgaaactatcctttatagctatagcgtatttacaggtgcaagaaaattcacagaatgctgtattttgtgaacrgaatcctgatcatactttatatttaagtagaaaaccatattttctaggtggtgggttttcagtgataaatatttacaatggatttgatctccaagacttt

SEQ ID NO: 28191 - DNA, 201 bp, Homo sapiens
tcagatgtagaggttagaatcccccagtcctgctcttcagccatctgtgcccagcgtggcctcgtctttctctgtggctttggacggtcacgctgtgcacrcggatctgagtgcccatgcccatggcatcacacacggatctgagtgcccgcaccatggcctcgcacacggatctgagtgcccgcgcccatggcctcgcac

SEQ ID NO: 28192 - DNA, 201 bp, Homo sapiens
tctcggggaagaggcgtttaatcccgccacaggtgtttgtttggaaggctgctgctctgttaggttttgggggccagcagcaggactggctctggctgtcrtaagtccattgggaatgatttgggaagactgttgaccagaggccggggaatcgcctctccagaaggctctgcagcaggaaccatagcaaagttcaggttt

SEQ ID NO: 28193 - DNA, 201 bp, Homo sapiens
tttcataatactcagtagttatttcaagtatatatgcaaaaatgaatagatatgaatagtaaaataaagttagctctcctagttcatagtttaaatcttaygacttactcaataccatgattggaataaagagtttagaaggaaaatcatagaattggtgctcagatctccatttttatttcctcactatgcatctataaa

SEQ ID NO: 28194 - DNA, 201 bp, Homo sapiens
gctttggacagtaagtttttggagttcaggaattgcctccttgtaccacgaacttcacattccacactgacaagcacagcacttacgtgcaaggcaggtcygctacgtgtgtagtttctgatttctgcaagtgtgtttgaggagcagtatggggatcccataagtccgtagaatttcctcataggtatttaaacacaagaa

SEQ ID NO: 28195 - DNA, 201 bp, Homo sapiens
gaaaggagcacttgtgtctgcaagcctcctgatttggttcttggtgctggacactgtcccacagggctctgttcctctccgtgcacctgacaaagcaccaygtttttacaggcggtcctgtgaactttgcttgctcagcgtttgctgagtagatctgaggaagaaataaaatgtgtattcctaaatgaaatagcgatttaa

SEQ ID NO: 28196 - DNA, 201 bp, Homo sapiens
ctgcccgagcttcacctcctgtcagatcagcagcggcattagattctcataggagtgtgacccctattgtgaactgcatgtgccagggatctaggttgcayggtccttatgagaatctaatgcctgatgatctgtcactgtctcccatcacccccagatgggactgtctagttgcaggaaaacaagcccaggattcccact

SEQ ID NO: 28197 - DNA, 201 bp, Homo sapiens
agtagctgagattacacgcacgcaccaccacacccagctaattttttgtatatttagtagagaaagggtttcactatgttgcacaggctggtctcgaactsctgacctcaggtgatccgcctacctcggcctcccaaagtgctgggattataggcatgagccactgtgcctggcctattatgtataattttaaatgtagga

SEQ ID NO: 28198 - DNA, 201 bp, Homo sapiens
ggaggttgtagtgagctgagatcgcgccactgcactccagcctggatgacagagcaagactccatctcaaaaaaaaaaaaaaaaaaaaaaaattacaggtrgacaaaaagtagtgatagtctccagaagaaggcattcttatttggccccatgtcccctggcctatctgataggatcggatatcagttctctaccagccac

SEQ ID NO: 28199 - DNA, 201 bp, Homo sapiens
agagagaatgaagaggaaattctcaggagccagagagggactctgtgatggacctggttccttgagaatgtgctcaagtcttaggcactgagctgctcctrgtggctgggatgaacagacaatcccatgggggtctataccgcctagcgagtttgtctactgtgttcgatgcacggggagccatccctagtagaccctcaa

SEQ ID NO: 28200 - DNA, 201 bp, Homo sapiens
agagacattgatcacaatttttccttcctttctgtactgagaagttatcaatttctctctgtatggagtcactcctattttctttgattcagtcaatcctyccacctcccttttaatcacaatatagtgtcctgggggccagagctggaggctgtccttcaggctgcagaagtccccaggtccgtatgccaggtttaaagg

SEQ ID NO: 28201 - DNA, 201 bp, Homo sapiens
caggttgcatgccccagacctcgtgattgggactggccagaacagacaagaccccatcagcaggatggacaagaccccatcagcgggatggaccccatggaaaaaaaaaaaatctaggaactaagacacgattgggcaggaggctgggaaacttactaggaaggatcaaggttgactttgccaccatgacctagccacgaa

SEQ ID NO: 28202 - DNA, 201 bp, Homo sapiens
cacatatatactggagttctctttagtactaaccaattcgctggtatttgggttgtttcacttggagaccttggagccttcacaatgaacacatggtaactttttttttttttttttaatgaggcagtgagctgcggaccaagtagatttaagaaggaaaaaggaattaatgaaggtcttcaacttctcaactcttcattg

SEQ ID NO: 28203 - DNA, 201 bp, Homo sapiens
gatatgaatagtaaaataaagttagctctcctagttcatagtttaaatcttacgacttactcaataccatgattggaataaagagtttagaaggaaaatcrtagaattggtgctcagatctccatttttatttcctcactatgcatctataaaatgtctgcaaaggtcttaaataagcctacaatctcatacatatgtagt

SEQ ID NO: 28204 - DNA, 201 bp, Homo sapiens
agaggaggaagaacaggtttggaaggagacagatttgaatagcaacagttgcattttaagatacggatggggattccaggtgaggaggcatagggagtggygggaattttgacactgaggccctcatcagaggctacaggatatgtggggacggtgaccacaaactttgcttaaacgaggagacttttagaagcaaacggg

SEQ ID NO: 28205 - DNA, 201 bp, Homo sapiens
attcgctggtatttgggttgtttcacttggagaccttggagccttcacaatgaacacatggtaactttttttttttttttttaatgaggcagtgagctgcrgaccaagtagatttaagaaggaaaaaggaattaatgaaggtcttcaacttctcaactcttcattggcacactcaactaaaaactggagctcaaataacta

SEQ ID NO: 28206 - DNA, 201 bp, Homo sapiens
tgacctcagtgattttctaagtaaatttccagcttctcagggtcagcaatcacatcaactactttcctgtgcgtccatcataggatggtgcctgtcacatrgtgtttaaaataccagtcccaggctggggttggtgtggactttgcagccagccacgtgtactagattaaccacgttggtcagagtaacctgtcttggtta

SEQ ID NO: 28207 - DNA, 201 bp, Homo sapiens
aattcacgaaagtgtagacacaggcaacgtggcaacatttctgtagcttacaggaatagaacatggctttattttcacagctccacctagagttgggtgarctgctcttggagaagcaagattccttctgtattttgtaatgactaaatttaacttgctatctaacactatgctgagccatcttaacaagattggactctt

SEQ ID NO: 28208 - DNA, 201 bp, Homo sapiens
agaaggttcgcctgcttgcattgtcttccttagcatctttttttggagtcttgtttctcagaatcatttttcctggacacctggctaaatatatacatgcrcgccacttacatgcacttcaaatgagacctggtagatttctagctcacgtttagcagttaatgcaagagattgacaagaacttttgggtggtttcattga

SEQ ID NO: 28209 - DNA, 201 bp, Homo sapiens
taatacaagttactttcagtcttaggtctctagcattatggccgcacacactggctcccacactcacagctctgcctttccacaaaccaagtgactttctrttcatttccagtcctttttttatgggacaaatacattggtccagcagttcggtatgctctcctagctctttagcccagaagaaggttcgcctgcttgcat

SEQ ID NO: 28210 - DNA, 201 bp, Homo sapiens
aagaaggttcgcctgcttgcattgtcttccttagcatctttttttggagtcttgtttctcagaatcatttttcctggacacctggctaaatatatacatgyacgccacttacatgcacttcaaatgagacctggtagatttctagctcacgtttagcagttaatgcaagagattgacaagaacttttgggtggtttcattg

SEQ ID NO: 28211 - DNA, 201 bp, Homo sapiens
cttattccccagagtgttttcattgggtagtgatgaaaattagttagtgttaggaaacagatcagaaaatatacattgaccatttttccagacctgattcrttgttctaaaaagtgtttgtaaacagtctgttgagtcttatctgttgaatagtatattacctgtaattattgctcaaaatcatgcatctttttcattact

SEQ ID NO: 28212 - DNA, 201 bp, Homo sapiens
caggcagtgccaggtgtgaacgcaggctcctggtggccctgtggccttgagcacgttgcttaagccctggtttccccatttctaaaatggcaatcatggtrttacttatagcaggggcttggtttgcattaaagcagttagcagagtttccaggaagaattttccgagagagaatgaagaggaaattctcaggagccagag

SEQ ID NO: 28213 - DNA, 201 bp, Homo sapiens
gctattaagatctgcctggggttcaattccattgctcttgacattttctctgttgcttaattccccagaccctacggcttcccacgtcttaaaaaagagtratgaacaacatttagtgtatatttaacattttgggcagtattttcttctttgtcctgttctctttgaatacagatttttgattttctagcaaagaaatag

SEQ ID NO: 28214 - DNA, 201 bp, Homo sapiens
gcttggtttgcattaaagcagttagcagagtttccaggaagaattttccgagagagaatgaagaggaaattctcaggagccagagagggactctgtgatgracctggttccttgagaatgtgctcaagtcttaggcactgagctgctcctggtggctgggatgaacagacaatcccatgggggtctataccgcctagcgag

SEQ ID NO: 28215 - DNA, 201 bp, Homo sapiens
acctatgcattcagctttcatcagtcagagacagcgcaataagcagactgctcaaatgctcaactgaccttaatgaaaaaatttcaggatagtttataggyttagtccagattaagctgtcctttctctacttctctagatctcaatacctccattaggaactaccagatcctcacccgagtgctctatcaaaatcgattt

SEQ ID NO: 28216 - DNA, 201 bp, Homo sapiens
aggttttcaagtagaatggcctctttctggaattcacgaaagtgtagacacaggcaacgtggcaacatttctgtagcttacaggaatagaacatggctttrttttcacagctccacctagagttgggtgaactgctcttggagaagcaagattccttctgtattttgtaatgactaaatttaacttgctatctaacactat

SEQ ID NO: 28217 - DNA, 201 bp, Homo sapiens
tactccataatctcatgctgcaaacctgtacattacacagtaaaaatccactcatctataactaagcacatacaacactctaaataaaattttacctatgyattcagctttcatcagtcagagacagcgcaataagcagactgctcaaatgctcaactgaccttaatgaaaaaatttcaggatagtttataggcttagtcc

SEQ ID NO: 28218 - DNA, 201 bp, Homo sapiens
cttggtgagtacgaccttcagttcaaagtcttgggaacttagatggttcccaaggattattcagaggttaatttggaattgttttagtcagggttttccakagaaatagacctgatagggtcagtacatacatagcaagaaattttatgtttaggaacatgtgattgtggatgaccagtgagcccaaaatctgatggggaa

SEQ ID NO: 28219 - DNA, 201 bp, Homo sapiens
gcctccattcattccggggccatgctgatgtcccagggccatgctgggttccactgggtttcactccagggctgtgccaacattccagagccataccaacrgtcgtgcctccaactcgagtccttaggttctgccggtcattagggagagtctgcctttttgagcctggctctcagggaatggttggtttgtgcaaagctt

SEQ ID NO: 28220 - DNA, 201 bp, Homo sapiens
ccttagagcagtgctaagaatgaaggtggtaatgagaaatgcagtttttatccatcctcattcttctggttaaggatggtattttattcaccttttgattycttataatgccttgcacatagttaaagctcagcagttgttaaatgaataaggaacaaagcccccatgaaaaaacaacaacacacaaaactaattagtact

SEQ ID NO: 28221 - DNA, 201 bp, Homo sapiens
ctccattccagggccaccatgcctccattccagggccatgcagatgttctagggccatgctgatgtctcagggccatgcagatgttcaagagccatgcctycattccagagccaccatgcctccattccagggccaagtagatgttctagcgccatgctgatgtcccagggccatgctgatgttctagagccgtgcctcca

SEQ ID NO: 28222 - DNA, 201 bp, Homo sapiens
actccagaagcaagtagcagttggggtcaccaagtaatgctgttctatagattataccggtgagctgcgtctgcatttgatgcctcctaagatagtgtgayatagttggattgtaagaagttgggtcatggtttttgtttggattttaaaaattgtcaaatagacataacatacaatttgcaatgtggaccagttttaact

SEQ ID NO: 28223 - DNA, 201 bp, Homo sapiens
ggtatgcagatgttctagggccatgcctccattgcagggccaccatgcctccattccagggccaccatgcctccattccagggccatgcagatgttctagrgccatgctgatgtctcagggccatgcagatgttcaagagccatgccttcattccagagccaccatgcctccattccagggccaagtagatgttctagcgc

SEQ ID NO: 28224 - DNA, 201 bp, Homo sapiens
aggggtatgcagatgttctagggccatgcctccattgcagggccaccatgcctccattccagggccaccatgcctccattccagggccatgcagatgttcwagggccatgctgatgtctcagggccatgcagatgttcaagagccatgccttcattccagagccaccatgcctccattccagggccaagtagatgttctag

SEQ ID NO: 28225 - DNA, 201 bp, Homo sapiens
ggtcagagacttgtttgctgagcatgtcttcctggagcttgcgggttcgttgctgccacactgtcattgcactctagacataacaatatgaaaaacgaagygagaaaggggtggctgcataggcagaagttcaaaagtgagtgcaagtcaaaatcggagtttggaggattcagtaggttgatgactgggtcagctggtact

SEQ ID NO: 28226 - DNA, 201 bp, Homo sapiens
gctcttgtcacccagactggagtgtggtggtgtgatcacggctcactgcagcctcagactcctcaaataatccttccacctcagcctcctgagtagctggracttcaggcacgtgccaccacacctggctaatttcttttgtatttttagtagagatgcgggtcccactatgttgcccagggtggtctcaaactcctgggc

SEQ ID NO: 28227 - DNA, 201 bp, Homo sapiens
ctgagtgcccgcgcccatggcctcgcacacggatctgagtgcccgcacccatggcctcacactcacaactccctttccatcccctgcaaaacatctccacrtggcagcagcatttccagaacagaactcaccagcagaaccgtcagaacccgtctctgctcttctccgtgaacgtcctggctgacgaatgatgccgttatt

SEQ ID NO: 28228 - DNA, 201 bp, Homo sapiens
gaagtttagggttccaaaatcaatgtgaaataaatggaaattcccaaaaagttgattgcttagtaggttttcaagtagaatggcctctttctggaattcamgaaagtgtagacacaggcaacgtggcaacatttctgtagcttacaggaatagaacatggctttattttcacagctccacctagagttgggtgaactgctc

SEQ ID NO: 28229 - DNA, 201 bp, Homo sapiens
ctcacactcacaactccctttccatcccctgcaaaacatctccacgtggcagcagcatttccagaacagaactcaccagcagaaccgtcagaacccgtctstgctcttctccgtgaacgtcctggctgacgaatgatgccgttattcacccaagtcggaagccacggcatcctcaaagttagaaactctacaataattcct

SEQ ID NO: 28230 - DNA, 201 bp, Homo sapiens
ttttttattttactttaagttctgggatacgtgtgcagaacgtgcaggtttgttacataggtatacatgtgccatggtggtttgctgcacccatcaacccrtcatctaggtttgaagccccgcatgtattaggtatttgtcctaatgctctccctccccttacccccaccccttgacaggccccagtgtgtgatgctcccc

SEQ ID NO: 28231 - DNA, 201 bp, Homo sapiens
tctctcatggctccatatttcagggcatacctccattctagggccatgcagatgttctagggacatgctgatgtcccaggggtatgcagatgttctagggmcatgcctccattgcagggccaccatgcctccattccagggccaccatgcctccattccagggccatgcagatgttctagggccatgctgatgtctcaggg

SEQ ID NO: 28232 - DNA, 201 bp, Homo sapiens
attttttattaagattgtatatgtatttttcgtagccacccaggatagaagaggagtttttattcctgcatgtctcttttgttagagagagaatttttttytgtaaacccttctcctacccatcttaagcctcctgaaaagggcatatggctaccatgagcatctcaagatggtcctgattcacttcctccaggaactgga

SEQ ID NO: 28233 - DNA, 201 bp, Homo sapiens
gagatcatgccactgcacttcagcctgggtaacagagtgagactccatcacaaaaaaaaaaacaacaacaacaaaaaataggatatattgagattgcttawtgaaaataattcgtattctttgcttgggaatacaagtggaggcaaccagtatcttcagtgtcttgagtttctttctttctttttttttttttttgagatg

SEQ ID NO: 28234 - DNA, 201 bp, Homo sapiens
agtctcttataggatggtggcaagtggatgaacatcgatagagtgtaagagtcatgttagcacgtagtagtcattgcttagtaaatggaggttgctgatartattattaggcagcacttttcttttaagatttgccacctgcgggagcctgtgctccagctgaaaggagcacttgtgtctgcaagcctcctgatttggttc

SEQ ID NO: 28235 - DNA, 201 bp, Homo sapiens
catcactttcaaaattagagtcatttgatccaagttggagtcagacacagtatttgagctgcacggcttctgggttctcccaccttatttgatcatattcraaagattatttcctgtgtttgctttgatttgttcctcagtacattaaaatgatccacaccttgaacactgccctctctagaaggttgattttgatcagcc

SEQ ID NO: 28236 - DNA, 201 bp, Homo sapiens
aaatatctgagcatcatggccaggcacattgacacacacaatggaccctcacaggggatcgtgacgttttactcttgtgctgccggattggctggcttgcttgcttgcttttctttctttctttctttctttctttctttctttctttctttctttctttctttctttctttctttctttctttctctttctttctttctc

SEQ ID NO: 28237 - DNA, 201 bp, Homo sapiens
aagcaattctcctgcctcagcctcctgagtagctgggattacaggcatgcaccaccactcccgcctaatttttgtatttgtagtagagacaaggttttacratgttggtcaggctgttctcaaactcctgacctcatgatctgcctctgcctcagcctcccaaagtgctgggattatgggtgtgagccaccgcacccagac

SEQ ID NO: 28238 - DNA, 201 bp, Homo sapiens
ttcagagaagcccgtctgagcccacctcatatgtttaggggaccaggtgcagaacacagccccttaagtttttccgtaactggcaaaaaaagtcaggtagytactatgcattttggagatacttgcaaaattgaaacaagggaacatgtaaacgtgaaaacaattacatttcaagccagggtgggtggttttaaaaccttt

SEQ ID NO: 28239 - DNA, 201 bp, Homo sapiens
tccctccccccactccacgacaggcccctgtgtgtgatgttccccatcctgtgtccaagcgttctcattgttcaattcccacctatgagtgagaacatgcrgtgtttggttttctgtattttttgtaagtgcttcgtaaaaacattctgggccagggaaatgaagagatttttagtttgcgacttgtagagtgaaaagaaa

SEQ ID NO: 28240 - DNA, 201 bp, Homo sapiens
taactcaggaaatagcagaggtccaggaagagatagtggaacagaaggagatcttgactttaacaaagtccgtcttccaaaaccccagacagatgggatcrttgtgttacagagatgtgtcttcacagatggagtcgtgagtcttcttagaggaatgccttgttaggtaactgctcgtcatccagccacgttacacttttc

SEQ ID NO: 28241 - DNA, 201 bp, Homo sapiens
cttgatcctggccaccagtttcgcccaccgtttttggttttgtttttggttttgttttcccaggccttcggctccagagctgacccagggaggctttgcgygctgggcttcttgataggcatctgcaaagggaacacgcccagagggcaggtggggcttccagcgtccaggtcttgcttgcgggcactcacaccggctttg

SEQ ID NO: 28242 - DNA, 201 bp, Homo sapiens
ttagaaatggctctccatagacagagtgtggaggactgggtgaatagatagaaggcctgaatgtacgtccaagaaaacacgaggcatgacattttagagartgggttgaagctcattagaagttagttatagaaagcccagcttaatgtctttgtgtagggaatagcggtgacttccaggtgggaaagttttatctgaaca

SEQ ID NO: 28243 - DNA, 201 bp, Homo sapiens
ctgggcttcttgataggcatctgcaaagggaacacgcccagagggcaggtggggcttccagcgtccaggtcttgcttgcgggcactcacaccggctttgcmttctgctggtgttttgcctgttcatctcacactcaagcctgtcagcatttgccatgccctttaactttcagtggggacatttattaggcaaggttaacac

SEQ ID NO: 28244 - DNA, 201 bp, Homo sapiens
acaaatagcaccctagtagaggtagcagtaaaacatagtgactgttatttgttatgtacctgttatgtgcaagacacagtgcctgctccccaaggcactcrcaatccagattcccatggctcactttttattccacttcgacatacctggggagtgtcccagacctacacactgagagaaatcgctgtctgtgtctatagt

SEQ ID NO: 28245 - DNA, 201 bp, Homo sapiens
ttttatctagaaattatcagattagaaatggctctccatagacagagtgtggaggactgggtgaatagatagaaggcctgaatgtacgtccaagaaaacaygaggcatgacattttagagagtgggttgaagctcattagaagttagttatagaaagcccagcttaatgtctttgtgtagggaatagcggtgacttccagg

SEQ ID NO: 28246 - DNA, 201 bp, Homo sapiens
ccataagcatctccctttttcatcctggggctctgggtagcataggtcactgtctcgattacagtcacctgtgtcatcggctgggtggagccgtggtgtgkttgcagtgagagcaccaggtagacctctgtgtcctgctgaaccggggacaagggggtagcaagctgcagaactctttaaggttccaaagggattctcaga

SEQ ID NO: 28247 - DNA, 201 bp, Homo sapiens
tgggtagcataggtcactgtctcgattacagtcacctgtgtcatcggctgggtggagccgtggtgtggttgcagtgagagcaccaggtagacctctgtgtyctgctgaaccggggacaagggggtagcaagctgcagaactctttaaggttccaaagggattctcagaaatctgttatgaatttagattgtgagtacggaa

SEQ ID NO: 28248 - DNA, 201 bp, Homo sapiens
ccttctgatagctaaagatacaaggtgtggcattctgtattactctaatgttttggttttatttttaggctcaaatgcttagttttcacaataaaaaaaartttagttaggcctgaatgaagagcagatttctcatttctagatcccaggttaggtatgagggcttataccttgaaacgtcaatagctcctgtgtctgtct

SEQ ID NO: 28249 - DNA, 201 bp, Homo sapiens
gggtggagagtgacttgccctcccagcaaggggcgataagcttgggaagcaattcccgcagcaacccacctgttccagctctttctacccaccagggtagrtatgtgagtttcagagtagccagagtgcccttagccaaaagctcttgtatttgtattgttgttttttgttgttgtttagagagtctcctgctgtgttgcc

SEQ ID NO: 28250 - DNA, 201 bp, Homo sapiens
gttggaatgtcagggaaatgagcatgttctagggacggaataattaactgttgcttacaacatagccagcaagacttgattttatctagaaattatcagaytagaaatggctctccatagacagagtgtggaggactgggtgaatagatagaaggcctgaatgtacgtccaagaaaacacgaggcatgacattttagagag

SEQ ID NO: 28251 - DNA, 201 bp, Homo sapiens
gcccagtggcatctctcaccccaagctcatgcatgctcgcgctctctcctgtgattcgctctgagtgaagtaattacataattttaggagtttgatagaaytgtgttcctaggaagacactcaggtgtcctcccaagccataagcatctccctttttcatcctggggctctgggtagcataggtcactgtctcgattacag

SEQ ID NO: 28252 - DNA, 201 bp, Homo sapiens
caatcatatacaggttaaggtgaacactgtgaagtttcctcctcctttaggattttggatctgtctgttgtgcttggctctttcccagggggtcaggcatccccaccccgctaacaaagaccaggggagacaagtattccaaactcatttttcacctgagagatcctaagtctggacctttttgtagtagtaactggaatt

SEQ ID NO: 28253 - DNA, 201 bp, Homo sapiens
cacagatctcatttgaggaccccaccctcataactccatctaactctaatcatctcccaaaggcatccctttggggttagggcttcaagtaagaattgtgrggagaaacatttagtccataacactttctctgacgtttactatcttttaacaacatagattcatctttcttcactggataggacctggaggagcagaagg

SEQ ID NO: 28254 - DNA, 201 bp, Homo sapiens
aaacttgggcttgaaaggagaaagatcagctgtcaattggaagagtaaggcattgcaaaaatgccccgaagtgctgctctgtgagttgtgaaactttctcrgaaaggactgagaacctgttcttagaacttaggttctgttgcatcaacatttatgcacatatctgggtcctggtatttgctgactttgaagatgattgta

SEQ ID NO: 28255 - DNA, 201 bp, Homo sapiens
agggcttcaagtaagaattgtgaggagaaacatttagtccataacactttctctgacgtttactatcttttaacaacatagattcatctttcttcactggrtaggacctggaggagcagaaggacatagaagttttttggagggaggtggataaaagaagagttgtttctctaggtctttgtttattgatgattatgttat

SEQ ID NO: 28256 - DNA, 201 bp, Homo sapiens
tggaagagcccttttaaattatggtaagactttggaatgtagtagttccttctaaagcttgtggtccctgatagttttattttctctgttgacagattgcygcccacagtgcctgttaagaaaatacctcatgacctttgtttattccctcacctggacaccacaggtaatcagtcccatttagggggtctctgtgccttc

SEQ ID NO: 28257 - DNA, 201 bp, Homo sapiens
gatgtattacatgtggatttggctctgaaagtggaattggcctacaggccccaggccagaggtccccttggtttcttcgcgacctagagccaaacacttayttcacagtactcccaaatccccccagctgcaatcagccttttctgtagcatctgaaaagaaagtaaaataacatgtatgagcactatagagcaagggaaa

SEQ ID NO: 28258 - DNA, 201 bp, Homo sapiens
gtgagctgagatcgcaccattgcactccagcctggcaacagagtgagacttaatctccaataaaataaaaagttttccataccaaatccttttccacttgaaaaggcaccttcttaaccagtttccattttaaatgcttaaggttttatctgtttcatgttgctttttaaaaaaataatcttcataatgacccatattaca

SEQ ID NO: 28259 - DNA, 201 bp, Homo sapiens
tgtcattgaacataatggttaagccaactgtccatggtttaatgacatccacagaacagaacagaatagaacatcagccctctgcctacttaaaatgtgtktttatgaggcccatggtacctggaagactttgagtccctacacccatgccctcttggtgtaatttgatgtattacatgtggatttggctctgaaagtgga

SEQ ID NO: 28260 - DNA, 201 bp, Homo sapiens
ttactttcttctctgggtgtctatggttgtattgttacaatggtggtgattgtggaggccttggttgcaaaataggtaactcattcacaaaggccaaaaartcataaaggtttatcttgggtcagattctccctccactcctgtgccccggcctccagccaactggttcctttccctgtggacacccactgtgttagtatt

SEQ ID NO: 28261 - DNA, 201 bp, Homo sapiens
gagctactggttctccttttgtgaataacatgttttagttgaaatgcatgcctctgacagcaccttgggagtgtgctgtgatagtaacatgatttgcttcrtcacaatttttattggaaaaaaatcattccggataactgcttgcaacaattgatctgaacatgtgtgctaatgtgaggtacaacaggtgtactcttttgc

SEQ ID NO: 28262 - DNA, 201 bp, Homo sapiens
atgcatgcctctgacagcaccttgggagtgtgctgtgatagtaacatgatttgcttcatcacaatttttattggaaaaaaatcattccggataactgcttrcaacaattgatctgaacatgtgtgctaatgtgaggtacaacaggtgtactcttttgctttcttaaatgcacatttaaaaataaagtagctagtgtaatga

SEQ ID NO: 28263 - DNA, 201 bp, Homo sapiens
agtttgtctggttctattttcatagactgggctgctgcctggggccagctgtagatagtagcctcgggtcctcctgctcatctcccttgaaccaggctgtygtctgccctctgtgagctgctcactgctcagctctggctttcagggctctttcaggttttggttttttattttttactttttttttggtgtctggagatt

SEQ ID NO: 28264 - DNA, 201 bp, Homo sapiens
tcaggctttcttgggccatccaaagaattggacaacaacttttctgaaatgctgttttcatctggtcttactggcattgctcccatacacacattctattstatggtcctcttatctgagatttctggaagagcccttttaaattatggtaagactttggaatgtagtagttccttctaaagcttgtggtccctgatagtt

SEQ ID NO: 28265 - DNA, 201 bp, Homo sapiens
cctgataaggcattttgcattaaagttcatttctctgccctccctcaagttggttagtttccttatgtggtttgtgattgttgattatgaactaatttcaktggtggttgttatttatgtggcagttccatgtgccctggattgaagtcatctctatttatttgttactgtctctatccatccactaggaaataaacttca

SEQ ID NO: 28266 - DNA, 201 bp, Homo sapiens
tcttttttcctgataaggcattttgcattaaagttcatttctctgccctccctcaagttggttagtttccttatgtggtttgtgattgttgattatgaacyaatttcagtggtggttgttatttatgtggcagttccatgtgccctggattgaagtcatctctatttatttgttactgtctctatccatccactaggaaat

SEQ ID NO: 28267 - DNA, 201 bp, Homo sapiens
gaggacttcatgaggcagcagagggtgttaatcaccgagaatggcgctccttggccgggtcatggtgctgtgccatctttttgtttcatccatctcttccsagcacctggtacctgcacacgggaggtaatggtaagtatttcaatggtctccaggtactttgacgaggtttgtgtcatgggtcacatccaggcccatcac

SEQ ID NO: 28268 - DNA, 201 bp, Homo sapiens
gagtgtgtgtgtttgaagttgtgttaaggtgttcagattcaggatcattagactggcggaagcactcttttttcctgataaggcattttgcattaaagttyatttctctgccctccctcaagttggttagtttccttatgtggtttgtgattgttgattatgaactaatttcagtggtggttgttatttatgtggcagttc

SEQ ID NO: 28269 - DNA, 201 bp, Homo sapiens
gcaccctcagagggatgcgagactcaagctttccctccacacgagagcctcggtgtgatttcaaatatcatttcacttgaggagaaagaggccattgaagsgaagtcagagggcattttctcttcctggtcatcagtggtattcgtagttaaagacctttttatttaaaaaaacatctgcttgagagaggaagtagaggtt

SEQ ID NO: 28270 - DNA, 201 bp, Homo sapiens
aaatccactcatctataactaagcacatacaacactctaaataaaattttacctatgcattcagctttcatcagtcagagacagcgcaataagcagactgytcaaatgctcaactgaccttaatgaaaaaatttcaggatagtttataggcttagtccagattaagctgtcctttctctacttctctagatctcaatacct

SEQ ID NO: 28271 - DNA, 201 bp, Homo sapiens
ggttgcgtgtgtgtgtgtgtggtatgtagtgtgtggtgtgagtgtgtgtgtttgaagttgtgttaaggtgttcagattcaggatcattagactggcggaascactcttttttcctgataaggcattttgcattaaagttcatttctctgccctccctcaagttggttagtttccttatgtggtttgtgattgttgattatg

SEQ ID NO: 28272 - DNA, 201 bp, Homo sapiens
ttgaacacactcacatggtctggggtgctgagggaaggttggcaaaggaaaagtgcacatttttttttttgcatgtcaggcttttctttattattttctcrtagagaagacaagataaatttgatgaactttcttatcatagcataggataagattttgtagcaatgaaaagcaatagcaaatgataactcctgagcctcc

SEQ ID NO: 28273 - DNA, 201 bp, Homo sapiens
acttgaggtcaggagttcgagaccagcctggccaacgtggcaaaaccctgtctctactgaagaaaaaaaaaaaattagctgggcgtggtggtgggtgcctktaatcccagctacttgggaggctgaggcaagagaattgcttgaacctgggagggagaggtagcagtgagccgagatcgtgtcactgcactccagcctggg

SEQ ID NO: 28274 - DNA, 201 bp, Homo sapiens
tactctcttgtgagagtgcagtatatttatttttgtaattaaactgaatgagcatttagaggaggaggtggtggtggtgattgtggtagtggtgttttacrgtttccttttgaggtggttggtttcacatcttgcatctcaacaccaggattaagagtcatattgtagagatgtttcaaagaccattcttcactttatgaa

SEQ ID NO: 28275 - DNA, 201 bp, Homo sapiens
gcagcaaacagaatgaagtccctgatttcctgctgcttatgtcttagtgggggtggatggtgaacaaataagccaattacggaataatcctatactaatartaagacaagttatccatgagaggccagagaatgaagggaggaatgtgctgtgtacagaggatactcgcagagacctttctgatacggactttggagtaaa

SEQ ID NO: 28276 - DNA, 201 bp, Homo sapiens
ccgagacaggcagatcacttgaggtcaggagttcgagaccagcctggccaacgtggcaaaaccctgtctctactgaagaaaaaaaaaaaattagctgggcstggtggtgggtgcctgtaatcccagctacttgggaggctgaggcaagagaattgcttgaacctgggagggagaggtagcagtgagccgagatcgtgtcac

SEQ ID NO: 28277 - DNA, 201 bp, Homo sapiens
taatgttcctccttcttagtaattctagagagtttggggggcctaaagcaacctaattcatgtcagtggaccatggctttacacaattcagatggtcaatrtatcaaagcagtcagagaattacaattttagggaataattttacaagggtctgtggttaaaagacagtcatggcttcattcattgactcccttactctct

SEQ ID NO: 28278 - DNA, 201 bp, Homo sapiens
gcccagcgtttcggccatgtgctctcaccaggcatctggataagacagtttcagggacattgtggacacagaaaagccccattggattgggttccagagargactgaagaagaggaaaaggcgctgttgagtgtagactcttcttaaggattttactgtaaaagagctgagaaatgaggtgggggaatgtgttagttcgtt

SEQ ID NO: 28279 - DNA, 201 bp, Homo sapiens
ttgttgtgtgggtgggtgtggggagggatgcgaggagcttaatttttattcttcactaaatagttacgtttaaggaaagcagtattgcacttgatatttayatatgatggcaagacagtgccatctcttcaagcaatgtttgttgacgtttttggattcccatatataaaatcagttccttgtggataactataaaaggcg

SEQ ID NO: 28280 - DNA, 201 bp, Homo sapiens
tacctgagactgggcaatttataaaggaaaagaggtttaagggactcacagatccacatggctggggaggcctcacaatcatggcagacggcaaaaggcaygtcttacatggcagcagacgagagaatgggagccaagcaaaaaggggaactccttataaaaccatcagatctcatgagacttattcactaccacgagaac

SEQ ID NO: 28281 - DNA, 201 bp, Homo sapiens
  misc_feature (1)...(201): n = A,T,C or G, or insertion/deletion polymorphism (see Tables 1-2)
cacgaggaacatacggtgttcccagttgtgctgtttcttttgtttttttttttttttttttttttttcgaaaatgcaacaaaagcaataagcaagaaccgncccaacgtgggtcctggagtccctcttcaaaggcacggagagggaagtctctacacatagggtcaatggagggcctagaaaaaccaacagccattcaagg

SEQ ID NO: 28282 - DNA, 201 bp, Homo sapiens
aggcagaggttgcagtgagtggagatcctgccactgcactctagcctgggtgacagagctagactctgtctcaaaacaacaagtaaaaataaatatttttrtagttattagtttattaaactgtaattttcttatttctgtaggagataattatgtatttagaatggtcttgaagggacatcatgacatctagagaggtcg

SEQ ID NO: 28283 - DNA, 201 bp, Homo sapiens
gtgtttttggggtatgagggacagaggtggggaatgtggcataagggatgaaggtagacatgacgtgtaacaataccatttttatctttttttcttttctrtctaaataaatgtgttacctattaaaaggtaacacatattattaaaaatggagggtttttataactgaaagggatcctaaagatgatttcatcaacctta

SEQ ID NO: 28284 - DNA, 201 bp, Homo sapiens
cccacaacacatgggaattatgggagctacaattcaaggtgagatttgggtggggtcacagccaaaccatatcagtggaggaagatgagacacctaaggtyctattagtttgggggcaggggcaggctccctgctaccctctctgatcaagcacataatgaactgaactccagtgttttgcaaagcacaataattcagtct

SEQ ID NO: 28285 - DNA, 201 bp, Homo sapiens
atattggttaaatagactttggagatccttctaatgagatctgtgccattgttgaaaagaatgagggacgtctctatgaactgatgtggaaggctgtccargatacactgtgagtggtacagtaggtatcgtatgacacttcctatgttagagaagaggcaaaacagtacctatgagtgtttgcttatatttttgtagtta

SEQ ID NO: 28286 - DNA, 201 bp, Homo sapiens
gtgcagctccttgtataataccggcctctttttgcctaactttgaagctccaggaaggcaaggactgtgtctttcctgtccattcttagaaacatactttyttgaccatagtagcactcattaaatacctgtccaataaatgcgtgaattcatggacatatgtcttcaactccttgaatttaatttttttttttttttttt

SEQ ID NO: 28287 - DNA, 201 bp, Homo sapiens
ggccaggctgggaaacgtccccagagaggagatttatggcagctttactcttacgtctctctcctgggaggagaagctgcccccaaagagggaatttatgrcagtctccatttctctaaagtttctattttacagcagataatgggagctccaacaagacttcttgctgtatctgtcgaatctcaactatcttgagcttaa

SEQ ID NO: 28288 - DNA, 201 bp, Homo sapiens
cataatagcaaaggcatggaatcaacctcaatgcccatcaacagcagactggataaaggaaatgtgttacacatacaccatggaatactacgcagccattaaaaaaaaaaagcaagatcatgtcctttgcagcaacatggatgtatgtccctggaggccatcctaagcaaactaatgcaggaacagaaaaccagatgctgc

SEQ ID NO: 28289 - DNA, 201 bp, Homo sapiens
ttccccatgctactttgaaccttgccacttctctttgtgacacagccctgagaaatggaacaaactgaaggacgttcgttctgcagttctatgggcgacaygtaaatttcttggcatttttgccatacagcgttgccttaagccttaggattcctaaggtgaagtagagatttccttaactaatattttattatgctaaac

SEQ ID NO: 28290 - DNA, 201 bp, Homo sapiens
agaccagcctggacaacatagtaagaccctgtctctacaacaaataaaatatttatatatatatatatatgtgtgtgtgtgtgtgtgtgtgtgtgtgtgtrtgtgtatatatagtatgtatgtatgtgtatatgtatgtatatatatgtcatatatacatatgacattcagtcctcttggttgattatgggagctgttgta

SEQ ID NO: 28291 - DNA, 201 bp, Homo sapiens
ggatcgtaggtctccaggcagagcttgggtcctgggactgtgtcccctggtagcggtgaggactccaggaggccttggtgtttgtttctctgttggtacayactggctttgcaccctgagccacatcactgcttcagttttcaagactgtccagtggagacacctgtgggagtccccaggtgccagcagagttaaaatgag

SEQ ID NO: 28292 - DNA, 201 bp, Homo sapiens
cagaacacagtttaccagtcactgtttttaatgcctaattcattcactcctcaaagtgaactatgaagaatctaagtcacagagagtttatataacttgcrcagggtcatttggatcgtaggtctccaggcagagcttgggtcctgggactgtgtcccctggtagcggtgaggactccaggaggccttggtgtttgtttct

SEQ ID NO: 28293 - DNA, 201 bp, Homo sapiens
gcctggacaacatagtaagaccctgtctctacaacaaataaaatatttatatatatatatatatgtgtgtgtgtgtgtgtgtgtgtgtgtgtgtatgtgtrtatatagtatgtatgtatgtgtatatgtatgtatatatatgtcatatatacatatgacattcagtcctcttggttgattatgggagctgttgtacacaat

SEQ ID NO: 28294 - DNA, 201 bp, Homo sapiens
ggatgcattaaaataattttaaattgggattcaagaaccacattgttagtgagtgccagtcttagagtttaccagtgtggtttgttgtcctctataggtcrggtttattcaggaagaaagcagtaagatgagaggtgagactaagagaagaataataaaggtatagtaagaagaagaaaattggaaaaagatgagaaaagt

SEQ ID NO: 28295 - DNA, 201 bp, Homo sapiens
acaaccgtaccttttatagaaagaaattattgcaatatttgaacttgtgaggagtctatcattattaccttcaacatgtattgaaaagcaaaaatttgctrgcttttatgccagggaaaaaaaatggcttctcatgtagttcatttctgttctggaagagaaaatttctttcttgccaatgaatttaaatatgctcaattt

SEQ ID NO: 28296 - DNA, 201 bp, Homo sapiens
gctaagtgattgagctcaaagacttgaaagtgtctgagaagtggctttacaaatgtaacacaatgttggtgaagcatttctttagagtgtttatttccagygagctaagctttctccagagtcaatttgctttcagatatccgacaattagatgctataatactttaaaataattacactgggagccaggatgcattaaaa

SEQ ID NO: 28297 - DNA, 201 bp, Homo sapiens
aagtttgtagtagtagtgggggcagaaaacataagcaagtgtttataatggagaaatccttcttattttaaaacttttctgcaaaattcaatacagtccaygtacacctaatggacacagatataataaaagtacaaaaatcttagctcccattaaaaccttccctgcctctaaataagccagaaactcgctcccgctcca

SEQ ID NO: 28298 - DNA, 201 bp, Homo sapiens
ttctcaacttttaactaccgtattagtccattttcatgccgctgataaagacatacctgcaactgggtaatttataaggaaaaaaaggttaaatggactcwcagttccacgtggctggggaggcctcataatcacggcggaaggtgaaaggcacatctcacatggtggcagacaagagaagagaatgagaatcaagcaaaa

SEQ ID NO: 28299 - DNA, 201 bp, Homo sapiens
tgatggtccatctgatttttaccctctgctttgtttatcggcatgtcttgttcttatttcttcattgatgtttcttcttatattcagtggacatttatccygttcctatgtacaaagcactttctatgcatttggaaatacttgtgttaacaaaaagacatcactctcctctaataacttatgctctatggcattggaaga

SEQ ID NO: 28300 - DNA, 201 bp, Homo sapiens
taaaacttatttatggtctaatcataatctgccaaatcaccaaagtggaagagaatatatgtaaataagaagagggtttatttgcagaaaatggcaggccrattaacgatgctgctacatttcatcatttccttctttctcaagaaatatttaagtgagcttcacctatagctcagagaaaaacatgtttttctaatattt

SEQ ID NO: 28301 - DNA, 201 bp, Homo sapiens
tttgcctccactcctttaggttcagagactgggagcctgaaggttaaactgaccaaagacaggtgagtgagagaagaaacagcccacttacatgtgtaacsctcataccgagggagtgctcagtgatgaataactcagagggtgggtcagtcgtttggggattctgtatccaactcagtacgggaaagggagctgggagca

SEQ ID NO: 28302 - DNA, 201 bp, Homo sapiens
ggggccaggaatcatagctttgtaaaactctcaaggtttcctaagaaagactgggttatgtctgttgaattgggaaagggatctttttttctggcctgttktagatactaagttacttaaatccatcttgcttttcagtgatggtccatctgatttttaccctctgctttgtttatcggcatgtcttgttcttatttcttc

SEQ ID NO: 28303 - DNA, 201 bp, Homo sapiens
  misc_feature (1)...(201): n = A,T,C or G, or insertion/deletion polymorphism (see Tables 1-2)
attcaatatccgatgcttttcataatttaattgctgcctgctcccaggctgaattgaactccagaaggcattttcttttcgcagtcacaaaatgcatctcnatatgcagcaaataacatgcagctctggggttttctcagcgaaacccaatgaaaagaatctgttgaaattttattgtctgttgataaacactgtgtgcgt

SEQ ID NO: 28304 - DNA, 201 bp, Homo sapiens
actagttgacttcttaatggtcattgagatgtaacatttgagaaatgatgtttttttaaaagagtaaaacagttttcagtggctagaggatatctaagcckcctttagagaaggcacctgccctattcatagtgaaaattgagaaatatgaaataatttgtatgatcggtaatattttcctctatagttaacttatactag

SEQ ID NO: 28305 - DNA, 201 bp, Homo sapiens
ttttgtctttgctattccttagttccaactcagtaatcttttgcttgttgcttctattttccttctttctgagattatttatattgccagagagttttctrttgtgtgcgagctcagctgtctcttaatattttcctcttactttgtcttcttgggacttgaaatattgcttcaaaaacttagtgtttatgagagccttgc

SEQ ID NO: 28306 - DNA, 201 bp, Homo sapiens
atttattgagcattcataggctcaattctggacaatgttcccattgtggagcttttattttaatggagggagacagactataaacagaatcaataagtaartaaatctagtatgttacatattaaatgctaaggagaaaaatacaccaaggcagggatgttggggtcctgggactgtgccccccggtagcagtgaggaccc

SEQ ID NO: 28307 - DNA, 201 bp, Homo sapiens
tccccactggaatttccaggaagagacgctgaaggccaagtaagtgttttcaattctggaaagcaagggtttttgtaatacttccccatgctactttgaamcttgccacttctctttgtgacacagccctgagaaatggaacaaactgaaggacgttcgttctgcagttctatgggcgacacgtaaatttcttggcatttt

SEQ ID NO: 28308 - DNA, 201 bp, Homo sapiens
atggtgccagtgcactccagcctgggtgagagcctgtctcaaaaaaaaaggaaagaaagaacaggtcatccccctacccagccatccccaggtctgtcacrtggagctcaaacccctgtccactgtgcctgggaagatcgtgtaaggatcaagtgatcaaatgctgtaagatccttgagaatatgtcagtagcttcattac

SEQ ID NO: 28309 - DNA, 201 bp, Homo sapiens
acctggtgttttctgaagacaccctgctgtgttaggatgacagattgcctcccttactctgctgtgcttcagttaatagcaccaaggacgagcaaagcagwgtcatgtgaacttttgcttagtgtaaatttaagcatggccaggaagccttgttgcctctcccttggaaaagcaatttagcctgcagaaaataattaaatc

SEQ ID NO: 28310 - DNA, 201 bp, Homo sapiens
ttttctagccagagagattgtattttaccacgctttttgtccatggatggtgaaacaactcagtgttagcctggcaagtgttctatcagacttaatcacgkttcttcacttcatgtgggtgtagtggcgagctgttcctaaatgtcagtggtgtggttttcaaagcatccttgtgttagtaggaatgaatgcaattgcagc

SEQ ID NO: 28311 - DNA, 201 bp, Homo sapiens
aaggagcccgctgtttttaaatgatgctataacttaaatcttcatacctttagatgggcttttccctattgtgaaagtttttactgaaacacttgtttccrtgaaatcatcccaaactaggaagagaaaattaagccagcctggttctgtttcccccagataaccgctcccttcatccgtcgctccgatgtggcagcgcgt

SEQ ID NO: 28312 - DNA, 201 bp, Homo sapiens
tggtacatatataccatggaatattgcatagccataaaaaagaatgcaagtatgttctttgcagcaacatggatggagctgaaggccgctattgttagcaractaatgcaggatcagaaagccaaatacctcatgttctcgcttagaagtgcgagctagaccttgagcacacacggatgtaaacatgggaccagtagacac

SEQ ID NO: 28313 - DNA, 201 bp, Homo sapiens
ttgctttttgaaaggtgagcaccttaggggtctgaggtccttgtccctttcattagagaaactcattgaggttaacaggaacatcgtatctccccagggtyagcagctggaactcttagaaatgcctgctctttctgagccccatggtagacacatgcttgttttcttggacttgggagtgaggggtggatgggggaaata

SEQ ID NO: 28314 - DNA, 201 bp, Homo sapiens
ttggagcaagagttttgtggaacagagagaagcacagaatctggaatggagggaatgaagagggcgggtagaccagaagccccgtggctgtcaggatgccyctagagcagagactctcaggaaagccggggtgatagaggcagccagggagaagacccatgcttgtccccgtgcaccagacctcaggaatgcctcaccctg

SEQ ID NO: 28315 - DNA, 201 bp, Homo sapiens
tcgatatgcagcaaataacatgcagctctggggttttctcagcgaaacccaatgaaaagaatctgttgaaattttattgtctgttgataaacactgtgtgygttattgcagtcagtactaattagatttatttttaaactgagtttctgtaaattgtactgacagtaaacaataaaatcagatgattattctaatacagaa

SEQ ID NO: 28316 - DNA, 201 bp, Homo sapiens
tgaagctccaggaaggcaaggactgtgtctttcctgtccattcttagaaacatactttcttgaccatagtagcactcattaaatacctgtccaataaatgsgtgaattcatggacatatgtcttcaactccttgaatttaatttttttttttttttttttttttggaggcaatcttgccctgtcacccaggctggagtgca

SEQ ID NO: 28317 - DNA, 201 bp, Homo sapiens
ggcttgtttttttgctccagtgtaactctccaccccgtttgctgagatgctggtgagaccagggcactcagctgaggtccaaagactgggtgtgaaggcgyagaccagcagaatcaaagaagtagtgcggcacccctgaaccagaatgcggtgtgccccggacccccggccctgagtcagagacgccccactgcaaatagt

SEQ ID NO: 28318 - DNA, 201 bp, Homo sapiens
agtctcgggtacatctttatcagtgaaaatggactaatgcatacctattttgttctgttaaagtcctactcatctttcattttcaaatatagattccccaraggagtccttccctggacccctgaccctggcccagatgaacttgagcctctgttggtgtccttcagcagcttgttctgtcacagttatgcttaatcattt

SEQ ID NO: 28319 - DNA, 201 bp, Homo sapiens
actgtgtctttcctgtccattcttagaaacatactttcttgaccatagtagcactcattaaatacctgtccaataaatgcgtgaattcatggacatatgtyttcaactccttgaatttaatttttttttttttttttttttttggaggcaatcttgccctgtcacccaggctggagtgcagtggcatgatctcagcttggc

SEQ ID NO: 28320 - DNA, 201 bp, Homo sapiens
cttctaccccaacctctcccggagtaccagggtccccaaaagagagataaaccatgatctatgtcatatcaggagattgctcgcctcctatgaccaaaagrgtcttgtcggctgttgcgttcctttgcattgcacgaggtgttcaggaaatttttgccttgtaacttacataccatctcatgaatcaccaggcctgtagtc

SEQ ID NO: 28321 - DNA, 201 bp, Homo sapiens
cgggtacatctttatcagtgaaaatggactaatgcatacctattttgttctgttaaagtcctactcatctttcattttcaaatatagattccccagaggartccttccctggacccctgaccctggcccagatgaacttgagcctctgttggtgtccttcagcagcttgttctgtcacagttatgcttaatcatttgtgca

SEQ ID NO: 28322 - DNA, 201 bp, Homo sapiens
caccatggcctcgcacacggatctgagtgcccgcgcccatggcctcgcacacggatctgagtgcccgcgcccatggcctcgcacacggatctgagtgcccrcacccatggcctcacactcacaactccctttccatcccctgcaaaacatctccacgtggcagcagcatttccagaacagaactcaccagcagaaccgtca

SEQ ID NO: 28323 - DNA, 201 bp, Homo sapiens
  misc_feature (1)...(201): n = A,T,C or G, or insertion/deletion polymorphism (see Tables 1-2)
tctgtgaatggatttccactagggcaatgttgtctgcctgtatttctgcctgtttttgttgtgagtgataggatgaggacacaacaactgacaaaaatacngagagctgatgggcttcttcgaagctgcctgcaagcctgtttcacgtgacgtgttccgttgttgaaatgacaccttcccttatctgccagctctgttaac

SEQ ID NO: 28324 - DNA, 201 bp, Homo sapiens
ttttattaatgagtaggcgtctgggtcgtaattgaatgctggatccttagtggtggttttcattagctgatgatacattttgtttataaaaaacattaatyactactaaagttcaataaataatttttgaattaagatgtacacctgtgtctctgctgtagaattcagaagcaatgtgagtcccagcaaatgagaaggaaa

SEQ ID NO: 28325 - DNA, 201 bp, Homo sapiens
cgctgaagtcattacccataagcatttccaatacagtccgcagccctgagtggatagggttatctcagggacacattgctgtctgctgtatttccaagcarcggcagccactgcctggtgtctgctagatgactgtgaacacaggaagtcctcagagagggcagggcttctggggacacagagtttccacacagcacgggg

SEQ ID NO: 28326 - DNA, 201 bp, Homo sapiens
atgccctgtgtgtaggtagagaaaggctgaggcaggacacagtggggcaacagatctgtgtacgagcgacacctcgctctggggagtgtgtgtctgtaaakggtgtgtgtgtgtgtgtgtgtgtgtgtgtgtgtgtgtgtgtttccctttatggaaacctgtgctgtcgttggcatatctgtcttgagcatcttctcaccc

SEQ ID NO: 28327 - DNA, 201 bp, Homo sapiens
cacaccaaccagttcttcaactctctggacagcaagtgaatatcctgcagtttaattcatttctgacactgtctgaaagcagtgcagaccccacaagtgargggctcggtaccataagatgcctccactttgatgccagttacaagtcctgggcttcctgtacttgatggctataaattagggttcctgaaaccccctcct

SEQ ID NO: 28328 - DNA, 201 bp, Homo sapiens
gtgtgtaggtagagaaaggctgaggcaggacacagtggggcaacagatctgtgtacgagcgacacctcgctctggggagtgtgtgtctgtaaatggtgtgtgtgtgtgtgtgtgtgtgtgtgtgtgtgtgtgtgtttccctttatggaaacctgtgctgtcgttggcatatctgtcttgagcatcttctcacccatcctaa

SEQ ID NO: 28329 - DNA, 201 bp, Homo sapiens
acaaatacctgtgtttggatgctgcaacctctcagaatgtctggcttctcttttcagtatatgaaacaagagtgtttaaggggttttgtgtagtttggaargaaaaacagatgcatttctgtgagtaagaagtgtcttgactataacttacgaactgtttttacccacaacacttctaacatcacatgtgtgggttttttc

SEQ ID NO: 28330 - DNA, 201 bp, Homo sapiens
tattattcttatttcatagttgaagaaagtgtgtttgttcccagatcaggcagtttgaagtagattttaagctaagaggattctggccagttctgaaatcratgctttgaaaatagcaggaggtctgtaaatatttgtttattgattagattatatcattaagactttagattaaaatggtcagactgaatatcactgaga

SEQ ID NO: 28331 - DNA, 201 bp, Homo sapiens
cacatacagcatggatatctttcatgttttttaaagttctccaatggccagaagtttcagtggcaaaccccgtcagaaaatattgtcacgctcttgcagtmaaacgtttctgaaatcgtcattcatcaataatataaacattagagtagcaggtttagccaaactcttaattgttttgtctttattcttgagtcttctcaa

SEQ ID NO: 28332 - DNA, 201 bp, Homo sapiens
gtccctggcccacatgagcgtccagtcgatgggaaagatgagtatgtaaatagaaggtagccacgtggtcccaggttccaggacaggacctggcatgcacrctgtgagatcacaccggaggcatctgcaatctgtggggactgcggaacaggtggcctgcccctggtagggagaggagcaggaacaaggctggggcatctg

SEQ ID NO: 28333 - DNA, 201 bp, Homo sapiens
ctttgacaaatggagggtgttctgtgtattccatgcaatagctgttagtctcctgtgcggtgcctcagtggtttctgatcagtgcttattggatgaatgakagaatataggattggaatggatgtcaagacatcattgggtttttgtcatcccttcagtttaattcgataaatatttatggaagcctttcttgggtgagcc

SEQ ID NO: 28334 - DNA, 201 bp, Homo sapiens
tggcttattttaacaggattttttaaaaagctgtgggctcagtttctgaaggagggaataggcattggaagcagttcagctggcatttaccgagacctccrttctctccatcctgtgggctgaagccagagatacacaaatggaaaaatgatgctctgacccatgaaaggctccccatctagagggagggacacacatctg

SEQ ID NO: 28335 - DNA, 201 bp, Homo sapiens
ctcctgagtagctaggactacaggtgtgcaccaccatgcccagctaatttttgtatttttttttctttagtagagatggggtttcaccatgttggccaggwtggtctcgatctcttgacctcatgatccgcctgtctcagcctcccaaagtgctgggattacagatgtgagccaccgcgcctggcccccagaatcttttat

SEQ ID NO: 28336 - DNA, 201 bp, Homo sapiens
ttttcctgttttatataattcaaactttagaatggttttaaaagaaccatgacagctaccctttcatagtctataattgtaattttactccttttcttttrtatccagaagaataacatttctgcttcctacctctgctggttcctagttgaagtctttatgagagcaagccttcctagactgttaaattaccatcccaga

SEQ ID NO: 28337 - DNA, 201 bp, Homo sapiens
ctgcacgatttgaatgagaagagcagctctgtaggtatttttttgtgggtttggttctaaatgcagtttatctggctcataaccagactccacgttatccrcctgatggggaagtagagagatttcataacacgcctgtgaccgaatccaaacttgaatccatcactccttaaatgcacagcccgtggattaacggttctc

SEQ ID NO: 28338 - DNA, 201 bp, Homo sapiens
gattgcagtcgtgcaaccagagaaacagtacgtgcttttttcccctccagactacactgtataccgataaactgtagtgtctttatggaggatgggaagcrtggctgtttttattggagttatctaacaaatagcaccctagtagaggtagcagtaaaacatagtgactgttatttgttatgtacctgttatgtgcaagac

SEQ ID NO: 28339 - DNA, 201 bp, Homo sapiens
taatgacatatttacacagtagttatgaagagccccccaaagcccatcatggattataggagcaagttatagccattaaaaccatctgtgattattttttygtagtagagagtgatgtcaagccatcagcttctgttcaacatatttcttagaaaaggatgtctcaaaacttcttcgagaccgtcacgaaatgaaacaact

SEQ ID NO: 28340 - DNA, 201 bp, Homo sapiens
ctttttccaaaccttcgttttctctgaaccccttttattcctgcctttttatatttcaaggagttttgtctctgataagattaaagactcctctaaagtcrtctcttccatatggctattttgtttttgtttttgttttttaatgtataaaggaatgtttttccccatgttagggatgctctattattgttgtccttctat

SEQ ID NO: 28341 - DNA, 201 bp, Homo sapiens
tgtgattattttttcgtagtagagagtgatgtcaagccatcagcttctgttcaacatatttcttagaaaaggatgtctcaaaacttcttcgagaccgtcaygaaatgaaacaactccccgatcccacacgaacctctcccaccaccctcaaacataaaccaacccaaaccctttgaaaagctccaaagaaaataaaatgtt

SEQ ID NO: 28342 - DNA, 201 bp, Homo sapiens
ggaattaaacatttaaaaagttaagactgacagtggtgataattgatttgagaaccaatcaaaagttcaaaatgatgaatgacaatgatagtatgtgtgtrtaagcacctgctgtccatgttcagagcacctgagatacaccaatatattggcttaactctaaattgggaccccacgtttagcaagtaacatactccatct

SEQ ID NO: 28343 - DNA, 201 bp, Homo sapiens
gctgtttcctcattgagtgaaaaaaaggaaaagtatttatatcagcattttggctgcttgatcactccattatggcagaggtttcatagttgtcaatgttktcagaattttaagatacattttctatgaattacataaaaagatcattgacatagcttagaagttcaccaggaaaatggatgtgcctatttggatacttga

SEQ ID NO: 28344 - DNA, 201 bp, Homo sapiens
aggtggcttctgagctttcaggatttgtccaccaagatgctctctgtttggatgaatctgcgggcatgttcaggaggaatgtctttgtttctggcactccrtttatgtaatagataggattgttgacgtatgcatcgcattggtgatgctttgctgaatttgttagcttgctataagtgctctttaacggaatgcgtatta

SEQ ID NO: 28345 - DNA, 201 bp, Homo sapiens
ttgaaatcaacaaatttattggattagcttaatcggaacgagagaggaaagagtccatgaccttgaaaatagaaattattttgtctgaaaaacagaagatsggcagggaaatgaaggacaaatggaatctcaggatctgagggacaattattatgtagaattgaagacccaaaagaggtggctgaataagaattaaaaaag

SEQ ID NO: 28346 - DNA, 201 bp, Homo sapiens
gaatgagaccctgtctcaaaaaaaaaaaaagaagatggggattgaaccccagcagatcttaatggcttagctagtttccccacctgtaaaaatcaggacaytcttactgctgtttgtgttaggtaattaacagccgtaaagcatgctgaaagtagaaactgctaaatacacacagaggcctgaccacatgaggacacaggg

SEQ ID NO: 28347 - DNA, 201 bp, Homo sapiens
gtgatttgctgttgatacagaaatctatcctttgaagatggcctctgaatggaaatgtactctggaaaaatcccttattgatgctgccaaatttcctcttycaatggaagtgtttaaggtaagatgttgattcttagcaatgtatctaccctttttgagaataaaatcatctacaaagttttccggccgggcgcagtggct

SEQ ID NO: 28348 - DNA, 201 bp, Homo sapiens
tggtagttctgtgtttaacattaaaagtgatctgccggcagctctcagttctataggaacatgtttataaaaatcaaaccacctgtgaggtatgctgttayctaaataatccttgaaagaaaaaatagtcttccagataaagtggctttctgggctcgtcatgattttacctttggtgtctccccagtttcctggaattct

SEQ ID NO: 28349 - DNA, 201 bp, Homo sapiens
gaagagagctttagagtgcgaataacaaaacccagttttgaactggggagccctgttataaattaaaacaggcatggaatctgcagttagtgtttttgtgytttgaatgggtgggaaaaataaataatgacaaaacacaccctacaggtatcaagctaggaatctgtgctgtgcacagctttggacagtaagtttttggag

SEQ ID NO: 28350 - DNA, 201 bp, Homo sapiens
catggagggtctgaaagaccctgggccttgaatctccatgtcagcccgcaaaacactgaggttagactctttaaactttactttcttcatctgaaaaatgaaaagtgcttcctattacttaacctcccagaatggtggtaagaatgaaaaggaattccatatattggctctcagcaggtgtgactttactgttctctgcaa

SEQ ID NO: 28351 - DNA, 201 bp, Homo sapiens
acgtaccctatacacacatgtgaggagttgaaggagtgagccaatgggaaattacagatgcccaccctccggtctaagcctcggagctgccaggccagtgragcccccgctgcagccccaggtctgcctccctgcgggaccagggcacccggggcctcacagctgtgcgggtcctgcctgtgcctctctttgtggcgttcc

SEQ ID NO: 28352 - DNA, 201 bp, Homo sapiens
aacggctaccaagttctttacacttcaaaaattatgcttcacacttacgtgaaatagaatattaggttctggacaaagatggtccattcaggttcatccarggaaatcataaaacaggcccatggagtgtgggcggcgacccaacaccattggcgtccttggacagttctcaatgtggttgtgacgggcagacatccagtt

SEQ ID NO: 28353 - DNA, 201 bp, Homo sapiens
gtttactgactttctttgtagcatattgttatggaaatattttcaccccctcacttcctactacagaaacaaaaggaaatatagcaagtctaattttgacrtttagtaaaaatgacagaaaatgactcatctcgtggtggttcagttttcttgatgtcccgaggttctgctaagtaccaggccttccaccaggtgctcccg

SEQ ID NO: 28354 - DNA, 201 bp, Homo sapiens
aaaggatgtctcaaaacttcttcgagaccgtcacgaaatgaaacaactccccgatcccacacgaacctctcccaccaccctcaaacataaaccaacccaarccctttgaaaagctccaaagaaaataaaatgtttttagaacttcttttcttgttcaaatgtttgattgactcgtagagatgaagggatgatgatgattta

SEQ ID NO: 28355 - DNA, 201 bp, Homo sapiens
tactaaaaatacaaaaattagccaggcgtgtggtgtgtgcctgtaatcccagctacttgggagtgtgaggtaggagaattgcttgaactggggaggcagargttacagtgagctgagatcgcaccattgcactccagcctggcaacagagtgagacttaatctccaataaaataaaaagttttccataccaaatccttttc

SEQ ID NO: 28356 - DNA, 201 bp, Homo sapiens
tgatgatttatatgccgggtgtactgttatttggagtaatgtttcattagatttgttttgtgaaatgaagaaagcagtatgtactttacatttttcatctstacatctaatgtgcaatttgttagcccatcaaaattaattttagatcccaaatggatctttagatttgtaagtaccgttaatggttttttcagttaagtg

SEQ ID NO: 28357 - DNA, 201 bp, Homo sapiens
accctttttgagaataaaatcatctacaaagttttccggccgggcgcagtggctcatgcctgtaatcccagcactttgagaggctgaggtgggcggatcaygacatcaggagatcgagaccatcctggctaacatggtgaaaccctatttctactaaaaatacaaaaattagccaggcgtgtggtgtgtgcctgtaatccc

SEQ ID NO: 28358 - DNA, 201 bp, Homo sapiens
ttgcacaaggggataagagcaaaaattatacagtgtgtattataggatgcatatagtcaaatgtcaggctcaaaattaggccagtagcttctgctgcttgracgttaatcttgaagcaaggaagaatgagggaatttcgggggggtgagggcgacagagttaaggtgttcagtgcttttatttttgtcctacacatggtag

SEQ ID NO: 28359 - DNA, 201 bp, Homo sapiens
aatcccttattgatgctgccaaatttcctcttccaatggaagtgtttaaggtaagatgttgattcttagcaatgtatctaccctttttgagaataaaatcrtctacaaagttttccggccgggcgcagtggctcatgcctgtaatcccagcactttgagaggctgaggtgggcggatcacgacatcaggagatcgagacca

SEQ ID NO: 28360 - DNA, 201 bp, Homo sapiens
acagatccaaaccatatcaaggtggaaccttggaatagaatgaaatgatgctcttgcaaagaaaccctgtcctcatgcaggggagcagcctacgttttctrtctttgggcctaatagcagcggctttgaacagatatccatacgtttagtaggacatttgactaccatggcattttgcatccttgtaagctttcatctaaa

SEQ ID NO: 28361 - DNA, 201 bp, Homo sapiens
ctctattaagtttattcttcatttctgacagcagaatcccaagttgctatttaatttcagaaagtcctttcagcaggtggctgctcatggtgggtatgggstgtgaacactcacggtcactgaccgtgctgaggtatcaggaaagcctgggaattagcatgcaggaaagagtcacccggcagaacgtgttagtccttcaac

SEQ ID NO: 28362 - DNA, 201 bp, Homo sapiens
tgaagaagagctctattaagtttattcttcatttctgacagcagaatcccaagttgctatttaatttcagaaagtcctttcagcaggtggctgctcatggygggtatggggtgtgaacactcacggtcactgaccgtgctgaggtatcaggaaagcctgggaattagcatgcaggaaagagtcacccggcagaacgtgtta

SEQ ID NO: 28363 - DNA, 201 bp, Homo sapiens
tgttgtcataactgcaaatgccagactagagtcgtttgtagtttagaaatgtatcagataataagttcctcatcagtgggcattgctttcctaggtgatakgtggaattttggcccatggatgactgaaggtttttgctaatgtgattaataccattaaattacttacagaatgccaactaaatgcatacaaatgttccct

SEQ ID NO: 28364 - DNA, 201 bp, Homo sapiens
gatcttagccaaaaggccgagaagcaatgtgtcaggatttttctataaaatgataaaggtcttcagtggaacattcagctttgcctatgaactttttgcartcctcaaataatcaaggagaagcattgtggacattcttttaatagattattttgcatgctattgggtctcctgtcttggaaaataattagtctgagtcca

SEQ ID NO: 28365 - DNA, 201 bp, Homo sapiens
cagcaataggtaaaaacagtgctcaacgtttttttttttccttttaattttgcattcagactgtgtaacctccatctgtaaatcttgccccccctcccacygcctggggaaaaatatgggcaacatgtggtgtgttaagcaacatttcaagtgtaaatattaaacttggtaaattttaatttaccttttaataattttctg

SEQ ID NO: 28366 - DNA, 201 bp, Homo sapiens
tgcctggtctaagtacttccgtaaaatacccagtgtcttggtgtccttctgcagcacagtctctgtcgtctttgacataagtatcgagattatacacacaycactgataagggataaaaggcaccctggaaatccgtaaataaaggactagcagtcacggcagtgcactgcattgagtctggtttggttgggtctgaaact

SEQ ID NO: 28367 - DNA, 201 bp, Homo sapiens
tgtgatctcggtgccattgattgaacttgggaggtttctaccccatggctggagccgggtctgttctctcaggcatccccagtgtctgggcctgaaagcayggttctgcagagtgcgtgctcccctacctcctgttgccattcccgtttctttacagacttgaagaggtttgttaaacagaatctctttgggtggaaaacc

SEQ ID NO: 28368 - DNA, 201 bp, Homo sapiens
accacacaaaacagtctgtaagtggttcccagttgagggggggtggatgacaccagtgatctttgtgaataaattggcagcttcataaagaaattataacmaagttctaaagaacaaataagatttttgattttccaccaagaacccatgttttcatgatctcgcttaatctttaagtgtttgcatgagatgatgtcacag

SEQ ID NO: 28369 - DNA, 201 bp, Homo sapiens
aagctgattttctttttccgttttgccttttctacagcacaaaagaagagaaagattgcagtcgtgcaaccagagaaacagtacgtgcttttttcccctcyagactacactgtataccgataaactgtagtgtctttatggaggatgggaagcatggctgtttttattggagttatctaacaaatagcaccctagtagagg

SEQ ID NO: 28370 - DNA, 201 bp, Homo sapiens
tattttgatgaaaagaattaagatgaagtagactgggtatagtgatattttatcttttaatctgttaggtgatttctgtgactagaacataaattatgtgaaaatctagatttttaactaaatagttaattttgctgaaaggaaggccaaatagataaagataaaatcatttatgacttacgtctttatctgattactcat

SEQ ID NO: 28371 - DNA, 201 bp, Homo sapiens
aaagctcaaggtgagttcaaaagctatgaggatcaaaatagatcgcttcatgctaaaaagcagacatgcaagaaattaaaaatacagtcccaaaggtttaytgttgctttttaactgtgcttaatttcatattcatatcctaagcgtctgtctgaagtagcctgggttgatatattgaaggcataaacatatctacttcca

SEQ ID NO: 28372 - DNA, 201 bp, Homo sapiens
gaatatatgttatttcccccttttaaacagatggtagcatactatatatgcacagtgttctgcaccctgccttttatactcggcagtgcatcttggagatstgtacatctgagtatattaagaggtgtctgattcttttttatagctgcagaatattccttcatatggatatacccagatttacttaagtgctttcccata

SEQ ID NO: 28373 - DNA, 201 bp, Homo sapiens
tccctgtggacacccactgtgttagtattttgcatttccttccagatttattttatgcacatatgaatatatgttatttcccccttttaaacagatggtarcatactatatatgcacagtgttctgcaccctgccttttatactcggcagtgcatcttggagatgtgtacatctgagtatattaagaggtgtctgattctt

SEQ ID NO: 28374 - DNA, 201 bp, Homo sapiens
acctgcaacacgatcattttaagaaaatggtcgatgttctttgaatggtactatttattgtccattaacttgctagtataaccagcatgactccatctcayggaatgcacatggggactgttgttctctgctggttgtgtcaggctgtcaaaactgcagttgattttcaccttttcatgaaagaagtctgccttgctgtgg

SEQ ID NO: 28375 - DNA, 201 bp, Homo sapiens
ccaggtttaaatccttcagctgccacttgccggccgctggatttcttccggtgcctcagtttactgatctctgaaatggggatgaaaacaccccgtatctyttagggttgttgtgaggattgaacgcttggaatggagtaagcactgtgtttgctactgtgtgggtctctctcctctctcccctccccacaccccccccat

SEQ ID NO: 28376 - DNA, 201 bp, Homo sapiens
gacagggtctcactctgtctcccaggctggagtgcagtggcatgatctcggctcattgcagcctcaacctcccaggttcaagtgatcttcccatcgcagcytcccaagtggctggaactacaggcatgtgccaccatccctggctaattttttaatctcttattttgtagagatgggatctcactatgttgctcaggctgg

SEQ ID NO: 28377 - DNA, 201 bp, Homo sapiens
aaagttttccataccaaatccttttccacttgaaaaggcaccttcttaaccagtttccattttaaatgcttaaggttttatctgtttcatgttgctttttwaaaaaataatcttcataatgacccatattacaagatgctgattaaaattgtttaggtttactgactttctttgtagcatattgttatggaaatattttca

SEQ ID NO: 28378 - DNA, 201 bp, Homo sapiens
ttgcagggagacactcttcaacccaatctgatcgcatttcatgtatgtacagaaatcttagaaataacacagtggcactctctactgacttcctctgcttrcacgaaggtaatgttcagagaaatggtatggatgcatgggatgaggatccaactgtcttagcagttgcttcatttatttaaaaaaaaaaagagaaatctt

SEQ ID NO: 28379 - DNA, 201 bp, Homo sapiens
atctacttgccagtgtacaaatttacagcaaagcaaaggatgactagtggcttcttatgttctctgtgatgtttctttcctgggaagttatgggactcacrctcacgagcaggaatggaacatgcctccgtggaagcttaggaaatactcgcttatgagctgtctccctctttagataatttggggtctttataatatatg

SEQ ID NO: 28380 - DNA, 201 bp, Homo sapiens
aaagatagccgcccaccccaggtgctttctaaggctctggagctggactgcccaggtttaaatccttcagctgccacttgccggccgctggatttcttcckgtgcctcagtttactgatctctgaaatggggatgaaaacaccccgtatctcttagggttgttgtgaggattgaacgcttggaatggagtaagcactgtgt

SEQ ID NO: 28381 - DNA, 201 bp, Homo sapiens
ctgccttggatgagagagagagagagggagagaaagagagagagagaaagagaaagagagaggaactttgactgtgcttgcacctctgtggctgtgttttkgggtctctttattatgcagtctagctgtgatgcagtatctcatagtcatcttaatgatcttaacgactatgagggccagtggagcttgcccttggtattt

SEQ ID NO: 28382 - DNA, 201 bp, Homo sapiens
gaaataaaaacgaggaaggaaaaagatagccgcccaccccaggtgctttctaaggctctggagctggactgcccaggtttaaatccttcagctgccacttrccggccgctggatttcttccggtgcctcagtttactgatctctgaaatggggatgaaaacaccccgtatctcttagggttgttgtgaggattgaacgctt

SEQ ID NO: 28383 - DNA, 201 bp, Homo sapiens
gggtgaggcccacccacgtcagggaggacggcctgctttactcaaagcccagcaattaaaatgttaatctcacccaaaatcaccctcccagaaaaatccgragtcgcattcaaccacatatctgggcactgtggcccaggcaaggtgacataaaattaaccatcacagacagcaacctaaatactgttgaacaagaggcca

SEQ ID NO: 28384 - DNA, 201 bp, Homo sapiens
agcaccatgtttttacaggcggtcctgtgaactttgcttgctcagcgtttgctgagtagatctgaggaagaaataaaatgtgtattcctaaatgaaatagygatttaagatacagcagtccattaagaactgctgtttggccaaccgaatttggggacagtgagatcttttatactggaagctaaaattcagaaactcctt

SEQ ID NO: 28385 - DNA, 201 bp, Homo sapiens
gccttcaactgattgggtgaggcccacccacgtcagggaggacggcctgctttactcaaagcccagcaattaaaatgttaatctcacccaaaatcaccctyccagaaaaatccggagtcgcattcaaccacatatctgggcactgtggcccaggcaaggtgacataaaattaaccatcacagacagcaacctaaatactgt

SEQ ID NO: 28386 - DNA, 201 bp, Homo sapiens
tttccagcttcatccatgtccctgcaaaggacatgaactcattcttttttgtggctgcatagtattccatggtgtatgtgtgccacagtttctttatcccrtctatcattgatgggcatttagcttggttgcaagtctttgctatcgagtagagactaaattccataacatgacactcagcaacccatcctctgtaggcac

SEQ ID NO: 28387 - DNA, 201 bp, Homo sapiens
acacatgcatgcacatagacgcacatacagacatatgcatacacactcacacatatttcacagccttgtatttcattgtatgggctcataatccctggggygtccatcccagacctgttgatgagttaagaacctttggtttagaggaggcaataactggtcagactgagacttcaggaataggcctgtccggagctaggg

SEQ ID NO: 28388 - DNA, 201 bp, Homo sapiens
ttcgccatgttggccaggctgctttcgaattcttgaactcaggtaatccacccgccttggcctcccaaagtgctggggttacagatgtgagccaccatgascagcccaaagctacattttaatgtaataatattttctatgcagtagttgttcgtaatcctttcagggtcatggtgctctttgagaatttgatgaatccaa

SEQ ID NO: 28389 - DNA, 201 bp, Homo sapiens
tttcagccgcctcctacctgctgtctctgccctcttcatggggctttgaggttatttctgtaaaatacaggcattgccttcctcctaatacacagtaggtmtgtgtttcttttttttcttaatttttttattttactttaagttctgggatacgtgtgcagaacgtgcaggtttgttacataggtatacatgtgccatggt

SEQ ID NO: 28390 - DNA, 201 bp, Homo sapiens
ttactcttatgatagtttattttgctgtgcagaagctctttagtttaattagaacctatttgtcaattttggctttcgttgcaattgcttttggctttttygtcatgaagtccttgcccatacctgtgtcttgaatagtattgcctaggttttcttccggggtttttatggttttagaataagtgtcatgtggcactgaga

SEQ ID NO: 28391 - DNA, 201 bp, Homo sapiens
cccatggcatcacacacggatctgagtgcccgcaccatggcctcgcacacggatctgagtgcccgcgcccatggcctcgcacacggatctgagtgcccgcrcccatggcctcgcacacggatctgagtgcccgcacccatggcctcacactcacaactccctttccatcccctgcaaaacatctccacgtggcagcagcat

SEQ ID NO: 28392 - DNA, 201 bp, Homo sapiens
cattgattgaacttgggaggtttctaccccatggctggagccgggtctgttctctcaggcatccccagtgtctgggcctgaaagcacggttctgcagagtrcgtgctcccctacctcctgttgccattcccgtttctttacagacttgaagaggtttgttaaacagaatctctttgggtggaaaaccccagagaagtccag

SEQ ID NO: 28393 - DNA, 201 bp, Homo sapiens
ttttaactttaggacttcagaggtttgagagctaatggaaaatgaggaccccatgtaataaggggagcccagtggtgtggccatgccaccgggccttgccyttcagcgctgtcacccctgcccccagggagggcacactgaggaggctggcctactttgctgggtgtcaataaaaggtgtggggactgttcattcctgagc

SEQ ID NO: 28394 - DNA, 201 bp, Homo sapiens
gtcccaggtgggggatgcagtcagcatctagtggatagaccccagagatgcagttgcaacatcctacagtggcagaacagccccccaacaaagattctggyccccaaaggccaatagtgttgaggctgaccatccctgtttctcacctggaagtggttgatggagggagccgagggcagctggggtgtgaggaaggctctg

SEQ ID NO: 28395 - DNA, 201 bp, Homo sapiens
gtgggctggtgtgaagccaattcttatcctttgactgcaccacacaaaacagtctgtaagtggttcccagttgagggggggtggatgacaccagtgatctktgtgaataaattggcagcttcataaagaaattataaccaagttctaaagaacaaataagatttttgattttccaccaagaacccatgttttcatgatctc

SEQ ID NO: 28396 - DNA, 201 bp, Homo sapiens
ttgtgaataaattggcagcttcataaagaaattataaccaagttctaaagaacaaataagatttttgattttccaccaagaacccatgttttcatgatctygcttaatctttaagtgtttgcatgagatgatgtcacaggttgacaaactttaacagtgagggacagttgaaagtcacagagaggcagaggaaaaatatct

SEQ ID NO: 28397 - DNA, 201 bp, Homo sapiens
atgaagaccacctggttctttcttcatgaacagtgggaaggacaaacacatacgtgagcctgtcttgtcgatgtaagatgcgtgtgcgtgcatttctttcyctttcttcatctgcccagctttgtcctgctgcgtcagcactggctcagtgttggtctcgtttctcttgcagacatcattcagtcgaggtttcacaaagaa

SEQ ID NO: 28398 - DNA, 201 bp, Homo sapiens
tttttgtttcatttgcttttttctttttgaaccttttgactagtcttccataggaattgctatggaaggatttttaaggatttgctgtagcagatacatgygtttttagcctgacatacggaggggatgggatgatttaaaacaggatgaattttcattggtaggccttggaaaagaagaagaggaactgtgtgtactgtc

SEQ ID NO: 28399 - DNA, 201 bp, Homo sapiens
taagatctgacatctggtgagttaacgtctatcctatgctagaagaaactgataggaaattgtggcatgaatgacgtaacttttcagcatttaaattgctmctttaaaatgggtacctctttgctttataacctatttttaaaaatggacttgccccactaacaaagctgattttctttttccgttttgccttttctacag

SEQ ID NO: 28400 - DNA, 201 bp, Homo sapiens
tacaacaggtgtactcttttgctttcttaaatgcacatttaaaaataaagtagctagtgtaatgataagattaaatgaacgaagttgtactaagatctgayatctggtgagttaacgtctatcctatgctagaagaaactgataggaaattgtggcatgaatgacgtaacttttcagcatttaaattgctactttaaaatg

SEQ ID NO: 28401 - DNA, 201 bp, Homo sapiens
tgggttaaaatatattgttagaattaaatttattcttttttgttcttaacgtggctggctgcaaatgtaaagtttagcattacgtttgtggcttccatagygtattacttagataaatacatgcctgttttagagcaacaggaatattgtttgtaagtgccatattttttagtggtttttgtcatcttctggatgtattgt

SEQ ID NO: 28402 - DNA, 201 bp, Homo sapiens
tgccttaggcagtttaggaaagagacattgatcacaatttttccttcctttctgtactgagaagttatcaatttctctctgtatggagtcactcctatttyctttgattcagtcaatcctcccacctcccttttaatcacaatatagtgtcctgggggccagagctggaggctgtccttcaggctgcagaagtccccaggt

SEQ ID NO: 28403 - DNA, 201 bp, Homo sapiens
gaatatgtgtttgaattcagcagtgagtcatctgagatgcgtgttgttatggaaaattgccatagcgttcagctgttacgagacagaagtcaaagctaagsacatttaatggccggagatgagcggtatttccaagaagttctttttattatttttacactttagatgaaatgggtatttggatgggatgagtcccattat

SEQ ID NO: 28404 - DNA, 201 bp, Homo sapiens
tggttatatttagtgtctaaataaggccctattttattacaccaccctttctttctctttttctgtctctctgtctctctctctctctctttttagtctcrgattaccccatctttccgtggtggaaagaataatggttgcaaagtgagtaggaaatttatttctctgtactcatctggcatgaattgtttgctctacata

SEQ ID NO: 28405 - DNA, 201 bp, Homo sapiens
ggccacggcttcctgtgtcttcccttttcctgcttttttggctgtagactgtttcagggttcaccaacatggagagacagactcatcactttgaaacctcyctaggattctgcaggagacacgggtggtggcagtggtggtttctggtgcatgatacaggtgggagaaggagggggaaagtacttcataagagctccagct

SEQ ID NO: 28406 - DNA, 201 bp, Homo sapiens
gaaggataaatagttgatgaaataggtttaaaaaaactcaaaggacattaaaagcctcattttattgaaaaataaataatgacttttttttcttgaagacsaaccctgttgtttagaggcctaaaagatttgccaaaactatccatatactatccatgtctataacaagtctgtagaggtgactgcactgtatatcaccgt

SEQ ID NO: 28407 - DNA, 201 bp, Homo sapiens
aggggaactcccctttatgaaaccatcagatctggtgagacttactccctgtcacaagaacagcatgggaaagacccaccccacgattcagttacctcccrgtgggtccctcccaagacacaagtgaattgtgggagctacagttcaagatgagatttgggtggggacatagccaaaccatgtcagtgagtgatttgcttg

SEQ ID NO: 28408 - DNA, 201 bp, Homo sapiens
tcattctcggagtcctacgtagaaccttgtgcctccttcggcccaggactgagtttcatgccgatgtcttcttcccaggtgctcttcttcttcctcacacrcaggttctgggagctcagtccactcttctcctcttcgcaggtggccacggcttcctgtgtcttcccttttcctgcttttttggctgtagactgtttcagg

SEQ ID NO: 28409 - DNA, 201 bp, Homo sapiens
tagttgatgaaataggtttaaaaaaactcaaaggacattaaaagcctcattttattgaaaaataaataatgacttttttttcttgaagaccaaccctgttrtttagaggcctaaaagatttgccaaaactatccatatactatccatgtctataacaagtctgtagaggtgactgcactgtatatcaccgtggctctcagt

SEQ ID NO: 28410 - DNA, 201 bp, Homo sapiens
ttggaacataaccagttcagtccagtgccatttctacttttgtcgccttgcctctcctgcattcttctagaaaatttgagtctcccgaaagggtagacctktgctaagtcaatggtgcagtattgataaggctgccccagactgccagttaggtatctggttttcccgttgatttcactctgtctggatgatcttccttcc

SEQ ID NO: 28411 - DNA, 201 bp, Homo sapiens
gcctcactcttcacgctgggaactggtcctgtgtgactcaatggtattcccttttttccttaaccctcctttgaatagctgtggcttcccctggctaggtratttgtgtgtgtgtgtgtgtgtgtgtgtgtgtgtgtgtgtgtgtgtgtgtgtggttttttcttttctcctagagtaactctggccatcgggtagttggat

SEQ ID NO: 28412 - DNA, 201 bp, Homo sapiens
gcaagcagaacaatatgctgacacagtgttcagtagattccttgacattctttttacaggcttgcgacgtgaaatttcctgatgaagtctatagataaagyggtgttgcacatttagacagggtgagcctcagtggagagaattatgctgaaaatgtgagcttgattcttcttcttggcatttggtattaactggagaacc

SEQ ID NO: 28413 - DNA, 201 bp, Homo sapiens
tcagttgctgtgataaaagcaagcagaacaatatgctgacacagtgttcagtagattccttgacattctttttacaggcttgcgacgtgaaatttcctgaygaagtctatagataaagtggtgttgcacatttagacagggtgagcctcagtggagagaattatgctgaaaatgtgagcttgattcttcttcttggcattt

SEQ ID NO: 28414 - DNA, 201 bp, Homo sapiens
aggctatgcgtaggacatttactgaattactattttaacatgagagtaaggcgagcatatatgttcccttataaaaatgtagtagggtaagtaacaagggcaggttcagggtgcctcagtagctgctgcgacaggtcagcacatctcagggcctgatgctgtgatgtttaattttgttgatcctgtcacagtccaatgtga

SEQ ID NO: 28415 - DNA, 201 bp, Homo sapiens
agtggctggattcacttgagaaactcaaatctagttttgagcattttcattccacaagtagcttattttttttttactaaaatctagttttgagcattcamactattaagtatgattctacaagtagtttattattattttttccaatctgctaacccacaaaatatttccagtcctggaatcacttggtgagatatttgg

SEQ ID NO: 28416 - DNA, 201 bp, Homo sapiens
cgcgtctagccctggctgacattttttgcacacgaagcctttttttcaaacctgcctgtttcctctatggagctagcatgtagtcagaaaatgcacagcarcttcatatgagccttagcaaaagaaaattctgaagaagatccatttaggaagaggaaaaatcagacagactttgccaaaagtaaatgtcagtgattcctg

SEQ ID NO: 28417 - DNA, 201 bp, Homo sapiens
gagatgactagcctaagaggggaatggctccatttatgggatggtgagtttacaactaaggatggcacttttgtaatcaactaaaaataccccagctcagytctttgctaagaagaggaaagagttgagagcactgagaagagtatttggcctcccaattaatttcaattcctcattgaaattaagaagacatctcagggg

SEQ ID NO: 28418 - DNA, 201 bp, Homo sapiens
gttcaaagagggcaattatgttcttagtaattcaggtgctcgatagactgggaagaagagatttgttctgtgtacaattacatggattgtataatgggacrtcttaagatttagaatgaaacagtttgttttttttttaggggaaactttgtaattgtaaccctggctgacagtttagtttgttttgttttattttgtttt

SEQ ID NO: 28419 - DNA, 201 bp, Homo sapiens
aagatggactacctagagatagccattggaaatgtttagctctagattaatcttgttaagttcaaagagggcaattatgttcttagtaattcaggtgctcsatagactgggaagaagagatttgttctgtgtacaattacatggattgtataatgggacatcttaagatttagaatgaaacagtttgttttttttttaggg

SEQ ID NO: 28420 - DNA, 201 bp, Homo sapiens
ctctctcctctctctgttcatgtctgtgtgtgtgtatagccttcaaaagtttctcatcttccttcctacagcctattactatggaaagagaaagaagatckccaagccccccatcggggaaagcaaccccgacagcggacaccccaaacccgccaggcggaggaagcgacggaaatccattttcgtgcagaagaaacggag

SEQ ID NO: 28421 - DNA, 201 bp, Homo sapiens
tctctgttcatgtctgtgtgtgtgtatagccttcaaaagtttctcatcttccttcctacagcctattactatggaaagagaaagaagatctccaagccccscatcggggaaagcaaccccgacagcggacaccccaaacccgccaggcggaggaagcgacggaaatccattttcgtgcagaagaaacggaggtcttctgcc

SEQ ID NO: 28422 - DNA, 201 bp, Homo sapiens
cttcaacactggggacgggccaagttcagcccgaacaccttccagacctgaagctttggagcagtgcttctcctgtgggtctgttttctcagaatgacttygtaaggcacaaatgaactatcagatgaaagaatcgtttcccttctttctctctcctctctctgttcatgtctgtgtgtgtgtatagccttcaaaagtttc

SEQ ID NO: 28423 - DNA, 201 bp, Homo sapiens
aactcagcagttctgtctgttggcttatttggaaattcgctggtgttgaattcttcaattatcataaaaacttgttattccttaggagtgtcaagtgactwcttttgccttttagatcatatttcagtgcttccatccagtatccagagcccagtctccatgcataaatccactgtgccaccttcccagaatctttttttt

SEQ ID NO: 28424 - DNA, 201 bp, Homo sapiens
cttgaagctgtgaaccccaggaatccaggagaactgtgtgtggcctccgttgtgagtgtgaaggggcggctaatgtggcttcacctggaaggtacgtactygctgggggtagcagtcgctggggggaatgtagagtttgtcgaaatggcaacgtgtggaggaaagcagcccttctcagaaggggccttacttctctttcat

SEQ ID NO: 28425 - DNA, 201 bp, Homo sapiens
ctcctcccaaaggtttgtattctgtgaaggtatgcagggtctggagattcaggagggtgtcttactgtcattgaagtaacacctgcattaatctggggagkctggttgtgtaaagggtttagatgtagtagaaatagggcgttcttcatcagcttgacataggtgtcagttacagctccatcccctggcgaggcgagtggc

SEQ ID NO: 28426 - DNA, 201 bp, Homo sapiens
ggaggaagattacgccttcgctatgtgggattggaggacactgaatcctatgaccagtggttgttttacttggattacagacttcgaccagttggttggtktcaagagaataaatacagaatggacccaccttcaggtaagggccaaagcttttgctgctgtaaagtattttagaaaaagatgtgatattttcctggatgt

SEQ ID NO: 28427 - DNA, 201 bp, Homo sapiens
ggtggatcagactcttgttctatacaggcctgcgatggatgggatgtggcccacccatagcatctgctctactcaatctgctgattcaaatgctaatgtcmgccagaaacaccccaagaaacacccagaataatgtttgaccaaatatctgagcatcatggccaggcacattgacacacacaatggaccctcacaggggat

SEQ ID NO: 28428 - DNA, 201 bp, Homo sapiens
atcttccatagctgttcttgcctctcttttccttctccctttgacaaatggagggtgttctgtgtattccatgcaatagctgttagtctcctgtgcggtgyctcagtggtttctgatcagtgcttattggatgaatgatagaatataggattggaatggatgtcaagacatcattgggtttttgtcatcccttcagtttaa

SEQ ID NO: 28429 - DNA, 201 bp, Homo sapiens
tgggaaaaagccatcatcccccaaaggcagtgaggcaggagggattctccctcacttgggggtggatcagactcttgttctatacaggcctgcgatggatrggatgtggcccacccatagcatctgctctactcaatctgctgattcaaatgctaatgtcagccagaaacaccccaagaaacacccagaataatgtttgac

SEQ ID NO: 28430 - DNA, 201 bp, Homo sapiens
agggtgttctgtgtattccatgcaatagctgttagtctcctgtgcggtgcctcagtggtttctgatcagtgcttattggatgaatgatagaatataggatyggaatggatgtcaagacatcattgggtttttgtcatcccttcagtttaattcgataaatatttatggaagcctttcttgggtgagccacgtagcataaat

SEQ ID NO: 28431 - DNA, 201 bp, Homo sapiens
agtcctagcctgaggcctgagaactggaactggtggaatagttcttgtctgaaggcctccaagctcgagacccaggaagagccaatatttcagatagagtyggaaggtgggaaaaagccatcatcccccaaaggcagtgaggcaggagggattctccctcacttgggggtggatcagactcttgttctatacaggcctgcg

SEQ ID NO: 28432 - DNA, 201 bp, Homo sapiens
attcttattttgaatactagacagagaggactaggttatagtgcagcaacacatcacttcagaatctcagtggcctgggcaggaaacgtctacaaatcacygtagcatggagtcgttgtgcaccatcctgcagggtttgttgtgagtgagaagagcagggttggaggtctcggaccagcagtcatctgctctggctcgcaa

SEQ ID NO: 28433 - DNA, 201 bp, Homo sapiens
ctcctccctcagcctcctgagtagctgggattacaggcatgcgccaccacgcctggctaattttgtattttcagtagagatggggtttctccatgttagtyggctggtcttgaactcctggcctcaggtgatctgcccgctttggcctcccaaagtgctgcgattacaggtgtgagccaccacgctggccatgatatgtct

SEQ ID NO: 28434 - DNA, 201 bp, Homo sapiens
atttttgatgatggtgtgtgaaagagggaacattcaggtaggaaacaaagtaaccctttctcaataggcactgaatggaccttttacaacaattcccatgrttttgaattctatctgatcaagtagagagtctgtgtacacattcatcatggtgtagaccaggatgggcttggcttgtagatgtgtgtgacagagagagta

SEQ ID NO: 28435 - DNA, 201 bp, Homo sapiens
atttggtgagtacctacattgtgcaccttaagatgggatattttatccctgacgttattttaccctgaatcactgttaagatgctcataaatgccgggcayggtggctcacgcctgtaatcccagcactttgggaggctgaggagggcagatcacaaggtcaggagatcgagaccatcctggctaacacagtgaaacccca

SEQ ID NO: 28436 - DNA, 201 bp, Homo sapiens
tttgatgatggtgtgtgaaagagggaacattcaggtaggaaacaaagtaaccctttctcaataggcactgaatggaccttttacaacaattcccatggttwtgaattctatctgatcaagtagagagtctgtgtacacattcatcatggtgtagaccaggatgggcttggcttgtagatgtgtgtgacagagagagtaggt

SEQ ID NO: 28437 - DNA, 201 bp, Homo sapiens
acttttgtgctgtgctgtgtatgtgtgtgtgtgtgtgtgtgtgtgtcttccataagttttcatttcaaattcttaaaaattttcttgtatattccttctaraatttctaaaaagtaaagatctttaatccatctggaatcgatgcctgtatatagggcagtcattgttcagggccagtcagtttcagctgggagcgccctt

SEQ ID NO: 28438 - DNA, 201 bp, Homo sapiens
ggtggttatgtgtgcggttggacggacagacttgcttttagcagccacttgtccttgctggcagccactggtatttatatgtctgtccccagtgcccaacrtggtgtctggcataaataaatcagatgttccattaatacacacacaagaaaactgcatggtatcagcacttatctgtctggcattagttttaaaattgta

SEQ ID NO: 28439 - DNA, 201 bp, Homo sapiens
aaggctccaatgagcatctcatgtgagcatcttgttggccctcaaaaagtttcaggtttggggcttgggattttcagagttgggattccagtttgtatacrcagaacctagttagtctcagcacagagttactacatcttagtaggagagtgagaactgctcaggctctggagggaataaagctgatgaaaccagggtgca

SEQ ID NO: 28440 - DNA, 201 bp, Homo sapiens
ctataggcacctgccaccatacctggctaactttttgtatttttagtagagacggagtttcaccatattggtcatgctgcaaactcccaaactcaggtgaycaacccgcctcagcctcccaaagtgctgggattataggcgtgaaccaccgcgcccagctccatttatgttttatattgcatgtatatttcaccataaatc

SEQ ID NO: 28441 - DNA, 201 bp, Homo sapiens
tagtcatggtatttgttaattgttgatgaaggttgtgactggctgtaggtaaacattttggaagtaatttttaggactggaatgcactcacatgctttttycttaagccactgaaaagtgcgaggaattaacagcaaaacttggaggttttaagtaaatgatcagtgttagtagctatcactttttaacttagcaatagct

SEQ ID NO: 28442 - DNA, 201 bp, Homo sapiens
tctgactatgaggagtaactcagggaactcagattggggtggagttcacaagatcctcggctgcagtttgggctctacctcttggtttttggagctccccygcctggtctcctccgcgtcttctctttttacttctggctcttcactctgcaccatcacctcttactccttattccattatttttcaacgttgcattgttg

SEQ ID NO: 28443 - DNA, 201 bp, Homo sapiens
gtgtactagattaaccacgttggtcagagtaacctgtcttggttaacatcgataacatcgcatggaagtcggtatcgatggaggataattgatgaagcacygtggacattttgctgcacatatttcctaaatcttcattgcttactgtataaacacacaaaagtagtcatggtatttgttaattgttgatgaaggttgtga

SEQ ID NO: 28444 - DNA, 201 bp, Homo sapiens
gtgcagtggcgtgatctctgctcactgtaacttctgcctccggagttcaagccattcccctgcctcagcctccccagtagctgggattacaggcgcccacygccacgcccagctaatttttatatttttagtagagatggggtttcataatgtaggccaggctgctctcaaactcctgacctcagtgattttctaagtaaa

SEQ ID NO: 28445 - DNA, 201 bp, Homo sapiens
cttagacacgggaggtggtggcagaccttgggtacaaggtgctgactgaagccctgagatgtgactccagtagcaagagacctggtgttttctgaagacaycctgctgtgttaggatgacagattgcctcccttactctgctgtgcttcagttaatagcaccaaggacgagcaaagcagtgtcatgtgaacttttgcttag

SEQ ID NO: 28446 - DNA, 201 bp, Homo sapiens
aaagattatagcctcctcttacttgagatctgtaacaacagtgcaaagcactcgctggtcagagacttgtttgctgagcatgtcttcctggagcttgcggkttcgttgctgccacactgtcattgcactctagacataacaatatgaaaaacgaagcgagaaaggggtggctgcataggcagaagttcaaaagtgagtgca

SEQ ID NO: 28447 - DNA, 201 bp, Homo sapiens
cgagctgctgcacctggcttacatgctaatgttatggtgaggatgttaggattattactatttttgtaagttatgtggctttgagaattcttccctaaacyttagttttcataagctgtcttattttcagcactcatatttgcaaaatgggacacttttcaggaacagatatgtgatattatagcagaaattcttgctttt

SEQ ID NO: 28448 - DNA, 201 bp, Homo sapiens
ttgacaaactttaacagtgagggacagttgaaagtcacagagaggcagaggaaaaatatctgaaatcatcactctcagttttttatacaattcattgtttkgatgtgaaaaaatatgttagatactatattattgtgttaccatttctttaaaagaactgatttttctcatgtagcttctcctaacagaatcttaattggt

SEQ ID NO: 28449 - DNA, 201 bp, Homo sapiens
tgaaggacagcagggaggagacgatgcttttcatggtagtccgcagggcatggcgacatccctatgtttgtcttttatttacggtgactttcctaaaatayattacccaaagaattgcatggagaaattactgtgcaacccctttccccaaggggaacaccaaaagggaatctagttcggttttaagagcagctttggaag

SEQ ID NO: 28450 - DNA, 201 bp, Homo sapiens
gcacctggcttacatgctaatgttatggtgaggatgttaggattattactatttttgtaagttatgtggctttgagaattcttccctaaactttagttttmataagctgtcttattttcagcactcatatttgcaaaatgggacacttttcaggaacagatatgtgatattatagcagaaattcttgcttttaatagtttg

SEQ ID NO: 28451 - DNA, 201 bp, Homo sapiens
acgtctcggggtgtggatgcagacatggtctttggcaaggctcagtgcaggctgcagagtccagttctgggttctgtctgagtgggccgctttataagagmggacgaagtttctggcaaaagtggtctttaatgcatggctctactcacttgatgggtgttagagttgagtggggtttggcaggaccacgagcgtgtctgg

SEQ ID NO: 28452 - DNA, 201 bp, Homo sapiens
gggaaaacagtttggcagttcttacaactttaaacatacacccaccatacaacccagcaattgtactcctgggtatttaaccttgagagatgaaaacttaygttcacataaaacctgggtaagatgtttatagcagccctattcatagttgccagaaagtggaaacagcccaggtgtctttaagcagtgaatggacaaatg

SEQ ID NO: 28453 - DNA, 201 bp, Homo sapiens
gggatttgtgggttgggattaggcaagagttcatagacatgagaacagacaacaaattgataaagtggacttcatcaaaatgaaaaatttcctgtgtgaargacacttaaaagaatgaaatgtcaaaggacaaatacagactgagagaaaatattttcaaatcacatacctgacaaagctcttgttgtatctagaataaaa

SEQ ID NO: 28454 - DNA, 201 bp, Homo sapiens
cacgtagaggggtttgcaagctctctgtgtttactggcctccacgttggtgtctgggaagggcaaaacagaagctcagactgctgggtggagaagttttgygccttcccagctcttgcttctttctgtgaagcatgctggcgtcatgtttccatgacagcagttgagttaatgcatttaggggccccctcagcgtccacca

SEQ ID NO: 28455 - DNA, 201 bp, Homo sapiens
ctgctcctgggccatcctgtgctaaggttgcattgctgaacggatgacagggtgggtggtgtatgtccctaaggccaccagagatggtttactcaattcayatgcttcctccacctgggatgaaagcggttaattaatgtttgattctaagaagtcaggtgatgtgattcagattagttatggggttgtgctgaagcgcgg

SEQ ID NO: 28456 - DNA, 201 bp, Homo sapiens
cttcagtggacatgtggcaaagccaggagacatttcagttgtcccaggtgggggatgcagtcagcatctagtggatagaccccagagatgcagttgcaacrtcctacagtggcagaacagccccccaacaaagattctggcccccaaaggccaatagtgttgaggctgaccatccctgtttctcacctggaagtggttgat

SEQ ID NO: 28457 - DNA, 201 bp, Homo sapiens
agtttgagaccagcctggccaagatggagaaaccccatctctactaaaagtacaaaaattagctgggcgtggtggtgtgcgcctgtaatcccagttactcrggagggtgaggcaggagaatcacttgaacccaggaggcggaggttgcagtgagctgagatcatgccactgcactcccgcctaggcaacagagcaagagtc

SEQ ID NO: 28458 - DNA, 201 bp, Homo sapiens
gaggcagtgggagggtaacagcagcaccaggtctgcagtgtagactggcagcaccgggtctgcagtgtagactggcacaaatgtaagtgtgaatttccagktcttgctgagacagcatcagagtgagtcaaaattaacagggttggttggcactgctgatcacaccaaggggctgaagggtgggtactagagtgagttaat

SEQ ID NO: 28459 - DNA, 201 bp, Homo sapiens
ctaggcatggtggcacacacctgtggtcccagctactcgggaggctgaggcaagaggattgcttgagtctaggaattcgaggtggtagtgagctatgatcrtgccactgcactccagcctgggtatcaaagtgaaaccctgtcccttaaaaaaaaaaaaaaaaggtaagcctcaaagttatcctcatccaccagatattta

SEQ ID NO: 28460 - DNA, 201 bp, Homo sapiens
ttcaaagtggaggcagtgggagggtaacagcagcaccaggtctgcagtgtagactggcagcaccgggtctgcagtgtagactggcacaaatgtaagtgtgratttccagttcttgctgagacagcatcagagtgagtcaaaattaacagggttggttggcactgctgatcacaccaaggggctgaagggtgggtactagag

SEQ ID NO: 28461 - DNA, 201 bp, Homo sapiens
tggtggctttggctgtgtcactgggaaggtggagggggtggcctctcggaggctgcacggtgggtttctgagcctggttctccaggccaggtggatgtgayggtgcctggctgtcagcggccaggccggctgtggatgacgcttgcctttttcctcttgatagaccatcatgttgctcccatcgtcagcaatgagttgtcg

SEQ ID NO: 28462 - DNA, 201 bp, Homo sapiens
agaacccattgctgccatagtggtagtaggcagtgggttaaggagtacttgagttattgttattgtcctgtgcatgcaaagcacctcttgtaccaccataytgtggtcaccattgtttatggttattgctgtcattcataacagcatctttgaatcttatacactagacattcaaagtggaggcagtgggagggtaacagc

SEQ ID NO: 28463 - DNA, 201 bp, Homo sapiens
tcctccctagcttctgtctggctgtgtcaggcctgtttcaggtgttaatttctgtgatcatttccctggtaaactcctggatggcaggttctaggttttaytcctgtcgtcctggaacttcacgcttgtctctgatgcagtgcaggcctcagctccgtagggaggttaacaaatgaagctgagttccgcaaggcagcccaa

SEQ ID NO: 28464 - DNA, 201 bp, Homo sapiens
ataccaggtcgagtagggttttctgtctggtctttgtgtgagaaggccctttaatagataaaggcttccttggggaccagtaccatttcaggtgactggtstgcttgtctgtaggttggaaatgattgcttactccttgcaaacagagaacccattgctgccatagtggtagtaggcagtgggttaaggagtacttgagtt

SEQ ID NO: 28465 - DNA, 201 bp, Homo sapiens
ttacttcaaggcaatatttaatttacaaatgatttaagattttaaaaactgttggaactgagttaagatgggtggaaatattaagtacttcagtttttctrtgctgcctgatactttgtactagccagtaaaatatttgttaaagaagtgtttgtccttcctttgaggtattttctttttttttctttttagtggctgagt

SEQ ID NO: 28466 - DNA, 201 bp, Homo sapiens
gagagactgcaggtctataaacaatgggacagggagccaaggcatggccagagtgttacaaaccctggctttctgtgtgataagccactcaccttgaggaygtttttggaatatgcattaacctttcagacctttcgggatagcataaaaaggtacgaaggaaaaacataattgaagccatagatgaatcataggaactca

SEQ ID NO: 28467 - DNA, 201 bp, Homo sapiens
attttcttaggcaagccagtctagaaattttgcggtcagctgtgggcttttactatctgtaaaactcttgcaggagccaagtattactattgtatccagakagaatcctagctaattctagtgtaaagaaatcagtgaggagaaaagtaaaacataattatgcaggaaagtaggcttttatgactcaattaacatatttta

SEQ ID NO: 28468 - DNA, 201 bp, Homo sapiens
tccagttcgttgaatacccgttcctggcaacatacagaactgcgaggtggggttcatctgtgggatcctttgcctgttctgggtacttgaactgaagcacrtgaattccatggcaaaaaaggaccagcggggccatctagtttttatgagtattggagaaaatcttataagagacacactaaagagggcaacattggtcaa

SEQ ID NO: 28469 - DNA, 201 bp, Homo sapiens
ctccaagccagatcttggagattcttgagtgatctggtgtaaagagtttggtgctggctgtggacactgagaaacggtttcacttttcagttcctgtcttsgctgtcatctaagctggggtttgtctgtctgacttcctccattcatttttcttcaagctatagccattggttgacttctctaagtctttgattttgttca

SEQ ID NO: 28470 - DNA, 201 bp, Homo sapiens
tcaaaaaagaaaagaaaagaaaagaaaagaaatagaggctgttttgatggtaggtgattttgttagcagactggtgcatgtccctctgtgatctcggtgcyattgattgaacttgggaggtttctaccccatggctggagccgggtctgttctctcaggcatccccagtgtctgggcctgaaagcacggttctgcagagtg

SEQ ID NO: 28471 - DNA, 201 bp, Homo sapiens
ctcactgcaacctctgcctcccgggttcaagcaattcttctgcctcagcctcctgagtagctgggattacaggtgcacacgaccatacccagctaattggtttttttttttttttttcctatttttaatagagacagggtttcgccatgttggccaggctggtctcaaactcctggcctcaagtgatctgcccgcttcagc

SEQ ID NO: 28472 - DNA, 201 bp, Homo sapiens
gtaaggaagacgcgggcttctcttacgatagattgtgaggctgcagtttctatggtgactggtttctttttcccttattcagcagctaaatgcagcaacaytcaaacacttgtagctgagtttggccttcaggtgggacacttacattctccaggcatttgccttaagcccatatatagagacagagcttaattttttccc

SEQ ID NO: 28473 - DNA, 201 bp, Homo sapiens
aaagatgtgatattttcctggatgtgtttctagaaaatgtatgagctttctggtatcttttatatctgagtatgtgaatattaagcactttaacttcacartgctttccatagagactaaaacctaagacctcaatcaatagtgttctcaaaggagaaagcaatgttagaggccttagggaaattgatctagttccttggg

SEQ ID NO: 28474 - DNA, 201 bp, Homo sapiens
tcactgcaacctctgcctcccgggttcaagcaattcttctgcctcagcctcctgagtagctgggattacaggtgcacacgaccatacccagctaattggtttttttttttttttttcctatttttaatagagacagggtttcgccatgttggccaggctggtctcaaactcctggcctcaagtgatctgcccgcttcagcc

SEQ ID NO: 28475 - DNA, 201 bp, Homo sapiens
cccttccgacggtgcaggagtgcatggagctgaagctggggcctgccatcaagttatgccaccagatcgagagagtcaaagtggctttctacgcccagtaygccaactgagtctgccctcgggaggtggcccattattgctgggatgcggtgttggtaaaggtttccaggactgaaactttgattttccgggatatgttaa

SEQ ID NO: 28476 - DNA, 201 bp, Homo sapiens
ttatactagcattatatgtaactctaaagaattaacctttggctcccccattttttttcttttaggtttttaacaatcacttttttcaagtgactattgaygacctaagacctgaaccaagtaaactgtcaatgctgtgccatgcagattctttggggattttgccagtacagtggtgccttaaaaatggagtcagcctca

SEQ ID NO: 28477 - DNA, 201 bp, Homo sapiens
aaaatagtacctggaggatgactttctccccaaatgtctaataaacagaatttaggcttgtttgttcagtgatgttgaaactatcctttatagctatagcrtatttacaggtgcaagaaaattcacagaatgctgtattttgtgaacagaatcctgatcatactttatatttaagtagaaaaccatattttctaggtggtg

SEQ ID NO: 28478 - DNA, 201 bp, Homo sapiens
aacattctccaaaagttgccttgaagtttggtggtgtggctctgccatgaagacccatgagtgttgattttcttaggcaagccagtctagaaattttgcgktcagctgtgggcttttactatctgtaaaactcttgcaggagccaagtattactattgtatccagagagaatcctagctaattctagtgtaaagaaatcag

SEQ ID NO: 28479 - DNA, 201 bp, Homo sapiens
ataagagctggatgaagggggaaggcccttatcatcagatctcatgagagcttactcactatcaggagaatagcatgggagaaaccgcctgcatgattcarttacgtccccacaacatgtggggattatgggagctataattcaaaatgagatttaggtggggacacagccaaaccatatcagctaatttttagatttttt

SEQ ID NO: 28480 - DNA, 201 bp, Homo sapiens
tcttagaaacatactttcttgaccatagtagcactcattaaatacctgtccaataaatgcgtgaattcatggacatatgtcttcaactccttgaatttaatttttttttttttttttttttttggaggcaatcttgccctgtcacccaggctggagtgcagtggcatgatctcagcttggccccctgcaacctctgcctcc

SEQ ID NO: 28481 - DNA, 201 bp, Homo sapiens
tcatggaggttacagggatccaaggtcatgataactgaggcttgtactgcatctggactcagaacagagcaaatgtgtgcctggtctaagtacttccgtaraatacccagtgtcttggtgtccttctgcagcacagtctctgtcgtctttgacataagtatcgagattatacacacatcactgataagggataaaaggcac

SEQ ID NO: 28482 - DNA, 201 bp, Homo sapiens
tattcctgatcctcagttttctctcagctgttctgctaaaattgcatgttctggtctccagcagttctcttagtgtgaaactcagtggcctttccctgttmaccttctcataaatttgttacatttttcatttgattactccctcagttcccccaatgttagttccctagtcattcactatccggatctctcgattgattg

SEQ ID NO: 28483 - DNA, 201 bp, Homo sapiens
tccctcacttcctacgggtgtctgcttaaaattagaaaaccctggactgggcgtggtggctcatgcctgtaatcccagcagtttgggaggccgaggtgggtggatcacctgaggtcaggagttcgagaccagcctggccaacatggtgaaaccccatctctactaaaaatacaaaaattatctgggcatggtggtgcttgc

SEQ ID NO: 28484 - DNA, 201 bp, Homo sapiens
ccctcacttcctacgggtgtctgcttaaaattagaaaaccctggactgggcgtggtggctcatgcctgtaatcccagcagtttgggaggccgaggtgggtkgatcacctgaggtcaggagttcgagaccagcctggccaacatggtgaaaccccatctctactaaaaatacaaaaattatctgggcatggtggtgcttgcc

SEQ ID NO: 28485 - DNA, 201 bp, Homo sapiens
tgaccacagcttgtcacagcaaggaagggacatatctgaaatgtcactaacatctatgatcctttttttatcctttaaagaagggaaattgttggaacttytttgtgttctttaaaaaaatattgaaaatctcagtgtgtttgaaattctaaatgagctactcagagatttgccttagagtgcagggaattatgcataaga

SEQ ID NO: 28486 - DNA, 201 bp, Homo sapiens
gtttccttagaggaatacagaaatatagctgggagaagacagaagctctctagcttactttgttcatgaccacagcttgtcacagcaaggaagggacatayctgaaatgtcactaacatctatgatcctttttttatcctttaaagaagggaaattgttggaacttttttgtgttctttaaaaaaatattgaaaatctcag

SEQ ID NO: 28487 - DNA, 201 bp, Homo sapiens
tttctagttaatggaaataaaatattgtttccttagaggaatacagaaatatagctgggagaagacagaagctctctagcttactttgttcatgaccacascttgtcacagcaaggaagggacatatctgaaatgtcactaacatctatgatcctttttttatcctttaaagaagggaaattgttggaacttttttgtgtt

SEQ ID NO: 28488 - DNA, 201 bp, Homo sapiens
agtgaggtcatgcggattggtggtgaagtgcgtctcccttccagaaatctgaaaaacagaacagctccctcctcggactcaaacacagccttcgattcaaatgtatgtatgtatgtatgtatgtatgtatgtatgtatgtatgtatgtgtgtatgtgtgtgtgtgtgttttgagacaggatctcacctgttgcccaggttg

SEQ ID NO: 28489 - DNA, 201 bp, Homo sapiens
tgtcacgtgtctgacatttacgagcctccatattactttttcgttcccagcaattcttataaatcgtattccatatctgagatcctacgtgtttgcaaatrttaaattgtacaagtttcactgacaactcatttgtccaccaaaaagatctataaataagaaacagcaattcccaattttctagttaatggaaataaaata

SEQ ID NO: 28490 - DNA, 201 bp, Homo sapiens
gtgaggtcatgcggattggtggtgaagtgcgtctcccttccagaaatctgaaaaacagaacagctccctcctcggactcaaacacagccttcgattcaaatgtatgtatgtatgtatgtatgtatgtatgtatgtatgtatgtatgtgtgtatgtgtgtgtgtgtgttttgagacaggatctcacctgttgcccaggttgg

SEQ ID NO: 28491 - DNA, 201 bp, Homo sapiens
tatgacatatcccaatgtccactcaagcaaaacgccccagtttccataaaagctttttatttttgtcttttgcgaaggactactaggaagggtttctgtcrgtttgtttctgtcatcaaacaatgaagtttattacaggacagactcagtcttttggtcaataatgtctttgttgcctcagttttccagttcactgagtgt

SEQ ID NO: 28492 - DNA, 201 bp, Homo sapiens
tgaggtcatgcggattggtggtgaagtgcgtctcccttccagaaatctgaaaaacagaacagctccctcctcggactcaaacacagccttcgattcaaatgtatgtatgtatgtatgtatgtatgtatgtatgtatgtatgtatgtgtgtatgtgtgtgtgtgtgttttgagacaggatctcacctgttgcccaggttgga

SEQ ID NO: 28493 - DNA, 201 bp, Homo sapiens
caggctacgctttattatttcataattctataataattccccttttccaaagatgaaagggtttatacttaaatggggaaggatatttacctgcaaaagcygtgatcgggactcatttcccgctgatgggtactggggacatggttgtctgacaggaacgttcactttttgagatggagtctcaccctgtcacccaggctg

SEQ ID NO: 28494 - DNA, 201 bp, Homo sapiens
ccatcatttgattaacttatgacatatcccaatgtccactcaagcaaaacgccccagtttccataaaagctttttatttttgtcttttgcgaaggactacyaggaagggtttctgtcggtttgtttctgtcatcaaacaatgaagtttattacaggacagactcagtcttttggtcaataatgtctttgttgcctcagttt

SEQ ID NO: 28495 - DNA, 201 bp, Homo sapiens
gaggtcatgcggattggtggtgaagtgcgtctcccttccagaaatctgaaaaacagaacagctccctcctcggactcaaacacagccttcgattcaaatgtatgtatgtatgtatgtatgtatgtatgtatgtatgtatgtatgtgtgtatgtgtgtgtgtgtgttttgagacaggatctcacctgttgcccaggttggag

SEQ ID NO: 28496 - DNA, 201 bp, Homo sapiens
gatctaggttgcacggtccttatgagaatctaatgcctgatgatctgtcactgtctcccatcacccccagatgggactgtctagttgcaggaaaacaagcycaggattcccactgattctatatcatggtgagttacagtattatttcattatatagtacaatgtaataataatagaaataaagtgcacaataaatgtaat

SEQ ID NO: 28497 - DNA, 201 bp, Homo sapiens
ggacatgcgagcctggatttccagcctctctattcaggtgagtgctggagaatggctgttcttaagtcaggttttatttttagttcccgctccagctctgygtacgcaaatcgcagggtcaggaggcacaccctgggaggcacagtgcatgctcatgcttttggtaacatctgattcactcagccccagacccagcctaaa

SEQ ID NO: 28498 - DNA, 201 bp, Homo sapiens
attcaggtgagtgctggagaatggctgttcttaagtcaggttttatttttagttcccgctccagctctgtgtacgcaaatcgcagggtcaggaggcacacsctgggaggcacagtgcatgctcatgcttttggtaacatctgattcactcagccccagacccagcctaaacaggtcctgagggagattgttagatctgcct

SEQ ID NO: 28499 - DNA, 201 bp, Homo sapiens
tcatgactcactcttcaagtttaacacttgaatcttgaaagccccttggaaaggatgtaagatggtttcattttgtaatagcttctctagtgaatagtttyagagacaagttctggggtcttgaatctgaatactctaagagctaatgggttcatttggtaaaaatgtatgctgttgcttgagaaagagggcagagtttat

SEQ ID NO: 28500 - DNA, 201 bp, Homo sapiens
agagtgtgtgcagctttttcaggtgcccagtgagggagcaaagggaggcagtggcttccggccaggaacggccgaggcctggagagtgctggagaggaccmagccagctgactgtgccgcagctgagctcctcctgccctttctctgcaggacacgaaacaggaggaggaggagagactggttctggagagcaacccgttg

SEQ ID NO: 28501 - DNA, 201 bp, Homo sapiens
tgtaagatggtttcattttgtaatagcttctctagtgaatagttttagagacaagttctggggtcttgaatctgaatactctaagagctaatgggttcatytggtaaaaatgtatgctgttgcttgagaaagagggcagagtttattaatcaattcttccttctccctcagaagacaaatgtggcagcagtcacacacact

SEQ ID NO: 28502 - DNA, 201 bp, Homo sapiens
cagggggcatcatcactgagccaagaactttctcagggactgagagtgtgtgcagctttttcaggtgcccagtgagggagcaaagggaggcagtggcttcyggccaggaacggccgaggcctggagagtgctggagaggacccagccagctgactgtgccgcagctgagctcctcctgccctttctctgcaggacacgaaa

SEQ ID NO: 28503 - DNA, 201 bp, Homo sapiens
ggcagctccaggagatgtcatcactaggggattcccatcagcaggcagagctccattaataaagacgcatttagagacctgggctctgtgaccaatcggcygttcagagcagcgttcctgcttgtgagctaatcagggctaatctttcatattaaaagtattaaggaacatatgacattaaagcgtcacccagtgccgcgg

SEQ ID NO: 28504 - DNA, 201 bp, Homo sapiens
tcacaagcagcatggggcgcaggaagcccctcccttctgcttccgaaatgtaagaagcttctctcttacctaatttttaaaaatcatagattttgtctacygtaagttttataacttgctttttattgatgaagcacggttggagtattacagtgcactggagaactacaaaatgtctgtagtttttggaaagctctgctt

SEQ ID NO: 28505 - DNA, 201 bp, Homo sapiens
gtagtgtctttatggaggatgggaagcatggctgtttttattggagttatctaacaaatagcaccctagtagaggtagcagtaaaacatagtgactgttayttgttatgtacctgttatgtgcaagacacagtgcctgctccccaaggcactcacaatccagattcccatggctcactttttattccacttcgacatacct

SEQ ID NO: 28506 - DNA, 201 bp, Homo sapiens
aacttcattcagaataaacactaataaaagcttaaataagtctaatggttgtggttcaacagtctctcagggaagcttgctgcaaagtttaattgcctaasgggttttatttcctttcattttcttctcccctctgctgttttcctccctccctccaggtttaaaatgtgttttcctggccacagttaagccttagtacgt

SEQ ID NO: 28507 - DNA, 201 bp, Homo sapiens
tgccacatgcaataatccaaatgcattctggttatgaaataaagcaggcagaacttacagtcagcctcagaatgacttattgacagctacaggtgcagcatttttttttttaacattgtaacccttttgcaaagtttttattgaaatgttttatgatatagtgtttttgatttgtctatttgaagaatcatagaagacaaa

SEQ ID NO: 28508 - DNA, 201 bp, Homo sapiens
ttctagggccatgcagatgttctagggacatgctgatgtcccaggggtatgcagatgttctagggccatgcctccattgcagggccaccatgcctccattscagggccaccatgcctccattccagggccatgcagatgttctagggccatgctgatgtctcagggccatgcagatgttcaagagccatgccttcattcca

SEQ ID NO: 28509 - DNA, 201 bp, Homo sapiens
gggccaccatgcctccattccagggccatgcagatgttctagggccatgctgatgtctcagggccatgcagatgttcaagagccatgccttcattccagagccaccatgcctccattccagggccaagtagatgttctagcgccatgctgatgtcccagggccatgctgatgttctagagccgtgcctccattccagggcc

SEQ ID NO: 28510 - DNA, 201 bp, Homo sapiens
catgcagatgttcaagagccatgccttcattccagagccaccatgcctccattccagggccaagtagatgttctagcgccatgctgatgtcccagggccaygctgatgttctagagccgtgcctccattccagggccatgcagatgttctagggccatgcagatgttctagaaccatgcctcccttccatggccatacaga

SEQ ID NO: 28511 - DNA, 201 bp, Homo sapiens
tgcctccattccagggccatgcagatgttctagggccatgttgaggtcacagggccatgcagatgttccagggccatgttgatgtcacagggccatgcagatgttctagggccatggtgatgtcacagggccatgcagatgttctaggcccatgcagatgttctagggccatgttgatgtcactgggccatgcagatgttc

SEQ ID NO: 28512 - DNA, 201 bp, Homo sapiens
catagagtgggtgggagcctcaggccccatccttgttgccgacggttttaccatcacattcatgactcactcttcaagtttaacacttgaatcttgaaagscccttggaaaggatgtaagatggtttcattttgtaatagcttctctagtgaatagttttagagacaagttctggggtcttgaatctgaatactctaagag

SEQ ID NO: 28513 - DNA, 201 bp, Homo sapiens
ttaacggttgtggaaattccttctttacagggtaccgcagctccaccaaaatcacatgctctttatatacgtatgtgtgtgtatgtgtatatatgcaagayagactaaataacagtaatttaacagatatttattgagcattcataggctcaattctggacaatgttcccattgtggagcttttattttaatggagggaga

SEQ ID NO: 28514 - DNA, 201 bp, Homo sapiens
aggctacgctttattatttcataattctataataattccccttttccaaagatgaaagggtttatacttaaatggggaaggatatttacctgcaaaagccrtgatcgggactcatttcccgctgatgggtactggggacatggttgtctgacaggaacgttcactttttgagatggagtctcaccctgtcacccaggctgg

SEQ ID NO: 28515 - DNA, 201 bp, Homo sapiens
caggagtttaagaccagcctggccaacatggtgaaatgctgtctctattaaaaatacaaaaattagccaggcgtggtggcacatgcctgtaatccctactygggaggctgaggcaggagagttgcttgaacccgggaggcggaggttgcagtgagccaagatcatgccactgcactccatcctgggtgagggagcgagact

SEQ ID NO: 28516 - DNA, 201 bp, Homo sapiens
ccgacaattagatgctataatactttaaaataattacactgggagccaggatgcattaaaataattttaaattgggattcaagaaccacattgttagtgartgccagtcttagagtttaccagtgtggtttgttgtcctctataggtcaggtttattcaggaagaaagcagtaagatgagaggtgagactaagagaagaat

SEQ ID NO: 28517 - DNA, 201 bp, Homo sapiens
tgattattatttctactgttatttatctttgatttaagagatcactgtgaatagctttggatgccatactttactgggaattctgacttaccttatttggmaaatacagatcatttccaaaatgtacattcagttgaaggataaatagttgatgaaataggtttaaaaaaactcaaaggacattaaaagcctcattttatt

SEQ ID NO: 28518 - DNA, 201 bp, Homo sapiens
caatacgagactgttgggataagagtctggggcatataggctgctgttaaagtagtacttatgtatatttttatttatttatttttttgttttatttatatttttttttttttggagagggagtctcgctctgtcacccaggctggagtgcagtagcgtgatctcggctcactgcaacctccaactcccgggttcgagcga

SEQ ID NO: 28519 - DNA, 201 bp, Homo sapiens
ggcaaaggaggagaaaggcacgtcttacatggtggcaggcaagagagcttgtgcagggcaacttccctttataaaaccatcagatcttgtgagacttactyactatcaggataccagtatgaggagaactgcccccatgattcaatggtctccacctggccccacccttgacacatggggattatcataattttaggtgag

SEQ ID NO: 28520 - DNA, 201 bp, Homo sapiens
ggaggttgcagtgaactgagatcatgccactgcactccagcctgggagacaagagcaaaactccgtctcccccccgcaaaaaaaaaaaaaaaaaaaaaaaraaaagaaaagaaaagaaaaaagagtcagggcttgaaagtgagaggatccaaactgcatcctgtcctgcccacagggtgttctgtccaccttaagtttgac

SEQ ID NO: 28521 - DNA, 201 bp, Homo sapiens
cagaacagccaaatgagaactttcttgattccctctcttcttgcatggtggttgtattagtcagttctcatgctgctaataaagacatatccaagactggrtaatatatatagaaaaaaagggtttaatggactcacaattccacatagctggggaagcctcacaattatggcagaaggcaaaggaggagaaaggcacgtc

SEQ ID NO: 28522 - DNA, 201 bp, Homo sapiens
agtaaggattaaaaaactacctatcaggtactaggctaattatctgggtgacaaaattatctgtacatcaaattactctgacaccctgacacatatgtatctcctccttctccccacaaaaaaatctaataaaattcttcaaaagatgtggaaatgttagtaacattgctttcgacaatttttgaatcaaagtggtttatg

SEQ ID NO: 28523 - DNA, 201 bp, Homo sapiens
atcactttgcacaaggggataagagcaaaaattatacagtgtgtattataggatgcatatagtcaaatgtcaggctcaaaattaggccagtagcttctgcygcttggacgttaatcttgaagcaaggaagaatgagggaatttcgggggggtgagggcgacagagttaaggtgttcagtgcttttatttttgtcctacaca

SEQ ID NO: 28524 - DNA, 201 bp, Homo sapiens
gtaaggattaaaaaactacctatcaggtactaggctaattatctgggtgacaaaattatctgtacatcaaattactctgacaccctgacacatatgtatctcctccttctccccacaaaaaaatctaataaaattcttcaaaagatgtggaaatgttagtaacattgctttcgacaatttttgaatcaaagtggtttatgt

SEQ ID NO: 28525 - DNA, 201 bp, Homo sapiens
atggtgcaaagcaaattctcatctcccttttctcagcatttctgtgttttttctcatctgcccttgttgactaaagaaaaactcatgcttctaagatctayagattcacaataaaattaccttttaacataaagacatttttataatgatctgttagtccttgaagattgtaatatcccagcaggtcatggtggctcatat

SEQ ID NO: 28526 - DNA, 201 bp, Homo sapiens
aaactcccaggctcaagccatcctcctgtctcagcctcccaagtagctagaaccacaggcatgcaccagcacacctagctaatgtattagtttgttctcaygctgttagggaagacatacctgagactgggtgatttataaaggaaagaggtttaattgactcacagttcagcaaagctggggaggcctcaggaaacttaa

SEQ ID NO: 28527 - DNA, 201 bp, Homo sapiens
tgtgcgggtcctgcctgtgcctctctttgtggcgttccagcctgtgtatgcttccctaagtgggatgctgagtcctgttgacaggatgggaagtgggcacygtcctcattgttcagagagggccctttccctactctgaagagggaagaaagctggatgtggtctgggcaccacactggctttgcttttcctcagagtgga

SEQ ID NO: 28528 - DNA, 201 bp, Homo sapiens
ccagccagataaatgtagactcataagcttggtaaagggaaatgaagaacttggtacccattatttagaatgggatttgtttagggtcagaaacactttcscaggtgataaataactgacttttccatcagttcttatttaatagatgccttaatgggatatatttggggtgggagaaggcataattgtaacctttttgag

SEQ ID NO: 28529 - DNA, 201 bp, Homo sapiens
caccttctctctggacatgcgagcctggatttccagcctctctattcaggtgagtgctggagaatggctgttcttaagtcaggttttatttttagttcccrctccagctctgtgtacgcaaatcgcagggtcaggaggcacaccctgggaggcacagtgcatgctcatgcttttggtaacatctgattcactcagccccag

SEQ ID NO: 28530 - DNA, 201 bp, Homo sapiens
cctgtcttggaaaataattagtctgagtccagccagataaatgtagactcataagcttggtaaagggaaatgaagaacttggtacccattatttagaatgkgatttgtttagggtcagaaacactttcccaggtgataaataactgacttttccatcagttcttatttaatagatgccttaatgggatatatttggggtgg

SEQ ID NO: 28531 - DNA, 201 bp, Homo sapiens
tacgtattttgatgaaaagaattaagatgaagtagactgggtatagtgatattttatcttttaatctgttaggtgatttctgtgactagaacataaattaygtgaaaatctagatttttaactaaatagttaattttgctgaaaggaaggccaaatagataaagataaaatcatttatgacttacgtctttatctgattac

SEQ ID NO: 28532 - DNA, 201 bp, Homo sapiens
taaacaagtagaatccatactgaccagatgcagcttagccaaagtcaagagattgaacatggtcttgtgttgtttgtcggggatttttcgcttgatcttarccaaaaggccgagaagcaatgtgtcaggatttttctataaaatgataaaggtcttcagtggaacattcagctttgcctatgaactttttgcaatcctcaa

SEQ ID NO: 28533 - DNA, 201 bp, Homo sapiens
gaaacttactaggaaggatcaaggttgactttgccaccatgacctagccacgaacacgatgggaagaaggctgtggagtggggctgtgggcagtgcctccyggggccctgaatgaagcaagcttggagagggagctggtgtgtgggtctgagtggcttctttaatgtcagcatgcgcctatgaggtgctgacgtagcctta

SEQ ID NO: 28534 - DNA, 201 bp, Homo sapiens
tacctgttatgtgcaagacacagtgcctgctccccaaggcactcacaatccagattcccatggctcactttttattccacttcgacatacctggggagtgwcccagacctacacactgagagaaatcgctgtctgtgtctatagttctcagcgtctgcaggggccccacgtggcaggtgcagtttcgagtcgcagcccctc

SEQ ID NO: 28535 - DNA, 201 bp, Homo sapiens
gccgccatgggtaagttccacccttcctcacctggcttcagatagtgtgttatagtaacgatggtttacctgtgtttagtactttaatttttccaaaatayttcatctgagcttatgaaatctgaagtgctgttaggcatcagaggacattatcttttgggagcctaaactttcaccccttctgattttgctcatctgtct

SEQ ID NO: 28536 - DNA, 201 bp, Homo sapiens
tatgtgtcaagttgctacttagagacacattttcagtctcagttttagtatttacttaagcatggtgatgaaagttaagaaaaacattgaaatcaaacctmcatggagaaaactgctgtgattttaagttgattggatactttgctgctgtgttgaagtgttttttttgttttgttttgtttttctttctcctttgtcttg

SEQ ID NO: 28537 - DNA, 201 bp, Homo sapiens
ttatgataagtgagtttgcactcatagaatctgtgacaatatggggaaaagaaactgggggatttggataaaaaaacataagaaatctcttagagatttayttcatgtagatttccaccaacagagagcactgtcaatgaagatactaggggcatttacacacttcagtgaatcacagttggactgtgtttttcctttgct

SEQ ID NO: 28538 - DNA, 201 bp, Homo sapiens
taaggattaaaaaactacctatcaggtactaggctaattatctgggtgacaaaattatctgtacatcaaattactctgacaccctgacacatatgtatctcctccttctccccacaaaaaaatctaataaaattcttcaaaagatgtggaaatgttagtaacattgctttcgacaatttttgaatcaaagtggtttatgtt

SEQ ID NO: 28539 - DNA, 201 bp, Homo sapiens
acctaagacaggtcaactttattgtgtaatagaaacaaaaaaattaaacaatcttattattttgttgttgttgtggatacgagagaggaatagggagaacttttttttttttttttttcaaggaagacctggtttcccccagtggtctggtggcccaaattagagtgacatgaagggaagcactgggggcaaaagtccctc

SEQ ID NO: 28540 - DNA, 201 bp, Homo sapiens
gacttttgtgatacttgacagtttgggaaaactgtcttataaacctatctggagctgttgatgttgttggtgttttattgagtgtgaatttatttcctttmgtggatataagtttagtcagggtaaccatttgtgagatagttttggtaatgtacatgtattttacagtattgtctgtttcagctgtattttcagatttat

SEQ ID NO: 28541 - DNA, 201 bp, Homo sapiens
agacatgagggtttcctttgtccattcgcctccccactgtcccctcttccatttcaacataccctgtttattagaccttacttttgtgctgtgctgtgtatgtgtgtgtgtgtgtgtgtgtgtgtcttccataagttttcatttcaaattcttaaaaattttcttgtatattccttctagaatttctaaaaagtaaagatc

SEQ ID NO: 28542 - DNA, 201 bp, Homo sapiens
gacatgagggtttcctttgtccattcgcctccccactgtcccctcttccatttcaacataccctgtttattagaccttacttttgtgctgtgctgtgtatgtgtgtgtgtgtgtgtgtgtgtgtcttccataagttttcatttcaaattcttaaaaattttcttgtatattccttctagaatttctaaaaagtaaagatct

SEQ ID NO: 28543 - DNA, 201 bp, Homo sapiens
cgtgccattccacaccatttggagatcgagcagaacaggtttgattgatgccgggtcattttgttttagatcattttcacatttatgatctctgggattayggaagaggtctgtgattcttgtgatttcaagagaggggatttaaaaatggatagggaggtttgtcacagattcatgagacctgggagtgagaaggaaagc

SEQ ID NO: 28544 - DNA, 201 bp, Homo sapiens
tctagaagttgctagcattgcacagagcatcctggagtagggacaatgttttctcttttcctctttgtcatttgtcatatcattttctctttccttcctcttttttttccccccttttcttggcttcatcttctgtatcattttttttttagttgctatttgtggcatatattatatttgtagatgattattattaattct

SEQ ID NO: 28545 - DNA, 201 bp, Homo sapiens
aggttgatgactgggtcagctggtacttgtaaatacagaagcacatcagcagcaaggttggaaatcaaggatccttctatgattgaacgaccttgagaagyagctcaaatctcagtcgagttctctccttatctaggctgcttggagcctgcctggcacctgcatgatccggggagcagtcaaaaatctaggcagaattta

SEQ ID NO: 28546 - DNA, 201 bp, Homo sapiens
ttctcttatttcagttcaatggaagagacacaggaggtttcttaactatattttgtaatgagtgagaatctacacgtttaatttggagggtgtgagaacaycattttcttagtttgcaaaggctactgtcacaaattcccatggactggatgacttagaatgacagaaatttgttctctcatgcttctggagactagtgtg

SEQ ID NO: 28547 - DNA, 201 bp, Homo sapiens
ttgcctctttgagagttggcttcccatagggacatcctagacactggaagatttttgcatcggcatcttcagtccatcaaatactgtccttgaaatcccastgtcctcagttggtgatggacaggggacagacatttgtggtctcatgctgagggtcttaggaaggcaagaggtggataaaagagtcagggattgagggcc

SEQ ID NO: 28548 - DNA, 201 bp, Homo sapiens
ttgctagcattgcacagagcatcctggagtagggacaatgttttctcttttcctctttgtcatttgtcatatcattttctctttccttcctcttttttttycccccttttcttggcttcatcttctgtatcattttttttttagttgctatttgtggcatatattatatttgtagatgattattattaattcttttaaagc

SEQ ID NO: 28549 - DNA, 201 bp, Homo sapiens
aggctgggaaacttactaggaaggatcaaggttgactttgccaccatgacctagccacgaacacgatgggaagaaggctgtggagtggggctgtgggcagygcctcccggggccctgaatgaagcaagcttggagagggagctggtgtgtgggtctgagtggcttctttaatgtcagcatgcgcctatgaggtgctgacgt

SEQ ID NO: 28550 - DNA, 201 bp, Homo sapiens
gaactctgtcatctttttttcttaatagtaagagcaggtgcttccatttatcattcaaggtgtactgttgcctccttttttctttagcaaagtcagtgttaaaaaaggcttcccctgagaagtcaaaggctgctacctgacatctggttgagaaggctcggttctcttgtgagctgggaggagtttcagtggattaagcac

SEQ ID NO: 28551 - DNA, 201 bp, Homo sapiens
aactctgtcatctttttttcttaatagtaagagcaggtgcttccatttatcattcaaggtgtactgttgcctccttttttctttagcaaagtcagtgttaaaaaaggcttcccctgagaagtcaaaggctgctacctgacatctggttgagaaggctcggttctcttgtgagctgggaggagtttcagtggattaagcact

SEQ ID NO: 28552 - DNA, 201 bp, Homo sapiens
caagattgtaaaaacctgctgttctaggagttgaaatgtattattattatggctatggtagaactcttctcttctttgtcatgcagacttaaagtataaarcagtctttattccagcttgttaaaagtgggaatgccgtaaaccaacacagtgagcctggagcaatgacaagctacacaaaaattaaacatatttgtattt

SEQ ID NO: 28553 - DNA, 201 bp, Homo sapiens
tctaatgccttttaccagaggagcggatagccccatccacagatccagagggtgtgtggctactaccaagggaattgccagccattgcatagtaaagcagmataattgatttatggcactcaatcctccaaaaagttgtaaatttctttggtgtctaccaagtaggtggcaacagcaaaggctaacctcagggggatttgc

SEQ ID NO: 28554 - DNA, 201 bp, Homo sapiens
ctgttatgaatttagattgtgagtacggaaagtctttgttctcttagaaacggaaatgttgattgctgtttagttttattttccttcatggtaattggccyctcattaacctgacctctgtggcaataccgtatttatgtataagagtcttactttcttctctgggtgtctatggttgtattgttacaatggtggtgattg

SEQ ID NO: 28555 - DNA, 201 bp, Homo sapiens
tgtttgcttgattaataacttgtaaatcttaaacatgtgctacgtgagctacatttgtatttgcacttggtgtgtctgggcctgttttagggttcagatasagcccctgtgaactagaagtctttctaaggatgatttgggcacgcgtggatttagggagccagtttctacatccaccaggcctgtctcttccatgagact

SEQ ID NO: 28556 - DNA, 201 bp, Homo sapiens
tgatgctgaggaagctcatcagaagtgtagggggaggagaccacaaggtcaggtgtctcatcagcgatacctgacttctctcttaaccgaatctgaatcartggtcctcaactcaggggccaggggcatgtgcccttcagtggacatgtggcaaagccaggagacatttcagttgtcccaggtgggggatgcagtcagcat

SEQ ID NO: 28557 - DNA, 201 bp, Homo sapiens
gcatctcttatccaaaatgcctgggaccagacgtgtctctgggttcagattttggaatatttgcagtacatttgtctgttgagcatctgaaaacctgaaaycgaaaaggctccaatgagcatctcatgtgagcatcttgttggccctcaaaaagtttcaggtttggggcttgggattttcagagttgggattccagtttgt

SEQ ID NO: 28558 - DNA, 201 bp, Homo sapiens
ggaagaccctccatgggcttcaagatgcttctctccacactgtgtccttctgtcctcattgcagactgtgggacacctaagatggggcttgtgtgggctgsagaacaggaagtctgtgctctgcctccagctccacaccttgccaacccagtggtccaagatctcttcatctccctgggtcctcccaattgtggaatgggg

SEQ ID NO: 28559 - DNA, 201 bp, Homo sapiens
tttttttttttttttttgagacggagtctggctctgtcactcaggtcggagtgcaatggcacaatctcggctcactgcaagctccatctcccgggttcacrccattctcctgcctcagcctcccaagtagctgggactacaggcacctgccaccatgcccggctaattttttgtatttttagtagagacgggatttcactg

SEQ ID NO: 28560 - DNA, 201 bp, Homo sapiens
ataccttcaaagtttcctggataacttgcatttcctggagaatgcatctgcattggcacctccccttaacacagctccagtgggctcctaaacttctattmttgaaggcatctgaaagggcattgtcccatcaggccataggcacaaggggaaactgaaacccaaagtggattgggggcctctgtatgccctgattcatcc

SEQ ID NO: 28561 - DNA, 201 bp, Homo sapiens
ttaggcaggaagaaaggaaggcagtaaaggtgggaggaatggtgtgcactaggatccagaggcagcaagagtgtgtgtgtgtgtgtgtgtgtgtgtgtgcrcgcacgtgggtttgacagggagcgtgttgacctgtctgactcgggagggcttgggtgggaaggaaaggccggtggacaggagcccagaaggctcactggg

SEQ ID NO: 28562 - DNA, 201 bp, Homo sapiens
cctgggatgctggggcacacgcggagtcattcctgtgagaaccagcctggcctgtgttaaactcttgtgccttggaaatccagatctttaaaattttatgyatttattaacatcgccattggaccccaaaaggttgtgtgtgtgtttctttttctctctctgatttatgggaaggggacaatgaagccagagctcgaaggt

SEQ ID NO: 28563 - DNA, 201 bp, Homo sapiens; identical to SEQ ID NO: 3435

SEQ ID NO: 28564 - DNA, 201 bp, Homo sapiens
tagttaggcaggaagaaaggaaggcagtaaaggtgggaggaatggtgtgcactaggatccagaggcagcaagagtgtgtgtgtgtgtgtgtgtgtgtgtgygcgcgcacgtgggtttgacagggagcgtgttgacctgtctgactcgggagggcttgggtgggaaggaaaggccggtggacaggagcccagaaggctcact

SEQ ID NO: 28565 - DNA, 201 bp, Homo sapiens
ggagtcattcctgtgagaaccagcctggcctgtgttaaactcttgtgccttggaaatccagatctttaaaattttatgtatttattaacatcgccattggrccccaaaaggttgtgtgtgtgtttctttttctctctctgatttatgggaaggggacaatgaagccagagctcgaaggttgagggctgggctgtagcaaga

SEQ ID NO: 28566 - DNA, 201 bp, Homo sapiens
tcaatttcctaactttgttttctaccacatggagaaaatctccctttaatttttcttaactctttctaacatcaaagctccttcccctcttccccaccccygagttttagcattctgggggagatgtccattctcccttctcatcccctctatagggaccttctccccaactccatggttttgggatatctgagccctagt

SEQ ID NO: 28567 - DNA, 201 bp, Homo sapiens
agacagttcatcagtggttctctatctgggctgcatattggaatcatcctggtagttttaaaacccctcctatagaacaagaagtgactgcagatgagcayggagaatatttttgaggtgataaaaatattctcaaattggattgtggtgacgattggacaactttgcgaatttatgaaaagtcatcgcattgcatacttg

SEQ ID NO: 28568 - DNA, 201 bp, Homo sapiens
ccaccccagccaccctgccacagaaactggttctggacagcagctgagtgtagtggctaaggaagtgggcctgagagtcacagaaatctgagttcaactcytggccttctcacttctagctgcgtggccttgggcaagttacttaccctctctgaaccttggatgtcttgcctatgagacggaaataattcctctccccat

SEQ ID NO: 28569 - DNA, 201 bp, Homo sapiens
ttacgtaggacagggcttgggtctggcttctttgtcctaaacagtttactgggatggggaaagacagatcttttaaccctttcctggggagaggcctaagrgtgtggaggctggaccccggacccagggtcctgcgggttcccattctgctgagaacagtgagggtgtgatgaggatggtctccgtaggggtaagaatcct

SEQ ID NO: 28570 - DNA, 201 bp, Homo sapiens
aaggacagagatacctggacagggatagagcacctgccaagagccaccaccacagagcacaaaggagggagcagtgatggggtggccttcgagctgggtgraaggggcattcctagtggggtgcacagcaggggcgaaggcgcggaggcccatgggaactgtggctctggtacagaacgggtcctgtgtggctccattgtg

SEQ ID NO: 28571 - DNA, 201 bp, Homo sapiens
agtgctggcctgagcccactgtaaacaggtgcacttagagcttaggcggtgggccaggcagaggctggcttgcctgatcttagggctttgggttttgtttrgagtgtgttcattcattcaatatttcttgagcacctaccatgcaccgggccccattctaggaatgaggctacagtggagaccaggacagagaagccctca

SEQ ID NO: 28572 - DNA, 201 bp, Homo sapiens
cagcttcagaatgattaatgctaaaagtgattggtctaatggtggtgggaggtgaaggggcctgggggtactgagtagaggtgtttatgaggctcccactrtgagggggagggctgcttaacttctgcgtgtcattgtcttctctgaaactgggaggccaactaagaaaaacagatgtcaatggcccagttagtgggattt

SEQ ID NO: 28573 - DNA, 201 bp, Homo sapiens
ggtgaacagcaggagcgaaggcttggagggcaggatgagccccgtcccagtgggagcagccttggagagaagattggtcctccccactacgtggttggaawactgaggccaggaagagcgatctgagctccgggtcaggtcagggtctcctgctgctggcctgcctgcctgcctgccttcccggggcaggctcctgggatg

SEQ ID NO: 28574 - DNA, 201 bp, Homo sapiens
tttttgttgctggtaattctaaaagggaaaccaacacagcataataagaataaccagcactggggtggtgtgagccacctcctgtctctcccagatgatgrcattcgccttcctgcgctcccttgcccctgcagtgtattcgccaacagcagcctgggcagtcctgttacaatccgagtcctccatggttcgcggcattcc

SEQ ID NO: 28575 - DNA, 201 bp, Homo sapiens
tacaatccgagtcctccatggttcgcggcattcctcccagagaagccagccaggccctgggccgccatcgctcctcctcactgccctccctgaagggaacrttcctccccagggactgccagggcctgcccctcagacccctcaggctttcactcaaatgtcaccttcagagcgacgtcctccctggcaaccttattcaca

SEQ ID NO: 28576 - DNA, 201 bp, Homo sapiens
atagatacaagggagcataaccttgtccctaccctgcaggatggcacaggggaagactgctgagcctgagatcagctagagtcccctaggagagaactcarcagctgccacccagggcccaggctgagctgtcagagaatgggccatctcaggggtagggggctttctgaagggggcaggccttggggacctgagtgcttc

SEQ ID NO: 28577 - DNA, 201 bp, Homo sapiens
caagctgtttggctggtgtttctgagtgcagagagacactggggttggaagtgtggctgagccactgcctagctgtgaggatttggatgagttaacctctytgtggttctttcccttatttattttgcacatatttactgttctagatgctgggggtacagtggtgcctgagacagacgtggcttctgctctcctggagct

SEQ ID NO: 28578 - DNA, 201 bp, Homo sapiens
cagcctggccaacatggtgaatccccgtgtctactaaaaatacaaaaattagctgggtgtggatgcacacctgtagtcccagctactcgggaaactgaggygggagaatcgcttgaacctgggaggcagaggttgcagtgagcagagatcgtgccactgcactccagcctggggacagagtgagaccctgttaaaaaaaaa

SEQ ID NO: 28579 - DNA, 201 bp, Homo sapiens
cagagtcgatgagatgattttggaaggcacgcagataggatctggtgggatcttcataacgactctctaggctgccctgggacatacacaggacttctagwctcctgtaaagagtctgaatttggggaccatagtggtgccagttcccatctatttttgagtgtttccagtgatggctccatagcggcagagcatccagtg

SEQ ID NO: 28580 - DNA, 201 bp, Homo sapiens
gagaaccgctcccctctgcagccccaccttctccttgacacgtgcccatggtcccctgggtttctaggtgtgtttgttttgccagctgcgttcttggaagyttggggaggagggcactaccccagcctgggctggtgacttcagcacactggggagtttgggcagatctgcccttccctttatttgccctgttggcttttg

SEQ ID NO: 28581 - DNA, 201 bp, Homo sapiens
tggaagagccctcaatgatcctctgattccagctttcccctgccagcctctccatgggtcctccatggacagatgctcattctccatcacacaactcttgrcccagacagctcccatcaggacgggctttcctccctggagcctgggctccaccccagaactgtcagctcttcagctctggtctagaatgacagactcttc

SEQ ID NO: 28582 - DNA, 201 bp, Homo sapiens
tgacagactcttcaggttggaagggacctcagaggcctgtcattgccagattcttccagagcatccttgcagggggtgtcttctctctgcttggattcctyctactctggggagctcaccactcccttcgcactgttgctgcccagagagcttccgttgctgcccagagagctgcctgcctgggtcaggatcctgcctgtc

SEQ ID NO: 28583 - DNA, 201 bp, Homo sapiens
tgtcctgggccactttctctgagcccagctggggactcagcatagtccctctccctacagacgcccagaagtgtgagctgatctgccagtcggcggacacrggggacgtggtgttcatgaaccaggtggttcacgatgggacacgctgcagctaccgggacccatacagcgtctgtgcgcgtggcgagtgtgtggtgggtg

SEQ ID NO: 28584 - DNA, 201 bp, Homo sapiens
tctttatgaaacatggatgaccacttaaatgtcccttttcgtgccattctaaatgtccctcttcttgccattccactgtttgaaagcctccagggtttggrtgagtggttctgagccctggatgcacgtctgaatcacccagcagcttccagaatgcactgactcctgagccccacccatcaggttttgatttcatcggtc

SEQ ID NO: 28585 - DNA, 201 bp, Homo sapiens
tctgcccagctgtttgtctgcaggtctttttcacctttaaaatcatcctctatcagtccccttttggggggtaaggacttttccccttaggatgttcaacyactggtattctttttttttcttgaggacttctttccacttacaggcaggacatctgggcatgtgtggtagtccatttttatgttgctataaggaaatatc

SEQ ID NO: 28586 - DNA, 201 bp, Homo sapiens
tatggcccttgtggcatgctcgggaccatcctaggtgccttatgtatattgctttctcagagcagccctacaagatggttgtggttataatcctgaagcamaatgatgttaagtaagtgtcccaagattacatgatctgagagtggtggagccagcatttgaactcaggaactctctggctctagggtctctgcatttacc

SEQ ID NO: 28587 - DNA, 201 bp, Homo sapiens; identical to SEQ ID NO: 3443

SEQ ID NO: 28588 - DNA, 201 bp, Homo sapiens; identical to SEQ ID NO: 3444

SEQ ID NO: 28589 - DNA, 201 bp, Homo sapiens
tgtggagagggcatccagcagcggcaggtggtgtgcaggaccaacgccaacagcctcgggcattgcgagggggataggccagacactgtccaggtctgcarcctgcctgcctgtggaggtgagccagaggggatggggaggccaggtccagtcccttgggccaaagtcccaaatactagaattgcttcttcctgctcacag

SEQ ID NO: 28590 - DNA, 201 bp, Homo sapiens
aggactgggcaaccaaagaagactccctggaggagaggagattatgctgagcctcaaccatgggtagaggttagttaggcaggaagaaaggaaggcagtaraggtgggaggaatggtgtgcactaggatccagaggcagcaagagtgtgtgtgtgtgtgtgtgtgtgtgtgtgcgcgcacgtgggtttgacagggagcgtg

SEQ ID NO: 28591 - DNA, 201 bp, Homo sapiens
aattgcttcttcctgctcacaggaaatcaccagaactccacggtgagggccgatgtctgggaacttgggacgccagaggggcagtgggtgccacaatctgracccctacatcccattaacaagatatcatcaagtaagtacagtctatggaccctaccctgctccccagacctttcagtggccctggtgttgcagcatggg

SEQ ID NO: 28592 - DNA, 201 bp, Homo sapiens
cagtgtgcagcagggctgagggcgaatggcgaagggccagggttctcagatgcgcccacacgtggagtcccctggagggcttgtgaaagcacagcgctgarccccagcctgagtttctgatgcaatagggctgggtggtgctggaggatgtgcattgccagcaagcttccaggtgacgctgctgctgcgtgtggggacatc

SEQ ID NO: 28593 - DNA, 201 bp, Homo sapiens
ctatttttttctgctttaatgctggaaatcagttggtcagccctgcctacccaaaaatttcttgtctgaatgactgaagccccaaatgtggttttacacacacacacacacacacacacacacacacacgtacagacatccacacacatgtacaggcccatgtgcacacagacacatgcacacatgcaaatagacataagc

SEQ ID NO: 28594 - DNA, 201 bp, Homo sapiens
tggcccagactctgagctaggcccccatgtccccttttcctaacaaagccttcctccgtggaagagagcttggacacacaatacttgccgataaaagcaaycattgtagccccagggaagggggcgggggtaaagaaacggggagaggttttgctctctgcttgccaaggctggctccagggaaggccgcagcccactcca

SEQ ID NO: 28595 - DNA, 201 bp, Homo sapiens
tcagttggtcagccctgcctacccaaaaatttcttgtctgaatgactgaagccccaaatgtggttttacacacacacacacacacacacacacacacacaygtacagacatccacacacatgtacaggcccatgtgcacacagacacatgcacacatgcaaatagacataagccagtgtgtacatgtacagatatacaaac

SEQ ID NO: 28596 - DNA, 201 bp, Homo sapiens
caaagcttcagagtgagatggagggaaagtcattaagagttaaggctctggagccttcttgacagaccccagcctcctgtcctgccttcttagctttcccygtgagtctccatgcaccctcactccaccgccccagcagagtgtattctatcttcattcaggctatagcatagatgactgacagcgctcaagttgttaccc

SEQ ID NO: 28597 - DNA, 201 bp, Homo sapiens
cagtgtgtacatgtacagatatacaaacacacacgtatacacagacacacagagacactgcatacatgtagagacacaaagacacatgtacatgcatgcacaggcactcacatagacacagacatgcacacacatgtatatcacatgtagagcaaatctcagccttccaggacaacagaggccccagaaacctccttccca

SEQ ID NO: 28598 - DNA, 201 bp, Homo sapiens
gtttgtgataatgcttacttaagcagggtcaagtggtatttctgtctttatgaccgtgaaattcccttaaggggatttctgacaacctcttttcccagatrctgctgcttttaaggaaagctgagaaggcttctttctgcatctgttggctttcagatgtcttcagcttacactgatctgtatcctaatgctggggttcca

SEQ ID NO: 28599 - DNA, 201 bp, Homo sapiens
attcacctccaaatctggggccaccttgccctctccccaccttctggcccagactctgagctaggcccccatgtccccttttcctaacaaagccttcctcsgtggaagagagcttggacacacaatacttgccgataaaagcaatcattgtagccccagggaagggggcgggggtaaagaaacggggagaggttttgctct

SEQ ID NO: 28600 - DNA, 201 bp, Homo sapiens
gtgcacccccagccaccccgactaccggcacagggagactggagggctgcactgtagcccctcctgcctgggaagatgagcattgcctcaccggcccactygcaacaccctgttggtcctcagcatagccctggggtgctggaaggggctaattattgctcagccccattggaggggagaggagatggcaagaatcctcat

SEQ ID NO: 28601 - DNA, 201 bp, Homo sapiens
ggctgactggagttcttgccgtccctcagggggccctccctccttgaactgtgccacagtctggggtggggagaaggggccctggggcccatctccaggcyttcctgggctgcccaggctggtgagccaggtgctgcagccagtcacctcacctttcaggcaagctcctccctgagtttggggcccaggagctccaagaga

SEQ ID NO: 28602 - DNA, 201 bp, Homo sapiens
gagttcttgccgtccctcagggggccctccctccttgaactgtgccacagtctggggtggggagaaggggccctggggcccatctccaggccttcctgggytgcccaggctggtgagccaggtgctgcagccagtcacctcacctttcaggcaagctcctccctgagtttggggcccaggagctccaagagacattttccc

SEQ ID NO: 28603 - DNA, 201 bp, Homo sapiens
ggcatcagacagatctaaaggtgtagccaagactggactgataattttcttttcctctctccttcctcatttttttttaaacctgcggcactttctgcttygaattcctggtatctttgagttccttgactttcctctctacctccaatctgaccagacttgctgtggaaaagaaccagatatcagtccttcacactttag

SEQ ID NO: 28604 - DNA, 201 bp, Homo sapiens
tcgtctctgcatgagtgtttgctggagcgtttgtcgtctgtgtgagtcgtccctttgtgtgtcctctccgtgcttgtgtattatctctttgcatgtttctygtctccatgcatgcatattatctttttaattaatagctttattgagatataattcacataccacgcaattcgcccatttaaaatatgcaattcagtggtt

SEQ ID NO: 28605 - DNA, 201 bp, Homo sapiens
ataaatggggcctattttcccttgggagatgttacactttgtctcacctttgattgttggggacaaggttggtggctctgagaaagtccaggccttgggtygggagggccagggcggctcaggacagtcatgtggagtcttcatggcctttatcatttaaatcccatcagtagcaagtagcttaaggtgtgagaagaagca

SEQ ID NO: 28606 - DNA, 201 bp, Homo sapiens
tctatttgtttgaagacacttcatacaaacagaatcatgtaatatgtgaccttttgcatctggcttctttcacttggcatattttcaagattcatccatcwtgtagcatttaccagtacttcattcctttctacggcaaaataatatttcattgtatggctatatatatatagtttgtttgtccatttatccattgatggg

SEQ ID NO: 28607 - DNA, 201 bp, Homo sapiens
gagagtcagaggagcaaaaagggacggggggaagggcagaagtgagacggagaggaagagggtcaggaaagagggaagtaatagcagctctcacacacacrgaggcccttagagtttacaggacatgtctcattcgatcctcccagcaccctcatggagaaggtctcatcctcagtttacaaatgaggatacagagattca

SEQ ID NO: 28608 - DNA, 201 bp, Homo sapiens
agtcaaacccagagttctgttccaaagtttgagatgaccagtggagatccagtctctatcaaggaggctgttggataatcacaaaggaatttcaggaggarccagggctggggatataaactggaagtcatttgcagtcatgcagtacctaaagccatggtcctggggacatgccagggagagctgatgatgggaggagct

SEQ ID NO: 28609 - DNA, 201 bp, Homo sapiens
agaaggtctcatcctcagtttacaaatgaggatacagagattcagagaggttctgtgatcaaatgagatgttcctgggtgcccagtgagggagtgggggaygctgggcagtgggaccaccagcttaggatgctcacgacttctggatccctgtgtgtggcaggagctctcaagctggtgcagatcccagcaggtgccaggc

SEQ ID NO: 28610 - DNA, 201 bp, Homo sapiens
ggtggagaagcttccctgggacagcaggatagagggaaagtgggtgagagagtatgggtgtttgcaagagaattattgtgcaactagacctagatgtccarggtggtgagaagggaagcgaggatgtaaggatcacaccttggaggtcccgatgaagtttaataataactggagccaagtgctagggttaggtgagcaggg

SEQ ID NO: 28611 - DNA, 201 bp, Homo sapiens
gagattcagagaggttctgtgatcaaatgagatgttcctgggtgcccagtgagggagtgggggacgctgggcagtgggaccaccagcttaggatgctcackacttctggatccctgtgtgtggcaggagctctcaagctggtgcagatcccagcaggtgccaggcacatccagattgaggcactggagaagtccccccacc

SEQ ID NO: 28612 - DNA, 201 bp, Homo sapiens
gccagccttggaaggagaaaggagaggcagtctggcccactcctcagctggcttcactgaagctactatcttgaaatagcccttctgggcatttggcaaasgtaggctggtccaagcggcagcaggcgaggggacttaggatccccctttcccagggcctgcagctgtctcctgagagccaagccacttgcaactgtctgg

SEQ ID NO: 28613 - DNA, 201 bp, Homo sapiens
tcatcttcatgttataagagagacaatggaggccagagaagcgagggattgggcctgggacgcccacagagataggatgagtggctcccggaacccaggckttctgctctgggccagttctcacccctttgctactcattgcttcaaagatttagcagtgccctcatggcaggaaaatggctcttgcccatgagttgacct

SEQ ID NO: 28614 - DNA, 201 bp, Homo sapiens
gccctctgacttgggggagctgggagaccagaggacaagattctagtacaagtggaattgtactaactggagtaatgggcagagacccccttttcattttrttttaaatttatgctgcatgggtaacccattccatggtttacatttcagaaggtctcaaaggggacctagtaaagagtcccctttctacccctgtaccct

SEQ ID NO: 28615 - DNA, 201 bp, Homo sapiens
ggtccttgctcattgtctctgtacctgcccatgtctgacatgtctcccagtccttggggatctcttctgtgctcctcttggagaactctttgttggctccrggtacccttgcctcccagtttacatgcacatacatgcaatttgagaatagatgtactttaatgtacacatgcacacatacgtactcatttcaaaacaatt

SEQ ID NO: 28616 - DNA, 201 bp, Homo sapiens
caagattctagtacaagtggaattgtactaactggagtaatgggcagagacccccttttcattttattttaaatttatgctgcatgggtaacccattccayggtttacatttcagaaggtctcaaaggggacctagtaaagagtcccctttctacccctgtaccctgggggcggttttcttccctaagggcaactactgtt

SEQ ID NO: 28617 - DNA, 201 bp, Homo sapiens
atccggggcaggccgagtgcgggcttgcttgcctgtttgtcgggtgagttccctgaaaggttagagttttccggggagcctggtggggagagcgaagcagkggcggcccaggagctgaactctgaagttggcacaggttgtgtgattatacaggtgtgaggtgcacagtggccttcagtgaaaacgtgtgaatatgtgtgt

SEQ ID NO: 28618 - DNA, 201 bp, Homo sapiens
tctcttctgtgctcctcttggagaactctttgttggctccaggtacccttgcctcccagtttacatgcacatacatgcaatttgagaatagatgtactttwatgtacacatgcacacatacgtactcatttcaaaacaatttggcctcaattacctgctataatatctgggacctcatcctgatagtagacagctgtgggt

SEQ ID NO: 28619 - DNA, 201 bp, Homo sapiens
gtttgagttgaatttctaatccttgcaaccaggaacctgatggatagtcatccttcaggacccacagatggcacctcctttgggacacgtgtccacacttsgtcatagcaccgggcaggacgttggcagccctcggctcttgggcctattttttccatttgtccctgcccataggaggcacacagtaggtataaagtcaaa

SEQ ID NO: 28620 - DNA, 201 bp, Homo sapiens
ttgattaaagccagaggcttcagctcagctctttgggtctagttttcagcacacagagaggtgcctcagaggcctggccaggtgctcagagcctgcctagsagccggctaaaggcttttggggaatcttcctcaggctggggaccttcacatctccagctgtggctgaggctgtggaggggattccagccccctgctccac

SEQ ID NO: 28621 - DNA, 201 bp, Homo sapiens
agcaggagtgggcagaacctgacggggacctgcacaatgaaggtaggctgtaggtaggggcctgtgtgctgcttctctccctacctctggagtgtttcccrgtcacttctgtccttaagctgtccatgtctggcctcagtcttcttatctgtaaaatgggactgggccacatagacctgctgtactggcagagaaacccca

SEQ ID NO: 28622 - DNA, 201 bp, Homo sapiens
ccatcttgcatggtaggcttttctccttctttcagtacagagtgagtcctcaaactgtctatgaatcaaccattagtcttggccatatcgtgtccctctarggtgggcaaaatgacctcctaatccagctgcaagctgagtatctaatcccagtctgggtaccctcgcctttggctgcaaatggagcccttccagatatag

SEQ ID NO: 28623 - DNA, 201 bp, Homo sapiens
gctaggggccagaggagtcacttgtgtcctgaactgtggtccctgggactccagaggtctctgaggagctcaccattgcttctcaaggctatttctgaggsaaggcagaaggtagaatgcctgcagtgagttcttcccccctaaaattgactcaacccttgggagccacaggaagggagttattagggcacctgcagggag

SEQ ID NO: 28624 - DNA, 201 bp, Homo sapiens
ggggcaggagaagactttcttggaaacctgtgacttgtacttttagttgaaggccagtcgtggggctgagcccagtgtggggagaagcatttctaggcgtrcctgtctccatttcacagcttgattaaagccagaggcttcagctcagctctttgggtctagttttcagcacacagagaggtgcctcagaggcctggccag

SEQ ID NO: 28625 - DNA, 201 bp, Homo sapiens
gctgcctgcagtgtgagcttagagcggtgccagcctcaagggtaagtgagggagaaacccacctgagccctgctcaccaggctgtgtgtccacccagaggrctttccctgccaggccagtggccacacgtttttccagctcttaagtctagggctttgttcctttgcactatagcaccactcagcaaagaggagataaaaa

SEQ ID NO: 28626 - DNA, 201 bp, Homo sapiens
ggggatacagtgcctgctgcccctctccaatggaacccacaaggtcatgccggccaaagcctgtgccggggaccggcctgaggcccgacggccctgtctcygagtgccctgcccagcccagtggaggctgggagcctggtcccaggtgacttgtcctcaggaggtgggaggggcttggggaggaggtgggtctgagggatt

SEQ ID NO: 28627 - DNA, 201 bp, Homo sapiens
gacagttgtcctaggcctcaaacattctgaaacccaaacccactctctggctcctgcctgcagctgtctggggatagaaagtgtcctctgggatgaagtgyccccttggtctcacctcctctcctttcaccctgtttccaggtgggtgacggaggagtggggtgcctgcagccggagctgtgggaagctgggggtgcagac

SEQ ID NO: 28628 - DNA, 201 bp, Homo sapiens
tttatctatagaagattggacaaaaatcatggtctgttcatacaatacagtactatacaacaagaaaaatgaacaggcctgaactgtacttaccaaaatarataaacttctgttatagagaatacatttaggtgagaaaaagtacttcagtatgaagtaaaaaagcacttccaatggatgtcatttccttaatgtttagag

SEQ ID NO: 28629 - DNA, 201 bp, Homo sapiens
gctgggagaccagaggacaagattctagtacaagtggaattgtactaactggagtaatgggcagagacccccttttcattttattttaaatttatgctgcrtgggtaacccattccatggtttacatttcagaaggtctcaaaggggacctagtaaagagtcccctttctacccctgtaccctgggggcggttttcttccc

SEQ ID NO: 28630 - DNA, 201 bp, Homo sapiens
acaatgatgtttattgcaacagcaaaacattaggacgtatctcaaatgtttatctatagaagattggacaaaaatcatggtctgttcatacaatacagtaytatacaacaagaaaaatgaacaggcctgaactgtacttaccaaaatagataaacttctgttatagagaatacatttaggtgagaaaaagtacttcagtat

SEQ ID NO: 28631 - DNA, 201 bp, Homo sapiens
tcttctttcaaaagcaaatgggagaaatatcgctgaattctttttctcagcaaggaacatccctgagaaagagaatgcgtccctgggggtaggcctctaamatggccgcttcggggggcagccgtcttttatggtcgaagctgtagggatgaaataagcctcagtctcccgtagcgctcccaggcttattaggaagaggaa

SEQ ID NO: 28632 - DNA, 201 bp, Homo sapiens
gaaagggaagagcattcctaggtgcagtggctgcccttgggcctggcacacagcaggtatccagcctgagtttgtcctatggcagctggtctgaatccaaycccctaccataccccagccatgctgggcacaacctcatcctagctttcacaggttctgctccgaccctaaggccttctcttcggcccctcccctcccagt

SEQ ID NO: 28633 - DNA, 201 bp, Homo sapiens
tggtagaggccagggattccactaaacatcttagaatgcacagaacagctcccccaactgagatcatccacatcaaattgtccactgagaccccctgacckatggtattagttccaattgccacacacaggaattttcaaagcaaacccactgggcagagaatgatgtgctgggaatcttggtgtgagagatatgtggtag

SEQ ID NO: 28634 - DNA, 201 bp, Homo sapiens; identical to SEQ ID NO: 3438

SEQ ID NO: 28635 - DNA, 201 bp, Homo sapiens; identical to SEQ ID NO: 3439

SEQ ID NO: 28636 - DNA, 201 bp, Homo sapiens
atttatgctgcatgggtaacccattccatggtttacatttcagaaggtctcaaaggggacctagtaaagagtcccctttctacccctgtaccctgggggcrgttttcttccctaagggcaactactgttaataatttcttgtgcacatagatggctgttaaaggaaagccatgttcacagagtgtatcagtcagcttttgc

SEQ ID NO: 28637 - DNA, 201 bp, Homo sapiens
cacaggcccttacattattctcattataatcatacttaaacaccaagccactaaatgaggtgacacccttgtgcttgtaacagttatctaactatgaagcyaggctcgattaaaaatgagaataccacaataagttaataaatttaaattaaggccattaatataatatgagtgatgttttgtttcgtttttgctgaaact

SEQ ID NO: 28638 - DNA, 201 bp, Homo sapiens
tatgagtgatgttttgtttcgtttttgctgaaactaaattggctgtcaaaaaatggacatgtccagagaggcaaatccacagacagagagagaatagatcmgtggctgccaggggctggggaaggaaagaggcatgacggctaatgggtatcaggtttctttttggggcgatgaaaatgttctggaattagacagtggcaa

SEQ ID NO: 28639 - DNA, 201 bp, Homo sapiens
taaaattgactcaacccttgggagccacaggaagggagttattagggcacctgcagggaggctgcctggtgtctgggcgtcatggtcagctttgtgtcccrtagaccattttacaaccctaccttcaagtctgtctactgtgtgaccctagcaagttacctaagatttctgagccctcattttcctcatcagtaaagcaga

SEQ ID NO: 28640 - DNA, 201 bp, Homo sapiens
gagttttccggggagcctggtggggagagcgaagcaggggcggcccaggagctgaactctgaagttggcacaggttgtgtgattatacaggtgtgaggtgyacagtggccttcagtgaaaacgtgtgaatatgtgtgtgtgagtgtgtgcatgcacgtgcatgcacgtgtaggggtgtgtgtacccaacaggatatgtaga

SEQ ID NO: 28641 - DNA, 201 bp, Homo sapiens
cttccttagaaagaccaggggcaggagaagactttcttggaaacctgtgacttgtacttttagttgaaggccagtcgtggggctgagcccagtgtggggaraagcatttctaggcgtgcctgtctccatttcacagcttgattaaagccagaggcttcagctcagctctttgggtctagttttcagcacacagagaggtgc

SEQ ID NO: 28642 - DNA, 201 bp, Homo sapiens
accagtgcaggaggctacacaccagaggcactcaagacttatggttgggcgaatgaaactggatgtgacaagtgctggtcctaggcccgctggtcaacttyacagtgtcacaaagctcctttggccaagaggagatgaggaggccatgggtgaaatctggttatgactggaccgcatccttgtgccagctccctatgggac

SEQ ID NO: 28643 - DNA, 201 bp, Homo sapiens
ctctgaagttggcacaggttgtgtgattatacaggtgtgaggtgcacagtggccttcagtgaaaacgtgtgaatatgtgtgtgtgagtgtgtgcatgcacrtgcatgcacgtgtaggggtgtgtgtacccaacaggatatgtagaggcccaggacaggtggcagccctggcgatgaagggagaggctctgtccattgtcat

SEQ ID NO: 28644 - DNA, 201 bp, Homo sapiens
gcatccgttgaagctccagttgctctccaagtatcactcataagagaagctgtggcaccagagccagagggttctgcaggcctaaggtggggagggcaggkctggcggggcctctgagcactggcgtggatttcagggcacccttctctccaccagggttgagaagagggctgagtctcccctgggctccattttttaaag

SEQ ID NO: 28645 - DNA, 201 bp, Homo sapiens
aataagttgtgagttactcactgactgggacattaaggggtagaaatttatggatttttaaaatctctgcctctgttccaggccctgtgctgggctgaggrcaccaagatggagataagccaacaggccgctgggagaggtgtggcatctgcaatcacagcagtgccaaaagtccagtacttttctggtggtctagcgata

SEQ ID NO: 28646 - DNA, 201 bp, Homo sapiens
ctcctatttaatccatggtcctactctctggagccccgttcccacccccagttccctcctgaggacactaatggggtatgtgctcctgcagcccgagctcsggctctccgtggggctgcccatgccagggccgccagccgggctggggctcagggcggctgctttacaagcaattgagataaaattcaccattttaaccat

SEQ ID NO: 28647 - DNA, 201 bp, Homo sapiens
gcccataccccccttcctagagcatgggccagggcttgtggaatagggattaacccagcagacgagaccatgaggagttctgtccatggtgccctcagcaytggctggtggcagggttaccttggatgggctttgttcctggtgtcaccctcaccagctggggggctcctggaggacaggctctgtggcctattggtgtca

SEQ ID NO: 28648 - DNA, 201 bp, Homo sapiens
ctactttctatctttctaaataggatttgcctattcagaacgtttcatggaatgaaatcatgtggtatgtgcctttggtgcctggcttctttcactcagcrtgttttcaaggctcatccatgggatcgcctgtcttgatgcttctctttatgatggagcactagtccagtgtatgggcatgccacatttattcattcatct

SEQ ID NO: 28649 - DNA, 201 bp, Homo sapiens
tcatgtggtatgtgcctttggtgcctggcttctttcactcagcatgttttcaaggctcatccatgggatcgcctgtcttgatgcttctctttatgatggarcactagtccagtgtatgggcatgccacatttattcattcatctggtggacactggagttgtttctatcttttggctactatgaaatgctgctgtgaacat

SEQ ID NO: 28650 - DNA, 201 bp, Homo sapiens
gctggagcccccccacagcatccaaggctgatgctggctggtcctccccaattccccagaaagtctgcagagagagaattatggctgtgccccgatagacwgtggtcatggctgggggaggcctgagtttacattccgggctgttgtcatgaagctgctgcgtgacctagggcgagtggggtaacctctccagccttcctg

SEQ ID NO: 28651 - DNA, 201 bp, Homo sapiens
tcaaccattagtcttggccatatcgtgtccctctaaggtgggcaaaatgacctcctaatccagctgcaagctgagtatctaatcccagtctgggtaccctygcctttggctgcaaatggagcccttccagatatagtcactggtgggagtgaggtcctgagtgaggggctgctcaaggcagcccgtcctccctggaagaga

SEQ ID NO: 28652 - DNA, 201 bp, Homo sapiens
acgctgggcagtgggaccaccagcttaggatgctcacgacttctggatccctgtgtgtggcaggagctctcaagctggtgcagatcccagcaggtgccagrcacatccagattgaggcactggagaagtccccccaccgcattggtgagtgctggggtgctgggaggggacagcagggccccaggccctgccctctgactt

SEQ ID NO: 28653 - DNA, 201 bp, Homo sapiens
tttcagaaggtctcaaaggggacctagtaaagagtcccctttctacccctgtaccctgggggcggttttcttccctaagggcaactactgttaataatttmttgtgcacatagatggctgttaaaggaaagccatgttcacagagtgtatcagtcagcttttgctgcctaacacaccactccaaaacttagtggcttcaaa

SEQ ID NO: 28654 - DNA, 201 bp, Homo sapiens
tattggtgggtgggaggcatcagacagatctaaaggtgtagccaagactggactgataattttcttttcctctctccttcctcatttttttttaaacctgyggcactttctgctttgaattcctggtatctttgagttccttgactttcctctctacctccaatctgaccagacttgctgtggaaaagaaccagatatcag

SEQ ID NO: 28655 - DNA, 201 bp, Homo sapiens
acgtgtaagtggcagcagcacggtgggtgggactggcagctgtgccgtgagctccagggaattctgtggctgtgggaggatttgcccagcttggcctggtyccagtgtcctgggaggtgtcagaggagctggcctgccactgcggcatggcctcctgcagttaccagtagagggaggccctaacctgagttaggaggagcc

SEQ ID NO: 28656 - DNA, 201 bp, Homo sapiens
ttttcccaggactgttagacgaattccaggaagttagctaagcccccaacttccttttttctaagaagcacagtaagtgtttatatatgctctggaacctyctttttaggatatctatagcccacataaagaaggaaacatttaattgttaggaccagaaaggactctctttctccctgactgttgctccattttgcaaac

SEQ ID NO: 28657 - DNA, 201 bp, Homo sapiens
tggattgcaacaggggagtttgctagagtgatacacaaaatattaaagaacccaggcacagaccagacacagtgcatgcaggtggtagtagggaatggggycccagaggttccctcctgagccagagattaaccgtttagattgtggaaaggcccatggagttctaggctcagggcaatggctcttcaccattggtatcag

SEQ ID NO: 28658 - DNA, 201 bp, Homo sapiens
ttcgatcctcccagcaccctcatggagaaggtctcatcctcagtttacaaatgaggatacagagattcagagaggttctgtgatcaaatgagatgttcctrggtgcccagtgagggagtgggggacgctgggcagtgggaccaccagcttaggatgctcacgacttctggatccctgtgtgtggcaggagctctcaagctg

SEQ ID NO: 28659 - DNA, 201 bp, Homo sapiens
cactgttcaggagcttcctggcagaggagtgcaaagggctgcattctttgatgagctgtgcagggcactggcccacagtcctgggcctgtgagaaaaaggrattatctagagcagtgctcttcaaacttgcccatgcctgccagtcagctggggatcttgttcaattgcagatccttattcaggaggcctggggtggggcc

SEQ ID NO: 28660 - DNA, 201 bp, Homo sapiens
gctgtggaaggttgagcgttagacagtcagggtagcgaaggggagatagcagtagcgctgcttagttatttgggtgctctgtggctcagaccctggaggcyaccttcgggaaactgccttgacgaaattgtcttgggttttcttttaaatactcatttgatgtgaacattgagaacatcatgccaagtaaaacaagccaag

SEQ ID NO: 28661 - DNA, 201 bp, Homo sapiens
tgctgtaaatgcactgggctcagcaagacctcagtagcctttcacccagcatcttccagggtgtggggcctgcagaggtcatgaccttgggaactgtggcygagtggtcatcccagataactctctccagctggcagaggctctctgcttcctggtgtttctttgaacctttggcttgttgtggcagcgctgatggtgctg

SEQ ID NO: 28662 - DNA, 201 bp, Homo sapiens
ccaagcatgagttgcctggggtctagcctgaccctggctggagtggggccagactccttgggttgattgggaggggctagggttcccacttccatccagarcagctgcaagttagaagcacctggtggtaggtcacaccctagattgtccagtgtgtgggtgaaggagacaggcacccccaaggattccagtgtgcagcag

SEQ ID NO: 28663 - DNA, 201 bp, Homo sapiens
tcgacctcctgggctcaagtgatcctcctgcctcagcctcccaagtagctgggactacaggcatggctgactgtgcccagctaatttttattttttttttwaaaaaatagacaaggtctcactacgttgctcagactggtcttgaattcctgagctcaaacaatcctcctgcctcagcctcccaaagtgctggtattatag

SEQ ID NO: 28664 - DNA, 201 bp, Homo sapiens
atctatggccaggtgattttcaacaagtgtaccaaggccattcaatggggaaagaatagtctcttcaaaatatggtgccgggacacctggatgtctacatrcaaaagaatgaagttctaccccttcctcacaccatacacaaatattaactcaaaatagatcaaagacctagatataagagcttaaaccatacaactctta

SEQ ID NO: 28665 - DNA, 201 bp, Homo sapiens
tgagggcactttgctggtgatttccaggggctgctggagggtgaatgaggggttagtgtttaataggcgaggagtttcagttgggaaagaagaaaatgttytggaaacagatggtggtaatgattgtacaacaatgggaatgtgcttaatgccactgaaccatagacttaaaaatagttaagatgggctgggcgcggtggc

SEQ ID NO: 28666 - DNA, 201 bp, Homo sapiens
ggaagattgcttgagcccacgaggtcaaggctccagtgagctatgaccataccatgccactgcactccagcctgagtgacagagcaagagcttgtctcacaaaaaaaaaaaaaaaagaaaagaaataagccagacatccagacatgtaaggacaaacactccatgagggcactttgctggtgatttccaggggctgctgga

SEQ ID NO: 28667 - DNA, 201 bp, Homo sapiens
accatagacttaaaaatagttaagatgggctgggcgcggtggctcacgcctgtaatcccaccactttgggaagccaaggcaggcagattgcctggggtcasgagttcaagaccagtctggccaacatggtgaaaccccgtctctactaaaaatgcaaaaattagccgggtgtggtggctggcgtatgcctgtaatctcagc

SEQ ID NO: 28668 - DNA, 201 bp, Homo sapiens
agctgttagctgctgtttgtaatgattcatcctgggaggatatgccgtgtttgtctcgtagttctgtgtggccccatgacccttgtgtctcagtggtcacwtgctccagtgtgggaagtggggtcctgcaaattcctctccttccagctaggtaaggctgtggtcagcatctaaaaggtgacccagtcacactgggcaacg

SEQ ID NO: 28669 - DNA, 201 bp, Homo sapiens
acctttgagccctgcaagcagctgtggtgcagccatcctgacaacccgtacttctgcaagaccaagaaggggcccccgctggatgggactgagtgtgcacmcggcaaggtacctgtggggtgtgcagcaggagtggccttcctggggtgcagggcatccatcactggcatgggggtggatcccagagtgaaccctgacccc

SEQ ID NO: 28670 - DNA, 201 bp, Homo sapiens
tcaaaagacattatcaaggaaaggaaaagaccacctgcagaatgggggaaaatacttgcaagtcatatatttgatgagggtcagtatccgaaccattcttrttaactgccttctagagccaggcagtgtggatgctgcagtgagcagaacagacagacagacagccagccctgccctcccatcagaactgaggtctatgaa

SEQ ID NO: 28671 - DNA, 201 bp, Homo sapiens
ctttgttggggcagcccaggatcccttgagaggcaggggtgggggactgatgttgtctccatttgatgtgtccttgcttatgactcagtttctccttgaaratctccagtgtgtggaagcccgttttgggcagggcctttgggatgaggctgggggtgctagagccatatccgggcagagcttctaccctaaaagagctca

SEQ ID NO: 28672 - DNA, 201 bp, Homo sapiens
tgggttatggagacacgaccatacaggcaacacaactttcagtgcttctgggctccaggcccaggccaggatgctgacctctacctcttctctgcctgatygtcaggagtccagagacatggctcagcctgccagcccccagccatggtccagcccctaattgggattccctggcttgcggctacatgctcttctgagcac

SEQ ID NO: 28673 - DNA, 201 bp, Homo sapiens
ttcacctccaaatctggggccaccttgccctctccccaccttctggcccagactctgagctaggcccccatgtccccttttcctaacaaagccttcctccrtggaagagagcttggacacacaatacttgccgataaaagcaatcattgtagccccagggaagggggcgggggtaaagaaacggggagaggttttgctctc

SEQ ID NO: 28674 - DNA, 201 bp, Homo sapiens
ggcctattttttccatttgtccctgcccataggaggcacacagtaggtataaagtcaaagtgctctgcatggatgcatggatgctcagtataaggtttgaygttgacattttaacaagcacaccagaacttttgcagacagttgagtgttacctgacaaaatggtgacagggaagcctcaaatttgttccaataatgccat

SEQ ID NO: 28675 - DNA, 201 bp, Homo sapiens
agtgttacctgacaaaatggtgacagggaagcctcaaatttgttccaataatgccatttgtccctgggaacatttcttggcctcctgattgggcctgtttwtgaagcacagaaggcaaccatcttggtttggctccaaaatgatgttttctgtttgatccacagaaacagctagaaggggcaaagaaaaggttggctgctg

SEQ ID NO: 28676 - DNA, 201 bp, Homo sapiens
agactctttgtagactcgacctcatttatttaagtctccccataaccctgtgagaggtctgagtagcctcaatgtccttacatagaaactggcgtgcagaracaggctgtaacttgctagtctgccctctggtaggccgtggggctgggatctgagcaccactgtgtccactccagagctcaccctcttccccaggcctgg

SEQ ID NO: 28677 - DNA, 201 bp, Homo sapiens
tccagagacatggctcagcctgccagcccccagccatggtccagcccctaattgggattccctggcttgcggctacatgctcttctgagcacaaggatgaycttgggattatttaggggagagactttggggagaggagagagctatgcctggtggagggctcatggccaggcctctgaacctgttgcagagccggcctca

SEQ ID NO: 28678 - DNA, 201 bp, Homo sapiens
ctcctttcaccctgtttccaggtgggtgacggaggagtggggtgcctgcagccggagctgtgggaagctgggggtgcagacacgggggatacagtgcctgmtgcccctctccaatggaacccacaaggtcatgccggccaaagcctgtgccggggaccggcctgaggcccgacggccctgtctccgagtgccctgcccagc

SEQ ID NO: 28679 - DNA, 201 bp, Homo sapiens
gcagccggagctgtgggaagctgggggtgcagacacgggggatacagtgcctgctgcccctctccaatggaacccacaaggtcatgccggccaaagcctgygccggggaccggcctgaggcccgacggccctgtctccgagtgccctgcccagcccagtggaggctgggagcctggtcccaggtgacttgtcctcaggagg

SEQ ID NO: 28680 - DNA, 201 bp, Homo sapiens
tgggttttcttttgtttcctacagtggaacagtttcaagctgggtttgatggaagcctagaacctgagacagcacagctgaccaaggggtgtcggtggaartaaagcccttgtgatagaaattccagaacaagttcagacccaagaatgcactctccttgggaggtgatggggtgattggctgagaggtggcctgctctgc

SEQ ID NO: 28681 - DNA, 201 bp, Homo sapiens
tcgtgcagcccacagtcctgtgagggaaatgtattaggccatcaacccacagccaagcactgacagactgcagtcggagctgggtggggagtagtgggtcratgtggtggaggatggagggcggtcagagggcttctctgaggaggtgttgctcaagctgagaccagagggacaagccacaggaagagaccaagtcaggaa

SEQ ID NO: 28682 - DNA, 201 bp, Homo sapiens
tggctgaagcctgacaccggctgctctgaagtctgcccattcatgaactggggcagctgccagttctgggcactgcggaaagtggcttgggactggggctyggtgatgcacgcggcttctgctgcccacagtttcgtgcttacagcctggctgcctccttggctggcccagaaggggtatgccagcaaagcgtacatctcc

SEQ ID NO: 28683 - DNA, 201 bp, Homo sapiens
tgctgtggaaggttgagcgttagacagtcagggtagcgaaggggagatagcagtagcgctgcttagttatttgggtgctctgtggctcagaccctggaggycaccttcgggaaactgccttgacgaaattgtcttgggttttcttttaaatactcatttgatgtgaacattgagaacatcatgccaagtaaaacaagccaa

SEQ ID NO: 28684 - DNA, 201 bp, Homo sapiens
gaccagagggacaagccacaggaagagaccaagtcaggaacaattttacaacgttccagaagccaacaggacagtggggctggagctgactgggagggatrggggctgcgagataacactggggaggcaggcgggggtccatggctacgggctttgcaaggggtttgcatatattctaagagcaatgggaaaccagggaag

SEQ ID NO: 28685 - DNA, 201 bp, Homo sapiens
gaccatgtggcagaaagacccattttcttgggaaaaattcaagccagctgtagaaatttgcataagtagaggagccaaatgttaatagccaagacaatggkgaagatgtgtcgagggagtttcagaggtcttcatggcagcccctcccatcacaggcctggaggcctaggagggaaaatggtttcatgggctaggccaagg

SEQ ID NO: 28686 - DNA, 201 bp, Homo sapiens
ccaggccagtggccacacgtttttccagctcttaagtctagggctttgttcctttgcactatagcaccactcagcaaagaggagataaaaacaaatggtgrcaccaagccctgtgtgttccctgttacctgtcctcagatccccattacctgagcacccgtgtgggtagcagcgtagaggcggctcgggtctctgcagagg

SEQ ID NO: 28687 - DNA, 201 bp, Homo sapiens
agcacccgtgtgggtagcagcgtagaggcggctcgggtctctgcagaggttcccatggatgcatccatgtgcatcacccacgtgtggacggggtctgcackcactcgctcccatgtgtaaaataaacaatcacaatggattgtgcaggggcagggccctctgccccctgtgctgaagcaggttatctcctgctctctgttc

SEQ ID NO: 28688 - DNA, 201 bp, Homo sapiens
tggagttgagtaaacttgaagcaggtgaggggctctggctgctttccctgcagtgccctgggtgcctgcactcatcacaccctcttttctctccatcactrccctttgttcttggacaaagagccagtccagtctggtgaccccattcccttgccatgcagttcaggacctttgagccctgcaagcagctgtggtgcagcc

SEQ ID NO: 28689 - DNA, 201 bp, Homo sapiens
gctaggctctttctcagtgccatggagaaaggaggggtccctggaggctgccggtacttggagttgagtaaacttgaagcaggtgaggggctctggctgcyttccctgcagtgccctgggtgcctgcactcatcacaccctcttttctctccatcactgccctttgttcttggacaaagagccagtccagtctggtgaccc

SEQ ID NO: 28690 - DNA, 201 bp, Homo sapiens
ggcctggggtggggcccaagactctgcatttctcacaagctcccaggtgctgctgctgctccaaggtcctggagtatgtctcctggaggagtgcccactgytgcctccccagggccggggtactgtagggcagacattatgccagtggcaactggaacggtacacagggatgttagggcgagtggcctgtggttccctgag

SEQ ID NO: 28691 - DNA, 201 bp, Homo sapiens
aactgaggcgggagaatcgcttgaacctgggaggcagaggttgcagtgagcagagatcgtgccactgcactccagcctggggacagagtgagaccctgttaaaaaaaaaaaaaaaaaaaaaaacaaagaaaaaaacaaaacttcaagcttttgatgatctgagcagctctgttctccaaggtgctggaggacagccagtca

SEQ ID NO: 28692 - DNA, 201 bp, Homo sapiens
ctacagacgcccagaagtgtgagctgatctgccagtcggcggacacgggggacgtggtgttcatgaaccaggtggttcacgatgggacacgctgcagctaycgggacccatacagcgtctgtgcgcgtggcgagtgtgtggtgggtgcacccccagccaccccgactaccggcacagggagactggagggctgcactgtag

SEQ ID NO: 28693 - DNA, 201 bp, Homo sapiens
actcccactggggaggggaggagtttgggaaggaagccctgctgctcgttggactatggtcatttcttgtggtgggcattggcattgttccttgtggtggrgtgttggcagggagctgcttcccctcagtgggtgctggtctttggtcttgctactcaattggatccagatatgggtgccaggaaggcccatggctgaagc

SEQ ID NO: 28694 - DNA, 201 bp, Homo sapiens
aagaaaaaatagataaattggacttcatcaagattgaaaacttaagtgcatcaaaagacattatcaaggaaaggaaaagaccacctgcagaatgggggaaratacttgcaagtcatatatttgatgagggtcagtatccgaaccattcttgttaactgccttctagagccaggcagtgtggatgctgcagtgagcagaaca
